United States Patent Application Publication US 2009/0181380 A1 - sequence listing, part 6

SEQ ID NO: 10649 - DNA, 1383 bp, Homo sapiens
tcagcgcggcgcagtagcggctgtgactagcgggccggcccgggccaggacagcgggcggcgggcggcgcgggcctggccccgggatggctatgttccgcagcctggtggcctcggctcagcagcggcagccgccggccgggccggcgggcggcgacagcggcctggaggcgcagtacacctgccccatctgcctggaggtctatcaccggcccgtggccatcggcagctgcggccacacgttctgcggggagtgtctccagccctgcctgcaggtgccatccccgctgtgcccactctgccgcctgcccttcgaccccaagaaggtggacaaggccacccacgtggagaagcagctctcatcctacaaagcgccctgtcgaggctgcaacaaaaaggtgaccctggcaaagatgagagtgcacatttcgtcctgcctgaaggtccaggagcagatggccaactgccccaagttcgtccccgtggtgcccacatcacagcctatccccagcaacatccccaacaggtccaccttcgcctgcccgtactgtggtgcccgcaacctggaccagcaggagctggtgaagcactgtgtggaaagccaccgcagcgaccccaaccgcgtggtgtgccccatctgctcggcaatgccctggggggaccccagctacaagagcgccaacttcctgcagcacctgcttcaccgacacaagttctcctacgacacctttgtggactacagtattgacgaggaggccgccttccaggctgctctggccctgtctctctctgagaactgaagggaagcgcagccacccgcctgcgtctggggtcagggatgtccccgctcctgtgtcgcacctggcacctgctcgggagcgcacctcaccggactgagctcacaggaggagcctgcacccgcgcagaaggggagccggggccgagcctccgggcctgaatacgggccagccgccgaggccgccagagcagggccgcctggtcccaccggcgtcgctgggttcttcggtgcttctggccgagcaggcggcctacttgggcagggctggacgctgggacctggagctgccgccgtctcttcaaagccatgataccccctcgtgggaagaagggaccgacgcgcgagtcgcgctccgcagtcgagccgggaggaacccaggctgctgccctgcccagcccgaccctgccccggccccacttccaccttgcgcatttggtactggcttttgtgatacttaggaaccctggcatcttttctatattatccagtgtgataatcttttcacgttttatagagcaaagacagagcagttactcttcatattgcaatatctgtgtttgactaggaataatagtatttttatgg

SEQ ID NO: 10650 - protein, 237 aa, Homo sapiens; identical to SEQ ID NO: 1718

SEQ ID NO: 10651 - DNA, 1741 bp, Homo sapiens
ctccgacgtcatcggggcgcgccctcgcgctgtcgccgccacagtctgcgacgggacccggcgtgcccatgtgtcaggtgggcgaggactacggggagccggcgcctgaggagccgcccccggcgccgcggcccagccgtgagcagaagtgtgtgaagtgcaaggaagcgcagcccgttgtggtgatacgagccggagatgccttctgcagggactgtttcaaggccttctacgtccacaagttcagagccatgctgggcaagaaccggctcatctttccaggcgagaaggtgctcttggcgtggtctggggggccttcgtccagctccatggtctggcaggttcttgagggcctgagccaagattctgccaaaagactgcgctttgtggcaggagtcatctttgttgacgagggagcagcctgtggccagagcctagaggagagatcaaagaccctggccgaagtgaagcccattctgcaagcaactgggttcccatggcatgtggtggccttagaggaggtgttcagcctgccaccgtcggtgctttggtgctctgcccaggagctggtgggatccgagggggcctacaaggcggccgtggacagcttcctccagcagcagcatgtgctgggggccgggggtggtcctggcccgactcaaggggaggaacagccaccccagcccccgctggacccccagaacctggcaagaccgcctgcccctgcccagactgaggctctttcccaactgttctgctcagtgaggacactgactgccaaggaggagcttctgcagaccctgcggacccacctgatcctccacatggcccgagcccacggctactccaaggtcatgactggggacagctgcacacgcttggctatcaagctcatgaccaacctggcgctgggtcgaggggccttcctggcctgggatacgggcttctcggatgagcggcacggggacgtggtggtggtgcggcccatgcgggaccacaccctgaaggaggtcgctttctacaaccgcctgttctccgttccttctgtcttcacaccagccgtcgacaccaaggcccctgaaaaggccagcatccaccggctgatggaggccttcatcctcaggctgcagacccagttcccctccactgtcagcactgtgtacaggacaagtgagaagctggtgaagggcccccgggatggccctgctgctggcgactccggcccccgctgcctcctctgcatgtgtgccctggacgtcgacgccgctgacagtgccacggcttttggggctcagacctcctcgcgtctctcccagatgcagtcacccatccccctgactgagacccggacacccccggggccctgctgttctccaggggtgggctgggcccagcgctgtggccagggggcctgcaggagggaggacccccaagcctgcattgaggagcagctgtgctacagctgccgcgtgaacatgaaggacttgccctcactggaccccctgccgccgtacatcctggctgaggcccagctccgcacacagagggcctggggcttgcaggagatccgggactgtctgattgaggacagtgacgacgaggcgggccagagctgagcgtgaggacgtgcttgccgggacagcaggcagtggccacctggtacaccacactggagccggaaggcaaggacgggggactggcctctgattgtccatttgtataaataaaacattttttaatt

SEQ ID NO: 10652 - protein, 515 aa, Homo sapiens; identical to SEQ ID NO: 1720

SEQ ID NO: 10653 - DNA, 2143 bp, Homo sapiens
ctccgacgtcatcggggcgcgccctcgcgctgtcgccgccacagtctgcgacgggacccggcgtgcccatgtgtcaggtgggcgaggactacggggagccggcgcctgaggagccgcccccggcgccgcggcccagccgtgagcagaagtgtgtgaagtgcaaggaagcgcagcccgttgtggtgatacgagccggagatgccttctgcagggactgtttcaaggccttctacgtccacaagttcagagccatgctgggcaagaaccggctcatctttccaggcgagaaggtgctcttggcgtggtctggggggccttcgtccagctccatggtctggcaggttcttgagggcctgagccaagattctgccaaaagactgcgctttgtggcaggagtcatctttgttgacgagggagcagcctgtggccagagcctagaggagagatcaaagaccctggccgaagtgaagcccattctgcaagcaactgggttcccatggcatgtggtggccttagaggaggtgttcagcctgccaccgtcggtgctttggtgctctgcccaggagctggtgggatccgagggggcctacaaggcggccgtggacagcttcctccagcagcagcatgtgctgggggccgggggtggtcctggcccgactcaaggggaggaacagccaccccagcccccgctggacccccagaacctggcaagaccgcctgcccctgcccagactgaggctctttcccaactgttctgctcagtgaggacactgactgccaaggaggagcttctgcagaccctgcggacccacctgatcctccacatggcccgagcccacggctactccaaggtcatgactggggacagctgcacacgcttggctatcaagctcatgaccaacctggcgctgggtcgaggggccttcctggcctgggatacgggcttctcggatgagcggcacggggacgtggtggtggtgcggcccatgcgggaccacaccctgaaggaggtcgctttctacaaccgcctgttctccgttccttctgtcttcacaccagccgtcgacaccaaggcccctgaaaaggccagcatccaccggctgatggaggccttcatcctcaggctgcagacccagttcccctccactgtcagcactgtgtacaggacaagtgagaagctggtgaagggcccccgggatggccctgctgctggcgactccggcccccgctgcctcctctgcatgtgtgccctggacgtcgacgccgctgacagtgccacggcttttggggctcagacctcctcgcgtctctcccagatgcagtcacccatccccctgactgagacccggacacccccggggccctgctgttctccaggggtgggctgggcccagcgctgtggccagggggcctgcaggagggaggacccccaagcctgcattgaggagcagctgtgctacagctgccgcgtgaacatgaaggacttgccctcactggaccccctgccgccgtacatcctggctgaggcccagctccgcacacagagggcctggggcttgcaggagatccgggactgtctgattgaggacagtgacgacgaggcgggccagagctgagcgtgaggacgtgcttgccgggacagcaggcagtggccacctggtacaccacactggagccggaaggcaaggacgggggactggcctctgattgtccatttgtataaataaaacattttttaattaaaaaaaaaactctacagtacacgtgggggacggcagcgccacgcaggccgtggggacgcagtgtccttctctgacagcagcatcagggctcaggcaggccgggaggatgcatcacagctggcggccttggacggggcagtggctcccccggcctgaggagtgccgccccttgtggccacgctgcccagcaggccggctccttccctctcgggcgccagcagcagctcctactccttctcacgagtccacttgatcatggtctccggtgagcggtagaggaagatgagcttggcgtacaactcctcctccagctccagctcccgagtctcccgcaccaggaagatgtcctggcagagcttgaggatgcggtccacgcacggcagctcctcgaacataatgga

SEQ ID NO: 10654 - protein, 515 aa, Homo sapiens; identical to SEQ ID NO: 1720

SEQ ID NO: 10655 - DNA, 937 bp, Homo sapiens
gacgggacccggcgtgcccatgtgtcaggtgggcgaggactacggggagccggcgcctgaggagccgcccccggcgccgcggcccagccgtgagcagaagtgtgtgaagtgcaaggaagcgcagcccgttgtggtgatacgagccggagatgccttctgcagggactgtttcaaggccttctacgtccacaagttcagagccatgctgggcaagaaccggctcatctttccaggcgagaaggtgctcttggcgtggtctggggggccttcgtccagctccatggtctggcaggttcttgagggcctgagccaagattctgccaaaagactgcgctttgtggcaggagtcatctttgttgacggtatgtggggccattgctcctcctagtccctggccacttggggtaagccctgcggatcctccctctggtgtggaccctccctctggtgccggtcctccctctggtaggatgtgttgagctactggtgctgcccctgcactgagggcctggtggggacatctccctgaaggaggcagcagatgtatccatcgttaggtggcatcactgttcctggaatctaagaacatccttagaaagtcgggggtgggagcaggagtggcggctgcccagcccccatcacggggtctggggacaaagaagggcaagttaagtgctgatggtgagcgggggcccaggggccgactccccgacccttgctcctgcagaacgaactcctggggtgttgactgtagcgctgaggtcagccgcaagagagaaacccctgcccaaaggaaaatggccgacaccccacagctccgccaggaagcaccgccctgcggagcgaggcctcgaagggttttcccaggtggaggtggccctgcagcctgccctgcctggctcctctctgagccctgactctttctgcctgggttttt

SEQ ID NO: 10656 - protein, 122 aa, Homo sapiens
MCQVGEDYGEPAPEEPPPAPRPSREQKCVKCKEAQPVVVIRAGDAFCRDCFKAFYVHKFRAMLGKNRLIFPGEKVLLAWSGGPSSSSMVWQVLEGLSQDSAKRLRFVAGVIFVDGMWGHCSS

SEQ ID NO: 10657 - DNA, 1905 bp, Homo sapiens
gacgggacccggcgtgcccatgtgtcaggtgggcgaggactacggggagccggcgcctgaggagccgcccccggcgccgcggcccagccgtgagcagaagtgtgtgaagtgcaaggaagcgcagcccgttgtggtgatacgagccggagatgccttctgcagggactgtttcaaggccttctacgtccacaagttcagagccatgctgggcaagaaccggctcatctttccaggcgagaaggtgctcttggcgtggtctggggggccttcgtccagctccatggtctggcaggttcttgagggcctgagccaagattctgccaaaagactgcgctttgtggcaggagtcatctttgttgacgaacgaactcctggggtgttgactgtagcgctgaggtcagccgcaagagagaaacccctgcccaaaggaaaatggccgacaccccacagctccgccaggaagcaccgccctgcggagcgaggcctcgaagggttttcccaggtggaggtggccctgcagcctgccctgcctggctcctctctgagccctgactctttctgcctgggtttttcagagggagcagcctgtggccagagcctagaggagagatcaaagaccctggccgaagtgaagcccattctgcaagcaactgggttcccatggcatgtggtggccttagaggaggtgttcagcctgccaccgtcggtgctttggtgctctgcccaggagctggtgggatccgagggggcctacaaggcggccgtggacagcttcctccagcagcagcatgtgctgggggccgggggtggtcctggcccgactcaaggggaggaacagccaccccagcccccgctggacccccagaacctggcaagaccgcctgcccctgcccagactgaggctctttcccaactgttctgctcagtgaggacactgactgccaaggaggagcttctgcagaccctgcggacccacctgatcctccacatggcccgagcccacggctactccaaggtcatgactggggacagctgcacacgcttggctatcaagctcatgaccaacctggcgctgggtcgaggggccttcctggcctgggatacgggcttctcggatgagcggcacggggacgtggtggtggtgcggcccatgcgggaccacaccctgaaggaggtcgctttctacaaccgcctgttctccgttccttctgtcttcacaccagccgtcgacaccaaggcccctgaaaaggccagcatccaccggctgatggaggccttcatcctcaggctgcagacccagttcccctccactgtcagcactgtgtacaggacaagtgagaagctggtgaagggcccccgggatggccctgctgctggcgactccggcccccgctgcctcctctgcatgtgtgccctggacgtcgacgccgctgacagtgccacggcttttggggctcagacctcctcgcgtctctcccagatgcagtcacccatccccctgactgagacccggacacccccggggccctgctgttctccaggggtgggctgggcccagcgctgtggccagggggcctgcaggagggaggacccccaagcctgcattgaggagcagctgtgctacagctgccgcgtgaacatgaaggacttgccctcactggaccccctgccgccgtacatcctggctgaggcccagctccgcacacagagggcctggggcttgcaggagatccgggactgtctgattgaggacagtgacgacgaggcgggccagagctgagcgtgaggacgtgcttgccgggacagcaggcagtggccacctggtacaccacactggagccggaaggcaaggacgggggactggcctctgattgtccatttgtataaataaaacattttttaatt

SEQ ID NO: 10658 - protein, 586 aa, Homo sapiens
MCQVGEDYGEPAPEEPPPAPRPSREQKCVKCKEAQPVVVIRAGDAFCRDCFKAFYVHKFRAMLGKNRLIFPGEKVLLAWSGGPSSSSMVWQVLEGLSQDSAKRLRFVAGVIFVDERTPGVLTVALRSAAREKPLPKGKWPTPHSSARKHRPAERGLEGFSQVEVALQPALPGSSLSPDSFCLGFSEGAACGQSLEERSKTLAEVKPILQATGFPWHVVALEEVFSLPPSVLWCSAQELVGSEGAYKAAVDSFLQQQHVLGAGGGPGPTQGEEQPPQPPLDPQNLARPPAPAQTEALSQLFCSVRTLTAKEELLQTLRTHLILHMARAHGYSKVMTGDSCTRLAIKLMTNLALGRGAFLAWDTGFSDERHGDVVVVRPMRDHTLKEVAFYNRLFSVPSVFTPAVDTKAPEKASIHRLMEAFILRLQTQFPSTVSTVYRTSEKLVKGPRDGPAAGDSGPRCLLCMCALDVDAADSATAFGAQTSSRLSQMQSPIPLTETRTPPGPCCSPGVGWAQRCGQGACRREDPQACIEEQLCYSCRVNMKDLPSLDPLPPYILAEAQLRTQRAWGLQEIRDCLIEDSDDEAGQS

SEQ ID NO: 10659 - DNA, 813 bp, Homo sapiens
ctacggggagccggcgcctgaggagccgcccccggcgccgcggcccagccgtgagcagaagtgtgtgaagtgcaaggaagcgcagcccgttgtggtgatacgagccggagatgccttctgcagggactgtttcaaggccttctacgtccacaagttcagagccatgctgggcaagaaccggctcatctttccaggcgagaaggtgctcttggcgtggtctggggggccttcgtccagctccatggtctggcaggttcttgaggtgcgtgttcaccaccccgtgggcccgggctgctgggctgagcttcaggctgggggcctcccttctcagcctgctgaggggctcttggttggggctagagagcagtccaccctgcggcctggacacttggggggttctcagatgtgttcacaacaggtgcaccaatcaggagctgagtccacagtgtgtgtgtgcggcccactctcagatgtgtttacagcaggtgcacaaatcagaagctgggtccacagcgcgtgtgtgcggcccactctcagatgtgtttacagcaggtgcacaaatcagaagctgggtccacagtgcgtgtgtgcggcccactctcagatgtgtttacagcaggtgcaccaatcagaagctgggtccagagtgcgtgtgtgcggcccacttgacttctgtccatttgctcaacctgcgtagaaacacagtcagtggaaagctgcatcttggctcagccatgtgtgacccgagggaagattgggaaaggggcgggggtttgccaggagaagcaaagggagcagcgtttgaggtggagg

SEQ ID NO: 10660 - protein, 233 aa, Homo sapiens
MPSAGTVSRPSTSTSSEPCWARTGSSFQARRCSWRGLGGLRPAPWSGRFLRCVFTTPWARAAGLSFRLGASLLSLLRGSWLGLESSPPCGLDTWGVLRCVHNRCTNQELSPQCVCAAHSQMCLQQVHKSEAGSTARVCGPLSDVFTAGAQIRSWVHSACVRPTLRCVYSRCTNQKLGPECVCAAHLTSVHLLNLRRNTVSGKLHLGSAMCDPREDWERGGGLPGEAKGAAFEV

SEQ ID NO: 10661 - DNA, 1300 bp, Homo sapiens
caccccttcggccacctttactggagagtagcctctcgcgtatcagtcctgcggcctcggatggtggtggggtctgtgacctcccctacctggcaggggaggaggggcaagcacattcgggccttgacctggaccacacagcccctgcctcccgcagggcttctcggatgagcggcacggggacgtggtggtggtgcggcccatgcgggaccacaccctgaaggaggtcgctttctacaaccgcctgttctccgttccttctgtcttcacaccagccgtcgacaccaaggcccctgaaaaggccagcatccaccggctgatggaggccttcatcctcaggctgcagacccagttcccctccactgtcagcactgtgtacaggacaagtgagaagctggtgaagggcccccgggatggccctgctgctggcgactccggcccccgctgcctcctctgcatgtgtgccctggacgtcgacgccgctgacagtgccacggcttttggggctcagacctcctcgcgtctctcccagatgcagtcacccatccccctgactgagacccggacacccccggggccctgctgttctccaggggtgggctgggcccagcgctgtggccagggggcctgcaggagggaggacccccaagcctgcattgaggagcagctgtgctacagctgccgcgtgaacatgaaggacttgggcctggggcttgcaggagatccgggactgtctgattgaggacagtgacgacgaggcgggccagagctgagcgtgaggacgtgcttgccgggacagcaggcagtggccacctggtacaccacactggagccggaaggcaaggacgggggactggcctctgattgtccatttgtataaataaaacattttttaattaaaaaaaaaactctacagtacacgtgggggacggcagcgccacgcaggccgtggggacgcagtgtccttctctgacagcagcatcagggctcaggcaggccgggaggatgcatcacagctggcggccttggacggggcagtggctcccccggcctgaggagtgccgccccttgtggccacgctgcccagcaggccggctccttccctctcgggcgccagcagcagctcctactccttctcacgagtccacttgatcatggtctccggtgagcggtagaggaagatgagcttggcgtacaactcctcctccagctccagctcccgagtctcccgcaccaggaagatgtcctggcagagcttgaggatgcggtccacgcacggcagctcctcgaacataatgga

SEQ ID NO: 10662 - protein, 179 aa, Homo sapiens
MRDHTLKEVAFYNRLFSVPSVFTPAVDTKAPEKASIHRLMEAFILRLQTQFPSTVSTVYRTSEKLVKGPRDGPAAGDSGPRCLLCMCALDVDAADSATAFGAQTSSRLSQMQSPIPLTETRTPPGPCCSPGVGWAQRCGQGACRREDPQACIEEQLCYSCRVNMKDLGLGLAGDPGLSD

SEQ ID NO: 10663 - DNA, 875 bp, Homo sapiens
gacagtgccacggcttttggggctcagacctcctcgcgtctctcccagatgcagtcacccatccccctgactgagacccggacacccccggggccctgctgttctccaggggtgggctgggcccagcgctgtggccagggggcctgcaggagggaggacccccaagcctgcattgaggagcagctgtgctacagctgccgcgtgaacatgaaggacttgccctcactggaccccctgccgccgtacatcctggctgaggcccagctccgcacacagagggcctggggcttgcaggagatccgggactgtctgattgaggacagtgacgacgaggcgggccagagctgagcgtgaggacgtgcttgccgggacagcaggcagtggccacctggtacaccacactggagccggaaggcaaggacgggggactggcctctgattgtccatttgtataaataaaacattttttaattaaaaaaaaaactctacagtacacgtgggggacggcagcgccacgcaggccgtggggacgcagtgtccttctctgacagcagcatcagggctcaggcaggccgggaggatgcatcacagctggcggccttggacggggcagtggctcccccggcctgaggagtgccgccccttgtggccacgctgcccagcaggccggctccttccctctcgggcgccagcagcagctcctactccttctcacgagtccacttgatcatggtctccggtgagcggtagaggaagatgagcttggcgtacaactcctcctccagctccagctcccgagtctcccgcaccaggaagatgtcctggcagagcttgaggatgcggtccacgcacggcagctcctcgaacataatgga

SEQ ID NO: 10664 - protein, 99 aa, Homo sapiens [sequence omitted]

SEQ ID NO: 10665 - DNA, 719 bp, Homo sapiens
cgtgggtggcttgagggggtgctggcaggtttcttggcccctcgacaccggcctctgttgcagccctcactggaccccctgccgccgtacatcctggctgaggcccagctccgcacacagagggcctggggcttgcaggagatccgggactgtctgattgaggacagtgacgacgaggcgggccagagctgagcgtgaggacgtgcttgccgggacagcaggcagtggccacctggtacaccacactggagccggaaggcaaggacgggggactggcctctgattgtccatttgtataaataaaacattttttaattaaaaaaaaaactctacagtacacgtgggggacggcagcgccacgcaggccgtggggacgcagtgtccttctctgacagcagcatcagggctcaggcaggccgggaggatgcatcacagctggcggccttggacggggcagtggctcccccggcctgaggagtgccgccccttgtggccacgctgcccagcaggccggctccttccctctcgggcgccagcagcagctcctactccttctcacgagtccacttgatcatggtctccggtgagcggtagaggaagatgagcttggcgtacaactcctcctccagctccagctcccgagtctcccgcaccaggaagatgtcctggcagagcttgaggatgcggtccacgcacggcagctcctcgaacataatgga

SEQ ID NO: 10666 - protein, 48 aa, Homo sapiens
MHHSWRPWTGQWLPRPEECRPLWPRCPAGRLLPSRAPAAAPTPSHEST

SEQ ID NO: 10667 - DNA, 1140 bp, Homo sapiens
gccctgtgaaagctggtgtggggaggcggctgcagtcactgagggtgtcacttgtacccagctggccatgcagttcatcagccagtacagccctgaggacatcgtcacggcgcagattgagggcagctccggggcgctgtggcgcatcagtccccccagccgtgcccagatgaagcgggagctctacaacggcacggccgacatcaccctgcgcttcacctggaacttccagagggacctggcgaagggaggcactgtggagtatgccaacgagaagcacatgctggccctggcccccaacagcactgcacggcggcagctggccagcctgctcgagggcacctcggaccagtctgtggtcatccctaatctcttccccaagtacatccgtgcccccaacgggcccgaagccaaccctgtgaagcagctgcagcccaatgaggaggccgactacctcggcgtgcgtatccagctgcggagggagcagggtgcgggggccaccggcttcctcgaatggtgggtcatcgagctgcaggagtgccggaccgactgcaacctgctgcccatggtcattttcagtgacaaggtcagcccaccgagcctcggcttcctggctggctacggcatcatggggctgtacgtgtccatcgtgctggtcatcggcaagttcgtgcgcggattcttcagcgagatctcgcactccattatgttcgaggagctgccgtgcgtggaccgcatcctcaagctctgccaggacatcttcctggtgcgggagactcgggagctggagctggaggaggagttgtacgccaagctcatcttcctctaccgctcaccggagaccatgatcaagtggactcgtgagaaggagtaggagctgctgctggcgcccgagagggaaggagccggcctgctgggcagcgtggccacaaggggcggcactcctcaggccgggggagccactgccccgtccaaggccgccagctgtgatgcatcctcccggcctgcctgagccctgatgctgctgtcagagaaggacactgcgtccccacggcctgcgtggcgctgccgtcccccacgtgtactgtagagttttttttttaattaaaaaatgttttatttatacaaatggacaatcag

SEQ ID NO: 10668 - protein, 268 aa, Homo sapiens [sequence omitted]

SEQ ID NO: 10669 - DNA, 2891 bp, Homo sapiens
gtgagaccctgtctctaaaaaagtaaaaagaagaaacccagtgcccattggctgtcactcggtttcccctcccctggcccctagtaaccccttgtctaggtcctggttctatgagatttgcctacagtggatatttcatgaaaacaggctcagacagcgtttgtccttttgtaatcagctttccttgctcagcatggtgtctctgaggtccacccacgtggcagtatggccttcctgtttatgggcaaatgatattctgtggcatggatggaccacaacatgctcatctgttgatgggctgttgcccgtgatgctgccaggcacgccggtgtacacgtctgtgtgcccgtgcccctggtcctgtggctgcacgccagggccggaagtgctggtggtggtttccatcatgaggagctgctggttttccatagcagctccaccatctaaggttcccaccaccaacacgaggttgcggtttctccacatcctcaacaacctgttactatgtcttttttgttctggccatgctgctgaacgggtggcttgctgtgggctcttctcagttccctgttgaccgacgctgagcgtcttttcatgtgcttggccatttgtgtatcttctctggggaaatgtctattcaaatcctttctccatagtttagttgggcttttgagataggatctcaggctgaagtgcagtggcatgaccttcactcactgtagcctctgcctcccaggttcaagcgattctcccacctcagcctcccgagtagctgggactacaggtgtgcaccaccaggcctggctagtcttttgtatttttggccaggttcgtctcaaactcctgacctcaaagtgctgggatgacaagtgtgagccgccacacccagcagttgggttgttttttattagagttttttctgtttttctgcagatacattggctagaaatgactgaattggaagaattctctgtattctctggttgctagaaccttatcaattaaaatttgcagaaaatttctccaattctatggactgtctcttaaattttcttggtgtctttggaagcacaaagtatttattttggtaatatctggtttactttgtttccttcgccaaatccaggttcatgaagatttgcccgttttcttctaaaagttctatagttttagctctgaagtttcgctctttgatccactttgaggtaaattttggcacatggtatgaggcaggagttgcgtttcattctcctgcctggggcggtgcctgcaccgtgttgaaaaaggttgtccgttcccactgaacggtcacagctcccttgtctaagatcaacgacccctgaacatgagggttccaactggactcttagttctactccactggcctgtgtctgcccaccattactaccgctgtgccatactgaggtcaggctggggcttttctgggctgctgggtgagctggagaatgcggttgtgtgacccgcaggaagggcagagctgagcgtatgacctgtgtcgttcccctccagaaatacccgcagcccaaagggcagaagaagaagaagatcgtcaagtacggcatgggtggcctcatcatcctcttcctcatcgccatcatctggttcccactgctcttcatgtcgctggtgcgctccgtggttggggttgtcaaccagcccatcgatgtcaccgtcaccctgaagctgggcggctatgagccgctgttcaccatgagcgcccagcagccgtccatcatccccttcacggcccaggcctatgaggagctgtcccggcagtttgacccccagccgctggccatgcagttcatcagccagtacagccctgaggacatcgtcacggcgcagattgagggcagctccggggcgctgtggcgcatcagtccccccagccgtgcccagatgaagcgggagctctacaacggcacggccgacatcaccctgcgcttcacctggaacttccagagggacctggcgaagggaggcactgtggagtatgccaacgagaagcacatgctggccctggcccccaacagcactgcacggcggcagctggccagcctgctcgagggcacctcggaccagtctgtggtcatccctaatctcttccccaagtacatccgtgcccccaacgggcccgaagccaaccctgtgaagcagctgcagcccaatgaggaggccgactacctcggcgtgcgtatccagctgcggagggagcagggtgcgggggccaccggcttcctcgaatggtgggtcatcgagctgcaggagtgccggaccgactgcaacctgctgcccatggtcattttcagtgacaaggtcagcccaccgagcctcggcttcctggctggctacggcatcatggggctgtacgtgtccatcgtgctggtcatcggcaagttcgtgcgcggattcttcagcgagatctcgcactccattatgttcgaggagctgccgtgcgtggaccgcatcctcaagctctgccaggacatcttcctggtgcgggagactcgggagctggagctggaggaggagttgtacgccaagctcatcttcctctaccgctcaccggagaccatgatcaagtggactcgtgagaaggagtaggagctgctgctggcgcccgagagggaaggagccggcctgctgggcagcgtggccacaaggggcggcactcctcaggccgggggagccactgccccgtccaaggccgccagctgtgatgcatcctcccggcctgcctgagccctgatgctgctgtcagagaaggacactgcgtccccacggcctgcgtggcgctgccgtcccccacgtgtactgtagagttttttttttaattaaaaaatgttttatttatacaaatggacaatcag

SEQ ID NO: 10670 - protein, 372 aa, Homo sapiens [sequence omitted]

SEQ ID NO: 10671 - DNA, 6379 bp, Homo sapiens
ccatggacctgcgccctgagctgcccaccaccctgggccccgtcagcctgcgccagctggggctggagcacacccgctacccctgtctggaccttggtgccatgttgctctacaccctgaccttctggctcctgctgcgccagtttgtgaaagagaagctgctgaagtgggcagagtctccagctgcgctgacggaggtcaccgtggcagacacagagcccacgcggacgcagacgctgttgcagagcctgggggagctggtgaagggcgtgtacgccaagtactggatctatgtgtgtgctggcatgttcatcgtggtcagcttcgccggccgcctcgtggtctacaagattgtctacatgttcctcttcctgctctgcctcaccctcttccaggtctactacagcctgtggcggaagctgctcaaggccttctggtggctcgtggtggcctacaccatgctggtcctcatcgccgtctacaccttccagttccaggacttccctgcctactggcgcaacctcactggcttcaccgacgagcagctgggggacctgggcctggagcagttcagcgtgtccgagctcttctccagcatcctggtgcccggcttcttcctcctggcctgcatcctgcagctgcactacttccacaggcccttcatgcagctcaccgacatggagcacgtgtccctgcctggcacgcgcctcccgcgctgggctcacaggcaggatgcagtgagtgggaccccactgctgcgggaggagcagcaggagcatcagcagcagcagcaggaggaggaggaggaggaggaggactccagggacgaggggctgggcgtggccactccccaccaggccacgcaggtgcctgaaggggcagccaagtggggcctggtggctgagcggctgctggagctggcagccggcttctcggacgtcctctcacgcgtgcaggtgttcctgcggcggctgctggagcttcacgttttcaagctggtggccctgtacaccgtctgggtggccctgaaggaggtgtcggtgatgaacctgctgctggtggtgctgtgggccttcgccctgccctacccacgcttccggcccatggcctcctgcctgtccaccgtgtggacctgcgtcatcatcgtgtgtaagatgctgtaccagctcaaggttgtcaacccccaggagtattccagcaactgcaccgagcccttccccaacagcaccaacttgctgcccacggagatcagccagtccctgctgtaccgggggcccgtggaccctgccaactggtttggggtgcggaaagggttccccaacctgggctacatccagaaccacctgcaagtgctgctgctgctggtattcgaggccatcgtgtaccggcgccaggagcactaccgccggcagcaccagctggccccgctgcctgcccaggccgtgtttgccagcggcacccgccagcagctggaccaggatctgctcggctgcctcaagtacttcatcaacttcttcttctacaaattcgggctggagatctgcttcctgatggccgtgaacgtgatcgggcagcgcatgaactttctggtgaccctgcacggttgctggctggtggccatcctcacccgcaggcaccgccaggccattgcccgcctctggcccaactactgcctcttcctggcgctgttcctgctgtaccagtacctgctgtgcctggggatgcccccggccctgtgcattgattatccctggcgctggagccgggccgtccccatgaactccgcactcatcaagtggctgtacctgcctgatttcttccgggcccccaactccaccaacctcatcagcgactttctcctgctgctgtgcgcctcccagcagtggcaggtgttctcagctgagcgcacagaggagtggcagcgcatggctggcgtcaacaccgaccgcctggagccgctgcggggggagcccaaccccgtgcccaactttatccactgcaggtcctaccttgacatgctgaaggtggccgtcttccgatacctgttctggctggtgctggtggtggtgtttgtcacgggggccacccgcatcagcatcttcgggctgggctacctgctggcctgcttctacctgctgctcttcggcacggccctgctgcagagggacacacgggcccgcctcgtgctgtgggactgcctcattctgtacaacgtcaccgtcatcatctccaagaacatgctgtcgctcctggcctgcgtcttcgtggagcagatgcagaccggcttctgctgggtcatccagctcttcagccttgtatgcaccgtcaagggctactatgaccccaaggagatgatggacagagaccaggactgcctgctgcctgtggaggaggctggcatcatctgggacagcgtctgcttcttcttcctgctgctgcagcgccgcgtcttccttagccattactacctgcacgtcagggccgacctccaggccaccgccctgctagcctccaggggcttcgccctctacaacgctgccaacctcaagagcattgactttcaccgcaggatagaggagaagtccctggcccagctgaaaagacagatggagcgtatccgtgccaagcaggagaagcacaggcagggccgggtggaccgcagtcgcccccaggacaccctgggccccaaggaccccggcctggagccagggcccgacagtccagggggctcctccccgccacggaggcagtggtggcggccctggctggaccacgccacagtcatccactccggggactacttcctgtttgagtccgacagtgaggaagaggaggaggctgttcctgaagacccgaggccgtcggcacagagtgccttccagctggcgtaccaggcatgggtgaccaacgcccaggcggtgctgaggcggcggcagcaggagcaggagcaggcaaggcaggaacaggcaggacagctacccacaggaggtggtcccagccaggaggtggagccagcagagggccccgaggaggcagcggcaggccggagccatgtggtgcagagggtgctgagcacggcgcagttcctgtggatgctggggcaggcgctagtggatgagctgacacgctggctgcaggagttcacccggcaccacggcaccatgagcgacgtgctgcgggcagagcgctacctcctcacacaggagctcctgcagggcggcgaagtgcacaggggcgtgctggatcagctgtacacaagccaggccgaggccacgctgccaggccccaccgaggcccccaatgccccaagcaccgtgtccagtgggctgggcgcggaggagccactcagcagcatgacagacgacatgggcagccccctgagcaccggctaccacacgcgcagtggcagtgaggaggcagtcaccgaccccggggagcgtgaggctggtgcctctctgtaccagggactgatgcggacggccagcgagctgctcctggacaggcgcctgcgcatcccagagctggaggaggcagagctgtttgcggaggggcagggccgggcgctgcggctgctgcgggccgtgtaccagtgtgtggccgcccactcggagctgctctgctacttcatcatcatcctcaaccacatggtcacggcctccgccggctcgctggtgctgcccgtgctcgtcttcctgtgggccatgctgtcgatcccgaggcccagcaagcgcttctggatgacggccatcgtcttcaccgagatcgcggtggtcgtcaagtacctgttccagtttgggttcttcccctggaacagccacgtggtgctgcggcgctacgagaacaagccctacttcccgccccgcatcctgggcctggagaagactgacggctacatcaagtacgacctggtgcagctcatggcccttttcttccaccgctcccagctgctgtgctatggcctctgggaccatgaggaggactcaccatccaaggagcatgacaagagcggcgaggaggagcagggagccgaggaggggccaggggtgcctgcggccaccaccgaagaccacattcaggtggaagccagggtcggacccacggacgggaccccagaaccccaagtggagctcaggccccgtgatacgaggcgcatcagtctacgttttagaagaaggaagaaggagggcccagcacggaaaggagcggcagccatcgaagctgaggacagggaggaagaagagggggaggaagagaaagaggcccccacggggagagagaagaggccaagccgctctggaggaagagtaagggcggccgggcggcggctgcagggcttctgcctgtccctggcccagggcacatatcggccgctacggcgcttcttccacgacatcctgcacaccaagtaccgcgcagccaccgacgtctatgccctcatgttcctggctgatgttgtcgacttcatcatcatcatttttggcttctgggcctttgggaagcactcggcggccacagacatcacgtcctccctatcagacgaccaggtacccgaggctttcctggtcatgctgctgatccagttcagtaccatggtggttgaccgcgccctctacctgcgcaagaccgtgctgggcaagctggccttccaggtggcgctggtgctggccatccacctatggatgttcttcatcctgcccgccgtcactgagaggatgttcaaccagaatgtggtggcccagctctggtacttcgtgaagtgcatctacttcgccctgtccgcctaccagatccgctgcggctaccccacccgcatcctcggcaacttcctcaccaagaagtacaatcatctcaacctcttcctcttccaggggttccggctggtgccgttcctggtggagctgcgggcagtgatggactgggtgtggacggacaccacgctgtccctgtccagctggatgtgtgtggaggacatctatgccaacatcttcatcatcaaatgcagccgagagacagagaagaaatacccgcagcccaaagggcagaagaagaagaagatcgtcaagtacggcatgggtggcctcatcatcctcttcctcatcgccatcatctggttcccactgctcttcatgtcgctggtgcgctccgtggttggggttgtcaaccagcccatcgatgtcaccgtcaccctgaagctgggcggctatgagccgctgttcaccatgagcgcccagcagccgtccatcatccccttcacggcccaggcctatgaggagctgtcccggcagtttgacccccagccgctggccatgcagttcatcagccagtacagccctgaggacatcgtcacggcgcagattgagggcagctccggggcgctgtggcgcatcagtccccccagccgtgcccagatgaagcgggagctctacaacggcacggccgacatcaccctgcgcttcacctggaacttccagagggacctggcgaagggaggcactgtggagtatgccaacgagaagcacatgctggccctggcccccaacagcactgcacggcggcagctggccagcctgctcgagggcacctcggaccagtctgtggtcatccctaatctcttccccaagtacatccgtgcccccaacgggcccgaagccaaccctgtgaagcagctgcagcccaatgaggaggccgactacctcggcgtgcgtatccagctgcggagggagcagggtgcgggggccaccggcttcctcgaatggtgggtcatcgagctgcaggagtgccggaccgactgcaacctgctgcccatggtcattttcagtgacaaggtcagcccaccgagcctcggcttcctggctggctacggcatcatggggctgtacgtgtccatcgtgctggtcatcggcaagttcgtgcgcggattcttcagcgagatctcgcactccattatgttcgaggagctgccgtgcgtggaccgcatcctcaagctctgccaggacatcttcctggtgcgggagactcgggagctggagctggaggaggagttgtacgccaagctcatcttcctctaccgctcaccggagaccatgatcaagtggactcgtgagaaggagtaggagctgctgctggcgcccgagagggaaggagccggcctgctgggcagcgtggccacaaggggcggcactcctcaggccgggggagccactgccccgtccaaggccgccagctgtgatgcatcctcccggcctgcctgagccctgatgctgctgtcagagaaggacactgcgtccccacggcctgcgtggcgctgccgtcccccacgtgtactgtagagttttttttttaattaaaaaatgttttatttatacaaatggacaatcag

SEQ ID NO: 10672 - protein, 2036 aa, Homo sapiens
MDLRPELPTTLGPVSLRQLGLEHTRYPCLDLGAMLLYTLTFWLLLRQFVKEKLLKWAESPAALTEVTVADTEPTRTQTLLQSLGELVKGVYAKYWIYVCAGMFIVVSFAGRLVVYKIVYMFLFLLCLTLFQVYYSLWRKLLKAFWWLVVAYTMLVLIAVYTFQFQDFPAYWRNLTGFTDEQLGDLGLEQFSVSELFSSILVPGFFLLACILQLHYFHRPFMQLTDMEHVSLPGTRLPRWAHRQDAVSGTPLLREEQQEHQQQQQEEEEEEEDSRDEGLGVATPHQATQVPEGAAKWGLVAERLLELAAGFSDVLSRVQVFLRRLLELHVFKLVALYTVWVALKEVSVMNLLLVVLWAFALPYPRFRPMASCLSTVWTCVIIVCKMLYQLKVVNPQEYSSNCTEPFPNSTNLLPTEISQSLLYRGPVDPANWFGVRKGFPNLGYIQNHLQVLLLLVFEAIVYRRQEHYRRQHQLAPLPAQAVFASGTRQQLDQDLLGCLKYFINFFFYKFGLEICFLMAVNVIGQRMNFLVTLHGCWLVAILTRRHRQAIARLWPNYCLFLALFLLYQYLLCLGMPPALCIDYPWRWSRAVPMNSALIKWLYLPDFFRAPNSTNLISDFLLLLCASQQWQVFSAERTEEWQRMAGVNTDRLEPLRGEPNPVPNFIHCRSYLDMLKVAVFRYLFWLVLVVVFVTGATRISIFGLGYLLACFYLLLFGTALLQRDTRARLVLWDCLILYNVTVIISKNMLSLLACVFVEQMQTGFCWVIQLFSLVCTVKGYYDPKEMMDRDQDCLLPVEEAGIIWDSVCFFFLLLQRRVFLSHYYLHVRADLQATALLASRGFALYNAANLKSIDFHRRIEEKSLAQLKRQMERIRAKQEKHRQGRVDRSRPQDTLGPKDPGLEPGPDSPGGSSPPRRQWWRPWLDHATVIHSGDYFLFESDSEEEEEAVPEDPRPSAQSAFQLAYQAWVTNAQAVLRRRQQEQEQARQEQAGQLPTGGGPSQEVEPAEGPEEAAAGRSHVVQRVLSTAQFLWMLGQALVDELTRWLQEFTRHHGTMSDVLRAERYLLTQELLQGGEVHRGVLDQLYTSQAEATLPGPTEAPNAPSTVSSGLGAEEPLSSMTDDMGSPLSTGYHTRSGSEEAVTDPGEREAGASLYQGLMRTASELLLDRRLRIPELEEAELFAEGQGRALRLLRAVYQCVAAHSELLCYFIIILNHMVTASAGSLVLPVLVFLWAMLSIPRPSKRFWMTAIVFTEIAVVVKYLFQFGFFPWNSHVVLRRYENKPYFPPRILGLEKTDGYIKYDLVQLMALFFHRSQLLCYGLWDHEEDSPSKEHDKSGEEEQGAEEGPGVPAATTEDHIQVEARVGPTDGTPEPQVELRPRDTRRISLRFRRRKKEGPARKGAAAIEAEDREEEEGEEEKEAPTGREKRPSRSGGRVRAAGRRLQGFCLSLAQGTYRPLRRFFHDILHTKYRAATDVYALMFLADVVDFIIIIFGFWAFGKHSAATDITSSLSDDQVPEAFLVMLLIQFSTMVVDRALYLRKTVLGKLAFQVALVLAIHLWMFFILPAVTERMFNQNVVAQLWYFVKCIYFALSAYQIRCGYPTRILGNFLTKKYNHLNLFLFQGFRLVPFLVELRAVMDWVWTDTTLSLSSWMCVEDIYANIFIIKCSRETEKKYPQPKGQKKKKIVKYGMGGLIILFLIAIIWFPLLFMSLVRSVVGVVNQPIDVTVTLKLGGYEPLFTMSAQQPSIIPFTAQAYEELSRQFDPQPLAMQFISQYSPEDIVTAQIEGSSGALWRISPPSRAQMKRELYNGTADITLRFTWNFQRDLAKGGTVEYANEKHMLALAPNSTARRQLASLLEGTSDQSVVIPNLFPKYIRAPNGPEANPVKQLQPNEEADYLGVRIQLRREQGAGATGFLEWWVIELQECRTDCNLLPMVIFSDKVSPPSLGFLAGYGIMGLYVSIVLVIGKFVRGFFSEISHSIMFEELPCVDRILKLCQDIFLVRETRELELEEELYAKLIFLYRSPETMIKWTREKE

SEQ ID NO: 10673 - DNA, 795 bp, Homo sapiens
agcagctgcagcccagtgagtatgggcgtgggggttgggggaggctagagaggggtgacctgcggcctcaacgatcttctccctccatcccagatgaggaggccgactacctcggcgtgcgtatccagctgcggagggagcagggtgcgggggccaccggcttcctcgaatggtgggtcatcgagctgcaggagtgccggaccgactgcaacctgctgcccatggtcattttcagtgacaaggtcagcccaccgagcctcggcttcctggctggctacggcatcatggggctgtacgtgtccatcgtgctggtcatcggcaagttcgtgcgcggattcttcagcgagatctcgcactccattatgttcgaggagctgccgtgcgtggaccgcatcctcaagctctgccaggacatcttcctggtgcgggagactcgggagctggagctggaggaggagttgtacgccaagctcatcttcctctaccgctcaccggagaccatgatcaagtggactcgtgagaaggagtaggagctgctgctggcgcccgagagggaaggagccggcctgctgggcagcgtggccacaaggggcggcactcctcaggccgggggagccactgccccgtccaaggccgccagctgtgatgcatcctcccggcctgcctgagccctgatgctgctgtcagagaaggacactgcgtccccacggcctgcgtggcgctgccgtcccccacgtgtactgtagagttttttttttaattaaaaaatgttttatttatacaaatggacaatca

SEQ ID NO: 10674 - protein, 136 aa, Homo sapiens
MRRPTTSACVSSCGGSRVRGPPASSNGGSSSCRSAGPTATCCPWSFSVTRSAHRASASWLATASWGCTCPSCWSSASSCADSSARSRTPLCSRSCRAWTASSSSARTSSWCGRLGSWSWRRSCTPSSSSSTAHRRP

SEQ ID NO: 10675 - DNA, 663 bp, Homo sapiens
ggtcatccctaatctcttccccaagtacatccgtgcccccaacgggcccgaagccaaccctgtgaagcagctgcagcccaatgaggaggccgactacctcggctgacaaggtcagcccaccgagcctcggcttcctggctggctacggcatcatggggctgtacgtgtccatcgtgctggtcatcggcaagttcgtgcgcggattcttcagcgagatctcgcactccattatgttcgaggagctgccgtgcgtggaccgcatcctcaagctctgccaggacatcttcctggtgcgggagactcgggagctggagctggaggaggagttgtacgccaagctcatcttcctctaccgctcaccggagaccatgatcaagtggactcgtgagaaggagtaggagctgctgctggcgcccgagagggaaggagccggcctgctgggcagcgtggccacaaggggcggcactcctcaggccgggggagccactgccccgtccaaggccgccagctgtgatgcatcctcccggcctgcctgagccctgatgctgctgtcagagaaggacactgcgtccccacggcctgcgtggcgctgccgtcccccacgtgtactgtagagttttttttttaattaaaaaatgttttatttatacaaatggacaatca

SEQ ID NO: 10676 - protein, 105 aa, Homo sapiens [sequence omitted]

SEQ ID NO: 10677 - DNA, 2537 bp, Homo sapiens
ttctatgagatttgcctacagtggatatttcatgaaaacaggctcagacagcgtttgtccttttgtaatcagctttccttgctcagcatggtgtctctgaggtccacccacgtggcagtatggccttcctgtttatgggcaaatgatattctgtggcatggatggaccacaacatgctcatctgttgatgggctgttgcccgtgatgctgccaggcacgccggtgtacacgtctgtgtgcccgtgcccctggtcctgtggctgcacgccagggccggaagtgctggtggtggtttccatcatgaggagctgctggttttccatagcagctccaccatctaaggttcccaccaccaacacgaggttgcggtttctccacatcctcaacaacctgttactatgtcttttttgttctggccatgctgctgaacgggtggcttgctgtgggctcttctcagttccctgttgaccgacgctgagcgtcttttcatgtgcttggccatttgtgtatcttctctggggaaatgtctattcaaatcctttctccatagtttagttgggcttttgagataggatctcaggctgaagtgcagtggcatgaccttcactcactgtagcctctgcctcccaggttcaagcgattctcccacctcagcctcccgagtagctgggactacaggtgtgcaccaccaggcctggctagtcttttgtatttttggccaggttcgtctcaaactcctgacctcaaagtgctgggatgacaagtgtgagccgccacacccagcagttgggttgttttttattagagttttttctgtttttctgcagatacattggctagaaatgactgaattggaagaattctctgtattctctggttgctagaaccttatcaattaaaatttgcagaaaatttctccaattctatggactgtctcttaaattttcttggtgtctttggaagcacaaagtatttattttggtaatatctggtttactttgtttccttcgccaaatccaggttcatgaagatttgcccgttttcttctaaaagttctatagttttagctctgaagtttcgctctttgatccactttgaggtaaattttggcacatggtatgaggcaggagttgcgtttcattctcctgcctggggcggtgcctgcaccgtgttgaaaaaggttgtccgttcccactgaacggtcacagctcccttgtctaagatcaacgacccctgaacatgagggttccaactggactcttagttctactccactggcctgtgtctgcccaccattactaccgctgtgccatactgaggtcaggctggggcttttctgggctgctgggtgagctggagaatgcggttgtgtgacccgcaggaagggcagagctgagcgtatgacctgtgtcgttcccctccagaaatacccgcagcccaaagggcagaagaagaagaagatcgtcaagtacggcatgggtggcctcatcatcctcttcctcatcgccatcatctggttcccactgctcttcatgtcgctggtgcgctccgtggttggggttgtcaaccagcccatcgatgtcaccgtcaccctgaagctgggcggctatgaggtgagcatgtgtgggtccgcctgtccattcccatcccctgggggttctggccaaggtggtgcaccacccccagccgctcctccacgctcatcttcgtggccccgtgtccccgtgcctgccccagccgctcacctccctgcagggtcatccctaatctcttccccaagtacatccgtgcccccaacgggcccgaagccaaccctgtgaagcagctgcagcccaatgaggaggccgactacctcggcgtgcgtatccagctgcggagggagcagggtgcgggggccaccggcttcctcgaatggtgggtcatcgagctgcaggagtgccggaccgactgcaacctgctgcccatggtcattttcagtgacaaggtcagcccaccgagcctcggcttcctggctggctacggcatcatggggctgtacgtgtccatcgtgctggtcatcggcaagttcgtgcgcggattcttcagcgagatctcgcactccattatgttcgaggagctgccgtgcgtggaccgcatcctcaagctctgccaggacatcttcctggtgcgggagactcgggagctggagctggaggaggagttgtacgccaagctcatcttcctctaccgctcaccggagaccatgatcaagtggactcgtgagaaggagtaggagctgctgctggcgcccgagagggaaggagccggcctgctgggcagcgtggccacaaggggcggcactcctcaggccgggggagccactgccccgtccaaggccgccagctgtgatgcatcctcccggcctgcctgagccctgatgctgctgtcagagaaggacactgcgtccccacggcctgcgtggcgctgccgtcccccacgtgtactgtagagttttttttttaattaaaaaatgttttatttatacaaatggacaatca

SEQ ID NO: 10678 - protein, 139 aa, Homo sapiens
MTCVVPLQKYPQPKGQKKKKIVKYGMGGLIILFLIAIIWFPLLFMSLVRSVVGVVNQPIDVTVTLKLGGYEVSMCGSACPFPSPGGSGQGGAPPPAAPPRSSSWPRVPVPAPAAHLPAGSSLISSPSTSVPPTGPKPTL

SEQ ID NO: 10679 - DNA, 724 bp, Homo sapiens
cggacgtcctctcacgcgtgcaggtgttcctgcggcggctgctggagcttcacgttttcaagctggtggccctgtacaccgtctgggtggccctgaaggaggtgtcggtgatgaacctgctgctggtggtgctgtgggccttcgccctgccctacccacgcttccggcccatggcctcctgcctgtccaccgtgtggacctgcgtcatcatcgtgtgtaagatgctgtaccagctcaaggttgtcaacccccaggagtattccagcaactgcaccgaggtaccggcccccgagggctgggacgggaggaagctccaggcaactctgtattcgcagcccgaccctcctggggcagctgcctcagtgcagtggggccagcaatggagatggaggactctcccctgggggcgccaagggggcttcctggaggcagcatccttcgacctcaactgtggaccaggggcgcactccctgcacacaagggtgtccagtaggggcggagtcccagggtctccggcagtgaggacgggagggccccacccctggacagggagagacagtcaggcatctctgcctgggaccttctcgcacatccctccttctccctgcctgagccctgatgctgctgtcagagaaggacactgcgtccccacggcctgcgtggcgctgccgtcccccacgtgtactgtagagttttttttttaattaaaaaatgttttatttat

SEQ ID NO: 10680 - protein, 197 aa, Homo sapiens
MNLLLVVLWAFALPYPRFRPMASCLSTVWTCVIIVCKMLYQLKVVNPQEYSSNCTEVPAPEGWDGRKLQATLYSQPDPPGAAASVQWGQQWRWRTLPWGRQGGFLEAASFDLNCGPGAHSLHTRVSSRGGVPGSPAVRTGGPHPWTGRDSQASLPGTFSHIPPSPCLSPDAAVREGHCVPTACVALPSPTCTVEFFF

SEQ ID NO: 10681 - DNA, 444 bp, Homo sapiens
cggggcccagggtggtgggcagctcagggcgcaggtccatggcccacacgtagcgtaggcagcacagcgtcatcccatacagcaggatgcagggcgagcacagcatggccagttggtggcggctgcgcaccgtccagatgaggcaggcccagagcagcagtacgaaggtcagccagctgtggtaggtgatgctccataccatcatggcaatgagcgcgcacacatagctctggtccatgatgaggtggcccaggctgtggagcggagacgcctccctgggctcagcccgcttgggccgcacaggccgccgcaggacggagctctggccggtcagctcgtgcacgatgcagttatcagcctcggtgtcgggtgctgtgggcaccacgtgctggtcagactcccgttcctggggccactggtccagctctgctagctccagctccc

SEQ ID NO: 10682 - protein, 68 aa, Homo sapiens
MMRWPRLWSGDASLGSARLGRTGRRRTELWPVSSCTMQLSASVSGAVGTTCWSDSRSWGHWSSSASSS

SEQ ID NO: 10683 - DNA, 4528 bp, Homo sapiens
tatgccctaaaatctgggccctgggcaagcacacagcaggagagacaggcccccggtgggctatgggcagaacacgagggctccggcaattgggctgacaccgtccctgagcgtcagggatggccctgccagcacctgccgttctctgggcctcactttccttgaaagggtgggaaaggtggccctgaccccctttccagctctgcgcacctgaagactctcaggacccccaccccagggccgtggcttcatttgcttcattcagaaacacattgcaaaatggaaaatcaagggttagggtaaagaaagaaagtagccagaaagagcccccaggccctcccaaggcgacgtggccaacacagagttcccaggccagcccctgccctggacgagcggcctcctggggccactgggccacctggagcagctcccagagctaacagcacaagacagcatagccacattctctggggaggggttgggggacctggaggccccccatggggtcttggggatcaacgacgcggccactcagctgccctgggggtcttgggggttggtcagtgacatggccactcggctgccctgggggtctcgggggtcactgacaccgacccgtggatgtcctgggcccccgagggggcggcaggcagaggtgcggcgcgagcatgcgagagcgccaggcggccaccagggggcagcaccggcctccgccccgccccccgcacccagccataccttgcagtgtgcggtactcaccaggccgccgcaggacggagctctggccggtcagctcgtgcacgatgcagttatcagcctcggtgtcgggtgctgtgggcaccacgtgctgtgggcaagcagcgctgagccatgcacgggctggccgggcgccccccacgctggcgtctccacctgcctggctgctcacctggtcagactcccgttcctggggccactggtccagctctgctagctccagctcccgagcctcatacccctttgccgcctccttcctctgcagagaccagcgtcttgagcccaaaccagctccacaccccacccagaggcaggaggtcctgagaccagccccatggcctggcctcagcccacccaccatgggtggcaggtgctcacctggccggaggggcggtacgcgcggagcttgcgcagagaggccgtggcgtagcacagcagcaggaggacgccggggctggcatacacaggccagtccaggccggtgttgaggaccagcgcgtgggggctggagcagttggtgggacccacgaagtccttgagacccagcaccctgtccagagaagacccgtcacagcctaccaccccagaggcagtggggccacaggggctagacgagccaggtgggcgggaccagggtggcaggaaaaaggggctgtgtggcaagccgttacctagcccagatgccggcaggcgggagcagagcctgtgccaagggcatctggtagcagtagaggcagatgagatggccggcgccgaagcaccccaccgcgacgcagagtctgctgaagccccgagtgctgatgggaaagtggcaggcccaccaggtgcagagggccaggaagagcagcagtcatcagggaactcccaagacccctcccagtgtgactgccagtgccccctgcctcggtgcgtacctgccagtgcaagcagtgttacggccaggacccgcccagccgccaccagcagccagtgggccgtgactcggaaacgagcggccagccgtgacctccgtgtaggggccagcgttgctgcttcctgcagccctgccgtcgggctggcatccacatccctctcatcatcatcctgccaaggtcacggacaggggcaaggtcaggtgtatcgcactgacgccacctctccagcccacacctgcccagccaggagcgtgggaggcggccacatccacagctgctcctctgagggccacaggacagcctccccgggcacaggccccagccgtccctgaggtctgcctgacaccttcctacttcctcactcaagctcacagttcctgcaggccttcctggtagcagctcccaccctggccgaagacccagggtctgtcctgccaagcccaggcacgtgatgaccttgccaggtacagacagaccacagactgtcctataccacctcatctccccgaaccacgcacccagggagcagcggggccctgtctataccccggggggtctctagagaccaagggggcctgagggacatggccaggctccagggtctcctgtgtacccctgccagccttctgggtggctctgcctggaagataggggtggtactcctgccctccccaagcctctggggggacagaggtggccagctgcctagaagaagtgacaggccggcctggggctggggagagagacctgccgggcctgttttccctggacctgactaaagatttcccagaacacagccatttcccaaacaccagggaaagccaggtgtggtggaaagaacacggctgtcgtcagatgccctggctctggcctggctgccaccggcccagtgtccccatctgtgactcgggggctctcctggtggctgaggcgccaggtgcccgggctgagaccgcaggctgtggggctggacgataggccccaccccagctctgacagtctccgtgctctgcaggccgaggcaagtcacagcctctcggagcctattccccttctgtcaaatgggatgggggcttgacgggacagatgaaccagaccagtcctgtcctcacaggcctccagggctgcaggggctgctgggaggctccgaggccagggtaacagggagatcagggcaggagaggcccaggccctgagcccacccctctcagagaccacacagcagctgggggcgaggctggatcagaacgcagggcgccatcgctcaccccacccacagcctggccctggccctggccctgggaaatcttctgagcagagccgtgaaaaatgagcatttctgggagtggaaagaacagaggcagctgctgtgagagaacaggtgtgaggccaccgaggggcaggcccggccctgacttggggtatgaggccaccgaggggcaggcccggccctgacttggggtgtgaggccaccgaggggcaggcccggccctgacttgggccccacgtgccgcagccatgctgcagacgcccctcaccctcctctagcggccagcacccctcgggctggctggcacactccgtcgcatgcctgcaaacacgtgtgtgtgttgcccatatgtgggagtgagggtcgcccgggggccctgccaggccgggtcatggggcttctagatctttcggaacggtatcctgcaggtgcctggtgcccccagctcactctgaagtctgtccacgctggccgcccagggcgcagctgcacactcaggctcccatcacaccaagatgaagatgaccagagtccagccacccagccccttcccagcagccaaactctaggaagctcatgccccatgcccccatcagcatggaggggctgacgagggaggggcgggtctcttggaggacaggcagcagcacagtcctcatgagcgctggaccccctcaaatgcccggaaaagccacttgacctccaggtccccgttcccacttctgaaatgcgggcaccagccttgccccatggggtggcgacaggacaggcaggagggcaggccgcctctgcaggctgagcaggtgtactcgacctaccgtgtggcttggggaacccctttccctctcgggactcctctagaagttgaggcccatgtgcgtggcgagcatcagctatctgacgagtgggcactgggagggtgaggtgggaggaggctgggtgcccggggcagggagttcgtgggccaggacacccaggtggccataaatcctggctgagcctggggatggcaagtgtgggcccaggcagggacgagagggtctgagcagtcaacgttgggtgtcgcaggccccagctcatgccctgtccgtgtgagggggccatagctcagagattcccggggccggacctccaagtcttgtagcagctaaagttcactctgcctcccactccgaggacagaggccctgcttcaggcccgtcgctcctggggtccaggcccctgctggggctctgggccgacagcctgtttgcctgtaagtgcatggggcctgctggggccgccccttctcagcccttctgcagtggctctccagccagacccactgcccagcactgcaggtttccaccaccgcgtggccccaaataattcccctgtgaagagttcctaagggcacagatgccatgtcggggcgtggaggtttctgactagaggcagagcccgagtagaaacaggtctgaacggatggaactgcaggctgggccccggggtgggatttggaacttcctcctctctttaacaccaacttacaaccaaaacgtctacatctgttttaaaaagattaaaataaccctcaaaatggctgaga

SEQ ID NO: 10684 - protein, 167 aa, Homo sapiens
MAGAEAPHRDAESAEAPSADGKVAGPPGAEGQEEQQSSGNSQDPSQCDCQCPLPRCVPASASSVTARTRPAATSSQWAVTRKRAASRDLRVGASVAASCSPAVGLASTSLSSSSCQGHGQGQGQVYRTDATSPAHTCPARSVGGGHIHSCSSEGHRTASPGTGPSRP

SEQ ID NO: 10685 - DNA, 2137 bp, Homo sapiens
aatagacacaaggagaggcaagaagctccacctcaccccagtgggggctgcaggtggatggagaccagagcatgcggagcgcccctgagcagccgtggctggggtgggagcagggccatgatggctctggagaaaagtggggcaggcagctgcctccctggggctgaggggctgcaaggagaagttgcatcccgatgcatggcctatgcatggtacccagtccccatggccaccctggcatttcaggcacctgctgtgcaccaggtcaggccccagaccggcatcctctctctctctgtgcacccacacctggcaggaagcggcagcaccatctggttgcctggcagccttgtcctgctcccagctgcctgtggccccactggactcagccccccagcagggaggccttcggctgcagggcaggggctgggcgggcgcaccctgtggctgggggcactcaggagccctggcttcacctctgctctcggcgcacatgtggacagctcacccttcagcaggggtccggaccaaagtccttgacccaccgggttctgagtcctgacagggctgtggacagcttccctttccaccccggcacgtgctggcaggagcttccgggccctcaccctggggcagcaactcctgcaccaccagccacgcccggccacgagaaagtgcagaacagctcaggcccttctcacaacttcctggagctcagggacagttttttgagcacaaatggtgttaggtgacagactcgggattggccttggacactcagccccctctttctggagcaaagactcatgacccacgtccaagtcaccctgcacatccctaagcctgaccgtgaagcagccctcacggatgcccaggactccctgtccgcaccaccaggcagccgaggcaggtttggaccagcttctcacactcacaccttcctagggttgccccaggccctgacctgctgaccctgcagctatgacctctgacctgtggaggatgggaggggtgagcagcagggagagtgggaaggaggaatggaaaaccgtccaggaagggaggctgcagccccgacacgaacaggagccaccaccagggggtgctgtgcagggctcccggaggacaggaccttccagggcctccctgccccgaacccataggtgccaggcttctcactgctcacgacctccgtgccgggctcatacctgccgcgccagcccctcttcagcagagcacaagtctggcagcaggagggcaccagccaggggccccgcgcccccgcctctgtacagcagggtcaccgtggggtgacatgagaacaccgacccagggaatgggctcctgccacacctgcctgggaacctgggctgtgagtcctgctcgctgcaccctctagcctgacgttgaagtaacctcgccagcggggccctctgtggcactgggcactcagggagagcacgtggcattggagaaggtcccacccccaaatgcaaagctgggaaaaccaggctgagccggggatcaggccacctccgcagggacccactgctgcctcttccaggagcccaggagacccagtgggtctcctgcccccgactccaactccctcctggcaggacacacccagctcacagtggcctttccatcctgggaaagggagtgagaggaggctcaggccagggacccgcccagctctggccggcaaccgcccttcagcctttcctgaaccactgtgtgggccccaacccatccgctgcctgccggagggagcccatggggaatggactattcttgccacccctatccatggcaggggaggggctcagcatggctcttgcccacccagaagaaggtgcagggggcctggcgtggtggttcacacctttgggaggccgaggtgggtggatcacctcaggtcaggagtttgagaccagcctggccaacatggtgaaaccctgtttctactgaaaatacaaaaattagccaggcgtggtgatgggcacctgtaatctcagctactcaggaggctgaggcaggagaatcactttcacttaaacccaggaggcggaggttgcagtgagttgagatcgcgccactgcactccagcctgggcaacagaacaagactccgtctc

SEQ ID NO: 10686 - protein, 185 aa, Homo sapiens
MHGLCMVPSPHGHPGISGTCCAPGQAPDRHPLSLCAPTPGRKRQHHLVAWQPCPAPSCLWPHWTQPPSREAFGCRAGAGRAHPVAGGTQEPWLHLCSRRTCGQLTLQQGSGPKSLTHRVLSPDRAVDSFPFHPGTCWQELPGPHPGAATPAPPATPGHEKVQNSSGPSHNFLELRDSFLSTNGVR

SEQ ID NO: 10687 - DNA, 471 bp, Homo sapiens
caaaaggactgacggggcctaggagacaggagagggacaggtgcttgaacaagggctgggggccaagacgggggaaagagcttctcaaaggaagtggagccaatgggctggactgagatcccatctccaccttctccagggcttccacacccaggaaggagagcccatgggttgaagcttcgtcacctgggaagcaggagagcccgagggttggactaccagctgagcatgggaagctctgaaaggggccgggtgagggcaggcgaggatcagagttcgcggatgacagctgccaggccagggcagctacagggagccggggtcctggtccaagccccagctgccctccccctggcctgctccaactcctgcaagagcgctctctgccttatttggcttggaagagaaaccgataaacactcccgtgctagtgctttcgacggtgggcggggccgggcagaggaagagagg

SEQ ID NO: 10688 - protein, 122 aa, Homo sapiens
MGWTEIPSPPSPGLPHPGRRAHGLKLRHLGSRRARGLDYQLSMGSSERGRVRAGEDQSSRMTAARPGQLQGAGVLVQAPAALPLACSNSCKSALCLIWLGRETDKHSRASAFDGGRGRAEEE

SEQ ID NO: 10689 - DNA, 1836 bp, Homo sapiens
aacccgttggagtccctttccacactgtggaaggtttgttcttttgctctttgcaataactcttgctgctgctcactgtttgggtccacattgcttttatgagctgtaacactcgccgcgaaggtctacagcttcagtcctgaagccggcgagaccaccaacccaccaggaggaacaaacaacttcagacgcgctgccttaagagctgtaacactcaccgcgaaggtctgcagcttcactcctgaagccagcgagaccacgaacccatcaggaggaacgaacaactccagacgcgccgccttaagagctgcaacactcaccgcgaaggtccgtagcttcactcctgagccagcgagaccacgaacccaccaaaaggaagaaactccggacacatcctaacatcagaaggaacaaactccggacacgccacctttaagaactgtaacactcaccgcgaaggtccacggcttcattctttaagtcagtgagactgagaacccgccaattccggacacacagctacagccaagcctctttgcttctctgggccagcctctctggagctgaatcgtggctggctggatttgaggagcctgcatgggcgcactctctctttctgaatcccagctagggctctcctggctgtaattactaagactcagctgctgggaatttccacgcctcctacctctctacagggcagtccctccatattaggaaacccactggcacgctccgccgttatcttcgcaagacttccgttgttgcctcaagttgcagattgccttttaacagagaagaaagtgacaggaatgtgctggcactgatgacacagtaatgaccaaggtcttcagtgttttggccatctccctacctgatcaccctgaagcaacacccacaagcagacaagctctgcccagctacattgagatcccagaaccagagccactagcaatctcaccctaagaggaagagaaggagagccaggcatggctgtctgcagtgtgcctctcacggatacttcttttacctggcggacagcccagcgcctagttgtctgacccgtgatcaagatgtccttcacacggaaaacttgtttattctgacaaatgccttggtggttgctgtgtccagtgaatgcctgcctgaccatcgctcggagctgggagcttgtgttatccactgcgtcccggggaaaacctgctggggcagcccccggttcttcctttcttctctgcaactggggttctctgtgttcagggattacccaaaccacggctttctttggagaccagtgatggcaaagcgttctcttctgctcctgccaagtcgccctcactcagctcaaggcctctggcattccttggagacttctgctcactgctgttggaggaagatgctgattcaggccagattccatcttggggtgcgtgcccttggtcttcctctgccccacacgctccttccgcagctctgtgcatggttgctcctgcctgtcattcaggctttggctcagacagcacttactcaagagaacttttttggtagacgcatagcttttaaattttttttaaattttttaattttttaaacgtagtattttgattcaggggatacatgtgcatgttcgtcacagggtatattgtgtgatgctgaggttttggcttctattgatcctgtcacccaaagagtgaacatagtccccagcaggaaattttttaacccttgcccccatccctccctctccccttttggagtctcctgtatctgttattcccatctttatgtcatgtgtactcaatgtttagctcccaattataagtgagaatttgtggg

SEQ ID NO: 10690 - protein, 42 aa, Homo sapiens
MTKVFSVLAISLPDHPEATPTSRQALPSYIEIPEPEPLAISP

SEQ ID NO: 10691 - DNA, 462 bp, Homo sapiens
gttacattgttcctcagagtgctgaattttgagagcaaagcattacagaaatgtaaaaaaatcttgaaggccaggtgcggtgtctcatgcctgtaatcccagcactttgggaggctgagatggagtctcgctgtgtcaccaggctggagtacagtagtgtgatctcggctcattgcaacctccatctcccaggttcaagcaatcctcctgcctcagcctcctgagtagctgggactacagaaaacaagctcatattaccaagtgtgaaattacagcaagtcttacaggctgggaactggaaaagagcttccccatcatggtggattatacaaccagtggtggagagtaactccaaaatatagcatctttctactcatcttactaaagctcaaagaaggtgatctacaagataatgaaaacaaggctcaaaataaaaacaagaaatctttatgaaattacaca

SEQ ID NO: 10692 - protein, 45 aa, Homo sapiens
MPVIPALWEAEMESRCVTRLEYSSVISAHCNLHLPGSSNPPASAS

SEQ ID NO: 10693 - DNA, 3060 bp, Homo sapiens
cagcggcggcccaggaggcagccggtgagcgcctgcgagcagagtggcgggggccgctgacaggtcccgcgcagcccagcccagcccagccacgcggctcacaggtggggtccaagagcagtttggagcaacccggcgctacggagaggggtggacggctctgcacgggcctcctgtctcccgctcgggcagagggactcggggggacctcgctccttggctgagagaacctgaactcgggcggagagaacgcgcccaggcgggcaaggggaccagagaaagccggggctggaagtcactgtcgctcgccactgtctggagcgcacggagcgcagaggcccggcagccgcgcgtgccctcacggggaccgagccagtgatgcaggatcgctgagcggagatccgcgccgagaagtctctcggggccggggctgagacgcacgccttcgacaccgctgccaagaccccgattccggcgactcttgcggggaaccgaggggccaaggctgccccaagctcaggacttgggcgagtctaagacgatggtttcttaagcacggacccgcgttccccttcccgctccctcgactggaggcagggatcctgcgcggggcccccgggattccgtttccccgcggagccccggccgctgcctcccgggacagttcgcacggccacaggggcgcacggcgatgtggcctccgtccagcgcgctggcccgccggggggatgctctggcacctgtcggggtccaggcctagcatggccggcgcgttgcccgacgtcgcctccggctaggatggcccctccgggcccggccagtgccctctccacctcggccgagccgctgtcccgcagcatcttccggaagttcttgctgatgctctgctccctgctcacgtccctttacgtcttctactgcctggccgagcgctgccagaccctgtccggccccgtcgtggggctgtccggcggcggcgaggaggcgggggcccctggtggcggcgtcctggccggaggcccgagggagctggcggtgtggccggcggcggcacagagaaagcgcctcctgcaactgccgcagtggcggaggcgccggccgcccgcgccccgcgacgacggcgaggaggcggcctgggaagaagagtcccctggcctgtcagggggtccgggcggctccggggccggaagcaccgtggccgaggccccgccggggaccctggcgctgctcctggacgaaggcagcaagcagctgccgcaggccatcatcatcggagtgaagaagggcggcacgcgggcgctgctggagttcctgcgcgtgcaccccgacgtgcgcgccgtgggcgccgagccccacttcttcgaccgcagctacgacaagggcctcgcctggtaccgggacctgatgcccagaaccctggacgggcagatcaccatggagaagacgcccagttacttcgtcacgcgggaggcccccgcgcgcatctcggccatgtccaaggacaccaagctcatcgtggtggtgcgggacccggtgaccagggccatctcggactacacgcagacgctgtccaagcggcccgacatccccaccttcgagagcttgacgttcaaaaacaggacagcgggcctcatcgacacgtcgtggagcgccatccagatcggcatctacgccaagcacctggagcactggctgcgccacttccccatccgccagatgctcttcgtgagcggcgagcggctcatcagcgacccggccggggagctgggccgcgtgcaagacttcctgggcctcaagaggatcatcacggacaagcacttctacttcaacaagaccaagggcttcccctgcctgaagaaggcggagggcagcagccggccccattgcctgggcaagaccaagggcaggacccatcctgagatcgaccgcgaggtggtgcgcaggctgcgcgagttctaccggcctttcaacctcaagttctaccagatgaccgggcacgactttggctgggatggataaccatataatttaaaaagaaaaaaaaaatcaaaatataatatatttttttaccaatcggtagagaagagacagtttaatatttgtgctgaaaatatgtttcagtatttttttcaatgaatgttaagagattgttctcactcccgccccatcttaatgtataaccaacaccaaacacgtggatcaacagaaaaggaaaatttcactcgtctaaacactttcaattttcagtttttattttatgttctatatacccagtcataaagtataagcatcagttgtcattaaaagttttcagaaaatcttgaggttaaacatctctctctctttttttaaaatacaaggccctgataaaattgatatctatccttatatttttctccctttttcccgtgccactttttcttaaattatttcccagttagtattatcatatgtttgtacccgtcacagttttcatagtgctttcaaatacacctttttgatcattaaaataaaaaaataaatcttgctctgttgtataagatcacaataggtaaatattattatccccattttacagaaaggaaaactgagtctttgggaggtgaaataatgtatctaaaggtcaaatgttggatggaccctggacaaaattccatcttccacttgttccctatttcatgtcactttttccagggagaatggaaaagaagacatctgcacctttagaaatggttaggtagttttcagatgatatgaaaagggaaagagagccccttgttttctaaattcccaggctacccctcatggcacccagtctcattacatagttgtgtccaagaaaaccactgagacctggacacaacctctcttaagagccagtcttgcctcttggctatttaaagtacactgagatatggaaatcttgactgatgaatgcttgattgaattggagaggaattattggattcttgcatggaggacaaggtggccagccacactaggggtagcacaagatgtgttaggaacgtaacttacccatttgttgatttaattgacttt

SEQ ID NO: 10694 - protein, 406 aa, Homo sapiens; identical to SEQ ID NO: 1730

SEQ ID NO: 10695 - DNA, 564 bp, Homo sapiens
tatttaatcacatctgcaaggaccctctgaatgctgtcttgcctcaactcattttacagataagaaaatcaaggctcagagaggtgaagtcactgatccaaagtcacacagcaggtcaaaaggagatcatgtttcctgcctggaggagaggccccggtggactggaataggagaaagtggagggggtgtatttcaggatagaatcctgcaccctgccagggaccacgcttatccttggctcactcaataggatgcaagggcgtttactgtggccaggtcttgtgagtgcccagagccctgtggcaagaagcctctgccagggaaagggatgcggggaagtggaggcagtgatggggaagcagagccaggagagacccttgggcttccttccttcaaggcctctggtctctagcagagagaagagagggagcagtgctctcttgcccttctgccttccaccatgggatgatacagcatgaagacccccaccagatgctggtgccatactcttggacttcccagtcttcagaagcatgagccaaataaatttctattgtttacaaa

SEQ ID NO: 10696 - protein, 75 aa, Homo sapiens
MQGRLLWPGLVSAQSPVARSLCQGKGCGEVEAVMGKQSQERPLGFLPSRPLVSSREKRGSSALLPFCLPPWDDTA

SEQ ID NO: 10697 - DNA, 390 bp, Homo sapiens
agaaagtggagggggtgtatttcaggatagaatcctgcaccctgccagggaccacgcttatccttggctcactcaataggatgcaagggcgtttactgtggccaggtcttgtgagtgcccagagccctgtggcaagaagcctctcccaagctcaagcaccgctcccatctcagcctcccaagttgcttggactacaggtgcacgctatcacgcccagctaatttttgtattttttgtagagatgggtttttgccatgttgttcaggctgctcttgaactcctgagttaagtgatctgccttgcctaccttggcctcccaaagtgctgggattacaggcatgagccactgcgtgcagccgagccaaacctcattctagattccatctccag

SEQ ID NO: 10698 - protein, 46 aa, Homo sapiens
MQGRLLWPGLVSAQSPVARSLSQAQAPLPSQPPKLLGLQVHAITPS

SEQ ID NO: 10699 - DNA, 695 bp, Homo sapiens
cccgcggacaccaggcaggcccggccgggtgcgcggccaaggcccgctccccgcgtccccgggcgccgcccccgcccgcggctgggctccgagagacgagtgggagagcgagtgcagcgagggcgagaggcgagccgagcaggccgccctgcccgcggccctagcgccggcgcgaggagggggcgccgcggcccaccctccttcctgcctggccgcgggccggccgggccgccgcgccccgacccccatggccacccaggcctccgggccgcgaagtcgcagcgccagacccaaggcccccgagtgagcgcgggcgccgaggatctcatctggccaccgcgttctggaagaggcgagagggagagcgtgcgcgagaggagagagacggcgggggaaagggagacggcgagacgcgcagcgccggcgcccgggagacccaggaggagcccgcagataaccagcccgagtcatgcagtcttttcgagaaaggtgtggtttccatggcaaacaacagaactaccagcagacctcgcaggaaacatcacgcctagagaattacaggcagccgagtcaggccgggctaagctgcgaccggcagcggctgctcgccaaggactattataacccgcagccttacccgagctatgagggtggcgctggcacgccctctggcactgcagccgcggtggccgccg

SEQ ID NO: 10700 - protein, 74 aa, Homo sapiens
MQSFRERCGFHGKQQNYQQTSQETSRLENYRQPSQAGLSCDRQRLLAKDYYNPQPYPSYEGGAGTPSGTAAAVA

SEQ ID NO: 10701 - DNA, 7658 bp, Homo sapiens
cccgcggacaccaggcaggcccggccgggtgcgcggccaaggcccgctccccgcgtccccgggcgccgcccccgcccgcggctgggctccgagagacgagtgggagagcgagtgcagcgagggcgagaggcgagccgagcaggccgccctgcccgcggccctagcgccggcgcgaggagggggcgccgcggcccaccctccttcctgcctggccgcgggccggccgggccgccgcgccccgacccccatggccacccaggcctccgggccgcgaagtcgcagcgccagacccaaggcccccgagtgagcgcgggcgccgaggatctcatctggccaccgcgttctggaagaggcgagagggagagcgtgcgcgagaggagagagacggcgggggaaagggagacggcgagacgcgcagcgccggcgcccgggagacccaggaggagcccgcagataaccagcccgagtcatgcagtcttttcgagaaaggtgtggtttccatggcaaacaacagaactaccagcagacctcgcaggaaacatcacgcctagagaattacaggcagccgagtcaggccgggctaagctgcgaccggcagcggctgctcgccaaggactattataacccgcagccttacccgagctatgagggtggcgctggcacgccctctggcactgcagccgcggtggccgccgacaagtaccaccgaggcagcaaggccctgcccacacagcaaggcctgcaggggaggccggctttccctggctacggcgtccaggacagcagcccctacccaggccgctatgctggtgaggagagccttcaggcttggggggccccacagccaccacccccacagccgcagccactacctgcaggggtggccaagtatgatgagaacttgatgaaaaagacagcagtgccccccagcaggcagtatgcagagcagggcgcccaggtgccctttcggactcactccctgcacgtccagcagccaccgccgccccagcagcccctggcataccccaagctccaaaggcagaagctgcagaacgacattgcctcccctctgcccttcccccagggtacccactttcctcagcattcccagtccttccccacctcctccacctactcctcctctgtccagggtggtgggcagggggcccactcctataagagttgcacagcaccgactgcccagccccatgacaggccgctgactgccagctccagcctggccccggggcagcgggtccagaatcttcatgcctaccagtcgggccgcctcagctatgaccagcagcagcagcagcagcagcagcagcagcagcagcagcaagcccttcagagccggcaccatgcccaggaaaccctccattaccaaaacctcgccaagtatcagcactacgggcagcaaggccagggctactgccagccggacgcagccgtccggaccccagagcagtactaccagaccttcagccccagctccagccactcacccgcccgctccgtgggccgctcaccttcctacagttccacaccgtcgccgctgatgccaaacctggagaactttccctacagccagcagccgctcagcaccggggccttccccgcagggatcactgaccacagccacttcatgcccctgctcaatccctccccaacggatgccaccagctctgtggacacccaggctggcaactgcaagccccttcagaaggacaagctccctgagaacctgctgtcggatctcagcctgcagagcctcacggcgctgacctcacaggtggagaacatctccaacaccgtccagcagctgctgctctccaaggctgctgtgccgcagaagaaaggtgtcaagaacctcgtgtccaggaccccagagcagcataaaagccagcactgcagccccgaagggagcggctactcagccgagcccgcaggcacaccgctgtcagagccgccgagcagcacgccacagtccacgcatgcggagccgcaggaggccgactacctgagcggctccgaggacccactggagcgcagcttcctctactgcaaccaggcccgtggcagccctgccagggtcaacagcaactcgaaggccaagcccgagtccgtgtccacctgttctgtgacctctcctgacgacatgtccaccaaatctgacgactccttccagagcctacacggcagtctgccgctcgacagcttctccaagttcgtggcgggtgagcgggactgtccgcggctgctgctcagcgccctggcacaggaggacctggcctccgagatcctggggctgcaggaagccatcggtgagaaggccgacaaagcttgggctgaagcacccagcctggtcaaggacagcagcaagccacccttctcgctggagaaccacagcgcctgcctggactctgtggccaagagtgcgtggccccggcctggggagccggaggccctgcccgactccttgcagctggacaagggcggcaatgccaaggacttcagcccagggctgtttgaagacccttccgtggccttcgctacgcctgaccccaaaaagacaactggtcctctctcctttggtaccaagcccacccttggggttcctgctccagaccccactacagcagcttttgactgtttcccggacacaaccgctgccagctcagcggacagcgccaacccctttgcctggccagaggaaaacctgggggatgcttgtcccaggtggggattgcaccctggcgagcttaccaagggcctggagcagggtgggaaggcctcagatggcatcagcaaaggggacacccatgaggcttcggcctgcctgggcttccaggaggaggacccccctggggagaaggtggcctcgttgcccggggacttcaagcaggaggaggtgggtggggtgaaggaggaggcaggtgggctgctgcagtgccccgaggtggccaaggctgaccggtggctggaggacagccggcactgctgttccaccgccgacttcggggacctcccactgctgccacccaccagcaggaaggaggacctggaagctgaggaggagtactcctccctatgtgagctcctgggcagccccgagcagaggcctggcatgcaggacccgctgtcacccaaggccccactcatctgcaccaaggaggaggtggaggaggtgctggactccaaggccggctggggctctccgtgccacctctcaggggagtccgtcatcctgctgggccctacagtgggcaccgagtcaaaggtccagagctggtttgagtcctctctgtcacacatgaagccaggtgaagaggggcctgatggggagcgagctccaggggattccaccacctcggacgcctctctggcccagaagcccaacaagcctgctgtgcccgaggcgcccatcgcaaagaaagagcctgtgccacggggcaaaagcttacggagccgtcgggtgcaccgggggctgcccgaggccgaggactccccatgcagggcaccagtgctgcccaaagacctcttgctccctgaatcctgcacagggcccccccagggacagatggaaggggctggagccccaggccggggggcctcggaagggctccccaggatgtgtactcgttctctcacggccctgagtgagccccgcacgcccggacccccaggcctgaccaccacccctgcacccccagacaaactggggggcaagcagcgagccgccttcaagtcgggcaagcgggtggggaagccctcacccaaggctgcctccagccccagcaacccggccgccctgcctgtggcctccgacagcagcccgatgggctccaagaccaaggagacagactcacccagcacgcctggcaaggaccagcgctccatgatccttcggtcacgcaccaaaacccaggagatcttccactccaagcggcggaggccctctgagggccggctccccaactgccgtgccaccaagaagctcctcgacaacagccacttgcccgccacattcaaggtctccagcagcccccagaaggagggcagggtgagccagcgggcaagggtccccaaacctggtgcaggcagcaagctctctgaccggcccctccatgcgctcaaaaggaagtcggccttcatggcgccggtccccaccaagaagcggaacctggtcttgcggagccgcagcagcagcagcagcaacgccagtggcaatgggggagatgggaaggaggagaggcctgagggttcccccaccctcttcaagaggatgtcttctcccaagaaagccaagcccaccaagggcaatggcgagcctgccacaaagctcccacccccggagacccccgatgcctgcctcaagctcgcctctcgggcagccttccagggggccatgaagaccaaggtgctgccaccccggaagggccggggcctgaagctggaagccatcgtgcagaagatcacctcgcccagcctcaagaagttcgcatgtaaagcgccaggggcctctcctggtaatcctctgagcccatccctttccgacaaagaccgtgggctcaagggtgctgggggcagcccagtgggggtggaagaaggcctggtaaatgtgggcaccgggcagaagctcccaacttctggggctgatccgttatgcagaaatccaaccaacagatccttaaaaggcaaactcatgaacagtaagaaactgtcttctactgactgtttcaaaaccgaggccttcacatccccggaggccctgcagcctggggggactgccctggcgcctaagaagaggagccggaaaggccgggcaggggcccatggactctccaaaggcccgctggagaagcggccctatcttggcccggctctgctcctgactccccgagacagggccagtggcacacaaggggccagtgaggacaactctggtggaggaggcaagaagccaaagatggaggagctgggcctggcctcccagcccccggagggcaggccctgccagccccagacaagggcacagaaacagccaggccacaccaactacagcagctattccaagcggaagcgcctcactcggggccgggccaagaacaccacctcttcaccctgtaaggggcgtgccaagcgacgacgacagcagcaggtgctgcccctggatcccgcagagcctgaaatccgcctcaagtacatttcctcttgcaagcggctgaggtcagacagccggacccccgccttctcacccttcgtgcgggtggagaagcgagacgcgttcaccaccatatgcactgttgtcaactcccctggagatgcgcccaagccccacaggaagccttcctcctctgcctcctcttcctcatcctcgtcctcgttctccttggatgcagccggggcctccctggccacactccctggaggctccatcctgcagccgcggccctccttgcccctctcctccacgatgcacttggggcctgtggtttccaaggccctgagtacctcttgccttgtttgctgcctctgccaaaacccggccaacttcaaggaccttggggacctctgtgggccctactaccctgaacactgcctccccaaaaagaagccaaaactcaaggagaaggtgcggccagaaggcacctgtgaggaggcctcgctgccgcttgagagaacactcaaaggtcccgagtgtgcagctgccgccactgccgggaagccccccaggcctgacggcccagctgacccggccaagcagggcccactgcgcaccagtgcccggggcctgtcccggaggctgcagagctgctactgctgtgatggccgggaggatgggggcgaggaggcagccccagccgacaagggtcgcaaacatgagtgcagcaaggaggctccggcagagcccggcggggaggcccaggagcactgggtgcatgaggcctgtgccgtgtggaccggcggcgtctacctggtggccgggaagctctttgggctgcaggaggccatgaaggtggccgtggacatgatgtgttccagctgccaagaagccggggccaccattgggtgctgccacaaaggatgcctccacacctaccactacccgtgtgccagcgatgcaggttgcatattcatcgaagagaacttttctttgaaatgtcccaaacataagaggctgccgtagtaatccaccccaacggccggaggagccgccggagcccgcctgcccgcccgccgccgaaggagaggagccgcctgcgcagcccccgggcctttgagctgctcccagcgctggtccagagccgatccttgatccgggtcccggatcgtggatccggccgcctagggctcagacttgcggccccgggttgggaggaaaacccgttccggagccgcctgctcccggaaccggacggcacagggcgttcttgcccaccccaggggccaggcttgcggagggggagcccgcggagcggccagactccccggggcgctcagcctccggcgagggtgggagacggctttgtcctggggacactttccctctggaatctcaagacgacgtggcacacattccacgtgggtgctgccgccaccccagtcggtcgtggcgtgcagctgggagccctgggcttgggggtgggggtcgaaacagtactggaagaggcggagggcggctcctagctccgtggactaggcgggggagaaaggaagcctttctgagagcgggctaggccggcactggagaggccggagcctttggaacaaaccgtgcggaacgcgtccaggggccttcccgcccagcctttgccagatctctcgtgcggttcgggcaaagccggggtagacctgggctatgctcagttaggggttgcgggatccccgagtgtgggcgggactgggacaccctttggcctctgtttgtcccctttccagtcctccaccccacccctggagcccagcctgggagcgcaaaacccaagaagcggccagaacgcacctccggctccggcggacgcgcgaccgttgtgcaccaccagggaccgccgcgcctactctgcacgggagcagggacagcgctagatttcgtgtacaaaacctgtgtacccctctatatatatgttacatagaatgtatatatgttgggaacatgctcgcttctcccgtgtgtcgccgccgtgcgtcgtgcgcccgcaacagagccccaaccgggcctttgccgggtaaggggctaccgcgacgccacttgtccacgcagccaccaccggcccgggccagtccctgccagtccgtccgcctgtccgtccgtgtcctcagctctgtccacgcttcgataggcctgacgcagcccccagcccagggccgccctagcaacttcctgtacatatgactgtaaaatggtaaacgtgtgtattatatctggcctcgttatatagtgtatatatatgtatacatatacatatatataatatatatgaagactgtaaatgttaagacgactagtgttcttattagtatattgcttcacactgaagattgtgtgtatcgagctgtttctaaaagatgtttattttccttaagagtaaaaaacagtcattgcattcagaaaaaaaaaaaaaaaaaagtcaataaagatacaacgattgttttgg

SEQ ID NO: 10702 - protein, 1906 aa, Homo sapiens; identical to SEQ ID NO: 1734

SEQ ID NO: 10703 - DNA, 5961 bp, Homo sapiens
cccgcggacaccaggcaggcccggccgggtgcgcggccaaggcccgctccccgcgtccccgggcgccgcccccgcccgcggctgggctccgagagacgagtgggagagcgagtgcagcgagggcgagaggcgagccgagcaggccgccctgcccgcggccctagcgccggcgcgaggagggggcgccgcggcccaccctccttcctgcctggccgcgggccggccgggccgccgcgccccgacccccatggccacccaggcctccgggccgcgaagtcgcagcgccagacccaaggcccccgagtgagcgcgggcgccgaggatctcatctggccaccgcgttctggaagaggcgagagggagagcgtgcgcgagaggagagagacggcgggggaaagggagacggcgagacgcgcagcgccggcgcccgggagacccaggaggagcccgcagataaccagcccgagtcatgcagtcttttcgagaaaggtgtggtttccatggcaaacaacagaactaccagcagacctcgcaggaaacatcacgcctagagaattacaggcagccgagtcaggccgggctaagctgcgaccggcagcggctgctcgccaaggactattataacccgcagccttacccgagctatgagggtggcgctggcacgccctctggcactgcagccgcggtggccgccgacaagtaccaccgaggcagcaaggccctgcccacacagcaaggcctgcaggggaggccggctttccctggctacggcgtccaggacagcagcccctacccaggccgctatgctggtgaggagagccttcaggcttggggggccccacagccaccacccccacagccgcagccactacctgcaggggtggccaagtatgatgagaacttgatgaaaaagacagcagtgccccccagcaggcagtatgcagagcagggcgcccaggtgccctttcggactcactccctgcacgtccagcagccaccgccgccccagcagcccctggcataccccaagctccaaaggcagaagctgcagaacgacattgcctcccctctgcccttcccccagggtacccactttcctcagcattcccagtccttccccacctcctccacctactcctcctctgtccagggtggtgggcagggggcccactcctataagagttgcacagcaccgactgcccagccccatgacaggccgctgactgccagctccagcctggccccggggcagcgggtccagaatcttcatgcctaccagtcgggccgcctcagctatgaccagcagcagcagcagcagcagcagcagcagcagcagcagcaagcccttcagagccggcaccatgcccaggaaaccctccattaccaaaacctcgccaagtatcagcactacgggcagcaaggccagggctactgccagccggacgcagccgtccggaccccagagcagtactaccagaccttcagccccagctccagccactcacccgcccgctccgtgggccgctcaccttcctacagttccacaccgtcgccgctgatgccaaacctggagaactttccctacagccagcagccgctcagcaccggggccttccccgcagggatcactgaccacagccacttcatgcccctgctcaatccctccccaacggatgccaccagctctgtggacacccaggctggcaactgcaagccccttcagaaggacaagctccctgagaacctgctgtcggatctcagcctgcagagcctcacggcgctgacctcacaggtggagaacatctccaacaccgtccagcagctgctgctctccaaggctgctgtgccgcagaagaaaggtgtcaagaacctcgtgtccaggaccccagagcagcataaaagccagcactgcagccccgaagggagcggctactcagccgagcccgcaggcacaccgctgtcagagccgccgagcagcacgccacagtccacgcatgcggagccgcaggaggccgactacctgagcggctccgaggacccactggagcgcagcttcctctactgcaaccaggcccgtggcagccctgccagggtcaacagcaactcgaaggccaagcccgagtccgtgtccacctgttctgtgacctctcctgacgacatgtccaccaaatctgacgactccttccagagcctacacggcagtctgccgctcgacagcttctccaagttcgtggcgggtgagcgggactgtccgcggctgctgctcagcgccctggcacaggaggacctggcctccgagatcctggggctgcaggaagccatcggtgagaaggccgacaaagcttgggctgaagcacccagcctggtcaaggacagcagcaagccacccttctcgctggagaaccacagcgcctgcctggactctgtggccaagagtgcgtggccccggcctggggagccggaggccctgcccgactccttgcagctggacaagggcggcaatgccaaggacttcagcccagggctgtttgaagacccttccgtggccttcgctacgcctgaccccaaaaagacaactggtcctctctcctttggtaccaagcccacccttggggttcctgctccagaccccactacagcagcttttgactgtttcccggacacaaccgctgccagctcagcggacagcgccaacccctttgcctggccagaggaaaacctgggggatgcttgtcccaggtggggattgcaccctggcgagcttaccaagggcctggagcagggtgggaaggcctcagatggcatcagcaaaggggacacccatgaggcttcggcctgcctgggcttccaggaggaggacccccctggggagaaggtggcctcgttgcccggggacttcaagcaggaggaggtgggtggggtgaaggaggaggcaggtgggctgctgcagtgccccgaggtggccaaggctgaccggtggctggaggacagccggcactgctgttccaccgccgacttcggggacctcccactgctgccacccaccagcaggaaggaggacctggaagctgaggaggagtactcctccctatgtgagctcctgggcagccccgagcagaggcctggcatgcaggacccgctgtcacccaaggccccactcatctgcaccaaggaggaggtggaggaggtgctggactccaaggccggctggggctctccgtgccacctctcaggggagtccgtcatcctgctgggccctacagtgggcaccgagtcaaaggtccagagctggtttgagtcctctctgtcacacatgaagccaggtgaagaggggcctgatggggagcgagctccaggggattccaccacctcggacgcctctctggcccagaagcccaacaagcctgctgtgcccgaggcgcccatcgcaaagaaagagcctgtgccacggggcaaaagcttacggagccgtcgggtgcaccgggggctgcccgaggccgaggactccccatgcagggcaccagtgctgcccaaagacctcttgctccctgaatcctgcacagggcccccccagggacagatggaaggggctggagccccaggccggggggcctcggaagggctccccaggatgtgtactcgttctctcacggccctgagtgagccccgcacgcccggacccccaggcctgaccaccacccctgcacccccagacaaactggggggcaagcagcgagccgccttcaagtcgggcaagcgggtggggaagccctcacccaaggctgcctccagccccagcaacccggccgccctgcctgtggcctccgacagcagcccgatgggctccaagaccaaggagacagactcacccagcacgcctggcaaggaccagcgctccatgatccttcggtcacgcaccaaaacccaggagatcttccactccaagcggcggaggccctctgagggccggctccccaactgccgtgccaccaagaagctcctcgacaacagccacttgcccgccacattcaaggtctccagcagcccccagaaggagggcagggtgagccagcgggcaagggtccccaaacctggtgcaggcagcaagctctctgaccggcccctccatgcgctcaaaaggaagtcggccttcatggcgccggtccccaccaagaagcggaacctggtcttgcggagccgcagcagcagcagcagcaacgccagtggcaatgggggagatgggaaggaggagaggcctgagggttcccccaccctcttcaagaggatgtcttctcccaagaaagccaagcccaccaagggcaatggcgagcctgccacaaagctcccacccccggagacccccgatgcctgcctcaagctcgcctctcgggcagccttccagggggccatgaagaccaaggtgctgccaccccggaagggccggggcctgaagctggaagccatcgtgcagaagatcacctcgcccagcctcaagaagttcgcatgtaaagcgccaggggcctctcctggtaatcctctgagcccatccctttccgacaaagaccgtgggctcaagggtgctgggggcagcccagtgggggtggaagaaggcctggtaaatgtgggcaccgggcagaagctcccaacttctggggctgatccgttatgcagaaatccaaccaacagatccttaaaaggcaaactcatgaacagtaagaaactgtcttctactgactgtttcaaaaccgaggccttcacatccccggaggccctgcagcctggggggactgccctggcgcctaagaagaggagccggaaaggccgggcaggggcccatggactctccaaaggcccgctggagaagcggccctatcttggcccggctctgctcctgactccccgagacagggccagtggcacacaaggggccagtgaggacaactctggtggaggaggcaagaagccaaagatggaggagctgggcctggcctcccagcccccggagggcaggccctgccagccccagacaagggcacagaaacagccaggccacaccaactacagcagctattccaagcggaagcgcctcactcggggccgggccaagaacaccacctcttcaccctgtaaggggcgtgccaagcgacgacgacagcagcaggtgctgcccctggatcccgcagagcctgaaatccgcctcaagtacatttcctcttgcaagcggctgaggtcagacagccggacccccgccttctcacccttcgagcccagcctgggagcgcaaaacccaagaagcggccagaacgcacctccggctccggcggacgcgcgaccgttgtgcaccaccagggaccgccgcgcctactctgcacgggagcagggacagcgctagatttcgtgtacaaaacctgtgtacccctctatatatatgttacatagaatgtatatatgttgggaacatgctcgcttctcccgtgtgtcgccgccgtgcgtcgtgcgcccgcaacagagccccaaccgggcctttgccgggtaaggggctaccgcgacgccacttgtccacgcagccaccaccggcccgggccagtccctgccagtccgtccgcctgtccgtccgtgtcctcagctctgtccacgcttcgataggcctgacgcagcccccagcccagggccgccctagcaacttcctgtacatatgactgtaaaatggtaaacgtgtgtattatatctggcctcgttatatagtgtatatatatgtatacatatacatatatataatatatatgaagactgtaaatgttaagacgactagtgttcttattagtatattgcttcacactgaagattgtgtgtatcgagctgtttctaaaagatgtttattttccttaagagtaaaaaacagtcattgcattcagaaaaaaaaaaaaaaaaaagtcaataaagatacaacgattgttttgg

SEQ ID NO: 10704 - protein, 1640 aa, Homo sapiens
MQSFRERCGFHGKQQNYQQTSQETSRLENYRQPSQAGLSCDRQRLLAKDYYNPQPYPSYEGGAGTPSGTAAAVAADKYHRGSKALPTQQGLQGRPAFPGYGVQDSSPYPGRYAGEESLQAWGAPQPPPPQPQPLPAGVAKYDENLMKKTAVPPSRQYAEQGAQVPFRTHSLHVQQPPPPQQPLAYPKLQRQKLQNDIASPLPFPQGTHFPQHSQSFPTSSTYSSSVQGGGQGAHSYKSCTAPTAQPHDRPLTASSSLAPGQRVQNLHAYQSGRLSYDQQQQQQQQQQQQQQALQSRHHAQETLHYQNLAKYQHYGQQGQGYCQPDAAVRTPEQYYQTFSPSSSHSPARSVGRSPSYSSTPSPLMPNLENFPYSQQPLSTGAFPAGITDHSHFMPLLNPSPTDATSSVDTQAGNCKPLQKDKLPENLLSDLSLQSLTALTSQVENISNTVQQLLLSKAAVPQKKGVKNLVSRTPEQHKSQHCSPEGSGYSAEPAGTPLSEPPSSTPQSTHAEPQEADYLSGSEDPLERSFLYCNQARGSPARVNSNSKAKPESVSTCSVTSPDDMSTKSDDSFQSLHGSLPLDSFSKFVAGERDCPRLLLSALAQEDLASEILGLQEAIGEKADKAWAEAPSLVKDSSKPPFSLENHSACLDSVAKSAWPRPGEPEALPDSLQLDKGGNAKDFSPGLFEDPSVAFATPDPKKTTGPLSFGTKPTLGVPAPDPTTAAFDCFPDTTAASSADSANPFAWPEENLGDACPRWGLHPGELTKGLEQGGKASDGISKGDTHEASACLGFQEEDPPGEKVASLPGDFKQEEVGGVKEEAGGLLQCPEVAKADRWLEDSRHCCSTADFGDLPLLPPTSRKEDLEAEEEYSSLCELLGSPEQRPGMQDPLSPKAPLICTKEEVEEVLDSKAGWGSPCHLSGESVILLGPTVGTESKVQSWFESSLSHMKPGEEGPDGERAPGDSTTSDASLAQKPNKPAVPEAPIAKKEPVPRGKSLRSRRVHRGLPEAEDSPCRAPVLPKDLLLPESCTGPPQGQMEGAGAPGRGASEGLPRMCTRSLTALSEPRTPGPPGLTTTPAPPDKLGGKQRAAFKSGKRVGKPSPKAASSPSNPAALPVASDSSPMGSKTKETDSPSTPGKDQRSMILRSRTKTQEIFHSKRRRPSEGRLPNCRATKKLLDNSHLPATFKVSSSPQKEGRVSQRARVPKPGAGSKLSDRPLHALKRKSAFMAPVPTKKRNLVLRSRSSSSSNASGNGGDGKEERPEGSPTLFKRMSSPKKAKPTKGNGEPATKLPPPETPDACLKLASRAAFQGAMKTKVLPPRKGRGLKLEAIVQKITSPSLKKFACKAPGASPGNPLSPSLSDKDRGLKGAGGSPVGVEEGLVNVGTGQKLPTSGADPLCRNPTNRSLKGKLMNSKKLSSTDCFKTEAFTSPEALQPGGTALAPKKRSRKGRAGAHGLSKGPLEKRPYLGPALLLTPRDRASGTQGASEDNSGGGGKKPKMEELGLASQPPEGRPCQPQTRAQKQPGHTNYSSYSKRKRLTRGRAKNTTSSPCKGRAKRRRQQQVLPLDPAEPEIRLKYISSCKRLRSDSRTPAFSPFEPSLGAQNPRSGQNAPPAPADARPLCTTRDRRAYSAREQGQR

SEQ ID NO: 10705 - DNA, 6424 bp, Homo sapiens
cccgcggacaccaggcaggcccggccgggtgcgcggccaaggcccgctccccgcgtccccgggcgccgcccccgcccgcggctgggctccgagagacgagtgggagagcgagtgcagcgagggcgagaggcgagccgagcaggccgccctgcccgcggccctagcgccggcgcgaggagggggcgccgcggcccaccctccttcctgcctggccgcgggccggccgggccgccgcgccccgacccccatggccacccaggcctccgggccgcgaagtcgcagcgccagacccaaggcccccgagtgagcgcgggcgccgaggatctcatctggccaccgcgttctggaagaggcgagagggagagcgtgcgcgagaggagagagacggcgggggaaagggagacggcgagacgcgcagcgccggcgcccgggagacccaggaggagcccgcagataaccagcccgagtcatgcagtcttttcgagaaaggtgtggtttccatggcaaacaacagaactaccagcagacctcgcaggaaacatcacgcctagagaattacaggcagccgagtcaggccgggctaagctgcgaccggcagcggctgctcgccaaggactattataacccgcagccttacccgagctatgagggtggcgctggcacgccctctggcactgcagccgcggtggccgccgacaagtaccaccgaggcagcaaggccctgcccacacagcaaggcctgcaggggaggccggctttccctggctacggcgtccaggacagcagcccctacccaggccgctatgctggtgaggagagccttcaggcttggggggccccacagccaccacccccacagccgcagccactacctgcaggggtggccaagtatgatgagaacttgatgaaaaagacagcagtgccccccagcaggcagtatgcagagcagggcgcccaggtgccctttcggactcactccctgcacgtccagcagccaccgccgccccagcagcccctggcataccccaagctccaaaggcagaagctgcagaacgacattgcctcccctctgcccttcccccagggtacccactttcctcagcattcccagtccttccccacctcctccacctactcctcctctgtccagggtggtgggcagggggcccactcctataagagttgcacagcaccgactgcccagccccatgacaggccgctgactgccagctccagcctggccccggggcagcgggtccagaatcttcatgcctaccagtcgggccgcctcagctatgaccagcagcagcagcagcagcagcagcagcagcagcagcagcaagcccttcagagccggcaccatgcccaggaaaccctccattaccaaaacctcgccaagtatcagcactacgggcagcaaggccagggctactgccagccggacgcagccgtccggaccccagagcagtactaccagaccttcagccccagctccagccactcacccgcccgctccgtgggccgctcaccttcctacagttccacaccgtcgccgctgatgccaaacctggagaactttccctacagccagcagccgctcagcaccggggccttccccgcagggatcactgaccacagccacttcatgcccctgctcaatccctccccaacggatgccaccagctctgtggacacccaggctggcaactgcaagccccttcagaaggacaagctccctgagaacctgctgtcggatctcagcctgcagagcctcacggcgctgacctcacaggtggagaacatctccaacaccgtccagcagctgctgctctccaaggctgctgtgccgcagaagaaaggtgtcaagaacctcgtgtccaggaccccagagcagcataaaagccagcactgcagccccgaagggagcggctactcagccgagcccgcaggcacaccgctgtcagagccgccgagcagcacgccacagtccacgcatgcggagccgcaggaggccgactacctgagcggctccgaggacccactggagcgcagcttcctctactgcaaccaggcccgtggcagccctgccagggtcaacagcaactcgaaggccaagcccgagtccgtgtccacctgttctgtgacctctcctgacgacatgtccaccaaatctgacgactccttccagagcctacacggcagtctgccgctcgacagcttctccaagttcgtggcgggtgagcgggactgtccgcggctgctgctcagcgccctggcacaggaggacctggcctccgagatcctggggctgcaggaagccatcggtgagaaggccgacaaagcttgggctgaagcacccagcctggtcaaggacagcagcaagccacccttctcgctggagaaccacagcgcctgcctggactctgtggccaagagtgcgtggccccggcctggggagccggaggccctgcccgactccttgcagctggacaagggcggcaatgccaaggacttcagcccagggctgtttgaagacccttccgtggccttcgctacgcctgaccccaaaaagacaactggtcctctctcctttggtaccaagcccacccttggggttcctgctccagaccccactacagcagcttttgactgtttcccggacacaaccgctgccagctcagcggacagcgccaacccctttgcctggccagaggaaaacctgggggatgcttgtcccaggtggggattgcaccctggcgagcttaccaagggcctggagcagggtgggaaggcctcagatggcatcagcaaaggggacacccatgaggcttcggcctgcctgggcttccaggaggaggacccccctggggagaaggtggcctcgttgcccggggacttcaagcaggaggaggtgggtggggtgaaggaggaggcaggtgggctgctgcagtgccccgaggtggccaaggctgaccggtggctggaggacagccggcactgctgttccaccgccgacttcggggacctcccactgctgccacccaccagcaggaaggaggacctggaagctgaggaggagtactcctccctatgtgagctcctgggcagccccgagcagaggcctggcatgcaggacccgctgtcacccaaggccccactcatctgcaccaaggaggaggtggaggaggtgctggactccaaggccggctggggctctccgtgccacctctcaggggagtccgtcatcctgctgggccctacagtgggcaccgagtcaaaggtccagagctggtttgagtcctctctgtcacacatgaagccaggtgaagaggggcctgatggggagcgagctccaggggattccaccacctcggacgcctctctggcccagaagcccaacaagcctgctgtgcccgaggcgcccatcgcaaagaaagagcctgtgccacggggcaaaagcttacggagccgtcgggtgcaccgggggctgcccgaggccgaggactccccatgcagggcaccagtgctgcccaaagacctcttgctccctgaatcctgcacagggcccccccagggacagatggaaggggctggagccccaggccggggggcctcggaagggctccccaggatgtgtactcgttctctcacggccctgagtgagccccgcacgcccggacccccaggcctgaccaccacccctgcacccccagacaaactggggggcaagcagcgagccgccttcaagtcgggcaagcgggtggggaagccctcacccaaggctgcctccagccccagcaacccggccgccctgcctgtggcctccgacagcagcccgatgggctccaagaccaaggagacagactcacccagcacgcctggcaaggaccagcgctccatgatccttcggtcacgcaccaaaacccaggagatcttccactccaagcggcggaggccctctgagggccggctccccaactgccgtgccaccaagaagctcctcgacaacagccacttgcccgccacattcaaggtctccagcagcccccagaaggagggcagggtgagccagcgggcaagggtccccaaacctggtgcaggcagcaagctctctgaccggcccctccatgcgctcaaaaggaagtcggccttcatggcgccggtccccaccaagaagcggaacctggtcttgcggagccgcagcagcagcagcagcaacgccagtggcaatgggggagatgggaaggaggagaggcctgagggttcccccaccctcttcaagaggatgtcttctcccaagaaagccaagcccaccaagggcaatggcgagcctgccacaaagctcccacccccggagacccccgatgcctgcctcaagctcgcctctcgggcagccttccagggggccatgaagaccaaggtgctgccaccccggaagggccggggcctgaagctggaagccatcgtgcagaagatcacctcgcccagcctcaagaagttcgcatgtaaagcgccaggggcctctcctggtaatcctctgagcccatccctttccgacaaagaccgtgggctcaagggtgctgggggcagcccagtgggggtggaagaaggcctggtaaatgtgggcaccgggcagaagctcccaacttctggggctgatccgttatgcagaaatccaaccaacagatccttaaaaggcaaactcatgaacagtaagaaactgtcttctactgactgtttcaaaaccgaggccttcacatccccggaggccctgcagcctggggggactgccctggcgcctaagaagaggagccggaaaggccgggcaggggcccatggactctccaaaggcccgctggagaagcggccctatcttggcccggctctgctcctgactccccgagacagggccagtggcacacaaggggccagtgaggacaactctggtggaggaggcaagaagccaaagatggaggagctgggcctggcctcccagcccccggagggcaggccctgccagccccagacaagggcacagaaacagccaggccacaccaactacagcagctattccaagcggaagcgcctcactcggggccgggccaagaacaccacctcttcaccctgtaaggggcgtgccaagcgacgacgacagcagcaggtgctgcccctggatcccgcagagcctgaaatccgcctcaagtacatttcctcttgcaagcggctgaggtcagacagccggacccccgccttctcacccttcgagcccagcctgggagcgcaaaacccaagaagcggccagaacgcacctccggctccggcggacgcgcgaccgttgtgcaccaccagggaccgccgcgcctactctgcacgggagcagggacagcgctagatttcgtgtacaaaacctgtgtacccctctatatatatgttacatagaatgtatatatgttgggaacatgctcgcttctcccgtgtgtcgccgccgtgcgtcgtgcgcccgcaacagagccccaaccgggcctttgccgggtaaggggctaccgcgacgccacttgtccacgcagccaccaccggcccgggccagtccctgccagtccgtccgcctgtccgtccgtgtcctcagctctgtccacgcttcgataggcctgacgcagcccccagcccagggccgccctagcaacttcctgtacatatgactgtaaaatggtaaacgtgtgtattatatctggcctcgttatatagtgtatatatatgtatacatatacatatatataatatatatgaagactgtaaatgttaagacgactagtgttcttattagtatattgcttcacactgaagattgtgtgtatcgagctgtttctaaaagatgtttattttccttaagagtaaaaaacagtcattgcattcagaaaaaaaaaaaaaaaaaagtcaataaagatacaacgattgttttggaaaatctgcagcccgtggattccgaccagattcagctgggagccgggccaggctttaggttggggaatgggaatgaagggaggggctgggggggggggcatgaatggagtcagggagtcggcctttcacagaacaggaaacctcccccgcccctgtgccccctctccagtgtggcggcaggtcgggagggaggaggcttctttgctgtgagatgaccaggggccgggatgggggaggtgagacgtgccagacttcttgcagggagacccaagctgtagctcctgtcacacaacaggtcctggaagtcagtccatcctcccgtgccacccagggacctgatggggacagagctgggaggtgagaagggacaactgaccccatggaggccctaagggttgacacagcccaaccatgtgccctgggagcagggggaacaggtaggctggaggccatacagccagcc

SEQ ID NO: 10706 - protein, 1640 aa, Homo sapiens; identical to SEQ ID NO: 10704

SEQ ID NO: 10707 - DNA, 8121 bp, Homo sapiens
cccgcggacaccaggcaggcccggccgggtgcgcggccaaggcccgctccccgcgtccccgggcgccgcccccgcccgcggctgggctccgagagacgagtgggagagcgagtgcagcgagggcgagaggcgagccgagcaggccgccctgcccgcggccctagcgccggcgcgaggagggggcgccgcggcccaccctccttcctgcctggccgcgggccggccgggccgccgcgccccgacccccatggccacccaggcctccgggccgcgaagtcgcagcgccagacccaaggcccccgagtgagcgcgggcgccgaggatctcatctggccaccgcgttctggaagaggcgagagggagagcgtgcgcgagaggagagagacggcgggggaaagggagacggcgagacgcgcagcgccggcgcccgggagacccaggaggagcccgcagataaccagcccgagtcatgcagtcttttcgagaaaggtgtggtttccatggcaaacaacagaactaccagcagacctcgcaggaaacatcacgcctagagaattacaggcagccgagtcaggccgggctaagctgcgaccggcagcggctgctcgccaaggactattataacccgcagccttacccgagctatgagggtggcgctggcacgccctctggcactgcagccgcggtggccgccgacaagtaccaccgaggcagcaaggccctgcccacacagcaaggcctgcaggggaggccggctttccctggctacggcgtccaggacagcagcccctacccaggccgctatgctggtgaggagagccttcaggcttggggggccccacagccaccacccccacagccgcagccactacctgcaggggtggccaagtatgatgagaacttgatgaaaaagacagcagtgccccccagcaggcagtatgcagagcagggcgcccaggtgccctttcggactcactccctgcacgtccagcagccaccgccgccccagcagcccctggcataccccaagctccaaaggcagaagctgcagaacgacattgcctcccctctgcccttcccccagggtacccactttcctcagcattcccagtccttccccacctcctccacctactcctcctctgtccagggtggtgggcagggggcccactcctataagagttgcacagcaccgactgcccagccccatgacaggccgctgactgccagctccagcctggccccggggcagcgggtccagaatcttcatgcctaccagtcgggccgcctcagctatgaccagcagcagcagcagcagcagcagcagcagcagcagcagcaagcccttcagagccggcaccatgcccaggaaaccctccattaccaaaacctcgccaagtatcagcactacgggcagcaaggccagggctactgccagccggacgcagccgtccggaccccagagcagtactaccagaccttcagccccagctccagccactcacccgcccgctccgtgggccgctcaccttcctacagttccacaccgtcgccgctgatgccaaacctggagaactttccctacagccagcagccgctcagcaccggggccttccccgcagggatcactgaccacagccacttcatgcccctgctcaatccctccccaacggatgccaccagctctgtggacacccaggctggcaactgcaagccccttcagaaggacaagctccctgagaacctgctgtcggatctcagcctgcagagcctcacggcgctgacctcacaggtggagaacatctccaacaccgtccagcagctgctgctctccaaggctgctgtgccgcagaagaaaggtgtcaagaacctcgtgtccaggaccccagagcagcataaaagccagcactgcagccccgaagggagcggctactcagccgagcccgcaggcacaccgctgtcagagccgccgagcagcacgccacagtccacgcatgcggagccgcaggaggccgactacctgagcggctccgaggacccactggagcgcagcttcctctactgcaaccaggcccgtggcagccctgccagggtcaacagcaactcgaaggccaagcccgagtccgtgtccacctgttctgtgacctctcctgacgacatgtccaccaaatctgacgactccttccagagcctacacggcagtctgccgctcgacagcttctccaagttcgtggcgggtgagcgggactgtccgcggctgctgctcagcgccctggcacaggaggacctggcctccgagatcctggggctgcaggaagccatcggtgagaaggccgacaaagcttgggctgaagcacccagcctggtcaaggacagcagcaagccacccttctcgctggagaaccacagcgcctgcctggactctgtggccaagagtgcgtggccccggcctggggagccggaggccctgcccgactccttgcagctggacaagggcggcaatgccaaggacttcagcccagggctgtttgaagacccttccgtggccttcgctacgcctgaccccaaaaagacaactggtcctctctcctttggtaccaagcccacccttggggttcctgctccagaccccactacagcagcttttgactgtttcccggacacaaccgctgccagctcagcggacagcgccaacccctttgcctggccagaggaaaacctgggggatgcttgtcccaggtggggattgcaccctggcgagcttaccaagggcctggagcagggtgggaaggcctcagatggcatcagcaaaggggacacccatgaggcttcggcctgcctgggcttccaggaggaggacccccctggggagaaggtggcctcgttgcccggggacttcaagcaggaggaggtgggtggggtgaaggaggaggcaggtgggctgctgcagtgccccgaggtggccaaggctgaccggtggctggaggacagccggcactgctgttccaccgccgacttcggggacctcccactgctgccacccaccagcaggaaggaggacctggaagctgaggaggagtactcctccctatgtgagctcctgggcagccccgagcagaggcctggcatgcaggacccgctgtcacccaaggccccactcatctgcaccaaggaggaggtggaggaggtgctggactccaaggccggctggggctctccgtgccacctctcaggggagtccgtcatcctgctgggccctacagtgggcaccgagtcaaaggtccagagctggtttgagtcctctctgtcacacatgaagccaggtgaagaggggcctgatggggagcgagctccaggggattccaccacctcggacgcctctctggcccagaagcccaacaagcctgctgtgcccgaggcgcccatcgcaaagaaagagcctgtgccacggggcaaaagcttacggagccgtcgggtgcaccgggggctgcccgaggccgaggactccccatgcagggcaccagtgctgcccaaagacctcttgctccctgaatcctgcacagggcccccccagggacagatggaaggggctggagccccaggccggggggcctcggaagggctccccaggatgtgtactcgttctctcacggccctgagtgagccccgcacgcccggacccccaggcctgaccaccacccctgcacccccagacaaactggggggcaagcagcgagccgccttcaagtcgggcaagcgggtggggaagccctcacccaaggctgcctccagccccagcaacccggccgccctgcctgtggcctccgacagcagcccgatgggctccaagaccaaggagacagactcacccagcacgcctggcaaggaccagcgctccatgatccttcggtcacgcaccaaaacccaggagatcttccactccaagcggcggaggccctctgagggccggctccccaactgccgtgccaccaagaagctcctcgacaacagccacttgcccgccacattcaaggtctccagcagcccccagaaggagggcagggtgagccagcgggcaagggtccccaaacctggtgcaggcagcaagctctctgaccggcccctccatgcgctcaaaaggaagtcggccttcatggcgccggtccccaccaagaagcggaacctggtcttgcggagccgcagcagcagcagcagcaacgccagtggcaatgggggagatgggaaggaggagaggcctgagggttcccccaccctcttcaagaggatgtcttctcccaagaaagccaagcccaccaagggcaatggcgagcctgccacaaagctcccacccccggagacccccgatgcctgcctcaagctcgcctctcgggcagccttccagggggccatgaagaccaaggtgctgccaccccggaagggccggggcctgaagctggaagccatcgtgcagaagatcacctcgcccagcctcaagaagttcgcatgtaaagcgccaggggcctctcctggtaatcctctgagcccatccctttccgacaaagaccgtgggctcaagggtgctgggggcagcccagtgggggtggaagaaggcctggtaaatgtgggcaccgggcagaagctcccaacttctggggctgatccgttatgcagaaatccaaccaacagatccttaaaaggcaaactcatgaacagtaagaaactgtcttctactgactgtttcaaaaccgaggccttcacatccccggaggccctgcagcctggggggactgccctggcgcctaagaagaggagccggaaaggccgggcaggggcccatggactctccaaaggcccgctggagaagcggccctatcttggcccggctctgctcctgactccccgagacagggccagtggcacacaaggggccagtgaggacaactctggtggaggaggcaagaagccaaagatggaggagctgggcctggcctcccagcccccggagggcaggccctgccagccccagacaagggcacagaaacagccaggccacaccaactacagcagctattccaagcggaagcgcctcactcggggccgggccaagaacaccacctcttcaccctgtaaggggcgtgccaagcgacgacgacagcagcaggtgctgcccctggatcccgcagagcctgaaatccgcctcaagtacatttcctcttgcaagcggctgaggtcagacagccggacccccgccttctcacccttcgtgcgggtggagaagcgagacgcgttcaccaccatatgcactgttgtcaactcccctggagatgcgcccaagccccacaggaagccttcctcctctgcctcctcttcctcatcctcgtcctcgttctccttggatgcagccggggcctccctggccacactccctggaggctccatcctgcagccgcggccctccttgcccctctcctccacgatgcacttggggcctgtggtttccaaggccctgagtacctcttgccttgtttgctgcctctgccaaaacccggccaacttcaaggaccttggggacctctgtgggccctactaccctgaacactgcctccccaaaaagaagccaaaactcaaggagaaggtgcggccagaaggcacctgtgaggaggcctcgctgccgcttgagagaacactcaaaggtcccgagtgtgcagctgccgccactgccgggaagccccccaggcctgacggcccagctgacccggccaagcagggcccactgcgcaccagtgcccggggcctgtcccggaggctgcagagctgctactgctgtgatggccgggaggatgggggcgaggaggcagccccagccgacaagggtcgcaaacatgagtgcagcaaggaggctccggcagagcccggcggggaggcccaggagcactgggtgcatgaggcctgtgccgtgtggaccggcggcgtctacctggtggccgggaagctctttgggctgcaggaggccatgaaggtggccgtggacatgatgtgttccagctgccaagaagccggggccaccattgggtgctgccacaaaggatgcctccacacctaccactacccgtgtgccagcgatgcaggttgcatattcatcgaagagaacttttctttgaaatgtcccaaacataagaggctgccgtagtaatccaccccaacggccggaggagccgccggagcccgcctgcccgcccgccgccgaaggagaggagccgcctgcgcagcccccgggcctttgagctgctcccagcgctggtccagagccgatccttgatccgggtcccggatcgtggatccggccgcctagggctcagacttgcggccccgggttgggaggaaaacccgttccggagccgcctgctcccggaaccggacggcacagggcgttcttgcccaccccaggggccaggcttgcggagggggagcccgcggagcggccagactccccggggcgctcagcctccggcgagggtgggagacggctttgtcctggggacactttccctctggaatctcaagacgacgtggcacacattccacgtgggtgctgccgccaccccagtcggtcgtggcgtgcagctgggagccctgggcttgggggtgggggtcgaaacagtactggaagaggcggagggcggctcctagctccgtggactaggcgggggagaaaggaagcctttctgagagcgggctaggccggcactggagaggccggagcctttggaacaaaccgtgcggaacgcgtccaggggccttcccgcccagcctttgccagatctctcgtgcggttcgggcaaagccggggtagacctgggctatgctcagttaggggttgcgggatccccgagtgtgggcgggactgggacaccctttggcctctgtttgtcccctttccagtcctccaccccacccctggagcccagcctgggagcgcaaaacccaagaagcggccagaacgcacctccggctccggcggacgcgcgaccgttgtgcaccaccagggaccgccgcgcctactctgcacgggagcagggacagcgctagatttcgtgtacaaaacctgtgtacccctctatatatatgttacatagaatgtatatatgttgggaacatgctcgcttctcccgtgtgtcgccgccgtgcgtcgtgcgcccgcaacagagccccaaccgggcctttgccgggtaaggggctaccgcgacgccacttgtccacgcagccaccaccggcccgggccagtccctgccagtccgtccgcctgtccgtccgtgtcctcagctctgtccacgcttcgataggcctgacgcagcccccagcccagggccgccctagcaacttcctgtacatatgactgtaaaatggtaaacgtgtgtattatatctggcctcgttatatagtgtatatatatgtatacatatacatatatataatatatatgaagactgtaaatgttaagacgactagtgttcttattagtatattgcttcacactgaagattgtgtgtatcgagctgtttctaaaagatgtttattttccttaagagtaaaaaacagtcattgcattcagaaaaaaaaaaaaaaaaaagtcaataaagatacaacgattgttttggaaaatctgcagcccgtggattccgaccagattcagctgggagccgggccaggctttaggttggggaatgggaatgaagggaggggctgggggggggggcatgaatggagtcagggagtcggcctttcacagaacaggaaacctcccccgcccctgtgccccctctccagtgtggcggcaggtcgggagggaggaggcttctttgctgtgagatgaccaggggccgggatgggggaggtgagacgtgccagacttcttgcagggagacccaagctgtagctcctgtcacacaacaggtcctggaagtcagtccatcctcccgtgccacccagggacctgatggggacagagctgggaggtgagaagggacaactgaccccatggaggccctaagggttgacacagcccaaccatgtgccctgggagcagggggaacaggtaggctggaggccatacagccagcc

SEQ ID NO: 10708 - protein, 1906 aa, Homo sapiens; identical to SEQ ID NO: 1734

SEQ ID NO: 10709 - DNA, 1569 bp, Homo sapiens
caggcctccgggccgcgaagtcgcagcgccagacccaaggcccccgagtgagcgcgggcgccgaggcaagccggtatattcggggcccaggagcaaggaaaagtggccttttgcgtgacacagaagtggacacatcattctgatctcagggcaggctcagccccataactctggcaaaagctctcacaagcaaaagccttggagaggaggagaatgtatcaaggtgagatccaggccccagaagccaactgtggagtgggcaaaataggacctttcccaccagcctagcatccctctggcttctgtggagataaagggaactcaggggtactggagctgcctttctcttccactagactgtggggctctcataggcagggaccctgtcttactcctctttgttttatttttgagacagggtcttgctgtgtggcccaggctggagtgccttggcacaaacacagctcacttcagcctcaacctccagggctcaagcgatcctccagcatcagtctcctgagtagctgggatcacaggcgcccgacaccacacgtagctaattttaaatttttttttttttctagagacaggggtcttgccatggctggtcttgaagtcctgggctcaagcgatcctccctctttggcctcccaaagtgctgggattacaggagtgagtcactgcacccagccttactcctctttagactcccaagcctagaccaattgctttcaaattcttgcccgtgacctatagtaagaaatacatcgtaggtaactacacaggtcacactgtatatagctgaaacaaaagtttactgaaataactcccttactgtgtctgctggtctgtaatcctttttgttcttgtgtatttgttttttttttaattactgattgctacccacgaaattaattttgcaatccactgatgggtcatacccagaatttgaaaaaaacaagcctaggaaatgaatttgccatctattcatgcaacaaatgttaattgcaaccctaataattcctctcatgttaaactactcaagtaacacttggatacttgggtgaaaaatgcaaataagccagaaatatatgtagtaaaagtaaaagttcccttggcaccctccctgcaggtaaccccagttaatagtttgaacgtatccttccagactttttgttactcacttaatgcatatatatatatatatatatatatatatatatatatgtatgtatgtatgtatattacatataccaatccatgcatagttttctttttccccaagtgaggacatactgtgggctcttcctcggcagcttcctttttcctctccgtttgtcttggagaggttggttgtgtggcgaagtccttcagggcaagttctgggttgactcctggctccaccacatactgaacaggccatttacctctctgtgcctcagtgtccccatctttacaatcaggagaataacagtacagacctcacggtactgaagtaaagatgcagtgagttaatccatatgaagtttagagcagtgcttttgccaataaatgctgattgctgccgtc

SEQ ID NO: 10710 - protein, 86 aa, Homo sapiens [sequence omitted]

SEQ ID NO: 10711 - DNA, 570 bp, Homo sapiens
cgccccacagacggcggcgcagcccgccgcccttttcgaggccggccccccctctcacgcgccttgaaggcaagccggtatattcggggcccaggagcaaggaaaagtggccttttgcgtgacacagaagtggacacatcattctgatctcagggcaggctcagccccataactctggcaaaagctctcacaagcaaaagccttggagaggaggagaatgtatcaaggatctcatctggccaccgcgttctggaagaggcgagagggagagcgtgcgcgagaggagagagacggcgggggaaagggagacggcgagacgcgcagcgccggcgcccgggagacccaggaggagcccgcagataaccagcccgagtcatgcagtcttttcgagaaaggtgtggtttccatggcaaacaacagaactaccagcagacctcgcaggaaacatcacgcctagagaattacaggcagccgagtcaggccgggctaagctgcgaccggcagcggctgctcgccaaggactattataacccgcagccttacccgagctatgagggtggcgctggcacg

SEQ ID NO: 10712 - protein, 79 aa, Homo sapiens
MYQGSHLATAFWKRREGERAREERDGGGKGDGETRSAGARETQEEPADNQPESCSLFEKGVVSMANNRTTSRPRRKHHA

SEQ ID NO: 10713 - DNA, 484 bp, Homo sapiens
accatacactttggccctaggttcaggtgagtgtcagcatggaggcctttccccaaataggtctcccctgctttacagaccacccagcccaggtatgagaccttgagatccaatgcaaagttgaagttgtcagtcacctgccttcacacatcttttgttccctggccccagggctcatgggtatctctgggtggcttaaccaccccacaagtgacccctccagccacttcccaactcagctcagagctccatgggcttctgccctccctggacttgatggcagcagggatgctccttccaggccttctcctggccgcagctgggtgaagacctctcaagtcccctgactttgtcccgactggtggctacagctcctgcctggactcaagctggctatgacatgcccttaagtctttggcatgacttggacaattccctctctgctaagggaaacccattccccccgccatagtttgtcatctgc

SEQ ID NO: 10714 - protein, 56 aa, Homo sapiens
MGISGWLNHPTSDPSSHFPTQLRAPWASALPGLDGSRDAPSRPSPGRSWVKTSQVP

SEQ ID NO: 10715 - DNA, 729 bp, Homo sapiens
ccacacccagccctgaaggcttttaagcagggaggtaagtgagctggtccagcatgtgtttttaaaaactcttttccagcctgggcgacagagcaagaccagttctacctggctagggtggccccagagtcatggcggaaggcgaaaggcatgtcttacatggtggcaggcaaagaatgaggacacccaatcttctttactcattcatctaacactgactgtgtggcctggcacccaccaggaatgtccctgccctcaaagtctttacaggctgttggagatggggcagatgcccaaataagtcattgttgtcccaggtagtgccatgccaggggccatccagggagctgagggcccagtaaaaaggcacttaaactcaaatgcatggagaaggggacagccagggtgtgattagggaagacttcctgaaggaggtgctgctccgagaaggttgattgggtggtttttgtaggggttttcttgtttccactttttaaataactacttcatgccacatgctattaggtgcttttcacatacatcgtcatgtttaatttgtaccaacaaccctgtgagataggaaatagcttccgtatgttagcagtgagtaagctaaggatcagagaggggaggttgcttggacaactggcttagccatgattagaactccaataggttcttaaatgatgatagaaaaggtgtaggaggatgggagccgaggctggcata

SEQ ID NO: 10716 - protein, 35 aa, Homo sapiens
MFNLYQQPCEIGNSFRMLAVSKLRIREGRLLGQLA

SEQ ID NO: 10717 - DNA, 1686 bp, Homo sapiens
gcatcctccctcggcttcccagacacccccatcaatgcctggcccccttccttaggagtgggggtctcagagacatgaggcttggggaggccagccaaagtaacaactaggccatatgtttcttaaaaacaaaacccaacagcccttaagggcttgggggtggggaatgcatcctgcaggaccaggacagctgcacgggacactacaatgtgagttcacaagaaggccgcctggctgctcaggggctggcctgggcacctcggaaccaggcctggaccccaggtcttccctgtgatgaatccaagttcaaaggcaccagctccagcacctaccgctcaggctgggaggctccaggggcagctcccaagaagccctgtcttctagaaccagagcctgaagccccaccattctcctggcttcattccaggcaaaggattacccatgcttggcttctaagaaatgccacaccccaagagggtaacagggtggagagactgccaacggacgcatccatagctgggctgaagtctgtgtctcaacttgtgtcctgatttctggagatgcaaagagtgagacaactcctcgtagttggccactctgacctggcaagagcccacaagctccctgcccgcttcttcttctctaggcatgctgtcccagggtctgaggtcacaccacccttccccatgtggggatggacatacagcaggtgcatcttaacagcttgcagagagcagccagcctcccctgcttcctgcctgggcaggtgttctcacctgcgcaggccttggtatccttatctgcgcaattagggtgatactccccaaacccaaatctttgttcctcctcagctgaaaaccttccatggcgaccagaacctctaagtaaaaactctcttgcttgcattcaaggtcctgcaccctctgacccctgctccctctaccagcccccctccccaccaaaacaggtcagcctgtaatccacctgtcagctgggcagcttcatacccctgggcctttgcatacaccagtccctctgtccagaacacacagaccctcccctgttcatccttcaaaaccctgcccagcatcagcccccgtgaagggccctctgcgatatcctcaccgccctgagtatgctcctcgtacatacgttgatcattgcacaactgcaattaggggttggcgcgtctgtctcctaccaagccagatgcgacagggattgggccttttgtctttgttttaaatctctggtgcccagatactgcctgcagagaaacaggcactcaggaacgtctagctgacaggtgggtgagtcggtaaacaacatctgcacagccctttccagtttacgaagccttttcctgtcctccatctcacaagcttcctctaaccagggcagcaaggaagggaggctcccggagcccgtccctgtccataggtgctgcctctgaaggcctgggagcttcagggccccttgtcttcacctaggcaggagctggggtcttcagggctcaccaaaagcagctgggacctcctttcagctgtaagccacccatttcctctgccaaaggctccctccccgcccatcccctggagagggtttgctgagtgcccaggtggtggccgggttggtagggcttgtggcggccctgccatcctgcccggagctgctgggatgcggccg

SEQ ID NO: 10718 - protein, 83 aa, Homo sapiens
MQRVRQLLVVGHSDLARAHKLPARFFFSRHAVPGSEVTPPFPMWGWTYSRCILTACREQPASPASCLGRCSHLRRPWYPYLRN

SEQ ID NO: 10719 - DNA, 2844 bp, Homo sapiens
aattcactcagggcctaagagctttgggcagttaaatccccctccccgacaacagactaacaggtcccattttgatatcaagggctggggtttcaagacagggaactgtggggcccacgctgtcctggcctccctggaggcctggctgctctcatgccaggaagggagcttccatttactacgggcctaggatggccgccccgctgcccccagcgctccctgggtgggtgcggatcctggccagtcccccagacacgcagtctgctgaccagaagcagcgaccttcggggagagccagccaccagccagccactgctccagaggcaggcctggggccacccgggaggctttcctcaccacggaaaatatttgcctttggttgtcggctgatgccttgtcttgtgtctgaatggacaactggctgatttctctctctttggaacagccatgaaatgcgaaggtgtttaagagtaaaaaccaggcgagggcaactgggcctggcgtccagctgttttgaacaacactcttgtttttctcccagagtgaacagaatactttctgcggttcagaatactctgtgcactggcccctcttcccaggccccgccccagccccctcaggcctcacctccagctgctgcagaccattccagaactccctccctcttggcttctagtcactcagcatctgggggagagagcctcttccagctgtacatagctagcttggcctggccccagaactgctgtgttctggaaagttgtaggagaatccctcttggcgggctctccagcatggagaatcgcaggcctctgctccggaaagggaggcttttgagaggtcagattcaccacagccagaccaatgaactgtgagggctcataggggctggggctccggtttcaggggtgagaggagccaccatctgcccccatgcccactctgattgtaaatggctagactctggtgccggggtcagctctggattcatatcccagctcctgcatatgtatatgctgggtgaccttgggcagtttacttaacctctctgtgctttgtgtgcctaagctgcaagatactctaaattaaacagcaaactttcagtgctgttgtgggacgaaatgggataatgtgcttggtagctggcaggggctcaataaaaggtagcaacttccagggccaccagttcatggggagccaggtccaagtcttgtactttctatgcctcccagggagccacgtatgtctgcgacagagctggggaggacattctggggctgagggttgaggtctgcccatagagcagcggcctgtacctgcaggcaggtagagtatcatcctggctgagtctcagtgctcctcaaacattaaagtgtacatcctggtgagacgcagattttgatgcagcgggtcaggtgggacaggggttctgcagctgtaaggaactcccaggtcaagccagtgtggcaggtctgtgaccgcagctggtacggcaagatctcagccctggaagactctgggttctgctgaggctgggctcagagagagaatacaagttttgtcctgtccaaggagcaccctccaggatttcaggacaaggctctggctctgtgtccccaagccctcagtctcagagcttgggtcctgcagtggcctgggcaaccctccggactctccattcagcatttgttcctgacagcagtgcacggataaagagcagtttcatgctgctgaacttgcaatcacttcaaggcctgggcccctctgggcctcagtttccccactggcacagtgggaagctgggataagctaatcccaccctttccccttggtaattccccacattgctcttcccttcccttcatcccttcccaaaacacaggtctgaggcctgagcatccatcctaggggctgggcccccatccccatgactgcagtcatggggtacaagactcatgcagactcgtaagaacagccacttctgacctggggcctcgatgttccaggcactgtcctaggcatttgcatctacaaacttctcaccataatccaatcaccactgttttacagatgaggaaactgagccccacggggtgaagcctattgcctgagatcttgcagttggtaacgggtgcaggctggactcaggcccccacacatgcccaggcccttgagtatttgtaagggaagcagctgtttggttttcttggcacagagcatctgcctagctggtgagggcatggggaaagaggtgcccaatctagttggggatgggagggtaaaatggtactacctctttggagagctttctggcaatatggacccaaatgcaaattacatgtgccctctaacctgggcccgaagtcatctgcacaaggctaccaactgcaatgtcctttgcagcagcaaaacacgggatcccctagctgtccatccaagggggatgagggagatacatctgggaggttctattggctgagtactcagagaatggaagcaccacatggattaattggagcagtcttcaagttggtgaaaaaaagtgcagtgtagaaagtgtgtacagggccgggtgcagtggctcacactgtaatgccagcactttgggaggctaaggcaggaggattgcttgagcataggagtttgagaccagcctgggtaacatggggagatcctacctctacaagaaaaaaaatgaactaggcaggtgaggtggtgtttgcctgcggtcccagctacttgggaagctgaggtaggaggattgcttgagcccatgaagtcaggctgcagtgagctgtgactgcaccactgcacagtctgggcgacagagcaagaccctctctc

SEQ ID NO: 10720 - protein, 140 aa, Homo sapiens
MRRCLRVKTRRGQLGLASSCFEQHSCFSPRVNRILSAVQNTLCTGPSSQAPPQPPQASPPAAADHSRTPSLLASSHSASGGESLFQLYIASLAWPQNCCVLESCRRIPLGGLSSMENRRPLLRKGRLLRGQIHHSQTNEL

SEQ ID NO: 10721 - DNA, 470 bp, Homo sapiens
gaagtgattgcaagttcagcagcatgaaactgctctttatccgtgcactgctgtcaggaacaaatgctgaatggagagtccggagggttgcccaggcctgcgattctccatgctggagagcccgccaagagggattctcctacaactttccagaacacagcagttctggggccaggccaagctagctatgtacagctggaagaggctctctcccccagatgctgagtgactagaagccaagagggagggagttctggaatggtctgcagcagctggaggtgaggcctgagggggctggggcggggcctgggaagaggggccagtgcacagagtattctgaaccgcagaaagtattctgttcactctgggagaaaaacaagagtgttgttcaaaacagctggacgccaggcccagttgccctcgcctggtttttactcttaaacaccttcgcatttcatggctgttccaaa

SEQ ID NO: 10722 - protein, 53 aa, Homo sapiens
MLNGESGGLPRPAILHAGEPAKRDSPTTFQNTAVLGPGQASYVQLEEALSPRC

SEQ ID NO: 10723 - DNA, 3622 bp, Homo sapiens
gctgagatttagccgtgcgatgcccgcgcaggggcgggggccgcgggccaggggaggcgctcagagtccggagccgccgagcgagataaccagcccgagtcatgcagtcttttcgagaaaggtgtggtttccatggcaaacaacagaactaccagcagacctcgcaggaaacatcacgcctagagaattacaggcagccgagtcaggccgggctaagctgcgaccggcagcggctgctcgccaaggactattataacccgcagccttacccgagctatgagggtggcgctggcacgccctctggcactgcagccgcggtggccgccgacaagtaccaccgaggcagcaaggccctgcccacacagcaaggcctgcaggggaggccggctttccctggctacggcgtccaggacagcagcccctacccaggccgctatgctggtgaggagagccttcaggcttggggggccccacagccaccacccccacagccgcagccactacctgcaggggtggccaagtatgatgagaacttgatgaaaaagacagcagtgccccccagcaggcagtatgcagagcagggcgcccaggtgccctttcggactcactccctgcacgtccagcagccaccgccgccccagcagcccctggcataccccaagctccaaaggcagaagctgcagaacgacattgcctcccctctgcccttcccccagggtacccactttcctcagcattcccagtccttccccacctcctccacctactcctcctctgtccagggtggtgggcagggggcccactcctataagagttgcacagcaccgactgcccagccccatgacaggccgctgactgccagctccagcctggccccggggcagcgggtccagaatcttcatgcctaccagtcgggccgcctcagctatgaccagcagcagcagcagcagcagcagcagcagcagcagcagcaagcccttcagagccggcaccatgcccaggaaaccctccattaccaaaacctcgccaagtatcagcactacgggcagcaaggccagggctactgccagccggacgcagccgtccggaccccagagcagtactaccagaccttcagccccagctccagccactcacccgcccgctccgtgggccgctcaccttcctacagttccacaccgtcgccgctgatgccaaacctggagaactttccctacagccagcagccgctcagcaccggggccttccccgcagggatcactgaccacagccacttcatgcccctgctcaatccctccccaacggatgccaccagctctgtggacacccaggctggcaactgcaagccccttcagaaggacaagctccctgagaacctgctgtcggatctcagcctgcagagcctcacggcgctgacctcacaggtggagaacatctccaacaccgtccagcagctgctgctctccaaggctgctgtgccgcagaagaaaggtgtcaagaacctcgtgtccaggaccccagagcagcataaaagccagcactgcagccccgaagggagcggctactcagccgagcccgcaggcacaccgctgtcagagccgccgagcagcacgccacagtccacgcatgcggagccgcaggaggccgactacctgagcggctccgaggacccactggagcgcagcttcctctactgcaaccaggcccgtggcagccctgccagggtcaacagcaactcgaaggccaagcccgagtccgtgtccacctgttctgtgacctctcctgacgacatgtccaccaaatctgacgactccttccagagcctacacggcagtctgccgctcgacagcttctccaagttcgtggcgggtgagcgggactgtccgcggctgctgctcagcgccctggcacaggaggacctggcctccgagatcctggggctgcaggaagccatcggtgagaaggccgacaaagcttgggctgaagcacccagcctggtcaaggacagcagcaagccacccttctcgctggagaaccacagcgcctgcctggactctgtggccaagagtgcgtggccccggcctggggagccggaggccctgcccgactccttgcagctggacaagggcggcaatgccaaggacttcagcccagggctgtttgaagacccttccgtggccttcgctacgcctgaccccaaaaagacaactggtcctctctcctttggtaccaagcccacccttggggttcctgctccagaccccactacagcagcttttgactgtttcccggacacaaccgctgccagctcagcggacagcgccaacccctttgcctggccagaggaaaacctgggggatgcttgtcccaggtggggattgcaccctggcgagcttaccaagggcctggagcagggtgggaaggcctcagatggcatcagcaaaggggacacccatgaggcttcggcctgcctgggcttccaggaggaggacccccctggggagaaggtggcctcgttgcccggggacttcaagcaggaggaggtgggtggggtgaaggaggaggcaggtgggctgctgcagtgccccgaggtggccaaggctgaccggtggctggaggacagccggcactgctgttccaccgccgacttcggggacctcccactgctgccacccaccagcaggaaggaggacctggaagctgaggaggagtactcctccctatgtgagctcctgggcagccccgagcagaggcctggcatgcaggacccgctgtcacccaaggccccactcatctgcaccaaggaggaggtggaggaggtgctggactccaaggccggctggggctctccgtgccacctctcaggggagtccgtcatcctgctgggccctacagtgggcaccgagtcaaaggtccagagctggtttgagcctcgttatatagtgtatatatatgtatacatatacatatatataatatatatgaagactgtaaatgttaagacgactagtgttcttattagtatattgcttcacactgaagattgtgtgtatcgagctgtttctaaaagatgtttattttccttaagagtaaaaaacagtcattgcattcagaaaaaaaaaaaaaaaaaagtcaataaagatacaacgattgttttggaaaatctgcagcccgtggattccgaccagattcagctgggagccgggccaggctttaggttggggaatgggaatgaagggaggggctgggggggggggcatgaatggagtcagggagtcggcctttcacagaacaggaaacctcccccgcccctgtgccccctctccagtgtggcggcaggtcgggagggaggaggcttctttgctgtgagatgaccaggggccgggatgggggaggtgagacgtgccagacttcttgcagggagacccaagctgtagctcctgtcacacaacaggtcctggaagtcagtccatcctcccgtgccacccagggacctgatggggacagagctgggaggtgagaagggacaactgaccccatggaggccctaagggttgacacagcccaaccatgtgccctgggagcagggggaacaggtaggctggaggccatacagccagcc

SEQ ID NO: 10724 - protein, 1090 aa, Homo sapiens
MQSFRERCGFHGKQQNYQQTSQETSRLENYRQPSQAGLSCDRQRLLAKDYYNPQPYPSYEGGAGTPSGTAAAVAADKYHRGSKALPTQQGLQGRPAFPGYGVQDSSPYPGRYAGEESLQAWGAPQPPPPQPQPLPAGVAKYDENLMKKTAVPPSRQYAEQGAQVPFRTHSLHVQQPPPPQQPLAYPKLQRQKLQNDIASPLPFPQGTHFPQHSQSFPTSSTYSSSVQGGGQGAHSYKSCTAPTAQPHDRPLTASSSLAPGQRVQNLHAYQSGRLSYDQQQQQQQQQQQQQQALQSRHHAQETLHYQNLAKYQHYGQQGQGYCQPDAAVRTPEQYYQTFSPSSSHSPARSVGRSPSYSSTPSPLMPNLENFPYSQQPLSTGAFPAGITDHSHFMPLLNPSPTDATSSVDTQAGNCKPLQKDKLPENLLSDLSLQSLTALTSQVENISNTVQQLLLSKAAVPQKKGVKNLVSRTPEQHKSQHCSPEGSGYSAEPAGTPLSEPPSSTPQSTHAEPQEADYLSGSEDPLERSFLYCNQARGSPARVNSNSKAKPESVSTCSVTSPDDMSTKSDDSFQSLHGSLPLDSFSKFVAGERDCPRLLLSALAQEDLASEILGLQEAIGEKADKAWAEAPSLVKDSSKPPFSLENHSACLDSVAKSAWPRPGEPEALPDSLQLDKGGNAKDFSPGLFEDPSVAFATPDPKKTTGPLSFGTKPTLGVPAPDPTTAAFDCFPDTTAASSADSANPFAWPEENLGDACPRWGLHPGELTKGLEQGGKASDGISKGDTHEASACLGFQEEDPPGEKVASLPGDFKQEEVGGVKEEAGGLLQCPEVAKADRWLEDSRHCCSTADFGDLPLLPPTSRKEDLEAEEEYSSLCELLGSPEQRPGMQDPLSPKAPLICTKEEVEEVLDSKAGWGSPCHLSGESVILLGPTVGTESKVQSWFEPRYIVYIYVYIYIYIIYMKTVNVKTTSVLISILLHTEDCVYRAVSKRCLFSLRVKNSHCIQKKKKKKVNKDTTIVLENLQPVDSDQIQLGAGPGFRLGNGNEGRGWGGGHEWSQGVGLSQNRKPPPPLCPLSSVAAGREGGGFFAVR

SEQ ID NO: 10725 - DNA, 5955 bp, Homo sapiens
atgcagtcttttcgagaaaggtgtggtttccatggcaaacaacagaactaccagcagacctcgcaggaaacatcacgcctagagaattacaggcagccgagtcaggccgggctaagctgcgaccggcagcggctgctcgccaaggactattataacccgcagccttacccgagctatgagggtggcgctggcacgccctctggcactgcagccgcggtggccgccgacaagtaccaccgaggcagcaaggccctgcccacacagcaaggcctgcaggggaggccggctttccctggctacggcgtccaggacagcagcccctacccaggccgctatgctggtgaggagagccttcaggcttggggggccccacagccaccacccccacagccgcagccactacctgcaggggtggccaagtatgatgagaacttgatgaaaaagacagcagtgccccccagcaggcagtatgcagagcagggcgcccaggtgccctttcggactcactccctgcacgtccagcagccaccgccgccccagcagcccctggcataccccaagctccaaaggcagaagctgcagaacgacattgcctcccctctgcccttcccccaggggtggtgggcagggggcccactcctataagagttgcacagcaccgactgcccagccccatgacaggccgctgactgccagctccagcctggccccggggcagcgggtccagaatcttcatgcctaccagtcgggccgcctcagctatgaccagcagcagcagcagcagcagcagcagcagcagcagcagcaagcccttcagagccggcaccatgcccaggaaaccctccattaccaaaacctcgccaagtatcagcactacgggcagcaaggccagggctactgccagccggacgcagccgtccggaccccagagcagtactaccagaccttcagccccagctccagccactcacccgcccgctccgtgggccgctcaccttcctacagttccacaccgtcgccgctgatgccaaacctggagaactttccctacagccagcagccgctcagcaccggggccttccccgcagggatcactgaccacagccacttcatgcccctgctcaatccctccccaacggatgccaccagctctcctgcagagcctcacggcgctgacctcacaggtggagaacatctccaacaccgtccagcagctgctgctctccaaggctgctgtgccgcagaagaaaggtgtcaagaacctcgtgtccaggaccccagagcagcataaaagccagcactgcagccccgaagggagcggctactcagccgagcccgcaggcacaccgctgtcagagccgccgagcagcacgccacagtccacgcatgcggagccgcaggaggccgactacctgagcggctccgaggacccactggagcgcagcttcctctactgcaaccaggcccgtggcagccctgccagggtcaacagcaactcgaaggccaagcccgagtccgtgtccacctgttctgtgacctctcctgacgacatgtccaccaaatctgacgactccttccagagcctacacggcagtctgccgctcgacagcttctccaagttcgtggcgggtgagcgggactgtccgcggctgctgctcagcgccctggcacaggaggacctggcctccgagatcctggggctgcaggaagccatcggtgagaaggccgacaaagcttgggctgaagcacccagcctggtcaaggacagcagcaagccacccttctcgctggagaaccacagcgcctgcctggactctgtggccaagagtgcgtggccccggcctggggagccggaggccctgcccgactccttgcagctggacaagggcggcaatgccaaggacttcagcccagggctgtttgaagacccttccgtggccttcgctacgcctgaccccaaaaagacaactggtcctctctcctttggtaccaagcccacccttggggttcctgctccagaccccactacagcagcttttgactgtttcccggacacaaccgctgccagctcagcggacagcgccaacccctttgcctggccagaggaaaacctgggggatgcttgtcccaggtggggattgcaccctggcgagcttaccaagggcctggagcagggtgggaaggcctcagatggcatcagcaaaggggacacccatgaggcttcggcctgcctgggcttccaggaggaggacccccctggggagaaggtggcctcgttgcccggggacttcaagcaggaggaggtgggtggggtgaaggaggaggcaggtgggctgctgcagtgccccgaggtggccaaggctgaccggtggctggaggacagccggcactgctgttccaccgccgacttcggggacctcccactgctgccacccaccagcaggaaggaggacctggaagctgaggaggagtactcctccctatgtgagctcctgggcagccccgagcagaggcctggcatgcaggacccgctgtcacccaaggccccactcatctgcaccaaggaggaggtggaggaggtgctggactccaaggccggctggggctctccgtgccacctctcaggggagtccgtcatcctgctgggccctacagtgggcaccgagtcaaaggtccagagctggtttgagtcctctctgtcacacatgaagccaggtgaagaggggcctgatggggagcgagctccaggggattccaccacctcggacgcctctctggcccagaagcccaacaagcctgctgtgcccgaggcgcccatcgcaaagaaagagcctgtgccacggggcaaaagcttacggagccgtcgggtgcaccgggggctgcccgaggccgaggactccccatgcagggcaccagtgctgcccaaagacctcttgctccctgaatcctgcacagggcccccccagggacagatggaaggggctggagccccaggccggggggcctcggaagggctccccaggatgtgtactcgttctctcacggccctgagtgagccccgcacgcccggacccccaggcctgaccaccacccctgcacccccagacaaactggggggcaagcagcgagccgccttcaagtcgggcaagcgggtggggaagccctcacccaaggctgcctccagccccagcaacccggccgccctgcctgtggcctccgacagcagcccgatgggctccaagaccaaggagacagactcacccagcacgcctggcaaggaccagcgctccatgatccttcggtcacgcaccaaaacccaggagatcttccactccaagcggcggaggccctctgagggccggctccccaactgccgtgccaccaagaagctcctcgacaacagccacttgcccgccacattcaaggtctccagcagcccccagaaggagggcagggtgagccagcgggcaagggtccccaaacctggtgcaggcagcaagctctctgaccggcccctccatgcgctcaaaaggaagtcggccttcatggcgccggtccccaccaagaagcggaacctggtcttgcggagccgcagcagcagcagcagcaacgccagtggcaatgggggagatgggaaggaggagaggcctgagggttcccccaccctcttcaagaggatgtcttctcccaagaaagccaagcccaccaagggcaatggcgagcctgccacaaagctcccacccccggagacccccgatgcctgcctcaagctcgcctctcgggcagccttccagggggccatgaagaccaaggtgctgccaccccggaagggccggggcctgaagctggaagccatcgtgcagaagatcacctcgcccagcctcaagaagttcgcatgtaaagcgccaggggcctctcctggtaatcctctgagcccatccctttccgacaaagaccgtgggctcaagggtgctgggggcagcccagtgggggtggaagaaggcctggtaaatgtgggcaccgggcagaagctcccaacttctggggctgatccgttatgcagaaatccaaccaacagatccttaaaaggcaaactcatgaacaggccagtggcacacaaggggccagtgaggacaactctggtggaggaggcaagaagccaaagatggaggagctgggcctggcctcccagcccccggagggcaggccctgccagccccagacaagggcacagaaacagccaggccacaccaactacagcagctattccaagcggaagcgcctcactcggggccgggccaagaacaccacctcttcaccctgtaaggggcgtgccaagcgacgacgacagcagcaggtgctgcccctggatcccgcagagcctgaaatccgcctcaagtacatttcctcttgcaagcggctgaggtcagacagccggacccccgccttctcacccttcgtgcgggtggagaagcgagacgcgttcaccaccatatgcactgttgtcaactcccctggagatgcgcccaagccccacaggaagccttcctcctctgcctcctcttcctcatcctcgtcctcgttctccttggatgcagccggggcctccctggccacactccctggaggctccatcctgcagccgcggccctccttgcccctctcctccacgatgcacttggggcctgtggtttccaaggccctgagtacctcttgccttgtttgctgcctctgccaaaacccggccaacttcaaggaccttggggacctctgtgggccctactaccctgaacactgcctccccaaaaagaagccaaaactcaaggagaaggtgcggccagaaggcacctgtgaggaggcctcgctgccgcttgagagaacactcaaaggtcccgagtgtgcagctgccgccactgccgggaagccccccaggcctgacggcccagctgacccggccaagcagggcccactgcgcaccagtgcccggggcctgtcccggaggctgcagagctgctactgctgtgatggccgggaggatgggggcgaggaggcagccccagccgacaaggcactgggtgcatgaggcctgtgccgtgtggaccggcggcgtctacctggtggccgggaagctctttgggctgcaggaggccatgaaggtggccgtggacatgcacggtggcactgtggctctggcgcctggtgacttctccctccccggcctcaggtttgcttcactcttccaagggccttcttggtgtgactgtcctgtcctggccacgtccactccaagcagctggtccagatgtgttccagctgccaagaagccggggccaccattgggtgctgccacaaaggatgcctccacacctaccactacccgtgtgccagcgatgcaggtacgagcccgcccaggaacaggagggcattggagcccatccaagcagtccagggggaccctccctgggcacagctccccaaacccaggccccatctcactcttcagtttccctcctctcttgccccagcaattcttttatccttctgtctgcctagacctctgctgggcaatgccagggacatggaaatgaggcattccccaggcacctgcttgaggagtgcccagagcagtgagggaagatagaagcataaattacaatgtggaatgctgtctgcggagccatcattgccaaggggcagggaggatctcaggcctcagagagaaaggggtattggaggttgggcctttgaaggataaataggagttcactcagcagagacaaggggaaaggcactactacaacagcaaaaaccaactgagttgggggtgatgaggttcaaaacagactgagacccatggagcaattgtggaagttttgaagcagggtaatggggtatggaggtaggcccaggctccccgcatcctctccccggtccttcctctcactcatgtattca

SEQ ID NO: 10726 - protein, 1094 aa, Homo sapiens [sequence omitted]

SEQ ID NO: 10727 - DNA, 183 bp, Homo sapiens
cttccagggctctgatgagccctcgcctgctgatggtgggcgagactcgatcctgagcccagctatctacactttgtatgtccacagctgcctctactgccgtgtggccaaagggaactgccgtgtgtgtagatggcctggcagagcagcccagtcccctccataccccattaccctgcttca

SEQ ID NO: 10728 - protein, 34 aa, Homo sapiens
MSTAASTAVWPKGTAVCVDGLAEQPSPLHTPLPC

SEQ ID NO: 10729 - DNA, 1638 bp, Homo sapiens
gtctggagcctcgcgggcagtgcggctcccctcctggctgcagacaaaaccccacagctgtggggcccccaccctgtcctaaccaccgaaacttctctttggtcacaggttgcatattcatcgaagagaacttttctttgaaatgtcccaaacataagaggctgccgtagtaatccaccccaacggccggaggagccgccggagcccgcctgcccgcccgccgccgaaggagaggagccgcctgcgcagcccccgggcctttgagctgctcccagcgctggtccagagccgatccttgatccgggtcccggatcgtggatccggccgcctagggctcagacttgcggccccgggttgggaggaaaacccgttccggagccgcctgctcccggaaccggacggcacagggcgttcttgcccaccccaggggccaggcttgcggagggggagcccgcggagcggccagactccccggggcgctcagcctccggcgagggtgggagacggctttgtcctggggacactttccctctggaatctcaagacgacgtggcacacattccacgtgggtgctgccgccaccccagtcggtcgtggcgtgcagctgggagccctgggcttgggggtgggggtcgaaacagtactggaagaggcggagggcggctcctagctccgtggactaggcgggggagaaaggaagcctttctgagagcgggctaggccggcactggagaggccggagcctttggaacaaaccgtgcggaacgcgtccaggggccttcccgcccagcctttgccagatctctcgtgcggttcgggcaaagccggggtagacctgggctatgctcagttaggggttgcgggatccccgagtgtgggcgggactgggacaccctttggcctctgtttgtcccctttccagtcctccaccccacccctggagcccagcctgggagcgcaaaacccaagaagcggccagaacgcacctccggctccggcggacgcgcgaccgttgtgcaccaccagggaccgccgcgcctactctgcacgggagcagggacagcgctagatttcgtgtacaaaacctgtgtacccctctatatatatgttacatagaatgtatatatgttgggaacatgctcgcttctcccgtgtgtcgccgccgtgcgtcgtgcgcccgcaacagagccccaaccgggcctttgccgggtaaggggctaccgcgacgccacttgtccacgcagccaccaccggcccgggccagtccctgccagtccgtccgcctgtccgtccgtgtcctcagctctgtccacgcttcgataggcctgacgcagcccccagcccagggccgccctagcaacttcctgtacatatgactgtaaaatggtaaacgtgtgtattatatctggcctcgttatatagtgtatatatatgtatacatatacatatatataatatatatgaagactgtaaatgttaagacgactagtgttcttattagtatattgcttcacactgaagattgtgtgtatcgagctgtttctaaaagatgtttattttccttaagagtaaaaaacagtcattgcattcagaaaaaaaaaaaaaaaaaagtcaataaagatacaacgattgttttgg

SEQ ID NO: 10730 - protein, 79 aa, Homo sapiens
MLASPVCRRRASCARNRAPTGPLPGKGLPRRHLSTQPPPARASPCQSVRLSVRVLSSVHASIGLTQPPAQGRPSNFLYI

SEQ ID NO: 10731 - DNA, 2101 bp, Homo sapiens
gtctggagcctcgcgggcagtgcggctcccctcctggctgcagacaaaaccccacagctgtggggcccccaccctgtcctaaccaccgaaacttctctttggtcacaggttgcatattcatcgaagagaacttttctttgaaatgtcccaaacataagaggctgccgtagtaatccaccccaacggccggaggagccgccggagcccgcctgcccgcccgccgccgaaggagaggagccgcctgcgcagcccccgggcctttgagctgctcccagcgctggtccagagccgatccttgatccgggtcccggatcgtggatccggccgcctagggctcagacttgcggccccgggttgggaggaaaacccgttccggagccgcctgctcccggaaccggacggcacagggcgttcttgcccaccccaggggccaggcttgcggagggggagcccgcggagcggccagactccccggggcgctcagcctccggcgagggtgggagacggctttgtcctggggacactttccctctggaatctcaagacgacgtggcacacattccacgtgggtgctgccgccaccccagtcggtcgtggcgtgcagctgggagccctgggcttgggggtgggggtcgaaacagtactggaagaggcggagggcggctcctagctccgtggactaggcgggggagaaaggaagcctttctgagagcgggctaggccggcactggagaggccggagcctttggaacaaaccgtgcggaacgcgtccaggggccttcccgcccagcctttgccagatctctcgtgcggttcgggcaaagccggggtagacctgggctatgctcagttaggggttgcgggatccccgagtgtgggcgggactgggacaccctttggcctctgtttgtcccctttccagtcctccaccccacccctggagcccagcctgggagcgcaaaacccaagaagcggccagaacgcacctccggctccggcggacgcgcgaccgttgtgcaccaccagggaccgccgcgcctactctgcacgggagcagggacagcgctagatttcgtgtacaaaacctgtgtacccctctatatatatgttacatagaatgtatatatgttgggaacatgctcgcttctcccgtgtgtcgccgccgtgcgtcgtgcgcccgcaacagagccccaaccgggcctttgccgggtaaggggctaccgcgacgccacttgtccacgcagccaccaccggcccgggccagtccctgccagtccgtccgcctgtccgtccgtgtcctcagctctgtccacgcttcgataggcctgacgcagcccccagcccagggccgccctagcaacttcctgtacatatgactgtaaaatggtaaacgtgtgtattatatctggcctcgttatatagtgtatatatatgtatacatatacatatatataatatatatgaagactgtaaatgttaagacgactagtgttcttattagtatattgcttcacactgaagattgtgtgtatcgagctgtttctaaaagatgtttattttccttaagagtaaaaaacagtcattgcattcagaaaaaaaaaaaaaaaaaagtcaataaagatacaacgattgttttggaaaatctgcagcccgtggattccgaccagattcagctgggagccgggccaggctttaggttggggaatgggaatgaagggaggggctgggggggggggcatgaatggagtcagggagtcggcctttcacagaacaggaaacctcccccgcccctgtgccccctctccagtgtggcggcaggtcgggagggaggaggcttctttgctgtgagatgaccaggggccgggatgggggaggtgagacgtgccagacttcttgcagggagacccaagctgtagctcctgtcacacaacaggtcctggaagtcagtccatcctcccgtgccacccagggacctgatggggacagagctgggaggtgagaagggacaactgaccccatggaggccctaagggttgacacagcccaaccatgtgccctgggagcagggggaacaggtaggctggaggccatacagccagcc

SEQ ID NO: 10732 - protein, 130 aa, Homo sapiens [sequence omitted]

SEQ ID NO: 10733 - DNA, 1244 bp, Homo sapiens
agaggctgccgtagtaatccaccccaacggccggaggagccgccggagcccgcctgcccgcccgccgccgaaggagaggagccgcctgcgcagcccccgggcctttgagctgctcccagcgctggtccagagccgatccttgatccgggtcccggatcgtggatccggccgcctagggctcagacttgcggccccgggttgggaggaaaacccgttccggagccgcctgctcccggaaccggacggcacagggcgttcttgcccaccccaggggccaggcttgcggagggggagcccgcggagcggccagactccccggggcgctcagcctccggcgagggtgggagacggctttgtcctggggacactttccctctggaatctcaagacgacgtggcacacattccacgtgggtgctgccgccaccccagtcggtcgtggcgtgcagctgggagccctgggcttgggggtgggggtcgaaacagtactggaagaggcggagggcggctcctagctccgtggactaggcgggggagaaaggaagcctttctgagagcgggctaggccggcactggagaggccggagcctttggaacaaaccgtgcggaacgccgaccgttgtgcaccaccagggaccgccgcgcctactctgcacgggagcagggacagcgctagatttcgtgtacaaaacctgtgtacccctctatatatatgttacatagaatgtatatatgttgggaacatgctcgcttctcccgtgtgtcgccgccgtgcgtcgtgcgcccgcaacagagccccaaccgggcctttgccgggtaaggggctaccgcgacgccacttgtccacgcagccaccaccggcccgggccagtccctgccagtccgtccgcctgtccgtccgtgtcctcagctctgtccacgcttcgataggcctgacgcagcccccagcccagggccgccctagcaacttcctgtacatatgactgtaaaatggtaaacgtgtgtattatatctggcctcgttatatagtgtatatatatgtatacatatacatatatataatatatatgaagactgtaaatgttaagacgactagtgttcttattagtatattgcttcacactgaagattgtgtgtatcgagctgtttctaaaagatgtttattttccttaagagtaaaaaacagtcattgcattcagaaaaaaaaaaaaaaaaaagtcaataaagatacaacgattgttttgg

SEQ ID NO: 10734 - protein, 79 aa, Homo sapiens; identical to SEQ ID NO: 10730

SEQ ID NO: 10735 - DNA, 1707 bp, Homo sapiens
agaggctgccgtagtaatccaccccaacggccggaggagccgccggagcccgcctgcccgcccgccgccgaaggagaggagccgcctgcgcagcccccgggcctttgagctgctcccagcgctggtccagagccgatccttgatccgggtcccggatcgtggatccggccgcctagggctcagacttgcggccccgggttgggaggaaaacccgttccggagccgcctgctcccggaaccggacggcacagggcgttcttgcccaccccaggggccaggcttgcggagggggagcccgcggagcggccagactccccggggcgctcagcctccggcgagggtgggagacggctttgtcctggggacactttccctctggaatctcaagacgacgtggcacacattccacgtgggtgctgccgccaccccagtcggtcgtggcgtgcagctgggagccctgggcttgggggtgggggtcgaaacagtactggaagaggcggagggcggctcctagctccgtggactaggcgggggagaaaggaagcctttctgagagcgggctaggccggcactggagaggccggagcctttggaacaaaccgtgcggaacgccgaccgttgtgcaccaccagggaccgccgcgcctactctgcacgggagcagggacagcgctagatttcgtgtacaaaacctgtgtacccctctatatatatgttacatagaatgtatatatgttgggaacatgctcgcttctcccgtgtgtcgccgccgtgcgtcgtgcgcccgcaacagagccccaaccgggcctttgccgggtaaggggctaccgcgacgccacttgtccacgcagccaccaccggcccgggccagtccctgccagtccgtccgcctgtccgtccgtgtcctcagctctgtccacgcttcgataggcctgacgcagcccccagcccagggccgccctagcaacttcctgtacatatgactgtaaaatggtaaacgtgtgtattatatctggcctcgttatatagtgtatatatatgtatacatatacatatatataatatatatgaagactgtaaatgttaagacgactagtgttcttattagtatattgcttcacactgaagattgtgtgtatcgagctgtttctaaaagatgtttattttccttaagagtaaaaaacagtcattgcattcagaaaaaaaaaaaaaaaaaagtcaataaagatacaacgattgttttggaaaatctgcagcccgtggattccgaccagattcagctgggagccgggccaggctttaggttggggaatgggaatgaagggaggggctgggggggggggcatgaatggagtcagggagtcggcctttcacagaacaggaaacctcccccgcccctgtgccccctctccagtgtggcggcaggtcgggagggaggaggcttctttgctgtgagatgaccaggggccgggatgggggaggtgagacgtgccagacttcttgcagggagacccaagctgtagctcctgtcacacaacaggtcctggaagtcagtccatcctcccgtgccacccagggacctgatggggacagagctgggaggtgagaagggacaactgaccccatggaggccctaagggttgacacagcccaaccatgtgccctgggagcagggggaacaggtaggctggaggccatacagccagcc

SEQ ID NO: 10736 - protein, 130 aa, Homo sapiens [sequence omitted]

SEQ ID NO: 10737 - DNA, 1430 bp, Homo sapiens
atccaccccaacggccggaggagccgccggagcccgcctgcccgcccgccgccgaaggagaggagccgcctgcgcagcccccgggcctttgagctgctcccagcgctggtccagagccgatccttgatccgggtcccggatcgtggatccggccgcctagggctcagacttgcggccccgggttgggaggaaaacccgttccggagccgcctgctcccggaaccggacggcacagggcgttcttgcccaccccaggggccaggcttgcggagggggagcccgcggagcggccagactccccggggcgctcagcctccggcgagggtgggagacggctttgtcctggggacactttccctctggaatctcaagacgacgtggcacacattccacgtgggtgctgccgccaccccagtcggtcgtggcgtgcagctgggagccctgggcttgggggtgggggtcgaaacagtactggaagaggcggagggcggctcctagctccgtggactaggcgggggagaaaggaagcctttgccgggtaaggggctaccgcgacgccacttgtccacgcagccaccaccggcccgggccagtccctgccagtccgtccgcctgtccgtccgtgtcctcagctctgtccacgcttcgataggcctgacgcagcccccagcccagggccgccctagcaacttcctgtacatatgactgtaaaatggtaaacgtgtgtattatatctggcctcgttatatagtgtatatatatgtatacatatacatatatataatatatatgaagactgtaaatgttaagacgactagtgttcttattagtatattgcttcacactgaagattgtgtgtatcgagctgtttctaaaagatgtttattttccttaagagtaaaaaacagtcattgcattcagaaaaaaaaaaaaaaaaaagtcaataaagatacaacgattgttttggaaaatctgcagcccgtggattccgaccagattcagctgggagccgggccaggctttaggttggggaatgggaatgaagggaggggctgggggggggggcatgaatggagtcagggagtcggcctttcacagaacaggaaacctcccccgcccctgtgccccctctccagtgtggcggcaggtcgggagggaggaggcttctttgctgtgagatgaccaggggccgggatgggggaggtgagacgtgccagacttcttgcagggagacccaagctgtagctcctgtcacacaacaggtcctggaagtcagtccatcctcccgtgccacccagggacctgatggggacagagctgggaggtgagaagggacaactgaccccatggaggccctaagggttgacacagcccaaccatgtgccctgggagcagggggaacaggtaggctggaggccatacagccagcc

SEQ ID NO: 10738 - protein, 130 aa, Homo sapiens [sequence omitted]

SEQ ID NO: 10739 - DNA, 5542 bp, Homo sapiens
gttactagcagtcctggtgtgcttgttgccggggtaggcgcaacctcgcactggaggcctggcttgaagccagtgcatttgcatcagagcccaggcagggactgtccataggaagccacatggggcaatgactcatccaaggccagtcggtgatagagacctgaagagcaggttgaaagtgggagagggaggtctgtgtctgcagccccatgctttatttctgcaggaagccctcccgggaacacccagcagccgctgcctggcctgccactggcttccccgccaggggtcccgcccgtctccttgcacacccaggtccagagtgtggtcccccagcagctactgacagtcacagctgcccccacggcagcccctgtaacgaccactgtgacctcgcagatccagcaggtcccggtcctgctgcagccccacttcatcaaggcagactcgctgcttctgacagccatgaagacagacggagccactgtgaaggcggcaggtctcagtcccctggtctctggcaccactgtgcagacagggcctttgccgaccctggtgagtggcggaaccatcttggcaacagtcccactggtcgtagatgcggagaagctgcctatcaaccggctcgcagctggcagcaaggccccggcctctgcccagagccgtggagagaagcgcacagcccacaacgccattgagaagcgctaccgctcctccatcaatgacaaaatcattgagctcaaggatctggtggtgggcactgaggcaaagctgaataaatctgctgtcttgcgcaaggccatcgactacattcgctttctgcaacacagcaaccagaaactcaagcaggagaacctaagtctgcgcactgctgtccacaaaagcaaatctctgaaggatctggtgtcggcctgtggcagtggagggaacacagacgtgctcatggagggcgtgaagactgaggtggaggacacactgaccccacccccctcggatgctggctcacctttccagagcagccccttgtcccttggcagcaggggcagtggcagcggtggcagtggcagtgactcggagcctgacagcccagtctttgaggacagcaaggcaaagccagagcagcggccgtctctgcacagccggggcatgctggaccgctcccgcctggccctgtgcacgctcgtcttcctctgcctgtcctgcaaccccttggcctccttgctgggggcccgggggcttcccagcccctcagataccaccagcgtctaccatagccctgggcgcaacgtgctgggcaccgagagcagagatggccctggctgggcccagtggctgctgcccccagtggtctggctgctcaatgggctgttggtgctcgtctccttggtgcttctctttgtctacggtgagccagtcacacggccccactcaggccccgccgtgtacttctggaggcatcgcaagcaggctgacctggacctggcccggggagactttgcccaggctgcccagcagctgtggctggccctgcgggcactgggccggcccctgcccacctcccacctggacctggcttgtagcctcctctggaacctcatccgtcacctgctgcagcgtctctgggtgggccgctggctggcaggccgggcagggggcctgcagcaggactgtgctctgcgagtggatgctagcgccagcgcccgagacgcagccctggtctaccataagctgcaccagctgcacaccatggggaagcacacaggcgggcacctcactgccaccaacctggcgctgagtgccctgaacctggcagagtgtgcaggggatgccgtgtctgtggcgacgctggccgagatctatgtggcggctgcattgagagtgaagaccagtctcccacgggccttgcattttctgacacgcttcttcctgagcagtgcccgccaggcctgcctggcacagagtggctcagtgcctcctgccatgcagtggctctgccaccccgtgggccaccgtttcttcgtggatggggactggtccgtgctcagtaccccatgggagagcctgtacagcttggccgggaacccagtggaccccctggcccaggtgactcagctattccgggaacatctcttagagcgagcactgaactgtgtgacccagcccaaccccagccctgggtcagctgatggggacaaggaattctcggatgccctcgggtacctgcagctgctgaacagctgttctgatgctgcgggggctcctgcctacagcttctccatcagttccagcatggccaccaccaccggcgtagacccggtggccaagtggtgggcctctctgacagctgtggtgatccactggctgcggcgggatgaggaggcggctgagcggctgtgcccgctggtggagcacctgccccgggtgctgcaggagtctgagagacccctgcccagggcagctctgcactccttcaaggctgcccgggccctgctgggctgtgccaaggcagagtctggtccagccagcctgaccatctgtgagaaggccagtgggtacctgcaggacagcctggctaccacaccagccagcagctccattgacaaggccgtgcagctgttcctgtgtgacctgcttcttgtggtgcgcaccagcctgtggcggcagcagcagcccccggccccggccccagcagcccagggcaccagcagcaggccccaggcttccgcccttgagctgcgtggcttccaacgggacctgagcagcctgaggcggctggcacagagcttccggcccgccatgcggagggtgttcctacatgaggccacggcccggctgatggcgggggccagccccacacggacacaccagctcctcgaccgcagtctgaggcggcgggcaggccccggtggcaaaggaggcgcggtggcggagctggagccgcggcccacgcggcgggagcacgcggaggccttgctgctggcctcctgctacctgccccccggcttcctgtcggcgcccgggcagcgcgtgggcatgctggctgaggcggcgcgcacactcgagaagcttggcgatcgccggctgctgcacgactgtcagcagatgctcatgcgcctgggcggtgggaccactgtcacttccagctagaccccgtgtccccggcctcagcacccctgtctctagccactttggtcccgtgcagcttctgtcctgcgtcgaagctttgaaggccgaaggcagtgcaagagactctggcctccacagttcgacctgcggctgctgtgtgccttcgcggtggaaggcccgaggggcgcgatcttgaccctaagaccggcggccatgatggtgctgacctctggtggccgatcggggcactgcaggggccgagccattttggggggcccccctccttgctctgcaggcaccttagtggcttttttcctcctgtgtacagggaagagaggggtacatttccctgtgctgacggaagccaacttggctttcccggactgcaagcagggctctgccccagaggcctctctctccgtcgtgggagagagacgtgtacatagtgtaggtcagcgtgcttagcctcctgacctgaggctcctgtgctactttgccttttgcaaactttattttcatagattgagaagttttgtacagagaattaaaaatgaaattatttataatctgggttttgtgtcttcagctgatggatgtgctgactagtgagagtgcttgggccctcccccagcacctagggaaaggcttcccctccccctccggccacaaggtacacaacttttaacttagctcttcccgatgtttgtttgttagtgggaggagtggggagggctggctgtatggcctccagcctacctgttccccctgctcccagggcacatggttgggctgtgtcaacccttagggcctccatggggtcagttgtcccttctcacctcccagctctgtccccatcaggtccctgggtggcacgggaggatggactgacttccaggacctgttgtgtgacaggagctacagcttgggtctccctgcaagaagtctggcacgtctcacctcccccatcccggcccctggtcatctcacagcaaagaagcctcctccctcccgacctgccgccacactggagagggggcacaggggcgggggaggtttcctgttctgtgaaaggccgactccctgactccattcatgcccccccccccagcccctcccttcattcccattccccaacctaaagcctggcccggctcccagctgaatctggtcggaatccacgggctgcagattttccaaaacaatcgttgtatctttattgacttttttttttttttttttctgaatgcaatgactgttttttactcttaaggaaaataaacatcttttagaaacagctcgatacacacaatcttcagtgtgaagcaatatactaataagaacactagtcgtcttaacatttacagtcttcatatatattatatatatgtatatgtatacatatatatacactatataacgaggccagatataatacacacgtttaccattttacagtcatatgtacaggaagttgctagggcggccctgggctgggggctgcgtcaggcctatcgaagcgtggacagagctgaggacacggacggacaggcggacggactggcagggactggcccgggccggtggtggctgcgtggacaagtggcgtcgcggtagccccttacccggcaaaggcccggttggggctctgttgcgggcgcacgacgcacggcggcgacacacgggagaagcgagcatgttcccaacatatatacattctatgtaacatatatatagaggggtacacaggttttgtacacgaaatctagcgctgtccctgctcccgtgcagagtaggcgcggcggtccctggtggtgcacaacggtcgcgcgtccgccggagccggaggtgcgttctggccgcttcttgggttttgcgctcccaggctgggctccaggggtggggtggaggactggaaaggggacaaacagaggccaaagggtgtcccagtcccgcccacactcggggatcccgcaacccctaactgagcatagcccaggtctaccccggctttgcccgaaccgcacgagagatctggcaaaggctgggcgggaaggcccctggacgcgttccgcacggtttgttccaaaggctccggcctctccagtgccggcctagcccgctctcagaaaggcttcctttctcccccgcctagtccacggagctaggagccgccctccgcctcttccagtactgtttcgacccccacccccaagcccagggctcccagctgcacgccacgaccgactggggtggcggcagcacccacgtggaatgtgtgccacgtcgtcttgagattccagagggaaagtgtccccaggacaaagccgtctcccaccctcgccggaggctgagcgccccggggagtctggccgctccgcgggctccccctccgcaagcctggcccctggggtgggca

SEQ ID NO: 10740 - protein, 893 aa, Homo sapiens
MKTDGATVKAAGLSPLVSGTTVQTGPLPTLVSGGTILATVPLVVDAEKLPINRLAAGSKAPASAQSRGEKRTAHNAIEKRYRSSINDKIIELKDLVVGTEAKLNKSAVLRKAIDYIRFLQHSNQKLKQENLSLRTAVHKSKSLKDLVSACGSGGNTDVLMEGVKTEVEDTLTPPPSDAGSPFQSSPLSLGSRGSGSGGSGSDSEPDSPVFEDSKAKPEQRPSLHSRGMLDRSRLALCTLVFLCLSCNPLASLLGARGLPSPSDTTSVYHSPGRNVLGTESRDGPGWAQWLLPPVVWLLNGLLVLVSLVLLFVYGEPVTRPHSGPAVYFWRHRKQADLDLARGDFAQAAQQLWLALRALGRPLPTSHLDLACSLLWNLIRHLLQRLWVGRWLAGRAGGLQQDCALRVDASASARDAALVYHKLHQLHTMGKHTGGHLTATNLALSALNLAECAGDAVSVATLAEIYVAAALRVKTSLPRALHFLTRFFLSSARQACLAQSGSVPPAMQWLCHPVGHRFFVDGDWSVLSTPWESLYSLAGNPVDPLAQVTQLFREHLLERALNCVTQPNPSPGSADGDKEFSDALGYLQLLNSCSDAAGAPAYSFSISSSMATTTGVDPVAKWWASLTAVVIHWLRRDEEAAERLCPLVEHLPRVLQESERPLPRAALHSFKAARALLGCAKAESGPASLTICEKASGYLQDSLATTPASSSIDKAVQLFLCDLLLVVRTSLWRQQQPPAPAPAAQGTSSRPQASALELRGFQRDLSSLRRLAQSFRPAMRRVFLHEATARLMAGASPTRTHQLLDRSLRRRAGPGGKGGAVAELEPRPTRREHAEALLLASCYLPPGFLSAPGQRVGMLAEAARTLEKLGDRRLLHDCQQMLMRLGGGTTVTSS

SEQ ID NO: 10741 - DNA, 2462 bp, Homo sapiens
acccctgtcccctccccagcctgcacccactccattgaagatgtacccgtccatgcccgctttctcccctgggcctggtatcaaggaagagtcagtgccactgagcatcctgcagacccccaccccacagcccctgccaggggccctcctgccacagagcttcccagccccagccccaccgcagttcagctccaccctgctgtgtgccttcgcggtggaaggcccgaggggcgcgatcttgaccctaagaccggcggccatgatggtgctgacctctggtggccgatcggggcactgcaggggccgagccattttggggggcccccctccttgctctgcaggcaccttagtggcttttttcctcctgtgtacagggaagagaggggtacatttccctgtgctgacggaagccaacttggctttcccggactgcaagcagggctctgccccagaggcctctctctccgtcgtgggagagagacgtgtacatagtgtaggtcagcgtgcttagcctcctgacctgaggctcctgtgctactttgccttttgcaaactttattttcatagattgagaagttttgtacagagaattaaaaatgaaattatttataatctgggttttgtgtcttcagctgatggatgtgctgactagtgagagtgcttgggccctcccccagcacctagggaaaggcttcccctccccctccggccacaaggtacacaacttttaacttagctcttcccgatgtttgtttgttagtgggaggagtggggagggctggctgtatggcctccagcctacctgttccccctgctcccagggcacatggttgggctgtgtcaacccttagggcctccatggggtcagttgtcccttctcacctcccagctctgtccccatcaggtccctgggtggcacgggaggatggactgacttccaggacctgttgtgtgacaggagctacagcttgggtctccctgcaagaagtctggcacgtctcacctcccccatcccggcccctggtcatctcacagcaaagaagcctcctccctcccgacctgccgccacactggagagggggcacaggggcgggggaggtttcctgttctgtgaaaggccgactccctgactccattcatgcccccccccccagcccctcccttcattcccattccccaacctaaagcctggcccggctcccagctgaatctggtcggaatccacgggctgcagattttccaaaacaatcgttgtatctttattgacttttttttttttttttttctgaatgcaatgactgttttttactcttaaggaaaataaacatcttttagaaacagctcgatacacacaatcttcagtgtgaagcaatatactaataagaacactagtcgtcttaacatttacagtcttcatatatattatatatatgtatatgtatacatatatatacactatataacgaggccagatataatacacacgtttaccattttacagtcatatgtacaggaagttgctagggcggccctgggctgggggctgcgtcaggcctatcgaagcgtggacagagctgaggacacggacggacaggcggacggactggcagggactggcccgggccggtggtggctgcgtggacaagtggcgtcgcggtagccccttacccggcaaaggcccggttggggctctgttgcgggcgcacgacgcacggcggcgacacacgggagaagcgagcatgttcccaacatatatacattctatgtaacatatatatagaggggtacacaggttttgtacacgaaatctagcgctgtccctgctcccgtgcagagtaggcgcggcggtccctggtggtgcacaacggtcgcgcgtccgccggagccggaggtgcgttctggccgcttcttgggttttgcgctcccaggctgggctccaggggtggggtggaggactggaaaggggacaaacagaggccaaagggtgtcccagtcccgcccacactcggggatcccgcaacccctaactgagcatagcccaggtctaccccggctttgcccgaaccgcacgagagatctggcaaaggctgggcgggaaggcccctggacgcgttccgcacggtttgttccaaaggctccggcctctccagtgccggcctagcccgctctcagaaaggcttcctttctcccccgcctagtccacggagctaggagccgccctccgcctcttccagtactgtttcgacccccacccccaagcccagggctcccagctgcacgccacgaccgactggggtggcggcagcacccacgtggaatgtgtgccacgtcgtcttgagattccagagggaaagtgtccccaggacaaagccgtctcccaccctcgccggaggctgagcgccccggggagtctggccgctccgcgggctccccctccgcaagcctggcccctggggtgggca

SEQ ID NO: 10742 - protein, 156 aa, Homo sapiens
MYPSMPAFSPGPGIKEESVPLSILQTPTPQPLPGALLPQSFPAPAPPQFSSTLLCAFAVEGPRGAILTLRPAAMMVLTSGGRSGHCRGRAILGGPPPCSAGTLVAFFLLCTGKRGVHFPVLTEANLAFPDCKQGSAPEASLSVVGERRVHSVGQRA

SEQ ID NO: 10743 - DNA, 2376 bp, Homo sapiens
agtttccgaggaacttttcgccggcgccgggccgcctctgaggccagggcaggacacgaacgcgcggagcggcggcggcgactgagagccggggccgcggcggcgctccctaggaagggccgtacgaggcggcgggcccggcgggcctcccggaggaggcggctgcgccatggacgagccacccttcagcgaggcggctttggagcaggcgctgggcgagccgtgcgatctggacgcggcgctgctgaccgacatcgaaggtgctggcttttttcctcctgtgtacagggaagagaggggtacatttccctgtgctgacggaagccaacttggctttcccggactgcaagcagggctctgccccagaggcctctctctccgtcgtgggagagagacgtgtacatagtgtaggtcagcgtgcttagcctcctgacctgaggctcctgtgctactttgccttttgcaaactttattttcatagattgagaagttttgtacagagaattaaaaatgaaattatttataatctgggttttgtgtcttcagctgatggatgtgctgactagtgagagtgcttgggccctcccccagcacctagggaaaggcttcccctccccctccggccacaaggtacacaacttttaacttagctcttcccgatgtttgtttgttagtgggaggagtggggagggctggctgtatggcctccagcctacctgttccccctgctcccagggcacatggttgggctgtgtcaacccttagggcctccatggggtcagttgtcccttctcacctcccagctctgtccccatcaggtccctgggtggcacgggaggatggactgacttccaggacctgttgtgtgacaggagctacagcttgggtctccctgcaagaagtctggcacgtctcacctcccccatcccggcccctggtcatctcacagcaaagaagcctcctccctcccgacctgccgccacactggagagggggcacaggggcgggggaggtttcctgttctgtgaaaggccgactccctgactccattcatgcccccccccccagcccctcccttcattcccattccccaacctaaagcctggcccggctcccagctgaatctggtcggaatccacgggctgcagattttccaaaacaatcgttgtatctttattgacttttttttttttttttttctgaatgcaatgactgttttttactcttaaggaaaataaacatcttttagaaacagctcgatacacacaatcttcagtgtgaagcaatatactaataagaacactagtcgtcttaacatttacagtcttcatatatattatatatatgtatatgtatacatatatatacactatataacgaggccagatataatacacacgtttaccattttacagtcatatgtacaggaagttgctagggcggccctgggctgggggctgcgtcaggcctatcgaagcgtggacagagctgaggacacggacggacaggcggacggactggcagggactggcccgggccggtggtggctgcgtggacaagtggcgtcgcggtagccccttacccggcaaaggcccggttggggctctgttgcgggcgcacgacgcacggcggcgacacacgggagaagcgagcatgttcccaacatatatacattctatgtaacatatatatagaggggtacacaggttttgtacacgaaatctagcgctgtccctgctcccgtgcagagtaggcgcggcggtccctggtggtgcacaacggtcgcgcgtccgccggagccggaggtgcgttctggccgcttcttgggttttgcgctcccaggctgggctccaggggtggggtggaggactggaaaggggacaaacagaggccaaagggtgtcccagtcccgcccacactcggggatcccgcaacccctaactgagcatagcccaggtctaccccggctttgcccgaaccgcacgagagatctggcaaaggctgggcgggaaggcccctggacgcgttccgcacggtttgttccaaaggctccggcctctccagtgccggcctagcccgctctcagaaaggcttcctttctcccccgcctagtccacggagctaggagccgccctccgcctcttccagtactgtttcgacccccacccccaagcccagggctcccagctgcacgccacgaccgactggggtggcggcagcacccacgtggaatgtgtgccacgtcgtcttgagattccagagggaaagtgtccccaggacaaagccgtctcccaccctcgccggaggctgagcgccccggggagtctggccgctccgcgggctccccctccgcaagcctggcccctggggtgggca

SEQ ID NO: 10744 - protein, 78 aa, Homo sapiens
MDEPPFSEAALEQALGEPCDLDAALLTDIEGAGFFPPVYREERGTFPCADGSQLGFPGLQAGLCPRGLSLRRGRETCT

SEQ ID NO: 10745 - DNA, 6033 bp, Homo sapiens
agcagagctgcggccgggggaacccagtttccgaggaacttttcgccggcgccgggccgcctctgaggccagggcaggacacgaacgcgcggagcggcggcggcgactgagagccggggccgcggcggcgctccctaggaagggccgtacgaggcggcgggcccggcgggcctcccggaggaggcggctgcgccatggacgagccacccttcagcgaggcggctttggagcaggcgctgggcgagccgtgcgatctggacgcggcgctgctgaccgacatcgaagacatgcttcagcttatcaacaaccaagacagtgacttccctggcctatttgacccaccctatgctgggagtggggcagggggcacagaccctgccagccccgataccagctccccaggcagcttgtctccacctcctgccacattgagctcctctcttgaagccttcctgagcgggccgcaggcagcgccctcacccctgtcccctccccagcctgcacccactccattgaagatgtacccgtccatgcccgctttctcccctgggcctggtatcaaggaagagtcagtgccactgagcatcctgcagacccccaccccacagcccctgccaggggccctcctgccacagagcttcccagccccagccccaccgcagttcagctccacccctgtgttaggctaccccagccctccgggaggcttctctacaggaagccctcccgggaacacccagcagccgctgcctggcctgccactggcttccccgccaggggtcccgcccgtctccttgcacacccaggtccagagtgtggtcccccagcagctactgacagtcacagctgcccccacggcagcccctgtaacgaccactgtgacctcgcagatccagcaggtcccggtcctgctgcagccccacttcatcaaggcagactcgctgcttctgacagccatgaagacagacggagccactgtgaaggcggcaggtctcagtcccctggtctctggcaccactgtgcagacagggcctttgccgaccctggtgagtggcggaaccatcttggcaacagtcccactggtcgtagatgcggagaagctgcctatcaaccggctcgcagctggcagcaaggccccggcctctgcccagagccgtggagagaagcgcacagcccacaacgccattgagaagcgctaccgctcctccatcaatgacaaaatcattgagctcaaggatctggtggtgggcactgaggcaaagctgaataaatctgctgtcttgcgcaaggccatcgactacattcgctttctgcaacacagcaaccagaaactcaagcaggagaacctaagtctgcgcactgctgtccacaaaagcaaatctctgaaggatctggtgtcggcctgtggcagtggagggaacacagacgtgctcatggagggcgtgaagactgaggtggaggacacactgaccccacccccctcggatgctggctcacctttccagagcagccccttgtcccttggcagcaggggcagtggcagcggtggcagtggcagtgactcggagcctgacagcccagtctttgaggacagcaaggcaaagccagagcagcggccgtctctgcacagccggggcatgctggaccgctcccgcctggccctgtgcacgctcgtcttcctctgcctgtcctgcaaccccttggcctccttgctgggggcccgggggcttcccagcccctcagataccaccagcgtctaccatagccctgggcgcaacgtgctgggcaccgagagcagagatggccctggctgggcccagtggctgctgcccccagtggtctggctgctcaatgggctgttggtgctcgtctccttggtgcttctctttgtctacggtgagccagtcacacggccccactcaggccccgccgtgtacttctggaggcatcgcaagcaggctgacctggacctggcccggggagactttgcccaggctgcccagcagctgtggctggccctgcgggcactgggccggcccctgcccacctcccacctggacctggcttgtagcctcctctggaacctcatccgtcacctgctgcagcgtctctgggtgggccgctggctggcaggccgggcagggggcctgcagcaggactgtgctctgcgagtggatgctagcgccagcgcccgagacgcagccctggtctaccataagctgcaccagctgcacaccatggggaagcacacaggcgggcacctcactgccaccaacctggcgctgagtgccctgaacctggcagagtgtgcaggggatgccgtgtctgtggcgacgctggccgagatctatgtggcggctgcattgagagtgaagaccagtctcccacgggccttgcattttctgacacgcttcttcctgagcagtgcccgccaggcctgcctggcacagagtggctcagtgcctcctgccatgcagtggctctgccaccccgtgggccaccgtttcttcgtggatggggactggtccgtgctcagtaccccatgggagagcctgtacagcttggccgggaacccagtggaccccctggcccaggtgactcagctattccgggaacatctcttagagcgagcactgaactgtgtgacccagcccaaccccagccctgggtcagctgatggggacaaggaattctcggatgccctcgggtacctgcagctgctgaacagctgttctgatgctgcgggggctcctgcctacagcttctccatcagttccagcatggccaccaccaccggcgtagacccggtggccaagtggtgggcctctctgacagctgtggtgatccactggctgcggcgggatgaggaggcggctgagcggctgtgcccgctggtggagcacctgccccgggtgctgcaggagtctgagagacccctgcccagggcagctctgcactccttcaaggctgcccgggccctgctgggctgtgccaaggcagagtctggtccagccagcctgaccatctgtgagaaggccagtgggtacctgcaggacagcctggctaccacaccagccagcagctccattgacaaggccgtgcagctgttcctgtgtgacctgcttcttgtggtgcgcaccagcctgtggcggcagcagcagcccccggccccggccccagcagcccagggcaccagcagcaggccccaggcttccgcccttgagctgcgtggcttccaacgggacctgagcagcctgaggcggctggcacagagcttccggcccgccatgcggagggtgttcctacatgaggccacggcccggctgatggcgggggccagccccacacggacacaccagctcctcgaccgcagtctgaggcggcgggcaggccccggtggcaaaggaggcgcggtggcggagctggagccgcggcccacgcggcgggagcacgcggaggccttgctgctggcctcctgctacctgccccccggcttcctgtcggcgcccgggcagcgcgtgggcatgctggctgaggcggcgcgcacactcgagaagcttggcgatcgccggctgctgcacgactgtcagcagatgctcatgcgcctgggcggtgggaccactgtcacttccagctagaccccgtgtccccggcctcagcacccctgtctctagccactttggtcccgtgcagcttctgtcctgcgtcgaagctttgaaggccgaaggcagtgcaagagactctggcctccacagttcgacctgcggctgctgtgtgccttcgcggtggaaggcccgaggggcgcgatcttgaccctaagaccggcggccatgatggtgctgacctctggtggccgatcggggcactgcaggggccgagccattttggggggcccccctccttgctctgcaggcaccttagtggcttttttcctcctgtgtacagggaagagaggggtacatttccctgtgctgacggaagccaacttggctttcccggactgcaagcagggctctgccccagaggcctctctctccgtcgtgggagagagacgtgtacatagtgtaggtcagcgtgcttagcctcctgacctgaggctcctgtgctactttgccttttgcaaactttattttcatagattgagaagttttgtacagagaattaaaaatgaaattatttataatctgggttttgtgtcttcagctgatggatgtgctgactagtgagagtgcttgggccctcccccagcacctagggaaaggcttcccctccccctccggccacaaggtacacaacttttaacttagctcttcccgatgtttgtttgttagtgggaggagtggggagggctggctgtatggcctccagcctacctgttccccctgctcccagggcacatggttgggctgtgtcaacccttagggcctccatggggtcagttgtcccttctcacctcccagctctgtccccatcaggtccctgggtggcacgggaggatggactgacttccaggacctgttgtgtgacaggagctacagcttgggtctccctgcaagaagtctggcacgtctcacctcccccatcccggcccctggtcatctcacagcaaagaagcctcctccctcccgacctgccgccacactggagagggggcacaggggcgggggaggtttcctgttctgtgaaaggccgactccctgactccattcatgcccccccccccagcccctcccttcattcccattccccaacctaaagcctggcccggctcccagctgaatctggtcggaatccacgggctgcagattttccaaaacaatcgttgtatctttattgacttttttttttttttttttctgaatgcaatgactgttttttactcttaaggaaaataaacatcttttagaaacagctcgatacacacaatcttcagtgtgaagcaatatactaataagaacactagtcgtcttaacatttacagtcttcatatatattatatatatgtatatgtatacatatatatacactatataacgaggccagatataatacacacgtttaccattttacagtcatatgtacaggaagttgctagggcggccctgggctgggggctgcgtcaggcctatcgaagcgtggacagagctgaggacacggacggacaggcggacggactggcagggactggcccgggccggtggtggctgcgtggacaagtggcgtcgcggtagccccttacccggcaaaggcccggttggggctctgttgcgggcgcacgacgcacggcggcgacacacgggagaagcgagcatgttcccaacatatatacattctatgtaacatatatatagaggggtacacaggttttgtacacgaaatctagcgctgtccctgctcccgtgcagagtaggcgcggcggtccctggtggtgcacaacggtcgcgcgtccgccggagccggaggtgcgttctggccgcttcttgggttttgcgctcccaggctgggctccaggggtggggtggaggactggaaaggggacaaacagaggccaaagggtgtcccagtcccgcccacactcggggatcccgcaacccctaactgagcatagcccaggtctaccccggctttgcccgaaccgcacgagagatctggcaaaggctgggcgggaaggcccctggacgcgttccgcacggtttgttccaaaggctccggcctctccagtgccggcctagcccgctctcagaaaggcttcctttctcccccgcctagtccacggagctaggagccgccctccgcctcttccagtactgtttcgacccccacccccaagcccagggctcccagctgcacgccacgaccgactggggtggcggcagcacccacgtggaatgtgtgccacgtcgtcttgagattccagagggaaagtgtccccaggacaaagccgtctcccaccctcgccggaggctgagcgccccggggagtctggccgctccgcgggctccccctccgcaagcctggcccctggggtgggca

SEQ ID NO: 10746 - protein, 1147 aa, Homo sapiens; identical to SEQ ID NO: 1740

SEQ ID NO: 10747 - DNA, 4419 bp, Homo sapiens
gttactagcagtcctggtgtgcttgttgccggggtaggcgcaacctcgcactggaggcctggcttgaagccagtgcatttgcatcagagcccaggcagggactgtccataggaagccacatggggcaatgactcatccaaggccagtcggtgatagagacctgaagagcaggttgaaagtgggagagggaggtctgtgtctgcagccccatgctttatttctgcaggaagccctcccgggaacacccagcagccgctgcctggcctgccactggcttccccgccaggggtcccgcccgtctccttgcacacccaggtccagagtgtggtcccccagcagctactgacagtcacagctgcccccacggcagcccctgtaacgaccactgtgacctcgcagatccagcaggtcccggtcctgctgcagccccacttcatcaaggcagactcgctgcttctgacagccatgaagacagacggagccactgtgaaggcggcaggtctcagtcccctggtctctggcaccactgtgcagacagggcctttgccgaccctggtgagtggcggaaccatcttggcaacagtcccactggtcgtagatgcggagaagctgcctatcaaccggctcgcagctggcagcaaggccccggcctctgcccagagccgtggagagaagcgcacagcccacaacgccattgagaagcgctaccgctcctccatcaatgacaaaatcattgagctcaaggatctggtggtgggcactgaggcaaagctgaataaatctgctgtcttgcgcaaggccatcgactacattcgctttctgcaacacagcaaccagaaactcaagcaggagaacctaagtctgcgcactgctgtccacaaaagcaaatctctgaaggatctggtgtcggcctgtggcagtggagggaacacagacgtgctcatggagggcgtgaagactgaggtggaggacacactgaccccacccccctcggatgctggctcacctttccagagcagccccttgtcccttggcagcaggggcagtggcagcggtggcagtggcagtgactcggagcctgacagcccagtctttgaggacagcaaggcaaagccagagcagcggccgtctctgcacagccggggcatgctggaccgctcccgcctggccctgtgcacgctcgtcttcctctgcctgtcctgcaaccccttggcctccttgctgggggcccgggggcttcccagcccctcagataccaccagcgtctaccatagccctgggcgcaacgtgctgggcaccgagagcagagatggccctggctgggcccagtggctgctgcccccagtggtctggctgctcaatgggctgttggtgctcgtctccttggtgcttctctttgtctacggtgagccagtcacacggccccactcaggccccgccgtgtacttctggaggcatcgcaagcaggctgacctggacctggcccggggagactttgcccaggctgcccagcagctgtggctggccctgcgggcactgggccggcccctgcccacctcccacctggacctggcttgtagcctcctctggaacctcatccgtcacctgctgcagcgtctctgggtgggccgctggctggcaggccgggcagggggcctgcagcaggactgtgctctgcgagtggatgctagcgccagcgcccgagacgcagccctggtctaccataagctgcaccagctgcacaccatggggaagcacacaggcgggcacctcactgccaccaacctggcgctgagtgccctgaacctggcagagtgtgcaggggatgccgtgtctgtggcgacgctggccgagatctatgtggcggctgcattgagagtgaagaccagtctcccacgggccttgcattttctgacacgcttcttcctgagcagtgcccgccaggcctgcctggcacagagtggctcagtgcctcctgccatgcagtggctctgccaccccgtgggccaccgtttcttcgtggatggggactggtccgtgctcagtaccccatgggagagcctgtacagcttggccgggaacccagtggaccccctggcccaggtgactcagctattccgggaacatctcttagagcgagcactgaactgtgtgacccagcccaaccccagccctgggtcagctgatggggacaaggaattctcggatgccctcgggtacctgcagctgctgaacagctgttctgatgctgcgggggctcctgcctacagcttctccatcagttccagcatggccaccaccaccggcgtagacccggtggccaagtggtgggcctctctgacagctgtggtgatccactggctgcggcgggatgaggaggcggctgagcggctgtgcccgctggtggagcacctgccccgggtgctgcaggagtctgagagacccctgcccagggcagctctgcactccttcaaggctgcccgggccctgctgggctgtgccaaggcagagtctggtccagccagcctgaccatctgtgagaaggccagtgggtacctgcaggacagcctggctaccacaccagccagcagctccattgacaaggccgtgcagctgttcctgtgtgacctgcttcttgtggtgcgcaccagcctgtggcggcagcagcagcccccggccccggccccagcagcccagggcaccagcagcaggccccaggcttccgcccttgagctgcgtggcttccaacgggacctgagcagcctgaggcggctggcacagagcttccggcccgccatgcggagggtgttcctacatgaggccacggcccggctgatggcgggggccagccccacacggacacaccagctcctcgaccgcagtctgaggcggcgggcaggccccggtggcaaaggaggcgcggtggcggagctggagccgcggcccacgcggcgggagcacgcggaggccttgctgctggcctcctgctacctgccccccggcttcctgtcggcgcccgggcagcgcgtgggcatgctggctgaggcggcgcgcacactcgagaagcttggcgatcgccggctgctgcacgactgtcagcagatgctcatgcgcctgggcggtgggaccactgtcacttccagctagaccccgtgtccccggcctcagcacccctgtctctagccactttggtcccgtgcagcttctgtcctgcgtcgaagctttgaaggccgaaggcagtgcaagagactctggcctccacagttcgacctgcggctgctgtgtgccttcgcggtggaaggcccgaggggcgcgatcttgaccctaagaccggcggccatgatggtgctgacctctggtggccgatcggggcactgcaggggccgagccattttggggggcccccctccttgctctgcaggcaccttagtggcttttttcctcctgtgtacagggaagagaggggtacatttccctgtgctgacggaagccaacttggctttcccggactgcaagcagggctctgccccagaggcctctctctccgtcgtgggagagagacgtgtacatagtgtaggtcagcgtgcttagcctcctgacctgaggctcctgtgctactttgccttttgcaaactttattttcatagattgagaagttttgtacagagaattaaaaatgaaattatttataatctgggttttgtgtcttcagctgatggatgtgctgactagtgagagtgcttgggccctcccccagcacctagggaaaggcttcccctccccctccggccacaaggtacacaacttttaacttagctcttcccgatgtttgtttgttagtgggaggagtggggagggctggctgtatggcctccagcctacctgttccccctgctcccagggcacatggttgggctgtgtcaacccttagggcctccatggggtcagttgtcccttctcacctcccagctctgtccccatcaggtccctgggtggcacgggaggatggactgacttccaggacctgttgtgtgacaggagctacagcttgggtctccctgcaagaagtctggcacgtctcacctcccccatcccggcccctggtcatctcacagcaaagaagcctcctccctcccgacctgccgccacactggagagggggcacaggggcgggggaggtttcctgttctgtgaaaggccgactccctgactccattcatgcccccccccccagcccctcccttcattcccattccccaacctaaagcctggcccggctcccagctgaatctggtcggaatccacgggctgcagattttccaaaacaatcgttgtatctttattgacttttttttttttttttttctgaatgcaatgactgttttttactcttaaggaaaataaacatcttttagaaac

SEQ ID NO: 10748 - protein, 893 aa, Homo sapiens; identical to SEQ ID NO: 10740

SEQ ID NO: 10749 - DNA, 1339 bp, Homo sapiens
acccctgtcccctccccagcctgcacccactccattgaagatgtacccgtccatgcccgctttctcccctgggcctggtatcaaggaagagtcagtgccactgagcatcctgcagacccccaccccacagcccctgccaggggccctcctgccacagagcttcccagccccagccccaccgcagttcagctccaccctgctgtgtgccttcgcggtggaaggcccgaggggcgcgatcttgaccctaagaccggcggccatgatggtgctgacctctggtggccgatcggggcactgcaggggccgagccattttggggggcccccctccttgctctgcaggcaccttagtggcttttttcctcctgtgtacagggaagagaggggtacatttccctgtgctgacggaagccaacttggctttcccggactgcaagcagggctctgccccagaggcctctctctccgtcgtgggagagagacgtgtacatagtgtaggtcagcgtgcttagcctcctgacctgaggctcctgtgctactttgccttttgcaaactttattttcatagattgagaagttttgtacagagaattaaaaatgaaattatttataatctgggttttgtgtcttcagctgatggatgtgctgactagtgagagtgcttgggccctcccccagcacctagggaaaggcttcccctccccctccggccacaaggtacacaacttttaacttagctcttcccgatgtttgtttgttagtgggaggagtggggagggctggctgtatggcctccagcctacctgttccccctgctcccagggcacatggttgggctgtgtcaacccttagggcctccatggggtcagttgtcccttctcacctcccagctctgtccccatcaggtccctgggtggcacgggaggatggactgacttccaggacctgttgtgtgacaggagctacagcttgggtctccctgcaagaagtctggcacgtctcacctcccccatcccggcccctggtcatctcacagcaaagaagcctcctccctcccgacctgccgccacactggagagggggcacaggggcgggggaggtttcctgttctgtgaaaggccgactccctgactccattcatgcccccccccccagcccctcccttcattcccattccccaacctaaagcctggcccggctcccagctgaatctggtcggaatccacgggctgcagattttccaaaacaatcgttgtatctttattgacttttttttttttttttttctgaatgcaatgactgttttttactcttaaggaaaataaacatcttttagaaac

SEQ ID NO: 10750 - protein, 156 aa, Homo sapiens; identical to SEQ ID NO: 10742

SEQ ID NO: 10751 - DNA, 1253 bp, Homo sapiens
agtttccgaggaacttttcgccggcgccgggccgcctctgaggccagggcaggacacgaacgcgcggagcggcggcggcgactgagagccggggccgcggcggcgctccctaggaagggccgtacgaggcggcgggcccggcgggcctcccggaggaggcggctgcgccatggacgagccacccttcagcgaggcggctttggagcaggcgctgggcgagccgtgcgatctggacgcggcgctgctgaccgacatcgaaggtgctggcttttttcctcctgtgtacagggaagagaggggtacatttccctgtgctgacggaagccaacttggctttcccggactgcaagcagggctctgccccagaggcctctctctccgtcgtgggagagagacgtgtacatagtgtaggtcagcgtgcttagcctcctgacctgaggctcctgtgctactttgccttttgcaaactttattttcatagattgagaagttttgtacagagaattaaaaatgaaattatttataatctgggttttgtgtcttcagctgatggatgtgctgactagtgagagtgcttgggccctcccccagcacctagggaaaggcttcccctccccctccggccacaaggtacacaacttttaacttagctcttcccgatgtttgtttgttagtgggaggagtggggagggctggctgtatggcctccagcctacctgttccccctgctcccagggcacatggttgggctgtgtcaacccttagggcctccatggggtcagttgtcccttctcacctcccagctctgtccccatcaggtccctgggtggcacgggaggatggactgacttccaggacctgttgtgtgacaggagctacagcttgggtctccctgcaagaagtctggcacgtctcacctcccccatcccggcccctggtcatctcacagcaaagaagcctcctccctcccgacctgccgccacactggagagggggcacaggggcgggggaggtttcctgttctgtgaaaggccgactccctgactccattcatgcccccccccccagcccctcccttcattcccattccccaacctaaagcctggcccggctcccagctgaatctggtcggaatccacgggctgcagattttccaaaacaatcgttgtatctttattgacttttttttttttttttttctgaatgcaatgactgttttttactcttaaggaaaataaacatcttttagaaac

SEQ ID NO: 10752 - protein, 78 aa, Homo sapiens; identical to SEQ ID NO: 10744

SEQ ID NO: 10753 - DNA, 4910 bp, Homo sapiens
agcagagctgcggccgggggaacccagtttccgaggaacttttcgccggcgccgggccgcctctgaggccagggcaggacacgaacgcgcggagcggcggcggcgactgagagccggggccgcggcggcgctccctaggaagggccgtacgaggcggcgggcccggcgggcctcccggaggaggcggctgcgccatggacgagccacccttcagcgaggcggctttggagcaggcgctgggcgagccgtgcgatctggacgcggcgctgctgaccgacatcgaagacatgcttcagcttatcaacaaccaagacagtgacttccctggcctatttgacccaccctatgctgggagtggggcagggggcacagaccctgccagccccgataccagctccccaggcagcttgtctccacctcctgccacattgagctcctctcttgaagccttcctgagcgggccgcaggcagcgccctcacccctgtcccctccccagcctgcacccactccattgaagatgtacccgtccatgcccgctttctcccctgggcctggtatcaaggaagagtcagtgccactgagcatcctgcagacccccaccccacagcccctgccaggggccctcctgccacagagcttcccagccccagccccaccgcagttcagctccacccctgtgttaggctaccccagccctccgggaggcttctctacaggaagccctcccgggaacacccagcagccgctgcctggcctgccactggcttccccgccaggggtcccgcccgtctccttgcacacccaggtccagagtgtggtcccccagcagctactgacagtcacagctgcccccacggcagcccctgtaacgaccactgtgacctcgcagatccagcaggtcccggtcctgctgcagccccacttcatcaaggcagactcgctgcttctgacagccatgaagacagacggagccactgtgaaggcggcaggtctcagtcccctggtctctggcaccactgtgcagacagggcctttgccgaccctggtgagtggcggaaccatcttggcaacagtcccactggtcgtagatgcggagaagctgcctatcaaccggctcgcagctggcagcaaggccccggcctctgcccagagccgtggagagaagcgcacagcccacaacgccattgagaagcgctaccgctcctccatcaatgacaaaatcattgagctcaaggatctggtggtgggcactgaggcaaagctgaataaatctgctgtcttgcgcaaggccatcgactacattcgctttctgcaacacagcaaccagaaactcaagcaggagaacctaagtctgcgcactgctgtccacaaaagcaaatctctgaaggatctggtgtcggcctgtggcagtggagggaacacagacgtgctcatggagggcgtgaagactgaggtggaggacacactgaccccacccccctcggatgctggctcacctttccagagcagccccttgtcccttggcagcaggggcagtggcagcggtggcagtggcagtgactcggagcctgacagcccagtctttgaggacagcaaggcaaagccagagcagcggccgtctctgcacagccggggcatgctggaccgctcccgcctggccctgtgcacgctcgtcttcctctgcctgtcctgcaaccccttggcctccttgctgggggcccgggggcttcccagcccctcagataccaccagcgtctaccatagccctgggcgcaacgtgctgggcaccgagagcagagatggccctggctgggcccagtggctgctgcccccagtggtctggctgctcaatgggctgttggtgctcgtctccttggtgcttctctttgtctacggtgagccagtcacacggccccactcaggccccgccgtgtacttctggaggcatcgcaagcaggctgacctggacctggcccggggagactttgcccaggctgcccagcagctgtggctggccctgcgggcactgggccggcccctgcccacctcccacctggacctggcttgtagcctcctctggaacctcatccgtcacctgctgcagcgtctctgggtgggccgctggctggcaggccgggcagggggcctgcagcaggactgtgctctgcgagtggatgctagcgccagcgcccgagacgcagccctggtctaccataagctgcaccagctgcacaccatggggaagcacacaggcgggcacctcactgccaccaacctggcgctgagtgccctgaacctggcagagtgtgcaggggatgccgtgtctgtggcgacgctggccgagatctatgtggcggctgcattgagagtgaagaccagtctcccacgggccttgcattttctgacacgcttcttcctgagcagtgcccgccaggcctgcctggcacagagtggctcagtgcctcctgccatgcagtggctctgccaccccgtgggccaccgtttcttcgtggatggggactggtccgtgctcagtaccccatgggagagcctgtacagcttggccgggaacccagtggaccccctggcccaggtgactcagctattccgggaacatctcttagagcgagcactgaactgtgtgacccagcccaaccccagccctgggtcagctgatggggacaaggaattctcggatgccctcgggtacctgcagctgctgaacagctgttctgatgctgcgggggctcctgcctacagcttctccatcagttccagcatggccaccaccaccggcgtagacccggtggccaagtggtgggcctctctgacagctgtggtgatccactggctgcggcgggatgaggaggcggctgagcggctgtgcccgctggtggagcacctgccccgggtgctgcaggagtctgagagacccctgcccagggcagctctgcactccttcaaggctgcccgggccctgctgggctgtgccaaggcagagtctggtccagccagcctgaccatctgtgagaaggccagtgggtacctgcaggacagcctggctaccacaccagccagcagctccattgacaaggccgtgcagctgttcctgtgtgacctgcttcttgtggtgcgcaccagcctgtggcggcagcagcagcccccggccccggccccagcagcccagggcaccagcagcaggccccaggcttccgcccttgagctgcgtggcttccaacgggacctgagcagcctgaggcggctggcacagagcttccggcccgccatgcggagggtgttcctacatgaggccacggcccggctgatggcgggggccagccccacacggacacaccagctcctcgaccgcagtctgaggcggcgggcaggccccggtggcaaaggaggcgcggtggcggagctggagccgcggcccacgcggcgggagcacgcggaggccttgctgctggcctcctgctacctgccccccggcttcctgtcggcgcccgggcagcgcgtgggcatgctggctgaggcggcgcgcacactcgagaagcttggcgatcgccggctgctgcacgactgtcagcagatgctcatgcgcctgggcggtgggaccactgtcacttccagctagaccccgtgtccccggcctcagcacccctgtctctagccactttggtcccgtgcagcttctgtcctgcgtcgaagctttgaaggccgaaggcagtgcaagagactctggcctccacagttcgacctgcggctgctgtgtgccttcgcggtggaaggcccgaggggcgcgatcttgaccctaagaccggcggccatgatggtgctgacctctggtggccgatcggggcactgcaggggccgagccattttggggggcccccctccttgctctgcaggcaccttagtggcttttttcctcctgtgtacagggaagagaggggtacatttccctgtgctgacggaagccaacttggctttcccggactgcaagcagggctctgccccagaggcctctctctccgtcgtgggagagagacgtgtacatagtgtaggtcagcgtgcttagcctcctgacctgaggctcctgtgctactttgccttttgcaaactttattttcatagattgagaagttttgtacagagaattaaaaatgaaattatttataatctgggttttgtgtcttcagctgatggatgtgctgactagtgagagtgcttgggccctcccccagcacctagggaaaggcttcccctccccctccggccacaaggtacacaacttttaacttagctcttcccgatgtttgtttgttagtgggaggagtggggagggctggctgtatggcctccagcctacctgttccccctgctcccagggcacatggttgggctgtgtcaacccttagggcctccatggggtcagttgtcccttctcacctcccagctctgtccccatcaggtccctgggtggcacgggaggatggactgacttccaggacctgttgtgtgacaggagctacagcttgggtctccctgcaagaagtctggcacgtctcacctcccccatcccggcccctggtcatctcacagcaaagaagcctcctccctcccgacctgccgccacactggagagggggcacaggggcgggggaggtttcctgttctgtgaaaggccgactccctgactccattcatgcccccccccccagcccctcccttcattcccattccccaacctaaagcctggcccggctcccagctgaatctggtcggaatccacgggctgcagattttccaaaacaatcgttgtatctttattgacttttttttttttttttttctgaatgcaatgactgttttttactcttaaggaaaataaacatcttttagaaac

SEQ ID NO: 10754 - protein, 1147 aa, Homo sapiens; identical to SEQ ID NO: 1740

SEQ ID NO: 10755 - DNA, 3697 bp, Homo sapiens
gttactagcagtcctggtgtgcttgttgccggggtaggcgcaacctcgcactggaggcctggcttgaagccagtgcatttgcatcagagcccaggcagggactgtccataggaagccacatggggcaatgactcatccaaggccagtcggtgatagagacctgaagagcaggttgaaagtgggagagggaggtctgtgtctgcagccccatgctttatttctgcaggaagccctcccgggaacacccagcagccgctgcctggcctgccactggcttccccgccaggggtcccgcccgtctccttgcacacccaggtccagagtgtggtcccccagcagctactgacagtcacagctgcccccacggcagcccctgtaacgaccactgtgacctcgcagatccagcaggtcccggtcctgctgcagccccacttcatcaaggcagactcgctgcttctgacagccatgaagacagacggagccactgtgaaggcggcaggtctcagtcccctggtctctggcaccactgtgcagacagggcctttgccgaccctggtgagtggcggaaccatcttggcaacagtcccactggtcgtagatgcggagaagctgcctatcaaccggctcgcagctggcagcaaggccccggcctctgcccagagccgtggagagaagcgcacagcccacaacgccattgagaagcgctaccgctcctccatcaatgacaaaatcattgagctcaaggatctggtggtgggcactgaggcaaagctgaataaatctgctgtcttgcgcaaggccatcgactacattcgctttctgcaacacagcaaccagaaactcaagcaggagaacctaagtctgcgcactgctgtccacaaaagcaaatctctgaaggatctggtgtcggcctgtggcagtggagggaacacagacgtgctcatggagggcgtgaagactgaggtggaggacacactgaccccacccccctcggatgctggctcacctttccagagcagccccttgtcccttggcagcaggggcagtggcagcggtggcagtggcagtgactcggagcctgacagcccagtctttgaggacagcaaggcaaagccagagcagcggccgtctctgcacagccggggcatgctggaccgctcccgcctggccctgtgcacgctcgtcttcctctgcctgtcctgcaaccccttggcctccttgctgggggcccgggggcttcccagcccctcagataccaccagcgtctaccatagccctgggcgcaacgtgctgggcaccgagagcagagatggccctggctgggcccagtggctgctgcccccagtggtctggctgctcaatgggctgttggtgctcgtctccttggtgcttctctttgtctacggtgagccagtcacacggccccactcaggccccgccgtgtacttctggaggcatcgcaagcaggctgacctggacctggcccggggagactttgcccaggctgcccagcagctgtggctggccctgcgggcactgggccggcccctgcccacctcccacctggacctggcttgtagcctcctctggaacctcatccgtcacctgctgcagcgtctctgggtgggccgctggctggcaggccgggcagggggcctgcagcaggactgtgctctgcgagtggatgctagcgccagcgcccgagacgcagccctggtctaccataagctgcaccagctgcacaccatggggaagcacacaggcgggcacctcactgccaccaacctggcgctgagtgccctgaacctggcagagtgtgcaggggatgccgtgtctgtggcgacgctggccgagatctatgtggcggctgcattgagagtgaagaccagtctcccacgggccttgcattttctgacacgcttcttcctgagcagtgcccgccaggcctgcctggcacagagtggctcagtgcctcctgccatgcagtggctctgccaccccgtgggccaccgtttcttcgtggatggggactggtccgtgctcagtaccccatgggagagcctgtacagcttggccgggaacccagtggaccccctggcccaggtgactcagctattccgggaacatctcttagagcgagcactgaactgtgtgacccagcccaaccccagccctgggtcagctgatggggacaaggaattctcggatgccctcgggtacctgcagctgctgaacagctgttctgatgctgcgggggctcctgcctacagcttctccatcagttccagcatggccaccaccaccggcgtagacccggtggccaagtggtgggcctctctgacagctgtggtgatccactggctgcggcgggatgaggaggcggctgagcggctgtgcccgctggtggagcacctgccccgggtgctgcaggagtctgagagacccctgcccagggcagctctgcactccttcaaggctgcccgggccctgctgggctgtgccaaggcagagtctggtccagccagcctgaccatctgtgagaaggccagtgggtacctgcaggacagcctggctaccacaccagccagcagctccattgacaaggccgtgcagctgttcctgtgtgacctgcttcttgtggtgcgcaccagcctgtggcggcagcagcagcccccggccccggccccagcagcccagggcaccagcagcaggccccaggcttccgcccttgagctgcgtggcttccaacgggacctgagcagcctgaggcggctggcacagagcttccggcccgccatgcggagggtgttcctacatgaggccacggcccggctgatggcgggggccagccccacacggacacaccagctcctcgaccgcagtctgaggcggcgggcaggccccggtggcaaaggaggcgcggtggcggagctggagccgcggcccacgcggcgggagcacgcggaggccttgctgctggcctcctgctacctgccccccggcttcctgtcggcgcccgggcagcgcgtgggcatgctggctgaggcggcgcgcacactcgagaagcttggcgatcgccggctgctgcacgactgtcagcagatgctcatgcgcctgggcggtgggaccactgtcacttccagctagaccccgtgtccccggcctcagcacccctgtctctagccactttggtcccgtgcagcttctgtcctgcgtcgaagctttgaaggccgaaggcagtgcaagagactctggcctccacagttcgacctgcggctgctgtgtgccttcgcggtggaaggcccgaggggcgcgatcttgaccctaagaccggcggccatgatggtgctgacctctggtggccgatcggggcactgcaggggccgagccattttggggggcccccctccttgctctgcaggcaccttagtggcttttttcctcctgtgtacagggaagagaggggtacatttccctgtgctgacggaagccaacttggctttcccggactgcaagcagggctctgccccagaggcctctctctccgtcgtgggagagagacgtgtacatagtgtaggtcagcgtgcttagcctcctgacctgaggctcctgtgctactttgccttttgcaaactttattttcatagattgagaagttttgtacagagaattaaaaatgaaattatttataatctgg

SEQ ID NO: 10756 - protein, 893 aa, Homo sapiens; identical to SEQ ID NO: 10740

SEQ ID NO: 10757 - DNA, 4254 bp, Homo sapiens
cagtttccgaggaacttttcgccggcgccgggccgcctctgaggccagggcaggacacgaacgcgcggagcggcggcggcgactgagagccggggccgcggcggcgctccctaggaagggccgtacgaggcggcgggcccggcgggcctcccggaggaggcggctgcgccatggacgagccacccttcagcgaggcggctttggagcaggcgctgggcgagccgtgcgatctggacgcggcgctgctgaccgacatcgaaggtgaagtcggcgcggggaggggtagggccaacggcctggacgccccaagggcgggcgcagatcgcggagccatggattgcactttcgaagacatgcttcagcttatcaacaaccaagacagtgacttccctggcctatttgacccaccctatgctgggagtggggcagggggcacagaccctgccagccccgataccagctccccaggcagcttgtctccacctcctgccacattgagctcctctcttgaagccttcctgagcgggccgcaggcagcgccctcacccctgtcccctccccagcctgcacccactccattgaagatgtacccgtccatgcccgctttctcccctgggcctggtatcaaggaagagtcagtgccactgagcatcctgcagacccccaccccacagcccctgccaggggccctcctgccacagagcttcccagccccagccccaccgcagttcagctccacccctgtgttaggctaccccagccctccgggaggcttctctacaggaagccctcccgggaacacccagcagccgctgcctggcctgccactggcttccccgccaggggtcccgcccgtctccttgcacacccaggtccagagtgtggtcccccagcagctactgacagtcacagctgcccccacggcagcccctgtaacgaccactgtgacctcgcagatccagcaggtcccggtcctgctgcagccccacttcatcaaggcagactcgctgcttctgacagccatgaagacagacggagccactgtgaaggcggcaggtctcagtcccctggtctctggcaccactgtgcagacagggcctttgccgaccctggtgagtggcggaaccatcttggcaacagtcccactggtcgtagatgcggagaagctgcctatcaaccggctcgcagctggcagcaaggccccggcctctgcccagagccgtggagagaagcgcacagcccacaacgccattgagaagcgctaccgctcctccatcaatgacaaaatcattgagctcaaggatctggtggtgggcactgaggcaaagctgaataaatctgctgtcttgcgcaaggccatcgactacattcgctttctgcaacacagcaaccagaaactcaagcaggagaacctaagtctgcgcactgctgtccacaaaagcaaatctctgaaggatctggtgtcggcctgtggcagtggagggaacacagacgtgctcatggagggcgtgaagactgaggtggaggacacactgaccccacccccctcggatgctggctcacctttccagagcagccccttgtcccttggcagcaggggcagtggcagcggtggcagtggcagtgactcggagcctgacagcccagtctttgaggacagcaaggcaaagccagagcagcggccgtctctgcacagccggggcatgctggaccgctcccgcctggccctgtgcacgctcgtcttcctctgcctgtcctgcaaccccttggcctccttgctgggggcccgggggcttcccagcccctcagataccaccagcgtctaccatagccctgggcgcaacgtgctgggcaccgagagcagagatggccctggctgggcccagtggctgctgcccccagtggtctggctgctcaatgggctgttggtgctcgtctccttggtgcttctctttgtctacggtgagccagtcacacggccccactcaggccccgccgtgtacttctggaggcatcgcaagcaggctgacctggacctggcccggggagactttgcccaggctgcccagcagctgtggctggccctgcgggcactgggccggcccctgcccacctcccacctggacctggcttgtagcctcctctggaacctcatccgtcacctgctgcagcgtctctgggtgggccgctggctggcaggccgggcagggggcctgcagcaggactgtgctctgcgagtggatgctagcgccagcgcccgagacgcagccctggtctaccataagctgcaccagctgcacaccatggggaagcacacaggcgggcacctcactgccaccaacctggcgctgagtgccctgaacctggcagagtgtgcaggggatgccgtgtctgtggcgacgctggccgagatctatgtggcggctgcattgagagtgaagaccagtctcccacgggccttgcattttctgacacgcttcttcctgagcagtgcccgccaggcctgcctggcacagagtggctcagtgcctcctgccatgcagtggctctgccaccccgtgggccaccgtttcttcgtggatggggactggtccgtgctcagtaccccatgggagagcctgtacagcttggccgggaacccagtggaccccctggcccaggtgactcagctattccgggaacatctcttagagcgagcactgaactgtgtgacccagcccaaccccagccctgggtcagctgatggggacaaggaattctcggatgccctcgggtacctgcagctgctgaacagctgttctgatgctgcgggggctcctgcctacagcttctccatcagttccagcatggccaccaccaccggcgtagacccggtggccaagtggtgggcctctctgacagctgtggtgatccactggctgcggcgggatgaggaggcggctgagcggctgtgcccgctggtggagcacctgccccgggtgctgcaggagtctgagagacccctgcccagggcagctctgcactccttcaaggctgcccgggccctgctgggctgtgccaaggcagagtctggtccagccagcctgaccatctgtgagaaggccagtgggtacctgcaggacagcctggctaccacaccagccagcagctccattgacaaggccgtgcagctgttcctgtgtgacctgcttcttgtggtgcgcaccagcctgtggcggcagcagcagcccccggccccggccccagcagcccagggcaccagcagcaggccccaggcttccgcccttgagctgcgtggcttccaacgggacctgagcagcctgaggcggctggcacagagcttccggcccgccatgcggagggtgttcctacatgaggccacggcccggctgatggcgggggccagccccacacggacacaccagctcctcgaccgcagtctgaggcggcgggcaggccccggtggcaaaggaggcgcggtggcggagctggagccgcggcccacgcggcgggagcacgcggaggccttgctgctggcctcctgctacctgccccccggcttcctgtcggcgcccgggcagcgcgtgggcatgctggctgaggcggcgcgcacactcgagaagcttggcgatcgccggctgctgcacgactgtcagcagatgctcatgcgcctgggcggtgggaccactgtcacttccagctagaccccgtgtccccggcctcagcacccctgtctctagccactttggtcccgtgcagcttctgtcctgcgtcgaagctttgaaggccgaaggcagtgcaagagactctggcctccacagttcgacctgcggctgctgtgtgccttcgcggtggaaggcccgaggggcgcgatcttgaccctaagaccggcggccatgatggtgctgacctctggtggccgatcggggcactgcaggggccgagccattttggggggcccccctccttgctctgcaggcaccttagtggcttttttcctcctgtgtacagggaagagaggggtacatttccctgtgctgacggaagccaacttggctttcccggactgcaagcagggctctgccccagaggcctctctctccgtcgtgggagagagacgtgtacatagtgtaggtcagcgtgcttagcctcctgacctgaggctcctgtgctactttgccttttgcaaactttattttcatagattgagaagttttgtacagagaattaaaaatgaaattatttataatctgg

SEQ ID NO: 10758 - protein, 1177 aa, Homo sapiens; identical to SEQ ID NO: 1738

SEQ ID NO: 10759 - DNA, 4188 bp, Homo sapiens
agcagagctgcggccgggggaacccagtttccgaggaacttttcgccggcgccgggccgcctctgaggccagggcaggacacgaacgcgcggagcggcggcggcgactgagagccggggccgcggcggcgctccctaggaagggccgtacgaggcggcgggcccggcgggcctcccggaggaggcggctgcgccatggacgagccacccttcagcgaggcggctttggagcaggcgctgggcgagccgtgcgatctggacgcggcgctgctgaccgacatcgaagacatgcttcagcttatcaacaaccaagacagtgacttccctggcctatttgacccaccctatgctgggagtggggcagggggcacagaccctgccagccccgataccagctccccaggcagcttgtctccacctcctgccacattgagctcctctcttgaagccttcctgagcgggccgcaggcagcgccctcacccctgtcccctccccagcctgcacccactccattgaagatgtacccgtccatgcccgctttctcccctgggcctggtatcaaggaagagtcagtgccactgagcatcctgcagacccccaccccacagcccctgccaggggccctcctgccacagagcttcccagccccagccccaccgcagttcagctccacccctgtgttaggctaccccagccctccgggaggcttctctacaggaagccctcccgggaacacccagcagccgctgcctggcctgccactggcttccccgccaggggtcccgcccgtctccttgcacacccaggtccagagtgtggtcccccagcagctactgacagtcacagctgcccccacggcagcccctgtaacgaccactgtgacctcgcagatccagcaggtcccggtcctgctgcagccccacttcatcaaggcagactcgctgcttctgacagccatgaagacagacggagccactgtgaaggcggcaggtctcagtcccctggtctctggcaccactgtgcagacagggcctttgccgaccctggtgagtggcggaaccatcttggcaacagtcccactggtcgtagatgcggagaagctgcctatcaaccggctcgcagctggcagcaaggccccggcctctgcccagagccgtggagagaagcgcacagcccacaacgccattgagaagcgctaccgctcctccatcaatgacaaaatcattgagctcaaggatctggtggtgggcactgaggcaaagctgaataaatctgctgtcttgcgcaaggccatcgactacattcgctttctgcaacacagcaaccagaaactcaagcaggagaacctaagtctgcgcactgctgtccacaaaagcaaatctctgaaggatctggtgtcggcctgtggcagtggagggaacacagacgtgctcatggagggcgtgaagactgaggtggaggacacactgaccccacccccctcggatgctggctcacctttccagagcagccccttgtcccttggcagcaggggcagtggcagcggtggcagtggcagtgactcggagcctgacagcccagtctttgaggacagcaaggcaaagccagagcagcggccgtctctgcacagccggggcatgctggaccgctcccgcctggccctgtgcacgctcgtcttcctctgcctgtcctgcaaccccttggcctccttgctgggggcccgggggcttcccagcccctcagataccaccagcgtctaccatagccctgggcgcaacgtgctgggcaccgagagcagagatggccctggctgggcccagtggctgctgcccccagtggtctggctgctcaatgggctgttggtgctcgtctccttggtgcttctctttgtctacggtgagccagtcacacggccccactcaggccccgccgtgtacttctggaggcatcgcaagcaggctgacctggacctggcccggggagactttgcccaggctgcccagcagctgtggctggccctgcgggcactgggccggcccctgcccacctcccacctggacctggcttgtagcctcctctggaacctcatccgtcacctgctgcagcgtctctgggtgggccgctggctggcaggccgggcagggggcctgcagcaggactgtgctctgcgagtggatgctagcgccagcgcccgagacgcagccctggtctaccataagctgcaccagctgcacaccatggggaagcacacaggcgggcacctcactgccaccaacctggcgctgagtgccctgaacctggcagagtgtgcaggggatgccgtgtctgtggcgacgctggccgagatctatgtggcggctgcattgagagtgaagaccagtctcccacgggccttgcattttctgacacgcttcttcctgagcagtgcccgccaggcctgcctggcacagagtggctcagtgcctcctgccatgcagtggctctgccaccccgtgggccaccgtttcttcgtggatggggactggtccgtgctcagtaccccatgggagagcctgtacagcttggccgggaacccagtggaccccctggcccaggtgactcagctattccgggaacatctcttagagcgagcactgaactgtgtgacccagcccaaccccagccctgggtcagctgatggggacaaggaattctcggatgccctcgggtacctgcagctgctgaacagctgttctgatgctgcgggggctcctgcctacagcttctccatcagttccagcatggccaccaccaccggcgtagacccggtggccaagtggtgggcctctctgacagctgtggtgatccactggctgcggcgggatgaggaggcggctgagcggctgtgcccgctggtggagcacctgccccgggtgctgcaggagtctgagagacccctgcccagggcagctctgcactccttcaaggctgcccgggccctgctgggctgtgccaaggcagagtctggtccagccagcctgaccatctgtgagaaggccagtgggtacctgcaggacagcctggctaccacaccagccagcagctccattgacaaggccgtgcagctgttcctgtgtgacctgcttcttgtggtgcgcaccagcctgtggcggcagcagcagcccccggccccggccccagcagcccagggcaccagcagcaggccccaggcttccgcccttgagctgcgtggcttccaacgggacctgagcagcctgaggcggctggcacagagcttccggcccgccatgcggagggtgttcctacatgaggccacggcccggctgatggcgggggccagccccacacggacacaccagctcctcgaccgcagtctgaggcggcgggcaggccccggtggcaaaggaggcgcggtggcggagctggagccgcggcccacgcggcgggagcacgcggaggccttgctgctggcctcctgctacctgccccccggcttcctgtcggcgcccgggcagcgcgtgggcatgctggctgaggcggcgcgcacactcgagaagcttggcgatcgccggctgctgcacgactgtcagcagatgctcatgcgcctgggcggtgggaccactgtcacttccagctagaccccgtgtccccggcctcagcacccctgtctctagccactttggtcccgtgcagcttctgtcctgcgtcgaagctttgaaggccgaaggcagtgcaagagactctggcctccacagttcgacctgcggctgctgtgtgccttcgcggtggaaggcccgaggggcgcgatcttgaccctaagaccggcggccatgatggtgctgacctctggtggccgatcggggcactgcaggggccgagccattttggggggcccccctccttgctctgcaggcaccttagtggcttttttcctcctgtgtacagggaagagaggggtacatttccctgtgctgacggaagccaacttggctttcccggactgcaagcagggctctgccccagaggcctctctctccgtcgtgggagagagacgtgtacatagtgtaggtcagcgtgcttagcctcctgacctgaggctcctgtgctactttgccttttgcaaactttattttcatagattgagaagttttgtacagagaattaaaaatgaaattatttataatctgg

SEQ ID NO: 10760 - protein, 1147 aa, Homo sapiens; identical to SEQ ID NO: 1740

SEQ ID NO: 10761 - DNA, 616 bp, Homo sapiens
acccctgtcccctccccagcctgcacccactccattgaagatgtacccgtccatgcccgctttctcccctgggcctggtatcaaggaagagtcagtgccactgagcatcctgcagacccccaccccacagcccctgccaggggccctcctgccacagagcttcccagccccagccccaccgcagttcagctccaccctgctgtgtgccttcgcggtggaaggcccgaggggcgcgatcttgaccctaagaccggcggccatgatggtgctgacctctggtggccgatcggggcactgcaggggccgagccattttggggggcccccctccttgctctgcaggcaccttagtggcttttttcctcctgtgtacagggaagagaggggtacatttccctgtgctgacggaagccaacttggctttcccggactgcaagcagggctctgccccagaggcctctctctccgtcgtgggagagagacgtgtacatagtgtaggtcagcgtgcttagcctcctgacctgaggctcctgtgctactttgccttttgcaaactttattttcatagattgagaagttttgtacagagaattaaaaatgaaattatttataatctg

SEQ ID NO: 10762 - protein, 156 aa, Homo sapiens; identical to SEQ ID NO: 10742

SEQ ID NO: 10763 - DNA, 530 bp, Homo sapiens
agtttccgaggaacttttcgccggcgccgggccgcctctgaggccagggcaggacacgaacgcgcggagcggcggcggcgactgagagccggggccgcggcggcgctccctaggaagggccgtacgaggcggcgggcccggcgggcctcccggaggaggcggctgcgccatggacgagccacccttcagcgaggcggctttggagcaggcgctgggcgagccgtgcgatctggacgcggcgctgctgaccgacatcgaaggtgctggcttttttcctcctgtgtacagggaagagaggggtacatttccctgtgctgacggaagccaacttggctttcccggactgcaagcagggctctgccccagaggcctctctctccgtcgtgggagagagacgtgtacatagtgtaggtcagcgtgcttagcctcctgacctgaggctcctgtgctactttgccttttgcaaactttattttcatagattgagaagttttgtacagagaattaaaaatgaaattatttataatctg

SEQ ID NO: 10764 - protein, 78 aa, Homo sapiens; identical to SEQ ID NO: 10744

SEQ ID NO: 10765 - DNA, 298 bp, Homo sapiens
gggccaacggcctggacgccccaagggcgggcgcagatcgcggagccatggattgcactttcgaagacatgcttcagcttatcaacaaccaagacagtgacttccctggcctatttgacccaccctatgctgggagtggggcagggggcacagaccctgccagccccgataccagctccccaggcagcttgtctccacctcctgacctgaggctcctgtgctactttgccttttgcaaactttattttcatagattgagaagttttgtacagagaattaaaaatgaaattatttataa

SEQ ID NO: 10766 - protein, 82 aa, Homo sapiens
MDCTFEDMLQLINNQDSDFPGLFDPPYAGSGAGGTDPASPDTSSPGSLSPPPDLRLLCYFAFCKLYFHRLRSFVQRIKNEII

SEQ ID NO: 10767 - DNA, 234 bp, Homo sapiens
cctggctgggcccagtggctgctgcccccagtggtctggctgctcaatgggctgttggtgctcgtctccttggtgcttctctttgtctacggtgagccagtcacacggccccactcaggccccgcccgtgcttagcctcctgacctgaggctcctgtgctactttgccttttgcaaactttattttcatagattgagaagttttgtacagagaattaaaaatgaaattatttat

SEQ ID NO: 10768 - protein, 33 aa, Homo sapiens
MGCWCSSPWCFSLSTVSQSHGPTQAPPVLSLLT

SEQ ID NO: 10769 - DNA, 591 bp, Homo sapiens
ggggaggggtagggccaacggcctggacgccccaagggcgggcgcagatcgcggagccatggattgcactttcgaagacatgcttcagcttatcaacaaccaagacagtgacttccctggcctatttgacccaccctatgctgggagtggggcagggggcacagaccctgccagccccgataccagctccccaggcagcttgtctccacctcctgccacattgagctcctctcttgaagccttcctgagcgggccgcaggcagcgccctcacccctgtcccctccccagcctgcacccactccattgaagatgtacccgtccatgcccgctttctcccctgggcctggtatcaaggaagagtcagtgccactgagcatcctgcagacccccaccccacagcccctgccaggggccctcctgccacagagcttcccagccccagccccaccgcagttcagctccacccctgtgttaggctaccccagccctccgggaggcttctctacaggtaagggggatgtgtggcgggaggggacacccggggtggggcttccaggagcacaggaagaagcttctgctgtgatgtgagt

SEQ ID NO: 10770 - protein, 176 aa, Homo sapiens
MDCTFEDMLQLINNQDSDFPGLFDPPYAGSGAGGTDPASPDTSSPGSLSPPPATLSSSLEAFLSGPQAAPSPLSPPQPAPTPLKMYPSMPAFSPGPGIKEESVPLSILQTPTPQPLPGALLPQSFPAPAPPQFSSTPVLGYPSPPGGFSTGKGDVWREGTPGVGLPGAQEEASAVM

SEQ ID NO: 10771 - DNA, 381 bp, Homo sapiens
ctcgaccgcccagcagagctgcggccgggggaacccagtttccgaggaacttttcgccggcgccgggccgcctctgaggccagggcaggacacgaacgcgcggagcggcggcggcgactgagagccggggccgcggcggcgctccctaggaagggccgtacgaggcggcgggcccggcgggcctcccggaggaggcggctgcgccatggacgagccacccttcagcgaggcggctttggagcaggcgctgggcgagccgtgcgatctggacgcggcgctgctgaccgacatcgaagacatgcttcagcttatcaacaaccaagacagtgacttccctggcctatttgacccaccctatgctgggagtggggcagggggcac

SEQ ID NO: 10772 - protein, 57 aa, Homo sapiens
MDEPPFSEAALEQALGEPCDLDAALLTDIEDMLQLINNQDSDFPGLFDPPYAGSGAG

SEQ ID NO: 10773 - DNA, 535 bp, Homo sapiens
tggcacaggattggcacacagtagatattgtcagagatggatctgggttctgtggacaaggctgtgggggcaggtgaagagctccctcttccaggaggttgtttggggttcaaggccttgtttgggttgtaggcttctgtgctggtcagcgttgggccctacaagcgcatgccatgaggcctgcccaggatttccctcatggcctcacagaatacatcggccagagtcattaaagggcgcctggggaaggtgaactagggagcagttggggccaccatggcccagagtctatgcctcctcttccttcctgtgttcagagtgtgtgtgggaaccacaagggccttctcagtgttcatagggaagcccggttcacccatgggtgggccgcaatttgggtgccacagtgagcccctagagaccagctctcccagcttccaggacagggactaggggaggcaagagaggctcttccttaaattgtgcacccaaggtgcctcagctgccttactctagactggccccgttaactcccctt

SEQ ID NO: 10774 - protein, 57 aa, Homo sapiens
MAQSLCLLFLPVFRVCVGTTRAFSVFIGKPGSPMGGPQFGCHSEPLETSSPSFQDRD

SEQ ID NO: 10775 - DNA, 543 bp, Homo sapiens
tccacctgccctgccaaattagaggctgggcctcagctgggggcccctcctgtcagggcctgaaccagctgtgaccccagcctcacccagcacagggctgaccacagcagggaccccagtcagaggccgtgcagactccagccatggcttcctccaccctcgtctgcctccacccccatcccctaactggtgtctccctgggcctccctttccctgcctgctttctgaacaccacaagctattgaaggccaggctgttccctccaccaggaatgccctttccacctggtgaattcctattcctccatcaaaacttgctctgatgccacctcccattcttcccttgtctgtgcccctccacatgccagagctgaaaacaacccacgggcctgatgcagtggcaattctgggagtagcccctgctgctgggcacctgttttcagtcaaaatggcagtgctaaggttaggcgcaggggctcacacctgtaataacagcactttgggaggcaaaggcaggcagatcacttgagcccaggagttcaag

SEQ ID NO: 10776 - protein, 68 aa, Homo sapiens
MPPPILPLSVPLHMPELKTTHGPDAVAILGVAPAAGHLFSVKMAVLRLGAGAHTCNNSTLGGKGRQIT

SEQ ID NO: 10777 - DNA, 4724 bp, Homo sapiens
gaagttagaaggtgttttgcagccccgggctgagaggccccgcaatgtgagagtggacactcatagtcaaaaagttctccatttcaagaacgcgtacagccaccttccttaccgccggccctgccgggagcctgcttcttatcatttgcacctcattgctttcctcacctgccatctcacacgtggctgccctgtgttgcccctgtgtgctgtgccaattgtgtttttttgctctgtgtacattttggttttatttggggttgctgttgatgatttcctttgttccggtgttctgtctcccctcgctggctgtgtgggggctgcctggcccgctgcttgccgcctccatagatccccgttgcgcagccatctgtcatggacgacattgaggtgtggctcaggaccgacctgaagggtgatgatctggaggagggtgtcacaagtgaagagtttgataaattccttgaagaaagagccaaagctgctgaaatggttcccgacctcccctcgccccccatggaggctcctgccccagcctcaaacccttctggccggaagaagccagagcggtcagaggatgccctcttcgccctgtgagcagctctgtggtttgcctccccagatggcgggtccccgctcgcaccccgtggacaccgggcactggccactcctacatccccagctccacacggcctgcacacctgtgtttccatggaaatgccaccgtgtctgctcccaggcctcccactagtcaggaccagcttcagccacttcttttctctgagtggtgggacaactgcagccagagactctctcccctcccaccatgggcccctctgcccatgtttcctcccaggaagagcgggcagagtggcccagccccaggcagtgcttcctgagcagaccacccggactgtctttcctccacccgcccatggagaaagagcacgcccggccccgccctgtgctcacctctgcctggctcagcgaccttctcaggcattctgccctcctgggcccctctctccctgaaggggctttgtggcatctctggaagagcagggtgtgctgcactcatgggcctggtctcactccttggacttgtcaccttgtgacatttggcttatcagcatttgagaaggctctgctgggtctccatggtgggggtctctcaccttcttgaccctctctccatcattcagctgccagcccaggcttcacacccaagctggctcagcagccgagcctggcaccgagggtccctgcaggctccctgggcagggagagggccaaggacaattgggagggcagcaggcagcccgcagatggtggccatgtggcacgctgctgagacgacactaccaataaaccaaactgccacgcacacactgcaggctcacacccgcacacctggtcctggcttgtggagggacttgcactggaggtattgctctggcttgcctggggaagtgtcacagatgtgcacatgggccacactcagtgctgtggcctggcctgccgtagcctcacacatctgcctcaagagccagcagcaaacagctttgtggcatccttggaggttcccagtgactgagaggcctgggcagcactaaggcccctgctctgctccctggcataggccttggcctccttgcacagactctcctgacagtctggcctcctcccacctcagaggtcctctggccaccaatttatactctctccccaagctgatcctgaaggcaggcagagcagctaggggctggtaacatgtattcccatcccgtgtcctcactggtgtgtctcctggccatgggcaagggactcgggtcatcccaggccctggtccagccagacacctggccccacacctcccaccaggctgctgttgctcagaaggagaatactgcagctgtatgcatccccgtgtgtcttgggcccagctcgctgggtcagtctgctcctgtcccctccagcatgcactgcctaggtcagcacaggttcctgatccatggtgtagttagcccttcccacctggcaggacggcccagaccaccagccaagcagggaaagggggctgggcttgacgggagaagagaccagcgacatggtcgttggggagcattcaggatggcgacttcagctgggggtcatgctgagcaccaacaggaactattccagtgaagagcaagtgctgcccgacccaggaccctgtgccaggctagcagccctccagctccctccagagaggaaacctctgtctggctgagggtgggactagctgggatgtctcactccagttgctcaggttcacccaggaagctcctccgtggagtggccagcctgattctagccctgtcctctctggcagcacatgccacacctgcctgggccttctgctccctgatgcttgatgagcccctgcctcctcaatgtttctcaaagacagacccccctgaggccagcttgaatgtgaagactgctgaagttagctggcttcacttgagctgcagaaaaggtggctgggatggcccaggtgcacccagaggccccagccctttggctgcctttgggttgtgacttgggttgtctctgaggccctgccagagctgggcctgcgggtggtgggcggtccgacctcgggcagtcagtgctccgcagcctcagcactgcatcccagacccagtgtcctcagagggaagagccagcctccctgcctcatggaaccaggagtcccaaaaagtcaggagcctggaggctctgaaaggagcagggattccatagtgcgtgaagctgaaataggcgccctcctggggagcccccagcaaaactgtttttcatacccactcccagaactgccccgctccagctccagcgccagcgccagctggttgccaggcatcattggagaggcctggctgccccaggggcagcagggagtggtggacctgtatgggctggcaggaggccattggccatgctgacaagtgtcacctgccttcctagcctggagccacccctcaggtggcctgcttgcacctcctatccggaggtagcctgccccacctgtaggcagagggggctcttgcttgaggcctgcacaggaagcaagtatagccccggtgccccagagtgggttccacttagccctggcgagatggcctgtcctgagatctctgctcccagaccccaccatctggggagcacagtccttaggctgcctggtccaggaagggggtgcggctctgtcaggaaacctggactctcaaggcccaccagcctctccgtgagtgttagaaatcacagatacagtatatacttaattacactaaattattgctgggattccttataagcactaattatacctgattataggttaaaatatttattttgtcaaaatattttcttgggaatgtgtttaaccctttctgcgttcattgttgctgagatgtgaaaactaaccattccctcctgcctacctttttggccactgggcggcagagaatggcgctatgtgcagttgggcccctggcaccatgggcctttggcctgcctgctgcagagtagccctgcctgggcagtctccaggcactgagcaggccatctgtggccaggctgagagaatgactggctcgcttaccagcgtgcatgggacaaggagctttggagcctcaaggggttgttgctggcctgggctagagggaaaggtgaccatccgtctgtcctcctgtctttctattagcgcctccatgtgagtgatggtgccttggttcactagccttcccccaccaccccaccatgccacctggtggtcttggggcctgtgctgtcactccagcccctggggaggagaggacccagcccggagagttggggcaagggctccacatggcccaagggcaacagatgctcgcagggcagctgctgccgatgctcacgctcctgcccccctccttcccgctgccacaccccaccctgggcccccgcagacacgcatctctaactcagttgggcccagccttctggatggcttggggtaggccatgggcccacctggggccaggccagcccctggggcagctctggaagagcagtgtggaggagcacttgcttgcagcctggcttcagcctctggcactgctggagtggtccctgggagcttctgcactgtcggctttggggacgtctcacccacttgggttacagtaggccttccccacccagagagaagtgtttccaccccagagacattgtctgtcagcccctgaagtgctcgcctcccccagtgcccgtcaccagcccttcctatctgtggggtccaagtcaggcttcccctgcggccaccagccatagggagcagccatcagcccccgagtcagaactgcttctgtctgtccatacctccaggctctcccggagagggggacggatatttatttcctaaagtttgcacttaattgtgaggattctcaggattgttgggggctactgaaaagaggaatgtgttgaatgtcgcgtttgctgtccactcgtcctagaagtttagtgtttttgtcactgtcatgtgtttctgtgggcagagctggttctggagggtgggtcagtgcacccgaggctcagagcatccatccaccccactggccctccttccagataccctctctctaattgggttcttgcatgtaaaatactccacaataaataaataattgaacaaatta

SEQ ID NO: 10778 - protein, 110 aa, Homo sapiens
MIWRRVSQVKSLINSLKKEPKLLKWFPTSPRPPWRLLPQPQTLLAGRSQSGQRMPSSPCEQLCGLPPQMAGPRSHPVDTGHWPLLHPQLHTACTPVFPWKCHRVCSQASH

SEQ ID NO: 10779 - DNA, 5414 bp, Homo sapiens
aatccagaccacgtctggcaggccccaaggcccaggcagctttttgagagcccctctcctgcctggcctggggacatgagccattcacaacagaggagagttggccacaaaaagagagaccacaatctaaatgtccagcaatagaagaatggcgagatacattatgaaacacacagaaaggaatgaggcagtctgtaccaagtgatggagaacggtgtctggaatattttgttgagaaaaagcaatctggaaagaatcacattttaatattttttaatgatttgtacaagcatgtacttgtatacatacaacagtatgtctggacatttgtctgctgaaaaagtacttgtttcctctgcggaaggaggggcaggcagtgaagagggaacttctactttgaattcggcacatgtctggttttatgaacaagcatgtactccttttgtgacttttaagaatcagtacaaattttttcaaaggagatagaatgtgacgaaaagcacacccagcaggctacccagaggtgcatgtgttccctaggagctcaacaggacctgtcgggccatgcagcagcgcatcgtggagctcatctcccgcgtgtccaatgaggaggtcaccgaggagctgctgcatgtgaacgatgacctcaacaacgtcttccttcgatacgagaggttcgaacgatacaggtctggccgatccgttcaaaatgccagtaatggagtactgaatgaagtaaccgaagacaacttaatagacctggggccagggtctccagccgtggtgagcccaatggtggggaacacagcgcccccatcttccctctcctcccagcttgcaggcttagacttggggacagagagcgtcagtggcaccctcagttcactccagcaatgtaatccccgtgacggctttgacatgtttgcccagacgagaggaaactccttggctgagcagcgcaagacggtaacctatgaggatcctcaggctgtcggaggacttgcttctgcactagacaatcgaaaacagagttcagaagggatccccgttgcgcagccatctgtcatggacgacattgaggtgtggctcaggaccgacctgaagggtgatgatctggaggagggtgtcacaagtgaagagtttgataaattccttgaagaaagagccaaagctgctgaaatggttcccgacctcccctcgccccccatggaggctcctgccccagcctcaaacccttctggccggaagaagccagagcggtcagaggatgccctcttcgccctgtgagcagctctgtggtttgcctccccagatggcgggtccccgctcgcaccccgtggacaccgggcactggccactcctacatccccagctccacacggcctgcacacctgtgtttccatggaaatgccaccgtgtctgctcccaggcctcccactagtcaggaccagcttcagccacttcttttctctgagtggtgggacaactgcagccagagactctctcccctcccaccatgggcccctctgcccatgtttcctcccaggaagagcgggcagagtggcccagccccaggcagtgcttcctgagcagaccacccggactgtctttcctccacccgcccatggagaaagagcacgcccggccccgccctgtgctcacctctgcctggctcagcgaccttctcaggcattctgccctcctgggcccctctctccctgaaggggctttgtggcatctctggaagagcagggtgtgctgcactcatgggcctggtctcactccttggacttgtcaccttgtgacatttggcttatcagcatttgagaaggctctgctgggtctccatggtgggggtctctcaccttcttgaccctctctccatcattcagctgccagcccaggcttcacacccaagctggctcagcagccgagcctggcaccgagggtccctgcaggctccctgggcagggagagggccaaggacaattgggagggcagcaggcagcccgcagatggtggccatgtggcacgctgctgagacgacactaccaataaaccaaactgccacgcacacactgcaggctcacacccgcacacctggtcctggcttgtggagggacttgcactggaggtattgctctggcttgcctggggaagtgtcacagatgtgcacatgggccacactcagtgctgtggcctggcctgccgtagcctcacacatctgcctcaagagccagcagcaaacagctttgtggcatccttggaggttcccagtgactgagaggcctgggcagcactaaggcccctgctctgctccctggcataggccttggcctccttgcacagactctcctgacagtctggcctcctcccacctcagaggtcctctggccaccaatttatactctctccccaagctgatcctgaaggcaggcagagcagctaggggctggtaacatgtattcccatcccgtgtcctcactggtgtgtctcctggccatgggcaagggactcgggtcatcccaggccctggtccagccagacacctggccccacacctcccaccaggctgctgttgctcagaaggagaatactgcagctgtatgcatccccgtgtgtcttgggcccagctcgctgggtcagtctgctcctgtcccctccagcatgcactgcctaggtcagcacaggttcctgatccatggtgtagttagcccttcccacctggcaggacggcccagaccaccagccaagcagggaaagggggctgggcttgacgggagaagagaccagcgacatggtcgttggggagcattcaggatggcgacttcagctgggggtcatgctgagcaccaacaggaactattccagtgaagagcaagtgctgcccgacccaggaccctgtgccaggctagcagccctccagctccctccagagaggaaacctctgtctggctgagggtgggactagctgggatgtctcactccagttgctcaggttcacccaggaagctcctccgtggagtggccagcctgattctagccctgtcctctctggcagcacatgccacacctgcctgggccttctgctccctgatgcttgatgagcccctgcctcctcaatgtttctcaaagacagacccccctgaggccagcttgaatgtgaagactgctgaagttagctggcttcacttgagctgcagaaaaggtggctgggatggcccaggtgcacccagaggccccagccctttggctgcctttgggttgtgacttgggttgtctctgaggccctgccagagctgggcctgcgggtggtgggcggtccgacctcgggcagtcagtgctccgcagcctcagcactgcatcccagacccagtgtcctcagagggaagagccagcctccctgcctcatggaaccaggagtcccaaaaagtcaggagcctggaggctctgaaaggagcagggattccatagtgcgtgaagctgaaataggcgccctcctggggagcccccagcaaaactgtttttcatacccactcccagaactgccccgctccagctccagcgccagcgccagctggttgccaggcatcattggagaggcctggctgccccaggggcagcagggagtggtggacctgtatgggctggcaggaggccattggccatgctgacaagtgtcacctgccttcctagcctggagccacccctcaggtggcctgcttgcacctcctatccggaggtagcctgccccacctgtaggcagagggggctcttgcttgaggcctgcacaggaagcaagtatagccccggtgccccagagtgggttccacttagccctggcgagatggcctgtcctgagatctctgctcccagaccccaccatctggggagcacagtccttaggctgcctggtccaggaagggggtgcggctctgtcaggaaacctggactctcaaggcccaccagcctctccgtgagtgttagaaatcacagatacagtatatacttaattacactaaattattgctgggattccttataagcactaattatacctgattataggttaaaatatttattttgtcaaaatattttcttgggaatgtgtttaaccctttctgcgttcattgttgctgagatgtgaaaactaaccattccctcctgcctacctttttggccactgggcggcagagaatggcgctatgtgcagttgggcccctggcaccatgggcctttggcctgcctgctgcagagtagccctgcctgggcagtctccaggcactgagcaggccatctgtggccaggctgagagaatgactggctcgcttaccagcgtgcatgggacaaggagctttggagcctcaaggggttgttgctggcctgggctagagggaaaggtgaccatccgtctgtcctcctgtctttctattagcgcctccatgtgagtgatggtgccttggttcactagccttcccccaccaccccaccatgccacctggtggtcttggggcctgtgctgtcactccagcccctggggaggagaggacccagcccggagagttggggcaagggctccacatggcccaagggcaacagatgctcgcagggcagctgctgccgatgctcacgctcctgcccccctccttcccgctgccacaccccaccctgggcccccgcagacacgcatctctaactcagttgggcccagccttctggatggcttggggtaggccatgggcccacctggggccaggccagcccctggggcagctctggaagagcagtgtggaggagcacttgcttgcagcctggcttcagcctctggcactgctggagtggtccctgggagcttctgcactgtcggctttggggacgtctcacccacttgggttacagtaggccttccccacccagagagaagtgtttccaccccagagacattgtctgtcagcccctgaagtgctcgcctcccccagtgcccgtcaccagcccttcctatctgtggggtccaagtcaggcttcccctgcggccaccagccatagggagcagccatcagcccccgagtcagaactgcttctgtctgtccatacctccaggctctcccggagagggggacggatatttatttcctaaagtttgcacttaattgtgaggattctcaggattgttgggggctactgaaaagaggaatgtgttgaatgtcgcgtttgctgtccactcgtcctagaagtttagtgtttttgtcactgtcatgtgtttctgtgggcagagctggttctggagggtgggtcagtgcacccgaggctcagagcatccatccaccccactggccctccttccagataccctctctctaattgggttcttgcatgtaaaatactccacaataaataaataattgaacaaatta

SEQ ID NO: 10780 - protein, 240 aa, Homo sapiens
MQQRIVELISRVSNEEVTEELLHVNDDLNNVFLRYERFERYRSGRSVQNASNGVLNEVTEDNLIDLGPGSPAVVSPMVGNTAPPSSLSSQLAGLDLGTESVSGTLSSLQQCNPRDGFDMFAQTRGNSLAEQRKTVTYEDPQAVGGLASALDNRKQSSEGIPVAQPSVMDDIEVWLRTDLKGDDLEEGVTSEEFDKFLEERAKAAEMVPDLPSPPMEAPAPASNPSGRKKPERSEDALFAL

SEQ ID NO: 10781 - DNA, 5735 bp, Homo sapiens
agtcaggacgggagtccggcgggttacagcggaggcctaggtggcagacagggggcccgggccgctgcgtgttgtccacccaagatggagttcctcctggggaacccgttcagcacaccagtggggcagtgcctcgaaaaggcaacagatggctccctgcaaagtgaggattggacgttgaatatggagatctgtgacatcatcaatgagacggaggaagggccaaaggatgccattcgagccctgaagaagcggctcaacgggaaccggaactacagagaggtgatgctggcattaacagtgctggagacatgtgtgaagaactgtggccaccgcttccacatccttgtggccaaccgagatttcatcgacagtgttctggtcaaaattatatctcccaagaacaaccctcccaccattgtacaggacaaagtgcttgctctgatccaggcatgggctgatgcctttcgaagcagtcctgatctcaccggcgttgtgcacatatatgaggagctgaagaggaaaggggttgaatttcccatggcagacttggacgctctgtctcccatacacacaccacagcggagtgtccctgaagtggatccagctgcgaccatgcccaggtcccaatcacagcagaggacaagtgctggttcctattcctcgccgcctcctgctccctactccgcaccgcaggccccagctctgagtgtgactggccccatcacagccaattcagaacagattgccaggctgcggagtgaactggacgtcgttcgaggaaacacaaaagtcatgtctgagatgttaacagaaatggtccctggacaggaggattcatctgatctggagttgctgcaggagctcaacaggacctgtcgggccatgcagcagcgcatcgtggagctcatctcccgcgtgtccaatgaggaggtcaccgaggagctgctgcatgtgaacgatgacctcaacaacgtcttccttcgatacgagaggttcgaacgatacaggtctggccgatccgttcaaaatgccagtaatggagtactgaatgaagtaaccgaagacaacttaatagacctggggccagggtctccagccgtggtgagcccaatggtggggaacacagcgcccccatcttccctctcctcccagcttgcaggcttagacttggggacagagagcgtcagtggcaccctcagttcactccagcaatgtaatccccgtgacggctttgacatgtttgcccagacgagaggaaactccttggctgagcagcgcaagacggtaacctatgaggatcctcaggctgtcggaggacttgcttctgcactagacaatcgaaaacagagttcagaagggatccccgttgcgcagccatctgtcatggacgacattgaggtgtggctcaggaccgacctgaagggtgatgatctggaggagggtgtcacaagtgaagagtttgataaattccttgaagaaagagccaaagctgctgaaatggttcccgacctcccctcgccccccatggaggctcctgccccagcctcaaacccttctggccggaagaagccagagcggtcagaggatgccctcttcgccctgtgagcagctctgtggtttgcctccccagatggcgggtccccgctcgcaccccgtggacaccgggcactggccactcctacatccccagctccacacggcctgcacacctgtgtttccatggaaatgccaccgtgtctgctcccaggcctcccactagtcaggaccagcttcagccacttcttttctctgagtggtgggacaactgcagccagagactctctcccctcccaccatgggcccctctgcccatgtttcctcccaggaagagcgggcagagtggcccagccccaggcagtgcttcctgagcagaccacccggactgtctttcctccacccgcccatggagaaagagcacgcccggccccgccctgtgctcacctctgcctggctcagcgaccttctcaggcattctgccctcctgggcccctctctccctgaaggggctttgtggcatctctggaagagcagggtgtgctgcactcatgggcctggtctcactccttggacttgtcaccttgtgacatttggcttatcagcatttgagaaggctctgctgggtctccatggtgggggtctctcaccttcttgaccctctctccatcattcagctgccagcccaggcttcacacccaagctggctcagcagccgagcctggcaccgagggtccctgcaggctccctgggcagggagagggccaaggacaattgggagggcagcaggcagcccgcagatggtggccatgtggcacgctgctgagacgacactaccaataaaccaaactgccacgcacacactgcaggctcacacccgcacacctggtcctggcttgtggagggacttgcactggaggtattgctctggcttgcctggggaagtgtcacagatgtgcacatgggccacactcagtgctgtggcctggcctgccgtagcctcacacatctgcctcaagagccagcagcaaacagctttgtggcatccttggaggttcccagtgactgagaggcctgggcagcactaaggcccctgctctgctccctggcataggccttggcctccttgcacagactctcctgacagtctggcctcctcccacctcagaggtcctctggccaccaatttatactctctccccaagctgatcctgaaggcaggcagagcagctaggggctggtaacatgtattcccatcccgtgtcctcactggtgtgtctcctggccatgggcaagggactcgggtcatcccaggccctggtccagccagacacctggccccacacctcccaccaggctgctgttgctcagaaggagaatactgcagctgtatgcatccccgtgtgtcttgggcccagctcgctgggtcagtctgctcctgtcccctccagcatgcactgcctaggtcagcacaggttcctgatccatggtgtagttagcccttcccacctggcaggacggcccagaccaccagccaagcagggaaagggggctgggcttgacgggagaagagaccagcgacatggtcgttggggagcattcaggatggcgacttcagctgggggtcatgctgagcaccaacaggaactattccagtgaagagcaagtgctgcccgacccaggaccctgtgccaggctagcagccctccagctccctccagagaggaaacctctgtctggctgagggtgggactagctgggatgtctcactccagttgctcaggttcacccaggaagctcctccgtggagtggccagcctgattctagccctgtcctctctggcagcacatgccacacctgcctgggccttctgctccctgatgcttgatgagcccctgcctcctcaatgtttctcaaagacagacccccctgaggccagcttgaatgtgaagactgctgaagttagctggcttcacttgagctgcagaaaaggtggctgggatggcccaggtgcacccagaggccccagccctttggctgcctttgggttgtgacttgggttgtctctgaggccctgccagagctgggcctgcgggtggtgggcggtccgacctcgggcagtcagtgctccgcagcctcagcactgcatcccagacccagtgtcctcagagggaagagccagcctccctgcctcatggaaccaggagtcccaaaaagtcaggagcctggaggctctgaaaggagcagggattccatagtgcgtgaagctgaaataggcgccctcctggggagcccccagcaaaactgtttttcatacccactcccagaactgccccgctccagctccagcgccagcgccagctggttgccaggcatcattggagaggcctggctgccccaggggcagcagggagtggtggacctgtatgggctggcaggaggccattggccatgctgacaagtgtcacctgccttcctagcctggagccacccctcaggtggcctgcttgcacctcctatccggaggtagcctgccccacctgtaggcagagggggctcttgcttgaggcctgcacaggaagcaagtatagccccggtgccccagagtgggttccacttagccctggcgagatggcctgtcctgagatctctgctcccagaccccaccatctggggagcacagtccttaggctgcctggtccaggaagggggtgcggctctgtcaggaaacctggactctcaaggcccaccagcctctccgtgagtgttagaaatcacagatacagtatatacttaattacactaaattattgctgggattccttataagcactaattatacctgattataggttaaaatatttattttgtcaaaatattttcttgggaatgtgtttaaccctttctgcgttcattgttgctgagatgtgaaaactaaccattccctcctgcctacctttttggccactgggcggcagagaatggcgctatgtgcagttgggcccctggcaccatgggcctttggcctgcctgctgcagagtagccctgcctgggcagtctccaggcactgagcaggccatctgtggccaggctgagagaatgactggctcgcttaccagcgtgcatgggacaaggagctttggagcctcaaggggttgttgctggcctgggctagagggaaaggtgaccatccgtctgtcctcctgtctttctattagcgcctccatgtgagtgatggtgccttggttcactagccttcccccaccaccccaccatgccacctggtggtcttggggcctgtgctgtcactccagcccctggggaggagaggacccagcccggagagttggggcaagggctccacatggcccaagggcaacagatgctcgcagggcagctgctgccgatgctcacgctcctgcccccctccttcccgctgccacaccccaccctgggcccccgcagacacgcatctctaactcagttgggcccagccttctggatggcttggggtaggccatgggcccacctggggccaggccagcccctggggcagctctggaagagcagtgtggaggagcacttgcttgcagcctggcttcagcctctggcactgctggagtggtccctgggagcttctgcactgtcggctttggggacgtctcacccacttgggttacagtaggccttccccacccagagagaagtgtttccaccccagagacattgtctgtcagcccctgaagtgctcgcctcccccagtgcccgtcaccagcccttcctatctgtggggtccaagtcaggcttcccctgcggccaccagccatagggagcagccatcagcccccgagtcagaactgcttctgtctgtccatacctccaggctctcccggagagggggacggatatttatttcctaaagtttgcacttaattgtgaggattctcaggattgttgggggctactgaaaagaggaatgtgttgaatgtcgcgtttgctgtccactcgtcctagaagtttagtgtttttgtcactgtcatgtgtttctgtgggcagagctggttctggagggtgggtcagtgcacccgaggctcagagcatccatccaccccactggccctccttccagataccctctctctaattgggttcttgcatgtaaaatactccacaataaataaataattgaacaaatta

SEQ ID NO: 10782 - protein, 507 aa, Homo sapiens
MEFLLGNPFSTPVGQCLEKATDGSLQSEDWTLNMEICDIINETEEGPKDAIRALKKRLNGNRNYREVMLALTVLETCVKNCGHRFHILVANRDFIDSVLVKIISPKNNPPTIVQDKVLALIQAWADAFRSSPDLTGVVHIYEELKRKGVEFPMADLDALSPIHTPQRSVPEVDPAATMPRSQSQQRTSAGSYSSPPPAPYSAPQAPALSVTGPITANSEQIARLRSELDVVRGNTKVMSEMLTEMVPGQEDSSDLELLQELNRTCRAMQQRIVELISRVSNEEVTEELLHVNDDLNNVFLRYERFERYRSGRSVQNASNGVLNEVTEDNLIDLGPGSPAVVSPMVGNTAPPSSLSSQLAGLDLGTESVSGTLSSLQQCNPRDGFDMFAQTRGNSLAEQRKTVTYEDPQAVGGLASALDNRKQSSEGIPVAQPSVMDDIEVWLRTDLKGDDLEEGVTSEEFDKFLEERAKAAEMVPDLPSPPMEAPAPASNPSGRKKPERSEDALFAL

SEQ ID NO: 10783 - DNA, 739 bp, Homo sapiens
aaaaggcaacagatggctccctgcaaagtgaggattggacgttgaatatggagatctgtgacatcatcaatgagacggaggaagggccaaaggatgccattcgagccctgaagaagcggctcaacgggaaccggaactacagagaggtgatgctggcattaacagtgctggagacatgtgtgaagaactgtggccaccgcttccacatccttgtggccaaccgagatttcatcgacagtgttctggtcaaaattatatctcccaagaacaaccctcccaccattgtacaggacaaagtgcttgctctgatccaggcatgggctgatgcctttcgaagcagtcctgatctcaccggcgttgtgcacatatatgaggacagccatcagcccccgagtcagaactgcttctgtctgtccatacctccaggctctcccggagagggggacggatatttatttcctaaagtttgcacttaattgtgaggattctcaggattgttgggggctactgaaaagaggaatgtgttgaatgtcgcgtttgctgtccactcgtcctagaagtttagtgtttttgtcactgtcatgtgtttctgtgggcagagctggttctggagggtgggtcagtgcacccgaggctcagagcatccatccaccccactggccctccttccagataccctctctctaattgggttcttgcatgtaaaatactccacaataaataaataattgaacaaatt

SEQ ID NO: 10784 - protein, 142 aa, Homo sapiens
MEICDIINETEEGPKDAIRALKKRLNGNRNYREVMLALTVLETCVKNCGHRFHILVANRDFIDSVLVKIISPKNNPPTIVQDKVLALIQAWADAFRSSPDLTGVVHIYEDSHQPPSQNCFCLSIPPGSPGEGDGYLFPKVCT

SEQ ID NO: 10785 - DNA, 401 bp, Homo sapiens
tccccagatggcgggtccccgctcgcaccccgtggacaccgggcactggccactcctacatccccagctccacacggcctgcacacctgtgtttccatggaaatgccaccgtgtctgctcccaggcctcccactagtcaggaccagcttcagccacttcttttctctgagtggtgggacaactgcagccagagactctctcccctcccaccatgggcccctctgcccatgtttcctcccaggaagagcgggcagagtggcccagctccctgggcagggagagggccaaggacaattgggagggcagcaggcagcccgcagatggtggccatgtggcacgctgctgagacgacactaccaataaaccaaactgccacgcacacactgcaggctcacacccgc

SEQ ID NO: 10786 - protein, 88 aa, Homo sapiens
MEMPPCLLPGLPLVRTSFSHFFSLSGGTTAARDSLPSHHGPLCPCFLPGRAGRVAQLPGQGEGQGQLGGQQAARRWWPCGTLLRRHYQ

SEQ ID NO: 10787 - DNA, 1406 bp, Homo sapiens
gaagttagaaggtgttttgcagccccgggctgagaggccccgcaatgtgagagtggacactcatagtcaaaaagttctccatttcaagaacgcgtacagccaccttccttaccgccggccctgccgggagcctgcttcttatcatttgcacctcattgctttcctcacctgccatctcacacgtggctgccctgtgttgcccctgtgtgctgtgccaattgtgtttttttgctctgtgtacattttggttttatttggggttgctgttgatgatttcctttgttccggtgttctgtctcccctcgctggctgtgtgggggctgcctggcccgctgcttgccgcctccatagatccccgttgcgcagccatctgtcatggacgacattgaggtgtggctcaggaccgacctgaagggtgatgatctggaggagggtgtcacaagtgaagagtttgataaattccttgaagaaagagccaaagctgctgaaatggttcccgacctcccctcgccccccatggaggctcctgccccagcctcaaacccttctggccggaagaagccagagcggtcagaggatgccctcttcgccctgtgagcagctctgtggtttgcctccccagatggcgggtccccgctcgcaccccgtggacaccgggcactggccactcctacatccccagctccacacggcctgcacacctgtgtttccatggaaatgccaccgtgtctgctcccaggcctcccactagtcaggaccagcttcagccacttcttttctctgagtggtgggacaactgcagccagagactctctcccctcccaccatgggcccctctgcccatgtttcctcccaggaagagcgggcagagtggcccagccccaggcagtgcttcctgagcagaccacccggactgtctttcctccacccgcccatggagaaagagcacgcccggccccgccctgtgctcacctctgcctggctcagcgaccttctcaggcattctgccctcctgggcccctctctccctgaaggggctttgtggcatctctggaagagcagggtgtgctgcactcatgggcctggtctcactccttggacttgtcaccttgtgacatttggcttatcagcatttgagaaggctctgctgggtctccatggtgggggtctctcaccttcttgaccctctctccatcattcagctgccagcccaggcttcacacccaagctggctcagcagccgagcctggcaccgagggtccctgcaggctccctgggcagggagagggccaaggacaattgggagggcagcaggcagcccgcagatggtggccatgtggcacgctgctgagacgacactaccaataaaccaaactgccacgcacacactgcaggctcacacccgc

SEQ ID NO: 10788 - protein, 110 aa, Homo sapiens; identical to SEQ ID NO: 10778

SEQ ID NO: 10789 - DNA, 2096 bp, Homo sapiens
aatccagaccacgtctggcaggccccaaggcccaggcagctttttgagagcccctctcctgcctggcctggggacatgagccattcacaacagaggagagttggccacaaaaagagagaccacaatctaaatgtccagcaatagaagaatggcgagatacattatgaaacacacagaaaggaatgaggcagtctgtaccaagtgatggagaacggtgtctggaatattttgttgagaaaaagcaatctggaaagaatcacattttaatattttttaatgatttgtacaagcatgtacttgtatacatacaacagtatgtctggacatttgtctgctgaaaaagtacttgtttcctctgcggaaggaggggcaggcagtgaagagggaacttctactttgaattcggcacatgtctggttttatgaacaagcatgtactccttttgtgacttttaagaatcagtacaaattttttcaaaggagatagaatgtgacgaaaagcacacccagcaggctacccagaggtgcatgtgttccctaggagctcaacaggacctgtcgggccatgcagcagcgcatcgtggagctcatctcccgcgtgtccaatgaggaggtcaccgaggagctgctgcatgtgaacgatgacctcaacaacgtcttccttcgatacgagaggttcgaacgatacaggtctggccgatccgttcaaaatgccagtaatggagtactgaatgaagtaaccgaagacaacttaatagacctggggccagggtctccagccgtggtgagcccaatggtggggaacacagcgcccccatcttccctctcctcccagcttgcaggcttagacttggggacagagagcgtcagtggcaccctcagttcactccagcaatgtaatccccgtgacggctttgacatgtttgcccagacgagaggaaactccttggctgagcagcgcaagacggtaacctatgaggatcctcaggctgtcggaggacttgcttctgcactagacaatcgaaaacagagttcagaagggatccccgttgcgcagccatctgtcatggacgacattgaggtgtggctcaggaccgacctgaagggtgatgatctggaggagggtgtcacaagtgaagagtttgataaattccttgaagaaagagccaaagctgctgaaatggttcccgacctcccctcgccccccatggaggctcctgccccagcctcaaacccttctggccggaagaagccagagcggtcagaggatgccctcttcgccctgtgagcagctctgtggtttgcctccccagatggcgggtccccgctcgcaccccgtggacaccgggcactggccactcctacatccccagctccacacggcctgcacacctgtgtttccatggaaatgccaccgtgtctgctcccaggcctcccactagtcaggaccagcttcagccacttcttttctctgagtggtgggacaactgcagccagagactctctcccctcccaccatgggcccctctgcccatgtttcctcccaggaagagcgggcagagtggcccagccccaggcagtgcttcctgagcagaccacccggactgtctttcctccacccgcccatggagaaagagcacgcccggccccgccctgtgctcacctctgcctggctcagcgaccttctcaggcattctgccctcctgggcccctctctccctgaaggggctttgtggcatctctggaagagcagggtgtgctgcactcatgggcctggtctcactccttggacttgtcaccttgtgacatttggcttatcagcatttgagaaggctctgctgggtctccatggtgggggtctctcaccttcttgaccctctctccatcattcagctgccagcccaggcttcacacccaagctggctcagcagccgagcctggcaccgagggtccctgcaggctccctgggcagggagagggccaaggacaattgggagggcagcaggcagcccgcagatggtggccatgtggcacgctgctgagacgacactaccaataaaccaaactgccacgcacacactgcaggctcacacccgc

SEQ ID NO: 10790 - protein, 240 aa, Homo sapiens; identical to SEQ ID NO: 10780

SEQ ID NO: 10791 - DNA, 2417 bp, Homo sapiens
agtcaggacgggagtccggcgggttacagcggaggcctaggtggcagacagggggcccgggccgctgcgtgttgtccacccaagatggagttcctcctggggaacccgttcagcacaccagtggggcagtgcctcgaaaaggcaacagatggctccctgcaaagtgaggattggacgttgaatatggagatctgtgacatcatcaatgagacggaggaagggccaaaggatgccattcgagccctgaagaagcggctcaacgggaaccggaactacagagaggtgatgctggcattaacagtgctggagacatgtgtgaagaactgtggccaccgcttccacatccttgtggccaaccgagatttcatcgacagtgttctggtcaaaattatatctcccaagaacaaccctcccaccattgtacaggacaaagtgcttgctctgatccaggcatgggctgatgcctttcgaagcagtcctgatctcaccggcgttgtgcacatatatgaggagctgaagaggaaaggggttgaatttcccatggcagacttggacgctctgtctcccatacacacaccacagcggagtgtccctgaagtggatccagctgcgaccatgcccaggtcccaatcacagcagaggacaagtgctggttcctattcctcgccgcctcctgctccctactccgcaccgcaggccccagctctgagtgtgactggccccatcacagccaattcagaacagattgccaggctgcggagtgaactggacgtcgttcgaggaaacacaaaagtcatgtctgagatgttaacagaaatggtccctggacaggaggattcatctgatctggagttgctgcaggagctcaacaggacctgtcgggccatgcagcagcgcatcgtggagctcatctcccgcgtgtccaatgaggaggtcaccgaggagctgctgcatgtgaacgatgacctcaacaacgtcttccttcgatacgagaggttcgaacgatacaggtctggccgatccgttcaaaatgccagtaatggagtactgaatgaagtaaccgaagacaacttaatagacctggggccagggtctccagccgtggtgagcccaatggtggggaacacagcgcccccatcttccctctcctcccagcttgcaggcttagacttggggacagagagcgtcagtggcaccctcagttcactccagcaatgtaatccccgtgacggctttgacatgtttgcccagacgagaggaaactccttggctgagcagcgcaagacggtaacctatgaggatcctcaggctgtcggaggacttgcttctgcactagacaatcgaaaacagagttcagaagggatccccgttgcgcagccatctgtcatggacgacattgaggtgtggctcaggaccgacctgaagggtgatgatctggaggagggtgtcacaagtgaagagtttgataaattccttgaagaaagagccaaagctgctgaaatggttcccgacctcccctcgccccccatggaggctcctgccccagcctcaaacccttctggccggaagaagccagagcggtcagaggatgccctcttcgccctgtgagcagctctgtggtttgcctccccagatggcgggtccccgctcgcaccccgtggacaccgggcactggccactcctacatccccagctccacacggcctgcacacctgtgtttccatggaaatgccaccgtgtctgctcccaggcctcccactagtcaggaccagcttcagccacttcttttctctgagtggtgggacaactgcagccagagactctctcccctcccaccatgggcccctctgcccatgtttcctcccaggaagagcgggcagagtggcccagccccaggcagtgcttcctgagcagaccacccggactgtctttcctccacccgcccatggagaaagagcacgcccggccccgccctgtgctcacctctgcctggctcagcgaccttctcaggcattctgccctcctgggcccctctctccctgaaggggctttgtggcatctctggaagagcagggtgtgctgcactcatgggcctggtctcactccttggacttgtcaccttgtgacatttggcttatcagcatttgagaaggctctgctgggtctccatggtgggggtctctcaccttcttgaccctctctccatcattcagctgccagcccaggcttcacacccaagctggctcagcagccgagcctggcaccgagggtccctgcaggctccctgggcagggagagggccaaggacaattgggagggcagcaggcagcccgcagatggtggccatgtggcacgctgctgagacgacactaccaataaaccaaactgccacgcacacactgcaggctcacacccgc

SEQ ID NO: 10792 - protein, 507 aa, Homo sapiens; identical to SEQ ID NO: 10782

SEQ ID NO: 10793 - DNA, 2280 bp, Homo sapiens
gggggcaagtgtcagtcaggacgggagtccggcgggttacagcggaggcctaggtggcagacagggggcccgggccgctgcgtgttgtccacccaagatggagttcctcctggggaacccgttcagcacaccagtggggcagtgcctcgaaaaggcaacagatggctccctgcaaagtgaggattggacgttgaatatggagatctgtgacatcatcaatgagacggaggaagggccaaaggatgccattcgagccctgaagaagcggctcaacgggaaccggaactacagagaggtgatgctggcattaacagcatgggctgatgcctttcgaagcagtcctgatctcaccggcgttgtgcacatatatgaggagctgaagaggaaaggggttgaatttcccatggcagacttggacgctctgtctcccatacacacaccacagcggagtgtccctgaagtggatccagctgcgaccatgcccaggtcccaatcacagcagaggacaagtgctggttcctattcctcgccgcctcctgctccctactccgcaccgcaggccccagctctgagtgtgactggccccatcacagccaattcagaacagattgccaggctgcggagtgaactggacgtcgttcgaggaaacacaaaagtcatgtctgagatgttaacagaaatggtccctggacaggaggattcatctgatctggagttgctgcaggagctcaacaggacctgtcgggccatgcagcagcgcatcgtggagctcatctcccgcgtgtccaatgaggaggtcaccgaggagctgctgcatgtgaacgatgacctcaacaacgtcttccttcgatacgagaggttcgaacgatacaggtctggccgatccgttcaaaatgccagtaatggagtactgaatgaagtaaccgaagacaacttaatagacctggggccagggtctccagccgtggtgagcccaatggtggggaacacagcgcccccatcttccctctcctcccagcttgcaggcttagacttggggacagagagcgtcagtggcaccctcagttcactccagcaatgtaatccccgtgacggctttgacatgtttgcccagacgagaggaaactccttggctgagcagcgcaagacggtaacctatgaggatcctcaggctgtcggaggacttgcttctgcactagacaatcgaaaacagagttcagaagggatccccgttgcgcagccatctgtcatggacgacattgaggtgtggctcaggaccgacctgaagggtgatgatctggaggagggtgtcacaagtgaagagtttgataaattccttgaagaaagagccaaagctgctgaaatggttcccgacctcccctcgccccccatggaggctcctgccccagcctcaaacccttctggccggaagaagccagagcggtcagaggatgccctcttcgccctgtgagcagctctgtggtttgcctccccagatggcgggtccccgctcgcaccccgtggacaccgggcactggccactcctacatccccagctccacacggcctgcacacctgtgtttccatggaaatgccaccgtgtctgctcccaggcctcccactagtcaggaccagcttcagccacttcttttctctgagtggtgggacaactgcagccagagactctctcccctcccaccatgggcccctctgcccatgtttcctcccaggaagagcgggcagagtggcccagccccaggcagtgcttcctgagcagaccacccggactgtctttcctccacccgcccatggagaaagagcacgcccggccccgccctgtgctcacctctgcctggctcagcgaccttctcaggcattctgccctcctgggcccctctctccctgaaggggctttgtggcatctctggaagagcagggtgtgctgcactcatgggcctggtctcactccttggacttgtcaccttgtgacatttggcttatcagcatttgagaaggctctgctgggtctccatggtgggggtctctcaccttcttgaccctctctccatcattcagctgccagcccaggcttcacacccaagctggctcagcagccgagcctggcaccgagggtccctgcaggctccctgggcagggagagggccaaggacaattgggagggcagcaggcagcccgcagatggtggccatgtggcacgctgctgagacgacactaccaataaaccaaactgccacgcacacactgcaggctcacacccgc

SEQ ID NO: 10794 - protein, 457 aa, Homo sapiens; identical to SEQ ID NO: 1742

SEQ ID NO: 10795 - DNA, 574 bp, Homo sapiens
gacatgtttgcccagacgagaggaaactccttggctgagcagcgcaagacacaccaccctgcctggcccctcatccacaggagaagcttggaagcaggagggtgcagccatgcagggtgaacccattccttacagcgagattttcctgactaaaataagtggtcagagcagaggctcctctgatagcagctctggctaggatgagccatctggaattcagggagttgattccaaaagagagaatctcctacatctcagggaggcactgtacatgttttgagctttctgttcagcctaaaggcgggtgaaacacactttttcccacctttcccagggacccagcatcttggtgcactcagcaccctgagtcctgcttggggctcagtagggtaagcagaaacccaaggtcccatgtacccttcaccaccaaaggttgattgtaaaacagatatagctaaaggagtcggagagtggaggaagacctcccataatcagtgacaggcccgggtcccagagaccaccttccctgtcaaatgccactgaggctgctgctaataaaataagaattaatgtt

SEQ ID NO: 10796 - protein, 38 aa, Homo sapiens
MFAQTRGNSLAEQRKTHHPAWPLIHRRSLEAGGCSHAG

SEQ ID NO: 10797 - DNA, 3182 bp, Homo sapiens
ttgagtttgaggtaacaaacctgcaaattctttttcatttccaaagccttccctcaggacaaagtccaaaatgtcttatttagacctagttttaaataggaggaataatggcaagcacagttcccatctcatcacctgatgggagcacactgggctttcatgaaggactcagcataaggaccagaaaggaccatgatcaggccaaccttttccccttaaagatgaggcttgagaggacaggacagtggcttgagtcccctgcagatttaaggtcctggtcccctctgccgcaccagctgactcacaacctactgctggattcatcaggaggacaaggacctggcatcagttagggtgagtgggacagatgcttgcatttgcgttaccctttggggacctaaagggtgattttgttatggctgtcacagccttgggccttgtctcatcttttgactacggaagtacacaccagtggctctgtgcccacctgacaggtgaataaacctctgcagtaagtgtgggggcatccccaggaccccccagtgcatcagttggagaacaggagcagatataaggggacctgactcccagcccgaggcccctttgtcttgccatgtgattccagtttctccatggtaaatgggcttgggtttaacctattaaacctatttaagccctgctagaaagcataacaggagctaactaatatgagtattttcacccaagagtctcccagtccaagcattacacataattcagaggcaaagcctggggctggtggctggaagtgctatcctggttagagtgtctttgatgatactcattgttcattgaagatgagtgtgggaaaggtaccccaggattaaaattgtttcagatgtattaatattcctgttctccttgtagaccactgttgaaaaaacacacaagtcgtttttaaaaccacagtggacactcactgccttacccagatcattcctcctggggatctctttcttgtcaccagctgctgaccccagcaagttgggagacaaatctggagcagcataactcactaaagctgggtgtctaaggctccagctggaaaaagtctcttagctaccgctgcccatggcatttggagtttttaaatacgatacagaacataatctattctgccccaccccaacacacacctcataactactcttccgttccccacctgacaggaggatgacctggccttcgacagttgctcaaagccaactccccctgcactgcctgactgggtgcagaggacactcactccaccctcctagcagtccttcgatgactggcccaggcctctctgtagcagctactggcgagcatttccccaggccgtagccagggccatgcgtccgccttcctcctgctggtgcccaccctatgtgtgccccaccccctttccccagaggctgagttgggagcatgttaggaacactagctagttgctcctgaacacagccctatgaaatagggagtctgcagctccaaggtaaggtggttaagccaccctccctccagggcccaggtgtgtgaggagaggctggggacactcacaatgacctccatgatgggccagccaccacccctttctgatgcccactctgggtgctgggtgagaagctgatcctctcagggggagccccacacagaggaagccgtggcagagttgatatatggtttcactccctagcccccaggtgggactggctggtcttggtcccagggattcttcataggactagtgagcaccccacagggccatatcacaggcatcctctctccttacttctgctttcccttcccctgttaggttcgaacgatacaggtctggccgatccgttcaaaatgccagtaatggagtaagtattccttcagaatcctgtcatctcctgaggccagacctacccctccacgttttggaggctggagagacctccagtttttctaactggttttgaaatatttgggaaattgaagaggcaagctctggttgatgggatactagggcagagctagcaggcacccctgatgggaaggtggcaagcaagccctaagtttgcatctcccaggacagtcactgttgactcagcaacccctccttctagtggggacggggaggaggcagtgagcagggctcactgacatccaggcccaccatggacctggaaggcaggtgggggaagtggccttgcttctgtactagagcagcgctgatacttttcttcttggaaccctgcatagttgccttgccagcttctacctcagagcctgactccagggttctggggcttatggccaatctcatgttctgacaggtactgaatgaagtaaccgaagacaacttaatagacctggggccagggtctccagccgtggtgagcccaatggtggggaacacagcgcccccatcttccctctcctcccagcttgcaggcttaggtgagtgtctcacagggacaaaagggcctacctacttcctaccactggcctcccttgcaggccacctctctttctttcttggaagacccaaagagagtcttttgggaaatacatgtgaaagtgtattcctgagtcctagccagttgtaccaccttactttcaattcataccttttttccccctaaatttgaagtttaaaatctatgttggaaagcagggatgggggaaattccaatgaattaaagaaaggtcacggccgtgcgcagtggctcacgcccgtaatcccagcactatgggaggccgaggtgggtggatcacctgaggtcaggagtttgagaccagcctgaccaacatggcgaaacccagtctctactaaaaatacaaaaattagctgcgcatggtgggcacctgcaatcccaactactcgggaggctgcggcaggagaatcacttgagcctgggaggtggaggttgcagtgagccgatatcgcatcattgcactccagcctgggcgacagagcaagacactgtctcaaaaaaaaaaaaaaaaaaaagaaagtggattctgctacctctcttcttaaaaaaggtatagtaggccaggcatagtggctcacgcctgtaatcccagcactctgggaagccaaggcaggcggattgcttgagtccaggagttcaagaccagcctgggcaacatagcaaaacctcatctctact

SEQ ID NO: 10798 - protein, 81 aa, Homo sapiens [sequence omitted]

SEQ ID NO: 10799 - DNA, 2825 bp, Homo sapiens
ttgcagtggctgcttggcttggcagtggtcgcttggcttggcgtggcagtgatcgcttggcttggcatttctggcttagcggtcctcctttcgcagattggaaaccgcgggctatcctgctgggaggttgtggccgaggcagtagctcgctactgatggtctcctggggtggagaaaagcggggaggggctgaggggtctccgaagccggcagtctacgccacgaggaaaaccggtagcgtcaggagccaggaggaccagtggtacttgggctacccgggggaccagtggtcctcgggcttctcctacagctggtggaaaaacagcgtcggcagcgagagcaagcacggtgagggcgccttagaccagccccagcacgatgtccgcctggaagatcttggcgagctccacagagctgcccggtcgggcgacgtccctggggtggagcacgtcttggttcctggagacactggcgtggacaagagggataggaagaagagcattcagcaactagttcctgaatataaggaaaaacagacacctgaaagtcttcctcaaaataacaatccagattggcatcctactaatttgacccttagtgatgagacttgtcagagatccaagaatctgaaagttgatgataaatgtccatctgtatcaccatcaatgcctgaaaatcagtcagcaaccaaagaactgggacagatgaacttaacagaacgagaaaagatggacactggggttgtacttctctcagggaatgatactctccatgacctgtgccaatcacagctaccagaaaacaaagagagcaaagaaggtaacaaagaagcatagagaattcagtcctagagtgcctctgcttggctgcatagagctatagttctgacttaaaaaaactttttctggtaaaatgtgctttgtgtttactcaccttttgcactgaacagaataccttttggcaggatatttgtgttcttcctttaaccaaagcaacatctagataacagagaattaggggaaagcaggattttctttaggaagtaggattatatttagaatatagggactaagtatgtttagggactaacataggattatatttaggataacttagtagagacctaaagattgctgactcaaacacaatgtggtttctttgctttatttttacagctctgaattcacagctgttagttataactatatgcactataatttaaaagacaccttcccacacctgcaatctcagcactttaggaggccgaggtgggtggatcacgaggtcagtagttcgagaccagcctggccaatatggtgaaaccccatctctactaaaaatacaaaaaaaactagccaggcatggtggtgaatgcctgtagtcccagctactcaggaggctgaagcaggagaatcgctggaacccagaaggtggaggttgcagtgagccgagattgcgccactgcactccaacccgggcaatagaggaagactccgtctcaaaaaacaaaaacaaaaacaaaaaaacaccttccaaaagcaaatattaagtgacttcctatcgtttctatgactttatgtattatagaattgactttccaagtcagtaattaatgagacttattgagaatttgctgcatagtatctccttggctgtgtccacatgagctaccaccttgcgttaataaatgtgttcgctagggatgttggttttggcattgacagtgttctatcaccaatgcaaataagaccagggaccactcttgagaacattaatgtccaagcatcttaaagttatacgtaaggctttcataatgtgattctgctcagctctccatctttagccctttcccccgtgtgccccttctctggccttactgaactgctggtcctgtcctgctgacccatccttcgactgcaggcaaacacatacactctttcaggcctctttctgccttttgttgctgcctgtcatgctctcactctttcctgtcccctaccccttctaattaggctagcctcactctttaagcctcagctcgggcaggatctctagaaaagtcatctctgacatgctttcttttcactctttaaatcctagtgcctagcacatagcaagactcaatacataattgctgagtaaaatagataatgactctttgtacaaagatgattttcaagattgttccctacagtcaaggagcagagggaatagacatgtaaagcaataattgacaattcgggtggtggagatgcagtagaaaaatcagtaaagttctagggcagccctaaggaaggagatacctagatacctgtttacctggggaaagatgaggatgagggtcaacttcacctagcagtctgttttttattttatgtattttatttatttatttttagcagtctgttttaaaagatgaaaatattaatacatttgtcagaataatacagggaaccatttcggatgttaggaagaggttgtacaccaataaaggtgtccacagtcattttggaaatcattaataaggtactattatgaaatggagaacagtatgcagcattgcctgataatattgctactgcattccaaaattttgttttgtttgtgatggctttgttcattgatgttgggtggatgaatctgtgagtgaatcttcaacatgattgtatttctttaacctggtggcatctagtgtctcccagaaagtggtttgttgaagttttggagaattagaattatttcttaaagaagtaagtattccactaaagatcaagcttcatttaaactctcaatttatgaaataaaatgaaatgtaatttaaaatc

SEQ ID NO: 10800 - protein, 226 aa, Homo sapiens
MVSWGGEKRGGAEGSPKPAVYATRKTGSVRSQEDQWYLGYPGDQWSSGFSYSWWKNSVGSESKHGEGALDQPQHDVRLEDLGELHRAARSGDVPGVEHVLVPGDTGVDKRDRKKSIQQLVPEYKEKQTPESLPQNNNPDWHPTNLTLSDETCQRSKNLKVDDKCPSVSPSMPENQSATKELGQMNLTEREKMDTGVVLLSGNDTLHDLCQSQLPENKESKEGNKEA

SEQ ID NO: 10801 - DNA, 589 bp, Homo sapiens
cagattctgacagaacatcagaagtatatctacatgaagaattacagcaagacatgcaaaagtttaagaatgaggtcaacacattagaagaagagttcctggctttgaagaaagaaaatgttcaacttcataaagaggttgaagaagaaatggagaagcacagaagtaatagcacagaattatcaggaaccctaactgatggtactactgttggcaatgatgatgatggactaaatcagcagattcctaggaaggaaaatggagagcatgacaggtaagcctatagcagcgtttaacaggagacaattggtcaagtgtggtggctcacgcctgtaatccagcaatttgggaggccaaggtgggtgaatcacctgaggtcaggagttcaagaccagcctgaccaacatggataaaccccatctctactaaaaatacaaaattagccaggtgtagtggtgcatgcctgtaatcccagttactcaggaggctgaggcaagagaatcgtttgaacctgggaggcgggggttgtggtgagccatgatcatgccattgcactcgagcctgggcaacaagagtaaaactccatttc

SEQ ID NO: 10802 - protein, 74 aa, Homo sapiens
MQKFKNEVNTLEEEFLALKKENVQLHKEVEEEMEKHRSNSTELSGTLTDGTTVGNDDDGLNQQIPRKENGEHDR

SEQ ID NO: 10803 - DNA, 702 bp, Homo sapiens
gccaagcaggaatctgtagaggagagattatctcaactacaaagtgaaaatatgttgcttcgacagcaactggatgatgttcacaagaaagctaacagtcaagaaaagacaatcagtactatccaagaccagtttcattctgctgccaaaaatcttcaagctgagagtgaaaagcagattctttcactacaagagaagaacaaggagctgatggatgaatataatcatttaaaagaaagaatggatcaatgtgagaaagagaaagcaggaagaaaagtagttatgagagaattccagcaagaatggaccgatctcctaaaacaacaacctacgtcagaggctacctcacgttgtcacattaatttagatgagacacaggattcaaagaagaaattgggtcaaatcagaagtgaaattgaccttacagaagcacaggaaactgtaccttcacgatgtctacatctggatgcagagaatgaagttcttcaacttcaacagacattattctctatgaaagcaatacaaaagcaatgtgaaacactacagaagaataagaagcagctgaaacaagaagtagtaaacctcaaaagttatatggaaagaaatatgttagaacgtggtgaagctgaatggcataaactgttgattgaagaaagagcaaggaaggagatagaagaaaaattaaacgaagccattctcacc

SEQ ID NO: 10804 - protein, 216 aa, Homo sapiens
MLLRQQLDDVHKKANSQEKTISTIQDQFHSAAKNLQAESEKQILSLQEKNKELMDEYNHLKERMDQCEKEKAGRKVVMREFQQEWTDLLKQQPTSEATSRCHINLDETQDSKKKLGQIRSEIDLTEAQETVPSRCLHLDAENEVLQLQQTLFSMKAIQKQCETLQKNKKQLKQEVVNLKSYMERNMLERGEAEWHKLLIEERARKEIEEKLNEAIL

SEQ ID NO: 10805 - DNA, 424 bp, Homo sapiens
acttactgtggagaaagagcagaccagatccagatctctattcactgcttatgctacaaggccagtcctagagtcaccttgcgttggaaatcttaatgatagtgaaggtctcaacagaaaacatattccaagaaaaaagaggtctgctcttaaggacatggagagctacttgttgaaatgcagcagaagttgcaaaatgacctaactgcagaagtagcagctgctactaaatatgaacctggatcctatatagcttctcctctaggatttacacacaaggaaaatctgaatcaagatccagttttggaagtagcaaaagaatatgcacagattttaagaagaaaatacatactctgaaagataaggcaattttatttgggctattcacatgatattttgtttcccattaaatatatgatgtgaa

SEQ ID NO: 10806 - protein, 59 aa, Homo sapiens [sequence omitted]

SEQ ID NO: 10807 - DNA, 565 bp, Homo sapiens
acacattctggtgtgccccagtaaaattctatattcagcctccaaactagctgggaaaaatgtggcaaatcatctacttgctccaattcaatagtgtttagaagtaagaagtcactgtgagcaatgccaccaagtggtggagagactccatgcagaatcgccaccttcagccagagaggctgggaggccgaagacctctctcaatgcacagggccattcagaaactagaaacaaaatgcttgctcatctccctaggccactccttccgaggctttttgagacaaagtctcactgtcacccaggccggagtgcagtggcacaatcaaggctcactgcaacctcaaccttctgggtgggaggattgcttgagcctgggaggtcgaggctgcagtgagctgtgattacctcactgcattccggcctgggcaacagagaccctgtctctatttaaaaaaaaaaaaagaaagaaagaaacctaaaaacagactggcacttaaaagagttgtgcttcattttttgactttctgtattaattttgtctgttcctttccttaaacaagctgcc

SEQ ID NO: 10808 - protein, 83 aa, Homo sapiens
MQNRHLQPERLGGRRPLSMHRAIQKLETKCLLISLGHSFRGFLRQSLTVTQAGVQWHNQGSLQPQPSGWEDCLSLGGRGCSEL

SEQ ID NO: 10809 - DNA, 2760 bp, Homo sapiens
aggttctccttcttcatcaagaaaaagtggaaccagctgtccctccagcaaaaacagcagccctaatagcagcccacggactttggggaggagcaaagggaggctccggctgccccagattggcagcaaaaataaactgtcaagtagtaagaagaacttggatgccagcaaagagaatggggctgggcagatctgtgagctggctgacgccttgagccgagggcatatgcggtgggggcagccaaccagagctggtcactcctcaggaccacgaggtagctttggccaatggattcctttatgagcatgaagcatgtggcaatggctacagcaatggtcagcttggaaaccacagtgaagaagacagcactgatgaccaaagagaagacactcatattaagcctatttataatctatatgcaatttcatgccattcaggaattctgagtgggggccgttacgtcacttatgcgaaaaacccaaactgcaagtggtactgctacaatggcagcatctgtgaggaacgtcaccctgatgaaattgacaccgactctgcctacattcttttctatgagcagcagaggatagactacgcacaatttctgccaaagattgatggcaaaaagatggcagacacaagcagtatggatgaagactttgagtctgattacaaaaagtactgtgtgttacagtaaagctaccactctggctgctagacagcttggttgggaggaagatgactccttgtagctgatacttggcaaaagtgtcactgagaggcaagctaaatgtagttattttatcctgttagaatacaaattctaattaaaatagttaactttaagagtagcagtaattttattttgaagtctcatgcaagttgtccgatagagaactttcaggcagatcccaccattagcctgtaaacaaaaggtttggcaccagccacctgggaccaaataagaattcaattgtgcttgtccagatatgaacaaatatgtagtgagtatagagtttatcaataatcataacaaatattaaagatttccttggagtcaaagtaaaaaacaaaaaattgtaatgttgtctagggatgacatgatatgctacctcctttttcctgaagttttattccattctgttgacaagatggtgaaagcaagatcatgaaggtgtgcaaatgattcttacggcatgggcgaggatttttcaatttattttttaaagtttccataccctttctttgtctttcttgctttttgtttttgccgttgtgtttaagtttgagacacaaccagtcattggtggcaggggcatagagtggtcagtctgaaagggaggctctcttaagagctatgtgccttctactcagagggagacccagtagaaagaaaaacatcctgggaaatccagctaccatggccctcccagtggaggcatcttacatttaggatacttcaggtatcctcagaaatgtattctgcacccccggccccgcccatgctgagggaaggggagcagttgccaatatttgcaccatcttcacatgcacatgttgcaacaagagcttctgggaaggtaagcggcatcggagctagatcacgtttcacaattagtggtggttcttttccatgtttattttgcactttaaaaaagagagaacacatgcaaatgaacttgcttgtgtgtatttgatggctccaagggctatgaattacaaacaaaacacatcccagacattaggagttcataagtatatttaatgaaattggtggttttaggaagtcaactttagttttgctttgtttgcatgtccactaatttttttattttgatattagtctttttaaaaaaattttacagtagtcattgaaagttatgtttctttgtttacttcattttttcctctaattattcaagactgggacaaaagtataaatattatttatttcaggtagaatttttttcatgtagttttttaatatatacttgaaggaaatgtttcaccttatttttggtctttgtttattcatttagaccctgcaagttgattctcattaattgtcagattccactacactttcttcctcataggtagtaattaccagtgtaactaagcatttgtgttctgatatctgaggccagtaactattaatatctagttctcagagcatttggaaaggttatcttaaatggctacctaaattgaaatccttttcagaaaaaatataattgcaaataggtaggagtggcctaaattatctaatgtaataaagtcagacaaaatgcatactttatagtttcaagattttcagtatataaaatctgtcctttcctacctggacatgtcccattaaaaagtggaagatcttaaataatttctttacagatgttttatttaagcaggtagcacaatctactaatgttgtttgatctgtgtttgttatactggttgtaattaatttttttaattcatgaactagcggaaaatttattaaattaactattaaccacattcaccttgtaaatgactgtataaaacttgttgacaatgcactgactttagaaagatgttaatgtgcataaatagagtgtaaataaaatagtgttgatgtactgaaatatgaactgtataaaaagtattggtaattgtatatggggtgtacctatttatctgtaactgttatccaaacaaattaaatactgtggatgcctctatgtactgtttttcctcatacaagtaaacacagaaagtcaaat

SEQ ID NO: 10810 - protein, 52 aa, Homo sapiens [sequence omitted]

SEQ ID NO: 10811 - DNA, 299 bp, Homo sapiens
tacagaccagcaccgtccatggcctgttaggaaccgggctgcacagcagcaggattatgctaaagtcaccaggcaagagaccaagatgagcccacctcacaaacccagaaacctcagatccaaggcagctgtataaggtacagatcgttccggactgtagaagagagggttaatccaacttcatcaggagagaaatgccattatccactgaactatttcttgactatctcctgtatgctggtcagtttcactcacattgtctcatttaatctttgacaaactaaataaaagtgtgaagt

SEQ ID NO: 10812 - DNA, 2834 bp, Homo sapiens
tccagtctaggtgacagagcgagactccatctcaacaacaacaacaacaaaagacaaccaaaaccaaaaaaaaaccaaaaaacaaaaaaccaatcctatactcattgctcccagtctactaaagcagaaagaaaactggactgggcgttaggtgacatgaaccccagtcccagctctgcaggcctccaaggttctctggcctctgtttcctttcctataaagtggagtaacatagtggctggcctggttatttcaagaagagagtgtgagattgcagagagagcatgggctttctggtgtcagaacaagtttctaatgaggaaaaattacttgccttcttggagcctcactgtcttcatctgttaagttacagaggaaaagaaaatatgggatatgtaagtgtgcaatgcctgtcagctgccagaagtgcagcaaatgttaaatcccttctctgctcaaaaggctgtgatggaaattcaaaagccccttctcagtaaggccctctggacacccaatctgaaatgtcaggcccctcccccttttctctttattgcggatcactgtttaacatttgacttctttatctggcttatcgtctctccctcagcgaagggctatgccatgaggccgggaatttgtgtccggatggctcactaatgtatctgtggtgcctagaccagcaactgggacatgaatctttgtcgagtgcatggaccagcagtgctttagatattatgctattgcgttatcagaatccatttcttccacacctctgaagccagaataatgcacgtggagaggttttaaaggtgtggaaaagcagagccctagaagaaaacagcccaggctgagactttggggacaacaggagacagaagaatacttgatgatttcatagtgggaggcatggagaattaacgtagtcaagagctgcgaggcaataagaggagactcttgggcagccctcaaatagaatattattcctcctcctctctccaccttaccccaggtacaagagatgaatcctgttcccccataagccagctgattccatgacacagcagtccatgcagtccccaaaatttatcccaactgccttcctcatgctcagcttccaggctgctcatttccttggcttattcaccctgcatcagtttctagtgtggcccagtctccaggatcaacacagtcagtttgggattctctattcaagctctgatattgatttcatattcgccctctggcttcaggcactcacttgggtcaggggcaccctacagtctgagcccctttcggggagagagtggaacagaacatgggtttgaggtcaggtggctctgggttctgaccctgagtccttgaatcactaggttttgctatcttggtcaatttacctgacctcagctttcctatttgtgagatacaaagagaaatattatattgtaagcttgttgtcagcagtgattctcaaagttttgtctttgggacatcaatcctatgagatggaaaaggtttttattatcaagtgagtttggcaaatgctcaatatcatatcctcatcttgggaattctcaaataacaaaagaatgggttccactttcattaactcagtttttctaaacaacaaaattcctttttgcaaggaatacctgttagcatcctgcagaaccaatgttttgtgtaatccgtggtggggaaagctgcttgggaagattagaaatgctcaacaccaggccctctgctcggctcctggcacatgcatcgtggacaccaggaagcatgagtgcctgttgcatttcttcctaatgtcagtcctcagagtacagcaagtggaagttcaccaacagccccacgttcctggagttgctggaggagttcccatccctgcaggtgtctgctggcttcctgctctccctgctccccattctgaagcccaggttttactccatcagctcctcccaggatcacacgcccacagcgatccacctgactgtggccgtgctcatgtaccacactcgagatggccagggtcccctgcaccacggcgtctgcggcacatggctcaacaactgaagccccaagaccaagtgtcctgctttgtgcggaagagtgcagggaggccgcatgaccccggtgttcgagtgccgcagcccaaatgaggaccacatctaccaggaggagatgctggagatggctcggaagggggtgctgcctgcggtgcccacagcctattcctgcctgcctggcaagcccaagagccagaagcacttccatgacgatatctttggtgctgtatttccctacgaggcaaagaaggacagggcggcggtgcagcccagcagcctggagatgtcagcactctgagggcccacaggaggggttaaagctgccagcacagaacttaacgatggagccagctctgcattatccgaggtcacagggcctggggagatggaggaaagtgatatcccccagcctcacgtcttatttctcacctcgttccccatcaagccctttacttgacctcctaccaagtagcaccctggattgatcggagcctcctctctcaagctggggcctccctggtcccttggagacgaaatcttcaatgccaggcctggcaagtgggtgaaagatggaacccgctgctgagtgcaccacttcaagtgaccaccaggaagtgccgtcacaccactgtgtatttaactgccatgggtacaattatttatgcctctgtttaaaaaacgaacaccctagtctgttcctaatggccccttgggtcttctctgtatgattccctgatggagatatttacatgagttgaattttacttt

SEQ ID NO: 10813 - protein, 206 aa, Homo sapiens
MLNIISSSWEFSNNKRMGSTFINSVFLNNKIPFCKEYLLASCRTNVLCNPWWGKLLGKIRNAQHQALCSAPGTCIVDTRKHECLLHFFLMSVLRVQQVEVHQQPHVPGVAGGVPIPAGVCWLPALPAPHSEAQVLLHQLLPGSHAHSDPPDCGRAHVPHSRWPGSPAPRRLRHMAQQLKPQDQVSCFVRKSAGRPHDPGVRVPQPK

SEQ ID NO: 10814 - DNA, 993 bp, Homo sapiens
ctgtttcccacccaggcccagggggcgcagacaaaaacctcccagcgtgcggcctgccaacccagctcccattacccagacagtcatccacacggtgcagagcgcctctggacagatgttctctactcccgccatcccacctatgatgtacccccaccctgcctatccgatgcctttcatcaccaccattccgggagggctgtacccatccaagtccatcatcctgtcaggcactgtcctgcccagtgctcagaggttccacatcaacctgtgctctgggagccacatcgccttccacatgaacccccgttttgatgagaatgctgtggtccgtaacacccagatcaacaactcttgggggtctgaggagcgaagtctgccccgaaaaatgcccttcgtccgaggccagagcttctcggtgtggatcttgtgtgaagctcactgcctcaaggtggccgtggatggtcagcacgtgtttgaatactaccatcgcctgaggaacctgcccaccatcaacaaactggaagtgggtggcgacatccagctgacccacgtgcagacataggcggctccctggccctggggccgggggctggggtgtggggcagtcggggtcctctcatcatccccacttcccaggcccagcctttccaaccgtgcctgggatctgggctttaatgcagaggccatgtccttatctggtcctgcttctggctacagccaccctggaattgagaaggcagctgactgggattgtcttcctcagccgcagcagcacctggggcgccagctgctggaatcctacaatcccagaaggcgggcacagccagggagaggggaggagcgggcagtgaagatgaagccccatgctcagtcccctcccatcccccacgcagctccaccccagtctcaagccaccagctgtctgctcctggtgggagatggcctcctcagcccctcctctctgacctttaacctcactctcaccttgca

SEQ ID NO: 10815 - protein, 149 aa, Homo sapiens
MFSTPAIPPMMYPHPAYPMPFITTIPGGLYPSKSIILSGTVLPSAQRFHINLCSGSHIAFHMNPRFDENAVVRNTQINNSWGSEERSLPRKMPFVRGQSFSVWILCEAHCLKVAVDGQHVFEYYHRLRNLPTINKLEVGGDIQLTHVQT

SEQ ID NO: 10816 - DNA, 492 bp, Homo sapiens
accttaaaactgtcgtgtcaacgtgagcacattgcatggccctcccttttcaccccacgagtctttctttctgtgtttggccaaatttcctttcatgacactaatctaagcccattaatttgaggagcaccggaaagttttcctttggcttttatggaaccaagtaaagatatcgtgggcttcttctcagctgacagcctaaattcatgggaaatggtacaatcttccccttccatgtggcggctgccctggctgccactggctgacctgtccccgtccttctgacagccgatgcctttcatcaccaccattccgggagggctgtacccatccaagtccatcatcctgtcaggcactgtcctgcccagtgctcagaggctggcgatgatggggaggaaatggggctcagaactcagtggacaaaggtccaggtaggctgcccaccgcaggttccacatcaacctgtgctctgggagccacatcgccttccac

SEQ ID NO: 10817 - protein, 47 aa, Homo sapiens
MPFITTIPGGLYPSKSIILSGTVLPSAQRLAMMGRKWGSELSGQRSR

SEQ ID NO: 10818 - DNA, 376 bp, Homo sapiens
ggagaggaagatgcacatgcccttccagaaggggatgccctttgacctctgcttcctggtgcagagctcagatttcaaggaacatggatggagctggaagccgttgcaggagcagaaaaccaaacaccgcaagttctcacttataagtaggagctgaacgatgagaacacatggacacaagtggggaaacaacacacactggggcctggtcggggacggagagcatcaggaagattagctaatggatgctgggcttgataccaaggtgatggtgaacgggagcctcttcgtgcagtacttccaccgcgtgcccttccaccgtgtggacaccatctccgtcaatggctctgtgcagctgtcctacatcagcttccag

SEQ ID NO: 10819 - protein, 48 aa, Homo sapiens
MHMPFQKGMPFDLCFLVQSSDFKEHGWSWKPLQEQKTKHRKFSLISRS

SEQ ID NO: 10820 - DNA, 895 bp, Homo sapiens
gtgaaatgggaaggagtgagggtggggggagatggtgcgtggagaccccgttgttgactggcaggtcagaggtcagcttagaccagcataaagactccacactctcaaagctgggtgggaactctgagccagcacacagcggagttgatcctgggctgaataatccagagtgaggagttggacgggactgggagtgatgaaatccagaggggaacctggagtcagcagttaggagggccccgccttccccagtgagaaggtgaccatgcagcacctcggtgaccgcctggcctcctacctggacaaggtgcgtgctctggaggaggccaacgccgacctggaagtgaagatccgtgactggtaccagaggcagcggcccagtgagatcaaagactacagtccctacttcaagaccatcgaggacctgaggcacaagatcattgcggccaccattgagaatgcgcagcccattttgcagattgacaatgccaggctggcagctgatgacttcaggaccaattaggagcacgagctggccctgcggctgactgtggaggctggcgtcaatggcctgtgccgggtgttggacgagctgaccctggccaggactgacctggagatggagatggaaggcctgaaggaggagctggcctacctgaggaagaaccacgaggaggagatgcttgctctgcgaggtcagaccggtggagaagtgaacgtggagacggatgccgcacctggcgtggacctgagctgcatcctgaatgagatgcgcaaccagtacgagcagatggcaaagcacaaccacagagatgctgggcctggttcctgagcaagaccaaggagctcaacaaaaaagtggcctccagcagtgaactggtacagagcagccgca

SEQ ID NO: 10821 - protein, 85 aa, Homo sapiens
MQHLGDRLASYLDKVRALEEANADLEVKIRDWYQRQRPSEIKDYSPYFKTIEDLRHKIIAATIENAQPILQIDNARLAADDFRTN

SEQ ID NO: 10822 - DNA, 917 bp, Homo sapiens
catgctcttagccttcctgagcaccttcccttttttcagccaactgctcgctcgctcacctccctccttggcacgatgagcacctgcagccaccagttcacctcctccagatccatgaagggctcctgcagtatcgggggcagcatcgggggcggctccagccgcatctcctctgtcctggccggagggtcctgccatgcccccagcacctactggggggcctgtgtgtctccttctctcgcttctcctttgggggagcctgcgggctggggggcggctatggcggtggcttcggcagcagcagcagctttgctagtggctttgggggaggatatggtggtggccttggtgctggcttcggtggtggcttgggtgctggcttgggtggtggctttgctggtggtgatgggcttctggtgggcagtgagaaggtgaccatgcagcacctcggtgaccgcctggcctcctacctggacaaggtgcgtgctctggaggaggccaacgccgacctggaagtgaagatccgtgactggtaccagaggcagcggcccagtgagatcaaagactacagtccctacttcaagaccatcgaggacctgaggcacaagatcattgcggccaccattgagaatgcgcagcccattttgcagattgacaatgccaggctggcagctgatgacttcaggaccaattaggagcacgagctggccctgcggctgactgtggaggctggcgtcaatggcctgtgccgggtgttggacgagctgaccctggccaggactgacctggagatggagatggaaggcctgaaggaggagctggcctacctgaggaagaaccacgaggaggagatgcttgctctgcgaggtcagaccggtggagaagtgaacgtggagacggatgccgcacctggcgtg

SEQ ID NO: 10823 - protein, 85 aa, Homo sapiens; identical to SEQ ID NO: 10821

SEQ ID NO: 10824 - DNA, 530 bp, Homo sapiens
gcactgaacccctgccctttcattcttgggcctgtgctaatttctgtgcattcccaactgtgatttttcaccaatttaggggaacctcctctgacagggcctgcttctccccagcagtgcttgcaggggcctgggctggctggcatccctgggtcgatgggtgctcctctccctgcaggctggccactcagtactccttgtccctggcctcgcagcccacccgggaagccacagtgaccagccaccaggtgtgccatcgtggaggaagtccaggttggagaggtggtcttctgtaagcaggtccatctctccacccactgaggcccctttctgcctgtgacagccccacctcgagggtcacggcacagccatcagctccagctcccagcatgctactgccacgccccgagtgtccgtctgggcactggtccatgacctgttgtctttctgtatctactttctgcagcccctcactgaggaggcctcctgggtttgtccagtgcctgctattaaagctttgctccaagttc

SEQ ID NO: 10825 - protein, 46 aa, Homo sapiens
MLLPRPECPSGHWSMTCCLSVSTFCSPSLRRPPGFVQCLLLKLCSK

SEQ ID NO: 10826 - DNA, 2334 bp, Homo sapiens
ttaaatgtcttgagattaaaaaagatgttttgtagttatactcaagcttggaaccatagtgaccaactgttacggacagactggattgtatccccttccaattaagttacggtgctgctacagaaagaaaagaggttgagactgagctacagttaatctgtggcaaggtgctggatgcactggacaaacacctcattccagtagctgacactggcaattgaactaattgacacctaccaccgcttgctggaggttgaggacgcccagtgagtgtgcacccgggctggagaaggcaggaggtatggcccggaaaagagacacagaaaggtaatccaagagggctttctggaggaggtggcagctgagcctagaggtgaatttcgttggggaagagggagtgaggcctaggcagcttaggccatgacccccatggtgggagatggctgcataagggtctctctcctggcatccgtctttacccatgcctgggcatcctacccccatcaccctttaacccccgagggccttggctgggtcccagaaattcccaggagggtcagagaagaccacggggactctcatcacccccaccctggctcacttccaaaaaggctgcaagaaggatgttggagggtctcctggaggctgccaagggcattttctcatggagcccacatctctccccgatcgtggtggctgtgatcggtaattccagcttcatactggctacaggtggatgatgcccacctggctgccgatgacttctgcaccaagtgaggctgggtctctggagctgccccaggggctggacaagctgaccctgcctggagccaacctggagatgcagcctgagaacctcaaggaggacctggtctacctgaagaagaaccatgaggaggaaatgaacgccctttgaggtcaggtggacaaggatgtcagtgtgaagatggacactgtgcctggagtgaacctgagctgcatcctgaatgagatgcgtgaccaggacaagaaactggtggagaagagctgcaaggatgcccagggctggttcttcagcttggtgggtggccgtgtgtaagcaggtgtgcacacgtgtgggcacatacgccgtgtgctggtgcagttggaacaccggcagattcacaggctgtcccagttggaaggacttttggaaaccagtcggaccagcccttcatgtcttcaatgtaaaatgtgaggctcagagaggactcaagctcacacagcccttcactgtggcctgcaaaatagatccagttctctgcaagtctggtcttgggtttccaccacagctgtttacaggatgtgtgtatttgagtacatacacatacccttggcaagcacaggctgagtgtgtccgctgtcctagggacagcaacaggtgcaaaagaataacacccagtgcctgtctttgaggtgctgtagttcggtaggagtaagaaatgcaaacgaccgcagagcaggctgaattcctccaaggtccaatgtgggtgcagagagtctttgtgtgcagagagaggggctgaactgcgagctggccaccaacacagaggccctgcagagcggcaggatggagatatggagctctacatctctgtgcagaacctgagccgtcccagctcagcaagaaagcattgctggagggcagcctggtggagacggaggtgtgttacaggacccagctggcccagctgcaggggctcatcagaagcatggaacagcagctgtgcgagctctgctgtgatgcagagcaccaggaccacgagcaccaggtccttctggacgtgaagacgcagctggagcaggagatcgccacctacagccgcttgctagaggttgaggacgcccagtgagtgtgcacccaggggaacctcctctgacagggcctgcttctccccagcagtgcttgcaggggcctgggctggctggcatccctgggtcgatgggtgctcctctccctgcaggctggccactcagtactccttgtccctggcctcgcagcccacccgggaagccacagtgaccagccaccaggtgtgccatcgtggaggaagtccaggttggagaggtggtcttctgtaagcaggtccatctctccacccactgaggcccctttctgcctgtgacagccccacctcgagggtcacggcacagccatcagctccagctcccagcatgctactgccacgccccgagtgtccgtctgggcactggtccatgacctgttgtctttctgtatctactttctgcagcccctcactgaggaggcctcctgggtttgtccagtgcctgctattaaagctttgctccaagttc

SEQ ID NO: 10827 - protein, 69 aa, Homo sapiens
MELYISVQNLSRPSSARKHCWRAAWWRRRCVTGPSWPSCRGSSEAWNSSCASSAVMQSTRTTSTRSFWT

SEQ ID NO: 10828 - DNA, 623 bp, Homo sapiens
ttgttctcacttaatacatgagaacatgcaatatttggctgtttctgtgttaattcacgtaggataatgaccttcagctgcatctgtgttgctgcaaaggacatgattttgttcttttttatgactgcctagtactttgtggtgtatatgcaccacattttctttatttaatgaaccgttggtggatacttaccttggttccatgaccttgctgttaagttgaactaattgacacctaccaccgcttgctggaggttgaggacgcccagtgagtgtgcacccgggctggagaaggcaggaggtatggcccggaaaagagacacagaaaggtaatccaagagggctttctggaggaggtggcagctgagcctagaggtgaatttcgttggggaagagggagtgaggcctaggcagcttaggccatgacccccatggtgggagatggctgcataagggtctctctcctggcatccgtctttacccatgcctgggcatcctacccccatcaccctttaacccccgagggccttggctgggtcccagaaattcccaggagggtcagagaagaccacggggactctcatcacccccaccctggctcacttccaaaaaggctgcaagaa

SEQ ID NO: 10829 - protein, 66 aa, Homo sapiens
MTPMVGDGCIRVSLLASVFTHAWASYPHHPLTPEGLGWVPEIPRRVREDHGDSHHPHPGSLPKRLQ

SEQ ID NO: 10830 - DNA, 798 bp, Homo sapiens
ccaactgcctttcacctagaagcgctccacgcgtgcgcccgcctgtgtccctgcgcctggtgtgtctgtgcgcccagccagccccatgagctgggcccctgagctccgccccaacagccaacaggagacccaggagagtcgctgccagggccatcacggctgccgccgcccccgcccccgccgctacctcagaactgaacagtgttggctgcgggcgaaagacagaaggtcgtgggaacatacagagacctacagggaagacggccatgggacaagggaggcagagtctggagttacgctgcctacagtcacggaatgccaaggacagctggaaaccaccagaagctaagaaggagattttacctgaaagcctctcaaagaaatcaatcatactcacacctcctttttgaatttctggcctcgtgaatggtgaaaaaataaatttctgtcgtcttaagccccacggtttgtagtcatttgttctgttcctagccttaggaaactaacacagcatgctaagggaaaagaagagaattctgcataaaatgtcattttactttttaaaacaactactgttgacagtaaatgagtattcttccaagattcatatgcagaacatatatgcagcccggaacattttttgggacccatggcataagtgattatgatagataaaatccaaatattaacctgccaaaagagttattttttcttttgcagtcatttaaaggtaataagcagaggtcatgagccctgtaaaaattaatctattcatttgttgtcacttgatacttacga

SEQ ID NO: 10831 - protein, 87 aa, Homo sapiens
MSWAPELRPNSQQETQESRCQGHHGCRRPRPRRYLRTEQCWLRAKDRRSWEHTETYREDGHGTREAESGVTLPTVTECQGQLETTRS

SEQ ID NO: 10832 - DNA, 2177 bp, Homo sapiens
aacgtcttcccacctttttctcccctctccgtcttctcccctccttcttccccactgcggtcttcccgcatcctcttctgccgtctccctactgtcttcttcccgcaccttcttctcccccgcagttttttttccccttccccaccgttttcttcccctcagtctctcccattcctcgcagcacgggttcctgtggcggcagcttttccttccatctccttctctccacccgctggcttccagtctccaccttcccgcctattcccccagcagcgtcttcccgccgctccctcttctcccctccccctcctcaccgtcttctcccggcctattaccgccaaccgttttcttcctcaccccgcacccttttcttcccatgtctgccttagtcttcttcccaccctcttctcctctccccatcgccttcttcccaccctcttctcctctcccaatcgtcgtctttcccagcctcttctccattttcttgccgcctccatatccccaccttctcgcagcagcgtcttcctgccgcgcttttctctcccctcaccatcttctcttcctcttccccaccgtcctctccccacgccctcttctcctcactgtcttctccccgcgccttccccacaaccgttttgtcccccgttttcttcccctcacaccgttttcttcccatgtcctcccaccgtctcgcagcagcgtctgtcagtcgcaatcttcttcccactttcttctctccccctcccatcgtcttttttccccagcctcttattctccgccatcttcttcccctccccaccttctcgcagcagcgacttcctgccgcgtttttctctccccgcaccctcttctcccctcttccactccccaccgtcttcgcccccgatcgtcttcttgcccacccccttctcgcgctctccaactgcctttcacctagaagcgctccacgcgtgcgcccgcctgtgtccctgcgcctggtgtgtctgtgcgcccagccagccccatgagctgggcccctgagctccgccccaacagccaacaggagacccaggagagtcgctgccagggccatcacggctgccgccgcccccgcccccgccgctacctcagaactgaacagtgttggctgcgggcgaaagacagtggggcccggaagactgcggggagagggggaggaggggacggagagggtgggaaagaccttggaaagtgggatggggagaaaggtggggaagaagacagtggggagaaagtgcagggagaagacagtgtggtagagaagacagtggaggaaaacggtgaggagaaaggagggtggaaaagaagacgatgaggacaaggccgggcgcggtggctcacgcctgtaatcccagcactttgggaggctgatgcgggcggatcacaaggtcaggagttcgagacctgcctgaccaacatgctgaaacccagtctctactaaaaatacaaaaattagctgggcgtgatggcgagcgcctgtaatccagctactccagcgcctgaggcaggagaatcgcttgaaccccggaggcggaggttgcagtgagctgagaactcaccattgcactccagcctggatgacagagaaggtcgtgggaacatacagagacctacagggaagacggccatgggacaagggaggcagagtctggagttacgctgcctacagtcacggaatgccaaggacagctggaaaccaccagaagctaagaaggagattttacctgaaagcctctcaaagaaatcaatcatactcacacctcctttttgaatttctggcctcgtgaatggtgaaaaaataaatttctgtcgtcttaagccccacggtttgtagtcatttgttctgttcctagccttaggaaactaacacagcatgctaagggaaaagaagagaattctgcataaaatgtcattttactttttaaaacaactactgttgacagtaaatgagtattcttccaagattcatatgcagaacatatatgcagcccggaacattttttgggacccatggcataagtgattatgatagataaaatccaaatattaacctgccaaaagagttattttttcttttgcagtcatttaaaggtaataagcagaggtcatgagccctgtaaaaattaatctattcatttgttgtcacttgatacttacga

SEQ ID NO: 10833 - protein, 69 aa, Homo sapiens
MTEKVVGTYRDLQGRRPWDKGGRVWSYAAYSHGMPRTAGNHQKLRRRFYLKASQRNQSYSHLLFEFLAS

SEQ ID NO: 10834 - DNA, 1056 bp, Homo sapiens
atgaagtatcagaagggacaccgagctgggctgccagaggacaaggggcctgaacctgttggaatctacagcagcgttgatcgctttgggattctgcaggctccagagcccaagacccagcatccacgggcggctctgggaagcctggcagctccgctaactccaacattcctcatttggcagcaaattcggcaggagaaaaaaagaaagagcaagtggctggaaatgctgggcaaatgcgagtcatataaaaacagcaaaaagctcatagatcgcatctataagggcattcccatgaacatccggggcctgatcatgaaggagaagggcaagaggtcttctgaacacatccaccagatcaaactggacgtgagcaggactctccagaaccatgtcttcttcagggatcgatatggagtgaagcagcgggaactattctacatccttgtggcatattcagagtataacccggaggtgggctactgcagggacctgagccacattgccaccttgtttctcctttatctgcctgaggaagatgcattctgggcactggtgcagctgctggccagtgagaggcactccctgccgggattccacagcccaaatggcgggacagtccaggggctccaagaccaacaggagcatgtggtacccaagtcacaacccaagaccatgtggcatcaggacaaggaaggtctatgcggacagtgttcctcattaggctgccttctccggatgttgattcaagggatctctctcgggctcaccctgtgcttgtgggacatgtatttgctggaaggacaggtgttgatgccgatcagaagcattgcttttaaggttcagaagaagcgcctcatgaagacatccaggtctggccttttggcatgttttcggaaccagttcttccatacctgggccacggatgatgacactgtgctcaagcatcttagggcctctacgaagaaactaacaaggaagcaaggggacctgccacccccaagtgggctccagtgccatgtcccctcccatgtcaccctctggggcagtcaatag

SEQ ID NO: 10835 - protein, 351 aa, Homo sapiens
MKYQKGHRAGLPEDKGPEPVGIYSSVDRFGILQAPEPKTQHPRAALGSLAAPLTPTFLIWQQIRQEKKRKSKWLEMLGKCESYKNSKKLIDRIYKGIPMNIRGLIMKEKGKRSSEHIHQIKLDVSRTLQNHVFFRDRYGVKQRELFYILVAYSEYNPEVGYCRDLSHIATLFLLYLPEEDAFWALVQLLASERHSLPGFHSPNGGTVQGLQDQQEHVVPKSQPKTMWHQDKEGLCGQCSSLGCLLRMLIQGISLGLTLCLWDMYLLEGQVLMPIRSIAFKVQKKRLMKTSRSGLLACFRNQFFHTWATDDDTVLKHLRASTKKLTRKQGDLPPPSGLQCHVPSHVTLWGSQ

SEQ ID NO: 10836 - DNA, 997 bp, Homo sapiens
ggcaagttggcatctaaaaagtgtctgcccaagacatgcatctggcccatggtacagccagtccacacagccaatggtgaaatccgggtggcattgtttcctcaccgccatgcctcatgcaagcagctgccttcttataacggtggacacaaatcccggcactggtgcagacgcttgctggctgtgggtgaagtagccccatctcttgccgcacgtgcagagagagaggaacttccagtgcccgctatggagccacagcccacagcatggggaagtccccatccagaggcagtgctgcagctagaggtagctccagagtcctccgggccctgcaccgatacagccaaagaccagcaaagcgacaagctgccagacctcatgccacctgccgtagccactgggctcagccctggagctgagagcatcgctggagatagacgtggcagagaagaggttgcgagcatggccccagccagcagctcccacgctgcccctagtcctgggcatggagcgagccttggtgtcagagaccagggtgtgcagtctgagctcctctaccttactaaagagagacctcttttatttaccagagccacagccctgctgcctcaggaccttttcattctgccggtgctggggctgtctatctgcaagctggaggtgttgagagcaggaaaaggaggctgtgaggaagggttcgggcagctcctcctgctctcagaggtggcctcctcctccaggcatggaggtctgtccactactgggcttctgggctatttgcccctgatttgctccctggtacgggctcttcttaacaggcaggcaaggggtgcggggaccaggcgagggcttcaaagggtacagtaccaaatcttccaaactcagcacttgtgccctggggtctccaaactgtcttctgccctaggatttattcatactgttaaattaccagtttatgcaaatgatatgtaaataaagctcaattttttgaaacttc

SEQ ID NO: 10837 - protein, 307 aa, Homo sapiens
MVQPVHTANGEIRVALFPHRHASCKQLPSYNGGHKSRHWCRRLLAVGEVAPSLAARAEREELPVPAMEPQPTAWGSPHPEAVLQLEVAPESSGPCTDTAKDQQSDKLPDLMPPAVATGLSPGAESIAGDRRGREEVASMAPASSSHAAPSPGHGASLGVRDQGVQSELLYLTKERPLLFTRATALLPQDLFILPVLGLSICKLEVLRAGKGGCEEGFGQLLLLSEVASSSRHGGLSTTGLLGYLPLICSLVRALLNRQARGAGTRRGLQRVQYQIFQTQHLCPGVSKLSSALGFIHTVKLPVYANDM

SEQ ID NO: 10838 - DNA, 1048 bp, Homo sapiens
gagacgctcaagagagcaagatgttctcctgttgcttccccacttcgagaggttgctgcttcaggaatggagggagtgagagccttttccgacaatgccgaagaaggctcatccctcaccccagacgcctgtggccctttgtaagaaggcgcacccaggtaccacaggacagcccggggcaggccctagctggccaggccacaccagagatcccatcggggctgcctctgcacattgtccttgtccaggaggagattcgggagcccatggaggcacagacacatgctcctggtccgtacgcagacatagcagcacttgcggcaccggctgtcgagccaaagccagcatgggaagagccccctccagagagagcgctggaggtggagggagctccagccaaggaccagcccagccaggagctgcctgaaatcatggcacctactgtagccactggccttaatgctggagctgaaaacgtggctggagagagaagtgggagggagggggtgacaagcacagccccagccagcagatcccatgctgcccctagtcctgggcatggtggcaaacatggaggcggagaccagggcattcagactggactcctgtacctcgctggagagaggcttctctcattcgccggaaccacagccctgctgctgcagggcctgtttattgtgctaattctggtggggtatatctctgtgaaggtgatgctcaagagcattaaaacaaggctgggaagaagagttccagcagctcctcctgctctcagacgcaatcttctcctccaggcatggaagtgtgtctgcaactgggcatccaggctgtttgcccctaatgtgctgccccgaacgggctcttaacaggtgggcaggggttgaggggaccaggaggtggctccaaagggtacagcaaggaaagcttttaaagacagctgttgtgctccaggctctccatgccaccacctgccctagcatttattaatagtgttagaattacaagtttatgaaatgaaatataaataaagtttgatttctgaaacttc

SEQ ID NO: 10839 - protein, 281 aa, Homo sapiens
MFSCCFPTSRGCCFRNGGSESLFRQCRRRLIPHPRRLWPFVRRRTQVPQDSPGQALAGQATPEIPSGLPLHIVLVQEEIREPMEAQTHAPGPYADIAALAAPAVEPKPAWEEPPPERALEVEGAPAKDQPSQELPEIMAPTVATGLNAGAENVAGERSGREGVTSTAPASRSHAAPSPGHGGKHGGGDQGIQTGLLYLAGERLLSFAGTTALLLQGLFIVLILVGYISVKVMLKSIKTRLGRRVPAAPPALRRNLLLQAWKCVCNWASRLFAPNVLPRTGS

SEQ ID NO: 10840 - DNA, 1458 bp, Homo sapiens
atgagactgctgagcacctccaccagagggaaagtggaagtggccccaagaaagagggaaccacgaagcagtttcagtgtggaaagaagaaaccctctggtggccttggcccgggaatatggcggtttcaagtgcaatgctgtactgaaatggtaccagaagaagacagaaggttacatggttgagactgaactaaagttaatctgtggcgacctgctggatgcactggacaagcacctcattcagcagctgacgctggcaagtccaaggttttctattatgaaatgtaggttctatactagaaaggaaaatgcaatgatagtaggaaatgctaaagatacagctcatacaaaagcagaatggaatattctggaagaagtaaagcatcccttcatcgtggatttaatttatgcttttcagactggtggaaaactctacctcatccttgagtatctcagtggagaactatttatgcagttagaaagagagggaatatttatggaagacactgcgtgcttttacttggcagaaatctccatggctttggggcatttacatcaaaaggggatcatctacagagacttgaagctggagaatatcatgcttaatcaccaagcatattattttcctcattgtacggcccctgaaatcttgatgagaagtggccacaattgtgctgtggattgttggagtttgggagcattaatgtatgacatgccaactggagcagctcatccattctttagacacattaactgggaagaacttctggctcgaaaggtggagcccccatttaaacctctgttggtggaggaggaggaggatgatgatagtgattattttttggtcatggagcataatgtgacccactttaaaaaacaacaaacaattcaatctgaagaggatgtaagtcagtttgattccaagtttacacgtcagacacctgtcgacagcccagatgactcaactctcagtgaaagtgcccatcaggtctttctgtgtgtgcctcacgaaatggctggaaagaagttaacaggtctaaaaatgaggttgaggacgtgggagactgtacacattggtggttttaggtgtgcatcgctgtgtagtgtgaaagaaaagttttcctttgaaccaaaaatccgatcacctcgaagatttattggcagcccacgaacacctgtcagaggcgcttcggccagcacagcaaatcctcagacacctgtggaatacccaatggaaacaagtggcacagagcagatggatgtgacaacgagtggggaagcattggcaccacttccaatacgacagccgaactctgggccatacaaaaaacaagcttttcccatgatctccaaacggccagagcacctgcgtatgaatctatgccacagcaatgcttttaatgaatttaaggcaaaaaaggtggagaggccgatgtgtgagcatcctacagggtga

SEQ ID NO: 10841 - protein, 485 aa, Homo sapiens
MRLLSTSTRGKVEVAPRKREPRSSFSVERRNPLVALAREYGGFKCNAVLKWYQKKTEGYMVETELKLICGDLLDALDKHLIQQLTLASPRFSIMKCRFYTRKENAMIVGNAKDTAHTKAEWNILEEVKHPFIVDLIYAFQTGGKLYLILEYLSGELFMQLEREGIFMEDTACFYLAEISMALGHLHQKGIIYRDLKLENIMLNHQAYYFPHCTAPEILMRSGHNCAVDCWSLGALMYDMPTGAAHPFFRHINWEELLARKVEPPFKPLLVEEEEDDDSDYFLVMEHNVTHFKKQQTIQSEEDVSQFDSKFTRQTPVDSPDDSTLSESAHQVFLCVPHEMAGKKLTGLKMRLRTWETVHIGGFRCASLCSVKEKFSFEPKIRSPRRFIGSPRTPVRGASASTANPQTPVEYPMETSGTEQMDVTTSGEALAPLPIRQPNSGPYKKQAFPMISKRPEHLRMNLCHSNAFNEFKAKKVERPMCEHPTG

SEQ ID NO: 10842 - DNA, 1020 bp, Homo sapiens
atgtataagtcagagtctcctaaagagcctgaacaactgaggaagctcttcgttggacggttgagctttgaaacaactgatgagagcctgaggagccactctgagcaatgggaacgctcacggactgtgtggagacagagccctgaagcaaagacatgtgggtcagagaaaaagtatttaagggccacgcaagccaatcgtagccaactgcgcagtcctccaggaactgaaagcagtgaggatgcctcagcccctcactgtgtccacacaagattgacagaagaaggttcttgtcttcattctggagatgttcatatccagataaatgccatatctaaagaatgtgcggaaaatacaagctccagaaatataaggtcagatgtccatagctgtgcccatggatgggaaaggtcctcaaagattcagtgtgcttggttactggtattcttagcaggatcttctgttcttttatattacacctttcattctcagtcactttattacagcttctgggaagtactttggattattggaattacagacttcattctgaaattctttttcatgagcttaaaatgccttatcttattggtgccttctttcatcatgccttttaaatctaagggttactggtatatgcttttagaagaattgtatcaatactaccgaacttttgttcccatactagtttggtttcactaccttataagctatggggagtttggtaatgtaactagacggagtcttaggatattgctggctttactttacctcgtactaaaaagttatggagtggctgccagcaagagacagtgttcagatgtggatggtacttgttcaatatgtcaagctgaatttcagaagccaattcttctcatctgtcagcatatattttgtgaagagtgcattaccttatggtttaacagagagaaaacatgtccactctgcagagctgtgatttcagaccatataaacaaatggaaagatggagccacttcatcacaccttcaaaattattaa

SEQ ID NO: 10843 - protein, 339 aa, Homo sapiens
MYKSESPKEPEQLRKLFVGRLSFETTDESLRSHSEQWERSRTVWRQSPEAKTCGSEKKYLRATQANRSQLRSPPGTESSEDASAPHCVHTRLTEEGSCLHSGDVHIQINAISKECAENTSSRNIRSDVHSCAHGWERSSKIQCAWLLVFLAGSSVLLYYTFHSQSLYYSFWEVLWIIGITDFILKFFFMSLKCLILLVPSFIMPFKSKGYWYMLLEELYQYYRTFVPILVWFHYLISYGEFGNVTRRSLRILLALLYLVLKSYGVAASKRQCSDVDGTCSICQAEFQKPILLICQHIFCEECITLWFNREKTCPLCRAVISDHINKWKDGATSSHLQNY

SEQ ID NO: 10844 - DNA, 5346 bp, Homo sapiens
gtggtgtcggtgtcggcagcatccccggcgccctgctgcggtcgccgcgagcctcggcctctgtctcctccccttccagccctcacctccacgcgggaccgctcgcgccagtcaactccgcgcacgttgcccctgcttggcagccaataaaagggggctgaggaaataccggacacggtcacccgttgccagctctagcctttaaattcccggatcgggcacctccacgcaccgcggctagcgccgacacccagctagcgtgcaaggcgccgcggctcagcgcgcaccggcgggcttcgaaatcgcagtcctccggcgaccccgaactccgccccggagcctcagcccctggaaagtgatcctggcatccgagagccaagatgccggcccacttgctgcaggacgatatctctagctcctataccaccaccaccaccaccattacagcgcctccttccagggtcccgcagaatggaggagataagttggagacgacgcccctctacttggaagaagacattcgccctgatataaaagatgatatatataacctcacctacaaggataaggaaggcccaagccccaaggttgaatatgtctggagaaacatcatccttatgtctctgctacacttgggcgccctgtatgggatcactttgattcctacctgcaacttatacacctggctttggggggtattctactattttatcagtgccctgggcataacagcaggagctcatcctctgtggagccactgatcttacaaagctcggctgtccctgtggctctttctgatcattgccaacacaatggcattccagaatgatgtctatgaatgggctcgcgaccaccgtgcccaccacaagttttcagaaacacatgctgatcctcataattcctgacgtggctttttcttctctcacgtgggttggctgcttgtgcgcaaacacccaactgtcaaagagaagggcagtacgctagacttgtctgacctagaagccgagaaactggtgatgttccagaggaggtactacaaacccggcttgctgttgatgtgcttcatcctgcccacgcttgtgccctggtgtttctggggtgaaacttttcaaaacagcgtgttcgttgccactttcttgcgatatgctgtggtgcttaatgccacgtggctggtgaacagtgctgcccacctcttcagatatcgtccttatgacaagaacattagcctccgggagaatatcctggtttcacttggagctgtgggtgagggctttcacaactaccaccactcctttccctatgactactctgccagtgagtaccgctggcacatcaacttcaccacattcttcattgattgcatggccgccttcggtctggcctacgaccagaagaaagtctccaaggccgccatcttggccaggattaaaagaaccggagagggaaactacaagagtggctgagtttggggtccctcaggttccttcttcaaaagccagccaggcagaggttttaatgtctgtttattaactactgaataatgctaccaggatgctaaagatgatgatgataacccattccagtacagtattcttttaaaattcgaaagtattgaaagccaacaactctgcctttatgatgctaaactgacattatttcttctcttatcctctctctcttctaggcccattgtcctccttttcactttgttgctatcatcctcctttctcttattgccacccaggcaagcagctggtcagtctttgttcagtgtccagcttccaaagcctagacaacctttctgtagcctaaaacgaatggtctctgctccagataactctctttccttgagctgttgtgagctttgaagtaggtggcttgagctagagataaaacagaatcttctgggtagtcccctgttaattatcttcagcccaggcttttgctagatggaatggaaaagcaacttcatttgacacaaagcttctaaagcaggtaaattgttgggggagagagttagcatgtatgaatgtaaggatgagggaagcgaagcaagaggaacctcttgccatgatcagacatgcagctgcctacctagtgaggacttcaagccccaccacatagcatgcttcctttctctcctggcttggggtaagaagtggctgtggtgtttggcaatgctaattcaatgccgcaacatatagtttaggccaaggataaagaagagacactttaagtttgtagtaaaagtggtctctgctggggaagggttttcttttctttttttctttaataacaaggagatttcttagttcatgtatcaagaattcttgaagttgggtgtttccataattggtaaaaacagcagctcacagaattttgagtattccatgagctgctcatcacagttctttcctctttctgctctgccatcttcaggatattggttgttcccctcatagtaataagatggctgtggcatttccaaccatccaaaaaaagggaaggattttaggaggtggagtcgggtcaaacaagaaatatatatatacatatatacattgcttagaacgttaaactattagagtatttccctcccaaagagggatgtttgaaaaaactctgaaggagaggaggaattagttgggatgccaatttcctctccactgctgtacatgagatggggaggttgagggacaggatctataggcagcttctaagagcaaacttcacacaggaagggatctgagaacacattgccgggggcttgagaaggttactgagtgagttattgggagtcttaataaaataaactagatattaggtccattcattaattagttccagtttctccttgaaatgagtaaaaactagaaggcttctccccacagtgttgtgccccttcactcattttttattggcggggtggggggctctgttaacatctagcctaagtatagaactgcctggggggcagggttaggaatctcttcactaccctgattcttgattcctggttctaccctgtctgtcccttttcttttactagatctttctcttccctgaacgttttcttctttccctggacaggcagcctcctttgggtgtattcagaggcagtgatgacttgctgtccaggcagctccctcctgcagacagaatgctcagggtcactgaaccactgcttctcttccgaaagtagagctagctgccactttcgcatggcctccggagtgtctccacctacacctctgtgctcccccgccacactgatggctcaagacaaggctggcaaaccctcccagaaatgtctctggcccagaaagcctctctctccctccctctctcatgaggcacagccaagccaagtgctcatgagccagtgggcctgccacagagcaaacgagggtttattttcagtcccctctctctggatcagaaccagagagcatgctgaatgcccctctgcttgctcggtaagggtgccccacctgaatcagtgctctcagctggcagtgcaatgcttgtagaagtaggaggaaacagttctcactgggaagaagcaagggcaagaacccaagtgcctcacctcaaaaggaggccctgttccctggagtcagggtgaactgcaaacctttggctgagacctgggatttgagataccacaaaccctgctgaacagagtgtctgttcagcaaactaaccagcattccctatagcctagggaatagtatagaagtctggcaaaaacagaaacagaacatcagtgttttgagaaccttggactactcctgtccctgtagctcagtcatcaaagcagaagcctggctttgctctattaagattggaaatgtacactaccaaacactcagtccactgttgagccccagtgctggaaggaaggagggcctttcttcctgtgttaattgcatggaggctacaggggttagcctggactaaaggcatccttgtgttttgagctattcacctcagtagaaaagaatctaagggaagatcactgtagtttagctctgttgacctgtgcacctaccccttggaaatgtctgctgttatttctaattccacaggtcataagatgccttcttgatgatatatgaacgataaaaacaactttcacttcttcctattgtaatcgtgtgccatggatctgatctgtaccatgaccctacataaggctggatggcaccctcaggctgagggccccaatgtatgtgtggctgtgggtgtgggtgtgggtgtatctgctgagtaaggaacactattctcaagattctaaagctcaattcaagtgacacattaatgataaactcagatctgatcaagagtctggatttctaacagtccttgcttcggggctgtgctggcaacttaactcgggtgccttacatcttttctaatcatagtgttgcatatgagcctgccctcactccctctgtggaatccctttgcacctgagagcctactgaagtggctggtagaaaaaggggcctgagtgaaggattatcagtatcgcgatttgcaggattcccttctgggcttcattctggaaacttttgttagggctgcttttaagtgcccacatttgatggagggtggaagtaatttgaatgtatttgatttatatatatatatatttttaaggttaaaagatggttgtagcatttaaaatggaaaattttctcctcggtttgctagtatcttgggtgtattctctctaagtgtagctcaaataggtcatcatgaaaggttaaaaaagtgaggtggccatgttacgctggtggttaaggccagggcctctcctaccactgtgccactgacttgctatgtcaccctgggcaagtcacttaactataaggtgcctcagttttccttctgttaaaatggggatgataatactgacctacctcaaagggcagttttgaggcgtgactaatgctttttagaaagcattttgggatccttcagcacagggattctcaagacctgagtattttttataatagcaatgtccaccatcaacttgatatgtccgtgtgtcccagatgctgtcattagtctatatggttctccaaaaaattgaatgaatccattggagaagcagtggattaactagccagacaaaatttgagaatgcataaaaaacacattgccacggaaacatacagaggatgccttttctgtgattgggtgggattttttccctttttatgtgggacatagtagttacttgtgacaagaataattttggaataatttctattaacatcaactctgaagctaattgtactaatctgagattgtgtttgtttataataaaagtgaagt

SEQ ID NO: 10845 - protein, 148 aa, Homo sapiens
MFQRRYYKPGLLLMCFILPTLVPWCFWGETFQNSVFVATFLRYAVVLNATWLVNSAAHLFRYRPYDKNISLRENILVSLGAVGEGFHNYHHSFPYDYSASEYRWHINFTTFFIDCMAAFGLAYDQKKVSKAAILARIKRTGEGNYKSG

SEQ ID NO: 10846 - DNA, 778 bp, Homo sapiens
gcggaggagcaactctgtgtccagcttagagaactggaagaagccgcaaccttccacctgctggagggtggaggatggatggagcctggagcctgggtcactacctcgctgcggttggtagtggcgatagagcagtaggagagcggtcagcagcaggagcttctcctgccaggctggaggactagaaggaagaggcactgccacatgctggaggctggaacctgtgccaccatggcttgcctcgctgtggttggtggtgacgtcggagactgcagcttagccacagtggtagaaacgtgatggggtagctgctccaagccaggctgaaggaggagaaggaggagtcgcctgtggtacggtggagcagatgacgtggctctgcagcttgcctcatgcagttggtggtggagatggagaccacagctcgactggagcggtaggagggcacccacgggggcctggagagtattgtcatctgcatgagcaaagggttcatcaccacatctttgcaagaggaaaaagaaaggggaagaatcatgtgtctaatgttgtaagggtcttgctctgtcacccaggctgcagcgatggaatgatcatagctcactgcagacttgacctcctgtgctcaaatgatactcctgctcaaatcagcctaggttcatatgagtctcccaagcagcaaggattcagcttcaagttttgatggcttattttcgtatatgtaagttatattctttaaatgttgatgtcaaatctattaaacttttttattatagtc

SEQ ID NO: 10847 - protein, 111 aa, Homo sapiens
MTWLCSLPHAVGGGDGDHSSTGAVGGHPRGPGEYCHLHEQRVHHHIFARGKRKGKNHVSNVVRVLLCHPGCSDGMIIAHCRLDLLCSNDTPAQISLGSYESPKQQGFSFKF

SEQ ID NO: 10848 - DNA, 1381 bp, Homo sapiens
cggagggaccgacggacgcacgggcgggcggccgggagccatggagcgcggccctggggcccgggggcgcgggccggggtgggcttcccacggcacgacatggagacctgtggttgcgaggctccctggggctcggcttggaccgcgatggggctgggccctggcctcctaacggggctgctgtctggggcggtagctgcgggggcgctctcccctctgcccgcgactcggagcacccccacccctcccctgccgggccaggccgggcggcgttgttggcgggggccccggtggaggcccggcccaggcggcgcccgccatgaacgggctgtcgttgagtgagctctgctgcctcttctgctgcccgccctgccccggccgcatcgctgccaagctcgccttcctgccgccggaggccacctacaccctggtgcctgagcccaagccggggcctggtggggccgggaccgcccccttggggaccctgcgggcctcctcgggcgcaccgcacccgggcgcaggaagctgcacctgacggagcataccgacttccagtacagccagcgcgagctggacaccatcgaggtcttccccaccaagagcgccagcggcaaccgcgtctcctgcatgtatgttcgctgcgtgcctggtgccagcttctacattggcctgggctcccgcctccactgcaacatcttctcctacgactactccggctacgatgccagctcgggcaggccttccgagaggaacctctatgccgacatcgacgccgcctggcaggccctgcgcaccagagcatcggcacggtgcccaccgtggacctggcctcgcgctacgagtgtgccgcggtggtgctgcactcgccgctcacctcgggcatgcgcgtcgccttccctgacaccaagacgacctactgcttcgacgccttccctaacatcgagaaggtgtcctagatcacgtcgcccgtgctcatcatccacggcacggaggacgaggtgatcgacttctcgcacgggctggcgctctacgagcgctgccccaaggcggtggagccgctgtgggtggagggcgccgggcacaacgacatcgagctctacagccagtacctggagcgcctgcgtcgcttcatctcccaggagctgcccagccagcgcgcctagcggcggccccaaccggccggacctcagcaataaggcggcccccggacctcaccccgcgccggccccccaggggctgcatgtggaccccccgggcggcccgggggaccccgccccgacccaggggctgtggacgatgtacaggcaacagagctacgcactcctttccttttggaagcaagaagaaaatacgtgaaaacggaaattaaagatttaaaatt

SEQ ID NO: 10849 - protein, 124 aa, Homo sapiens
MYVRCVPGASFYIGLGSRLHCNIFSYDYSGYDASSGRPSERNLYADIDAAWQALRTRASARCPPWTWPRATSVPRWCCTRRSPRACASPSLTPRRPTASTPSLTSRRCPRSRRPCSSSTARRTR

SEQ ID NO: 10850 - DNA, 2842 bp, Homo sapiens
gcgtggcttggccttacccgcgaggctttgcggtggctgcttggcgtggcagtgatcgcttggcttggcatttctggcttagcggtcctcctttcgcagattggaaaccgcgggctatcctgctgggaggttgtggccgaggcagtagctcgctactgatggcctcctggggtggagaaaagcggggaggggctggggggtctccgaagccggcagtctacgccacgaggaagacccctagtgttgggagccaggaggaccagtggtacttggactacccgggggaccagtggtccttgggcttctcctacagctggtggaagaacagcgtcggcagcgagagcaagcacggtgagggcgccttagaccagctccagcacgatgtccgcctggaagatcttggcgagctccacagagctgcccggtcgggcgacgtccctggggtggagcacgtcttggctcctggagacactggcgtggacaagagggataggaagaagagcattcagcaactagttcctgaatataaggaaaaacagacacctgaaagtcttcctcaaaataacaatccagctgctccaagccaggctgaaggaggagaaggaggagtcgcctgtggtacggtggagcagatgacgtggctctgcagcttgcctcatgcagttggtggtggagatggagaccacagctcgactggagcggtaggagggcacccacgggggcctggagagtattgtcatctgcatgagcaaagggttcatcaccacatctttgcaagaggaaaaagaaaggggaagaatcatgtgtctaatgttgtaaggtaaacattcacaaccaaaaacaaggttttattaacttttgcctttaagaacctgcagtgtttagccctctttgattcctagtattattacctttggtatgaactcttttattaaactgatcactctagaggtttatgcattttgtatcatttttcaagccaacagaaatgtgtaatgcctataattctgacactttagttatttttaaggctatgagcatgtaagatactgttggaagaatatgtataaataccactaggtagcttattttgaagagatagtatctaaatttttgtccagagtagattggttgcagtttcttaggtgtgtttcttaatacgttgcctcaatgttttaaagcatgtagaaatttgaatacagtttaacttcatatagtcctttgtttatagatttaatatttctaaagactaaagacatcacagctccctttaagattcagtaatattaataaaattttagaaatatagggttagaatccaacaaattcagaggaaaattgttaaattctatagctgtagagcagaaatgaaacccaggttctaagctctaagggggccatgaggtaccatacaggtgcatcagtgactgggcatagattcagcaaaattacaggatggttaagagagtgagctgtggagccaaactctatgtaacatgaatttttaaactgcctggtgcctcagtttatccatctttacagtggggactgtagtaagtttttctttttctgctcagttgtctgtcttgttgccactgttccctagtctgtcttgttgccactcagtgcccacatgagaggatctacggtaatttctgacagcctgggactccttaaagaaaaacagaaggtgctacaaaacccattttaggagaaacctctgttgtcctcatggaaccccaagaacttcaggcagacaggtctctctcaaaatctaaggctctcctctgttttgttttgcgttatctgaccttttaggtttggttgggcatcagaaatcagtcggggagagagatctaaagaaagttgtggatatgaagatgtatttatggtaaaaaagttatgaaggaaagaaatgttatatgagagaggatcttgtatggcaaattcttgtcctaaagtagaatgactaattatgaaagagggaaatacaggaaaagtcagaaagttcatgtcatagatggtctgtggaagttgtgctagggttcataaaatgagaaagaaaaacttacaactgctagatcttctcctgtctagaagtgttgtgtatgtgttggatatgtaaaggagccctaattacttggcttagaagaaaaggacggctcttaaatattttgtcagaaaaatagaatctccaatgccttttatttcacatgacttcagtaatctttgggaaataaagacagtgttaaaatcattggtaaaaaaaatcatcaaaatttatccattttgtctaatttaagtcagaggttaaattttagaagtgctttaacgtcataaattgattgactttggaaaattgttctgtttacctggtttggagctgctcaacttctaggtaaggcctgggggacaggtggagttagccatgtctcctagctatgctggaaagagtcagactttacctgcagttctgtcttgtatcctatacactgcacctggtacgttattaaaacttcctgctgcttctaatctctgagttccactttaaatttttccatcacttgaatactatcctctgtactaaatttttccgcaattaaatacttagaatcatttttgcccacttgacccaagcattagtgatatatctttaaaatacttataatgtgtcacaatatatttagcaaatgtagcgaatggcatttttacttttgtcagcatttacatagcatttagcaatgctatctcaagtatttttagtcatttgaatgttacataatatgcttttcctttgtttctatgtaaataaataggagatattcaataaatagtatcaatt

SEQ ID NO: 10851 - protein, 221 aa, Homo sapiens; identical to SEQ ID NO: 1755

SEQ ID NO: 10852 - DNA, 1902 bp, Homo sapiens
ctcatccaatcaagacatgcagtccaggaacctccgtgggcattaccgcagtatataaatgatgctgaagcggaaacacgttttttcaagttcctgtatttttatgtggagttgctcactgcccaacgtagaggactaggaatcaggagtcggtggccgtatgctggaggctggagccgcgggagcgcggctcgcctcgctgcggttgttggcagtgacggagagagagcagcgcggctggagcaggacattgtattagtttcctgcaataaaatatttttacaatgtcagtttgtcgaaactgctggactgtaaactatttctaatcgaaacctgaaattgtgtcacaacatggctgtattacgattccatgtcagaggaaggatatatacgtgcatctggtagtggcttccagttgttgctgtcagatgtttgtttgggaatgcattcagaagagcttatcaaggacttgagtacaaaacaagcatttccacaaaaaagcagtgacacaaatcactatgtaatatagttagcctttgaacaacacggatttgaactgcaggggtctacttatgagcagattttctcccacctctaccacctgagacagcgaagaccaatcttcctcttcctccttctccttagcctgctcaacttgaagactatgatgaagagttatataatgatctacttgcatttaatgaacagaagtctaatgcctacatttaaaggatagcccggcccccagtaaacgcggattcctgctcgtggccttctacgcccattactggagcagcagccatcagcgtagacgacgacgaagtctcccatgtaggaaaacgtgtctctgctaactggaggcgccggcttcaccctcggcttcatgtgcttgcatatggctctgcgctttcatctccatctccatccagtggctcacggagtcgcttgctggctttcgtctctgattcttgtccatgttgattttcctgcccttctgaaacttccgggcttgcagatttcctgacaaagtcccaggtctcatcctctgtggcaaacttcttaaatctggcagcaggaaaccggtccacctgtgctttgcactcattcccggtcagaaagaccccggtcttgccgcccctcctcacggcatagaacatcccgaacccgtgagagcagcggcagggcaaggcggccaaggcgactctgcggccaggaacagaagccggctcatcgctcactcccggcaccaggaagcatttcgactcccaaggaaccactaattttacaaagagagttgtcctaaactgtgacaaattttccagtacttaattctttttacaattcattcgttttttaaatgacaaaattgtatatatgttgtgtaaaacctttttagaaataggtagatggtggaatgattgcattgcgctcaggaacatatgcatacttactttttgtggtgagaacccttcttgattttcaagaatacgatacattaactgcagttaccatgttgtgcaatgtatctcttaaacttattcctcctgtctaactacacttttgaatgatttcaccgtctccccaaacccctgcctcccacccccggtaacctccattctactctctgcttctgtgagtagaagcaggaggctggagaattgcttgaactcaggaggcagaggttgcagtgagctgagatcgagccgctgcactccagcctgtgtgacagagcaagactctcaaaaaaacaaacaaacaaacaaaaaaaacagagaatccagaggtcagacattccttttagtaaggactccaatatggtttctcacctactcactccaacaaaattgctcttctcaaagcacaaacgatattgttaaattatgaattaaagcataattcctc

SEQ ID NO: 10853 - protein, 52 aa, Homo sapiens [sequence omitted]

SEQ ID NO: 10854 - DNA, 3351 bp, Homo sapiens
gttgctcactgcccaacgtagaggactaggaatcaggagtcggtggccgtatgctggaggctggagccgcgggagcgcggctcgcctcgctgcggttgttggcagtgacggagagagagcagcgcggctggagcagtgacacaaatcactatgtaatatagttagcctttgaacaacacggatttgaactgcaggggtctacttatgagcagattttctcccacctctaccacctgagacagcgaagaccaatcttcctcttcctccttctccttagcctgctcaacttgaagactatgatgaagagttatataatgatctacttgcatttaatgaacagaagtctaatgcctacatttaaaggatagcccggcccccagtaaacgcggattcctgctcgtggccttctacgcccattactggagcagcagccatcagcgtagacgacgacgaagtctcccatgtaggaaaacgtgtctctgctaactggaggcgccggcttcaccctcggcttcatgtgcttgcatatggctctgcgctttcatctccatctccatccagtggctcacggagtcgcttgctggctttcgtctctgattcttgtccatgttgattttcctgcccttctgaaacttccgggcttgcagatttcctgacaaagtcccaggtctcatcctctgtggcaaacttcttaaatctggcagcaggaaaccggtccacctgtgctttgcactcattcccggtcagaaagaccccggtcttgccgcccctcctcacggcatagaacatcccgaacccgtgagagcagcggcagggcaaggcggccaaggcgactctgcggccaggaacagaagccggctcatcgctcactcccggcaccaggaagcatttcgactcccaaggaaccactaattttacaaagagagttgtcctaaactgtgacaaattttccagtacttaattctttttacaattcattcgttttttaaatgacaaaattgtatatatgttgtgtaaaacctttttagaaataggtagatggtggaatgattgcattgcgctcaggaacatatgcatacttactttttgtggtgagaacccttcttgattttcaagaatacgatacattaactgcagttaccatgttgtgcaatgtatctcttaaacttattcctcctgtctaactacacttttgaatgatttcaccgtctccccaaacccctgcctcccacccccggtaacctccattctactctctgcttctgtgagtagaagcaggaggctggagaattgcttgaactcaggaggcagaggttgcagtgagctgagatcgagccgctgcactccagcctgtgtgacagagcaagactctcaaaaaaacaaacaaacaaacaaaaaaaacagagaatccagaggtcagacattccttttagtaaggactccaatatggtttctcacctactcactccaacaaaattgctcttctcaaagcacaaacgatattgttaaattatgaattaaagcataattcctcagcctttgtcttaatttatgtatcagcagcatttgacacaggtgatctctcctttttgcaaaactttctttgatagaattccagaacacttaacccactttccccccgacatttttgataattacccctagtccttttttgctgtttttttctcacctttactactttttaaatgttagagaagcactaggctcaggacctggacttatctttcttttatttactttcttactaatttttgtgtcattaatttcctgatatttcatattatacctcaacactagactacacccagcaccgtctgacttcttcacttgggtgtcagccaagaatttcaaaatgaagttccacatggagcctccaatactccccagacttgcccttcccctatctgtttaatggcaactcccattttatagtttctcagctcaatattcttgatatccccttttagttctctctgtatctgtctggttctcattctctatctctccatcacacacacacacacacacacacacacacacacactttcagatctgttgtgtatggaaaacctgccagctttgcctttaaagtgcagtaattccaaatggtgttttcaaattcaccttcccaccctcaccacttggtaactacactacttccctcacacggtcagggctctactgcagacatttcttggaggaaataatgagaactattataaattcttatttcaggcaccctcaaaattataggctagccatattctatatgaatttaagcttttatcattgccctttttttcattccagtctctacacagcaaccacagtatgcaattttttagaattccaagccgcatcataacacttttttttttgagacggcgtttggttcttgttacccaggctggagtgcagtggcgcaatctgggctcaccgcaacctccgcatcccaggttcaagcaattctgcctcagcctcccgagtggctggattataggcatgcgccaccacacccggctaattttttgtatttttagaagagacggggtttctccatgttggccagactggtctcgaactcccaacttcaggtgatccacctgcttcagcctctcaaaagtgctgggattacaggcgtgagccaccgtgcccggccaacgctcctgttttaaagtacctgcgctattacttcttttctccctcattagaatttaagcttaacaaacctgggtaactttatatacttttccactgatctgtctccatgagctggagatcacttagtgtaaggtaaatgatcaataaatgttttcaaataacagaatcaattattaatagttttctttctttgagtatacatttagactttcaaaaatcaagaaaatagattggtcaagagatttccatttgttttgattttgttatcctttgattagattagctgtgttagtatagatttcagtgtgggaagctataagcatttcctaaattttaaaatgaaaggcatgggatttgaatatccattccttttatttaaggaataaagacaagcctagcttttaaaatatattttatatatgtaaactatctaaatttatttttctctttatccctgaatactttttcaagttattcatctcattttaaaaaatctacctcgataacattttaaaatacatatgcaacttcattaagaatatctttgttccactgaatagcttgtcaaataatacattagcagtacaatttcctcataattcttagacttgtttgattaaatttatagatttcctactctcaactaataaattcattcaagtataatac

SEQ ID NO: 10855 - protein, 36 aa, Homo sapiens
MLEAGAAGARLASLRLLAVTEREQRGWSSDTNHYVI

SEQ ID NO: 10856 - DNA, 401 bp, Homo sapiens
atgtcaagttcatgttaccctcccaaccaaggagcattcagcacagaacaaagtcattatcctcctcactctgtaaagtatacgtttcccagcacctgccaccagcaggatccaacatttggaggcaaacatgaagctccatcctctccaatttcggggcaaccatgtggagatgatcaaaatgcttcaccttcaaaactttcaaaggaagagttaatacagagtatggatcgtataaatcgagaaattgcaaaagtagaacagcagatccttaaactgaaaaagaaacaagtaaaagtctttgcttataatattctaagaatgtgtgtttttctccctatagaagatatttttgagttttccatattttgaaactgtacataaaaggaatcatgccttat

SEQ ID NO: 10857 - protein, 123 aa, Homo sapiens; identical to SEQ ID NO: 1758

SEQ ID NO: 10858 - DNA, 555 bp, Homo sapiens
tagaaatggtgagagaactttggatgtggaatgtggagtaggaggaacacgaagtggggatctgcacttggggtggtcagcactgcggatgcccagcaaaggcactgcctggtccacatcccggagtggtctctgcgcccgagtcggcatcgcagctgatggtgaaacttttggtgtggcagaagagtgtccacaaactttggaagacaagaaacgcctacagttgcagccccctgtagtgcaatttgtgtcagtctgggaagagtggatttggagcccaaccaccattgaggaaaatccgtctgatggacatggcggcctcactcaggttctcatctacttccttggggtctgccccgcctccctcaggagtttggaaccacatactgttctggaggggacctctcactgctgcagaacctgtcctccaggatacccacaagtgttcatctcggtcgtggctaattaacttatcatatggtagtgaactaccttctggggccccaatagtttgtttattttttaaaaataaaattagtaccattgtttattttc

SEQ ID NO: 10859 - protein, 126 aa, Homo sapiens
MPSKGTAWSTSRSGLCARVGIAADGETFGVAEECPQTLEDKKRLQLQPPVVQFVSVWEEWIWSPTTIEENPSDGHGGLTQVLIYFLGVCPASLRSLEPHTVLEGTSHCCRTCPPGYPQVFISVVAN

SEQ ID NO: 10860 - DNA, 1378 bp, Homo sapiens
ggtatgatgtgacttgctcctccttgccttccaccatgattgtgaggcttcaacagcaacgtggaactgctcataggcggaagggacttgccttgtctcggattacacattggactgtggacttttgagttaacgctgagaagagttaagactttgagggactgttgtgaaggcatgattggttttgaaatatggagtctcgctctgtcgcccaggctgtagtgcaatggtgcaatcacagctcactgcagcctcaacttccctggctcaggtgatcctgccacctcagcctcctgagtaactgggactacaggtcaaaatgcggatcttcgtgaaaacccttaccggcaagatcatcacccttgaagtggagcccagtgccactatcgaaaatgtcaaagccaaaatccaagataaagaaggcaatccctgtgaccagcagaggctcatctttgcaggcaagcagcgggaagatggccgcagtctttctgactacaacatccagaaagagtcgaccctgcatctggtcctgcgtcggagaggtggtatgcagatcttcgtgaagaccctgaccggcaagaccatcaccctggaagtggagcccagtgacaccatcgaaaatgtgaaggccaagatccaagataaagaaggcatcccccccgaccagcagaggctcatctttgcaggcaagcagctggaagatggccgcagtctttctgactacaacatccagaaagagtcgaccctgcatctggtcctgcgtctgagaggtggtatgcagatcttcgtgaagaccctgaccggcaagaccatcaccctggaagtggagcccagtgacaccatcgaaaatgtgaaggccaagatccaagataaagaaggcatccccccgatcagcagaggctcatctttgcaggcaagcagctggaagatggcggtactctttctgactacaacatccagaaggagtcgaccctgcacctggtcctgcgtctgagaggtggtatgaagatcttcgtgaagaccctgactggaaagaccatcaccctggaggtggagcccagtgacaccatcgaaaatgtgaaagccaagatccaggatgaagaaggcatcccccccgatcagcagaggctcatctttgcaggcaagaagttggaagatggccgcactctttctgactacagcatccagaaagagtcgaccctgcacctggtcctgcgcctgaggggtggctgttaattcttcagtcttgcattagcagtgcccactgatggcattactctgcactatagccatttgccccaacttaggtttagaaattacaagtttcagtaatagctgaacctgttcaaaatgttaataaaggtttcgttgaatggta

SEQ ID NO: 10861 - protein, 30 aa, Homo sapiens
MIVRLQQQRGTAHRRKGLALSRITHWTVDF

SEQ ID NO: 10862 - DNA, 1256 bp, Homo sapiens
ggtatgatgtgacttgctcctccttgccttccaccatgattgtgaggcttcaacagcaacgtggaactgctcataggcggaagggacttgccttgtctcggattacacattggactgtggacttttgagttaacgctgagaagagttaagactttgagggactgttgtgaaggcatgattggttttgaaatgtcaaaatgcggatcttcgtgaaaacccttaccggcaagatcatcacccttgaagtggagcccagtgccactatcgaaaatgtcaaagccaaaatccaagataaagaaggcaatccctgtgaccagcagaggctcatctttgcaggcaagcagcgggaagatggccgcagtctttctgactacaacatccagaaagagtcgaccctgcatctggtcctgcgtcggagaggtggtatgcagatcttcgtgaagaccctgaccggcaagaccatcaccctggaagtggagcccagtgacaccatcgaaaatgtgaaggccaagatccaagataaagaaggcatcccccccgaccagcagaggctcatctttgcaggcaagcagctggaagatggccgcagtctttctgactacaacatccagaaagagtcgaccctgcatctggtcctgcgtctgagaggtggtatgcagatcttcgtgaagaccctgaccggcaagaccatcaccctggaagtggagcccagtgacaccatcgaaaatgtgaaggccaagatccaagataaagaaggcatccccccgatcagcagaggctcatctttgcaggcaagcagctggaagatggcggtactctttctgactacaacatccagaaggagtcgaccctgcacctggtcctgcgtctgagaggtggtatgaagatcttcgtgaagaccctgactggaaagaccatcaccctggaggtggagcccagtgacaccatcgaaaatgtgaaagccaagatccaggatgaagaaggcatcccccccgatcagcagaggctcatctttgcaggcaagaagttggaagatggccgcactctttctgactacagcatccagaaagagtcgaccctgcacctggtcctgcgcctgaggggtggctgttaattcttcagtcttgcattagcagtgcccactgatggcattactctgcactatagccatttgccccaacttaggtttagaaattacaagtttcagtaatagctgaacctgttcaaaatgttaataaaggtttcgttgaatggta

SEQ ID NO: 10863 - protein, 30 aa, Homo sapiens; identical to SEQ ID NO: 10861

SEQ ID NO: 10864 - DNA, 1184 bp, Homo sapiens
gcacaaatttgcgctctgccaaaccagagcattcaggcacgactggctttgttgggtgaggttgttgtggtgttcctgtggctggacgtgattcgcagcatcctcgtatccgctaacaggtcaaaatgcggatcttcgtgaaaacccttaccggcaagatcatcacccttgaagtggagcccagtgccactatcgaaaatgtcaaagccaaaatccaagataaagaaggcaatccctgtgaccagcagaggctcatctttgcaggcaagcagcgggaagatggccgcagtctttctgactacaacatccagaaagagtcgaccctgcatctggtcctgcgtcggagaggtggtatgcagatcttcgtgaagaccctgaccggcaagaccatcaccctggaagtggagcccagtgacaccatcgaaaatgtgaaggccaagatccaagataaagaaggcatcccccccgaccagcagaggctcatctttgcaggcaagcagctggaagatggccgcagtctttctgactacaacatccagaaagagtcgaccctgcatctggtcctgcgtctgagaggtggtatgcagatcttcgtgaagaccctgaccggcaagaccatcaccctggaagtggagcccagtgacaccatcgaaaatgtgaaggccaagatccaagataaagaaggcatccccccgatcagcagaggctcatctttgcaggcaagcagctggaagatggcggtactctttctgactacaacatccagaaggagtcgaccctgcacctggtcctgcgtctgagaggtggtatgaagatcttcgtgaagaccctgactggaaagaccatcaccctggaggtggagcccagtgacaccatcgaaaatgtgaaagccaagatccaggatgaagaaggcatcccccccgatcagcagaggctcatctttgcaggcaagaagttggaagatggccgcactctttctgactacagcatccagaaagagtcgaccctgcacctggtcctgcgcctgaggggtggctgttaattcttcagtcttgcattagcagtgcccactgatggcattactctgcactatagccatttgccccaacttaggtttagaaattacaagtttcagtaatagctgaacctgttcaaaatgttaataaaggtttcgttgaatggta

SEQ ID NO: 10865 - protein, 224 aa, Homo sapiens
MRIFVKTLTGKIITLEVEPSATIENVKAKIQDKEGNPCDQQRLIFAGKQREDGRSLSDYNIQKESTLHLVLRRRGGMQIFVKTLTGKTITLEVEPSDTIENVKAKIQDKEGIPPDQQRLIFAGKQLEDGRSLSDYNIQKESTLHLVLRLRGGMQIFVKTLTGKTITLEVEPSDTIENVKAKIQDKEGIPPISRGSSLQASSWKMAVLFLTTTSRRSRPCTWSCV

SEQ ID NO: 10866 - DNA, 1098 bp, Homo sapiens
gtcgcgtttacttgggaggaaggcggaaaagaggtcaaaatgcggatcttcgtgaaaacccttaccggcaagatcatcacccttgaagtggagcccagtgccactatcgaaaatgtcaaagccaaaatccaagataaagaaggcaatccctgtgaccagcagaggctcatctttgcaggcaagcagcgggaagatggccgcagtctttctgactacaacatccagaaagagtcgaccctgcatctggtcctgcgtcggagaggtggtatgcagatcttcgtgaagaccctgaccggcaagaccatcaccctggaagtggagcccagtgacaccatcgaaaatgtgaaggccaagatccaagataaagaaggcatcccccccgaccagcagaggctcatctttgcaggcaagcagctggaagatggccgcagtctttctgactacaacatccagaaagagtcgaccctgcatctggtcctgcgtctgagaggtggtatgcagatcttcgtgaagaccctgaccggcaagaccatcaccctggaagtggagcccagtgacaccatcgaaaatgtgaaggccaagatccaagataaagaaggcatccccccgatcagcagaggctcatctttgcaggcaagcagctggaagatggcggtactctttctgactacaacatccagaaggagtcgaccctgcacctggtcctgcgtctgagaggtggtatgaagatcttcgtgaagaccctgactggaaagaccatcaccctggaggtggagcccagtgacaccatcgaaaatgtgaaagccaagatccaggatgaagaaggcatcccccccgatcagcagaggctcatctttgcaggcaagaagttggaagatggccgcactctttctgactacagcatccagaaagagtcgaccctgcacctggtcctgcgcctgaggggtggctgttaattcttcagtcttgcattagcagtgcccactgatggcattactctgcactatagccatttgccccaacttaggtttagaaattacaagtttcagtaatagctgaacctgttcaaaatgttaataaaggtttcgttgaatggta

SEQ ID NO: 10867 - protein, 224 aa, Homo sapiens; identical to SEQ ID NO: 10865

SEQ ID NO: 10868 - DNA, 838 bp, Homo sapiens
gtcaaaatgcggatcttcgtgaaaacccttaccggcaagatcatcacccttgaagtggagcccagtgccactatcgaaaatgtcaaagccaaaatccaagataaagaaggcaatccctgtgaccagcagaggctcatctttgcaggcaagcagcgggaagatggccgcagtctttctgactacaacatccagaaagagtcgaccctgcatctggtcctgcgtcggagaggtggtatgcagatcttcgtgaagaccctgaccggcaagaccatcaccctggaagtggagcccagtgacaccatcgaaaatgtgaaggccaagatccaagataaagaaggcatcccccccgaccagcagaggctcatctttgcaggcaagcagctggaagatggccgcagtctttctgactacaacatccagaaagagtcgaccctgcatctggtcctgcgtctgagaggtggtatgcagatcttcgtgaagaccctgaccggcaagaccatcaccctggaagtggagcccagtgacaccatcgaaaatgtgaaagccaagatccaggatgaagaaggcatcccccccgatcagcagaggctcatctttgcaggcaagaagttggaagatggccgcactctttctgactacagcatccagaaagagtcgaccctgcacctggtcctgcgcctgaggggtggctgttaattcttcagtcttgcattagcagtgcccactgatggcattactctgcactatagccatttgccccaacttaggtttagaaattacaagtttcagtaatagctgaacctgttcaaaatgttaataaaggtttcgttgaatggta

SEQ ID NO: 10869 - protein, 229 aa, Homo sapiens
MRIFVKTLTGKIITLEVEPSATIENVKAKIQDKEGNPCDQQRLIFAGKQREDGRSLSDYNIQKESTLHLVLRRRGGMQIFVKTLTGKTITLEVEPSDTIENVKAKIQDKEGIPPDQQRLIFAGKQLEDGRSLSDYNIQKESTLHLVLRLRGGMQIFVKTLTGKTITLEVEPSDTIENVKAKIQDEEGIPPDQQRLIFAGKKLEDGRTLSDYSIQKESTLHLVLRLRGGC

SEQ ID NO: 10870 - DNA, 459 bp, Homo sapiens
ctgtcagagctgttagcctgcttaaacagaggaaaatggtacaggcagagctggtctggtatcaggaaaaaggctgcctacgataatccactgcaggaccctaaaagtctcgaccttagggccccctcggaccgtctccaaggtcgggtcccgctggagaaggaggcatttcgagagtgttggaaacactcttttgtaaaatctacaaagaaacattttggagtccattgaggcctatagtgaaaaactgaatatttcgccttgaaaaccagaaacaagctatctgtgaaaatgctttgtgatggaagatttatctcacagagttaaacgtttgtattgattcagctggctggcaacactctttttgtaaaatctacaatgggacatttcagagaccattgaagtctacagaaaaagactgaatatcccatgattaaaactagaaacaagctatccatc

SEQ ID NO: 10871 - protein, 76 aa, Homo sapiens
LSELLACLNRGKWYRQSWSGIRKKAAYDNPLQDPKSLDLRAPSDRLQGRVPLEKEAFRECWKHSFVKSTKKHFGVH

SEQ ID NO: 10872 - DNA, 1481 bp, Homo sapiens
atgcgctttagcgaggcagtctcgggcgcccagctgtcagagctgttagcctgcttaaacagaggaaaatggtacaggcagagctggtctggtatcaggaaaaaggctgcctacgataatccactgcaggaccctaaaagtctcgaccttagggccccctcggaccgtctccaaggtcgggtcccgctggagaaggaggcatttcgagagtgttggaaacaccttatttgtagaatctacgaagggacattttggaacccattgagacctatagtgaaacactgattgtttcacaatgaaaactgaaaacgttatctaggaaaatgctttgcgtgtgtagattctactcagacaggaaattggaaactctcctttggtacaatcgacaaagagatatttcaaagcccattgaggcttactgtgaaaaatagaatatccagtgataaaaactataaaaaaggtttgaaatactctaagacattttggagctcttggggcctataatgaagaaacgtatatcctgcgatgaaaacttgaaacaagctacctgtgaaaatgctttgcaatgtgtagattcatctgacagttaaacctttgttttgattcaacaggggtttgggaacatactttttatataacttatgaatggacatttcagagcccattgaagcctatactgaaaatccaaatatcctgcgataaaaactaggagtaagctatctgtgaaaatgctttgcgaggtttggattaatctcacagatttaagctgttgctttgatttagcaggttggaaaccctctttttctacaatctactagggtactattcggaccaaattgaggcctatactgaaaaactgattatcccgtgataaaaactagaaaaaagctgtcagtaaaaatgctgtgcaatatgtggattcatgtcacaaatttaaacctctgcatttattcagcaagtttggaatacctttttgtagaatatacaaagggatgtttcacacctataaaagcctatagtaaaaaagttggatacactcttgttgtagaatctacaaagagacattttgaagttcattgaggtctatagtgaaaaaccaaatatccagtgatagaaactataaagaagctatctctgaaaatactttatgatgtgtgatttcatttcacaagttgaacttttcttttgattcaacagcaggttggaaacactcttttgtaaaatctacaaagaaacattttggagtccattgaggcctatagtgaaaaactgaatatttcgccttgaaaaccagaaacaagctatctgtgaaaatgctttgtgatggaagatttatctcacagagttaaacgtttgtattgattcagctggctggcaacactctttttgtaaaatctacaatgggacatttcagagaccattgaagtctacagaaaaagactgaatatcccatgattaaaactagaaacaagctatccatc

SEQ ID NO: 10873 - protein, 94 aa, Homo sapiens
MRFSEAVSGAQLSELLACLNRGKWYRQSWSGIRKKAAYDNPLQDPKSLDLRAPSDRLQGRVPLEKEAFRECWKHLICRIYEGTFWNPLRPIVKH

SEQ ID NO: 10874 - DNA, 1507 bp, Homo sapiens
ctagcgacaaatccctgcggcttggcggagacagagaactttgtggaggtgcctaggcggtggactctcgcctgtcttctctgtgggatccacgggatagtcccatgatcctaggagagggcagacgtgagccagcctgaagaaacgccaagcaggagccccaggaataaaccgcaaaatccctaaggatccaaaaggatctgcaggatgcctcaggcctgcctagtcatcgtagggagacaaggtctggctctgtcacccaagctggagtacagtggcaccagctccactcactgtaacctttgcctcccaagttgaagtgattcctgtgcctcagcctcccaagtagctgggactacagatatggacactattgatgggagcggctggccatctggagtggcagttgccatcatgccagtagcgcttgggccgcatgggcagtgttgtcaggagcagcagcaggagcagcagtggcggtggtaggaccccgttccctgtgtccccaaggcatctgactgcgccgccgccccctaatggctgggcaggacccactgccaggtgcagaccctccatggcggcctcaatttcgcttcctaccacatctgggagcccatcagcgctggcagccgggtcttgcaggattggccccaggagcatcaggttcatttgtgcggcattagccagggcccccatgccacctgcacctcgcccatgcactactgcagggaaaacgcagagaggagtcacggccaaggctgcacactctatggagccagtggcagctggggacaagtgggagcccagccccttccaagttgccagggcaggaactccccaggcgcaactgcagctgcccaaggagggtctgcgacccaggcactcctgtgctcttgggagccaggagaaggcaggagccccaccctcccaggcacagctggagcctttcaagccacagctgcagacccaggcacctctgcactcttggggcctgggaaggcccccgtgaccacacaggctcggaagtgcctgcccccactgtctgggttctcctcgctgtcagcacctgctccaatcttcgagcaaagttgaggtcgagcacactatattgtgaccaatataaaatagatataaaaatacctcttacacttaaatccaggcattgccatttgaatgacttaagaatatgcagctaaggtgcttttaaaaatacaagctagtgattatactgaatttgtaaatcacgtaggatagtgagtcattttagaatattaattatttcagtccataaacctggatgtctttccttttttgtgttttctttaatttctttcattgatgtttgtaatttttgttatagaaatcatttacttcctcggttaagtttatttctaagtacatttttgtagctattgtaaaagaaatagcttccttaattttttttctgctagtttactatcaacatatagaaatgctactgttttttgtatgttgattttatatcctg

SEQ ID NO: 10875 - protein, 36 aa, Homo sapiens
MPQACLVIVGRQGLALSPKLEYSGTSSTHCNLCLPS

SEQ ID NO: 10876 - DNA, 450 bp, Homo sapiens
ggagaccaccgtggaggtgcaaaggcggtggactctcgcctgtcttctccgtgggatccacaggatagtccgaggatcctaggagagggcagatgtgagcgagcctgaagaaacgtcaggcagagccccaggagtaaaccgcgaaatccctagggatccaaaaggatctgaaggatgcctcaggcctgtctagtcgttgtagggatatggacactattgatgggagcggctggccatctggagtggcagttgccatcatgccagtagcgcttgggccgcatgggcagtgttgtcaggagcagcagcaggagcagcagtggcggtgcactattcacaatagccaagatatggaatcaacataagtgtccatcaacagatgaatggataaagaaaatgtgacatacatatataatggaatactattaagttataataaagaacaaaatcctg

SEQ ID NO: 10877 - protein, 51 aa, Homo sapiens
MDTIDGSGWPSGVAVAIMPVALGPHGQCCQEQQQEQQWRCTIHNSQDMEST

SEQ ID NO: 10878 - DNA, 486 bp, Homo sapiens
tggaggtgcaaaggcggtggactctcgcctgtcttctccgtgggatccacaggatagtccgaggatcctaggagagggcagatgtgagcgagcctgaagaaacgtcaggcagagccccaggagtaaaccgcgaaatccctagggatccaaaaggatctgaaggatgcctcaggcctgtctagtcgttgtagggatatggacactattgatgggagcggctggccatctggagtggcagttgccatcatgccagtagcgcttgggccgcatgggcagtgttgtcaggaccacagctgcagacccaggcacctctgcactcttggggcctgggaaggcccccgtgaccacacaggctcggaagtgcctgcccccactgtctgggttctcctcgctgtcagcacctgctccaatcttcgagcaaagttgaggtcgagcacactatattgtgaccaatataaaatagatataaaaatacctcttacactt

SEQ ID NO: 10879 - protein, 96 aa, Homo sapiens
MDTIDGSGWPSGVAVAIMPVALGPHGQCCQDHSCRPRHLCTLGAWEGPRDHTGSEVPAPTVWVLLAVSTCSNLRAKLRSSTLYCDQYKIDIKIPLT

SEQ ID NO: 10880 - DNA, 609 bp, Homo sapiens
ctgaggcttcgcaaagcaggagccctccgtagcagggcttcggtgtcggggctccgaggctccggcctgacttctccacggggtacacaggaacgtctccggacgccaggacctgaaatgggccgactaggatgacgaaaccacaggcagagtccggggaagcagcgcggcatcccatcttcaggcctgcccggagggtgttcgggatcaagatgaccacactccagccaaggataaaagccccacaggagctcactgtcctgcaggagaggagcaggcccacgtccaagaagatggctgtatgttttcacggctcttctctgagaagtgaagccacaccacgatacagtcttgaagaggaagccaggaatgggagatggcaacaagccctgtcatggtggcctctctgaacaagttacccttttggcacccctccccttatgcccgtggcggtggcacagtgctgtatcctgcctgggctctggcccctgctctgtcctccctcttactctgtctcccttgtttctgaggggcctagatgcttctaggtctggctgaatgtcttcaaaaaagatcacttcccagtccatcagggagacagttggtgga

SEQ ID NO: 10881 - protein, 92 aa, Homo sapiens
MTKPQAESGEAARHPIFRPARRVFGIKMTTLQPRIKAPQELTVLQERSRPTSKKMAVCFHGSSLRSEATPRYSLEEEARNGRWQQALSWWPL

SEQ ID NO: 10882 - DNA, 500 bp, Homo sapiens
ctgcctaggcctgttcgatgaagcaccaacaagccccacagctttgttgcttttgctatgcccactgggaccagtgagagaagtgcggtcttatccctgggaggagagaaagagccagcatctgcaggcgcccacaggatgtcaaggtgatttcgcttttgttgcccaggctggagtgcaatggtatgatcttggctcactgcaacctccgcctcctggattcaagcaattctcctgcctcagcttcccaaatagattccagacattgtatggaaaagcatcgtgaaaatccctggcctgttctgctctgttctgattaccggtgcgtgcagcccgcagtcacgtacccgctggttgctcaatcgatcacgaccctctcacacggacccccttagagctgtaagcccttaaaagggacaggaattgctcgctcggggagctcggtttttggagacgtgagtccgccggtgctcccagctgaataaagccctttccttcca

SEQ ID NO: 10883 - protein, 69 aa, Homo sapiens
MILAHCNLRLLDSSNSPASASQIDSRHCMEKHRENPWPVLLCSDYRCVQPAVTYPLVAQSITTLSHGPP

SEQ ID NO: 10884 - DNA, 934 bp, Homo sapiens
cgcgtttagaggatcagtggcggcggcacccgcggccccgcgcggcgcggacggcgggcagcaccgtgcctgggccccctcctgctccgaacagcccaaggagcagaaaagagtgacaaggccgtgaaaggaggcgcctggggcgtagccggctctaggaggttaccccatgcggagtacacaccctgctacacccatcccggaggagggaggaaatagccagcccggagcacccctggactctgccggtcccagaggccacgcaaactccgcccagactcggagacaggccctggcaccaggctctggagaccccacttcctgactccagcggtgcgaagatgatacaatactttctggtgctgacattcagctgtctcccaaacagctctcaatctggggcatgactttgaagggaaggttgctaagcctcctaaatcccgatacacaccaatgccgtttccccactcatctggaaacctggtgggtcctgcccaaacgcctgtatgtcaattccacctcctgcttggcgacccaccatgcccacattttccactcaagcctttcagatctgctttgggcacctgaagacagagagaatcatctttcaagagtcagaaactttgcacgtgccattccctctgcttagaatgcttttccctttctcccaattgccttatcatcagcctgggaaaatatttatttcggctcctaaaatctcagatatcacttctccaggagctttcccagatgcctcacttgattccagaaggagctatcgccacttttgcctggcgagtacgttttcaccgttacacttatacgctatggcaatttattggtgatttgtctgtctcccctactcaatagtgaattattcatctatccctggaaacctggaactgctcaataaatgtatgtggcatgaatatac

SEQ ID NO: 10885 - protein, 51 aa, Homo sapiens
MRSTHPATPIPEEGGNSQPGAPLDSAGPRGHANSAQTRRQALAPGSGDPTS

SEQ ID NO: 10886 - DNA, 877 bp, Homo sapiens
atgtcctggcgcagcggctacagtaggccggcggctggaacggctcggcgcggaccgccgctgtcgcgcccgggccgcggcttgttgctggccctccccgggcgcgtccctcagtccctggtctcctggcccagtcgccgccccgcgcccgccgacgtcactgcggcctgcgaccaatcagcgcctcgcggtccctctgtaaaccattctgcatcccccggcccgggagagtgcggggagaccgcgtttagaggatcagtggcggcggcacccgcggccccgcgcggcgcggacggcgggcagcaccgtgcctgggccccctcctgctccgctctcaatctggggcatgactttgaagggaaggttgctaagcctcctaaatcccgatacacaccaatgccgtttccccactcatctggaaacctggtgggtcctgcccaaacgcctgtatgtcaattccacctcctgcttggcgacccaccatgcccacattttccactcaagcctttcagatctgctttgggcacctgaagacagagagaatcatctttcaagagtcagaaactttgcacgtgccattccctctgcttagaatgcttttccctttctcccaattgccttatcatcagcctgggaaaatatttatttcggctcctaaaatctcagatatcacttctccaggagctttcccagatgcctcacttgattccagaaggagctatcgccacttttgcctggcgagtacgttttcaccgttacacttatacgctatggcaatttattggtgatttgtctgtctcccctactcaatagtgaattattcatctatccctggaaacctggaactgctcaataaatgtatgtggcatgaatatac

SEQ ID NO: 10887 - protein, 176 aa, Homo sapiens
MSWRSGYSRPAAGTARRGPPLSRPGRGLLLALPGRVPQSLVSWPSRRPAPADVTAACDQSAPRGPSVNHSASPGPGECGETAFRGSVAAAPAAPRGADGGQHRAWAPSCSALNLGHDFEGKVAKPPKSRYTPMPFPHSSGNLVGPAQTPVCQFHLLLGDPPCPHFPLKPFRSALGT

SEQ ID NO: 10888 - DNA, 857 bp, Homo sapiens
cgcggccccgcgcggcgcggacggcgggcagcaccgtgcctgggccccctcctgctccggttccagaatgacgctcggcccatggacagagcctgcccagtcactctcggctgctattgatcccgaggatgatggccgcccctagccatttccctcctctctcttcggttccagaacagcccaaggagcagaaaagagtgacaaggccgtgaaaggaggcgcctggggcgtagccggctctaggaggttaccccatgcggagtacacaccctgctacacccatcccggaggagggaggaaatagccagcccggagcacccctggactctgccggtcccagaggccacgcaaactccgcccagactcggtgaggccgcagtaatgccacgcagggaactgcgtggataaggtcgctcggatctgagcgccaaggtctcccgcctctccttcccgtctagttctctccggactcaaattgccttaatctcacccatcactctctcatggaaatgatctactcgtgtgcagtacttcacagcttgtatcacggtctcccctgaaccgtatagcaagagggtggtggggggtggaagagaagggtactatctccactttcccggccaggaggcccaagttaggaggcttgtccgagatccctaggtcagagcactatttaaggtgagaagttgggtggggagcttggcaccttgctccagtgtgcactttgcgcctggccatgttttataagcaaggggggcttgggctggttaagggggagcagggaccgcagggccaggaaagggcagcatccggcaggccggggcgtcacggtatgtgcctggcctgggtaaacaact

SEQ ID NO: 10889 - protein, 39 aa, Homo sapiens
MFYKQGGLGLVKGEQGPQGQERAASGRPGRHGMCLAWVN

SEQ ID NO: 10890 - DNA, 3020 bp, Homo sapiens
cggccgcgagttgtgactggagccacgatgcacggccaggcgcggtgagaagccagcccgtagtgcctcccgaaggagcccgggcgcagggagggtcgccctgaggacacggaggccgccaggcaggccaagggccgaggtgactgggctggggcggtagggaaggagcgagtgcgcctggctgcctccgcacggagttgtccctctctgttttcgattgacacaaacacttctccaaaagcggggaaacctaagcaacaacagcaatcaacaccaagatcttcctcctaccctcccctctttcccttctcccgcggtcggccctcgccccctcccccaggcccagcgcgggcgctcggcgcgtccagacccgcggcgcgatgccggcagtttaggatccaaagcttctctgctccttttgttctttccttcccttttttaaaaaaagaggggggaaatcccagtggtgggcagcctggcacgcacacagtcgccctcataccccgacaaaagcagatgcactttgacttctgacagctctacctcaagccccggagaactcagcggcgctttcctcgcaacccgagctcggcgagtcgtcgtcttcttcttctccgtttttatttatttatttccgttcccgccgccgttctcgctgaccttcactcctccgcgggctctgagcagaagggtcgcattctctcccgcctgagacttcttttcctcgccccgggagctcaggcggcgccgctccagcccggggccccgggactccccggctgcacacttcactgagacgcccccccaggccccgatcagcctcgtttcctccaccctactttgatttcctggtgcgagttttggcttgcacggccgagtgtgtgtcctctttttggagagactggggagctcgtgccgattgtcttcaggagtcatcccctgggctctactttgcccctctctctctctgggcctcatcagaccaaaccaaagaccatggttcactgtgccggctgcaaaaggcccatcctggaccgctttctcttgaacgtgctggacagggcctggcacgtcaagtgcgtccagtgctgtgaatgtaaatgcaacctgaccgagaagtgcttctccagggaaggcaaactctactgcaagaacgacttcttccggtgtttcggtaccaaatgcgcaggctgcgctcagggcatctcccctagcgacctggtgcggagagcgcggagcaaagtgtttcacctgaactgcttcacctgcatgatgtgtaacaagcagctctccactggcgaggaactctacatcatcgacgagaataagttcgtctgcaaagaggattacctaagtaacagcagtgttgccaaagagaacagccttcactcggccaccacgggcagtgaccccagtttgtctccggattcccaagacccgtcgcaggacgacgccaaggactcggagagcgccaacgtgtcggacaaggaagcgggtagcaacgagaatgacgaccagaacctgggcgccaagcggcggggaccgcgcaccaccatcaaagccaagcagctggagacgctgaaggccgccttcgctgctacacccaagcccacccgccacatccgcgagcagctggcgcaggagaccggcctcaacatgcgcgtcattcaggtctggttccagaaccggcgctccaaggagcggaggatgaagcagctgagcgccctgggcgcccggcgccacgccttcttccgcagtccgcgccggatgcggccgctggtggaccgcctggagccgggcgagctcatccccaatggtcccttctccttctacggagattaccagagcgagtactacgggcccgggggcaactacgacttcttcccgcaaggccccccgtcctcgcaggcccagacaccagtggacctacccttcgtgccgtcatctgggccgtccgggacgcccctgggtggcctggagcacccgctgccgggccaccacccgtcgagcgaggcgcagcggtttaccgacatcctggcgcacccacccggggactcgcccagccccgagcccagcctgcccgggcctctgcactccatgtcggccgaggtcttcggacccagcccgcccttctcgtcgctgtcggtcaacggtggggcgagctacggaaaccacctgtcccacccccccgaaatgaacgaggcggccgtgtggtagcggggtctcgcacggtctgcggagttcgtggttgtacagaaatgaacctttatttaagaaaaatagaaaaaaaaaaaaacataaaaagcaagtccccacccccttcctccagcctcgagaaccattctccttctggggagaccggatggaaaagggggacacgaaataggatccaaatcggcctcgaggtgggactgggatccgcgcactggctgtcgacgtgcagaactggggctccccaaaggaaacgcagacctctccccaactcccacctggacccggatccgtagacagaccccgcgggcgtgtgcgcctggcaggcgggcggcgaaaagacgtccagggcagccgcgggtgcgcacagccgttggcgatgccaggagccgtggggagggaggccgtgagcacagccgggtgaaggaagtgaagcggcccagggcgctcccgggccagccaggagggttctagctctgggatatcccttattagtgttgtctcagagttcaacaacagcgacaaaaaactcttatagcttcagaaacgccgacctgccgtgcatcaggtgggactatatatatattttttgtctatctggatttttggtttttgtttttgccaaaattgcaaaattctaaatgtaaagccctccgtatcaactcttctaccttcgcaaaactacacatacacacatacacacgtacacggacacactcggtaagatggtctccagccagaccgctcagtaaaatgacttgaacatcagctgtacaagaaaagtattctaccttcacacacaaaaagtt

SEQ ID NO: 10891 - protein, 406 aa, Homo sapiens; identical to SEQ ID NO: 1762

SEQ ID NO: 10892 - DNA, 2142 bp, Homo sapiens
aatcccttcaaccttctgcgcgcttccgccttcatgctagcaacgcccgcagtgacgcgcaggccccgccccctcccgcgcgcctcccggaagtggccggtccagagctgtggggtggcctccgcgcggtctctggcggagtcggggaatcggatcaaggcgagaggatccggcagggaaggagcttcggggccgggggttgggccgcacatttacgtgcgcgaagcggagtggaccgggagctggtgacgatggcggggccgcagcccctggcgctgcaactggaacagttgttgaacccgcgaccaagcgaggcggaccctgaagcggaccccgaggaagccactgctgccagggtgattgacaggtttgatgaaggggaagatggggaaggtgatttcctagtagtgggtagcattagaaaactggcatcagcctccctcttggacacggacaaaaggtattgcggcaaaaccacctctagaaaagcatggaatgaagaccattgggagcagactctgccaggatcgtctgatgaggaaatatctgatgaggaagggtctggagatgaagattcagagggactgggtctggaggaatatgatgaggacgacctgggtgctgctgaggaacaggagtgtggtgatcacagggagagcaagaagagcagaagccactctgcaaaaacaccgggcttcagtgtccagagtatcagtgactttgagaaatttaccaagggaatggatgaccttgggagcagtgaggaggaggaagacgaagagagtggcatggaagaaggggatgacgcggaagactcccaaggcgagagtgaggaagacagggctggagatagaaacagtgaggatgatggtgtggtgatgaccttctctagtgtcaaagtttctgaggaagtggagaaaggaagagccgtgaagaaccagatagcactgtgggaccagctcttggaaggaaggatcaaactacaaaaagctctgttgaccaccaaccagcttcctcaaccagatgttttcccattgttcaaggacaaaggtggcccagaattttccagtgccctgaaaaatagtcacaaggcacttaaagcattgttgaggtcattggtaggtcttcaggaagagttgcttttccagtacccagacactagatatctagtagatgggacaaagcccaatgcgggaagtgaggagatttctagtgaagatgatgagctggtagaagagaagaagcagcaacgaagaagggtccctgcaaagaggaagctggagatggaggactatcccagcttcatggcaaagcgctttgccgactttacagtctacaggaaccgcacacttcagaaatggcacgataagaccaaactggcttctggaaaactggggaagggttttggtgcctttgaacgctcaatcttgactcagatcgaccatattctgatggacaaagagagattacttcgaaggacacagaccaagcgctctgtctatcgagttcttggcaaacctgagccagcagctcagcctgtcccagagagtttgccaggggaaccggagatccttcctcaagcccctgctaatgctcatctgaaggacttggatgaagaaatctttgatgatgatgacttttaccaccagctccttcgagaactcatagaacggaagaccagctccttggatcccaacgatcaggtggccatgggaaggcagtggcttgcaatccagaagttacgaagcaaaatccacaaaaaagtagataggaaagccagcaaaggcaggaaacttcggtttcatgtccttagcaagctactgagtttcatggcacctattgaccatactacaatgaatgatgatgccaggacagaactgtaccgctctctttttggccagctccaccctcccgacgaaggccacggggattgacatcgcccacctccgacacccagtgggcgccttggctggtgcggctgctggtccagatggaggaaaccagtgactttatggggctgagctagtagggaagcccctggaaagatgctgcgttccgaacctgtgcctaatacacgcaagggcgctgtcccgcccaaccccgcctttaaacgccacaaataaagagcattgttaccgccac

SEQ ID NO: 10893 - protein, 560 aa, Homo sapiens; identical to SEQ ID NO: 1764

SEQ ID NO: 10894 - DNA, 638 bp, Homo sapiens
ctctgctatttttagtgtcctagtaccctaattcctggtatgcctttggaatgagacctagactgctctagattaaatgttttaaatgtttcacgataaggcctgttttcattttgttactcattattctttttgcttgagcctgggcaacaagagtgaaactccgtctcaaaaaaaaaaaaaaagttcttggccgggcacggtggctcccgcttataatcccagcactttgggaggctgaggcaggcggatcactttaggtcaagagtttgagaccagcctagccaacgtggtgaaatcccatctttaataaaaataaaaatattagccaggtatggtggtacacacttgtagtcccagctacttgggaggttgaggcaggagaatcacttgaacccgggagcaaaggttgtagtgagctgagatcgtgctagtgcactctagcctgagcgacaagagcgaaactgtcccccccgaaaaaaaaaagagagagagagagaaaattcttgagcacattactctggatgaccaatttattactgtgctgtatagctggtgtggaacataggctgaatttgtaccaaccccagaacaaccactggaacttactgtctttaattaaatctcttttcaatttg

SEQ ID NO: 10895 - protein, 51 aa, Homo sapiens
MFHDKACFHFVTHYSFCLSLGNKSETPSQKKKKSSWPGTVAPAYNPSTLGG

SEQ ID NO: 10896 - DNA, 475 bp, Homo sapiens
gtcagttgtactggaagatgataaataaattcgttgctttcctttttcccctagctccttcgagaactcatagaacggaagaccagctccttggatcccaacgatcaggtggccatgggaaggcagtggcttgcaatccagaagttacgaagcaaaatccacaaaaaagtagataggaaagccagcaaaggcaggaaacttcggacagaactgtaccgctctctttttggccagctccaccctcccgacgaaggccacggggattgacatcgcccacctccgacacccagtgggcgccttggctggtgcggctgctggtccagatggaggaaaccagtgactttatggggctgagctagtagggaagcccctggaaagatgctgcgttccgaacctgtgcctaatacacgcaagggcgctgtcccgcccaaccccgcctttaaacgccacaaataaagagcattgttaccgccac

SEQ ID NO: 10897 - protein, 52 aa, Homo sapiens
MINKFVAFLFPLAPSRTHRTEDQLLGSQRSGGHGKAVACNPEVTKQNPQKSR

SEQ ID NO: 10898 - DNA, 593 bp, Homo sapiens
ggaacttgagcatccgtggatttttgtatccatagagagtcctggaaccattcctccacagataccatgggatgactgtagttggtcatcccaatgacagtggtaagtgcctatgaatttttccctatcccactttgtacccagatgttccagtgatcagttctggagtttgttaactcactgaatgtgtttcctctcctaggttaatagttactaatgttgctgcctgttgcttcctgctttatttaggtttcatgtccttagcaagctactgagtttcatggcacctattgaccatactacaatgaatgatgatgccaggacagaactgtaccgctctctttttggccagctccaccctcccgacgaaggccacggggattgacatcgcccacctccgacacccagtgggcgccttggctggtgcggctgctggtccagatggaggaaaccagtgactttatggggctgagctagtagggaagcccctggaaagatgctgcgttccgaacctgtgcctaatacacgcaagggcgctgtcccgcccaaccccgcctttaaacgccacaaataaagagcattgttaccgccac

SEQ ID NO: 10899 - protein, 49 aa, Homo sapiens
MMMPGQNCTALFLASSTLPTKATGIDIAHLRHPVGALAGAAAGPDGGNQ

SEQ ID NO: 10900 - DNA, 379 bp, Homo sapiens
ttgaaaaagacatcaaaaacaaagttaataggtaaatgatgaacttgaacaaaaaaattccagcagatgacatatttttctactatgtaaagagtttttacaaatgtctaagaatatcccaataacaataatggacacagcatatcaacaagaagacttaaaaatcaaaaaagaaggtgtgagccaccgcgcctggcaaatttttttttttttaattcccacatcgactattacactaacggcatattaaccaatagtctgtattctcatcagttctgtttcattgccagattcaccttcctccaatatcacatgctactctttgcctctagcataaaacccagactctcaagcctgccagtcaaggccatcgatgact

SEQ ID NO: 10901 - protein, 48 aa, Homo sapiens
MSKNIPITIMDTAYQQEDLKIKKEGVSHRAWQIFFFLIPTSTITLTAY

SEQ ID NO: 10902 - DNA, 521 bp, Homo sapiens
atattctctctctctgaaaatattttaagaacccagaccactcagcttcccaggttgctttgccatgaacagctgcatatgtttgtcagctttgcccacctgagtgtgaaatgatgttctatgaaaacatgggtttcagcatttcactctctgctcctgacacgtgaaccctgctgcggacagtaactgctgccttcggcccaggcgttgcactgatattgcgcgcagagtggaagcatttgctcagtggacagaactgtaccgctctctttttggccagctccaccctcccgacgaaggccacggggattgacatcgcccacctccgacacccagtgggcgccttggctggtgcggctgctggtccagatggaggaaaccagtgactttatggggctgagctagtagggaagcccctggaaagatgctgcgttccgaacctgtgcctaatacacgcaagggcgctgtcccgcccaaccccgcctttaaacgccacaaataaagagcattgttaccgccac

SEQ ID NO: 10903 - protein, 72 aa, Homo sapiens
TLLRTVTAAFGPGVALILRAEWKHLLSGQNCTALFLASSTLPTKATGIDIAHLRHPVGALAGAAAGPDGGNQ

SEQ ID NO: 10904 - DNA, 10105 bp, Homo sapiens
tctcagtaagtagtctttctaggcaggatttttcttccctgcttaagggggttagacctccaaaatatttgtcagggtctcttttccttttaagggtttaacccacaatcttttctgtatccgttttgtaccagctccattcctattctcaagctttggtgcataaaaccttagtttaggtgtctatatataccactactttggcctgaaaattagaatcgtggctcacacttgattctaagttccctagtagtggcgtgtttcctttctacgtgcttactttcccacctgacctgcttttccccaccgtgcagtctgataattggtattatttgttttgattggatctcagaaattacctctttagaccgagctgtgctcctccctctggatttcatgagcccattattttcttggcttaattgtccttgtaaatttggtctttttgtcctgggctttccctgtcatgtgctcctggcagccaggagaggcagtggagcttttctccgttgactgtcagaagaaagtgactgttgttgaaaatgtttgctgcaactaaaggagagctgctaagatctactttctagttaaacaagcttttatatttctccccggctcctctcagttcccttgggaaatcaactaattgtgtgtgtaagctaagtgtgtggaggagagaagatgcaaaaaggaagagaaaggtggggaaagaaggaaattgggaacaattagacaaaaagactatagtttgaggccatcaggagtattctagtctgactgaagccaggcagaaggcacagtatctcttgtcctcctgggttttaagcagctgcaacaggaggaggaactgcggcttgtgtttacaaggccgaaatctgaagaaaaagcttccattcttttcccatcttgatatggagggttctccagaggaaaataaggaaatgagatattacatgcttcaaaggtccagcatgtctggcttgcacctagtaaagcagggccgagacagaaagaaaatagattctcaacgagatttcactgtggcttctccagcagaatttgttactcgctttgggggaaataaagtgattgagaaggttcttattgctaacaatggcattgcagcagtgaaatgcatgcggtctatccgtaggtggtcttatgaaatgtttcgaaatgaacgtgcaattagattcgttgtcatggtcacacctgaagaccttaaagccaatgcagaatacattaagatggcagatcactatgtgccagtgcctggaggaccaaacaacaacaactatgcaaatgtggaattaattcttgatattgctaaaaggatcccagtacaagcagtgtgggctggctggggtcatgcttctgagaatcccaaactaccggaacttctcttgaaaaatggcattgccttcatgggtcctccaagccaggccatgtgggctttaggggataagattgcatcttccatagtggctcaaactgcaggtatcccaactcttccctggagcggcagtggtcttcgtgtggactggcaggaaaatgatttttcaaaacgtatcttaaatgttccccaggagctatatgaaaaaggttatgtgaaagatgtggatgatgggctacaggcagctgaggaagttggatatccagtaatgatcaaggcctcagagggaggaggagggaagggaattagaaaagtcaacaatgcagatgacttccctaatctcttcagacaggttcaagctgaagttcctggatctcccatatttgtgatgagactagccaaacaatctcgtcatctggaggtgcagatcttagcggaccaatatggcaatgctatctctttgtttggtcgtgattgctctgtacaacgcaggcatcagaagattattgaagaagcacctgctactattgctactccagcagtatttgaacacatggaacagtgtgcggtgaaacttgccaaaatggtgggttatgtgagtgctgggactgtggaatacctgtacagccaggatggcagcttctactttctggaattgaatcctcggctgcaggtagagcacccttgtacagagatggtggctgatgtcaatctccctgcagcacagctccagattgccatggggattcctctatatagaatcaaggatatccgtatgatgtatggggtatctccctggggtgattctcccattgattttgaagattctgcacacgttccttgtccaaggggccatgttattgctgctcggatcactagtgaaaatccagatgagggttttaagcccagctcaggaacagttcaggagctaaatttccgcagcaataagaatgtttggggatatttcagtgttgctgctgcagggggacttcatgaatttgctgattctcagtttggtcactgcttttcttggggagaaaacagagaagaggcaatttcaaacatggtggtggctttgaaggagctgtctattcggggtgactttcgaactacagttgaatacctgatcaaattgttagagactgaaagctttcagatgaacagaattgatactggctggctggacagactgatagcagaaaaagtacaggctgagcgacctgacaccatgttgggggttgtgtgtggtgccctccacgtggcagatgtgagcctgcggaatagcgtctctaacttccttcactccttagaaaggggtcaagtccttcctgctcatacacttctgaatacagtagatgttgaacttatctatgagggagtcaagtatgtacttaaggtgactcgacagtcccccaactcctatgtggtgatcatgaatggctcatgtgtagaagtagatgtacatcggctgagtgacggtggactgctcttgtcctatgatggcagcagttatactacgtatatgaaagaggaagtggatagatatcgcatcacaattggcaataaaacctgtgtgtttgagaaggaaaatgacccatcggtgatgcgctcaccttctgctgggaagttaatccagtacattgtagaagatggaggtcatgtgtttgccggccagtgctatgctgagattgaggtaatgaagatggtaatgaccttaacagctgtggagtctggctgtatccattacgtcaagcgacctggagcagctcttgaccctggctgtgtactagccaaaatgcaactggacaaccccagcaaggttcagcaggctgaacttcacacaggtagtctgccacggatccagagcacggcactcagaggcgagaaactccatcgagtgttccattatgtcctggataatctggtcaatgtaatgaatggatactgccttccagatcctttctttagcagcaaggtaaaagactgggtagagcgattgatgaaaaccctcagagatccctccctgcctctcctagaattgcaagatattatgaccagtgtgtctggccgcattccccccaatgtggagaagtctatcaagaaggaaatggctcagtatgctagcaacatcacatcagtcctctgtcagtttcccagccagcagattgcaaacatcctagatagccatgcagctacattgaaccggaaatctgaacgggaagtcttctttatgaatactcagagcattgttcagctggtacagaggtaccgaagtggcatccgaggccacatgaaggctgtggtgatggatctgctccggcagtacctgcgagtagagacacaattccagaatggtcactatgacaaatgtgtattcgccctccgagaagagaataaaagtgacatgaacactgtactgaactacatcttctctcacgctcaagtcaccaagaagaatcttctggtcacaatgcttattgatcagttgtgtggccgggaccctactctcactgatgagctgctgaatattctcacagagctaactcaactcagtaagaccaccaatgccaaagtagcacttcgagcacgccaggttcttattgcctcccatttgccatcatatgagcttcgccataaccaagtagagtctatcttcctatcagctattgacatgtatggacatcaattttgcattgagaacctgcagaaactcatcctatcagaaacatctatttttgatgtcctaccaaacttcttctatcacagcaaccaagtagtgaggatggcagctctggaggtgtatgttcgaagggcttatattgcctatgaacttaacagcgtacaacaccgccagcttaaggacaacacctgtgtggtggaattccagttcatgctgcccacatctcatccaaacagagggaacatccctacgctaaacagaatgtccttctcctccaacctcaaccactatggcatgacccatgtagctagtgtcagcgatgtactgttggacaactcattcactccaccttgtcagcggatgggcggaatggtctcttttcggacttttgaagattttgtcaggatctttgatgaagtgatgggctgcttctctgactccccaccccagagtcccacattccctgaggcaggtcacacgtctctttatgatgaggataaggttcccagggatgaaccaattcacattctcaatgtggctatcaagactgactgtgatattgaggatgacaggctggcagctatgttcagagaatttacccagcaaaataaagctaccctggttgaccatgggatccggcgccttactttcctggttgcacaaaaggatttcagaaagcaggtcaactatgaggtggatcggagatttcatagagaattccctaaattttttacattccgagcaagggataagtttgaggaggatcgtatctatcgtcatctggagcctgctctggctttccagttagagctgaaccggatgagaaattttgacctcactgccattccatgtgctaatcacaagatgcacctgtatctcggggcagccaaggtggaagtgggcacagaagtgacagactacaggttctttgttcgtgcaatcatcaggcattctgatctggtcaccaaggaagcttcttttgaatatctgcaaaatgaaggggagcggctactcctggaagccatggatgagttggaagttgcttttaacaatacaaatgtccgcactgactgtaaccacatcttcctcaactttgtgcccacggttatcatggacccatcaaagattgaggaatccgtgcggagcatggtaatgcggtatggaagtcgcctgtggaaattgcgcgtcctccaggcagaactgaaaatcaacattcgcctgacgccaactggaaaagcaattcccatccgcctcttcctgacaaacgagtctggctattacttggatatcagcctatacaaggaagtgactgactccaggacagcacagatcatgtttcaggcatatggagacaaacagggaccactgcatggaatgttaatcaatactccatatgtgaccaaagacctgctgcaatcaaagaggttccaggcacaatccttagggacaacatacatatatgatatcccagagatgtttcggcagtccctgatcaaactctgggagtctatgtccactcaagcatttcttccatctccccctctgccttctgacatgctgacttacactgaactggtactggatgatcaaggtcagctggtccacatgaacaggcttccaggaggaaatgagattggcatggtagcttggaaaatgacctttaaaagtcctgaatatccagaaggccgagatatcattgttattggcaatgacatcacataccgaattgggtcctttgggcctcaagaggatttgttatttctcagagcttccgaacttgctagggcagaaggtattccacgcatctatgtatcagccaacagtggagcaagaatcggactggcagaagaaattcgccatatgtttcatgtggcctgggtagatcctgaggatccttacaagggatacaggtatttatatctgactcctcaagattataagagagtcagtgctctcaactctgtccattgtgaacacgtggaagatgaaggagaatccaggtacaagataacagatattattgggaaagaagagggaattggacccgagaaccttcgaggttctggaatgattgctggagaatcctcattggcctataatgagatcattaccatcagcctggtgacgtgccgggccattgggattggggcttaccttgtccggctgggacagagaaccatccaggttgagaattctcacttaattctaacaggagctggagccctcaacaaagtcctcgggcgggaagtgtacacctccaataaccagctggggggcatccagattatgcacaacaatggggtgacccactgcactgtgtgtgatgactttgaaggggttttcactgtcctgcactggctgtcttacatgcccaagagcgtgcacagttcagttcctcttctgaactcaaaggatcctatagacagaatcatcgagtttgttcccacaaagaccccatacgatcctcgatggatgctagcaggccgtcctcacccaacccaaaaaggtcagtggttgagtggcttttttgactatggatctttctcagagattatgcagccctgggcacagactgtggtggttggtagagccaggctaggaggaatacctgtgggagttgttgctgtagaaacccgaacagtagaactaagtatcccagctgatccagcaaacctggattctgaagccaagataatccagcaggctggccaggtttggttcccagattctgcgtttaagacatatcaggccatcaaggacttcaaccgggaagggctgcctctgatggtctttgccaactggagaggcttctctggtggaatgaaagatatgtacgaccaagtgctgaagtttggtgcttacattgtggatggcttgagggagtgctgccagcctgtgctggtttacattcctccccaggctgagctgcggggtggctcctgggtggtgattgactcctccatcaacccccggcacatggagatgtatgctgaccgagaaagcaggggatctgttctggagccagaagggacagtagaaatcaaattccgcagaaaggatctggtgaaaaccatgcgtcgggtggacccagtctacatccacttggctgagcgattggggaccccagagctaagcacagctgagcggaaggagttggagaacaagttgaaggagcgggaggaattcctaattcccatttaccatcaggtagccgtgcagtttgctgacttgcacgacacaccaggccggatgcaggagaagggtgttattagcgatatcctggattggaaaacatcccgtaccttcttctactggcggctgaggcgtcttctgctggaggacctggtcaagaagaaaatccacaatgccaaccctgagctgactgatggccagattcaagccatgttaaggcgctggtttgtggaagtggaaggaacagtgaaggcttatgtttgggacaataataaggatctggcggagtggctagagaaacagctgacagaggaggatggtgttcactcggtaatagaggaaaacatcaaatgcatcagcagagactacgtcctcaagcaaatccgcagcttggtccaggccaatccagaggttgccatggattccatcatccatatgacgcagcacatatcacccactcagcgagcagaagtcatacggatcctctccacaatggattccccttccacgtaggaagagcttcctgcctgtccctgccctgtctctggagaaaagggctagagctgccttttacaactgtaaccactgtaatgagaaggcacaggagacccagcactggagtcaaatggcattttacttcctctcgtttcaggttatgcatgacatcctgggatgtaagatcacagaatccccctccagcccaccagtcacacctaccccattcagtatttattaccctggccaggcctagtcctccactccctgcacaggactgagaaggcaatgaaaggtacaaacatgtaccatgaggtcttactaaccaaagtagggctgcccctcctgtcctgacagccccttggcctcccagcatggggaagcgtgaggagttgcccagcagtgagcagcccccctcactcctggccccatgagccgcagccacaggcagcagaggagggctaaggagaggaggaagcctcaagtccattgtttattaccccgactcttagcccagcacacagtaggcactggagaggaatgattcccagtttaaccacactacggtaccttttatgaagaaaaattagagcataaaatctactacaagctccataggaactcaaagatgagggcaaaactgtgagccaagaagcagagaaagaaaatagaaccagttattcttgatttaggggacctcaaccttgggttcagtctctgaggacaaagggaaaggtagttgttggcctgcctctcgcctgcacgtcactgctggactagctgtcgcatgtggctgggagctgcaaggccagtgcttgaggggccccagcagttccacaggtggtgaagcctgagttggcagaggaggagccagaagagaactgccctttctgcactggtggaaactagttatttatgccatgtggagagccagtgagatagatagatagtctgtttgttttgaggacttggaaagttgttcctatgaagcctggagcttggatggttttgagaggttaatggtgcctccacactcactcttccctagttccaggattactgtcctagcagctaacggttctactctcttccccagagtgtagacaggcagcaggtctccccacagctctgaaaggaccctggtgacagctacaccctcagcaccaggagctggccttcctgatgagggaggcttccaggaaacacagaatccacatgaccttaagattatttacaactcagtcatggtgctgctgtcctccaggcttactggcccctcctgactggcatcaggggcttcctcaggtggtggagagagtttactttcaacaactagtttattcaagaaaagaacttactgattcctctgttcctaaagcaagagtggcaggtgatcagggctggtgtagcatccggttcctttagtgcagctaactgcatttgtcactgatgaccaaggaggaaatcactaagacatttgagaagcagtggtatgaacgttcttggacaagccacagttctgagccttaaccctgtagtttgcacacaagaacgagctccacctccccttcttcaggaggaatctgtgcggatagattggctggacttttcaatggttctgggttgcaggtgggcactgtatggctgggtatggagcggacagcccccaggagtcagagcctcagcccggctgccctggtggaaggtacaggtgttcagcaccttcagaaaagggcataaagtggtgggggacaattctcagtccaggaaaatgcattgaccattgctggctatttgcttacctagtaagaattggattcatttttgaccagattattcttctatgcttttttgcaataaatcaaatcccacatatctacaagtggtatgaagtcctgcaccccccaggaggcctgtccaggcatgtcttcagaggcagggtgggttacactcatttacctcccctctccccaccaaattatgacacaaacgagtatgtttcctctctagaaccctgtaatgcctcctcccccatccccagagctccttactgtaggtcttaccctggacaaggattttttcaagttggaggcacagaacatgagcaatctgacattcccacagcccctcaaacatgcaaggctactaaggcaggaggagtataaatgatggatattgaccaagacctgcttggacggagaccgccatattatctgttctcttcgttcacaaaacagccttcacttgtctcagaatttgatggacacatactgtgatgagcaggagcttcagatgcactctttacacattttgttgaaataaacctctacatttgtagaagagtt

SEQ ID NO: 10905 - protein, 2288 aa, Homo sapiens; identical to SEQ ID NO: 1770

SEQ ID NO: 10906 - DNA, 10216 bp, Homo sapiens
tctcagtaagtagtctttctaggcaggatttttcttccctgcttaagggggttagacctccaaaatatttgtcagggtctcttttccttttaagggtttaacccacaatcttttctgtatccgttttgtaccagctccattcctattctcaagctttggtgcataaaaccttagtttaggtgtctatatataccactactttggcctgaaaattagaatcgtggctcacacttgattctaagttccctagtagtggcgtgtttcctttctacgtgcttactttcccacctgacctgcttttccccaccgtgcagtctgataattggtattatttgttttgattggatctcagaaattacctctttagaccgagctgtgctcctccctctggatttcatgagcccattattttcttggcttaattgtccttgtaaatttggtctttttgtcctgggctttccctgtcatgtgctcctggcagccaggagaggcagtggagcttttctccgttgactgtcagaagaaagtgactgttgttgaaaatgtttgctgcaactaaaggagagctgctaagatctactttctagttaaacaagcttttatatttctccccggctcctctcagttcccttgggaaatcaactaattgtgtgtgtaagctaagtgtgtggaggagagaagatgcaaaaaggaagagaaaggtggggaaagaaggaaattgggaacaattagacaaaaagactatagtttgaggccatcaggagtattctagtctgactgaagccaggcagaaggcacagtatctcttgtcctcctgggttttaagcagctgcaacaggaggaggaactgcggcttgtgtttacaaggccgaaatctgaagaaaaagcttccattcttttcccatcttgatatggagggttctccagaggaaaataaggaaatgagatattacatgcttcaaagactttgaaatactcgtgggatatgaagtggaggtgcctagagggttgaagataatgaggacagatgaagaaatgtttgattgtgccatacttacagttgctgattttcaaggtccagcatgtctggcttgcacctagtaaagcagggccgagacagaaagaaaatagattctcaacgagatttcactgtggcttctccagcagaatttgttactcgctttgggggaaataaagtgattgagaaggttcttattgctaacaatggcattgcagcagtgaaatgcatgcggtctatccgtaggtggtcttatgaaatgtttcgaaatgaacgtgcaattagattcgttgtcatggtcacacctgaagaccttaaagccaatgcagaatacattaagatggcagatcactatgtgccagtgcctggaggaccaaacaacaacaactatgcaaatgtggaattaattcttgatattgctaaaaggatcccagtacaagcagtgtgggctggctggggtcatgcttctgagaatcccaaactaccggaacttctcttgaaaaatggcattgccttcatgggtcctccaagccaggccatgtgggctttaggggataagattgcatcttccatagtggctcaaactgcaggtatcccaactcttccctggagcggcagtggtcttcgtgtggactggcaggaaaatgatttttcaaaacgtatcttaaatgttccccaggagctatatgaaaaaggttatgtgaaagatgtggatgatgggctacaggcagctgaggaagttggatatccagtaatgatcaaggcctcagagggaggaggagggaagggaattagaaaagtcaacaatgcagatgacttccctaatctcttcagacaggttcaagctgaagttcctggatctcccatatttgtgatgagactagccaaacaatctcgtcatctggaggtgcagatcttagcggaccaatatggcaatgctatctctttgtttggtcgtgattgctctgtacaacgcaggcatcagaagattattgaagaagcacctgctactattgctactccagcagtatttgaacacatggaacagtgtgcggtgaaacttgccaaaatggtgggttatgtgagtgctgggactgtggaatacctgtacagccaggatggcagcttctactttctggaattgaatcctcggctgcaggtagagcacccttgtacagagatggtggctgatgtcaatctccctgcagcacagctccagattgccatggggattcctctatatagaatcaaggatatccgtatgatgtatggggtatctccctggggtgattctcccattgattttgaagattctgcacacgttccttgtccaaggggccatgttattgctgctcggatcactagtgaaaatccagatgagggttttaagcccagctcaggaacagttcaggagctaaatttccgcagcaataagaatgtttggggatatttcagtgttgctgctgcagggggacttcatgaatttgctgattctcagtttggtcactgcttttcttggggagaaaacagagaagaggcaatttcaaacatggtggtggctttgaaggagctgtctattcggggtgactttcgaactacagttgaatacctgatcaaattgttagagactgaaagctttcagatgaacagaattgatactggctggctggacagactgatagcagaaaaagtacaggctgagcgacctgacaccatgttgggggttgtgtgtggtgccctccacgtggcagatgtgagcctgcggaatagcgtctctaacttccttcactccttagaaaggggtcaagtccttcctgctcatacacttctgaatacagtagatgttgaacttatctatgagggagtcaagtatgtacttaaggtgactcgacagtcccccaactcctatgtggtgatcatgaatggctcatgtgtagaagtagatgtacatcggctgagtgacggtggactgctcttgtcctatgatggcagcagttatactacgtatatgaaagaggaagtggatagatatcgcatcacaattggcaataaaacctgtgtgtttgagaaggaaaatgacccatcggtgatgcgctcaccttctgctgggaagttaatccagtacattgtagaagatggaggtcatgtgtttgccggccagtgctatgctgagattgaggtaatgaagatggtaatgaccttaacagctgtggagtctggctgtatccattacgtcaagcgacctggagcagctcttgaccctggctgtgtactagccaaaatgcaactggacaaccccagcaaggttcagcaggctgaacttcacacaggtagtctgccacggatccagagcacggcactcagaggcgagaaactccatcgagtgttccattatgtcctggataatctggtcaatgtaatgaatggatactgccttccagatcctttctttagcagcaaggtaaaagactgggtagagcgattgatgaaaaccctcagagatccctccctgcctctcctagaattgcaagatattatgaccagtgtgtctggccgcattccccccaatgtggagaagtctatcaagaaggaaatggctcagtatgctagcaacatcacatcagtcctctgtcagtttcccagccagcagattgcaaacatcctagatagccatgcagctacattgaaccggaaatctgaacgggaagtcttctttatgaatactcagagcattgttcagctggtacagaggtaccgaagtggcatccgaggccacatgaaggctgtggtgatggatctgctccggcagtacctgcgagtagagacacaattccagaatggtcactatgacaaatgtgtattcgccctccgagaagagaataaaagtgacatgaacactgtactgaactacatcttctctcacgctcaagtcaccaagaagaatcttctggtcacaatgcttattgatcagttgtgtggccgggaccctactctcactgatgagctgctgaatattctcacagagctaactcaactcagtaagaccaccaatgccaaagtagcacttcgagcacgccaggttcttattgcctcccatttgccatcatatgagcttcgccataaccaagtagagtctatcttcctatcagctattgacatgtatggacatcaattttgcattgagaacctgcagaaactcatcctatcagaaacatctatttttgatgtcctaccaaacttcttctatcacagcaaccaagtagtgaggatggcagctctggaggtgtatgttcgaagggcttatattgcctatgaacttaacagcgtacaacaccgccagcttaaggacaacacctgtgtggtggaattccagttcatgctgcccacatctcatccaaacagagggaacatccctacgctaaacagaatgtccttctcctccaacctcaaccactatggcatgacccatgtagctagtgtcagcgatgtactgttggacaactcattcactccaccttgtcagcggatgggcggaatggtctcttttcggacttttgaagattttgtcaggatctttgatgaagtgatgggctgcttctctgactccccaccccagagtcccacattccctgaggcaggtcacacgtctctttatgatgaggataaggttcccagggatgaaccaattcacattctcaatgtggctatcaagactgactgtgatattgaggatgacaggctggcagctatgttcagagaatttacccagcaaaataaagctaccctggttgaccatgggatccggcgccttactttcctggttgcacaaaaggatttcagaaagcaggtcaactatgaggtggatcggagatttcatagagaattccctaaattttttacattccgagcaagggataagtttgaggaggatcgtatctatcgtcatctggagcctgctctggctttccagttagagctgaaccggatgagaaattttgacctcactgccattccatgtgctaatcacaagatgcacctgtatctcggggcagccaaggtggaagtgggcacagaagtgacagactacaggttctttgttcgtgcaatcatcaggcattctgatctggtcaccaaggaagcttcttttgaatatctgcaaaatgaaggggagcggctactcctggaagccatggatgagttggaagttgcttttaacaatacaaatgtccgcactgactgtaaccacatcttcctcaactttgtgcccacggttatcatggacccatcaaagattgaggaatccgtgcggagcatggtaatgcggtatggaagtcgcctgtggaaattgcgcgtcctccaggcagaactgaaaatcaacattcgcctgacgccaactggaaaagcaattcccatccgcctcttcctgacaaacgagtctggctattacttggatatcagcctatacaaggaagtgactgactccaggacagcacagatcatgtttcaggcatatggagacaaacagggaccactgcatggaatgttaatcaatactccatatgtgaccaaagacctgctgcaatcaaagaggttccaggcacaatccttagggacaacatacatatatgatatcccagagatgtttcggcagtccctgatcaaactctgggagtctatgtccactcaagcatttcttccatctccccctctgccttctgacatgctgacttacactgaactggtactggatgatcaaggtcagctggtccacatgaacaggcttccaggaggaaatgagattggcatggtagcttggaaaatgacctttaaaagtcctgaatatccagaaggccgagatatcattgttattggcaatgacatcacataccgaattgggtcctttgggcctcaagaggatttgttatttctcagagcttccgaacttgctagggcagaaggtattccacgcatctatgtatcagccaacagtggagcaagaatcggactggcagaagaaattcgccatatgtttcatgtggcctgggtagatcctgaggatccttacaagggatacaggtatttatatctgactcctcaagattataagagagtcagtgctctcaactctgtccattgtgaacacgtggaagatgaaggagaatccaggtacaagataacagatattattgggaaagaagagggaattggacccgagaaccttcgaggttctggaatgattgctggagaatcctcattggcctataatgagatcattaccatcagcctggtgacgtgccgggccattgggattggggcttaccttgtccggctgggacagagaaccatccaggttgagaattctcacttaattctaacaggagctggagccctcaacaaagtcctcgggcgggaagtgtacacctccaataaccagctggggggcatccagattatgcacaacaatggggtgacccactgcactgtgtgtgatgactttgaaggggttttcactgtcctgcactggctgtcttacatgcccaagagcgtgcacagttcagttcctcttctgaactcaaaggatcctatagacagaatcatcgagtttgttcccacaaagaccccatacgatcctcgatggatgctagcaggccgtcctcacccaacccaaaaaggtcagtggttgagtggcttttttgactatggatctttctcagagattatgcagccctgggcacagactgtggtggttggtagagccaggctaggaggaatacctgtgggagttgttgctgtagaaacccgaacagtagaactaagtatcccagctgatccagcaaacctggattctgaagccaagataatccagcaggctggccaggtttggttcccagattctgcgtttaagacatatcaggccatcaaggacttcaaccgggaagggctgcctctgatggtctttgccaactggagaggcttctctggtggaatgaaagatatgtacgaccaagtgctgaagtttggtgcttacattgtggatggcttgagggagtgctgccagcctgtgctggtttacattcctccccaggctgagctgcggggtggctcctgggtggtgattgactcctccatcaacccccggcacatggagatgtatgctgaccgagaaagcaggggatctgttctggagccagaagggacagtagaaatcaaattccgcagaaaggatctggtgaaaaccatgcgtcgggtggacccagtctacatccacttggctgagcgattggggaccccagagctaagcacagctgagcggaaggagttggagaacaagttgaaggagcgggaggaattcctaattcccatttaccatcaggtagccgtgcagtttgctgacttgcacgacacaccaggccggatgcaggagaagggtgttattagcgatatcctggattggaaaacatcccgtaccttcttctactggcggctgaggcgtcttctgctggaggacctggtcaagaagaaaatccacaatgccaaccctgagctgactgatggccagattcaagccatgttaaggcgctggtttgtggaagtggaaggaacagtgaaggcttatgtttgggacaataataaggatctggcggagtggctagagaaacagctgacagaggaggatggtgttcactcggtaatagaggaaaacatcaaatgcatcagcagagactacgtcctcaagcaaatccgcagcttggtccaggccaatccagaggttgccatggattccatcatccatatgacgcagcacatatcacccactcagcgagcagaagtcatacggatcctctccacaatggattccccttccacgtaggaagagcttcctgcctgtccctgccctgtctctggagaaaagggctagagctgccttttacaactgtaaccactgtaatgagaaggcacaggagacccagcactggagtcaaatggcattttacttcctctcgtttcaggttatgcatgacatcctgggatgtaagatcacagaatccccctccagcccaccagtcacacctaccccattcagtatttattaccctggccaggcctagtcctccactccctgcacaggactgagaaggcaatgaaaggtacaaacatgtaccatgaggtcttactaaccaaagtagggctgcccctcctgtcctgacagccccttggcctcccagcatggggaagcgtgaggagttgcccagcagtgagcagcccccctcactcctggccccatgagccgcagccacaggcagcagaggagggctaaggagaggaggaagcctcaagtccattgtttattaccccgactcttagcccagcacacagtaggcactggagaggaatgattcccagtttaaccacactacggtaccttttatgaagaaaaattagagcataaaatctactacaagctccataggaactcaaagatgagggcaaaactgtgagccaagaagcagagaaagaaaatagaaccagttattcttgatttaggggacctcaaccttgggttcagtctctgaggacaaagggaaaggtagttgttggcctgcctctcgcctgcacgtcactgctggactagctgtcgcatgtggctgggagctgcaaggccagtgcttgaggggccccagcagttccacaggtggtgaagcctgagttggcagaggaggagccagaagagaactgccctttctgcactggtggaaactagttatttatgccatgtggagagccagtgagatagatagatagtctgtttgttttgaggacttggaaagttgttcctatgaagcctggagcttggatggttttgagaggttaatggtgcctccacactcactcttccctagttccaggattactgtcctagcagctaacggttctactctcttccccagagtgtagacaggcagcaggtctccccacagctctgaaaggaccctggtgacagctacaccctcagcaccaggagctggccttcctgatgagggaggcttccaggaaacacagaatccacatgaccttaagattatttacaactcagtcatggtgctgctgtcctccaggcttactggcccctcctgactggcatcaggggcttcctcaggtggtggagagagtttactttcaacaactagtttattcaagaaaagaacttactgattcctctgttcctaaagcaagagtggcaggtgatcagggctggtgtagcatccggttcctttagtgcagctaactgcatttgtcactgatgaccaaggaggaaatcactaagacatttgagaagcagtggtatgaacgttcttggacaagccacagttctgagccttaaccctgtagtttgcacacaagaacgagctccacctccccttcttcaggaggaatctgtgcggatagattggctggacttttcaatggttctgggttgcaggtgggcactgtatggctgggtatggagcggacagcccccaggagtcagagcctcagcccggctgccctggtggaaggtacaggtgttcagcaccttcagaaaagggcataaagtggtgggggacaattctcagtccaggaaaatgcattgaccattgctggctatttgcttacctagtaagaattggattcatttttgaccagattattcttctatgcttttttgcaataaatcaaatcccacatatctacaagtggtatgaagtcctgcaccccccaggaggcctgtccaggcatgtcttcagaggcagggtgggttacactcatttacctcccctctccccaccaaattatgacacaaacgagtatgtttcctctctagaaccctgtaatgcctcctcccccatccccagagctccttactgtaggtcttaccctggacaaggattttttcaagttggaggcacagaacatgagcaatctgacattcccacagcccctcaaacatgcaaggctactaaggcaggaggagtataaatgatggatattgaccaagacctgcttggacggagaccgccatattatctgttctcttcgttcacaaaacagccttcacttgtctcagaatttgatggacacatactgtgatgagcaggagcttcagatgcactctttacacattttgttgaaataaacctctacatttgtagaagagtt

SEQ ID NO: 10907 - protein, 2268 aa, Homo sapiens; identical to SEQ ID NO: 1772

SEQ ID NO: 10908 - DNA, 9559 bp, Homo sapiens
cggcctggtgctgcacgcctgtcagccatcgcccgagccgccggcgtctcctcccgcccagcagttcctccacgcaggggctccggaatcgcccgaccgcacacgttgccaccctgaggtctttctggaagtggatatctactcagacagtaagaattataagagctgtaagagctcattttggaggaataatggatgaaccatctcccttggcccaacctctggagctgaaccagcactctcgattcataataggttctgtgtctgaagataactcagaggatgagatcagcaacctggtgaagttggacctactggaggagaaggagggctccttgtcacctgcttctgttggctcagatacactctctgatttggggatctctagcctacaggatggcttggccttgcacataaggtccagcatgtctggcttgcacctagtaaagcagggccgagacagaaagaaaatagattctcaacgagatttcactgtggcttctccagcagaatttgttactcgctttgggggaaataaagtgattgagaaggttcttattgctaacaatggcattgcagcagtgaaatgcatgcggtctatccgtaggtggtcttatgaaatgtttcgaaatgaacgtgcaattagattcgttgtcatggtcacacctgaagaccttaaagccaatgcagaatacattaagatggcagatcactatgtgccagtgcctggaggaccaaacaacaacaactatgcaaatgtggaattaattcttgatattgctaaaaggatcccagtacaagcagtgtgggctggctggggtcatgcttctgagaatcccaaactaccggaacttctcttgaaaaatggcattgccttcatgggtcctccaagccaggccatgtgggctttaggggataagattgcatcttccatagtggctcaaactgcaggtatcccaactcttccctggagcggcagtggtcttcgtgtggactggcaggaaaatgatttttcaaaacgtatcttaaatgttccccaggagctatatgaaaaaggttatgtgaaagatgtggatgatgggctacaggcagctgaggaagttggatatccagtaatgatcaaggcctcagagggaggaggagggaagggaattagaaaagtcaacaatgcagatgacttccctaatctcttcagacaggttcaagctgaagttcctggatctcccatatttgtgatgagactagccaaacaatctcgtcatctggaggtgcagatcttagcggaccaatatggcaatgctatctctttgtttggtcgtgattgctctgtacaacgcaggcatcagaagattattgaagaagcacctgctactattgctactccagcagtatttgaacacatggaacagtgtgcggtgaaacttgccaaaatggtgggttatgtgagtgctgggactgtggaatacctgtacagccaggatggcagcttctactttctggaattgaatcctcggctgcaggtagagcacccttgtacagagatggtggctgatgtcaatctccctgcagcacagctccagattgccatggggattcctctatatagaatcaaggatatccgtatgatgtatggggtatctccctggggtgattctcccattgattttgaagattctgcacacgttccttgtccaaggggccatgttattgctgctcggatcactagtgaaaatccagatgagggttttaagcccagctcaggaacagttcaggagctaaatttccgcagcaataagaatgtttggggatatttcagtgttgctgctgcagggggacttcatgaatttgctgattctcagtttggtcactgcttttcttggggagaaaacagagaagaggcaatttcaaacatggtggtggctttgaaggagctgtctattcggggtgactttcgaactacagttgaatacctgatcaaattgttagagactgaaagctttcagatgaacagaattgatactggctggctggacagactgatagcagaaaaagtacaggctgagcgacctgacaccatgttgggggttgtgtgtggtgccctccacgtggcagatgtgagcctgcggaatagcgtctctaacttccttcactccttagaaaggggtcaagtccttcctgctcatacacttctgaatacagtagatgttgaacttatctatgagggagtcaagtatgtacttaaggtgactcgacagtcccccaactcctatgtggtgatcatgaatggctcatgtgtagaagtagatgtacatcggctgagtgacggtggactgctcttgtcctatgatggcagcagttatactacgtatatgaaagaggaagtggatagatatcgcatcacaattggcaataaaacctgtgtgtttgagaaggaaaatgacccatcggtgatgcgctcaccttctgctgggaagttaatccagtacattgtagaagatggaggtcatgtgtttgccggccagtgctatgctgagattgaggtaatgaagatggtaatgaccttaacagctgtggagtctggctgtatccattacgtcaagcgacctggagcagctcttgaccctggctgtgtactagccaaaatgcaactggacaaccccagcaaggttcagcaggctgaacttcacacaggtagtctgccacggatccagagcacggcactcagaggcgagaaactccatcgagtgttccattatgtcctggataatctggtcaatgtaatgaatggatactgccttccagatcctttctttagcagcaaggtaaaagactgggtagagcgattgatgaaaaccctcagagatccctccctgcctctcctagaattgcaagatattatgaccagtgtgtctggccgcattccccccaatgtggagaagtctatcaagaaggaaatggctcagtatgctagcaacatcacatcagtcctctgtcagtttcccagccagcagattgcaaacatcctagatagccatgcagctacattgaaccggaaatctgaacgggaagtcttctttatgaatactcagagcattgttcagctggtacagaggtaccgaagtggcatccgaggccacatgaaggctgtggtgatggatctgctccggcagtacctgcgagtagagacacaattccagaatggtcactatgacaaatgtgtattcgccctccgagaagagaataaaagtgacatgaacactgtactgaactacatcttctctcacgctcaagtcaccaagaagaatcttctggtcacaatgcttattgatcagttgtgtggccgggaccctactctcactgatgagctgctgaatattctcacagagctaactcaactcagtaagaccaccaatgccaaagtagcacttcgagcacgccaggttcttattgcctcccatttgccatcatatgagcttcgccataaccaagtagagtctatcttcctatcagctattgacatgtatggacatcaattttgcattgagaacctgcagaaactcatcctatcagaaacatctatttttgatgtcctaccaaacttcttctatcacagcaaccaagtagtgaggatggcagctctggaggtgtatgttcgaagggcttatattgcctatgaacttaacagcgtacaacaccgccagcttaaggacaacacctgtgtggtggaattccagttcatgctgcccacatctcatccaaacagagggaacatccctacgctaaacagaatgtccttctcctccaacctcaaccactatggcatgacccatgtagctagtgtcagcgatgtactgttggacaactcattcactccaccttgtcagcggatgggcggaatggtctcttttcggacttttgaagattttgtcaggatctttgatgaagtgatgggctgcttctctgactccccaccccagagtcccacattccctgaggcaggtcacacgtctctttatgatgaggataaggttcccagggatgaaccaattcacattctcaatgtggctatcaagactgactgtgatattgaggatgacaggctggcagctatgttcagagaatttacccagcaaaataaagctaccctggttgaccatgggatccggcgccttactttcctggttgcacaaaaggatttcagaaagcaggtcaactatgaggtggatcggagatttcatagagaattccctaaattttttacattccgagcaagggataagtttgaggaggatcgtatctatcgtcatctggagcctgctctggctttccagttagagctgaaccggatgagaaattttgacctcactgccattccatgtgctaatcacaagatgcacctgtatctcggggcagccaaggtggaagtgggcacagaagtgacagactacaggttctttgttcgtgcaatcatcaggcattctgatctggtcaccaaggaagcttcttttgaatatctgcaaaatgaaggggagcggctactcctggaagccatggatgagttggaagttgcttttaacaatacaaatgtccgcactgactgtaaccacatcttcctcaactttgtgcccacggttatcatggacccatcaaagattgaggaatccgtgcggagcatggtaatgcggtatggaagtcgcctgtggaaattgcgcgtcctccaggcagaactgaaaatcaacattcgcctgacgccaactggaaaagcaattcccatccgcctcttcctgacaaacgagtctggctattacttggatatcagcctatacaaggaagtgactgactccaggacagcacagatcatgtttcaggcatatggagacaaacagggaccactgcatggaatgttaatcaatactccatatgtgaccaaagacctgctgcaatcaaagaggttccaggcacaatccttagggacaacatacatatatgatatcccagagatgtttcggcagtccctgatcaaactctgggagtctatgtccactcaagcatttcttccatctccccctctgccttctgacatgctgacttacactgaactggtactggatgatcaaggtcagctggtccacatgaacaggcttccaggaggaaatgagattggcatggtagcttggaaaatgacctttaaaagtcctgaatatccagaaggccgagatatcattgttattggcaatgacatcacataccgaattgggtcctttgggcctcaagaggatttgttatttctcagagcttccgaacttgctagggcagaaggtattccacgcatctatgtatcagccaacagtggagcaagaatcggactggcagaagaaattcgccatatgtttcatgtggcctgggtagatcctgaggatccttacaagggatacaggtatttatatctgactcctcaagattataagagagtcagtgctctcaactctgtccattgtgaacacgtggaagatgaaggagaatccaggtacaagataacagatattattgggaaagaagagggaattggacccgagaaccttcgaggttctggaatgattgctggagaatcctcattggcctataatgagatcattaccatcagcctggtgacgtgccgggccattgggattggggcttaccttgtccggctgggacagagaaccatccaggttgagaattctcacttaattctaacaggagctggagccctcaacaaagtcctcgggcgggaagtgtacacctccaataaccagctggggggcatccagattatgcacaacaatggggtgacccactgcactgtgtgtgatgactttgaaggggttttcactgtcctgcactggctgtcttacatgcccaagagcgtgcacagttcagttcctcttctgaactcaaaggatcctatagacagaatcatcgagtttgttcccacaaagaccccatacgatcctcgatggatgctagcaggccgtcctcacccaacccaaaaaggtcagtggttgagtggcttttttgactatggatctttctcagagattatgcagccctgggcacagactgtggtggttggtagagccaggctaggaggaatacctgtgggagttgttgctgtagaaacccgaacagtagaactaagtatcccagctgatccagcaaacctggattctgaagccaagataatccagcaggctggccaggtttggttcccagattctgcgtttaagacatatcaggccatcaaggacttcaaccgggaagggctgcctctgatggtctttgccaactggagaggcttctctggtggaatgaaagatatgtacgaccaagtgctgaagtttggtgcttacattgtggatggcttgagggagtgctgccagcctgtgctggtttacattcctccccaggctgagctgcggggtggctcctgggtggtgattgactcctccatcaacccccggcacatggagatgtatgctgaccgagaaagcaggggatctgttctggagccagaagggacagtagaaatcaaattccgcagaaaggatctggtgaaaaccatgcgtcgggtggacccagtctacatccacttggctgagcgattggggaccccagagctaagcacagctgagcggaaggagttggagaacaagttgaaggagcgggaggaattcctaattcccatttaccatcaggtagccgtgcagtttgctgacttgcacgacacaccaggccggatgcaggagaagggtgttattagcgatatcctggattggaaaacatcccgtaccttcttctactggcggctgaggcgtcttctgctggaggacctggtcaagaagaaaatccacaatgccaaccctgagctgactgatggccagattcaagccatgttaaggcgctggtttgtggaagtggaaggaacagtgaaggcttatgtttgggacaataataaggatctggcggagtggctagagaaacagctgacagaggaggatggtgttcactcggtaatagaggaaaacatcaaatgcatcagcagagactacgtcctcaagcaaatccgcagcttggtccaggccaatccagaggttgccatggattccatcatccatatgacgcagcacatatcacccactcagcgagcagaagtcatacggatcctctccacaatggattccccttccacgtaggaagagcttcctgcctgtccctgccctgtctctggagaaaagggctagagctgccttttacaactgtaaccactgtaatgagaaggcacaggagacccagcactggagtcaaatggcattttacttcctctcgtttcaggttatgcatgacatcctgggatgtaagatcacagaatccccctccagcccaccagtcacacctaccccattcagtatttattaccctggccaggcctagtcctccactccctgcacaggactgagaaggcaatgaaaggtacaaacatgtaccatgaggtcttactaaccaaagtagggctgcccctcctgtcctgacagccccttggcctcccagcatggggaagcgtgaggagttgcccagcagtgagcagcccccctcactcctggccccatgagccgcagccacaggcagcagaggagggctaaggagaggaggaagcctcaagtccattgtttattaccccgactcttagcccagcacacagtaggcactggagaggaatgattcccagtttaaccacactacggtaccttttatgaagaaaaattagagcataaaatctactacaagctccataggaactcaaagatgagggcaaaactgtgagccaagaagcagagaaagaaaatagaaccagttattcttgatttaggggacctcaaccttgggttcagtctctgaggacaaagggaaaggtagttgttggcctgcctctcgcctgcacgtcactgctggactagctgtcgcatgtggctgggagctgcaaggccagtgcttgaggggccccagcagttccacaggtggtgaagcctgagttggcagaggaggagccagaagagaactgccctttctgcactggtggaaactagttatttatgccatgtggagagccagtgagatagatagatagtctgtttgttttgaggacttggaaagttgttcctatgaagcctggagcttggatggttttgagaggttaatggtgcctccacactcactcttccctagttccaggattactgtcctagcagctaacggttctactctcttccccagagtgtagacaggcagcaggtctccccacagctctgaaaggaccctggtgacagctacaccctcagcaccaggagctggccttcctgatgagggaggcttccaggaaacacagaatccacatgaccttaagattatttacaactcagtcatggtgctgctgtcctccaggcttactggcccctcctgactggcatcaggggcttcctcaggtggtggagagagtttactttcaacaactagtttattcaagaaaagaacttactgattcctctgttcctaaagcaagagtggcaggtgatcagggctggtgtagcatccggttcctttagtgcagctaactgcatttgtcactgatgaccaaggaggaaatcactaagacatttgagaagcagtggtatgaacgttcttggacaagccacagttctgagccttaaccctgtagtttgcacacaagaacgagctccacctccccttcttcaggaggaatctgtgcggatagattggctggacttttcaatggttctgggttgcaggtgggcactgtatggctgggtatggagcggacagcccccaggagtcagagcctcagcccggctgccctggtggaaggtacaggtgttcagcaccttcagaaaagggcataaagtggtgggggacaattctcagtccaggaaaatgcattgaccattgctggctatttgcttacctagtaagaattggattcatttttgaccagattattcttctatgcttttttgcaataaatcaaatcccacatatctacaagtggtatgaagtcctgcaccccccaggaggcctgtccaggcatgtcttcagaggcagggtgggttacactcatttacctcccctctccccaccaaattatgacacaaacgagtatgtttcctctctagaaccctgtaatgcctcctcccccatccccagagctccttactgtaggtcttaccctggacaaggattttttcaagttggaggcacagaacatgagcaatctgacattcccacagcccctcaaacatgcaaggctactaaggcaggaggagtataaatgatggatattgaccaagacctgcttggacggagaccgccatattatctgttctcttcgttcacaaaacagccttcacttgtctcagaatttgatggacacatactgtgatgagcaggagcttcagatgcactctttacacattttgttgaaataaacctctacatttgtagaagagtt

SEQ ID NO: 10909 - protein, 2346 aa, Homo sapiens; identical to SEQ ID NO: 1768

SEQ ID NO: 10910 - DNA, 9670 bp, Homo sapiens
cggcctggtgctgcacgcctgtcagccatcgcccgagccgccggcgtctcctcccgcccagcagttcctccacgcaggggctccggaatcgcccgaccgcacacgttgccaccctgaggtctttctggaagtggatatctactcagacagtaagaattataagagctgtaagagctcattttggaggaataatggatgaaccatctcccttggcccaacctctggagctgaaccagcactctcgattcataataggttctgtgtctgaagataactcagaggatgagatcagcaacctggtgaagttggacctactggaggagaaggagggctccttgtcacctgcttctgttggctcagatacactctctgatttggggatctctagcctacaggatggcttggccttgcacataagactttgaaatactcgtgggatatgaagtggaggtgcctagagggttgaagataatgaggacagatgaagaaatgtttgattgtgccatacttacagttgctgattttcaaggtccagcatgtctggcttgcacctagtaaagcagggccgagacagaaagaaaatagattctcaacgagatttcactgtggcttctccagcagaatttgttactcgctttgggggaaataaagtgattgagaaggttcttattgctaacaatggcattgcagcagtgaaatgcatgcggtctatccgtaggtggtcttatgaaatgtttcgaaatgaacgtgcaattagattcgttgtcatggtcacacctgaagaccttaaagccaatgcagaatacattaagatggcagatcactatgtgccagtgcctggaggaccaaacaacaacaactatgcaaatgtggaattaattcttgatattgctaaaaggatcccagtacaagcagtgtgggctggctggggtcatgcttctgagaatcccaaactaccggaacttctcttgaaaaatggcattgccttcatgggtcctccaagccaggccatgtgggctttaggggataagattgcatcttccatagtggctcaaactgcaggtatcccaactcttccctggagcggcagtggtcttcgtgtggactggcaggaaaatgatttttcaaaacgtatcttaaatgttccccaggagctatatgaaaaaggttatgtgaaagatgtggatgatgggctacaggcagctgaggaagttggatatccagtaatgatcaaggcctcagagggaggaggagggaagggaattagaaaagtcaacaatgcagatgacttccctaatctcttcagacaggttcaagctgaagttcctggatctcccatatttgtgatgagactagccaaacaatctcgtcatctggaggtgcagatcttagcggaccaatatggcaatgctatctctttgtttggtcgtgattgctctgtacaacgcaggcatcagaagattattgaagaagcacctgctactattgctactccagcagtatttgaacacatggaacagtgtgcggtgaaacttgccaaaatggtgggttatgtgagtgctgggactgtggaatacctgtacagccaggatggcagcttctactttctggaattgaatcctcggctgcaggtagagcacccttgtacagagatggtggctgatgtcaatctccctgcagcacagctccagattgccatggggattcctctatatagaatcaaggatatccgtatgatgtatggggtatctccctggggtgattctcccattgattttgaagattctgcacacgttccttgtccaaggggccatgttattgctgctcggatcactagtgaaaatccagatgagggttttaagcccagctcaggaacagttcaggagctaaatttccgcagcaataagaatgtttggggatatttcagtgttgctgctgcagggggacttcatgaatttgctgattctcagtttggtcactgcttttcttggggagaaaacagagaagaggcaatttcaaacatggtggtggctttgaaggagctgtctattcggggtgactttcgaactacagttgaatacctgatcaaattgttagagactgaaagctttcagatgaacagaattgatactggctggctggacagactgatagcagaaaaagtacaggctgagcgacctgacaccatgttgggggttgtgtgtggtgccctccacgtggcagatgtgagcctgcggaatagcgtctctaacttccttcactccttagaaaggggtcaagtccttcctgctcatacacttctgaatacagtagatgttgaacttatctatgagggagtcaagtatgtacttaaggtgactcgacagtcccccaactcctatgtggtgatcatgaatggctcatgtgtagaagtagatgtacatcggctgagtgacggtggactgctcttgtcctatgatggcagcagttatactacgtatatgaaagaggaagtggatagatatcgcatcacaattggcaataaaacctgtgtgtttgagaaggaaaatgacccatcggtgatgcgctcaccttctgctgggaagttaatccagtacattgtagaagatggaggtcatgtgtttgccggccagtgctatgctgagattgaggtaatgaagatggtaatgaccttaacagctgtggagtctggctgtatccattacgtcaagcgacctggagcagctcttgaccctggctgtgtactagccaaaatgcaactggacaaccccagcaaggttcagcaggctgaacttcacacaggtagtctgccacggatccagagcacggcactcagaggcgagaaactccatcgagtgttccattatgtcctggataatctggtcaatgtaatgaatggatactgccttccagatcctttctttagcagcaaggtaaaagactgggtagagcgattgatgaaaaccctcagagatccctccctgcctctcctagaattgcaagatattatgaccagtgtgtctggccgcattccccccaatgtggagaagtctatcaagaaggaaatggctcagtatgctagcaacatcacatcagtcctctgtcagtttcccagccagcagattgcaaacatcctagatagccatgcagctacattgaaccggaaatctgaacgggaagtcttctttatgaatactcagagcattgttcagctggtacagaggtaccgaagtggcatccgaggccacatgaaggctgtggtgatggatctgctccggcagtacctgcgagtagagacacaattccagaatggtcactatgacaaatgtgtattcgccctccgagaagagaataaaagtgacatgaacactgtactgaactacatcttctctcacgctcaagtcaccaagaagaatcttctggtcacaatgcttattgatcagttgtgtggccgggaccctactctcactgatgagctgctgaatattctcacagagctaactcaactcagtaagaccaccaatgccaaagtagcacttcgagcacgccaggttcttattgcctcccatttgccatcatatgagcttcgccataaccaagtagagtctatcttcctatcagctattgacatgtatggacatcaattttgcattgagaacctgcagaaactcatcctatcagaaacatctatttttgatgtcctaccaaacttcttctatcacagcaaccaagtagtgaggatggcagctctggaggtgtatgttcgaagggcttatattgcctatgaacttaacagcgtacaacaccgccagcttaaggacaacacctgtgtggtggaattccagttcatgctgcccacatctcatccaaacagagggaacatccctacgctaaacagaatgtccttctcctccaacctcaaccactatggcatgacccatgtagctagtgtcagcgatgtactgttggacaactcattcactccaccttgtcagcggatgggcggaatggtctcttttcggacttttgaagattttgtcaggatctttgatgaagtgatgggctgcttctctgactccccaccccagagtcccacattccctgaggcaggtcacacgtctctttatgatgaggataaggttcccagggatgaaccaattcacattctcaatgtggctatcaagactgactgtgatattgaggatgacaggctggcagctatgttcagagaatttacccagcaaaataaagctaccctggttgaccatgggatccggcgccttactttcctggttgcacaaaaggatttcagaaagcaggtcaactatgaggtggatcggagatttcatagagaattccctaaattttttacattccgagcaagggataagtttgaggaggatcgtatctatcgtcatctggagcctgctctggctttccagttagagctgaaccggatgagaaattttgacctcactgccattccatgtgctaatcacaagatgcacctgtatctcggggcagccaaggtggaagtgggcacagaagtgacagactacaggttctttgttcgtgcaatcatcaggcattctgatctggtcaccaaggaagcttcttttgaatatctgcaaaatgaaggggagcggctactcctggaagccatggatgagttggaagttgcttttaacaatacaaatgtccgcactgactgtaaccacatcttcctcaactttgtgcccacggttatcatggacccatcaaagattgaggaatccgtgcggagcatggtaatgcggtatggaagtcgcctgtggaaattgcgcgtcctccaggcagaactgaaaatcaacattcgcctgacgccaactggaaaagcaattcccatccgcctcttcctgacaaacgagtctggctattacttggatatcagcctatacaaggaagtgactgactccaggacagcacagatcatgtttcaggcatatggagacaaacagggaccactgcatggaatgttaatcaatactccatatgtgaccaaagacctgctgcaatcaaagaggttccaggcacaatccttagggacaacatacatatatgatatcccagagatgtttcggcagtccctgatcaaactctgggagtctatgtccactcaagcatttcttccatctccccctctgccttctgacatgctgacttacactgaactggtactggatgatcaaggtcagctggtccacatgaacaggcttccaggaggaaatgagattggcatggtagcttggaaaatgacctttaaaagtcctgaatatccagaaggccgagatatcattgttattggcaatgacatcacataccgaattgggtcctttgggcctcaagaggatttgttatttctcagagcttccgaacttgctagggcagaaggtattccacgcatctatgtatcagccaacagtggagcaagaatcggactggcagaagaaattcgccatatgtttcatgtggcctgggtagatcctgaggatccttacaagggatacaggtatttatatctgactcctcaagattataagagagtcagtgctctcaactctgtccattgtgaacacgtggaagatgaaggagaatccaggtacaagataacagatattattgggaaagaagagggaattggacccgagaaccttcgaggttctggaatgattgctggagaatcctcattggcctataatgagatcattaccatcagcctggtgacgtgccgggccattgggattggggcttaccttgtccggctgggacagagaaccatccaggttgagaattctcacttaattctaacaggagctggagccctcaacaaagtcctcgggcgggaagtgtacacctccaataaccagctggggggcatccagattatgcacaacaatggggtgacccactgcactgtgtgtgatgactttgaaggggttttcactgtcctgcactggctgtcttacatgcccaagagcgtgcacagttcagttcctcttctgaactcaaaggatcctatagacagaatcatcgagtttgttcccacaaagaccccatacgatcctcgatggatgctagcaggccgtcctcacccaacccaaaaaggtcagtggttgagtggcttttttgactatggatctttctcagagattatgcagccctgggcacagactgtggtggttggtagagccaggctaggaggaatacctgtgggagttgttgctgtagaaacccgaacagtagaactaagtatcccagctgatccagcaaacctggattctgaagccaagataatccagcaggctggccaggtttggttcccagattctgcgtttaagacatatcaggccatcaaggacttcaaccgggaagggctgcctctgatggtctttgccaactggagaggcttctctggtggaatgaaagatatgtacgaccaagtgctgaagtttggtgcttacattgtggatggcttgagggagtgctgccagcctgtgctggtttacattcctccccaggctgagctgcggggtggctcctgggtggtgattgactcctccatcaacccccggcacatggagatgtatgctgaccgagaaagcaggggatctgttctggagccagaagggacagtagaaatcaaattccgcagaaaggatctggtgaaaaccatgcgtcgggtggacccagtctacatccacttggctgagcgattggggaccccagagctaagcacagctgagcggaaggagttggagaacaagttgaaggagcgggaggaattcctaattcccatttaccatcaggtagccgtgcagtttgctgacttgcacgacacaccaggccggatgcaggagaagggtgttattagcgatatcctggattggaaaacatcccgtaccttcttctactggcggctgaggcgtcttctgctggaggacctggtcaagaagaaaatccacaatgccaaccctgagctgactgatggccagattcaagccatgttaaggcgctggtttgtggaagtggaaggaacagtgaaggcttatgtttgggacaataataaggatctggcggagtggctagagaaacagctgacagaggaggatggtgttcactcggtaatagaggaaaacatcaaatgcatcagcagagactacgtcctcaagcaaatccgcagcttggtccaggccaatccagaggttgccatggattccatcatccatatgacgcagcacatatcacccactcagcgagcagaagtcatacggatcctctccacaatggattccccttccacgtaggaagagcttcctgcctgtccctgccctgtctctggagaaaagggctagagctgccttttacaactgtaaccactgtaatgagaaggcacaggagacccagcactggagtcaaatggcattttacttcctctcgtttcaggttatgcatgacatcctgggatgtaagatcacagaatccccctccagcccaccagtcacacctaccccattcagtatttattaccctggccaggcctagtcctccactccctgcacaggactgagaaggcaatgaaaggtacaaacatgtaccatgaggtcttactaaccaaagtagggctgcccctcctgtcctgacagccccttggcctcccagcatggggaagcgtgaggagttgcccagcagtgagcagcccccctcactcctggccccatgagccgcagccacaggcagcagaggagggctaaggagaggaggaagcctcaagtccattgtttattaccccgactcttagcccagcacacagtaggcactggagaggaatgattcccagtttaaccacactacggtaccttttatgaagaaaaattagagcataaaatctactacaagctccataggaactcaaagatgagggcaaaactgtgagccaagaagcagagaaagaaaatagaaccagttattcttgatttaggggacctcaaccttgggttcagtctctgaggacaaagggaaaggtagttgttggcctgcctctcgcctgcacgtcactgctggactagctgtcgcatgtggctgggagctgcaaggccagtgcttgaggggccccagcagttccacaggtggtgaagcctgagttggcagaggaggagccagaagagaactgccctttctgcactggtggaaactagttatttatgccatgtggagagccagtgagatagatagatagtctgtttgttttgaggacttggaaagttgttcctatgaagcctggagcttggatggttttgagaggttaatggtgcctccacactcactcttccctagttccaggattactgtcctagcagctaacggttctactctcttccccagagtgtagacaggcagcaggtctccccacagctctgaaaggaccctggtgacagctacaccctcagcaccaggagctggccttcctgatgagggaggcttccaggaaacacagaatccacatgaccttaagattatttacaactcagtcatggtgctgctgtcctccaggcttactggcccctcctgactggcatcaggggcttcctcaggtggtggagagagtttactttcaacaactagtttattcaagaaaagaacttactgattcctctgttcctaaagcaagagtggcaggtgatcagggctggtgtagcatccggttcctttagtgcagctaactgcatttgtcactgatgaccaaggaggaaatcactaagacatttgagaagcagtggtatgaacgttcttggacaagccacagttctgagccttaaccctgtagtttgcacacaagaacgagctccacctccccttcttcaggaggaatctgtgcggatagattggctggacttttcaatggttctgggttgcaggtgggcactgtatggctgggtatggagcggacagcccccaggagtcagagcctcagcccggctgccctggtggaaggtacaggtgttcagcaccttcagaaaagggcataaagtggtgggggacaattctcagtccaggaaaatgcattgaccattgctggctatttgcttacctagtaagaattggattcatttttgaccagattattcttctatgcttttttgcaataaatcaaatcccacatatctacaagtggtatgaagtcctgcaccccccaggaggcctgtccaggcatgtcttcagaggcagggtgggttacactcatttacctcccctctccccaccaaattatgacacaaacgagtatgtttcctctctagaaccctgtaatgcctcctcccccatccccagagctccttactgtaggtcttaccctggacaaggattttttcaagttggaggcacagaacatgagcaatctgacattcccacagcccctcaaacatgcaaggctactaaggcaggaggagtataaatgatggatattgaccaagacctgcttggacggagaccgccatattatctgttctcttcgttcacaaaacagccttcacttgtctcagaatttgatggacacatactgtgatgagcaggagcttcagatgcactctttacacattttgttgaaataaacctctacatttgtagaagagtt

SEQ ID NO: 10911 - protein, 2268 aa, Homo sapiens; identical to SEQ ID NO: 1772

SEQ ID NO: 10912 - DNA, 10668 bp, Homo sapiens
ggcccccgccgggtgctgagcgcccgccaccgccctcttggccttttcccggtccccgccgcgcgcctgctgctgtccccgtgcccgaggactgggaggatggggctgagccgcttgcctgacttttgatccgaccagtaatcactttgcccgtgtggcgcgtggcccgttgcctgaggcttcctggcgcgtggggctgtttggtcccctccggagtgcggtgaggcgggccgagccgggactgcctgggtttggggataacgttcccatctccacccctgttgcagcaagggaaattgaggctgagggaactgggcccagggacggcgagccgtggctgcctctccagtccgggccccgaagggctgctcgtggatgaaccagactgattttaaggggtgaagagggtgcgtttcaatcagatgcttctggaacgtcgaaattgtcttctttggaaagaaccatcccctctttgggcttcagaggcccaaattgaggcgcaatgatgagaggatgtggtggtctactctgatgtcaatcttgagggctagggtcttgctatgtcacccagcctggagtggaattgtgtgatcaagactcactgaagcctccaactcctgggctcaagcaatcctcccacctcagccacccaagtagctgggactacaggcgctggagtgcaatggcatgatcttggctcactgcaacctccgcctcccggattcaacggattctcctgcctcagcctcctgagtagctgggattataggtgcctgccacaacacccaggaccagacttatgaagtggccttcctgaggagattttctgaccttatggtatgaagttccttcaggctcttaattctggataaactggagtgattaacaagagcaaagagacatagtattcagataaggactttgtgtcttatttttcttttatatcacaactggagccacagttgtgggcaaggcactgactttcttgatgaattctgtccatctgtaaagcagctatatatcccactggaggctttgcctctcagagacaacgtgaagacggataagcaggcatcaggagcagagtggcctctcagctggtcagattctccgaagaaggatcctctaggctgggcacggtggctcacacctataatcccagcactttgggaggccgaggcaggtggatcacgaggtcaggagttcgaggccagcctggccaatatggtctttctggaagtggatatctactcagacagtaagaattataagagctgtaagagctcattttggaggaataatggatgaaccatctcccttggcccaacctctggagctgaaccagcactctcgattcataataggttctgtgtctgaagataactcagaggatgagatcagcaacctggtgaagttggacctactggaggagaaggagggctccttgtcacctgcttctgttggctcagatacactctctgatttggggatctctagcctacaggatggcttggccttgcacataaggtccagcatgtctggcttgcacctagtaaagcagggccgagacagaaagaaaatagattctcaacgagatttcactgtggcttctccagcagaatttgttactcgctttgggggaaataaagtgattgagaaggttcttattgctaacaatggcattgcagcagtgaaatgcatgcggtctatccgtaggtggtcttatgaaatgtttcgaaatgaacgtgcaattagattcgttgtcatggtcacacctgaagaccttaaagccaatgcagaatacattaagatggcagatcactatgtgccagtgcctggaggaccaaacaacaacaactatgcaaatgtggaattaattcttgatattgctaaaaggatcccagtacaagcagtgtgggctggctggggtcatgcttctgagaatcccaaactaccggaacttctcttgaaaaatggcattgccttcatgggtcctccaagccaggccatgtgggctttaggggataagattgcatcttccatagtggctcaaactgcaggtatcccaactcttccctggagcggcagtggtcttcgtgtggactggcaggaaaatgatttttcaaaacgtatcttaaatgttccccaggagctatatgaaaaaggttatgtgaaagatgtggatgatgggctacaggcagctgaggaagttggatatccagtaatgatcaaggcctcagagggaggaggagggaagggaattagaaaagtcaacaatgcagatgacttccctaatctcttcagacaggttcaagctgaagttcctggatctcccatatttgtgatgagactagccaaacaatctcgtcatctggaggtgcagatcttagcggaccaatatggcaatgctatctctttgtttggtcgtgattgctctgtacaacgcaggcatcagaagattattgaagaagcacctgctactattgctactccagcagtatttgaacacatggaacagtgtgcggtgaaacttgccaaaatggtgggttatgtgagtgctgggactgtggaatacctgtacagccaggatggcagcttctactttctggaattgaatcctcggctgcaggtagagcacccttgtacagagatggtggctgatgtcaatctccctgcagcacagctccagattgccatggggattcctctatatagaatcaaggatatccgtatgatgtatggggtatctccctggggtgattctcccattgattttgaagattctgcacacgttccttgtccaaggggccatgttattgctgctcggatcactagtgaaaatccagatgagggttttaagcccagctcaggaacagttcaggagctaaatttccgcagcaataagaatgtttggggatatttcagtgttgctgctgcagggggacttcatgaatttgctgattctcagtttggtcactgcttttcttggggagaaaacagagaagaggcaatttcaaacatggtggtggctttgaaggagctgtctattcggggtgactttcgaactacagttgaatacctgatcaaattgttagagactgaaagctttcagatgaacagaattgatactggctggctggacagactgatagcagaaaaagtacaggctgagcgacctgacaccatgttgggggttgtgtgtggtgccctccacgtggcagatgtgagcctgcggaatagcgtctctaacttccttcactccttagaaaggggtcaagtccttcctgctcatacacttctgaatacagtagatgttgaacttatctatgagggagtcaagtatgtacttaaggtgactcgacagtcccccaactcctatgtggtgatcatgaatggctcatgtgtagaagtagatgtacatcggctgagtgacggtggactgctcttgtcctatgatggcagcagttatactacgtatatgaaagaggaagtggatagatatcgcatcacaattggcaataaaacctgtgtgtttgagaaggaaaatgacccatcggtgatgcgctcaccttctgctgggaagttaatccagtacattgtagaagatggaggtcatgtgtttgccggccagtgctatgctgagattgaggtaatgaagatggtaatgaccttaacagctgtggagtctggctgtatccattacgtcaagcgacctggagcagctcttgaccctggctgtgtactagccaaaatgcaactggacaaccccagcaaggttcagcaggctgaacttcacacaggtagtctgccacggatccagagcacggcactcagaggcgagaaactccatcgagtgttccattatgtcctggataatctggtcaatgtaatgaatggatactgccttccagatcctttctttagcagcaaggtaaaagactgggtagagcgattgatgaaaaccctcagagatccctccctgcctctcctagaattgcaagatattatgaccagtgtgtctggccgcattccccccaatgtggagaagtctatcaagaaggaaatggctcagtatgctagcaacatcacatcagtcctctgtcagtttcccagccagcagattgcaaacatcctagatagccatgcagctacattgaaccggaaatctgaacgggaagtcttctttatgaatactcagagcattgttcagctggtacagaggtaccgaagtggcatccgaggccacatgaaggctgtggtgatggatctgctccggcagtacctgcgagtagagacacaattccagaatggtcactatgacaaatgtgtattcgccctccgagaagagaataaaagtgacatgaacactgtactgaactacatcttctctcacgctcaagtcaccaagaagaatcttctggtcacaatgcttattgatcagttgtgtggccgggaccctactctcactgatgagctgctgaatattctcacagagctaactcaactcagtaagaccaccaatgccaaagtagcacttcgagcacgccaggttcttattgcctcccatttgccatcatatgagcttcgccataaccaagtagagtctatcttcctatcagctattgacatgtatggacatcaattttgcattgagaacctgcagaaactcatcctatcagaaacatctatttttgatgtcctaccaaacttcttctatcacagcaaccaagtagtgaggatggcagctctggaggtgtatgttcgaagggcttatattgcctatgaacttaacagcgtacaacaccgccagcttaaggacaacacctgtgtggtggaattccagttcatgctgcccacatctcatccaaacagagggaacatccctacgctaaacagaatgtccttctcctccaacctcaaccactatggcatgacccatgtagctagtgtcagcgatgtactgttggacaactcattcactccaccttgtcagcggatgggcggaatggtctcttttcggacttttgaagattttgtcaggatctttgatgaagtgatgggctgcttctctgactccccaccccagagtcccacattccctgaggcaggtcacacgtctctttatgatgaggataaggttcccagggatgaaccaattcacattctcaatgtggctatcaagactgactgtgatattgaggatgacaggctggcagctatgttcagagaatttacccagcaaaataaagctaccctggttgaccatgggatccggcgccttactttcctggttgcacaaaaggatttcagaaagcaggtcaactatgaggtggatcggagatttcatagagaattccctaaattttttacattccgagcaagggataagtttgaggaggatcgtatctatcgtcatctggagcctgctctggctttccagttagagctgaaccggatgagaaattttgacctcactgccattccatgtgctaatcacaagatgcacctgtatctcggggcagccaaggtggaagtgggcacagaagtgacagactacaggttctttgttcgtgcaatcatcaggcattctgatctggtcaccaaggaagcttcttttgaatatctgcaaaatgaaggggagcggctactcctggaagccatggatgagttggaagttgcttttaacaatacaaatgtccgcactgactgtaaccacatcttcctcaactttgtgcccacggttatcatggacccatcaaagattgaggaatccgtgcggagcatggtaatgcggtatggaagtcgcctgtggaaattgcgcgtcctccaggcagaactgaaaatcaacattcgcctgacgccaactggaaaagcaattcccatccgcctcttcctgacaaacgagtctggctattacttggatatcagcctatacaaggaagtgactgactccaggacagcacagatcatgtttcaggcatatggagacaaacagggaccactgcatggaatgttaatcaatactccatatgtgaccaaagacctgctgcaatcaaagaggttccaggcacaatccttagggacaacatacatatatgatatcccagagatgtttcggcagtccctgatcaaactctgggagtctatgtccactcaagcatttcttccatctccccctctgccttctgacatgctgacttacactgaactggtactggatgatcaaggtcagctggtccacatgaacaggcttccaggaggaaatgagattggcatggtagcttggaaaatgacctttaaaagtcctgaatatccagaaggccgagatatcattgttattggcaatgacatcacataccgaattgggtcctttgggcctcaagaggatttgttatttctcagagcttccgaacttgctagggcagaaggtattccacgcatctatgtatcagccaacagtggagcaagaatcggactggcagaagaaattcgccatatgtttcatgtggcctgggtagatcctgaggatccttacaagggatacaggtatttatatctgactcctcaagattataagagagtcagtgctctcaactctgtccattgtgaacacgtggaagatgaaggagaatccaggtacaagataacagatattattgggaaagaagagggaattggacccgagaaccttcgaggttctggaatgattgctggagaatcctcattggcctataatgagatcattaccatcagcctggtgacgtgccgggccattgggattggggcttaccttgtccggctgggacagagaaccatccaggttgagaattctcacttaattctaacaggagctggagccctcaacaaagtcctcgggcgggaagtgtacacctccaataaccagctggggggcatccagattatgcacaacaatggggtgacccactgcactgtgtgtgatgactttgaaggggttttcactgtcctgcactggctgtcttacatgcccaagagcgtgcacagttcagttcctcttctgaactcaaaggatcctatagacagaatcatcgagtttgttcccacaaagaccccatacgatcctcgatggatgctagcaggccgtcctcacccaacccaaaaaggtcagtggttgagtggcttttttgactatggatctttctcagagattatgcagccctgggcacagactgtggtggttggtagagccaggctaggaggaatacctgtgggagttgttgctgtagaaacccgaacagtagaactaagtatcccagctgatccagcaaacctggattctgaagccaagataatccagcaggctggccaggtttggttcccagattctgcgtttaagacatatcaggccatcaaggacttcaaccgggaagggctgcctctgatggtctttgccaactggagaggcttctctggtggaatgaaagatatgtacgaccaagtgctgaagtttggtgcttacattgtggatggcttgagggagtgctgccagcctgtgctggtttacattcctccccaggctgagctgcggggtggctcctgggtggtgattgactcctccatcaacccccggcacatggagatgtatgctgaccgagaaagcaggggatctgttctggagccagaagggacagtagaaatcaaattccgcagaaaggatctggtgaaaaccatgcgtcgggtggacccagtctacatccacttggctgagcgattggggaccccagagctaagcacagctgagcggaaggagttggagaacaagttgaaggagcgggaggaattcctaattcccatttaccatcaggtagccgtgcagtttgctgacttgcacgacacaccaggccggatgcaggagaagggtgttattagcgatatcctggattggaaaacatcccgtaccttcttctactggcggctgaggcgtcttctgctggaggacctggtcaagaagaaaatccacaatgccaaccctgagctgactgatggccagattcaagccatgttaaggcgctggtttgtggaagtggaaggaacagtgaaggcttatgtttgggacaataataaggatctggcggagtggctagagaaacagctgacagaggaggatggtgttcactcggtaatagaggaaaacatcaaatgcatcagcagagactacgtcctcaagcaaatccgcagcttggtccaggccaatccagaggttgccatggattccatcatccatatgacgcagcacatatcacccactcagcgagcagaagtcatacggatcctctccacaatggattccccttccacgtaggaagagcttcctgcctgtccctgccctgtctctggagaaaagggctagagctgccttttacaactgtaaccactgtaatgagaaggcacaggagacccagcactggagtcaaatggcattttacttcctctcgtttcaggttatgcatgacatcctgggatgtaagatcacagaatccccctccagcccaccagtcacacctaccccattcagtatttattaccctggccaggcctagtcctccactccctgcacaggactgagaaggcaatgaaaggtacaaacatgtaccatgaggtcttactaaccaaagtagggctgcccctcctgtcctgacagccccttggcctcccagcatggggaagcgtgaggagttgcccagcagtgagcagcccccctcactcctggccccatgagccgcagccacaggcagcagaggagggctaaggagaggaggaagcctcaagtccattgtttattaccccgactcttagcccagcacacagtaggcactggagaggaatgattcccagtttaaccacactacggtaccttttatgaagaaaaattagagcataaaatctactacaagctccataggaactcaaagatgagggcaaaactgtgagccaagaagcagagaaagaaaatagaaccagttattcttgatttaggggacctcaaccttgggttcagtctctgaggacaaagggaaaggtagttgttggcctgcctctcgcctgcacgtcactgctggactagctgtcgcatgtggctgggagctgcaaggccagtgcttgaggggccccagcagttccacaggtggtgaagcctgagttggcagaggaggagccagaagagaactgccctttctgcactggtggaaactagttatttatgccatgtggagagccagtgagatagatagatagtctgtttgttttgaggacttggaaagttgttcctatgaagcctggagcttggatggttttgagaggttaatggtgcctccacactcactcttccctagttccaggattactgtcctagcagctaacggttctactctcttccccagagtgtagacaggcagcaggtctccccacagctctgaaaggaccctggtgacagctacaccctcagcaccaggagctggccttcctgatgagggaggcttccaggaaacacagaatccacatgaccttaagattatttacaactcagtcatggtgctgctgtcctccaggcttactggcccctcctgactggcatcaggggcttcctcaggtggtggagagagtttactttcaacaactagtttattcaagaaaagaacttactgattcctctgttcctaaagcaagagtggcaggtgatcagggctggtgtagcatccggttcctttagtgcagctaactgcatttgtcactgatgaccaaggaggaaatcactaagacatttgagaagcagtggtatgaacgttcttggacaagccacagttctgagccttaaccctgtagtttgcacacaagaacgagctccacctccccttcttcaggaggaatctgtgcggatagattggctggacttttcaatggttctgggttgcaggtgggcactgtatggctgggtatggagcggacagcccccaggagtcagagcctcagcccggctgccctggtggaaggtacaggtgttcagcaccttcagaaaagggcataaagtggtgggggacaattctcagtccaggaaaatgcattgaccattgctggctatttgcttacctagtaagaattggattcatttttgaccagattattcttctatgcttttttgcaataaatcaaatcccacatatctacaagtggtatgaagtcctgcaccccccaggaggcctgtccaggcatgtcttcagaggcagggtgggttacactcatttacctcccctctccccaccaaattatgacacaaacgagtatgtttcctctctagaaccctgtaatgcctcctcccccatccccagagctccttactgtaggtcttaccctggacaaggattttttcaagttggaggcacagaacatgagcaatctgacattcccacagcccctcaaacatgcaaggctactaaggcaggaggagtataaatgatggatattgaccaagacctgcttggacggagaccgccatattatctgttctcttcgttcacaaaacagccttcacttgtctcagaatttgatggacacatactgtgatgagcaggagcttcagatgcactctttacacattttgttgaaataaacctctacatttgtagaagagtt

SEQ ID NO: 10913 - protein, 2346 aa, Homo sapiens; identical to SEQ ID NO: 1768

SEQ ID NO: 10914 - DNA, 10103 bp, Homo sapiens
ggcccccgccgggtgctgagcgcccgccaccgccctcttggccttttcccggtccccgccgcgcgcctgctgctgtccccgtgcccgaggactgggaggatggggctgagccgcttgcctgacttttgatccgaccagtaatcactttgcccgtgtggcgcgtggcccgttgcctgaggcttcctggcgcgtggggctgtttggtcccctccggagtgcggtgaggcgggccgagccgggactgcctgggtttggggataacgttcccatctccacccctgttgcagcaagggaaattgaggctgagggaactgggcccagggacggcgagccgtggctgcctctccagtccgggccccgaagggctgctcgtggatgaaccagactgattttaaggggtgaagagggtgcgtttcaatcagatgcttctggaacgtcgaaattgtcttctttggaaagaaccatcccctctttgggcttcagaggcccaaattgaggcgcaatgatgagaggatgtggtggtctactctgatgtcaatcttgagggctaggtctttctggaagtggatatctactcagacagtaagaattataagagctgtaagagctcattttggaggaataatggatgaaccatctcccttggcccaacctctggagctgaaccagcactctcgattcataataggttctgtgtctgaagataactcagaggatgagatcagcaacctggtgaagttggacctactggaggagaaggagggctccttgtcacctgcttctgttggctcagatacactctctgatttggggatctctagcctacaggatggcttggccttgcacataagactttgaaatactcgtgggatatgaagtggaggtgcctagagggttgaagataatgaggacagatgaagaaatgtttgattgtgccatacttacagttgctgattttcaaggtccagcatgtctggcttgcacctagtaaagcagggccgagacagaaagaaaatagattctcaacgagatttcactgtggcttctccagcagaatttgttactcgctttgggggaaataaagtgattgagaaggttcttattgctaacaatggcattgcagcagtgaaatgcatgcggtctatccgtaggtggtcttatgaaatgtttcgaaatgaacgtgcaattagattcgttgtcatggtcacacctgaagaccttaaagccaatgcagaatacattaagatggcagatcactatgtgccagtgcctggaggaccaaacaacaacaactatgcaaatgtggaattaattcttgatattgctaaaaggatcccagtacaagcagtgtgggctggctggggtcatgcttctgagaatcccaaactaccggaacttctcttgaaaaatggcattgccttcatgggtcctccaagccaggccatgtgggctttaggggataagattgcatcttccatagtggctcaaactgcaggtatcccaactcttccctggagcggcagtggtcttcgtgtggactggcaggaaaatgatttttcaaaacgtatcttaaatgttccccaggagctatatgaaaaaggttatgtgaaagatgtggatgatgggctacaggcagctgaggaagttggatatccagtaatgatcaaggcctcagagggaggaggagggaagggaattagaaaagtcaacaatgcagatgacttccctaatctcttcagacaggttcaagctgaagttcctggatctcccatatttgtgatgagactagccaaacaatctcgtcatctggaggtgcagatcttagcggaccaatatggcaatgctatctctttgtttggtcgtgattgctctgtacaacgcaggcatcagaagattattgaagaagcacctgctactattgctactccagcagtatttgaacacatggaacagtgtgcggtgaaacttgccaaaatggtgggttatgtgagtgctgggactgtggaatacctgtacagccaggatggcagcttctactttctggaattgaatcctcggctgcaggtagagcacccttgtacagagatggtggctgatgtcaatctccctgcagcacagctccagattgccatggggattcctctatatagaatcaaggatatccgtatgatgtatggggtatctccctggggtgattctcccattgattttgaagattctgcacacgttccttgtccaaggggccatgttattgctgctcggatcactagtgaaaatccagatgagggttttaagcccagctcaggaacagttcaggagctaaatttccgcagcaataagaatgtttggggatatttcagtgttgctgctgcagggggacttcatgaatttgctgattctcagtttggtcactgcttttcttggggagaaaacagagaagaggcaatttcaaacatggtggtggctttgaaggagctgtctattcggggtgactttcgaactacagttgaatacctgatcaaattgttagagactgaaagctttcagatgaacagaattgatactggctggctggacagactgatagcagaaaaagtacaggctgagcgacctgacaccatgttgggggttgtgtgtggtgccctccacgtggcagatgtgagcctgcggaatagcgtctctaacttccttcactccttagaaaggggtcaagtccttcctgctcatacacttctgaatacagtagatgttgaacttatctatgagggagtcaagtatgtacttaaggtgactcgacagtcccccaactcctatgtggtgatcatgaatggctcatgtgtagaagtagatgtacatcggctgagtgacggtggactgctcttgtcctatgatggcagcagttatactacgtatatgaaagaggaagtggatagatatcgcatcacaattggcaataaaacctgtgtgtttgagaaggaaaatgacccatcggtgatgcgctcaccttctgctgggaagttaatccagtacattgtagaagatggaggtcatgtgtttgccggccagtgctatgctgagattgaggtaatgaagatggtaatgaccttaacagctgtggagtctggctgtatccattacgtcaagcgacctggagcagctcttgaccctggctgtgtactagccaaaatgcaactggacaaccccagcaaggttcagcaggctgaacttcacacaggtagtctgccacggatccagagcacggcactcagaggcgagaaactccatcgagtgttccattatgtcctggataatctggtcaatgtaatgaatggatactgccttccagatcctttctttagcagcaaggtaaaagactgggtagagcgattgatgaaaaccctcagagatccctccctgcctctcctagaattgcaagatattatgaccagtgtgtctggccgcattccccccaatgtggagaagtctatcaagaaggaaatggctcagtatgctagcaacatcacatcagtcctctgtcagtttcccagccagcagattgcaaacatcctagatagccatgcagctacattgaaccggaaatctgaacgggaagtcttctttatgaatactcagagcattgttcagctggtacagaggtaccgaagtggcatccgaggccacatgaaggctgtggtgatggatctgctccggcagtacctgcgagtagagacacaattccagaatggtcactatgacaaatgtgtattcgccctccgagaagagaataaaagtgacatgaacactgtactgaactacatcttctctcacgctcaagtcaccaagaagaatcttctggtcacaatgcttattgatcagttgtgtggccgggaccctactctcactgatgagctgctgaatattctcacagagctaactcaactcagtaagaccaccaatgccaaagtagcacttcgagcacgccaggttcttattgcctcccatttgccatcatatgagcttcgccataaccaagtagagtctatcttcctatcagctattgacatgtatggacatcaattttgcattgagaacctgcagaaactcatcctatcagaaacatctatttttgatgtcctaccaaacttcttctatcacagcaaccaagtagtgaggatggcagctctggaggtgtatgttcgaagggcttatattgcctatgaacttaacagcgtacaacaccgccagcttaaggacaacacctgtgtggtggaattccagttcatgctgcccacatctcatccaaacagagggaacatccctacgctaaacagaatgtccttctcctccaacctcaaccactatggcatgacccatgtagctagtgtcagcgatgtactgttggacaactcattcactccaccttgtcagcggatgggcggaatggtctcttttcggacttttgaagattttgtcaggatctttgatgaagtgatgggctgcttctctgactccccaccccagagtcccacattccctgaggcaggtcacacgtctctttatgatgaggataaggttcccagggatgaaccaattcacattctcaatgtggctatcaagactgactgtgatattgaggatgacaggctggcagctatgttcagagaatttacccagcaaaataaagctaccctggttgaccatgggatccggcgccttactttcctggttgcacaaaaggatttcagaaagcaggtcaactatgaggtggatcggagatttcatagagaattccctaaattttttacattccgagcaagggataagtttgaggaggatcgtatctatcgtcatctggagcctgctctggctttccagttagagctgaaccggatgagaaattttgacctcactgccattccatgtgctaatcacaagatgcacctgtatctcggggcagccaaggtggaagtgggcacagaagtgacagactacaggttctttgttcgtgcaatcatcaggcattctgatctggtcaccaaggaagcttcttttgaatatctgcaaaatgaaggggagcggctactcctggaagccatggatgagttggaagttgcttttaacaatacaaatgtccgcactgactgtaaccacatcttcctcaactttgtgcccacggttatcatggacccatcaaagattgaggaatccgtgcggagcatggtaatgcggtatggaagtcgcctgtggaaattgcgcgtcctccaggcagaactgaaaatcaacattcgcctgacgccaactggaaaagcaattcccatccgcctcttcctgacaaacgagtctggctattacttggatatcagcctatacaaggaagtgactgactccaggacagcacagatcatgtttcaggcatatggagacaaacagggaccactgcatggaatgttaatcaatactccatatgtgaccaaagacctgctgcaatcaaagaggttccaggcacaatccttagggacaacatacatatatgatatcccagagatgtttcggcagtccctgatcaaactctgggagtctatgtccactcaagcatttcttccatctccccctctgccttctgacatgctgacttacactgaactggtactggatgatcaaggtcagctggtccacatgaacaggcttccaggaggaaatgagattggcatggtagcttggaaaatgacctttaaaagtcctgaatatccagaaggccgagatatcattgttattggcaatgacatcacataccgaattgggtcctttgggcctcaagaggatttgttatttctcagagcttccgaacttgctagggcagaaggtattccacgcatctatgtatcagccaacagtggagcaagaatcggactggcagaagaaattcgccatatgtttcatgtggcctgggtagatcctgaggatccttacaagggatacaggtatttatatctgactcctcaagattataagagagtcagtgctctcaactctgtccattgtgaacacgtggaagatgaaggagaatccaggtacaagataacagatattattgggaaagaagagggaattggacccgagaaccttcgaggttctggaatgattgctggagaatcctcattggcctataatgagatcattaccatcagcctggtgacgtgccgggccattgggattggggcttaccttgtccggctgggacagagaaccatccaggttgagaattctcacttaattctaacaggagctggagccctcaacaaagtcctcgggcgggaagtgtacacctccaataaccagctggggggcatccagattatgcacaacaatggggtgacccactgcactgtgtgtgatgactttgaaggggttttcactgtcctgcactggctgtcttacatgcccaagagcgtgcacagttcagttcctcttctgaactcaaaggatcctatagacagaatcatcgagtttgttcccacaaagaccccatacgatcctcgatggatgctagcaggccgtcctcacccaacccaaaaaggtcagtggttgagtggcttttttgactatggatctttctcagagattatgcagccctgggcacagactgtggtggttggtagagccaggctaggaggaatacctgtgggagttgttgctgtagaaacccgaacagtagaactaagtatcccagctgatccagcaaacctggattctgaagccaagataatccagcaggctggccaggtttggttcccagattctgcgtttaagacatatcaggccatcaaggacttcaaccgggaagggctgcctctgatggtctttgccaactggagaggcttctctggtggaatgaaagatatgtacgaccaagtgctgaagtttggtgcttacattgtggatggcttgagggagtgctgccagcctgtgctggtttacattcctccccaggctgagctgcggggtggctcctgggtggtgattgactcctccatcaacccccggcacatggagatgtatgctgaccgagaaagcaggggatctgttctggagccagaagggacagtagaaatcaaattccgcagaaaggatctggtgaaaaccatgcgtcgggtggacccagtctacatccacttggctgagcgattggggaccccagagctaagcacagctgagcggaaggagttggagaacaagttgaaggagcgggaggaattcctaattcccatttaccatcaggtagccgtgcagtttgctgacttgcacgacacaccaggccggatgcaggagaagggtgttattagcgatatcctggattggaaaacatcccgtaccttcttctactggcggctgaggcgtcttctgctggaggacctggtcaagaagaaaatccacaatgccaaccctgagctgactgatggccagattcaagccatgttaaggcgctggtttgtggaagtggaaggaacagtgaaggcttatgtttgggacaataataaggatctggcggagtggctagagaaacagctgacagaggaggatggtgttcactcggtaatagaggaaaacatcaaatgcatcagcagagactacgtcctcaagcaaatccgcagcttggtccaggccaatccagaggttgccatggattccatcatccatatgacgcagcacatatcacccactcagcgagcagaagtcatacggatcctctccacaatggattccccttccacgtaggaagagcttcctgcctgtccctgccctgtctctggagaaaagggctagagctgccttttacaactgtaaccactgtaatgagaaggcacaggagacccagcactggagtcaaatggcattttacttcctctcgtttcaggttatgcatgacatcctgggatgtaagatcacagaatccccctccagcccaccagtcacacctaccccattcagtatttattaccctggccaggcctagtcctccactccctgcacaggactgagaaggcaatgaaaggtacaaacatgtaccatgaggtcttactaaccaaagtagggctgcccctcctgtcctgacagccccttggcctcccagcatggggaagcgtgaggagttgcccagcagtgagcagcccccctcactcctggccccatgagccgcagccacaggcagcagaggagggctaaggagaggaggaagcctcaagtccattgtttattaccccgactcttagcccagcacacagtaggcactggagaggaatgattcccagtttaaccacactacggtaccttttatgaagaaaaattagagcataaaatctactacaagctccataggaactcaaagatgagggcaaaactgtgagccaagaagcagagaaagaaaatagaaccagttattcttgatttaggggacctcaaccttgggttcagtctctgaggacaaagggaaaggtagttgttggcctgcctctcgcctgcacgtcactgctggactagctgtcgcatgtggctgggagctgcaaggccagtgcttgaggggccccagcagttccacaggtggtgaagcctgagttggcagaggaggagccagaagagaactgccctttctgcactggtggaaactagttatttatgccatgtggagagccagtgagatagatagatagtctgtttgttttgaggacttggaaagttgttcctatgaagcctggagcttggatggttttgagaggttaatggtgcctccacactcactcttccctagttccaggattactgtcctagcagctaacggttctactctcttccccagagtgtagacaggcagcaggtctccccacagctctgaaaggaccctggtgacagctacaccctcagcaccaggagctggccttcctgatgagggaggcttccaggaaacacagaatccacatgaccttaagattatttacaactcagtcatggtgctgctgtcctccaggcttactggcccctcctgactggcatcaggggcttcctcaggtggtggagagagtttactttcaacaactagtttattcaagaaaagaacttactgattcctctgttcctaaagcaagagtggcaggtgatcagggctggtgtagcatccggttcctttagtgcagctaactgcatttgtcactgatgaccaaggaggaaatcactaagacatttgagaagcagtggtatgaacgttcttggacaagccacagttctgagccttaaccctgtagtttgcacacaagaacgagctccacctccccttcttcaggaggaatctgtgcggatagattggctggacttttcaatggttctgggttgcaggtgggcactgtatggctgggtatggagcggacagcccccaggagtcagagcctcagcccggctgccctggtggaaggtacaggtgttcagcaccttcagaaaagggcataaagtggtgggggacaattctcagtccaggaaaatgcattgaccattgctggctatttgcttacctagtaagaattggattcatttttgaccagattattcttctatgcttttttgcaataaatcaaatcccacatatctacaagtggtatgaagtcctgcaccccccaggaggcctgtccaggcatgtcttcagaggcagggtgggttacactcatttacctcccctctccccaccaaattatgacacaaacgagtatgtttcctctctagaaccctgtaatgcctcctcccccatccccagagctccttactgtaggtcttaccctggacaaggattttttcaagttggaggcacagaacatgagcaatctgacattcccacagcccctcaaacatgcaaggctactaaggcaggaggagtataaatgatggatattgaccaagacctgcttggacggagaccgccatattatctgttctcttcgttcacaaaacagccttcacttgtctcagaatttgatggacacatactgtgatgagcaggagcttcagatgcactctttacacattttgttgaaataaacctctacatttgtagaagagtt

SEQ ID NO: 10915 - protein, 2268 aa, Homo sapiens; identical to SEQ ID NO: 1772

SEQ ID NO: 10916 - DNA, 9992 bp, Homo sapiens
ggcccccgccgggtgctgagcgcccgccaccgccctcttggccttttcccggtccccgccgcgcgcctgctgctgtccccgtgcccgaggactgggaggatggggctgagccgcttgcctgacttttgatccgaccagtaatcactttgcccgtgtggcgcgtggcccgttgcctgaggcttcctggcgcgtggggctgtttggtcccctccggagtgcggtgaggcgggccgagccgggactgcctgggtttggggataacgttcccatctccacccctgttgcagcaagggaaattgaggctgagggaactgggcccagggacggcgagccgtggctgcctctccagtccgggccccgaagggctgctcgtggatgaaccagactgattttaaggggtgaagagggtgcgtttcaatcagatgcttctggaacgtcgaaattgtcttctttggaaagaaccatcccctctttgggcttcagaggcccaaattgaggcgcaatgatgagaggatgtggtggtctactctgatgtcaatcttgagggctaggtctttctggaagtggatatctactcagacagtaagaattataagagctgtaagagctcattttggaggaataatggatgaaccatctcccttggcccaacctctggagctgaaccagcactctcgattcataataggttctgtgtctgaagataactcagaggatgagatcagcaacctggtgaagttggacctactggaggagaaggagggctccttgtcacctgcttctgttggctcagatacactctctgatttggggatctctagcctacaggatggcttggccttgcacataaggtccagcatgtctggcttgcacctagtaaagcagggccgagacagaaagaaaatagattctcaacgagatttcactgtggcttctccagcagaatttgttactcgctttgggggaaataaagtgattgagaaggttcttattgctaacaatggcattgcagcagtgaaatgcatgcggtctatccgtaggtggtcttatgaaatgtttcgaaatgaacgtgcaattagattcgttgtcatggtcacacctgaagaccttaaagccaatgcagaatacattaagatggcagatcactatgtgccagtgcctggaggaccaaacaacaacaactatgcaaatgtggaattaattcttgatattgctaaaaggatcccagtacaagcagtgtgggctggctggggtcatgcttctgagaatcccaaactaccggaacttctcttgaaaaatggcattgccttcatgggtcctccaagccaggccatgtgggctttaggggataagattgcatcttccatagtggctcaaactgcaggtatcccaactcttccctggagcggcagtggtcttcgtgtggactggcaggaaaatgatttttcaaaacgtatcttaaatgttccccaggagctatatgaaaaaggttatgtgaaagatgtggatgatgggctacaggcagctgaggaagttggatatccagtaatgatcaaggcctcagagggaggaggagggaagggaattagaaaagtcaacaatgcagatgacttccctaatctcttcagacaggttcaagctgaagttcctggatctcccatatttgtgatgagactagccaaacaatctcgtcatctggaggtgcagatcttagcggaccaatatggcaatgctatctctttgtttggtcgtgattgctctgtacaacgcaggcatcagaagattattgaagaagcacctgctactattgctactccagcagtatttgaacacatggaacagtgtgcggtgaaacttgccaaaatggtgggttatgtgagtgctgggactgtggaatacctgtacagccaggatggcagcttctactttctggaattgaatcctcggctgcaggtagagcacccttgtacagagatggtggctgatgtcaatctccctgcagcacagctccagattgccatggggattcctctatatagaatcaaggatatccgtatgatgtatggggtatctccctggggtgattctcccattgattttgaagattctgcacacgttccttgtccaaggggccatgttattgctgctcggatcactagtgaaaatccagatgagggttttaagcccagctcaggaacagttcaggagctaaatttccgcagcaataagaatgtttggggatatttcagtgttgctgctgcagggggacttcatgaatttgctgattctcagtttggtcactgcttttcttggggagaaaacagagaagaggcaatttcaaacatggtggtggctttgaaggagctgtctattcggggtgactttcgaactacagttgaatacctgatcaaattgttagagactgaaagctttcagatgaacagaattgatactggctggctggacagactgatagcagaaaaagtacaggctgagcgacctgacaccatgttgggggttgtgtgtggtgccctccacgtggcagatgtgagcctgcggaatagcgtctctaacttccttcactccttagaaaggggtcaagtccttcctgctcatacacttctgaatacagtagatgttgaacttatctatgagggagtcaagtatgtacttaaggtgactcgacagtcccccaactcctatgtggtgatcatgaatggctcatgtgtagaagtagatgtacatcggctgagtgacggtggactgctcttgtcctatgatggcagcagttatactacgtatatgaaagaggaagtggatagatatcgcatcacaattggcaataaaacctgtgtgtttgagaaggaaaatgacccatcggtgatgcgctcaccttctgctgggaagttaatccagtacattgtagaagatggaggtcatgtgtttgccggccagtgctatgctgagattgaggtaatgaagatggtaatgaccttaacagctgtggagtctggctgtatccattacgtcaagcgacctggagcagctcttgaccctggctgtgtactagccaaaatgcaactggacaaccccagcaaggttcagcaggctgaacttcacacaggtagtctgccacggatccagagcacggcactcagaggcgagaaactccatcgagtgttccattatgtcctggataatctggtcaatgtaatgaatggatactgccttccagatcctttctttagcagcaaggtaaaagactgggtagagcgattgatgaaaaccctcagagatccctccctgcctctcctagaattgcaagatattatgaccagtgtgtctggccgcattccccccaatgtggagaagtctatcaagaaggaaatggctcagtatgctagcaacatcacatcagtcctctgtcagtttcccagccagcagattgcaaacatcctagatagccatgcagctacattgaaccggaaatctgaacgggaagtcttctttatgaatactcagagcattgttcagctggtacagaggtaccgaagtggcatccgaggccacatgaaggctgtggtgatggatctgctccggcagtacctgcgagtagagacacaattccagaatggtcactatgacaaatgtgtattcgccctccgagaagagaataaaagtgacatgaacactgtactgaactacatcttctctcacgctcaagtcaccaagaagaatcttctggtcacaatgcttattgatcagttgtgtggccgggaccctactctcactgatgagctgctgaatattctcacagagctaactcaactcagtaagaccaccaatgccaaagtagcacttcgagcacgccaggttcttattgcctcccatttgccatcatatgagcttcgccataaccaagtagagtctatcttcctatcagctattgacatgtatggacatcaattttgcattgagaacctgcagaaactcatcctatcagaaacatctatttttgatgtcctaccaaacttcttctatcacagcaaccaagtagtgaggatggcagctctggaggtgtatgttcgaagggcttatattgcctatgaacttaacagcgtacaacaccgccagcttaaggacaacacctgtgtggtggaattccagttcatgctgcccacatctcatccaaacagagggaacatccctacgctaaacagaatgtccttctcctccaacctcaaccactatggcatgacccatgtagctagtgtcagcgatgtactgttggacaactcattcactccaccttgtcagcggatgggcggaatggtctcttttcggacttttgaagattttgtcaggatctttgatgaagtgatgggctgcttctctgactccccaccccagagtcccacattccctgaggcaggtcacacgtctctttatgatgaggataaggttcccagggatgaaccaattcacattctcaatgtggctatcaagactgactgtgatattgaggatgacaggctggcagctatgttcagagaatttacccagcaaaataaagctaccctggttgaccatgggatccggcgccttactttcctggttgcacaaaaggatttcagaaagcaggtcaactatgaggtggatcggagatttcatagagaattccctaaattttttacattccgagcaagggataagtttgaggaggatcgtatctatcgtcatctggagcctgctctggctttccagttagagctgaaccggatgagaaattttgacctcactgccattccatgtgctaatcacaagatgcacctgtatctcggggcagccaaggtggaagtgggcacagaagtgacagactacaggttctttgttcgtgcaatcatcaggcattctgatctggtcaccaaggaagcttcttttgaatatctgcaaaatgaaggggagcggctactcctggaagccatggatgagttggaagttgcttttaacaatacaaatgtccgcactgactgtaaccacatcttcctcaactttgtgcccacggttatcatggacccatcaaagattgaggaatccgtgcggagcatggtaatgcggtatggaagtcgcctgtggaaattgcgcgtcctccaggcagaactgaaaatcaacattcgcctgacgccaactggaaaagcaattcccatccgcctcttcctgacaaacgagtctggctattacttggatatcagcctatacaaggaagtgactgactccaggacagcacagatcatgtttcaggcatatggagacaaacagggaccactgcatggaatgttaatcaatactccatatgtgaccaaagacctgctgcaatcaaagaggttccaggcacaatccttagggacaacatacatatatgatatcccagagatgtttcggcagtccctgatcaaactctgggagtctatgtccactcaagcatttcttccatctccccctctgccttctgacatgctgacttacactgaactggtactggatgatcaaggtcagctggtccacatgaacaggcttccaggaggaaatgagattggcatggtagcttggaaaatgacctttaaaagtcctgaatatccagaaggccgagatatcattgttattggcaatgacatcacataccgaattgggtcctttgggcctcaagaggatttgttatttctcagagcttccgaacttgctagggcagaaggtattccacgcatctatgtatcagccaacagtggagcaagaatcggactggcagaagaaattcgccatatgtttcatgtggcctgggtagatcctgaggatccttacaagggatacaggtatttatatctgactcctcaagattataagagagtcagtgctctcaactctgtccattgtgaacacgtggaagatgaaggagaatccaggtacaagataacagatattattgggaaagaagagggaattggacccgagaaccttcgaggttctggaatgattgctggagaatcctcattggcctataatgagatcattaccatcagcctggtgacgtgccgggccattgggattggggcttaccttgtccggctgggacagagaaccatccaggttgagaattctcacttaattctaacaggagctggagccctcaacaaagtcctcgggcgggaagtgtacacctccaataaccagctggggggcatccagattatgcacaacaatggggtgacccactgcactgtgtgtgatgactttgaaggggttttcactgtcctgcactggctgtcttacatgcccaagagcgtgcacagttcagttcctcttctgaactcaaaggatcctatagacagaatcatcgagtttgttcccacaaagaccccatacgatcctcgatggatgctagcaggccgtcctcacccaacccaaaaaggtcagtggttgagtggcttttttgactatggatctttctcagagattatgcagccctgggcacagactgtggtggttggtagagccaggctaggaggaatacctgtgggagttgttgctgtagaaacccgaacagtagaactaagtatcccagctgatccagcaaacctggattctgaagccaagataatccagcaggctggccaggtttggttcccagattctgcgtttaagacatatcaggccatcaaggacttcaaccgggaagggctgcctctgatggtctttgccaactggagaggcttctctggtggaatgaaagatatgtacgaccaagtgctgaagtttggtgcttacattgtggatggcttgagggagtgctgccagcctgtgctggtttacattcctccccaggctgagctgcggggtggctcctgggtggtgattgactcctccatcaacccccggcacatggagatgtatgctgaccgagaaagcaggggatctgttctggagccagaagggacagtagaaatcaaattccgcagaaaggatctggtgaaaaccatgcgtcgggtggacccagtctacatccacttggctgagcgattggggaccccagagctaagcacagctgagcggaaggagttggagaacaagttgaaggagcgggaggaattcctaattcccatttaccatcaggtagccgtgcagtttgctgacttgcacgacacaccaggccggatgcaggagaagggtgttattagcgatatcctggattggaaaacatcccgtaccttcttctactggcggctgaggcgtcttctgctggaggacctggtcaagaagaaaatccacaatgccaaccctgagctgactgatggccagattcaagccatgttaaggcgctggtttgtggaagtggaaggaacagtgaaggcttatgtttgggacaataataaggatctggcggagtggctagagaaacagctgacagaggaggatggtgttcactcggtaatagaggaaaacatcaaatgcatcagcagagactacgtcctcaagcaaatccgcagcttggtccaggccaatccagaggttgccatggattccatcatccatatgacgcagcacatatcacccactcagcgagcagaagtcatacggatcctctccacaatggattccccttccacgtaggaagagcttcctgcctgtccctgccctgtctctggagaaaagggctagagctgccttttacaactgtaaccactgtaatgagaaggcacaggagacccagcactggagtcaaatggcattttacttcctctcgtttcaggttatgcatgacatcctgggatgtaagatcacagaatccccctccagcccaccagtcacacctaccccattcagtatttattaccctggccaggcctagtcctccactccctgcacaggactgagaaggcaatgaaaggtacaaacatgtaccatgaggtcttactaaccaaagtagggctgcccctcctgtcctgacagccccttggcctcccagcatggggaagcgtgaggagttgcccagcagtgagcagcccccctcactcctggccccatgagccgcagccacaggcagcagaggagggctaaggagaggaggaagcctcaagtccattgtttattaccccgactcttagcccagcacacagtaggcactggagaggaatgattcccagtttaaccacactacggtaccttttatgaagaaaaattagagcataaaatctactacaagctccataggaactcaaagatgagggcaaaactgtgagccaagaagcagagaaagaaaatagaaccagttattcttgatttaggggacctcaaccttgggttcagtctctgaggacaaagggaaaggtagttgttggcctgcctctcgcctgcacgtcactgctggactagctgtcgcatgtggctgggagctgcaaggccagtgcttgaggggccccagcagttccacaggtggtgaagcctgagttggcagaggaggagccagaagagaactgccctttctgcactggtggaaactagttatttatgccatgtggagagccagtgagatagatagatagtctgtttgttttgaggacttggaaagttgttcctatgaagcctggagcttggatggttttgagaggttaatggtgcctccacactcactcttccctagttccaggattactgtcctagcagctaacggttctactctcttccccagagtgtagacaggcagcaggtctccccacagctctgaaaggaccctggtgacagctacaccctcagcaccaggagctggccttcctgatgagggaggcttccaggaaacacagaatccacatgaccttaagattatttacaactcagtcatggtgctgctgtcctccaggcttactggcccctcctgactggcatcaggggcttcctcaggtggtggagagagtttactttcaacaactagtttattcaagaaaagaacttactgattcctctgttcctaaagcaagagtggcaggtgatcagggctggtgtagcatccggttcctttagtgcagctaactgcatttgtcactgatgaccaaggaggaaatcactaagacatttgagaagcagtggtatgaacgttcttggacaagccacagttctgagccttaaccctgtagtttgcacacaagaacgagctccacctccccttcttcaggaggaatctgtgcggatagattggctggacttttcaatggttctgggttgcaggtgggcactgtatggctgggtatggagcggacagcccccaggagtcagagcctcagcccggctgccctggtggaaggtacaggtgttcagcaccttcagaaaagggcataaagtggtgggggacaattctcagtccaggaaaatgcattgaccattgctggctatttgcttacctagtaagaattggattcatttttgaccagattattcttctatgcttttttgcaataaatcaaatcccacatatctacaagtggtatgaagtcctgcaccccccaggaggcctgtccaggcatgtcttcagaggcagggtgggttacactcatttacctcccctctccccaccaaattatgacacaaacgagtatgtttcctctctagaaccctgtaatgcctcctcccccatccccagagctccttactgtaggtcttaccctggacaaggattttttcaagttggaggcacagaacatgagcaatctgacattcccacagcccctcaaacatgcaaggctactaaggcaggaggagtataaatgatggatattgaccaagacctgcttggacggagaccgccatattatctgttctcttcgttcacaaaacagccttcacttgtctcagaatttgatggacacatactgtgatgagcaggagcttcagatgcactctttacacattttgttgaaataaacctctacatttgtagaagagtt

SEQ ID NO: 10917 - protein, 2383 aa, Homo sapiens; identical to SEQ ID NO: 1766

SEQ ID NO: 10918 - DNA, 1104 bp, Homo sapiens
cccacagctctgaaaggaccctggtgacagctacaccctcagcaccaggagctggccttcctgatgagggaggcttccaggaaacacagaatccacatgaccttaagattatttacaactcagtcatggtgctgctgtcctccaggcttactggcccctcctgactggcatcaggggcttcctcaggtggtggagagagtttactttcaacaactagtttattcaagaaaagaacttactgattcctctgttcctaaagcaagagtggcaggtgatcagggctggtgtagcatccggttcctttagtgcagctaactgcatttgtcactgatgaccaaggaggaaatcactaagacatttgagaagcagtggtatgaacgttcttggacaagccacagttctgagccttaaccctgtagtttgcacacaagaacgagctccacctccccttcttcaggaggaatctgtgcggatagattggctggacttttcaatggttctgggttgcaggtgggcactgtatggctgggtatggagcggacagcccccaggagtcagagcctcagcccggctgccctggtggaaggtacaggtgttcagcaccttcagaaaagggcataaagtggtgggggacaattctcagtccaggaaaatgcattgaccattgctggctatttgcttacctagtaagaattggattcatttttgaccagattattcttctatgcttttttgcaataaatcaaatcccacatatctacaagtggtatgaagtcctgcaccccccaggaggcctgtccaggcatgtcttcagaggcagggtgggttacactcatttacctcccctctccccaccaaaacatgagcaatctgacattcccacagcccctcaaacatgcaaggctactaaggcaggaggagtataaatgatggatattgaccaagacctgcttggacggagaccgccatattatctgttctcttcgttcacaaaacagccttcacttgtctcagaatttgatggacacatactgtgatgagcaggagcttcagatgcactctttacacattttgttgaaataaacctctacatttgtagaagag

SEQ ID NO: 10919 - protein, 134 aa, Homo sapiens
MAGYGADSPQESEPQPGCPGGRYRCSAPSEKGIKWWGTILSPGKCIDHCWLFAYLVRIGFIFDQIILLCFFAINQIPHIYKWYEVLHPPGGLSRHVFRGRVGYTHLPPLSPPKHEQSDIPTAPQTCKATKAGGV

SEQ ID NO: 10920 - DNA, 710 bp, Homo sapiens
tttgggcctcaagaggatttgttatttctcagagcttccgaacttgctagggcagaaggtattccacgcatctatgtatcagccaacagtggagcaagaatcggactggcagaagaaattcgccatatgtttcatgtggcctgggtagatcctgaggatccttacaagggatacaggtatttatatctgactcctcaagattataagagagtcagtgctctcaactctgtccattgtgaacacgtggaagatgaaggaaaaatccacaatgccaaccctgagctgactgatggccagattcaagccatgttaaggcgctggtttgtggaagtggaaggaacagtgaaggcttatgtttgggacaataataaggatctggcggagtggctagagaaacagctgacagaggaggatggtgttcactcggtaatagaggaaaacatcaaatgcatcagcagagactacgtcctcaagcaaatccgcagcttggtccaggccaatccagaggttgccatggattccatcatccatatgacgcagcacatatcacccactcagcgagcagaagtcatacggatcctctccacaatggattccccttccacgtaggaagagcttcctgcctgtccctgccctgtctctggagaaaagggctagagctgccttttacaactgtaaccactgtaatgagaaggcacaggagacccagc

SEQ ID NO: 10921 - protein, 160 aa, Homo sapiens
MFHVAWVDPEDPYKGYRYLYLTPQDYKRVSALNSVHCEHVEDEGKIHNANPELTDGQIQAMLRRWFVEVEGTVKAYVWDNNKDLAEWLEKQLTEEDGVHSVIEENIKCISRDYVLKQIRSLVQANPEVAMDSIIHMTQHISPTQRAEVIRILSTMDSPST

SEQ ID NO: 10922 - DNA, 293 bp, Homo sapiens
acacccctcccctccccttagcgaggaaagatttgggatcctgtttgaagggaattctaaaagttctgctctccaaacttcaaataaggggtcagagacatgggtcaagacttcaggaaaagccccagaaataccctgcactcaaaagcagtttcagagtttcacattttcctgagaatgaaacaaattatcctccaaattctgctgcttgttttgaattatgtttacgctggttatgttaccagtgagtttttatctccacatacttgaattaaaccgtgtagttcttcttt

SEQ ID NO: 10923 - protein, 56 aa, Homo sapiens
MGQDFRKSPRNTLHSKAVSEFHIFLRMKQIILQILLLVLNYVYAGYVTSEFLSPHT

SEQ ID NO: 10924 - DNA, 3587 bp, Homo sapiens
aagctcagcattcagatttgcccaatgtcactattaggcctccagacatgcagctcactatagcaacagagcctactgcagaggtgggaagttctccaatccaccaggaggctacagctcaggtctcagggccaggaagtgatgtagaaccttctgccacccagcatggtggtgcacctctgcgtccagagtcatcagaagatgctggacctttagcaggtcaacaggagacttcagttcaatctccagaacctgttaataatgagaacccctctccaacccagcaggaagctgcagctgagcatccacagacccctgaggaggctgagtcttctccagcccagcaagaggcccaacctcagactccagatccccctaaggaggtagaaccttctccagtccagcaagagttcccagctgagccaccagagccccctaaggaggttgaaccatctgcaacccagcagcaagcctcaggtcagcctccaaagtccactgaagaggtcagtcctccaccacagcaggagataccagctcagccatcagagccacctgagaaggtcaaaccatctccagtcctacagcagaccccaactcagcttttagagccacctaaagaggtagaatcctctccagttcagcaggcaggccctgctcagtcctcagaggcccctgtggtcatagaaccctctcggacccagcagatggccccatcttcacctccagagctccctcaggaagtggaaccatctcttaactcagcagggggttccagctcagactccagagccccctatggaggcagaaccttctccaatccagcaggaggccacagttcagactccagagccccctatggaggtagaaccttcaagccagcagctggtcccagctcagcatccagagtcacctaaggaggttgcagctcaacctccagtgcatgagatgacaattccaatagcaggccaggaccaagcccagattccagtatcacccagtgtcacatttcaacctttagacctgggacttaccgtcactccaaaatccactatggaggctgagtattctacaaccccaaggaagactacagctcctccaaaacaccctgaggtgatgcttccacctcctgaccaggttcaggctcagcacacaaacctaacaggtcatagttcaacctttgcacctggaacttaccacaactccgcaaccatgtttttttcctccaaccatgaagaactcaactcagcttccagagacacctacagaggttgcagctcaacctccagctcattatgaggtgacaattccaacaccaggtcaggatcaagctcagcattcaacactgtccagtgtcacagttcagcctttgggcctggggcttaccatcactccagaatccatgacagaggttgaactttctccaaccattcaggagaccccaacttagcctcctaaggaagttgtaccccaacctccagcatatcaaggggtaacagttccaacaccaggtcaggatcaagctcagcatccaatgtcacccagcgttacagctcaacctttggacctgggacttaccatcactccagaacccactacagaggttgaacattctacacccctgaagaagattcctcccaagcaccctaaagtgacacttccacatccagaccaggttcagactctccattcgaacctgactcaagtcacagttcaacctttggatctggaacttaccttaactccagaatccactatggaggttgaaccttttccaaccatgcagaagaccccaactcagcctccagagctacgtaaggaggttgtagctcaacctcctgtgtattatgagacgtccatgccaacacgaggccaggatcaagctcagcatccaacatcacccagagtcacagttcaacctttggatctggggcttaccatcactccagaatccattacaaaggttgaaccgtctacagccctgatgactacagctcctcctccagagcaccttgaggtgacacttccaccgccagacaagggtcaggctcagcattcaaacctgactcaagtcacagttcaacctctggacctggagcttaccataactatagaacctactatagatgttaaaccgtctccaaccacggaggagacctcaactcagtctccagacctggggcttgccatcactccagaacccactacagagattggatattctacagccctggagaagactatagctccacgtccagaccaggttcagactcagcatcgaaacctgactgaagtcacaggtccacctactgaactagaacctactcaggattcactggtgcagtctgaaaattacgcccaaaataaggctttaactgcaccagaggaacagaaggcctccacaagcaccaacatatgtgatctctgtacctgcggagatgagacgctgtcgtgtatcgatctcagcccaaagcagaggctccgctgagtgcctgtgccagagcccaacacctacaatggcaccttcaccatcttaaatttccaaggaaactatatttcttacattggtgaagatgtatggaaagcatacagttggactgagaaactgaatcttggttgcaatttactgacagaactgagctttggaacctttcaggcctggcacggaatgcagtttttacacaagttgtccggattgatggcttattttaaaaaattttcttactcacttcattggttctaataatacaagctccataattttggaaactgaatgactctgcaatgtagaaaggctataccttggcccggcgcggtggctcacgcctgtaatcccagcactttgagaggccgaggcgggcggatcacaggatgcccgggcatttgtagagaacactgccaaagaaaaaaaggctcaggagtccagccccaagggagctggaacagcctcacatggtgcaggggccaagaagttagccaagaactacttcatttcccaccccccatcaaatgatgccaaggagactaactccgaagaggactgatgtaaaatgcttctgcccagcatgggtgttcactgcacgagagcacttggccaagggggtgagtggggctgaaaatcctgctcaggctccatgctgagccacatacaaagtctccccgagacattgtggggcccttctggacagacatggagagcttctgaaagtcccgcatgcttggaattattttcaagaccccagggtagaatggaggttgcactattcgggccggccactctcctactggctgacaggatgctgcccgagatgaaacagggtgtgtgtgcaccacggagtcagtccaagactcctgttctcactcagggattcttcatttcttcttcctattgcctccacttcatgttattttcttcccttcccatttacaagtaaaactgaccagagccccaggaataaatggttttcttggcttcctccttgctcccatctggacccagtcccctggttcctgttggtcatttgcaaaccaagaggaccacaataaacaaatctctattttttttttaaatattaaagcattcactctgc

SEQ ID NO: 10925 - protein, 99 aa, Homo sapiens
MLSHIQSLPETLWGPSGQTWRASESPACLELFSRPQGRMEVALFGPATLLLADRMLPEMKQGVCAPRSQSKTPVLTQGFFISSSYCLHFMLFSSLPIYK

SEQ ID NO: 10926 - DNA, 705 bp, Homo sapiens
cgtggtggagaggcctggagaggtgtcattctagctgggcagcgggtgacacgcagtcatcccctcagtgaacgctggacgtgctctgtggctccctgcaggcctgcggatccaccagggggctccgttccttctgggccaaagctgaagaagcggctgctgcaccagagaagtgcatctggatgaaggtggaagcacacgcgggcccgcagaaccgcctaagatatcttcaggtgtgggcttggaactggtaggctttcatttctgcttcattccatggccaaagcaagccacatgggcaagtctgaagccggggcaagaaagtatcctccacccacaacgaaaccatggcaagcgggtagaatggaggttgcactattcgggccggccactctcctactggctgacaggatgctgcccgagatgaaacagggtgtgtgtgcaccacggagtcagtccaagactcctgttctcactcagggattcttcatttcttcttcctattgcctccacttcatgttattttcttcccttcccatttacaagtaaaactgaccagagccccaggaataaatggttttcttggcttcctccttgctcccatctggacccagtcccctggttcctgttggtcatttgcaaaccaagaggaccacaataaacaaatctctattttttttttaaatattaaagcattcactctgc

SEQ ID NO: 10927 - protein, 90 aa, Homo sapiens
MAKASHMGKSEAGARKYPPPTTKPWQAGRMEVALFGPATLLLADRMLPEMKQGVCAPRSQSKTPVLTQGFFISSSYCLHFMLFSSLPIYK

SEQ ID NO: 10928 - DNA, 2305 bp, Homo sapiens
gcagtactgcgcgagccttagccgcgcaggctcagcgaagggaggctggcggatctgctaccttttgcggttcccaccaagagtgacaaaaccttgctagtgtgggagctgagctctggacccacggccgacgctttgcatgctgtttctcttggaggtggtgcaggaggttgaggaaagcacctctgatgagcagatagctggaggctgttcccacagtcatgtctcagcgaagaagtcggagttcagcagccatcagaaccaagggattcaacttggtgtcatcttcaaagagagaagacagaaggagcaagattagtggaatcattacagcctttgtcactctgagtccagatgggatgaaagttcagcccaaactttcattttagagagagagggtcttgctccgtcacacaggctggagtgcagtggtacaatcacagttcactacagccccgacctcctgaactcaagtgatcctcccacctcagcctcccgagtagctgcgtctggctaattaaaaaagatttttttgagatgaggtctcactgtgttgcccaggctggtctccaactcgtgggctcaagcaatcttcttacctcagcctctcagagcactgggattacaggcgagagccacctcacctggcctaacaaggggaacccaccaagccctactcaagcccagggatgtctgcatgggaagaataacatcatgaaccaccagtgccaagaaggaattctcagcaggttaactgcaccagcacccactgaggtttggtgaggccaagggccaaggcttgccaggagctgtcagtctttccttctgcagatgcctctgggctctgagctgctcctcctgcagcagggatggctgaactgagccagccacactctccttctgtcaggtcctctatgcccactactttgggggatggaggattaggaaggctattggaggctgagaactaaagtttcttttagggctgggtgtggtggctcatgcctgtaatcccagcgttttgagaggctgaggcaggaggattgcttgagcccaggaatttaaggctatagtgagctatgatggcaccactgcactccagcctgggtgacagagcaagaccctgtctcttaaaaaaaaaaaatagtttcttttagactgtgctaactgattctttcaaagattgagcctttggtatgggtttatgacccccatttctggagctaatcctggaattaacattacccttagactccagagtgggtcatggcggggcgggggcaggcaggcatctgccgtgagagacgaaattgtttaaatccattccagcccaagagcaaggagaaaagctctgggaggctgtgaaaggcaaagtgggtggaggggaggggagcagagaaccatgcagggactgactgcagctgttggcagagagaccatgtcagctggccctgccctccgggtttttagggacctaggttcagctctcagttgcagctgaggctccagagagcttgtaagaagggacaatgtgcaggagtgagcccaggcccatggggcgcctggggatgggatgattttcagcctgcaccagccatgctcccccaggtggagtttctctgtgctcctctttgctgacacaactcctgcagatgcacacagtcagaggccttgcccttcccccagcctgaccaacctcctaatgttgaggagggctcaaccctcatttaactcatagtctctgaatttgggcatatgctttaaatgggggttgtgttgatgggagagtttggctgtcatctgacccattttgcagttctcatggctcagcgcttgtgaaagctgagtcatgtggtggcagccagccccaggatcccagggctcatctgaggccatctctccattgcttagaccatggttctcaaatttgaaagtacacaagagggaccacttcaaaaatcagatttctgggatcctggttccagaggatcatattcagtgggatggggcccaggaatctgcattttacaagccctccaggtataaggagagcctcacagtctgcagactattctgcaacgctctgctccaggaagaaccaacctggggtctatcctacatattctttctgaggctctgtgagtctcatgcgaaggatgctgaatgctttgtaaaaatgcttcttgcggctgggcgtggtggctcacgcctgtaatcccagtactttgggaggccgaggcgggcggatcatgaggtcaggagatcgagactgtcctggctaacacggtgaaacctcatctctact

SEQ ID NO: 10929 - protein, 81 aa, Homo sapiens
MRSHCVAQAGLQLVGSSNLLTSASQSTGITGESHLTWPNKGNPPSPTQAQGCLHGKNNIMNHQCQEGILSRLTAPAPTEVW

SEQ ID NO: 10930 - DNA, 2009 bp, Homo sapiens
agcgaagggaggctggcggatctgctaccttttgcggttcccaccaagagtgacaaaaccttgctagtgtgggagctgagctctggacccacggccgacgcttttagagacaaggtctcgctgtgttgctcatgctggttttgaactcctggcctcaagccatcctcccatcttggcctcccagagagcaggattacaggctgtttctcttggaggtggtgcaggaggttgaggaaagcacctctgatgagcagatagctggaggctgttcccacagtcatgtctcagcgaagaagtcggagttcagcagccatcagaaccaaggcaaagacaatgcggccgtcatggtgcagagctgcctggaaggtgaaactgcccttgtcttcccagccttggagataaacgtggtcccactgaaccacaaagactgtccctggggagaagaacagagacccggctggacgggagatcatgcaaggagcagggccctacagaaatgccagtcggagggcagcggccacaggttgggtcccttcgggatgatggggaagtttgcaaaggtaaggaggcaggagctgggcagctcactaaagcagcgcggcttccaagcagcagaggagccagaagatcctgcttcagccccagatactgtacttgatcatctctttccctttccttcttgtctattctgactccttgagataaaagaaggaggaatgtctgttctcctggattcagacggggctcaagggacatcctggtgaatgtaagtaacaataaaggcccctaacatttattttacctcgactaagagccaagcactgtcgttttgttatctcatcagattcttctgggtagcaggcatttttgcccctatctgacaggtcaggaaactgagcagagaaaggtaggtggctgctttgccgtgggactgtgggacccttgccctctctaggccctgtgctcctctaaaggactggacaagggatccctggagctgggtgacttaaattctgagatccagtctcaccattgtcaaagtaaacaactgtggagttgtcggagtagccagggttgaagttggccatcaggggcgccacatactgagtagctgtgagcatccgatggatcacgtcccccatgaagatgaagcctagggtgggagaggtgcagaggagtcaccagaaatggcccagaggggccgctttgggggccttttccccaagggcaagaagggcagcgcaggcagagctggaagtgaccctgatgccacggcccctggggtgagggctaaggatgctgcttcccattgctgccacagccaccagccctggagtctcgggagggtacccagagggggacgcactgctctccagctctgcccacaggcactgaagccactgcttctgcccagagctcttagcctccctcgggaaagcagctccctctgtttctgcccctttccccatcctccaggagaactaatgcttcatgtttttccttggtgtctgtctctcctatttccacccatctctgctggagacccctatctcaatttttaaaaaaatcacccatcaagaaacaaagctccgtgcgtggcactctgtgcagagagatctgcacaaaggaagagtccgatggccgcctcccagcctgcttcctggattcacagtctttgcagatgaaacaagtcaagatgaaggcagaccggattagggtgggccctaaatccaatgaccggtgtctttatgtaaacgaagagggagatgtggatacagagtcgcagaggagacacagggaggatccctgtcacaatgaaggcagagattagagtgacgctgtttacaaaccaaggacaccaaggatttccaggagatccagaagctaggacaagacaaggaaggctcctttcccagggccttgagagggagcgtggccctgctgacaccttaatttcagacttctggcctccagaactgcaagtgaataaatttctgttgttttcagct

SEQ ID NO: 10931 - protein, 186 aa, Homo sapiens
MLVLNSWPQAILPSWPPREQDYRLFLLEVVQEVEESTSDEQIAGGCSHSHVSAKKSEFSSHQNQGKDNAAVMVQSCLEGETALVFPALEINVVPLNHKDCPWGEEQRPGWTGDHARSRALQKCQSEGSGHRLGPFGMMGKFAKVRRQELGSSLKQRGFQAAEEPEDPASAPDTVLDHLFPFPSCLF

SEQ ID NO: 10932 - DNA, 856 bp, Homo sapiens
cggatctgctaccttttgcggttcccaccaagagtgacaaaaccttgctagtgtgggagctgagctctggacccacggccgacgctttgcatgctgtttctcttggaggtggtgcaggaggttgaggaaagcacctctgatgagcagatagctggaggctgttcccacagtcatgtctcagcgaagaagtcggagttcagcagccatcagaaccaagggattcaacttggtgtcatcttcaaagagagaagacagaaggagcaagattagtggaatcattacagcctttgtcactctgagtccagatgggatgaaagttcagcccaaactttcattttagagagagagggtcttgctccgtcacacaggctggagtgcagtggtacaatcacagttcactacagccccgacctcctgaactcaacaattctcctgcctcagcctcccgagtagctgggattacaggtgcccaccaccacacctggctaatattttgtatttttggtagagagggggtttcaccatattggccaggctggtcccaaactcctgacctcaggtgatatgcctgcctgagacccccaaaatgctgggattacaggtgtgagccaccatgcctggcctgtatctcattatttatttatccttaacgttggaattagtccctcctacttaacccaggactgcgcccccgtgggtctggcaccaaagcatgctctcttcccaacacaatgccctgctgcaggacacttcagcccctgaaacattcaagaccttggaatgtcattccatgcagtgaaaagaagactactctggcattggtgtcaataaagattccctggagctgagcagcatc

SEQ ID NO: 10933 - protein, 59 aa, Homo sapiens
MLFLLEVVQEVEESTSDEQIAGGCSHSHVSAKKSEFSSHQNQGIQLGVIFKERRQKEQD

SEQ ID NO: 10934 - DNA, 6220 bp, Homo sapiens
cagctccgctcgcgctctcgccgctcctgccggctcgcccggccccgcgctccgccgtctcctcgccgcccgcccctccgccagccccggggaccgcgcggccgcagcctgagccagggccccctccctcgtcaggaccggggcagcaagcaggccgggggcaggtccgggcacccaccatgcgaggcgagctctggctcctggtgctggtgctcagggaggctgcccgggcgctgagcccccagcccggagcaggtcacgatgagggcccaggctctggatgggctgccaaagggaccgtgcggggctggaaccggagagcccgagagagccctgggcatgtgtcagagccggacaggacccagctgagccaggacctgggtgggggcaccctggccatggacacgctgccagataacaggaccagggtggtggaggacaaccacagctattatgtgtcccgtctctatggccccagcgagccccacagccgggaactgtgggtagatgtggccgaggccaaccggagccaagtgaagatccacacaatactctccaacacccaccggcaggcttcgagagtggtcttgtcctttgatttccctttctacgggcatcctctgcggcagatcaccatagcaactggaggcttcatcttcatgggggacgtgatccatcggatgctcacagctactcagtatgtggcgcccctgatggccaacttcaaccctggctactccgacaactccacagttgtttactttgacaatgggacagtctttgtggttcagtgggaccacgtttatctccaaggctgggaagacaagggcagtttcaccttccaggcagctctgcaccatgacggccgcattgtctttgcctataaagagatccctatgtctgtcccggaaatcagctcctcccagcatcctgtcaaaaccggcctatcggatgccttcatgattctcaatccatccccggatgtgccagaatctcggcgaaggagcatctttgaatatcaccgcatagagctggaccccagcaaggtcaccagcatgtcggccgtggagttcaccccattgccgacctgcctgcagcataggagctgtgacgcctgcatgtcctcagacctgaccttcaactgcagctggtgccatgtcctccagagatgctccagtggctttgaccgctatcgccaggagtggatggactatggctgtgcacaggaggcagagggcaggatgtgcgaggacttccaggatgaggaccacgactcagcctcccctgacacttccttcagcccctatgatggagacctcaccactacctcctcctccctcttcatcgacagcctcaccacagaagatgacaccaagttgaatccctatgcaggaggagacggccttcagaacaacctgtcccccaagacaaagggcactcctgtgcacctgggcaccatcgtgggcatcgtgctggcagtcctcctcgtggcggccatcatcctggctggaatttacatcaatggccaccccacatccaatgctgcgctcttcttcatcgagcgtagacctcaccactggccagccatgaagtttcgcagccaccctgaccattccacctatgcggaggtggagccctcgggccatgagaaggagggcttcatggaggctgagcagtgctgagaacaccaagtctcccctttgaagactttgaggccacagaaaagacagttaaagcaaagaagagaagtgacttttcctggcctctcccagcatgccctgggctgagatgagatggtggtttatggctccagagctgctgctcgcttcgtcagcacaccccgaatattgaagagggggccaaaaaacaaccacatggattttttataggaacaacaacctaatctcatcctgttttgatgcaagggttctcttctgtgtcttgtaaccatgaaacagcagaagaactaacataactaactccatttttgtttaaggggcctttacctattcctgcacctaggctaggataactttagagcactgacataaaacgcaaaaacaggaatcatgccgtttgcaaaactaactctgggattaaaggggaagcatgtaaacagctaactgtttttgttaaagatttataggaatgaggaggtttggctattgtcacatgacagactgttagccaaggacaaagaagttctgcaaacctcccctggacccttgctggtgtccagatgtctgcggttgtcagccccttcctttcccccgacctaaacataaaagacaaggcaaagcccgcataattttaagacggttctttaggacattagtccaccatcttcttggtttgctggctctccgaaataaagtccctttccttgctccaactccttgtctctcaacgtattggctatgacgcagcaagcagaatgaatttggactcagttacaggctgtcaatggtctgctctgtagcagtctcagagcctccccgacccactacctggagatagccagatagccagatgccctgctcctggccacctttaaagcccctgcatatgacacaggttaactaaagtcaagattggggctgctgcattccaggttccctagactcacaagctggtccttggccaggtgcagtggctcacgcctgtaatcccagcactttgggaggctgaggcaggcggatcacctgaagtcagaagtttgagaccagcctggccaacataattaaaatgtctctactaaaaatacaaaaaattagctgggtgtggtgacgcttgcctgtatcccagctactcaggaagctgagacacgagaatcacttgaacctgggaggcagaggttgcagtgagctcagatagtgccactgcactccagcctgggtgacagagcgagactccgtctcaaaaaaaaaaaaagaaagcagatcctcatggctatagagttggcattttagccccagcttctgtagctctgaaagcctaaagaaggtattctctccatctgttaaacacagtatagtggctctcagcccttggggcatgttatcatgggagggaagtcaaataagaggagagaaaagaactcaagggggaaactgcatttttaggctttgctctcttaccttgccctttctactcagaaccaataacttctgcatcaaaacatgttacagcctgcatcaagggctttaccccaacctgcagcccagccttccctgggtgagcttgctatgcgcagccacatttaccatgtggggctccctattctgatggcctgttcggtgccgggtttactcactgccctgttctgatgtcagtgcctgtacatacctccaaaggcaggacttgcctgataaatatttttcctcctctgaactggattttataggcattaaagacaagtcgggtggctagagggctccttgagacatacctagcagggaactgcaggtggattctgttgagaggcaaagcacctgagtggttgggacacaggcagctggcatgggagggactttttttgagacagggtctcactgtgtcgcccagggcaaggatgcccaaagacaccaggttggagaggcacctgccaactacttgctttccctggagcctgcatgtgcctgtggggtggggaggcgtaggggtctacggctgcctgagatgggtgtgcacagtgtgtgaagtacctacctccttgccttgctggactgtcagccagtcgcagggccggccacaagacccatgtctccatctggtcatactccatagctaccaagttaacctgctctaaactttggagaactggatctgtccaataaacgcttatttggccaagcctgatggctcgtgcctgtactcccagcactttgggaggctgaggtgggagggttgcttgagcccaggggtttgagaccagcttgggcaacaacaacaaaaatgccaggtgtggtggggtgcacctgtagtcccagctactagggaggctgagccaggaggatcacttgagcccgggaggttgaggctgcagtggggggtcataatcatgccactgtactccagcctgggtgacagagtgagaccctgtctccgaaaaaaaaaaaaaaaaaaagaacggaaaaagaaatgcttacattgtcagggatcctgtagacaatcattaactctatgagatgcttggttctatttttttgggagactttgtccaagtgttttggcttaagaaatccataggcctctcttggtgacacatctctagtactttttgtcataaacaaacaggccatctgccgccaaatacatccactccccatgccactgacatcctatgggtcagccaggcttgctttgactgaggccgaggcatctggaactttctctgcctgcaggggctagcagcagaggcttcaccgcatcaccaccccttcctccactcctgacattctttcccttcagggatccaaaatggttggccgagctcccagtgggaaaacgtgtgctagagttggggagtgagatgagtggtgctgtccatggaatcaggccacagcaggaactgccccactggccatttgagacacacacaggtggtaaatgctctgctggtgggctgtgcttccctcattcagagagctctgttacagcccactgtgtcctttagaagcttgaaaggaacccaactctttgctgcactgtcctttttcttcctcaaattcagaccctccttccaccggcacccccctactccaccctcagctcttccttgcctggtttatcaagcagagctgaggccccacgtttccaactctgattgtcacttgcatcttcacaaaggataaaccacggagcaactggaaaaccatcagccaagcgttcggatgagtctggttattggtccacccccgaccagattcccttacacttaactcacttctttctttggcaatgaccctcatgacatgtataaatgggtatgactaagaagaggctgtgatctaacatttatttgctgccattttttactctggggagaagcagccccaactcatcactgggaaagaactccccctgcaaaccagctaaatttgataatttaaaccccctgcccctaaaacttctcacagagctggggagttggtggcaactttccaagtcaaggtcttgcttagaaagtccttcactacatggccaggtgcagtggctcacgcctgtagtcccaggtacttgggagcctgaggcaggaggattgcttgagctcaggagttcaaggctgcagagagctatgatcatcccactgcatttgtttaaaaataaatttttaaaatttgtgtgttttatcaggggtctcctgtacagtgtatctgtgtatgtttgtgtgtgtgtttgtatacagccttgtttaatgttttgagcaataagatatgcacacacaggtattttgttgctaaagagattggacaaggttgtagctgtgctcaggcttcagcttggtttgttaaattgagagataaacaatgacaagagctgccagccaaccacactattcaaaaagcaaagtgttcaccactaaagctaaccattcatctggttgcaggcaaggctaaggctctctctcctctagttcctggaacagactcacagattggcatgaagcactgatcaggggctgcactcagactccctggccaagcaaacctacaccagaagagtcagtgtcacagatatgatgcggccaatctctgtctccaaaaacctacctgaacttaatggtagaattcaaagatctggggactgagggcacccagccttctaaaacacaatgtattcatgtgtttagtgtaaactctctgcatggattctcagtgttaataataaaaggaagcattcttttacaactcctgctgtgtgcaaaagaaagtgcaaaggatttggagtggcattccgaagatcaccacacataccttggttctgatggctgctgaactccgacttcttcgctgagacatgactgtgggaacagcctccagctatctgctcatcagaggtgctttcctcaacctcctgcaccacctccaagagaaacagcctaaaaagaaaccccagctgtttacttatattggtctgtaaatccctggaagtaaaccccatgcatttttatctactgtctgaggacatacaataaatctgagaaagtctatgctgtcac

SEQ ID NO: 10935 - protein, 500 aa, Homo sapiens; identical to SEQ ID NO: 1779

SEQ ID NO: 10936 - DNA, 2598 bp, Homo sapiens
agcaaaacctcctggcttgtacatcaccatagcaggccccaggaatgcgagggaccctgtgtcagggcagggaccccatcatccaagacagttggcagggagagtgcaagacctgcctggtttctacaaccttccaaaggaggcagctcccgaaagaaggttttcagaacgcagggccttgggagacaggaagccagtcagactcctcgcacaaaccacagggggcaagcagtgctcctccaagaacctggccccaccagggtgctcaagggaacgaggaggacaaccacagctattatgtgtcccgtctctatggccccagcgagccccacagccgggaactgtgggtagatgtggccgaggccaaccggagccaagtgaagatccacacaatactctccaacacccaccggcaggcttcgagagtggtcttgtcctttgatttccctttctacgggcatcctctgcggcagatcaccatagcaactggaggcttcatcttcatgggggacgtgatccatcggatgctcacagctactcagtatgtggcgcccctgatggccaacttcaaccctggctactccgacaactccacagttgtttactttgacaatgggacagtctttgtggttcagtgggaccacgtttatctccaaggctgggaagacaagggcagtttcaccttccaggcagctctgcaccatgacggccgcattgtctttgcctataaagagatccctatgtctgtcccggaaatcagctcctcccagcatcctgtcaaaaccggcctatcggatgccttcatgattctcaatccatccccggatgtgccagaatctcggcgaaggagcatctttgaatatcaccgcatagagctggaccccagcaaggtcaccagcatgtcggccgtggagttcaccccattgccgacctgcctgcagcataggagctgtgacgcctgcatgtcctcagacctgaccttcaactgcagctggtgccatgtcctccagaggtccctcaacaaccaggatgaaaacacgtatgtgaattgcctggattctcagcagtgtcacggcagctcagagtcaaggcgaccttgaggatcactggagctcatgcagtcctgctagcccctacacctactcacatgggcagatgtggccttggtcctggggagctgggtgggaaggaaggcagggatgccacaaataccttcatcttccggggaagtagagggaatgggagtgcctgactacctcagcctggggaccttggctcctcttctcactatcagcagagagctgttactgaacagtgaaaggggaaggcttctttgtcaatcccatcataactctgtccttttggtcctcctgcagatgctccagtggctttgaccgctatcgccaggagtggatggactatggctgtgcacaggaggcagagggcaggatgtgcgaggacttccaggatgaggaccacgactcagcctcccctgacacttccttcagcccctatgatggagacctcaccactacctcctcctccctcttcatcgacagcctcaccacagaagatgacaccaagttgaatccctatgcaggaggagacggccttcagaacaacctgtcccccaagacaaagggcactcctgtgcacctgggcaccatcgtgggcatcgtgctggcagtcctcctcgtggcggccatcatcctggctggaatttacatcaatggccaccccacatccaatgctgcgctcttcttcatcgagcgtagacctcaccactggccagccatgaagtttcgcagccaccctgaccattccacctatgcggaggtggagccctcgggccatgagaaggagggcttcatggaggctgagcagtgctgagaacaccaagtctcccctttgaagactttgaggccacagaaaagacagttaaagcaaagaagagaagtgacttttcctggcctctcccagcatgccctgggctgagatgagatggtggtttatggctccagagctgctgctcgcttcgtcagcacaccccgaatattgaagagggggccaaaaaacaaccacatggattttttataggaacaacaacctaatctcatcctgttttgatgcaagggttctcttctgtgtcttgtaaccatgaaacagcagaagaactaacataactaactccatttttgtttaaggggcctttacctattcctgcacctaggctaggataactttagagcactgacataaaacgcaaaaacaggaatcatgccgtttgcaaaactaactctgggattaaaggggaagcatgtaaacagctaactgtttttgttaaagatttataggaatgaggaggtttggctattgtcacatgacagactgttagccaaggacaaagaagttctgcaaacctcccctggacccttgctggtgtccagatgtctgcggttgtcagccccttcctttcccccgacctaaacataaaagacaaggcaaagcccgcataattttaagacggttctttaggacattagtccaccatcttcttggtttgctggctctccgaaataaagtccctttccttgctcc

SEQ ID NO: 10937 - protein, 351 aa, Homo sapiens
MRGTLCQGRDPIIQDSWQGECKTCLVSTTFQRRQLPKEGFQNAGPWETGSQSDSSHKPQGASSAPPRTWPHQGAQGNEEDNHSYYVSRLYGPSEPHSRELWVDVAEANRSQVKIHTILSNTHRQASRVVLSFDFPFYGHPLRQITIATGGFIFMGDVIHRMLTATQYVAPLMANFNPGYSDNSTVVYFDNGTVFVVQWDHVYLQGWEDKGSFTFQAALHHDGRIVFAYKEIPMSVPEISSSQHPVKTGLSDAFMILNPSPDVPESRRRSIFEYHRIELDPSKVTSMSAVEFTPLPTCLQHRSCDACMSSDLTFNCSWCHVLQRSLNNQDENTYVNCLDSQQCHGSSESRRP

SEQ ID NO: 10938 - DNA, 2390 bp, Homo sapiens
cagctccgctcgcgctctcgccgctcctgccggctcgcccggccccgcgctccgccgtctcctcgccgcccgcccctccgccagccccggggaccgcgcggccgcagcctgagccagggccccctccctcgtcaggaccggggcagcaagcaggccgggggcaggtccgggcacccaccatgcgaggcgagctctggctcctggtgctggtgctcagggaggctgcccgggcgctgagcccccagcccggagcaggtcacgatgagggcccaggctctggatgggctgccaaagggaccgtgcggggctggaaccggagagcccgagagagccctgggcatgtgtcagagccggacaggacccagctgagccaggacctgggtgggggcaccctggccatggacacgctgccagataacaggaccagggtggtggaggacaaccacagctattatgtgtcccgtctctatggccccagcgagccccacagccgggaactgtgggtagatgtggccgaggccaaccggagccaagtgaagatccacacaatactctccaacacccaccggcaggcttcgagagtggtcttgtcctttgatttccctttctacgggcatcctctgcggcagatcaccatagcaactggaggcttcatcttcatgggggacgtgatccatcggatgctcacagctactcagtatgtggcgcccctgatggccaacttcaaccctggctactccgacaactccacagttgtttactttgacaatgggacagtctttgtggttcagtgggaccacgtttatctccaaggctgggaagacaagggcagtttcaccttccaggcagctctgcaccatgacggccgcattgtctttgcctataaagagatccctatgtctgtcccggaaatcagctcctcccagcatcctgtcaaaaccggcctatcggatgccttcatgattctcaatccatccccggatgtgccagaatctcggcgaaggagcatctttgaatatcaccgcatagagctggaccccagcaaggtcaccagcatgtcggccgtggagttcaccccattgccgacctgcctgcagcataggagctgtgacgcctgcatgtcctcagacctgaccttcaactgcagctggtgccatgtcctccagagatgctccagtggctttgaccgctatcgccaggagtggatggactatggctgtgcacaggaggcagagggcaggatgtgcgaggacttccaggatgaggaccacgactcagcctcccctgacacttccttcagcccctatgatggagacctcaccactacctcctcctccctcttcatcgacagcctcaccacagaagatgacaccaagttgaatccctatgcaggaggagacggccttcagaacaacctgtcccccaagacaaagggcactcctgtgcacctgggcaccatcgtgggcatcgtgctggcagtcctcctcgtggcggccatcatcctggctggaatttacatcaatggccaccccacatccaatgctgcgctcttcttcatcgagcgtagacctcaccactggccagccatgaagtttcgcagccaccctgaccattccacctatgcggaggtggagccctcgggccatgagaaggagggcttcatggaggctgagcagtgctgagaacaccaagtctcccctttgaagactttgaggccacagaaaagacagttaaagcaaagaagagaagtgacttttcctggcctctcccagcatgccctgggctgagatgagatggtggtttatggctccagagctgctgctcgcttcgtcagcacaccccgaatattgaagagggggccaaaaaacaaccacatggattttttataggaacaacaacctaatctcatcctgttttgatgcaagggttctcttctgtgtcttgtaaccatgaaacagcagaagaactaacataactaactccatttttgtttaaggggcctttacctattcctgcacctaggctaggataactttagagcactgacataaaacgcaaaaacaggaatcatgccgtttgcaaaactaactctgggattaaaggggaagcatgtaaacagctaactgtttttgttaaagatttataggaatgaggaggtttggctattgtcacatgacagactgttagccaaggacaaagaagttctgcaaacctcccctggacccttgctggtgtccagatgtctgcggttgtcagccccttcctttcccccgacctaaacataaaagacaaggcaaagcccgcataattttaagacggttctttaggacattagtccaccatcttcttggtttgctggctctccgaaataaagtccctttccttgctcc

SEQ ID NO: 10939 - protein, 500 aa, Homo sapiens; identical to SEQ ID NO: 1779

SEQ ID NO: 10940 - DNA, 2874 bp, Homo sapiens
acacacacacacacacacacacacacacacacacacacacacacaccctgcaggtgattacgatctcaagttctagaggcttacgttaaaatttacacatttgcttctactatttacaagtttatgtttcagcctgagctcttcttgtaagacagaccacgaggtaccccagatggaggaatgtgcaaagacgccggggctggagctggaatccgtcccgagacttctcaccttgacctcgaggaaggcaggaggtcggagacagggggtgggcaggctggggaaagaggaaacccgcaggacaagagggttgtggctcgtcacgtggccacttgagggcagcaagtagctgcagctggaggtagctgcctatctgattctgtttgagagtccgccaagttgggatttaaattagacatcaagaagaatttacagaccggccttgccttgttccacggtcacgatgagggcccaggctctggatgggctgccaaagggaccgtgcggggctggaaccggagagcccgagagagccctgggcatgtgtcagagccggacaggacccagctgagccaggacctgggtgggggcaccctggccatggacacgctgccagataacaggaccagggtggtggaggacaaccacagctattatgtgtcccgtctctatggccccagcgagccccacagccgggaactgtgggtagatgtggccgaggccaaccggagccaagtgaagatccacacaatactctccaacacccaccggcaggcttcgagagtggtcttgtcctttgatttccctttctacgggcatcctctgcggcagatcaccatagcaactggaggcttcatcttcatgggggacgtgatccatcggatgctcacagctactcagtatgtggcgcccctgatggccaacttcaaccctggctactccgacaactccacagttgtttactttgacaatgggacagtctttgtggttcagtgggaccacgtttatctccaaggctgggaagacaagggcagtttcaccttccaggcagctctgcaccatgacggccgcattgtctttgcctataaagagatccctatgtctgtcccggaaatcagctcctcccagcatcctgtcaaaaccggcctatcggatgccttcatgattctcaatccatccccggatgtgccagaatctcggcgaaggagcatctttgaatatcaccgcatagagctggaccccagcaaggtcaccagcatgtcggccgtggagttcaccccattgccgagtccctcaacaaccaggatgaaaacacgtatgtgaattgcctggattctcagcagtgtcacggcagctcagagtcaaggcgaccttgaggatcactggagctcatgcagtcctgctagcccctacacctactcacatgggcagatgtggccttggtcctggggagctgggtgggaaggaaggcagggatgccacaaataccttcatcttccggggaagtagagggaatgggagtgcctgactacctcagcctggggaccttggctcctcttctcactatcagcagagagctgttactgaacagtgaaaggggaaggcttctttgtcaatcccatcataactctgtccttttggtcctcctgcagatgctccagtggctttgaccgctatcgccaggagtggatggactatggctgtgcacaggaggcagagggcaggatgtgcgaggacttccaggatgaggaccacgactcagcctcccctgacacttccttcagcccctatgatggagacctcaccactacctcctcctccctcttcatcgacagcctcaccacagaagatgacaccaagttgaatccctatgcaggaggagacggccttcagaacaacctgtcccccaagacaaagggcactcctgtgcacctgggcaccatcgtgggcatcgtgctggcagtcctcctcgtggcggccatcatcctggctggaatttacatcaatggccaccccacatccaatgctgcgctcttcttcatcgagcgtagacctcaccactggccagccatgaagtttcgcagccaccctgaccattccacctatgcggaggtggagccctcgggccatgagaaggagggcttcatggaggctgagcagtgctgagaacaccaagtctcccctttgaagactttgaggccacagaaaagacagttaaagcaaagaagagaagtgacttttcctggcctctcccagcatgccctgggctgagatgagatggtggtttatggctccagagctgctgctcgcttcgtcagcacaccccgaatattgaagagggggccaaaaaacaaccacatggattttttataggaacaacaacctaatctcatcctgttttgatgcaagggttctcttctgtgtcttgtaaccatgaaacagcagaagaactaacataactaactccatttttgtttaaggggcctttacctattcctgcacctaggctaggataactttagagcactgacataaaacgcaaaaacaggaatcatgccgtttgcaaaactaactctgggattaaaggggaagcatgtaaacagctaactgtttttgttaaagatttataggaatgaggaggtttggctattgtcacatgacagactgttagccaaggacaaagaagttctgcaaacctcccctggacccttgctggtgtccagatgtctgcggttgtcagccccttcctttcccccgacctaaacataaaagacaaggcaaagcccgcataattttaagacggttctttaggacattagtccaccatcttcttggtttgctggctctccgaaataaagtccctttccttgctcc

SEQ ID NO: 10941 - protein, 240 aa, Homo sapiens
MDTLPDNRTRVVEDNHSYYVSRLYGPSEPHSRELWVDVAEANRSQVKIHTILSNTHRQASRVVLSFDFPFYGHPLRQITIATGGFIFMGDVIHRMLTATQYVAPLMANFNPGYSDNSTVVYFDNGTVFVVQWDHVYLQGWEDKGSFTFQAALHHDGRIVFAYKEIPMSVPEISSSQHPVKTGLSDAFMILNPSPDVPESRRRSIFEYHRIELDPSKVTSMSAVEFTPLPSPSTTRMKTRM

SEQ ID NO: 10942 - DNA, 531 bp, Homo sapiens
atgggacagctgatcgccaagttaatgagcatcttcgggaaccaggagcacacggtcatcatcgtgggactggacaatgaaggaaagaccaccattctctaccggttcttgaccaatgaggtggtccatatgtgtcccaccattggcagcaacgtggaggagatcattctgccgaagacccacttcttcatgtgggacatagtgagacctgaggctctgagctttatctggaacacatactactccaacactgagtttatcatccttgtgattgacagcacggaccgggatcggctgctgaccactcgggaggagctatataaaatgctggcccatgaggctctacaggatgcttcagtcctgatatttgccaataagcaggacgtgaaggactccatgaggatggtggagatctcccatttccttactctcagcaccatcaaagaccactcgtggcatatacaaggctgctgtgccctcaccagggaagggttagtggctgccctacctggatctctagggcctggctga

SEQ ID NO: 10943 - protein, 176 aa, Homo sapiens
MGQLIAKLMSIFGNQEHTVIIVGLDNEGKTTILYRFLTNEVVHMCPTIGSNVEEIILPKTHFFMWDIVRPEALSFIWNTYYSNTEFIILVIDSTDRDRLLTTREELYKMLAHEALQDASVLIFANKQDVKDSMRMVEISHFLTLSTIKDHSWHIQGCCALTREGLVAALPGSLGPG

SEQ ID NO: 10944 - DNA, 3708 bp, Homo sapiens
ggagagagcgggaggagcgagggaaggcaggaaggaggcagccgaaggccgagctgggtggctggaccgggtgctggctgcgccgcgctgctttcggctcccacggcctctcccatgcgctgagggagcccggctgggccgggccggcggcgggaggggaggctcctctccatggtccagaagaccagcatgtcccggggcccttacccaccctcccaggagatccccatggaggtcttcgaccccagcccgcagggcaaatacagcaagaggaaagggcgattcaaacggtcagatgggagcacgtcctcggataccacatccaacagctttgtccgccagggctcagcggagtcctacaccagccgtccatcagactctgatgtatctctggaggaggaccgggaagccttaaggaaggaagcagagcgccaggcattagcgcagctcgagaaggccaagaccaagccagtggcatttgctgtgcggacaaatgttggctacaatccgtctccaggggatgaggtgcctgtgcagggagtggccatcaccttcgagcccaaagacttcctgcacatcaaggagaaatacaataatgactggtggatcgggcggctggtgaaggagggctgtgaggttggcttcattcccagccccgtcaaactggacagccttcgcctgctgcaggaacagaagctgcgccagaaccgcctcggctccagcaaatcaggcgataactccagttccagtctgggagatgtggtgactggcacccgccgccccacaccccctgccagtgccaaacagaagcagaagtcgacagagcatgtgcccccctatgacgtggtgccttccatgaggcccatcatcctggtgggaccgtcgctcaagggctacgaggttacagacatgatgcagaaagctttatttgacttcttgaagcatcggtttgatggcaggatctccatcactcgtgtgacggcagatatttccctggctaagcgctcagttctcaacaaccccagcaaacacatcatcattgagcgctccaacacacgctccagcctggctgaggtgcagagtgaaatcgagcgaatcttcgagctggcccggacccttcagttggtcgctctggatgctgacaccatcaatcacccagcccagctgtccaagacctcgctggcccccatcattgtttacatcaagatcacctctcccaaggtacttcaaaggctcatcaagtcccgaggaaagtctcagtccaaacacctcaatgtccaaatagcggcctcggaaaagctggcacagtgcccccctgaaatgtttgacatcatcctggatgagaaccaattggaggatgcctgcgagcatctggcggagtacttggaagcctattggaaggccacacacccgcccagcagcacgccacccaatccgctgctgaaccgcaccatggctaccgcagccctggctgccagccctgcccctgtctccaacctccagggaccctaccttgcttccggggaccagccactggaacgggccaccggggagcacgccagcatgcacgagtacccaggggagctgggccagcccccaggcctttaccccagcagccacccaccaggccgggcaggcacgctacgggcactgtcccgccaagacacttttgatgccgacacccccggcagccgaaactctgcctacacggagctgggagactcatgtgtggacatggagactgacccctcagaggggccagggcttggagaccctgcagggggcggcacgcccccagcccgacagggatcctgggaggacgaggaagaagactatgaggaagagctgaccgacaaccggaaccggggccggaataaggcccgctactgcgctgagggtgggggtccagttttggggcgcaacaagaatgagctggagggctggggacgaggcgtctacattcgctgagaggcaggggccacacggcgggaggaagggctctgagcccaggggaggggagggagcgaggggctcacacctgacatgtattcgcctccagggggcgctgtctccctcctttcagatgcctttgctcaaagcttggggtttctttggtgttaccatcccagctcccgggaggcccttaagccccagctgtcggtttttacctgcctgttgtggatggatgggggatacccacctttctgaagtgtcccctttctcccatcttaaggggctctcctccctcaccctcctagagaaaaggtgcacttccttaactctttctactcggggccctaagtgacggtcctaagtgggatggctctccttctcccaagctgcagtactggggaagggctgggcgcttttcctggaaagggaggccacagattctttcccatgggggctctcttccccagaccccagatccaaggtccctcaccctgcctgccccttcctcccagcttcctggcagcatcgtctggtcggtgaaagccatagcatggacaccccatggggagcttgtcttggggagggttctgggtggaagctggcaggcatacagcaccctctaccctccgtggccatggcaacgtccagggcccagaaccctgaggagtgagcggccgagacgctgctccccaccccccacctccatgcctcagcctttgcctaccccaggaatgagcttggcctccaacatcccttgcctgctgccattagtagagggggcccctctgcatctgagccccccatccctgtgccacctgggtgtggagcccatggaacactctggtccgcctcattttaaaccaaaaaactgctccttcaccctcaccctgaggccccaggggagaggacccgtgggatggtgcccaggggttgccttgggacctcggatctcctctggggggcttggctgctgctgttgctgctctgtatttgcctctcgtgattctgtttgttacccatgttcacttcccccaggagaggccttggtaccccctctcccctggggcatccctttgccttggcatccctgtagcccagcaaccctgcccctccccagcatcccagctgggccagagagagccgagtgtgccaacaaggactggggcctgcccggctgcccgcctcagggatgggcacctcatgcctgtctcgccacctcctgtgccaatgtcccaccctccacctgggggtggggtgcagcttccacttactgattagaagacaccactgccctcccttcccccctccctgtctggtgtcctgtgcccccatctgtctgtctatatttgtctgtactcccctaggagaagtattttgccatatataaaaccactgtcctgtcctttgtggctgcctcccaagcctgcttctttgtcctcgccacatagtcgtcagcgtaggcacctgggagctgctgatatgcacggggagttgaaagggtgggtgcctgaagatgttgtgccctgagtcattgactcaaaagaaaagatgatcctttgattttggccctctgatgtattgtgcccaagccaggagctgcttgggcagtcccagctccacactggccctgagccccttcacttacctgtctctccacaagtagagccaaaggcaatgggaagctcaatgttgctcagtgggtgagatccagacccactggtgcaatgtcttaaatacacatgactgtttttctgc

SEQ ID NO: 10945 - protein, 598 aa, Homo sapiens; identical to SEQ ID NO: 1781

SEQ ID NO: 10946 - DNA, 4087 bp, Homo sapiens
ataacctcctatgccttgtccaacaccacccctgcatagtcacacaaatccacacctcttgcctcctgccctcacatgtcccccaacctcagggtcacagatgtctgggagctcccccccagtacactcacatgtggctgtacacacacagtcatatgcagccaactatagagcacaccctcctccacacacttgtacttgcacatccacacacacacatgaagaagcacgtgcattcccactaccaggtctgtacgggcaacatgtgtcttacacatatgtgtgcatccctaaaggagtcccttgtgctctgggttggtcattgtggtcaaagccagctgtctggcacccagcagccctcatttcagggaaagccctgtcccatatcctgctcttaacttgcctcttcggtctgtaccagcctggaactcttgggttctcttgtgtcctaggagagcctgaggactggggctgtaagtagtgaagtttgattctggcagtaccagttaagaggagcaggggaggtaggagtctgtctccctctacccttgaacagaagctggcaaaatctgtggtggccccatcctgcggagcaggccgtccacggctgatagtgcagagagctcaggccgaagctggtggctgcagtccctggaatggatgccactggacctcagctgagtctatctcagcgggtgctgggggcaggggagggaaggagcagtgggagtagagactcgtccctggcattcctcccttgccttgtgcccctatcaggttcccacccctccctgggccccaagcagctgtccttgggcctgccttcatctcctgcttgctgctgtcaccctcactagggccacactttccccaggggcctgagaaatctcagctcctggtcccttccacctaataccaccttgtcttagcccttgtggtgtcatgctgggctggctggggctcgaggcatccatgatgggtggcacctccatgccttcccaggcccaggagctgggaggggcagcaatggccctgatctggctctctctattttcagggctcagcggagtcctacaccagccgtccatcagactctgatgtatctctggaggaggaccgggaagccttaaggaaggaagcagagcgccaggcattagcgcagctcgagaaggccaagaccaagccagtggcatttgctgtgcggacaaatgttggctacaatccgtctccaggggatgaggtgcctgtgcagggagtggccatcaccttcgagcccaaagacttcctgcacatcaaggagaaatacaataatgactggtggatcgggcggctggtgaaggagggctgtgaggttggcttcattcccagccccgtcaaactggacagccttcgcctgctgcaggaacagaagctgcgccagaaccgcctcggctccagcaaatcaggcgataactccagttccagtctgggagatgtggtgactggcacccgccgccccacaccccctgccagtgccaaacagaagcagaagtcgacagagcatgtgcccccctatgacgtggtgccttccatgaggcccatcatcctggtgggaccgtcgctcaagggctacgaggttacagacatgatgcagaaagctttatttgacttcttgaagcatcggtttgatggcaggatctccatcactcgtgtgacggcagatatttccctggctaagcgctcagttctcaacaaccccagcaaacacatcatcattgagcgctccaacacacgctccagcctggctgaggtgcagagtgaaatcgagcgaatcttcgagctggcccggacccttcagttggtcgctctggatgctgacaccatcaatcacccagcccagctgtccaagacctcgctggcccccatcattgtttacatcaagatcacctctcccaaggtacttcaaaggctcatcaagtcccgaggaaagtctcagtccaaacacctcaatgtccaaatagcggcctcggaaaagctggcacagtgcccccctgaaatgtttgacatcatcctggatgagaaccaattggaggatgcctgcgagcatctggcggagtacttggaagcctattggaaggccacacacccgcccagcagcacgccacccaatccgctgctgaaccgcaccatggctaccgcagccctggctgccagccctgcccctgtctccaacctccagggaccctaccttgcttccggggaccagccactggaacgggccaccggggagcacgccagcatgcacgagtacccaggggagctgggccagcccccaggcctttaccccagcagccacccaccaggccgggcaggcacgctacgggcactgtcccgccaagacacttttgatgccgacacccccggcagccgaaactctgcctacacggagctgggagactcatgtgtggacatggagactgacccctcagaggggccagggcttggagaccctgcagggggcggcacgcccccagcccgacagggatcctgggaggacgaggaagaagactatgaggaagagctgaccgacaaccggaaccggggccggaataaggcccgctactgcgctgagggtgggggtccagttttggggcgcaacaagaatgagctggagggctggggacgaggcgtctacattcgctgagaggcaggggccacacggcgggaggaagggctctgagcccaggggaggggagggagcgaggggctcacacctgacatgtattcgcctccagggggcgctgtctccctcctttcagatgcctttgctcaaagcttggggtttctttggtgttaccatcccagctcccgggaggcccttaagccccagctgtcggtttttacctgcctgttgtggatggatgggggatacccacctttctgaagtgtcccctttctcccatcttaaggggctctcctccctcaccctcctagagaaaaggtgcacttccttaactctttctactcggggccctaagtgacggtcctaagtgggatggctctccttctcccaagctgcagtactggggaagggctgggcgcttttcctggaaagggaggccacagattctttcccatgggggctctcttccccagaccccagatccaaggtccctcaccctgcctgccccttcctcccagcttcctggcagcatcgtctggtcggtgaaagccatagcatggacaccccatggggagcttgtcttggggagggttctgggtggaagctggcaggcatacagcaccctctaccctccgtggccatggcaacgtccagggcccagaaccctgaggagtgagcggccgagacgctgctccccaccccccacctccatgcctcagcctttgcctaccccaggaatgagcttggcctccaacatcccttgcctgctgccattagtagagggggcccctctgcatctgagccccccatccctgtgccacctgggtgtggagcccatggaacactctggtccgcctcattttaaaccaaaaaactgctccttcaccctcaccctgaggccccaggggagaggacccgtgggatggtgcccaggggttgccttgggacctcggatctcctctggggggcttggctgctgctgttgctgctctgtatttgcctctcgtgattctgtttgttacccatgttcacttcccccaggagaggccttggtaccccctctcccctggggcatccctttgccttggcatccctgtagcccagcaaccctgcccctccccagcatcccagctgggccagagagagccgagtgtgccaacaaggactggggcctgcccggctgcccgcctcagggatgggcacctcatgcctgtctcgccacctcctgtgccaatgtcccaccctccacctgggggtggggtgcagcttccacttactgattagaagacaccactgccctcccttcccccctccctgtctggtgtcctgtgcccccatctgtctgtctatatttgtctgtactcccctaggagaagtattttgccatatataaaaccactgtcctgtcctttgtggctgcctccc

SEQ ID NO: 10947 - protein, 370 aa, Homo sapiens
MRPIILVGPSLKGYEVTDMMQKALFDFLKHRFDGRISITRVTADISLAKRSVLNNPSKHIIIERSNTRSSLAEVQSEIERIFELARTLQLVALDADTINHPAQLSKTSLAPIIVYIKITSPKVLQRLIKSRGKSQSKHLNVQIAASEKLAQCPPEMFDIILDENQLEDACEHLAEYLEAYWKATHPPSSTPPNPLLNRTMATAALAASPAPVSNLQGPYLASGDQPLERATGEHASMHEYPGELGQPPGLYPSSHPPGRAGTLRALSRQDTFDADTPGSRNSAYTELGDSCVDMETDPSEGPGLGDPAGGGTPPARQGSWEDEEEDYEEELTDNRNRGRNKARYCAEGGGPVLGRNKNELEGWGRGVYIR

SEQ ID NO: 10948 - DNA, 3360 bp, Homo sapiens
ggagagagcgggaggagcgagggaaggcaggaaggaggcagccgaaggccgagctgggtggctggaccgggtgctggctgcgccgcgctgctttcggctcccacggcctctcccatgcgctgagggagcccggctgggccgggccggcggcgggaggggaggctcctctccatggtccagaagaccagcatgtcccggggcccttacccaccctcccaggagatccccatggaggtcttcgaccccagcccgcagggcaaatacagcaagaggaaagggcgattcaaacggtcagatgggagcacgtcctcggataccacatccaacagctttgtccgccagggctcagcggagtcctacaccagccgtccatcagactctgatgtatctctggaggaggaccgggaagccttaaggaaggaagcagagcgccaggcattagcgcagctcgagaaggccaagaccaagccagtggcatttgctgtgcggacaaatgttggctacaatccgtctccaggggatgaggtgcctgtgcagggagtggccatcaccttcgagcccaaagacttcctgcacatcaaggagaaatacaataatgactggtggatcgggcggctggtgaaggagggctgtgaggttggcttcattcccagccccgtcaaactggacagccttcgcctgctgcaggaacagaagctgcgccagaaccgcctcggctccagcaaatcaggcgataactccagttccagtctgggagatgtggtgactggcacccgccgccccacaccccctgccagtgccaaacagaagcagaagtcgacagagcatgtgcccccctatgacgtggtgccttccatgaggcccatcatcctggtgggaccgtcgctcaagggctacgaggttacagacatgatgcagaaagctttatttgacttcttgaagcatcggtttgatggcaggatctccatcactcgtgtgacggcagatatttccctggctaagcgctcagttctcaacaaccccagcaaacacatcatcattgagcgctccaacacacgctccagcctggctgaggtgcagagtgaaatcgagcgaatcttcgagctggcccggacccttcagttggtcgctctggatgctgacaccatcaatcacccagcccagctgtccaagacctcgctggcccccatcattgtttacatcaagatcacctctcccaaggtacttcaaaggctcatcaagtcccgaggaaagtctcagtccaaacacctcaatgtccaaatagcggcctcggaaaagctggcacagtgcccccctgaaatgtttgacatcatcctggatgagaaccaattggaggatgcctgcgagcatctggcggagtacttggaagcctattggaaggccacacacccgcccagcagcacgccacccaatccgctgctgaaccgcaccatggctaccgcagccctggctgccagccctgcccctgtctccaacctccagggaccctaccttgcttccggggaccagccactggaacgggccaccggggagcacgccagcatgcacgagtacccaggggagctgggccagcccccaggcctttaccccagcagccacccaccaggccgggcaggcacgctacgggcactgtcccgccaagacacttttgatgccgacacccccggcagccgaaactctgcctacacggagctgggagactcatgtgtggacatggagactgacccctcagaggggccagggcttggagaccctgcagggggcggcacgcccccagcccgacagggatcctgggaggacgaggaagaagactatgaggaagagctgaccgacaaccggaaccggggccggaataaggcccgctactgcgctgagggtgggggtccagttttggggcgcaacaagaatgagctggagggctggggacgaggcgtctacattcgctgagaggcaggggccacacggcgggaggaagggctctgagcccaggggaggggagggagcgaggggctcacacctgacatgtattcgcctccagggggcgctgtctccctcctttcagatgcctttgctcaaagcttggggtttctttggtgttaccatcccagctcccgggaggcccttaagccccagctgtcggtttttacctgcctgttgtggatggatgggggatacccacctttctgaagtgtcccctttctcccatcttaaggggctctcctccctcaccctcctagagaaaaggtgcacttccttaactctttctactcggggccctaagtgacggtcctaagtgggatggctctccttctcccaagctgcagtactggggaagggctgggcgcttttcctggaaagggaggccacagattctttcccatgggggctctcttccccagaccccagatccaaggtccctcaccctgcctgccccttcctcccagcttcctggcagcatcgtctggtcggtgaaagccatagcatggacaccccatggggagcttgtcttggggagggttctgggtggaagctggcaggcatacagcaccctctaccctccgtggccatggcaacgtccagggcccagaaccctgaggagtgagcggccgagacgctgctccccaccccccacctccatgcctcagcctttgcctaccccaggaatgagcttggcctccaacatcccttgcctgctgccattagtagagggggcccctctgcatctgagccccccatccctgtgccacctgggtgtggagcccatggaacactctggtccgcctcattttaaaccaaaaaactgctccttcaccctcaccctgaggccccaggggagaggacccgtgggatggtgcccaggggttgccttgggacctcggatctcctctggggggcttggctgctgctgttgctgctctgtatttgcctctcgtgattctgtttgttacccatgttcacttcccccaggagaggccttggtaccccctctcccctggggcatccctttgccttggcatccctgtagcccagcaaccctgcccctccccagcatcccagctgggccagagagagccgagtgtgccaacaaggactggggcctgcccggctgcccgcctcagggatgggcacctcatgcctgtctcgccacctcctgtgccaatgtcccaccctccacctgggggtggggtgcagcttccacttactgattagaagacaccactgccctcccttcccccctccctgtctggtgtcctgtgcccccatctgtctgtctatatttgtctgtactcccctaggagaagtattttgccatatataaaaccactgtcctgtcctttg

SEQ ID NO: 10949 - protein, 598 aa, Homo sapiens; identical to SEQ ID NO: 1781

SEQ ID NO: 10950 - DNA, 712 bp, Homo sapiens
acacggagctgggagactcatgtgtggacatggagactgacccctcagaggggccagggcttggagaccctgcagggggcggcacgcccccagcccgacagggatcctgggaggacgaggaagaagactatgaggaagagctgaccgacaaccggaaccggggccggaataaggcccgctactgcgctgagggtgggggtccagttttggggcgcaacaagaatgagctggagggctggggacgaggcgtctacattcgctgagaggcaggggccacacggcgggaggaagggctctgagcccaggggaggggagggagcgaggggctcacacctgacatgtattcgcctccagggggcgctgtctccctcctttcagatgcctttgctcaaagcttggggtttctttggtgttaccatcccagctcccgggaggcccttaagccccagctgtcggtttttacctgcctgttgtggatggatgggggatacccacctttctgaagtgtcccctttctcccatcttaaggggctctcctccctcaccctcctagagaaaaggtgcaagcttccacttactgattagaagacaccactgccctcccttcccccctccctgtctggtgtcctgtgcccccatctgtctgtctatatttgtctgtactcccctaggagaagtattttgccatatataaaaccactgtcctgtcctt

SEQ ID NO: 10951 - protein, 120 aa, Homo sapiens
MSWRAGDEASTFAERQGPHGGRKGSEPRGGEGARGSHLTCIRLQGALSPSFQMPLLKAWGFFGVTIPAPGRPLSPSCRFLPACCGWMGDTHLSEVSPFSHLKGLSSLTLLEKRCKLPLTD

SEQ ID NO: 10952 - DNA, 668 bp, Homo sapiens
gggtgcaagaatatactggacaatgtaggggcacagaagccagactgtctgccattagggaaggaaagggtggtgatggaatgaagccatctgtgtcttgcactgctgcagcacacacaacaaggtctcagtctgttgcccaggttgcagtgcaatggcacgatctcagctcactgaaacctccgcctcccaggttcaagcgattctcctgcctcagcctccggagtagctgggattacagacatacggcatcacgcccagctaattattatagattggtcctggttctttggttggccagaccatcctgtaaaacactggcaagccagaaatcatcaagagtcacccctggaacttgggtcatacacttgcaggcacttgaatgaacgtggagaattacttggagaatcaccaagggtagacacaagactctctttagataacagaaaggcacttagggagaaggagaattgtaaattactttgttattactccaaagggcagaattaggtttagataccaggttactaaaaaaaaatttagcaaccagtaataaccaaggagaatagtagttactggaggtgtttagttacatgccgggggatcaagaaagagaaggccatccctgagtgctgggttagcttcatacatgtagcttctaacctcct

SEQ ID NO: 10953 - protein, 101 aa, Homo sapiens
MKPSVSCTAAAHTTRSQSVAQVAVQWHDLSSLKPPPPRFKRFSCLSLRSSWDYRHTASRPANYYRLVLVLWLARPSCKTLASQKSSRVTPGTWVIHLQALE

SEQ ID NO: 10954 - DNA, 1751 bp, Homo sapiens
gagacacactctgccccaaccatcctgaagctacaggtgctccctcctggaatctccaatggatttcagtcgcagaagcttccacagaagcctgagctcctccttgcaggcccctgtagtcagtacagtgggcatgcagcgcctcgggacgacacccagcgtttatgggggtgctggaggccggggcatccgcatctccaactccagacacacggtgaactatgggagcgatctcacaggcggcggggacctgtttgttggcaatgagaaaatggccatgcagaacctaaatgaccgtctagcgagctacctagaaaaggtgcggaccctggagcagtccaactccaaacttgaagtgcaaatcaagcagtggtacgaaaccaacgccccgagggctggtcgcgactacagtgcatattacagacaaattgaagagctgcgaagtcagattaaggatgctcaactgcaaaatgctcggtgtgtcctgcaaattgataatgctaaactggctgctgaggacttcagactgaagtatgagactgagagaggaatacgtctaacagtggaagctgatctccaaggcctgaataaggtctttgatgacctaaccctacataaaacagatttggagattcaaattgaagaactgaataaagacctagctctcctcaaaaaggagcatcaggaggaagtcgatggcctacacaagcatctgggcaacactgtcaatgtggaggttgatgctgctccaggcctgaaccttggcgtcatcatgaatgaaatgaggcagaagtatgaagtcatggcccagaagaaccttcaagaggccaaagaacagtttgagagacagactgcagttctgcagcaacaggtcacagtgaatactgaagaattaaaaggaactgaggttcaactaacggagctgagacgcacctcccagagccttgagatagaactccagtcccatctcagcatgaaagagtctttggagcacactctagaggagaccaaggcccgttacagcagccagttagccaacctccagtcgctgttgagctctctggaggcccaactgatgcagattcggagtaacatggaacgccagaacaacgaataccatatccttcttgacataaagactcgacttgaacaggaaattgctacttaccgccgccttctggaaggagaagacgtaaaaactacagaatatcagttaagcaccctggaagagagagatataaagaaaaccaggaagattaagacagtcgtgcaagaagtagtggatggcaaggtcgtgtcatctgaagtcaaagaggtggaagaaaatatctaaatagctaccagaaggagatgctgctgaggttttgaaagaaatttggctataatcttatctttgctccctgcaagaaatcagccataagaaagcactattaatactctgcagtgattagaaggggtggggtggcgggaatcctatttatcagactctgtaattgaatataaatgttttactcagaggagctgcaaattgcctgcaaaaatgaaatccagtgagcactagaatatttaaaacatcattactgccatctttatcatgaagcacatcaattacaagctgtagaccacctaatatcaatttgtaggtaatgttcctgaaaattgcaatacatttcaattatactaaacctcacaaagtagaggaatccatgtaaattgcaaataaaccactttctaattttttcctgtttctg

SEQ ID NO: 10955 - protein, 424 aa, Homo sapiens; identical to SEQ ID NO: 1787

SEQ ID NO: 10956 - DNA, 534 bp, Homo sapiens
caggcccctgtagtcagtacagtgggcatgcagcgcctcgggacgacacccagcgtttatgggggtgctggaggccggggcatccgcatctccaactccagacacacggtgaactatgggagcgatctcacaggcggcggggacctgtttgttggcaatgagaaaatggccatgcagaacctaaatgaccgtctagcgagctacctagaaaaggtgcggaccctggagcagtccaactccaaacttgaagtgcaaatcaagcagtggtacgaaaccaacgccccgagggctggtcgcgactacagtgcatattacagacaaattgaagagctgcgaagtcagattaaggatgctcaactgcaaaatgctcggtgtgtcctgcaaattgataatgctaaactggctgctgaggacttcagactgaagtaggttccctaatacgtggcaaaagtttctgaaaaagaattcctttagtagtccttccagatactcagctttccatatcattgttgataaaggaagcacggttcaatg

SEQ ID NO: 10957 - protein, 133 aa, Homo sapiens
MQRLGTTPSVYGGAGGRGIRISNSRHTVNYGSDLTGGGDLFVGNEKMAMQNLNDRLASYLEKVRTLEQSNSKLEVQIKQWYETNAPRAGRDYSAYYRQIEELRSQIKDAQLQNARCVLQIDNAKLAAEDFRLK

SEQ ID NO: 10958 - DNA, 1466 bp, Homo sapiens
ggcagatgaaatataagattcatcaaccacatttgacagcccatggcaggtttcctgttttccatcgtccctctgcaggtcacagacacacagagcccagccgtggcaggctcagccggggtccggggctgctaacaacggctacattcctcccccagggccaagggaaatcctgagcgcaggccagggttgtttggttttgaggtgtgctgggatgaaaggcaccctggaagtggaaggttcggtcattcattaattaattacatctataattgagggtttgttcttaagagcgagtcctttgaaagtactttccttcaaacagtgactgccacaaaggcatcagatattcaccaccttctcggctgcctcagcacagcaagctttattctgggacctgagatcctgttctgagctggctttcccttctccaggctcgctcaccctccctttagagatagtggatggtaagatgaccaatgctcagattattcttctcattgacaatgccaggatggcagtggatgacttcaacctcaagaaatggagaagcatcatgtgccaagtgacttcaatgtcaatgtgaaggtggatacaggtcccagggaagatctgattaaggtcctggaggatatgagacaagaatatgagcttataataaagaagaagcatcgagacttggacacttggtataaagaacagtctgcagccatgtcccaggaggcagccagtccagccactgtgcagagcagacaaggtgacatccacgaactgaagcgcacattccaggccctggagattgacctgcagacacagtacagcacgaaatctgctttggaaaacatgttatccgagacccagtctcggtactcctgcaagctccaggacatgcaagagatcatctcccactatgaggaggaactgacgcagctacgccatgaactggagcggcagaacaatgaataccaagtgctgctgggcatcaaaacccacctggagaaggaaatcaccacgtaccgacggctcctggagggagagagtgaagggacacgggaagaatcaaagtcgagcatgaaagtgtctgcaactccaaagatcaaggccataacccaggagaccatcaacggaagattagttctttgtcaagtgaatgaaatccaaaagcacgcatgagaccaatgaaagtttccgcctgttgtaaaatctattttcccccaaggaaagtccttgcacagacaccagtgagtgagttctaaaagatacccttggaattatcagactcagaaacttttattttttttttctgtaacagtctcaccagacttctcataatgctcttaatatattgcacttttctaatcaaagtgcgagtttatgagggtaaagctctactttcctactgcagccttcagattctcatcattttgcatctattttgtagccaataaaactccgcactagctgca

SEQ ID NO: 10959 - protein, 209 aa, Homo sapiens
MEKHHVPSDFNVNVKVDTGPREDLIKVLEDMRQEYELIIKKKHRDLDTWYKEQSAAMSQEAASPATVQSRQGDIHELKRTFQALEIDLQTQYSTKSALENMLSETQSRYSCKLQDMQEIISHYEEELTQLRHELERQNNEYQVLLGIKTHLEKEITTYRRLLEGESEGTREESKSSMKVSATPKIKAITQETINGRLVLCQVNEIQKHA

SEQ ID NO: 10960 - DNA, 2151 bp, Homo sapiens
ggcagatgaaatataagattcatcaaccacatttgacagcccatggcaggtttcctgttttccatcgtccctctgcaggtcacagacacacagagcccagccgtggcaggctcagccggggtccggggctgctaacaacggctacattcctcccccagggccaagggaaatcctgagcgcaggccagggttgtttggttttgaggtgtgctgggatgaaaggcaccctggaagtggaaggtaaatgaacaatggaaaaacttcacggcaagattagaaagatacctgagcccaatacccgcctgatgtcgtgggccacacctccgggttaccaggggaagggaggaagcaaactgtcatattgatgtggctctaaacaacaacagtgtgcgaaggcccaggggcactttgggattgaccaagaggaaacacaagttgcacaatgatacaatcttgttggtacaattgtcagagaagggaactcccacagcaaaggccataaaaccatccagggcagtctggggcggctcagttctgcggtgccagggagtggagcagagctcagccccgtcccaaacacagatgggaccatgaactccggacacagcttcagccagaccccctcggcctccttccatggcgccggaggtggctggggccggcccaggagcttccccagggctcccaccgtccatggcggtgcggggggagcccgcatctccctgtccttcaccacgcggagctgcccaccccctggagggtcttggggttctggaagaagcagccccctactaggcggaaatgggaaggccaccatgcagaatctcaacgaccgcctggcctcctacctggagaaggttcgcgccctggaggaggccaacatgaagctggaaagccgcatcctgaaatggcaccagcagagagatcctggcagtaagaaagattattcccagtatgaggaaaacatcacacacctgcaggagcagatagtggatggtaagatgaccaatgctcagattattcttctcattgacaatgccaggatggcagtggatgacttcaacctcaagtatgaaaatgaacactcctttaagaaagacttggaaattgaagtcgagggcctccgaaggaccttagacaacctgaccattgtcacaacagacctagaacaggaggtggaaggaatgaggaaagagctcattctcatgaagaagcaccatgagcaggaaatggagaagcatcatgtgccaagtgacttcaatgtcaatgtgaaggtggatacaggtcccagggaagatctgattaaggtcctggaggatatgagacaagaatatgagcttataataaagaagaagcatcgagacttggacacttggtataaagaacagtctgcagccatgtcccaggaggcagccagtccagccactgtgcagagcagacaaggtgacatccacgaactgaagcgcacattccaggccctggagattgacctgcagacacagtacagcacgaaatctgctttggaaaacatgttatccgagacccagtctcggtactcctgcaagctccaggacatgcaagagatcatctcccactatgaggaggaactgacgcagctacgccatgaactggagcggcagaacaatgaataccaagtgctgctgggcatcaaaacccacctggagaaggaaatcaccacgtaccgacggctcctggagggagagagtgaagggacacgggaagaatcaaagtcgagcatgaaagtgtctgcaactccaaagatcaaggccataacccaggagaccatcaacggaagattagttctttgtcaagtgaatgaaatccaaaagcacgcatgagaccaatgaaagtttccgcctgttgtaaaatctattttcccccaaggaaagtccttgcacagacaccagtgagtgagttctaaaagatacccttggaattatcagactcagaaacttttattttttttttctgtaacagtctcaccagacttctcataatgctcttaatatattgcacttttctaatcaaagtgcgagtttatgagggtaaagctctactttcctactgcagccttcagattctcatcattttgcatctattttgtagccaataaaactccgcactagctgca

SEQ ID NO: 10961 - protein, 422 aa, Homo sapiens; identical to SEQ ID NO: 1789

SEQ ID NO: 10962 - DNA, 721 bp, Homo sapiens
acagcagtcactgcgctgcagggacagtccccaagtgccaaggcacagcctaaaggggcctgttcccaccatggcatccgtgacaagaaccaggagccagaatgcaggtttctgggacttgtcagctcccttctgagtgccctgttgaggattcctagaagtccagacacctcacccccctaacctggatggaccacgcagagccaataggaatacttttctgtggacgtgccatgttggaatcccagatctccctgccctgccagcccctgccagcttcctggggacccaactgaccctgaagaaagcctctgatgggcctagaacagagaaggtgacccaggaccttgcccagcctttctggacaactggaagacagttacgcttcgtcctccacctctccctccaacaaaaggatcttagcaagtgttggagaggtgctgaagtcgtattaggaccaaccagactttttctttgaggatactcagaaggagtgaaggagaatggaacagggggtgtgaataaatgagctttctccatgtgtgattcaaagtggtttaacccatgcctcaccttctagaacacccgtggccctctctagccatgagaagtgtcaccactagccatcaaaatgctcccaaaagtccaacctttgaccaaactacatttcagattttcatttcagattttcttaaattctggagaaaaaagaaaataaagt

SEQ ID NO: 10963 - protein, 51 aa, Homo sapiens
MPHLLEHPWPSLAMRSVTTSHQNAPKSPTFDQTTFQIFISDFLKFWRKKKI

SEQ ID NO: 10964 - DNA, 4987 bp, Homo sapiens
agctgagctccctgggtgatggctccttccacaagttctaacgtcccactgaaagcaagctgcaatttctgttgcttcttgtatcaattgcatgaaaggacgggcagtttcttttgatcctctggcatgccaaggcctgaatgccagtcctgggagccttaccagccctctaagaagaatcagaagcctgaccgggcgggaagtcctgacgcccttcccaggattgggcactgcggcagccccggcacagggcggggcccacctgaaccacattctcttgtcctgcccatcacagcgctgccaccaccgcctctggccctcagagggcggcaggcaacctctaagcttcctcctttcctctcttccccctttcctccctccctatgcccctgggtgcccgatccaggcttcaaagagacagctttcctgtacgcggtgtcctctgccgccctcacccacaccctggcccgggcctgcagcgctgggcgcatggagcgctgcacctgtgatgactctccggggctggagagccggcaggcctggcagtggggcgtgtgcggtgacaacctcaagtacagcaccaagtttctgagcaacttcctggggtccaagagaggaaacaaggacctgcgggcacgggcagacgcccacaatacccacgtgggcatcaaggctgtgaagagtggcctcaggaccacgtgtaagtgccatggcgtatcaggctcctgtgccgtgcgcacctgctggaagcagctctccccgttccgtgagacgggccaggtgctgaaactgcgctatgactcggctgtcaaggtgtccagtgccaccaatgaggccttgggccgcctagagctgtgggcccctgccaggcagggcagcctcaccaaaggcctggccccaaggtctggggacctggtgtacatggaggactcacccagcttctgccggcccagcaagtactcacctggcacagcaggtagggtgtgctcccgggaggccagctgcagcagcctgtgctgcgggcggggctatgacacccagagccgcctggtggccttctcctgccactgccaggtgcagtggtgctgctacgtggagtgccagcaatgtgtgcaggaggagcttgtgtacacctgcaagcactaggcctactgcccagcaagccagtctggcactgccaggacctcctgtggcacccttcaagctgcccagccggccctctgggcagactgtcatcacatgcatgcataaaccggcatgtgtgccaatgcacacgagtgtgccactcaccaccattccttggccagccttttgcctccctcgatactcaacaaagagaagcaaagcctcctcccttaacccaagcatccccaaccttgttgaggacttggagaggagggcagagtgagaaagacatggagggaaataagggagaccaagagcacagcaggactgaaattttggacgggagagaggggctattccatcttgcttcctgggatgaatggcttggagccagcatgttcttgggaggtgaactgctgggctaggaatgccaaggcaggcagtgccagctggaagtgaaggcgggagcctggctgagatgggtcaatcgggtcctgtggccctgctcaggtgcagtgggctccaggtgtcacacacctccaccactcccctggttttgctgtgccagagatggggagaaagcacaggtggtagaagccatccgttcagagaaaggagagctttctgtgcttgagtggacccgagtgagatctgtgccctggagccctgtgtccttgatttggcttttcaaatatgcctccgctgaggcctcattcttgtctcgagagctgggttatgcacactcacccagccgtgctcaaaactaccaccagtgcaggtaagacaggtgggagaactagccaccaaggcgggactcagtgcacctgaggttgaacagggagacaacggcccctccctgtgttccctgctggccaaaggaatcttcactcccagcgcagaggaggagggcaacagcttcctggtgcctggcagtgacgtggcgagctcagtttctcagctggctcttgagtgagctttggtgacttcctgtggctggggcctgcctggtctgtgacacccccataccagctgagttcacaatactgaagaacagctggctcacgagctatgacttgaagttacatttctattcttgtggctgctcatctagttaaggcttttgccctggctggggttataggtgcttgagtccttgctaagcctggctcctgggtagcctccttcagttcctaatggcctctcacttggccctcactttggctcttacttgaggaggagacgtgactttgataatttcctcagatcctgtggacattttcagcagcacctgccaaggccctctgtgaaaggaggagagactggtacctccacacaggcacacatggatgcacagcccctggaccaggctgggggttcctgttgcacatgcctctcttgttcaggatgaagaccttgcaggggtccccttgctggaggcattgtacttccccagagtggggcccgatgccacccaggaggaagtgacttctttcgggaagcccttggccactttgctggccctgccacgcccatctgtcagcttcctttctccctaaacctagagttgctgacccttcaccaacacaggaaatttcagaatcagctgaatgctcagaaacctcgcctgtgccagctccaggacaaaggcccgctgactgtgccctggccaactccctgagacctccaagggcgaggaggagctgcccagtctccagtggatcagggcagtctgctggatgctggaaggatttttgactgcagaggcccggctgagaagccaaactgacctgagcccctctcgttaaaatgacattgctgacccaagcacctggcccacaccttggcagcaggagaaaaatggggagagggctggttttctcctttcttccacttccccacagcatggagattttctctgccttcccaatccatcttgctcctccgagaccccaactctgcctccacccaggctcagtgctgggcgtaaggcagcagggacctcactggcagagcagggggcctgggagcaacgtggaggccagagcaccctgatccaccaacatgccacctgcattctgacttcatggctggcagtgccagggtcgtgggagggcaaagggcaggctctaaggcatctaggcagtggctggctgctaacatggacaccccaagtcaatggcacagtgcaggttctgagggctccttggcttgtggggtcttctctgtctgtctctctccctctcttcttccttgctctcatccctttcttttccagttacccctgaagacccacctcggccctcttggggcccctggggactagagtgaccactgacccctcattctacagctttaagggaaatgctcacagggtatttttgtctacctcaaatatatagtttttagagcaaaggagaataatttatatagctaagatatatgagaaagtatttatattatttatatagttgctatatttcacagacagcacaggtggggtttgtgtattttcccggaaaccctctgtctggggagatacagcctgacctgaccgggtcccccactgagcaggaggccgggtcgctgggaaggaggacaaacctgtattccatgactgggtctgtctcggagctggtaagcacatgtccgctctgtgatgagccctggtgggctccatccagaccctccttgtgatgtttttgtagattttctgcccttctgggtccaggcccccttcttctgctctggcaaaagtgtcttactcataatgataatgacaacgagaattcccacacctggcatttgtaaagcactttgctatttagaaacaaaaacttttacccctttcatctcacttgatttctccgttatctctgtgaggtaggtggggccacattactgtggccattttatagatgaggtccagagatggagagctgtgctcaaagtcacacctaagagacttgttcaatgaatatttactgaacatctccatagaccaggcactacgggctgacctgctctgagcccaggagccccaaagcctggataccactgtgagcccaagaactcagggaagcagttccttcccaggctgtgatcccagccttttggatctggatggcatgttggcacttcccccaagtggagtcccatgtctcaggggctttggctgcctgagaaggctggagagaccaggaacccatggaggccactccaaggggtccttctgcccacactgcccaagaagcttgggctacaccactgggcccctcccaacctacagatgaattttgattgctctcatttgtgttttgcttgtaaaaatgaattgttttccactggatttctggctgcttttgcaaaagtcagctgcgctggcagactgggcctgcatgtcctcctgcaggcagctagagtgagggagtctaatggacaggatgccccaagtgcccccgttgctcatggatgcccctgcctgcctctcatgagcacatagtcctgtcccctggtctagataagcccagctttcctggtacccttcatcacctggcagacagacagccccatgccaaccctggacattacttgcttttgaacctttcctttctcaacaaccatgaacttcaaatgctttctgtctcaggacactttagaataacaatggaagccatcacttattgagcaccccttatgtccatttattcaaccaatgattatttagggatctcttattgagcaccaggcagcatcctgggtgcttggtgcagcaaggaacaggaccaagtctctgcctcatggggctgacatcctagtgggtgagaaagacaataaaccaataaatgacatgccagttatttgc

SEQ ID NO: 10965 - protein, 339 aa, Homo sapiens
MPRPECQSWEPYQPSKKNQKPDRAGSPDALPRIGHCGSPGTGRGPPEPHSLVLPITALPPPPLALRGRQATSKLPPFLSSPFPPSLCPWVPDPGFKETAFLYAVSSAALTHTLARACSAGRMERCTCDDSPGLESRQAWQWGVCGDNLKYSTKFLSNFLGSKRGNKDLRARADAHNTHVGIKAVKSGLRTTCKCHGVSGSCAVRTCWKQLSPFRETGQVLKLRYDSAVKVSSATNEALGRLELWAPARQGSLTKGLAPRSGDLVYMEDSPSFCRPSKYSPGTAGRVCSREASCSSLCCGRGYDTQSRLVAFSCHCQVQWCCYVECQQCVQEELVYTCKH

SEQ ID NO: 10966 - DNA, 1484 bp, Homo sapiens
gagctgcgagcttgagcggcgcgaggagatgctagagggcgcagcgccgccagcaccatgcgccccccgcccgcgctggccctggccgggctctgcctgctggcgctgcccgccgccgccgcctcctacttcggcctgaccgggcgggaagtcctgacgcccttcccaggattgggcactgcggcagccccggcacagggcggggcccacctgaagcagtgtgacctgctgaagctgtcccggcggcagaagcagctctgccggagggagcccggcctggctgagaccctgagggatgctgcgcacctcggcctgcttgagtgccagtttcagttccggcatgagcgctggaactgtagcctggagggcaggatgggcctgctcaagagaggcttcaaagagacagctttcctgtacgcggtgtcctctgccgccctcacccacaccctggcccgggcctgcagcgctgggcgcatggagcgctgcacctgtgatgactctccggggctggagagccggcaggcctggcagtggggcgtgtgcggtgacaacctcaagtacagcaccaagtttctgagcaacttcctggggtccaagagaggaaacaaggacctgcgggcacgggcagacgcccacaatacccacgtgggcatcaaggctgtgaagagtggcctcaggaccacgtgtaagtgccatggcgtatcaggctcctgtgccgtgcgcacctgctggaagcagctctccccgttccgtgagacgggccaggtgctgaaactgcgctatgactcggctgtcaaggtgtccagtgccaccaatgaggccttgggccgcctagagctgtgggcccctgccaggcagggcagcctcaccaaaggcctggccccaaggtctggggacctggtgtacatggaggactcacccagcttctgccggcccagcaagtactcacctggcacagcaggtagggtgtgctcccgggaggccagctgcagcagcctgtgctgcgggcggggctatgacacccagagccgcctggtggccttctcctgccactgccaggtgcagtggtgctgctacgtggagtgccagcaatgtgtgcaggaggagcttgtgtacacctgcaagcactaggcctactgcccagcaagccagtctggcactgccaggacctcctgtggcacccttcaagctgcccagccggccctctgggcagactgtcatcacatgcatgcataaaccggcatgtgtgccaatgcacacgagtgtgccactcaccaccattccttggccagccttttgcctccctcgatactcaacaaagagaagcaaagcctcctcccttaacccaagcatccccaaccttgttgaggacttggagaggagggcagagtgagaaagacatggagggaaataagggagaccaagagcacagcaggactgaaattttggacgggagagaggggctattccatcttgcttcctgg

SEQ ID NO: 10967 - protein, 357 aa, Homo sapiens; identical to SEQ ID NO: 1793

SEQ ID NO: 10968 - DNA, 2654 bp, Homo sapiens
tgcgagcttgagcggcgcgaggagatgctagagggcgcagcgccgccagcaccatgcgccccccgcccgcgctggccctggccgggctctgcctgctggcgctgcccgccgccgccgcctcctacttcggcctgaccgggcgggaagtcctgacgcccttcccaggattgggcactgcggcagccccggcacagggcggggcccacctgaagcagtgtgacctgctgaagctgtcccggcggcagaagcagctctgccggagggagcccggcctggctgagaccctgagggatgctgcgcacctcggcctgcttgagtgccagtttcagttccggcatgagcgctggaactgtagcctggagggcaggatgggcctgctcaagagaggcttcaaagagacagctttcctgtacgcggtgtcctctgccgccctcacccacaccctggcccgggcctgcagcgctgggcgcatggagcgctgcacctgtgatgactctccggggctggagagccggcaggcctggcagtggggcgtgtgcggtgacaacctcaagtacagcaccaagtttctgagcaacttcctggggtccaagagaggaaacaaggacctgcgggcacgggcagacgcccacaatacccacgtgggcatcaaggctgtgaagagtggcctcaggaccacgtgtaagtgccatggcgtatcaggctcctgtgccgtgcgcacctgctggaagcagctctccccgttccgtgagacgggccaggtgctgaaactgcgctatgactcggctgtcaaggtgtccagtgccaccaatgaggccttgggccgcctagagctgtgggcccctgccaggcagggcagcctcaccaaaggcctggccccaaggtctggggacctggtgtacatggaggactcacccagcttctgccggcccagcaagtactcacctggcacagcaggttggagtgcagtggcaagatctcagctcatcacaacctccacctcccggattcaagcgattctcccgtctcagctgcctgagtaactgggattacaggcatgcaccaccacgcctgactaattttgtatttttggctaattttgtatttttagtagagatgaggtttctccatgttggtcaggctggtctcgaactcccgacctcaggtgatccacccgcctcggcctcccaaagtgctgggattaccggtgtgagccactgcgcctggccagcatttttttttttgagacagagtctcgctctgtcacccaggctggagtgcactggcatgatctctgctcactgcaacctccacctcccaggttcaagtgactctcttggctcagcctcccaagtagctgggactacaggcgtgcaccaccacgctcagctaatttttgtattttcagtagagatggacttttatcatgttggccaggctggtctcgaactcctggtctcaagtgatctgccagcctcagtctcccagggtgctgggattacaggtatgagccactgtgcccggccgccttagcattttgtgtatgttttgagtgacagccatctgtcaatattggcatcttttgttttattggatgaatgaatgaacaaatgaatttataaatcttgttctccatactgtttacccatcctcatttccctcacttggcagtgtcttgccatagcaggcttcctggtgtagctggcaccacatccctccctgacacacggcctccttattgcccctgctacttgcctttttctctcctccctttccttcccttcattccccctggcttccccttcccaactctcagaatccctggctgcctcaaccacaagaacaaagctgtgcagaagcctgaacctggagcttctgcaagatgaggtggggaatgagctaacccagctggaaagcagcctgctgatccctgggagagacggcgcttgggccaacccaccctccccaaggtggtcccctgcctcagctccacccgcttccccagatgaacttctttctctccctccagcgcttcagaggatgcacagctgtgtgtacttgaccctgagcctgggctagtgctggggacatagccagtctggctgatacccatatcagtacagaaagctgtcctcacccacttcatgcactagttgcattggtatgaagcattagctttataactatcccatttactgcaggcataaacctatatcaattggtggggatggaggttaaatgagagaagacatcaaagatgcatagaactattgggcccctttcaattaataaataaaatttgtaggaggccattagtttgtactgtgctcctgtaatggacccaacagaccaaacaaatatggagtcactcatgctaaatgcaattaacttgggagtatactcctaagttgcaaaaagtggtaacaaatagctgagttttggggcagttacagcagctgagcatctgtcaatgtaggtggccaggtgattcaattaaggatgctgtaaccaattaagctgtatctacacctcacttctgttttctatctacaaatactgcgtgatcatgttgctggttggagttctttgaataagctgtggttcggagggatgcccaattctagaatcatgaataaaagcctattaagatcttt

SEQ ID NO: 10969 - protein, 329 aa, Homo sapiens
MRPPPALALAGLCLLALPAAAASYFGLTGREVLTPFPGLGTAAAPAQGGAHLKQCDLLKLSRRQKQLCRREPGLAETLRDAAHLGLLECQFQFRHERWNCSLEGRMGLLKRGFKETAFLYAVSSAALTHTLARACSAGRMERCTCDDSPGLESRQAWQWGVCGDNLKYSTKFLSNFLGSKRGNKDLRARADAHNTHVGIKAVKSGLRTTCKCHGVSGSCAVRTCWKQLSPFRETGQVLKLRYDSAVKVSSATNEALGRLELWAPARQGSLTKGLAPRSGDLVYMEDSPSFCRPSKYSPGTAGWSAVARSQLITTSTSRIQAILPSQLPE

SEQ ID NO: 10970 - DNA, 393 bp, Homo sapiens
tccaccccctaccatggacacatgggtgaggccgggctccccgcctcactgcccttgagaccaaaggggcagccctggccctccctccctcccgtctcagctcagcggatcccccagagtggaggaggcctctccatgaggaggggagcagcccaaggcacctgtcctctgacccaccggcagcgagtgcgcaggtgtgagtgtaagttcatgtaggagagtgtatgcgtgtgcgcctgtgccctgcttgcaggcaagcagggctccctcatgtagccccgccttccccctgctgggggtccaccacatcgctgctctttctcacagtctgcctctgatgagggcgaattgctatgacattccaagctccaataaagactgtcccagactttg

SEQ ID NO: 10971 - protein, 64 aa, Homo sapiens
MGEAGLPASLPLRPKGQPWPSLPPVSAQRIPQSGGGLSMRRGAAQGTCPLTHRQRVRRCECKFM

SEQ ID NO: 10972 - DNA, 1279 bp, Homo sapiens
cggggacccacgccaggtggccagtgcatctggaaacccatttgccttggagctgaatgagctgacagcagagctgaaacggtcgctgccttccaccgacacgagactccggccagaccagaggtacctggaggaggggaacatacaggccgctgaggcccagaagagaaggatcgagcagctgcagcgagacaggcgcaaagtcatggaggaaaacaacatcgtacaccaggctcgcttcttcaggcggcagacggatagcagcgggaaagagtggtgggtgaccaacaatacctactggaggctgcgggccgagccaggctatgggaacatggatggggccgtgctctggtagccctggccccgggggcaggaggctctggttcctcactcctcctgcctccaccccctaccatggacacatgggtgaggccgggctccccgcctcactgcccttgagaccaaaggggcagccctggccctccctcccctctgctggccagagggtctgcatctcagcccacccccaaccccaccgtttggggtgagaagcagaatctgtgcttccccagtctccttgccccagacaaccagcatgtaagacccttcccgcttcaccattccgattcctgtcccctttggggtacttgggggagactctggctcccaggatctgttccctatttcagtgccttcctaggacacaggggactccttgacgctccccaggctttctgtgcccaggcctctgtccccagcggtgaggttgcagtgagtgaaggagaggaggtgatctgttctccctccccttctgcccatctccagcatcttcttccccttccctggccctgcagggccttctccagctccctttggttagtccctggccatccctcctgtcctggatcccttctccctaactgcaaaatgcctgcagcttccagctccttcgtccctgatcctcaagcggttccctcccgtctcagctcagcggatcccccagagtggaggaggcctctccatgaggaggggagcagcccaaggcacctgtcctctgacccaccggcagcgagtgcgcaggtgtgagtgtaagttcatgtaggagagtgtatgcgtgtgcgcctgtgccctgcttgcaggcaagcagggctccctcatgtagccccgccttccccctgctgggggtccaccacatcgctgctctttctcacagtctgcctctgatgagggcgaattgctatgacattccaagctccaataaagactgtcccagactttg

SEQ ID NO: 10973 - protein, 49 aa, Homo sapiens
MEENNIVHQARFFRRQTDSSGKEWWVTNNTYWRLRAEPGYGNMDGAVLW

SEQ ID NO: 10974 - DNA, 2845 bp, Homo sapiens
tgcagcagctgctgccactgctcagcgcggtgaggagggagccggtgactcggagacggtgactcagaggcagagcggcgcaagggccaaggagtactggcgtccatggaccctggggaccccgtcaggagcaggtgacatccttccccttccaccctgctccctgctctacatccccagcagggagtggcctctcccttctccatggacttccaagagagggacccgcccttcctgcctgagagcgctcagtcctcaaagcccagcagtgctcagcaggcctctgagctgtgggaggtggtggaggagcctcgggtcaggctggggacagagggtgtcatgcctgagaggcaggaaggtcacctgctcaagaagaggaagtggcctctgaagggctggcacaagagatactttgtgctcgaggacgggatccttcattatgcaacaacccggcaagacatcaccaaggggaagctccatggctccatcgatgtccggctgtcggtcatgtccatcaacaaaaaggcccagcgcattgaccttgacactgaagacaacatctaccacctcaagatcaaatcccaggacctattccagagctgggtggcgcagctgcgtgcccaccgcctagcccaccgcctggacatgccccgtggctcactgcccagtactgctcaccggaaggttcctggtgcccagcttccaacagcagctactgcctcagccctacctgggcttggaccgcgggagaaagtgtcttcctggctgagggacagtgatgggctggaccgctgctctcatgagctctctgagtgtcaggggaagctccaggaactacacaggctcctccagagcctggagtccctgcaccgaatcccctcagcccctgttatccccacacaccaggcctcagtgacaaccgaaagacccaagaaggggaaacggacaagccgcatgtggtgcacccagagctttgccaaggatgacaccattggacgggttggtcgtctccatggctctgttcccaacctgtctcgctacctggagtctcgggactcctcgggcacccgtgggctgccacccacagactatgcccacctgcagcgcagcttctgggccctggcccagaaggtgcacagctccctcagcagcgtcctggccgccctcaccatggaacgggaccaactgagggacatgcaccagggctcagagttgtcaagaatgggggtgaggcctgggggacagggtgactggtgcggggagagggcttcaagctgaggactgccagcctggggtccgatagcagatctgggtcagggtggggggttggcagaggcagtctctgcagagatgcggcaaggtggggaggacctcatcctcctggcaccgtgtccctcaccctctccctgcaggtctctgaggcctccactggccagaggcgcctccactcactgtccacctcctccgacaccacggcggactctttcagctccctcaaccctgaggagcaagaagctcttaccggggacccacgccaggtggccagtgcatctggaaacccaactcaatgccccccgaccatgagcgaaacttcggcttcacccagtttgccttggagctgaatgagctgacagcagagctgaaacggtcgctgccttccaccgacacgagactccggccagaccagaggtacctggaggaggggaacatacaggccgctgaggcccagaagagaaggatcgagcagctgcagcgagacaggcgcaaagtcatggaggaaaacaacatcgtacaccaggctcgcttcttcaggcggcagacggatagcagcgggaaagagtggtgggtgaccaacaatacctactggaggctgcgggccgagccaggctatgggaacatggatggggccgtgctctggtagccctggccccgggggcaggaggctctggttcctcactcctcctgcctccaccccctaccatggacacatgggtgaggccgggctccccgcctcactgcccttgagaccaaaggggcagccctggccctccctcccctctgctggccagagggtctgcatctcagcccacccccaaccccaccgtttggggtgagaagcagaatctgtgcttccccagtctccttgccccagacaaccagcatgtaagacccttcccgcttcaccattccgattcctgtcccctttggggtacttgggggagactctggctcccaggatctgttccctatttcagtgccttcctaggacacaggggactccttgacgctccccaggctttctgtgcccaggcctctgtccccagcggtgaggttgcagtgagtgaaggagaggaggtgatctgttctccctccccttctgcccatctccagcatcttcttccccttccctggccctgcagggccttctccagctccctttggttagtccctggccatccctcctgtcctggatcccttctccctaactgcaaaatgcctgcagcttccagctccttcgtccctgatcctcaagcggttccctcccgtctcagctcagcggatcccccagagtggaggaggcctctccatgaggaggggagcagcccaaggcacctgtcctctgacccaccggcagcgagtgcgcaggtgtgagtgtaagttcatgtaggagagtgtatgcgtgtgcgcctgtgccctgcttgcaggcaagcagggctccctcatgtagccccgccttccccctgctgggggtccaccacatcgctgctctttctcacagtctgcctctgatgagggcgaattgctatgacattccaagctccaataaagactgtcccagactttg

SEQ ID NO: 10975 - protein, 357 aa, Homo sapiens
MDFQERDPPFLPESAQSSKPSSAQQASELWEVVEEPRVRLGTEGVMPERQEGHLLKKRKWPLKGWHKRYFVLEDGILHYATTRQDITKGKLHGSIDVRLSVMSINKKAQRIDLDTEDNIYHLKIKSQDLFQSWVAQLRAHRLAHRLDMPRGSLPSTAHRKVPGAQLPTAATASALPGLGPREKVSSWLRDSDGLDRCSHELSECQGKLQELHRLLQSLESLHRIPSAPVIPTHQASVTTERPKKGKRTSRMWCTQSFAKDDTIGRVGRLHGSVPNLSRYLESRDSSGTRGLPPTDYAHLQRSFWALAQKVHSSLSSVLAALTMERDQLRDMHQGSELSRMGVRPGGQGDWCGERASS

SEQ ID NO: 10976 - DNA, 3709 bp, Homo sapiens
ggggagatccggctagaggggaggctctgacatctccttccttcctggttcctgcagcagctgctgccactgctcagcgcggtgaggagggagccggtgactcggagacggtgactcagaggcagagcggcgcaagggccaaggagtactggcgtccatggaccctggggaccccgtcaggagcaggtgacatccttccccttccaccctgctccctgctctacatccccagcagggagtggcctctcccttctccatggacttccaagagagggacccgcccttcctgcctgagagcgctcagtcctcaaagcccagcagtgctcagcaggcctctgagctgtgggaggtggtggaggagcctcgggtcaggctggggacagagggtgtcatgcctgagaggcaggaaggtcacctgctcaagaagaggaagtggcctctgaagggctggcacaagagatactttgtgctcgaggacgggatccttcattatgcaacaacccggcaagacatcaccaaggggaagctccatggctccatcgatgtccggctgtcggtcatgtccatcaacaaaaaggcccagcgcattgaccttgacactgaagacaacatctaccacctcaagatcaaatcccaggacctattccagagctgggtggcgcagctgcgtgcccaccgcctagcccaccgcctggacatgccccgtggctcactgcccagtactgctcaccggaaggttcctggtgcccagcttccaacagcagctactgcctcagccctacctgggcttggaccgcgggagaaagtgtcttcctggctgagggacagtgatgggctggaccgctgctctcatgagctctctgagtgtcaggggaagctccaggaactacacaggctcctccagagcctggagtccctgcaccgaatcccctcagcccctgttatccccacacaccaggcctcagtgacaaccgaaagacccaagaaggggaaacggacaagccgcatgtggtgcacccagagctttgccaaggatgacaccattggacgggttggtcgtctccatggctctgttcccaacctgtctcgctacctggagtctcgggactcctcgggcacccgtgggctgccacccacagactatgcccacctgcagcgcagcttctgggccctggcccagaaggtgcacagctccctcagcagcgtcctggccgccctcaccatggaacgggaccaactgagggacatgcaccagggctcagagttgtcaagaatgggggtctctgaggcctccactggccagaggcgcctccactcactgtccacctcctccgacaccacggcggactctttcagctccctcaaccctgaggagcaagaagctctgtacatgaaggggcgcgagctcaccccccagctatcgcagaccagcatcctgtcccttgctgattcccacacggagttcttcgatgcctgcgaggttctcctctccgccagctcttctgagaatgagggctcagaggaggaggagtcctgtaccagtgaaatcaccaccagcctgtctgaggagatgctggacctcaggggagctgagcgctgtcagaaaggggggtgtgttccagggagacccatggggccaccccgccgtcgctgcctgccggcggccagcgggcctggggctgacgtgagcctgtggaacattctgcgcaacaacatcggcaaagacctgtccaaggtgtcaatgcctgtgcagctcaacgagccgctcaacactctgcagcggctctgcgaggagctggagtacagcagcctcctggaccaggccagccgcatcgccgacccctgcgagcgcatggtgtacatcgcagcctttgctgtctcggcctactcctccacataccaccgagccggctgcaagcccttcaaccctgtcctgggggagacctacgagtgtgagcggcctgaccgaggcttccgcttcatcagtgagcaggtctcccaccacccccctatctcggcctgccatgcagagtctgagaacttcgccttctggcaagatatgaagtggaagaacaagttctggggcaaatccctggagattgtgcctgtgggaacagtcaacgtcagcctgcccaggtttggggaccactttgagtggaacaaggtgacatcctgcattcacaatgtcctgagtggtcagcgctggatcgagcactatggggaggtgctcatccgaaacacacaggacagctcctgccactgcaagatcaccttctgcaaggccaagtactggagttccaatgtccacgaggtgcagggcgctgtgctcagtcggagtggccgtgtcctccaccgactctttgggaagtggcacgaggggctgtaccggggacccacgccaggtggccagtgcatctggaaacccaactcaatgccccccgaccatgagcgaaacttcggcttcacccagtttgccttggagctgaatgagctgacagcagagctgaaacggtcgctgccttccaccgacacgagactccggccagaccagaggtacctggaggaggggaacatacaggccgctgaggcccagaagagaaggatcgagcagctgcagcgagacaggcgcaaagtcatggaggaaaacaacatcgtacaccaggctcgcttcttcaggcggcagacggatagcagcgggaaagagtggtgggtgaccaacaatacctactggaggctgcgggccgagccaggctatgggaacatggatggggccgtgctctggtagccctggccccgggggcaggaggctctggttcctcactcctcctgcctccaccccctaccatggacacatgggtgaggccgggctccccgcctcactgcccttgagaccaaaggggcagccctggccctccctcccctctgctggccagagggtctgcatctcagcccacccccaaccccaccgtttggggtgagaagcagaatctgtgcttccccagtctccttgccccagacaaccagcatgtaagacccttcccgcttcaccattccgattcctgtcccctttggggtacttgggggagactctggctcccaggatctgttccctatttcagtgccttcctaggacacaggggactccttgacgctccccaggctttctgtgcccaggcctctgtccccagcggtgaggttgcagtgagtgaaggagaggaggtgatctgttctccctccccttctgcccatctccagcatcttcttccccttccctggccctgcagggccttctccagctccctttggttagtccctggccatccctcctgtcctggatcccttctccctaactgcaaaatgcctgcagcttccagctccttcgtccctgatcctcaagcggttccctcccgtctcagctcagcggatcccccagagtggaggaggcctctccatgaggaggggagcagcccaaggcacctgtcctctgacccaccggcagcgagtgcgcaggtgtgagtgtaagttcatgtaggagagtgtatgcgtgtgcgcctgtgccctgcttgcaggcaagcagggctccctcatgtagccccgccttccccctgctgggggtccaccacatcgctgctctttctcacagtctgcctctgatgagggcgaattgctatgacattccaagctccaataaagactgtcccagactttg

SEQ ID NO: 10977 - protein, 842 aa, Homo sapiens; identical to SEQ ID NO: 1795

SEQ ID NO: 10978 - DNA, 3355 bp, Homo sapiens
ggggagatccggctagaggggaggctctgacatctccttccttcctggttcctgcagcagctgctgccactgctcagcgcggtgaggagggagccggtgactcggagacggtgactcagaggcagagcggcgcaagggccaaggagtactggcgtccatggaccctggggaccccgtcaggagcaggtgacatccttccccttccaccctgctccctgctctacatccccagcagggagtggcctctcccttctccatggacttccaagagagggacccgcccttcctgcctgagagcgctcagtcctcaaagcccagcagtgctcagcaggcctctgagctgtgggaggtggtggaggagcctcgggtcaggctggggacagagggtgtcatgcctgagaggcaggaaggtcacctgctcaagaagaggaagtggcctctgaagggctggcacaagagatactttgtgctcgaggacgggatccttcattatgcaacaacccggcaagacatcaccaaggggaagctccatggctccatcgatgtccggctgtcggtcatgtccatcaacaaaaaggcccagcgcattgaccttgacactgaagacaacatctaccacctcaagatcaaatcccaggacctattccagagctgggtggcgcagctgcgtgcccaccgcctagcccaccgcctggacatgccccgtggctcactgcccagtactgctcaccggaaggttcctggtgcccagcttccaacagcagctactgcctcagccctacctgggcttggaccgcgggagaaagtgtcttcctggctgagggacagtgatgggctggaccgctgctctcatgagctctctgagtgtcaggggaagctccaggaactacacaggctcctccagagcctggagtccctgcaccgaatcccctcagcccctgttatccccacacaccaggcctcagtgacaaccgaaagacccaagaaggggaaacggacaagccgcatgtggtgcacccagagctttgccaaggatgacaccattggacgggttggtcgtctccatggctctgttcccaacctgtctcgctacctggagtctcgggactcctcgggcacccgtgggctgccacccacagactatgcccacctgcagcgcagcttctgggccctggcccagaaggtgcacagctccctcagcagcgtcctggccgccctcaccatggaacgggaccaactgagggacatgcaccagggctcagagttgtcaagaatgggggtctctgaggcctccactggccagaggcgcctccactcactgtccacctcctccgacaccacggcggactctttcagctccctcaaccctgaggagcaagaagctctgtacatgaaggggcgcgagctcaccccccagctatcgcagaccagcatcctgtcccttgctgattcccacacggagttcttcgatgcctgcgaggttctcctctccgccagctcttctgagaatgagggctcagaggaggaggagtcctgtaccagtgaaatcaccaccagcctgtctgaggagatgctggacctcaggggagctgagcgctgtcagaaaggggggtgtgttccagggagacccatggggccaccccgccgtcgctgcctgccggcggccagcgggcctggggctgacgtgagcctgtggaacattctgcgcaacaacatcggcaaagacctgtccaaggtgtcaatgcctgtgcagctcaacgagccgctcaacactctgcagcggctctgcgaggagctggagtacagcagcctcctggaccaggccagccgcatcgccgacccctgcgagcgcatggtgtacatcgcagcctttgctgtctcggcctactcctccacataccaccgagccggctgcaagcccttcaaccctgtcctgggggagacctacgagtgtgagcggcctgaccgaggcttccgcttcatcagtgagcaggtctcccaccacccccctatctcggcctgccatgcagagtctgagaacttcgccttctggcaagatatgaagtggaagaacaagttctggggcaaatccctggagattgtgcctgtgggaacagtcaacgtcagcctgcccaggtttggggaccactttgagtggaacaaggtgacatcctgcattcacaatgtcctgagtggtcagcgctggatcgagcactatggggaggtgctcatccgaaacacacaggacagctcctgccactgcaagatcaccttctgcaaggccaagtactggagttccaatgtccacgaggtgcagggcgctgtgctcagtcggagtggccgtgtcctccaccgactctttgggaagtggcacgaggggctgtaccggggacccacgccaggtggccagtgcatctggaaacccaactcaatgccccccgaccatgagcgaaacttcggcttcacccagtttgccttggagctgaatgagctgacagcagagctgaaacggtcgctgccttccaccgacacgagactccggccagaccagaggtacctggaggaggggaacatacaggccgctgaggcccagaagagaaggatcgagcagctgcagcgagacaggcgcaaagtcatggaggaaaacaacatcgtacaccaggctcgcttcttcaggcggcagacggatagcagcgggaaagagtggtgggtgaccaacaatacctactggaggctgcgggccgagccaggctatgggaacatggatggggccgtgctctggtagccctggccccgggggcaggaggctctggttcctcactcctcctgcctccaccccctaccatggacacatgggtgaggccgggctccccgcctcactgcccttctgcccatctccagcatcttcttccccttccctggccctgcagggccttctccagctccctttggttagtccctggccatccctcctgtcctggatcccttctccctaactgcaaaatgcctgcagcttccagctccttcgtccctgatcctcaagcggttccctcccgtctcagctcagcggatcccccagagtggaggaggcctctccatgaggaggggagcagcccaaggcacctgtcctctgacccaccggcagcgagtgcgcaggtgtgagtgtaagttcatgtaggagagtgtatgcgtgtgcgcctgtgccctgcttgcaggcaagcagggctccctcatgtagccccgccttccccctgctgggggtccaccacatcgctgctctttctcacagtctgcctctgatgagggcgaattgctatgacattccaagctccaataaagactgtcccagactttg

SEQ ID NO: 10979 - protein, 842 aa, Homo sapiens; identical to SEQ ID NO: 1795

SEQ ID NO: 10980 - DNA, 1159 bp, Homo sapiens
gcagcagctgctgccactgctcagcgcggtgaggagggagccggtgactcggagacggtgactcagaggcagagcggcgcaagggccaaggagtactggcgtccatggaccctggggaccccgtcaggagcaggtgacatccttccccttccaccctgctccctgctctacatccccagcagggagtggcctctcccttctccatggacttccaagagagggacccgcccttcctgcctgagagcgctcagtcctcaaagcccagcagtgctcagcaggcctctgagctgtgggaggtggtggaggagcctcgggtcaggctggggacagagggtgtcatgcctgagaggcaggaaggtcacctgctcaagaagaggaagtggcctctgaagggctggcacaagagatactttgtgctcgaggacgggatccttcattatgcaacaacccggcaagacgtgagcccgggcagtggcttggggttgtgggaggagtctggccccagtatgccctgggcaggcatggggtatctggaatcgaccagagcagggtctgaatcccaggtccaccacttgctgaatgtgtgatctcgggcaagttacatccctgggccatagcttcctcacctctaatgggagagcaccatcccccaggtgcagagctgtcatggtaagggaggtcatacgtacaaggctctctggacagggcagaataagtgcccaagaaatgggggctttaccaccctcatcctggtcccattctcaggctgggaacaaggaactgaaggcctgggtacccaggatctctctgggagggtgttgccttccacaaccctgcagacccctgagggtgggaatagtttttcttgatctgtgacttcttagagaccaagatgtgacttgacgtaggggagcgttctgcacatgggaggatgattgacaagtctctactgatagtgtgacttggacatgagggtgaacctgccacctggcccttgagcctagaatggcatcagggagatggtggctctatggctctgagagcctaaaacaggtcccctctccctctaccaacacttcacccccagatcaccaaggggaagctccatggctccatcgatgtccggctgtcggtcatgtccatcaacaaaaaggcccag

SEQ ID NO: 10981 - protein, 127 aa, Homo sapiens [sequence omitted]

SEQ ID NO: 10982 - DNA, 2618 bp, Homo sapiens
agcatcaccaggagggcttgttagaacactatttgtgacccgtcttggtaacatagtgaaacctggtctctacaaaacaaaacaaacaaaaaacactatttgctaggctccaccccagaattgctgattcagtaggtctaggcagggcctgagaatttatgtttatttttctttctttctttctttttttttttttgagacagtcttgctctgtcacccaggccggagtgccggagtgcaatggcacaatctcggctcactgcaacctctgcctcttgggttcaagcaattctcatggctcagccacctgagtagctgggactacaggtgtgtgccaccacgcctggctaatttttgtagtttagttagagacggggtttcaccatgttggccaggttggtcttgaattcctgacctcaagtgagctgcccaccttggcctcccaaagtgttgggattacaggcgtgagccaccacacccagcaaaatttctaacaagctctcaaatgatgctgatgttgctggttggggtggaggtggggcataccttgagagccactagattagaccaggggttggcgtattatggcagggccagtcactgtgttttataaaattctattggtacatagtttctgctgtctctttaaatattgtctgtggctgcttttggcagagttgagcattagagacagattacatgggccccaaacttaaaatatttactgtttgaccattttaagaaaaagtttatttaaccttatcccctttttctttctctctctctctctctctttccttccttccttccttccttctttttttttctgagacggagtcttactctgtgcccaggctagagtgcagtggcatgatctcggctcactgcaacctccacctcccgggttcaagcgattctcctgcctcagcctctcaagtagctgggattacaggccggctgcctaccctccagactgtccgctatggctccaaggctgttacccgccaccgtcgtgtgatgcactttcagcggcagaagctgatggctgtgactgaatatatccccccgaaaccagccatccacccatcatgcctgccatctcctcccagccccccacaggaggagataggcctcatcaggcttctccgccgggagatagcagcagttttccaggacaaccgaatgatagccgtctgccagaatgtggctctgagtgcagaggacaagcttcttatgcgacaccagctgcggaaacacaagatcctgatgaaggtcttccccaaccaggtcctgaagcccttcctggaggattccaagtaccaaaatctgctgcccctttttgtggggcacaacatgctgctggtcagtgaagagcccaaggtcaaggagatggtacggatcttaaggactgtgccattcctgccgctgctaggtggctgcattgatgacaccatcctcagcaggcagggctttatcaactactccaagctccccagcctgcccctggtgcagggggagcttgtaggaggcctcacctgcctcacagcccagacccactccctgctccagcaccagcccctccagctgaccaccctgttggaccagtacatcagagagcaacgcgagaaggattctgtcatgtcggccaatgggaagccagatcctgacactgttccggactcgtagccagcctgtttagccagccctgcgcataaatacactctgcgttattggctgtgctctcctcaatgggacatgtggaagaacttggggtcggggagtgtgtttgtcacttggttttcactagtaatgatattgtcaggtatagggccacttggagatgcagaggattccatttcagatgtcagtcaccggcttcgtccttagttttcccaacttgggacgtgataggagcaaagtctctccattctccaggtccaaggcagagatcctgaaaagatagggctattgtcccctgcctccttggtcactgcctcttgctgcacgggctcctgagcccacccccttggggcacaacctgccactgccacagtagctcaaccaagcagttgtgctgagaatggcacctggtgagagcctgctgtgtgccaggctttgtgctgagtgctgtacatgtattagttcctttactgctgaccacattgtacccatttcacagagaaggagcagagaaattaagtggcttgctcaaggtcatgcagttagtaagtggcagaacagggacttgaaccaagccctctgctctgaagaccgcgtcctgaatttcttcactagagcttcctcatcaggttacccagaagtgggtcccatccaccatccaggtgtgcttggatgttagttctccaccctcgaggtgtacgctgtgaaaagtttgggagcactgctttataataaaatgaaatatattctacttcctttattttgtggtttacacggttgtcctccctctaaacttactctcaggggcttctctgtcatctgactttcctcactcttgcttcccttcctaggaaaatcctcttcccctatacctgttcccacaaatggcatcccgcgcatgcttgccctattaaaggcagctgacagctgtacccact

SEQ ID NO: 10983 - protein, 271 aa, Homo sapiens; identical to SEQ ID NO: 1799

SEQ ID NO: 10984 - DNA, 1882 bp, Homo sapiens
attcttccggtggagatggctgcggccgtggcggggatgctgcgagggggtctcctgccccaggcgggtaaggagtggcccaggtcctcacggcgtgtcttgcggccgctctctagtcctcatctgccctcctctactactgattcttcccataatctctgaccccagctagatcgctggcctccttaccccgtccagttccttgtgactcgactggccggctgcctaccctccagactgtccgctatggctccaaggctgttacccgccaccgtcgtgtgatgcactttcagcggcagaagctgatggctgtgactgaatatatccccccgaaaccagccatccacccatcatgcctgccatctcctcccagccccccacaggaggagataggcctcatcaggcttctccgccgggagatagcagcagttttccaggacaaccgaatgatagccgtctgccagaatgtggctctgagtgcagaggacaagcttcttatgcgacaccagctgcggaaacacaagatcctgatgaaggtcttccccaaccaggtcctgaagcccttcctggaggattccaagtaccaaaatctgctgcccctttttgtggggcacaacatgctgctggtcagtgaagagcccaaggtcaaggagatggtacggatcttaaggactgtgccattcctgccgctgctaggtggctgcattgatgacaccatcctcagcaggcagggctttatcaactactccaagctccccagcctgcccctggtgcagggggagcttgtaggaggcctcacctgcctcacagcccagacccactccctgctccagcaccagcccctccagctgaccaccctgttggaccagtacatcagagagcaacgcgagaaggattctgtcatgtcggccaatgggaagccagatcctgacactgttccggactcgtagccagcctgtttagccagccctgcgcataaatacactctgcgttattggctgtgctctcctcaatgggacatgtggaagaacttggggtcggggagtgtgtttgtcacttggttttcactagtaatgatattgtcaggtatagggccacttggagatgcagaggattccatttcagatgtcagtcaccggcttcgtccttagttttcccaacttgggacgtgataggagcaaagtctctccattctccaggtccaaggcagagatcctgaaaagatagggctattgtcccctgcctccttggtcactgcctcttgctgcacgggctcctgagcccacccccttggggcacaacctgccactgccacagtagctcaaccaagcagttgtgctgagaatggcacctggtgagagcctgctgtgtgccaggctttgtgctgagtgctgtacatgtattagttcctttactgctgaccacattgtacccatttcacagagaaggagcagagaaattaagtggcttgctcaaggtcatgcagttagtaagtggcagaacagggacttgaaccaagccctctgctctgaagaccgcgtcctgaatttcttcactagagcttcctcatcaggttacccagaagtgggtcccatccaccatccaggtgtgcttggatgttagttctccaccctcgaggtgtacgctgtgaaaagtttgggagcactgctttataataaaatgaaatatattctacttcctttattttgtggtttacacggttgtcctccctctaaacttactctcaggggcttctctgtcatctgactttcctcactcttgcttcccttcctaggaaaatcctcttcccctatacctgttcccacaaatggcatcccgcgcatgcttgccctattaaaggcagctgacagctgtacccact

SEQ ID NO: 10985 - protein, 222 aa, Homo sapiens
MHFQRQKLMAVTEYIPPKPAIHPSCLPSPPSPPQEEIGLIRLLRREIAAVFQDNRMIAVCQNVALSAEDKLLMRHQLRKHKILMKVFPNQVLKPFLEDSKYQNLLPLFVGHNMLLVSEEPKVKEMVRILRTVPFLPLLGGCIDDTILSRQGFINYSKLPSLPLVQGELVGGLTCLTAQTHSLLQHQPLQLTTLLDQYIREQREKDSVMSANGKPDPDTVPDS

SEQ ID NO: 10986 - DNA, 1842 bp, Homo sapiens
ggcttccgtccattcttccggtggagatggctgcggccgtggcggggatgctgcgagggggtctcctgccccaggcgggctagagtgcagtggcatgatctcggctcactgcaacctccacctcccgggttcaagcgattctcctgcctcagcctctcaagtagctgggattacaggccggctgcctaccctccagactgtccgctatggctccaaggctgttacccgccaccgtcgtgtgatgcactttcagcggcagaagctgatggctgtgactgaatatatccccccgaaaccagccatccacccatcatgcctgccatctcctcccagccccccacaggaggagataggcctcatcaggcttctccgccgggagatagcagcagttttccaggacaaccgaatgatagccgtctgccagaatgtggctctgagtgcagaggacaagcttcttatgcgacaccagctgcggaaacacaagatcctgatgaaggtcttccccaaccaggtcctgaagcccttcctggaggattccaagtaccaaaatctgctgcccctttttgtggggcacaacatgctgctggtcagtgaagagcccaaggtcaaggagatggtacggatcttaaggactgtgccattcctgccgctgctaggtggctgcattgatgacaccatcctcagcaggcagggctttatcaactactccaagctccccagcctgcccctggtgcagggggagcttgtaggaggcctcacctgcctcacagcccagacccactccctgctccagcaccagcccctccagctgaccaccctgttggaccagtacatcagagagcaacgcgagaaggattctgtcatgtcggccaatgggaagccagatcctgacactgttccggactcgtagccagcctgtttagccagccctgcgcataaatacactctgcgttattggctgtgctctcctcaatgggacatgtggaagaacttggggtcggggagtgtgtttgtcacttggttttcactagtaatgatattgtcaggtatagggccacttggagatgcagaggattccatttcagatgtcagtcaccggcttcgtccttagttttcccaacttgggacgtgataggagcaaagtctctccattctccaggtccaaggcagagatcctgaaaagatagggctattgtcccctgcctccttggtcactgcctcttgctgcacgggctcctgagcccacccccttggggcacaacctgccactgccacagtagctcaaccaagcagttgtgctgagaatggcacctggtgagagcctgctgtgtgccaggctttgtgctgagtgctgtacatgtattagttcctttactgctgaccacattgtacccatttcacagagaaggagcagagaaattaagtggcttgctcaaggtcatgcagttagtaagtggcagaacagggacttgaaccaagccctctgctctgaagaccgcgtcctgaatttcttcactagagcttcctcatcaggttacccagaagtgggtcccatccaccatccaggtgtgcttggatgttagttctccaccctcgaggtgtacgctgtgaaaagtttgggagcactgctttataataaaatgaaatatattctacttcctttattttgtggtttacacggttgtcctccctctaaacttactctcaggggcttctctgtcatctgactttcctcactcttgcttcccttcctaggaaaatcctcttcccctatacctgttcccacaaatggcatcccgcgcatgcttgccctattaaaggcagctgacagctgtacccact

SEQ ID NO: 10987 - protein, 271 aa, Homo sapiens; identical to SEQ ID NO: 1799

SEQ ID NO: 10988 - DNA, 1749 bp, Homo sapiens
cactcggcttccgtccattcttccggtggagatggctgcggccgtggcggggatgctgcgagggggtctcctgccccaggcgggccggctgcctaccctccagactgtccgctatggctccaaggctgttacccgccaccgtcgtgtgatgcactttcagcggcagaagctgatggctgtgactgaatatatccccccgaaaccagccatccacccatcatgcctgccatctcctcccagccccccacaggaggagataggcctcatcaggcttctccgccgggagatagcagcagttttccaggacaaccgaatgatagccgtctgccagaatgtggctctgagtgcagaggacaagcttcttatgcgacaccagctgcggaaacacaagatcctgatgaaggtcttccccaaccaggtcctgaagcccttcctggaggattccaagtaccaaaatctgctgcccctttttgtggggcacaacatgctgctggtcagtgaagagcccaaggtcaaggagatggtacggatcttaaggactgtgccattcctgccgctgctaggtggctgcattgatgacaccatcctcagcaggcagggctttatcaactactccaagctccccagcctgcccctggtgcagggggagcttgtaggaggcctcacctgcctcacagcccagacccactccctgctccagcaccagcccctccagctgaccaccctgttggaccagtacatcagagagcaacgcgagaaggattctgtcatgtcggccaatgggaagccagatcctgacactgttccggactcgtagccagcctgtttagccagccctgcgcataaatacactctgcgttattggctgtgctctcctcaatgggacatgtggaagaacttggggtcggggagtgtgtttgtcacttggttttcactagtaatgatattgtcaggtatagggccacttggagatgcagaggattccatttcagatgtcagtcaccggcttcgtccttagttttcccaacttgggacgtgataggagcaaagtctctccattctccaggtccaaggcagagatcctgaaaagatagggctattgtcccctgcctccttggtcactgcctcttgctgcacgggctcctgagcccacccccttggggcacaacctgccactgccacagtagctcaaccaagcagttgtgctgagaatggcacctggtgagagcctgctgtgtgccaggctttgtgctgagtgctgtacatgtattagttcctttactgctgaccacattgtacccatttcacagagaaggagcagagaaattaagtggcttgctcaaggtcatgcagttagtaagtggcagaacagggacttgaaccaagccctctgctctgaagaccgcgtcctgaatttcttcactagagcttcctcatcaggttacccagaagtgggtcccatccaccatccaggtgtgcttggatgttagttctccaccctcgaggtgtacgctgtgaaaagtttgggagcactgctttataataaaatgaaatatattctacttcctttattttgtggtttacacggttgtcctccctctaaacttactctcaggggcttctctgtcatctgactttcctcactcttgcttcccttcctaggaaaatcctcttcccctatacctgttcccacaaatggcatcccgcgcatgcttgccctattaaaggcagctgacagctgtacccact

SEQ ID NO: 10989 - protein, 261 aa, Homo sapiens [sequence omitted]

SEQ ID NO: 10990 - DNA, 2439 bp, Homo sapiens
agcatcaccaggagggcttgttagaacactatttgtgacccgtcttggtaacatagtgaaacctggtctctacaaaacaaaacaaacaaaaaacactatttgctaggctccaccccagaattgctgattcagtaggtctaggcagggcctgagaatttatgtttatttttctttctttctttctttttttttttttgagacagtcttgctctgtcacccaggccggagtgccggagtgcaatggcacaatctcggctcactgcaacctctgcctcttgggttcaagcaattctcatggctcagccacctgagtagctgggactacaggtgtgtgccaccacgcctggctaatttttgtagtttagttagagacggggtttcaccatgttggccaggttggtcttgaattcctgacctcaagtgagctgcccaccttggcctcccaaagtgttgggattacaggcgtgagccaccacacccagcaaaatttctaacaagctctcaaatgatgctgatgttgctggttggggtggaggtggggcataccttgagagccactagattagaccaggggttggcgtattatggcagggccagtcactgtgttttataaaattctattggtacatagtttctgctgtctctttaaatattgtctgtggctgcttttggcagagttgagcattagagacagattacatgggccccaaacttaaaatatttactgtttgaccattttaagaaaaagtttatttaaccttatcccctttttctttctctctctctctctctctttccttccttccttccttccttctttttttttctgagacggagtcttactctgtgcccaggctagagtgcagtggcatgatctcggctcactgcaacctccacctcccgggttcaagcgattctcctgcctcagcctctcaagtagctgggattacaggccggctgcctaccctccagactgtccgctatggctccaaggctgttacccgccaccgtcgtgtgatgcactttcagcggcagaagctgatggctgtgactgaatatatccccccgaaaccagccatccacccatcatgcctgccatctcctcccagccccccacaggaggagataggcctcatcaggcttctccgccgggagatagcagcagttttccaggacaaccgaatgatagccgtctgccagaatgtggctctgagtgcagaggacaagcttcttatgcgacaccagctgcggaaacacaagatcctgatgaaggtcttccccaaccaggtcctgaagcccttcctggaggattccaagtaccaaaatctgctgcccctttttgtggggcacaacatgctgctggtcagtgaagagcccaaggtcaaggagatggtacggatcttaaggactgtgccattcctgccgctgctaggtggctgcattgatgacaccatcctcagcaggcagggctttatcaactactccaagctccccagcctgcccctggtgcagggggagcttgtaggaggcctcacctgcctcacagcccagacccactccctgctccagcaccagcccctccagctgaccaccctgttggaccagtacatcagagagcaacgcgagaaggattctgtcatgtcggccaatgggaagccagatcctgacactgttccggactcgtagccagcctgtttagccagccctgcgcataaatacactctgcgttattggctgtgctctcctcaatgggacatgtggaagaacttggggtcggggagtgtgtttgtcacttggttttcactagtaatgatattgtcaggtatagggccacttggagatgcagaggattccatttcagatgtcagtcaccggcttcgtccttagttttcccaacttgggacgtgataggagcaaagtctctccattctccaggtccaaggcagagatcctgaaaagatagggctattgtcccctgcctccttggtcactgcctcttgctgcacgggctcctgagcccacccccttggggcacaacctgccactgccacagtagctcaaccaagcagttgtgctgagaatggcacctggtgagagcctgctgtgtgccaggctttgtgctgagtgctgtacatgtattagttcctttactgctgaccacattgtacccatttcacagagaaggagcagagaaattaagtggcttgctcaaggtcatgcagttagtaagtggcagaacagggacttgaaccaagccctctgctctgaagaccgcgtcctgaatttcttcactagagcttcctcatcaggttacccagaagtgggtcccatccaccatccaggtgtgcttggatgttagttctccaccctcgaggtgtacgctgtgaaaagtttgggagcactgctttataataaaatgaaatatattctacttccttt

SEQ ID NO: 10991 - protein, 271 aa, Homo sapiens; identical to SEQ ID NO: 1799

SEQ ID NO: 10992 - DNA, 1703 bp, Homo sapiens
attcttccggtggagatggctgcggccgtggcggggatgctgcgagggggtctcctgccccaggcgggtaaggagtggcccaggtcctcacggcgtgtcttgcggccgctctctagtcctcatctgccctcctctactactgattcttcccataatctctgaccccagctagatcgctggcctccttaccccgtccagttccttgtgactcgactggccggctgcctaccctccagactgtccgctatggctccaaggctgttacccgccaccgtcgtgtgatgcactttcagcggcagaagctgatggctgtgactgaatatatccccccgaaaccagccatccacccatcatgcctgccatctcctcccagccccccacaggaggagataggcctcatcaggcttctccgccgggagatagcagcagttttccaggacaaccgaatgatagccgtctgccagaatgtggctctgagtgcagaggacaagcttcttatgcgacaccagctgcggaaacacaagatcctgatgaaggtcttccccaaccaggtcctgaagcccttcctggaggattccaagtaccaaaatctgctgcccctttttgtggggcacaacatgctgctggtcagtgaagagcccaaggtcaaggagatggtacggatcttaaggactgtgccattcctgccgctgctaggtggctgcattgatgacaccatcctcagcaggcagggctttatcaactactccaagctccccagcctgcccctggtgcagggggagcttgtaggaggcctcacctgcctcacagcccagacccactccctgctccagcaccagcccctccagctgaccaccctgttggaccagtacatcagagagcaacgcgagaaggattctgtcatgtcggccaatgggaagccagatcctgacactgttccggactcgtagccagcctgtttagccagccctgcgcataaatacactctgcgttattggctgtgctctcctcaatgggacatgtggaagaacttggggtcggggagtgtgtttgtcacttggttttcactagtaatgatattgtcaggtatagggccacttggagatgcagaggattccatttcagatgtcagtcaccggcttcgtccttagttttcccaacttgggacgtgataggagcaaagtctctccattctccaggtccaaggcagagatcctgaaaagatagggctattgtcccctgcctccttggtcactgcctcttgctgcacgggctcctgagcccacccccttggggcacaacctgccactgccacagtagctcaaccaagcagttgtgctgagaatggcacctggtgagagcctgctgtgtgccaggctttgtgctgagtgctgtacatgtattagttcctttactgctgaccacattgtacccatttcacagagaaggagcagagaaattaagtggcttgctcaaggtcatgcagttagtaagtggcagaacagggacttgaaccaagccctctgctctgaagaccgcgtcctgaatttcttcactagagcttcctcatcaggttacccagaagtgggtcccatccaccatccaggtgtgcttggatgttagttctccaccctcgaggtgtacgctgtgaaaagtttgggagcactgctttataataaaatgaaatatattctacttccttt

SEQ ID NO: 10993 - protein, 222 aa, Homo sapiens; identical to SEQ ID NO: 10985

SEQ ID NO: 10994 - DNA, 1663 bp, Homo sapiens
ggcttccgtccattcttccggtggagatggctgcggccgtggcggggatgctgcgagggggtctcctgccccaggcgggctagagtgcagtggcatgatctcggctcactgcaacctccacctcccgggttcaagcgattctcctgcctcagcctctcaagtagctgggattacaggccggctgcctaccctccagactgtccgctatggctccaaggctgttacccgccaccgtcgtgtgatgcactttcagcggcagaagctgatggctgtgactgaatatatccccccgaaaccagccatccacccatcatgcctgccatctcctcccagccccccacaggaggagataggcctcatcaggcttctccgccgggagatagcagcagttttccaggacaaccgaatgatagccgtctgccagaatgtggctctgagtgcagaggacaagcttcttatgcgacaccagctgcggaaacacaagatcctgatgaaggtcttccccaaccaggtcctgaagcccttcctggaggattccaagtaccaaaatctgctgcccctttttgtggggcacaacatgctgctggtcagtgaagagcccaaggtcaaggagatggtacggatcttaaggactgtgccattcctgccgctgctaggtggctgcattgatgacaccatcctcagcaggcagggctttatcaactactccaagctccccagcctgcccctggtgcagggggagcttgtaggaggcctcacctgcctcacagcccagacccactccctgctccagcaccagcccctccagctgaccaccctgttggaccagtacatcagagagcaacgcgagaaggattctgtcatgtcggccaatgggaagccagatcctgacactgttccggactcgtagccagcctgtttagccagccctgcgcataaatacactctgcgttattggctgtgctctcctcaatgggacatgtggaagaacttggggtcggggagtgtgtttgtcacttggttttcactagtaatgatattgtcaggtatagggccacttggagatgcagaggattccatttcagatgtcagtcaccggcttcgtccttagttttcccaacttgggacgtgataggagcaaagtctctccattctccaggtccaaggcagagatcctgaaaagatagggctattgtcccctgcctccttggtcactgcctcttgctgcacgggctcctgagcccacccccttggggcacaacctgccactgccacagtagctcaaccaagcagttgtgctgagaatggcacctggtgagagcctgctgtgtgccaggctttgtgctgagtgctgtacatgtattagttcctttactgctgaccacattgtacccatttcacagagaaggagcagagaaattaagtggcttgctcaaggtcatgcagttagtaagtggcagaacagggacttgaaccaagccctctgctctgaagaccgcgtcctgaatttcttcactagagcttcctcatcaggttacccagaagtgggtcccatccaccatccaggtgtgcttggatgttagttctccaccctcgaggtgtacgctgtgaaaagtttgggagcactgctttataataaaatgaaatatattctacttccttt

SEQ ID NO: 10995 - protein, 271 aa, Homo sapiens; identical to SEQ ID NO: 1799

SEQ ID NO: 10996 - DNA, 1570 bp, Homo sapiens
cactcggcttccgtccattcttccggtggagatggctgcggccgtggcggggatgctgcgagggggtctcctgccccaggcgggccggctgcctaccctccagactgtccgctatggctccaaggctgttacccgccaccgtcgtgtgatgcactttcagcggcagaagctgatggctgtgactgaatatatccccccgaaaccagccatccacccatcatgcctgccatctcctcccagccccccacaggaggagataggcctcatcaggcttctccgccgggagatagcagcagttttccaggacaaccgaatgatagccgtctgccagaatgtggctctgagtgcagaggacaagcttcttatgcgacaccagctgcggaaacacaagatcctgatgaaggtcttccccaaccaggtcctgaagcccttcctggaggattccaagtaccaaaatctgctgcccctttttgtggggcacaacatgctgctggtcagtgaagagcccaaggtcaaggagatggtacggatcttaaggactgtgccattcctgccgctgctaggtggctgcattgatgacaccatcctcagcaggcagggctttatcaactactccaagctccccagcctgcccctggtgcagggggagcttgtaggaggcctcacctgcctcacagcccagacccactccctgctccagcaccagcccctccagctgaccaccctgttggaccagtacatcagagagcaacgcgagaaggattctgtcatgtcggccaatgggaagccagatcctgacactgttccggactcgtagccagcctgtttagccagccctgcgcataaatacactctgcgttattggctgtgctctcctcaatgggacatgtggaagaacttggggtcggggagtgtgtttgtcacttggttttcactagtaatgatattgtcaggtatagggccacttggagatgcagaggattccatttcagatgtcagtcaccggcttcgtccttagttttcccaacttgggacgtgataggagcaaagtctctccattctccaggtccaaggcagagatcctgaaaagatagggctattgtcccctgcctccttggtcactgcctcttgctgcacgggctcctgagcccacccccttggggcacaacctgccactgccacagtagctcaaccaagcagttgtgctgagaatggcacctggtgagagcctgctgtgtgccaggctttgtgctgagtgctgtacatgtattagttcctttactgctgaccacattgtacccatttcacagagaaggagcagagaaattaagtggcttgctcaaggtcatgcagttagtaagtggcagaacagggacttgaaccaagccctctgctctgaagaccgcgtcctgaatttcttcactagagcttcctcatcaggttacccagaagtgggtcccatccaccatccaggtgtgcttggatgttagttctccaccctcgaggtgtacgctgtgaaaagtttgggagcactgctttataataaaatgaaatatattctacttccttt

SEQ ID NO: 10997 - protein, 261 aa, Homo sapiens [sequence omitted]

SEQ ID NO: 10998 - DNA, 1486 bp, Homo sapiens
ggcgtccagtctcttagcaacgactccggcttcctaggaactgctcctttctcaaccattcctgcccacaacaccccagcttgctgccagcaaagcccctccacacccctcaaactccagacccttcacatcaatttactgttttcttcgacctcaccccagcaattttctctgaatcaaccccctttcctcctctcctaagtctctgagtttctctctcctcctgccatcctgagttctgccatccttaggggccgccaagacctctcttttcgttcctctcccgcctcagaccagcagccttttattttagatcatgtctggagggaagtcagcccagggtccagaggaagggggcgtctgcatcactgaagcccttatcactaagcggaacttgactttccctgaagatggggaactgtcagagaagatgtttcacactcttgatgaactgcagactgtccgcctggaccgggaggggattactactatcaggaacttagaaggcctccagaatcttcacagtctctatctgcaagggaataagatccagcaaattgagaacctggcttgcatcccctccttgcgcttcctgtctctggcaggaaaccaaatcaggcaggtggaaaacctcctcgacctcccatgcctccagtttctggacctttctgagaacctgatagaaacattgaagctggatgagttcccccagagccttctcatcctcaacctgtctggaaacagctgcaccaaccaggatggctaccgcgagctggtgacagaagccctgccacttctcctggacctggacgggcagcctgtggtggagcgctggatttcggatgaggaggatgaagcctcaagcgatgaggagttcccagagctgagtggcccattctgctcagaacgaggcttcctcaaggagctggagcaggagctgagcaggcacagggagcaccggcaacagacggccctgacagagcacctgctgaggatggagatgcagcccaccctcaccgacctgcccctgctacctggggtgcccatggctggggacagcagcccttctgccactcctgcgcaaggggaggagacagtccctgaggccgtctcctcaccccaggcctcctctcccaccaagaaaccatgcagtctgattcccaggggccaccaaagctctttctggggaaggaagggggcacgagcagccacagcccccaaggcctctgtggctgaggcccccagcacaaccaaaactacggccaagagaagcaagaaatgattctctgtcaacctttctctactagtggagaggagtggggcctgcccctcttctcagacctctgacctgtgacagaagcccatccccagtaaagtgtctctaggccctgagtatgcttttcatgtcacttggggtatctcaggggaagaaaccagtgaaagctccaggaaacaaaatacagagctcagtgagccacctgattct

SEQ ID NO: 10999 - protein, 321 aa, Homo sapiens; identical to SEQ ID NO: 1801

SEQ ID NO: 11000 - DNA, 2577 bp, Homo sapiens
ggcgtccagtctcttagcaacgactccggcttcctaggaactgctcctttctcaaccattcctgcccacaacaccccagcttgctgccagcaaagcccctccacacccctcaaactccagacccttcacatcaatttactgttttcttcgacctcaccccagcaattttctctgaatcaaccccctttcctcctctcctaagtctctgagtttctctctcctcctgccatcctgagttctgccatccttaggggccgccaagacctctcttttcgttcctctcccgcctcagaccagcagccttttattttagatcatgtctggagggaagtcagcccagggtccagaggaagggggcgtctgcatcactgaagcccttatcactaagcggaacttgactttccctgaagatggggaactgtcagagaagatgtttcacactcttgatgaactgcagactgtccgcctggaccgggaggggattactactatcaggaacttagaaggcctccagaatcttcacagtctctatctgcaagggaataagatccagcaaattgagaacctggcttgcatcccctccttgcgcttcctgtctctggcaggaaaccaaatcaggcaggtggaaaacctcctcgacctcccatgcctccagtttctggacctttctgagaacctgatagaaacattgaagctggatgagttcccccagagccttctcatcctcaacctgtctggaaacagctgcaccaaccaggatggctaccgcgagctggtgacagaagccctgccacttctcctggacctggacgggcagcctgtggtggagcgctggatttcggatgaggaggatgaagcctcaagcgatgaggagttcccagagctgagtggcccattctgctcagaacgaggcttcctcaaggagctggagcaggagctgagcaggcacagggagcaccggcaacagacggccctgacagagcacctgctgaggatggagatgcagcccaccctcaccgacctgcccctgctacctggggtgcccatggctggggacagcagcccttctgccactcctgcgcaaggggaggagacagtccctgaggccgtctcctcaccccaggcctcctctcccaccaagaaaccatgcagtctgattcccaggggccaccaaagctctttctggggaaggaagggggcacgagcagccacagcccccaaggcctctgtggctgaggcccccagcacaaccaaaactacggccaagagaagcaagaaatgattctctgtcaacctttctctactagtggagaggagtggggcctgcccctcttctcagacctctgacctgtgacagaagcccatccccagtaaagtgtctctaggccctgagtatgcttttcatgtcacttggggtatctcaggggaagaaaccagtgaaagctccaggaaacaaaatacagagctcagtgagccacctgattctaaagagcgagtctggaatctttcgggagctacccacagggcaggcatgcctcaggcccccgctggcttcctggctcccacttgggcaggaagcgggcaccacctcatggaagaggcatgccatctcactgccacccctagcgagtgcccttccccggtccaagccaaggaccaaggagctgtggtcctagtcatccccaacagcagccagctcctgtcccctccctgtcctcctgcccagtccccatcactcacccactcataggaatgagtacacaaccacaggccccgcagccagcccacagctgcctttgggcctcacttggctctcccacccccactggtcctgggataaagttcactgaagagaaaataaagcacatttattaaggcaaaggccaagctggccgctcagaacatggccaaggagcgtgaagggattgctccactttaccaccactcagggcacccaggccccaggggtcctgggtccaccccaggccagcagaagctatgaagcttacgcataagcctggctctccctcttcacgaaggcctggaagaggctgcccagctcccagaggggtggggcccactcgccggccagcagcccctgtgtggcctcgaggccttcctgctccagatcctgctgtttctgctggagctgctgcccccgatcctgccccaagggaaagctgagatgagtctgtccgggacaggcttcccgccaggtgaaggggggactgtgtaccacctcacacaagcaggagaaaggagataccccccgacattccccaaaggcagttgctggctttgaagggaggaactcctctccccagctctgaaatctcttccactccctagttccttcatatttccagagtcccactgggagtgggggaggtctatcatcccctcaaggtagcccctactccctgggggatacctgatctctctccatcagccccagggctgcctggtgtccacggtagagggtatgccgacgatctacctgagtctggaatcggggcagggtccgaacagggtcttgtgctccaaaagtgggggacagcacctggggggcctgggcca

SEQ ID NO: 11001 - protein, 321 aa, Homo sapiens; identical to SEQ ID NO: 1801

SEQ ID NO: 11002 - DNA, 2335 bp, Homo sapiens
tctcaaccattcctgcccacaacaccccagcttgctgccagcaaagcccctccacacccctcaaactccagacccttcacatcaatttactgttttcttcgacctcaccccagcaattttctctgaatcaaccccctttcctcctctcctaagtctctgagtttctctctcctcctgccatcctgagttctgccatccttaggggccgccaagacctctcttttcgttcctctcccgcctcagaccagcagccttttattttagatcatgtctggagggaagtcagcccagggtccagaggaagggggcgtctgcatcactgaagcccttatcactaagcggaacttgactttccctgaagatggggaactgtcagagaagatgcactcagcaatgttgtggaatgaatgaatgggtggatggaacaagtgcttttttctccatgaacgactcaaaaggaaggtttcacactcttgatgaactgcagactgtccgcctggaccgggaggggattactactatcaggaacttagaaggcctccagaatcttcacagtctctatctgcaaggggtaacttctttctccacccttcccctccccttgacccctgtggacctaatctgtctcatctgaaaggagccaaccaggtcatcctgcccattccctggtgttcaggcaggcagaccttcatttaaaccattcccagacgaatgacatagggtcctgaattgaaaaactaattccctcaaaatagatcctgaacatgacctgtgctccttccactgttctttaggcacttctcttgatctagaagttctttttggcatctactctaaatctttcacgttaaatagctccagcccatttcctgttttgaagaagaggaaactatgaagattcctgtacatcattcagatcctacttgaaggctgtttggtggtggtggtggtggttggttgatcttcagccttcccctggttgagtattcccagctcgcttcaactttccccatagaaactttaaccgtcaagttcctgtatgctcattgttctctctgtgtatgcaagccaccaccaaggccctttccgttttcctggtggcttcttagtttccttttctgattcccaggtcactctttggttgtggaatcagaagagtatacgtagtcaggtttagataccccaggtttacacccttaaccatccacatggggaaagaaaatcatctttcttaaggtagtggcaacctgttcaaggagtggggtgatcattcccaaagtgccagatctccagctgcagagtagacatggtcttggggctttgtccccgtaaagggcccctgacgcatctgatctcagcttggtttccccacttcggtttcttcttgcagaataagatccagcaaattgagaacctggcttgcatcccctccttgcgcttcctgtctctggcaggaaaccaaatcaggcaggtggaaaacctcctcgacctcccatgcctccagtttctggacctttctgagaacctgatagaaacattgaagctggatgagttcccccagagccttctcatcctcaacctgtctggaaacagctgcaccaaccaggatggctaccgcgagctggtgacagaagccctgccacttctcctggacctggacgggcagcctgtggtggagcgctggatttcggatgaggaggatgaagcctcaagcgatgaggagttcccagagctgagtggcccattctgctcagaacgaggcttcctcaaggagctggagcaggagctgagcaggcacagggagcaccggcaacagacggccctgacagagcacctgctgaggatggagatgcagcccaccctcaccgacctgcccctgctacctggggtgcccatggctggggacagcagcccttctgccactcctgcgcaaggggaggagacagtccctgaggccgtctcctcaccccaggcctcctctcccaccaagaaaccatgcagtctgattcccaggggccaccaaagctctttctggggaaggaagggggcacgagcagccacagcccccaaggcctctgtggctgaggcccccagcacaaccaaaactacggccaagagaagcaagaaatgattctctgtcaacctttctctactagtggagaggagtggggcctgcccctcttctcagacctctgacctgtgacagaagcccatccccagtaaagtgtctctaggccctgagtatgcttttcatgtcacttggggtatctcaggggaagaaaccagtgaaagctccaggaaacaaaatacagagctcagtgagccacctgattct

SEQ ID NO: 11003 - protein, 274 aa, Homo sapiens
MVLGLCPRKGPLTHLISAWFPHFGFFLQNKIQQIENLACIPSLRFLSLAGNQIRQVENLLDLPCLQFLDLSENLIETLKLDEFPQSLLILNLSGNSCTNQDGYRELVTEALPLLLDLDGQPVVERWISDEEDEASSDEEFPELSGPFCSERGFLKELEQELSRHREHRQQTALTEHLLRMEMQPTLTDLPLLPGVPMAGDSSPSATPAQGEETVPEAVSSPQASSPTKKPCSLIPRGHQSSFWGRKGARAATAPKASVAEAPSTTKTTAKRSKK

SEQ ID NO: 11004 - DNA, 3426 bp, Homo sapiens
tctcaaccattcctgcccacaacaccccagcttgctgccagcaaagcccctccacacccctcaaactccagacccttcacatcaatttactgttttcttcgacctcaccccagcaattttctctgaatcaaccccctttcctcctctcctaagtctctgagtttctctctcctcctgccatcctgagttctgccatccttaggggccgccaagacctctcttttcgttcctctcccgcctcagaccagcagccttttattttagatcatgtctggagggaagtcagcccagggtccagaggaagggggcgtctgcatcactgaagcccttatcactaagcggaacttgactttccctgaagatggggaactgtcagagaagatgcactcagcaatgttgtggaatgaatgaatgggtggatggaacaagtgcttttttctccatgaacgactcaaaaggaaggtttcacactcttgatgaactgcagactgtccgcctggaccgggaggggattactactatcaggaacttagaaggcctccagaatcttcacagtctctatctgcaaggggtaacttctttctccacccttcccctccccttgacccctgtggacctaatctgtctcatctgaaaggagccaaccaggtcatcctgcccattccctggtgttcaggcaggcagaccttcatttaaaccattcccagacgaatgacatagggtcctgaattgaaaaactaattccctcaaaatagatcctgaacatgacctgtgctccttccactgttctttaggcacttctcttgatctagaagttctttttggcatctactctaaatctttcacgttaaatagctccagcccatttcctgttttgaagaagaggaaactatgaagattcctgtacatcattcagatcctacttgaaggctgtttggtggtggtggtggtggttggttgatcttcagccttcccctggttgagtattcccagctcgcttcaactttccccatagaaactttaaccgtcaagttcctgtatgctcattgttctctctgtgtatgcaagccaccaccaaggccctttccgttttcctggtggcttcttagtttccttttctgattcccaggtcactctttggttgtggaatcagaagagtatacgtagtcaggtttagataccccaggtttacacccttaaccatccacatggggaaagaaaatcatctttcttaaggtagtggcaacctgttcaaggagtggggtgatcattcccaaagtgccagatctccagctgcagagtagacatggtcttggggctttgtccccgtaaagggcccctgacgcatctgatctcagcttggtttccccacttcggtttcttcttgcagaataagatccagcaaattgagaacctggcttgcatcccctccttgcgcttcctgtctctggcaggaaaccaaatcaggcaggtggaaaacctcctcgacctcccatgcctccagtttctggacctttctgagaacctgatagaaacattgaagctggatgagttcccccagagccttctcatcctcaacctgtctggaaacagctgcaccaaccaggatggctaccgcgagctggtgacagaagccctgccacttctcctggacctggacgggcagcctgtggtggagcgctggatttcggatgaggaggatgaagcctcaagcgatgaggagttcccagagctgagtggcccattctgctcagaacgaggcttcctcaaggagctggagcaggagctgagcaggcacagggagcaccggcaacagacggccctgacagagcacctgctgaggatggagatgcagcccaccctcaccgacctgcccctgctacctggggtgcccatggctggggacagcagcccttctgccactcctgcgcaaggggaggagacagtccctgaggccgtctcctcaccccaggcctcctctcccaccaagaaaccatgcagtctgattcccaggggccaccaaagctctttctggggaaggaagggggcacgagcagccacagcccccaaggcctctgtggctgaggcccccagcacaaccaaaactacggccaagagaagcaagaaatgattctctgtcaacctttctctactagtggagaggagtggggcctgcccctcttctcagacctctgacctgtgacagaagcccatccccagtaaagtgtctctaggccctgagtatgcttttcatgtcacttggggtatctcaggggaagaaaccagtgaaagctccaggaaacaaaatacagagctcagtgagccacctgattctaaagagcgagtctggaatctttcgggagctacccacagggcaggcatgcctcaggcccccgctggcttcctggctcccacttgggcaggaagcgggcaccacctcatggaagaggcatgccatctcactgccacccctagcgagtgcccttccccggtccaagccaaggaccaaggagctgtggtcctagtcatccccaacagcagccagctcctgtcccctccctgtcctcctgcccagtccccatcactcacccactcataggaatgagtacacaaccacaggccccgcagccagcccacagctgcctttgggcctcacttggctctcccacccccactggtcctgggataaagttcactgaagagaaaataaagcacatttattaaggcaaaggccaagctggccgctcagaacatggccaaggagcgtgaagggattgctccactttaccaccactcagggcacccaggccccaggggtcctgggtccaccccaggccagcagaagctatgaagcttacgcataagcctggctctccctcttcacgaaggcctggaagaggctgcccagctcccagaggggtggggcccactcgccggccagcagcccctgtgtggcctcgaggccttcctgctccagatcctgctgtttctgctggagctgctgcccccgatcctgccccaagggaaagctgagatgagtctgtccgggacaggcttcccgccaggtgaaggggggactgtgtaccacctcacacaagcaggagaaaggagataccccccgacattccccaaaggcagttgctggctttgaagggaggaactcctctccccagctctgaaatctcttccactccctagttccttcatatttccagagtcccactgggagtgggggaggtctatcatcccctcaaggtagcccctactccctgggggatacctgatctctctccatcagccccagggctgcctggtgtccacggtagagggtatgccgacgatctacctgagtctggaatcggggcagggtccgaacagggtcttgtgctccaaaagtgggggacagcacctggggggcctgggcca

SEQ ID NO: 11005 - protein, 274 aa, Homo sapiens; identical to SEQ ID NO: 11003

SEQ ID NO: 11006 - DNA, 300 bp, Homo sapiens
ctgagcaggcacagggagcaccggcaacagacggccctgacagagcacctgctgaggatggagatgcagcccaccctcaccgacctgcccctgctacctggggtgcccatggctggggacagcagcccttctgccactcctgcgcaaggggaggagacagtccctgaggccgtctcctcaccccaggcctcctctcccaccaagaaaccatgcagtctgattcccatggggcctgcccctcttctcagacctctgacctgtgacagaagcccatccccagtaaagtgtctctaggccctg

SEQ ID NO: 11007 - protein, 78 aa, Homo sapiens
MEMQPTLTDLPLLPGVPMAGDSSPSATPAQGEETVPEAVSSPQASSPTKKPCSLIPMGPAPLLRPLTCDRSPSPVKCL

SEQ ID NO: 11008 - DNA, 1274 bp, Homo sapiens
caaaacgtaggctccatgagggtaggtagttctcttctccaccatgttctcagcacctcgcccagtgcctggcatagaatagatgctcaatggtaaatgaaccactccccgatctcctccacagagggggcccgcaacatctccaaccagctgagcattggcacggacatctcggcccaacacccggagctgcggactcatgcccaggccaagggctggtgggatgggcagggtgcctttgactttgctcagatcttctccctgacccagcagcctgtgcgcatggaggctgccaaggcccgcttccaggcagggcgggagctgctgcggcaacggcaagggggcatcacggcagaggtgatgatgggcatcctcagagacaaggagagtggtatctgtatggactcgggaggctttcgcaccacggccagcatggtgtctgtcctgccccaggatcccacgcagccctgcgtgcactttcttaccgccacgccagacccatccaggtctgtgttcaaacctttcatcttcgggatgggggtggcccaggccccccaggtgctgtcccccacttttggagcacaagaccctgttcggaccctgccccgattccagactcaggtagatcgtcggcataccctctaccgtggacaccaggcagccctggggctgatggagagagatcaggtatcccccagggagtaggggctaccttgaggggatgatagacctcccccactcccagtgggactctggaaatatgaaggaactagggagtggaagagatttcagagctggggagaggagttcctcccttcaaagccagcaactgcctttggggaatgtcggggggtatctcctttctcctgcttgtgtgaggtggtacacagtccccccttcacctggcgggaagcctgtcccggacagactcatctcagctttcccttggggcaggatcgggggcagcagctccagcagaaacagcaggatctggagcaggaaggcctcgaggccacacaggggctgctggccggcgagtgggccccacccctctgggagctgggcagcctcttccaggccttcgtgaagagggagagccaggcttatgcgtaagcttcatagcttctgctggcctggggtggacccaggacccctggggcctgggtgccctgagtggtggtaaagtggagcaatcccttcacgctccttggccatgttctgagcggccagcttggcctttgccttaataaatgtgctttattttctcttcagtg

SEQ ID NO: 11009 - protein, 202 aa, Homo sapiens
MNHSPISSTEGARNISNQLSIGTDISAQHPELRTHAQAKGWWDGQGAFDFAQIFSLTQQPVRMEAAKARFQAGRELLRQRQGGITAEVMMGILRDKESGICMDSGGFRTTASMVSVLPQDPTQPCVHFLTATPDPSRSVFKPFIFGMGVAQAPQVLSPTFGAQDPVRTLPRFQTQVDRRHTLYRGHQAALGLMERDQVSPRE

SEQ ID NO: 11010 - DNA, 1250 bp, Homo sapiens
gcgccattctcctaccatagcaccttcctgctggctgaccgcactgaggcgtgggtgctggagacagctgggaggctctgggctgcacagaggatccaggagggggcccgcaacatctccaaccagctgagcattggcacggacatctcggcccaacacccggagctgcggactcatgcccaggccaagggctggtgggatgggcagggtgcctttgactttgctcagatcttctccctgacccagcagcctgtgcgcatggaggctgccaaggcccgcttccaggcagggcgggagctgctgcggcaacggcaagggggcatcacggcagaggtgatgatgggcatcctcagagacaaggagagtggtatctgtatggactcgggaggctttcgcaccacggccagcatggtgtctgtcctgccccaggatcccacgcagccctgcgtgcactttcttaccgccacgccagacccatccaggtctgtgttcaaacctttcatcttcgggatgggggtggcccaggccccccaggtgctgtcccccacttttggagcacaagaccctgttcggaccctgccccgattccagactcaggtagatcgtcggcataccctctaccgtggacaccaggcagccctggggctgatggagagagatcaggtatcccccagggagtaggggctaccttgaggggatgatagacctcccccactcccagtgggactctggaaatatgaaggaactagggagtggaagagatttcagagctggggagaggagttcctcccttcaaagccagcaactgcctttggggaatgtcggggggtatctcctttctcctgcttgtgtgaggtggtacacagtccccccttcacctggcgggaagcctgtcccggacagactcatctcagctttcccttggggcaggatcgggggcagcagctccagcagaaacagcaggatctggagcaggaaggcctcgaggccacacaggggctgctggccggcgagtgggccccacccctctgggagctgggcagcctcttccaggccttcgtgaagagggagagccaggcttatgcgtaagcttcatagcttctgctggcctggggtggacccaggacccctggggcctgggtgccctgagtggtggtaaagtggagcaatcccttcacgctccttggccatgttctgagcggccagcttggcctttgccttaataaatgtgctttattttctcttcagtg

SEQ ID NO: 11011 - protein, 140 aa, Homo sapiens
MEAAKARFQAGRELLRQRQGGITAEVMMGILRDKESGICMDSGGFRTTASMVSVLPQDPTQPCVHFLTATPDPSRSVFKPFIFGMGVAQAPQVLSPTFGAQDPVRTLPRFQTQVDRRHTLYRGHQAALGLMERDQVSPRE

SEQ ID NO: 11012 - DNA, 1832 bp, Homo sapiens
ccggctccgaccccgaggccgaaggccttccaggtcacctgagagtctccgcccaatggggcggccctggccagaagcggaggaggtggcacccgggaccgagctggggtcttggaggaagagaggatggcgtcgtcgagccctgactccccatgttcctgcgactgctttgtctccgtgcccccggcctcagccatcccggctgtgatctttgccaagaactcggaccgaccccgggacgaggtgcaggaggtggtgtttgtccccgcaggcactcacactcctgggagccggctccagtgcacctacattgaagtggaacaggtgtcgaagacgcacgctgtgattctgagccgtccttcttggctatggggggctgagatgggcgccaacgagcatggtgtctgcattggcaacgaggctgtgtggacgaaggagccagttggggagggggaagccctgctgggcatggacctactcaggctggctttggaacggagcagctctgcccaggaggccttgcatgtgatcacagggttactggagcactatgggcaggggggcaactgcctggaggatgctgcgccattctcctaccatagcaccttcctgctggctgaccgcactgaggcgtgggtgctggagacagctgggaggctctgggctgcacagaggatccaggagggggcccgcaacatctccaaccagctgagcattggcacggacatctcggcccaacacccggagctgcggactcatgcccaggccaagggctggtgggatgggcagggtgcctttgactttgctcagatcttctccctgacccagcagcctgtgcgcatggaggctgccaaggcccgcttccaggcagggcgggagctgctgcggcaacggcaagggggcatcacggcagaggtgatgatgggcatcctcagagacaaggagagtggtatctgtatggactcgggaggctttcgcaccacggccagcatggtgtctgtcctgccccaggatcccacgcagccctgcgtgcactttcttaccgccacgccagacccatccaggtctgtgttcaaacctttcatcttcgggatgggggtggcccaggccccccaggtgctgtcccccacttttggagcacaagaccctgttcggaccctgccccgattccagactcaggtagatcgtcggcataccctctaccgtggacaccaggcagccctggggctgatggagagagatcaggtatcccccagggagtaggggctaccttgaggggatgatagacctcccccactcccagtgggactctggaaatatgaaggaactagggagtggaagagatttcagagctggggagaggagttcctcccttcaaagccagcaactgcctttggggaatgtcggggggtatctcctttctcctgcttgtgtgaggtggtacacagtccccccttcacctggcgggaagcctgtcccggacagactcatctcagctttcccttggggcaggatcgggggcagcagctccagcagaaacagcaggatctggagcaggaaggcctcgaggccacacaggggctgctggccggcgagtgggccccacccctctgggagctgggcagcctcttccaggccttcgtgaagagggagagccaggcttatgcgtaagcttcatagcttctgctggcctggggtggacccaggacccctggggcctgggtgccctgagtggtggtaaagtggagcaatcccttcacgctccttggccatgttctgagcggccagcttggcctttgccttaataaatgtgctttattttctcttcagtg

SEQ ID NO: 11013 - protein, 378 aa, Homo sapiens
MASSSPDSPCSCDCFVSVPPASAIPAVIFAKNSDRPRDEVQEVVFVPAGTHTPGSRLQCTYIEVEQVSKTHAVILSRPSWLWGAEMGANEHGVCIGNEAVWTKEPVGEGEALLGMDLLRLALERSSSAQEALHVITGLLEHYGQGGNCLEDAAPFSYHSTFLLADRTEAWVLETAGRLWAAQRIQEGARNISNQLSIGTDISAQHPELRTHAQAKGWWDGQGAFDFAQIFSLTQQPVRMEAAKARFQAGRELLRQRQGGITAEVMMGILRDKESGICMDSGGFRTTASMVSVLPQDPTQPCVHFLTATPDPSRSVFKPFIFGMGVAQAPQVLSPTFGAQDPVRTLPRFQTQVDRRHTLYRGHQAALGLMERDQVSPRE

SEQ ID NO: 11014 - DNA, 906 bp, Homo sapiens
ccttcctgctggctgaccgcactgaggcgtgggtgctggagacagctgggaggctctgggctgcacggacatctcggcccaacacccggagctgcggactcatgcccaggccaagggctggtgggatgggcagggtgcctttgactttgctcagatcttctccctgacccagcagcctgtgcgcatggaggctgccaaggcccgcttccaggcagggcgggagctgctgcggcaacggcaagggggcatcacggcagaggtgatgatgggcatcctcagagacaaggagagtggtatctgtatggactcgggaggctttcgcaccacggccagcatggtgtctgtcctgccccaggatcccacgcagccctgcgtgcactttcttaccgccacgccagacccatccaggtctgtgttcaaacctttcatcttcgggatgggggtggcccaggccccccaggtgctgtcccccacttttggagcacaagaccctgttcggaccctgccccgattccagactcaggtagatcgtcggcataccctctaccgtggacaccaggcagccctggggctgatggagagagatcaggatcgggggcagcagctccagcagaaacagcaggatctggagcaggaaggcctcgaggccacacaggggctgctggccggcgagtgggccccacccctctgggagctgggcagcctcttccaggccttcgtgaagagggagagccaggcttatgcgtaagcttcatagcttctgctggcctggggtggacccaggacccctggggcctgggtgccctgagtggtggtaaagtggagcaatcccttcacgctccttggccatgttctgagcggccagcttggcctttgccttaataaatgtgctttattttctcttca

SEQ ID NO: 11015 - protein, 187 aa, Homo sapiens
MEAAKARFQAGRELLRQRQGGITAEVMMGILRDKESGICMDSGGFRTTASMVSVLPQDPTQPCVHFLTATPDPSRSVFKPFIFGMGVAQAPQVLSPTFGAQDPVRTLPRFQTQVDRRHTLYRGHQAALGLMERDQDRGQQLQQKQQDLEQEGLEATQGLLAGEWAPPLWELGSLFQAFVKRESQAYA

SEQ ID NO: 11016 - DNA, 1052 bp, Homo sapiens
gggtcttggaggaagagaggatggcgtcgtcgagccctgactccccatgggggcaactgcctggaggatgctgcgccattctcctaccatagcaccttcctgctggctgaccgcactgaggcgtgggtgctggagacagctgggaggctctgggctgcacagaggatccaggagggggcccgcaacatctccaaccagctgagcattggcacggacatctcggcccaacacccggagctgcggactcatgcccaggccaagggctggtgggatgggcagggtgcctttgactttgctcagatcttctccctgacccagcagcctgtgcgcatggaggctgccaaggcccgcttccaggcagggcgggagctgctgcggcaacggcaagggggcatcacggcagaggtgatgatgggcatcctcagagacaaggagagtggtatctgtatggactcgggaggctttcgcaccacggccagcatggtgtctgtcctgccccaggatcccacgcagccctgcgtgcactttcttaccgccacgccagacccatccaggtctgtgttcaaacctttcatcttcgggatgggggtggcccaggccccccaggtgctgtcccccacttttggagcacaagaccctgttcggaccctgccccgattccagactcaggtagatcgtcggcataccctctaccgtggacaccaggcagccctggggctgatggagagagatcaggatcgggggcagcagctccagcagaaacagcaggatctggagcaggaaggcctcgaggccacacaggggctgctggccggcgagtgggccccacccctctgggagctgggcagcctcttccaggccttcgtgaagagggagagccaggcttatgcgtaagcttcatagcttctgctggcctggggtggacccaggacccctggggcctgggtgccctgagtggtggtaaagtggagcaatcccttcacgctccttggccatgttctgagcggccagcttggcctttgccttaataaatgtgctttattttctcttca

SEQ ID NO: 11017 - protein, 187 aa, Homo sapiens; identical to SEQ ID NO: 11015

SEQ ID NO: 11018 - DNA, 1562 bp, Homo sapiens
ccggctccgaccccgaggccgaaggccttccaggtcacctgagagtctccgcccaatggggcggccctggccagaagcggaggaggtggcacccgggaccgagctggggtcttggaggaagagaggatggcgtcgtcgagccctgactccccatgttcctgcgactgctttgtctccgtgcccccggcctcagccatcccggctgtgatctttgccaagaactcggaccgaccccgggacgaggtgcaggaggtggtgtttgtccccgcaggcactcacactcctgggagccggctccagtgcacctacattgaagtggaacaggtgtcgaagacgcacgctgtgattctgagccgtccttcttggctatggggggctgagatgggcgccaacgagcatggtgtctgcattggcaacgaggctgtgtggacgaaggagccagttggggagggggaagccctgctgggcatggacctactcaggctggctttggaacggagcagctctgcccaggaggccttgcatgtgatcacagggttactggagcactatgggcaggggggcaactgcctggaggatgctgcgccattctcctaccatagcaccttcctgctggctgaccgcactgaggcgtgggtgctggagacagctgggaggctctgggctgcacagaggatccaggagggggcccgcaacatctccaaccagctgagcattggcacggacatctcggcccaacacccggagctgcggactcatgcccaggccaagggctggtgggatgggcagggtgcctttgactttgctcagatcttctccctgacccagcagcctgtgcgcatggaggctgccaaggcccgcttccaggcagggcgggagctgctgcggcaacggcaagggggcatcacggcagaggtgatgatgggcatcctcagagacaaggagagtggtatctgtatggactcgggaggctttcgcaccacggccagcatggtgtctgtcctgccccaggatcccacgcagccctgcgtgcactttcttaccgccacgccagacccatccaggtctgtgttcaaacctttcatcttcgggatgggggtggcccaggccccccaggtgctgtcccccacttttggagcacaagaccctgttcggaccctgccccgattccagactcaggtagatcgtcggcataccctctaccgtggacaccaggcagccctggggctgatggagagagatcaggatcgggggcagcagctccagcagaaacagcaggatctggagcaggaaggcctcgaggccacacaggggctgctggccggcgagtgggccccacccctctgggagctgggcagcctcttccaggccttcgtgaagagggagagccaggcttatgcgtaagcttcatagcttctgctggcctggggtggacccaggacccctggggcctgggtgccctgagtggtggtaaagtggagcaatcccttcacgctccttggccatgttctgagcggccagcttggcctttgccttaataaatgtgctttattttctcttca

SEQ ID NO: 11019 - protein, 425 aa, Homo sapiens
MASSSPDSPCSCDCFVSVPPASAIPAVIFAKNSDRPRDEVQEVVFVPAGTHTPGSRLQCTYIEVEQVSKTHAVILSRPSWLWGAEMGANEHGVCIGNEAVWTKEPVGEGEALLGMDLLRLALERSSSAQEALHVITGLLEHYGQGGNCLEDAAPFSYHSTFLLADRTEAWVLETAGRLWAAQRIQEGARNISNQLSIGTDISAQHPELRTHAQAKGWWDGQGAFDFAQIFSLTQQPVRMEAAKARFQAGRELLRQRQGGITAEVMMGILRDKESGICMDSGGFRTTASMVSVLPQDPTQPCVHFLTATPDPSRSVFKPFIFGMGVAQAPQVLSPTFGAQDPVRTLPRFQTQVDRRHTLYRGHQAALGLMERDQDRGQQLQQKQQDLEQEGLEATQGLLAGEWAPPLWELGSLFQAFVKRESQAYA

SEQ ID NO: 11020 - DNA, 732 bp, Homo sapiens
gcccaggccaagggctggtgggatgggcagggtgcctttgactttgctcagatcttctccctgacccagcagcctgtgcgcatggaggctgccaaggcccgcttccaggcagggcgggagctgctgcggcaacggcaagggggcatcacggcagaggtgatgatgggcatcctcagagacaaggagagtggtatctgtatggactcgggaggctttcgcaccacggccagcatggtgtctgtcctgccccaggatcccacgcagccctgcgtgcactttcttaccgccacgccagacccatccaggtctgtgttcaaacctttcatcttcgggatgggggtggcccaggccccccaggtgctgtcccccacttttggagcacaagaccctgttcggaccctgccccgattccagactcaggatcgggggcagcagctccagcagaaacagcaggatctggagcaggaaggcctcgaggccacacaggggctgctggccggcgagtgggccccacccctctgggagctgggcagcctcttccaggccttcgtgaagagggagagccaggcttatgcgtaagcttcatagcttctgctggcctggggtggacccaggacccctggggcctgggtgccctgagtggtggtaaagtggagcaatcccttcacgctccttggccatgttctgagcggccagcttggcctttgccttaataaatgtgctttattttct

SEQ ID NO: 11021 - protein, 165 aa, Homo sapiens
MEAAKARFQAGRELLRQRQGGITAEVMMGILRDKESGICMDSGGFRTTASMVSVLPQDPTQPCVHFLTATPDPSRSVFKPFIFGMGVAQAPQVLSPTFGAQDPVRTLPRFQTQDRGQQLQQKQQDLEQEGLEATQGLLAGEWAPPLWELGSLFQAFVKRESQAYA

SEQ ID NO: 11022 - DNA, 1038 bp, Homo sapiens
aacatctccaaccagctgagcattggcacggacatctcggcccaacacccggagctgcggactcatgcccaggccaagggctggtgggatgggcagggtgcctttgactttgctcagatcttctccctgacccagcagcctgtgcgcatggaggctgccaaggcccgcttccaggcagggcgggagctgctgcggcaacggcaaggttagtgaacggtggagggggctgggggccaggagggccacagcagtgccagccactctcccctcccacagcttccccctctactccttggcagggggcatcacggcagaggtgatgatgggcatcctcagagacaaggagagtggtatctgtatggactcgggaggctttcgcaccacggccagcatggtgtctgtcctgccccaggatcccacgcagccctgcgtgcactttcttaccgccacgccagacccatccaggtgggaagaatgagggtggggaaggctggggagaagagaggatctgatatatctccgtgcttccatctgtgcccctctaggtctgtgttcaaacctttcatcttcgggatgggggtggcccaggccccccaggtgctgtcccccacttttggagcacaagaccctgttcggaccctgccccgattccagactcaggtagatcgtcggcataccctctaccgtggacaccaggcagccctggggctgatggagagagatcaggatcgggggcagcagctccagcagaaacagcaggatctggagcaggaaggcctcgaggccacacaggggctgctggccggcgagtgggccccacccctctgggagctgggcagcctcttccaggccttcgtgaagagggagagccaggcttatgcgtaagcttcatagcttctgctggcctggggtggacccaggacccctggggcctgggtgccctgagtggtggtaaagtggagcaatcccttcacgctccttggccatgttctgagcggccagcttggcctttgccttaataaatgtgctttattttct

SEQ ID NO: 11023 - protein, 136 aa, Homo sapiens
MRVGKAGEKRGSDISPCFHLCPSRSVFKPFIFGMGVAQAPQVLSPTFGAQDPVRTLPRFQTQVDRRHTLYRGHQAALGLMERDQDRGQQLQQKQQDLEQEGLEATQGLLAGEWAPPLWELGSLFQAFVKRESQAYA

SEQ ID NO: 11024 - DNA, 961 bp, Homo sapiens
aatggggcggccctggccagaagcggaggaggtggcacccgggaccgagctggggtcttggaggaagagaggatggcgtcgtcgagccctgactccccatgttcctgcgactgctttgtctccgtgcccccggcctcagccatcccggctgtgatctttgccaagaactcggaccgaccccgggacgaggtgcaggaggtggtgtttgtccccgcaggcactcacactcctgggagccggctccagtgcacctacattgaagtggaacaggtgtcgaagacgcacgctgtgattctgagccgtccttcttggctatggggggctgagatgggcgccaacgagcatggtgtctgcattggcaacgaggctgtgtggacgaaggagccagttggggagggggaagccctgctgggcatggacctactcaggtgcagaccctgcccttcctcatctgcctgacacaccagaaatctaggggctgagttttgacctgggcccatccatccctcccccagcctggttcacaggggcctcctcctctctgcagactttgcccttgtgccttcgtgaagaaggctgcagcagcagccacctttgggcctctcctggcccagaaatagagcagtggttatttatttattttcagttgaaatcttacatagagtcccaatttataaaaccagtaatagtggatggagcagctctgggtggagagaggttaggggctcaggacacttctctctctgaaactgtgtttcaggccttttcatggaaccctcaaagcatagcacatggaaccagagcattgaaagccactggcataattgcatttgatacgatcagtgccagcagatttgctgtgtgacttgggcctatcaccaaacctctccgggcctcttctgtcccctggagcttctgccaccagccattgatccctctgtcacccttctgtcccttggcc

SEQ ID NO: 11025 - protein, 128 aa, Homo sapiens [sequence omitted]

SEQ ID NO: 11026 - DNA, 769 bp, Homo sapiens
gaagggttggacagaagagggtcgggtatctgggcatgcgcagggccgcaggactcttggtggggtagcgagggggacggtcccacgactgctccgaagggccgggactcccagtgggggcgggacccccggagtgcccgcctgcggactcccaagcctggagcctggggagagggtgggcacctccgttcccgcacacccgtccatggtgtgtgcgccgagcgtccaggagccacggcggtgtcttccttgcgcgtcttttacacgtgtgggggtaggctgctcctcggggctgagccgtggccagggttatggagaggcccgcctctccccagatggcgtcgtcgagccctgactccccatgttcctgcgactgctttgtctccgtgcccccggcctcagccatcccggctgtgatctttgccaagaactcggaccgaccccgggacgaggtgcaggaggtggtgtttgtccccgcaggcactcacactcctgggagccggctccagtgcacctacattgaagtggaacaggtgtcgaagacgcacgctgtgattctgagccgtccttcttggctatggggggctgagatgggcgccaacgagcatggtgtctgcattggcaacgaggctgtgtggacgaaggagccagttggggagggggaagccctgctgggcatggacctactcaggtgcagaccctgcccttcctcatctgcctgacacaccagaaatctaggggctgagttttgacctgggcccatccatcc

SEQ ID NO: 11027 - protein, 136 aa, Homo sapiens
MERPASPQMASSSPDSPCSCDCFVSVPPASAIPAVIFAKNSDRPRDEVQEVVFVPAGTHTPGSRLQCTYIEVEQVSKTHAVILSRPSWLWGAEMGANEHGVCIGNEAVWTKEPVGEGEALLGMDLLRCRPCPSSSA

SEQ ID NO: 11028 - DNA, 3854 bp, Homo sapiens
aaaaagcagcgctggggagaggatgaaggcagagagcgcgggtgagtcacgggcggagctggccttgttcgctcgctggctcctgcccgccctccgtcctccgccctctcgccagcgctcacctccgccgcctgccgcctgccgccagccgccgggtctggctcgccctgggctcctgccccttaccgctggagagctcgccggcgcacagggcctatgagcgaccgtcagtagcgcaccagccagccgtgcccggagcccgccgcagcctcgaggtcccgtctgaggtgcccctgaccgtccctgccctcaccccaccccggatcccggcaatgctaaccgctgtctgcggctctctgggcagccagcacacggaagcgccgcacgcctccccgccgcgcctcgacctgcagcctctccaaacttaccagggccacacgagccctgaggccggggactacccctccccgctgcagcctggagagctgcagagcctcccgctgggcccggaggtggacttctcgcagggctatgagctgccaggggcctcctcgcgggtaacctgcgaggacctggaaagcgacagtcccttggccccgggccccttttccaagctcctgcagccggacatgtcacaccattatgaatcgtggttcaggccgactcacccaggcgcggaggatggctcgtggtgggaccttcatccgggcaccagctggatggacctcccccacactcagggcgcgctgacctcacctggccacccgggggcgcttcaggcgggcttggggggctacgtcggagaccaccagctttgtgccccgccaccccacccgcatgcgcaccacctccttccagctgccggagggcagcatctcctagggccgcccgacggggctaaggccttggaagtagccgccccggagtctcaagggctggattccagcctggacggggcggcgcgtcccaaaggctcccggcggtcggtgccccgcagctcaggccagaccgtctgtcgctgccccaactgtctggaggcggagcgactgggggctccatgtgggcccgatgggggcaagaagaagcatttgcacaactgccacatcccgggctgcgggaaagcctacgccaagacgtcgcacctgaaggcgcacctgcgctggcacagcggcgaccgtcccttcgtgtgcaactggctcttctgcggcaagcgcttcacgcgctcggacgagctgcagcgccacctccagacccacaccggcaccaagaagttcccctgtgcagtctgcagccgcgtcttcatgcgcagcgaccacctggccaagcacatgaaaacccacgagggcgccaaggaggaggcggctggggcggcctcgggagagggcaaggccggcggcgcagtggagccccccgggggcaaaggcaaacgcgaggccgagggcagcgtggctccctccaactgagctcctcagtgccgcctccctgcgggtatcccggggggcactggatgcgagcccccaggtctgacgtccttgggggtggcttgaggaagaggggaaggtgcgtatttattcagggaggaggaaaagtggtgcagggacagggagatggggcgctaggggttcttagtctctggggctactaggcaggatgaatttgactgggtcggtaggagctgcgcaatgcccctctgttctcccctgcctcacagtttccctcgcccctgggctggggggttggggtgggacacccgtaccgcggctggctggcggggacaggctagaggagacagcaagtcccagtccccggagcagagagaagtggggccggcccggggcgctggtggtggctgtctggacacgtccttagcgcctgggaaccaggacataaaagcgcctccggagccgccctgcggcggggtccctttcatcccacttaaagtgcttctgcccctagggtttccggagggagagccgagatgggatgggggagcctgggggtcccccttggcaggggtgtctctttctggtttggagggttgttgctgtaaaaataactcctttgatgagcttccttattaaccctttcagacccagtctgttggagccatgaaggaagagggaaagagggctgccattcctgacagcctcccagccagggctggcgataaaggaccgagatagatggagggggcgagtagggaagtcctcttctaaaatgagagatagggatttggtggggtatggaaggaactaaccccttccctctccacctctgattcagcccttaattcttggtctatgataaataaagttcagtagtctcacattccccatctattaccctaggtgtgttttcaaggcagccagcggtagaatccatgtagttcccaccagttgccttcccctcagggatggaaggaagagggtttcttgggctggttgagggcagattgggggtgtctcatcagagggacctccactggttcccactcagagtggaggcctgcagcctacctgaccatctctttagctgtcaccaagaaaataaaccccactgtctctctagcttggcccttgtctttcccttgcccctgccatagcatgttcattaggggattccttcctccccctcatctcacaggggaagggagaggaaagagttgttctcccactggaaggggttctgccttctgaggtgacatccaggaagctgtccccattcccttctcctttagatgctagaaacacattttgattctgatcatggggtgggggagagaggaaaggagggaggggagaagcccagcagaagctgagccaggcagaggggaaagaagctgatatgaggaagggtctgacaggccacagcccttgcagccggagggctttcccacactcaagagaggggccttacagtccctctgacacccctcccccttcccctcgctccctttcttcacccggagccctctgcagagattagctgtgtattgatttttaagttataagcaaagggtattttatttaatattaggttatgtgtgtgcatgttgtgtgtacctgtgtgcatgtatgtgtgtttctctactgagcctggggtctctagccagggagaccccatcttattcaccatgtccaagatcctgggatctgggcccagcatctcttcctcctttgtagatgctggagcccagccaaggtctgggagctatatgggaagtgggggctgggatctgggtgggaatatgtgtttgtatacaaaggggccctccttaaaagggacaggatgaccttcccgaggaactcattggcctggggtagtttaagaagtaatgttctttctttctttctcttttccctacctcctgctaacccaaccagagatccccttccttgctgagagggttgggggcaggaggagatttggcagtgcctgcaggttgcctggccaggtggagagggggaaagaggaagggcaccgtgggtgtaagatgcctttctcctccacccatcgaaaccagccaccccttccctgtgccaccaagacagccttttccagtggccatcctaaggggaactcccaaatgggtgttgctggtggacacagatgctccccccaatggaagccccaagctctgaggtatgcgggtagaggctttggataggttttcttctgctcccctcttttatagatctaggctgcttggctgcctgtctttctaggcagtccccctagaggaaaaatgtaggaatttattttttctttaactgctgtgaactcactttgagggggtaggaggagggagaaacagcctgtgttttttatgcaataaagtcatcaactacatcatg

SEQ ID NO: 11029 - protein, 376 aa, Homo sapiens; identical to SEQ ID NO: 1805

SEQ ID NO: 11030 - DNA, 3800 bp, Homo sapiens
gactcagatctcacctcctaccactcccctaggagagctgggggccactgtttcctggattatcctaaaagcttctgaggccgtgaggacttggcagcatccctgctccctccttcacctccccctttggcactgcctgtcacctcctttataaagcctggctcttttatcaccgccacttggccctcactgccgccgccagctctgggctccatggactggtcccgtctgaggtgcccctgaccgtccctgccctcaccccaccccggatcccggcaatgctaaccgctgtctgcggctctctgggcagccagcacacggaagcgccgcacgcctccccgccgcgcctcgacctgcagcctctccaaacttaccagggccacacgagccctgaggccggggactacccctccccgctgcagcctggagagctgcagagcctcccgctgggcccggaggtggacttctcgcagggctatgagctgccaggggcctcctcgcgggtaacctgcgaggacctggaaagcgacagtcccttggccccgggccccttttccaagctcctgcagccggacatgtcacaccattatgaatcgtggttcaggccgactcacccaggcgcggaggatggctcgtggtgggaccttcatccgggcaccagctggatggacctcccccacactcagggcgcgctgacctcacctggccacccgggggcgcttcaggcgggcttggggggctacgtcggagaccaccagctttgtgccccgccaccccacccgcatgcgcaccacctccttccagctgccggagggcagcatctcctagggccgcccgacggggctaaggccttggaagtagccgccccggagtctcaagggctggattccagcctggacggggcggcgcgtcccaaaggctcccggcggtcggtgccccgcagctcaggccagaccgtctgtcgctgccccaactgtctggaggcggagcgactgggggctccatgtgggcccgatgggggcaagaagaagcatttgcacaactgccacatcccgggctgcgggaaagcctacgccaagacgtcgcacctgaaggcgcacctgcgctggcacagcggcgaccgtcccttcgtgtgcaactggctcttctgcggcaagcgcttcacgcgctcggacgagctgcagcgccacctccagacccacaccggcaccaagaagttcccctgtgcagtctgcagccgcgtcttcatgcgcagcgaccacctggccaagcacatgaaaacccacgagggcgccaaggaggaggcggctggggcggcctcgggagagggcaaggccggcggcgcagtggagccccccgggggcaaaggcaaacgcgaggccgagggcagcgtggctccctccaactgagctcctcagtgccgcctccctgcgggtatcccggggggcactggatgcgagcccccaggtctgacgtccttgggggtggcttgaggaagaggggaaggtgcgtatttattcagggaggaggaaaagtggtgcagggacagggagatggggcgctaggggttcttagtctctggggctactaggcaggatgaatttgactgggtcggtaggagctgcgcaatgcccctctgttctcccctgcctcacagtttccctcgcccctgggctggggggttggggtgggacacccgtaccgcggctggctggcggggacaggctagaggagacagcaagtcccagtccccggagcagagagaagtggggccggcccggggcgctggtggtggctgtctggacacgtccttagcgcctgggaaccaggacataaaagcgcctccggagccgccctgcggcggggtccctttcatcccacttaaagtgcttctgcccctagggtttccggagggagagccgagatgggatgggggagcctgggggtcccccttggcaggggtgtctctttctggtttggagggttgttgctgtaaaaataactcctttgatgagcttccttattaaccctttcagacccagtctgttggagccatgaaggaagagggaaagagggctgccattcctgacagcctcccagccagggctggcgataaaggaccgagatagatggagggggcgagtagggaagtcctcttctaaaatgagagatagggatttggtggggtatggaaggaactaaccccttccctctccacctctgattcagcccttaattcttggtctatgataaataaagttcagtagtctcacattccccatctattaccctaggtgtgttttcaaggcagccagcggtagaatccatgtagttcccaccagttgccttcccctcagggatggaaggaagagggtttcttgggctggttgagggcagattgggggtgtctcatcagagggacctccactggttcccactcagagtggaggcctgcagcctacctgaccatctctttagctgtcaccaagaaaataaaccccactgtctctctagcttggcccttgtctttcccttgcccctgccatagcatgttcattaggggattccttcctccccctcatctcacaggggaagggagaggaaagagttgttctcccactggaaggggttctgccttctgaggtgacatccaggaagctgtccccattcccttctcctttagatgctagaaacacattttgattctgatcatggggtgggggagagaggaaaggagggaggggagaagcccagcagaagctgagccaggcagaggggaaagaagctgatatgaggaagggtctgacaggccacagcccttgcagccggagggctttcccacactcaagagaggggccttacagtccctctgacacccctcccccttcccctcgctccctttcttcacccggagccctctgcagagattagctgtgtattgatttttaagttataagcaaagggtattttatttaatattaggttatgtgtgtgcatgttgtgtgtacctgtgtgcatgtatgtgtgtttctctactgagcctggggtctctagccagggagaccccatcttattcaccatgtccaagatcctgggatctgggcccagcatctcttcctcctttgtagatgctggagcccagccaaggtctgggagctatatgggaagtgggggctgggatctgggtgggaatatgtgtttgtatacaaaggggccctccttaaaagggacaggatgaccttcccgaggaactcattggcctggggtagtttaagaagtaatgttctttctttctttctcttttccctacctcctgctaacccaaccagagatccccttccttgctgagagggttgggggcaggaggagatttggcagtgcctgcaggttgcctggccaggtggagagggggaaagaggaagggcaccgtgggtgtaagatgcctttctcctccacccatcgaaaccagccaccccttccctgtgccaccaagacagccttttccagtggccatcctaaggggaactcccaaatgggtgttgctggtggacacagatgctccccccaatggaagccccaagctctgaggtatgcgggtagaggctttggataggttttcttctgctcccctcttttatagatctaggctgcttggctgcctgtctttctaggcagtccccctagaggaaaaatgtaggaatttattttttctttaactgctgtgaactcactttgagggggtaggaggagggagaaacagcctgtgttttttatgcaataaagtcatcaactacatcatg

SEQ ID NO: 11031 - protein, 376 aa, Homo sapiens; identical to SEQ ID NO: 1805

SEQ ID NO: 11032 - DNA, 815 bp, Homo sapiens
cttcatggaggcagggggtttcgttcattgcactactcccagtgcttggaatggtgcctgggactctataagtgctttagatgggtgtctcgctgtgttatccaggctgatctcaaactcctggcttcaagtgatcctcccatattggcctcccaaagtgctgggattacaggtgtgagccacggcaccctgccgaatctttgagtctggacaccagtaggtggtcatggtccagttccttgcccagatgcccacagggacttccagcttccaggctgcaatcacagagaatgaagaaggaaggctgttcgagaaatatgggcagctcttacaggaaagccccccagcctctaacaggccctctctgggcaccgaaggtgccagtggtcttccaaggcccgggatgtgccctggacgtgattgctctcctgggtcttgtcttgctgctctttgcccccgccctcctcctctctacctgatggtgccaggtaaggcttcaggcatggcagaggctgaactgagagccaccctaccttgttcctgtggctccatccccctatccacacccaagagatgagatcctggggcagttggcatctgacagcctggcatcgactcatgccaacagcttggaagctgcagtaattagaaggggagagggagagagggggagagaaggagagcgaaagcaagctctagagagaaaccttctcctgcctgccgcagggcaaactacttcaaacgaattcgtttcgctcttgtgaaactgaagacaatttccttttctgtcataaaacaaattattgctcatcagg

SEQ ID NO: 11033 - protein, 57 aa, Homo sapiens
MEAGGFVHCTTPSAWNGAWDSISALDGCLAVLSRLISNSWLQVILPYWPPKVLGLQV

SEQ ID NO: 11034 - DNA, 375 bp, Homo sapiens
ttatcatgttgtccaggctggtctcaaactcctgacctcaggtgatccgcccaccttggcctcccaaagtgctgggattacaggtatgagccatgggcaccacatggagctgtggtcaatggggtcgggaaaggtggggagcaggggagtgcaggggaggggcagaggcagagagaagatgctgctacccggggaggtaagaggagctggttggtaggaaaccaattccttgaagaggcaaatgtgtgtgtttgtttgtttttgttttcagacagggagacagggttttgctttgtcacccagggcagagtgcagtgtcgcaaacacagctcactacagcctcaaattcctaggctcaagggatcctcctgcctc

SEQ ID NO: 11035 - protein, 43 aa, Homo sapiens
MSHGHHMELWSMGSGKVGSRGVQGRGRGREKMLLPGEVRGAGW

SEQ ID NO: 11036 - DNA, 522 bp, Homo sapiens
gccccagaaatagcatatacattgcgccctaagtccagtctcgcccaggtgtggcaggagcttttacctgctcttcggcagtagccggctgccactcaaccccatgcctgactgagctgtggtagaaggattgaggccagcacagaggaggatcagcaggaaatgtaagggttgtcctcatctaatccgtcagtaccagacagtgaacatctctcccccaggatgctgagggagggtcctggagggaaggatgtggaactacagcctctgctctcaagaagctcagatctgggcagggaacatcacataccagggctgtctgtcgggggggtggagggctgggggagggatagcattaggggaaatacctaatgtaaatgacaagttgatgggtgcagcaaaccaacatggcacatgtatacctatgtaacaaatctgcatgttgtgcacgtgtaccctagaacttaaagtataattaaaaaaaaaaaaagcttcagatccctcctggagcctcctatgaaa

SEQ ID NO: 11037 - protein, 59 aa, Homo sapiens
MWNYSLCSQEAQIWAGNITYQGCLSGGWRAGGGIALGEIPNVNDKLMGAANQHGTCIPM

SEQ ID NO: 11038 - DNA, 682 bp, Homo sapiens
cgtagtggcgcgcgtctgtaatcccagctactcaggaaactgaggcaggagaatcgcttgaacccgggaggaagaggttgcagtgagctgagatagtgcccctgtactccagcctgggcgacggagcaagtctccgtctctaaataaataaataaataaagtgtggccgggagagcacaagcatttccaagccgctgcctgaccttctccgtctctgttgaagacaggggccatcttgaaagaaaaaatctctgaggagttgtgtggtcactgggggagcgggggtgtttgtgaaggaagctctaagactccaatgggcctgacaaaagtataacggggtcttcttcttagaaagtgtccccttcctccgggtgcagtggctcacacataggaagtcaactagtggaaaaaagcgtaagtgtttaggaacctggaatctttcctggagggaaaagggtaggatttgtaggaagggaacgggggtagagggaggagataaagcatgaaagatacaccagtaagagtgtgtcctctggtggatgctgaggttaagaagaaaaaagagtgggaggactttgcctagaaaggagtttgggctttatctaggagatacggatcccatgaaggatctttactagaggagtattattgtctaaagtcttgtttttcaaaggctaacact

SEQ ID NO: 11039 - protein, 32 aa, Homo sapiens
MLRLRRKKSGRTLPRKEFGLYLGDTDPMKDLY

SEQ ID NO: 11040 - DNA, 2915 bp, Homo sapiens
gctccgggattggcggttgcttggcgggcggtgtcaggctctcggtggcggcggaggcggcggaggccagggaggaagatgtcgtaatgagcgatccacagaccagcatggctgccactgctgctgtgagtcccagtgactacctgcagcctgccgcctccaccacccaggactcccagccatctcccttagccctgcttgctgcaacatgtagcaaaattggccctccagcagttgaagctgctgtgacacctcctgctcccccacagcccacaccgcggaaacttgtccctatcaaacctgcccctctccctctcagccccggcaagaatagctttggaatcttgtcctccaaaggaaatatacttcagattcaggggtcacaactgagcgcctcctatcctggagggcagctggtgttcgctatccagaatcccaccatgatcaacaaagggacccgatcaaatgccaatatccagtaccaggcggtccctcagattcaggcaagcaattcccaaaccatccaagtacagcccaatctcaccaaccagatccagatcatccctggcaccaaccaagccatcatcaccccctcaccgtccagtcacaagcctgtccccatcaagccagcccccatccagaagtcgagtacgaccaccacccccgtgcagagcggggccaatgtggtgaagctgacaggtgggggcggcaatgtgacgctcactctgcccgtcaacaaccttgtgaacgccagtgacaccggggcccctactcagctcctcactgaaagccccccaaccccgctgtctaagactaacaagaaagcaaggaagaagagccttcctgcctcccagccccctgtggctgtggctgagcaggtggagacggtgctgatcgagaccaccgcggacaacatcatccaggcaggaaataacctgctcattgttcagagccctggtgggggccagccagctgtggtccagcaggtccaggtggtgccccccaaggccgagcagcagcaggtggtacagatcccccagcaggctctgcgggtggtgcaggcggcatctgccaccctccccactgtaccccagaagccctcccagaactttcagatccaggcagctgagccgacacctactcaggtctacatccgcacgccttccggtgaggtgcagacagtccttgtccaggacagccccccagcaacagctgcagccacctctaacaccacctgtagcagccctgcatcccgtgctccccatctgagtgggaccagcaaaaagcactcagctgcaattctccgaaaagagcgtcccctgccaaagattgccccagccgggagcatcatcagcctgaatgcagcccagttggcggcagctgcccaggcaatgcagaccatcaacatcaatggtgtccaggtccagggcgtgcctgtcaccatcaccaacacaggcgggcagcagcagctgacagtgcagaatgtttctgggaacaacctgaccatcagtgggctgagccccacccagatccagctgcaaatggaacaagccctggccggagagacccagcccggggagaagcggcgccgcatggcctgcacgtgtcccaactgcaaggatggggagaagaggtctggagagcagggcaagaagaagcacgtgtgccacatccccgactgtggcaagacgttccgtaagacgtccttgctgcgtgcccatgtgcgcctgcacactggcgagcggccctttgtctgcaactggttcttctgtgggaagaggttcacacggagtgacgagctccaacggcatgctcgcacccacacaggggacaaacgcttcgagtgcgcccagtgtcagaagcgcttcatgaggagtgaccacctcaccaagcattacaagacccacctggtcacgaagaacttgtaaggccaactgcggcgggaggccctgaagatgcagtcccccacctgtgtcctccctgggcccctggtggaaaggagccctgtggctgccttgggcctgccctcagccccactcctgttctgcaactgtccccacaggaaggggctctgttccctgtattgtcctccttctgaagccccttggctctgccttggcccttcccctcaccacgagctcccggcctgcccagactgtggacactggccgtgcccaatgagacgttctaaaccaggacgcgtgggaacccttatttccaaaggaaaaacatgcatttcactccgtcgaggagcaaagtgagcccctaccccccaccccgatccccgctcccaacactgccggagtcgcgtcatgccatgccccctctcctgcacctccctggccctgccggccactgtggacgccctggggcttggcacccacctctggagaaactcggggccacctccactccatgtgcccagccccgccacaacctctcctccagcacattccagctctatttaaaaagtaaagacacccaccgactcctgatccccctctttttctatggagaacgttgccttatactctacttcagatgatgaacactgtgtactgtgtgtgctttaaagaagttttatttaattgctcccttcttcctttccttgttattcacctccctgatgcctgctttcagttgagggttgggggcaatgatgagcatatgaattttttctcactctagcaattcccttttctaaatgacacagcatttaaactcaaatctggattcagataacagcacctgcacatcctgcacctcctccctctcccttcacctcacccctgcccggcccaagctctacttgtgtacagtgtatattgtataatagacaattgtgtctactacatgtttaaaaacacattgcttgttatttttgaggcttttaaattaaacaaaaatccaacttt

SEQ ID NO: 11041 - protein, 613 aa, Homo sapiens
MSDPQTSMAATAAVSPSDYLQPAASTTQDSQPSPLALLAATCSKIGPPAVEAAVTPPAPPQPTPRKLVPIKPAPLPLSPGKNSFGILSSKGNILQIQGSQLSASYPGGQLVFAIQNPTMINKGTRSNANIQYQAVPQIQASNSQTIQVQPNLTNQIQIIPGTNQAIITPSPSSHKPVPIKPAPIQKSSTTTTPVQSGANVVKLTGGGGNVTLTLPVNNLVNASDTGAPTQLLTESPPTPLSKTNKKARKKSLPASQPPVAVAEQVETVLIETTADNIIQAGNNLLIVQSPGGGQPAVVQQVQVVPPKAEQQQVVQIPQQALRVVQAASATLPTVPQKPSQNFQIQAAEPTPTQVYIRTPSGEVQTVLVQDSPPATAAATSNTTCSSPASRAPHLSGTSKKHSAAILRKERPLPKIAPAGSIISLNAAQLAAAAQAMQTININGVQVQGVPVTITNTGGQQQLTVQNVSGNNLTISGLSPTQIQLQMEQALAGETQPGEKRRRMACTCPNCKDGEKRSGEQGKKKHVCHIPDCGKTFRKTSLLRAHVRLHTGERPFVCNWFFCGKRFTRSDELQRHARTHTGDKRFECAQCQKRFMRSDHLTKHYKTHLVTKNL

SEQ ID NO: 11042 - DNA, 3065 bp, Homo sapiens
gctccgggattggcggttgcttggcgggcggtgtcaggctctcggtggcggcggaggcggcggaggccagggaggaagatgtcgtaatgagcgatccacagaccagcatggctgccactgctgctgtgagtcccagtgactacctgcagcctgccgcctccaccacccaggactcccagccatctcccttagccctgcttgctgcaacatgtagcaaaattggccctccagcagttgaagctgctgtgacacctcctgctcccccacagcccacaccgcggaaacttgtccctatcaaacctgcccctctccctctcagccccggcaagaatagctttggaatcttgtcctccaaaggaaatatacttcagattcaggggtcacaactgagcgcctcctatcctggagggcagctggtgttcgctatccagaatcccaccatgatcaacaaagggacccgatcaaatgccaatatccagtaccaggcggtccctcagattcaggcaagcaattcccaaaccatccaagtacagcccaatctcaccaaccagatccagatcatccctggcaccaaccaagccatcatcaccccctcaccgtccagtcacaagcctgtccccatcaagccagcccccatccagaagtcgagtacgaccaccacccccgtgcagagcggggccaatgtggtgaagctgacaggtgggggcggcaatgtgacgctcactctgcccgtcaacaaccttgtgaacgccagtgacaccggggcccctactcagctcctcactgaaagccccccaaccccgctgtctaagactaacaagaaagcaaggaagaagagccttcctgcctcccagccccctgtggctgtggctgagcaggtggagacggtgctgatcgagaccaccgcggacaacatcatccaggcaggaaataacctgctcattgttcagagccctggtgggggccagccagctgtggtccagcaggtccaggtggtgccccccaaggccgagcagcagcaggtggtacagatcccccagcaggctctgcgggtggtgcaggcggcatctgccaccctccccactgtaccccagaagccctcccagaactttcagatccaggcagctgagccgacacctactcaggtctacatccgcacgccttccggtgaggtgcagacagtccttgtccaggacagccccccagcaacagctgcagccacctctaacaccacctgtagcagccctgcatcccgtgctccccatctgagtgggaccagcaaaaagcactcagctgcaattctccgaaaagagcgtcccctgccaaagattgccccagccgggagcatcatcagcctgaatgcagcccagttggcggcagctgcccaggcaatgcagaccatcaacatcaatggtgtccaggtccagggcgtgcctgtcaccatcaccaacacaggcgggcagcagcagctgacagtgcagaatgtttctgggaacaacctgaccatcagtgggctgagccccacccagatccagctgcaaatggaacaagccctggccggagagacccagcccggggagaagcggcgccgcatggcctgcacgtgtcccaactgcaaggatggggagaagaggtctggagagcagggcaagaagaagcacgtgtgccacatccccgactgtggcaagacgttccgtaagacgtccttgctgcgtgcccatgtgcgcctgcacactggcgagcggccctttgtctgcaactggttcttctgtgggaagaggttcacacggagtgacgagctccaacggcatgctcgcacccacacaggggacaaacgcttcgagtgcgcccagtgtcagaagcgcttcatgaggagtgaccacctcaccaagcattacaagacccacctggtcacgaagaacttgtaaggccaactgcggcgggaggccctgaagatgcagtcccccacctgtgtcctccctgggcccctggtggaaaggagccctgtggctgccttgggcctgccctcagccccactcctgttctgcaactgtccccacaggaaggggctctgttccctgtattgtcctccttctgaagccccttggctctgccttggcccttcccctcaccacgagctcccggcctgcccagactgtggacactggccgtgcccaatgagacgttctaaaccaggacgcgtgggaacccttatttccaaaggaaaaacatgcatttcactccgtcgaggagcaaagtgagcccctaccccccaccccgatccccgctcccaacactgccggagtcgcgtcatgccatgccccctctcctgcacctccctggccctgccggccactgtggacgccctggggcttggcacccacctctggagaaactcggggccacctccactccatgtgcccagccccgccacaacctctcctccagcacattccagctctatttaaaaagtaaagacacccaccgactcctgatccccctctttttctatggagaacgttgccttatactctacttcagatgatgaacactgtgtactgtgtgtgctttaaagaagttttatttaattgctcccttcttcctttccttgttattcacctccctgatgcctgctttcagttgagggttgggggcaatgatgagcatatgaattttttctcactctagcaattcccttttctaaatgacacagcatttaaactcaaatctggattcagataacagcacctgcacatcctgcacctcctccctctcccttcacctcacccctgcccggcccaagctctacttgtgtacagtgtatattgtataatagacaattgtgtctactacatgtttaaaaacacattgcttgttatttttgaggcttttaaattaaacaaaaatccaactttatttttagttgtaactgcttgaggtatgttttatgaattaagtgacagatttgttatcctttattaacgtactttgttggtcagcactgggctgacaaaaattttttcttgctaataaatttagttgcctgaggcaaaatcttcaacttg

SEQ ID NO: 11043 - protein, 613 aa, Homo sapiens; identical to SEQ ID NO: 11041

SEQ ID NO: 11044 - DNA, 1859 bp, Homo sapiens
ggattggcggttgcttggcgggcggtgtcaggctctcggtggcggcggaggcggcggaggccagggaggaagatgtcgtaatgagcgatccacagaccagcatggctgccactgctgctgtgagtcccagtgactacctgcagcctgccgcctccaccacccaggactcccagccatctcccttagccctgcttgctgcaacatgtagcaaaattggccctccagcagttgaagctgctgtgacacctcctgctcccccacagcccacaccgcggaaacttgtccctatcaaacctgcccctctccctctcagccccggcaagaatagctttggaatcttgtcctccaaaggaaatatacttcagattcaggggtcacaactgagcgcctcctatcctggagggcagctggtgttcgctatccagaatcccaccatgatcaacaaagggacccgatcaaatgccaatatccagtaccaggcggtccctcagattcaggcaagcaattcccaaaccatccaagtacagcccaatctcaccaaccagatccagatcatccctggcaccaaccaagccatcatcaccccctcaccgtccagtcacaagcctgtccccatcaagccagcccccatccagaagtcgagtacgaccaccacccccgtgcagagcggggccaatgtggtgaagctgacaggtgggggcggcaatgtgacgctcactctgcccgtcaacaaccttgtgaacgccagtgacaccggggcccctactcagctcccactgcttcctgccaaactgggatgctgaattcaacaagaatgttcttatttttggcatttattaatgtgctctaatactctggaatctctttggctctgtgaggcaagttttattctttgttcatgcctgctaagtgccagtaattgtgcccatgttgcagatggataacccagaactcagataatttatgaagtatccaagatcaaatagggcataaatgacaggaaccaggagtcaattgagatttgtaacttcagaccccacactcttccatcttccaccttgactcttgtgtcttatgtgtagcaggtgctaccattaaaattgaggagtttttttttttttaatataaaaaacagttcctgccatcgaggaatgtatgacctagttgtctatagaggaagaaccgaatgactgagagtgggaagttgtgtaatttcctgggtggagaagagagcctttgaatttgaactgtggacatagaaatcacacaggaattcacccttctggcatatttaatgttgccaggtattttttataagtcatttatcacaatatctgtgaattcccatgatcagacctaccctacaggtgatattttatgttgccaggtgattttttataagtcatctatcacaaatatctgtgaattcccatgatcagacctaccttacaggtgaagaattgtggcacctgctcaggagcacatcctcggcattgcctcccctcccttccatgaggtcccatttcttgaggttgatggagacaggactaaaacccaggtcttccctaaggaaataatgatacatatgcagaaagatttagctacagtattattttttcatgactacacagctttataacatcccaacatgctgattattatacaactgataccttgttaactgtatatatctaggctgtttccaatcttacagctaaataaatccctgaaagtgggtcaaggacacgtacatttttaaaaaatttgtattctatattagaggtttgcagtctgtgaccaactttgaagccaaatctagcccacctgcctgtttttgtaaataaagtttaattggagtg

SEQ ID NO: 11045 - protein, 240 aa, Homo sapiens [sequence omitted]

SEQ ID NO: 11046 - DNA, 1367 bp, Homo sapiens
gggccggcgagaggagcgggcaccggggtggcctggcacccctcggacgggtgccgacccacttcaacgccgctctcccgcctgggcgaactatgcctgggtcggctctgaggaggcagccaacagcccttgtgttcgccccgtgtctgagaggccttcctgcactcttaactgtagatgcccaccagcgattcagggctccccggagaacagagaggggcgagggaacgcttgagacccggacgctgccaaccagatgggcactgctcggcatcgacgacagcccgggggcgaatctatcagacaacctatcaattgggctgatgatgtcagtgttccagtggcttctaacaggcgttaatacctgttggaaatggattatcattggctgggacgattgatccacagaccagcatggctgccactgctgctgtgagtcccagtgactacctgcagcctgccgcctccaccacccaggactcccagccatctcccttagccctgcttgctgcaacatgtagcaaaattggccctccagcagttgaagctgctgtgacacctcctgctcccccacagcccacaccgcggaaacttgtccctatcaaacctgcccctctccctctcagccccggcaagaatagctttggaatcttgtcctccaaaggaaatatacttcagattcaggggtcacaactgagcgcctcctatcctggagggcagctggtgttcgctatccagaatcccaccatgatcaacaaagggacccgatcaaatgccaatatccagtaccaggcggtccctcagattcaggcaagcaattcccaaaccatccaagtacagcccaatctcaccaaccagatccagatcatccctggcaccaaccaagccatcatcaccccctcaccgtccagtcacaagcctgtccccatcaagccagcccccatccagaagtcgagtacgaccaccacccccgtgcagagcggggccaatgtggtgaagctgacaggtgggggcggcaatgtgacgctcactctgcccgtcaacaaccttgtgaacgccagtgacaccggggcccctactcagctcctcactgaaagccccccaaccccgctgtctaagactaacaagaaagcaaggaagaagagccttcctgcctcccagccccctgtggctgtggctgagcaggtggagacggtgctgatcgagaccaccgcggacaacatcatccaggcaggaaataacctgctcattgttcagagccctggtgggggccagccagctgtggtccagcaggtccaggtggtgccccccaaggccgagcagcagcaggtggtacagatcccccagcaggctctgcgggtggtgca

SEQ ID NO: 11047 - protein, 316 aa, Homo sapiens
MAATAAVSPSDYLQPAASTTQDSQPSPLALLAATCSKIGPPAVEAAVTPPAPPQPTPRKLVPIKPAPLPLSPGKNSFGILSSKGNILQIQGSQLSASYPGGQLVFAIQNPTMINKGTRSNANIQYQAVPQIQASNSQTIQVQPNLTNQIQIIPGTNQAIITPSPSSHKPVPIKPAPIQKSSTTTTPVQSGANVVKLTGGGGNVTLTLPVNNLVNASDTGAPTQLLTESPPTPLSKTNKKARKKSLPASQPPVAVAEQVETVLIETTADNIIQAGNNLLIVQSPGGGQPAVVQQVQVVPPKAEQQQVVQIPQQALRV

SEQ ID NO: 11048 - DNA, 3292 bp, Homo sapiens
gctgtattgagttggtattctggatgatacaatttttagggctagaaagtttagagtgttggctggctcacaggctgcaaaggaaataatggtggagtccagaccacagcagtaatttcaattactaacacaaagaaacccattgtctgcaataatgaatataactgcagtgtcttgttttgttttaaattcttgtgtgcgatgaagggggcgaatctatcagacaacctatcaattgggctgatgatgtcagtgttccagtggcttctaacaggcgttaatacctgttggaaatggattatcattggctgggacgattgatccacagaccagcatggctgccactgctgctgtgagtcccagtgactacctgcagcctgccgcctccaccacccaggactcccagccatctcccttagccctgcttgctgcaacatgtagcaaaattggccctccagcagttgaagctgctgtgacacctcctgctcccccacagcccacaccgcggaaacttgtccctatcaaacctgcccctctccctctcagccccggcaagaatagctttggaatcttgtcctccaaaggaaatatacttcagattcaggggtcacaactgagcgcctcctatcctggagggcagctggtgttcgctatccagaatcccaccatgatcaacaaagggacccgatcaaatgccaatatccagtaccaggcggtccctcagattcaggcaagcaattcccaaaccatccaagtacagcccaatctcaccaaccagatccagatcatccctggcaccaaccaagccatcatcaccccctcaccgtccagtcacaagcctgtccccatcaagccagcccccatccagaagtcgagtacgaccaccacccccgtgcagagcggggccaatgtggtgaagctgacaggtgggggcggcaatgtgacgctcactctgcccgtcaacaaccttgtgaacgccagtgacaccggggcccctactcagctcctcactgaaagccccccaaccccgctgtctaagactaacaagaaagcaaggaagaagagccttcctgcctcccagccccctgtggctgtggctgagcaggtggagacggtgctgatcgagaccaccgcggacaacatcatccaggcaggaaataacctgctcattgttcagagccctggtgggggccagccagctgtggtccagcaggtccaggtggtgccccccaaggccgagcagcagcaggtggtacagatcccccagcaggctctgcgggtggtgcaggcggcatctgccaccctccccactgtaccccagaagccctcccagaactttcagatccaggcagctgagccgacacctactcaggtctacatccgcacgccttccggtgaggtgcagacagtccttgtccaggacagccccccagcaacagctgcagccacctctaacaccacctgtagcagccctgcatcccgtgctccccatctgagtgggaccagcaaaaagcactcagctgcaattctccgaaaagagcgtcccctgccaaagattgccccagccgggagcatcatcagcctgaatgcagcccagttggcggcagctgcccaggcaatgcagaccatcaacatcaatggtgtccaggtccagggcgtgcctgtcaccatcaccaacacaggcgggcagcagcagctgacagtgcagaatgtttctgggaacaacctgaccatcagtgggctgagccccacccagatccagctgcaaatggaacaagccctggccggagagacccagcccggggagaagcggcgccgcatggcctgcacgtgtcccaactgcaaggatggggagaagaggtctggagagcagggcaagaagaagcacgtgtgccacatccccgactgtggcaagacgttccgtaagacgtccttgctgcgtgcccatgtgcgcctgcacactggcgagcggccctttgtctgcaactggttcttctgtgggaagaggttcacacggagtgacgagctccaacggcatgctcgcacccacacaggggacaaacgcttcgagtgcgcccagtgtcagaagcgcttcatgaggagtgaccacctcaccaagcattacaagacccacctggtcacgaagaacttgtaaggccaactgcggcgggaggccctgaagatgcagtcccccacctgtgtcctccctgggcccctggtggaaaggagccctgtggctgccttgggcctgccctcagccccactcctgttctgcaactgtccccacaggaaggggctctgttccctgtattgtcctccttctgaagccccttggctctgccttggcccttcccctcaccacgagctcccggcctgcccagactgtggacactggccgtgcccaatgagacgttctaaaccaggacgcgtgggaacccttatttccaaaggaaaaacatgcatttcactccgtcgaggagcaaagtgagcccctaccccccaccccgatccccgctcccaacactgccggagtcgcgtcatgccatgccccctctcctgcacctccctggccctgccggccactgtggacgccctggggcttggcacccacctctggagaaactcggggccacctccactccatgtgcccagccccgccacaacctctcctccagcacattccagctctatttaaaaagtaaagacacccaccgactcctgatccccctctttttctatggagaacgttgccttatactctacttcagatgatgaacactgtgtactgtgtgtgctttaaagaagttttatttaattgctcccttcttcctttccttgttattcacctccctgatgcctgctttcagttgagggttgggggcaatgatgagcatatgaattttttctcactctagcaattcccttttctaaatgacacagcatttaaactcaaatctggattcagataacagcacctgcacatcctgcacctcctccctctcccttcacctcacccctgcccggcccaagctctacttgtgtacagtgtatattgtataatagacaattgtgtctactacatgtttaaaaacacattgcttgttatttttgaggcttttaaattaaacaaaaatccaactttatttttagttgtaactgcttgaggtatgttttatgaattaagtgacagatttgttatcctttattaacgtactttgttggtcagcactgggctgacaaaaattttttcttgctaataaatttagttgcctgaggcaaaatcttcaacttg

SEQ ID NO: 11049 - protein, 606 aa, Homo sapiens; identical to SEQ ID NO: 1807

SEQ ID NO: 11050 - DNA, 1225 bp, Homo sapiens
ctggctcacaggctgcaaaggaaataatggtggagtccagaccacagcagtaatttcaattactaacacaaagaaacccattgtctgcaataatgaatataactgcagtgtcttgttttgttttaaattcttgtgtgcgatgaagggggcgaatctatcagacaacctatcaattgggctgatgatgtcagtgttccagtggcttctaacaggcgttaatacctgttggaaatggattatcattggctgggacgattgatccacagaccagcatggctgccactgctgctgtgagtcccagtgactacctgcagcctgccgcctccaccacccaggactcccagccatctcccttagccctgcttgctgcaacatgtagcaaaattggccctccagcagttgaagctgctgtgacacctcctgctcccccacagcccacaccgcggaaacttgtccctatcaaacctgcccctctccctctcagccccggcaagaatagctttggaatcttgtcctccaaaggaaatatacttcagattcaggggtcacaactgagcgcctcctatcctggagggcagctggtgttcgctatccagaatcccaccatgatcaacaaagggacccgatcaaatgccaatatccagtaccaggcggtccctcagattcaggcaagcaattcccaaaccatccaagtacagcccaatctcaccaaccagatccagatcatccctggcaccaaccaagccatcatcaccccctcaccgtccagtcacaagcctgtccccatcaagccagcccccatccagaagtcgagtacgaccaccacccccgtgcagagcggggccaatgtggtgaagctgacaggtgggggcggcaatgtgacgctcactctgcccgtcaacaaccttgtgaacgccagtgacaccggggcccctactcagctcctcactgaaagccccccaaccccgctgtctaagactaacaagaaagcaaggaagaagagccttcctgcctcccagccccctgtggctgtggctgagcaggtggagacggtgctgatcgagaccaccgcggacaacatcatccaggcaggaaataacctgctcattgttcagagccctggtgggggccagccagctgtggtccagcaggtccaggtggtgccccccaaggccgagcagcagcaggtggtacagatcccccagcaggctctgcgggtggtgca

SEQ ID NO: 11051 - protein, 316 aa, Homo sapiens; identical to SEQ ID NO: 11047

SEQ ID NO: 11052 - DNA, 1404 bp, Homo sapiens
agggaagacctgggttttagtcctgtctccatcaacctcaagaaatgggacctcatggaagggaggggaggcaatgccgaggatgtgctcctgagcaggtgccacaattcttcacctgtaagattgctgacagaaaagtgagacctcctccaccccaaggtctcctaagagaatgctgctagccaaaaaaagatctgctgataattgaggaagagcatctttaaaaagacactcaactacatttcagaaacataaagatctaagtgttggctctacaagggaagaaataaagagaaagaactttttttcctcctacaacaggtctagacaacgtcatacaaggagttgcacgcatatccaaaacaaaagcaaggcaaaaacaagcaaaaaagcaacaaatgcattccaaaatgatgtccatttatcagcccagaaatgtactggatactggtttagttcagcctgtaggtgctgggaagaaattccgacaaatccaagtcagttgcaaaaagggaaaactccagacatatcacccaatgaacttgtaagaaagcatatgagcttccctgaacagattttactccaggtttgcagcccgcaagatttaagatggggccatgaggttaaatcttgtaaactcagaagtgttcacgctactgcatccctaaactctgtaactctctacatactctttaaagcagtgtttctctgcatctttcattccatagccattgtccacctgatccaaaatatcctaagtttttcagtgtttggaagcagggtttccaatttttgtgtatacagaaaaggggggtgtgtgtgaaaaaataagtattagaaaaaaaacatgttatacatatctatcacagaaatgagtgggcaaggtttagaagatggctgaaaccaagccaatactaaggtctactggttggctgcaacaagtttaaaatgtcttcataagggccctggttgggcaatactatacttgctgacagtacttgggatctgccacagacctatagcaaaggactgttcaacttctccaaaaagctggtattaaccaccagaagaaataagaagttcaaggccaaaatatccaaatgaaccaaccactctacttgctgaaatgccataaagcttctttaccccagacatttgcccaaatcttataatttcttttctcctctctgacaggcctctccagaggcccaaactttaatagaatctgagagaaaaaagtggccagtctatctgctgtccagagtgatgccaaactctttctcccggagccagttctccccgttgggcagtcaggtgaggatccgattattaacaaactctacttgggtctccttggcaaagagtttctggcttcagcagcctagctcaggggggttcataatt

SEQ ID NO: 11053 - protein, 45 aa, Homo sapiens
MGPHGREGRQCRGCAPEQVPQFFTCKIADRKVRPPPPQGLLRECC

SEQ ID NO: 11054 - DNA, 1757 bp, Homo sapiens
agagacaaggaaatgctgtcaccgcggttaacacgcacgtggagggaagacctgggttttagtcctgtctccatcaacctcaagaaatgggacctcatggaagggaggggaggcaatgccgaggatgtgctcctgagcaggtgccacaattcttcacctgtaaggctgatctaagaagattcctaattatcaattgagagcagagatattccacttccaattacatggcctgcctgctcactcttacttcctattcacactctcttggagaccactttgtgattctaccaaattctataggagaggtgacaaccccaaagagaaggctctagaaagatgacatttggaaatgtgtacgctagtgtctgctggctcctcctgagccatttttactctgtgaatgagatcaaaggccacctaactgcctaaatcaccacaaagggacaaactggtatctcagagcactcagcaacaaaaacaagaaagctaagcctctgcactgcaatgtggcagggcttctggctaagtatagcaagcaattctgatgtggagacaaacagcagcaatgggaatgatatgccaatgaaggattccaacagttgggtctgcaagtgtgcttgtcctgtgacacaaacggcctagacatctcagcactgcttggagctgctcattgggggagcctaagaaacatcagccctttcacaacctcttgctcctgagcagagctcatctcccaagagcacatcagcccgcagcccagtctgatgagaagcacagtattcccctgtgccagtggcagcctcagagcatcctgaaagagcgcttcctagacacgcagtggaagccatgacttcccctaagctgccggtgctgcctctgaactcatgtggaggttcttttttcagtgtccccagaggcagcagaaaaatccgttttccattttggaatctatcaagtaggacaaatctgccacctgggagcatctcctcaagggcaatctctgctccctttcctacatggcctgacaataccctcgagttagaaatgtcccatgttggctaggcacagtggctcatgcctgtaatcccagcactttgggaggctgaggtgggaggattgcttgaggccaggagttttgagaccagcctgacatagagagactatgcctctattattttaaaaaaagaaatgtcacatatttttaccctcttcactcatctttccaccttgctccaatagattgctgacagaaaagtgagacctcctccaccccaaggtctcctaagagaatgctgctagccaaaaaaagatctgctgataattgaggaagagcatctttaaaaagacactcaactacatttcagaaacataaagatctaagtgttggctctacaagggaagaaataaagagaaagaactttttttcctcctacaacaggtctagacaacgtcatacaaggagttgcacgcatatccaaaacaaaagcaaggcaaaaacaagcaaaaaagcaacaaatgcattccaaaatgatgtccatttatcagcccagaaatgtactggatactggtttagttcagcctgtaggtgctgggaagaaattccgacaaatccaagtcagttgcaaaaagggaaaactccagacatatcacccaatgaacttgtaagaaagcatatgagcttccctgaacagattttactccaggtttgcagcccgcaagatttaagatggggccatgaggttaaatcttgtaaactc

SEQ ID NO: 11055 - protein, 53 aa, Homo sapiens
MLSPRLTRTWREDLGFSPVSINLKKWDLMEGRGGNAEDVLLSRCHNSSPVRLI

SEQ ID NO: 11056 - DNA, 2845 bp, Homo sapiens
ttattgcaaacagacaggcagctccgtttcctgttggttctgtttccttcctattaaattactgaactgtgaggactggggagggcgggtaggaagggagatgaagcagggttaagaggattctgttttcagcaagtagtgaattccccagaagcttttcccacttagtccggatgcatccatacgatgtgaagttgggcttaattgcttcgtgttggtggcagagctctgaagatgaggactggctttcctactggagagctggcccgtggaccaggcatctattgctgaggccagatgaaaatgggccagggcctctggccacacgctgccacagccaagagagatggagcaaagccatgcagtgtcaacttaggtttgagaaaggggtcaggtcaaagtgctggaaggactccccatcactgagttccttgccatcaacacaactgcagagcagagcagaagtgaccacacatccagaggccactgtggaggaaacacagcatcaggccctttcaacacttagttaatcctcatgttggccccatggaattattttattttcctactttatacacaggaagtcgaagcttggagagattctgtgaattggtgaaggacacagagcaaagccaggattcagattcagacctgcttgactccaagatcattccagaaatctcccttttcctttggaccctgtgacgtgacagctgggttctttctgctctgatttccatgcctgacaaccatttaaatggaatacaagaatgcagttttcttaggttgaaagaaattcaccctttatcaagaattatttatagttcctctggagtgagagaggaagacattacccacgcagtgctctgtggaatcatctgagccaccacttctgccttggggacatcatctggggaagtatctagatcctttggctgaacaacgtgttttgaggtctttaatatgtcaccttaaggatgaggcctagagaacatggccttttgttgaacagtttgtaagctctcaaatgtgagtaaatgtgaggagggtcttgagagatataggaagctcaagaaacctagctagagtctctagactgttgagaaaagtggtgagaagaaattcccattgtgggggatgggagtggtggttcaggaggatttttgagaatggggatagagagcctagaaataaggccacacacccatggccatctgatcttcgacaaagcaagcaatgagtaatggactccttgttcaataaatggtgccgggttgactgattagccatatgcagaagattgaaactggactccttcctcacaccatatacagaaatcaactcaagatggattaaagacttaaatgtaaaacccagaactataaaaactctggaagacaacctaggcaataccaccctggatataggaacgggcaaagatttcatgatgaagacactaaaagcaattgcagcaaaagcaaaaattgacaaatgtgatctgattaaacctaagagcttctgcacagcaaaagaaattatcaacagagtaaacagagtaaacaacctatagaataggagaaaatatttgcagactaagtatccaacaaaggtctcatatccagcatctataaggaacttaaacaaatttataagaaataactaacaattccaacaaaaagtgggcaaagtatatgaacagacactttgctaaagtagacatatatgtggccaacaagcaaatgaaaaaaagctcaatatcatgatcattagagaaatgcaaatcaaagccacaataagatatatcatctcacaccagtcagaatggctattattaaaaagtcaaaaaataaccgatggctggtaaagttgcagagaaaaggaaatacttatacactgttagttggagtttaaattagttcaaccattatggaaagcagtgtggtgattcctcaaagagctaaaaacaggactaccatttgacccagcaaacctattactgggtatatgcccagaggaatagaaatcattctaccataaaaacatgtgcaacaaatgttcattgtagcactatccaaaatagcaaagacatggaatcaacctaaatgtccatcaatgacagattggataaaaaatgtagtacataggtcccatggaatactatgcaaccataagaaagaacaagatcatgtcttttgcaggaacatgatggagctggaggccattatccttagcaaactaatgcagaaacagaaaactaaatagtgcatgctcttactcataagagggagctaaatgaggagacatcatgaatacaaagaggggaacaacagacactgggacctctttgagggtggagggtaggaggagggagaggagcagaaaaacattaatcttgttgtacagattattttgtcacccaggtactaaatgtggtactattgggtaccctaccactgttttatcaaacaagtttctgtaatagtataaatcctttgttgtcattacaacaatgttcatggcatcttcaccaggagtaaatctcatctcaagaaaccactttttttgcttatccataagaagcaactcctcatctattcaaatttgatcatgagattgcagcaatctggtcacatcttcaggttcactctaattcaagttctcttgctgtttctaccacatccacagttacttccttcactgaaattttgaacctgtcaaaatttggtaccttactgttgtgtaccaggtttagtacctgggtgacaaaataatctgtacaacagaccccccgtgataccagttaacctaggtaacaaacctgcacatgtactcctgaacctgaaat

SEQ ID NO: 11057 - protein, 47 aa, Homo sapiens
MPDNHLNGIQECSFLRLKEIHPLSRIIYSSSGVREEDITHAVLCGII

SEQ ID NO: 11058 - DNA, 888 bp, Homo sapiens
atgaggagaacatttggagagcctccaaaccataagagccaaaaacaggaagtaaatccaaaaattaagagggacagacatcaaaacctcacagtggaaactgctcttgccgtaggggtatcagaccacaggccttttgctagaaccatggagggtgtagaagagaagaagaagaaggttcctgctgtgccagaaacccttaagaaaaagagaaggaatttcgcagagccgaagatcaagcacctgagaaagaagtttgcccaaaagatgcttcaaaaggcaaggaggaagcttatctatgaaaaagcaaagcactatcacaaggaatataggcagttgtacagaactgaaattcaaatgccaaggatagcaagaaaagctggcaacttctatgtacctgcaaaacccaaattggcgtttgtcatcaggatcagaggtgtcaatggtgtaagcccaaagatccgaaaggtgttgcagcttcttcgcctttgtcaaatcttcaatgaaacctttgtgaagctcaacaaggcttcaattaacatgctgaggattgtagagccatacattgcatgggggtgcccaaatctgaagtcagtaaatgaactaatttacaagcgtggttatggcaaaatcaataagaagggagttgcttcgacagataacactttgattgctcgatctcttggtaaatatagcatcaactgcatggaggatcttattcatgagatctatactgttggaaaatgcttcaaagaagcaaataacttcctgtggcccttcaaattatcttctccacaaggcagaatgaagaaaaaaaccacccattttgtagaagtggagatgctggcaacagggaggaccagatcaacaggcttactagaagactga

SEQ ID NO: 11059 - protein, 295 aa, Homo sapiens
MRRTFGEPPNHKSQKQEVNPKIKRDRHQNLTVETALAVGVSDHRPFARTMEGVEEKKKKVPAVPETLKKKRRNFAEPKIKHLRKKFAQKMLQKARRKLIYEKAKHYHKEYRQLYRTEIQMPRIARKAGNFYVPAKPKLAFVIRIRGVNGVSPKIRKVLQLLRLCQIFNETFVKLNKASINMLRIVEPYIAWGCPNLKSVNELIYKRGYGKINKKGVASTDNTLIARSLGKYSINCMEDLIHEIYTVGKCFKEANNFLWPFKLSSPQGRMKKKTTHFVEVEMLATGRTRSTGLLED

SEQ ID NO: 11060 - DNA, 739 bp, Homo sapiens
atgtggcgtgctctccggatcatggcgagaaagaacaggtgcagcttggaacccggaggccctggtggccgtcggggccctgggattgggaaccgcggtggcttccgcggaggtttcggcagtggcatccggggccggggtagcagcagtggacggggccggggccgaggccgcggagctcgcggaggcaaggccgaggataaggagtggatacccgtcaccaagctgggccgcttggtcaaggaaatgaagatcaaatccctggaggagatctatcccttctccctgcccattaaggtatctgagatcattgactttttcctgggggcctctcttaaggacgaggttttgaagattatgtcggtgcagaagcagacccgccgctgcggctctgtgctggtgcgcctcatccctgcacccaggggcactggcattgtctccgcacctgtgcccaagaagctgctcatgatagctggtatcgatgactgctacacctcagcccggggctgcactgccaccctgggcaacttcgccaaggccacctttgacgccatctctaagacctacagctacctgacccccgacctctggaaggagactgtatttaccaagtctccctgtcaggaattcactgaccacctcgtcaagacccacaccagagtcttcgtgcagcagacccaggctccagctgtggctacaacatagggtttttatacaagaaaaataaagtgaattaagc

SEQ ID NO: 11061 - protein, 234 aa, Homo sapiens
MWRALRIMARKNRCSLEPGGPGGRRGPGIGNRGGFRGGFGSGIRGRGSSSGRGRGRGRGARGGKAEDKEWIPVTKLGRLVKEMKIKSLEEIYPFSLPIKVSEIIDFFLGASLKDEVLKIMSVQKQTRRCGSVLVRLIPAPRGTGIVSAPVPKKLLMIAGIDDCYTSARGCTATLGNFAKATFDAISKTYSYLTPDLWKETVFTKSPCQEFTDHLVKTHTRVFVQQTQAPAVATT

SEQ ID NO: 11062 - DNA, 2039 bp, Homo sapiens
gactttttccttcattgctttttaggatgtttgtaaaattcccagtgggaacttagagctttgtgggagcagtggggaggttttttggtttcagcaccttgatgcagaggcttagttaaagggagcagaggtgatacgtggcagtcaagaggttttaaacttgaactgtaccctaccgacaggaaaagaggcaaatcctgtgtagctggctgaaagcgaagaaactaaggagcgcctgtttgaatcaatgctcagcgagtgtcgggacgccatccaggtggttcgggaggagctcaagccagatcagaaacagagagattatatccttgaaggagagccagggaaggtgtctaatcttcaatacttgcatagctacctgacttacatcaagctatcaacggcaatcaagcgtaatgagaacatggccaaaggtctgcagagggctctgctgcagcagcagccagaggatgacagcaagcgctcaccccggccccaggacctgatccgactctatgacatcatcttacagaatctggtggaattgctccagcttcctggtttagaggaagacaaagccttccagaaagagataggcctcaagactctggtgttcaaagcttacaggtgttttttcattgctcagtcctatgtgctggtgaagaagtggagcgaagcccttgtcctgtatgacagagtcctgaaatatgcaaatgaagtaaattctgatgctggcgccttcaagaacagcctaaaggacctgcctgatgtgcaagagctcatcactcaagtgcggtcagagaagtgctccctgcaggccgcagccatccttgatgcaaacgacgctcatcaaacagagacctcctcctcccaagtcaaggacaataagcctctggttgaacggtttgagacattctgcctggacccttcccttgtcaccaagcaagccaaccttgtgcacttcccaccaggcttccagcccattccctgcaagcctttgttctttgacctggccctcaaccatgtggctttcccaccccttgaggacaagttggaacagaagaccaagagtggcctcactggatacatcaagggcatctttggattcaggagctaaccaggctcttcctcgggggcgggggagattctgactcttaatctgtattgtgagaaaatcccagcaagttccatgatattaaatccaggtctgcattggcccggggcaagagtttaacatcttcggccctgcattcctacatcttgtgtctgtacacgttcttaagcagcgtgtcaggagagcaccctgttgtcttctggtaaatgtgtgcagggtcatcctgtctcctgtacctcctgggaaaggggccgctgctgtctggtgccctgtgagctgtgattgattgcctttggtcagtaatgcgttcaggagtccacaccaggcacagatggggccttgaaacgctttgtcatgcttcttcagtaccatggatttgaaatgaactcatccttgctgtgagcatccaggagcccttgagaagtttatctatgactatgaaactggcaacgtcaccccagaattacggtcagccttattccccttcacctcccagtgaacgctaagaagtttcagacaagcagagagctctatttttagaagaaatatgttacactcagaaatgatgaaaccaaatcttatattaaaaggcaaagatgacggagactgtgcccatttcttatatgccctccctcatgtccagtccccgttctctcctcgggagcctagttgcgtgaagccggtgaggtcaagtgtaacctgacttaccggcaactaggtgaggctgatgccagatacacatgttagaggcactatttttcaggacttcccaatgtgtaatttttagatgccattatattttaatccccttcgttaccccccgtttttccttagtcatcccttttcacttctattataacatcaataatagaagtcacaaaaacaatgtaagaaagcaaggaataaaagtgatttaaacatgtacctg

SEQ ID NO: 11063 - protein, 288 aa, Homo sapiens
MLSECRDAIQVVREELKPDQKQRDYILEGEPGKVSNLQYLHSYLTYIKLSTAIKRNENMAKGLQRALLQQQPEDDSKRSPRPQDLIRLYDIILQNLVELLQLPGLEEDKAFQKEIGLKTLVFKAYRCFFIAQSYVLVKKWSEALVLYDRVLKYANEVNSDAGAFKNSLKDLPDVQELITQVRSEKCSLQAAAILDANDAHQTETSSSQVKDNKPLVERFETFCLDPSLVTKQANLVHFPPGFQPIPCKPLFFDLALNHVAFPPLEDKLEQKTKSGLTGYIKGIFGFRS

SEQ ID NO: 11064 - DNA, 1951 bp, Homo sapiens
gccaaacaggcagctaccatgagtgaagtggagtggagagggagaacggttccagtgaagattgacaaagtgcgcattttcttattaggactggctgataacgaagcagctattgtccaggctgaaagcgaagaaactaaggagcgcctgtttgaatcaatgctcagcgagtgtcgggacgccatccaggtggttcgggaggagctcaagccagatcagaaacagagagattatatccttgaaggagagccagggaaggtgtctaatcttcaatacttgcatagctacctgacttacatcaagctatcaacggcaatcaagcgtaatgagaacatggccaaaggtctgcagagggctctgctgcagcagcagccagaggatgacagcaagcgctcaccccggccccaggacctgatccgactctatgacatcatcttacagaatctggtggaattgctccagcttcctggtttagaggaagacaaagccttccagaaagagataggcctcaagactctggtgttcaaagcttacaggtgttttttcattgctcagtcctatgtgctggtgaagaagtggagcgaagcccttgtcctgtatgacagagtcctgaaatatgcaaatgaagtaaattctgatgctggcgccttcaagaacagcctaaaggacctgcctgatgtgcaagagctcatcactcaagtgcggtcagagaagtgctccctgcaggccgcagccatccttgatgcaaacgacgctcatcaaacagagacctcctcctcccaagtcaaggacaataagcctctggttgaacggtttgagacattctgcctggacccttcccttgtcaccaagcaagccaaccttgtgcacttcccaccaggcttccagcccattccctgcaagcctttgttctttgacctggccctcaaccatgtggctttcccaccccttgaggacaagttggaacagaagaccaagagtggcctcactggatacatcaagggcatctttggattcaggagctaaccaggctcttcctcgggggcgggggagattctgactcttaatctgtattgtgagaaaatcccagcaagttccatgatattaaatccaggtctgcattggcccggggcaagagtttaacatcttcggccctgcattcctacatcttgtgtctgtacacgttcttaagcagcgtgtcaggagagcaccctgttgtcttctggtaaatgtgtgcagggtcatcctgtctcctgtacctcctgggaaaggggccgctgctgtctggtgccctgtgagctgtgattgattgcctttggtcagtaatgcgttcaggagtccacaccaggcacagatggggccttgaaacgctttgtcatgcttcttcagtaccatggatttgaaatgaactcatccttgctgtgagcatccaggagcccttgagaagtttatctatgactatgaaactggcaacgtcaccccagaattacggtcagccttattccccttcacctcccagtgaacgctaagaagtttcagacaagcagagagctctatttttagaagaaatatgttacactcagaaatgatgaaaccaaatcttatattaaaaggcaaagatgacggagactgtgcccatttcttatatgccctccctcatgtccagtccccgttctctcctcgggagcctagttgcgtgaagccggtgaggtcaagtgtaacctgacttaccggcaactaggtgaggctgatgccagatacacatgttagaggcactatttttcaggacttcccaatgtgtaatttttagatgccattatattttaatccccttcgttaccccccgtttttccttagtcatcccttttcacttctattataacatcaataatagaagtcacaaaaacaatgtaagaaagcaaggaataaaagtgatttaaacatgtacctg

SEQ ID NO: 11065 - protein, 335 aa, Homo sapiens
MSEVEWRGRTVPVKIDKVRIFLLGLADNEAAIVQAESEETKERLFESMLSECRDAIQVVREELKPDQKQRDYILEGEPGKVSNLQYLHSYLTYIKLSTAIKRNENMAKGLQRALLQQQPEDDSKRSPRPQDLIRLYDIILQNLVELLQLPGLEEDKAFQKEIGLKTLVFKAYRCFFIAQSYVLVKKWSEALVLYDRVLKYANEVNSDAGAFKNSLKDLPDVQELITQVRSEKCSLQAAAILDANDAHQTETSSSQVKDNKPLVERFETFCLDPSLVTKQANLVHFPPGFQPIPCKPLFFDLALNHVAFPPLEDKLEQKTKSGLTGYIKGIFGFRS

SEQ ID NO: 11066 - DNA, 2711 bp, Homo sapiens
gcggcgcaggggcaagatggctgctgagaagcaggtcccaggcggcggcggcggcggcggcagtggcggcggcggtggcagtggcggcggcggtagcggcggtggacgtggtgccggaggggaagaaaataaagaaaacgaacgcccttcggccggatcgaaggcaaacaaagaatttggggatagcctgagtttggagattcttcagattattaaggaatcccagcagcagcatggtttacggcatggagattttcagaggtacagatacttgcttctggttctgatggatgctgaaagagcctggagctacgccatgcagctgaaacaggaagccaacactgaaccccgaaaacggtttcacttgttatctcgcctacgcaaagccgtgaagcatgcagaggaattggaacgcttgtgtgagagcaatcgcgtggatgccaagaccaaattagaggctcaggcttacacagcttacctctcaggaatgctacgttttgaacatcaagaatggaaagctgccattgaggcttttaacaaatgcaaaactatctatgagaagctagccagtgctttcacagaggagcaggctgtgctgtataaccaacgtgtggaagagatttcacccaacatccgctattgtgcatataatattggggaccagtcagccatcaatgaactcatgcagatgagattgaggtctgggggcactgagggtctcttggctgaaaaattggaggctttgatcactcagactcgagccaaacaggcagctaccatgagtgaagtggagtggagagggagaacggttccagtgaagattgacaaagtgcgcattttcttattaggactggctgataacgaagcagctattgtccaggctgaaagcgaagaaactaaggagcgcctgtttgaatcaatgctcagcgagtgtcgggacgccatccaggtggttcgggaggagctcaagccagatcagaaacagagagattatatccttgaaggagagccagggaaggtgtctaatcttcaatacttgcatagctacctgacttacatcaagctatcaacggcaatcaagcgtaatgagaacatggccaaaggtctgcagagggctctgctgcagcagcagccagaggatgacagcaagcgctcaccccggccccaggacctgatccgactctatgacatcatcttacagaatctggtggaattgctccagcttcctggtttagaggaagacaaagccttccagaaagagataggcctcaagactctggtgttcaaagcttacaggtgttttttcattgctcagtcctatgtgctggtgaagaagtggagcgaagcccttgtcctgtatgacagagtcctgaaatatgcaaatgaagtaaattctgatgctggcgccttcaagaacagcctaaaggacctgcctgatgtgcaagagctcatcactcaagtgcggtcagagaagtgctccctgcaggccgcagccatccttgatgcaaacgacgctcatcaaacagagacctcctcctcccaagtcaaggacaataagcctctggttgaacggtttgagacattctgcctggacccttcccttgtcaccaagcaagccaaccttgtgcacttcccaccaggcttccagcccattccctgcaagcctttgttctttgacctggccctcaaccatgtggctttcccaccccttgaggacaagttggaacagaagaccaagagtggcctcactggatacatcaagggcatctttggattcaggagctaaccaggctcttcctcgggggcgggggagattctgactcttaatctgtattgtgagaaaatcccagcaagttccatgatattaaatccaggtctgcattggcccggggcaagagtttaacatcttcggccctgcattcctacatcttgtgtctgtacacgttcttaagcagcgtgtcaggagagcaccctgttgtcttctggtaaatgtgtgcagggtcatcctgtctcctgtacctcctgggaaaggggccgctgctgtctggtgccctgtgagctgtgattgattgcctttggtcagtaatgcgttcaggagtccacaccaggcacagatggggccttgaaacgctttgtcatgcttcttcagtaccatggatttgaaatgaactcatccttgctgtgagcatccaggagcccttgagaagtttatctatgactatgaaactggcaacgtcaccccagaattacggtcagccttattccccttcacctcccagtgaacgctaagaagtttcagacaagcagagagctctatttttagaagaaatatgttacactcagaaatgatgaaaccaaatcttatattaaaaggcaaagatgacggagactgtgcccatttcttatatgccctccctcatgtccagtccccgttctctcctcgggagcctagttgcgtgaagccggtgaggtcaagtgtaacctgacttaccggcaactaggtgaggctgatgccagatacacatgttagaggcactatttttcaggacttcccaatgtgtaatttttagatgccattatattttaatccccttcgttaccccccgtttttccttagtcatcccttttcacttctattataacatcaataatagaagtcacaaaaacaatgtaagaaagcaaggaataaaagtgatttaaacatgtacctg

SEQ ID NO: 11067 - protein, 589 aa, Homo sapiens
MAAEKQVPGGGGGGGSGGGGGSGGGGSGGGRGAGGEENKENERPSAGSKANKEFGDSLSLEILQIIKESQQQHGLRHGDFQRYRYLLLVLMDAERAWSYAMQLKQEANTEPRKRFHLLSRLRKAVKHAEELERLCESNRVDAKTKLEAQAYTAYLSGMLRFEHQEWKAAIEAFNKCKTIYEKLASAFTEEQAVLYNQRVEEISPNIRYCAYNIGDQSAINELMQMRLRSGGTEGLLAEKLEALITQTRAKQAATMSEVEWRGRTVPVKIDKVRIFLLGLADNEAAIVQAESEETKERLFESMLSECRDAIQVVREELKPDQKQRDYILEGEPGKVSNLQYLHSYLTYIKLSTAIKRNENMAKGLQRALLQQQPEDDSKRSPRPQDLIRLYDIILQNLVELLQLPGLEEDKAFQKEIGLKTLVFKAYRCFFIAQSYVLVKKWSEALVLYDRVLKYANEVNSDAGAFKNSLKDLPDVQELITQVRSEKCSLQAAAILDANDAHQTETSSSQVKDNKPLVERFETFCLDPSLVTKQANLVHFPPGFQPIPCKPLFFDLALNHVAFPPLEDKLEQKTKSGLTGYIKGIFGFRS

SEQ ID NO: 11068 - DNA, 2977 bp, Homo sapiens
ggatccctcgcgcaggcgcgctccagcacatggcgccctgctgcagcaagggccgacggcggcggagtccgccgctatcccatcagcccggccaggcaggtccagctctcacccgcccaggtcgtcccgcctcccctatcccgtcttgctctgcggcgcaggggcaagatggctgctgagaagcaggtcccaggcggcggcggcggcggcggcagtggcggcggcggtggcagtggcggcggcggtagcggcggtggacgtggtgccggaggggaagaaaataaagaaaacgaacgcccttcggccggatcgaaggcaaacaaagaatttggggatagcctgagtttggagattcttcagattattaaggaatcccagcagcagcatggtttacggcatggagattttcagaggtacaggggctactgttcccgtagacaaagacgtcttcgaaaaacactcaacttcaagatgggtaacagacacaaattcacagggaagaaagtgactgaagagcttctgaccgataatagatacttgcttctggttctgatggatgctgaaagagcctggagctacgccatgcagctgaaacaggaagccaacactgaaccccgaaaacggtttcacttgttatctcgcctacgcaaagccgtgaagcatgcagaggaattggaacgcttgtgtgagagcaatcgcgtggatgccaagaccaaattagaggctcaggcttacacagcttacctctcaggaatgctacgttttgaacatcaagaatggaaagctgccattgaggcttttaacaaatgcaaaactatctatgagaagctagccagtgctttcacagaggagcaggctgtgctgtataaccaacgtgtggaagagatttcacccaacatccgctattgtgcatataatattggggaccagtcagccatcaatgaactcatgcagatgagattgaggtctgggggcactgagggtctcttggctgaaaaattggaggctttgatcactcagactcgagccaaacaggcagctaccatgagtgaagtggagtggagagggagaacggttccagtgaagattgacaaagtgcgcattttcttattaggactggctgataacgaagcagctattgtccaggctgaaagcgaagaaactaaggagcgcctgtttgaatcaatgctcagcgagtgtcgggacgccatccaggtggttcgggaggagctcaagccagatcagaaacagagagattatatccttgaaggagagccagggaaggtgtctaatcttcaatacttgcatagctacctgacttacatcaagctatcaacggcaatcaagcgtaatgagaacatggccaaaggtctgcagagggctctgctgcagcagcagccagaggatgacagcaagcgctcaccccggccccaggacctgatccgactctatgacatcatcttacagaatctggtggaattgctccagcttcctggtttagaggaagacaaagccttccagaaagagataggcctcaagactctggtgttcaaagcttacaggtgttttttcattgctcagtcctatgtgctggtgaagaagtggagcgaagcccttgtcctgtatgacagagtcctgaaatatgcaaatgaagtaaattctgatgctggcgccttcaagaacagcctaaaggacctgcctgatgtgcaagagctcatcactcaagtgcggtcagagaagtgctccctgcaggccgcagccatccttgatgcaaacgacgctcatcaaacagagacctcctcctcccaagtcaaggacaataagcctctggttgaacggtttgagacattctgcctggacccttcccttgtcaccaagcaagccaaccttgtgcacttcccaccaggcttccagcccattccctgcaagcctttgttctttgacctggccctcaaccatgtggctttcccaccccttgaggacaagttggaacagaagaccaagagtggcctcactggatacatcaagggcatctttggattcaggagctaaccaggctcttcctcgggggcgggggagattctgactcttaatctgtattgtgagaaaatcccagcaagttccatgatattaaatccaggtctgcattggcccggggcaagagtttaacatcttcggccctgcattcctacatcttgtgtctgtacacgttcttaagcagcgtgtcaggagagcaccctgttgtcttctggtaaatgtgtgcagggtcatcctgtctcctgtacctcctgggaaaggggccgctgctgtctggtgccctgtgagctgtgattgattgcctttggtcagtaatgcgttcaggagtccacaccaggcacagatggggccttgaaacgctttgtcatgcttcttcagtaccatggatttgaaatgaactcatccttgctgtgagcatccaggagcccttgagaagtttatctatgactatgaaactggcaacgtcaccccagaattacggtcagccttattccccttcacctcccagtgaacgctaagaagtttcagacaagcagagagctctatttttagaagaaatatgttacactcagaaatgatgaaaccaaatcttatattaaaaggcaaagatgacggagactgtgcccatttcttatatgccctccctcatgtccagtccccgttctctcctcgggagcctagttgcgtgaagccggtgaggtcaagtgtaacctgacttaccggcaactaggtgaggctgatgccagatacacatgttagaggcactatttttcaggacttcccaatgtgtaatttttagatgccattatattttaatccccttcgttaccccccgtttttccttagtcatcccttttcacttctattataacatcaataatagaagtcacaaaaacaatgtaagaaagcaaggaataaaagtgatttaaacatgtacctg

SEQ ID NO: 11069 - protein, 627 aa, Homo sapiens; identical to SEQ ID NO: 1811

SEQ ID NO: 11070 - DNA, 2430 bp, Homo sapiens
ggatccctcgcgcaggcgcgctccagcacatggcgccctgctgcagcaagggccgacggcggcggagtccgccgctatcccatcagcccggccaggcaggtccagctctcacccgcccaggtcgtcccgcctcccctatcccgtcttgctctgcggcgcaggggcaagatggctgctgagaagcaggtcccaggcggcggcggcggcggcggcagtggcggcggcggtggcagtggcggcggcggtagcggcggtggacgtggtgccggaggggaagaaaataaagaaaacgaacgcccttcggccggatcgaaggcaaacaaagaatttggggatagcctgagtttggagattcttcagattattaaggaatcccagcagcagcatggtttacggcatggagattttcagaggtacaggggctactgttcccgtagacaaagacgtcttcgaaaaacactcaacttcaagatgggtaacagacacaaattcacagggaagaaagtgactgaagagcttctgaccgataatagatacttgcttctggttctgatggatgctgaaagagcctggagctacgccatgcagctgaaacaggaagccaacactgaaccccgaaaacggtttcacttgttatctcgcctacgcaaagccgtgaagcatgcagaggaattggaacgcttgtgtgagagcaatcgcgtggatgccaagaccaaattagaggctcaggcttacacagcttacctctcaggaatgctacgttttgaacatcaagaatggaaagctgccattgaggcttttaacaaatgcaaaactatctatgagaagctagccagtgctttcacagaggagcaggctgtgctgtataaccaacgtgtggaagagatttcacccaacatccgctattgtgcatataatattggggaccagtcagccatcaatgaactcatgcagatgagattgaggtctgggggcactgagggtctcttggctgaaaaattggaggctttgatcactcagactcgagccaaacaggcagctaccatgagtgaagtggagtggagagggagaacggttccagtgaagattgacaaagtgcgcattttcttattaggactggctgataacgaagcagctattgtccaggctgaaagcgaagaaactaaggagcgcctgtttgaatcaatgctcagcgagtgtcgggacgccatccaggtggttcgggaggagctcaagccagatcagagacctcctcctcccaagtcaaggacaataagcctctggttgaacggtttgagacattctgcctggacccttcccttgtcaccaagcaagccaaccttgtgcacttcccaccaggcttccagcccattccctgcaagcctttgttctttgacctggccctcaaccatgtggctttcccaccccttgaggacaagttggaacagaagaccaagagtggcctcactggatacatcaagggcatctttggattcaggagctaaccaggctcttcctcgggggcgggggagattctgactcttaatctgtattgtgagaaaatcccagcaagttccatgatattaaatccaggtctgcattggcccggggcaagagtttaacatcttcggccctgcattcctacatcttgtgtctgtacacgttcttaagcagcgtgtcaggagagcaccctgttgtcttctggtaaatgtgtgcagggtcatcctgtctcctgtacctcctgggaaaggggccgctgctgtctggtgccctgtgagctgtgattgattgcctttggtcagtaatgcgttcaggagtccacaccaggcacagatggggccttgaaacgctttgtcatgcttcttcagtaccatggatttgaaatgaactcatccttgctgtgagcatccaggagcccttgagaagtttatctatgactatgaaactggcaacgtcaccccagaattacggtcagccttattccccttcacctcccagtgaacgctaagaagtttcagacaagcagagagctctatttttagaagaaatatgttacactcagaaatgatgaaaccaaatcttatattaaaaggcaaagatgacggagactgtgcccatttcttatatgccctccctcatgtccagtccccgttctctcctcgggagcctagttgcgtgaagccggtgaggtcaagtgtaacctgacttaccggcaactaggtgaggctgatgccagatacacatgttagaggcactatttttcaggacttcccaatgtgtaatttttagatgccattatattttaatccccttcgttaccccccgtttttccttagtcatcccttttcacttctattataacatcaataatagaagtcacaaaaacaatgtaagaaagcaaggaataaaagtgatttaaacatgtacctg

SEQ ID NO: 11071 - protein, 456 aa, Homo sapiens [sequence omitted]

SEQ ID NO: 11072 - DNA, 1716 bp, Homo sapiens
gactttttccttcattgctttttaggatgtttgtaaaattcccagtgggaacttagagctttgtgggagcagtggggaggttttttggtttcagcaccttgatgcagaggcttagttaaagggagcagaggtgatacgtggcagtcaagaggttttaaacttgaactgtaccctaccgacaggaaaagaggcaaatcctgtgtagctggctgaaagcgaagaaactaaggagcgcctgtttgaatcaatgctcagcgagtgtcgggacgccatccaggtggttcgggaggagctcaagccagatcagaaacagagagattatatccttgaaggagagccagggaaggtgtctaatcttcaatacttgcatagctacctgacttacatcaagctatcaacggcaatcaagcgtaatgagaacatggccaaaggtctgcagagggctctgctgcagcagcagccagaggatgacagcaagcgctcaccccggccccaggacctgatccgactctatgacatcatcttacagaatctggtggaattgctccagcttcctggtttagaggaagacaaagccttccagaaagagataggcctcaagactctggtgttcaaagcttacaggtgttttttcattgctcagtcctatgtgctggtgaagaagtggagcgaagcccttgtcctgtatgacagagtcctgaaatatgcaaatgaagtaaattctgatgctggcgccttcaagaacagcctaaaggacctgcctgatgtgcaagagctcatcactcaagtgcggtcagagaagtgctccctgcaggccgcagccatccttgatgcaaacgacgctcatcaaacagagacctcctcctcccaagtcaaggacaataagcctctggttgaacggtttgagacattctgcctggacccttcccttgtcaccaagcaagccaaccttgtgcacttcccaccaggcttccagcccattccctgcaagcctttgttctttgacctggccctcaaccatgtggctttcccaccccttgaggacaagttggaacagaagaccaagagtggcctcactggatacatcaagggcatctttggattcaggagctaaccaggctcttcctcgggggcgggggagattctgactcttaatctgtattgtgagaaaatcccagcaagttccatgatattaaatccaggtctgcattggcccggggcaagagtttaacatcttcggccctgcattcctacatcttgtgtctgtacacgttcttaagcagcgtgtcaggagagcaccctgttgtcttctggtaaatgtgtgcagggtcatcctgtctcctgtacctcctgggaaaggggccgctgctgtctggtgccctgtgagctgtgattgattgcctttggtcagtaatgcgttcaggagtccacaccaggcacagatggggccttgaaacgctttgtcatgcttcttcagtaccatggatttgaaatgaactcatccttgctgtgagcatccaggagcccttgagaagtttatctatgactatgaaactggcaacgtcaccccagaattacggtcagccttattccccttcacctcccagtgaacgctaagaagtttcagacaagcagagagctctatttttagaagaaatatgttacactcagaaatgatgaaaccaaatcttatattaaaaggcaaagatgacggag

SEQ ID NO: 11073 - protein, 288 aa, Homo sapiens; identical to SEQ ID NO: 11063

SEQ ID NO: 11074 - DNA, 1628 bp, Homo sapiens
gccaaacaggcagctaccatgagtgaagtggagtggagagggagaacggttccagtgaagattgacaaagtgcgcattttcttattaggactggctgataacgaagcagctattgtccaggctgaaagcgaagaaactaaggagcgcctgtttgaatcaatgctcagcgagtgtcgggacgccatccaggtggttcgggaggagctcaagccagatcagaaacagagagattatatccttgaaggagagccagggaaggtgtctaatcttcaatacttgcatagctacctgacttacatcaagctatcaacggcaatcaagcgtaatgagaacatggccaaaggtctgcagagggctctgctgcagcagcagccagaggatgacagcaagcgctcaccccggccccaggacctgatccgactctatgacatcatcttacagaatctggtggaattgctccagcttcctggtttagaggaagacaaagccttccagaaagagataggcctcaagactctggtgttcaaagcttacaggtgttttttcattgctcagtcctatgtgctggtgaagaagtggagcgaagcccttgtcctgtatgacagagtcctgaaatatgcaaatgaagtaaattctgatgctggcgccttcaagaacagcctaaaggacctgcctgatgtgcaagagctcatcactcaagtgcggtcagagaagtgctccctgcaggccgcagccatccttgatgcaaacgacgctcatcaaacagagacctcctcctcccaagtcaaggacaataagcctctggttgaacggtttgagacattctgcctggacccttcccttgtcaccaagcaagccaaccttgtgcacttcccaccaggcttccagcccattccctgcaagcctttgttctttgacctggccctcaaccatgtggctttcccaccccttgaggacaagttggaacagaagaccaagagtggcctcactggatacatcaagggcatctttggattcaggagctaaccaggctcttcctcgggggcgggggagattctgactcttaatctgtattgtgagaaaatcccagcaagttccatgatattaaatccaggtctgcattggcccggggcaagagtttaacatcttcggccctgcattcctacatcttgtgtctgtacacgttcttaagcagcgtgtcaggagagcaccctgttgtcttctggtaaatgtgtgcagggtcatcctgtctcctgtacctcctgggaaaggggccgctgctgtctggtgccctgtgagctgtgattgattgcctttggtcagtaatgcgttcaggagtccacaccaggcacagatggggccttgaaacgctttgtcatgcttcttcagtaccatggatttgaaatgaactcatccttgctgtgagcatccaggagcccttgagaagtttatctatgactatgaaactggcaacgtcaccccagaattacggtcagccttattccccttcacctcccagtgaacgctaagaagtttcagacaagcagagagctctatttttagaagaaatatgttacactcagaaatgatgaaaccaaatcttatattaaaaggcaaagatgacggag

SEQ ID NO: 11075 - protein, 335 aa, Homo sapiens; identical to SEQ ID NO: 11065

SEQ ID NO: 11076 - DNA, 2388 bp, Homo sapiens
gcggcgcaggggcaagatggctgctgagaagcaggtcccaggcggcggcggcggcggcggcagtggcggcggcggtggcagtggcggcggcggtagcggcggtggacgtggtgccggaggggaagaaaataaagaaaacgaacgcccttcggccggatcgaaggcaaacaaagaatttggggatagcctgagtttggagattcttcagattattaaggaatcccagcagcagcatggtttacggcatggagattttcagaggtacagatacttgcttctggttctgatggatgctgaaagagcctggagctacgccatgcagctgaaacaggaagccaacactgaaccccgaaaacggtttcacttgttatctcgcctacgcaaagccgtgaagcatgcagaggaattggaacgcttgtgtgagagcaatcgcgtggatgccaagaccaaattagaggctcaggcttacacagcttacctctcaggaatgctacgttttgaacatcaagaatggaaagctgccattgaggcttttaacaaatgcaaaactatctatgagaagctagccagtgctttcacagaggagcaggctgtgctgtataaccaacgtgtggaagagatttcacccaacatccgctattgtgcatataatattggggaccagtcagccatcaatgaactcatgcagatgagattgaggtctgggggcactgagggtctcttggctgaaaaattggaggctttgatcactcagactcgagccaaacaggcagctaccatgagtgaagtggagtggagagggagaacggttccagtgaagattgacaaagtgcgcattttcttattaggactggctgataacgaagcagctattgtccaggctgaaagcgaagaaactaaggagcgcctgtttgaatcaatgctcagcgagtgtcgggacgccatccaggtggttcgggaggagctcaagccagatcagaaacagagagattatatccttgaaggagagccagggaaggtgtctaatcttcaatacttgcatagctacctgacttacatcaagctatcaacggcaatcaagcgtaatgagaacatggccaaaggtctgcagagggctctgctgcagcagcagccagaggatgacagcaagcgctcaccccggccccaggacctgatccgactctatgacatcatcttacagaatctggtggaattgctccagcttcctggtttagaggaagacaaagccttccagaaagagataggcctcaagactctggtgttcaaagcttacaggtgttttttcattgctcagtcctatgtgctggtgaagaagtggagcgaagcccttgtcctgtatgacagagtcctgaaatatgcaaatgaagtaaattctgatgctggcgccttcaagaacagcctaaaggacctgcctgatgtgcaagagctcatcactcaagtgcggtcagagaagtgctccctgcaggccgcagccatccttgatgcaaacgacgctcatcaaacagagacctcctcctcccaagtcaaggacaataagcctctggttgaacggtttgagacattctgcctggacccttcccttgtcaccaagcaagccaaccttgtgcacttcccaccaggcttccagcccattccctgcaagcctttgttctttgacctggccctcaaccatgtggctttcccaccccttgaggacaagttggaacagaagaccaagagtggcctcactggatacatcaagggcatctttggattcaggagctaaccaggctcttcctcgggggcgggggagattctgactcttaatctgtattgtgagaaaatcccagcaagttccatgatattaaatccaggtctgcattggcccggggcaagagtttaacatcttcggccctgcattcctacatcttgtgtctgtacacgttcttaagcagcgtgtcaggagagcaccctgttgtcttctggtaaatgtgtgcagggtcatcctgtctcctgtacctcctgggaaaggggccgctgctgtctggtgccctgtgagctgtgattgattgcctttggtcagtaatgcgttcaggagtccacaccaggcacagatggggccttgaaacgctttgtcatgcttcttcagtaccatggatttgaaatgaactcatccttgctgtgagcatccaggagcccttgagaagtttatctatgactatgaaactggcaacgtcaccccagaattacggtcagccttattccccttcacctcccagtgaacgctaagaagtttcagacaagcagagagctctatttttagaagaaatatgttacactcagaaatgatgaaaccaaatcttatattaaaaggcaaagatgacggag

SEQ ID NO: 11077 - protein, 589 aa, Homo sapiens; identical to SEQ ID NO: 11067

SEQ ID NO: 11078 - DNA, 2654 bp, Homo sapiens
ggatccctcgcgcaggcgcgctccagcacatggcgccctgctgcagcaagggccgacggcggcggagtccgccgctatcccatcagcccggccaggcaggtccagctctcacccgcccaggtcgtcccgcctcccctatcccgtcttgctctgcggcgcaggggcaagatggctgctgagaagcaggtcccaggcggcggcggcggcggcggcagtggcggcggcggtggcagtggcggcggcggtagcggcggtggacgtggtgccggaggggaagaaaataaagaaaacgaacgcccttcggccggatcgaaggcaaacaaagaatttggggatagcctgagtttggagattcttcagattattaaggaatcccagcagcagcatggtttacggcatggagattttcagaggtacaggggctactgttcccgtagacaaagacgtcttcgaaaaacactcaacttcaagatgggtaacagacacaaattcacagggaagaaagtgactgaagagcttctgaccgataatagatacttgcttctggttctgatggatgctgaaagagcctggagctacgccatgcagctgaaacaggaagccaacactgaaccccgaaaacggtttcacttgttatctcgcctacgcaaagccgtgaagcatgcagaggaattggaacgcttgtgtgagagcaatcgcgtggatgccaagaccaaattagaggctcaggcttacacagcttacctctcaggaatgctacgttttgaacatcaagaatggaaagctgccattgaggcttttaacaaatgcaaaactatctatgagaagctagccagtgctttcacagaggagcaggctgtgctgtataaccaacgtgtggaagagatttcacccaacatccgctattgtgcatataatattggggaccagtcagccatcaatgaactcatgcagatgagattgaggtctgggggcactgagggtctcttggctgaaaaattggaggctttgatcactcagactcgagccaaacaggcagctaccatgagtgaagtggagtggagagggagaacggttccagtgaagattgacaaagtgcgcattttcttattaggactggctgataacgaagcagctattgtccaggctgaaagcgaagaaactaaggagcgcctgtttgaatcaatgctcagcgagtgtcgggacgccatccaggtggttcgggaggagctcaagccagatcagaaacagagagattatatccttgaaggagagccagggaaggtgtctaatcttcaatacttgcatagctacctgacttacatcaagctatcaacggcaatcaagcgtaatgagaacatggccaaaggtctgcagagggctctgctgcagcagcagccagaggatgacagcaagcgctcaccccggccccaggacctgatccgactctatgacatcatcttacagaatctggtggaattgctccagcttcctggtttagaggaagacaaagccttccagaaagagataggcctcaagactctggtgttcaaagcttacaggtgttttttcattgctcagtcctatgtgctggtgaagaagtggagcgaagcccttgtcctgtatgacagagtcctgaaatatgcaaatgaagtaaattctgatgctggcgccttcaagaacagcctaaaggacctgcctgatgtgcaagagctcatcactcaagtgcggtcagagaagtgctccctgcaggccgcagccatccttgatgcaaacgacgctcatcaaacagagacctcctcctcccaagtcaaggacaataagcctctggttgaacggtttgagacattctgcctggacccttcccttgtcaccaagcaagccaaccttgtgcacttcccaccaggcttccagcccattccctgcaagcctttgttctttgacctggccctcaaccatgtggctttcccaccccttgaggacaagttggaacagaagaccaagagtggcctcactggatacatcaagggcatctttggattcaggagctaaccaggctcttcctcgggggcgggggagattctgactcttaatctgtattgtgagaaaatcccagcaagttccatgatattaaatccaggtctgcattggcccggggcaagagtttaacatcttcggccctgcattcctacatcttgtgtctgtacacgttcttaagcagcgtgtcaggagagcaccctgttgtcttctggtaaatgtgtgcagggtcatcctgtctcctgtacctcctgggaaaggggccgctgctgtctggtgccctgtgagctgtgattgattgcctttggtcagtaatgcgttcaggagtccacaccaggcacagatggggccttgaaacgctttgtcatgcttcttcagtaccatggatttgaaatgaactcatccttgctgtgagcatccaggagcccttgagaagtttatctatgactatgaaactggcaacgtcaccccagaattacggtcagccttattccccttcacctcccagtgaacgctaagaagtttcagacaagcagagagctctatttttagaagaaatatgttacactcagaaatgatgaaaccaaatcttatattaaaaggcaaagatgacggag

SEQ ID NO: 11079 - protein, 627 aa, Homo sapiens; identical to SEQ ID NO: 1811

SEQ ID NO: 11080 - DNA, 2107 bp, Homo sapiens
ggatccctcgcgcaggcgcgctccagcacatggcgccctgctgcagcaagggccgacggcggcggagtccgccgctatcccatcagcccggccaggcaggtccagctctcacccgcccaggtcgtcccgcctcccctatcccgtcttgctctgcggcgcaggggcaagatggctgctgagaagcaggtcccaggcggcggcggcggcggcggcagtggcggcggcggtggcagtggcggcggcggtagcggcggtggacgtggtgccggaggggaagaaaataaagaaaacgaacgcccttcggccggatcgaaggcaaacaaagaatttggggatagcctgagtttggagattcttcagattattaaggaatcccagcagcagcatggtttacggcatggagattttcagaggtacaggggctactgttcccgtagacaaagacgtcttcgaaaaacactcaacttcaagatgggtaacagacacaaattcacagggaagaaagtgactgaagagcttctgaccgataatagatacttgcttctggttctgatggatgctgaaagagcctggagctacgccatgcagctgaaacaggaagccaacactgaaccccgaaaacggtttcacttgttatctcgcctacgcaaagccgtgaagcatgcagaggaattggaacgcttgtgtgagagcaatcgcgtggatgccaagaccaaattagaggctcaggcttacacagcttacctctcaggaatgctacgttttgaacatcaagaatggaaagctgccattgaggcttttaacaaatgcaaaactatctatgagaagctagccagtgctttcacagaggagcaggctgtgctgtataaccaacgtgtggaagagatttcacccaacatccgctattgtgcatataatattggggaccagtcagccatcaatgaactcatgcagatgagattgaggtctgggggcactgagggtctcttggctgaaaaattggaggctttgatcactcagactcgagccaaacaggcagctaccatgagtgaagtggagtggagagggagaacggttccagtgaagattgacaaagtgcgcattttcttattaggactggctgataacgaagcagctattgtccaggctgaaagcgaagaaactaaggagcgcctgtttgaatcaatgctcagcgagtgtcgggacgccatccaggtggttcgggaggagctcaagccagatcagagacctcctcctcccaagtcaaggacaataagcctctggttgaacggtttgagacattctgcctggacccttcccttgtcaccaagcaagccaaccttgtgcacttcccaccaggcttccagcccattccctgcaagcctttgttctttgacctggccctcaaccatgtggctttcccaccccttgaggacaagttggaacagaagaccaagagtggcctcactggatacatcaagggcatctttggattcaggagctaaccaggctcttcctcgggggcgggggagattctgactcttaatctgtattgtgagaaaatcccagcaagttccatgatattaaatccaggtctgcattggcccggggcaagagtttaacatcttcggccctgcattcctacatcttgtgtctgtacacgttcttaagcagcgtgtcaggagagcaccctgttgtcttctggtaaatgtgtgcagggtcatcctgtctcctgtacctcctgggaaaggggccgctgctgtctggtgccctgtgagctgtgattgattgcctttggtcagtaatgcgttcaggagtccacaccaggcacagatggggccttgaaacgctttgtcatgcttcttcagtaccatggatttgaaatgaactcatccttgctgtgagcatccaggagcccttgagaagtttatctatgactatgaaactggcaacgtcaccccagaattacggtcagccttattccccttcacctcccagtgaacgctaagaagtttcagacaagcagagagctctatttttagaagaaatatgttacactcagaaatgatgaaaccaaatcttatattaaaaggcaaagatgacggag

SEQ ID NO: 11081 - protein, 456 aa, Homo sapiens [sequence omitted]

SEQ ID NO: 11082 - DNA, 1969 bp, Homo sapiens
ccctatcccgtcttgctctgcggcgcaggggcaagatggctgctgagaagcaggtcccaggcggcggcggcggcggcggcagtggcggcggcggtggcagtggcggcggcggtagcggcggtggacgtggtgccggaggggaagaaaataaagaaaacgaacgcccttcggccggatcgaaggcaaacaaagaatttggggatagcctgagtttggagattcttcagattattaaggaatcccagcagcagcatggtttacggcatggagattttcagaggtacaggggctactgttcccgtagacaaagacgtcttcgaaaaacactcaacttcaagatgggtaacagacacaaattcacagggaagaaagtgactgaagagcttctgaccgataatagatacttgcttctggttctgatggatgctgaaagagcctggagctacgccatgcagctgaaacaggaagccaacactgaaccccgaaaacggtttcacttgttatctcgcctacgcaaagccgtgaagcatgcagaggaattggaacgcttgtgtgagagcaatcgcgtggatgccaagaccaaattagaggctcaggcttacacagcttacctctcaggaatgctacgttttgaacatcaagaatggaaagctgccattgaggcttttaacaaatgcaaaactatctatgagaagctagccagtgctttcacagaggagcaggctgtgctgtataaccaacgtgtggaagagatttcacccaacatccgctattgtgcatataatattggtgagagcagactcgagccaaacaggcagctaccatgagtgaagtggagtggagagggagaacggttccagtgaagattgacaaagtgcgcattttcttattaggactggctgataacgaagcagctattgtccaggctgaaagcgaagaaactaaggagcgcctgtttgaatcaatgctcagcgagtgtcgggacgccatccaggtggttcgggaggagctcaagccagatcagaaacagagagattatatccttgaaggagagccagggaaggtgtctaatcttcaatacttgcatagctacctgacttacatcaagctatcaacggcaatcaagcgtaatgagaacatggccaaaggtctgcagagggctctgctgcagcagcagccagaggatgacagcaagcgctcaccccggccccaggacctgatccgactctatgacatcatcttacagaatctggtggaattgctccagcttcctggtttagaggaagacaaagccttccagaaagagataggcctcaagactctggtgttcaaagcttacaggtgttttttcattgctcagtcctatgtgctggtgaagaagtggagcgaagcccttgtcctgtatgacagagtcctgaaatatgcaaatgaagtaaattctgatgctggcgccttcaagaacagcctaaaggacctgcctgatgtgcaagagctcatcactcaagtgcggtcagagaagtgctccctgcaggccgcagccatccttgatgcaaacgacgctcatcaaacagagacctcctcctcccaagtcaaggacaataagcctctggttgaacggtttgagacattctgcctggacccttcccttgtcaccaagcaagccaaccttgtgcacttcccaccaggcttccagcccattccctgcaagcctttgttctttgacctggccctcaaccatgtggctttcccaccccttgaggacaagttggaacagaagaccaagagtggcctcactggatacatcaagggcatctttggattcaggagctaaccaggctcttcctcgggggcgggggagattctgactcttaatctgtattgtgagaaaatcccagcaagttccatgatattaaatccaggtctgcattggcccggggcaagagtttaacatcttcggccctgcattcct

SEQ ID NO: 11083 - protein, 335 aa, Homo sapiens; identical to SEQ ID NO: 11065

SEQ ID NO: 11084 - DNA, 2190 bp, Homo sapiens
ggatccctcgcgcaggcgcgctccagcacatggcgccctgctgcagcaagggccgacggcggcggagtccgccgctatcccatcagcccggccaggcaggtccagctctcacccgcccaggtcgtcccgcctcccctatcccgtcttgctctgcggcgcaggggcaagatggctgctgagaagcaggtcccaggcggcggcggcggcggcggcagtggcggcggcggtggcagtggcggcggcggtagcggcggtggacgtggtgccggaggggaagaaaataaagaaaacgaacgcccttcggccggatcgaaggcaaacaaagaatttggggatagcctgagtttggagattcttcagattattaaggaatcccagcagcagcatggtttacggcatggagattttcagaggtacaggggctactgttcccgtagacaaagacgtcttcgaaaaacactcaacttcaagatgggtaacagacacaaattcacagggaagaaagtgactgaagagcttctgaccgataatagatacttgcttctggttctgatggatgctgaaagagcctggagctacgccatgcagctgaaacaggaagccaacactgaaccccgaaaacggtttcacttgttatctcgcctacgcaaagccgtgaagcatgcagaggaattggaacgcttgtgtgagagcaatcgcgtggatgccaagaccaaattagaggctcaggcttacacagcttacctctcaggaatgctacgttttgaacatcaagaatggaaagctgccattgaggcttttaacaaatgcaaaactatctatgagaagctagccagtgctttcacagaggagcaggctgtgctgtataaccaacgtgtggaagagatttcacccaacatccgctattgtgcatataatattggggaccagtcagccatcaatgaactcatgcagatgagattgaggtctgggggcactgagggtctcttggctgaaaaattggaggctttgatcactcagactcgagccaaacaggcagctaccatgagtgaagtggagtggagagggagaacggttccagtgaagattgacaaagtgcgcattttcttattaggactggctgataacgaagcagctattgtccaggctgaaagcgaagaaactaaggagcgcctgtttgaatcaatgctcagcgagtgtcgggacgccatccaggtggttcgggaggagctcaagccagatcagaaacagagagattatatccttgaaggagagccagggaaggtgtctaatcttcaatacttgcatagctacctgacttacatcaagctatcaacggcaatcaagcgtaatgagaacatggccaaaggtctgcagagggctctgctgcagcagcagccagaggatgacagcaagcgctcaccccggccccaggacctgatccgactctatgacatcatcttacagaatctggtggaattgctccagcttcctggtttagaggaagacaaagccttccagaaagagataggcctcaagactctggtgttcaaagcttacaggtgttttttcattgctcagtcctatgtgctggtgaagaagtggagcgaagcccttgtcctgtatgacagagtcctgaaatatgcaaatgaagtaaattctgatgctggcgccttcaagaacagcctaaaggacctgcctgatgtgcaagagctcatcactcaagtgcggtcagagaagtgctccctgcaggccgcagccatccttgatgcaaacgacgctcatcaaacagagacctcctcctcccaagtcaaggacaataagcctctggttgaacggtttgagacattctgcctggacccttcccttgtcaccaagcaagccaaccttgtgcacttcccaccaggcttccagcccattccctgcaagcctttgttctttgacctggccctcaaccatgtggctttcccaccccttgaggacaagttggaacagaagaccaagagtggcctcactggatacatcaagggcatctttggattcaggagctaaccaggctcttcctcgggggcgggggagattctgactcttaatctgtattgtgagaaaatcccagcaagttccatgatattaaatccaggtctgcattggcccggggcaagagtttaacatcttcggccctgcattcct

SEQ ID NO: 11085 - protein, 627 aa, Homo sapiens; identical to SEQ ID NO: 1811

SEQ ID NO: 11086 - DNA, 3552 bp, Homo sapiens
gtggacttctccagtgcctcccttttctgaaaacactatccctgtggttgattcaggcatctaggctgaaaacctcagatctatttgtctcttttgtccctgtcaccaaacccaccttcttctccctttgcagggcctcttgcctattgttgcttcacctgtttctattagccttttctcgtgtgcctaggcaaccgcaaaggtctcctaattgcttcttctggcttggtctcggttcccttctccaggcctttctttcgcaaagtacaaatggaatctttctaaatctagtttccctgtctaattttaaaaagcccagtgatttcctctagggattgagcaatggcctccaaacttttatgctgataaaccccataggcagcattgagcctgcaccactgatgcatttatttatgaattatatagcttattatttgactaatttgtcatatataaactgcattaaaataagggcttttttgaatgagataaatagaaatagaaattctaattttcgtttcatacccagactccctgggttttatgcgccctacttagagaccactggcctctcagttcagacttgagctggtgtacaagccttccttagtctgttcccagccttgtacttcactgcatccttctgagtcctctgcctcaagctgttccacttactggcatctcagtaatgcctttcccaccccgtgtgttacactgttctcattcccctccctccgcacacttgggtaatctttcctgcccctcttcacctgtccaaaccccatctgtttttcaaggtccagctcatagcttaccatttctgaaaagcatatgcctgcaccatcctagcccacagagatctctgcagtttctaaatatctgatacttgcagctataagctttgatagttaattaagtattacctcttcataaaaactttattgtggtaaaaaacgttaaacataaaaccttaaccatttttaagtgtatggttcagtggtaattaaatgcattcataacgtacaaccatcaccaacagtccatctccagaactctctgcattttgtaaaactgaaacgctgaacccattaaacaacaataacttcgttgcctagcaactatttttttttcagcatctgccacaaagccttgagtataaactttgttttgaatcactgctttctctaaggagtcacctgcttccttgccccgttaggctgcctttatgtattgtgcttcccttcatcgacttaacagaggtgcctacagagtcccagcccctgtcactgtcattcaccttgaatgcatagcagttgggagacacctcacagaatgtaaggaatgtgatgccgcaaaggcgcattcatttcctgttgctgcgatcatattaaccacaaacttgatggtttaagatgatccaaatgtattatcttacgcttctcgaggtcagaaatctagtgggttcacagggctgtgttcctttagaaaccctaggggaatccttttccagtattcccaagaatgcatctcctggcttctagcggctgcctgtagtccttggcttgtggctctccgtttgtgcttcaaagcgatcagctcctctcccctctgcttccgttccttcatcttctgcatctctgacccatctgcctccctcttctcaggaccctgggatgacattggacccacccagataattcagagatccctaatttaatcacatctgtagagtctcttttaccatatatggtaacatcttcccagattgcacggaggctagcatatagacagctctggcgtatgttattcggccagccacaaaaggcacactctgacagcacaaggggtggaactgggatctgtggcacagaccttcacacagagccgtggactgtggaatgtctgattttaatgctttggggttaggcacggggaggagtggacaggaagtctcatctggccgttactctcagttctcttatttgaggtcaatttttagatgccagtggcaacttgagtgccactgtcattctagattatgtcaagtatagatctttgatatttgaggactcctgtcttactagagtttgtgtctatgttcagggcactttggagaccccaccattccatgaggtggtcagagcgatggagagcatcagttgctttactttttacctttttcactttctgcagaaacagagagattatatccttgaaggagagccagggaaggtgtctaatcttcaatacttgcatagctacctgacttacatcaagctatcaacggcaatcaagcgtaatgagaacatggccaaaggtctgcagagggctctgctgcagcagcagccagaggatgacagcaagcgctcaccccggccccaggacctgatccgactctatgacatcatcttacagaatctggtggaattgctccagcttcctggtttagaggaagacaaagccttccagaaagagataggcctcaagactctggtgttcaaagcttacaggtaacgtcccatgggatgggcagttttcctccgcctcccaggttctataagcattgggagcatgacccagcccacagcagatgggaccgttggccttgagtgtatggttaccttgcctgtgatcagaggaaggtcagcccagcatgttcaaggggagtttctaaaggctgtggtcagtagtggccagtgatgatgtctgccttttggccaggtcggaggagtggagcacacacgttaaacttggcttcctcgctgggcgcggtggctcacacttgtcatcccagaactttgggaggctgaggcaggtggatcacctgaggtcgggagttcgagaccagcctgaccaacatggagaaactccgtctctattaaaaatacaaaattagccaggcatggtggtgcatgcctgtaaacccagctccttgggagcctgaggcaggagaatcgcttgaacccgggaggctcaccgcaacttggcggtgagccaagatcgcaccattgcactccagcctgggagacaagagcgaaactccatctcaaaaaaaacaaaaacacttgtcttcctgtactttcctcctcccttccaggggaaaaggggcacgccttgaaagggtgttaattagcagaaccagtgtggccagttcaaggaacttgaactgacttgggataaagctaaactcagtttcttaaatgacttgtgtcatttgtaacttggaagtgggctgggtagcacgatggggcccagccaggatggaaggcagagccccatgcattcttgcccttcctcttgtggccctcacatgccagtgtgctctggtgctccagcatgccccgtcttcactccatggccccttctgtcctgtcagggaccagcagcgctcaggctctgctgagcccaggagaggaatttgactcaggaagaaccttctgtgagttttgtttttggaaagcgatgagcagagatgaatgattgcgacttgggtgtgtggatgggtttgggatttctatttgagccgggcagcgttcttccttccttcctgtc

SEQ ID NO: 11087 - protein, 122 aa, Homo sapiens
MESISCFTFYLFHFLQKQRDYILEGEPGKVSNLQYLHSYLTYIKLSTAIKRNENMAKGLQRALLQQQPEDDSKRSPRPQDLIRLYDIILQNLVELLQLPGLEEDKAFQKEIGLKTLVFKAYR

SEQ ID NO: 11088 - DNA, 534 bp, Homo sapiens
agggtgggagggagtgagagataaaagactacacattgggtaccgtgtacactgcttgggtgacaggtgcaccagagtctcagaaatcaccatagaagaacttatccatgtaaccagaaaccacctgttcccccaaaactattgaaatttaatttaatttttaaaagatcagcctaggccgggcgtgagccacagcgcccagctcaggcttggtgattcttatcctcaagttatggttaatattttaatatttgagtggaagagggaccatttatctttttcttaaaaaacaatgtatatttatatatattcatgtatattctcaagtgagatttgtttccttctttaccagatttccatgtatttttttcctaaacctcactgggctgggtaaggtttgattcttgtccccatagtaggggtgtggttgggaatgtggtcagacttgccttgtgtgtctcttagtcatactaccaccttccagcaatttccatagacaagtgaaaacaatctgagaatgtgctttttaaagcg

SEQ ID NO: 11089 - protein, 33 aa, Homo sapiens
MYIYIYSCIFSSEICFLLYQISMYFFPKPHWAG

SEQ ID NO: 11090 - DNA, 1356 bp, Homo sapiens
agcggccgcagccccgggagcttcccgctcgcggagacccagacggctgcaggagcccgggcagcctcggggtcagcggcaccatgaacgtctcgggctgcccaggggccgggaacgcgagccaggcgggcggcgggggaggctggcaccccgaggcggtcatcgtgcccctgctcttcgcgctcatcttcctcgtgggcaccgtgggcaacacgctggtgctggcggtgctgctgcgcggcggccaggcggtcagcactaccaacctgttcatccttaacctgggcgtggccgacctgtgtttcatcctgtgctgcgtgcccttccaggccaccatctacaccctggacggctgggtgttcggctcgctgctgtgcaaggcggtgcacttcctcatcttcctcaccatgcacgccagcagcttcacgctggccgccgtctccctggacaggtatctggccatccgctacccgctgcactcccgcgagctgcgcacgcctcgaaacgcgctggcagccatcgggctcatctgggggctgtcgctgctcttctccgggccctacctgagctactaccgccagtcgcagctggccaacctgaccgtgtgccatcccgcgtggagcgcccctcgccgccgcgccatggacatctgcaccttcgtcttcagctacctgcttcctgtgctggttctcggcctgacctacgcgcgcaccttgcgctacctctggcgcgccgtcgacccggtggccgcgggctcgggtgcccggcgcgccaagcgcaaggtgacacgcatgatcctcatcgtggccgcgctcttctgcctctgctggatgccccaccacgcgctcatcctctgcgtgtggttcggccagttcccgctcacgcgcgccacttatgcgcttcgcatcctctcgcacctggtctcctacgccaactcctgcgtcaaccccatcgtttacgcgctggtctccaagcacttccgcaaaggcttccgcacgatctgcgcgggcctgctgggccgtgccccaggccgagcctcgggccgtgtgtgcgctgccgcgcggggcacccacagtggcagcgtgttggagcgcgagtccagcgacctgttgcacatgagcgaggcggcgggggcccttcgtccctgccccggcgcttcccagccatgcatcctcgagccctgtcctggcccgtcctggcagggcccaaaggcaggcgacagcatcctgacggttgatgtggcctgaaagcacttagcgggcgcgctgggatgtcacagagttggagtcattgttgggggaccgtggggagagctttgcctgttaataaaacgcacaaaccatttcacacacagtg

SEQ ID NO: 11091 - protein, 387 aa, Homo sapiens; identical to SEQ ID NO: 1813

SEQ ID NO: 11092 - DNA, 3223 bp, Homo sapiens
aattgctcagctgccagagaagtgactggaatagaggttgtagcttaggcaccgctgctccctccagtccctccgtgcagccgatgatggccctatggtccctgctccatctcaccttcctggggttcagcattaccttgctgttggtccacgggcagggcttccaagggacagcagccatctggccatccctcttcaacgtcaacttgtccaagaaggttcaggaaagcatccagatcccgaacaatgggagtgcgcccctgctcgtggatgtgcgggtgtttgtctccaacgtgtttaatgtggacatcctgcgatacacaatgtcctccatgctgctgcttaggctgtcctggctggacactcgcctggcctggaacactagtgcacacccgcggcacgccatcacgctgccctgggagtctctctggacaccaaggctcaccatcctggaggcgctctgggtggactggagggaccagagcccccaggctcgagtagaccaggacggccacgtgaagctcaacctggccctcgccacggagaccaactgcaactttgagctcctccacttcccccgggaccacagcaactgcagcctcagcttctacgctctcagcaacacgggtgctgacagggcaggggctgcagggttgaggaggggaggaggaaggtgggggaggggaactcccaggtctgtggtgcaggggcagggtgcggggcaaggggaaggggcaaaggcagacagaaggcgaactcccaggtctgtgttcagagcagtctaccccaggcttaggcgggcagcacctgctctcccactgcgccccccactcgagtggcagcccatctctgtgctcagcggtagcctcagggcccctctctagggtgacagactcaaacattcgcagcagctctgcaatcccagaggtccgagcacatcagtcttctgtcctccccagagcaactgccctccacagccatggcgactgcagtggctcggccccttgcagcaaggccagaggctcaggttgccatggcctcactcctggaaaccacctgaaggtgcagccaccctgtataaacccatcaggtgacatctaacttggcagagaagtcctacccttccctccatgagagaccacagcggtagccctggggatcctgcttcagctgtgagatgatagactgacgagcctgtgaccacttctccctccatcatgaagtggtgcaaagtacatttatttttacaatgaaagctcatctatgaatctgataaaggccttccttcaactggagacaatttgggatgttgcaaaacaagcgatggagttagagttccaggcccacgtggtgaacgagattgtgagtgtcaagagggaatacgtagtttatgatctgaagacccaagtcccaccccagcagctggtgccctgcttccaggtgacgctgaggctgaagaacacggcgctcaagtccatcatcgctctcttggtgcctgcagaggcactgctgttggctgacgtgtgcggggggttgctgcccctccgggccattgagcgcataggctacaaggtgacattgctgctgagttacctcgtcctccactcctccctggtgcaggccctgcccagctcctcctcctgcaacccactgctcatttactacttcaccatcctgctgctgctgctcttcctcagcaccatagagactgtgctgctggctgggctgctggcccggggcaaccttggggccaagagcggccccagcccagccccgagaggggaacagcgagagcacggcaacccagggcctcatcctgctgaagagccctccagaggagtaaaggggtcacagagaagctggcctgagactgctgaccgcatcttcttcctcgtgtatgtggttggggtgctgtgcacccaattcgtctttgcaggaatctggatgtgggcagcgtgcaagtctgacgcagcccctggagaggctgcaccccatggcaggcggcctagactgtaaaggggcagggcctgggctgcacaccttaggatgaagtttgctttcccatggctgggggcgggccatgacagggcctctggattaagccaccctgagctctccctccgctagcacacaagcacagagcgtgaaataaacccatctccagtgcaagtgtgcctcaagggtcagtcttcaatctcgtcctaaataggtggggccctattttttgcttccaacccccattttgctccttaacttttccccattgtccctgtctcccagcccacaggcaggcagcctaattgctccttctgcaaccacgactgcctggccctgggccaagaggcactgaggctgggggccagagacaggggcctgaggaaggctgtagagggtggggcggaactcctcctccgaacgcctcctgcagtgtgctggactctagggaaaatggccagtgagcctgcctcccccagccacctaggggactcctgggagggaaaggtcccagacctcaggcctgtgggcgggcgggaatgtgttttaagagagggggtcagtcccgactgcctttcctccaggagctctggctgcttctctgagccctgccacatctctgggctgtaggggagttctctgtccccacctctgacctaggctggagggagggcccttctgccctgctgctcttggtacacatggagcagcagtgggcacaggcctctgtcttccttctctcttttcctgtttcagaagccatcagggtcataaaagccaaggtgtggagggaccccaggcttccgggagagtgctggttcggctgggaacacgggctgtggggaaaaagcaggagccaggactagggggctcagggacacagctcccggaggcgtggagacaggtctctgtcccagaggacttcaagctcacccagcccagaggcaagctaacactggtttatctgtccaatgacacgccagtctggtggaaccaggcagggctagcagcaggctcaggcagaggtgtcgaaaaggcgatcgatcatgtcgcccacctgctccaccccgtacttgatgtacttctccgggttcttggtgaagggcacgctgccaaacctgaggaggcactgtggtcaggggacagggagggccgacccctccccagctccaccctcagcctaaggcactcctgatagtcttggaaggggtggccctgagcgattccc

SEQ ID NO: 11093 - protein, 266 aa, Homo sapiens
MMALWSLLHLTFLGFSITLLLVHGQGFQGTAAIWPSLFNVNLSKKVQESIQIPNNGSAPLLVDVRVFVSNVFNVDILRYTMSSMLLLRLSWLDTRLAWNTSAHPRHAITLPWESLWTPRLTILEALWVDWRDQSPQARVDQDGHVKLNLALATETNCNFELLHFPRDHSNCSLSFYALSNTGADRAGAAGLRRGGGRWGRGTPRSVVQGQGAGQGEGAKADRRRTPRSVFRAVYPRLRRAAPALPLRPPLEWQPISVLSGSLRAPL

SEQ ID NO: 11094 - DNA, 2483 bp, Homo sapiens
aggcaccgctgctccctccagtccctccgtgcagccgatgatggccctatggtccctgctccatctcaccttcctggggttcagcattaccttgctgttggtccacgggcagggcttccaagggacagcagccatctggccatccctcttcaacgtcaacttgtccaagaaggttcaggaaagcatccagatcccgaacaatgggagtgcgcccctgctcgtggatgtgcgggtgtttgtctccaacgtgtttaatgtggacatcctgcgatacacaatgtcctccatgctgctgcttaggctgtcctggctggacactcgcctggcctggaacactagtgcacacccgcggcacgccatcacgctgccctgggagtctctctggacaccaaggctcaccatcctggaggcgctctgggtggactggagggaccagagcccccaggctcgagtagaccaggacggccacgtgaagctcaacctggccctcgccacggagaccaactgcaactttgagctcctccacttcccccgggaccacagcaactgcagcctcagcttctacgctctcagcaacacggcgatggagttagagttccaggcccacgtggtgaacgagattgtgagtgtcaagagggaatacgtagtttatgatctgaagacccaagtcccaccccagcagctggtgccctgcttccaggtgacgctgaggctgaagaacacggcgctcaagtccatcatcgctctcttggtgcctgcagaggcactgctgttggctgacgtgtgcggggggttgctgcccctccgggccattgagcgcataggctacaaggtgacattgctgctgagttacctcgtcctccactcctccctggtgcaggccctgcccagctcctcctcctgcaacccactgctcatttactacttcaccatcctgctgctgctgctcttcctcagcaccatagagactgtgctgctggctgggctgctggcccggggcaaccttggggccaagagcggccccagcccagccccgagaggggaacagcgagagcacggcaacccagggcctcatcctgctgaagagccctccagaggagtaaaggggtcacagagaagctggcctgagactgctgaccgcatcttcttcctcgtgtatgtggttggggtgctgtgcacccaattcgtctttgcaggaatctggatgtgggcagcgtgcaagtctgacgcagcccctggagaggctgcaccccatggcaggcggcctagactgtaaaggggcagggcctgggctgcacaccttaggatgaagtttgctttcccatggctgggggcgggccatgacagggcctctggattaagccaccctgagctctccctccgctagcacacaagcacagagcgtgaaataaacccatctccagtgcaagtgtgcctcaagggtcagtcttcaatctcgtcctaaataggtggggccctattttttgcttccaacccccattttgctccttaacttttccccattgtccctgtctcccagcccacaggcaggcagcctaattgctccttctgcaaccacgactgcctggccctgggccaagaggcactgaggctgggggccagagacaggggcctgaggaaggctgtagagggtggggcggaactcctcctccgaacgcctcctgcagtgtgctggactctagggaaaatggccagtgagcctgcctcccccagccacctaggggactcctgggagggaaaggtcccagacctcaggcctgtgggcgggcgggaatgtgttttaagagagggggtcagtcccgactgcctttcctccaggagctctggctgcttctctgagccctgccacatctctgggctgtaggggagttctctgtccccacctctgacctaggctggagggagggcccttctgccctgctgctcttggtacacatggagcagcagtgggcacaggcctctgtcttccttctctcttttcctgtttcagaagccatcagggtcataaaagccaaggtgtggagggaccccaggcttccgggagagtgctggttcggctgggaacacgggctgtggggaaaaagcaggagccaggactagggggctcagggacacagctcccggaggcgtggagacaggtctctgtcccagaggacttcaagctcacccagcccagaggcaagctaacactggtttatctgtccaatgacacgccagtctggtggaaccaggcagggctagcagcaggctcaggcagaggtgtcgaaaaggcgatcgatcatgtcgcccacctgctccaccccgtacttgatgtacttctccgggttcttggtgaagggcacgctgccaaacctgaggaggcactgtggtcaggggacagggagggccgacccctccccagctccaccctcagcctaaggcactcctgatagtcttggaaggggtggccctgagcgattccc

SEQ ID NO: 11095 - protein, 412 aa, Homo sapiens
MMALWSLLHLTFLGFSITLLLVHGQGFQGTAAIWPSLFNVNLSKKVQESIQIPNNGSAPLLVDVRVFVSNVFNVDILRYTMSSMLLLRLSWLDTRLAWNTSAHPRHAITLPWESLWTPRLTILEALWVDWRDQSPQARVDQDGHVKLNLALATETNCNFELLHFPRDHSNCSLSFYALSNTAMELEFQAHVVNEIVSVKREYVVYDLKTQVPPQQLVPCFQVTLRLKNTALKSIIALLVPAEALLLADVCGGLLPLRAIERIGYKVTLLLSYLVLHSSLVQALPSSSSCNPLLIYYFTILLLLLFLSTIETVLLAGLLARGNLGAKSGPSPAPRGEQREHGNPGPHPAEEPSRGVKGSQRSWPETADRIFFLVYVVGVLCTQFVFAGIWMWAACKSDAAPGEAAPHGRRPRL

SEQ ID NO: 11096 - DNA, 1413 bp, Homo sapiens
tgtccctgagccccctagtcctggctcctgctttttccccacagcccgtgttcccagccgaaccagcactctcccggaagcctggggtccctccacaccttggcttttatgaccctgatggcttctgaaacaggaaaagagagaaggaagacagaggcctgtgcccactgctgctccatgtgtaccaagagcagcagggcagaagggccctccctccagcctaggtcagaggtggggacagagaactcccctacagcccagagatgtggcagggctcagagaagcagccagagctcctggaggaaaggcagtcgggactgaccccctctcttaaaacacattcccgcccgcccacaggcctgaggtctgggacctttccctcccaggagtcccctaggtggctgggggaggcaggctcactggccattttccctagagtccagcacactgcaggaggcgttcggaggaggagttccgccccaccctctacagccttcctcaggcccctgtctctggcccccagcctcagtgcctcttggcccagggccaggcagtcgtggttgcagaaggagcaattaggctgcctgcctgtgggctgggagacagggacaatggggaaaagttaaggagcaaaatgggggttggaagcaaaaaatagggccccacctatttaggacgagattgaagactgacccttgaggcacacttgcactggagatgggtttatttcacgctctgtgcttgtgtgctagcggagggagagctcagggtggcttaatccagaggccctgtcatggcccgcccccagccatgggaaagcaaacttcatcctaaggtgtgcagcccaggccctgcccctttacagtctaggccgcctgccatggggtgcagcctctccaggggctgcgtcagacttgcacgctgcccacatccagattccgtgcatcctcactcccacccgcctccagcagccctctgtcggcctcctcccgacttgactcaccgtcacctggaagcagggcaccagctgctggggtgggacttgggtcttcagatcataaactacgtattccctcttgacactcacaatctcgttcaccacgtgggcctggaactctaactccatcgctgaggggtgggaatgagaactatgaaccaggaaggagagatcccagctgccaagtctgggggtagcagactggagcccaggggtgatggagacttttgatggcttttggcagggacagacttggacacaaaaccgatccatagaagggcttcccaaaccttgttttgcaacatcccaaattgtctccagttgaaggaaggcctttatcagattcatagatgagctttcattgtaaaaataaatgtactttgcaccacttcatgatggagggagaagtggtcaca

SEQ ID NO: 11097 - protein, 108 aa, Homo sapiens
MARPQPWESKLHPKVCSPGPAPLQSRPPAMGCSLSRGCVRLARCPHPDSVHPHSHPPPAALCRPPPDLTHRHLEAGHQLLGWDLGLQIINYVFPLDTHNLVHHVGLEL

SEQ ID NO: 11098 - DNA, 2113 bp, Homo sapiens
cctgctgctagccctgcctggttccaccagactggcgtgtcattggacagataaaccagtgttagcttgcctctgggctgggtgagcttgaagtcctctgggacagagacctgtctccacgcctccgggagctgtgtccctgagccccctagtcctggctcctgctttttccccacagcccgtgttcccagccgaaccagcactctcccggaagcctggggtccctccacaccttggcttttatgaccctgatggcttctgaaacaggaaaagagagaaggaagacagaggcctgtgcccactgctgctccatgtgtaccaagagcagcagggcagaagggccctccctccagcctaggtcagaggtggggacagagaactcccctacagcccagagatgtggcagggctcagagaagcagccagagctcctggaggaaaggcagtcgggactgaccccctctcttaaaacacattcccgcccgcccacaggcctgaggtctgggacctttccgctgcccacatccagattcctgcaaagacgaattgggtgcacagcaccccaaccacatacacgaggaagaagatgcggtcagcagtctcaggccagcttctctgtgacccctttactcctctggagggctctgtggggagagatacagggaaaggagctgttcttcaaggtcccctcaacatgagcggaagagcgaaccccaggggtcatcagcctgtatcgcttcctttcttagattctcagctgatgaaaatttgggtctggcccatttcaggccatcttcagttgaagaaacaccctcttaggctgtgcaaggcatgggttatcaggggattgaggtcacctgggacttcagggaggctcagcttgctccctgccccagacctgtttcttctaagggaggaggacatggtggagaccagggacaggagagccagcagggtggatgcaaggggcctctacccacacctggacctccgtgccctcaccccagccctaggtgtgcacctaggcctcattccttaccccccagcccctgcccaccttcagcaggatgaggccctgggttgccgtgctctcgctgttcccctctcggggctgggctggggccgctcttggccccaaggttgccccgggccagcagcccagccagcagcacagtctctatggtgctgaggaagagcagcagcagcaggatggtgaagtagtaaactgggggaggcagggcacagggagatgctcaggggccagtccctgtgtctctggtgcccagcgagctgagcaccagtgggtgaccggggagaaacagggcagactgggtaagggagcagggcttactgagcagtgggttgcaggaggaggagctgggcagggcctgcaccagggaggagtggaggacgaggtaactcagcagcaatgtcaccttgtagcctatgcgctcaatggcccggaggggcagcaaccccccgcacacgtcagccaacagcagtgcctctgcaggcaccaagagagcgatgatggacttgagcgccgtgttcttcagcctcagctggaaggggaaaagtcagggccttcccggcgggggggaaggaggtgggcatcgggggcatggggcctggcctctggccgtgcatcctcactcccacccgcctccagcagccctctgtcggcctcctcccgacttgactcaccgtcacctggaagcagggcaccagctgctggggtgggacttgggtcttcagatcataaactacgtattccctcttgacactcacaatctcgttcaccacgtgggcctggaactctaactccatcgctgaggggtgggaatgagaactatgaaccaggaaggagagatcccagctgccaagtctgggggtagcagactggagcccaggggtgatggagacttttgatggcttttggcagggacagacttggacacaaaaccgatccatagaagggcttcccaaaccttgttttgcaacatcccaaattgtctccagttgaaggaaggcctttatcagattcatagatgagctttcattgtaaaaataaatgtactttgcaccacttcatgatggagggagaagtggtcaca

SEQ ID NO: 11099 - protein, 99 aa, Homo sapiens
MWQGSEKQPELLEERQSGLTPSLKTHSRPPTGLRSGTFPLPTSRFLQRRIGCTAPQPHTRGRRCGQQSQASFSVTPLLLWRALWGEIQGKELFFKVPST

SEQ ID NO: 11100 - DNA, 2322 bp, Homo sapiens
ggtggagcaggtgggcgacatgatcgatcgccttttcgacacctctgcctgagcctgctgctagccctgcctggttccaccagactggcgtgtcattggacagataaaccagtgttagcttgcctctgggctgggtgagcttgaagtcctctgggacagagacctgtctccacgcctccgggagctgtgtccctgagccccctagtcctggctcctgctttttccccacagcccgtgttcccagccgaaccagcactctcccggaagcctggggtccctccacaccttggcttttatgaccctgatggcttctgaaacaggaaaagagagaaggaagacagaggcctgtgcccactgctgctccatgtgtaccaagagcagcagggcagaagggccctccctccagcctaggtcagaggtggggacagagaactcccctacagcccagagatgtggcagggctcagagaagcagccagagctcctggaggaaaggcagtcgggactgaccccctctcttaaaacacattcccgcccgcccacaggcctgaggtctgggacctttccctcccaggagtcccctaggtggctgggggaggcaggctcactggccattttccctagagtccagcacactgcaggaggcgttcggaggaggagttccgccccaccctctacagccttcctcaggcccctgtctctggcccccagcctcagtgcctcttggcccagggccaggcagtcgtggttgcagaaggagcaattaggctgcctgcctgtgggctgggagacagggacaatggggaaaagttaaggagcaaaatgggggttggaagcaaaaaatagggccccacctatttaggacgagattgaagactgacccttgaggcacacttgcactggagatgggtttatttcacgctctgtgcttgtgtgctagcggagggagagctcagggtggcttaatccagaggccctgtcatggcccgcccccagccatgggaaagcaaacttcatcctaaggtgtgcagcccaggccctgcccctttacagggattgaggtcacctgggacttcagggaggctcagcttgctccctgccccagacctgtttcttctaagggaggaggacatggtggagaccagggacaggagagccagcagggtggatgcaaggggcctctacccacacctggacctccgtgccctcaccccagccctaggtgtgcacctaggcctcattccttaccccccagcccctgcccaccttcagcaggatgaggccctgggttgccgtgctctcgctgttcccctctcggggctgggctggggccgctcttggccccaaggttgccccgggccagcagcccagccagcagcacagtctctatggtgctgaggaagagcagcagcagcaggatggtgaagtagtaaactgggggaggcagggcacagggagatgctcaggggccagtccctgtgtctctggtgcccagcgagctgagcaccagtgggtgaccggggagaaacagggcagactgggtaagggagcagggcttactgagcagtgggttgcaggaggaggagctgggcagggcctgcaccagggaggagtggaggacgaggtaactcagcagcaatgtcaccttgtagcctatgcgctcaatggcccggaggggcagcaaccccccgcacacgtcagccaacagcagtgcctctgcaggcaccaagagagcgatgatggacttgagcgccgtgttcttcagcctcagctggaaggggaaaagtcagggccttcccggcgggggggaaggaggtgggcatcgggggcatggggcctggcctctggccgtgcatcctcactcccacccgcctccagcagccctctgtcggcctcctcccgacttgactcaccgtcacctggaagcagggcaccagctgctggggtgggacttgggtcttcagatcataaactacgtattccctcttgacactcacaatctcgttcaccacgtgggcctggaactctaactccatcgctgaggggtgggaatgagaactatgaaccaggaaggagagatcccagctgccaagtctgggggtagcagactggagcccaggggtgatggagacttttgatggcttttggcagggacagacttggacacaaaaccgatccatagaagggcttcccaaaccttgttttgcaacatcccaaattgtctccagttgaaggaaggcctttatcagattcatagatgagctttcattgtaaaaataaatgtactttgcaccacttcatgatggagggagaagtggtcaca

SEQ ID NO: 11101 - protein, 138 aa, Homo sapiens
MARPQPWESKLHPKVCSPGPAPLQGLRSPGTSGRLSLLPAPDLFLLREEDMVETRDRRASRVDARGLYPHLDLRALTPALGVHLGLIPYPPAPAHLQQDEALGCRALAVPLSGLGWGRSWPQGCPGPAAQPAAQSLWC

SEQ ID NO: 11102 - DNA, 2837 bp, Homo sapiens
cagacacagagcagagggacaggattcgccaggcccagaagaccattgtcaaggagacctacggggcctttctacagaagtttggcagcgtgcccttcaccaagaacccggagaagtacatcaagtacggggtggagcaggtgggcgacatgatcgatcgccttttcgacacctctgcctgagcctgctgctagccctgcctggttccaccagactggcgtgtcattggacagataaaccagtgttagcttgcctctgggctgggtgagcttgaagtcctctgggacagagacctgtctccacgcctccgggagctgtgtccctgagccccctagtcctggctcctgctttttccccacagcccgtgttcccagccgaaccagcactctcccggaagcctggggtccctccacaccttggcttttatgaccctgatggcttctgaaacaggaaaagagagaaggaagacagaggcctgtgcccactgctgctccatgtgtaccaagagcagcagggcagaagggccctccctccagcctaggtcagaggtggggacagagaactcccctacagcccagagatgtggcagggctcagagaagcagccagagctcctggaggaaaggcagtcgggactgaccccctctcttaaaacacattcccgcccgcccacaggcctgaggtctgggacctttccctcccaggagtcccctaggtggctgggggaggcaggctcactggccattttccctagagtccagcacactgcaggaggcgttcggaggaggagttccgccccaccctctacagccttcctcaggcccctgtctctggcccccagcctcagtgcctcttggcccagggccaggcagtcgtggttgcagaaggagcaattaggctgcctgcctgtgggctgggagacagggacaatggggaaaagttaaggagcaaaatgggggttggaagcaaaaaatagggccccacctatttaggacgagattgaagactgacccttgaggcacacttgcactggagatgggtttatttcacgctctgtgcttgtgtgctagcggagggagagctcagggtggcttaatccagaggccctgtcatggcccgcccccagccatgggaaagcaaacttcatcctaaggtgtgcagcccaggccctgcccctttacagtctaggccgcctgccatggggtgcagcctctccaggggctgcgtcagacttgcacgctgcccacatccagattcctgcaaagacgaattgggtgcacagcaccccaaccacatacacgaggaagaagatgcggtcagcagtctcaggccagcttctctgtgacccctttactcctctggagggctctgtggggagagatacagggaaaggagctgttcttcaaggtcccctcaacatgagcggaagagcgaaccccaggggtcatcagcctgtatcgcttcctttcttagattctcagctgatgaaaatttgggtctggcccatttcaggccatcttcagttgaagaaacaccctcttaggctgtgcaaggcatgggttatcaggggattgaggtcacctgggacttcagggaggctcagcttgctccctgccccagacctgtttcttctaagggaggaggacatggtggagaccagggacaggagagccagcagggtggatgcaaggggcctctacccacacctggacctccgtgccctcaccccagccctaggtgtgcacctaggcctcattccttaccccccagcccctgcccaccttcagcaggatgaggccctgggttgccgtgctctcgctgttcccctctcggggctgggctggggccgctcttggccccaaggttgccccgggccagcagcccagccagcagcacagtctctatggtgctgaggaagagcagcagcagcaggatggtgaagtagtaaactgggggaggcagggcacagggagatgctcaggggccagtccctgtgtctctggtgcccagcgagctgagcaccagtgggtgaccggggagaaacagggcagactgggtaagggagcagggcttactgagcagtgggttgcaggaggaggagctgggcagggcctgcaccagggaggagtggaggacgaggtaactcagcagcaatgtcaccttgtagcctatgcgctcaatggcccggaggggcagcaaccccccgcacacgtcagccaacagcagtgcctctgcaggcaccaagagagcgatgatggacttgagcgccgtgttcttcagcctcagctggaaggggaaaagtcagggccttcccggcgggggggaaggaggtgggcatcgggggcatggggcctggcctctggccgtgcatcctcactcccacccgcctccagcagccctctgtcggcctcctcccgacttgactcaccgtcacctggaagcagggcaccagctgctggggtgggacttgggtcttcagatcataaactacgtattccctcttgacactcacaatctcgttcaccacgtgggcctggaactctaactccatcgctgaggggtgggaatgagaactatgaaccaggaaggagagatcccagctgccaagtctgggggtagcagactggagcccaggggtgatggagacttttgatggcttttggcagggacagacttggacacaaaaccgatccatagaagggcttcccaaaccttgttttgcaacatcccaaattgtctccagttgaaggaaggcctttatcagattcatagatgagctttcattgtaaaaataaatgtactttgcaccacttcatgatggagggagaagtggtcaca

SEQ ID NO: 11103 - protein, 237 aa, Homo sapiens
MRPWVAVLSLFPSRGWAGAALGPKVAPGQQPSQQHSLYGAEEEQQQQDGEVVNWGRQGTGRCSGASPCVSGAQRAEHQWVTGEKQGRLGKGAGLTEQWVAGGGAGQGLHQGGVEDEVTQQQCHLVAYALNGPEGQQPPAHVSQQQCLCRHQESDDGLERRVLQPQLEGEKSGPSRRGGRRWASGAWGLASGRASSLPPASSSPLSASSRLDSPSPGSRAPAAGVGLGSSDHKLRIPS

SEQ ID NO: 11104 - DNA, 3361 bp, Homo sapiens
gttgtttgcttagttgtgacccacatcccttcctaccaccacccaccaagtagatccagagatttagcaaacgaaacaagccaggccactgaggcaggccaccctctgccctcatgcttctctttctgtctggcagctggttaaaggtgactgattacatcgcagagaagaatctacctgtgttccagccgggagtcaaggtgggctcaagacctgggctgggaaggggtgtctggcagacgggatactttttgtcgtgtctctgggaaaaagtggacaagcatccctctgggatcagagagcaaaggatgcatgtggccatcaggacacaggagacaggcccagaccaagggtgtttggggaagagtgggggaaggctgctctgctctgaagtgagctttctctgctatctctcctggcttcccagctccgggacaaggagcggcagattatcaaggagcgttttaagggcttcaatgatggcctcgaagaactgtgcaaaatccagaaggcctgggctattccagacacagagcagagggacaggattcgccaggcccagaagaccattgtcaaggagacctacggggcctttctacagaagtttggcagcgtgcccttcaccaagaacccggagaagtacatcaagtacggggtggagcaggtgggcgacatgatcgatcgccttttcgacacctctgcctgagcctgctgctagccctgcctggttccaccagactggcgtgtcattggacagataaaccagtgttagcttgcctctgggctgggtgagcttgaagtcctctgggacagagacctgtctccacgcctccgggagctgtgtccctgagccccctagtcctggctcctgctttttccccacagcccgtgttcccagccgaaccagcactctcccggaagcctggggtccctccacaccttggcttttatgaccctgatggcttctgaaacaggaaaagagagaaggaagacagaggcctgtgcccactgctgctccatgtgtaccaagagcagcagggcagaagggccctccctccagcctaggtcagaggtggggacagagaactcccctacagcccagagatgtggcagggctcagagaagcagccagagctcctggaggaaaggcagtcgggactgaccccctctcttaaaacacattcccgcccgcccacaggcctgaggtctgggacctttccctcccaggagtcccctaggtggctgggggaggcaggctcactggccattttccctagagtccagcacactgcaggaggcgttcggaggaggagttccgccccaccctctacagccttcctcaggcccctgtctctggcccccagcctcagtgcctcttggcccagggccaggcagtcgtggttgcagaaggagcaattaggctgcctgcctgtgggctgggagacagggacaatggggaaaagttaaggagcaaaatgggggttggaagcaaaaaatagggccccacctatttaggacgagattgaagactgacccttgaggcacacttgcactggagatgggtttatttcacgctctgtgcttgtgtgctagcggagggagagctcagggtggcttaatccagaggccctgtcatggcccgcccccagccatgggaaagcaaacttcatcctaaggtgtgcagcccaggccctgcccctttacagtctaggccgcctgccatggggtgcagcctctccaggggctgcgtcagacttgcacgctgcccacatccagattcctgcaaagacgaattgggtgcacagcaccccaaccacatacacgaggaagaagatgcggtcagcagtctcaggccagcttctctgtgacccctttactcctctggagggctctgtggggagagatacagggaaaggagctgttcttcaaggtcccctcaacatgagcggaagagcgaaccccaggggtcatcagcctgtatcgcttcctttcttagattctcagctgatgaaaatttgggtctggcccatttcaggccatcttcagttgaagaaacaccctcttaggctgtgcaaggcatgggttatcaggggattgaggtcacctgggacttcagggaggctcagcttgctccctgccccagacctgtttcttctaagggaggaggacatggtggagaccagggacaggagagccagcagggtggatgcaaggggcctctacccacacctggacctccgtgccctcaccccagccctaggtgtgcacctaggcctcattccttaccccccagcccctgcccaccttcagcaggatgaggccctgggttgccgtgctctcgctgttcccctctcggggctgggctggggccgctcttggccccaaggttgccccgggccagcagcccagccagcagcacagtctctatggtgctgaggaagagcagcagcagcaggatggtgaagtagtaaactgggggaggcagggcacagggagatgctcaggggccagtccctgtgtctctggtgcccagcgagctgagcaccagtgggtgaccggggagaaacagggcagactgggtaagggagcagggcttactgagcagtgggttgcaggaggaggagctgggcagggcctgcaccagggaggagtggaggacgaggtaactcagcagcaatgtcaccttgtagcctatgcgctcaatggcccggaggggcagcaaccccccgcacacgtcagccaacagcagtgcctctgcaggcaccaagagagcgatgatggacttgagcgccgtgttcttcagcctcagctggaaggggaaaagtcagggccttcccggcgggggggaaggaggtgggcatcgggggcatggggcctggcctctggccgtgcatcctcactcccacccgcctccagcagccctctgtcggcctcctcccgacttgactcaccgtcacctggaagcagggcaccagctgctggggtgggacttgggtcttcagatcataaactacgtattccctcttgacactcacaatctcgttcaccacgtgggcctggaactctaactccatcgctgaggggtgggaatgagaactatgaaccaggaaggagagatcccagctgccaagtctgggggtagcagactggagcccaggggtgatggagacttttgatggcttttggcagggacagacttggacacaaaaccgatccatagaagggcttcccaaaccttgttttgcaacatcccaaattgtctccagttgaaggaaggcctttatcagattcatagatgagctttcattgtaaaaataaatgtactttgcaccacttcatgatggagggagaagtggtcaca

SEQ ID NO: 11105 - protein, 187 aa, Homo sapiens
MLLFLSGSWLKVTDYIAEKNLPVFQPGVKVGSRPGLGRGVWQTGYFLSCLWEKVDKHPSGIREQRMHVAIRTQETGPDQGCLGKSGGRLLCSEVSFLCYLSWLPSSGTRSGRLSRSVLRASMMASKNCAKSRRPGLFQTQSRGTGFARPRRPLSRRPTGPFYRSLAACPSPRTRRSTSSTGWSRWAT

SEQ ID NO: 11106 - DNA, 4977 bp, Homo sapiens
ttagatgttccagaagccctgactgggctggtcacttccttcacaggccccgcatttgcccacatggatgaccccagtgccagcctccttgaggtggcacagccacctgcccaccctgggctgccctctttcaggtacaactcagaatgctcagtcctggggtcaaaccaccttatccaggacgctgattcaggaatcttccctccttatctttccatccgtcactctcctgcctctggtgtctgatcccactgtctgcgcagagccgagaatgaagccagaacaaaggctgggctcagctccttttattcccctcgaacctggcggggcctgctggctcccttgcagctttctgccagaacagtcagcctcttccccatcctctgccagtgtggggtacaggccaggagctgggggacccacgccgcccccagccaggagtgtggctggccccagaccagcagctcaagagttgtgccatcccccagggagagatgacatgctggacgtggagaccgatgcctacatccactgcgtcagtgccttcgtcaagctggcgcagagcgagtaccagctgctggccgacatcatccccgagcaccaccagaagaagaccttcgactccctgatacaggatgccctggatgggctgatgcttgaaggggagaacatcgtgtctgctgcccggaaggccattgtgcgacacgacttctccacggtgctcaccgtcttccccatcctgcgacacctcaagcagaccaagcctgagtttgaccaggtgctccagggcacggctgccagcacaaagaacaagctgcctggcctcatcacatccatggagaccatcggtgccaaagcgctggaggacttcgcagacaacatcaaggtccctgctgtcctcccctttctccctccctcccggcccagcaccacagtgacctggccctgggggactctcagagcaggcctccaagagggtgcgttgtcccggggcagccagctgcgccactggcctgtcagcacccatgtgccttcctttccttcctggggcctccaagccctctgaagtgggaagggcctctcccccttggtccagcctggctcagcctttgtgcctgagaggtgtcctagcacccgtctgccaggaggcggcaccatgagcaggtgcactggggcatggggtgggctgggggctgcttcagggaaccagaggctgtttttccacagaatgacccggacaaggagtacaacatgccgaaggacggcaccgtacacgagctcaccagcaatgtgggtgctgcctgaggacaccagggagaggggaggaaggagggcccaggcccaggcccagggccaggcagagtactggtggaagggactcagcctggcccagagccgctcgcacctttgtgagcagtcctgggtggcaggatggacagtgacatgtttagtgtctctagcagacagggcctttcctggcaggctagagtgaaaatgaagtttccagccgcgctcttcactgggcggatcccagccctgggctggccctgggcactcagaggggtcgctgtgggaggccgtcggccgggcctgccacttgcccttctgcaccgttttcttcccacccaggccatcctcttcctgcagcagcttttggacttccaggagacggcaggcgccatgctggcctcccaagagaccagctcttcggccaccagctacagctctgagttcagcaagcggctgctaagcacctatatctgtaaagtgctgggcaacctgcagttgaacttgctgagcaagtccaaggtgtacgaggacccagctctgagcgccatcttcctgcacaacaactacaattacatcctcaagtccctggagaagtctgaactgatccagctggtggcagtgacacagaagactgctgagcgctcctaccgggagcacattgagcagcagatccagacctaccagcgcagctggttaaaggtgactgattacatcgcagagaagaatctacctgtgttccagccgggagtcaagctccgggacaaggagcggcagattatcaaggagcgttttaagggcttcaatgatggcctcgaagaactgtgcaaaatccagaaggcctgggctattccagacacagagcagagggacaggattcgccaggcccagaagaccattgtcaaggagacctacggggcctttctacagaagtttggcagcgtgcccttcaccaagaacccggagaagtacatcaagtacggggtggagcaggtgggcgacatgatcgatcgccttttcgacacctctgcctgagcctgctgctagccctgcctggttccaccagactggcgtgtcattggacagataaaccagtgttagcttgcctctgggctgggtgagcttgaagtcctctgggacagagacctgtctccacgcctccgggagctgtgtccctgagccccctagtcctggctcctgctttttccccacagcccgtgttcccagccgaaccagcactctcccggaagcctggggtccctccacaccttggcttttatgaccctgatggcttctgaaacaggaaaagagagaaggaagacagaggcctgtgcccactgctgctccatgtgtaccaagagcagcagggcagaagggccctccctccagcctaggtcagaggtggggacagagaactcccctacagcccagagatgtggcagggctcagagaagcagccagagctcctggaggaaaggcagtcgggactgaccccctctcttaaaacacattcccgcccgcccacaggcctgaggtctgggacctttccctcccaggagtcccctaggtggctgggggaggcaggctcactggccattttccctagagtccagcacactgcaggaggcgttcggaggaggagttccgccccaccctctacagccttcctcaggcccctgtctctggcccccagcctcagtgcctcttggcccagggccaggcagtcgtggttgcagaaggagcaattaggctgcctgcctgtgggctgggagacagggacaatggggaaaagttaaggagcaaaatgggggttggaagcaaaaaatagggccccacctatttaggacgagattgaagactgacccttgaggcacacttgcactggagatgggtttatttcacgctctgtgcttgtgtgctagcggagggagagctcagggtggcttaatccagaggccctgtcatggcccgcccccagccatgggaaagcaaacttcatcctaaggtgtgcagcccaggccctgcccctttacagtctaggccgcctgccatggggtgcagcctctccaggggctgcgtcagacttgcacgctgcccacatccagattcctgcaaagacgaattgggtgcacagcaccccaaccacatacacgaggaagaagatgcggtcagcagtctcaggccagcttctctgtgacccctttactcctctggagggctctgtggggagagatacagggaaaggagctgttcttcaaggtcccctcaacatgagcggaagagcgaaccccaggggtcatcagcctgtatcgcttcctttcttagattctcagctgatgaaaatttgggtctggcccatttcaggccatcttcagttgaagaaacaccctcttaggctgtgcaaggcatgggttatcaggggattgaggtcacctgggacttcagggaggctcagcttgctccctgccccagacctgtttcttctaagggaggaggacatggtggagaccagggacaggagagccagcagggtggatgcaaggggcctctacccacacctggacctccgtgccctcaccccagccctaggtgtgcacctaggcctcattccttaccccccagcccctgcccaccttcagcaggatgaggccctgggttgccgtgctctcgctgttcccctctcggggctgggctggggccgctcttggccccaaggttgccccgggccagcagcccagccagcagcacagtctctatggtgctgaggaagagcagcagcagcaggatggtgaagtagtaaactgggggaggcagggcacagggagatgctcaggggccagtccctgtgtctctggtgcccagcgagctgagcaccagtgggtgaccggggagaaacagggcagactgggtaagggagcagggcttactgagcagtgggttgcaggaggaggagctgggcagggcctgcaccagggaggagtggaggacgaggtaactcagcagcaatgtcaccttgtagcctatgcgctcaatggcccggaggggcagcaaccccccgcacacgtcagccaacagcagtgcctctgcaggcaccaagagagcgatgatggacttgagcgccgtgttcttcagcctcagctggaaggggaaaagtcagggccttcccggcgggggggaaggaggtgggcatcgggggcatggggcctggcctctggccgtgcatcctcactcccacccgcctccagcagccctctgtcggcctcctcccgacttgactcaccgtcacctggaagcagggcaccagctgctggggtgggacttgggtcttcagatcataaactacgtattccctcttgacactcacaatctcgttcaccacgtgggcctggaactctaactccatcgctgaggggtgggaatgagaactatgaaccaggaaggagagatcccagctgccaagtctgggggtagcagactggagcccaggggtgatggagacttttgatggcttttggcagggacagacttggacacaaaaccgatccatagaagggcttcccaaaccttgttttgcaacatcccaaattgtctccagttgaaggaaggcctttatcagattcatagatgagctttcattgtaaaaataaatgtactttgcaccacttcatgatggagggagaagtggtcaca

SEQ ID NO: 11107 - protein, 332 aa, Homo sapiens
MTPVPASLRWHSHLPTLGCPLSGTTQNAQSWGQTTLSRTLIQESSLLIFPSVTLLPLVSDPTVCAEPRMKPEQRLGSAPFIPLEPGGACWLPCSFLPEQSASSPSSASVGYRPGAGGPTPPPARSVAGPRPAAQELCHPPGRDDMLDVETDAYIHCVSAFVKLAQSEYQLLADIIPEHHQKKTFDSLIQDALDGLMLEGENIVSAARKAIVRHDFSTVLTVFPILRHLKQTKPEFDQVLQGTAASTKNKLPGLITSMETIGAKALEDFADNIKVPAVLPFLPPSRPSTTVTWPWGTLRAGLQEGALSRGSQLRHWPVSTHVPSFPSWGLQAL

SEQ ID NO: 11108 - DNA, 2956 bp, Homo sapiens
aaagatactggggagtgggagccgcggggttcagagcgatgattcccccacaggaggcatccgctcgacggcgggagattgaggacaagctgaagcaggaggaggagactctgtccttcatccgagacagcctggagaagagcgaccagctcactaagaacatggtgtctatcttatcatcctttgagagccgccttatgaagctggagaactccatcatccctgcctgggctattccagacacagagcagagggacaggattcgccaggcccagaagaccattgtcaaggagacctacggggcctttctacagaagtttggcagcgtgcccttcaccaagaacccggagaagtacatcaagtacggggtggagcaggtgggcgacatgatcgatcgccttttcgacacctctgcctgagcctgctgctagccctgcctggttccaccagactggcgtgtcattggacagataaaccagtcccgtgttcccagccgaaccagcactctcccggaagcctggggtccctccacaccttggcttttatgaccctgatggcttctgaaacaggaaaagagagaaggaagacagaggcctgtgcccactgctgctccatgtgtaccaagagcagcagggcagaagggccctccctccagcctaggtcagaggtggggacagagaactcccctacagcccagagatgtggcagggctcagagaagcagccagagctcctggaggaaaggcagtcgggactgaccccctctcttaaaacacattcccgcccgcccacaggcctgaggtctgggacctttccctcccaggagtcccctaggtggctgggggaggcaggctcactggccattttccctagagtccagcacactgcaggaggcgttcggaggaggagttccgccccaccctctacagccttcctcaggcccctgtctctggcccccagcctcagtgcctcttggcccagggccaggcagtcgtggttgcagaaggagcaattaggctgcctgcctgtgggctgggagacagggacaatggggaaaagttaaggagcaaaatgggggttggaagcaaaaaatagggccccacctatttaggacgagattgaagactgacccttgaggcacacttgcactggagatgggtttatttcacgctctgtgcttgtgtgctagcggagggagagctcagggtggcttaatccagaggccctgtcatggcccgcccccagccatgggaaagcaaacttcatcctaaggtgtgcagcccaggccctgcccctttacagtctaggccgcctgccatggggtgcagcctctccaggggctgcgtcagacttgcacgctgcccacatccagattcctgcaaagacgaattgggtgcacagcaccccaaccacatacacgaggaagaagatgcggtcagcagtctcaggccagcttctctgtgacccctttactcctctggagggctctgtggggagagatacagggaaaggagctgttcttcaaggtcccctcaacatgagcggaagagcgaaccccaggggtcatcagcctgtatcgcttcctttcttagattctcagctgatgaaaatttgggtctggcccatttcaggccatcttcagttgaagaaacaccctcttaggctgtgcaaggcatgggttatcaggggattgaggtcacctgggacttcagggaggctcagcttgctccctgccccagacctgtttcttctaagggaggaggacatggtggagaccagggacaggagagccagcagggtggatgcaaggggcctctacccacacctggacctccgtgccctcaccccagccctaggtgtgcacctaggcctcattccttaccccccagcccctgcccaccttcagcaggatgaggccctgggttgccgtgctctcgctgttcccctctcggggctgggctggggccgctcttggccccaaggttgccccgggccagcagcccagccagcagcacagtctctatggtgctgaggaagagcagcagcagcaggatggtgaagtagtaaactgggggaggcagggcacagggagatgctcaggggccagtccctgtgtctctggtgcccagcgagctgagcaccagtgggtgaccggggagaaacagggcagactgggtaagggagcagggcttactgagcagtgggttgcaggaggaggagctgggcagggcctgcaccagggaggagtggaggacgaggtaactcagcagcaatgtcaccttgtagcctatgcgctcaatggcccggaggggcagcaaccccccgcacacgtcagccaacagcagtgcctctgcaggcaccaagagagcgatgatggacttgagcgccgtgttcttcagcctcagctggaaggggaaaagtcagggccttcccggcgggggggaaggaggtgggcatcgggggcatggggcctggcctctggccgtgcatcctcactcccacccgcctccagcagccctctgtcggcctcctcccgacttgactcaccgtcacctggaagcagggcaccagctgctggggtgggacttgggtcttcagatcataaactacgtattccctcttgacactcacaatctcgttcaccacgtgggcctggaactctaactccatcgctgaggggtgggaatgagaactatgaaccaggaaggagagatcccagctgccaagtctgggggtagcagactggagcccaggggtgatggagacttttgatggcttttggcagggacagacttggacacaaaaccgatccatagaagggcttcccaaaccttgttttgcaacatcccaaattgtctccagttgaaggaaggcctttatcagattcatagatgagctttcattgtaaaaataaatgtactttgcaccacttcatgatggagggagaagtggtcaca

SEQ ID NO: 11109 - protein, 126 aa, Homo sapiens
MIPPQEASARRREIEDKLKQEEETLSFIRDSLEKSDQLTKNMVSILSSFESRLMKLENSIIPAWAIPDTEQRDRIRQAQKTIVKETYGAFLQKFGSVPFTKNPEKYIKYGVEQVGDMIDRLFDTSA

SEQ ID NO: 11110 - DNA, 4773 bp, Homo sapiens
cgggggcccggtgggcccgcggaggaaagatactggggagtgggagccgcggggttcagagcgatgattcccccacaggaggcatccgctcgacggcgggagattgaggacaagctgaagcaggaggaggagactctgtccttcatccgagacagcctggagaagagcgaccagctcactaagaacatggtgtctatcttatcatcctttgagagccgccttatgaagctggagaactccatcatccctgtgcacaagcagacggagaatctgcagcggctgcaggagaatgttgagaagacgctgtcctgcctggaccatgtcatcagctactaccatgtggccagtgacactgagaagatcatcagagagggccccacaggtaggctggaagagtacctgggaagcatggccaagattcagaaggcagtggagtatttccaggacaacagcccagacagcccggaactcaacaaagtgaaactgctctttgagcgcgggaaggaggccctggagtccgaatttcgcagcctgatgacgcggcacagtaaggtcgtctcgcccgtgctcatcttggatctgatcagtggtgacgatgatctggaggcccaggaggacgtgaccctggagcacctgcccgagagcgtgctccaggatgtcattcgcatctcccgctggctggtggaatatggccgcaaccaagatttcatgaacgtctactaccagatacgctccagccagctggaccgctccatcaaaggactgaaggagcatttccataagagcagttcttcctctggggttccctactcccctgctatccccaacaagaggaaagacacacctaccaagaagccagtcaagcggccagggacgatccgtaaggctcagaaccttctgaaacagtattcccagcatggtctagatgggaaaaaggggggctctaacctcattcctctggaagggagagatgacatgctggacgtggagaccgatgcctacatccactgcgtcagtgccttcgtcaagctggcgcagagcgagtaccagctgctggccgacatcatccccgagcaccaccagaagaagaccttcgactccctgatacaggatgccctggatgggctgatgcttgaaggggagaacatcgtgtctgctgcccggaaggccattgtgcgacacgacttctccacggtgctcaccgtcttccccatcctgcgacacctcaagcagaccaagcctgagtttgaccaggtgctccagggcacggctgccagcacaaagaacaagctgcctggcctcatcacatccatggagaccatcggtgccaaagcgctggaggacttcgcagacaacatcaagaatgacccggacaaggagtacaacatgccgaaggacggcaccgtacacgagctcaccagcaatgccatcctcttcctgcagcagcttttggacttccaggagacggcaggcgccatgctggcctcccaagagaccagctcttcggccaccagctacagctctgagttcagcaagcggctgctaagcacctatatctgtaaagtgctgggcaacctgcagttgaacttgctgagcaagtccaaggtgtacgaggacccagctctgagcgccatcttcctgcacaacaactacaattacatcctcaagtccctggagaagtctgaactgatccagctggtggcagtgacacagaagactgctgagcgctcctaccgggagcacattgagcagcagatccagacctaccagcgcagctggttaaaggtgactgattacatcgcagagaagaatctacctgtgttccagccgggagtcaagctccgggacaaggagcggcagattatcaaggagcgttttaagggcttcaatgatggcctcgaagaactgtgcaaaatccagaaggcctgggctattccagacacagagcagagggacaggattcgccaggcccagaagaccattgtcaaggagacctacggggcctttctacagaagtttggcagcgtgcccttcaccaagaacccggagaagtacatcaagtacggggtggagcaggtgggcgacatgatcgatcgccttttcgacacctctgcctgagcctgctgctagccctgcctggttccaccagactggcgtgtcattggacagataaaccagtgttagcttgcctctgggctgggtgagcttgaagtcctctgggacagagacctgtctccacgcctccgggagctgtgtccctgagccccctagtcctggctcctgctttttccccacagcccgtgttcccagccgaaccagcactctcccggaagcctggggtccctccacaccttggcttttatgaccctgatggcttctgaaacaggaaaagagagaaggaagacagaggcctgtgcccactgctgctccatgtgtaccaagagcagcagggcagaagggccctccctccagcctaggtcagaggtggggacagagaactcccctacagcccagagatgtggcagggctcagagaagcagccagagctcctggaggaaaggcagtcgggactgaccccctctcttaaaacacattcccgcccgcccacaggcctgaggtctgggacctttccctcccaggagtcccctaggtggctgggggaggcaggctcactggccattttccctagagtccagcacactgcaggaggcgttcggaggaggagttccgccccaccctctacagccttcctcaggcccctgtctctggcccccagcctcagtgcctcttggcccagggccaggcagtcgtggttgcagaaggagcaattaggctgcctgcctgtgggctgggagacagggacaatggggaaaagttaaggagcaaaatgggggttggaagcaaaaaatagggccccacctatttaggacgagattgaagactgacccttgaggcacacttgcactggagatgggtttatttcacgctctgtgcttgtgtgctagcggagggagagctcagggtggcttaatccagaggccctgtcatggcccgcccccagccatgggaaagcaaacttcatcctaaggtgtgcagcccaggccctgcccctttacagtctaggccgcctgccatggggtgcagcctctccaggggctgcgtcagacttgcacgctgcccacatccagattcctgcaaagacgaattgggtgcacagcaccccaaccacatacacgaggaagaagatgcggtcagcagtctcaggccagcttctctgtgacccctttactcctctggagggctctgtggggagagatacagggaaaggagctgttcttcaaggtcccctcaacatgagcggaagagcgaaccccaggggtcatcagcctgtatcgcttcctttcttagattctcagctgatgaaaatttgggtctggcccatttcaggccatcttcagttgaagaaacaccctcttaggctgtgcaaggcatgggttatcaggggattgaggtcacctgggacttcagggaggctcagcttgctccctgccccagacctgtttcttctaagggaggaggacatggtggagaccagggacaggagagccagcagggtggatgcaaggggcctctacccacacctggacctccgtgccctcaccccagccctaggtgtgcacctaggcctcattccttaccccccagcccctgcccaccttcagcaggatgaggccctgggttgccgtgctctcgctgttcccctctcggggctgggctggggccgctcttggccccaaggttgccccgggccagcagcccagccagcagcacagtctctatggtgctgaggaagagcagcagcagcaggatggtgaagtagtaaactgggggaggcagggcacagggagatgctcaggggccagtccctgtgtctctggtgcccagcgagctgagcaccagtgggtgaccggggagaaacagggcagactgggtaagggagcagggcttactgagcagtgggttgcaggaggaggagctgggcagggcctgcaccagggaggagtggaggacgaggtaactcagcagcaatgtcaccttgtagcctatgcgctcaatggcccggaggggcagcaaccccccgcacacgtcagccaacagcagtgcctctgcaggcaccaagagagcgatgatggacttgagcgccgtgttcttcagcctcagctggaaggggaaaagtcagggccttcccggcgggggggaaggaggtgggcatcgggggcatggggcctggcctctggccgtgcatcctcactcccacccgcctccagcagccctctgtcggcctcctcccgacttgactcaccgtcacctggaagcagggcaccagctgctggggtgggacttgggtcttcagatcataaactacgtattccctcttgacactcacaatctcgttcaccacgtgggcctggaactctaactccatcgctgaggggtgggaatgagaactatgaaccaggaaggagagatcccagctgccaagtctgggggtagcagactggagcccaggggtgatggagacttttgatggcttttggcagggacagacttggacacaaaaccgatccatagaagggcttcccaaaccttgttttgcaacatcccaaattgtctccagttgaaggaaggcctttatcagattcatagatgagctttcattgtaaaaataaatgtactttgcaccacttcatgatggagggagaagtggtcaca

SEQ ID NO: 11111 - protein, 684 aa, Homo sapiens; identical to SEQ ID NO: 1817

SEQ ID NO: 11112 - DNA, 4990 bp, Homo sapiens
gcccgggctcgcctcacctccccgcctgcttaagccctcccggagcgctcggggttcgacccccgagcacggcgggaggagggcgcccccctgcggcacagccacgtccacgaagcccctcccggggttctagaaagcggaggcctccgaaggaaagaccaagatgcagagagatgtctaaaaggtgccagaaggtgactatccagccctggtatcactgcctggtgatttcgtttctttgatcttcacgaatggcctcactggctgtgatttggacagaaatcagctgccacgtgcaacattctcccatgggaacatgtgtccgcagtacctatctcagagcccaaatccttcctgccccacagccttctcctggaacctgccttgggaggcatccgctcgacggcgggagattgaggacaagctgaagcaggaggaggagactctgtccttcatccgagacagcctggagaagagcgaccagctcactaagaacatggtgtctatcttatcatcctttgagagccgccttatgaagctggagaactccatcatccctgtgcacaagcagacggagaatctgcagcggctgcaggagaatgttgagaagacgctgtcctgcctggaccatgtcatcagctactaccatgtggccagtgacactgagaagatcatcagagagggccccacaggtaggctggaagagtacctgggaagcatggccaagattcagaaggcagtggagtatttccaggacaacagcccagacagcccggaactcaacaaagtgaaactgctctttgagcgcgggaaggaggccctggagtccgaatttcgcagcctgatgacgcggcacagtaaggtcgtctcgcccgtgctcatcttggatctgatcagtggtgacgatgatctggaggcccaggaggacgtgaccctggagcacctgcccgagagcgtgctccaggatgtcattcgcatctcccgctggctggtggaatatggccgcaaccaagatttcatgaacgtctactaccagatacgctccagccagctggaccgctccatcaaaggactgaaggagcatttccataagagcagttcttcctctggggttccctactcccctgctatccccaacaagaggaaagacacacctaccaagaagccagtcaagcggccagggagagatgacatgctggacgtggagaccgatgcctacatccactgcgtcagtgccttcgtcaagctggcgcagagcgagtaccagctgctggccgacatcatccccgagcaccaccagaagaagaccttcgactccctgatacaggatgccctggatgggctgatgcttgaaggggagaacatcgtgtctgctgcccggaaggccattgtgcgacacgacttctccacggtgctcaccgtcttccccatcctgcgacacctcaagcagaccaagcctgagtttgaccaggtgctccagggcacggctgccagcacaaagaacaagctgcctggcctcatcacatccatggagaccatcggtgccaaagcgctggaggacttcgcagacaacatcaagaatgacccggacaaggagtacaacatgccgaaggacggcaccgtacacgagctcaccagcaatgccatcctcttcctgcagcagcttttggacttccaggagacggcaggcgccatgctggcctcccaagagaccagctcttcggccaccagctacagctctgagttcagcaagcggctgctaagcacctatatctgtaaagtgctgggcaacctgcagttgaacttgctgagcaagtccaaggtgtacgaggacccagctctgagcgccatcttcctgcacaacaactacaattacatcctcaagtccctggagaagtctgaactgatccagctggtggcagtgacacagaagactgctgagcgctcctaccgggagcacattgagcagcagatccagacctaccagcgcagctggttaaaggtgactgattacatcgcagagaagaatctacctgtgttccagccgggagtcaagctccgggacaaggagcggcagattatcaaggagcgttttaagggcttcaatgatggcctcgaagaactgtgcaaaatccagaaggcctgggctattccagacacagagcagagggacaggattcgccaggcccagaagaccattgtcaaggagacctacggggcctttctacagaagtttggcagcgtgcccttcaccaagaacccggagaagtacatcaagtacggggtggagcaggtgggcgacatgatcgatcgccttttcgacacctctgcctgagcctgctgctagccctgcctggttccaccagactggcgtgtcattggacagataaaccagtgttagcttgcctctgggctgggtgagcttgaagtcctctgggacagagacctgtctccacgcctccgggagctgtgtccctgagccccctagtcctggctcctgctttttccccacagcccgtgttcccagccgaaccagcactctcccggaagcctggggtccctccacaccttggcttttatgaccctgatggcttctgaaacaggaaaagagagaaggaagacagaggcctgtgcccactgctgctccatgtgtaccaagagcagcagggcagaagggccctccctccagcctaggtcagaggtggggacagagaactcccctacagcccagagatgtggcagggctcagagaagcagccagagctcctggaggaaaggcagtcgggactgaccccctctcttaaaacacattcccgcccgcccacaggcctgaggtctgggacctttccctcccaggagtcccctaggtggctgggggaggcaggctcactggccattttccctagagtccagcacactgcaggaggcgttcggaggaggagttccgccccaccctctacagccttcctcaggcccctgtctctggcccccagcctcagtgcctcttggcccagggccaggcagtcgtggttgcagaaggagcaattaggctgcctgcctgtgggctgggagacagggacaatggggaaaagttaaggagcaaaatgggggttggaagcaaaaaatagggccccacctatttaggacgagattgaagactgacccttgaggcacacttgcactggagatgggtttatttcacgctctgtgcttgtgtgctagcggagggagagctcagggtggcttaatccagaggccctgtcatggcccgcccccagccatgggaaagcaaacttcatcctaaggtgtgcagcccaggccctgcccctttacagtctaggccgcctgccatggggtgcagcctctccaggggctgcgtcagacttgcacgctgcccacatccagattcctgcaaagacgaattgggtgcacagcaccccaaccacatacacgaggaagaagatgcggtcagcagtctcaggccagcttctctgtgacccctttactcctctggagggctctgtggggagagatacagggaaaggagctgttcttcaaggtcccctcaacatgagcggaagagcgaaccccaggggtcatcagcctgtatcgcttcctttcttagattctcagctgatgaaaatttgggtctggcccatttcaggccatcttcagttgaagaaacaccctcttaggctgtgcaaggcatgggttatcaggggattgaggtcacctgggacttcagggaggctcagcttgctccctgccccagacctgtttcttctaagggaggaggacatggtggagaccagggacaggagagccagcagggtggatgcaaggggcctctacccacacctggacctccgtgccctcaccccagccctaggtgtgcacctaggcctcattccttaccccccagcccctgcccaccttcagcaggatgaggccctgggttgccgtgctctcgctgttcccctctcggggctgggctggggccgctcttggccccaaggttgccccgggccagcagcccagccagcagcacagtctctatggtgctgaggaagagcagcagcagcaggatggtgaagtagtaaactgggggaggcagggcacagggagatgctcaggggccagtccctgtgtctctggtgcccagcgagctgagcaccagtgggtgaccggggagaaacagggcagactgggtaagggagcagggcttactgagcagtgggttgcaggaggaggagctgggcagggcctgcaccagggaggagtggaggacgaggtaactcagcagcaatgtcaccttgtagcctatgcgctcaatggcccggaggggcagcaaccccccgcacacgtcagccaacagcagtgcctctgcaggcaccaagagagcgatgatggacttgagcgccgtgttcttcagcctcagctggaaggggaaaagtcagggccttcccggcgggggggaaggaggtgggcatcgggggcatggggcctggcctctggccgtgcatcctcactcccacccgcctccagcagccctctgtcggcctcctcccgacttgactcaccgtcacctggaagcagggcaccagctgctggggtgggacttgggtcttcagatcataaactacgtattccctcttgacactcacaatctcgttcaccacgtgggcctggaactctaactccatcgctgaggggtgggaatgagaactatgaaccaggaaggagagatcccagctgccaagtctgggggtagcagactggagcccaggggtgatggagacttttgatggcttttggcagggacagacttggacacaaaaccgatccatagaagggcttcccaaaccttgttttgcaacatcccaaattgtctccagttgaaggaaggcctttatcagattcatagatgagctttcattgtaaaaataaatgtactttgcaccacttcatgatggagggagaagtggtcaca

SEQ ID NO: 11113 - protein, 672 aa, Homo sapiens
MCPQYLSQSPNPSCPTAFSWNLPWEASARRREIEDKLKQEEETLSFIRDSLEKSDQLTKNMVSILSSFESRLMKLENSIIPVHKQTENLQRLQENVEKTLSCLDHVISYYHVASDTEKIIREGPTGRLEEYLGSMAKIQKAVEYFQDNSPDSPELNKVKLLFERGKEALESEFRSLMTRHSKVVSPVLILDLISGDDDLEAQEDVTLEHLPESVLQDVIRISRWLVEYGRNQDFMNVYYQIRSSQLDRSIKGLKEHFHKSSSSSGVPYSPAIPNKRKDTPTKKPVKRPGRDDMLDVETDAYIHCVSAFVKLAQSEYQLLADIIPEHHQKKTFDSLIQDALDGLMLEGENIVSAARKAIVRHDFSTVLTVFPILRHLKQTKPEFDQVLQGTAASTKNKLPGLITSMETIGAKALEDFADNIKNDPDKEYNMPKDGTVHELTSNAILFLQQLLDFQETAGAMLASQETSSSATSYSSEFSKRLLSTYICKVLGNLQLNLLSKSKVYEDPALSAIFLHNNYNYILKSLEKSELIQLVAVTQKTAERSYREHIEQQIQTYQRSWLKVTDYIAEKNLPVFQPGVKLRDKERQIIKERFKGFNDGLEELCKIQKAWAIPDTEQRDRIRQAQKTIVKETYGAFLQKFGSVPFTKNPEKYIKYGVEQVGDMIDRLFDTSA

SEQ ID NO: 11114 - DNA, 716 bp, Homo sapiens
gaagacagaggcctgtgcccactgctgctccatgtgtaccaagagcagcagggcagaagggccctccctccagcctaggtcagaggtggggacagagaactcccctacagcccagagatgtggcagggctcagagaagcagccagagctcctggaggaaaggcagtcgggactgaccccctctcttaaaacacattcccgcccgcccacaggcctgaggtctgggacctttccctcccaggagtcccctaggtggctgggggaggcaggctcactggccattttccctagagtccagcacactgcaggaggcgttcggaggaggagttccgccccaccctctacagccttcctcaggcccctgtctctggcccccagcctcagtgcctcttggcccagggccaggcagtcgtggttgcagaaggagcaattaggctgcctgcctgtgggctgggagacagggacaatggggaaaagaaggagagatcccagctgccaagtctgggggtagcagactggagcccaggggtgatggagacttttgatggcttttggcagggacagacttggacacaaaaccgatccatagaagggcttcccaaaccttgttttgcaacatcccaaattgtctccagttgaaggaaggcctttatcagattcatagatgagctttcattgtaaaaataaatgtactttgcaccacttcatgatggaggg

SEQ ID NO: 11115 - protein, 130 aa, Homo sapiens
MWQGSEKQPELLEERQSGLTPSLKTHSRPPTGLRSGTFPSQESPRWLGEAGSLAIFPRVQHTAGGVRRRSSAPPSTAFLRPLSLAPSLSASWPRARQSWLQKEQLGCLPVGWETGTMGKRRRDPSCQVWG

SEQ ID NO: 11116 - DNA, 532 bp, Homo sapiens
gaaactgctctttgagcgcgggaaggaggccctggagtccgaatttcgcagcctgatgacgcggcacagtaaggtcgtctcgcccgtgctcatcttggatctgatcagtggtgacgatgatctggaggcccaggaggacgtgaccctggagcacctgcccgagagcgtgctccaggatgtcattcgcatctcccgctggctggtggaatatggccgcaaccaagatttcatgaacgtctactaccagatacgctccagccagctggaccgctccatcaaaggactgaaggagcatttccataagagcagttcttcctctggggtagcagactggagcccaggggtgatggagacttttgatggcttttggcagggacagacttggacacaaaaccgatccatagaagggcttcccaaaccttgttttgcaacatcccaaattgtctccagttgaaggaaggcctttatcagattcatagatgagctttcattgtaaaaataaatgtactttgcaccacttcatgatggaggg

SEQ ID NO: 11117 - protein, 132 aa, Homo sapiens
MTRHSKVVSPVLILDLISGDDDLEAQEDVTLEHLPESVLQDVIRISRWLVEYGRNQDFMNVYYQIRSSQLDRSIKGLKEHFHKSSSSSGVADWSPGVMETFDGFWQGQTWTQNRSIEGLPKPCFATSQIVSS

SEQ ID NO: 11118 - DNA, 345 bp, Homo sapiens
atgattcccccacaggaggcatccgctcgacggcgggagattgaggacaagctgaagcaggaggaggagactctgtccttcatccgagacagcctggagaagagcgaccagctcactaagaacatggtgtctatcttatcatcctttgagagccgggtgatggagacttttgatggcttttggcagggacagacttggacacaaaaccgatccatagaagggcttcccaaaccttgttttgcaacatcccaaattgtctccagttgaaggaaggcctttatcagattcatagatgagctttcattgtaaaaataaatgtactttgcaccacttcatgatggaggg

SEQ ID NO: 11119 - protein, 88 aa, Homo sapiens
MIPPQEASARRREIEDKLKQEEETLSFIRDSLEKSDQLTKNMVSILSSFESRVMETFDGFWQGQTWTQNRSIEGLPKPCFATSQIVSS

SEQ ID NO: 11120 - DNA, 655 bp, Homo sapiens
gaaactgctctttgagcgcgggaaggaggccctggagtccgaatttcgcagcctgatgacgcggcacagtaaggtcgtctcgcccgtgctcatcttggatctgatcagtggtgacgatgatctggaggcccaggaggacgtgaccctggagcacctgcccgagagcgtgctccaggatgtcattcgcatctcccgctggctggtggaatatggccgcaaccaagatttcatgaacgtctactaccagatacgctccagccagctggaccgctccatcaaaggactgaaggagcatttccataagagcagttcttcctctggggttccctactcccctgctatccccaacaagaggaaagacacacctaccaagaagccagtcaagcggccagggagagatgacatgctggacgtggagaccgatgcctacatccactgcgtcagtgccttcgtcaagctggcgcagagcgagtaccagctgctggccgacatcatccccgagcaccaccagaagaagaccttcgactccctgatacaggatgccctggatgggctgatgcttgaaggggagaacatcgtgtctgctgcccggaaggcctttatcagattcatagatgagctttcattgtaaaaataaatgtactttgcaccactt

SEQ ID NO: 11121 - protein, 191 aa, Homo sapiens
MTRHSKVVSPVLILDLISGDDDLEAQEDVTLEHLPESVLQDVIRISRWLVEYGRNQDFMNVYYQIRSSQLDRSIKGLKEHFHKSSSSSGVPYSPAIPNKRKDTPTKKPVKRPGRDDMLDVETDAYIHCVSAFVKLAQSEYQLLADIIPEHHQKKTFDSLIQDALDGLMLEGENIVSAARKAFIRFIDELSL

SEQ ID NO: 11122 - DNA, 1444 bp, Homo sapiens
cagacacagagcagagggacaggattcgccaggcccagaagaccattgtcaaggagacctacggggcctttctacagaagtttggcagcgtgcccttcaccaagaacccggagaagtacatcaagtacggggtggagcaggtgggcgacatgatcgatcgccttttcgacacctctgcctgagcctgctgctagccctgcctggttccaccagactggcgtgtcattggacagataaaccagtgttagcttgcctctgggctgggtgagcttgaagtcctctgggacagagacctgtctccacgcctccgggagctgtgtccctgagccccctagtcctggctcctgctttttccccacagcccgtgttcccagccgaaccagcactctcccggaagcctggggtccctccacaccttggcttttatgaccctgatggcttctgaaacaggaaaagagagaaggaagacagaggcctgtgcccactgctgctccatgtgtaccaagagcagcagggcagaagggccctccctccagcctaggtcagaggtggggacagagaactcccctacagcccagagatgtggcagggctcagagaagcagccagagctcctggaggaaaggcagtcgggactgaccccctctcttaaaacacattcccgcccgcccacaggcctgaggtctgggacctttccctcccaggagtcccctaggtggctgggggaggcaggctcactggccattttccctagagtccagcacactgcaggaggcgttcggaggaggagttccgccccaccctctacagccttcctcaggcccctgtctctggcccccagcctcagtgcctcttggcccagggccaggcagtcgtggttgcagaaggagcaattaggctgcctgcctgtgggctgggagacagggacaatggggaaaagttaaggagcaaaatgggggttggaagcaaaaaatagggccccacctatttaggacgagattgaagactgacccttgaggcacacttgcactggagatgggtttatttcacgctctgtgcttgtgtgctagcggagggagagctcagggtggcttaatccagaggccctgtcatggcccgcccccagccatgggaaagcaaacttcatcctaaggtgtgcagcccaggccctgcccctttacagtctaggccgcctgccatggggtgcagcctctccaggggctgcgtcagacttgcacgctgcccacatccagattcctgcaaagacgaattgggtgcacagcaccccaaccacatacacgaggaagaagatgcggtcagcagtctcaggccagcttctctgtgacccctttactcctctggagggctctgtggggagagatacagggaaaggagctgttcttcaaggtcccctcaacatgagcggaagagcgaaccccaggggt

SEQ ID NO: 11123 - protein, 120 aa, Homo sapiens [sequence omitted]

SEQ ID NO: 11124 - DNA, 3584 bp, Homo sapiens
ttagatgttccagaagccctgactgggctggtcacttccttcacaggccccgcatttgcccacatggatgaccccagtgccagcctccttgaggtggcacagccacctgcccaccctgggctgccctctttcaggtacaactcagaatgctcagtcctggggtcaaaccaccttatccaggacgctgattcaggaatcttccctccttatctttccatccgtcactctcctgcctctggtgtctgatcccactgtctgcgcagagccgagaatgaagccagaacaaaggctgggctcagctccttttattcccctcgaacctggcggggcctgctggctcccttgcagctttctgccagaacagtcagcctcttccccatcctctgccagtgtggggtacaggccaggagctgggggacccacgccgcccccagccaggagtgtggctggccccagaccagcagctcaagagttgtgccatcccccagggagagatgacatgctggacgtggagaccgatgcctacatccactgcgtcagtgccttcgtcaagctggcgcagagcgagtaccagctgctggccgacatcatccccgagcaccaccagaagaagaccttcgactccctgatacaggatgccctggatgggctgatgcttgaaggggagaacatcgtgtctgctgcccggaaggccattgtgcgacacgacttctccacggtgctcaccgtcttccccatcctgcgacacctcaagcagaccaagcctgagtttgaccaggtgctccagggcacggctgccagcacaaagaacaagctgcctggcctcatcacatccatggagaccatcggtgccaaagcgctggaggacttcgcagacaacatcaaggtccctgctgtcctcccctttctccctccctcccggcccagcaccacagtgacctggccctgggggactctcagagcaggcctccaagagggtgcgttgtcccggggcagccagctgcgccactggcctgtcagcacccatgtgccttcctttccttcctggggcctccaagccctctgaagtgggaagggcctctcccccttggtccagcctggctcagcctttgtgcctgagaggtgtcctagcacccgtctgccaggaggcggcaccatgagcaggtgcactggggcatggggtgggctgggggctgcttcagggaaccagaggctgtttttccacagaatgacccggacaaggagtacaacatgccgaaggacggcaccgtacacgagctcaccagcaatgtgggtgctgcctgaggacaccagggagaggggaggaaggagggcccaggcccaggcccagggccaggcagagtactggtggaagggactcagcctggcccagagccgctcgcacctttgtgagcagtcctgggtggcaggatggacagtgacatgtttagtgtctctagcagacagggcctttcctggcaggctagagtgaaaatgaagtttccagccgcgctcttcactgggcggatcccagccctgggctggccctgggcactcagaggggtcgctgtgggaggccgtcggccgggcctgccacttgcccttctgcaccgttttcttcccacccaggccatcctcttcctgcagcagcttttggacttccaggagacggcaggcgccatgctggcctcccaagagaccagctcttcggccaccagctacagctctgagttcagcaagcggctgctaagcacctatatctgtaaagtgctgggcaacctgcagttgaacttgctgagcaagtccaaggtgtacgaggacccagctctgagcgccatcttcctgcacaacaactacaattacatcctcaagtccctggagaagtctgaactgatccagctggtggcagtgacacagaagactgctgagcgctcctaccgggagcacattgagcagcagatccagacctaccagcgcagctggttaaaggtgactgattacatcgcagagaagaatctacctgtgttccagccgggagtcaagctccgggacaaggagcggcagattatcaaggagcgttttaagggcttcaatgatggcctcgaagaactgtgcaaaatccagaaggcctgggctattccagacacagagcagagggacaggattcgccaggcccagaagaccattgtcaaggagacctacggggcctttctacagaagtttggcagcgtgcccttcaccaagaacccggagaagtacatcaagtacggggtggagcaggtgggcgacatgatcgatcgccttttcgacacctctgcctgagcctgctgctagccctgcctggttccaccagactggcgtgtcattggacagataaaccagtgttagcttgcctctgggctgggtgagcttgaagtcctctgggacagagacctgtctccacgcctccgggagctgtgtccctgagccccctagtcctggctcctgctttttccccacagcccgtgttcccagccgaaccagcactctcccggaagcctggggtccctccacaccttggcttttatgaccctgatggcttctgaaacaggaaaagagagaaggaagacagaggcctgtgcccactgctgctccatgtgtaccaagagcagcagggcagaagggccctccctccagcctaggtcagaggtggggacagagaactcccctacagcccagagatgtggcagggctcagagaagcagccagagctcctggaggaaaggcagtcgggactgaccccctctcttaaaacacattcccgcccgcccacaggcctgaggtctgggacctttccctcccaggagtcccctaggtggctgggggaggcaggctcactggccattttccctagagtccagcacactgcaggaggcgttcggaggaggagttccgccccaccctctacagccttcctcaggcccctgtctctggcccccagcctcagtgcctcttggcccagggccaggcagtcgtggttgcagaaggagcaattaggctgcctgcctgtgggctgggagacagggacaatggggaaaagttaaggagcaaaatgggggttggaagcaaaaaatagggccccacctatttaggacgagattgaagactgacccttgaggcacacttgcactggagatgggtttatttcacgctctgtgcttgtgtgctagcggagggagagctcagggtggcttaatccagaggccctgtcatggcccgcccccagccatgggaaagcaaacttcatcctaaggtgtgcagcccaggccctgcccctttacagtctaggccgcctgccatggggtgcagcctctccaggggctgcgtcagacttgcacgctgcccacatccagattcctgcaaagacgaattgggtgcacagcaccccaaccacatacacgaggaagaagatgcggtcagcagtctcaggccagcttctctgtgacccctttactcctctggagggctctgtggggagagatacagggaaaggagctgttcttcaaggtcccctcaacatgagcggaagagcgaaccccaggggt

SEQ ID NO: 11125 - protein, 332 aa, Homo sapiens; identical to SEQ ID NO: 11107

SEQ ID NO: 11126 - DNA, 3078 bp, Homo sapiens
gggaccaagagcggaagtgggtgtgacggggacgggggcccggtgggcccgcggaggaaagatactggggagtgggagccgcggggttcagagcgatgattcccccacaggaggcatccgctcgacggcgggagattgaggacaagctgaagcaggaggaggagactctgtccttcatccgagacagcctggagaagagcgaccagctcactaagaacatggtgtctatcttatcatcctttgagagccgccttatgaagctggagaactccatcatccctgtgcacaagcagacggagaatctgcagcggctgcaggagaatgttgagaagacgctgtcctgcctggaccatgtcatcagctactaccatgtggccatggtgacgatgatctggaggcccaggaggacgtgaccctggagcacctgcccgagagcgtgctccaggatgtcattcgcatctcccgctggctggtggaatatggccgcaaccaagatttcatgaacgtctactaccagatacgctccagccagctggaccgctccatcaaaggactgaaggagcatttccataagagcagttcttcctctggggttccctactcccctgctatccccaacaagaggaaagacacacctaccaagaagccagtcaagcggccagggagagatgacatgctggacgtggagaccgatgcctacatccactgcgtcagtgccttcgtcaagctggcgcagagcgagtaccagctgctggccgacatcatccccgagcaccaccagaagaagaccttcgactccctgatacaggatgccctggatgggctgatgcttgaaggggagaacatcgtgtctgctgcccggaaggccattgtgcgacacgacttctccacggtgctcaccgtcttccccatcctgcgacacctcaagcagaccaagcctgagtttgaccaggtgctccagggcacggctgccagcacaaagaacaagctgcctggcctcatcacatccatggagaccatcggtgccaaagcgctggaggacttcgcagacaacatcaagaatgacccggacaaggagtacaacatgccgaaggacggcaccgtacacgagctcaccagcaatgccatcctcttcctgcagcagcttttggacttccaggagacggcaggcgccatgctggcctcccaagagaccagctcttcggccaccagctacagctctgagttcagcaagcggctgctaagcacctatatctgtaaagtgctgggcaacctgcagttgaacttgctgagcaagtccaaggtgtacgaggacccagctctgagcgccatcttcctgcacaacaactacaattacatcctcaagtccctggagaagtctgaactgatccagctggtggcagtgacacagaagactgctgagcgctcctaccgggagcacattgagcagcagatccagacctaccagcgcagctggttaaaggtgactgattacatcgcagagaagaatctacctgtgttccagccgggagtcaagctccgggacaaggagcggcagattatcaaggagcgttttaagggcttcaatgatggcctcgaagaactgtgcaaaatccagaaggcctgggctattccagacacagagcagagggacaggattcgccaggcccagaagaccattgtcaaggagacctacggggcctttctacagaagtttggcagcgtgcccttcaccaagaacccggagaagtacatcaagtacggggtggagcaggtgggcgacatgatcgatcgccttttcgacacctctgcctgagcctgctgctagccctgcctggttccaccagactggcgtgtcattggacagataaaccagtgttagcttgcctctgggctgggtgagcttgaagtcctctgggacagagacctgtctccacgcctccgggagctgtgtccctgagccccctagtcctggctcctgctttttccccacagcccgtgttcccagccgaaccagcactctcccggaagcctggggtccctccacaccttggcttttatgaccctgatggcttctgaaacaggaaaagagagaaggaagacagaggcctgtgcccactgctgctccatgtgtaccaagagcagcagggcagaagggccctccctccagcctaggtcagaggtggggacagagaactcccctacagcccagagatgtggcagggctcagagaagcagccagagctcctggaggaaaggcagtcgggactgaccccctctcttaaaacacattcccgcccgcccacaggcctgaggtctgggacctttccctcccaggagtcccctaggtggctgggggaggcaggctcactggccattttccctagagtccagcacactgcaggaggcgttcggaggaggagttccgccccaccctctacagccttcctcaggcccctgtctctggcccccagcctcagtgcctcttggcccagggccaggcagtcgtggttgcagaaggagcaattaggctgcctgcctgtgggctgggagacagggacaatggggaaaagttaaggagcaaaatgggggttggaagcaaaaaatagggccccacctatttaggacgagattgaagactgacccttgaggcacacttgcactggagatgggtttatttcacgctctgtgcttgtgtgctagcggagggagagctcagggtggcttaatccagaggccctgtcatggcccgcccccagccatgggaaagcaaacttcatcctaaggtgtgcagcccaggccctgcccctttacagtctaggccgcctgccatggggtgcagcctctccaggggctgcgtcagacttgcacgctgcccacatccagattcctgcaaagacgaattgggtgcacagcaccccaaccacatacacgaggaagaagatgcggtcagcagtctcaggccagcttctctgtgacccctttactcctctggagggctctgtggggagagatacagggaaaggagctgttcttcaaggtcccctcaacatgagcggaagagcgaaccccaggggt

SEQ ID NO: 11127 - protein, 438 aa, Homo sapiens
MNVYYQIRSSQLDRSIKGLKEHFHKSSSSSGVPYSPAIPNKRKDTPTKKPVKRPGRDDMLDVETDAYIHCVSAFVKLAQSEYQLLADIIPEHHQKKTFDSLIQDALDGLMLEGENIVSAARKAIVRHDFSTVLTVFPILRHLKQTKPEFDQVLQGTAASTKNKLPGLITSMETIGAKALEDFADNIKNDPDKEYNMPKDGTVHELTSNAILFLQQLLDFQETAGAMLASQETSSSATSYSSEFSKRLLSTYICKVLGNLQLNLLSKSKVYEDPALSAIFLHNNYNYILKSLEKSELIQLVAVTQKTAERSYREHIEQQIQTYQRSWLKVTDYIAEKNLPVFQPGVKLRDKERQIIKERFKGFNDGLEELCKIQKAWAIPDTEQRDRIRQAQKTIVKETYGAFLQKFGSVPFTKNPEKYIKYGVEQVGDMIDRLFDTSA

SEQ ID NO: 11128 - DNA, 2393 bp, Homo sapiens
ttagatgttccagaagccctgactgggctggtcacttccttcacaggccccgcatttgcccacatggatgaccccagtgccagcctccttgaggtggcacagccacctgcccaccctgggctgccctctttcaggtacaactcagaatgctcagtcctggggtcaaaccaccttatccaggacgctgattcaggaatcttccctccttatctttccatccgtcactctcctgcctctggtgtctgatcccactgtctgcgcagagccgagaatgaagccagaacaaaggctgggctcagctccttttattcccctcgaacctggcggggcctgctggctcccttgcagctttctgccagaacagtcagcctcttccccatcctctgccagtgtggggtacaggccaggagctgggggacccacgccgcccccagccaggagtgtggctggccccagaccagcagctcaagagttgtgccatcccccagggagagatgacatgctggacgtggagaccgatgcctacatccactgcgtcagtgccttcgtcaagctggcgcagagcgagtaccagctgctggccgacatcatccccgagcaccaccagaagaagaccttcgactccctgatacaggatgccctggatgggctgatgcttgaaggggagaacatcgtgtctgctgcccggaaggccattgtgcgacacgacttctccacggtgctcaccgtcttccccatcctgcgacacctcaagcagaccaagcctgagtttgaccaggtgctccagggcacggctgccagcacaaagaacaagctgcctggcctcatcacatccatggagaccatcggtgccaaagcgctggaggacttcgcagacaacatcaaggtccctgctgtcctcccctttctccctccctcccggcccagcaccacagtgacctggccctgggggactctcagagcaggcctccaagagggtgcgttgtcccggggcagccagctgcgccactggcctgtcagcacccatgtgccttcctttccttcctggggcctccaagccctctgaagtgggaagggcctctcccccttggtccagcctggctcagcctttgtgcctgagaggtgtcctagcacccgtctgccaggaggcggcaccatgagcaggtgcactggggcatggggtgggctgggggctgcttcagggaaccagaggctgtttttccacagaatgacccggacaaggagtacaacatgccgaaggacggcaccgtacacgagctcaccagcaatgtgggtgctgcctgaggacaccagggagaggggaggaaggagggcccaggcccaggcccagggccaggcagagtactggtggaagggactcagcctggcccagagccgctcgcacctttgtgagcagtcctgggtggcaggatggacagtgacatgtttagtgtctctagcagacagggcctttcctggcaggctagagtgaaaatgaagtttccagccgcgctcttcactgggcggatcccagccctgggctggccctgggcactcagaggggtcgctgtgggaggccgtcggccgggcctgccacttgcccttctgcaccgttttcttcccacccaggccatcctcttcctgcagcagcttttggacttccaggagacggcaggcgccatgctggcctcccaagagaccagctcttcggccaccagctacagctctgagttcagcaagcggctgctaagcacctatatctgtaaagtgctgggcaacctgcagttgaacttgctgagcaagtccaaggtgtacgaggacccagctctgagcgccatcttcctgcacaacaactacaattacatcctcaagtccctggagaagtctgaactgatccagctggtggcagtgacacagaagactgctgagcgctcctaccgggagcacattgagcagcagatccagacctaccagcgcagctggttaaaggtgactgattacatcgcagagaagaatctacctgtgttccagccgggagtcaagctccgggacaaggagcggcagattatcaaggagcgttttaagggcttcaatgatggcctcgaagaactgtgcaaaatccagaaggcctgggctattccagacacagagcagagggacaggattcgccaggcccagaagaccattgtcaaggagacctacggggcctttctacagaagtttggcagcgtgcccttcaccaagaacccggagaagtacatcaagtacggggtggagcaggtgggcgacatgatcgatcgccttttcgacacctctgcctgagcctgctgctagccctgcctggttccaccagactggcgtgtcattggacagataaaccagtgttagcttgc

SEQ ID NO: 11129 - protein, 332 aa, Homo sapiens; identical to SEQ ID NO: 11107

SEQ ID NO: 11130 - DNA, 2192 bp, Homo sapiens
ggacgggggcccggtgggcccgcggaggaaagatactggggagtgggagccgcggggttcagagcgatgattcccccacaggaggcatccgctcgacggcgggagattgaggacaagctgaagcaggaggaggagactctgtccttcatccgagacagcctggagaagagcgaccagctcactaagaacatggtgtctatcttatcatcctttgagagccgccttatgaagctggagaactccatcatccctgtgcacaagcagacggagaatctgcagcggctgcaggagaatgttgagaagacgctgtcctgcctggaccatgtcatcagctactaccatgtggccagtgacactgagaagatcatcagagagggccccacaggtaggctggaagagtacctgggaagcatggccaagattcagaaggcagtggagtatttccaggacaacagcccagacagcccggaactcaacaaagtgaaactgctctttgagcgcgggaaggaggccctggagtccgaatttcgcagcctgatgacgcggcacagtaaggtcgtctcgcccgtgctcatcttggatctgatcagtggtgacgatgatctggaggcccaggaggacgtgaccctggagcacctgcccgagagcgtgctccaggatgtcattcgcatctcccgctggctggtggaatatggccgcaaccaagatttcatgaacgtctactaccagatacgctccagccagctggaccgctccatcaaaggactgaaggagcatttccataagagcagttcttcctctggggttccctactcccctgctatccccaacaagaggaaagacacacctaccaagaagccagtcaagcggccagggacgatccgtaaggctcagaaccttctgaaacagtattcccagcatggtctagatgggaaaaaggggggctctaacctcattcctctggaagggagagatgacatgctggacgtggagaccgatgcctacatccactgcgtcagtgccttcgtcaagctggcgcagagcgagtaccagctgctggccgacatcatccccgagcaccaccagaagaagaccttcgactccctgatacaggatgccctggatgggctgatgcttgaaggggagaacatcgtgtctgctgcccggaaggccattgtgcgacacgacttctccacggtgctcaccgtcttccccatcctgcgacacctcaagcagaccaagcctgagtttgaccaggtgctccagggcacggctgccagcacaaagaacaagctgcctggcctcatcacatccatggagaccatcggtgccaaagcgctggaggacttcgcagacaacatcaagaatgacccggacaaggagtacaacatgccgaaggacggcaccgtacacgagctcaccagcaatgccatcctcttcctgcagcagcttttggacttccaggagacggcaggcgccatgctggcctcccaagagaccagctcttcggccaccagctacagctctgagttcagcaagcggctgctaagcacctatatctgtaaagtgctgggcaacctgcagttgaacttgctgagcaagtccaaggtgtacgaggacccagctctgagcgccatcttcctgcacaacaactacaattacatcctcaagtccctggagaagtctgaactgatccagctggtggcagtgacacagaagactgctgagcgctcctaccgggagcacattgagcagcagatccagacctaccagcgcagctggttaaaggtgactgattacatcgcagagaagaatctacctgtgttccagccgggagtcaagctccgggacaaggagcggcagattatcaaggagcgttttaagggcttcaatgatggcctcgaagaactgtgcaaaatccagaaggcctgggctattccagacacagagcagagggacaggattcgccaggcccagaagaccattgtcaaggagacctacggggcctttctacagaagtttggcagcgtgcccttcaccaagaacccggagaagtacatcaagtacggggtggagcaggtgggcgacatgatcgatcgccttttcgacacctctgcctgagcctgctgctagccctgcctggttccaccagactggcgtgtcattggacagataaaccagtgttagcttgc

SEQ ID NO: 11131 - protein, 684 aa, Homo sapiens; identical to SEQ ID NO: 1817

SEQ ID NO: 11132 - DNA, 477 bp, Homo sapiens
gagcaaaggatgcatgtggccatcaggacacaggagacaggcccagaccaagggtgtttggggaagagtgggggaaggctgctctgctctgaagtgagctttctctgctatctctcctggcttcccagctccgggacaaggagcggcagattatcaaggagcgttttaagggcttcaatgatggcctcgaagaactgtgcaaaatccagaaggcctgggctattccagacacagagcagagggacaggattcgccaggcccagaagaccattgtcaaggagacctacggggcctttctacagaagtttggcagcgtgcccttcaccaagaacccggagaagtacatcaagtacggggtggagcaggtgggcgacatgatcgatcgccttttcgacacctctgcctgagcctgctgctagccctgcctggttccaccagactggcgtgtcattggacagataaaccagtgttagcttg

SEQ ID NO: 11133 - protein, 122 aa, Homo sapiens
MHVAIRTQETGPDQGCLGKSGGRLLCSEVSFLCYLSWLPSSGTRSGRLSRSVLRASMMASKNCAKSRRPGLFQTQSRGTGFARPRRPLSRRPTGPFYRSLAACPSPRTRRSTSSTGWSRWAT

SEQ ID NO: 11134 - DNA, 210 bp, Homo sapiens
cccagaagaccattgtcaaggagacctacggggcctttctacagaagtttggcagcgtgcccttcaccaagaacccggagaagtacatcaagtacggggtggagcaggtgggcgacatgatcgatcgccttttcgacacctctgcctgagcctgctgctagccctgcctggttccaccagactggcgtgtcattggacagataaaccagt

SEQ ID NO: 11135 - protein, 68 aa, Homo sapiens
PEDHCQGDLRGLSTEVWQRALHQEPGEVHQVRGGAGGRHDRSPFRHLCLSLLLALPGSTRLACHWTDK

SEQ ID NO: 11136 - DNA, 538 bp, Homo sapiens
gggaactctggtgtggggctaggctgcctctgggtctctgagccgtccgccttgggcacagcgctcccccggaagttcagtcagggtggcttcctgctggctgctcctcctggggcagctggcaacccctcctctctgggacttaccagcctcttagattttgaccccatgccagccagcctcagaagctgcagccaaccaccctcttagatgttccagaagccctgactgggctggtcacttccttcacaggccccgcatttgcccacatggatgaccccagtgccagcctccttgaggtggcacagccacctgcccaccctgggctgccctctttcaggtacaactcagaatgctcagtcctggggtcaaaccaccttatccaggacgctgattcaggaatcttccctccttatctttccatccgtcactctcctgcctctggtgtctgatcccactgtctgcgcagagccgagaatgaagccagaacaaaggctgggctcagctccttttattcccctcgaacctggcggggcct

SEQ ID NO: 11137 - protein, 87 aa, Homo sapiens
MTPVPASLRWHSHLPTLGCPLSGTTQNAQSWGQTTLSRTLIQESSLLIFPSVTLLPLVSDPTVCAEPRMKPEQRLGSAPFIPLEPGG

SEQ ID NO: 11138 - DNA, 3014 bp, Homo sapiens
ggaagtgggtgtgacggggacgggggcccggtgggcccgcggaggaaagatactggggagtgggagccgcggggttcagagcgatgattcccccacaggaggcatccgctcgacggcgggagattgaggacaagctgaagcaggaggaggagactctgtccttcatccgagacagcctggagaagagcgaccagctcactaagaacatggtgtctatcttatcatcctttgagagccgccttatgaagctggagaactccatcatccctgtgcacaagcagacggagaatctgcagcggctgcaggagaatgttgagaagacgctgtcctgcctggaccatgtcatcagctactaccatgtggccagtgacactgagaagatcatcagagagggccccacaggtaggctggaagagtacctgggaagcatggccaagattcagaaggcagtggagtatttccaggacaacagcccagacagcccggaactcaacaaagtgaaactgctctttgagcgcgggaaggaggccctggagtccgaatttcgcagcctgatgacgcggcacagtaaggtcgtctcgcccgtgctcatcttggatctgatcagtggtgacgatgatctggaggcccaggaggacgtgaccctggagcacctgcccgagagcgtgctccaggatgtcattcgcatctcccgctggctggtggaatatggccgcaaccaagatttcatgaacgtctactaccagatacgctccagccagctggaccgctccatcaaaggactgaaggagcatttccataagagcagttcttcctctggggttccctactcccctgctatccccaacaagaggaaagacacacctaccaagaagccagtcaagcggccaggtgagcccccatcctggcccatctctgcaacagccagaggctgactgggactgtactgctttagtccaatctagcgttcgcagcgtcaggcccctccagagcttgtcgtcgtggtaaccccgactgtaggtacacaggacagaaagcaagtgtctacccacccagtgaagccccccaagagcaagactcttccttccagctagcagagcctggggttacacagcttctttggagtaggggagtaacacaggtgctcagcgaatcccgcctgaggcagagcccctgcctaggcctcctccctcacacacacgtcgccctgtcagaaggccaggcacactactgcagccaggatgctgggatagcaaggggataggtgctccaaccttcaccttccagaaaggcagggtgatctgaagtgacgtgtagctgagagctggatggggagaatttcactttcccagttgatccagaaaggaaagaaaccccagagcatcctctcggaagaacttaaactggctttgggctccagtgcgagcgagtgacttgtggaaaggggcaccatgatgagaggccggggccggtgggtgttgctgtcctgggtgaacatctcgtcatctgtctgttctttctccccggcatcatatcccttatagtctgtgctccaggtaaacagtgtctctgccagccacagcttggcaagcccggctatgtctggccactgagagatgctgcccgcagctcgatgatgtgctgggatgttctggggtggggctgctgagattgcactgaaaaagaaagctggagaagccggggctgctcccacccaggctggccccctgtccagctgctgctgtgggcacatgccctagttgtggcctgtggcacctgcttatgacaacaagctttgggtagagcttacttacacccttggtttctccagtccctgcctgctcatgcccctcagagagtgaggtgtctgttccacaagagcacccgctcccctgcaggcctttgtttagggtttggagaaacaggcagagcaggggctgccctcagggagtagagcattagggagctggtgcctggggccttctccctccagtgtggaaatcctgcccaccagccaaaacctgctgcaaatggggactgccagcccagcctgtgggcgcagctgcctgcacagtggatggagcagctctgtgccttctgtgtggtggggagtggctgtctctatgaggctgctaggatgcttgggccccagccagtctgtgcttgcttcctcttctgcctggctccctgacaggtcccccagaagccccagagccctatttgcactgccttaagagtgcccgctggccatgcagctacctggcctttcaggcaggagggatctgatctcaggtggctcacagtggaccacatccatccttgggccagagacactagaggaaaactccagctgtggggtttcagagttgtcaggaactggtgggctcaggaccgatgtcaggctctagggagtcaggctctggggatgtcggttcccacttctgaggagagggacagggaggcctcccaggtggtgaagcaccgacctcagcatccctggaggcaattgggagcctgacgggtttggcggctgctagatccacatcggcgacccacatcctgccggcgtgcacctgcgtctgtgtctgctcctggtgggttgtggggcaggaatcagattcactcattagtaagccgcactcgctgaaggggagagcatgagcaagggagacgtgagccaggccttggttattaggagctaattatgggccaagtatggtggctcacgcctgtaatcctagcacttcgggaggccgaggcgggcggatcacctgaggtcaggagttcgagaccagcctggccaacatggtgaaaccctgtctctactaaaaatagaaaaaaaattagttgggtgtggtgacgcacgcctataatcccagctacctgggaggctgaggcaggagaatcacttgaacccaggaggcagaggttgcagtgagccgaggtcgtgccaccgtactccagcctgggcgacagagtgagactgtctcaaaaaaaaaaaaaaaaaaaaaaac

SEQ ID NO: 11139 - protein, 283 aa, Homo sapiens
MIPPQEASARRREIEDKLKQEEETLSFIRDSLEKSDQLTKNMVSILSSFESRLMKLENSIIPVHKQTENLQRLQENVEKTLSCLDHVISYYHVASDTEKIIREGPTGRLEEYLGSMAKIQKAVEYFQDNSPDSPELNKVKLLFERGKEALESEFRSLMTRHSKVVSPVLILDLISGDDDLEAQEDVTLEHLPESVLQDVIRISRWLVEYGRNQDFMNVYYQIRSSQLDRSIKGLKEHFHKSSSSSGVPYSPAIPNKRKDTPTKKPVKRPGEPPSWPISATARG

SEQ ID NO: 11140 - DNA, 720 bp, Homo sapiens
ggaggaaagatactggggagtgggagccgcggggttcagagcgatgattcccccacaggaggcatccgctcgacggcgggagattgaggacaagctgaagcaggaggaggagactctgtccttcatccgagacagcctggagaagagcgaccagctcactaagaacatggtgtctatcttatcatcctttgagagccgccttatgaagctggagaactccatcatccctgtgcacaagcagacggagaatctgcagcggctgcaggagaatgttgagaagacgctgtcctgcctggaccatgtcatcagctactaccatgtggccagtgacactgagaagatcatcagagagggccccacaggtaggctggaagagtacctgggaagcatggccaagattcagaaggcagtggagtatttccaggacaacagcccagacagcccggaactcaacaaagtggtaaggggtccgcagaataacgtgagaagcttggggatatcagtctctgccctggtctcatgagggacatggagccagcttgaggatgtatgcagtagaatacacagaaggatatagcacagtacatcctataggcattaggatctctgcttcaagaattgcacattttttattattaaaaattctttattataaaacttgttaatgtattataaaaattaaattataaattacatataaaatataaacttaacatttga

SEQ ID NO: 11141 - protein, 159 aa, Homo sapiens
MIPPQEASARRREIEDKLKQEEETLSFIRDSLEKSDQLTKNMVSILSSFESRLMKLENSIIPVHKQTENLQRLQENVEKTLSCLDHVISYYHVASDTEKIIREGPTGRLEEYLGSMAKIQKAVEYFQDNSPDSPELNKVVRGPQNNVRSLGISVSALVS

SEQ ID NO: 11142 - DNA, 1129 bp, Homo sapiens
gcggctactgagcggcgctttcaagaagcggcgactgccccctgtccacatccacccagcctttgcccgccaggccgcgcaggagcccagcgctgtcccccgggccgggccgctgacggtgaataccgaggcccagcagctgctgcgggagttcgaggaggccaccggggaggcgggctggggtgcaggcgagggcaggctggggcataagcgcaaacagccgctgcccaagcgggtggccaaggtcccgcggccccccagcaccctgctgcccaccccggaggagcagggtgagctggaacccctcaaaggcaactttgactgggaggccatcttcgacgccggcactctgggcggggagctgggtgcactggaggccctggagctgagcccgcctctgagccccgcctcacacgtggacgtggacctcaccatccacggccgccacatcgactgccctgccacctgggggccttcggtggagcaggctgccgacagcctggacttcgatgagaccttcctggccacatccttcctgcagcacccctgggacgagagcggcagtggctgcctgcccccggagcccctctttgaggctggggatgccaccctggcctccgacctgcaggactgggccagcgtgggggccttcttgtaagaggccaggccctgccccacctctggacagtgcccaagtcagggtccagaactgccccccaacacaggtccacagacaccccatccctagggggcggggaggggacgtaaatccctaatctttaagcccgacttgaggctgagagcagctggaagtttgggtttggtggtttgggggccggggcagccaagctgtatggggcaggacagacagactaatgtagtgagtgtagctgtagctgaggcttaactgggagggatgccgagcttgctggaactactgggaccaagaagcggggtaccccacgcccctgcctgcactcctcgggggcgtggggcgtgccttgctccacccggactccctgggctgcgtcccacatccaccctcctgccccgtggggcaatttaacctttttcatgaaagttatttacaatgaaaagtttttaaaaataaaatttttaaaaatctaaa

SEQ ID NO: 11143 - protein, 88 aa, Homo sapiens
MRPSWPHPSCSTPGTRAAVAACPRSPSLRLGMPPWPPTCRTGPAWGPSCKRPGPAPPLDSAQVRVQNCPPTQVHRHPIPRGRGGDVNP

SEQ ID NO: 11144 - DNA, 2503 bp, Homo sapiens
tcccctcgggggtggggtagtgctcagctcccaccgtggtcctcgcaggcaccacatacttattcggaggaggcgcccccggggtcgcgagatggaagcgcgcgtccgggaggccgtgtaacgggagctgcgggactcagcgggccagagagcgcggcgggccacccccggctcagcccgtggatgctgaccgccccctcggagagtccccgcagacatggcggagagctggctgcgcctctcgggagccgggccggcggaggaggccgggccggagggcggcctggaggagcccgacgccctggatgacagcctgaccagcctgcagtggctgcaggaattctccattctcaacgccaaggcccccgccctgcccccggggggcaccgacccccacggctaccaccaggtgccaggttcagcggcgcccgggtcccccctggcggccgaccccgcctgcctggggcagccacacacgccgggcaagcccacgtcgtcgtgcacgtcgcggagcgcgcccccggggctgcaggccccaccccccgacgacgtggactacgccaccaatccgcacgtgaagcctccctactcgtatgccacgctcatctgcatggccatgcaggccagcaaggccaccaagatcaccctgtcggccatctacaagtggatcacggacaacttctgctacttccgccacgcagatcccacctggcagaattcaatccgccacaacctgtctctgaacaagtgcttcatcaaagtgcctcgggagaaggacgaaccaggcaaggggggcttctggcgcattgacccccagtacgcggagcggctactgagcggcgctttcaagaagcggcgactgccccctgtccacatccacccagcctttgcccgccaggccgcgcaggagcccagcgctgtcccccgggccgggccgctgacggtgaataccgaggcccagcagctgctgcgggagttcgaggaggccaccggggaggcgggctggggtgcaggcgagggcaggctggggcataagcgcaaacagccgctgcccaagcgggtggccaaggtcccgcggccccccagcaccctgctgcccaccccggaggagcagggtgagctggaacccctcaaaggcaactttgactgggaggccatcttcgacgccggcactctgggcggggagctgggtgcactggaggccctggagctgagcccgcctctgagccccgcctcacacgtggacgtggacctcaccatccacggccgccacatcgactgccctgccacctgggggccttcggtggagcaggctgccgacagcctggacttcgatgagaccttcctggccacatccttcctgcagcacccctgggacgagagcggcagtggctgcctgcccccggagcccctctttgaggctggggatgccaccctggcctccgacctgcaggactgggccagcgtgggggccttcttgtaagaggccaggccctgccccacctctggacagtgcccaagtcagggtccagaactgccccccaacacaggtccacagacaccccaccacctaggcaggggctgggccagggctccaaggcttgccccagaggccacatggccaccagccccagctgccatcagattcaagcccaggaggctgaaaacgagggcccaggaccagaatcgctgcctcctctccccagccccaccttgtacacacagtgtttcattgctccgcgtcttcccagccccagaaaccggctaaaggaccctgcaccatgagagccgaggcctggaggagcccgggtcaggctggggaggaacagaactgggccctcccagagcacctccgcttcccccctgcttccccaggtctctatccagagagagtccccaggtacaacaaatgctaattagatgacagcaaattaaccccctggaggcttctcctggcagagcctccctggggccggggcaggctgtggatggggcggagcagggcagaagatggactgggggagggggcagagagaggagaccaaaatgaggtggtggcacagggtggggcaaggagatcctctctaaggcctctggggtctttgcctggccccatccctagggggcggggaggggacgtaaatccctaatctttaagcccgacttgaggctgagagcagctggaagtttgggtttggtggtttgggggccggggcagccaagctgtatggggcaggacagacagactaatgtagtgagtgtagctgtagctgaggcttaactgggagggatgccgagcttgctggaactactgggaccaagaagcggggtaccccacgcccctgcctgcactcctcgggggcgtggggcgtgccttgctccacccggactccctgggctgcgtcccacatccaccctcctgccccgtggggcaatttaacctttttcatgaaagttatttacaatgaaaagtttttaaaaataaaatttttaaaaatctaaa

SEQ ID NO: 11145 - protein, 421 aa, Homo sapiens; identical to SEQ ID NO: 1823

SEQ ID NO: 11146 - DNA, 2632 bp, Homo sapiens
ctttggagcggctacttaatgccggtcccggggccgcggtagctcagagaagcgccgtcgggcgggggggcggcaagaggcgctggcagggcccccgagctgggggcagagagccgcagggggtgggagcaacttcttccagaaccttcctctggcccgggctgcgctctgagccaggcaccacatacttattcggaggaggcgcccccggggtcgcgagatggaagcgcgcgtccgggaggccgtgtaacgggagctgcgggactcagcgggccagagagcgcggcgggccacccccggctcagcccgtggatgctgaccgccccctcggagagtccccgcagacatggcggagagctggctgcgcctctcgggagccgggccggcggaggaggccgggccggagggcggcctggaggagcccgacgccctggatgacagcctgaccagcctgcagtggctgcaggaattctccattctcaacgccaaggcccccgccctgcccccggggggcaccgacccccacggctaccaccaggtgccaggttcagcggcgcccgggtcccccctggcggccgaccccgcctgcctggggcagccacacacgccgggcaagcccacgtcgtcgtgcacgtcgcggagcgcgcccccggggctgcaggccccaccccccgacgacgtggactacgccaccaatccgcacgtgaagcctccctactcgtatgccacgctcatctgcatggccatgcaggccagcaaggccaccaagatcaccctgtcggccatctacaagtggatcacggacaacttctgctacttccgccacgcagatcccacctggcagaattcaatccgccacaacctgtctctgaacaagtgcttcatcaaagtgcctcgggagaaggacgaaccaggcaaggggggcttctggcgcattgacccccagtacgcggagcggctactgagcggcgctttcaagaagcggcgactgccccctgtccacatccacccagcctttgcccgccaggccgcgcaggagcccagcgctgtcccccgggccgggccgctgacggtgaataccgaggcccagcagctgctgcgggagttcgaggaggccaccggggaggcgggctggggtgcaggcgagggcaggctggggcataagcgcaaacagccgctgcccaagcgggtggccaaggtcccgcggccccccagcaccctgctgcccaccccggaggagcagggtgagctggaacccctcaaaggcaactttgactgggaggccatcttcgacgccggcactctgggcggggagctgggtgcactggaggccctggagctgagcccgcctctgagccccgcctcacacgtggacgtggacctcaccatccacggccgccacatcgactgccctgccacctgggggccttcggtggagcaggctgccgacagcctggacttcgatgagaccttcctggccacatccttcctgcagcacccctgggacgagagcggcagtggctgcctgcccccggagcccctctttgaggctggggatgccaccctggcctccgacctgcaggactgggccagcgtgggggccttcttgtaagaggccaggccctgccccacctctggacagtgcccaagtcagggtccagaactgccccccaacacaggtccacagacaccccaccacctaggcaggggctgggccagggctccaaggcttgccccagaggccacatggccaccagccccagctgccatcagattcaagcccaggaggctgaaaacgagggcccaggaccagaatcgctgcctcctctccccagccccaccttgtacacacagtgtttcattgctccgcgtcttcccagccccagaaaccggctaaaggaccctgcaccatgagagccgaggcctggaggagcccgggtcaggctggggaggaacagaactgggccctcccagagcacctccgcttcccccctgcttccccaggtctctatccagagagagtccccaggtacaacaaatgctaattagatgacagcaaattaaccccctggaggcttctcctggcagagcctccctggggccggggcaggctgtggatggggcggagcagggcagaagatggactgggggagggggcagagagaggagaccaaaatgaggtggtggcacagggtggggcaaggagatcctctctaaggcctctggggtctttgcctggccccatccctagggggcggggaggggacgtaaatccctaatctttaagcccgacttgaggctgagagcagctggaagtttgggtttggtggtttgggggccggggcagccaagctgtatggggcaggacagacagactaatgtagtgagtgtagctgtagctgaggcttaactgggagggatgccgagcttgctggaactactgggaccaagaagcggggtaccccacgcccctgcctgcactcctcgggggcgtggggcgtgccttgctccacccggactccctgggctgcgtcccacatccaccctcctgccccgtggggcaatttaacctttttcatgaaagttatttacaatgaaaagtttttaaaaataaaatttttaaaaatctaaa

SEQ ID NO: 11147 - protein, 421 aa, Homo sapiens; identical to SEQ ID NO: 1823

SEQ ID NO: 11148 - DNA, 822 bp, Homo sapiens
gcggctactgagcggcgctttcaagaagcggcgactgccccctgtccacatccacccagcctttgcccgccaggccgcgcaggagcccagcgctgtcccccgggccgggccgctgacggtgaataccgaggcccagcagctgctgcgggagttcgaggaggccaccggggaggcgggctggggtgcaggcgagggcaggctggggcataagcgcaaacagccgctgcccaagcgggtggccaaggtcccgcggccccccagcaccctgctgcccaccccggaggagcagggtgagctggaacccctcaaaggcaactttgactgggaggccatcttcgacgccggcactctgggcggggagctgggtgcactggaggccctggagctgagcccgcctctgagccccgcctcacacgtggacgtggacctcaccatccacggccgccacatcgactgccctgccacctgggggccttcggtggagcaggctgccgacagcctggacttcgatgagaccttcctggccacatccttcctgcagcacccctgggacgagagcggcagtggctgcctgcccccggagcccctctttgaggctggggatgccaccctggcctccgacctgcaggactgggccagcgtgggggccttcttgtaagaggccaggccctgccccacctctggacagtgcccaagtcagggtccagaactgccccccaacacagtcccacatccaccctcctgccccgtggggcaatttaacctttttcatgaaagttatttacaatgaaaagtttttaaaaataaaatttttaaaaatct

SEQ ID NO: 11149 - protein, 103 aa, Homo sapiens
MRPSWPHPSCSTPGTRAAVAACPRSPSLRLGMPPWPPTCRTGPAWGPSCKRPGPAPPLDSAQVRVQNCPPTQSHIHPPAPWGNLTFFMKVIYNEKFLKIKFLK

SEQ ID NO: 11150 - DNA, 2174 bp, Homo sapiens
atgtggtgcctgcgaggaccacggtgggagctgagcactaccccacccccgaggggacagtgtgtgtacggggacgccctctctaacatcatccccgcagctggggaggatcttttagtgccgaggagaggactaagcacctgctgcgaggaaggacagggatcctcaggaagggggtcctggccactgtggctactgtttacctgaatctccttcatctcagctccttcctccctcctcccagaaaaaagatgtgtaagaaattagcccatggaccccagctccacctgaacatcaatataccgtgaggacattccagagtccctgcaaaaggtctcgtgagctgcagttcattgagtggctttaggtcacacggagaaaggagggttccagttccctctgagagggcagcccaggagccggcacggaaggagcaggatgcgtgtcacctgagactccgatgacggtgcgagccacagcactcgtgtgtgagaacggagagaagcaggtgctgacaggtgcagagcctgctcctgccccctgggctagatgggacatgcgtactgacctcacgggcttgctgtgaggactagatgagagaatgcgagcgttggactccggagctgcggctgttcagtaggaaagaccaaaagcaaatggtaaacaagagagaagacacacatgcatgcacaaataaaaacagcagcaccaccaccaccaccgccgccgccaccaccagcaagccatggaatgctgggccggagaggctgcccagagagctgtcctgactctgaattcacagaagtccttgctacaaactccaaccttctattctatagaagccttagccagggcagaacatcggttacttgtggaagactcaagaatcagatctgaagtctgctctcctggcctcttgagagaagaaaacaaatccattccacgggctagggaatgtcggtgaaacaacctggccacaccgcacttcttagaagcaaatattctatgggagaaacaatcacaaggggtaactctagagcctcaagcactgaagtcatcaactgagttggtgacactccaaacccccttgggctggggtgcaagagctgacggacgcagccttggcggccaccttctccttcaagctccttggccaggtgggagccgtcaggtccacatgcacacctccaacacttcccaagcgatggccagcgctaaagcagaagcaataggatgacatctgctggtgcgtctgtatccaggccgggcatacgtgtgctctggaggtgcccctgagggaggggcctcagagcagcagggggaagagtctggctcctggaacacatagtgttccctgcttgggggagactttcctgccctccttcttcctcctacgtccttgctctgtgggccattccttctcttctagccttactggaaacaacattcttccaactgaagatgtaactgaggcctgaattatggtaaaggaagattattacaacagcctttaaaatacttgcctaagctgagctcctgaagaaacttggacctgtctccttgaccacgcctttacacccgcacctgacatccatggctctgaggcccagaaagagctgaggaggtcatagagatcatcaatgctctgcttgctttgatgtaccattaagaagacgatctttcctctaacagccccatacaactgagcagcgccaccacgtcataccggtacccttttctttaccccttaaagaatacccaggaaagaaagataactaaaggaagtaaaggaccagatcttttaccaccttcctgcgtgggtgatccatcctcttcctctataacatcatttccctaggacagaaggaaggccctgtgagtctatgaagcggcaaaatgagtaaactgattggctgaagacagaactaatcatcctactggtatctaactccagggcctacgttaatagcatatatttccatctgtgtttaatatgcctcagaggctgagtagaggcagatcttgcttggagaggcaccatctgcctacagggattagatccgagccacattacccatatatgctcagaatggtctgtcaggaacacccttgttaatagtttagctgatactgtttctctaaggtggaagtaaaaattactaaatgaaagagca

SEQ ID NO: 11151 - protein, 72 aa, Homo sapiens
MECWAGEAAQRAVLTLNSQKSLLQTPTFYSIEALARAEHRLLVEDSRIRSEVCSPGLLREENKSIPRARECR

SEQ ID NO: 11152 - DNA, 2052 bp, Homo sapiens
agaagcgcgcggcctgcggcaccgggaaccgctatggatccgttcgttctggggaaccaagactctcgcccccacccccttcctgtcccgtatgccttggacatgggactgaggccttgaggaatctttccgtgcttctccctaggagaggactaagcacctgctgcgaggaaggacagggatcctcaggaagggggtcctggccactgtggctactgtttacctgaatctccttcatctcagctccttcctccctcctcccagaaaaaagatgtgtaagaaattagcccatggaccccagctccacctgaacatcaatataccgtgaggacattccagagtccctgcaaaaggtctcgtgagctgcagttcattgagtggctttaggtcacacggagaaaggagggttccagttccctctgagagggcagcccaggagccggcacggaaggagcaggatgcgtgtcacctgagactccgatgacggtgcgagccacagcactcgtgtgtgagaacggagagaagcagtgaaacagagagaagaaaacaaatccattccacgggctagggaatgtcggtgaaacaacctggccacaccgcacttcttagaagcaaatattctatgggagaaacaatcacaaggggtaactctagagcctcaagcactgaagtcatcaactgagttggtgacactccaaacccccttgggctggggtgcaagagctgacggacgcagccttggcggccaccttctccttcaagctccttggccaggtgggagccgtcaggtccacatgcacacctccaacacttcccaagcgatggccagcgctaaagcagaagcaataggatgacatctgctggtgcgtctgtatccaggccgggcatacgtgtgctctggaggtgcccctgagggaggggcctcagagcagcagggggaagagtctggctcctggaacacatagtgttccctgcttgggggagactttcctgccctccttcttcctcctacgtccttgctctgtgggccattccttctcttctagccttactggaaacaacattcttccaactgaagatgtaactgaggcctgaattatggtaaaggaagattattacaacagcctttaaaatacttgcctaagctgagctcctgaagaaacttggacctgtctccttgaccacgcctttagtacgtctgccggcccgagagtcctcttttacagtaatgttgaccatattcctaactaaagcaagacctgaccagctgccaaatagtcctccccctccccccagtggaagaaatggctactgctattcaacactgagaatgccagaacagctctgtggggctccactgaaaacctgcagcagggaggctgatgatgggagctgcttagagagcttccgaatctacttcaggtaaatatggacctgtatgtatctcctgcagcacccgcacctgacatccatggctctgaggcccagaaagagctgaggaggtcatagagatcatcaatgctctgcttgctttgatgtaccattaagaagacgatctttcctctaacagccccatacaactgagcagcgccaccacgtcataccggtacccttttctttaccccttaaagaatacccaggaaagaaagataactaaaggaagtaaaggaccagatcttttaccaccttcctgcgtgggtgatccatcctcttcctctataacatcatttccctaggacagaaggaaggccctgtgagtctatgaagcggcaaaatgagtaaactgattggctgaagacagaactaatcatcctactggtatctaactccagggcctacgttaatagcatatatttccatctgtgtttaatatgcctcagaggctgagtagaggcagatcttgcttggagaggcaccatctgcctacagggattagatccgagccacattacccatatatgctcagaatggtctgtcaggaacacccttgttaatagtttagctgatactgtttctctaaggtggaagtaaaaattactaaatgaaagagca

SEQ ID NO: 11153 - protein, 65 aa, Homo sapiens
MLTIFLTKARPDQLPNSPPPPPSGRNGYCYSTLRMPEQLCGAPLKTCSREADDGSCLESFRIYFR

SEQ ID NO: 11154 - DNA, 3130 bp, Homo sapiens
tttttttaacatatgatttgattttttttgtctccatccttaagatttttattttaaggacagcaacgcagagaaaaacacagccagcccctctctaactgcattaactccgttacaggccagaggacgtgcgcatttctaggtatggagtgtgacaataacaatgactttgacatcgcaagcgtgaaagcactggacaataagctgtgctctgaggtctgcttacctggtgcctggcaggctgatgacaatgccgtcagtcggaatgcccagcgccggcgcttgtcatccagcagcctggaggactctgagacgaggccctgtgtgtggggccctttggctgtctgagccccagcctctgcacttgggctcccctcctgccctgcattccatccatcctcactcagctgctgcctactgggcatcctcagcaagatgctggagactttttaccctcctgtgacagctgttacaacctgtaaccacaatccctcacctctcagagggaactggaaccctcctttctccgtgtgacctaaagccactcaatgaactgcagctcacgagaccttttgcagggactctggaatgtcctcacggtatattgatgttcaggtggagctggggtccatgggctaatttcttacacatcttttttctccttagggggtagaacaagaaggcttagagtttggcagctttgttacaaacatccctctggcatttcctggtctctggcacatcataaccaattggaaacctgcagtttggggtagggctggaggatcgctcctgtggaaagggagagccatactgcacggacgtagcgtttccctctacaagcactaggagcacctttctcaaggacaagaaatggtagcaaccaaaaggttggttgaaggaaacaatccttccttctggtggcagagccagtcttctgggcctcacatgcctgtgcggttaagaaggagctcttggccgggcgcggtggctcacgcctgtaatcccagcactttgggaggccgaggcgggtggatcatgagatcaggagatcgagaccatcctggctaacacggcgaaaccccgtctctactaaaaatacaaaaaattagctgggcatggttgcaggcgcctgtagtcccagctacttgggaggctgaggcaggagaatggcctgaacccgggaggcggagcttgcagtgagccgagatcgcgccaatgcactccagcctgggcgacagagaaaaaaaaaaaaaaagaaggagcccttgaatctgagaatcccccagttaagatgatttcccttaaggagcatttctcctgatcaggtgcattcagggaggcctgcaactccatcctaaggtgacatttcaagaaacacatgtgttgaccacctctgtgtgccaagcactgggtgaggagtggtcgtatattaccataattcatcctcactcaattgggaggtggcattcttgtccctgttgcccccatctctacccccttttgttaatggttgagagaaatgtggaccagtgattctcagtttggtgcccaggtccccaaaggaagtgatggagagccttgagctaagttcaggcagcagcatgtggccagcagcagtgtgctgggagcagaggttggaatcagggctcagggccttcacttcaagggccctccccagctactcgggaggctgaggcaggagaatcgcttgaactcaggaggtggaggttgcggtgagccaagatcgtgccactgcactccagcctgggctacaagattgaaaagatcgaaactctgtctcaaacaaaaaaaaaaaaattcaaggctgtttccaaggcagcctcaaaaagagcctggtgcccagggggtccttcgtttctgtgtggctgcagaggccaggagtgcagtgactgtctcactgcctagtggttgtggctcacatcctgccctgatggagaggggggcctgtcgtccaaccctctctgaaaaactgcagtagactttaccatttcaggccccacctaatgttctttccttccttccccctacattcttcccgcccctttcatagttaagatgcataagctgagcaataaccccacttcctgatttccctgaaatatgagcccagaagcagcaggtgacagggagcttcccttaccctggggtggtggcacacagaccacctcctgtcctgtcccctgcaggtagtattcacagtgtggtgttacctgggaggagggaggaaggagctgagatgaaggagattcaggtaaacagtagccacagtggccaggacccccttcctgaggatccctgtccttcctcgcagcaggtgcttagtcctctcctagggagaagcacggaaagattcctcaaggcctcagtcccatgtccaaggcatacctaggttagaaatgtcctttacttgtttctcagttactatttctcctcttcctccctccccctgccttctcttggctgtcatttagctctctggcccacagaaatactccatccaaggagctggtcctcagtcagcctgatgaggacaggtcagtggccaacccttttgccccagtccttcatctggagacagtcacatagtcacgtcaacagttcacccaaagagaagaggtggggcctggcttctcccacagggcacagcctaactatggagacccagggctccttcctgctgcactaggcctgtgctctccctattgccttcaggtggtgtgatcccggcttcctcacagagcccttttttccttctgcccagctccatcccaccagagtttctacccccgctgaggcatctcctgggcacagaccaccacactctaagccggctggcctgggagttagggtcctgcccacctcacctgggagttggggtcctgcccacctggagtttagcacgctggtcgctcactttgctttggtctgcacacctggtgtgtgcatgtgtatactgcttgtgccatctgtgtacccctctccctggagtacacttgtggtcacactacagtggggacatcaagaatgcaatatttatggattgctgcatgattcttaaaaatgaataaaactgtttacaagggaaggagagctaactgcaaagtga

SEQ ID NO: 11155 - protein, 67 aa, Homo sapiens
MECDNNNDFDIASVKALDNKLCSEVCLPGAWQADDNAVSRNAQRRRLSSSSLEDSETRPCVWGPLAV

SEQ ID NO: 11156 - DNA, 443 bp, Homo sapiens
cccttgtaaacagttttattcatttttaagaatcatgcagcaatccataaatattgcattcttgatgtccccactgtagtgtgaccacaagtgtactccagggagaggggtacacagatggcacaagcagtatacacatgcacacaccaggtgtgcagaccaaagcaaagtgagcgaccagcgtgctaaactccaggtgggcaggaccccaactcccaggtgaggtgggcaggaccctaactcccaggccagccggcttagagtgtggtggtctgtgcccaggagatgcctcagcgggggtagaaactctggtgggatggagctgggcagaaggaaaaaagggctctgtgaggaagccgggatcacaccaccagaaggaaggattgtttccttcaaccaaccttttggttgctaccatttcttgtccttgagaaaggtgctcc

SEQ ID NO: 11157 - protein, 41 aa, Homo sapiens
MELGRRKKGLCEEAGITPPEGRIVSFNQPFGCYHFLSLRKV

SEQ ID NO: 11158 - DNA, 539 bp, Homo sapiens
ttacaacagcctttaaaatacttgcctaagctgagctcctgaagaaacttggacctgtctccttgaccacgcctttacacccgcacctgacatccatggctctgaggcccagaaagagctgaggaggtcatagagatcatcaatgctctgcttgctttgatgtaccattaagaagacgatctttcctctaacagccccatacaactgagcagcgccaccacgtcataccgaaggaaggccctgtgagtctatgaagcggcaaaatgagtaaactgattggctgaagacagaactaatcatcctactggtatctaactccagggcctacgttaatagcatatatttccatctgtgtttaatatgcctcagaggctgagtagaggcagatcttgcttggagaggcaccatctgcctacagggattagatccgagccacattacccatatatgctcagaatggtctgtcaggaacacccttgttaatagtttagctgatactgtttctctaaggtggaagtaaaaattactaaatgaaagag

SEQ ID NO: 11159 - protein, 40 aa, Homo sapiens
MPQRLSRGRSCLERHHLPTGIRSEPHYPYMLRMVCQEHPC

SEQ ID NO: 11160 - DNA, 3565 bp, Homo sapiens
ctcaccccggccgtccggccgcttcattgtcaccgggcctcggggcagtgttgggggtggcggggcgccaggtcgccgacccgaggtttgggcgcgactggttccgcatcccctccccgccggccgaatctgcaggccccgcgcgccaggcaggcttcgcggctgcgcccccggcccgcgcaggacctgccttgtccaccatgaaaggcacccgggccatcggcagcgtcccggagcgcagcccagcaggtgtggacctgagtctgacaggtctccctccgcctgtgtcccggcgtcctggcagtgccgccaccaccaagcccatcgtccgctctgtctccgtggtcacaggcagcgagcagaagaggaaggtgctggaggccacagggcctgggggctcccaggccatcaacaaccttagaagatccaacagcaccacgcaggtcagccagcctcggagcggctcccccaggccaacggagcccacagacttcctgatgctcttcgagggcagccccagtgggaaaaagaggcctgccagcctgagcacagcccccagcgagaagggagccacctggaacgtcctggatgaccagccccggggcttcaccttgccatccaatgcccggagttccagtgcccttgactcaccagcgggcccgcggaggaaagaatgcaccgtggccctggcccccaacttcactgctaacaacaggagcaacaagggagcagtgggcaactgcgtcaccaccatggtgcacaaccgctacaccccctcggagagggcgcctccgctcaagagctccaaccagactgccccctccctcaacaacatcatcaaggcagccacctgtgagggcagtgagagcagcggctttgggaagctgccgaagaatgtctccagtgccacccactcagcccggaacaatactgggggcagcacgggcttgcccaggcggaaggaggtgacggaggaggaggctgagaggtttatccaccaggtgaaccaggccactgtcaccatccagcgctggtaccggcaccaggtgcagcggcgcggagcaggagctgcccgcctggagcacttgcttcaggccaagcgggaggagcagcggcagcggtcaggcgaggggaccctcttggacctgcaccagcagaaagaggcagccaggaggaaggcccgggaggagaaggcacgccaagccaggcgagcagccattcaggagctgcaacagaaacgagccctgagagcccagaaggcgagcactgccgagcgtgggccacctgagaatcccagggagaccagagtgccaggaatgcggcagcctgctcaggagctgtcccccacaccaggcggcactgcccaccaggccctcaaggccaacaatactggtggtggcctccctgctgcaggccccggagaccgctgcctgcccacctccgactcatccccagaaccacagcagcctccagaggacaggacgcaggacgttcttgcccaggatgcagctggggacaacctggagatgatggccccgagcagggggagcgccaagtccagggggccactggaggagctgctgcacacactgcagctgctggagaaggagccggacgtgctgccccgccccaggacccatcacaggggcagatacgcctgggccagcgaggaggatgacgccagctctctgacagctgacaacttggagaaatttggaaaactcagtgcgttccccgaacctcctgaggatgggacgctgctatcggaggccaagctacaaagcatcatgagcttcttggacgagatggagaagtctgggcaggaccagctggggtccgaggtgagcacgtctgtgatgcggctgaagctggaggtggaggagaagaagcaggccatgctgctgctgcagagagcgctggcgcagcagcgagacctcacggcccggcgggtcaaggagacagagaaggcgctgagccggcagctgcagcggcagagggagcactacgaggccaccatccagcggcacttggccttcattgaccagctgattgaggacaagaaggtcctgagtgaaaagtgcgaggctgtggtggccgagctgaagcaggaggaccagagatgcaccgagcgtgtggcccaggcacaggcgcagcacgagctggagattaaaaaactcaaagaattaatgagcgccaccgagaaagcccgccgggagaagtggatcagtgagaaaaccaagaagatcaaggaggtcactgtccgaggtctggagcccgagatccagaagctgattgcaaggcacaagcaggaagtgcggaggctcaagagcctgcacgaggcggagctgctgcagtcggatgagcgggcctcgcagcgctgcctgcgccaggccgaggagctgcgggagcagctggagcgggagaaggaggcgctgggccagcaggagcgcgaacgtgctcggcagcggttccagcagcacctggagcaggagcagtgggcgctgcagcagcaacggcagcggctgtacagtgaggtggctgaggagagggagcggctgggccagcaggcagccaggcagcgggcggagctggaagagctgaggcagcagctggaggagagcagctctgcactgacccgagccctgagggctgagtttgagaagggcagggaggagcaggagcgccggcaccagatggagctgaataccctgaagcagcagctggagctggagaggcaggcgtgggaggccggccgcaccaggaaggaggaggcgtggctgctgaaccgggaacaggagctgagggaagaaatccggaaaggccgggacaaggagattgagctggtcattcaccggctggaggccgacatggcgctggccaaggaggagagtgagaaggctgccgagagccgcatcaagcgcttacgggacaagtacgaggccgagctctccgagctggagcagtcggagcggaagcttcaggagcggtgctcggagctgaagggccagcttggggaggccgagggcgagaatctgcgtctgcagggccttgtgcggcagaaggagcgggcgctggaggatgcgcaggcggtgaacgagcagctttctagcgagcgcagcaacctggcccaggtgatccgccaggagttcgaggaccggctggcagcctctgaggaggagacgcggcaggccaaggccgagctggccacgctgcaggcccgccagcagctggagctggaggaggtgcaccggagggtgaagacagccctcgcgaggaaggaggaggccgtgagcagcctccggacacaacatgaggctgcggtgaagcgggccgaccacctggaggagctgctggagcagcacaggaggcccacgccaagtaccaagtgaccagggatgccgggaacactgtcgaagaacggaaggcagaggacagaggctggacgtgggcccagaggcccacagggacgcccacctgccccccacagaggctggtggttgagatgcccacggctaagcacctgtggctgcattttaacagtaaaggaggccgttgttttcagcgc

SEQ ID NO: 11161 - protein, 1062 aa, Homo sapiens
MKGTRAIGSVPERSPAGVDLSLTGLPPPVSRRPGSAATTKPIVRSVSVVTGSEQKRKVLEATGPGGSQAINNLRRSNSTTQVSQPRSGSPRPTEPTDFLMLFEGSPSGKKRPASLSTAPSEKGATWNVLDDQPRGFTLPSNARSSSALDSPAGPRRKECTVALAPNFTANNRSNKGAVGNCVTTMVHNRYTPSERAPPLKSSNQTAPSLNNIIKAATCEGSESSGFGKLPKNVSSATHSARNNTGGSTGLPRRKEVTEEEAERFIHQVNQATVTIQRWYRHQVQRRGAGAARLEHLLQAKREEQRQRSGEGTLLDLHQQKEAARRKAREEKARQARRAAIQELQQKRALRAQKASTAERGPPENPRETRVPGMRQPAQELSPTPGGTAHQALKANNTGGGLPAAGPGDRCLPTSDSSPEPQQPPEDRTQDVLAQDAAGDNLEMMAPSRGSAKSRGPLEELLHTLQLLEKEPDVLPRPRTHHRGRYAWASEEDDASSLTADNLEKFGKLSAFPEPPEDGTLLSEAKLQSIMSFLDEMEKSGQDQLGSEVSTSVMRLKLEVEEKKQAMLLLQRALAQQRDLTARRVKETEKALSRQLQRQREHYEATIQRHLAFIDQLIEDKKVLSEKCEAVVAELKQEDQRCTERVAQAQAQHELEIKKLKELMSATEKARREKWISEKTKKIKEVTVRGLEPEIQKLIARHKQEVRRLKSLHEAELLQSDERASQRCLRQAEELREQLEREKEALGQQERERARQRFQQHLEQEQWALQQQRQRLYSEVAEERERLGQQAARQRAELEELRQQLEESSSALTRALRAEFEKGREEQERRHQMELNTLKQQLELERQAWEAGRTRKEEAWLLNREQELREEIRKGRDKEIELVIHRLEADMALAKEESEKAAESRIKRLRDKYEAELSELEQSERKLQERCSELKGQLGEAEGENLRLQGLVRQKERALEDAQAVNEQLSSERSNLAQVIRQEFEDRLAASEEETRQAKAELATLQARQQLELEEVHRRVKTALARKEEAVSSLRTQHEAAVKRADHLEELLEQHRRPTPSTK

SEQ ID NO: 11162 - DNA, 3667 bp, Homo sapiens
gacgggctggggaggtggtgccaggctggttgctagctgccgccgctgctcaccccggccgtccggccgcttcattgtcaccgggcctcggggcagtgttgggggtggcggggcgccaggtcgccgacccgaggtttgggcgcgactggttccgcatcccctccccgccggccgaatctgcaggccccgcgcgccaggcaggcttcgcggctgcgcccccggcccgcgcaggacctgccttgtccaccatgaaaggcacccgggccatcggcagcgtcccggagcgcagcccagcaggtgtggacctgagtctgacaggtctccctccgcctgtgtcccggcgtcctggcagtgccgccaccaccaagcccatcgtccgctctgtctccgtggtcacaggcagcgagcagaagaggaaggtgctggaggccacagggcctgggggctcccaggccatcaacaaccttagaagatccaacagcaccacgcaggtcagccagcctcggagcggctcccccaggccaacggagcccacagacttcctgatgctcttcgagggcagccccagtgggaaaaagaggcctgccagcctgagcacagcccccagcgagaagggagccacctggaacgtcctggatgaccagccccggggcttcaccttgccatccaatgcccggagttccagtgcccttgactcaccagcgggcccgcggaggaaagaatgcaccgtggccctggcccccaacttcactgctaacaacaggagcaacaagggagcagtgggcaactgcgtcaccaccatggtgcacaaccgctacaccccctcggagagggcgcctccgctcaagagctccaaccagactgccccctccctcaacaacatcatcaaggcagccacctgtgagggcagtgagagcagcggctttgggaagctgccgaagaatgtctccagtgccacccactcagcccggaacaatactgggggcagcacgggcttgcccaggcggaaggaggtgacggaggaggaggctgagaggtttatccaccaggtgaaccaggccactgtcaccatccagcgctggtaccggcaccaggtgcagcggcgcggagcaggagctgcccgcctggagcacttgcttcaggccaagcgggaggagcagcggcagcggtcaggcgaggggaccctcttggacctgcaccagcagaaagaggcagccaggaggaaggcccgggaggagaaggcacgccaagccaggcgagcagccattcaggagctgcaacagaaacgagccctgagagcccagaaggcgagcactgccgagcgtgggccacctgagaatcccagggagaccagagtgccaggaatgcggcagcctgctcaggagctgtcccccacaccaggcggcactgcccaccaggccctcaaggccaacaatactggtggtggcctccctgctgcaggccccggagaccgctgcctgcccacctccgactcatccccagaaccacagcagcctccagaggacaggacgcaggacgttcttgcccaggatgcagctggggacaacctggagatgatggccccgagcagggggagcgccaagtccagggggccactggaggagctgctgcacacactgcagctgctggagaaggagccggacgtgctgccccgccccaggacccatcacaggggcagatacgcctgggccagcgaggaggatgacgccagctctctgacagctgacaacttggagaaatttggaaaactcagtgcgttccccgaacctcctgaggatgggacgctgctatcggaggccaagctacaaagcatcatgagcttcttggacgagatggagaagtctgggcaggaccagctggactcccagcaggaggggtgggtgccggaggcggggccggggcccctggagctggggtccgaggtgagcacgtctgtgatgcggctgaagctggaggtggaggagaagaagcaggccatgctgctgctgcagagagcgctggcgcagcagcgagacctcacggcccggcgggtcaaggagacagagaaggcgctgagccggcagctgcagcggcagagggagcactacgaggccaccatccagcggcacttggccttcattgaccagctgattgaggacaagaaggtcctgagtgaaaagtgcgaggctgtggtggccgagctgaagcaggaggaccagagatgcaccgagcgtgtggcccaggcacaggcgcagcacgagctggagattaaaaaactcaaagaattaatgagcgccaccgagaaagcccgccgggagaagtggatcagtgagaaaaccaagaagatcaaggaggtcactgtccgaggtctggagcccgagatccagaagctgattgcaaggcacaagcaggaagtgcggaggctcaagagcctgcacgaggcggagctgctgcagtcggatgagcgggcctcgcagcgctgcctgcgccaggccgaggagctgcgggagcagctggagcgggagaaggaggcgctgggccagcaggagcgcgaacgtgctcggcagcggttccagcagcacctggagcaggagcagtgggcgctgcagcagcaacggcagcggctgtacagtgaggtggctgaggagagggagcggctgggccagcaggcagccaggcagcgggcggagctggaagagctgaggcagcagctggaggagagcagctctgcactgacccgagccctgagggctgagtttgagaagggcagggaggagcaggagcgccggcaccagatggagctgaataccctgaagcagcagctggagctggagaggcaggcgtgggaggccggccgcaccaggaaggaggaggcgtggctgctgaaccgggaacaggagctgagggaagaaatccggaaaggccgggacaaggagattgagctggtcattcaccggctggaggccgacatggcgctggccaaggaggagagtgagaaggctgccgagagccgcatcaagcgcttacgggacaagtacgaggccgagctctccgagctggagcagtcggagcggaagcttcaggagcggtgctcggagctgaagggccagcttggggaggccgagggcgagaatctgcgtctgcagggccttgtgcggcagaaggagcgggcgctggaggatgcgcaggcggtgaacgagcagctttctagcgagcgcagcaacctggcccaggtgatccgccaggagttcgaggaccggctggcagcctctgaggaggagacgcggcaggccaaggccgagctggccacgctgcaggcccgccagcagctggagctggaggaggtgcaccggagggtgaagacagccctcgcgaggaaggaggaggccgtgagcagcctccggacacaacatgaggctgcggtgaagcgggccgaccacctggaggagctgctggagcagcacaggaggcccacgccaagtaccaagtgaccagggatgccgggaacactgtcgaagaacggaaggcagaggacagaggctggacgtgggcccagaggcccacagggacgcccacctgccccccacagaggctggtggttgagatgcccacggctaagcacctgtggctgcattttaacagtaaaggaggccgttgttttcagcgc

SEQ ID NO: 11163 - protein, 1080 aa, Homo sapiens; identical to SEQ ID NO: 1827

SEQ ID NO: 11164 - DNA, 4181 bp, Homo sapiens
atggcttccctggagaggacctgggcggaatccccagggctcccggagagagggggagtcacagagcggctacgcacggggcgcagcgttaaaactttggagaaggaaaaaaaacaacaaagcagcgcgaagggaaggaggacagccgagcggcccaatgagctcccgggacggcctgagcgggagcgtgaagggccaatccggagtcggcgcgcgcaggaaaggcgggccggcgtgacgggctggggagtgttgggggtggcggggcgccaggtcgccgacccgaggtttgggcgcgactggttccgcatcccctccccgccggccgaatctgcaggccccgcgcgccaggcaggcttcgcggctgcgcccccggcccgcgcaggacctgccttgtccaccatgaaaggcacccgggccatcggcagcgtcccggagcgcagcccagcaggtgtggacctgagtctgacaggtctccctccgcctgtgtcccggcgtcctggcagtgccgccaccaccaagcccatcgtccgctctgtctccgtggtcacaggcagcgagcagaagaggaaggtgctggaggccacagggcctgggggctcccaggccatcaacaaccttagaagatccaacagcaccacgcaggtcagccagcctcggagcggctcccccaggccaacggagcccacagacttcctgatgctcttcgagggcagccccagtgggaaaaagaggcctgccagcctgagcacagcccccagcgagaagggagccacctggaacgtcctggatgaccagccccggggcttcaccttgccatccaatgcccggagttccagtgcccttgactcaccagcgggcccgcggaggaaagaatgcaccgtggccctggcccccaacttcactgctaacaacaggagcaacaagggagcagtgggcaactgcgtcaccaccatggtgcacaaccgctacaccccctcggagagggcgcctccgctcaagagctccaaccagactgccccctccctcaacaacatcatcaaggcagccacctgtgagggcagtgagagcagcggctttgggaagctgccgaagaatgtctccagtgccacccactcagcccggaacaatactgggggcagcacgggcttgcccaggcggaaggaggtgacggaggaggaggctgagaggtttatccaccaggtgaaccaggccactgtcaccatccagcgctggtaccggcaccaggtgcagcggcgcggagcaggagctgcccgcctggagcacttgcttcaggccaagcgggaggagcagcggcagcggtcaggcgaggggaccctcttggacctgcaccagcagaaagaggcagccaggaggaaggcccgggaggagaaggcacgccaagccaggcgagcagccattcaggagctgcaacagaaacgagccctgagagcccagaaggcgagcactgccgagcgtgggccacctgagaatcccagggagaccagagtgccaggaatgcggcagcctgctcaggagctgtcccccacaccaggcggcactgcccaccaggccctcaaggccaacaatactgagttgctgcccgccccgggatgctccctgtggaatggtgctgtgttctgctgtgcaggtggtggcctccctgctgcaggccccggagaccgctgcctgcccacctccgactcatccccagaaccacagcagcctccagaggacaggacgcaggacgttcttgcccaggatgcagctggggacaacctggagatgatggccccgagcagggggagcgccaagtccagggggccactggaggagctgctgcacacactgcagctgctggagaaggagccggacgtgctgccccgccccaggacccatcacaggggcagatacgcctgggccagcgaggaggatgacgccagctctctgacagctgacaacttggagaaatttggaaaactcagtgcgttccccgaacctcctgaggatgggacgctgctatcggaggccaagctacaaagcatcatgagcttcttggacgagatggagaagtctgggcaggaccagctggactcccagcaggaggggtgggtgccggaggcggggccggggcccctggagctggggtccgaggtgagcacgtctgtgatgcggctgaagctggaggtggaggagaagaagcaggccatgctgctgctgcagagagcgctggcgcagcagcgagacctcacggcccggcgggtcaaggagacagagaaggcgctgagccggcagctgcagcggcagagggagcactacgaggccaccatccagcggcacttggccttcattgaccagctgattgaggacaagaaggtcctgagtgaaaagtgcgaggctgtggtggccgagctgaagcaggaggaccagagatgcaccgagcgtgtggcccaggcacaggcgcagcacgagctggagattaaaaaactcaaagaattaatgagcgccaccgagaaagcccgccgggagaagtggatcagtgagaaaaccaagaagatcaaggaggtcactgtccgaggtctggagcccgagatccagaagctgattgcaaggcacaagcaggaagtgcggaggctcaagagcctgcacgaggcggagctgctgcagtcggatgagcgggcctcgcagcgctgcctgcgccaggccgaggagctgcgggagcagctggagcgggagaaggaggcgctgggccagcaggagcgcgaacgtgctcggcagcggttccagcagcacctggagcaggagcagtgggcgctgcagcagcaacggcagcggctgtacagtgaggtggctgaggagagggagcggctgggccagcaggcagccaggcagcgggcggagctggaagagctgaggcagcagctggaggagagcagctctgcactgacccgagccctgagggctgagtttgagaagggcagggaggagcaggagcgccggcaccagatggagctgaataccctgaagcagcagctggagctggagaggcaggcgtgggaggccggccgcaccaggaaggagcccatcttttgcgtgggctctggaaggatcaagggtgcctggagcgcatcctctgtggtccgagaacaggcgttgcccctctcgctaggggctgctacacccctgcgccccacgaccagcccactgacactcagatgtaccgagagggacacgcacaacaggggctccccccttagcctctggggccttctgtggggggtggactctgccacggtgacagtcccacacacattctcaccacccatgcccgccgcgaggctacagtccaggctgaccgtgcccgtcacctggtttcacaccctggaggcgtggctgctgaaccgggaacaggagctgagggaagaaatccggaaaggccgggacaaggagattgagctggtcattcaccggctggaggccgacatggcgctggccaaggaggagagtgagaaggctgccgagagccgcatcaagcgcttacgggacaagtacgaggccgagctctccgagctggagcagtcggagcggaagcttcaggagcggtgctcggagctgaagggccagcttggggaggccgagggcgagaatctgcgtctgcagggccttgtgcggcagaaggagcgggcgctggaggatgcgcaggcggtgaacgagcagctttctagcgagcgcagcaacctggcccaggtgatccgccaggagttcgaggaccggctggcagcctctgaggaggagacgcggcaggccaaggccgagctggccacgctgcaggcccgccagcagctggagctggaggaggtgcaccggagggtgaagacagccctcgcgaggaaggaggaggccgtgagcagcctccggacacaacatgaggctgcggtgaagcgggccgaccacctggaggagctgctggagcagcacaggaggcccacgccaagtaccaagtgaccagggatgccgggaacactgtcgaagaacggaaggcagaggacagaggctggacgtgggcccagaggcccacagggacgcccacctgccccccacagaggctggtggttgagatgcccacggctaagcacctgtggctgcattttaacagtaaaggaggccgttgttttcagcgc

SEQ ID NO: 11165 - protein, 1334 aa, Homo sapiens
MASLERTWAESPGLPERGGVTERLRTGRSVKTLEKEKKQQSSAKGRRTAERPNELPGRPEREREGPIRSRRAQERRAGVTGWGVLGVAGRQVADPRFGRDWFRIPSPPAESAGPARQAGFAAAPPARAGPALSTMKGTRAIGSVPERSPAGVDLSLTGLPPPVSRRPGSAATTKPIVRSVSVVTGSEQKRKVLEATGPGGSQAINNLRRSNSTTQVSQPRSGSPRPTEPTDFLMLFEGSPSGKKRPASLSTAPSEKGATWNVLDDQPRGFTLPSNARSSSALDSPAGPRRKECTVALAPNFTANNRSNKGAVGNCVTTMVHNRYTPSERAPPLKSSNQTAPSLNNIIKAATCEGSESSGFGKLPKNVSSATHSARNNTGGSTGLPRRKEVTEEEAERFIHQVNQATVTIQRWYRHQVQRRGAGAARLEHLLQAKREEQRQRSGEGTLLDLHQQKEAARRKAREEKARQARRAAIQELQQKRALRAQKASTAERGPPENPRETRVPGMRQPAQELSPTPGGTAHQALKANNTELLPAPGCSLWNGAVFCCAGGGLPAAGPGDRCLPTSDSSPEPQQPPEDRTQDVLAQDAAGDNLEMMAPSRGSAKSRGPLEELLHTLQLLEKEPDVLPRPRTHHRGRYAWASEEDDASSLTADNLEKFGKLSAFPEPPEDGTLLSEAKLQSIMSFLDEMEKSGQDQLDSQQEGWVPEAGPGPLELGSEVSTSVMRLKLEVEEKKQAMLLLQRALAQQRDLTARRVKETEKALSRQLQRQREHYEATIQRHLAFIDQLIEDKKVLSEKCEAVVAELKQEDQRCTERVAQAQAQHELEIKKLKELMSATEKARREKWISEKTKKIKEVTVRGLEPEIQKLIARHKQEVRRLKSLHEAELLQSDERASQRCLRQAEELREQLEREKEALGQQERERARQRFQQHLEQEQWALQQQRQRLYSEVAEERERLGQQAARQRAELEELRQQLEESSSALTRALRAEFEKGREEQERRHQMELNTLKQQLELERQAWEAGRTRKEPIFCVGSGRIKGAWSASSVVREQALPLSLGAATPLRPTTSPLTLRCTERDTHNRGSPLSLWGLLWGVDSATVTVPHTFSPPMPAARLQSRLTVPVTWFHTLEAWLLNREQELREEIRKGRDKEIELVIHRLEADMALAKEESEKAAESRIKRLRDKYEAELSELEQSERKLQERCSELKGQLGEAEGENLRLQGLVRQKERALEDAQAVNEQLSSERSNLAQVIRQEFEDRLAASEEETRQAKAELATLQARQQLELEEVHRRVKTALARKEEAVSSLRTQHEAAVKRADHLEELLEQHRRPTPSTK

SEQ ID NO: 11166 - DNA, 1733 bp, Homo sapiens
cagggctccagagggctgaactatccacacatatgggctcgtggaggcagctcggggcagcggctcctgcagtgggagcatcgctgagcactgtccctgggagaggacgaccccaggctccacagccaagctgccctgaggctaagtgtcccggggcccagggagccccagcagcagccccgcacggtcaggcctgggccacggtgctgctcagtggtccctgcgcggtcagcacctgaatggctgctcgcctggcttggcgtgccttctcctcccgggccttcctcctggctgcctctttctgctggtgcaggtccaagagggtcccctcgcctgaccgctgccgctgctcctgccaaagaagccggtgccatgtggcgtttacatctggaagacggaatccagacccagaccagaggtttccccacaacgccctggagtcccctagagttcgtggaatctcagggccagcagggaaagtgaaaccccaccaggaccttgaacctgccatttctctgctctacagaggatgagccctacgtcgcaggtggccaacagttctggcgtgggggagacagctctgcccccacagaacgtcctcctgagactctccagcctgggatggacccagcaggcgtttcctgacacccaggccctgaggaccgccagtgaggaccaccctgactgtccgcggggacccagggtcaagaaggatgctgcacccagagacggggcccacgagcaatcctaggctttgattccacctgtcccagaaactcaaacccctgggattctgggccagaccccccgggggagcatggagtgactgagacgcccacactgacctcccgcttggcctgaagcaagtgctccaggcgggcagctcctgctccgcgccgctgcacctggtgccggtaccagcgctggatggtgacagtggcctggttcacctggtggataaacctgcccggagagcaggactcagggccaagacaggaccagcgccccggcaggacccagctggctgctggtggaaggtcgagccggggaagagagaagccggcggctgcactcaagtagcccttttcacaaggcaggaccagcccacctggaccattttcacatggcaggaccagccgcctggaccagctccactaaaacccaaaaccttcttcctgggaaggtgcccaggggagaggaaacgcctacccacgcaggcctgtgtggccttatttacaattgccaggaagtgggaagagttcaaatgcccatgacctggctacagcgtgaatactggatggcgggaccctacccacaggcaacaggcccgggactcaggccagtgcagaccacaggccgtggctccacagagagggtggtcggaacaggcagggctatgagggaacagactggtggctgctggcatctgggcggggaaggagctcgagggaagcctggtggtgctgggccgtttccttatcttggtctgctgtgtccacagacagcactatacaccctggtggaatctcatggaactgcacacttacaatgggcaccttctattgtatacaaattatactaagtaaaactgattaagcaaaaaaaaaaatgcttcaccttggctctcgggaccatgtgtggattctctcagcaaaggcactaacagagaacccagaacgtgtgagccctagctcgggagcagtctgccccgggcagaactggggggcttcaag

SEQ ID NO: 11167 - protein, 68 aa, Homo sapiens
MGSWRQLGAAAPAVGASLSTVPGRGRPQAPQPSCPEAKCPGAQGAPAAAPHGQAWATVLLSGPCAVST

SEQ ID NO: 11168 - DNA, 3804 bp, Homo sapiens
ggatcatggctgccgcgccgccgctacgggaccgcctgagctttctacaccgggtgagtgagggcggtccgcccgggccccggtcccacggctcctctcgagcgccgcattccccggactcgccccgggccggagccattgaccttgcgtctccgcgccgggtagctgctcctggccttccaagccggacccgccgagcgcaagggcgatgggcacagccagaccctgggggaacgaacaggcctcggccagcattcagtggcctccgacgggagggaaggagcggcggacccggtggacgtggagccgctgtgtccgtgctgctggcgcccaggtgggctggcagcccgccgtcctccctgacggtggcgtttcagaggactccggtcctggagaggcacccctgggttgcagagaacacagacgtctcgaagggacagagaaggacgcaccattgtaagcccctcttagtaaaccctctgagaagtagaggccggggcgagttcccaggtgtcgtcctgagcaaactgccctcttttgtcagccctgagctttcctgggctggacctcagagggggctgggtggtcccagggcgcgaccttgggctgccagaagccacgctagggttggtcaaggctctcagtgcaaggtttcgacatagtcgttctgtgctgcgttctgcagttgtcagctgtcacctgcaaacctcagcagctccccttagggcgtggtgggcaaacagtgtcagtgatgcgtgtccacagcctcgggaaacacttcaggtccacgttttcgtatgttgtcactagatctcggcccttccgaccgaaaggcttcggcacctcacgcggtgggtcccatgcttgtcctgttaaatactcttgaactctattctgtcctgatactgaataatgcaagaatgggtggttccagttttcatccctataaaccgtacatctttgtgccagtaagtaagcatgaaacaaataagtacgtctgcgctaagcgaacgtaaaacacacgacatcagtcggttctcggggagcgatggagctagtcacgctgagcggctgtcactctgccattccggcctctggggaggtggaacgattcatagtcccctgtgtggaaaaggggcttgcctgggccttgtttggctttgctagtcagtaggtaggtacaggagaggtaccttcaaatagccttacatgctggtaagtgcagggaggctgggggctgtgtcccttcttaacccaagtggcgcagctcctccgtggagaaccaccattgatttgcctcttctccgaggctgttcatccctgactgttgagagaggaccctgctgcagcctccctgtggccagtagcacagttctcatcccttcccagtcctctctccggccatgtcaacagtgagagctcccgattctcctgaaggggacgtccgatgatgatgtcccgtgtccgggctacctgtttgaagagattgctaaaatctcccacgagtctccgggcagcagccagtgcctgctggagtacctcctgagccgcctgcacagcagctccggccacgggaagctcaaggtgctgaagatcctgctctatctgtgcagccacggctcctccttcttcctgctcatcctcaaacgcaactctgccttcatccaggaagctgcagcttttgcagggcccccagatcctctgcacgggaacagcttgtaccagaaggttcgcgcggccgcgcaggacttggggagcaccctgttctcggacaccgtgttgccgctggctccctcccagcctctggggaccccgcctgccacaggcatgggctcccaggccaggccgcacagcaccctccagggtttcggctacagcaaggaacacggccgcacgggctcggcaggcgaagccttcctctccaccatccagaaggccgcagaggtggtggccagcgccatgcgccccgggcccgagagtcccagtacccggaggctcctgccgcggggtgacacctaccagcctgccatgatgccttcagccagccacggtcccccaaccctggggaacctactccccggggccattccaggtccccgagctgtgaggcatcagcctgggcaggccggagggggctgggatgagctggacagcggccccagctctcagaattcctcccagaacagcgacctgagcagggtctcggactcgggcagtcattccggcagcgacagccattcaggggccagccgggagccgggtgacctggcagaaagggtcgaggtggtggccctgagtgactgtcagcaggagttgagcttggtgaggactgtgactcggggaccacgcgccttcctgagccgcgaggaggcacagcacttcatcaaagcgtgtggactgctcaactgtgaggccgtgctgcagctgctgacctgccacctgcgtgggaccagtgaatgcacgcagctgagggcgctgtgtgccatcgcctccctggggagcagcgacctcctcccccaggagcacatcctcctccgcacccggccgtggctgcaggagctcagcatgggcagcccgggacctgtgaccaacaaggccaccaagatcctgaggcactttgaggcctcctgtgggcagctgtcccctgcccggggcacctcagctgagcctggccccacagccgccctcccaggcccatctgacctgctgaccgacgctgtgcctctccctgggagccaggtcttcctgcagcctctgagttcaaccccggtctcgtcccggagccctgctccctcatctgggatgccgtccagccctgtgcccaccccacccccagatgcctcccccattccagcccccggagaccccagcgaggccgaggccagactggcagaaagcaggcggtggagacctgaacggatcccagggggcacggacagcccaaagagaggccccagcagctgtgcgtggagccgcgactccttgtttgctggcatggagctggtggcctgtccccgcctggtgggggctggggctgctgcgggagagtcctgtcctgatgctccccgcgccccccaaacatcgtcccagaggacagcagccaaagagcctcctggctcagagccgtcagctttcgcgttcctgaacgcctgacccgatggcctggccctggagtcttcagcttcagctgctgtctggggcggtctgtgcttcctgagcagcctcaaccgtagctgctacagtctccaggcagcttgacttgagaggacgaccctagggctacctcagtttcccccatctcctctgccagaggctctggctatttggacttgaatccctacgagggatggcaggtggcagggcttcagaaatgtcgatctcagggctctcagggggcagtccctgcctgtcttgctctcagacatgaggtttcttgtatgaatgcggaagcgactaccaggttccttatttcattttgatctcagctccctccttccccaggaggtcatgagcagcaacaagccactgctcccccgtcccatcggggtgggctaggtgctgaggctgggtttggtgcatgtgggttgagggtgtcttgtccgggctgccttgtgctgtctggcctgaggccatttcaagtctcagatccctacgtgatccttccctggctctcacctgctcctttaggctgtaattgcttcctacacacgaagcctctgattggagcctctggtccatctcagaaaaaccttccaagagcgctggggtttatgctttctgaataaacactactgtttacatgaa

SEQ ID NO: 11169 - protein, 441 aa, Homo sapiens
MGSQARPHSTLQGFGYSKEHGRTGSAGEAFLSTIQKAAEVVASAMRPGPESPSTRRLLPRGDTYQPAMMPSASHGPPTLGNLLPGAIPGPRAVRHQPGQAGGGWDELDSGPSSQNSSQNSDLSRVSDSGSHSGSDSHSGASREPGDLAERVEVVALSDCQQELSLVRTVTRGPRAFLSREEAQHFIKACGLLNCEAVLQLLTCHLRGTSECTQLRALCAIASLGSSDLLPQEHILLRTRPWLQELSMGSPGPVTNKATKILRHFEASCGQLSPARGTSAEPGPTAALPGPSDLLTDAVPLPGSQVFLQPLSSTPVSSRSPAPSSGMPSSPVPTPPPDASPIPAPGDPSEAEARLAESRRWRPERIPGGTDSPKRGPSSCAWSRDSLFAGMELVACPRLVGAGAAAGESCPDAPRAPQTSSQRTAAKEPPGSEPSAFAFLNA

SEQ ID NO: 11170 - DNA, 2552 bp, Homo sapiens
cctggatcatggctgccgcgccgccgctacgggaccgcctgagctttctacaccggctcccgattctcctgaaggggacgtccgatgatgatgtcccgtgtccgggctacctgtttgaagagattgctagtatccttccttgatgtccccgtgtagtggaaagagcggatggcagggtcccagagtggtgcaaagggttcctggggattctgctgtccctagggggatgcacggctcctttattattgtaaccaggcatgggtggggtctgaaggctgcaatactgatgacacaggggaccctagaagcccaggtgctcctgatggcagagcctccagtaggcgcctccagggagcgtgaactgagaggccccatggcctggtctccctgcggcctggcgcagccctcatcatctcgcccttccctaacccgagcgtgccgcagaaatctcccacgagtctccgggcagcagccagtgcctgctggagtacctcctgagccgcctgcacagcagctccggccacgggaagctcaaggtgctgaagatcctgctctatctgtgcagccacggctcctccttcttcctgctcatcctcaaacgcaactctgccttcatccaggaagctgcagcttttgcagggcccccagatcctctgcacgggaacagcttgtaccagaaggttcgcgcggccgcgcaggacttggggagcaccctgttctcggacaccgtgttgccgctggctccctcccagcctctggggaccccgcctgccacaggcatgggctcccaggccaggccgcacagcaccctccagggtttcggctacagcaaggaacacggccgcacggctgtgaggcatcagcctgggcaggccggagggggctgggatgagctggacagcggccccagctctcagaattcctcccagaacagcgacctgagcagggtctcggactcgggcagtcattccggcagcgacagccattcaggggccagccgggagccgggtgacctggcagaaagggtcgaggtggtggccctgagtgactgtcagcaggagttgagcttggtgaggactgtgactcggggaccacgcgccttcctgagccgcgaggaggcacagcacttcatcaaagcgtgtggactgctcaactgtgaggccgtgctgcagctgctgacctgccacctgcgtgggaccagtgaatgcacgcagctgagggcgctgtgtgccatcgcctccctggggagcagcgacctcctcccccaggagcacatcctcctccgcacccggccgtggctgcaggagctcagcatgggcagcccgggacctgtgaccaacaaggccaccaagatcctgaggcactttgaggcctcctgtgggcagctgtcccctgcccggggcacctcagctgagcctggccccacagccgccctcccaggcccatctgacctgctgaccgacgctgtgcctctccctgggagccaggtcttcctgcagcctctgagttcaaccccggtctcgtcccggagccctgctccctcatctgggatgccgtccagccctgtgcccaccccacccccagatgcctcccccattccagcccccggagaccccagcgaggccgaggccagactggcagaaagcaggcggtggagacctgaacggatcccagggggcacggacagcccaaagagaggccccagcagctgtgcgtggagccgcgactccttgtttgctggcatggagctggtggcctgtccccgcctggtgggggctggggctgctgcgggagagtcctgtcctgatgctccccgcgccccccaaacatcgtcccagaggacagcagccaaagagcctcctggctcagagccgtcagctttcgcgttcctgaacgcctgacccgatggcctggccctggagtcttcagcttcagctgctgtctggggcggtctgtgcttcctgagcagcctcaaccgtagctgctacagtctccaggcagcttgacttgagaggacgaccctagggctacctcagtttcccccatctcctctgccagaggctctggctatttggacttgaatccctacgagggatggcaggtggcagggcttcagaaatgtcgatctcagggctctcagggggcagtccctgcctgtcttgctctcagacatgaggtttcttgtatgaatgcggaagcgactaccaggttccttatttcattttgatctcagctccctccttccccaggaggtcatgagcagcaacaagccactgctcccccgtcccatcggggtgggctaggtgctgaggctgggtttggtgcatgtgggttgagggtgtcttgtccgggctgccttgtgctgtctggcctgaggccatttcaagtctcagatccctacgtgatccttccctggctctcacctgctcctttaggctgtaattgcttcctacacacgaagcctctgattggagcctctggtccatctcagaaaaaccttccaagagcgctggggtttatgctttctgaataaacactactgtttacatgaa

SEQ ID NO: 11171 - protein, 373 aa, Homo sapiens
MGSQARPHSTLQGFGYSKEHGRTAVRHQPGQAGGGWDELDSGPSSQNSSQNSDLSRVSDSGSHSGSDSHSGASREPGDLAERVEVVALSDCQQELSLVRTVTRGPRAFLSREEAQHFIKACGLLNCEAVLQLLTCHLRGTSECTQLRALCAIASLGSSDLLPQEHILLRTRPWLQELSMGSPGPVTNKATKILRHFEASCGQLSPARGTSAEPGPTAALPGPSDLLTDAVPLPGSQVFLQPLSSTPVSSRSPAPSSGMPSSPVPTPPPDASPIPAPGDPSEAEARLAESRRWRPERIPGGTDSPKRGPSSCAWSRDSLFAGMELVACPRLVGAGAAAGESCPDAPRAPQTSSQRTAAKEPPGSEPSAFAFLNA

SEQ ID NO: 11172 - DNA, 2251 bp, Homo sapiens
agaccgggaggggacctggatcatggctgccgcgccgccgctacgggaccgcctgagctttctacaccggctcccgattctcctgaaggggacgtccgatgatgatgtcccgtgtccgggctacctgtttgaagagattgctaaaatctcccacgagtctccgggcagcagccagtgcctgctggagtacctcctgagccgcctgcacagcagctccggccacgggaagctcaaggtgctgaagatcctgctctatctgtgcagccacggctcctccttcttcctgctcatcctcaaacgcaactctgccttcatccaggaagctgcagcttttgcagggcccccagatcctctgcacgggaacagcttgtaccagaaggttcgcgcggccgcgcaggacttggggagcaccctgttctcggacaccgtgttgccgctggctccctcccagcctctggggaccccgcctgccacaggcatgggctcccaggccaggccgcacagcaccctccagggtttcggctacagcaaggaacacggccgcacggctgtgaggcatcagcctgggcaggccggagggggctgggatgagctggacagcggccccagctctcagaattcctcccagaacagcgacctgagcagggtctcggactcgggcagtcattccggcagcgacagccattcaggggccagccgggagccgggtgacctggcagaaagggtcgaggtggtggccctgagtgactgtcagcaggagttgagcttggtgaggactgtgactcggggaccacgcgccttcctgagccgcgaggaggcacagcacttcatcaaagcgtgtggactgctcaactgtgaggccgtgctgcagctgctgacctgccacctgcgtgggaccagtgaatgcacgcagctgagggcgctgtgtgccatcgcctccctggggagcagcgacctcctcccccaggagcacatcctcctccgcacccggccgtggctgcaggagctcagcatgggcagcccgggacctgtgaccaacaaggccaccaagatcctgaggcactttgaggcctcctgtgggcagctgtcccctgcccggggcacctcagctgagcctggccccacagccgccctcccaggcccatctgacctgctgaccgacgctgtgcctctccctgggagccaggtcttcctgcagcctctgagttcaaccccggtctcgtcccggagccctgctccctcatctgggatgccgtccagccctgtgcccaccccacccccagatgcctcccccattccagcccccggagaccccagcgaggccgaggccagactggcagaaagcaggcggtggagacctgaacggatcccagggggcacggacagcccaaagagaggccccagcagctgtgcgtggagccgcgactccttgtttgctggcatggagctggtggcctgtccccgcctggtgggggctggggctgctgcgggagagtcctgtcctgatgctccccgcgccccccaaacatcgtcccagaggacagcagccaaagagcctcctggctcagagccgtcagctttcgcgttcctgaacgcctgacccgatggcctggccctggagtcttcagcttcagctgctgtctggggcggtctgtgcttcctgagcagcctcaaccgtagctgctacagtctccaggcagcttgacttgagaggacgaccctagggctacctcagtttcccccatctcctctgccagaggctctggctatttggacttgaatccctacgagggatggcaggtggcagggcttcagaaatgtcgatctcagggctctcagggggcagtccctgcctgtcttgctctcagacatgaggtttcttgtatgaatgcggaagcgactaccaggttccttatttcattttgatctcagctccctccttccccaggaggtcatgagcagcaacaagccactgctcccccgtcccatcggggtgggctaggtgctgaggctgggtttggtgcatgtgggttgagggtgtcttgtccgggctgccttgtgctgtctggcctgaggccatttcaagtctcagatccctacgtgatccttccctggctctcacctgctcctttaggctgtaattgcttcctacacacgaagcctctgattggagcctctggtccatctcagaaaaaccttccaagagcgctggggtttatgctttctgaataaacactactgtttacatgaa

SEQ ID NO: 11173 - protein, 525 aa, Homo sapiens; identical to SEQ ID NO: 1829

SEQ ID NO: 11174 - DNA, 4321 bp, Homo sapiens
ggcccgggcctggcggaagcggggcagaccgggaggggacctggatcatggctgccgcgccgccgctacgggaccgcctgagctttctacaccgggtgagtgagggcggtccgcccgggccccggtcccacggctcctctcgagcgccgcattccccggactcgccccgggccggagccattgaccttgcgtctccgcgccgggtagctgctcctggccccttcgcccgcgccgacgcccctgagctgcccgcccgccgcgccgtcccggggccttccaagccgggccttccaagccggacccgccgagcgcaagggcgatgggcacagccagaccctgggggaacgaacaggcctcggccagcattcagtggcctccgacgggagggaaggagcggcggacccggtggacgtggagccgctgtgtccgtgctgctggcgcccaggtgggctggcagcccgccgtcctccctgacggtggcgtttcagaggactccggtcctggagaggcacccctgggttgcagagaacacagacgtctcgaagggacagagaaggacgcaccattgtaagcccctcttagtaaaccctctgagaagtagaggccggggcgagttcccaggtgtcgtcctgagcaaactgccctcttttgtcagccctgagctttcctgggctggacctcagagggggctgggtggtcccagggcgcgaccttgggctgccagaagccacgctagggttggtcaaggctctcagtgcaaggtttcgacatagtcgttctgtgctgcgttctgcagttgtcagctgtcacctgcaaacctcagcagctccccttagggcgtggtgggcaaacagtgtcagtgatgcgtgtccacagcctcgggaaacacttcaggtccacgttttcgtatgttgtcactagatctcggcccttccgaccgaaaggcttcggcacctcacgcggtgggtcccatgcttgtcctgttaaatactcttgaactctattctgtcctgatactgaataatgcaagaatgggtggttccagttttcatccctataaaccgtacatctttgtgccagtaagtaagcatgaaacaaataagtacgtctgcgctaagcgaacgtaaaacacacgacatcagtcggttctcggggagcgatggagctagtcacgctgagcggctgtcactctgccattccggcctctggggaggtggaacgattcatagtcccctgtgtggaaaaggggcttgcctgggccttgtttggctttgctagtcagtaggtaggtacaggagaggtaccttcaaatagccttacatgctggtaagtgcagggaggctgggggctgtgtcccttcttaacccaagtggcgcagctcctccgtggagaaccaccattgatttgcctcttctccgaggctgttcatccctgactgttgagagaggaccctgctgcagcctccctgtggccagtagcacagttctcatcccttcccagtcctctctccggccatgtcaacagtgagaggtgggtcgtttccatcccctttggggggctgcggattcacccctgtgggaaatggcacctcatcatggtaggggctcttgttccctttcagctcccgattctcctgaaggggacgtccgatgatgatgtcccgtgtccgggctacctgtttgaagagattgctagtatccttccttgatgtccccgtgtagtggaaagagcggatggcagggtcccagagtggtgcaaagggttcctggggattctgctgtccctagggggatgcacggctcctttattattgtaaccaggcatgggtggggtctgaaggctgcaatactgatgacacaggggaccctagaagcccaggtgctcctgatggcagagcctccagtaggcgcctccagggagcgtgaactgagaggccccatggcctggtctccctgcggcctggcgcagccctcatcatctcgcccttccctaacccgagcgtgccgcagaaatctcccacgagtctccgggcagcagccagtgcctgctggagtacctcctgagccgcctgcacagcagctccggccacgggaagctcaaggtgctgaagatcctgctctatctgtgcagccacggctcctccttcttcctgctcatcctcaaacgcaactctgccttcatccaggaagctgcagcttttgcagggcccccagatcctctgcacgggaacagcttgtaccagaaggttcgcgcggccgcgcaggacttggggagcaccctgttctcggacaccgtgttgccgctggctccctcccagcctctggggaccccgcctgccacaggcatgggctcccaggccaggccgcacagcaccctccagggtttcggctacagcaaggaacacggccgcacgggctcggcaggcgaagccttcctctccaccatccagaaggccgcagaggtggtggccagcgccatgcgccccgggcccgagagtcccagtacccggaggctcctgccgcggggtgacacctaccagcctgccatgatgccttcagccagccacggtcccccaaccctggggaacctactccccggggccattccaggtccccgagctgtgaggcatcagcctgggcaggccggagggggctgggatgagctggacagcggccccagctctcagaattcctcccagaacagcgacctgagcagggtctcggactcgggcagtcattccggcagcgacagccattcaggggccagccgggagccgggtgacctggcagaaagggtcgaggtggtggccctgagtgactgtcagcaggagttgagcttggtgaggactgtgactcggggaccacgcgccttcctgagccgcgaggaggcacagcacttcatcaaagcgtgtggactgctcaactgtgaggccgtgctgcagctgctgacctgccacctgcgtgggaccagtgaatgcacgcagctgagggcgctgtgtgccatcgcctccctggggagcagcgacctcctcccccaggagcacatcctcctccgcacccggccgtggctgcaggagctcagcatgggcagcccgggacctgtgaccaacaaggccaccaagatcctgaggcactttgaggcctcctgtgggcagctgtcccctgcccggggcacctcagctgagcctggccccacagccgccctcccaggcccatctgacctgctgaccgacgctgtgcctctccctgggagccaggtcttcctgcagcctctgagttcaaccccggtctcgtcccggagccctgctccctcatctgggatgccgtccagccctgtgcccaccccacccccagatgcctcccccattccagcccccggagaccccagcgaggccgaggccagactggcagaaagcaggcggtggagacctgaacggatcccagggggcacggacagcccaaagagaggccccagcagctgtgcgtggagccgcgactccttgtttgctggcatggagctggtggcctgtccccgcctggtgggggctggggctgctgcgggagagtcctgtcctgatgctccccgcgccccccaaacatcgtcccagaggacagcagccaaagagcctcctggctcagagccgtcagctttcgcgttcctgaacgcctgacccgatggcctggccctggagtcttcagcttcagctgctgtctggggcggtctgtgcttcctgagcagcctcaaccgtagctgctacagtctccaggcagcttgacttgagaggacgaccctagggctacctcagtttcccccatctcctctgccagaggctctggctatttggacttgaatccctacgagggatggcaggtggcagggcttcagaaatgtcgatctcagggctctcagggggcagtccctgcctgtcttgctctcagacatgaggtttcttgtatgaatgcggaagcgactaccaggttccttatttcattttgatctcagctccctccttccccaggaggtcatgagcagcaacaagccactgctcccccgtcccatcggggtgggctaggtgctgaggctgggtttggtgcatgtgggttgagggtgtcttgtccgggctgccttgtgctgtctggcctgaggccatttcaagtctcagatccctacgtgatccttccctggctctcacctgctcctttaggctgtaattgcttcctacacacgaagcctctgattggagcctctggtccatctcagaaaaaccttccaagagcgctggggtttatgctttctgaataaacactactgtttacatgaa

SEQ ID NO: 11175 - protein, 441 aa, Homo sapiens; identical to SEQ ID NO: 11169

SEQ ID NO: 11176 - DNA, 1876 bp, Homo sapiens
atgtaaacagtagtgtttattcagaaagcataaaccccagcgctcttggaaggtttttctgagatggaccagaggctccaatcagaggcttcgtgtgtaggaagcaattacagcctaaaggagcaggtgagagccagggaaggatcacgtagggatctgagacttgaaatggcctcaggccagacagcacaaggcagcccggacaagacaccctcaacccacatgcaccaaacccagcctcagcacctagcccaccccgatgggacgggggagcagtggcttgttgctgctcatgacctcctggggaaggagggagctgagatcaaaatgaaataaggaacctggtagtcgcttccgcattcatacaagaaacctcatgtctgagagcaagacaggcagggactgccccctgagagccctgagatcgacatttctgaagccctgccacctgccatccctcgtagggattcaagtccaaatagccagagcctctggcagaggagatgggggaaactgaggtagccctagggtcgtcctctcaagtcaagctgcctggagactgtagcagctacggttgaggctgctcaggaagcacagaccgccccagacagcagctgaagctgaagactccagggccaggccatcgggtcaggcgttcaggaacgcgaaagctgacggctctgagccaggaggctctttggctgctgtcctctgggacgatgtttggggggcgcggggagcatcaggacaggactctcccgcagcagccccagcccccaccaggcggggacaggccaccagctccatgccagcaaacaaggagtcgcggctccacgcacagctgctggggcctctctttgggctgtccgtgccccctgggatccgttcaggtctccaccgcctgctttctgccagtctggcctcggcctcgctggggtctccgggggctggaatgggggaggcatctgggggtggggtgggcacagggctggacggcatcccagatgagggagcagggctccgggacgagaccggggttgaactcagaggctgcaggaagacctggctcccagggagaggcacagcgtcggtcagcagacaaatggacaccctccccgtcataacccgccaggcactgccggagggagtgaacacgtggcctggcacatctgggcatttccaactgttggacgcagggttcttccagcatgcccgttttagaaaccccactatgaggttcgcctgcggtggtgcgaaccccaggctcactcgtcgctctgactgaaagccagggagaaaacaggaagaaagaagctgggaatgcccacaggcagagggaaggtgccagggcctggcggccgggagaggcctccccgtgtgattccagtggccgccaggcagttcagagtgttcaagtgcacagagatgaatggaaccatttctgccctccggagcttgggagttgagcatgagctgtgtcatgggtggcaaactgcatgtgcagtcagggagggcttcctggaagaggtcacccggctcccggctggcccctgaatggctgtcgctgccggaatgactgcccgagtccgagaccctgctcaggtcgctgttctgggaggaattctgagagctggggccgctgtccagctcatcccagccccctccggcctgcccaggctgatgcctcacagctggaggaaacaggacagccggtgagatccctggggcttcaggccagccccatgcccacctcccggggccctggaccaggaggcctcgggggctgagtcctgagctgaggatgggtggccaccttggctccagcttcagcaaacaccagccccatgggcatgtgcttccgccgcgggtcccaccc

SEQ ID NO: 11177 - protein, 159 aa, Homo sapiens
MPANKESRLHAQLLGPLFGLSVPPGIRSGLHRLLSASLASASLGSPGAGMGEASGGGVGTGLDGIPDEGAGLRDETGVELRGCRKTWLPGRGTASVSRQMDTLPVITRQALPEGVNTWPGTSGHFQLLDAGFFQHARFRNPTMRFACGGANPRLTRRSD

SEQ ID NO: 11178 - DNA, 4933 bp, Homo sapiens
atgtaaacagtagtgtttattcagaaagcataaaccccagcgctcttggaaggtttttctgagatggaccagaggctccaatcagaggcttcgtgtgtaggaagcaattacagcctaaaggagcaggtgagagccagggaaggatcacgtagggatctgagacttgaaatggcctcaggccagacagcacaaggcagcccggacaagacaccctcaacccacatgcaccaaacccagcctcagcacctagcccaccccgatgggacgggggagcagtggcttgttgctgctcatgacctcctggggaaggagggagctgagatcaaaatgaaataaggaacctggtagtcgcttccgcattcatacaagaaacctcatgtctgagagcaagacaggcagggactgccccctgagagccctgagatcgacatttctgaagccctgccacctgccatccctcgtagggattcaagtccaaatagccagagcctctggcagaggagatgggggaaactgaggtagccctagggtcgtcctctcaagtcaagctgcctggagactgtagcagctacggttgaggctgctcaggaagcacagaccgccccagacagcagctgaagctgaagactccagggccaggccatcgggtcaggcgttcaggaacgcgaaagctgacggctctgagccaggaggctctttggctgctgtcctctgggacgatgtttggggggcgcggggagcatcaggacaggactctcccgcagcagccccagcccccaccaggcggggacaggccaccagctccatgccagcaaacaaggagtcgcggctccacgcacagctgctggggcctctctttgggctgtccgtgccccctgggatccgttcaggtctccaccgcctgctttctgccagtctggcctcggcctcgctggggtctccgggggctggaatgggggaggcatctgggggtggggtgggcacagggctggacggcatcccagatgagggagcagggctccgggacgagaccggggttgaactcagaggctgcaggaagacctggctcccagggagaggcacagcgtcggtcagcagacaaatggacaccctccccgtcataacccgccaggcactgccggagggagtgaacacgtggcctggcacatctgggcatttccaactgttggacgcagggttcttccagcatgcccgttttagaaaccccactatgaggttcgcctgcggtggtgcgaaccccaggctcactcgtcgctctgactgaaagccagggagaaaacaggaagaaagaagctgggaatgcccacaggcagagggaaggtgccagggcctggcggccgggagaggcctccccgtgtgattccagtggccgccaggcagttcagagtgttcaagtgcacagagatgaatggaaccatttctgccctccggagcttgggagttgagcatgagctgtgtcatgggtggcaaactgcatgtgcagtcagggagggcttcctggaagaggtaagtgtgaggccaagacacaagggcaggaacattaaggcagcggagtctgggggcttccaggaataggtagaggccagtgtactgtgagtgctgcagagtttgggtggaaggcgggaaggcaatggggaggtgaggaccctgacttgctgctgctccctctgccagcgggacagggacttgagagggggtccgggaagggctgaccaggcgccgggcagggacggggtggccgtggactgcagcgtatctcccactgtacccttggaccccggtgtgcgtgtggcctccgcagctgcccaccttggtggccttgttggtcacaggtcccgggctgcccatgctgagctcctgcagccacggccgggtgcggaggaggatgtgctcctgggggaggaggtcgctgctccccagggaggcgatggcacacagcgccctctgcgggtgaagggaggggacatcagcacccatggggcagcaggtccacgccagggaggcctatttggccatctctctccctcttcttcctcctcatcaatgactggagtgccaggaggccccagagacagctccaccacagccctgtcctcaccgccttacaccccggatcccagacaccacagccctgtcctcaccaccttacacccccgctcccagacaccagagccctgtcttcaccgccttacaccccagctcccggacaccagagccatgtcctccccggctcctggacagaccccagcgagaagcacgtgacctgctgccccgattgccttaccttcattcctccgcacgccccccgacacacgcacacacgtgtccacactttcatgtgcatgcacacacacacaggcacatacatacacaaccacacacatgcagtcatgtacacacacacacagatgtgtgcataccacacacgtgcacaagtgtgtacacaccgcacacatgcacgagtgtgtacacacacaggcatacatacacaggcatacacacccacacgcacacacacaggcatgtgcgcacgcacagccacacagaggaatgttcacacacaggtgtgcacacaggcacacgtgcacacacacgcacacgcacacacacgcacacaggcacatgcacacagtcacgccctcccgcccgcgtgtgcagctcaccagctgcgtgcattcactggtcccacgcaggtggcaggtcagcagctgcagcacggcctcacagttgagcagtccacacctgcacagaggggacacctgggtggcgggtgcggcccgttccctcctccctcgcccacggttggggctgaggcagagcagggcgggtccgggcgcactcacgctttgatgaagtgctgtgcctcctcgcggctcaggaaggcgcgtggtccccgagtcacagtcctcaccaagctcaactcctgctgacagtcactcagggccaccacctcgaccctgccagggggaatggccgggtcaagggtgagtggaggccatgcccccactcctgtctcgcatgggggagaacctggagagcaggagccgcgctgggagggggacagtgtggtgcctccgagacctctcccacatatctggcagctcccgctcacctttctgccaggtcacccggctcccggctggcccctgaatggctgtcgctgccggaatgactgcccgagtccgagaccctgctcaggtcgctgttctgggaggaattctgagagctggggccgctgtccagctcatcccagccccctccggcctgcccaggctgatgcctcacagctggaggaaacaggacagccggtgagatccctggggcttcaggccagccccatgcccacctcccggggccctggaccaggaggcctcgggggctgagtcctgagctgaggatgggtggccaccttggctccagcttcagcaaacaccagccccatgggcatgtgcttccgccgcgggtcccacccctcctgctgtgtgggaggccctgggatttgcctccgtggccgcaaagccccagcggtgacaggaaggagtgacccagaccccaaggggaggagccctcgcctcgatacctcggggacctggaatggccccggggagtaggttccccagggttgggggaccgtggctggctgaaggcatcatggcaggctggtaggtgtcaccccgcggcaggagcctccgggtactgggactctcgggcccggggcgcatggcgctggccaccacctctgcggccttctggatggtggagaggaaggcttcgcctgccgagcctgtacccgaggagagggagatgggacggccgcccagtgcggcccccacccgcgttctctgggagcagggtgcccgcatcggctccctgctcaagcttggagaggtcggggtacatgctgcaggtagggaggcctcctggtgggccccaggccctctggaagctcccagtggactccgctttggcattcccactcccagtgggcctggacaccaaagctcactgcagagttatgcctccgtccctctgtcctctgggggtgaaggtgtcctaaggggcttgggcttggccttggctcagggagggtgtgtccagggctcggggaggggccggcctttcctgtgtgagttccctgtagaagctgccccgacaccaaagtgtcggcaggagccccaggctgtgcgcaggacggcgtgacacagcctaacggtgagcagctacacaccgcccagggcccggcagcagggcacagctgggctgggggctgggtcccagccgcaggcagtggtgccacctgtggctctcctggcgctggtgagcagttgtccactggtactgccccacctcataacagctccacacgggactgcctgagtcacctgcaccacagccaggggcacagccctcggcccctctcagagtgggactcacccctgccacggggcccagccctgacttcttgctcggcctggtttctctcatctgtccataaagcagccctggccacacctgccccacccccacgtcagcagccagagagagacagtggggacagccccaggaagggttgaggccatgtaggggaggggacgggggacagcagctactagatggggcggcatggtccggcccccaccacctcctcatccccacaccctgagatgccagagcccatgcaggccctccccactcacccgtgcggccgtgttccttgctgtagccgaaaccctggagggtgctgtgcggcctggcctgggagcccatgcctgcagagggtcctccgttagcagcaagccggcccccaccctcggccctgcccacggatggcacagacacccaggacactcaaggaggcagaaaccaggaggaggggcaccccgcagagcgacactgctcctgggctcacctg

SEQ ID NO: 11179 - protein, 159 aa, Homo sapiens; identical to SEQ ID NO: 11177

SEQ ID NO: 11180 - DNA, 555 bp, Homo sapiens
ggggggctgcggattcacccctgtgggaaatggcacctcatcatggtaggggctcttgttccctttcagctcccgattctcctgaaggggacgtccgatgatgatgtcccgtgtccgggctacctgtttgaagagattgctaaaatctcccacgagtctccgggcagcagccagtgcctgctggagtacctcctgagccgcctgcacagcagctccggccacgggaagctcaaggtgagcccctgggtggtcaagggtcaggcctgaggcccggcccacggtggtgaggatggaggagcagacgagcggcccagggtggcaggcagctctgtgcccttggggtgcccccgggccctgccctgggtgtcccgtgtccggcctgcccagcactgctgaccgccccactccccaggtgctgaagatcctgctctatctgtgcagccacggctcctccttcttcctgctcatcctcaaacgcaactctgccttcatccaggaagctgcaggtacaggggccgcgcacgcgctcaggaagagccagggctttggagaatg

SEQ ID NO: 11181 - protein, 74 aa, Homo sapiens
MVGALVPFQLPILLKGTSDDDVPCPGYLFEEIAKISHESPGSSQCLLEYLLSRLHSSSGHGKLKVSPWVVKGQA

SEQ ID NO: 11182 - DNA, 604 bp, Homo sapiens
ggggacctggatcatggctgccgcgccgccgctacgggaccgcctgagctttctacaccggctgctcctggccccttcgcccgcgccgacgcccctgagctgcccgcccgccgcgccgtcccggggccttccaagccgggccttccaagccggacccgccgagcgcaagggcgatgggcacagccagaccctgggggaacgaacaggcctcggccagcattcagtggcctccgacgggagggaaggagcggcggacccggtggacgtggagccgctgtgtccgtgctgctggcgcccaggtgggctggcagcccgccgtcctccctgacggtggcgtttcagaggactccggtcctggagaggcacccctgggttgcagagaacacagacgtctcgaagggacagagaaggacgcaccattgctgttcatccctgactgttgagagaggaccctgctgcagcctccctgtggccagtagcacagttctcatcccttcccagtcctctctccggccatgtcaacagtgagagctcccgattctcctgaaggggacgtccgatgatgatgtcccgtgtccgggctacctgtttgaagagattgcta

SEQ ID NO: 11183 - protein, 104 aa, Homo sapiens
MAAAPPLRDRLSFLHRLLLAPSPAPTPLSCPPAAPSRGLPSRAFQAGPAERKGDGHSQTLGERTGLGQHSVASDGREGAADPVDVEPLCPCCWRPGGLAARRPP

SEQ ID NO: 11184 - DNA, 1307 bp, Homo sapiens
ccgggaggggacctggatcatggctgccgcgccgccgctacgggaccgcctgagctttctacaccggctgctcctggccccttcgcccgcgccgacgcccctgagctgcccgcccgccgcgccgtcccggggccttccaagccgggccttccaagccggacccgccgagcgcaagggcgatgggcacagccagaccctgggggaacgaacaggcctcggccagcattcagtggcctccgacgggagggaaggagcggcggacccggtggacgtggagccgctgtgtccgtgctgctggcgcccaggtgggctggcagcccgccgtcctccctgacggtggcgtttcagaggactccggtcctggagaggcacccctgggttgcagagaacacagacgtctcgaagggacagagaaggacgcaccattgtaagcccctcttagtaaaccctctgagaagtagaggccggggcgagttcccaggtgtcgtcctgagcaaactgccctcttttgtcagccctgagctttcctgggctggacctcagagggggctgggtggtcccagggcgcgaccttgggctgccagaagccacgctagggttggtcaaggctctcagtgcaaggtttcgacatagtcgttctgtgctgcgttctgcagttgtcagctgtcacctgcaaacctcagcagctccccttagggcgtggtgggcaaacagtgtcagtgatgcgtgtccacagcctcgggaaacacttcaggtccacgttttcgtatgttgtcactagatctcggcccttccgaccgaaaggcttcggcacctcacgcggtgggtcccatgcttgtcctgttaaatactcttgaactctattctgtcctgatactgaataatgcaagaatgggtggttccagttttcatccctataaaccgtacatctttgtgccagtaagtaagcatgaaacaaataagtacgtctgcgctaagcgaacgtaaaacacacgacatcagtcggttctcggggagcgatggagctagtcacgctgagcggctgtcactctgccattccggcctctggggaggtggaacgattcatagtcccctgtgtggaaaaggggcttgcctgggccttgtttggctttgctagtcagtaggtaggtacaggagaggtaccttcaaatagccttacatgctggtaagtgcagggaggctgggggctgtgtcccttcttaacccaagtggcgcagctcctccgtggagaaccaccattgatttgcctcttctccgaggctgttcatccctgactgttgagagag

SEQ ID NO: 11185 - protein, 104 aa, Homo sapiens; identical to SEQ ID NO: 11183

SEQ ID NO: 11186 - DNA, 524 bp, Homo sapiens
ggcccgggcctggcggaagcggggcagaccgggaggggacctggatcatggctgccgcgccgccgctacgggaccgcctgagctttctacaccgggtgagtgagggcggtccgcccgggccccggtcccacggctcctctcgagcgccgcattccccggactcgccccgggccggagccattgaccttgcgtctccgcgccgggtagctgctcctggccccttcgcccgcgccgacgcccctgagctgcccgcccgccgcgccgtcccggggccttccaagccgggccttccaagccggacccgccgagcgcaagggcgatgggcacagccagaccctgggggaacgaacaggcctcggccagcattcagtggcctccgacgggagggaaggagcggcggacccggtggacgtggagccgctgtgtccgtgctgctggcgcccaggtgggctggcagcccgccgtcctcagagaaggacgcaccattgtaagcccctcttagtaaaccctctgagaagtagagg

SEQ ID NO: 11187 - protein, 147 aa, Homo sapiens
MAAAPPLRDRLSFLHRVSEGGPPGPRSHGSSRAPHSPDSPRAGAIDLASPRRVAAPGPFARADAPELPARRAVPGPSKPGLPSRTRRAQGRWAQPDPGGTNRPRPAFSGLRREGRSGGPGGRGAAVSVLLAPRWAGSPPSSEKDAPL

SEQ ID NO: 11188 - DNA, 614 bp, Homo sapiens
aaagcctggccaattaagaagttcaggaaaggttatgggcggaagcgccgacctatcaagctgtttgacaccggaagaggacggacctaagatggcggcctccagggggctgggaatagccgctcatgtcggctaacggagcggtgtggggccgcgtgcgaagccgcctccgcgccttccccgagcggctggccgcctgcggggccgaggccgcggcgtacggcaggtgcgtgcaggcctccacggccccgggcggccgcctgagtaaggacttctgcgcgcgggagttcgaggccctgcggagctgcttcgccgctgcggccaagaagacgctggagggaggctgttaggagggactctgagcttcacacctgtctgctgccatgggtgcagagccctagtcctgatggcccctggtggcacatatcgaatgcctagggcagaaaggaagtgggaatggcgaagatgtgacattcctcggtgttagatcctgttttttcttaacaagttgaggcgtgggtagagcaggaattggttttccagcattgtgtccgtaaacctgagttagaataagatgtaacggaagccacgataaagactcggtcaaatcctgc

SEQ ID NO: 11189 - protein, 74 aa, Homo sapiens; identical to SEQ ID NO: 1831

SEQ ID NO: 11190 - DNA, 880 bp, Homo sapiens
aaagcctggccaattaagaagttcaggaaaggttatgggcggaagcgccgacctatcaagctgtttgacaccggaagaggacggacctaagatggcggcctccagggggctgggaatagccgctcatgtcggctaacggagcggtgtggggccgcgtgcgaagccgcctccgcgccttccccgagcggctggccgcctgcggggccgaggccgcggcgtacggcaggtgcgtgcaggcctccacggccccgggcggccgcctgagtaaggacttctgcgcgcgggagttcgaggccctgcggagctgcttcgccgctgcggtaggtgggcgcgggccccttccccccttcccagcccttcccctccaagagccagcgggccccggctttcctttgctttcccgttggttcaaggtttgagcgcctgccgcgtgctttagacgccggctgacaaaatcaccgagccatcgacgagcccgcgaaacctcggccgtcctgggcttgtccctgcatgtttgtaaagcgggactggcaccaacctcagaaaggatgggagatgtgtgcaaaaaagcgccttgtaaaacgcgccaagaagacgctggagggaggctgttaggagggactctgagcttcacacctgtctgctgccatgggtgcagagccctagtcctgatggcccctggtggcacatatcgaatgcctagggcagaaaggaagtgggaatggcgaagatgtgacattcctcggtgttagatcctgttttttcttaacaagttgaggcgtgggtagagcaggaattggttttccagcattgtgtccgtaaacctgagttagaataagatgtaacggaagccacgataaagactcggtcaaatcctgca

SEQ ID NO: 11191 - protein, 97 aa, Homo sapiens
MSANGAVWGRVRSRLRAFPERLAACGAEAAAYGRCVQASTAPGGRLSKDFCAREFEALRSCFAAAVGGRGPLPPFPALPLQEPAGPGFPLLSRWFKV

SEQ ID NO: 11192 - DNA, 766 bp, Homo sapiens; identical to SEQ ID NO: 1830

SEQ ID NO: 11193 - protein, 74 aa, Homo sapiens; identical to SEQ ID NO: 1831

SEQ ID NO: 11194 - DNA, 177 bp, Homo sapiens
acttctgcgcgcgggagttcgaggccctgcggagctgcttcgccgctgcggtttgagcgcctgccgcgtgctttagacgccggctgacaaaatcaccgagccatcgacgagcccgcgaaacctcggccgtcctgggcttgtccctgcatgtttgtaaagcgggactggcaccaacct

SEQ ID NO: 11195 - protein, 39 aa, Homo sapiens
APAACFRRRLTKSPSHRRARETSAVLGLSLHVCKAGLAP

SEQ ID NO: 11196 - DNA, 708 bp, Homo sapiens
ccgggggcccagaggagcgcctcgcagaggaattccctgggcaaagtcaggacgttactggcggttcccaagacaggctgcggggggagctctgcaggtggtccacagccggcagcttagacaggcgcctgggcctccagaggagtcctagcacctgctggccatgagggccacgccagccactgccctcctcggccagcagcaggtctgtctcagccgcatcccagccaaactctggaggtcacactcgcctctccccagggtttcatgtctgaggccctcaccaagtgtgagtgacagtataaaagattcactgtggcatcgtttccagaatgttcttgctgtcgttctgttgcagctcttagtctgaggtcctctgacctctagactctgagctcactccagcctgtgaggagaaacggcctccgctgcgagctggctggtgcactcccaggctcaggctggggagctgctgcgtctgtggtcaggcctcctgctcctgccagggagcacgcgtggtcttcgggttgagctcggccgtgcgtggaggtgcgcatggctgctcatggtcccaacacaggctactgtgagagccagcatccaaccccacgcttgcagtgactcagaatgataattattatgactgtttatcgatgcttcccacagtgtggtagaaagtcttgaataaacacttttgccttcacccag

SEQ ID NO: 11197 - protein, 68 aa, Homo sapiens
MRATPATALLGQQQVCLSRIPAKLWRSHSPLPRVSCLRPSPSVSDSIKDSLWHRFQNVLAVVLLQLLV

SEQ ID NO: 11198 - DNA, 1993 bp, Homo sapiens
caggctggtctctaactcctgggctcaagcgatctgcctgcctccgcctcccaaattgctgggattacaggcgtgagccgccgtgcccaggcttattttcttacgtgcttgtcctagaacaactgaatgtgtaaagtggaaaaaacaaaaacaaaaccccacccagcccagataaccatctctgacattctggcacattccttttgactgttgctctggacactcacttccatgggcaacgagcaggcttgctggggtcctgccgggtgcgcctggggcacagccagtgggagaactgatgcggcacagtggctggctgtgcgggagaggccatcccgggtgggcttccaggggcagtcagggcgcagcctctcccgggccctcaggcctgcgtgcatcactgagctgtccgggcttcacggtcacagtcatgatgggtgtcaccagtggccagtgttcgggcacactccctgcaggtgacctgtgcgttgccttgctgtgggccgcgccgtccctggcccagcacggtgcatgagcagcccgggcactctgactgtgtgctttccaaacccagaagctggcagggcggagatgctggaccacgccgtcctgcttcaggtgatcaaagaacagcaggtgcagcaaaagcgcttgctggaccagcaggagaagctgctggcggtgatcgaggagcagcacaaggagatccaccagcagaggcaggaggacgaggaggataaacccaggcagggaaaaaacctgggaaggaggtggcagccactggcaccagcattctgaaggaagccaactggctcgtggcagggccaggagcagagacgggggaccctcgcatgaagcccaagcaagtgagccgagacctgggccttgcagcggacctgcccggtggggcggaaggagcagctgcacagccccaggctgtgttacgccagccggaactgcgggtcatctctgatggcgagcagggtggacagcagggccaccggctggaccatggcggtcacctggagatgagaaaggcccgcgggggggaccatgtgcctgtgtcccacgagcagccgagaggcggggaggacgctgctgtccaggagcccaggcagaggccagagccagagctggggctcaaacgagctgtcccggggggccagaggccggacaatgccaagcccaaccgggacctgaaactgcaggctggctccgacctccggaggcgacggcgggaccttggccctcatgcagagggtcagctggccccgagggatggggtcatcattggccttaaccccctgcctgatgtccaggtgaacgacctccgtggcgccctggatgcccagctccgccaggctgcggggggagctctgcaggtggtccacagccggcagcttagacaggcgcctgggcctccagaggagtcctagcacctgctggccatgagggccacgccagccactgccctcctcggccagcagcaggtctgtctcagccgcatcccagccaaactctggaggtcacactcgcctctccccagggtttcatgtctgaggccctcaccaagtgtgagtgacagtataaaagattcactgtggcatcgtttccagaatgttcttgctgtcgttctgttgcagctcttagtctgaggtcctctgacctctagactctgagctcactccagcctgtgaggagaaacggcctccgctgcgagctggctggtgcactcccaggctcaggctggggagctgctgcgtctgtggtcaggcctcctgctcctgccagggagcacgcgtggtcttcgggttgagctcggccgtgcgtggaggtgcgcatggctgctcatggtcccaacacaggctactgtgagagccagcatccaaccccacgcttgcagtgactcagaatgataattattatgactgtttatcgatgcttcccacagtgtggtagaaagtcttgaataaacacttttgccttcacccag

SEQ ID NO: 11199 - protein, 88 aa, Homo sapiens
MSSPGTLTVCFPNPEAGRAEMLDHAVLLQVIKEQQVQQKRLLDQQEKLLAVIEEQHKEIHQQRQEDEEDKPRQGKNLGRRWQPLAPAF

SEQ ID NO: 11200 - DNA, 651 bp, Homo sapiens
cagtgcggcatcgtcctgggggcgctgctcttggtcttctgctcatggatgacgcaccagtcgtgcatgttcttggtgaagtcggccagcctgagcaagcggaggacctacgccggcgccagccactgccctcctcggccagcagcaggtctgtctcagccgcatcccagccaaactctggaggtcacactcgcctctccccagggtttcatgtctgaggccctcaccaagtgtgagtgacagtataaaagattcactgtggcatcgtttccagaatgttcttgctgtcgttctgttgcagctcttagtctgaggtcctctgacctctagactctgagctcactccagcctgtgaggagaaacggcctccgctgcgagctggctggtgcactcccaggctcaggctggggagctgctgcgtctgtggtcaggcctcctgctcctgccagggagcacgcgtggtcttcgggttgagctcggccgtgcgtggaggtgcgcatggctgctcatggtcccaacacaggctactgtgagagccagcatccaaccccacgcttgcagtgactcagaatgataattattatgactgtttatcgatgcttcccacagtgtggtagaaagtcttgaataaacacttttgccttcacccag

SEQ ID NO: 11201 - protein, 63 aa, Homo sapiens
MTHQSCMFLVKSASLSKRRTYAGASHCPPRPAAGLSQPHPSQTLEVTLASPQGFMSEALTKCE

SEQ ID NO: 11202 - DNA, 3199 bp, Homo sapiens
ccgagcctctctgtgcccagcgtttcattcctacctcctaggtgctaattcctcacaacagactatttttcggctgaggcagtcagggcccccgcccccgtgccctggcgccaagcactcgccccagaatcggtcctgggaataaaggtcaaaaaggaacccttaaacccgctcctccccggaaggcacagcgcctccccttctctccagcccgcgactgcccatccaaaccgaggcctcgcggggcgagtcccttgtcctccagctcgttgaactggggccccgggcacaggtcggctggaccagcttggcgaaccggacagctgcgagaccctcaggtgcccaccggcccagtttccgcccgcccctccgggcccgcctctcattggctcgcgtcccaccaaaccctaccccctggccgtcacttccgggcaacggagcccgtggaaggcggaagtgtgagcgccgcggcggcagctgagttgggctgaggtgtccctagctggctctgcggctcttccgggtctgggctcggagattcacaggcggcccgcgaggccgagcgagggacgcatggccctgaggcggccgcagggcttggcggggtccggaggttgacctcgcccccgcagccggccttcgaggctgcctcctccaggcagcctctggggcccgcgcccgcgcctgctcaggctcccgtgttcaggctgcccatcccctccccaccggcgtcccggacgttgggacctgtgaccgtggcctcgggctgggcttccaaagccggccgcagcccggcgacccccgaggcctctcgccccgggcccctagacctctcactatgaccgcggccgccgcctccaactgggggctgatcacgaacatcgtgaacagcatcgtaggggtcagtgtcctcaccatgcccttctgcttcaaacagtgcggcatcgtcctgggggcgctgctcttggtcttctgctcatggatgacgcaccagtcgtgcatgttcttggtgaagtcggccagcctgagcaagcggaggacctacgccggcctggcattccacgcctacgggaaggcaggcaagatgctggtggagaccagcatgatcgggctgatgctgggcacctgcatcgccttctacgtcgtgatcggcgacttggggtccaacttctttgcccggctgttcgggtttcaggtgggcggcaccttccgcatgttcctgctgttcgccgtgtcgctgtgcatcgtgctcccgctcagcctgcagcggaacatgatggcctccatccagtccttcagcgccatggccctcctcttctacaccgtgttcatgttcgtgatcgtgctctcctctctcaagcacggcctcttcagtgggcagtggctgcggcgggtcagctacgtccgctgggagggcgtcttccgctgcatccccatcttcggcatgtccttcgcctgccagtcccaggtgctgcccacctacgacagcctggatgagccgtcagtgaaaaccatgagctccatatttgcttcctcccttaatgtggtcaccaccttctacgtcatggtggggtttttcggctacgtcagcttcaccgaggccacggccggcaacgtgctcatgcactttccctccaacctggtgacggagatgctccgtgtgggcttcatgatgtcagtggctgtgggcttccccatgatgatcctgccatgcaggcaggccctgagcacgctgctgtgtgagcagcagcaaaaagatggcacctttgcagcagggggctacatgccccctctccggtttaaagcacttaccctctctgtggtgtttggaaccatggttggtggcatccttatccccaacgtggagaccatcctgggcctcacaggagcgaccatgggaagcctcatctgcttcatctgcccggcgctgatctacaagaaaatccacaagaacgcactttcctcccaggtggtgctgtgggtcggcctgggcgtcctggtggtgagcactgtcaccacactgtctgtgagcgaggaggtccccgaggacttggcagaggaagcccctggcggccggcttggagaggccgagggtttgatgaaggtggaggcagcgcggctctcagcccaggatccggttgtggccgtggctgaggatggccgggagaagccgaagctgccgaaggagagagaggagctggagcaggcccagatcaaggggcccgtggatgtgcctggacgggaagatggcaaggaggcaccggaggaggcacagctcgatcgccctgggcaagggattgctgtgcctgtgggcgaggcccaccgccacgagcctcctgttcctcacgacaaggtggtggtagatgaaggccaagaccgagaggtgccagaagagaacaaacctccatccagacacgcgggcggaaaggctccaggggtccagggccagatggcgccgcctctgcccgactcagaaagagagaaacaagagccggagcagggagaggttgggaagaggcctggacaggcccaggccttggaggaggcgggtgatcttcctgaagatccccagaaagttccagaagcagatggtcagccagctgtccagcctgcaaaggaggacctggggccaggagacaggggcctgcatcctcggccccaggcagtgctgtctgagcagcagaacggcctggcggtgggtggaggggaaaaggccaaggggggaccgccgccaggcaacgccgccggggacacagggcagcccgcagaggacagcgaccacggtgggaagcctcccctcccagcggagaagccggctccagggcctgggctgccgcccgagcctcgcgagcagagggacgtggagcgagcgggtggaaaccaggcggccagccagctggagggtaaggcctccgccctacagccgcctgcctcaggcccagggagcggcagccccctcccccagccctggggtgatgcccaggtcatcctcgggagccctgccaggccccccttctctttccagccgcctgctgagcagacccctcggagagctttctgctcccttcccatcagcagcttgctttctgggaaccttttatctgccttactcccctttaaacacctgcggcatcgtcacatggcttgtgattaccgttttatctcccttgctcccctttaaaacacctgcggcattgtc

SEQ ID NO: 11203 - protein, 780 aa, Homo sapiens; identical to SEQ ID NO: 1835

SEQ ID NO: 11204 - DNA, 3219 bp, Homo sapiens
cgcatggcagcgcatgcctgtagtcctagtgactcgggaggctgaggcaggaggatcacttgaaccaagagttcaaggctgcagtgggccatgaccgctccaccatactccagcctgggctacaaagtgagaccctgtgtctaaaagagaaagaaaaataaaaagtgaggctgggttttttcactgtaacacatgtaggccaggcagctacttagttctttctaagaaactttcagctgtaggagttgaaaccagagggtgtcctggttctctccttgcggcagagtgaaccatgaaaggcccgctgtgctgtcttgcgctccgagcatgggggtgcagacgccactctgcagtgctggaggagccctgccccgtccaggttcccctcctgcctccccttgggagctctgcccggtggcccatccatcttctgtcccgcagcctgagatctgtgagcctggtatgtcccttcagctggaactcctggtggctagaggcacacgttcctcttgaactgtttcagccaaggcgggttgagtggtctcagagaatccaggggagagtccagcagccacattgggggcggtgggtctccctgggccttgggaacgatagcattggctcactgtccatgtggccaggtgtgcggtcaccacagcctcctgcagacttccaccagccacgtgcctctggcttcgcagcagaggccaagcaccaaagactgggtgcctcccccacgtgctggtgctcctctcttctgcggagttcaggcacctgggcacgggtgaggcaggatcgaggaggcaaggccagagcccgtcatatggccgtggggtccctccgcgcatctggccaggccaactttcagtgtttgatgttttgtacctgagcagcatctgtatttctgtacgtgacccatttttatcttgttaaaaaattgacaatggcgttaaatgtattgtgactcaagtaggaaagcttacgcaacccccttcatcccaaggtggacctggctgtttcctccgtcagcgcccgtggctgctcctttcccggaggtgcggctgcggccatgccacctgctttcttgtcttcggcccatgtgccgtgagcgtttctccacggtccctacaagcctgcaggggctctgcttccttgcttctccacctgttgcgggggcctgggtgcactgctccttcacccttgacctctcgtggctaaccatctcacgacagtcttcgtgctaaagtcccctctccccttctctgggtctatgtcataggtaaagttctaggaccgggactcttgtgtgatggacctaaccccccacctccatggcctgtatacaaattaccgccctgaggccgataggaacttctggctccgtcttccacagtccatcctatgtaaaagtccattctgaaaatggcatgcttcaaaactagttctagaaagttctgcagttgtttcctagcccagggagagtcatcacggccagtccgtcctgtgtgttaacttatttggtccttaccacggctggatgaggagatgcttctgttgacagatgaggaaactgaggcaccgagaagtcacttgcctagggacacacaggtggggctggtgagtggcagagcaaggatttgagccaggtggtctggctcctgtgtcctgtactagagaccacagctgggggtcctggggcaggtggcgtctgaggccatccgtccttggctctgccgcctcctccggaatgaatggccctggcatcccggtgcagatcagtagagtcctggctgcacactggggccaaaacaggcacttgaaattagggcctcatcgtgcccttctctcttcttcttcctggactttgaaattgctcactgcttgttgcacatctgctggagataacacggccatgtgtgcgtgtgtttgggggggttctgcctgcaccctgaaacctgtgggccaggagagtcctggggcatttgtcaggagcggcgctgtgcagcctgtgttttgctctccatacttcctggcacttaaaaaactctcgtggtattgctctaaaagcaaaaaggaaaacggaaggactcgatactcacatttcaaaaggaagttgtaaaatgtacggtctgtgcctggggtgagaagccctcgtgccttcctggcatgctgcaggttcccgtttaagttgctcagccagatctgattgtgctggtcaggctcacctgccaggtgagtgcgcggccggcctcacgtggagatgtgcctggtgtgcctggcagagccctttcaggctttgctttctaggagagtggtggaggaaatcagtcatttcaaaaccttttgtttttcttttgtacagcaaaaagatggcacctttgcagcagggggctacatgccccctctccggtttaaagcacttaccctctctgtggtgtttggaaccatggttggtggcatccttatccccaacggtaaggcgggagggctgccctgttgccggggagtgggacccggggcttcggcatcaaccaagacctgcacagttacgagacctgcacagagaccatcttctctggtctcttaaaaaagtctagagactttgtcagtttttctctggcccacagagaaaggcaggggataaaatctggcaacttgagccaggtgcggtggctcacacctgtaatcccagcactttgggaggttgaggtgggtggatcacctgaggttgggagttcaagaccagcctgaccaatgtggagaaaccccgtctctactaaaaatacaaaattagcagggcgtcatggtgcatgcctgtaatcctagctacttgggaggctgaggcaaaagaatcacttgaacccgggaggaggagtttgcagtgagccaagattgcgccattgcactccaggctgggcaacaagagagaaacttcgtctcaaaaaaaaaaaaatctggcagcttgctgggcgcagtggctcacgcctgtaatccccgcagtttgggaggccgaggcgggcggatcacgaggtcaggagatcgaaaccatcctggctaacacggtgaaaccccgtctctactaaaaatacaaaaaaattagccgggcgtggtggcgggtgcctgtagtcccagctacttgggaggctgaggcaggagaatggcgtgaacctgggaggcgaagcttgcagtgagctgagatcgctccactacactccagcc

SEQ ID NO: 11205 - protein, 198 aa, Homo sapiens [sequence omitted]

SEQ ID NO: 11206 - DNA, 1268 bp, Homo sapiens
ccgagcctctctgtgcccagcgtttcattcctacctcctaggtgctaattcctcacaacagactatttttcggctgaggcagtcagggcccccgcccccgtgccctggcgccaagcactcgccccagaatcggtcctgggaataaaggtcaaaaaggaacccttaaacccgctcctccccggaaggcacagcgcctccccttctctccagcccgcgactgcccatccaaaccgaggcctcgcggggcgagtcccttgtcctccagctcgttgaactggggccccgggcacaggtcggctggaccagcttggcgaaccggacagctgcgagaccctcaggtgcccaccggcccagtttccgcccgcccctccgggcccgcctctcattggctcgcgtcccaccaaaccctaccccctggccgtcacttccgggcaacggagcccgtggaaggcggaagtgtgagcgccgcggcggcagctgagttgggctgaggtgtccctagctggctctgcggctcttccgggtctgggctcggagattcacaggcggcccgcgaggccgagcgagggacgcatggccctgaggcggccgcagggcttggcggggtccggaggttgacctcgcccccgcagccggccttcgaggctgcctcctccaggcagcctctggggcccgcgcccgcgcctgctcaggctcccgtgttcaggctgcccatcccctccccaccggcgtcccggacgttgggacctgtgaccgtggcctcgggctgggcttccaaagccggccgcagcccggcgacccccgaggcctctcgccccgggcccctagacctctcactatgaccgcggccgccgcctccaactgggggctgatcacgaacatcgtgaacagcatcgtaggggtcagtgtcctcaccatgcccttctgcttcaaacagtgcggcatcgtcctgggggcgctgctcttggtcttctgctcatggatgacgcaccagtcgtgcatgttcttggtgaagtcggccagcctgagcaagcggaggacctacgccggcctgggtccacacaagcttcctcttctaaactcagaccaagacagccgtcctcaccgtgctggtgcagacctgctctctctgtgtctctcctggacaccagatgccttcctgcggagctgcctgcagagagccttgctgttctccccaactcggaattccatggaggaagctcctcaggcctgggctgttgctggagttcagtggctcctctcccagt

SEQ ID NO: 11207 - protein, 142 aa, Homo sapiens
MTAAAASNWGLITNIVNSIVGVSVLTMPFCFKQCGIVLGALLLVFCSWMTHQSCMFLVKSASLSKRRTYAGLGPHKLPLLNSDQDSRPHRAGADLLSLCLSWTPDAFLRSCLQRALLFSPTRNSMEEAPQAWAVAGVQWLLS

SEQ ID NO: 11208 - DNA, 2970 bp, Homo sapiens
acgtctgcggtgttacccacgactgcctgggacctggccaagggctccacacaccaagaccaaggcagcaggaaggagaaaggagggaaggtaaaagactactgaaaagctttcagctggggctgggcatggaggctcacacctgtaatcccaacactttgggaagccgaggctggtggatcacttgagcccaggagtctgagaccagcctggccaacatggcaaaaccctgtcgctacaaaaaatacaagaattagccatgtgcacctgtggtcccagctcccagggccgggagcctgaaaccaaggtgtccacagggccctgctgcccccagaggctctgggcagagcccttccgcctttccagctccccctggttcccgtgctcctcggcctgtggccccatcactctggcctctgccttcatctcatgccgagatccctgaagcgggcccagctccgttcactgctcccccggcctcctgctgtttcccacacgcagccatggtacagggcagctcatcccaccacctccccaaccgcagcctccagggatgtacaccctgcctcaggggctgtgcctgggccctggctggtggagggcacagccgtcagggaaggccctcagctgcaggatgccgtgcctcagagaccaaccaggccctcgaaggcactgtggccggcccagatgtcagcagctccagcaattaggctgggacagatggtgcctggtgacacaaggggactgtgggggccacaggggaccctgctcacctggacctaccgtggaggccagggagggagatggactcgaagggcggaagggcccagagaaggcacatttgcagagcagcggccgcatttccagagctcgggagcccaacaggaatcccgtctggccatgggaccaccgcccttggggctgggggatgccgcaggggacggcagagggcagacaggccaggaaaaggggagggcagagggcagacaggccaggaagagcgcctgcaagtgcccaaggaagggaccaaacccaggcccctggaccagagcggccgcctggtggggcaggctggaaggggccaaggccagcgccaagggggagcaggtgagggaccctggtgggcatctgtgggaacaaggccacgtttctccctgcgcacgctttaatcaaggacattcctgtggttctccaaaagtgtcgcacactacatgggtgtcgtgagctgggctccgtgagagtgtgcgggtggctgggggcagcaagggagcagcaaggcctcaaacccgggcggcggcctggcctgcgcgccaggatgtgcggtgtgagtttcccgagctgcaggaacaaggtccacagactggggagcttcacacaacagaaactgcctcgcagttcccgaggccagagcccatcggggtggctccctgaggccgtgagcccggactgtcctgggccgccccctcttccacaggctgagatcatccttggcgtctgttggcctgcggccgcctcgcccaacctctgccctcatgtccacacgggtcctccctgtgtgcatgttggtgtctggatctgccctttctactgtggggcaactgtcgtcgaggatagggcccaccacacaacacggcctcatcgtaactaagtatagtcagcagtgatcctatttcccaataaggtcccattctgaggtcctggacttcaacatgtgaattttgggggccacaactctaccctggcatgcagagagagaaggggggcgtggagtccccctggggggaagtcccttgggaagtcacaggcccccttggtggggcaattgggacgtgggtgtgagggtcctgggtacagggagcctgcctaccaaggctctgccgacagctatttctaaattcctcgtggaaaataccctgtggccctcctcatctggagcgagcgacgggctggagggtgtctgagccaggctggtgccggggagcagatgtgggtggcccaacccagccccttgttcttgttccccacctcccaggaaagggggagggtgggcggagccggccctcctgggctctctccttgggtcccggagccacctggggaggggaggctcaaccccctaccttggccagctggctgcaggtctctcagggctggcacagaacagctgggctttgccaggtgtcccccatcctgatgcacggcccggtggtgcggtctccaggcctcccaggattctcagctgcgccgtctccccagtccccaaaccccagtggtggccgccaggggactggaccgtcagtctgtggagctggggctgcagctggtggtgtttccaacaagggtcttttggctgcctggctccagggagaggcctctggaggcaaggggtaacctaccgggaaagcctcaaaggcacccccatccccgccccgcacagactccaccggccccccatggttcctccaggccctcttcagtcatgacaggcagtgcctgggtgcccggcctgctcagcacaccctgggcctcagccccacccaagccttggcctagcatgggagccaccacgggaacacacacacgggctggagggtgtctgagccaggctggtgccggggagcagatgcgtcagatggaggagaaaagccctggggcagcggcttctggagctctggccaaggatgggctctgagcacacccctgcccggcccagagcaccaggccggggcagggtcaggaacagcttgaagccccctgcaaagtctgtccctcctcctggagcctcagctgcccctccaacacagccctctgtgggagcctagatggcccccgtgtggccatgagacatgggcgggcgctggtggattcctctgtgtcaggtgacatggtggcaccccggccgcaggctgtgccccggctgtggcgttaagaagggctatggatctaaataaaatccagtctctttgctgg

SEQ ID NO: 11209 - protein, 264 aa, Homo sapiens; identical to SEQ ID NO: 1837

SEQ ID NO: 11210 - DNA, 1160 bp, Homo sapiens
cacttgagcccaggagtctgagaccagcctggccaacatggcaaaaccctgtcgctacaaaaaatacaagaattagccatgtgcacctgtggtcccaggtgcctcctctgctcctttgggaaagccccacctgtcttgaggtcccccacacctgtgcttcccagcacctcggagaccccagaaccactgaacaaagaacactggggtcctgggctgccacatggaggaccccagggtggcaggctcacaacagcacaggtgtcctcctacagctcccagggccgggagcctgaaaccaaggtgtccacagggccctgctgcccccagaggctctgggcagagcccttccgcctttccagctccccctggttcccgtgctcctcggcctgtggccccatcactctggcctctgccttcatctcatgccgagatccctgaagcgggcccagctccgttcactgctcccccggcctcctgctgtttcccacacgcagccatggtacagggcagctcatcccaccacctccccaaccgcagcctccagggatgtacaccctgcctcaggggctgtgcctgggccctggctggtggagggcacagccgtcagggaaggccctcagctgcaggatgccgtgcctcagagaccaaccaggccctcgaaggcactgtggccggcccagatgtcagcagctccagcaattaggctgggacagatggtgcctggtgacacaaggggactgtgggggccacaggggaccctgctcacctggacctaccgtggaggccagggagggagatggactcgaagggcggaagggcccagagaaggcacatttgcagagcagcggccgcatttccagagctcgggagcccaacaggaatcccgtctggccatgggaccaccgcccttggggctgggggatgccgcaggggacggcagagggcagacaggccaggaaaaggggagggcagagggcagacaggccaggaagagcgcctgcaagtgcccaaggaagggaccaaacccaggcccctggaccagagcggccgcctggtggggcaggctggaaggggccaaggccagcgccaagggggagcaggtgagggaccctggtgggcatctgtgggaacaaggccacgtttctccctgcgcacgcttt

SEQ ID NO: 11211 - protein, 245 aa, Homo sapiens
MPRSLKRAQLRSLLPRPPAVSHTQPWYRAAHPTTSPTAASRDVHPASGAVPGPWLVEGTAVREGPQLQDAVPQRPTRPSKALWPAQMSAAPAIRLGQMVPGDTRGLWGPQGTLLTWTYRGGQGGRWTRRAEGPREGTFAEQRPHFQSSGAQQESRLAMGPPPLGLGDAAGDGRGQTGQEKGRAEGRQARKSACKCPRKGPNPGPWTRAAAWWGRLEGAKASAKGEQVRDPGGHLWEQGHVSPCAR

SEQ ID NO: 11212 - DNA, 3317 bp, Homo sapiens
acactgcgtccccatcagctcaaagaatacgcatggggacaagcctggggggccgtctgagagtcccccaaccctggatccccacggcagcccccactgttgggtttttcagtggctggtgtgccctgggctggtcacctctgcattttgctctgctgggagtttgctcctggccctccaacagcgcctcctctgtgaggaggaactcctgttcccgtggctctgctggctctggaggctggagttcccgtgctgggccctcctgggcgggttctctcttgctgccgccagtaccctgcccctctcgtcctcctgggtagcctgggaggaatggcagaagaaagcagtgaagccaggtagcagtagcccggccaccccaccaggctctgctgtaggctgggctctcaaggcagctgctccaggaggggccccctaggaagggactgccacactcctgggagcgttcctggccccctccagtgcaaatgaccctgggccccaaggctccgaacacccgcccctctgctccaggctagcttggctgagcccgatgcttctcaaggtgaggagggcgtccttgaagcctccggccaccccacaccaaggagctttcagggcaggaaatgtgatcgggcagctgatttatctccttacctggtctttgttcacagcctggctccggccccccaccctgctgcagggcccgaggacgtctccccaggggtccccacctcggtctccttggggggactgtgctgagcccagctgcctctgtgagatgaagataagaaggcgaagacatgaagggcctgcctgggggcagtctggctttcttgcaggggggctgcacctggttccctcctccctctcgctggcagcctgcggggtggtgaggatgaaggggctgtggggccggggtgcagggattagagggaggtgactgccatctcttcctcctcatcgtgtttttcacctcttaagtcaactttagattctcggactcagagttctctcctgacggtggcagggtcctcagatcaccggtgcagacagggccagacagggccaatgtggggacccactcagcctgtggcctctgcaggagggaggtcggaggcctcagcagccaccccggccacctcctgaaacagtgaatgtccttcattttcagctggcaagctctgatcttacaacgaggtatggaactgttcagaaaactttcagcagacgttcgagggaaaacagctcagcttcccatgccccccacctctgccaggagcgaccccatatcccccaaacagaattctggtagcccgggaccacagggtcttcctgtgcctcccctgccagctctgcatgactttgtcacgtacttgagtgctggctgagatgatgctaccgctaccaaacaggtgggaggccagccccagccccagccccagccccaccggggccggagctcccggtgaagaagcgtctgcctggttcgcaggtgtccaggacacaccagtcgcctgactcccggtcaggcaaacgcacacatcaagttcttgcaagccagggctctgctggcatcttcaagaggagggagggtcctggccctgaccacagggctcccttaacaggaggagttacaaactcggcttcctggggggcatcgtggggtgtgctgcctgccaggagaccccactcctggtcacggggttccgtcccacacagtggcaggagccatgcatgattcttggctgaagaagaacccgcacagctatgtggtctgccgcccagcagggaagcccccacatcagccctaagggaacttcccaaagctcagcaggtgcctcttcctgccatccgctaggtcttctcttggcccctctcccaagccttgacccatagctgacacttctagaaaagtctttaccgagaaacggaccggctgcatgggtggtgaggagggcagttgcccagggcctggcatcagaggggcctgtggctaaggctgtcctgaaattcttaatcattttacctctgaacttgcgggtttttgttgttgttttttgaggcagagtcttgctctgtcacccaggctggagtgcagtggtgcgatcttggcttactgcaacttccgactcccaggttcaagcgattctcctgcctcagcctcccgagtagctgggactacagaagtgcaccaccacacccggttaatttttgtatttttagtagagacggggtttcaccatgttggccaggctgatctcaaactcctgatacacccgcctcggcctctcaaagcactgggattacaggtgtgagccaccgcgcccggcccttttcctgcctcctaaacaagtggccaggaattctcctcctgcaccgggtccccagattgtgtggcaagccctgcagatggcacaggggactggttcttcctcgtggaaagccaggcccggacacctctcgggcatcgcctgttggggtgaccctcccacacccagcctggaaccctagccagctcagcctccgtccgctgagaaatcaaggtgaccttgtggctcagccctcagggggcactcaccacacaagagttccctttcaagaccccctgttcggggctggggcccccaggaacggttggggcaccttcctggggccctgtttttccccaggagcggggcctgggagctgagggcgtctcatctccccacaggcatctgctgctgctcctggctgccactcacccctgtgagatgctgagggcaggatacctgtctgtgcggggcgtgggaaaaagggagaaagcctggcagagggttgggggctaagaagcaaagggcgtggaagggccaccgtgcacttttgaagtctctacttgccagtggccaccccacctctccctgccctcatccaaggacggacaggcctggcaggtggaccggagctgtggggcagaagcatcccaggcctggcctcagaggagggaggccatggtgaaagtggaggctgtctgcatccacctccccagcctttgtcaccgggacctcagcctgaccccaggcccaccccaggctgctcaccgaggtgggtaccctgcccaccgccagctcagatgcggtgtgtggactcccttctctctgggggtgagcgggagttccctcccctccacatcaggagctgggggagagctggagggccctgggatccccttgaccctggtcatcagccccagccctgacaggccctgcgtgtgccatgtgtggcctgggtttggagctcagcaccctgcgggaattctattaaatctccgattttatctg

SEQ ID NO: 11213 - protein, 129 aa, Homo sapiens; identical to SEQ ID NO: 1839

SEQ ID NO: 11214 - DNA, 865 bp, Homo sapiens
atcagctcaaagaatacgcatggggacaagcctggggggccgtctgagagtcccccaaccctggatccccacggcagcccccactgttgggtttttcagtggctggtgtgccctgggctggtcacctctgcattttgctctgctgggagtttgctcctggccctccaacagcgcctcctctgtgaggaggaactcctgttcccgtggctctgctggctctggaggctggagttcccgtgctgggccctcctgggcgggttctctcttgctgccgccagtaccctgcccctctcgtcctcctgggtagcctgggaggaatggcagaagaaagcagtgaagccaggtagcagtagcccggccaccccaccaggctctgctgtaggctgggctctcaaggcagctgctccaggaggggccccctaggaagggactgccacactcctgggagcgttcctggccccctccagtgcaaatgaccctgggccccaaggctccgaacacccgcccctctgctccaggttaaaatctggattgaaaaagcaagtggggtttgttggcctctcaaaaagtggagcataggccgggtgcggtggctcacgcctgtaacgccagcactttgggaggtcaaggtgggcggatcacctgaggtcagaagtttgagaccagcctggccaacatggtgaaaccccatctccactaaaaagacaaaagttagccaggcgtggtggtgaacacctgtaatcccagctacttgggaggctgaggcaggagaatcgcttgaacccgggaggtggaggttgcagggagccaagatcgcaccactgcactccagcctgggtgagagagcaagactctgtctcaagaa

SEQ ID NO: 11215 - protein, 95 aa, Homo sapiens
MGTSLGGRLRVPQPWIPTAAPTVGFFSGWCALGWSPLHFALLGVCSWPSNSASSVRRNSCSRGSAGSGGWSSRAGPSWAGSLLLPPVPCPSRPPG

SEQ ID NO: 11216 - DNA, 1098 bp, Homo sapiens
atgggggaggggaaggagcccgctcaggccacccggcctcctcggaccccgctcaggccacccggcctcctcggaccccgctcaggccacccggcctcctcggaccccgcccaggccacccggcctcctcggaccccgcagaatacccccaaagcccatgggcgtctcctaaccgtgaggacggggtgggagagcttcggggaacaaagcccggtcctcccagctctgaggccgaggcagggcgcacctcctcctgggcgaattcaatcggagctgcagaagagacaagcatttccaaactggcacccgctccgagcccaaggtgagggtggagaagggtccctggtggaagctgcaggaacactttgggccggggtctaccccgcgttcggcggctccccgaatcccgcagaaagacacgtttgcagcgaaaggctcttacacaccagccgggattttattcgttccctaccgagagtgcgctctgggagcgcgggaaacaaggaaaacgcacgtacctggcggcgctccgagggcggcctcgcgggccctccgctggcgaaggcccccagaagccactccccgcccggctgctcgccccacggccagtccctccctccccggcgacgcaccccgccgagccagctcacaggaagcgccaggagccggagacctggctcgcctttccgggcgctgcgtccgtcttcgaccgccagggcccgcgtcctctccccggccacggcccaccagagggaccccgcggcgggtcctggctcgggcgcgtccttctgcgtccgagttcccaggttcccggccgagctgcggagacggacgcggagccctcggggaagacgaggcggcggcggccgccagccctactgtgcacgtttccgcgaggatctgcggagagacgtgcaggcgacgcaggccccgggaaggaaggagggtacctgggctcggacgagcgataacgctgtgttctgtgactccgtacaaacggatcctggagtccagggaaagcgtcccaggcccccagcccgggcagggttcgtgggattggcgtccgctgccccaggcttaccccgaatggaggagtga

SEQ ID NO: 11217 - protein, 365 aa, Homo sapiens
MGEGKEPAQATRPPRTPLRPPGLLGPRSGHPASSDPAQATRPPRTPQNTPKAHGRLLTVRTGWESFGEQSPVLPALRPRQGAPPPGRIQSELQKRQAFPNWHPLRAQGEGGEGSLVEAAGTLWAGVYPAFGGSPNPAERHVCSERLLHTSRDFIRSLPRVRSGSAGNKENARTWRRSEGGLAGPPLAKAPRSHSPPGCSPHGQSLPPRRRTPPSQLTGSARSRRPGSPFRALRPSSTARARVLSPATAHQRDPAAGPGSGASFCVRVPRFPAELRRRTRSPRGRRGGGGRQPYCARFREDLRRDVQATQAPGRKEGTWARTSDNAVFCDSVQTDPGVQGKRPRPPARAGFVGLASAAPGLPRMEE

SEQ ID NO: 11218 - DNA, 665 bp, Homo sapiens
ctccttcaccttccaccacgattgtgaggcctccccagccatgtggaactgagcctgaagttatggggcgtgtatacagtgagggaccgcaccgcccgccggcagctttcatctgtcaactcctagtgagaagaacactcacccaccaaaaaaaggaaaaattgaaaatggtgctgatttcgaggggtacttggagactggccccgggctgggcccctgtctggagcgccgaggcctgcctgtcggcctgggatgactgcagaggctgctgtcaaggaagctgtgctccatggtcaggacaagcaagccgacctaggggcccaagagaccaagatgagctctccaggccccacagcccggccctgagcctcctctgctgaagccagcccgtgcgctgacagcggtatggggcctgcatgattggcgcaggaataagcaaagagaccctggacccaagggcgggtccagaaagcggccccttccccacgccgatttataacaaaggcccctgcagagcagggggaagaggtggcctttccctgccacgtgtccagtatcagttggacactgacagaaaaaagtgaccccatccccacaattaatttaaaatgagtcacagagcaggctgggcacggtggctcacacctgtaatcccagcactttgg

SEQ ID NO: 11219 - protein, 105 aa, Homo sapiens
MGRVYSEGPHRPPAAFICQLLVRRTLTHQKKEKLKMVLISRGTWRLAPGWAPVWSAEACLSAWDDCRGCCQGSCAPWSGQASRPRGPRDQDELSRPHSPALSLLC

SEQ ID NO: 11220 - DNA, 719 bp, Homo sapiens
ggtgagttcaccccggtcctggtctggcacctcattgctggggaggtctcggcagtccagaggaggtagcccccaccctgggcatccatccgcccaggccccagcctccgcgggaagacccaattacagaagagagaagtatgtggagacccttggctgaggttgggggtcctggaagctggaggaatggcagactctggacatgctcctagagatgggaggtcaaaatgatcaacgttcagggtcccttcatctcagagggtctcgagtcacctcatttaaagtgtggcctgggacacctcctatccagccatacgccgcccaggactggctcaacagctccaccctccactgctgttcacccatgacacgtcacttcccacccgccactgctggctcacctgtgacaccccaggcagctcagatgcccggcaggtcctgctggtgtgtgttagccggggtctccaaagaaccagagccagcaggggacacacccatctctgtatctggagaaaaagatcgatgagaaggaatctgctcctgtgatgatggaggctgacaagtcccgagagccacggttggcaccctggagacccctgagggtgataccaccactccaggctgaaagctggcaggcttgagaccctgggagagctggccctctgactcctgggacttcttattctatcctagtatttcctcagctgagtgcatggggc

SEQ ID NO: 11221 - protein, 107 aa, Homo sapiens
MLLEMGGQNDQRSGSLHLRGSRVTSFKVWPGTPPIQPYAAQDWLNSSTLHCCSPMTRHFPPATAGSPVTPQAAQMPGRSCWCVLAGVSKEPEPAGDTPISVSGEKDR

SEQ ID NO: 11222 - DNA, 767 bp, Homo sapiens
agctatgcgcctcgtgcctgggagccttagggccacacggaagggtagaaatcagtttcaggtcaggaggtctggaacagctttgttaaacccagtttttttcctatgaaaatggctgcagacactgggggagggagagggtggccctgatcccgatgactctgaaacatgcttggccttccccagagattcctgctcccagcccaggcccagacggcaacagaagctcatggaatggcagactctggacatgctcctagagatgggaggtcaaaatgatcaacgttcagggtcccttcatctcagagggtctcgagtcacctcatttaaagtgtggcctgggacacctcctatccagccatacgccgcccaggactggctcaacagctccaccctccactgctgttcacccatgacacgtcacttcccacccgccactgctggctcacctgtgacaccccaggcagctcagatgcccggcaggtcctgctggtgtgtgttagccggggtctccaaagaaccagagccagcaggggacacacccatctctgtatctggagaaaaagatcgatgagaaggaatctgctcctgtgatgatggaggctgacaagtcccgagagccacggttggcaccctggagacccctgagggtgataccaccactccaggctgaaagctggcaggcttgagaccctgggagagctggccctctgactcctgggacttcttattctatcctagtatttcctcagctgagtgcatggggc

SEQ ID NO: 11223 - protein, 114 aa, Homo sapiens
MEWQTLDMLLEMGGQNDQRSGSLHLRGSRVTSFKVWPGTPPIQPYAAQDWLNSSTLHCCSPMTRHFPPATAGSPVTPQAAQMPGRSCWCVLAGVSKEPEPAGDTPISVSGEKDR

SEQ ID NO: 11224 - DNA, 391 bp, Homo sapiens
tgggtccagggcagcgacctagtccatttgtccttttcgaagtgtggcctgggacacctcctatccagccatacgccgcccaggactggctcaacagctccaccctccactgctgttcacccatgacacgtcacttcccacccgccactgctggctcacctgtgacaccccaggcagctcagatgcccggcaggtcctgctggtgtgtgttagccggggtctccaaagaaccagagccagcaggggacacacccatctctgtatctggagaaaaagatcgatgagaaggaatctgctcctgtgatgatggaggctgacaagtcccgagagccacggttggcaccctggagacccctgagggtgataccaccactccaggctgaaagctggc

SEQ ID NO: 11225 - protein, 53 aa, Homo sapiens
MTRHFPPATAGSPVTPQAAQMPGRSCWCVLAGVSKEPEPAGDTPISVSGEKDR

SEQ ID NO: 11226 - DNA, 547 bp, Homo sapiens
tgaagggacaggatggagcgggagcggcgccaaagcacggggagaaccagaggccgcaggaatggcagactctggacatgctcctagagatgggaggtcaaaatgatcaacgttcagggtcccttcatctcagagggtctcgagtcacctcatttaaaggtgggaactggggatcctggaacctcccctgcaccccagatgcttctggggcccttgagaacttgccctgagctgtcacctggcctagactcccagccactttcagggcacagagaaactgccctcactctgaaaatgtggagaccgggacccagagagtgtggcctgggacacctcctatccagccatacgccgcccaggactggctcaacagctccaccctccactgctgttcacccatgacacgtcacttcccacccggcctgctgcaccctggggaggggacccagtgcagtgatgcccaagttccagcgttcagactgcctgggagccctgagactccctgacccagcaggacgccccatcctgggtgagggggagagtgggg

SEQ ID NO: 11227 - protein, 99 aa, Homo sapiens
MINVQGPFISEGLESPHLKVGTGDPGTSPAPQMLLGPLRTCPELSPGLDSQPLSGHRETALTLKMWRPGPRECGLGHLLSSHTPPRTGSTAPPSTAVHP

SEQ ID NO: 11228 - DNA, 559 bp, Homo sapiens
ggtggccctgatcccgatgactctgaaacatgcttggccttccccagagattcctgctcccagcccaggcccagacggcaacagaagctcatggccccagcctccgcgggaagacccaattacagaagagagaagtatgtggagacccttggctgaggttgggggtcctggaagctggaggggagtgaagggacaggatggagcgggagcggcgccaaagcacggggagaaccagaggccgcaggaatggcagactctggacatgctcctagagatgggaggtcaaaatgatcaacgttcagggtcccttcatctcagagggtctcgagtcacctcatttaaagtgtggcctgggacacctcctatccagccatacgccgcccaggactggctcaacagctccaccctccactgctgttcacccatgacacgtcacttcccacccgccactgctggctcacctgtgacaccccaggcagctcagatgcccggcaggtcctgctggtaagagggaggcaggaacttgtcctgtctgggacccgggcattgctgggcgccg

SEQ ID NO: 11229 - protein, 163 aa, Homo sapiens
MTLKHAWPSPEIPAPSPGPDGNRSSWPQPPREDPITEERSMWRPLAEVGGPGSWRGVKGQDGAGAAPKHGENQRPQEWQTLDMLLEMGGQNDQRSGSLHLRGSRVTSFKVWPGTPPIQPYAAQDWLNSSTLHCCSPMTRHFPPATAGSPVTPQAAQMPGRSCW

SEQ ID NO: 11230 - DNA, 2296 bp, Homo sapiens
agcccctaaaccagcctcccctcccccgtgggcagattgttcgagggtcctggagcctgaatgatgggccctcggcttgcccacccccatccccagtcatcaatcaccatttgagaaatgcccactgccagggacatgggagggcagagggtagctcgcgggtgcgtggcccctatctcctcaagctggtttagacccttctggctcagcctcaccagattcctaggatgagcactggcttcaaatcccccaagtgctggtcccttcgtgtccccgaaagaggctgctcgcgtgggcaaaggccccgaggcgtcgagtgcgccttccagggcagtgcggaagctccctgccctcctccttcctccccacttctgcctcctcctcccccagtgttcacttgaagcaaattctagtgggctttttttttttcaatactgtttcaaaacagttgttacagcaaataactgcagacgggtctgctggacgcggtggagaggggctggcagctgcccagcacaggcgcctggccgctgggcagctcccgcaataccaaaataagctcccgagttcccctggaagacttgggccgccgggagctcaggctggcgatctgctcagaggaaacctccctactttccttttttactcttcctgctgtccagagctaacaaatgtttttaatttcagaggaacatggtgtggggatctgcagacttgccttccactggggagagggccagcgaggggacagagggggaggaaaggagaggggataatagacccgaggtcagtgttgatgctggagggcccaggtctctgaagttcctgcagctttgcagaaggtccccggctccagcccaagcagggagccaggttgggggtgtgggaaggcagaagtcccagggatcctgggggaggctcaggttgtacctgaaggccacagtctcctcgacagacctcggacgaggttgtaagtgttttaaagaaactagagcagcagagaagagagactcagaagcccgtggcacggctttctcggcgtcccctccagcgagggggtctccattgctgcagttgccggttttgtccaaccaggaggttgacccgaaacagccctccgtcttcctgcccatgaggatgaggacaggaagccagacccgggagagaaagcccagatcagacagatgggggttgggagggcctagtggctgaaactgccctgcttggggacaatgctcaggcaggaccaatccaaacgagggcactgcttatgtggtccttccggagcatcctccaaggcagagcctggcttcgggccctccctgcaaggacacctgcctccactccctgccagaccaggcctggctgcagaggcggaggggcggcagggctgcctgtctccactgtttggcggtgtttacacgtgtcgctgtcagggtgtctggacagtgggggtcgggggcctcccgggcccagacttccccaggcctattctcacactggtgagagggccctaggggaagggtgtgggctgggtggcggggccaggccagctgagacctacaggaccgtggagcatttaggtctcccacccaactccacccggtcctctgagcatcagttacagagcccaggcagcaggagggcagggcccagccccttatcacccatcctcaaggcaggcaggaaccctgaaggcagcttccaccaggggttcccttagcccccaccctccaaaagccccagaccctgccaggcctcaccctgccagcatcgtggccccagctgacggctcccaagggcaggtgctggcaacacaagcaggagccctcggggcatcccgcagggcacacaccaggtcgccctgggctccccaagcacctcccagacccagcccttgggtgggtcctggcccacaaacccccacgccctgcccctgagatgagccccaccgcccacctgccctccagccctggagacctttctcccccttggccatggctcccatggggaggctgcaggccctccctgggctggaccagaggggacagactgtctctcccctgcgacttctgggggcactggagtccttggcctggttaccttcagcatttatagccctccagtgagttattcctcggagttctcacagagcagcatgcgcctgcggcaaagccctcacctccagcccctggaccacctgactgctgcctcccgcctggcgccaaacacggccaccgcctcttttgttaacaggacagttgatccattaaattaaaaatcattcaatagattc

SEQ ID NO: 11231 - protein, 172 aa, Homo sapiens
MVWGSADLPSTGERASEGTEGEERRGDNRPEVSVDAGGPRSLKFLQLCRRSPAPAQAGSQVGGVGRQKSQGSWGRLRLYLKATVSSTDLGRGCKCFKETRAAEKRDSEARGTAFSASPPARGSPLLQLPVLSNQEVDPKQPSVFLPMRMRTGSQTRERKPRSDRWGLGGPSG

SEQ ID NO: 11232 - DNA, 766 bp, Homo sapiens
cagaactgttgtggaggggaagaggacggcgaaggttccgaagggaagggggctgcccccactgaaaacgaagcttccagtcacagccccttcattatttatcaggacccaggggatgaggtggcaggggagggggctgcatggagggagtgccctcaccctcgtccccagcgcctgccccctcccgaccaggcctgggctgaggcccagggtaagggggctgaggcaggccacagaggagcaagacttgtcaggggccagacctgggtaggaggattgtcctccaggcacacacggcccccagccccccagcctgtcgaactgggctctcccagaaggtccccggctccagcccaagcagggagccaggttgggggtgtgggaaggcagaagtcccagggatcctgggggaggctcaggttgtacctgaaggccacagtctcctcgacagacctcggacgaggttgtaagtgttttaaagaaactagagcagcagagaagagagactcagaagcccgtggcacggctttctcggcgtcccctccagcgagggggtctccattgctgcagttgccggttaccttcagcatttatagccctccagtgagttattcctcggagttctcacagagcagcatgcgcctgcggcaaagccctcacctccagcccctggaccacctgactgctgcctcccgcctggcgccaaacacggccaccgcctcttttgttaacaggacagttgatccattaaattaaaaatcattca

SEQ ID NO: 11233 - protein, 51 aa, Homo sapiens
MRWQGRGLHGGSALTLVPSACPLPTRPGLRPRVRGLRQATEEQDLSGARPG

SEQ ID NO: 11234 - DNA, 480 bp, Homo sapiens
agccagcagcctcttcgccgcggcgccctagctgcagggacccgcggggacgagaacgggaggcggcgagcagtgcggctgggttcccccggctgccccgggccaagcgtggccgggacgaccatggacccgcacagcggccgctggctcggtgcgcggccgcccgccgagaagcccagcctccagggcagccctcttcccggtggctttgatatgagtgtcgagggaggtcagggtaggggcagctaccacgcctgaagccctagaggtcaccaggcggcgcgggtagattcgggggaagcgcgcagggctgcgctagggacccgccgggtcaccctggtacatgggtggcttttgtttacagtttgttctaaacatcagaaatgtttgtcgcttttaaaaacaaaattggcagtaacagttattattggtagcttgatgaactgtgaatactaataaaattatatctgctttaatggg

SEQ ID NO: 11235 - protein, 44 aa, Homo sapiens
MDPHSGRWLGARPPAEKPSLQGSPLPGGFDMSVEGGQGRGSYHA

SEQ ID NO: 11236 - DNA, 9955 bp, Homo sapiens
gataacttctacctgcgcaacctgccgccccagcccacgctgctgccggccaaccacaacttccccagcgtggcccgggccgcccctgcccaccccatgggctcctgcagccgggatcgagaccggggtgaggcaggctccctgcagaagggccccaaggacttcgaccgcttcctcgtgggcaaagagctgggcagagagaaggcgggcaaggccgctgagggcaaggagcggccagcggcagaggaggacggtggcaaggagcggcacaagctggtgctgcccgtgccagccgacgggcactgcagggagggcggccccgcaccccgaggggcctgcgagggccgccccaagcacctcacctcctgcctcctcaacaccaaggtgctcaacggcgagatgggcagggctgcgctagccagctgtgcagggggcatgctggggcggcctggcacgggggtggtgacctccgggcgctgtgcaaaggaggcagcaggccccccggagcccgggccggccttcagcgagtgcctggagcggcggcagatgctacaccacaccgcatcctacgccgggccacccccgcccctcagcacagccgccggctccttcccctgcctgcagctgcacgggggccctgacgggctctgcccgctgcaggacaaagccccccgggacctaaaggccagcgggcccaccttcgtgccttctgtgggacacctggccgacaagggccgccccttccaggccgccgaggcctgtgccgtggcaggggagggcaaggaccggcacctggagggaaccatggcccccgaccacgctgcaccctatggagtctcctatgcccacctgaaggccgagggcaagggcgagcggcggcctgggggctttgaggcggccctcaacccccggctaaagggcctcgactatctcagcagcgcaggccccgaggcctccttccccggactccctaaaagcggtctggacaaaagcggctacttcgagttgcccacctcttcacaggactgtgcccggcctggtcaccaggacccgctgggcgggaaggccccccaggcctgctgcactttagataagactgttggcaaggaagccccggccggccccccaggggcacagaaggtggcccgcatcaggcaccagcagcacttgatggccgccgaggtggagcaggggggcattggggctgaggccaagcgcaagtccctggagctggcatccctgggctacagtgggccccacctgcccccatggggtgtccaggcaggccagggcaccgccatggccatcagcgaggagcgcaaggctggcgcctacctggacccctttggcagtggcctgcagcaggcggctcttctgccccaggaactgcctgcgccgccggacgaggtctcagccatgaagaacctgctcaaatacagcagccaggccctggtggtgggccagaaagcacccttggtgggcctgggtggcctcaaggccagctgcatccagcaggaagcaaagttcctgtcctctaagggcccaggccagtcggagaggccggactgtgcccgcagcagggagcacgacaccacgcacggcgacggggaggtgcggcagccccctgtgggcattgcagtggccttggcccggcagaaggacacagtgagccggtctgaggcagcctacggcaccaacactgcgcggcagggccgggccgcccccgccttcaaaggtggcggtgggccccgttccacacacgcgctggacctggaggctgaggaggagaggacgaggctatgtgatgaccgcctggggcttgccagccgcgagctgctgctgcaggacagcaaagaccgcgtagagttcgcccggatccacccaccgagcagctgccctggggacctggccccccacctcatgatgcagagcggccagctgggcggggacccagccccccacacccacccccatcccccctggctgccccgcacccgcagcccctccctgtggatgggggggcactcctacggcctggggcaccctgccctgcaccagaacctgccccccggcttccccgcctccgtggctggccctgtgccctctgtcttccccctcccacaggacgcccccacacagctggtcatcctgccctcagagcccacaccccacagcgccccccacgcacttgcggatgtcatggaccaggcgtcactgtggccccccatgtacgggggccggggccccgcctctcacatgcagcacccgggccagctccctgtgtactcgaggccgcagctcctccggcagcaggagctctatgctttgcagcagcagagggccgcccagttccagcggaagcccgaagaccagcacctggatctggaggagcccgcccaggagaaggccccaaagtccacccacaagccagttgccttaacccccacggccccgggcgccccctcacccgctgcaggccccaccaagctgccaccttgctgccatccgcccgacccaaagccccccgccagctcccccaccccaccacctcggcccagcgccccgtgcactttaaatgtctgccctgccagcagccccgggcctggctcccgggtgcgcagcgccgaggaaaagaatggggagggtcagcagtccacggccgacatcatcacatccgaaccagtggcacgtgctcactctgttgcccacgctggtctcgaattcctggcctcaaatgatccatccacctcagcctcccaaagttttgggattacagacctgcctcccggatacctgcgccccatggctggcctgggcttctccctaccctcagacgtgcactcttctaacctcgaggaccctgaaactatgcaaaccaccgccccgggggcccagcctgagcccacaaggacattcctgcctggggagccgcctccctgcagccccaggagcctggaggagcccgggctgctctcaggggccagggaggccacccaggaccttgccgccaccccctaccctaccgagcggggaccccaggggaaggcagcggaccccagcccactagaggggctacaagaactgcaatgtgcggccctcctggaggcagggggccccgaggccaccggccaggctcattctactcagggaggggcacgagaagagaggagcagggaggagggggagcaggggccctcgtcaggggcctcctcccaagtcctggagcagcgagcagggagtccgggtgcccttgaggacgagggggagcagccggcccctgaggaggacgagctggaggaagacgagctggggcagcagagcatggaggactcagaggaggactgtggcggagctcccgacaacagccacccacccagggcgctaccaggcctggatgccttggtggccgccaccatcaacctgggggacctgcccagcgacagcccaccggaccctcagcccccagcggcctctgggccccccagcacagtccccctgcctcatagctcagggattcatgggatcgctctgctcagcgagctggctgacctggcaatccagcggcagaggagtgagaggactgtgccagaggaggaagaggacgtgctagccttcaacctgcagcacctggccacgctggccacagcctggtccctggtggaggccgctggcctggacagctccactgccccagcgcagccgcccacagccaacccctgcagcggccccaggctcaccccccgcatgcagatcctgcagcgcaaggacacctggacccccaagaccaagcctgtgtgccccctgaaggccgccatcgaccggctggacacgcaggaggtggggatgcgcgtgcggctggcggagctgcagcggcgctacaaggagaagcagcgggagctggcccgcctgcagcgcaagcacgaccatgagagagacgagagttcacggagccctgcacggcgggggcctggccggccgaggaagcgcaaacactcaagctcgctgcctgccccacgtcccacggggccgctccccaggagcgatggcaagaaagtcaaggcggtgcggacaagcctgggtctgctgtgtgcggagctgcgaggaggcagtgggggcgagcctgcgaagaagcgaagcaagctggagaggagcgtctatgcgggcctgcagactgcctccgtggagaaggcgcagtgtaagaagagcagctgtcagggcgggctggcgccctccgtggcccacagggtggcccagctgaaacccaaggtcaagagcaaagggctgcccacaggcctcagctctttccagcagaaggaggctacccccggggggcgcatccgggagaagctgtcccgagccaagagtgccaaggtgtctggggccacacggcacccacagcccaagggccacggcagccgggagacacccaggtgcccagcccagccctccgtggctgcgtcccaggaggcaggcaatggctatgacagtgaggactgcgagggtctcctggggacagaggcaccacccagggaagcagggctgctgctgcacaccggggccagtgtggccgtgctggggccctcaccctcctctgtggtcaagatggaggccaaccagaaggccaagaagaagaaggagaggcaggggttgctaggggcctgccgcctgtccagccctgagagtgaggtcaagatcaagaggcggtcggtgaaggccaaggtgggcaccaccctggagcgggccccagggcagaggcccccaggtgcgctgggcaagaagaaagccaagggcaaggccaagggcagcctgcgggcagagccgggggccacccccagcagggacgccctcttcaacccctctcgggccttcgcctgccgtgaggagggcagccagctggccagtgagcgcctcaagagggccacgcgcaagggcacagtgctgcagccagtgctgcggcggaagaacggggccctgtccatcacgctggccacacgcaacgccaaggccatcctggggaagggccggaagctgagcaaggtgaagcacaaggccggcaagcagggcaagggccgggccgtgagccgcctgctggaaagcttcgccgtggaggaagactttgagttcgacgacaacagcagcttctcggaagaggaggaggacgaggaggaagaggaggaggacagcggccctctgagcgcagagcagagcgccgccctagcgcgctcgtgtgccatccacaaggaggacctgcgggacgggctgcccgtgctcatccccaaggaggatagcctgctgtacgcgggcagcgtcaggaccctgcagccacccgacatctatagcatcgtcatcgagggcgagaggggcaaccggcagaggatctactcactggagcagctgctgcaggaagcggttctcgatgtgcggccacagtccagccggtacctcccgcccggcacgcgggtctgcgcctactggagtcagaagtctcgatgtctgtacccgggcaacgtggtccggggggcctccggtgacgaagatgaggacctggactcagtagtggtggaatttgacgatggggatacaggccacatcgccgtctccaacgtcaggctgctgccccctgacttcaagatccagtgcacagagccctctccagccctgctagtgtctagcagctgccggaggaccaagaaggtatccagtgaggcacccccgcctagtgaagccgccacccccagcctgtcccccaaagcacaggacggccccgaagctttgaagacacctgggaaaaaatccattagcaaagacaaagctggtaaagccgaactcctaacctcaggtgccaaatcccccacgggggcctccgaccacttcctgggccgccgtggcagccccttgctgagctggtccgcggtggcgcagaccaagcggaaggcggtggcagcggccagcaaggggccgggggtgctgcagaacctcttccagctcaacggcagcagcaagaagctgcgggcccgcgaggccctgttccccgtgcacagcgtggccacacccatatttggcaacggcttccgcgccgactccttcagcagcctggccagctcctacgcgcccttcgtcggggggaccgggccgggcctccccaggggagcccacaagctgctgcgggctaagaaggccgagagggtggaggccgagaagggtgggcggcggcgggcgggcggtgagttcctggtcaagctggaccacgagggtgtgacctcccccaagaacaagacctgcaaggcgttgctcatgggggacaaggacttcagccccaagctcgggcggcccctgcccagccccagctatgtgcacccggcccttgtgggcaaggacaagaaggggcgggcacccatccccccgctgcccatggggctggcgctgcgcaagtacgcgggccaggcagagttcccgctgccctacgacagcgactgccacagctccttctcggacgaggacgaggacgggccggggctggcggccggcgtgccctcccgcttcctcgcccgcctgtccgtgtcctcttcctcctctggctcgtccacctcctcctcctcaggctccgtgtccacctccagcctctgctcctccgacaacgaggactcgtcctacagctcagacgacgaggacccggctctgctgctgcagacctgcctcacccaccccgtgcccaccctcctggcccagcccgaggccctgcgctccaagggcagcggccctcacgcgcatgcccagcgctgcttcctgtccagggccacggtggctggcaccggtgcgggctcaggccccagcagcagcagcaaatccaagctcaagcgcaaagaggccctgagcttctccaaagccaaagagctctcccggaggcagcggccgccctccgtggaaaaccggccaaagatctcagccttcctgcccgcccggcagctctggaagtggtcggggaatcccacacagcggcgtggcatgaaggggaaggcccggaagctgttctacaaggccatcgtgcggggcgaggagaccctgcgtgtcggggactgtgccgtcttcctgtcagctgggcggcccaacctcccctacatcggccgcatcgagagcatgtgggagtcgtggggcagcaacatggtggtcaaggtcaagtggttctaccaccctgaggagaccaagctgggcaagaggcagtgcgacggcaagaatgcgctgtaccagtcctgccacgaggatgagaacgacgtgcagaccatctcccacaagtgccaggtcgtggcgcgcgagcagtatgagcagatggcccggagccgcaagtgccaggaccggcaggacctctactacctggcgggcacctacgaccccaccaccgggcgcctggtgacggctgatggcgtgcccatcctatgctgagccgcccaccgcagatgcctcccacgtgcgccagggaccctgtgtgcggagcctggcgtcggccaagccaccgggcaggaggcagccccggcctcccaagggcgcatctgagcaaatatgcaaaagcccacagggcaagacccaggctttcttacggttttccctggaaagagcgctccaggtgtcggaatccagtcccgtcccatcctctgcggagggtcgggctgtggccctcatgggtccccggcccgccccacccacagcgccctccgtttcccgcaccggcagttcacgggagatttgaatccaagccatattccctagtacctccgactgtctcccaccagggaaagcagaaatcaggtgtgttgtctatttatttctctatgtaaatattgtatttctgcggggaaattttatggtaaaaagtggaaaagggtttttccccatccgcgtgacaaggtgtgtgtgagcgtgtatgtgtgtgcgcgtgtgtggcgatttttgtcctggggtttcctttggaaatgcactgttctcagcccagctgggttccaacgggggcacctgggacgacagaggcatctcggggcagggggcagaggccacgggagggtcaggtgggacccttgacggcaccctctgatctcttggggggacgaccgtgtaagatgaaagtcggtcaagtttatttgctttcagtgcatctcctagaaaagaagtgttggagcagggggtggtgatgaggggcccgtggggaaaggattcaagaggcaaagcccagaccagggagtgtgacaacagccgtgagcatctcacctgtgttcaaaacaagacaaagacgaacaaatattttaaagtattgataagaaaaagcaatgtttggattgtatctgctgaatcatattccaacctatatctgatttctgtttccggggccagttggtctgaggccaaggagtctggcctccacccagagcagggaggggctggcccctcgcccccctcaccctcgccgccctggcacactcgggaagcagggcccagctctgagcccctcctcacccctggggtcctaactttcctgaaagtagtaggtgccgtgagaaggggcagtttggccaggttcctgaactgggcagggctcggggcctatgagggcaggttcacagtcccaccagattctctcctcacccccaagcagaatgcatgcaaaagacaccccttttcccacccaccttattggtgcccccaaacccctggcctgctgcgtagatggtggtgaggccaggccagcagtgctgtggccaggggagaagaaaataaaacgcaggccctgcccttggggaaggcccctttctgggcccccttttccaccagccaaatctgcctggccctcggacccctctgcctgccccaacccctttggaggtttctcggccttttctgtgccacttggtggggcagatggcctgatgggctagtgcttggggcatagaatgagggtccccctgaccacctgagcccaaatcctggccccaggtgcaagcagcacccctcgagggctctgccccagtatccccagggaattcacacccctccccttctcccacagccaaggacagacaggctgcctggacctgagcccaacagccttcagcctcagaaacgcatggggggccacacactccttatatcctcccacactaaggttcccctggccccacgggagcttcaggaaagccccccaagttagccactgctctaggacgagctctgtgtcccccacaccacaggcctcgaagcagggtgctggtgggtgccctgtaccccaatcccaggtccccttggccccctatttttctcgggcccattggggcctgtttctcacctgctggctggaccccctgaagggccgttcccagaggctccccaggaggctcaaggctgggggcttatgttgtggtcgggggtccccgcctccagccccccgctcccacccccgagcctaccctttgtctcgcatgagtgcaatatttcattcccggtggttgtctggggaggtggttggacgaggtcctgcttgaggctcggggatcagaacgatgtcaagtgaagaaaaatgcacgggggcatgctgagccactggagttccagagagggccgaggagggtgcagccacggaggttggatcctctgctccgccgcctcgtcctcgtcccgcttctgctgggttccgctttgtccctggttttttcctttctttttctgtgtgcgtgcgaatggtgcggcccctcccctctcaccgtggttaacgtgacgaaggcacgattcctgtaaatgtgtaaactaaggggatggttggattttttttcaatgtaaacactaaaaacaaaatggacaaaaaaacacacaaaggttttatgaacagcagactctatgtaaaggcattttagtatcaaattttttattgataacttgcttaagaataaatatatggactattgtacaggtt

SEQ ID NO: 11237 - protein, 2447 aa, Homo sapiens
MGSCSRDRDRGEAGSLQKGPKDFDRFLVGKELGREKAGKAAEGKERPAAEEDGGKERHKLVLPVPADGHCREGGPAPRGACEGRPKHLTSCLLNTKVLNGEMGRAALASCAGGMLGRPGTGVVTSGRCAKEAAGPPEPGPAFSECLERRQMLHHTASYAGPPPPLSTAAGSFPCLQLHGGPDGLCPLQDKAPRDLKASGPTFVPSVGHLADKGRPFQAAEACAVAGEGKDRHLEGTMAPDHAAPYGVSYAHLKAEGKGERRPGGFEAALNPRLKGLDYLSSAGPEASFPGLPKSGLDKSGYFELPTSSQDCARPGHQDPLGGKAPQACCTLDKTVGKEAPAGPPGAQKVARIRHQQHLMAAEVEQGGIGAEAKRKSLELASLGYSGPHLPPWGVQAGQGTAMAISEERKAGAYLDPFGSGLQQAALLPQELPAPPDEVSAMKNLLKYSSQALVVGQKAPLVGLGGLKASCIQQEAKFLSSKGPGQSERPDCARSREHDTTHGDGEVRQPPVGIAVALARQKDTVSRSEAAYGTNTARQGRAAPAFKGGGGPRSTHALDLEAEEERTRLCDDRLGLASRELLLQDSKDRVEFARIHPPSSCPGDLAPHLMMQSGQLGGDPAPHTHPHPPWLPRTRSPSLWMGGHSYGLGHPALHQNLPPGFPASVAGPVPSVFPLPQDAPTQLVILPSEPTPHSAPHALADVMDQASLWPPMYGGRGPASHMQHPGQLPVYSRPQLLRQQELYALQQQRAAQFQRKPEDQHLDLEEPAQEKAPKSTHKPVALTPTAPGAPSPAAGPTKLPPCCHPPDPKPPASSPTPPPRPSAPCTLNVCPASSPGPGSRVRSAEEKNGEGQQSTADIITSEPVARAHSVAHAGLEFLASNDPSTSASQSFGITDLPPGYLRPMAGLGFSLPSDVHSSNLEDPETMQTTAPGAQPEPTRTFLPGEPPPCSPRSLEEPGLLSGAREATQDLAATPYPTERGPQGKAADPSPLEGLQELQCAALLEAGGPEATGQAHSTQGGAREERSREEGEQGPSSGASSQVLEQRAGSPGALEDEGEQPAPEEDELEEDELGQQSMEDSEEDCGGAPDNSHPPRALPGLDALVAATINLGDLPSDSPPDPQPPAASGPPSTVPLPHSSGIHGIALLSELADLAIQRQRSERTVPEEEEDVLAFNLQHLATLATAWSLVEAAGLDSSTAPAQPPTANPCSGPRLTPRMQILQRKDTWTPKTKPVCPLKAAIDRLDTQEVGMRVRLAELQRRYKEKQRELARLQRKHDHERDESSRSPARRGPGRPRKRKHSSSLPAPRPTGPLPRSDGKKVKAVRTSLGLLCAELRGGSGGEPAKKRSKLERSVYAGLQTASVEKAQCKKSSCQGGLAPSVAHRVAQLKPKVKSKGLPTGLSSFQQKEATPGGRIREKLSRAKSAKVSGATRHPQPKGHGSRETPRCPAQPSVAASQEAGNGYDSEDCEGLLGTEAPPREAGLLLHTGASVAVLGPSPSSVVKMEANQKAKKKKERQGLLGACRLSSPESEVKIKRRSVKAKVGTTLERAPGQRPPGALGKKKAKGKAKGSLRAEPGATPSRDALFNPSRAFACREEGSQLASERLKRATRKGTVLQPVLRRKNGALSITLATRNAKAILGKGRKLSKVKHKAGKQGKGRAVSRLLESFAVEEDFEFDDNSSFSEEEEDEEEEEEDSGPLSAEQSAALARSCAIHKEDLRDGLPVLIPKEDSLLYAGSVRTLQPPDIYSIVIEGERGNRQRIYSLEQLLQEAVLDVRPQSSRYLPPGTRVCAYWSQKSRCLYPGNVVRGASGDEDEDLDSVVVEFDDGDTGHIAVSNVRLLPPDFKIQCTEPSPALLVSSSCRRTKKVSSEAPPPSEAATPSLSPKAQDGPEALKTPGKKSISKDKAGKAELLTSGAKSPTGASDHFLGRRGSPLLSWSAVAQTKRKAVAAASKGPGVLQNLFQLNGSSKKLRAREALFPVHSVATPIFGNGFRADSFSSLASSYAPFVGGTGPGLPRGAHKLLRAKKAERVEAEKGGRRRAGGEFLVKLDHEGVTSPKNKTCKALLMGDKDFSPKLGRPLPSPSYVHPALVGKDKKGRAPIPPLPMGLALRKYAGQAEFPLPYDSDCHSSFSDEDEDGPGLAAGVPSRFLARLSVSSSSSGSSTSSSSGSVSTSSLCSSDNEDSSYSSDDEDPALLLQTCLTHPVPTLLAQPEALRSKGSGPHAHAQRCFLSRATVAGTGAGSGPSSSSKSKLKRKEALSFSKAKELSRRQRPPSVENRPKISAFLPARQLWKWSGNPTQRRGMKGKARKLFYKAIVRGEETLRVGDCAVFLSAGRPNLPYIGRIESMWESWGSNMVVKVKWFYHPEETKLGKRQCDGKNALYQSCHEDENDVQTISHKCQVVAREQYEQMARSRKCQDRQDLYYLAGTYDPTTGRLVTADGVPILC

SEQ ID NO: 11238 - DNA, 833 bp, Homo sapiens
gccttggcctgggccgcagccactcccaggcccagggaccagactctcaggcagccctgggccaggccccacctgctcatgggtcgtcgcccgcgttcctgcaggttctcgatgtgcggccacagtccagccggtacctcccgcccggcacgcgggtctgcgcctactggagtcagaagtctcgatgtctgtacccgggcaacgtggtccggggggcctccggtgacgaagatgaggacctggactcagtagtggtggaatttgacgatggggatacaggccacatcgccgtctccaacgtcaggctgctgccccctgacttcaagatccagtgcacagagccctctccagccctgctagtgtctagcagctgccggaggaccaagaaggtatccagtgaggcacccccgcctagtgaagccgccacccccagcctgtcccccaaagcacaggacggccccgaagctttgaagacacctgggaaaaaatccattagcaaagacaaagctggtaaagccgaactcctaacctcaggtgccaaatcccccacgggggcctccgaccacttcctgggccgccgtggcagccccttgctgagctggtccgcggtggcgcagaccaagcggaaggcggtggcagcggccagcaaggggccgggggtgctgcagaacctcttccagctcaacggcagcagcaagaagctgcgggcccgcgaggccctgttccccgtgcacagcgtggccacacccatatttggcaacggcttccgcgccgactccttcagcagcctggccagctcctacgcgcccttcgtcggggggaccgggccgggc

SEQ ID NO: 11239 - protein, 57 aa, Homo sapiens
MGRRPRSCRFSMCGHSPAGTSRPARGSAPTGVRSLDVCTRATWSGGPPVTKMRTWTQ

SEQ ID NO: 11240 - DNA, 453 bp, Homo sapiens
gggtgctgcagaacctcttccagctcaacggcagcagcaagaagctgcgggcccgcgaggccctgttccccgtgcacagcgtggccacacccatatttggcaacggcttccgcgccgactccttcagcagcctggccagctcctacgcgccctccagcctctgctcctccgacaacgaggactcgtcctacagctcagacgacgaggacccggctctgctgctgcagacctgcctcacccaccccgtgcccaccctcctggcccagcccgaggccctgcgctccaagggcagcggccctcacgcgcatgcccagcgctgcttcctgtccagggccacggtggctggcaccggtgcgggctcaggccccagcagcagcagcaaatccaagctcaagcgcaaagaggccctgagcttctccaaagccaaagagctctcccggaggcagcggccgc

SEQ ID NO: 11241 - protein, 34 aa, Homo sapiens
MPSAASCPGPRWLAPVRAQAPAAAANPSSSAKRP

SEQ ID NO: 11242 - DNA, 943 bp, Homo sapiens
ctccgtttcccgcaccggcagttcacgggagatttgaatccaagccatattccctagtacctccgactgtctcccaccagggaaagcagaaatcaggtgtgttgtctatttatttctctatgtaaatattgtatttctgcggggaaattttatggtaaaaagtggaaaagggtttttccccatccgcgtgacaaggtgtgtgtgagcgtgtatgtgtgtgcgcgtgtgtggcgatttttgtcctggggtttcctttggaaatgcactgttctcagcccagctgggttccaacgggggcacctgggacgacagaggcatctcggggcagggggcagaggccacgggagggtcaggtgggacccttgacggcaccctctgatctcttggggggacgaccgtgtaagatgaaagtcggtcaagtttatttgctttcagtgcatctcctagaaaagaagtgttggagcagggggtggtgatgaggggcccgtggggaaaggattcaagaggcaaagcccagaccagggagtgtgacaacagccgtgagcatctcacctgtgttcaaaacaagacaaagacgaacaaatattttaaagtattgataagaaaaagcaatgtttggattgtatctgctgaatcatattccaacctatatctgatttctggttccgctttgtccctggttttttcctttctttttctgtgtgcgtgcgaatggtgcggcccctcccctctcaccgtggttaacgtgacgaaggcacgattcctgtaaatgtgtaaactaaggggatggttggattttttttcaatgtaaacactaaaaacaaaatggacaaaaaaacacacaaaggttttatgaacagcagactctatgtaaaggcattttagtatcaaattttttattgataacttgcttaagaataaatatatggactattgtacaggt

SEQ ID NO: 11243 - protein, 97 aa, Homo sapiens
MRGPWGKDSRGKAQTRECDNSREHLTCVQNKTKTNKYFKVLIRKSNVWIVSAESYSNLYLISGSALSLVFSFLFLCACEWCGPSPLTVVNVTKARFL

SEQ ID NO: 11244 - DNA, 957 bp, Homo sapiens
tggcctccacccagagcagggaggggctggcccctcgcccccctcaccctcgccgccctggcacactcgggaagcagggcccagctctgagcccctcctcacccctggggtcctaactttcctgaaagtagtaggtgccgtgagaaggggcagtttggccaggttcctgaactgggcagggctcggggcctatgagggcaggttcacagtcccaccagattctctcctcacccccaagcagaatgcatgcaaaagacaccccttttcccacccaccttattggtgcccccaaacccctggcctgctgcgtagatggtggtgaggccaggccagcagtgctgtggccaggggagaagaaaataaaacgcaggccctgcccttggggaaggcccctttctgggcccccttttccaccagccaaatctgcctggccctcggacccctctgcctgccccaacccctttggaggtttctcggccttttctgtgccacttggtggggcagatggcctgatgggctagtgcttggggcatagaatgagggtccccctgaccacctgagcccaaatcctggccccaggtgcaagcagcacccctcgagggctctgccccagtatccccagggaattcacacccctccccttctcccacagccaaggacagacaggctgcctggacctgagcccaacagccttcagcctcagaaacgcatggggggccacacactccttatatcccctcccctctcaccgtggttaacgtgacgaaggcacgattcctgtaaatgtgtaaactaaggggatggttggattttttttcaatgtaaacactaaaaacaaaatggacaaaaaaacacacaaaggttttatgaacagcagactctatgtaaaggcattttagtatcaaattttttattgataacttgcttaagaataaatatatggactattgtacaggt

SEQ ID NO: 11245 - protein, 109 aa, Homo sapiens
MRAGSQSHQILSSPPSRMHAKDTPFPTHLIGAPKPLACCVDGGEARPAVLWPGEKKIKRRPCPWGRPLSGPPFPPAKSAWPSDPSACPNPFGGFSAFSVPLGGADGLMG

SEQ ID NO: 11246 - DNA, 715 bp, Homo sapiens
gccgtgagaaggggcagtttggccaggttcctgaactgggcagggctcggggcctatgagggcaggttcacagtcccaccagattctctcctcacccccaagcagaatgcatgcaaaagacaccccttttcccacccaccttattggtgcccccaaacccctggcctgctgcgtagatggtggtgaggccaggccagcagtgctgtggccaggggagaagaaaataaaacgcaggccctgcccttggggaaggcccctttctgggcccccttttccaccagccaaatctgcctggccctcggacccctctgcctgccccaacccctttggaggtttctcggccttttctgtgccacttggtggggcagatggcctgatgggctagtgcttggggcatagaatgagggtccccctgaccacctgagcccaaatcctggccccaggtgcaagcagcacccctcgagggctctgccccagtatccccagggaattcacacccctcccctctcaccgtggttaacgtgacgaaggcacgattcctgtaaatgtgtaaactaaggggatggttggattttttttcaatgtaaacactaaaaacaaaatggacaaaaaaacacacaaaggttttatgaacagcagactctatgtaaaggcattttagtatcaaattttttattgataacttgcttaagaataaatatatggactattgtac

SEQ ID NO: 11247 - protein, 109 aa, Homo sapiens; identical to SEQ ID NO: 11245

SEQ ID NO: 11248 - DNA, 1085 bp, Homo sapiens
accagattctctcctcacccccaagcagaatgcatgcaaaagacaccccttttcccacccaccttattggtgcccccaaacccctggcctgctgcgtagatggtggtgaggccaggccagcagtgctgtggccaggggagaagaaaataaaacgcaggccctgcccttggggaaggcccctttctgggcccccttttccaccagccaaatctgcctggccctcggacccctctgcctgccccaacccctttggaggtttctcggccttttctgtgccacttggtggggcagatggcctgatgggctagtgcttggggcatagaatgagggtccccctgaccacctgagcccaaatcctggccccaggtgcaagcagcacccctcgagggctctgccccagtatccccagggaattcacacccctccccttctcccacagccaaggacagacaggctgcctggacctgagcccaacagccttcagcctcagaaacgcatggggggccacacactccttatatcctcccacactaaggttcccctggccccacgggagcttcaggaaagccccccaagttagccactgctctaggacgagctctgtgtcccccacaccacaggcctcgaagcagggtgctggtgggtgccctgtaccccaatcccaggtccccttggccccctatttttctcgggcccattggggcctgtttctcacctgctggctggaccccctgaagggccgttcccagaggctccccaggaggctcaaggctgggggcttatgttgtggtcgggggtccccgcctccagccccccgctcccacccccgagcctaccctttgtctcgcatgagtgcaatatttcattcccctctcaccgtggttaacgtgacgaaggcacgattcctgtaaatgtgtaaactaaggggatggttggattttttttcaatgtaaacactaaaaacaaaatggacaaaaaaacacacaaaggttttatgaacagcagactctatgtaaaggcattttagtatcaaattttttattgataacttgcttaagaataaatatatggactattgtacaggt

SEQ ID NO: 11249 - protein, 34 aa, Homo sapiens
MLWSGVPASSPPLPPPSLPFVSHECNISFPSHRG

SEQ ID NO: 11250 - DNA, 862 bp, Homo sapiens
gcctgctgcgtagatggtggtgaggccaggccagcagtgctgtggccaggggagaagaaaataaaacgcaggccctgcccttggggaaggcccctttctgggcccccttttccaccagccaaatctgcctggccctcggacccctctgcctgccccaacccctttggaggtttctcggccttttctgtgccacttggtggggcagatggcctgatgggctagtgcttggggcatagaatgagggtccccctgaccacctgagcccaaatcctggccccaggtgcaagcagcacccctcgagggctctgccccagtatccccagggaattcacacccctccctcccacccccgagcctaccctttgtctcgcatgagtgcaatatttcattcccggtggttgtctggggaggtggttggacgaggtcctgcttgaggctcggggatcagaacgatgtcaagtgaagaaaaatgcacgggggcatgctgagccactggagttccagagagggccgaggagggtgcagccacggaggttggatcctctgctccgccgcctcgtcctcgtcccgcttctgctgggttccgctttgtccctggttttttcctttctttttctgtgtgcgtgcgaatggtgcggcccctcccctctcaccgtggttaacgtgacgaaggcacgattcctgtaaatgtgtaaactaaggggatggttggattttttttcaatgtaaacactaaaaacaaaatggacaaaaaaacacacaaaggttttatgaacagcagactctatgtaaaggcattttagtatcaaattttttattgataacttgcttaagaataaatatatggactattgtacaggtt

SEQ ID NO: 11251 - protein, 65 aa, Homo sapiens
MHGGMLSHWSSREGRGGCSHGGWILCSAASSSSRFCWVPLCPWFFPFFFCVRANGAAPPLSPWLT

SEQ ID NO: 11252 - DNA, 3290 bp, Homo sapiens
gcgtgacgtcgcgcgggctcccgggcggggcgggtccggccgcctccgagcccggccggcagcccccggccttaaagcgcgggctgtccggaggggtcggctttcccaccgaggatttggcactctggtgagggaaaagggcgaaagagaaaagcgagcagccgtcctttcacagcctcagaaagtgctcgcttcccttcgggggctttcgcgaatcccgaggcaatctcggaggcggtatttgacctgtccaaagacgacttgatacctctataatgtaacagaaaaggtcagaaaatattaagcaagtagaagtgtggagcatattaagcaagatgaacatctcgggaagcagctgtggaagccctaactctgcagatacatctagtgactttaaggacctttggacaaaactaaaagaatgtcatgatagagaagtacaaggtttacaagtaaaagtaaccaagctaaaacaggaacgaatcttagatgcacaaagactagaagaattcttcaccaaaaatcaacagctgagggaacagcagaaagtccttcatgaaaccattaaagttttagaagatcggttaagagcaggcttatgtgatcgctgtgcagtaactgaagaacatatgcggaaaaaacagcaagagtttgaaaatatccggcagcagaatcttaaacttattacagaacttatgaatgaaaggaatactctacaggaagaaaataaaaagctttctgaacaactccagcagaaaattgagaatgatcaacagcatcaagcagctgagcttgaatgtgaggaagacgttattccagattcaccgataacagccttctcattttctggcgttaaccggctacgaagaaaggagaacccccatgtccgatacatagaacaaacacatactaaattggagcactctgtgtgtgcaaatgaaatgagaaaagtttccaagtcttcaactcatccacaacataatcctaatgaaaatgaaattctagtagctgacacttatgaccaaagtcaatctccaatggccaaagcacatggaacaagcagctatacccctgataagtcatcttttaatttagctacagttgttgctgaaacacttggacttggtgttcaagaagaatctgaaactcaaggtcccatgagcccccttggtgatgagctctaccactgtctggaaggaaatcacaagaaacagccttttgaggaatctacaagaaatactgaagatagtttaagattttcagattctacttcaaagactcctcctcaagaagaattacctactcgagtgtcatctcctgtatttggagctacctctagtatcaaaagtggtttagatttgaatacaagtttgtccccttctcttttacagcctgggaaaaaaaaacatctgaaaacactcccttttagcaacacttgtatatctagattagaaaaaactagatcaaaatctgaagatagtgcccttttcacacatcacagtcttgggtctgaagtgaacaagatcattatccagtcatctaataaacagatacttataaataaaaatataagtgaatccctaggtgaacagaataggactgagtacggtaaagattctaacactgataaacatttggagcccctgaaatcattgggaggccgaacatccaaaaggaagaaaactgaggaagaaagtgaacatgaagtaagctgcccccaagcttcttttgataaagaaaatgctttcccttttccaatggataatcagttttccatgaatggagactgtgtgatggataaacctctggatctgtctgatcgattttcagctattcagcgtcaagagaaaagccaaggaagtgagacttctaaaaacaaatttaggcaagtgactctttatgaggctttgaagaccattccaaagggcttttcctcaagccgtaaggcctcagatggcaactgcacgttgcccaaagattccccaggggagccctgttcacaggaatgcatcatccttcagcccttgaataaatgctctccagacaataaaccatcattacaaataaaagaagaaaatgctgtctttaaaattcctctacgtccacgtgaaagtttggagactgagaatgttttagatgacataaagagtgctggttctcatgagccaataaaaatacaaaccaggtcagaccatggaggatgtgaacttgcatcagttcttcagttaaatccatgtagaactggtaaaataaagtctctacaaaacaaccaagatgtatcctttgaaaatatccagtggagtatagatccgggagcagacctttctcagtataaaatggatgttactgtaatagatacaaaggatggcagtcagtcaaaattaggaggagagacagtggacatggactgtacattggttagtgaaaccgttctcttaaaaatgaagaagcaagagcagaagggagaaaaaagttcaaatgaagaaagaaaaatgaatgatagcttggaagatatgtttgatcggacaacacatgaagagtatgaatcctgtttggcagacagtttctcccaagcagcagatgaagaggaggaattgtctactgccacaaagaaactacacactcatggtgataaacaagacaaagtcaagcagaaagcgtttgtggagccgtattttaaaggtgatgaaagagagactagcttgcaaaattttcctcatattgaggtggttcggaaaaaagaggagagaagaaaactgcttgggcacacgtgtaaggaatgtgaaatttattatgcagatatgccagcagaagaaagagaaaagaaattggcttcctgctcaagacaccgattccgctacattccacccaacacaccagagaatttttgggaagttggttttccttccactcagacttgtatggaaagaggttatattaaggaagatcttgatccttgtcctcgtccaaaaagacgtcagccttacaacgcaatattttctccaaaaggcaaggagcagaagacatagacgttgaaacagaaacagaaggatgaaggacagttttttccttcttagttatttatagttaaagttggtactaaacattgatttttttgatcttctgtaaatggatttataaatcagttttctattgaaaatgtttgtgatattttgcttttgcacctttaaaacaataaggcgctttcattttgcactctaacttaagagtttttactttatgtagtgatacctaatacaattttgaaaatacaatagttgtagtctgtg

SEQ ID NO: 11253 - protein, 897 aa, Homo sapiens; identical to SEQ ID NO: 1848

SEQ ID NO: 11254 - DNA, 3231 bp, Homo sapiens
agacccgcacgcggaaccggcgcgggcacctggggagaaatggatggagaagggacctggctggaaagcctttgccccgctgctctgctccgcccataagaggacccctgaaatgtcccgtgcagtttgttcaagtcccctgtgtgatgaaatgtgcctctcgccttacccgtgtgagaatacctgtggtgtggcagcgagtattttggtgagcacctgcagtgtagtggtttatactaaggaatacacacaaattacaggcctttgagcccagaatgcaacttgggaggtatttgacctgtccaaagacgacttgatacctctataatgtaacagaaaaggtcagaaaatattaagcaagtagaagtgtggagcatattaagcaagatgaacatctcgggaagcagctgtggaagccctaactctgcagatacatctagtgactttaaggacctttggacaaaactaaaagaatgtcatgatagagaagtacaaggtttacaagtaaaagtaaccaagctaaaacaggaacgaatcttagatgcacaaagactagaagaattcttcaccaaaaatcaacagctgagggaacagcagaaagtccttcatgaaaccattaaagttttagaagatcggttaagagcaggcttatgtgatcgctgtgcagtaactgaagaacatatgcggaaaaaacagcaagagtttgaaaatatccggcagcagaatcttaaacttattacagaacttatgaatgaaaggaatactctacaggaagaaaataaaaagctttctgaacaactccagcagaaaattgagaatgatcaacagcatcaagcagctgagcttgaatgtgaggaagacgttattccagattcaccgataacagccttctcattttctggcgttaaccggctacgaagaaaggagaacccccatgtccgatacatagaacaaacacatactaaattggagcactctgtgtgtgcaaatgaaatgagaaaagtttccaagtcttcaactcatccacaacataatcctaatgaaaatgaaattctagtagctgacacttatgaccaaagtcaatctccaatggccaaagcacatggaacaagcagctatacccctgataagtcatcttttaatttagctacagttgttgctgaaacacttggacttggtgttcaagaagaatctgaaactcaaggtcccatgagcccccttggtgatgagctctaccactgtctggaaggaaatcacaagaaacagccttttgaggaatctacaagaaatactgaagatagtttaagattttcagattctacttcaaagactcctcctcaagaagaattacctactcgagtgtcatctcctgtatttggagctacctctagtatcaaaagtggtttagatttgaatacaagtttgtccccttctcttttacagcctgggaaaaaaaaacatctgaaaacactcccttttagcaacacttgtatatctagattagaaaaaactagatcaaaatctgaagatagtgcccttttcacacatcacagtcttgggtctgaagtgaacaagatcattatccagtcatctaataaacagatacttataaataaaaatataagtgaatccctaggtgaacagaataggactgagtacggtaaagattctaacactgataaacatttggagcccctgaaatcattgggaggccgaacatccaaaaggaagaaaactgaggaagaaagtgaacatgaagtaagctgcccccaagcttcttttgataaagaaaatgctttcccttttccaatggataatcagttttccatgaatggagactgtgtgatggataaacctctggatctgtctgatcgattttcagctattcagcgtcaagagaaaagccaaggaagtgagacttctaaaaacaaatttaggcaagtgactctttatgaggctttgaagaccattccaaagggcttttcctcaagccgtaaggcctcagatggcaactgcacgttgcccaaagattccccaggggagccctgttcacaggaatgcatcatccttcagcccttgaataaatgctctccagacaataaaccatcattacaaataaaagaagaaaatgctgtctttaaaattcctctacgtccacgtgaaagtttggagactgagaatgttttagatgacataaagagtgctggttctcatgagccaataaaaatacaaaccaggtcagaccatggaggatgtgaacttgcatcagttcttcagttaaatccatgtagaactggtaaaataaagtctctacaaaacaaccaagatgtatcctttgaaaatatccagtggagtatagatccgggagcagacctttctcagtataaaatggatgttactgtaatagatacaaaggatggcagtcagtcaaaattaggaggagagacagtggacatggactgtacattggttagtgaaaccgttctcttaaaaatgaagaagcaagagcagaagggagaaaaaagttcaaatgaagaaagaaaaatgaatgatagcttggaagatatgtttgatcggacaacacatgaagagtatgaatcctgtttggcagacagtttctcccaagcagcagatgaagaggaggaattgtctactgccacaaagaaactacacactcatggtgataaacaagacaaagtcaagcagaaagcgtttgtggagccgtattttaaaggtgatgaaagtattatgcagatatgccagcagaagaaagagaaaagaaattggcttcctgctcaagacaccgattccgctacattccacccaacacaccagagaatttttgggaagttggttttccttccactcagacttgtatggaaagaggttatattaaggaagatcttgatccttgtcctcgtccaaaaagacgtcagccttacaacgcaatattttctccaaaaggcaaggagcagaagacatagacgttgaaacagaaacagaaggatgaaggacagttttttccttcttagttatttatagttaaagttggtactaaacattgatttttttgatcttctgtaaatggatttataaatcagttttctattgaaaatgtttgtgatattttgcttttgcacctttaaaacaataaggcgctttcattttgcactctaacttaagagtttttactttatgtagtgatacctaatacaattttgaaaatacaat

SEQ ID NO: 11255 - protein, 867 aa, Homo sapiens; identical to SEQ ID NO: 1852

SEQ ID NO: 11256 - DNA, 3256 bp, Homo sapiens
cgcacgcggaaccggcgcgggcacctggggagaaatggatggagaagggacctggctggaaagcctttgccccgctgctctgctccgcccataagaggacccctgaaatgtcccgtgcagtttgttcaagtcccctgtgtgatgaaatgtgcctctcgccttacccgtgtgagaatacctgtggtgtggcagcgagtattttggtatttgacctgtccaaagacgacttgatacctctataatgtaacagaaaaggtcagaaaatattaagcaagtagaagtgtggagcatattaagcaagatgaacatctcgggaagcagctgtggaagccctaactctgcagatacatctagtgactttaaggacctttggacaaaactaaaagaatgtcatgatagagaagtacaaggtttacaagtaaaagtaaccaagctaaaacaggaacgaatcttagatgcacaaagactagaagaattcttcaccaaaaatcaacagctgagggaacagcagaaagtccttcatgaaaccattaaagttttagaagatcggttaagagcaggcttatgtgatcgctgtgcagtaactgaagaacatatgcggaaaaaacagcaagagtttgaaaatatccggcagcagaatcttaaacttattacagaacttatgaatgaaaggaatactctacaggaagaaaataaaaagctttctgaacaactccagcagaaaattgagaatgatcaacagcatcaagcagctgagcttgaatgtgaggaagacgttattccagattcaccgataacagccttctcattttctggcgttaaccggctacgaagaaaggagaacccccatgtccgatacatagaacaaacacatactaaattggagcactctgtgtgtgcaaatgaaatgagaaaagtttccaagtcttcaactcatccacaacataatcctaatgaaaatgaaattctagtagctgacacttatgaccaaagtcaatctccaatggccaaagcacatggaacaagcagctatacccctgataagtcatcttttaatttagctacagttgttgctgaaacacttggacttggtgttcaagaagaatctgaaactcaaggtcccatgagcccccttggtgatgagctctaccactgtctggaaggaaatcacaagaaacagccttttgaggaatctacaagaaatactgaagatagtttaagattttcagattctacttcaaagactcctcctcaagaagaattacctactcgagtgtcatctcctgtatttggagctacctctagtatcaaaagtggtttagatttgaatacaagtttgtccccttctcttttacagcctgggaaaaaaaaacatctgaaaacactcccttttagcaacacttgtatatctagattagaaaaaactagatcaaaatctgaagatagtgcccttttcacacatcacagtcttgggtctgaagtgaacaagatcattatccagtcatctaataaacagatacttataaataaaaatataagtgaatccctaggtgaacagaataggactgagtacggtaaagattctaacactgataaacatttggagcccctgaaatcattgggaggccgaacatccaaaaggaagaaaactgaggaagaaagtgaacatgaagtaagctgcccccaagcttcttttgataaagaaaatgctttcccttttccaatggataatcagttttccatgaatggagactgtgtgatggataaacctctggatctgtctgatcgattttcagctattcagcgtcaagagaaaagccaaggaagtgagacttctaaaaacaaatttaggcaagtgactctttatgaggctttgaagaccattccaaagggcttttcctcaagccgtaaggcctcagatggcaactgcacgttgcccaaagattccccaggggagccctgttcacaggaatgcatcatccttcagcccttgaataaatgctctccagacaataaaccatcattacaaataaaagaagaaaatgctgtctttaaaattcctctacgtccacgtgaaagtttggagactgagaatgttttagatgacataaagagtgctggttctcatgagccaataaaaatacaaaccaggtcagaccatggaggatgtgaacttgcatcagttcttcagttaaatccatgtagaactggtaaaataaagtctctacaaaacaaccaagatgtatcctttgaaaatatccagtggagtatagatccgggagcagacctttctcagtataaaatggatgttactgtaatagatacaaaggatggcagtcagtcaaaattaggaggagagacagtggacatggactgtacattggttagtgaaaccgttctcttaaaaatgaagaagcaagagcagaagggagaaaaaagttcaaatgaagaaagaaaaatgaatgatagcttggaagatatgtttgatcggacaacacatgaagagtatgaatcctgtttggcagacagtttctcccaagcagcagatgaagaggaggaattgtctactgccacaaagaaactacacactcatggtgataaacaagacaaagtcaagcagaaagcgtttgtggagccgtattttaaaggtgatgaaagagagactagcttgcaaaattttcctcatattgaggtggttcggaaaaaagaggagagaagaaaactgcttgggcacacgtgtaaggaatgtgaaatttattatgcagatatgccagcagaagaaagagaaaagaaattggcttcctgctcaagacaccgattccgctacattccacccaacacaccagagaatttttgggaagttggttttccttccactcagacttgtatggaaagaggttatattaaggaagatcttgatccttgtcctcgtccaaaaagacgtcagccttacaacgcaatattttctccaaaaggcaaggagcagaagacatagacgttgaaacagaaacagaaggatgaaggacagttttttccttcttagttatttatagttaaagttggtactaaacattgatttttttgatcttctgtaaatggatttataaatcagttttctattgaaaatgtttgtgatattttgcttttgcacctttaaaacaataaggcgctttcattttgcactctaacttaagagtttttactttatgtagtgatacctaatacaattttgaaaatacaatagttgtagtctgtg

SEQ ID NO: 11257 - protein, 897 aa, Homo sapiens; identical to SEQ ID NO: 1848

SEQ ID NO: 11258 - DNA, 3078 bp, Homo sapiens
ttgagaacatgcgggctacagagaggtatttgacctgtccaaagacgacttgatacctctataatgtaacagaaaaggtcagaaaatattaagcaagtagaagtgtggagcatattaagcaagatgaacatctcgggaagcagctgtggaagccctaactctgcagatacatctagtgactttaaggacctttggacaaaactaaaagaatgtcatgatagagaagtacaaggtttacaagtaaaagtaaccaagctaaaacaggaacgaatcttagatgcacaaagactagaagaattcttcaccaaaaatcaacagctgagggaacagcagaaagtccttcatgaaaccattaaagttttagaagatcggttaagagcaggcttatgtgatcgctgtgcagtaactgaagaacatatgcggaaaaaacagcaagagtttgaaaatatccggcagcagaatcttaaacttattacagaacttatgaatgaaaggaatactctacaggaagaaaataaaaagctttctgaacaactccagcagaaaattgagaatgatcaacagcatcaagcagctgagcttgaatgtgaggaagacgttattccagattcaccgataacagccttctcattttctggcgttaaccggctacgaagaaaggagaacccccatgtccgatacatagaacaaacacatactaaattggagcactctgtgtgtgcaaatgaaatgagaaaagtttccaagtcttcaactcatccacaacataatcctaatgaaaatgaaattctagtagctgacacttatgaccaaagtcaatctccaatggccaaagcacatggaacaagcagctatacccctgataagtcatcttttaatttagctacagttgttgctgaaacacttggacttggtgttcaagaagaatctgaaactcaaggtcccatgagcccccttggtgatgagctctaccactgtctggaaggaaatcacaagaaacagccttttgaggaatctacaagaaatactgaagatagtttaagattttcagattctacttcaaagactcctcctcaagaagaattacctactcgagtgtcatctcctgtatttggagctacctctagtatcaaaagtggtttagatttgaatacaagtttgtccccttctcttttacagcctgggaaaaaaaaacatctgaaaacactcccttttagcaacacttgtatatctagattagaaaaaactagatcaaaatctgaagatagtgcccttttcacacatcacagtcttgggtctgaagtgaacaagatcattatccagtcatctaataaacagatacttataaataaaaatataagtgaatccctaggtgaacagaataggactgagtacggtaaagattctaacactgataaacatttggagcccctgaaatcattgggaggccgaacatccaaaaggaagaaaactgaggaagaaagtgaacatgaagtaagctgcccccaagcttcttttgataaagaaaatgctttcccttttccaatggataatcagttttccatgaatggagactgtgtgatggataaacctctggatctgtctgatcgattttcagctattcagcgtcaagagaaaagccaaggaagtgagacttctaaaaacaaatttaggcaagtgactctttatgaggctttgaagaccattccaaagggcttttcctcaagccgtaaggcctcagatggcaactgcacgttgcccaaagattccccaggggagccctgttcacaggaatgcatcatccttcagcccttgaataaatgctctccagacaataaaccatcattacaaataaaagaagaaaatgctgtctttaaaattcctctacgtccacgtgaaagtttggagactgagaatgttttagatgacataaagagtgctggttctcatgagccaataaaaatacaaaccaggtcagaccatggaggatgtgaacttgcatcagttcttcagttaaatccatgtagaactggtaaaataaagtctctacaaaacaaccaagatgtatcctttgaaaatatccagtggagtatagatccgggagcagacctttctcagtataaaatggatgttactgtaatagatacaaaggatggcagtcagtcaaaattaggaggagagacagtggacatggactgtacattggttagtgaaaccgttctcttaaaaatgaagaagcaagagcagaagggagaaaaaagttcaaatgaagaaagaaaaatgaatgatagcttggaagatatgtttgatcggacaacacatgaagagtatgaatcctgtttggcagacagtttctcccaagcagcagatgaagaggaggaattgtctactgccacaaagaaactacacactcatggtgataaacaagacaaagtcaagcagaaagcgtttgtggagccgtattttaaaggtgatgaaagagagactagcttgcaaaattttcctcatattgaggtggttcggaaaaaagaggagagaagaaaactgcttgggcacacgtgtaaggaatgtgaaatttattatgcagatatgccagcagaagaaagagaaaagaaattggcttcctgctcaagacaccgattccgctacattccacccaacacaccagagaatttttgggaagttggttttccttccactcagacttgtatggaaagaggttatattaaggaagatcttgatccttgtcctcgtccaaaaagacgtcagccttacaacgcaatattttctccaaaaggcaaggagcagaagacatagacgttgaaacagaaacagaaggatgaaggacagttttttccttcttagttatttatagttaaagttggtactaaacattgatttttttgatcttctgtaaatggatttataaatcagttttctattgaaaatgtttgtgatattttgcttttgcacctttaaaacaataaggcgctttcattttgcactctaacttaagagtttttactttatgtagtgatacctaatacaattttgaaaatacaatagttgtagtctgtg

SEQ ID NO: 11259 - protein, 897 aa, Homo sapiens; identical to SEQ ID NO: 1848

SEQ ID NO: 11260 - DNA, 566 bp, Homo sapiens
acctggtttattatttagaggccagactgatgtgacttaatagtggagcatttgactcataaaggaactgttgtagaagtaataccttttctttttacttttcaggtttacaagtaaaagtaaccaagctaaaacaggaacgaatcttagatgcacaaagactagaagaattcttcaccaaaaatcaacagctgagggaacagcagaaagtccttcatgaaaccattaaagttttagaagatcggtgagtctggcacttaggtcttgagtaagaagtgatttcctccataataagaagtacattgactttcatttgtaattagttttgggattgaaagtgatctttcccacagccttctctcacctttgaatgaatactttatgaaaacaaggatctattctttaagattttcattaattctgagatcacatcagtttaccctttaaatgatatctttatctggtgtttgatgtagtggaagctcaagggtagcaatgttctaattcatttaatgctttaattccagttttacttctaagtaggtggaaactgcttcacaattctg

SEQ ID NO: 11261 - protein, 61 aa, Homo sapiens
RNCCRSNTFSFYFSGLQVKVTKLKQERILDAQRLEEFFTKNQQLREQQKVLHETIKVLEDR

SEQ ID NO: 11262 - DNA, 2080 bp, Homo sapiens
gtgcttatgagataaacgacagggtaactgtccacattggtcccagtttatgagggagaagagatcataatctacaaaaatttgcaagacggcgcctcatctcccagagatcttccttggagaccctggaagatattgaggagaacgcccctctccggagatgtcgaactctctcaggttcacccagaccaaagaattttaagaagattcattttatcaagaacatgcggcaacacgataccaggaatggcagaatagtccttatcagtggcagaagatccttctgtagtatattttcagtgctgccgtatcgcgacagtacccaagtcggacaacagtgattgactacgtgaagccctcggatctcaagaaggacatgaacgagaccttcaaggagaagtttcctcacattaagctgacactcagcaaaattaggagtctgaaacgagagatgcggaagcttgcgcaggaggactgtggccttgaggagcccacggtggccatggccttcgtctactttgaaaagctcgccctcaaggggaaactcaacaaacagaaccggaagctgtgtgctggggcatgtgtgctgttagcagccaaaattggaagtgacctcaaaaaacacgaagtcaagcatttaattgacaaactggaagagaagttccggctgaacaggcgagaactgattgcctttgaattcccggtgttagtggccttggaattcgccctccacttgcccgagcacgaagtcatgccccactacagacggctggtccagagttcctagcactggccccgaggacagccaagggccatttcttctcagcttggtggagcagcacttacttactactggaaatgaaaaaaagtagaactcagaataccagacttttcttcctctcgacatagtttggggagaagcagtactagaaactttccaaggagtcttgggtgtgtagccaagaggagccatgagctatggactcctcaagcacgggaagaggaggtgtgtgctgagaacagagaggccctgccctctgtccactagcgagaatccctagctgccccagcccagtctttctccccggcattcacaaactttgcaagcgtggtccagggccttctccagatctgttccaacttggagtgtgaagggcttgagcatacgggggaagagagtctgcagaagttgggggaaaacttttaaaagataccctcattgtgtcaaagagtgtgccaatctatttttgtatcagcattggaagtgcactttcccctggggcgtgtgggtgtgtgaatgtgcaagtgtctgagagatactgcatcagccctagacccccagagccagtcccgccctttacagagcagcccttagcctggggccatgggtcaggctgaccttcaacaattatttctagatgatttctggataagaattgctctctcggtaccagacagtttgacatcctccacccttagaaaatgactgacattgttttgttactgctcctacccaccaaggggataaagaaggcgagttctgagtgttggatgagtcagtcgcgtggaaggacgtggagcgtggcgctctgtaacttcctgccgtctgccaccccgccacgtgtatttaaccctcgcactttctccactgtggagatggctggggcggcgccccacagtgtgtattcctgtcctctatgttagagtgcatcagaagcacatttactgtgctatctatatcgctatataaaagtgttttataaaaacccagaataggagcacgacgcatgattggtgtttgaggcgtttgccagctgggacaaactgcgtttggagctgtggttaagctgactaaggaggcggtggctctttcttaacattcccacgtgcccagggctgttcatgcaagattttaatggtgacttgtcctggcttactgggacagtctgtatgaggcatgtcaccacactgtcgcctcatagctgcaagagagaggcaccagctgaagttcccctgactgaagagagcctgtggccatgtaaaaagagaattaaactcttgttgctttttgtatacctgt

SEQ ID NO: 11263 - protein, 136 aa, Homo sapiens
MNETFKEKFPHIKLTLSKIRSLKREMRKLAQEDCGLEEPTVAMAFVYFEKLALKGKLNKQNRKLCAGACVLLAAKIGSDLKKHEVKHLIDKLEEKFRLNRRELIAFEFPVLVALEFALHLPEHEVMPHYRRLVQSS

SEQ ID NO: 11264 - DNA, 3888 bp, Homo sapiens
gtgcttatgagataaacgacagggtaactgtccacattggtcccagtttatgagggagaagagatcataatctacaaaaatttgcaagacggcgcctcatctcccagagatcttccttggagaccctggaagatattgaggagaacgcccctctccggagatgtcgaactctctcaggttcacccagaccaaagaattttaagaagattcattttatcaagaacatgcggcaacacgataccaggaatggcagaatagtccttatcagtggcagaagatccttctgtagtatattttcagtgctgccgtatcgcgacagtacccaagtcggacaacagtgattgactacgtgaagccctcggatctcaagaaggacatgaacgagaccttcaaggagaagtttcctcacattaagctgacactcagcaaaattaggagtctgaaacgagagatgcggaagcttgcgcaggaggactgtggccttgaggagcccacggtggccatggccttcgtctactttgaaaagctcgccctcaaggggaaactcaacaaacagaaccggaagctgtgtgctggggcatgtgtgctgttagcagccaaaattggaagtgacctcaaaaaacacgaagtcaagcatttaattgacaaactggaagagaagttccggctgaacaggcgagaactgattgcctttgaattcccggtgttagtggccttggaattcgccctccacttgcccgagcacgaagtcatgccccactacagacggctggtccagagttcctagcactggccccgaggacagccaagggccatttcttctcagcttggtggagcagcacttacttactactggaaatgaaaaaaagtagaactcagaataccagacttttcttcctctcgacatagtttggggagaagcagtactagaaactttccaaggagtcttgggtgtgtagccaagaggagccatgagctatggactcctcaagcacgggaagaggaggtgtgtgctgagaacagagaggccctgccctctgtccactagcgagaatccctagctgccccagcccagtctttctccccggcattcacaaactttgcaagcgtggtccagggccttctccagatctgttccaacttggagtgtgaagggcttgagcatacgggggaagagagtctgcagaagttgggggaaaacttttaaaagataccctcattgtgtcaaagagtgtgccaatctatttttgtatcagcattggaagtgcactttcccctggggcgtgtgggtgtgtgaatgtgcaagtgtctgagagatactgcatcagccctagacccccagagccagtcccgccctttacagagcagcccttagcctggggccatgggtcaggctgaccttcaacaattatttctagatgatttctggataagaattgctctctcggtaccagacagtttgacatcctccacccttagaaaatgactgacattgttttgttactgctcctacccaccaaggggataaagaaggcgagttctgagtgttggatgagtcagtcgcgtggaaggacgtggagcgtggcgctctgtaacttcctgccgtctgccaccccgccacgtgtatttaaccctcgcactttctccactgtggagatggctggggcggcgccccacagtgtgtattcctgtcctctatgttagagtgcatcagaagcacatttactgtgctatctatatcgctatataaaagtgttttataaaaacccagaataggagcacgacgcatgattggtgtttgaggcgtttgccagctgggacaaactgcgtttggagctgtggttaagctgactaaggaggcggtggctctttcttaacattcccacgtgcccagggctgttcatgcaagattttaatggtgacttgtcctggcttactgggacagtctgtatgaggcatgtcaccacactgtcgcctcatagctgcaagagagaggcaccagctgaagttcccctgactgaagagagcctgtggccatgtaaaaagagaattaaactcttgttgctttttgtatacctgtatgcgtttgtgtagacgtgtgtctcaccagtcacctttgccctgcattgctgatccccttgcgcacactgattctagtgaggtcacagattcggagcttcacacaccagcccagagaaagggcgatggaaccgaaccgagggtctgcagctttcgttagcagagctgtcagattcttgacagtcttggaggatggagaaattcaagcagcagctggtgagggccaaaacagaatacttggcttcttcagaatcttagattgcactgagtttagtcctaaatattttgctaacaaatttccttggccagaatcagttgtaagacagtgatttgggtggtggggggagggaggagggagaggatatgattaatgtggtctctttggctgatcgaaagctagatcaactggtacttagggcacttgctgtttataaagcaaaattgagaaaatattcaaggtgcctccatcgcctgaactacaaaatgcccttggccttcctcacatggggtctgtcaccttgcatctctgataagccatccaccttcctggtcagtgcctacagggggagagcctttctgagaagcaggtcctgtggtatctgagaatggtctagagagctccccactgcccatctgcccccgaatttcctgccaagctctggggagtggggtggggggagggacgtccgatggatgacaggccgccagcccagacgtggggagagaagcctgagtcctttcctgtgtgataaaatcaggctaatttacttggatttggggtgatttgtttggtttttagcatttatgaggtgagcccatgaagttagtggtccattactttttaaagatgcattttcattttaaactgtctcctggcctgtggatttgtggaatggacagttttgtgggttttaatttatttgtgaggagtcggggctgagaaggcattttatcaggaggtctccttttgcacgtccatgacatgagcttttcggaggcaaaggaagtggaggagggtgagagatgcaggtcactgccagaggcacctctgtgacacggaacattccagacacgtcgcagccttgggcttcggcgaggaggaagtctgagcctgtgaagcgagaaggccaggcagtagactggctctgaggttttgccctttgacctcctccacagagggcagcttcagccccttgtaagccctgccccctctcaggactgccctgaggcctctccagtcctccccacactcagagatctgtggggaagctccgcccagccacactccttgggataatactagccggttctgcctgattccttttcccccggagccagcctagggggcccgggactcctctagtgagccttgactgttaggtaagagacaggaagcagacaagccaagaggttgctgcagctgcccccaggaggaaacgggcagcagggagtgtggcccagcccccactgtacccctccaggggcccgagcccttgccagcccaatgacaccttgaagtcaccacttttcctttcttgcccgctaataaaacctatttaaacaggaaattcataccaaatgcaaatgggttttgttttccttggcattttgttgttccgatcacagatttccctgccagggtgtctgtggttatcagctgcaggctcagcttggggcggccgcttcacacaagccactctgtaccacgtgccctaccttagtgacgggagtaaggagcttccttcccctccatgtcattccttcctgttcccttcattccccaacagcaaataaaactgttgaatgctc

SEQ ID NO: 11265 - protein, 136 aa, Homo sapiens; identical to SEQ ID NO: 11263

SEQ ID NO: 11266 - DNA, 652 bp, Homo sapiens
tattgcaaagagggctttggagcgcgagcgcggggcgcgcgcacctataaatacggacacccggccccggagcccgcgagccagcggccaggcgaccggcgggcggccagccagcgagccgaactagccgagctaggtagcgaggcgtgcgcgtgggccggggcggcggcgcccccatccccagcaccgaggggcgagcatggcccgcccgcgggggggctggaccgccgcgcacgccgcccgatccccgcgccctacccagcccgggtcgccgccgctcgcgcccgccgcttagcgctcgggcgccgctcgcttctccgggcatcgcggaaatcccgccgcagccccagcctcagcccgcggccgccgcgccggcccagccgccgcccgaacccccccggaagccgcgcatggacccgcggcgccgccaggctgccctctccttcctcaccaacatctcgctggacggccggctgccgccgcaggacgcggagtggggcggtggcgaggagggcggcgcggccaagccgggcgccggcggcgcctgcggcgcgaggactcggttcagcttgctcgccgctgccgagcggggcggctgcatcgcgctcgccgcgccgggcacgccggctgcggggttagccgctgggtccgg

SEQ ID NO: 11267 - protein, 79 aa, Homo sapiens
MDPRRRQAALSFLTNISLDGRLPPQDAEWGGGEEGGAAKPGAGGACGARTRFSLLAAAERGGCIALAAPGTPAAGLAAG

SEQ ID NO: 11268 - DNA, 601 bp, Homo sapiens
ggaggagttggaggaggacgatgcctttatcagcgtgcaggtgccggcggccgcctttttgggctccgggacccccgggagtgggagcggcagtcggggacgcctcaactcgttcactcagggaatcctgcccatcgccttctccaggccgacttcgcagaactactgctccctggagcagccaggccagggcggcagcaccagcgccttcgagcagctgcagaggtcccgacggcgcctcatctcccagagatcttccttggagaccctggaagatattgaggagaacgcccctctccggagatgtcgaactctctcaggttcacccagaccaaagaattttaagaagattcattttatcaagaacatgcggcaacacgataccaggaatggcagctcctgagtctccttgggacccctgatgagcacagcccaggctctcagtctgcgggccagatccacggctgatttgctcttctgaccctgaaaacgctggcatggaggctcccgcgtccccagacctgctgaccgtgtgatagaggccccagtattgaggaggatttggacttctcatctcagcaaggaccagagtgcagctcaa

SEQ ID NO: 11269 - protein, 133 aa, Homo sapiens
MPLSACRCRRPPFWAPGPPGVGAAVGDASTRSLRESCPSPSPGRLRRTTAPWSSQARAAAPAPSSSCRGPDGASSPRDLPWRPWKILRRTPLSGDVELSQVHPDQRILRRFILSRTCGNTIPGMAAPESPWDP

SEQ ID NO: 11270 - DNA, 651 bp, Homo sapiens
ggaggagttggaggaggacgatgcctttatcagcgtgcaggtgccggcggccgcctttttgggctccgggacccccgggagtgggagcggcagtcggggacgcctcaactcgttcactcagggaatcctgcccatcgccttctccaggccgacttcgcagaactactgctccctggagcagccaggccagggcggcagcaccagcgccttcgagcagctgcagaggtcccgacggcgcctcatctcccagagatcttccttggagaccctggaagatattgaggagaacgcccctctccggagatgtcgaactctctcaggttcacccagaccaaagaattttaagaagattcattttatcaagaacatgcggcaacacgataccaggaatggcagaatagtccttatcagtggcagaagatccttctgtagtatattttcagtgctgccgtatcgcgacagtacccaagtcgggtatgtatatgcatgcatgctttgtagttctctgggtgaaaagatctcacaccaatgtacataatgtggccatcctttccattttcaagaagttgccttgctttgatactgcaaattcagtatttgtacactggaatgataaaaagatgttccactttcttttcagccagaaagctt

SEQ ID NO: 11271 - protein, 126 aa, Homo sapiens
MPLSACRCRRPPFWAPGPPGVGAAVGDASTRSLRESCPSPSPGRLRRTTAPWSSQARAAAPAPSSSCRGPDGASSPRDLPWRPWKILRRTPLSGDVELSQVHPDQRILRRFILSRTCGNTIPGMAE

SEQ ID NO: 11272 - DNA, 493 bp, Homo sapiens
ggaggagttggaggaggacgatgcctttatcagcgtgcaggtgccggcggccgcctttttgggctccgggacccccgggagtgggagcggcagtcggggacgcctcaactcgttcactcagggaatcctgcccatcgccttctccaggccgacttcgcagaactactgctccctggagcagccaggccagggcggcagcaccagcgccttcgagcagctgcagaggtcccgacggcgcctcatctcccagagatcttccttggagaccctggaagatattgaggagaacgcccctctccggagatgtcgaactctctcaggttcacccagaccaaagaattttaagaagattcattttatcaagaacatgcggcaacacgataccaggaatggcagaatagtccttatcagtggcagaagatccttctgtagtatattttcagtgctgccgtatcgcgacattcccctgactgaagagagcctgtggccatgt

SEQ ID NO: 11273 - protein, 126 aa, Homo sapiens; identical to SEQ ID NO: 11271

SEQ ID NO: 11274 - DNA, 963 bp, Homo sapiens
ctcagggaatcctgcccatcgccttctccaggccgacttcgcagaactactgctccctggagcagccaggccagggcggcagcaccagcgccttcgagcagctgcagaggtcccgacggcgcctcatctcccagagatcttccttggagaccctggaagatattgaggagaacgcccctctccggaggaaaatccatgaataacgttgagaagcccctggagtttcgagaggctactagaagccatggtccttggaacaacgtggccactgtgagccgaaggaaaccgggtgactcggggtaccggctacagagggctctcccctcttcaggaattcccaggcagggctgttgagcctcgggatgcagtgtccttgagtctcgaggtgtcgaggagaggctggaggaggacgtgggttctgcgttcctggttggtgcgctgtcacccctcttcacggaatccacccagactggtcctcagccttgtggtagcacaaatgaatgcagtaaaaatgcttgttggcctcaactgtgacttgtaccagcgttcacagaatactgcactgaacctcaaatcttgttattataaaattctaagaatgtcagaaatcagaagagttttagaaatcaagtgtttattccactaaaggacctttttttgatttaaaaaagttctcagccgggtgcagtggctcacacctatcatcctagcacttggggaggtggaggcaggaagattgcttagtctaggagttcaagaccagcctgggcaatgtagtgagacccccatgtctacaatcaatcagtcaacacaaaaatacataaataaataaggttctcatattggctgggcacggtggctcacacctgtaaccccagcactttgagaggttgaggcagaggggttgcttgaggttaggagtttgagatcatcctgggcaatgtagtgagaccccatctctac

SEQ ID NO: 11275 - protein, 52 aa, Homo sapiens
MNNVEKPLEFREATRSHGPWNNVATVSRRKPGDSGYRLQRALPSSGIPRQGC

SEQ ID NO: 11276 - DNA, 2478 bp, Homo sapiens
ggccatttttcttcctggtgtttgaatgactcataaaatgagtttggagtggtctgaagcctctgcctccttccttgaatgctttctaagaggggctgccatgcaagaatatatgctgattttcccatacggcgcctcatctcccagagatcttccttggagaccctggaagatattgaggagaacgcccctctccggagatgtcgaactctctcaggttcacccagaccaaagaattttaagaagattcattttatcaagaacatgcggcaacacgataccaggaatggcagaatagtccttatcagtggcagaagatccttctgtagtatattttcagtgctgccgtatcgcgacagtacccaagtcggggacttgaagttggacggaggaagacaatcaactggtgcagtgagtttgaaagagatcattggtctggaaggtgtggagctgggtgctgatgggaagactgtttcctatacccaatttctgttacccacaaatgcctttggagcccggagaaataccatagactccacctcctctttctcccagttccgtaacctgagccaccgcagcctctccataggccgggcaagcggcacccaggggagcctcgacacaggtagtgacctgggagactttatggactatgacccaaatctcttggatgacccccagtggccttgtggcaaacacaaacgcgttctgatcttcccttcctacatgacaacagtgattgactacgtgaagccctcggatctcaagaaggacatgaacgagaccttcaaggagaagtttcctcacattaagctgacactcagcaaaattaggagtctgaaacgagagatgcggaagcttgcgcaggaggactgtggccttgaggagcccacggtggccatggccttcgtctactttgaaaagctcgccctcaaggggaaactcaacaaacagaaccggaagctgtgtgctggggcatgtgtgctgttagcagccaaaattggaagtgacctcaaaaaacacgaagtcaagcatttaattgacaaactggaagagaagttccggctgaacaggcgagaactgattgcctttgaattcccggtgttagtggccttggaattcgccctccacttgcccgagcacgaagtcatgccccactacagacggctggtccagagttcctagcactggccccgaggacagccaagggccatttcttctcagcttggtggagcagcacttacttactactggaaatgaaaaaaagtagaactcagaataccagacttttcttcctctcgacatagtttggggagaagcagtactagaaactttccaaggagtcttgggtgtgtagccaagaggagccatgagctatggactcctcaagcacgggaagaggaggtgtgtgctgagaacagagaggccctgccctctgtccactagcgagaatccctagctgccccagcccagtctttctccccggcattcacaaactttgcaagcgtggtccagggccttctccagatctgttccaacttggagtgtgaagggcttgagcatacgggggaagagagtctgcagaagttgggggaaaacttttaaaagataccctcattgtgtcaaagagtgtgccaatctatttttgtatcagcattggaagtgcactttcccctggggcgtgtgggtgtgtgaatgtgcaagtgtctgagagatactgcatcagccctagacccccagagccagtcccgccctttacagagcagcccttagcctggggccatgggtcaggctgaccttcaacaattatttctagatgatttctggataagaattgctctctcggtaccagacagtttgacatcctccacccttagaaaatgactgacattgttttgttactgctcctacccaccaaggggataaagaaggcgagttctgagtgttggatgagtcagtcgcgtggaaggacgtggagcgtggcgctctgtaacttcctgccgtctgccaccccgccacgtgtatttaaccctcgcactttctccactgtggagatggctggggcggcgccccacagtgtgtattcctgtcctctatgttagagtgcatcagaagcacatttactgtgctatctatatcgctatataaaagtgttttataaaaacccagaataggagcacgacgcatgattggtgtttgaggcgtttgccagctgggacaaactgcgtttggagctgtggttaagctgactaaggaggcggtggctctttcttaacattcccacgtgcccagggctgttcatgcaagattttaatggtgacttgtcctggcttactgggacagtctgtatgaggcatgtcaccacactgtcgcctcatagctgcaagagagaggcaccagctgaagttcccctgactgaagagagcctgtggccatgtaaaaagagaattaaactcttgttgctttttgtatacctgt

SEQ ID NO: 11277 - protein, 368 aa, Homo sapiens; identical to SEQ ID NO: 1854

SEQ ID NO: 11278 - DNA, 837 bp, Homo sapiens
ttcctttggtcctgccccacacgggcgcgcttttccttcaggggctgtgactaattatggaaaacggcacacctgccactctctcagaccatgaggtttaactgagtgaacaccgctgttccggggctctgcctctcgctgaacgctcctgctgggctggggcctcccgagtagctggaagtacagataatcacagctggcttatcaatattgctgtttgatgcgatcctgaccagtgcaaccacgggatgtgaactgtcctgacttcgataccggtggcagcctgatgacagacaccggatgcatgaaaaggcaaaaggagcacaaggaggaaggaacacggtgttcagggatggcgatgaagagcggaggctttgcaaggacggaccctcagtctcaggtatgtcttaatcagcagtgtgagaacagacgaatcagcagcgtgagaagagacgaattgctcagtctcatgtaggtctttatcagcagcataagaacagatgaatacaaccgccaagggaaggttctgtccaatctgaaacaatttccaactcttttacctttcctctgtgactgcttttatttcttcaaatcaaactggtggaaaagcagcaacaagcacccacaggctgtgagcttttcagtcgcaaacccgtacacaagcgcgaggtactgagcacagctgctattgattctgttgattgaaaatcatttatctcaaaagcctcatgcaacactacagaagcagccagcctcacctccatgctatttaaagaggcatgaataataaaaccaggtgcgtgtggtgctgacccagcacaccgccgggaactggac

SEQ ID NO: 11279 - protein, 62 aa, Homo sapiens
MTDTGCMKRQKEHKEEGTRCSGMAMKSGGFARTDPQSQVCLNQQCENRRISSVRRDELLSLM

SEQ ID NO: 11280 - DNA, 1621 bp, Homo sapiens
gaaacgccgggataaagaacgccaggccaaacaacttttaattgatccagaagatgatgtaagagataatattttaaactgcagcagcctgacactgtggagcctgatgccatcaagcctgtgggaatccgacgaatggatgaaagacccatccacgccgagccccagtatccggtccgatctgcagccccacaccctggagacattggggacttcattaatgagggccttaaagcggctgacaatgaccccacagctccaccatatgactccctgttagtgtttgactatgaaggcagtggctccactgctgggtccttgagctcccttaattcctcaagtagtggtggtgagcaggactatgattacctgaacgactgggggccacggttcaagaaacttgctgacatgtatggtggaggtgatgactgaacttcagggtgaacttggtttttggacaagtacaaacaatttcaactgatattcccaaaaagcattcagaagctaggctttaactttgtagtctactagcacagtgcttgctggaggctttggcataggctgcaaaccaatttgggctcagagggaatatcagtgatccatactgtttggaaaaacactgagctcagttacacttgaattttacagtacagaagcactgggattttatgtgcctttttgtacctttttcagattggaattagttttctgtttaaggctttaatggtactgatttctgaaacgataagtaaaagacaaaatattttgtggtgggagcagtaagttaaaccatgatatgcttcaacacgcttttgttacattgcatttgcttttattaaaatacaaaattaaacaaacaaaaaaactcatggagcgattttattatcttgggggatgagaccatgagattggaaaatgtacattacttctagttttagactttagtttgtttttttttttttcactaaaatcttaaaacttactcagctggttgcaaataaagggagttttcatatcaccaatttgtagcaaaattgaattttttcataaactagaatgttagacacattttggtcttaatccatgtacacttttttatttctgtatttttccacttcactgtaaaaatagtatgtgtacataatgttttattggcatagtctatggagaagtgcagaaacttcagaacatgtgtatgtattatttggactatggattcaggttttttgcatgtttatatctttcgttatggataaagtatttacaaaacagtgacatttgattcaattgttgagctgtagttagaatactcaatttttaatttttttaatttttttattttttattttctttttggtttggggagggagaaaagttcttagcacaaatgttttacataatttgtaccaaaaaaaaaaaaaaaggaaaggaaagaaaggggtggcctgacactggtggcactactaagtgtgtgtttttttaaaaaaaaaatggaaaaaaaaaagcttttaaactggagagacttctgacaacagctttgcctctgtattgtgtaccagaatataaatgatacacctctgaccccagcgttctgaataaaatgctaattttggatctggtg

SEQ ID NO: 11281 - protein, 98 aa, Homo sapiens
MDERPIHAEPQYPVRSAAPHPGDIGDFINEGLKAADNDPTAPPYDSLLVFDYEGSGSTAGSLSSLNSSSSGGEQDYDYLNDWGPRFKKLADMYGGGDD

SEQ ID NO: 11282 - DNA, 4571 bp, Homo sapiens
gagccgagaagcgcccctcggcccccacgcagcggaggcgcggagtggcgggactgctgctctttgtgggtgcagcacgcacgacccggagcgccctccccgcggcgctgtccccggcgtcttcgtcgcgccgagcggccctggagcggggacccggaggaagcaaaaccacgagcccgaaacctcgcgtggcggagctcttggggagcgccatccgctccacttccacctccacatcctccaccggccaaggtccccgccgctgcatccctcgcggcttccgctgcgctccgggccggagccgagccgcctgcgctgccacagcagccgcctccacacactcgcagacgctcacacgctctccctccctgttcccccgccccctccccagctccttgatctctgggtctgttttattactcctggtgcgagtcccgcggactccgcggcccgctatttgtcatcagctcgctctccattggcggggagcggagagcagcgaagaagggggtggggaggggaggggaagggaagggggtggaaactgcctggagccgtttctccgcgccgctgttggtgctgccgctgcctcctcctcctccgccgccgccgccgccgccgccgcctcctccggctcttcgctcggcccctctccgcctccatgtgccggatagcgggagcgctgcggaccctgctgccgctgctggcggccctgcttcaggcgtctgtagaggcttctggtgaaatcgcattatgcaagactggatttcctgaagatgtttacagtgcagtcttatcgaaggatgtgcatgaaggacagcctcttctcaatgtgaagtttagcaactgcaatggaaaaagaaaagtacaatatgagagcagtgagcctgcagattttaaggtggatgaagatggcatggtgtatgccgtgagaagctttccactctcttctgagcatgccaagttcctgatatatgcccaagacaaagagacccaggaaaagtggcaagtggcagtaaaattgagcctgaagccaaccttaactgaggagtcagtgaaggagtcagcagaagttgaagaaatagtgttcccaagacaattcagtaagcacagtggccacctacaaaggcagaagagagactgggtcatccctccaatcaacttgccagaaaactccaggggaccttttcctcaagagcttgtcaggatcaggtctgatagagataaaaacctttcactgcggtacagtgtaactgggccaggagctgaccagcctccaactggtatcttcattatcaaccccatctcgggtcagctgtcggtgacaaagcccctggatcgcgagcagatagcccggtttcatttgagggcacatgcagtagatattaatggaaatcaagtggagaaccccattgacattgtcatcaatgttattgacatgaatgacaacagacctgagttcttacaccaggtttggaatgggacagttcctgagggatcaaagcctggaacatatgtgatgaccgtaacagcaattgatgctgacgatcccaatgccctcaatgggatgttgaggtacagaatcgtgtctcaggctccaagcaccccttcacccaacatgtttacaatcaacaatgagactggtgacatcatcacagtggcagctggacttgatcgagaaaaagtgcaacagtatacgttaataattcaagctacagacatggaaggcaatcccacatatggcctttcaaacacagccacggccgtcatcacagtgacagatgtcaatgacaatcctccagagtttactgccatgacgttttatggtgaagttcctgagaacagggtagacatcatagtagctaatctaactgtgaccgataaggatcaaccccatacaccagcctggaacgcagtgtacagaatcagtggcggagatcctactggacggttcgccatccagaccgacccaaacagcaacgacgggttagtcaccgtggtcaaaccaatcgactttgaaacaaataggatgtttgtccttactgttgctgcagaaaatcaagtgccattagccaagggaattcagcacccccctcagtcaactgcaaccgtgtctgttacagttattgacgtaaatgaaaacccttattttgcccccaatcctaagatcattcgccaagaagaagggcttcatgccggtaccatgttgacaacattcactgctcaggacccagatcgatatatgcagcaaaatattagatacactaaattatctgatcctgccaattggctaaaaatagatcctgtgaatggacaaataactacaattgctgttttggaccgagaatcaccaaatgtgaaaaacaatatatataatgctactttccttgcttctgacaatggaattcctcctatgagtggaacaggaacgctgcagatctatttacttgatattaatgacaatgcccctcaagtgttacctcaagaggcagagacttgcgaaactccagaccccaattcaattaatattacagcacttgattatgacattgatccaaatgctggaccatttgcttttgatcttcctttatctccagtgactattaagagaaattggaccatcactcggcttaatggtgattttgctcagcttaatttaaagataaaatttcttgaagctggtatctatgaagttcccatcataatcacagattcgggtaatcctcccaaatcaaatatttccatcctgcgtgtgaaggtttgccagtgtgactccaacggggactgcacagatgtggacaggattgtgggtgcggggcttggcaccggtgccatcattgccatcctgctctgcatcatcatcctgcttatccttgtgctgatgtttgtggtatggatgaaacgccgggataaagaacgccaggccaaacaacttttaattgatccagaagatgatgtaagagataatattttaaaatatgatgaagaaggtggaggagaagaagaccaggactatgacttgagccagctgcagcagcctgacactgtggagcctgatgccatcaagcctgtgggaatccgacgaatggatgaaagacccatccacgccgagccccagtatccggtccgatctgcagccccacaccctggagacattggggacttcattaatgagggccttaaagcggctgacaatgaccccacagctccaccatatgactccctgttagtgtttgactatgaaggcagtggctccactgctgggtccttgagctcccttaattcctcaagtagtggtggtgagcaggactatgattacctgaacgactgggggccacggttcaagaaacttgctgacatgtatggtggaggtgatgactgaacttcagggtgaacttggtttttggacaagtacaaacaatttcaactgatattcccaaaaagcattcagaagctaggctttaactttgtagtctactagcacagtgcttgctggaggctttggcataggctgcaaaccaatttgggctcagagggaatatcagtgatccatactgtttggaaaaacactgagctcagttacacttgaattttacagtacagaagcactgggattttatgtgcctttttgtacctttttcagattggaattagttttctgtttaaggctttaatggtactgatttctgaaacgataagtaaaagacaaaatattttgtggtgggagcagtaagttaaaccatgatatgcttcaacacgcttttgttacattgcatttgcttttattaaaatacaaaattaaacaaacaaaaaaactcatggagcgattttattatcttgggggatgagaccatgagattggaaaatgtacattacttctagttttagactttagtttgtttttttttttttcactaaaatcttaaaacttactcagctggttgcaaataaagggagttttcatatcaccaatttgtagcaaaattgaattttttcataaactagaatgttagacacattttggtcttaatccatgtacacttttttatttctgtatttttccacttcactgtaaaaatagtatgtgtacataatgttttattggcatagtctatggagaagtgcagaaacttcagaacatgtgtatgtattatttggactatggattcaggttttttgcatgtttatatctttcgttatggataaagtatttacaaaacagtgacatttgattcaattgttgagctgtagttagaatactcaatttttaatttttttaatttttttattttttattttctttttggtttggggagggagaaaagttcttagcacaaatgttttacataatttgtaccaaaaaaaaaaaaaaaggaaaggaaagaaaggggtggcctgacactggtggcactactaagtgtgtgtttttttaaaaaaaaaatggaaaaaaaaaagcttttaaactggagagacttctgacaacagctttgcctctgtattgtgtaccagaatataaatgatacacctctgaccccagcgttctgaataaaatgctaattttggatctggtg

SEQ ID NO: 11283 - protein, 906 aa, Homo sapiens; identical to SEQ ID NO: 1856

SEQ ID NO: 11284 - DNA, 858 bp, Homo sapiens
gaaacgccgggataaagaacgccaggccaaacaacttttaattgatccagaagatgatgtaagagataatattttaaactgcagcagcctgacactgtggagcctgatgccatcaagcctgtgggaatccgacgaatggatgaaagacccatccacgccgagccccagtatccggtccgatctgcagccccacaccctggagacattggggacttcattaatgagggccttaaagcggctgacaatgaccccacagctccaccatatgactccctgttagtgtttgactatgaaggcagtggctccactgctgggtccttgagctcccttaattcctcaagtagtggtggtgagcaggactatgattacctgaacgactgggggccacggttcaagaaacttgctgacatgtatggtggaggtgatgactgaacttcagggtgaacttggtttttggacaagtacaaacaatttcaactgatattcccaaaaagcattcagaagctaggctttaactttgtagtctactagcacagtgcttgctggaggctttggcataggctgcaaaccaatttgggctcagagggaatatcagtgatccatactgtttggaaaaacactgagctcagttacacttgaattttacagtacagaagcactgggattttatgtgcctttttgtacctttttcagattggaattagttttctgtttaaggctttaatggtactgatttctgaaacgataagtaaaagacaaaatattttgtggtgggagcagtaagttaaaccatgatatgcttcaacacgcttttgttacattgcatttgcttttattaaaatacaaaattaaacaaac

SEQ ID NO: 11285 - protein, 98 aa, Homo sapiens; identical to SEQ ID NO: 11281

SEQ ID NO: 11286 - DNA, 3808 bp, Homo sapiens
gagccgagaagcgcccctcggcccccacgcagcggaggcgcggagtggcgggactgctgctctttgtgggtgcagcacgcacgacccggagcgccctccccgcggcgctgtccccggcgtcttcgtcgcgccgagcggccctggagcggggacccggaggaagcaaaaccacgagcccgaaacctcgcgtggcggagctcttggggagcgccatccgctccacttccacctccacatcctccaccggccaaggtccccgccgctgcatccctcgcggcttccgctgcgctccgggccggagccgagccgcctgcgctgccacagcagccgcctccacacactcgcagacgctcacacgctctccctccctgttcccccgccccctccccagctccttgatctctgggtctgttttattactcctggtgcgagtcccgcggactccgcggcccgctatttgtcatcagctcgctctccattggcggggagcggagagcagcgaagaagggggtggggaggggaggggaagggaagggggtggaaactgcctggagccgtttctccgcgccgctgttggtgctgccgctgcctcctcctcctccgccgccgccgccgccgccgccgcctcctccggctcttcgctcggcccctctccgcctccatgtgccggatagcgggagcgctgcggaccctgctgccgctgctggcggccctgcttcaggcgtctgtagaggcttctggtgaaatcgcattatgcaagactggatttcctgaagatgtttacagtgcagtcttatcgaaggatgtgcatgaaggacagcctcttctcaatgtgaagtttagcaactgcaatggaaaaagaaaagtacaatatgagagcagtgagcctgcagattttaaggtggatgaagatggcatggtgtatgccgtgagaagctttccactctcttctgagcatgccaagttcctgatatatgcccaagacaaagagacccaggaaaagtggcaagtggcagtaaaattgagcctgaagccaaccttaactgaggagtcagtgaaggagtcagcagaagttgaagaaatagtgttcccaagacaattcagtaagcacagtggccacctacaaaggcagaagagagactgggtcatccctccaatcaacttgccagaaaactccaggggaccttttcctcaagagcttgtcaggatcaggtctgatagagataaaaacctttcactgcggtacagtgtaactgggccaggagctgaccagcctccaactggtatcttcattatcaaccccatctcgggtcagctgtcggtgacaaagcccctggatcgcgagcagatagcccggtttcatttgagggcacatgcagtagatattaatggaaatcaagtggagaaccccattgacattgtcatcaatgttattgacatgaatgacaacagacctgagttcttacaccaggtttggaatgggacagttcctgagggatcaaagcctggaacatatgtgatgaccgtaacagcaattgatgctgacgatcccaatgccctcaatgggatgttgaggtacagaatcgtgtctcaggctccaagcaccccttcacccaacatgtttacaatcaacaatgagactggtgacatcatcacagtggcagctggacttgatcgagaaaaagtgcaacagtatacgttaataattcaagctacagacatggaaggcaatcccacatatggcctttcaaacacagccacggccgtcatcacagtgacagatgtcaatgacaatcctccagagtttactgccatgacgttttatggtgaagttcctgagaacagggtagacatcatagtagctaatctaactgtgaccgataaggatcaaccccatacaccagcctggaacgcagtgtacagaatcagtggcggagatcctactggacggttcgccatccagaccgacccaaacagcaacgacgggttagtcaccgtggtcaaaccaatcgactttgaaacaaataggatgtttgtccttactgttgctgcagaaaatcaagtgccattagccaagggaattcagcacccccctcagtcaactgcaaccgtgtctgttacagttattgacgtaaatgaaaacccttattttgcccccaatcctaagatcattcgccaagaagaagggcttcatgccggtaccatgttgacaacattcactgctcaggacccagatcgatatatgcagcaaaatattagatacactaaattatctgatcctgccaattggctaaaaatagatcctgtgaatggacaaataactacaattgctgttttggaccgagaatcaccaaatgtgaaaaacaatatatataatgctactttccttgcttctgacaatggaattcctcctatgagtggaacaggaacgctgcagatctatttacttgatattaatgacaatgcccctcaagtgttacctcaagaggcagagacttgcgaaactccagaccccaattcaattaatattacagcacttgattatgacattgatccaaatgctggaccatttgcttttgatcttcctttatctccagtgactattaagagaaattggaccatcactcggcttaatggtgattttgctcagcttaatttaaagataaaatttcttgaagctggtatctatgaagttcccatcataatcacagattcgggtaatcctcccaaatcaaatatttccatcctgcgtgtgaaggtttgccagtgtgactccaacggggactgcacagatgtggacaggattgtgggtgcggggcttggcaccggtgccatcattgccatcctgctctgcatcatcatcctgcttatccttgtgctgatgtttgtggtatggatgaaacgccgggataaagaacgccaggccaaacaacttttaattgatccagaagatgatgtaagagataatattttaaaatatgatgaagaaggtggaggagaagaagaccaggactatgacttgagccagctgcagcagcctgacactgtggagcctgatgccatcaagcctgtgggaatccgacgaatggatgaaagacccatccacgccgagccccagtatccggtccgatctgcagccccacaccctggagacattggggacttcattaatgagggccttaaagcggctgacaatgaccccacagctccaccatatgactccctgttagtgtttgactatgaaggcagtggctccactgctgggtccttgagctcccttaattcctcaagtagtggtggtgagcaggactatgattacctgaacgactgggggccacggttcaagaaacttgctgacatgtatggtggaggtgatgactgaacttcagggtgaacttggtttttggacaagtacaaacaatttcaactgatattcccaaaaagcattcagaagctaggctttaactttgtagtctactagcacagtgcttgctggaggctttggcataggctgcaaaccaatttgggctcagagggaatatcagtgatccatactgtttggaaaaacactgagctcagttacacttgaattttacagtacagaagcactgggattttatgtgcctttttgtacctttttcagattggaattagttttctgtttaaggctttaatggtactgatttctgaaacgataagtaaaagacaaaatattttgtggtgggagcagtaagttaaaccatgatatgcttcaacacgcttttgttacattgcatttgcttttattaaaatacaaaattaaacaaac

SEQ ID NO: 11287 - protein, 906 aa, Homo sapiens; identical to SEQ ID NO: 1856

SEQ ID NO: 11288 - DNA, 440 bp, Homo sapiens
agaatggcctgctccagatgggaagtttatctgcctggatcctgaaacgaagacgacatatggatcaggaactgagtcactgacagactacagctgacttacaacttaagtgctttcaactgttttaaaactctacaaggtgtggggctgcagatcggaccggatactggggctcggcgtggatgggtctttcatccattcgtcggattcccacaggcttgatggcatcaggctccacagtgtcaggctgctgcagctggctcaagtcatagtcctgcaaaaagacaaaatcaaaaaccgatgggagatgggcacaaagatagaaaattacaacctcgctttttaagcacatactcagaacacatagaaatgaggaaaatttaacataatggaaaagttgccactatgagtttttcatgttatgattaaatatttctttc

SEQ ID NO: 11289 - protein, 48 aa, Homo sapiens
VTDRLQLTYNLSAFNCFKTLQGVGLQIGPDTGARRGWVFHPFVGFPQA

SEQ ID NO: 11290 - DNA, 2534 bp, Homo sapiens
gcgcgtctcttgtttgtgcggctgaccagttggcgacatggtggcacccgtgctggagacttctcacgtgttttgctgcccaaaccgggtgcggggagtcctgaactggagctctgggcccagaggacttctggcctttggcacgtcctgctccgtggtgctctatgaccccctgaaaagggttgttgttaccaacttgaatggtcacaccgcccgagtcaattgcatacagtggatttgtaaacaggatggctccccttctactgaattagtttctggaggatctgataatcaagtgattcactgggaaatagaggataatcagcttttaaaagcagtgcatcttcaaggccatgaaggacctgtttatgcggtgcatgctgtttaccagaggaggacatcagatcctgcattatgtacactgatcgtttctgcagctgcagattctgctgttcgactctggtctaaaaagggtccagaagtaatgtgccttcagactttaaactttggaaatggatttgctttggctctctgcttatcttttttgccaaatactgatgtaccaatattagcatgtggcaatgatgattgcagaattcacatatttgctcaacaaaatgatcagtttcagaaagtgctttctctctgtggacatgaggattggattagaggagtggaatgggcagcctttggtagagatcttttcctagcaagctgttcacaagattgcctgataagaatatggaagctgtatataaagtcaacatctttagaaactcaggatgacgataacataagactgaaagaaaatacttttaccatagaaaatgaaagtgttaaaatagcatttgctgttactctggagacagtgctagccggtcatgaaaactgggtaaatgcagttcactggcaacctgtgttttacaaagatggtgtcctacagcagccagtgagattattatctgcttccatggataaaaccatgattctctgggctccagatgaagagtcaggagtttggctagaacaggttcgagtaggtgaagtaggtgggaatactttgggattttatgattgccagttcaatgaagatggctccatgatcattgctcatgctttccacggagcgttgcacctttggaaacagaatacagttaacccaagagagtggactccagagattgtcatttcaggacactttgatggtgtccaagacctagtctgggatccagaaggagaatttattatcactgttggtactgatcagacaactagactttttgctccatggaagagaaaagaccaatcacaggtgacttggcatgaaattgcaaggcctcagatacatgggtatgacctgaaatgtttggcaatgattaatcggtttcagtttgtatctggagcagatgaaaaagttcttcgggttttttctgcacctcggaattttgtggaaaatttttgtgccattacaggacaatcactgaatcatgtgctctgtaatcaagatagtgatcttccagaaggagccactgtccctgcattgggattatcaaataaagctgtctttcagggagatatagcttctcagccttctgatgaagaggagctgttaactagtactggttttgagtatcagcaggtggcctttcagccctccatacttactgagcctcccactgaggatcatcttctgcagaatactttgtggcctgaagttcaaaaactatatgggcacggttatgaaatattttgtgttacttgtaacagttcaaagactctgcttgcctcagcttgtaaggcagctaagaaagagcatgcagctatcattctttggaacactacatcttggaaacaggtgcagaatttagttttccacagtttgacagtcacgcagatggccttctcacctaatgagaagttcttactagctgtttccagagatcgaacctggtcattgtggaaaaagcaggatacaatctcacctgagttcgagccagtttttagtctttttgccttcaccaacaaaattacttctgtgcacagtagaattatttggtcttgtgattggagtcctgacagcaagtatttcttcactgggagtcgagacaaaaaggtggttgtctggggtgagtgcgactccactgatgactgtattgagcacaacattggcccctgctcctcagtcctggacgtgggtggggctgtgacagctgtcagcgtctgcccagtgctccacccttctcaacgatacgtggttgcagtaggattggagtgtggaaagatttgcttatatacctggaaaaagactgatcaagttccagaaataaatgactggacccactgtgtagaaacaagtcaaagccaaagtcatacactggctatcagaaaattatgctggaagaattgcagtggaaaaactgaacagaaggaagcagaaggtgctgagtggttacactttgcaagctgtggtgaagatcacactgtgaagatacacagagtcaataaatgtgcactgtaatggacttaataactac

SEQ ID NO: 11291 - protein, 826 aa, Homo sapiens; identical to SEQ ID NO: 1858

SEQ ID NO: 11292 - DNA, 2609 bp, Homo sapiens
gcgcgtctcttgtttgtgcggctgaccagttggcgacatggtggcacccgtgctggagacttctcacgtgttttgctgcccaaaccgggtgcggggagtcctgaactggagctctgggcccagaggacttctggcctttggcacgtcctgctccgtggtgctctatgaccccctgaaaagggttgttgttaccaacttgaatggtcacaccgcccgagtcaattgcatacagtggatttgtaaacaggatggctccccttctactgaattagtttctggaggatctgataatcaagtgattcactgggaaatagaggataatcagcttttaaaagcagtgcatcttcaaggccatgaaggacctgtttatgcggtgcatgctgtttaccagaggaggacatcagatcctgcattatgtacactgatcgtttctgcagctgcagattctgctgttcgactctggtctaaaaagggtccagaagtaatgtgccttcagactttaaactttggaaatggatttgctttggctctctgcttatcttttttgccaaatactgatgtaccaatattagcatgtggcaatgatgattgcagaattcacatatttgctcaacaaaatgatcagtttcagaaagtgctttctctctgtggacatgaggattggattagaggagtggaatgggcagcctttggtagagatcttttcctagcaagctgttcacaagattgcctgataagaatatggaagctgtatataaagtcaacatctttagaaactcaggatgacgataacataagactgaaagaaaatacttttaccatagaaaatgaaagtgttaaaatagcatttgctgttactctggagacagtgctagccggtcatgaaaactgggtaaatgcagttcactggcaacctgtgttttacaaagatggtgtcctacagcagccagtgagattattatctgcttccatggataaaaccatgattctctgggctccagatgaagagtcaggagtttggctagaacaggttcgagtaggtgaagtaggtgggaatactttgggattttatgattgccagttcaatgaagatggctccatgatcattgctcatgctttccacggagcgttgcacctttggaaacagaatacagttaacccaagagagtggactccagagattgtcatttcaggacactttgatggtgtccaagacctagtctgggatccagaaggagaatttattatcactgttggtactgatcagacaactagactttttgctccatggaagagaaaagaccaatcacaggtgacttggcatgaaattgcaaggcctcagatacatgggtatgacctgaaatgtttggcaatgattaatcggtttcagtttgtatctggagcagatgaaaaagttcttcgggttttttctgcacctcggaattttgtggaaaatttttgtgccattacaggacaatcactgaatcatgtgctctgtaatcaagatagtgatcttccagaaggagccactgtccctgcattgggattatcaaataaagctgtctttcagggagatatagcttctcagccttctgatgaagaggagctgttaactagtactggttttgagtatcagcaggtggcctttcagccctccatacttactgagcctcccactgaggatcatcttctgcagaatactttgtggcctgaagttcaaaaactatatgggcacggttatgaaatattttgtgttacttgtaacagttcaaagactctgcttgcctcagcttgtaaggcagctaagaaagagcatgcagctatcattctttggaacactacatcttggaaacaggtgcagaatttagttttccacagtttgacagtcacgcagatggccttctcacctaatgagaagttcttactagctgtttccagagatcgaacctggtcattgtggaaaaagcaggatacaatctcacctgagttcgagccagtttttagtctttttgccttcaccaacaaaattacttctgtgcacagtagaattatttggtcttgtgattggagtcctgacagcaagtatttcttcactgggagtcgagacaaaaaggtggttgtctggggtgagtgcgactccactgatgactgtattgagcacaacattggcccctgctcctcagtcctggacgtgggtggggctgtgacagctgtcagcgtctgcccagtgctccacccttctcaacgatacgtggttgcagtaggattggagtgtggaaagatttgcttatatacctggaaaaagactgatcaagttccagaaataaatgactggacccactgtgtagaaacaagtcaaagccaaagtcatacactggctatcagaaaattatgctggaagaattgcagtggaaaaactgaacagaaggaagcagaaggtgctgagtggttacactttgcaagctgtggtgaagatcacactgtgaagatacacagagtcaataaatgtgcactgtaatggacttaataactacatgcttgcagtcactggtatcttaaaatattatcatgtaaacaggtcatctttaccttcataactgaattgagtt

SEQ ID NO: 11293 - protein, 826 aa, Homo sapiens; identical to SEQ ID NO: 1858

SEQ ID NO: 11294 - DNA, 2319 bp, Homo sapiens
tctcttgtttgtgcggctgaccagttggcgacatggtggcacccgtgctggagacttctcacgtgttttgctgcccaaaccgggtgcggggagtcctgaactggagctctgggcccagaggacttctggcctttggcacgtcctgctccgtggtgctctatgaccccctgaaaagggttgttgttaccaacttgaatggtcacaccgcccgagtcaattgcatacagtggatttgtaaacaggatggctccccttctactgaattagtttctggaggatctgataatcaagtgattcactgggaaatagaggataatcagcttttaaaagcagtgcatcttcaaggccatgaaggacctgtttatgcggtgcatgctgtttaccagaggaggacatcagatcctgcattatgtacactgatcgtttctgcagctgcagattctgctgttcgactctggtctaaaaagggtccagaagtaccaatattagcatgtggcaatgatgattgcagaattcacatatttgctcaacaaaatgatcagtttcagaaagtgctttctctctgtggacatgaggattggattagaggagtggaatgggcagcctttggtagagatcttttcctagcaagctgttcacaagattgcctgataagaatatggaagctgtatataaagtcaacatctttagaaactcaggatgacgataacataagactgaaagaaaatacttttaccatagaaaatgaaagtgttaaaatagcatttgctgttactctggagacagtgctagccggtcatgaaaactgggtaaatgcagttcactggcaacctgtgttttacaaagatggtgtcctacagcagccagtgagattattatctgcttccatggataaaaccatgattctctgggctccagatgaagagtcaggagtttggctagaacagagagagtggactccagagattgtcatttcaggacactttgatggtgtccaagacctagtctgggatccagaaggagaatttattatcactgttggtactgatcagacaactagactttttgctccatggaagagaaaagaccaatcacaggtgacttggcatgaaattgcaaggcctcagatacatgggtatgacctgaaatgtttggcaatgattaatcggtttcagtttgtatctggagcagatgaaaaagttcttcgggttttttctgcacctcggaattttgtggaaaatttttgtgccattacaggacaatcactgaatcatgtgctctgtaatcaagatagtgatcttccagaaggagccactgtccctgcattgggattatcaaataaagctgtctttcagggagatatagcttctcagccttctgatgaagaggagctgttaactagtactggttttgagtatcagcaggtggcctttcagccctccatacttactgagcctcccactgaggatcatcttctgcagaatactttgtggcctgaagttcaaaaactatatgggcacggttatgaaatattttgtgttacttgtaacagttcaaagactctgcttgcctcagcttgtaaggcagctaagaaagagcatgcagctatcattctttggaacactacatcttggaaacaggtgcagaatttagttttccacagtttgacagtcacgcagatggccttctcacctaatgagaagttcttactagctgtttccagagatcgaacctggtcattgtggaaaaagcaggatacaatctcacctgagttcgagccagtttttagtctttttgccttcaccaacaaaattacttctgtgcacagtagaattatttggtcttgtgattggagtcctgacagcaagtatttcttcactgggagtcgagacaaaaaggtggttgtctggggtgagtgcgactccactgatgactgtattgagcacaacattggcccctgctcctcagtcctggacgtgggtggggctgtgacagctgtcagcgtctgcccagtgctccacccttctcaacgatacgtggttgcagtaggattggagtgtggaaagatttgcttatatacctggaaaaagactgatcaagttccagaaataaatgactggacccactgtgtagaaacaagtcaaagccaaagtcatacactggctatcagaaaattatgctggaagaattgcagtggaaaaactgaacagaaggaagcagaaggtgctgagtggttacactttgcaagctgtggtgaagatcacactgtgaagatacacagagtcaataaatgtgcactgtaatggacttaataactac

SEQ ID NO: 11295 - protein, 756 aa, Homo sapiens
MVAPVLETSHVFCCPNRVRGVLNWSSGPRGLLAFGTSCSVVLYDPLKRVVVTNLNGHTARVNCIQWICKQDGSPSTELVSGGSDNQVIHWEIEDNQLLKAVHLQGHEGPVYAVHAVYQRRTSDPALCTLIVSAAADSAVRLWSKKGPEVPILACGNDDCRIHIFAQQNDQFQKVLSLCGHEDWIRGVEWAAFGRDLFLASCSQDCLIRIWKLYIKSTSLETQDDDNIRLKENTFTIENESVKIAFAVTLETVLAGHENWVNAVHWQPVFYKDGVLQQPVRLLSASMDKTMILWAPDEESGVWLEQREWTPEIVISGHFDGVQDLVWDPEGEFIITVGTDQTTRLFAPWKRKDQSQVTWHEIARPQIHGYDLKCLAMINRFQFVSGADEKVLRVFSAPRNFVENFCAITGQSLNHVLCNQDSDLPEGATVPALGLSNKAVFQGDIASQPSDEEELLTSTGFEYQQVAFQPSILTEPPTEDHLLQNTLWPEVQKLYGHGYEIFCVTCNSSKTLLASACKAAKKEHAAIILWNTTSWKQVQNLVFHSLTVTQMAFSPNEKFLLAVSRDRTWSLWKKQDTISPEFEPVFSLFAFTNKITSVHSRIIWSCDWSPDSKYFFTGSRDKKVVVWGECDSTDDCIEHNIGPCSSVLDVGGAVTAVSVCPVLHPSQRYVVAVGLECGKICLYTWKKTDQVPEINDWTHCVETSQSQSHTLAIRKLCWKNCSGKTEQKEAEGAEWLHFASCGEDHTVKIHRVNKCAL

SEQ ID NO: 11296 - DNA, 2451 bp, Homo sapiens
tctcttgtttgtgcggctgaccagttggcgacatggtggcacccgtgctggagacttctcacgtgttttgctgcccaaaccgggtgcggggagtcctgaactggagctctgggcccagaggacttctggcctttggcacgtcctgctccgtggtgctctatgaccccctgaaaagggttgttgttaccaacttgaatggtcacaccgcccgagtcaattgcatacagtggatttgtaaacaggatggctccccttctactgaattagtttctggaggatctgataatcaagtgattcactgggaaatagaggataatcagcttttaaaagcagtgcatcttcaaggccatgaaggacctgtttatgcggtgcatgctgtttaccagaggaggacatcagatcctgcattatgtacactgatcgtttctgcagctgcagattctgctgttcgactctggtctaaaaagggtccagaagtaccaatattagcatgtggcaatgatgattgcagaattcacatatttgctcaacaaaatgatcagtttcagaaagtgctttctctctgtggacatgaggattggattagaggagtggaatgggcagcctttggtagagatcttttcctagcaagctgttcacaagattgcctgataagaatatggaagctgtatataaagtcaacatctttagaaactcaggatgacgataacataagactgaaagaaaatacttttaccatagaaaatgaaagtgttaaaatagcatttgctgttactctggagacagtgctagccggtcatgaaaactgggtaaatgcagttcactggcaacctgtgttttacaaagatggtgtcctacagcagccagtgagattattatctgcttccatggataaaaccatgattctctgggctccagatgaagagtcaggagtttggctagaacaggttcgagtaggtgaagtaggtgggaatactttgggattttatgattgccagttcaatgaagatggctccatgatcattgctcatgctttccacggagcgttgcacctttggaaacagaatacagttaacccaagagagtggactccagagattgtcatttcaggacactttgatggtgtccaagacctagtctgggatccagaaggagaatttattatcactgttggtactgatcagacaactagactttttgctccatggaagagaaaagaccaatcacaggtgacttggcatgaaattgcaaggcctcagatacatgggtatgacctgaaatgtttggcaatgattaatcggtttcagtttgtatctggagcagatgaaaaagttcttcgggttttttctgcacctcggaattttgtggaaaatttttgtgccattacaggacaatcactgaatcatgtgctctgtaatcaagatagtgatcttccagaaggagccactgtccctgcattgggattatcaaataaagctgtctttcagggagatatagcttctcagccttctgatgaagaggagctgttaactagtactggttttgagtatcagcaggtggcctttcagccctccatacttactgagcctcccactgaggatcatcttctgcagaatactttgtggcctgaagttcaaaaactatatgggcacggttatgaaatattttgtgttacttgtaacagttcaaagactctgcttgcctcagcttgtaaggcagctaagaaagagcatgcagctatcattctttggaacactacatcttggaaacaggtgcagaatttagttttccacagtttgacagtcacgcagatggccttctcacctaatgagaagttcttactagctgtttccagagatcgaacctggtcattgtggaaaaagcaggatacaatctcacctgagttcgagccagtttttagtctttttgccttcaccaacaaaattacttctgtgcacagtagaattatttggtcttgtgattggagtcctgacagcaagtatttcttcactgggagtcgagacaaaaaggtggttgtctggggtgagtgcgactccactgatgactgtattgagcacaacattggcccctgctcctcagtcctggacgtgggtggggctgtgacagctgtcagcgtctgcccagtgctccacccttctcaacgatacgtggttgcagtaggattggagtgtggaaagatttgcttatatacctggaaaaagactgatcaagttccagaaataaatgactggacccactgtgtagaaacaagtcaaagccaaagtcatacactggctatcagaaaattatgctggaagaattgcagtggaaaaactgaacagaaggaagcagaaggtgctgagtggttacactttgcaagctgtggtgaagatcacactgtgaagatacacagagtcaataaatgtgcactgtaatggacttaataactac

SEQ ID NO: 11297 - protein, 800 aa, Homo sapiens
MVAPVLETSHVFCCPNRVRGVLNWSSGPRGLLAFGTSCSVVLYDPLKRVVVTNLNGHTARVNCIQWICKQDGSPSTELVSGGSDNQVIHWEIEDNQLLKAVHLQGHEGPVYAVHAVYQRRTSDPALCTLIVSAAADSAVRLWSKKGPEVPILACGNDDCRIHIFAQQNDQFQKVLSLCGHEDWIRGVEWAAFGRDLFLASCSQDCLIRIWKLYIKSTSLETQDDDNIRLKENTFTIENESVKIAFAVTLETVLAGHENWVNAVHWQPVFYKDGVLQQPVRLLSASMDKTMILWAPDEESGVWLEQVRVGEVGGNTLGFYDCQFNEDGSMIIAHAFHGALHLWKQNTVNPREWTPEIVISGHFDGVQDLVWDPEGEFIITVGTDQTTRLFAPWKRKDQSQVTWHEIARPQIHGYDLKCLAMINRFQFVSGADEKVLRVFSAPRNFVENFCAITGQSLNHVLCNQDSDLPEGATVPALGLSNKAVFQGDIASQPSDEEELLTSTGFEYQQVAFQPSILTEPPTEDHLLQNTLWPEVQKLYGHGYEIFCVTCNSSKTLLASACKAAKKEHAAIILWNTTSWKQVQNLVFHSLTVTQMAFSPNEKFLLAVSRDRTWSLWKKQDTISPEFEPVFSLFAFTNKITSVHSRIIWSCDWSPDSKYFFTGSRDKKVVVWGECDSTDDCIEHNIGPCSSVLDVGGAVTAVSVCPVLHPSQRYVVAVGLECGKICLYTWKKTDQVPEINDWTHCVETSQSQSHTLAIRKLCWKNCSGKTEQKEAEGAEWLHFASCGEDHTVKIHRVNKCAL

SEQ ID NO: 11298 - DNA, 2394 bp, Homo sapiens
tctcttgtttgtgcggctgaccagttggcgacatggtggcacccgtgctggagacttctcacgtgttttgctgcccaaaccgggtgcggggagtcctgaactggagctctgggcccagaggacttctggcctttggcacgtcctgctccgtggtgctctatgaccccctgaaaagggttgttgttaccaacttgaatggtcacaccgcccgagtcaattgcatacagtggatttgtaaacaggatggctccccttctactgaattagtttctggaggatctgataatcaagtgattcactgggaaatagaggataatcagcttttaaaagcagtgcatcttcaaggccatgaaggacctgtttatgcggtgcatgctgtttaccagaggaggacatcagatcctgcattatgtacactgatcgtttctgcagctgcagattctgctgttcgactctggtctaaaaagggtccagaagtaccaatattagcatgtggcaatgatgattgcagaattcacatatttgctcaacaaaatgatcagtttcagaaagtgctttctctctgtggacatgaggattggattagaggagtggaatgggcagcctttggtagagatcttttcctagcaagctgttcacaagattgcctgataagaatatggaagctgtatataaagtcaacatctttagaaactcaggatgacgataacataagactgaaagaaaatacttttaccatagaaaatgaaagtgttaaaatagcatttgctgttactctggagacagtgctagccggtcatgaaaactgggtaaatgcagttcactggcaacctgtgttttacaaagatggtgtcctacagcagccagtgagattattatctgcttccatggataaaaccatgattctctgggctccagatgaagagtcaggagtttggctagaacagagagagtggactccagagattgtcatttcaggacactttgatggtgtccaagacctagtctgggatccagaaggagaatttattatcactgttggtactgatcagacaactagactttttgctccatggaagagaaaagaccaatcacaggtgacttggcatgaaattgcaaggcctcagatacatgggtatgacctgaaatgtttggcaatgattaatcggtttcagtttgtatctggagcagatgaaaaagttcttcgggttttttctgcacctcggaattttgtggaaaatttttgtgccattacaggacaatcactgaatcatgtgctctgtaatcaagatagtgatcttccagaaggagccactgtccctgcattgggattatcaaataaagctgtctttcagggagatatagcttctcagccttctgatgaagaggagctgttaactagtactggttttgagtatcagcaggtggcctttcagccctccatacttactgagcctcccactgaggatcatcttctgcagaatactttgtggcctgaagttcaaaaactatatgggcacggttatgaaatattttgtgttacttgtaacagttcaaagactctgcttgcctcagcttgtaaggcagctaagaaagagcatgcagctatcattctttggaacactacatcttggaaacaggtgcagaatttagttttccacagtttgacagtcacgcagatggccttctcacctaatgagaagttcttactagctgtttccagagatcgaacctggtcattgtggaaaaagcaggatacaatctcacctgagttcgagccagtttttagtctttttgccttcaccaacaaaattacttctgtgcacagtagaattatttggtcttgtgattggagtcctgacagcaagtatttcttcactgggagtcgagacaaaaaggtggttgtctggggtgagtgcgactccactgatgactgtattgagcacaacattggcccctgctcctcagtcctggacgtgggtggggctgtgacagctgtcagcgtctgcccagtgctccacccttctcaacgatacgtggttgcagtaggattggagtgtggaaagatttgcttatatacctggaaaaagactgatcaagttccagaaataaatgactggacccactgtgtagaaacaagtcaaagccaaagtcatacactggctatcagaaaattatgctggaagaattgcagtggaaaaactgaacagaaggaagcagaaggtgctgagtggttacactttgcaagctgtggtgaagatcacactgtgaagatacacagagtcaataaatgtgcactgtaatggacttaataactacatgcttgcagtcactggtatcttaaaatattatcatgtaaacaggtcatctttaccttcataactgaattgagtt

SEQ ID NO: 11299 - protein, 756 aa, Homo sapiens; identical to SEQ ID NO: 11295

SEQ ID NO: 11300 - DNA, 2526 bp, Homo sapiens
tctcttgtttgtgcggctgaccagttggcgacatggtggcacccgtgctggagacttctcacgtgttttgctgcccaaaccgggtgcggggagtcctgaactggagctctgggcccagaggacttctggcctttggcacgtcctgctccgtggtgctctatgaccccctgaaaagggttgttgttaccaacttgaatggtcacaccgcccgagtcaattgcatacagtggatttgtaaacaggatggctccccttctactgaattagtttctggaggatctgataatcaagtgattcactgggaaatagaggataatcagcttttaaaagcagtgcatcttcaaggccatgaaggacctgtttatgcggtgcatgctgtttaccagaggaggacatcagatcctgcattatgtacactgatcgtttctgcagctgcagattctgctgttcgactctggtctaaaaagggtccagaagtaccaatattagcatgtggcaatgatgattgcagaattcacatatttgctcaacaaaatgatcagtttcagaaagtgctttctctctgtggacatgaggattggattagaggagtggaatgggcagcctttggtagagatcttttcctagcaagctgttcacaagattgcctgataagaatatggaagctgtatataaagtcaacatctttagaaactcaggatgacgataacataagactgaaagaaaatacttttaccatagaaaatgaaagtgttaaaatagcatttgctgttactctggagacagtgctagccggtcatgaaaactgggtaaatgcagttcactggcaacctgtgttttacaaagatggtgtcctacagcagccagtgagattattatctgcttccatggataaaaccatgattctctgggctccagatgaagagtcaggagtttggctagaacaggttcgagtaggtgaagtaggtgggaatactttgggattttatgattgccagttcaatgaagatggctccatgatcattgctcatgctttccacggagcgttgcacctttggaaacagaatacagttaacccaagagagtggactccagagattgtcatttcaggacactttgatggtgtccaagacctagtctgggatccagaaggagaatttattatcactgttggtactgatcagacaactagactttttgctccatggaagagaaaagaccaatcacaggtgacttggcatgaaattgcaaggcctcagatacatgggtatgacctgaaatgtttggcaatgattaatcggtttcagtttgtatctggagcagatgaaaaagttcttcgggttttttctgcacctcggaattttgtggaaaatttttgtgccattacaggacaatcactgaatcatgtgctctgtaatcaagatagtgatcttccagaaggagccactgtccctgcattgggattatcaaataaagctgtctttcagggagatatagcttctcagccttctgatgaagaggagctgttaactagtactggttttgagtatcagcaggtggcctttcagccctccatacttactgagcctcccactgaggatcatcttctgcagaatactttgtggcctgaagttcaaaaactatatgggcacggttatgaaatattttgtgttacttgtaacagttcaaagactctgcttgcctcagcttgtaaggcagctaagaaagagcatgcagctatcattctttggaacactacatcttggaaacaggtgcagaatttagttttccacagtttgacagtcacgcagatggccttctcacctaatgagaagttcttactagctgtttccagagatcgaacctggtcattgtggaaaaagcaggatacaatctcacctgagttcgagccagtttttagtctttttgccttcaccaacaaaattacttctgtgcacagtagaattatttggtcttgtgattggagtcctgacagcaagtatttcttcactgggagtcgagacaaaaaggtggttgtctggggtgagtgcgactccactgatgactgtattgagcacaacattggcccctgctcctcagtcctggacgtgggtggggctgtgacagctgtcagcgtctgcccagtgctccacccttctcaacgatacgtggttgcagtaggattggagtgtggaaagatttgcttatatacctggaaaaagactgatcaagttccagaaataaatgactggacccactgtgtagaaacaagtcaaagccaaagtcatacactggctatcagaaaattatgctggaagaattgcagtggaaaaactgaacagaaggaagcagaaggtgctgagtggttacactttgcaagctgtggtgaagatcacactgtgaagatacacagagtcaataaatgtgcactgtaatggacttaataactacatgcttgcagtcactggtatcttaaaatattatcatgtaaacaggtcatctttaccttcataactgaattgagtt

SEQ ID NO: 11301 - protein, 800 aa, Homo sapiens; identical to SEQ ID NO: 11297

SEQ ID NO: 11302 - DNA, 2394 bp, Homo sapiens
tctcttgtttgtgcggctgaccagttggcgacatggtggcacccgtgctggagacttctcacgtgttttgctgcccaaaccgggtgcggggagtcctgaactggagctctgggcccagaggacttctggcctttggcacgtcctgctccgtggtgctctatgaccccctgaaaagggttgttgttaccaacttgaatggtcacaccgcccgagtcaattgcatacagtggatttgtaaacaggatggctccccttctactgaattagtttctggaggatctgataatcaagtgattcactgggaaatagaggataatcagcttttaaaagcagtgcatcttcaaggccatgaaggacctgtttatgcggtgcatgctgtttaccagaggaggacatcagatcctgcattatgtacactgatcgtttctgcagctgcagattctgctgttcgactctggtctaaaaagggtccagaaggtagagatcttttcctagcaagctgttcacaagattgcctgataagaatatggaagctgtatataaagtcaacatctttagaaactcaggatgacgataacataagactgaaagaaaatacttttaccatagaaaatgaaagtgttaaaatagcatttgctgttactctggagacagtgctagccggtcatgaaaactgggtaaatgcagttcactggcaacctgtgttttacaaagatggtgtcctacagcagccagtgagattattatctgcttccatggataaaaccatgattctctgggctccagatgaagagtcaggagtttggctagaacaggttcgagtaggtgaagtaggtgggaatactttgggattttatgattgccagttcaatgaagatggctccatgatcattgctcatgctttccacggagcgttgcacctttggaaacagaatacagttaacccaagagagtggactccagagattgtcatttcaggacactttgatggtgtccaagacctagtctgggatccagaaggagaatttattatcactgttggtactgatcagacaactagactttttgctccatggaagagaaaagaccaatcacaggtgacttggcatgaaattgcaaggcctcagatacatgggtatgacctgaaatgtttggcaatgattaatcggtttcagtttgtatctggagcagatgaaaaagttcttcgggttttttctgcacctcggaattttgtggaaaatttttgtgccattacaggacaatcactgaatcatgtgctctgtaatcaagatagtgatcttccagaaggagccactgtccctgcattgggattatcaaataaagctgtctttcagggagatatagcttctcagccttctgatgaagaggagctgttaactagtactggttttgagtatcagcaggtggcctttcagccctccatacttactgagcctcccactgaggatcatcttctgcagaatactttgtggcctgaagttcaaaaactatatgggcacggttatgaaatattttgtgttacttgtaacagttcaaagactctgcttgcctcagcttgtaaggcagctaagaaagagcatgcagctatcattctttggaacactacatcttggaaacaggtgcagaatttagttttccacagtttgacagtcacgcagatggccttctcacctaatgagaagttcttactagctgtttccagagatcgaacctggtcattgtggaaaaagcaggatacaatctcacctgagttcgagccagtttttagtctttttgccttcaccaacaaaattacttctgtgcacagtagaattatttggtcttgtgattggagtcctgacagcaagtatttcttcactgggagtcgagacaaaaaggtggttgtctggggtgagtgcgactccactgatgactgtattgagcacaacattggcccctgctcctcagtcctggacgtgggtggggctgtgacagctgtcagcgtctgcccagtgctccacccttctcaacgatacgtggttgcagtaggattggagtgtggaaagatttgcttatatacctggaaaaagactgatcaagttccagaaataaatgactggacccactgtgtagaaacaagtcaaagccaaagtcatacactggctatcagaaaattatgctggaagaattgcagtggaaaaactgaacagaaggaagcagaaggtgctgagtggttacactttgcaagctgtggtgaagatcacactgtgaagatacacagagtcaataaatgtgcactgtaatggacttaataactacatgcttgcagtcactggtatcttaaaatattatcatgtaaacaggtcatctttaccttcataactgaattgagtt

SEQ ID NO: 11303 - protein, 756 aa, Homo sapiens
MVAPVLETSHVFCCPNRVRGVLNWSSGPRGLLAFGTSCSVVLYDPLKRVVVTNLNGHTARVNCIQWICKQDGSPSTELVSGGSDNQVIHWEIEDNQLLKAVHLQGHEGPVYAVHAVYQRRTSDPALCTLIVSAAADSAVRLWSKKGPEGRDLFLASCSQDCLIRIWKLYIKSTSLETQDDDNIRLKENTFTIENESVKIAFAVTLETVLAGHENWVNAVHWQPVFYKDGVLQQPVRLLSASMDKTMILWAPDEESGVWLEQVRVGEVGGNTLGFYDCQFNEDGSMIIAHAFHGALHLWKQNTVNPREWTPEIVISGHFDGVQDLVWDPEGEFIITVGTDQTTRLFAPWKRKDQSQVTWHEIARPQIHGYDLKCLAMINRFQFVSGADEKVLRVFSAPRNFVENFCAITGQSLNHVLCNQDSDLPEGATVPALGLSNKAVFQGDIASQPSDEEELLTSTGFEYQQVAFQPSILTEPPTEDHLLQNTLWPEVQKLYGHGYEIFCVTCNSSKTLLASACKAAKKEHAAIILWNTTSWKQVQNLVFHSLTVTQMAFSPNEKFLLAVSRDRTWSLWKKQDTISPEFEPVFSLFAFTNKITSVHSRIIWSCDWSPDSKYFFTGSRDKKVVVWGECDSTDDCIEHNIGPCSSVLDVGGAVTAVSVCPVLHPSQRYVVAVGLECGKICLYTWKKTDQVPEINDWTHCVETSQSQSHTLAIRKLCWKNCSGKTEQKEAEGAEWLHFASCGEDHTVKIHRVNKCAL

SEQ ID NO: 11304 - DNA, 3071 bp, Homo sapiens
gggactgtaaagtatactcagcaatatgttttagaacagactgttttcttttgcatcactaatcttttcctaacatgcagcatttactgtttaaaaagctaaaccactgcgcccagcctgagtttcattttttaagtcacatagcagtagtccttatttcagtgctagaccctttgaaatgcgatgaaagctatatggacccttcgctttgttatataacatatgcacacatacccagaattttgcacatatgttcagagattcctagacctgcagacctgcctctgtgtgtcccaatttaagaacctctgttctttcttcatgactggatttgcccaattttgtgttattttgggacttaatttgtccctctttgggacatttccttatttattgccctcttcagagagtagatgtagaaaataaagagaggaaacctagattacttaattttattttaacattttctatagatagcataccacgccaagtgtgctctgtcttgatccccttctttctagcatctgccagacattgtagagtttcgcaagcagttgtaggtttgagctgcagccagtcatttcttttattctttaaaagtacatagatttgtctttttagggctttactgaaagtaaaatatcctgacatttaaactgacagatgtaggaggtaaaaaatagagttctgaaacatttgaatttatgtgacagctgaagtcacgagatgagggatatatgtcccccagggaggatgcagaaagaagaaaagggtactggaaacagcatgtcagtggtgccagctgagggctggaggcagccaggagagttgggagcctgggtgctgggtggagagaggttaacagggaagacatgggaagtattgtgaaggctggtgtgagcaggggactactccagccctgttggaacatagagccatttggcagattgacaatgcagtgacagctgtatataataaatgtgttgaaaggaggaaggtgaggattttcttggtgggagtttatgctgttatttaacatattttgcttccaaaggggttaagatgttttacctaaatggaggtttctaggtcagtgctatacaatatttctaatctgtgttttatagtgtgagctacatatgtaattttaaaattttcaagtagccacataataaaggaaacaggtgaaatttaatgacatatttcctttaatacggtatatccaaaatattattatgtcaacctataatcagtataaaaacctgttactgaaatattttatagggcccatctcagttcagactagccacatttaagtgcttcatagccacatgtggctcatggccatccatatttggacaatgtactttagactattgcatctgtatactcttgtgccgtcagctggggggtggggtgtgtgtgcgtgtataccaaggcagtgagcatctgagctttgaacctcaaagaccaaaatgccctgcccattttcctgcttatcagctgaggaatctttacccacattgacacatgggcttgttctgacccaagtgcatgcaggcttccagagcagattcagaggcctaacttagtcctttagctttcctcccagcacagaactcccaaggttatctgcaagtaggccttgcctagagagactgagttttcaagttgtcagttttcccaaattgtcctcaagcatcttcctctggaatcaccttactgtttagtaaacattcagaggacttgctacacatctgggcagtctgcattgtaattcatatgtgtttacacatttgtgtcttcatctgctaaagcacctttgaaccatattgtaattcataatatctgaagcaattattatgaattgtagtaattcataatattgaagcgattcataatatctgaagcaatccccagatacgggttaggcatggccctgctctgagcaggatggcaaaagtggcagtccgtgacgcagcccttgttaccccaggctattactaaatggtggtggtggttttatcttaattaaaatgacatcaccaacaatgggccctttcctgtctgccaggaaaagttttctgtagtgacgcacgtgttgtgtgtgtatgtgtgcgtttgaggctatattactcattgctacggcagttcaaaatgacttggaaaaaaacaatgaacgctggtcattgatatgtatactgacatgtttgagggaagttactgtggtctgtaacttatgaaatacataaaaaatatgatgggtggagtgacggacacatggacagatatgaagcaagcactgtaaaatattagtggtagtttttgtatgcccatactcacggcaccattattcacagtagctaagagatggaagcaatatgtgcccatcagtgggtgaatgatcaacaaaatgtggtatattcatacagtggaatattattcagcctctaaaaggaagatacgctgacatgtgctgcaacatggatgaatcttgaggacatgatgctaagtgaagtaagccagtcactggaagacaaatactctatgcttccatttatgtgaagtatctagagcagtcaaatgcatagaaacaagtagaatggtagttgccaaggactgggggaggaggaaatgaggagttgtttaatgggtatagtgtttcagttttgcaagataaaaagtcctgtggattggttgcacagttaagttatgtgaatgctgtatgccaactcaactgtacactctaaaatggttaagatggtaaatcttatctttattttaccacagttttttttaaagcatggtaaacaccatttcccaggatgtaaatcggtactaaaaaaaaagtgctccaaagtaagatatatttgggaaacacagggataactaaggttagataggtgttctttattgcaggaattctaagagcatttaacaaattaatttacactgggaattttcagtgtggagggtctggctcatagcatttcacaaacattatacttcagagtcccaaagcctttaaataaaatgttaatggtagaaactccttaaggggtgttcactgt

SEQ ID NO: 11305 - protein, 75 aa, Homo sapiens
MQHLLFKKLNHCAQPEFHFLSHIAVVLISVLDPLKCDESYMDPSLCYITYAHIPRILHICSEIPRPADLPLCVPI

SEQ ID NO: 11306 - DNA, 799 bp, Homo sapiens
aagtggtgcattaatcttttttctatagcctaatatgcaaatctgcctactttgagtaaggctaaatagcttcaggcttcttctgtaggcgtgagttgaacttcagttgagtgtttggaagatgtttgtcatcagtcactagagagtgaccagtcagtacaaaagcattccctactagaaaaatagctgtgtccacagccttctggtgaggggttggttgcctggcttcagtctatttcaaaagtcagtgcatataaattgaatattaagtcatatggtgtatatggcacttaaacatcacttcctaacagaattatttggtcttgtgattggagtcctgacagcaagtatttcttcactgggagtcgagacaaaaaggtggttgtctggggtgagtgcgactccactgatgactgtattgagcacaacattggcccctgctcctcagtcctggacgtgggtggggctgtgacagctgtcagcgtctgcccagtgctccacccttctcaacgatacgtggttgcagtaggattggagtgtggaaagatttgcttatatacctggaaaaagactgatcaagttccagaaataaatgactggacccactgtgtagaaacaagtcaaagccaaagtcatacactggctatcagaaaattatgctggaagaattgcagtggaaaaactgaacagaaggaagcagaaggtgctgagtggttacactttgcaagctgtggtgaagatcacactgtgaagatacacagagtcaataaatgtgcactgtaatggacttaataactac

SEQ ID NO: 11307 - protein, 65 aa, Homo sapiens
MVYMALKHHFLTELFGLVIGVLTASISSLGVETKRWLSGVSATPLMTVLSTTLAPAPQSWTWVGL

SEQ ID NO: 11308 - DNA, 678 bp, Homo sapiens
agtctatttcaaaagtcagtgcatataaattgaatattaagtcatatggtgtatatggcacttaaacatcacttcctaacaggtaaaaacccagctttctctgctttgtgaatagtgtatacatatttctttcagagccagtttttagtctttttgccttcaccaacaaaattacttctgtgcacagtagaattatttggtcttgtgattggagtcctgacagcaagtatttcttcactgggagtcgagacaaaaaggtggttgtctggggtgagtgcgactccactgatgactgtattgagcacaacattggcccctgctcctcagtcctggacgtgggtggggctgtgacagctgtcagcgtctgcccagtgctccacccttctcaacgatacgtggttgcagtaggattggagtgtggaaagatttgcttatatacctggaaaaagactgatcaagttccagaaataaatgactggacccactgtgtagaaacaagtcaaagccaaagtcatacactggctatcagaaaattatgctggaagaattgcagtggaaaaactgaacagaaggaagcagaaggtgctgagtggttacactttgcaagctgtggtgaagatcacactgtgaagatacacagagtcaataaatgtgcactgtaatggacttaataactac

SEQ ID NO: 11309 - protein, 191 aa, Homo sapiens
KPSFLCFVNSVYIFLSEPVFSLFAFTNKITSVHSRIIWSCDWSPDSKYFFTGSRDKKVVVWGECDSTDDCIEHNIGPCSSVLDVGGAVTAVSVCPVLHPSQRYVVAVGLECGKICLYTWKKTDQVPEINDWTHCVETSQSQSHTLAIRKLCWKNCSGKTEQKEAEGAEWLHFASCGEDHTVKIHRVNKCAL

SEQ ID NO: 11310 - DNA, 532 bp, Homo sapiens
agtcctgacagcaagtatttcttcactgggagtcgagacaaaaaggtggttgtctggggtgagtgcgactccactgatgactgtattgagcacaacattggcccctgctcctcagtcctggacgtgggtggggctgtgacagctgtcagcgtctgcccagtgctccacccttctcaacgatacgtggttgcagtaggattggagtgtggaaagatttgcttatatacctggaaaaagactgatcaagttccagaaataaatgactggacccactgtgtagaaacaagtcaaagccaaagtcatacactggctatcagaaaattatgctggaagaattgcagtggaaaaactgaacagaaggaagcagaaggtgctgagtggttacactttgcaagctgtggtgaagatcacactgtgaagatacacagagtcaataaatgtgcactgtaatggacttaataactacatgcttgcagtcactggtatcttaaaatattatcatgtaaacaggtcatctttaccttcataactg

SEQ ID NO: 11311 - protein, 149 aa, Homo sapiens
SPDSKYFFTGSRDKKVVVWGECDSTDDCIEHNIGPCSSVLDVGGAVTAVSVCPVLHPSQRYVVAVGLECGKICLYTWKKTDQVPEINDWTHCVETSQSQSHTLAIRKLCWKNCSGKTEQKEAEGAEWLHFASCGEDHTVKIHRVNKCAL

SEQ ID NO: 11312 - DNA, 905 bp, Homo sapiens
agcctcccaagtaggtgggattacaggcatgcgccgtcacgcctggctcctttttttatatttttaatagagatggggtttcaccatgttggtcaggcaggtcttaatctcctgacctcaagtgatccatctgcctcgtcctcccaaagtgctgggattacaggcgtatgccaccgtgcctggcctgagttactgtcttttgcaaaatgcttatgtttctcataataatttttaaattgatagaacctaatgattcagaatgtaaaatacaggttaggaatggggctcaaagattcttacttcaccaaatctaggactataatactttctctgtaacaagcatcttcagtggaacaagggtccctacagccagctggggaaacactggctcatgggccttgccagcagaggacacagataaatctgtgtgcagcccctgtaaagaggaggctccttgaggacacaggagagcagtgcagcatgtcctgggctgatgcctgcagagtcttttgtaaggcagggacagttgggacactgtgaagaactactttagagcaatgacgaagataacaatttcatgctaagttaatcactgttgtccccctcccttaaaaacagatacgtggttgcagtaggattggagtgtggaaagatttgcttatatacctggaaaaagactgatcaagttccagaaataaatgactggacccactgtgtagaaacaagtcaaagccaaagtcatacactggctatcagaaaattatgctggaagaattgcagtggaaaaactgaacagaaggaagcagaaggtgctgagtggttacactttgcaagctgtggtgaagatcacactgtgaagatacacagagtcaataaatgtgcactgtaatggacttaataactac

SEQ ID NO: 11313 - protein, 50 aa, Homo sapiens
MGFHHVGQAGLNLLTSSDPSASSSQSAGITGVCHRAWPELLSFAKCLCFS

SEQ ID NO: 11314 - DNA, 971 bp, Homo sapiens
agcctcccaagtaggtgggattacaggcatgcgccgtcacgcctggctcctttttttatatttttaatagagatggggtttcaccatgttggtcaggcaggtcttaatctcctgacctcaagtgatccatctgcctcgtcctcccaaagtgctgggattacaggcgtatgccaccgtgcctggcctgagttactgtcttttgcaaaatgcttatgtttctcataataatttttaaattgatagaacctaatgattcagaatgtaaaatacaggttaggaatggggctcaaagattcttacttcaccaaatctaggactataatactttctctgtaacaagcatcttcagtggaacaagggtccctacagccagctggggaaacactggctcatgggccttgccagcagaggacacagataaatctgtgtgcagcccctgtaaagaggaggctccttgaggacacaggagagcagtgcagcatgtcctgggctgatgcctgcagagtcttttgtaaggcagggacagttgggacactgtgaagaactactttagagcaatgacgaagataacaatttcatgctaagttaatcactgttgtccccctcccttaaaaacagatacgtggttgcagtaggattggagtgtggaaagatttgcttatatacctggaaaaagactgatcaagttccagaaataaatgactggacccactgtgtagaaacaagtcaaagccaaagtcatacactggctatcagaaaattatgctggaagaattgcagtggaaaaactgaacagaaggaagcagaaggtgctgagtggttacactttgcaagctgtggtgaagatcacactgtgaagatacacagagtcaataaatgtgcactgtaatggacttaataactacatgcttgcagtcactggtatcttaaaatattatcatgtaaacaggtcatctttaccttcataactg

SEQ ID NO: 11315 - protein, 50 aa, Homo sapiens; identical to SEQ ID NO: 11313

SEQ ID NO: 11316 - DNA, 588 bp, Homo sapiens
ctctcggaatccgcagcctaggtgtggcgccccgaccggactttcacttctggccagccctttccccacctgggcgcgggagcgggtgccagtctttaaacaacctctcgatgggtcccacgaagatgtttccagacccttggaatgccaagttcaagtttagctatgtctcgcggagaggccggtggaagaagcaacgagaatgaagcaccccagttctctgctgagcacatgggcatctgcaataaagatttaatttcccagcttctcctgaagctcggtatggccacaacactaaattctgcccgaggagattaagcaaaatagtatgggacttccaagaaatgtttttaaagtcaggggcaggcctttcttcatgccttcttcctctttgctggctggaacgcaaagaccatggcaggaggccaagcagccatcctggaaggtgaaagcctcatactaaggacgtcagacagcgaaataagagcctgggtccttgaccctgtagacatctccctccccatcctggtctgtctgccttgactcctttcatatgagagaaataaacttttaacttgcgtaaaccag

SEQ ID NO: 11317 - protein, 57 aa, Homo sapiens
MPSSSLAMSRGEAGGRSNENEAPQFSAEHMGICNKDLISQLLLKLGMATTLNSARGD

SEQ ID NO: 11318 - DNA, 531 bp, Homo sapiens
agaaaaacaagtggacatgttccaagactcccagcagtgggaggggcgtcagattagtgcacaaatgtctgctttaaccgtaatgtagaggaaatacaaggaacttgcattaaataaaagatgcccacaacactaccagacatacaaatgaagcaccccagttctctgctgagcacatgggcatctgcaataaagatttaatttcccagcttctcctgaagctcggtatggccacaacactaaattctgcccgaggagattaagcaaaatagtatgggacttccaagaaatgtttttaaagtcaggggcaggcctttcttcatgccttcttcctctttgctggctggaacgcaaagaccatggcaggaggccaagcagccatcctggaaggtgaaagcctcatactaaggacgtcagacagcgaaataagagcctgggtccttgaccctgtagacatctccctccccatcctggtctgtctgccttgactcctttcatatgagagaaataaacttttaacttgcgtaaacc

SEQ ID NO: 11319 - protein, 44 aa, Homo sapiens
MGLPRNVFKVRGRPFFMPSSSLLAGTQRPWQEAKQPSWKVKASY

SEQ ID NO: 11320 - DNA, 2726 bp, Homo sapiens
ctggatggactagccggggccatggccggcgcggcggcggagtcagggcgggagctgtggaccttcgcgggttcccgggacccgagcgcaccgcggctagcctacggctacggcccgggcagcctgcgcgagctgcgggcgcgcgagttcagccgcctggcaggaactgtctatcttgaccatgcaggtgccaccttgttctcccagagccagctcgaaagcttcactagtgatctcatggaaaacacttatggtaatcctcacagccagaacatcagcagcaagctcacccatgacactgtggagcaggtgcgctacagaatcctggcgcacttccacaccaccgcagaagactacactgtgatcttcactgccgggagcacggctgctctcaaactggtggcagaggcctttccatgggtgtcccagggcccagagagcagtgggagtcgcttctgttacctcaccgacagccacacctccgtagtgggtatgcggaacgtgaccatggctataaatgtcatatccaccccggtcaggccagaggacctgtggtctgcagaggaacgtagtgcttcagccagcaacccagactgccagctgccgcatctcttctgctacccagctcagagtaacttttctggagtcagataccccctgtcctggatagaagaggtcaagtctgggcggttgcaccctgtgagcacgcctgggaagtggtttgtgctgctggatgcagcctcctacgtgagcacctcgcctttggacctgtcagctcaccaggccgactttgtccccatctccttctataagatcttcgggtttcctacaggcctgggcgctctgctggtccataatcgtgcggctcctctactgaggaagacctactttggaggagggacagcctctgcgtacctagcaggagaagacttctacatcccgaggcagtcggtagctcagaggtttgaagatggcaccatctcattccttgatgttatcgcgctaaaacatggatttgacaccctagagcgcctcacaggtggaatggagaatataaagcagcacaccttcaccttggctcagtatacctacgtggccctgtcctctctccagtaccccaatggagcccctgtggtgcggatttacagcgattctgagttcagcagccctgaggttcagggcccaatcatcaattttaatgtgctggatgacaaagggaacatcattggttactcccaggtggacaaaatggccagtctttacaacatccacctgcgaactggctgcttctgtaacactggggcctgccagaggcacctgggcataagcaacgagatggtcaggaagcattttcaggctggtcatgtctgtggggacaatatggacctcatagatgggcagcccacaggatctgtgaggatttcatttggatacatgtcgacgctggatgatgtccaggcctttcttaggttcatcatagacactcgcctgcactcatcaggggactggcctgtccctcaggcccatgctgacaccggggagactggagccccatcagcagacagccaggctgatgttatacctgctgtcatgggcagacgtagcctctcgcctcaggaagatgccctcacaggctccagggtttggaacaactcgtctactgtgaatgctgtgcctgtggccccacctgtgtgtgatgtcgccagaacccagccgactccttcagagaaagctgcaggagtcctggagggggcccttgggccacatgttgtcactaacctttatctctatccaatcaaatcctgtgctgcatttgaggtgaccaggtggcctgtaggaaaccaagggctgctatatgaccggagctggatggttgtgaatcacaatggtgtttgcctgagtcagaagcaggaaccccggctctgcctgatccagcccttcatcgacttgcggcaaaggatcatggtcatcaaagccaaagggatggagcctatagaggtgcctcttgaggaaaatagtgaacggactcagattcgccaaagcagggtctgtgctgacagagtaagtacttatgattgtggagaaaaaatttcaagctggttgtcaacattttttggccgtccttgtcatttgatcaaacaaagttcaaactctcaaaggaatgcaaagaagaaacatggaaaagatcaacttcctggtacaatggccaccctttctctggtgaatgaggcacagtatctgctgatcaacacatccagtattttggaacttcaccggcaactaaacaccagtgatgagaatggaaaggaggaattattctcactgaaggatctcagcttgcgttttcgtgccaatattattatcaatggaaaaagggcttttgaagaagagaaatgggatgagatttcaattggctctttgcgtttccaggttttggggccttgtcacagatgccagatgatttgcatcgaccagcaaactgggcaacgaaaccagcatgttttccaaaaactttctgagagtcgtgaaacaaaggtgaactttggcatgtacctgatgcatgcatcattggatttatcctccccatgtttcctgtctgtaggatctcaggtgctccctgtgttgaaagagaatgtggaaggtcatgatttacctgcatctgagaaacaccaggatgttacctcctaaaaaaaatttttagcataaagtttctcttttacagtgat

SEQ ID NO: 11321 - protein, 888 aa, Homo sapiens
MAGAAAESGRELWTFAGSRDPSAPRLAYGYGPGSLRELRAREFSRLAGTVYLDHAGATLFSQSQLESFTSDLMENTYGNPHSQNISSKLTHDTVEQVRYRILAHFHTTAEDYTVIFTAGSTAALKLVAEAFPWVSQGPESSGSRFCYLTDSHTSVVGMRNVTMAINVISTPVRPEDLWSAEERSASASNPDCQLPHLFCYPAQSNFSGVRYPLSWIEEVKSGRLHPVSTPGKWFVLLDAASYVSTSPLDLSAHQADFVPISFYKIFGFPTGLGALLVHNRAAPLLRKTYFGGGTASAYLAGEDFYIPRQSVAQRFEDGTISFLDVIALKHGFDTLERLTGGMENIKQHTFTLAQYTYVALSSLQYPNGAPVVRIYSDSEFSSPEVQGPIINFNVLDDKGNIIGYSQVDKMASLYNIHLRTGCFCNTGACQRHLGISNEMVRKHFQAGHVCGDNMDLIDGQPTGSVRISFGYMSTLDDVQAFLRFIIDTRLHSSGDWPVPQAHADTGETGAPSADSQADVIPAVMGRRSLSPQEDALTGSRVWNNSSTVNAVPVAPPVCDVARTQPTPSEKAAGVLEGALGPHVVTNLYLYPIKSCAAFEVTRWPVGNQGLLYDRSWMVVNHNGVCLSQKQEPRLCLIQPFIDLRQRIMVIKAKGMEPIEVPLEENSERTQIRQSRVCADRVSTYDCGEKISSWLSTFFGRPCHLIKQSSNSQRNAKKKHGKDQLPGTMATLSLVNEAQYLLINTSSILELHRQLNTSDENGKEELFSLKDLSLRFRANIIINGKRAFEEEKWDEISIGSLRFQVLGPCHRCQMICIDQQTGQRNQHVFQKLSESRETKVNFGMYLMHASLDLSSPCFLSVGSQVLPVLKENVEGHDLPASEKHQDVTS

SEQ ID NO: 11322 - DNA, 2953 bp, Homo sapiens
ctggatggactagccggggccatggccggcgcggcggcggagtcagggcgggagctgtggaccttcgcgggttcccgggacccgagcgcaccgcggctagcctacggctacggcccgggcagcctgcgcgagctgcgggcgcgcgagttcagccgcctggcaggaactgtctatcttgaccatgcaggtgccaccttgttctcccagagccagctcgaaagcttcactagtgatctcatggaaaacacttatggtaatcctcacagccagaacatcagcagcaagctcacccatgacactgtggagcaggtgcgctacagaatcctggcgcacttccacaccaccgcagaagactacactgtgatcttcactgccgggagcacggctgctctcaaactggtggcagaggcctttccatgggtgtcccagggcccagagagcagtgggagtcgcttctgttacctcaccgacagccacacctccgtagtgggtatgcggaacgtgaccatggctataaatgtcatatccaccccggtcaggccagaggacctgtggtctgcagaggaacgtagtgcttcagccagcaacccagactgccagctgccgcatctcttctgctacccagctcagagtaacttttctggagtcagataccccctgtcctggatagaagaggtcaagtctgggcggttgcaccctgtgagcacgcctgggaagtggtttgtgctgctggatgcagcctcctacgtgagcacctcgcctttggacctgtcagctcaccaggccgactttgtccccatctccttctataagatcttcgggtttcctacaggcctgggcgctctgctggtccataatcgtgcggctcctctactgaggaagacctactttggaggagggacagcctctgcgtacctagcaggagaagacttctacatcccgaggcagtcggtagctcagaggtttgaagatggcaccatctcattccttgatgttatcgcgctaaaacatggatttgacaccctagagcgcctcacaggtggaatggagaatataaagcagcacaccttcaccttggctcagtatacctacgtggccctgtcctctctccagtaccccaatggagcccctgtggtgcggatttacagcgattctgagttcagcagccctgaggttcagggcccaatcatcaattttaatgtgctggatgacaaagggaacatcattggttactcccaggtggacaaaatggccagtctttacaacatccacctgcgaactggctgcttctgtaacactggggcctgccagaggcacctgggcataagcaacgagatggtcaggaagcattttcaggctggtcatgtctgtggggacaatatggacctcatagatgggcagcccacaggatctgtgaggatttcatttggatacatgtcgacgctggatgatgtccaggcctttcttaggttcatcatagacactcgcctgcactcatcaggggactggcctgtccctcaggcccatgctgacaccggggagactggagccccatcagcagacagccaggctgatgttatacctgctgtcatgggcagacgtagcctctcgcctcaggaagatgccctcacaggctccagggtttggaacaactcgtctactgtgaatgctgtgcctgtggccccacctgtgtgtgatgtcgccagaacccagccgactccttcagagaaagctgcaggagtcctggagggggcccttgggccacatgttgtcactaacctttatctctatccaatcaaatcctgtgctgcatttgaggtgaccaggtggcctgtaggaaaccaagggctgctatatgaccggagctggatggttgtgaatcacaatggtgtttgcctgagtcagaagcaggaaccccggctctgcctgatccagcccttcatcgacttgcggcaaaggatcatggtcatcaaagccaaagggatggagcctatagaggtgcctcttgaggaaaatagtgaacggactcagattcgccaaagcagggtctgtgctgacagagtaagtacttatgattgtggagaaaaaatttcaagctggttgtcaacattttttggccgtccttgtcatttgatcaaacaaagttcaaactctcaaaggaatgcaaagaagaaacatggaaaagatcaacttcctggtacaatggccaccctttctctggtgaatgaggcacagtatctgctgatcaacacatccagtattttggaacttcaccggcaactaaacaccagtgatgagaatggaaaggaggaattattctcactgaaggatctcagcttgcgttttcgtgccaatattattatcaatggaaaaagggcttttgaagaagagaaatgggatgagatttcaattggctctttgcgtttccaggttttggggccttgtcacagatgccagatgatttgcatcgaccagcaaactgggcaacgaaaccagcatgttttccaaaaactttctgagagtcgtgaaacaaaggtgaactttggcatgtacctgatgcatgcatcattggatttatcctccccatgtttcctgtctgtaggatctcaggtgctccctgtgttgaaagagaatgtggaaggtcatgatttacctgcatctgagaaacaccaggatgttacctcctaaaaaaaatttttagcataaagtttctcttttacagtgatctctattattgttaagatctgcaacttggttcagtagaacttgatgttttgaataaggagagctctttttctttagaggcagggaatgctctcacctgcttccttctgcctttgacttctcaccctgcaaatttgcactggctgtgctcaggagagcacttctgaggcctcaggaacgaatgctgcacccacatccagtgaggctcctgtaggtatttgaagtataa

SEQ ID NO: 11323 - protein, 888 aa, Homo sapiens; identical to SEQ ID NO: 11321

SEQ ID NO: 11324 - DNA, 2101 bp, Homo sapiens
tacatccactccacattcattctgctggcgtccttctgaagcctgctgtccatgtgtgaacccagtcccttcatcatcttccccctggatggttgtatttttccagtcacttctcccccaaatgtctgcctgctgcagcccactgcatcttttgaaagcctgtgccaccccatctctcctgctgctcagttggagagcaggctccaggctcaggcttccctaatgtatctgttcagagcctgtgggattcagggtcagtttgtttcattatcacatttgtaggactttgtgttgttcccagcactaggtgagatttgaaagatgaggtgtgctctgttctcaaggattgttgagatggagcctaatgattgcacactcacgtgctgtgaagagttaagggtaaaaagtacaactctgactctggttcctgagatcaccgaaagaagaggcaaatgaagttaggtggggtggggtggggtttattgttttgaactgtttattaaaaacgcaacctcttcaaagactcagcactgccacatcatatgagtggacttgtcctcatcagctaactgataggagaacaatgccctaaagtaatggatttatccacctactcaggccagtttcatgcaggagggaactttccagatggcacattgccccatttccaagaccttccgctgacaaatgcatcatattaattatgatggaaaacaagtaagaaggcatgctctacaaaaattaggtcacttgcccaggtgcggtggctcacacctgtaattccagcactttgggaggctgacgtgggcagatcatgaggtcaggagatcgagaccatcctggctaacacggtgaaaccccgtctctactaaaatacaaaaaattatagctgggactacaggcacacatcaccacatccagctaattttttttttcttttttttctttttggtagagatggcatctcactttgttgcccaggctagttttgaattcctgggctcaagccatcctcccgccacagcctcccaaagttctgggattacaagtgtgagccactgtgcccagcttttgatttcagacattttaatgcagatcctctcctttacagcactattatttggttatctacttataattactgatttaacattgatctgttttcactagactgtaagctccatgaggacaagtcctgtgccagtatatctctagtgtcagcagacaatactcaaaatttgttgacagactatttaaagctgcccctatttttatcattaattgattgaatattaattaaatatattttattaatttaaaatgaattttaaatgcattttttctttagtgtctaccttcaatatttcttgtatgaagtttcagctaaaaatgtactttgtgtatctgtagagtggcttcatattcagagtttatggacatttatgattttatgtcccctccttggttcttatctcctggagttcagccttatgtgcttctcaaagtgtataacaaaatcaaagacaatgtcatgtcccttgaatttaattctaacaccaaaccttggtgttagagtcacaaaaagtccttttttaaaaaaacttggtgagaacagacaataacttgtctttctgggcattcgcgtcatggtccttttagccagaagagaggttttcttttgcatagtttggtgagcatcaagaatcctttaaggagggtggcggtgctgacttctccccattgagagtcagcctcatcccctcctcagccttgtggatggagaagaacaggcagtgatatacattttctgctgttgaaagatgtccgcttatccttctctttcagtgaaaagttgcttttttattcaatatgtactgaacaggttctagagtttcagaaacaaaagaaacagaaccaacatttatagatctcactatagaggcatcactaattggggaaagacagactaggtaatagtcagatgtgatatagtatgtttaagctataggatggcaggtgcatgagtgttggttgtattattctttatttttttgtatgacttatgatattcatgataattaaaacgttttggaacaattca

SEQ ID NO: 11325 - protein, 96 aa, Homo sapiens [sequence omitted]

SEQ ID NO: 11326 - DNA, 742 bp, Homo sapiens
gtaggactttgtgttgttcccagcactaggtgagatttgaaagatgaggtgtgctctgttctcaaggattgttgagatggagcctaatgattgcacactcacgtgctgtgaagagttaagggtaaaaagtacaactctgactctggttcctgagatcaccgaaagaagaggcaaatgaagttaggtggggtggggtggggtttattgttttgaactgtttattaaaaacgcaacctcttcaaagactcagcactgccacatcatatgagtggacttgtcctcatcagctaactgataggagaacaatgccctaaagtaatggatttatccacctactcaggccagtttcatgcaggagggaactttccagatggcacattgccccatttccaagaccttccgctgacaaatgcatcatattaattatgatggaaaacaagtaagaaggcatgctctacaaaaattaggtcacttgcccagccactgtgcccagcttttgatttcagacattttaatgcagatcctctcctttacagcactattatttggttatctacttataattactgatttaacattgatctgttttcactagactgtaagctccatgaggacaagtcctgtgccagtatatctctagtgtcagcagacaatactcaaaatttgttgacagactatttaaagctgcccctatttttatcattaattgattgaatattaattaaatatattttattaattt

SEQ ID NO: 11327 - protein, 61 aa, Homo sapiens
MHHINYDGKQVRRHALQKLGHLPSHCAQLLISDILMQILSFTALLFGYLLIITDLTLICFH

SEQ ID NO: 11328 - DNA, 5153 bp, Homo sapiens
ctgcgagtccgcgagccagcgagctgcggctgcggcctcccctgcgcgcagctacccgggcgtcccggcccgcggccccgctaaccccggggcccgcgcccccgcggcagggatgcatcatggccacgctggcttgccgggtgcagttcttggacgacacggaccctttcaacagcaccaacttccccgagcccagccggccgccgctgttcacgttccgcgaggacctcgcgctcggcacccagctggcgggggtccataggctgctgcaggcgccgcacaagctggatgactgtactctgcagctctctcacaatggcgcctacctggatttggaggccaccctggcagagcagcgggatgagttggaaggcttccaggatgacgccgggcggggcaagaagcacagcatcatcctaaggacgcagctgtctgtgagggtccatgcctgcatcgaaaaactatacaactccagcggacgagatttgagaagggccctcttctccctgaagcagatatttcaggatgacaaggatttggtgcatgaatttgtagtggctgaaggtctgacatgtttgatcaaggtgggagctgaggctgatcagaactatcagaactacatcttaagggctttgggccagattatgttgtatgtggatggaatgaatggagtaataaaccgcaatgaaaccattcagtggctgtacactctcattgggtcaaagttccgcctggtggtgaagacagccctgaagctgctgctcgtctttgtagagtactcggagtccaacgcacctctcctaattcaggctgtcactgctgttgacacgaaaagaggggtcaaaccttggtcaaatatcatggaaatcctggaggaaaaagatggagttgatacggagctactggtttatgcaatgactttggtgaacaagacgttatcaggactaccagaccaagacaccttctacgacgtcgtggactgcctggaggagctgggcattgctgctgtgtcccagaggcacttgaacaagaaagggactgacctggacttagtggagcaactcaacatttatgaggtggcgctcaggcacgaggatggcgatgagaccacggagccaccccccagtgggtgccgggaccggaggagggccagcgtgtgttccagtggcggaggcgagcaccggggcctggaccgcagaaggagccgcaggcactcggtgcagagcatcaagagcaccctgtcggcccccaccagtccctgctcccagtcagctcccagcttcaagcccaaccaagtgcgagatctgcgtgaaaaatacagcaattttggcaataactcttatcactcctcaagaccctcatctggatccagtgtgcccaccacccccacatcatccgtctcacccccacaggaggccaggttggaaaggtcatcaccgagtggtcttctcacatcatccttcaggcagcaccaagagtcactggcagcagagagagagaggcggcggcaggagagagaagaaaggttgcagagaatagagcgggaagaaagaaacaaattcagatacaaatacttggaacagttggcagctgaggagcacgagaaggagctgagaagccggagtgtgagccggggcagagccgacctctccttggacctgacctcgccagcagccccagcctgcctggctcctctgagccatagcccctcatcttcagactctcaagaggctctcacggtgtctgcctcctccccaggaacccctcaccatccccaagcaagtgccggggatcctgaacccgaatcagaggcagaaccggaagcagaggcaggggcggggcaggttgctgatgaagctggccaggacatagcctctgcccacgagggtgcagagactgaagtggagcaggcactagagcaagagccggaagaaagagcctccctcagtgaaaaagagaggcagaacgagggggtgaacgagagggacaactgctctgcctccagcgtctcgtcctccagcagcacgttggagagggaggagaaggaggacaagctctccagggacaggacaactggtaaatgaagccccttgtttcagtcggcatgtgccagggaggcctggggtgcaggggctggttctctaagagcttgtccacaggctggcctctgaggtgacctgggtcaacccactcatgtggctgtgtcacccagtgtctggggacaaggagtgtggccacgctggcagccagccagcagccttctgccctgtagaaagacagcccccaaactgtctgccacaccatcacattcatcacctccacacctggggaaaagggccccgataaggagggcttttcctgaggaataagccccagaagagaaacctctcacttccccctgactgttccattgtgaataatagtaaggttgataatagtaaggctttttccgtttttgatataagtttagaaactgtcacattgtcatctattcctttaaaaatgtgtttactgaagtgtgttaatcattttgactggacatttcagactgggaaagatttgtttaaatggattgaatgagtatttccaaaaaattgtacacagtttactgaggtcaatttgatgtactggaatatagataatttgttttctatattacactcataactattcttttctttgtataaagtatatgcttttccttatggaagtatatctttttgatgttacacttaatactcattcagttctcctatgaatggtaactttagaattagggaccaaatggaatgttagattataggtttggtttagcctgaaagaacctcaccaaggacttgagaagggtgccacagagggttataggaatcgtgaataattcatatgatctgtgacaccacaggattacttttcctacccatgacttgtgtgctatcaaggtggtagaatgcctccttcctcaacaaacactcctaaccagtggagtcatgtcttatgggccagcctttcttaagctacatatgagtggcacccactcgagtcgatgtcttaggcccaaagggcaatatgacacctctacaaaggcctgccaaccagtgccatgacccatgaatggcttattcattcctagattaaaaatacattgtctcagaagcatggatgaacgaatgaatgaaaccagaatgtcttccaatagacctgtcagtcaatggcgtagtctaaaatagttactatttggattttttcccagttagaatatactactagattttatgctttatattgctggtcactatgatgcagtaaaaacaagaagataaaagactttattagtttacatcttaggaattattgcattgaaaatccagtgtcttcatttggttgaatatgtatgtgccaagaggtattatatatactgatatttacttaatttctttcaaagtcagattacagttagtcccccaaattcttcttatcattcatattaatgtaattattgtcataatactgggtgtagggtaagtcttattgatcagattggtcttaaatcatgttttatttattaggaatagctttaagaattattaatcataactgggtttagcaggcctaaaacatatcaagaaattggattagtaaaaatataccaggcgacagggctttcttggatcagattgtccaatattcttccaaagaaggacaattttccaaaagtggaaaccgttcccagtgaagaaccactgactttctaccaaagtgggcaatgtccaagtatttagaagcagaaattagggctttgcaatgatttttctgctttgcttcagtgctgttatgagagttggtcatgtttatttactgtagcttattggttcctaaaaaatctcactgctcacaggcatcatcagccactgtggagtccgggcagctatgtcattatagctcttgcttttcagagtgctgtcaaatcacagagcaaccttagagataaaaaattattctcaaacgtatttctaatgattatgtcaaaaatgaatttgtaggacttgaaaaagtctcattccagttatgtggtttaatttttctttgtttaatgtgttctactttagggcatgcatgtgagaagctttatcataacatacattttacttttttgtagttacttgcataattgtcctttgtctccacttgaatgtcagctttgtgagggtggggatgtctgtctattcatcgtgagtcctcacttcctagcagggtctcacaaaacaatcgatgaataaatgaagaggcgtctggctaagatggggaagcttcattgctcctgggtcctccctcttacaaccaacatagcagcaccctgagaataccagaataatcagaggaggactgtgaaaagtggaaagaagaatgcagactgcctaggaacctctggacttaaattatatgacagtgaagctccaagtaaaacttattcccctagccaaaggactgggaaaaggattgcctaacagaatagaacacaggctttttacttattaatacttgtaccctagacaggcactaatgaaaaacctgacccagagtcaatggagactgataagaagctgaacctcccgcgtcccttggaggtaataaggcaatgtgagtcagtgatttaatttccctgggaagatgccagtgaggccaagggagggggcactgacgttctaccctcctcatctgcaatgagccagtgtgagtcagcgctcttgctggggtggtgacagaaagatccagcaaggagctgaacatctccctccaccagcacctgtatgctatacctaaaaagggtgactaccagctaatagattagataggagccaaagtctaataaagcataaaatgtccaagacataatggaaaaatcactcatcatttcaagagctaaggcaatcacatcttgaatgggaaaatgcaataaacagatgccaacactgagatgagccagacattggaattatgtgacggggattttgaagcagccataatgatattgcttcagtgagcagttacaaacacttagggaatacgtaaaaagtaaaatatctcagcaaagaaataaaagatattaaaaagaaccaaagggaaattgtagaactgaaaaacacagtaacaac

SEQ ID NO: 11329 - protein, 654 aa, Homo sapiens
MATLACRVQFLDDTDPFNSTNFPEPSRPPLFTFREDLALGTQLAGVHRLLQAPHKLDDCTLQLSHNGAYLDLEATLAEQRDELEGFQDDAGRGKKHSIILRTQLSVRVHACIEKLYNSSGRDLRRALFSLKQIFQDDKDLVHEFVVAEGLTCLIKVGAEADQNYQNYILRALGQIMLYVDGMNGVINRNETIQWLYTLIGSKFRLVVKTALKLLLVFVEYSESNAPLLIQAVTAVDTKRGVKPWSNIMEILEEKDGVDTELLVYAMTLVNKTLSGLPDQDTFYDVVDCLEELGIAAVSQRHLNKKGTDLDLVEQLNIYEVALRHEDGDETTEPPPSGCRDRRRASVCSSGGGEHRGLDRRRSRRHSVQSIKSTLSAPTSPCSQSAPSFKPNQVRDLREKYSNFGNNSYHSSRPSSGSSVPTTPTSSVSPPQEARLERSSPSGLLTSSFRQHQESLAAERERRRQEREERLQRIEREERNKFRYKYLEQLAAEEHEKELRSRSVSRGRADLSLDLTSPAAPACLAPLSHSPSSSDSQEALTVSASSPGTPHHPQASAGDPEPESEAEPEAEAGAGQVADEAGQDIASAHEGAETEVEQALEQEPEERASLSEKERQNEGVNERDNCSASSVSSSSSTLEREEKEDKLSRDRTTGK

SEQ ID NO: 11330 - DNA, 4966 bp, Homo sapiens
ctgcgagtccgcgagccagcgagctgcggctgcggcctcccctgcgcgcagctacccgggcgtcccggcccgcggccccgctaaccccggggcccgcgcccccgcggcagggatgcatcatggccacgctggcttgccgggtgcagttcttggacgacacggaccctttcaacagcaccaacttccccgagcccagccggccgccgctgttcacgttccgcgaggacctcgcgctcggcacccagctggcgggggtccataggctgctgcaggcgccgcacaagctggatgactgtactctgcagctctctcacaatggcgcctacctggatttggaggccaccctggcagagcagcgggatgagttggaaggcttccaggatgacgccgggcggggcaagaagcacagcatcatcctaaggacgcagctgtctgtgagggtccatgcctgcatcgaaaaactatacaactccagcggacgagatttgagaagggccctcttctccctgaagcagatatttcaggatgacaaggatttggtgcatgaatttgtagtggctgaaggtctgacatgtttgatcaaggtgggagctgaggctgatcagaactatcagaactacatcttaagggctttgggccagattatgttgtatgtggatggaatgaatggagtaataaaccgcaatgaaaccattcagtggctgtacactctcattgggtcaaagttccgcctggtggtgaagacagccctgaagctgctgctcgtctttgtagagtactcggagtccaacgcacctctcctaattcaggctgtcactgctgttgacacgaaaagaggggtcaaaccttggtcaaatatcatggaaatcctggaggaaaaagatggagttgatacggagctactggtttatgcaatgactttggtgaacaagacgttatcaggactaccagaccaagacaccttctacgacgtcgtggactgcctggaggagctgggcattgctgctgtgtcccagaggcacttgaacaagaaagggactgacctggacttagtggagcaactcaacatttatgaggtggcgctcaggcacgaggatggcgatgagaccacggagccaccccccagtgggtgccgggaccggaggagggccagcgtgtgttccagtggcggaggcgagcaccggggcctggaccgcagaaggagccgcaggcactcggtgcagagcatcaagagcaccctgtcggcccccaccagtccctgctcccagtcagctcccagcttcaagcccaaccaagtgcgagatctgcgtgaaaaatacagcaattttggcaataactcttatcactcctcaagaccctcatctggatccagtgtgcccaccacccccacatcatccgtctcacccccacaggaggccaggttggaaaggtcatcaccgagtggtcttctcacatcatccttcaggcagcaccaagagtcactggcagcagagagagagaggcggcggcaggagagagaagaaaggttgcagagaatagagcgggaagaaagaaacaaattcagccgagattatttagacaaaagagaggagcaaaggcaagcaagagaagaaagatacaaatacttggaacagttggcagctgaggagcacgagaaggagctgagaagccggagtgtgagccggggcagagccgacctctccttggacctgacctcgccagcagccccagcctgcctggctcctctgagccatagcccctcatcttcagactctcaagaggctctcacggtgtctgcctcctccccaggaacccctcaccatccccaagcaagtgccggggatcctgaacccgaatcagaggcagaaccggaagcagaggcaggggcggggcaggttgctgatgaagctggccaggacatagcctctgcccacgagggtgcagagactgaagtggagcaggcactagagcaagagccggaagaaagagcctccctcagtgaaaaagagaggcagaacgagggggtgaacgagagggacaactgctctgcctccagcgtctcgtcctccagcagcacgttggagagggaggagaaggaggacaagctctccagggacaggacaactggtttgtggcccgcaggtgtccaggatgcaggtgtaaatggacagtgtggcgacatcctcaccaacaaacggttcatgcttgacatgctgtatgcccataacaggaagtctccggatgatgaggagaagggggatggggaggctgggaggacccagcaggaggcagaggcggtagccagccttgctaccaggatatccaccctgcaggccaactctcagacccaggatgagagtgtcaggagggtggatgtcggctgtttggacaatcggggcagtgtgaaagcatttgctgagaaattcaacagtggggacctggggagaggttccatctcccctgatgctgagcccaatgacaaggtcccagaaacagcgccggtgcagccgaagacagagtctgattacatctgggaccagctcatggccaatccaagagagctcagaatccaagacatggatttcactgacctgggggaggaggatgacattgatgtcctagatgtggacctgggtcacagggaggcccctgggccacctcccccacccccacccacctttctgggtttgccgcccccaccccctccgcccctgttggacagcattcctccccctcctgtccctggtaatttattggttcctcctcctccagtgttcaacgctcctcagggcttagggtggtcccaggtacccaggggtcagcccacattcactaagaaaaagaagaccatccgtttgttctggaatgaagttcggccttttgactggccatgtaaaaacaaccgacgctgcagagaattcctgtggtcaaaactggaacccattaaggtggacacttccagactggagcacctgtttgagtctaaatccaaggaactgtctgtctcaaagaaaactgctgcagatggaaaaaggcaagagatcattgttctggattccaagaggagtaacgccatcaatattggtctgacggtgctgccccctccaaggacgattaagatcgccattttgaattttgatgagtatgccttaaacaaagaaggaatcgagaaaattctaacgatgattcccaccgatgaggagaagcagaaaatccaggaagctcagctggccaaccctgaaatccccctgggcagtgcagagcagttcctcctcaccctgtcctccatcagcgagctctctgcacgacttcacctctgggcattcaaaatggattatgaaactacagaaaaggaagtagcagaaccactcctggacctgaaggaaggaatagaccagttggagaacaataaaaccttgggctttatcctgtctactctcttagccattgggaactttctaaatggaactaatgccaaagcgtttgagttaagctacctcgagaaggttccagaagtcaaagacacagtgcacaagcagtcgcttctccaccatgtgtgcaccatggtggtagaaaacttcccagacagctccgatctgtactcggagatcggggccatcaccaggtcagccaaggttgactttgatcaacttcaggataatttatgtcagatggagagaagatgcaaagcttcatgggatcacctcaaggcaattgcaaaacatgaaatgaaaccagttttaaaacaacggatgtcagagttcctgaaagactgtgcagagcgaattataattttaaagattgtccatagaaggataatcaacagattccactcctttttactctttatgggccatccaccttatgcaattcgggaagtgaacataaacaaattctgcaggattattagtgaatttgcactagagtatcgcacaaccagggaaagggttttgcagcagaaacagaaacgggccaaccacagagagagaaataagaccagagggaagatgatcaccgattctggcaagttctccggcagttctccggcgcccccaagccagccgcagggtctgagctatgcggaggacgcggctgagcacgagaacatgaaggctgtgctgaaaacctcgtccccctccgtggaggacgccacccccgcgctgggcgtccgcacacgcagccgagcaagccgaggatccactagttcctggactatgggaactgatgactcgcccaatgtcacagatgatgcagctgatgagatcatggaccgcatcgtcaagtcagccacccaagtgcccagtcagcgagtggtgccgagggagaggaaacgatcccgggccaaccggaaatctttgcgaagaaccctgaagagcggcctgaccccagaagaagccagagccctgggcttggttggcacctcggagttgcagctgtgacactcataggttactcccaggagtgtgctgagcagaaggcaagctcttgctggatgaaacccctccaggtggggttggggagacttgatattcacatccaacagtttgaaaagggagagctcaattcccagcgtcaccccatggcttgtgttgcctgctacgcattgacttggatctccaggagtcccctgcacataccttctccatcgtgtcagctgtgtttctcttgattccgtgacacccggtttattagttcaaaagtgtgacaccttttctgggcaaggaacagcccctttaaggagcaaatcacttctgtcacagttattatggtaatatgaggcaatctgattagcttcacagactgagtctccacaacaccaaaatatccagatgtaaaccccaaacttgtacacaaaagaaagcacagattgtttacctgttgtggattttagatgtaacaaatgtttatacaaatacatacatgtacaccatgtttcaaatactaaataaatagagtttaatgccat

SEQ ID NO: 11331 - protein, 1439 aa, Homo sapiens; identical to SEQ ID NO: 1862

SEQ ID NO: 11332 - DNA, 5127 bp, Homo sapiens
ctgcgagtccgcgagccagcgagctgcggctgcggcctcccctgcgcgcagctacccgggcgtcccggcccgcggccccgctaaccccggggcccgcgcccccgcggcagggatgcatcatggccacgctggcttgccgggtgcagttcttggacgacacggaccctttcaacagcaccaacttccccgagcccagccggccgccgctgttcacgttccgcgaggacctcgcgctcggcacccagctggcgggggtccataggctgctgcaggcgccgcacaagctggatgactgtactctgcagctctctcacaatggcgcctacctggatttggaggccaccctggcagagcagcgggatgagttggaaggcttccaggatgacgccgggcggggcaagaagcacagcatcatcctaaggacgcagctgtctgtgagggtccatgcctgcatcgaaaaactatacaactccagcggacgagatttgagaagggccctcttctccctgaagcagatatttcaggatgacaaggatttggtgcatgaatttgtagtggctgaaggtctgacatgtttgatcaaggtgggagctgaggctgatcagaactatcagaactacatcttaagggctttgggccagattatgttgtatgtggatggaatgaatggagtaataaaccgcaatgaaaccattcagtggctgtacactctcattgggtcaaagttccgcctggtggtgaagacagccctgaagctgctgctcgtctttgtagagtactcggagtccaacgcacctctcctaattcaggctgtcactgctgttgacacgaaaagaggggtcaaaccttggtcaaatatcatggaaatcctggaggaaaaagatggagttgatacggagctactggtttatgcaatgactttggtgaacaagacgttatcaggactaccagaccaagacaccttctacgacgtcgtggactgcctggaggagctgggcattgctgctgtgtcccagaggcacttgaacaagaaagggactgacctggacttagtggagcaactcaacatttatgaggtggcgctcaggcacgaggatggcgatgagaccacggagccaccccccagtgggtgccgggaccggaggagggccagcgtgtgttccagtggcggaggcgagcaccggggcctggaccgcagaaggagccgcaggcactcggtgcagagcatcaagagcaccctgtcggcccccaccagtccctgctcccagtcagctcccagcttcaagcccaaccaagtgcgagatctgcgtgaaaaatacagcaattttggcaataactcttatcactcctcaagaccctcatctggatccagtgtgcccaccacccccacatcatccgtctcacccccacaggaggccaggttggaaaggtcatcaccgagtggtcttctcacatcatccttcaggcagcaccaagagtcactggcagcagagagagagaggcggcggcaggagagagaagaaaggttgcagagaatagagcgggaagaaagaaacaaattcagccgagattatttagacaaaagagaggagcaaaggcaagcaagagaagaaagatacaaatacttggaacagttggcagctgaggagcacgagaaggagctgagaagccggagtgtgagccggggcagagccgacctctccttggacctgacctcgccagcagccccagcctgcctggctcctctgagccatagcccctcatcttcagactctcaagaggctctcacggtgtctgcctcctccccaggaacccctcaccatccccaagcaagtgccggggatcctgaacccgaatcagaggcagaaccggaagcagaggcaggggcggggcaggttgctgatgaagctggccaggacatagcctctgcccacgagggtgcagagactgaagtggagcaggcactagagcaagagccggaagaaagagcctccctcagtgaaaaagagaggcagaacgagggggtgaacgagagggacaactgctctgcctccagcgtctcgtcctccagcagcacgttggagagggaggagaaggaggacaagctctccagggacaggacaactggtttgtggcccgcaggtgtccaggatgcaggtgtaaatggacagtgtggcgacatcctcaccaacaaacggttcatgcttgacatgctgtatgcccataacaggaagtctccggatgatgaggagaagggggatggggaggctgggaggacccagcaggaggcagaggcggtagccagccttgctaccaggatatccaccctgcaggccaactctcagacccaggatgagagtgtcaggagggtggatgtcggctgtttggacaatcggggcagtgtgaaagcatttgctgagaaattcaacagtggggacctggggagaggttccatctcccctgatgctgagcccaatgacaaggtcccagaaacagcgccggtgcagccgaagacagagtctgattacatctgggaccagctcatggccaatccaagagagctcagaatccaagacatggatttcactgacctgggggaggaggatgacattgatgtcctagatgtggacctgggtcacagggaggcccctgggccacctcccccacccccacccacctttctgggtttgccgcccccaccccctccgcccctgttggacagcattcctccccctcctgtccctggtaatttattggttcctcctcctccagtgttcaacgctcctcagggcttagggtggtcccaggtacccaggggtcagcccacattcactaagaaaaagaagaccatccgtttgttctggaatgaagttcggccttttgactggccatgtaaaaacaaccgacgctgcagagaattcctgtggtcaaaactggaacccattaaggtggacacttccagactggagcacctgtttgagtctaaatccaaggaactgtctgtctcaaagaaaactgctgcagatggaaaaaggcaagagatcattgttctggattccaagaggagtaacgccatcaatattggtctgacggtgctgccccctccaaggacgattaagatcgccattttgaattttgatgagtatgccttaaacaaagaaggaatcgagaaaattctaacgatgattcccaccgatgaggagaagcagaaaatccaggaagctcagctggccaaccctgaaatccccctgggcagtgcagagcagttcctcctcaccctgtcctccatcagcgagctctctgcacgacttcacctctgggcattcaaaatggattatgaaactacagaaaaggaagtagcagaaccactcctggacctgaaggaaggaatagaccagttggagaacaataaaaccttgggctttatcctgtctactctcttagccattgggaactttctaaatggaactaatgccaaagcgtttgagttaagctacctcgagaaggttccagaagtcaaagacacagtgcacaagcagtcgcttctccaccatgtgtgcaccatggtggtagaaaacttcccagacagctccgatctgtactcggagatcggggccatcaccaggtcagccaaggttgactttgatcaacttcaggataatttatgtcagatggagagaagatgcaaagcttcatgggatcacctcaaggcaattgcaaaacatgaaatgaaaccagttttaaaacaacggatgtcagagttcctgaaagactgtgcagagcgaattataattttaaagattgtccatagaaggataatcaacagattccactcctttttactctttatgggccatccaccttatgcaattcgggaagtgaacataaacaaattctgcaggattattagtgaatttgcactagagtatcgcacaaccagggaaagggttttgcagcagaaacagaaacgggccaaccacagagagagaaataagaccagagggaagatgatcaccgattctggcaagttctccggcagttctccggcgcccccaagccagccgcagggtctgagctatgcggaggacgcggctgagcacgagaacatgaaggctgtgctgaaaacctcgtccccctccgtggaggacgccacccccgcgctgggcgtccgcacacgcagccgagcaagccgaggatccactagttcctggactatgggaactgatgactcgcccaatgtcacagatgatgcagctgatgagatcatggaccgcatcgtcaagtcagccacccaagtgcccagtcagcgagtggtgccgagggagaggaaacgatcccgggccaaccggaaatctttgcgaagaaccctgaagagcggcctgaccccagaagaagccagagccctgggcttggttggcacctcggagttgcagctgtgacactcataggttactcccaggagtgtgctgagcagaaggcaagctcttgctggatgaaacccctccaggtggggttggggagacttgatattcacatccaacagtttgaaaagggagagctcaattcccagcgtcaccccatggcttgtgttgcctgctacgcattgacttggatctccaggagtcccctgcacataccttctccatcgtgtcagctgtgtttctcttgattccgtgacacccggtttattagttcaaaagtgtgacaccttttctgggcaaggaacagcccctttaaggagcaaatcacttctgtcacagttattatggtaatatgaggcaatctgattagcttcacagactgagtctccacaacaccaaaatatccagatgtaaaccccaaacttgtacacaaaagaaagcacagattgtttacctgttgtggattttagatgtaacaaatgtttatacaaatacatacatgtacaccatgtttcaaatactaaataaatagagtttaatgccataatgagaaacttttattcttctgggaacaggaccttaaacagttccacaggctcgcctcttcagaatggcaaaactcttctcagtgtcctcagaagcaccctcgcttggaacggccttcagatcctttgggctgtattttgttaatagagtgagtaacatc

SEQ ID NO: 11333 - protein, 1439 aa, Homo sapiens; identical to SEQ ID NO: 1862

SEQ ID NO: 11334 - DNA, 4862 bp, Homo sapiens
cccgagtggcggttgtttcaagatggcggacgtggcgggcccctcccgccccagtgccgcggcgttctggagccgggacttttctgatgaagaacaatcagtagtatacgttccaggaatttctgctgaaggaaatgtcagatcaagacacaagctgatgagtccaaaagctgatgttaaacttaagacttccagggtgactgatgcttcaatctccatggagtccttaaaaggcacaggagattcagtagatgaacagaattcctgcaggggagaaataaagagtgcatcattgaaggatttatgtcttgaagacaaaagacgcattgcaaacttaattaaagaactggccagagtaagtgaggaaaaggaagtgacagaggaaagactgaaagctgagcaggagtcatttgagaagaagatcaggcagttggaagaacagaatgaactgatcatcaaagaaagggaagctcttcagctacagtatagagaatgccaagaacttctaagcctgtatcagaaatatttatcagaacaacaggagaagctcaccatgtctctctcagaacttggtgctgctagaatgcaggaacagcaggtatccagtagaaaaagcactctccagtgttcatctgtggaactggatggttcctacttgagcatagccagaccacagacctactatcaaaccaagcaaagacctaagtctgcagtccaggattcagcttcagaatcccttatagcatttaggaataattctttgaaaccagtaacccttcatcatcccaaagatgatctagataagataccatcagagaccacaacatgtaattgtgaatctccagggagaaaacctgcagtcccaacagagaaaatgccacaagaagaattgcacatgaaggaatgtccacatcttaagcctactcctagtcaatgctgtggtcatagacttgctgcagatcgtgttcatgacagccatcctacaaacatgacccctcaacatcctaagacacatccagaatcatgcagttattgtcggctttcttgggcatctctggtgcatggtggtggggcactgcaacccattgaaactttgaaaaagcagatctcagaagatagaaagcagcaactgatgcttcagaaaatggaactggaaattgaaaaggagcgccttcagcatctgctggcccagcaggagacaaagcttcttctaaaacagcagcagcttcaccagtctcgactggattacaattgtttattgaagtcaaactgtgatggctggctgcttggaacatcatcatctattaaaaagcaccaagaccccccaaacagtggagagaataggaaggagaggaagacagttgggtttcattcgcatatgaaagatgatgcccagtggtcatgtcaaaagaaagatacatgtagaccccaaagagggacagtgacaggagttagaaaagatgcgtctacatctcctatgccaacaggaagcctaaaggattttgtcaccacagcctcaccatcattacagcacaccacctcccggtatgagacatctttgttggatttggttcagtctctgagcccaaactctgcgcccaaacctcagcgctatccctccagagaagctggggcctggaatcatggtactttccgactcagtcctctaaaatcaacccggaagaagatggggatgcacagaacccctgaagagttggaggagaatcagattctggaagatatatttttcatttgacatattgcaaaattttcttaggaaatttgtgggtttcctcacatactgatctaggattttaaattatttcattgcaaagtaattgtgtctctcctttcacggggacttgtctcactagcatcctgttacgtattgaatatagaaatcattctaacaacccaggttattttcaatcagaccaggcattcgataacacactaagggggtaggaatggaagatggtatcttttatatgctaaacagattagaaaattaacataggatactttctgcgtggtggaaaccattgcatattcagcctcatttcaagagtgtttccttctcaaacttctgctagaaaatgctgactcacttttatatacaagaaaaacctttccactgaaaaatccctctgatttaaaagtaacccctttgaaacataagcagtttcagaaaggcagactctctcatctttctcatcctgttctctcactactacatttctgtaagtggtcctttaattctgaagttggagttggtgcccctgccatcacaaacaacacgagagccaattgtgagtcagtctcagtagccatcagcctggcagctgcccatcccataaccaaagagctcaatgggctggagggtgagacccagccaatccttgggagcaagcagcactaaatcacatcagggagtgattagtcctggggaaattcagtggaggcacaagcctgaagcactcttctaccaatgtttgggtgaccacccctccaatatcccagaatgaataagaacaatccctaggtatttttatttacccaagtgttcagcttattcaccccacccccccaccccccatcacacgtgctcctgtgaactttccatggttatgtctacggaaaatgccactagagagagagtgatgcaagctgctgcaaagctgatgggcttcctctggccctcccttttcctccacgaggattaaaggatacaagctgaccaggcctcacaggtgctctgctcgtggccccaaagaaccatctctacttgccagagtatgttccaccacccaagcagggtctccctactttttctcactggcctcgttttgacccagagaaagcctatggaagttatgcagtgcagacctcatcctgtctgctgtcttttctcccacagagctcttgagatgggtccttcagcttgcagtggtccctagtagcctctcaagctaatggggatgatgatcctggtttagccagagttcaaaactctccagtcattgaaagcaaggggagggtgtgttcccagatgtgtattacttgggaattttatttgatctggagggtgtggctttttttctctcctttttaccaaccccaactaaactgggagtaagacttagtcagtgttggtagacaaagtcataccacccagggcagcctgcatgcagcgagtctgcgtggcttccctgaattactcttttaattaaaactagattatttcaatctagaaaagccttgttgagcagcctccttatccagatagatccaaagctcatgtctcttcaggctgagactggcgctgtcacctccacccagccttctttcacttggggttttttattctttggagtagaaaagaatggagcccactaatattatatttttcttctgaaataaatataaagtcaagactaactagttataatcattcccttaaaaagttggaaaatcattacagattaaaatttctttataaagttcacctctgagagtaaccaaatcggtttcatcccatatcaaaaagcctttggagtgtggagctttctgtggtatggcagaaatgggtggatggcaaactaagagccctcagccattttttcagttaaagttaggttgccagaactttcttttccttgccccctgtgtcatgactagcttaagtgtacttgactcccatagactactcccatgcccacagtcacccattccagactccagtgtccttaaaactctggagtgagaggatgccagaggatcaagaaaaggatcacagtttcttgaagaagcttgtttgcctttagaagaatcgtaaacagagtctaaactaaaggctttttgggggtcacagccacagagtggagttttattgcttctttgcctctccatgaatggccaatttggaaaagcagagatgggctttcagcagaatatcaaccaatacatttttcacatgcaaaactcatcaccagttgcctttttctaacttaatggacattttgttggtgttggtgcaagggcaataggatgtaaatttgtatataatctaatgtcttcattattaattgaatagtacatgttaacattttaatctatttaaatttactttgaaatatatacatacatatgaatgaaaggttgttacagagcctcaaagctgttgcagactatcccaagagaaaggatctggcacaaaggaatctgcctttcctccgtctcaagtctcccacccttgactggttgggatttgctcgtccagcctctagacacttcccaaagcaagactggacacatgccgagggcgttgcggatagtgcctcaccattgcccaccctgctgcccaactcctgtgagagaaaaaccaatcaatgtttacaaaatggaaaaggacacagcatgtcctttgaactccctaagtaaggcccacagttcttgatgcagagaaccaaagtgaatcatagaaaagcttttgctaacagtccgctttccaggaggcaaacttgtgtttatccaaacctgatccccatgatggggacttttctagagcaccccaaatgtcatggggagagagggactctttctgctccctcagagctactcttcacttgtccctgcttccggcaccaagttcataatagagatcttctggccagagaatcaggggagaggagaggcctgatggggcagagctggacgaagtctgctaagagagatggaggctgtggcggactccttccaactcacgatttatcctcagctcagagtgtattttgaatatgagcaaatgtttatgtacgtatgagatttcaagttaataaatcatctctatggctattttcccc

SEQ ID NO: 11335 - protein, 577 aa, Homo sapiens; identical to SEQ ID NO: 1864

SEQ ID NO: 11336 - DNA, 1837 bp, Homo sapiens
gtttcaagatggcggacgtggcgggcccctcccgccccagtgccgcggcgttctggagccgggacttttctgatgaagaacaatcagtagtatacgttccaggaatttctgctgaaggaaatgtcagatcaagacacaagctgatgagtccaaaagctgatgttaaacttaagacttccagggtgactgatgcttcaatctccatggagtccttaaaaggcacaggagattcagtagatgaacagagtaagtgaggaaaaggaagtgacagaggaaagactgaaagctgagcaggagtcatttgagaagaagatcaggcagttggaagaacagaatgaactgatcatcaaagaaagggaagctcttcagctacagtatagagaatgccaagaacttctaagcctgtatcagaaatatttatcagaacaacaggagaagctcaccatgtctctctcagaacttggtgctgctagaatgcaggaacagcaggtatccagtagaaaaagcactctccagtgttcatctgtggaactggatggttcctacttgagcatagccagaccacagacctactatcaaaccaagcaaagacctaagtctgcagtccaggattcagcttcagaatcccttatagcatttaggaataattctttgaaaccagtaacccttcatcatcccaaagatgatctagataagataccatcagagaccacaacatgtaattgtgaatctccagggagaaaacctgcagtcccaacagagaaaatgccacaagaagaattgcacatgaaggaatgtccacatcttaagcctactcctagtcaatgctgtggtcatagacttgctgcagatcgtgttcatgacagccatcctacaaacatgacccctcaacatcctaagacacatccagaatcatgcagttattgtcggctttcttgggcatctctggtgcatggtggtggggcactgcaacccattgaaactttgaaaaagcagatctcagaagatagaaagcagcaactgatgcttcagaaaatggaactggaaattgaaaaggagcgccttcagcatctgctggcccagcaggagacaaagcttcttctaaaacagcagcagcttcaccagtctcgactggattacaattggttaaaagctcaggctctgtttaagtcgagagaactggttgctgaaaaacagcttactaaaccccaagaactcaaactggatatgaatggcagtgactctggaccaagtttattgaagtcaaactgtgatggctggctgcttggaacatcatcatctattaaaaagcaccaagaccccccaaacagtggagagaataggaaggagaggaagacagttgggtttcattcgcatatgaaagatgatgcccagtggtcatgtcaaaagaaagatacatgtagaccccaaagagggacagtgacaggagttagaaaagatgcgtctacatctcctatgccaacaggaagcctaaaggattttgtcaccacagcctcaccatcattacagcacaccacctcccggtatgagacatctttgttggatttggttcagtctctgagcccaaactctgcgcccaaacctcagcgctatccctccagagaagctggggcctggaatcatggtactttccgactcagtcctctaaaatcaacccggaagaagatggggatgcacagaacccctgaagagttggaggagaatcagattctggaagatatatttttcatttgacatattgcaaaattttcttaggaaatttgtgggtttcctcacatactgatctaggattttaaattatttcattgcaaagtaa

SEQ ID NO: 11337 - protein, 505 aa, Homo sapiens
MNRVSEEKEVTEERLKAEQESFEKKIRQLEEQNELIIKEREALQLQYRECQELLSLYQKYLSEQQEKLTMSLSELGAARMQEQQVSSRKSTLQCSSVELDGSYLSIARPQTYYQTKQRPKSAVQDSASESLIAFRNNSLKPVTLHHPKDDLDKIPSETTTCNCESPGRKPAVPTEKMPQEELHMKECPHLKPTPSQCCGHRLAADRVHDSHPTNMTPQHPKTHPESCSYCRLSWASLVHGGGALQPIETLKKQISEDRKQQLMLQKMELEIEKERLQHLLAQQETKLLLKQQQLHQSRLDYNWLKAQALFKSRELVAEKQLTKPQELKLDMNGSDSGPSLLKSNCDGWLLGTSSSIKKHQDPPNSGENRKERKTVGFHSHMKDDAQWSCQKKDTCRPQRGTVTGVRKDASTSPMPTGSLKDFVTTASPSLQHTTSRYETSLLDLVQSLSPNSAPKPQRYPSREAGAWNHGTFRLSPLKSTRKKMGMHRTPEELEENQILEDIFFI

SEQ ID NO: 11338 - DNA, 5521 bp, Homo sapiens
gggtttcaccgtgttagccaggatgatctcgattttctgacctcgtgatatgcccacctcggcctcccaaagtgctgggattacagacgtgagccactgcacctggcctatgttcaatgatattggtgctgtggagaaaaaataaagcaggaaagaggcagatagtagcgggaggtaggtaggttgtgggaagagagagttttgcaatttcaagtacctatatggttaggaagtgaaagcttcaatcagaaggtgacatgacatgacatatgacataagtcctaaagtgagccatgaagatatttgaggaaagagcttcctgggtagaagaaatcatacctgcagaagctataagttagttacaaattcccaggtcaaaagaaattatgaattataagaggtatacagaacagaagcagcatttggatgccggataatattattgtattttccttcatgttctcctgcgtagtttctgatgaagaacaatcagtagtatacgttccaggaatttctgctgaaggaaatgtcagatcaagacacaagctgatgagtccaaaagctgatgttaaacttaagacttccagggtgactgatgcttcaatctccatggagtccttaaaaggcacaggagattcagtagatgaacagaattcctgcaggggagaaataaagagtgcatcattgaaggatttatgtcttgaagacaaaagacgcattgcaaacttaattaaagaactggccagagtaagtgaggaaaaggaagtgacagaggaaagactgaaagctgagcaggagtcatttgagaagaagatcaggcagttggaagaacagaatgaactgatcatcaaagaaagggaagctcttcagctacagtatagagaatgccaagaacttctaagcctgtatcagaaatatttatcagaacaacaggagaagctcaccatgtctctctcagaacttggtgctgctagaatgcaggaacagcaggtatccagtagaaaaagcactctccagtgttcatctgtggaactggatggttcctacttgagcatagccagaccacagacctactatcaaaccaagcaaagacctaagtctgcagtccaggattcagcttcagaatcccttatagcatttaggaataattctttgaaaccagtaacccttcatcatcccaaagatgatctagataagataccatcagagaccacaacatgtaattgtgaatctccagggagaaaacctgcagtcccaacagagaaaatgccacaagaagaattgcacatgaaggaatgtccacatcttaagcctactcctagtcaatgctgtggtcatagacttgctgcagatcgtgttcatgacagccatcctacaaacatgacccctcaacatcctaagacacatccagaatcatgcagttattgtcggctttcttgggcatctctggtgcatggtggtggggcactgcaacccattgaaactttgaaaaagcagatctcagaagatagaaagcagcaactgatgcttcagaaaatggaactggaaattgaaaaggagcgccttcagcatctgctggcccagcaggagacaaagcttcttctaaaacagcagcagcttcaccagtctcgactggattacaattgtttattgaagtcaaactgtgatggctggctgcttggaacatcatcatctattaaaaagcaccaagaccccccaaacagtggagagaataggaaggagaggaagacagttgggtttcattcgcatatgaaagatgatgcccagtggtcatgtcaaaagaaagatacatgtagaccccaaagagggacagtgacaggagttagaaaagatgcgtctacatctcctatgccaacaggaagcctaaaggattttgtcaccacagcctcaccatcattacagcacaccacctcccggtatgagacatctttgttggatttggttcagtctctgagcccaaactctgcgcccaaacctcagcgctatccctccagagaagctggggcctggaatcatggtactttccgactcagtcctctaaaatcaacccggaagaagatggggatgcacagaacccctgaagagttggaggagaatcagattctggaagatatatttttcatttgacatattgcaaaattttcttaggaaatttgtgggtttcctcacatactgatctaggattttaaattatttcattgcaaagtaattgtgtctctcctttcacggggacttgtctcactagcatcctgttacgtattgaatatagaaatcattctaacaacccaggttattttcaatcagaccaggcattcgataacacactaagggggtaggaatggaagatggtatcttttatatgctaaacagattagaaaattaacataggatactttctgcgtggtggaaaccattgcatattcagcctcatttcaagagtgtttccttctcaaacttctgctagaaaatgctgactcacttttatatacaagaaaaacctttccactgaaaaatccctctgatttaaaagtaacccctttgaaacataagcagtttcagaaaggcagactctctcatctttctcatcctgttctctcactactacatttctgtaagtggtcctttaattctgaagttggagttggtgcccctgccatcacaaacaacacgagagccaattgtgagtcagtctcagtagccatcagcctggcagctgcccatcccataaccaaagagctcaatgggctggagggtgagacccagccaatccttgggagcaagcagcactaaatcacatcagggagtgattagtcctggggaaattcagtggaggcacaagcctgaagcactcttctaccaatgtttgggtgaccacccctccaatatcccagaatgaataagaacaatccctaggtatttttatttacccaagtgttcagcttattcaccccacccccccaccccccatcacacgtgctcctgtgaactttccatggttatgtctacggaaaatgccactagagagagagtgatgcaagctgctgcaaagctgatgggcttcctctggccctcccttttcctccacgaggattaaaggatacaagctgaccaggcctcacaggtgctctgctcgtggccccaaagaaccatctctacttgccagagtatgttccaccacccaagcagggtctccctactttttctcactggcctcgttttgacccagagaaagcctatggaagttatgcagtgcagacctcatcctgtctgctgtcttttctcccacagagctcttgagatgggtccttcagcttgcagtggtccctagtagcctctcaagctaatggggatgatgatcctggtttagccagagttcaaaactctccagtcattgaaagcaaggggagggtgtgttcccagatgtgtattacttgggaattttatttgatctggagggtgtggctttttttctctcctttttaccaaccccaactaaactgggagtaagacttagtcagtgttggtagacaaagtcataccacccagggcagcctgcatgcagcgagtctgcgtggcttccctgaattactcttttaattaaaactagattatttcaatctagaaaagccttgttgagcagcctccttatccagatagatccaaagctcatgtctcttcaggctgagactggcgctgtcacctccacccagccttctttcacttggggttttttattctttggagtagaaaagaatggagcccactaatattatatttttcttctgaaataaatataaagtcaagactaactagttataatcattcccttaaaaagttggaaaatcattacagattaaaatttctttataaagttcacctctgagagtaaccaaatcggtttcatcccatatcaaaaagcctttggagtgtggagctttctgtggtatggcagaaatgggtggatggcaaactaagagccctcagccattttttcagttaaagttaggttgccagaactttcttttccttgccccctgtgtcatgactagcttaagtgtacttgactcccatagactactcccatgcccacagtcacccattccagactccagtgtccttaaaactctggagtgagaggatgccagaggatcaagaaaaggatcacagtttcttgaagaagcttgtttgcctttagaagaatcgtaaacagagtctaaactaaaggctttttgggggtcacagccacagagtggagttttattgcttctttgcctctccatgaatggccaatttggaaaagcagagatgggctttcagcagaatatcaaccaatacatttttcacatgcaaaactcatcaccagttgcctttttctaacttaatggacattttgttggtgttggtgcaagggcaataggatgtaaatttgtatataatctaatgtcttcattattaattgaatagtacatgttaacattttaatctatttaaatttactttgaaatatatacatacatatgaatgaaaggttgttacagagcctcaaagctgttgcagactatcccaagagaaaggatctggcacaaaggaatctgcctttcctccgtctcaagtctcccacccttgactggttgggatttgctcgtccagcctctagacacttcccaaagcaagactggacacatgccgagggcgttgcggatagtgcctcaccattgcccaccctgctgcccaactcctgtgagagaaaaaccaatcaatgtttacaaaatggaaaaggacacagcatgtcctttgaactccctaagtaaggcccacagttcttgatgcagagaaccaaagtgaatcatagaaaagcttttgctaacagtccgctttccaggaggcaaacttgtgtttatccaaacctgatccccatgatggggacttttctagagcaccccaaatgtcatggggagagagggactctttctgctccctcagagctactcttcacttgtccctgcttccggcaccaagttcataatagagatcttctggccagagaatcaggggagaggagaggcctgatggggcagagctggacgaagtctgctaagagagatggaggctgtggcggactccttccaactcacgatttatcctcagctcagagtgtattttgaatatgagcaaatgtttattcaatcttcaagaagtatcaagtccatccaggcgcggtggcttacacctgtaatcccaggctttgggaggccgaggcagccggatcatgaggtcaggagatcgagaccatcctggctaacacggtgaaaccccatctctgtattttgtatttgtaaaaatacaaaaaattacctgagcgtggtggcacgcacctgtagtcccggctactcaggaggctgaggcaggagaatcacttgaacccgggaggcggaggttgcagtgagccaagatcatgccgctgcactccagcctgggtgacagagcaagactccatctc

SEQ ID NO: 11339 - protein, 573 aa, Homo sapiens
MPDNIIVFSFMFSCVVSDEEQSVVYVPGISAEGNVRSRHKLMSPKADVKLKTSRVTDASISMESLKGTGDSVDEQNSCRGEIKSASLKDLCLEDKRRIANLIKELARVSEEKEVTEERLKAEQESFEKKIRQLEEQNELIIKEREALQLQYRECQELLSLYQKYLSEQQEKLTMSLSELGAARMQEQQVSSRKSTLQCSSVELDGSYLSIARPQTYYQTKQRPKSAVQDSASESLIAFRNNSLKPVTLHHPKDDLDKIPSETTTCNCESPGRKPAVPTEKMPQEELHMKECPHLKPTPSQCCGHRLAADRVHDSHPTNMTPQHPKTHPESCSYCRLSWASLVHGGGALQPIETLKKQISEDRKQQLMLQKMELEIEKERLQHLLAQQETKLLLKQQQLHQSRLDYNCLLKSNCDGWLLGTSSSIKKHQDPPNSGENRKERKTVGFHSHMKDDAQWSCQKKDTCRPQRGTVTGVRKDASTSPMPTGSLKDFVTTASPSLQHTTSRYETSLLDLVQSLSPNSAPKPQRYPSREAGAWNHGTFRLSPLKSTRKKMGMHRTPEELEENQILEDIFFI

SEQ ID NO: 11340 - DNA, 688 bp, Homo sapiens
atgtaggtaaatgataacttaaaatgtggcaaatgtaacaggagcttctgcttccacccaagatgaataaattgggacaagaattgtcctcatgctataaacaactagaaaaatgaaaaaaaaatgtatgaaacaacagttccagatgttggagaaaggacagaggaggatatgctgccagagaaaagtctccacagtaaacctgctggaatgaatactattatttactcctcattttgcagagaagaaactggaattttagcgagaaaaagaagaaatctgtaaagggagaaaaaatgtaaatggtattttttggtgacagaatgcgtttcttcagctttgtggcaaactgcccctaccaccacccctccagcaaaaaaaaattgttggtgaagaacgcaatcacaaatagctttataaagagatgaaaatattgcctcacttctaagtgaggctggattttcagaatttttttttttgcaactttcatatgatgtccggtctggcaacacatgtggcaaaaatgaaggctacatttttccctagatagaagagcacatccaatgtttccaacatgatagttcagaagattcaacaactgtgaaaagtgctaatctcagaccattttaagagattatagagaaaaaaatgaaaaatctggaataaaaataaacagctatgaaactcc

SEQ ID NO: 11341 - protein, 53 aa, Homo sapiens
MYETTVPDVGERTEEDMLPEKSLHSKPAGMNTIIYSSFCREETGILARKRRNL

SEQ ID NO: 11342 - DNA, 459 bp, Homo sapiens
aataaattgggacaagaattgtcctcatgctataaacaactagaaaaatgaaaaaaaaatgtatgaaacaacagttccagatgttggagaaaggacagaggaggatatgctgccagagaaaagtctccacagtaaacctgctggaatgaatactattatttactcctcattttgcagagaagaaactggaattttagcgaggtcagtgatttgcacacaatacagagttctctacctgccttagcagagcacaggtgtttgaagcactaaatgaactccatggaaattttctattcccaacatttcccctaaagtcacctcaattttacatttccctttcttttcagtccttctgcccttccccactggaaagacctaatcatttaaccacaaaactgagcagagaactttcgcaattgaactggcaagaattattttaaatacatggcattaaacttc

SEQ ID NO: 11343 - protein, 61 aa, Homo sapiens
MYETTVPDVGERTEEDMLPEKSLHSKPAGMNTIIYSSFCREETGILARSVICTQYRVLYLP

SEQ ID NO: 11344 - DNA, 464 bp, Homo sapiens
gaggacaattcttgtcccaatttattcatcttgggtggaagcagaagctcctgaaaagacagtatttatggtcatcattaccagagggttatttttttttttttgtaggtcaggttgaatgaaattctagatatatttttactttaagccatctttgattttaaatttcataaattaacaacagaagatgaattagagaagaaaaatagcctataaaattaggagttatacttttctttacttattatttgtttgtttgtttttgagatggagtctcgctttgtcacccaggctggaatgcagtggcgtcatatcggctcactgtaagctccacctcccgggttcacgccattcctctgcctcagcctcccaaagaatactttttttttttttaaacaaagacaacctatatgtagctagtcaagtcatggcactcccttttaattttctcttgaagattacct

SEQ ID NO: 11345 - protein, 42 aa, Homo sapiens
DGVSLCHPGWNAVASYRLTVSSTSRVHAIPLPQPPKEYFFFF

SEQ ID NO: 11346 - DNA, 1850 bp, Homo sapiens
aggaagtcatttgggacctttcagaagtgtagtatcctgaaacaccaagcaaattcagaccttcatgctgaggtgaatttgtaaagggtcattgggcgtaccctttgggagaactgatacggccttcagacctttgaccaaaacagataaaataaacacagaaagacataccaagaatgacttaaagggaggaagcaaaggagtccaataatgtattacatttcaacataaaggagaaggatgggcctcctctcactggtgtgaaagagggttcttagagatgattgatacgcataccgtaagtatgttccctggaccagcaacatcagcattactcagaagcttgttagaccctacctcagatctactggatcagaatttgctttccaacaagacccacaggtatccagtagaaaaagcactctccagtgttcatctgtggaactggatggttcctacttgagcatagccagaccacagacctactatcaaaccaagcaaagacctaagtctgcagtccaggattcagcttcagaatcccttatagcatttaggaataattctttgaaaccagtaacccttcatcatcccaaagatgatctagataagataccatcagagaccacaacatgtaattgtgaatctccagggagaaaacctgcagtcccaacagagaaaatgccacaagaagaattgcacatgaaggaatgtccacatcttaagcctactcctagtcaatgctgtggtcatagacttgctgcagatcgtgttcatgacagccatcctacaaacatgacccctcaacatcctaagacacatccagaatcatgcagttattgtcggctttcttgggcatctctggtgcatggtggtggggcactgcaacccattgaaactttgaaaaagcagatctcagaagatagaaagcagcaactgatgcttcagaaaatggaactggaaattgaaaaggagcgccttcagcatctgctggcccagcaggagacaaagcttcttctaaaacagcagcagcttcaccagtctcgactggattacaattggttaaaagctcaggctctgtttaagtcgagagaactggttgctgaaaaacagcttactaaaccccaagaactcaaactggatatgaatggcagtgactctggaccaagtttattgaagtcaaactgtgatggctggctgcttggaacatcatcatctattaaaaagcaccaagaccccccaaacagtggagagaataggaaggagaggaagacagttgggtttcattcgcatatgaaagatgatgcccagtggtcatgtcaaaagaaagatacatgtagaccccaaagagggacagtgacaggagttagaaaagatgcgtctacatctcctatgccaacaggaagcctaaaggattttgtcaccacagcctcaccatcattacagcacaccacctcccgcccaggaatctccacaaagatctgcttcctttcaaatcatttcttcatattgttctcctagacaaaatgctaggctacacggattatggaaggaacctattaaggtatgagacatctttgttggatttggttcagtctctgagcccaaactctgcgcccaaacctcagcgctatccctccagagaagctggggcctggaatcatggtactttccgactcagtcctctaaaatcaacccggaagaagatggggatgcacagaacccctgaagagttggaggagaatcagattctggaagatatatttttcatttgacatattgcaaaattttcttaggaaatttgtgggtttcctcacatactgatctaggattttaaattatttcattgcaaa

SEQ ID NO: 11347 - protein, 279 aa, Homo sapiens
MPQEELHMKECPHLKPTPSQCCGHRLAADRVHDSHPTNMTPQHPKTHPESCSYCRLSWASLVHGGGALQPIETLKKQISEDRKQQLMLQKMELEIEKERLQHLLAQQETKLLLKQQQLHQSRLDYNWLKAQALFKSRELVAEKQLTKPQELKLDMNGSDSGPSLLKSNCDGWLLGTSSSIKKHQDPPNSGENRKERKTVGFHSHMKDDAQWSCQKKDTCRPQRGTVTGVRKDASTSPMPTGSLKDFVTTASPSLQHTTSRPGISTKICFLSNHFFILFS

SEQ ID NO: 11348 - DNA, 1577 bp, Homo sapiens
aggtgatcttgtggttctttctaggtatccagtagaaaaagcactctccagtgttcatctgtggaactggatggttcctacttgagcatagccagaccacagacctactatcaaaccaagcaaagacctaagtctgcagtccaggattcagcttcagaatcccttatagcatttaggaataattctttgaaaccagtaacccttcatcatcccaaagatgatctagataagataccatcagagaccacaacatgtaattgtgaatctccagggagaaaacctgcagtcccaacagagaaaatgccacaagaagaattgcacatgaaggaatgtccacatcttaagcctactcctagtcaatgctgtggtcatagacttgctgcagatcgtgttcatgacagccatcctacaaacatgacccctcaacatcctaagacacatccagaatcatgcagttattgtcggctttcttgggcatctctggtgcatggtggtggggcactgcaacccattgaaactttgaaaaagcagatctcagaagatagaaagcagcaactgatgcttcagaaaatggaactggaaattgaaaaggagcgccttcagcatctgctggcccagcaggagacaaagcttcttctaaaacagcagcagcttcaccagtctcgactggattacaattgctcagagtagtttgatcatctgaatccttctctcaactcgtcaaagtcattctctgtccagctttgttccgttgctggtgaggagctgcgttcctttggaggaggagaggtgctctgctttttagagtttccaagaaccaagttggaaaacactctgcaggatattatccaggagaacttccccaatctagcaaggcaggccaacattcagattcaggaaatacagagaacgccacaaagatactcctcgagaagagcaactccaagacacataattgtcagattcaccaaagttgaaatgaaggaaaaaatgttaagggcagccagagagaaaggttgggttacccacaaagggaagcccatcagactaacagcggatctcttggcagaaactctacaagccagaagagagtgggggccaatattcaacattcttaaagaaaagaattttcaacccagaatttcatatccagccaaactaagcttcataagtgaaggagaaataaaatcctttacagacaagcaaatgctgagagattttctcaccaccagacttgccctaaaagagctcctgaaggaagcactaaacatggaaaggaacaactggtaccagctgctgcaaaatcatgccaaaatgtaaagaccatcaaggctaggaagaaactgcatcaactaacgagcaaaataaccagctaacatcataatgacaggaacaaattcacacataacaatattaactttaaatgtaaatggactaaatgctccaattaaaagacacagactggcaaattggataaagagtcaagacccatcagtgtgctgttttcaggaaacccatctcacatgcagagacacacataggctcaaaataaaaggatggaggaagatctaccaagc

SEQ ID NO: 11349 - protein, 129 aa, Homo sapiens
MPQEELHMKECPHLKPTPSQCCGHRLAADRVHDSHPTNMTPQHPKTHPESCSYCRLSWASLVHGGGALQPIETLKKQISEDRKQQLMLQKMELEIEKERLQHLLAQQETKLLLKQQQLHQSRLDYNCSE

SEQ ID NO: 11350 - DNA, 959 bp, Homo sapiens
aggtatccagtagaaaaagcactctccagtgttcatctgtggaactggatggttcctacttgagcatagccagaccacagacctactatcaaaccaagcaaagacctaagtctgcagtccaggattcagcttcagaatcccttatagcatttaggaataattctttgaaaccagtaacccttcatcatcccaaagatgatctagataagataccatcagagaccacaacatgtaattgtgaatctccagggagaaaacctgcagtcccaacagagaaaatgccacaagaagaattgcacatgaaggaatgtccacatcttaagcctactcctagtcaatgctgtggtcatagacttgctgcagatcgtgttcatgacagccatcctacaaacatgacccctcaacatcctaagacacatccagaatcatgcagttattgtcggctttcttgggcatctctggtgcatggtggtggggcactgcaacccattgaaactttgaaaaagcagatctcagaagatagaaagcagcaactgatgcttcagaaaatggaactggaaattgaaaaggagcgccttcagcatctgctggcccagcaggagacaaagcttcttctaaaacagcagcagcttcaccagtctcgactggattacaattggttaaaagctcaggctctgtttaagtcgagagaactggttgctgaaaaacagcttactaaaccccaagaactcaaactggatatgaatggcagtgactctggaccaaggtaaacctgaagtctcagttaaaacaagaatcttaagggcataaatatttaggatacgtttggtatacttttatagctctatgttgattaatacagttttgtgaccatatgaatacgtacattcctgttatacaattttgaaaaatatagaaaaatatgaaaaacaaaataaaaatcattcataatcctacaa

SEQ ID NO: 11351 - protein, 163 aa, Homo sapiens
MPQEELHMKECPHLKPTPSQCCGHRLAADRVHDSHPTNMTPQHPKTHPESCSYCRLSWASLVHGGGALQPIETLKKQISEDRKQQLMLQKMELEIEKERLQHLLAQQETKLLLKQQQLHQSRLDYNWLKAQALFKSRELVAEKQLTKPQELKLDMNGSDSGPR

SEQ ID NO: 11352 - DNA, 479 bp, Homo sapiens
gtcccctcattgtgatttctgctgccactgtctcgaacattcttcaggaagactgttttgctttaaaacttcaggcccagcagagacatgcaccccgtactgtgttcctagtacagttaagactctctacagatataccaacccatgaggaagatagatggaggtgaatacagattgtatgtagatcatataggggtctaatcgtgtatggagcagtaaaggatatatatgttataaaacatgggatccagatctctatagctttttaaatatccaaggactgatcagtactttggcagacaactctgattataattgaaaaccatcattgtatacatgaagaactctttcttctaaccacagagtgccatgtttataatctgattaagaaatagtcttctgcatatagccaagatgaagactcctactaggtaaaggcaaccttgaactgtctactcaaataaacactatcaaaaatg

SEQ ID NO: 11353 - protein, 54 aa, Homo sapiens
PLIVISAATVSNILQEDCFALKLQAQQRHAPRTVFLVQLRLSTDIPTHEEDRWR

SEQ ID NO: 11354 - DNA, 5111 bp, Homo sapiens
tgaaatatggagaatagtcttagatgtgtttgggtacccaagctggcttttgtactcttcggagcttccttgttcagcgcgcatcttcaagtaaccggttttcaaattaaagctttcacagcactgcgcttcctctcagaaccttctgatgccgtcacaatgcggggaggaaatgtcctcctcgactgctccgcggagtccgaccgaggagttccagtgatcaagtggaagaaagatggcattcatctggccttgggaatggatgaaaggaagcagcaactttcaaatgggtctctgctgatacaaaacatacttcattccagacaccacaagccagatgagggactttaccaatgtgaggcatctttaggagattctggctcaattattagtcggacagcaaaagttgcagtagcaggaccactgaggttcctttcacagacagaatctgtcacagccttcatgggagacacagtgctactcaagtgtgaagtcattggggagcccatgccaacaatccactggcagaagaaccaacaagacctgactccaatcccaggtgactcccgagtggtggtcttgccctctggagcattgcagatcagccgactccaaccgggggacattggaatttaccgatgctcagctcgaaatccagccagctcaagaacaggaaatgaagcagaagtcagaattttatcagatccaggactgcatagacagctgtattttctgcaaagaccatccaatgtagtagccattgaaggaaaagatgctgtcctggaatgttgtgtttctggctatcctccaccaagttttacctggttacgaggcgaggaagtcatccaactcaggtctaaaaagtattctttattgggtggaagcaacttgcttatctccaatgtgacagatgatgacagtggaatgtatacctgtgttgtcacatataaaaatgagaatattagtgcctctgcagagctcacagtcttggttccgccatggtttttaaatcatccttccaacctgtatgcctatgaaagcatggatattgagtttgaatgtacagtctctggaaagcctgtgcccactgtgaattggatgaagaatggagatgtggtcattcctagtgattattttcagatagtgggaggaagcaacttacggatacttggggtggtgaagtcagatgaaggcttttatcaatgtgtggctgaaaatgaggctggaaatgcccagaccagtgcacagctcattgtccctaagcctgctatcccaagctccagtgtcctcccttcggctcccagagatgtggtccctgtcttggtttccagccgatttgtccgtctcagctggcgcccacctgcagaagcgaaagggaacattcaaactttcacggtctttttctccagagaaggtgacaacagggaacgagcattgaatacaacacagcctgggtcccttcagctcactgtgggaaacctgaagccagaagccatgtacacctttcgagttgtggcttacaatgaatggggaccgggagagagttctcaacccatcaaggtggccacacagcctgagttgcaagttccagggccagtagaaaacctgcaagctgtatctacctcacctacctcaattcttattacctgggaaccccctgcctatgcaaacggtccagtccaaggttacagattgttctgcactgaggtgtccacaggaaaagaacagaatatagaggttgatggactatcttataaactggaaggcctgaaaaaattcaccgaatatagtcttcgattcttagcttataatcgctatggtccgggcgtctctactgatgatataacagtggttacactttctgacgtgccaagtgccccgcctcagaacgtctccctggaagtggtcaattcaagaagtatcaaagttagctggctgcctcctccatcaggaacacaaaatggatttattaccggctataaaattcgacacagaaagacgacccgcaggggtgagatggaaacactggagccaaacaacctctggtacctattcacaggactggagaaaggaagtcagtacagtttccaggtgtcagccatgacagtcaatggtactggaccaccttccaactggtatactgcagagactccagagaatgatctagatgaatctcaagttcctgatcaaccaagctctcttcatgtgaggccccagactaactgcatcatcatgagttggactcctcccttgaacccaaacatcgtggtgcgaggttatattatcggttatggcgttgggagcccttacgctgagacagtgcgtgtggacagcaagcagcgatattattccattgagaggttagagtcaagttcccattatgtaatctccctaaaagcttttaacaatgccggagaaggagttcctctttatgaaagtgccaccaccaggtctataaccgatcccactgacccagttgattattatcctttgcttgatgatttccccacctcggtcccagatctctccacccccatgctcccaccagtaggtgtacaggctgtggctcttacccatgatgctgtgagggtcagctgggcagacaactctgtccctaagaaccaaaagacgtctgaggtgcgactttacaccgtccggtggagaaccagcttttctgcaagtgcaaaatacaagtcagaagacacaacatctctaagttacacagcaacaggcctcaaaccaaacacaatgtatgaattctcggtcatggtaacaaaaaacagaaggtccagtacttggagcatgactgcacatgccaccacgtatgaagcagcccccacctctgctcccaaggacttgacagtcattactagggaagggaagcctcgtgccgtcattgtgagttggcagcctcccttggaagccaatgggaaaattactgcttacatcttattttataccttggacaagaacatcccaattgatgactggattatggaaacaatcagtggtgataggcttactcatcaaatcatggatctcaaccttgatactatgtattactttcgaattcaagcacgaaattcaaaaggagtggggccactctctgatcctatcctcttcaggactctgaaagtggaacaccctgacaaaatggctaatgaccaaggtcgtcatggagatggaggttattggccagttgatactaatttgattgatagaagcaccctaaatgagccgccaattggacaaatgcaccccccgcatggcagtgtcactcctcagaagaacagcaacctgcttgtgatcattgtggtcaccgttggtgtcatcacagtgctggtagtggtcatcgtggctgtgatttgcacccgacgctcttcagcccagcagagaaagaaacgggccacccacagtgctggcaaaaggaagggcagccagaaggacctccgaccccctgatctttggatccatcatgaagaaatggagatgaaaaatattgaaaagccatctggcactgaccctgcaggaagggactctcccatccaaagttgccaagacctcacaccagtcagccacagccagtcagaaacccaactgggaagcaaaagcacctctcattcaggtcaagacactgaggaagcagggagctctatgtccactctggagaggtcgctggctgcacgccgagccccccgggccaagctcatgattcccatggatgcccagtccaacaatcctgctgtcgtgagcgccatcccggtgccaacgctagaaagtgcccagtacccaggaatcctcccgtctcccacctgtggatatccccacccgcagttcactctccggcctgtgccattcccaacactctcagtggaccgaggtttcggagcaggaagaagtcagtcagtgagtgaaggaccaactacccaacaaccacctatgctgcccccatctcagcctgagcattctagcagcgaggaggcaccaagcagaaccatccccacagcttgtgttcgaccaactcacccactccgcagctttgctaatcctttgctacctccaccaatgagtgcaatagaaccgaaagtcccttacacaccacttttgtctcagccagggcccactcttcctaagacccatgtgaaaacagcctcccttgggttggctggaaaagcaagatcccctttgcttcctgtgtctgtgccaacagcccctgaagtgtctgaggagagccacaaaccaacagaggattcagccaatgtgtatgaacaggatgatctgagtgaacaaatggcaagtttggaaggactcatgaagcagcttaatgccatcacaggctcagccttttaacatgtatttctgaatggatgaggtgaattttccgggaactttgcagcataccaattacccataaacagcacacctgtgtccaagaactctaaccagtgtacaggtcacccatcaggaccactcagttaaggaagatcctgaagcagttcagaaggaataagcattccttctttcacaggcatcaggaattgtcaaatgatgattatgagttccctaaacaaaagcaaagatgcattttcactgcaatgtcaaagtttaagctgctagaatagtcatgggcctttgtcactgcagtgaccacactgtcataactaatacctatgttttcctttgtcaaggcctgttgtttaatgtgtaggtctagtcttacaaaatgcaagtgcattatttaagcctgtaccatgccatggcaaaccagtgcaagctcactattttgttttcaacttaaacatacaaagcacccatgggaatctctcatgccatagcaccaaaggattggatgttttccttacagcacaaaaagtaaatagtaaacaaacaaaaggcagagaatgcttatgtttgtaactcagtcattcatcttgcacaagtggtggatattagtgagtggctaaaaattcacctattttggcaagtatttgtaaatccacccttggttaatatgtatgtctggagtccaggaatataaaaatctgcaactagtggcattctgccagcagcagtacatttctggaaagaggatataatatgcaatcttctca

SEQ ID NO: 11355 - protein, 1447 aa, Homo sapiens; identical to SEQ ID NO: 1869

SEQ ID NO: 11356 - DNA, 505 bp, Homo sapiens
cacagaatgacgtggaacttagttgtacacaataaaaggcaaattaagaaaacaaaatttggcttaaaataaatctccatggtttacaatgcaaatggctgttgcaaggtgaagaaacaaagagaatatcattctgaaggcaacaaagagcattgcaatacctgataaaattctgacttctgcttcatttcctgttcttgagctggctggatttcgagctgagcatcggtaaattccaatgtcccccggttggagtcggctgatctgcaatgctccagagggcaagaccaccactcgggagtcacctgggattggagtcaggtcttgttggttcttctgccagtggattgttggcatgggctccccaatgacttcacacttgagtagcactgtgtctcccatgaaggctgtgacagattctgtctgtgaaaggaacctcagtggtcctaggagaaaaacaaagaaggaagaataagtcttccaaataaagcacaataatcgccaa

SEQ ID NO: 11357 - protein, 78 aa, Homo sapiens
MSPGWSRLICNAPEGKTTTRESPGIGVRSCWFFCQWIVGMGSPMTSHLSSTVSPMKAVTDSVCERNLSGPRRKTKKEE

SEQ ID NO: 11358 - DNA, 3323 bp, Homo sapiens
gagaggcgccggggctgccgcccggtgctcggcgcgctctcgggagccgcccgcccgctggtcccgcagccttccgggaggaagcggtgccggcagcgtccagggcgcgctctcgggcaccctcacctgccggcgcccggccgcttacccggcagggcgtgcgcagggtagggtgcgggaccggggggacctggaggcagaggggagaaccggccgtccgcgccgcagcacagccgctgggagcgcctcagaccccgcgcggggcgccggctccatggcgaccgggctcggggagccggtctatggactttccgaagacgagggagagtcccgtattctcagagtaaaagttgtttctggaattgatctcgccaaaaaggacatctttggagccagtgatccgtatgtgaaactttcattgtacgtagcggatgagaatagagaacttgctttggtccagacaaaaacaattaaaaagacactgaacccaaaatggaatgaagaattttatttcagggtaaacccatctaatcacagactcctatttgaagtatttgacgaaaatagactgacacgagacgacttcctgggccaggtggacgtgccccttagtcaccttccgacagaagatccaaccatggagcgaccctatacatttaaggactttctcctcagaccaagaagtcataagtctcgagttaagggatttttgcgattgaaaatggcctatatgccaaaaaatggaggtcaagatgaagaaaacagtgaccagagggatgacatggagcatggatgggaagttgttgactcaaatgactcggcttctcagcaccaagaggaacttcctcctcctcctctgcctcccgggtgggaagaaaaagtggacaatttaggccgaacttactatgtcaaccacaacaaccggaccactcagtggcacagaccaagcctgatggacgtgtcctcggagtcggacaataacatcagacagatcaaccaggaggcagcacaccggcgcttccgctcccgcaggcacatcagcgaagacttggagcccgagccctcggagggcggggatgtccccgagccttgggagaccatttcagaggaagtgaatatcgctggagactctctcggtctggctctgcccccaccaccggcctccccaggatctcggaccagccctcaggagctgtcagaggaactaagcagaaggcttcagatcactccagactccaatggggaacagttcagctctttgattcaaagagaaccctcctcaaggttgaggtcatgcagtgtcaccgacgcagttgcagaacagggccatctaccaccgcttgcagaagatggtgcgtccggatcagccacaaacagtaacaaccatctaatcgagcctcagatccgccggcctcgtagcctcagctcgccaacagtaactttatctgccccgctggagggtgccaaggactcacccgtacgtcgggctgtgaaagacaccctttccaacccacagtccccacagccatcaccttacaactcccccaaaccacaacacaaagtcacacagagcttcttgccacccggctgggaaatgaggatagcgccaaacggccggcccttcttcattgatcataacacaaagactacaacctgggaagatccacgtttgaaatttccagtacatatgcggtcaaagacatctttaaaccccaatgaccttggcccccttcctcctggctgggaagaaagaattcacttggatggccgaacgttttatattgatcataatagcaaaattactcagtgggaagacccaagactgcagaacccagctattactggtccggctgtcccttactccagagaatttaagcagaaatatgactacttcaggaagaaattaaagaaacctgctgatatccccaataggtttgaaatgaaacttcacagaaataacatatttgaagagtcctatcggagaattatgtccgtgaaaagaccagatgtcctaaaagctagactgtggattgagtttgaatcagagaaaggtcttgactatgggggtgtggccagagaatggttcttcttactgtccaaagagatgttcaacccctactacggcctctttgagtactctgccacggacaactacacccttcagatcaaccctaattcaggcctctgtaatgaggatcatttgtcctacttcacttttattggaagagttgctggtctggccgtatttcatgggaagctcttagatggtttcttcattagaccattttacaagatgatgttgggaaagcagataaccctgaatgacatggaatctgtggatagtgaatattacaactctttgaaatggatcctggagaatgaccctactgagctggacctcatgttctgcatagacgaagaaaactttggacagacatatcaagtggatttgaagcccaatgggtcagaaataatggtcacaaatgaaaacaaaagggaatatatcgacttagtcatccagtggagatttgtgaacagggtccagaagcagatgaacgccttcttggagggattcacagaactacttcctattgatttgattaaaatttttgatgaaaatgagctggagttgctcatgtgcggcctcggtgatgtggatgtgaatgactggagacagcattctatttacaagaacggctactgcccaaaccaccccgtcattcagtggttctggaaggctgtgctactcatggacgccgaaaagcgtatccggttactgcagtttgtcacagggacatcgcgagtacctatgaatggatttgccgaactttatggttccaatggtcctcagctgtttacaatagagcaatggggcagtcctgagaaactgcccagagctcacacatgctttaatcgccttgacttacctccatatgaaacctttgaagatttacgagagaaacttctcatggccgtggaaaatgctcaaggatttgaaggggtggattaagcaccctgtgcctcgggggtggttgttcttcaagcaagttctgcttgcacttttgcatttgcctaacagacttttgcagaggcgatggcagagagcagctgcaggcatggtccctggagccgagccttcaccacgcactcgtccaagttcggatgcgggaacctggtcccagcttgagttcctgcctttcccaccacaaattatcaactggttgatgtgtacactaattacatttcaggaggacttaatgctatttatgttgtgcctctgcaggcaaagcccttaataaatattttacatcctttctaatgac

SEQ ID NO: 11359 - protein, 911 aa, Homo sapiens
MATGLGEPVYGLSEDEGESRILRVKVVSGIDLAKKDIFGASDPYVKLSLYVADENRELALVQTKTIKKTLNPKWNEEFYFRVNPSNHRLLFEVFDENRLTRDDFLGQVDVPLSHLPTEDPTMERPYTFKDFLLRPRSHKSRVKGFLRLKMAYMPKNGGQDEENSDQRDDMEHGWEVVDSNDSASQHQEELPPPPLPPGWEEKVDNLGRTYYVNHNNRTTQWHRPSLMDVSSESDNNIRQINQEAAHRRFRSRRHISEDLEPEPSEGGDVPEPWETISEEVNIAGDSLGLALPPPPASPGSRTSPQELSEELSRRLQITPDSNGEQFSSLIQREPSSRLRSCSVTDAVAEQGHLPPLAEDGASGSATNSNNHLIEPQIRRPRSLSSPTVTLSAPLEGAKDSPVRRAVKDTLSNPQSPQPSPYNSPKPQHKVTQSFLPPGWEMRIAPNGRPFFIDHNTKTTTWEDPRLKFPVHMRSKTSLNPNDLGPLPPGWEERIHLDGRTFYIDHNSKITQWEDPRLQNPAITGPAVPYSREFKQKYDYFRKKLKKPADIPNRFEMKLHRNNIFEESYRRIMSVKRPDVLKARLWIEFESEKGLDYGGVAREWFFLLSKEMFNPYYGLFEYSATDNYTLQINPNSGLCNEDHLSYFTFIGRVAGLAVFHGKLLDGFFIRPFYKMMLGKQITLNDMESVDSEYYNSLKWILENDPTELDLMFCIDEENFGQTYQVDLKPNGSEIMVTNENKREYIDLVIQWRFVNRVQKQMNAFLEGFTELLPIDLIKIFDENELELLMCGLGDVDVNDWRQHSIYKNGYCPNHPVIQWFWKAVLLMDAEKRIRLLQFVTGTSRVPMNGFAELYGSNGPQLFTIEQWGSPEKLPRAHTCFNRLDLPPYETFEDLREKLLMAVENAQGFEGVD

SEQ ID NO: 11360 - DNA, 8413 bp, Homo sapiens
gagaggcgccggggctgccgcccggtgctcggcgcgctctcgggagccgcccgcccgctggtcccgcagccttccgggaggaagcggtgccggcagcgtccagggcgcgctctcgggcaccctcacctgccggcgcccggccgcttacccggcagggcgtgcgcagggtagggtgcgggaccggggggacctggaggcagaggggagaaccggccgtccgcgccgcagcacagccgctgggagcgcctcagaccccgcgcggggcgccggctccatggcgaccgggctcggggagccggtctatggactttccgaagacgagggagagtcccgtattctcagagtaaaagttgtttctggaattgatctcgccaaaaaggacatctttggagccagtgatccgtatgtgaaactttcattgtacgtagcggatgagaatagagaacttgctttggtccagacaaaaacaattaaaaagacactgaacccaaaatggaatgaagaattttatttcagggtaaacccatctaatcacagactcctatttgaagtatttgacgaaaatagactgacacgagacgacttcctgggccaggtggacgtgccccttagtcaccttccgacagaagatccaaccatggagcgaccctatacatttaaggactttctcctcagaccaagaagtcataagtctcgagttaagggatttttgcgattgaaaatggcctatatgccaaaaaatggaggtcaagatgaagaaaacagtgaccagagggatgacatggagcatggatgggaagttgttgactcaaatgactcggcttctcagcaccaagaggaacttcctcctcctcctctgcctcccgggtgggaagaaaaagtggacaatttaggccgaacttactatgtcaaccacaacaaccggaccactcagtggcacagaccaagcctgatggacgtgtcctcggagtcggacaataacatcagacagatcaaccaggaggcagcacaccggcgcttccgctcccgcaggcacatcagcgaagacttggagcccgagccctcggagggcggggatgtccccgagccttgggagaccatttcagaggaagtgaatatcgctggagactctctcggtctggctctgcccccaccaccggcctccccaggatctcggaccagccctcaggagctgtcagaggaactaagcagaaggcttcagatcactccagactccaatggggaacagttcagctctttgattcaaagagaaccctcctcaaggttgaggtcatgcagtgtcaccgacgcagttgcagaacagggccatctaccaccgccatcagtggcctatgtacataccacgccgggtctgccttcaggctgggaagaaagaaaagatgctaaggggcgcacatactatgtcaatcataacaatcgaaccacaacttggactcgacctatcatgcagcttgcagaagatggtgcgtccggatcagccacaaacagtaacaaccatctaatcgagcctcagatccgccggcctcgtagcctcagctcgccaacagtaactttatctgccccgctggagggtgccaaggactcacccgtacgtcgggctgtgaaagacaccctttccaacccacagtccccacagccatcaccttacaactcccccaaaccacaacacaaagtcacacagagcttcttgccacccggctgggaaatgaggatagcgccaaacggccggcccttcttcattgatcataacacaaagactacaacctgggaagatccacgtttgaaatttccagtacatatgcggtcaaagacatctttaaaccccaatgaccttggcccccttcctcctggctgggaagaaagaattcacttggatggccgaacgttttatattgatcataatagcaaaattactcagtgggaagacccaagactgcagaacccagctattactggtccggctgtcccttactccagagaatttaagcagaaatatgactacttcaggaagaaattaaagaaacctgctgatatccccaataggtttgaaatgaaacttcacagaaataacatatttgaagagtcctatcggagaattatgtccgtgaaaagaccagatgtcctaaaagctagactgtggattgagtttgaatcagagaaaggtcttgactatgggggtgtggccagagaatggttcttcttactgtccaaagagatgttcaacccctactacggcctctttgagtactctgccacggacaactacacccttcagatcaaccctaattcaggcctctgtaatgaggatcatttgtcctacttcacttttattggaagagttgctggtctggccgtatttcatgggaagctcttagatggtttcttcattagaccattttacaagatgatgttgggaaagcagataaccctgaatgacatggaatctgtggatagtgaatattacaactctttgaaatggatcctggagaatgaccctactgagctggacctcatgttctgcatagacgaagaaaactttggacagacatatcaagtggatttgaagcccaatgggtcagaaataatggtcacaaatgaaaacaaaagggaatatatcgacttagtcatccagtggagatttgtgaacagggtccagaagcagatgaacgccttcttggagggattcacagaactacttcctattgatttgattaaaatttttgatgaaaatgagctggagttgctcatgtgcggcctcggtgatgtggatgtgaatgactggagacagcattctatttacaagaacggctactgcccaaaccaccccgtcattcagtggttctggaaggctgtgctactcatggacgccgaaaagcgtatccggttactgcagtttgtcacagggacatcgcgagtacctatgaatggatttgccgaactttatggttccaatggtcctcagctgtttacaatagagcaatggggcagtcctgagaaactgcccagagctcacacatgctttaatcgccttgacttacctccatatgaaacctttgaagatttacgagagaaacttctcatggccgtggaaaatgctcaaggatttgaaggggtggattaagcaccctgtgcctcgggggtggttgttcttcaagcaagttctgcttgcacttttgcatttgcctaacagacttttgcagaggcgatggcagagagcagctgcaggcatggtccctggagccgagccttcaccacgcactcgtccaagttcggatgcgggaacctggtcccagcttgagttcctgcctttcccaccacaaattatcaactggttgatgtgtacactaattacatttcaggaggacttaatgctatttatgttgtgcctctgcaggcaaagcccttaataaatattttacatcctttctaatgacaatgaatggaattaatcactcaacaggtatagtattacgactcatgtttactttttaaaatgatttagaccgattttcagattttatttcgttatgattaaagatgtctcatgtacttggaaaagtgagcattttttttttttttgtatttcactttcataccaggcttaatgtcaatgacatttttatttttgaagtactctgacacctccaccctctactttattagaattggaaggcaaatttttgtccaaaaacctacagacaagtactttgagagaatttccaatataatattagacataatgataattttttccatactcagaatgaaaaactggatattacgtttttgttttggggtttttttgtacaaatttagctaatagctacaggctgagagaattgtaacatagcatgacaaattttgtgttgacttgaaaggaatcacaccattattccttagaagtaattacatgtgttctaacacatttgagacagggttggactcccatttctcatccgagaaattacttaacccttcctggcgctgtacagtcatcttttattctatttcctctttgctgtttgtagtagagacattttgaatgaaacttggcactgcttgattcaaaactgtggaaaccagatctgtttagtctcctgtttgtatgcgtttgctaatggtagctaaataaccagtttttgttgtaaatgcaccaattctgaaggcactttatgtactacatggaggtcatatctggttttgtttttatttttttatcatgaacattaaatgtgatgatgatttcttttccctgcacacatctttccggtgcaatatctatcaattgtgaatctggctgctggtgtataaaaacctggatgtaaagctgagcctacagacctgtcctcaccaactgttttgtgatttctactcaactacaaagatttatttaatgtactcttaatctaactgagttttgttaccaatgacctgttgcatgcttcaataccgtgtactgcctgagttgtgcctcttgtgtgctagattaaaagtgagacagagacttgacttgatcctctgagctcaagctattgagctggtagtggcagaggactgagggtacctgcacagtttgattcttttccacgtgtaagtctccattgcagaattgtcgtgctttgagaaaacacctgaggcagtgtgggagttgaacgaccctgctgtcctttttaacctgtgttgtcctagaccctgtcggggcagtcaggggacactagagatttgatctcatgcgagtcatcaataggacaaaaaagttgtggtttggggaggtctgtttgttacataaaaaggacctttcggtgtaagaaattgccgtttttaccctgccctggctggcatgtgagaagccatggaaggttgtggttgtaaatgagttgtctaaaggggtgcagaggcctgaggtttctaaaagaaggtagatttctacagagctgagtgttggttcctttttcttattggttgaaaattacctggtagtgatcagaaaacttagatgctatgtaactaaaaaaaaaaaaaaaaaaaaaaaaaaaaaaaaaaaaattcccgctcatgagttttgactattggtgagatgttttccgctacagttaacatgacaaatgtctcagtggcaaaaatcccctttttgtaagcccccatagtctagaggcagttttctttttaagaatcatgccagagcctgagtcgagcagtatgctttcttggtttttgagagtaattgtgtaattgtagagggagaaatccaattctaacctaagaactgggattcttctgtcatcttgtaaaccgtatattgaaaaaaacagaatgtcactaaatgcatattaagtcaagtattggaaagtataaaagaaaaatcattctgacaatttctaagccagaagcaaacaagaattactgaaatctaccccatgaatacttggaaggcagtaattgtgagtgacacctcagttcatcaaccccttaataatatcagcttaattttaatgacaactaaatatgctgaagtgaggatttagtattttttaaaaaagcaaaacaaggttcagtagtcctcagcaattctccaagtttctctctttgcctaaaatggtcatagatcttgatttctctgaatcgtgatgaccacacccagtcatcttcacagcataattgcaggtggcagtaaagagagtgtgctgggtaaggagcagttgctgggtcattccttgggccccgacctgcccggggagtagccctgggggagagagggcagtgttgcctatcccagaggtcccagcagtcacactgctctgcaggccgggctctctttatagccagagaaatcaccttaatgcagtctctttagttgtctgctgaagctgtagttattatgggccacttacatgaggctgagaagtacgtgccggagctcacacactgcctgttgcggttctcttaacatcagttatcacagctgcctgtgggtcccgggtatttccattcctgccccttgttggcccgaggaaggatgtggaaagagcacctggtgggatgaaggtccaacagcctgtgcctctccactgctggccctggagccggcagcagtgaggcattcattgtctgtgttgcggtgtattcccagcttcagtgctcttttcctttttgcctgaaatgtttatgcttctctgcagccagtcctctaacaaatctcaagaacaaaggtaagacacttggtttttgtttccaggacccttcagaaggtgacatcagatattccctaaattcagacaatgagggatacagagcgacttggcatgtattatttctcccatgtaaggacaaagggacagattattattgttatttctgagacagagtcttgctctgtagctcaggctggagtgcagtggctcaatctcagctcaccacaacctctgcctcctggcttcaagcgattcttctgcctcagcctccccgaatagttgggattacaggcacccaccaccacgcctggctaatttttgtatttttagtagagatggtttcaccatgctggccaggctggtcttgaactcctgacctcaggtgatcctcccgcctcagccttccaaagtgctgggattacaagcatgagccaccgcacccggcctcacagtgacagattctgagaaacagcatgcaaaacatttgaaccattttctacatctcccattgttgcatagagagtgtgcaccgctgctatcttgccagatccacactggtcctcccgaaagccaggttcatacacagcaactttttaattattctaacagttacccattaacagtcgactcctgtatttctgagagtcttgtactcacctctgaaatttaaaaacgtataaagagagcctgggttaatcagttctgcagcccctacgtgacactgtgctagttctccttcttctgtctcctccttaccctggccctgcacccctgtacttaagagggagaggtgggaggtgctgtctggtatcatttgctgcctcgccagtagagggtgccgctgtgcagggtaactgcccgcctgctcccttcctgacctcccctgaccccgaagatcactacctctgtcattcaggcattggggtacatcctgataagtcgtgtcagaactgccaatttcaggactgagatgtgtttttaaaaaacaaatccttataaactccactttgtactttagattttaaaactggggaaaaatgtgatattctttggaccacttttttaatttatataagccttaatgaacagtgtctatacatttgcatacacacacccccaccccagagtgttctcagtatgtcagagaaagtgccacagcattaggacgggagcttggagaacgttttctagaaaagggttagcttcctgttggcatgaaattttccaagcaaacctcattaaacatctgttgtttgttaaagatgttccactgaaagcaacgcatgtttcaaaggcacgtctttccgttcgttggttttctgtgtgtaaggagtagcattgctgttggcgcctaacctcgcgtgcactgcattctcaaccccgtaccagtgcatcatcagaagccttcctcgtgaccataactctgtgtctgcagatatgtgttcccgtgtaagccagttttccccttttactcagactgatttcacctagattgtcacggtttccttcatgttaactttgcgtgactttgttcttcctttactactctgtatgtaatatatatacatatatacgtacatatgctgtccaaatatatttgtatatatttgtatagcatttttacacctttattgagtaatctggtttcgaaaggaggtgagagtttagtcccttctgcagttttctccaagctgtgtcctgtgaatttcaacccttggagcctaagaaaaccctaggaagatgatgttaatttgctgtcatttcctaattcaggatctatcatcaaatgaaacatgaaaaaaacagtgacttttaaggtgaaaagagtttcaagcattccaaataaattatcaatgtttcataactttttattataaacccacctcctaataggaagccaagtactatttgatacagtggtaaaaaccaaactaccttgaatttttttaaggcaacttatgaataatgctcattttcacagtcagaatagctttaaaatatggttgaatttgatacacacaggaagttttcttgaagaacaatcctttcgcttttcttttttcttgagagatctaaagagaaactgtagattgttttcctgacagcaaaagactaatgtgacaaaatgaagtcattgtaaagaagcgatgcaacttgtcaaatatttaataaagaattatggaagctggaacattttctac

SEQ ID NO: 11361 - protein, 955 aa, Homo sapiens; identical to SEQ ID NO: 1871

SEQ ID NO: 11362 - DNA, 4211 bp, Homo sapiens
cttgccacttttgtccacaggagtcactactaatcatcataactgatgtctagtgtgaaagtgaagcttggaatgtaaacagagtccgagtgtgtgttggcatgtgactggattcactcctgcatgttgctagaagggaatttggggctgtataggaaatagcaagaggtgatgaagacaccttttattatctatttattgccatgtcgctggtagtatttagttccacacacattgtatttcacaagatgagtctcagccgtcttcctttttcaactttctcctaccagtgaaaaaataagccagggcagttctgatgacttcacatttcattggtatttgtttttcatgggcagtttcatgctgtcacgttgcccttcagagaatcagggaatgccttcgtagaatattaacgacaaattgttgaatttgcacagcttgttttgtctccctgaattagtatgtgtaagaaaaaccaatggaagattttagcaggctctgaaagtagaatgcccgctgaagcaaacggcagggttgttcttccaaggcgtattaaatatgggtacacttagtttgcagacttggtgtgctgcagaatatcacatatgaagatattttgaccgctatttagaagagtgacctcataaatcttttagcaaagtagacacacatacctaccacatttcttaaaagtagattcgtattttgatttgagattgttgaaaagcatggtatgtttggagtgcacttagttatgtcccatctcataaagactgttgagctctctgcactgctgatgatgaagcattgcatgaacccagaaaacggggatgccaaagcacagggcttaggtgctgttccttgcgtcatcagcagaggtctgtccactttgtagaagggagagtcccgtattctcagagtaaaagttgtttctggaattgatctcgccaaaaaggacatctttggagccagtgatccgtatgtgaaactttcattgtacgtagcggatgagaatagagaacttgctttggtccagacaaaaacaattaaaaagacactgaacccaaaatggaatgaagaattttatttcagggtaaacccatctaatcacagactcctatttgaagtatttgacgaaaatagactgacacgagacgacttcctgggccaggtggacgtgccccttagtcaccttccgacagaagatccaaccatggagcgaccctatacatttaaggactttctcctcagaccaagaagtcataagtctcgagttaagggatttttgcgattgaaaatggcctatatgccaaaaaatggaggtcaagatgaagaaaacagtgaccagagggatgacatggagcatggatgggaagttgttgactcaaatgactcggcttctcagcaccaagaggaacttcctcctcctcctctgcctcccgggtgggaagaaaaagtggacaatttaggccgaacttactatgtcaaccacaacaaccggaccactcagtggcacagaccaagcctgatggacgtgtcctcggagtcggacaataacatcagacagatcaaccaggaggcagcacaccggcgcttccgctcccgcaggcacatcagcgaagacttggagcccgagccctcggagggcggggatgtccccgagccttgggagaccatttcagaggaagtgaatatcgctggagactctctcggtctggctctgcccccaccaccggcctccccaggatctcggaccagccctcaggagctgtcagaggaactaagcagaaggcttcagatcactccagactccaatggggaacagttcagctctttgattcaaagagaaccctcctcaaggttgaggtcatgcagtgtcaccgacgcagttgcagaacagggccatctaccaccgcccagtgccccagctgggagagcgcgttcatcaactgtcacgggtggtgaggaaccaacgccatcagtggcctatgtacataccacgccgggtctgccttcaggctgggaagaaagaaaagatgctaaggggcgcacatactatgtcaatcataacaatcgaaccacaacttggactcgacctatcatgcagcttgcagaagatggtgcgtccggatcagccacaaacagtaacaaccatctaatcgagcctcagatccgccggcctcgtagcctcagctcgccaacagtaactttatctgccccgctggagggtgccaaggactcacccgtacgtcgggctgtgaaagacaccctttccaacccacagtccccacagccatcaccttacaactcccccaaaccacaacacaaagtcacacagagcttcttgccacccggctgggaaatgaggatagcgccaaacggccggcccttcttcattgatcataacacaaagactacaacctgggaagatccacgtttgaaatttccagtacatatgcggtcaaagacatctttaaaccccaatgaccttggcccccttcctcctggctgggaagaaagaattcacttggatggccgaacgttttatattgatcataatagcaaaattactcagtgggaagacccaagactgcagaacccagctattactggtccggctgtcccttactccagagaatttaagcagaaatatgactacttcaggaagaaattaaagaaacctgctgatatccccaataggtttgaaatgaaacttcacagaaataacatatttgaagagtcctatcggagaattatgtccgtgaaaagaccagatgtcctaaaagctagactgtggattgagtttgaatcagagaaaggtcttgactatgggggtgtggccagagaatggttcttcttactgtccaaagagatgttcaacccctactacggcctctttgagtactctgccacggacaactacacccttcagatcaaccctaattcaggcctctgtaatgaggatcatttgtcctacttcacttttattggaagagttgctggtctggccgtatttcatgggaagctcttagatggtttcttcattagaccattttacaagatgatgttgggaaagcagataaccctgaatgacatggaatctgtggatagtgaatattacaactctttgaaatggatcctggagaatgaccctactgagctggacctcatgttctgcatagacgaagaaaactttggacagacatatcaagtggatttgaagcccaatgggtcagaaataatggtcacaaatgaaaacaaaagggaatatatcgacttagtcatccagtggagatttgtgaacagggtccagaagcagatgaacgccttcttggagggattcacagaactacttcctattgatttgattaaaatttttgatgaaaatgagctggagttgctcatgtgcggcctcggtgatgtggatgtgaatgactggagacagcattctatttacaagaacggctactgcccaaaccaccccgtcattcagtggttctggaaggctgtgctactcatggacgccgaaaagcgtatccggttactgcagtttgtcacagggacatcgcgagtacctatgaatggatttgccgaactttatggttccaatggtcctcagctgtttacaatagagcaatggggcagtcctgagaaactgcccagagctcacacatgctttaatcgccttgacttacctccatatgaaacctttgaagatttacgagagaaacttctcatggccgtggaaaatgctcaaggatttgaaggggtggattaagcaccctgtgcctcgggggtggttgttcttcaagcaagttctgcttgcacttttgcatttgcctaacagacttttgcagaggcgatggcagagagcagctgcaggcatggtccctggagccgagccttcaccacgcactcgtccaagttcggatgcgggaacctggtcccagcttgagttcctgcctttcccaccacaaattatcaactggttgatgtgtacactaattacatttcaggaggacttaatgctatttatgttgtgcctctgcaggcaaagcccttaataaatattttacatcctttctaatgacaatgaatggaattaatcactcaacaggtatagtattacgactcatgtttactttttaaaatgatttagaccgattttcagattttatttcgttatgattaaagatgtctcatgtacttgg

SEQ ID NO: 11363 - protein, 854 aa, Homo sapiens
MERPYTFKDFLLRPRSHKSRVKGFLRLKMAYMPKNGGQDEENSDQRDDMEHGWEVVDSNDSASQHQEELPPPPLPPGWEEKVDNLGRTYYVNHNNRTTQWHRPSLMDVSSESDNNIRQINQEAAHRRFRSRRHISEDLEPEPSEGGDVPEPWETISEEVNIAGDSLGLALPPPPASPGSRTSPQELSEELSRRLQITPDSNGEQFSSLIQREPSSRLRSCSVTDAVAEQGHLPPPSAPAGRARSSTVTGGEEPTPSVAYVHTTPGLPSGWEERKDAKGRTYYVNHNNRTTTWTRPIMQLAEDGASGSATNSNNHLIEPQIRRPRSLSSPTVTLSAPLEGAKDSPVRRAVKDTLSNPQSPQPSPYNSPKPQHKVTQSFLPPGWEMRIAPNGRPFFIDHNTKTTTWEDPRLKFPVHMRSKTSLNPNDLGPLPPGWEERIHLDGRTFYIDHNSKITQWEDPRLQNPAITGPAVPYSREFKQKYDYFRKKLKKPADIPNRFEMKLHRNNIFEESYRRIMSVKRPDVLKARLWIEFESEKGLDYGGVAREWFFLLSKEMFNPYYGLFEYSATDNYTLQINPNSGLCNEDHLSYFTFIGRVAGLAVFHGKLLDGFFIRPFYKMMLGKQITLNDMESVDSEYYNSLKWILENDPTELDLMFCIDEENFGQTYQVDLKPNGSEIMVTNENKREYIDLVIQWRFVNRVQKQMNAFLEGFTELLPIDLIKIFDENELELLMCGLGDVDVNDWRQHSIYKNGYCPNHPVIQWFWKAVLLMDAEKRIRLLQFVTGTSRVPMNGFAELYGSNGPQLFTIEQWGSPEKLPRAHTCFNRLDLPPYETFEDLREKLLMAVENAQGFEGVD

SEQ ID NO: 11364 - DNA, 752 bp, Homo sapiens
tgctgtttaattttttctgtgtgtttcgggcggaggtttctctgatggagtctcactctgtcgcccaggctggagtgcagtggtgcaatctcggctcactgcaagctctgcctcccgggttcacgccattcgcctgcctcagcctcccaagtagctgggactacaggctgtgctactcatggacgccgaaaagcgtatccggttactgcagtttgtcacagggacatcgcgagtacctatgaatggatttgccgaactttatggttccaatggtcctcagctgtttacaatagagcaatggggcagtcctgagaaactgcccagagctcacacatgctttaatcgccttgacttacctccatatgaaacctttgaagatttacgagagaaacttctcatggccgtggaaaatgctcaaggatttgaaggggtggattaagcaccctgtgcctcgggggtggttgttcttcaagcaagttctgcttgcacttttgcatttgcctaacagacttttgcagaggcgatggcagagagcagctgcaggcatggtccctggagccgagccttcaccacgcactcgtccaagttcggatgcgggaacctggtcccagcttgagttcctgcctttcccaccacaaattatcaactggttgatgtgtacactaattacatttcaggaggacttaatgctatttatgttgtgcctctgcaggcaaagcccttaataaatattttacatcctttctaatgac

SEQ ID NO: 11365 - protein, 86 aa, Homo sapiens
MDAEKRIRLLQFVTGTSRVPMNGFAELYGSNGPQLFTIEQWGSPEKLPRAHTCFNRLDLPPYETFEDLREKLLMAVENAQGFEGVD

SEQ ID NO: 11366 - DNA, 872 bp, Homo sapiens
tgctgtttaattttttctgtgtgtttcgggcggaggtttctctgatggagtctcactctgtcgcccaggctggagtgcagtggtgcaatctcggctcactgcaagctctgcctcccgggttcacgccattcgcctgcctcagcctcccaagtagctgggactacaggctgtgctactcatggacgccgaaaagcgtatccggttactgcagtttgtcacagggacatcgcgagtacctatgaatggatttgccgaactttatggttccaatggtcctcagctgtttacaatagagcaatggggcagtcctgagaaactgcccagagctcacacatgctttaatcgccttgacttacctccatatgaaacctttgaagatttacgagagaaacttctcatggccgtggaaaatgctcaaggatttgaaggggtggattaagcaccctgtgcctcgggggtggttgttcttcaagcaagttctgcttgcacttttgcatttgcctaacagacttttgcagaggcgatggcagagagcagctgcaggcatggtccctggagccgagccttcaccacgcactcgtccaagttcggatgcgggaacctggtcccagcttgagttcctgcctttcccaccacaaattatcaactggttgatgtgtacactaattacatttcaggaggacttaatgctatttatgttgtgcctctgcaggcaaagcccttaataaatattttacatcctttctaatgacaatgaatggaattaatcactcaacaggtatagtattacgactcatgtttactttttaaaatgatttagaccgattttcagattttatttcgttatgattaaagatgtctcatgtacttgg

SEQ ID NO: 11367 - protein, 86 aa, Homo sapiens; identical to SEQ ID NO: 11365

SEQ ID NO: 11368 - DNA, 5710 bp, Homo sapiens
tgctgtttaattttttctgtgtgtttcgggcggaggtttctctgatggagtctcactctgtcgcccaggctggagtgcagtggtgcaatctcggctcactgcaagctctgcctcccgggttcacgccattcgcctgcctcagcctcccaagtagctgggactacaggctgtgctactcatggacgccgaaaagcgtatccggttactgcagtttgtcacagggacatcgcgagtacctatgaatggatttgccgaactttatggttccaatggtcctcagctgtttacaatagagcaatggggcagtcctgagaaactgcccagagctcacacatgctttaatcgccttgacttacctccatatgaaacctttgaagatttacgagagaaacttctcatggccgtggaaaatgctcaaggatttgaaggggtggattaagcaccctgtgcctcgggggtggttgttcttcaagcaagttctgcttgcacttttgcatttgcctaacagacttttgcagaggcgatggcagagagcagctgcaggcatggtccctggagccgagccttcaccacgcactcgtccaagttcggatgcgggaacctggtcccagcttgagttcctgcctttcccaccacaaattatcaactggttgatgtgtacactaattacatttcaggaggacttaatgctatttatgttgtgcctctgcaggcaaagcccttaataaatattttacatcctttctaatgacaatgaatggaattaatcactcaacaggtatagtattacgactcatgtttactttttaaaatgatttagaccgattttcagattttatttcgttatgattaaagatgtctcatgtacttggaaaagtgagcattttttttttttttgtatttcactttcataccaggcttaatgtcaatgacatttttatttttgaagtactctgacacctccaccctctactttattagaattggaaggcaaatttttgtccaaaaacctacagacaagtactttgagagaatttccaatataatattagacataatgataattttttccatactcagaatgaaaaactggatattacgtttttgttttggggtttttttgtacaaatttagctaatagctacaggctgagagaattgtaacatagcatgacaaattttgtgttgacttgaaaggaatcacaccattattccttagaagtaattacatgtgttctaacacatttgagacagggttggactcccatttctcatccgagaaattacttaacccttcctggcgctgtacagtcatcttttattctatttcctctttgctgtttgtagtagagacattttgaatgaaacttggcactgcttgattcaaaactgtggaaaccagatctgtttagtctcctgtttgtatgcgtttgctaatggtagctaaataaccagtttttgttgtaaatgcaccaattctgaaggcactttatgtactacatggaggtcatatctggttttgtttttatttttttatcatgaacattaaatgtgatgatgatttcttttccctgcacacatctttccggtgcaatatctatcaattgtgaatctggctgctggtgtataaaaacctggatgtaaagctgagcctacagacctgtcctcaccaactgttttgtgatttctactcaactacaaagatttatttaatgtactcttaatctaactgagttttgttaccaatgacctgttgcatgcttcaataccgtgtactgcctgagttgtgcctcttgtgtgctagattaaaagtgagacagagacttgacttgatcctctgagctcaagctattgagctggtagtggcagaggactgagggtacctgcacagtttgattcttttccacgtgtaagtctccattgcagaattgtcgtgctttgagaaaacacctgaggcagtgtgggagttgaacgaccctgctgtcctttttaacctgtgttgtcctagaccctgtcggggcagtcaggggacactagagatttgatctcatgcgagtcatcaataggacaaaaaagttgtggtttggggaggtctgtttgttacataaaaaggacctttcggtgtaagaaattgccgtttttaccctgccctggctggcatgtgagaagccatggaaggttgtggttgtaaatgagttgtctaaaggggtgcagaggcctgaggtttctaaaagaaggtagatttctacagagctgagtgttggttcctttttcttattggttgaaaattacctggtagtgatcagaaaacttagatgctatgtaactaaaaaaaaaaaaaaaaaaaaaaaaaaaaaaaaaaaaattcccgctcatgagttttgactattggtgagatgttttccgctacagttaacatgacaaatgtctcagtggcaaaaatcccctttttgtaagcccccatagtctagaggcagttttctttttaagaatcatgccagagcctgagtcgagcagtatgctttcttggtttttgagagtaattgtgtaattgtagagggagaaatccaattctaacctaagaactgggattcttctgtcatcttgtaaaccgtatattgaaaaaaacagaatgtcactaaatgcatattaagtcaagtattggaaagtataaaagaaaaatcattctgacaatttctaagccagaagcaaacaagaattactgaaatctaccccatgaatacttggaaggcagtaattgtgagtgacacctcagttcatcaaccccttaataatatcagcttaattttaatgacaactaaatatgctgaagtgaggatttagtattttttaaaaaagcaaaacaaggttcagtagtcctcagcaattctccaagtttctctctttgcctaaaatggtcatagatcttgatttctctgaatcgtgatgaccacacccagtcatcttcacagcataattgcaggtggcagtaaagagagtgtgctgggtaaggagcagttgctgggtcattccttgggccccgacctgcccggggagtagccctgggggagagagggcagtgttgcctatcccagaggtcccagcagtcacactgctctgcaggccgggctctctttatagccagagaaatcaccttaatgcagtctctttagttgtctgctgaagctgtagttattatgggccacttacatgaggctgagaagtacgtgccggagctcacacactgcctgttgcggttctcttaacatcagttatcacagctgcctgtgggtcccgggtatttccattcctgccccttgttggcccgaggaaggatgtggaaagagcacctggtgggatgaaggtccaacagcctgtgcctctccactgctggccctggagccggcagcagtgaggcattcattgtctgtgttgcggtgtattcccagcttcagtgctcttttcctttttgcctgaaatgtttatgcttctctgcagccagtcctctaacaaatctcaagaacaaaggtaagacacttggtttttgtttccaggacccttcagaaggtgacatcagatattccctaaattcagacaatgagggatacagagcgacttggcatgtattatttctcccatgtaaggacaaagggacagattattattgttatttctgagacagagtcttgctctgtagctcaggctggagtgcagtggctcaatctcagctcaccacaacctctgcctcctggcttcaagcgattcttctgcctcagcctccccgaatagttgggattacaggcacccaccaccacgcctggctaatttttgtatttttagtagagatggtttcaccatgctggccaggctggtcttgaactcctgacctcaggtgatcctcccgcctcagccttccaaagtgctgggattacaagcatgagccaccgcacccggcctcacagtgacagattctgagaaacagcatgcaaaacatttgaaccattttctacatctcccattgttgcatagagagtgtgcaccgctgctatcttgccagatccacactggtcctcccgaaagccaggttcatacacagcaactttttaattattctaacagttacccattaacagtcgactcctgtatttctgagagtcttgtactcacctctgaaatttaaaaacgtataaagagagcctgggttaatcagttctgcagcccctacgtgacactgtgctagttctccttcttctgtctcctccttaccctggccctgcacccctgtacttaagagggagaggtgggaggtgctgtctggtatcatttgctgcctcgccagtagagggtgccgctgtgcagggtaactgcccgcctgctcccttcctgacctcccctgaccccgaagatcactacctctgtcattcaggcattggggtacatcctgataagtcgtgtcagaactgccaatttcaggactgagatgtgtttttaaaaaacaaatccttataaactccactttgtactttagattttaaaactggggaaaaatgtgatattctttggaccacttttttaatttatataagccttaatgaacagtgtctatacatttgcatacacacacccccaccccagagtgttctcagtatgtcagagaaagtgccacagcattaggacgggagcttggagaacgttttctagaaaagggttagcttcctgttggcatgaaattttccaagcaaacctcattaaacatctgttgtttgttaaagatgttccactgaaagcaacgcatgtttcaaaggcacgtctttccgttcgttggttttctgtgtgtaaggagtagcattgctgttggcgcctaacctcgcgtgcactgcattctcaaccccgtaccagtgcatcatcagaagccttcctcgtgaccataactctgtgtctgcagatatgtgttcccgtgtaagccagttttccccttttactcagactgatttcacctagattgtcacggtttccttcatgttaactttgcgtgactttgttcttcctttactactctgtatgtaatatatatacatatatacgtacatatgctgtccaaatatatttgtatatatttgtatagcatttttacacctttattgagtaatctggtttcgaaaggaggtgagagtttagtcccttctgcagttttctccaagctgtgtcctgtgaatttcaacccttggagcctaagaaaaccctaggaagatgatgttaatttgctgtcatttcctaattcaggatctatcatcaaatgaaacatgaaaaaaacagtgacttttaaggtgaaaagagtttcaagcattccaaataaattatcaatgtttcataactttttattataaacccacctcctaataggaagccaagtactatttgatacagtggtaaaaaccaaactaccttgaatttttttaaggcaacttatgaataatgctcattttcacagtcagaatagctttaaaatatggttgaatttgatacacacaggaagttttcttgaagaacaatcctttcgcttttcttttttcttgagagatctaaagagaaactgtagattgttttcctgacagcaaaagactaatgtgacaaaatgaagtcattgtaaagaagcgatgcaacttgtcaaatatttaataaagaattatggaagctggaacattttctac

SEQ ID NO: 11369 - protein, 86 aa, Homo sapiens; identical to SEQ ID NO: 11365

SEQ ID NO: 11370 - DNA, 3373 bp, Homo sapiens
agtcacagaggaagccatttccagagaggaacaaccgtgtagactgctttcctgggagtcaagttaaaacttctctcctgtgaccttgtcacccggcagtggaaagttacccttggctgcagccacgacttccgcatactcttcagaacttgctctgcccttgagttttccagctttcctttaatgcactaaacctttaatattgtattctcctaaatgagacgtctcgcatttgagcagggagagtcccgtattctcagagtaaaagttgtttctggaattgatctcgccaaaaaggacatctttggagccagtgatccgtatgtgaaactttcattgtacgtagcggatgagaatagagaacttgctttggtccagacaaaaacaattaaaaagacactgaacccaaaatggaatgaagaattttatttcagggtaaacccatctaatcacagactcctatttgaagtatttgacgaaaatagactgacacgagacgacttcctgggccaggtggacgtgccccttagtcaccttccgacagaagatccaaccatggagcgaccctatacatttaaggactttctcctcagaccaagaagtcataagtctcgagttaagggatttttgcgattgaaaatggcctatatgccaaaaaatggaggtcaagatgaagaaaacagtgaccagagggatgacatggagcatggatgggaagttgttgactcaaatgactcggcttctcagcaccaagaggaacttcctcctcctcctctgcctcccgggtgggaagaaaaagtggacaatttaggccgaacttactatgtcaaccacaacaaccggaccactcagtggcacagaccaagcctgatggacgtgtcctcggagtcggacaataacatcagacagatcaaccaggaggcagcacaccggcgcttccgctcccgcaggcacatcagcgaagacttggagcccgagccctcggagggcggggatgtccccgagccttgggagaccatttcagaggaagtgaatatcgctggagactctctcggtctggctctgcccccaccaccggcctccccaggatctcggaccagccctcaggagctgtcagaggaactaagcagaaggcttcagatcactccagactccaatggggaacagttcagctctttgattcaaagagaaccctcctcaaggttgaggtcatgcagtgtcaccgacgcagttgcagaacagggccatctaccaccgccatcagtggcctatgtacataccacgccgggtctgccttcaggctgggaagaaagaaaagatgctaaggggcgcacatactatgtcaatcataacaatcgaaccacaacttggactcgacctatcatgcagcttgcagaagatggtgcgtccggatcagccacaaacagtaacaaccatctaatcgagcctcagatccgccggcctcgtagcctcagctcgccaacagtaactttatctgccccgctggagggtgccaaggactcacccgtacgtcgggctgtgaaagacaccctttccaacccacagtccccacagccatcaccttacaactcccccaaaccacaacacaaagtcacacagagcttcttgccacccggctgggaaatgaggatagcgccaaacggccggcccttcttcattgatcataacacaaagactacaacctgggaagatccacgtttgaaatttccagtacatatgcggtcaaagacatctttaaaccccaatgaccttggcccccttcctcctggctgggaagaaagaattcacttggatggccgaacgttttatattgatcataatagcaaaattactcagtgggaagacccaagactgcagaacccagctattactggtccggctgtcccttactccagagaatttaagcagaaatatgactacttcaggaagaaattaaagaaacctgctgatatccccaataggtttgaaatgaaacttcacagaaataacatatttgaagagtcctatcggagaattatgtccgtgaaaagaccagatgtcctaaaagctagactgtggattgagtttgaatcagagaaaggtcttgactatgggggtgtggccagagaatggttcttcttactgtccaaagagatgttcaacccctactacggcctctttgagtactctgccacggacaactacacccttcagatcaaccctaattcaggcctctgtaatgaggatcatttgtcctacttcacttttattggaagagttgctggtctggccgtatttcatgggaagctcttagatggtttcttcattagaccattttacaagatgatgttgggaaagcagataaccctgaatgacatggaatctgtggatagtgaatattacaactctttgaaatggatcctggagaatgaccctactgagctggacctcatgttctgcatagacgaagaaaactttggacagacatatcaagtggatttgaagcccaatgggtcagaaataatggtcacaaatgaaaacaaaagggaatatatcgacttagtcatccagtggagatttgtgaacagggtccagaagcagatgaacgccttcttggagggattcacagaactacttcctattgatttgattaaaatttttgatgaaaatgagctggagttgctcatgtgcggcctcggtgatgtggatgtgaatgactggagacagcattctatttacaagaacggctactgcccaaaccaccccgtcattcagtggttctggaaggctgtgctactcatggacgccgaaaagcgtatccggttactgcagtttgtcacagggacatcgcgagtacctatgaatggatttgccgaactttatggttccaatggtcctcagctgtttacaatagagcaatggggcagtcctgagaaactgcccagagctcacacatgctttaatcgccttgacttacctccatatgaaacctttgaagatttacgagagaaacttctcatggccgtggaaaatgctcaaggatttgaaggggtggattaagcaccctgtgcctcgggggtggttgttcttcaagcaagttctgcttgcacttttgcatttgcctaacagacttttgcagaggcgatggcagagagcagctgcaggcatggtccctggagccgagccttcaccacgcactcgtccaagttcggatgcgggaacctggtcccagcttgagttcctgcctttcccaccacaaattatcaactggttgatgtgtacactaattacatttcaggaggacttaatgctatttatgttgtgcctctgcaggcaaagcccttaataaatattttacatcctttctaatgac

SEQ ID NO: 11371 - protein, 947 aa, Homo sapiens
MRRLAFEQGESRILRVKVVSGIDLAKKDIFGASDPYVKLSLYVADENRELALVQTKTIKKTLNPKWNEEFYFRVNPSNHRLLFEVFDENRLTRDDFLGQVDVPLSHLPTEDPTMERPYTFKDFLLRPRSHKSRVKGFLRLKMAYMPKNGGQDEENSDQRDDMEHGWEVVDSNDSASQHQEELPPPPLPPGWEEKVDNLGRTYYVNHNNRTTQWHRPSLMDVSSESDNNIRQINQEAAHRRFRSRRHISEDLEPEPSEGGDVPEPWETISEEVNIAGDSLGLALPPPPASPGSRTSPQELSEELSRRLQITPDSNGEQFSSLIQREPSSRLRSCSVTDAVAEQGHLPPPSVAYVHTTPGLPSGWEERKDAKGRTYYVNHNNRTTTWTRPIMQLAEDGASGSATNSNNHLIEPQIRRPRSLSSPTVTLSAPLEGAKDSPVRRAVKDTLSNPQSPQPSPYNSPKPQHKVTQSFLPPGWEMRIAPNGRPFFIDHNTKTTTWEDPRLKFPVHMRSKTSLNPNDLGPLPPGWEERIHLDGRTFYIDHNSKITQWEDPRLQNPAITGPAVPYSREFKQKYDYFRKKLKKPADIPNRFEMKLHRNNIFEESYRRIMSVKRPDVLKARLWIEFESEKGLDYGGVAREWFFLLSKEMFNPYYGLFEYSATDNYTLQINPNSGLCNEDHLSYFTFIGRVAGLAVFHGKLLDGFFIRPFYKMMLGKQITLNDMESVDSEYYNSLKWILENDPTELDLMFCIDEENFGQTYQVDLKPNGSEIMVTNENKREYIDLVIQWRFVNRVQKQMNAFLEGFTELLPIDLIKIFDENELELLMCGLGDVDVNDWRQHSIYKNGYCPNHPVIQWFWKAVLLMDAEKRIRLLQFVTGTSRVPMNGFAELYGSNGPQLFTIEQWGSPEKLPRAHTCFNRLDLPPYETFEDLREKLLMAVENAQGFEGVD

SEQ ID NO: 11372 - DNA, 3433 bp, Homo sapiens
agtcacagaggaagccatttccagagaggaacaaccgtgtagactgctttcctgggagtcaagttaaaacttctctcctgtgaccttgtcacccggcagtggaaagttacccttggctgcagccacgacttccgcatactcttcagaacttgctctgcccttgagttttccagctttcctttaatgcactaaacctttaatattgtattctcctaaatgagacgtctcgcatttgagcagggagagtcccgtattctcagagtaaaagttgtttctggaattgatctcgccaaaaaggacatctttggagccagtgatccgtatgtgaaactttcattgtacgtagcggatgagaatagagaacttgctttggtccagacaaaaacaattaaaaagacactgaacccaaaatggaatgaagaattttatttcagggtaaacccatctaatcacagactcctatttgaagtatttgacgaaaatagactgacacgagacgacttcctgggccaggtggacgtgccccttagtcaccttccgacagaagatccaaccatggagcgaccctatacatttaaggactttctcctcagaccaagaagtcataagtctcgagttaagggatttttgcgattgaaaatggcctatatgccaaaaaatggaggtcaagatgaagaaaacagtgaccagagggatgacatggagcatggatgggaagttgttgactcaaatgactcggcttctcagcaccaagaggaacttcctcctcctcctctgcctcccgggtgggaagaaaaagtggacaatttaggccgaacttactatgtcaaccacaacaaccggaccactcagtggcacagaccaagcctgatggacgtgtcctcggagtcggacaataacatcagacagatcaaccaggaggcagcacaccggcgcttccgctcccgcaggcacatcagcgaagacttggagcccgagccctcggagggcggggatgtccccgagccttgggagaccatttcagaggaagtgaatatcgctggagactctctcggtctggctctgcccccaccaccggcctccccaggatctcggaccagccctcaggagctgtcagaggaactaagcagaaggcttcagatcactccagactccaatggggaacagttcagctctttgattcaaagagaaccctcctcaaggttgaggtcatgcagtgtcaccgacgcagttgcagaacagggccatctaccaccgcccagtgccccagctgggagagcgcgttcatcaactgtcacgggtggtgaggaaccaacgccatcagtggcctatgtacataccacgccgggtctgccttcaggctgggaagaaagaaaagatgctaaggggcgcacatactatgtcaatcataacaatcgaaccacaacttggactcgacctatcatgcagcttgcagaagatggtgcgtccggatcagccacaaacagtaacaaccatctaatcgagcctcagatccgccggcctcgtagcctcagctcgccaacagtaactttatctgccccgctggagggtgccaaggactcacccgtacgtcgggctgtgaaagacaccctttccaacccacagtccccacagccatcaccttacaactcccccaaaccacaacacaaagtcacacagagcttcttgccacccggctgggaaatgaggatagcgccaaacggccggcccttcttcattgatcataacacaaagactacaacctgggaagatccacgtttgaaatttccagtacatatgcggtcaaagacatctttaaaccccaatgaccttggcccccttcctcctggctgggaagaaagaattcacttggatggccgaacgttttatattgatcataatagcaaaattactcagtgggaagacccaagactgcagaacccagctattactggtccggctgtcccttactccagagaatttaagcagaaatatgactacttcaggaagaaattaaagaaacctgctgatatccccaataggtttgaaatgaaacttcacagaaataacatatttgaagagtcctatcggagaattatgtccgtgaaaagaccagatgtcctaaaagctagactgtggattgagtttgaatcagagaaaggtcttgactatgggggtgtggccagagaatggttcttcttactgtccaaagagatgttcaacccctactacggcctctttgagtactctgccacggacaactacacccttcagatcaaccctaattcaggcctctgtaatgaggatcatttgtcctacttcacttttattggaagagttgctggtctggccgtatttcatgggaagctcttagatggtttcttcattagaccattttacaagatgatgttgggaaagcagataaccctgaatgacatggaatctgtggatagtgaatattacaactctttgaaatggatcctggagaatgaccctactgagctggacctcatgttctgcatagacgaagaaaactttggacagacatatcaagtggatttgaagcccaatgggtcagaaataatggtcacaaatgaaaacaaaagggaatatatcgacttagtcatccagtggagatttgtgaacagggtccagaagcagatgaacgccttcttggagggattcacagaactacttcctattgatttgattaaaatttttgatgaaaatgagctggagttgctcatgtgcggcctcggtgatgtggatgtgaatgactggagacagcattctatttacaagaacggctactgcccaaaccaccccgtcattcagtggttctggaaggctgtgctactcatggacgccgaaaagcgtatccggttactgcagtttgtcacagggacatcgcgagtacctatgaatggatttgccgaactttatggttccaatggtcctcagctgtttacaatagagcaatggggcagtcctgagaaactgcccagagctcacacatgctttaatcgccttgacttacctccatatgaaacctttgaagatttacgagagaaacttctcatggccgtggaaaatgctcaaggatttgaaggggtggattaagcaccctgtgcctcgggggtggttgttcttcaagcaagttctgcttgcacttttgcatttgcctaacagacttttgcagaggcgatggcagagagcagctgcaggcatggtccctggagccgagccttcaccacgcactcgtccaagttcggatgcgggaacctggtcccagcttgagttcctgcctttcccaccacaaattatcaactggttgatgtgtacactaattacatttcaggaggacttaatgctatttatgttgtgcctctgcaggcaaagcccttaataaatattttacatcctttctaatgac

SEQ ID NO: 11373 - protein, 967 aa, Homo sapiens
MRRLAFEQGESRILRVKVVSGIDLAKKDIFGASDPYVKLSLYVADENRELALVQTKTIKKTLNPKWNEEFYFRVNPSNHRLLFEVFDENRLTRDDFLGQVDVPLSHLPTEDPTMERPYTFKDFLLRPRSHKSRVKGFLRLKMAYMPKNGGQDEENSDQRDDMEHGWEVVDSNDSASQHQEELPPPPLPPGWEEKVDNLGRTYYVNHNNRTTQWHRPSLMDVSSESDNNIRQINQEAAHRRFRSRRHISEDLEPEPSEGGDVPEPWETISEEVNIAGDSLGLALPPPPASPGSRTSPQELSEELSRRLQITPDSNGEQFSSLIQREPSSRLRSCSVTDAVAEQGHLPPPSAPAGRARSSTVTGGEEPTPSVAYVHTTPGLPSGWEERKDAKGRTYYVNHNNRTTTWTRPIMQLAEDGASGSATNSNNHLIEPQIRRPRSLSSPTVTLSAPLEGAKDSPVRRAVKDTLSNPQSPQPSPYNSPKPQHKVTQSFLPPGWEMRIAPNGRPFFIDHNTKTTTWEDPRLKFPVHMRSKTSLNPNDLGPLPPGWEERIHLDGRTFYIDHNSKITQWEDPRLQNPAITGPAVPYSREFKQKYDYFRKKLKKPADIPNRFEMKLHRNNIFEESYRRIMSVKRPDVLKARLWIEFESEKGLDYGGVAREWFFLLSKEMFNPYYGLFEYSATDNYTLQINPNSGLCNEDHLSYFTFIGRVAGLAVFHGKLLDGFFIRPFYKMMLGKQITLNDMESVDSEYYNSLKWILENDPTELDLMFCIDEENFGQTYQVDLKPNGSEIMVTNENKREYIDLVIQWRFVNRVQKQMNAFLEGFTELLPIDLIKIFDENELELLMCGLGDVDVNDWRQHSIYKNGYCPNHPVIQWFWKAVLLMDAEKRIRLLQFVTGTSRVPMNGFAELYGSNGPQLFTIEQWGSPEKLPRAHTCFNRLDLPPYETFEDLREKLLMAVENAQGFEGVD

SEQ ID NO: 11374 - DNA, 3493 bp, Homo sapiens
agtcacagaggaagccatttccagagaggaacaaccgtgtagactgctttcctgggagtcaagttaaaacttctctcctgtgaccttgtcacccggcagtggaaagttacccttggctgcagccacgacttccgcatactcttcagaacttgctctgcccttgagttttccagctttcctttaatgcactaaacctttaatattgtattctcctaaatgagacgtctcgcatttgagcagggagagtcccgtattctcagagtaaaagttgtttctggaattgatctcgccaaaaaggacatctttggagccagtgatccgtatgtgaaactttcattgtacgtagcggatgagaatagagaacttgctttggtccagacaaaaacaattaaaaagacactgaacccaaaatggaatgaagaattttatttcagggtaaacccatctaatcacagactcctatttgaagtatttgacgaaaatagactgacacgagacgacttcctgggccaggtggacgtgccccttagtcaccttccgacagaagatccaaccatggagcgaccctatacatttaaggactttctcctcagaccaagaagtcataagtctcgagttaagggatttttgcgattgaaaatggcctatatgccaaaaaatggaggtcaagatgaagaaaacagtgaccagagggatgacatggagcatggatgggaagttgttgactcaaatgactcggcttctcagcaccaagaggaacttcctcctcctcctctgcctcccgggtgggaagaaaaagtggacaatttaggccgaacttactatgtcaaccacaacaaccggaccactcagtggcacagaccaagcctgatggacgtgtcctcggagtcggacaataacatcagacagatcaaccaggaggcagcacaccggcgcttccgctcccgcaggcacatcagcgaagacttggagcccgagccctcggagggcggggatgtccccgagccttgggagaccatttcagaggaagtgaatatcgctggagactctctcggtctggctctgcccccaccaccggcctccccaggatctcggaccagccctcaggagctgtcagaggaactaagcagaaggcttcagatcactccagactccaatggggaacagttcagctctttgattcaaagagaaccctcctcaaggttgaggtcatgcagtgtcaccgacgcagttgcagaacagggccatctaccaccgccatcagtggcctatgtacataccacgccgggtctgccttcaggctgggaagaaagaaaagatgctaaggggcgcacatactatgtcaatcataacaatcgaaccacaacttggactcgacctatcatgcagcttgcagaagatggtgcgtccggatcagccacaaacagtaacaaccatctaatcgagcctcagatccgccggcctcgtagcctcagctcgccaacagtaactttatctgccccgctggagggtgccaaggactcacccgtacgtcgggctgtgaaagacaccctttccaacccacagtccccacagccatcaccttacaactcccccaaaccacaacacaaagtcacacagagcttcttgccacccggctgggaaatgaggatagcgccaaacggccggcccttcttcattgatcataacacaaagactacaacctgggaagatccacgtttgaaatttccagtacatatgcggtcaaagacatctttaaaccccaatgaccttggcccccttcctcctggctgggaagaaagaattcacttggatggccgaacgttttatattgatcataatagcaaaattactcagtgggaagacccaagactgcagaacccagctattactggtccggctgtcccttactccagagaatttaagcagaaatatgactacttcaggaagaaattaaagaaacctgctgatatccccaataggtttgaaatgaaacttcacagaaataacatatttgaagagtcctatcggagaattatgtccgtgaaaagaccagatgtcctaaaagctagactgtggattgagtttgaatcagagaaaggtcttgactatgggggtgtggccagagaatggttcttcttactgtccaaagagatgttcaacccctactacggcctctttgagtactctgccacggacaactacacccttcagatcaaccctaattcaggcctctgtaatgaggatcatttgtcctacttcacttttattggaagagttgctggtctggccgtatttcatgggaagctcttagatggtttcttcattagaccattttacaagatgatgttgggaaagcagataaccctgaatgacatggaatctgtggatagtgaatattacaactctttgaaatggatcctggagaatgaccctactgagctggacctcatgttctgcatagacgaagaaaactttggacagacatatcaagtggatttgaagcccaatgggtcagaaataatggtcacaaatgaaaacaaaagggaatatatcgacttagtcatccagtggagatttgtgaacagggtccagaagcagatgaacgccttcttggagggattcacagaactacttcctattgatttgattaaaatttttgatgaaaatgagctggagttgctcatgtgcggcctcggtgatgtggatgtgaatgactggagacagcattctatttacaagaacggctactgcccaaaccaccccgtcattcagtggttctggaaggctgtgctactcatggacgccgaaaagcgtatccggttactgcagtttgtcacagggacatcgcgagtacctatgaatggatttgccgaactttatggttccaatggtcctcagctgtttacaatagagcaatggggcagtcctgagaaactgcccagagctcacacatgctttaatcgccttgacttacctccatatgaaacctttgaagatttacgagagaaacttctcatggccgtggaaaatgctcaaggatttgaaggggtggattaagcaccctgtgcctcgggggtggttgttcttcaagcaagttctgcttgcacttttgcatttgcctaacagacttttgcagaggcgatggcagagagcagctgcaggcatggtccctggagccgagccttcaccacgcactcgtccaagttcggatgcgggaacctggtcccagcttgagttcctgcctttcccaccacaaattatcaactggttgatgtgtacactaattacatttcaggaggacttaatgctatttatgttgtgcctctgcaggcaaagcccttaataaatattttacatcctttctaatgacaatgaatggaattaatcactcaacaggtatagtattacgactcatgtttactttttaaaatgatttagaccgattttcagattttatttcgttatgattaaagatgtctcatgtacttgg

SEQ ID NO: 11375 - protein, 947 aa, Homo sapiens; identical to SEQ ID NO: 11371

SEQ ID NO: 11376 - DNA, 3553 bp, Homo sapiens
agtcacagaggaagccatttccagagaggaacaaccgtgtagactgctttcctgggagtcaagttaaaacttctctcctgtgaccttgtcacccggcagtggaaagttacccttggctgcagccacgacttccgcatactcttcagaacttgctctgcccttgagttttccagctttcctttaatgcactaaacctttaatattgtattctcctaaatgagacgtctcgcatttgagcagggagagtcccgtattctcagagtaaaagttgtttctggaattgatctcgccaaaaaggacatctttggagccagtgatccgtatgtgaaactttcattgtacgtagcggatgagaatagagaacttgctttggtccagacaaaaacaattaaaaagacactgaacccaaaatggaatgaagaattttatttcagggtaaacccatctaatcacagactcctatttgaagtatttgacgaaaatagactgacacgagacgacttcctgggccaggtggacgtgccccttagtcaccttccgacagaagatccaaccatggagcgaccctatacatttaaggactttctcctcagaccaagaagtcataagtctcgagttaagggatttttgcgattgaaaatggcctatatgccaaaaaatggaggtcaagatgaagaaaacagtgaccagagggatgacatggagcatggatgggaagttgttgactcaaatgactcggcttctcagcaccaagaggaacttcctcctcctcctctgcctcccgggtgggaagaaaaagtggacaatttaggccgaacttactatgtcaaccacaacaaccggaccactcagtggcacagaccaagcctgatggacgtgtcctcggagtcggacaataacatcagacagatcaaccaggaggcagcacaccggcgcttccgctcccgcaggcacatcagcgaagacttggagcccgagccctcggagggcggggatgtccccgagccttgggagaccatttcagaggaagtgaatatcgctggagactctctcggtctggctctgcccccaccaccggcctccccaggatctcggaccagccctcaggagctgtcagaggaactaagcagaaggcttcagatcactccagactccaatggggaacagttcagctctttgattcaaagagaaccctcctcaaggttgaggtcatgcagtgtcaccgacgcagttgcagaacagggccatctaccaccgcccagtgccccagctgggagagcgcgttcatcaactgtcacgggtggtgaggaaccaacgccatcagtggcctatgtacataccacgccgggtctgccttcaggctgggaagaaagaaaagatgctaaggggcgcacatactatgtcaatcataacaatcgaaccacaacttggactcgacctatcatgcagcttgcagaagatggtgcgtccggatcagccacaaacagtaacaaccatctaatcgagcctcagatccgccggcctcgtagcctcagctcgccaacagtaactttatctgccccgctggagggtgccaaggactcacccgtacgtcgggctgtgaaagacaccctttccaacccacagtccccacagccatcaccttacaactcccccaaaccacaacacaaagtcacacagagcttcttgccacccggctgggaaatgaggatagcgccaaacggccggcccttcttcattgatcataacacaaagactacaacctgggaagatccacgtttgaaatttccagtacatatgcggtcaaagacatctttaaaccccaatgaccttggcccccttcctcctggctgggaagaaagaattcacttggatggccgaacgttttatattgatcataatagcaaaattactcagtgggaagacccaagactgcagaacccagctattactggtccggctgtcccttactccagagaatttaagcagaaatatgactacttcaggaagaaattaaagaaacctgctgatatccccaataggtttgaaatgaaacttcacagaaataacatatttgaagagtcctatcggagaattatgtccgtgaaaagaccagatgtcctaaaagctagactgtggattgagtttgaatcagagaaaggtcttgactatgggggtgtggccagagaatggttcttcttactgtccaaagagatgttcaacccctactacggcctctttgagtactctgccacggacaactacacccttcagatcaaccctaattcaggcctctgtaatgaggatcatttgtcctacttcacttttattggaagagttgctggtctggccgtatttcatgggaagctcttagatggtttcttcattagaccattttacaagatgatgttgggaaagcagataaccctgaatgacatggaatctgtggatagtgaatattacaactctttgaaatggatcctggagaatgaccctactgagctggacctcatgttctgcatagacgaagaaaactttggacagacatatcaagtggatttgaagcccaatgggtcagaaataatggtcacaaatgaaaacaaaagggaatatatcgacttagtcatccagtggagatttgtgaacagggtccagaagcagatgaacgccttcttggagggattcacagaactacttcctattgatttgattaaaatttttgatgaaaatgagctggagttgctcatgtgcggcctcggtgatgtggatgtgaatgactggagacagcattctatttacaagaacggctactgcccaaaccaccccgtcattcagtggttctggaaggctgtgctactcatggacgccgaaaagcgtatccggttactgcagtttgtcacagggacatcgcgagtacctatgaatggatttgccgaactttatggttccaatggtcctcagctgtttacaatagagcaatggggcagtcctgagaaactgcccagagctcacacatgctttaatcgccttgacttacctccatatgaaacctttgaagatttacgagagaaacttctcatggccgtggaaaatgctcaaggatttgaaggggtggattaagcaccctgtgcctcgggggtggttgttcttcaagcaagttctgcttgcacttttgcatttgcctaacagacttttgcagaggcgatggcagagagcagctgcaggcatggtccctggagccgagccttcaccacgcactcgtccaagttcggatgcgggaacctggtcccagcttgagttcctgcctttcccaccacaaattatcaactggttgatgtgtacactaattacatttcaggaggacttaatgctatttatgttgtgcctctgcaggcaaagcccttaataaatattttacatcctttctaatgacaatgaatggaattaatcactcaacaggtatagtattacgactcatgtttactttttaaaatgatttagaccgattttcagattttatttcgttatgattaaagatgtctcatgtacttgg

SEQ ID NO: 11377 - protein, 967 aa, Homo sapiens; identical to SEQ ID NO: 11373

SEQ ID NO: 11378 - DNA, 8331 bp, Homo sapiens
agtcacagaggaagccatttccagagaggaacaaccgtgtagactgctttcctgggagtcaagttaaaacttctctcctgtgaccttgtcacccggcagtggaaagttacccttggctgcagccacgacttccgcatactcttcagaacttgctctgcccttgagttttccagctttcctttaatgcactaaacctttaatattgtattctcctaaatgagacgtctcgcatttgagcagggagagtcccgtattctcagagtaaaagttgtttctggaattgatctcgccaaaaaggacatctttggagccagtgatccgtatgtgaaactttcattgtacgtagcggatgagaatagagaacttgctttggtccagacaaaaacaattaaaaagacactgaacccaaaatggaatgaagaattttatttcagggtaaacccatctaatcacagactcctatttgaagtatttgacgaaaatagactgacacgagacgacttcctgggccaggtggacgtgccccttagtcaccttccgacagaagatccaaccatggagcgaccctatacatttaaggactttctcctcagaccaagaagtcataagtctcgagttaagggatttttgcgattgaaaatggcctatatgccaaaaaatggaggtcaagatgaagaaaacagtgaccagagggatgacatggagcatggatgggaagttgttgactcaaatgactcggcttctcagcaccaagaggaacttcctcctcctcctctgcctcccgggtgggaagaaaaagtggacaatttaggccgaacttactatgtcaaccacaacaaccggaccactcagtggcacagaccaagcctgatggacgtgtcctcggagtcggacaataacatcagacagatcaaccaggaggcagcacaccggcgcttccgctcccgcaggcacatcagcgaagacttggagcccgagccctcggagggcggggatgtccccgagccttgggagaccatttcagaggaagtgaatatcgctggagactctctcggtctggctctgcccccaccaccggcctccccaggatctcggaccagccctcaggagctgtcagaggaactaagcagaaggcttcagatcactccagactccaatggggaacagttcagctctttgattcaaagagaaccctcctcaaggttgaggtcatgcagtgtcaccgacgcagttgcagaacagggccatctaccaccgccatcagtggcctatgtacataccacgccgggtctgccttcaggctgggaagaaagaaaagatgctaaggggcgcacatactatgtcaatcataacaatcgaaccacaacttggactcgacctatcatgcagcttgcagaagatggtgcgtccggatcagccacaaacagtaacaaccatctaatcgagcctcagatccgccggcctcgtagcctcagctcgccaacagtaactttatctgccccgctggagggtgccaaggactcacccgtacgtcgggctgtgaaagacaccctttccaacccacagtccccacagccatcaccttacaactcccccaaaccacaacacaaagtcacacagagcttcttgccacccggctgggaaatgaggatagcgccaaacggccggcccttcttcattgatcataacacaaagactacaacctgggaagatccacgtttgaaatttccagtacatatgcggtcaaagacatctttaaaccccaatgaccttggcccccttcctcctggctgggaagaaagaattcacttggatggccgaacgttttatattgatcataatagcaaaattactcagtgggaagacccaagactgcagaacccagctattactggtccggctgtcccttactccagagaatttaagcagaaatatgactacttcaggaagaaattaaagaaacctgctgatatccccaataggtttgaaatgaaacttcacagaaataacatatttgaagagtcctatcggagaattatgtccgtgaaaagaccagatgtcctaaaagctagactgtggattgagtttgaatcagagaaaggtcttgactatgggggtgtggccagagaatggttcttcttactgtccaaagagatgttcaacccctactacggcctctttgagtactctgccacggacaactacacccttcagatcaaccctaattcaggcctctgtaatgaggatcatttgtcctacttcacttttattggaagagttgctggtctggccgtatttcatgggaagctcttagatggtttcttcattagaccattttacaagatgatgttgggaaagcagataaccctgaatgacatggaatctgtggatagtgaatattacaactctttgaaatggatcctggagaatgaccctactgagctggacctcatgttctgcatagacgaagaaaactttggacagacatatcaagtggatttgaagcccaatgggtcagaaataatggtcacaaatgaaaacaaaagggaatatatcgacttagtcatccagtggagatttgtgaacagggtccagaagcagatgaacgccttcttggagggattcacagaactacttcctattgatttgattaaaatttttgatgaaaatgagctggagttgctcatgtgcggcctcggtgatgtggatgtgaatgactggagacagcattctatttacaagaacggctactgcccaaaccaccccgtcattcagtggttctggaaggctgtgctactcatggacgccgaaaagcgtatccggttactgcagtttgtcacagggacatcgcgagtacctatgaatggatttgccgaactttatggttccaatggtcctcagctgtttacaatagagcaatggggcagtcctgagaaactgcccagagctcacacatgctttaatcgccttgacttacctccatatgaaacctttgaagatttacgagagaaacttctcatggccgtggaaaatgctcaaggatttgaaggggtggattaagcaccctgtgcctcgggggtggttgttcttcaagcaagttctgcttgcacttttgcatttgcctaacagacttttgcagaggcgatggcagagagcagctgcaggcatggtccctggagccgagccttcaccacgcactcgtccaagttcggatgcgggaacctggtcccagcttgagttcctgcctttcccaccacaaattatcaactggttgatgtgtacactaattacatttcaggaggacttaatgctatttatgttgtgcctctgcaggcaaagcccttaataaatattttacatcctttctaatgacaatgaatggaattaatcactcaacaggtatagtattacgactcatgtttactttttaaaatgatttagaccgattttcagattttatttcgttatgattaaagatgtctcatgtacttggaaaagtgagcattttttttttttttgtatttcactttcataccaggcttaatgtcaatgacatttttatttttgaagtactctgacacctccaccctctactttattagaattggaaggcaaatttttgtccaaaaacctacagacaagtactttgagagaatttccaatataatattagacataatgataattttttccatactcagaatgaaaaactggatattacgtttttgttttggggtttttttgtacaaatttagctaatagctacaggctgagagaattgtaacatagcatgacaaattttgtgttgacttgaaaggaatcacaccattattccttagaagtaattacatgtgttctaacacatttgagacagggttggactcccatttctcatccgagaaattacttaacccttcctggcgctgtacagtcatcttttattctatttcctctttgctgtttgtagtagagacattttgaatgaaacttggcactgcttgattcaaaactgtggaaaccagatctgtttagtctcctgtttgtatgcgtttgctaatggtagctaaataaccagtttttgttgtaaatgcaccaattctgaaggcactttatgtactacatggaggtcatatctggttttgtttttatttttttatcatgaacattaaatgtgatgatgatttcttttccctgcacacatctttccggtgcaatatctatcaattgtgaatctggctgctggtgtataaaaacctggatgtaaagctgagcctacagacctgtcctcaccaactgttttgtgatttctactcaactacaaagatttatttaatgtactcttaatctaactgagttttgttaccaatgacctgttgcatgcttcaataccgtgtactgcctgagttgtgcctcttgtgtgctagattaaaagtgagacagagacttgacttgatcctctgagctcaagctattgagctggtagtggcagaggactgagggtacctgcacagtttgattcttttccacgtgtaagtctccattgcagaattgtcgtgctttgagaaaacacctgaggcagtgtgggagttgaacgaccctgctgtcctttttaacctgtgttgtcctagaccctgtcggggcagtcaggggacactagagatttgatctcatgcgagtcatcaataggacaaaaaagttgtggtttggggaggtctgtttgttacataaaaaggacctttcggtgtaagaaattgccgtttttaccctgccctggctggcatgtgagaagccatggaaggttgtggttgtaaatgagttgtctaaaggggtgcagaggcctgaggtttctaaaagaaggtagatttctacagagctgagtgttggttcctttttcttattggttgaaaattacctggtagtgatcagaaaacttagatgctatgtaactaaaaaaaaaaaaaaaaaaaaaaaaaaaaaaaaaaaaattcccgctcatgagttttgactattggtgagatgttttccgctacagttaacatgacaaatgtctcagtggcaaaaatcccctttttgtaagcccccatagtctagaggcagttttctttttaagaatcatgccagagcctgagtcgagcagtatgctttcttggtttttgagagtaattgtgtaattgtagagggagaaatccaattctaacctaagaactgggattcttctgtcatcttgtaaaccgtatattgaaaaaaacagaatgtcactaaatgcatattaagtcaagtattggaaagtataaaagaaaaatcattctgacaatttctaagccagaagcaaacaagaattactgaaatctaccccatgaatacttggaaggcagtaattgtgagtgacacctcagttcatcaaccccttaataatatcagcttaattttaatgacaactaaatatgctgaagtgaggatttagtattttttaaaaaagcaaaacaaggttcagtagtcctcagcaattctccaagtttctctctttgcctaaaatggtcatagatcttgatttctctgaatcgtgatgaccacacccagtcatcttcacagcataattgcaggtggcagtaaagagagtgtgctgggtaaggagcagttgctgggtcattccttgggccccgacctgcccggggagtagccctgggggagagagggcagtgttgcctatcccagaggtcccagcagtcacactgctctgcaggccgggctctctttatagccagagaaatcaccttaatgcagtctctttagttgtctgctgaagctgtagttattatgggccacttacatgaggctgagaagtacgtgccggagctcacacactgcctgttgcggttctcttaacatcagttatcacagctgcctgtgggtcccgggtatttccattcctgccccttgttggcccgaggaaggatgtggaaagagcacctggtgggatgaaggtccaacagcctgtgcctctccactgctggccctggagccggcagcagtgaggcattcattgtctgtgttgcggtgtattcccagcttcagtgctcttttcctttttgcctgaaatgtttatgcttctctgcagccagtcctctaacaaatctcaagaacaaaggtaagacacttggtttttgtttccaggacccttcagaaggtgacatcagatattccctaaattcagacaatgagggatacagagcgacttggcatgtattatttctcccatgtaaggacaaagggacagattattattgttatttctgagacagagtcttgctctgtagctcaggctggagtgcagtggctcaatctcagctcaccacaacctctgcctcctggcttcaagcgattcttctgcctcagcctccccgaatagttgggattacaggcacccaccaccacgcctggctaatttttgtatttttagtagagatggtttcaccatgctggccaggctggtcttgaactcctgacctcaggtgatcctcccgcctcagccttccaaagtgctgggattacaagcatgagccaccgcacccggcctcacagtgacagattctgagaaacagcatgcaaaacatttgaaccattttctacatctcccattgttgcatagagagtgtgcaccgctgctatcttgccagatccacactggtcctcccgaaagccaggttcatacacagcaactttttaattattctaacagttacccattaacagtcgactcctgtatttctgagagtcttgtactcacctctgaaatttaaaaacgtataaagagagcctgggttaatcagttctgcagcccctacgtgacactgtgctagttctccttcttctgtctcctccttaccctggccctgcacccctgtacttaagagggagaggtgggaggtgctgtctggtatcatttgctgcctcgccagtagagggtgccgctgtgcagggtaactgcccgcctgctcccttcctgacctcccctgaccccgaagatcactacctctgtcattcaggcattggggtacatcctgataagtcgtgtcagaactgccaatttcaggactgagatgtgtttttaaaaaacaaatccttataaactccactttgtactttagattttaaaactggggaaaaatgtgatattctttggaccacttttttaatttatataagccttaatgaacagtgtctatacatttgcatacacacacccccaccccagagtgttctcagtatgtcagagaaagtgccacagcattaggacgggagcttggagaacgttttctagaaaagggttagcttcctgttggcatgaaattttccaagcaaacctcattaaacatctgttgtttgttaaagatgttccactgaaagcaacgcatgtttcaaaggcacgtctttccgttcgttggttttctgtgtgtaaggagtagcattgctgttggcgcctaacctcgcgtgcactgcattctcaaccccgtaccagtgcatcatcagaagccttcctcgtgaccataactctgtgtctgcagatatgtgttcccgtgtaagccagttttccccttttactcagactgatttcacctagattgtcacggtttccttcatgttaactttgcgtgactttgttcttcctttactactctgtatgtaatatatatacatatatacgtacatatgctgtccaaatatatttgtatatatttgtatagcatttttacacctttattgagtaatctggtttcgaaaggaggtgagagtttagtcccttctgcagttttctccaagctgtgtcctgtgaatttcaacccttggagcctaagaaaaccctaggaagatgatgttaatttgctgtcatttcctaattcaggatctatcatcaaatgaaacatgaaaaaaacagtgacttttaaggtgaaaagagtttcaagcattccaaataaattatcaatgtttcataactttttattataaacccacctcctaataggaagccaagtactatttgatacagtggtaaaaaccaaactaccttgaatttttttaaggcaacttatgaataatgctcattttcacagtcagaatagctttaaaatatggttgaatttgatacacacaggaagttttcttgaagaacaatcctttcgcttttcttttttcttgagagatctaaagagaaactgtagattgttttcctgacagcaaaagactaatgtgacaaaatgaagtcattgtaaagaagcgatgcaacttgtcaaatatttaataaagaattatggaagctggaacattttctac

SEQ ID NO: 11379 - protein, 947 aa, Homo sapiens; identical to SEQ ID NO: 11371

SEQ ID NO: 11380 - DNA, 8391 bp, Homo sapiens
agtcacagaggaagccatttccagagaggaacaaccgtgtagactgctttcctgggagtcaagttaaaacttctctcctgtgaccttgtcacccggcagtggaaagttacccttggctgcagccacgacttccgcatactcttcagaacttgctctgcccttgagttttccagctttcctttaatgcactaaacctttaatattgtattctcctaaatgagacgtctcgcatttgagcagggagagtcccgtattctcagagtaaaagttgtttctggaattgatctcgccaaaaaggacatctttggagccagtgatccgtatgtgaaactttcattgtacgtagcggatgagaatagagaacttgctttggtccagacaaaaacaattaaaaagacactgaacccaaaatggaatgaagaattttatttcagggtaaacccatctaatcacagactcctatttgaagtatttgacgaaaatagactgacacgagacgacttcctgggccaggtggacgtgccccttagtcaccttccgacagaagatccaaccatggagcgaccctatacatttaaggactttctcctcagaccaagaagtcataagtctcgagttaagggatttttgcgattgaaaatggcctatatgccaaaaaatggaggtcaagatgaagaaaacagtgaccagagggatgacatggagcatggatgggaagttgttgactcaaatgactcggcttctcagcaccaagaggaacttcctcctcctcctctgcctcccgggtgggaagaaaaagtggacaatttaggccgaacttactatgtcaaccacaacaaccggaccactcagtggcacagaccaagcctgatggacgtgtcctcggagtcggacaataacatcagacagatcaaccaggaggcagcacaccggcgcttccgctcccgcaggcacatcagcgaagacttggagcccgagccctcggagggcggggatgtccccgagccttgggagaccatttcagaggaagtgaatatcgctggagactctctcggtctggctctgcccccaccaccggcctccccaggatctcggaccagccctcaggagctgtcagaggaactaagcagaaggcttcagatcactccagactccaatggggaacagttcagctctttgattcaaagagaaccctcctcaaggttgaggtcatgcagtgtcaccgacgcagttgcagaacagggccatctaccaccgcccagtgccccagctgggagagcgcgttcatcaactgtcacgggtggtgaggaaccaacgccatcagtggcctatgtacataccacgccgggtctgccttcaggctgggaagaaagaaaagatgctaaggggcgcacatactatgtcaatcataacaatcgaaccacaacttggactcgacctatcatgcagcttgcagaagatggtgcgtccggatcagccacaaacagtaacaaccatctaatcgagcctcagatccgccggcctcgtagcctcagctcgccaacagtaactttatctgccccgctggagggtgccaaggactcacccgtacgtcgggctgtgaaagacaccctttccaacccacagtccccacagccatcaccttacaactcccccaaaccacaacacaaagtcacacagagcttcttgccacccggctgggaaatgaggatagcgccaaacggccggcccttcttcattgatcataacacaaagactacaacctgggaagatccacgtttgaaatttccagtacatatgcggtcaaagacatctttaaaccccaatgaccttggcccccttcctcctggctgggaagaaagaattcacttggatggccgaacgttttatattgatcataatagcaaaattactcagtgggaagacccaagactgcagaacccagctattactggtccggctgtcccttactccagagaatttaagcagaaatatgactacttcaggaagaaattaaagaaacctgctgatatccccaataggtttgaaatgaaacttcacagaaataacatatttgaagagtcctatcggagaattatgtccgtgaaaagaccagatgtcctaaaagctagactgtggattgagtttgaatcagagaaaggtcttgactatgggggtgtggccagagaatggttcttcttactgtccaaagagatgttcaacccctactacggcctctttgagtactctgccacggacaactacacccttcagatcaaccctaattcaggcctctgtaatgaggatcatttgtcctacttcacttttattggaagagttgctggtctggccgtatttcatgggaagctcttagatggtttcttcattagaccattttacaagatgatgttgggaaagcagataaccctgaatgacatggaatctgtggatagtgaatattacaactctttgaaatggatcctggagaatgaccctactgagctggacctcatgttctgcatagacgaagaaaactttggacagacatatcaagtggatttgaagcccaatgggtcagaaataatggtcacaaatgaaaacaaaagggaatatatcgacttagtcatccagtggagatttgtgaacagggtccagaagcagatgaacgccttcttggagggattcacagaactacttcctattgatttgattaaaatttttgatgaaaatgagctggagttgctcatgtgcggcctcggtgatgtggatgtgaatgactggagacagcattctatttacaagaacggctactgcccaaaccaccccgtcattcagtggttctggaaggctgtgctactcatggacgccgaaaagcgtatccggttactgcagtttgtcacagggacatcgcgagtacctatgaatggatttgccgaactttatggttccaatggtcctcagctgtttacaatagagcaatggggcagtcctgagaaactgcccagagctcacacatgctttaatcgccttgacttacctccatatgaaacctttgaagatttacgagagaaacttctcatggccgtggaaaatgctcaaggatttgaaggggtggattaagcaccctgtgcctcgggggtggttgttcttcaagcaagttctgcttgcacttttgcatttgcctaacagacttttgcagaggcgatggcagagagcagctgcaggcatggtccctggagccgagccttcaccacgcactcgtccaagttcggatgcgggaacctggtcccagcttgagttcctgcctttcccaccacaaattatcaactggttgatgtgtacactaattacatttcaggaggacttaatgctatttatgttgtgcctctgcaggcaaagcccttaataaatattttacatcctttctaatgacaatgaatggaattaatcactcaacaggtatagtattacgactcatgtttactttttaaaatgatttagaccgattttcagattttatttcgttatgattaaagatgtctcatgtacttggaaaagtgagcattttttttttttttgtatttcactttcataccaggcttaatgtcaatgacatttttatttttgaagtactctgacacctccaccctctactttattagaattggaaggcaaatttttgtccaaaaacctacagacaagtactttgagagaatttccaatataatattagacataatgataattttttccatactcagaatgaaaaactggatattacgtttttgttttggggtttttttgtacaaatttagctaatagctacaggctgagagaattgtaacatagcatgacaaattttgtgttgacttgaaaggaatcacaccattattccttagaagtaattacatgtgttctaacacatttgagacagggttggactcccatttctcatccgagaaattacttaacccttcctggcgctgtacagtcatcttttattctatttcctctttgctgtttgtagtagagacattttgaatgaaacttggcactgcttgattcaaaactgtggaaaccagatctgtttagtctcctgtttgtatgcgtttgctaatggtagctaaataaccagtttttgttgtaaatgcaccaattctgaaggcactttatgtactacatggaggtcatatctggttttgtttttatttttttatcatgaacattaaatgtgatgatgatttcttttccctgcacacatctttccggtgcaatatctatcaattgtgaatctggctgctggtgtataaaaacctggatgtaaagctgagcctacagacctgtcctcaccaactgttttgtgatttctactcaactacaaagatttatttaatgtactcttaatctaactgagttttgttaccaatgacctgttgcatgcttcaataccgtgtactgcctgagttgtgcctcttgtgtgctagattaaaagtgagacagagacttgacttgatcctctgagctcaagctattgagctggtagtggcagaggactgagggtacctgcacagtttgattcttttccacgtgtaagtctccattgcagaattgtcgtgctttgagaaaacacctgaggcagtgtgggagttgaacgaccctgctgtcctttttaacctgtgttgtcctagaccctgtcggggcagtcaggggacactagagatttgatctcatgcgagtcatcaataggacaaaaaagttgtggtttggggaggtctgtttgttacataaaaaggacctttcggtgtaagaaattgccgtttttaccctgccctggctggcatgtgagaagccatggaaggttgtggttgtaaatgagttgtctaaaggggtgcagaggcctgaggtttctaaaagaaggtagatttctacagagctgagtgttggttcctttttcttattggttgaaaattacctggtagtgatcagaaaacttagatgctatgtaactaaaaaaaaaaaaaaaaaaaaaaaaaaaaaaaaaaaaattcccgctcatgagttttgactattggtgagatgttttccgctacagttaacatgacaaatgtctcagtggcaaaaatcccctttttgtaagcccccatagtctagaggcagttttctttttaagaatcatgccagagcctgagtcgagcagtatgctttcttggtttttgagagtaattgtgtaattgtagagggagaaatccaattctaacctaagaactgggattcttctgtcatcttgtaaaccgtatattgaaaaaaacagaatgtcactaaatgcatattaagtcaagtattggaaagtataaaagaaaaatcattctgacaatttctaagccagaagcaaacaagaattactgaaatctaccccatgaatacttggaaggcagtaattgtgagtgacacctcagttcatcaaccccttaataatatcagcttaattttaatgacaactaaatatgctgaagtgaggatttagtattttttaaaaaagcaaaacaaggttcagtagtcctcagcaattctccaagtttctctctttgcctaaaatggtcatagatcttgatttctctgaatcgtgatgaccacacccagtcatcttcacagcataattgcaggtggcagtaaagagagtgtgctgggtaaggagcagttgctgggtcattccttgggccccgacctgcccggggagtagccctgggggagagagggcagtgttgcctatcccagaggtcccagcagtcacactgctctgcaggccgggctctctttatagccagagaaatcaccttaatgcagtctctttagttgtctgctgaagctgtagttattatgggccacttacatgaggctgagaagtacgtgccggagctcacacactgcctgttgcggttctcttaacatcagttatcacagctgcctgtgggtcccgggtatttccattcctgccccttgttggcccgaggaaggatgtggaaagagcacctggtgggatgaaggtccaacagcctgtgcctctccactgctggccctggagccggcagcagtgaggcattcattgtctgtgttgcggtgtattcccagcttcagtgctcttttcctttttgcctgaaatgtttatgcttctctgcagccagtcctctaacaaatctcaagaacaaaggtaagacacttggtttttgtttccaggacccttcagaaggtgacatcagatattccctaaattcagacaatgagggatacagagcgacttggcatgtattatttctcccatgtaaggacaaagggacagattattattgttatttctgagacagagtcttgctctgtagctcaggctggagtgcagtggctcaatctcagctcaccacaacctctgcctcctggcttcaagcgattcttctgcctcagcctccccgaatagttgggattacaggcacccaccaccacgcctggctaatttttgtatttttagtagagatggtttcaccatgctggccaggctggtcttgaactcctgacctcaggtgatcctcccgcctcagccttccaaagtgctgggattacaagcatgagccaccgcacccggcctcacagtgacagattctgagaaacagcatgcaaaacatttgaaccattttctacatctcccattgttgcatagagagtgtgcaccgctgctatcttgccagatccacactggtcctcccgaaagccaggttcatacacagcaactttttaattattctaacagttacccattaacagtcgactcctgtatttctgagagtcttgtactcacctctgaaatttaaaaacgtataaagagagcctgggttaatcagttctgcagcccctacgtgacactgtgctagttctccttcttctgtctcctccttaccctggccctgcacccctgtacttaagagggagaggtgggaggtgctgtctggtatcatttgctgcctcgccagtagagggtgccgctgtgcagggtaactgcccgcctgctcccttcctgacctcccctgaccccgaagatcactacctctgtcattcaggcattggggtacatcctgataagtcgtgtcagaactgccaatttcaggactgagatgtgtttttaaaaaacaaatccttataaactccactttgtactttagattttaaaactggggaaaaatgtgatattctttggaccacttttttaatttatataagccttaatgaacagtgtctatacatttgcatacacacacccccaccccagagtgttctcagtatgtcagagaaagtgccacagcattaggacgggagcttggagaacgttttctagaaaagggttagcttcctgttggcatgaaattttccaagcaaacctcattaaacatctgttgtttgttaaagatgttccactgaaagcaacgcatgtttcaaaggcacgtctttccgttcgttggttttctgtgtgtaaggagtagcattgctgttggcgcctaacctcgcgtgcactgcattctcaaccccgtaccagtgcatcatcagaagccttcctcgtgaccataactctgtgtctgcagatatgtgttcccgtgtaagccagttttccccttttactcagactgatttcacctagattgtcacggtttccttcatgttaactttgcgtgactttgttcttcctttactactctgtatgtaatatatatacatatatacgtacatatgctgtccaaatatatttgtatatatttgtatagcatttttacacctttattgagtaatctggtttcgaaaggaggtgagagtttagtcccttctgcagttttctccaagctgtgtcctgtgaatttcaacccttggagcctaagaaaaccctaggaagatgatgttaatttgctgtcatttcctaattcaggatctatcatcaaatgaaacatgaaaaaaacagtgacttttaaggtgaaaagagtttcaagcattccaaataaattatcaatgtttcataactttttattataaacccacctcctaataggaagccaagtactatttgatacagtggtaaaaaccaaactaccttgaatttttttaaggcaacttatgaataatgctcattttcacagtcagaatagctttaaaatatggttgaatttgatacacacaggaagttttcttgaagaacaatcctttcgcttttcttttttcttgagagatctaaagagaaactgtagattgttttcctgacagcaaaagactaatgtgacaaaatgaagtcattgtaaagaagcgatgcaacttgtcaaatatttaataaagaattatggaagctggaacattttctac

SEQ ID NO: 11381 - protein, 967 aa, Homo sapiens; identical to SEQ ID NO: 11373

SEQ ID NO: 11382 - DNA, 8301 bp, Homo sapiens
agcagcttccaacccagacaggcttaagccgcgcgagggtgcccgggtgggtggctgcgcagggccctacctgggcgggagcggctgcagagccctgtccacgcggtgcctccccagcacggcacctcccactccaggctgttggttacctggccgggagctggcggagaccaggatttctcctcgccgccgttgctgttgttaggggaaacagaccatctgcatctagacctgcctctctctccgctccccacttcagacgagctcttcctgcctggaatctgtgatccgtatgtgaaactttcattgtacgtagcggatgagaatagagaacttgctttggtccagacaaaaacaattaaaaagacactgaacccaaaatggaatgaagaattttatttcagggtaaacccatctaatcacagactcctatttgaagtatttgacgaaaatagactgacacgagacgacttcctgggccaggtggacgtgccccttagtcaccttccgacagaagatccaaccatggagcgaccctatacatttaaggactttctcctcagaccaagaagtcataagtctcgagttaagggatttttgcgattgaaaatggcctatatgccaaaaaatggaggtcaagatgaagaaaacagtgaccagagggatgacatggagcatggatgggaagttgttgactcaaatgactcggcttctcagcaccaagaggaacttcctcctcctcctctgcctcccgggtgggaagaaaaagtggacaatttaggccgaacttactatgtcaaccacaacaaccggaccactcagtggcacagaccaagcctgatggacgtgtcctcggagtcggacaataacatcagacagatcaaccaggaggcagcacaccggcgcttccgctcccgcaggcacatcagcgaagacttggagcccgagccctcggagggcggggatgtccccgagccttgggagaccatttcagaggaagtgaatatcgctggagactctctcggtctggctctgcccccaccaccggcctccccaggatctcggaccagccctcaggagctgtcagaggaactaagcagaaggcttcagatcactccagactccaatggggaacagttcagctctttgattcaaagagaaccctcctcaaggttgaggtcatgcagtgtcaccgacgcagttgcagaacagggccatctaccaccgccatcagtggcctatgtacataccacgccgggtctgccttcaggctgggaagaaagaaaagatgctaaggggcgcacatactatgtcaatcataacaatcgaaccacaacttggactcgacctatcatgcagcttgcagaagatggtgcgtccggatcagccacaaacagtaacaaccatctaatcgagcctcagatccgccggcctcgtagcctcagctcgccaacagtaactttatctgccccgctggagggtgccaaggactcacccgtacgtcgggctgtgaaagacaccctttccaacccacagtccccacagccatcaccttacaactcccccaaaccacaacacaaagtcacacagagcttcttgccacccggctgggaaatgaggatagcgccaaacggccggcccttcttcattgatcataacacaaagactacaacctgggaagatccacgtttgaaatttccagtacatatgcggtcaaagacatctttaaaccccaatgaccttggcccccttcctcctggctgggaagaaagaattcacttggatggccgaacgttttatattgatcataatagcaaaattactcagtgggaagacccaagactgcagaacccagctattactggtccggctgtcccttactccagagaatttaagcagaaatatgactacttcaggaagaaattaaagaaacctgctgatatccccaataggtttgaaatgaaacttcacagaaataacatatttgaagagtcctatcggagaattatgtccgtgaaaagaccagatgtcctaaaagctagactgtggattgagtttgaatcagagaaaggtcttgactatgggggtgtggccagagaatggttcttcttactgtccaaagagatgttcaacccctactacggcctctttgagtactctgccacggacaactacacccttcagatcaaccctaattcaggcctctgtaatgaggatcatttgtcctacttcacttttattggaagagttgctggtctggccgtatttcatgggaagctcttagatggtttcttcattagaccattttacaagatgatgttgggaaagcagataaccctgaatgacatggaatctgtggatagtgaatattacaactctttgaaatggatcctggagaatgaccctactgagctggacctcatgttctgcatagacgaagaaaactttggacagacatatcaagtggatttgaagcccaatgggtcagaaataatggtcacaaatgaaaacaaaagggaatatatcgacttagtcatccagtggagatttgtgaacagggtccagaagcagatgaacgccttcttggagggattcacagaactacttcctattgatttgattaaaatttttgatgaaaatgagctggagttgctcatgtgcggcctcggtgatgtggatgtgaatgactggagacagcattctatttacaagaacggctactgcccaaaccaccccgtcattcagtggttctggaaggctgtgctactcatggacgccgaaaagcgtatccggttactgcagtttgtcacagggacatcgcgagtacctatgaatggatttgccgaactttatggttccaatggtcctcagctgtttacaatagagcaatggggcagtcctgagaaactgcccagagctcacacatgctttaatcgccttgacttacctccatatgaaacctttgaagatttacgagagaaacttctcatggccgtggaaaatgctcaaggatttgaaggggtggattaagcaccctgtgcctcgggggtggttgttcttcaagcaagttctgcttgcacttttgcatttgcctaacagacttttgcagaggcgatggcagagagcagctgcaggcatggtccctggagccgagccttcaccacgcactcgtccaagttcggatgcgggaacctggtcccagcttgagttcctgcctttcccaccacaaattatcaactggttgatgtgtacactaattacatttcaggaggacttaatgctatttatgttgtgcctctgcaggcaaagcccttaataaatattttacatcctttctaatgacaatgaatggaattaatcactcaacaggtatagtattacgactcatgtttactttttaaaatgatttagaccgattttcagattttatttcgttatgattaaagatgtctcatgtacttggaaaagtgagcattttttttttttttgtatttcactttcataccaggcttaatgtcaatgacatttttatttttgaagtactctgacacctccaccctctactttattagaattggaaggcaaatttttgtccaaaaacctacagacaagtactttgagagaatttccaatataatattagacataatgataattttttccatactcagaatgaaaaactggatattacgtttttgttttggggtttttttgtacaaatttagctaatagctacaggctgagagaattgtaacatagcatgacaaattttgtgttgacttgaaaggaatcacaccattattccttagaagtaattacatgtgttctaacacatttgagacagggttggactcccatttctcatccgagaaattacttaacccttcctggcgctgtacagtcatcttttattctatttcctctttgctgtttgtagtagagacattttgaatgaaacttggcactgcttgattcaaaactgtggaaaccagatctgtttagtctcctgtttgtatgcgtttgctaatggtagctaaataaccagtttttgttgtaaatgcaccaattctgaaggcactttatgtactacatggaggtcatatctggttttgtttttatttttttatcatgaacattaaatgtgatgatgatttcttttccctgcacacatctttccggtgcaatatctatcaattgtgaatctggctgctggtgtataaaaacctggatgtaaagctgagcctacagacctgtcctcaccaactgttttgtgatttctactcaactacaaagatttatttaatgtactcttaatctaactgagttttgttaccaatgacctgttgcatgcttcaataccgtgtactgcctgagttgtgcctcttgtgtgctagattaaaagtgagacagagacttgacttgatcctctgagctcaagctattgagctggtagtggcagaggactgagggtacctgcacagtttgattcttttccacgtgtaagtctccattgcagaattgtcgtgctttgagaaaacacctgaggcagtgtgggagttgaacgaccctgctgtcctttttaacctgtgttgtcctagaccctgtcggggcagtcaggggacactagagatttgatctcatgcgagtcatcaataggacaaaaaagttgtggtttggggaggtctgtttgttacataaaaaggacctttcggtgtaagaaattgccgtttttaccctgccctggctggcatgtgagaagccatggaaggttgtggttgtaaatgagttgtctaaaggggtgcagaggcctgaggtttctaaaagaaggtagatttctacagagctgagtgttggttcctttttcttattggttgaaaattacctggtagtgatcagaaaacttagatgctatgtaactaaaaaaaaaaaaaaaaaaaaaaaaaaaaaaaaaaaaattcccgctcatgagttttgactattggtgagatgttttccgctacagttaacatgacaaatgtctcagtggcaaaaatcccctttttgtaagcccccatagtctagaggcagttttctttttaagaatcatgccagagcctgagtcgagcagtatgctttcttggtttttgagagtaattgtgtaattgtagagggagaaatccaattctaacctaagaactgggattcttctgtcatcttgtaaaccgtatattgaaaaaaacagaatgtcactaaatgcatattaagtcaagtattggaaagtataaaagaaaaatcattctgacaatttctaagccagaagcaaacaagaattactgaaatctaccccatgaatacttggaaggcagtaattgtgagtgacacctcagttcatcaaccccttaataatatcagcttaattttaatgacaactaaatatgctgaagtgaggatttagtattttttaaaaaagcaaaacaaggttcagtagtcctcagcaattctccaagtttctctctttgcctaaaatggtcatagatcttgatttctctgaatcgtgatgaccacacccagtcatcttcacagcataattgcaggtggcagtaaagagagtgtgctgggtaaggagcagttgctgggtcattccttgggccccgacctgcccggggagtagccctgggggagagagggcagtgttgcctatcccagaggtcccagcagtcacactgctctgcaggccgggctctctttatagccagagaaatcaccttaatgcagtctctttagttgtctgctgaagctgtagttattatgggccacttacatgaggctgagaagtacgtgccggagctcacacactgcctgttgcggttctcttaacatcagttatcacagctgcctgtgggtcccgggtatttccattcctgccccttgttggcccgaggaaggatgtggaaagagcacctggtgggatgaaggtccaacagcctgtgcctctccactgctggccctggagccggcagcagtgaggcattcattgtctgtgttgcggtgtattcccagcttcagtgctcttttcctttttgcctgaaatgtttatgcttctctgcagccagtcctctaacaaatctcaagaacaaaggtaagacacttggtttttgtttccaggacccttcagaaggtgacatcagatattccctaaattcagacaatgagggatacagagcgacttggcatgtattatttctcccatgtaaggacaaagggacagattattattgttatttctgagacagagtcttgctctgtagctcaggctggagtgcagtggctcaatctcagctcaccacaacctctgcctcctggcttcaagcgattcttctgcctcagcctccccgaatagttgggattacaggcacccaccaccacgcctggctaatttttgtatttttagtagagatggtttcaccatgctggccaggctggtcttgaactcctgacctcaggtgatcctcccgcctcagccttccaaagtgctgggattacaagcatgagccaccgcacccggcctcacagtgacagattctgagaaacagcatgcaaaacatttgaaccattttctacatctcccattgttgcatagagagtgtgcaccgctgctatcttgccagatccacactggtcctcccgaaagccaggttcatacacagcaactttttaattattctaacagttacccattaacagtcgactcctgtatttctgagagtcttgtactcacctctgaaatttaaaaacgtataaagagagcctgggttaatcagttctgcagcccctacgtgacactgtgctagttctccttcttctgtctcctccttaccctggccctgcacccctgtacttaagagggagaggtgggaggtgctgtctggtatcatttgctgcctcgccagtagagggtgccgctgtgcagggtaactgcccgcctgctcccttcctgacctcccctgaccccgaagatcactacctctgtcattcaggcattggggtacatcctgataagtcgtgtcagaactgccaatttcaggactgagatgtgtttttaaaaaacaaatccttataaactccactttgtactttagattttaaaactggggaaaaatgtgatattctttggaccacttttttaatttatataagccttaatgaacagtgtctatacatttgcatacacacacccccaccccagagtgttctcagtatgtcagagaaagtgccacagcattaggacgggagcttggagaacgttttctagaaaagggttagcttcctgttggcatgaaattttccaagcaaacctcattaaacatctgttgtttgttaaagatgttccactgaaagcaacgcatgtttcaaaggcacgtctttccgttcgttggttttctgtgtgtaaggagtagcattgctgttggcgcctaacctcgcgtgcactgcattctcaaccccgtaccagtgcatcatcagaagccttcctcgtgaccataactctgtgtctgcagatatgtgttcccgtgtaagccagttttccccttttactcagactgatttcacctagattgtcacggtttccttcatgttaactttgcgtgactttgttcttcctttactactctgtatgtaatatatatacatatatacgtacatatgctgtccaaatatatttgtatatatttgtatagcatttttacacctttattgagtaatctggtttcgaaaggaggtgagagtttagtcccttctgcagttttctccaagctgtgtcctgtgaatttcaacccttggagcctaagaaaaccctaggaagatgatgttaatttgctgtcatttcctaattcaggatctatcatcaaatgaaacatgaaaaaaacagtgacttttaaggtgaaaagagtttcaagcattccaaataaattatcaatgtttcataactttttattataaacccacctcctaataggaagccaagtactatttgatacagtggtaaaaaccaaactaccttgaatttttttaaggcaacttatgaataatgctcattttcacagtcagaatagctttaaaatatggttgaatttgatacacacaggaagttttcttgaagaacaatcctttcgcttttcttttttcttgagagatctaaagagaaactgtagattgttttcctgacagcaaaagactaatgtgacaaaatgaagtcattgtaaagaagcgatgcaacttgtcaaatatttaataaagaattatggaagctggaacattttctac

SEQ ID NO: 11383 - protein, 834 aa, Homo sapiens
MERPYTFKDFLLRPRSHKSRVKGFLRLKMAYMPKNGGQDEENSDQRDDMEHGWEVVDSNDSASQHQEELPPPPLPPGWEEKVDNLGRTYYVNHNNRTTQWHRPSLMDVSSESDNNIRQINQEAAHRRFRSRRHISEDLEPEPSEGGDVPEPWETISEEVNIAGDSLGLALPPPPASPGSRTSPQELSEELSRRLQITPDSNGEQFSSLIQREPSSRLRSCSVTDAVAEQGHLPPPSVAYVHTTPGLPSGWEERKDAKGRTYYVNHNNRTTTWTRPIMQLAEDGASGSATNSNNHLIEPQIRRPRSLSSPTVTLSAPLEGAKDSPVRRAVKDTLSNPQSPQPSPYNSPKPQHKVTQSFLPPGWEMRIAPNGRPFFIDHNTKTTTWEDPRLKFPVHMRSKTSLNPNDLGPLPPGWEERIHLDGRTFYIDHNSKITQWEDPRLQNPAITGPAVPYSREFKQKYDYFRKKLKKPADIPNRFEMKLHRNNIFEESYRRIMSVKRPDVLKARLWIEFESEKGLDYGGVAREWFFLLSKEMFNPYYGLFEYSATDNYTLQINPNSGLCNEDHLSYFTFIGRVAGLAVFHGKLLDGFFIRPFYKMMLGKQITLNDMESVDSEYYNSLKWILENDPTELDLMFCIDEENFGQTYQVDLKPNGSEIMVTNENKREYIDLVIQWRFVNRVQKQMNAFLEGFTELLPIDLIKIFDENELELLMCGLGDVDVNDWRQHSIYKNGYCPNHPVIQWFWKAVLLMDAEKRIRLLQFVTGTSRVPMNGFAELYGSNGPQLFTIEQWGSPEKLPRAHTCFNRLDLPPYETFEDLREKLLMAVENAQGFEGVD

SEQ ID NO: 11384 - DNA, 3342 bp, Homo sapiens
atcagtataagtagcgagctgggcgcattccttctcagttgtgttaaaacttgctggtattcccccggtatcagcagaggtgtgtacgggcactgctttaaaactgggaaggaggaagacgaggccagggagccggagggtcaccaaggtagatttccagcagcgctagtccagctgaacactttccagccttgtttttcagcagctttgaggaaaagtatagtgatccgtatgtgaaactttcattgtacgtagcggatgagaatagagaacttgctttggtccagacaaaaacaattaaaaagacactgaacccaaaatggaatgaagaattttatttcagggtaaacccatctaatcacagactcctatttgaagtatttgacgaaaatagactgacacgagacgacttcctgggccaggtggacgtgccccttagtcaccttccgacagaagatccaaccatggagcgaccctatacatttaaggactttctcctcagaccaagaagtcataagtctcgagttaagggatttttgcgattgaaaatggcctatatgccaaaaaatggaggtcaagatgaagaaaacagtgaccagagggatgacatggagcatggatgggaagttgttgactcaaatgactcggcttctcagcaccaagaggaacttcctcctcctcctctgcctcccgggtgggaagaaaaagtggacaatttaggccgaacttactatgtcaaccacaacaaccggaccactcagtggcacagaccaagcctgatggacgtgtcctcggagtcggacaataacatcagacagatcaaccaggaggcagcacaccggcgcttccgctcccgcaggcacatcagcgaagacttggagcccgagccctcggagggcggggatgtccccgagccttgggagaccatttcagaggaagtgaatatcgctggagactctctcggtctggctctgcccccaccaccggcctccccaggatctcggaccagccctcaggagctgtcagaggaactaagcagaaggcttcagatcactccagactccaatggggaacagttcagctctttgattcaaagagaaccctcctcaaggttgaggtcatgcagtgtcaccgacgcagttgcagaacagggccatctaccaccgcccagtgccccagctgggagagcgcgttcatcaactgtcacgggtggtgaggaaccaacgccatcagtggcctatgtacataccacgccgggtctgccttcaggctgggaagaaagaaaagatgctaaggggcgcacatactatgtcaatcataacaatcgaaccacaacttggactcgacctatcatgcagcttgcagaagatggtgcgtccggatcagccacaaacagtaacaaccatctaatcgagcctcagatccgccggcctcgtagcctcagctcgccaacagtaactttatctgccccgctggagggtgccaaggactcacccgtacgtcgggctgtgaaagacaccctttccaacccacagtccccacagccatcaccttacaactcccccaaaccacaacacaaagtcacacagagcttcttgccacccggctgggaaatgaggatagcgccaaacggccggcccttcttcattgatcataacacaaagactacaacctgggaagatccacgtttgaaatttccagtacatatgcggtcaaagacatctttaaaccccaatgaccttggcccccttcctcctggctgggaagaaagaattcacttggatggccgaacgttttatattgatcataatagcaaaattactcagtgggaagacccaagactgcagaacccagctattactggtccggctgtcccttactccagagaatttaagcagaaatatgactacttcaggaagaaattaaagaaacctgctgatatccccaataggtttgaaatgaaacttcacagaaataacatatttgaagagtcctatcggagaattatgtccgtgaaaagaccagatgtcctaaaagctagactgtggattgagtttgaatcagagaaaggtcttgactatgggggtgtggccagagaatggttcttcttactgtccaaagagatgttcaacccctactacggcctctttgagtactctgccacggacaactacacccttcagatcaaccctaattcaggcctctgtaatgaggatcatttgtcctacttcacttttattggaagagttgctggtctggccgtatttcatgggaagctcttagatggtttcttcattagaccattttacaagatgatgttgggaaagcagataaccctgaatgacatggaatctgtggatagtgaatattacaactctttgaaatggatcctggagaatgaccctactgagctggacctcatgttctgcatagacgaagaaaactttggacagacatatcaagtggatttgaagcccaatgggtcagaaataatggtcacaaatgaaaacaaaagggaatatatcgacttagtcatccagtggagatttgtgaacagggtccagaagcagatgaacgccttcttggagggattcacagaactacttcctattgatttgattaaaatttttgatgaaaatgagctggagttgctcatgtgcggcctcggtgatgtggatgtgaatgactggagacagcattctatttacaagaacggctactgcccaaaccaccccgtcattcagtggttctggaaggctgtgctactcatggacgccgaaaagcgtatccggttactgcagtttgtcacagggacatcgcgagtacctatgaatggatttgccgaactttatggttccaatggtcctcagctgtttacaatagagcaatggggcagtcctgagaaactgcccagagctcacacatgctttaatcgccttgacttacctccatatgaaacctttgaagatttacgagagaaacttctcatggccgtggaaaatgctcaaggatttgaaggggtggattaagcaccctgtgcctcgggggtggttgttcttcaagcaagttctgcttgcacttttgcatttgcctaacagacttttgcagaggcgatggcagagagcagctgcaggcatggtccctggagccgagccttcaccacgcactcgtccaagttcggatgcgggaacctggtcccagcttgagttcctgcctttcccaccacaaattatcaactggttgatgtgtacactaattacatttcaggaggacttaatgctatttatgttgtgcctctgcaggcaaagcccttaataaatattttacatcctttctaatgac

SEQ ID NO: 11385 - protein, 854 aa, Homo sapiens; identical to SEQ ID NO: 11363

SEQ ID NO: 11386 - DNA, 3707 bp, Homo sapiens
tcttccccctccctcttctccccggtggagaatcagctcctcctcctcccggtcgtgagaccctggtgcaaaatgcaaacaaccgcccgctttccccaccctgcgcgcttctcccagaggagggagagggaagaggcgagggcgcagccccaagccgagtccagcaagtctgtcaatcggacgtgaacgtcccgacgagacaacttgaacctcagggccctcgcgccagccggacaccgcaggtaccccctttacctgcttctctgctgggtttgcatccgataccccaactcctagcctcattttccccccagccccataatattccggacccctgctccccgtgcaggtggtgcaaacgcccctgctctccggcgccccctgccgggaagagggaaggcggcggcggccgcggaggagcaggacgcttggtccggacggagctcggcgctgggaagaagccgggagcttccctgatggtgccgccgcctccgagccggggaggagctgccaggggccagctgggcaggagcctgggtccgctgctgctgctcctggcgttgggacacacgtggacctacagagaggagccggaggacggcgacagagaaatctgctcagagagcaaaatcgcgacgactaaatacccgtgtctgaagtcttcaggcgagctcaccacatgctacaggaaaaagtgctgcaaaggatataaatttgttcttggacaatgcatcccagaagattacgacgtttgtgccgaggctccctgtgaacagcagtgcacggacaactttggccgagtgctgtgtacttgttatccgggataccgatatgaccgggagagacaccggaagcgggagaagccatactgtctggatattgatgagtgtgccagcagcaatgggacgctgtgtgcccacatctgcatcaataccttgggcagctaccgctgcgagtgccgggaaggctacatccgggaagatgatgggaagacatgtaccaggggagacaaatatcccaatgacactggccatgagaagtctgagaacatggtgaaagccggaacttgctgtgccacatgcaaggagttctaccagatgaagcagaccgtgctgcagctgaagcaaaagattgctctgctccccaacaatgcagctgacctgggcaagtatatcactggtgacaaggtgctggcctcaaacacctaccttccaggacctcctggcctgcctgggggccagggccctcccggctcaccaggaccaaagggaagcccaggcttccccggtatgccaggccctcctgggcagcccggcccacggggctcaatgggacccatgggaccatctcctgatctgtcccacattaagcaaggccggaggggccctgtgggtccaccaggggcaccaggaagagatggttctaagggggagagaggagcgcctgggcccagagggtctccaggaccccctggttctttcgacttcctgctacttatgctggctgacatccgcaatgacatcactgagctgcaggaaaaggtgttcgggcaccggactcactcttcagcagaggagttccctttacctcaggaatttcccagctacccagaagccatggacctgggctctggagatgaccatccaagaagaactgagacaagagacttgagagcccccagagacttctacccatagcacatcccaacaccgtcacgccaaaggaagagaaagatcaactcacctgcagttaaaccatctaaagagaagaaagaccactggagacctagaaaacatacatttttctcttctcttctcctgacgtctctccactcctcttcttccaaatacgatgctattttcagagtcccctcctaggcctgcagacatgagggagtgaatgattgatttacctgcttctcactaagagtccattggggtggtttgcattgtaacttttcttttacatcctatttttccaggaactttggatttaagtactctcacagtgtcttaaatcataaattcttgaagttaaatttggcagagtatcaaaagggggaaaatgacaaagtgagctctaagaaaatgtgaggctacttctaagatgtgtgttcacaatagaccataactcctctagtatcaaaattggggctcttcagttaaaaaggggtggggaggacaaacgtgtcgatgtgctttggtggagaattttttccttgtgcttctagtagactttaaatattgtatccctttgtcaaaccttgtttcccaaattcaattaaagagaggagagaattgaatggcgtttagagaagatagaaaagaatcacagtcatatatttactgttatatagattgccacattctaaaattcaaatacggtgcttaaggtttcatgccatgcttatctgtaagtatcctatttagggaagaagattaaactctcttttcaaaaaaacaaagtgaaatgcctggattcacattaaaacaatgggctctcgtttgctataatattttaaagctgtttaatcaacagtggagtctgctctataaatatagattatttgttcaataaactggctgagcttagagagaggtgcagaattcctggttctgagcaggtgcccagaaggtaccattaggtgccatgatccaggctgaaccaatatacagtggggctgaagtctgcaaggaggttgctggcttgggctgacctcactaatgccatcagcagcggtaggtaaattttttctccttgggtattacaagtttttgtctggagccaaccaagcttgccaccaacatattgagagtaatacactattgaaagttatcttggatggggagaaaaaaaaatagtggttttccttgtttgcaaaaacttccttcctattctcattttttcttaattttctttaatttagtccaagttccagttcttttaggccttctctttgatttattttcccctgcatgtgagaagcagttcagaaaaaggtctatatctccacctcctagtgagttagagtgttttctcagagcacctctgggtggcaaagggaagcatgttcctgccaaggtttgctgtggattcagaagcaccaggagcaagagaccagaaggatgatctgctcctttgtaacgttgttgagggccctcttgtttccaatgagcagcttataggttactcacagtccactttctcactggacacacaaagtggctctttatctacctttgcgggagattttcactctcctgcaaatgatcgttctcacactcatattagctcatgttggaatttcccatcctgccatgtcctttcccatttctttttggcttttttgcctccaccttttagcccacatcatttaactccactactgtgaaagcttgcttaaagaaaatccctcttggccgggtgtggtagcccacgcctctaatcccagcactttgggaggctgaggcggggagatcacaaggtcaggagatcgagaccagcctgaccaacatggtgaaaccctgtctctactaaaaatacaaaaattagctgggcgtgttggcacacacctgtaatcccagctactcaggaggctgaggcaggagaattactttaacctgcggggggagcctagattgcgctactgcactccagcctaggcaacagagggagactctgtctcattaaaaaaaaaaaaaaaaaaa

SEQ ID NO: 11387 - protein, 406 aa, Homo sapiens; identical to SEQ ID NO: 1873

SEQ ID NO: 11388 - DNA, 382 bp, Homo sapiens
cgatccaaccaaccctcaaagattcgcaccgcgcggcacgcacccagcaggttccagcgtaaaagctgctccggtcccaagcgcgtctccaaacccctcctttacagcgccgcctccccagccagccccggtgcgcagtggcgaacagcccgcagagcccccaggcttacctgtagcatgtggtgagctcgcctgaagacttcagacacgggtccacgtgtgtcccaacgccaggagcagcagcagcggacccaggctcctgcccagctggcccctggcagctcctccccggctcggaggcggcggcaccatcagggaagctcccggcttcttcccagcgccgagctccgtccggaccaagcgtcctgctcctccgcggccg

SEQ ID NO: 11389 - protein, 67 aa, Homo sapiens
HVVSSPEDFRHGSTCVPTPGAAAADPGSCPAGPWQLLPGSEAAAPSGKLPASSQRRAPSGPSVLLLR

SEQ ID NO: 11390 - DNA, 348 bp, Homo sapiens
atgacaaagaaaagagggaacaatggtcgtgctaaaaagggccgtggccacatgcagcctattcgctgcaggaactgtgcccgatgcatacccaaggacaaggccattaagaaattcatcattcacaacatagtggaggccgcagcagtcagggacatttctgaagcaagcgtcttcgatgcctatgtgcttcccaagctgtatgtgaagctacattactttttgagttgtgcagttcacagcaaagtagtcaggaatcaatcttgtgtagcccgcaaggaccaaacacccccaccccgattgagacctgcgggtgctgctctacaacccccaccaaagcccatgtaa

SEQ ID NO: 11391 - protein, 115 aa, Homo sapiens
MTKKRGNNGRAKKGRGHMQPIRCRNCARCIPKDKAIKKFIIHNIVEAAAVRDISEASVFDAYVLPKLYVKLHYFLSCAVHSKVVRNQSCVARKDQTPPPRLRPAGAALQPPPKPM

SEQ ID NO: 11392 - DNA, 501 bp, Homo sapiens
atggtgacagaccccaaccaaggtttcttcctccgaggccaattacagcaacagaggctgatggtcaaaggctacactctaccaaagctccttggactccctgatctctacatgaatgccaaaggagagacagcatccaactttgagtggctgaagaatctaaatcatgtcagctatggctgtttgaccttcaaatatgaaagggagtgtaactaccacttgctaatatctgttcaagagaatttagcaagaaaatttggaaagcacagtggaactattctcattatacccacagcagagttccaagacaggatatcaggtgcatcagagaaagacaccatgcatgctgacttggtgtacgcaatggagagttctgccaggcaaattttgtgcatagccatgaggtataacctgggattggacatgaggaccaccgtctatgtcaacgccattgagaaagtgttcaaagtatacaatgaagccagagtgaccttcacgtag

SEQ ID NO: 11393 - protein, 166 aa, Homo sapiens
MVTDPNQGFFLRGQLQQQRLMVKGYTLPKLLGLPDLYMNAKGETASNFEWLKNLNHVSYGCLTFKYERECNYHLLISVQENLARKFGKHSGTILIIPTAEFQDRISGASEKDTMHADLVYAMESSARQILCIAMRYNLGLDMRTTVYVNAIEKVFKVYNEARVTFT

SEQ ID NO: 11394 - DNA, 1518 bp, Homo sapiens
atggcaacctcctctgaagaagttttgctgattgtaaagaaagtgcgtcaaaagaagcaggatggagctctatacctcatggcagaaagaattgcttgggcacctgaaggcaaaaatagatttacagtcagccgtatgtatgtagatgttaaatgtcagaaaattagtccagaaggcaaagctacaattcagcatcagctggacctacatgaaggagatacaattaacttccgttttcccagtgaaaacacagcagtgaaagagcaagatgcagtaaaggaccttcagcagctgcttcccaaattcaagaggaaagcaaataaagaactggaagagaagaacagaatgctgcaagaagatcctgttttgtttcagctttataaagatcttgttgtgagccaagtgatgagtgctgaggaattctgggccaatcatttaaatgggaatgcaacagaaaattcttccacatccaatcataagcaggatgttggcatttctgctgcatatctggctgatgtctggcccgaaaccgatggctgtaacggtctgaaatataatttaacttctgatatcattgagttcatatttaggacctatccagcagtgaaaatgaaatatgcagaaagtgttccccacaacatgacagagaagggattctggacacgttttttccagtcccattattttcacagggattggctgaatacagggtcaaaggatctctctgcagaatgtgccaaaatagatgaaaaaggccttaaaacaatggtttcattaggagtgaaaaacccactactagaattaacagctttgggaaataagccattagatgagggctatggcatttcctctgtgccatctgcttccaattctaaatccatagaagagaatagtaatgctgccatcaagagatttaaccatcacagtgccatggtcctggcagctggactcaggaaacaagaagcagaaaatgagcaaaatagcccagcagcatggatggaaattccagagatgcagactgctttcagccatattgggcaagaaatggaagcttatatacccaagttaattgaggttctcttgagtagtgctgccagtagtaccatcatagcactgtcacctgcaggggaccttatgcagggaggaacacagcaaaccataaaccagatggtgccaagtgatattcagtctgaattgaaacacttgtatgtagctgttggagaacttctatggcatttctggtcctactttcctgttaatacaccattcctagaagaaagggtagtgaaaatgaaaagtaatttggaacgattccaagttaagaagatctgcccattccaagaaaagattcggaggcagtatttaagcacacatttgatgtacaaaaaccttaaaggcactggaagtaccataagtatagtgctattagaccctgggagaggggagaagcattcctccaggggtgccttcttccctcctgttgattatggtggttttgcttctgattgtaccctatga

SEQ ID NO: 11395 - protein, 505 aa, Homo sapiens
MATSSEEVLLIVKKVRQKKQDGALYLMAERIAWAPEGKNRFTVSRMYVDVKCQKISPEGKATIQHQLDLHEGDTINFRFPSENTAVKEQDAVKDLQQLLPKFKRKANKELEEKNRMLQEDPVLFQLYKDLVVSQVMSAEEFWANHLNGNATENSSTSNHKQDVGISAAYLADVWPETDGCNGLKYNLTSDIIEFIFRTYPAVKMKYAESVPHNMTEKGFWTRFFQSHYFHRDWLNTGSKDLSAECAKIDEKGLKTMVSLGVKNPLLELTALGNKPLDEGYGISSVPSASNSKSIEENSNAAIKRFNHHSAMVLAAGLRKQEAENEQNSPAAWMEIPEMQTAFSHIGQEMEAYIPKLIEVLLSSAASSTIIALSPAGDLMQGGTQQTINQMVPSDIQSELKHLYVAVGELLWHFWSYFPVNTPFLEERVVKMKSNLERFQVKKICPFQEKIRRQYLSTHLMYKNLKGTGSTISIVLLDPGRGEKHSSRGAFFPPVDYGGFASDCTL

SEQ ID NO: 11396 - DNA, 2563 bp, Homo sapiens
cgctcccctcagctcctgcagtgctaattaagggagggagcagcggggagcttgcagtgaccaagagggtgttgaggctaggaggccacgataaacaggatacgataaaagtccttaaccaagacgcagatgggaagaagcgttagagcgagcagcactcacatctcaagaaccagcctttcaaacagtttccagagatggattatcctactttacttttggctcttcttcatgtatacagagctctatgtgaagaggtgctttggcatacatcagttccctttgccgagaacatgtctctagaatgtgtgtatccatcaatgggcatcttaacacaggtggagtggttcaagatcgggacccagcaggattccatagccattttcagccctactcatggcatggtcataaggaagccctatgctgagagggtttactttttgaattcaacgatggcttccaataacatgactcttttctttcggaatgcctctgaagatgatgttggctactattcctgctctctttacacttacccacagggaacttggcagaaggtgatacaggtggttcagtcagatagttttgaggcagctgtgccatcaaatagccacattgtttcggaacctggaaagaatgtcacactcacttgtcagcctcagatgacgtggcctgtgcaggcagtgaggtgggaaaagatccagccccgtcagatcgacctcttaacttactgcaacttggtccatggcagaaatttcacctccaagttcccaagacaaatagtgagcaactgcagccacggaaggtggagcgtcatcgtcatccccgatgtcacagtctcagactcggggctttaccgctgctacttgcaggccagcgcaggagaaaacgaaaccttcgtgatgagattgactgtagccgagggtaaaaccgataaccaatataccctctttgtggctggagggacagttttattgttgttgtttgttatctcaattaccaccatcattgtcattttccttaacagaaggagaaggagagagagaagagatctatttacagagtcctgggatacacagaaggcacccaataactatagaagtcccatctctaccagtcaacctaccaatcaatccatggatgatacaagagaggatatttatgtcaactatccaaccttctctcgcagaccaaagactagagtttaagcttattcttgacatgagtgcattagtaatgactcttatgtactcatgcatggatctttatgcaatttttttccactacccaaggtctaccttagatactagttgtctgaattgagttactttgataggaaaaatacttcattacctaaaatcatttttcatagaactgtttcagaaaacctgactctaactggtttatatacaaaagaaaacttactgtatcatataacagaatgatccaggggagattaagctttgggcaagggctatttaccagggcttaaatgttgtgtctagaattaagtatgggcataaactggcttctgaatccctttccagagtgttggatccatttccctggtcttggcctcactctcatgcaggctttcctcttgtgttggcaagatggctgccaactcttggcaattcatacatccttgtttctgtctggtagagagtttgcttctcaaatggagcaaacaaatttgattattttttcattgttaaataggcaacatgaccagaaaggatggaatggcttaagtaaactaagggttcacttctagagctgagaagcagggtcaaagcacaatactgggcaattcagagcatggttagaagaggaaaggggagtctcaaagctggagagtttaccaacaaatattgactgcagtgattaaccaagacatttttgttaactaaaaagtgaaatatgggatggattctagaaatggggtatctctgtccatacttctagaatccactctatcagcatagtccagaagaatacctggcagtagaagaaatgaatattcaagaggaagataaatgcgagagggcaatcctttactattctcatatttatttatctctcattctgtatagaattcttgccgccatcccaggtctagccttaggagcaaatgtagtagatagtcgaataataaataacttaatgttttggacatattttgtctacttttgagaattatttttaatatgtaaattctctcaaaagggtcaggcacctagttattattttttaatgattatgtgaaagttgaatataatataccactaaaagtgacagttgaaagtggtggcataggacggtagggtagaaatttgggagggaaaaaagaaattgggagggtacaggcaacaggagaaaggaatcaaaccacagaaaaatacaaagggaaacttctgcttcactattcagacaaagacagccctaatgacatcaccaacagtcaaagcaattagagaccatacctaatattgtttaaattctagatgtaggctaacaatgaaaagtatttgccaaactgaataaaactgtcatggttaccttg

SEQ ID NO: 11397 - protein, 336 aa, Homo sapiens
MDYPTLLLALLHVYRALCEEVLWHTSVPFAENMSLECVYPSMGILTQVEWFKIGTQQDSIAIFSPTHGMVIRKPYAERVYFLNSTMASNNMTLFFRNASEDDVGYYSCSLYTYPQGTWQKVIQVVQSDSFEAAVPSNSHIVSEPGKNVTLTCQPQMTWPVQAVRWEKIQPRQIDLLTYCNLVHGRNFTSKFPRQIVSNCSHGRWSVIVIPDVTVSDSGLYRCYLQASAGENETFVMRLTVAEGKTDNQYTLFVAGGTVLLLLFVISITTIIVIFLNRRRRRERRDLFTESWDTQKAPNNYRSPISTSQPTNQSMDDTREDIYVNYPTFSRRPKTRV

SEQ ID NO: 11398 - DNA, 2091 bp, Homo sapiens
acagtttccagagatggattatcctactttacttttggctcttcttcatgtatacagagggaacttggcagaaggtgatacaggtggttcagtcaggacaaccaattgaaaacagctcaacctttcaggatagaggatggagctaacctgtagagaactaaatgatggttgttatgcaaagatagttttgaggcagctgtgccatcaaatagccacattgtttcggaacctggaaagaatgtcacactcacttgtcagcctcagatgacgtggcctgtgcaggcagtgaggtgggaaaagatccagccccgtcagatcgacctcttaacttactgcaacttggtccatggcagaaatttcacctccaagttcccaagacaaatagtgagcaactgcagccacggaaggtggagcgtcatcgtcatccccgatgtcacagtctcagactcggggctttaccgctgctacttgcaggccagcgcaggagaaaacgaaaccttcgtgatgagattgactgtagccgagggtaaaaccgataaccaatataccctctttgtggctggagggacagttttattgttgttgtttgttatctcaattaccaccatcattgtcattttccttaacagaaggagaaggagagagagaagagatctatttacagagtcctgggatacacagaaggcacccaataactatagaagtcccatctctaccagtcaacctaccaatcaatccatggatgatacaagagaggatatttatgtcaactatccaaccttctctcgcagaccaaagactagagtttaagcttattcttgacatgagtgcattagtaatgactcttatgtactcatgcatggatctttatgcaatttttttccactacccaaggtctaccttagatactagttgtctgaattgagttactttgataggaaaaatacttcattacctaaaatcatttttcatagaactgtttcagaaaacctgactctaactggtttatatacaaaagaaaacttactgtatcatataacagaatgatccaggggagattaagctttgggcaagggctatttaccagggcttaaatgttgtgtctagaattaagtatgggcataaactggcttctgaatccctttccagagtgttggatccatttccctggtcttggcctcactctcatgcaggctttcctcttgtgttggcaagatggctgccaactcttggcaattcatacatccttgtttctgtctggtagagagtttgcttctcaaatggagcaaacaaatttgattattttttcattgttaaataggcaacatgaccagaaaggatggaatggcttaagtaaactaagggttcacttctagagctgagaagcagggtcaaagcacaatactgggcaattcagagcatggttagaagaggaaaggggagtctcaaagctggagagtttaccaacaaatattgactgcagtgattaaccaagacatttttgttaactaaaaagtgaaatatgggatggattctagaaatggggtatctctgtccatacttctagaatccactctatcagcatagtccagaagaatacctggcagtagaagaaatgaatattcaagaggaagataaatgcgagagggcaatcctttactattctcatatttatttatctctcattctgtatagaattcttgccgccatcccaggtctagccttaggagcaaatgtagtagatagtcgaataataaataacttaatgttttggacatattttgtctacttttgagaattatttttaatatgtaaattctctcaaaagggtcaggcacctagttattattttttaatgattatgtgaaagttgaatataatataccactaaaagtgacagttgaaagtggtggcataggacggtagggtagaaatttgggagggaaaaaagaaattgggagggtacaggcaacaggagaaaggaatcaaaccacagaaaaatacaaagggaaacttctgcttcactattcagacaaagacagccctaatgacatcaccaacagtcaaagcaattagagaccatacctaata

SEQ ID NO: 11399 - protein, 181 aa, Homo sapiens
MTWPVQAVRWEKIQPRQIDLLTYCNLVHGRNFTSKFPRQIVSNCSHGRWSVIVIPDVTVSDSGLYRCYLQASAGENETFVMRLTVAEGKTDNQYTLFVAGGTVLLLLFVISITTIIVIFLNRRRRRERRDLFTESWDTQKAPNNYRSPISTSQPTNQSMDDTREDIYVNYPTFSRRPKTRV

SEQ ID NO: 11400 - DNA, 473 bp, Homo sapiens
atcatctgaccatgtacaacaaatgtaatgaaaacggtaaacctgaaccaaggcaaacccaacagtttaatttaaaaacttgaagatactaagtattcccttcaactggacattcagaaacttcacgtggctacattgtatttccccccacgagttgcttcagggttgtgaaattcactggactgtggagggagccttaaacctttgtgggtgattgacgtctaaagtacctgagcttttctggttctgctgaccctcagtctcctggaccctagaagaagaatcagacccatccttcagtctcatctctagaagcccagaataaaatgaaaaaggtatgaacgagaagagagaaatcactgttgacaacacattttacctagcagtccaacattgtttatcagcataataaaatgtgccaatactcaccagcactctaaagtatgcactaataataaatagagatatagggc

SEQ ID NO: 11401 - protein, 47 aa, Homo sapiens
FKNLKILSIPFNWTFRNFTWLHCISPHELLQGCEIHWTVEGALNLCG

SEQ ID NO: 11402 - DNA, 716 bp, Homo sapiens
cccattccaccagagtggctgcctacacttggaaaatgaacaggatctggtctcaagccttcctgagctccaaccagccctgcctgagcgaccttgggtgtatcatctgtcctgctgagcctcacattttccccacgtaaactggcgtgtggggtgagcacagccacagagagctcctctggctgagtgccgagtctgtgaggaaccggagctgggggttcagctgcagttggagctcgacctggatgaatggatggcacatggaggatgctgggtgtcactctgttgcccaggctggagtgcagtgatgagatctgagcccattgcaacctctgcctcctgggttaagcgatcctcccacctttgcctcccaagcagctggattacagacactgaagactcagcagagatcaagagagacaatatttcctgtacttctggaactcatggaagctggagagagacagaatttgcaaatgtctctcagcctgagtttccttccagaatttccatgaaccagggggttggctgcagtgtctgtttgaaagatgtggctgggggtatgaagggactgccttgaagctgagttgacatggcaggctcaccttttcaacttggatgggctcaaccccagccacgctgtcctctgctcctgagtacagggtctcggcccctcagctcctactctgaagcagccacggctgctggaagaaggt

SEQ ID NO: 11403 - protein, 108 aa, Homo sapiens
MAHGGCWVSLCCPGWSAVMRSEPIATSASWVKRSSHLCLPSSWITDTEDSAEIKRDNISCTSGTHGSWRETEFANVSQPEFPSRISMNQGVGCSVCLKDVAGGMKGLP

SEQ ID NO: 11404 - DNA, 1309 bp, Homo sapiens
agaaccctggtgactcctggtctccatgtcatctgccagaaaggccacctgcgccagcacctcctgagaccggccttcaaagacacgacgcatgccgctctgccgtccggagcacttaatgcctagcagcacacagacagcgaagcgggtgaccatggggtggccacggccgggccgagccctcgtggcagtcaaagccttgctggtcttgtcgctgctccaggtgcccgcgcaggcagtggtacgggccgtgctggaagacaactcgagctcggtggactttgcggatctgccggcgctgttcggcgtccccctggcccccgagggcatacggggctacctgatggaggtcaagccagccaacgcgtgccatcccatcgaggccccgcgactgggcaaccgctctctgggcgccatcgtgctgatccgccgctacgactgcaccttcgacctcaaggtgctgaacgcccagcgcgccggcttcgaggcggccatcgtgcacaacgtccactccgacgacctcgtgagcatgacccacgtctacgaggacttgaggggccagatcgccatcccctcagtgttcgtgagcgaggccgcctcgcaggacctgcgggtcatcctgggctgcaacaagtcggcccacgcgctgctcctgcccgacgacccaccgtgccacgacctgggctgtcaccccgtgctgaccgtgtcctgggtgctgggctgtaccctggccctggtcgtatcagccttctttgtcctgaaccacctgtggctctgggcccaggcctgctgcagccacagacggccggtgaagacgtctacctgccagaaggcccaggtccgcaccttcacgtggcacaacgacctgtgtgccatctgcctggatgagtatgaggagggcgaccaactcaagatcctgccctgctcccacacctaccactgcaaatgcattgacccctggttctcccaagccccccggcgctcctgccccgtgtgcaaacagtcggtggccgccacagaagacagctttgactccaccacctacagcttcagggacgaggacccctccctaccgggccaccggccccccatctgggccattcaagtccagctacgctcccggaggctggagctgctgggccgcgccagtccccactgccactgcagcaccacgtccctggaggcagagtataccactgtctcctcagcccctcctgaggcccctggtcagtaaagatctagggcagggaggggggtgcaatgaggaatgtttctggtctgaaaagaataaagtgggtttgaaagcgga

SEQ ID NO: 11405 - protein, 380 aa, Homo sapiens
MPLCRPEHLMPSSTQTAKRVTMGWPRPGRALVAVKALLVLSLLQVPAQAVVRAVLEDNSSSVDFADLPALFGVPLAPEGIRGYLMEVKPANACHPIEAPRLGNRSLGAIVLIRRYDCTFDLKVLNAQRAGFEAAIVHNVHSDDLVSMTHVYEDLRGQIAIPSVFVSEAASQDLRVILGCNKSAHALLLPDDPPCHDLGCHPVLTVSWVLGCTLALVVSAFFVLNHLWLWAQACCSHRRPVKTSTCQKAQVRTFTWHNDLCAICLDEYEEGDQLKILPCSHTYHCKCIDPWFSQAPRRSCPVCKQSVAATEDSFDSTTYSFRDEDPSLPGHRPPIWAIQVQLRSRRLELLGRASPHCHCSTTSLEAEYTTVSSAPPEAPGQ

SEQ ID NO: 11406 - DNA, 1444 bp, Homo sapiens
gactcctggtctccatgtcatctgccagaaaggccacctgcgccagcacctcctgagaccggccttcaaagacacgacgcatgccgctctgccgtccggagcacttaatgcctagagccagcagggtcccagtggccgcgtcactgcctctgagccacgcggtcattccaactcaactgccctcgcgtcctggccacaggccccctgggagaccccggagatgcccaaaggcctcatgcctgccgcctccagtgggacctagcagcacacagacagcgaagcgggtgaccatggggtggccacggccgggccgagccctcgtggcagtcaaagccttgctggtcttgtcgctgctccaggtgcccgcgcaggcagtggtacgggccgtgctggaagacaactcgagctcggtggactttgcggatctgccggcgctgttcggcgtccccctggcccccgagggcatacggggctacctgatggaggtcaagccagccaacgcgtgccatcccatcgaggccccgcgactgggcaaccgctctctgggcgccatcgtgctgatccgccgctacgactgcaccttcgacctcaaggtgctgaacgcccagcgcgccggcttcgaggcggccatcgtgcacaacgtccactccgacgacctcgtgagcatgacccacgtctacgaggacttgaggggccagatcgccatcccctcagtgttcgtgagcgaggccgcctcgcaggacctgcgggtcatcctgggctgcaacaagtcggcccacgcgctgctcctgcccgacgacccaccgtgccacgacctgggctgtcaccccgtgctgaccgtgtcctgggtgctgggctgtaccctggccctggtcgtatcagccttctttgtcctgaaccacctgtggctctgggcccaggcctgctgcagccacagacggccggtgaagacgtctacctgccagaaggcccaggtccgcaccttcacgtggcacaacgacctgtgtgccatctgcctggatgagtatgaggagggcgaccaactcaagatcctgccctgctcccacacctaccactgcaaatgcattgacccctggttctcccaagccccccggcgctcctgccccgtgtgcaaacagtcggtggccgccacagaagacagctttgactccaccacctacagcttcagggacgaggacccctccctaccgggccaccggccccccatctgggccattcaagtccagctacgctcccggaggctggagctgctgggccgcgccagtccccactgccactgcagcaccacgtccctggaggcagagtataccactgtctcctcagcccctcctgaggcccctggtcagtaaagatctagggcagggaggggggtgcaatgaggaatgtttctggtctgaaaagaataaagtgggtttgaaagcgg

SEQ ID NO: 11407 - protein, 429 aa, Homo sapiens
MPLCRPEHLMPRASRVPVAASLPLSHAVIPTQLPSRPGHRPPGRPRRCPKASCLPPPVGPSSTQTAKRVTMGWPRPGRALVAVKALLVLSLLQVPAQAVVRAVLEDNSSSVDFADLPALFGVPLAPEGIRGYLMEVKPANACHPIEAPRLGNRSLGAIVLIRRYDCTFDLKVLNAQRAGFEAAIVHNVHSDDLVSMTHVYEDLRGQIAIPSVFVSEAASQDLRVILGCNKSAHALLLPDDPPCHDLGCHPVLTVSWVLGCTLALVVSAFFVLNHLWLWAQACCSHRRPVKTSTCQKAQVRTFTWHNDLCAICLDEYEEGDQLKILPCSHTYHCKCIDPWFSQAPRRSCPVCKQSVAATEDSFDSTTYSFRDEDPSLPGHRPPIWAIQVQLRSRRLELLGRASPHCHCSTTSLEAEYTTVSSAPPEAPGQ

SEQ ID NO: 11408 - DNA, 2431 bp, Homo sapiens
cagcagacagagagaggaggttgtctgggacagactgctcctgacagaaggatgtcccagctgagcctgtcctggctgggcctctggccagtggcagcatccccttggctgctcctcctgctggtcggggcctcctggctcctggcccatgtcctggcctggacctacgccttctatgacaactgccgccgccttcggtgtttcccacaacccccaagacggaactggttttggggacaccagggcatggtcaaccccacagaggagggcatgagagttctgactcagctggtggccacctacccccagggctttaaggtctggatgggacccatctcccccctcctcagtttgtgccaccccgacatcatccggtctgtcatcaacgcctcagctgccattgcaccaaaggacaagttcttctacagcttcctggagccctggctgggggatgggctcctgctgagtgctggtgacaagtggagccgccaccgtcggatgctgacgcctgccttccatttcaacatcctgaagccctatatgaagattttcaatgagagtgtgaacatcatgcacgccaagtggcagctcctggcctcagagggtagtgcctgtttggatatgtttgagcacatcagcctcatgaccttggacagtctacagaaatgtgtcttcagctttgacagccattgtcaggagaaacccagtgaatatattgccgccatcttggagctcagtgcccttgtatcaaaaagacaccatgagatcctcctgcatattgacttcctgtattatctcacccctgatgggcagcgtttccgcagggcctgccgcctggtgcacgacttcacagatgccgtcatccaggagcggcgccgcactctccctagccagggtgttgatgacttcctccaagccaaggccaaatccaagactttggacttcattgatgtactcctgctgagcaaggatgaagacgggaagaagttatctgatgaggacataagagcagaagctgacacctttatgtttgagggccatgacaccacggccagtggtctctcctgggtcctgtaccaccttgcaaagcacccagaataccaggagcgctgccggcaggaggtgcaagaacttctgaaggaccgtgagcctaaagagattgaatgggacgacctggcccatttgcccttcctgaccatgtgcatgaaggagagcctgcggctgcatcccccagtcccggtcatctcccgccatgtcacccaggacattgtgctcccagacggccgggtcatccccaaaggcattatctgcctcatcagtgttttcggaacccatcacaacccagctgtgtggccggaccctgaggtctacgacccctttcgctttgacccagagaacatcaaggagaggtcacctctggcttttattcccttctcggcagggcccaggaactgcatcgggcagacgttcgcgatggcggagatgaaggtggtcctggcgctcacgctgctgcgcttccgcgtcctgcctgaccacaccgagccccgcaggaagccggagctggtcctgcgcgcagagggcggactttggctgcgggtggagcccctgagctgagttctgcagagacccactctgaccccactaaaatgacccctgattcatcaaaagtgaagcctagaattaccctaagaccctgttccacagtcctgtattccatcctagatatctactcaaaataattgagacaagtgttcaaacagaaagacgcttgtgcgtgaatgttcatggcggccctattcacagtagccaaacgatgaaaacaaccccaagctatatattaccagatgaaaggataaacaaaatgtggtccatccatacaatggagtattacacagccataaaaaggaatgaagcagtgatccctactacactgtggatgaaccttgaatgcatgatactgaatgaaagacgtcagatgcaaaaggtcacatagtgtactgtccttttatacgaaatttccagaacaggccaatctgaagagatgcatagcggattggtggctttcagcagctgtggggaggtgggactgaggagcgactgctaatcagtatggggtttcctcccgggatggtgaaaatgttccggacctagatactgacgaaggtagcacgacactgtgagtgcactaaatgctattgaattggacactttgaaatggtgaatttcgtggtatgtgaattctacctcaatcaaaaaaatttgctattttatctcacatacattttttttctgtccaggttgttcatataataatatgctgtgagcatctttccatgacattaaatcatcttaggaaacattattttgtggtcctcaaaatgtgtgtgttaagtgttcaaatcagtcttaatttaaaaaaagacatcatatt

SEQ ID NO: 11409 - protein, 520 aa, Homo sapiens; identical to SEQ ID NO: 1880

SEQ ID NO: 11410 - DNA, 724 bp, Homo sapiens
ctgggtcctgtaccaccttgcaaagcacccagaataccaggagcgctgccggcaggaggtgcaagaacttctgaaggaccgtgagcctaaagagattgaatggtctacgacccctttcgctttgacccagagaacatcaaggagaggtcacctctggcttttattcccttctcggcagggcccaggaactgcatcgggcagacgttcgcgatggcggagatgaaggtggtcctggcgctcacgctgctgcgcttccgcgtcctgcctgaccacaccgagccccgcaggaagccggagctggtcctgcgcgcagagggcggactttggctgcgggtggagcccctgagctgagttctgcagagacccactctgaccccactaaaatgacccctgattcatcaaaagtgaagcctagaattaccctaagaccctgttccacagtcctgtattccatcctagatatctactcaaaataattgagacaagtgttcaaacagaaagacgcttgtgcgtgaatgttcatggcggccctattcacagtagccaaacgatgaaaacaaccccaagctatatattaccagatgaaaggataaacaaaatgtggtccatccatacaatggagtattacacagccataaaaaggaatgaagcagtgatccctactacactgtggatgaaccttgaatgcatgatactgaatgaaagacgtcagatgcaaaaggtc

SEQ ID NO: 11411 - protein, 83 aa, Homo sapiens
MVYDPFRFDPENIKERSPLAFIPFSAGPRNCIGQTFAMAEMKVVLALTLLRFRVLPDHTEPRRKPELVLRAEGGLWLRVEPLS

SEQ ID NO: 11412 - DNA, 587 bp, Homo sapiens
agacagagagaggaggttgtctgggacagactgctcctgacagaaggatgtcccagctgagcctgtcctggctgggcctctggccagtggcagcatccccttggctgctcctcctgctggtcggggcctcctggctcctggcccatgtcctggcctggacctacgccttctatgacaactgccgccgccttcggtgtttcccacaacccccaagacggaactggttttggggacaccagggcatggtcaaccccacagaggagggcatgagagttctgactcagctggtggccacctacccccagggctttaaggtctggatgggacccatctcccccctcctcagtttgtgccaccccgacatcatccggtctgtcatcaacgcctcagctgccattgcaccaaaggacaagttcttctacagcttcctggagccctggctgggtgagtatctgcaggtgaacagggttgggaaaaacgttggggggccaggggagggagaggtccttgcccatggcccttggctgccctgctaggggatgggctcctgctgagtgctggtgacaagtggagccgccaccgtcgga

SEQ ID NO: 11413 - protein, 162 aa, Homo sapiens
MSQLSLSWLGLWPVAASPWLLLLLVGASWLLAHVLAWTYAFYDNCRRLRCFPQPPRRNWFWGHQGMVNPTEEGMRVLTQLVATYPQGFKVWMGPISPLLSLCHPDIIRSVINASAAIAPKDKFFYSFLEPWLGEYLQVNRVGKNVGGPGEGEVLAHGPWLPC

SEQ ID NO: 11414 - DNA, 3620 bp, Homo sapiens
tgagatattatttgagtcttagtatagttaggtcttagggtagatttgaattatgccgaagaataggcttggttatacccgggccatgtttaggacattagtgacatcatatttaaatgttatctaggacccttcactgggatacacagaagtcatatcagaccatctcaggtccatggcagagcatgttgtgtcatttagggtttgtcatatgtgttttggccatgtcagggaatgttaacaactgtcggggcaatattccaggtcccagatccatgtcagaagatagcagagagtgctgggagtagacagagtgtcctaggtccctgtaaaggcattctgtagagtgttgagctatgctcaggtgttgcagaacatgttggaccttgtaggagatatgtcattgtgtgctggggcatgctgtgttattgctctactctgtcgctgcagcctggtctggtctctccttcctccaccatcctcccttcttcctctacccttggccttcttcctgctatgctgggtgggatgcgtggaagtgcacacccctggctgggagcattcctccatacccaaagtccttctctcacccctctccatggccactgatggtcctcaatcatgtcagctgctgtcgcacccaaggatatgattttctatggcttcctgaagccctggctgggggatgggctcctgctgagtggtggtgacaagtggagccgccaccgtcggatgttgacgcctgccttccatttcaacatcttgaagccttatatgaagattttcaacaagagtgtgaacatcatgcacgaagcccagtgaatatattgccgccatcttggagctcagtgcctttgtagaaaagagaaaccagcagattctcttgcacacggacttcctgtattatctcactcctgatgggcagcgcttccgcagggcctgccacctggtgcacgacttcacagatgccgtcatccaggagcggcgctgcaccctccccactcagggtattgatgatttcctcaagaacaaggcaaagtccaagactttagacttcattgatgtgcttctgctgagcaaggatgaagatgggaaggaattgtctgatgaggacataagagcagaagctgacaccttcatgtttgagggccatgacactacagccagtggtctctcctgggtcctataccaccttgcaaagcacccagaataccaggaacagtgccggcaagaagtgcaagagcttctgaaggaccgtgaacctatagagattgaatgggacgacctggcccagctgcccttcctgaccatgtgcattaaggagagcctgcggttgcatcccccagtcccggtcatctcccgatgttgcacgcaggactttgtgctcccagacggccgcgtcatccccaaaggcattgtctgcctcatcaatattatcgggatccattacaacccaactgtgtggccagaccctgaggtctacgaccccttccgtttcgaccaagagaacatcaaggagaggtcacctctggcttttattcccttctcggcagggcccagaaactgcatcgggcaggcgttcgccatggctgagatgaaggtggtcctggcgctcaccctgctgcacttccgcatcctgccgacccacactgaaccccgcaggaaacccgagctgatattgcgcgcagagggtggactttggctgcgggtggagcccctgggtgcgaactcacagtgactgtcctacccacccacccacctctgtagagtcccagaaacaaaactatgctgacacctctgcttgagcctcgttgacagccagcatggggctcctggggactggtgggatctaagaaagggaggtgagtgggtggaggcagggtgacgtctctgaacccaaaaccctgacggcctctctggctgagcacagggcatctaggcccttagtgggttctcccagagcccaagtaaaaactttatcctgtgggcagtagggagccctgggaggtgtttgagcaggagagggaacaggattaagaatgggtttaaggagcaagactgagactctgattcagcgagaaacaaccataggggcagatcccttcatctgtcctgggaatgtcctcccaagactggagtcctcagctcagaacaaagggaaaggggtgcagcttccaccctggcaggctctcagaaatttttagttcctttttccaccaacttcccacccctgtttctccccctcccagtgcgttctctctgtgactctcttcccttactttcagaggcataggatctggagccagactgcttgggctcaagtcctggctctgctgcgtgacttgagcaagttaattcctctctctgtgcctcggttccctcaaccatataatggagacaacagcattacctatatcagggttttcctgaggtctcaatataagggactcagagctgtgcctggcacacaatgaatgctaaatatatggagccattattatttcctgtctcagaaagtctggctgttaaagaatgttgtctttcaagatcgttatttctaccacgactttaaaggctgtgttttggaactcaaaggcaaaaattctaatatctgtgctccttgaacaacctcttctcctagagggctgtgcatataagatatgtatatatatatatatattatatatatatatatatacacacacacacacacacacacacacatatatacatatacacacacacacacacacacacacacacacacacacatatatatatatatatatttttttttttttcctgaggatggtgaaggtacctgactgtgtgaggtggtaggagaatgagagaaacctcagtcagtgtctcaaaataaaatcctgctacaaacattgatctcttttcatagcctaagggatgttgcatcgctaaaccctgttgacttctctaatctcttctgtagctgatctccttcccttgctacactcggttactctggccttgattctgatctccaaatacattatattttttatttgggaccatcgtattgcctttgcacctttatcaaatataagttgcctatatttatttggatctattttttgggcttttaatattctgttccattgacctatttctcttttcttttaccaataccgcaacatcttggttactgtagcttcacggtaagtcttaaaacttggatattgtcagtcctccaactatgttctactccttcaatattgtgttggttattctgagtcttttgtctctccatataaattgtagaattagattgctgatatccataaaaaaactttctggagggccccagggagcgcggggcgccgctgctgctgctgctgctcctcggctgggttgtgtctactgggcccgcggctgcggcggcagaggggcctgagccgggagccgcgctcagccgagagttgggcagagggagtgcccgcgccgccgcggcgtcatgggccccctcccctcacctcagcgggcaccagccgcgggaacccccgggcctcctcgcgcccgagcctgagcgacccctgggttctccggcgccccctccctccccctatttttcttttcctgctcttgct

SEQ ID NO: 11415 - protein, 199 aa, Homo sapiens
MFEGHDTTASGLSWVLYHLAKHPEYQEQCRQEVQELLKDREPIEIEWDDLAQLPFLTMCIKESLRLHPPVPVISRCCTQDFVLPDGRVIPKGIVCLINIIGIHYNPTVWPDPEVYDPFRFDQENIKERSPLAFIPFSAGPRNCIGQAFAMAEMKVVLALTLLHFRILPTHTEPRRKPELILRAEGGLWLRVEPLGANSQ

SEQ ID NO: 11416 - DNA, 3102 bp, Homo sapiens
tgagatattatttgagtcttagtatagttaggtcttagggtagatttgaattatgccgaagaataggcttggttatacccgggccatgtttaggacattagtgacatcatatttaaatgttatctaggacccttcactgggatacacagaagtcatatcagaccatctcaggtccatggcagagcatgttgtgtcatttagggtttgtcatatgtgttttggccatgtcagggaatgttaacaactgtcggggcaatattccaggtcccagatccatgtcagaagatagcagagagtgctgggagtagacagagtgtcctaggtccctgtaaaggcattctgtagagtgttgagctatgctcaggtgttgcagaacatgttggaccttgtaggagatatgtcattgtgtgctggggcatgctgtgttattgctctactctgtcgctgcagcctggtctggtctctccttcctccaccatcctcccttcttcctctacccttggccttcttcctgctatgctgggtgggatgcgtggaagtgcacacccctggctgggagcattcctccatacccaaagtccttctctcacccctctccatggccactgatggtcctcaatcatgtcagctgctgtcgcacccaaggatatgattttctatggcttcctgaagccctggctgggggatgggctcctgctgagtggtggtgacaagtggagccgccaccgtcggatgttgacgcctgccttccatttcaacatcttgaagccttatatgaagattttcaacaagagtgtgaacatcatgcacgaagcccagtgaatatattgccgccatcttggagctcagtgcctttgtagaaaagagaaaccagcagattctcttgcacacggacttcctgtattatctcactcctgatgggcagcgcttccgcagggcctgccacctggtgcacgacttcacagatgccgtcatccaggagcggcgctgcaccctccccactcagggtattgatgatttcctcaagaacaaggcaaagtccaagactttagacttcattgatgtgcttctgctgagcaaggatgaagatgggaaggaattgtctgatgaggacataagagcagaagctgacaccttcatgtttgagggccatgacactacagccagtggtctctcctgggtcctataccaccttgcaaagcacccagaataccaggaacagtgccggcaagaagtgcaagagcttctgaaggaccgtgaacctatagagattgaatgggacgacctggcccagctgcccttcctgaccatgtgcattaaggagagcctgcggttgcatcccccagtcccggtcatctcccgatgttgcacgcaggactttgtgctcccagacggccgcgtcatccccaaaggcattgtctgcctcatcaatattatcgggatccattacaacccaactgtgtggccagaccctgaggtctacgaccccttccgtttcgaccaagagaacatcaaggagaggtcacctctggcttttattcccttctcggcagggcccagaaactgcatcgggcaggcgttcgccatggctgagatgaaggtggtcctggcgctcaccctgctgcacttccgcatcctgccgacccacactgaaccccgcaggaaacccgagctgatattgcgcgcagagggtggactttggctgcgggtggagcccctgggtgcgaactcacagtgactgtcctacccacccacccacctctgtagagtcccagaaacaaaactatgctgacacctctgcttgagcctcgttgacagccagcatggggctcctggggactggtgggatctaagaaagggaggtgagtgggtggaggcagggtgacgtctctgaacccaaaaccctgacggcctctctggctgagcacagggcatctaggcccttagtgggttctcccagagcccaagtaaaaactttatcctgtgggcagtagggagccctgggaggtgtttgagcaggagagggaacaggattaagaatgggtttaaggagcaagactgagactctgattcagcgagaaacaaccataggggcagatcccttcatctgtcctgggaatgtcctcccaagactggagtcctcagctcagaacaaagggaaaggggtgcagcttccaccctggcaggctctcagaaatttttagttcctttttccaccaacttcccacccctgtttctccccctcccagtgcgttctctctgtgactctcttcccttactttcagaggcataggatctggagccagactgcttgggctcaagtcctggctctgctgcgtgacttgagcaagttaattcctctctctgtgcctcggttccctcaaccatataatggagacaacagcattacctatatcagggttttcctgaggtctcaatataagggactcagagctgtgcctggcacacaatgaatgctaaatatatggagccattattatttcctgtctcagaaagtctggctgttaaagaatgttgtctttcaagatcgttatttctaccacgactttaaaggctgtgttttggaactcaaaggcaaaaattctaatatctgtgctccttgaacaacctcttctcctagagggctgtgcatataagatatgtatatatatatatatattatatatatatatatatacacacacacacacacacacacacacatatatacatatacacacacacacacacacacacacacacacacacacatatatatatatatatatttttttttttttcctgaggatggtgaaggtacctgactgtgtgaggtggtaggagaatgagagaaacctcagtcagtgtctcaaaataaaatcctgctacaaacattgatctcttttcatagcctaagggatgttgcatcgctaaaccctgttgacttctctaatctcttctgtagctgatctccttcccttgctacactcggttactctggccttgattctgatctccaaatacattatattttttatttgggaccatcgtattgcctttgcacctttatcaaatataagttgcctatatttatttggatct

SEQ ID NO: 11417 - protein, 199 aa, Homo sapiens; identical to SEQ ID NO: 11415

SEQ ID NO: 11418 - DNA, 2884 bp, Homo sapiens
gccctgcaggatgccgcagctgagcctgtcctggctgggcctcgggcccgtggcagcatccccgtggctgcttctgctgctggttggaggctcctggctcctggcccgcgtcctggcctggacctacaccttctatgacaactgccgccgcctccagtgttttcctcaacccccgaaacagaactggttttggggacaccagggcctggtcactcccacggaagagggcatgaagacattgacccagctggtgaccacatatccccagggctttaagttgtggctgggtcctaccttccccctcctcattttatgccaccctgacattatccggcctatcaccagtgcctcagctgctgtcgcacccaaggatatgattttctatggcttcctgaagccctggctgggggatgggctcctgctgagtggtggtgacaagtggagccgccaccgtcggatgttgacgcctgccttccatttcaacatcttgaagccttatatgaagattttcaacaagagtgtgaacatcatgcacgacaagtggcagcgcctggcctcagagggcagcgccagactggacatgtttgaacacatcagcctcatgaccttggacagtctgcagaaatgtgtcttcagctttgaaagcaattgtcaggagaagcccagtgaatatattgccgccatcttggagctcagtgcctttgtagaaaagagaaaccagcagattctcttgcacacggacttcctgtattatctcactcctgatgggcagcgcttccgcagggcctgccacctggtgcacgacttcacagatgccgtcatccaggagcggcgctgcaccctccccactcagggtattgatgatttcctcaagaacaaggcaaagtccaagactttagacttcattgatgtgcttctgctgagcaaggatgaagatgggaaggaattgtctgatgaggacataagagcagaagctgacaccttcatgtttgagggccatgacactacagccagtggtctctcctgggtcctataccaccttgcaaagcacccagaataccaggaacagtgccggcaagaagtgcaagagcttctgaaggaccgtgaacctatagagattgaatgggacgacctggcccagctgcccttcctgaccatgtgcattaaggagagcctgcggttgcatcccccagtcccggtcatctcccgatgttgcacgcaggactttgtgctcccagacggccgcgtcatccccaaaggtctacgaccccttccgtttcgaccaagagaacatcaaggagaggtcacctctggcttttattcccttctcggcagggcccagaaactgcatcgggcaggcgttcgccatggctgagatgaaggtggtcctggcgctcaccctgctgcacttccgcatcctgccgacccacactgaaccccgcaggaaacccgagctgatattgcgcgcagagggtggactttggctgcgggtggagcccctgggtgcgaactcacagtgactgtcctacccacccacccacctctgtagagtcccagaaacaaaactatgctgacacctctgcttgagcctcgttgacagccagcatggggctcctggggactggtgggatctaagaaagggaggtgagtgggtggaggcagggtgacgtctctgaacccaaaaccctgacggcctctctggctgagcacagggcatctaggcccttagtgggttctcccagagcccaagtaaaaactttatcctgtgggcagtagggagccctgggaggtgtttgagcaggagagggaacaggattaagaatgggtttaaggagcaagactgagactctgattcagcgagaaacaaccataggggcagatcccttcatctgtcctgggaatgtcctcccaagactggagtcctcagctcagaacaaagggaaaggggtgcagcttccaccctggcaggctctcagaaatttttagttcctttttccaccaacttcccacccctgtttctccccctcccagtgcgttctctctgtgactctcttcccttactttcagaggcataggatctggagccagactgcttgggctcaagtcctggctctgctgcgtgacttgagcaagttaattcctctctctgtgcctcggttccctcaaccatataatggagacaacagcattacctatatcagggttttcctgaggtctcaatataagggactcagagctgtgcctggcacacaatgaatgctaaatatatggagccattattatttcctgtctcagaaagtctggctgttaaagaatgttgtctttcaagatcgttatttctaccacgactttaaaggctgtgttttggaactcaaaggcaaaaattctaatatctgtgctccttgaacaacctcttctcctagagggctgtgcatataagatatgtatatatatatatatattatatatatatatatatacacacacacacacacacacacacacatatatacatatacacacacacacacacacacacacacacacacacacatatatatatatatatatttttttttttttcctgaggatggtgaaggtacctgactgtgtgaggtggtaggagaatgagagaaacctcagtcagtgtctcaaaataaaatcctgctacaaacattgatctcttttcatagcctaagggatgttgcatcgctaaaccctgttgacttctctaatctcttctgtagctgatctccttcccttgctacactcggttactctggccttgattctgatctccaaatacattatattttttatttgggaccatcgtattgcctttgcacctttatcaaatataagttgcctatatttatttggatct

SEQ ID NO: 11419 - protein, 454 aa, Homo sapiens
MPQLSLSWLGLGPVAASPWLLLLLVGGSWLLARVLAWTYTFYDNCRRLQCFPQPPKQNWFWGHQGLVTPTEEGMKTLTQLVTTYPQGFKLWLGPTFPLLILCHPDIIRPITSASAAVAPKDMIFYGFLKPWLGDGLLLSGGDKWSRHRRMLTPAFHFNILKPYMKIFNKSVNIMHDKWQRLASEGSARLDMFEHISLMTLDSLQKCVFSFESNCQEKPSEYIAAILELSAFVEKRNQQILLHTDFLYYLTPDGQRFRRACHLVHDFTDAVIQERRCTLPTQGIDDFLKNKAKSKTLDFIDVLLLSKDEDGKELSDEDIRAEADTFMFEGHDTTASGLSWVLYHLAKHPEYQEQCRQEVQELLKDREPIEIEWDDLAQLPFLTMCIKESLRLHPPVPVISRCCTQDFVLPDGRVIPKGLRPLPFRPREHQGEVTSGFYSLLGRAQKLHRAGVRHG

SEQ ID NO: 11420 - DNA, 2047 bp, Homo sapiens
gggacaagctgcttctgataggagccaggctggcagtggcagggctggagggtcctggcctgggatggggaggggactgcccaaggttggggtgggtcaaggctgctggcctgggagactggtgatttcctggtaactggacccctggcaacctcccagtgattcaggctgggcctttttggattctaatcagcctctctctctctttccctttctgtgtaactggaggccacttggctgctggttttcattgggcatttctggactttagatctcagctcttgtttacccatctcagagccttccctgatctgcctccagcactgcccatccttgcccctttccactgtccttggagcttcctgggcccttccctgggcctcaggatcccaccctccatcccgtctgccctgcaggatgccgcagctgagcctgtcctggctgggcctcgggcccgtggcagcatccccgtggctgcttctgctgctggttggaggctcctggctcctggcccgcgtcctggcctggacctacaccttctatgacaactgccgccgcctccagtgttttcctcaacccccgaaacagaactggttttggggacaccagggcctggtcactcccacggaagagggcatgaagacattgacccagctggtgaccacatatccccagggctttaagttgtggctgggtcctaccttccccctcctcattttatgccaccctgacattatccggcctatcaccagtgcctcagctgctgtcgcacccaaggatatgattttctatggcttcctgaagccctggctgggggatgggctcctgctgagtggtggtgacaagtggagccgccaccgtcggatgttgacgcctgccttccatttcaacatcttgaagccttatatgaagattttcaacaagagtgtgaacatcatgcacgacaagtggcagcgcctggcctcagagggcagcgccagactggacatgtttgaacacatcagcctcatgaccttggacagtctgcagaaatgtgtcttcagctttgaaagcaattgtcaggagaagcccagtgaatatattgccgccatcttggagctcagtgcctttgtagaaaagagaaaccagcagattctcttgcacacggacttcctgtattatctcactcctgatgggcagcgcttccgcagggcctgccacctggtgcacgacttcacagatgccgtcatccaggagcggcgctgcaccctccccactcagggtattgatgatttcctcaagaacaaggcaaagtccaagactttagacttcattgatgtgcttctgctgagcaaggatgaagatgggaaggaattgtctgatgaggacataagagcagaagctgacaccttcatgtttgagggccatgacactacagccagtggtctctcctgggtcctataccaccttgcaaagcacccagaataccaggaacagtgccggcaagaagtgcaagagcttctgaaggaccgtgaacctatagagattgaatgggacgacctggcccagctgcccttcctgaccatgtgcattaaggagagcctgcggttgcatcccccagtcccggtcatctcccgatgttgcacgcaggactttgtgctcccagacggccgcgtcatccccaaaggcattgtctgcctcatcaatattatcgggatccattacaacccaactgtgtggccagaccctgaggtctacgaccccttccgtttcgaccaagagaacatcaaggagaggtcacctctggcttttattcccttctcggcagggcccagaaactgcatcgggcaggcgttcgccatggctgagatgaaggtggtcctggcgctcaccctgctgcacttccgcatcctgccgacccacactgaaccccgcaggaaacccgagctgatattgcgcgcagagggtggactttggctgcgggtggagcccctgggtgcgaactcacagtgactgtcctacccacccacccacctctgtagagtcccagaaacaaaactatgctgac

SEQ ID NO: 11421 - protein, 524 aa, Homo sapiens
MPQLSLSWLGLGPVAASPWLLLLLVGGSWLLARVLAWTYTFYDNCRRLQCFPQPPKQNWFWGHQGLVTPTEEGMKTLTQLVTTYPQGFKLWLGPTFPLLILCHPDIIRPITSASAAVAPKDMIFYGFLKPWLGDGLLLSGGDKWSRHRRMLTPAFHFNILKPYMKIFNKSVNIMHDKWQRLASEGSARLDMFEHISLMTLDSLQKCVFSFESNCQEKPSEYIAAILELSAFVEKRNQQILLHTDFLYYLTPDGQRFRRACHLVHDFTDAVIQERRCTLPTQGIDDFLKNKAKSKTLDFIDVLLLSKDEDGKELSDEDIRAEADTFMFEGHDTTASGLSWVLYHLAKHPEYQEQCRQEVQELLKDREPIEIEWDDLAQLPFLTMCIKESLRLHPPVPVISRCCTQDFVLPDGRVIPKGIVCLINIIGIHYNPTVWPDPEVYDPFRFDQENIKERSPLAFIPFSAGPRNCIGQAFAMAEMKVVLALTLLHFRILPTHTEPRRKPELILRAEGGLWLRVEPLGANSQ

SEQ ID NO: 11422 - DNA, 1666 bp, Homo sapiens
gaggcaaagacctcctagcagagggggagaggagggatgccgcagctgagcctgtcctggctgggcctcgggcccgtggcagcatccccgtggctgcttctgctgctggttggaggctcctggctcctggcccgcgtcctggcctggacctacaccttctatgacaactgccgccgcctccagtgttttcctcaacccccgaaacagaactggttttggggacaccagggcctggtcactcccacggaagagggcatgaagacattgacccagctggtgaccacatatccccagggctttaagttgtggctgggtcctaccttccccctcctcattttatgccaccctgacattatccggcctatcaccagtgcctcagctgctgtcgcacccaaggatatgattttctatggcttcctgaagccctggctgggggatgggctcctgctgagtggtggtgacaagtggagccgccaccgtcggatgttgacgcctgccttccatttcaacatcttgaagccttatatgaagattttcaacaagagtgtgaacatcatgcacgacaagtggcagcgcctggcctcagagggcagcgccagactggacatgtttgaacacatcagcctcatgaccttggacagtctgcagaaatgtgtcttcagctttgaaagcaattgtcaggagaagcccagtgaatatattgccgccatcttggagctcagtgcctttgtagaaaagagaaaccagcagattctcttgcacacggacttcctgtattatctcactcctgatgggcagcgcttccgcagggcctgccacctggtgcacgacttcacagatgccgtcatccaggagcggcgctgcaccctccccactcagggtattgatgatttcctcaagaacaaggcaaagtccaagactttagacttcattgatgtgcttctgctgagcaaggatgaagatgggaaggaattgtctgatgaggacataagagcagaagctgacaccttcatgtttgagggccatgacactacagccagtggtctctcctgggtcctataccaccttgcaaagcacccagaataccaggaacagtgccggcaagaagtgcaagagcttctgaaggaccgtgaacctatagagattgaatgggacgacctggcccagctgcccttcctgaccatgtgcattaaggagagcctgcggttgcatcccccagtcccggtcatctcccgatgttgcacgcaggactttgtgctcccagacggccgcgtcatccccaaaggcattgtctgcctcatcaatattatcgggatccattacaacccaactgtgtggccagaccctgaggtctacgaccccttccgtttcgaccaagagaacatcaaggagaggtcacctctggcttttattcccttctcggcagggcccagaaactgcatcgggcaggcgttcgccatggctgagatgaaggtggtcctggcgctcaccctgctgcacttccgcatcctgccgacccacactgaaccccgcaggaaacccgagctgatattgcgcgcagagggtggactttggctgcgggtggagcccctgggtgcgaactcacagtgactgtcctacccacccacccacctctgtagagtcccagaaacaaaactatgctgac

SEQ ID NO: 11423 - protein, 524 aa, Homo sapiens; identical to SEQ ID NO: 11421

SEQ ID NO: 11424 - DNA, 951 bp, Homo sapiens; identical to SEQ ID NO: 1885

SEQ ID NO: 11425 - protein, 316 aa, Homo sapiens; identical to SEQ ID NO: 1886

SEQ ID NO: 11426 - DNA, 1689 bp, Homo sapiens
gcatgatgatggcagtggatcagagtcccaaggacactggtgaagatcagagcaggactcacacaacctcagatccctgtggagtcagggtggaaccagagggaaggctgaaggctggagggtcctgagaggccttgcagaaagagaggacattggagctggggctttgatggatgaagaggaactagggaaaggcatttcaagcagagggaacagcctgtgcaaccacagcaggcagcccagcatgccagtgcttcctccatgaatttgaaagacatattggctgacctcatacctaaggagcaggccagaattaagaccttcaggcagcaacatggcaagaaggtggtgggccaaatcactgtggacatgatgtatggtggcatgagaggcatgaagggattggtctatgaaacatcagttcttgatcctgatgagggcatccgtttctgaggctttagtatccctgaatgccagaaactgctacccaaggctaagggtggggaagaacccctgcctgagggcttattttggctgctggtaactggatgtatcccaacagaggaacaggtatcttggctctcaaaagagtgggcaaagagggcagctctgccttcccatgtggtcaccatgctggacaactttcccaccaatctacaccccatgtctcagctcagtgcagctgttacagccctcaacagtgaaagtaactttgcccaagcatatgcacggggtatcagccgaacccaagtactgggagttgatttatgaagactctgtggatctaatcacaaagctaccttgtgtcgcagcaaagatctaccgaaatctctatggagaaggcagtggtattggggccattgactctaacctggactggtctcacagtttcaccaacatgttaggctatactgatcatcagttccctgagctcatgcacctgtacctcactatccacagtgaccatgagggcggcaatgtaagtgcccataccagccacttggtgggcagtggcctttcagacccttacctgtcctttgcagcagccatgaacgggctggcagggcctctccatggactggcaaatcaggaagtgcttgtctggctaacacagctgcagaaggaagttggcaaagatgtgtcagatgagaagttatgagactacatctggaacacactcaactcaggacgggctgttccaggctatggccatgcagtactaaggaagactgatccacgatatacctgtcagcgagagtttgctctgaaacacctgcctaatgaccccatgtttaagttggttgctcagctatgcaagattgtgcccaatgtcctcttagagcagggtaaggccaagaatccttggcccaatgtagatgctcacagtggggtgctgctccagtattatggcatgatggagatgaattactacacagtcctgtttggggtgtcacgagcattgggtgtactggcacagctcatctggagccgagccttaggcttccctctagaaaggcccaagtccatgagcacagagggtctgatgaagtttgtggactctaagtcagggtaaaactggagactgggggaaagtgactaccagaaagtgaggaagcctaaataaaaagtatacttttgtttcagggggcctttaaagacttaagattaaattatatctgaggcactgat

SEQ ID NO: 11427 - protein, 31 aa, Homo sapiens
MDEEELGKGISSRGNSLCNHSRQPSMPVLPP

SEQ ID NO: 11428 - DNA, 2172 bp, Homo sapiens
gcatgatgatggcagtggatcagagtcccaaggacactggtgaagatcagagcaggactcacacaacctcagatccctgtggagtcagggtggaaccagagggaaggctgaaggctggagggtcctgagaggccttgcagaaagagaggacattggagctggggctttgatggatgaagaggaactagggaaaggcatttcaagcagagggaacagcctgtgcaaccacagcaggcagcccagcatgccagtgcttcctccatgaatttgaaagacatattggctgacctcatacctaaggagcaggccagaattaagaccttcaggcagcaacatggcaagaaggtggtgggccaaatcactgtggacatgatgtatggtggcatgagaggcatgaagggattggtctatgaaacatcagttcttgatcctgatgagggcatccgtttctgaggctttagtatccctgaatgccagaaactgctacccaaggctaagggtggggaagaacccctgcctgagggcttattttggctgctggtaactggatgtatcccaacagaggaacaggtatcttggctctcaaaagagtgggcaaagagggcagctctgccttcccatgtggtcaccatgctggacaactttcccaccaatctacaccccatgtctcagctcagtgcagctgttacagccctcaacagtgaaagtaactttgcccaagcatatgcacggggtatcagccgaacccaagtactgggagttgatttatgaagactctgtggatctaatcacaaagctaccttgtgtcgcagcaaagatctaccgaaatctctatggagaaggcagtggtattggggccattgactctaacctggactggtctcacagtttcaccaacatgttaggctatactgatcatcagttccctgagctcatgcacctgtacctcactatccacagtgaccatgagggcggcaatgtaagtgcccataccagccacttggtgggcagtggcctttcagacccttacctgtcctttgcagcagccatgaacgggctggcagggcctctccatggactggcaaatcaggaagtgcttgtctggctaacacagctgcagaaggaagttggcaaagatgtgtcagatgagaagttatgagactacatctggaacacactcaactcaggacgggctgttccaggctatggccatgcagtactaaggaagactgatccacgatatacctgtcagcgagagtttgctctgaaacacctgcctaatgaccccatgtttaagttggttgctcagctatgcaagattgtgcccaatgtcctcttagagcagggtaaggccaagaatccttggcccaatgtagatgctcacagtggggtgctgctccagtattatggcatgatggagatgaattactacacagtcctgtttggggtgtcacgagcattgggtgtactggcacagctcatctggagccgagccttaggcttccctctagaaaggcccaagtccatgagcacagagggtctgatgaagtttgtggactctaagtcagggtaaaactggagactgggggaaagtgactaccagaaagtgaggaagcctaaataaaaagtatacttttgtttcagggggcctttaaagacttaagattaaattatatctgaggcactgataatatgtttgaggttaaaatataaattaagactttaaaagatgaaaaatggtcccttcttccctaatcagctcctttcccctgcctggtatgagttgcccatcacaggcatggtcctggaggatgaccaggactaatgcatgtggtatgagtaggtttggccccctcactatctctagagtgagaatctggctcctgtttccatggctcaaagccggttgcagagaatctgcagtcacttcggagctttagcttcttctctgccaagccctcaataagccagcaaaccaggactctgccccttctgtttccataggaatcatgttggatagtcagctgtaccaagccccttggccttcccatgcacacaaacacctcctagcaagacctgttggttagctggacatgctttggcaatttttttatactgccaagtgaccataaaggcatggcatttgttgtgactggcacccaatgtttgatt

SEQ ID NO: 11429 - protein, 31 aa, Homo sapiens; identical to SEQ ID NO: 11427

SEQ ID NO: 11430 - DNA, 921 bp, Homo sapiens
ctcaggtgagattctcggtggagcagctgggccaggatgggaggaggcggctgaccctgaaagagcaggtaacggggctctccgccattgagttccctggagggaaggagacttggcagtggatcaacccagtggacttccaggaagaggcatccctgcaggaggccctggtggtagagatgtcctgggacaaaggcgagaggactgagcctctcgagaagacagagctacctgagggtgcccctgagctggccctggatacagagttgtccttggaggatggagacaggtgcaaggccaagatgtgatcgttgaggctcagagagggtgagtgactcgcccgaggctacgtagcacacacaggagtcacatttggacccaaataacccagagctcctccaggctccagtgcacctgcctcctctctgccccgtgcctgttgccacccatcctgcgggggaaccctagatgctgccatgaaatggaagctgctgcaccctgctgggcctggcatccgtggggcaggagcagaccctgccatttacctgttctggcgtagaatggactgggaatgggggcaaggggggctcagatggatccctggaccctgggctgggcatccacccccaggagcactggatggggagtctggactcaagggctccctgcagcattgcggggtcttgtagcttggaggatccaggcatatagggaagggggctgtaaactttgtgggaaaaatgacggtcctcccatcccaccccccaccccaccctcacccccctataaaatgggggtggtgataatgaccttacacagctgttcaaaatcatcgtaaatgagcctcctcttgggtatttttttcctgtttgaagcttgaatgtcctgctcaaaatctcaaaacacgagccttggaattca

SEQ ID NO: 11431 - protein, 42 aa, Homo sapiens
MSWDKGERTEPLEKTELPEGAPELALDTELSLEDGDRCKAKM

SEQ ID NO: 11432 - DNA, 2877 bp, Homo sapiens
gtgagtcccttatcacaactgatcactccgtggggtcaccgctgctctggcgtctacctcccccaacaggttggggtttctaggagggcagctccagaggttgcagaacactccgctgcctctccagagccaggcacacagcaggcgctccataaatgttcgttggtcttttctccttgctcagcttcaatgtgttccggagtggggacggggtggctgaacctcgcaggtggcagagaggctcccctggggctgtggggctctacgtggatccgatggagccgctggtgacctgggtggtccccctcctcttcctcttcctgctgtccaggcagggcgctgcctgcagaaccagtgagtgctgttttcaggacccgccatatccggatgcagactcaggctcggcctcgggccctagggacctgagatgctatcggatatccagtgatcgttacgagtgctcctggcagtatgagggtcccacagctggggtcagccacttcctgcggtgttgccttagctccgggcgctgctgctacttcgccgccggctcagccaccaggctgcagttctccgaccaggctggggtgtctgtgctgtacactgtcacactctgggtggaatcctgggccaggaaccagacagagaagtctcctgaggtgaccctgcagctctacaactcagttaaatatgagcctcctctgggagacatcaaggtgtccaagttggccgggcagctgcgtatggagtgggagaccccggataaccaggttggtgctgaggtgcagttccggcaccggacacccagcagcccatggaagttgggcgactgcggacctcaggatgatgatactgagtcctgcctctgccccctggagatgaatgtggcccaggaattccagctccgacgacggcagctggggagccaaggaagttcctggagcaagtggagcagccccgtgtgcgttccccctgaaaaccccccacagcctcaggtgagattctcggtggagcagctgggccaggatgggaggaggcggctgaccctgaaagagcagccaacccagctggagcttccagaaggctgtcaagggctggcgcctggcacggaggtcacttaccgactacagctccacatgctgtcctgcccgtgtaaggccaaggccaccaggaccctgcacctggggaagatgccctatctctcgggtgctgcctacaacgtggctgtcatctcctcgaaccaatttggtcctggcctgaaccagacgtggcacattcctgccgacacccacacagaaccagtggctctgaatatcagcgtcggaaccaacgggaccaccatgtattggccagcccgggctcagagcatgacgtattgcattgaatggcagcctgtgggccaggacgggggccttgccacctgcagcctgactgcgccgcaagacccggatccggctggaatggcaacctacagctggagtcgagagtctggggcaatggggcaggaaaagtgttactacattaccatctttgcctctgcgcaccccgagaagctcaccttgtggtctacggtcctgtccacctaccactttgggggcaatgcctcagcagctgggacaccgcaccacgtctcggtgaagaatcatagcttggactctgtgtctgtggactgggcaccatccctgctgagcacctgtcccggcgtcctaaaggagtatgttgtccgctgccgagatgaagacagcaaacaggtgtcagagcatcccgtgcagcccacagagacccaagttaccctcagtggcctgcgggctggtgtagcctacacggtgcaggtgcgagcagacacagcgtggctgaggggtgtctggagccagccccagcgcttcagcatcgaagtgcaggtttctgattggctcatcttcttcgcctccctggggagcttcctgagcatccttctcgtgggcgtccttggctaccttggcctgaacagggccgcacggcacctgtgcccgccgctgcccacaccctgtgccagctccgccattgagttccctggagggaaggagacttggcagtggatcaacccagtggacttccaggaagaggcatccctgcaggaggccctggtggtagagatgtcctgggacaaaggcgagaggactgagcctctcgagaagacagagctacctgagggtgcccctgagctggccctggatacagagttgtccttggaggatggagacaggtgcaaggccaagatgtgatcgttgaggctcagagagggtgagtgactcgcccgaggctacgtagcacacacaggagtcacatttggacccaaataacccagagctcctccaggctccagtgcacctgcctcctctctgccccgtgcctgttgccacccatcctgcgggggaaccctagatgctgccatgaaatggaagctgctgcaccctgctgggcctggcatccgtggggcaggagcagaccctgccatttacctgttctggcgtagaatggactgggaatgggggcaaggggggctcagatggatccctggaccctgggctgggcatccacccccaggagcactggatggggagtctggactcaagggctccctgcagcattgcggggtcttgtagcttggaggatccaggcatatagggaagggggctgtaaactttgtgggaaaaatgacggtcctcccatcccaccccccaccccaccctcacccccctataaaatgggggtggtgataatgaccttacacagctgttcaaaatcatcgtaaatgagcctcctcttgggtatttttttcctgtttgaagcttgaatgtcctgctcaaaatctcaaaacacgagccttggaattca

SEQ ID NO: 11433 - protein, 702 aa, Homo sapiens
MFVGLFSLLSFNVFRSGDGVAEPRRWQRGSPGAVGLYVDPMEPLVTWVVPLLFLFLLSRQGAACRTSECCFQDPPYPDADSGSASGPRDLRCYRISSDRYECSWQYEGPTAGVSHFLRCCLSSGRCCYFAAGSATRLQFSDQAGVSVLYTVTLWVESWARNQTEKSPEVTLQLYNSVKYEPPLGDIKVSKLAGQLRMEWETPDNQVGAEVQFRHRTPSSPWKLGDCGPQDDDTESCLCPLEMNVAQEFQLRRRQLGSQGSSWSKWSSPVCVPPENPPQPQVRFSVEQLGQDGRRRLTLKEQPTQLELPEGCQGLAPGTEVTYRLQLHMLSCPCKAKATRTLHLGKMPYLSGAAYNVAVISSNQFGPGLNQTWHIPADTHTEPVALNISVGTNGTTMYWPARAQSMTYCIEWQPVGQDGGLATCSLTAPQDPDPAGMATYSWSRESGAMGQEKCYYITIFASAHPEKLTLWSTVLSTYHFGGNASAAGTPHHVSVKNHSLDSVSVDWAPSLLSTCPGVLKEYVVRCRDEDSKQVSEHPVQPTETQVTLSGLRAGVAYTVQVRADTAWLRGVWSQPQRFSIEVQVSDWLIFFASLGSFLSILLVGVLGYLGLNRAARHLCPPLPTPCASSAIEFPGGKETWQWINPVDFQEEASLQEALVVEMSWDKGERTEPLEKTELPEGAPELALDTELSLEDGDRCKAKM

SEQ ID NO: 11434 - DNA, 2067 bp, Homo sapiens
gtgagtcccttatcacaactgatcactccgtggggtcaccgctgctctggcgtctacctcccccaacaggttggggtttctaggagggcagctccagaggttgcagaacactccgctgcctctccagagccaggcacacagcaggcgctccataaatgttcgttggtcttttctccttgctcagcttcaatgtgttccggagtggggacggggtggctgaacctcgcaggtggcagagaggctcccctggggctgtggggctctacgtggatccgatggagccgctggtgacctgggtggtccccctcctcttcctcttcctgctgtccaggcagggcgctgcctgcagaaccagtgagtgctgttttcaggacccgccatatccggatgcagactcaggctcggcctcgggccctagggacctgagatgctatcggatatccagtgatcgttacgagtgctcctggcagtatgagggtcccacagctggggtcagccacttcctgcggtgttgccttagctccgggcgctgctgctacttcgccgccggctcagccaccaggctgcagttctccgaccaggctggggtgtctgtgctgtacactgtcacactctgggtggaatcctgggccaggaaccagacagagaagtctcctgaggtgaccctgcagctctacaactcagttaaatatgagcctcctctgggagacatcaaggtgtccaagttggccgggcagctgcgtatggagtgggagaccccggataaccaggttggtgctgaggtgcagttccggcaccggacacccagcagcccatggaagttgggcgactgcggacctcaggatgatgatactgagtcctgcctctgccccctggagatgaatgtggcccaggaattccagctccgacgacggcagctggggagccaaggaagttcctggagcaagtggagcagccccgtgtgcgttccccctgaaaaccccccacagcctcaggtgagattctcggtggagcagctgggccaggatgggaggaggcggctgaccctgaaagagcagccaacccagctggagcttccagaaggctgtcaagggctggcgcctggcacggaggtcacttaccgactacagctccacatgctgtcctgcccgtgtaaggccaaggccaccaggaccctgcacctggggaagatgccctatctctcgggtgctgcctacaacgtggctgtcatctcctcgaaccaatttggtcctggcctgaaccagacgtggcacattcctgccgacacccacacagatggcatgatctcagctcactgcaacctccgccttccagattcaagagattctcctgcttcagcctcccgagtagctgggattacaggcatctgccaccatacccggctaattttgtatttttagtagagacggggtttcaccacgttggccaggctggtctcgaactcctgacctcaagtgatccacctgccttggcctcccaaagtgttgggattataggcgtgagccaccatgcccagcctaatttttgtatttttagtagagatggagtttcaccatgttgcccaggctggtctcaaactcctgccctcaggtgatccacccacctcagcctctcaaagtgctgggattacaggtgtgagccactgtggccgacctactatttttattatttttgagctaggttctcagtctgttggcagactggagtgcaatcatggctcactgcagccttgaactcccagactcaagtgatccttccacctcagcctctggagtagctgggactacagacatgcaccaccacacctggttaattttttatttttattttttgtagagacaggtgtctctctacgttgcccaggctggtctcgaactcctgggctcaagtgatccacccatctccacctcccaaagtgctaggattacaggcgtgagccaccgtacccagcctggtcccatatcatagtgaaatggtgcctgtaaagctctcagcattggcttggcacatgcagttggtactcaataaacggctgttgctatcccc

SEQ ID NO: 11435 - protein, 421 aa, Homo sapiens
MFVGLFSLLSFNVFRSGDGVAEPRRWQRGSPGAVGLYVDPMEPLVTWVVPLLFLFLLSRQGAACRTSECCFQDPPYPDADSGSASGPRDLRCYRISSDRYECSWQYEGPTAGVSHFLRCCLSSGRCCYFAAGSATRLQFSDQAGVSVLYTVTLWVESWARNQTEKSPEVTLQLYNSVKYEPPLGDIKVSKLAGQLRMEWETPDNQVGAEVQFRHRTPSSPWKLGDCGPQDDDTESCLCPLEMNVAQEFQLRRRQLGSQGSSWSKWSSPVCVPPENPPQPQVRFSVEQLGQDGRRRLTLKEQPTQLELPEGCQGLAPGTEVTYRLQLHMLSCPCKAKATRTLHLGKMPYLSGAAYNVAVISSNQFGPGLNQTWHIPADTHTDGMISAHCNLRLPDSRDSPASASRVAGITGICHHTRLILYF

SEQ ID NO: 11436 - DNA, 5852 bp, Homo sapiens
gctgccgcagcgggaaccgcaagagcttggtggtaggaacgccctccccgaccctctcccggcccctgtcgccattgtcggtcccaacggcaggcagcagccccttggatagtcctcggaatttctcggctgcctctgccctaaatttcccctttgcccggagggcagacggcagaagatggtccctcgcgtctctcccatcttccggctatggaaccaacacacccagctccaccctctcgtcaagctcatcctcccgggaacgtctccaccagcttcccttccagccgacgccggacgagctgcacttcctgtccaagcacttccgcagctcagagaatgtgcttgatgaggaaggcggccggtcaccccgcctccgaccccgctctcgcagtctcagcccgggccgtgcaacggggaccttcgacaatgagattgtcatgatgaatcacgtgtaccgggagaggttccccaaggccacagcacagatggagggccgtctgcaggagttcctgacggcctacgcgcccggcgcccggctggcgctggctgatggcgtcttgggcttcatccaccaccagatcgtcgagctggcccgagactgcttggccaagtctggcgagaacctcgtcacctcccgctacttcctagagatgcaggagaagctggagcggcttctgcaggatgcccatgagcgttcggacagtgaggaggtcagcttcatcgtccagcttgtccggaaactgctgatcatcatctcacggccagctcggctgctggagtgtctggagtttgaccctgaggaattttaccacctgctggaggcggctgagggccatgcgcgggagggccaaggcattaagactgaccttccacagtacatcattgggcagctgggcctggccaaggaccccctggaggagatggtgccactgagtcacctcgaagaagaacagcccccagcacctgagtccccagagagccgcgccctggtcggccagtcacggaggaagccatgcgaaagcgactttgagaccatcaaactcattagcaacggagcctatggggccgtctacctggtgcggcaccgtgacacacggcagcgctttgccatcaagaagatcaacaaacagaacttgatcctgcgtaaccagatccagcaggtctttgtggagcgtgacattctcacctttgccgagaacccctttgtggtcagcatgttctgctcctttgagacccggcgccacctatgtatggtcatggaatacgtggaaggcggcgactgcgccacgctcctgaagaacatgggcccgctgcccgtggacatggcccgcctgtacttcgccgagacggtgttggcgctggagtacctgcataactatggcatcgtgcaccgtgacctcaaaccagacaatctgctcatcacctcgcttggccacatcaagctcacggacttcggcctgtccaagatcggcctcatgagcatggccaccaacctctatgagggccacatcgagaaggacgcccgagagttcatcgacaagcaggtgtgtgggacgccggagtacatagcccccgaggtgatcttccgccagggctatgggaagccagtggactggtgggccatgggcgtcgtcctctatgagtttctggtgggctgcgtgcctttctttggagatacccccgaggaactcttcggtcaggtggtcagcgatgagatcatgtggccagagggagatgaggcccttccagcagacgcccaggacctcatcaccaggttgctccggcagagcccgctggaccgtctgggcactggtggcacccacgaagtgaagcagcacccctttttcctggccctggactgggcagggcttctccgacacaaagccgagttcgtgccccagctcgaagctgaggatgataccagctactttgacacacgttcggaacgttaccgccatctgggctccgaggacgacgagaccaatgatgaagaatcgtccacagagatcccccagttctcctcctgctcccaccggttcagcaaggtctacagcagctctgagttcctggccgtccagcccactcctaccttcgctgaaaggagcttcagtgaagaccgggaggaggggtgggagcgcagcgaagtggactatggccgccggctgagtgctgacatccggctgaggtcctggacatcctctggatcctcctgtcagtcatcttcgtcccagcccgagcggggtcccagcccatctctcctgaataccatcagcctggacacaatgcccaagtttgccttctcatcagaggatgagggggtaggcccaggccctgcaggccccaagaggcccgtcttcattctaggggagcctgaccccccaccagcggccaccccagtgatgcccaagccctcgagcctttctgccgacacagctgctctcagccacgcccgcctacggagcaatagcatcggcgcccgacactccacaccaaggcctctggatgccggccggggccgccgccttgggggcccaagagacccagcccctgagaagtccagagcctcctccagcggtggcagtggtggcggcagtgggggccgcgtgcccaagtcagcctctgtctctgccctgtccctcatcatcacggcagatgatggcagcggcggccccctcatgagccccctttccccgcgctctctgtcctcgaacccgtcgtcccgtgactcttcgccgagccgagacccgtcccccgtgtgtggcagcctgcggccccccatcgttatccacagctctggcaagaagtacggcttcagcctgcgggcgatccgcgtctacatgggtgatagcgacgtctacactgtgcaccacgtcgtctggagtgtggaggacggaagccccgcccaggaggcgggcctgcgggctggggacctcatcacccacatcaacggggagtcagtgctggggctggtgcacatggacgtcgtggagctgctgctgaagagcggcaacaagatatccctgcggaccacagccctggagaacacctccatcaaggtgggccccgcccggaagaatgtggccaagggccgcatggcacgcaggagcaagaggagccgtcggcgggagacccaggatcggtgcgcggcagtgaccaccagggagcggcggaagtcacttttcaagaagatctccaagcagacctccgtgctgcacaccagccgcagcttctcctccggactccaccactcactgtcatccagtgagagcctccccggctcgcccacccacagcctctcccccagccccaccactccctgccgaagcccagcccctgatgtcccagcagataccactgcatccccacccagcgcatccccgagctccagcagccccgcctccccagctgctgctggccacacccgccccagctccctgcacggcctggctgccaagcttgggccaccccgccccaagactggccgccgcaagtccaccagcagcatcccgccctccccgctggcctgcccgcccatctccgcgcccccaccccgctcgccctcgcccctgcccgggcacccgcccgcacctgcccgatccccgcggctgcgccggggccagtcagctgacaagctgggcacaggggagcggctggatggggaggcggggcggcgcactcgtgggccagaggccgagctcgtggtcatgcggcggctgcacctgtccgagcgccgagactccttcaagaagcaggaggccgtgcaggaggttagcttcgatgagccgcaggaggaggccactgggctgcccacctcagtgccacagatcgccgtggagggcgaggaagccgtgccagtagctctcgggcccaccggaagagactgatcccctgccaggtctctccctggcatcaaagttacgcgttttcttgtgcaatgttttttccgtaaagtcatgcctggatggggactgagccaccagcctgacacccagaaggcgagaagccatctcggtccttgctggaaggtggagacatcgcttgtgttctggtgtcaatcggggctggatggggcaagaatgggggacaagggtggctttgtaaatagcagcaaatccctgcaactaatttattactttttttttctttttttttttttttttttgagacagagtctcactctgttgcccgggctggagtgcagcggcgtgatctcagctcactgcaacctccgcctcccaagttcaagcgattgtcctgcctcagcttcccaagtggctgggattacaggcgcccaccactatgcccagctaattttttgtatttttagtacagacggggtttcaccatgttggtcaggctggtctcgaactcctgacctcatgatttgcctgcctttgcctcccaaagtgctgggattacaggcgtgagccactgggcccagcctaatttattactttttataagcgatagccgtactgagccgccccctgaaggcggctgccaggtcttgccccaggcacctgggactctgtttgcaggccctgccctctgggctgagaaggatgcactttggacaagtcatctgtgtttgtgttttccagtttttctgtactttttaagtgttttgtgttacctggtctcattcccctccccacacctacccatttgaggggatggagttgaagtcacctggtcacctgtaccggcccagttcggctacaacctggagtgtccgtaaacaattcctctcacccacaaaacaatgtaatcccagcgatggactggattctgaaggccacttcccaccatcatagctgccatgcccaggcagtgcctgctctatatatagagtctgcctccaatcctgctggcttcagcctggagaagggatatgggagctggagctttgatggatgaataggtgttcaccggatctgggcagaggggtcatccgctccccaggtgggcactgataaaggaaggtacaggcctcacctggaactgccaaggcagcctccagaaatgctcggctgtctcggggcacgctccagtatgccagtcctgcgggattacgtccagctacttccagaaacactcagtgtcccctcccctcaggctctgccttggcctggccttgtccagtctaccctggacaagatgccgtgtgtttgaggcccagcagagtaagcccttggccgtgatgtgtctgaaacacctgttaggggttccctccatatgtcagagcctctctgggatgaagttcaagccagaaaacccagtcgaggctcaagtttgaatttcagcttcactgtgtggctctgggaaaatggctttcccactctgtgcctcagtttccttgtgtttacaagactaatcccattgactgtttattaagcacctactgtgtgccaagcgcttttacgtggcttctccctcagccagccttgagaaggctggaggtggtgtcatcacctccattttacagacaaagcagctgagaccccagcgaggggcggagacctgtcccacgatcacccagcaggagtcgtggcagaacggagcatcagccagaccctgttgtgggcgttgtcatcaagggagcttgaatggagggtctggtgtcagatacagccgactccagccccagctcatcccccatgatgctgtgtgacccactgggcactctggtgagggagctttccagacatcaacagcccactctgcttccctttctgagtcccctgtccagcactgcctagtgttggagggtagaccaaggctgtgcatgattcaccccctccttccatcctggagctggcagtgaataaaagcccgtatttacaaagatg

SEQ ID NO: 11437 - protein, 1148 aa, Homo sapiens
MMNHVYRERFPKATAQMEGRLQEFLTAYAPGARLALADGVLGFIHHQIVELARDCLAKSGENLVTSRYFLEMQEKLERLLQDAHERSDSEEVSFIVQLVRKLLIIISRPARLLECLEFDPEEFYHLLEAAEGHAREGQGIKTDLPQYIIGQLGLAKDPLEEMVPLSHLEEEQPPAPESPESRALVGQSRRKPCESDFETIKLISNGAYGAVYLVRHRDTRQRFAIKKINKQNLILRNQIQQVFVERDILTFAENPFVVSMFCSFETRRHLCMVMEYVEGGDCATLLKNMGPLPVDMARLYFAETVLALEYLHNYGIVHRDLKPDNLLITSLGHIKLTDFGLSKIGLMSMATNLYEGHIEKDAREFIDKQVCGTPEYIAPEVIFRQGYGKPVDWWAMGVVLYEFLVGCVPFFGDTPEELFGQVVSDEIMWPEGDEALPADAQDLITRLLRQSPLDRLGTGGTHEVKQHPFFLALDWAGLLRHKAEFVPQLEAEDDTSYFDTRSERYRHLGSEDDETNDEESSTEIPQFSSCSHRFSKVYSSSEFLAVQPTPTFAERSFSEDREEGWERSEVDYGRRLSADIRLRSWTSSGSSCQSSSSQPERGPSPSLLNTISLDTMPKFAFSSEDEGVGPGPAGPKRPVFILGEPDPPPAATPVMPKPSSLSADTAALSHARLRSNSIGARHSTPRPLDAGRGRRLGGPRDPAPEKSRASSSGGSGGGSGGRVPKSASVSALSLIITADDGSGGPLMSPLSPRSLSSNPSSRDSSPSRDPSPVCGSLRPPIVIHSSGKKYGFSLRAIRVYMGDSDVYTVHHVVWSVEDGSPAQEAGLRAGDLITHINGESVLGLVHMDVVELLLKSGNKISLRTTALENTSIKVGPARKNVAKGRMARRSKRSRRRETQDRCAAVTTRERRKSLFKKISKQTSVLHTSRSFSSGLHHSLSSSESLPGSPTHSLSPSPTTPCRSPAPDVPADTTASPPSASPSSSSPASPAAAGHTRPSSLHGLAAKLGPPRPKTGRRKSTSSIPPSPLACPPISAPPPRSPSPLPGHPPAPARSPRLRRGQSADKLGTGERLDGEAGRRTRGPEAELVVMRRLHLSERRDSFKKQEAVQEVSFDEPQEEATGLPTSVPQIAVEGEEAVPVALGPTGRD

SEQ ID NO: 11438 - DNA, 435 bp, Homo sapiens
gcccctccctgggctggtgtggaggcccaagttgtggctcctccttcaccccagccctgaccctgcctgagcctagcctctgattcttgtccctcaaccctggctcagatcccccaacatcctcccctggggttggtctcaggtcccatatcacaagccagctgtcttcctttcagcccgggccgtgcaacggggaccttcgacaatgagattgtcatgatgaatcacgtgtaccgggagaggttccccaaggccacagcacagatggagggccgtctgcaggagttcctgacggcctacgcgcccggcgcccggctggcgctggctgatggcgtcttgggcttcatccaccaccagatcgtcgagctggcccgagactgcttggccaagtctggcgagaacctcgtcacctcccgctacttcctagagatgcag

SEQ ID NO: 11439 - protein, 72 aa, Homo sapiens
MMNHVYRERFPKATAQMEGRLQEFLTAYAPGARLALADGVLGFIHHQIVELARDCLAKSGENLVTSRYFLEM

SEQ ID NO: 11440 - DNA, 463 bp, Homo sapiens
cactccacaccaaggcctctggatgccggccggggccgccgccttgggggcccaagagacccagcccctgagaagtccagagcctcctccattttacagacaaagcagctgagaccccagcgaggggcggagacctgtcccacgatcacccagcaggagtcgtggcagaacggagcatcagccagaccctgttgtgggcgttgtcatcaagggagcttgaatggagggtctggtgtcagatacagccgactccagccccagctcatcccccatgatgctgtgtgacccactgggcactctggtgagggagctttccagacatcaacagcccactctgcttccctttctgagtcccctgtccagcactgcctagtgttggagggtagaccaaggctgtgcatgattcaccccctccttccatcctggagctggcagtgaataaaagcccgtatttacaaagatg

SEQ ID NO: 11441 - protein, 50 aa, Homo sapiens
MEGLVSDTADSSPSSSPMMLCDPLGTLVRELSRHQQPTLLPFLSPLSSTA

SEQ ID NO: 11442 - DNA, 1222 bp, Homo sapiens
tgggcactgagcacattcggttatttccagaaacgctccgcggtcttggggatcagcctcagttgtgccagtgcggccgtagagagtgttcggccatttccgaaagcgctcgggcgtctctaagcccagccgagcccagtctcggatccctcgccgacccgattgcactcggctacctctggaaacgctcggctgtctcgggggcaccctctagtccaccagtcccgcgggattacgttcggctacttccggaaacactcgggtgcccccttacctcaggctccgcctcggcctcggttcatccgcccggctcgaatgcgctcgggcatttccgccgggggcgggccaggccgctcggaaccgtggcggcggcggaggcggggatcccgcggctgcggcgacggtggccgcggtggagccacggggcgggcttggcttggtgtgacggcggctgcggcggcggtggcggccgcgaccaggtcggcgtcctcagctggccgagcatggtggcagcctgcacccttggctcccttgtctggtgcagccagcagagccgccagccttgggcgcccatggccctccgtgtgagggcgtgagcggcctgccccagcctcacctgctgatggaggactcaatggcccagtgacctgacaccacaccaccaactccctcccaccagctgacgaatggtggacccagtgacgagtggcccttgtaagggtcatggaataatttgaagcgaggcatgagcggcccctgtggtcgcctgtgactgctggagatagaggtcccagcaccccaagccaacccagcggaccctcccagccctgcttcaaccaatggggccagtggggctccaagcagccacctaaccatccagaccccaccccactcacgcggccatggcgggccctgagggcttccagtaccgcgctctgtacccgttccgccgggagcggccggaggacctggagctgctgcccggcgacgtgctggtagtgagccgggcggccttgcaggcgctgggcgtggccgagggtggcgagcgctgcccacagagcgtgggctggatgcccggcctcaacgagcgcacacggcagcgaggtgacttccctggcacctatgtggagttcctggggcccgtggccctggcccggcccggccctcgcccacggggcccccgcccactgcccgccaggccccgtgatggggcccctgagcc

SEQ ID NO: 11443 - protein, 90 aa, Homo sapiens
MRSGISAGGGPGRSEPWRRRRRGSRGCGDGGRGGATGRAWLGVTAAAAAVAAATRSASSAGRAWWQPAPLAPLSGAASRAASLGRPWPSV

SEQ ID NO: 11444 - DNA, 740 bp, Homo sapiens
gacggtcggggcagaatggggagagactccccgcgtccaagataccggactggagccgaggccccaaatgaagggaggccctgcctggaatggggcttcgaatagtaccgaggggcgcccaggtcggcgtcctcagctggccgagcatggtggcagcctgcacccttggctcccttgtctggtgcagccagcagagccgccagccttgggcgcccatggccctccgtgtgagggcgtgagcggcctgccccagcctcacctgctgatggaggactcaatggcccagtgacctgacaccacaccaccaactccctcccaccagctgacgaatggtggacccagtgacgagtggcccttgtaagggtcatggaataatttgaagcgaggcatgagcggcccctgtggtcgcctgtgactgctggagatagaggtcccagcaccccaagccaacccagcggaccctcccagccctgcttcaaccaatggggccagtggggctccaagcagccacctaaccatccagaccccaccccactcacgcggccatggcgggccctgagggcttccagtaccgcgctctgtacccgttccgccgggagcggccggaggacctggagctgctgcccggcgacgtgctggtagtgagccgggcggccttgcaggcgctgggcgtggccgagggtggcgagcgctgcccacagagcgtgggctggatgcccggcctcaacgagcgcacacgg

SEQ ID NO: 11445 - protein, 73 aa, Homo sapiens
MKGGPAWNGASNSTEGRPGRRPQLAEHGGSLHPWLPCLVQPAEPPALGAHGPPCEGVSGLPQPHLLMEDSMAQ

SEQ ID NO: 11446 - DNA, 3899 bp, Homo sapiens
aggtcggcgtcctcagctggccgagcatggtggcagcctgcacccttggctcccttgtctggtgcagccagcagagccgccagccttgggcgcccatggccctccgtgtgagggcgtgagcggcctgccccagcctcacctgctgatggaggactcaatggcccagtgacctgacaccacaccaccaactccctcccaccagctgacgaatggtggacccagtgacgagtggcccttgtaagggtcatggaataatttgaagcgaggcatgagcggcccctgtggtcgcctgtgactgctggagatagaggtcccagcaccccaagccaacccagcggaccctcccagccctgcttcaaccaatggggccagtggggctccaagcagccacctaaccatccagaccccaccccactcacgcggccatggcgggccctgagggcttccagtaccgcgctctgtacccgttccgccgggagcggccggaggacctggagctgctgcccggcgacgtgctggtagtgagccgggcggccttgcaggcgctgggcgtggccgagggtggcgagcgctgcccacagagcgtgggctggatgcccggcctcaacgagcgcacacggcagcgaggtgacttccctggcacctatgtggagttcctggggcccgtggccctggcccggcccggccctcgcccacggggcccccgcccactgcccgccaggccccgtgatggggcccctgagccaggcctcacactccccgacttgcccgagcagttctccccacctgatgtggctccccctcttctggtgaagcttgtggaggccattgaaaggacagggctggacagcgaatctcactaccgcccggagctgcccgcaccgcgtacagactggtccctgagcgacgtggatcagtgggacacggcagccctggctgacggcattaagagcttcctgctggcactgcccgcgccgctcgtgacccccgaggcctcggccgaggcgcgccgggccctgcgggaggccgcggggcccgtggggccggcgctggagccaccgacgctgccgctgcaccgcgcgctcacgctgcgcttcctgctccagcacctgggccgcgtggccagccgcgccccggccctgggtcccgcggtccgggccctgggcgccacctttgggccgctgctgctgcgcgcgccgccgccgccgtcctcgccgccgccagggggcgctcccgacgggagtgagcccagccctgacttcccggcgctgctggtggagaagctgcttcaggaacacttggaagagcaggaggttgcgcccccagcgctgccgcctaaaccccccaaggcaaagccggcctccacagtcctggccaatggagggagcccaccctccctgcaggatgctgagtggtactggggggacatttcaagggaggaggtgaacgagaaactccgggacactcccgatggcaccttcctagtccgagatgcttctagcaagatccagggcgagtacacgctgaccctcaggaaaggcgggaacaataagctgatcaaggtcttccaccgagatgggcactatggcttctcagagccactcaccttctgctccgttgtggacctcatcaatcactaccgccacgagtctctggcccagtacaatgccaagctggacacacggctcctctaccctgtgtccaaataccagcaggaccagattgtcaaggaggacagcgtggaggcagtgggcgcccagcttaaggtctatcaccagcagtaccaggacaagagccgcgagtatgaccagctttatgaagagtacacacggacctcccagggccttttggggagtcccaggaggtgctgagctgcgccccctcctccaggagctgcagatgaagcgtactgcaattgaggccttcaatgagactatcaagatctttgaagagcagggccagactcaagagaaatgcagcaaggaatacctggagcgcttccggcgtgagggcaacgagaaagagatgcaaaggatcctgctgaactccgagcggctcaagtcccgcattgccgagatccatgagagccgcacgaagctggagcagcagctgcgggcccaggcctcggacaacagagagatcgacaagcgcatgaacagcctcaagccggacctcatgcagctgcgcaagatccgagaccagtacctcgtgtggctcacccagaaaggcgcccggcagaagaaaatcaacgagtggctggggattaaaaatgagactgaggaccagtacgcactcatggaggacgaggacgatctcccgcaccacgaggaacgcacttggtacgtgggcaagatcaaccgcacgcaggcagaggagatgctgagtggcaagcgggatggcaccttcctcatccgcgagagcagccagcggggctgctacgcctgctccgtggtagtggacggcgacaccaagcactgcgtcatctaccgcacggccaccggcttcggcttcgcggagccctacaacctgtacgggtcgctgaaggagctggtgctgcactaccagcacgcctcgctggtgcagcacaacgacgcgctcaccgtcaccctggcgcacccagtgcgcgccccgggccccggcccgccgcctgccgcccgctgagcaccgaggacccgccccaagcagagccgcccctgggcccgtctgcgccggaggctgcggcggcgggagccacggaccagaccagccacatccaggggtcctcatttctccggctctggctcttgtttggggttctctcaccctctttctctttccttccctcccccattctccagatctccctctgtctccttttctctgtctttcttggcccctgtctctctccatgttgggggtcctaactcccccaccccatatctacgtgtcctccgggcattgccctctccatggctctggtcaccctgaccctctgccctgcccaccgcaggtcccccggggtcccggaagccccttctggctgcacctgccatgtttacagagggcccctgggctgcgcggccccagcctgggcaccctgatttttaagccatagacctggggtcagggcaggaaggaacttcactctgctgcttccgagaacctcggccgtgacattcggggccgggcgggacccgccccacagactccaacttcccctccaaaccccgaagtgaaacccgccaccgggttacccccacaagggggccgctgcgagaagttcacccacccccgaaaaaataattaaactcgcaggccaggcacggtggctcatgcctgtaatcccagcactttgggaggccaagacgggcggatcttttgaggtcgggagttggaggccagcctggccaaaatggcaaaaccccgcatctactaaaatacaaaaattagccgggcgtggtggcggccgcctgtaatcccagctacttgggaggctgaggcgtgagaatctcttgaacccaggagatggaggttgcagtgagcagagatcgtgccactgcactccagcctgggtaacagagggagactcctccgtctcaaaaaaataaataaataaacttgtgagctggccccaacccctcctaggaatcacagctccccgtactggtgccgccgcagtggccaagttgcgacactgcccacggcccctccctctgatgcagattcagggcttctcttcgatcatgttgggttttgattctgtttttccttgactgcaaaaccctctttcctctcctcttttgggacaagagccctggttttctacgctgcccttggccaccacactgcctgccccacgagctgggaggcaggttttgtacggtacgttgttattgatatgatataaaacatcaaacgtc

SEQ ID NO: 11447 - protein, 481 aa, Homo sapiens
MAGPEGFQYRALYPFRRERPEDLELLPGDVLVVSRAALQALGVAEGGERCPQSVGWMPGLNERTRQRGDFPGTYVEFLGPVALARPGPRPRGPRPLPARPRDGAPEPGLTLPDLPEQFSPPDVAPPLLVKLVEAIERTGLDSESHYRPELPAPRTDWSLSDVDQWDTAALADGIKSFLLALPAPLVTPEASAEARRALREAAGPVGPALEPPTLPLHRALTLRFLLQHLGRVASRAPALGPAVRALGATFGPLLLRAPPPPSSPPPGGAPDGSEPSPDFPALLVEKLLQEHLEEQEVAPPALPPKPPKAKPASTVLANGGSPPSLQDAEWYWGDISREEVNEKLRDTPDGTFLVRDASSKIQGEYTLTLRKGGNNKLIKVFHRDGHYGFSEPLTFCSVVDLINHYRHESLAQYNAKLDTRLLYPVSKYQQDQIVKEDSVEAVGAQLKVYHQQYQDKSREYDQLYEEYTRTSQGLLGSPRRC

SEQ ID NO: 11448 - DNA, 3850 bp, Homo sapiens
aggtcggcgtcctcagctggccgagcatggtggcagcctgcacccttggctcccttgtctggtgcagccagcagagccgccagccttgggcgcccatggccctccgtgtgagggcgtgagcggcctgccccagcctcacctgctgatggaggactcaatggcccagtgacctgacaccacaccaccaactccctcccaccagctgacgaatggtggacccagtgacgagtggcccttgtaagggtcatggaataatttgaagcgaggcatgagcggcccctgtggtcgcctgtgactgctggagatagaggtcccagcaccccaagccaacccagcggaccctcccagccctgcttcaaccaatggggccagtggggctccaagcagccacctaaccatccagaccccaccccactcacgcggccatggcgggccctgagggcttccagtaccgcgctctgtacccgttccgccgggagcggccggaggacctggagctgctgcccggcgacgtgctggtagtgagccgggcggccttgcaggcgctgggcgtggccgagggtggcgagcgctgcccacagagcgtgggctggatgcccggcctcaacgagcgcacacggcagcgaggtgacttccctggcacctatgtggagttcctggggcccgtggccctggcccggcccggccctcgcccacggggcccccgcccactgcccgccaggccccgtgatggggcccctgagccaggcctcacactccccgacttgcccgagcagttctccccacctgatgtggctccccctcttctggtgaagcttgtggaggccattgaaaggacagggctggacagcgaatctcactaccgcccggagctgcccgcaccgcgtacagactggtccctgagcgacgtggatcagtgggacacggcagccctggctgacggcattaagagcttcctgctggcactgcccgcgccgctcgtgacccccgaggcctcggccgaggcgcgccgggccctgcgggaggccgcggggcccgtggggccggcgctggagccaccgacgctgccgctgcaccgcgcgctcacgctgcgcttcctgctccagcacctgggccgcgtggccagccgcgccccggccctgggtcccgcggtccgggccctgggcgccacctttgggccgctgctgctgcgcgcgccgccgccgccgtcctcgccgccgccagggggcgctcccgacgggagtgagcccagccctgacttcccggcgctgctggtggagaagctgcttcaggaacacttggaagagcaggaggttgcgcccccagcgctgccgcctaaaccccccaaggcaaagccggcctccacagtcctggccaatggagggagcccaccctccctgcaggatgctgagtggtactggggggacatttcaagggaggaggtgaacgagaaactccgggacactcccgatggcaccttcctagtccgagatgcttctagcaagatccagggcgagtacacgctgaccctcaggaaaggcgggaacaataagctgatcaaggtcttccaccgagatgggcactatggcttctcagagccactcaccttctgctccgttgtggacctcatcaatcactaccgccacgagtctctggcccagtacaatgccaagctggacacacggctcctctaccctgtgtccaaataccagcaggaccagattgtcaaggaggacagcgtggaggcagtgggcgcccagcttaaggtctatcaccagcagtaccaggacaagagccgcgagtatgaccagctttatgaagagtacacacggacctcccaggagctgcagatgaagcgtactgcaattgaggccttcaatgagactatcaagatctttgaagagcagggccagactcaagagaaatgcagcaaggaatacctggagcgcttccggcgtgagggcaacgagaaagagatgcaaaggatcctgctgaactccgagcggctcaagtcccgcattgccgagatccatgagagccgcacgaagctggagcagcagctgcgggcccaggcctcggacaacagagagatcgacaagcgcatgaacagcctcaagccggacctcatgcagctgcgcaagatccgagaccagtacctcgtgtggctcacccagaaaggcgcccggcagaagaaaatcaacgagtggctggggattaaaaatgagactgaggaccagtacgcactcatggaggacgaggacgatctcccgcaccacgaggaacgcacttggtacgtgggcaagatcaaccgcacgcaggcagaggagatgctgagtggcaagcgggatggcaccttcctcatccgcgagagcagccagcggggctgctacgcctgctccgtggtagtggacggcgacaccaagcactgcgtcatctaccgcacggccaccggcttcggcttcgcggagccctacaacctgtacgggtcgctgaaggagctggtgctgcactaccagcacgcctcgctggtgcagcacaacgacgcgctcaccgtcaccctggcgcacccagtgcgcgccccgggccccggcccgccgcctgccgcccgctgagcaccgaggacccgccccaagcagagccgcccctgggcccgtctgcgccggaggctgcggcggcgggagccacggaccagaccagccacatccaggggtcctcatttctccggctctggctcttgtttggggttctctcaccctctttctctttccttccctcccccattctccagatctccctctgtctccttttctctgtctttcttggcccctgtctctctccatgttgggggtcctaactcccccaccccatatctacgtgtcctccgggcattgccctctccatggctctggtcaccctgaccctctgccctgcccaccgcaggtcccccggggtcccggaagccccttctggctgcacctgccatgtttacagagggcccctgggctgcgcggccccagcctgggcaccctgatttttaagccatagacctggggtcagggcaggaaggaacttcactctgctgcttccgagaacctcggccgtgacattcggggccgggcgggacccgccccacagactccaacttcccctccaaaccccgaagtgaaacccgccaccgggttacccccacaagggggccgctgcgagaagttcacccacccccgaaaaaataattaaactcgcaggccaggcacggtggctcatgcctgtaatcccagcactttgggaggccaagacgggcggatcttttgaggtcgggagttggaggccagcctggccaaaatggcaaaaccccgcatctactaaaatacaaaaattagccgggcgtggtggcggccgcctgtaatcccagctacttgggaggctgaggcgtgagaatctcttgaacccaggagatggaggttgcagtgagcagagatcgtgccactgcactccagcctgggtaacagagggagactcctccgtctcaaaaaaataaataaataaacttgtgagctggccccaacccctcctaggaatcacagctccccgtactggtgccgccgcagtggccaagttgcgacactgcccacggcccctccctctgatgcagattcagggcttctcttcgatcatgttgggttttgattctgtttttccttgactgcaaaaccctctttcctctcctcttttgggacaagagccctggttttctacgctgcccttggccaccacactgcctgccccacgagctgggaggcaggttttgtacggtacgttgttattgatatgatataaaacatcaaacgtc

SEQ ID NO: 11449 - protein, 728 aa, Homo sapiens
MAGPEGFQYRALYPFRRERPEDLELLPGDVLVVSRAALQALGVAEGGERCPQSVGWMPGLNERTRQRGDFPGTYVEFLGPVALARPGPRPRGPRPLPARPRDGAPEPGLTLPDLPEQFSPPDVAPPLLVKLVEAIERTGLDSESHYRPELPAPRTDWSLSDVDQWDTAALADGIKSFLLALPAPLVTPEASAEARRALREAAGPVGPALEPPTLPLHRALTLRFLLQHLGRVASRAPALGPAVRALGATFGPLLLRAPPPPSSPPPGGAPDGSEPSPDFPALLVEKLLQEHLEEQEVAPPALPPKPPKAKPASTVLANGGSPPSLQDAEWYWGDISREEVNEKLRDTPDGTFLVRDASSKIQGEYTLTLRKGGNNKLIKVFHRDGHYGFSEPLTFCSVVDLINHYRHESLAQYNAKLDTRLLYPVSKYQQDQIVKEDSVEAVGAQLKVYHQQYQDKSREYDQLYEEYTRTSQELQMKRTAIEAFNETIKIFEEQGQTQEKCSKEYLERFRREGNEKEMQRILLNSERLKSRIAEIHESRTKLEQQLRAQASDNREIDKRMNSLKPDLMQLRKIRDQYLVWLTQKGARQKKINEWLGIKNETEDQYALMEDEDDLPHHEERTWYVGKINRTQAEEMLSGKRDGTFLIRESSQRGCYACSVVVDGDTKHCVIYRTATGFGFAEPYNLYGSLKELVLHYQHASLVQHNDALTVTLAHPVRAPGPGPPPAAR

SEQ ID NO: 11450 - DNA, 416 bp, Homo sapiens
tgccgcctaaaccccccaaggcaaagccggcctccacagtcctggccaatggagggagcccaccctccctgcaggatgctgagtggtactggggggacatttcaagggaggaggtgaacgagaaactccgggacactcccgatggcaccttcctagtccgagatgcttctagcaagatccagggcgagtacacgctgaccctcaggtgggggcctgtccctgcaaggataaccgggggtcacaggtcacagagaccgggagttcagaggggatagaacatgtgcggtttcaagaatggagggccaggcacggtggcttacacctgtaatcccagcactttgggaggctgaggctggcagaacacctgaggtcaggagtttaaaaccagcctggccaacatggtgaaaccccgtctc

SEQ ID NO: 11451 - protein, 36 aa, Homo sapiens
MEGQARWLTPVIPALWEAEAGRTPEVRSLKPAWPTW

SEQ ID NO: 11452 - DNA, 1083 bp, Homo sapiens
gtggaggagggagagacgctggcccgggacccgaggggcgtgggcatcgggaggcgggcccgggttaggggcgggaccgccgcctggttaaaggcgcttatttcccaggcagccgctgcagtcgccacacctttgcccctgctgcgatgaccctgtcgccacttctgctgttcctgccaccgctgctgctgctgctggacgtccccacggcggcggtgcaggcgtcccctctgcaagcgttagacttctttgggaatgggccaccagttaactacaagacaggcaatctatacctgcgggggcccctgaagaagtccaatgcaccgcttgtcaatgtgaccctctactatgaagcactgtgcggtggctgccgagccttcctgatccgggagctcttcccaacatggctgttggtcatggagatcctcaatgtcacgctggtgccctacggaaacgcacaggaacaaaatgtcagtggcaggtgggagttcaagtgccagcatggagaagaggagtgcaaattcaacaaggtggaggcctgcgtgttggatgaacttgacatggagctagccttcctgaccattgtctgcatggaagagtttgaggacatggagagaagtctgccactatgcctgcagctctacgccccagggctgtcgccagacactatcatggagtgtgcaatgggggaccgcggcatgcagctcatgcacgccaacgcccagcggacagatgctctccagccaccacacgagtatgtgccctgggtcaccgtcaatggggtaagaatctttttagccctcagcttgacactcatagtcccatggagtcagggatggacaagacagagggaccagagataaaggaacccaggcggaggttgcagtgagctgagatcatgccactgcactccagcctgggcaacaagagcaaaacttgatagctttgcatagggaaagagggcattgatgctggggttttgaaaggtgagtaggagtccatcaggcaaaaaaagtatgtattaattcgaagtattaaacatccctagccacccccattgggaaagatgtgccactgatttgc

SEQ ID NO: 11453 - protein, 238 aa, Homo sapiens
MTLSPLLLFLPPLLLLLDVPTAAVQASPLQALDFFGNGPPVNYKTGNLYLRGPLKKSNAPLVNVTLYYEALCGGCRAFLIRELFPTWLLVMEILNVTLVPYGNAQEQNVSGRWEFKCQHGEEECKFNKVEACVLDELDMELAFLTIVCMEEFEDMERSLPLCLQLYAPGLSPDTIMECAMGDRGMQLMHANAQRTDALQPPHEYVPWVTVNGVRIFLALSLTLIVPWSQGWTRQRDQR

SEQ ID NO: 11454 - DNA, 1112 bp, Homo sapiens
gtggaggagggagagacgctggcccgggacccgaggggcgtgggcatcgggaggcgggcccgggttaggggcgggaccgccgcctggttaaaggcgcttatttcccaggcagccgctgcagtcgccacacctttgcccctgctgcgatgaccctgtcgccacttctgctgttcctgccaccgctgctgctgctgctggacgtccccacggcggcggtgcaggcgtcccctctgcaagcgttagacttctttgggaatgggccaccagttaactacaagacaggcaatctatacctgcgggggcccctgaagaagtccaatgcaccgcttgtcaatgtgaccctctactatgaagcactgtgcggtggctgccgagccttcctgatccgggagctcttcccaacatggctgttggtcatggagatcctcaatgtcacgctggtgccctacggaaacgcacaggaacaaaatgtcagtggcaggtgggagttcaagtgccagcatggagaagaggagtgcaaattcaacaaggtggaggcctgcgtgttggatgaacttgacatggagctagccttcctgaccattgtctgcatggaagagtttgaggacatggagagaagtctgccactatgcctgcagctctacgccccagggctgtcgccagacactatcatggagtgtgcaatgggggaccgcggcatgcagctcatgcacgccaacgcccagcggacagatgctctccagccaccacacgagtatgtgccctgggtcaccgtcaatgggaaacccttggaagatcagacccagctccttacccttgtctgccagttgtaccagggcaagaagccggatgtctgcccttcctcaaccagctccctcaggagtgtttgcttcaagtgatggccggtgagctgcggagagctcatggaaggcgagtgggaacccggctgcctgcctttttttctgatccagaccctcggcacctgctacttaccaactggaaaattttatgcatcccatgaagcccagatacacaaaattccaccccatgatcaagaatcctgctccactaagaatggtgctaaagtaaaactagtttaataagcccttctg

SEQ ID NO: 11455 - protein, 250 aa, Homo sapiens; identical to SEQ ID NO: 1897

SEQ ID NO: 11456 - DNA, 921 bp, Homo sapiens
gcttatttcccaggcagccgctgcagtcgccacacctttgcccctgctgcgatgaccctgtcgccacttctgctgttcctgccaccgctgctgctgctgctggacgtccccacggcggcggtgcaggcgtcccctctgcaagcgttagacttctttgggaatgggccaccagttaactacaagacaggcaatctatacctgcgggggcccctgaagaagtccaatgcaccgcttgtcaatgtgaccctctactatgaagcactgtgcggtggctgccgagccttcctgatccgggagctcttcccaacatggctgttggtcatggagatcctcaatgtcacgctggtgccctacggaaacgcacaggaacaaaatgtcagtggcaggtgggagttcaagtgccagcatggagaagaggagtgcaaattcaacaaggtggagtgcctgcagctctacgccccagggctgtcgccagacactatcatggagtgtgcaatgggggaccgcggcatgcagctcatgcacgccaacgcccagcggacagatgctctccagccaccacacgagtatgtgccctgggtcaccgtcaatgggaaacccttggaagatcagacccagctccttacccttgtctgccagttgtaccagggcaagaagccggatgtctgcccttcctcaaccagctccctcaggagtgtttgcttcaagtgatggccggtgagctgcggagagctcatggaaggcgagtgggaacccggctgcctgcctttttttctgatccagaccctcggcacctgctacttaccaactggaaaattttatgcatcccatgaagcccagatacacaaaattccaccccatgatcaagaatcctgctccactaagaatggtgctaaagtaaaactagtttaataagccctt

SEQ ID NO: 11457 - protein, 219 aa, Homo sapiens
MTLSPLLLFLPPLLLLLDVPTAAVQASPLQALDFFGNGPPVNYKTGNLYLRGPLKKSNAPLVNVTLYYEALCGGCRAFLIRELFPTWLLVMEILNVTLVPYGNAQEQNVSGRWEFKCQHGEEECKFNKVECLQLYAPGLSPDTIMECAMGDRGMQLMHANAQRTDALQPPHEYVPWVTVNGKPLEDQTQLLTLVCQLYQGKKPDVCPSSTSSLRSVCFK

SEQ ID NO: 11458 - DNA, 930 bp, Homo sapiens
atttcccaggcagccgctgcagtcgccacacctttgcccctgctgcgatgaccctgtcgccacttctgctgttcctgccaccgctgctgctgctgctggacgtccccacggcggcggtgcaggcgtcccctctgcaagcgttagacttctttgggaatgggccaccagttaactacaagacaggcaatctatacctgcgggggcccctgaagaagtccaatgcaccgcttgtcaatgtgaccctctactatgaagcactgtgcggtggctgccgagccttcctgatccgggagctcttcccaacatggctgttggtcatggagatcctcaatgtcacgctggtgccctacggaaacgcacagtgcaaattcaacaaggtggaggcctgcgtgttggatgaacttgacatggagctagccttcctgaccattgtctgcatggaagagtttgaggacatggagagaagtctgccactatgcctgcagctctacgccccagggctgtcgccagacactatcatggagtgtgcaatgggggaccgcggcatgcagctcatgcacgccaacgcccagcggacagatgctctccagccaccacacgagtatgtgccctgggtcaccgtcaatggggtaagaatctttttagccctcagcttgacactcatagtcccatggagtcagggatggacaagacagagggaccagagataaaggaacccaggcggaggttgcagtgagctgagatcatgccactgcactccagcctgggcaacaagagcaaaacttgatagctttgcatagggaaagagggcattgatgctggggttttgaaaggtgagtaggagtccatcaggcaaaaaaagtatgtattaattcgaagtattaaacatccctagccacccccattgggaaagatgtgccactgatttgc

SEQ ID NO: 11459 - protein, 220 aa, Homo sapiens
MTLSPLLLFLPPLLLLLDVPTAAVQASPLQALDFFGNGPPVNYKTGNLYLRGPLKKSNAPLVNVTLYYEALCGGCRAFLIRELFPTWLLVMEILNVTLVPYGNAQCKFNKVEACVLDELDMELAFLTIVCMEEFEDMERSLPLCLQLYAPGLSPDTIMECAMGDRGMQLMHANAQRTDALQPPHEYVPWVTVNGVRIFLALSLTLIVPWSQGWTRQRDQR

SEQ ID NO: 11460 - DNA, 548 bp, Homo sapiens
gctgcagtcgccacacctttgcccctgctgcgatgaccctgtcgccacttctgctgttcctgccaccgctgctgctgctgctggacgtccccacggcggcggtgcaggcgtcccctctgcaagcgttagacttctttgggaatgggccaccagttaactacaagacaggcaatctatacctgcgggggcccctgaagaagtccaatgcaccgcttgtcaataaacccttggaagatcagacccagctccttacccttgtctgccagttgtaccagggcaagaagccggatgtctgcccttcctcaaccagctccctcaggagtgtttgcttcaagtgatggccggtgagctgcggagagctcatggaaggcgagtgggaacccggctgcctgcctttttttctgatccagaccctcggcacctgctacttaccaactggaaaattttatgcatcccatgaagcccagatacacaaaattccaccccatgatcaagaatcctgctccactaagaatggtgctaaagtaaaactagtttaataagccctt

SEQ ID NO: 11461 - protein, 101 aa, Homo sapiens
MTLSPLLLFLPPLLLLLDVPTAAVQASPLQALDFFGNGPPVNYKTGNLYLRGPLKKSNAPLVNKPLEDQTQLLTLVCQLYQGKKPDVCPSSTSSLRSVCFK

SEQ ID NO: 11462 - DNA, 658 bp, Homo sapiens
gctgcagtcgccacacctttgcccctgctgcgatgaccctgtcgccacttctgctgttcctgccaccgctgctgctgctgctggacgtccccacggcggcggtgcaggcgtcccctctgcaagcgttagacttctttgggaatgggccaccagttaactacaagacaggcaatctatacctgcgggggcccctgaagaagtccaatgcaccgcttgtcaatgtgaccctctactatgaagcactgtgcggtggctgccctagccttcctgaccattgtctgcatggaagagtttgaggacatggagagaagtctgccactatgcctgcagctctacgccccagggctgtcgccagacactatcatggagtgtgcaatgggggaccgcggcatgcagctcatgcacgccttcctcaaccagctccctcaggagtgtttgcttcaagtgatggccggtgagctgcggagagctcatggaaggcgagtgggaacccggctgcctgcctttttttctgatccagaccctcggcacctgctacttaccaactggaaaattttatgcatcccatgaagcccagatacacaaaattccaccccatgatcaagaatcctgctccactaagaatggtgctaaagtaaaactagtttaataagccctt

SEQ ID NO: 11463 - protein, 111 aa, Homo sapiens
MKHCAVAALAFLTIVCMEEFEDMERSLPLCLQLYAPGLSPDTIMECAMGDRGMQLMHAFLNQLPQECLLQVMAGELRRAHGRRVGTRLPAFFSDPDPRHLLLTNWKILCIP

SEQ ID NO: 11464 - DNA, 2476 bp, Homo sapiens
gcagtcgccacacctttgcccctgctgcgatgaccctgtcgccacttctgctgttcctgccaccgctgctgctgctgctggacgtccccacggcggcggtgcaggcgtcccctctgcaagcgttagacttctttgggaatgggccaccagttaactacaaggtagggacggcgacagggcgggcaggctggagggaacaggcgccctgtcggggcacgcggctccttctttctccccagacttcacaggggaagaccagggccccgaggggacgctgtccctgccgggttcctggaaaaaccctgttcagttcccggcgctgcggccacactccctccgtgccgtttcgctttcgcatcccgcatctgagaggcgcagctgcctccacccgcctagtcccgcccaagggttcaatgagcgcctactgtgtacttttggggcaggagctggggtctccttttgtggcccagggcacaagttcagcagctggccaagggccgccggcatgcattcttgctgctacccttgatgcattcattccagccagggcagggctcgcgtgtctttgggacctattaggcagatgccctagaggctgagcgacttgctcaccgctccagcgacatgggccacccgccacccctcagctgaagccggaagtcagcacctattaggtgccgcctctattcagtcggacttggaaagggttcacgtggatcccttgctcagctcagaggcaaggtctccaggtgaagtgacaagaaatgagcatgggccaaggccggaggcggtggctcatgcctgtaatcccaacactttggaagtctgaggcaggcagatcacgaggtcaggagttcgagaccattctggcctacatggagaaaccctgtctctactaaaaatacaaaaattagctgggtgtggtggcatgtgcctataatcccagctactcaggaggctgaggcaggacaattgcttgaaccagggagtcgggtgttgcagtgagccgagatcgtgccgcagcacaccagcctagcgacagtgagactccatctcaaaaaaaaaaaaaaaagtctcaaagtcaagattccacctggcaagttctggaaggcgtgcaagatgaattgcgtatcacagccccctttctacaagactaccaagtggggttgagagaagtggggaactgcccagggctacacctgcctcccacgccttcctaatccacagacaggcaatctatacctgcgggggcccctgaagaagtccaatgcaccgcttgtcaatgtgaccctctactatgaagcactgtgcggtggctgccgagccttcctgatccgggagctcttcccaacatggctgttggtcatggagatcctcaatgtcacgctggtgccctacggaaacgcacaggaacaaaatgtcagtggcaggtgggagttcaagtgccagcatggagaagaggagtgcaaattcaacaaggtggaggcctgcgtgttggatgaacttgacatggagctagccttcctgaccattgtctgcatggaagagtttgaggacatggagagaagtctgccactatgcctgcagctctacgccccagggctgtcgccagacactatcatggagtgtgcaatgggggaccgcggcatgcagctcatgcacgccaacgcccagcggacagatgctctccagccaccacacgagtatgtgccctgggtcaccgtcaatggggtaagaatctttttagccctcagcttgacactcatagtcccatggagtcagggatggacaagacagagggaccagagataaaggaacccaggcggaggttgcagtgagctgagatcatgccactgcactccagcctgggcaacaagagcaaaacttgatagctttgcatagggaaagagggcattgatgctggggttttgaaaggtgagtaggagtccatcaggcaaaaaaagtatgtattaattcgaagtattaaacatccctagccacccccattgggaaagatgtgccactgatttgcgaggcgggaggcgggggccagacttgggaatatgtgcagccctttctgggctggaaccagggtgcatgggttggggtagctgctgggaatatgcgacccctgtcttgctttgtgcagaaacccttggaagatcagacccagctccttacccttgtctgccagttgtaccagggcaagaagccggatgtctgcccttcctcaaccagctccctcaggagtgtttgcttcaagtgatggccggtgagctgcggagagctcatggaaggcgagtgggaacccggctgcctgcctttttttctgatccagaccctcggcacctgctacttaccaactggaaaattttatgcatcccatgaagcccagatacacaaaattccaccccatgatcaagaatcctgctccactaagaatggtgctaaagtaaaactagtttaataagccctt

SEQ ID NO: 11465 - protein, 148 aa, Homo sapiens
MEILNVTLVPYGNAQEQNVSGRWEFKCQHGEEECKFNKVEACVLDELDMELAFLTIVCMEEFEDMERSLPLCLQLYAPGLSPDTIMECAMGDRGMQLMHANAQRTDALQPPHEYVPWVTVNGVRIFLALSLTLIVPWSQGWTRQRDQR

SEQ ID NO: 11466 - DNA, 541 bp, Homo sapiens
agccttcctgaccattgtctgcatggaagagtttgaggacatggagagaagtctgccactatgcctgcagctctacgccccagggctgtcgccagacactatcatggagtgtgcaatgggggaccgcggcatgcagctcatgcacgccaacgcccagcggacagatgctctccagccaccacacgagtatgtgccctgggtcaccgtcaatgggaaacccttggaagatcagacccagctccttacccttgtctgccagttgtaccagggcaagaagccggatgtctgcccttcctcaaccagctccctcaggagtgtttgcttcaagtgatggccggtgagctgcggagagctcatggaaggcgagtgggaacccggctgcctgcctttttttctgatccagaccctcggcacctgctacttaccaactggaaaattttatgcatcccatgaagcccagatacacaaaattccaccccatgatcaagaatcctgctccactaagaatggtgctaaagtaaaactagtttaataagccctt

SEQ ID NO: 11467 - protein, 130 aa, Homo sapiens
MPAALRPRAVARHYHGVCNGGPRHAAHARQRPADRCSPATTRVCALGHRQWETLGRSDPAPYPCLPVVPGQEAGCLPFLNQLPQECLLQVMAGELRRAHGRRVGTRLPAFFSDPDPRHLLLTNWKILCIP

SEQ ID NO: 11468 - DNA, 326 bp, Homo sapiens
gtggggagcagggggttgcctcagcttcctccccgttatctcaacggtcccgcccaccagccctgagccaagcctgtttcgtcactgagaagagggtacagttggcttcacagtgatgcgacaaagcccacaaacagcaggtgctcaatacatgcttgagtggaggcccctaaggcagggcttgggctgctcctgcctcctagctcccttggtttcatccctaagaccagacccactgcctctgaccctgcaggactagggtgtcactaggtgaggcctcttgggtgacccggatgtttgatgaatgaataaatgattggagccaa

SEQ ID NO: 11469 - protein, 47 aa, Homo sapiens
MRQSPQTAGAQYMLEWRPLRQGLGCSCLLAPLVSSLRPDPLPLTLQD

SEQ ID NO: 11470 - DNA, 1336 bp, Homo sapiens
gtcggcgcggcgaaagcagagcggcgcgccggttccttggttcctgagggcgatggcgcggggtggctggcgccggctacgccgcctgttatccgcggggcagcttctattccagggccgcgcgctgctcgtcactaacacgctgggctgcggcgcgctcatggcggccggtgatggcgtgcgccagtcctgggagatccgcgcccggcccggccaggttttcgacccacggcgctccgcgagcatgtttgcggtgggctgcagcatgggtcccttcctgcactactggtacttgtcgctggaccgcctattccctgcgtctggcctccgaggcttcccaaatgtcctcaagaaggtcctcgtggatcagctggtagcctctccattgctgggcgtctggtacttcttgggccttggctgcctggagggtcagacagtgggtgagagctgccaggagctgcgggagaagttctgggaattctacaaggcagactggtgcgtgtggcctgctgcgcagttcgtgaacttcctcttcgtgcccccccaatttcgagtcacctacatcaacggcctgacgctgggctgggacacgtacctgtcctacttgaagtaccggagcccagttcctctgacacccccaggctgtgtggccctggacacccgagcagactgaactgtctgcttcctggaccagatgcaagactgtctcctggcggaccaccccctctgacagaaggggaatgggctcctgcagcaagctcgggtcttgagccacgtcccagcaccacttcagctccggagcattgggctgagccgccctttccaagctcacttctgggactgagtttcctcaaccggaacacacccatgaagatggatgatcatcccctagcccttctcagcaggaacctcatgcgacctgtgaccaagatgtcccatcctcagcacagggcccactctgccaaccagtctcaagcaccagcccctcaacactgccatccacctggctctgggccaagccaccaatccagagctccctcaggtcctgggactaaggcggggacatgactgatcccctcagagcaggctcaggcctggagtcggcccccaaaagtttcacatagggccaggcagcctctgtgtttctttccctggtcctgaactgtggaaatgccattaaactctctctataatgtaactgaaactgctggctgggcgcagtggctcccacctgtaatctcagcccttcccgaggctgaggtggaaggattgctcgaggccaggtgttcgagaccagcctgggcaacatagcaagaccctgtctctatttatattg

SEQ ID NO: 11471 - protein, 206 aa, Homo sapiens; identical to SEQ ID NO: 1899

SEQ ID NO: 11472 - DNA, 1360 bp, Homo sapiens; identical to SEQ ID NO: 1898

SEQ ID NO: 11473 - protein, 206 aa, Homo sapiens; identical to SEQ ID NO: 1899

SEQ ID NO: 11474 - DNA, 1251 bp, Homo sapiens
cgaaagcagagcggcgcgccggttccttggttcctgagggcgatggcgcggggtggctggcgccggctacgccgcctgttatccgcggggcagcttctattccagggccgcgcgctgctcgtcactaacacgctgggctgcggcgcgctcatggcggccggtgatggcgtgcgccagtcctgggagatccgcgcccggcccggccaggttttcgacccacggcgctccgcgagcatgtttgcggtgggctgcagcatgggtcccttcctgcactactggtacttgtcgctggaccgcctattccctgcgtctggcctccgaggcttcccaaatgtcctcaagaaggtcctcgtggatcagctggtagcctctccattgctgggcttctgggaattctacaaggcagactggtgcgtgtggcctgctgcgcagttcgtgaacttcctcttcgtgcccccccaatttcgagtcacctacatcaacggcctgacgctgggctgggacacgtacctgtcctacttgaagtaccggagcccagttcctctgacacccccaggctgtgtggccctggacacccgagcagactgaactgtctgcttcctggaccagatgcaagactgtctcctggcggaccaccccctctgacagaaggggaatgggctcctgcagcaagctcgggtcttgagccacgtcccagcaccacttcagctccggagcattgggctgagccgccctttccaagctcacttctgggactgagtttcctcaaccggaacacacccatgaagatggatgatcatcccctagcccttctcagcaggaacctcatgcgacctgtgaccaagatgtcccatcctcagcacagggcccactctgccaaccagtctcaagcaccagcccctcaacactgccatccacctggctctgggccaagccaccaatccagagctccctcaggtcctgggactaaggcggggacatgactgatcccctcagagcaggctcaggcctggagtcggcccccaaaagtttcacatagggccaggcagcctctgtgtttctttccctggtcctgaactgtggaaatgccattaaactctctctataatgtaactgaaactgctggctgggcgcagtggctcccacctgtaatctcagcccttcccgaggctgaggtggaaggattgctcgaggccaggtgttcgagaccagcctgggcaacatagcaagaccctgtctctatttatattg

SEQ ID NO: 11475 - protein, 181 aa, Homo sapiens
MARGGWRRLRRLLSAGQLLFQGRALLVTNTLGCGALMAAGDGVRQSWEIRARPGQVFDPRRSASMFAVGCSMGPFLHYWYLSLDRLFPASGLRGFPNVLKKVLVDQLVASPLLGFWEFYKADWCVWPAAQFVNFLFVPPQFRVTYINGLTLGWDTYLSYLKYRSPVPLTPPGCVALDTRAD

SEQ ID NO: 11476 - DNA, 1941 bp, Homo sapiens
gcggcgcgccggttccttggttcctgagggcgatggcgcggggtggctggcgccggctacgccgcctgttatccgcggggcagcttctattccagggccgcgcgctgctcgtcactaacacgctgggctgcggcgcgctcatggcggccggtgatggcgtgcgccagtcctgggagatccgcgcccggcccggccaggttttcgacccacggcgctccggtgaggacgccacgctgcttagtccttcaccccgggcgacctttgatcccgacacccgactgcgggccgtgacccctgacccgtggcctcagtcccccgcaggacccttgccctgaccgcgcctctccccgggtgtctgtctccccgcagctctgggtctccatcacctcccaacccccggaggtctctgcccactacccaggagcctctggagccgcgcctcctggtggggcttgtagtggaagaatgcacgggtgggctcttccggttttcccggtgaggctgaggctccgggatggcattgggcttacccaggccttagccagggagggagagagggaatggactgaggaacttgccggcccgacccagccccctgacttacactcttatagcgagcatgtttgcggtgggctgcagcatgggtcccttcctgcactactggtacttgtcgctggaccgcctattccctgcgtctggcctccgaggcttcccaaatgtcctcaagaaggtcctcgtggatcagctggtagcctctccattgctgggcgtctggtacttcttgggccttggctgcctggagggtcagacagtgggtgagagctgccaggagctgcgggagaagttctgggaattctacaaggcagactggtgcgtgtggcctgctgcgcagttcgtgaacttcctcttcgtgcccccccaatttcgagtcacctacatcaacggcctgacgctgggctgggacacgtacctgtcctacttgaagtaccggagcccagttcctctgacacccccaggctgtgtggccctggacacccgagcagactgaactgtctgcttcctggaccagatgcaagactgtctcctggcggaccaccccctctgacagaaggggaatgggctcctgcagcaagctcgggtcttgagccacgtcccagcaccacttcagctccggagcattgggctgagccgccctttccaagctcacttctgggactgagtttcctcaaccggaacacacccatgaagatggatgatcatcccctagcccttctcagcaggaacctcatgcgacctgtgaccaagatgtcccatcctcagcacagggcccactctgccaaccagtctcaagcaccagcccctcaacactgccatccacctggctctgggccaagccaccaatccagagctccctcaggtcctgggactaaggcggggacatgactgatcccctcagagcaggctcaggcctggagtcggcccccaaaagtttcacatagggccaggcagcctctgtgtttctttccctggtcctgaactgtggaaatgccattaaactctctctataatgtaactgaaactgctggctgggcgcagtggctcccacctgtaatctcagcccttcccgaggctgaggtggaaggattgctcgaggccaggtgttcgagaccagcctgggcaacatagcaagaccctgtctctatttatattgaaaaataaaaataacaaaagaaaatgctgtggatgatcaaaaccagggtgggcaggacccggtgctcacagggacacacatggatggtccattcgctttattgggtgcgtgtagtgttgtcatgacatctcctaaggaactggggggcacgtttgacactcatgaggtcagaacaggtctggtgggcggggggggggggggtcccagggtggtgaatacccacagcacac

SEQ ID NO: 11477 - protein, 142 aa, Homo sapiens
MFAVGCSMGPFLHYWYLSLDRLFPASGLRGFPNVLKKVLVDQLVASPLLGVWYFLGLGCLEGQTVGESCQELREKFWEFYKADWCVWPAAQFVNFLFVPPQFRVTYINGLTLGWDTYLSYLKYRSPVPLTPPGCVALDTRAD

SEQ ID NO: 11478 - DNA, 1632 bp, Homo sapiens
ggcgcgccggttccttggttcctgagggcgatggcgcggggtggctggcgccggctacgccgcctgttatccgcggggcagcttctattccagggccgcgcgctgctcgtcactaacacgctgggctgcggcgcgctcatggcggccggtgatggcgtgcgccagtcctgggagatccgcgcccggcccggccaggttttcgacccacggcgctccggtgaggacgccacgctgcttagtccttcaccccgggcgacctttgatcccgacacccgactgcgggccgtgacccctgacccgtggcctcagtcccccgcaggacccttgccctgaccgcgcctctccccgggtgtctgtctccccgcagctctgggtctccatcacctcccaacccccggaggtctctgcccactacccaggagcctctggagccgcgcctcctggtggggcttgtagtggaagaatgcacgggtgggctcttccggttttcccggtgaggctgaggctccgggatggcattgggcttacccaggccttagccagggagggagagagggaatggactgaggaacttgccggcccgacccagccccctgacttacactcttatagcgagcatgtttgcggtgggctgcagcatgggtcccttcctgcactactggtacttgtcgctggaccgcctattccctgcgtctggcctccgaggcttcccaaatgtcctcaagaaggtcctcgtggatcagctggtagcctctccattgctgggcgtctggtacttcttgggcagactggtgcgtgtggcctgctgcgcagttcgtgaacttcctcttcgtgcccccccaatttcgagtcacctacatcaacggcctgacgctgggctgggacacgtacctgtcctacttgaagtaccggagcccagttcctctgacacccccaggctgtgtggccctggacacccgagcagactgaactgtctgcttcctggaccagatgcaagactgtctcctggcggaccaccccctctgacagaaggggaatgggctcctgcagcaagctcgggtcttgagccacgtcccagcaccacttcagctccggagcattgggctgagccgccctttccaagctcacttctgggactgagtttcctcaaccggaacacacccatgaagatggatgatcatcccctagcccttctcagcaggaacctcatgcgacctgtgaccaagatgtcccatcctcagcacagggcccactctgccaaccagtctcaagcaccagcccctcaacactgccatccacctggctctgggccaagccaccaatccagagctccctcaggtcctgggactaaggcggggacatgactgatcccctcagagcaggctcaggcctggagtcggcccccaaaagtttcacatagggccaggcagcctctgtgtttctttccctggtcctgaactgtggaaatgccattaaactctctctataatgtaactgaaactgctggctgggcgcagtggctcccacctgtaatctcagcccttcccgaggctgaggtggaaggattgctcgaggccaggtgttcgagaccagcctgggcaacatagcaagaccctgtctctatttatattg

SEQ ID NO: 11479 - protein, 248 aa, Homo sapiens
MFAVGCSMGPFLHYWYLSLDRLFPASGLRGFPNVLKKVLVDQLVASPLLGVWYFLGRLVRVACCAVRELPLRAPPISSHLHQRPDAGLGHVPVLLEVPEPSSSDTPRLCGPGHPSRLNCLLPGPDARLSPGGPPPLTEGEWAPAASSGLEPRPSTTSAPEHWAEPPFPSSLLGLSFLNRNTPMKMDDHPLALLSRNLMRPVTKMSHPQHRAHSANQSQAPAPQHCHPPGSGPSHQSRAPSGPGTKAGT

SEQ ID NO: 11480 - DNA, 1647 bp, Homo sapiens
ggcgcgccggttccttggttcctgagggcgatggcgcggggtggctggcgccggctacgccgcctgttatccgcggggcagcttctattccagggccgcgcgctgctcgtcactaacacgctgggctgcggcgcgctcatggcggccggtgatggcgtgcgccagtcctgggagatccgcgcccggcccggccaggttttcgacccacggcgctccggtgaggacgccacgctgcttagtccttcaccccgggcgacctttgatcccgacacccgactgcgggccgtgacccctgacccgtggcctcagtcccccgcaggacccttgccctgaccgcgcctctccccgggtgtctgtctccccgcagctctgggtctccatcacctcccaacccccggaggtctctgcccactacccaggagcctctggagccgcgcctcctggtggggcttgtagtggaagaatgcacgggtgggctcttccggttttcccggtgaggctgaggctccgggatggcattgggcttacccaggccttagccagggagggagagagggaatggactgaggaacttgccggcccgacccagccccctgacttacactcttatagcgagcatgtttgcggtgggctgcagcatgggtcccttcctgcactactggtacttgtcgctggaccgcctattccctgcgtctggcctccgaggcttcccaaatgtcctcaagaaggtcctcgtggatcagctggtagcctctccattgctgggcgtctggtacttcttgggcagactggtgcgtgtggcctgctgcgcagttcgtgaacttcctcttcgtgcccccccaatttcgagtcacctacatcaacggcctgacgctgggctgggacacgtacctgtcctacttgaagtaccggagcccagttcctctgacacccccaggctgtgtggccctggacacccgagcagactgaactgtctgcttcctggaccagatgcaagactgtctcctggcggaccaccccctctgacagaaggggaatgggctcctgcagcaagctcgggtcttgagccacgtcccagcaccacttcagctccggagcattgggctgagccgccctttccaagctcacttctgggactgagtttcctcaaccggaacacacccatgaagatggatgatcatcccctagcccttctcagcaggaacctcatgcgacctgtgaccaagatgtcccatcctcagcacagggcccactctgccaaccagtctcaagcaccagcccctcaacactgccatccacctggctctgggccaagccaccaatccagagctccctcaggtcctgggactaaggcggggacatgactgatcccctcagagcaggctcaggcctggagtcggcccccaaaagtttcacatagggccaggcagcctctgtgtttctttccctggtcctgaactgtggaaatgccattaaactctctctataatgtaactgaaactgctggctgggcgcagtggctcccacctgtaatctcagcccttcccgaggctgaggtggaaggattgctcgaggccaggtgttcgagaccagcctgggcaacatagcaagaccctgtctctatttatattgaaaaataaaaataac

SEQ ID NO: 11481 - protein, 248 aa, Homo sapiens; identical to SEQ ID NO: 11479

SEQ ID NO: 11482 - DNA, 624 bp, Homo sapiens
gccggttccttggttcctgagggcgatggcgcggggtggctggcgccggctacgccgcctgttatccgcggggcagcttctattccagggccgcgcgctgctcgtcactaacacgctgggctgcggcgcgctcatggcggccggtgatggcgtgcgccagtcctgggagatccgcgcccggcccggccaggttttcgacctgtgaccaagatgtcccatcctcagcacagggcccactctgccaaccagtctcaagcaccagcccctcaacactgccatccacctggctctgggccaagccaccaatccagagctccctcaggtcctgggactaaggcggggacatgactgatcccctcagagcaggctcaggcctggagtcggcccccaaaagtttcacatagggccaggcagcctctgtgtttctttccctggtcctgaactgtggaaatgccattaaactctctctataatgtaactgaaactgctggctgggcgcagtggctcccacctgtaatctcagcccttcccgaggctgaggtggaaggattgctcgaggccaggtgttcgagaccagcctgggcaacatagcaagaccctgtctctatttatattgaaaaataa

SEQ ID NO: 11483 - protein, 62 aa, Homo sapiens
MACASPGRSAPGPARFSTCDQDVPSSAQGPLCQPVSSTSPSTLPSTWLWAKPPIQSSLRSWD

SEQ ID NO: 11484 - DNA, 1247 bp, Homo sapiens
cggttccttggttcctgagggcgatggcgcggggtggctggcgccggctacgccgcctgttatccgcggggcagcttctattccagggccgcgcgctgctcgtcactaacacgctgggctgcggcgcgctcatggcggccggtgatggcgtgcgccagtcctgggagatccgcgcccggcccggccaggttttcgacccacggcgctccgcgagcatgtttgcggtgggctgcagcatgggtcccttcctgcactactggtacttgtcgctggaccgcctattccctgcgtctggcctccgaggcttcccaaatgtcctcaagaaggtcctcgtggatcagctggtagcctctccattgctgggcttctgggaattctacaaggcagactggtgcgtgtggcctgctgcgcagttcgtgaacttcctcttcgtgcccccccaatttcgagtcacctacatcaacggcctgacgctgggctgggacacgtacctgtcctacttgaagtaccggagcccagttcctctgacacccccaggctgtgtggccctggacacccgagcagactgaactgtctgcttcctggaccagatgcaagactgtctcctggcggaccaccccctctgacagaaggggaatgggctcctgcagcaagctcgggtcttgagccacgtcccagcaccacttcagctccggagcattgggctgagccgccctttccaagctcacttctgggactgagtttcctcaaccggaacacacccatgaagatggatgatcatcccctagcccttctcagcaggaacctcatgcgacctgtgaccaagatgtcccatcctcagcacagggcccactctgccaaccagtctcaagcaccagcccctcaacactgccatccacctggctctgggccaagccaccaatccagagctccctcaggtcctgggactaaggcggggacatgactgatcccctcagagcaggctcaggcctggagtcggcccccaaaagtttcacatagggccaggcagcctctgtgtttctttccctggtcctgaactgtggaaatgccattaaactctctctataatgtaactgaaactgctggctgggcgcagtggctcccacctgtaatctcagcccttcccgaggctgaggtggaaggattgctcgaggccaggtgttcgagaccagcctgggcaacatagcaagaccctgtctctatttatattgaaaaataaaaataac

SEQ ID NO: 11485 - protein, 181 aa, Homo sapiens; identical to SEQ ID NO: 11475

SEQ ID NO: 11486 - DNA, 577 bp, Homo sapiens
caggctgtgtggccctggacacccgagcagactgaactgtctgcttcctggaccagatgcaagactgtctcctggcggaccaccccctctgacagaaggggaatgggctcctgcagcaagctcgggtcttgagccacgtcccagcaccacttcagctccggagcattgggctgagccgccctttccaagctcacttctgggactgagtttcctcaaccggaacaactgccatccacctggctctgggccaagccaccaatccagagctccctcaggtcctgggactaaggcggggacatgactgatcccctcagagcaggctcaggcctggagtcggcccccaaaagtttcacatagggccaggcagcctctgtgtttctttccctggtcctgaactgtggaaatgccattaaactctctctataatgtaactgaaactgctggctgggcgcagtggctcccacctgtaatctcagcccttcccgaggctgaggtggaaggattgctcgaggccaggtgttcgagaccagcctgggcaacatagcaagaccctgtctctatttatattgaaaaataa

SEQ ID NO: 11487 - protein, 46 aa, Homo sapiens
MPLNSLYNVTETAGWAQWLPPVISALPEAEVEGLLEARCSRPAWAT

SEQ ID NO: 11488 - DNA, 410 bp, Homo sapiens
tgacagaaggggaatgggctcctgcagcaagctcgggtcttgagccaccccctcaacactgccatccacctggctctgggccaagccaccaatccagagctccctcaggtcctgggactaaggcggggacatgactgatcccctcagagcaggctcaggcctggagtcggcccccaaaagtttcacatagggccaggcagcctctgtgtttctttccctggtcctgaactgtggaaatgccattaaactctctctataatgtaactgaaactgctggctgggcgcagtggctcccacctgtaatctcagcccttcccgaggctgaggtggaaggattgctcgaggccaggtgttcgagaccagcctgggcaacatagcaagaccctgtctctatttatattgaaaaataa

SEQ ID NO: 11489 - protein, 46 aa, Homo sapiens; identical to SEQ ID NO: 11487

SEQ ID NO: 11490 - DNA, 770 bp, Homo sapiens
ggttcgagttctttgaggcaagcgccaaggacaacattaacgtcaagcagacctttgagcgcctggtggatgtcatctgcgagaagatgtccgagtcgttggacacggcggaccctgcggtcacaggcgccaagcagggcccacagctcagtgaccagcaggtgccaccgcaccaggactgcgcctgctgagagccatcccactccccttatttattattgtagctatttatttatttattgaagatgtcccccaggggcccaggctcccctgcccgccccaagccctgcccctcctgtacatatagccctttccccactcagctgtggtgtctcgtggccccgtgaactcaccgctcaccctcctgaaccccccccccccgcctttttttaaaattcacccccatccacagttgtcagttgtgaagaggggccagatgacaccctaaagcaggctgatcgggcaatgggaggtggccaggcctgccagcccctcggctctgccgcggtgggccgaggccgctgttgggggtttccctgtgtggaccatggggatcagagtctggcctgccaggctcctctccccgttttctcttttggtgggggggtgtgctgtgggtattcaccaccctgggaccccccccccccccgcccaccagacctgttctgacctcatgagtgtcaaacgtgccccccagttccttaggagatgtcatgacaacactacacgcacccaataaagcgaatggaccatccatgtgtgtccctgtg

SEQ ID NO: 11491 - protein, 57 aa, Homo sapiens
MSSARRCPSRWTRRTLRSQAPSRAHSSVTSRCHRTRTAPAESHPTPLIYYCSYLFIY

SEQ ID NO: 11492 - DNA, 1244 bp, Homo sapiens
ggggcctgagccgctgctgccgccgccgccgcgcagccccacatcaacgcaccggggtcctgtcaccgccaccgccaaaaaagtcaccgccgctagggtcgccgttgcatcggtgcagggcaaggacacagcagggcaagagcggtaccggaccatcaccaccgcatactaccggggcgctatgggcttcatcctcatgtatgacatcaccaacgaggaatccttcaatgcagtgcaggactggtccacccagatcaagacctactcatgggacaatgcccaggtgctgctggtaggaaacaagtgtgacatggaggatgagcgggtggtgtcatcagaacgtggccggcagctagctgaccaccttgggttcgagttctttgaggcaagcgccaaggacaacattaacgtcaagcagacctttgagcgcctggtggatgtcatctgcgagaagatgtccgagtcgttggacacggcggaccctgcggtcacaggcgccaagcagggcccacagctcagtgaccagcaggtgccaccgcaccaggactgcgcctgctgagagccatcccactccctttcccctcttccctgtcttccccaccttcccccaactacccgggcctgacccggcccctaccagccacgggcacaagacccctgctcctgacttagcccgtcacccttatttattattgtagctatttatttatttattgaagatgtcccccaggggcccaggctcccctgcccgccccaagccctgcccctcctgtacatatagccctttccccactcagctgtggtgtctcgtggccccgtgaactcaccgctcaccctcctgaaccccccccccccgcctttttttaaaattcacccccatccacagttgtcagttgtgaagaggggccagatgacaccctaaagcaggctgatcgggcaatgggaggtggccaggcctgccagcccctcggctctgccgcggtgggccgaggccgctgttgggggtttccctgtgtggaccatggggatcagagtctggcctgccaggctcctctccccgttttctcttttggtgggggggtgtgctgtgggtattcaccaccctgggaccccccccccccccgcccaccagacctgttctgacctcatgagtgtcaaacgtgccccccagttccttaggagatgtcatgacaacactacacgcacccaataaagcgaatggaccatccatgtgtgtccctgtg

SEQ ID NO: 11493 - protein, 125 aa, Homo sapiens
MGFILMYDITNEESFNAVQDWSTQIKTYSWDNAQVLLVGNKCDMEDERVVSSERGRQLADHLGFEFFEASAKDNINVKQTFERLVDVICEKMSESLDTADPAVTGAKQGPQLSDQQVPPHQDCAC

SEQ ID NO: 11494 - DNA, 826 bp, Homo sapiens
tttgcaggacgtcacggaggactgcaggggcctgagccgctgctgccgccgccgccgcgcagccccacatcaacgcaccggggtcctgtcaccgccaccgccaaaaaagtcaccgccgctagggtcgccgttgcatcggtgcagggcaagatggcatccgccacagactcgcgctatgggcagaaggagtcctcggatcagaacttcgactacatgttcaagattctcatcatcggcaacagcagcgtgggcaagacgtccttcctcttccgctatgctgacgactcgttcacgcctgccttcgtcagcaccgtgggcatcgacttcaaggtcaagaccatctatcgcaacgacaagaggatcaagctgcagatctgggacacagcagggcaagagcggtaccggaccatcaccaccgcatactaccggggcgctatgggcttcatcctcatgtatgacatcaccaacgaggaatccttcaatgcagtgcagatgacaccctaaagcaggctgatcgggcaatgggaggtggccaggcctgccagcccctcggctctgccgcggtgggccgaggccgctgttgggggtttccctgtgtggaccatggggatcagagtctggcctgccaggctcctctccccgttttctcttttggtgggggggtgtgctgtgggtattcaccaccctgggaccccccccccccccgcccaccagacctgttctgacctcatgagtgtcaaacgtgccccccagttccttaggagatgtcatgacaacactacacgcacccaataaagcgaatggaccatccatgtgtgtccctgtg

SEQ ID NO: 11495 - protein, 117 aa, Homo sapiens
MASATDSRYGQKESSDQNFDYMFKILIIGNSSVGKTSFLFRYADDSFTPAFVSTVGIDFKVKTIYRNDKRIKLQIWDTAGQERYRTITTAYYRGAMGFILMYDITNEESFNAVQMTP

SEQ ID NO: 11496 - DNA, 1500 bp, Homo sapiens
cctttgcaggacgtcacggaggactgcaggggcctgagccgctgctgccgccgccgccgcgcagccccacatcaacgcaccggggtcctgtcaccgccaccgccaaaaaagtcaccgccgctagggtcgccgttgcatcggtgcagggcaagatggcatccgccacagactcgcgctatgggcagaaggagtcctcggatcagaacttcgactacatgttcaagattctcatcatcggcaacagcagcgtgggcaagacgtccttcctcttccgctatgctgacgactcgttcacgcctgccttcgtcagcaccgtgggcatcgacttcaaggtcaagaccatctatcgcaacgacaagaggatcaagctgcagatctgggacacagcagggcaagagcggtaccggaccatcaccaccgcatactaccggggcgctatgggcttcatcctcatgtatgacatcaccaacgaggaatccttcaatgcagtgcaggactggtccacccagatcaagacctactcatgggacaatgcccaggtgctgctggtaggaaacaagtgtgacatggaggatgagcgggtggtgtcatcagaacgtggccggcagctagctgaccaccttgggttcgagttctttgaggcaagcgccaaggacaacattaacgtcaagcagacctttgagcgcctggtggatgtcatctgcgagaagatgtccgagtcgttggacacggcggaccctgcggtcacaggcgccaagcagggcccacagctcagtgaccagcaggtgccaccgcaccaggactgcgcctgctgagagccatcccactccctttcccctcttccctgtcttccccaccttcccccaactacccgggcctgacccggcccctaccagccacgggcacaagacccctgctcctgacttagcccgtcacccttatttattattgtagctatttatttatttattgaagatgtcccccaggggcccaggctcccctgcccgccccaagccctgcccctcctgtacatatagccctttccccactcagctgtggtgtctcgtggccccgtgaactcaccgctcaccctcctgaaccccccccccccgcctttttttaaaattcacccccatccacagttgtcagttgtgaagaggggccagatgacaccctaaagcaggctgatcgggcaatgggaggtggccaggcctgccagcccctcggctctgccgcggtgggccgaggccgctgttgggggtttccctgtgtggaccatggggatcagagtctggcctgccaggctcctctccccgttttctcttttggtgggggggtgtgctgtgggtattcaccaccctgggaccccccccccccccgcccaccagacctgttctgacctcatgagtgtcaaacgtgccccccagttccttaggagatgtcatgacaacactacacgcacccaataaagcgaatggaccatccatgtgtgtccctgtg

SEQ ID NO: 11497 - protein, 220 aa, Homo sapiens; identical to SEQ ID NO: 1901

SEQ ID NO: 11498 - DNA, 871 bp, Homo sapiens
ggtcaagagagcctcccctccccaccattcccagaaaaggaggaaggggctgatggactctctgggaaccccctcccctccctgcgccccgtcatcaagaagaaaattcgaagaaaaggtttagcagggacagagaagcgacctgtcccggaaaccccttaaagcctgcgagtcagttcaaactggaatctgtcaggcccgtcccgctcggggttggtgaggtctgagggacttcgggggatcttgctctggtaccactctcgattgtcctccagcgtgtccagcaggtcctgtgcatctgggtggaccagtgtctaccggttcagcccagtcccctgccaacctgggacttctccactgaggccgtatgcttgtcacacatgggactgatgtccaggcccgactcacgctcgcggtctccctgctggaagaactcggccatgatgcgagacagggtcttgctgtcacccaggctggagtgcagtggtgcaatcacggttccctgcagcctcaacctcctggcctcaagtgatcctcccatctcagcctcctgagtagttgggattacaggaaccaaagcagtgactcaacaaagctcacccaggaaggtccgggagatgtactcggacacctggttcccggagcggctggtttcggacaggtgggtcaactcccggttcaggatccgcttgaactggggcggagagaaggtgaagaccgtgatgatggggcaccgtgggccgaggcaggtgagctcagcgatctgccccacctcaccttgttggaggccatctcccccaccgagtgccgggtctgcagcgtctccaactgatccaggcaccagtccagctcgtctagcgtctccaatgcc

SEQ ID NO: 11499 - protein, 57 aa, Homo sapiens
MGLMSRPDSRSRSPCWKNSAMMRDRVLLSPRLECSGAITVPCSLNLLASSDPPISAS

SEQ ID NO: 11500 - DNA, 413 bp, Homo sapiens
gagagcctcccctccccaccattcccagaaaaggaggaaggggctgatggactctctgggaaccccctcccctccctgcgccccgtcatcaagaagaaaattcgaagaaaaggtttagcagggacagagaagcgacctgtcccggaaaccccttaaagcctgcggcacgcgaagagggaggcagaggggagggatggatactgaggcttccggaggcggggatcgaaccctaggcttgagcatggtgctgcccagtccgctcggaggcccgaccagcaggacgagctcttcccggcgaggtgcgggaaggaggaacacgtaggggacccagtatggagttctgcggacagagaaagcagggggctcctacatccagagacaccaaagacagaaaataaagcgacttaaagcaa

SEQ ID NO: 11501 - protein, 42 aa, Homo sapiens
MDTEASGGGDRTLGLSMVLPSPLGGPTSRTSSSRRGAGRRNT

SEQ ID NO: 11502 - DNA, 267 bp, Homo sapiens
cctcccctccccaccattcccagaaaaggaggaaggggctgatggactctctgggaaccccctcccctccctgcgccccgtcatcaagaagaaaattcgaagaaaaggtttagcagggacagagaagcgacctgtcccggaaaccccttaaagcctgcgggtaacatgtttgctccctcctcccccactcggactatagaagtatcaccaatccactgcagagaaattgggaaaattcagaaaaacaaaaaataaaaagaaatccac

SEQ ID NO: 11503 - protein, 49 aa, Homo sapiens
LPSPPFPEKEEGADGLSGNPLPSLRPVIKKKIRRKGLAGTEKRPVPETP

SEQ ID NO: 11504 - DNA, 3595 bp, Homo sapiens
atgggacccaggcaggactccgcagtggtgcaccatctgggcatcgacagctcctcggtgtcggccccaccttgagccccagttccaccttctaccgcttcagcacctccggcgcggacagctcctcgctgtcgcctccactcccggccctgggccggacccgggagcagacgctcctcggcgcccgctcacggggacgagtcctgctccctgctatcccagacccctttctctggcgcatggagaacctgggggtcggcgaaggggcagaggcttgcagcaggttgagtcgctctcgcggccgccacagcatgaccagagccccgaagcacctgtggcggcaaccccggcgccccatccgcatccaacagcgcttctattcggatccggacaagtccgcgggctgccgcgagagggacctgagcccgcggccggagctcaggaagtcgcggctctcctggcccgtttcctcctgcaggcgctttgacctggaaaatgggctctcgtgtgggaggagggccctggaccctcagtccagccctggcctgggccggattatgcaggctccagtcccgcacagccagcggcgcgagtccttcctgtaccgctcagatagcgactatgaactctcgcccaaggccatgtctcggaactcctctgtggccagcgacctacatggagaggacatgattgtgacgccctttgcccaggtcctggccagtctgcggaccgttcggagcaacgtggcggcccttgcccgccagcaatgcctaggagcagccaagcagggacccgtcggaaacccttcatccagcaatcagctccctcctgcagaggacacggggcagaagctggcattggagacgctagacgagctggactggtgcctggatcagttggagacgctgcagacccggcactcggtgggggagatggcctccaacaagttcaagcggatcctgaaccgggagttgacccacctgtccgaaaccagccgctccgggaaccaggtgtccgagtacatctcccggaccttcctggaccagcagaccgaggtggagctgcccaaggtgaccgctgaggaggccccacagcccatgtcccggatcagtggcctacatgggctctgccacagtgccagcctctcctcagccactgtcccacgctttggggtccagactgaccaggaggagcaactggccaaggagctagaagacaccaacaagtggggacttgatgtgttcaaggtggcggagctaagtgggaaccggcccctcacagctatcatattcagcatttttcaggagcgggacctgctgaagacattccagatcccagcagacacactggccacctacctgctgatgctggaaggtcactaccacgccaatgtggcctaccacaacagcctacatgccgccgacgtggcccagtccacgcatgtgctgctggctacgcccgccctcgaggctgtgttcacagacttggaaatcctggctgccctctttgcaagcgccatccacgacgtggaccatcctggggtctccaaccagtttctgattaacaccaactcagagctggcgcttatgtacaacgacgcctcggtgctggagaaccatcacctggctgtgggcttcaagctgctgcaggcagagaactgcgatatcttccagaacctcagcgccaagcagcgactgagtctgcgcaggatggtcattgacatggtgctggccacagacatgtccaaacacatgaacctcctggccgacctcaagaccatggtggagaccaagaaggtgacaagcctcggtgtcctcctcctggacaactattccgaccgaatccaggtcttgcagaacctggtgcactgtgctgatctgagcaaccccaccaagccgctgcccctgtaccgccagtggacggaccgcatcatggccgagttcttccagcagggagaccgcgagcgtgagtcgggcctggacatcagtcccatgtgtgacaagcatacggcctcagtggagaagtcccaggtgggtttcattgactacattgctcacccactgtgggagacttgggctgacctggtccacccagatgcacaggacctgctggacacgctggaggacaatcgagagtggtaccagagcaagatcccccgaagtccctcagacctcaccaaccccgagcgggacgggcctgacagattccagtttgaactgactctggaggaggcagaggaagaggatgaggaggaagaagaggagggggaagagacagctttagccaaagaggccttggagttgcctgacactgaactcctgtcccctgaagccggcccagaccctggggacttacccctcgacaaccagaggacttagggccagccctgcgtgaactgcaggggcaatggatggtaaagccctttggctcttggcaggcagactttccaggaagaggctccatgtggctcctgcttcactttcccacccatttagggagacaatcaagctcttagttataggtggctcccagggtctaattggaggcacctggctggggtccactctgaccctagacttgcctaaaagagctctctaaggggcagcctcttacgatgccctggtgtctttctcctgggcttctatccctgtgaggagaggtgctgtctgctggagcctctagtccaccctctccagtggtcactcttgagtcacatctgtcacttaattatttccttctttatcaaatatttattgctcatctacttcgtgccagctttctgcctctgtagtagccctgcacaaagggtggggagtcaggagaccatcccaaaggcatctccctgtcttcctctaccaagcggctctctgcaagagcatggaaatgtgagtggggaaaattttcagcaccaaagcttcactcatacccagttttgtttctgaaactacggtagggggcaggaagaggagcagaaaagaagggctgggcaaggcatagtggcttatgcctgtaatcccggtactttgggaggctgaggtgggaggactgcttaagctcaggagtttgagaccagcctgggcaacatagcaagacccccaccatctctgaaaaaaaaaattagccaggcatggtggtgtgcacctgagaatcccagctactcagaaggttgagacaaaggggatcgcttgagcccaggagttggaggctgaagagagctatgactgcatcactgcactccagcctgggcaacacagcaagatcctgtctaaaaataaaaagaaaagagaaggaaaggaaagagacggggctctgaggccgagcacagtggcccatgcctataatcccagcactttgggaggctgaggcaggtggatcacctgaggttaggagttcgagaccagcctggccaacatggtgaaaccccatctctactaaaaatacaaaaattggctgggcatggtggcgggtgcctgtaatcccagctactggggaggctgaggcaggagaatcacttgaattcaggaggtggaggttgcagtgagccgacatcatgccactgcactccagcctgggcgacagagcaagacactgtctc

SEQ ID NO: 11505 - protein, 712 aa, Homo sapiens; identical to SEQ ID NO: 1903

SEQ ID NO: 11506 - DNA, 4228 bp, Homo sapiens
ccccgcgctccgccagcagggagcgcacacgcaggtgcaaggagctggcacctgggcacacacctggccacacacctgtgcagagccggtggcaggccctcccggcgcaggaatggcgtgcccccagctgccgccacttctgcttttggtgctggtggtgctgctgaaagctggtgtgaattacaatactccctttacagttccgaatccctgaccccgcactggagccccacttcccacagccccggaacggagcccttgacctccactgaccagaccttggagccccctggcccagctccaggtgacactgggccccgtgagttacacaggaacccgagtgtggtggtggtcgtgtgtttgctggtgtctcttttgctcatcgggtctgtggtcatggctgtgagattctgtcaccggaatgagtccaagtttgagaacctggacgaggtgtccatgtggttctgggagttggtggattctggcttggcccctgtgagcccccttggtggtggtatcatccggagaggcttctcgggtaccccattgctgccatcgctgccgagccgccttgtgttgcctggagaggtcgagcccagtacccatgtggtgttcaccattgaggcttaagggacagagaaaagacagcgtggtcccagatagcaccatctgggcatcgacagctcctcggtgtcggccccaccttgagccccagttccaccttctaccgcttcagcacctccggcgcggacagctcctcgctgtcgcctccactcccggccctgggccggacccgggagcagacgctcctcggcgcccgctcacggggacgagtcctgctccctgctatcccagacccctttctctggcgcatggagaacctgggggtcggcgaaggggcagaggcttgcagcaggttgagtcgctctcgcggccgccacagcatgaccagagccccgaagcacctgtggcggcaaccccggcgccccatccgcatccaacagcgcttctattcggatccggacaagtccgcgggctgccgcgagagggacctgagcccgcggccggagctcaggaagtcgcggctctcctggcccgtttcctcctgcaggcgctttgacctggaaaatgggctctcgtgtgggaggagggccctggaccctcagtccagccctggcctgggccggattatgcaggctccagtcccgcacagccagcggcgcgagtccttcctgtaccgctcagatagcgactatgaactctcgcccaaggccatgtctcggaactcctctgtggccagcgacctacatggagaggacatgattgtgacgccctttgcccaggtcctggccagtctgcggaccgttcggagcaacgtggcggcccttgcccgccagcaatgcctaggagcagccaagcagggacccgtcggaaacccttcatccagcaatcagctccctcctgcagaggacacggggcagaagctggcattggagacgctagacgagctggactggtgcctggatcagttggagacgctgcagacccggcactcggtgggggagatggcctccaacaagttcaagcggatcctgaaccgggagttgacccacctgtccgaaaccagccgctccgggaaccaggtgtccgagtacatctcccggaccttcctggaccagcagaccgaggtggagctgcccaaggtgaccgctgaggaggccccacagcccatgtcccggatcagtggcctacatgggctctgccacagtgccagcctctcctcagccactgtcccacgctttggggtccagactgaccaggaggagcaactggccaaggagctagaagacaccaacaagtggggacttgatgtgttcaaggtggcggagctaagtgggaaccggcccctcacagctatcatattcagcatttttcaggagcgggacctgctgaagacattccagatcccagcagacacactggccacctacctgctgatgctggaaggtcactaccacgccaatgtggcctaccacaacagcctacatgccgccgacgtggcccagtccacgcatgtgctgctggctacgcccgccctcgaggctgtgttcacagacttggaaatcctggctgccctctttgcaagcgccatccacgacgtggaccatcctggggtctccaaccagtttctgattaacaccaactcagagctggcgcttatgtacaacgacgcctcggtgctggagaaccatcacctggctgtgggcttcaagctgctgcaggcagagaactgcgatatcttccagaacctcagcgccaagcagcgactgagtctgcgcaggatggtcattgacatggtgctggccacagacatgtccaaacacatgaacctcctggccgacctcaagaccatggtggagaccaagaaggtgacaagcctcggtgtcctcctcctggacaactattccgaccgaatccaggtcttgcagaacctggtgcactgtgctgatctgagcaaccccaccaagccgctgcccctgtaccgccagtggacggaccgcatcatggccgagttcttccagcagggagaccgcgagcgtgagtcgggcctggacatcagtcccatgtgtgacaagcatacggcctcagtggagaagtcccaggtgggtttcattgactacattgctcacccactgtgggagacttgggctgacctggtccacccagatgcacaggacctgctggacacgctggaggacaatcgagagtggtaccagagcaagatcccccgaagtccctcagacctcaccaaccccgagcgggacgggcctgacagattccagtttgaactgactctggaggaggcagaggaagaggatgaggaggaagaagaggagggggaagagacagctttagccaaagaggccttggagttgcctgacactgaactcctgtcccctgaagccggcccagaccctggggacttacccctcgacaaccagaggacttagggccagccctgcgtgaactgcaggggcaatggatggtaaagccctttggctcttggcaggcagactttccaggaagaggctccatgtggctcctgcttcactttcccacccatttagggagacaatcaagctcttagttataggtggctcccagggtctaattggaggcacctggctggggtccactctgaccctagacttgcctaaaagagctctctaaggggcagcctcttacgatgccctggtgtctttctcctgggcttctatccctgtgaggagaggtgctgtctgctggagcctctagtccaccctctccagtggtcactcttgagtcacatctgtcacttaattatttccttctttatcaaatatttattgctcatctacttcgtgccagctttctgcctctgtagtagccctgcacaaagggtggggagtcaggagaccatcccaaaggcatctccctgtcttcctctaccaagcggctctctgcaagagcatggaaatgtgagtggggaaaattttcagcaccaaagcttcactcatacccagttttgtttctgaaactacggtagggggcaggaagaggagcagaaaagaagggctgggcaaggcatagtggcttatgcctgtaatcccggtactttgggaggctgaggtgggaggactgcttaagctcaggagtttgagaccagcctgggcaacatagcaagacccccaccatctctgaaaaaaaaaattagccaggcatggtggtgtgcacctgagaatcccagctactcagaaggttgagacaaaggggatcgcttgagcccaggagttggaggctgaagagagctatgactgcatcactgcactccagcctgggcaacacagcaagatcctgtctaaaaataaaaagaaaagagaaggaaaggaaagagacggggctctgaggccgagcacagtggcccatgcctataatcccagcactttgggaggctgaggcaggtggatcacctgaggttaggagttcgagaccagcctggccaacatggtgaaaccccatctctactaaaaatacaaaaattggctgggcatggtggcgggtgcctgtaatcccagctactggggaggctgaggcaggagaatcacttgaattcaggaggtggaggttgcagtgagccgacatcatgccactgcactccagcctgggcgacagagcaagacactgtctc

SEQ ID NO: 11507 - protein, 712 aa, Homo sapiens; identical to SEQ ID NO: 1903

SEQ ID NO: 11508 - DNA, 1945 bp, Homo sapiens
accccctccggatccggcctctccttcccaccgcctaccacctcctcccaacaggtcctggccagtctgcggaccgttcggagcaacgtggcggcccttgcccgccagcaatgcctaggagcagccaattcaagcggatcctgaaccgggagttgacccacctgtccgaaaccagccgctccgggaaccaggtgtccgagtacatctcccggaccttcctggaccagcagaccgaggtggagctgcccaaggtgaccgctgaggaggccccacagcccatgtcccggatcagtggcctacatgggctctgccacagtgccagcctctcctcagccactgtcccacgctttggggtccagactgaccaggaggagcaactggccaaggagctagaagacaccaacaagtggggacttgatgtgttcaaggtggcggagctaagtgggaaccggcccctcacagctatcatattcagcatttttcaggagcgggacctgctgaagacattccagatcccagcagacacactggccacctacctgctgatgctggaaggtcactaccacgccaatgtggcctaccacaacagcctacatgccgccgacgtggcccagtccacgcatgtgctgctggctacgcccgccctcgaggctgtgttcacagacttggaaatcctggctgccctctttgcaagcgccatccacgacgtggaccatcctggggtctccaaccagtttctgattaacaccaactcagagctggcgcttatgtacaacgacgcctcggtgctggagaaccatcacctggctgtgggcttcaagctgctgcaggcagagaactgcgatatcttccagaacctcagcgccaagcagcgactgagtctgcgcaggatggtcattgacatggtgctggccacagacatgtccaaacacatgaacctcctggccgacctcaagaccatggtggagaccaagaaggtgacaagcctcggtgtcctcctcctggacaactattccgaccgaatccaggtcttgcagaacctggtgcactgtgctgatctgagcaaccccaccaagccgctgcccctgtaccgccagtggacggaccgcatcatggccgagttcttccagcagggagaccgcgagcgtgagtcgggcctggacatcagtcccatgtgtgacaagcatacggcctcagtggagaagtcccaggtgggtttcattgactacattgctcacccactgtgggagacttgggctgacctggtccacccagatgcacaggacctgctggacacgctggaggacaatcgagagtggtaccagagcaagatcccccgaagtccctcagacctcaccaaccccgagcgggacgggcctgacagattccagtttgaactgactctggaggaggcagaggaagaggatgaggaggaagaagaggagggggaagagacagctttagccaaagaggccttggagttgcctgacactgaactcctgtcccctgaagccggcccagaccctggggacttacccctcgacaaccagaggacttagggccagccctgcgtgaactgcaggggcaatggatggtaaagccctttggctcttggcaggcagactttccaggaagaggctccatgtggctcctgcttcactttcccacccatttagggagacaatcaagctcttagttataggtggctcccagggtctaattggaggcacctggctggggtccactctgaccctagacttgcctaaaagagctctctaaggggcagcctcttacgatgccctggtgtctttctcctgggcttctatccctgtgaggagaggtgctgtctgctggagcctctagtccaccctctccagtggtcactcttgagtcacatctgtcacttaattatttccttctttatcaaatatttattgctcatcta

SEQ ID NO: 11509 - protein, 482 aa, Homo sapiens
MPRSSQFKRILNRELTHLSETSRSGNQVSEYISRTFLDQQTEVELPKVTAEEAPQPMSRISGLHGLCHSASLSSATVPRFGVQTDQEEQLAKELEDTNKWGLDVFKVAELSGNRPLTAIIFSIFQERDLLKTFQIPADTLATYLLMLEGHYHANVAYHNSLHAADVAQSTHVLLATPALEAVFTDLEILAALFASAIHDVDHPGVSNQFLINTNSELALMYNDASVLENHHLAVGFKLLQAENCDIFQNLSAKQRLSLRRMVIDMVLATDMSKHMNLLADLKTMVETKKVTSLGVLLLDNYSDRIQVLQNLVHCADLSNPTKPLPLYRQWTDRIMAEFFQQGDRERESGLDISPMCDKHTASVEKSQVGFIDYIAHPLWETWADLVHPDAQDLLDTLEDNREWYQSKIPRSPSDLTNPERDGPDRFQFELTLEEAEEEDEEEEEEGEETALAKEALELPDTELLSPEAGPDPGDLPLDNQRT

SEQ ID NO: 11510 - DNA, 2542 bp, Homo sapiens
ttcgacgtgatcagacccaactcagacccggtcatacttggaccgaatgctgccaaatcccccacctctacccagatctgagcctacgcggggtgccgacccagctcgtggacggggatacggtgacctttgacccaaaagtcttggccgggaccagccggacactggccctcggccgggagctccgagtctcaggcggtcccggttgtcttcctgtcggtgccgcttccgcctgcccttcttgaaaacccacccccagctttgacctggaaaatgggctctcgtgtgggaggagggccctggaccctcagtccagccctggcctgggccggattatgcaggctccagtcccgcacagccagcggcgcgagtccttcctgtaccgctcagatagcgactatgaactctcgcccaaggccatgtctcggaactcctctgtggccagcgacctacatggagaggacatgattgtgacgccctttgcccaggtcctggccagtctgcggaccgttcggagcaacgtggcggcccttgcccgccagcaatgcctaggagcagccaagcagggacccgtcggaaacccttcatccagcaatcagctccctcctgcagaggacacggggcagaagctggcattggagacgctagacgagctggactggtgcctggatcagttggagacgctgcagacccggcactcggtgggggagatggcctccaacaagttcaagcggatcctgaaccgggagttgacccacctgtccgaaaccagccgctccgggaaccaggtgtccgagtacatctcccggaccttcctggaccagcagaccgaggtggagctgcccaaggtgaccgctgaggaggccccacagcccatgtcccggatcagtggcctacatgggctctgccacagtgccagcctctcctcagccactgtcccacgctttggggtccagactgaccaggaggagcaactggccaaggagctagaagacaccaacaagtggggacttgatgtgttcaaggtggcggagctaagtgggaaccggcccctcacagctatcatattcagcatttttcaggagcgggacctgctgaagacattccagatcccagcagacacactggccacctacctgctgatgctggaaggtcactaccacgccaatgtggcctaccacaacagcctacatgccgccgacgtggcccagtccacgcatgtgctgctggctacgcccgccctcgaggctgtgttcacagacttggaaatcctggctgccctctttgcaagcgccatccacgacgtggaccatcctggggtctccaaccagtttctgattaacaccaactcagagctggcgcttatgtacaacgacgcctcggtgctggagaaccatcacctggctgtgggcttcaagctgctgcaggcagagaactgcgatatcttccagaacctcagcgccaagcagcgactgagtctgcgcaggatggtcattgacatggtgctggccacagacatgtccaaacacatgaacctcctggccgacctcaagaccatggtggagaccaagaaggtgacaagcctcggtgtcctcctcctggacaactattccgaccgaatccaggtcttgcagaacctggtgcactgtgctgatctgagcaaccccaccaagccgctgcccctgtaccgccagtggacggaccgcatcatggccgagttcttccagcagggagaccgcgagcgtgagtcgggcctggacatcagtcccatgtgtgacaagcatacggcctcagtggagaagtcccaggtgggtttcattgactacattgctcacccactgtgggagacttgggctgacctggtccacccagatgcacaggacctgctggacacgctggaggacaatcgagagtggtaccagagcaagatcccccgaagtccctcagacctcaccaaccccgagcgggacgggcctgacagattccagtttgaactgactctggaggaggcagaggaagaggatgaggaggaagaagaggagggggaagagacagctttagccaaagaggccttggagttgcctgacactgaactcctgtcccctgaagccggcccagaccctggggacttacccctcgacaaccagaggacttagggccagccctgcgtgaactgcaggggcaatggatggtaaagccctttggctcttggcaggcagactttccaggaagaggctccatgtggctcctgcttcactttcccacccatttagggagacaatcaagctcttagttataggtggctcccagggtctaattggaggcacctggctggggtccactctgaccctagacttgcctaaaagagctctctaaggggcagcctcttacgatgccctggtgtctttctcctgggcttctatccctgtgaggagaggtgctgtctgctggagcctctagtccaccctctccagtggtcactcttgagtcacatctgtcacttaattatttccttctttatcaaatatttattgctcatcta

SEQ ID NO: 11511 - protein, 606 aa, Homo sapiens
MQAPVPHSQRRESFLYRSDSDYELSPKAMSRNSSVASDLHGEDMIVTPFAQVLASLRTVRSNVAALARQQCLGAAKQGPVGNPSSSNQLPPAEDTGQKLALETLDELDWCLDQLETLQTRHSVGEMASNKFKRILNRELTHLSETSRSGNQVSEYISRTFLDQQTEVELPKVTAEEAPQPMSRISGLHGLCHSASLSSATVPRFGVQTDQEEQLAKELEDTNKWGLDVFKVAELSGNRPLTAIIFSIFQERDLLKTFQIPADTLATYLLMLEGHYHANVAYHNSLHAADVAQSTHVLLATPALEAVFTDLEILAALFASAIHDVDHPGVSNQFLINTNSELALMYNDASVLENHHLAVGFKLLQAENCDIFQNLSAKQRLSLRRMVIDMVLATDMSKHMNLLADLKTMVETKKVTSLGVLLLDNYSDRIQVLQNLVHCADLSNPTKPLPLYRQWTDRIMAEFFQQGDRERESGLDISPMCDKHTASVEKSQVGFIDYIAHPLWETWADLVHPDAQDLLDTLEDNREWYQSKIPRSPSDLTNPERDGPDRFQFELTLEEAEEEDEEEEEEGEETALAKEALELPDTELLSPEAGPDPGDLPLDNQRT

SEQ ID NO: 11512 - DNA, 2489 bp, Homo sapiens
gctgtccagaaaaggtcccgcgcagccggcgctcggtccagcctccacgcagtcctggcgatgcagggcccccccgcgcccgccccggtccccgggcccggctcccctcggggatccccgcgcggctcccccgggctcttcaggaagcttttggtgaatcagagcatccgcctgcagcggcgcttcacggtggcccatccgctgtgctttgacctggaaaatgggctctcgtgtgggaggagggccctggaccctcagtccagccctggcctgggccggattatgcaggctccagtcccgcacagccagcggcgcgagtccttcctgtaccgctcagatagcgactatgaactctcgcccaaggccatgtctcggaactcctctgtggccagcgacctacatggagaggacatgattgtgacgccctttgcccaggtcctggccagtctgcggaccgttcggagcaacgtggcggcccttgcccgccagcaatgcctaggagcagccaagcagggacccgtcggaaacccttcatccagcaatcagctccctcctgcagaggacacggggcagaagctggcattggagacgctagacgagctggactggtgcctggatcagttggagacgctgcagacccggcactcggtgggggagatggcctccaacaagttcaagcggatcctgaaccgggagttgacccacctgtccgaaaccagccgctccgggaaccaggtgtccgagtacatctcccggaccttcctggaccagcagaccgaggtggagctgcccaaggtgaccgctgaggaggccccacagcccatgtcccggatcagtggcctacatgggctctgccacagtgccagcctctcctcagccactgtcccacgctttggggtccagactgaccaggaggagcaactggccaaggagctagaagacaccaacaagtggggacttgatgtgttcaaggtggcggagctaagtgggaaccggcccctcacagctatcatattcagcatttttcaggagcgggacctgctgaagacattccagatcccagcagacacactggccacctacctgctgatgctggaaggtcactaccacgccaatgtggcctaccacaacagcctacatgccgccgacgtggcccagtccacgcatgtgctgctggctacgcccgccctcgaggctgtgttcacagacttggaaatcctggctgccctctttgcaagcgccatccacgacgtggaccatcctggggtctccaaccagtttctgattaacaccaactcagagctggcgcttatgtacaacgacgcctcggtgctggagaaccatcacctggctgtgggcttcaagctgctgcaggcagagaactgcgatatcttccagaacctcagcgccaagcagcgactgagtctgcgcaggatggtcattgacatggtgctggccacagacatgtccaaacacatgaacctcctggccgacctcaagaccatggtggagaccaagaaggtgacaagcctcggtgtcctcctcctggacaactattccgaccgaatccaggtcttgcagaacctggtgcactgtgctgatctgagcaaccccaccaagccgctgcccctgtaccgccagtggacggaccgcatcatggccgagttcttccagcagggagaccgcgagcgtgagtcgggcctggacatcagtcccatgtgtgacaagcatacggcctcagtggagaagtcccaggtgggtttcattgactacattgctcacccactgtgggagacttgggctgacctggtccacccagatgcacaggacctgctggacacgctggaggacaatcgagagtggtaccagagcaagatcccccgaagtccctcagacctcaccaaccccgagcgggacgggcctgacagattccagtttgaactgactctggaggaggcagaggaagaggatgaggaggaagaagaggagggggaagagacagctttagccaaagaggccttggagttgcctgacactgaactcctgtcccctgaagccggcccagaccctggggacttacccctcgacaaccagaggacttagggccagccctgcgtgaactgcaggggcaatggatggtaaagccctttggctcttggcaggcagactttccaggaagaggctccatgtggctcctgcttcactttcccacccatttagggagacaatcaagctcttagttataggtggctcccagggtctaattggaggcacctggctggggtccactctgaccctagacttgcctaaaagagctctctaaggggcagcctcttacgatgccctggtgtctttctcctgggcttctatccctgtgaggagaggtgctgtctgctggagcctctagtccaccctctccagtggtcactcttgagtcacatctgtcacttaattatttccttctttatcaaatatttattgctcatcta

SEQ ID NO: 11513 - protein, 680 aa, Homo sapiens
MQGPPAPAPVPGPGSPRGSPRGSPGLFRKLLVNQSIRLQRRFTVAHPLCFDLENGLSCGRRALDPQSSPGLGRIMQAPVPHSQRRESFLYRSDSDYELSPKAMSRNSSVASDLHGEDMIVTPFAQVLASLRTVRSNVAALARQQCLGAAKQGPVGNPSSSNQLPPAEDTGQKLALETLDELDWCLDQLETLQTRHSVGEMASNKFKRILNRELTHLSETSRSGNQVSEYISRTFLDQQTEVELPKVTAEEAPQPMSRISGLHGLCHSASLSSATVPRFGVQTDQEEQLAKELEDTNKWGLDVFKVAELSGNRPLTAIIFSIFQERDLLKTFQIPADTLATYLLMLEGHYHANVAYHNSLHAADVAQSTHVLLATPALEAVFTDLEILAALFASAIHDVDHPGVSNQFLINTNSELALMYNDASVLENHHLAVGFKLLQAENCDIFQNLSAKQRLSLRRMVIDMVLATDMSKHMNLLADLKTMVETKKVTSLGVLLLDNYSDRIQVLQNLVHCADLSNPTKPLPLYRQWTDRIMAEFFQQGDRERESGLDISPMCDKHTASVEKSQVGFIDYIAHPLWETWADLVHPDAQDLLDTLEDNREWYQSKIPRSPSDLTNPERDGPDRFQFELTLEEAEEEDEEEEEEGEETALAKEALELPDTELLSPEAGPDPGDLPLDNQRT

SEQ ID NO: 11514 - DNA, 3779 bp, Homo sapiens
gtgcgagggacaccgtctcggccccgggggtctcctgagaccctgtctccctgccctccatttagcagcgatcagtggacaatttctgtcttctccactccaagtccttgtcttggttcttttccatgcagcgctataggggacggcagacggttttcggggctggtgtgttgggggggggtctcttcagcccctagcttcaacaccccctcaccacgttcttctcccctgttctacccttcagcaccatctgggcatcgacagctcctcggtgtcggccccaccttgagccccagttccaccttctaccgcttcagcacctccggcgcggacagctcctcgctgtcgcctccactcccggccctgggccggacccgggagcagacgctcctcggcgcccgctcacggggacgagtcctgctccctgctatcccagacccctttctctggcgcatggagaacctgggggtcggcgaaggggcagaggcttgcagcaggttgagtcgctctcgcggccgccacagcatgaccagagccccgaagcacctgtggcggcaaccccggcgccccatccgcatccaacagcgcttctattcggatccggacaagtccgcgggctgccgcgagagggacctgagcccgcggccggagctcaggaagtcgcggctctcctggcccgtttcctcctgcaggcgctttgacctggaaaatgggctctcgtgtgggaggagggccctggaccctcagtccagccctggcctgggccggattatgcaggctccagtcccgcacagccagcggcgcgagtccttcctgtaccgctcagatagcgactatgaactctcgcccaaggccatgtctcggaactcctctgtggccagcgacctacatggagaggacatgattgtgacgccctttgcccaggtcctggccagtctgcggaccgttcggagcaacgtggcggcccttgcccgccagcaatgcctaggagcagccaagtaggtagagggcggggcggggcgggggcggggccggcagagacaaggtgggcggaaagcgggctgcaaattgaggctggggctccggcgcctccaggtgggtttgaggggcggggcctggtggacttgggggcggggcgagatgggcggagcagccacgcctgaggctgctgtaccgcaggcagggacccgtcggaaacccttcatccagcaatcagctccctcctgcaggtaaagtacctgttccttccctcccccgctgaggacagctgggagcttcctttccatagtgacctccccagtccatgagccccttatactggggctaattgtagccccgcccctgcaaaaacaataacgccctcggggatggaccccaccacactcatattacagatgaggaggctgaggcccagagatctcatggtcacacaggcactcggggaacagatctggaacttgggtccaggagtcctgggtggcccccgtgggaacagtttcagggtccagatgaagagacgaagtcgcgagaggcgtggggtccctgagcgggggggttgggcaggcccctgactgcctcggctcccagaggacacggggcagaagctggcattggagacgctagacgagctggactggtgcctggatcagttggagacgctgcagacccggcactcggtgggggagatggcctccaacaagttcaagcggatcctgaaccgggagttgacccacctgtccgaaaccagccgctccgggaaccaggtgtccgagtacatctcccggaccttcctggtagcgatggggtttcaccgtattgctcagactggtctcgaactcctgacctcaagtgatctgcccacctcgacctcccaaagcactgggattacaggcgtgagccactgcgtccggccgacagggtctttactccgaacttactttggttcctgtagaaagggaaataggttgattctggggtttggcaaaattcaggtcctgaggccaggccccagcaggtgaaatcggcttctctgagcttcaccctggcccatccgcagaccagcagaccgaggtggagctgcccaaggtgaccgctgaggaggccccacagcccatgtcccggatcagtggcctacatgggctctgccacagtgccagcctctcctcagccactgtcccacgctttggggtccagactgaccaggaggagcaactggccaaggagctagaagacaccaacaagtggggacttgatgtgttcaaggtggcggagctaagtgggaaccggcccctcacagctatcatattcagcatttttcaggagcgggacctgctgaagacattccagatcccagcagacacactggccacctacctgctgatgctggaaggtcactaccacgccaatgtggcctaccacaacagcctacatgccgccgacgtggcccagtccacgcatgtgctgctggctacgcccgccctcgaggctgtgttcacagacttggaaatcctggctgccctctttgcaagcgccatccacgacgtggaccatcctggggtctccaaccagtttctgattaacaccaactcagagctggcgcttatgtacaacgacgcctcggtgctggagaaccatcacctggctgtgggcttcaagctgctgcaggcagagaactgcgatatcttccagaacctcagcgccaagcagcgactgagtctgcgcaggatggtcattgacatggtgctggccacagacatgtccaaacacatgaacctcctggccgacctcaagaccatggtggagaccaagaaggtgacaagcctcggtgtcctcctcctggacaactattccgaccgaatccaggtcttgcagaacctggtgcactgtgctgatctgagcaaccccaccaagccgctgcccctgtaccgccagtggacggaccgcatcatggccgagttcttccagcagggagaccgcgagcgtgagtcgggcctggacatcagtcccatgtgtgacaagcatacggcctcagtggagaagtcccaggtgggtttcattgactacattgctcacccactgtgggagacttgggctgacctggtccacccagatgcacaggacctgctggacacgctggaggacaatcgagagtggtaccagagcaagatcccccgaagtccctcagacctcaccaaccccgagcgggacgggcctgacagattccagtttgaactgactctggaggaggcagaggaagaggatgaggaggaagaagaggagggggaagagacagctttagccaaagaggccttggagttgcctgacactgaactcctgtcccctgaagccggcccagaccctggggacttacccctcgacaaccagaggacttagggccagccctgcgtgaactgcaggggcaatggatggtaaagccctttggctcttggcaggcagactttccaggaagaggctccatgtggctcctgcttcactttcccacccatttagggagacaatcaagctcttagttataggtggctcccagggtctaattggaggcacctggctggggtccactctgaccctagacttgcctaaaagagctctctaaggggcagcctcttacgatgccctggtgtctttctcctgggcttctatccctgtgaggagaggtgctgtctgctggagcctctagtccaccctctccagtggtcactcttgagtcacatctgtcacttaattatttccttctttatcaaatatttattgctcatcta

SEQ ID NO: 11515 - protein, 426 aa, Homo sapiens
MSRISGLHGLCHSASLSSATVPRFGVQTDQEEQLAKELEDTNKWGLDVFKVAELSGNRPLTAIIFSIFQERDLLKTFQIPADTLATYLLMLEGHYHANVAYHNSLHAADVAQSTHVLLATPALEAVFTDLEILAALFASAIHDVDHPGVSNQFLINTNSELALMYNDASVLENHHLAVGFKLLQAENCDIFQNLSAKQRLSLRRMVIDMVLATDMSKHMNLLADLKTMVETKKVTSLGVLLLDNYSDRIQVLQNLVHCADLSNPTKPLPLYRQWTDRIMAEFFQQGDRERESGLDISPMCDKHTASVEKSQVGFIDYIAHPLWETWADLVHPDAQDLLDTLEDNREWYQSKIPRSPSDLTNPERDGPDRFQFELTLEEAEEEDEEEEEEGEETALAKEALELPDTELLSPEAGPDPGDLPLDNQRT

SEQ ID NO: 11516 - DNA, 1925 bp, Homo sapiens
accccctccggatccggcctctccttcccaccgcctaccacctcctcccaacaggtcctggccagtctgcggaccgttcggagcaacgtggcggcccttgcccgccagcaatgcctaggagcagccaattcaagcggatcctgaaccgggagttgacccacctgtccgaaaccagccgctccgggaaccaggtgtccgagtacatctcccggaccttcctggaccagcagaccgaggtggagctgcccaaggtgaccgctgaggaggccccacagcccatgtcccggatcagtggcctacatgggctctgccacagtgccagcctctcctcagccactgtcccacgctttggggtccagactgaccaggaggagcaactggccaaggagctagaagacaccaacaagtggggacttgatgtgttcaaggtggcggagctaagtgggaaccggcccctcacagctatcatattcagcatttttcaggagcgggacctgctgaagacattccagatcccagcagacacactggccacctacctgctgatgctggaaggtcactaccacgccaatgtggcctaccacaacagcctacatgccgccgacgtggcccagtccacgcatgtgctgctggctacgcccgccctcgaggctgtgttcacagacttggaaatcctggctgccctctttgcaagcgccatccacgacgtggaccatcctggggtctccaaccagtttctgattaacaccaactcagagctggcgcttatgtacaacgacgcctcggtgctggagaaccatcacctggctgtgggcttcaagctgctgcaggcagagaactgcgatatcttccagaacctcagcgccaagcagcgactgagtctgcgcaggatggtcattgacatggtgctggccacagacatgtccaaacacatgaacctcctggccgacctcaagaccatggtggagaccaagaaggtgacaagcctcggtgtcctcctcctggacaactattccgaccgaatccaggtcttgcagaacctggtgcactgtgctgatctgagcaaccccaccaagccgctgcccctgtaccgccagtggacggaccgcatcatggccgagttcttccagcagggagaccgcgagcgtgagtcgggcctggacatcagtcccatgtgtgacaagcatacggcctcagtggagaagtcccaggtgggtttcattgactacattgctcacccactgtgggagacttgggctgacctggtccacccagatgcacaggacctgctggacacgctggaggacaatcgagagtggtaccagagcaagatcccccgaagtccctcagacctcaccaaccccgagcgggacgggcctgacagattccagtttgaactgactctggaggaggcagaggaagaggatgaggaggaagaagaggagggggaagagacagctttagccaaagaggccttggagttgcctgacactgaactcctgtcccctgaagccggcccagaccctggggacttacccctcgacaaccagaggacttagggccagccctgcgtgaactgcaggggcaatggatggtaaagccctttggctcttggcaggcagactttccaggaagaggctccatgtggctcctgcttcactttcccacccatttagggagacaatcaagctcttagttataggtggctcccagggtctaattggaggcacctggctggggtccactctgaccctagacttgcctaaaagagctctctaaggggcagcctcttacgatgccctggtgtctttctcctgggcttctatccctgtgaggagaggtgctgtctgctggagcctctagtccaccctctccagtggtcactcttgagtcacatctgtcacttaattatttccttctttatc

SEQ ID NO: 11517 - protein, 482 aa, Homo sapiens; identical to SEQ ID NO: 11509

SEQ ID NO: 11518 - DNA, 2522 bp, Homo sapiens
ttcgacgtgatcagacccaactcagacccggtcatacttggaccgaatgctgccaaatcccccacctctacccagatctgagcctacgcggggtgccgacccagctcgtggacggggatacggtgacctttgacccaaaagtcttggccgggaccagccggacactggccctcggccgggagctccgagtctcaggcggtcccggttgtcttcctgtcggtgccgcttccgcctgcccttcttgaaaacccacccccagctttgacctggaaaatgggctctcgtgtgggaggagggccctggaccctcagtccagccctggcctgggccggattatgcaggctccagtcccgcacagccagcggcgcgagtccttcctgtaccgctcagatagcgactatgaactctcgcccaaggccatgtctcggaactcctctgtggccagcgacctacatggagaggacatgattgtgacgccctttgcccaggtcctggccagtctgcggaccgttcggagcaacgtggcggcccttgcccgccagcaatgcctaggagcagccaagcagggacccgtcggaaacccttcatccagcaatcagctccctcctgcagaggacacggggcagaagctggcattggagacgctagacgagctggactggtgcctggatcagttggagacgctgcagacccggcactcggtgggggagatggcctccaacaagttcaagcggatcctgaaccgggagttgacccacctgtccgaaaccagccgctccgggaaccaggtgtccgagtacatctcccggaccttcctggaccagcagaccgaggtggagctgcccaaggtgaccgctgaggaggccccacagcccatgtcccggatcagtggcctacatgggctctgccacagtgccagcctctcctcagccactgtcccacgctttggggtccagactgaccaggaggagcaactggccaaggagctagaagacaccaacaagtggggacttgatgtgttcaaggtggcggagctaagtgggaaccggcccctcacagctatcatattcagcatttttcaggagcgggacctgctgaagacattccagatcccagcagacacactggccacctacctgctgatgctggaaggtcactaccacgccaatgtggcctaccacaacagcctacatgccgccgacgtggcccagtccacgcatgtgctgctggctacgcccgccctcgaggctgtgttcacagacttggaaatcctggctgccctctttgcaagcgccatccacgacgtggaccatcctggggtctccaaccagtttctgattaacaccaactcagagctggcgcttatgtacaacgacgcctcggtgctggagaaccatcacctggctgtgggcttcaagctgctgcaggcagagaactgcgatatcttccagaacctcagcgccaagcagcgactgagtctgcgcaggatggtcattgacatggtgctggccacagacatgtccaaacacatgaacctcctggccgacctcaagaccatggtggagaccaagaaggtgacaagcctcggtgtcctcctcctggacaactattccgaccgaatccaggtcttgcagaacctggtgcactgtgctgatctgagcaaccccaccaagccgctgcccctgtaccgccagtggacggaccgcatcatggccgagttcttccagcagggagaccgcgagcgtgagtcgggcctggacatcagtcccatgtgtgacaagcatacggcctcagtggagaagtcccaggtgggtttcattgactacattgctcacccactgtgggagacttgggctgacctggtccacccagatgcacaggacctgctggacacgctggaggacaatcgagagtggtaccagagcaagatcccccgaagtccctcagacctcaccaaccccgagcgggacgggcctgacagattccagtttgaactgactctggaggaggcagaggaagaggatgaggaggaagaagaggagggggaagagacagctttagccaaagaggccttggagttgcctgacactgaactcctgtcccctgaagccggcccagaccctggggacttacccctcgacaaccagaggacttagggccagccctgcgtgaactgcaggggcaatggatggtaaagccctttggctcttggcaggcagactttccaggaagaggctccatgtggctcctgcttcactttcccacccatttagggagacaatcaagctcttagttataggtggctcccagggtctaattggaggcacctggctggggtccactctgaccctagacttgcctaaaagagctctctaaggggcagcctcttacgatgccctggtgtctttctcctgggcttctatccctgtgaggagaggtgctgtctgctggagcctctagtccaccctctccagtggtcactcttgagtcacatctgtcacttaattatttccttctttatc

SEQ ID NO: 11519 - protein, 606 aa, Homo sapiens; identical to SEQ ID NO: 11511

SEQ ID NO: 11520 - DNA, 2469 bp, Homo sapiens
gctgtccagaaaaggtcccgcgcagccggcgctcggtccagcctccacgcagtcctggcgatgcagggcccccccgcgcccgccccggtccccgggcccggctcccctcggggatccccgcgcggctcccccgggctcttcaggaagcttttggtgaatcagagcatccgcctgcagcggcgcttcacggtggcccatccgctgtgctttgacctggaaaatgggctctcgtgtgggaggagggccctggaccctcagtccagccctggcctgggccggattatgcaggctccagtcccgcacagccagcggcgcgagtccttcctgtaccgctcagatagcgactatgaactctcgcccaaggccatgtctcggaactcctctgtggccagcgacctacatggagaggacatgattgtgacgccctttgcccaggtcctggccagtctgcggaccgttcggagcaacgtggcggcccttgcccgccagcaatgcctaggagcagccaagcagggacccgtcggaaacccttcatccagcaatcagctccctcctgcagaggacacggggcagaagctggcattggagacgctagacgagctggactggtgcctggatcagttggagacgctgcagacccggcactcggtgggggagatggcctccaacaagttcaagcggatcctgaaccgggagttgacccacctgtccgaaaccagccgctccgggaaccaggtgtccgagtacatctcccggaccttcctggaccagcagaccgaggtggagctgcccaaggtgaccgctgaggaggccccacagcccatgtcccggatcagtggcctacatgggctctgccacagtgccagcctctcctcagccactgtcccacgctttggggtccagactgaccaggaggagcaactggccaaggagctagaagacaccaacaagtggggacttgatgtgttcaaggtggcggagctaagtgggaaccggcccctcacagctatcatattcagcatttttcaggagcgggacctgctgaagacattccagatcccagcagacacactggccacctacctgctgatgctggaaggtcactaccacgccaatgtggcctaccacaacagcctacatgccgccgacgtggcccagtccacgcatgtgctgctggctacgcccgccctcgaggctgtgttcacagacttggaaatcctggctgccctctttgcaagcgccatccacgacgtggaccatcctggggtctccaaccagtttctgattaacaccaactcagagctggcgcttatgtacaacgacgcctcggtgctggagaaccatcacctggctgtgggcttcaagctgctgcaggcagagaactgcgatatcttccagaacctcagcgccaagcagcgactgagtctgcgcaggatggtcattgacatggtgctggccacagacatgtccaaacacatgaacctcctggccgacctcaagaccatggtggagaccaagaaggtgacaagcctcggtgtcctcctcctggacaactattccgaccgaatccaggtcttgcagaacctggtgcactgtgctgatctgagcaaccccaccaagccgctgcccctgtaccgccagtggacggaccgcatcatggccgagttcttccagcagggagaccgcgagcgtgagtcgggcctggacatcagtcccatgtgtgacaagcatacggcctcagtggagaagtcccaggtgggtttcattgactacattgctcacccactgtgggagacttgggctgacctggtccacccagatgcacaggacctgctggacacgctggaggacaatcgagagtggtaccagagcaagatcccccgaagtccctcagacctcaccaaccccgagcgggacgggcctgacagattccagtttgaactgactctggaggaggcagaggaagaggatgaggaggaagaagaggagggggaagagacagctttagccaaagaggccttggagttgcctgacactgaactcctgtcccctgaagccggcccagaccctggggacttacccctcgacaaccagaggacttagggccagccctgcgtgaactgcaggggcaatggatggtaaagccctttggctcttggcaggcagactttccaggaagaggctccatgtggctcctgcttcactttcccacccatttagggagacaatcaagctcttagttataggtggctcccagggtctaattggaggcacctggctggggtccactctgaccctagacttgcctaaaagagctctctaaggggcagcctcttacgatgccctggtgtctttctcctgggcttctatccctgtgaggagaggtgctgtctgctggagcctctagtccaccctctccagtggtcactcttgagtcacatctgtcacttaattatttccttctttatc

SEQ ID NO: 11521 - protein, 680 aa, Homo sapiens; identical to SEQ ID NO: 11513

SEQ ID NO: 11522 - DNA, 657 bp, Homo sapiens
agcctccacgcagtcctggcgatgcagggcccccccgcgcccgccccggtccccgggcccggctcccctcggggatccccgcgcggctcccccgggctcttcaggaagcttttggtgaatcagagcatccgcctgcagcggcgcttcacggtggcccatccgctgtgctttgacctggaaaatgggctctcgtgtgggaggagggccctggaccctcagtccagccctggcctgggccggattatgcaggctccagtcccgcacagccagcggcgcgagtccttcctgtaccgctcagatagcgactatgaactctcgcccaaggccatgtctcggaactcctctgtggccagcgacctacatggagaggacatgattgtgacgccctttgcccaggtcctggccagtctgcggaccgttcggagcaacgtggcggcccttgcccgccagcaatgcctaggagcagccaagtaggtagagggcggggcggggcgggggcggggccggcagagacaaggtgggcggaaagcgggctgcaaattgaggctggggctccggcgcctccaggtgggtttgaggggcggggcctggtggacttgggggcggggcgagatgggcggagcagccacgcctgaggctgctgtaccgcaggcaggg

SEQ ID NO: 11523 - protein, 150 aa, Homo sapiens
MQGPPAPAPVPGPGSPRGSPRGSPGLFRKLLVNQSIRLQRRFTVAHPLCFDLENGLSCGRRALDPQSSPGLGRIMQAPVPHSQRRESFLYRSDSDYELSPKAMSRNSSVASDLHGEDMIVTPFAQVLASLRTVRSNVAALARQQCLGAAK

SEQ ID NO: 11524 - DNA, 711 bp, Homo sapiens
atggcgtgcccccagctgccgccacttctgcttttggtgctggtggtgctgctgaaagctggtgtgaattacaatactccctttacaggccacgctggtccgccaaccctccgaggaaggctgggttttcccccagaaacaaacggagcagctgtgaggacagatgaggcaccgctgctcccaagccctggggctgtgggtcctgcaactccaggcctggggggctacatagagatctggggagggtggcatgtggacccagccccctctcagggccagtgttgtgtgttatttccgcatttctgctgcctaggttccgaatccctgaccccgcactggagccccacttcccacagccccggaacggagcccttgacctccactgaccagaccttggagccccctggcccagctccaggtgacactgggccccgtgagttacacaggaacccgagtgtggtggtggtcgtgtgtttgctggtgtctcttttgctcatcgggtctgtggtcatggctgtgagattctgtcaccggaatgagtccaagtttgagaacctggacgaggtgtccatgggatccgtgaatgacagattgtcctttgcccaccacctccaggagtgagccctgaggagccaacagagatgggggcatggatggggctggggttcctggggaggagcagaacctgaggaaataaagcccctaccattc

SEQ ID NO: 11525 - protein, 206 aa, Homo sapiens
MACPQLPPLLLLVLVVLLKAGVNYNTPFTGHAGPPTLRGRLGFPPETNGAAVRTDEAPLLPSPGAVGPATPGLGGYIEIWGGWHVDPAPSQGQCCVLFPHFCCLGSESLTPHWSPTSHSPGTEPLTSTDQTLEPPGPAPGDTGPRELHRNPSVVVVVCLLVSLLLIGSVVMAVRFCHRNESKFENLDEVSMGSVNDRLSFAHHLQE

SEQ ID NO: 11526 - DNA, 689 bp, Homo sapiens
tcagctctctgatttcttctcccttcgcccacagcacccacagttcaggggaaccccccaaatcctactccagcaccatgagtttggagacagactccataacccacctcagcccctcaagttcaggggcaacccctaccatccagccgagccccagctccacagattcaaggatgataccctcctccccacaaccagagacaatcacgcaccctagttctggctcccccagtgcagagctcaccccctcttcccattccaccctccccagttccgaatccctgaccccgcactggagccccacttcccacagccccggaacggagcccttgacctccactgaccagaccttggagccccctggcccagctccaggtgacactgggccccgtgagttacacaggaacccgagtgtggtggtggtcgtgtgtttgctggtgtctcttttgctcatcgggtctgtggtcatggctgtgagattctgtcaccggaatgagtccaagtttgagaacctggacgaggtgtccatggtaaggtagggctgggctgggggctcagccctggggccaaggcatggttgggggagctgctatcccaagcagggccaacctgggctgcagagccttttggtgtctgaatgcctccctgtgtgttccttcctcagggatccgtgaatgacagattgtcct

SEQ ID NO: 11527 - protein, 153 aa, Homo sapiens
MSLETDSITHLSPSSSGATPTIQPSPSSTDSRMIPSSPQPETITHPSSGSPSAELTPSSHSTLPSSESLTPHWSPTSHSPGTEPLTSTDQTLEPPGPAPGDTGPRELHRNPSVVVVVCLLVSLLLIGSVVMAVRFCHRNESKFENLDEVSMVR

SEQ ID NO: 11528 - DNA, 1119 bp, Homo sapiens
gcaggatggggaatcctagtcttcttcagaggtcagggaccaccagcatggtctcacatgtgccactatatccgtcctcggctagaagggcattgtccagtcccttccagacagaagctgtccccaatccactccagaaaacagtgtctggaaacatggctccgagcagccgctgggacgccatgggccctaaaaattcctacagatccgtgcatggtaggattgttccagaactgctagaaagttctgtggccagggttaggcccttacagtatgtgcaaagacaaccatcccaggcctcagcccgaagtggtgcaaaccccacccacaggccctctgcagaggtaaggcccgtcatccgcactggggagatgacacactcctcggtcattcctccgctggccccgggagttcggagggtgtctctaggctatgagtcttccccaagtggttccctgccacccctttttaaccaggagtcaccgtggagacggcaggactcctatagcccccagaatcctgccgttagtcacaaggcatccctgaactccactatactccagggccccgcggacgctggtgtggttggtggccaatcgtggaaccgcgcatgggagccagccaggggtgctgcgtcctgggacacctggcgcaacaaggcggtggtgcctcccaggcggtccggggagccaatggtgtccatgcaggctgcagaggagatccgcatcctcgcagtgatcactatccaggcgggcgtccgtggctacctggcgcgtcgcaggatccggctaccagctggctgccctgagtcccaggcagccgcatcgccaggacaaagcggccacagccatccagtccgcctggaggggctttaagatccgccagcagatgaggcagcagcaaatggcagcgaagatagttcaagccacctggcgaggccaccatacccggagctgtctgaagaacacagaggcgctcttgggaccagcagacccctcggccagctcacggcacatgcattggcctggcatctaggaccctggctccctgcagtggggacttcgtgggaggcactcatggctctctgggtctaatgaataaagtcctccacagcctaga

SEQ ID NO: 11529 - protein, 289 aa, Homo sapiens
MGNPSLLQRSGTTSMVSHVPLYPSSARRALSSPFQTEAVPNPLQKTVSGNMAPSSRWDAMGPKNSYRSVHGRIVPELLESSVARVRPLQYVQRQPSQASARSGANPTHRPSAEVRPVIRTGEMTHSSVIPPLAPGVRRVSLGYESSPSGSLPPLFNQESPWRRQDSYSPQNPAVSHKASLNSTILQGPADAGVVGGQSWNRAWEPARGAASWDTWRNKAVVPPRRSGEPMVSMQAAEEIRILAVITIQAGVRGYLARRRIRLPAGCPESQAAASPGQSGHSHPVRLEGL

SEQ ID NO: 11530 - DNA, 3932 bp, Homo sapiens
ccaaaccaagctcacgcatctataaccagcaggatgtcccctagcagagctcatgcatctatgacctgtatggtgtccccaagccaggttcatcgatctatgcccagtgaggtgtccccaagccttgcccagctatctcaggccaccactgcagtgcccttaagaccagctcatcaacctatggcctgtggtgtatccccaagcctagcccagccgtctcaagccacagggatgtcttcaaggctagcccaccaacctatgacctgtgtggtgtccttaagcccagcccagccatctcaagccattggtgtgtccccaagcctacccacccatctcagaccactgcagtatccccaaggcaagcccaaccatctgtggcctccagtccaggcaagacaaattcatcctgtaccctagcctccagcctagccgagccagctatagcccccagcctattcccaccatctgtggcccacacggaagccctaagcctggctcagtcacccccggacactaggttggccccaagccgatcccagccatctgtggtcagtggtacatgtcatggcctcaatgagccatgctggggctctaggctggattcaaatctgcagtgttcaagggtggactcagtagccccgtgtctgtgtcacccatcagcgtttgtttcagttagcctgggtggaccatatccctctgtggctggaaatatggaccagggtctgaaccagccatccctgggtactggggtgaacctatgtgaagaacctctgatggttagtgagatggtatccagccccccggacttcaagttcaacgacgtgtcccttgggttccatcatccacccagggttggtgggaggcatgtgtgtccaccctctgtggttagtgtttcaacaccaaatctctctcatgctgatgaggaggcctgttgtgtaggccagtgaatcacgcctctgttcaggggtgtggctgtaagccatccccaggagcctttggctgatgctatgttccccagtgggtctcaggggaccacatctcctggcctagctgggaatctcccctggagaaccatagcaactggcatgggccaaagtcaatgtcaggtggccaatggcatggcttcccttgcatcccaggtcttagaggcaggtggccctttgacacatccctctggaaccacagggatggcccccagcccctctctggcttcagtgcccaacagactggccgtgactcagtctaatctttccctgaacagcatggaccccagcagctcccagatcagtgtggttattccaaaaaacatagactgctggcacccttctgaggcatccatggtcccacccagttaccagcagagagatgtgattccgcaggactctctgaagagcagggctggtcgtggtgcggcaggaggttttgtagccagtagaatgagcacgggcgcagtcccaggcactctgcctggtggcataacctccagccttcccccgggctccaccatccgaggcatgggtcacagccttcccgcaggctctgtgtccagttgggtggctcccagtctgatggcagacagaaagaagccaagtctatctgtaagaccctccgctagcttagctgctccaaacttgctcccaggttcagtagtgagtcgggtgagcccagttgtccccctggttctgtgccaatgatgggggcctctagtgtggctcagagctgctccaaggggcccatggtgattgacatcactgcccctccttacctcaaagcctggctggggagaggtctttagcccccttgcagatgccccacaccaccagtctggctccaggtcactcctcagccccggcagctagtggcacagtgaggagtctacaccgagtgcccacggttctatcaagagccttacaattgagccaagatgctaggataatgccatctggggtcacaggggaccaagccaagctaggagaattggatgaggctgtgttccaagtgtcaggatcaagtggatccaatgacctattcagcaaagccagggtcactggtgcaacccagtggatgtactccagtcctctgggagctgatgggggccatgatcataggtccctgtctgagaaagggtctcttccccaagggaggtggctcccagccatgctagtggcatggtccctgtccctttccaggccccgggtttagccactaagtccccctcagtttatcaacaggggtctgtcactcacgtcatacccccaaatcactctcagggtacagtggcttctaatgtagtctcaggatcaccccagctggcccgtggcagtactgaggctttcagattgctttcagtgtctgtgggcaggatggggaatcctagtcttcttcagaggtcagggaccaccagcatggtctcacatgtgccactatatccgtcctcggctagaagggcattgtccagtcccttccagacagaagctgtccccaatccactccagaaaacagtgtctggaaacatggctccgagcagccgctgggacgccatgggccctaaaaattcctacagatccgtgcatggtaggattgttccagaactgctagaaagttctgtggccagggttaggcccttacagtatgtgcaaagacaaccatcccaggcctcagcccgaagtggtgcaaaccccacccacaggccctctgcagaggtaaggcccgtcatccgcactggggagatgacacactcctcggtcattcctccgctggccccgggagttcggagggtgtctctaggctatgagtcttccccaagtggttccctgccacccctttttaaccaggagtcaccgtggagacggcaggactcctatagcccccagaatcctgccgttagtcacaaggcatccctgaactccactatactccagggccccgcggacgctggtgtggttggtggccaatcgtggaaccgcgcatgggagccagccaggggtgctgcgtcctgggacacctggcgcaacaaggcggtggtgcctcccaggcggtccggggagccaatggtgtccatgcaggctgcagaggagatccgcatcctcgcagtgatcactatccaggcgggcgtccgtggctacctggcgcgtcgcaggatccggctgtggcaccggggggccatggtcatccaagctacttggcgcggctaccgtgtgcggcggaacctggcacacctctgcagagccaccacgaccatccagtctgcctggcgcggctacagcacccgccgggaccaagcccggcactggcagatgctccaccccgtcacgtgggtggagctgggcagccgggccggggtcatgtctgaccgaagctggttccaggatggcagagccaggacagtatctgaccatcgctgcttccagtcctgccaggcacacgcttgcagcgtctgccactccctgagctccaggatcgggagcccgcccagcgtggtgatgctagtgggctccagccctcgcacctgtcatacctgtggacgcacacagcccacccgtgtggtgcagggcatgggccagggcactgagggccccggggcagtgtcttgggcctccgcctaccagctggctgccctgagtcccaggcagccgcatcgccaggacaaagcggccacagccatccagtccgcctggaggggctttaagatccgccagcagatgaggcagcagcaaatggcagcgaagatagttcaagccacctggcgaggccaccatacccggagctgtctgaagaacacagaggcgctcttgggaccagcagacccctcggccagctcacggcacatgcattggcctggcatctaggaccctggctccctgcagtggggacttcgtgggaggcactcatggctctctgggtctaatgaataaagtcctccacagcctaga

SEQ ID NO: 11531 - protein, 127 aa, Homo sapiens
MSPSRAHASMTCMVSPSQVHRSMPSEVSPSLAQLSQATTAVPLRPAHQPMACGVSPSLAQPSQATGMSSRLAHQPMTCVVSLSPAQPSQAIGVSPSLPTHLRPLQYPQGKPNHLWPPVQARQIHPVP

SEQ ID NO: 11532 - DNA, 5138 bp, Homo sapiens
aagtccagactacccatctcagtctgttggggagtacccaatgctggctcagccatttcagcccactgaggtgtccccaagtccaacctacccatctcaggccatgaggtgtccccaagtgcagcctactcatatcagcccactgaggtgtccccaaacccaggctacctatctatggccattgagatgtccccaagcccagaatacccatcttggccactgaggtgtccccaagcccaggctacccatctcagctcactgaggtgtccccaagctcaggctacctatctgtggccactgaagtgtccccaagcccagactactcatctcagcctactgagatgtccccaagctcaggctacctatctatggccactgaggtgtccccaagcccaggctacccatttcagcccactgaggtgtccccaagcccagactatccatgtgtggccactggggagtcccctagccttgcccagccatctcagcccactgaggtgtccccaagctcagcctacccatctgtggtcactggggagtctccaagcctggcccagtcatatcagcgcactgaggtgttcccaagcccagcctacccatttatggccactgaggtgtccccaagcccaggcgacccatctgtggtcactggggagtccccaagcccagcctacccatctcagcccactgagatgtccccaagcccagcctacccatctcagcccactggggagtctccaagcctgacccagccatctctgaccatcagagtgtccccaagcctagccatgtcatctcagactattggagtgtccccaagcctagccatgccatctcagaccattggagtgtccccaagcctagccatgccatttcacaccattggagtgtccccaaccctagctcacccatctatggccattcgggagtctccaagcctggcccagcctcctcagtccactggggaatccccaagcttgacctggccatctcaggccactggggtgtccccaagtgtagcccaccaatctgtggccagtagggtttcctcaagcctagcccagccatctcaagccagtgggatgtcccctagacaagattacccaccagtggcctccagggtgtccccaaaccaagctcacgcatctataaccagcaggatgtcccctagcagagctcatgcatctatgacctgtatggtgtccccaagccaggttcatcgatctatgcccagtgaggtgtccccaagccttgcccagctatctcaggccaccactgcagtgcccttaagaccagctcatcaacctatggcctgtggtgtatccccaagcctagcccagccgtctcaagccacagggatgtcttcaaggctagcccaccaacctatgacctgtgtggtgtccttaagcccagcccagccatctcaagccattggtgtgtccccaagcctagcccacccatcaggaccccatgggttgtctccaagtctagctcacccatatgtggccagtggggcgggctccagcctagcccacccatctcagaccactgcagtatccccaaggcaagcccaaccatctgtggcctccagtccaggcaagacaaattcatcctgtaccctagcctccagcctagccgagccagctatagcccccagcctattcccaccatctgtggcccacacggaagccctaagcctggctcagtcacccccggacactaggttggccccaagccgatcccagccatctgtggtcagtggtacatgtcatggcctcaatgagccatgctggggctctaggctggattcaaatctgcagtgttcaagggtggactcagtagccccgtgtctgtgtcacccatcagcgtttgtttcagttagcctgggtggaccatatccctctgtggctggaaatatggaccagggtctgaaccagccatccctgggtactggggtgaacctatgtgaagaacctctgatggttagtgagatggtatccagccccccggacttcaagttcaacgacgtgtcccttgggttccatcatccacccagggttggtgggaggcatgtgtgtccaccctctgtggttagtgtttcaacaccaaatctctctcatgctgatgaggaggcctgttgtgtaggccagtgaatcacgcctctgttcaggggtgtggctgtaagccatccccaggagcctttggctgatgctatgttccccagtgggtctcaggggaccacatctcctggcctagctgggaatctcccctggagaaccatagcaactggcatgggccaaagtcaatgtcaggtggccaatggcatggcttcccttgcatcccaggtcttagaggcaggtggccctttgacacatccctctggaaccacagggatggcccccagcccctctctggcttcagtgcccaacagactggccgtgactcagtctaatctttccctgaacagcatggaccccagcagctcccagatcagtgtggttattccaaaaaacatagactgctggcacccttctgaggcatccatggtcccacccagttaccagcagagagatgtgattccgcaggactctctgaagagcagggctggtcgtggtgcggcaggaggttttgtagccagtagaatgagcacgggcgcagtcccaggcactctgcctggtggcataacctccagccttcccccgggctccaccatccgaggcatgggtcacagccttcccgcaggctctgtgtccagttgggtggctcccagtctgatggcagacagaaagaagccaagtctatctgtaagaccctccgctagcttagctgctccaaacttgctcccaggttcagtagtgagtcgggtgagcccagttgtccccctggttctgtgccaatgatgggggcctctagtgtggctcagagctgctccaaggggcccatggtgattgacatcactgcccctccttacctcaaagcctggctggggagaggtctttagcccccttgcagatgccccacaccaccagtctggctccaggtcactcctcagccccggcagctagtggcacagtgaggagtctacaccgagtgcccacggttctatcaagagccttacaattgagccaagatgctaggataatgccatctggggtcacaggggaccaagccaagctaggagaattggatgaggctgtgttccaagtgtcaggatcaagtggatccaatgacctattcagcaaagccagggtcactggtgcaacccagtggatgtactccagtcctctgggagctgatgggggccatgatcataggtccctgtctgagaaagggtctcttccccaagggaggtggctcccagccatgctagtggcatggtccctgtccctttccaggccccgggtttagccactaagtccccctcagtttatcaacaggggtctgtcactcacgtcatacccccaaatcactctcagggtacagtggcttctaatgtagtctcaggatcaccccagctggcccgtggcagtactgaggctttcagattgctttcagtgtctgtgggcaggatggggaatcctagtcttcttcagaggtcagggaccaccagcatggtctcacatgtgccactatatccgtcctcggctagaagggcattgtccagtcccttccagacagaagctgtccccaatccactccagaaaacagtgtctggaaacatggctccgagcagccgctgggacgccatgggccctaaaaattcctacagatccgtgcatggtaggattgttccagaactgctagaaagttctgtggccagggttaggcccttacagtatgtgcaaagacaaccatcccaggcctcagcccgaagtggtgcaaaccccacccacaggccctctgcagaggtaaggcccgtcatccgcactggggagatgacacactcctcggtcattcctccgctggccccgggagttcggagggtgtctctaggctatgagtcttccccaagtggttccctgccacccctttttaaccaggagtcaccgtggagacggcaggactcctatagcccccagaatcctgccgttagtcacaaggcatccctgaactccactatactccagggccccgcggacgctggtgtggttggtggccaatcgtggaaccgcgcatgggagccagccaggggtgctgcgtcctgggacacctggcgcaacaaggcggtggtgcctcccaggcggtccggggagccaatggtgtccatgcaggctgcagaggagatccgcatcctcgcagtgatcactatccaggcgggcgtccgtggctacctggcgcgtcgcaggatccggctgtggcaccggggggccatggtcatccaagctacttggcgcggctaccgtgtgcggcggaacctggcacacctctgcagagccaccacgaccatccagtctgcctggcgcggctacagcacccgccgggaccaagcccggcactggcagatgctccaccccgtcacgtgggtggagctgggcagccgggccggggtcatgtctgaccgaagctggttccaggatggcagagccaggacagtatctgaccatcgctgcttccagtcctgccaggcacacgcttgcagcgtctgccactccctgagctccaggatcgggagcccgcccagcgtggtgatgctagtgggctccagccctcgcacctgtcatacctgtggacgcacacagcccacccgtgtggtgcagggcatgggccagggcactgagggccccggggcagtgtcttgggcctccgcctaccagctggctgccctgagtcccaggcagccgcatcgccaggacaaagcggccacagccatccagtccgcctggaggggctttaagatccgccagcagatgaggcagcagcaaatggcagcgaagatagttcaagccacctggcgaggccaccatacccggagctgtctgaagaacacagaggcgctcttgggaccagcagacccctcggccagctcacggcacatgcattggcctggcatctaggaccctggctccctgcagtggggacttcgtgggaggcactcatggctctctgggtctaatgaataaagtcctccacagcctaga

SEQ ID NO: 11533 - protein, 190 aa, Homo sapiens
MAIEMSPSPEYPSWPLRCPQAQATHLSSLRCPQAQATYLWPLKCPQAQTTHLSLLRCPQAQATYLWPLRCPQAQATHFSPLRCPQAQTIHVWPLGSPLALPSHLSPLRCPQAQPTHLWSLGSLQAWPSHISALRCSQAQPTHLWPLRCPQAQATHLWSLGSPQAQPTHLSPLRCPQAQPTHLSPLGSLQA

SEQ ID NO: 11534 - DNA, 5367 bp, Homo sapiens
gcacagccatctgtggtgactaggaggtccccaagccgaggacacccatcaaggacctttagagtggcctcagaccaaggtcaccaatcaatggctaactgggggtcccaaaacctagcccagccatctatggacagtggggagccctcaagcctagcccagccatctcaagcccctggggtaacctcaaatctggcccagccatctcaagcctttggggtgtctccaagtccagactacccatctcagtctgttggggagtacccaatgctggctcagccatttcagcccactgaggtgtccccaagtccaacctacccatctcaggccattagggagtacccaaccctggcacagccatttcagcccactgaggtatctccaagcccagcccacccatatcagctcactgaggtgtccccaagtgcagcctactcatatcagcccactgaggtgtccccaaacccaggctacctatctatggccattgagatgtccccaagcccagaatacccatctgtggccactgaggtgtccccaagcccaacctacccatatcagcccactgagatatccccaagctcaggctacctatctgtggccactgaggtgtccccaagcccaggctacccatctcagctcactgaggtgtccccaagctcaggctacctatctgtggccactgaagtgtccccaagcccagactactcatctcagcctactgagatgtccccaagctcaggctacctatctatggccactgaggtgtccccaagcccaggctacccatttcagcccactgaggtgtccccaagcccagactatccatgtgtggccactggggagtcccctagccttgcccagccatctcagcccactgaggtgtccccaagctcagcctacccatctgtggtcactggggagtctccaagcccagcctacccatctcagcccactggggagtctccaagcctgacccagccatctctgaccatcagagtgtccccaagcctagccatgtcatctcagactattggagtgtccccaagcctagccatgccatctcagaccattggagtgtccccaagcctagccatgccatttcacaccattggagtgtccccaaccctagctcacccatctatggccattcgggagtctccaagcctggcccagcctcctcagtccactggggaatccccaagcttgacctggccatctcaggccactggggtgtccccaagtgtagcccaccaatctgtggccagtagggtttcctcaagcctagcccagccatctcaagccagtgggatgtcccctagacaagattacccaccagtggcctccagggtgtccccaaaccaagctcacgcatctataaccagcaggatgtcccctagcagagctcatgcatctatgacctgtatggtgtccccaagccaggttcatcgatctatgcccagtgaggtgtccccaagccttgcccagctatctcaggccaccactgcagtgcccttaagaccagctcatcaacctatggcctgtggtgtatccccaagcctagcccagccgtctcaagccacagggatgtcttcaaggctagcccaccaacctatgacctgtgtggtgtccttaagcccagcccagccatctcaagccattggtgtgtccccaagcctagcccacccatcaggaccccatgggttgtctccaagtctagctcacccatatgtggccagtggggcgggctccagcctagcccacccatctcagaccactgcagtatccccaaggcaagcccaaccatctgtggcctccagtccaggcaagacaaattcatcctgtaccctagcctccagcctagccgagccagctatagcccccagcctattcccaccatctgtggcccacacggaagccctaagcctggctcagtcacccccggacactaggttggccccaagccgatcccagccatctgtggtcagtggtacatgtcatggcctcaatgagccatgctggggctctaggctggattcaaatctgcagtgttcaagggtggactcagtagccccgtgtctgtgtcacccatcagcgtttgtttcagttagcctgggtggaccatatccctctgtggctggaaatatggaccagggtctgaaccagccatccctgggtactggggtgaacctatgtgaagaacctctgatggttagtgagatggtatccagccccccggacttcaagttcaacgacgtgtcccttgggttccatcatccacccagggttggtgggaggcatgtgtgtccaccctctgtggttagtgtttcaacaccaaatctctctcatgctgatgaggaggcctgttgtgtaggccagtgaatcacgcctctgttcaggggtgtggctgtaagccatccccaggagcctttggctgatgctatgttccccagtgggtctcaggggaccacatctcctggcctagctgggaatctcccctggagaaccatagcaactggcatgggccaaagtcaatgtcaggtggccaatggcatggcttcccttgcatcccaggtcttagaggcaggtggccctttgacacatccctctggaaccacagggatggcccccagcccctctctggcttcagtgcccaacagactggccgtgactcagtctaatctttccctgaacagcatggaccccagcagctcccagatcagtgtggttattccaaaaaacatagactgctggcacccttctgaggcatccatggtcccacccagttaccagcagagagatgtgattccgcaggactctctgaagagcagggctggtcgtggtgcggcaggaggttttgtagccagtagaatgagcacgggcgcagtcccaggcactctgcctggtggcataacctccagccttcccccgggctccaccatccgaggcatgggtcacagccttcccgcaggctctgtgtccagttgggtggctcccagtctgatggcagacagaaagaagccaagtctatctgtaagaccctccgctagcttagctgctccaaacttgctcccaggttcagtagtgagtcgggtgagcccagttgtccccctggttctgtgccaatgatgggggcctctagtgtggctcagagctgctccaaggggcccatggtgattgacatcactgcccctccttacctcaaagcctggctggggagaggtctttagcccccttgcagatgccccacaccaccagtctggctccaggtcactcctcagccccggcagctagtggcacagtgaggagtctacaccgagtgcccacggttctatcaagagccttacaattgagccaagatgctaggataatgccatctggggtcacaggggaccaagccaagctaggagaattggatgaggctgtgttccaagtgtcaggatcaagtggatccaatgacctattcagcaaagccagggtcactggtgcaacccagtggatgtactccagtcctctgggagctgatgggggccatgatcataggtccctgtctgagaaagggtctcttccccaagggaggtggctcccagccatgctagtggcatggtccctgtccctttccaggccccgggtttagccactaagtccccctcagtttatcaacaggggtctgtcactcacgtcatacccccaaatcactctcagggtacagtggcttctaatgtagtctcaggatcaccccagctggcccgtggcagtactgaggctttcagattgctttcagtgtctgtgggcaggatggggaatcctagtcttcttcagaggtcagggaccaccagcatggtctcacatgtgccactatatccgtcctcggctagaagggcattgtccagtcccttccagacagaagctgtccccaatccactccagaaaacagtgtctggaaacatggctccgagcagccgctgggacgccatgggccctaaaaattcctacagatccgtgcatggtaggattgttccagaactgctagaaagttctgtggccagggttaggcccttacagtatgtgcaaagacaaccatcccaggcctcagcccgaagtggtgcaaaccccacccacaggccctctgcagaggtaaggcccgtcatccgcactggggagatgacacactcctcggtcattcctccgctggccccgggagttcggagggtgtctctaggctatgagtcttccccaagtggttccctgccacccctttttaaccaggagtcaccgtggagacggcaggactcctatagcccccagaatcctgccgttagtcacaaggcatccctgaactccactatactccagggccccgcggacgctggtgtggttggtggccaatcgtggaaccgcgcatgggagccagccaggggtgctgcgtcctgggacacctggcgcaacaaggcggtggtgcctcccaggcggtccggggagccaatggtgtccatgcaggctgcagaggagatccgcatcctcgcagtgatcactatccaggcgggcgtccgtggctacctggcgcgtcgcaggatccggctgtggcaccggggggccatggtcatccaagctacttggcgcggctaccgtgtgcggcggaacctggcacacctctgcagagccaccacgaccatccagtctgcctggcgcggctacagcacccgccgggaccaagcccggcactggcagatgctccaccccgtcacgtgggtggagctgggcagccgggccggggtcatgtctgaccgaagctggttccaggatggcagagccaggacagtatctgaccatcgctgcttccagtcctgccaggcacacgcttgcagcgtctgccactccctgagctccaggatcgggagcccgcccagcgtggtgatgctagtgggctccagccctcgcacctgtcatacctgtggacgcacacagcccacccgtgtggtgcagggcatgggccagggcactgagggccccggggcagtgtcttgggcctccgcctaccagctggctgccctgagtcccaggcagccgcatcgccaggacaaagcggccacagccatccagtccgcctggaggggctttaagatccgccagcagatgaggcagcagcaaatggcagcgaagatagttcaagccacctggcgaggccaccatacccggagctgtctgaagaacacagaggcgctcttgggaccagcagacccctcggccagctcacggcacatgcattggcctggcatctaggaccctggctccctgcagtggggacttcgtgggaggcactcatggctctctgggtctaatgaataaagtcctccacagcctaga

SEQ ID NO: 11535 - protein, 763 aa, Homo sapiens
MANWGSQNLAQPSMDSGEPSSLAQPSQAPGVTSNLAQPSQAFGVSPSPDYPSQSVGEYPMLAQPFQPTEVSPSPTYPSQAIREYPTLAQPFQPTEVSPSPAHPYQLTEVSPSAAYSYQPTEVSPNPGYLSMAIEMSPSPEYPSVATEVSPSPTYPYQPTEISPSSGYLSVATEVSPSPGYPSQLTEVSPSSGYLSVATEVSPSPDYSSQPTEMSPSSGYLSMATEVSPSPGYPFQPTEVSPSPDYPCVATGESPSLAQPSQPTEVSPSSAYPSVVTGESPSPAYPSQPTGESPSLTQPSLTIRVSPSLAMSSQTIGVSPSLAMPSQTIGVSPSLAMPFHTIGVSPTLAHPSMAIRESPSLAQPPQSTGESPSLTWPSQATGVSPSVAHQSVASRVSSSLAQPSQASGMSPRQDYPPVASRVSPNQAHASITSRMSPSRAHASMTCMVSPSQVHRSMPSEVSPSLAQLSQATTAVPLRPAHQPMACGVSPSLAQPSQATGMSSRLAHQPMTCVVSLSPAQPSQAIGVSPSLAHPSGPHGLSPSLAHPYVASGAGSSLAHPSQTTAVSPRQAQPSVASSPGKTNSSCTLASSLAEPAIAPSLFPPSVAHTEALSLAQSPPDTRLAPSRSQPSVVSGTCHGLNEPCWGSRLDSNLQCSRVDSVAPCLCHPSAFVSVSLGGPYPSVAGNMDQGLNQPSLGTGVNLCEEPLMVSEMVSSPPDFKFNDVSLGFHHPPRVGGRHVCPPSVVSVSTPNLSHADEEACCVGQ

SEQ ID NO: 11536 - DNA, 3739 bp, Homo sapiens
cagcccagggcagtgttgctgcatattgcatggatgaaaggctgaaggctgcctcctcttgcaggctggcttctgagattgcaccttcttctcctgctactcctccaaatctatgacccttcaaggcagagctgacctgtccggtaatcaaggcaatgcagccggccgcctagctacagttcacgagccagttgtcacccagtgggcggtgcatcctccagcccccgctcaccccagtctcctggacaaaatggagaaagcgcctccacagccccagcacgagggcctcaagtccaaggagcatcttccgcaacagcctgccgaaggcaagacggcgtcccgccgcgtcccacgcctccgggctgtggtcgagagccaggccttcaagaacatcctggtagacgagatggacatgatgcacgcccgtgcagccacgctcatccaagccaactggaggggctattggctccggcagaagctgatttcccagatgatggcggccaaggccatccaggaggcctggcggcgcttcaacaagagacacatccttcactccagcaagtcgttggtaaagaaaacgagggcggaggagggggacataccttatcacgccccacagcaggtgcgcttccagcatccggaagagaaccgccttctgtccccgcccatcatggtgaacaaggagacccagttcccttcctgtgacaatctggtcctctgcagaccccagtcgtcccccctcctgcagcccccagcagctcagggtaccccagagccctgtgtgcagggtcctcatgctgccagagtccgggggctggccttcctgccacaccagacggtcaccatcagatttccctgcccagtgagtctggacgcaaaatgccagccatgcctgctgaccagaaccatcagaagcacctgcctcgtccacatagagggtgactcagtgaagaccaaacgtgtaagtgcccggaccaacaaagccagggctccggagacaccattgtccagaaggtatgaccaggcagttacgagaccatccagagcccaaacccagggccctgtgaaagcagagacccccaaagcccccttccagatatgtccagggcccatgatcaccaagactctactccagacatatccagtggtctccgtgaccctgccacagacatatccagcgtccacgatgaccaccaccccacccaagactagcccagttcccaaagtaacaataatcaagaccccagcccagatgtatccggggcccacagtgaccaaaactgcacctcacacatgccccatgcccacaatgaccaagatccaggtacaccccacagcctccagaactggcaccccacggcagacatgccctgcgaccatcacggcaaagaaccgacctcaggtttcccttctggcttccatcatgaagagcctgccccaggtatgcccggggcctgcgatggcaaagaccccaccccagatgcacccggtcaccaccccagccaaaaacccattgcaaacatgtctgtcagccacaatgtccaagacttcatcccagaggagcccagttggggtgaccaagccctcaccccagacccgcctgccagccatgataaccaagaccccagcccagttacgctcggtggccaccatcctcaagactctgtgtctggcctctccaacagtggcaaatgtcaaggctccaccccaagtggcggtagcagccggaactcccaacacctcaggctccatccatgagaacccacccaaggccaaggccaccgtgaatgtgaagcaggctgcaaaggtggtgaaagcctcatccccctcctatttggctgaggggaagatcaggtgcctggctcaaccacatccgggaactggggtccccagggctgcagctgagcttcctttggaagccgagaaaatcaagactggcacccagaaacaggcgaaaacagacatggcatttaagaccagtgtggcagtggaaatggctggggctccatcctggacaaaagttgctgaggaaggggacaagccacctcacgtgtatgtgcctgtagacatggctgtcaccctgccccggggacagctggctgccccactgaccaatgcctcatcccagagacatccaccctgcctgtcccagagaccactggccgccccgctgaccaaggcctcatctcagggacatctgcccactgagctgaccaagaccccatccctggcccatctggacacctgtctgagcaagatgcattcccagacacatctggccacaggtgccgtgaaggtccagtcccaagcgcctctagccacctgtctgaccaagacgcagtcccgggggcagccgatcacagacataaccacgtgcctcatcccagcgcaccaggctgctgatctcagcagcaacacccactcccaggtgctcctaacagggtccaaggtgtccaaccacgcctgccagcgcctcggtggcctcagcgccccaccctgggccaagccagaggacagacagacccagccacagccccacggacacgtgccggggaagaccactcaggggggaccatgcccggcagcctgtgaggtccagggtatgctggtgccgccgatggcacccaccggccattccacatgcaacgttgagtcctggggagacaacggagccacacgtgcccagccatcaatgcccggccaggcggtgccctgccaggaggacacgggccccgcggacgctggtgtggttggtggccaatcgtggaaccgcgcatgggagccagccaggggtgctgcgtcctgggacacctggcgcaacaaggcggtggtgcctcccaggcggtccggggagccaatggtgtccatgcaggctgcagaggagatccgcatcctcgcagtgatcactatccaggcgggcgtccgtggctacctggcgcgtcgcaggatccggctgtggcaccggggggccatggtcatccaagctacttggcgcggctaccgtgtgcggcggaacctggcacacctctgcagagccaccacgaccatccagtctgcctggcgcggctacagcacccgccgggaccaagcccggcactggcagatgctccaccccgtcacgtgggtggagctgggcagccgggccggggtcatgtctgaccgaagctggttccaggatggcagagccaggacagtatctgaccatcgctgcttccagtcctgccaggcacacgcttgcagcgtctgccactccctgagctccaggatcgggagcccgcccagcgtggtgatgctagtgggctccagccctcgcacctgtcatacctgtggacgcacacagcccacccgtgtggtgcagggcatgggccagggcactgagggccccggggcagtgtcttgggcctccgcctaccagctggctgccctgagtcccaggcagccgcatcgccaggacaaagcggccacagccatccagtccgcctggaggggctttaagatccgccagcagatgaggcagcagcaaatggcagcgaagatagttcaagccacctggcgaggccaccatacccggagctgtctgaagaacacagaggcgctcttgggaccagcagacccctcggccagctcacggcacatgcattggcctggcatctaggaccctggctccctgcagtggggacttcgtgggaggcactcatggctctctgggtctaatgaataaagtcctccacagcctaga

SEQ ID NO: 11537 - protein, 1180 aa, Homo sapiens; identical to SEQ ID NO: 1907

SEQ ID NO: 11538 - DNA, 439 bp, Homo sapiens
agagaccactggccgccccgctgaccaaggcctcatctcagggacatctgcccactgagctgaccaagaccccatccctggcccatctggacacctgtctgagcaagatgcattcccagacacatctggccacaggtgccgtgaaggtccagtcccaagcgcctctagccacctgtctgaccaagacgcagtcccgggggcagccgatcacagacataaccacgtgcctcatcccagcgcaccaggctgctgatctcagcagcaacacccactcccaggtgctcctaacagggtccaaggtgtccaaccacgcctgccagcgcctcggtggcctcagcgccccaccctgggccaagccagaggacagacagacccatggggacttcgtgggaggcactcatggctctctgggtctaatgaataaagtcctccacagcct

SEQ ID NO: 11539 - protein, 109 aa, Homo sapiens
MHSQTHLATGAVKVQSQAPLATCLTKTQSRGQPITDITTCLIPAHQAADLSSNTHSQVLLTGSKVSNHACQRLGGLSAPPWAKPEDRQTHGDFVGGTHGSLGLMNKVLH

SEQ ID NO: 11540 - DNA, 471 bp, Homo sapiens
cctcccagcttcaagcaatgctcccaccttggcctcccaaagcgctgggattacaggcatgagccaccatgcctggccattgccattgcacttcagctggttctcctgaaccttgaattatcttaggaaagattgtattttcaggaattaagtctattggagacacagcaggactccacagccagctagatttggataaaatgtagactgcctcaaggccagtgtgttgacttctgaccagtctcatctgaacccacaccctttaacatatatacaaaacacctgaagggttgggctgccagctttctttaggatgatagagggcaggttaagtttgtttgacataactagaagaggtggagcctcttcctaatggagcaaggtccatttatggcaaactgtggtcccccaccactatcagctacttctggatagcttttgcttaaagttgatgagatattgtttctttca

SEQ ID NO: 11541 - protein, 41 aa, Homo sapiens
PPSFKQCSHLGLPKRWDYRHEPPCLAIAIALQLVLLNLELS

SEQ ID NO: 11542 - DNA, 899 bp, Homo sapiens
tgaacttagggcatccccatctgggctgtgaaggtttctgacttggggaccaggtgctcagaccttcctggatgctgctttccacaatatctctaccaggcaggcaggttctcttcattttgcaaatttggtgaaacagcatttgtaaaactttagaagcttccttggctcacacaggtggtagtggccctgtcaggatttgacccaggctctcggattccagagttcctgaatttaaccacctgtactgtgatgcctccttatcatgtgtgcatcgtgcattactattttttatagcctgtagggtactgagcaccatgcacacctacagtgatcacaggcactgcctactggaaggtcttctttggctgggttccagtttcctcagacgatgtagggcagggagttccacttgttagcatatcccacagggcctttctcttcaaatggaccccagcagccaaccacacagctgcctcagcaagcgtaggagatggcacatcagagaccaacaattgtcagcacagcaaaactgggcatttcttttcttactgagctttgcagctacctacacagttgtgtgtggcatctcctcctgggtgcaaggacatgagatgacatcagttactgtgatctccagtaaaatgtttaatacaagtggagacaatagataaccttttccaactcctgatcggggggtggaaagtgctcagtgtgctattaacttaaggcttttatagatgtgctttatcatgtaaaggctgttccctccaattctttctatactgagaaattttttcaaagaggtgttaaattttttcaacccatgtcacaaatctgcatatgtactcccctaaacctaaaataaaagttggaaagaaaaataaaactattacttg

SEQ ID NO: 11543 - protein, 75 aa, Homo sapiens
MDPSSQPHSCLSKRRRWHIRDQQLSAQQNWAFLFLLSFAATYTVVCGISSWVQGHEMTSVTVISSKMFNTSGDNR

SEQ ID NO: 11544 - DNA, 1682 bp, Homo sapiens
ggctgaacacggtgcgcttcacctcggagttcccactccactccaaggatccaacagcgcacaagctgctcttcacgggcaactacctctgcaagcttcacccccggccccgccacgccccgcagggttccctgtctggtctggatcacctcgctctccctgcgcctctctccttggcctagctagacaagtgcttctcacgatccagcgcgtttaccgctcggtttcgtcgccgctaaggggtggtggtgtctgatccgtcaggctctgcgcttctctctcggatccatcctcaatgtccaggcaggactctcacatgaagccggtgctgtctgctgttcactctaagatgtccagccactcaggacagttacgatctgtcatccagggcccaaaccgactctcctctattgctatctgaggtaggcagtctcctctgtgaggtcggtcccatccatactgcctagatccctgcgcaggaagactgagatgaggaccctaggagacagcagccagggatagcgaaggtggaggatgagtataaatagcgaccccagcgcgatcagagaagctcccttacccccacccatcgcagtgggagtgagtcttcagatctacccccaagacaacgaaatcctacccgggccattgaagggaaacctccactccaacccccagaagacgccttagatgagaaagtgaagagatattgtatgagctcattcatcaaaggccatgccatcaccagctcaggcagtgctgctaggggattcctgcctctctggaggtccagttctctctgaagacagagaagatgcagggaggaagggtttcaaacaggaactctcaacccacgtctgccagttgtagactctgtaaacaaagttccaactcgcccgctgctgccactgccgctgctattttttgaggtcaagactcttccacctgtatgcccatcttcatagaccggcccatcactggtgcctcaagcattttcactatcacagccagtaatctgcagactcaacctcaagcctactttgtactttggtataaactgcatggataccaatcccttttcacaggttttcatctcctggtctcccataggatccaggatgagtatcctcccatttgaccagttccatcccagtatggagcagatatcccttgtaaagaacacagtctccaccagcccacctgcttttatggtcaacagccctacctgaatttccaacattgccttttgacccaagaaacacctatcacctgaaatctagggttccagacaggcatcaacaggaaaccactctcttcaatgccctgtcttttctggcccacctaccactgcttctgcagtcacctccactatagtaagcagaccctcttcagacttggcatccaagcctgccttttactctgatgaaatcaacatggataccatgcccatttccccatctgttatcttcctgtctctccctgcaatgttaacagctgtttccctttgaagaacctggcagcccccagaaatccttcctacttaacctctactgcagccctggaacccaatgacagcaccactcaggcagcttttgggaatttgactcccccatgtccacctttggcatctgctatggtttgaatgtgtcaaccaaatttcgtgtattaaaaactcaatcccc

SEQ ID NO: 11545 - protein, 62 aa, Homo sapiens
MPIFIDRPITGASSIFTITASNLQTQPQAYFVLWYKLHGYQSLFTGFHLLVSHRIQDEYPPI

SEQ ID NO: 11546 - DNA, 3156 bp, Homo sapiens
gctgggagccatagacctcgaagctggggcgtctgacacctgaggcccgaagtaggtggccagcttcttagagggccaacccagggcattaacacaccaggtcagaaaaagcaaaaacaaaaacaaacaaaaaatgataatctataccaaaatatgttattactttaacacaaaaatatgaaaactaggtgtttgaaattatctttccgtactgtttgcttttcgctacagaaatgctattatttaacagaatattaataggattaatagtggcaattagactaatcacgtgtgagaaaaatatatttctgtcctctgatacaggaattttaagtttctattaaatatttaaattttgtgggttctatctaagatgctaaatgtaagaccttttaaaaggagaatgtaaataaggctaatcaaacagatattaactatatgtaataggcatttatctttctgtcccatcatacgtttaggagatatttactctttctggttccttttccagtaacacctctctgtattagctgcctgtagcctttatggcattcttcttttggtttatgtaatgctaaaactgaatacaggcaaacgtgaaattcaccttgactgtcagctccgctttttgtttgttttgtttttgttttgttttgagacagggtctccctctgtcgctcagactggaatgcagtggcgctatctcggcttactgtaacctctgcctcccaggttcaagtgattctcccacctcggcctccagagtagctgagactacaggggcgcgccactacacctggctaatttttgtatattttttgtagaaatggggttttgccatcttgcccaggctagtctcgaactcctgggctcaagcgatccacccgcctcagcctcccaaagtgtggggcagtccaaggagagccggtgctgcggagcagcccgattccaggggaaaaccatttcccttctggctcccccaactgttgagagctacttccactcaaaaccctgcagtcatcctccaagcccatgtgtgatctgattcttctggtacaccaagacaggaaccccgggatatgaaagccctctgtccttgcgataacgcagggatctaattgaattgactaacataagccgcctgcggacagctaaagagcatcctgtaacacgcccactggggcttcagctataaacattcacccctagacactgccatggggtcagagccccacagcccgcccgtctgtatactcccctggaggtttgagcagcgggacactgaagaagcgagccacacccccatcgcacgccctgccagggggacaagggaacttttctcttatcaacatcaacctaagtagcctcgcatcaaaagcatttgactgtcaatagttaggattttccctaccagcagtagcaagtttttagccttattggaattagtttccagctctgcaaaaatgttcatctgctttgtaactccaggcttttttggtagagcagctgtttgttgaccagtcgctttgcctctgtaagttcaccatataggctattcatgtctaaagtgttcattttcaaaccctctgaaactcattgggtatctattacaatgtctgaagacaaatatttcattaacaaataagaaggtgatagacctggagtgagaatccacccaattcatgtcaatcggagacaaatttgcaatatcctgtgattcctgaactggctgtggtcactgatcacttctgtcctggaggaactagagacattcaagacaaataaggactcatctagtcccctgattaaaggacttttcatagaggctgcattaagggccaaattatgtacaatgtgctctctgagatggggatgtgtaaatagccgtcaaaatgtcatctgggcagaaatttgtttgggaggataaatttatgttcaggggtgaggggtgaatacaatagaaatttgtattttgcagagggaaatgtgggttccatggtgggtagaaataaaatagattagtagaatacttagaatgtcaaagaaatttttaaatcatagggttttttttttgagaaaatttttgaaatgattttgaaatgatttattcaaaaagtgcccctcaaaagtgatcactccatagatgacagctaaggatcgcaatcttactgctatgcccttgtgttttgagtgaagacttgtgtgactatagtgagggtctaggtgtttaatcgtcagaggtaaattggagatttcagatgaggctgtctcatggaagagggaggaaggatactcacaaaccctacagctggaatctgagcatccagtggaaaatgacagtccctgatccctcaggaaactttctctggccactgtcagtgatgttctaatctaggagagcagaactttcccccttataatgtttctcactgcatttcctgaaatatatttcgtctaagttccatacgtttatctgaaaagaataaccacttaccaaattgtgtttccaactaggatagtggccgcagttgtattatcttgtgcatttgtcaagagaggtcatccgaacgctgagataaaggcttgggattccattgtctcatctctttctgggagtgattttcctctcatctggaagtgcagagacagagtcttcatagggaactgagattacctccaaaaaacatttgtgaagtgagcaattcctagaaggctgttaatgttgattaatgaaattatacaaaaagaatcataagatagctggagaagaaaattatctgtgatgcctggaaaagatacgtcccagtgggaggtaagtacagaatcctgagttctgagatgtgaggaattcagttgaggtaatggttctactataattgtggctaccattaaatttttgtttcttcaaattatgatttatttctcttcctgataacattgaacaatcataaatgtggagggaaaggaatcattgagggttgatttagagagagtaaacaggtgtaaagccatggttcctgtgtgttttaacaaatactaactgagcacccgccctgttgcagatgcatttctagatgtgtgaacaaagaaatttatctaccttaatttgaattgagagaagcagacaataaataataaaggaaatgttataagtta

SEQ ID NO: 11547 - protein, 72 aa, Homo sapiens [sequence omitted]

SEQ ID NO: 11548 - DNA, 625 bp, Homo sapiens
ctcgaagctggggcgtctgacacctgaggcccgaagtaggtggccagcttcttagagggccaacccagggcattaacacaccaggatagtggccgcagttgtattatcttgtgcatttgtcaagagaggtcatccgaacgctgagataaaggcttgggattccattgtctcatctctttctgggagtgattttcctctcatctggaagtgcagagacagagtcttcatagggaactgagattacctccaaaaaacatttgtgaagtgagcaattcctagaaggctgttaatgttgattaatgaaattatacaaaaagaatcataagatagctggagaagaaaattatctgtgatgcctggaaaagatacgtcccagtgggaggtaagtacagaatcctgagttctgagatgtgaggaattcagttgaggtaatggttctactataattgtggctaccattaaatttttgtttcttcaaattatgatttatttctcttcctgataacattgaacaatcataaatgtggagggaaaggaatcattgagggttgatttagagagagtaaacaggtgtaaagccatggttcctgtgtgttttaacaaatactaactgagcacccgccct

SEQ ID NO: 11549 - protein, 53 aa, Homo sapiens
HTRIVAAVVLSCAFVKRGHPNAEIKAWDSIVSSLSGSDFPLIWKCRDRVFIGN

SEQ ID NO: 11550 - DNA, 2634 bp, Homo sapiens
ggtgtgacggctcaggactgcatttcccagaggctgcagctatccggccaatgtagcctgaaactacatttctcagcggccactggaacgacctcaatctctgcctcctcgccagttcattgtggtcgttgacccggcagcgagctttggagttcatcgagggagaagtcagcgcccagctccgaggttggagcagccccgccgggcaacttgaatttctgcaaacgaacacagcaccgggagctctgcagacctgtgtcggcgcggaacccggactgagacatgccttttgaacttctcagatagaggaaccccagtgaagactgatcagttcttacaattctcaaagcatggcccataaatatgtgggtttgcagtatcacggatcagtgacatttgaggatgtggccatagccttctcccagcaggagtgggagagtctggactcttcccagaggggcttgtacagagatgtgatgttggagaactacaggaacttggtgtcaatgggacattcccgttctaaaccacatgtgatcgccttattggaacaatggaaagagcctgaagtgacagtgaggaaagatggaagaagatggtgcacaggataagaaagctccagtctacaaacaaaacatgccagaagatttttaggcgatgatgccacctgcacatggaaccaaaagatttgcagttggaagatgatacaatcggctgtaaagaaatgcccacctctgaaaactgtccatcttttgctctacatcagaaaataagtagacagaaaccacgtgaatgtcaggaatatggaaagaccctttgtcaagactcaaagcctgttcaacatgaaagaatacatagtagtgaaaaacccaacagatgtaaagaatgtgggaagaactttagtaatggacatcaactcaccatacatcagagattgcatgttggtgagaaaccctataaatatgaaaaatgtgggaaggcctttatcagtggctcagcctttgttaagcatgggagaattcacactggtgagaagccactcaaatgtaagcaatgtggaaagactattagtggtagctatcaacttacagtacataagagtattcatactgggaagaaaccatatgagtgcggggaatgtgggaaagcttttctagtatatggaaagcttacccggcatcagagtactcacactggtgaaaaaccctttgggtgtgaggagtgtgggaaggccttcagtaccttttcatacctggttcaacatcagcgaattcataccagtgaaaaaccttacgaatgcaaagaatgtgggaaggcctttagcactagctcaccccttgctaagcatcagagaattcatactggcgagaaaccctatgaatgtaaggagtgtgggaagtccttcactgtgtatggacagcttactcgacatcagagtattcatactggtgagaaaccttttgaatgtaaggaatgtggaaaggcctttagacttagttccttccttcatgcacatcagcgaattcatgcagagataaagccctacggatgcaaggaatgcgggagaaccttcagtcgtgcctcatatcttgttcaacatggaagacttcacactggcgagaagccctatgaatgtaaggagtgtggcaaggcctttagtactggctcataccttgttcagcatcagaggatccatactggggagaaaccctatgaatgtaaggaatgtggcaaagcctttattagtcgccatcagcttaccgtacatcaaagggttcatactggagagaaaccctatgagtgtaaggaatgtggcaaggccttcagagtgcacgtacatctcacacagcatcggaaaattcatactgatgtaaagccctatgaatgtaaggaatgtggaaagacttttagtcgagcctcgtaccttgtacaacatagcagaatccatactggtaagaagccctatgagtgtaaggagtgtggcaaggccttcagttctggctcataccttgttcagcatcaaagaattcatactggggagaaaccctatgaatgtaacaaatgtgggaaagcctttactgtttatggacaacttattggacatcagagtgttcacactggtgagaaaccttttgaatgtaaggaatgcgggaaggcctttagacttaattcattccttactgaacatcagcgggtacacactggtgagaaaccctttaaatgcaaaaaatgtgggaagacctttagatacagttcagcccttaaagtgcatctgagaaaacatatgagtgttataccctaagagtctgaggagtgtgggaagtgcttcgtgtgtggctcaaacattgttgaacatcggggaatttatgctggtaggaaactttcaaatgtgaagaatattggcaggtctattctcatcttataattcataatataactcagaaaacataagaatattcctttgtcatttataggtttgtaataccaatatttatactggtggaccattcagaaaaagtgggaaacgttattacttaatggttacagcactgacagcatgaacttttatatgatgcatttattctaatgtgattgtatgaacaagtgaataaaaaaccttggacctcctaaacc

SEQ ID NO: 11551 - protein, 542 aa, Homo sapiens
MEPKDLQLEDDTIGCKEMPTSENCPSFALHQKISRQKPRECQEYGKTLCQDSKPVQHERIHSSEKPNRCKECGKNFSNGHQLTIHQRLHVGEKPYKYEKCGKAFISGSAFVKHGRIHTGEKPLKCKQCGKTISGSYQLTVHKSIHTGKKPYECGECGKAFLVYGKLTRHQSTHTGEKPFGCEECGKAFSTFSYLVQHQRIHTSEKPYECKECGKAFSTSSPLAKHQRIHTGEKPYECKECGKSFTVYGQLTRHQSIHTGEKPFECKECGKAFRLSSFLHAHQRIHAEIKPYGCKECGRTFSRASYLVQHGRLHTGEKPYECKECGKAFSTGSYLVQHQRIHTGEKPYECKECGKAFISRHQLTVHQRVHTGEKPYECKECGKAFRVHVHLTQHRKIHTDVKPYECKECGKTFSRASYLVQHSRIHTGKKPYECKECGKAFSSGSYLVQHQRIHTGEKPYECNKCGKAFTVYGQLIGHQSVHTGEKPFECKECGKAFRLNSFLTEHQRVHTGEKPFKCKKCGKTFRYSSALKVHLRKHMSVIP

SEQ ID NO: 11552 - DNA, 317 bp, Homo sapiens
tcttatctcataagcaggacattcccgttctaaaccacatgtgatcgccttattggaacaatggaaagagcctgaagtgacagtgaggaaagatggaagaagatggtgcacagatttgcagttggaagatgatacaatcggctgtaaagaaatgcccacctctgaaaactgtccatcttttgctctacatcagaaaataagtagacagaaaccacgtgaatgtcaggaatatggaaagaccctttgtcaagactcaaagcctgttcaacatgaaagaatacatagtagtgaaaaacccaacagatgtaaagaatgtg

SEQ ID NO: 11553 - protein, 35 aa, Homo sapiens
MEEDGAQICSWKMIQSAVKKCPPLKTVHLLLYIRK

SEQ ID NO: 11554 - DNA, 3687 bp, Homo sapiens
tccctcctctccctgagctgcccccacacctgctgcctgaagccttgcagggaagctccaggcatgaggggtcttgcggttagctgtgtgactacctctgactcggccattccctcctgggtgattatccagatctgacagttctgtggtttagattctgtgcctttcctcttgctaatatttcctaagcctgactgtgccaggaattccaatcactgatgtggttactgcttgccgtgaccacccaatgtccctgtgtcatacggagcttcctgtcttgtagtctatcatggggtagttcaactgggcaggtgctggccactgacccactctgtctttcccttaggacttatatctttcaggtcccacatcgtttcccagttggagatggggaaagagccctgggtgcctgacagtgtggatatgacatcagccatggccagaggggcttatggcaggcctggctctgatttttgccatggaacagagggcaaggacttaccttctgagcataacgtttctgtagaaggagtggcacaggacaggagtcccgaggcaactctgtgcccccagaagacctgcccctgtgacatatgtggcctacgtttgaaagacattttgcatttggctgaacaccagacaacacatcccaggcagaaaccatttgtgtgtgaggcatatgtgaaaggctctgagttcagtgcaaaccttccccggaaacaggtgcagcagaacgtacacaaccctatcagaacggaggagggccaggcttcccctgtaaagacctgcagagaccacacatcagatcagctttccacctgcagggagggtgggaaggactttgtggccacagcagggtttctgcagtgtgaggtcactcccagcgatggggagccgcacgaggccaccgaaggtgtggtggattttcacattgcactaaggcataacaagtgctgtgaatctggggatgccttcaataacaaatccactcttgttcagcaccagagaatccacagcagagaaaggccttatgaatgcagcaaatgtggaatcttcttcacttacgccgctgacctcactcaacaccagaaagttcacaatagaggaaaaccgtatgagtgctgtgaatgtggaaaattcttcagccagcactccagccttgttaaacatcgcagggttcacaccggtgaaagccctcacgtgtgtggtgactgtgggaaattcttcagccgaagctccaacctcattcagcataagagggttcacactggtgaaaagccatatgagtgcagcgactgtgggaagttcttcagccagcgttccaacctcattcatcataagagggttcatacgggcagaagtgcccatgagtgcagtgaatgtgggaaatctttcaactgcaactccagcctaattaaacattggagagttcacactggagaaagaccttacaagtgtaacgaatgtgggaaattcttcagccacattgccagcctcattcaacatcagatagttcacactggcgagcggcctcacgggtgtggtgagtgtgggaaagccttcagccgaagctctgacctcatgaaacatcagcgagttcacactggtgagcggccttatgaatgcaatgaatgtgggaagttatttagccagagctccagcctcaatagccatcggagacttcacactggtgaacggccttaccagtgcagtgaatgtgggaaattctttaaccaaagctccagcctcaataaccaccggagacttcacaccggcgagcggccttatgagtgcagcgaatgtgggaaaaccttcaggcagaggtccaatctgaggcagcacctgaaagttcacaaaccagacaggccttacgaatgcagcgaatgtgggaaagccttcaaccaaaggcctaccctcattcggcatcagaagattcacatcagagaaaggagcatggagaatgtgctccttccctgttcacagcacacaccagagataagctctgagaacagaccttatcagggcgctgtcaactacaagttgaaacttgttcatccaagtacccaccctggggaggttccctaggaatgctagctgtgttggaagctttctggagacaagttacattctcttactgtagagtttatcagcgttttttcactgctggggttgtgatagaagccatgtcagcaccacacactgcagctctccaaagagtgtgtccaccactccactgtgctcagggaaggcagacctctcctctctctttccaatccctaaagggaattaggagtagtctgaagccttgggaagatgtcattcccgccctgtatggctggtttagccatggacatgaccagcttttggctgtgaagacctgagcagggttttgccaacagcttgttctagagaaggtttccctttttctgggacattgttggtctcatgttatgcctgtgaaggatttgtccagccttcatgttactctacacaacaacttatctcctgtgtattgccctggttcatgtgatgataatggccttatgataaagccgcctttagtcttccatgttctgatcactgtgtggggtggttcaagagcagagttaagatctaccaaactgaaggggtctccagattatcttggaggggacaggaggatggcagagaaacaactgtcaatccagatttgacctcatttgcattgccaccaaggcctcctaggaaaaattgtaggaatttatgggtataatattgtggtctgaatggcgtgaatttttatcccgaggagggggcagttgtgacaacctccagtgcatgtgggaacagcatgaattgggtcccttattcccagggggtgccccatattccccaatactgtaaagcagatgctgtttagcacctgccaaggagccatatgccctgaagttcagcattaggcaggtatctcttaactgtaagacataccaggcccagctgggaccataatttgtacagaaacactggatgtgattaatagggagtaggcgagattatagcaaaccagcagaaatggaactctgctaaatgtgcatccgtgaatgctcccttgaatgtggctgtgcaggattcagggtttgcagaaattctcaggacctcagacctctgtcctatgactaatgttactggcagagcaaataatctaaaggttttggttttgtggattaccatctccgtgctgtgcatctgaaggccagtgctgtgctggcaggaaaatagggactgagaaaaagcagatcctatactatagggactgtagtatctatgacgtagccagccattctttgctcccaaggcaagaagaaagagatgacagagtcaatatagggttgccaaatcggattttctaaaatgagtaggaagttggatttttatgtgcaacagtttcttttaatgctttgttgatatgtgattgtcatgcaataattattcatatttggtaagttttgtacatatattatgtacactcagggaaccaataccataatcatgataatgaacgtatccatcacctgcaaagctacctcatgcccctttacattccctccttgccttccctaggaaaccgttgatttacattttttactttagatttgtttgccttttctagaattaacacaattggaatcataaagtatttatactctc

SEQ ID NO: 11555 - protein, 565 aa, Homo sapiens
MGKEPWVPDSVDMTSAMARGAYGRPGSDFCHGTEGKDLPSEHNVSVEGVAQDRSPEATLCPQKTCPCDICGLRLKDILHLAEHQTTHPRQKPFVCEAYVKGSEFSANLPRKQVQQNVHNPIRTEEGQASPVKTCRDHTSDQLSTCREGGKDFVATAGFLQCEVTPSDGEPHEATEGVVDFHIALRHNKCCESGDAFNNKSTLVQHQRIHSRERPYECSKCGIFFTYAADLTQHQKVHNRGKPYECCECGKFFSQHSSLVKHRRVHTGESPHVCGDCGKFFSRSSNLIQHKRVHTGEKPYECSDCGKFFSQRSNLIHHKRVHTGRSAHECSECGKSFNCNSSLIKHWRVHTGERPYKCNECGKFFSHIASLIQHQIVHTGERPHGCGECGKAFSRSSDLMKHQRVHTGERPYECNECGKLFSQSSSLNSHRRLHTGERPYQCSECGKFFNQSSSLNNHRRLHTGERPYECSECGKTFRQRSNLRQHLKVHKPDRPYECSECGKAFNQRPTLIRHQKIHIRERSMENVLLPCSQHTPEISSENRPYQGAVNYKLKLVHPSTHPGEVP

SEQ ID NO: 11556 - DNA, 3886 bp, Homo sapiens
gggaggctgagtccccaggagctggggaccccgagttgggggcggggcggctggggctacgcccgtgaagctgccccgccggctttcccggaccgcgagggggacagtgaggccgggaccccctccgcgcctttgcaccagccgtgaccccttgcaacgggggtacccagcggagctgcgcgctctcggcgcccccggagcctgcgccccgggccccttgcgcattttgcacgggggagactgaggctaggagtgcgaccctcagcccggggtcacacctcgtctggggcacggccaggtgggtggtagcctcagcctgcgagaccccctacccccgccccgtggtttcccgcaccgtggggccctgctctgaccacagactccgatggcagcggcggcgctgcgggaccccgcgcagggctgcgtgacctttgaggacgtgaccatttacttctcccaggaggagtgggtgctcctcgatgaggctcagagactcctgtactgcgatgtgatgctggaaaactttgcacttatagcctcgctgggacttatatctttcaggtcccacatcgtttcccagttggagatggggaaagagccctgggtgcctgacagtgtggatatgacatcagccatggccagaggggcttatggcaggcctggctctgatttttgccatggaacagagggcaaggacttaccttctgagcataacgtttctgtagaaggagtggcacaggacaggagtcccgaggcaactctgtgcccccagaagacctgcccctgtgacatatgtggcctacgtttgaaagacattttgcatttggctgaacaccagacaacacatcccaggcagaaaccatttgtgtgtgaggcatatgtgaaaggctctgagttcagtgcaaaccttccccggaaacaggtgcagcagaacgtacacaaccctatcagaacggaggagggccaggcttcccctgtaaagacctgcagagaccacacatcagatcagctttccacctgcagggagggtgggaaggactttgtggccacagcagggtttctgcagtgtgaggtcactcccagcgatggggagccgcacgaggccaccgaaggtgtggtggattttcacattgcactaaggcataacaagtgctgtgaatctggggatgccttcaataacaaatccactcttgttcagcaccagagaatccacagcagagaaaggccttatgaatgcagcaaatgtggaatcttcttcacttacgccgctgacctcactcaacaccagaaagttcacaatagaggaaaaccgtatgagtgctgtgaatgtggaaaattcttcagccagcactccagccttgttaaacatcgcagggttcacaccggtgaaagccctcacgtgtgtggtgactgtgggaaattcttcagccgaagctccaacctcattcagcataagagggttcacactggtgaaaagccatatgagtgcagcgactgtgggaagttcttcagccagcgttccaacctcattcatcataagagggttcatacgggcagaagtgcccatgagtgcagtgaatgtgggaaatctttcaactgcaactccagcctaattaaacattggagagttcacactggagaaagaccttacaagtgtaacgaatgtgggaaattcttcagccacattgccagcctcattcaacatcagatagttcacactggcgagcggcctcacgggtgtggtgagtgtgggaaagccttcagccgaagctctgacctcatgaaacatcagcgagttcacactggtgagcggccttatgaatgcaatgaatgtgggaagttatttagccagagctccagcctcaatagccatcggagacttcacactggtgaacggccttaccagtgcagtgaatgtgggaaattctttaaccaaagctccagcctcaataaccaccggagacttcacaccggcgagcggccttatgagtgcagcgaatgtgggaaaaccttcaggcagaggtccaatctgaggcagcacctgaaagttcacaaaccagacaggccttacgaatgcagcgaatgtgggaaagccttcaaccaaaggcctaccctcattcggcatcagaagattcacatcagagaaaggagcatggagaatgtgctccttccctgttcacagcacacaccagagataagctctgagaacagaccttatcagggcgctgtcaactacaagttgaaacttgttcatccaagtacccaccctggggaggttccctaggaatgctagctgtgttggaagctttctggagacaagttacattctcttactgtagagtttatcagcgttttttcactgctggggttgtgatagaagccatgtcagcaccacacactgcagctctccaaagagtgtgtccaccactccactgtgctcagggaaggcagacctctcctctctctttccaatccctaaagggaattaggagtagtctgaagccttgggaagatgtcattcccgccctgtatggctggtttagccatggacatgaccagcttttggctgtgaagacctgagcagggttttgccaacagcttgttctagagaaggtttccctttttctgggacattgttggtctcatgttatgcctgtgaaggatttgtccagccttcatgttactctacacaacaacttatctcctgtgtattgccctggttcatgtgatgataatggccttatgataaagccgcctttagtcttccatgttctgatcactgtgtggggtggttcaagagcagagttaagatctaccaaactgaaggggtctccagattatcttggaggggacaggaggatggcagagaaacaactgtcaatccagatttgacctcatttgcattgccaccaaggcctcctaggaaaaattgtaggaatttatgggtataatattgtggtctgaatggcgtgaatttttatcccgaggagggggcagttgtgacaacctccagtgcatgtgggaacagcatgaattgggtcccttattcccagggggtgccccatattccccaatactgtaaagcagatgctgtttagcacctgccaaggagccatatgccctgaagttcagcattaggcaggtatctcttaactgtaagacataccaggcccagctgggaccataatttgtacagaaacactggatgtgattaatagggagtaggcgagattatagcaaaccagcagaaatggaactctgctaaatgtgcatccgtgaatgctcccttgaatgtggctgtgcaggattcagggtttgcagaaattctcaggacctcagacctctgtcctatgactaatgttactggcagagcaaataatctaaaggttttggttttgtggattaccatctccgtgctgtgcatctgaaggccagtgctgtgctggcaggaaaatagggactgagaaaaagcagatcctatactatagggactgtagtatctatgacgtagccagccattctttgctcccaaggcaagaagaaagagatgacagagtcaatatagggttgccaaatcggattttctaaaatgagtaggaagttggatttttatgtgcaacagtttcttttaatgctttgttgatatgtgattgtcatgcaataattattcatatttggtaagttttgtacatatattatgtacactcagggaaccaataccataatcatgataatgaacgtatccatcacctgcaaagctacctcatgcccctttacattccctccttgccttccctaggaaaccgttgatttacattttttactttagatttgtttgccttttctagaattaacacaattggaatcataaagtatttatactctc

SEQ ID NO: 11557 - protein, 632 aa, Homo sapiens
MAAAALRDPAQGCVTFEDVTIYFSQEEWVLLDEAQRLLYCDVMLENFALIASLGLISFRSHIVSQLEMGKEPWVPDSVDMTSAMARGAYGRPGSDFCHGTEGKDLPSEHNVSVEGVAQDRSPEATLCPQKTCPCDICGLRLKDILHLAEHQTTHPRQKPFVCEAYVKGSEFSANLPRKQVQQNVHNPIRTEEGQASPVKTCRDHTSDQLSTCREGGKDFVATAGFLQCEVTPSDGEPHEATEGVVDFHIALRHNKCCESGDAFNNKSTLVQHQRIHSRERPYECSKCGIFFTYAADLTQHQKVHNRGKPYECCECGKFFSQHSSLVKHRRVHTGESPHVCGDCGKFFSRSSNLIQHKRVHTGEKPYECSDCGKFFSQRSNLIHHKRVHTGRSAHECSECGKSFNCNSSLIKHWRVHTGERPYKCNECGKFFSHIASLIQHQIVHTGERPHGCGECGKAFSRSSDLMKHQRVHTGERPYECNECGKLFSQSSSLNSHRRLHTGERPYQCSECGKFFNQSSSLNNHRRLHTGERPYECSECGKTFRQRSNLRQHLKVHKPDRPYECSECGKAFNQRPTLIRHQKIHIRERSMENVLLPCSQHTPEISSENRPYQGAVNYKLKLVHPSTHPGEVP

SEQ ID NO: 11558 - DNA, 2825 bp, Homo sapiens
aagtctgaatgctgtgtggacagaggaggaggacccaataagagaccacaccgctgttccagaccctctccatggatgatgtcctgcccctgatgccttgggagaccctgttggcacagggcagtccccagggctcgcctgacctcccagcagggcagcggaagcagcagccacagggtgacagggcccagggcctggcctctgagtcctggaagctcctggaggtgcccatcattcacataacgccatccagtgatggggagtcccccgcctgcaccccaaccccccgacgccggcagcagcagaggatgccagacccgcagagtctgtcccaggacagcaccacaccccactctggccggagcacgccaagcagctccccatcgctccggaaacggctgcagctcctgcccccaagccggcccccacctgagccagaaccaggcaccatggtggagaagggatcagatagctcctcagagaagggtggggtgcctgggacccccagcacccagagcctaggcagccggaacttcatccgcaacagcaagaagatgcagagctggtacagtatgctgagccccacttataagcagcgtaatgaggacttccggaaactgttcagcaaactccccgaagcagaacgcctcattgtggattactcctgcgccctgcagcgtgagatcctgctccagggccgcctctacctctctgagaactggatctgcttctacagcaacatcttccgctgggagaccacgatctccatccagctgaaggaagtgacatgtctgaagaaggaaaagacggccaagctgatccccaacgccatccagatctgcacggagagcgagaagcatttcttcacttcctttggggcccgtgaccgctgcttcctcctcatcttccgcctctggcagaatgcactgcttgaaaagacgctgagtccccgcgagctctggcacctggtgcatcagtgctacggctcagagctgggcctcaccagtgaggatgaggactatgtctcccccttgcagctgaacggtctggggacccccaaggaagtgggagatgtgatcgccctgagcgacatcacctcctcgggggcagctgaccgcagccaggagccaagcccagtgggttcgcgccgtggccatgtcacgcccaacctttcccgagccagcagcgacgcagaccatggggcagaggaggacaaggaggagcaggtagacagccagccagacgcctcctccagccagacagtgaccccggtggctgaacccccgagcacagagcccacccagcctgacgggcccaccaccctgggccccttggatctgctgcccagtgaggagctattgacagacacaagtaactcctcttcatccactggggaggaagcggacttggctgccctgcttcccgacctctccggccgcctcctcatcaactctgtcttccatgtgggcgctgagcggctccagcagatgctcttctcggactcgcccttcctccagggcttcctacagcagtgcaagttcacagacgtgacgctgagcccctggagtggggacagcaagtgccaccagcgccgggtgctgacgtacaccatccccatcagcaacccactgggccccaagagcgcctccgtggtggagacacagacgctgttccggcgcggcccccaggccggcgggtgtgtggtggactccgaggtgctgacgcagggcatcccctaccaggactacttctacactgcccaccgctactgcatcctgggtctggcccggaacaaggcgcggctccgagtgtcttctgagatccgctaccgaaagcagccgtggagcctggtgaagtcgctcattgagaagaactcgtggagcggcattgaagactatttccaccatctggagcgagagctcgccaaggctgagaagctgtctctggaggaaggcgggaaggatgcccggggcttgctatccggcctgcggcggcggaagcggcccctgagctggcgggctcacggggacgggccccagcacccagatcctgacccctgtgcccgggccggcattcacacctcgggctccctcagctcccgcttctccgaaccatctgtggaccagggccccggggcaggcatccccagtgccctggttctcatcagcattgtccttatcatcctcatcgccctcaacgtcctgctcttctaccgcctctggtccctggaaaggacagcccacacctttgagtcctggcacagcctggccctggccaagggcaagttcccccagacggccacagagtgggccgagatcctggcgctgcagaagcaattccacagcgtggaggtgcacaagtggaggcagatcctgcgggcctccgtggagctcctggatgagatgaagttctcgctggagaagctgcaccaaggcatcacagtctcagaccctccctttgacacccagccccggcccgatgacagcttttcctgaggaccccggccacgcagctgttcccccacatggacagatggacacacagagcctcggcggccactgctggcacggtgtgagcgccaggcatctcccacccgcccctcccgacggcccaaccaggggctgtgcagacgtggggaccacggaaccgagatgcactttagaccagggagctggcccggcctctggcaggccccccactaacttattttgcccggctgaggttgtggggggcgcctcctggggtgcacgattccctcagctctgggtttaatgtattatatttatttggggccgacagtgccccaataaagggtcagaagtggc

SEQ ID NO: 11559 - protein, 807 aa, Homo sapiens
MDDVLPLMPWETLLAQGSPQGSPDLPAGQRKQQPQGDRAQGLASESWKLLEVPIIHITPSSDGESPACTPTPRRRQQQRMPDPQSLSQDSTTPHSGRSTPSSSPSLRKRLQLLPPSRPPPEPEPGTMVEKGSDSSSEKGGVPGTPSTQSLGSRNFIRNSKKMQSWYSMLSPTYKQRNEDFRKLFSKLPEAERLIVDYSCALQREILLQGRLYLSENWICFYSNIFRWETTISIQLKEVTCLKKEKTAKLIPNAIQICTESEKHFFTSFGARDRCFLLIFRLWQNALLEKTLSPRELWHLVHQCYGSELGLTSEDEDYVSPLQLNGLGTPKEVGDVIALSDITSSGAADRSQEPSPVGSRRGHVTPNLSRASSDADHGAEEDKEEQVDSQPDASSSQTVTPVAEPPSTEPTQPDGPTTLGPLDLLPSEELLTDTSNSSSSTGEEADLAALLPDLSGRLLINSVFHVGAERLQQMLFSDSPFLQGFLQQCKFTDVTLSPWSGDSKCHQRRVLTYTIPISNPLGPKSASVVETQTLFRRGPQAGGCVVDSEVLTQGIPYQDYFYTAHRYCILGLARNKARLRVSSEIRYRKQPWSLVKSLIEKNSWSGIEDYFHHLERELAKAEKLSLEEGGKDARGLLSGLRRRKRPLSWRAHGDGPQHPDPDPCARAGIHTSGSLSSRFSEPSVDQGPGAGIPSALVLISIVLIILIALNVLLFYRLWSLERTAHTFESWHSLALAKGKFPQTATEWAEILALQKQFHSVEVHKWRQILRASVELLDEMKFSLEKLHQGITVSDPPFDTQPRPDDSFS

SEQ ID NO: 11560 - DNA, 564 bp, Homo sapiens
acagagaagggaaagcagaggggcagagagacagagaaggaaacaaagagactttattaaaaccaaacatcgtggaggcagctgcctgcccgcagaggtcagagtcaggtggtgtcctggactcctggcccaaccacacagaaatgcgagtcccacctcacagctccggggctgtggctccccagcgctctccagggtcaggcgcgttgggtcacgcctgtaatcccagcactttgggaggccaaggagggtggatcacctatcaggagttcgagaccagcctggccaacagagtgaaaccccatctctatcaaaaatacaaaaaaattagccaggtgtagtggcttgcacctgtaatcccagctacccaggaagctgaggcaggagaattgcttgaacccgggaggtggaagttgcagtgagccaggatcgcaccactgcgctccagcctggacaacagagcaagactccatctcaaaaaaaaaaaaaaaaaaaaaaaggaagaaaatataacagtcctctatgtcccctgtacctatatagaatagatgtggacattttgcc

SEQ ID NO: 11561 - protein, 65 aa, Homo sapiens
MRVPPHSSGAVAPQRSPGSGALGHACNPSTLGGQGGWITYQEFETSLANRVKPHLYQKYKKISQV

SEQ ID NO: 11562 - DNA, 945 bp, Homo sapiens
gtccaggagcttctggccaggggcatagtagttgctagggacccttttctaggtactaggggagggggctccccaacctgcgggcaggcagctgcctccacgatgtttggttttaataaagtctctttgtttccttctctgtctctctgcccctctgctttcccttctctgtccagtccctctctccccggcttctccctccttctaggcctctgcggcccctccccgccttccctcccgggctgggggcggcgccgtgacgcggcggggcgggggaaggaagggggtgtcgctgacgccgcggcggcctccggcggctccggccttttgtgcgggcggttgggtcgggtgggggcggcggccgcggaaggccaggccggtgccctgcggggacgcccagcgcagcccagccccgcgcagcccagccctgccctgccctgccctgccctgcgcccggggcgcgcccaccgcgccgcatccatgttcgacaccacaccccactctggccggagcacgccaagcagctccccatcgctccggaaacggctgcagctcctgcccccaagccggcccccacctgagccagaaccaggcaccatggtggagaagggatcagatagctcctcagagaagggtggggtgcctgggacccccagcaacacagagcctcggcggccactgctggcacggtgtgagcgccaggcatctcccacccgcccctcccgacggcccaaccaggggctgtgcagacgtggggaccacggaaccgagatgcactttagaccagggagctggcccggcctctggcaggccccccactaacttattttgcccggctgaggttgtggggggcgcctcctggggtgcacgattccctcagctctgggtttaatgtattatatttatttggggccgacagtgccccaataaagggtcagaagtggc

SEQ ID NO: 11563 - protein, 239 aa, Homo sapiens
MFGFNKVSLFPSLSLCPSAFPSLSSPSLPGFSLLLGLCGPSPPSLPGWGRRRDAAGRGKEGGVADAAAASGGSGLLCGRLGRVGAAAAEGQAGALRGRPAQPSPAQPSPALPCPALRPGRAHRAASMFDTTPHSGRSTPSSSPSLRKRLQLLPPSRPPPEPEPGTMVEKGSDSSSEKGGVPGTPSNTEPRRPLLARCERQASPTRPSRRPNQGLCRRGDHGTEMHFRPGSWPGLWQAPH

SEQ ID NO: 11564 - DNA, 2973 bp, Homo sapiens
gtccaggagcttctggccaggggcatagtagttgctagggacccttttctaggtactaggggagggggctccccaacctgcgggcaggcagctgcctccacgatgtttggttttaataaagtctctttgtttccttctctgtctctctgcccctctgctttcccttctctgtccagtccctctctccccggcttctccctccttctaggcctctgcggcccctccccgccttccctcccgggctgggggcggcgccgtgacgcggcggggcgggggaaggaagggggtgtcgctgacgccgcggcggcctccggcggctccggccttttgtgcgggcggttgggtcgggtgggggcggcggccgcggaaggccaggccggtgccctgcggggacgcccagcgcagcccagccccgcgcagcccagccctgccctgccctgccctgccctgcgcccggggcgcgcccaccgcgccgcatccatgttcgacaccacaccccactctggccggagcacgccaagcagctccccatcgctccggaaacggctgcagctcctgcccccaagccggcccccacctgagccagaaccaggcaccatggtggagaagggatcagatagctcctcagagaagggtggggtgcctgggacccccagcacccagagcctaggcagccggaacttcatccgcaacagcaagaagatgcagagctggtacagtatgctgagccccacttataagcagcgtaatgaggacttccggaaactgttcagcaaactccccgaagcagaacgcctcattgtggattactcctgcgccctgcagcgtgagatcctgctccagggccgcctctacctctctgagaactggatctgcttctacagcaacatcttccgctgggagaccacgatctccatccagctgaaggaagtgacatgtctgaagaaggaaaagacggccaagctgatccccaacgccatccagatctgcacggagagcgagaagcatttcttcacttcctttggggcccgtgaccgctgcttcctcctcatcttccgcctctggcagaatgcactgcttgaaaagacgctgagtccccgcgagctctggcacctggtgcatcagtgctacggctcagagctgggcctcaccagtgaggatgaggactatgtctcccccttgcagctgaacggtctggggacccccaaggaagtgggagatgtgatcgccctgagcgacatcacctcctcgggggcagctgaccgcagccaggagccaagcccagtgggttcgcgccgtggccatgtcacgcccaacctttcccgagccagcagcgacgcagaccatggggcagaggaggacaaggaggagcaggtagacagccagccagacgcctcctccagccagacagtgaccccggtggctgaacccccgagcacagagcccacccagcctgacgggcccaccaccctgggccccttggatctgctgcccagtgaggagctattgacagacacaagtaactcctcttcatccactggggaggaagcggacttggctgccctgcttcccgacctctccggccgcctcctcatcaactctgtcttccatgtgggcgctgagcggctccagcagatgctcttctcggactcgcccttcctccagggcttcctacagcagtgcaagttcacagacgtgacgctgagcccctggagtggggacagcaagtgccaccagcgccgggtgctgacgtacaccatccccatcagcaacccactgggccccaagagcgcctccgtggtggagacacagacgctgttccggcgcggcccccaggccggcgggtgtgtggtggactccgaggtgctgacgcagggcatcccctaccaggactacttctacactgcccaccgctactgcatcctgggtctggcccggaacaaggcgcggctccgagtgtcttctgagatccgctaccgaaagcagccgtggagcctggtgaagtcgctcattgagaagaactcgtggagcggcattgaagactatttccaccatctggagcgagagctcgccaaggctgagaagctgtctctggaggaaggcgggaaggatgcccggggcttgctatccggcctgcggcggcggaagcggcccctgagctggcgggctcacggggacgggccccagcacccagatcctgacccctgtgcccgggccggcattcacacctcgggctccctcagctcccgcttctccgaaccatctgtggaccagggccccggggcaggcatccccagtgccctggttctcatcagcattgtccttatcatcctcatcgccctcaacgtcctgctcttctaccgcctctggtccctggaaaggacagcccacacctttgagtcctggcacagcctggccctggccaagggcaagttcccccagacggccacagagtgggccgagatcctggcgctgcagaagcaattccacagcgtggaggtgcacaagtggaggcagatcctgcgggcctccgtggagctcctggatgagatgaagttctcgctggagaagctgcaccaaggcatcacagtctcagaccctccctttgacacccagccccggcccgatgacagcttttcctgaggaccccggccacgcagctgttcccccacatggacagatggacacacagagcctcggcggccactgctggcacggtgtgagcgccaggcatctcccacccgcccctcccgacggcccaaccaggggctgtgcagacgtggggaccacggaaccgagatgcactttagaccagggagctggcccggcctctggcaggccccccactaacttattttgcccggctgaggttgtggggggcgcctcctggggtgcacgattccctcagctctgggtttaatgtattatatttatttggggccgacagtgccccaataaagggtcagaagtggc

SEQ ID NO: 11565 - protein, 846 aa, Homo sapiens
MFGFNKVSLFPSLSLCPSAFPSLSSPSLPGFSLLLGLCGPSPPSLPGWGRRRDAAGRGKEGGVADAAAASGGSGLLCGRLGRVGAAAAEGQAGALRGRPAQPSPAQPSPALPCPALRPGRAHRAASMFDTTPHSGRSTPSSSPSLRKRLQLLPPSRPPPEPEPGTMVEKGSDSSSEKGGVPGTPSTQSLGSRNFIRNSKKMQSWYSMLSPTYKQRNEDFRKLFSKLPEAERLIVDYSCALQREILLQGRLYLSENWICFYSNIFRWETTISIQLKEVTCLKKEKTAKLIPNAIQICTESEKHFFTSFGARDRCFLLIFRLWQNALLEKTLSPRELWHLVHQCYGSELGLTSEDEDYVSPLQLNGLGTPKEVGDVIALSDITSSGAADRSQEPSPVGSRRGHVTPNLSRASSDADHGAEEDKEEQVDSQPDASSSQTVTPVAEPPSTEPTQPDGPTTLGPLDLLPSEELLTDTSNSSSSTGEEADLAALLPDLSGRLLINSVFHVGAERLQQMLFSDSPFLQGFLQQCKFTDVTLSPWSGDSKCHQRRVLTYTIPISNPLGPKSASVVETQTLFRRGPQAGGCVVDSEVLTQGIPYQDYFYTAHRYCILGLARNKARLRVSSEIRYRKQPWSLVKSLIEKNSWSGIEDYFHHLERELAKAEKLSLEEGGKDARGLLSGLRRRKRPLSWRAHGDGPQHPDPDPCARAGIHTSGSLSSRFSEPSVDQGPGAGIPSALVLISIVLIILIALNVLLFYRLWSLERTAHTFESWHSLALAKGKFPQTATEWAEILALQKQFHSVEVHKWRQILRASVELLDEMKFSLEKLHQGITVSDPPFDTQPRPDDSFS

SEQ ID NO: 11566 - DNA, 2952 bp, Homo sapiens
gtccaggagcttctggccaggggcatagtagttgctagggacccttttctaggtactaggggagggggctccccaacctgcgggcaggcagctgcctccacgatgtttggttttaataaagtctctttgtttccttctctgtctctctgcccctctgctttcccttctctgtccagtccctctctccccggcttctccctccttctaggcctctgcggcccctccccgccttccctcccgggctgggggcggcgccgtgacgcggcggggcgggggaaggaagggggtgtcgctgacgccgcggcggcctccggcggctccggccttttgtgcgggcggttgggtcgggtgggggcggcggccgcggaaggccaggccggtgccctgcggggacgcccagcgcagcccagccccgcgcagcccagccctgccctgccctgccctgccctgcgcccggggcgcgcccaccgcgccgcatccatgttcgacaccacaccccactctggccggagcacgccaagcagctccccatcgctccggaaacggctgcagctcctgcccccaagccggcccccacctgagccagaaccaggcaccatggtggagaagggatcagatagctcctcagagaagggtggggtgcctgggacccccagcacccagagcctaggcagccggaacttcatccgcaacagcaagatgctgagccccacttataagcagcgtaatgaggacttccggaaactgttcagcaaactccccgaagcagaacgcctcattgtggattactcctgcgccctgcagcgtgagatcctgctccagggccgcctctacctctctgagaactggatctgcttctacagcaacatcttccgctgggagaccacgatctccatccagctgaaggaagtgacatgtctgaagaaggaaaagacggccaagctgatccccaacgccatccagatctgcacggagagcgagaagcatttcttcacttcctttggggcccgtgaccgctgcttcctcctcatcttccgcctctggcagaatgcactgcttgaaaagacgctgagtccccgcgagctctggcacctggtgcatcagtgctacggctcagagctgggcctcaccagtgaggatgaggactatgtctcccccttgcagctgaacggtctggggacccccaaggaagtgggagatgtgatcgccctgagcgacatcacctcctcgggggcagctgaccgcagccaggagccaagcccagtgggttcgcgccgtggccatgtcacgcccaacctttcccgagccagcagcgacgcagaccatggggcagaggaggacaaggaggagcaggtagacagccagccagacgcctcctccagccagacagtgaccccggtggctgaacccccgagcacagagcccacccagcctgacgggcccaccaccctgggccccttggatctgctgcccagtgaggagctattgacagacacaagtaactcctcttcatccactggggaggaagcggacttggctgccctgcttcccgacctctccggccgcctcctcatcaactctgtcttccatgtgggcgctgagcggctccagcagatgctcttctcggactcgcccttcctccagggcttcctacagcagtgcaagttcacagacgtgacgctgagcccctggagtggggacagcaagtgccaccagcgccgggtgctgacgtacaccatccccatcagcaacccactgggccccaagagcgcctccgtggtggagacacagacgctgttccggcgcggcccccaggccggcgggtgtgtggtggactccgaggtgctgacgcagggcatcccctaccaggactacttctacactgcccaccgctactgcatcctgggtctggcccggaacaaggcgcggctccgagtgtcttctgagatccgctaccgaaagcagccgtggagcctggtgaagtcgctcattgagaagaactcgtggagcggcattgaagactatttccaccatctggagcgagagctcgccaaggctgagaagctgtctctggaggaaggcgggaaggatgcccggggcttgctatccggcctgcggcggcggaagcggcccctgagctggcgggctcacggggacgggccccagcacccagatcctgacccctgtgcccgggccggcattcacacctcgggctccctcagctcccgcttctccgaaccatctgtggaccagggccccggggcaggcatccccagtgccctggttctcatcagcattgtccttatcatcctcatcgccctcaacgtcctgctcttctaccgcctctggtccctggaaaggacagcccacacctttgagtcctggcacagcctggccctggccaagggcaagttcccccagacggccacagagtgggccgagatcctggcgctgcagaagcaattccacagcgtggaggtgcacaagtggaggcagatcctgcgggcctccgtggagctcctggatgagatgaagttctcgctggagaagctgcaccaaggcatcacagtctcagaccctccctttgacacccagccccggcccgatgacagcttttcctgaggaccccggccacgcagctgttcccccacatggacagatggacacacagagcctcggcggccactgctggcacggtgtgagcgccaggcatctcccacccgcccctcccgacggcccaaccaggggctgtgcagacgtggggaccacggaaccgagatgcactttagaccagggagctggcccggcctctggcaggccccccactaacttattttgcccggctgaggttgtggggggcgcctcctggggtgcacgattccctcagctctgggtttaatgtattatatttatttggggccgacagtgccccaataaagggtcagaagtggc

SEQ ID NO: 11567 - protein, 839 aa, Homo sapiens
MFGFNKVSLFPSLSLCPSAFPSLSSPSLPGFSLLLGLCGPSPPSLPGWGRRRDAAGRGKEGGVADAAAASGGSGLLCGRLGRVGAAAAEGQAGALRGRPAQPSPAQPSPALPCPALRPGRAHRAASMFDTTPHSGRSTPSSSPSLRKRLQLLPPSRPPPEPEPGTMVEKGSDSSSEKGGVPGTPSTQSLGSRNFIRNSKMLSPTYKQRNEDFRKLFSKLPEAERLIVDYSCALQREILLQGRLYLSENWICFYSNIFRWETTISIQLKEVTCLKKEKTAKLIPNAIQICTESEKHFFTSFGARDRCFLLIFRLWQNALLEKTLSPRELWHLVHQCYGSELGLTSEDEDYVSPLQLNGLGTPKEVGDVIALSDITSSGAADRSQEPSPVGSRRGHVTPNLSRASSDADHGAEEDKEEQVDSQPDASSSQTVTPVAEPPSTEPTQPDGPTTLGPLDLLPSEELLTDTSNSSSSTGEEADLAALLPDLSGRLLINSVFHVGAERLQQMLFSDSPFLQGFLQQCKFTDVTLSPWSGDSKCHQRRVLTYTIPISNPLGPKSASVVETQTLFRRGPQAGGCVVDSEVLTQGIPYQDYFYTAHRYCILGLARNKARLRVSSEIRYRKQPWSLVKSLIEKNSWSGIEDYFHHLERELAKAEKLSLEEGGKDARGLLSGLRRRKRPLSWRAHGDGPQHPDPDPCARAGIHTSGSLSSRFSEPSVDQGPGAGIPSALVLISIVLIILIALNVLLFYRLWSLERTAHTFESWHSLALAKGKFPQTATEWAEILALQKQFHSVEVHKWRQILRASVELLDEMKFSLEKLHQGITVSDPPFDTQPRPDDSFS

SEQ ID NO: 11568 - DNA, 2860 bp, Homo sapiens
gtccaggagcttctggccaggggcatagtagttgctagggacccttttctaggtactaggggagggggctccccaacctgcgggcaggcagctgcctccacgatgtttggttttaataaagtctctttgtttccttctctgtctctctgcccctctgctttcccttctctgtccagtccctctctccccggcttctccctccttctaggcctctgcggcccctccccgccttccctcccgggctgggggcggcgccgtgacgcggcggggcgggggaaggaagggggtgtcgctgacgccgcggcggcctccggcggctccggccttttgtgcgggcggttgggtcgggtgggggcggcggccgcggaaggccaggccggtgccctgcggggacgcccagcgcagcccagccccgcgcagcccagccctgccctgccctgccctgccctgcgcccggggcgcgcccaccgcgccgcatccatgttcgacaccacaccccactctggccggagcacgccaagcagctccccatcgctccggaaacggctgcagctcctgcccccaagccggcccccacctgagccagaaccaggcaccatggtggagaagggatcagatagctcctcagagaagggtggggtgcctgggacccccagcacccagagcctaggcagccggaacttcatccgcaacagcaagaagatgcagagctggtacagtatgctgagccccacttataagcagcgtaatgaggacttccggaaactgttcagcaaactccccgaagcagaacgcctcattgtggattactcctgcgccctgcagcgtgagatcctgctccagggccgcctctacctctctgagaactggatctgcttctacagcaacatcttccgctgggagaccacgatctccatccagctgaaggaagtgacatgtctgaagaaggaaaagacggccaagctgatccccaacgccatccagatctgcacggagagcgagaagcatttcttcacttcctttggggcccgtgaccgctgcttcctcctcatcttccgcctctggcagaatgcactgcttgaaaaggacccccaaggaagtgggagatgtgatcgccctgagcgacatcacctcctcgggggcagctgaccgcagccaggagccaagcccagtgggttcgcgccgtggccatgtcacgcccaacctttcccgagccagcagcgacgcagaccatggggcagaggaggacaaggaggagcaggtagacagccagccagacgcctcctccagccagacagtgaccccggtggctgaacccccgagcacagagcccacccagcctgacgggcccaccaccctgggccccttggatctgctgcccagtgaggagctattgacagacacaagtaactcctcttcatccactggggaggaagcggacttggctgccctgcttcccgacctctccggccgcctcctcatcaactctgtcttccatgtgggcgctgagcggctccagcagatgctcttctcggactcgcccttcctccagggcttcctacagcagtgcaagttcacagacgtgacgctgagcccctggagtggggacagcaagtgccaccagcgccgggtgctgacgtacaccatccccatcagcaacccactgggccccaagagcgcctccgtggtggagacacagacgctgttccggcgcggcccccaggccggcgggtgtgtggtggactccgaggtgctgacgcagggcatcccctaccaggactacttctacactgcccaccgctactgcatcctgggtctggcccggaacaaggcgcggctccgagtgtcttctgagatccgctaccgaaagcagccgtggagcctggtgaagtcgctcattgagaagaactcgtggagcggcattgaagactatttccaccatctggagcgagagctcgccaaggctgagaagctgtctctggaggaaggcgggaaggatgcccggggcttgctatccggcctgcggcggcggaagcggcccctgagctggcgggctcacggggacgggccccagcacccagatcctgacccctgtgcccgggccggcattcacacctcgggctccctcagctcccgcttctccgaaccatctgtggaccagggccccggggcaggcatccccagtgccctggttctcatcagcattgtccttatcatcctcatcgccctcaacgtcctgctcttctaccgcctctggtccctggaaaggacagcccacacctttgagtcctggcacagcctggccctggccaagggcaagttcccccagacggccacagagtgggccgagatcctggcgctgcagaagcaattccacagcgtggaggtgcacaagtggaggcagatcctgcgggcctccgtggagctcctggatgagatgaagttctcgctggagaagctgcaccaaggcatcacagtctcagaccctccctttgacacccagccccggcccgatgacagcttttcctgaggaccccggccacgcagctgttcccccacatggacagatggacacacagagcctcggcggccactgctggcacggtgtgagcgccaggcatctcccacccgcccctcccgacggcccaaccaggggctgtgcagacgtggggaccacggaaccgagatgcactttagaccagggagctggcccggcctctggcaggccccccactaacttattttgcccggctgaggttgtggggggcgcctcctggggtgcacgattccctcagctctgggtttaatgtattatatttatttggggccgacagtgccccaataaagggtcagaagtggc

SEQ ID NO: 11569 - protein, 486 aa, Homo sapiens
MHCLKRTPKEVGDVIALSDITSSGAADRSQEPSPVGSRRGHVTPNLSRASSDADHGAEEDKEEQVDSQPDASSSQTVTPVAEPPSTEPTQPDGPTTLGPLDLLPSEELLTDTSNSSSSTGEEADLAALLPDLSGRLLINSVFHVGAERLQQMLFSDSPFLQGFLQQCKFTDVTLSPWSGDSKCHQRRVLTYTIPISNPLGPKSASVVETQTLFRRGPQAGGCVVDSEVLTQGIPYQDYFYTAHRYCILGLARNKARLRVSSEIRYRKQPWSLVKSLIEKNSWSGIEDYFHHLERELAKAEKLSLEEGGKDARGLLSGLRRRKRPLSWRAHGDGPQHPDPDPCARAGIHTSGSLSSRFSEPSVDQGPGAGIPSALVLISIVLIILIALNVLLFYRLWSLERTAHTFESWHSLALAKGKFPQTATEWAEILALQKQFHSVEVHKWRQILRASVELLDEMKFSLEKLHQGITVSDPPFDTQPRPDDSFS

SEQ ID NO: 11570 - DNA, 1094 bp, Homo sapiens
gcccagcgcagcccagccccgcgcagcccagccctgccctgccctgccctgccctgcgcccggggcgcgcccaccgcgccgcatccatgttcgaccccacttataagcagcgtaatgaggacttccggaaactgttcagcaaactccccgaagcagaacgcctcattgtggattactcctgcgccctgcagcgtgagatcctgctccagggccgcctctacctctctgagaactggatctgcttctacagcaacatcttccgctgggagaccacgatctccatccagctgaaggaagtgacatgtctgaagaaggaaaagacggccaagctgatccccaacgccatccagatctgcacggagagcgagaaggtgacggaggacccggtgacgggaccacgcggtcccccgctcagcaggccgcctcccccaaacatgcaaagccccatttgttctgcaccctgagttctctccgagctgtccccttctctctgttctcccggcccaggcgcccatcacccctgacctgatccccgcaccagcctctcctctctttccctgcaacctgttacctcacacagctgctcaggaacagcagaaatagtaaaactcttccatgtatgtggcacctcagccgcccctcccttcgtaagtctccccgatgttgtgtcctgtccctgtcattgtggcctcatgtccgttggttgcaagatggctttctcaccagcggtccaacaagaagggggacaggtgtgggggacacttcccagcagacttctctttgtgttttgttggttaaaagtggatctggccaggtgtagtggctcatgcctgtaaccctagcattttggggaggctgaggcaggaagattgcttgagcccaggaggttgaggctagcctgggcaacatagtgagaccctgtctcttaaaaagcaaaaaattaaccaggtgtggtggcacgcacctgtagtcccagctactcactcaggaggctgagacaggaggatggcttgagcccaggaggttgaggctgcagtgagccgtgatcatgccactgcactccagcctgggtgacaaagccagaccctgtctca

SEQ ID NO: 11571 - protein, 125 aa, Homo sapiens
MFDPTYKQRNEDFRKLFSKLPEAERLIVDYSCALQREILLQGRLYLSENWICFYSNIFRWETTISIQLKEVTCLKKEKTAKLIPNAIQICTESEKVTEDPVTGPRGPPLSRPPPPNMQSPICSAP

SEQ ID NO: 11572 - DNA, 546 bp, Homo sapiens
cctgtgtgtgtctggggctccaaatctgtggctgtgagcagctggttgtgtgcgtgttgtgtctcattccatctgtagctccctgtgcaaatataaattacccctgtgtgtctgagtgtgacgttggagtgtttgtacatgtgtctggagttaccgtgtgtagcagctctgatccttcttgggctgtgtgtgttttaccattaattctatctgtagctccaagcgttgctgtaagttaccagtgtgcgtcccattgtgacttagtggtgtgtgtacaagtgtgcctggggctctgggttctaccatgaccctctgtgcctgcatatgcctgtaatttagctctgaaacgctcttctttttttttttttcttttgaaatagagtctggctctgtcgcccaggctagagtgcagtggcacgatctcggcccactgcaacctcctcctgctggacaggaggatggcttgagcccaggaggttgaggctgcagtgagccgtgatcatgccactgcactccagcctgggtgacaaagccagaccctgtctc

SEQ ID NO: 11573 - protein, 48 aa, Homo sapiens
FSSETLFFFFFSFEIESGSVAQARVQWHDLGPLQPPPAGQEDGLSPGG

SEQ ID NO: 11574 - DNA, 2215 bp, Homo sapiens
ccggaaactgttcagcaaactccccgaagcagaacgcctcattgtggattactcctgcgccctgcagcgtgagatcctgctccagggccgcctctacctctctgagaactggatctgcttctacagcaacatcttccgctgggagaccacgatctccatccagctgaaggaagtgacatgtctgaagaaggaaaagacggccaagctgatccccaacgccatccagatctgcacggagagcgagaagcatttcttcacttcctttggggcccgtgaccgctgcttcctcctcatcttccgcctctggcagaatgcactgcttgaaaagacgctgagtccccgcgagctctggcacctggtgcatcagtgctacggctcagagctgggcctcaccagtgaggatgaggactatgtctcccccttgcagctgaacggtctggggacccccaaggaagtgggagatgtgatcgccctgagcgacatcacctcctcgggggcagctgaccgcagccaggagccaagcccagtgggttcgcgccgtggccatgtcacgcccaacctttcccgagccagcagcgacgcagaccatggggcagaggaggacaaggaggagcaggtagacagccagccagacgcctcctccagccagacagtgaccccggtggctgaacccccgagcacagagcccacccagcctgacgggcccaccaccctgggccccttggatctgctgcccagtgaggagctattgacagacacaagtaactcctcttcatccactggggaggaagcggacttggctgccctgcttcccgacctctccggccgcctcctcatcaactctgtcttccatgtgggcgctgagcggctccagcagatgctcttctcggactcgcccttcctccagggcttcctacagcagtgcaagttcacagacgtgacgctgagcccctggagtggggacagcaagtgccaccagcgccgggtgctgacgtacaccatccccatcagcaacccactgggccccaagagcgcctccgtggtggagacacagacgctgttccggcgcggcccccaggccggcgggtgtgtggtggactccgaggtgctgacgcagggcatcccctaccaggactacttctacactgcccaccgctactgcatcctgggtctggcccggaacaaggcgcggctccgagtgtcttctgagatccgctaccgaaagcagccgtggagcctggtgaagtcgctcattgagaagaactcgtggagcggcattgaagactatttccaccatctggagcgagagctcgccaaggctgagaagctgtctctggaggaaggcgggaaggatgcccggggcttgctatccggcctgcggcggcggaagcggcccctgagctggcgggctcacggggacgggccccagcacccagatcctgacccctgtgcccgggccggcattcacacctcgggctccctcagctcccgcttctccgaaccatctgtggaccagggccccggggcaggcatccccagtgccctggttctcatcagcattgtccttatcatcctcatcgccctcaacgtcctgctcttctaccgcctctggtccctggaaaggacagcccacacctttgagtcctggcacagcctggccctggccaagggcaagttcccccagacggccacagagtgggccgagatcctggcgctgcagaagcaattccacagcgtggaggtgcacaagtggaggcagatcctgcgggcctccgtggagctcctggatgagatgaagttctcgctggagaagctgcaccaaggcatcacagtctcagaccctccctttgacacccagccccggcccgatgacagcttttcctgaggaccccggccacgcagctgttcccccacatggacagatggacacacagagcctcggcggccactgctggcacggtgtgagcgccaggcatctcccacccgcccctcccgacggcccaaccaggggctgtgcagacgtggggaccacggaaccgagatgcactttagaccagggagctggcccggcctctggcaggccccccactaacttattttgcccggctgaggttgtggggggcgcctcctggggtgcacgattccctcagctctgggtttaatgtattatatttatttggggccgacagtgccccaataaagggtcagaagtggc

SEQ ID NO: 11575 - protein, 335 aa, Homo sapiens
MLFSDSPFLQGFLQQCKFTDVTLSPWSGDSKCHQRRVLTYTIPISNPLGPKSASVVETQTLFRRGPQAGGCVVDSEVLTQGIPYQDYFYTAHRYCILGLARNKARLRVSSEIRYRKQPWSLVKSLIEKNSWSGIEDYFHHLERELAKAEKLSLEEGGKDARGLLSGLRRRKRPLSWRAHGDGPQHPDPDPCARAGIHTSGSLSSRFSEPSVDQGPGAGIPSALVLISIVLIILIALNVLLFYRLWSLERTAHTFESWHSLALAKGKFPQTATEWAEILALQKQFHSVEVHKWRQILRASVELLDEMKFSLEKLHQGITVSDPPFDTQPRPDDSFS

SEQ ID NO: 11576 - DNA, 2391 bp, Homo sapiens
ttttgtacaaaaaagaaaaaaaagaaaaaactaggtgtggtggtgcacacctatagtaccagctacttggcagaccaaggcaagaggatcacatgaggccaagagtttgagacaagcctgggcaacatagtgagacccctgtctttacaaaaaatttaaaaattagccaggcatggggtcatgcaccctatgtagtctcagctactggggaggctgaggcaggaggatcgcttgagcccaggagttggaggctgcagtgagctatgattgcaccactgcacttcggcctgagcaacagagcgagaccctgtctctaaaacgaacaaagggagagaattaagtgatttcatacatttaaagcacttgggccagttagtaagcattgactattagtatttctattatcattattgtattcattttctctctccactaattttcagctagcctctattcttgtctcttatggggcagagatggcctcagccctgccccagaccagcccaatgagagagagcagcctatttttcctagtgtctacagcggacaccctagggttggctctgattgggccaacttgagagtgtgcctgcccctgaaccaatcactgtggttgatcggatagacctgggccacccactcacccctgaaccaattgctgtgcccctaggttgatgctcccaggaggcgtgctatctggtaatgaatccctgtgatttaaatctcagggcctaggtgtgttctccacccagaaccaagcacagtggctgtctgtctgggcctggagcacgtgcccaccctcaacccatccctgagtcacaggagggctctgtgtcagtgtccagctgtgctccaggaggtggggtccgcccatgcacactacaaggcctgggagtggggaggcgtggcccgcagagggagggaggagtggaggcagtcatcatcctcggctctcctctgtctccagcggacttggctgccctgcttcccgacctctccggccgcctcctcatcaactctgtcttccatgtgggcgctgagcggctccagcagatgctcttctcggactcgcccttcctccagggcttcctacagcagtgcaagttcacagacgtgacgctgagcccctggagtggggacagcaagtgccaccagcgccgggtgctgacgtacaccatccccatcagcaacccactgggccccaagagcgcctccgtggtggagacacagacgctgttccggcgcggcccccaggccggcgggtgtgtggtggactccgaggtgctgacgcagggcatcccctaccaggactacttctacactgcccaccgctactgcatcctgggtctggcccggaacaaggcgcggctccgagtgtcttctgagatccgctaccgaaagcagccgtggagcctggtgaagtcgctcattgagaagaactcgtggagcggcattgaagactatttccaccatctggagcgagagctcgccaaggctgagaagctgtctctggaggaaggcgggaaggatgcccggggcttgctatccggcctgcggcggcggaagcggcccctgagctggcgggctcacggggacgggccccagcacccagatcctgacccctgtgcccgggccggcattcacacctcgggctccctcagctcccgcttctccgaaccatctgtggaccagggccccggggcaggcatccccagtgccctggttctcatcagcattgtccttatcatcctcatcgccctcaacgtcctgctcttctaccgcctctggtccctggaaaggacagcccacacctttgagtcctggcacagcctggccctggccaagggcaagttcccccagacggccacagagtgggccgagatcctggcgctgcagaagcaattccacagcgtggaggtgcacaagtggaggcagatcctgcgggcctccgtggagctcctggatgagatgaagttctcgctggagaagctgcaccaaggcatcacagtctcagaccctccctttgacacccagccccggcccgatgacagcttttcctgaggaccccggccacgcagctgttcccccacatggacagatggacacacagagcctcggcggccactgctggcacggtgtgagcgccaggcatctcccacccgcccctcccgacggcccaaccaggggctgtgcagacgtggggaccacggaaccgagatgcactttagaccagggagctggcccggcctctggcaggccccccactaacttattttgcccggctgaggttgtggggggcgcctcctggggtgcacgattccctcagctctgggtttaatgtattatatttatttggggccgacagtgccccaataaagggtcagaagtggc

SEQ ID NO: 11577 - protein, 335 aa, Homo sapiens; identical to SEQ ID NO: 11575

SEQ ID NO: 11578 - DNA, 1465 bp, Homo sapiens
ccgcagtgaccttgaggaaaagatagacctcacaccagaccagagtgatccgggctgggatgggggaggtatgggcagaggggttggggctgggagtggggaagccctgggaggccagcggcggcttcctcccaggccagagggggcagtcaggatgggcgtcctgagagagtggagaccgcgtaggctaagggcttgggcagggagaacccacactcctgcccagaagcctgcaggagttggcgggcaggacgctgggaggaaacagaagcaggatcccggggttgagcagaccctgcgaggtgagggtcaggccagctacatgctcagcctctgagcctcagctctcagctctcatccagtgagggggcgtggtgctctcagccaagagctgccccgggtgaggagggctgggggtgtcgggggcaggccaggcggcgctcatctctctgtctcccctcactgctgctgctgcaggatctgtgtgaggtagggtcccgagtcctccccctgccctcccctccctgcaccccacccctgctgcagcctcttctccccaccccatgccccccagctcccccagggaggtggcctggcatggcagtcaagggtatgggcatcagacagacctgggtttgaacactgacttccctgctatggactgtgcaaccctaggcatgtctctcatcctctctgagcctaattctcctcctctgcaatgggggatagaggtgtccctacaagatgtagttgtttgggggtgttcagagcatctagaccccaggaatcctgacctctgacccctgtccccagccttatcatcctcatcgccctcaacgtcctgctcttctaccgcctctggtccctggaaaggacagcccacacctttgagtcctggcacagcctggccctggccaagggcaagttcccccagacggccacagagtgggccgagatcctggcgctgcagaagcaattccacagcgtggaggtgcacaagtggaggcagatcctgcgggcctccgtggagctcctggatgagatgaagttctcgctggagaagctgcaccaaggcatcacagtctcagaccctccctttgacacccagccccggcccgatgacagcttttcctgaggaccccggccacgcagctgttcccccacatggacagatggacacacagagcctcggcggccactgctggcacggtgtgagcgccaggcatctcccacccgcccctcccgacggcccaaccaggggctgtgcagacgtggggaccacggaaccgagatgcactttagaccagggagctggcccggcctctggcaggccccccactaacttattttgcccggctgaggttgtggggggcgcctcctggggtgcacgattccctcagctctgggtttaatgtattatatttatttggggccgacagtgccccaataaagggtcagaagtggc

SEQ ID NO: 11579 - protein, 30 aa, Homo sapiens
MKFSLEKLHQGITVSDPPFDTQPRPDDSFS

SEQ ID NO: 11580 - DNA, 418 bp, Homo sapiens
ccttatcatcctcatcgccctcaacgtcctgctcttctaccgccctccctttgacacccagccccggcccgatgacagcttttcctgaggaccccggccacgcagctgttcccccacatggacagatggacacacagagcctcggcggccactgctggcacggtgtgagcgccaggcatctcccacccgcccctcccgacggcccaaccaggggctgtgcagacgtggggaccacggaaccgagatgcactttagaccagggagctggcccggcctctggcaggccccccactaacttattttgcccggctgaggttgtggggggcgcctcctggggtgcacgattccctcagctctgggtttaatgtattatatttatttggggccgacagtgccccaataaagggtcagaagtggc

SEQ ID NO: 11581 - protein, 97 aa, Homo sapiens
MTAFPEDPGHAAVPPHGQMDTQSLGGHCWHGVSARHLPPAPPDGPTRGCADVGTTEPRCTLDQGAGPASGRPPTNLFCPAEVVGGASWGARFPQLWV

SEQ ID NO: 11582 - DNA, 1330 bp, Homo sapiens
agtgcgcaggagaccgcggtccgcgcccgagcgcgcccgagccggagcgggaccggggtcggtgcacctagcggatgtgcccggctgcgcgcgccagcgcagcagcccgagcagcggccgccgcccgcgcggcggggatgcccggacgccgggccccggggctgggcccccggcggtaaccggagcgggggggccgcgccccccctcctcccccctcgccggtcccagagccgcagctgctgcgcccgcgcgctcccggggacattctaaccgccgccaggtcccgccgcctctcgccccgctattaataccggcggcccgggaggggggcgcagcacgcgccgcgcagccatggggaggctgctggccttagtggtcggcgcggcactggtgtcctcagcctgcgggggctgcgtggaggtggactcggagaccgaggccgtgtatgggatgaccttcaaaattctttgcatctcctgcaagcgccgcagcgagaccaacgctgagaccttcaccgagtggaccttccgccagaagggcactgaggagtttgtcaagatcctgcgctatgagaatgaggtgttgcagctggaggaggatgagcgcttcgagggccgcgtggtgtggaatggcagccggggcaccaaagacctgcaggatctgtctatcttcatcaccaatgtcacctacaaccactcgggcgactacgagtgccacgtctaccgcctgctcttcttcgaaaactacgagcacaacaccagcgtcgtcaagaagatccacattgaggtagtggacaaaggtgagtcgggtgctgcctgcccctttaccgtcacccaccggagagccagatggagggacagatggcaggcagtggacaggacaggctggctctgtgcctggccagccaaccgcccacagcagcgggctgagggggaggggagcagcccctcctgcccactccagctctggcctctgtttctctccagcccacggagaggtcaaagcatgcctgtcccccacagacgctccgggtacagaacccagctctgtcacctgtgctgtatgacctctggcaggtgccttctgtctctgagccaaagggttgtcctgggcttgcccgggataataatccgatgtgtttctcggggtgtggtttgagccattcttccatcatggggttcatgaggattgagcagctgcaggcacacgcctggcttccagcagagccttgcaggtggtggcgagggtggcggttcttactgttcgagtagctcagccctgctgccctctgtggtgatgaggcaagagagcgtgccacctagagcagagt

SEQ ID NO: 11583 - protein, 268 aa, Homo sapiens; identical to SEQ ID NO: 1917

SEQ ID NO: 11584 - DNA, 1673 bp, Homo sapiens
agtgcgcaggagaccgcggtccgcgcccgagcgcgcccgagccggagcgggaccggggtcggtgcacctagcggatgtgcccggctgcgcgcgccagcgcagcagcccgagcagcggccgccgcccgcgcggcggggatgcccggacgccgggccccggggctgggcccccggcggtaaccggagcgggggggccgcgccccccctcctcccccctcgccggtcccagagccgcagctgctgcgcccgcgcgctcccggggacattctaaccgccgccaggtcccgccgcctctcgccccgctattaataccggcggcccgggaggggggcgcagcacgcgccgcgcagccatggggaggctgctggccttagtggtcggcgcggcactggtgtcctcagcctgcgggggctgcgtggaggtggactcggagaccgaggccgtgtatgggatgaccttcaaaattctttgcatctcctgcaagcgccgcagcgagaccaacgctgagaccttcaccgagtggaccttccgccagaagggcactgaggagtttgtcaagatcctgcgctatgagaatgaggtgttgcagctggaggaggatgagcgcttcgagggccgcgtggtgtggaatggcagccggggcaccaaagacctgcaggatctgtctatcttcatcaccaatgtcacctacaaccactcgggcgactacgagtgccacgtctaccgcctgctcttcttcgaaaactacgagcacaacaccagcgtcgtcaagaagatccacattgaggtagtggacaaagccaacagagacatggcatccatcgtgtctgagatcatgatgtatgtgctcattgtggtgttgaccatatggctcgtggcagagatgatttactgctacaagaagatcgctgccgccacggagactgctgcacaggagaatgcctcggaatacctggccatcacctctgaaagcaaagagaactgcacgggcgtccaggtggccgaatagccctggccctgggccccgcctcaaggaagagccagccgtaatggggactctccaggcaccgcctgcccccagcgtgggggtggccactcctgggccccagaaagcctcagagtcctgccgacggagccactggggtgggagggggcagggggcttggctcgcacccccactttcgcctcctccagctcctgccccgccggccgcgcaccgccatgcatgatgggtaaagcaatactgccgctgcccccaccctgcttctgctgcctgtttggggaggggggcggtgaggtgggggcagcggccccgcacccctcctccttgctgatttgcacacattggccgcttcagacacgcacttctggggccagcccctccccgcctcctccctgcctggcggcaggggtcgcgatgatgggctggagcagtttggggcagggggttctgggacccactccgactccccctccccggcatcatttcccctcccgcttcctccggctggacctggggtcccccctccctgtaatgcactcctgccccggcccaacctcgccctctctcaccagccttgaactgtggccacctagaaaggggcccattcagcctcgtctctttacagaagtagttttgttcatgaaataaagactcttggacttgatgcatag

SEQ ID NO: 11585 - protein, 218 aa, Homo sapiens; identical to SEQ ID NO: 1915

SEQ ID NO: 11586 - DNA, 1505 bp, Homo sapiens
ctcccgaaatccagcgatccttctgcttgagcctcccacgtagctgggactacaggtgtgagccactacgcccggcaattttttttttttttgtagagactggatcttgctatgttgcccaggatggtcttgaactcctggcctcaaataatcttccctccttagccgccgtaagtgccgagattacaggagagagcctccgcgcctggcctacagtatttttattataatccatcatactagcgtatttttaacgttccccaccatggcgggtatttttattacccaccatgctatgctatagtatttcaaaaattaatcctattgtagcatgtaaaaatattccattctataccatactatattcatcattacctctgatactacagtatttttaacatgactcattgtgctattgtattttttcattacccacaataccacaatattactgtatttgttagcactgcctgccattccttattattattatttttgcaatggagtctcgctctgtcacccaggcaggctggagtgcagcagtacaatgtcggctcactgcacctcccgggctcaagcgattcttctgcctcagcctccgaagtagctgggattacaggcacgcgccaccacgcccggctaattcttttgtatttttagtagagacagggtttcgctatgtagaccaggctggtctcgcactcctggcctccagtgattcacccaccttggcctcccagagtgctggaatgacacgtatgagccaccacactgacctttttattatttttatccaccatctcgctgcaatttcagtattgcccatcgacctatattgcctcctggtaatgacccctgaggaatgagccatgccatttccataggtggaggcgacgggtcatggtggtgagaacttcactgacctggaagaggtggagaagatgctgggaagctgctgagggctgcccacctgtgttaggagaaggcagatggggacccatggggacagtaatactattttggatccacacaacgggagtggaaaatgccttgaggcacagcagcgtctgaggcgggtgagaaatccggcctgcagagtcgcggctggccttcagatctgcgggctgcctgtgagatgccgtgttacctaaatccatttgggcactgagttccaggagtgggggcaagaattccgatgacggggctttatccggtgcgcatccagctcagagtggttcctgagaccagccaccatgggcagccaggatgtgctcatccttgaggctttccgaggcatcaaggagatggttggataaagaatttagcacagagcttgactgatggcaggcgcccacaacatgagacacattaataatgtgtgtggaggccaggtgtagtggttcatgcctgtcaccccagcactttgggaggcagaggtgggaagatttcttgaggccaggaattcaagaccagcctgggcaacacagcgagacctcatctctacc

SEQ ID NO: 11587 - protein, 121 aa, Homo sapiens
MESRSVTQAGWSAAVQCRLTAPPGLKRFFCLSLRSSWDYRHAPPRPANSFVFLVETGFRYVDQAGLALLASSDSPTLASQSAGMTRMSHHTDLFIIFIHHLAAISVLPIDLYCLLVMTPEE

SEQ ID NO: 11588 - DNA, 3468 bp, Homo sapiens
cacgcgccaccacgcccggctaattcttttgtatttttagtagagacagggtttcgctatgtagaccaggctggtctcgcactcctggcctccagtgattcacccaccttggcctcccagagtgctggaatgacacgtatgagccaccacactgacctttttattatttttatccaccatctcgctgcaatttcagtattgcccatcgacctatattgcctcctggtaatgacccctgaggaatgagccatgccatttccataggtggaggcgacgggtcatggtggtgagaacttcactgacctggaagaggtggagaagatgctgggaagctgctgagggctgcccacctgtgttaggagaaggcagatggggacccatggggacagtaatactattttggatccacacaacgggagtggaaaatgccttgaggcacagcagcgtctgaggcgggtgagaaatccggcctgcagagtcgcggctggccttcagatctgcgggctgcctgtgagatgccgtgttacctaaatccatttgggcactgagttccaggagtgggggcaagaattccgatgacggggctttatccggtgcgcatccagctcagagtggttcctgagaccagccaccatgggcagccaggatgtgctcatccttgaggctttccgaggcatcaaggagatggttggataaagaatttagcacagagcttgactgatggcaggcgcccacaacatgagacacattaataatgtgtgtggaggccaggtgtagtggttcatgcctgtcaccccagcactttgggaggcagaggtgggaagatttcttgaggccaggaattcaagaccagcctgggcaacacagcgagacctcatctctaccaaaaaaaaaaaaaaaaaaggaaaaaattcacctggcctagtggtgcacacttgtagtctccgctactcaggaggctgaggcaggaggattgcttgagctcaggagttccaggctgcagtgggctatgattgcatcactgcactccagtctgggcaatagagcaagaccctgtctcttaaaaaaataaagtctgttgaaaagaatgaatgaaggaaggaaggaatgagagggaaaccctgtctcagctcctcccgcagggaagctggggcagggcaggcagggggggcatccggccccgctccctcccttactctggcccagaaagcactggtgccatctgcacagggtggagccaaagaaagtgccccactcacagcagagggaggccatttgaggacagcagggaaaatgggatctcagccatctaggagggggccagagatgtgggatggacacctaggaaatccagccgaggacaccagagtggcttttgactctggtcccctggctgaacgcgttccctttacagtttaaatttaggctcaaggagaagaagctggcaatcggcagggccagtgctgtagagaggatgtagggtttccggaaaatagccaacacttcagcagtgctggctgcgagctcatccaagcatgttacgggtgttaactcatttcctctccagcaaccctgtgagagggtctgagtgttcccatctccattttacagaggctcagagaggtgcagtcctttgcctgaggtcacacagctagtaagaggcagagccgggatttgaaccctggcagtctggccctagagccccagctgttaaccattaggctttatagccccagttataacaacaataataatactaatacaagtgaaccttcactgagtgccatttatagatcaagcactattctaaggattttaaagcatatttaattctcacagcactctgatgaaggaggtattcattttacaattgaagaaacagaggcctagagacattgagtcacttgcgcaaggtcacacagctggccagtggcagagccagcctttgaacctgagccttctggttgcagagctacggcttttaggcaccgtgctgagggcctccagaatgacacagatgtggcctcgagttacacagggaggcaggttgagggtgacccccaccaggcctacccaaggctgggtattaataatcacagtgcatacaccaggcccagggaggttgagccactcatccaagctcacacagcaagctcacagcacactcaggctgtcatgcagcctgggctacccccttaaccctgcctggcccctgcagccaacagagacatggcatccatcgtgtctgagatcatgatgtatgtgctcattgtggtgttgaccatatggctcgtggcagagatgatttactgctacaagaagatcgctgccgccacggagactgctgcacaggagaatgcgtgagtagggtggctgggaggtgggagggcacccagggcaccgtcacacttgccagagaggaactccggagcccgggcagggaggaggcagcggagcggcccagggcgccatctctcagtactacccagaggggagtgctccctgtcagacacaggataggggtcgtcagacccagccccttcctccctccaactcaggagcccaggctcccagccagattcctcaaagaccctgaggagtccacccatagactccttctctctctaactaaggagccctgtgtacctggggtggagaccgctaccttcccccatcccccgggggttgggtcggtctgatgatggggtcactgtatacctggcctttcccccacagctcggaatacctggccatcacctctgaaagcaaagagaactgcacgggcgtccaggtggccgaatagccctggccctgggccccgcctcaaggaagagccagccgtaatggggactctccaggcaccgcctgcccccagcgtgggggtggccactcctgggccccagaaagcctcagagtcctgccgacggagccactggggtgggagggggcagggggcttggctcgcacccccactttcgcctcctccagctcctgccccgccggccgcgcaccgccatgcatgatgggtaaagcaatactgccgctgcccccaccctgcttctgctgcctgtttggggaggggggcggtgaggtgggggcagcggccccgcacccctcctccttgctgatttgcacacattggccgcttcagacacgcacttctggggccagcccctccccgcctcctccctgcctggcggcaggggtcgcgatgatgggctggagcagtttggggcagggggttctgggacccactccgactccccctccccggcatcatttcccctcccgcttcctccggctggacctggggtcccccctccctgtaatgcactcctgccccggcccaacctcgccctctctcaccagccttgaactgtggccacctagaaaggggcccattcagcctcgtctctttacagaagtagttttgttcatgaaataaagactcttggacttgatgcatag

SEQ ID NO: 11589 - protein, 141 aa, Homo sapiens
MMGKAILPLPPPCFCCLFGEGGGEVGAAAPHPSSLLICTHWPLQTRTSGASPSPPPPCLAAGVAMMGWSSLGQGVLGPTPTPPPRHHFPSRFLRLDLGSPLPVMHSCPGPTSPSLTSLELWPPRKGPIQPRLFTEVVLFMK

SEQ ID NO: 11590 - DNA, 1785 bp, Homo sapiens
tcgagcccgctttccagggaccctacctgagggcccacaggtgaggcagcctggcctagcaggccccacgccaccgcctctgcctccaggccgcccgctgctgcggggccaccatgctcctgcccaggcctggagactgacccgaccccggcactacctcgaggctccgcccccacctgctggaccccagggtcccaccctggcccaggaggtcagccagggaatcattaacaagaggcagtgacatggcgcagaaggagggtggccggactgtgccatgctgctccagacccaaggtggcagctctcactgcggggaccctgctacttctgacagccatcggggcggcatcctgggccattgtggctgttctcctcaggagtgaccaggagccgctgtacccagtgcaggtcagctctgcggacgctcggctcatggtctttgacaagacggaagggacgtggcggctgctgtgctcctcgcgctccaacgccagggtagccggactcagctgcgaggagatgggcttcctcagggcactgacccactccgagctggacgtgcgaacggcgggcgccaatggcacgtcgggcttcttctgtgtggacgaggggaggctgccccacacccagaggctgctggaggtcatctccgtgtgtgattgccccagaggccgtttcttggccgccatctgccaagactgtggccgcaggaagctgcccgtggaccgcatcgtgggaggccgggacaccagcttgggccggtggccgtggcaagtcagccttcgctatgatggagcacacctctgtgggggatccctgctctccggggactgggtgctgacagccgcccactgcttcccggagcggaaccgggtcctgtcccgatggcgagtgtttgccggtgccgtggcccaggcctctccccacggtctgcagctgggggtgcaggctgtggtctaccacgggggctatcttccctttcgggaccccaacagcgaggagaacagcaacgatattgccctggtccacctctccagtcccctgcccctcacagaatacatccagcctgtgtgcctcccagctgccggccaggccctggtggatggcaagatctgtaccgtgacgggctggggcaacacgcagtactatggccaacaggccggggtactccaggaggctcgagtccccataatcagcaatgatgtctgcaatggcgctgacttctatggaaaccagatcaagcccaagatgttctgtgctggctaccccgagggtggcattgatgcctgccagggcgacagcggtggtccctttgtgtgtgaggacagcatctctcggacgccacgttggcggctgtgtggcattgtgagttggggcactggctgtgccctggcccagaagccaggcgtctacaccaaagtcagtgacttccgggagtggatcttccaggccataaagactcactccgaagccagcggcatggtgacccagctctgaccggtggcttctcgctgcgcagcctccagggcccgaggtgatcccggtggtgggatccacgctgggcctaggatgggacgtttttcttcttgggcccggtccacaggtccaaggacaccctccctccagggtcctctcttccacagtggcgggcccactcagccccgagaccacccaacctcaccctcctgacccccatgtaaatattgttctgctgtctgggactcctgtctaggtgcccctgatgacgggatgctctttaaataataaagatggttttgattaa

SEQ ID NO: 11591 - protein, 417 aa, Homo sapiens; identical to SEQ ID NO: 1919

SEQ ID NO: 11592 - DNA, 2365 bp, Homo sapiens
tcgagcccgctttccagggaccctacctgagggcccacaggtgaggcagcctggcctagcaggccccacgccaccgcctctgcctccaggccgcccgctgctgcggggccaccatgctcctgcccaggcctggagactgacccgaccccggcactacctcgaggctccgcccccacctgctggaccccagggtaaggacaagggcccccagactcacagttccagccctgaggacaggggttccctcatccccccacccagcctaatgcccacctcctaatagaggggttcctggggacctgaagagggggcactatgacgtccccccaagcacctaggtgttctgtcctgctcttccttcagactcagccgttggaccccagtcctttcctccccagacccaggagttccagccctcaggcccctcctccctcatactagggagtcctggcccccaaattcctcctttcccaagacttatgatttcaggtcctcagctgtctcctccctcaaaccgggatcctcagtcccctgctccaccaggctcaggcatgggggtccccatccctgcaaatccaggcgtccccccgctgctggtcagacactgaccccatccttgaacccagcccaatctgcgtccgtgatcacggcgtgctctggccaaggcccagtccctacagcctgcctggatggacgcctgggactgggggcgccaggactgggctgggctgggctcccccaggccctgcctccccgtccatctcctcacaggtcccaccctggcccaggaggtcagccagggaatcattaacaagaggcagtgacatggcgcagaaggagggtggccggactgtgccatgctgctccagacccaaggtggcagctctcactgcggggaccctgctacttctgacagccatcggggcggcatcctgggccattgtggctgttctcctcaggagtgaccaggagccgctgtacccagtgcaggtcagctctgcggacgctcggctcatggtctttgacaagacggaagggacgtggcggctgctgtgctcctcgcgctccaacgccagggtagccggactcagctgcgaggagatgggcttcctcagggcactgacccactccgagctggacgtgcgaacggcgggcgccaatggcacgtcgggcttcttctgtgtggacgaggggaggctgccccacacccagaggctgctggaggtcatctccgtgtgtgattgccccagaggccgtttcttggccgccatctgccaagactgtggccgcaggaagctgcccgtggaccgcatcgtgggaggccgggacaccagcttgggccggtggccgtggcaagtcagccttcgctatgatggagcacacctctgtgggggatccctgctctccggggactgggtgctgacagccgcccactgcttcccggagcggaaccgggtcctgtcccgatggcgagtgtttgccggtgccgtggcccaggcctctccccacggtctgcagctgggggtgcaggctgtggtctaccacgggggctatcttccctttcgggaccccaacagcgaggagaacagcaacgatattgccctggtccacctctccagtcccctgcccctcacagaatacatccagcctgtgtgcctcccagctgccggccaggccctggtggatggcaagatctgtaccgtgacgggctggggcaacacgcagtactatggccaacaggccggggtactccaggaggctcgagtccccataatcagcaatgatgtctgcaatggcgctgacttctatggaaaccagatcaagcccaagatgttctgtgctggctaccccgagggtggcattgatgcctgccagggcgacagcggtggtccctttgtgtgtgaggacagcatctctcggacgccacgttggcggctgtgtggcattgtgagttggggcactggctgtgccctggcccagaagccaggcgtctacaccaaagtcagtgacttccgggagtggatcttccaggccataaagactcactccgaagccagcggcatggtgacccagctctgaccggtggcttctcgctgcgcagcctccagggcccgaggtgatcccggtggtgggatccacgctgggcctaggatgggacgtttttcttcttgggcccggtccacaggtccaaggacaccctccctccagggtcctctcttccacagtggcgggcccactcagccccgagaccacccaacctcaccctcctgacccccatgtaaatattgttctgctgtctgggactcctgtctaggtgcccctgatgacgggatgctctttaaataataaagatggttttgattaa

SEQ ID NO: 11593 - protein, 417 aa, Homo sapiens; identical to SEQ ID NO: 1919

SEQ ID NO: 11594 - DNA, 401 bp, Homo sapiens
actgacccgaccccggcactacctcgaggctccgcccccacctgctggaccccagggtcccaccctggcccaggaggtcagccagggaatcattaacaagaggcagtgacatggcgcagaaggagggtggccggactgtgccatgctgctccagacccaaggtggcagctctcactgcggggaccctgctacttctgacagccatcggggcggcatcctgggccattgtggctgttctcctcaggagtgaccaggagccgctgtacccagtgcaggtcagctctgcggacgctcggctcatggtctttgacaagacggaagggacgtggcggctgctgtgctcctcgcgctccaacgccagggtagccggactcagctgcgaggagatgggcttcctcagg

SEQ ID NO: 11595 - protein, 96 aa, Homo sapiens
MAQKEGGRTVPCCSRPKVAALTAGTLLLLTAIGAASWAIVAVLLRSDQEPLYPVQVSSADARLMVFDKTEGTWRLLCSSRSNARVAGLSCEEMGFL

SEQ ID NO: 11596 - DNA, 2177 bp, Homo sapiens
agacccaaggtggcagctctcactgcggggaccctgctacttctgacagccatcggggcggcatcctgggccattggtgagagcggttcctgtgcctctgacctcccctggcccctgcagcctccagcctgcctgccctcacccctcccttctctgcagtggctgttctcctcaggagtgaccaggagccgctgtacccagtgcaggtcagctctgcggacgctcggctcatggtctttgacaagacggaagggacgtggcggctgctgtgctcctcgcgctccaacgccagggtagccggactcagctgcgaggagatgggcttcctcaggtactgggggccctcggaggggtgggagccgggaggggctggggagcaggcctaacccctgccccgcccagggcactgacccactccgagctggacgtgcgaacggcgggcgccaatggcacgtcgggcttcttctgtgtggacgaggggaggctgccccacacccagaggctgctggaggtcatctccgtgtggtgaggagggcagcgggcaggtggggcaacacctcagacccccaaggcactccctctccccgttttccttccacctgtcttaactggtctctatttcctttctttctgtgtctccaatcccatctctcccagtgattgccccagaggccgtttcttggccgccatctgccaaggtgagatcctaaaactcagaaccctctcctttaggcccttggggaggccacgtcccctcaagctccccaggatggggccatgtactttcagaccccctagggcagggccaagcctgggctctggggacctgggctccagtcccctgtcgccgccccctgctgacccttgtcccacagactgtggccgcaggaagctgcccgtggaccgcatcgtgggaggccgggacaccagcttgggccggtggccgtggcaagtcagccttcgctatgatggagcacacctctgtgggggatccctgctctccggggactgggtgctgacagccgcccactgcttcccggagcggaaccgggtcctgtcccgatggcgagtgtttgccggtgccgtggcccaggcctctccccacggtctgcagctgggggtgcaggctgtggtctaccacgggggctatcttccctttcgggaccccaacagcgaggagaacagcaacgatattgccctggtccacctctccagtcccctgcccctcacagaatacatccagcctgtgtgcctcccagctgccggccaggccctggtggatggcaagatctgtaccgtgacgggctggggcaacacgcagtactatggccaacaggccggggtactccaggaggctcgagtccccataatcagcaatgatgtctgcaatggcgctgacttctatggaaaccagatcaagcccaagatgttctgtgctggctaccccgagggtggcattgatgcctgccagggcgacagcggtggtccctttgtgtgtgaggacagcatctctcggacgccacgttggcggctgtgtggcattgtgagttggggcactggctgtgccctggcccagaagccaggcgtctacaccaaagtcagtgacttccgggagtggatcttccaggccataaaggtgaaagttgggtccagatgggagccagggtggggacgtttgggtgtctaatgggggaagggaggcagagatttgttttaggaaacctacgctcaggcctagaagagggccccccttgggaacagatggactttgaagggttcctggggaagggaagccagtggtgggacgtggaagcctctcagacctcgggagcccccagctgtctttccccagactcactccgaagccagcggcatggtgacccagctctgaccggtggcttctcgctgcgcagcctccagggcccgaggtgatcccggtggtgggatccacgctgggcctaggatgggacgtttttcttcttgggcccggtccacaggtccaaggacaccctccctccagggtcctctcttccacagtggcgggcccactcagccccgagaccacccaacctcaccctcctgacccccatgtaaatattgttctgctgtctgggactcctgtctaggtgcccctgatgacgggatgctctttaaataataaagatggttttgattaa

SEQ ID NO: 11597 - protein, 305 aa, Homo sapiens
MGPCTFRPPRAGPSLGSGDLGSSPLSPPPADPCPTDCGRRKLPVDRIVGGRDTSLGRWPWQVSLRYDGAHLCGGSLLSGDWVLTAAHCFPERNRVLSRWRVFAGAVAQASPHGLQLGVQAVVYHGGYLPFRDPNSEENSNDIALVHLSSPLPLTEYIQPVCLPAAGQALVDGKICTVTGWGNTQYYGQQAGVLQEARVPIISNDVCNGADFYGNQIKPKMFCAGYPEGGIDACQGDSGGPFVCEDSISRTPRWRLCGIVSWGTGCALAQKPGVYTKVSDFREWIFQAIKVKVGSRWEPGWGRLGV

SEQ ID NO: 11598 - DNA, 3070 bp, Homo sapiens
gagggtgaacatgacccttaacagatccagcctcaagtgctggattctcttgggaacttggttaaatggttttttttcttcccgaatgtccaagtcaccttccagacctgcagctcctgagcagccaacttaggacttctaatggagagtgaagttcccctggttcgcggaggggccggccacagcctcaaggctgctgttgattggtccgacctgagtccttgagtctggcagagtgccatggtgctctgtaatcccacctgtaatcccagcattttaggaggcagaggcaggaagattgcttgagcctaggagttcaagaccagcctgggcaacatagcaagacccgtctctacaaaacaaaacaaaacaaaacaaacaaacaaaaaaattagtcaggtgtggtggtgcacgcctgtggtcctagctactcaggaggttgaggtaggaggatttcttgagtctgggaggtcaaggctacagtgagccaagatcacaccactacactccagcctgggcaacagagcgagaccctgtctttaaaaaaaaaaagtccttgagtcatgattccagatgcaatcgcagatgtgggggctgcaaccctccgatgggctggggttcacgtctacaccacatggctggagcacaggccaggaggggctccggctggggaagcatgtggggagcctggctgtgggacccaggcggccccgggccctgtcgccctgcagtgcaggtcagctctgcggacgctcggctcatggtctttgacaagacggaagggacgtggcggctgctgtgctcctcgcgctccaacgccagggtagccggactcagctgcgaggagatgggcttcctcaggtactgggggccctcggaggggtgggagccgggaggggctggggagcaggcctaacccctgccccgcccagggcactgacccactccgagctggacgtgcgaacggcgggcgccaatggcacgtcgggcttcttctgtgtggacgaggggaggctgccccacacccagaggctgctggaggtcatctccgtgtggtgaggagggcagcgggcaggtggggcaacacctcagacccccaaggcactccctctccccgttttccttccacctgtcttaactggtctctatttcctttctttctgtgtctccaatcccatctctcccagtgattgccccagaggccgtttcttggccgccatctgccaaggtgagatcctaaaactcagaaccctctcctttaggcccttggggaggccacgtcccctcaagctccccaggatggggccatgtactttcagaccccctagggcagggccaagcctgggctctggggacctgggctccagtcccctgtcgccgccccctgctgacccttgtcccacagactgtggccgcaggaagctgcccgtggaccgcatcgtgggaggccgggacaccagcttgggccggtggccgtggcaagtcagccttcgctatgatggagcacacctctgtgggggatccctgctctccggggactgggtgctgacagccgcccactgcttcccggagtgagtgccccccaatggcgctgatgatggggaggcagaggagcggagagacagtggggaggagggcggattgtgcccaggcaggtggccaccctccacccctttccctggtaggcggaaccgggtcctgtcccgatggcgagtgtttgccggtgccgtggcccaggcctctccccacggtctgcagctgggggtgcaggctgtggtctaccacgggggctatcttccctttcgggaccccaacagcgaggagaacagcaacgatattgccctggtccacctctccagtcccctgcccctcacaggtaagtctaagggctgagccatggggcttgaggacccgaggccaggaggacagaggaggggaccaggggcacaaggcaatcaacttatggctcaggcatccttggcaataaggggaatgatctcgagggagcacaaagtgggccttaactatcaatgatcagtgcagccaatttggaaaatttgccagcatttccccaagaagtatacataaagttaccattggacccaacacttccactcccaggacaggaggtatatacctaagacaaatggaaactgtgtctgcaccaaaactcgtacatcagtgttcatagcagcattattcataatagcccaaagatggaaacagcccaagactgtttcatcggacaaatgcataaagaaaatgtggtatattgaccgggcgcggtggctcatgcctgtaatcccagcactttgggaggccgaggtgggtggatcacgaggtcaggagtttgaaaccagcctggccaacatggtgaaactccatctctactaaaaatacaaaaattagcctggcgtggtggcacacgcctgtaatcccagctactcgggaggatgaggcaggagaatctcttgaacccgggaggtggagattgcagtgagccgagatcacaccactgcactccagcctggctgacagagcaaggctctgtcatcttgaaaataaataaataaataacaaaaaaaatgtggtatatccacacaacgggagaatattggaccatagaaatgaatgaggtactgattcatgctaccacaaggatgaaacttgagaacagtgctgaatgagacaagccagccgcaaaggccacatactgtaggatgccacttgtatgaaatgtacaaggctgggcacggtggctcacgcctgtaatcctggcactctgggcagctgagatgggaggattgtttgtgctcaggagtttaagaccagcctgggcaacatagcaagaccccatcacttaaaaaaatgagctaggtgtggtgacggatacctgtagttccagttactcaggaggctaaggcaggaggatcacttgagcccaggagtttgaggctgcagtgggctaggattgtgccactgtactccagcctgggtaacagagcaaaaccttgtctgttaaaaaaagaagaaagaaagaaagagaaagaaaagaaaggaaggaaggaag

SEQ ID NO: 11599 - protein, 133 aa, Homo sapiens
MALMMGRQRSGETVGRRADCAQAGGHPPPLSLVGGTGSCPDGECLPVPWPRPLPTVCSWGCRLWSTTGAIFPFGTPTARRTATILPWSTSPVPCPSQVSLRAEPWGLRTRGQEDRGGDQGHKAINLWLRHPWQ

SEQ ID NO: 11600 - DNA, 3681 bp, Homo sapiens
gtaattgctgcggggaggacaggccagctctggaagaaaacaggtggacctgggtcccattaacctggacagacacctccaagatgagcatgagggggctgctggatctgttctcctttcacagctgtatcctgaagaatggcagtgagccggaagagccacaggattcggcaaagacggacacacagaaatgggttctcactacgttgcccaggctggtctggaactcctagactcaagcgatcctcccacctcagcctcccaaagcactgggattacagacatgagccaccgcacccggtcaggtgcagccgttggggactgcaaagctgttgatgcagaaggcctagtgcctggggatgcccacattgctggtgtctgccacattcaggatgcctgaggtccgggagccaggaagggtgaagtagtccctctgtcggccgctgttgaagcctgcctgggggtgtcatttggaacagggtcagcccacctgcgtcctcaccctccccaaggacccagggaggcccctgtgggttccccactcacctgggccgcaatgccccccaggccgtggtgggggctcccaccgctggccacccccatggtccactggatgtccttgtggtgaaacagcacccaggaggggccgctgcccagggccagcacctcctggaaggtgttcacctgcagggcaagcgccaggagccagggtgtcgtgggctggtccaggggcacccaggaccctcctcactgcccagtcctcaaccgagctccatctgcaccactaagctggctgcttccagctgtgccacctcctgggcccccatccacaccacatcccgggcccctacccatgccacatcccagacccccatccacgccacctcccaggcccctgtccacaccatgtccacagctgcctctgctggcacctgtgccagccttcctttcacatcccccagtctcgatttttctgctctgctctcatcccctctctctctccgtctctctccttttcctattctctgtctctccatctgatcatctcactcctctcgcttgctgtcttgcctcctctctctcgccatttctctccctgttcgtgtcttccctctttctcacccattttctctacctcgctgcatctccatgcttccgtctctctgtctctctcttcccgccccctctatctctccctcgttcccccatctccgtctctcctccgtggtgtctcctccttacccaggaatccaagcccttcttcccaaggggttgggccaaacagcctcagcctgggcccttctctgccacccgcttcctcacctggggaccaagtgccccgtaaaatggaatttggtcccacatggccaccagcagggcgcaaggggtgggcggggcatgggggaaggctgaggccaggtctcaggccacctgctgcggcagctctggctggcggctctgccggtaccacatctggcccctgctcagtgtggacccattggcccagaacgggactgcgaaggcctggcccatctcctggggaaatgcctccagtgtgaagagagccacaggctccccgaaggacaccagcccattggtgcagaactgggggaagtgaggaagggcaagacccgcaggggggtgttggcagggcaggggacagaagagggacagggcccgccccaggaagacagaggacgaagccagaaggagccaggagctatagatatagacaggctccgagtcaagagtggggtggggagaagagagagagcccagggaccgcacggtcagggccagggcactcacataggccgtcccgtgtgtggcttcaaagagcatgaagggctccagcagccgcagctcctcagagaagtcatcatcctctgcagggagggcctgatccccacactccagcccataggggtacaggagcgaggctggggacacgagaccactgaggctcccctcagagccccagggcagggctgtgtcccctcagtccccaagagaaagctccaggtcccctgagggactccagggtggggccatggctcctcagacccctggagccctccctgcctgtccacatggccctgtcctctctccaggttagggagcacatccattctcacctctgatctccttgctccaagtcacttggttctgtaggactgaggggaaggatgtcagctaagggctggggcccacgtggcacagtcgacccccttccagagtccccactcctactcacccaccagcagaagccacagtatccccatggtggctgcaggtgctgcgggccaggcgggcttataccagggcagaggtggggccagggtggggacggggcagctggagctcaccttccattgttcgagggtccagggggcctgggggtctcccagggatcctggttcccatccggtctgcctgaggctgggccaggtctggggttggtgggcagggcaagggaggaaagaggggatggaaatcttccagggctttcccagggggccgggttgccagaccctggaggaaccccccacccattagcagggctgggcacaagtcaagcgatccacagtgggaaagttgagccactgcttggtgaagggccgctgctgacagacagctgaacatgcagggagcctcttcccatggggccctgctggttctcttggagcaggttagagatgagcacacagcatccaggaacggagtgcatgtgcatcaagcagggccaagatgtgtggctggggagactcgtgggctgctggccagccccgggggcccaggggtgggcatctgcagggcatggctggggctgccatggtggatagtcaaggtcaggcatttaggagtgttactggacccagaaggggagattcgcctggagacgtgaacggggagacggggaggaggagcatacaggcaagggggctcgttactgtgcacctgtgagattcacggaccaccctggtggaggaggctcagagttaggcactggggactccatcttcaaagcagtgtcccaaaggggtgctccagaccctcaaaccccagacagccctttacctggtcaaaccacatgggacagagggtcacctgtgttcctggaccaaactgaggattaggctgctatttctcatggcccagtgatgagatgcagataaactgggagaacagggaggttttttttgtttttgtttttgtttttgtttttgttttttgagacggagtctcgccctatcgcccaggctggagtgcaatggcactgtctcggctcacggcaacctctgcctcccgggttcaagcaattctcctgcctcagcctcccaagtagttgggattaccaacacccaccaccatgcctggctaatttttgtattattagtagagacggggtttctccatgttggtcaggcttgtctcgaattcctgacctcaggtgatccgcctacctcggcctcccaaagtgctgggattacaggcatgagccaccgcacccagcgaaaagggagtttttatttctgtaactggttatagggtgaaagcctggaaattgtccccagaccaactcaaaattacaaagttttccagagcttatataccttctaagctatatgcctgtgtgtaagtgtagtttcttcagacccccaattaaacttgtttaatcct

SEQ ID NO: 11601 - protein, 69 aa, Homo sapiens
MGSHYVAQAGLELLDSSDPPTSASQSTGITDMSHRTRSGAAVGDCKAVDAEGLVPGDAHIAGVCHIQDA

SEQ ID NO: 11602 - DNA, 4810 bp, Homo sapiens
atggggatactgtggcttctgctggtggtcctacagaaccaagtgacttggagcaaggagatcagagcctcgctcctgtacccctatgggctggagtgtggggatcaggccctccctgcagaggatgatgacttctctgaggagctgcggctgctggagcccttcatgctctttgaagccacacacgggacggcctatttctgcaccaatgggctggtgtccttcggggagcctgtggctctcttcacactggaggcatttccccaggagatgggccaggccttcgcagtcccgttctgggccaatgggtccacactgagcaggggccagatgtggtaccggcagagccgccagccagagctgccgcagcaggtggcctgagacctggcctcagccttcccccatgccccgcccaccccttgcgccctgctggtggccatgtgggaccaaattccattttacggggcacttggtccccaggtgaacaccttccaggaggtgctggccctgggcagcggcccctcctgggtgctgtttcaccacaaggacatccagtggaccatgggggtggccagcggtgggagcccccaccacggcctggggggcattgcggcccaggcaggcttcaacagcggccgacagagggactacttcacccttcctggctcccggacctcaggcatcctgaatgtggcagacaccagcaatggccacccgcacacactctccagatggcagctgtggctccagccctgccacttcgtcctggccctgcttcctggcatctgcgtggaggtggagttgaggaggggaggcccggtggcagaggccctggtgcggctggtcatccatggctgggatgtggtagtgagatcgcatggcccaatagaacacatcctgcagggccacattctgcacctgggaccgcaggagctgagccccaactgccgtgagctgtgtgagtgcaaggaggctgggcagccaccccactgcagcccccaggcgtgtgaggacggggaggcctgcttcctgctcaccggggcctggtactgtggggtccggagaggtagcagctgggtgtcaggtgacccccattaccacagcttcaacagcacagccctcacagcccagggtgcctgtcactatgtgctgagccgcacctgtcaggccggcctgagggcacaagctttcacagtgtgggtggacaatgagtacctaagtcccacggccctcatgactggggctcggccgatcgaagtggacgtgcacggggtgaaggtgatgatggaggctcagacccccgggagggcacaggttaacaggacccaggcccacctgcccctacgcctggctggcggccaagtgcacgtctatttcagcgattctggggccatgctggagactgacgctggcctcttggtctcctacgactggagccaccatgtatccattatggtgcctgagtcctacgctggcaccctctgcagcctgtgtggggacttcaacggggacccccatgatgacttccatgcccctgatggctccctcctgcctgacccggaggtgtttgcactcagcttgaagggcctggattccccagccagttgctccaccgtgggcactgcccctctgtgcccccatgaccgagagggccggtaccagtcactggctttctgtgggctgctgggtgcccacgatgggcccttccaggcctgtgatgagctggcccaggcccaagtccacatggagaactgcatccgtgacctctgtgccacaaggggttcccggcagatcctgtgcgaggctctggggagctatgtccagcagtgccagcagcacggcctcctagtgaggccctggagacacctggtggactgcgagctgacctggccccccgacagccactacgagctgtgtggcttctcctgtcccagctcctgcaccgagcctgccctgcccgacagctgtctgacaccatgccaggatggctgccagtgtgacccaggatttgtgctcagtggcacggactgcttgacccccatccagtgcagctgctccatggggggcagataccacctggccggggagccattctgggctagggagcactgtgagcaattctgccactgcgaggcttccacccatgctgtgtgctgctccccctcctcctgtgggccagggcagagatgtgggaccctaaggggcatctttgggtgccacccattctcccctggcacctgccaagcagccgggcactcacacatcatcacctttgatgggaaaactgttgagttctcaggtggacagccaggcggtaagcagggcctggtgctcctgcaggtgggcacctggctccaggtacagttcaatggccacaatatgctgttggtgtgcgtggggcctgagttctggagccacctctgcggactctgtggcaacttcagtggcgaccccagtgatgacaaggtgctccccagcagggtgcccaccctcagtgatgccatctttggcaacgcctggtggacccaggacagccggcctggctgccggcgggaccctggtggcgctgagccctgccaggacaggccccgggtggagcagctctgcagtgttctggcaaaccgctccgggcccttggccaagtgccactggtatgagagccccgtgtcctacacgcaggtgtgtgtctctgacctctgccagtatggcacgggcaaccgcatgctgtgcaccatgctggaggcctacgtccaactctgcgccctgcgctgcgcgttgcctgcccgcgtggcgagccagcctgggatgcagttacgtgtggcgtgtccagccaacagctactatgactcctgtgggccacccttcccggccacctgtgctagcctcaactcctccgcgccctgcaccctccagtgcacaggccgctatatccgcctgggtactgaggtgctgcctgcagccccctgtgatcagaggtgcgtgtaccatggacctggacgcccgctcgagtgccaccctcatgcctgcaggccctgtgagctgtgctgccagcacaggggtgtctggggttgctaccccatgcactacgggacactgtggctgtacggagacccccacctgcacactttcaatgggacccaccatcaggttcaagggcctggctgggagatattggctagaacatgccggccacaccacagcgcctatgccatctgggtggagatcaggcgccaggagccgtgggatgccatgtgggcccagcaggtggatgtggatgtggcaggatggcagctgtcactgctggcaggacagtttggagccgtccagcttaatgggggcccagcccctctgtgcccaccagacaaggcagccctataccaggccttctgtggcttgctgggcacccaagatgggccctacagggcctgcagtaaggacgtggatccccaggtgcatgtggagaactgcatccatgacctctgtgccacggggggctcaagagagactctgtgtgccatactggggagctacgcccaggaaagccagcagcgcagcgttcccatgcagccctggagacacctcttggcctgcaagctggcctgtcctccccgcagcaattacgagctctgcggctcctcctgtcctagctcttgtgccgagcctgccctgcccgacagctgcctgacaccatgccaggatggctgccagtgtgacccaggctttgtgctcagtggcatggactgcgtgcccccaatccagtgcagctgctccatggggggcaggtaccaccacccggctggggaggccttctggactggggagcgctgtgagcaattctgccactgccaggcctccacccacgccgtgtgctgctccccgtcctcctgtgggccggggcagagatgtgagaccctcaggggcatctttgggtgccacccactctcccctggcatttatcaagcaaccatgcactcacacgtcgcctcctttgaccggaagagtgttgagtttccaggcacttgcgcttctgcttttaccaagtcctgtggctcctccagctcattgcgccttttcaaggtggaaattgggaaggagaaacaagtccagcagtcccattgtgttcatttcaaagatgtaggttcatgggacccagcatcttctgctgatcctgaaattgtaccagcggcaagatgtggcctggaaggggactttaagttctccacaactgccagcaatccttccaccaggcaaaacacatcatctaaggaaaagaagtgaggtcggaacaccaacgcatcatctcactgcatggccctggaggctctgccgtttaaagaccccagaaccttccccattcaaggtcctctcctgggcacaggagattggagaaagctcctcccttaattccaggggccgagttccagcccatccaattctccgtctcacctgaggctgctgtggtcctggtgaccccagggagcaacctgccgcccatggctggggagggggtgaagctgtctctttaagagcaggaatggagcccctgggcctcagggcatctgacttgttttctacctgcccaggtttgcttagggcgtggcagcttcggataaacgcaggactccgcctggcagcccgatttctcccggaacctctgctcagcctggtgaaccacacaggtgagcagctggggccccttcctccaagccctccttgtctctgcccctaaattaggaagtatctacctgccccctgaccctgccccatagaagcttttatgttaaagcgcctaaaatcttgtgaaatgctt

SEQ ID NO: 11603 - protein, 1279 aa, Homo sapiens
MWDQIPFYGALGPQVNTFQEVLALGSGPSWVLFHHKDIQWTMGVASGGSPHHGLGGIAAQAGFNSGRQRDYFTLPGSRTSGILNVADTSNGHPHTLSRWQLWLQPCHFVLALLPGICVEVELRRGGPVAEALVRLVIHGWDVVVRSHGPIEHILQGHILHLGPQELSPNCRELCECKEAGQPPHCSPQACEDGEACFLLTGAWYCGVRRGSSWVSGDPHYHSFNSTALTAQGACHYVLSRTCQAGLRAQAFTVWVDNEYLSPTALMTGARPIEVDVHGVKVMMEAQTPGRAQVNRTQAHLPLRLAGGQVHVYFSDSGAMLETDAGLLVSYDWSHHVSIMVPESYAGTLCSLCGDFNGDPHDDFHAPDGSLLPDPEVFALSLKGLDSPASCSTVGTAPLCPHDREGRYQSLAFCGLLGAHDGPFQACDELAQAQVHMENCIRDLCATRGSRQILCEALGSYVQQCQQHGLLVRPWRHLVDCELTWPPDSHYELCGFSCPSSCTEPALPDSCLTPCQDGCQCDPGFVLSGTDCLTPIQCSCSMGGRYHLAGEPFWAREHCEQFCHCEASTHAVCCSPSSCGPGQRCGTLRGIFGCHPFSPGTCQAAGHSHIITFDGKTVEFSGGQPGGKQGLVLLQVGTWLQVQFNGHNMLLVCVGPEFWSHLCGLCGNFSGDPSDDKVLPSRVPTLSDAIFGNAWWTQDSRPGCRRDPGGAEPCQDRPRVEQLCSVLANRSGPLAKCHWYESPVSYTQVCVSDLCQYGTGNRMLCTMLEAYVQLCALRCALPARVASQPGMQLRVACPANSYYDSCGPPFPATCASLNSSAPCTLQCTGRYIRLGTEVLPAAPCDQRCVYHGPGRPLECHPHACRPCELCCQHRGVWGCYPMHYGTLWLYGDPHLHTFNGTHHQVQGPGWEILARTCRPHHSAYAIWVEIRRQEPWDAMWAQQVDVDVAGWQLSLLAGQFGAVQLNGGPAPLCPPDKAALYQAFCGLLGTQDGPYRACSKDVDPQVHVENCIHDLCATGGSRETLCAILGSYAQESQQRSVPMQPWRHLLACKLACPPRSNYELCGSSCPSSCAEPALPDSCLTPCQDGCQCDPGFVLSGMDCVPPIQCSCSMGGRYHHPAGEAFWTGERCEQFCHCQASTHAVCCSPSSCGPGQRCETLRGIFGCHPLSPGIYQATMHSHVASFDRKSVEFPGTCASAFTKSCGSSSSLRLFKVEIGKEKQVQQSHCVHFKDVGSWDPASSADPEIVPAARCGLEGDFKFSTTASNPSTRQNTSSKEKK

SEQ ID NO: 11604 - DNA, 361 bp, Homo sapiens
aagagttgctgacaccttctctgtcccgctggaagttattttctcctccctctccctgtacagctgaccttccttccctgctgcagggccagggggtctgttccaggactggattctcccatcaggagcctctggactggtcgccgagggtcagacggcccctccctctcttgctgtcatccctggctcttcaagctaatgagacctgtcctgattcctcagccaggcctgtagcttgggcctcagtgtccccgaagatcatgatggcgtatatgaacccggggccccactattctgtcaacgccttggccctaagtggccccagtgtggatctgatgcaccaggctgtgccctacccaag

SEQ ID NO: 11605 - protein, 32 aa, Homo sapiens
MMAYMNPGPHYSVNALALSGPSVDLMHQAVPY

SEQ ID NO: 11606 - DNA, 2346 bp, Homo sapiens
ccaccttggccgggattaccctccgagttccaggccatgacaaatgacatcactcccggcccaggcttaaaatctccccatgtgaggggatgtgtttccttcagcctctgctgtctggccgctctgtctaggtcctgggccacgggagagccccgtccctcctttctgaaggccccctgacttgggcctcagtgtccccgaagatcatgatggcgtatatgaacccggggccccactattctgtcaacgccttggccctaagtggccccagtgtggatctgatgcaccaggctgtgccctacccaagcgcccccaggaagcagcggcgggagcgcaccaccttcacccggagccaactggaggagctggaggcactgtttgccaagacccagtacccagacgtctatgcccgtgaggaggtggctctgaagatcaatctgcctgagtccagggttcaggtttggttcaagaaccggagggctaaatgcaggcagcagcgacagcagcagaaacagcagcagcagcccccagggggccaggccaaggcccggcctgccaagaggaaggcgggcacgtccccaagaccctccacagatgtgtgtccagaccctctgggcatctcagattcctacagtccccctctgcccggcccctcaggctccccaaccacggcagtggccactgtgtccatctggagcccagcctcagagtcccctttgcctgaggcgcagcgggctgggctggtggcctcagggccgtctctgacctccgccccctatgccatgacctacgccccggcctccgctttctgctcttccccctccgcctatgggtctccgagctcctatttcagcggcctagacccctacctttctcccatggtgccccagctagggggcccggctcttagccccctctctggcccctccgtgggaccttccctggcccagtcccccacctccctatcaggccagagctatggcgcctacagccccgtggatagcttggaattcaaggaccccacgggcacctggaaattcacctacaatcccatggaccctctggactacaaggatcagagtgcctggaagtttcagatcttgtagaggacgcagtctccatctctctccatcgggcctcgggaccctttctcttctgaatctgcttccctgcagtttagatcccgggatggcattcctgagaaagcaacccgaaccagctgtccttctgacagctcggtgttcagcttacagagaccacccctttcctccacagggagaggctcctccctctcctgggacagctcacaggtcctagtgattctctcaaccctaacaccgtctggcacgattgtgaccgctgaagtacaccacgagctccaggcttcagaaagtggtgctgagaacttgctccaagaagaagtcaaaccaaacttgcagttgatttggggtcatgtttaggtcagaatcaccgtgcccttgaacaagcaggtaggggggcttgataacttaactttccacgtggacagaatttttttttttgttttgtttttattgtgccactgtgctctagcctgggtcacaagagcgaaactccgtctcaataataacaacaacaaaaataacccaggagtggctcaagagtccagtgtgggatgaaaatataaacagaggaagacaacatatgtcactggggaggctgggggagctagacaaaattcacacgggaggggcagggatgagacaatattgtgccctgggtctgtgcaaacgttgggaccagaatccactataagtttcattcttcggagacacggaagctctgcactggaggccgggactcaggcgtggaagagaatcttctccttattcaccggggaggctgtgtcttgtgcaaacaagtcatagaaacttgatgggagttggggagggactgaaggatgcatgcaaggttctgggaaggagtgagaagtagtgaaggccaaggggcccccatcacaggccgatggggtaagacttcgagagagcctgatcctggggtcttctgagactccaccaggagccggagagggcagggagccaaatccagctaggaggttacagattgcttttcctgggctgggctcctgagtgttggttcttccagctgtgcacaggggatttcaaacgttctacgtcctaaagccaggaagagtgacaaggcaggtggggacagaaggaagaagccaggagcctccctgagaaggtgtcaccttatctgtcctcctcttccccacacactggcctctgggtcccccttctctgtccacccacagagtgaaaccaattaaaatgttggatctcattt

SEQ ID NO: 11607 - protein, 299 aa, Homo sapiens [sequence omitted]

SEQ ID NO: 11608 - DNA, 1565 bp, Homo sapiens
accttggccgggattaccctccgagttccaggccatgacaaatgacatcactcccggcccaggcttaaaatctccccatgtgaggggatgtgtttccttcagcctctgctgtctggccgctctgtctaggtcctgggccacgggagagccccgtccctcctttctgaaggccccctgacttgggcctcagtgtccccgaagatcatgatggcgtatatgaacccggggccccactattctgtcaacgccttggccctaagtggccccagtgtggatctgatgcaccaggctgtgccctacccaagcgcccccaggaagcagcggcgggagcgcaccaccttcacccggagccaactggaggagctggaggcactgtttgccaagacccagtacccagacgtctatgcccgtgaggaggtggctctgaagatcaatctgcctgagtccagggttcaggtttggttcaagaaccggagggctaaatgcaggcagcagcgacagcagcagaaacagcagcagcagcccccagggggccaggccaaggcccggcctgccaagaggaaggcgggcacgtccccaagaccctccacagatgtgtgtccagaccctctgggcatctcagattcctacagtccccctctgcccggcccctcaggctccccaaccacggcagtggccactgtgtccatctggagcccagcctcagagtcccctttgcctgaggcaggagaattgctggaacccgggaggcggaggttgaagagagcagagattgtgccactgtgctctagcctgggtcacaagagcgaaactccgtctcaataataacaacaacaaaaataacccaggagtggctcaagagtccagtgtgggatgaaaatataaacagaggaagacaacatatgtcactggggaggctgggggagctagacaaaattcacacgggaggggcagggatgagacaatattgtgccctgggtctgtgcaaacgttgggaccagaatccactataagtttcattcttcggagacacggaagctctgcactggaggccgggactcaggcgtggaagagaatcttctccttattcaccggggaggctgtgtcttgtgcaaacaagtcatagaaacttgatgggagttggggagggactgaaggatgcatgcaaggttctgggaaggagtgagaagtagtgaaggccaaggggcccccatcacaggccgatggggtaagacttcgagagagcctgatcctggggtcttctgagactccaccaggagccggagagggcagggagccaaatccagctaggaggttacagattgcttttcctgggctgggctcctgagtgttggttcttccagctgtgcacaggggatttcaaacgttctacgtcctaaagccaggaagagtgacaaggcaggtggggacagaaggaagaagccaggagcctccctgagaaggtgtcaccttatctgtcctcctcttccccacacactggcctctgggtcccccttctctgtccacccacagagtgaaaccaattaaaatgttggatctcattt

SEQ ID NO: 11609 - protein, 206 aa, Homo sapiens
MMAYMNPGPHYSVNALALSGPSVDLMHQAVPYPSAPRKQRRERTTFTRSQLEELEALFAKTQYPDVYAREEVALKINLPESRVQVWFKNRRAKCRQQRQQQKQQQQPPGGQAKARPAKRKAGTSPRPSTDVCPDPLGISDSYSPPLPGPSGSPTTAVATVSIWSPASESPLPEAGELLEPGRRRLKRAEIVPLCSSLGHKSETPSQ

SEQ ID NO: 11610 - DNA, 1913 bp, Homo sapiens
accttggccgggattaccctccgagttccaggccatgacaaatgacatcactcccggcccaggcttaaaatctccccatgtgaggggatgtgtttccttcagcctctgctgtctggccgctctgtctaggtcctgggccacgggagagccccgtccctcctttctgaaggccccctgacttgggcctcagtgtccccgaagatcatgatggcgtatatgaacccggggccccactattctgtcaacgccttggccctaagtggccccagtgtggatctgatgcaccaggctgtgccctacccaagcgcccccaggaagcagcggcgggagcgcaccaccttcacccggagccaactggaggagctggaggcactgtttgccaagacccagtacccagacgtctatgcccgtgaggaggtggctctgaagatcaatctgcctgagtccagggttcaggtttggttcaagaaccggagggctaaatgcaggcagcagcgacagcagcagaaacagcagcagcagcccccagggggccaggccaaggcccggcctgccaagaggaaggcgggcacgtccccaagaccctccacagatgtgtgtccagaccctctgggcatctcagattcctacagtccccctctgcccggcccctcaggctccccaaccacggcagtggccactgtgtccatctggagcccagcctcagagtcccctttgcctgaggcaggagaattgctggaacccgggaggcggaggttgaagagagcagagattgtgccactgtgctctagcctgggtcacaagagcgaaactccgtctcaataataacaacaacaaaaataacccaggagtggctcaagagtccagtgtgggatgaaaatataaacagaggaagacaacatatgtcactggggaggctgggggagctagacaaaattcacacgggaggggcagggatgagacaatattgtgccctgggtctgtgcaaacgttgggaccagaatccactataagtttcattcttcggagacacggaagctctgcactggaggccgggactcaggcgtggaagagaatcttctccttattcaccggggaggctgtgtcttgtgcaaacaagtcatagaaacttgatgggagttggggagggactgaaggatgcatgcaaggttctgggaaggagtgagaagtagtgaaggccaaggggcccccatcacaggccgatggggtaagacttcgagagagcctgatcctggggtcttctgagactccaccaggagccggagagggcagggagccaaatccagctaggaggttacagattgcttttcctgggctgggctcctgagtgttggttcttccagctgtgcacaggggatttcaaacgttctacgtcctaaagccaggaagagtgacaaggcaggtggggacagaaggaagaagccaggagcctccctgagaaggtgtcaccttatctgtcctcctcttccccacacactggcctctgggtcccccttctctgtccacccacagagtgaaaccaattaaaatgttggatctcatttaaagtctgggtgattctttagtttccgtgttttctccaggaggggcaggtagaaacaggaactactctgttccttctgtctgtggggcctgggtccctccatgtgtttcctgtctcatcaccctcctttccttgacatctctctaaagccaatttatgaaggatcaggggctgggtgcagtggctcacgcatgtaatccagtgctctgagaagctgaggagggaagattgattaaggccaggagtttgagaccagcccaggcaacatagcgagatctctgtctctacaaaaaattaaaaaaatcaaccgggtgtggtgatgtgtgcctgtggtcccagctactcggga

SEQ ID NO: 11611 - protein, 206 aa, Homo sapiens; identical to SEQ ID NO: 11609

SEQ ID NO: 11612 - DNA, 962 bp, Homo sapiens
gtgtgtccagaccctctgggcatctcagattcctacagtccccctctgcccggcccctcaggctccccaaccacggcagtggccactgtgtccatctggagcccagcctcagagtcccctttgcctgaggcgcagcgggctgggctggtggcctcagggccgtctctgacctccgccccctatgccatgacctacgccccggcctccgctttctgctcttccccctccgcctatgggtctccgagctcctatttcagcggcctagacccctacctttctcccatggtgccccagctagggggcccggctcttagccccctctctggcccctccgtgggaccttccctggcccagtcccccacctccctatcaggccagagctatggcgcctacagccccgtggatagcttggaattcaaggaccccacgggcacctggaaattcacctacaatcccatggaccctctggactacaaggatcagagtgcctggaagtttcagatcttgtagaggacgcagtctccatctctctccatcgggcctcgggaccctttctcttctgaatctgcttccctgcagtttagatcccgggatggcattcctgagaaagcaacccgaaccagctgtccttctgacagctcggtgttcagcttacagagaccacccctttcctccacagggagaggctcctccctctcctgggacagctcacaggtcctagtgattctctcaaccctaacaccgtctggcacgattgtgaccgctgaagtacaccacgagctccaggcttcagaaagtggtgctgagaacttgctccaagaagaagtcaaaccaaacttgcagttgatttggggtcatgtttaggtcagaatcaccgtgcccttgaacaagcaggtaggggggcttgataacttaactttccacccacagagtgaaaccaattaaaatgttggatctcattt

SEQ ID NO: 11613 - protein, 112 aa, Homo sapiens
MAPTAPWIAWNSRTPRAPGNSPTIPWTLWTTRIRVPGSFRSCRGRSLHLSPSGLGTLSLLNLLPCSLDPGMAFLRKQPEPAVLLTARCSAYRDHPFPPQGEAPPSPGTAHRS

SEQ ID NO: 11614 - DNA, 825 bp, Homo sapiens
gcaaactccatcttcattcattaacaaactaatccgtggcccggcctggtgactcatgcttgtaatcccagcactttgggaggccgagggccctggagcaccaccgtccctcccctaggcccaggatgtgattctgaatctacagtcagactggaccacctctcccccatgcccccagaatgtccacaggggctccctcgcctacaatagatggattagattcctccctactcttcccacactgtcagagtctgactggtgtgaagttccggtgtttttgtgtgtattttactaccagggtcggctagataaggaggagctttcattacatcctggaagtctgtcccccgcacacacgcacagccgtcctcccttcccccaacatctgatctaattctctctctgctttgctgaggctggcctggcctaagaggattagagcatttgctaaacgggaccaggacaggcagggtcagagaacccgctgtggggagacccagggccaggatggccactagggggcggcagaggaagcgagacgcggagaggggtgtggagtgctgaggagaggcactcgtcggcttagcagcaatcaatgtccacaaagtaaccatgaagttttattcatttttaaatttacaatgtccagctaagttatgagaattcaaaagaattgaactaggttcctggaaacaaaataaacagatcaactgaattctatgtgcaagacaaacatttttttaaaataagaaatttaaaataccatgtaaaatatcagacaataataaaaatgaagtgcaagaaataaatctacagaaagatgca

SEQ ID NO: 11615 - protein, 42 aa, Homo sapiens
MSTGAPSPTIDGLDSSLLFPHCQSLTGVKFRCFCVYFTTRVG

SEQ ID NO: 11616 - DNA, 1987 bp, Homo sapiens
acaacaaacatgtgacatgctgggacaaggttaaagatcgttttatccttgctgtaaaagctgatctgcctgtagctgccacagcctccagcggtggctacagttgaaaccctcacaccacgcaggaagaggtcatcatcatgtcggacgatttcttatggtttgaaggcatagctttccctactatgggtttcagatccgaaaccttaagaaaagtacgtgatgagtttgtgataagggatgaagatgtaataatattgacttaccccaaatcaggaacaaactggttggctgagattctctgcctgatgcactccaagggggatgccaagtggatccaatctgtgcccatctgggagcgatcaccctgggtagagagtgagattgggtatacagcactcagtgaaacggagagtccacgtttattctcctcccacctccccatccagttattccccaagtctttcttcagttccaaggccaaggtgatttatctcatgagaaatcccagagatgttttggtgtctggttattttttctggaaaaacatgaagtttattaagaaaccaaagtcatgggaagaatattttgaatggttttgtcaaggaactgtgctatatgggtcatggtttgaccacattcatggctggatgcccatgagagaggagaaaaacttcctgttactgagttatgaggagctgaaacaggacacaggaagaaccatagagaagatctgtcaattcctgggaaagacgttagaacccgaagaactgaacttaattctcaagaacagctcctttcagagcatgaaagaaaacaagatgtccaattattccctcctgagtgttgattatgtagtggacaaagcacaacttctgagaaaaggtgtatctggggactggaaaaatcacttcacagtggcccaagctgaagactttgataaattgttccaagagaagatggcagatcttcctcgagagctgttcccatgggaataacgtccaaaacactctggatcttatatggagaatgacattgattctcctgtccttgtacatgtacctgactggggtcattgtgtaagacttattattttatcctgaaaccttaaatatcaaacctctgcatctctgatcccttccttgttaaaagttaccagggttggccaggcacggtggttcatgcctgtaatcccagcactatgggaggccgagacgggcggatcacgaggtcaggagactgagaccatcctggctaacacggtgaaaccccatctctactaaaaatacaaaaaccaaaaaaaattagccaggcgcattggctcatgtctgtaatcccagcactttgggaggtcgggggggtgggggaggatcacggggtcaggagatcgagaccatcctggccaacatgatgaaaccctatctctactaaaaatacaaaaattagccgggcatggtggtgcacgcctatagtcccagctactcgggaggctgaggtaggagaatcgtttgaactcaggaggcagaggttgcaatgagccaagatcgcgccactgcactccagcctgggtgacagagcgagaccgtctcaaaaagaaagaagtgactagggttcagagaaccagggttcaaagcccagggatgcaaaggttgcagtgagttgagtcatgggatcccagacttttttaaatgtttgcaatgtttcccgtttacagaatgctacaagaataatgtacgtactacctaaaaggatgtctaaatgtttgttaataaaaataagaaatagctacagtgacagattttagagcaaaaattagtaataaaaataagaaataaaattacaggagcaattaaggttccatttcttttcatcacatgtatctccacaatttattattgctctgatcttaaggagtgtaatttgcaatctaattttatcctcttactctgtgttgttaaaccatatacaataaacggtgtttatggag

SEQ ID NO: 11617 - protein, 285 aa, Homo sapiens; identical to SEQ ID NO: 1927

SEQ ID NO: 11618 - DNA, 1126 bp, Homo sapiens
acaacaaacatgtgacatgctgggacaaggttaaagatcgttttatccttgctgtaaaagctgatctgcctgtagctgccacagcctccagcggtggctacagttgaaaccctcacaccacgcaggaagaggtcatcatcatgtcggacgatttcttatggtttgaaggcatagctttccctactatgggtttcagatccgaaaccttaagaaaagtacgtgatgagtttgtgataagggatgaagatgtaataatattgacttaccccaaatcaggaacaaactggttggctgagattctctgcctgatgcactccaagggggatgccaagtggatccaatctgtgcccatctgggagcgatcaccctgggtagagagtgagattgggtatacagcactcagtgaaacggagagtccacgtttattctcctcccacctccccatccagttattccccaagtctttcttcagttccaaggccaaggtgatttatctcatgagaaatcccagagatgttttggtgtctggttattttttctggaaaaacatgaagtttattaagaaaccaaagtcatgggaagaatattttgaatggttttgtcaaggaactgtgctatatgggtcatggtttgaccacattcatggctggatgcccatgagagaggagaaaaacttcctgttactgagttatgaggagctgaaacaggacacaggaagaaccatagagaagatctgtcaattcctgggaaagacgttagaacccgaagaactgaacttaattctcaagaacagctcctttcagagcatgaaagaaaacaagatgtccaattattccctcctgagtgttgattatgtagtggacaaagcacaacttctgagaaaaggtgtatctggggactggaaaaatcacttcacagtggcccaagctgaagactttgataaattgttccaagagaagatggcagatcttcctcgagagctgttcccatgggaataacgtccaaaacactctggatcttatatggagaatgacattgattctcctgtccttgtacatgtacctgactggggtcattgtgtaagacttattattttatcctgaaaccttaaatatcaaacctctgc

SEQ ID NO: 11619 - protein, 285 aa, Homo sapiens; identical to SEQ ID NO: 1927

SEQ ID NO: 11620 - DNA, 1059 bp, Homo sapiens
cactgatgaagaaccctcctttgagaagctgcctttgtgtcctacagacaggctggggccaaagccattcaaccaatccccagataatccagagctcttgggagcagaaccttaaagagagatcgtggagagagccagggcccagaagaactctctcaaagagaagagggcagccaagatgacccgatggtccagttacctgttgggatggacaaccttccttctctattcctatgagtcaagtggagggatgcatgaggaatgtgtctttcctttcacctacaagggatctgtttacttcacttgcacccatattcatagcttatccccttggtgtgccaccagagccgtgtacaacggccagtggaagtactgccagagtgaagattacccacgctgtatcttccctttcatctatcgaggaaaggcttataacagctgcatctcccagggcagcttcttaggcagtctgtggtgctcagtcacctctgtcttcgatgagaaacagcagtggaaattctgtgaaacgaatgagtatgggggaaattctctcaggaagccctgcatcttcccctccatctacagaaataatgtggtctctgattgcatggaggatgaaagcaacaagctctggtgcccaaccacagagaacatggataaggatggaaagtggagtttctgtgccgacaccagaatttccgcgttggtccctggctttccttgtcactttccgttcaactataaaaacaagaattattttaactgcactaacgaaggatcaaaggagaaccttgtgtggtgtgcaacttcttacaactacgaccaagaccacacctgggtgtattgctgatgctgaggaaaggagaaatatcttcagaggaagactgccgccatactgaggctgagcacagatttgtctttttcattgcatctgtcaagcttaaataaccacctttagaaataccctctgcaccacctgcttcaatcagctggtcctttgtgaagaacgtagagagaatgcggcataaccaccaataaaggagtcttgatttaaccctg

SEQ ID NO: 11621 - protein, 223 aa, Homo sapiens [sequence omitted]

SEQ ID NO: 11622 - DNA, 557 bp, Homo sapiens
ccaaagccattcaaccaatccccagataatccagagctcttgggagcagaaccttaaagagagatcgtggagagagccagggcccagaagaactctctcaaagagaagagggcagccaagatgacccgatggtccagttacctgttgggatggacaaccttccttctctattcctatgagtcaagtggaggaatttccgcgttggtccctggctttccttgtcactttccgttcaactataaaaacaagaattattttaactgcactaacgaaggatcaaaggagaaccttgtgtggtgtgcaacttcttacaactacgaccaagaccacacctgggtgtattgctgatgctgaggaaaggagaaatatcttcagaggaagactgccgccatactgaggctgagcacagatttgtctttttcattgcatctgtcaagcttaaataaccacctttagaaataccctctgcaccacctgcttcaatcagctggtcctttgtgaagaacgtagagagaatgcggcataaccaccaataaaggagtcttgatttaaccctg

SEQ ID NO: 11623 - protein, 75 aa, Homo sapiens
MTRWSSYLLGWTTFLLYSYESSGGISALVPGFPCHFPFNYKNKNYFNCTNEGSKENLVWCATSYNYDQDHTWVYC

SEQ ID NO: 11624 - DNA, 1827 bp, Homo sapiens
ggagaagccaagagaggcaggaagaggtggcaaaggagtgctggagaagataaggaggctgagctccgacagggagcagggaggaggggccatcttgagactggtgccctgcgagctccaccccacccctccatgcagttccccatgggccccgcctgcatcttcttgaggaaaggcattgctgagaaacagcgggaaagaccactgggacaagatgagattgaagagctgcgggaagcatttcttgagttcgataaggaccgagatgggttcatctcttgtaaggatctggggaatctcatgaggacgatgggttacatgcccacggagatggaactgattgagctcggccagcaaatccgcatgaacctgggtggccgtgtagactttgatgactttgtggagctgatgacccccaaattgcttgcagaaacagctgggatgatcggtgtccaggagatgcgggatgccttcaaggagtttgacacgaatggagatggggagatcaccctggtggagctacagcaggccatgcagagactcctgggggagcggctcaccccccgggagatctctgaggttgtccgggaggctgatgttaatggagacggcacagttgactttgaagagtttgtgaagatgatgtctcgctgaggaggtcctggaagctccagaccctctccacctggtcaacatggagcaagcgcttgtggagaaccaaagcccaaaagccccagatccccttaaagcagagagggagggcaggcgggagggagggcattggcatgcggcgctgtgcatggggtgagacccagagcggtatctttgccaggatgggggcgtctgcagaactagattaagaaggaagagtctgtggatggaaataggaagcgtgggagggtccagttgccacccccaaaaattccaatgattcttgacatcttttcacttcacgtagtcctaagtccctgtgacctgccagagtctcttccccagcttccccttgggtgaaaatagtctcttctcctgttgggtatcaaaaggttcagaacgtagtctctactcttcccctgcctgcatcaactgttgcaaatcccgtttctctctcccggtaaggggacaaattatactttattcaggtgatggttacatgaacagcccagacttcaccactacgcaatatatccatgtaacaaaaccgcacttgtactccctaaatctatagaaatacaaaatgaaataaaaaggatgcaaatcagtcacagagctggaaacagagttgttgttgaggctgggcttggaaatggctcgtgcaagtggcattcaaagtcaactccttccttttcctgatttcctggaagcactgtctggtttctctctctctctctctctctctctctctctctctctctgtctgtctgtctctgtctcccctcccacatcccttcctttgtgtaagatactcaggggactgaattaaaccacaaatctggattatcaaggtttagagctagctgatccttggggaattaatcccctgaaaaaatgtcatcatgcaaagagagagatgacaggatcccccaaatccccagttcagccaggttgttgcaaagtctttcctagaagcctcctacctccgcgctggtctgtcctggaccacccagaggctgtgtctctgttagatgggtcgtctgttccgtccctcacgtcctgacatcgatctgtgccatgaaacagaaaagagagattcctcctgacctccgcccaaagcaagacactccagcaatgcaaaggttaaaataaaagtcaaaataaagaattaacttc

SEQ ID NO: 11625 - protein, 173 aa, Homo sapiens; identical to SEQ ID NO: 1931

SEQ ID NO: 11626 - DNA, 2535 bp, Homo sapiens
gaacagctgaaaaagctggagcaaccaagcagggcctacaagccgaggagggctgtttaaaggcgcaggggccattttacctccaggttggccctgctcaggaccaggaggaaacacctccagcccgcgacctcctcccacagggggaaaaggaaagcaggaggaccacagaagctttggcaccgaggatccccgcagtcttcacccgcggagattccggctgaaggagctgtccagcgactacaccgctaagcgcagggagcccaagcctccgcaccggattccggagcacaagctccaccgcgcatgcgcacacgccccagacccaggctcaggaggactgagaattttctgaccgcagtgcaccatgggaagctctgaagtttccataattcctgggctccagaaagaagaaaaggcggccgtggagagacgaagacttcatgtgctgaaagctctgaagaagctaaggattgaggctgatgaggccccagttgttgctgtgctgggctcaggcggaggactgcgggctcacattgcctgccttggggtcctgagtgagatgaaagaacagggcctgttggatgccgtcacgtacctcgcaggggtctctggatccacttgggcaatatcttctctctacaccaatgatggtgacatggaagctctcgaggctgacctgaaacatcgatttacccgacaggagtgggacttggctaagagcctacagaaaaccatccaagcagcgaggtctgagaattactctctgaccgacttctgggcctacatggttatctctaagcaaaccagagaactgccggagtctcatttgtccaatatgaagaagcccgtggaagaagggacactaccctacccaatatttgcagccattgacaatgacctgcaaccttcctggcaggaggcaagagcaccagagacctggttcgagttcacccctcaccacgctggcttctctgcactgggggcctttgtttccataacccacttcggaagcaaattcaagaagggaagactggtcagaactcaccctgagagagacctgactttcctgagaggtttatggggaagtgctcttggtaacactgaagtcattagggaatacatttttgaccagttaaggaatctgaccctgaaaggtttatggagaagggctgttgctaatgctaaaagcattggacaccttatttttgcccgattactgaggctgcaagaaagttcacaaggggaacatcctcccccagaagatgaaggcggtgagcctgaacacacctggctgactgagatgctcgagaattggaccaggacctccctggaaaagcaggagcagccccatgaggaccccgaaaggaaaggctcactcagtaacttgatggattttgtgaagaaaacaggcatttgcgcttcaaagtgggaatgggggaccactcacaacttcctgtacaaacacggtggcatccgggacaagataatgagcagccggaagcacctccacctggtggatgctggtttagccatcaacactcccttcccactcgtgctgcccccgacgcgggaggttcacctcatcctctccttcgacttcagtgccggagatcctttcgagaccatccgggctaccactgactactgccgccgccacaagatcccctttccccaagtagaagaggctgagctggatttgtggtccaaggcccccgccagctgctacatcctgaaaggagaaactggaccagtggtgatgcattttcccctgttcaacatagatgcctgtggaggtgatattgaggcatggagtgacacatacgacacattcaagcttgctgacacctacactctagatgtggtggtgctactcttggcattagccaagaagaatgtcagggaaaacaagaagaagatccttagagagttgatgaacgtggccgggtaggtgggagaccatagtcgctctgatgcctatgctcgttcagctctactacccgaaggatagtgcccgaagttgctgcttggcatagatgagcctcagcttccagggcactgtgggcctgttggtctactagggccctgatgtccacctggccttcctgttcttcactcccttcagccacacgcttcatggccttgagttcaccttggctgtcctaacagggccaatcaccagtgaccagctagactgtgattttgatagcgtcattcagaagaaggcgtccaaggagctgaaggtggtgaaatttgtcctgcaggtccctcgggagatcctggagctggagcatgagtgtctgacaatcagaagcatcatgtccaatgtccagatggccagaatgaatgtgatagttcagaccaatgccttccactgctcctttatgactgcacttctagccagtagctctgcacaagttagctctgtagaagtaagaacttgggcttaaatcatgggctatctctccacagccaagtggagctctgagaatacaacaagtgctcaataaatgcttgctgattgactgatggatt

SEQ ID NO: 11627 - protein, 527 aa, Homo sapiens
MGSSEVSIIPGLQKEEKAAVERRRLHVLKALKKLRIEADEAPVVAVLGSGGGLRAHIACLGVLSEMKEQGLLDAVTYLAGVSGSTWAISSLYTNDGDMEALEADLKHRFTRQEWDLAKSLQKTIQAARSENYSLTDFWAYMVISKQTRELPESHLSNMKKPVEEGTLPYPIFAAIDNDLQPSWQEARAPETWFEFTPHHAGFSALGAFVSITHFGSKFKKGRLVRTHPERDLTFLRGLWGSALGNTEVIREYIFDQLRNLTLKGLWRRAVANAKSIGHLIFARLLRLQESSQGEHPPPEDEGGEPEHTWLTEMLENWTRTSLEKQEQPHEDPERKGSLSNLMDFVKKTGICASKWEWGTTHNFLYKHGGIRDKIMSSRKHLHLVDAGLAINTPFPLVLPPTREVHLILSFDFSAGDPFETIRATTDYCRRHKIPFPQVEEAELDLWSKAPASCYILKGETGPVVMHFPLFNIDACGGDIEAWSDTYDTFKLADTYTLDVVVLLLALAKKNVRENKKKILRELMNVAG

SEQ ID NO: 11628 - DNA, 2492 bp, Homo sapiens
gaacagctgaaaaagctggagcaaccaagcagggcctacaagccgaggagggctgtttaaaggcgcaggggccattttacctccaggttggccctgctcaggaccaggaggaaacacctccagcccgcgacctcctcccacagggggaaaaggaaagcaggaggaccacagaagctttggcaccgaggatccccgcagtcttcacccgcggagattccggctgaaggagctgtccagcgactacaccgctaagcgcagggagcccaagcctccgcaccggattccggagcacaagctccaccgcgcatgcgcacacgccccagacccaggctcaggaggactgagaattttctgaccgcagtgcaccatgggaagctctgaagtttccataattcctgggctccagaaagaagaaaaggcggccgtggagagacgaagacttcatgtgctgaaagctctgaagaagctaaggattgaggctgatgaggccccagttgttgctgtgctgggctcaggcggaggactgcgggctcacattgcctgccttggggtcctgagtgagatgaaagaacagggcctgttggatgccgtcacgtacctcgcaggggtctctggatccacttgggcaatatcttctctctacaccaatgatggtgacatggaagctctcgaggctgacctgaaacatcgatttacccgacaggagtgggacttggctaagagcctacagaaaaccatccaagcagcgaggtctgagaattactctctgaccgacttctgggcctacatggttatctctaagcaaaccagagaactgccggagtctcatttgtccaatatgaagaagcccgtggaagaagggacactaccctacccaatatttgcagccattgacaatgacctgcaaccttcctggcaggaggcaagagcaccagagacctggttcgagttcacccctcaccacgctggcttctctgcactgggggcctttgtttccataacccacttcggaagcaaattcaagaagggaagactggtcagaactcaccctgagagagacctgactttcctgagaggtttatggggaagtgctcttggtaacactgaagtcattagggaatacatttttgaccagttaaggaatctgaccctgaaaggtttatggagaagggctgttgctaatgctaaaagcattggacaccttatttttgcccgattactgaggctgcaagaaagttcacaaggggaacatcctcccccagaagatgaaggcggtgagcctgaacacacctggctgactgagatgctcgagaattggaccaggacctccctggaaaagcaggagcagccccatgaggaccccgaaaggaaaggctcactcagtaacttgatggattttgtgaagaaaacaggcatttgcgcttcaaagtgggaatgggggaccactcacaacttcctgtacaaacacggtggcatccgggacaagataatgagcagccggaagcacctccacctggtggatgctggtttagccatcaacactcccttcccactcgtgctgcccccgacgcgggaggttcacctcatcctctccttcgacttcagtgccggagatcctttcgagaccatccgggctaccactgactactgccgccgccacaagatcccctttccccaagtagaagaggctgagctggatttgtggtccaaggcccccgccagctgctacatcctgaaaggagaaactggaccagtggtgatgcattttcccctgttcaacatagatgcctgtggaggtgatattgaggcatggagtgacacatacgacacattcaagcttgctgacacctacactctagatgtggtggtgctactcttggcattagccaagaagaatgtcagggaaaacaagaagaagatccttagagagttgatgaacgtggccgggctctactacccgaaggatagtgcccgaagttgctgcttggcatagatgagcctcagcttccagggcactgtgggcctgttggtctactagggccctgatgtccacctggccttcctgttcttcactcccttcagccacacgcttcatggccttgagttcaccttggctgtcctaacagggccaatcaccagtgaccagctagactgtgattttgatagcgtcattcagaagaaggcgtccaaggagctgaaggtggtgaaatttgtcctgcaggtccctcgggagatcctggagctggagcatgagtgtctgacaatcagaagcatcatgtccaatgtccagatggccagaatgaatgtgatagttcagaccaatgccttccactgctcctttatgactgcacttctagccagtagctctgcacaagttagctctgtagaagtaagaacttgggcttaaatcatgggctatctctccacagccaagtggagctctgagaatacaacaagtgctcaataaatgcttgctgattgactgatggatt

SEQ ID NO: 11629 - protein, 541 aa, Homo sapiens
MGSSEVSIIPGLQKEEKAAVERRRLHVLKALKKLRIEADEAPVVAVLGSGGGLRAHIACLGVLSEMKEQGLLDAVTYLAGVSGSTWAISSLYTNDGDMEALEADLKHRFTRQEWDLAKSLQKTIQAARSENYSLTDFWAYMVISKQTRELPESHLSNMKKPVEEGTLPYPIFAAIDNDLQPSWQEARAPETWFEFTPHHAGFSALGAFVSITHFGSKFKKGRLVRTHPERDLTFLRGLWGSALGNTEVIREYIFDQLRNLTLKGLWRRAVANAKSIGHLIFARLLRLQESSQGEHPPPEDEGGEPEHTWLTEMLENWTRTSLEKQEQPHEDPERKGSLSNLMDFVKKTGICASKWEWGTTHNFLYKHGGIRDKIMSSRKHLHLVDAGLAINTPFPLVLPPTREVHLILSFDFSAGDPFETIRATTDYCRRHKIPFPQVEEAELDLWSKAPASCYILKGETGPVVMHFPLFNIDACGGDIEAWSDTYDTFKLADTYTLDVVVLLLALAKKNVRENKKKILRELMNVAGLYYPKDSARSCCLA

SEQ ID NO: 11630 - DNA, 507 bp, Homo sapiens
atttaatccacagaacaactcctggtggagccatcgttagcccaattttacagctgaggaaaccgacatgcacagaagttacgcacattggatcaggccacacagctggaaacccagatgagcaggaagacacgcgctcggggctggagacgtgcacacccggggaaggaggtgcacagcccgcgtcctcagttcctccgcaaagtcagcttcgccgcagcccacctcccacccaggaccggccccaaagcccttctcgattacctcgaaaggatctccggcactgaagtcgaaggagaggatgaggtgaacctcccgcgtcgggggcagcacgagtgggaagggagtgttgatggctaaaccagcatccaccaggtggaggtgcttccggctgctcattatcttgtcccggatgccacctgtggtgcccaggaagaaagaggatcagctgcttctggggactgaaagcaagacttggaaatggaaggcagagagggggatgggaaa

SEQ ID NO: 11631 - protein, 80 aa, Homo sapiens
MSRKTRARGWRRAHPGKEVHSPRPQFLRKVSFAAAHLPPRTGPKALLDYLERISGTEVEGEDEVNLPRRGQHEWEGSVDG

SEQ ID NO: 11632 - DNA, 538 bp, Homo sapiens
ggaaaccgacatgcacagaagttacgcacattggatcaggccacacagctggaaacccagatgagcaggaagacacgcgctcggggctggagacgtgcacacccggggaaggaggtgcacagcccgcgtcctcagttcctccgcaaagtcagcttcgccgcagcccacctcccacccaggaccggccccaaagcccttctcgattacctcgaaaggatctccggcactgaagtcgaaggagaggatgagcttgctacctggagccttcatcagttactggaaaggggtcctgatccagaccccaagaaagggttcttggatctcatacaagaaagaattcaggaatgactagtgctcttctaagaagaggggattagaacagagacacacatggagcaaagaccatacgaggatatgagaaggtggctgtctgcaaatcacagagagagtcctcagaaagaactcaccccacagacaacttgattttggacttccagccttgagaactgtgagaaaataaatgtctgtcgtttaagtc

SEQ ID NO: 11633 - protein, 95 aa, Homo sapiens
MSRKTRARGWRRAHPGKEVHSPRPQFLRKVSFAAAHLPPRTGPKALLDYLERISGTEVEGEDELATWSLHQLLERGPDPDPKKGFLDLIQERIQE

SEQ ID NO: 11634 - DNA, 513 bp, Homo sapiens
ttatggagaagggctgttgctaatgctaaaagcattggacaccttatttttgcccgattactgaggctgcaagaaagttcacaaggggaacatcctcccccagaagatgaaggcggtgagcctgaacacacctggctgactgagatgctcgagaattggaccaggacctccctggaaaagcaggagcagccccatgaggaccccgaaaggaaaggtaccatgtgtagtgtgataagtgtcatcaacagtaagtgccaccaaccttctcccccctcttgctcttccccacccctgtgggccagtcctgcaggggacatgaccagatgtcccactggtacagtttggatatttgttcccttccacatctcatgttggaatgtaatcccccaatgtaaattagttcaaccattgtaggagacagtgtggaattcctcaaggatctagatccagaaatactatttggcccagcaatcccattactgggtatatgcccaaaggaatgtaaatcattct

SEQ ID NO: 11635 - protein, 89 aa, Homo sapiens
MLENWTRTSLEKQEQPHEDPERKGTMCSVISVINSKCHQPSPPSCSSPPLWASPAGDMTRCPTGTVWIFVPFHISCWNVIPQCKLVQPL

SEQ ID NO: 11636 - DNA, 1271 bp, Homo sapiens
gaacagctgaaaaagctggagcaaccaagcagggcctacaagccgaggagggctgtttaaaggcgcaggggccattttacctccaggttggccctgctcaggaccaggaggaaacacctccagcccgcgacctcctcccacagggggaaaaggaaagcaggaggaccacagaagctttggcaccgaggatccccgcagtcttcacccgcggagattccggctgaaggagctgtccagcgactacaccgctaagcgcagggagcccaagcctccgcaccggattccggagcacaagctccaccgcgcatgcgcacacgccccagacccaggctcaggaggactgagaattttctgaccgcagtgcaccatgggaagctctgaagtttccataattcctgggctccagaaagaagaaaaggcggccgtggagagacgaagacttcatgtgctgaaagctctgaagaagctaaggattgaggctgatgaggccccagttgttgctgtgctgggctcaggcggaggactgcgggctcacattgcctgccttggggtcctgagtgagatgaaagaacagggcctgttggatgccgtcacgtacctcgcaggggtctctggatccacttgggcaatatcttctctctacaccaatgatggtgacatggaagctctcgaggctgacctgaaacatcgatttacccgacaggagtgggacttggctaagagcctacagaaaaccatccaagcagcgaggtctgagaattactctctgaccgacttctgggcctacatggttatctctaagcaaaccagagaactgccggagtctcatttgtccaatatgaagaagcccgtggaagaagggacactaccctacccaatatttgcagccattgacaatgacctgcaaccttcctggcaggaggcaagagcaccaggtaagcaaacatttagagggagggagaggtagtaagggatggaacagcacggagtggaatggaagaatgtttccctgccctccccttggggagcccaggaagagggaagggctcaggattgcagaaaacagggtgctcagcttagacgagagaagagggaagtcccagaagtgaccagaggacatgcacttgctttgcatggatcaagaaaacctttaagaggccaacatggtggctcacgcttgtaatcccagtggtttgggaggctgaggtgggaggatcgcctgaaaccagaagttggagaccaccctgggcaacatagtgagatcccatctc

SEQ ID NO: 11637 - protein, 199 aa, Homo sapiens
MGSSEVSIIPGLQKEEKAAVERRRLHVLKALKKLRIEADEAPVVAVLGSGGGLRAHIACLGVLSEMKEQGLLDAVTYLAGVSGSTWAISSLYTNDGDMEALEADLKHRFTRQEWDLAKSLQKTIQAARSENYSLTDFWAYMVISKQTRELPESHLSNMKKPVEEGTLPYPIFAAIDNDLQPSWQEARAPGKQTFRGRER

SEQ ID NO: 11638 - DNA, 898 bp, Homo sapiens
cactgtgtctctgtctccttcctccaggtctctggccctttctctgcctctttttgtctttaatgtcctgcctcagcccccagggcctttcatttctttccatctcccattcctcccaactcccacctttctcaactttttacttcaagggggtcttgtttcttttcccttctttcactttctgtttctctttctatttctgtttacttcaagggggtgtcttgtttcttttcccttatttcacttcctatttctgtttacttcaagggggtgcctgtttttttcccttcctccctctccccagccctccaacacttggccttgactttgagattccagaccctctgttcctctcttcctctgctcactgcaggcgctggtgctgcccagcccacgcccttacgtgcggatagatggcgctgtgattcccgaccactggctggaccccagcgctgtgtgggaggtgaagtgcgctgacctctccctctctcccatctaccctgctgcgcggggcctggtggatagtgacaagggcatctcccttcgcttccctcggtttattcgagtccgtgaagacaagcagccggagcaggccaccaccagtgctcaggtggcctgtttgtaccggaagcaaagtcagattcagaaccaacaaggcgaggactcaggctctgaccctgaagatacctactaagccctcgccctcctagggcctgggtacagggcatgagttggacggaccccagggttattattgcctttgctttttagcaaatctgctgtggcaggctgtggattttgagagtcaggggaggggtgtgtgtgtgagggggtggcttactccggagtctgggattcatcccgtcatttctttcaataaataattattggatagcta

SEQ ID NO: 11639 - protein, 116 aa, Homo sapiens
MSCLSPQGLSFLSISHSSQLPPFSTFYFKGVLFLFPSFTFCFSFYFCLLQGGVLFLFPYFTSYFCLLQGGACFFPFLPLPSPPTLGLDFEIPDPLFLSSSAHCRRWCCPAHALTCG

SEQ ID NO: 11640 - DNA, 750 bp, Homo sapiens
ctggaagtactttgttttcagtgttgtatatgcccttaagcaatatggcaacaggacctgaatgcccgcacaagagttttcaagtgctgtgccccatagcacatagtgctgtgtcctgaaccagctccccgtggctgtgtggggaagttgttgccggctttgttctgatggcttggaactggcttcagtgatgaggagctggaggagcatcaccagagcctcaaggcgctggtgctgcccagcccacgcccttacgtgcggatagatggcgctgtgattcccgaccactggctggaccccagcgctgtgtgggaggtgaagtgcgctgacctctccctctctcccatctaccctgctgcgcggggcctggtggatagtgacaagggcatctcccttcgcttccctcggtttattcgagtccgtgaagacaagcagccggagcaggccaccaccagtgctcaggtggcctgtttgtaccggaagcaaagtcagattcagaaccaacaaggcgaggactcaggctctgaccctgaagatacctactaagccctcgccctcctagggcctgggtacagggcatgagttggacggaccccagggttattattgcctttgctttttagcaaatctgctgtggcaggctgtggattttgagagtcaggggaggggtgtgtgtgtgagggggtggcttactccggagtctgggattcatcccgtcatttctttcaataaataattattggatagcta

SEQ ID NO: 11641 - protein, 125 aa, Homo sapiens
WLGTGFSDEELEEHHQSLKALVLPSPRPYVRIDGAVIPDHWLDPSAVWEVKCADLSLSPIYPAARGLVDSDKGISLRFPRFIRVREDKQPEQATTSAQVACLYRKQSQIQNQQGEDSGSDPEDTY

SEQ ID NO: 11642 - DNA, 3384 bp, Homo sapiens
tcgcgggggcgcttccaccgattcctcctctttccctgccagtcactcctcagaccctcagccacacccgctcatccagggcgagggaaagcgcgggcattttcccagtgtgctctgcgggagggctcgccccacttcaccccttttcccgccctcctcccattcgggagactacgactcccagtgtcctccgcgcgacggcggcggtgcggacggtgcccaggtcccgcccctaggctctgccccgcccccgcccgcagacgtctgcgcgcgaatgccgtggcgcgaacttgggactgcagaggcgcgcctggcggatctgagtgtgttgcccgggcagcggcgcgcgggaccaacgcaaggcaacagctgacagacgaagaaaagtgctggacaggaagggagaattctgacgccaacatgcagcgaagtatcatgtcatttttccaccccaagaaagagggtaaagcaaagaagcctgagaaggaggcatccaatagcagcagagagacggagccccctccaaaggcggcactgaaggagtggaatggagtggtgtccgagagtgactctccggtgaagaggccagggaggaaggcggcccgggtcctgggcagcgaaggggaagaggaggatgaagcccttagccctgctaaaggccagaagcctgccctggactgctcacaggtctccccgccccgtcctgccacatctcctgagaacaatgcttccctctctgacacctctcccatggacagttccccatcagggattccgaagcgtcgcacagctcggaagcagctcccgaaacggaccattcaggaagtcctggaagagcagagtgaggacgaggacagagaagccaagaggaagaaggaggaggaagaagaggagaccccgaaagaaagcctcacagaggctgaagtggccacagagaaggaaggagaagacggggaccagcccaccacgcctcccaagcccctaaagacctccaaagcagagaccccgacggaaagcgtttcagagcctgaggtggccacgaagcaggaactgcaggaggaggaagagcagaccaagcctccccgcagagctcccaagacgctcagcagcttcttcaccccccggaagccagcagtcaaaaaagaagtgaaggaagaggagccaggggctccaggaaaggagggagctgctgagggacccctggatccatctggttacaatcctgccaagaacaactatcatcccgtggaagatgcctgctggaaaccgggccagaaggttccttacctggctgtggcccggacgtttgagaagatcgaggaggtgtctgctcggctccggatggtggagacgctgagcaacttgctgcgctccgtggtggccctgtcgcctccagacctcctccctgtcctctacctcagcctcaaccaccttgggccaccccagcagggcctggagcttggcgtgggtgatggtgtccttctcaaggcagtggcccaggccacaggtcggcagctggagtccgtccgggctgaggcagccgagaaaggcgacgtggggctggtggccgagaacagccgcagcacccagaggctcatgctgccaccacctccgctcactgcctccggggtcttcagcaagttccgcgacatcgccaggctcactggcagtgcttccacagccaagaagatagacatcatcaaaggcctctttgtggcctgccgccactcagaagcccggttcatcgctaggtccctgagcggacggctgcgccttgggctggcagagcagtcggtgctggctgccctctcccaggcagtgagcctcacgcccccgggccaagaattcccaccagccatggtggatgctgggaagggcaagacagcagaggccagaaagacgtggctggaggagcaaggcatgatcctgaagcagacgttctgcgaggttcccgacctggaccgaattatccccgtgctgctggagcacggcctggaacgtctcccggagcactgcaagctgagcccagggattcccctgaaaccaatgttggcccatcccacccggggcatcagcgaggtcctgaaacgctttgaggaggcagctttcacctgcgaatacaaatatgacgggcagagggcacagatccacgccctggaaggcggggaggtgaagatcttcagcaggaatcaggaagacaacactgggaagtacccggacatcatcagccgcatccccaagattaaactcccatcggtcacatccttcatcctggacaccgaagccgtggcttgggaccgggaaaagaagcagatccagccattccaagtgctcaccacccgcaaacgcaaggaggtggatgcgtctgagatccaggtgcaggtgtgtttgtacgccttcgacctcatctacctcaatggagagtccctggtacgtgagcccctttcccggcgccggcagctgctccgggagaactttgtggagacagagggcgagtttgtcttcgccacctccctggacaccaaggacatcgagcagatcgccgagttcctggagcagtcagtgaaagactcctgcgaggggctgatggtgaagaccctggatgttgatgccacctacgagatcgccaagagatcgcacaactggctcaagctgaagaaggactaccttgatggcgtgggtgacaccctggacctggtggtgatcggcgcctacctgggccgggggaagcgggccggccggtacgggggcttcctgctggcctcctacgacgaggacagtgaggagctgcaggccatatgcaagcttggaactggcttcagtgatgaggagctggaggagcatcaccagagcctcaaggcgctggtgctgcccagcccacgcccttacgtgcggatagatggcgctgtgattcccgaccactggctggaccccagcgctgtgtgggaggtgaagtgcgctgacctctccctctctcccatctaccctgctgcgcggggcctggtggatagtgacaagggcatctcccttcgcttccctcggtttattcgagtccgtgaagacaagcagccggagcaggccaccaccagtgctcaggtggcctgtttgtaccggaagcaaagtcagattcagaaccaacaaggcgaggactcaggctctgaccctgaagatacctactaagccctcgccctcctagggcctgggtacagggcatgagttggacggaccccagggttattattgcctttgctttttagcaaatctgctgtggcaggctgtggattttgagagtcaggggaggggtgtgtgtgtgagggggtggcttactccggagtctgggattcatcccgtcatttctttcaataaataattattggatagcta

SEQ ID NO: 11643 - protein, 919 aa, Homo sapiens; identical to SEQ ID NO: 1935

SEQ ID NO: 11644 - DNA, 846 bp, Homo sapiens
gtaagatgtgcctttgctcctctttcgccttctgccatgactgtgaggcctccccagccgtgtggaactccccagttccccaggaccttgcatatggcctgcagctcctcactgtcctcgtcgtaggaggccagcaggaagcccccgtaccggccggcccgcttcccccggcccaggacctgaggaagatccacctcacgccaatgtggagttggaaagagagggaccttgaagatgtccttgaaagaatcttaaggaacctcaggggtcctcagaccacactttgagaactgctgcccaagtgtggcttcctggccatgtgaagtggcagagtcggaaatggaagtcagaggggcagctgccaggctcacaccccaccccgtcacccctcagctgcccctggacaggaagctggaactcacctctccattgaggtagatgaggtcgaaggcgtacaaacacacctgcacctggatctcagacgcatccacctcctgggttggggcacaacggagttcgtgagtgcaggaaggtgagacggggcactgtgcctgaggccgacagcattcatctaccggtctccctctcgccccacctaactggctgcccatctgtgagggcggccatgctgctggctccaggtgctggatcgttaacggctctcagctaattccgacaacctcattccccttcaccagatatttgctctcctagacttttctgcagctaatggcagtgacatggcacagttctggccaatgagatggaaaaggggaaacctgtggggtgcaggttgtggggttttccagaacagatcttctttcatagtaaaacaacagagatgcc

SEQ ID NO: 11645 - protein, 93 aa, Homo sapiens
MCLCSSFAFCHDCEASPAVWNSPVPQDLAYGLQLLTVLVVGGQQEAPVPAGPLPPAQDLRKIHLTPMWSWKERDLEDVLERILRNLRGPQTTL

SEQ ID NO: 11646 - DNA, 681 bp, Homo sapiens
tgtgcctttgctcctctttcgccttctgccatgactgtgaggcctccccagccgtgtggaactccccagttccccaggaccttgcatatggcctgcagctcctcactgtcctcgtcgtaggaggccagcaggaagcccccgtaccggccggcccgcttcccccggcccaggctcctgctcgctggccctcaacacacccgtcctccactcgaggggaaaccccaggagcttcgcacaatgacaacctgtgactcccggcacggaacccccactgacttcctgaaaccttcaagaggaagatccagttttatctcacagtggccccaggacctgaggaagatccacctcacgccaatgtggagttggaaagagagggaccttgaagatgtccttgaaagaatcttaaggaacctcaggggtcctcagaccacactttgagaactgctgcccaagtgtggcttcctggccatgtgaagtggcagagtcggaaatggaagtcagaggggcagctgccaggctcacaccccaccccgtcacccctcagctgcccctggacaggaagctggaactcacctctccattgaggtagatgaggtcgaaggcgtacaaacacacctgcacctggatctcagacgcatccacctcctgggttggggcacaacggagttcgtgagtgcagga

SEQ ID NO: 11647 - protein, 66 aa, Homo sapiens
MTTCDSRHGTPTDFLKPSRGRSSFISQWPQDLRKIHLTPMWSWKERDLEDVLERILRNLRGPQTTL

SEQ ID NO: 11648 - DNA, 2314 bp, Homo sapiens
cttgatgacggttggaggggcacaatgactttcccaagatcacacagcaaatgtgggacaaaatcaaggctgacagctcatgacagggtgggaggcagatgcagctgcctggcacaggctggctctccagggagatgggcagtgggcacgcattgcccagggcagaactggggctaggggaggaaacaacaagggaggctgtcattagctccttccaaagtggaggtcacttctctcccaaccccgagtcctccacccaaactcccttctcaaggtacaagggctgatcccgtaccagggatgggtagggactcaaagaggaaaagaggatgaaaagaggatggggactgagtgagatgtgaggactccagagggattagcggctctcaaggcaagtgggaggggacttcccggtaggagcccggagacagatgggagcctgtgaagagggcgggggcccggcgaggagaagcggtttctacgctggggtggggctccatgagggggatggagacctggaaaagggactgacggtgcagcgaggagaggaaggctcggttaagggatgggtcttccacgggaggggtggggaactgcgggagtgacggcagcttcggtgaggagtctgaggggctggccctcactgtgttggaagatcagcctgtcctcggggaccctgcttctgctgctgggtgtggcggctctgaccactggctatgcagtgccccccaagctggagggcatcggtgagggtgagttcctggtgttggatcagcgggcagccgactacaaccaggccctgggcacctgtcgcctggcaggcacagcgctctgtgtggcagctggagttctgctcgccatctgcctcttctgggccatgataggctggctgagccaggacaccaaggcagagcccttggaccccgaagccgacagccacgtggaggtcttcggggatgagccagagcagcagttgtcacccattttccgcaatgccagtggccagtcatggttctcgccacccgccagcccctttgggcaatcttctgtgcagactatccagcccaagagggactcctgagctgcccacatggcctaagatgtgggtcctggatccttccccccttctcaccataaccccctctcagtgtttccccaacttctcccttttagcagggtccctttagagcccaactccaggtcaaatctggagctcaaatcccagtgctccctccccaggagtggggccccaactcttccaagataccagcattcctcaagtcctcccaaaacttcctacccacaccctcttcccaaggccctcaggggcagaaaacatctccttcaacccgtccccactccttcctctgcatgaccttgggcaaacccttgccctttcaagccatcagctcctgcctctctgccatgagggctttggatcagattcctcttctcgccaggatgaggacacgcactgccctccatagacacagatgaaggggtgggggtcattcagctcgaatgggtcccagatgctcacttggcctttccctgcaggatgagtgaagacgtttgcctctcacagtgtgtcttctacctgcattttggcatcagagccccccagcccacccaccacaggcaattactagccctagttgataggtgaggtgggtgaagaaggctggaggtgacatgtccgaggtcacacaacaaagcagcatgcaggaactagaaacacatcttcagcctcctcctgggccagctcttgtgctacaggtggggcggagccagcccctcaccttcctggttccctgagggtcctcagggtggaggacaggtttggcccagaaagactagccagaggcctgatggtcccaggtggctctggatatactttggatatggatttaaatggtctctaagagccgggggtagggggcaggaaaagtgggttgtctttgcccctcaaagtccacctacctagaaaccaagcccacggtcttggccgtgaccctgataataaatgggctctctcagaggcgccagcccctccctccccagccggaggcgtcatctctcttctgtaccactagagggagctctgatgcagctggagagcagcgctcaaggctctcgcccctcccctccctaacccttaccttcagtctccaccagcctgaagggcctcctaggggatcctcaggcggcccccaccagggcacaccctactgtccttgtgcctcacgccccctcctcatcctgcaccccttccatcccaccttccctttcaataaacagctgggatggatactga

SEQ ID NO: 11649 - protein, 171 aa, Homo sapiens
MGLPREGWGTAGVTAASVRSLRGWPSLCWKISLSSGTLLLLLGVAALTTGYAVPPKLEGIGEGEFLVLDQRAADYNQALGTCRLAGTALCVAAGVLLAICLFWAMIGWLSQDTKAEPLDPEADSHVEVFGDEPEQQLSPIFRNASGQSWFSPPASPFGQSSVQTIQPKRDS

SEQ ID NO: 11650 - DNA, 2034 bp, Homo sapiens
gtgacggcagcttcggtgaggagtctgaggggctgcgtgaggggctggggcccagggagtccgaggggtctctgtgagggcgctggggtgtccgagcgagcagggaactctggaaggggacaggagccgggggagctgcaggcggccgccgtctgcagagccaggccctgaggcgggccggcgccccctcccccgccccgaactgcggcgcaggcgcgaaccggacccgcctttgctcggcggagacagcaggcagagagatgaggaaactgagacccagaaaggtggaagcacttgtctaaggtcacgcctccaggaagcagtgtgtccacgactccagtccaagtggtcaggctccagagcccacagtcccagatcagcctgtcctcggggaccctgcttctgctgctgggtgtggcggctctgaccactggctatgcagtgccccccaagctggagggcatcggtgagggtgagttcctggtgttggatcagcgggcagccgactacaaccaggccctgggcacctgtcgcctggcaggcacagcgctctgtgtggcagctggagttctgctcgccatctgcctcttctgggccatgataggctggctgagccaggacaccaaggcagagcccttggaccccgaagccgacagccacgtggaggtcttcggggatgagccagagcagcagttgtcacccattttccgcaatgccagtggccagtcatggttctcgccacccgccagcccctttgggcaatcttctgtgcagactatccagcccaagagggactcctgagctgcccacatggcctaagatgtgggtcctggatccttccccccttctcaccataaccccctctcagtgtttccccaacttctcccttttagcagggtccctttagagcccaactccaggtcaaatctggagctcaaatcccagtgctccctccccaggagtggggccccaactcttccaagataccagcattcctcaagtcctcccaaaacttcctacccacaccctcttcccaaggccctcaggggcagaaaacatctccttcaacccgtccccactccttcctctgcatgaccttgggcaaacccttgccctttcaagccatcagctcctgcctctctgccatgagggctttggatcagattcctcttctcgccaggatgaggacacgcactgccctccatagacacagatgaaggggtgggggtcattcagctcgaatgggtcccagatgctcacttggcctttccctgcaggatgagtgaagacgtttgcctctcacagtgtgtcttctacctgcattttggcatcagagccccccagcccacccaccacaggcaattactagccctagttgataggtgaggtgggtgaagaaggctggaggtgacatgtccgaggtcacacaacaaagcagcatgcaggaactagaaacacatcttcagcctcctcctgggccagctcttgtgctacaggtggggcggagccagcccctcaccttcctggttccctgagggtcctcagggtggaggacaggtttggcccagaaagactagccagaggcctgatggtcccaggtggctctggatatactttggatatggatttaaatggtctctaagagccgggggtagggggcaggaaaagtgggttgtctttgcccctcaaagtccacctacctagaaaccaagcccacggtcttggccgtgaccctgataataaatgggctctctcagaggcgccagcccctccctccccagccggaggcgtcatctctcttctgtaccactagagggagctctgatgcagctggagagcagcgctcaaggctctcgcccctcccctccctaacccttaccttcagtctccaccagcctgaagggcctcctaggggatcctcaggcggcccccaccagggcacaccctactgtccttgtgcctcacgccccctcctcatcctgcaccccttccatcccaccttccctttcaataaacagctgggatggatactga

SEQ ID NO: 11651 - protein, 76 aa, Homo sapiens
MSQSSSCHPFSAMPVASHGSRHPPAPLGNLLCRLSSPRGTPELPTWPKMWVLDPSPLLTITPSQCFPNFSLLAGSL

SEQ ID NO: 11652 - DNA, 2088 bp, Homo sapiens
gcggccgccgtctgcagagccaggccctgaggcgggccggcgccccctcccccgccccgaactgcggcgcaggcgcgaaccggacccgcctttgctcggcggagacagcaggcagagagatgaggaaactgagacccagaaaggtggaagcacttgtctaaggtcacgcctccaggaagcagtgtgtccacgactccagtccaagtggtcaggctccagagcccacagtcccaggggtccatgatgccgagctgcaatcgttcctgcagctgcagccgcggccccagcgtggaggatggcaagtggtatggggtccgctcctacctgcacctcttctatgaggactgtgcaggcactgctctcagcgacgaccctgagggacctccggtcctgtgcccccgccggccctggccctcactgtgttggaagatcagcctgtcctcggggaccctgcttctgctgctgggtgtggcggctctgaccactggctatgcagtgccccccaagctggagggcatcggtgagggtgagttcctggtgttggatcagcgggcagccgactacaaccaggccctgggcacctgtcgcctggcaggcacagcgctctgtgtggcagctggagttctgctcgccatctgcctcttctgggccatgataggctggctgagccaggacaccaaggcagagcccttggaccccgaagccgacagccacgtggaggtcttcggggatgagccagagcagcagttgtcacccattttccgcaatgccagtggccagtcatggttctcgccacccgccagcccctttgggcaatcttctgtgcagactatccagcccaagagggactcctgagctgcccacatggcctaagatgtgggtcctggatccttccccccttctcaccataaccccctctcagtgtttccccaacttctcccttttagcagggtccctttagagcccaactccaggtcaaatctggagctcaaatcccagtgctccctccccaggagtggggccccaactcttccaagataccagcattcctcaagtcctcccaaaacttcctacccacaccctcttcccaaggccctcaggggcagaaaacatctccttcaacccgtccccactccttcctctgcatgaccttgggcaaacccttgccctttcaagccatcagctcctgcctctctgccatgagggctttggatcagattcctcttctcgccaggatgaggacacgcactgccctccatagacacagatgaaggggtgggggtcattcagctcgaatgggtcccagatgctcacttggcctttccctgcaggatgagtgaagacgtttgcctctcacagtgtgtcttctacctgcattttggcatcagagccccccagcccacccaccacaggcaattactagccctagttgataggtgaggtgggtgaagaaggctggaggtgacatgtccgaggtcacacaacaaagcagcatgcaggaactagaaacacatcttcagcctcctcctgggccagctcttgtgctacaggtggggcggagccagcccctcaccttcctggttccctgagggtcctcagggtggaggacaggtttggcccagaaagactagccagaggcctgatggtcccaggtggctctggatatactttggatatggatttaaatggtctctaagagccgggggtagggggcaggaaaagtgggttgtctttgcccctcaaagtccacctacctagaaaccaagcccacggtcttggccgtgaccctgataataaatgggctctctcagaggcgccagcccctccctccccagccggaggcgtcatctctcttctgtaccactagagggagctctgatgcagctggagagcagcgctcaaggctctcgcccctcccctccctaacccttaccttcagtctccaccagcctgaagggcctcctaggggatcctcaggcggcccccaccagggcacaccctactgtccttgtgcctcacgccccctcctcatcctgcaccccttccatcccaccttccctttcaataaacagctgggatggatactga

SEQ ID NO: 11653 - protein, 204 aa, Homo sapiens; identical to SEQ ID NO: 1937

SEQ ID NO: 11654 - DNA, 2083 bp, Homo sapiens
cccgcctttgctcggcggagacagcaggcagagagtttctctctagggaaaaggacgcagttggtgtggagcagggcatcggtggtcctgtcaggaagagtggcgcgggtgccgatgaggaaactgagacccagaaaggtggaagcacttgtctaaggtcacgcctccaggaagcagtgtgtccacgactccagtccaagtggtcaggctccagagcccacagtcccaggggtccatgatgccgagctgcaatcgttcctgcagctgcagccgcggccccagcgtggaggatggcaagtggtatggggtccgctcctacctgcacctcttctatgaggactgtgcaggcactgctctcagcgacgaccctgagggacctccggtcctgtgcccccgccggccctggccctcactgtgttggaagatcagcctgtcctcggggaccctgcttctgctgctgggtgtggcggctctgaccactggctatgcagtgccccccaagctggagggcatcggtgagggtgagttcctggtgttggatcagcgggcagccgactacaaccaggccctgggcacctgtcgcctggcaggcacagcgctctgtgtggcagctggagttctgctcgccatctgcctcttctgggccatgataggctggctgagccaggacaccaaggcagagcccttggaccccgaagccgacagccacgtggaggtcttcggggatgagccagagcagcagttgtcacccattttccgcaatgccagtggccagtcatggttctcgccacccgccagcccctttgggcaatcttctgtgcagactatccagcccaagagggactcctgagctgcccacatggcctaagatgtgggtcctggatccttccccccttctcaccataaccccctctcagtgtttccccaacttctcccttttagcagggtccctttagagcccaactccaggtcaaatctggagctcaaatcccagtgctccctccccaggagtggggccccaactcttccaagataccagcattcctcaagtcctcccaaaacttcctacccacaccctcttcccaaggccctcaggggcagaaaacatctccttcaacccgtccccactccttcctctgcatgaccttgggcaaacccttgccctttcaagccatcagctcctgcctctctgccatgagggctttggatcagattcctcttctcgccaggatgaggacacgcactgccctccatagacacagatgaaggggtgggggtcattcagctcgaatgggtcccagatgctcacttggcctttccctgcaggatgagtgaagacgtttgcctctcacagtgtgtcttctacctgcattttggcatcagagccccccagcccacccaccacaggcaattactagccctagttgataggtgaggtgggtgaagaaggctggaggtgacatgtccgaggtcacacaacaaagcagcatgcaggaactagaaacacatcttcagcctcctcctgggccagctcttgtgctacaggtggggcggagccagcccctcaccttcctggttccctgagggtcctcagggtggaggacaggtttggcccagaaagactagccagaggcctgatggtcccaggtggctctggatatactttggatatggatttaaatggtctctaagagccgggggtagggggcaggaaaagtgggttgtctttgcccctcaaagtccacctacctagaaaccaagcccacggtcttggccgtgaccctgataataaatgggctctctcagaggcgccagcccctccctccccagccggaggcgtcatctctcttctgtaccactagagggagctctgatgcagctggagagcagcgctcaaggctctcgcccctcccctccctaacccttaccttcagtctccaccagcctgaagggcctcctaggggatcctcaggcggcccccaccagggcacaccctactgtccttgtgcctcacgccccctcctcatcctgcaccccttccatcccaccttccctttcaataaacagctgggatggatactga

SEQ ID NO: 11655 - protein, 204 aa, Homo sapiens; identical to SEQ ID NO: 1937

SEQ ID NO: 11656 - DNA, 2059 bp, Homo sapiens
ttcagtctctgccttttcccgttctctgtcgtggcttttgttgttgttgtttttcctcctttccttccccgctcttcttttccctgaattatgaggaaactgagacccagaaaggtggaagcacttgtctaaggtcacgcctccaggaagcagtgtgtccacgactccagtccaagtggtcaggctccagagcccacagtcccaggggtccatgatgccgagctgcaatcgttcctgcagctgcagccgcggccccagcgtggaggatggcaagtggtatggggtccgctcctacctgcacctcttctatgaggactgtgcaggcactgctctcagcgacgaccctgagggacctccggtcctgtgcccccgccggccctggccctcactgtgttggaagatcagcctgtcctcggggaccctgcttctgctgctgggtgtggcggctctgaccactggctatgcagtgccccccaagctggagggcatcggtgagggtgagttcctggtgttggatcagcgggcagccgactacaaccaggccctgggcacctgtcgcctggcaggcacagcgctctgtgtggcagctggagttctgctcgccatctgcctcttctgggccatgataggctggctgagccaggacaccaaggcagagcccttggaccccgaagccgacagccacgtggaggtcttcggggatgagccagagcagcagttgtcacccattttccgcaatgccagtggccagtcatggttctcgccacccgccagcccctttgggcaatcttctgtgcagactatccagcccaagagggactcctgagctgcccacatggcctaagatgtgggtcctggatccttccccccttctcaccataaccccctctcagtgtttccccaacttctcccttttagcagggtccctttagagcccaactccaggtcaaatctggagctcaaatcccagtgctccctccccaggagtggggccccaactcttccaagataccagcattcctcaagtcctcccaaaacttcctacccacaccctcttcccaaggccctcaggggcagaaaacatctccttcaacccgtccccactccttcctctgcatgaccttgggcaaacccttgccctttcaagccatcagctcctgcctctctgccatgagggctttggatcagattcctcttctcgccaggatgaggacacgcactgccctccatagacacagatgaaggggtgggggtcattcagctcgaatgggtcccagatgctcacttggcctttccctgcaggatgagtgaagacgtttgcctctcacagtgtgtcttctacctgcattttggcatcagagccccccagcccacccaccacaggcaattactagccctagttgataggtgaggtgggtgaagaaggctggaggtgacatgtccgaggtcacacaacaaagcagcatgcaggaactagaaacacatcttcagcctcctcctgggccagctcttgtgctacaggtggggcggagccagcccctcaccttcctggttccctgagggtcctcagggtggaggacaggtttggcccagaaagactagccagaggcctgatggtcccaggtggctctggatatactttggatatggatttaaatggtctctaagagccgggggtagggggcaggaaaagtgggttgtctttgcccctcaaagtccacctacctagaaaccaagcccacggtcttggccgtgaccctgataataaatgggctctctcagaggcgccagcccctccctccccagccggaggcgtcatctctcttctgtaccactagagggagctctgatgcagctggagagcagcgctcaaggctctcgcccctcccctccctaacccttaccttcagtctccaccagcctgaagggcctcctaggggatcctcaggcggcccccaccagggcacaccctactgtccttgtgcctcacgccccctcctcatcctgcaccccttccatcccaccttccctttcaataaacagctgggatggatactga

SEQ ID NO: 11657 - protein, 204 aa, Homo sapiens; identical to SEQ ID NO: 1937

SEQ ID NO: 11658 - DNA, 2690 bp, Homo sapiens
tcgtacctatctgggtatgtctctgtatgctttgtgagtatgtctgtgtgtttctctgtgctgtttcggtgagtttctctatgcagggatttgaggaccacatctgattggaagtgaggggcagctgtcaggacctttatcttaccctttggaacaagcacattgtttcattttgcaggaggctgctaattaaggctgagggccatcatggagactggggtagaagcccagtcctcccccaacacctcctggctttggttcgggccaaacctgtatatggatatacaagtaccttccattcccaagatccgtgtccacttttgtggaaaaaaaaaaaaaggttatttgataggtttctctggaaatctaacagcccttaagcctaagagtctttaatcctgagggaccctgactttcacttccaatggagtcaaaattcattggaatctggaggctttcaggggcagtcctggggaggacctttttatagccttgcagcttgggaactccagcccaagtgtcagccatgacaattacccccaggagggggtctgaaggggagcggagggtgaggctctctcattccagatatggagactaaaaagttcaagatggaagtaatagcaaaaaaattacagtactaatcacaacagctaccatttctcagcattagacacagtaactgtatgaaagaagtatgattattaggtctgttttacagatgaggaaactgagacccagaaaggtggaagcacttgtctaaggtcacgcctccaggaagcagtgtgtccacgactccagtccaagtggtcaggctccagagcccacagtcccaggggtccatgatgccgagctgcaatcgttcctgcagctgcagccgcggccccagcgtggaggatggcaagtggtatggggtccgctcctacctgcacctcttctatgaggactgtgcaggcactgctctcagcgacgaccctgagggacctccggtcctgtgcccccgccggccctggccctcactgtgttggaagatcagcctgtcctcggggaccctgcttctgctgctgggtgtggcggctctgaccactggctatgcagtgccccccaagctggagggcatcggtgagggtgagttcctggtgttggatcagcgggcagccgactacaaccaggccctgggcacctgtcgcctggcaggcacagcgctctgtgtggcagctggagttctgctcgccatctgcctcttctgggccatgataggctggctgagccaggacaccaaggcagagcccttggaccccgaagccgacagccacgtggaggtcttcggggatgagccagagcagcagttgtcacccattttccgcaatgccagtggccagtcatggttctcgccacccgccagcccctttgggcaatcttctgtgcagactatccagcccaagagggactcctgagctgcccacatggcctaagatgtgggtcctggatccttccccccttctcaccataaccccctctcagtgtttccccaacttctcccttttagcagggtccctttagagcccaactccaggtcaaatctggagctcaaatcccagtgctccctccccaggagtggggccccaactcttccaagataccagcattcctcaagtcctcccaaaacttcctacccacaccctcttcccaaggccctcaggggcagaaaacatctccttcaacccgtccccactccttcctctgcatgaccttgggcaaacccttgccctttcaagccatcagctcctgcctctctgccatgagggctttggatcagattcctcttctcgccaggatgaggacacgcactgccctccatagacacagatgaaggggtgggggtcattcagctcgaatgggtcccagatgctcacttggcctttccctgcaggatgagtgaagacgtttgcctctcacagtgtgtcttctacctgcattttggcatcagagccccccagcccacccaccacaggcaattactagccctagttgataggtgaggtgggtgaagaaggctggaggtgacatgtccgaggtcacacaacaaagcagcatgcaggaactagaaacacatcttcagcctcctcctgggccagctcttgtgctacaggtggggcggagccagcccctcaccttcctggttccctgagggtcctcagggtggaggacaggtttggcccagaaagactagccagaggcctgatggtcccaggtggctctggatatactttggatatggatttaaatggtctctaagagccgggggtagggggcaggaaaagtgggttgtctttgcccctcaaagtccacctacctagaaaccaagcccacggtcttggccgtgaccctgataataaatgggctctctcagaggcgccagcccctccctccccagccggaggcgtcatctctcttctgtaccactagagggagctctgatgcagctggagagcagcgctcaaggctctcgcccctcccctccctaacccttaccttcagtctccaccagcctgaagggcctcctaggggatcctcaggcggcccccaccagggcacaccctactgtccttgtgcctcacgccccctcctcatcctgcaccccttccatcccaccttccctttcaataaacagctgggatggatactga

SEQ ID NO: 11659 - protein, 204 aa, Homo sapiens; identical to SEQ ID NO: 1937

SEQ ID NO: 11660 - DNA, 1329 bp, Homo sapiens
gccaggacaccaaggcagagcccttggaccccgaagccgacagccacgtggaggtcttcggggatgagccagagcagcagttgtcacccattttccgcaatgccagtggccagtcatggttctcgccacccgccagcccctttgggcaatcttctgtgcagactatccagcccaagagggactcctgagctgcccacatggcctaagatgtgggtcctggatccttccccccttctcaccataaccccctctcagtgtttccccaacttctcccttttagcagggtccctttagagcccaactccaggtcaaatctggagctcaaatcccagtgctccctccccaggagtggggccccaactcttccaagataccagcattcctcaagtcctcccaaaacttcctacccacaccctcttcccaaggccctcaggggcagaaaacatctccttcaacccgtccccactccttcctctgcatgaccttgggcaaacccttgccctttcaagccatcagctcctgcctctctgccatgagggctttggatcagattcctcttctcgccaggatgaggacacgcactgccctccatagacacagatgaaggggtgggggtcattcagctcgaatgggtcccagatgctcacttggcctttccctgcaggatgagtgaagacgtttgcctctcacagtgtgtcttctacctgcattttggcatcagagccccccagcccacccaccacaggcaattactagccctagttgataggtgaggtgggtgaagaaggctggaggtgacatgtccgaggtcacacaacaaagcagcatgcaggaactagaaacacatcttcagcctcctcctgggccagctcttgtgctacaggtggggcggagccagcccctcaccttcctggttccctgagggtcctcagggtggaggacaggtttggcccagaaagactagccagaggcctgatggtcccaggtggctctggatatactttggatatggatttaaatggtctctaagagccgggggtagggggcaggaaaagtgggttgtctttgcccctcaaagtccacctacctagaaaccaagcccacggtcttggccgtgaccctgataataaatgggctctctcagaggcgccagcccctccctccctaacccttaccttcagtctccaccagcctgaagggcctcctaggggatcctcaggcggcccccaccagggcacaccctactgtccttgtgcctcacgccccctcctcatcctgcaccccttccatcccaccttccctttcaataaacagctgggatggatactg

SEQ ID NO: 11661 - protein, 76 aa, Homo sapiens; identical to SEQ ID NO: 11651

SEQ ID NO: 11662 - DNA, 2497 bp, Homo sapiens
ggagcttgcagtgagccgagatcgcgccaccgccctccagcctgggcgacagagcaagactctgtctcaaaaaaaaaaaaaaaaagagcaaattttttttccaaggtgatagggagagtccgtggctgatgtctgcactgaccagacgcccctagggggccagcgagggcgggtcccaggtgcagcggatgcagaggagagaggcccgggcgcggcgcgggggatggtgcgatcccgggcccgagggcatcagacggcggctgattagctccggtttgcatcacccggaccgggggattagctccggtttgcatcacccggaccgggggattagctccggtttgcatcacccggaccgggggccgggcgcgcacgagactcgcagcggaagtggaggcggctccgcgcgcgtccgctgctaggacccgggcagggctggagctgggctgggatcccgagctcggcagcagcgcagcgggccggcccacctgctggtgccctggaggctctgagccccggcggcgcccgggcccacgcggaacgacggggcgagatgcgagccacccctctggctgctcctgcgggttccctgtccaggaagaagcggttggagttggatgacaacttagataccgagcgtcccgtccagaaacgagctcgaagtgggccccagcccagactgcccccctgcctgttgcccctgagcccacctactgctccagatcgtgcaactgctgtggccactgcctcccgtcttgggccctatgtcctcctggagcccgaggagggcgggcgggcctaccaggccctgcactgccctacaggcactgagtatacctgcaaggtgtaccccgtccaggaagccctggccgtgctggagccctatgcgcggctgcccccgcacaagcatgtggctcggcccactgaggtcctggctggtacccagctcctctacgcctttttcactcggacccatggggacatgcacagcctggtgcgaagccgccaccgtatccctgagcctgaggctgccgtgctcttccgccagatggccaccgccctggcgcactgtcaccagcacggtctggtcctgcgtgatctcaagctgtgtcgctttgtcttcgctgaccgtgagaggaagaagctggtgctggagaacctggaggactcctgcgtgctgactgggccagatgattccctgtgggacaagcacgcgtgcccagcctacgtgggacctgagatactcagctcacgggcctcatactcgggcaaggcagccgatgtctggagcctgggcgtggcgctcttcaccatgctggccggccactaccccttccaggactcggagcctgtcctgctcttcggcaagatccgccgcggggcctacgccttgcctgcaggcctctcggcccctgcccgctgtctggttcgctgcctccttcgtcgggagccagctgaacggctcacagccacaggcatcctcctgcacccctggctgcgacaggacccgatgcccttagccccaacccgatcccatctctgggaggctgcccaggtggtccctgatggactggggctggacgaagccagggaagaggagggagacagagaagtggttctgtatggctaggaccaccctactacacgctcagctgccaacagtggattgagtttgggggtagctccaagccttctcctgcctctgaactgagccaaaccttcagtgccttccagaagggagaaaggcagaagcctgtgtggagtgtgctgtgtacacatctgctttgttccacacacatgcagttcctgcttgggtgcttatcaggtgccaagccctgttctcggtgctgggagtacagcagtgagcaaaggagacaatattccctgctcacagagatgacaaactggcatccttgagctgacaacacttttccatgaccataggtcactgtctacactgggtacactttgtaccagtgtcggcctccactgatgctggtgctcaggcacctctgtccaaggacaatccctttcacaaacaaaccagctgcctttgtatcttgtaccttttcagagaaagggaggtatccctgtgccaaaggctccaggcctctcccctgcaactcaggacccaagcccagctcactctgggaactgtgttcccagcatctctgtcctcttgattaagagattctccttccaggcctaagcctgggatttgggccagagataagaatccaaactatgaggctagttcttgtctaactcaagactgttctggaatgagggtccaggcctgtcaaccatggggcttctgacctgagcaccaaggttgagggacaggattaggcagggtctgtcctgtggccacctggaaagtcccaggtgggactcttctggggacacttggggtccacaatcccaggtccatactctaggttttggataccatgagtatgtatgtttacctgtgcctaataaaggagaattatgaaat

SEQ ID NO: 11663 - protein, 358 aa, Homo sapiens; identical to SEQ ID NO: 1939

SEQ ID NO: 11664 - DNA, 2204 bp, Homo sapiens
ggagcttgcagtgagccgagatcgcgccaccgccctccagcctgggcgacagagcaagactctgtctcaaaaaaaaaaaaaaaaagagcaaattttttttccaaggtgatagggagagtccgtggctgatgtctgcactgaccagacgcccctagggggccagcgagggcgggtcccaggtgcagcggatgcagaggagagaggcccgggcgcggcgcgggggatggtgcgatcccgggcccgagggcatcagacggcggctgattagctccggtttgcatcacccggaccgggggattagctccggtttgcatcacccggaccgggggattagctccggtttgcatcacccggaccgggggccgggcgcgcacgagactcgcagcggaagtggaggcggctccgcgcgcgtccgctgctaggacccgggcagggctggagctgggctgggatcccgagctcggcagcagcgcagcgggccggcccacctgctggtgccctggaggctctgagccccggcggcgcccgggcccacgcggaacgacggggcgagatgcgagccacccctctggctgctcctgcgggttccctgtccaggaagaagcggttggagttggatgacaacttagataccgagcgtcccgtccagaaacgagctcgaagtgggccccagcccagactgcccccctgcctgttgcccctgagcccacctactgctccagatcgtgcaactgctgtggccactgcctcccgtcttgggccctatgtcctcctggagcccgaggagggcgggcgggcctaccaggccctgcactgccctacaggcactgagtatacctgcaaggaagaagctggtgctggagaacctggaggactcctgcgtgctgactgggccagatgattccctgtgggacaagcacgcgtgcccagcctacgtgggacctgagatactcagctcacgggcctcatactcgggcaaggcagccgatgtctggagcctgggcgtggcgctcttcaccatgctggccggccactaccccttccaggactcggagcctgtcctgctcttcggcaagatccgccgcggggcctacgccttgcctgcaggcctctcggcccctgcccgctgtctggttcgctgcctccttcgtcgggagccagctgaacggctcacagccacaggcatcctcctgcacccctggctgcgacaggacccgatgcccttagccccaacccgatcccatctctgggaggctgcccaggtggtccctgatggactggggctggacgaagccagggaagaggagggagacagagaagtggttctgtatggctaggaccaccctactacacgctcagctgccaacagtggattgagtttgggggtagctccaagccttctcctgcctctgaactgagccaaaccttcagtgccttccagaagggagaaaggcagaagcctgtgtggagtgtgctgtgtacacatctgctttgttccacacacatgcagttcctgcttgggtgcttatcaggtgccaagccctgttctcggtgctgggagtacagcagtgagcaaaggagacaatattccctgctcacagagatgacaaactggcatccttgagctgacaacacttttccatgaccataggtcactgtctacactgggtacactttgtaccagtgtcggcctccactgatgctggtgctcaggcacctctgtccaaggacaatccctttcacaaacaaaccagctgcctttgtatcttgtaccttttcagagaaagggaggtatccctgtgccaaaggctccaggcctctcccctgcaactcaggacccaagcccagctcactctgggaactgtgttcccagcatctctgtcctcttgattaagagattctccttccaggcctaagcctgggatttgggccagagataagaatccaaactatgaggctagttcttgtctaactcaagactgttctggaatgagggtccaggcctgtcaaccatggggcttctgacctgagcaccaaggttgagggacaggattaggcagggtctgtcctgtggccacctggaaagtcccaggtgggactcttctggggacacttggggtccacaatcccaggtccatactctaggttttggataccatgagtatgtatgtttacctgtgcctaataaaggagaattatgaaat

SEQ ID NO: 11665 - protein, 190 aa, Homo sapiens
MSSWSPRRAGGPTRPCTALQALSIPARKKLVLENLEDSCVLTGPDDSLWDKHACPAYVGPEILSSRASYSGKAADVWSLGVALFTMLAGHYPFQDSEPVLLFGKIRRGAYALPAGLSAPARCLVRCLLRREPAERLTATGILLHPWLRQDPMPLAPTRSHLWEAAQVVPDGLGLDEAREEEGDREVVLYG

SEQ ID NO: 11666 - DNA, 2390 bp, Homo sapiens
ggagcttgcagtgagccgagatcgcgccaccgccctccagcctgggcgacagagcaagactctgtctcaaaaaaaaaaaaaaaaagagcaaattttttttccaaggtgatagggagagtccgtggctgatgtctgcactgaccagacgcccctagggggccagcgagggcgggtcccaggtgcagcggatgcagaggagagaggcccgggcgcggcgcgggggatggtgcgatcccgggcccgagggcatcagacggcggctgattagctccggtttgcatcacccggaccgggggattagctccggtttgcatcacccggaccgggggattagctccggtttgcatcacccggaccgggggccgggcgcgcacgagactcgcagcggaagtggaggcggctccgcgcgcgtccgctgctaggacccgggcagggctggagctgggctgggatcccgagctcggcagcagcgcagcgggccggcccacctgctggtgccctggaggctctgagccccggcggcgcccgggcccacgcggaacgacggggcgagatgcgagccacccctctggctgctcctgcgggttccctgtccaggaagaagcggttggagttggatgacaacttagataccgagcgtcccgtccagaaacgagctcgaagtgggccccagcccagactgcccccctgcctgttgcccctgagcccacctactgctccagatcgtgcaactgctgtggccactgcctcccgtcttgggccctatgtcctcctggagcccgaggagggcgggcgggcctaccaggccctgcactgccctacaggcactgagtatacctgcaaggaagaagctggtgctggagaacctggaggactcctgcgtgctgactgggccagatgattccctgtgggacaagcacgcgtgcccagcctacgtgggacctgagatactcagctcacgggcctcatactcgggcaaggcagccgatgtctggagcctgggcgtggcgctcttcaccatgctggccggccactaccccttccaggactcggagcctgtcctgctcttcggcaagatccgccgcggggcctacgccttgcctgcaggcctctcggcccctgcccgctgtctggttcgctgcctccttcgtcgggagccagctgaacggctcacagccacaggcatcctcctgcacccctggctgcgacaggacccgatgcccttagccccaacccgatcccatctctgggaggctgcccaggtggtccctgatggactggggctggacgaagccagggaagaggagggagacagagaagtggttctgtatggctaggaccaccctactacacgctcagctgccaacagtggattgagtttgggggtagctccaagccttctcctgcctctgaactgagccaaaccttcagtgccttccagaagggagaaaggcagaagcctgtgtggagtgtgctgtgtacacatctgctttgttccacacacatgcagttcctgcttgggtgcttatcaggtgccaagccctgttctcggtgctgggagtacagcagtgagcaaaggagacaatattccctgctcacagagatgacaaactggcatccttgagctgacaacacttttccatgaccataggtcactgtctacactgggtacactttgtaccagtgtcggcctccactgatgctggtgctcaggcacctctgtccaaggacaatccctttcacaaacaaaccagctgcctttgtatcttgtaccttttcagagaaagggaggtatccctgtgccaaaggctccaggcctctcccctgcaactcaggacccaagcccagctcactctgggaactgtgttcccagcatctctgtcctcttgattaagagattctccttccaggcctaagcctgggatttgggccagagataagaatccaaactatgaggctagttcttgtctaactcaagactgttctggaatgagggtccaggcctgtcaaccatggggcttctgacctgagcaccaaggttgagggacaggattaggcagggtctgtcctgtggccacctggaaagtcccaggtgggactcttctggggacacttggggtccacaatcccaggtccatactctaggttttggataccatgagtatgtatgtttacctgtgcctaataaaggagaattatgaaataattttatttttctctgcaatttcttccatcctttccaacgatctcttaccagtttttcctgccttcaaaactggcccccatggtgaaaggccgtagagttgtgtcttaacctgggctgagtggtttgtgagaacagattacctggagcccagtgggtcttcctgcactccttctgtttcttctgg

SEQ ID NO: 11667 - protein, 190 aa, Homo sapiens; identical to SEQ ID NO: 11665

SEQ ID NO: 11668 - DNA, 2683 bp, Homo sapiens
ggagcttgcagtgagccgagatcgcgccaccgccctccagcctgggcgacagagcaagactctgtctcaaaaaaaaaaaaaaaaagagcaaattttttttccaaggtgatagggagagtccgtggctgatgtctgcactgaccagacgcccctagggggccagcgagggcgggtcccaggtgcagcggatgcagaggagagaggcccgggcgcggcgcgggggatggtgcgatcccgggcccgagggcatcagacggcggctgattagctccggtttgcatcacccggaccgggggattagctccggtttgcatcacccggaccgggggattagctccggtttgcatcacccggaccgggggccgggcgcgcacgagactcgcagcggaagtggaggcggctccgcgcgcgtccgctgctaggacccgggcagggctggagctgggctgggatcccgagctcggcagcagcgcagcgggccggcccacctgctggtgccctggaggctctgagccccggcggcgcccgggcccacgcggaacgacggggcgagatgcgagccacccctctggctgctcctgcgggttccctgtccaggaagaagcggttggagttggatgacaacttagataccgagcgtcccgtccagaaacgagctcgaagtgggccccagcccagactgcccccctgcctgttgcccctgagcccacctactgctccagatcgtgcaactgctgtggccactgcctcccgtcttgggccctatgtcctcctggagcccgaggagggcgggcgggcctaccaggccctgcactgccctacaggcactgagtatacctgcaaggtgtaccccgtccaggaagccctggccgtgctggagccctatgcgcggctgcccccgcacaagcatgtggctcggcccactgaggtcctggctggtacccagctcctctacgcctttttcactcggacccatggggacatgcacagcctggtgcgaagccgccaccgtatccctgagcctgaggctgccgtgctcttccgccagatggccaccgccctggcgcactgtcaccagcacggtctggtcctgcgtgatctcaagctgtgtcgctttgtcttcgctgaccgtgagaggaagaagctggtgctggagaacctggaggactcctgcgtgctgactgggccagatgattccctgtgggacaagcacgcgtgcccagcctacgtgggacctgagatactcagctcacgggcctcatactcgggcaaggcagccgatgtctggagcctgggcgtggcgctcttcaccatgctggccggccactaccccttccaggactcggagcctgtcctgctcttcggcaagatccgccgcggggcctacgccttgcctgcaggcctctcggcccctgcccgctgtctggttcgctgcctccttcgtcgggagccagctgaacggctcacagccacaggcatcctcctgcacccctggctgcgacaggacccgatgcccttagccccaacccgatcccatctctgggaggctgcccaggtggtccctgatggactggggctggacgaagccagggaagaggagggagacagagaagtggttctgtatggctaggaccaccctactacacgctcagctgccaacagtggattgagtttgggggtagctccaagccttctcctgcctctgaactgagccaaaccttcagtgccttccagaagggagaaaggcagaagcctgtgtggagtgtgctgtgtacacatctgctttgttccacacacatgcagttcctgcttgggtgcttatcaggtgccaagccctgttctcggtgctgggagtacagcagtgagcaaaggagacaatattccctgctcacagagatgacaaactggcatccttgagctgacaacacttttccatgaccataggtcactgtctacactgggtacactttgtaccagtgtcggcctccactgatgctggtgctcaggcacctctgtccaaggacaatccctttcacaaacaaaccagctgcctttgtatcttgtaccttttcagagaaagggaggtatccctgtgccaaaggctccaggcctctcccctgcaactcaggacccaagcccagctcactctgggaactgtgttcccagcatctctgtcctcttgattaagagattctccttccaggcctaagcctgggatttgggccagagataagaatccaaactatgaggctagttcttgtctaactcaagactgttctggaatgagggtccaggcctgtcaaccatggggcttctgacctgagcaccaaggttgagggacaggattaggcagggtctgtcctgtggccacctggaaagtcccaggtgggactcttctggggacacttggggtccacaatcccaggtccatactctaggttttggataccatgagtatgtatgtttacctgtgcctaataaaggagaattatgaaataattttatttttctctgcaatttcttccatcctttccaacgatctcttaccagtttttcctgccttcaaaactggcccccatggtgaaaggccgtagagttgtgtcttaacctgggctgagtggtttgtgagaacagattacctggagcccagtgggtcttcctgcactccttctgtttcttctgg

SEQ ID NO: 11669 - protein, 358 aa, Homo sapiens; identical to SEQ ID NO: 1939

SEQ ID NO: 11670 - DNA, 1981 bp, Homo sapiens
ctgctaggacccgggcagggctggagctgggctgggatcccgagctcggcagcagcgcagcgggccggcccacctgctggtgccctggaggctctgagccccggcggcgcccgggcccacgcggaacgacggggcgagatgcgagccacccctctggctgctcctgcgggttccctgtccaggaagaagcggttggagttggatgacaacttagataccgagcgtcccgtccagaaacgagctcgaagtgggccccagcccagactgcccccctgcctgttgcccctgagccctgcactgccctacaggcactgagtatacctgcaaggtgtaccccgtccaggaagccctggccgtgctggagccctatgcgcggctgcccccgcacaagcatgtggctcggcccactgaggtcctggctggtacccagctcctctacgcctttttcactcggacccatggggacatgcacagcctggtgcgaagccgccaccgtatccctgagcctgaggctgccgtgctcttccgccagatggccaccgccctggcgcactgtcaccagcacggtctggtcctgcgtgatctcaagctgtgtcgctttgtcttcgctgaccgtgagaggaagaagctggtgctggagaacctggaggactcctgcgtgctgactgggccagatgattccctgtgggacaagcacgcgtgcccagcctacgtgggacctgagatactcagctcacgggcctcatactcgggcaaggcagccgatgtctggagcctgggcgtggcgctcttcaccatgctggccggccactaccccttccaggactcggagcctgtcctgctcttcggcaagatccgccgcggggcctacgccttgcctgcaggcctctcggcccctgcccgctgtctggttcgctgcctccttcgtcgggagccagctgaacggctcacagccacaggcatcctcctgcacccctggctgcgacaggacccgatgcccttagccccaacccgatcccatctctgggaggctgcccaggtggtccctgatggactggggctggacgaagccagggaagaggagggagacagagaagtggttctgtatggctaggaccaccctactacacgctcagctgccaacagtggattgagtttgggggtagctccaagccttctcctgcctctgaactgagccaaaccttcagtgccttccagaagggagaaaggcagaagcctgtgtggagtgtgctgtgtacacatctgctttgttccacacacatgcagttcctgcttgggtgcttatcaggtgccaagccctgttctcggtgctgggagtacagcagtgagcaaaggagacaatattccctgctcacagagatgacaaactggcatccttgagctgacaacacttttccatgaccataggtcactgtctacactgggtacactttgtaccagtgtcggcctccactgatgctggtgctcaggcacctctgtccaaggacaatccctttcacaaacaaaccagctgcctttgtatcttgtaccttttcagagaaagggaggtatccctgtgccaaaggctccaggcctctcccctgcaactcaggacccaagcccagctcactctgggaactgtgttcccagcatctctgtcctcttgattaagagattctccttccaggcctaagcctgggatttgggccagagataagaatccaaactatgaggctagttcttgtctaactcaagactgttctggaatgagggtccaggcctgtcaaccatggggcttctgacctgagcaccaaggttgagggacaggattaggcagggtctgtcctgtggccacctggaaagtcccaggtgggactcttctggggacacttggggtccacaatcccaggtccatactctaggttttggataccatgagtatgtatgtttacctgtgcctaataaaggagaattatgaaat

SEQ ID NO: 11671 - protein, 215 aa, Homo sapiens [sequence omitted]

SEQ ID NO: 11672 - DNA, 2167 bp, Homo sapiens
ctgctaggacccgggcagggctggagctgggctgggatcccgagctcggcagcagcgcagcgggccggcccacctgctggtgccctggaggctctgagccccggcggcgcccgggcccacgcggaacgacggggcgagatgcgagccacccctctggctgctcctgcgggttccctgtccaggaagaagcggttggagttggatgacaacttagataccgagcgtcccgtccagaaacgagctcgaagtgggccccagcccagactgcccccctgcctgttgcccctgagccctgcactgccctacaggcactgagtatacctgcaaggtgtaccccgtccaggaagccctggccgtgctggagccctatgcgcggctgcccccgcacaagcatgtggctcggcccactgaggtcctggctggtacccagctcctctacgcctttttcactcggacccatggggacatgcacagcctggtgcgaagccgccaccgtatccctgagcctgaggctgccgtgctcttccgccagatggccaccgccctggcgcactgtcaccagcacggtctggtcctgcgtgatctcaagctgtgtcgctttgtcttcgctgaccgtgagaggaagaagctggtgctggagaacctggaggactcctgcgtgctgactgggccagatgattccctgtgggacaagcacgcgtgcccagcctacgtgggacctgagatactcagctcacgggcctcatactcgggcaaggcagccgatgtctggagcctgggcgtggcgctcttcaccatgctggccggccactaccccttccaggactcggagcctgtcctgctcttcggcaagatccgccgcggggcctacgccttgcctgcaggcctctcggcccctgcccgctgtctggttcgctgcctccttcgtcgggagccagctgaacggctcacagccacaggcatcctcctgcacccctggctgcgacaggacccgatgcccttagccccaacccgatcccatctctgggaggctgcccaggtggtccctgatggactggggctggacgaagccagggaagaggagggagacagagaagtggttctgtatggctaggaccaccctactacacgctcagctgccaacagtggattgagtttgggggtagctccaagccttctcctgcctctgaactgagccaaaccttcagtgccttccagaagggagaaaggcagaagcctgtgtggagtgtgctgtgtacacatctgctttgttccacacacatgcagttcctgcttgggtgcttatcaggtgccaagccctgttctcggtgctgggagtacagcagtgagcaaaggagacaatattccctgctcacagagatgacaaactggcatccttgagctgacaacacttttccatgaccataggtcactgtctacactgggtacactttgtaccagtgtcggcctccactgatgctggtgctcaggcacctctgtccaaggacaatccctttcacaaacaaaccagctgcctttgtatcttgtaccttttcagagaaagggaggtatccctgtgccaaaggctccaggcctctcccctgcaactcaggacccaagcccagctcactctgggaactgtgttcccagcatctctgtcctcttgattaagagattctccttccaggcctaagcctgggatttgggccagagataagaatccaaactatgaggctagttcttgtctaactcaagactgttctggaatgagggtccaggcctgtcaaccatggggcttctgacctgagcaccaaggttgagggacaggattaggcagggtctgtcctgtggccacctggaaagtcccaggtgggactcttctggggacacttggggtccacaatcccaggtccatactctaggttttggataccatgagtatgtatgtttacctgtgcctaataaaggagaattatgaaataattttatttttctctgcaatttcttccatcctttccaacgatctcttaccagtttttcctgccttcaaaactggcccccatggtgaaaggccgtagagttgtgtcttaacctgggctgagtggtttgtgagaacagattacctggagcccagtgggtcttcctgcactccttctgtttcttctgg

SEQ ID NO: 11673 - protein, 215 aa, Homo sapiens [sequence omitted]

SEQ ID NO: 11674 - DNA, 2153 bp, Homo sapiens
cgccccttacacaccttttcacagaccccgccgtcggggcgcggccaggtcagatcccttttgatccgggcctgggctgagtgctccccccgggcttcaggtgacgcggccccgcggagcgtggggtcgcccgagttgggctggggaagccagggacggaggtgtccggccgtcacccctagaggagggcgtgcgggggtctgttttgcatgcgagccacccctctggctgctcctgcgggttccctgtccaggaagaagcggttggagttggatgacaacttagataccgagcgtcccgtccagaaacgagctcgaagtgggccccagcccagactgcccccctgcctgttgcccctgagcccacctactgctccagatcgtgcaactgctgtggccactgcctcccgtcttgggccctatgtcctcctggagcccgaggagggcgggcgggcctaccaggccctgcactgccctacaggcactgagtatacctgcaaggtgtaccccgtccaggaagccctggccgtgctggagccctatgcgcggctgcccccgcacaagcatgtggctcggcccactgaggtcctggctggtacccagctcctctacgcctttttcactcggacccatggggacatgcacagcctggtgcgaagccgccaccgtatccctgagcctgaggctgccgtgctcttccgccagatggccaccgccctggcgcactgtcaccagcacggtctggtcctgcgtgatctcaagctgtgtcgctttgtcttcgctgaccgtgagaggaagaagctggtgctggagaacctggaggactcctgcgtgctgactgggccagatgattccctgtgggacaagcacgcgtgcccagcctacgtgggacctgagatactcagctcacgggcctcatactcgggcaaggcagccgatgtctggagcctgggcgtggcgctcttcaccatgctggccggccactaccccttccaggactcggagcctgtcctgctcttcggcaagatccgccgcggggcctacgccttgcctgcaggcctctcggcccctgcccgctgtctggttcgctgcctccttcgtcgggagccagctgaacggctcacagccacaggcatcctcctgcacccctggctgcgacaggacccgatgcccttagccccaacccgatcccatctctgggaggctgcccaggtggtccctgatggactggggctggacgaagccagggaagaggagggagacagagaagtggttctgtatggctaggaccaccctactacacgctcagctgccaacagtggattgagtttgggggtagctccaagccttctcctgcctctgaactgagccaaaccttcagtgccttccagaagggagaaaggcagaagcctgtgtggagtgtgctgtgtacacatctgctttgttccacacacatgcagttcctgcttgggtgcttatcaggtgccaagccctgttctcggtgctgggagtacagcagtgagcaaaggagacaatattccctgctcacagagatgacaaactggcatccttgagctgacaacacttttccatgaccataggtcactgtctacactgggtacactttgtaccagtgtcggcctccactgatgctggtgctcaggcacctctgtccaaggacaatccctttcacaaacaaaccagctgcctttgtatcttgtaccttttcagagaaagggaggtatccctgtgccaaaggctccaggcctctcccctgcaactcaggacccaagcccagctcactctgggaactgtgttcccagcatctctgtcctcttgattaagagattctccttccaggcctaagcctgggatttgggccagagataagaatccaaactatgaggctagttcttgtctaactcaagactgttctggaatgagggtccaggcctgtcaaccatggggcttctgacctgagcaccaaggttgagggacaggattaggcagggtctgtcctgtggccacctggaaagtcccaggtgggactcttctggggacacttggggtccacaatcccaggtccatactctaggttttggataccatgagtatgtatgtttacctgtgcctaataaaggagaattatgaaat

SEQ ID NO: 11675 - protein, 358 aa, Homo sapiens; identical to SEQ ID NO: 1939

SEQ ID NO: 11676 - DNA, 2339 bp, Homo sapiens
cgccccttacacaccttttcacagaccccgccgtcggggcgcggccaggtcagatcccttttgatccgggcctgggctgagtgctccccccgggcttcaggtgacgcggccccgcggagcgtggggtcgcccgagttgggctggggaagccagggacggaggtgtccggccgtcacccctagaggagggcgtgcgggggtctgttttgcatgcgagccacccctctggctgctcctgcgggttccctgtccaggaagaagcggttggagttggatgacaacttagataccgagcgtcccgtccagaaacgagctcgaagtgggccccagcccagactgcccccctgcctgttgcccctgagcccacctactgctccagatcgtgcaactgctgtggccactgcctcccgtcttgggccctatgtcctcctggagcccgaggagggcgggcgggcctaccaggccctgcactgccctacaggcactgagtatacctgcaaggtgtaccccgtccaggaagccctggccgtgctggagccctatgcgcggctgcccccgcacaagcatgtggctcggcccactgaggtcctggctggtacccagctcctctacgcctttttcactcggacccatggggacatgcacagcctggtgcgaagccgccaccgtatccctgagcctgaggctgccgtgctcttccgccagatggccaccgccctggcgcactgtcaccagcacggtctggtcctgcgtgatctcaagctgtgtcgctttgtcttcgctgaccgtgagaggaagaagctggtgctggagaacctggaggactcctgcgtgctgactgggccagatgattccctgtgggacaagcacgcgtgcccagcctacgtgggacctgagatactcagctcacgggcctcatactcgggcaaggcagccgatgtctggagcctgggcgtggcgctcttcaccatgctggccggccactaccccttccaggactcggagcctgtcctgctcttcggcaagatccgccgcggggcctacgccttgcctgcaggcctctcggcccctgcccgctgtctggttcgctgcctccttcgtcgggagccagctgaacggctcacagccacaggcatcctcctgcacccctggctgcgacaggacccgatgcccttagccccaacccgatcccatctctgggaggctgcccaggtggtccctgatggactggggctggacgaagccagggaagaggagggagacagagaagtggttctgtatggctaggaccaccctactacacgctcagctgccaacagtggattgagtttgggggtagctccaagccttctcctgcctctgaactgagccaaaccttcagtgccttccagaagggagaaaggcagaagcctgtgtggagtgtgctgtgtacacatctgctttgttccacacacatgcagttcctgcttgggtgcttatcaggtgccaagccctgttctcggtgctgggagtacagcagtgagcaaaggagacaatattccctgctcacagagatgacaaactggcatccttgagctgacaacacttttccatgaccataggtcactgtctacactgggtacactttgtaccagtgtcggcctccactgatgctggtgctcaggcacctctgtccaaggacaatccctttcacaaacaaaccagctgcctttgtatcttgtaccttttcagagaaagggaggtatccctgtgccaaaggctccaggcctctcccctgcaactcaggacccaagcccagctcactctgggaactgtgttcccagcatctctgtcctcttgattaagagattctccttccaggcctaagcctgggatttgggccagagataagaatccaaactatgaggctagttcttgtctaactcaagactgttctggaatgagggtccaggcctgtcaaccatggggcttctgacctgagcaccaaggttgagggacaggattaggcagggtctgtcctgtggccacctggaaagtcccaggtgggactcttctggggacacttggggtccacaatcccaggtccatactctaggttttggataccatgagtatgtatgtttacctgtgcctaataaaggagaattatgaaataattttatttttctctgcaatttcttccatcctttccaacgatctcttaccagtttttcctgccttcaaaactggcccccatggtgaaaggccgtagagttgtgtcttaacctgggctgagtggtttgtgagaacagattacctggagcccagtgggtcttcctgcactccttctgtttcttctgg

SEQ ID NO: 11677 - protein, 358 aa, Homo sapiens; identical to SEQ ID NO: 1939

SEQ ID NO: 11678 - DNA, 2025 bp, Homo sapiens
cacagaccccgccgtcggggcgcggccaggtcagatcccttttgatccgggcctgggctgagtgctccccccgggcttcagatgcgagccacccctctggctgctcctgcgggttccctgtccaggaagaagcggttggagttggatgacaacttagataccgagcgtcccgtccagaaacgagctcgaagtgggccccagcccagactgcccccctgcctgttgcccctgagcccacctactgctccagatcgtgcaactgctgtggccactgcctcccgtcttgggccctatgtcctcctggagcccgaggagggcgggcgggcctaccaggccctgcactgccctacaggcactgagtatacctgcaaggtgtaccccgtccaggaagccctggccgtgctggagccctatgcgcggctgcccccgcacaagcatgtggctcggcccactgaggtcctggctggtacccagctcctctacgcctttttcactcggacccatggggacatgcacagcctggtgcgaagccgccaccgtatccctgagcctgaggctgccgtgctcttccgccagatggccaccgccctggcgcactgtcaccagcacggtctggtcctgcgtgatctcaagctgtgtcgctttgtcttcgctgaccgtgagaggaagaagctggtgctggagaacctggaggactcctgcgtgctgactgggccagatgattccctgtgggacaagcacgcgtgcccagcctacgtgggacctgagatactcagctcacgggcctcatactcgggcaaggcagccgatgtctggagcctgggcgtggcgctcttcaccatgctggccggccactaccccttccaggactcggagcctgtcctgctcttcggcaagatccgccgcggggcctacgccttgcctgcaggcctctcggcccctgcccgctgtctggttcgctgcctccttcgtcgggagccagctgaacggctcacagccacaggcatcctcctgcacccctggctgcgacaggacccgatgcccttagccccaacccgatcccatctctgggaggctgcccaggtggtccctgatggactggggctggacgaagccagggaagaggagggagacagagaagtggttctgtatggctaggaccaccctactacacgctcagctgccaacagtggattgagtttgggggtagctccaagccttctcctgcctctgaactgagccaaaccttcagtgccttccagaagggagaaaggcagaagcctgtgtggagtgtgctgtgtacacatctgctttgttccacacacatgcagttcctgcttgggtgcttatcaggtgccaagccctgttctcggtgctgggagtacagcagtgagcaaaggagacaatattccctgctcacagagatgacaaactggcatccttgagctgacaacacttttccatgaccataggtcactgtctacactgggtacactttgtaccagtgtcggcctccactgatgctggtgctcaggcacctctgtccaaggacaatccctttcacaaacaaaccagctgcctttgtatcttgtaccttttcagagaaagggaggtatccctgtgccaaaggctccaggcctctcccctgcaactcaggacccaagcccagctcactctgggaactgtgttcccagcatctctgtcctcttgattaagagattctccttccaggcctaagcctgggatttgggccagagataagaatccaaactatgaggctagttcttgtctaactcaagactgttctggaatgagggtccaggcctgtcaaccatggggcttctgacctgagcaccaaggttgagggacaggattaggcagggtctgtcctgtggccacctggaaagtcccaggtgggactcttctggggacacttggggtccacaatcccaggtccatactctaggttttggataccatgagtatgtatgtttacctgtgcctaataaaggagaattatgaaat

SEQ ID NO: 11679 - protein, 358 aa, Homo sapiens; identical to SEQ ID NO: 1939

SEQ ID NO: 11680 - DNA, 2211 bp, Homo sapiens
cacagaccccgccgtcggggcgcggccaggtcagatcccttttgatccgggcctgggctgagtgctccccccgggcttcagatgcgagccacccctctggctgctcctgcgggttccctgtccaggaagaagcggttggagttggatgacaacttagataccgagcgtcccgtccagaaacgagctcgaagtgggccccagcccagactgcccccctgcctgttgcccctgagcccacctactgctccagatcgtgcaactgctgtggccactgcctcccgtcttgggccctatgtcctcctggagcccgaggagggcgggcgggcctaccaggccctgcactgccctacaggcactgagtatacctgcaaggtgtaccccgtccaggaagccctggccgtgctggagccctatgcgcggctgcccccgcacaagcatgtggctcggcccactgaggtcctggctggtacccagctcctctacgcctttttcactcggacccatggggacatgcacagcctggtgcgaagccgccaccgtatccctgagcctgaggctgccgtgctcttccgccagatggccaccgccctggcgcactgtcaccagcacggtctggtcctgcgtgatctcaagctgtgtcgctttgtcttcgctgaccgtgagaggaagaagctggtgctggagaacctggaggactcctgcgtgctgactgggccagatgattccctgtgggacaagcacgcgtgcccagcctacgtgggacctgagatactcagctcacgggcctcatactcgggcaaggcagccgatgtctggagcctgggcgtggcgctcttcaccatgctggccggccactaccccttccaggactcggagcctgtcctgctcttcggcaagatccgccgcggggcctacgccttgcctgcaggcctctcggcccctgcccgctgtctggttcgctgcctccttcgtcgggagccagctgaacggctcacagccacaggcatcctcctgcacccctggctgcgacaggacccgatgcccttagccccaacccgatcccatctctgggaggctgcccaggtggtccctgatggactggggctggacgaagccagggaagaggagggagacagagaagtggttctgtatggctaggaccaccctactacacgctcagctgccaacagtggattgagtttgggggtagctccaagccttctcctgcctctgaactgagccaaaccttcagtgccttccagaagggagaaaggcagaagcctgtgtggagtgtgctgtgtacacatctgctttgttccacacacatgcagttcctgcttgggtgcttatcaggtgccaagccctgttctcggtgctgggagtacagcagtgagcaaaggagacaatattccctgctcacagagatgacaaactggcatccttgagctgacaacacttttccatgaccataggtcactgtctacactgggtacactttgtaccagtgtcggcctccactgatgctggtgctcaggcacctctgtccaaggacaatccctttcacaaacaaaccagctgcctttgtatcttgtaccttttcagagaaagggaggtatccctgtgccaaaggctccaggcctctcccctgcaactcaggacccaagcccagctcactctgggaactgtgttcccagcatctctgtcctcttgattaagagattctccttccaggcctaagcctgggatttgggccagagataagaatccaaactatgaggctagttcttgtctaactcaagactgttctggaatgagggtccaggcctgtcaaccatggggcttctgacctgagcaccaaggttgagggacaggattaggcagggtctgtcctgtggccacctggaaagtcccaggtgggactcttctggggacacttggggtccacaatcccaggtccatactctaggttttggataccatgagtatgtatgtttacctgtgcctaataaaggagaattatgaaataattttatttttctctgcaatttcttccatcctttccaacgatctcttaccagtttttcctgccttcaaaactggcccccatggtgaaaggccgtagagttgtgtcttaacctgggctgagtggtttgtgagaacagattacctggagcccagtgggtcttcctgcactccttctgtttcttctgg

SEQ ID NO: 11681 - protein, 358 aa, Homo sapiens; identical to SEQ ID NO: 1939

SEQ ID NO: 11682 - DNA, 1403 bp, Homo sapiens
gatgattccctgtgggacaagcacgcgtgcccagcctacgtgggacctgagatactcagctcacgggcctcatactcgggcaaggcagccgatgtctggagcctgggcgtggcgctcttcaccatgctggccggccactaccccttccaggactcggagcctgtcctgctcttcggcaagatccgccgcggggcctacgccttgcctgcaggcctctcggcccctgcccgctgtctggttcgctgcctccttcgtcgggagccagctgaacggctcacagccacaggcatcctcctgcacccctggctgcgacaggacccgatgcccttagccccaacccgatcccatctctgggaggctgcccaggtggtccctgatggactggggctggacgaagccagggaagaggagggagacagagaagtggttctgtatggctaggaccaccctactacacgctcagctgccaacagtggattgagtttgggggtagctccaagccttctcctgcctctgaactgagccaaaccttcagtgccttccagaagggagaaaggcagaagcctgtgtggagtgtgctgtgtacacatctgctttgttccacacacatgcagttcctgcttgggtgcttatcaggtgccaagccctgttctcggtgctgggagtacagcagtgagcaaaggagacaatattccctgctcacagagatgacaaactggcatccttgagctgacaacacttttccatgaccataggtcactgtctacactgggtacactttgtaccagtgtcggcctccactgatgctggtgctcaggcacctctgtccaaggacaatccctttcacaaacaaaccagctgcctttgtatcttgtaccttttcagagaaagggaggtatccctgtgccaaaggctccaggcctctcccctgcaactcaggacccaagcccagctcactctgggaactgtgttcccagcatctctgtcctcttgattaagagattctccttccaggcctaagcctgggatttgggccagagataagaatccaaactatgaggctagttcttgtctaactcaagactgttctggaatgaggtcccaggtgggactcttctggggacacttggggtccacaatcccaggtccatactctaggttttggataccatgagtatgtatgtttacctgtgcctaataaaggagaattatgaaataattttatttttctctgcaatttcttccatcctttccaacgatctcttaccagtttttcctgccttcaaaactggcccccatggtgaaaggccgtagagttgtgtcttaacctgggctgagtggtttgtgagaacagattacctggagcccagtgggtcttcctgcactccttctgtttcttctgg

SEQ ID NO: 11683 - protein, 109 aa, Homo sapiens
MIPCGTSTRAQPTWDLRYSAHGPHTRARQPMSGAWAWRSSPCWPATTPSRTRSLSCSSARSAAGPTPCLQASRPLPAVWFAASFVGSQLNGSQPQASSCTPGCDRTRCP

SEQ ID NO: 11684 - DNA, 687 bp, Homo sapiens
ggacaagcacgcgtgcccagcctacgtgggacctgagatactcagctcacgggcctcatactcgggcaaggcagccgatgtctggagcctgggcgtggcgctcttcaccatgctggccggccactaccccttccaggactcggagcctgtcctgctcttcggcaagatccgccgcggggcctacgccttgcctgcaggcctctcggcccctgcccgctgtctggttcgctgcctccttcgtcgggagccagctgaacggctcacagccacaggcatcctcctgcacccctggctgcgacaggacccgatgcccttagccccaacccgatcccatcttctgggaactgtgttcccagcatctctgtcctcttgattaagagattctccttccaggcctaagcctgggatttgggccagagataagaatccaaactatgaggctagttcttgtctaactcaagactgttctggaatgagggtccaggcctgtcaaccatggggcttctgacctgagcaccaaggttgagggacaggattaggcagggtctgtcctgtggccacctggaaagtcccaggtgggactcttctggggacacttggggtccacaatcccaggtccatactctaggttttggataccatgagtatgtatgtttacctgtgcctaataaaggagaattatgaaat

SEQ ID NO: 11685 - protein, 87 aa, Homo sapiens
MLAGHYPFQDSEPVLLFGKIRRGAYALPAGLSAPARCLVRCLLRREPAERLTATGILLHPWLRQDPMPLAPTRSHLLGTVFPASLSS

SEQ ID NO: 11686 - DNA, 873 bp, Homo sapiens
ggacaagcacgcgtgcccagcctacgtgggacctgagatactcagctcacgggcctcatactcgggcaaggcagccgatgtctggagcctgggcgtggcgctcttcaccatgctggccggccactaccccttccaggactcggagcctgtcctgctcttcggcaagatccgccgcggggcctacgccttgcctgcaggcctctcggcccctgcccgctgtctggttcgctgcctccttcgtcgggagccagctgaacggctcacagccacaggcatcctcctgcacccctggctgcgacaggacccgatgcccttagccccaacccgatcccatcttctgggaactgtgttcccagcatctctgtcctcttgattaagagattctccttccaggcctaagcctgggatttgggccagagataagaatccaaactatgaggctagttcttgtctaactcaagactgttctggaatgagggtccaggcctgtcaaccatggggcttctgacctgagcaccaaggttgagggacaggattaggcagggtctgtcctgtggccacctggaaagtcccaggtgggactcttctggggacacttggggtccacaatcccaggtccatactctaggttttggataccatgagtatgtatgtttacctgtgcctaataaaggagaattatgaaataattttatttttctctgcaatttcttccatcctttccaacgatctcttaccagtttttcctgccttcaaaactggcccccatggtgaaaggccgtagagttgtgtcttaacctgggctgagtggtttgtgagaacagattacctggagcccagtgggtcttcctgcactccttctgtttcttctgg

SEQ ID NO: 11687 - protein, 87 aa, Homo sapiens; identical to SEQ ID NO: 11685

SEQ ID NO: 11688 - DNA, 372 bp, Homo sapiens
aggatctgctgatcgatgggacgaggaacgggagaaaaattaaagcggcgcatgaggcagacgaatgcaaacttcaccaatagctcaacgaaaagacagacggtgaccgctgagaggcagcgtcggatctggtgcggacctgtctcggcgcccgctgccctctcaccgccccacgcaggatcccggcctggtcaccgggcagtgtgatgcttcccgactgccgcggggacagcgaggcacacacagggcttgggccgcgccggaggccacacggcctggctgagttgctcctggtctcccgcctctcccaggcgacccggaggtagcatttcccaggaggcacggtcccccccagggggatgggcacagcca

SEQ ID NO: 11689 - protein, 63 aa, Homo sapiens
MGRGTGEKLKRRMRQTNANFTNSSTKRQTVTAERQRRIWCGPVSAPAALSPPHAGSRPGHRAV

SEQ ID NO: 11690 - DNA, 2783 bp, Homo sapiens
ccccgcctgcggcccagctccttcccgcggctctgcgatgcggcccgcagggtgacccgggcgggagtccggggacccgcgatcagccccggaggacggggtggggtcgccccaaacaggagcgccgggaccgctgggaccccgcactcggcgtccgccgccgccgggtagccgggcagtggaggtcccggatgaggcgacaatttttccggccccccctcccagtcccgccccacttccggggccgccactttcactttctcttccgccgaagccgctccccttgcgaagaactggggcctcccgggaggagagagggctttgccttgaaacccgggacgccaggggcgctcccgcaagtgggggtcctccgggacttggaacgccccggctgggtggtgtccgggcgtcctttccccgcttcttcccacctcggctggtcccgtttcctcctgcgcccagtgcggacctgtctcggcgcccgctgccctctcaccgccccacgcaggatcccggcctggtcaccgggcagtgtgatgcttcccgactgccgcggggacagcgaggcacacacagggcttgggccgcgccggaggccacacggcctggctgagttgctcctggtctcccgcctctcccaggcgacccggaggtagcatttcccaggaggcacggtcccccccagggggatgggcacagccacgccagatggacgagaagaccaagaaagcagaggaaatggccctgagcctcacccgagcagtggcgggcggggatgaacaggtggcaatgaagtgtgccatctggctggcagagcaacgggtgcccctgagtgtgcaactgaagcctgaggtctccccaacgcaggacatcaggctgtgggtgagcgtggaggatgctcagatgcacaccgtcaccatctggctcacagtgcgccctgatatgacagtggcgtctctcaaggacatggtttttctggactatggcttcccaccagtcttgcagcagtgggtgattgggcagcggctggcacgagaccaggagaccctgcactcccatggggtgcggcagaatggggacagtgcctacctctatctgctgtcagcccgcaacacctccctcaaccctcaggagctgcagcgggagcggcagctgcggatgctggaagatctgggcttcaaggacctcacgctgcagccgcggggccctctggagccaggccccccaaagcccggggtcccccaggaacccggacgggggcagccagatgcagtgcctgagcccccaccggtgggctggcagtgccccgggtgcaccttcatcaacaagcccacgcggcctggctgtgagatgtgctgccgggcgcgccccgaggcctaccaggtccccgcctcataccagcccgacgaggaggagcgagcgcgcctggcgggcgaggaggaggcgctgcgtcagtaccagcagcggaagcagcagcagcaggaggggaactacctgcagcacgtccagctggaccagaggagcctggtgctgaacacggagcccgccgagtgccccgtgtgctactcggtgctggcgcccggcgaggccgtggtgctgcgtgagtgtctgcacaccttctgcagggagtgcctgcagggcaccatccgcaacagccaggaggcggaggtctcctgccccttcattgacaacacctactcgtgctcgggcaagctgctggagagggagatcaaggcgctcctgacccctgaggattaccagcgatttctagacctgggcatctccattgctgaaaaccgcagtgccttcagctaccattgcaagaccccagattgcaagggatggtgcttctttgaggatgatgtcaatgagttcacctgccctgtgtgtttccacgtcaactgcctgctctgcaaggccatccatgagcagatgaactgcaaggagtatcaggaggacctggccctgcgggctcagaacgatgtggctgcccggcagacgacagagatgctgaaggtgatgctgcagcagggcgaggccatgcgctgcccccagtgccagatcgtggtacagaagaaggacggctgcgactggatccgctgcaccgtctgccacaccgagatctgctgggtcaccaagggcccacgctggggccctgggggcccaggagacaccagcgggggctgccgctgcagggtaaatgggattccttgccacccaagctgtcagaactgccactgagctaaagatggtggggccacatgctgacccagccccacatccacattctgttagaatgtagctcagggagcttcgtggacggccttgcttgctgtagcgttgtaggggccctgcctgcactgcggttgtccacggtcacatctgccccagtgcctttgtccttcccttggggcttgccggccagacttctctcccctgcggctcccacctctgcctgaccccagccttaaacatagcccctggccagaggccttgctgggtggagcctctgtgtgactccatactcctcccaccacaacactcatctgtcaaacaccaagcactctcagcctccccgccttcagctgtcagctttctggggctaacttctctgcctttgtggttggaggcctgaggcctcttggaactcttgctaacctgttcagagccaggaaggagactgcacagttttgaaagcacagcccgtcaggtccggctctgcgtctccctctctgcagcctgtgtaagctattataattaaaatggttttccgggaagggatg

SEQ ID NO: 11691 - protein, 510 aa, Homo sapiens
MDEKTKKAEEMALSLTRAVAGGDEQVAMKCAIWLAEQRVPLSVQLKPEVSPTQDIRLWVSVEDAQMHTVTIWLTVRPDMTVASLKDMVFLDYGFPPVLQQWVIGQRLARDQETLHSHGVRQNGDSAYLYLLSARNTSLNPQELQRERQLRMLEDLGFKDLTLQPRGPLEPGPPKPGVPQEPGRGQPDAVPEPPPVGWQCPGCTFINKPTRPGCEMCCRARPEAYQVPASYQPDEEERARLAGEEEALRQYQQRKQQQQEGNYLQHVQLDQRSLVLNTEPAECPVCYSVLAPGEAVVLRECLHTFCRECLQGTIRNSQEAEVSCPFIDNTYSCSGKLLEREIKALLTPEDYQRFLDLGISIAENRSAFSYHCKTPDCKGWCFFEDDVNEFTCPVCFHVNCLLCKAIHEQMNCKEYQEDLALRAQNDVAARQTTEMLKVMLQQGEAMRCPQCQIVVQKKDGCDWIRCTVCHTEICWVTKGPRWGPGGPGDTSGGCRCRVNGIPCHPSCQNCH

SEQ ID NO: 11692 - DNA, 948 bp, Homo sapiens
cccgcctgcggcccagctccttcccgcggctctgcgatgcggcccgcagggtgacccgggcgggagtccggggacccgcgatcagccccggaggacggggtggggtcgccccaaacaggagcgccgggaccgctgggaccccgcactcggcgtccgccgccgccgggtagccgggcagtggaggtcccggatgaggcgacaatttttccggccccccctcccagtcccgccccacttccggggccgccactttcactttctcttccgccgaagccgctccccttgcgaagaactggggcctcccgggaggagagagggctttgccttgaaacccgggacgccaggggcgctcccgcaagtgggggtcctccgggacttggaacgccccggctgggtggtgtccgggcgtcctttccccgcttcttcccacctcggctggtcccgtttcctcctgcgcccagtgcggacctgtctcggcgcccgctgccctctcaccgccccacgcaggatcccggcctggtcaccgggcagtgtgatgcttcccgactgccgcggggacagcgaggcacacacagggcttgggccgcgccggaggccacacggcctggctgagttgctcctggtctcccgcctctcccaggcgacccggaggtagcatttcccaggaggcacggtcccccccagggggatgggcacagccacgccagatggacgagaagaccaagaaagcagaggaaatggccctgagcctcacccgagcagtggcgggcggggatgaacaggtggcaatgaagtgtgccatctggctggcagagcaacgggtgcccctgagtgtgcaactgaagcctgaggtctccccaacgcaggacatcaggtgaggagtgcatggctggcctgaacccaagggacagcaggacaggatattcttgcctgtagaacagttcttcc

SEQ ID NO: 11693 - protein, 56 aa, Homo sapiens [sequence omitted]

SEQ ID NO: 11694 - DNA, 1277 bp, Homo sapiens
cccgcctgcggcccagctccttcccgcggctctgcgatgcggcccgcagggtgacccgggcgggagtccggggacccgcgatcagccccggaggacggggtggggtcgccccaaacaggagcgccgggaccgctgggaccccgcactcggcgtccgccgccgccgggtagccgggcagtggaggtcccggatgaggcgacaatttttccggccccccctcccagtcccgccccacttccggggccgccactttcactttctcttccgccgaagccgctccccttgcgaagaactggggcctcccgggaggagagagggctttgccttgaaacccgggacgccaggggcgctcccgcaagtgggggtcctccgggacttggaacgccccggctgggtggtgtccgggcgtcctttccccgcttcttcccacctcggctggtcccgtttcctcctgcgcccagtgcggacctgtctcggcgcccgctgccctctcaccgccccacgcaggatcccggcctggtcaccgggcagtgtgatgcttcccgactgccgcggggacagcgaggcacacacagggcttgggccgcgccggaggccacacggcctggctgagttgctcctggtctcccgcctctcccaggcgacccggaggtagcatttcccaggaggcacggtcccccccagggggatgggcacagccacgccagatggacgagaagaccaagaaagctcctgaaaataaaccctgtgctaactggctcctgctgtactggctttcagcagaggaaatggccctgagcctcacccgagcagtggcgggcggggatgaacaggtggcaatgaagtgtgccatctggctggcagagcaacgggtgcccctgagtgtgcaactgaagcctgaggtctccccaacgcaggacatcagattcctcatggtgcaaaatggccattccagctccatccagccatcacatcacaggaggaagggaagaaagacacccctccacactcttctaaagagcatagctcaaaaattgtacacacttcttccgttaattcctgtggaccagaactgattcccacagctacagttcagcttgaggggagactgtatagccaagatattcagctagaattcaggggttcgcttggtaagggaagggaagagaatggatactgtcggtctgtgctccaggagacttaaactcaatgctgaaacactttgcacaatgcctggcgtgttatgcactcaataataaacattagtgtctatcgtt

SEQ ID NO: 11695 - protein, 122 aa, Homo sapiens
MDEKTKKAPENKPCANWLLLYWLSAEEMALSLTRAVAGGDEQVAMKCAIWLAEQRVPLSVQLKPEVSPTQDIRFLMVQNGHSSSIQPSHHRRKGRKTPLHTLLKSIAQKLYTLLPLIPVDQN

SEQ ID NO: 11696 - DNA, 1081 bp, Homo sapiens
cccgcctgcggcccagctccttcccgcggctctgcgatgcggcccgcagggtgacccgggcgggagtccggggacccgcgatcagccccggaggacggggtggggtcgccccaaacaggagcgccgggaccgctgggaccccgcactcggcgtccgccgccgccgggtagccgggcagtggaggtcccggatgaggcgacaatttttccggccccccctcccagtcccgccccacttccggggccgccactttcactttctcttccgccgaagccgctccccttgcgaagaactggggcctcccgggaggagagagggctttgccttgaaacccgggacgccaggggcgctcccgcaagtgggggtcctccgggacttggaacgccccggctgggtggtgtccgggcgtcctttccccgcttcttcccacctcggctggtcccgtttcctcctgcgcccagtgcggacctgtctcggcgcccgctgccctctcaccgccccacgcaggatcccggcctggtcaccgggcagtgtgatgcttcccgactgccgcggggacagcgaggcacacacagggcttgggccgcgccggaggccacacggcctggctgagttgctcctggtctcccgcctctcccaggcgacccggaggtagcatttcccaggaggcacggtcccccccagggggatgggcacagccacgccagatggacgagaagaccaagaaagattcctcatggtgcaaaatggccattccagctccatccagccatcacatcacaggaggaagggaagaaagacacccctccacactcttctaaagagcatagctcaaaaattgtacacacttcttccgttaattcctgtggaccagaactgattcccacagctacagttcagcttgaggggagactgtatagccaagatattcagctagaattcaggggttcgcttggtaagggaagggaagagaatggatactgtcggtctgtgctccaggagacttaaactcaatgctgaaacactttgcacaatgcctggcgtgttatgcactcaataataaacattagtgtctatcgtt

SEQ ID NO: 11697 - protein, 63 aa, Homo sapiens
MGTATPDGREDQERFLMVQNGHSSSIQPSHHRRKGRKTPLHTLLKSIAQKLYTLLPLIPVDQN

SEQ ID NO: 11698 - DNA, 1227 bp, Homo sapiens
cccgcctgcggcccagctccttcccgcggctctgcgatgcggcccgcagggtgacccgggcgggagtccggggacccgcgatcagccccggaggacggggtggggtcgccccaaacaggagcgccgggaccgctgggaccccgcactcggcgtccgccgccgccgggtagccgggcagtggaggtcccggatgaggcgacaatttttccggccccccctcccagtcccgccccacttccggggccgccactttcactttctcttccgccgaagccgctccccttgcgaagaactggggcctcccgggaggagagagggctttgccttgaaacccgggacgccaggggcgctcccgcaagtgggggtcctccgggacttggaacgccccggctgggtggtgtccgggcgtcctttccccgcttcttcccacctcggctggtcccgtttcctcctgcgcccagtgcggacctgtctcggcgcccgctgccctctcaccgccccacgcaggatcccggcctggtcaccgggcagtgtgatgcttcccgactgccgcggggacagcgaggcacacacagggcttgggccgcgccggaggccacacggcctggctgagttgctcctggtctcccgcctctcccaggcgacccggaggtagcatttcccaggaggcacggtcccccccagggggatgggcacagccacgccagatggacgagaagaccaagaaagcagaggaaatggccctgagcctcacccgagcagtggcgggcggggatgaacaggtggcaatgaagtgtgccatctggctggcagagcaacgggtgcccctgagtgtgcaactgaagcctgaggtctccccaacgcaggacatcagattcctcatggtgcaaaatggccattccagctccatccagccatcacatcacaggaggaagggaagaaagacacccctccacactcttctaaagagcatagctcaaaaattgtacacacttcttccgttaattcctgtggaccagaactgattcccacagctacagttcagcttgaggggagactgtatagccaagatattcagctagaattcaggggttcgcttggtaagggaagggaagagaatggatactgtcggtctgtgctccaggagacttaaactcaatgctgaaacactttgcacaatgcctggcgtgttatgcactcaataataaacattagtgtctatcgtta

SEQ ID NO: 11699 - protein, 105 aa, Homo sapiens
MDEKTKKAEEMALSLTRAVAGGDEQVAMKCAIWLAEQRVPLSVQLKPEVSPTQDIRFLMVQNGHSSSIQPSHHRRKGRKTPLHTLLKSIAQKLYTLLPLIPVDQN

SEQ ID NO: 11700 - DNA, 2637 bp, Homo sapiens
cccgcctgcggcccagctccttcccgcggctctgcgatgcggcccgcagggtgacccgggcgggagtccggggacccgcgatcagccccggaggacggggtggggtcgccccaaacaggagcgccgggaccgctgggaccccgcactcggcgtccgccgccgccgggtagccgggcagtggaggtcccggatgaggcgacaatttttccggccccccctcccagtcccgccccacttccggggccgccactttcactttctcttccgccgaagccgctccccttgcgaagaactggggcctcccgggaggagagagggctttgccttgaaacccgggacgccaggggcgctcccgcaagtgggggtcctccgggacttggaacgccccggctgggtggtgtccgggcgtcctttccccgcttcttcccacctcggctggtcccgtttcctcctgcgcccagtgcggacctgtctcggcgcccgctgccctctcaccgccccacgcaggatcccggcctggtcaccgggcagtgtgatgcttcccgactgccgcggggacagcgaggcacacacagggcttgggccgcgccggaggccacacggcctggctgagttgctcctggtctcccgcctctcccaggcgacccggaggtagcatttcccaggaggcacggtcccccccagggggatgggcacagccacgccagatggacgagaagaccaagaaaggctgtgggtgagcgtggaggatgctcagatgcacaccgtcaccatctggctcacagtgcgccctgatatgacagtggcgtctctcaaggacatggtttttctggactatggcttcccaccagtcttgcagcagtgggtgattgggcagcggctggcacgagaccaggagaccctgcactcccatggggtgcggcagaatggggacagtgcctacctctatctgctgtcagcccgcaacacctccctcaaccctcaggagctgcagcgggagcggcagctgcggatgctggaagatctgggcttcaaggacctcacgctgcagccgcggggccctctggagccaggccccccaaagcccggggtcccccaggaacccggacgggggcagccagatgcagtgcctgagcccccaccggtgggctggcagtgccccgggtgcaccttcatcaacaagcccacgcggcctggctgtgagatgtgctgccgggcgcgccccgaggcctaccaggtccccgcctcataccagcccgacgaggaggagcgagcgcgcctggcgggcgaggaggaggcgctgcgtcagtaccagcagcggaagcagcagcagcaggaggggaactacctgcagcacgtccagctggaccagaggagcctggtgctgaacacggagcccgccgagtgccccgtgtgctactcggtgctggcgcccggcgaggccgtggtgctgcgtgagtgtctgcacaccttctgcagggagtgcctgcagggcaccatccgcaacagccaggaggcggaggtctcctgccccttcattgacaacacctactcgtgctcgggcaagctgctggagagggagatcaaggcgctcctgacccctgaggattaccagcgatttctagacctgggcatctccattgctgaaaaccgcagtgccttcagctaccattgcaagaccccagattgcaagggatggtgcttctttgaggatgatgtcaatgagttcacctgccctgtgtgtttccacgtcaactgcctgctctgcaaggccatccatgagcagatgaactgcaaggagtatcaggaggacctggccctgcgggctcagaacgatgtggctgcccggcagacgacagagatgctgaaggtgatgctgcagcagggcgaggccatgcgctgcccccagtgccagatcgtggtacagaagaaggacggctgcgactggatccgctgcaccgtctgccacaccgagatctgctgggtcaccaagggcccacgctggggccctgggggcccaggagacaccagcgggggctgccgctgcagggtaaatgggattccttgccacccaagctgtcagaactgccactgagctaaagatggtggggccacatgctgacccagccccacatccacattctgttagaatgtagctcagggagcttcgtggacggccttgcttgctgtagcgttgtaggggccctgcctgcactgcggttgtccacggtcacatctgccccagtgcctttgtccttcccttggggcttgccggccagacttctctcccctgcggctcccacctctgcctgaccccagccttaaacatagcccctggccagaggccttgctgggtggagcctctgtgtgactccatactcctcccaccacaacactcatctgtcaaacaccaagcactctcagcctccccgccttcagctgtcagctttctggggctaacttctctgcctttgtggttggaggcctgaggcctcttggaactcttgctaacctgttcagagccaggaaggagactgcacagttttgaaagcacagcccgtcaggtccggctctgcgtctccctctctgcagcctgtgtaagctattataattaaaatggttttccgggaagggatg

SEQ ID NO: 11701 - protein, 468 aa, Homo sapiens; identical to SEQ ID NO: 1941

SEQ ID NO: 11702 - DNA, 2476 bp, Homo sapiens
cccgcctgcggcccagctccttcccgcggctctgcgatgcggcccgcagggtgacccgggcgggagtccggggacccgcgatcagccccggaggacggggtggggtcgccccaaacaggagcgccgggaccgctgggaccccgcactcggcgtccgccgccgccgggtagccgggcagtggaggtcccggatgaggcgacaatttttccggccccccctcccagtcccgccccacttccggggccgccactttcactttctcttccgccgaagccgctccccttgcgaagaactggggcctcccgggaggagagagggctttgccttgaaacccgggacgccaggggcgctcccgcaagtgggggtcctccgggacttggaacgccccggctgggtggtgtccgggcgtcctttccccgcttcttcccacctcggctggtcccgtttcctcctgcgcccagtgcggacctgtctcggcgcccgctgccctctcaccgccccacgcaggatcccggcctggtcaccgggcagtgtgatgcttcccgactgccgcggggacagcgaggcacacacagggcttgggccgcgccggaggccacacggcctggctgagttgctcctggtctcccgcctctcccaggcgacccggaggtagcatttcccaggaggcacggtcccccccagggggatgggcacagccacgccagatggacgagaagaccaagaaaggctgtgggtgagcgtggaggatgctcagatgcacaccgtcaccatctggctcacagtgcgccctgatatgacagtggcgtctctcaaggacatggtttttctggactatggcttcccaccagtcttgcagcagtgggtgattgggcagcggctggcacgagaccaggagaccctgcactcccatggggtgcggcagaatggggacagtgcctacctctatctgctgtcagcccgcaacacctccctcaaccctcaggagctgcagcgggagcggcagctgcggatgctggaagatctgggcttcaaggacctcacgctgcagccgcggggccctctggagccaggccccccaaagcccggggtcccccaggaacccggacgggggcagccagatgcagtgcctgagcccccaccggtgggctggcagtgccccgggtgcaccttcatcaacaagcccacgcggcctggctgtgagatgtgctgccgggcgcgccccgaggcctaccaggtccccgcctcataccagcccgacgaggaggagcgagcgcgcctggcgggcgaggaggaggcgctgcgtcagtaccagcagggagtgcctgcagggcaccatccgcaacagccaggaggcggaggtctcctgccccttcattgacaacacctactcgtgctcgggcaagctgctggagagggagatcaaggcgctcctgacccctgaggattaccagcgatttctagacctgggcatctccattgctgaaaaccgcagtgccttcagctaccattgcaagaccccagattgcaagggatggtgcttctttgaggatgatgtcaatgagttcacctgccctgtgtgtttccacgtcaactgcctgctctgcaaggccatccatgagcagatgaactgcaaggagtatcaggaggacctggccctgcgggctcagaacgatgtggctgcccggcagacgacagagatgctgaaggtgatgctgcagcagggcgaggccatgcgctgcccccagtgccagatcgtggtacagaagaaggacggctgcgactggatccgctgcaccgtctgccacaccgagatctgctgggtcaccaagggcccacgctggggccctgggggcccaggagacaccagcgggggctgccgctgcagggtaaatgggattccttgccacccaagctgtcagaactgccactgagctaaagatggtggggccacatgctgacccagccccacatccacattctgttagaatgtagctcagggagcttcgtggacggccttgcttgctgtagcgttgtaggggccctgcctgcactgcggttgtccacggtcacatctgccccagtgcctttgtccttcccttggggcttgccggccagacttctctcccctgcggctcccacctctgcctgaccccagccttaaacatagcccctggccagaggccttgctgggtggagcctctgtgtgactccatactcctcccaccacaacactcatctgtcaaacaccaagcactctcagcctccccgccttcagctgtcagctttctggggctaacttctctgcctttgtggttggaggcctgaggcctcttggaactcttgctaacctgttcagagccaggaaggagactgcacagttttgaaagcacagcccgtcaggtccggctctgcgtctccctctctgcagcctgtgtaagctattataattaaaatggttttccgggaagggatg

SEQ ID NO: 11703 - protein, 340 aa, Homo sapiens
MGCGRMGTVPTSICCQPATPPSTLRSCSGSGSCGCWKIWASRTSRCSRGALWSQAPQSPGSPRNPDGGSQMQCLSPHRWAGSAPGAPSSTSPRGLAVRCAAGRAPRPTRSPPHTSPTRRSERAWRARRRRCVSTSRECLQGTIRNSQEAEVSCPFIDNTYSCSGKLLEREIKALLTPEDYQRFLDLGISIAENRSAFSYHCKTPDCKGWCFFEDDVNEFTCPVCFHVNCLLCKAIHEQMNCKEYQEDLALRAQNDVAARQTTEMLKVMLQQGEAMRCPQCQIVVQKKDGCDWIRCTVCHTEICWVTKGPRWGPGGPGDTSGGCRCRVNGIPCHPSCQNCH

SEQ ID NO: 11704 - DNA, 2621 bp, Homo sapiens
cccgcctgcggcccagctccttcccgcggctctgcgatgcggcccgcagggtgacccgggcgggagtccggggacccgcgatcagccccggaggacggggtggggtcgccccaaacaggagcgccgggaccgctgggaccccgcactcggcgtccgccgccgccgggtagccgggcagtggaggtcccggatgaggcgacaatttttccggccccccctcccagtcccgccccacttccggggccgccactttcactttctcttccgccgaagccgctccccttgcgaagaactggggcctcccgggaggagagagggctttgccttgaaacccgggacgccaggggcgctcccgcaagtgggggtcctccgggacttggaacgccccggctgggtggtgtccgggcgtcctttccccgcttcttcccacctcggctggtcccgtttcctcctgcgcccagtgcggacctgtctcggcgcccgctgccctctcaccgccccacgcaggatcccggcctggtcaccgggcagtgtgatgcttcccgactgccgcggggacagcgaggcacacacagggcttgggccgcgccggaggccacacggcctggctgagttgctcctggtctcccgcctctcccaggcgacccggaggtagcatttcccaggaggcacggtcccccccagggggatgggcacagccacgccagatggacgagaagaccaagaaagcagaggaaatggccctgagcctcacccgagcagtggcgggcggggatgaacaggtggcaatgaagtgtgccatctggctggcagagcaacgggtgcccctgagtgtgcaactgaagcctgaggtctccccaacgcaggacatcaggctgtgggtgagcgtggaggatgctcagatgcacaccgtcaccatctggctcacagtgcgccctgatatgacagtggcgtctctcaaggacatggtttttctggactatggcttcccaccagtcttgcagcagtgggtgattgggcagcggctggcacgagaccaggagaccctgcactcccatggggtgcggcagaatggggacagtgcctacctctatctgctgtcagcccgcaacacctccctcaaccctcaggagctgcagcgggagcggcagctgcggatgctggaagatctgggcttcaaggacctcacgctgcagccgcggggccctctggagccaggccccccaaagcccggggtcccccaggaacccggacgggggcagccagatgcagtgcctgagcccccaccggtgggctggcagtgccccgggtgcaccttcatcaacaagcccacgcggcctggctgtgagatgtgctgccgggcgcgccccgaggcctaccaggtccccgcctcataccagcccgacgaggaggagcgagcgcgcctggcgggcgaggaggaggcgctgcgtcagtaccagcagggagtgcctgcagggcaccatccgcaacagccaggaggcggaggtctcctgccccttcattgacaacacctactcgtgctcgggcaagctgctggagagggagatcaaggcgctcctgacccctgaggattaccagcgatttctagacctgggcatctccattgctgaaaaccgcagtgccttcagctaccattgcaagaccccagattgcaagggatggtgcttctttgaggatgatgtcaatgagttcacctgccctgtgtgtttccacgtcaactgcctgctctgcaaggccatccatgagcagatgaactgcaaggagtatcaggaggacctggccctgcgggctcagaacgatgtggctgcccggcagacgacagagatgctgaaggtgatgctgcagcagggcgaggccatgcgctgcccccagtgccagatcgtggtacagaagaaggacggctgcgactggatccgctgcaccgtctgccacaccgagatctgctgggtcaccaagggcccacgctggggccctgggggcccaggagacaccagcgggggctgccgctgcagggtaaatgggattccttgccacccaagctgtcagaactgccactgagctaaagatggtggggccacatgctgacccagccccacatccacattctgttagaatgtagctcagggagcttcgtggacggccttgcttgctgtagcgttgtaggggccctgcctgcactgcggttgtccacggtcacatctgccccagtgcctttgtccttcccttggggcttgccggccagacttctctcccctgcggctcccacctctgcctgaccccagccttaaacatagcccctggccagaggccttgctgggtggagcctctgtgtgactccatactcctcccaccacaacactcatctgtcaaacaccaagcactctcagcctccccgccttcagctgtcagctttctggggctaacttctctgcctttgtggttggaggcctgaggcctcttggaactcttgctaacctgttcagagccaggaaggagactgcacagttttgaaagcacagcccgtcaggtccggctctgcgtctccctctctgcagcctgtgtaagctattataattaaaatggttttccgggaagggatg

SEQ ID NO: 11705 - protein, 340 aa, Homo sapiens; identical to SEQ ID NO: 11703

SEQ ID NO: 11706 - DNA, 508 bp, Homo sapiens
cccgcggctctgcgatgcggcccgcagggtgacccgggcgggagtccggggacccgcgatcagccccggaggacggggtggggtcgccccaaacaggagcgccgggaccgctgggaccccgcactcggcgtccgccgccgccgggtagccgggcagtggaggtcccggatgaggcgacaatttttccggccccccctcccagtcccgccccacttccggggccgccactttcactttcttcttctaaagagcatagctcaaaaattgtacacacttcttccgttaattcctgtggaccagaactgattcccacagctacagttcagcttgaggggagactgtatagccaagatattcagctagaattcaggggttcgcttggtaagggaagggaagagaatggatactgtcggtctgtgctccaggagacttaaactcaatgctgaaacactttgcacaatgcctggcgtgttatgcactcaataataaacattagtgtctatcgtta

SEQ ID NO: 11707 - protein, 45 aa, Homo sapiens
MRRQFFRPPLPVPPHFRGRHFHFLLLKSIAQKLYTLLPLIPVDQN

SEQ ID NO: 11708 - DNA, 383 bp, Homo sapiens
cagcagaggaaatggccctgagcctcacccgagcagtggcgggcggggatgaacaggtggcaatgaagtgtgccatctggctggcagagcaacgggtgcccctgagtgtgcaactgaagcctgaggtctccccaacgcaggacatcaggtgaggagtgcatggctggcctgaacccaagggacagcaggacaggatattcttgcctgtagaacagttcttcctaatggcacgttctggttcacctctcagtgtgtcctcattttaaaaatcagaccgtaacagtagctatctcatagggttgttaggaggtgtactgtattaggatgttaggccttatacaacagaagaaaacggaacagtgacgtaaacaaatttgatggca

SEQ ID NO: 11709 - protein, 46 aa, Homo sapiens [sequence omitted]

SEQ ID NO: 11710 - DNA, 417 bp, Homo sapiens
ctgagatagactctaggggccagatggatgcagggagcccagcgaggaggctcctggagtcacccaggtgggggatgtggggcctggaccagagaatcagagcggcagtatggaggcagggtggaggccttggtgatgggttggtgagagggatgggaaggaaggagatattgaggagaagtccacctggggtgactgagtgaggcccctggggtcaggccttgccatgtgagggatggagtccccagtgaagggggttcctatgatcctaactcttttcccctcccctcccctagggagtgcctgcagggcaccatccgcaacagccaggaggcggaggtctcctgccccttcattgacaacacctactctctgcagcctgtgtaagctattataattaaaatggttttccgggaa

SEQ ID NO: 11711 - protein, 53 aa, Homo sapiens
MESPVKGVPMILTLFPSPPLGSACRAPSATARRRRSPAPSLTTPTLCSLCKLL

SEQ ID NO: 11712 - DNA, 540 bp, Homo sapiens
agcccagcgaggaggctcctggagtcacccaggtgggggatgtggggcctggaccagagaatcagagcggcagtatggaggcagggtggaggccttggtgatgggttggtgagagggatgggaaggaaggagatattgaggagaagtccacctggggtgactgagtgaggcccctggggtcaggccttgccatgtgagggatggagtccccagtgaagggggttcctatgatcctaactcttttcccctcccctcccctagggagtgcctgcagggcaccatccgcaacagccaggaggcggaggtctcctgccccttcattgacaacacctactcgtgctcgggcaagctgctggagagggagatcaaggcgctcctgacccctgaggattaccagcgatttctagacctgggcatctccattgctgaaaaccgcagtgccttcagctaccattgcaagaccccagattgcaagggatggtgcttctttgaggatgatgtcaatgagttcacctgccctgtgtgtttccacgtcaactg

SEQ ID NO: 11713 - protein, 59 aa, Homo sapiens
MESPVKGVPMILTLFPSPPLGSACRAPSATARRRRSPAPSLTTPTRARASCWRGRSRRS

SEQ ID NO: 11714 - DNA, 576 bp, Homo sapiens
ctcggctcagtggttctgcctgggcctttctgcctccagggccggggaggctgcctgagtgtgcccctcatcctctgcgacggttgactgccctgagccaatgcaggcagtgccgaaggacccagtccactcacacattctcagacagctctgcgcacagtgactggggccagctcttgagtcctggcatccaacggcaggtggcagtgcctttccagttgctagaacaggcccttccccacaaaatcacaggccttcagcagcagaggcgccctctgcctgctatgatgatggtcacgtcacagcgtggacaatgtgttgggcatcaaataccagatctcaaaaggggaaggagggtgggtcacagagcggaggaaagacttagagaatgaacatcccaggaccctgtcttagtaacctccgaccagcacagagtgggttctagtaaatactgctgaatcgatactgtgccatcttgcttgagacgagaaaataggatggacaaccccacccctcaactgcagcagcttcgttccttcttgaactatctacctgccaaccctagatgcctgctga

SEQ ID NO: 11715 - protein, 35 aa, Homo sapiens
MMMVTSQRGQCVGHQIPDLKRGRRVGHRAEERLRE

SEQ ID NO: 11716 - DNA, 5193 bp, Homo sapiens
atccctggtagaaaaattatctacccaccacctcaggtaccagtagagaggaacacaagacgacgggcatcactcctcagccgtcctggggataactcactggcctgttttctggtcagcttttttaggagtttgagccctcgccaccctgagccctgatctaagtgtttggtaaccaggcttattgaattgtctccctccagggattttatggatccaacaatggacaacaccaagcatatattaaactatctgatgcccatcattgaccaggtgaatccagagctccatgacttcatgcagaggtacatatgtgtctgcatttctgtgtgcatgcatacacacgcccacacccccccacacctgaaacactcctcacaagccgagcgcagtttcctcattgtcttgggtggatttgttaagttctccccagttgttccagtcaccagcaatctgggtaattcagttcttggagcatttttggggactgtgctctttgggggacatagcccatcccttgagtttacatctagtggggagaggtggataaggtatgtatgccaaggtaagatgttgaggttattgccacaagagaaacacaaagtcctgtgggatccagtggcgagaaggggaaggccaacaatgggttgttttatttcccaagtaccaaagagaagaaatatttttttgcaaatcccatgtgatgttttgtttcttctctgtttagttggaaatgtgttcttggccaatgcctctttttttaaaattttttaaaaggtaatggctatgccttctttttttttgagatggagtattttctcttgttgcccaggctggagtgcaatggcatgatcttggctcactgcaacctctatcttccgggttcaagcgattcttctgcctcagcctcaagtagctgggattacaggcatgcgccaccacgctcggctaattttgtatttttagtagagacagggtttctccatgttggtcaggctggtctcgagctcccgatgtcaggtgatccgcccgctttggcctcccaaagtgctgagattataggcgtgactcaccgtgtctggcagctacatcttaagatatttcagttgtctcatgttaacagaaaaattaatgcagtcatgttttcaggcttgggaatatgtacctgtgccccccagaagggtaagacttagtcagaaggagaatcatggcgtagttctctgaaaacaactgcttctcgttcctgtagttgacatttgttggccagtaggcgagcacccagtgagataaagcagccaggaccctgttgtggtgttagtgttgtggtacaccttaaagactttgtattaaatattttgtaaggagaagatgctgaattcctaggtaactgaattttccagaaatcttattcctaaatgcttccttctcaccagcgctataaggcccagagagagggaagggatggcccacaggacctgacacctgcctttcctttgtttctagtgctgaggtagggaccatctttgccctcagctggctcatcacctggtttgggcatgtcctgtctgacttcaggcacgtcgtgcggttatatgacttcttcctggcctgccacccactgatgccgatttactttgcagccgtgattgtgttgtatcgcgagcaggaagtcctggactgtgactgtgacatggcctcggtccaccacctgttgtcccagatccctcaggacttgccctatgagacactgatcagcagagcaggagacctttttgttcagtttcccccatccgaacttgctcgggaggccgctgcccaacagcaagctgagaggacggcagcctctactttcaaagactttgagctggcatcagcccagcagaggcctgatatggtgctgcggcagcggtttcggggacttctgcggcctgaagatcgaacaaaagatgtcctgaccaagccaaggaccaaccgctttgtgaaattggcagtgatggggctgacagtggcacttggagcggctgcactggctgtggtgaaaagtgccctggaatgggcccctaagtttcagctgcagctgtttccctgaaagccagagaagaccttcctcttacatcacattaaggtctcacccttccatggaaggattgggaggggtggaatttcctttattaaaagggtttctgtccagagttttttattcctgccaccctgccctgcccgtttgtgtttgcctttacttcagaggccagtagcagagcctacctgacacagaggggacctgggggcctggcacagaatcttatgcctctcccagtgggcttttggatgggctctctgccacctccctggtgttggaggaagtgggtttctgaagcttgcagctgcttttgcaacctgctgggcctgggctgccctagttaccgggaacctcctagtcaccccatagaaggtgaactggaacatgggatgccctcttactgctcctgcttgcctgcatcagatggacacagaaggagggggctgctgctgaaggagtcaggcttgggatggagagcaagaggccaaaggactcgtctgggagcatgatcggcccctcttactagcagctccatcagctgatcagaaatcagagacagaagggaactaggttactcgttaaatcctacctattttcagcctagaaatcacatgggcgtttccagtcaagtgggaaggaagctcatttttagggcctagacctagactagttttgcctgcctttttttcctccctgctttcttctacaagccacacaacattgcttataaaaggtacttttattactatttttagaatatatacaccccatatgtaaattaccctcacttttaaagtaataatagttccttcacggaaaaaaaaatagttctcatcagaaggatgagcttctaagatcctgaattttactttctacttgattaacattttcgctttagccagagttgctatttgcaaacagctttccacttccaaagtgccactttctgaccggtttttcttcctgttttcctcaaatcatcctactcccaaataggcacccactcactaccttggcgtcgttttttgggtctgacttgactcgtcaactgctggtctctcccacctggttggaaatgtcgttggaaacttgcaaagactctccagaccttagggaacaagaggcatcactcagtccttctgggacagcttccctgtaagcaaagccaggtttgttttagattcactctggcctgaaaaaaaaagtgccttttgctgctttaaagaattggggtatatggtatgaagcagccatgtacttgtattttcctggtctttcctgggcactcttctctcttggcagatgttttcttaaagtgaacacaccagaagcactctaccccaccatatccagtcctctttgcatgcctgttgtgtgcagggtggagggtgtcccacgtgccagagcagctgggagccctgtccgctgagttacactaagcactttatttttatttattttattattattttcttttttctgagatggagtctcactctgttgcccaggctggagtgcagtggtgcagtctcagctcactgcaacctccgcctcccaagttcaggcaattctcgctgcctcagcctcccgagtagctgggactacaggcacctgctaccacgcctgactaatttttgtatttttagtagagatggggtttcgccacgttggccaggctggtctcgaactcctgacctcaggtgatctgcccgtctcgtcctcccaaagtgctgggattacaggtgtgagccaccacgcccagccaccactacgcactttaaaaccaaaaaaagctcaaagggatggatcattgtccatggctcaggagccccactgtggggtaagtgtgatgtcgatggattaatttagacagtggtgtattcatcagggcaaaggaaattcttccagaggtgatgatgcggcagatattcccagtgctctcccaaagcaagctggccctcttgtcatcctctcagtgggcggcaccagctgcccctccttccacaagtactcaagcctgtttgtaaatactgaaggaattgatggggttgaggaaaggaggtgcatgtgaccagggtcccaaggccacagcttttcagatcctaggaagcaagtggcatttgcttgagttgtggcctcggaaggagaatgtttatctgttttctaactttgctgacaccaggattctccctgtcattgagaagaaagcattatctaattaccttcaggtggtttacttattctgtaaagaatatgtgtaaatattttgtacagagccctgtatcaaataaacagccatatgtggttactaatcacctcttctgtcattccgtccttggccaccgctcagtgggaatggtctctgatctggatgctcccaccttccatgtcaggcccagaactgtgccatggtctgtggactcctggtcagccttgactggctaggagaccttgggcagtacctacagtcttgctgtttctgtttcatctgcaagaattatgacccacacactccagctgcagcccagggcactgtgatattttatacgtgtgtagatgtttttgtccacagttcctggttcatcactcccataaccctttgttataatgttgggacactgcaggcctcagaaaacggaatctctgtctgtgaccttctcctgccccatttcacttgctcaacaccagactttaatctgactgtagctcataagaccctcattccagagagggtgctgccccatacccggaaggaggaacgctgcacagagaggccaagaagcatctggacagacaggccttgctgggtttagaccttatgctttttgtccagtttcatctcaacacagctgccatgcttcagccatgcctatccaatgacgtctccataaaaggcccaggaacacgggagcttctgaagagctgaacatgtggagggaggggaacgagaacttgtccatgtgccaagagggtggcgcacccccactccatggggacagaagctccagcatttgcccaggacccgtccagacctcaccctgtgtgtatcttcatctggctgtttacttatttgtatccttttctaataatgtttgtaataaactggtaaacat

SEQ ID NO: 11717 - protein, 155 aa, Homo sapiens
MPIYFAAVIVLYREQEVLDCDCDMASVHHLLSQIPQDLPYETLISRAGDLFVQFPPSELAREAAAQQQAERTAASTFKDFELASAQQRPDMVLRQRFRGLLRPEDRTKDVLTKPRTNRFVKLAVMGLTVALGAAALAVVKSALEWAPKFQLQLFP

SEQ ID NO: 11718 - DNA, 2022 bp, Homo sapiens
gcgccgctggccgacggaggggagcctgccgatgccgagcgggtgctacgtcccgcggtcggagccgcgtcttctcccggctccgccaccagccggggctcgggtgggggcccggggccccggggcatggccctccggagtgcgcagggcgacggccccacctccggccactgggacggcggcgcggagaaggcagactttaacgccaaaaggaaaaagaaagtggcagagatacaccaggctctgaacagtgatcccactgatgtggctgcccttagacgcatggctatcagtgaaggagggctcctgactgatgagatcagacgaaaagtgtggcccaagctcctcaatgtcaatgccaatgacccacctcctatatcagggaagaacctacggcagatgagcaaggactaccaacaagtgttgctggacgtccggcggtcattgcggcggttccctcctggcatgccagaggaacagagagaagggctccaggaagaactgattgacatcatcctcctcatcttggagcgcaaccctcagctgcactactaccagggctaccatgacattgtggtcacatttctgctggtggtaggcgagaggctggcaacatccctggtagaaaaattatctacccaccacctcagggattttatggatccaacaatggacaacaccaagcatatattaaactatctgatgcccatcattgaccaggtgaatccagagctccatgacttcatgcagagtgctgaggtagggaccatctttgccctcagctggctcatcacctggtttgggcatgtcctgtctgacttcaggcacgtcgtgcggttatatgacttcttcctggcctgccacccactgatgccgatttactttgcagccgtgattgtgttgtatcgcgagcaggaagtcctggactgtgactgtgacatggcctcggtccaccacctgttgtcccagatccctcaggacttgccctatgagacactgatcagcagagcaggagacctttttgttcagtttcccccatccgaacttgctcgggaggccgctgcccaacagcaagctgagaggacggcagcctctactttcaaagactttgagctggcatcagcccagcagaggcctgatatggtgctgcggcagcggtttcggggacttctgcggcctgaagatcgaacaaaagatgtcctgaccaagccaaggaccaaccgctttgtgaaattggcagtgatggggctgacagtggcacttggagcggctgcactggctgtggtgaaaagtgccctggaatgggcccctaagtttcagctgcagctgtttccctgaaagccagagaagaccttcctcttacatcacattaaggcacccactcactaccttggcgtcgttttttgggtctgacttgactcgtcaactgctggtctctcccacctggttggaaatgtcgttggaaacttgcaaagactctccagaccttagggaacaagaggcatcactcagtccttctgggacagcttccctgcctcagaaaacggaatctctgtctgtgaccttctcctgccccatttcacttgctcaacaccagactttaatctgactgtagctcataagaccctcattccagagagggtgctgccccatacccggaaggaggaacgctgcacagagaggccaagaagcatctggacagacaggccttgctgggtttagaccttatgctttttgtccagtttcatctcaacacagctgccatgcttcagccatgcctatccaatgacgtctccataaaaggcccaggaacacgggagcttctgaagagctgaacatgtggagggaggggaacgagaacttgtccatgtgccaagagggtggcgcacccccactccatggggacagaagctccagcatttgcccaggacccgtccagacctcaccctgtgtgtatcttcatctggctgtttacttatttgtatccttttctaataatgtttgtaataaactggtaaacat

SEQ ID NO: 11719 - protein, 403 aa, Homo sapiens; identical to SEQ ID NO: 1945

SEQ ID NO: 11720 - DNA, 4020 bp, Homo sapiens
gtttccttatttatcttttagggtatgctttttatttgagaaggggtggggtaaatatgggcaagaggtgagttttgctcttacctgcaatcctttgtccggtttagtttgggcccttacattagctgctttctctctctgagtatgtgtttgtaactgaaagctaatggtgtggagaagctgtgcatgtgccattcttctaacctggctcataaggccaaggcatttttactgctggcagcactagctccagcagtaaaagaactccctgaaagaactcctgagacaggcttccctatttccagctataatacatctttggatcaagaggatcagtttttcctgtaacgtttgctttggtttaaaggggaccgtgtaactttaaaatttttttatttttatataatttcatacttactgaaaggttgtaaaaataggacaaagaattccccagataccttttacccagatttccttttgttttcacattttactacatttgctttttttttcttggagacggagtcttgctctctcgcccgggctgcagtgcagtggcacgatctcagctcactgcaagctctggttcctgggttcatgccattctcctgcctcagcctcccaagtagctgggactacaggcgcctgccaccacgcccagctaattttttgtattttttattagagacggggtttttcaccatattagccaggatggtctcgatctcctgacctcgtgatccacctgcctctgcctcccaaagtgctgggattacaggcgtgagccaccgcgcctggcctacatttgcttttttagctgctttctgtctttccttcgctttacacatagacatacactttttctctgaactatttaagagtaagttgcaaacatgacatctttttaccccaagtgtttcaggacatatttcctaaatataaggctctcatgtaatcacagtacactgagcaacatcagtaacaacactgaaaaatagttaactaattaatccacagattttattcacatttcaccatttcttcgagtaatgtgcttcactggaaaaggaaatatagatttatgcgtttctcatgctgttgtcctatatctttagccatttttaatctggaacagttcctttgtattgtatgagagttaaatttctcttcctttggggatattgggtatttcttcattgtgagattgaggtctgtgcgctgttgatagaaatcctgcagacatgatgctgagctctgtcagtgcatcacctcgggaggcagaggccgtctgtggctcccatagttgaaattctgcagttaaatactgtgtcccagcagtattaactgcagcaacttggttagggtggcatctgcagcttcccctactggaaagctagcagctgccttttcctgtatgccaggtggtatcaacagtggatcttgatatgcgttgccaaattatttgtaattcattttccttttttctctgaaaattcattgctggccttcttcgacctccttgttaactaggctgcttggtatgttcaaaggcatctctgttcctgtccccaggcatgccagaggaacagagagaagggctccaggaagaactgattgacatcatcctcctcatcttggagcgcaaccctcagctgcactactaccagggctaccatgacattgtggtcacatttctgctggtggtaggcgagaggctggcaacatccctggtagaaaaattatctacccaccacctcaggtaccagtagagaggaacacaagacgacgggcatcactcctcagccgtcctggggataactcactggcctgttttctggtcagcttttttaggagtttgagccctcgccaccctgagccctgatctaagtgtttggtaaccaggcttattgaattgtctccctccagggattttatggatccaacaatggacaacaccaagcatatattaaactatctgatgcccatcattgaccaggtgaatccagagctccatgacttcatgcagaggtacatatgtgtctgcatttctgtgtgcatgcatacacacgcccacacccccccacacctgaaacactcctcacaagccgagcgcagtttcctcattgtcttgggtggatttgttaagttctccccagttgttccagtcaccagcaatctgggtaattcagttcttggagcatttttggggactgtgctctttgggggacatagcccatcccttgagtttacatctagtggggagaggtggataaggtatgtatgccaaggtaagatgttgaggttattgccacaagagaaacacaaagtcctgtgggatccagtggcgagaaggggaaggccaacaatgggttgttttatttcccaagtaccaaagagaagaaatatttttttgcaaatcccatgtgatgttttgtttcttctctgtttagttggaaatgtgttcttggccaatgcctctttttttaaaattttttaaaaggtaatggctatgccttctttttttttgagatggagtattttctcttgttgcccaggctggagtgcaatggcatgatcttggctcactgcaacctctatcttccgggttcaagcgattcttctgcctcagcctcaagtagctgggattacaggtgtgagccaccacgcccagccaccactacgcactttaaaaccaaaaaaagctcaaagggatggatcattgtccatggctcaggagccccactgtggggtaagtgtgatgtcgatggattaatttagacagtggtgtattcatcagggcaaaggaaattcttccagaggtgatgatgcggcagatattcccagtgctctcccaaagcaagctggccctcttgtcatcctctcagtgggcggcaccagctgcccctccttccacaagtactcaagcctgtttgtaaatactgaaggaattgatggggttgaggaaaggaggtgcatgtgaccagggtcccaaggccacagcttttcagatcctaggaagcaagtggcatttgcttgagttgtggcctcggaaggagaatgtttatctgttttctaactttgctgacaccaggattctccctgtcattgagaagaaagcattatctaattaccttcaggtggtttacttattctgtaaagaatatgtgtaaatattttgtacagagccctgtatcaaataaacagccatatgtggttactaatcacctcttctgtcattccgtccttggccaccgctcagtgggaatggtctctgatctggatgctcccaccttccatgtcaggcccagaactgtgccatggtctgtggactcctggtcagccttgactggctaggagaccttgggcagtacctacagtcttgctgtttctgtttcatctgcaagaattatgacccacacactccagctgcagcccagggcactgtgatattttatacgtgtgtagatgtttttgtccacagttcctggttcatcactcccataaccctttgttataatgttgggacactgcaggcctcagaaaacggaatctctgtctgtgaccttctcctgccccatttcacttgctcaacaccagactttaatctgactgtagctcataagaccctcattccagagagggtgctgccccatacccggaaggaggaacgctgcacagagaggccaagaagcatctggacagacaggccttgctgggtttagaccttatgctttttgtccagtttcatctcaacacagctgccatgcttcagccatgcctatccaatgacgtctccataaaaggcccaggaacacgggagcttctgaagagctgaacatgtggagggaggggaacgagaacttgtccatgtgccaagagggtggcgcacccccactccatggggacagaagctccagcatttgcccaggacccgtccagacctcaccctgtgtgtatcttcatctggctgtttacttatttgtatccttttctaataatgtttgtaataaactggtaaac

SEQ ID NO: 11721 - protein, 82 aa, Homo sapiens
MEYFLLLPRLECNGMILAHCNLYLPGSSDSSASASSSWDYRCEPPRPATTTHFKTKKSSKGWIIVHGSGAPLWGKCDVDGLI

SEQ ID NO: 11722 - DNA, 4621 bp, Homo sapiens
gcctgcgcgcctgcgcgccgctggccgacggaggggagcctgccgatgccgagcgggtgctacgtcccgcggtcggagccgcgtcttctcccggctccgccaccagccggggctcgggtgggggcccggggccccggggcatggccctccggagtgcgcagggcgacggccccacctccggccactgggacggcggcgcggagaaggcagactttaacgccaaaaggaaaaagaaagtggcagagatacaccaggctctgaacagtgatcccactgatgtggctgcccttagacgcatggctatcagtgaaggagggctcctgactgatgagatcagacgaaaagtgtggcccaagctcctcaatgtcaatgccaatgacccacctcctatatcagggaagaacctacggcagatgagcaaggactaccaacaagtgttgctggacgtccggcggtcattgcggcggttccctcctggcatgccagaggaacagagagaagggctccaggaagaactgattgacatcatcctcctcatcttggagcgcaaccctcagctgcactactaccagggctaccatgacattgtggtcacatttctgctggtggtaggcgagaggctggcaacatccctggtagaaaaattatctacccaccacctcaggtaccagtagagaggaacacaagacgacgggcatcactcctcagccgtcctggggataactcactggcctgttttctggtcagcttttttaggagtttgagccctcgccaccctgagccctgatctaagtgtttggtaaccaggcttattgaattgtctccctccagggattttatggatccaacaatggacaacaccaagcatatattaaactatctgatgcccatcattgaccaggtgaatccagagctccatgacttcatgcagagtgctgaggtagggaccatctttgccctcagctggctcatcacctggtttgggcatgtcctgtctgacttcaggcacgtcgtgcggttatatgacttcttcctggcctgccacccactgatgccgatttactttgcagccgtgattgtgttgtatcgcgagcaggaagtcctggactgtgactgtgacatggcctcggtccaccacctgttgtcccagatccctcaggacttgccctatgagacactgatcagcagagcaggagacctttttgttcagtttcccccatccgaacttgctcgggaggccgctgcccaacagcaagctgagaggacggcagcctctactttcaaagactttgagctggcatcagcccagcagaggcctgatatggtgctgcggcagcggtttcggggacttctgcggcctgaagatcgaacaaaagatgtcctgaccaagccaaggaccaaccgctttgtgaaattggcagtgatggggctgacagtggcacttggagcggctgcactggctgtggtgaaaagtgccctggaatgggcccctaagtttcagctgcagctgtttccctgaaagccagagaagaccttcctcttacatcacattaaggtctcacccttccatggaaggattgggaggggtggaatttcctttattaaaagggtttctgtccagagttttttattcctgccaccctgccctgcccgtttgtgtttgcctttacttcagaggccagtagcagagcctacctgacacagaggggacctgggggcctggcacagaatcttatgcctctcccagtgggcttttggatgggctctctgccacctccctggtgttggaggaagtgggtttctgaagcttgcagctgcttttgcaacctgctgggcctgggctgccctagttaccgggaacctcctagtcaccccatagaaggtgaactggaacatgggatgccctcttactgctcctgcttgcctgcatcagatggacacagaaggagggggctgctgctgaaggagtcaggcttgggatggagagcaagaggccaaaggactcgtctgggagcatgatcggcccctcttactagcagctccatcagctgatcagaaatcagagacagaagggaactaggttactcgttaaatcctacctattttcagcctagaaatcacatgggcgtttccagtcaagtgggaaggaagctcatttttagggcctagacctagactagttttgcctgcctttttttcctccctgctttcttctacaagccacacaacattgcttataaaaggtacttttattactatttttagaatatatacaccccatatgtaaattaccctcacttttaaagtaataatagttccttcacggaaaaaaaaatagttctcatcagaaggatgagcttctaagatcctgaattttactttctacttgattaacattttcgctttagccagagttgctatttgcaaacagctttccacttccaaagtgccactttctgaccggtttttcttcctgttttcctcaaatcatcctactcccaaataggcacccactcactaccttggcgtcgttttttgggtctgacttgactcgtcaactgctggtctctcccacctggttggaaatgtcgttggaaacttgcaaagactctccagaccttagggaacaagaggcatcactcagtccttctgggacagcttccctgtaagcaaagccaggtttgttttagattcactctggcctgaaaaaaaaagtgccttttgctgctttaaagaattggggtatatggtatgaagcagccatgtacttgtattttcctggtctttcctgggcactcttctctcttggcagatgttttcttaaagtgaacacaccagaagcactctaccccaccatatccagtcctctttgcatgcctgttgtgtgcagggtggagggtgtcccacgtgccagagcagctgggagccctgtccgctgagttacactaagcactttatttttatttattttattattattttcttttttctgagatggagtctcactctgttgcccaggctggagtgcagtggtgcagtctcagctcactgcaacctccgcctcccaagttcaggcaattctcgctgcctcagcctcccgagtagctgggactacaggcacctgctaccacgcctgactaatttttgtatttttagtagagatggggtttcgccacgttggccaggctggtctcgaactcctgacctcaggtgatctgcccgtctcgtcctcccaaagtgctgggattacaggtgtgagccaccacgcccagccaccactacgcactttaaaaccaaaaaaagctcaaagggatggatcattgtccatggctcaggagccccactgtggggtaagtgtgatgtcgatggattaatttagacagtggtgtattcatcagggcaaaggaaattcttccagaggtgatgatgcggcagatattcccagtgctctcccaaagcaagctggccctcttgtcatcctctcagtgggcggcaccagctgcccctccttccacaagtactcaagcctgtttgtaaatactgaaggaattgatggggttgaggaaaggaggtgcatgtgaccagggtcccaaggccacagcttttcagatcctaggaagcaagtggcatttgcttgagttgtggcctcggaaggagaatgtttatctgttttctaactttgctgacaccaggattctccctgtcattgagaagaaagcattatctaattaccttcaggtggtttacttattctgtaaagaatatgtgtaaatattttgtacagagccctgtatcaaataaacagccatatgtggttactaatcacctcttctgtcattccgtccttggccaccgctcagtgggaatggtctctgatctggatgctcccaccttccatgtcaggcccagaactgtgccatggtctgtggactcctggtcagccttgactggctaggagaccttgggcagtacctacagtcttgctgtttctgtttcatctgcaagaattatgacccacacactccagctgcagcccagggcactgtgatattttatacgtgtgtagatgtttttgtccacagttcctggttcatcactcccataaccctttgttataatgttgggacactgcaggcctcagaaaacggaatctctgtctgtgaccttctcctgccccatttcacttgctcaacaccagactttaatctgactgtagctcataagaccctcattccagagagggtgctgccccatacccggaaggaggaacgctgcacagagaggccaagaagcatctggacagacaggccttgctgggtttagaccttatgctttttgtccagtttcatctcaacacagctgccatgcttcagccatgcctatccaatgacgtctccataaaaggcccaggaacacgggagcttctgaagagctgaacatgtggagggaggggaacgagaacttgtccatgtgccaagagggtggcgcacccccactccatggggacagaagctccagcatttgcccaggacccgtccagacctcaccctgtgtgtatcttcatctggctgtttacttatttgtatccttttctaataatgtttgtaataaactggtaaac

SEQ ID NO: 11723 - protein, 226 aa, Homo sapiens
MDPTMDNTKHILNYLMPIIDQVNPELHDFMQSAEVGTIFALSWLITWFGHVLSDFRHVVRLYDFFLACHPLMPIYFAAVIVLYREQEVLDCDCDMASVHHLLSQIPQDLPYETLISRAGDLFVQFPPSELAREAAAQQQAERTAASTFKDFELASAQQRPDMVLRQRFRGLLRPEDRTKDVLTKPRTNRFVKLAVMGLTVALGAAALAVVKSALEWAPKFQLQLFP

SEQ ID NO: 11724 - DNA, 4462 bp, Homo sapiens
agcggggcgcctgcgcgcctgcgcgccgctggccgacggaggggagcctgccgatgccgagcgggtgctacgtcccgcggtcggagccgcgtcttctcccggctccgccaccagccggggctcgggtgggggcccggggccccggggcatggccctccggagtgcgcagggcgacggccccacctccggccactgggacggcggcgcggagaaggcagactttaacgccaaaaggaaaaagaaagtggcagagatacaccaggctctgaacagtgatcccactgatgtggctgcccttagacgcatggctatcagtgaaggagggctcctgactgatgagatcagacgaaaagtgtggcccaagctcctcaatgtcaatgccaatgacccacctcctatatcagggaagaacctacggcagatgagcaaggactaccaacaagtgttgctggacgtccggcggtcattgcggcggttccctcctggcatgccagaggaacagagagaagggctccaggaagaactgattgacatcatcctcctcatcttggagcgcaaccctcagctgcactactaccagggctaccatgacattgtggtcacatttctgctggtggtaggcgagaggctggcaacatccctggtagaaaaattatctacccaccacctcagggattttatggatccaacaatggacaacaccaagcatatattaaactatctgatgcccatcattgaccaggtgaatccagagctccatgacttcatgcagagtgctgaggtagggaccatctttgccctcagctggctcatcacctggtttgggcatgtcctgtctgacttcaggcacgtcgtgcggttatatgacttcttcctggcctgccacccactgatgccgatttactttgcagccgtgattgtgttgtatcgcgagcaggaagtcctggactgtgactgtgacatggcctcggtccaccacctgttgtcccagatccctcaggacttgccctatgagacactgatcagcagagcaggagacctttttgttcagtttcccccatccgaacttgctcgggaggccgctgcccaacagcaagctgagaggacggcagcctctactttcaaagactttgagctggcatcagcccagcagaggcctgatatggtgctgcggcagcggtttcggggacttctgcggcctgaagatcgaacaaaagatgtcctgaccaagccaaggaccaaccgctttgtgaaattggcagtgatggggctgacagtggcacttggagcggctgcactggctgtggtgaaaagtgccctggaatgggcccctaagtttcagctgcagctgtttccctgaaagccagagaagaccttcctcttacatcacattaaggtctcacccttccatggaaggattgggaggggtggaatttcctttattaaaagggtttctgtccagagttttttattcctgccaccctgccctgcccgtttgtgtttgcctttacttcagaggccagtagcagagcctacctgacacagaggggacctgggggcctggcacagaatcttatgcctctcccagtgggcttttggatgggctctctgccacctccctggtgttggaggaagtgggtttctgaagcttgcagctgcttttgcaacctgctgggcctgggctgccctagttaccgggaacctcctagtcaccccatagaaggtgaactggaacatgggatgccctcttactgctcctgcttgcctgcatcagatggacacagaaggagggggctgctgctgaaggagtcaggcttgggatggagagcaagaggccaaaggactcgtctgggagcatgatcggcccctcttactagcagctccatcagctgatcagaaatcagagacagaagggaactaggttactcgttaaatcctacctattttcagcctagaaatcacatgggcgtttccagtcaagtgggaaggaagctcatttttagggcctagacctagactagttttgcctgcctttttttcctccctgctttcttctacaagccacacaacattgcttataaaaggtacttttattactatttttagaatatatacaccccatatgtaaattaccctcacttttaaagtaataatagttccttcacggaaaaaaaaatagttctcatcagaaggatgagcttctaagatcctgaattttactttctacttgattaacattttcgctttagccagagttgctatttgcaaacagctttccacttccaaagtgccactttctgaccggtttttcttcctgttttcctcaaatcatcctactcccaaataggcacccactcactaccttggcgtcgttttttgggtctgacttgactcgtcaactgctggtctctcccacctggttggaaatgtcgttggaaacttgcaaagactctccagaccttagggaacaagaggcatcactcagtccttctgggacagcttccctgtaagcaaagccaggtttgttttagattcactctggcctgaaaaaaaaagtgccttttgctgctttaaagaattggggtatatggtatgaagcagccatgtacttgtattttcctggtctttcctgggcactcttctctcttggcagatgttttcttaaagtgaacacaccagaagcactctaccccaccatatccagtcctctttgcatgcctgttgtgtgcagggtggagggtgtcccacgtgccagagcagctgggagccctgtccgctgagttacactaagcactttatttttatttattttattattattttcttttttctgagatggagtctcactctgttgcccaggctggagtgcagtggtgcagtctcagctcactgcaacctccgcctcccaagttcaggcaattctcgctgcctcagcctcccgagtagctgggactacaggcacctgctaccacgcctgactaatttttgtatttttagtagagatggggtttcgccacgttggccaggctggtctcgaactcctgacctcaggtgatctgcccgtctcgtcctcccaaagtgctgggattacaggtgtgagccaccacgcccagccaccactacgcactttaaaaccaaaaaaagctcaaagggatggatcattgtccatggctcaggagccccactgtggggtaagtgtgatgtcgatggattaatttagacagtggtgtattcatcagggcaaaggaaattcttccagaggtgatgatgcggcagatattcccagtgctctcccaaagcaagctggccctcttgtcatcctctcagtgggcggcaccagctgcccctccttccacaagtactcaagcctgtttgtaaatactgaaggaattgatggggttgaggaaaggaggtgcatgtgaccagggtcccaaggccacagcttttcagatcctaggaagcaagtggcatttgcttgagttgtggcctcggaaggagaatgtttatctgttttctaactttgctgacaccaggattctccctgtcattgagaagaaagcattatctaattaccttcaggtggtttacttattctgtaaagaatatgtgtaaatattttgtacagagccctgtatcaaataaacagccatatgtggttactaatcacctcttctgtcattccgtccttggccaccgctcagtgggaatggtctctgatctggatgctcccaccttccatgtcaggcccagaactgtgccatggtctgtggactcctggtcagccttgactggctaggagaccttgggcagtacctacagtcttgctgtttctgtttcatctgcaagaattatgacccacacactccagctgcagcccagggcactgtgatattttatacgtgtgtagatgtttttgtccacagttcctggttcatcactcccataaccctttgttataatgttgggacactgcaggcctcagaaaacggaatctctgtctgtgaccttctcctgccccatttcacttgctcaacaccagactttaatctgactgtagctcataagaccctcattccagagagggtgctgccccatacccggaaggaggaacgctgcacagagaggccaagaagcatctggacagacaggccttgctgggtttagaccttatgctttttgtccagtttcatctcaacacagctgccatgcttcagccatgcctatccaatgacgtctccataaaaggcccaggaacacgggagcttctgaagagctgaacatgtggagggaggggaacgagaacttgtccatgtgccaagagggtggcgcacccccactccatggggacagaagctccagcatttgcccaggacccgtccagacctcaccctgtgtgtatcttcatctggctgtttacttatttgtatccttttctaataatgtttgtaataaactggtaaac

SEQ ID NO: 11725 - protein, 403 aa, Homo sapiens; identical to SEQ ID NO: 1945

SEQ ID NO: 11726 - DNA, 4375 bp, Homo sapiens
acccaccacctcaggtaccagtagagaggaacacaagacgacgggcatcactcctcagccgtcctggggataactcactggcctgttttctggtcagcttttttaggagtttgagccctcgccaccctgagccctgatctaagtgtttggtaaccaggcttattgaattgtctccctccagggattttatggatccaacaatggacaacaccaagcatatattaaactatctgatgcccatcattgaccaggtgaatccagagctccatgacttcatgcagaggtacatatgtgtctgcatttctgtgtgcatgcatacacacgcccacacccccccacacctgaaacactcctcacaagccgagcgcagtttcctcattgtcttgggtggatttgttaagttctccccagttgttccagtcaccagcaatctgggtaattcagttcttggagcatttttggggactgtgctctttgggggacatagcccatcccttgagtttacatctagtggggagaggtggataaggtatgtatgccaaggtaagatgttgaggttattgccacaagagaaacacaaagtcctgtgggatccagtggcgagaaggggaaggccaacaatgggttgttttatttcccaagtaccaaagagaagaaatatttttttgcaaatcccatgtgatgttttgtttcttctctgtttagttggaaatgtgttcttggccaatgcctctttttttaaaattttttaaaaggtaatggctatgccttctttttttttgagatggagtattttctcttgttgcccaggctggagtgcaatggcatgatcttggctcactgcaacctctatcttccgggttcaagcgattcttctgcctcagcctcaagtagctgggattacaggcatgcgccaccacgctcggctaattttgtatttttagtagagacagggtttctccatgttggtcaggctggtctcgagctcccgatgtcaggtgatccgcccgctttggcctcccaaagtgctgagattataggcgtgactcaccgtgtctggcagctacatcttaagatatttcagttgtctcatgttaacagaaaaattaatgcagtcatgttttcaggcttgggaatatgtacctgtgccccccagaagggtaagacttagtcagaaggagaatcatggcgtagttctctgaaaacaactgcttctcgttcctgtagttgacatttgttggccagtaggcgagcacccagtgagataaagcagccaggaccctgttgtggtgttagtgttgtggtacaccttaaagactttgtattaaatattttgtaaggagaagatgctgaattcctaggtaactgaattttccagaaatcttattcctaaatgcttccttctcaccagcgctataaggcccagagagagggaagggatggcccacaggacctgacacctgcctttcctttgtttctagtgctgaggtagggaccatctttgccctcagctggctcatcacctggtttgggcatgtcctgtctgacttcaggcacgtcgtgcggttatatgacttcttcctggcctgccacccactgatgccgatttactttgcagccgtgattgtgttgtatcgcgagcaggaagtcctggactgtgactgtgacatggcctcggtccaccacctgttgtcccagatccctcaggacttgccctatgagacactgatcagcagagcaggagacctttttgttcagtttcccccatccgaacttgctcgggaggccgctgcccaacagcaagctgagaggacggcagcctctactttcaaagactttgagctggcatcagcccagcagaggcctgatatggtgctgcggcagcggtttcggggacttctgcggcctgaagatcgaacaaaagatgtcctgaccaagccaaggaccaaccgctttgtgaaattggcagtgatggggctgacagtggcacttggagcggctgcactggctgtggtgaaaagtgccctggaatgggcccctaagtttcagctgcagctgtttccctgaaagccagagaagaccttcctcttacatcacattaaggtctcacccttccatggaaggattgggaggggtggaatttcctttattaaaagggtttctgtccagagttttttattcctgccaccctgccctgcccgtttgtgtttgcctttacttcagaggccagtagcagagcctacctgacacagaggggacctgggggcctggcacagaatcttatgcctctcccagtgggcttttggatgggctctctgccacctccctggtgttggaggaagtgggtttctgaagcttgcagctgcttttgcaacctgctgggcctgggctgccctagttaccgggaacctcctagtcaccccatagaaggtgaactggaacatgggatgccctcttactgctcctgcttgcctgcatcagatggacacagaaggagggggctgctgctgaaggagtcaggcttgggatggagagcaagaggccaaaggactcgtctgggagcatgatcggcccctcttactagcagctccatcagctgatcagaaatcagagacagaagggaactaggttactcgttaaatcctacctattttcagcctagaaatcacatgggcgtttccagtcaagtgggaaggaagctcatttttagggcctagacctagactagttttgcctgcctttttttcctccctgctttcttctacaagccacacaacattgcttataaaaggtacttttattactatttttagaatatatacaccccatatgtaaattaccctcacttttaaagtaataatagttccttcacggaaaaaaaaatagttctcatcagaaggatgagcttctaagatcctgaattttactttctacttgattaacattttcgctttagccagagttgctatttgcaaacagctttccacttccaaagtgccactttctgaccggtttttcttcctgttttcctcaaatcatcctactcccaaataggcacccactcactaccttggcgtcgttttttgggtctgacttgactcgtcaactgctggtctctcccacctggttggaaatgtcgttggaaacttgcaaagactctccagaccttagggaacaagaggcatcactcagtccttctgggacagcttccctgtaagcaaagccaggtttgttttagattcactctggcctgaaaaaaaaagtgccttttgctgctttaaagaattggggtatatggtatgaagcagccatgtacttgtattttcctggtctttcctgggcactcttctctcttggcagatgttttcttaaagtgaacacaccagaagcactctaccccaccatatccagtcctctttgcatgcctgttgtgtgcagggtggagggtgtcccacgtgccagagcagctgggagccctgtccgctgagttacactaagcactttatttttatttattttattattattttcttttttctgagatggagtctcactctgttgcccaggctggagtgcagtggtgcagtctcagctcactgcaacctccgcctcccaagttcaggcaattctcgctgcctcagcctcccgagtagctgggactacaggcacctgctaccacgcctgactaatttttgtatttttagtagagatggggtttcgccacgttggccaggctggtctcgaactcctgacctcaggtgatctgcccgtctcgtcctcccaaagtgctgggattacaggtgtgagccaccacgcccagccaccactacgcactttaaaaccaaaaaaagctcaaagggatggatcattgtccatggctcaggagccccactgtggggtaagtgtgatgtcgatggattaatttagacagtggtgtattcatcagggcaaaggaaattcttccagaggtgatgatgcggcagatattcccagtgctctcccaaagcaagctggccctcttgtcatcctctcagtgggcggcaccagctgcccctccttccacaagtactcaagcctgtttgtaaatactgaaggaattgatggggttgaggaaaggaggtgcatgtgaccagggtcccaaggccacagcttttcagatcctaggaagcaagtggcatttgcttgagttgtggcctcggaaggagaatgtttatctgttttctaactttgctgacaccaggattctccctgtcattgagaagaaagcattatctaattaccttcaggtggtttacttattctgtaaagaatatgtgtaaatattttgtacagagccctgtatcaaataaacagccatatgtggttactaatcacc

SEQ ID NO: 11727 - protein, 155 aa, Homo sapiens; identical to SEQ ID NO: 11717

SEQ ID NO: 11728 - DNA, 3226 bp, Homo sapiens
gtttccttatttatcttttagggtatgctttttatttgagaaggggtggggtaaatatgggcaagaggtgagttttgctcttacctgcaatcctttgtccggtttagtttgggcccttacattagctgctttctctctctgagtatgtgtttgtaactgaaagctaatggtgtggagaagctgtgcatgtgccattcttctaacctggctcataaggccaaggcatttttactgctggcagcactagctccagcagtaaaagaactccctgaaagaactcctgagacaggcttccctatttccagctataatacatctttggatcaagaggatcagtttttcctgtaacgtttgctttggtttaaaggggaccgtgtaactttaaaatttttttatttttatataatttcatacttactgaaaggttgtaaaaataggacaaagaattccccagataccttttacccagatttccttttgttttcacattttactacatttgctttttttttcttggagacggagtcttgctctctcgcccgggctgcagtgcagtggcacgatctcagctcactgcaagctctggttcctgggttcatgccattctcctgcctcagcctcccaagtagctgggactacaggcgcctgccaccacgcccagctaattttttgtattttttattagagacggggtttttcaccatattagccaggatggtctcgatctcctgacctcgtgatccacctgcctctgcctcccaaagtgctgggattacaggcgtgagccaccgcgcctggcctacatttgcttttttagctgctttctgtctttccttcgctttacacatagacatacactttttctctgaactatttaagagtaagttgcaaacatgacatctttttaccccaagtgtttcaggacatatttcctaaatataaggctctcatgtaatcacagtacactgagcaacatcagtaacaacactgaaaaatagttaactaattaatccacagattttattcacatttcaccatttcttcgagtaatgtgcttcactggaaaaggaaatatagatttatgcgtttctcatgctgttgtcctatatctttagccatttttaatctggaacagttcctttgtattgtatgagagttaaatttctcttcctttggggatattgggtatttcttcattgtgagattgaggtctgtgcgctgttgatagaaatcctgcagacatgatgctgagctctgtcagtgcatcacctcgggaggcagaggccgtctgtggctcccatagttgaaattctgcagttaaatactgtgtcccagcagtattaactgcagcaacttggttagggtggcatctgcagcttcccctactggaaagctagcagctgccttttcctgtatgccaggtggtatcaacagtggatcttgatatgcgttgccaaattatttgtaattcattttccttttttctctgaaaattcattgctggccttcttcgacctccttgttaactaggctgcttggtatgttcaaaggcatctctgttcctgtccccaggcatgccagaggaacagagagaagggctccaggaagaactgattgacatcatcctcctcatcttggagcgcaaccctcagctgcactactaccagggctaccatgacattgtggtcacatttctgctggtggtaggcgagaggctggcaacatccctggtagaaaaattatctacccaccacctcaggtaccagtagagaggaacacaagacgacgggcatcactcctcagccgtcctggggataactcactggcctgttttctggtcagcttttttaggagtttgagccctcgccaccctgagccctgatctaagtgtttggtaaccaggcttattgaattgtctccctccagggattttatggatccaacaatggacaacaccaagcatatattaaactatctgatgcccatcattgaccaggtgaatccagagctccatgacttcatgcagaggtacatatgtgtctgcatttctgtgtgcatgcatacacacgcccacacccccccacacctgaaacactcctcacaagccgagcgcagtttcctcattgtcttgggtggatttgttaagttctccccagttgttccagtcaccagcaatctgggtaattcagttcttggagcatttttggggactgtgctctttgggggacatagcccatcccttgagtttacatctagtggggagaggtggataaggtatgtatgccaaggtaagatgttgaggttattgccacaagagaaacacaaagtcctgtgggatccagtggcgagaaggggaaggccaacaatgggttgttttatttcccaagtaccaaagagaagaaatatttttttgcaaatcccatgtgatgttttgtttcttctctgtttagttggaaatgtgttcttggccaatgcctctttttttaaaattttttaaaaggtaatggctatgccttctttttttttgagatggagtattttctcttgttgcccaggctggagtgcaatggcatgatcttggctcactgcaacctctatcttccgggttcaagcgattcttctgcctcagcctcaagtagctgggattacaggtgtgagccaccacgcccagccaccactacgcactttaaaaccaaaaaaagctcaaagggatggatcattgtccatggctcaggagccccactgtggggtaagtgtgatgtcgatggattaatttagacagtggtgtattcatcagggcaaaggaaattcttccagaggtgatgatgcggcagatattcccagtgctctcccaaagcaagctggccctcttgtcatcctctcagtgggcggcaccagctgcccctccttccacaagtactcaagcctgtttgtaaatactgaaggaattgatggggttgaggaaaggaggtgcatgtgaccagggtcccaaggccacagcttttcagatcctaggaagcaagtggcatttgcttgagttgtggcctcggaaggagaatgtttatctgttttctaactttgctgacaccaggattctccctgtcattgagaagaaagcattatctaattaccttcaggtggtttacttattctgtaaagaatatgtgtaaatattttgtacagagccctgtatcaaataaacagccatatgtggttactaatcacc

SEQ ID NO: 11729 - protein, 82 aa, Homo sapiens; identical to SEQ ID NO: 11721

SEQ ID NO: 11730 - DNA, 3827 bp, Homo sapiens
gcctgcgcgcctgcgcgccgctggccgacggaggggagcctgccgatgccgagcgggtgctacgtcccgcggtcggagccgcgtcttctcccggctccgccaccagccggggctcgggtgggggcccggggccccggggcatggccctccggagtgcgcagggcgacggccccacctccggccactgggacggcggcgcggagaaggcagactttaacgccaaaaggaaaaagaaagtggcagagatacaccaggctctgaacagtgatcccactgatgtggctgcccttagacgcatggctatcagtgaaggagggctcctgactgatgagatcagacgaaaagtgtggcccaagctcctcaatgtcaatgccaatgacccacctcctatatcagggaagaacctacggcagatgagcaaggactaccaacaagtgttgctggacgtccggcggtcattgcggcggttccctcctggcatgccagaggaacagagagaagggctccaggaagaactgattgacatcatcctcctcatcttggagcgcaaccctcagctgcactactaccagggctaccatgacattgtggtcacatttctgctggtggtaggcgagaggctggcaacatccctggtagaaaaattatctacccaccacctcaggtaccagtagagaggaacacaagacgacgggcatcactcctcagccgtcctggggataactcactggcctgttttctggtcagcttttttaggagtttgagccctcgccaccctgagccctgatctaagtgtttggtaaccaggcttattgaattgtctccctccagggattttatggatccaacaatggacaacaccaagcatatattaaactatctgatgcccatcattgaccaggtgaatccagagctccatgacttcatgcagagtgctgaggtagggaccatctttgccctcagctggctcatcacctggtttgggcatgtcctgtctgacttcaggcacgtcgtgcggttatatgacttcttcctggcctgccacccactgatgccgatttactttgcagccgtgattgtgttgtatcgcgagcaggaagtcctggactgtgactgtgacatggcctcggtccaccacctgttgtcccagatccctcaggacttgccctatgagacactgatcagcagagcaggagacctttttgttcagtttcccccatccgaacttgctcgggaggccgctgcccaacagcaagctgagaggacggcagcctctactttcaaagactttgagctggcatcagcccagcagaggcctgatatggtgctgcggcagcggtttcggggacttctgcggcctgaagatcgaacaaaagatgtcctgaccaagccaaggaccaaccgctttgtgaaattggcagtgatggggctgacagtggcacttggagcggctgcactggctgtggtgaaaagtgccctggaatgggcccctaagtttcagctgcagctgtttccctgaaagccagagaagaccttcctcttacatcacattaaggtctcacccttccatggaaggattgggaggggtggaatttcctttattaaaagggtttctgtccagagttttttattcctgccaccctgccctgcccgtttgtgtttgcctttacttcagaggccagtagcagagcctacctgacacagaggggacctgggggcctggcacagaatcttatgcctctcccagtgggcttttggatgggctctctgccacctccctggtgttggaggaagtgggtttctgaagcttgcagctgcttttgcaacctgctgggcctgggctgccctagttaccgggaacctcctagtcaccccatagaaggtgaactggaacatgggatgccctcttactgctcctgcttgcctgcatcagatggacacagaaggagggggctgctgctgaaggagtcaggcttgggatggagagcaagaggccaaaggactcgtctgggagcatgatcggcccctcttactagcagctccatcagctgatcagaaatcagagacagaagggaactaggttactcgttaaatcctacctattttcagcctagaaatcacatgggcgtttccagtcaagtgggaaggaagctcatttttagggcctagacctagactagttttgcctgcctttttttcctccctgctttcttctacaagccacacaacattgcttataaaaggtacttttattactatttttagaatatatacaccccatatgtaaattaccctcacttttaaagtaataatagttccttcacggaaaaaaaaatagttctcatcagaaggatgagcttctaagatcctgaattttactttctacttgattaacattttcgctttagccagagttgctatttgcaaacagctttccacttccaaagtgccactttctgaccggtttttcttcctgttttcctcaaatcatcctactcccaaataggcacccactcactaccttggcgtcgttttttgggtctgacttgactcgtcaactgctggtctctcccacctggttggaaatgtcgttggaaacttgcaaagactctccagaccttagggaacaagaggcatcactcagtccttctgggacagcttccctgtaagcaaagccaggtttgttttagattcactctggcctgaaaaaaaaagtgccttttgctgctttaaagaattggggtatatggtatgaagcagccatgtacttgtattttcctggtctttcctgggcactcttctctcttggcagatgttttcttaaagtgaacacaccagaagcactctaccccaccatatccagtcctctttgcatgcctgttgtgtgcagggtggagggtgtcccacgtgccagagcagctgggagccctgtccgctgagttacactaagcactttatttttatttattttattattattttcttttttctgagatggagtctcactctgttgcccaggctggagtgcagtggtgcagtctcagctcactgcaacctccgcctcccaagttcaggcaattctcgctgcctcagcctcccgagtagctgggactacaggcacctgctaccacgcctgactaatttttgtatttttagtagagatggggtttcgccacgttggccaggctggtctcgaactcctgacctcaggtgatctgcccgtctcgtcctcccaaagtgctgggattacaggtgtgagccaccacgcccagccaccactacgcactttaaaaccaaaaaaagctcaaagggatggatcattgtccatggctcaggagccccactgtggggtaagtgtgatgtcgatggattaatttagacagtggtgtattcatcagggcaaaggaaattcttccagaggtgatgatgcggcagatattcccagtgctctcccaaagcaagctggccctcttgtcatcctctcagtgggcggcaccagctgcccctccttccacaagtactcaagcctgtttgtaaatactgaaggaattgatggggttgaggaaaggaggtgcatgtgaccagggtcccaaggccacagcttttcagatcctaggaagcaagtggcatttgcttgagttgtggcctcggaaggagaatgtttatctgttttctaactttgctgacaccaggattctccctgtcattgagaagaaagcattatctaattaccttcaggtggtttacttattctgtaaagaatatgtgtaaatattttgtacagagccctgtatcaaataaacagccatatgtggttactaatcacc

SEQ ID NO: 11731 - protein, 226 aa, Homo sapiens; identical to SEQ ID NO: 11723

SEQ ID NO: 11732 - DNA, 3668 bp, Homo sapiens
agcggggcgcctgcgcgcctgcgcgccgctggccgacggaggggagcctgccgatgccgagcgggtgctacgtcccgcggtcggagccgcgtcttctcccggctccgccaccagccggggctcgggtgggggcccggggccccggggcatggccctccggagtgcgcagggcgacggccccacctccggccactgggacggcggcgcggagaaggcagactttaacgccaaaaggaaaaagaaagtggcagagatacaccaggctctgaacagtgatcccactgatgtggctgcccttagacgcatggctatcagtgaaggagggctcctgactgatgagatcagacgaaaagtgtggcccaagctcctcaatgtcaatgccaatgacccacctcctatatcagggaagaacctacggcagatgagcaaggactaccaacaagtgttgctggacgtccggcggtcattgcggcggttccctcctggcatgccagaggaacagagagaagggctccaggaagaactgattgacatcatcctcctcatcttggagcgcaaccctcagctgcactactaccagggctaccatgacattgtggtcacatttctgctggtggtaggcgagaggctggcaacatccctggtagaaaaattatctacccaccacctcagggattttatggatccaacaatggacaacaccaagcatatattaaactatctgatgcccatcattgaccaggtgaatccagagctccatgacttcatgcagagtgctgaggtagggaccatctttgccctcagctggctcatcacctggtttgggcatgtcctgtctgacttcaggcacgtcgtgcggttatatgacttcttcctggcctgccacccactgatgccgatttactttgcagccgtgattgtgttgtatcgcgagcaggaagtcctggactgtgactgtgacatggcctcggtccaccacctgttgtcccagatccctcaggacttgccctatgagacactgatcagcagagcaggagacctttttgttcagtttcccccatccgaacttgctcgggaggccgctgcccaacagcaagctgagaggacggcagcctctactttcaaagactttgagctggcatcagcccagcagaggcctgatatggtgctgcggcagcggtttcggggacttctgcggcctgaagatcgaacaaaagatgtcctgaccaagccaaggaccaaccgctttgtgaaattggcagtgatggggctgacagtggcacttggagcggctgcactggctgtggtgaaaagtgccctggaatgggcccctaagtttcagctgcagctgtttccctgaaagccagagaagaccttcctcttacatcacattaaggtctcacccttccatggaaggattgggaggggtggaatttcctttattaaaagggtttctgtccagagttttttattcctgccaccctgccctgcccgtttgtgtttgcctttacttcagaggccagtagcagagcctacctgacacagaggggacctgggggcctggcacagaatcttatgcctctcccagtgggcttttggatgggctctctgccacctccctggtgttggaggaagtgggtttctgaagcttgcagctgcttttgcaacctgctgggcctgggctgccctagttaccgggaacctcctagtcaccccatagaaggtgaactggaacatgggatgccctcttactgctcctgcttgcctgcatcagatggacacagaaggagggggctgctgctgaaggagtcaggcttgggatggagagcaagaggccaaaggactcgtctgggagcatgatcggcccctcttactagcagctccatcagctgatcagaaatcagagacagaagggaactaggttactcgttaaatcctacctattttcagcctagaaatcacatgggcgtttccagtcaagtgggaaggaagctcatttttagggcctagacctagactagttttgcctgcctttttttcctccctgctttcttctacaagccacacaacattgcttataaaaggtacttttattactatttttagaatatatacaccccatatgtaaattaccctcacttttaaagtaataatagttccttcacggaaaaaaaaatagttctcatcagaaggatgagcttctaagatcctgaattttactttctacttgattaacattttcgctttagccagagttgctatttgcaaacagctttccacttccaaagtgccactttctgaccggtttttcttcctgttttcctcaaatcatcctactcccaaataggcacccactcactaccttggcgtcgttttttgggtctgacttgactcgtcaactgctggtctctcccacctggttggaaatgtcgttggaaacttgcaaagactctccagaccttagggaacaagaggcatcactcagtccttctgggacagcttccctgtaagcaaagccaggtttgttttagattcactctggcctgaaaaaaaaagtgccttttgctgctttaaagaattggggtatatggtatgaagcagccatgtacttgtattttcctggtctttcctgggcactcttctctcttggcagatgttttcttaaagtgaacacaccagaagcactctaccccaccatatccagtcctctttgcatgcctgttgtgtgcagggtggagggtgtcccacgtgccagagcagctgggagccctgtccgctgagttacactaagcactttatttttatttattttattattattttcttttttctgagatggagtctcactctgttgcccaggctggagtgcagtggtgcagtctcagctcactgcaacctccgcctcccaagttcaggcaattctcgctgcctcagcctcccgagtagctgggactacaggcacctgctaccacgcctgactaatttttgtatttttagtagagatggggtttcgccacgttggccaggctggtctcgaactcctgacctcaggtgatctgcccgtctcgtcctcccaaagtgctgggattacaggtgtgagccaccacgcccagccaccactacgcactttaaaaccaaaaaaagctcaaagggatggatcattgtccatggctcaggagccccactgtggggtaagtgtgatgtcgatggattaatttagacagtggtgtattcatcagggcaaaggaaattcttccagaggtgatgatgcggcagatattcccagtgctctcccaaagcaagctggccctcttgtcatcctctcagtgggcggcaccagctgcccctccttccacaagtactcaagcctgtttgtaaatactgaaggaattgatggggttgaggaaaggaggtgcatgtgaccagggtcccaaggccacagcttttcagatcctaggaagcaagtggcatttgcttgagttgtggcctcggaaggagaatgtttatctgttttctaactttgctgacaccaggattctccctgtcattgagaagaaagcattatctaattaccttcaggtggtttacttattctgtaaagaatatgtgtaaatattttgtacagagccctgtatcaaataaacagccatatgtggttactaatcacc

SEQ ID NO: 11733 - protein, 403 aa, Homo sapiens; identical to SEQ ID NO: 1945

SEQ ID NO: 11734 - DNA, 2167 bp, Homo sapiens
acccaccacctcaggtaccagtagagaggaacacaagacgacgggcatcactcctcagccgtcctggggataactcactggcctgttttctggtcagcttttttaggagtttgagccctcgccaccctgagccctgatctaagtgtttggtaaccaggcttattgaattgtctccctccagggattttatggatccaacaatggacaacaccaagcatatattaaactatctgatgcccatcattgaccaggtgaatccagagctccatgacttcatgcagaggtacatatgtgtctgcatttctgtgtgcatgcatacacacgcccacacccccccacacctgaaacactcctcacaagccgagcgcagtttcctcattgtcttgggtggatttgttaagttctccccagttgttccagtcaccagcaatctgggtaattcagttcttggagcatttttggggactgtgctctttgggggacatagcccatcccttgagtttacatctagtggggagaggtggataaggtatgtatgccaaggtaagatgttgaggttattgccacaagagaaacacaaagtcctgtgggatccagtggcgagaaggggaaggccaacaatgggttgttttatttcccaagtaccaaagagaagaaatatttttttgcaaatcccatgtgatgttttgtttcttctctgtttagttggaaatgtgttcttggccaatgcctctttttttaaaattttttaaaaggtaatggctatgccttctttttttttgagatggagtattttctcttgttgcccaggctggagtgcaatggcatgatcttggctcactgcaacctctatcttccgggttcaagcgattcttctgcctcagcctcaagtagctgggattacaggcatgcgccaccacgctcggctaattttgtatttttagtagagacagggtttctccatgttggtcaggctggtctcgagctcccgatgtcaggtgatccgcccgctttggcctcccaaagtgctgagattataggcgtgactcaccgtgtctggcagctacatcttaagatatttcagttgtctcatgttaacagaaaaattaatgcagtcatgttttcaggcttgggaatatgtacctgtgccccccagaagggtaagacttagtcagaaggagaatcatggcgtagttctctgaaaacaactgcttctcgttcctgtagttgacatttgttggccagtaggcgagcacccagtgagataaagcagccaggaccctgttgtggtgttagtgttgtggtacaccttaaagactttgtattaaatattttgtaaggagaagatgctgaattcctaggtaactgaattttccagaaatcttattcctaaatgcttccttctcaccagcgctataaggcccagagagagggaagggatggcccacaggacctgacacctgcctttcctttgtttctagtgctgaggtagggaccatctttgccctcagctggctcatcacctggtttgggcatgtcctgtctgacttcaggcacgtcgtgcggttatatgacttcttcctggcctgccacccactgatgccgatttactttgcagccgtgattgtgttgtatcgcgagcaggaagtcctggactgtgactgtgacatggcctcggtccaccacctgttgtcccagatccctcaggacttgccctatgagacactgatcagcagagcaggagacctttttgttcagtttcccccatccgaacttgctcgggaggccgctgcccaacagcaagctgagaggacggcagcctctactttcaaagactttgagctggcatcagcccagcagaggcctgatatggtgctgcggcagcggtttcggggacttctgcggcctgaagatcgaacaaaagatgtcctgaccaagccaaggaccaaccgctttgtgaaattggcagtgatggggctgacagtggcacttggagcggctgcactggctgtggtgaaaagtgccctggaatgggcccctaagtttcagctgcagctgtttccctgaaagccagagaagaccttcctcttacatcacattaaggtctcacccttccatggaaggattgggaggggtggaatttcctttattaaaagggtttctgtcc

SEQ ID NO: 11735 - protein, 155 aa, Homo sapiens; identical to SEQ ID NO: 11717

SEQ ID NO: 11736 - DNA, 621 bp, Homo sapiens
cttgggatgcctgttccagctgccgctggcgctcagcagtaacggccctatctgtctcctgatgcctgagcagagagccccagtttgagggacagcgggatatccaccatgctgctgtgagactcgggcagttgtgactggtttagaagtggatacacagggagaggtcttctggaaaaggtcttctggagagctgagatcagaagacaatcaactggcttcaaatctaaggagagacaggcacaaaatggaagagatgacatgggcactggttacctggtaaacacaagtggacactggtgagggactgggtcatggagactgcagtagtctttacccttttcagcgtttttcaccatgaaccccactgggagcacacagaagattggagaaagttttaataaaatgtctcaagatctggaagaagacaatggcagctactgtgaaaggatcacagtgctccacccagacccttccctgtatcccctaccggacaaaagccttagtctgtggagggaaggacaccaaatcctgtcacccccttggatgaagctcccttgcatctgggggaatgaaacaggaacaaaacaaaactttccctgggcaggggcaggaatacac

SEQ ID NO: 11737 - protein, 87 aa, Homo sapiens
MNPTGSTQKIGESFNKMSQDLEEDNGSYCERITVLHPDPSLYPLPDKSLSLWREGHQILSPPWMKLPCIWGNETGTKQNFPWAGAGI

SEQ ID NO: 11738 - DNA, 3212 bp, Homo sapiens
agtgccaaccccttcaccccttggacctctggcaggctcaccagtgattgctgctgccaacccccttgggatgcctgttccagctgccgctggcgctcagcagtaacggccctatctgtctcctgatgcctgagcagaggtgggggagtccaccctctccttgatgcagcttgcgcctggcggggaggggtgaaacacttcagaagcaccgtgtctgaaccgttgcttgtggatttatagtagttcagtcataaaaaaaaaattataataggctgattttcttttttctttttttttttaactcgaacttttcataactcaggggattccctgaaaaattacctgcaggtggaatatttcatggacaaatttttttttctcccctcccaaatttagttcctcatcacaaaagaacaaagataaaccagcctcaatcccggctgctgcatttaggtggagacttcttcccattcccaccattgttcctccaccgtcccacactttagggggttggtatctcgtgctcttctccagagattacaaaaatgtagcttctcaggggaggcaggaagaaaggaaggaaggaaagaaggaagggaggacccaatctataggagcagtggactgcttgctggtcgcttacatcatatctccattgaagctgaaatggtagacctgtaattgtgggaaaactataaactctcttgttacagccccgccaccccttgctgtgtgtatatatataatactttgtccttcatatgtgaaagatccagtgttggaattctttggtgtaaataaacgtttggttttatttatcaaggttagatttaagttccctgtgtaaaggtcttgctgggtgggtgtctcatgttcacatctgaggggcctgcagccctgtaccgtggaggcttcccaaggcccccattttatacacccctcgttcgacccatggtaccgggcagagcagagaggccttaaaaaaaaagcaccacaagccaaagcgtctctggggattaaggatcctttgccataaaactcattttgtgtctcagcagtgcagggattggggatggaaaaagtcgccagtttttgtgtgtttgtgtgtgtgtgtaaagtggactttccactgtaatccaaccacctaagtttatcaggtgcttcactgaggaagcctagttttttaagcacaatagcaaaaccatcagctctgtattttctcctgttatttcattacagtagctgcttgtgggaactaggaaaaattcttccaacatattttaaggcctaaaatcttagttccccattctcctaccttatagattcacaggcctttctcgcctaggcatcatagataaacgtaattgtttggggagttgaatttaatgaacttatctaactttgtaacccatcttggctttagtaactttatcaaggtggtggctttagtgaatataatggtaaactttagaggacgctaaagcctccttttatagcgcttctcaacggtagggagagctgaagggaaaacattctgactgtgtggcagggtgattttcttccttatgaccacttacagtggatatttattgtacttgacccttttatgccctagaatgctgtgagggttaccatgttgaatttgtgcagaagctaaaagcaccagatgtgccagagatgcaatttgtgattatgtttgcactggattgtgatttgaacaggacacttataactaatgagttctttcttttgaggtggggagagggttgtaaatcaagacttcataccctatccttgtagctcggaaattgaggtgtagcttaggctgatgcggagagctgcagacagctggacctccttacacccatcagaccttggaataaaccgaaggtgaatgcagaggactctgaggtgccacccaagagccttttaaaataaatagaagtttttaaaaatgctacttaagagtcactgcagaagcatggagagagagaaaaaaaaaaaagacccaattgggtggggggtgggggggaggcaagggtttacagagtaacaacttacgtgttgttgtaaattacctcatctgtataccttgtattgggacactatttctcagcactacctgtgtctgcattgcttagatggcaggaaatggaatggccaacatgaaaggttatgttggcaattactctgaaagattttttaaagtatttttaaactttgtttgaagtggtccctcccctcttcctctgcttttttttaagtttgaagccagaaggccctccccaccttgctttattggttgtaattgtattgtaattggtatgactaaaccataactgtgctgggaagaagttgtgccatgaaggtctttaattttttttaataaaaacatttaaataaatgaaatgtccctgcagcctgagcaatatgcttctccaaccgacaccgtgtgtgatagatggctccgttttcacgttttgaattctgtttcttgtacttgaaatgcctgtccagcttacataagatagattaaattgttagagtgggactgtcagaggaatatatcttgtaaagtagatcctcagggtatggctaattactatagtcctaaagtagcagagaaaattagagattggttgacagatttgggaattttaatttcttcttagtttttaactttcatctttgcttcaccttttgacaagtatggttataattagaattgaccatttaagcatctcttgaaaaacctgattttgtcccaccagcaaattctctcccaagactggaattgggtttgcatagtagagagcctgtcttcccagggccttttcctagttaaagaaacacttaactaaaaaggctgtgtggtaaggtcatgctcagttccttcctcaaaaaatgagtctaaaattggtttatcctgaatccgacttcccccactgtcatcacttacccttgcccttctttttcctcagaacacctgaacttttgttgtattattttgtatctccccacttgcatgtaaactccctggtgaccttgcatgtcttatgcaatcctcattaaaaccttttgtttttttttttaagtgggttcgttttccctcaggatcgaagagtattgaatggaatggcacgaggaaaatatttaacaccctacttggcttgtaataataggtgcttaataaattgtagttccactctcca

SEQ ID NO: 11739 - protein, 55 aa, Homo sapiens
MSLKLVYPESDFPHCHHLPLPFFFLRTPELLLYYFVSPHLHVNSLVTLHVLCNPH

SEQ ID NO: 11740 - DNA, 5226 bp, Homo sapiens
cccgcctcctggtaggagggggtttccgcttccggcagcagcggctgcagcctcgctctggtccctgcggctggcggccgagccgtgtgtctcctcctccatcgccgccatattgtctgtgtgagcagaggggagagcggccgccgccgctgccgcttccaccacagctctatcaaggcttgtcaagcagtgtgctcatcacatggtaaatcatgcagcgtggaacctcataaaatctccaagaaacatcattcacccatactgactagtttcacatctctttgtttgaagaaaacaggtctgaaacaaggtcttacccccagctgcttctgaacacagtgactgccagatctccaaacatcaagtccagctttgtccgccaacctgtctgacatgtcgggacccgtgccaagcagggccagagtttacacagatgttaatacacacagacctcgagaatactgggattacgagtcacatgtggtggaatggggaaatcaagatgactaccagctggttcgaaaattaggccgaggtaaatacagtgaagtatttgaagccatcaacatcacaaataatgaaaaagttgttgttaaaattctcaagccagtaaaaaagaagaaaattaagcgtgaaataaagattttggagaatttgagaggaggtcccaacatcatcacactggcagacattgtaaaagaccctgtgtcacgaacccccgccttggtttttgaacacgtaaacaacacagacttcaagcaattgtaccagacgttaacagactatgatattcgattttacatgtatgagattctgaaggccctggattattgtcacagcatgggaattatgcacagagatgtcaagccccataatgtcatgattgatcatgagcacagaaagctacgactaatagactggggtttggctgagttttatcatcctggccaagaatataatgtccgagttgcttcccgatacttcaaaggtcctgagctacttgtagactatcagatgtacgattatagtttggatatgtggagtttgggttgtatgctggcaagtatgatctttcggaaggagccatttttccatggacatgacaattatgatcagttggtgaggatagccaaggttctggggacagaagatttatatgactatattgacaaatacaacattgaattagatccacgtttcaatgatatcttgggcagacactctcgaaagcgatgggaacgctttgtccacagtgaaaatcagcaccttgtcagccctgaggccttggatttcctggacaaactgctgcgatatgaccaccagtcacggcttactgcaagagaggcaatggagcacccctatttctacactgttgtgaaggaccaggctcgaatgggttcatctagcatgccagggggcagtacgcccgtcagcagcgccaatatgatgtcagggatttcttcagtgccaaccccttcaccccttggacctctggcaggctcaccagtgattgctgctgccaacccccttgggatgcctgttccagctgccgctggcgctcagcagtaacggccctatctgtctcctgatgcctgagcagaggtgggggagtccaccctctccttgatgcagcttgcgcctggcggggaggggtgaaacacttcagaagcaccgtgtctgaaccgttgcttgtggatttatagtagttcagtcataaaaaaaaaattataataggctgattttcttttttctttttttttttaactcgaacttttcataactcaggggattccctgaaaaattacctgcaggtggaatatttcatggacaaatttttttttctcccctcccaaatttagttcctcatcacaaaagaacaaagataaaccagcctcaatcccggctgctgcatttaggtggagacttcttcccattcccaccattgttcctccaccgtcccacactttagggggttggtatctcgtgctcttctccagagattacaaaaatgtagcttctcaggggaggcaggaagaaaggaaggaaggaaagaaggaagggaggacccaatctataggagcagtggactgcttgctggtcgcttacatcactttactccataagcgcttcagtggggttatcctagtggctcttgtggaagtgtgtcttagttacatcaagatgttgaaaatctacccaaaatgcagacagatactaaaaacttctgttcagtaagaatcatgtcttactgatctaaccctaaatccaactcatttatacttttatttttagttcagtttaaaatgttgataccttccctcccaggctccttaccttggtcttttccctgttcatctcccaacatgctgtgctccatagctggtaggagagggaaggcaaaatctttcttagttttctttgtcttggccattttgaattcatttagttactgggcataacttactgctttttacaaaagaaacaaacattgtctgtacaggtttcatgctagagctaatgggagatgtggccacactgacttccattttaagctttctaccttcttttcctccgaccgtccccttccctcacatgccatccagtgagaagacctgctcctcagtcttgtaaatgtatcttgagaggtaggagcagagccactatctccattgaagctgaaatggtagacctgtaattgtgggaaaactataaactctcttgttacagccccgccaccccttgctgtgtgtatatatataatactttgtccttcatatgtgaaagatccagtgttggaattctttggtgtaaataaacgtttggttttatttatcaaggttagatttaagttccctgtgtaaaggtcttgctgggtgggtgtctcatgttcacatctgaggggcctgcagccctgtaccgtggaggcttcccaaggcccccattttatacacccctcgttcgacccatggtaccgggcagagcagagaggccttaaaaaaaaagcaccacaagccaaagcgtctctggggattaaggatcctttgccataaaactcattttgtgtctcagcagtgcagggattggggatggaaaaagtcgccagtttttgtgtgtttgtgtgtgtgtgtaaagtggactttccactgtaatccaaccacctaagtttatcaggtgcttcactgaggaagcctagttttttaagcacaatagcaaaaccatcagctctgtattttctcctgttatttcattacagtagctgcttgtgggaactaggaaaaattcttccaacatattttaaggcctaaaatcttagttccccattctcctaccttatagattcacaggcctttctcgcctaggcatcatagataaacgtaattgtttggggagttgaatttaatgaacttatctaactttgtaacccatcttggctttagtaactttatcaaggtggtggctttagtgaatataatggtaaactttagaggacgctaaagcctccttttatagcgcttctcaacggtagggagagctgaagggaaaacattctgactgtgtggcagggtgattttcttccttatgaccacttacagtggatatttattgtacttgacccttttatgccctagaatgctgtgagggttaccatgttgaatttgtgcagaagctaaaagcaccagatgtgccagagatgcaatttgtgattatgtttgcactggattgtgatttgaacaggacacttataactaatgagttctttcttttgaggtggggagagggttgtaaatcaagacttcataccctatccttgtagctcggaaattgaggtgtagcttaggctgatgcggagagctgcagacagctggacctccttacacccatcagaccttggaataaaccgaaggtgaatgcagaggactctgaggtgccacccaagagccttttaaaataaatagaagtttttaaaaatgctacttaagagtcactgcagaagcatggagagagagaaaaaaaaaaaagacccaattgggtggggggtgggggggaggcaagggtttacagagtaacaacttacgtgttgttgtaaattacctcatctgtataccttgtattgggacactatttctcagcactacctgtgtctgcattgcttagatggcaggaaatggaatggccaacatgaaaggttatgttggcaattactctgaaagattttttaaagtatttttaaactttgtttgaagtggtccctcccctcttcctctgcttttttttaagtttgaagccagaaggccctccccaccttgctttattggttgtaattgtattgtaattggtatgactaaaccataactgtgctgggaagaagttgtgccatgaaggtctttaattttttttaataaaaacatttaaataaatgaaatgtccctgcagcctgagcaatatgcttctccaaccgacaccgtgtgtgatagatggctccgttttcacgttttgaattctgtttcttgtacttgaaatgcctgtccagcttacataagatagattaaattgttagagtgggactgtcagaggaatatatcttgtaaagtagatcctcagggtatggctaattactatagtcctaaagtagcagagaaaattagagattggttgacagatttgggaattttaatttcttcttagtttttaactttcatctttgcttcaccttttgacaagtatggttataattagaattgaccatttaagcatctcttgaaaaacctgattttgtcccaccagcaaattctctcccaagactggaattgggtttgcatagtagagagcctgtcttcccagggccttttcctagttaaagaaacacttaactaaaaaggctgtgtggtaaggtcatgctcagttccttcctcaaaaaatgagtctaaaattggtttatcctgaatccgacttcccccactgtcatcacttacccttgcccttctttttcctcagaacacctgaacttttgttgtattattttgtatctccccacttgcatgtaaactccctggtgaccttgcatgtcttatgcaatcctcattaaaaccttttgtttttttttttaagtgggttcgttttccctcaggatcgaagagtattgaatggaatggcacgaggaaaatatttaacaccctacttggcttgtaataataggtgcttaataaattgtagttccactctcca

SEQ ID NO: 11741 - protein, 391 aa, Homo sapiens; identical to SEQ ID NO: 1947

SEQ ID NO: 11742 - DNA, 5109 bp, Homo sapiens
cccgcctcctggtaggagggggtttccgcttccggcagcagcggctgcagcctcgctctggtccctgcggctggcggccgagccgtgtgtctcctcctccatcgccgccatattgtctgtgtgagcagaggggagagcggccgccgccgctgccgcttccaccacagtttgaagaaaacaggtctgaaacaaggtcttacccccagctgcttctgaacacagtgactgccagatctccaaacatcaagtccagctttgtccgccaacctgtctgacatgtcgggacccgtgccaagcagggccagagtttacacagatgttaatacacacagacctcgagaatactgggattacgagtcacatgtggtggaatggggaaatcaagatgactaccagctggttcgaaaattaggccgaggtaaatacagtgaagtatttgaagccatcaacatcacaaataatgaaaaagttgttgttaaaattctcaagccagtaaaaaagaagaaaattaagcgtgaaataaagattttggagaatttgagaggaggtcccaacatcatcacactggcagacattgtaaaagaccctgtgtcacgaacccccgccttggtttttgaacacgtaaacaacacagacttcaagcaattgtaccagacgttaacagactatgatattcgattttacatgtatgagattctgaaggccctggattattgtcacagcatgggaattatgcacagagatgtcaagccccataatgtcatgattgatcatgagcacagaaagctacgactaatagactggggtttggctgagttttatcatcctggccaagaatataatgtccgagttgcttcccgatacttcaaaggtcctgagctacttgtagactatcagatgtacgattatagtttggatatgtggagtttgggttgtatgctggcaagtatgatctttcggaaggagccatttttccatggacatgacaattatgatcagttggtgaggatagccaaggttctggggacagaagatttatatgactatattgacaaatacaacattgaattagatccacgtttcaatgatatcttgggcagacactctcgaaagcgatgggaacgctttgtccacagtgaaaatcagcaccttgtcagccctgaggccttggatttcctggacaaactgctgcgatatgaccaccagtcacggcttactgcaagagaggcaatggagcacccctatttctacactgttgtgaaggaccaggctcgaatgggttcatctagcatgccagggggcagtacgcccgtcagcagcgccaatatgatgtcagggatttcttcagtgccaaccccttcaccccttggacctctggcaggctcaccagtgattgctgctgccaacccccttgggatgcctgttccagctgccgctggcgctcagcagtaacggccctatctgtctcctgatgcctgagcagaggtgggggagtccaccctctccttgatgcagcttgcgcctggcggggaggggtgaaacacttcagaagcaccgtgtctgaaccgttgcttgtggatttatagtagttcagtcataaaaaaaaaattataataggctgattttcttttttctttttttttttaactcgaacttttcataactcaggggattccctgaaaaattacctgcaggtggaatatttcatggacaaatttttttttctcccctcccaaatttagttcctcatcacaaaagaacaaagataaaccagcctcaatcccggctgctgcatttaggtggagacttcttcccattcccaccattgttcctccaccgtcccacactttagggggttggtatctcgtgctcttctccagagattacaaaaatgtagcttctcaggggaggcaggaagaaaggaaggaaggaaagaaggaagggaggacccaatctataggagcagtggactgcttgctggtcgcttacatcactttactccataagcgcttcagtggggttatcctagtggctcttgtggaagtgtgtcttagttacatcaagatgttgaaaatctacccaaaatgcagacagatactaaaaacttctgttcagtaagaatcatgtcttactgatctaaccctaaatccaactcatttatacttttatttttagttcagtttaaaatgttgataccttccctcccaggctccttaccttggtcttttccctgttcatctcccaacatgctgtgctccatagctggtaggagagggaaggcaaaatctttcttagttttctttgtcttggccattttgaattcatttagttactgggcataacttactgctttttacaaaagaaacaaacattgtctgtacaggtttcatgctagagctaatgggagatgtggccacactgacttccattttaagctttctaccttcttttcctccgaccgtccccttccctcacatgccatccagtgagaagacctgctcctcagtcttgtaaatgtatcttgagaggtaggagcagagccactatctccattgaagctgaaatggtagacctgtaattgtgggaaaactataaactctcttgttacagccccgccaccccttgctgtgtgtatatatataatactttgtccttcatatgtgaaagatccagtgttggaattctttggtgtaaataaacgtttggttttatttatcaaggttagatttaagttccctgtgtaaaggtcttgctgggtgggtgtctcatgttcacatctgaggggcctgcagccctgtaccgtggaggcttcccaaggcccccattttatacacccctcgttcgacccatggtaccgggcagagcagagaggccttaaaaaaaaagcaccacaagccaaagcgtctctggggattaaggatcctttgccataaaactcattttgtgtctcagcagtgcagggattggggatggaaaaagtcgccagtttttgtgtgtttgtgtgtgtgtgtaaagtggactttccactgtaatccaaccacctaagtttatcaggtgcttcactgaggaagcctagttttttaagcacaatagcaaaaccatcagctctgtattttctcctgttatttcattacagtagctgcttgtgggaactaggaaaaattcttccaacatattttaaggcctaaaatcttagttccccattctcctaccttatagattcacaggcctttctcgcctaggcatcatagataaacgtaattgtttggggagttgaatttaatgaacttatctaactttgtaacccatcttggctttagtaactttatcaaggtggtggctttagtgaatataatggtaaactttagaggacgctaaagcctccttttatagcgcttctcaacggtagggagagctgaagggaaaacattctgactgtgtggcagggtgattttcttccttatgaccacttacagtggatatttattgtacttgacccttttatgccctagaatgctgtgagggttaccatgttgaatttgtgcagaagctaaaagcaccagatgtgccagagatgcaatttgtgattatgtttgcactggattgtgatttgaacaggacacttataactaatgagttctttcttttgaggtggggagagggttgtaaatcaagacttcataccctatccttgtagctcggaaattgaggtgtagcttaggctgatgcggagagctgcagacagctggacctccttacacccatcagaccttggaataaaccgaaggtgaatgcagaggactctgaggtgccacccaagagccttttaaaataaatagaagtttttaaaaatgctacttaagagtcactgcagaagcatggagagagagaaaaaaaaaaaagacccaattgggtggggggtgggggggaggcaagggtttacagagtaacaacttacgtgttgttgtaaattacctcatctgtataccttgtattgggacactatttctcagcactacctgtgtctgcattgcttagatggcaggaaatggaatggccaacatgaaaggttatgttggcaattactctgaaagattttttaaagtatttttaaactttgtttgaagtggtccctcccctcttcctctgcttttttttaagtttgaagccagaaggccctccccaccttgctttattggttgtaattgtattgtaattggtatgactaaaccataactgtgctgggaagaagttgtgccatgaaggtctttaattttttttaataaaaacatttaaataaatgaaatgtccctgcagcctgagcaatatgcttctccaaccgacaccgtgtgtgatagatggctccgttttcacgttttgaattctgtttcttgtacttgaaatgcctgtccagcttacataagatagattaaattgttagagtgggactgtcagaggaatatatcttgtaaagtagatcctcagggtatggctaattactatagtcctaaagtagcagagaaaattagagattggttgacagatttgggaattttaatttcttcttagtttttaactttcatctttgcttcaccttttgacaagtatggttataattagaattgaccatttaagcatctcttgaaaaacctgattttgtcccaccagcaaattctctcccaagactggaattgggtttgcatagtagagagcctgtcttcccagggccttttcctagttaaagaaacacttaactaaaaaggctgtgtggtaaggtcatgctcagttccttcctcaaaaaatgagtctaaaattggtttatcctgaatccgacttcccccactgtcatcacttacccttgcccttctttttcctcagaacacctgaacttttgttgtattattttgtatctccccacttgcatgtaaactccctggtgaccttgcatgtcttatgcaatcctcattaaaaccttttgtttttttttttaagtgggttcgttttccctcaggatcgaagagtattgaatggaatggcacgaggaaaatatttaacaccctacttggcttgtaataataggtgcttaataaattgtagttccactctcca

SEQ ID NO: 11743 - protein, 391 aa, Homo sapiens; identical to SEQ ID NO: 1947

SEQ ID NO: 11744 - DNA, 4899 bp, Homo sapiens
cccgcctcctggtaggagggggtttccgcttccggcagcagcggctgcagcctcgctctggtccctgcggctggcggccgagccgtgtgtctcctcctccatcgccgccatattgtctgtgtgagcagaggggagagcggccgccgccgctgccgcttccaccacagaaatcaagatgactaccagctggttcgaaaattaggccgaggtaaatacagtgaagtatttgaagccatcaacatcacaaataatgaaaaagttgttgttaaaattctcaagccagtaaaaaagaagaaaattaagcgtgaaataaagattttggagaatttgagaggaggtcccaacatcatcacactggcagacattgtaaaagaccctgtgtcacgaacccccgccttggtttttgaacacgtaaacaacacagacttcaagcaattgtaccagacgttaacagactatgatattcgattttacatgtatgagattctgaaggccctggattattgtcacagcatgggaattatgcacagagatgtcaagccccataatgtcatgattgatcatgagcacagaaagctacgactaatagactggggtttggctgagttttatcatcctggccaagaatataatgtccgagttgcttcccgatacttcaaaggtcctgagctacttgtagactatcagatgtacgattatagtttggatatgtggagtttgggttgtatgctggcaagtatgatctttcggaaggagccatttttccatggacatgacaattatgatcagttggtgaggatagccaaggttctggggacagaagatttatatgactatattgacaaatacaacattgaattagatccacgtttcaatgatatcttgggcagacactctcgaaagcgatgggaacgctttgtccacagtgaaaatcagcaccttgtcagccctgaggccttggatttcctggacaaactgctgcgatatgaccaccagtcacggcttactgcaagagaggcaatggagcacccctatttctacactgttgtgaaggaccaggctcgaatgggttcatctagcatgccagggggcagtacgcccgtcagcagcgccaatatgatgtcagggatttcttcagtgccaaccccttcaccccttggacctctggcaggctcaccagtgattgctgctgccaacccccttgggatgcctgttccagctgccgctggcgctcagcagtaacggccctatctgtctcctgatgcctgagcagaggtgggggagtccaccctctccttgatgcagcttgcgcctggcggggaggggtgaaacacttcagaagcaccgtgtctgaaccgttgcttgtggatttatagtagttcagtcataaaaaaaaaattataataggctgattttcttttttctttttttttttaactcgaacttttcataactcaggggattccctgaaaaattacctgcaggtggaatatttcatggacaaatttttttttctcccctcccaaatttagttcctcatcacaaaagaacaaagataaaccagcctcaatcccggctgctgcatttaggtggagacttcttcccattcccaccattgttcctccaccgtcccacactttagggggttggtatctcgtgctcttctccagagattacaaaaatgtagcttctcaggggaggcaggaagaaaggaaggaaggaaagaaggaagggaggacccaatctataggagcagtggactgcttgctggtcgcttacatcactttactccataagcgcttcagtggggttatcctagtggctcttgtggaagtgtgtcttagttacatcaagatgttgaaaatctacccaaaatgcagacagatactaaaaacttctgttcagtaagaatcatgtcttactgatctaaccctaaatccaactcatttatacttttatttttagttcagtttaaaatgttgataccttccctcccaggctccttaccttggtcttttccctgttcatctcccaacatgctgtgctccatagctggtaggagagggaaggcaaaatctttcttagttttctttgtcttggccattttgaattcatttagttactgggcataacttactgctttttacaaaagaaacaaacattgtctgtacaggtttcatgctagagctaatgggagatgtggccacactgacttccattttaagctttctaccttcttttcctccgaccgtccccttccctcacatgccatccagtgagaagacctgctcctcagtcttgtaaatgtatcttgagaggtaggagcagagccactatctccattgaagctgaaatggtagacctgtaattgtgggaaaactataaactctcttgttacagccccgccaccccttgctgtgtgtatatatataatactttgtccttcatatgtgaaagatccagtgttggaattctttggtgtaaataaacgtttggttttatttatcaaggttagatttaagttccctgtgtaaaggtcttgctgggtgggtgtctcatgttcacatctgaggggcctgcagccctgtaccgtggaggcttcccaaggcccccattttatacacccctcgttcgacccatggtaccgggcagagcagagaggccttaaaaaaaaagcaccacaagccaaagcgtctctggggattaaggatcctttgccataaaactcattttgtgtctcagcagtgcagggattggggatggaaaaagtcgccagtttttgtgtgtttgtgtgtgtgtgtaaagtggactttccactgtaatccaaccacctaagtttatcaggtgcttcactgaggaagcctagttttttaagcacaatagcaaaaccatcagctctgtattttctcctgttatttcattacagtagctgcttgtgggaactaggaaaaattcttccaacatattttaaggcctaaaatcttagttccccattctcctaccttatagattcacaggcctttctcgcctaggcatcatagataaacgtaattgtttggggagttgaatttaatgaacttatctaactttgtaacccatcttggctttagtaactttatcaaggtggtggctttagtgaatataatggtaaactttagaggacgctaaagcctccttttatagcgcttctcaacggtagggagagctgaagggaaaacattctgactgtgtggcagggtgattttcttccttatgaccacttacagtggatatttattgtacttgacccttttatgccctagaatgctgtgagggttaccatgttgaatttgtgcagaagctaaaagcaccagatgtgccagagatgcaatttgtgattatgtttgcactggattgtgatttgaacaggacacttataactaatgagttctttcttttgaggtggggagagggttgtaaatcaagacttcataccctatccttgtagctcggaaattgaggtgtagcttaggctgatgcggagagctgcagacagctggacctccttacacccatcagaccttggaataaaccgaaggtgaatgcagaggactctgaggtgccacccaagagccttttaaaataaatagaagtttttaaaaatgctacttaagagtcactgcagaagcatggagagagagaaaaaaaaaaaagacccaattgggtggggggtgggggggaggcaagggtttacagagtaacaacttacgtgttgttgtaaattacctcatctgtataccttgtattgggacactatttctcagcactacctgtgtctgcattgcttagatggcaggaaatggaatggccaacatgaaaggttatgttggcaattactctgaaagattttttaaagtatttttaaactttgtttgaagtggtccctcccctcttcctctgcttttttttaagtttgaagccagaaggccctccccaccttgctttattggttgtaattgtattgtaattggtatgactaaaccataactgtgctgggaagaagttgtgccatgaaggtctttaattttttttaataaaaacatttaaataaatgaaatgtccctgcagcctgagcaatatgcttctccaaccgacaccgtgtgtgatagatggctccgttttcacgttttgaattctgtttcttgtacttgaaatgcctgtccagcttacataagatagattaaattgttagagtgggactgtcagaggaatatatcttgtaaagtagatcctcagggtatggctaattactatagtcctaaagtagcagagaaaattagagattggttgacagatttgggaattttaatttcttcttagtttttaactttcatctttgcttcaccttttgacaagtatggttataattagaattgaccatttaagcatctcttgaaaaacctgattttgtcccaccagcaaattctctcccaagactggaattgggtttgcatagtagagagcctgtcttcccagggccttttcctagttaaagaaacacttaactaaaaaggctgtgtggtaaggtcatgctcagttccttcctcaaaaaatgagtctaaaattggtttatcctgaatccgacttcccccactgtcatcacttacccttgcccttctttttcctcagaacacctgaacttttgttgtattattttgtatctccccacttgcatgtaaactccctggtgaccttgcatgtcttatgcaatcctcattaaaaccttttgtttttttttttaagtgggttcgttttccctcaggatcgaagagtattgaatggaatggcacgaggaaaatatttaacaccctacttggcttgtaataataggtgcttaataaattgtagttccactctcca

SEQ ID NO: 11745 - protein, 255 aa, Homo sapiens; identical to SEQ ID NO: 1951

SEQ ID NO: 11746 - DNA, 2413 bp, Homo sapiens
agtgccaaccccttcaccccttggacctctggcaggctcaccagtgattgctgctgccaacccccttgggatgcctgttccagctgccgctggcgctcagcagtaacggccctatctgtctcctgatgcctgagcagaggtgggggagtccaccctctccttgatgcagcttgcgcctggcggggaggggtgaaacacttcagaagcaccgtgtctgaaccgttgcttgtggatttatagtagttcagtcataaaaaaaaaattataataggctgattttcttttttctttttttttttaactcgaacttttcataactcaggggattccctgaaaaattacctgcaggtggaatatttcatggacaaatttttttttctcccctcccaaatttagttcctcatcacaaaagaacaaagataaaccagcctcaatcccggctgctgcatttaggtggagacttcttcccattcccaccattgttcctccaccgtcccacactttagggggttggtatctcgtgctcttctccagagattacaaaaatgtagcttctcaggggaggcaggaagaaaggaaggaaggaaagaaggaagggaggacccaatctataggagcagtggactgcttgctggtcgcttacatcatatctccattgaagctgaaatggtagacctgtaattgtgggaaaactataaactctcttgttacagccccgccaccccttgctgtgtgtatatatataatactttgtccttcatatgtgaaagatccagtgttggaattctttggtgtaaataaacgtttggttttatttatcaaggttagatttaagttccctgtgtaaaggtcttgctgggtgggtgtctcatgttcacatctgaggggcctgcagccctgtaccgtggaggcttcccaaggcccccattttatacacccctcgttcgacccatggtaccgggcagagcagagaggccttaaaaaaaaagcaccacaagccaaagcgtctctggggattaaggatcctttgccataaaactcattttgtgtctcagcagtgcagggattggggatggaaaaagtcgccagtttttgtgtgtttgtgtgtgtgtgtaaagtggactttccactgtaatccaaccacctaagtttatcaggtgcttcactgaggaagcctagttttttaagcacaatagcaaaaccatcagctctgtattttctcctgttatttcattacagtagctgcttgtgggaactaggaaaaattcttccaacatattttaaggcctaaaatcttagttccccattctcctaccttatagattcacaggcctttctcgcctaggcatcatagataaacgtaattgtttggggagttgaatttaatgaacttatctaactttgtaacccatcttggctttagtaactttatcaaggtggtggctttagtgaatataatggtaaactttagaggacgctaaagcctccttttatagcgcttctcaacggtagggagagctgaagggaaaacattctgactgtgtggcagggtgattttcttccttatgaccacttacagtggatatttattgtacttgacccttttatgccctagaatgctgtgagggttaccatgttgaatttgtgcagaagctaaaagcaccagatgtgccagagatgcaatttgtgattatgtttgcactggattgtgatttgaacaggacacttataactaatgagttctttcttttgaggtggggagagggttgtaaatcaagacttcataccctatccttgtagctcggaaattgaggtgtagcttaggctgatgcggagagctgcagacagctggacctccttacacccatcagaccttggaataaaccgaaggtgaatgcagaggactctgaggtgccacccaagagccttttaaaataaatagaagtttttaaaaatgctacttaagagtcactgcagaagcatggagagagagaaaaaaaaaaaagacccaattgggtggggggtgggggggaggcaagggtttacagagtaacaacttacgtgttgttgtaaattacctcatctgtataccttgtattgggacactatttctcagcactacctgtgtctgcattgcttagatggcaggaaatggaatggccaacatgaaaggttatgttggcaattactctgaaagattttttaaagtatttttaaactttgtttgaagtggtccctcccctcttcctctgcttttttttaagtttgaagccagaaggccctccccaccttgctttattggttgtaattgtattgtaattggtatgactaaaccataactgtgctgggaagaagttgtgccatgaaggtctttaattttttttaataaaaacatttaaataaatgaaatgtc

SEQ ID NO: 11747 - protein, 40 aa, Homo sapiens
MQFVIMFALDCDLNRTLITNEFFLLRWGEGCKSRLHTLSL

SEQ ID NO: 11748 - DNA, 4427 bp, Homo sapiens
cccgcctcctggtaggagggggtttccgcttccggcagcagcggctgcagcctcgctctggtccctgcggctggcggccgagccgtgtgtctcctcctccatcgccgccatattgtctgtgtgagcagaggggagagcggccgccgccgctgccgcttccaccacagctctatcaaggcttgtcaagcagtgtgctcatcacatggtaaatcatgcagcgtggaacctcataaaatctccaagaaacatcattcacccatactgactagtttcacatctctttgtttgaagaaaacaggtctgaaacaaggtcttacccccagctgcttctgaacacagtgactgccagatctccaaacatcaagtccagctttgtccgccaacctgtctgacatgtcgggacccgtgccaagcagggccagagtttacacagatgttaatacacacagacctcgagaatactgggattacgagtcacatgtggtggaatggggaaatcaagatgactaccagctggttcgaaaattaggccgaggtaaatacagtgaagtatttgaagccatcaacatcacaaataatgaaaaagttgttgttaaaattctcaagccagtaaaaaagaagaaaattaagcgtgaaataaagattttggagaatttgagaggaggtcccaacatcatcacactggcagacattgtaaaagaccctgtgtcacgaacccccgccttggtttttgaacacgtaaacaacacagacttcaagcaattgtaccagacgttaacagactatgatattcgattttacatgtatgagattctgaaggccctggattattgtcacagcatgggaattatgcacagagatgtcaagccccataatgtcatgattgatcatgagcacagaaagctacgactaatagactggggtttggctgagttttatcatcctggccaagaatataatgtccgagttgcttcccgatacttcaaaggtcctgagctacttgtagactatcagatgtacgattatagtttggatatgtggagtttgggttgtatgctggcaagtatgatctttcggaaggagccatttttccatggacatgacaattatgatcagttggtgaggatagccaaggttctggggacagaagatttatatgactatattgacaaatacaacattgaattagatccacgtttcaatgatatcttgggcagacactctcgaaagcgatgggaacgctttgtccacagtgaaaatcagcaccttgtcagccctgaggccttggatttcctggacaaactgctgcgatatgaccaccagtcacggcttactgcaagagaggcaatggagcacccctatttctacactgttgtgaaggaccaggctcgaatgggttcatctagcatgccagggggcagtacgcccgtcagcagcgccaatatgatgtcagggatttcttcagtgccaaccccttcaccccttggacctctggcaggctcaccagtgattgctgctgccaacccccttgggatgcctgttccagctgccgctggcgctcagcagtaacggccctatctgtctcctgatgcctgagcagaggtgggggagtccaccctctccttgatgcagcttgcgcctggcggggaggggtgaaacacttcagaagcaccgtgtctgaaccgttgcttgtggatttatagtagttcagtcataaaaaaaaaattataataggctgattttcttttttctttttttttttaactcgaacttttcataactcaggggattccctgaaaaattacctgcaggtggaatatttcatggacaaatttttttttctcccctcccaaatttagttcctcatcacaaaagaacaaagataaaccagcctcaatcccggctgctgcatttaggtggagacttcttcccattcccaccattgttcctccaccgtcccacactttagggggttggtatctcgtgctcttctccagagattacaaaaatgtagcttctcaggggaggcaggaagaaaggaaggaaggaaagaaggaagggaggacccaatctataggagcagtggactgcttgctggtcgcttacatcactttactccataagcgcttcagtggggttatcctagtggctcttgtggaagtgtgtcttagttacatcaagatgttgaaaatctacccaaaatgcagacagatactaaaaacttctgttcagtaagaatcatgtcttactgatctaaccctaaatccaactcatttatacttttatttttagttcagtttaaaatgttgataccttccctcccaggctccttaccttggtcttttccctgttcatctcccaacatgctgtgctccatagctggtaggagagggaaggcaaaatctttcttagttttctttgtcttggccattttgaattcatttagttactgggcataacttactgctttttacaaaagaaacaaacattgtctgtacaggtttcatgctagagctaatgggagatgtggccacactgacttccattttaagctttctaccttcttttcctccgaccgtccccttccctcacatgccatccagtgagaagacctgctcctcagtcttgtaaatgtatcttgagaggtaggagcagagccactatctccattgaagctgaaatggtagacctgtaattgtgggaaaactataaactctcttgttacagccccgccaccccttgctgtgtgtatatatataatactttgtccttcatatgtgaaagatccagtgttggaattctttggtgtaaataaacgtttggttttatttatcaaggttagatttaagttccctgtgtaaaggtcttgctgggtgggtgtctcatgttcacatctgaggggcctgcagccctgtaccgtggaggcttcccaaggcccccattttatacacccctcgttcgacccatggtaccgggcagagcagagaggccttaaaaaaaaagcaccacaagccaaagcgtctctggggattaaggatcctttgccataaaactcattttgtgtctcagcagtgcagggattggggatggaaaaagtcgccagtttttgtgtgtttgtgtgtgtgtgtaaagtggactttccactgtaatccaaccacctaagtttatcaggtgcttcactgaggaagcctagttttttaagcacaatagcaaaaccatcagctctgtattttctcctgttatttcattacagtagctgcttgtgggaactaggaaaaattcttccaacatattttaaggcctaaaatcttagttccccattctcctaccttatagattcacaggcctttctcgcctaggcatcatagataaacgtaattgtttggggagttgaatttaatgaacttatctaactttgtaacccatcttggctttagtaactttatcaaggtggtggctttagtgaatataatggtaaactttagaggacgctaaagcctccttttatagcgcttctcaacggtagggagagctgaagggaaaacattctgactgtgtggcagggtgattttcttccttatgaccacttacagtggatatttattgtacttgacccttttatgccctagaatgctgtgagggttaccatgttgaatttgtgcagaagctaaaagcaccagatgtgccagagatgcaatttgtgattatgtttgcactggattgtgatttgaacaggacacttataactaatgagttctttcttttgaggtggggagagggttgtaaatcaagacttcataccctatccttgtagctcggaaattgaggtgtagcttaggctgatgcggagagctgcagacagctggacctccttacacccatcagaccttggaataaaccgaaggtgaatgcagaggactctgaggtgccacccaagagccttttaaaataaatagaagtttttaaaaatgctacttaagagtcactgcagaagcatggagagagagaaaaaaaaaaaagacccaattgggtggggggtgggggggaggcaagggtttacagagtaacaacttacgtgttgttgtaaattacctcatctgtataccttgtattgggacactatttctcagcactacctgtgtctgcattgcttagatggcaggaaatggaatggccaacatgaaaggttatgttggcaattactctgaaagattttttaaagtatttttaaactttgtttgaagtggtccctcccctcttcctctgcttttttttaagtttgaagccagaaggccctccccaccttgctttattggttgtaattgtattgtaattggtatgactaaaccataactgtgctgggaagaagttgtgccatgaaggtctttaattttttttaataaaaacatttaaataaatgaaatgtc

SEQ ID NO: 11749 - protein, 391 aa, Homo sapiens; identical to SEQ ID NO: 1947

SEQ ID NO: 11750 - DNA, 4310 bp, Homo sapiens
cccgcctcctggtaggagggggtttccgcttccggcagcagcggctgcagcctcgctctggtccctgcggctggcggccgagccgtgtgtctcctcctccatcgccgccatattgtctgtgtgagcagaggggagagcggccgccgccgctgccgcttccaccacagtttgaagaaaacaggtctgaaacaaggtcttacccccagctgcttctgaacacagtgactgccagatctccaaacatcaagtccagctttgtccgccaacctgtctgacatgtcgggacccgtgccaagcagggccagagtttacacagatgttaatacacacagacctcgagaatactgggattacgagtcacatgtggtggaatggggaaatcaagatgactaccagctggttcgaaaattaggccgaggtaaatacagtgaagtatttgaagccatcaacatcacaaataatgaaaaagttgttgttaaaattctcaagccagtaaaaaagaagaaaattaagcgtgaaataaagattttggagaatttgagaggaggtcccaacatcatcacactggcagacattgtaaaagaccctgtgtcacgaacccccgccttggtttttgaacacgtaaacaacacagacttcaagcaattgtaccagacgttaacagactatgatattcgattttacatgtatgagattctgaaggccctggattattgtcacagcatgggaattatgcacagagatgtcaagccccataatgtcatgattgatcatgagcacagaaagctacgactaatagactggggtttggctgagttttatcatcctggccaagaatataatgtccgagttgcttcccgatacttcaaaggtcctgagctacttgtagactatcagatgtacgattatagtttggatatgtggagtttgggttgtatgctggcaagtatgatctttcggaaggagccatttttccatggacatgacaattatgatcagttggtgaggatagccaaggttctggggacagaagatttatatgactatattgacaaatacaacattgaattagatccacgtttcaatgatatcttgggcagacactctcgaaagcgatgggaacgctttgtccacagtgaaaatcagcaccttgtcagccctgaggccttggatttcctggacaaactgctgcgatatgaccaccagtcacggcttactgcaagagaggcaatggagcacccctatttctacactgttgtgaaggaccaggctcgaatgggttcatctagcatgccagggggcagtacgcccgtcagcagcgccaatatgatgtcagggatttcttcagtgccaaccccttcaccccttggacctctggcaggctcaccagtgattgctgctgccaacccccttgggatgcctgttccagctgccgctggcgctcagcagtaacggccctatctgtctcctgatgcctgagcagaggtgggggagtccaccctctccttgatgcagcttgcgcctggcggggaggggtgaaacacttcagaagcaccgtgtctgaaccgttgcttgtggatttatagtagttcagtcataaaaaaaaaattataataggctgattttcttttttctttttttttttaactcgaacttttcataactcaggggattccctgaaaaattacctgcaggtggaatatttcatggacaaatttttttttctcccctcccaaatttagttcctcatcacaaaagaacaaagataaaccagcctcaatcccggctgctgcatttaggtggagacttcttcccattcccaccattgttcctccaccgtcccacactttagggggttggtatctcgtgctcttctccagagattacaaaaatgtagcttctcaggggaggcaggaagaaaggaaggaaggaaagaaggaagggaggacccaatctataggagcagtggactgcttgctggtcgcttacatcactttactccataagcgcttcagtggggttatcctagtggctcttgtggaagtgtgtcttagttacatcaagatgttgaaaatctacccaaaatgcagacagatactaaaaacttctgttcagtaagaatcatgtcttactgatctaaccctaaatccaactcatttatacttttatttttagttcagtttaaaatgttgataccttccctcccaggctccttaccttggtcttttccctgttcatctcccaacatgctgtgctccatagctggtaggagagggaaggcaaaatctttcttagttttctttgtcttggccattttgaattcatttagttactgggcataacttactgctttttacaaaagaaacaaacattgtctgtacaggtttcatgctagagctaatgggagatgtggccacactgacttccattttaagctttctaccttcttttcctccgaccgtccccttccctcacatgccatccagtgagaagacctgctcctcagtcttgtaaatgtatcttgagaggtaggagcagagccactatctccattgaagctgaaatggtagacctgtaattgtgggaaaactataaactctcttgttacagccccgccaccccttgctgtgtgtatatatataatactttgtccttcatatgtgaaagatccagtgttggaattctttggtgtaaataaacgtttggttttatttatcaaggttagatttaagttccctgtgtaaaggtcttgctgggtgggtgtctcatgttcacatctgaggggcctgcagccctgtaccgtggaggcttcccaaggcccccattttatacacccctcgttcgacccatggtaccgggcagagcagagaggccttaaaaaaaaagcaccacaagccaaagcgtctctggggattaaggatcctttgccataaaactcattttgtgtctcagcagtgcagggattggggatggaaaaagtcgccagtttttgtgtgtttgtgtgtgtgtgtaaagtggactttccactgtaatccaaccacctaagtttatcaggtgcttcactgaggaagcctagttttttaagcacaatagcaaaaccatcagctctgtattttctcctgttatttcattacagtagctgcttgtgggaactaggaaaaattcttccaacatattttaaggcctaaaatcttagttccccattctcctaccttatagattcacaggcctttctcgcctaggcatcatagataaacgtaattgtttggggagttgaatttaatgaacttatctaactttgtaacccatcttggctttagtaactttatcaaggtggtggctttagtgaatataatggtaaactttagaggacgctaaagcctccttttatagcgcttctcaacggtagggagagctgaagggaaaacattctgactgtgtggcagggtgattttcttccttatgaccacttacagtggatatttattgtacttgacccttttatgccctagaatgctgtgagggttaccatgttgaatttgtgcagaagctaaaagcaccagatgtgccagagatgcaatttgtgattatgtttgcactggattgtgatttgaacaggacacttataactaatgagttctttcttttgaggtggggagagggttgtaaatcaagacttcataccctatccttgtagctcggaaattgaggtgtagcttaggctgatgcggagagctgcagacagctggacctccttacacccatcagaccttggaataaaccgaaggtgaatgcagaggactctgaggtgccacccaagagccttttaaaataaatagaagtttttaaaaatgctacttaagagtcactgcagaagcatggagagagagaaaaaaaaaaaagacccaattgggtggggggtgggggggaggcaagggtttacagagtaacaacttacgtgttgttgtaaattacctcatctgtataccttgtattgggacactatttctcagcactacctgtgtctgcattgcttagatggcaggaaatggaatggccaacatgaaaggttatgttggcaattactctgaaagattttttaaagtatttttaaactttgtttgaagtggtccctcccctcttcctctgcttttttttaagtttgaagccagaaggccctccccaccttgctttattggttgtaattgtattgtaattggtatgactaaaccataactgtgctgggaagaagttgtgccatgaaggtctttaattttttttaataaaaacatttaaataaatgaaatgtc

SEQ ID NO: 11751 - protein, 391 aa, Homo sapiens; identical to SEQ ID NO: 1947

SEQ ID NO: 11752 - DNA, 4100 bp, Homo sapiens
cccgcctcctggtaggagggggtttccgcttccggcagcagcggctgcagcctcgctctggtccctgcggctggcggccgagccgtgtgtctcctcctccatcgccgccatattgtctgtgtgagcagaggggagagcggccgccgccgctgccgcttccaccacagaaatcaagatgactaccagctggttcgaaaattaggccgaggtaaatacagtgaagtatttgaagccatcaacatcacaaataatgaaaaagttgttgttaaaattctcaagccagtaaaaaagaagaaaattaagcgtgaaataaagattttggagaatttgagaggaggtcccaacatcatcacactggcagacattgtaaaagaccctgtgtcacgaacccccgccttggtttttgaacacgtaaacaacacagacttcaagcaattgtaccagacgttaacagactatgatattcgattttacatgtatgagattctgaaggccctggattattgtcacagcatgggaattatgcacagagatgtcaagccccataatgtcatgattgatcatgagcacagaaagctacgactaatagactggggtttggctgagttttatcatcctggccaagaatataatgtccgagttgcttcccgatacttcaaaggtcctgagctacttgtagactatcagatgtacgattatagtttggatatgtggagtttgggttgtatgctggcaagtatgatctttcggaaggagccatttttccatggacatgacaattatgatcagttggtgaggatagccaaggttctggggacagaagatttatatgactatattgacaaatacaacattgaattagatccacgtttcaatgatatcttgggcagacactctcgaaagcgatgggaacgctttgtccacagtgaaaatcagcaccttgtcagccctgaggccttggatttcctggacaaactgctgcgatatgaccaccagtcacggcttactgcaagagaggcaatggagcacccctatttctacactgttgtgaaggaccaggctcgaatgggttcatctagcatgccagggggcagtacgcccgtcagcagcgccaatatgatgtcagggatttcttcagtgccaaccccttcaccccttggacctctggcaggctcaccagtgattgctgctgccaacccccttgggatgcctgttccagctgccgctggcgctcagcagtaacggccctatctgtctcctgatgcctgagcagaggtgggggagtccaccctctccttgatgcagcttgcgcctggcggggaggggtgaaacacttcagaagcaccgtgtctgaaccgttgcttgtggatttatagtagttcagtcataaaaaaaaaattataataggctgattttcttttttctttttttttttaactcgaacttttcataactcaggggattccctgaaaaattacctgcaggtggaatatttcatggacaaatttttttttctcccctcccaaatttagttcctcatcacaaaagaacaaagataaaccagcctcaatcccggctgctgcatttaggtggagacttcttcccattcccaccattgttcctccaccgtcccacactttagggggttggtatctcgtgctcttctccagagattacaaaaatgtagcttctcaggggaggcaggaagaaaggaaggaaggaaagaaggaagggaggacccaatctataggagcagtggactgcttgctggtcgcttacatcactttactccataagcgcttcagtggggttatcctagtggctcttgtggaagtgtgtcttagttacatcaagatgttgaaaatctacccaaaatgcagacagatactaaaaacttctgttcagtaagaatcatgtcttactgatctaaccctaaatccaactcatttatacttttatttttagttcagtttaaaatgttgataccttccctcccaggctccttaccttggtcttttccctgttcatctcccaacatgctgtgctccatagctggtaggagagggaaggcaaaatctttcttagttttctttgtcttggccattttgaattcatttagttactgggcataacttactgctttttacaaaagaaacaaacattgtctgtacaggtttcatgctagagctaatgggagatgtggccacactgacttccattttaagctttctaccttcttttcctccgaccgtccccttccctcacatgccatccagtgagaagacctgctcctcagtcttgtaaatgtatcttgagaggtaggagcagagccactatctccattgaagctgaaatggtagacctgtaattgtgggaaaactataaactctcttgttacagccccgccaccccttgctgtgtgtatatatataatactttgtccttcatatgtgaaagatccagtgttggaattctttggtgtaaataaacgtttggttttatttatcaaggttagatttaagttccctgtgtaaaggtcttgctgggtgggtgtctcatgttcacatctgaggggcctgcagccctgtaccgtggaggcttcccaaggcccccattttatacacccctcgttcgacccatggtaccgggcagagcagagaggccttaaaaaaaaagcaccacaagccaaagcgtctctggggattaaggatcctttgccataaaactcattttgtgtctcagcagtgcagggattggggatggaaaaagtcgccagtttttgtgtgtttgtgtgtgtgtgtaaagtggactttccactgtaatccaaccacctaagtttatcaggtgcttcactgaggaagcctagttttttaagcacaatagcaaaaccatcagctctgtattttctcctgttatttcattacagtagctgcttgtgggaactaggaaaaattcttccaacatattttaaggcctaaaatcttagttccccattctcctaccttatagattcacaggcctttctcgcctaggcatcatagataaacgtaattgtttggggagttgaatttaatgaacttatctaactttgtaacccatcttggctttagtaactttatcaaggtggtggctttagtgaatataatggtaaactttagaggacgctaaagcctccttttatagcgcttctcaacggtagggagagctgaagggaaaacattctgactgtgtggcagggtgattttcttccttatgaccacttacagtggatatttattgtacttgacccttttatgccctagaatgctgtgagggttaccatgttgaatttgtgcagaagctaaaagcaccagatgtgccagagatgcaatttgtgattatgtttgcactggattgtgatttgaacaggacacttataactaatgagttctttcttttgaggtggggagagggttgtaaatcaagacttcataccctatccttgtagctcggaaattgaggtgtagcttaggctgatgcggagagctgcagacagctggacctccttacacccatcagaccttggaataaaccgaaggtgaatgcagaggactctgaggtgccacccaagagccttttaaaataaatagaagtttttaaaaatgctacttaagagtcactgcagaagcatggagagagagaaaaaaaaaaaagacccaattgggtggggggtgggggggaggcaagggtttacagagtaacaacttacgtgttgttgtaaattacctcatctgtataccttgtattgggacactatttctcagcactacctgtgtctgcattgcttagatggcaggaaatggaatggccaacatgaaaggttatgttggcaattactctgaaagattttttaaagtatttttaaactttgtttgaagtggtccctcccctcttcctctgcttttttttaagtttgaagccagaaggccctccccaccttgctttattggttgtaattgtattgtaattggtatgactaaaccataactgtgctgggaagaagttgtgccatgaaggtctttaattttttttaataaaaacatttaaataaatgaaatgtc

SEQ ID NO: 11753 - protein, 255 aa, Homo sapiens; identical to SEQ ID NO: 1951

SEQ ID NO: 11754 - DNA, 2840 bp, Homo sapiens
cccgcctcctggtaggagggggtttccgcttccggcagcagcggctgcagcctcgctctggtccctgcggctggcggccgagccgtgtgtctcctcctccatcgccgccatattgtctgtgtgagcagaggggagagcggccgccgccgctgccgcttccaccacagctctatcaaggcttgtcaagcagtgtgctcatcacatggtaaatcatgcagcgtggaacctcataaaatctccaagaaacatcattcacccatactgactagtttcacatctctttgtttgaagaaaacaggtctgaaacaaggtcttacccccagctgcttctgaacacagtgactgccagatctccaaacatcaagtccagctttgtccgccaacctgtctgacatgtcgggacccgtgccaagcagggccagagtttacacagatgttaatacacacagacctcgagaatactgggattacgagtcacatgtggtggaatggggaaatcaagatgactaccagctggttcgaaaattaggccgaggtaaatacagtgaagtatttgaagccatcaacatcacaaataatgaaaaagttgttgttaaaattctcaagccagtaaaaaagaagaaaattaagcgtgaaataaagattttggagaatttgagaggaggtcccaacatcatcacactggcagacattgtaaaagaccctgtgtcacgaacccccgccttggtttttgaacacgtaaacaacacagacttcaagcaattgtaccagacgttaacagactatgatattcgattttacatgtatgagattctgaaggccctggattattgtcacagcatgggaattatgcacagagatgtcaagccccataatgtcatgattgatcatgagcacagaaagctacgactaatagactggggtttggctgagttttatcatcctggccaagaatataatgtccgagttgcttcccgatacttcaaaggtcctgagctacttgtagactatcagatgtacgattatagtttggatatgtggagtttgggttgtatgctggcaagtatgatctttcggaaggagccatttttccatggacatgacaattatgatcagttggtgaggatagccaaggttctggggacagaagatttatatgactatattgacaaatacaacattgaattagatccacgtttcaatgatatcttgggcagacactctcgaaagcgatgggaacgctttgtccacagtgaaaatcagcaccttgtcagccctgaggccttggatttcctggacaaactgctgcgatatgaccaccagtcacggcttactgcaagagaggcaatggagcacccctatttctacactgttgtgaaggaccaggctcgaatgggttcatctagcatgccagggggcagtacgcccgtcagcagcgccaatatgatgtcagggatttcttcagtgccaaccccttcaccccttggacctctggcaggctcaccagtgattgctgctgccaacccccttgggatgcctgttccagctgccgctggcgctcagcagtaacggccctatctgtctcctgatgcctgagcagaggtgggggagtccaccctctccttgatgcagcttgcgcctggcggggaggggtgaaacacttcagaagcaccgtgtctgaaccgttgcttgtggatttatagtagttcagtcataaaaaaaaaattataataggctgattttcttttttctttttttttttaactcgaacttttcataactcaggggattccctgaaaaattacctgcaggtggaatatttcatggacaaatttttttttctcccctcccaaatttagttcctcatcacaaaagaacaaagataaaccagcctcaatcccggctgctgcatttaggtggagacttcttcccattcccaccattgttcctccaccgtcccacactttagggggttggtatctcgtgctcttctccagagattacaaaaatgtagcttctcaggggaggcaggaagaaaggaaggaaggaaagaaggaagggaggacccaatctataggagcagtggactgcttgctggtcgcttacatcactttactccataagcgcttcagtggggttatcctagtggctcttgtggaagtgtgtcttagttacatcaagatgttgaaaatctacccaaaatgcagacagatactaaaaacttctgttcagtaagaatcatgtcttactgatctaaccctaaatccaactcatttatacttttatttttagttcagtttaaaatgttgataccttccctcccaggctccttaccttggtcttttccctgttcatctcccaacatgctgtgctccatagctggtaggagagggaaggcaaaatctttcttagttttctttgtcttggccattttgaattcatttagttactgggcataacttactgctttttacaaaagaaacaaacattgtctgtacaggtttcatgctagagctaatgggagatgtggccacactgacttccattttaagctttctaccttcttttcctccgaccgtccccttccctcacatgccatccagtgagaagacctgctcctcagtcttgtaaatgtatcttgagaggtaggagcagagccactatctccattgaagctgaaatggtagacctgtaattgtgggaaaactataaactctcttgttacagccccgccaccccttgctgtgtgtatatatataatactttgtccttcatatgtgaaagatccagtgttggaattctttggtgtaaataaacgtttggttttatttatcaaggtt

SEQ ID NO: 11755 - protein, 391 aa, Homo sapiens; identical to SEQ ID NO: 1947

SEQ ID NO: 11756 - DNA, 2723 bp, Homo sapiens
cccgcctcctggtaggagggggtttccgcttccggcagcagcggctgcagcctcgctctggtccctgcggctggcggccgagccgtgtgtctcctcctccatcgccgccatattgtctgtgtgagcagaggggagagcggccgccgccgctgccgcttccaccacagtttgaagaaaacaggtctgaaacaaggtcttacccccagctgcttctgaacacagtgactgccagatctccaaacatcaagtccagctttgtccgccaacctgtctgacatgtcgggacccgtgccaagcagggccagagtttacacagatgttaatacacacagacctcgagaatactgggattacgagtcacatgtggtggaatggggaaatcaagatgactaccagctggttcgaaaattaggccgaggtaaatacagtgaagtatttgaagccatcaacatcacaaataatgaaaaagttgttgttaaaattctcaagccagtaaaaaagaagaaaattaagcgtgaaataaagattttggagaatttgagaggaggtcccaacatcatcacactggcagacattgtaaaagaccctgtgtcacgaacccccgccttggtttttgaacacgtaaacaacacagacttcaagcaattgtaccagacgttaacagactatgatattcgattttacatgtatgagattctgaaggccctggattattgtcacagcatgggaattatgcacagagatgtcaagccccataatgtcatgattgatcatgagcacagaaagctacgactaatagactggggtttggctgagttttatcatcctggccaagaatataatgtccgagttgcttcccgatacttcaaaggtcctgagctacttgtagactatcagatgtacgattatagtttggatatgtggagtttgggttgtatgctggcaagtatgatctttcggaaggagccatttttccatggacatgacaattatgatcagttggtgaggatagccaaggttctggggacagaagatttatatgactatattgacaaatacaacattgaattagatccacgtttcaatgatatcttgggcagacactctcgaaagcgatgggaacgctttgtccacagtgaaaatcagcaccttgtcagccctgaggccttggatttcctggacaaactgctgcgatatgaccaccagtcacggcttactgcaagagaggcaatggagcacccctatttctacactgttgtgaaggaccaggctcgaatgggttcatctagcatgccagggggcagtacgcccgtcagcagcgccaatatgatgtcagggatttcttcagtgccaaccccttcaccccttggacctctggcaggctcaccagtgattgctgctgccaacccccttgggatgcctgttccagctgccgctggcgctcagcagtaacggccctatctgtctcctgatgcctgagcagaggtgggggagtccaccctctccttgatgcagcttgcgcctggcggggaggggtgaaacacttcagaagcaccgtgtctgaaccgttgcttgtggatttatagtagttcagtcataaaaaaaaaattataataggctgattttcttttttctttttttttttaactcgaacttttcataactcaggggattccctgaaaaattacctgcaggtggaatatttcatggacaaatttttttttctcccctcccaaatttagttcctcatcacaaaagaacaaagataaaccagcctcaatcccggctgctgcatttaggtggagacttcttcccattcccaccattgttcctccaccgtcccacactttagggggttggtatctcgtgctcttctccagagattacaaaaatgtagcttctcaggggaggcaggaagaaaggaaggaaggaaagaaggaagggaggacccaatctataggagcagtggactgcttgctggtcgcttacatcactttactccataagcgcttcagtggggttatcctagtggctcttgtggaagtgtgtcttagttacatcaagatgttgaaaatctacccaaaatgcagacagatactaaaaacttctgttcagtaagaatcatgtcttactgatctaaccctaaatccaactcatttatacttttatttttagttcagtttaaaatgttgataccttccctcccaggctccttaccttggtcttttccctgttcatctcccaacatgctgtgctccatagctggtaggagagggaaggcaaaatctttcttagttttctttgtcttggccattttgaattcatttagttactgggcataacttactgctttttacaaaagaaacaaacattgtctgtacaggtttcatgctagagctaatgggagatgtggccacactgacttccattttaagctttctaccttcttttcctccgaccgtccccttccctcacatgccatccagtgagaagacctgctcctcagtcttgtaaatgtatcttgagaggtaggagcagagccactatctccattgaagctgaaatggtagacctgtaattgtgggaaaactataaactctcttgttacagccccgccaccccttgctgtgtgtatatatataatactttgtccttcatatgtgaaagatccagtgttggaattctttggtgtaaataaacgtttggttttatttatcaaggtt

SEQ ID NO: 11757 - protein, 391 aa, Homo sapiens; identical to SEQ ID NO: 1947

SEQ ID NO: 11758 - DNA, 2513 bp, Homo sapiens
cccgcctcctggtaggagggggtttccgcttccggcagcagcggctgcagcctcgctctggtccctgcggctggcggccgagccgtgtgtctcctcctccatcgccgccatattgtctgtgtgagcagaggggagagcggccgccgccgctgccgcttccaccacagaaatcaagatgactaccagctggttcgaaaattaggccgaggtaaatacagtgaagtatttgaagccatcaacatcacaaataatgaaaaagttgttgttaaaattctcaagccagtaaaaaagaagaaaattaagcgtgaaataaagattttggagaatttgagaggaggtcccaacatcatcacactggcagacattgtaaaagaccctgtgtcacgaacccccgccttggtttttgaacacgtaaacaacacagacttcaagcaattgtaccagacgttaacagactatgatattcgattttacatgtatgagattctgaaggccctggattattgtcacagcatgggaattatgcacagagatgtcaagccccataatgtcatgattgatcatgagcacagaaagctacgactaatagactggggtttggctgagttttatcatcctggccaagaatataatgtccgagttgcttcccgatacttcaaaggtcctgagctacttgtagactatcagatgtacgattatagtttggatatgtggagtttgggttgtatgctggcaagtatgatctttcggaaggagccatttttccatggacatgacaattatgatcagttggtgaggatagccaaggttctggggacagaagatttatatgactatattgacaaatacaacattgaattagatccacgtttcaatgatatcttgggcagacactctcgaaagcgatgggaacgctttgtccacagtgaaaatcagcaccttgtcagccctgaggccttggatttcctggacaaactgctgcgatatgaccaccagtcacggcttactgcaagagaggcaatggagcacccctatttctacactgttgtgaaggaccaggctcgaatgggttcatctagcatgccagggggcagtacgcccgtcagcagcgccaatatgatgtcagggatttcttcagtgccaaccccttcaccccttggacctctggcaggctcaccagtgattgctgctgccaacccccttgggatgcctgttccagctgccgctggcgctcagcagtaacggccctatctgtctcctgatgcctgagcagaggtgggggagtccaccctctccttgatgcagcttgcgcctggcggggaggggtgaaacacttcagaagcaccgtgtctgaaccgttgcttgtggatttatagtagttcagtcataaaaaaaaaattataataggctgattttcttttttctttttttttttaactcgaacttttcataactcaggggattccctgaaaaattacctgcaggtggaatatttcatggacaaatttttttttctcccctcccaaatttagttcctcatcacaaaagaacaaagataaaccagcctcaatcccggctgctgcatttaggtggagacttcttcccattcccaccattgttcctccaccgtcccacactttagggggttggtatctcgtgctcttctccagagattacaaaaatgtagcttctcaggggaggcaggaagaaaggaaggaaggaaagaaggaagggaggacccaatctataggagcagtggactgcttgctggtcgcttacatcactttactccataagcgcttcagtggggttatcctagtggctcttgtggaagtgtgtcttagttacatcaagatgttgaaaatctacccaaaatgcagacagatactaaaaacttctgttcagtaagaatcatgtcttactgatctaaccctaaatccaactcatttatacttttatttttagttcagtttaaaatgttgataccttccctcccaggctccttaccttggtcttttccctgttcatctcccaacatgctgtgctccatagctggtaggagagggaaggcaaaatctttcttagttttctttgtcttggccattttgaattcatttagttactgggcataacttactgctttttacaaaagaaacaaacattgtctgtacaggtttcatgctagagctaatgggagatgtggccacactgacttccattttaagctttctaccttcttttcctccgaccgtccccttccctcacatgccatccagtgagaagacctgctcctcagtcttgtaaatgtatcttgagaggtaggagcagagccactatctccattgaagctgaaatggtagacctgtaattgtgggaaaactataaactctcttgttacagccccgccaccccttgctgtgtgtatatatataatactttgtccttcatatgtgaaagatccagtgttggaattctttggtgtaaataaacgtttggttttatttatcaaggtt

SEQ ID NO: 11759 - protein, 255 aa, Homo sapiens; identical to SEQ ID NO: 1951

SEQ ID NO: 11760 - DNA, 1493 bp, Homo sapiens
gaggggagagcggccgccgccgctgccgcttccaccacagtttgaagaaaacaggtctgaaacaaggtcttacccccagctgcttctgaacacagtgactgccagatctccaaacatcaagtccagctttgtccgccaacctgtctgacatgtcgggacccgtgccaagcagggccagagtttacacagatgttaatacacacagacctcgagaatactgggattacgagtcacatgtggtggaatggggaaatcaagatgactaccagctggttcgaaaattaggccgaggtaaatacagtgaagtatttgaagccatcaacatcacaaataatgaaaaagttgttgttaaaattctcaagccagtaaaaaagaagaaaattaagcgtgaaataaagattttggagaatttgagaggaggtcccaacatcatcacactggcagacattgtaaaagaccctgtgtcacgaacccccgccttggtttttgaacacgtaaacaacacagacttcaagcaattgtaccagacgttaacagactatgatattcgattttacatgtatgagattctgaaggccctggattattgtcacagcatgggaattatgcacagagatgtcaagccccataatgtcatgattgatcatgagcacagaaagctacgactaatagactggggtttggctgagttttatcatcctggccaagaatataatgtccgagttgcttcccgatacttcaaaggtcctgagctacttgtagactatcagatgtacgattatagtttggatatgtggagtttgggttgtatgctggcaagtatgatctttcggaaggagccatttttccatggacatgacaattatgatcagttggtgaggatagccaaggttctggggacagaagatttatatgactatattgacaaatacaacattgaattagatccacgtttcaatgatatcttgggcagacactctcgaaagcgatgggaacgctttgtccacagtgaaaatcagcaccttgtcagccctgaggccttggatttcctggacaaactgctgcgatatgaccaccagtcacggcttactgcaagagaggcaatggagcacccctatttctacactgttgtgaaggaccaggctcgaatgggttcatctagcatgccagggggcagtacgcccgtcagcagcgccaatatgatgtcagggatttcttcagtgccaaccccttcaccccttggacctctggcaggctcaccagtgattgctgctgccaacccccttgggatgcctgttccagctgccgctggcgctcagcagtaacggccctatctgtctcctgatgcctgagcagaggtgggggagtccaccctctccttgatgcagcttgcgcctggcggggaggggtgaaacacttcagaagcaccgtgtctgaaccgttgcttgtggatttatagtagttcagtcataaaaaaaaaattataataggct

SEQ ID NO: 11761 - protein, 391 aa, Homo sapiens; identical to SEQ ID NO: 1947

SEQ ID NO: 11762 - DNA, 696 bp, Homo sapiens
ataaagtacattaattttgtcctttttaaaattttcttgatgtggctactaacacatttaaaattacacatgtggtttgtattatatttcctttgggccagcactgttttagactattcaggagaaggctttataatataagcccaggcacagtggctcatgcctataatcccagcactttggaaggccaaggcaggcggatcatgaggtcaggagttcgagacgatcctgaccaacatgatgaaaccctgtctctactaaaaatacaaaaaaaaaaaaaaaaggctttataaaggaggtgcagtgggaccaaggccctcctcagaaaaaaatgaaaaggattccatactagaacagatgtggaaagaatgggtaaggacaaaggaatgtttaagatatgctctgcagaatactctttagaatggaggggttcatttataagagtattggcactttgggaggccgaggcaggcagatcacgaggtcaggagatcgagaccatcctggctaacacggtgaaaccccgtctctactaaaaatacaaaaattagcctggcctggtggcgggtgcctgtagtcccagctactcgggaggctgaggcaagagaatggcgtgaacccaggaggcggaggttgcagtgagccaagattgcaccactgcactccagcctgggtgacagagcaagactctgtctc

SEQ ID NO: 11763 - protein, 55 aa, Homo sapiens [sequence omitted]

SEQ ID NO: 11764 - DNA, 1493 bp, Homo sapiens
gttcttctgagattgaacctacaggtgtttgccaagtgcctggcccagagcaagtggccactgcttctcccatctctctcctgcccaacctggtagagctgagggcatgagaggcagagtgcacagtggtcaagggtgcagctctgcagcacaggcagcctaggcctgcgtcccaacctgcctctcaccagctctgtgaccttgggcaagggatttatctgtctgtcccttagttttctcacctgtaaaaggaggataagtatatatatatatttcccagtgttgtgaagattaaaggagtttatcgatgtaggtcttaggatgagtcctggcatttaccaagggttggatatatgttattatcactattaagtgttgagggtccaggcatgctgggcaacagggaccccatctctacaaaaaagtttaaaaaattagccaggcgtggtggtgcacctgtcgtcttagctacttgggaggctgaggtgggaggatcacttgagcccagaagcttgaagctgcagtgagctaggatcgtgccactgcactccaacctgggtgagagagcgagaccctgtctcaagaaaaagaaaaatgcagagaaacaggagtcttggctactcctttagaggcagactcagaccctcctgcctcacagctttatctttgtatttgccccttactttatcttgtgccttgagaaattgctggggagagaggtatgtccactgggcagctgtacaggatggaggatatagggcgtttccactcccagcagccaggttccctcaccccaagctcacccactgttggggagattatctacaataacaccagaaacacattggggtggattgggggtatccttatgggttcttttcagggaaccattgctggacaaggcacaggagccacctccatttctgagctctgcaagggacaagaactagagccatcaggggctgggctcactgtggccccaccccaagccgtcagcctccagggatctacaccctgccttggctgctacagctttttcactccactgccctaggggagttcagcaacctaatgatctctatctctgaacatctcttcatcccatgctccaagtccagcaactgcactccagcctgggtgacagagcgagactccatctcaaaaaaataataaagatgtggggcctgtgggaggtggttaggtcatgagggtggagatcatgaatggggttagcaccttataaaacaggcttgagggagcccttctgtcccttctaccatgtgtggatgcagtgagaaggcaccgtatctctgaagcagagagcccgccctggacactggatctgctggcaccttgatcttggacttcccagcctctagaactgtgagaaataattttttgttgtttacaaattacccaggctaaggtgtttcattgtaacctgaatggaccaagctggtgtgaccctgttggaaaactggcagtatctacca

SEQ ID NO: 11765 - protein, 34 aa, Homo sapiens
MLQVQQLHSSLGDRARLHLKKIIKMWGLWEVVRS

SEQ ID NO: 11766 - DNA, 4537 bp, Homo sapiens
gcactccaacctgggtgagagagcgagaccctgtctcaagaaaaagaaaaatgcagagaaacaggagtcttggctactcctttagaggcagactcagaccctcctgcctcacagctttatctttgtatttgccccttactttatcttgtgccttgagaaattgctggggagagaggtatgtccactgggcagctgtacaggatggaggatatagggcgtttccactcccagcagccaggttccctcaccccaagctcacccactgttggggagattatctacaataacaccagaaacacattggggtggattgggggtatccttatgggttcttttcagggaaccattgctggacaaggcacaggagccacctccatttctgagctctgcaagggacaagaactagagccatcaggggctgggctcactgtggccccaccccaagccgtcagcctccagggatctacaccctgccttggctgctacagctttttcactccactgccctaggggagttcagcaacctaatgatctctatctctgaacatctcttcatcccatgctccaagtccagcaacctgcaccctggaaccaggagtggaccctacccgagctgtctgtattaatccccatcccccaccaccaatcttaaaaagccctctgtccccctaccctaaaccccagttaggtacccatgctgggcaggtcagttaacaatttatgcacaggtactagttttattgtattaccgttccagggtagctttgaaaaaagtatctcaaaaagtgagccactgcgcctggctgatcccagcacttttcaaatgatgccgctcaaagccgtgacttggcctactttgaacagcaaacttgttgctgctgttgtcaacctgaaggcctctcaaatgccagcttcaagcagggtgtgaattggccagtgtcagatctcaggagtcctgtgttgagagtgtggctttcagctgcggggagctgcacttggtggggaaagccaggcaggtcaccctcacagccagataatgtggaggtcagaacccaaggaagggagtgagacctccactcccagtgggggacctggccacccatccttggggacctgagaaagcgtacttcaccttggggtgaaggctgggtggggccagagggaccagtgccctcctcagtgcttaggggcagagccacctgcagcaatggtatctgcatattagcccctctccaccttctttctcccgctgaatcatttccctcaaagcccaagagctgtcactgcttctttctccctgggaagaatgcgtggactctgcctggtgatagactgaagccagaacagtgccacaccctcgccttaattccttgctaggtgttctcagatttatgagacttcttagtcaaatatgagggaggttggatgtggtggcttgtgcctgtaatcccagcattttgggaagccgaggtgggaggatcccttgaagccaggagtttgagacaagcctgggcaacaaagcaagaccctatctctaaaaaaaaaaaaaaaaaaaaaaaaaaaaaaaaaaaaaaaaaatctaggagatgctctttaccctgcctggcctcaaactattaatagcttcctttgagcaacattatttattatgaactttcaaacacaaaaaagtagagagagtagaataacaaatccccatgagcccatcacccaacttcagtaattatcaattcatggccatcttgttcacccctgcctgcttccctgcttcccctcattctgcagaggttcttttcttttgagacagagtgttgctctgttgcccaggctggagtgcagtggtgcaacttcggctcactgcaacctccgcctcccaggttcaagtgattctcctgcttcagcctctcaagtagctgggattacagatgcccgccaccacacctggctaattttcgtatttttgttagagatggggtttcaccatgttggccaggctggtctcgaactcctgacctcaagtgatccgcccgccttggcctcccaaaatgctgggattacaggtgtgaaccacggtgcctggccactgtacaggttatttatagaagttggagagtgaagggttgagaaagccaaggggcagatgcgggtctggaggattttgtgcctaaggccctctctttgctcccagacagcatgaagtaacaatgaggcatccacctcttggttttgtggcctctgtggatgacgtctctcaccttgaaccagttcagagttggagtagcgcaggatcctgtcttcagaggaggggccgaagcgggttcctctgttgtcaagctctttggaggtgcctggctgctactactgtcccagagaggtgatgatgaatgatgggtgtgtccagtggcagtttgccccactgaggcaggggcttccactaggccctgacagagcccttccagcaggcagaaatccctgtgctaggcaagattcaaactccgtagcatgtctcctgctcccatctcttaggaatggagtccttcaggccttgagtcccacattttccatgatgctccattaagcagctgatagcacccccacctccagggaaagtgagttcagagtccttggtctaatgcatctgtgttgaaattgaggccttcccctgtgttcacctttctgctctttttcttttagcccaaggctatgaaggcctcattcggtgctgggcatggtcactcctagcattcctcactctgttgctaacagcaacagcaataataataagggttacaacttactccataccttactgtctgccaggcattaagctaagtgctttacatatattaagtcatttaatcctcataatgaccctatgaaagagataccatctcaacccaattgacagctggtttgcaagattaggagggatgaaggacccaggggacaatgcgagggaaaactctgaccccggggccccaggctggatgttctttatgcctgtgaaccacagcttatcacatgtctggagttagggaccccacttaaagtgagattttggctggaggtggtggatcatacctataatcccagcactttgggagaccaaggcagaaggactgcttgaggccaggagttcaaaaccagtgtaggtaacagctagaccctatctctacaaaaaatttaaaaattagctgggtgtggtggtatgtgcctcaagttccagctactcaggaggctgaggtgggaggatcacttgagcacaggagtttgaagttacagtgagctatgatggcaccactgcacttcagcctaggcaacagagggagaccctgtctttaaagtacatagaggtttttcacaccaacacatctctgcccagtgtgccaacatctgccacctgctataatagtactataacactcaatatgtaattaatgtagtctcagggatgttatgacaatatgattacaactatcacgtgtgtgcccagccaggctcaatgccccaggctgggcgaggtggggcaggggacacagcctaaaatgccaggcctcaggaagccatttggtttagcagacattgtttattaaaggagttacctatgccagatcgaaggcctaagatgattaagacactatgagtgccttcaagtggttggggacgttcatgattgtggtacagacaaataggctttcacatcattcttttatgtaatcatacaacagatatttgcacctacatgtgcagagcactgtgataggcctcagtgacacagaataatacggcaaagaccccacccgatgagccccctcccaccacccaccagtacagtagggggtggtttaatggagtgttcctggaatatgaagtgggggcaggcattaggggtggcaaagggacaagtgtttatctgatcagttatgtactgtttataataagtaaatcagcagagggggaataatacttagaacctatagagagtaaatctgacaagatgaaatgctgatgaaaatatggaggaaatgaaactctcatgggttttgcagggaatctaagtcagtgctgtgttgtgaatgtaggtgtaccctttgaattcatatgttgaatcctaacccccaaagcaatggcattaagaggtggggcctttggggctgggtatggtggctcatgactgtaatcccagcactttgggatgctggcagggggcagatcacttgaagccaggagtctgagatcagcctggccaacatggtgaaaccccatctgtactaaaaatacaaaaattagccaggtgtgatggcgtacatctgtaatttcagccactcgggaggctgagacaggagaatagcttgaacccagtaggtggagatttcagtgagccgagatcgtgccactgcactccagcctgggtgacagagcgagactccatctcaaaaaaataataaagatgtggggcctgtgggaggtggttaggtcatgagggtggagatcatgaatggggttagcaccttataaaacaggcttgagggagccc

SEQ ID NO: 11767 - protein, 77 aa, Homo sapiens
MLGRSVNNLCTGTSFIVLPFQGSFEKSISKSEPLRLADPSTFQMMPLKAVTWPTLNSKLVAAVVNLKASQMPASSRV

SEQ ID NO: 11768 - DNA, 4973 bp, Homo sapiens
gcactccaacctgggtgagagagcgagaccctgtctcaagaaaaagaaaaatgcagagaaacaggagtcttggctactcctttagaggcagactcagaccctcctgcctcacagctttatctttgtatttgccccttactttatcttgtgccttgagaaattgctggggagagaggtatgtccactgggcagctgtacaggatggaggatatagggcgtttccactcccagcagccaggttccctcaccccaagctcacccactgttggggagattatctacaataacaccagaaacacattggggtggattgggggtatccttatgggttcttttcagggaaccattgctggacaaggcacaggagccacctccatttctgagctctgcaagggacaagaactagagccatcaggggctgggctcactgtggccccaccccaagccgtcagcctccagggatctacaccctgccttggctgctacagctttttcactccactgccctaggggagttcagcaacctaatgatctctatctctgaacatctcttcatcccatgctccaagtccagcaacctgcaccctggaaccaggagtggaccctacccgagctgtctgtattaatccccatcccccaccaccaatcttaaaaagccctctgtccccctaccctaaaccccagttaggtacccatgctgggcaggtcagttaacaatttatgcacaggtactagttttattgtattaccgttccagggtagctttgaaaaaagtatctcaaaaaggcaacatggccaccgcgcccagccaaattaaattttttatagagatgaggtcatgctgttatgttgcccaggttggcctcatgagatcttgccttagcctcccaaagtgctgggattacagatgtgagacactgcacccaaaccccaccacttttttttttcctttttctttttttgagacagtcttactccgttgcccaggctggagtgtagtggcatgatctcagctcactgcaacctccgcctcccgggttcaagcaattctcctgcctcagcctcccgagtagctgggattacagaggcctgccaccacacccgactaattttcgtatttttagtagagacggggtttctccatgttggccaggctgttcttgaactcctgacctcaagtgctccacctgcgttggcttcccaaagtgctgggatacaggagtgagccactgcgcctggctgatcccagcacttttcaaatgatgccgctcaaagccgtgacttggcctactttgaacagcaaacttgttgctgctgttgtcaacctgaaggcctctcaaatgccagcttcaagcagggtgtgaattggccagtgtcagatctcaggagtcctgtgttgagagtgtggctttcagctgcggggagctgcacttggtggggaaagccaggcaggtcaccctcacagccagataatgtggaggtcagaacccaaggaagggagtgagacctccactcccagtgggggacctggccacccatccttggggacctgagaaagcgtacttcaccttggggtgaaggctgggtggggccagagggaccagtgccctcctcagtgcttaggggcagagccacctgcagcaatggtatctgcatattagcccctctccaccttctttctcccgctgaatcatttccctcaaagcccaagagctgtcactgcttctttctccctgggaagaatgcgtggactctgcctggtgatagactgaagccagaacagtgccacaccctcgccttaattccttgctaggtgttctcagatttatgagacttcttagtcaaatatgagggaggttggatgtggtggcttgtgcctgtaatcccagcattttgggaagccgaggtgggaggatcccttgaagccaggagtttgagacaagcctgggcaacaaagcaagaccctatctctaaaaaaaaaaaaaaaaaaaaaaaaaaaaaaaaaaaaaaaaaatctaggagatgctctttaccctgcctggcctcaaactattaatagcttcctttgagcaacattatttattatgaactttcaaacacaaaaaagtagagagagtagaataacaaatccccatgagcccatcacccaacttcagtaattatcaattcatggccatcttgttcacccctgcctgcttccctgcttcccctcattctgcagaggttcttttcttttgagacagagtgttgctctgttgcccaggctggagtgcagtggtgcaacttcggctcactgcaacctccgcctcccaggttcaagtgattctcctgcttcagcctctcaagtagctgggattacagatgcccgccaccacacctggctaattttcgtatttttgttagagatggggtttcaccatgttggccaggctggtctcgaactcctgacctcaagtgatccgcccgccttggcctcccaaaatgctgggattacaggtgtgaaccacggtgcctggccactgtacaggttatttatagaagttggagagtgaagggttgagaaagccaaggggcagatgcgggtctggaggattttgtgcctaaggccctctctttgctcccagacagcatgaagtaacaatgaggcatccacctcttggttttgtggcctctgtggatgacgtctctcaccttgaaccagttcagagttggagtagcgcaggatcctgtcttcagaggaggggccgaagcgggttcctctgttgtcaagctctttggaggtgcctggctgctactactgtcccagagaggtgatgatgaatgatgggtgtgtccagtggcagtttgccccactgaggcaggggcttccactaggccctgacagagcccttccagcaggcagaaatccctgtgctaggcaagattcaaactccgtagcatgtctcctgctcccatctcttaggaatggagtccttcaggccttgagtcccacattttccatgatgctccattaagcagctgatagcacccccacctccagggaaagtgagttcagagtccttggtctaatgcatctgtgttgaaattgaggccttcccctgtgttcacctttctgctctttttcttttagcccaaggctatgaaggcctcattcggtgctgggcatggtcactcctagcattcctcactctgttgctaacagcaacagcaataataataagggttacaacttactccataccttactgtctgccaggcattaagctaagtgctttacatatattaagtcatttaatcctcataatgaccctatgaaagagataccatctcaacccaattgacagctggtttgcaagattaggagggatgaaggacccaggggacaatgcgagggaaaactctgaccccggggccccaggctggatgttctttatgcctgtgaaccacagcttatcacatgtctggagttagggaccccacttaaagtgagattttggctggaggtggtggatcatacctataatcccagcactttgggagaccaaggcagaaggactgcttgaggccaggagttcaaaaccagtgtaggtaacagctagaccctatctctacaaaaaatttaaaaattagctgggtgtggtggtatgtgcctcaagttccagctactcaggaggctgaggtgggaggatcacttgagcacaggagtttgaagttacagtgagctatgatggcaccactgcacttcagcctaggcaacagagggagaccctgtctttaaagtacatagaggtttttcacaccaacacatctctgcccagtgtgccaacatctgccacctgctataatagtactataacactcaatatgtaattaatgtagtctcagggatgttatgacaatatgattacaactatcacgtgtgtgcccagccaggctcaatgccccaggctgggcgaggtggggcaggggacacagcctaaaatgccaggcctcaggaagccatttggtttagcagacattgtttattaaaggagttacctatgccagatcgaaggcctaagatgattaagacactatgagtgccttcaagtggttggggacgttcatgattgtggtacagacaaataggctttcacatcattcttttatgtaatcatacaacagatatttgcacctacatgtgcagagcactgtgataggcctcagtgacacagaataatacggcaaagaccccacccgatgagccccctcccaccacccaccagtacagtagggggtggtttaatggagtgttcctggaatatgaagtgggggcaggcattaggggtggcaaagggacaagtgtttatctgatcagttatgtactgtttataataagtaaatcagcagagggggaataatacttagaacctatagagagtaaatctgacaagatgaaatgctgatgaaaatatggaggaaatgaaactctcatgggttttgcagggaatctaagtcagtgctgtgttgtgaatgtaggtgtaccctttgaattcatatgttgaatcctaacccccaaagcaatggcattaagaggtggggcctttggggctgggtatggtggctcatgactgtaatcccagcactttgggatgctggcagggggcagatcacttgaagccaggagtctgagatcagcctggccaacatggtgaaaccccatctgtactaaaaatacaaaaattagccaggtgtgatggcgtacatctgtaatttcagccactcgggaggctgagacaggagaatagcttgaacccagtaggtggagatttcagtgagccgagatcgtgccactgcactccagcctgggtgacagagcgagactccatctcaaaaaaataataaagatgtggggcctgtgggaggtggttaggtcatgagggtggagatcatgaatggggttagcaccttataaaacaggcttgagggagccc

SEQ ID NO: 11769 - protein, 71 aa, Homo sapiens
MATAPSQIKFFIEMRSCCYVAQVGLMRSCLSLPKCWDYRCETLHPNPTTFFFPFSFFETVLLRCPGWSVVA

SEQ ID NO: 11770 - DNA, 3778 bp, Homo sapiens
gcctcccaaagtgctgggattacaggctgagccactgcgcctggctgatcccagcacttttcaaatgatgccgctcaaagccgtgacttggcctactttgaacagcaaacttgttgctgctgttgtcaacctgaaggcctctcaaatgccagcttcaagcagggtgtgaattggccagtgtcagatctcaggagtcctgtgttgagagtgtggctttcagctgcggggagctgcacttggtggggaaagccaggcaggtcaccctcacagccagataatgtggaggtcagaacccaaggaagggagtgagacctccactcccagtgggggacctggccacccatccttggggacctgagaaagcgtacttcaccttggggtgaaggctgggtggggccagagggaccagtgccctcctcagtgcttaggggcagagccacctgcagcaatggtatctgcatattagcccctctccaccttctttctcccgctgaatcatttccctcaaagcccaagagctgtcactgcttctttctccctgggaagaatgcgtggactctgcctggtgatagactgaagccagaacagtgccacaccctcgccttaattccttgctaggtgttctcagatttatgagacttcttagtcaaatatgagggaggttggatgtggtggcttgtgcctgtaatcccagcattttgggaagccgaggtgggaggatcccttgaagccaggagtttgagacaagcctgggcaacaaagcaagaccctatctctaaaaaaaaaaaaaaaaaaaaaaaaaaaaaaaaaaaaaaaaaatctaggagatgctctttaccctgcctggcctcaaactattaatagcttcctttgagcaacattatttattatgaactttcaaacacaaaaaagtagagagagtagaataacaaatccccatgagcccatcacccaacttcagtaattatcaattcatggccatcttgttcacccctgcctgcttccctgcttcccctcattctgcagaggttcttttcttttgagacagagtgttgctctgttgcccaggctggagtgcagtggtgcaacttcggctcactgcaacctccgcctcccaggttcaagtgattctcctgcttcagcctctcaagtagctgggattacagatgcccgccaccacacctggctaattttcgtatttttgttagagatggggtttcaccatgttggccaggctggtctcgaactcctgacctcaagtgatccgcccgccttggcctcccaaaatgctgggattacaggtgtgaaccacggtgcctggccactgtacaggttatttatagaagttggagagtgaagggttgagaaagccaaggggcagatgcgggtctggaggattttgtgcctaaggccctctctttgctcccagacagcatgaagtaacaatgaggcatccacctcttggttttgtggcctctgtggatgacgtctctcaccttgaaccagttcagagttggagtagcgcaggatcctgtcttcagaggaggggccgaagcgggttcctctgttgtcaagctctttggaggtgcctggctgctactactgtcccagagaggtgatgatgaatgatgggtgtgtccagtggcagtttgccccactgaggcaggggcttccactaggccctgacagagcccttccagcaggcagaaatccctgtgctaggcaagattcaaactccgtagcatgtctcctgctcccatctcttaggaatggagtccttcaggccttgagtcccacattttccatgatgctccattaagcagctgatagcacccccacctccagggaaagtgagttcagagtccttggtctaatgcatctgtgttgaaattgaggccttcccctgtgttcacctttctgctctttttcttttagcccaaggctatgaaggcctcattcggtgctgggcatggtcactcctagcattcctcactctgttgctaacagcaacagcaataataataagggttacaacttactccataccttactgtctgccaggcattaagctaagtgctttacatatattaagtcatttaatcctcataatgaccctatgaaagagataccatctcaacccaattgacagctggtttgcaagattaggagggatgaaggacccaggggacaatgcgagggaaaactctgaccccggggccccaggctggatgttctttatgcctgtgaaccacagcttatcacatgtctggagttagggaccccacttaaagtgagattttggctggaggtggtggatcatacctataatcccagcactttgggagaccaaggcagaaggactgcttgaggccaggagttcaaaaccagtgtaggtaacagctagaccctatctctacaaaaaatttaaaaattagctgggtgtggtggtatgtgcctcaagttccagctactcaggaggctgaggtgggaggatcacttgagcacaggagtttgaagttacagtgagctatgatggcaccactgcacttcagcctaggcaacagagggagaccctgtctttaaagtacatagaggtttttcacaccaacacatctctgcccagtgtgccaacatctgccacctgctataatagtactataacactcaatatgtaattaatgtagtctcagggatgttatgacaatatgattacaactatcacgtgtgtgcccagccaggctcaatgccccaggctgggcgaggtggggcaggggacacagcctaaaatgccaggcctcaggaagccatttggtttagcagacattgtttattaaaggagttacctatgccagatcgaaggcctaagatgattaagacactatgagtgccttcaagtggttggggacgttcatgattgtggtacagacaaataggctttcacatcattcttttatgtaatcatacaacagatatttgcacctacatgtgcagagcactgtgataggcctcagtgacacagaataatacggcaaagaccccacccgatgagccccctcccaccacccaccagtacagtagggggtggtttaatggagtgttcctggaatatgaagtgggggcaggcattaggggtggcaaagggacaagtgtttatctgatcagttatgtactgtttataataagtaaatcagcagagggggaataatacttagaacctatagagagtaaatctgacaagatgaaatgctgatgaaaatatggaggaaatgaaactctcatgggttttgcagggaatctaagtcagtgctgtgttgtgaatgtaggtgtaccctttgaattcatatgttgaatcctaacccccaaagcaatggcattaagaggtggggcctttggggctgggtatggtggctcatgactgtaatcccagcactttgggatgctggcagggggcagatcacttgaagccaggagtctgagatcagcctggccaacatggtgaaaccccatctgtactaaaaatacaaaaattagccaggtgtgatggcgtacatctgtaatttcagccactcgggaggctgagacaggagaatagcttgaacccagtaggtggagatttcagtgagccgagatcgtgccactgcactccagcctgggtgacagagcgagactccatctcaaaaaaataataaagatgtggggcctgtgggaggtggttaggtcatgagggtggagatcatgaatggggttagcaccttataaaacaggcttgagggagccc

SEQ ID NO: 11771 - protein, 66 aa, Homo sapiens
MMNDGCVQWQFAPLRQGLPLGPDRALPAGRNPCARQDSNSVACLLLPSLRNGVLQALSPTFSMMLH

SEQ ID NO: 11772 - DNA, 3975 bp, Homo sapiens
gctgggattacagatgtgagacactgcacccaaaccccaccacttttttttttcctttttctttttttgagacagtcttactccgttgcccaggctggagtgtagtggcatgatctcagctcactgcaacctccgcctcccgggttcaagcaattctcctgcctcagcctcccgagtagctgggattacagaggcctgccaccacacccgactaattttcgtatttttagtagagacggggtttctccatgttggccaggctgttcttgaactcctgacctcaagtgctccacctgcgttggcttcccaaagtgctgggatacaggagtgagccactgcgcctggctgatcccagcacttttcaaatgatgccgctcaaagccgtgacttggcctactttgaacagcaaacttgttgctgctgttgtcaacctgaaggcctctcaaatgccagcttcaagcagggtgtgaattggccagtgtcagatctcaggagtcctgtgttgagagtgtggctttcagctgcggggagctgcacttggtggggaaagccaggcaggtcaccctcacagccagataatgtggaggtcagaacccaaggaagggagtgagacctccactcccagtgggggacctggccacccatccttggggacctgagaaagcgtacttcaccttctttctcccgctgaatcatttccctcaaagcccaagagctgtcactgcttctttctccctgggaagaatgcgtggactctgcctggtgatagactgaagccagaacagtgccacaccctcgccttaattccttgctaggtgttctcagatttatgagacttcttagtcaaatatgagggaggttggatgtggtggcttgtgcctgtaatcccagcattttgggaagccgaggtgggaggatcccttgaagccaggagtttgagacaagcctgggcaacaaagcaagaccctatctctaaaaaaaaaaaaaaaaaaaaaaaaaaaaaaaaaaaaaaaaaatctaggagatgctctttaccctgcctggcctcaaactattaatagcttcctttgagcaacattatttattatgaactttcaaacacaaaaaagtagagagagtagaataacaaatccccatgagcccatcacccaacttcagtaattatcaattcatggccatcttgttcacccctgcctgcttccctgcttcccctcattctgcagaggttcttttcttttgagacagagtgttgctctgttgcccaggctggagtgcagtggtgcaacttcggctcactgcaacctccgcctcccaggttcaagtgattctcctgcttcagcctctcaagtagctgggattacagatgcccgccaccacacctggctaattttcgtatttttgttagagatggggtttcaccatgttggccaggctggtctcgaactcctgacctcaagtgatccgcccgccttggcctcccaaaatgctgggattacaggtgtgaaccacggtgcctggccactgtacaggttatttatagaagttggagagtgaagggttgagaaagccaaggggcagatgcgggtctggaggattttgtgcctaaggccctctctttgctcccagacagcatgaagtaacaatgaggcatccacctcttggttttgtggcctctgtggatgacgtctctcaccttgaaccagttcagagttggagtagcgcaggatcctgtcttcagaggaggggccgaagcgggttcctctgttgtcaagctctttggaggtgcctggctgctactactgtcccagagaggtgatgatgaatgatgggtgtgtccagtggcagtttgccccactgaggcaggggcttccactaggccctgacagagcccttccagcaggcagaaatccctgtgctaggcaagattcaaactccgtagcatgtctcctgctcccatctcttaggaatggagtccttcaggccttgagtcccacattttccatgatgctccattaagcagctgatagcacccccacctccagggaaagtgagttcagagtccttggtctaatgcatctgtgttgaaattgaggccttcccctgtgttcacctttctgctctttttcttttagcccaaggctatgaaggcctcattcggtgctgggcatggtcactcctagcattcctcactctgttgctaacagcaacagcaataataataagggttacaacttactccataccttactgtctgccaggcattaagctaagtgctttacatatattaagtcatttaatcctcataatgaccctatgaaagagataccatctcaacccaattgacagctggtttgcaagattaggagggatgaaggacccaggggacaatgcgagggaaaactctgaccccggggccccaggctggatgttctttatgcctgtgaaccacagcttatcacatgtctggagttagggaccccacttaaagtgagattttggctggaggtggtggatcatacctataatcccagcactttgggagaccaaggcagaaggactgcttgaggccaggagttcaaaaccagtgtaggtaacagctagaccctatctctacaaaaaatttaaaaattagctgggtgtggtggtatgtgcctcaagttccagctactcaggaggctgaggtgggaggatcacttgagcacaggagtttgaagttacagtgagctatgatggcaccactgcacttcagcctaggcaacagagggagaccctgtctttaaagtacatagaggtttttcacaccaacacatctctgcccagtgtgccaacatctgccacctgctataatagtactataacactcaatatgtaattaatgtagtctcagggatgttatgacaatatgattacaactatcacgtgtgtgcccagccaggctcaatgccccaggctgggcgaggtggggcaggggacacagcctaaaatgccaggcctcaggaagccatttggtttagcagacattgtttattaaaggagttacctatgccagatcgaaggcctaagatgattaagacactatgagtgccttcaagtggttggggacgttcatgattgtggtacagacaaataggctttcacatcattcttttatgtaatcatacaacagatatttgcacctacatgtgcagagcactgtgataggcctcagtgacacagaataatacggcaaagaccccacccgatgagccccctcccaccacccaccagtacagtagggggtggtttaatggagtgttcctggaatatgaagtgggggcaggcattaggggtggcaaagggacaagtgtttatctgatcagttatgtactgtttataataagtaaatcagcagagggggaataatacttagaacctatagagagtaaatctgacaagatgaaatgctgatgaaaatatggaggaaatgaaactctcatgggttttgcagggaatctaagtcagtgctgtgttgtgaatgtaggtgtaccctttgaattcatatgttgaatcctaacccccaaagcaatggcattaagaggtggggcctttggggctgggtatggtggctcatgactgtaatcccagcactttgggatgctggcagggggcagatcacttgaagccaggagtctgagatcagcctggccaacatggtgaaaccccatctgtactaaaaatacaaaaattagccaggtgtgatggcgtacatctgtaatttcagccactcgggaggctgagacaggagaatagcttgaacccagtaggtggagatttcagtgagccgagatcgtgccactgcactccagcctgggtgacagagcgagactccatctcaaaaaaataataaagatgtggggcctgtgggaggtggttaggtcatgagggtggagatcatgaatggggttagcaccttataaaacaggcttgagggagccc

SEQ ID NO: 11773 - protein, 73 aa, Homo sapiens [sequence omitted]

SEQ ID NO: 11774 - DNA, 1494 bp, Homo sapiens
tctgggctttaagttaggccttaaagaacgaagaatgtttgtgggtgtagtaagcaatgacttggagcagagccctctagccattgggctcaccctcacaggcaggcgccactgaccctaggggggtgtaggcagctggaggaagtactgtgtgtcccccattccagcgatggtggcccctctcagagtcaatacccttccttccaagagactgaacatacaactggacaatggccaggccacatatgacaatagactctggccagaaacccatgaccagcctgggaagccaaggaagccaaaccacagcctcagcagcaatcggacccagaacagtctgaacttagtggctgccagcttcttccaaagtgctgggattataggtatgatccaccacctccagccaaaatctcactttaagtggggtccctaactccagacatgtgataagctgtggttcacaggcataaagaacatccagcctggggccccggggtcagagttttccctcgcattgtcccctgggtccttcatccctcctaatcttgcaaaccagctgtcaattgggttgagatggtatctctttcatagggtcattatgaggattaaatgacttaatatatgtaaagcacttagcttaatgcctggcagacagtaaggtatggagtaagttgtaacccttattattattgctgttgctgttagcaacagagtgaggaatgctaggagtgaccatgcccagcaccgaatgaggccttcatagccttgggctaaaagaaaaagagcagaaaggtgaacacaggggaaggcctcaatttcaacacagatgcattagaccaaggactctgaactcactttccctggaggtgggggtgctatcagctgcttaatggagcatcatggaaaatgtgggactcaaggcctgaaggactccattcctaagagatgggagcaggagacatgctacggagtttgaatcttgcctagcacagggatttctgcctgctggaagggctctgtcagggcctagtggaagcccctgcctcagtggggcaaactgccactggacacacccatcattcatcatcacctctctgggacagtagtagcagccaggcacctccaaagagcttgacaacagaggaacccgcttcggcccctcctctgaagacaggatcctgcgctactccaactctgaactggttcaaggtgagagacgtcatccacagaggccacaaaaccaagaggtggatgcctcattgttacttcatgctgtctgggagcaaagagagggccttaggcacaaaatcctccagacccgcatctgccccttggctttctcaacccttcactctccaacttctataaataacctgtacagtggccaggcaccgtggttcacacctgtaatcccagcattttgggaggccaaggcgggcggatcacttgaggtcaggagttcgagaccagcctggccaacatggtgaaacccca

SEQ ID NO: 11775 - protein, 87 aa, Homo sapiens
MVAPLRVNTLPSKRLNIQLDNGQATYDNRLWPETHDQPGKPRKPNHSLSSNRTQNSLNLVAASFFQSAGIIGMIHHLQPKSHFKWGP

SEQ ID NO: 11776 - DNA, 552 bp, Homo sapiens
ctaaggccctctctttgctcccagacagcatgaagtaacaatgaggcatccacctcttggttttgtggcctctgtggatgacgtctctcaccttgaaccagttcagagttggagtagcgcaggatcctgtcttcagaggaggggccgaagcgggttcctctgttgtcaagctctttggaggtgcctggctgctactactgtcccagagaggctaaggtgtttcattgtaacctgaatggaccaagctggtgtgaccctgttggaaaactggcagtatctaccaaaagccgaacatacgtataaactgatccagcagttccactcctgggtatgtacaccacagaaagctatgtccaccgagacattggcaagaatgtttctaaccacacgctgactgtagccccaaacctgaaacaacccaaatgtccatccaccaacccaaatgtccatccacagttgaagctacagtgaagtcacagggtcgaatactactgcacagcaacgaatatgaatgaaaatatcgctatgcacagcaacatggataaatttcac

SEQ ID NO: 11777 - protein, 64 aa, Homo sapiens [sequence omitted]

SEQ ID NO: 11778 - DNA, 771 bp, Homo sapiens
ttgtatttggcaggggtcaaaggcaggcagggactgtgaaatgttatagtggaaaaaaagggaaggctctgggtgtgctggtttctggccagagtctattgtcatatgtggcctggccattgtccagttgtatgttcagtctcttggaaggaagggtattgactctgagaggggccaccatcgctggaatgggggacacacagtacttcctccagctgcctacacccccctagggtcagtggcgcctgcctgtgagggtgagcccaatggctagagggctctgctccaagtcattgcttactacacccacaaacattcttcgttctttaaggcctaacttaaagcccagatcctacaggaaaccttgattagacccctctctttattaagcttcctaagatcaaaccctgcttttgtgtaaatgctgacctccttgcctacattttaaaaacctagagctgggcatgatggccccagcctgtaatcccagtgattcaggagactgaggtgggaggattgctagaagccaggagttcgagaccagcctgggtaacatagctagaccacatctcttaaaataaaatagttaatttagccaggcatgatgatatatgcctgtagtcccaactacttggaaggctgaggtgtgaggatctttgagcccgggaggtcgaggctacagtaagctatgatctcaccactgtactccagcctgggtgacagagcgagacccagactcaaaaaataaaaataaaaaccctgaatatcttc

SEQ ID NO: 11779 - protein, 33 aa, Homo sapiens
MFSLLEGRVLTLRGATIAGMGDTQYFLQLPTPP

SEQ ID NO: 11780 - DNA, 1448 bp, Homo sapiens
ttgtatttggcaggggtcaaaggcaggcagggactgtgaaatgttatagtggaaaaaaagggaaggctctgggtgtgctggtttctggccagagtctattgtcatatgtggcctggccattgtccagttgtatgttcagtctcttggaaggaagggtattgactctgagaggggccaccatcgctggaatgggggacacacagtacttcctccagctgcctacacccccctagggtcagtggcgcctgcctgtgagggtgagcccaatggctagagggctctgctccaagtcattgcttactacacccacaaacattcttcgttctttaaggcctaacttaaagcccagatcctacaggaaaccttgattagacccctctctttattaagcttcctaagatcaaaccctgcttttgtgtaaatgctgacctccttgcctacattttaaaaacctagagctgggcatgatggccccagcctgtaatcccagtgattcaggagactgaggtgggaggattgctagaagccaggagttcgagaccagcctgggtaacatagctagaccacatctcttaaaataaaatagttaatttagccaggcatgatgatatatgcctgtagtcccaactacttggaaggctgaggtgtgaggatctttgagcccgggaggtcgaggctacagtaagctatgatctcaccactgtactccagcctgggtgacagagcgagacccagactcaaaaaataaaaataaaaaccctgaatatcttccttctacttcttcagtgctgtttttatttaaaaaaaaaaaaaaccagccaaaaccacaactttttactgaagtgtaatgtaaatgctgtaaaaggcagtgaaaggcacaagggaggtggaggggtaggaagggtggaagtggcgggaggaagtggcagggcaggcaaaatgaagggaagccctgggttcttgtcctgcatccgcagccagctcccactttcctcaccctccaggacctgtaaactgtgaggctggaccagttatgtcaaatctgtcctcccccagagctcagtccctctgcccttgggtgtccttggcacaaggcaggctaggctgcaccagcttcctccatctccgtcctgcctcccccatccccaggtgccattcccacaccatctgaatcactgatttcctcgcaatcagacgctatcttccagttaatcacttcgcttgtatttaacataagaaagaaaaaccctttcattatcacatacagctggaaatcggcttcttgcaggaggcgtatccaaaggaattggagaagagataaactggtaattggtgaaagaattactttaattttttttcctacttgctgtcatgatgatgtccttagaattgtgagcccgtggacacttctgtacaataaatctgctattattacttctagaactaca

SEQ ID NO: 11781 - protein, 45 aa, Homo sapiens
MSNLSSPRAQSLCPWVSLAQGRLGCTSFLHLRPASPIPRCHSHTI

SEQ ID NO: 11782 - DNA, 429 bp, Homo sapiens
cgtcgaggccgccagcccctcccccagcatgtttgggctaagccgcctcctttccgcctgcgttggagagagaggtaccagaaggaatgaaaggactggggcttgtctccatggcaactgaaagaaagagagaaaaattggtcacctccaggactgagaccctgacccttccaagcatccccactaccaaaggctgcccaagcccggaaggatcccatcccgttctgtactctgaggtcacttcctcactccgtcaaatttcactggactgtgggctaattaaaagtgcctccgtattagcggggcgtggtggcccatgcctataatcccagctacttgggaagctgaggcaggaaaattgcttgaacccgggtggcggaggctgcagtgacccaacattgtgcaacaagagcgaaactccgtctcaaa

SEQ ID NO: 11783 - protein, 79 aa, Homo sapiens
MKGLGLVSMATERKREKLVTSRTETLTLPSIPTTKGCPSPEGSHPVLYSEVTSSLRQISLDCGLIKSASVLAGRGGPCL

SEQ ID NO: 11784 - DNA, 2520 bp, Homo sapiens
gggtggcgaaggatttataacccacctctttctttcagttgccatggagacaagccccagtcctttcattccttctggtacctctctctccaacgcaggcggaaaggaggcggcttagcccaaacatgctgggggaggggctggcggcctcgacggcagctgcggaactaggccgagggacaaaggctaaggtcagccgcggttcaagccctttcgtctgccgacgaccagcggccagacgctgcgggagcactgctgggctggaggagggctcgagctgcgaggacggcacggagcagcggggtgggactcggggtcgccccaggagagttccgcggcccgggggggcagaggcatgcacaagtggggggcggaaggagggggtggatgaggaggctcgggcccttccacccacgcgtccattgggcggcgccgccatcactctcttctgggctacaccgccttctcttcctccgcggaacccggatcccctcctccaccaccctctccccgccccgtcacgatagcctctcattggacggaggcacggtcaatcctcctcgagttagggagccgactggacgcgaggcctttgggccgtccccagcctcgtcggattggcttcctgcgcgttggcgcaacggaagaggcggccggccgagggcgcgcctctgctctggctggactgccgcggaggaggcgagaaggaatccgacgctggggggcttgctcgggcggcagcgactgctgctgcggatgggagggggccggctcggcgcgcccatggagcgccacggcagggcttccgccacctccgtctcgtcggctggggagcaggcggccggggaccccgaagggcggcggcaggagccactgcggcgccgggcgagcagcgcgtcggtgcccgcggtcggggcctcggctgagggcacgaggcgggatcgactgggctcttacagcggccccacctcggtctcccgccagcgcgtcgaaagcctgaggaaaaagcggccgctttttccatggtttggactggatatcggtggaactctggtcaagctggtatattttgaacccaaagacatcactgctgaagaagaagaggaagaagtggaaagtcttaaaagcattcggaagtacctgacctccaatgtggcttatgggtctacaggcattcgggacgtgcacctcgagctgaaggacctgactctgtgtggacgcaaaggcaatctgcactttatacgctttcccactcatgacatgcctgcttttattcaaatgggcagagataaaaacttctcgagtctccacactgtcttttgtgccactggaggtggagcgtacaaatttgagcaggattttctcacaataggtgatcttcagctttgcaaactggatgaactagattgcttgatcaaaggaattttatacattgactcagtcggattcaatggacggtcacagtgctattactttgaaaaccctgctgattctgaaaagtgtcagaagttaccatttgatttgaaaaatccgtatcctctgcttctggtgaacattggctcaggggttagcatcttagcagtatattccaaagataattacaaacgggtcacaggtactagtcttggaggaggaactttttttggtctctgctgtcttcttactggctgtaccacttttgaagaagctcttgaaatggcatctcgtggagatagcaccaaagtggataaactagtacgagatatttatggaggggactatgagaggtttggactgccaggctgggctgtggcttcaagctttggaaacatgatgagcaaggagaagcgagaggctgtcagtaaagaggacctggccagagcgactttgatcaccatcaccaacaacattggctcaatagcaagaatgtgtgcccttaatgaaaacattaaccaggtggtatttgttggaaatttcttgagaattaatacgatcgccatgcggcttttggcatatgctttggattattggtccaaggggcagttgaaagcacttttttcggaacacgagggttattttggagctgttggagcactccttgagctgttgaagatcccgtgatcattacctggggaggggttcctgaaaccttccacaatgggatctgtggactttcatttttttaagagacttactcaatttcatgactgtactacctgaaacaaagtgagaaaggacaggtgtatttttctaagtcatcaagataaatccttaagaattcagtctaaattagcaaccaggaaggaaaaatatattaaaaacaacaaaaaagtggcacatgtccaggcagtgtgaggatttgctgtatataagttgcctgctttgtatttttgaaatctctgcatcactcattggaagtgcttctgaagagagctgctctgtgttcagttgactggttttgtgtcctgtttgaacttgctgaatgtaaggcaggctactatgcgttataatctaatcacaatttgtcaatatggtcttggc

SEQ ID NO: 11785 - protein, 570 aa, Homo sapiens; identical to SEQ ID NO: 1955

SEQ ID NO: 11786 - DNA, 2600 bp, Homo sapiens
gggtggcgaaggatttataacccacctctttctttcagttgccatggagacaagccccagtcctttcattccttctggtacctctctctccaacgcaggcggaaaggaggcggcttagcccaaacatgctgggggaggggctggcggcctcgacggcagctgcggaactaggccgagggacaaaggctaaggtcagccgcggttcaagccctttcgtctgccgacgaccagcggccagacgctgcgggagcactgctgggctggaggagggctcgagctgcgaggacggcacggagcagcggggtgggactcggggtcgccccaggagagttccgcggcccgggggggcagaggcatgcacaagtggggggcggaaggagggggtggatgaggaggctcgggcccttccacccacgcgtccattgggcggcgccgccatcactctcttctgggctacaccgccttctcttcctccgcggaacccggatcccctcctccaccaccctctccccgccccgtcacgatagcctctcattggacggaggcacggtcaatcctcctcgagttagggagccgactggacgcgaggcctttgggccgtccccagcctcgtcggattggcttcctgcgcgttggcgcaacggaagaggcggccggccgagggcgcgcctctgctctggctggactgccgcggaggaggcgagaaggaatccgacgctggggggcttgctcgggcggcagcgactgctgctgcggatgggagggggccggctcggcgcgcccatggagcgccacggcagggcttccgccacctccgtctcgtcggctggggagcaggcggccggggaccccgaagggcggcggcaggagccactgcggcgccgggcgagcagcgcgtcggtgcccgcggtcggggcctcggctgagggcacgaggcgggatcgactgggctcttacagcggccccacctcggtctcccgccagcgcgtcgaaagcctgaggaaaaagcggccgctttttccatggtttggactggatatcggtggaactctggtcaagctggtatattttgaacccaaagacatcactgctgaagaagaagaggaagaagtggaaagtcttaaaagcattcggaagtacctgacctccaatgtggcttatgggtctacaggcattcgggacgtgcacctcgagctgaaggacctgactctgtgtggacgcaaaggcaatctgcactttatacgctttcccactcatgacatgcctgcttttattcaaatgggcagagataaaaacttctcgagtctccacactgtcttttgtgccactggaggtggagcgtacaaatttgagcaggattttctcacaataggtgatcttcagctttgcaaactggatgaactagattgcttgatcaaaggaattttatacattgactcagtcggattcaatggacggtcacagtgctattactttgaaaaccctgctgattctgaaaagtgtcagaagttaccatttgatttgaaaaatccgtatcctctgcttctggtgaacattggctcaggggttagcatcttagcagtatattccaaagataattacaaacgggtcacaggtactagtcttggaggaggaactttttttggtctctgctgtcttcttactggctgtaccacttttgaagaagctcttgaaatggcatctcgtggagatagcaccaaagtggataaactagtacgagatatttatggaggggactatgagaggtttggactgccaggctgggctgtggcttcaagctttggaaacatgatgagcaaggagaagcgagaggctgtcagtaaagaggacctggccagagcgactttgatcaccatcaccaacaacattggctcaatagcaagaatgtgtgcccttaatgaaaacattaaccaggtggtatttgttggaaatttcttgagaattaatacgatcgccatgcggcttttggcatatgctttggattattggtccaaggggcagttgaaagcacttttttcggaacacgagggttattttggagctgttggagcactccttgagctgttgaagatcccgtgatcattacctggggaggggttcctgaaaccttccacaatgggatctgtggactttcatttttttaagagacttactcaatttcatgactgtactacctgaaacaaagtgagaaaggacaggtgtatttttctaagtcatcaagataaatccttaagaattcagtctaaattagcaaccaggaaggaaaaatatattaaaaacaacaaaaaagtggcacatgtccaggcagtgtgaggatttgctgtatataagttgcctgctttgtatttttgaaatctctgcatcactcattggaagtgcttctgaagagagctgctctgtgttcagttgactggttttgtgtcctgtttgaacttgctgaatgtaaggcaggctactatgcgttataatctaatcacaatttgtcaatatggtcttggcaatcatctgtgcattactctggtttgcattaagcctgtgtgtgaacttactgtaaaacatgttttatttcaaggttctgc

SEQ ID NO: 11787 - protein, 570 aa, Homo sapiens; identical to SEQ ID NO: 1955

SEQ ID NO: 11788 - DNA, 7248 bp, Homo sapiens
gggtggcgaaggatttataacccacctctttctttcagttgccatggagacaagccccagtcctttcattccttctggtacctctctctccaacgcaggcggaaaggaggcggcttagcccaaacatgctgggggaggggctggcggcctcgacggcagctgcggaactaggccgagggacaaaggctaaggtcagccgcggttcaagccctttcgtctgccgacgaccagcggccagacgctgcgggagcactgctgggctggaggagggctcgagctgcgaggacggcacggagcagcggggtgggactcggggtcgccccaggagagttccgcggcccgggggggcagaggcatgcacaagtggggggcggaaggagggggtggatgaggaggctcgggcccttccacccacgcgtccattgggcggcgccgccatcactctcttctgggctacaccgccttctcttcctccgcggaacccggatcccctcctccaccaccctctccccgccccgtcacgatagcctctcattggacggaggcacggtcaatcctcctcgagttagggagccgactggacgcgaggcctttgggccgtccccagcctcgtcggattggcttcctgcgcgttggcgcaacggaagaggcggccggccgagggcgcgcctctgctctggctggactgccgcggaggaggcgagaaggaatccgacgctggggggcttgctcgggcggcagcgactgctgctgcggatgggagggggccggctcggcgcgcccatggagcgccacggcagggcttccgccacctccgtctcgtcggctggggagcaggcggccggggaccccgaagggcggcggcaggagccactgcggcgccgggcgagcagcgcgtcggtgcccgcggtcggggcctcggctgagggcacgaggcgggatcgactgggctcttacagcggccccacctcggtctcccgccagcgcgtcgaaagcctgaggaaaaagcggccgctttttccatggtttggactggatatcggtggaactctggtcaagctggtatattttgaacccaaagacatcactgctgaagaagaagaggaagaagtggaaagtcttaaaagcattcggaagtacctgacctccaatgtggcttatgggtctacaggcattcgggacgtgcacctcgagctgaaggacctgactctgtgtggacgcaaaggcaatctgcactttatacgctttcccactcatgacatgcctgcttttattcaaatgggcagagataaaaacttctcgagtctccacactgtcttttgtgccactggaggtggagcgtacaaatttgagcaggattttctcacaataggtgatcttcagctttgcaaactggatgaactagattgcttgatcaaaggaattttatacattgactcagtcggattcaatggacggtcacagtgctattactttgaaaaccctgctgattctgaaaagtgtcagaagttaccatttgatttgaaaaatccgtatcctctgcttctggtgaacattggctcaggggttagcatcttagcagtatattccaaagataattacaaacgggtcacaggtactagtcttggaggaggaactttttttggtctctgctgtcttcttactggctgtaccacttttgaagaagctcttgaaatggcatctcgtggagatagcaccaaagtggataaactagtacgagatatttatggaggggactatgagaggtttggactgccaggctgggctgtggcttcaagctttggaaacatgatgagcaaggagaagcgagaggctgtcagtaaagaggacctggccagagcgactttgatcaccatcaccaacaacattggctcaatagcaagaatgtgtgcccttaatgaaaacattaaccaggtggtatttgttggaaatttcttgagaattaatacgatcgccatgcggcttttggcatatgctttggattattggtccaaggggcagttgaaagcacttttttcggaacacgagggttattttggagctgttggagcactccttgagctgttgaagatcccgtgatcattacctggggaggggttcctgaaaccttccacaatgggatctgtggactttcatttttttaagagacttactcaatttcatgactgtactacctgaaacaaagtgagaaaggacaggtgtatttttctaagtcatcaagataaatccttaagaattcagtctaaattagcaaccaggaaggaaaaatatattaaaaacaacaaaaaagtggcacatgtccaggcagtgtgaggatttgctgtatataagttgcctgctttgtatttttgaaatctctgcatcactcattggaagtgcttctgaagagagctgctctgtgttcagttgactggttttgtgtcctgtttgaacttgctgaatgtaaggcaggctactatgcgttataatctaatcacaatttgtcaatatggtcttggcaatcatctgtgcattactctggtttgcattaagcctgtgtgtgaacttactgtaaaacatgttttatttcaaggttctgcaaaattaattgggcaggttaattgtgtacctgaaacttaacaagcagtttttggaagggcagttccacgttactttacactaaatcctgggaatgaatgtctggagagacagggcttcttttcttggcagaatttccttgggtagtgggcggactgttctgatgcaagtgggtacactggcagaagcagcacaatctggaggactaacatgagtcagcagggccactagaattgacaccccctcaggggatcagggagaatctggtttttctttcaggctaagtagaaaaggaagaactgaagtgtctgtcaaagaactcatggggagtggggggtccttcagggcactgtggcacttgggaggtgagtctcagaagactgcctgaggagagtgccaggctgcaggtgctcttggtaggggctgaagcttttctttctgctttgcagaataatttcaaaagcctttcccaaggagagaatgcaccttttatatctgaggtcttaagtggtgcccatattgctgttgaaggcaaggatgggcctgtacaaagcagccttggaccaggagggaaaaccccaaggctctgcagcctccctgctcccctccgtttaaggctgtggtcagggagggatgggcagggtgccagccgcatggaggcagcagagacacccgtgttccagctggggcaaggggaactgatatgtgggctgtgggctgttccactaggcgtggccacctctgcacatgggccttggcacttaggaaatatgggtgctgctgcattgggaccttgtgtgggtgcagagcaggatggctgctgcgtggagggtaattttgtcccctggagagtgattggtgaccctcttccctgctgctgctgtttgcaggctcctggcctatactacctctgacgccctgatcctgagttcctctgccctcctctgctgccagcagcgctgttggtggcctcaccctcctccagtacccaggcaccaaagatggcaccaccatcctcctgcttgtaccacagggtgctgctccctgggccaactcctgtgaacttgctcacttcccatggagaccgaggccagggcctgcccctctgaggcccctgttttgtggtcctgctgcctctgctgtgctgcgttcaggaggttgtccactgctcgacgtgggtcaccatgcagcccttgctgttcccacaatttaacagaaaaggaaactgaacggatgagtaaggctgcccagggtcactcagctggaaaagagtagagctggactcaaacccgggactgtctgtctctggtgcctgagttgggaagacgctgttgatgtccccttctgcctcgctttgagcttcctcctccgtgggccctccccctactctagagaaactagtccattccctcatgttccaccttgtgctcagtaaaccctgtcactccacagcagggtttttgagacagtctcgctgtgtcacccaggtggagtgcagtggggcgatctcagctcactgcaacctctgccttccaggctcaagcaattctcctgccttagcctcctgcgtagctgagactacaggcatgtgccaccatggctggctaatttttatatttttagtagagatggggtttcaccatgatggccaggctggtctcgaactccagaccccaggtgatccgcctgccttggcctcccaaagtgctgggaatacaggtgtgagcccctgcgcccggctcacagcagggttcttgataggccaccagtgaatcccatgccaccgaatctggcattcatttcacagcctcatctcagttctcactcagcagagccctcttgcctgtcctgccacccaggctactaatgttctggttcattctctgctgacagttagctgtggctgtcctcagcctcagtcctgggtctccccaagcagtcattagcatcaccttgactgatttccagggaacacttcaaccaccccttacctctgagctccagccccgagacactgccttctctctgcatttgttgatctctgtgcagcagtgcccacatcctcatcccagcttactgccgtctcaccaccttcaggttgtgaggtgcccataaactctgctgttaccattgccacttccctgtcttagcagctgtccctttcagtctgccctccactagtggccatgaagggggctgtgaccgtggtccaggtgagaaaggaaggcctgaactaagatgggaggtgggtggccagaatggagaggggagaagtggatggccagaatggagagatgcttagagggctgtgttgggaagtggtgactggatacaggggagggaggagagatacaagagggcacctgggctcatttgtggactacgtgattttgagactccaaataagcactgggtatttgggttggagatacagagctgagaatgatatgcatgtaggtgggcaaagcaagggggatttcatgagttctaaggtagggtgagaaaaataaccgagagttgagcagtgacggaggaagctgcaaagaaaacgactgctcagggagaggctggccaggggcctgtggctcaggggactgagaagaggagctctctaggcatctgaattgaggttgcccacaattggttgcaagatcgtggctggccttgatggaagctgggaagccactcggtcctagtgaggggtggtgaggagagcagcaacggccacacaggaaggctttggacgttttttctcctgacactagttatttccaggcctgggatatagctaggggcttggggtgggggcaactctttgcagggtggtgtggcctgtggaggaaacaggctcagttccactactttggccaggtgcaatggctcatgcctgtaatcccagcactttggaaggccaaggcgggtggatcacctgaggtcaggagttcaagaccagcctggacaacatggtgaaaccccgtctctactgaaaatacaaaaataattagccgggaatggtggtgcgtgcctgtaatcccaggtactcgagaggctgaggcagacagttgcttgaacctgggaggcagaggttgctgcagtgagccgagattgctgcactgcactccagcctgggtgacagcaagactgtctcaaaaaaaaaaaaaaaaaaaaatccgctatttcaggtcaccctggtgctggcgttcacgtggaagactgcttatctgtatccagctgtttgcagagctcagggaggccagggggcttcagactccactgtactctgcattccaggattctctgttctctggctgtggtggcctgacacactcttcaccactgaccccacccccgcttgcacactatgccacaggaagggcaggggcttccatcacaatcactcagtactagttaccagctctgatagaattactcaccttgagtttccaagtcttgctgaaggtgcttgcgtaagtggcacatggatgttccctctgttcaaaggcatatgcacaacactatttttcaaaatttgcttttatttacacgtttgagtcaattacatgcatgttttatttttgaggagtgattagcaaaatgcattaaaattttaaaatagcaattaaatatacaaaaatatagcttacaaaaaactgcgaatgtttaaaaatattctgctgcagaatttttagtgtacaaagacgtctatgaaacctgaggttcagcatttcataaacctttttttgagggagttacacaatacctagtgaggaaacccgagggccaaactacaagacgaaaaagtgccccgttcctggcaatgatgtcagaagaccaagaggcgatagttaccagcaacactctaggaagaccagctgtcaccagaagggagttcctaacacttgccacacctgctcccccgaccgggggcctgggagggaagggcagatggagaggaacggtgtgcagtgggcgtgagatgcagatccaccaggcttgggactggcaaagggagctgagaagagagttcccccaaagcacaaacaagtctgctgacactggtggggcccttacagtcacagaagtaaggactggatggtaagccaaaggtgctgatgcttggtcaaaaagtggagtacatctttgcatcttgtaacaatttgggctctacagctgaattggcaaagtaaggtttactacacaagcccctctttttcttctgatatccccactcaaatggaagcacactccccagcacatggggatcccttattaatctttactaaagaaccgtgaaccagcattttccagttatcaactggatatttaggcatgaatctggacatgtccatctgcttaagaaatctgcttaagaaatctgtaacagctacaggaaaagacacacccagggccagagattctacaaatgccagaagagtggatgtgatagagaattttttctcaagttttgggttagggcaccagttgcaattttaatccaggggaggatctgggctgctgctgtagggggcaagtacaccagggaggtgggtgtggacagaggcactgggcagctgctgggaagcgaggcacaagtctgtgcccctactcccagggctgcctggaggaagcagctctaactttcatcagcgg

SEQ ID NO: 11789 - protein, 570 aa, Homo sapiens; identical to SEQ ID NO: 1955

SEQ ID NO: 11790 - DNA, 6299 bp, Homo sapiens
atgctgggggaggggctggcggcctcgacggcagctgcggaactaggccgagggacaaaggctaagtttttccatggtttggactggatatcggtggaactctggtcaagctggtatattttgaacccaaagacatcactgctgaagaagaagaggaagaagtggaaagtcttaaaagcattcggaagtacctgacctccaatgtggcttatgggtctacaggcattcgggacgtgcacctcgagctgaaggacctgactctgtgtggacgcaaaggcaatctgcactttatacgctttcccactcatgacatgcctgcttttattcaaatgggcagagataaaaacttctcgagtctccacactgtcttttgtgccactggaggtggagcgtacaaatttgagcaggattttctcacaataggtgatcttcagctttgcaaactggatgaactagattgcttgatcaaaggaattttatacattgactcagtcggattcaatggacggtcacagtgctattactttgaaaaccctgctgattctgaaaagtgtcagaagttaccatttgatttgaaaaatccgtatcctctgcttctggtgaacattggctcaggggttagcatcttagcagtatattccaaagataattacaaacgggtcacaggtactagtcttggaggaggaactttttttggtctctgctgtcttcttactggctgtaccacttttgaagaagctcttgaaatggcatctcgtggagatagcaccaaagtggataaactagtacgagatatttatggaggggactatgagaggtttggactgccaggctgggctgtggcttcaagctttggaaacatgatgagcaaggagaagcgagaggctgtcagtaaagaggacctggccagagcgactttgatcaccatcaccaacaacattggctcaatagcaagaatgtgtgcccttaatgaaaacattaaccaggtggtatttgttggaaatttcttgagaattaatacgatcgccatgcggcttttggcatatgctttggattattggtccaaggggcagttgaaagcacttttttcggaacacgagggttattttggagctgttggagcactccttgagctgttgaagatcccgtgatcattacctggggaggggttcctgaaaccttccacaatgggatctgtggactttcatttttttaagagacttactcaatttcatgactgtactacctgaaacaaagtgagaaaggacaggtgtatttttctaagtcatcaagataaatccttaagaattcagtctaaattagcaaccaggaaggaaaaatatattaaaaacaacaaaaaagtggcacatgtccaggcagtgtgaggatttgctgtatataagttgcctgctttgtatttttgaaatctctgcatcactcattggaagtgcttctgaagagagctgctctgtgttcagttgactggttttgtgtcctgtttgaacttgctgaatgtaaggcaggctactatgcgttataatctaatcacaatttgtcaatatggtcttggcaatcatctgtgcattactctggtttgcattaagcctgtgtgtgaacttactgtaaaacatgttttatttcaaggttctgcaaaattaattgggcaggttaattgtgtacctgaaacttaacaagcagtttttggaagggcagttccacgttactttacactaaatcctgggaatgaatgtctggagagacagggcttcttttcttggcagaatttccttgggtagtgggcggactgttctgatgcaagtgggtacactggcagaagcagcacaatctggaggactaacatgagtcagcagggccactagaattgacaccccctcaggggatcagggagaatctggtttttctttcaggctaagtagaaaaggaagaactgaagtgtctgtcaaagaactcatggggagtggggggtccttcagggcactgtggcacttgggaggtgagtctcagaagactgcctgaggagagtgccaggctgcaggtgctcttggtaggggctgaagcttttctttctgctttgcagaataatttcaaaagcctttcccaaggagagaatgcaccttttatatctgaggtcttaagtggtgcccatattgctgttgaaggcaaggatgggcctgtacaaagcagccttggaccaggagggaaaaccccaaggctctgcagcctccctgctcccctccgtttaaggctgtggtcagggagggatgggcagggtgccagccgcatggaggcagcagagacacccgtgttccagctggggcaaggggaactgatatgtgggctgtgggctgttccactaggcgtggccacctctgcacatgggccttggcacttaggaaatatgggtgctgctgcattgggaccttgtgtgggtgcagagcaggatggctgctgcgtggagggtaattttgtcccctggagagtgattggtgaccctcttccctgctgctgctgtttgcaggctcctggcctatactacctctgacgccctgatcctgagttcctctgccctcctctgctgccagcagcgctgttggtggcctcaccctcctccagtacccaggcaccaaagatggcaccaccatcctcctgcttgtaccacagggtgctgctccctgggccaactcctgtgaacttgctcacttcccatggagaccgaggccagggcctgcccctctgaggcccctgttttgtggtcctgctgcctctgctgtgctgcgttcaggaggttgtccactgctcgacgtgggtcaccatgcagcccttgctgttcccacaatttaacagaaaaggaaactgaacggatgagtaaggctgcccagggtcactcagctggaaaagagtagagctggactcaaacccgggactgtctgtctctggtgcctgagttgggaagacgctgttgatgtccccttctgcctcgctttgagcttcctcctccgtgggccctccccctactctagagaaactagtccattccctcatgttccaccttgtgctcagtaaaccctgtcactccacagcagggtttttgagacagtctcgctgtgtcacccaggtggagtgcagtggggcgatctcagctcactgcaacctctgccttccaggctcaagcaattctcctgccttagcctcctgcgtagctgagactacaggcatgtgccaccatggctggctaatttttatatttttagtagagatggggtttcaccatgatggccaggctggtctcgaactccagaccccaggtgatccgcctgccttggcctcccaaagtgctgggaatacaggtgtgagcccctgcgcccggctcacagcagggttcttgataggccaccagtgaatcccatgccaccgaatctggcattcatttcacagcctcatctcagttctcactcagcagagccctcttgcctgtcctgccacccaggctactaatgttctggttcattctctgctgacagttagctgtggctgtcctcagcctcagtcctgggtctccccaagcagtcattagcatcaccttgactgatttccagggaacacttcaaccaccccttacctctgagctccagccccgagacactgccttctctctgcatttgttgatctctgtgcagcagtgcccacatcctcatcccagcttactgccgtctcaccaccttcaggttgtgaggtgcccataaactctgctgttaccattgccacttccctgtcttagcagctgtccctttcagtctgccctccactagtggccatgaagggggctgtgaccgtggtccaggtgagaaaggaaggcctgaactaagatgggaggtgggtggccagaatggagaggggagaagtggatggccagaatggagagatgcttagagggctgtgttgggaagtggtgactggatacaggggagggaggagagatacaagagggcacctgggctcatttgtggactacgtgattttgagactccaaataagcactgggtatttgggttggagatacagagctgagaatgatatgcatgtaggtgggcaaagcaagggggatttcatgagttctaaggtagggtgagaaaaataaccgagagttgagcagtgacggaggaagctgcaaagaaaacgactgctcagggagaggctggccaggggcctgtggctcaggggactgagaagaggagctctctaggcatctgaattgaggttgcccacaattggttgcaagatcgtggctggccttgatggaagctgggaagccactcggtcctagtgaggggtggtgaggagagcagcaacggccacacaggaaggctttggacgttttttctcctgacactagttatttccaggcctgggatatagctaggggcttggggtgggggcaactctttgcagggtggtgtggcctgtggaggaaacaggctcagttccactactttggccaggtgcaatggctcatgcctgtaatcccagcactttggaaggccaaggcgggtggatcacctgaggtcaggagttcaagaccagcctggacaacatggtgaaaccccgtctctactgaaaatacaaaaataattagccgggaatggtggtgcgtgcctgtaatcccaggtactcgagaggctgaggcagacagttgcttgaacctgggaggcagaggttgctgcagtgagccgagattgctgcactgcactccagcctgggtgacagcaagactgtctcaaaaaaaaaaaaaaaaaaaaatccgctatttcaggtcaccctggtgctggcgttcacgtggaagactgcttatctgtatccagctgtttgcagagctcagggaggccagggggcttcagactccactgtactctgcattccaggattctctgttctctggctgtggtggcctgacacactcttcaccactgaccccacccccgcttgcacactatgccacaggaagggcaggggcttccatcacaatcactcagtactagttaccagctctgatagaattactcaccttgagtttccaagtcttgctgaaggtgcttgcgtaagtggcacatggatgttccctctgttcaaaggcatatgcacaacactatttttcaaaatttgcttttatttacacgtttgagtcaattacatgcatgttttatttttgaggagtgattagcaaaatgcattaaaattttaaaatagcaattaaatatacaaaaatatagcttacaaaaaactgcgaatgtttaaaaatattctgctgcagaatttttagtgtacaaagacgtctatgaaacctgaggttcagcatttcataaacctttttttgagggagttacacaatacctagtgaggaaacccgagggccaaactacaagacgaaaaagtgccccgttcctggcaatgatgtcagaagaccaagaggcgatagttaccagcaacactctaggaagaccagctgtcaccagaagggagttcctaacacttgccacacctgctcccccgaccgggggcctgggagggaagggcagatggagaggaacggtgtgcagtgggcgtgagatgcagatccaccaggcttgggactggcaaagggagctgagaagagagttcccccaaagcacaaacaagtctgctgacactggtggggcccttacagtcacagaagtaaggactggatggtaagccaaaggtgctgatgcttggtcaaaaagtggagtacatctttgcatcttgtaacaatttgggctctacagctgaattggcaaagtaaggtttactacacaagcccctctttttcttctgatatccccactcaaatggaagcacactccccagcacatggggatcccttattaatctttactaaagaaccgtgaaccagcattttccagttatcaactggatatttaggcatgaatctggacatgtccatctgcttaagaaatctgcttaagaaatctgtaacagctacaggaaaagacacacccagggccagagattctacaaatgccagaagagtggatgtgatagagaattttttctcaagttttgggttagggcaccagttgcaattttaatccaggggaggatctgggctgctgctgtagggggcaagtacaccagggaggtgggtgtggacagaggcactgggcagctgctgggaagcgaggcacaagtctgtgcccctactcccagggctgcctggaggaagcagctctaactttcatcagcgg

SEQ ID NO: 11791 - protein, 279 aa, Homo sapiens; identical to SEQ ID NO: 1953

SEQ ID NO: 11792 - DNA, 6173 bp, Homo sapiens
ccgacgaccagcggccagacgctgcgggagcactgctgggctggaggagggctcgagctgcgaggacggcacggagcagcgggtttttccatggtttggactggatatcggtggaactctggtcaagctggtatattttgaacccaaagacatcactgctgaagaagaagaggaagaagtggaaagtcttaaaagcattcggaagtacctgacctccaatgtggcttatgggtctacaggcattcgggacgtgcacctcgagctgaaggacctgactctgtgtggacgcaaagataggtgatcttcagctttgcaaactggatgaactagattgcttgatcaaaggaattttatacattgactcagtcggattcaatggacggtcacagtgctattactttgaaaaccctgctgattctgaaaagtgtcagaagttaccatttgatttgaaaaatccgtatcctctgcttctggtgaacattggctcaggggttagcatcttagcagtatattccaaagataattacaaacgggtcacaggtactagtcttggaggaggaactttttttggtctctgctgtcttcttactggctgtaccacttttgaagaagctcttgaaatggcatctcgtggagatagcaccaaagtggataaactagtacgagatatttatggaggggactatgagaggtttggactgccaggctgggctgtggcttcaagctttggaaacatgatgagcaaggagaagcgagaggctgtcagtaaagaggacctggccagagcgactttgatcaccatcaccaacaacattggctcaatagcaagaatgtgtgcccttaatgaaaacattaaccaggtggtatttgttggaaatttcttgagaattaatacgatcgccatgcggcttttggcatatgctttggattattggtccaaggggcagttgaaagcacttttttcggaacacgagggttattttggagctgttggagcactccttgagctgttgaagatcccgtgatcattacctggggaggggttcctgaaaccttccacaatgggatctgtggactttcatttttttaagagacttactcaatttcatgactgtactacctgaaacaaagtgagaaaggacaggtgtatttttctaagtcatcaagataaatccttaagaattcagtctaaattagcaaccaggaaggaaaaatatattaaaaacaacaaaaaagtggcacatgtccaggcagtgtgaggatttgctgtatataagttgcctgctttgtatttttgaaatctctgcatcactcattggaagtgcttctgaagagagctgctctgtgttcagttgactggttttgtgtcctgtttgaacttgctgaatgtaaggcaggctactatgcgttataatctaatcacaatttgtcaatatggtcttggcaatcatctgtgcattactctggtttgcattaagcctgtgtgtgaacttactgtaaaacatgttttatttcaaggttctgcaaaattaattgggcaggttaattgtgtacctgaaacttaacaagcagtttttggaagggcagttccacgttactttacactaaatcctgggaatgaatgtctggagagacagggcttcttttcttggcagaatttccttgggtagtgggcggactgttctgatgcaagtgggtacactggcagaagcagcacaatctggaggactaacatgagtcagcagggccactagaattgacaccccctcaggggatcagggagaatctggtttttctttcaggctaagtagaaaaggaagaactgaagtgtctgtcaaagaactcatggggagtggggggtccttcagggcactgtggcacttgggaggtgagtctcagaagactgcctgaggagagtgccaggctgcaggtgctcttggtaggggctgaagcttttctttctgctttgcagaataatttcaaaagcctttcccaaggagagaatgcaccttttatatctgaggtcttaagtggtgcccatattgctgttgaaggcaaggatgggcctgtacaaagcagccttggaccaggagggaaaaccccaaggctctgcagcctccctgctcccctccgtttaaggctgtggtcagggagggatgggcagggtgccagccgcatggaggcagcagagacacccgtgttccagctggggcaaggggaactgatatgtgggctgtgggctgttccactaggcgtggccacctctgcacatgggccttggcacttaggaaatatgggtgctgctgcattgggaccttgtgtgggtgcagagcaggatggctgctgcgtggagggtaattttgtcccctggagagtgattggtgaccctcttccctgctgctgctgtttgcaggctcctggcctatactacctctgacgccctgatcctgagttcctctgccctcctctgctgccagcagcgctgttggtggcctcaccctcctccagtacccaggcaccaaagatggcaccaccatcctcctgcttgtaccacagggtgctgctccctgggccaactcctgtgaacttgctcacttcccatggagaccgaggccagggcctgcccctctgaggcccctgttttgtggtcctgctgcctctgctgtgctgcgttcaggaggttgtccactgctcgacgtgggtcaccatgcagcccttgctgttcccacaatttaacagaaaaggaaactgaacggatgagtaaggctgcccagggtcactcagctggaaaagagtagagctggactcaaacccgggactgtctgtctctggtgcctgagttgggaagacgctgttgatgtccccttctgcctcgctttgagcttcctcctccgtgggccctccccctactctagagaaactagtccattccctcatgttccaccttgtgctcagtaaaccctgtcactccacagcagggtttttgagacagtctcgctgtgtcacccaggtggagtgcagtggggcgatctcagctcactgcaacctctgccttccaggctcaagcaattctcctgccttagcctcctgcgtagctgagactacaggcatgtgccaccatggctggctaatttttatatttttagtagagatggggtttcaccatgatggccaggctggtctcgaactccagaccccaggtgatccgcctgccttggcctcccaaagtgctgggaatacaggtgtgagcccctgcgcccggctcacagcagggttcttgataggccaccagtgaatcccatgccaccgaatctggcattcatttcacagcctcatctcagttctcactcagcagagccctcttgcctgtcctgccacccaggctactaatgttctggttcattctctgctgacagttagctgtggctgtcctcagcctcagtcctgggtctccccaagcagtcattagcatcaccttgactgatttccagggaacacttcaaccaccccttacctctgagctccagccccgagacactgccttctctctgcatttgttgatctctgtgcagcagtgcccacatcctcatcccagcttactgccgtctcaccaccttcaggttgtgaggtgcccataaactctgctgttaccattgccacttccctgtcttagcagctgtccctttcagtctgccctccactagtggccatgaagggggctgtgaccgtggtccaggtgagaaaggaaggcctgaactaagatgggaggtgggtggccagaatggagaggggagaagtggatggccagaatggagagatgcttagagggctgtgttgggaagtggtgactggatacaggggagggaggagagatacaagagggcacctgggctcatttgtggactacgtgattttgagactccaaataagcactgggtatttgggttggagatacagagctgagaatgatatgcatgtaggtgggcaaagcaagggggatttcatgagttctaaggtagggtgagaaaaataaccgagagttgagcagtgacggaggaagctgcaaagaaaacgactgctcagggagaggctggccaggggcctgtggctcaggggactgagaagaggagctctctaggcatctgaattgaggttgcccacaattggttgcaagatcgtggctggccttgatggaagctgggaagccactcggtcctagtgaggggtggtgaggagagcagcaacggccacacaggaaggctttggacgttttttctcctgacactagttatttccaggcctgggatatagctaggggcttggggtgggggcaactctttgcagggtggtgtggcctgtggaggaaacaggctcagttccactactttggccaggtgcaatggctcatgcctgtaatcccagcactttggaaggccaaggcgggtggatcacctgaggtcaggagttcaagaccagcctggacaacatggtgaaaccccgtctctactgaaaatacaaaaataattagccgggaatggtggtgcgtgcctgtaatcccaggtactcgagaggctgaggcagacagttgcttgaacctgggaggcagaggttgctgcagtgagccgagattgctgcactgcactccagcctgggtgacagcaagactgtctcaaaaaaaaaaaaaaaaaaaaatccgctatttcaggtcaccctggtgctggcgttcacgtggaagactgcttatctgtatccagctgtttgcagagctcagggaggccagggggcttcagactccactgtactctgcattccaggattctctgttctctggctgtggtggcctgacacactcttcaccactgaccccacccccgcttgcacactatgccacaggaagggcaggggcttccatcacaatcactcagtactagttaccagctctgatagaattactcaccttgagtttccaagtcttgctgaaggtgcttgcgtaagtggcacatggatgttccctctgttcaaaggcatatgcacaacactatttttcaaaatttgcttttatttacacgtttgagtcaattacatgcatgttttatttttgaggagtgattagcaaaatgcattaaaattttaaaatagcaattaaatatacaaaaatatagcttacaaaaaactgcgaatgtttaaaaatattctgctgcagaatttttagtgtacaaagacgtctatgaaacctgaggttcagcatttcataaacctttttttgagggagttacacaatacctagtgaggaaacccgagggccaaactacaagacgaaaaagtgccccgttcctggcaatgatgtcagaagaccaagaggcgatagttaccagcaacactctaggaagaccagctgtcaccagaagggagttcctaacacttgccacacctgctcccccgaccgggggcctgggagggaagggcagatggagaggaacggtgtgcagtgggcgtgagatgcagatccaccaggcttgggactggcaaagggagctgagaagagagttcccccaaagcacaaacaagtctgctgacactggtggggcccttacagtcacagaagtaaggactggatggtaagccaaaggtgctgatgcttggtcaaaaagtggagtacatctttgcatcttgtaacaatttgggctctacagctgaattggcaaagtaaggtttactacacaagcccctctttttcttctgatatccccactcaaatggaagcacactccccagcacatggggatcccttattaatctttactaaagaaccgtgaaccagcattttccagttatcaactggatatttaggcatgaatctggacatgtccatctgcttaagaaatctgcttaagaaatctgtaacagctacaggaaaagacacacccagggccagagattctacaaatgccagaagagtggatgtgatagagaattttttctcaagttttgggttagggcaccagttgcaattttaatccaggggaggatctgggctgctgctgtagggggcaagtacaccagggaggtgggtgtggacagaggcactgggcagctgctgggaagcgaggcacaagtctgtgcccctactcccagggctgcctggaggaagcagctctaactttcatcagcgg

SEQ ID NO: 11793 - protein, 134 aa, Homo sapiens
MASRGDSTKVDKLVRDIYGGDYERFGLPGWAVASSFGNMMSKEKREAVSKEDLARATLITITNNIGSIARMCALNENINQVVFVGNFLRINTIAMRLLAYALDYWSKGQLKALFSEHEGYFGAVGALLELLKIP

SEQ ID NO: 11794 - DNA, 1782 bp, Homo sapiens
tctggctggactgccgcggaggaggcgagaaggaatccgacgctggggggcttgctcgggcggcagcgactgctgctgcggatgggagggggccggctcggcgcgcccatggagcgccacggcagggcttccgccacctccgtctcgtcggctggggagcaggcggccggggaccccgaagggcggcggcaggagccactgcggcgccgggcgagcagcgcgtcggtgcccgcggtcggggcctcggctgagggcacgaggcgggatcgactgggctcttacagcggccccacctcggtctcccgccagcgcgtcgaaagcctgaggaaaaagcggccgctttttccatggtttggactggatatcggtggaactctggtcaagctggtatattttgaacccaaagacatcactgctgaagaagaagaggaagaagtggaaagtcttaaaagcattcggaagtacctgacctccaatgtggcttatgggtctacaggcattcgggacgtgcacctcgagctgaaggacctgactctgtgtggacgcaaagataggtgatcttcagctttgcaaactggatgaactagattgcttgatcaaaggaattttatacattgactcagtcggattcaatggacggtcacagtgctattactttgaaaaccctgctgattctgaaaagtgtcagaagttaccatttgatttgaaaaatccgtatcctctgcttctggtgaacattggctcaggggttagcatcttagcagtatattccaaagataattacaaacgggtcacaggtactagtcttggaggaggaactttttttggtctctgctgtcttcttactggctgtaccacttttgaagaagctcttgaaatggcatctcgtggagatagcaccaaagtggataaactagtacgagatatttatggaggggactatgagaggtttggactgccaggctgggctgtggcttcaagctttggaaacatgatgagcaaggagaagcgagaggctgtcagtaaagaggacctggccagagcgactttgatcaccatcaccaacaacattggctcaatagcaagaatgtgtgcccttaatgaaaacattaaccaggtggtatttgttggaaatttcttgagaattaatacgatcgccatgcggcttttggcatatgctttggattattggtccaaggggcagttgaaagcacttttttcggaacacgagggttattttggagctgttggagcactccttgagctgttgaagatcccgtgatcattacctggggaggggttcctgaaaccttccacaatgggatctgtggactttcatttttttaagagacttactcaatttcatgactgtactacctgaaacaaagtgagaaaggacaggtgtatttttctaagtcatcaagataaatccttaagaattcagtctaaattagcaaccaggaaggaaaaatatattaaaaacaacaaaaaagtggcacatgtccaggcagtgtgaggatttgctgtatataagttgcctgctttgtatttttgaaatctctgcatcactcattggaagtgcttctgaagagagctgctctgtgttcagttgactggttttgtgtcctgtttgaacttgctgaatgtaaggcaggctactatgcgttataatctaatcacaatttgtcaatatggtcttggcaatcatctgtgcattactctggtttgcattaagcctgtgtgtgaacttactgtaaaacatgttttatttcaaggttctgc

SEQ ID NO: 11795 - protein, 158 aa, Homo sapiens
MGGGRLGAPMERHGRASATSVSSAGEQAAGDPEGRRQEPLRRRASSASVPAVGASAEGTRRDRLGSYSGPTSVSRQRVESLRKKRPLFPWFGLDIGGTLVKLVYFEPKDITAEEEEEEVESLKSIRKYLTSNVAYGSTGIRDVHLELKDLTLCGRKDR

SEQ ID NO: 11796 - DNA, 6430 bp, Homo sapiens
tctggctggactgccgcggaggaggcgagaaggaatccgacgctggggggcttgctcgggcggcagcgactgctgctgcggatgggagggggccggctcggcgcgcccatggagcgccacggcagggcttccgccacctccgtctcgtcggctggggagcaggcggccggggaccccgaagggcggcggcaggagccactgcggcgccgggcgagcagcgcgtcggtgcccgcggtcggggcctcggctgagggcacgaggcgggatcgactgggctcttacagcggccccacctcggtctcccgccagcgcgtcgaaagcctgaggaaaaagcggccgctttttccatggtttggactggatatcggtggaactctggtcaagctggtatattttgaacccaaagacatcactgctgaagaagaagaggaagaagtggaaagtcttaaaagcattcggaagtacctgacctccaatgtggcttatgggtctacaggcattcgggacgtgcacctcgagctgaaggacctgactctgtgtggacgcaaagataggtgatcttcagctttgcaaactggatgaactagattgcttgatcaaaggaattttatacattgactcagtcggattcaatggacggtcacagtgctattactttgaaaaccctgctgattctgaaaagtgtcagaagttaccatttgatttgaaaaatccgtatcctctgcttctggtgaacattggctcaggggttagcatcttagcagtatattccaaagataattacaaacgggtcacaggtactagtcttggaggaggaactttttttggtctctgctgtcttcttactggctgtaccacttttgaagaagctcttgaaatggcatctcgtggagatagcaccaaagtggataaactagtacgagatatttatggaggggactatgagaggtttggactgccaggctgggctgtggcttcaagctttggaaacatgatgagcaaggagaagcgagaggctgtcagtaaagaggacctggccagagcgactttgatcaccatcaccaacaacattggctcaatagcaagaatgtgtgcccttaatgaaaacattaaccaggtggtatttgttggaaatttcttgagaattaatacgatcgccatgcggcttttggcatatgctttggattattggtccaaggggcagttgaaagcacttttttcggaacacgagggttattttggagctgttggagcactccttgagctgttgaagatcccgtgatcattacctggggaggggttcctgaaaccttccacaatgggatctgtggactttcatttttttaagagacttactcaatttcatgactgtactacctgaaacaaagtgagaaaggacaggtgtatttttctaagtcatcaagataaatccttaagaattcagtctaaattagcaaccaggaaggaaaaatatattaaaaacaacaaaaaagtggcacatgtccaggcagtgtgaggatttgctgtatataagttgcctgctttgtatttttgaaatctctgcatcactcattggaagtgcttctgaagagagctgctctgtgttcagttgactggttttgtgtcctgtttgaacttgctgaatgtaaggcaggctactatgcgttataatctaatcacaatttgtcaatatggtcttggcaatcatctgtgcattactctggtttgcattaagcctgtgtgtgaacttactgtaaaacatgttttatttcaaggttctgcaaaattaattgggcaggttaattgtgtacctgaaacttaacaagcagtttttggaagggcagttccacgttactttacactaaatcctgggaatgaatgtctggagagacagggcttcttttcttggcagaatttccttgggtagtgggcggactgttctgatgcaagtgggtacactggcagaagcagcacaatctggaggactaacatgagtcagcagggccactagaattgacaccccctcaggggatcagggagaatctggtttttctttcaggctaagtagaaaaggaagaactgaagtgtctgtcaaagaactcatggggagtggggggtccttcagggcactgtggcacttgggaggtgagtctcagaagactgcctgaggagagtgccaggctgcaggtgctcttggtaggggctgaagcttttctttctgctttgcagaataatttcaaaagcctttcccaaggagagaatgcaccttttatatctgaggtcttaagtggtgcccatattgctgttgaaggcaaggatgggcctgtacaaagcagccttggaccaggagggaaaaccccaaggctctgcagcctccctgctcccctccgtttaaggctgtggtcagggagggatgggcagggtgccagccgcatggaggcagcagagacacccgtgttccagctggggcaaggggaactgatatgtgggctgtgggctgttccactaggcgtggccacctctgcacatgggccttggcacttaggaaatatgggtgctgctgcattgggaccttgtgtgggtgcagagcaggatggctgctgcgtggagggtaattttgtcccctggagagtgattggtgaccctcttccctgctgctgctgtttgcaggctcctggcctatactacctctgacgccctgatcctgagttcctctgccctcctctgctgccagcagcgctgttggtggcctcaccctcctccagtacccaggcaccaaagatggcaccaccatcctcctgcttgtaccacagggtgctgctccctgggccaactcctgtgaacttgctcacttcccatggagaccgaggccagggcctgcccctctgaggcccctgttttgtggtcctgctgcctctgctgtgctgcgttcaggaggttgtccactgctcgacgtgggtcaccatgcagcccttgctgttcccacaatttaacagaaaaggaaactgaacggatgagtaaggctgcccagggtcactcagctggaaaagagtagagctggactcaaacccgggactgtctgtctctggtgcctgagttgggaagacgctgttgatgtccccttctgcctcgctttgagcttcctcctccgtgggccctccccctactctagagaaactagtccattccctcatgttccaccttgtgctcagtaaaccctgtcactccacagcagggtttttgagacagtctcgctgtgtcacccaggtggagtgcagtggggcgatctcagctcactgcaacctctgccttccaggctcaagcaattctcctgccttagcctcctgcgtagctgagactacaggcatgtgccaccatggctggctaatttttatatttttagtagagatggggtttcaccatgatggccaggctggtctcgaactccagaccccaggtgatccgcctgccttggcctcccaaagtgctgggaatacaggtgtgagcccctgcgcccggctcacagcagggttcttgataggccaccagtgaatcccatgccaccgaatctggcattcatttcacagcctcatctcagttctcactcagcagagccctcttgcctgtcctgccacccaggctactaatgttctggttcattctctgctgacagttagctgtggctgtcctcagcctcagtcctgggtctccccaagcagtcattagcatcaccttgactgatttccagggaacacttcaaccaccccttacctctgagctccagccccgagacactgccttctctctgcatttgttgatctctgtgcagcagtgcccacatcctcatcccagcttactgccgtctcaccaccttcaggttgtgaggtgcccataaactctgctgttaccattgccacttccctgtcttagcagctgtccctttcagtctgccctccactagtggccatgaagggggctgtgaccgtggtccaggtgagaaaggaaggcctgaactaagatgggaggtgggtggccagaatggagaggggagaagtggatggccagaatggagagatgcttagagggctgtgttgggaagtggtgactggatacaggggagggaggagagatacaagagggcacctgggctcatttgtggactacgtgattttgagactccaaataagcactgggtatttgggttggagatacagagctgagaatgatatgcatgtaggtgggcaaagcaagggggatttcatgagttctaaggtagggtgagaaaaataaccgagagttgagcagtgacggaggaagctgcaaagaaaacgactgctcagggagaggctggccaggggcctgtggctcaggggactgagaagaggagctctctaggcatctgaattgaggttgcccacaattggttgcaagatcgtggctggccttgatggaagctgggaagccactcggtcctagtgaggggtggtgaggagagcagcaacggccacacaggaaggctttggacgttttttctcctgacactagttatttccaggcctgggatatagctaggggcttggggtgggggcaactctttgcagggtggtgtggcctgtggaggaaacaggctcagttccactactttggccaggtgcaatggctcatgcctgtaatcccagcactttggaaggccaaggcgggtggatcacctgaggtcaggagttcaagaccagcctggacaacatggtgaaaccccgtctctactgaaaatacaaaaataattagccgggaatggtggtgcgtgcctgtaatcccaggtactcgagaggctgaggcagacagttgcttgaacctgggaggcagaggttgctgcagtgagccgagattgctgcactgcactccagcctgggtgacagcaagactgtctcaaaaaaaaaaaaaaaaaaaaatccgctatttcaggtcaccctggtgctggcgttcacgtggaagactgcttatctgtatccagctgtttgcagagctcagggaggccagggggcttcagactccactgtactctgcattccaggattctctgttctctggctgtggtggcctgacacactcttcaccactgaccccacccccgcttgcacactatgccacaggaagggcaggggcttccatcacaatcactcagtactagttaccagctctgatagaattactcaccttgagtttccaagtcttgctgaaggtgcttgcgtaagtggcacatggatgttccctctgttcaaaggcatatgcacaacactatttttcaaaatttgcttttatttacacgtttgagtcaattacatgcatgttttatttttgaggagtgattagcaaaatgcattaaaattttaaaatagcaattaaatatacaaaaatatagcttacaaaaaactgcgaatgtttaaaaatattctgctgcagaatttttagtgtacaaagacgtctatgaaacctgaggttcagcatttcataaacctttttttgagggagttacacaatacctagtgaggaaacccgagggccaaactacaagacgaaaaagtgccccgttcctggcaatgatgtcagaagaccaagaggcgatagttaccagcaacactctaggaagaccagctgtcaccagaagggagttcctaacacttgccacacctgctcccccgaccgggggcctgggagggaagggcagatggagaggaacggtgtgcagtgggcgtgagatgcagatccaccaggcttgggactggcaaagggagctgagaagagagttcccccaaagcacaaacaagtctgctgacactggtggggcccttacagtcacagaagtaaggactggatggtaagccaaaggtgctgatgcttggtcaaaaagtggagtacatctttgcatcttgtaacaatttgggctctacagctgaattggcaaagtaaggtttactacacaagcccctctttttcttctgatatccccactcaaatggaagcacactccccagcacatggggatcccttattaatctttactaaagaaccgtgaaccagcattttccagttatcaactggatatttaggcatgaatctggacatgtccatctgcttaagaaatctgcttaagaaatctgtaacagctacaggaaaagacacacccagggccagagattctacaaatgccagaagagtggatgtgatagagaattttttctcaagttttgggttagggcaccagttgcaattttaatccaggggaggatctgggctgctgctgtagggggcaagtacaccagggaggtgggtgtggacagaggcactgggcagctgctgggaagcgaggcacaagtctgtgcccctactcccagggctgcctggaggaagcagctctaactttcatcagcgg

SEQ ID NO: 11797 - protein, 158 aa, Homo sapiens; identical to SEQ ID NO: 11795

SEQ ID NO: 11798 - DNA, 1285 bp, Homo sapiens
aggaggcgagaaggaatccgacgctggggggcttgctcgggcggcagcgactgctgctgcggatgggagggggccggctcggcgcgcccatggagcgccacggcagggcttccgccacctccgtctcgtcggctggggagcaggcggccggggaccccgaagggcggcggcaggagccactgcggcgccgggcgagcagcgcgtcggtgcccgcggtcggggcctcggctgagggcacgaggcgggatcgactgggctcttacagcggccccacctcggtctcccgccagcgcgtcgaaagcctgaggaaaaagcggccgctttttccatggtttggactggatatcggtggaactctggtcaagctggtatattttgaacccaaagacatcactgctgaagaagaagaggaagaagtggaaagtcttaaaagcattcggaagtacctgacctccaatgtggcttatgggtctacaggcattcgggacgtgcacctcgagctgaaggacctgactctgtgtggacgcaaaggcaatctgcactttatacgctttcccactcatgacatgcctgcttttattcaaatgggcagagataaaaacttctcgagtctccacactgtcttttgtgccactggaggtggagcgtacaaatttgagcaggattttctcacagtatgcattttttagcttatatacaatttatggtaatttgattgttaaaaataatgccagtagcaagtggtgaaataatttccatctctaatggaacttgaattttcttgagtcaaatgaagattaaaggtacgctagtgataggagttggccatctagaggtggttgtctagttcagatgtatggacgacaatcagaaccactaaaagggtagcattttattgctcctttagtatgaaaaattagggcatctgctatacgttgaggaagaaactacctaaaaggaacatcattagatcatgaacaatgagattgaaatataattaaaatcatttcatgtcataaaattgttttcagtcttgtctaccacataatttctcttgtctccctcagttgtttgctggcatgttcactaactgaaaaaaataaggaactctggtcaaaagtggtgttttcaggctcagggctggtctgagatgggtgactgcagagccctcctctcccagaatgctttctgatgtgttctgtgctgcacacttaactggagtctcgccaccatgtctggcccctggggaatgctgccaggcgctctatcttgctttcattgagtg

SEQ ID NO: 11799 - protein, 208 aa, Homo sapiens
MGGGRLGAPMERHGRASATSVSSAGEQAAGDPEGRRQEPLRRRASSASVPAVGASAEGTRRDRLGSYSGPTSVSRQRVESLRKKRPLFPWFGLDIGGTLVKLVYFEPKDITAEEEEEEVESLKSIRKYLTSNVAYGSTGIRDVHLELKDLTLCGRKGNLHFIRFPTHDMPAFIQMGRDKNFSSLHTVFCATGGGAYKFEQDFLTVCIF

SEQ ID NO: 11800 - DNA, 1541 bp, Homo sapiens
cgccgccgtttttcccgcgcgcggacactgtccccgcacggtggtccctcgttggtgcgtggcctgacatccggctggaggcctcgggtgctccgaaagcggtaccttcgggggcccccccgcacccattgtttttccatggtttggactggatatcggtggaactctggtcaagctggtatattttgaacccaaagacatcactgctgaagaagaagaggaagaagtggaaagtcttaaaagcattcggaagtacctgacctccaatgtggcttatgggtctacaggcattcgggacgtgcacctcgagctgaaggacctgactctgtgtggacgcaaaggcaatctgcactttatacgctttcccactcatgacatgcctgcttttattcaaatgggcagagataaaaacttctcgagtctccacactgtcttttgtgccactggaggtggagcgtacaaatttgagcaggattttctcacaataggtgatcttcagctttgcaaactggatgaactagattgcttgatcaaaggaattttatacattgactcagtcggattcaatggacggtcacagtgctattactttgaaaaccctgctgattctgaaaagtgtcagaagttaccatttgatttgaaaaatccgtatcctctgcttctggtgaacattggctcaggggttagcatcttagcagtatattccaaagataattacaaacgggtcacaggtactagtcttggaggaggaactttttttggtctctgctgtcttcttactggctgtaccacttttgaagaagctcttgaaatggcatctcgtggagatagcaccaaagtggataaactagtacgagatatttatggaggggactatgagaggtttggactgccaggctgggctgtggcttcaagctttggaaacatgatgagcaaggagaagcgagaggctgtcagtaaagaggacctggccagagcgactttgatcaccatcaccaacaacattggctcaatagcaagaatgtgtgcccttaatgaaaacattaaccaggtggtatttgttggaaatttcttgagaattaatacgatcgccatgcggcttttggcatatgctttggattattggtccaaggggcagttgaaagcacttttttcggaacacgagggttattttggagctgttggagcactccttgagctgttgaagatcccgtgatcattacctggggaggggttcctgaaaccttccacaatgggatctgtggactttcatttttttaagagacttactcaatttcatgactgtactacctgaaacaaagtgagaaaggacaggtgtatttttctaagtcatcaagataaatccttaagaattcagtctaaattagcaaccaggaaggaaaaatatattaaaaacaacaaaaaagtggcacatgtccaggcagtgtgaggatttgctgtatataagttgcctgctttgtatttttgaaatctctgcatcactcattggaagtgcttctgaagagagctgctctgtgttc

SEQ ID NO: 11801 - protein, 279 aa, Homo sapiens; identical to SEQ ID NO: 1953

SEQ ID NO: 11802 - DNA, 6364 bp, Homo sapiens
cgccgccgtttttcccgcgcgcggacactgtccccgcacggtggtccctcgttggtgcgtggcctgacatccggctggaggcctcgggtgctccgaaagcggtaccttcgggggcccccccgcacccattgtttttccatggtttggactggatatcggtggaactctggtcaagctggtatattttgaacccaaagacatcactgctgaagaagaagaggaagaagtggaaagtcttaaaagcattcggaagtacctgacctccaatgtggcttatgggtctacaggcattcgggacgtgcacctcgagctgaaggacctgactctgtgtggacgcaaaggcaatctgcactttatacgctttcccactcatgacatgcctgcttttattcaaatgggcagagataaaaacttctcgagtctccacactgtcttttgtgccactggaggtggagcgtacaaatttgagcaggattttctcacaataggtgatcttcagctttgcaaactggatgaactagattgcttgatcaaaggaattttatacattgactcagtcggattcaatggacggtcacagtgctattactttgaaaaccctgctgattctgaaaagtgtcagaagttaccatttgatttgaaaaatccgtatcctctgcttctggtgaacattggctcaggggttagcatcttagcagtatattccaaagataattacaaacgggtcacaggtactagtcttggaggaggaactttttttggtctctgctgtcttcttactggctgtaccacttttgaagaagctcttgaaatggcatctcgtggagatagcaccaaagtggataaactagtacgagatatttatggaggggactatgagaggtttggactgccaggctgggctgtggcttcaagctttggaaacatgatgagcaaggagaagcgagaggctgtcagtaaagaggacctggccagagcgactttgatcaccatcaccaacaacattggctcaatagcaagaatgtgtgcccttaatgaaaacattaaccaggtggtatttgttggaaatttcttgagaattaatacgatcgccatgcggcttttggcatatgctttggattattggtccaaggggcagttgaaagcacttttttcggaacacgagggttattttggagctgttggagcactccttgagctgttgaagatcccgtgatcattacctggggaggggttcctgaaaccttccacaatgggatctgtggactttcatttttttaagagacttactcaatttcatgactgtactacctgaaacaaagtgagaaaggacaggtgtatttttctaagtcatcaagataaatccttaagaattcagtctaaattagcaaccaggaaggaaaaatatattaaaaacaacaaaaaagtggcacatgtccaggcagtgtgaggatttgctgtatataagttgcctgctttgtatttttgaaatctctgcatcactcattggaagtgcttctgaagagagctgctctgtgttcagttgactggttttgtgtcctgtttgaacttgctgaatgtaaggcaggctactatgcgttataatctaatcacaatttgtcaatatggtcttggcaatcatctgtgcattactctggtttgcattaagcctgtgtgtgaacttactgtaaaacatgttttatttcaaggttctgcaaaattaattgggcaggttaattgtgtacctgaaacttaacaagcagtttttggaagggcagttccacgttactttacactaaatcctgggaatgaatgtctggagagacagggcttcttttcttggcagaatttccttgggtagtgggcggactgttctgatgcaagtgggtacactggcagaagcagcacaatctggaggactaacatgagtcagcagggccactagaattgacaccccctcaggggatcagggagaatctggtttttctttcaggctaagtagaaaaggaagaactgaagtgtctgtcaaagaactcatggggagtggggggtccttcagggcactgtggcacttgggaggtgagtctcagaagactgcctgaggagagtgccaggctgcaggtgctcttggtaggggctgaagcttttctttctgctttgcagaataatttcaaaagcctttcccaaggagagaatgcaccttttatatctgaggtcttaagtggtgcccatattgctgttgaaggcaaggatgggcctgtacaaagcagccttggaccaggagggaaaaccccaaggctctgcagcctccctgctcccctccgtttaaggctgtggtcagggagggatgggcagggtgccagccgcatggaggcagcagagacacccgtgttccagctggggcaaggggaactgatatgtgggctgtgggctgttccactaggcgtggccacctctgcacatgggccttggcacttaggaaatatgggtgctgctgcattgggaccttgtgtgggtgcagagcaggatggctgctgcgtggagggtaattttgtcccctggagagtgattggtgaccctcttccctgctgctgctgtttgcaggctcctggcctatactacctctgacgccctgatcctgagttcctctgccctcctctgctgccagcagcgctgttggtggcctcaccctcctccagtacccaggcaccaaagatggcaccaccatcctcctgcttgtaccacagggtgctgctccctgggccaactcctgtgaacttgctcacttcccatggagaccgaggccagggcctgcccctctgaggcccctgttttgtggtcctgctgcctctgctgtgctgcgttcaggaggttgtccactgctcgacgtgggtcaccatgcagcccttgctgttcccacaatttaacagaaaaggaaactgaacggatgagtaaggctgcccagggtcactcagctggaaaagagtagagctggactcaaacccgggactgtctgtctctggtgcctgagttgggaagacgctgttgatgtccccttctgcctcgctttgagcttcctcctccgtgggccctccccctactctagagaaactagtccattccctcatgttccaccttgtgctcagtaaaccctgtcactccacagcagggtttttgagacagtctcgctgtgtcacccaggtggagtgcagtggggcgatctcagctcactgcaacctctgccttccaggctcaagcaattctcctgccttagcctcctgcgtagctgagactacaggcatgtgccaccatggctggctaatttttatatttttagtagagatggggtttcaccatgatggccaggctggtctcgaactccagaccccaggtgatccgcctgccttggcctcccaaagtgctgggaatacaggtgtgagcccctgcgcccggctcacagcagggttcttgataggccaccagtgaatcccatgccaccgaatctggcattcatttcacagcctcatctcagttctcactcagcagagccctcttgcctgtcctgccacccaggctactaatgttctggttcattctctgctgacagttagctgtggctgtcctcagcctcagtcctgggtctccccaagcagtcattagcatcaccttgactgatttccagggaacacttcaaccaccccttacctctgagctccagccccgagacactgccttctctctgcatttgttgatctctgtgcagcagtgcccacatcctcatcccagcttactgccgtctcaccaccttcaggttgtgaggtgcccataaactctgctgttaccattgccacttccctgtcttagcagctgtccctttcagtctgccctccactagtggccatgaagggggctgtgaccgtggtccaggtgagaaaggaaggcctgaactaagatgggaggtgggtggccagaatggagaggggagaagtggatggccagaatggagagatgcttagagggctgtgttgggaagtggtgactggatacaggggagggaggagagatacaagagggcacctgggctcatttgtggactacgtgattttgagactccaaataagcactgggtatttgggttggagatacagagctgagaatgatatgcatgtaggtgggcaaagcaagggggatttcatgagttctaaggtagggtgagaaaaataaccgagagttgagcagtgacggaggaagctgcaaagaaaacgactgctcagggagaggctggccaggggcctgtggctcaggggactgagaagaggagctctctaggcatctgaattgaggttgcccacaattggttgcaagatcgtggctggccttgatggaagctgggaagccactcggtcctagtgaggggtggtgaggagagcagcaacggccacacaggaaggctttggacgttttttctcctgacactagttatttccaggcctgggatatagctaggggcttggggtgggggcaactctttgcagggtggtgtggcctgtggaggaaacaggctcagttccactactttggccaggtgcaatggctcatgcctgtaatcccagcactttggaaggccaaggcgggtggatcacctgaggtcaggagttcaagaccagcctggacaacatggtgaaaccccgtctctactgaaaatacaaaaataattagccgggaatggtggtgcgtgcctgtaatcccaggtactcgagaggctgaggcagacagttgcttgaacctgggaggcagaggttgctgcagtgagccgagattgctgcactgcactccagcctgggtgacagcaagactgtctcaaaaaaaaaaaaaaaaaaaaatccgctatttcaggtcaccctggtgctggcgttcacgtggaagactgcttatctgtatccagctgtttgcagagctcagggaggccagggggcttcagactccactgtactctgcattccaggattctctgttctctggctgtggtggcctgacacactcttcaccactgaccccacccccgcttgcacactatgccacaggaagggcaggggcttccatcacaatcactcagtactagttaccagctctgatagaattactcaccttgagtttccaagtcttgctgaaggtgcttgcgtaagtggcacatggatgttccctctgttcaaaggcatatgcacaacactatttttcaaaatttgcttttatttacacgtttgagtcaattacatgcatgttttatttttgaggagtgattagcaaaatgcattaaaattttaaaatagcaattaaatatacaaaaatatagcttacaaaaaactgcgaatgtttaaaaatattctgctgcagaatttttagtgtacaaagacgtctatgaaacctgaggttcagcatttcataaacctttttttgagggagttacacaatacctagtgaggaaacccgagggccaaactacaagacgaaaaagtgccccgttcctggcaatgatgtcagaagaccaagaggcgatagttaccagcaacactctaggaagaccagctgtcaccagaagggagttcctaacacttgccacacctgctcccccgaccgggggcctgggagggaagggcagatggagaggaacggtgtgcagtgggcgtgagatgcagatccaccaggcttgggactggcaaagggagctgagaagagagttcccccaaagcacaaacaagtctgctgacactggtggggcccttacagtcacagaagtaaggactggatggtaagccaaaggtgctgatgcttggtcaaaaagtggagtacatctttgcatcttgtaacaatttgggctctacagctgaattggcaaagtaaggtttactacacaagcccctctttttcttctgatatccccactcaaatggaagcacactccccagcacatggggatcccttattaatctttactaaagaaccgtgaaccagcattttccagttatcaactggatatttaggcatgaatctggacatgtccatctgcttaagaaatctgcttaagaaatctgtaacagctacaggaaaagacacacccagggccagagattctacaaatgccagaagagtggatgtgatagagaattttttctcaagttttgggttagggcaccagttgcaattttaatccaggggaggatctgggctgctgctgtagggggcaagtacaccagggaggtgggtgtggacagaggcactgggcagctgctgggaagcgaggcacaagtctgtgcccctactcccagggctgcctggaggaagcagctctaactttcatcagcgg

SEQ ID NO: 11803 - protein, 279 aa, Homo sapiens; identical to SEQ ID NO: 1953

SEQ ID NO: 11804 - DNA, 6208 bp, Homo sapiens
cccgcgcgcggacactgtccccgcacggtggtccctcgttggtgcgtggcctgacatccggctggaggcctcgggtgctccgaaagcggtaccttcgggggcccccccgcacccattgtttttccatggtttggactggatatcggtggaactctggtcaagctggtatattttgaacccaaagacatcactgctgaagaagaagaggaagaagtggaaagtcttaaaagcattcggaagtacctgacctccaatgtggcttatgggtctacaggcattcgggacgtgcacctcgagctgaaggacctgactctgtgtggacgcaaagataggtgatcttcagctttgcaaactggatgaactagattgcttgatcaaaggaattttatacattgactcagtcggattcaatggacggtcacagtgctattactttgaaaaccctgctgattctgaaaagtgtcagaagttaccatttgatttgaaaaatccgtatcctctgcttctggtgaacattggctcaggggttagcatcttagcagtatattccaaagataattacaaacgggtcacaggtactagtcttggaggaggaactttttttggtctctgctgtcttcttactggctgtaccacttttgaagaagctcttgaaatggcatctcgtggagatagcaccaaagtggataaactagtacgagatatttatggaggggactatgagaggtttggactgccaggctgggctgtggcttcaagctttggaaacatgatgagcaaggagaagcgagaggctgtcagtaaagaggacctggccagagcgactttgatcaccatcaccaacaacattggctcaatagcaagaatgtgtgcccttaatgaaaacattaaccaggtggtatttgttggaaatttcttgagaattaatacgatcgccatgcggcttttggcatatgctttggattattggtccaaggggcagttgaaagcacttttttcggaacacgagggttattttggagctgttggagcactccttgagctgttgaagatcccgtgatcattacctggggaggggttcctgaaaccttccacaatgggatctgtggactttcatttttttaagagacttactcaatttcatgactgtactacctgaaacaaagtgagaaaggacaggtgtatttttctaagtcatcaagataaatccttaagaattcagtctaaattagcaaccaggaaggaaaaatatattaaaaacaacaaaaaagtggcacatgtccaggcagtgtgaggatttgctgtatataagttgcctgctttgtatttttgaaatctctgcatcactcattggaagtgcttctgaagagagctgctctgtgttcagttgactggttttgtgtcctgtttgaacttgctgaatgtaaggcaggctactatgcgttataatctaatcacaatttgtcaatatggtcttggcaatcatctgtgcattactctggtttgcattaagcctgtgtgtgaacttactgtaaaacatgttttatttcaaggttctgcaaaattaattgggcaggttaattgtgtacctgaaacttaacaagcagtttttggaagggcagttccacgttactttacactaaatcctgggaatgaatgtctggagagacagggcttcttttcttggcagaatttccttgggtagtgggcggactgttctgatgcaagtgggtacactggcagaagcagcacaatctggaggactaacatgagtcagcagggccactagaattgacaccccctcaggggatcagggagaatctggtttttctttcaggctaagtagaaaaggaagaactgaagtgtctgtcaaagaactcatggggagtggggggtccttcagggcactgtggcacttgggaggtgagtctcagaagactgcctgaggagagtgccaggctgcaggtgctcttggtaggggctgaagcttttctttctgctttgcagaataatttcaaaagcctttcccaaggagagaatgcaccttttatatctgaggtcttaagtggtgcccatattgctgttgaaggcaaggatgggcctgtacaaagcagccttggaccaggagggaaaaccccaaggctctgcagcctccctgctcccctccgtttaaggctgtggtcagggagggatgggcagggtgccagccgcatggaggcagcagagacacccgtgttccagctggggcaaggggaactgatatgtgggctgtgggctgttccactaggcgtggccacctctgcacatgggccttggcacttaggaaatatgggtgctgctgcattgggaccttgtgtgggtgcagagcaggatggctgctgcgtggagggtaattttgtcccctggagagtgattggtgaccctcttccctgctgctgctgtttgcaggctcctggcctatactacctctgacgccctgatcctgagttcctctgccctcctctgctgccagcagcgctgttggtggcctcaccctcctccagtacccaggcaccaaagatggcaccaccatcctcctgcttgtaccacagggtgctgctccctgggccaactcctgtgaacttgctcacttcccatggagaccgaggccagggcctgcccctctgaggcccctgttttgtggtcctgctgcctctgctgtgctgcgttcaggaggttgtccactgctcgacgtgggtcaccatgcagcccttgctgttcccacaatttaacagaaaaggaaactgaacggatgagtaaggctgcccagggtcactcagctggaaaagagtagagctggactcaaacccgggactgtctgtctctggtgcctgagttgggaagacgctgttgatgtccccttctgcctcgctttgagcttcctcctccgtgggccctccccctactctagagaaactagtccattccctcatgttccaccttgtgctcagtaaaccctgtcactccacagcagggtttttgagacagtctcgctgtgtcacccaggtggagtgcagtggggcgatctcagctcactgcaacctctgccttccaggctcaagcaattctcctgccttagcctcctgcgtagctgagactacaggcatgtgccaccatggctggctaatttttatatttttagtagagatggggtttcaccatgatggccaggctggtctcgaactccagaccccaggtgatccgcctgccttggcctcccaaagtgctgggaatacaggtgtgagcccctgcgcccggctcacagcagggttcttgataggccaccagtgaatcccatgccaccgaatctggcattcatttcacagcctcatctcagttctcactcagcagagccctcttgcctgtcctgccacccaggctactaatgttctggttcattctctgctgacagttagctgtggctgtcctcagcctcagtcctgggtctccccaagcagtcattagcatcaccttgactgatttccagggaacacttcaaccaccccttacctctgagctccagccccgagacactgccttctctctgcatttgttgatctctgtgcagcagtgcccacatcctcatcccagcttactgccgtctcaccaccttcaggttgtgaggtgcccataaactctgctgttaccattgccacttccctgtcttagcagctgtccctttcagtctgccctccactagtggccatgaagggggctgtgaccgtggtccaggtgagaaaggaaggcctgaactaagatgggaggtgggtggccagaatggagaggggagaagtggatggccagaatggagagatgcttagagggctgtgttgggaagtggtgactggatacaggggagggaggagagatacaagagggcacctgggctcatttgtggactacgtgattttgagactccaaataagcactgggtatttgggttggagatacagagctgagaatgatatgcatgtaggtgggcaaagcaagggggatttcatgagttctaaggtagggtgagaaaaataaccgagagttgagcagtgacggaggaagctgcaaagaaaacgactgctcagggagaggctggccaggggcctgtggctcaggggactgagaagaggagctctctaggcatctgaattgaggttgcccacaattggttgcaagatcgtggctggccttgatggaagctgggaagccactcggtcctagtgaggggtggtgaggagagcagcaacggccacacaggaaggctttggacgttttttctcctgacactagttatttccaggcctgggatatagctaggggcttggggtgggggcaactctttgcagggtggtgtggcctgtggaggaaacaggctcagttccactactttggccaggtgcaatggctcatgcctgtaatcccagcactttggaaggccaaggcgggtggatcacctgaggtcaggagttcaagaccagcctggacaacatggtgaaaccccgtctctactgaaaatacaaaaataattagccgggaatggtggtgcgtgcctgtaatcccaggtactcgagaggctgaggcagacagttgcttgaacctgggaggcagaggttgctgcagtgagccgagattgctgcactgcactccagcctgggtgacagcaagactgtctcaaaaaaaaaaaaaaaaaaaaatccgctatttcaggtcaccctggtgctggcgttcacgtggaagactgcttatctgtatccagctgtttgcagagctcagggaggccagggggcttcagactccactgtactctgcattccaggattctctgttctctggctgtggtggcctgacacactcttcaccactgaccccacccccgcttgcacactatgccacaggaagggcaggggcttccatcacaatcactcagtactagttaccagctctgatagaattactcaccttgagtttccaagtcttgctgaaggtgcttgcgtaagtggcacatggatgttccctctgttcaaaggcatatgcacaacactatttttcaaaatttgcttttatttacacgtttgagtcaattacatgcatgttttatttttgaggagtgattagcaaaatgcattaaaattttaaaatagcaattaaatatacaaaaatatagcttacaaaaaactgcgaatgtttaaaaatattctgctgcagaatttttagtgtacaaagacgtctatgaaacctgaggttcagcatttcataaacctttttttgagggagttacacaatacctagtgaggaaacccgagggccaaactacaagacgaaaaagtgccccgttcctggcaatgatgtcagaagaccaagaggcgatagttaccagcaacactctaggaagaccagctgtcaccagaagggagttcctaacacttgccacacctgctcccccgaccgggggcctgggagggaagggcagatggagaggaacggtgtgcagtgggcgtgagatgcagatccaccaggcttgggactggcaaagggagctgagaagagagttcccccaaagcacaaacaagtctgctgacactggtggggcccttacagtcacagaagtaaggactggatggtaagccaaaggtgctgatgcttggtcaaaaagtggagtacatctttgcatcttgtaacaatttgggctctacagctgaattggcaaagtaaggtttactacacaagcccctctttttcttctgatatccccactcaaatggaagcacactccccagcacatggggatcccttattaatctttactaaagaaccgtgaaccagcattttccagttatcaactggatatttaggcatgaatctggacatgtccatctgcttaagaaatctgcttaagaaatctgtaacagctacaggaaaagacacacccagggccagagattctacaaatgccagaagagtggatgtgatagagaattttttctcaagttttgggttagggcaccagttgcaattttaatccaggggaggatctgggctgctgctgtagggggcaagtacaccagggaggtgggtgtggacagaggcactgggcagctgctgggaagcgaggcacaagtctgtgcccctactcccagggctgcctggaggaagcagctctaactttcatcagcgg

SEQ ID NO: 11805 - protein, 134 aa, Homo sapiens; identical to SEQ ID NO: 11793

SEQ ID NO: 11806 - DNA, 350 bp, Homo sapiens
agagccatcccagaaatcagaatacaaaatgtgaacccagaattgggggatgtttttgcaatcacactcctgttgagtaagacatattttcattttattgcaacatactgaaattttagttttctgtacaaatcagaatctgcagtccctcccttaccccaaatgcccagctaatccaagagcacaaccagatttttctgattgactttctatctgcgacaggatgctcaagatcaggctctgtagctgacagcagtggcacaggcctctcccagctctgagcagcctcggtctccatgggaagtgagcaagttcacaggagttggcccagggagcagcaccctgtggta

SEQ ID NO: 11807 - protein, 33 aa, Homo sapiens
LTAVAQASPSSEQPRSPWEVSKFTGVGPGSSTL

SEQ ID NO: 11808 - DNA, 1359 bp, Homo sapiens
ctgtcacccaggctggaatgcagtggcacgatctggattaaaattgcaactggtgccctaacccaaaacttgagaaaaaattctctatcacatccactcttctggcatttgtagaatctctggccctgggtgtgtcttttcctgtagctgttacagatttcttaagcagatttcttaagcagatggacatgtccagattcatgcctaaatatccagttgataactggaaaatgctggttcacggttctttagtaaagattaataagggatccccatgtgctggggagtgtgcttccatttgagtggggatatcagaagaaaaagaggggcttgtgtagtaaaccttactttgccaattcagctgtagagcccaaattgttacaagatgcaaagatgtactccactttttgaccaagcatcagcacctttggcttaccatccagtccttacttctgtgactgtaagggccccaccagtgtcagcagacttgtttgtgctttgggggaactctcttctcagctccctttgccagtcccaagcctggtggatctgcatctcacgcccactgcacaccgttcctctccatctgcccttccctcccaggcccccggtcgggggagcaggtgtggcaagtgttaggaactcccttctggtgacagctggtcttcctagagtgttgctggtaactatcgcctcttggtcttctgacatcattgccaggaacggggcactttttcgtcttgtagtttggccctcgggtttcctcactaggtattgtgtaactccctcaaaaaaaggtttatgaaatgctgaacctcaggtttcatagacgtctttgtacactaaaaattctgcagcagaatatttttaaacattcgcagttttttgtaagctatatttttgtatatttaattgctattttaaaattttaatgcattttgctaatcactcctcaaaaataaaacatgcatgtaattgactcaaacgtgtaaataaaagcaaattttgaaaaatagtgttgtgcatatgcctttgaacagagggaacatccatgtgccacttacgcaagcaccttcagcaagacttggaaactcaaggtgagtaattctatcagagctggtaactagtactgagtgattgtgatggaagcccctgcccttcctgtggcatagtgtgcaagcgggggtggggtcagtggtgaagagtgtgtcaggccaccacagccagagaacagagaatcctggaatgcagagtacagtggagtctgaagccccctggcctccctgagctctgcaaacagctggatacagataagcagtcttccacgtgaacgccagcaccagggtgacctgaaatagc

SEQ ID NO: 11809 - protein, 139 aa, Homo sapiens
MQRCTPLFDQASAPLAYHPVLTSVTVRAPPVSADLFVLWGNSLLSSLCQSQAWWICISRPLHTVPLHLPFPPRPPVGGAGVASVRNSLLVTAGLPRVLLVTIASWSSDIIARNGALFRLVVWPSGFLTRYCVTPSKKGL

SEQ ID NO: 11810 - DNA, 1008 bp, Homo sapiens
ctgtcacccaggctggaatgcagtggcacgatctggattaaaattgcaactggtgccctaacccaaaacttgagaaaaaattctctatcacatccactcttctggcatttgtagaatctctggccctgggtgtgtcttttcctgtagctgttacagatttcttaagcagatttcttaagcagatggacatgtccagattcatgcctaaatatccagttgataactggaaaatgctggttcacggttctttagtaaagattaataagggatccccatgtgctggggagtgtgcttccatttgagtggggatatcagaagaaaaagaggggcttgtgtagtaaaccttactttgccaattcagctgtagagcccaaattgttacaagatgcaaagatgtactccactttttgaccaagcatcagcacctttggcttaccatccagtccttacttctgtgactgtaagggccccaccagtgtcagcagacttgtttgtgctttgggggaactctcttctcagctccctttgccagtcccaagcctggtggatctgcatctcacgcccactgcacaccgttcctctccatctgcccttccctcccaggcccccggtcgggggagcaggtgtggcaagtgttaggaactcccttctggtgacagctggtcttcctagagtgttgctggtaactatcgcctcttggtcttctgacatcattgccaggaacggggcactttttcgtcttgtagtttggccctcgggtttcctcactaggtattgtgtaactccctcaaaaaaaggtttatgaaatgctgaacctcaggtttcatagacgtctttgtacactaaaaattctgcagcagaatatttttaaacattcgcagttttttgtaagctatatttttgtatatttaattgctattttaaaattttaatgcattttgctaatcactcctcaaaaataaaacatgcatgtaattgactcaaacgtgtaaataaaagcaaattttg

SEQ ID NO: 11811 - protein, 139 aa, Homo sapiens; identical to SEQ ID NO: 11809

SEQ ID NO: 11812 - DNA, 2947 bp, Homo sapiens
tgctccctgcatctgggtcctccaccaggatgggcctgcgcatctgcattgctgtacagacaaacaggccttttaatttacatcctcctttaattctcattaaaatcgcagggtttttgtttgaaagacagtcctttttttatttattttgaaaaaggaatgagttagggacccctttataactctcttggctcagactcgaaccccatggtaaagtcaccctttccgcatctatcttcaggagttgctgggacttgttactgtgtagctgcgtggggattctggtctgctcttggaccactggctggtatcctttgtgtgtttcttaagcagctcaaagatagaatgttgctggtctgctatgggttagtggagcataactcagccccaactggactccacgggtggctgaaccattagtagttgctaggggtacaactgaattcaactgccttcagaaacagggaacaaaaccagcctgacttgattcctggttgggtcagtatcagacactaggaagttgacatctgctgcttttctttgccacgtgtgatttggttaggcctgtccctggcagataaggtccttgaagcctatgcttgcctagccagggaaggcaggacagaaatggccaaataggggcaggtggcccctgggaaggtctgagctgagggatacaggggacctcccaccattgccggataccctgttcttgacaagaagatccttttccccagtgccaagccccttggatccatcagagaaatagcctcgggccttgtcctttttcacaaccccacttcaaaatcatgtcatctccctggcctgatcccgctctaagctactttgaacaactaggaattatttttctcagaggctttttgggcattatgaaatacatcctgatacatccagggcagtatacccagagctccaggcagagagtgatggaatcacctcttgtcactcactagccttaggcccttctgcaggttagcctctcagtctcttccttagcttccttagctaccacccagggattgtagtaacgtccctggcacctcttgtgggggttagctggtgcccagagcctggtaggcagcaggcctggtgtcatgggggctgctgataccacataacatcatctgggttacatgggctcctctgccatcatgattgataggaacagaacctcagccaaaaagcttcctgagctgtaggggctttccctgaggcccaggttcacctggcccctttcttccttggtcatctctgcctttgcccacagtgaactctgacttggttgttcagtgctgaatatttctttcttaatgttttgaataggtaatccattcatgtggttcacaaatcataaagtagttaaaagcctttcttgagttcctgatgcctagcaagctccgctcctcactccatgaatacctactattggtttgttccttgggtatccttccagagatcatttatgcatgtacacacatgtgtatgtgtgtctatataatttttctccttttctactcatgtgataccagacaagtgtattcaaggaacgctcctactaatgtgggaagagccatcccagaaatcagaatacaaaatgtgaacccagaattgggggatgtttttgcaatcacactcctgttgagtaagacatattttcattttattgcaacatactgaaattttagttttctgtacaaatcagaatctgcagtccctcccttaccccaaattgctgggattacaggcgtgagccactgcgcccggccaataatttttttagtttaagttcatttttgtccccgctgatgaaagttagagctgcttcctccaggcagccctgggagtaggggcacagacttgtgcctcgcttcccagcagctgcccagtgcctctgtccacacccacctccctggtgtacttgccccctacagcagcagcccagatcctcccctggattaaaattgcaactggtgccctaacccaaaacttgagaaaaaattctctatcacatccactcttctggcatttgtagaatctctggccctgggtgtgtcttttcctgtagctgttacagatttcttaagcagatttcttaagcagatggacatgtccagattcatgcctaaatatccagttgataactggaaaatgctggttcacggttctttagtaaagattaataagggatccccatgtgctggggagtgtgcttccatttgagtggggatatcagaagaaaaagaggggcttgtgtagtaaaccttactttgccaattcagctgtagagcccaaattgttacaagatgcaaagatgtactccactttttgaccaagcatcagcacctttggcttaccatccagtccttacttctgtgactgtaagggccccaccagtgtcagcagacttgtttgtgctttgggggaactctcttctcagctccctttgccagtcccaagcctggtggatctgcatctcacgcccactgcacaccgttcctctccatctgcccttccctcccaggcccccggtcgggggagcaggtgtggcaagtgttaggaactcccttctggtgacagctggtcttcctagagtgttgctggtaactatcgcctcttggtcttctgacatcattgccaggaacggggcactttttcgtcttgtagtttggccctcgggtttcctcactaggtattgtgtaactccctcaaaaaaaggtttatgaaatgctgaacctcaggtttcatagacgtctttgtacactaaaaattctgcagcagaatatttttaaacattcgcagttttttgtaagctatatttttgtatatttaattgctattttaaaattttaatgcattttgctaatcactcctcaaaaataaaacatgcatgtaattgactcaaacgtgtaaataaaagcaaattttg

SEQ ID NO: 11813 - protein, 139 aa, Homo sapiens; identical to SEQ ID NO: 11809

SEQ ID NO: 11814 - DNA, 5627 bp, Homo sapiens
ggccgccgcccccgggctggggtttgggggaccgagccgctccgggttcgggatgctgaggagaccgcgggcccgcgccagcctcccacacacacacactctcccggcgcctcggccggccgggcgcggtgtgcaggggtgaggcggtgtctccaggctgaggagggacgcggaggagggtccggcgcggccccgggactggagggtgagtccctcacaaagggcggagcggggctgtcacctggagatcacggagggaagttcatccatgagctcggatttcccacattacaacttcaggatgcctaatattggattccagaatctgcctctcaacatatatattgtggtttttggtactgctatatttgtcttcatccttagtttactcttctgttgctacttgattaggctaagacatcaagcacacaaagaattttatgcctacaaacaggttatattaaaagagaaagtaaaagaattgaatttacatgagctctgtgcagtgtgcctagaagacttcaagcctcgagatgagttggggatttgcccatgtaagcacgccttccacagaaagtgccttattaagtggctggaggttcgtaaagtgtgtcccctgtgcaacatgccagttctacagctggcccagttgcacagtaagcaggaccgtggaccccctcaggggccccttcctggggcagagaacattgtatagcttaccgcaaggatcagactgttgctggacacgacgtctgtgtggagccaggaggaacacatgtggtgtctgtatggctgctctctacctaggacaccagctgccacttcttttgcctcatgaagaactcttgggccagccaaactgggaacctaggtgtctgggtcttgtgacaaccaaagcactttgacactaccccctgccgagagaagaggagtggatgagcctgcgggtttgcctcaagaaacttcatgagggtctcttactaactccattacactctctctcctggagcctcatctccatgtcaagcaggagggtaaagaagggaactaagagcaggtctttcaagccacacccccacctgcggatggatgggtttctctgtaggccatgcaggcctttgtcgcagcaaaccttcccagcagcccttgagccaagtaaaaccagcacaaccagccaccagtggttggtgaggcagtgcccacaaggctcatgttgtatgcctttgataaggccatcttggctttgagtagcagtgttcctcgtcacccatttccccctcaggattacaacacctgctatcaaatcatctaagctgaaaacatgagatgcgcttggaaaggcctagtcagaagccatttcctcttatcatttccctctcctatgcaccagtaaggcccgtccagagccccagcagggagtgggccctgagtccacactgtccctgagtgatccaggaggctgcccacatccccacatgtgcactgtggttccagtgtagctgctgtgagcccactgccactgcctcagaagggagccactgtgaacctctcgagtggctccaaagagcagtggctttttgagaatggcccatacttctggcccggctggatgaagggaatgccgaccctttggcctctccccctccttccatctcttctctctcttgccctatctctctttctacttcagaaaaaaaaaaaaaaaaaaaaaaaagcctgtcattcactttttaacactttatcccaaataagatccctgtgtaattctgaagctggtgatccacttggaattgtagatagtttcaggaagctcctgcagggctgtccaccgttggtgtgtgcctcagtatttggacttccgaaactgaaagtgaaagtgtctttataggagagaaacgcatgctgctctttggctctttctgtccaacttttctagaaatgactcaaagtccattaagatttgtgaatattgtataaattagctatggaaagtagcaggtcagatggaaaattcttttccacagccctgctctccgcctccctccatcttaggagcgcctgcctcaattcctcgtcaactgctttgctccactccatcccacaggtgtgagtgggggaagtttttcattaggaatacagtctgcgtgacatggagaatggatggagggagctttgctactctgctcttggcatgactccaggatttttttctggaatccaacctctgtcctcttaggagaaggaacctgtccttggttcagatggctgggcatgaggaggaaaatttccattagtgtagaacagtgctggacagaatccggtttggaaaattacaaatccagttggtcaaaataggccatttcctatgtgtgacctattcgtggtatgccaactggactgcttcctaaacaggacgaggaaagtgaggaatatttttatatgaaagccttagcctgtctggcacccatgaaaaaaactatttatgcactcctactttcaccgtctttttgcattctctatttgtagcacaacagagttgaatgccacaaaacaccccgtttatagtgagctgttttcagtgaccaatatcagaaggaggcttgcttctggactagcctcactaattgccagcagccaccattttccatggaatggccttgggacagatgtcacctctgttatggggctctaataggaaagagaatgttttttcccttcctatgatcaatactgcaaattattgctgctcacagcttttataggattctcccaactgaaagttgcaggctttttctgtccctgtgcatcagtactaacaaaagacagcctcaccaagtctgtatatttgaacagaggcaagttaattcatccccccgtgtcagagccacaggcatgttgagggggttgatacgtagcactggaccagggcgcaaagcccagatagttccagccatgagaggagagcacaagaatgctctgcactctgcactcagcaccaccttgggtctgctttgcccagatgagggaccactaacaaccttctcagcacatgtgaatgtggactggttttaaaatgcattcattctgctaggattgggctggaagctggaacagtgagagtactttttctgctcctagtcatctccctttctcagcgtgacatcctcctgcagcaagcctagtatcactagcagtagttcctgcgactcttagcaacacaacccgaatatttgctccctgcatctgggtcctccaccaggatgggcctgcgcatctgcattgctgtacagacaaacaggccttttaatttacatcctcctttaattctcattaaaatcgcagggtttttgtttgaaagacagtcctttttttatttattttgaaaaaggaatgagttagggacccctttataactctcttggctcagactcgaaccccatggtaaagtcaccctttccgcatctatcttcaggagttgctgggacttgttactgtgtagctgcgtggggattctggtctgctcttggaccactggctggtatcctttgtgtgtttcttaagcagctcaaagatagaatgttgctggtctgctatgggttagtggagcataactcagccccaactggactccacgggtggctgaaccattagtagttgctaggggtacaactgaattcaactgccttcagaaacagggaacaaaaccagcctgacttgattcctggttgggtcagtatcagacactaggaagttgacatctgctgcttttctttgccacgtgtgatttggttaggcctgtccctggcagataaggtccttgaagcctatgcttgcctagccagggaaggcaggacagaaatggccaaataggggcaggtggcccctgggaaggtctgagctgagggatacaggggacctcccaccattgccggataccctgttcttgacaagaagatccttttccccagtgccaagccccttggatccatcagagaaatagcctcgggccttgtcctttttcacaaccccacttcaaaatcatgtcatctccctggcctgatcccgctctaagctactttgaacaactaggaattatttttctcagaggctttttgggcattatgaaatacatcctgatacatccagggcagtatacccagagctccaggcagagagtgatggaatcacctcttgtcactcactagccttaggcccttctgcaggttagcctctcagtctcttccttagcttccttagctaccacccagggattgtagtaacgtccctggcacctcttgtgggggttagctggtgcccagagcctggtaggcagcaggcctggtgtcatgggggctgctgataccacataacatcatctgggttacatgggctcctctgccatcatgattgataggaacagaacctcagccaaaaagcttcctgagctgtaggggctttccctgaggcccaggttcacctggcccctttcttccttggtcatctctgcctttgcccacagtgaactctgacttggttgttcagtgctgaatatttctttcttaatgttttgaataggtaatccattcatgtggttcacaaatcataaagtagttaaaagcctttcttgagttcctgatgcctagcaagctccgctcctcactccatgaatacctactattggtttgttccttgggtatccttccagagatcatttatgcatgtacacacatgtgtatgtgtgtctatataatttttctccttttctactcatgtgataccagacaagtgtattcaaggaacgctcctactaatgtgggaagagccatcccagaaatcagaatacaaaatgtgaacccagaattgggggatgtttttgcaatcacactcctgttgagtaagacatattttcattttattgcaacatactgaaattttagttttctgtacaaatcagaatctgcagtccctcccttaccccaaatgcccagctaatccaagagcacaaccagatttttctgattgactttctatctgcgacaggatgctcaagatcaggctctgtagctgacagcagtggcacaggcctctcccagctctgagcagcctctgcaggtgcctggacagctgctggcccctcccctaccttggccagttccaagtgaggaccagtggtgatgtgtggctgcaactgttgtggtcacttaggcaagctcttgtgtctttgatgcaggagtttgagcagcagcaactgaaggcttctattttgtggggcagacatcttagctactgagcaagtgcacagtgagtctcatgtggatatgcctgaatgtccagcgtcagttcatggagctactccctttccctcccaacttttcgttgttgttgagacagggtcttgttacccagactggagtgcagtggcaccattgtagctcactgcagcctcaacttcctggactcaagtgatcctcccgcctcagtctgtagctgcgtctacaggtgcacaccagcacacctggctaattttcgtaattatttttttgtagagacaggtctcaactcactatgttgcccaggctggcctcctcactctgtgcacacactttgaaaagaaaatgcttctggtc

SEQ ID NO: 11815 - protein, 148 aa, Homo sapiens; identical to SEQ ID NO: 1959

SEQ ID NO: 11816 - DNA, 5544 bp, Homo sapiens
gccacctccgccgcgctctgtccggacggacgctcgccgcccgcagcctgccgcccgccgcagggcgctgacggtcccgcacgtctgccgctgccaccggcgcgcccgaaacttccagcactatgttgaataagagtggtgagagcagatatcctgccttgttcccggtcttagggggttcatccatgagctcggatttcccacattacaacttcaggatgcctaatattggattccagaatctgcctctcaacatatatattgtggtttttggtactgctatatttgtcttcatccttagtttactcttctgttgctacttgattaggctaagacatcaagcacacaaagaattttatgcctacaaacaggttatattaaaagagaaagtaaaagaattgaatttacatgagctctgtgcagtgtgcctagaagacttcaagcctcgagatgagttggggatttgcccatgtaagcacgccttccacagaaagtgccttattaagtggctggaggttcgtaaagtgtgtcccctgtgcaacatgccagttctacagctggcccagttgcacagtaagcaggaccgtggaccccctcaggggccccttcctggggcagagaacattgtatagcttaccgcaaggatcagactgttgctggacacgacgtctgtgtggagccaggaggaacacatgtggtgtctgtatggctgctctctacctaggacaccagctgccacttcttttgcctcatgaagaactcttgggccagccaaactgggaacctaggtgtctgggtcttgtgacaaccaaagcactttgacactaccccctgccgagagaagaggagtggatgagcctgcgggtttgcctcaagaaacttcatgagggtctcttactaactccattacactctctctcctggagcctcatctccatgtcaagcaggagggtaaagaagggaactaagagcaggtctttcaagccacacccccacctgcggatggatgggtttctctgtaggccatgcaggcctttgtcgcagcaaaccttcccagcagcccttgagccaagtaaaaccagcacaaccagccaccagtggttggtgaggcagtgcccacaaggctcatgttgtatgcctttgataaggccatcttggctttgagtagcagtgttcctcgtcacccatttccccctcaggattacaacacctgctatcaaatcatctaagctgaaaacatgagatgcgcttggaaaggcctagtcagaagccatttcctcttatcatttccctctcctatgcaccagtaaggcccgtccagagccccagcagggagtgggccctgagtccacactgtccctgagtgatccaggaggctgcccacatccccacatgtgcactgtggttccagtgtagctgctgtgagcccactgccactgcctcagaagggagccactgtgaacctctcgagtggctccaaagagcagtggctttttgagaatggcccatacttctggcccggctggatgaagggaatgccgaccctttggcctctccccctccttccatctcttctctctcttgccctatctctctttctacttcagaaaaaaaaaaaaaaaaaaaaaaaagcctgtcattcactttttaacactttatcccaaataagatccctgtgtaattctgaagctggtgatccacttggaattgtagatagtttcaggaagctcctgcagggctgtccaccgttggtgtgtgcctcagtatttggacttccgaaactgaaagtgaaagtgtctttataggagagaaacgcatgctgctctttggctctttctgtccaacttttctagaaatgactcaaagtccattaagatttgtgaatattgtataaattagctatggaaagtagcaggtcagatggaaaattcttttccacagccctgctctccgcctccctccatcttaggagcgcctgcctcaattcctcgtcaactgctttgctccactccatcccacaggtgtgagtgggggaagtttttcattaggaatacagtctgcgtgacatggagaatggatggagggagctttgctactctgctcttggcatgactccaggatttttttctggaatccaacctctgtcctcttaggagaaggaacctgtccttggttcagatggctgggcatgaggaggaaaatttccattagtgtagaacagtgctggacagaatccggtttggaaaattacaaatccagttggtcaaaataggccatttcctatgtgtgacctattcgtggtatgccaactggactgcttcctaaacaggacgaggaaagtgaggaatatttttatatgaaagccttagcctgtctggcacccatgaaaaaaactatttatgcactcctactttcaccgtctttttgcattctctatttgtagcacaacagagttgaatgccacaaaacaccccgtttatagtgagctgttttcagtgaccaatatcagaaggaggcttgcttctggactagcctcactaattgccagcagccaccattttccatggaatggccttgggacagatgtcacctctgttatggggctctaataggaaagagaatgttttttcccttcctatgatcaatactgcaaattattgctgctcacagcttttataggattctcccaactgaaagttgcaggctttttctgtccctgtgcatcagtactaacaaaagacagcctcaccaagtctgtatatttgaacagaggcaagttaattcatccccccgtgtcagagccacaggcatgttgagggggttgatacgtagcactggaccagggcgcaaagcccagatagttccagccatgagaggagagcacaagaatgctctgcactctgcactcagcaccaccttgggtctgctttgcccagatgagggaccactaacaaccttctcagcacatgtgaatgtggactggttttaaaatgcattcattctgctaggattgggctggaagctggaacagtgagagtactttttctgctcctagtcatctccctttctcagcgtgacatcctcctgcagcaagcctagtatcactagcagtagttcctgcgactcttagcaacacaacccgaatatttgctccctgcatctgggtcctccaccaggatgggcctgcgcatctgcattgctgtacagacaaacaggccttttaatttacatcctcctttaattctcattaaaatcgcagggtttttgtttgaaagacagtcctttttttatttattttgaaaaaggaatgagttagggacccctttataactctcttggctcagactcgaaccccatggtaaagtcaccctttccgcatctatcttcaggagttgctgggacttgttactgtgtagctgcgtggggattctggtctgctcttggaccactggctggtatcctttgtgtgtttcttaagcagctcaaagatagaatgttgctggtctgctatgggttagtggagcataactcagccccaactggactccacgggtggctgaaccattagtagttgctaggggtacaactgaattcaactgccttcagaaacagggaacaaaaccagcctgacttgattcctggttgggtcagtatcagacactaggaagttgacatctgctgcttttctttgccacgtgtgatttggttaggcctgtccctggcagataaggtccttgaagcctatgcttgcctagccagggaaggcaggacagaaatggccaaataggggcaggtggcccctgggaaggtctgagctgagggatacaggggacctcccaccattgccggataccctgttcttgacaagaagatccttttccccagtgccaagccccttggatccatcagagaaatagcctcgggccttgtcctttttcacaaccccacttcaaaatcatgtcatctccctggcctgatcccgctctaagctactttgaacaactaggaattatttttctcagaggctttttgggcattatgaaatacatcctgatacatccagggcagtatacccagagctccaggcagagagtgatggaatcacctcttgtcactcactagccttaggcccttctgcaggttagcctctcagtctcttccttagcttccttagctaccacccagggattgtagtaacgtccctggcacctcttgtgggggttagctggtgcccagagcctggtaggcagcaggcctggtgtcatgggggctgctgataccacataacatcatctgggttacatgggctcctctgccatcatgattgataggaacagaacctcagccaaaaagcttcctgagctgtaggggctttccctgaggcccaggttcacctggcccctttcttccttggtcatctctgcctttgcccacagtgaactctgacttggttgttcagtgctgaatatttctttcttaatgttttgaataggtaatccattcatgtggttcacaaatcataaagtagttaaaagcctttcttgagttcctgatgcctagcaagctccgctcctcactccatgaatacctactattggtttgttccttgggtatccttccagagatcatttatgcatgtacacacatgtgtatgtgtgtctatataatttttctccttttctactcatgtgataccagacaagtgtattcaaggaacgctcctactaatgtgggaagagccatcccagaaatcagaatacaaaatgtgaacccagaattgggggatgtttttgcaatcacactcctgttgagtaagacatattttcattttattgcaacatactgaaattttagttttctgtacaaatcagaatctgcagtccctcccttaccccaaatgcccagctaatccaagagcacaaccagatttttctgattgactttctatctgcgacaggatgctcaagatcaggctctgtagctgacagcagtggcacaggcctctcccagctctgagcagcctctgcaggtgcctggacagctgctggcccctcccctaccttggccagttccaagtgaggaccagtggtgatgtgtggctgcaactgttgtggtcacttaggcaagctcttgtgtctttgatgcaggagtttgagcagcagcaactgaaggcttctattttgtggggcagacatcttagctactgagcaagtgcacagtgagtctcatgtggatatgcctgaatgtccagcgtcagttcatggagctactccctttccctcccaacttttcgttgttgttgagacagggtcttgttacccagactggagtgcagtggcaccattgtagctcactgcagcctcaacttcctggactcaagtgatcctcccgcctcagtctgtagctgcgtctacaggtgcacaccagcacacctggctaattttcgtaattatttttttgtagagacaggtctcaactcactatgttgcccaggctggcctcctcactctgtgcacacactttgaaaagaaaatgcttctggtc

SEQ ID NO: 11817 - protein, 169 aa, Homo sapiens
MLNKSGESRYPALFPVLGGSSMSSDFPHYNFRMPNIGFQNLPLNIYIVVFGTAIFVFILSLLFCCYLIRLRHQAHKEFYAYKQVILKEKVKELNLHELCAVCLEDFKPRDELGICPCKHAFHRKCLIKWLEVRKVCPLCNMPVLQLAQLHSKQDRGPPQGPLPGAENIV

SEQ ID NO: 11818 - DNA, 5503 bp, Homo sapiens
gaggggccgccgggcgcagtcagccgccgccacctccgccgcgctctgtccggacggacgctcgccgcccgcagcctgccgcccgccgcagggcgctgacggtcccgcacgtctgccgctgccaccggcgcgcccgattcatccatgagctcggatttcccacattacaacttcaggatgcctaatattggattccagaatctgcctctcaacatatatattgtggtttttggtactgctatatttgtcttcatccttagtttactcttctgttgctacttgattaggctaagacatcaagcacacaaagaattttatgcctacaaacaggttatattaaaagagaaagtaaaagaattgaatttacatgagctctgtgcagtgtgcctagaagacttcaagcctcgagatgagttggggatttgcccatgtaagcacgccttccacagaaagtgccttattaagtggctggaggttcgtaaagtgtgtcccctgtgcaacatgccagttctacagctggcccagttgcacagtaagcaggaccgtggaccccctcaggggccccttcctggggcagagaacattgtatagcttaccgcaaggatcagactgttgctggacacgacgtctgtgtggagccaggaggaacacatgtggtgtctgtatggctgctctctacctaggacaccagctgccacttcttttgcctcatgaagaactcttgggccagccaaactgggaacctaggtgtctgggtcttgtgacaaccaaagcactttgacactaccccctgccgagagaagaggagtggatgagcctgcgggtttgcctcaagaaacttcatgagggtctcttactaactccattacactctctctcctggagcctcatctccatgtcaagcaggagggtaaagaagggaactaagagcaggtctttcaagccacacccccacctgcggatggatgggtttctctgtaggccatgcaggcctttgtcgcagcaaaccttcccagcagcccttgagccaagtaaaaccagcacaaccagccaccagtggttggtgaggcagtgcccacaaggctcatgttgtatgcctttgataaggccatcttggctttgagtagcagtgttcctcgtcacccatttccccctcaggattacaacacctgctatcaaatcatctaagctgaaaacatgagatgcgcttggaaaggcctagtcagaagccatttcctcttatcatttccctctcctatgcaccagtaaggcccgtccagagccccagcagggagtgggccctgagtccacactgtccctgagtgatccaggaggctgcccacatccccacatgtgcactgtggttccagtgtagctgctgtgagcccactgccactgcctcagaagggagccactgtgaacctctcgagtggctccaaagagcagtggctttttgagaatggcccatacttctggcccggctggatgaagggaatgccgaccctttggcctctccccctccttccatctcttctctctcttgccctatctctctttctacttcagaaaaaaaaaaaaaaaaaaaaaaaagcctgtcattcactttttaacactttatcccaaataagatccctgtgtaattctgaagctggtgatccacttggaattgtagatagtttcaggaagctcctgcagggctgtccaccgttggtgtgtgcctcagtatttggacttccgaaactgaaagtgaaagtgtctttataggagagaaacgcatgctgctctttggctctttctgtccaacttttctagaaatgactcaaagtccattaagatttgtgaatattgtataaattagctatggaaagtagcaggtcagatggaaaattcttttccacagccctgctctccgcctccctccatcttaggagcgcctgcctcaattcctcgtcaactgctttgctccactccatcccacaggtgtgagtgggggaagtttttcattaggaatacagtctgcgtgacatggagaatggatggagggagctttgctactctgctcttggcatgactccaggatttttttctggaatccaacctctgtcctcttaggagaaggaacctgtccttggttcagatggctgggcatgaggaggaaaatttccattagtgtagaacagtgctggacagaatccggtttggaaaattacaaatccagttggtcaaaataggccatttcctatgtgtgacctattcgtggtatgccaactggactgcttcctaaacaggacgaggaaagtgaggaatatttttatatgaaagccttagcctgtctggcacccatgaaaaaaactatttatgcactcctactttcaccgtctttttgcattctctatttgtagcacaacagagttgaatgccacaaaacaccccgtttatagtgagctgttttcagtgaccaatatcagaaggaggcttgcttctggactagcctcactaattgccagcagccaccattttccatggaatggccttgggacagatgtcacctctgttatggggctctaataggaaagagaatgttttttcccttcctatgatcaatactgcaaattattgctgctcacagcttttataggattctcccaactgaaagttgcaggctttttctgtccctgtgcatcagtactaacaaaagacagcctcaccaagtctgtatatttgaacagaggcaagttaattcatccccccgtgtcagagccacaggcatgttgagggggttgatacgtagcactggaccagggcgcaaagcccagatagttccagccatgagaggagagcacaagaatgctctgcactctgcactcagcaccaccttgggtctgctttgcccagatgagggaccactaacaaccttctcagcacatgtgaatgtggactggttttaaaatgcattcattctgctaggattgggctggaagctggaacagtgagagtactttttctgctcctagtcatctccctttctcagcgtgacatcctcctgcagcaagcctagtatcactagcagtagttcctgcgactcttagcaacacaacccgaatatttgctccctgcatctgggtcctccaccaggatgggcctgcgcatctgcattgctgtacagacaaacaggccttttaatttacatcctcctttaattctcattaaaatcgcagggtttttgtttgaaagacagtcctttttttatttattttgaaaaaggaatgagttagggacccctttataactctcttggctcagactcgaaccccatggtaaagtcaccctttccgcatctatcttcaggagttgctgggacttgttactgtgtagctgcgtggggattctggtctgctcttggaccactggctggtatcctttgtgtgtttcttaagcagctcaaagatagaatgttgctggtctgctatgggttagtggagcataactcagccccaactggactccacgggtggctgaaccattagtagttgctaggggtacaactgaattcaactgccttcagaaacagggaacaaaaccagcctgacttgattcctggttgggtcagtatcagacactaggaagttgacatctgctgcttttctttgccacgtgtgatttggttaggcctgtccctggcagataaggtccttgaagcctatgcttgcctagccagggaaggcaggacagaaatggccaaataggggcaggtggcccctgggaaggtctgagctgagggatacaggggacctcccaccattgccggataccctgttcttgacaagaagatccttttccccagtgccaagccccttggatccatcagagaaatagcctcgggccttgtcctttttcacaaccccacttcaaaatcatgtcatctccctggcctgatcccgctctaagctactttgaacaactaggaattatttttctcagaggctttttgggcattatgaaatacatcctgatacatccagggcagtatacccagagctccaggcagagagtgatggaatcacctcttgtcactcactagccttaggcccttctgcaggttagcctctcagtctcttccttagcttccttagctaccacccagggattgtagtaacgtccctggcacctcttgtgggggttagctggtgcccagagcctggtaggcagcaggcctggtgtcatgggggctgctgataccacataacatcatctgggttacatgggctcctctgccatcatgattgataggaacagaacctcagccaaaaagcttcctgagctgtaggggctttccctgaggcccaggttcacctggcccctttcttccttggtcatctctgcctttgcccacagtgaactctgacttggttgttcagtgctgaatatttctttcttaatgttttgaataggtaatccattcatgtggttcacaaatcataaagtagttaaaagcctttcttgagttcctgatgcctagcaagctccgctcctcactccatgaatacctactattggtttgttccttgggtatccttccagagatcatttatgcatgtacacacatgtgtatgtgtgtctatataatttttctccttttctactcatgtgataccagacaagtgtattcaaggaacgctcctactaatgtgggaagagccatcccagaaatcagaatacaaaatgtgaacccagaattgggggatgtttttgcaatcacactcctgttgagtaagacatattttcattttattgcaacatactgaaattttagttttctgtacaaatcagaatctgcagtccctcccttaccccaaatgcccagctaatccaagagcacaaccagatttttctgattgactttctatctgcgacaggatgctcaagatcaggctctgtagctgacagcagtggcacaggcctctcccagctctgagcagcctctgcaggtgcctggacagctgctggcccctcccctaccttggccagttccaagtgaggaccagtggtgatgtgtggctgcaactgttgtggtcacttaggcaagctcttgtgtctttgatgcaggagtttgagcagcagcaactgaaggcttctattttgtggggcagacatcttagctactgagcaagtgcacagtgagtctcatgtggatatgcctgaatgtccagcgtcagttcatggagctactccctttccctcccaacttttcgttgttgttgagacagggtcttgttacccagactggagtgcagtggcaccattgtagctcactgcagcctcaacttcctggactcaagtgatcctcccgcctcagtctgtagctgcgtctacaggtgcacaccagcacacctggctaattttcgtaattatttttttgtagagacaggtctcaactcactatgttgcccaggctggcctcctcactctgtgcacacactttgaaaagaaaatgcttctggtc

SEQ ID NO: 11819 - protein, 148 aa, Homo sapiens; identical to SEQ ID NO: 1959

SEQ ID NO: 11820 - DNA, 2229 bp, Homo sapiens
acaaaaaaataattacgaaaattagccaggtgtgctggtgtgcacctgtagacgcagctacagactgaggcgggagggaaagggagtagctccatgaactgacgctggacattcaggcatatccacatgagactcactgtgcacttgctcagtagctaagatgtctgccccacaaaatagaagccttcagttgctgctgctcaaactcctgcatcaaagacacaagagcttgcctaagtgaccacaacagttgcagccacacatcaccactggtcctcacttggaactggccaaggtaggggaggggccagcagctgtccaggcacctgcagaggctgctcagagctgggagaggcctgtgccactgctgtcagctacagagcctgatcttgagcatcctgtcgcagatagaaagtcaatcagaaaaatctggttgtgctcttggattagctgggcatttggggtaagggagggactgcagattctgatttgtacagaaaactaaaatttcagtatgttgcaataaaatgaaaatatgtcttactcaacaggagtgtgattgcaaaaacatcccccaattctgggttcacattttgtattctgatttctgggatggctcttcccacattagtaggagcgttccttgaatacacttgtctggtatcacatgagtagaaaaggagaaaaattatatagacacacatacacatgtgtgtacatgcataaatgatctctggaaggatacccaaggaacaaaccaatagtaggtattcatggagtgaggagcggagcttgctaggcatcaggaactcaagaaaggcttttaactactttatgatttgtgaaccacatgaatggattacctattcaaaacattaagaaagaaatattcagcactgaacaaccaagtcagagttcactgtgggcaaaggcagagatgaccaaggaagaaaggggccaggtgaacctgggcctcagggaaagcccctacagctcaggaagctttttggctgaggttctgttcctatcaatcatgatggcagaggagcccatgtaacccagatgatgttatgtggtatcagcagcccccatgacaccaggcctgctgcctaccaggctctgggcaccagctaacccccacaagaggtgccagggacgttactacaatccctgggtggtagctaaggaagctaaggaagagactgagaggctaacctgcagaagggcctaaggctagtgagtgacaagaggtgattccatcactctctgcctggagctctgggtatactgccctggatgtatcaggatgtatttcataatgcccaaaaagcctctgagaaaaataattcctagttgttcaaagtagcttagagcgggatcaggccagggagatgacatgattttgaagtggggttgtgaaaaaggacaaggcccgaggctatttctctgatggatccaaggggcttggcactggggaaaaggatcttcttgtcaagaacagggtatccggcaatggtgggaggtcccctgtatccctcagctcagaccttcccaggggccacctgcccctatttggccatttctgtcctgccttccctggctaggcaagcataggcttcaaggaccttatctgccagggacaggcctaaccaaatcacacgtggcaaagaaaagcagcagatgtcaacttcctagtgtctgatactgacccaaccaggaatcaagtcaggctggttttgttccctgtttctgaaggcagttgaattcagttgtacccctagcaactactaatggttcagccacccgtggagtccagttggggctgagttatgctccactaacccatagcagaccagcaacattctatctttgagctgcttaagaaacacacaaaggataccagccagtggtccaagagcagaccagaatccccacgcagctacacagtaacaagtcccagcaactcctgaagatagatgcggaaagggtgactttaccatggggttcgagtctgagccaagagagttataaaggggtccctaactcattcctttttcaaaataaataaaaaaaggactgtctttcaaacaaaaaccctgcgattttaatgagaattaaaggaggatgtaaattaaaaggcctgtttgtctgtacagcaatgcagatgcgcaggcccatcctggtggaggacccagatgcagggagcaaatattcgggttgtgttgctaa

SEQ ID NO: 11821 - protein, 68 aa, Homo sapiens [sequence omitted]

SEQ ID NO: 11822 - DNA, 3354 bp, Homo sapiens
ggccgccgcccccgggctggggtttgggggaccgagccgctccgggttcgggatgctgaggagaccgcgggcccgcgccagcctcccacacacacacactctcccggcgcctcggccggccgggcgcggtgtgcaggggtgaggcggtgtctccaggctgaggagggacgcggaggagggtccggcgcggccccgggactggagggtgagtccctcacaaagggcggagcggggctgtcacctggagatcacggagggaagttcatccatgagctcggatttcccacattacaacttcaggatgcctaatattggattccagaatctgcctctcaacatatatattgtggtttttggtactgctatatttgtcttcatccttagtttactcttctgttgctacttgattaggctaagacatcaagcacacaaagaattttatgcctacaaacaggttatattaaaagagaaagtaaaagaattgaatttacatgagctctgtgcagtgtgcctagaagacttcaagcctcgagatgagttggggatttgcccatgtaagcacgccttccacagaaagtgccttattaagtggctggaggttcgtaaagtgtgtcccctgtgcaacatgccagttctacagctggcccagttgcacagtaagcaggaccgtggaccccctcaggggccccttcctggggcagagaacattgtatagcttaccgcaaggatcagactgttgctggacacgacgtctgtgtggagccaggaggaacacatgtggtgtctgtatggctgctctctacctaggacaccagctgccacttcttttgcctcatgaagaactcttgggccagccaaactgggaacctaggtgtctgggtcttgtgacaaccaaagcactttgacactaccccctgccgagagaagaggagtggatgagcctgcgggtttgcctcaagaaacttcatgagggtctcttactaactccattacactctctctcctggagcctcatctccatgtcaagcaggagggtaaagaagggaactaagagcaggtctttcaagccacacccccacctgcggatggatgggtttctctgtaggccatgcaggcctttgtcgcagcaaaccttcccagcagcccttgagccaagtaaaaccagcacaaccagccaccagtggttggtgaggcagtgcccacaaggctcatgttgtatgcctttgataaggccatcttggctttgagtagcagtgttcctcgtcacccatttccccctcaggattacaacacctgctatcaaatcatctaagctgaaaacatgagatgcgcttggaaaggcctagtcagaagccatttcctcttatcatttccctctcctatgcaccagtaaggcccgtccagagccccagcagggagtgggccctgagtccacactgtccctgagtgatccaggaggctgcccacatccccacatgtgcactgtggttccagtgtagctgctgtgagcccactgccactgcctcagaagggagccactgtgaacctctcgagtggctccaaagagcagtggctttttgagaatggcccatacttctggcccggctggatgaagggaatgccgaccctttggcctctccccctccttccatctcttctctctcttgccctatctctctttctacttcagaaaaaaaaaaaaaaaaaaaaaaaagcctgtcattcactttttaacactttatcccaaataagatccctgtgtaattctgaagctggtgatccacttggaattgtagatagtttcaggaagctcctgcagggctgtccaccgttggtgtgtgcctcagtatttggacttccgaaactgaaagtgaaagtgtctttataggagagaaacgcatgctgctctttggctctttctgtccaacttttctagaaatgactcaaagtccattaagatttgtgaatattgtataaattagctatggaaagtagcaggtcagatggaaaattcttttccacagccctgctctccgcctccctccatcttaggagcgcctgcctcaattcctcgtcaactgctttgctccactccatcccacaggtgtgagtgggggaagtttttcattaggaatacagtctgcgtgacatggagaatggatggagggagctttgctactctgctcttggcatgactccaggatttttttctggaatccaacctctgtcctcttaggagaaggaacctgtccttggttcagatggctgggcatgaggaggaaaatttccattagtgtagaacagtgctggacagaatccggtttggaaaattacaaatccagttggtcaaaataggccatttcctatgtgtgacctattcgtggtatgccaactggactgcttcctaaacaggacgaggaaagtgaggaatatttttatatgaaagccttagcctgtctggcacccatgaaaaaaactatttatgcactcctactttcaccgtctttttgcattctctatttgtagcacaacagagttgaatgccacaaaacaccccgtttatagtgagctgttttcagtgaccaatatcagaaggaggcttgcttctggactagcctcactaattgccagcagccaccattttccatggaatggccttgggacagatgtcacctctgttatggggctctaataggaaagagaatgttttttcccttcctatgatcaatactgcaaattattgctgctcacagcttttataggattctcccaactgaaagttgcaggctttttctgtccctgtgcatcagtactaacaaaagacagcctcaccaagtctgtatatttgaacagaggcaagttaattcatccccccgtgtcagagccacaggcatgttgagggggttgatacgtagcactggaccagggcgcaaagcccagatagttccagccatgagaggagagcacaagaatgctctgcactctgcactcagcaccaccttgggtctgctttgcccagatgagggaccactaacaaccttctcagcacatgtgaatgtggactggttttaaaatgcattcattctgctaggattgggctggaagctggaacagtgagagtactttttctgctcctagtcatctccctttctcagcgtgacatcctcctgcagcaagcctagtatcactagcagtagttcctgcgactcttagcaacacaacccgaatatttgctccctgcatctgggtcctccaccaggatgggcctgcgcatctgcattgctgtacagacaaacaggccttttaatttacatcctcctttaattctcattaaaatcgcagggtttttgtttg

SEQ ID NO: 11823 - protein, 148 aa, Homo sapiens; identical to SEQ ID NO: 1959

SEQ ID NO: 11824 - DNA, 3271 bp, Homo sapiens
gccacctccgccgcgctctgtccggacggacgctcgccgcccgcagcctgccgcccgccgcagggcgctgacggtcccgcacgtctgccgctgccaccggcgcgcccgaaacttccagcactatgttgaataagagtggtgagagcagatatcctgccttgttcccggtcttagggggttcatccatgagctcggatttcccacattacaacttcaggatgcctaatattggattccagaatctgcctctcaacatatatattgtggtttttggtactgctatatttgtcttcatccttagtttactcttctgttgctacttgattaggctaagacatcaagcacacaaagaattttatgcctacaaacaggttatattaaaagagaaagtaaaagaattgaatttacatgagctctgtgcagtgtgcctagaagacttcaagcctcgagatgagttggggatttgcccatgtaagcacgccttccacagaaagtgccttattaagtggctggaggttcgtaaagtgtgtcccctgtgcaacatgccagttctacagctggcccagttgcacagtaagcaggaccgtggaccccctcaggggccccttcctggggcagagaacattgtatagcttaccgcaaggatcagactgttgctggacacgacgtctgtgtggagccaggaggaacacatgtggtgtctgtatggctgctctctacctaggacaccagctgccacttcttttgcctcatgaagaactcttgggccagccaaactgggaacctaggtgtctgggtcttgtgacaaccaaagcactttgacactaccccctgccgagagaagaggagtggatgagcctgcgggtttgcctcaagaaacttcatgagggtctcttactaactccattacactctctctcctggagcctcatctccatgtcaagcaggagggtaaagaagggaactaagagcaggtctttcaagccacacccccacctgcggatggatgggtttctctgtaggccatgcaggcctttgtcgcagcaaaccttcccagcagcccttgagccaagtaaaaccagcacaaccagccaccagtggttggtgaggcagtgcccacaaggctcatgttgtatgcctttgataaggccatcttggctttgagtagcagtgttcctcgtcacccatttccccctcaggattacaacacctgctatcaaatcatctaagctgaaaacatgagatgcgcttggaaaggcctagtcagaagccatttcctcttatcatttccctctcctatgcaccagtaaggcccgtccagagccccagcagggagtgggccctgagtccacactgtccctgagtgatccaggaggctgcccacatccccacatgtgcactgtggttccagtgtagctgctgtgagcccactgccactgcctcagaagggagccactgtgaacctctcgagtggctccaaagagcagtggctttttgagaatggcccatacttctggcccggctggatgaagggaatgccgaccctttggcctctccccctccttccatctcttctctctcttgccctatctctctttctacttcagaaaaaaaaaaaaaaaaaaaaaaaagcctgtcattcactttttaacactttatcccaaataagatccctgtgtaattctgaagctggtgatccacttggaattgtagatagtttcaggaagctcctgcagggctgtccaccgttggtgtgtgcctcagtatttggacttccgaaactgaaagtgaaagtgtctttataggagagaaacgcatgctgctctttggctctttctgtccaacttttctagaaatgactcaaagtccattaagatttgtgaatattgtataaattagctatggaaagtagcaggtcagatggaaaattcttttccacagccctgctctccgcctccctccatcttaggagcgcctgcctcaattcctcgtcaactgctttgctccactccatcccacaggtgtgagtgggggaagtttttcattaggaatacagtctgcgtgacatggagaatggatggagggagctttgctactctgctcttggcatgactccaggatttttttctggaatccaacctctgtcctcttaggagaaggaacctgtccttggttcagatggctgggcatgaggaggaaaatttccattagtgtagaacagtgctggacagaatccggtttggaaaattacaaatccagttggtcaaaataggccatttcctatgtgtgacctattcgtggtatgccaactggactgcttcctaaacaggacgaggaaagtgaggaatatttttatatgaaagccttagcctgtctggcacccatgaaaaaaactatttatgcactcctactttcaccgtctttttgcattctctatttgtagcacaacagagttgaatgccacaaaacaccccgtttatagtgagctgttttcagtgaccaatatcagaaggaggcttgcttctggactagcctcactaattgccagcagccaccattttccatggaatggccttgggacagatgtcacctctgttatggggctctaataggaaagagaatgttttttcccttcctatgatcaatactgcaaattattgctgctcacagcttttataggattctcccaactgaaagttgcaggctttttctgtccctgtgcatcagtactaacaaaagacagcctcaccaagtctgtatatttgaacagaggcaagttaattcatccccccgtgtcagagccacaggcatgttgagggggttgatacgtagcactggaccagggcgcaaagcccagatagttccagccatgagaggagagcacaagaatgctctgcactctgcactcagcaccaccttgggtctgctttgcccagatgagggaccactaacaaccttctcagcacatgtgaatgtggactggttttaaaatgcattcattctgctaggattgggctggaagctggaacagtgagagtactttttctgctcctagtcatctccctttctcagcgtgacatcctcctgcagcaagcctagtatcactagcagtagttcctgcgactcttagcaacacaacccgaatatttgctccctgcatctgggtcctccaccaggatgggcctgcgcatctgcattgctgtacagacaaacaggccttttaatttacatcctcctttaattctcattaaaatcgcagggtttttgtttg

SEQ ID NO: 11825 - protein, 169 aa, Homo sapiens; identical to SEQ ID NO: 11817

SEQ ID NO: 11826 - DNA, 3230 bp, Homo sapiens
gaggggccgccgggcgcagtcagccgccgccacctccgccgcgctctgtccggacggacgctcgccgcccgcagcctgccgcccgccgcagggcgctgacggtcccgcacgtctgccgctgccaccggcgcgcccgattcatccatgagctcggatttcccacattacaacttcaggatgcctaatattggattccagaatctgcctctcaacatatatattgtggtttttggtactgctatatttgtcttcatccttagtttactcttctgttgctacttgattaggctaagacatcaagcacacaaagaattttatgcctacaaacaggttatattaaaagagaaagtaaaagaattgaatttacatgagctctgtgcagtgtgcctagaagacttcaagcctcgagatgagttggggatttgcccatgtaagcacgccttccacagaaagtgccttattaagtggctggaggttcgtaaagtgtgtcccctgtgcaacatgccagttctacagctggcccagttgcacagtaagcaggaccgtggaccccctcaggggccccttcctggggcagagaacattgtatagcttaccgcaaggatcagactgttgctggacacgacgtctgtgtggagccaggaggaacacatgtggtgtctgtatggctgctctctacctaggacaccagctgccacttcttttgcctcatgaagaactcttgggccagccaaactgggaacctaggtgtctgggtcttgtgacaaccaaagcactttgacactaccccctgccgagagaagaggagtggatgagcctgcgggtttgcctcaagaaacttcatgagggtctcttactaactccattacactctctctcctggagcctcatctccatgtcaagcaggagggtaaagaagggaactaagagcaggtctttcaagccacacccccacctgcggatggatgggtttctctgtaggccatgcaggcctttgtcgcagcaaaccttcccagcagcccttgagccaagtaaaaccagcacaaccagccaccagtggttggtgaggcagtgcccacaaggctcatgttgtatgcctttgataaggccatcttggctttgagtagcagtgttcctcgtcacccatttccccctcaggattacaacacctgctatcaaatcatctaagctgaaaacatgagatgcgcttggaaaggcctagtcagaagccatttcctcttatcatttccctctcctatgcaccagtaaggcccgtccagagccccagcagggagtgggccctgagtccacactgtccctgagtgatccaggaggctgcccacatccccacatgtgcactgtggttccagtgtagctgctgtgagcccactgccactgcctcagaagggagccactgtgaacctctcgagtggctccaaagagcagtggctttttgagaatggcccatacttctggcccggctggatgaagggaatgccgaccctttggcctctccccctccttccatctcttctctctcttgccctatctctctttctacttcagaaaaaaaaaaaaaaaaaaaaaaaagcctgtcattcactttttaacactttatcccaaataagatccctgtgtaattctgaagctggtgatccacttggaattgtagatagtttcaggaagctcctgcagggctgtccaccgttggtgtgtgcctcagtatttggacttccgaaactgaaagtgaaagtgtctttataggagagaaacgcatgctgctctttggctctttctgtccaacttttctagaaatgactcaaagtccattaagatttgtgaatattgtataaattagctatggaaagtagcaggtcagatggaaaattcttttccacagccctgctctccgcctccctccatcttaggagcgcctgcctcaattcctcgtcaactgctttgctccactccatcccacaggtgtgagtgggggaagtttttcattaggaatacagtctgcgtgacatggagaatggatggagggagctttgctactctgctcttggcatgactccaggatttttttctggaatccaacctctgtcctcttaggagaaggaacctgtccttggttcagatggctgggcatgaggaggaaaatttccattagtgtagaacagtgctggacagaatccggtttggaaaattacaaatccagttggtcaaaataggccatttcctatgtgtgacctattcgtggtatgccaactggactgcttcctaaacaggacgaggaaagtgaggaatatttttatatgaaagccttagcctgtctggcacccatgaaaaaaactatttatgcactcctactttcaccgtctttttgcattctctatttgtagcacaacagagttgaatgccacaaaacaccccgtttatagtgagctgttttcagtgaccaatatcagaaggaggcttgcttctggactagcctcactaattgccagcagccaccattttccatggaatggccttgggacagatgtcacctctgttatggggctctaataggaaagagaatgttttttcccttcctatgatcaatactgcaaattattgctgctcacagcttttataggattctcccaactgaaagttgcaggctttttctgtccctgtgcatcagtactaacaaaagacagcctcaccaagtctgtatatttgaacagaggcaagttaattcatccccccgtgtcagagccacaggcatgttgagggggttgatacgtagcactggaccagggcgcaaagcccagatagttccagccatgagaggagagcacaagaatgctctgcactctgcactcagcaccaccttgggtctgctttgcccagatgagggaccactaacaaccttctcagcacatgtgaatgtggactggttttaaaatgcattcattctgctaggattgggctggaagctggaacagtgagagtactttttctgctcctagtcatctccctttctcagcgtgacatcctcctgcagcaagcctagtatcactagcagtagttcctgcgactcttagcaacacaacccgaatatttgctccctgcatctgggtcctccaccaggatgggcctgcgcatctgcattgctgtacagacaaacaggccttttaatttacatcctcctttaattctcattaaaatcgcagggtttttgtttg

SEQ ID NO: 11827 - protein, 148 aa, Homo sapiens; identical to SEQ ID NO: 1959

SEQ ID NO: 11828 - DNA, 1566 bp, Homo sapiens
gaggggccgccgggcgcagtcagccgccgccacctccgccgcgctctgtccggacggacgctcgccgcccgcagcctgccgcccgccgcagggcgctgacggtcccgcacgtctgccgctgccaccggcgcgcccgattcatccatgagctcggatttcccacattacaacttcaggatgcctaatattggattccagaatctgcctctcaacatatatattgtggtttttggtactgctatatttgtcttcatccttagtttactcttctgttgctacttgattaggctaagacatcaagcacacaaagaattttatgcctacaaacaggttatattaaaagagaaagtaaaagaattgaatttacatgagctctgtgcagtgtgcctagaagacttcaagcctcgagatgagttggggatttgcccatgtaagcacgccttccacagaaagtgccttattaagtggctggaggttcgtaaagtgtgtcccctgtgcaacatgccagttctacagctggcccagttgcacagtaagcaggaccgtggaccccctcaggggccccttcctggggcagagaacattgtatagcttaccgcaaggatcagactgttgctggacacgacgtctgtgtggagccaggaggaacacatgtggtgtctgtatggctgctctctacctaggacaccagctgccacttcttttgcctcatgaagaactcttgggccagccaaactgggaacctaggtgtctgggtcttgtgacaaccaaagcactttgacactaccccctgccgagagaagaggagtggatgagcctgcgggtttgcctcaagaaacttcatgagggtctcttactaactccattacactctctctcctggagcctcatctccatgtcaagcaggagggtaaagaagggaactaagagcaggtctttcaagccacacccccacctgcggatggatgggtttctctgtaggccatgcaggcctttgtcgcagcaaaccttcccagcagcccttgagccaagtaaaaccagcacaaccagccaccagtggttggtgaggcagtgcccacaaggctcatgttgtatgcctttgataaggccatcttggctttgagtagcagtgttcctcgtcacccatttccccctcaggattacaacacctgctatcaaatcatctaagctgaaaacatgagatgcgcttggaaaggcctagtcagaagccatttcctcttatcatttccctctcctatgcaccagtaaggcccgtccagagccccagcagggagtgggccctgagtccacactgtccctgagtgatccaggaggctgcccacatccccacatgtgcactgtggttccagtgtagctgctgtgagcccactgccactgcctcagaagggagccactgtgaacctctcgagtggctccaaagagcagtggctttttgagaatggcccatacttctggcccggctggatgaagggaatgccgaccctttggcctctccccctccttccatctcttctctctcttgccctatctctctttctacttcag

SEQ ID NO: 11829 - protein, 148 aa, Homo sapiens; identical to SEQ ID NO: 1959

SEQ ID NO: 11830 - DNA, 607 bp, Homo sapiens
tgaggtcaggagttcaagaccagcctggccaacaagtgaaacaccatctctactaaaaatacaaaaattagttgggtgtggtggcacacgcctgtacctcccgagtagctgggactacaggcgcacgccaccacgcccagctaaattttgtatttttagtagagatggggtttcaccatgttggccaggatgttctagatctcttgatcttgtgatccgcctgcctcagcctcccaaagtgctgggattacaggcatgagccaccgcgcctggccaatttttaaaatttaatcatgaggtaaggagctttcctttgtgatgatcctaatttgttacctttaacacttcaaatggtaaattgggatttaacaagtctttgcagttaatctagagatctgtggagtcagctcctccagaattaccctagctcattttttatgataacctaagctctccagcaccttcccaggaggttcttctgttctccagagagctccctccagtcaccaccactggactcatcagaaccataggaagactataacttaggtctaaacaagacagtcactaccaaccacagtcttacacaggattgtagtatagaatg

SEQ ID NO: 11831 - protein, 85 aa, Homo sapiens
EVRSSRPAWPTSETPSLLKIQKLVGCGGTRLYLPSSWDYRRTPPRPAKFCIFSRDGVSPCWPGCSRSLDLVIRLPQPPKVLGLQA

SEQ ID NO: 11832 - DNA, 468 bp, Homo sapiens
acggagtcttgctcagttgcccaggatgcagtggcgggatctcggctcactgcaagctccgcctcccgggctcacgccattctcctgcctcagcctcctgagcagctgggactacagttgcccgccactatgcccggctaattttgtttgtatttttagtagaaatggggtttcaccgtgttagccaggatggtctcggtctcctgacctcgtgatctgcccgtctcggcctcccaaagtgctgggattacaggcgtgagccactgctcccagcctgttgttgcttctttaatggatcacaaatgctagctttcatatggatttcaagctgggtgaaatgactttttttgcttgtaaagaagaaatgatgatggaggtctcatcaggaagtgatgcagaagactgggacagcatatctcaaaaatcaagatgaatccttaagctttctacccagatgttgtgggaact

SEQ ID NO: 11833 - protein, 38 aa, Homo sapiens
MDFKLGEMTFFACKEEMMMEVSSGSDAEDWDSISQKSR

SEQ ID NO: 11834 - DNA, 600 bp, Homo sapiens
gagagcttcaaggaagatataacacagatttgagtccaaaatatatttttacaggagaatactgaatggaatatttattgttaagcatctgagacagctttgtttctggattatccccagcagggattacagaaagcttatgagatttgtatattaaatcatcacaaaaattttttcagtatgtataaggagatgtatttcttaatagaagggaaaccagtaggaaataataattaaacatgatccttcactcatgatgtatggtggttccaatatccttctgccactcaaggaatatctgactggtaagggaagaatacctcaagcgagcatgcgtacagctccagtaaacacactgcggatgctcccctcccaagggcttgcaggccactgcacatgtacacagcctaccccacggaagaatcaggggagaaggaccacaagactccggaaacatgccaacatataaaacttcaaatcaaaaggtcaaaccaaggacttgatctctcaggtcactctcttggccctcttgcaagtgtactttacttcctttcattcctgctctaaagctttttaataaactttacattgaactttaga

SEQ ID NO: 11835 - protein, 71 aa, Homo sapiens
MMYGGSNILLPLKEYLTGKGRIPQASMRTAPVNTLRMLPSQGLAGHCTCTQPTPRKNQGRRTTRLRKHANI

SEQ ID NO: 11836 - DNA, 957 bp, Homo sapiens
acagatttccttgttcccttgctgagctctgtcttaactgtggcttggatctgttgcttggtgacggccttctactggtgcctgcggaagcggcggaagccgggcagccacacacactcagcctctgaggacaacaccaccaacaacgtgcgggagcagctgaaccagatcaaaaaccccattgagaaacatggggccaacacggtccccatcaaggattatgagaacaagaactccaaaatgtctaaaataaggacacacaattctgaagtagaagaggacgacatggacaaacaccagcagaaagcccggtttgccaagcagccggcgtacacgctggtagacagagaagagaagccccccaacggcacgccgacaaaacacccaaactggacaaacaaacaggacaacagagacttggaaagtgcccagagcttaaaccgaatggagtacatcgtatagcagaccgcgggcactgccgccgctaggtagagtctgagggcttgtagttctttaaactgtcgtgtcatactcgagtctgaggccgttgctgacttagaatccctgtgttaatttaagttttgacaagctggcttacactggcaatggtagtttctgtggttggctgggaaatcgagtgccgcatctcacagctatgcaaaaagctagtcaacagtaccctggttgtgtgtccccttgcagccgacacggtctcggatcaggctcccaggagcctgcccagccccctggtctttgagctcccactttctgcctgacagagggatggaggaagaactgaaaggcttttcaaccacaaaactcatctggagttctcaaagacctggggctgctgtgaagctggaactgcgggagccccatctaggggagccttgattcccttgttattcaacagcaagtgtgaatactgcttgaataaacaccactggattaatggcc

SEQ ID NO: 11837 - protein, 56 aa, Homo sapiens
MVVSVVGWEIECRISQLCKKLVNSTLVVCPLAADTVSDQAPRSLPSPLVFELPLSA

SEQ ID NO: 11838 - DNA, 2366 bp, Homo sapiens
atcgatcttgttagtaaacgtgatggaaacagctcgctgattgctgccgttgcagaagtaagagttcagaggcggcctctgaagaacagaacagatttccttgttcccttgctgagctctgtcttaactgtggcttggatctgttgcttggtgacggccttctactggtgcctgcggaagcggcggaagccgggcagccacacacactcagcctctgaggacaacaccaccaacaacgtgcgggagcagctgaaccagatcaaaaaccccattgagaaacatggggccaacacggtccccatcaaggattatgagaacaagaactccaaaatgtctaaaataaggacacacaattctgaagtagaagaggacgacatggacaaacaccagcagaaagcccggtttgccaagcagccggcgtacacgctggtagacagagaagagaagccccccaacggcacgccgacaaaacacccaaactggacaaacaaacaggacaacagagacttggaaagtgcccagagcttaaaccgaatggagtacatcgtatagcagaccgcgggcactgccgccgctaggtagagtctgagggcttgtagttctttaaactgtcgtgtcatactcgagtctgaggccgttgctgacttagaatccctgtgttaatttaagttttgacaagctggcttacactggcaatggtagtttctgtggttggctgggaaatcgagtgccgcatctcacagctatgcaaaaagctagtcaacagtaccctggttgtgtgtccccttgcagccgacacggtctcggatcaggctcccaggagcctgcccagccccctggtctttgagctcccacttctgccagatgtcctaatggtgatgcagtcttagatcatagttttatttatatttattgactcttgagttgtttttgtatattggttttatgatgacgtacaagtagttctgtatttgaaagtgcctttgcagctcagaaccacagcaacgatcacaaatgactttattatttattttttttaattgtatttttgttgttgggggaggggagactttgatgtcagcagttgctggtaaaatgaagaatttaaagaaaaaaatgtcaaaagtagaactttgtatagttatgtaaataattcttttttattaatcactgtgtatatttgatttattaacttaataatcaagagccttaaaacatcattcctttttatttatatgtatgtgtttagaattgaaggtttttgatagcattgtaagcgtatggctttatttttttgaactcttctcattacttgttgcctataagccaaaattaaggtgtttgaaaatagtttattttaaaacaataggatgggcttctgtgcccagaatactgatggaatttttttgtacgacgtcagatgtttaaaacaccttctatagcatcacttaaaacacgttttaaggactgactgaggcagtttgaggattagtttagaacaggtttttttgtttgtttgttttttgtttttctgctttagacttgaaaagagacaggcaggtgatctgctgcagagcagtaagggaacaagttgagctatgacttaacatagccaaaatgtgagtggttgaatatgattaaaaatatcaaattaattgtgtgaacttggaagcacaccaatcttactttgtaaattctgatttcttttcaccattcgtacataatactgaaccacttgtagatttgatttttttttttaatctactgcatttagggagtattctaataagctagttgaatacttgaaccataaaatgtccagtaagatcactgtttagatttgccatagagtacactgcctgccttaagtgaggaaatcaaagtgctattacgaagttcaagatcaaaaaggcttataaaacagagtaatcttgttggttcaccattgagaccgtgaagatactttgtattgtcctattagtgttatatgaacatacaaatgcatctttgatgtgttgttcttggcaataaattttgaaaagtaatatttattaaatttttttgtatgaaaacatggaacagtgtggcctcttctgagcttacgtagttctaccggctttgccatgtgcttctgccaccctgctgagtctgttctggtaatcggggtataataggctctgcctgacagagggatggaggaagaactgaaaggcttttcaaccacaaaactcatctggagttctcaaagacctggggctgctgtgaagctggaactgcgggagccccatctaggggagccttgattcccttgttattcaacagcaagtgtgaatactgcttgaataaacaccactggattaatggcc

SEQ ID NO: 11839 - protein, 73 aa, Homo sapiens [sequence omitted]

SEQ ID NO: 11840 - DNA, 1749 bp, Homo sapiens
atggagacaactggtaccggtgcgaatgtgccccgggttttgctgggcccgactgcagaataaacatcaatgaatgccagtcttcaccttgtgcctttggagcgacctgtgtggatgagatcaatggctaccggtgtgtctgccctccagggcacagtggtgccaagtgccaggaagtttcagggagaccttgcatcaccatggagcctgcccagccccctggtctttgagctcccacttctgccagatgtcctaatggtgatgcagtcttagatcatagttttatttatatttattgactcttgagttgtttttgtatattggttttatgatgacgtacaagtagttctgtatttgaaagtgcctttgcagctcagaaccacagcaacgatcacaaatgactttattatttattttttttaattgtatttttgttgttgggggaggggagactttgatgtcagcagttgctggtaaaatgaagaatttaaagaaaaaaatgtcaaaagtagaactttgtatagttatgtaaataattcttttttattaatcactgtgtatatttgatttattaacttaataatcaagagccttaaaacatcattcctttttatttatatgtatgtgtttagaattgaaggtttttgatagcattgtaagcgtatggctttatttttttgaactcttctcattacttgttgcctataagccaaaattaaggtgtttgaaaatagtttattttaaaacaataggatgggcttctgtgcccagaatactgatggaatttttttgtacgacgtcagatgtttaaaacaccttctatagcatcacttaaaacacgttttaaggactgactgaggcagtttgaggattagtttagaacaggtttttttgtttgtttgttttttgtttttctgctttagacttgaaaagagacaggcaggtgatctgctgcagagcagtaagggaacaagttgagctatgacttaacatagccaaaatgtgagtggttgaatatgattaaaaatatcaaattaattgtgtgaacttggaagcacaccaatcttactttgtaaattctgatttcttttcaccattcgtacataatactgaaccacttgtagatttgatttttttttttaatctactgcatttagggagtattctaataagctagttgaatacttgaaccataaaatgtccagtaagatcactgtttagatttgccatagagtacactgcctgccttaagtgaggaaatcaaagtgctattacgaagttcaagatcaaaaaggcttataaaacagagtaatcttgttggttcaccattgagaccgtgaagatactttgtattgtcctattagtgttatatgaacatacaaatgcatctttgatgtgttgttcttggcaataaattttgaaaagtaatatttattaaatttttttgtatgaaaacatggaacagtgtggcctcttctgagcttacgtagttctaccggctttgccatgtgcttctgccaccctgctgagtctgttctggtaatcggggtataataggctctgcctgacagagggatggaggaagaactgaaaggcttttcaaccacaaaactcatctggagttctcaaagacctggggctgctgtgaagctggaactgcgggagccccatctaggggagccttgattcccttgttattcaacagcaagtgtgaatactgcttgaataaacaccactggattaatggcc

SEQ ID NO: 11841 - protein, 67 aa, Homo sapiens
MNASLHLVPLERPVWMRSMATGVSALQGTVVPSARKFQGDLASPWSLPSPLVFELPLLPDVLMVMQS

SEQ ID NO: 11842 - DNA, 6048 bp, Homo sapiens
gggaggggcgtgcccagggtgagcacgccctctcatgaatattaataagcgcgcatgcgccctgcccggcgtgctgggtagaggtggccagccccggccgctgctgccagacgggctctccgggtccttctccgagagccgggcgggcacgcgtcattgtgttacctgcggccggcccgcgagctaggctggtttttttttttctcccctccctcccccctttttccatgcagctgatctaaaagggaataaaaggctgcgcataatcataataataaaagaaggggagcgcgagagaaggaaagaaagccgggaggtggaagaggagggggagcgtctcaaagaagcgatcagaataataaaaggaggccgggctctttgccttctggaacgggccgctcttgaaagggcttttgaaaagtggtgttgttttccagtcgtgcatgctccaatcggcggagtatattagagccgggacgcggcggccgcaggggcagcggcgacggcagcaccggcggcagcaccagcgcgaacagcagcggcggcgtcccgagtgcccgcggcgcgcggcgcagcgatgcgttccccacggacgcgcggccggtccgggcgccccctaagcctcctgctcgccctgctctgtgccctgcgagccaaggtgtgtggggcctcgggtcagttcgagttggagatcctgtccatgcagaacgtgaacggggagctgcagaacgggaactgctgcggcggcgcccggaacccgggagaccgcaagtgcacccgcgacgagtgtgacacatacttcaaagtgtgcctcaaggagtatcagtcccgcgtcacggccggggggccctgcagcttcggctcagggtccacgcctgtcatcgggggcaacaccttcaacctcaaggccagccgcggcaacgaccgcaaccgcatcgtgctgcctttcagtttcgcctggccgaggtcctatacgttgcttgtggaggcgtgggattccagtaatgacaccgttcaacctgacagtattattgaaaaggcttctcactcgggcatgatcaaccccagccggcagtggcagacgctgaagcagaacacgggcgttgcccactttgagtatcagatccgcgtgacctgtgatgactactactatggctttggctgcaataagttctgccgccccagagatgacttctttggacactatgcctgtgaccagaatggcaacaaaacttgcatggaaggctggatgggccccgaatgtaacagagctatttgccgacaaggctgcagtcctaagcatgggtcttgcaaactcccaggtgactgcaggtgccagtacggctggcaaggcctgtactgtgataagtgcatcccacacccgggatgcgtccacggcatctgtaatgagccctggcagtgcctctgtgagaccaactggggcggccagctctgtgacaaagatctcaattactgtgggactcatcagccgtgtctcaacgggggaacttgtagcaacacaggccctgacaaatatcagtgttcctgccctgaggggtattcaggacccaactgtgaaattgctgagcacgcctgcctctctgatccctgtcacaacagaggcagctgtaaggagacctccctgggctttgagtgtgagtgttccccaggctggaccggccccacatgctctacaaacattgatgactgttctcctaataactgttcccacgggggcacctgccaggacctggttaacggatttaagtgtgtgtgccccccacagtggactgggaaaacgtgccagttagatgcaaatgaatgtgaggccaaaccttgtgtaaacgccaaatcctgtaagaatctcattgccagctactactgcgactgtcttcccggctggatgggtcagaattgtgacataaatattaatgactgccttggccagtgtcagaatgacgcctcctgtcgggatttggttaatggttatcgctgtatctgtccacctggctatgcaggcgatcactgtgagagagacatcgatgaatgtgccagcaacccctgtttgaatgggggtcactgtcagaatgaaatcaacagattccagtgtctgtgtcccactggtttctctggaaacctctgtcagctggacatcgattattgtgagcctaatccctgccagaacggtgcccagtgctacaaccgtgccagtgactatttctgcaagtgccccgaggactatgagggcaagaactgctcacacctgaaagaccactgccgcacgaccccctgtgaagtgattgacagctgcacagtggccatggcttccaacgacacacctgaaggggtgcggtatatttcctccaacgtctgtggtcctcacgggaagtgcaagagtcagtcgggaggcaaattcacctgtgactgtaacaaaggcttcacgggaacatactgccatgaaaatattaatgactgtgagagcaacccttgtagaaacggtggcacttgcatcgatggtgtcaactcctacaagtgcatctgtagtgacggctgggagggggcctactgtgaaaccaatattaatgactgcagccagaacccctgccacaatgggggcacgtgtcgcgacctggtcaatgacttctactgtgactgtaaaaatgggtggaaaggaaagacctgccactcacgtgacagtcagtgtgatgaggccacgtgcaacaacggtggcacctgctatgatgagggggatgcttttaagtgcatgtgtcctggcggctgggaaggaacaacctgtaacatagcccgaaacagtagctgcctgcccaacccctgccataatgggggcacatgtgtggtcaacggcgagtcctttacgtgcgtctgcaaggaaggctgggaggggcccatctgtgctcagaataccaatgactgcagccctcatccctgttacaacagcggcacctgtgtggatggagacaactggtaccggtgcgaatgtgccccgggttttgctgggcccgactgcagaataaacatcaatgaatgccagtcttcaccttgtgcctttggagcgacctgtgtggatgagatcaatggctaccggtgtgtctgccctccagggcacagtggtgccaagtgccaggaagtttcagggagaccttgcatcaccatggggagtgtgataccagatggggccaaatgggatgatgactgtaatacctgccagtgcctgaatggacggatcgcctgctcaaaggtctggtgtggccctcgaccttgcctgctccacaaagggcacagcgagtgccccagcgggcagagctgcatccccatcctggacgaccagtgcttcgtccacccctgcactggtgtgggcgagtgtcggtcttccagtctccagccggtgaagacaaagtgcacctctgactcctattaccaggataactgtgcgaacatcacatttacctttaacaaggagatgatgtcaccaggtcttactacggagcacatttgcagtgaattgaggaatttgaatattttgaagaatgtttccgctgaatattcaatctacatcgcttgcgagccttccccttcagcgaacaatgaaatacatgtggccatttctgctgaagatatacgggatgatgggaacccgatcaaggaaatcactgacaaaataatcgatcttgttagtaaacgtgatggaaacagctcgctgattgctgccgttgcagaagtaagagttcagaggcggcctctgaagaacagaacagatttccttgttcccttgctgagctctgtcttaactgtggcttggatctgttgcttggtgacggccttctactggtgcctgcggaagcggcggaagccgggcagccacacacactcagcctctgaggacaacaccaccaacaacgtgcgggagcagctgaaccagatcaaaaaccccattgagaaacatggggccaacacggtccccatcaaggattatgagaacaagaactccaaaatgtctaaaataaggacacacaattctgaagtagaagaggacgacatggacaaacaccagcagaaagcccggtttgccaagcagccggcgtacacgctggtagacagagaagagaagccccccaacggcacgccgacaaaacacccaaactggacaaacaaacaggacaacagagacttggaaagtgcccagagcttaaaccgaatggagtacatcgtatagcagaccgcgggcactgccgccgctaggtagagtctgagggcttgtagttctttaaactgtcgtgtcatactcgagtctgaggccgttgctgacttagaatccctgtgttaatttaagttttgacaagctggcttacactggcaatggtagtttctgtggttggctgggaaatcgagtgccgcatctcacagctatgcaaaaagctagtcaacagtaccctggttgtgtgtccccttgcagccgacacggtctcggatcaggctcccaggagcctgcccagccccctggtctttgagctcccacttctgccagatgtcctaatggtgatgcagtcttagatcatagttttatttatatttattgactcttgagttgtttttgtatattggttttatgatgacgtacaagtagttctgtatttgaaagtgcctttgcagctcagaaccacagcaacgatcacaaatgactttattatttattttttttaattgtatttttgttgttgggggaggggagactttgatgtcagcagttgctggtaaaatgaagaatttaaagaaaaaaatgtcaaaagtagaactttgtatagttatgtaaataattcttttttattaatcactgtgtatatttgatttattaacttaataatcaagagccttaaaacatcattcctttttatttatatgtatgtgtttagaattgaaggtttttgatagcattgtaagcgtatggctttatttttttgaactcttctcattacttgttgcctataagccaaaattaaggtgtttgaaaatagtttattttaaaacaataggatgggcttctgtgcccagaatactgatggaatttttttgtacgacgtcagatgtttaaaacaccttctatagcatcacttaaaacacgttttaaggactgactgaggcagtttgaggattagtttagaacaggtttttttgtttgtttgttttttgtttttctgctttagacttgaaaagagacaggcaggtgatctgctgcagagcagtaagggaacaagttgagctatgacttaacatagccaaaatgtgagtggttgaatatgattaaaaatatcaaattaattgtgtgaacttggaagcacaccaatcttactttgtaaattctgatttcttttcaccattcgtacataatactgaaccacttgtagatttgatttttttttttaatctactgcatttagggagtattctaataagctagttgaatacttgaaccataaaatgtccagtaagatcactgtttagatttgccatagagtacactgcctgccttaagtgaggaaatcaaagtgctattacgaagttcaagatcaaaaaggcttataaaacagagtaatcttgttggttcaccattgagaccgtgaagatactttgtattgtcctattagtgttatatgaacatacaaatgcatctttgatgtgttgttcttggcaataaattttgaaaagtaatatttattaaatttttttgtatgaaaacatggaacagtgtggcctcttctgagcttacgtagttctaccggctttgccatgtgcttctgccaccctgctgagtctgttctggtaatcggggtataataggctctgcctgacagagggatggaggaagaactgaaaggcttttcaaccacaaaactcatctggagttctcaaagacctggggctgctgtgaagctggaactgcgggagccccatctaggggagccttgattcccttgttattcaacagcaagtgtgaatactgcttgaataaacaccactggattaatggcc

SEQ ID NO: 11843 - protein, 1218 aa, Homo sapiens; identical to SEQ ID NO: 1961

SEQ ID NO: 11844 - DNA, 2077 bp, Homo sapiens
atcgatcttgttagtaaacgtgatggaaacagctcgctgattgctgccgttgcagaagtaagagttcagaggcggcctctgaagaacagaacagatttccttgttcccttgctgagctctgtcttaactgtggcttggatctgttgcttggtgacggccttctactggtgcctgcggaagcggcggaagccgggcagccacacacactcagcctctgaggacaacaccaccaacaacgtgcgggagcagctgaaccagatcaaaaaccccattgagaaacatggggccaacacggtccccatcaaggattatgagaacaagaactccaaaatgtctaaaataaggacacacaattctgaagtagaagaggacgacatggacaaacaccagcagaaagcccggtttgccaagcagccggcgtacacgctggtagacagagaagagaagccccccaacggcacgccgacaaaacacccaaactggacaaacaaacaggacaacagagacttggaaagtgcccagagcttaaaccgaatggagtacatcgtatagcagaccgcgggcactgccgccgctaggtagagtctgagggcttgtagttctttaaactgtcgtgtcatactcgagtctgaggccgttgctgacttagaatccctgtgttaatttaagttttgacaagctggcttacactggcaatggtagtttctgtggttggctgggaaatcgagtgccgcatctcacagctatgcaaaaagctagtcaacagtaccctggttgtgtgtccccttgcagccgacacggtctcggatcaggctcccaggagcctgcccagccccctggtctttgagctcccacttctgccagatgtcctaatggtgatgcagtcttagatcatagttttatttatatttattgactcttgagttgtttttgtatattggttttatgatgacgtacaagtagttctgtatttgaaagtgcctttgcagctcagaaccacagcaacgatcacaaatgactttattatttattttttttaattgtatttttgttgttgggggaggggagactttgatgtcagcagttgctggtaaaatgaagaatttaaagaaaaaaatgtcaaaagtagaactttgtatagttatgtaaataattcttttttattaatcactgtgtatatttgatttattaacttaataatcaagagccttaaaacatcattcctttttatttatatgtatgtgtttagaattgaaggtttttgatagcattgtaagcgtatggctttatttttttgaactcttctcattacttgttgcctataagccaaaattaaggtgtttgaaaatagtttattttaaaacaataggatgggcttctgtgcccagaatactgatggaatttttttgtacgacgtcagatgtttaaaacaccttctatagcatcacttaaaacacgttttaaggactgactgaggcagtttgaggattagtttagaacaggtttttttgtttgtttgttttttgtttttctgctttagacttgaaaagagacaggcaggtgatctgctgcagagcagtaagggaacaagttgagctatgacttaacatagccaaaatgtgagtggttgaatatgattaaaaatatcaaattaattgtgtgaacttggaagcacaccaatcttactttgtaaattctgatttcttttcaccattcgtacataatactgaaccacttgtagatttgatttttttttttaatctactgcatttagggagtattctaataagctagttgaatacttgaaccataaaatgtccagtaagatcactgtttagatttgccatagagtacactgcctgccttaagtgaggaaatcaaagtgctattacgaagttcaagatcaaaaaggcttataaaacagagtaatcttgttggttcaccattgagaccgtgaagatactttgtattgtcctattagtgttatatgaacatacaaatgcatctttgatgtgttgttcttggcaataaattttgaaaagtaatatttattaaatttttttgtatgaaaacatgg

SEQ ID NO: 11845 - protein, 73 aa, Homo sapiens [sequence omitted]

SEQ ID NO: 11846 - DNA, 1460 bp, Homo sapiens
atggagacaactggtaccggtgcgaatgtgccccgggttttgctgggcccgactgcagaataaacatcaatgaatgccagtcttcaccttgtgcctttggagcgacctgtgtggatgagatcaatggctaccggtgtgtctgccctccagggcacagtggtgccaagtgccaggaagtttcagggagaccttgcatcaccatggagcctgcccagccccctggtctttgagctcccacttctgccagatgtcctaatggtgatgcagtcttagatcatagttttatttatatttattgactcttgagttgtttttgtatattggttttatgatgacgtacaagtagttctgtatttgaaagtgcctttgcagctcagaaccacagcaacgatcacaaatgactttattatttattttttttaattgtatttttgttgttgggggaggggagactttgatgtcagcagttgctggtaaaatgaagaatttaaagaaaaaaatgtcaaaagtagaactttgtatagttatgtaaataattcttttttattaatcactgtgtatatttgatttattaacttaataatcaagagccttaaaacatcattcctttttatttatatgtatgtgtttagaattgaaggtttttgatagcattgtaagcgtatggctttatttttttgaactcttctcattacttgttgcctataagccaaaattaaggtgtttgaaaatagtttattttaaaacaataggatgggcttctgtgcccagaatactgatggaatttttttgtacgacgtcagatgtttaaaacaccttctatagcatcacttaaaacacgttttaaggactgactgaggcagtttgaggattagtttagaacaggtttttttgtttgtttgttttttgtttttctgctttagacttgaaaagagacaggcaggtgatctgctgcagagcagtaagggaacaagttgagctatgacttaacatagccaaaatgtgagtggttgaatatgattaaaaatatcaaattaattgtgtgaacttggaagcacaccaatcttactttgtaaattctgatttcttttcaccattcgtacataatactgaaccacttgtagatttgatttttttttttaatctactgcatttagggagtattctaataagctagttgaatacttgaaccataaaatgtccagtaagatcactgtttagatttgccatagagtacactgcctgccttaagtgaggaaatcaaagtgctattacgaagttcaagatcaaaaaggcttataaaacagagtaatcttgttggttcaccattgagaccgtgaagatactttgtattgtcctattagtgttatatgaacatacaaatgcatctttgatgtgttgttcttggcaataaattttgaaaagtaatatttattaaatttttttgtatgaaaacatgg

SEQ ID NO: 11847 - protein, 67 aa, Homo sapiens; identical to SEQ ID NO: 11841

SEQ ID NO: 11848 - DNA, 5759 bp, Homo sapiens
gggaggggcgtgcccagggtgagcacgccctctcatgaatattaataagcgcgcatgcgccctgcccggcgtgctgggtagaggtggccagccccggccgctgctgccagacgggctctccgggtccttctccgagagccgggcgggcacgcgtcattgtgttacctgcggccggcccgcgagctaggctggtttttttttttctcccctccctcccccctttttccatgcagctgatctaaaagggaataaaaggctgcgcataatcataataataaaagaaggggagcgcgagagaaggaaagaaagccgggaggtggaagaggagggggagcgtctcaaagaagcgatcagaataataaaaggaggccgggctctttgccttctggaacgggccgctcttgaaagggcttttgaaaagtggtgttgttttccagtcgtgcatgctccaatcggcggagtatattagagccgggacgcggcggccgcaggggcagcggcgacggcagcaccggcggcagcaccagcgcgaacagcagcggcggcgtcccgagtgcccgcggcgcgcggcgcagcgatgcgttccccacggacgcgcggccggtccgggcgccccctaagcctcctgctcgccctgctctgtgccctgcgagccaaggtgtgtggggcctcgggtcagttcgagttggagatcctgtccatgcagaacgtgaacggggagctgcagaacgggaactgctgcggcggcgcccggaacccgggagaccgcaagtgcacccgcgacgagtgtgacacatacttcaaagtgtgcctcaaggagtatcagtcccgcgtcacggccggggggccctgcagcttcggctcagggtccacgcctgtcatcgggggcaacaccttcaacctcaaggccagccgcggcaacgaccgcaaccgcatcgtgctgcctttcagtttcgcctggccgaggtcctatacgttgcttgtggaggcgtgggattccagtaatgacaccgttcaacctgacagtattattgaaaaggcttctcactcgggcatgatcaaccccagccggcagtggcagacgctgaagcagaacacgggcgttgcccactttgagtatcagatccgcgtgacctgtgatgactactactatggctttggctgcaataagttctgccgccccagagatgacttctttggacactatgcctgtgaccagaatggcaacaaaacttgcatggaaggctggatgggccccgaatgtaacagagctatttgccgacaaggctgcagtcctaagcatgggtcttgcaaactcccaggtgactgcaggtgccagtacggctggcaaggcctgtactgtgataagtgcatcccacacccgggatgcgtccacggcatctgtaatgagccctggcagtgcctctgtgagaccaactggggcggccagctctgtgacaaagatctcaattactgtgggactcatcagccgtgtctcaacgggggaacttgtagcaacacaggccctgacaaatatcagtgttcctgccctgaggggtattcaggacccaactgtgaaattgctgagcacgcctgcctctctgatccctgtcacaacagaggcagctgtaaggagacctccctgggctttgagtgtgagtgttccccaggctggaccggccccacatgctctacaaacattgatgactgttctcctaataactgttcccacgggggcacctgccaggacctggttaacggatttaagtgtgtgtgccccccacagtggactgggaaaacgtgccagttagatgcaaatgaatgtgaggccaaaccttgtgtaaacgccaaatcctgtaagaatctcattgccagctactactgcgactgtcttcccggctggatgggtcagaattgtgacataaatattaatgactgccttggccagtgtcagaatgacgcctcctgtcgggatttggttaatggttatcgctgtatctgtccacctggctatgcaggcgatcactgtgagagagacatcgatgaatgtgccagcaacccctgtttgaatgggggtcactgtcagaatgaaatcaacagattccagtgtctgtgtcccactggtttctctggaaacctctgtcagctggacatcgattattgtgagcctaatccctgccagaacggtgcccagtgctacaaccgtgccagtgactatttctgcaagtgccccgaggactatgagggcaagaactgctcacacctgaaagaccactgccgcacgaccccctgtgaagtgattgacagctgcacagtggccatggcttccaacgacacacctgaaggggtgcggtatatttcctccaacgtctgtggtcctcacgggaagtgcaagagtcagtcgggaggcaaattcacctgtgactgtaacaaaggcttcacgggaacatactgccatgaaaatattaatgactgtgagagcaacccttgtagaaacggtggcacttgcatcgatggtgtcaactcctacaagtgcatctgtagtgacggctgggagggggcctactgtgaaaccaatattaatgactgcagccagaacccctgccacaatgggggcacgtgtcgcgacctggtcaatgacttctactgtgactgtaaaaatgggtggaaaggaaagacctgccactcacgtgacagtcagtgtgatgaggccacgtgcaacaacggtggcacctgctatgatgagggggatgcttttaagtgcatgtgtcctggcggctgggaaggaacaacctgtaacatagcccgaaacagtagctgcctgcccaacccctgccataatgggggcacatgtgtggtcaacggcgagtcctttacgtgcgtctgcaaggaaggctgggaggggcccatctgtgctcagaataccaatgactgcagccctcatccctgttacaacagcggcacctgtgtggatggagacaactggtaccggtgcgaatgtgccccgggttttgctgggcccgactgcagaataaacatcaatgaatgccagtcttcaccttgtgcctttggagcgacctgtgtggatgagatcaatggctaccggtgtgtctgccctccagggcacagtggtgccaagtgccaggaagtttcagggagaccttgcatcaccatggggagtgtgataccagatggggccaaatgggatgatgactgtaatacctgccagtgcctgaatggacggatcgcctgctcaaaggtctggtgtggccctcgaccttgcctgctccacaaagggcacagcgagtgccccagcgggcagagctgcatccccatcctggacgaccagtgcttcgtccacccctgcactggtgtgggcgagtgtcggtcttccagtctccagccggtgaagacaaagtgcacctctgactcctattaccaggataactgtgcgaacatcacatttacctttaacaaggagatgatgtcaccaggtcttactacggagcacatttgcagtgaattgaggaatttgaatattttgaagaatgtttccgctgaatattcaatctacatcgcttgcgagccttccccttcagcgaacaatgaaatacatgtggccatttctgctgaagatatacgggatgatgggaacccgatcaaggaaatcactgacaaaataatcgatcttgttagtaaacgtgatggaaacagctcgctgattgctgccgttgcagaagtaagagttcagaggcggcctctgaagaacagaacagatttccttgttcccttgctgagctctgtcttaactgtggcttggatctgttgcttggtgacggccttctactggtgcctgcggaagcggcggaagccgggcagccacacacactcagcctctgaggacaacaccaccaacaacgtgcgggagcagctgaaccagatcaaaaaccccattgagaaacatggggccaacacggtccccatcaaggattatgagaacaagaactccaaaatgtctaaaataaggacacacaattctgaagtagaagaggacgacatggacaaacaccagcagaaagcccggtttgccaagcagccggcgtacacgctggtagacagagaagagaagccccccaacggcacgccgacaaaacacccaaactggacaaacaaacaggacaacagagacttggaaagtgcccagagcttaaaccgaatggagtacatcgtatagcagaccgcgggcactgccgccgctaggtagagtctgagggcttgtagttctttaaactgtcgtgtcatactcgagtctgaggccgttgctgacttagaatccctgtgttaatttaagttttgacaagctggcttacactggcaatggtagtttctgtggttggctgggaaatcgagtgccgcatctcacagctatgcaaaaagctagtcaacagtaccctggttgtgtgtccccttgcagccgacacggtctcggatcaggctcccaggagcctgcccagccccctggtctttgagctcccacttctgccagatgtcctaatggtgatgcagtcttagatcatagttttatttatatttattgactcttgagttgtttttgtatattggttttatgatgacgtacaagtagttctgtatttgaaagtgcctttgcagctcagaaccacagcaacgatcacaaatgactttattatttattttttttaattgtatttttgttgttgggggaggggagactttgatgtcagcagttgctggtaaaatgaagaatttaaagaaaaaaatgtcaaaagtagaactttgtatagttatgtaaataattcttttttattaatcactgtgtatatttgatttattaacttaataatcaagagccttaaaacatcattcctttttatttatatgtatgtgtttagaattgaaggtttttgatagcattgtaagcgtatggctttatttttttgaactcttctcattacttgttgcctataagccaaaattaaggtgtttgaaaatagtttattttaaaacaataggatgggcttctgtgcccagaatactgatggaatttttttgtacgacgtcagatgtttaaaacaccttctatagcatcacttaaaacacgttttaaggactgactgaggcagtttgaggattagtttagaacaggtttttttgtttgtttgttttttgtttttctgctttagacttgaaaagagacaggcaggtgatctgctgcagagcagtaagggaacaagttgagctatgacttaacatagccaaaatgtgagtggttgaatatgattaaaaatatcaaattaattgtgtgaacttggaagcacaccaatcttactttgtaaattctgatttcttttcaccattcgtacataatactgaaccacttgtagatttgatttttttttttaatctactgcatttagggagtattctaataagctagttgaatacttgaaccataaaatgtccagtaagatcactgtttagatttgccatagagtacactgcctgccttaagtgaggaaatcaaagtgctattacgaagttcaagatcaaaaaggcttataaaacagagtaatcttgttggttcaccattgagaccgtgaagatactttgtattgtcctattagtgttatatgaacatacaaatgcatctttgatgtgttgttcttggcaataaattttgaaaagtaatatttattaaatttttttgtatgaaaacatgg

SEQ ID NO: 11849 - protein, 1218 aa, Homo sapiens; identical to SEQ ID NO: 1961

SEQ ID NO: 11850 - DNA, 499 bp, Homo sapiens
atgctcaacatgctttgactgttgaaaagagacctttggcacacattgaagggatggtgatggagatgccaatccatggaatcaggtggcacagctatgttggtagctatagcagaagtcttcttggcaaagattcctccagggaaggaaggtaccattggagaaccatgcatgaagacagggaagaaatgattggaatcatgaaacattaaactggaaggaagccctaggcaaacctaactcatgggaaaacagacacccacatgttacccagtttagtaccaaaaccaaggctggtatttgcataaatatacttttcttctctatctaatatcaaggccttcttagtattgttaataggccttaagcttggtttgtctacatagaaatcaaaataacaatgtcaacccatgaaagaattaaaagaagtcccaaacagttctgatttcctccaatgtgactatttctgatatattataaaataacagaaatcaaactc

SEQ ID NO: 11851 - protein, 52 aa, Homo sapiens
MVMEMPIHGIRWHSYVGSYSRSLLGKDSSREGRYHWRTMHEDREEMIGIMKH

SEQ ID NO: 11852 - DNA, 727 bp, Homo sapiens
aagcagacctcaggcggtaatgctgactggcccgaagctcacctcctgctgtgttgcccggttcctaacaggccatggacctgcaccagtctgtggcccgaaggctggggacccctgattcctacacgaagaaacctcaaacccaggattcaagccaaaaacaatgattctcaagttcctatgaaatcctggatggatgttgaactgggcaacgtactagctgactcccgtggcagatgcgagcctcaacaaagctccagggctggcacttcaagggagcggaggtgtgtgtttgagtctgagtcacatgcagtaggccatctgctcttatcaacaggatgagaatctttgccaagaagacttctgctatagctaccaacatagctgtgccacctgattccatggattggcatctccatcacctaatgaagcagagataacacggaggacctcagtcaatactatctacaaacctcagttgatatcatttgcaaacctccctgattcagtattaacattcacaatatttaattaggcaccattgaatttcatttaccaaatgtcaagcagatgacaaaattctcccaatttgataaaatttgataaattttaatgttgacattaagtcacttttattttagaaaacagcaagacatcttagattttgaaaacggaaaagtcaatatcaccaaagtctgtttgttggtataagataaaaaattgagtt

SEQ ID NO: 11853 - protein, 33 aa, Homo sapiens
MRIFAKKTSAIATNIAVPPDSMDWHLHHLMKQR

SEQ ID NO: 11854 - DNA, 1268 bp, Homo sapiens
actatcgagaagcagatgacaggctcaggccttaccagggatgcacttgccacattttggaaagactacataaaaaacctttaaaaattggagccctttgggcctcaggtatccaaagagcacattttttggaaactcaacactcaggaaggtcgcatagagccagtttatgcagatgtcatccatactgtagggccaatagccaggggccatattaatggttcccacaaggaagaccttgcaaattgctataaatcatctctgaagctcgtgaaagaaaataacatccgatcagttgcatttccctgcatctcaacaggcatttatggctttcccaacgagcctgctgcagtcattgccctcaacaccattaaggaatggcttgccaagaatcaccatgaggtggatcggatcattttctgtgtcttcttagaagttgacttcaaaatctacaaaaagaaaatgaatgagtttttctccgtagacgataataatgaagaagaagaggatgttgaaatgaaagaagattcagatgagaacggtccagaggagaagcaaagtgtggaagaaatggaagagcagagccaagatgcagatggtgtcaacactgtcactgtgcccggccctgcttcagaagaggcagttgaagactgtaaagatgaagattttgcaaaggatgaaaatattacaaaaggcggtgaagtgacagatcattctgtgcgtgaccaagatcatcccgatggacaagagaatgattcaacgaagaatgaaataaaaattgaaacagaatcgcagagctcatatatggaaacagaagaactttcatcaaaccaagaagatgccgtgattgtggagcaaccagaagtgattccattaacagaggaccaagaagaaaaagaaggtgaaaaagctccaggcgaggacacacctaggatgcctgggaaaagtgaaggctccagtgacctagaaaatactccaggtcctgatgttgaaatgaatagtcaggttgacaaggtaaatgacccaacagagagtcaacaagaagatcaactaatagcaggggcacaagatgaagcgaaggaacaaagaaatggaactaaatgacaatcctcagcatcgcaaggcctctcctggctctgggggagctcgggaagatagcagcacacgctgtggaggagggtgggggtggggggaaggcaagtcccatggaaggacggggaatcctttactctaatttctccagctgcattttgttccgtttatctgca

SEQ ID NO: 11855 - protein, 213 aa, Homo sapiens; identical to SEQ ID NO: 1963

SEQ ID NO: 11856 - DNA, 2112 bp, Homo sapiens
acttgagctgtctctgctgcctctccaggggccacctggcctcaggaccccaggcaagcaccgtgggttgggaaccaacctggtggaaaactaaaatcagcccatcttcaggtctaccgcggcggatgaagcctcacgcagaacagatacagttgcttggcaagcagggggctgcagtttctcaactttgccctttggtgcttgtaagtggacatatctgcagagaagaaaggagacattttcaaagaattgctcttactgcctcctccttgtcctgtggctctcagctcaaatggcacctcctccaagaagccttccctgattttctacccttctctgtgctcccagtttcctggactgcccgtgccacagacgtgctggcactgtctgttgacatggcttgctctctacttccccactggactgggcactctgcaagggcaaagactgtgtttggcccctctttgtggctgcagctgtgccttgcacaggttcaggcacagtacgggtgttcactaatgtttgctgaatgaatcaatgaacaaatattcccttccagttctgctccacctctggactcctgccccacaggggagaaaccctttttgaaagcacctgtgacatagttcaagatcaccaatgtcgggcgagggtaggacatgcaccctggagtccagccatacctcagcacagccctcctgcccacatcgccaaggccctgtcagaggcatgacaaacagcttggctgatggcttataatgtcaaagatgatggaaacagggaggcgacggctgaaagaatgggttggggacgcttgtcataactttatttgtgggagacacactgtctaccttgattctccaaactgccctaaaaagaacatacatttttacagaggaggaaaccgaagcttgaagaggagaaatgacatatccaagtgccccatgaaggaggacaaaagcccaggaggcagctgtcgcatcatcctcttcctttccctgcacatccgctacatcccttggtcctactgatttcacctgccgtttcctctatgtccaacgttactcagtccaagtccccaagcatttcctgcctcgacagttattctaccccatcctcccctgctgctctcaaactcctccttcttttttttttttgagacagactcttgatgcccaggctggagtgcaatggcgtgatctcagctcactgcaacctccgcctcccaggttcaagtggttctcttgcctcagcctcccaagtagctgggattacagcgtgcgccaccacacccagctaatttttgtatatttagtagagataaagggtttcaccatattggccaggctggtcttcaactcttgacctcaggtgatgtgcccgccttggcctcccaaagtgctgggattacaggcttgagccactgcgccagcaaactcattcttcttcttacagactctcttatttgagttcacctaaaagcctgagataaggaattggatgtacagaatttatttgcatggccatcccaggaaacacttggaagtaggggagtgggaaaggaagacagggaggggtaggcagccaggaaaagggttatcgagcaggttacactgtggataacgggggcttgattccaccagacctctgggagcccatgaataacacctcggagttctcctgcctgcggagttggggagcagggtatttatctactaggtcctatgggggcaggggtgttcattctcaggcacctctgacctgcttcacaggcgggaagagtgtgctccagagttgttaaagaaagtctttaggtaaagagacacagtgggctgggcacagtggctcacgcctgtaatcccaacactttgggaggccaaagcaggtggatcacctgaggtcaggagttcaagaccagcctgaccaacatggtgaaaccccgtctctattaaaaatacaaaaatcagctgggagtggtggtgggtgcctgtaatcccagctccttgggaggctaaggcaggagaatcacctgaaccagggaggcagaggttgcagtgagccgagattgcgccactacactccagcctgggtgacagagtaagactctgtctt

SEQ ID NO: 11857 - protein, 135 aa, Homo sapiens; identical to SEQ ID NO: 1969

SEQ ID NO: 11858 - DNA, 1924 bp, Homo sapiens
attggctctgcggctccgctcgccgcactttacggcagtgtggctggagccgcggctgacgggcccgcggtctgggcgtgagtgcagggaagtggagtatttgctgggccgggtaccatggacgtgggcgaacttctgagctaccagcccaataggggcacaaaacgtccccgggatgatgaagaggaggagcagaagatgcgtcggaaacaaactggtactcgagaacgcggccgctatcgggaagaagaaatgactgtggtggaggaagcggatgatgacaaaaaaaggctgctgcagattattgacagagatggggaagaggaagaggaagaggaggagccattggatgaaagctcagtgaagaaaatgatcctcacatttgaaaagagatcatataaaaaccaagaattgcggattaagtttccagacaatccagagaagttcatggaatccgagctggacctaaatgacatcattcaggagatgcacgtggtggccaccatgccagacctgtaccaccttctggtggagctgaatgctgtacagtcgcttctcggcttgctcggacacgataatacagatgtgtccatagctgtggtcgatttgcttcaggaattaacagatatagacaccctccatgagagtgaagagggagcagaagtgctcatcgatgctctggtggatgggcaggtggtagcactgctggtacagaatctggagcgcctggatgagtctgtgaaagaggaggcagatggcgtccacaacactctggctattgtggaaaacatggctgagttccggcctgagatgtgtacagagggtgcccagcagggtcttctacagtggctgttgaagaggctgaaggcaaagatgccttttgatgccaacaaactgtattgcagtgaagtgctggccatattgctccaggacaatgatgaaaacagggaattgcttggggagctggatggaatcgatgtgcttcttcagcagttatccgtgtttaaaagacacaatcccagcacggctgaggagcaggagatgatggagaatctgtttgattccctctgctcctgtctaatgcttagttccaatcgtgagcgcttcctgaagggcgagggtcttcagctgatgaatctcatgctcagggaaaagaagatctcccggagcagtgccctgaaagtgctggaccatgccatgattggccccgaaggcacagacaactgccataagtttgttgacattcttggcttacgaaccatctttcccctctttatgaaatctcccaggaagatcaagaaagtgggaaccactgagaaggaacatgaagagcatgtctgttcgatcctggcttccctcctgcggaacctgagagggcagcagcggacccggcttctgaataaattcactgaaaatgacagtgagaaggttgacagactaatggagttgcattttaaatatctgggtgcaatgcaggtggcggacaagaagattgaaggggaaaaacacgacatggtccggcgaggagagatcatcgacaatgacaccgaggaggagttctacctccggcgcctggatgcggggctctttgttctccagcacatctgctacatcatggccgagatctgcaatgccaatgtcccccagattcgccagagggttcaccagatcctaaacatgcgaggaagctccatcaaaattgtcaggcatatcatcaaggagtatgcagagaacatcggggacggccggagcccggagttccgggagaacgagcaaaagcgcatcctgggcttgctggagaacttctagaggcaccttggccctgcgcatcatggactctctcagcttccctcccaggatcagtttctacacaactctgtgtggcttttggacaaattaaagctagttttggtatccccgggcc

SEQ ID NO: 11859 - protein, 563 aa, Homo sapiens; identical to SEQ ID NO: 1971

SEQ ID NO: 11860 - DNA, 569 bp, Homo sapiens
actttacggcagtgtggctggagccgcggctgacgggcccgcggtctgggcgtgagtgcagggaagtggagtatttgctgggccgggtaccatggacgtgggcgaacttctgagctaccagcccaataggggcacaaaacgtccccgggatgatgaagaggaggagcagaagatgcgtcggaaacaaactggtactcgagaacgcggccgctatcgggaagaagaaatgactgtggtggaggaagcggatgatgacaaaaaaaggctgctgcagattattgacagagatggggaagaggaagaggaagaggaggagccattggatgaaagctcagtgaagaaaatgatcctcacatttgaaaagagatcatataaaaaccaagaattgcggattaagtttccagacaatccagagaagttcatggaatccgagctggacctaaatgacatcattcaggagatgcacgtggtggccaccatgccagacctgtaccaccttctggtggagctgaatgctgtacagtcgcttctcggcttgctcggacacgataatacagatatcctttcag

SEQ ID NO: 11861 - protein, 158 aa, Homo sapiens
MDVGELLSYQPNRGTKRPRDDEEEEQKMRRKQTGTRERGRYREEEMTVVEEADDDKKRLLQIIDRDGEEEEEEEEPLDESSVKKMILTFEKRSYKNQELRIKFPDNPEKFMESELDLNDIIQEMHVVATMPDLYHLLVELNAVQSLLGLLGHDNTDIL

SEQ ID NO: 11862 - DNA, 551 bp, Homo sapiens
ctctctgtgtcacccagactggaatacagtggcatgaccttggcttactgcagcctcctgggctcaagtgatcctctcacctcagcctcctgagtagttgggactacagcccaataggggcacaaaacgtccccgggatgatgaagaggaggagcagaagatgcgtcggaaacaaactggtactcgagaacgcggccgctatcgggaagaagaaatgactgtggtggaggaagcggatgatgacaaaaaaaggctgctgcagattattgacagagatggggaagaggaagaggaagaggaggagccattggatgaaagctcagtgaagaaaatgatcctcacatttgaaaagagatcatataaaaaccaagaattgcggattaagtttccagacaatccagagaagttcatggaatccgagctggacctaaatgacatcattcaggagatgcacgtggtggccaccatgccagacctgtaccaccttctggtggagctgaatgctgtacagtcgcttctcggcttgctcggacacgataatacagatatcc

SEQ ID NO: 11863 - protein, 129 aa, Homo sapiens
MRRKQTGTRERGRYREEEMTVVEEADDDKKRLLQIIDRDGEEEEEEEEPLDESSVKKMILTFEKRSYKNQELRIKFPDNPEKFMESELDLNDIIQEMHVVATMPDLYHLLVELNAVQSLLGLLGHDNTD

SEQ ID NO: 11864 - DNA, 525 bp, Homo sapiens
gtgcatttgcttcagaccagcaggatattctccttcaaccacaagggtgaatatcagcaaatgaccagcaaagttcaaaaacactgggaaagccacagaaattggagtgtacaatggagttttctgaagggctccatgacatgatgacatcactgccctgatggctaatgaaatgtgtgcttgtctattcttgtatttgccagaattttctaagcactttgggatattcaataatttaagagtacaaggagatcctgagaccaaaaaggttgaaaatcagtaaactaagtaattctgtccctgcaaaaatgaagagaagaactattaaaggactttctagggaaacagcacactctagtcaatgtggtgtttaggagaaagatcaggcagtgcaaattggagggtgcataaggagaactgtcaactgaatctcaaatgcagtcaaatgaagagaggcatttttgggtatgcgatcaaaatgacaattggatatatgggaaaataaatttgaatgtttctgatctc

SEQ ID NO: 11865 - protein, 47 aa, Homo sapiens
MWCLGERSGSANWRVHKENCQLNLKCSQMKRGIFGYAIKMTIGYMGK

SEQ ID NO: 11866 - DNA, 1492 bp, Homo sapiens
gggaagagtgctgtggtgagtgagggattttgccatggagaaggagaaggacccatagcagtttgtcaggttcatggaatccgagctggacctaaatgacatcattcaggagatgcacgtggtggccaccatgccagacctgtaccaccttctggtggagctgaatgctgtacagtcgcttctcggcttgctcggacacgataatacagatatcctttcagatctgacctcagtaggagagctgacatggtggatgggcaggtggtagcactgctggtacagaatctggagcgcctggatgagtctgtgaaagaggaggcagatggcgtccacaacactctggctattgtggaaaacatggctgagttccggcctgagatgtgtacagagggtgcccagcagggtcttctacagtggctgttgaagaggctgaaggcaaagatgccttttgatgccaacaaactgtattgcagtgaagtgctggccatattgctccaggacaatgatgaaaacagggaattgcttggggagctggatggaatcgatgtgcttcttcagcagttatccgtgtttaaaagacacaatcccagcacggctgaggagcaggagatgatggagaatctgtttgattccctctgctcctgtctaatgcttagttccaatcgtgagcgcttcctgaagggcgagggtcttcagctgatgaatctcatgctcagggaaaagaagatctcccggagcagtgccctgaaagtgctggaccatgccatgattggccccgaaggcacagacaactgccataagtttgttgacattcttggcttacgaaccatctttcccctctttatgaaatctcccaggaagatcaagaaagtgggaaccactgagaaggaacatgaagagcatgtctgttcgatcctggcttccctcctgcggaacctgagagggcagcagcggacccggcttctgaataaattcactgaaaatgacagtgagaaggttgacagactaatggagttgcattttaaatatctgggtgcaatgcaggtggcggacaagaagattgaaggggaaaaacacgacatggtccggcgaggagagatcatcgacaatgacaccgaggaggagttctacctccggcgcctggatgcggggctctttgttctccagcacatctgctacatcatggccgagatctgcaatgccaatgtcccccagattcgccagagggttcaccagatcctaaacatgcgaggaagctccatcaaaattgtcaggcatatcatcaaggagtatgcagagaacatcggggacggccggagcccggagttccgggagaacgagcaaaagcgcatcctgggcttgctggagaacttctagaggcaccttggccctgcgcatcatggactctctcagcttccctcccaggatcagtttctacacaactctgtgtggcttttggacaaattaaagctagttttggtatccccgggcc

SEQ ID NO: 11867 - protein, 376 aa, Homo sapiens
MVDGQVVALLVQNLERLDESVKEEADGVHNTLAIVENMAEFRPEMCTEGAQQGLLQWLLKRLKAKMPFDANKLYCSEVLAILLQDNDENRELLGELDGIDVLLQQLSVFKRHNPSTAEEQEMMENLFDSLCSCLMLSSNRERFLKGEGLQLMNLMLREKKISRSSALKVLDHAMIGPEGTDNCHKFVDILGLRTIFPLFMKSPRKIKKVGTTEKEHEEHVCSILASLLRNLRGQQRTRLLNKFTENDSEKVDRLMELHFKYLGAMQVADKKIEGEKHDMVRRGEIIDNDTEEEFYLRRLDAGLFVLQHICYIMAEICNANVPQIRQRVHQILNMRGSSIKIVRHIIKEYAENIGDGRSPEFRENEQKRILGLLENF

SEQ ID NO: 11868 - DNA, 2989 bp, Homo sapiens
aaatttttcttcaggaaacggttgttaacaatttactgttgtacagctgtaactgcccaaaacaccttagcatgaataaacaatttcatggcagtcatgacttaaatttttaatcttttttaactcttcatttatcaaccaagaccatatatggctggttatgttcccagcaagcacaggtcatctttgcttcatcctcctctgtgaaaacataaactgtagggattttaattcaatcagagcctggtttgttgtaaccttaagaggcagaggatgtgagaaaacagcttgtgcctcatcctttcaaccgtgagaagcagcttcagagtttattctggcgctctgcatcactgctgctggtgagggcttgtcagcgcttctgtgcctcatctgcccccttgagaggctggagcccagctatcggttggctgcagaatggattctgatctgtgaagagcatatcttgggggtggggagcacacacctcacatggttttggagggttactctaaatgcagtcggaggcagcagaaggtggaatccagcagctgctgccttttcaaaataatgctttttaaacactttttcctttaaagtaattcattaaacgtgtttagagctcctttcttgtgaaccttttagagtgtttctatggaaaaataaaaccaaaggtacatttaaagatattttcttaaggtattgctaaaaaatccatttttgtggactgctttaagccagatttactcagttggcccaaaggaacaaggaggaataaaagggaaaaaaacaaaccacaacaacgatcacatggcaccaaattgataaatattctgtttttgtatgtcttttgccatgttcttaatttgagtggtcagttgagtcccttctaaagtttttttggtagatcactgttatttactgggttcttcctttgtatgctaagtgtgttggatgctaataaaaaataataactccagtttaaagcaaaaactctcaaattaccaccctcccccaccatggtgtgtgtggaaagtgccttgggaacagtatgctcaggaaacaccactgattggagccctgagaaggtgtgggtcatctctggcttgggggtgtggggagtggagatgggtaagcttttgacagacatggagattagcatgcatttcaggtttatttttgtagtctctccctttgcagtggaaattgccattcctcctactccggatggaagctgatgtggtcttgctggctgcccatgtagtcactacaaatttatcaagaaaaccaggagaacttacagagttgtcaagtgagttttgtgaagaattactgtgggaattcggaaaatacggaggagacaggttttttagaccaacagggatcaactgaacttgagtagtctgggtctgagaatactaaagtggaacaaactgactgagacttaccgtgttatcccagaagatgaggaaactgaggcccagaatgaagaatggattggcctttatcatgttcagtactttagtcatcatgggcattcaataaatgcagtttgctggagcaagctgtggtcgatttgcttcaggaattaacagatatagacaccctccatgagagtgaagagggagcagaagtgctcatcgatgctctggtggatgggcaggtggtagcactgctggtacagaatctggagcgcctggatgagtctgtgaaagaggaggcagatggcgtccacaacactctggctattgtggaaaacatggctgagttccggcctgagatgtgtacagagggtgcccagcagggtcttctacagtggctgttgaagaggctgaaggcaaagatgccttttgatgccaacaaactgtattgcagtgaagtgctggccatattgctccaggacaatgatgaaaacagggaattgcttggggagctggatggaatcgatgtgcttcttcagcagttatccgtgtttaaaagacacaatcccagcacggctgaggagcaggagatgatggagaatctgtttgattccctctgctcctgtctaatgcttagttccaatcgtgagcgcttcctgaagggcgagggtcttcagctgatgaatctcatgctcagggaaaagaagatctcccggagcagtgccctgaaagtgctggaccatgccatgattggccccgaaggcacagacaactgccataagtttgttgacattcttggcttacgaaccatctttcccctctttatgaaatctcccaggaagatcaagaaagtgggaaccactgagaaggaacatgaaggagccagtcaggatgaccagggctgactgaaacatgttcagtggcagacatgtgatcaggttgcagtatggaaggagttacctggtgatctaggacagagcatgtctgttcgatcctggcttccctcctgcggaacctgagagggcagcagcggacccggcttctgaataaattcactgaaaatgacagtgagaaggttgacagactaatggagttgcattttaaatatctgggtgcaatgcaggtggcggacaagaagattgaaggggaaaaacacgacatggtccggcgaggagagatcatcgacaatgacaccgaggaggagttctacctccggcgcctggatgcggggctctttgttctccagcacatctgctacatcatggccgagatctgcaatgccaatgtcccccagattcgccagagggttcaccagatcctaaacatgcgaggaagctccatcaaaattgtcaggcatatcatcaaggagtatgcagagaacatcggggacggccggagcccggagttccgggagaacgagcaaaagcgcatcctgggcttgctggagaacttctagaggcaccttggccctgcgcatcatggactctctcagcttccctcccaggatcagtttctacacaactctgtgtggcttttggacaaattaaagctagttttggtatccccgggcc

SEQ ID NO: 11869 - protein, 188 aa, Homo sapiens
MAEFRPEMCTEGAQQGLLQWLLKRLKAKMPFDANKLYCSEVLAILLQDNDENRELLGELDGIDVLLQQLSVFKRHNPSTAEEQEMMENLFDSLCSCLMLSSNRERFLKGEGLQLMNLMLREKKISRSSALKVLDHAMIGPEGTDNCHKFVDILGLRTIFPLFMKSPRKIKKVGTTEKEHEGASQDDQG

SEQ ID NO: 11870 - DNA, 1129 bp, Homo sapiens
cgtgaaaaatttgtcctggggaaggaagcaagaccccttaacatttttctcatttctcctatttccccataggcaaagatgccttttgatgccaacaaactgtattgcagtgaagtgctggccatattgctccaggacaatgatgaaaacagggaattgcttggggagctggatggaatcgatgtgcttcttcagcagttatccgtgtttaaaagacacaatcccagcacggctgaggagcaggagatgatggagaatctgtttgattccctctgctcctgtctaatgcttagttccaatcgtgagcgcttcctgaagggcgagggtcttcagctgatgaatctcatgctcagggaaaagaagatctcccggagcagtgccctgaaagtgctggaccatgccatgattggccccgaaggcacagacaactgccataagtttgttgacattcttggcttacgaaccatctttcccctctttatgaaatctcccaggaagatcaagaaagtgggaaccactgagaaggaacatgaagagcatgtctgttcgatcctggcttccctcctgcggaacctgagagggcagcagcggacccggcttctgaataaattcactgaaaatgacagtgagaaggttgacagactaatggagttgcattttaaatatctgggtgcaatgcaggtggcggacaagaagattgaaggggaaaaacacgacatggtccggcgaggagagatcatcgacaatgacaccgaggaggagttctacctccggcgcctggatgcggggctctttgttctccagcacatctgctacatcatggccgagatctgcaatgccaatgtcccccagattcgccagagggttcaccagatcctaaacatgcgaggaagctccatcaaaattgtcaggcatatcatcaaggagtatgcagagaacatcggggacggccggagcccggagttccgggagaacgagcaaaagcgcatcctgggcttgctggagaacttctagaggcaccttggccctgcgcatcatggactctctcagcttccctcccaggatcagtttctacacaactctgtgtggcttttggacaaattaaagctagttttggtatccccgggcc

SEQ ID NO: 11871 - protein, 311 aa, Homo sapiens
MPFDANKLYCSEVLAILLQDNDENRELLGELDGIDVLLQQLSVFKRHNPSTAEEQEMMENLFDSLCSCLMLSSNRERFLKGEGLQLMNLMLREKKISRSSALKVLDHAMIGPEGTDNCHKFVDILGLRTIFPLFMKSPRKIKKVGTTEKEHEEHVCSILASLLRNLRGQQRTRLLNKFTENDSEKVDRLMELHFKYLGAMQVADKKIEGEKHDMVRRGEIIDNDTEEEFYLRRLDAGLFVLQHICYIMAEICNANVPQIRQRVHQILNMRGSSIKIVRHIIKEYAENIGDGRSPEFRENEQKRILGLLENF

SEQ ID NO: 11872 - DNA, 581 bp, Homo sapiens
acagtgagatgaataggagtgccactgttctcttgctgtgcgttgtctttccttctcactcaagcctgtgaaatctctctttcaggttgacagactaatggagttgcattttaaatatctgggtgcaatgcaggtggcggacaagaagattgaaggggaaaaacacgacatggtccggcgaggagagatcatcgacaatgacaccgaggaggagttctacctccggcgcctggatgcggggctctttgttctccagcacatctgctacatcatggccgagatctgcaatgccaatgtcccccagattcgccagagggttcaccagatcctaaacatgcgaggaagctccatcaaaattgtcaggcatatcatcaaggagtatgcagagaacatcggggacggccggagcccggagttccgggagaacgagcaaaagcgcatcctgggcttgctggagaacttctagaggcaccttggccctgcgcatcatggactctctcagcttccctcccaggatcagtttctacacaactctgtgtggcttttggacaaattaaagctagttttggtatccccgggcc

SEQ ID NO: 11873 - protein, 122 aa, Homo sapiens [sequence omitted]

SEQ ID NO: 11874 - DNA, 449 bp, Homo sapiens
gaaaagaaaaagatggactccttgtaatgaaacagacatggtccggcgaggagagatcatcgacaatgacaccgaggaggagttctacctccggcgcctggatgcggggctctttgttctccagcacatctgctacatcatggccgagatctgcaatgccaatgtcccccagattcgccagagggttcaccagatcctaaacatgcgaggaagctccatcaaaattgtcaggcatatcatcaaggagtatgcagagaacatcggggacggccggagcccggagttccgggagaacgagcaaaagcgcatcctgggcttgctggagaacttctagaggcaccttggccctgcgcatcatggactctctcagcttccctcccaggatcagtttctacacaactctgtgtggcttttggacaaattaaagctagttttggtatccccgggcc

SEQ ID NO: 11875 - protein, 98 aa, Homo sapiens [sequence omitted]

SEQ ID NO: 11876 - DNA, 6639 bp, Homo sapiens
cggcgccgcgcggccgcgctagaatggaggcgcccagcggcagcgagcccggcggcgacggggccggggactgcgcccacccggacccccgggcccctggcgccgcggcgcccagctccggccccggcccgtgcgcggccgcccgggagtccgagcgccagctgcgcctccgcctctgcgtcctcaacgagatcttgggcaccgagagggactacgtgggcaccttgcgcttcttgcagtcggcattcctgcatcgcatccggcagaacgtggccgactcagtggagaagggcctcacggaggagaatgtcaaggtcctgttctcgaacatcgaagacatcctggaagttcataaggatttcttggccgccttggagtattgtttacacccggagccgcagtctcagcatgaacttgggaatgttttcttaaaattcaaggacaagttctgcgtgtacgaggagtattgcagcaaccatgagaaagccctgaggctgctggtggagctgaacaagatccctaccgtgcgcgccttccttttgagctgcatgcttctgggaggccggaagaccacggacatccctttggaaggctacctgttgtctccgatccagaggatctgcaagtacccgctcctccttaaggagctggccaagaggactcccggcaagcacccagaccaccccgcggtccagagtgccctgcaggccatgaagaccgtttgctccaacatcaatgagaccaagcggcagatggagaagctggaagccctggagcagctgcagtcccacatcgaaggctgggagggttccaacctcacagacatctgcactcagctcctcctgcaagggactttgttaaagatctctgcgggcaacatccaggaaagggccttcttcctcttcgacaaccttctcgtctactgcaagcggaaatccagggtcaccgggagcaagaagtccaccaagaggaccaaatccatcaacggctccctctacatcttcaggggtcgaatcaacactgaagtcatggaggtggagaatgtggaagatgggacagcggattaccatagcaacggctataccgtcaccaacggctggaagatccacaacacggccaagaataagtggtttgtctgcatggccaagacggcagaggagaagcagaagtggctggatgccatcatccgcgagcgggagcagcgcgagagcctgaagctgggcatggagcgtgatgcctacgtcatgattgcggagaagggggagaagctgtaccacatgatgatgaacaagaaggtgaacctcatcaaggaccgccggagaaagctgagcactgtccccaagtgctttcttggcaatgagttcgttgcctggctcctagaaattggtgaaatcagcaagacggaagaaggagtcaacttgggccaagccctgttggagaatggcatcatccaccatgtttccgacaagcaccagttcaagaatgagcaggtgatgtatcgcttccgctacgacgatggcacctacaaggcccgaagtgagctggaggacatcatgtccaagggtgtgaggctttactgccgtcttcacagcctctacaccccggtgatcaaagaccgtgattaccacctgaagacctacaagtcagtgcttcccgggagcaagctggtggactggctgctggctcagggagactgccagactcgggaggaggcagtggcgctcggcgtgggtctgtgcaacaatggcttcatgcaccacgtgctggagaagagcgagttcagggatgagtcccagtacttccgctttcatgctgacgaggagatggaggggaccagcagcaagaacaaacagcttcgcaacgacttcaagctggtggagaacattctggccaagcgcctgctgatcctgccccaggaggaggactatggctttgacatcgaggagaagaacaaggctgtggtggtgaagtccgtccagaggggctcgctggctgaggtggctggcctgcaggtggggaggaagatctactccatcaatgaggacctggtgttcctgcggccgttttcagaggtggagtccatcctcaaccagtccttctgctcccgccgccctctgcgcctcctggtggccacgaaggccaaagagatcatcaaaatccccgaccagccggacacactgtgcttccagattcgtggagctgccccaccgtacgtctatgctgtggggagaggctctgaggccatggctgcagggctctgtgctggtcagtgcattctgaaggtcaatggcagcaacgtgatgaacgatggtgcccctgaggtcctggagcacttccaggcattccggagtcggcgcgaagaggccctgggcctgtaccagtggatctaccacacccatgaggatgcccaggaagcacgagccagtcaggaggcctccactgaggaccccagtggcgagcaggcccaggaggaagaccaggctgattcagccttcccactgctgtccctgggtccccggctgagcctgtgtgaggacagccccatggtcaccctgactgtggacaacgtgcacctggaacacggcgtggtgtatgagtatgtgagcacggcaggcgtcaggtgccatgtgctggagaagatcgtggagccccgcggctgcttcggcctcaccgccaagatcctcgaggcctttgctgccaatgacagcgtcttcgtggagaactgcaggcggctcatggccctgagcagcgccatcgtgaccatgccccactttgagttccgcaacatctgtgacaccaagctggagagcattggccagaggattgcctgctaccaggagtttgcagcccaactgaagagcagggtcagcccacccttcaaacaagcccccctggagccccacccgctgtgtggcctggacttctgccccaccaattgccacatcaacctcatggaagtgtcctaccccaagaccaccccctcagtgggcaggtccttcagcatccgctttggacgcaaaccctccctcatcggccttgacccggagcaaggccacctgaaccccatgtcgtacacccagcactgcatcaccaccatggctgctccctcctggaagtgcttgcctgctgcagagggtgatccccaaggccagggtctccatgatggcagcttcgggccagccagtgggacccttggtcaggaagaccggggcctcagcttcctactcaagcaggaggaccgtgagatccaggatgcctacctgcagctcttcaccaagctggatgtggccctgaaggagatgaagcaatatgtcacccagatcaacaggctgctgtccaccatcacagagcccacctcgggtgggtcctgcgacgcatccttggctgaggaggcctcctccctgcccctggtcagtgaagagagcgagatggacaggagtgaccatgggggcatcaagaaggtgtgcttcaaggtggccgaggaggaccaggaggactcaggccacgacaccatgagttatcgcgactcctacagcgagtgtaacagcaatcgagactcggtcctgtcctacaccagcgtgagaagtaacagctcctacttgggcagcgacgagatggggtctggagatgagctgccctgtgacatgcggatcccatctgacaagcaggacaagcttcatggctgcctggagcacctctttaaccaggtggactccatcaatgctctcctcaaggggccagtcatgagccgggctttcgaagagaccaagcatttccctatgaaccacagcttacaagagtttaaacagaaagaagagtgtacaatccgtggccggagcctgatccagattagcatccaggaggacccctggaacctccccaactccatcaagaccctggtggacaacattcagagatatgtggaagatgggaagaaccagctgctcctggccttgctgaagtgcacagacacggagctgcagctgcgcagagacgcgatcttctgccaggccctggtggccgccgtgtgcaccttctccaagcagctgctggcggccctgggctaccgctacaacaacaatggcgagtacgaggagagcagccgcgacgccagccgcaagtggctggagcaggtggcggccacgggcgtcctgctgcactgccagtccctgctctcgccagccacagtgaaggaggaacggaccatgctggaggacatctgggtgacgctgtcagagctggacaatgtcaccttctcctttaagcagctggacgagaactatgtggccaacaccaacgtcttctaccacattgagggcagccggcaggcgctgaaggtcatcttctacctcgacagctaccacttctccaagctgccctcccgcctggagggtggggccagcctgaggctgcacacagcgctgttcacgaaagtgctggagaacgtggaggggctgccttctccaggcagccaggccgcggaggatttgcagcaggacatcaacgcgcagtccctggagaaagttcagcagtattaccgcaaactcagggcattttacctggagcggtctaacctgcccacggatgccagcaccacggcggtaaagatagaccagctgatccgccccatcaatgccctggatgagctctgccgcctcatgaagtcctttgtccacccaaagcctggtgctgctgggagtgtgggcgccggcctcatccccatctcctcggagctctgctaccgcctgggggcctgccagatggtcatgtgtggcacaggcatgcagaggagcaccctgagcgtgtccctggagcaggcggccatcttggcacggagccacgggttgctgcccaagtgcatcatgcaggccacggacatcatgcggaagcagggcccaagggtggagattctggccaaaaacctgcgagtcaaggaccagatgccccagggtgctccgcgcctctaccgcctctgccagccgccggtggatggggacctctgaacacccaaatgccccacgctgggccgcggcctctggagctgggatttgggaggacacagcaggcagcgctggccttctccagggatggcccaaggcttccgcagccgcccgttccgggacctgcccagcgtcctccctgcctccttccgggacaagcctggccaccctcgctgtgatgacgagctggctgattggccctgggccggcccattcttcacacgcctgccagaagctggaggggtgctggagacccatagagctgatgggagcagctggtgcctggccttcggctcctgcgtccccagaacccaagggaacgtcatggaggccacatggggccacccggctccctcgggatggctccgcctgcacttttgaaaccccggtttccttcaacgtccacattccaggtgaccacacgtgtctcctcctcctcatcttagcttccaggttcaccctaaccctgtactaacctgcttggtggacttggaaaagacttggctctgtcgggaaaggagagacggggcctccatcacgcctgttaccagaggatccccgagagccacaccagctctggacatcaccgcccctggaactggggccaccagccctgggcacgagatttgctctgactttatttatatggcatgaaatctctggtttattttgggattttttgttgttggtgttgtcaaagtttgttttttctaaagttgtgtgattatatatttgacattttacatttcaaagaaaggtatgttgtctaacaggggaccaacagaaggtagtattgacaactgttcctgcttctactaaaaaaaaaagagcacaaaagaaaaactaaattattgaaaaattaaaaaatgtcattgtttcctgtttgttaatattagggttgtaaggtgtcgttttgaggtatcgactgtgattccttcccccaccctccattctccagcggttggccggtgttagaactcgctctctttgagtgactggctacaagggcctgagaggtggccagccagggttggagctggaggggatggagccccacctgaggtgccgtgtcacacgggttagagggtcactgggaaacaccgggcggtggcttctgtgatttattttcttgatggtaacttctcagagcagggcgattgggacatcaccagccagagcacaggaagccaccctgcctgctggggaggagggacccacacaagccccctcggcagtttgtccccccagcttcggtatgccttcagggaaaggtcacagctggggaggaagcggggggacgcctgtcacccctggcaggtggtgagttcaggtgggggctccctgctgcccccaggcctgggagcttgaagccctcccggcatctggcatccgagcctcccgccctccagggtgcgcttccctctcttgccgcagcatacacgagggcaggcagtggccttgtcactgtatcttgcatcagagacaaaggaggacccgctttagccctgctgcgggaaatgggggagggcccagggccagcgcattgtgcactggtttactttaaaatgtacagattcttctcgttaaattcttgatagattttttattattattaaaagtcagtttataatacaaagaa

SEQ ID NO: 11877 - protein, 1659 aa, Homo sapiens
MEAPSGSEPGGDGAGDCAHPDPRAPGAAAPSSGPGPCAAARESERQLRLRLCVLNEILGTERDYVGTLRFLQSAFLHRIRQNVADSVEKGLTEENVKVLFSNIEDILEVHKDFLAALEYCLHPEPQSQHELGNVFLKFKDKFCVYEEYCSNHEKALRLLVELNKIPTVRAFLLSCMLLGGRKTTDIPLEGYLLSPIQRICKYPLLLKELAKRTPGKHPDHPAVQSALQAMKTVCSNINETKRQMEKLEALEQLQSHIEGWEGSNLTDICTQLLLQGTLLKISAGNIQERAFFLFDNLLVYCKRKSRVTGSKKSTKRTKSINGSLYIFRGRINTEVMEVENVEDGTADYHSNGYTVTNGWKIHNTAKNKWFVCMAKTAEEKQKWLDAIIREREQRESLKLGMERDAYVMIAEKGEKLYHMMMNKKVNLIKDRRRKLSTVPKCFLGNEFVAWLLEIGEISKTEEGVNLGQALLENGIIHHVSDKHQFKNEQVMYRFRYDDGTYKARSELEDIMSKGVRLYCRLHSLYTPVIKDRDYHLKTYKSVLPGSKLVDWLLAQGDCQTREEAVALGVGLCNNGFMHHVLEKSEFRDESQYFRFHADEEMEGTSSKNKQLRNDFKLVENILAKRLLILPQEEDYGFDIEEKNKAVVVKSVQRGSLAEVAGLQVGRKIYSINEDLVFLRPFSEVESILNQSFCSRRPLRLLVATKAKEIIKIPDQPDTLCFQIRGAAPPYVYAVGRGSEAMAAGLCAGQCILKVNGSNVMNDGAPEVLEHFQAFRSRREEALGLYQWIYHTHEDAQEARASQEASTEDPSGEQAQEEDQADSAFPLLSLGPRLSLCEDSPMVTLTVDNVHLEHGVVYEYVSTAGVRCHVLEKIVEPRGCFGLTAKILEAFAANDSVFVENCRRLMALSSAIVTMPHFEFRNICDTKLESIGQRIACYQEFAAQLKSRVSPPFKQAPLEPHPLCGLDFCPTNCHINLMEVSYPKTTPSVGRSFSIRFGRKPSLIGLDPEQGHLNPMSYTQHCITTMAAPSWKCLPAAEGDPQGQGLHDGSFGPASGTLGQEDRGLSFLLKQEDREIQDAYLQLFTKLDVALKEMKQYVTQINRLLSTITEPTSGGSCDASLAEEASSLPLVSEESEMDRSDHGGIKKVCFKVAEEDQEDSGHDTMSYRDSYSECNSNRDSVLSYTSVRSNSSYLGSDEMGSGDELPCDMRIPSDKQDKLHGCLEHLFNQVDSINALLKGPVMSRAFEETKHFPMNHSLQEFKQKEECTIRGRSLIQISIQEDPWNLPNSIKTLVDNIQRYVEDGKNQLLLALLKCTDTELQLRRDAIFCQALVAAVCTFSKQLLAALGYRYNNNGEYEESSRDASRKWLEQVAATGVLLHCQSLLSPATVKEERTMLEDIWVTLSELDNVTFSFKQLDENYVANTNVFYHIEGSRQALKVIFYLDSYHFSKLPSRLEGGASLRLHTALFTKVLENVEGLPSPGSQAAEDLQQDINAQSLEKVQQYYRKLRAFYLERSNLPTDASTTAVKIDQLIRPINALDELCRLMKSFVHPKPGAAGSVGAGLIPISSELCYRLGACQMVMCGTGMQRSTLSVSLEQAAILARSHGLLPKCIMQATDIMRKQGPRVEILAKNLRVKDQMPQGAPRLYRLCQPPVDGDL

SEQ ID NO: 11878 - DNA, 3845 bp, Homo sapiens
ggaagagggctccaggcaggggaagcagctagggcagaggccctgaagtgggaccgtgtctggcgcattggaagagcagaaggaagctgatggggctggagcagatcatcaaaatccccgaccagccggacacactgtgcttccagattcgtggagctgccccaccgtacgtctatgctgtggggagaggctctgaggccatggctgcagggctctgtgctggtcagtgcattctgaaggtcaatggcagcaacgtgatgaacgatggtgcccctgaggtcctggagcacttccaggcattccggagtcggcgcgaagaggccctgggcctgtaccagtggatctaccacacccatgaggatgcccaggaagcacgagccagtcaggaggcctccactgaggaccccagtggcgagcaggcccaggaggaagaccaggctgattcagccttcccactgctgtccctgggtccccggctgagcctgtgtgaggacagccccatggtcaccctgactgtggacaacgtgcacctggaacacggcgtggtgtatgagtatgtgagcacggcaggcgtcaggtgccatgtgctggagaagatcgtggagccccgcggctgcttcggcctcaccgccaagatcctcgaggcctttgctgccaatgacagcgtcttcgtggagaactgcaggcggctcatggccctgagcagcgccatcgtgaccatgccccactttgagttccgcaacatctgtgacaccaagctggagagcattggccagaggattgcctgctaccaggagtttgcagcccaactgaagagcagggtcagcccacccttcaaacaagcccccctggagccccacccgctgtgtggcctggacttctgccccaccaattgccacatcaacctcatggaagtgtcctaccccaagaccaccccctcagtgggcaggtccttcagcatccgctttggacgcaaaccctccctcatcggccttgacccggagcaaggccacctgaaccccatgtcgtacacccagcactgcatcaccaccatggctgctccctcctggaagtgcttgcctgctgcagagggtgatccccaaggccagggtctccatgatggcagcttcgggccagccagtgggacccttggtcaggaagaccggggcctcagcttcctactcaagcaggaggaccgtgagatccaggatgcctacctgcagctcttcaccaagctggatgtggccctgaaggagatgaagcaatatgtcacccagatcaacaggctgctgtccaccatcacagagcccacctcgggtgggtcctgcgacgcatccttggctgaggaggcctcctccctgcccctggtcagtgaagagagcgagatggacaggagtgaccatgggggcatcaagaaggtgtgcttcaaggtggccgaggaggaccaggaggactcaggccacgacaccatgagttatcgcgactcctacagcgagtgtaacagcaatcgagactcggtcctgtcctacaccagcgtgagaagtaacagctcctacttgggcagcgacgagatggggtctggagatgagctgccctgtgacatgcggatcccatctgacaagcaggacaagcttcatggctgcctggagcacctctttaaccaggtggactccatcaatgctctcctcaaggggccagtcatgagccgggctttcgaagagaccaagcatttccctatgaaccacagcttacaagagtttaaacagaaagaagagtgtacaatccgtggccggagcctgatccagattagcatccaggaggacccctggaacctccccaactccatcaagaccctggtggacaacattcagagatatgtggaagatgggaagaaccagctgctcctggccttgctgaagtgcacagacacggagctgcagctgcgcagagacgcgatcttctgccaggccctggtggccgccgtgtgcaccttctccaagcagctgctggcggccctgggctaccgctacaacaacaatggcgagtacgaggagagcagccgcgacgccagccgcaagtggctggagcaggtggcggccacgggcgtcctgctgcactgccagtccctgctctcgccagccacagtgaaggaggaacggaccatgctggaggacatctgggtgacgctgtcagagctggacaatgtcaccttctcctttaagcagctggacgagaactatgtggccaacaccaacgtcttctaccacattgagggcagccggcaggcgctgaaggtcatcttctacctcgacagctaccacttctccaagctgccctcccgcctggagggtggggccagcctgaggctgcacacagcgctgttcacgaaagtgctggagaacgtggaggggctgccttctccaggcagccaggccgcggaggatttgcagcaggacatcaacgcgcagtccctggagaaagttcagcagtattaccgcaaactcagggcattttacctggagcggtctaacctgcccacggatgccagcaccacggcggtaaagatagaccagctgatccgccccatcaatgccctggatgagctctgccgcctcatgaagtcctttgtccacccaaagcctggtgctgctgggagtgtgggcgccggcctcatccccatctcctcggagctctgctaccgcctgggggcctgccagatggtcatgtgtggcacaggcatgcagaggagcaccctgagcgtgtccctggagcaggcggccatcttggcacggagccacgggttgctgcccaagtgcatcatgcaggccacggacatcatgcggaagcagggcccaagggtggagattctggccaaaaacctgcgagtcaaggaccagatgccccagggtgctccgcgcctctaccgcctctgccagccgccggtggatggggacctctgaacacccaaatgccccacgctgggccgcggcctctggagctgggatttgggaggacacagcaggcagcgctggccttctccagggatggcccaaggcttccgcagccgcccgttccgggacctgcccagcgtcctccctgcctccttccgggacaagcctggccaccctcgctgtgatgacgagctggctgattggccctgggccggcccattcttcacacgcctgccagaagctggaggggtgctggagacccatagagctgatgggagcagctggtgcctggccttcggctcctgcgtccccagaacccaagggaacgtcatggaggccacatggggccacccggctccctcgggatggctccgcctgcacttttgaaaccccggtttccttcaacgtccacattccaggtgaccacacgtgtctcctcctcctcatcttagcttccaggttcaccctaaccctgtactaacctgcttggtggacttggaaaagacttggctctgtcgggaaaggagagacggggcctccatcacgcctgttaccagaggatccccgagagccacaccagctctggacatcaccgcccctggaactggggccaccagccctgggcacgagatttgctctgactttatttatatggcatgaaatctctggtttattttgggattttttgttgttggtgttgtcaaagtttgttttttctaaagttgtgtgattatatatttgacattttacatttcaaagaaaggtatgttgtctaacaggggaccaacagaaggtagtattgacaactgttcctgcttctactaaaaaaaaaagagcacaaaagaaaaactaaattattgaaaaattaaaaaatgtcattgtttcctgtttgtt

SEQ ID NO: 11879 - protein, 956 aa, Homo sapiens
MGLEQIIKIPDQPDTLCFQIRGAAPPYVYAVGRGSEAMAAGLCAGQCILKVNGSNVMNDGAPEVLEHFQAFRSRREEALGLYQWIYHTHEDAQEARASQEASTEDPSGEQAQEEDQADSAFPLLSLGPRLSLCEDSPMVTLTVDNVHLEHGVVYEYVSTAGVRCHVLEKIVEPRGCFGLTAKILEAFAANDSVFVENCRRLMALSSAIVTMPHFEFRNICDTKLESIGQRIACYQEFAAQLKSRVSPPFKQAPLEPHPLCGLDFCPTNCHINLMEVSYPKTTPSVGRSFSIRFGRKPSLIGLDPEQGHLNPMSYTQHCITTMAAPSWKCLPAAEGDPQGQGLHDGSFGPASGTLGQEDRGLSFLLKQEDREIQDAYLQLFTKLDVALKEMKQYVTQINRLLSTITEPTSGGSCDASLAEEASSLPLVSEESEMDRSDHGGIKKVCFKVAEEDQEDSGHDTMSYRDSYSECNSNRDSVLSYTSVRSNSSYLGSDEMGSGDELPCDMRIPSDKQDKLHGCLEHLFNQVDSINALLKGPVMSRAFEETKHFPMNHSLQEFKQKEECTIRGRSLIQISIQEDPWNLPNSIKTLVDNIQRYVEDGKNQLLLALLKCTDTELQLRRDAIFCQALVAAVCTFSKQLLAALGYRYNNNGEYEESSRDASRKWLEQVAATGVLLHCQSLLSPATVKEERTMLEDIWVTLSELDNVTFSFKQLDENYVANTNVFYHIEGSRQALKVIFYLDSYHFSKLPSRLEGGASLRLHTALFTKVLENVEGLPSPGSQAAEDLQQDINAQSLEKVQQYYRKLRAFYLERSNLPTDASTTAVKIDQLIRPINALDELCRLMKSFVHPKPGAAGSVGAGLIPISSELCYRLGACQMVMCGTGMQRSTLSVSLEQAAILARSHGLLPKCIMQATDIMRKQGPRVEILAKNLRVKDQMPQGAPRLYRLCQPPVDGDL

SEQ ID NO: 11880 - DNA, 5888 bp, Homo sapiens
cggcgccgcgcggccgcgctagaatggaggcgcccagcggcagcgagcccggcggcgacggggccggggactgcgcccacccggacccccgggcccctggcgccgcggcgcccagctccggccccggcccgtgcgcggccgcccgggagtccgagcgccagctgcgcctccgcctctgcgtcctcaacgagatcttgggcaccgagagggactacgtgggcaccttgcgcttcttgcagtcggcattcctgcatcgcatccggcagaacgtggccgactcagtggagaagggcctcacggaggagaatgtcaaggtcctgttctcgaacatcgaagacatcctggaagttcataaggatttcttggccgccttggagtattgtttacacccggagccgcagtctcagcatgaacttgggaatgttttcttaaaattcaaggacaagttctgcgtgtacgaggagtattgcagcaaccatgagaaagccctgaggctgctggtggagctgaacaagatccctaccgtgcgcgccttccttttgagctgcatgcttctgggaggccggaagaccacggacatccctttggaaggctacctgttgtctccgatccagaggatctgcaagtacccgctcctccttaaggagctggccaagaggactcccggcaagcacccagaccaccccgcggtccagagtgccctgcaggccatgaagaccgtttgctccaacatcaatgagaccaagcggcagatggagaagctggaagccctggagcagctgcagtcccacatcgaaggctgggagggttccaacctcacagacatctgcactcagctcctcctgcaagggactttgttaaagatctctgcgggcaacatccaggaaagggccttcttcctcttcgacaaccttctcgtctactgcaagcggaaatccagggtcaccgggagcaagaagtccaccaagaggaccaaatccatcaacggctccctctacatcttcaggggtcgaatcaacactgaagtcatggaggtggagaatgtggaagatgggacagcggattaccatagcaacggctataccgtcaccaacggctggaagatccacaacacggccaagaataagtggtttgtctgcatggccaagacggcagaggagaagcagaagtggctggatgccatcatccgcgagcgggagcagcgcgagagcctgaagctgggcatggagcgtgatgcctacgtcatgattgcggagaagggggagaagctgtaccacatgatgatgaacaagaaggtgaacctcatcaaggaccgccggagaaagctgagcactgtccccaagtgctttcttggcaatgagttcgttgcctggctcctagaaattggtgaaatcagcaagacggaagaaggagtcaacttgggccaagccctgttggagaatggcatcatccaccatgtttccgacaagcaccagttcaagaatgagcaggtgatgtatcgcttccgctacgacgatggcacctacaaggcccgaagtgagctggaggacatcatgtccaagggtgtgaggctttactgccgtcttcacagcctctacaccccggtgatcaaagaccgtgattaccacctgaagacctacaagtcagtgcttcccgggagcaagctggtggactggctgctggctcagggagactgccagactcgggaggaggcagtggcgctcggcgtgggtctgtgcaacaatggcttcatgcaccacgtgctggagaagagcgagttcagggatgagtcccagtacttccgctttcatgctgacgaggagatggaggggaccagcagcaagaacaaacagcttcgcaacgacttcaagctggtggagaacattctggccaagcgcctgctgatcctgccccaggaggaggactatggctttgacatcgaggagaagaacaaggctgtggtggtgaagtccgtccagaggggctcgctggctgaggtggctggcctgcaggtggggaggaagatctactccatcaatgaggacctggtgttcctgcggccgttttcagaggtggagtccatcctcaaccagtccttctgctcccgccgccctctgcgcctcctggtggccacgaaggccaaagagatcatcaaaatccccgaccagccggacacactgtgcttccagattcgtggagctgccccaccgtacgtctatgctgtggggagaggctctgaggccatggctgcagggctctgtgctggtcagtgcattctgaaggtcaatggcagcaacgtgatgaacgatggtgcccctgaggtcctggagcacttccaggcattccggagtcggcgcgaagaggccctgggcctgtaccagtggatctaccacacccatgaggatgcccaggaagcacgagccagtcaggaggcctccactgaggaccccagtggcgagcaggcccaggaggaagaccaggctgattcagccttcccactgctgtccctgggtccccggctgagcctgtgtgaggacagccccatggtcaccctgactgtggacaacgtgcacctggaacacggcgtggtgtatgagtatgtgagcacggcaggcgtcaggtgccatgtgctggagaagatcgtggagccccgcggctgcttcggcctcaccgccaagatcctcgaggcctttgctgccaatgacagcgtcttcgtggagaactgcaggcggctcatggccctgagcagcgccatcgtgaccatgccccactttgagttccgcaacatctgtgacaccaagctggagagcattggccagaggattgcctgctaccaggagtttgcagcccaactgaagagcagggtcagcccacccttcaaacaagcccccctggagccccacccgctgtgtggcctggacttctgccccaccaattgccacatcaacctcatggaagtgtcctaccccaagaccaccccctcagtgggcaggtccttcagcatccgctttggacgcaaaccctccctcatcggccttgacccggagcaaggccacctgaaccccatgtcgtacacccagcactgcatcaccaccatggctgctccctcctggaagtgcttgcctgctgcagagggtgatccccaaggccagggtctccatgatggcagcttcgggccagccagtgggacccttggtcaggaagaccggggcctcagcttcctactcaagcaggaggaccgtgagatccaggatgcctacctgcagctcttcaccaagctggatgtggccctgaaggagatgaagcaatatgtcacccagatcaacaggctgctgtccaccatcacagagcccacctcgggtgggtcctgcgacgcatccttggctgaggaggcctcctccctgcccctggtcagtgaagagagcgagatggacaggagtgaccatgggggcatcaagaaggtgtgcttcaaggtggccgaggaggaccaggaggactcaggccacgacaccatgagttatcgcgactcctacagcgagtgtaacagcaatcgagactcggtcctgtcctacaccagcgtgagaagtaacagctcctacttgggcagcgacgagatggggtctggagatgagctgccctgtgacatgcggatcccatctgacaagcaggacaagcttcatggctgcctggagcacctctttaaccaggtggactccatcaatgctctcctcaaggggccagtcatgagccgggctttcgaagagaccaagcatttccctatgaaccacagcttacaagagtttaaacagaaagaagagtgtacaatccgtggccggagcctgatccagattagcatccaggaggacccctggaacctccccaactccatcaagaccctggtggacaacattcagagatatgtggaagatgggaagaaccagctgctcctggccttgctgaagtgcacagacacggagctgcagctgcgcagagacgcgatcttctgccaggccctggtggccgccgtgtgcaccttctccaagcagctgctggcggccctgggctaccgctacaacaacaatggcgagtacgaggagagcagccgcgacgccagccgcaagtggctggagcaggtggcggccacgggcgtcctgctgcactgccagtccctgctctcgccagccacagtgaaggaggaacggaccatgctggaggacatctgggtgacgctgtcagagctggacaatgtcaccttctcctttaagcagctggacgagaactatgtggccaacaccaacgtcttctaccacattgagggcagccggcaggcgctgaaggtcatcttctacctcgacagctaccacttctccaagctgccctcccgcctggagggtggggccagcctgaggctgcacacagcgctgttcacgaaagtgctggagaacgtggaggggctgccttctccaggcagccaggccgcggaggatttgcagcaggacatcaacgcgcagtccctggagaaagttcagcagtattaccgcaaactcagggcattttacctggagcggtctaacctgcccacggatgccagcaccacggcggtaaagatagaccagctgatccgccccatcaatgccctggatgagctctgccgcctcatgaagtcctttgtccacccaaagcctggtgctgctgggagtgtgggcgccggcctcatccccatctcctcggagctctgctaccgcctgggggcctgccagatggtcatgtgtggcacaggcatgcagaggagcaccctgagcgtgtccctggagcaggcggccatcttggcacggagccacgggttgctgcccaagtgcatcatgcaggccacggacatcatgcggaagcagggcccaagggtggagattctggccaaaaacctgcgagtcaaggaccagatgccccagggtgctccgcgcctctaccgcctctgccagccgccggtggatggggacctctgaacacccaaatgccccacgctgggccgcggcctctggagctgggatttgggaggacacagcaggcagcgctggccttctccagggatggcccaaggcttccgcagccgcccgttccgggacctgcccagcgtcctccctgcctccttccgggacaagcctggccaccctcgctgtgatgacgagctggctgattggccctgggccggcccattcttcacacgcctgccagaagctggaggggtgctggagacccatagagctgatgggagcagctggtgcctggccttcggctcctgcgtccccagaacccaagggaacgtcatggaggccacatggggccacccggctccctcgggatggctccgcctgcacttttgaaaccccggtttccttcaacgtccacattccaggtgaccacacgtgtctcctcctcctcatcttagcttccaggttcaccctaaccctgtactaacctgcttggtggacttggaaaagacttggctctgtcgggaaaggagagacggggcctccatcacgcctgttaccagaggatccccgagagccacaccagctctggacatcaccgcccctggaactggggccaccagccctgggcacgagatttgctctgactttatttatatggcatgaaatctctggtttattttgggattttttgttgttggtgttgtcaaagtttgttttttctaaagttgtgtgattatatatttgacattttacatttcaaagaaaggtatgttgtctaacaggggaccaacagaaggtagtattgacaactgttcctgcttctactaaaaaaaaaagagcacaaaagaaaaactaaattattgaaaaattaaaaaatgtcattgtttcctgtttgtt

SEQ ID NO: 11881 - protein, 1659 aa, Homo sapiens; identical to SEQ ID NO: 11877

SEQ ID NO: 11882 - DNA, 2053 bp, Homo sapiens
aggcgcagagggcggcgggagcagaaggactggttgaggatggactccacctctgaaaacggccgcaggaacaccaggtcctcattgatggagtagatcttcctccccacctgcaggccagccacctgggtagggacggcagaggacagacgtgcacaccagttactaagctccttccctcctcaccaaggaagctcaaatgtgttcagcagaagggtgctggcccaagggatccagcaggactgggtgactgcgtgctgtctgtgggcctggcgaagaaagatgaagacctgctgacccgaaccaagattcacaactgcctccttccaaccgctcacatcactggcaaggtcaacctagccgctccggccatgggtatgtcgctccttgcagcccaaagcattcctaattgccacaggggcaagctgggctccagccagcacggcaggtgcatctcccccacccacctgcacacgccccaggcaaagccggaaggccccagggctgaatcctcggccagccacaccctcactctcctaacctatcctcctgtaggctttgcatcagacagcaatgagcttatcttattcaagccactgtgactggttgcagaaaactgagacacctgcttttttcctgtacctccccacaatgtccagcagagggcagtggtggaacacaccaggagcacagccccgggactctgcactcactcccagctactgtagccactgcagacagtgggtcctggactcagtttctccacgtgagcaatgagagaagaggagtcagcgatcattccagaatctcctgggctgggctgcctcaaggagggtgaagagagacaccccgctctgccacctgcacacggtccctgccagctcccccgagggcctcacctcagccagcgagcccctctggacggacttcaccaccacagccttgttcttctcctcgatgtcaaagccatagtcctcctcctggggcaggatctgggggcccagggcagaaggaacccggtcagggagcgaggtgggcctacggccagccccaccgtggcccccacaggaccatgacctcgtcccaggtctagtagggaagtggccagatccaggtgggcgagacagagcaaaacgcaaacagcacctggcagagccagtgctcactctgtgcctgccactggcttaacgaatcacacggatccaaaggtgtccagccaccaagaatgtggagtcagggagtttagggaggagcggtcccaccccagggcaggatggcaggcatgctagaaacaggtctgggggttccccagtgcgggggatacagggaaaggcactcattcagtcaacagacattgattgagatgctgcccatcacacgggccaggcagttctcatgggtgctggagacaccatctagaacaagacaaacaagcccagccctgcttagtgcgggaggccaactataaacaaataaacaaaagaaatacaggatgtgatgcagggagtgtacgtagttggaattaaagcacttaatgggatagggcacggcaagggggcagagaaggtgctatcggagctgaggcctgaacgaaatgaaaaacaaaacttcataaagagtggaggaacatgctccaggcagcagacacagcacgtacaaaggtcctgagggaggccccaaggcactggaggataagaaaagagatcaggaggtcaggcgcaatggctcacgcttgtaatcccagcactttgggaggccgagacgggttgatcgcttgatcccaggagttcaagaccagcctgggcaacatagcaaaaccctgtctttataaaaaatacaaaaattagctgggtgtggtggcgcaggtctgttgtcctagccactggggaggcagaggagaggagagaggagagaggggaggggagaaaggggaagggaggggagagaggggaatggaggggaggggagggaagaaagaaaggggaggagagaaagaaaaggaaggaaggaaggaaggaaggaaggacgggcacgagagagagagagaaagaag

SEQ ID NO: 11883 - protein, 100 aa, Homo sapiens
MREEESAIIPESPGLGCLKEGEERHPALPPAHGPCQLPRGPHLSQRAPLDGLHHHSLVLLLDVKAIVLLLGQDLGAQGRRNPVRERGGPTASPTVAPTGP

SEQ ID NO: 11884 - DNA, 2761 bp, Homo sapiens
gaagacgcgctacctgtctggatctgggcgtgaaagagaagggagcctgaagggccacacattggcaggagaagagttcatgggccttggcctcggtaatttggtgagtggcggagtggataaaagacagatggccagcttccaagaatcggttggtgagaccagctcgcagagtgtggttgtagctgtggacaggatttttactgggtctaccagactggatggaaatgcaatagttgactttgtccgctggctgtgtgctgtgtccatggatgaactggcttccccccaccatcctcgcatgttcagcttgcagaagattgtggagatatcatactacaacatgaatcggatccgactacagtggtctcgaatatggcatgtgattggagatcacttcaataaggttggctgcaaccctaatgaagatgtggctatctttgctgttgactcattaaggcaactctccatgaagtttcttgagaagggtgaattagccaacttccgtttccagaaagattttctgaggccctttgagcatattatgaagaaaaacaggtctcccaccatccgggacatggcgatccgctgcattgcccagatggtgaactcccaggcggccaacatccgctcaggttggaagaacatctttgccgtgttccaccaggcagcctctgatcatgatgggaacattgtggagctggccttccagaccacttgccacattgtcacaactattttccagcaccattttcctgcagccatcgattcctttcaggatgctgtgaagtgcttatcagagttcgcctgcaacgccgctttccctgacacgagcatggaagcgattcggctcatccgcttctgtggcaaatacgtctctgagaggcctcgggtgctacaagaatacacaagtgatgacatgaatgtagctcctggtgacagagtctgggtccgaggctggttccccatcttattcgaactctcctgcatcattaatagatgcaagttagatgtacgaacaaggggactcacagtcatgtttgagatcatgaagagctatggccacacctttgaaaagcactggtggcaggacctgttcagaatcgtgtttcggatttttgacaatatgaaactccctgagcaactgtcagagaaatctgagtggatgacaacaacctgcaatcacgcactttatgctatttgtgatgtttttacccagttttatgaagctttgaatgaagttcttctttctgatgtatttgcacaattgcagtggtgtgtcaaacaagataatgaacagttggcgcgatcaggtacaaattgcttagaaaacttagtaatatccaatggagagaaattcagtcctgaagtctgggatgaaacctgcaactgtatgttggatattttcaaaacaaccatcccacatgttttgctgacatggagacctgtaggaatggaggaagattcatcagaaaagcatttggatgtggatctggaccgccagtctttaagcagcatagataaaaatccctctgagaggggacagagccagctctctaacccaacagatgacagctggaagggtagaccatacgcaaatcagaaactgtttgccagcctcctcatcaagtgtgtggtccagttggaattgatacagaccattgacaacattgtgttctaccctgcgacgagcaaaaaggaggatgcagagcacatggttgccgcccagcaagacacgctggatgcagatatccacatagagacggaggatcagggcatgtataagtacatgtcttcccagcacctcttcaagctgttggactgtttgcaggaatcccattcattctcaaaggccttcaactccaattacgagcagcggactgtcctgtggcgagcaggttttaagggcaagtctaaacccaatcttctaaaacaagaaaccagcagcctggcctgttgtttgaggatcctgtttcgaatgtatgttgatgagaaccgcagggattcctgggaagaaatacagcagagacttttaactgtttgcagtgaagctcttgcctatttcatcactgtgaattctgagagccatcgggaggcctggacaagtctcttgttgttacttctaactaaaaccctcaaaataaatgatgaaaagttcaaagcacatgcttcaatgtactacccctacttgtgtgaaattatgcagtttgacctgatccctgagctccgagcagttctgcggaagttcttcctacggataggtgttgtgtataagatatggataccagaagagccatcacaggtaccagcagcactgtcaccagtgtggtagccctggctgcccaggccagtgctgcagctctgcagaatgttcagcatgccatttctgactggcacatctcgtgaagtttcatagaaacaaggagttggcatcttggatctcagaatggcctggaaacggatggcctctacgctgttccatcacagtctccaactaaggcttatggtatttcattaaactgttgcatacccagttagcacagtaggtggggagtctgcttcatttctatcattccatttttctgattaaactgtcaaatctgtcattgcatatgccatcgttttctagcaaaatcccatgattggctataaacgttttgtaagaagtcactctccttgaaaatactgaacatagctgtataggtttgtgattattagagaatatgttaataaaacttcttgtaacggctaactgccacct

SEQ ID NO: 11885 - protein, 750 aa, Homo sapiens [sequence omitted]

SEQ ID NO: 11886 - DNA, 472 bp, Homo sapiens
ctgatgtatgtgtgtgtgtgtgtgtgtgcacgcacgtgcattttttcatccccatttctaaatcctggtcttatgaaaaatgtgccttgtgttcccccagcaactattttccagcaccattttcctgcagccatcgattcctttcaggatgctgtgaagtgcttatcagagttcgcctgcaacgccgctttccctgacacgagcatggaagcgattcggctcatccgcttctgtggcaaatacgtctctgagaggcctcgggtgctacaagaatacacaagtgatgacatgaatgtagctcctggtgacagagtctgggtccgaggctggttccccatcttattcgaactctcctgcatcattaatagatgcaagttagatgtacgaacaaggtaaccatgttcccgtgcggtggccccttacatcactgaaatgaacctcagtcacttgctcacctgaccccactctcttc

SEQ ID NO: 11887 - protein, 130 aa, Homo sapiens
MYVCVCVCARTCIFSSPFLNPGLMKNVPCVPPATIFQHHFPAAIDSFQDAVKCLSEFACNAAFPDTSMEAIRLIRFCGKYVSERPRVLQEYTSDDMNVAPGDRVWVRGWFPILFELSCIINRCKLDVRTR

SEQ ID NO: 11888 - DNA, 345 bp, Homo sapiens
gaggtgttcaatgttgatcgatccaaggtcgtgcacatagggtctaagacggaagagaacttcctgcccctcttggagcttctattttagagggagacacggccagacaggtctcgaactcctggcctcaagtgatccgcacaccttggcctcccaaaatgctgggattccaggcgtgagccaccgcgcctggcctggagccagggccccatattatctaccgctgtccatctgctctccagcacatcagagcagcccttcccctgtgtgagattcctctccagggcaagacttgaagggagcatcaaggttgcagtggaagaaataaattggaagtggagctgg

SEQ ID NO: 11889 - protein, 76 aa, Homo sapiens
GLRRKRTSCPSWSFYFRGRHGQTGLELLASSDPHTLASQNAGIPGVSHRAWPGARAPYYLPLSICSPAHQSSPSPV

SEQ ID NO: 11890 - DNA, 661 bp, Homo sapiens
ggcttcacggttctcgttttccaaagaggaacacagattcagcgagcggctgctggcttctgacccattttgatgtcagggcttggcacgtaggaggtgttcaatgttgatcgatccaaggtcgtgcacatagggtctaagacggaagagaacttcctgcccctcttggagcttctattttagagggagacacggccagacaggtctcgaactcctggcctcaagtgatccgcacaccttggcctcccaaaatgctgggattccaggcgtgagccaccgcgcctggcctgtcctagggagaatgagcctgatgactttaccattttccacctctaagagccaatcgcaaaggaggctggctggcatcttgtgtctgtctagcatctctaccagtttctgtagaaaaccctcaagctgtgccaagacgatcatgtctggacacagctcttggtgtcacggggtgtctcctcctactgcctatcgccctttgcagccaccagaataatcatgcaggagccagggccccatattatctaccgctgtccatctgctctccagcacatcagagcagcccttcccctgtgtgagattcctctccagggcaagacttgaagggagcatcaaggttgcagtggaagaaataaattggaagtggagctgg

SEQ ID NO: 11891 - protein, 34 aa, Homo sapiens
MQEPGPHIIYRCPSALQHIRAALPLCEIPLQGKT

SEQ ID NO: 11892 - DNA, 2025 bp, Homo sapiens
cgggccgctcgctcatgcgctctggcctcaggctcgctgtcgcgccattttgccggggtttgaatgtgaggcggagcggcggcaggagcgggtagtgccagctacggtccgcggctggggttccctcctccgtttctgtatccccacgagatcctatagcaatggaactcagcgatgcaaatctgcaaacactaacagaatatttaaagaaaacacttgatcctgatcctgccatccgacgtccagctgagaaatttcttgaatctgttgaaggaaatcagaattatccactgttgcttttgacattactggagaagtcccaggataatgttatcaaagtatgtgcttcagtaacattcaaaaactatattaaaaggaactggagaattgttgaagatgaaccaaacaaaatttgtgaagccgatcgagtggccattaaagccaacatagtgcacttgatgcttagcagcccagagcaaattcagaagcagttaagtgatgcaattagcattattggcagagaagattttccacagaaatggcctgacttgctgacagaaatggtgaatcgctttcagagtggagatttccatgttattaatggagtcctccgtacagcacattcattatttaaaagataccgtcatgaatttaagtcaaacgagttatggactgaaattaagcttgttctggatgcctttgctttgcctttgactaatctttttaaggtatggaatgcatcttggtgatatttttaaattaatattttaaattgcttgaatgtttgtatacatgttaagagaatgctttgaaagcttatttgatagataatgtttagagcatttcttttgaaaaatttcaaacctacacagaaatagagatgctatagtgaactcccatctattattacacaaatttaatggttagcaacgttttattttctctgttccctttcttaggaatgttataaaagcaaatcccaagcatcatatcatttcacccaagtattttaaagtatgtgtctctaaaggaagaaatacatatttttatttgactatgtttggagtttaattaattatatatttatacattattttacagtttacaggatactttcctgaatgtgttcttggtgtttgtgaaaatcctataagatttaaagaaatatatatatactttttttcttttttcttttttaaagacagggtctcactctcattgcccaggctggagtgcatgagctattacagtgccactgcaatccagcctgggcaacagagcgaggtcccgtttcttaaaaaacatatatgtgtgtggcgtgtgtatatatatgtatatatattttttcattgtattattacggagactttcaaacatatatagaaagagcataatgaagcctgcatgtgcccagcttcaataattaccaatatcttgccagttttgtttcgtttctccttttattctctgtattgagcaagtcttagacatcatacgtttcacgcgtaagtaccttattctacatcattaaccagtaaggactttttaattaaccacaataccactatcacacctaataatagtaattccttatggatcttttctttagacctatttttgaaggcataaaagcagttgagtttctggagaatttttggatggtgattaatgacttgactggctgctcttcccagagctgtggcagctctcccgtagaagatggggtttgtattggcgcaccaagatctccaacagccagtgtgtgtttcccatctcttgtaggttccatcaatggtgagcaccagcctgaatgcagaagcgctccagtatctccaagggtaccttcaggcagccagtgtgacactgctttaaactgcatttttctaatgggctaaacccagatggtttcctaggaaatcacaggcttctgagcacagctgcattaaaacaaaggaagttctccttttgaacttgtcacgaattccatcttgtaaaggatattaaatgttgctttaacctgaacct

SEQ ID NO: 11893 - protein, 195 aa, Homo sapiens
MELSDANLQTLTEYLKKTLDPDPAIRRPAEKFLESVEGNQNYPLLLLTLLEKSQDNVIKVCASVTFKNYIKRNWRIVEDEPNKICEADRVAIKANIVHLMLSSPEQIQKQLSDAISIIGREDFPQKWPDLLTEMVNRFQSGDFHVINGVLRTAHSLFKRYRHEFKSNELWTEIKLVLDAFALPLTNLFKVWNASW

SEQ ID NO: 11894 - DNA, 3232 bp, Homo sapiens
cgggccgctcgctcatgcgctctggcctcaggctcgctgtcgcgccattttgccggggtttgaatgtgaggcggagcggcggcaggagcgggtagtgccagctacggtccgcggctggggttccctcctccgtttctgtatccccacgagatcctatagcaatggaactcagcgatgcaaatctgcaaacactaacagaatatttaaagaaaacacttgatcctgatcctgccatccgacgtccagctgagaaatttcttgaatctgttgaaggaaatcagaattatccactgttgcttttgacattactggagaagtcccaggataatgttatcaaagtatgtgcttcagtaacattcaaaaactatattaaaaggaactggagaattgttgaagatgaaccaaacaaaatttgtgaagccgatcgagtggccattaaagccaacatagtgcacttgatgcttagcagcccagagcaaattcagaagcagttaagtgatgcaattagcattattggcagagaagattttccacagaaatggcctgacttgctgacagaaatggtgaatcgctttcagagtggagatttccatgttattaatggagtcctccgtacagcacattcattatttaaaagataccgtcatgaatttaagtcaaacgagttatggactgaaattaagcttgttctggatgcctttgctttgcctttgactaatctttttaaggccactattgaactctgcagtacccatgcaaatgatgcctctgccctgaggattctgttttcttccctgatcctgatctcaaaattgttctatagtttaaactttcaggatctccctgaattttttgaagataatatggaaacttggatgaataattttcatactctcttaacattggataataagcttttacaaactgatgatgaagaggaagccggcttattggagctcttaaaatcccagatttgtgataatgccgcactctatgcacaaaagtacgatgaagaattccagcgatacctgcctcgttttgttacagccatctggaatttactagttacaacgggtcaagaggttaaatatgatttgttggtaagtaatgcaattcaatttctggcttcagtttgtgagagacctcattataagaatctatttgaggaccagaacacgctgacaagtatctgtgaaaaggttattgtgcctaacatggaatttagagctgctgatgaagaagcatttgaagataattctgaggagtacataaggagagatttggaaggatctgatattgatactagacgcagggctgcttgtgatctggtacgaggattatgcaagttttttgagggacctgtgacaggaatcttctctggttatgttaattccatgctgcaggaatacgcaaaaaatccatctgtcaactggaaacacaaagatgcagccatctacctagtgacatctttggcatcaaaagcccaaacacagaagcatggaattacacaagcaaatgaacttgtaaacctaactgagttctttgtgaatcacatcctccctgatttaaaatcagctaatgtgaatgaatttcctgtccttaaagctgacggtatcaaatatattatgatttttagaaatcaagtgccaaaagaacatcttttagtctcgattcctctcttgattaatcatcttcaagctgaaagtattgttgttcatacttacgcagctcatgctcttgaacggctctttactatgcgagggcctaacaatgccactctctttacagctgcagaaatcgcaccgtttgttgagattctgctaacaaaccttttcaaagctctcacacttcctggctcttcagaaaatgaatatattatgaaagctatcatgagaagtttttctctcctacaagaagccataatcccctacatccctactctcatcactcagcttacacagaagctattagctgttagtaagaacccaagcaaacctcactttaatcactacatgtttgaagcaatatgtttatccataagaataacttgcaaagctaaccctgctgctgttgtaaattttgaggaggctttgtttttggtgtttactgaaatcttacaaaatgatgtgcaagaatttattccatacgtctttcaagtgatgtctttgcttctggaaacacacaaaaatgacatcccgtcttcctatatggccttatttcctcatctccttcagccagtgctttgggaaagaacaggaaatattcctgctctagtgaggcttcttcaagcattcttagaacgcggttcaaacacaatagcaagtgctgcagctgacaaaattcctgggttactaggtgtctttcagaagctgattgcatccaaagcaaatgaccaccaaggtttttatcttctaaacagtataatagagcacatgcctcctgaatcagttgaccaatataggaaacaaatcttcattctgctattccagagacttcagaattccaaaacaaccaagtttatcaagagttttttagtctttattaatttgtattgcataaaatatggggcactagcactacaagaaatatttgatggtatacaaccaaaaatgtttggaatggttttggaaaaaattattattcctgaaattcagaaggtatctggaaatgtagagaaaaagatctgtgcggttggcataaccaaattactaacagaatgtcccccaatgatggacactgagtataccaaactgtggactccattattacagtctttgattggtctttttgagttacccgaagatgataccattcctgatgaggaacattttattgacatagaagatacaccaggatatcagactgccttctcacagttggcatttgctgggaaaaaagagcatgatcctgtaggtcaaatggtgaataaccccaaaattcacctggcacagtcacttcacaagttgtctaccgcctgtccaggaagggttccatcaatggtgagcaccagcctgaatgcagaagcgctccagtatctccaagggtaccttcaggcagccagtgtgacactgctttaaactgcatttttctaatgggctaaacccagatggtttcctaggaaatcacaggcttctgagcacagctgcattaaaacaaaggaagttctccttttgaacttgtcacgaattccatcttgtaaaggatattaaatgttgctttaacctgaaccttg

SEQ ID NO: 11895 - protein, 971 aa, Homo sapiens; identical to SEQ ID NO: 1975

SEQ ID NO: 11896 - DNA, 2387 bp, Homo sapiens
cgggccgctcgctcatgcgctctggcctcaggctcgctgtcgcgccattttgccggggtttgaatgtgaggcggagcggcggcaggagcgggtagtgccagctacggtccgcggctggggttccctcctccgtttctgtatccccacgagatcctatagcaatggaactcagcgatgcaaatctgcaaacactaacagaatatttaaagaaaacacttgatcctgatcctgccatccgacgtccagctgagaaatttcttgaatctgttgaaggaaatcagaattatccactgttgcttttgacattactggagaagtcccaggataatgttatcaaagtatgtgcttcagtaacattcaaaaactatattaaaaggaactggagaattgttgaagatgaaccaaacaaaatttgtgaagccgatcgagtggccattaaagccaacatagtgcacttgatgcttagcagcccagagcaaattcagaagcagttaagtgatgcaattagcattattggcagagaagattttccacagaaatggcctgacttgctgacagaaatggtgaatcgctttcagagtggagatttccatgttattaatggagtcctccgtacagcacattcattatttaaaagataccgtcatgaatttaagtcaaacgagttatggactgaaattaagcttgttctggatgcctttgctttgcctttgactaatctttttaaggtatggaatgcatcttggtgatatttttaaattaatattttaaattgcttgaatgtttgtatacatgttaagagaatgctttgaaagcttatttgatagataatgtttagagcatttcttttgaaaaatttcaaacctacacagaaatagagatgctatagtgaactcccatctattattacacaaatttaatggttagcaacgttttattttctctgttccctttcttaggaatgttataaaagcaaatcccaagcatcatatcatttcacccaagtattttaaagtatgtgtctctaaaggaagaaatacatatttttatttgactatgtttggagtttaattaattatatatttatacattattttacagtttacaggatactttcctgaatgtgttcttggtgtttgtgaaaatcctataagatttaaagaaatatatatatactttttttcttttttcttttttaaagacagggtctcactctcattgcccaggctggagtgcatgagctattacagtgccactgcaatccagcctgggcaacagagcgaggtcccgtttcttaaaaaacatatatgtgtgtggcgtgtgtatatatatgtatatatattttttcattgtattattacggagactttcaaacatatatagaaagagcataatgaagcctgcatgtgcccagcttcaataattaccaatatcttgccagttttgtttcgtttctccttttattctctgtattgagcaagtcttagacatcatacgtttcacgcgtaagtaccttattctacatcattaaccagtaaggactttttaattaaccacaataccactatcacacctaataatagtaattccttatggatcttttctttagacctatttttgaaggcataaaagcagttgagtttctggagaatttttggatggtgattaatgacttgactggctgctcttcccagagctgtggcagctctcccgtagaagatggggtttgtattggcgcaccaagatctccaacagccagtgtgtgtttcccatctcttgtaggttccatcaatggtgagcaccagcctgaatgcagaagcgctccagtatctccaagggtaccttcaggcagccagtgtgacactgctttaaactgcatttttctaatgggctaaacccagatggtttcctaggaaatcacaggcttctgagcacagctgcattaaaacaaaggaagttctccttttgaacttgtcacgaattccatcttgtaaaggatattaaatgttgctttaacctgaaccttgagcaaattagttggtttgtgtgatcatacagttatgtgggtggcttctagtttgcaacttcaagggacaagtattaatagttcagtgtatggcgttggtttgtgttgagcgtttgcacggtttggataatcttaaattttgacggacactgtggagactttctgttactaaatccttttgttttgaagctgttgctatttgtatttctcttgtcctttatattttttgtctgtttatttacgcttttattggaaatgtgaataagtaaagaattacttgtgttacttgccaagcagtgcacatttcatagtttcaaatctgtaatcagcaataaaaatcctaaaatatgtacctaagaac

SEQ ID NO: 11897 - protein, 195 aa, Homo sapiens; identical to SEQ ID NO: 11893

SEQ ID NO: 11898 - DNA, 3592 bp, Homo sapiens
cgggccgctcgctcatgcgctctggcctcaggctcgctgtcgcgccattttgccggggtttgaatgtgaggcggagcggcggcaggagcgggtagtgccagctacggtccgcggctggggttccctcctccgtttctgtatccccacgagatcctatagcaatggaactcagcgatgcaaatctgcaaacactaacagaatatttaaagaaaacacttgatcctgatcctgccatccgacgtccagctgagaaatttcttgaatctgttgaaggaaatcagaattatccactgttgcttttgacattactggagaagtcccaggataatgttatcaaagtatgtgcttcagtaacattcaaaaactatattaaaaggaactggagaattgttgaagatgaaccaaacaaaatttgtgaagccgatcgagtggccattaaagccaacatagtgcacttgatgcttagcagcccagagcaaattcagaagcagttaagtgatgcaattagcattattggcagagaagattttccacagaaatggcctgacttgctgacagaaatggtgaatcgctttcagagtggagatttccatgttattaatggagtcctccgtacagcacattcattatttaaaagataccgtcatgaatttaagtcaaacgagttatggactgaaattaagcttgttctggatgcctttgctttgcctttgactaatctttttaaggccactattgaactctgcagtacccatgcaaatgatgcctctgccctgaggattctgttttcttccctgatcctgatctcaaaattgttctatagtttaaactttcaggatctccctgaattttttgaagataatatggaaacttggatgaataattttcatactctcttaacattggataataagcttttacaaactgatgatgaagaggaagccggcttattggagctcttaaaatcccagatttgtgataatgccgcactctatgcacaaaagtacgatgaagaattccagcgatacctgcctcgttttgttacagccatctggaatttactagttacaacgggtcaagaggttaaatatgatttgttggtaagtaatgcaattcaatttctggcttcagtttgtgagagacctcattataagaatctatttgaggaccagaacacgctgacaagtatctgtgaaaaggttattgtgcctaacatggaatttagagctgctgatgaagaagcatttgaagataattctgaggagtacataaggagagatttggaaggatctgatattgatactagacgcagggctgcttgtgatctggtacgaggattatgcaagttttttgagggacctgtgacaggaatcttctctggttatgttaattccatgctgcaggaatacgcaaaaaatccatctgtcaactggaaacacaaagatgcagccatctacctagtgacatctttggcatcaaaagcccaaacacagaagcatggaattacacaagcaaatgaacttgtaaacctaactgagttctttgtgaatcacatcctccctgatttaaaatcagctaatgtgaatgaatttcctgtccttaaagctgacggtatcaaatatattatgatttttagaaatcaagtgccaaaagaacatcttttagtctcgattcctctcttgattaatcatcttcaagctgaaagtattgttgttcatacttacgcagctcatgctcttgaacggctctttactatgcgagggcctaacaatgccactctctttacagctgcagaaatcgcaccgtttgttgagattctgctaacaaaccttttcaaagctctcacacttcctggctcttcagaaaatgaatatattatgaaagctatcatgagaagtttttctctcctacaagaagccataatcccctacatccctactctcatcactcagcttacacagaagctattagctgttagtaagaacccaagcaaacctcactttaatcactacatgtttgaagcaatatgtttatccataagaataacttgcaaagctaaccctgctgctgttgtaaattttgaggaggctttgtttttggtgtttactgaaatcttacaaaatgatgtgcaagaatttattccatacgtctttcaagtgatgtctttgcttctggaaacacacaaaaatgacatcccgtcttcctatatggccttatttcctcatctccttcagccagtgctttgggaaagaacaggaaatattcctgctctagtgaggcttcttcaagcattcttagaacgcggttcaaacacaatagcaagtgctgcagctgacaaaattcctgggttactaggtgtctttcagaagctgattgcatccaaagcaaatgaccaccaaggtttttatcttctaaacagtataatagagcacatgcctcctgaatcagttgaccaatataggaaacaaatcttcattctgctattccagagacttcagaattccaaaacaaccaagtttatcaagagttttttagtctttattaatttgtattgcataaaatatggggcactagcactacaagaaatatttgatggtatacaaccaaaaatgtttggaatggttttggaaaaaattattattcctgaaattcagaaggtatctggaaatgtagagaaaaagatctgtgcggttggcataaccaaattactaacagaatgtcccccaatgatggacactgagtataccaaactgtggactccattattacagtctttgattggtctttttgagttacccgaagatgataccattcctgatgaggaacattttattgacatagaagatacaccaggatatcagactgccttctcacagttggcatttgctgggaaaaaagagcatgatcctgtaggtcaaatggtgaataaccccaaaattcacctggcacagtcacttcacaagttgtctaccgcctgtccaggaagggttccatcaatggtgagcaccagcctgaatgcagaagcgctccagtatctccaagggtaccttcaggcagccagtgtgacactgctttaaactgcatttttctaatgggctaaacccagatggtttcctaggaaatcacaggcttctgagcacagctgcattaaaacaaaggaagttctccttttgaacttgtcacgaattccatcttgtaaaggatattaaatgttgctttaacctgaaccttgagcaaattagttggtttgtgtgatcatacagttatgtgggtggcttctagtttgcaacttcaagggacaagtattaatagttcagtgtatggcgttggtttgtgttgagcgtttgcacggtttggataatcttaaattttgacggacactgtggagactttctgttactaaatccttttgttttgaagctgttgctatttgtatttctcttgtcctttatattttttgtctgtttatttacgcttttattggaaatgtgaataagtaaagaattacttgtgttacttgccaagcagtgcacatttcatagtttcaaatctgtaatcagcaataaaaatcctaaaatatgtacctaagaac

SEQ ID NO: 11899 - protein, 971 aa, Homo sapiens; identical to SEQ ID NO: 1975

SEQ ID NO: 11900 - DNA, 2453 bp, Homo sapiens
cgggccgctcgctcatgcgctctggcctcaggctcgctgtcgcgccattttgccggggtttgaatgtgaggcggagcggcggcaggagcgggtagtgccagctacggtccgcggctggggttccctcctccgtttctgtatccccacgagatcctatagcaatggaactcagcgatgcaaatctgcaaacactaacagaatatttaaagaaaacacttgatcctgatcctgccatccgacgtccagctgagaaatttcttgaatctgttgaaggaaatcagaattatccactgttgcttttgacattactggagaagtcccaggataatgttatcaaagtatgtgcttcagtaacattcaaaaactatattaaaaggaactggagaattgttgaagatgaaccaaacaaaatttgtgaagccgatcgagtggccattaaagccaacatagtgcacttgatgcttagcagcccagagcaaattcagaagcagttaagtgatgcaattagcattattggcagagaagattttccacagaaatggcctgacttgctgacagaaatggtgaatcgctttcagagtggagatttccatgttattaatggagtcctccgtacagcacattcattatttaaaagataccgtcatgaatttaagtcaaacgagttatggactgaaattaagcttgttctggatgcctttgctttgcctttgactaatctttttaaggtatggaatgcatcttggtgatatttttaaattaatattttaaattgcttgaatgtttgtatacatgttaagagaatgctttgaaagcttatttgatagataatgtttagagcatttcttttgaaaaatttcaaacctacacagaaatagagatgctatagtgaactcccatctattattacacaaatttaatggttagcaacgttttattttctctgttccctttcttaggaatgttataaaagcaaatcccaagcatcatatcatttcacccaagtattttaaagtatgtgtctctaaaggaagaaatacatatttttatttgactatgtttggagtttaattaattatatatttatacattattttacagtttacaggatactttcctgaatgtgttcttggtgtttgtgaaaatcctataagatttaaagaaatatatatatactttttttcttttttcttttttaaagacagggtctcactctcattgcccaggctggagtgcatgagctattacagtgccactgcaatccagcctgggcaacagagcgaggtcccgtttcttaaaaaacatatatgtgtgtggcgtgtgtatatatatgtatatatattttttcattgtattattacggagactttcaaacatatatagaaagagcataatgaagcctgcatgtgcccagcttcaataattaccaatatcttgccagttttgtttcgtttctccttttattctctgtattgagcaagtcttagacatcatacgtttcacgcgtaagtaccttattctacatcattaaccagtaaggactttttaattaaccacaataccactatcacacctaataatagtaattccttatggatcttttctttagacctatttttgaaggcataaaagcagttgagtttctggagaatttttggatggtgattaatgacttgactggctgctcttcccagagctgtggcagctctcccgtagaagatggggtttgtattggcgcaccaagatctccaacagccagtgtgtgtttcccatctcttgtaggttccatcaatggtgagcaccagcctgaatgcagaagcgctccagtatctccaagggtaccttcaggcagccagtgtgacactgctttaaactgcatttttctaatgggctaaacccagatggtttcctaggaaatcacaggcttctgagcacagctgcattaaaacaaaggaagttctccttttgaacttgtcacgaattccatcttgtaaaggatattaaatgttgctttaacctgaaccttgagcaaattagttggtttgtgtgatcatacagttatgtgggtggcttctagtttgcaacttcaagggacaagtattaatagttcagtgtatggcgttggtttgtgttgagcgtttgcacggtttggataatcttaaattttgacggacactgtggagactttctgttactaaatccttttgttttgaagctgttgctatttgtatttctcttgtcctttatattttttgtctgtttatttacgcttttattggaaatgtgaataagtaaagaattacttgtgttacttgccaagcagtgcacatttcatagtttcaaatctgtaatcagcaataaaaatcctaaaatatgtacctaagaacatcttaagggcaggttttcagtgctctctcatgcttttataaaaatgaagaatttctttaaatttc

SEQ ID NO: 11901 - protein, 195 aa, Homo sapiens; identical to SEQ ID NO: 11893

SEQ ID NO: 11902 - DNA, 3658 bp, Homo sapiens
cgggccgctcgctcatgcgctctggcctcaggctcgctgtcgcgccattttgccggggtttgaatgtgaggcggagcggcggcaggagcgggtagtgccagctacggtccgcggctggggttccctcctccgtttctgtatccccacgagatcctatagcaatggaactcagcgatgcaaatctgcaaacactaacagaatatttaaagaaaacacttgatcctgatcctgccatccgacgtccagctgagaaatttcttgaatctgttgaaggaaatcagaattatccactgttgcttttgacattactggagaagtcccaggataatgttatcaaagtatgtgcttcagtaacattcaaaaactatattaaaaggaactggagaattgttgaagatgaaccaaacaaaatttgtgaagccgatcgagtggccattaaagccaacatagtgcacttgatgcttagcagcccagagcaaattcagaagcagttaagtgatgcaattagcattattggcagagaagattttccacagaaatggcctgacttgctgacagaaatggtgaatcgctttcagagtggagatttccatgttattaatggagtcctccgtacagcacattcattatttaaaagataccgtcatgaatttaagtcaaacgagttatggactgaaattaagcttgttctggatgcctttgctttgcctttgactaatctttttaaggccactattgaactctgcagtacccatgcaaatgatgcctctgccctgaggattctgttttcttccctgatcctgatctcaaaattgttctatagtttaaactttcaggatctccctgaattttttgaagataatatggaaacttggatgaataattttcatactctcttaacattggataataagcttttacaaactgatgatgaagaggaagccggcttattggagctcttaaaatcccagatttgtgataatgccgcactctatgcacaaaagtacgatgaagaattccagcgatacctgcctcgttttgttacagccatctggaatttactagttacaacgggtcaagaggttaaatatgatttgttggtaagtaatgcaattcaatttctggcttcagtttgtgagagacctcattataagaatctatttgaggaccagaacacgctgacaagtatctgtgaaaaggttattgtgcctaacatggaatttagagctgctgatgaagaagcatttgaagataattctgaggagtacataaggagagatttggaaggatctgatattgatactagacgcagggctgcttgtgatctggtacgaggattatgcaagttttttgagggacctgtgacaggaatcttctctggttatgttaattccatgctgcaggaatacgcaaaaaatccatctgtcaactggaaacacaaagatgcagccatctacctagtgacatctttggcatcaaaagcccaaacacagaagcatggaattacacaagcaaatgaacttgtaaacctaactgagttctttgtgaatcacatcctccctgatttaaaatcagctaatgtgaatgaatttcctgtccttaaagctgacggtatcaaatatattatgatttttagaaatcaagtgccaaaagaacatcttttagtctcgattcctctcttgattaatcatcttcaagctgaaagtattgttgttcatacttacgcagctcatgctcttgaacggctctttactatgcgagggcctaacaatgccactctctttacagctgcagaaatcgcaccgtttgttgagattctgctaacaaaccttttcaaagctctcacacttcctggctcttcagaaaatgaatatattatgaaagctatcatgagaagtttttctctcctacaagaagccataatcccctacatccctactctcatcactcagcttacacagaagctattagctgttagtaagaacccaagcaaacctcactttaatcactacatgtttgaagcaatatgtttatccataagaataacttgcaaagctaaccctgctgctgttgtaaattttgaggaggctttgtttttggtgtttactgaaatcttacaaaatgatgtgcaagaatttattccatacgtctttcaagtgatgtctttgcttctggaaacacacaaaaatgacatcccgtcttcctatatggccttatttcctcatctccttcagccagtgctttgggaaagaacaggaaatattcctgctctagtgaggcttcttcaagcattcttagaacgcggttcaaacacaatagcaagtgctgcagctgacaaaattcctgggttactaggtgtctttcagaagctgattgcatccaaagcaaatgaccaccaaggtttttatcttctaaacagtataatagagcacatgcctcctgaatcagttgaccaatataggaaacaaatcttcattctgctattccagagacttcagaattccaaaacaaccaagtttatcaagagttttttagtctttattaatttgtattgcataaaatatggggcactagcactacaagaaatatttgatggtatacaaccaaaaatgtttggaatggttttggaaaaaattattattcctgaaattcagaaggtatctggaaatgtagagaaaaagatctgtgcggttggcataaccaaattactaacagaatgtcccccaatgatggacactgagtataccaaactgtggactccattattacagtctttgattggtctttttgagttacccgaagatgataccattcctgatgaggaacattttattgacatagaagatacaccaggatatcagactgccttctcacagttggcatttgctgggaaaaaagagcatgatcctgtaggtcaaatggtgaataaccccaaaattcacctggcacagtcacttcacaagttgtctaccgcctgtccaggaagggttccatcaatggtgagcaccagcctgaatgcagaagcgctccagtatctccaagggtaccttcaggcagccagtgtgacactgctttaaactgcatttttctaatgggctaaacccagatggtttcctaggaaatcacaggcttctgagcacagctgcattaaaacaaaggaagttctccttttgaacttgtcacgaattccatcttgtaaaggatattaaatgttgctttaacctgaaccttgagcaaattagttggtttgtgtgatcatacagttatgtgggtggcttctagtttgcaacttcaagggacaagtattaatagttcagtgtatggcgttggtttgtgttgagcgtttgcacggtttggataatcttaaattttgacggacactgtggagactttctgttactaaatccttttgttttgaagctgttgctatttgtatttctcttgtcctttatattttttgtctgtttatttacgcttttattggaaatgtgaataagtaaagaattacttgtgttacttgccaagcagtgcacatttcatagtttcaaatctgtaatcagcaataaaaatcctaaaatatgtacctaagaacatcttaagggcaggttttcagtgctctctcatgcttttataaaaatgaagaatttctttaaatttc

SEQ ID NO: 11903 - protein, 971 aa, Homo sapiens; identical to SEQ ID NO: 1975

SEQ ID NO: 11904 - DNA, 528 bp, Homo sapiens
ggaactcagcgatgcaaatctgcaaacactaacagaatatttaaagaaaacacttgatcctgatcctgccatccgacgtccaggtaaagaaaataaacgttttttggttgattaattccttcaggacaggtgagagaaacctatgtattatctgcctccttataaatatattttaaaaaattcatacttgggttctcaagcgtagtttataagtgttacagctgctataccatggtgtgttgtttcttttttgagtaaaatagcttttatttggcatcttctgggattaaaaagtactagttttcggataaaaagtactgacatgtttagaatgctttgtctttgaccttttccaaaatacccacttaaaacatgcctgctttaggccggatgcggtggctcacacctgtaatcccagcactttgggaggctgaggcaggagaattgcttgaatccaggaagcggaggttgcagttaaccgaggccactgcactccagcctggtgacagagcaagactccgtctcaaa

SEQ ID NO: 11905 - protein, 51 aa, Homo sapiens
MPALGRMRWLTPVIPALWEAEAGELLESRKRRLQLTEATALQPGDRARLRL

SEQ ID NO: 11906 - DNA, 462 bp, Homo sapiens
attgtggaaaataggttaaagtatgtatttttgaactgttcataatggcactaaaaagtccagtgttaatattctgaactacgtcttcccaatctgtgcatatataaaaatatattacacaaaactatctttatatgctcttattaaacaattcatctgccacttggtatttaggttgtttccaattctttattattctaaatgcgattaacaggttttactggccaggcccagtggcacaggctgtaatcccagtgtactcggagaattgcttgaacccgggaggcggaggttgcattgaggctgcagtgagctataatcatgccccactgcactccagcctgggcaatgagagtgagaccctgtctttaaaaaagaaaaaagaaaaaaagtatatatatatttctttaaatcttataggattttcacaaacaccaagaacacattcaggaaagtatcctg

SEQ ID NO: 11907 - protein, 108 aa, Homo sapiens
MLLLNNSSATWYLGCFQFFIILNAINRFYWPGPVAQAVIPVYSENCLNPGGGGCIEAAVSYNHAPLHSSLGNESETLSLKKKKEKKYIYISLNLIGFSQTPRTHSGKY

SEQ ID NO: 11908 - DNA, 713 bp, Homo sapiens
caaggacctttttgcccagttaaccatgtgctaccttgtgctactatttatgccttaagtaatcagtgtgagggagttttggttttggctttggtttttgttcttactctgatgtcttcccttgtctcacttccagcctgggcaacagagggagactgcgtctcaaaaaaaaaaaaaaaaaaccactcctggcctcaggccatcctccagcctcagcctcccagagggttgggattaccggcgtgagccactacactcagccagaatatactgtttgaatctaatacggaaatattttgtaattcagcaacttatttgaaagacttggtgaaaagattggtggtggcatagctgtagtttacaataactgatttgatttggatttaattgataaagagtctagttcaggaatttcagttactcctcttacttatgttagcattagagttgtatgttggagtttttgttttcttttatgtgaggatgaagaggaagccggcttattggagctcttaaaatcccagatttgtgataatgccgcactctatgcacaaaagtacgatgaagaattccagcgatacctgcctcgttttgttacagccatctggaatttactagttacaacgggtcaagaggttaaatatgatttggtaagatgatggtggagacaaataattaaaagacattctctccctatctcctccaagaaataa

SEQ ID NO: 11909 - protein, 44 aa, Homo sapiens
MSSLVSLPAWATEGDCVSKKKKKNHSWPQAILQPQPPRGLGLPA

SEQ ID NO: 11910 - DNA, 727 bp, Homo sapiens
gtgtctttcagaagctgattgcatccaaagcaaatgaccaccaaggtttttatcttctaaacagtataatagacaccagcctgaatgcagaagcgctccagtatctccaagggtaccttcaggcagccagtgtgacactgctttaaactgcatttttctaatgggctaaacccagatggtttcctaggaaatcacaggcttctgagcacagctgcattaaaacaaaggaagttctccttttgaacttgtcacgaattccatcttgtaaaggatattaaatgttgctttaacctgaaccttgagcaaattagttggtttgtgtgatcatacagttatgtgggtggcttctagtttgcaacttcaagggacaagtattaatagttcagtgtatggcgttggtttgtgttgagcgtttgcacggtttggataatcttaaattttgacggacactgtggagactttctgttactaaatccttttgttttgaagctgttgctatttgtatttctcttgtcctttatattttttgtctgtttatttacgcttttattggaaatgtgaataagtaaagaattacttgtgttacttgccaagcagtgcacatttcatagtttcaaatctgtaatcagcaataaaaatcctaaaatatgtacctaagaacatcttaagggcaggttttcagtgctctctcatgcttttataaaaatgaagaatttctttaaatttc

SEQ ID NO: 11911 - protein, 47 aa, Homo sapiens
VFQKLIASKANDHQGFYLLNSIIDTSLNAEALQYLQGYLQAASVTLL

SEQ ID NO: 11912 - DNA, 1268 bp, Homo sapiens
gggccgagagacacggtgggtaaaggatgtgggcagcagcagggaagacaacagaaacacaaggaggcggctgtggccgggctggactgtgctggggtttgttgtgatggccactcgacacattgggacaaaccctggacagccatgccagagagaggcctttgaccggccccagagctaaaagcaccagagaaaatcaaatgcttcctactcagcgtgacccaacttttctagtgtgccacggccccaccacctcctgcagtacccacaccatcaccactgctttctcttccaacagtgatctgtattcttagtttcattattttcttttgattgatatgacactatataaaattttcatttgagaatttctcaattgtatctagttaaatagcacagtttggaaacttgtctgagactgactttatcaataatctaaccgacaaagatcatatccatgtgtatgtggttagacatttttatttcattgactaacccaggacagtttcagtgatgcaaattgtgtgccctctggttcagctgaaacagtcctggactttcaaaaaccttgaataagtctcccacagttgtataaattggacaatttaggaattttaaactttagatgatcatttggttccatttttatttcatttttatttttgttaatgcaaacaggacttaaatgaactttgatctctgttttaaagattattaaaaaacattgtgtatctatacatatggctcttgaggacttagctttcactacactacaggatatgatctccatgtagtccatataaacctgcagagtgattttccagagtgctcgatactgttaattacatctccattagggctgaaaagaatgacctacgtttctgtatacagctgtgttgcttttgatgttgtgttactgtacacagaagtgtgtgcactgaggctctgcgtgtggtccgtatggaaagcctggtagccctgcgagttaagtactgcttccattcattgtttacgctggaatttttctccccatggaatgtaagtaaaacttaagtgtttgtcatcaataaatggtaatactaaatttttttgttaatttattctcaaatgccactactgctaggttggtcccctcccaacttgcccctatcctttttttatttttaagaaaaaaactttgtaatgcttgtgattccatctgggcaaaagtctgaagatctgaaataactttatatcaaaccattgatcaataaacagctactaatgaa

SEQ ID NO: 11913 - protein, 47 aa, Homo sapiens
MVILNFFVNLFSNATTARLVPSQLAPILFLFLRKKLCNACDSIWAKV

SEQ ID NO: 11914 - DNA, 3395 bp, Homo sapiens
acttcctgccgggctgcgggcgcctgagcggctcttcagcgtttgcgccggcggctgccgcgtctctctcggctcccgcttcctttgaccgcctcccccccccggcccggcggcgcccgcctcctccacggccactccgcctcttccctcccttcgtcccttcttcctctcccttttttccttcttccttcccctcctcgccgccaccgcccaggaccgccggccgggggacgagctcggagcagcagccagagtttattaaccacttaacctctcagaactgaacaaagacaacattgttcctggaacgccctctttttaaaaaagaaagcataacccctactgtagaactaaatgcactgtgcatgaaacttggaaaaaaaccaatgtataagcctgttgacccttactctcggatgcagtccacctataactacaacatgagaggaggtgcttatcccccgaggtacttttacccatttccagttccacctttactttatcaagtggaactttctgtgggaggacagcaatttaatggcaaaggaaagacaagacaggctgcgaaacacgatgctgctgccaaagcgttgaggatcctgcagaatgagcccctgccagagaggctggaggtgaatggaagagaatccgaagaagaaaatctcaataaatctgaaataagtcaagtgtttgagattgcacttaaacggaacttgcctgtgaatttcgaggtggcccgggagagtggcccaccccacatgaagaactttgtgaccaaggtttcggttggggagtttgtgggggaaggtgaagggaaaagcaagaagatttcaaagaaaaatgccgccatagctgttcttgaggagctgaagaagttaccgcccctgcctgcagttgaacgagtaaagcctagaatcaaaaagaaaacaaaacccatagtcaagccacagacaagcccagaatatggccaggggatcaatccgattagccgactggcccagatccagcaggcaaaaaaggagaaggagccagagtacacgctcctcacagagcgaggcctcccgcgccgcagggagtttgtgatgcaggtgaaggttggaaaccacactgcagaaggaacgggcaccaacaagaaggtggccaagcgcaatgcagccgagaacatgctggagatccttggtttcaaagtcccgcaggcgcagcccaccaaacccgcactcaagtcagaggagaagacacccataaagaaaccaggggatggaagaaaagtaaccttttttgaacctggctctggggatgaaaatgggactagtaataaagaggatgagttcaggatgccttatctaagtcatcagcagctgcctgctggaattcttcccatggtgcccgaggtcgcccaggctgtaggagttagtcaaggacatcacaccaaagattttaccagggcagctccgaatcctgccaaggccacggtaactgccatgatagcccgagagttgttgtatgggggcacctcgcccacagccgagaccattttaaagaataacatctcttcaggccacgtaccccatggacctctcacgagaccctctgagcaactggactatctttccagagtccagggattccaggttgaatacaaagacttccccaaaaacaacaagaacgaatttgtatctcttatcaattgctcctctcagccacctctgatcagccatggtatcggcaaggatgtggagtcctgccatgatatggctgcgctgaacatcttaaagttgctgtctgagttggaccaacaaagtacagagatgccaagaacaggaaacggaccaatgtctgtgtgtgggaggtgctgaaccttttctggccatgaaccattataaaatcccaacatatatactgaaaatactgaaactgctttgaaaatttggaatttctgatacctccagtgggccgagagacacggtgggtaaaggatgtgggcagcagcagggaagacaacagaaacacaaggaggcggctgtggccgggctggactgtgctggggtttgttgtgatggccactcggtgacctggcggtccctacgcaatagcagctgcctgtggggaagaagggctgcccagccagctggttctcccgggacaccagcagatccacaccctgggcacctccgtgtttggtcttttttttcccctgtgtgaaagaagaaacggcacgaccccttctcaagctggctcactcagacacattgggacaaaccctggacagccatgccagagagaggcctttgaccggccccagagctaaaagcaccagagaaaatcaaatgcttcctactcagcgtgacccaacttttctagtgtgccacggccccaccacctcctgcagtacccacaccatcaccactgctttctcttccaacagtgatctgtattcttagtttcattattttcttttgattgatatgacactatataaaattttcatttgagaatttctcaattgtatctagttaaatagcacagtttggaaacttgtctgagactgactttatcaataatctaaccgacaaagatcatatccatgtgtatgtggttagacatttttatttcattgactaacccaggacagtttcagtgatgcaaattgtgtgccctctggttcagctgaaacagtcctggactttcaaaaaccttgaataagtctcccacagttgtataaattggacaatttaggaattttaaactttagatgatcatttggttccatttttatttcatttttatttttgttaatgcaaacaggacttaaatgaactttgatctctgttttaaagattattaaaaaacattgtgtatctatacatatggctcttgaggacttagctttcactacactacaggatatgatctccatgtagtccatataaacctgcagagtgattttccagagtgctcgatactgttaattacatctccattagggctgaaaagaatgacctacgtttctgtatacagctgtgttgcttttgatgttgtgttactgtacacagaagtgtgtgcactgaggctctgcgtgtggtccgtatggaaagcctggtagccctgcgagttaagtactgcttccattcattgtttacgctggaatttttctccccatggaatgtaagtaaaacttaagtgtttgtcatcaataaatggtaatactaaatttttttgttaatttattctcaaatgccactactgctaggttggtcccctcccaacttgcccctatcctttttttatttttaagaaaaaaactttgtaatgcttgtgattccatctgggcaaaagtctgaagatctgaaataactttatatcaaaccattgatcaataaacagctactaatgaa

SEQ ID NO: 11915 - protein, 496 aa, Homo sapiens; identical to SEQ ID NO: 1979

SEQ ID NO: 11916 - DNA, 1490 bp, Homo sapiens
attagtagctgtttattgatcaatggtttgatataaagttatttcagatcttcagacttttgcccagatggaatcacaagcattacaaagtttttttcttaaaaataaaaaaaggataggggcaagttgggaggggaccaacctagcagtagtggcatttgagaataaattaacaaaaaaatttagtattaccatttattgatgacaaacacttaagttttacttacattccatggggagaaaaattccagcgtaaacaatgaatggaagcagtacttaactcgcagggctaccaggctttccatacggaccacacgcagagcctcagtgcacacacttctgtgtacagtaacacaacatcaaaagcaacacagctgtatacagaaacgtaggtcattcttttcagccctttaaaacagagatcaaagttcatttaagtcctgtttgcattaacaaaaataaaaatgaaataaaaatggaaccaaatgatcatctaaagtttaaaattcctaaattgtccaatttatacaactgtgggagacttattcaaggtttttgaaagtccaggactgtttcagctgaaccagagggcacacaatttgcatcactgaaactgtcctgggttagtcaatgaaataaaaatgtctaaccacatacacatggatatgatctttgtcggttagattattgataaagtcagtctcagacaagtttccaaactgtgctatttaactagatacaattgagaaattctcaaatgaaaattttatatagtgtcatatcaatcaaaagaaaataatgaaactaagaatacagatcactgttggaagagaaagcagtggtgatggtgtgggtactgcaggaggtggtggggccgtggcacactagaaaagttgggtcacgctgagtaggaagcatttgattttctctggtgcttttagctctggggccggtcaaaggcctctctctggcatggctgtccagggtttgtcccaatgtgtctgagtgagccagcttgagaaggggtcgtgccgtttcttctttcacacaggggaaaaaaaagaccaaacacggaggtgcccagggtgtggatctgctggtgtcccgggagaaccagctggctgggcagcccttcttccccacaggcagctgctattgcgtagggaccgccaggtcaccgagtggccatcacaacaaaccccagcacagtccagcccggccacagccgcctccttgtgtttctgttgtcttccctgctgctgcccacatcctttacccaccgtgtctctcggcccactggaggtatcagaaattccaaattttcaaagcagtttcagtattttcagtatatatgttgggattttataatggttcatggccagaaaaggttcagcacctcccacacctttaaggaagaaaaatgaaaatgacactagttttgaaatgtaagagaattaaagtactgttaaaaatgaaaagaaattggcaaa

SEQ ID NO: 11917 - protein, 44 aa, Homo sapiens [sequence omitted]

SEQ ID NO: 11918 - DNA, 1081 bp, Homo sapiens
gggccgagagacacggtgggtaaaggatgtgggcagcagcagggaagacaacagaaacacaaggaggcggctgtggccgggctggactgtgctggggtttgttgtgatggccactcgacacattgggacaaaccctggacagccatgccagagagaggcctttgaccggccccagagctaaaagcaccagagaaaatcaaatgcttcctactcagcgtgacccaacttttctagtgtgccacggccccaccacctcctgcagtacccacaccatcaccactgctttctcttccaacagtgatctgtattcttagtttcattattttcttttgattgatatgacactatataaaattttcatttgagaatttctcaattgtatctagttaaatagcacagtttggaaacttgtctgagactgactttatcaataatctaaccgacaaagatcatatccatgtgtatgtggttagacatttttatttcattgactaacccaggacagtttcagtgatgcaaattgtgtgccctctggttcagctgaaacagtcctggactttcaaaaaccttgaataagtctcccacagttgtataaattggacaatttaggaattttaaactttagatgatcatttggttccatttttatttcatttttatttttgttaatgcaaacaggacttaaatgaactttgatctctgttttaaagattattaaaaaacattgtgtatctatacatatggctcttgaggacttagctttcactacactacaggatatgatctccatgtagtccatataaacctgcagagtgattttccagagtgctcgatactgttaattacatctccattagggctgaaaagaatgacctacgtttctgtatacagctgtgttgcttttgatgttgtgttactgtacacagaagtgtgtgcactgaggctctgcgtgtggtccgtatggaaagcctggtagccctgcgagttaagtactgcttccattcattgtttacgctggaatttttctccccatggaatgtaagtaaaacttaagtgtttgtcatcaataaatggtaatact

SEQ ID NO: 11919 - protein, 37 aa, Homo sapiens
MLPTQRDPTFLVCHGPTTSCSTHTITTAFSSNSDLYS

SEQ ID NO: 11920 - DNA, 1179 bp, Homo sapiens
gtgtgggaggtgctgaaccttttctggccatgaaccattataaaatcccaacatatatactgaaaatactgaaactgctttgaaaatttggaatttctgatacctccagtgggccgagagacacggtgggtaaaggatgtgggcagcagcagggaagacaacagaaacacaaggaggcggctgtggccgggctggactgtgctggggtttgttgtgatggccactcggtgacctggcggtccctacgcaatagcagctgcctgtggggaagaagggctgcccagccagctggttctcccgggacaccagcagatccacaccctgggcacctccgtgtttggtcttttttttcccctgtgtgaaagaagaaacggcacgaccccttctcaagctggctcactcagacacattgggacaaaccctggacagccatgccagagagaggcctttgaccggccccagagctaaaagcaccagagaaaatcaaatgcttcctactcagcgtgacccaacttttctagtgtgccacggccccaccacctcctgcagtacccacaccatcaccactgctttctcttccaacagtgatctgtattcttagtttcattattttcttttgattgatatgacactatataaaattttcatttgagaatttctcaattgtatctagttaaatagcacattgtataaattggacaatttaggaattttaaactttagatgatcatttggttccatttttatttcatttttatttttgttaatgcaaacaggacttaaatgaactttgatctctgttttaaagattattaaaaaacattgtgtatctatacatatggctcttgaggacttagctttcactacactacaggatatgatctccatgtagtccatataaacctgcagagtgattttccagagtgctcgatactgttaattacatctccattagggctgaaaagaatgacctacgtttctgtatacagctgtgttgcttttgatgttgtgttactgtacacagaagtgtgtgcactgaggctctgcgtgtggtccgtatggaaagcctggtagccctgcgagttaagtactgcttccattcattgtttacgctggaatttttctccccatggaatgtaagtaaaacttaagtgtttgtcatcaataaatggtaatact

SEQ ID NO: 11921 - protein, 37 aa, Homo sapiens; identical to SEQ ID NO: 11919

SEQ ID NO: 11922 - DNA, 3331 bp, Homo sapiens
acttcctgccgggctgcgggcgcctgagcggctcttcagcgtttgcgccggcggctgccgcgtctctctcggctcccgcttcctttgaccgcctcccccccccggcccggcggcgcccgcctcctccacggccactccgcctcttccctcccttcgtcccttcttcctctcccttttttccttcttccttcccctcctcgccgccaccgcccaggaccgccggccgggggacgagctcggagcagcagccaggtggagttttgctcttgtcgcccaggctggagtgcagtggcgtgatctcggctcactgcaacctccacctcccaggttcaagcgattttcccacttcagcctcccgataagctgagattacagagtttattaaccacttaacctctcagaactgaacaaagacaacattgttcctggaacgccctctttttaaaaaagaaagcataacccctactgtagaactaaatgcactgtgcatgaaacttggaaaaaaaccaatgtataagcctgttgacccttactctcggatgcagtccacctataactacaacatgagaggaggtgcttatcccccgaggtacttttacccatttccagttccacctttactttatcaagtggaactttctgtgggaggacagcaatttaatggcaaaggaaagacaagacaggctgcgaaacacgatgctgctgccaaagcgttgaggatcctgcagaatgagcccctgccagagaggctggaggtgaatggaagagaatccgaagaagaaaatctcaataaatctgaaataagtcaagtgtttgagattgcacttaaacggaacttgcctgtgaatttcgaggtggcccgggagagtggcccaccccacatgaagaactttgtgaccaaggtttcggttggggagtttgtgggggaaggtgaagggaaaagcaagaagatttcaaagaaaaatgccgccatagctgttcttgaggagctgaagaagttaccgcccctgcctgcagttgaacgagtaaagcctagaatcaaaaagaaaacaaaacccatagtcaagccacagacaagcccagaatatggccaggggatcaatccgattagccgactggcccagatccagcaggcaaaaaaggagaaggagccagagtacacgctcctcacagagcgaggcctcccgcgccgcagggagtttgtgatgcaggtgaaggttggaaaccacactgcagaaggaacgggcaccaacaagaaggtggccaagcgcaatgcagccgagaacatgctggagatccttggtttcaaagtcccgcaggcgcagcccaccaaacccgcactcaagtcagaggagaagacacccataaagaaaccaggggatggaagaaaagtaaccttttttgaacctggctctggggatgaaaatgggactagtaataaagaggatgagttcaggatgccttatctaagtcatcagcagctgcctgctggaattcttcccatggtgcccgaggtcgcccaggctgtaggagttagtcaaggacatcacaccaaagattttaccagggcagctccgaatcctgccaaggccacggtaactgccatgatagcccgagagttgttgtatgggggcacctcgcccacagccgagaccattttaaagaataacatctcttcaggccacgtaccccatggacctctcacgagaccctctgagcaactggactatctttccagagtccagggattccaggttgaatacaaagacttccccaaaaacaacaagaacgaatttgtatctcttatcaattgctcctctcagccacctctgatcagccatggtatcggcaaggatgtggagtcctgccatgatatggctgcgctgaacatcttaaagttgctgtctgagttggaccaacaaagtacagagatgccaagaacaggaaacggaccaatgtctgtgtgtgggaggtgctgaaccttttctggccatgaaccattataaaatcccaacatatatactgaaaatactgaaactgctttgaaaatttggaatttctgatacctccagtgggccgagagacacggtgggtaaaggatgtgggcagcagcagggaagacaacagaaacacaaggaggcggctgtggccgggctggactgtgctggggtttgttgtgatggccactcggtgacctggcggtccctacgcaatagcagctgcctgtggggaagaagggctgcccagccagctggttctcccgggacaccagcagatccacaccctgggcacctccgtgtttggtcttttttttcccctgtgtgaaagaagaaacggcacgaccccttctcaagctggctcactcagacacattgggacaaaccctggacagccatgccagagagaggcctttgaccggccccagagctaaaagcaccagagaaaatcaaatgcttcctactcagcgtgacccaacttttctagtgtgccacggccccaccacctcctgcagtacccacaccatcaccactgctttctcttccaacagtgatctgtattcttagtttcattattttcttttgattgatatgacactatataaaattttcatttgagaatttctcaattgtatctagttaaatagcacagtttggaaacttgtctgagactgactttatcaataatctaaccgacaaagatcatatccatgtgtatgtggttagacatttttatttcattgactaacccaggacagtttcagtgatgcaaattgtgtgccctctggttcagctgaaacagtcctggactttcaaaaaccttgaataagtctcccacagttgtataaattggacaatttaggaattttaaactttagatgatcatttggttccatttttatttcatttttatttttgttaatgcaaacaggacttaaatgaactttgatctctgttttaaagattattaaaaaacattgtgtatctatacatatggctcttgaggacttagctttcactacactacaggatatgatctccatgtagtccatataaacctgcagagtgattttccagagtgctcgatactgttaattacatctccattagggctgaaaagaatgacctacgtttctgtatacagctgtgttgcttttgatgttgtgttactgtacacagaagtgtgtgcactgaggctctgcgtgtggtccgtatggaaagcctggtagccctgcgagttaagtactgcttccattcattgtttacgctggaatttttctccccatggaatgtaagtaaaacttaagtgtttgtcatcaataaatggtaatact

SEQ ID NO: 11923 - protein, 496 aa, Homo sapiens; identical to SEQ ID NO: 1979

SEQ ID NO: 11924 - DNA, 3133 bp, Homo sapiens
acttcctgccgggctgcgggcgcctgagcggctcttcagcgtttgcgccggcggctgccgcgtctctctcggctcccgcttcctttgaccgcctcccccccccggcccggcggcgcccgcctcctccacggccactccgcctcttccctcccttcgtcccttcttcctctcccttttttccttcttccttcccctcctcgccgccaccgcccaggaccgccggccgggggacgagctcggagcagcagccagaaagcataacccctactgtagaactaaatgcactgtgcatgaaacttggaaaaaaaccaatgtataagcctgttgacccttactctcggatgcagtccacctataactacaacatgagaggaggtgcttatcccccgaggtacttttacccatttccagttccacctttactttatcaagtggaactttctgtgggaggacagcaatttaatggcaaaggaaagacaagacaggctgcgaaacacgatgctgctgccaaagcgttgaggatcctgcagaatgagcccctgccagagaggctggaggtgaatggaagagaatccgaagaagaaaatctcaataaatctgaaataagtcaagtgtttgagattgcacttaaacggaacttgcctgtgaatttcgaggtggcccgggagagtggcccaccccacatgaagaactttgtgaccaaggtttcggttggggagtttgtgggggaaggtgaagggaaaagcaagaagatttcaaagaaaaatgccgccatagctgttcttgaggagctgaagaagttaccgcccctgcctgcagttgaacgagtaaagcctagaatcaaaaagaaaacaaaacccatagtcaagccacagacaagcccagaatatggccaggggatcaatccgattagccgactggcccagatccagcaggcaaaaaaggagaaggagccagagtacacgctcctcacagagcgaggcctcccgcgccgcagggagtttgtgatgcaggtgaaggttggaaaccacactgcagaaggaacgggcaccaacaagaaggtggccaagcgcaatgcagccgagaacatgctggagatccttggtttcaaagtcccgcaggcgcagcccaccaaacccgcactcaagtcagaggagaagacacccataaagaaaccaggggatggaagaaaagtaaccttttttgaacctggctctggggatgaaaatgggactagtaataaagaggatgagttcaggatgccttatctaagtcatcagcagctgcctgctggaattcttcccatggtgcccgaggtcgcccaggctgtaggagttagtcaaggacatcacaccaaagattttaccagggcagctccgaatcctgccaaggccacggtaactgccatgatagcccgagagttgttgtatgggggcacctcgcccacagccgagaccattttaaagaataacatctcttcaggccacgtaccccatggacctctcacgagaccctctgagcaactggactatctttccagagtccagggattccaggttgaatacaaagacttccccaaaaacaacaagaacgaatttgtatctcttatcaattgctcctctcagccacctctgatcagccatggtatcggcaaggatgtggagtcctgccatgatatggctgcgctgaacatcttaaagttgctgtctgagttggaccaacaaagtacagagatgccaagaacaggaaacggaccaatgtctgtgtgtgggaggtgctgaaccttttctggccatgaaccattataaaatcccaacatatatactgaaaatactgaaactgctttgaaaatttggaatttctgatacctccagtgggccgagagacacggtgggtaaaggatgtgggcagcagcagggaagacaacagaaacacaaggaggcggctgtggccgggctggactgtgctggggtttgttgtgatggccactcggtgacctggcggtccctacgcaatagcagctgcctgtggggaagaagggctgcccagccagctggttctcccgggacaccagcagatccacaccctgggcacctccgtgtttggtcttttttttcccctgtgtgaaagaagaaacggcacgaccccttctcaagctggctcactcagacacattgggacaaaccctggacagccatgccagagagaggcctttgaccggccccagagctaaaagcaccagagaaaatcaaatgcttcctactcagcgtgacccaacttttctagtgtgccacggccccaccacctcctgcagtacccacaccatcaccactgctttctcttccaacagtgatctgtattcttagtttcattattttcttttgattgatatgacactatataaaattttcatttgagaatttctcaattgtatctagttaaatagcacagtttggaaacttgtctgagactgactttatcaataatctaaccgacaaagatcatatccatgtgtatgtggttagacatttttatttcattgactaacccaggacagtttcagtgatgcaaattgtgtgccctctggttcagctgaaacagtcctggactttcaaaaaccttgaataagtctcccacagttgtataaattggacaatttaggaattttaaactttagatgatcatttggttccatttttatttcatttttatttttgttaatgcaaacaggacttaaatgaactttgatctctgttttaaagattattaaaaaacattgtgtatctatacatatggctcttgaggacttagctttcactacactacaggatatgatctccatgtagtccatataaacctgcagagtgattttccagagtgctcgatactgttaattacatctccattagggctgaaaagaatgacctacgtttctgtatacagctgtgttgcttttgatgttgtgttactgtacacagaagtgtgtgcactgaggctctgcgtgtggtccgtatggaaagcctggtagccctgcgagttaagtactgcttccattcattgtttacgctggaatttttctccccatggaatgtaagtaaaacttaagtgtttgtcatcaataaatggtaatact

SEQ ID NO: 11925 - protein, 496 aa, Homo sapiens; identical to SEQ ID NO: 1979

SEQ ID NO: 11926 - DNA, 3208 bp, Homo sapiens
acttcctgccgggctgcgggcgcctgagcggctcttcagcgtttgcgccggcggctgccgcgtctctctcggctcccgcttcctttgaccgcctcccccccccggcccggcggcgcccgcctcctccacggccactccgcctcttccctcccttcgtcccttcttcctctcccttttttccttcttccttcccctcctcgccgccaccgcccaggaccgccggccgggggacgagctcggagcagcagccagagtttattaaccacttaacctctcagaactgaacaaagacaacattgttcctggaacgccctctttttaaaaaagaaagcataacccctactgtagaactaaatgcactgtgcatgaaacttggaaaaaaaccaatgtataagcctgttgacccttactctcggatgcagtccacctataactacaacatgagaggaggtgcttatcccccgaggtacttttacccatttccagttccacctttactttatcaagtggaactttctgtgggaggacagcaatttaatggcaaaggaaagacaagacaggctgcgaaacacgatgctgctgccaaagcgttgaggatcctgcagaatgagcccctgccagagaggctggaggtgaatggaagagaatccgaagaagaaaatctcaataaatctgaaataagtcaagtgtttgagattgcacttaaacggaacttgcctgtgaatttcgaggtggcccgggagagtggcccaccccacatgaagaactttgtgaccaaggtttcggttggggagtttgtgggggaaggtgaagggaaaagcaagaagatttcaaagaaaaatgccgccatagctgttcttgaggagctgaagaagttaccgcccctgcctgcagttgaacgagtaaagcctagaatcaaaaagaaaacaaaacccatagtcaagccacagacaagcccagaatatggccaggggatcaatccgattagccgactggcccagatccagcaggcaaaaaaggagaaggagccagagtacacgctcctcacagagcgaggcctcccgcgccgcagggagtttgtgatgcaggtgaaggttggaaaccacactgcagaaggaacgggcaccaacaagaaggtggccaagcgcaatgcagccgagaacatgctggagatccttggtttcaaagtcccgcaggcgcagcccaccaaacccgcactcaagtcagaggagaagacacccataaagaaaccaggggatggaagaaaagtaaccttttttgaacctggctctggggatgaaaatgggactagtaataaagaggatgagttcaggatgccttatctaagtcatcagcagctgcctgctggaattcttcccatggtgcccgaggtcgcccaggctgtaggagttagtcaaggacatcacaccaaagattttaccagggcagctccgaatcctgccaaggccacggtaactgccatgatagcccgagagttgttgtatgggggcacctcgcccacagccgagaccattttaaagaataacatctcttcaggccacgtaccccatggacctctcacgagaccctctgagcaactggactatctttccagagtccagggattccaggttgaatacaaagacttccccaaaaacaacaagaacgaatttgtatctcttatcaattgctcctctcagccacctctgatcagccatggtatcggcaaggatgtggagtcctgccatgatatggctgcgctgaacatcttaaagttgctgtctgagttggaccaacaaagtacagagatgccaagaacaggaaacggaccaatgtctgtgtgtgggaggtgctgaaccttttctggccatgaaccattataaaatcccaacatatatactgaaaatactgaaactgctttgaaaatttggaatttctgatacctccagtgggccgagagacacggtgggtaaaggatgtgggcagcagcagggaagacaacagaaacacaaggaggcggctgtggccgggctggactgtgctggggtttgttgtgatggccactcggtgacctggcggtccctacgcaatagcagctgcctgtggggaagaagggctgcccagccagctggttctcccgggacaccagcagatccacaccctgggcacctccgtgtttggtcttttttttcccctgtgtgaaagaagaaacggcacgaccccttctcaagctggctcactcagacacattgggacaaaccctggacagccatgccagagagaggcctttgaccggccccagagctaaaagcaccagagaaaatcaaatgcttcctactcagcgtgacccaacttttctagtgtgccacggccccaccacctcctgcagtacccacaccatcaccactgctttctcttccaacagtgatctgtattcttagtttcattattttcttttgattgatatgacactatataaaattttcatttgagaatttctcaattgtatctagttaaatagcacagtttggaaacttgtctgagactgactttatcaataatctaaccgacaaagatcatatccatgtgtatgtggttagacatttttatttcattgactaacccaggacagtttcagtgatgcaaattgtgtgccctctggttcagctgaaacagtcctggactttcaaaaaccttgaataagtctcccacagttgtataaattggacaatttaggaattttaaactttagatgatcatttggttccatttttatttcatttttatttttgttaatgcaaacaggacttaaatgaactttgatctctgttttaaagattattaaaaaacattgtgtatctatacatatggctcttgaggacttagctttcactacactacaggatatgatctccatgtagtccatataaacctgcagagtgattttccagagtgctcgatactgttaattacatctccattagggctgaaaagaatgacctacgtttctgtatacagctgtgttgcttttgatgttgtgttactgtacacagaagtgtgtgcactgaggctctgcgtgtggtccgtatggaaagcctggtagccctgcgagttaagtactgcttccattcattgtttacgctggaatttttctccccatggaatgtaagtaaaacttaagtgtttgtcatcaataaatggtaatact

SEQ ID NO: 11927 - protein, 496 aa, Homo sapiens; identical to SEQ ID NO: 1979

SEQ ID NO: 11928 - DNA, 3497 bp, Homo sapiens
acttcctgccgggctgcgggcgcctgagcggctcttcagcgtttgcgccggcggctgccgcgtctctctcggctcccgcttcctttgaccgcctcccccccccggcccggcggcgcccgcctcctccacggccactccgcctcttccctcccttcgtcccttcttcctctcccttttttccttcttccttcccctcctcgccgccaccgcccaggaccgccggccgggggacgagctcggagcagcagccagagtttattaaccacttaacctctcagaactgaacaaagacaacattgttcctggaacgccctctttttaaaaaaggtagaactttagacttcatagcactgaattaacctgcactgaaagctgtttacctgcatttgttcacttttgttgaaagtgaccatgtctcaagttcaagtgcaagttcagaacccatctgctgctctctcagggagccaaatactgaacaagaaccagtctcttctctcacagcctttgatgagtattccttctactactagctctctgccctctgaaaatgcaggtagacccattcaaaactctgctttaccctctgcatctattacatccaccagtgcagctgcagaaagcataacccctactgtagaactaaatgcactgtgcatgaaacttggaaaaaaaccaatgtataagcctgttgacccttactctcggatgcagtccacctataactacaacatgagaggaggtgcttatcccccgaggtacttttacccatttccagttccacctttactttatcaagtggaactttctgtgggaggacagcaatttaatggcaaaggaaagacaagacaggctgcgaaacacgatgctgctgccaaagcgttgaggatcctgcagaatgagcccctgccagagaggctggaggtgaatggaagagaatccgaagaagaaaatctcaataaatctgaaataagtcaagtgtttgagattgcacttaaacggaacttgcctgtgaatttcgaggtggcccgggagagtggcccaccccacatgaagaactttgtgaccaaggtttcggttggggagtttgtgggggaaggtgaagggaaaagcaagaagatttcaaagaaaaatgccgccatagctgttcttgaggagctgaagaagttaccgcccctgcctgcagttgaacgagtaaagcctagaatcaaaaagaaaacaaaacccatagtcaagccacagacaagcccagaatatggccaggggatcaatccgattagccgactggcccagatccagcaggcaaaaaaggagaaggagccagagtacacgctcctcacagagcgaggcctcccgcgccgcagggagtttgtgatgcaggtgaaggttggaaaccacactgcagaaggaacgggcaccaacaagaaggtggccaagcgcaatgcagccgagaacatgctggagatccttggtttcaaagtcccgcaggcgcagcccaccaaacccgcactcaagtcagaggagaagacacccataaagaaaccaggggatggaagaaaagtaaccttttttgaacctggctctggggatgaaaatgggactagtaataaagaggatgagttcaggatgccttatctaagtcatcagcagctgcctgctggaattcttcccatggtgcccgaggtcgcccaggctgtaggagttagtcaaggacatcacaccaaagattttaccagggcagctccgaatcctgccaaggccacggtaactgccatgatagcccgagagttgttgtatgggggcacctcgcccacagccgagaccattttaaagaataacatctcttcaggccacgtaccccatggacctctcacgagaccctctgagcaactggactatctttccagagtccagggattccaggttgaatacaaagacttccccaaaaacaacaagaacgaatttgtatctcttatcaattgctcctctcagccacctctgatcagccatggtatcggcaaggatgtggagtcctgccatgatatggctgcgctgaacatcttaaagttgctgtctgagttggaccaacaaagtacagagatgccaagaacaggaaacggaccaatgtctgtgtgtgggaggtgctgaaccttttctggccatgaaccattataaaatcccaacatatatactgaaaatactgaaactgctttgaaaatttggaatttctgatacctccagtgggccgagagacacggtgggtaaaggatgtgggcagcagcagggaagacaacagaaacacaaggaggcggctgtggccgggctggactgtgctggggtttgttgtgatggccactcggtgacctggcggtccctacgcaatagcagctgcctgtggggaagaagggctgcccagccagctggttctcccgggacaccagcagatccacaccctgggcacctccgtgtttggtcttttttttcccctgtgtgaaagaagaaacggcacgaccccttctcaagctggctcactcagacacattgggacaaaccctggacagccatgccagagagaggcctttgaccggccccagagctaaaagcaccagagaaaatcaaatgcttcctactcagcgtgacccaacttttctagtgtgccacggccccaccacctcctgcagtacccacaccatcaccactgctttctcttccaacagtgatctgtattcttagtttcattattttcttttgattgatatgacactatataaaattttcatttgagaatttctcaattgtatctagttaaatagcacagtttggaaacttgtctgagactgactttatcaataatctaaccgacaaagatcatatccatgtgtatgtggttagacatttttatttcattgactaacccaggacagtttcagtgatgcaaattgtgtgccctctggttcagctgaaacagtcctggactttcaaaaaccttgaataagtctcccacagttgtataaattggacaatttaggaattttaaactttagatgatcatttggttccatttttatttcatttttatttttgttaatgcaaacaggacttaaatgaactttgatctctgttttaaagattattaaaaaacattgtgtatctatacatatggctcttgaggacttagctttcactacactacaggatatgatctccatgtagtccatataaacctgcagagtgattttccagagtgctcgatactgttaattacatctccattagggctgaaaagaatgacctacgtttctgtatacagctgtgttgcttttgatgttgtgttactgtacacagaagtgtgtgcactgaggctctgcgtgtggtccgtatggaaagcctggtagccctgcgagttaagtactgcttccattcattgtttacgctggaatttttctccccatggaatgtaagtaaaacttaagtgtttgtcatcaataaatggtaatact

SEQ ID NO: 11929 - protein, 577 aa, Homo sapiens; identical to SEQ ID NO: 1983

SEQ ID NO: 11930 - DNA, 559 bp, Homo sapiens
ggttagtcaatgaaataaaaatgtctaaccacatacacatggatatgatctttgtcggttagattattgataaagtcagtctcagacaagtttccaaactgtgctatttaactagatacaattgagaaattctcaaatgaaaattttatatagtgtcatatcaatcaaaagaaaataatgaaactaagaatacagatcactgttggaagagaaagcagtggtgatggtgtgggtactgcaggaggtggtggggccgtggcacactagaaaagttgggtcacgctgagtaggaagcatttgattttctctggtgcttttagctctggggccggtcaaaggcctctctctggcatggctgtccagggtttgtcccaatgtgtctgagtgagccagcttgagaaggggtcgtgccgtttcttctttcacacaggggaccgccaggtcaccgagtggccatcacaacaaaccccagcacagtccagcccggccacagccgcctccttgtgtttctgttgtcttccctgctgctgcccacatcctttacccaccgtgtctctcg

SEQ ID NO: 11931 - protein, 57 aa, Homo sapiens
VSQLEKGSCRFFFHTGDRQVTEWPSQQTPAQSSPATAASLCFCCLPCCCPHPLPTVS

SEQ ID NO: 11932 - DNA, 540 bp, Homo sapiens
cactcctacaattcttttatgtgactactgtcaagattcctgaacacagagttgagagccagatctgaaaccttaacaaaagtgaaggaggaaaggaagcaatctgaccccaaatcccacagaacaaaaacataaaatagcaatctctaagtttccagaaatctcagtgactctgggtagcagcaagagtgagcaggtggtaagcttctcaggaatccaaggctctggcccaagccgtcaactctgcacatgaggtgacccgggaagccagccaggcatctcccactccccacggtcttggtacccctcccccacaacctgcaaaaatccactctcatgacagactaatctgtcagcaggggagaaaagcaacacttctcccctttcctgaaacaggtgccgggggagacctcatgactccttgggatgcagctcccatctttttcccactcaactgtgagcccaaacagccattctgaatgtcccctgtctcattccctccccaatgcatttagttctacagtaggggttatgctttct

SEQ ID NO: 11933 - protein, 37 aa, Homo sapiens
MQLPSFSHSTVSPNSHSECPLSHSLPNAFSSTVGVML

SEQ ID NO: 11934 - DNA, 3697 bp, Homo sapiens
cttcagtttcagagaaaagacctaccctactaaattattattattttttattttccagagtttattaaccacttaacctctcagaactgaacaaagacaacattgttcctggaacgccctctttttaaaaaaggtacatataatttggctttataatttctggcctgttgataatcagtggtacttttgaattctttaatgagttgtgtggagaatgatttttacttctggctataatattagagaaacaaattttatgcagtttgaatttcatctttactcttgatttaattagaaagtaagtacaggaaaagttattggcaagaatgtaaagcctatgttctttaaatatagagacatgagaattgatgactgaagctgtcattaaacatgactggctcaataagcttcttggtcatagtatcttttgtagtttgctttttttaaaaaaaccctttgatttctcagattgtttatgttaaacatgattttcaaactcatagaacgaatttagcattgttttctattgtgagatagggttacgaatcaagcttcgttgaccactagcagcttgtgaacattcagataaaaaaggagttttctaagagtgttcaagattttctggtcttttgtcagggcaatgcaaaatacactatgtgggttaatactgcttcctgcttttaacactttccctctagaagctgaaagcacattgctgtaccatatctctgaggtagtaattagtagacaagttaacctactttgaggatgaggaaatggaagcataaggaaattattgaagttgtacaaagctcagtgaatggttttaaactcaccacactggatttgtataatgcttttcttttctttctttctgaaacggagtttcgctcttgttgcccaggttggagtgcaatggcgccatgttggctcacctcggcctcctgggttcaagcagttctcctgcctcagcctcccaagtagctgggattacaggcgtgtgccaccacacctggctaattttgtatttttagtagagacagggtttcaccgtgttggtcaggctggtctcgaactcctgacatgaggtgatccacccacgcttgtaatcccagcacttcgggaggccgaggcaggcggatcacaaggtcaggagatagagaccacggtgaaaccccgtctctactaaaaatacaaaaaaaaaattagccgggcgtggtggcgggcacctgtagtcccagctacttggagaggctgaggcaggagaatggtgtgaacctggcaggcggaacttgcagtgagctgagatcgtgccactgcactccagcctgggcaacagagcgagactccgtctcaataaaaataaataaataaataactggtataaggaatgatgtgggtattttaggtgtatttaaaggctattgaaaaggactttattttgtagaaaaagtggtttattccttgatgttttttaattgaccaagtttctctgggagtggagcctctcaacaaactaaagagaacagaataatagatttacatgtgattgctgaaagatgtcgtcttgtgtctttgaggaagagtttaacacacagatcctttccagcatttaagaatgtgcaatctgccatttatgggttcacatgtaatagatgcttaataagtttttgtagactattgagtgaatatattttagaattgctattgctttataacagcgaggcacaggagtgctcctttgtatctgtatatccatcttacatcagatttaccaaaggacttgcaaggggagacatttagtgaaatgtttgtgatgatctgaaaaggaggcttctccagaattgggatgacttctttccttctttttttttttttttttcccagacacatcttgtttggaaatatcacttattatgaaggagactgatatgttgattaaacaaaagtatagctactgcattataagttgtgttaatccggtttaaaaattacttattaaaaatgtttttctggctgggcacggtggctcatgtctataatcccagcactttgttgaggccaagacaggcggatcacttgaggccaggagttaaagaccagcctgaccaacatggtgaaaccccatttctactaaaaacacaaaataattagccaggtgtggtggtacacacctgtagttcccgctactcgggaggctgacacaggagaatcacttgaacctgggaggcagaggttacggtgagccaagatcgtgccactgcactccaacctggacgacagagtgagactgtctccagaaaaaaaatgtttttccataattgcttaagtatttcatagtacaaagatttaacagtctgtaagttgaaagtggataagactaaccatgtattagtagcacaagataattaaaagactaagcacgattgcagatagttctgtaaaccatttctagaagggtctgccttcttgtatattaaatcactcggactgtgctcagtatggtctagtcttggtaggttcactgctgagtgctgaatacacattttgtgaccactttttagtacatcatgtataatttaaaaaaaactttcgtagcgctcatgtgcccagattctccttcaccacaacccatagaaactatttggcacttgtaaaacggtaactgccagccaaagcaagattctgtttttatgagaagatttttgtgttaccaagccaatcttaagaaccaggaggacatggaattaaggaatcttttaaaagaaacacctataactctatcattttgcagcttgtattatggtgcttatgtatgctatgtaaaattagggcttgagcctaagatgagtatgttttgttgatctggtgtctaaagcccttcaaatagggaaagaaccaggagatgaaaggtcctcatctgtgtgggaggcagaaaggcaggaaaatggcagcacaacacaattcacagtaagaggtgttttccagcaccagcgagatctgaagaatctttgcgtttcaaacttctcaacctaattttactgtgtataaaatagtgtttgtctctaagaagactctaacaaaacattttgatctctcaagtccttaatttacctggtggaaaacaatccttaaagacaggtttaaaggaaaagacttatttgcatttaaggacttagtcttcaggacagtactgttgagcaacaggtttagaatttacacagaagttctatttccaaagttccacagttccttgaaggctgctatgaactatatctatatcagtaatgaaaaacttaatttgttccttgagttatgtgggcaaatgatatattttcccccattcatcactgtgatgtctgttccggcttctctttgggagaggagcatctgtttgggtgctaaaacattagcatcaggccaggcgcagtggctcatgcctgtaatcctagcacttagggaggctgaggcaggaggatcacttgagatcaggagttcaagatcagcctggccagcatggtgaaacgctgtctctactaaaaatacaaaattagccgggtgtggtggtacacgcctgtaatcctaagtactcgggagactaaggcaggaaaatcgcttgaacccagaaggcggagtttgcagtgagcggagatcacaccactgcactccaccctaggcaacagagcgagactgtctc

SEQ ID NO: 11935 - protein, 88 aa, Homo sapiens
MVLNSPHWICIMLFFSFFLKRSFALVAQVGVQWRHVGSPRPPGFKQFSCLSLPSSWDYRRVPPHLANFVFLVETGFHRVGQAGLELLT

SEQ ID NO: 11936 - DNA, 3337 bp, Homo sapiens
cacccgcggtcgcccagcacgccgggacgcgcgtggccatccagctccccgggggcgttggggggctccgcgggcctgggcctcgggattcgcccgccgcttccccggggagccgctgctgcaaagccaggttggggcgccgggcccggccagcgccctctaggcagcggaagtgcagcttgctttacatccgtcctccccgcctcgcagagttgggagaaggcagggtggggggtgtggaaaaataaaaggaaaagtccttgcaccatgtagatcagcgtcccccactttggcatcccggccggccggggacctcccagtctgcggccatgaacgcgagcagcgagggcgagagcttcgcgggctcggtgcaaattccaggtggcacaacggtgctggtggagctgactcccgacatccatatctgcggcatctgcaagcagcagtttaacaacctggatgcctttgtagctcacaagcaaagtggctgccagctgacaggcacatccgcagcagcccccagcacggtccagtttgtatcggaggaaacagtgcctgccacccagactcagaccaccaccagaaccatcacctcggagacccagacaatcacagtttcagctccagaatttgtttttgaacatggctatcaaacttacctgcccacggaaagtaatgaaaaccagacagccactgtcatctctctccctgccaagtcacgcaccaaaaagcccacaacaccacctgctcagaaaaggcttaactgttgctatccaggttgccaattcaagactgcttatggcatgaaggacatggagcggcatttaaaaattcacacgggagacaaaccccataagtgtgaagtctgtggcaagtgctttagccggaaagacaagctgaaaactcacatgcggtgccacacgggcgtgaagccctacaagtgtaagacgtgtgactacgccgctgccgacagcagcagcctcaacaagcacctgaggatccactcggacgagcggcccttcaaatgccagatctgcccctacgccagccgcaactccagccagctcactgtccacctgcgatcccacacggcttcagaacttgatgatgatgttccaaaagcaaactgcctctccactgaaagcactgacactccgaaggcccctgtcatcactcttccctcagaggcaagggaacaaatggccacccttggagagaggacgttcaactgttgctacccaggttgccacttcaaaactgtccatggcatgaaagacttggaccgccatctcagaatccacacgggagacaaaccgcacaagtgtgagttctgtgacaagtgcttcagccggaaggacaacctgaccatgcacatgcggtgccacaccagtgtgaagccacacaagtgtcacctgtgtgactacgctgccgtggacagcagtagcctcaagaagcacctgcggatccactctgatgagcggccgtacaaatgccagctctgcccctatgccagccgcaactccagccagctcaccgtccacctgcgatctcacacgggggatacccccttccagtgctggctctgtagcgccaagttcaaaatcagctcggacttgaaaaggcacatgatcgtgcactcgggggagaagcctttcaagtgcgagttctgcgacgtccgctgcaccatgaaggcgaatctcaaatcgcacatccgcatcaagcacaccttcaaatgtctgcactgtgccttccagggccgggaccgggctgacctcctggagcacagccggctgcaccaggccgaccacccggagaagtgtccagagtgcagctactcctgctccagcgcggccgccctgcgcgtgcacagcagagtccactgtaaggaccgtcccttcaagtgtgacttctgcagcttcgacacgaagcggcccagcagcctggccaagcacgtcgacaaggtgcacagggacgaggccaagacggagaaccgggcccctctgggcaaggaagggctcagagagggcagctcccagcacgtggccaagatcgtgacgcagagggccttccgctgtgagacctgcggcgcctccttcgtcagggatgactctctgagatgccacaagaagcagcacagtgatcagagtgagaacaagaactcagacttggtcaccttcccaccggaaagcggtgcctcgggacagctcagcaccctggtctccgtggggcagctcgaggctcccctagagcccagccaagacctctagctcagccgaagagggtggtcagctgtcggaacttctgaccagtgctgttgcccagccctccagaggtgaggccactgagagacaggctttgggcaccacttctggggctggccgctccaacttcacaggccttcagaggcgatggctgggcgacagtgacgaaagcaaagcaaagcagggctgtggagacactcctcgcatttgtctcttccctccaaggattatctgagcaagtcgacttgttcattcaaaggcggggtctgccaagccctgctctatccaatggggatagcttctacgtaacggattccaattttaaaactgatccatctctgatggaattattaaacttagacgatatagaaaactaaaactaatctctagagtggaaagggttaaagtgaggaaggtgtacgtgaagggtctggggttgctggaaaacttctatttcataacctgggtgatcgttctaagagtgtttgccttatatgtttgtgtggtttcttttacctgttgtcttacaataaaaaaggcagactcatggtagcatgatgtaaggaacactcaattttgcagccctccacagacagttacggtagaaggttctccatccccagcccgcgccccattcagtaacttaattataaacgcacattggatttctcaatgagttcctactgtagtaaaacgaaatgcagtttgatctggaggtggcgccaaagatcaagctaactagcccagcctgtgcttgtctgttgtggaattcaaaattctgtttaattctatttggagagaaaagtccaggggcccagtgggccctgagcttggtgctgggtgctgggatatgtgatacgtgggacagcctcacaccagcatctgtttcatcacggaaagcatttagtgtttgctgaacccacaaactactgaaaatccaacctcttctcatagatggacccttaggaggttatgaaatctcagtggatataatacttacccaaagttgcttggtttctacttttggcatctttccttcaaatactctttttaaatataaagtcttgtgtgccctc

SEQ ID NO: 11937 - protein, 645 aa, Homo sapiens
MNASSEGESFAGSVQIPGGTTVLVELTPDIHICGICKQQFNNLDAFVAHKQSGCQLTGTSAAAPSTVQFVSEETVPATQTQTTTRTITSETQTITVSAPEFVFEHGYQTYLPTESNENQTATVISLPAKSRTKKPTTPPAQKRLNCCYPGCQFKTAYGMKDMERHLKIHTGDKPHKCEVCGKCFSRKDKLKTHMRCHTGVKPYKCKTCDYAAADSSSLNKHLRIHSDERPFKCQICPYASRNSSQLTVHLRSHTASELDDDVPKANCLSTESTDTPKAPVITLPSEAREQMATLGERTFNCCYPGCHFKTVHGMKDLDRHLRIHTGDKPHKCEFCDKCFSRKDNLTMHMRCHTSVKPHKCHLCDYAAVDSSSLKKHLRIHSDERPYKCQLCPYASRNSSQLTVHLRSHTGDTPFQCWLCSAKFKISSDLKRHMIVHSGEKPFKCEFCDVRCTMKANLKSHIRIKHTFKCLHCAFQGRDRADLLEHSRLHQADHPEKCPECSYSCSSAAALRVHSRVHCKDRPFKCDFCSFDTKRPSSLAKHVDKVHRDEAKTENRAPLGKEGLREGSSQHVAKIVTQRAFRCETCGASFVRDDSLRCHKKQHSDQSENKNSDLVTFPPESGASGQLSTLVSVGQLEAPLEPSQDL

SEQ ID NO: 11938 - DNA, 2832 bp, Homo sapiens
ggcaggggcgcatccctcgccacccgcggtcgcccagcacgccgggacgcgcgtggccatccagctccccgggggcgttggggggctccgcgggcctgggcctcgggattcgcccgccgcttccccggggagccgctgctgcaaagccaggttggggcgccgggcccggccagcgccctctaggcagcggaagtgcagcttgctttacatccgtcctccccgcctcgcagagttgggagaaggcagggtggggggtgtggaaaaataaaaggaaaagtccttgcaccatgtagatcagcgtcccccactttggcatcccggccggccggggacctcccagtctgcggccatgaacgcgagcagcgagggcgagagcttcgcgggctcggtgcaaattccaggtggcacaacggtgctggtggagctgactcccgacatccatatctgcggcatctgcaagcagcagtttaacaacctggatgcctttgtagctcacaagcaaagtggctgccagctgacaggcacatccgcagcagcccccagcacggtccagtttgtatcggaggaaacagtgcctgccacccagactcagaccaccaccagaaccatcacctcggagacccagacaatcacagtttcagctccagaatttgtttttgaacatggctatcaaacttacctgcccacggaaagtaatgaaaaccagacagccactgtcatctctctccctgccaagtcacgcaccaaaaagcccacaacaccacctgctcagaaaaggcttaactgttgctatccaggttgccaattcaagactgcttatggcatgaaggacatggagcggcatttaaaaattcacacgggagacaaaccccataagtgtgaagtctgtggcaagtgctttagccggaaagacaagctgaaaactcacatgcggtgccacacgggcgtgaagccctacaagtgtaagacgtgtgactacgccgctgccgacagcagcagcctcaacaagcacctgaggatccactcggacgagcggcccttcaaatgccagatctgcccctacgccagccgcaactccagccagctcactgtccacctgcgatcccacacggcttcagaacttgatgatgatgttccaaaagcaaactgcctctccactgaaagcactgacactccgaaggcccctgtcatcactcttccctcagaggcaagggaacaaatggccacccttggagagaggacgttcaactgttgctacccaggttgccacttcaaaactgtccatggcatgaaagacttggaccgccatctcagaatccacacgggagacaaaccgcacaagtgtgagttctgtgacaagtgcttcagccggaaggacaacctgaccatgcacatgcggtgccacaccagtgtgaagccacacaagtgtcacctgtgtgactacgctgccgtggacagcagtagcctcaagaagcacctgcggatccactctgatgagcggccgtacaaatgccagctctgcccctatgccagccgcaactccagccagctcaccgtccacctgcgatctcacacgggggatacccccttccagtgctggctctgtagcgccaagttcaaaatcagctcggacttgaaaaggcacatgatcgtgcactcgggggagaagcctttcaagtgcgagttctgcgacgtccgctgcaccatgaaggcgaatctcaaatcgcacatccgcatcaagcacaccttcaaatgtctgcactgtgccttccagggccgggaccgggctgacctcctggagcacagccggctgcaccaggccgaccacccggagaagtgtccagagtgcagctactcctgctccagcgcggccgccctgcgcgtgcacagcagagtccactgtaaggaccgtcccttcaagtgtgacttctgcagcttcgacacgaagcggcccagcagcctggccaagcacgtcgacaaggtgcacagggacgaggccaagacggagaaccgggcccctctgggcaaggaagggctcagagagggcagctcccagcacgtggccaagatcgtgacgcagagggccttccgctgtgagacctgcggcgcctccttcgtcagggatgactctctgagatgccacaagaagcagcacagtgatcagagtgagaacaagaactcagacttggtcaccttcccaccggaaagcggtgcctcgggacagctcagcaccctggtctccgtggggcagctcgaggctcccctagagcccagccaagacctctagctcagccgaagagggtggtcagctgtcggaacttctgaccagtgctgttgcccagccctccagaggtgaggccactgagagacaggctttgggcaccacttctggggctggccgctccaacttcacaggccttcagaggcgatggctgggcgacagtgacgaaagcaaagcaaagcagggctgtggagacactcctcgcatttgtctcttccctccaaggattatctgagcaagtcgacttgttcattcaaaggcggggtctgccaagccctgctctatccaatggggatagcttctacgtaacggattccaattttaaaactgatccatctctgatggaattattaaacttagacgatatagaaaactaaaactaatctctagagtggaaagggttaaagtgaggaaggtgtacgtgaagggtctggggttgctggaaaacttctatttcataacctgggtgatcgttctaagagtgtttgccttatatgtttgtgtggtttcttttacctgttgtcttacaataaaaaaggcagactcatggt

SEQ ID NO: 11939 - protein, 645 aa, Homo sapiens; identical to SEQ ID NO: 11937

SEQ ID NO: 11940 - DNA, 2928 bp, Homo sapiens
gtggaaaaataaaaggaaaagtccttgcaccatgtagatcagcgtcccccactttggcatcccggccggccggggacctcccagtctgcggccatgaacgcgagcagcgagggcgagagcttcgcgggctcggtgcaaattccaggtggcacaacggtgctggtggagctgactcccgacatccatatctgcggcatctgcaagcagcagtttaacaacctggatgcctttgtagctcacaagcaaagtggctgccagctgacaggcacatccgcagcagcccccagcacggtccagttttttcagctccagaatttgtttttgaacatggctatcaaacttacctgcccacggaaagtaatgaaaaccagacagccactgtcatctctctccctgccaagtcacgcaccaaaaagcccacaacaccacctgctcagaaaaggcttaactgttgctatccaggttgccaattcaagactgcttatggcatgaaggacatggagcggcatttaaaaattcacacgggagacaaaccccataagtgtgaagtctgtggcaagtgctttagccggaaagacaagctgaaaactcacatgcggtgccacacgggcgtgaagccctacaagtgtaagacgtgtgactacgccgctgccgacagcagcagcctcaacaagcacctgaggatccactcggacgagcggcccttcaaatgccagatctgcccctacgccagccgcaactccagccagctcactgtccacctgcgatcccacacgggggacgcccccttccagtgctggctctgtagcgccaagttcaaaatcagctcggacttgaaaaggcacatgcgggtgcactcgggggagaagcctttcaagtgcgagttctgcaatgtccgctgcaccatgaaggggaacctcaagtcgcacatccgtatcaagcacagcgggaataacttcaagtgtcctcattgcgacttcctgggtgacagcaaagccaccctccggaagcacagccgcgtgcaccagtcggagcatcctgagaagtgctcggaatgcagctactcctgctccagcaaggccgccctgcgcatccacgagcgtatccactgcaccgaccgccctttcaagtgcaactactgcagcttcgacaccaaacagcccagcaacctgagcaagcacatgaagaagttccatggggacatggttaagactgaggctctagagaggaaggacaccggcaggcagagcagccggcaggtggccaagctggatgccaagaagagtttccactgcgatatatgcgatgcctccttcatgcgggaggactcgctccgcagccacaagagacagcacagtgagtacagtgagagtaagaactcggacgtgaccgttctccagtttcagatcgaccccagcaagcagcccgccacgcccctcactgtgggacacctccaggtgcccctccagcccagccaagtgccccagttcagcgagggaagagtcaaaatcatcgttgggcatcaggtgccccaggcgaacaccatcgtccaggctgccgccgctgcagtgaacatcgtcccgcctgccttggtggcccagaacccagaggaactcccagggaacagccggctgcagatcctgcgccaggtcagtctgatcgccccccctcagtcctcgcggtgtccgagcgaggcgggcgcaatgacccagccggctgtcctgctgaccacccacgagcagacggacggagccactctgcaccagactctcatccccacggcctcaggtggcccccaggaaggctctggcaatcaaactttcattaccagttcgggtattacttgcactgactttgaaggcctaaacgccttgattcaggaggggacagcagaagtgacagtggtgagcgatggaggccagaacatcgcagtggccaccacagcgccaccggtcttctcctcctcttcccagcaagaactacccaagcagacctactccatcattcaaggggcagcccatccagctttgctctgtcccgccgactccattccagattagtgcttaaaaaaacaaaaggagtgggggaaaggaattgagaaaaagaaatcttaagtagaattctctaaaaggtttgctcttaatgttttctttgttttgttttgtttttgagacggagtctcgctctgtttcccaggctggagtgcagtggcgctatcttggctcactgcaacgtccgcctcccaggttcaagcgattctcatgcctcagccctccgagtagctgggaccacaggtgtacgacatcatgactggctaatttttgtatatttagtagagacggggtttcatcatgttgaactcctgacctcaagtgatctgcccacctcagcctcccaaagtgctgggattacaggtgtgagccaccatgcctggccgtggtttgctcttaatgtttttaaggatggttgtgaatccccctggccccataataaattgtaattttatactgcttactataatttttttaacactgtaacaactttgagaccacctctgaatcgtcgcattataactgttgtagaatcttaaatgttaccaagatgattccaatgaggggttggaattaaatgcattaagtagtgaattcatgtgtttgtttccaacttgattttccaactctaataaaggtttctgtccatcttattacatttgtgtagtaaatggtacttcccagcctctcttttgccccattctggaatactccccagagtttgggggtgttcatgttttatacatgtaagtctgttggcatgaaggaccattttctacataatatgacatggatacttgacccaaaaaaaaatgtttagtgctaatgagcagaaaatgaatggttccataataaattgatatctgattaaaatata

SEQ ID NO: 11941 - protein, 523 aa, Homo sapiens
MKDMERHLKIHTGDKPHKCEVCGKCFSRKDKLKTHMRCHTGVKPYKCKTCDYAAADSSSLNKHLRIHSDERPFKCQICPYASRNSSQLTVHLRSHTGDAPFQCWLCSAKFKISSDLKRHMRVHSGEKPFKCEFCNVRCTMKGNLKSHIRIKHSGNNFKCPHCDFLGDSKATLRKHSRVHQSEHPEKCSECSYSCSSKAALRIHERIHCTDRPFKCNYCSFDTKQPSNLSKHMKKFHGDMVKTEALERKDTGRQSSRQVAKLDAKKSFHCDICDASFMREDSLRSHKRQHSEYSESKNSDVTVLQFQIDPSKQPATPLTVGHLQVPLQPSQVPQFSEGRVKIIVGHQVPQANTIVQAAAAAVNIVPPALVAQNPEELPGNSRLQILRQVSLIAPPQSSRCPSEAGAMTQPAVLLTTHEQTDGATLHQTLIPTASGGPQEGSGNQTFITSSGITCTDFEGLNALIQEGTAEVTVVSDGGQNIAVATTAPPVFSSSSQQELPKQTYSIIQGAAHPALLCPADSIPD

SEQ ID NO: 11942 - DNA, 3263 bp, Homo sapiens
ggcaggggcgcatccctcgccacccgcggtcgcccagcacgccgggacgcgcgtggccatccagctccccgggggcgttggggggctccgcgggcctgggcctcgggattcgcccgccgcttccccggggagccgctgctgcaaagccaggttggggcgccgggcccggccagcgccctctaggcagcggaagtgcagcttgctttacatccgtcctccccgcctcgcagagttgggagaaggcagggtggggggtgtggaaaaataaaaggaaaagtccttgcaccatgtagatcagcgtcccccactttggcatcccggccggccggggacctcccagtctgcggccatgaacgcgagcagcgagggcgagagcttcgcgggctcggtgcaaattccaggtggcacaacggtgctggtggagctgactcccgacatccatatctgcggcatctgcaagcagcagtttaacaacctggatgcctttgtagctcacaagcaaagtggctgccagctgacaggcacatccgcagcagcccccagcacggtccagtttgtatcggaggaaacagtgcctgccacccagactcagaccaccaccagaaccatcacctcggagacccagacaatcacagtttcagctccagaatttgtttttgaacatggctatcaaacttacctgcccacggaaagtaatgaaaaccagacagccactgtcatctctctccctgccaagtcacgcaccaaaaagcccacaacaccacctgctcagaaaaggcttaactgttgctatccaggttgccaattcaagactgcttatggcatgaaggacatggagcggcatttaaaaattcacacgggagacaaaccccataagtgtgaagtctgtggcaagtgctttagccggaaagacaagctgaaaactcacatgcggtgccacacgggcgtgaagccctacaagtgtaagacgtgtgactacgccgctgccgacagcagcagcctcaacaagcacctgaggatccactcggacgagcggcccttcaaatgccagatctgcccctacgccagccgcaactccagccagctcactgtccacctgcgatcccacacgggggacgcccccttccagtgctggctctgtagcgccaagttcaaaatcagctcggacttgaaaaggcacatgcgggtgcactcgggggagaagcctttcaagtgcgagttctgcaatgtccgctgcaccatgaaggggaacctcaagtcgcacatccgtatcaagcacagcgggaataacttcaagtgtcctcattgcgacttcctgggtgacagcaaagccaccctccggaagcacagccgcgtgcaccagtcggagcatcctgagaagtgctcggaatgcagctactcctgctccagcaaggccgccctgcgcatccacgagcgtatccactgcaccgaccgccctttcaagtgcaactactgcagcttcgacaccaaacagcccagcaacctgagcaagcacatgaagaagttccatggggacatggttaagactgaggctctagagaggaaggacaccggcaggcagagcagccggcaggtggccaagctggatgccaagaagagtttccactgcgatatatgcgatgcctccttcatgcgggaggactcgctccgcagccacaagagacagcacagtgagtacagtgagagtaagaactcggacgtgaccgttctccagtttcagatcgaccccagcaagcagcccgccacgcccctcactgtgggacacctccaggtgcccctccagcccagccaagtgccccagttcagcgagggaagagtcaaaatcatcgttgggcatcaggtgccccaggcgaacaccatcgtccaggctgccgccgctgcagtgaacatcgtcccgcctgccttggtggcccagaacccagaggaactcccagggaacagccggctgcagatcctgcgccaggtcagtctgatcgccccccctcagtcctcgcggtgtccgagcgaggcgggcgcaatgacccagccggctgtcctgctgaccacccacgagcagacggacggagccactctgcaccagactctcatccccacggcctcaggtggcccccaggaaggctctggcaatcaaactttcattaccagttcgggtattacttgcactgactttgaaggcctaaacgccttgattcaggaggggacagcagaagtgacagtggtgagcgatggaggccagaacatcgcagtggccaccacagcgccaccggtcttctcctcctcttcccagcaagaactacccaagcagacctactccatcattcaaggggcagcccatccagctttgctctgtcccgccgactccattccagattagtgcttaaaaaaacaaaaggagtgggggaaaggaattgagaaaaagaaatcttaagtagaattctctaaaaggtttgctcttaatgttttctttgttttgttttgtttttgagacggagtctcgctctgtttcccaggctggagtgcagtggcgctatcttggctcactgcaacgtccgcctcccaggttcaagcgattctcatgcctcagccctccgagtagctgggaccacaggtgtacgacatcatgactggctaatttttgtatatttagtagagacggggtttcatcatgttgaactcctgacctcaagtgatctgcccacctcagcctcccaaagtgctgggattacaggtgtgagccaccatgcctggccgtggtttgctcttaatgtttttaaggatggttgtgaatccccctggccccataataaattgtaattttatactgcttactataatttttttaacactgtaacaactttgagaccacctctgaatcgtcgcattataactgttgtagaatcttaaatgttaccaagatgattccaatgaggggttggaattaaatgcattaagtagtgaattcatgtgtttgtttccaacttgattttccaactctaataaaggtttctgtccatcttattacatttgtgtagtaaatggtacttcccagcctctcttttgccccattctggaatactccccagagtttgggggtgttcatgttttatacatgtaagtctgttggcatgaaggaccattttctacataatatgacatggatacttgacccaaaaaaaaatgtttagtgctaatgagcagaaaatgaatggttccataataaattgatatctgattaaaatata

SEQ ID NO: 11943 - protein, 681 aa, Homo sapiens; identical to SEQ ID NO: 1987

SEQ ID NO: 11944 - DNA, 3101 bp, Homo sapiens
ggcaggggcgcatccctcgccacccgcggtcgcccagcacgccgggacgcgcgtggccatccagctccccgggggcgttggggggctccgcgggcctgggcctcgggattcgcccgccgcttccccggggagccgctgctgcaaagccaggttggggcgccgggcccggccagcgccctctaggcagcggaagtgcagcttgctttacatccgtcctccccgcctcgcagagttgggagaaggcagggtggggggtgtggaaaaataaaaggaaaagtccttgcaccatgtagatcagcgtcccccactttggcatcccggccggccggggacctcccagtctgcggccatgaacgcgagcagcgagggcgagagcttcgcgggctcggtgcaaattccaggtggcacaacggtgctggtggagctgactcccgacatccatatctgcggcatctgcaagcagcagtttaacaacctggatgcctttgtagctcacaagcaaagtggctgccagctgacaggcacatccgcagcagcccccagcacggtccagtttgtatcggaggaaacagtgcctgccacccagactcagaccaccaccagaaccatcacctcggagacccagacaatcacaggttgccaattcaagactgcttatggcatgaaggacatggagcggcatttaaaaattcacacgggagacaaaccccataagtgtgaagtctgtggcaagtgctttagccggaaagacaagctgaaaactcacatgcggtgccacacgggcgtgaagccctacaagtgtaagacgtgtgactacgccgctgccgacagcagcagcctcaacaagcacctgaggatccactcggacgagcggcccttcaaatgccagatctgcccctacgccagccgcaactccagccagctcactgtccacctgcgatcccacacgggggacgcccccttccagtgctggctctgtagcgccaagttcaaaatcagctcggacttgaaaaggcacatgcgggtgcactcgggggagaagcctttcaagtgcgagttctgcaatgtccgctgcaccatgaaggggaacctcaagtcgcacatccgtatcaagcacagcgggaataacttcaagtgtcctcattgcgacttcctgggtgacagcaaagccaccctccggaagcacagccgcgtgcaccagtcggagcatcctgagaagtgctcggaatgcagctactcctgctccagcaaggccgccctgcgcatccacgagcgtatccactgcaccgaccgccctttcaagtgcaactactgcagcttcgacaccaaacagcccagcaacctgagcaagcacatgaagaagttccatggggacatggttaagactgaggctctagagaggaaggacaccggcaggcagagcagccggcaggtggccaagctggatgccaagaagagtttccactgcgatatatgcgatgcctccttcatgcgggaggactcgctccgcagccacaagagacagcacagtgagtacagtgagagtaagaactcggacgtgaccgttctccagtttcagatcgaccccagcaagcagcccgccacgcccctcactgtgggacacctccaggtgcccctccagcccagccaagtgccccagttcagcgagggaagagtcaaaatcatcgttgggcatcaggtgccccaggcgaacaccatcgtccaggctgccgccgctgcagtgaacatcgtcccgcctgccttggtggcccagaacccagaggaactcccagggaacagccggctgcagatcctgcgccaggtcagtctgatcgccccccctcagtcctcgcggtgtccgagcgaggcgggcgcaatgacccagccggctgtcctgctgaccacccacgagcagacggacggagccactctgcaccagactctcatccccacggcctcaggtggcccccaggaaggctctggcaatcaaactttcattaccagttcgggtattacttgcactgactttgaaggcctaaacgccttgattcaggaggggacagcagaagtgacagtggtgagcgatggaggccagaacatcgcagtggccaccacagcgccaccggtcttctcctcctcttcccagcaagaactacccaagcagacctactccatcattcaaggggcagcccatccagctttgctctgtcccgccgactccattccagattagtgcttaaaaaaacaaaaggagtgggggaaaggaattgagaaaaagaaatcttaagtagaattctctaaaaggtttgctcttaatgttttctttgttttgttttgtttttgagacggagtctcgctctgtttcccaggctggagtgcagtggcgctatcttggctcactgcaacgtccgcctcccaggttcaagcgattctcatgcctcagccctccgagtagctgggaccacaggtgtacgacatcatgactggctaatttttgtatatttagtagagacggggtttcatcatgttgaactcctgacctcaagtgatctgcccacctcagcctcccaaagtgctgggattacaggtgtgagccaccatgcctggccgtggtttgctcttaatgtttttaaggatggttgtgaatccccctggccccataataaattgtaattttatactgcttactataatttttttaacactgtaacaactttgagaccacctctgaatcgtcgcattataactgttgtagaatcttaaatgttaccaagatgattccaatgaggggttggaattaaatgcattaagtagtgaattcatgtgtttgtttccaacttgattttccaactctaataaaggtttctgtccatcttattacatttgtgtagtaaatggtacttcccagcctctcttttgccccattctggaatactccccagagtttgggggtgttcatgttttatacatgtaagtctgttggcatgaaggaccattttctacataatatgacatggatacttgacccaaaaaaaaatgtttagtgctaatgagcagaaaatgaatggttccataataaattgatatctgattaaaatata

SEQ ID NO: 11945 - protein, 627 aa, Homo sapiens; identical to SEQ ID NO: 1989

SEQ ID NO: 11946 - DNA, 993 bp, Homo sapiens
cacccgcggtcgcccagcacgccgggacgcgcgtggccatccagctccccgggggcgttggggggctccgcgggcctgggcctcgggattcgcccgccgcttccccggggagccgctgctgcaaagccaggttggggcgccgggcccggccagcgccctctaggcagcggaagtgcagcttgctttacatccgtcctccccgcctcgcagagttgggagaaggcagggtggggggtgtggaaaaataaaaggaaaagtccttgcaccatgtagatcagcgtcccccactttggcatcccggccggccggggacctcccagtctgcggccatgaacgcgagcagcgagggcgagagcttcgcgggctcggtgcaaattccaggtggcacaacggtgctggtggagctgactcccgacatccatatctgcggcatctgcaagcagcagtttaacaacctggatgcctttgtagctcacaagcaaagtggctgccagctgacaggcacatccgcagcagcccccagcacggtccagtttgtatcggaggaaacagtgcctgccacccagactcagaccaccaccagaaccatcacctcggagacccagacaatcacagatggagcctcactctgttgcccaggctggagcgcaatgacgcgatcttggcccactgcaacctccgcctcccgggttcaagcaattctgcctcagcctcccgagtagctgggattacaggtacccaccaccacacccagctaatttttgtatttttagtagagacaaagttttgccatgttggccaggctggtctcgaactcccgacctcaggtgatccgcctgcctcagccaccaaaagtgttgggattacaggcgtgagccaccgctcccggccctaaaatatattttctatatataaaagaggttagccctttagctgatcattaattaaacaaatgttctttgagctcctccccttcacctggttctgtggtgg

SEQ ID NO: 11947 - protein, 130 aa, Homo sapiens
MNASSEGESFAGSVQIPGGTTVLVELTPDIHICGICKQQFNNLDAFVAHKQSGCQLTGTSAAAPSTVQFVSEETVPATQTQTTTRTITSETQTITDGASLCCPGWSAMTRSWPTATSASRVQAILPQPPE

SEQ ID NO: 11948 - DNA, 747 bp, Homo sapiens
agtgctggcgcaagtcgtcttgcgccaggcgactgggtctgaggaggcaggagttattcattcccttaagctttcaggccggggggagaatctttcaggtggtagctgcaagaactcttagtatgttgacctcacctctgccttccacataccactaccagtgaggaattaggaatgcatgagaagagtgtccaagaagagtgtcctcattcatgcaaggcttaagagagaatgcaggtcaacatcaccatgtcaatcagagaatacttctgttgggttgaatgactctctgcccccagtctgactggttggaagaggcccttttcccagcctttgtgaaagagatcttcatgtaaacagagtccctcttattggctgaagtgaagagtcattctgaggcatctcaagatgaaggtttcctatttgtgattatgaaaaaaatgtcaagaacaagtcccttggtgttcttagaccaaagtcagaacaacagacctagtcaagaggaacagcatcgattgttaatatgctgtctgctttcaacccccaaaggattattttcagaatgaaatgatctgtggtctttaaggggtggggatgggaggagctgaagaactctcgatccttcgaagaggtcccagtggacttgatttctcagtggaaacagagggatttccttctgcagtgggaaagagacacgaagtgataaaccgagcaccctctttgaagatttcccagtatatttgtccc

SEQ ID NO: 11949 - protein, 44 aa, Homo sapiens
MKKMSRTSPLVFLDQSQNNRPSQEEQHRLLICCLLSTPKGLFSE

SEQ ID NO: 11950 - DNA, 1854 bp, Homo sapiens
taagcccacattctgaggttctggggaggcatgaattttgggagggacactatctttcccagaacagcttctattattttgtgtgtgtgtgctcagtgcttcgtagacttgactttatcccctcctcctagccaccttatgaggaagggacaatggctaccttgcctcacatgaggaggcgaggcacagagacttggaacctctcaggatacacgatcatctttgcccttgcttggaattcatctgattttcaaagaggcggcctgcagcagagcctcccaacctgacttttctctccaaatggcagtccctgcacgacaatgaacaaggagaagctgggctccacagtgccctgtgttcacaggctccacagtgagacgaaatgtcctggtttaaaacggacattgatcagacctgctgggaaggcaagcgggaggcagaaaggcacggctgcttccaagtttctgttggcagagagggcagagctgacaactcccagtgaaagatgttttcaccgtggcgcaagagcagagacagggccagcgcggcaccccagccccgctcacagctctaggttgatgcttctcagagggaagagctctttctctctcaagagtttcaataatcgtatcctaacttggcacagaacctcacccttcctgggaacacaggaatgtttgctacttgatgtcaataaaatccaactccttaaggtctctcctggggtccatggggtggagttcattccacaccattctgagacagagtcagaggaatttgctgggtcttctctggctcggaataagtccaccaggcatctctaccttatccagaagagagtcatttattttcacaagtgcatagcggccgacaccaccagcactaaccagagtggattcttgcttcactctcggggccctcattcaaggctggtctcttcccgcaggccttctgacaagtgccacattttgttcctctaacttgggtgaagccccctcaaacactagtctcaaagatcccttgctacaaaggtgggtgctcgggcctcaaattcaaagaccctgactcagtagatccaggttggggtcccaggactgtaatataggtggtcctggcaccacacttggccaaatgctgtgtagcttgcaagaaagctccagaagcaatctagagctttatatcatcactcaaaagtaaagatttgtaggaaaggtttaaaccagtgtcttcccaagtttccagcttcttcaaccaaactgctggttgaggggaaggtgatttgagattttagggcatcgatttatacagtgtgaaaattattcccctgtggttagatcaaaggaaaattcttcatctggcactaagagtctttagcacctcctgacacttctaagctcccttttgaacaaagagagagaggcctcaggcttgaagccatcagcaggcagcagtatctggctggaatttagcaatgctcgtttgtggtcaagtgcttaggagctggggctaaggcaacttttgtcatcaaaaagaaggcccagatcttggagagaagcagagcatcctgagtgtctgccaagcgccaactttgcagccacaggttcaagttcttccctaatcccggcagatctgccttcttggtcctattggtctccatgtgtggttggcgcgatctctgggctttgctgatgtgaagccatggggaggtggagttttaagagcggtgttctcagcgggaagagctctttctttctcaaacatttcggtaatctcatcccaacctggcatagaacctcacccttcctggggacacaggaatatttgctactttacatcaataaaatccaactcctt

SEQ ID NO: 11951 - protein, 219 aa, Homo sapiens [sequence omitted]

SEQ ID NO: 11952 - DNA, 628 bp, Homo sapiens
taggcttcttagctatgaaggtcatggaagctcaaggctgctggagaccacccctgctgtcacttagaactcatcctgcctgatcatgaagccaactagcaaaaaggagagccaagagatgtcaggaggaaaataagtcctactgttgtgcagtaaggccctagtcaaccaaggaacatcactgtgtgtcacgtgtccaccttcctttcccttgcctcgcatgccctgcctcatccaggcacagcctggaaggtagaggtgagtgacaagcacgcaggaagctttatggaacatccaacacctcaagactcagctcagacaccacctcctccaggaagcctcgcctggtgccctagtgtgccttctcaggctggttcatagcccatctctgctggtccacagcctttattgagggcagcaccatgcataagggctagactctggaacccagatgtccctgattggaatgtcagctcttgccagctgtgtgaccttgaacgtacgagtaacctatccgttccttggtttcatcacctataaaattaacatcagtctctctacctagtcctactttgttgtgagatttgtcactgagttagaacagaggccagcacatggctactcctca

SEQ ID NO: 11953 - protein, 37 aa, Homo sapiens
MSLIGMSALASCVTLNVRVTYPFLGFITYKINISLST

SEQ ID NO: 11954 - DNA, 726 bp, Homo sapiens
gcatggcagtcaccattgtcttgacttgggaaagaatctgacccccgcagatccttcaatcaggggctgctgctgagcttatgatgatttttcttctaaaggtcagcaactcattggggctgatggcgtccctgccctgggcagacaggcaggacttgctcatgagtctctgtatcactcagctccaggagactcagaatctcaccaggacacgtccatcactctctcatagctggtacttggaaatgaaagagactcgcagtgcagtcccaatcaatgtccgtcggccgtctctgtcgataactgccgggctgtccaatctttcccctgatagaaaggcgcctgggggtcagcctgaagaagctctggagggaagaggcggctgtttgattcagagcctcctcgctgggctggaattaacctggctctttctctaatgaaactgactccaagggtccctgtgtgctagagattcaatggcccttaggagaagcaatgatgagaggtaatattaaagcagtgtacacatgcagcctcgaattcctaaccacgctgatgatgttttcaaggtgctttgagccctgtaggaagcagcacctgtctggcatgatgctgaatgcacagtagaaacagtgaatgcagggagagtagaccctgggctgcctttcctatctactgatgaagagatcaggccttaagaagcttagtgacttaaccacgatgtca

SEQ ID NO: 11955 - protein, 118 aa, Homo sapiens [sequence omitted]

SEQ ID NO: 11956 - DNA, 808 bp, Homo sapiens
ctcagagtctgcatggcagtcaccattgtcttgacttgggaaagaatctgacccccgcaggtaaggggaagagccagggtctacgctcatcttccgaaggtgtttttcacctctccaagtcccggtcacttcatctcttagatgggagttaatttagtcaacaaatattgattgccatgttcctatgtgttggacactggggtttagtggtgagctagatggacatggtccctgttctcacaatgctctcttttaaataagagaggtgaacaagaagtgaataaatgaatctacgcacagtgcgatggctgtcaggcagagaaaggtgctataaagaaagatccttcaatcaggggctgctgctgagcttatgatgatttttcttctaaaggtcagcaactcattggggctgatggcgtccctgccctgggcagacaggcaggacttgctcatgagtctctgtatcactcagctccaggagactcagaatctcaccaggacacgtccatcactctctcatagctggtacttggaaatgaaagagactcgcagtgcagtcccaatcaatgtccgtcggccgtctctgtcgataactgccgggctgtccaatctttcccctgatagaaaggcgcctgggggtcagcctgaagaagctctggagggaagaggcggctgtttgattcagagcctcctcgctgggctggaattaacctggctctttctctaatgaaactgactccaagggtccctgtgtgctagagattcaatggcccttaggagaagcaatgatgagaggtaatattaaagc

SEQ ID NO: 11957 - protein, 118 aa, Homo sapiens [sequence omitted]

SEQ ID NO: 11958 - DNA, 803 bp, Homo sapiens
aggagacgcgagacgctgagcccagggccagagcttgcggggcgcacagagcccccaggcctcatggcgcagaaacctctcagcaccgcggcggctgaacgcatgaaccttgtgggtcaggatgagatctggaaataccgtctgaaggctgaatcggaagcacggcagaactggccccagaactgggggtttttaacaaccccttttgaggagttgatcaagtgtgaagaagatctccccaccccaaagcccaaaatcgagcttcctgagcgtttccgcatccggccggtgaccccagtggagaagtacatcaaggtctttccatcccccccagtcccacagaccacccagggcttcatcggctggagatctgcagtgccaggcctgaacaagtgcctagagctcgacgatgcgatcagaagctgcaaaggtgcttttgcacgagagctgtgctggcccaagcagggcgtgcactgaatccagacggagttctgcccaggggtgctgcatatcggtcaccaggcacccagggccatgccagggaaaggaagagctcccctgaatcccgaggacacagtcccctgcgtacttgctcatgggatgttgcaaagaacacaaagtgtgccttagacattctcaagtcatcagcgtcacccttccagaatgttcacgtccacacccattcttggctaatgtaatgaataaggcttctctcatttgtttttgataccttgggaatttctatgcagggctttaaaaaaaaataagtgattcaattttaaaaatatttgtctaggtccttc

SEQ ID NO: 11959 - protein, 137 aa, Homo sapiens; identical to SEQ ID NO: 1995

SEQ ID NO: 11960 - DNA, 928 bp, Homo sapiens
aggagacgcgagacgctgagcccagggccagagcttgcggggcgcacagagcccccaggcctcatggcgcagaaacctctcagcaccgcggcggctgaacgcatgaaccttgtgggtcaggatgagatctggaaataccgtctgaaggctgaatcggaagcacggcagaactggccccagaactgggggtttttaacaaccccttttgaggagttgatcaagtgtgaagaagatctccccaccccaaagcccaaaatcgagcttcctgagcgtttccgcatccggccggtgaccccagtggagaagtacatcaaggtctttccatcccccccagtcccacagaccacccagggcttcatcggctggagatctgcagtgccaggcctgaacaagtgcctagagctcgacgatgcgatcagaagctgcaaaggtgcttttgcacgagagctgtgctggcccaagcagggcgtgcactgaatccagacggagttctgcccaggggtgctgcatatcggtcaccaggcacccagggccatgccagggaaaggaagagctcccctgaatcccgaggacacagtcccctgcgtacttgctcatgggatgttgcaaagaacacaaagtgtgccttagacattctcaagtcatcagcgtcacccttccagaatgttcacgtccacacccattcttggctaatgtaatgaataaggcttctctcatttgtttttgataccttgggaatttctatgcagggctttaaaaaaaaataagtgattcaattttaaaaatatttgtctaggtccttcaatgtagcttttcattgcacctatcatcatccttatttataacgaacttgttgatcaggtgtttctctatccagatatccctgggcctgtttttcaggaagaagaatacacttagagaatccctt

SEQ ID NO: 11961 - protein, 137 aa, Homo sapiens; identical to SEQ ID NO: 1995

SEQ ID NO: 11962 - DNA, 3312 bp, Homo sapiens
atcttgggcctgtcacttggggagcactgtagaaggttctggagaaggcattgagactataattctactttaatgagctgggctacctagattctatggtacagcaagagaagctgtttgtatgcacctgtatgtacgtgccttacttaaaattcagaaagaaaatcttcaggtgccagaattacttgtgaggctggtgaagagtgaaaagccacttcccaggccagacaggaaagagtgccctggttgggaccagacgggcctggctgcagacgtacactttgggcttcagcagccctggtgctgccttgagcttgacccgaattgcttcttcccagaggctgggtctccctcgcagcccctgctctcaaggatgggaatgagaaggtcgatgacaaggcacctctgctttacatccaagcgttgacttttgtggcttcctttaccccattgctctgccctttaaagggtcctggtgtgtttgggaatgggacagacaattttgtttttcacaatggtattgggctgtggatccagaactcaagttccagaggaaagcgatgccaaagtcaacagggatgcttcacggaggcagggaaaatgcaggagtcaagttcagcagctgtgtggggaccaaggggacacaatatgagacctcgtccccgcactctggacacaagccgcagaaaggaaagaaggtcgtggctctggacccctctccgcctccgaaggacaccctgctgccgtggccccagcaccagaacgccaacgggctgaggcggcgcaaacgggactgggtcatcccgcccatcaacgtgcccgagaactcgcgcgggcccttcccgcagcagctcgtgaggatccggtccgacaaagacaatgacatccccatccggtacagcatcacgggagtgggcgccgaccagccccccatggaggtcttcagcattgactccatgtccggccggatgtacgtcacaaggcccatggaccgggaggagcacgcctcttaccacctccgagcccacgctgtggacatgaatggcaacaaggtggagaaccccatcgacctgtacatctacgtcatcgacatgaatgacaaccgccctgagttcatcaaccaggtctacaacggctccgtggacgagggctccaagccaggcacctacgtgatgaccgtcacggccaacgatgctgacgacagcaccacggccaacgggatggtgcggtaccggatcgtgacccagaccccacagagcccgtcccagaatatgttcaccatcaacagcgagactggagatatcgtcacagtggcggctggcctggaccgagagaaagttcagcagtacacagtcatcgttcaggccacagatatggaaggaaatctcaactatggcctctcaaacacagccacagccatcatcacggtgacagatgtgaatgacaacccgccagaatttaccgccagcacgtttgcaggggaggtccccgaaaaccgcgtggagaccgtggtcgcaaacctcacggtgatggaccgagatcagccccactctccaaactggaatgccgtttaccgcatcatcagtggggatccatccgggcacttcagcgtccgcacagaccccgtaaccaacgagggcatggtcaccgtggtgaaggcagtcgactacgagctcaacagagctttcatgctgacagtgatggtgtccaaccaggcgcccctggccagcggaatccagatgtccttccagtccacggcaggggtgaccatctccatcatggacatcaacgaggctccctacttcccctcaaaccacaagctgatccgcctggaggagggcgtgccccccggcaccgtgctgaccacgttttcagctgtggaccctgaccggttcatgcagcaggctgtgagatactcaaagctgtcagacccagcgagctggctgcacatcaatgccaccaacggccagatcaccacggcggcagtgctggaccgtgagtccctctacaccaaaaacaacgtctacgaggccaccttcctggcagctgacaatgggatacccccggccagcggcaccgggaccctccagatctatctcattgacatcaacgacaacgcccctgagctgctgcccaaggaggcgcagatctgcgagaagcccaacctgaacgccatcaacatcacggcggccgacgctgacgtcgaccccaacatcggcccctacgtcttcgagctgccctttgtcccggcggccgtgcggaagaactggaccatcacccgcctgaacggtgactatgcccaactcagcttgcgcatcctgtacctggaggccgggatgtatgacgtccccatcatcgtcacagactctggaaaccctcccctgtccaacacgtccatcatcaaagtcaaggtgtgcccatgtgatgacaacggggactgcaccaccattggcgcagtggcagcggctggtctgggcaccggtgccatcgtggccatcctcatctgcatcctcatcctgctgaccatggtcctgctgtttgtcatgtggatgaagcggcgagagaaggagcgccacacgaagcagctgctcattgaccccgaggacgacgtccgcgacaacatcctcaagtatgacgaggaaggcggtggcgaggaggaccaggactacgacctcagccagctgcagcagccggaagccatggggcacgtgccaagcaaagcccctggcgtgcgtcgcgtggatgagcggccggtgggcgctgagccccagtacccgatcaggcccatggtgccgcacccaggcgacatcggtgacttcatcaatgagggactccgcgctgctgacaacgaccccacggcacccccctatgactccctgctggtcttcgactacgaggggagcggctccaccgcaggctccgtcagctccctgaactcatccagttccggggaccaagactacgattacctcaacgactgggggcccagattcaagaagctggcggacatgtatggaggtggtgaagaggattgactgacctcgcatcttcggaccgaagtgagagccgtgctcggacgccggaggagcaggactgagcagaggcggccggtcttcccgactccctgcggctgtgtccttagtgctgttaggaggccccccaatccccacgttgagctgtctagcatgagcacccacccccacagcgccctgcacccggccgctgcccagcaccgcgctggctggcactgaaggacagcaagaggcactctgtcttcacttgaatttcctagaacagaagcactgtttttaa

SEQ ID NO: 11963 - protein, 824 aa, Homo sapiens
MPKSTGMLHGGRENAGVKFSSCVGTKGTQYETSSPHSGHKPQKGKKVVALDPSPPPKDTLLPWPQHQNANGLRRRKRDWVIPPINVPENSRGPFPQQLVRIRSDKDNDIPIRYSITGVGADQPPMEVFSIDSMSGRMYVTRPMDREEHASYHLRAHAVDMNGNKVENPIDLYIYVIDMNDNRPEFINQVYNGSVDEGSKPGTYVMTVTANDADDSTTANGMVRYRIVTQTPQSPSQNMFTINSETGDIVTVAAGLDREKVQQYTVIVQATDMEGNLNYGLSNTATAIITVTDVNDNPPEFTASTFAGEVPENRVETVVANLTVMDRDQPHSPNWNAVYRIISGDPSGHFSVRTDPVTNEGMVTVVKAVDYELNRAFMLTVMVSNQAPLASGIQMSFQSTAGVTISIMDINEAPYFPSNHKLIRLEEGVPPGTVLTTFSAVDPDRFMQQAVRYSKLSDPASWLHINATNGQITTAAVLDRESLYTKNNVYEATFLAADNGIPPASGTGTLQIYLIDINDNAPELLPKEAQICEKPNLNAINITAADADVDPNIGPYVFELPFVPAAVRKNWTITRLNGDYAQLSLRILYLEAGMYDVPIIVTDSGNPPLSNTSIIKVKVCPCDDNGDCTTIGAVAAAGLGTGAIVAILICILILLTMVLLFVMWMKRREKERHTKQLLIDPEDDVRDNILKYDEEGGGEEDQDYDLSQLQQPEAMGHVPSKAPGVRRVDERPVGAEPQYPIRPMVPHPGDIGDFINEGLRAADNDPTAPPYDSLLVFDYEGSGSTAGSVSSLNSSSSGDQDYDYLNDWGPRFKKLADMYGGGEED

SEQ ID NO: 11964 - DNA, 3071 bp, Homo sapiens
ttcttctttctccctctgccttaatgatgctgcccctttcctgttcctggttgaagctgaagcccgcttcccttcgccgcacacaacacaggagcaatcttctcagccgtgcactcacagcttggaaaataaagggaggaaggagtcccagccacagggtagaggaacggcctctccacagagaagctgctgctgctgagctgaagtgacagtcaagttcagcagctgtgtggggaccaaggggacacaatatgagaccaacagcatggacttcaaagttggggcagatgggacagtcttcgccacccgggagctgcaggtcccctccgagcaggtggcgttcacggtgactgcatgggacagccagacagcagagaaatgggacgccgtggtgcggttgctggtggcccagacctcgtccccgcactctggacacaagccgcagaaaggaaagaaggtcgtggctctggacccctctccgcctccgaaggacaccctgctgccgtggccccagcaccagaacgccaacgggctgaggcggcgcaaacgggactgggtcatcccgcccatcaacgtgcccgagaactcgcgcgggcccttcccgcagcagctcgtgaggatccggtccgacaaagacaatgacatccccatccggtacagcatcacgggagtgggcgccgaccagccccccatggaggtcttcagcattgactccatgtccggccggatgtacgtcacaaggcccatggaccgggaggagcacgcctcttaccacctccgagcccacgctgtggacatgaatggcaacaaggtggagaaccccatcgacctgtacatctacgtcatcgacatgaatgacaaccgccctgagttcatcaaccaggtctacaacggctccgtggacgagggctccaagccaggcacctacgtgatgaccgtcacggccaacgatgctgacgacagcaccacggccaacgggatggtgcggtaccggatcgtgacccagaccccacagagcccgtcccagaatatgttcaccatcaacagcgagactggagatatcgtcacagtggcggctggcctggaccgagagaaagttcagcagtacacagtcatcgttcaggccacagatatggaaggaaatctcaactatggcctctcaaacacagccacagccatcatcacggtgacagatgtgaatgacaacccgccagaatttaccgccagcacgtttgcaggggaggtccccgaaaaccgcgtggagaccgtggtcgcaaacctcacggtgatggaccgagatcagccccactctccaaactggaatgccgtttaccgcatcatcagtggggatccatccgggcacttcagcgtccgcacagaccccgtaaccaacgagggcatggtcaccgtggtgaaggcagtcgactacgagctcaacagagctttcatgctgacagtgatggtgtccaaccaggcgcccctggccagcggaatccagatgtccttccagtccacggcaggggtgaccatctccatcatggacatcaacgaggctccctacttcccctcaaaccacaagctgatccgcctggaggagggcgtgccccccggcaccgtgctgaccacgttttcagctgtggaccctgaccggttcatgcagcaggctgtgagatactcaaagctgtcagacccagcgagctggctgcacatcaatgccaccaacggccagatcaccacggcggcagtgctggaccgtgagtccctctacaccaaaaacaacgtctacgaggccaccttcctggcagctgacaatgggatacccccggccagcggcaccgggaccctccagatctatctcattgacatcaacgacaacgcccctgagctgctgcccaaggaggcgcagatctgcgagaagcccaacctgaacgccatcaacatcacggcggccgacgctgacgtcgaccccaacatcggcccctacgtcttcgagctgccctttgtcccggcggccgtgcggaagaactggaccatcacccgcctgaacggtgactatgcccaactcagcttgcgcatcctgtacctggaggccgggatgtatgacgtccccatcatcgtcacagactctggaaaccctcccctgtccaacacgtccatcatcaaagtcaaggtgtgcccatgtgatgacaacggggactgcaccaccattggcgcagtggcagcggctggtctgggcaccggtgccatcgtggccatcctcatctgcatcctcatcctgctgaccatggtcctgctgtttgtcatgtggatgaagcggcgagagaaggagcgccacacgaagcagctgctcattgaccccgaggacgacgtccgcgacaacatcctcaagtatgacgaggaaggcggtggcgaggaggaccaggactacgacctcagccagctgcagcagccggaagccatggggcacgtgccaagcaaagcccctggcgtgcgtcgcgtggatgagcggccggtgggcgctgagccccagtacccgatcaggcccatggtgccgcacccaggcgacatcggtgacttcatcaatgagggactccgcgctgctgacaacgaccccacggcacccccctatgactccctgctggtcttcgactacgaggggagcggctccaccgcaggctccgtcagctccctgaactcatccagttccggggaccaagactacgattacctcaacgactgggggcccagattcaagaagctggcggacatgtatggaggtggtgaagaggattgactgacctcgcatcttcggaccgaagtgagagccgtgctcggacgccggaggagcaggactgagcagaggcggccggtcttcccgactccctgcggctgtgtccttagtgctgttaggaggccccccaatccccacgttgagctgtctagcatgagcacccacccccacagcgccctgcacccggccgctgcccagcaccgcgctggctggcactgaaggacagcaagaggcactctgtcttcacttgaatttcctagaacagaagcactgtttttaa

SEQ ID NO: 11965 - protein, 842 aa, Homo sapiens
MDFKVGADGTVFATRELQVPSEQVAFTVTAWDSQTAEKWDAVVRLLVAQTSSPHSGHKPQKGKKVVALDPSPPPKDTLLPWPQHQNANGLRRRKRDWVIPPINVPENSRGPFPQQLVRIRSDKDNDIPIRYSITGVGADQPPMEVFSIDSMSGRMYVTRPMDREEHASYHLRAHAVDMNGNKVENPIDLYIYVIDMNDNRPEFINQVYNGSVDEGSKPGTYVMTVTANDADDSTTANGMVRYRIVTQTPQSPSQNMFTINSETGDIVTVAAGLDREKVQQYTVIVQATDMEGNLNYGLSNTATAIITVTDVNDNPPEFTASTFAGEVPENRVETVVANLTVMDRDQPHSPNWNAVYRIISGDPSGHFSVRTDPVTNEGMVTVVKAVDYELNRAFMLTVMVSNQAPLASGIQMSFQSTAGVTISIMDINEAPYFPSNHKLIRLEEGVPPGTVLTTFSAVDPDRFMQQAVRYSKLSDPASWLHINATNGQITTAAVLDRESLYTKNNVYEATFLAADNGIPPASGTGTLQIYLIDINDNAPELLPKEAQICEKPNLNAINITAADADVDPNIGPYVFELPFVPAAVRKNWTITRLNGDYAQLSLRILYLEAGMYDVPIIVTDSGNPPLSNTSIIKVKVCPCDDNGDCTTIGAVAAAGLGTGAIVAILICILILLTMVLLFVMWMKRREKERHTKQLLIDPEDDVRDNILKYDEEGGGEEDQDYDLSQLQQPEAMGHVPSKAPGVRRVDERPVGAEPQYPIRPMVPHPGDIGDFINEGLRAADNDPTAPPYDSLLVFDYEGSGSTAGSVSSLNSSSSGDQDYDYLNDWGPRFKKLADMYGGGEED

SEQ ID NO: 11966 - DNA, 2000 bp, Homo sapiens
atcttgtcgtatgatattaacacggctgctcggaaacacctcgagagagacaccagctttccccacgctcttcctttggtttctcttctggggggacattggatcgcacagctttgcaggggaaaaacagcttgtgtttttgaaagcaaggaataaaaacctcacaggcctccgtggctgactcgtaccttggaagattctgcaatgaggccacacggcacagaaatgttcttttacatccagacactaaacagtggcttgcatccttctctgtattagcaatgaacaaaaactaccaagacttaaaaaaaaaaatctctgattagaacccatggatgctgacaattatgtgtggctttcagatgcaaagccatttggctgcaggtgacatgaagaggctgggatacgattttgatcatttgctttcgccagcacttcctattagcacgagtgtggccagggagggtccttctctcatcacacttagagccactcgtgatgctgagtgtgctctttcatctggtgcagggcagggggcagggcgaggagagaagacccctgcttcacccactaaccaacaccctgggctggaagagctccaacaagcagcagacagagagttccatccccagcctgacagcaggaacagtgaagtccaagatagagccagctgtcgctgggagcccgggatggtgggtgcagcctcctccgcagctggtgagagtgtgtgtgtgcaggggtgtagggtggcctgttagcctagtgtctcctgcactcaaatgccctgtttcagttgagtaagctaattcacacagtgtcatgcaggctcctctggcttcggttcaagttaatgtcccattgaaaggcttctgttcaccttaggacacccagtcgggtagcccctgcagcgctctgccctgtgagcctgtgcaggtggtgcttggctgtgatcgaggttggcctgttccaggaagggaagcacggcctgggatatgggacggcactgtcctggcactgcctctaaccagcgtcagccttagcaggcacctgcctccttctgtgttgggtgtgtccagagccagagaggagcattccttttcatcacacctgaattatctccttcaacacccagagggaccaggctcccacccttggcatgatccaggaagaacagtgactcgagtgtggcttggcagcgccttacaggagaggcagggatgccgagaagggcaggtttgggcttcccccggaggcagagtggggtctggaaggcagggccccttggacagcatatacccttcaccctgccctggggaaggcagcaggacccagcggctcagtcttccgggtgggtcctaaccagccccacccccacagtgtgggtgctcccttgccttctctgggaccaggtcagcgtggctacagtaaagggccgcatcccttcacaggggacgctacccacagaggccagcattggtagggtgctgaggatgtgatgtgtgaggttgtaggggacatcagggccttctgtggcacaggcaggacttgacctcaggcggtgggctcctcggcctccctcacagtgccagagcccactctcctgtctccatgtcagtcccttccactaaactagcccaacacctggttcacggctacctgagcacactgggggctgggggcggggggcagggcggtgatgcacacttattaaaaccaagtatcagacatggtggctcacgcctgtcatcccagcacgttgggaggccgaggccggcagatcaccttaaggtcaggagttcgagaccagcctgaccaacatggtgaaaacctgcctctatgaaaaattcaaaattatccaggtgtggtggtgtgcgcctgtaatcccagctactcagggggctgaggcaggagaatcacttgaacccaggatgcagaggttgcagtgaaccaagatcgcaccactgcactccagcttcggtgacagggcgagactccatctc

SEQ ID NO: 11967 - protein, 56 aa, Homo sapiens
MILTRLLGNTSRETPAFPTLFLWFLFWGDIGSHSFAGEKQLVFLKARNKNLTGLRG

SEQ ID NO: 11968 - DNA, 1167 bp, Homo sapiens
ccataattctgaggcctcacagccatgtggaactgccccgtccaatcacgagaaagctccagggctttgtgacaagatgcagtcccaacatcctgtttcagtctaaccataacttgggtgttccgctccaaacacgacctctgtgtctgaacactcagcccactagcatttgtgattctgagtcctcagccgtggagaatcaggaggaaaacaggagttgtcactggtagagaaggaagcagcccaagggacaaaggtcacgatacggttacgcaaatggtgctggcccacaccctcctggagagaggcctggaagatgggggggtcattcagagaccccagttgttggggggacctgctttccaggagaagaaaggagcttcagaaccttcaatacctgctcctgtgccccaccaggctgtggcctctttcataaggaaagagcaataagtcttcaggagagaattaacatccaatggattcccagaaaacttttccctcgatgtaccagcaaacacctacaatgccctgaaaagccgcctctgcgaccccaatgcagatcacacgtcctgtcccagcccctgcagcctccacgcggcgggtgcactgccaggcacgggaaggcagcgctggcgagtagaactggcccatctcgcagataggaagctgagcctcagggacgtttcacgccttcgtcaaggtggtgagaggaggagcgggattgccgtgaaggtggtgagaggaggagcggggtttgctgcccgacttcagggatctgtcaccctcgtccagcagggttggttcttcccgaggctgggaggatgccaagcctggtggaggatgggggcggtggtgtggtgtggggagcttctgacttgcacatcctgagggaaccttctgcagctgatgtgtgaactggaccccaggccgtgcctccgaggaatccccaaggctatggcccctcaggtcctgctggggtgttggcccccacctctgcctcagaatgcaggggttctgcagggaagccgcagaccagcctgctgccttgggccctagggacactgcagccccagaaagtactgtgggggacaaaagagttgtttctcgggggagaaaacacctgtgaggaaatgcaggtgccacagagggaaatcctcctggggagga

SEQ ID NO: 11969 - protein, 57 aa, Homo sapiens [sequence omitted]

SEQ ID NO: 11970 - DNA, 785 bp, Homo sapiens
gctgctgtaatgtaagaaacgccttttgcctcctgccataattctgaggcctcacagccatgtggaacttcttcaggagagaattaacatccaatggattcccagaaaacttttccctcgatgtaccagcaaacacctacaatgccctgaaaagccgcctctgcgaccccaatgcagatcacacgtcctgtcccagcccctgcagcctccacgcggcgggtgcactgccaggcacgggaaggcagcgctggcgagtagaactggcccatctcgcagataggaagctgagcctcagggacgtttcacgccttcgtcaaggtggtgagaggaggagcgggattgccgtgaaggtggtgagaggaggagcggggtttgctgcccgacttcagggatctgtcaccctcgtccagcagggttggttcttcccgaggctgggaggatgccaagcctggtggaggatgggggcggtggtgtggtgtggggagcttctgacttgcacatcctgagggaaccttctgcagctgatgtgtgaactggaccccaggccgtgcctccgaggaatccccaaggctatggcccctcaggtcctgctggggtgttggcccccacctctgcctcagaatgcaggggttctgcagggaagccgcagaccagcctgctgccttgggccctagggacactgcagccccagaaagtactgtgggggacaaaagagttgtttctcgggggagaaaacacctgtgaggaaatgcaggtgccacagagggaaatcctcctggggagga

SEQ ID NO: 11971 - protein, 148 aa, Homo sapiens
MWNFFRRELTSNGFPENFSLDVPANTYNALKSRLCDPNADHTSCPSPCSLHAAGALPGTGRQRWRVELAHLADRKLSLRDVSRLRQGGERRSGIAVKVVRGGAGFAARLQGSVTLVQQGWFFPRLGGCQAWWRMGAVVWCGELLTCTS

SEQ ID NO: 11972 - DNA, 2170 bp, Homo sapiens
ctgcactgtcctccggcctcacgtggccttgtcttcacacccagcgtggtcatgtcttgggagcccgtcacccacgcacgcctcagggtggagcccccgcctggactcaggaccccgggcaccagctcccgcgtgtctcagaggctatgcagacaagagtccctggactgggctgtgtttgctggggctccttccctccagcgacgagtccccagatcatctcccgggtgtgcctcagttctcaaaggtcctggcagcccctctgcgccaggcagtggccgcacgccagcagcctcctcccacagcccaggagctggaggaaacagctcagccaagccgcgccaccagctagagccgggactccctccttgacattcagagctgctaagttttcctgcgcacggttggtttgacatttgcattggaatggatttatgttaacttcctccctgctgctggccggagaccaaatcctgctggttgctcaggcagtgatccccggatgggccacctgcctcattgcctgccctgccagagggaggctctgggacctgagaccacccaggcgcagacttggtgctgtgtagctcatggagcggccccgcctctgctcccaccgagccctccagcccccttgtcttggaaggacgcagctccccttcctggccctcccccaaccccaagtcctcgcccaagcgctgcttcctctatgaagcttccctgagcggccctcttggagggtcactgttccctggcaaattctgaccacacctggctcctccatcatttcatggacgcagccctggtcagctccacttgggtcggggctgacgtggctcattcccttgcaccccagcacagcgcaggacaggctattcagctggtgtccagtccgcctgtgctgtatgctccctgcagccgggagcagccaccacgcatccatccacccttccgtcctccctgagggctggcactgcctcccggatcctgccgcgtacacagcaggtgcagaatgggtgctcgctaactccatgggacgacggggtgtcaaacctgcagccaccagcttctgacgggagatttgctgagagcctgcaagtcccacgggcctactggggggctgtgcacagagagcctagggggccatggcccagccctggcactccccgcccacagcaattattgccccaggagccaggcccagcctgcacctccacaccggccctgctccttcctcctctaggtccaggccccaggagccaggcccagcctgcgcccccacaccggccctgctccttcctcctctgggcccaggccccaggagccaggcccagcctgcgcccccacaccggccctgctccttcctcctctaggtccaggccccaggagccaggcccagcctgcgcccccacaccggccctgctccttcctcctctgggcccaggccccaggagctgggcccaggccccaggagccaggcccagcctgcgcccccacaatggccctgctccttcctcctctaggcccaggcgcccgcctgacacatgtccaccatgttcaccttgcctgtgtcacacatgagaagactgagactcagtgagggcccagcagagcgggtggagctggtcagcccggctgtgccctgacatgtgggggtggggggtgtggaatcctaatgagggaaaaggagtcgggctggcaggacagagggaaggcaaaaagaagaagcaaagaagctttaagtctgcccttcttcactgtccaggacacacagccctcctgaagaaataactcacaatcttcctgtgcccggctattgccagacccttggctgataggagaatggatgttagctgactgcaaccttggcgttatcagtactgcctgtggccctctccagcacacagcacaggcgccgtcctataacatccccagcaagccctcatttctttgcagtggctcctcccttgctgacctgccccttgcttcggctcctcccttgctgacctgccccttgcttcggctcctcccttgctgacctgccccttgcttcggctcctcccttgctgacctgccccttgcttcggctcctcccttgctgacctgcccgttgcttctgtgctatgcacattttctactttctctaataaatctgcctttctttacctac

SEQ ID NO: 11973 - protein, 106 aa, Homo sapiens
MSWEPVTHARLRVEPPPGLRTPGTSSRVSQRLCRQESLDWAVFAGAPSLQRRVPRSSPGCASVLKGPGSPSAPGSGRTPAASSHSPGAGGNSSAKPRHQLEPGLPP

SEQ ID NO: 11974 - DNA, 453 bp, Homo sapiens
gggatcacggcaggaagggggcaacgtggatggacacctgcaccctgtgtgggggtataaatcaccctacagggcgctcgtcacctggccagccagagccctaggacccagccgcccctgctcctcactcactgtggcccccagccccactgtttcacaacaccccagctcgttcgtgccctgaggagagggaccatccgtccccacacccggtccacagcaccgcacccgactcagccccagcatcgaccagaagtccccggccctcagaccggccgcccagagacagtgggagtgaggaggccacacaccgtccaggttgaatcactgcgttttactgagtgcacaggtccacctggcgtccgaactcgtccccgtggcagcagggatccccagaaccttccacggccatcgcggccgcaggaccccacacccgaagtcccccgcaaaccc

SEQ ID NO: 11975 - protein, 130 aa, Homo sapiens
ITLQGARHLASQSPRTQPPLLLTHCGPQPHCFTTPQLVRALRRGTIRPHTRSTAPHPTQPQHRPEVPGPQTGRPETVGVRRPHTVQVESLRFTECTGPPGVRTRPRGSRDPQNLPRPSRPQDPTPEVPRK

SEQ ID NO: 11976 - DNA, 7546 bp, Homo sapiens
gcgcggagcgaggtggccgcagcgtctccgcgcgcggcccaagcccggcaggagtgcggaaccgccgcctcggccatgcggctcccggccggggggcctgggctggggcccgcgccgccccccgcgctccgcccccgctgagcctgagcccgacccggggcgcctcccgccaggcaccatggtgcagaagtcgcgcaacggcggcgtataccccggcccgagcggggagaagaagctgaaggtgggcttcgtggggctggaccccggcgcgcccgactccacccgggacggggcgctgctgatcgccggctccgaggcccccaagcgcggcagcatcctcagcaaacctcgcgcgggcggcgcgggcgccgggaagccccccaagcgcaacgccttctaccgcaagctgcagaatttcctctacaacgtgctggagcggccgcgcggctgggcgttcatctaccacgcctacgtgttcctcctggttttctcctgcctcgtgctgtctgtgttttccaccatcaaggagtatgagaagagctcggagggggccctctacatcctggaaatcgtgactatcgtggtgtttggcgtggagtacttcgtgcggatctgggccgcaggctgctgctgccggtaccgtggctggagggggcggctcaagtttgcccggaaaccgttctgtgtgattgacatcatggtgctcatcgcctccattgcggtgctggccgccggctcccagggcaacgtctttgccacatctgcgctccggagcctgcgcttcctgcagattctgcggatgatccgcatggaccggcggggaggcacctggaagctgctgggctctgtggtctatgcccacagcaaggagctggtcactgcctggtacatcggcttcctttgtctcatcctggcctcgttcctggtgtacttggcagagaagggggagaacgaccactttgacacctacgcggatgcactctggtggggcctgatcacgctgaccaccattggctacggggacaagtacccccagacctggaacggcaggctccttgcggcaaccttcaccctcatcggtgtctccttcttcgcgctgcctgcaggcatcttggggtctgggtttgccctgaaggttcaggagcagcacaggcagaagcactttgagaagaggcggaacccggcagcaggcctgatccagtcggcctggagattctacgccaccaacctctcgcgcacagacctgcactccacgtggcagtactacgagcgaacggtcaccgtgcccatgtacagacttatccccccgctgaaccagctggagctgctgaggaacctcaagagtaaatctggactcgctttcaggaaggaccccccgccggagccgtctccaagccagaaggtcagtttgaaagatcgtgtcttctccagcccccgaggcgtggctgccaaggggaaggggtccccgcaggcccagactgtgaggcggtcacccagcgccgaccagagcctcgaggacagccccagcaaggtgcccaagagctggagcttcggggaccgcagccgggcacgccaggctttccgcatcaagggtgccgcgtcacggcagaactcagaagaagcaagcctccccggagaggacattgtggatgacaagagctgcccctgcgagtttgtgaccgaggacctgaccccgggcctcaaagtcagcatcagagccgtgtgtgtcatgcggttcctggtgtccaagcggaagttcaaggagagcctgcggccctacgacgtgatggacgtcatcgagcagtactcagccggccacctggacatgctgtcccgaattaagagcctgcagtccagagtggaccagatcgtggggcggggcccagcgatcacggacaaggaccgcaccaagggcccggccgaggcggagctgcccgaggaccccagcatgatgggacggctcgggaaggtggagaagcaggtcttgtccatggagaagaagctggacttcctggtgaatatctacatgcagcggatgggcatccccccgacagagaccgaggcctactttggggccaaagagccggagccggcgccgccgtaccacagcccggaagacagccgggagcatgtcgacaggcacggctgcattgtcaagatcgtgcgctccagcagctccacgggccagaagaacttctcggcgcccccggccgcgccccctgtccagtgtccgccctccacctcctggcagccacagagccacccgcgccagggccacggcacctcccccgtgggggaccacggctccctggtgcgcatcccgccgccgcctgcccacgagcggtcgctgtccgcctacggcgggggcaaccgcgccagcatggagttcctgcggcaggaggacaccccgggctgcaggccccccgaggggaacctgcgggacagcgacacgtccatctccatcccgtccgtggaccacgaggagctggagcgttccttcagcggcttcagcatctcccagtccaaggagaacctggatgctctcaacagctgctacgcggccgtggcgccttgtgccaaagtcaggccctacattgcggagggagagtcagacaccgactccgacctctgtaccccgtgcgggcccccgccacgctcggccaccggcgagggtccctttggtgacgtgggctgggccgggcccaggaagtgaggcggcgctgggccagtggacccgcccgcggccctcctcagcacggtgcctccgaggttttgaggcgggaaccctctggggcccttttcttacagtaactgagtgtggcgggaagggtgggccctggaggggcccatgtgggctgaaggatgggggctcctggcagtgaccttttacaaaagttattttccaacagggggcactcccaggccctgtcgccattgaggtgcctccgctgggctgtctcctcacccctccctgtgctggagcctgtcccaaaaaggtgccaactgggaggcctcggaagccactgtccaggctcccactgcctgtctgctctgttcccaaaggcagcgtgtgtggcctcgggccctgcggtggcatgaagcatcccttctggtgtgggcatcgctacgtgttttgggggcagcgtttcacggcggtgcccttgctgtctcccttgggctggctcgagcctggggtccatgtccctttgccgtcccgtcatggggcagggaatccatagcggggcccacaggcaggggtatgagtgcgtcccacccaacgcagcaccagccccggccaccgctccccgtgtccccagttccgtctcagctacctggactccaggaccctggagaagggagacctggcagtggagggaggctgtgctgtgtgtccccctgcaggtgtgaccccgcctgctctttcctcccccgccaggtgtggccccgcctgctctttcctcccccaccagtatggccccacctgctctttcctccccccccaaggtgtggccccacctgttctttcctcccctgccgaggtgtgaccccacctgctctttcctccctcccagtatggccccacctgctctttcctcccccgaggtgaggccccgcctgctctttcctcccatggggccgctgaggcatgagcacctgggcacaggttggggctctgcaggatgaggaagacaggccaatcccttccctcccagaagctggccgcccagcaggagggactgaggccagactcatgtccagcaaggaacgtgtggtgtgtcccctgggaagtctctgggccctgggaagagggaaggtgcacgtcctgggatggttgcggggccctgttttgggagacaaaggggtagagggtctgtcttgggcccccccagactctagcctgagcagtgcagccacctactgccccacctcagagaagtgcagcgggaaggaggctggaggtggtgcggcgctgcctcgggtgtctgcgtgaatgagcgtggccaaggaccagtgccaccttatggcaaagagctcccgcagtgtttgttagagtgcacatccctacgtgcccactggcacacacacgtgctcacatacatgtccgcatacaggcgtacacatgcacgcttgcacacatgcacacagaccacatagcacacatgtgcactgaccacacctgtatagaccatgcacagtacacatacgtgcatacacatgcctgcatacaggcatacacatgcacgcttacatgtacacgtgcacagatcacacacatgcacacacgtgtagctcacacacagtatacacatacacaagtgcacagaccacacacagcactaacacatgcacacacaaagtgcataggccacacagcacatgcacacaggtgcacagaccacacagcacacacaagtgcacagagcacactgcacacatgcacacacacacgcgtgcatgcacactcctcgcacttccagccttggagcccttctgtctctggtctttctctttgaccctgctgagtgtaagctgcctggggaggggctacaaggagtaattgtggctttaggggtcgtggtgatgctggaatgtcaagcgccgtcgtggggtatccgactgtccgggctcctggtccgcagtggcagagcgccaggcagagcccaatcagggtctcgtgctgcccttccctcccacagcctggcagccatccagaggaggggctctaccagatgccaaggtgccccggtgtctgtatgggtgtccggttgggtcctgtgtttggtctgccctggaggtgctgggccctcctgggatgggtggctcagcctcgaatcccaggccccagcccaggcaggtgctgctgcctgttgtggtttcctggcccagcttctccttctccctctgcataaaatcacagtccgtgagtcttccagctgccaccacggctgggacacgctgggggagggctcctcccatgcctcctgcacacagccgtctgagcagggcaggtgcccaacaccccccaccggaggacacgctgcccctcagcgatgcccctaccttttggggggcctcgtctcaagcccccccttggaggctgaaatcaccccaggcactgtgagggcttctccagggggcaccctttgagctgtgggtctgatcaccccaagtcccgcccggaggagaggcacagccagggcgtgtggtttaatgtttgcccccttcggggctggaggtctcagtgtttctagattccagaccctgctgccagagagacctgctgccggagagaaggggaggaggactccagctgggctcggtcccccacagtcagggacccccataaaggacacccccttctctctagaaagagctgggctctcagctatttctagttgcttcccagaagccgaggagcagaaggagctgtgagagctttgcagaaacgcccttgtccccgccctcctgagctatgaatgccgtacagagcagaggctggggcattggcaagatcacaggttgatgctgcacagccccattgacacaaaccctcaaagcagacgtgagagggacggttcacaaagctcggacctgccgtggagggtgcccggcagacgtggcgtgagagggacggctcacgaggcttggacctgctgtggagggtgcccagcagacgtggtgtgagaggaacggctcacgagacttggacctggtggagggtgcccagcagacgtggtgtgagagggacggctcacagggcttggacctgccagagatggctcatgaggcttggacctgccgtggagggtgcccagcagacgtggtatgagagggatggctcacgaggcttggacctggtggagggtgcccggcagacgtgtgagagggacggttcacaaggcttggacctgccatggagggtgcccagcagacgtggtgtgagagggacagctcacgaggcttggacctgctgtggagggtgcccagcagggggctgagctctgaggggtgggtgctcagtgcacgggtgcccccagtgtcctctgatcctgtccggtgcctcccccaacccccacacccatgcagaactcccaggtcacatgcacgtatgtccagggcatgggggtggcgtgaagaggcctggtcagggcctttaggggctgcaggacggaatggccgcctggggagcctgtgtggctgtgccgggcagccatcctgcattcccacccagcgcgcagtctccacctcggccccagcaaagcgctaagcagccggagagacagccagggcggcttcctgaaggatgtgggatggtggactccggggtcgagggaatacgcaggttcctgtccctccgggagacctagagaagctgcacacccaggagctttccatgacccgggagcatgagtgaatgggggttccagtttgctgaactttgccgtcttgtaagggtgggggctgacggccgaccctgggaggaggtgacatcgccgggggaggttgtgggcaacggtggaggaggagagacgggaggggaccatttgggatggaggggcctcttcagagttttaaaaggcgtttgtggggtggagttgagtgtgctctgggcttggacacttgccgtggtgcccctggctggccgaggagactggctctggccaggggccccgtcctgagaggtcctcagcgtctgactctcggccaggcgccagcaaggaggggccggtccccggggctaccaggcaggcacgtgcacatcgccatcgccacacgccaactccgcctgggttttacaaagtcgttgccttaatgcatgtggacaggaactccctgaggtcgccccatgccccctggctgtgccaggtacggacgccctggaccctgcgaacaggtggggcgggcgaggggcccaagggacgggctccagagacacgcgcagggcaggaggggtctcacggaggggtctcgcactgaggcgcccagagctggtggtcccgctggacgccatccctctgcccgggatccacacggcccacgtgtgcccgccatgcccgcgccccacgccattgcagtctgccatcctctggccgtgacggtggctgcagcttccccatttgcgccgttgcctctggctgtctgcacttttgttcatgctccaaagaacatttcataatgccttcagtaccgacgtacacttctgaccattttgtatgtgtccttgtgccgtagtgaccaggcctttttttggtggatgtgttaccccgcacacttcaatctcaactttgtgcaccgtccattttctagggatagacgcccagggaatgaactctagttttctaacagattagctgagatattaacttactcacacggacaggttgatgccagagccgtaagaatgcgccagtgcgggtttgcgggggacttcgggtgtggggtcctgcggccgcgatggccgtggaaggttctggggatccctgctgccacggggacgagttcggacgccaggtggacctgtgcactcagtaaaacgcagtgattc

SEQ ID NO: 11977 - protein, 844 aa, Homo sapiens; identical to SEQ ID NO: 1997

SEQ ID NO: 11978 - DNA, 3402 bp, Homo sapiens
gcgcggagcgaggtggccgcagcgtctccgcgcgcggcccaagcccggcaggagtgcggaaccgccgcctcggccatgcggctcccggccggggggcctgggctggggcccgcgccgccccccgcgctccgcccccgctgagcctgagcccgacccggggcgcctcccgccaggcaccatggtgcagaagtcgcgcaacggcggcgtataccccggcccgagcggggagaagaagctgaaggtgggcttcgtggggctggaccccggcgcgcccgactccacccgggacggggcgctgctgatcgccggctccgaggcccccaagcgcggcagcatcctcagcaaacctcgcgcgggcggcgcgggcgccgggaagccccccaagcgcaacgccttctaccgcaagctgcagaatttcctctacaacgtgctggagcggccgcgcggctgggcgttcatctaccacgcctacgtgttcctcctggttttctcctgcctcgtgctgtctgtgttttccaccatcaaggagtatgagaagagctcggagggggccctctacatcctggaaatcgtgactatcgtggtgtttggcgtggagtacttcgtgcggatctgggccgcaggctgctgctgccggtaccgtggctggagggggcggctcaagtttgcccggaaaccgttctgtgtgattgacatcatggtgctcatcgcctccattgcggtgctggccgccggctcccagggcaacgtctttgccacatctgcgctccggagcctgcgcttcctgcagattctgcggatgatccgcatggaccggcggggaggcacctggaagctgctgggctctgtggtctatgcccacagcaaggagctggtcactgcctggtacatcggcttcctttgtctcatcctggcctcgttcctggtgtacttggcagagaagggggagaacgaccactttgacacctacgcggatgcactctggtggggcctgatcacgctgaccaccattggctacggggacaagtacccccagacctggaacggcaggctccttgcggcaaccttcaccctcatcggtgtctccttcttcgcgctgcctgcaggcatcttggggtctgggtttgccctgaaggttcaggagcagcacaggcagaagcactttgagaagaggcggaacccggcagcaggcctgatccagtcggcctggagattctacgccaccaacctctcgcgcacagacctgcactccacgtggcagtactacgagcgaacggtcaccgtgcccatgtacagttcgcaaactcaaacctacggggcctccagacttatccccccgctgaaccagctggagctgctgaggaacctcaagagtaaatctggactcgctttcaggaaggaccccccgccggagccgtctccaagtaaaggcagcccgtgcagagggcccctgtgtggatgctgccccggacgctctagccagaaggtcagtttgaaagatcgtgtcttctccagcccccgaggcgtggctgccaaggggaaggggtccccgcaggcccagactgtgaggcggtcacccagcgccgaccagagcctcgaggacagccccagcaaggtgcccaagagctggagcttcggggaccgcagccgggcacgccaggctttccgcatcaagggtgccgcgtcacggcagaactcagaagaagcaagcctccccggagaggacattgtggatgacaagagctgcccctgcgagtttgtgaccgaggacctgaccccgggcctcaaagtcagcatcagagccgtgtgtgtcatgcggttcctggtgtccaagcggaagttcaaggagagcctgcggccctacgacgtgatggacgtcatcgagcagtactcagccggccacctggacatgctgtcccgaattaagagcctgcagtccagagtggaccagatcgtggggcggggcccagcgatcacggacaaggaccgcaccaagggcccggccgaggcggagctgcccgaggaccccagcatgatgggacggctcgggaaggtggagaagcaggtcttgtccatggagaagaagctggacttcctggtgaatatctacatgcagcggatgggcatccccccgacagagaccgaggcctactttggggccaaagagccggagccggcgccgccgtaccacagcccggaagacagccgggagcatgtcgacaggcacggctgcattgtcaagatcgtgcgctccagcagctccacgggccagaagaacttctcggcgcccccggccgcgccccctgtccagtgtccgccctccacctcctggcagccacagagccacccgcgccagggccacggcacctcccccgtgggggaccacggctccctggtgcgcatcccgccgccgcctgcccacgagcggtcgctgtccgcctacggcgggggcaaccgcgccagcatggagttcctgcggcaggaggacaccccgggctgcaggccccccgaggggaacctgcgggacagcgacacgtccatctccatcccgtccgtggaccacgaggagctggagcgttccttcagcggcttcagcatctcccagtccaaggagaacctggatgctctcaacagctgctacgcggccgtggcgccttgtgccaaagtcaggccctacattgcggagggagagtcagacaccgactccgacctctgtaccccgtgcgggcccccgccacgctcggccaccggcgagggtccctttggtgacgtgggctgggccgggcccaggaagtgaggcggcgctgggccagtggacccgcccgcggccctcctcagcacggtgcctccgaggttttgaggcgggaaccctctggggcccttttcttacagtaactgagtgtggcgggaagggtgggccctggaggggcccatgtgggctgaaggatgggggctcctggcagtgaccttttacaaaagttattttccaacaggggctggagggctgggcagggccctgtggctccaggagcagcgtgcaggagcaaggctgccctgtccactctgctcagggccgcggccgacatcagcccggtgtgaggaggggcgggagtgatgacggggtgttgccagcgtggcaacaggcggggggttgtctcagccgagcccaggggaggcacaaagggcaggcctgttccctgaggacctgcgcaaagggcgggcctgtttggtgaggacctgcggccttgggtcccggtggggtttccgggcagctacaggcgggtgtggccggccgctgtgcgtggcctctgccttcacacctgacctgcccggcgggctttcctgttccccacctcaggggcgcccaaatacagagctattggttggcgtcttctccctgta

SEQ ID NO: 11979 - protein, 872 aa, Homo sapiens [sequence omitted]

SEQ ID NO: 11980 - DNA, 3348 bp, Homo sapiens
gcgcggagcgaggtggccgcagcgtctccgcgcgcggcccaagcccggcaggagtgcggaaccgccgcctcggccatgcggctcccggccggggggcctgggctggggcccgcgccgccccccgcgctccgcccccgctgagcctgagcccgacccggggcgcctcccgccaggcaccatggtgcagaagtcgcgcaacggcggcgtataccccggcccgagcggggagaagaagctgaaggtgggcttcgtggggctggaccccggcgcgcccgactccacccgggacggggcgctgctgatcgccggctccgaggcccccaagcgcggcagcatcctcagcaaacctcgcgcgggcggcgcgggcgccgggaagccccccaagcgcaacgccttctaccgcaagctgcagaatttcctctacaacgtgctggagcggccgcgcggctgggcgttcatctaccacgcctacgtgttcctcctggttttctcctgcctcgtgctgtctgtgttttccaccatcaaggagtatgagaagagctcggagggggccctctacatcctggaaatcgtgactatcgtggtgtttggcgtggagtacttcgtgcggatctgggccgcaggctgctgctgccggtaccgtggctggagggggcggctcaagtttgcccggaaaccgttctgtgtgattgacatcatggtgctcatcgcctccattgcggtgctggccgccggctcccagggcaacgtctttgccacatctgcgctccggagcctgcgcttcctgcagattctgcggatgatccgcatggaccggcggggaggcacctggaagctgctgggctctgtggtctatgcccacagcaaggagctggtcactgcctggtacatcggcttcctttgtctcatcctggcctcgttcctggtgtacttggcagagaagggggagaacgaccactttgacacctacgcggatgcactctggtggggcctgatcacgctgaccaccattggctacggggacaagtacccccagacctggaacggcaggctccttgcggcaaccttcaccctcatcggtgtctccttcttcgcgctgcctgcaggcatcttggggtctgggtttgccctgaaggttcaggagcagcacaggcagaagcactttgagaagaggcggaacccggcagcaggcctgatccagtcggcctggagattctacgccaccaacctctcgcgcacagacctgcactccacgtggcagtactacgagcgaacggtcaccgtgcccatgtacagttcgcaaactcaaacctacggggcctccagacttatccccccgctgaaccagctggagctgctgaggaacctcaagagtaaatctggactcgctttcaggaaggaccccccgccggagccgtctccaagccagaaggtcagtttgaaagatcgtgtcttctccagcccccgaggcgtggctgccaaggggaaggggtccccgcaggcccagactgtgaggcggtcacccagcgccgaccagagcctcgaggacagccccagcaaggtgcccaagagctggagcttcggggaccgcagccgggcacgccaggctttccgcatcaagggtgccgcgtcacggcagaactcagaagaagcaagcctccccggagaggacattgtggatgacaagagctgcccctgcgagtttgtgaccgaggacctgaccccgggcctcaaagtcagcatcagagccgtgtgtgtcatgcggttcctggtgtccaagcggaagttcaaggagagcctgcggccctacgacgtgatggacgtcatcgagcagtactcagccggccacctggacatgctgtcccgaattaagagcctgcagtccagagtggaccagatcgtggggcggggcccagcgatcacggacaaggaccgcaccaagggcccggccgaggcggagctgcccgaggaccccagcatgatgggacggctcgggaaggtggagaagcaggtcttgtccatggagaagaagctggacttcctggtgaatatctacatgcagcggatgggcatccccccgacagagaccgaggcctactttggggccaaagagccggagccggcgccgccgtaccacagcccggaagacagccgggagcatgtcgacaggcacggctgcattgtcaagatcgtgcgctccagcagctccacgggccagaagaacttctcggcgcccccggccgcgccccctgtccagtgtccgccctccacctcctggcagccacagagccacccgcgccagggccacggcacctcccccgtgggggaccacggctccctggtgcgcatcccgccgccgcctgcccacgagcggtcgctgtccgcctacggcgggggcaaccgcgccagcatggagttcctgcggcaggaggacaccccgggctgcaggccccccgaggggaacctgcgggacagcgacacgtccatctccatcccgtccgtggaccacgaggagctggagcgttccttcagcggcttcagcatctcccagtccaaggagaacctggatgctctcaacagctgctacgcggccgtggcgccttgtgccaaagtcaggccctacattgcggagggagagtcagacaccgactccgacctctgtaccccgtgcgggcccccgccacgctcggccaccggcgagggtccctttggtgacgtgggctgggccgggcccaggaagtgaggcggcgctgggccagtggacccgcccgcggccctcctcagcacggtgcctccgaggttttgaggcgggaaccctctggggcccttttcttacagtaactgagtgtggcgggaagggtgggccctggaggggcccatgtgggctgaaggatgggggctcctggcagtgaccttttacaaaagttattttccaacaggggctggagggctgggcagggccctgtggctccaggagcagcgtgcaggagcaaggctgccctgtccactctgctcagggccgcggccgacatcagcccggtgtgaggaggggcgggagtgatgacggggtgttgccagcgtggcaacaggcggggggttgtctcagccgagcccaggggaggcacaaagggcaggcctgttccctgaggacctgcgcaaagggcgggcctgtttggtgaggacctgcggccttgggtcccggtggggtttccgggcagctacaggcgggtgtggccggccgctgtgcgtggcctctgccttcacacctgacctgcccggcgggctttcctgttccccacctcaggggcgcccaaatacagagctattggttggcgtcttctccctgta

SEQ ID NO: 11981 - protein, 854 aa, Homo sapiens; identical to SEQ ID NO: 1999

SEQ ID NO: 11982 - DNA, 3312 bp, Homo sapiens
gcgcggagcgaggtggccgcagcgtctccgcgcgcggcccaagcccggcaggagtgcggaaccgccgcctcggccatgcggctcccggccggggggcctgggctggggcccgcgccgccccccgcgctccgcccccgctgagcctgagcccgacccggggcgcctcccgccaggcaccatggtgcagaagtcgcgcaacggcggcgtataccccggcccgagcggggagaagaagctgaaggtgggcttcgtggggctggaccccggcgcgcccgactccacccgggacggggcgctgctgatcgccggctccgaggcccccaagcgcggcagcatcctcagcaaacctcgcgcgggcggcgcgggcgccgggaagccccccaagcgcaacgccttctaccgcaagctgcagaatttcctctacaacgtgctggagcggccgcgcggctgggcgttcatctaccacgcctacgtgttcctcctggttttctcctgcctcgtgctgtctgtgttttccaccatcaaggagtatgagaagagctcggagggggccctctacatcctggaaatcgtgactatcgtggtgtttggcgtggagtacttcgtgcggatctgggccgcaggctgctgctgccggtaccgtggctggagggggcggctcaagtttgcccggaaaccgttctgtgtgattgacatcatggtgctcatcgcctccattgcggtgctggccgccggctcccagggcaacgtctttgccacatctgcgctccggagcctgcgcttcctgcagattctgcggatgatccgcatggaccggcggggaggcacctggaagctgctgggctctgtggtctatgcccacagcaaggagctggtcactgcctggtacatcggcttcctttgtctcatcctggcctcgttcctggtgtacttggcagagaagggggagaacgaccactttgacacctacgcggatgcactctggtggggcctgatcacgctgaccaccattggctacggggacaagtacccccagacctggaacggcaggctccttgcggcaaccttcaccctcatcggtgtctccttcttcgcgctgcctgcaggcatcttggggtctgggtttgccctgaaggttcaggagcagcacaggcagaagcactttgagaagaggcggaacccggcagcaggcctgatccagtcggcctggagattctacgccaccaacctctcgcgcacagacctgcactccacgtggcagtactacgagcgaacggtcaccgtgcccatgtacagttcgcaaactcaaacctacggggcctccagacttatccccccgctgaaccagctggagctgctgaggaacctcaagagtaaatctggactcgctttcaggaaggaccccccgccggagccgtctccaagcccccgaggcgtggctgccaaggggaaggggtccccgcaggcccagactgtgaggcggtcacccagcgccgaccagagcctcgaggacagccccagcaaggtgcccaagagctggagcttcggggaccgcagccgggcacgccaggctttccgcatcaagggtgccgcgtcacggcagaactcagaagaagcaagcctccccggagaggacattgtggatgacaagagctgcccctgcgagtttgtgaccgaggacctgaccccgggcctcaaagtcagcatcagagccgtgtgtgtcatgcggttcctggtgtccaagcggaagttcaaggagagcctgcggccctacgacgtgatggacgtcatcgagcagtactcagccggccacctggacatgctgtcccgaattaagagcctgcagtccagagtggaccagatcgtggggcggggcccagcgatcacggacaaggaccgcaccaagggcccggccgaggcggagctgcccgaggaccccagcatgatgggacggctcgggaaggtggagaagcaggtcttgtccatggagaagaagctggacttcctggtgaatatctacatgcagcggatgggcatccccccgacagagaccgaggcctactttggggccaaagagccggagccggcgccgccgtaccacagcccggaagacagccgggagcatgtcgacaggcacggctgcattgtcaagatcgtgcgctccagcagctccacgggccagaagaacttctcggcgcccccggccgcgccccctgtccagtgtccgccctccacctcctggcagccacagagccacccgcgccagggccacggcacctcccccgtgggggaccacggctccctggtgcgcatcccgccgccgcctgcccacgagcggtcgctgtccgcctacggcgggggcaaccgcgccagcatggagttcctgcggcaggaggacaccccgggctgcaggccccccgaggggaacctgcgggacagcgacacgtccatctccatcccgtccgtggaccacgaggagctggagcgttccttcagcggcttcagcatctcccagtccaaggagaacctggatgctctcaacagctgctacgcggccgtggcgccttgtgccaaagtcaggccctacattgcggagggagagtcagacaccgactccgacctctgtaccccgtgcgggcccccgccacgctcggccaccggcgagggtccctttggtgacgtgggctgggccgggcccaggaagtgaggcggcgctgggccagtggacccgcccgcggccctcctcagcacggtgcctccgaggttttgaggcgggaaccctctggggcccttttcttacagtaactgagtgtggcgggaagggtgggccctggaggggcccatgtgggctgaaggatgggggctcctggcagtgaccttttacaaaagttattttccaacaggggctggagggctgggcagggccctgtggctccaggagcagcgtgcaggagcaaggctgccctgtccactctgctcagggccgcggccgacatcagcccggtgtgaggaggggcgggagtgatgacggggtgttgccagcgtggcaacaggcggggggttgtctcagccgagcccaggggaggcacaaagggcaggcctgttccctgaggacctgcgcaaagggcgggcctgtttggtgaggacctgcggccttgggtcccggtggggtttccgggcagctacaggcgggtgtggccggccgctgtgcgtggcctctgccttcacacctgacctgcccggcgggctttcctgttccccacctcaggggcgcccaaatacagagctattggttggcgtcttctccctgta

SEQ ID NO: 11983 - protein, 842 aa, Homo sapiens
MVQKSRNGGVYPGPSGEKKLKVGFVGLDPGAPDSTRDGALLIAGSEAPKRGSILSKPRAGGAGAGKPPKRNAFYRKLQNFLYNVLERPRGWAFIYHAYVFLLVFSCLVLSVFSTIKEYEKSSEGALYILEIVTIVVFGVEYFVRIWAAGCCCRYRGWRGRLKFARKPFCVIDIMVLIASIAVLAAGSQGNVFATSALRSLRFLQILRMIRMDRRGGTWKLLGSVVYAHSKELVTAWYIGFLCLILASFLVYLAEKGENDHFDTYADALWWGLITLTTIGYGDKYPQTWNGRLLAATFTLIGVSFFALPAGILGSGFALKVQEQHRQKHFEKRRNPAAGLIQSAWRFYATNLSRTDLHSTWQYYERTVTVPMYSSQTQTYGASRLIPPLNQLELLRNLKSKSGLAFRKDPPPEPSPSPRGVAAKGKGSPQAQTVRRSPSADQSLEDSPSKVPKSWSFGDRSRARQAFRIKGAASRQNSEEASLPGEDIVDDKSCPCEFVTEDLTPGLKVSIRAVCVMRFLVSKRKFKESLRPYDVMDVIEQYSAGHLDMLSRIKSLQSRVDQIVGRGPAITDKDRTKGPAEAELPEDPSMMGRLGKVEKQVLSMEKKLDFLVNIYMQRMGIPPTETEAYFGAKEPEPAPPYHSPEDSREHVDRHGCIVKIVRSSSSTGQKNFSAPPAAPPVQCPPSTSWQPQSHPRQGHGTSPVGDHGSLVRIPPPPAHERSLSAYGGGNRASMEFLRQEDTPGCRPPEGNLRDSDTSISIPSVDHEELERSFSGFSISQSKENLDALNSCYAAVAPCAKVRPYIAEGESDTDSDLCTPCGPPPRSATGEGPFGDVGWAGPRK

SEQ ID NO: 11984 - DNA, 969 bp, Homo sapiens
gtgtcatgcggttcctggtgtccaagcggaagttcaaggagagcctgcggccctacgacgtgatggacgtcatcgagcagtactcagccggccacctggacatgctgtcccgaattaagagcctgcagtccaggcaagagccccgcctgcctgtccagcaggggacaagaacggggtgggcttctgggacaaagcccactgtggcccatggtgggagtgcagggggtgtgtgggcggggcctcctccccacccacgtcggcctctgtcagcttctgttgtgtcttcacaaagtctgttttaatatttctgctgtctctcccatacatgtgcagcctcaggcacatacaaacaaggatatacacacgagtgggtgtttatgttgcctgtaatggggacacacggctgttgagagtctctcctgcagtaggggacatgctcctgcctatcagggtcccctccctctcccaggccccccaaccaaggctgtaccagtttctcagccctggaagcgaggctgggcccctgttacagggagaaggctgggatggtcagggacagcctgggggtcacagcccaactccgggccctccagtgggagtgaagctctcatctgaggaagtcgagagccccaccctggggctcctgcccagtcctgcttcagggggccagggaaggggcgcctccaggccttagcccactcctgctgtgcaggggccactgagccatccccttcaccccgctgggctccagctgtgaggcctctttcccagcgtcctctctggagcagcggccaaccctggctgcgtgtgcgtgtgcgtgtgtgtgcggaacgccctcctgtcttgacttctgtgctttgtctccacatctctctcacttcagctgtttttgttcaccaggatctcttgtcctaaattttccctttccttccctctctctctggaaaaacaaacaaaacaaagcaaaca

SEQ ID NO: 11985 - protein, 60 aa, Homo sapiens
MVGVQGVCGRGLLPTHVGLCQLLLCLHKVCFNISAVSPIHVQPQAHTNKDIHTSGCLCCL

SEQ ID NO: 11986 - DNA, 343 bp, Homo sapiens
gacctgaccccgggcctcaaagtcagcatcagagccgtgtgtgtcatgcggttcctggtgtccaagcggaagttcaaggagagcctgcggccctacgacgtgatggacgtcatcgagcagtactcagccggccacctggacatgctgtcccgaattaagagcctgcagtccaggcaagagccccgcctgcctgtccagcaggggacaagaacggggtgggcttctgggacaaagcccactgtggcccatggtgggagtgcagggggtgtgtgggcggggcctcctccccacccacgtcggcctctgtcagcttctgttgtgtcttcacaaagtctgttttaat

SEQ ID NO: 11987 - protein, 98 aa, Homo sapiens [sequence omitted]

SEQ ID NO: 11988 - DNA, 604 bp, Homo sapiens
gctcagtggagggagccagacggggaaggccgtgcagcttgcgatgcccttggcaggaaatgcccggggcggggaagtccgtggagccccgtacaccctggcggtggccagggcctgggggaccaggaaccaggagcgcctgctgaacgtcggggcaccgcaaaacaaaacaaaggcatagagaacggaaatccagccaggcgaggttcagtctgacgtacaggctcatgccccgagccgggctgagtccccgccctgggaggttggaggctgaggtccctggccctacccatactcccagcgcctcaggttgcccagggcccaaccaggaggtcaggaaggtaacccccaggacaggtgatacccgccaggggccagtcggcctggagattctacgccaccaacctctcgcgcacagacctgcactccacgtggcagtactacgagcgaacggtcaccgtgcccatgtacaggtaccgccgccgggcacctgccaccaagcaactgtttcattttttattttccatttgttcttaaaccccactttttgttgttcattattttgattgattttttttctttaaaatgtatttttcacaaagga

SEQ ID NO: 11989 - protein, 112 aa, Homo sapiens
MPRAGLSPRPGRLEAEVPGPTHTPSASGCPGPNQEVRKVTPRTGDTRQGPVGLEILRHQPLAHRPALHVAVLRANGHRAHVQVPPPGTCHQATVSFFIFHLFLNPTFCCSLF

SEQ ID NO: 11990 - DNA, 1427 bp, Homo sapiens
gcgcggagcgaggtggccgcagcgtctccgcgcgcggcccaagcccggcaggagtgcggaaccgccgcctcggccatgcggctcccggccggggggcctgggctggggcccgcgccgccccccgcgctccgcccccgctgagcctgagcccgacccggggcgcctcccgccaggcaccatggtgcagaagtcgcgcaacggcggcgtataccccggcccgagcggggagaagaagctgaaggtgggcttcgtggggctggaccccggcgcgcccgactccacccgggacggggcgctgctgatcgccggctccgaggcccccaagcgcggcagcatcctcagcaaacctcgcgcgggcggcgcgggcgccgggaagccccccaagcgcaacgccttctaccgcaagctgcagaatttcctctacaacgtgctggagcggccgcgcggctgggcgttcatctaccacgcctacgtgttcctcctggttttctcctgcctcgtgctgtctgtgttttccaccatcaaggagtatgagaagagctcggagggggccctctacatcctggaaatcgtgactatcgtggtgtttggcgtggagtacttcgtgcggatctgggccgcaggctgctgctgccggtaccgtggctggagggggcggctcaagtttgcccggaaaccgttctgtgtgattgacatcatggtgctcatcgcctccattgcggtgctggccgccggctcccagggcaacgtctttgccacatctgcgctccggagcctgcgcttcctgcagattctgcggatgatccgcatggaccggcggggaggcacctggaagctgctgggctctgtggtctatgcccacagcaaggagctggtcactgcctggtacatcggcttcctttgtctcatcctggcctcgttcctggtgtacttggcagagaagggggagaacgaccactttgacacctacgcggatgcactctggtggggcctgatcacgctgaccaccattggctacggggacaagtacccccagacctggaacggcaggctccttgcggcaaccttcaccctcatcggtgtctccttcttcgcgctgcctgcaggcatcttggggtctgggtttgccctgaaggttcaggagcagcacaggcagaagcactttgagaagaggcggaacccggcagcaggcctgatccagtcggcctggagattctacgccaccaacctctcgcgcacagacctgcactccacgtggcagtactacgagcgaacggtcaccgtgcccatgtacaggtaccgccgccgggcacctgccaccaagcaactgtttcattttttattttccatttgttcttaaaccccactttttgttgttcattattttgattgattttttttctttaaaatgtatttttcacaaagga

SEQ ID NO: 11991 - protein, 393 aa, Homo sapiens; identical to SEQ ID NO: 2005

SEQ ID NO: 11992 - DNA, 2599 bp, Homo sapiens
gtccaacctggcctgacctcccccttgcccaccacccctagagaaactaagcacaacccctggggtccctgctccaggagcagcccaccccgccatggctcggtggagaccactcccccgcctcttgtggtggcctcctcctgcccacccctctcctctggcctcagctcagctcaggctcagcgagccccctgcacgccctgcccgttcctctgggtccctctgggcactcccttctccccagctgcactcttcacctggcggggatgcagtgggggctgctgtcctagccgagcctcgtgggagtcacgtcgctgggcctctggttctcgatgtgagatggggacacagcctttggctggaccccgcttctggcctgtaggggaagaggagagagggctcaggggatgaggggcggccgacaccgaccctggcctcactgggcctccgtgtggatggtgacacgggggtggccccgcatctgtcccatcccaagccccgagtcgccagcgggcgtccagcctgccctcaggggtgtgagcaggcccttcgtgtgactagagcctgcggtcccacagatcacgctgaccaccattggctacggggacaagtacccccagacctggaacggcaggctccttgcggcaaccttcaccctcatcggtgtctccttcttcgcgctgcctgcaggcatcttggggtctgggtttgccctgaaggttcaggagcagcacaggcagaagcactttgagaagaggcggaacccggcagcaggcctgatccaggtgagtccaggtgtcccccggggaccagcacagcccttgtcctggtcccaccttgttgaggagtggaggccgctggggctttggcattgccctgtctgtggatgggccacagcgctcaccctctgcaggaatctgtggaaggagcgaggatgtgaagtgtgtgtgttgagaaatggctccaacccctgaggctgcacaggggtggctcgtgtgaggacgctggggtggcccttgccttgtgtgggtgctggggcccggccatcaggtcctctctaccgcaccctgggaggtgagcacacccgttctgcagctgcagggccaaggctcctagagcccacacactgcagtgagtcagtgcctgacctcgtctgacccctgatgctggctgtgggcccccatgatgcccgcccggaccccacccagtgccgtcccaccatttgggggtgggtagcgtgcagtgaccactgtggcatccacaagtaattcctgagccaccttgaaaatacggacagacaatggccgggcacagtggctcacgcctgcaatcccagcactttgggaggccgaggtgggaggatcacgaggtcaggaaatcaagaccagcctggccaacatggtgaaaccctgtctctcctaaaaatacaaaaattagctgggcgtggtggcgtgcgtctgtaatcccagctactcgggaggctgaagcaggagaatcgcttgaaccagggaggcggaggttgcagtgagccgagatcacgccacagcactccagcctgggtgacagagcgagactccgtctcaaaaaaaaagagaaaatatggacagacagcaggacccccttgggaccagccattcttgcagctcctccccaaagtcttccatccactggacccgcagagctgaccaggatccctgccagcggaatgtggctataggctctctcctgtcttagacagcaaatcttgagatggagataatcctgggttaccccaggtgggccctaaatgcaatcacatgcatccttataagaaggagatttgacacagaggaggggaaagcagtgtgaccacaaaggcggagactggagacgtggccacaagccgcggagtgtcagtggccactgcaggggatgtgcctcttgtggtcttggctctgggtccagcctaccttaaggtgtgtatttatcttccactataaaaactacaaacagctatttatttccaggcaagagttttaagaagaaccaaaatgcccccaaatctcactccactattgacggtttaaaaagtgaccacgtacgtgtggtgaaaaggttacaatagtgccagaaaaagcagcgtctgagcacccagggtcccatgcgccctgcttccctcgaaggtcactcttagcagctggtgcacatttccagagcacagctgggcctctccacaggcgcacctcagaggacctgcagccgtggttccagaccactacggtagagatacggcaataaagcgagtcacacaaatttcgtggtttccctcccaaagtgctgggattacaggcgtgagccactgcgcccggctgtggtgatttcttaaaataaggcaagaatgaggtttgccgcatcgattcactcttcctttcacgaaagatttctctgcagcatgcgattctgttggatagcgttttacccagtggacctcctttcagcatcgcagtcagtcctctcaaatgctgccactgctgtatcaactaagtttatataatgttctcattccttgtcatttcaacacagttcacaacatctttgcctggagtagattctgtcgacc

SEQ ID NO: 11993 - protein, 95 aa, Homo sapiens
MARWRPLPRLLWWPPPAHPSPLASAQLRLSEPPARPARSSGSLWALPSPQLHSSPGGDAVGAAVLAEPRGSHVAGPLVLDVRWGHSLWLDPASGL

SEQ ID NO: 11994 - DNA, 521 bp, Homo sapiens
tgtgaactgtgttgaaatgacaaggaatgagaacattatataaacttagttgatacagcagtggcagcatttgagaggactgactgcgatgctgaaaggaggtccatgggattacaggtgggagccacggtgcccagcctgtaaacataacttccatatgcactgggaaaccacgaaatttgtgtgactcgctttattgccgtatctctaccgtagtggtctggaaccacggctgcaggtcctctgaggtgcgcctgtggagaggcccagctgtgctctggaaatgtgcaccagctgctaagagtgaccttcgagggaagcagggcgcatgggaccctgggtgctcagacgctgctttttctggcactattgtaaccttttcaccacacgtacgtggtcactttttaaaccgtcaatagtggagtgagatttgggggcattttggttcttcttaaaactcttgcctggaaataaatagctgtttgtagtttttatagtggaagataaatacacaccttaag

SEQ ID NO: 11995 - protein, 32 aa, Homo sapiens
MLKGGPWDYRWEPRCPACKHNFHMHWETTKFV

SEQ ID NO: 11996 - DNA, 788 bp, Homo sapiens
ggccacccacatagaagagacatagaagatctcccagctcttcctgggagcaaagctgtgcaacccagagcctcaagctgccgctttggcaggaaagccaactcccgcgtgctgaagtcactgaatgcacaccagagagaaacccacttcgcaggaagcaaatgctttgtctcatttacatttttcgcaggtgttctgggatgtgaaggggacgtgtccaacgtccaggtccttcgtcacagccataaaggaggccatgcgtgggacacgccctcattccaggcaatgtgagagacgccttcaccttgaccgtgttgctgcctctcgttccaaccgtgctcagaaccaggagccggcggggacggagccacagagcagccgcttccccgtgtccgcgcccctgtactgtcttcacactcgccatcaccttgcacaccctgcggcaccacacgaccgccacggagcctgtggggccctcctgtgtctcaaacccgagcccttccccggcgcccacatccaggttgccaactaggaggaggcaggcctggggcactggcaggaggacgggtgggcacaggaaaacctgcctgaagatgaggtcatgaggaaggcagcacagaaggatgggagaagaggccttaagacacataatgtgagcacctggatccagctgtgcctgaagccccttggacttccaggttatgtaagcccattccttacaaccctttgcatttgttttctgccccttgcaaataaaagaccatgacctttcacgctatgagcagctg

SEQ ID NO: 11997 - protein, 135 aa, Homo sapiens
MHTREKPTSQEANALSHLHFSQVFWDVKGTCPTSRSFVTAIKEAMRGTRPHSRQCERRLHLDRVAASRSNRAQNQEPAGTEPQSSRFPVSAPLYCLHTRHHLAHPAAPHDRHGACGALLCLKPEPFPGAHIQVAN

SEQ ID NO: 11998 - DNA, 3378 bp, Homo sapiens
gttttttctaaaggaccaaggctctcaataagcttccctagcccctggcaagccggctaattgcatgagggagttgacttgtacttcccagccaccaataataccgtcaattgaggagcccgtggtcagctgtgacggctggggagctacggtggctccggaggcatccggaaagggcagaaatccacctgtagctctgggacctcgagggaactctctgcttgatgctgtgccgtggcatccccaaaccccatatgttgtcatctctggtccacaggtgtcacaggtggcctcccacacgccccctcctatgccttcaggcaaatggagaagctgtggcaatcgtccccgttctgtggcagatatatcgtgaggaacgcaggcgccacgctcactcgtgggagagaccaggccccaccgtggatctacacatccagactccctggcacctcgacgctacccaaatgctttcctcatcaaggcctcctcgctcctgagacctggccctgccacacgctccaagaccaccgacccctctgcccccgtcctcccttcctgggcacacggccaccccgacatccctgagcaggcaaggagctcttgcatttgctgtctcctctgctcaccaggatggcagacactgcttcttctcagggaggccctggcgcggggtcccctccccaccttctctggagctggtcctcatcccgatgggaaactgttttgcctggcgctgctgccccactgcacagagcgcacaaggtgtggggggaggggtgggcacagacactcacagccccacctagcccaaggaaggtgcatgtcaacctgtcagatgacagatggccactttgacctggggctggacgtcgctggagcccccagccagatgtggcctcagtcacaggcctggggcttgtgtggctcagggctgccggggagaccccaagaggacatgggcagctggagctcaggactagcggagcggccagacgtcctgcccatgcaggctgcatctgtgccctggctgcccacccaccaacgtcctgcccacgctcaccagggccttgcttggccagatgtccagtaggctttgggcggggccatccagccttggcaaggcccatggactgtcacagccctccccaccccacatccaggacaaggtcatctagcgccacaccaggtggatggttcagaaaggctgggttctccaagctgcacaccagaggctgcacagagctgaagtccggcgagtcccaaggctcccagggcggcccgctgccccacaccctccggcaaacacgaaggcgccaccctcggcacccagcagcatctgcctcagcccctgcagagggcggcgctggtgtgggctgcagagagtatggcccgcaggcagccgccatgggcctgcccgagctgagtggctttcagcagaccaggcggccactcaggcctgcgtggactggatgtgtccccagaatccacatgctgaaaccctcactccagtgtgatggtgttaggagagggggcctttgggggtgactgggtcaggagggtggagccctcggaagaggaccagcaccctcaggggaagagacacgggcgctgggttcccttctctgcttcgtgccatgtggggacatgggaaggcatcgtctgcaagccaggaagccggccctcacagaaccgagtctgcccgctccttgatcttgacctctggcttccagaactgtgagaaataaatttctgttgtttaaggcaccaagtcaaagttactctgttgtagttgcccaagtgagacagaacctcatgctacccagacaagtggagagagtcagcccccaccccacgggagggtggggatgggagcgagacagcgagagccttattctgagagggcgtcaggaggagggcaggaaggtgcccaggtgagtcaatttcccggcttggacacgcccctcttccctggtctcacacaggaaggtgcccaggtgagtccagttcccggctcggacacgcccctcttccctggtctctctcgggaaggtgcccaggtgagtccagttcccggctcggacacgcccctcttccctggtctcgcacgggaagtcgcccaggtgagtccagttcccggctcggacacgcccctcttccctggtctcgcacgggaagtcgcccaggtgagtccagttcccggctcggacacgcccctcttccctggtctcgtgcgggaagttgcccaggtgagtccagttcctggctcggacacgcccctcttccctggtttctcacagatcctcccactggttgaattgaagagagcatgatgtgtccatccctgcggctcggacgagctggccccatcctggagaccagccttttgcttaatcacacttcctggcatcccacctacagagatgaaatccatttaggtcaattgctctcacccaggggttttgttcccaagggagcatctagagagtctggagacagttttggtcgtcacagcagaggggcagatggtatggcatccagtgggtggaggccaggggggtgggggggcaccaagcaccctgcagggcacagggcagcccccacagagcacagcgtcatccagccccaatgccagtcatgctgacattaagaaaacatggtgtaaggccagtcacggtggctcacacctgtaatcccagcactttgggaggctgaggtgggcgaatcacaaggtcaggagttcgagaccagcctggccaacataatgaaaccccatctctactaaaaatacaataaattagctgggcatggtggtgggtgcctgtaatcccagctactcgggagactgaggcagaagaatcgcttgaacccagaaggcggaagttgcagtgagccgagatcgcgccactgcacagccagggcgacggtgcaagactccgtctcaaaaaaaaaagaaaacatggtgtaagttaacaatgtcctttcttaaaatgcaaataggacgggtgaggtagctcacacctgtaatcccagcacttcgggaggtcaaggtaggtggatcacctaaggtcaggagttgaagaccagcctggccaacatggcaaaaacctgtctctactaaaaatacaaaaattagccgggcgtggtggtgggcacctattatcccagctactcgggaggccaaggcaggaagatggcttgaaccctgggagcggagattgcagtgagctgagatcgtgccattgcactccagcctggcgacaagagcgagactccgtctcaaaaaaataaaaataaaaaaaaataaaagcaaatagttctggtatgttagccattcacattttagcatgaaacagcataaataaatggacttcctcccaa

SEQ ID NO: 11999 - protein, 154 aa, Homo sapiens
MGARQREPYSERASGGGQEGAQVSQFPGLDTPLFPGLTQEGAQVSPVPGSDTPLFPGLSREGAQVSPVPGSDTPLFPGLAREVAQVSPVPGSDTPLFPGLAREVAQVSPVPGSDTPLFPGLVREVAQVSPVPGSDTPLFPGFSQILPLVELKRA

SEQ ID NO: 12000 - DNA, 2007 bp, Homo sapiens
gccccgcccccgcccgcggcgcgtttctcccccgcctcccgcgtccgtctttgcagcccgcgcctcccgcatcgcctcgcgtccccgtggcgcccgcccgcgcgcgtccgcgccccgccccctcccgcgcggttccgcattggcgtgctgcagggcgcggtgcactgcgccgccaccgtcaataggtggaccccctcccggagataaaaccgccggcgccggcgccgccagtccctctggctgagacctcggctccggaatcactgcagcccccctcgccctgagccagagcaccccgggtcccgccagcccctcacactcccagcaaaatgggcaaggagaagacccacatcaacatcgtggtcatcggccacgtggactccggaaagtccaccaccacgggccacctcatctacaaatgcggaggtattgacaaaaggaccattgagaagttcgagaaggaggcggctgagatggggaagggatccttcaagtatgcctgggtgctggacaagctgaaggcggagcgtgagcgcggcatcaccatcgacatctccctctggaagttcgagaccaccaagtactacatcaccatcatcgatgcccccggccaccgcgacttcatcaagaacatgatcacgggtacatcccaggcggactgcgcagtgctgatcgtggcggcgggcgtgggcgagttcgaggcgggcatctccaagaatgggcagacgcgggagcatgccctgctggcctacacgctgggtgtgaagcagctcatcgtgggcgtgaacaaaatggactccacagagccggcctacagcgagaagcgctacgacgagatcgtcaaggaagtcagcgcctacatcaagaagatcggctacaacccggccaccgtgccctttgtgcccatctccggctggcacggtgacaacatgctggagccctcccccaacatgccgtggttcaagggctggaaggtggagcgtaaggagggcaacgcaagcggcgtgtccctgctggaggccctggacaccatcctgccccccacgcgccccacggacaagcccctgcgcctgccgctgcaggacgtgtacaagattggcggcattggcacggtgcccgtgggccgggtggagaccggcatcctgcggccgggcatggtggtgacctttgcgccagtgaacatcaccactgaggtgaagtcagtggagatgcaccacgaggctctgagcgaagctctgcccggcgacaacgtcggcttcaatgtgaagaacgtgtcggtgaaggacatccggcggggcaacgtgtgtggggacagcaagtctgacccgccgcaggaggctgctcagttcacctcccaggtcatcatcctgaaccacccggggcagattagcgccggctactccccggtcatcgactgccacacagcccacatcgcctgcaagtttgcggagctgaaggagaagattgaccggcgctctggcaagaagctggaggacaaccccaagtccctgaagtctggagacgcggccatcgtggagatggtgccgggaaagcccatgtgtgtggagagcttctcccagtacccgcctctcggccgcttcgccgtgcgcgacatgaggcagacggtggccgtaggcgtcatcaagaacgtggagaagaagagcggcggcgccggcaaggtcaccaagtcggcgcagaaggcgcagaaggcgggcaagtgaagcgcgggcgcccgcggcgcgaccctccccggcggtgccgcgctccgaaccccgggcccgggcccccgccccgcccccgccccgcgcgccggtccggcgccccgcacccccgccaggcgcatgtctgcacctccgcttgccagaggccctcggtcagcgactggatgctcgccatcaaggtccagtggaagttcttcaagaggaaaggcgcccccgccccaggcttccgcgcccagcgctcgccacgctcagtgcccgttttaccaataaactgagcgaccccaga

SEQ ID NO: 12001 - protein, 463 aa, Homo sapiens; identical to SEQ ID NO: 2007

SEQ ID NO: 12002 - DNA, 499 bp, Homo sapiens
atggaggccccgggtcgggcccagcagctgcgactgggcaaatccatggggatccccagcgactggacccctacctggcctgctggcaggtccgccgagtgcctaacgaaccacctgtgcatggggcacagccaggccatcaccccggggccaccgtcgcaggcaggtggaggctggcagcccagaggcagacaggggcttggaggcagggtggggagcaaggccaaggccgctctctggcccccagtgtcacaggatgacctcagccctggcctggccccagagcaggttggttcactgctgggccctgtggacttgttctcatgctttgtcagtgtcgatgtcgaaagcccaaagtgtttcccaagtcctgctaccttggtaagactcaaccctcaatctcagtctcccctgcagatctctgtggggcttggtctgaactttcgttaggtgagtgtggagtaggcattattgtacattgtagtcctttctcctcaaa

SEQ ID NO: 12003 - protein, 149 aa, Homo sapiens
MEAPGRAQQLRLGKSMGIPSDWTPTWPAGRSAECLTNHLCMGHSQAITPGPPSQAGGGWQPRGRQGLGGRVGSKAKAALWPPVSQDDLSPGLAPEQVGSLLGPVDLFSCFVSVDVESPKCFPSPATLVRLNPQSQSPLQISVGLGLNFR

SEQ ID NO: 12004 - DNA, 429 bp, Homo sapiens
tgaagtgcagacgacgctggcccacatccttgtcgggcagaggggctgccgactggcccctggccatggctcttgctgggagccgtgtggcctgggcttggacccacatccacctcttgccggcttacttatcagttacaaagggcaaagtggtaactttactgtgagaagcttgtggatgccagtttaaccagaggatcaaaggtaccgttgccgctggtgggcagccagcgtcccgagtgctgggaaggatgcctggctcttggtgccaatctgttcatgcagaaatgtcaggaacgctcaatgcggggacaatctacaaaacaaccggtttgcattcttcaaaagtttcagtgtcataaaagatttttaaaaagacaggcccaatgtatataccgtgaaaatagtaaaacaataaaatataaaagt

SEQ ID NO: 12005 - protein, 33 aa, Homo sapiens
MALAGSRVAWAWTHIHLLPAYLSVTKGKVVTLL

SEQ ID NO: 12006 - DNA, 1409 bp, Homo sapiens
ccgccccctgcgggcagcaggcgcgtcctggggctgggcaaccggggtgcaggttccggagctgccagagctgtgagggggactcgggagagatccaggttcctctggctgcgaagtccctggaggccgggccggagggctccgcgcacgtagcactttttggcccgcccggcgcccccgtcgcctccacaagggctgaagaggacgggcgggctggaccaggcggggctccgagacgcgtccgagacgggggcctgggcccgggagaggggcgggggctgggctcccggacccgggcgcggggccttttaacccctgcagacccaggaccggccgggccgccccaagacgaacgccgcagggctgggctcagcccaagccagacggcgagagtcgcaccgaggtggaagctgggggcgcggcctcgccggggccaggaaaggggcggggccgggtggggcccggggaggagcctgtgcgccccgccctccgtgacgcgccgcggcccccgcgcatataagtgggcgcgtccgcgcgtgcgcaccccgcgcgcgcctctctgtcgtggcgcggcttcccgcggtcttctctgcaaatgggctccgtggcctagcgcccccgtccccgccacccgtgatcgtgcgccgaggcccgcgaggggtcgccgcccagatcccaccagccagcaagctaaagcatggcggccatcccctccagcggctcgctcgtggccacccacgactactaccggcgccgcctgggttccacttccagcaacagctcctgcagcagtaccgagtgccccggggaagccattccccaccccccaggtgagtgcaggatcgcccctttctccccccgctcctccaggagctggcagcatcaagaccccacttcgcttctctcaggtctccccaaggctgacccgggtcattggtgggccagcttctttttcgggaagtccaccctcccgttcatggccacggtgttggagtccgcagagcactcggaacctccccaggcctccagcagcatgaccgcctgtggcctggctcgggacgccccgaggaagcagcccggcggtcagtccagcacagccagcgctgggcccccgtcctgacctgagcggttaccaccagccccaggcctgcggaggcgctagtccaccagagcccctccccgcccctctccccactccgcatccctcgcccccctccccacctcccaccccccaccctgtaaactaggcggctgcagcaagcagaccttcgcatcaacacagcagacaccaaaaaccagtgagagccccgctctctaccgcccggccccagcactcgctagctttcctgacacctggaactgtgcacctggcaccaagcggaaaataaactccaagcagccagtagccc

SEQ ID NO: 12007 - protein, 140 aa, Homo sapiens
MAAIPSSGSLVATHDYYRRRLGSTSSNSSCSSTECPGEAIPHPPGECRIAPFSPRSSRSWQHQDPTSLLSGLPKADPGHWWASFFFGKSTLPFMATVLESAEHSEPPQASSSMTACGLARDAPRKQPGGQSSTASAGPPS

SEQ ID NO: 12008 - DNA, 1153 bp, Homo sapiens
ccgccccctgcgggcagcaggcgcgtcctggggctgggcaaccggggtgcaggttccggagctgccagagctgtgagggggactcgggagagatccaggttcctctggctgcgaagtccctggaggccgggccggagggctccgcgcacgtagcactttttggcccgcccggcgcccccgtcgcctccacaagggctgaagaggacgggcgggctggaccaggcggggctccgagacgcgtccgagacgggggcctgggcccgggagaggggcgggggctgggctcccggacccgggcgcggggccttttaacccctgcagacccaggaccggccgggccgccccaagacgaacgccgcagggctgggctcagcccaagccagacggcgagagtcgcaccgaggtggaagctgggggcgcggcctcgccggggccaggaaaggggcggggccgggtggggcccggggaggagcctgtgcgccccgccctccgtgacgcgccgcggcccccgcgcatataagtgggcgcgtccgcgcgtgcgcaccccgcgcgcgcctctctgtcgtggcgcggcttcccgcggtcttctctgcaaatgggctccgtggcctagcgcccccgtccccgccacccgtgatcgtgcgccgaggcccgcgaggggtcgccgcccagatcccaccagccagcaagctaaagcatggcggccatcccctccagcggctcgctcgtggccacccacgactactaccggcgccgcctgggttccacttccacagcatgaccgcctgtggcctggctcgggacgccccgaggaagcagcccggcggtcagtccagcacagccagcgctgggcccccgtcctgacctgagcggttaccaccagccccaggcctgcggaggcgctagtccaccagagcccctccccgcccctctccccactccgcatccctcgcccccctccccacctcccaccccccaccctgtaaactaggcggctgcagcaagcagaccttcgcatcaacacagcagacaccaaaaaccagtgagagccccgctctctaccgcccggccccagcactcgctagctttcctgacacctggaactgtgcacctggcaccaagcggaaaataaactccaagcagccagtagccc

SEQ ID NO: 12009 - protein, 288 aa, Homo sapiens
APCGQQARPGAGQPGCRFRSCQSCEGDSGEIQVPLAAKSLEAGPEGSAHVALFGPPGAPVASTRAEEDGRAGPGGAPRRVRDGGLGPGEGRGLGSRTRARGLLTPADPGPAGPPQDERRRAGLSPSQTARVAPRWKLGARPRRGQERGGAGWGPGRSLCAPPSVTRRGPRAYKWARPRVRTPRAPLCRGAASRGLLCKWAPWPSAPVPATRDRAPRPARGRRPDPTSQQAKAWRPSPPAARSWPPTTTTGAAWVPLPQHDRLWPGSGRPEEAARRSVQHSQRWAPVLT

SEQ ID NO: 12010 - DNA, 1294 bp, Homo sapiens
ccgccccctgcgggcagcaggcgcgtcctggggctgggcaaccggggtgcaggttccggagctgccagagctgtgagggggactcgggagagatccaggttcctctggctgcgaagtccctggaggccgggccggagggctccgcgcacgtagcactttttggcccgcccggcgcccccgtcgcctccacaagggctgaagaggacgggcgggctggaccaggcggggctccgagacgcgtccgagacgggggcctgggcccgggagaggggcgggggctgggctcccggacccgggcgcggggccttttaacccctgcagacccaggaccggccgggccgccccaagacgaacgccgcagggctgggctcagcccaagccagacggcgagagtcgcaccgaggtggaagctgggggcgcggcctcgccggggccaggaaaggggcggggccgggtggggcccggggaggagcctgtgcgccccgccctccgtgacgcgccgcggcccccgcgcatataagtgggcgcgtccgcgcgtgcgcaccccgcgcgcgcctctctgtcgtggcgcggcttcccgcggtcttctctgcaaatgggctccgtggcctagcgcccccgtccccgccacccgtgatcgtgcgccgaggcccgcgaggggtcgccgcccagatcccaccagccagcaagctaaagcatggcggccatcccctccagcggctcgctcgtggccacccacgactactaccggcgccgcctgggttccacttccagcaacagctcctgcagcagtaccgagtgccccggggaagccattccccaccccccagcttctttttcgggaagtccaccctcccgttcatggccacggtgttggagtccgcagagcactcggaacctccccaggcctccagcagcatgaccgcctgtggcctggctcgggacgccccgaggaagcagcccggcggtcagtccagcacagccagcgctgggcccccgtcctgacctgagcggttaccaccagccccaggcctgcggaggcgctagtccaccagagcccctccccgcccctctccccactccgcatccctcgcccccctccccacctcccaccccccaccctgtaaactaggcggctgcagcaagcagaccttcgcatcaacacagcagacaccaaaaaccagtgagagccccgctctctaccgcccggccccagcactcgctagctttcctgacacctggaactgtgcacctggcaccaagcggaaaataaactccaagcagccagtagccc

SEQ ID NO: 12011 - protein, 74 aa, Homo sapiens
MAAIPSSGSLVATHDYYRRRLGSTSSNSSCSSTECPGEAIPHPPASFSGSPPSRSWPRCWSPQSTRNLPRPPAA

SEQ ID NO: 12012 - DNA, 1333 bp, Homo sapiens
ccgccccctgcgggcagcaggcgcgtcctggggctgggcaaccggggtgcaggttccggagctgccagagctgtgagggggactcgggagagatccaggttcctctggctgcgaagtccctggaggccgggccggagggctccgcgcacgtagcactttttggcccgcccggcgcccccgtcgcctccacaagggctgaagaggacgggcgggctggaccaggcggggctccgagacgcgtccgagacgggggcctgggcccgggagaggggcgggggctgggctcccggacccgggcgcggggccttttaacccctgcagacccaggaccggccgggccgccccaagacgaacgccgcagggctgggctcagcccaagccagacggcgagagtcgcaccgaggtggaagctgggggcgcggcctcgccggggccaggaaaggggcggggccgggtggggcccggggaggagcctgtgcgccccgccctccgtgacgcgccgcggcccccgcgcatataagtgggcgcgtccgcgcgtgcgcaccccgcgcgcgcctctctgtcgtggcgcggcttcccgcggtcttctctgcaaatgggctccgtggcctagcgcccccgtccccgccacccgtgatcgtgcgccgaggcccgcgaggggtcgccgcccagatcccaccagccagcaagctaaagcatggcggccatcccctccagcggctcgctcgtggccacccacgactactaccggcgccgcctgggttccacttccagcaacagctcctgcagcagtaccgagtgccccggggaagccattccccaccccccaggtctccccaaggctgacccgggtcattggtgggccagcttctttttcgggaagtccaccctcccgttcatggccacggtgttggagtccgcagagcactcggaacctccccaggcctccagcagcatgaccgcctgtggcctggctcgggacgccccgaggaagcagcccggcggtcagtccagcacagccagcgctgggcccccgtcctgacctgagcggttaccaccagccccaggcctgcggaggcgctagtccaccagagcccctccccgcccctctccccactccgcatccctcgcccccctccccacctcccaccccccaccctgtaaactaggcggctgcagcaagcagaccttcgcatcaacacagcagacaccaaaaaccagtgagagccccgctctctaccgcccggccccagcactcgctagctttcctgacacctggaactgtgcacctggcaccaagcggaaaataaactccaagcagccagtagccccg

SEQ ID NO: 12013 - protein, 114 aa, Homo sapiens; identical to SEQ ID NO: 2009

SEQ ID NO: 12014 - DNA, 1243 bp, Homo sapiens
ccgccccctgcgggcagcaggcgcgtcctggggctgggcaaccggggtgcaggttccggagctgccagagctgtgagggggactcgggagagatccaggttcctctggctgcgaagtccctggaggccgggccggagggctccgcgcacgtagcactttttggcccgcccggcgcccccgtcgcctccacaagggctgaagaggacgggcgggctggaccaggcggggctccgagacgcgtccgagacgggggcctgggcccgggagaggggcgggggctgggctcccggacccgggcgcggggccttttaacccctgcagacccaggaccggccgggccgccccaagacgaacgccgcagggctgggctcagcccaagccagacggcgagagtcgcaccgaggtggaagctgggggcgcggcctcgccggggccaggaaaggggcggggccgggtggggcccggggaggagcctgtgcgccccgccctccgtgacgcgccgcggcccccgcgcatataagtgggcgcgtccgcgcgtgcgcaccccgcgcgcgcctctctgtcgtggcgcggcttcccgcggtcttctctgcaaatgggctccgtggcctagcgcccccgtccccgccacccgtgatcgtgcgccgaggcccgcgaggggtcgccgcccagatcccaccagccagcaagctaaagcatggcggccatcccctccagcggctcgctcgtggccacccacgactactaccggcgccgcctgggttccacttccagcaacagctcctgcagcagtaccgagtgccccggggaagccattccccaccccccaggtctccccaaggctgacccgggtcattggtgggccagcttctttttcgggaagtccaccctcccgttcatggccacggtgttggagtccgcagagcactcggaacctccccaggcctccagcagcatgaccgcctgtggcctggctcgggacgccccgaggaagcagcccggcggtcagtccagcacagccagcgctgggcccccgtcctgacctgagcggttaccaccagccccaggcctgcggaggcgctagtccaccagagccctgagagccccgctctctaccgcccggccccagcactcgctagctttcctgacacctggaactgtgcacctggcaccaagcggaaaataaactccaagcagccagtagccccgatggtgtgtgcctgagctgtgtggcccgaggttc

SEQ ID NO: 12015 - protein, 114 aa, Homo sapiens; identical to SEQ ID NO: 2009

SEQ ID NO: 12016 - DNA, 2116 bp, Homo sapiens
ccgccccctgcgggcagcaggcgcgtcctggggctgggcaaccggggtgcaggttccggagctgccagagctgtgagggggactcgggagagatccaggttcctctggctgcgaagtccctggaggccgggccggagggctccgcgcacgtagcactttttggcccgcccggcgcccccgtcgcctccacaagggctgaagaggacgggcgggctggaccaggcggggctccgagacgcgtccgagacgggggcctgggcccgggagaggggcgggggctgggctcccggacccgggcgcggggccttttaacccctgcagacccaggaccggccgggccgccccaagacgaacgccgcagggctgggctcagcccaagccagacggcgagagtcgcaccgaggtggaagctgggggcgcggcctcgccggggccaggaaaggggcggggccgggtggggcccggggaggagcctgtgcgccccgccctccgtgacgcgccgcggcccccgcgcatataagtgggcgcgtccgcgcgtgcgcaccccgcgcgcgcctctctgtcgtggcgcggcttcccgcggtcttctctgcaaatgggctccgtggcctagcgcccccgtccccgccacccgtgatcgtgcgccgaggcccgcgaggggtcgccgcccagatcccaccagccagcaagctaaagcatggcggccatcccctccagcggctcgctcgtggccacccacgactactaccggcgccgcctgggttccacttccagcaacagctcctgcagcagtaccgagtgccccggggaagccattccccaccccccagcttctttttcgggaagtccaccctcccgttcatggccacggtgttggagtccgcagagcactcggaacctccccaggcctccagcagcatgaccgcctgtggcctggctcgggacgccccgaggaagcagcccggcggtcagtccagcacagccagcgctgggcccccgtcctgacctgagcggttaccaccagccccaggcctgcggaggcgctagtccaccagagcccctccccgcccctctccccactccgcatccctcgcccccctccccacctcccaccccccaccctgtaaactaggcggctgcagcaagcagaccttcgcatcaacacagcagacaccaaaaaccagtgagagccccgctctctaccgcccggccccagcactcgctagctttcctgacacctggaactgtgcacctggcaccaagcggaaaataaactccaagcagccagtagccccgatggtgtgtgcctgagctgtgtggcccgaggttccatttgagtgtgagaaatggctgaatccctcccgacctcactgccttgtgggggctggccctgctcccaggcctttctgggcctcctcacgctgtgaggctgttgctggggctgataagggtggggttcactgctgcttctggagagccttggacagcaggcagtcctggagctggacaagcaggacccagggcagccactgaggtgggcccccgtgccacctttagcggggggaaagggagcagggagggctggtcctctgagggattcaggccccttacccgagggcctgcggggcggggagtagcctctggctgtgagctgggaagccctcactctggagggacctggttcctgctggtaggtgtctcccaagggcctcccataggggtgttgccccaagacaggctgaggggtaggggctgcaggcaccgtggaggggtcttcctgccacaggcagcccagcttaaagtgagggtggctgcatcattctggcctggtataggcatggagtgttggagtccgggagtgctgcaggctggcagggatgggggtccacacacaggagtgcatgggctgtgagcttagtagactccttcataaccaaggtgggtggtgtccccacacctctgccaggagcctacagggattgactcagttctgttgagaggcagcttagtgagcaggtgggagtcagtgagatagctggagacttgatgtgtggccagggacatggtgagaggaggggcctccgtggggtgggaaagggtggggttcagtggtggg

SEQ ID NO: 12017 - protein, 74 aa, Homo sapiens; identical to SEQ ID NO: 12011

SEQ ID NO: 12018 - DNA, 2231 bp, Homo sapiens
ccgccccctgcgggcagcaggcgcgtcctggggctgggcaaccggggtgcaggttccggagctgccagagctgtgagggggactcgggagagatccaggttcctctggctgcgaagtccctggaggccgggccggagggctccgcgcacgtagcactttttggcccgcccggcgcccccgtcgcctccacaagggctgaagaggacgggcgggctggaccaggcggggctccgagacgcgtccgagacgggggcctgggcccgggagaggggcgggggctgggctcccggacccgggcgcggggccttttaacccctgcagacccaggaccggccgggccgccccaagacgaacgccgcagggctgggctcagcccaagccagacggcgagagtcgcaccgaggtggaagctgggggcgcggcctcgccggggccaggaaaggggcggggccgggtggggcccggggaggagcctgtgcgccccgccctccgtgacgcgccgcggcccccgcgcatataagtgggcgcgtccgcgcgtgcgcaccccgcgcgcgcctctctgtcgtggcgcggcttcccgcggtcttctctgcaaatgggctccgtggcctagcgcccccgtccccgccacccgtgatcgtgcgccgaggcccgcgaggggtcgccgcccagatcccaccagccagcaagctaaagcatggcggccatcccctccagcggctcgctcgtggccacccacgactactaccggcgccgcctgggttccacttccagcaacagctcctgcagcagtaccgagtgccccggggaagccattccccaccccccaggtgagtgcaggatcgcccctttctccccccgctcctccaggagctggcagcatcaagaccccacttcgcttctctcaggtctccccaaggctgacccgggtcattggtgggccagcttctttttcgggaagtccaccctcccgttcatggccacggtgttggagtccgcagagcactcggaacctccccaggcctccagcagcatgaccgcctgtggcctggctcgggacgccccgaggaagcagcccggcggtcagtccagcacagccagcgctgggcccccgtcctgacctgagcggttaccaccagccccaggcctgcggaggcgctagtccaccagagcccctccccgcccctctccccactccgcatccctcgcccccctccccacctcccaccccccaccctgtaaactaggcggctgcagcaagcagaccttcgcatcaacacagcagacaccaaaaaccagtgagagccccgctctctaccgcccggccccagcactcgctagctttcctgacacctggaactgtgcacctggcaccaagcggaaaataaactccaagcagccagtagccccgatggtgtgtgcctgagctgtgtggcccgaggttccatttgagtgtgagaaatggctgaatccctcccgacctcactgccttgtgggggctggccctgctcccaggcctttctgggcctcctcacgctgtgaggctgttgctggggctgataagggtggggttcactgctgcttctggagagccttggacagcaggcagtcctggagctggacaagcaggacccagggcagccactgaggtgggcccccgtgccacctttagcggggggaaagggagcagggagggctggtcctctgagggattcaggccccttacccgagggcctgcggggcggggagtagcctctggctgtgagctgggaagccctcactctggagggacctggttcctgctggtaggtgtctcccaagggcctcccataggggtgttgccccaagacaggctgaggggtaggggctgcaggcaccgtggaggggtcttcctgccacaggcagcccagcttaaagtgagggtggctgcatcattctggcctggtataggcatggagtgttggagtccgggagtgctgcaggctggcagggatgggggtccacacacaggagtgcatgggctgtgagcttagtagactccttcataaccaaggtgggtggtgtccccacacctctgccaggagcctacagggattgactcagttctgttgagaggcagcttagtgagcaggtgggagtcagtgagatagctggagacttgatgtgtggccagggacatggtgagaggaggggcctccgtggggtgggaaagggtggggttcagtggtggg

SEQ ID NO: 12019 - protein, 140 aa, Homo sapiens; identical to SEQ ID NO: 12007

SEQ ID NO: 12020 - DNA, 2153 bp, Homo sapiens
ccgccccctgcgggcagcaggcgcgtcctggggctgggcaaccggggtgcaggttccggagctgccagagctgtgagggggactcgggagagatccaggttcctctggctgcgaagtccctggaggccgggccggagggctccgcgcacgtagcactttttggcccgcccggcgcccccgtcgcctccacaagggctgaagaggacgggcgggctggaccaggcggggctccgagacgcgtccgagacgggggcctgggcccgggagaggggcgggggctgggctcccggacccgggcgcggggccttttaacccctgcagacccaggaccggccgggccgccccaagacgaacgccgcagggctgggctcagcccaagccagacggcgagagtcgcaccgaggtggaagctgggggcgcggcctcgccggggccaggaaaggggcggggccgggtggggcccggggaggagcctgtgcgccccgccctccgtgacgcgccgcggcccccgcgcatataagtgggcgcgtccgcgcgtgcgcaccccgcgcgcgcctctctgtcgtggcgcggcttcccgcggtcttctctgcaaatgggctccgtggcctagcgcccccgtccccgccacccgtgatcgtgcgccgaggcccgcgaggggtcgccgcccagatcccaccagccagcaagctaaagcatggcggccatcccctccagcggctcgctcgtggccacccacgactactaccggcgccgcctgggttccacttccagcaacagctcctgcagcagtaccgagtgccccggggaagccattccccaccccccaggtctccccaaggctgacccgggtcattggtgggccagcttctttttcgggaagtccaccctcccgttcatggccacggtgttggagtccgcagagcactcggaacctccccaggcctccagcagcatgaccgcctgtggcctggctcgggacgccccgaggaagcagcccggcggtcagtccagcacagccagcgctgggcccccgtcctgacctgagcggttaccaccagccccaggcctgcggaggcgctagtccaccagagcccctccccgcccctctccccactccgcatccctcgcccccctccccacctcccaccccccaccctgtaaactaggcggctgcagcaagcagaccttcgcatcaacacagcagacaccaaaaaccagtgagagccccgctctctaccgcccggccccagcactcgctagctttcctgacacctggaactgtgcacctggcaccaagcggaaaataaactccaagcagccagtagccccgatggtgtgtgcctgagctgtgtggcccgaggttccatttgagtgtgagaaatggctgaatccctcccgacctcactgccttgtgggggctggccctgctcccaggcctttctgggcctcctcacgctgtgaggctgttgctggggctgataagggtggggttcactgctgcttctggagagccttggacagcaggcagtcctggagctggacaagcaggacccagggcagccactgaggtgggcccccgtgccacctttagcggggggaaagggagcagggagggctggtcctctgagggattcaggccccttacccgagggcctgcggggcggggagtagcctctggctgtgagctgggaagccctcactctggagggacctggttcctgctggtaggtgtctcccaagggcctcccataggggtgttgccccaagacaggctgaggggtaggggctgcaggcaccgtggaggggtcttcctgccacaggcagcccagcttaaagtgagggtggctgcatcattctggcctggtataggcatggagtgttggagtccgggagtgctgcaggctggcagggatgggggtccacacacaggagtgcatgggctgtgagcttagtagactccttcataaccaaggtgggtggtgtccccacacctctgccaggagcctacagggattgactcagttctgttgagaggcagcttagtgagcaggtgggagtcagtgagatagctggagacttgatgtgtggccagggacatggtgagaggaggggcctccgtggggtgggaaagggtggggttcagtggtggg

SEQ ID NO: 12021 - protein, 114 aa, Homo sapiens; identical to SEQ ID NO: 2009

SEQ ID NO: 12022 - DNA, 1975 bp, Homo sapiens
ccgccccctgcgggcagcaggcgcgtcctggggctgggcaaccggggtgcaggttccggagctgccagagctgtgagggggactcgggagagatccaggttcctctggctgcgaagtccctggaggccgggccggagggctccgcgcacgtagcactttttggcccgcccggcgcccccgtcgcctccacaagggctgaagaggacgggcgggctggaccaggcggggctccgagacgcgtccgagacgggggcctgggcccgggagaggggcgggggctgggctcccggacccgggcgcggggccttttaacccctgcagacccaggaccggccgggccgccccaagacgaacgccgcagggctgggctcagcccaagccagacggcgagagtcgcaccgaggtggaagctgggggcgcggcctcgccggggccaggaaaggggcggggccgggtggggcccggggaggagcctgtgcgccccgccctccgtgacgcgccgcggcccccgcgcatataagtgggcgcgtccgcgcgtgcgcaccccgcgcgcgcctctctgtcgtggcgcggcttcccgcggtcttctctgcaaatgggctccgtggcctagcgcccccgtccccgccacccgtgatcgtgcgccgaggcccgcgaggggtcgccgcccagatcccaccagccagcaagctaaagcatggcggccatcccctccagcggctcgctcgtggccacccacgactactaccggcgccgcctgggttccacttccacagcatgaccgcctgtggcctggctcgggacgccccgaggaagcagcccggcggtcagtccagcacagccagcgctgggcccccgtcctgacctgagcggttaccaccagccccaggcctgcggaggcgctagtccaccagagcccctccccgcccctctccccactccgcatccctcgcccccctccccacctcccaccccccaccctgtaaactaggcggctgcagcaagcagaccttcgcatcaacacagcagacaccaaaaaccagtgagagccccgctctctaccgcccggccccagcactcgctagctttcctgacacctggaactgtgcacctggcaccaagcggaaaataaactccaagcagccagtagccccgatggtgtgtgcctgagctgtgtggcccgaggttccatttgagtgtgagaaatggctgaatccctcccgacctcactgccttgtgggggctggccctgctcccaggcctttctgggcctcctcacgctgtgaggctgttgctggggctgataagggtggggttcactgctgcttctggagagccttggacagcaggcagtcctggagctggacaagcaggacccagggcagccactgaggtgggcccccgtgccacctttagcggggggaaagggagcagggagggctggtcctctgagggattcaggccccttacccgagggcctgcggggcggggagtagcctctggctgtgagctgggaagccctcactctggagggacctggttcctgctggtaggtgtctcccaagggcctcccataggggtgttgccccaagacaggctgaggggtaggggctgcaggcaccgtggaggggtcttcctgccacaggcagcccagcttaaagtgagggtggctgcatcattctggcctggtataggcatggagtgttggagtccgggagtgctgcaggctggcagggatgggggtccacacacaggagtgcatgggctgtgagcttagtagactccttcataaccaaggtgggtggtgtccccacacctctgccaggagcctacagggattgactcagttctgttgagaggcagcttagtgagcaggtgggagtcagtgagatagctggagacttgatgtgtggccagggacatggtgagaggaggggcctccgtggggtgggaaagggtggggttcagtggtggg

SEQ ID NO: 12023 - protein, 39 aa, Homo sapiens
MGVHTQECMGCELSRLLHNQGGWCPHTSARSLQGLTQFC

SEQ ID NO: 12024 - DNA, 373 bp, Homo sapiens
accccgcgcgcgcctctctgtcgtggcgcggcttcccgcggtcttctctgcaaatgggctccgtggcctagcgcccccgtccccgccacccgtgatcgtgcgccgaggcccgcgaggggtcgccgcccagatcccaccagccagcaagctaaagcatggcggccatcccctccagcggctcgctcgtggccacccacgactactaccggcgtgagtagcccctgccccccatccacgcggatgctctgctggcgccagtgccggccccgtgcaggctgcggaaccagcgctcggcctgaaggccggtgggctggggggctccgcgccccgcgttgctgacgggacctctcctctccaggccgcctgggttcca

SEQ ID NO: 12025 - protein, 32 aa, Homo sapiens
MLCWRQCRPRAGCGTSARPEGRWAGGLRAPRC

SEQ ID NO: 12026 - DNA, 709 bp, Homo sapiens
accccgcgcgcgcctctctgtcgtggcgcggcttcccgcggtcttctctgcaaatgggctccgtggcctagcgcccccgtccccgccacccgtgatcgtgcgccgaggcccgcgaggggtcgccgcccaggccgcctgggttccacttccagcaacagctcctgcagcagtaccgagtgccccggggaagccattccccaccccccaggtctccccaaggctgacccgggtcattggtgggccagcttctttttcgggaagtccaccctcccgttcatggccacggtgttggagtccgcagagcactcggaacctccccaggcctccagcagcatgaccgcctgtggcctggctcgggacgccccgaggaagcagcccggcggtcagtccagcacagccagcgctgggcccccgtcctgacctgagcggttaccaccagccccaggcctgcggaggcgctagtccaccagagcccctccccgcccctctccccactccgcatccctcgcccccctccccacctcccaccccccaccctgtaaactaggcggctgcagcaagcagaccttcgcatcaacacagcagacaccaaaaaccagtgagagccccgctctctaccgcccggccccagcactcgctagctttcctgacacctggaactgtgcacctggcaccaagcggaaaataaactccaagcagccagtagccc

SEQ ID NO: 12027 - protein, 47 aa, Homo sapiens
MATVLESAEHSEPPQASSSMTACGLARDAPRKQPGGQSSTASAGPPS

SEQ ID NO: 12028 - DNA, 1531 bp, Homo sapiens
accccgcgcgcgcctctctgtcgtggcgcggcttcccgcggtcttctctgcaaatgggctccgtggcctagcgcccccgtccccgccacccgtgatcgtgcgccgaggcccgcgaggggtcgccgcccaggccgcctgggttccacttccagcaacagctcctgcagcagtaccgagtgccccggggaagccattccccaccccccaggtctccccaaggctgacccgggtcattggtgggccagcttctttttcgggaagtccaccctcccgttcatggccacggtgttggagtccgcagagcactcggaacctccccaggcctccagcagcatgaccgcctgtggcctggctcgggacgccccgaggaagcagcccggcggtcagtccagcacagccagcgctgggcccccgtcctgacctgagcggttaccaccagccccaggcctgcggaggcgctagtccaccagagcccctccccgcccctctccccactccgcatccctcgcccccctccccacctcccaccccccaccctgtaaactaggcggctgcagcaagcagaccttcgcatcaacacagcagacaccaaaaaccagtgagagccccgctctctaccgcccggccccagcactcgctagctttcctgacacctggaactgtgcacctggcaccaagcggaaaataaactccaagcagccagtagccccgatggtgtgtgcctgagctgtgtggcccgaggttccatttgagtgtgagaaatggctgaatccctcccgacctcactgccttgtgggggctggccctgctcccaggcctttctgggcctcctcacgctgtgaggctgttgctggggctgataagggtggggttcactgctgcttctggagagccttggacagcaggcagtcctggagctggacaagcaggacccagggcagccactgaggtgggcccccgtgccacctttagcggggggaaagggagcagggagggctggtcctctgagggattcaggccccttacccgagggcctgcggggcggggagtagcctctggctgtgagctgggaagccctcactctggagggacctggttcctgctggtaggtgtctcccaagggcctcccataggggtgttgccccaagacaggctgaggggtaggggctgcaggcaccgtggaggggtcttcctgccacaggcagcccagcttaaagtgagggtggctgcatcattctggcctggtataggcatggagtgttggagtccgggagtgctgcaggctggcagggatgggggtccacacacaggagtgcatgggctgtgagcttagtagactccttcataaccaaggtgggtggtgtccccacacctctgccaggagcctacagggattgactcagttctgttgagaggcagcttagtgagcaggtgggagtcagtgagatagctggagacttgatgtgtggccagggacatggtgagaggaggggcctccgtggggtgggaaagggtggggttcagtggtggg

SEQ ID NO: 12029 - protein, 47 aa, Homo sapiens; identical to SEQ ID NO: 12027

SEQ ID NO: 12030 - DNA, 1087 bp, Homo sapiens
gtgatcgtgcgccgaggcccgcgaggggtcgccgcccaggtgaggggcgccgcgcgcgggtgggacgagcaggcccgaggggcggggggcgaggggcggggctgggccgggggctcctctcctctccgcctggcgagcgctgggctcggggtccccggcgggctcctctcgggtcgggcgggttgggacggcgcccaccaggttcccgacgtctgggccggggccccgcgcacaaagcgcctttgttccacccgctcggccggtttgggctggttggagccgcccgcgccccgcgcggcgaaggcggtgccgggagctggggagccccgcctcggtaaataacccagcgcggcggctccacccgctggggagcgcccttcatgacggaaggccgctgacccgaggggctcctccacccccatgcgcagatcccaccagccagcaagctaaagcatggcggccatcccctccagcggctcgctcgtggccacccacgactactaccggcgccgcctgggttccacttccagcaacagctcctgcagcagtaccgagtgccccggggaagccattccccaccccccaggtctccccaaggctgacccgggtcattggtgggccagcttctttttcgggaagtccaccctcccgttcatggccacggtgttggagtccgcagagcactcggaacctccccaggcctccagcagcatgaccgcctgtggcctggctcgggacgccccgaggaagcagcccggcggtcagtccagcacagccagcgctgggcccccgtcctgacctgagcggttaccaccagccccaggcctgcggaggcgctagtccaccagagcccctccccgcccctctccccactccgcatccctcgcccccctccccacctcccaccccccaccctgtaaactaggcggctgcagcaagcagaccttcgcatcaacacagcagacaccaaaaaccagtgagagccccgctctctaccgcccggccccagcactcgctagctttcctgacacctggaactgtgcacctggcaccaagcggaaaataaactccaagcagccagtagccc

SEQ ID NO: 12031 - protein, 114 aa, Homo sapiens; identical to SEQ ID NO: 2009

SEQ ID NO: 12032 - DNA, 1909 bp, Homo sapiens
gtgatcgtgcgccgaggcccgcgaggggtcgccgcccaggtgaggggcgccgcgcgcgggtgggacgagcaggcccgaggggcggggggcgaggggcggggctgggccgggggctcctctcctctccgcctggcgagcgctgggctcggggtccccggcgggctcctctcgggtcgggcgggttgggacggcgcccaccaggttcccgacgtctgggccggggccccgcgcacaaagcgcctttgttccacccgctcggccggtttgggctggttggagccgcccgcgccccgcgcggcgaaggcggtgccgggagctggggagccccgcctcggtaaataacccagcgcggcggctccacccgctggggagcgcccttcatgacggaaggccgctgacccgaggggctcctccacccccatgcgcagatcccaccagccagcaagctaaagcatggcggccatcccctccagcggctcgctcgtggccacccacgactactaccggcgccgcctgggttccacttccagcaacagctcctgcagcagtaccgagtgccccggggaagccattccccaccccccaggtctccccaaggctgacccgggtcattggtgggccagcttctttttcgggaagtccaccctcccgttcatggccacggtgttggagtccgcagagcactcggaacctccccaggcctccagcagcatgaccgcctgtggcctggctcgggacgccccgaggaagcagcccggcggtcagtccagcacagccagcgctgggcccccgtcctgacctgagcggttaccaccagccccaggcctgcggaggcgctagtccaccagagcccctccccgcccctctccccactccgcatccctcgcccccctccccacctcccaccccccaccctgtaaactaggcggctgcagcaagcagaccttcgcatcaacacagcagacaccaaaaaccagtgagagccccgctctctaccgcccggccccagcactcgctagctttcctgacacctggaactgtgcacctggcaccaagcggaaaataaactccaagcagccagtagccccgatggtgtgtgcctgagctgtgtggcccgaggttccatttgagtgtgagaaatggctgaatccctcccgacctcactgccttgtgggggctggccctgctcccaggcctttctgggcctcctcacgctgtgaggctgttgctggggctgataagggtggggttcactgctgcttctggagagccttggacagcaggcagtcctggagctggacaagcaggacccagggcagccactgaggtgggcccccgtgccacctttagcggggggaaagggagcagggagggctggtcctctgagggattcaggccccttacccgagggcctgcggggcggggagtagcctctggctgtgagctgggaagccctcactctggagggacctggttcctgctggtaggtgtctcccaagggcctcccataggggtgttgccccaagacaggctgaggggtaggggctgcaggcaccgtggaggggtcttcctgccacaggcagcccagcttaaagtgagggtggctgcatcattctggcctggtataggcatggagtgttggagtccgggagtgctgcaggctggcagggatgggggtccacacacaggagtgcatgggctgtgagcttagtagactccttcataaccaaggtgggtggtgtccccacacctctgccaggagcctacagggattgactcagttctgttgagaggcagcttagtgagcaggtgggagtcagtgagatagctggagacttgatgtgtggccagggacatggtgagaggaggggcctccgtggggtgggaaagggtggggttcagtggtggg

SEQ ID NO: 12033 - protein, 114 aa, Homo sapiens; identical to SEQ ID NO: 2009

SEQ ID NO: 12034 - DNA, 764 bp, Homo sapiens
gacgtctacctctcccatgaccacaatatcccctacaagtggacggcccctgaagcgctctcccgaggccattactccaccaaatccgacgtctggtcctttgggattctcctgcatgagatgttcagcaggggtcaggtgccctacccaggagattcagggtcttgctatgttgcccaggctggtctcgaactcctgggctctagcaatcctcctgcctcgggactacaggcctgagctgctgcgcccagcctgggcacgaaagccgtctgtacgagagttgctggggaaatttctctgaagtctgtatcaagtggggcagcttcagcttacagggctttgggaaaagagcagttttaattttcagtgactccatgaggaatggtggaagaaaaaattggaaagagtggtttggtgagctgtaggcaaatattggaggaaactgaagttcaggacccggtccggaccacaggtgggcgacaaaacctccagacagcaaaccgggctagagtctaatagtgggggcacgagttttattttgaaacataatttttctctctacagtcaacaaatttctttttctttttttttttttgagatagagtttcgctcttattgcacaggctggagtgcaatggcttgatctcggctcacggcaacctctgcctcccgggttcaagtgattctcctgcctcagcctcccgagtagctgggattacaggcatgcgccaccacgcccagctaatttttgtactttcagtaga

SEQ ID NO: 12035 - protein, 94 aa, Homo sapiens
MTTISPTSGRPLKRSPEAITPPNPTSGPLGFSCMRCSAGVRCPTQEIQGLAMLPRLVSNSWALAILLPRDYRPELLRPAWARKPSVRELLGKFL

SEQ ID NO: 12036 - DNA, 2533 bp, Homo sapiens
tgccacgcccagctctgggtgctccagctgggccacagcctggtcctgccgctgcgcccgcccgccatggtgtcccgggaccaggctcacctgggccccaagtatgtgggcctctgggacttcaagtcccggacggacgaggagctgagcttccgcgcgggggacgtcttccacgtggccaggaaggaggagcagtggtggtgggccacgctgctggacgaggcgggtggggccgtggcccagggctatgtgccccacaactacctggccgagagggagacggtggagtcggaaccgtggttctttggctgcatctcccgctcggaagctgtgcgtcggctgcaggccgagggcaacgccacgggcgccttcctgatcagggtcagcgagaagccgagtgccgactacgtcctgtcggtgcgggacacgcaggctgtgcggcactacaagatctggcggcgtgccgggggccggctgcacctgaacgaggcggtgtccttcctcagcctgcccgagcttgtgaactaccacagggcccagagcctgtcccacggcctgcggctggccgcgccctgccggaagcacgagcctgagcccctgccccattgggatgactgggagaggccgagggaggagttcacgctctgcaggaagctggggtccggctactttggggaggtcttcgaggggctctggaaagaccgggtccaggtggccattaaggtgatttctcgagacaacctcctgcaccagcagatgctgcagtcggagatccaggccatgaagaagctgcggcacaaacacatcctggcgctgtacgccgtggtgtccgtgggggaccccgtgtacatcatcacggagctcatggccaagggcagcctgctggagctgctccgcgactctgatgagaaagtcctgcccgtttcggagctgctggacatcgcctggcaggtggctgagggcatgtgttacctggagtcgcagaattacatccaccgggacctggccgccaggaacatcctcgtcggggaaaacaccctctgcaaagttggggacttcgggttagccaggcttatcaaggaggacgtctacctctcccatgaccacaatatcccctacaagtggacggcccctgaagcgctctcccgaggccattactccaccaaatccgacgtctggtcctttgggattctcctgcatgagatgttcagcaggggtcaggtgccctacccaggcatgtccaaccatgaggccttcctgagggtggacgccggctaccgcatgccctgccctctggagtgcccgcccagcgtgcacaagctgatgctgacatgctggtgcagggaccccgagcagagaccctgcttcaaggccctgcgggagaggctctccagcttcaccagctacgagaacccgacctgagctgctgtggagcgggcatggccgggccctgctgaggaggggcctgggcagagggcctggacctgggatcaaggcccacgcgcttccctggggtttactgaggtgatgggtgcaggaaaggttcacaaatgtggagtgtctgcgtccaatacacgcgtgtgctcctctccttactccatcgtgtgtgccttgggtctcagctgctgacacgcagcctgctctggagcctgcagatgagatccgggagactgacacgaagccagcagaggtcagaggggactctgaccacagcccgctctctggctgtctgtctgcagtgcccggctgagggtgggaggcaaacacgccttgttcctgctcttcccagttcagcttggtgggagaaagtcattcgcgtggctcgggacgctcatgtaaatttggttttggtgctcaagggttctttcctcccaggggcaggtgtttctttcctgtttgtcttgtgtcttgagagcttggccttatgaccagtgagaactctctccctggtctctgccagcccaagcatcactgcccgaggcgccagctcagtttcaccgtccacgtccacaaggggcttttcccaccttcacctttgtcgctgggtcagtgctggaaagcgcccctcactcctgcgctgacaagggcccttctctactgtctgtggggtggttccgggctgggggggctgcctcctttgcacctgattttgaaggtgtctctttcatccatggttaagtcataaaaagcttattggttttggttttgactcacctgaaagtttttttggtttaaaagaagaataggcggggcacggtggctcatgcctgtaatcccagcactttgggaggctgaggcaggtggatcacgaggtcaggagatcgacaccatcctggctaacacggtgaaaccccgtctctactaaaaaatacaaaaaattagctgggtgtggtggtgggggtgggcgcctgtagtcccagctacgtgggaggctgaggcagcagactggtgtgaacccgggaggtggagcttgcagtgagccgagatcgcgccactgcactccagcctgggcgacagagcgagactccatctc

SEQ ID NO: 12037 - protein, 451 aa, Homo sapiens; identical to SEQ ID NO: 2011

SEQ ID NO: 12038 - DNA, 2512 bp, Homo sapiens
aaattttaggccgggcacggtggctcacatctgtaatccccacactttgggaagccaaggtgggcggatcacgaggtcaggagtttgagaccagcctggccaacatggggaaaccacgtctctactaaaaatacaaaaattagccgagtgtggaggcatgtgcctgtagtcccagctactcgggaggctgaggcaggagaatcgcttcaacccaggaggcggagattgcagtgagctgagatcgcgccattgcactccagcctgggcgacagagcaagaccccgtcttgggaaaaaaaaaaaagaaagaaagaaagaaaatttaaaatccttgacgtaatggaaagccattaaaatagatcactggaaatgggtaaaacttccctggaacccgtctgggccccagcagaggtctggcctctatgtcagaggtctgggccgggcacaggaagaaatcgggtggccaccacagccccgtgggtacgccaggctggggccctgtggggccggctgcatctgccatttcgtggcctcgggagccaggtgccctgtcgggggcaggaggtctgtgtgtcctgcacagctgctgggtgtgatggctgctgtgtgtgggggcagggccttggcctcttccttggggcctggggggtcaggggctgcatccaccgaggccacccgtccccgcagacaacctcctgcaccagcagatgctgcagtcggagatccaggccatgaagaagctgcggcacaaacacatcctggcgctgtacgccgtggtgtccgtgggggaccccgtgtacatcatcacggagctcatggccaagggcagcctgctggagctgctccgcgactctgatgagaaagtcctgcccgtttcggagctgctggacatcgcctggcaggtggctgagggcatgtgttacctggagtcgcagaattacatccaccgggacctggccgccaggaacatcctcgtcggggaaaacaccctctgcaaagttggggacttcgggttagccaggcttatcaaggaggacgtctacctctcccatgaccacaatatcccctacaagtggacggcccctgaagcgctctcccgaggccattactccaccaaatccgacgtctggtcctttgggattctcctgcatgagatgttcagcaggggtcaggtgccctacccaggtactgtccccactgtccctgactgggcatgagaggcagagtgggggaggtcctgggtagccggcagggacgctggggggtgcctcccccacgggcttcagggccctccgcgggccatcgcctgaactccacacctgcaccattctctgagcacccaggctggtgcctggagctgcctgttggagccctgtccagagggaggtgttagcagtggacagtgtgctgggtggcgccaaggcatggcagctgaggctgcggggaaggccccaggaaggggcagtggatggctggtgtggcttcttgggggagggtaggcaggtgggccccagctcttctcatccctgtcggccgcaggcatgtccaaccatgaggccttcctgagggtggacgccggctaccgcatgccctgccctctggagtgcccgcccagcgtgcacaagctgatgctgacatgctggtgcagggaccccgagcagagaccctgcttcaaggccctgcgggagaggctctccagcttcaccagctacgagaacccgacctgagctgctgtggagcgggcatggccgggccctgctgaggaggggcctgggcagagggcctggacctgggatcaaggcccacgcgcttccctggggtttactgaggtgatgggtgcaggaaaggttcacaaatgtggagtgtctgcgtccaatacacgcgtgtgctcctctccttactccatcgtgtgtgccttgggtctcagctgctgacacgcagcctgctctggagcctgcagatgagatccgggagactgacacgaagccagcagaggtcagaggggactctgaccacagcccgctctctggctgtctgtctgcagtgcccggctgagggtgggaggcaaacacgccttgttcctgctcttcccagttcagcttggtgggagaaagtcattcgcgtggctcgggacgctcatgtaaatttggttttggtgctcaagggttctttcctcccaggggcaggtgtttctttcctgtttgtcttgtgtcttgagagcttggccttatgaccagtgagaactctctccctggtctctgccagcccaagcatcactgcccgaggcgccagctcagtttcaccgtccacgtccacaaggggcttttcccaccttcacctttgtcgctgggtcagtgctggaaagcgcccctcactcctgcgctgacaagggcccttctctactgtctgtggggtggttccgggctgggggggctgcctcctttgcacctgattttgaaggtgtctctttcatccatggttaagtcataaaaagcttattggttttggttttg

SEQ ID NO: 12039 - protein, 169 aa, Homo sapiens
MLQSEIQAMKKLRHKHILALYAVVSVGDPVYIITELMAKGSLLELLRDSDEKVLPVSELLDIAWQVAEGMCYLESQNYIHRDLAARNILVGENTLCKVGDFGLARLIKEDVYLSHDHNIPYKWTAPEALSRGHYSTKSDVWSFGILLHEMFSRGQVPYPGTVPTVPDWA

SEQ ID NO: 12040 - DNA, 1984 bp, Homo sapiens
agctgggccacagcctggtcctgccgctgcgcccgcccgccatggtgtcccgggaccaggctcacctgggccccaagtatgtgggcctctgggacttcaagtcccggacggacgaggagctgagcttccgcgcgggggacgtcttccacgtggccaggaaggaggagcagtggtggtgggccacgctgctggacgaggcgggtggggccgtggcccagggctatgtgccccacaactacctggccgagagggagacggtggagtcggaaccgtggttctttggctgcatctcccgctcggaagctgtgcgtcggctgcaggccgagggcaacgccacgggcgccttcctgatcaggtgcgggacacgcaggctgtgcggcactacaagatctggcggcgtgccgggggccggctgcacctgaacgaggcggtgtccttcctcagcctgcccgagcttgtgaactaccacagggcccagagcctgtcccacggcctgcggctggccgcgccctgccggaagcacgagcctgagcccctgccccattgggatgactgggagaggccgagggaggagttcacgctctgcaggaagctggggtccggctactttggggaggtcttcgaggggctctggaaagaccgggtccaggtggccattaaggtgatttctcgagactctgatgagaaagtcctgcccgtttcggagctgctggacatcgcctggcaggtggctgagggcatgtgttacctggagtcgcagaattacatccaccgggacctggccgccaggaacatcctcgtcggggaaaacaccctctgcaaagttggggacttcgggttagccaggcttatcaaggaggacgtctacctctcccatgaccacaatatcccctacaagtggacggcccctgaagcgctctcccgaggccattactccaccaaatccgacgtctggtcctttgggattctcctgcatgagatgttcagcaggggtcaggtgccctacccaggcatgtccaaccatgaggccttcctgagggtggacgccggctaccgcatgccctgccctctggagtgcccgcccagcgtgcacaagctgatgctgacatgctggtgcagggaccccgagcagagaccctgcttcaaggccctgcgggagaggctctccagcttcaccagctacgagaacccgacctgagctgctgtggagcgggcatggccgggccctgctgaggaggggcctgggcagagggcctggacctgggatcaaggcccacgcgcttccctggggtttactgaggtgatgggtgcaggaaaggttcacaaatgtggagtgtctgcgtccaatacacgcgtgtgctcctctccttactccatcgtgtgtgccttgggtctcagctgctgacacgcagcctgctctggagcctgcagatgagatccgggagactgacacgaagccagcagaggtcagaggggactctgaccacagcccgctctctggctgtctgtctgcagtgcccggctgagggtgggaggcaaacacgccttgttcctgctcttcccagttcagcttggtgggagaaagtcattcgcgtggctcgggacgctcatgtaaatttggttttggtgctcaagggttctttcctcccaggggcaggtgtttctttcctgtttgtcttgtgtcttgagagcttggccttatgaccagtgagaactctctccctggtctctgccagcccaagcatcactgcccgaggcgccagctcagtttcaccgtccacgtccacaaggggcttttcccaccttcacctttgtcgctgggtcagtgctggaaagcgcccctcactcctgcgctgacaagggcccttctctactgtctgtggggtggttccgggctgggggggctgcctcctttgcacctgattttgaaggtgtctctttcatccatggttaagtcataaaaagcttattggttttggttttg

SEQ ID NO: 12041 - protein, 152 aa, Homo sapiens [sequence omitted]

SEQ ID NO: 12042 - DNA, 2208 bp, Homo sapiens
tgccacgcccagctctgggtgctccagctgggccacagcctggtcctgccgctgcgcccgcccgccatggtgtcccgggaccaggctcacctgggccccaagtatgtgggcctctgggacttcaagtcccggacggacgaggagctgagcttccgcgcgggggacgtcttccacgtggccaggaaggaggagcagtggtggtgggccacgctgctggacgaggcgggtggggccgtggcccagggctatgtgccccacaactacctggccgagagggagacggtggagtcggaaccgtggttctttggctgcatctcccgctcggaagctgtgcgtcggctgcaggccgagggcaacgccacgggcgccttcctgatcagggtcagcgagaagccgagtgccgactacgtcctgtcggtgcgggacacgcaggctgtgcggcactacaagatctggcggcgtgccgggggccggctgcacctgaacgaggcggtgtccttcctcagcctgcccgagcttgtgaactaccacagggcccagagcctgtcccacggcctgcggctggccgcgccctgccggaagcacgagcctgagcccctgccccattgggatgactgggagaggccgagggaggagttcacgctctgcaggaagctggggtccggctactttggggaggtcttcgaggggctctggaaagaccgggtccaggtggccattaaggtgatttctcgagacaacctcctgcaccagcagatgctgcagtcggagatccaggccatgaagaagctgcggcacaaacacatcctggcgctgtacgccgtggtgtccgtgggggaccccgtgtacatcatcacggagctcatggccaagggcagcctgctggagctgctccgcgactctgatgagaaagtcctgcccgtttcggagctgctggacatcgcctggcaggtggctgagggcatgtgttacctggagtcgcagaattacatccaccgggacctggccgccaggaacatcctcgtcggggaaaacaccctctgcaaagttggggacttcgggttagccaggcttatcaaggaggacgtctacctctcccatgaccacaatatcccctacaagtggacggcccctgaagcgctctcccgaggccattactccaccaaatccgacgtctggtcctttgggattctcctgcatgagatgttcagcaggggtcaggtgccctacccaggcatgtccaaccatgaggccttcctgagggtggacgccggctaccgcatgccctgccctctggagtgcccgcccagcgtgcacaagctgatgctgacatgctggtgcagggaccccgagcagagaccctgcttcaaggccctgcgggagaggctctccagcttcaccagctacgagaacccgacctgagctgctgtggagcgggcatggccgggccctgctgaggaggggcctgggcagagggcctggacctgggatcaaggcccacgcgcttccctggggtttactgaggtgatgggtgcaggaaaggttcacaaatgtggagtgtctgcgtccaatacacgcgtgtgctcctctccttactccatcgtgtgtgccttgggtctcagctgctgacacgcagcctgctctggagcctgcagatgagatccgggagactgacacgaagccagcagaggtcagaggggactctgaccacagcccgctctctggctgtctgtctgcagtgcccggctgagggtgggaggcaaacacgccttgttcctgctcttcccagttcagcttggtgggagaaagtcattcgcgtggctcgggacgctcatgtaaatttggttttggtgctcaagggttctttcctcccaggggcaggtgtttctttcctgtttgtcttgtgtcttgagagcttggccttatgaccagtgagaactctctccctggtctctgccagcccaagcatcactgcccgaggcgccagctcagtttcaccgtccacgtccacaaggggcttttcccaccttcacctttgtcgctgggtcagtgctggaaagcgcccctcactcctgcgctgacaagggcccttctctactgtctgtggggtggttccgggctgggggggctgcctcctttgcacctgattttgaaggtgtctctttcatccatggttaagtcataaaaagcttattggttttggttttg

SEQ ID NO: 12043 - protein, 451 aa, Homo sapiens; identical to SEQ ID NO: 2011

SEQ ID NO: 12044 - DNA, 872 bp, Homo sapiens
ggctgaggagggtcacgctcctgagatcccgcgtttctcatcagtgattgggcacccactgtgtgtgtgcgtgagtcacaggctgtgtagggttagctcccgggggacccaagcaacaagcaggggaggctgtaaagaggccgtcgggcaggggcccatggtggagacccctctattacgtgcagacccacgacctcgttagcagggtcacgcgcagacccacgacctcgttagtgagcaggggtgcaggggtggggtctggccggaggctggtcagctcccaggtgcaaagaccctgagtcctgagaactcgcccaggtggttctttggctgcatctcccgctcggaagctgtgcgtcggctgcaggccgagggcaacgccacgggcgccttcctgatcagggtcagcgagaagccgagtgccgactacgtcctgtcggtgcgggacacgcaggctgtgcggcactacaagatctggcggcgtgccgggggccggctgcacctgaacgaggcggtgtccttcctcagcctgcccgagcttgtgaactaccacagggcccagagcctgtcccacggcctgcggctggccgcgccctgccggaagcacgagcctgagcccctgccccattgggatgactgggagaggccgagggaggagttcacgctctgcaggaagctggggtccggctactttggggaggtcttcgaggggctctggaaagaccgggtccaggtggccattaaggtgatttctcgagacaacctcctgcaccagcagatgctgcagtcggagatccaggccatgaagaagctgcggcacaaacacatcctggcgctgtacgccgtggtgtccgtgggggaccccgtgtaca

SEQ ID NO: 12045 - protein, 38 aa, Homo sapiens
MTGRGRGRSSRSAGSWGPATLGRSSRGSGKTGSRWPLR

SEQ ID NO: 12046 - DNA, 2402 bp, Homo sapiens
ggctcccatggccctcgggcccagcgtggtgaccccgggggatggagccgttcctcaggaggcggctggccttcctgtccttcttctgggacaagatctggccggcgggcggcgagccggaccatggcacccccgggtccctggaccccaacactgacccagtgcccacgctccccgccgagccttgcagccccttccctcagctcttccttgcgctctatgacttcacggcgcggtgtggcggggagctgagtgtccgccgcggggacaggctctgtgccctcgaagaggggggcggctacatcttcgcacgcaggctttcgggccagcccagcgccgggctcgtgcccatcacccacgtggccaaggcttctcctgagacgctctcagaccaaccctggtactttagcggggtcagtcggacccaggcacagcagctgctcctctccccacccaacgaaccaggggccttcctcatccggcccagcgagagcagcctcgggggctactcactgtcagtccgggcccaggccaaggtctgccactaccgggtctccatggcagctgatggcagcctctacctgcagaagggacggctctttcccggcctggaggagctgctcacctactacaaggccaactggaagctgatccagaaccccctgctgcagccctgcatgccccagaaggccccgaggcaggacgtgtgggagcggccacactccgaattcgcccttgggaggaagctgggtgaaggctactttggggaggtgtgggaaggcctgtggctgggctccctgcccgtggcgatcaaggtcatcaagtcagccaacatgaagctcactgacctcgccaaggagatccagacactgaagggcctgcggcacgagcggctcatccggctgcacgcagtgtgctcgggcggggagcctgtgtacatcgtcacggaactcatgcgcaaggggaacctgcaggccttcctgggcacccccgagggccgggccctgcgtctgccgccactcctgggctttgcctgccaggtggctgagggcatgagctacctggaggagcagcgcgttgtgcaccgggacttggccgcccggaacgtgctcgtggacgacggcctggcctgcaaggtggctgacttcggcctggcccggctgctcaaggacgacatctactccccgagcagcagctccaagatcccggtcaagtggacagcgcctgaggcggccaattatcgtgtcttctcccagaagtcagacgtctggtccttcggcgtcctgctgcacgaggttttcacctatggccagtgtccctatgaagggatgaccaaccacgagacgctgcagcagatcatgcgagggtaccggctgccgcgcccggctgcctgcccggcggaggtctacgtgctcatgctggagtgctggaggagcagccccgaggaacggccctccttcgccacgctgcgggagaagctgcacgccatccacagatgccacccctgagtcctcacgtgacccaacgctctgggctccagccaggccagcccctcctccctgcagagcgccaactcgaagggatgccggtctgccggaccgaggagcctctggctgtgggcctcaggccctggcgtgcacacatgttcgtgcaccaggcagacgtgcagacggagggctggggctgacgtcccccgtgcagtgtgactcgtgcagacggagggctggggctgacgtcccccatgcagtgtgactcgtgcagacgaagggctggggctgacgttccccgtgcagtgtgactcgtgcagacggagggctggggctgacgttccccgtgcagtgtgacacgtgtccctggcctctcaagagagacaacggcacaggagggtgggtagaagcctcggaggctctgggtgaggaaccctgagccctgtgtgtctcctgcctgggtcccctggactccctcccagggtgaagagccaaaggcccagttctctccctagtcccagcttgggtttgtggaaatgaccagtgctgactcccaggcagaccgtggtgttgaccccactggatgtgtggtatgtaggcacggggtggcaccgtcacctgcccctcacagacacactggcggcctgtgcacaaacccactcacgcacacagcactcagtaagccgggactgacccactcagacacgcacacaggcgcacatcacacacaggctcagccccccaaacccagacccaggagctggagcgtacgggtccacgtggctagaaaatgcaggttggagcggcccccatgccgcccggacccccagcccaggacatcatggtgcccagagagcgtgagccccaagggcattggcaggagctgccgattccatctccctgggtgggttccag

SEQ ID NO: 12047 - protein, 488 aa, Homo sapiens; identical to SEQ ID NO: 2013

SEQ ID NO: 12048 - DNA, 2497 bp, Homo sapiens
ccccaacgccagcccggacgccggtgggaaccgtgtgcctcctggatccaggggacctctgagtgaccgcagggccggggtcccctgtcaccccacggccagggcagggagcgctggacaccgggtcccaccggccctgccagttcctcttccgggctcgcgggctcccatggccctcgggcccagcgtgatctggccggcgggcggcgagccggaccatggcacccccgggtccctggaccccaacactgacccagtgcccacgctccccgccgagccttgcagccccttccctcagctcttccttgcgctctatgacttcacggcgcggtgtggcggggagctgagtgtccgccgcggggacaggctctgtgccctcgaagaggggggcggctacatcttcgcacgcaggctttcgggccagcccagcgccgggctcgtgcccatcacccacgtggccaaggcttctcctgagacgctctcagaccaaccctggtactttagcggggtcagtcggacccaggcacagcagctgctcctctccccacccaacgaaccaggggccttcctcatccggcccagcgagagcagcctcgggggctactcactgtcagtccgggcccaggccaaggtctgccactaccgggtctccatggcagctgatggcagcctctacctgcagaagggacggctctttcccggcctggaggagctgctcacctactacaaggccaactggaagctgatccagaaccccctgctgcagccctgcatgccccagaaggccccgaggcaggacgtgtgggagcggccacactccgaattcgcccttgggaggaagctgggtgaaggctactttggggaggtgtgggaaggcctgtggctgggctccctgcccgtggcgatcaaggtcatcaagtcagccaacatgaagctcactgacctcgccaaggagatccagacactgaagggcctgcggcacgagcggctcatccggctgcacgcagtgtgctcgggcggggagcctgtgtacatcgtcacggaactcatgcgcaaggggaacctgcaggccttcctgggcacccccgagggccgggccctgcgtctgccgccactcctgggctttgcctgccaggtggctgagggcatgagctacctggaggagcagcgcgttgtgcaccgggacttggccgcccggaacgtgctcgtggacgacggcctggcctgcaaggtggctgacttcggcctggcccggctgctcaaggacgacatctactccccgagcagcagctccaagatcccggtcaagtggacagcgcctgaggcggccaattatcgtgtcttctcccagaagtcagacgtctggtccttcggcgtcctgctgcacgaggttttcacctatggccagtgtccctatgaagggatgaccaaccacgagacgctgcagcagatcatgcgagggtaccggctgccgcgcccggctgcctgcccggcggaggtctacgtgctcatgctggagtgctggaggagcagccccgaggaacggccctccttcgccacgctgcgggagaagctgcacgccatccacagatgccacccctgagtcctcacgtgacccaacgctctgggctccagccaggccagcccctcctccctgcagagcgccaactcgaagggatgccggtctgccggaccgaggagcctctggctgtgggcctcaggccctggcgtgcacacatgttcgtgcaccaggcagacgtgcagacggagggctggggctgacgtcccccgtgcagtgtgactcgtgcagacggagggctggggctgacgtcccccatgcagtgtgactcgtgcagacgaagggctggggctgacgttccccgtgcagtgtgactcgtgcagacggagggctggggctgacgttccccgtgcagtgtgacacgtgtccctggcctctcaagagagacaacggcacaggagggtgggtagaagcctcggaggctctgggtgaggaaccctgagccctgtgtgtctcctgcctgggtcccctggactccctcccagggtgaagagccaaaggcccagttctctccctagtcccagcttgggtttgtggaaatgaccagtgctgactcccaggcagaccgtggtgttgaccccactggatgtgtggtatgtaggcacggggtggcaccgtcacctgcccctcacagacacactggcggcctgtgcacaaacccactcacgcacacagcactcagtaagccgggactgacccactcagacacgcacacaggcgcacatcacacacaggctcagccccccaaacccagacccaggagctggagcgtacgggtccacgtggctagaaaatgcaggttggagcggcccccatgccgcccggacccccagcccaggacatcatggtgcccagagagcgtgagccccaagggcattggcaggagctgccgattccatctccctgggtgggttccag

SEQ ID NO: 12049 - protein, 477 aa, Homo sapiens
MALGPSVIWPAGGEPDHGTPGSLDPNTDPVPTLPAEPCSPFPQLFLALYDFTARCGGELSVRRGDRLCALEEGGGYIFARRLSGQPSAGLVPITHVAKASPETLSDQPWYFSGVSRTQAQQLLLSPPNEPGAFLIRPSESSLGGYSLSVRAQAKVCHYRVSMAADGSLYLQKGRLFPGLEELLTYYKANWKLIQNPLLQPCMPQKAPRQDVWERPHSEFALGRKLGEGYFGEVWEGLWLGSLPVAIKVIKSANMKLTDLAKEIQTLKGLRHERLIRLHAVCSGGEPVYIVTELMRKGNLQAFLGTPEGRALRLPPLLGFACQVAEGMSYLEEQRVVHRDLAARNVLVDDGLACKVADFGLARLLKDDIYSPSSSSKIPVKWTAPEAANYRVFSQKSDVWSFGVLLHEVFTYGQCPYEGMTNHETLQQIMRGYRLPRPAACPAEVYVLMLECWRSSPEERPSFATLREKLHAIHRCHP

SEQ ID NO: 12050 - DNA, 1109 bp, Homo sapiens
ggaagaggccccagcactgacctccgtgggggtggagatgaggaggatggaaagggtgtcttcctccagcatcttcctgaagctcccggataatgagcacccatgtggcaggcctgggcctggacaagatgaagctgggcaatccccagtccttcctggaccaggaggaggcagatgaccagcagctgctggaaccagaggcgtggaagacctacaccgagcgccgcaatgccctgcgtgagttcctgacctcggacctgagtccgcacctgctcaagcgccaccacgcccgcatgcagctgctgcgtaagtgctcctactacatcgaggtcctgcccaagcacctggccctgggcgaccagaacccgctggtgctgcctagcgccttgttccagctcatcgacccctggaagttccagcgcatgaagaaggtgggcacagctcagaccaagatccagctcctgctgctcggggacctgttggaacagctcgaccatggccgtgctgagctggatgccctgctccggtcgccagacccacggcccttcctggccgactgggcgctggtggagcggcggctggcggacgtgtcggccgtcatggacagcttcctgaccatgatggtgccggggcggctacacgtcaagcaccgcctggtgtctgatgtcagtgccaccaagatcccgcacatctggctcatgctgagcaccaagatgcctgtcgtgtttgaccgaaaggcgtcggcggctcaccaggactgggcccggctgcgctggttcgtcaccatccagccagccacatcggagcagtatgagttgcgcttcaggctgctggacccgcggacacagcaggagtgcgcccagtgtggcgtcatccccgtggctgcctgcaccttcgacgtccgaaacctgctgcccaaccgatcctataagttcaccatcaagagggccgagacctccacgctggtgtacgagccctggagggacagcctcaccctgcacaccaagccggagcccctggaggggcccgccctcagccactctgtctgagagatgattttctaatatttatccactaataaagaagagtgtaaatgcacatatggaatt

SEQ ID NO: 12051 - protein, 46 aa, Homo sapiens
MRRMERVSSSSIFLKLPDNEHPCGRPGPGQDEAGQSPVLPGPGGGR

SEQ ID NO: 12052 - DNA, 1131 bp, Homo sapiens
agaggccccagcactgacctccgtgggggtggagatgaggaggatggaaagggtgtcttcctccagcatcttcctgaagctcccggataatgagcacccatgtggcaggcctgggcctggacaagatgaagctgggcaatccccagtccttcctggaccaggaggaggcagatgaccagcagctgctggaaccagaggcgtggaagacctacaccgagcgccgcaatgccctgcgtgagttcctgacctcggacctgagtccgcacctgctcaagcgccaccacgcccgcatgcagctgctgcgtaagtgctcctactacatcgaggtcctgcccaagcacctggccctgggcgaccagaacccgctggtgctgcctagcgccttgttccagctcatcgacccctggaagttccagcgcatgaagaaggtgggcacagctcagaccaagatccagctcctgctgctcggggacctgttggaacagctcgaccatggccgtgctgagctggatgccctgctccggtcgccagacccacggcccttcctggccgactgggcgctggtggagcggcggctggcggacgtgtcggccgtcatggacagcttcctgaccatgatggtgccggggcggctacacgtcaagcaccgcctggtgtctgatgtcagtgccaccaagatcccgcacatctggctcatgctgagcaccaagatgcctgtcgtgtttgaccgaaaggcgtcggcggctcaccaggactgggcccggctgcgctggttcgtcaccatccagccagccacatcggagcagtatgagttgcgcttcaggctgctggacccgcggacacagcaggagtgcgcccagtgtggcgtcatccccgtggctgcctgcaccttcgacgtccgaaacctgctgcccaaccgatcctataagttcaccatcaagagggccgagacctccacgctggtgtacgagccctggagggacagcctcaccctgcacaccaagccggagcccctggaggggcccgccctcagccactctgtctgagagatgattttctaatatttatccactaataaagaagagtgtaaatgcacatatggaattaaagaagcaaacctatttatgtttt

SEQ ID NO: 12053 - protein, 46 aa, Homo sapiens; identical to SEQ ID NO: 12051

SEQ ID NO: 12054 - DNA, 1116 bp, Homo sapiens
ccgcggagtgcggagggaggctgggctctgggaagtccgcgcgcggctccgcttcagaggcaggctcccggataatgagcacccatgtggcaggcctgggcctggacaagatgaagctgggcaatccccagtccttcctggaccaggaggaggcagatgaccagcagctgctggaaccagaggcgtggaagacctacaccgagcgccgcaatgccctgcgtgagttcctgacctcggacctgagtccgcacctgctcaagcgccaccacgcccgcatgcagctgctgcgtaagtgctcctactacatcgaggtcctgcccaagcacctggccctgggcgaccagaacccgctggtgctgcctagcgccttgttccagctcatcgacccctggaagttccagcgcatgaagaaggtgggcacagctcagaccaagatccagctcctgctgctcggggacctgttggaacagctcgaccatggccgtgctgagctggatgccctgctccggtcgccagacccacggcccttcctggccgactgggcgctggtggagcggcggctggcggacgtgtcggccgtcatggacagcttcctgaccatgatggtgccggggcggctacacgtcaagcaccgcctggtgtctgatgtcagtgccaccaagatcccgcacatctggctcatgctgagcaccaagatgcctgtcgtgtttgaccgaaaggcgtcggcggctcaccaggactgggcccggctgcgctggttcgtcaccatccagccagccacatcggagcagtatgagttgcgcttcaggctgctggacccgcggacacagcaggagtgcgcccagtgtggcgtcatccccgtggctgcctgcaccttcgacgtccgaaacctgctgcccaaccgatcctataagttcaccatcaagagggccgagacctccacgctggtgtacgagccctggagggacagcctcaccctgcacaccaagccggagcccctggaggggcccgccctcagccactctgtctgagagatgattttctaatatttatccactaataaagaagagtgtaaatgcacatatggaattaaagaagcaaacctatttatgtttt

SEQ ID NO: 12055 - protein, 318 aa, Homo sapiens; identical to SEQ ID NO: 2015

SEQ ID NO: 12056 - DNA, 1167 bp, Homo sapiens
gggaggctgggctctgggaagtccgcgcgcggctccgcttcagaggcagggcaagtgggcgcggtcctggggcggcggcgggggccgggagaggagggctgggggtctcgagaagctcccggataatgagcacccatgtggcaggcctgggcctggacaagatgaagctgggcaatccccagtccttcctggaccaggaggaggcagatgaccagcagctgctggaaccagaggcgtggaagacctacaccgagcgccgcaatgccctgcgtgagttcctgacctcggacctgagtccgcacctgctcaagcgccaccacgcccgcatgcagctgctgcgtaagtgctcctactacatcgaggtcctgcccaagcacctggccctgggcgaccagaacccgctggtgctgcctagcgccttgttccagctcatcgacccctggaagttccagcgcatgaagaaggtgggcacagctcagaccaagatccagctcctgctgctcggggacctgttggaacagctcgaccatggccgtgctgagctggatgccctgctccggtcgccagacccacggcccttcctggccgactgggcgctggtggagcggcggctggcggacgtgtcggccgtcatggacagcttcctgaccatgatggtgccggggcggctacacgtcaagcaccgcctggtgtctgatgtcagtgccaccaagatcccgcacatctggctcatgctgagcaccaagatgcctgtcgtgtttgaccgaaaggcgtcggcggctcaccaggactgggcccggctgcgctggttcgtcaccatccagccagccacatcggagcagtatgagttgcgcttcaggctgctggacccgcggacacagcaggagtgcgcccagtgtggcgtcatccccgtggctgcctgcaccttcgacgtccgaaacctgctgcccaaccgatcctataagttcaccatcaagagggccgagacctccacgctggtgtacgagccctggagggacagcctcaccctgcacaccaagccggagcccctggaggggcccgccctcagccactctgtctgagagatgattttctaatatttatccactaataaagaagagtgtaaatgcacatatggaattaaagaagcaaacctatttatgtttt

SEQ ID NO: 12057 - protein, 318 aa, Homo sapiens; identical to SEQ ID NO: 2015

SEQ ID NO: 12058 - DNA, 1103 bp, Homo sapiens
ggcgtggagcgtccccagggagaaccggagcgggaggatggcccgcgaatgtccccgagggggatcctgtgctgcttaggaccacgccgtcccctctccacggccccgaggggtgccagcaacccctttcagcagcagggttaggaactggggcccttgcaaggccacaggtcaggcggttctggccagaagtccgcagtcctagttcttccctgtcctgtcccacaggccactggttgtcagtagaggtttttgcccctcagtataaactgtgtccagatctgtaggctgcccatccagccctccaggcagcctcttcccatcgagttgtgcccccgaagaaggacagaggtccagcatggggtcagtgggctgaatccatcccccgaacatgccacagcccaggggaggccagcctgcctggcagctgacacccagccctccccccagctcccggataatgagcacccatgtggcaggcctgggcctggacaagatgaagctgggcaatccccagtccttcctggaccaggaggaggcagatgaccagcagctgctggaaccagaggcgtggaagacctacaccgagcgccgcaatgccctgcgtgagttcctgacctcggacctgagtccgcacctgctcaagcgccaccacgcccgcatgcagctgctgcgtaagtgctcctactacatcgaggtcctgcccaagcacctggccctgggcgaccagaacccgctggtgctgcctagcgccttgttccagctcatcgacccctggaagttccagcgcatgaagaaggtgggcacagctcagaccaaggagtgcgcccagtgtggcgtcatccccgtggctgcctgcaccttcgacgtccgaaacctgctgcccaaccgatcctataagttcaccatcaagagggccgagacctccacgctggtgtacgagccctggagggacagcctcaccctgcacaccaagccggagcccctggaggggcccgccctcagccactctgtctgagagatgattttctaatatttatccactaataaagaagagtgtaaatgcacatatggaattaaagaagcaaacctatttatgtttt

SEQ ID NO: 12059 - protein, 208 aa, Homo sapiens
MPQPRGGQPAWQLTPSPPPSSRIMSTHVAGLGLDKMKLGNPQSFLDQEEADDQQLLEPEAWKTYTERRNALREFLTSDLSPHLLKRHHARMQLLRKCSYYIEVLPKHLALGDQNPLVLPSALFQLIDPWKFQRMKKVGTAQTKECAQCGVIPVAACTFDVRNLLPNRSYKFTIKRAETSTLVYEPWRDSLTLHTKPEPLEGPALSHSV

SEQ ID NO: 12060 - DNA, 1393 bp, Homo sapiens
ggcgtggagcgtccccagggagaaccggagcgggaggatggcccgcgaatgtccccgagggggatcctgtgctgcttaggaccacgccgtcccctctccacggccccgaggggtgccagcaacccctttcagcagcagggttaggaactggggcccttgcaaggccacaggtcaggcggttctggccagaagtccgcagtcctagttcttccctgtcctgtcccacaggccactggttgtcagtagaggtttttgcccctcagtataaactgtgtccagatctgtaggctgcccatccagccctccaggcagcctcttcccatcgagttgtgcccccgaagaaggacagaggtccagcatggggtcagtgggctgaatccatcccccgaacatgccacagcccaggggaggccagcctgcctggcagctgacacccagccctccccccagctcccggataatgagcacccatgtggcaggcctgggcctggacaagatgaagctgggcaatccccagtccttcctggaccaggaggaggcagatgaccagcagctgctggaaccagaggcgtggaagacctacaccgagcgccgcaatgccctgcgtgagttcctgacctcggacctgagtccgcacctgctcaagcgccaccacgcccgcatgcagctgctgcgtaagtgctcctactacatcgaggtcctgcccaagcacctggccctgggcgaccagaacccgctggtgctgcctagcgccttgttccagctcatcgacccctggaagttccagcgcatgaagaaggtgggcacagctcagaccaagatccagctcctgctgctcggggacctgttggaacagctcgaccatggccgtgctgagctggatgccctgctccggtcgccagacccacggcccttcctggccgactgggcgctggtggagcggcggctggcggacgtgtcggccgtcatggacagcttcctgaccatgatggtgccggggcggctacacgtcaagcaccgcctggtgtctgatgtcagtgccaccaagatcccgcacatctggctcatgctgagcaccaagatgcctgtcgtgtttgaccgaaaggcgtcggcggctcaccaggactgggcccggctgcgctggttcgtcaccatccagccagccacatcggagcagtatgagttgcgcttcaggctgctggacccgcggacacagcaggagtgcgcccagtgtggcgtcatccccgtggctgcctgcacaccaagccggagcccctggaggggcccgccctcagccactctgtctgagagatgattttctaatatttatccactaataaagaagagtgtaaatgcacatatggaattaaagaagcaaacctatttatgtttt

SEQ ID NO: 12061 - protein, 307 aa, Homo sapiens
MPQPRGGQPAWQLTPSPPPSSRIMSTHVAGLGLDKMKLGNPQSFLDQEEADDQQLLEPEAWKTYTERRNALREFLTSDLSPHLLKRHHARMQLLRKCSYYIEVLPKHLALGDQNPLVLPSALFQLIDPWKFQRMKKVGTAQTKIQLLLLGDLLEQLDHGRAELDALLRSPDPRPFLADWALVERRLADVSAVMDSFLTMMVPGRLHVKHRLVSDVSATKIPHIWLMLSTKMPVVFDRKASAAHQDWARLRWFVTIQPATSEQYELRFRLLDPRTQQECAQCGVIPVAACTPSRSPWRGPPSATLSER

SEQ ID NO: 12062 - DNA, 1694 bp, Homo sapiens
cagggccacgagcggagcctgctggtgtccacggacgaagggaatgagaactccaaggccaacctggaggaggtggctgaggtggtccgtatcaccaagcagctgaccctggggaggaccgtagagccccaggacatcgccgtcctcacgccctacaacgcgcaggcctctgagatcagcaaggcccttcggcgagagggcatcgccggggtggccgtgtcctccatcaccaagagccaggggagcgagtggcgctatgtgctggtgagcaccgtccgcacctgtgccaagagcgacctggaccagcggcccaccaagagctggctcaagaagtttctgggcttcgttgtggaccccaaccaagtgaatgtggctgtcacgcgggcccaggaggggctctgcctgatcggagaccacctccttctgcgctgctgccccctctggcgtagcctcctggacttctgcgaggctcagcagaccctcgtgcctgccggccaggtgcgcgtctgcaggaggccaactatgccttcctgaagagccctctccacctgcaaggtgccaggactgggagggaaagtccagggcccccccaccctccccaccaccctccgccatcagcctgcctgggccagcctgcctcctggcctcaggatctccctggggcaggaagtgggtggacttggaggaggaacggcaagggccggtccccacactcttgctcctcctgggcatctggggacaggaacacctctcagggtggccaagaggggcttccttgggaccagtgcaaggaagttctgctgtccctgggaagtctcagaaccaggaaggaaaccctgtggaggctgccctttgacctttggacgccacctgtaatcactctggatggtgtctgtggagttcaggtttattttctatttaaatgaactaaaagccagcatcctgccgggcgtggtggctcacgcccataatccagcactttgggaagccgaggcgggcagatcacctgaggtcaggagttcgagaccatcctggccaacatggtgaaaccccgtctccactaaaaatacaaaattagctgggcgtggtggcgggcgcctgtaatcccagctacttgggaggctgaggcaggagaatcgcttgactccaggaggcgcaggctgcagtgagctctgatggtaccactgcactccagcctgggtgacagagcgagaccctgtcttaaaaaaaaaaacaaaacaaaaccagcatctgttactggaacagagacctcagcccaagctcaggacaaggaggcctccctgggagagggggcctttctcccaccatcaccgcctgtgtccttcaggggctgctggagggcagcccaaagccaggggcccaccccgccccaccccaccccaccccaccctctgaaatgtgaaaagcctgcactcttcctgtgggctgcgcagtgggctcgggggttggggggtgccggggcgatgcttccaccctggactgagtgttcggggcagcctgctcggctgtatgtttctcgcacgctcacccgcttcagtgcggctctgtccctgctgccgcctccagtcctgagggaggggcttgccccaccttctacattccaatttttatatctttgaattatgtgattagatattaatttaatgataaaaccactctgaaagctcttctca

SEQ ID NO: 12063 - protein, 154 aa, Homo sapiens
MVPLHSSLGDRARPCLKKKNKTKPASVTGTETSAQAQDKEASLGEGAFLPPSPPVSFRGCWRAAQSQGPTPPHPTPPHPLKCEKPALFLWAAQWARGLGGAGAMLPPWTECSGQPARLYVSRTLTRFSAALSLLPPPVLREGLAPPSTFQFLYL

SEQ ID NO: 12064 - DNA, 7821 bp, Homo sapiens
cgtttttatagaaacacagatctttgtcctaaccacaaggttcccctttggtttatgtggtttcctctggttcctgccaccaccacctccccaggccggggccttcccatccctgcccagtggggagtgggaggaagagcctgggacagtggccatacgtcccgggctgatttctggattgggggttctggggaccagggaggtgcaggtgtctgcagtgtcagaggagccgctgggctcgcccaggtgttgcctgaagccctccgtggcctcttgccccttggactcctgacaggagggacaccagtgtttgctgctcacctctgacagccagacaagggctgtgctcaggggcagctcggctgggcacacagtaggtgctttagcggacagcactgaggcccccagcaagaagcccatgagctcctccccctcccgcagtgccgccgacatctacatccgggagtatttccacagccacgtcagcggcggccaccccgaggccactcctctccgtgtgatgtacacggaccggccgctgagccagacggacccagtcacgctgcagtactgttgcctgaccgacgaccgccaggctttccgcccgcccacacgggcagagctggcgcggcaccgcgtggtggtcaccaccacctcccaggcccgtgagctcagggtgccggtcggcttcttctcccacattctcatcgatgaggcggcccagatgctggagtgcgaggccctcaccccgctggcctatgcctcgcacggcacccgcctcgtgctggcgggcgaccacatgcaggtcacaccccggctgttcagtgtggccagggcccgggcggccgagcacacgctgctgcaccgcctcttcctgtgctaccagcaggagactcacgaggtggcgcggcagagccgcctggtcttccacgagaactaccgctgcacggacgccattgtcagcttcatctcgcggcacttctacgtggccaagggcaaccccatccacgccaggggcaaggttccgccccacccccggcactacccgctcatgttctgccacgtggcgggcagcccagaccgggacatgtccatggcgtcctggctgaatctggctgagattgcgcaggtcgtcgagaaggtgcaggaggcctacaacacctggcccagctgctggggcggccgcgagcagaggtgcatctgtgtcgtttcccacggtgcccaggtcagtgcactgaggcaggagctgaggaggcgggacctaggccaggtgtctgtcggcagttttgagatcctgccagggcggcagttccgggtcgtggtgctcagcactgtgcacacctgccagagcctgctcagccctggggcactggcccctgagttcttcaccgacgcccgcgtgctcaacaccgtcctgacccgcgcccagtcccagctggtggtagtgggggacgccgtggccctctgctccttcggggcctgcggcaagctctgggagagcttcatccgtgagtgcgtggagcggcacagtgtctgccccgagggcctgtccatggagcaggtcgagcagggtgtggcgcagagacggcgctggcctccccgaggcacacaggctggggcagcggggaactgggaggctgccccagagccagtaggggacctggccgaggagcaggcggctgtggtgacggccatggtgaaggcagagccgggagatgaggctctgagcccagcatcccgtgacatcacggcaaccacagcgcagacggaggctgcggcagcaccagcaggagacgcagtgaaggaagacgtggtgcccggggcctgtgcggcaggagcggctgctgcagcgggcgtggagtccacggaggctgaggatgcagaggctgacttctggccgtgggacggggagctcaacgctgacgacgccatcctacgggagcttctggacgagagccagaaggtgatggtgaccgtcggggaggacgggctgctggacactgtcgccaggcccgagtccctgcagcaggcccggctgtacgagaacctgcccccggctgcgctacggaagctgctgcacgcggagcccgagcggtaccgccactgctctttcgtgccagagaccttcgagcgggcgtcagccatcccgctggacgatgcctcctcgggccccatccaggtcaggggccgcctggactgtgggatggccttcgccggggatgaggtgctggtgcagctcctttcgggagacaaggcgcccgaggggcggcttcggggccgcgtgctgggcgtgctgaagaggaagaggcacgagctggcgtttgtgtgccgcatggacacgtgggacccgcgcatcatggtccccatcaatggctccgtgaccaagatcttcgtggccgagctgaaggacccatcgcaggtccccatctacagcctccggaagggccggctgcagcgtgtggggcttgagaggctcaccgccgaggcccggcacagccggctcttctgggtccaaattgtcctgtggcggcaaggcttctactacccgctgggcatcgtccgggaggtgctgcctgaggccagcacctgggagcagggcctccgcatcctcggcctggagtacagcttgagggtgcccccgtcggaccaggccaccatcaccaaggtgctgcagaaataccacacggagcttggccgggttgccggccgccgagaggactgccgcgccttcttgaccttcactgtggacccccagggcgcctgcaacctcgatgatgccctcagtgtccgagacctgggtcccaggtgcgaggtggctgtgcacatcactgatgtggccagcttcgtgcccagggacggggtgctggacgtggaggcgcgaaggcagggcgctgcgttctatgcccccggcagggagccagtgcccatgctgccggccagcctctgccaggacgtcctcagcctcctgcctggccgggaccgcctggccatctccctgttcctcaccatggagaaggccagtggccagctgaagagcctgcgctttgcaccctccgtggtccagtctgaccgccagctgtcctacgaggaggcggaggaggtgatcaggcagcacccgggtgccggccgtgagctgccggcccgcctggactccgtggacgcctgcgtcgtggccgcgtgctacttctctcggctgctgcgccggcaccgcctgcggtccgactgcttctatgagcagccggacgaggacggcaccctgggcttccgcgcggcccacatcatggtgaaggagtacatgattcagtttaataggctcgtggctgagttcctggtgggcagcgagtgcacgcggacggtcacgcctctgcggtggcagccagcaccccgcagccagcagctcaaggccctgtgtgagaagcatggggaccgggtgcccctgtcactgcacctcggccaccacctgcacggcggcgggggcagtccccccgacacgcggctgcacctcctggcctccctctggaagcaggtccagtttgctgcccgcacccaggactacgaacagatggtggacttggtcaccacggacgacatgcacccattcctggctcctgcaggccgcgacctccgcaaggccctggagcgctcggcgttcggccgctgcgcccggggccaccagcagcagggcggccactactcgctgcaggtggactggtacacgtgggccacctcgcccatccgcaggtacctggacgtggtgttgcagcggcagatcctgctggcgctgggccatgggggctctgcctactctgccagggacatcgatgggctctgccaggccttcagcctccagcacgcacttgcccagagctatcagcggcgggcgcgcagcctgcacctggccgtgcagctcaaggcccagcctctggacaagctgggcttcgtggtggacgtggaggcgggctcccgctgcttccggctgctcttccccagcaaccgggagacgctgcctgacccctgccccgtcccctacggctccctgcagctggccgagcacccccacgccctggcaggccggccgggcctgcggctcctgtggcggcgccgtgtctactcagcgcagggatccagcccgcccctgccactgcctggcactgtgccggacccacacaccctggccgtggagacggccctgtggaagcagctgctggagctggtggagctgcagcgctggccggaggcggctgctctcatccaggagaagggcgaggcgtcccagcggcgggagctggtgcaggtgcagcggagccactgtggccatttcctggaggtggcccgggagctgggcagtggggacaccctgcaggtgcagctcggcaccagcctgcagcacggcttcctggtaccgagccctcagctctggacggtggcaccgggcttcagcctctgcctggagcacgtggagcggcccggagactgcttctcaggccgtgtgtaccgggccccgagggaccggtaccgcgacgtggatgagtacgcctgcgtgtgggaaccattctgcgccctggagtcggccaccggcgcggttgccgagaatgactccgtcacacttcagcacctgagtgtctcctgggaggcgtcacggacgccgcaggggcagctgcagggcgccttccgcctggaggccgccttcctcgaggagaactgtgccgacatcaacttcagctgctgctacctctgcatccggctcgaggggctgccggctcccacggccagcccacgccctgggcccagcagcctcggccctggcctgaatgttgaccccggcacgtatacctgggtggcccacgggcagacgcaggactgggaccaggagcgccgggcagaccggcaggaggctcccagacgggtgcacctcttcgtccaccacatgggcatggagaaggttccggaagaggtgctgaggccgggcaccctgttcaccgttgagctgctgcccaagcagcttcctgatctccgcaaggaggaagccgtgcgtggactagaggaggcgtccccgctggtcaccagcatcgcactgggccggcctgtcccgcagcccctctgcagagtgatccccagcaggttcctggagcggcagacctacaacatccccggaggccgccacaagctgaaccccagccagaacgtggcggtcagggaggctctggagaagcctttcacggtcattcagggcccaccaggtacagggaagacgatcgtgggcctccacatcgtattctggtttcataaatcaaaccaggagcaggtgcagcccggaggccccccccgtggggagaagcggctggggggtccctgcatcttgtactgcggcccctccaacaagtcggtggatgtcctggcaggactgctcctgagaaggatggagctgaagcccctccgtgtgtacagtgagcaggctgaggccagcgagttcccagtgccgcgtgtgggcagcaggaagctgctcaggaagagcccccgggaggggaggccgaaccagagcctcaggagcatcaccctgcaccaccggatccggcaggcccccaacccttactcgtcggaaatcaaggcctttgacacccggctgcagagaggggagctcttctccagggaggacctggtctggtacaagaaggtcttgtgggaggctcggaagttcgagctggaccggcatgaggtcatcctctgcacctgctcctgtgcagcctctgccagcctcaaaatcctggacgtgaggcagatccttgttgacgaggcaggcatggccacggaacctgaaaccctcatccccctggtgcagttcccacaggccgagaaggtggttcttctcggagaccacaagcagctgcggcctgtggtcaagaatgagcggctgcaaaacctgggtctggaccggtctctgttcgagcggtaccacgaggacgcacatatgctggacactcagtaccgcatgcatgagggcatctgtgccttcccctctgtggcgttctacaagagcaagctgaagacgtggcagggcctgaggaggccgcccagtgtcctgggccacgctggcaaggagagctgccctgtcatctttggccacgtgcagggccacgagcggagcctgctggtgtccacggacgaagggaatgagaactccaaggccaacctggaggaggtggctgaggtggtccgtatcaccaagcagctgaccctggggaggaccgtagagccccaggacatcgccgtcctcacgccctacaacgcgcaggcctctgagatcagcaaggcccttcggcgagagggcatcgccggggtggccgtgtcctccatcaccaagagccaggggagcgagtggcgctatgtgctggtgagcaccgtccgcacctgtgccaagagcgacctggaccagcggcccaccaagagctggctcaagaagtttctgggcttcgttgtggaccccaaccaagtgaatgtggctgtcacgcgggcccaggaggggctctgcctgatcggagaccacctccttctgcgctgctgccccctctggcgtagcctcctggacttctgcgaggctcagcagaccctcgtgcctgccggccaggtgcgcgtctgcaggaggccaactatgccttcctgaagagccctctccacctgcaaggtgccaggactgggagggaaagtccagggcccccccaccctccccaccaccctccgccatcagcctgcctgggccagcctgcctcctggcctcaggatctccctggggcaggaagtgggtggacttggaggaggaacggcaagggccggtccccacactcttgctcctcctgggcatctggggacaggaacacctctcagggtggccaagaggggcttccttgggaccagtgcaaggaagttctgctgtccctgggaagtctcagaaccaggaaggaaaccctgtggaggctgccctttgacctttggacgccacctgtaatcactctggatggtgtctgtggagttcaggtttattttctatttaaatgaactaaaagccagcatcctgccgggcgtggtggctcacgcccataatccagcactttgggaagccgaggcgggcagatcacctgaggtcaggagttcgagaccatcctggccaacatggtgaaaccccgtctccactaaaaatacaaaattagctgggcgtggtggcgggcgcctgtaatcccagctacttgggaggctgaggcaggagaatcgcttgactccaggaggcgcaggctgcagtgagctctgatggtaccactgcactccagcctgggtgacagagcgagaccctgtcttaaaaaaaaaaacaaaacaaaaccagcatctgttactggaacagagacctcagcccaagctcaggacaaggaggcctccctgggagagggggcctttctcccaccatcaccgcctgtgtccttcaggggctgctggagggcagcccaaagccaggggcccaccccgccccaccccaccccaccccaccctctgaaatgtgaaaagcctgcactcttcctgtgggctgcgcagtgggctcgggggttggggggtgccggggcgatgcttccaccctggactgagtgttcggggcagcctgctcggctgtatgtttctcgcacgctcacccgcttcagtgcggctctgtccctgctgccgcctccagtcctgagggaggggcttgccccaccttctacattccaatttttatatctttgaattatgtgattagatattaatttaatgataaaaccactctgaaagctcttctca

SEQ ID NO: 12065 - protein, 2080 aa, Homo sapiens
MSSSPSRSAADIYIREYFHSHVSGGHPEATPLRVMYTDRPLSQTDPVTLQYCCLTDDRQAFRPPTRAELARHRVVVTTTSQARELRVPVGFFSHILIDEAAQMLECEALTPLAYASHGTRLVLAGDHMQVTPRLFSVARARAAEHTLLHRLFLCYQQETHEVARQSRLVFHENYRCTDAIVSFISRHFYVAKGNPIHARGKVPPHPRHYPLMFCHVAGSPDRDMSMASWLNLAEIAQVVEKVQEAYNTWPSCWGGREQRCICVVSHGAQVSALRQELRRRDLGQVSVGSFEILPGRQFRVVVLSTVHTCQSLLSPGALAPEFFTDARVLNTVLTRAQSQLVVVGDAVALCSFGACGKLWESFIRECVERHSVCPEGLSMEQVEQGVAQRRRWPPRGTQAGAAGNWEAAPEPVGDLAEEQAAVVTAMVKAEPGDEALSPASRDITATTAQTEAAAAPAGDAVKEDVVPGACAAGAAAAAGVESTEAEDAEADFWPWDGELNADDAILRELLDESQKVMVTVGEDGLLDTVARPESLQQARLYENLPPAALRKLLHAEPERYRHCSFVPETFERASAIPLDDASSGPIQVRGRLDCGMAFAGDEVLVQLLSGDKAPEGRLRGRVLGVLKRKRHELAFVCRMDTWDPRIMVPINGSVTKIFVAELKDPSQVPIYSLRKGRLQRVGLERLTAEARHSRLFWVQIVLWRQGFYYPLGIVREVLPEASTWEQGLRILGLEYSLRVPPSDQATITKVLQKYHTELGRVAGRREDCRAFLTFTVDPQGACNLDDALSVRDLGPRCEVAVHITDVASFVPRDGVLDVEARRQGAAFYAPGREPVPMLPASLCQDVLSLLPGRDRLAISLFLTMEKASGQLKSLRFAPSVVQSDRQLSYEEAEEVIRQHPGAGRELPARLDSVDACVVAACYFSRLLRRHRLRSDCFYEQPDEDGTLGFRAAHIMVKEYMIQFNRLVAEFLVGSECTRTVTPLRWQPAPRSQQLKALCEKHGDRVPLSLHLGHHLHGGGGSPPDTRLHLLASLWKQVQFAARTQDYEQMVDLVTTDDMHPFLAPAGRDLRKALERSAFGRCARGHQQQGGHYSLQVDWYTWATSPIRRYLDVVLQRQILLALGHGGSAYSARDIDGLCQAFSLQHALAQSYQRRARSLHLAVQLKAQPLDKLGFVVDVEAGSRCFRLLFPSNRETLPDPCPVPYGSLQLAEHPHALAGRPGLRLLWRRRVYSAQGSSPPLPLPGTVPDPHTLAVETALWKQLLELVELQRWPEAAALIQEKGEASQRRELVQVQRSHCGHFLEVARELGSGDTLQVQLGTSLQHGFLVPSPQLWTVAPGFSLCLEHVERPGDCFSGRVYRAPRDRYRDVDEYACVWEPFCALESATGAVAENDSVTLQHLSVSWEASRTPQGQLQGAFRLEAAFLEENCADINFSCCYLCIRLEGLPAPTASPRPGPSSLGPGLNVDPGTYTWVAHGQTQDWDQERRADRQEAPRRVHLFVHHMGMEKVPEEVLRPGTLFTVELLPKQLPDLRKEEAVRGLEEASPLVTSIALGRPVPQPLCRVIPSRFLERQTYNIPGGRHKLNPSQNVAVREALEKPFTVIQGPPGTGKTIVGLHIVFWFHKSNQEQVQPGGPPRGEKRLGGPCILYCGPSNKSVDVLAGLLLRRMELKPLRVYSEQAEASEFPVPRVGSRKLLRKSPREGRPNQSLRSITLHHRIRQAPNPYSSEIKAFDTRLQRGELFSREDLVWYKKVLWEARKFELDRHEVILCTCSCAASASLKILDVRQILVDEAGMATEPETLIPLVQFPQAEKVVLLGDHKQLRPVVKNERLQNLGLDRSLFERYHEDAHMLDTQYRMHEGICAFPSVAFYKSKLKTWQGLRRPPSVLGHAGKESCPVIFGHVQGHERSLLVSTDEGNENSKANLEEVAEVVRITKQLTLGRTVEPQDIAVLTPYNAQASEISKALRREGIAGVAVSSITKSQGSEWRYVLVSTVRTCAKSDLDQRPTKSWLKKFLGFVVDPNQVNVAVTRAQEGLCLIGDHLLLRCCPLWRSLLDFCEAQQTLVPAGQVRVCRRPTMPS

SEQ ID NO: 12066 - DNA, 367 bp, Homo sapiens
gcggcagcagggcctcacctcccatcccgcagggagcgagtggcgctatgtgctggtgagcaccgtccgcacctgtgccaagagcgacctggaccagcggcccaccaagagctggctcaagaagtttctgggcttcgttgtggaccccaaccaagtgaatgtggctgtcacgcgggcccaggaggggctctgcctgatcggagaccacctccttctgcgctgctgccccctctggcgtagcctcctggacttctgcgaggctcagcagaccctcgtgcctgccggccaggtgcgcgtctgcaggaggccaactatgccttcctgaagagccctctccacctgcaaggtgccaggactgggagggaaa

SEQ ID NO: 12067 - protein, 79 aa, Homo sapiens
AAAGPHLPSRRERVALCAGEHRPHLCQERPGPAAHQELAQEVSGLRCGPQPSECGCHAGPGGALPDRRPPPSALLPPLA

SEQ ID NO: 12068 - DNA, 1341 bp, Homo sapiens
gccagcgctgaacatgctcttcgcgcctccgggagcactgtacgcagaggtccccgtcccctcctccctgatgccagacacagaccagggcttcctgctgggccgggcggtcagcacagccctggtggcccctgtacctgcacccgacaatacggtgttcgaggtgcggctggagaggcgggccagctcagagcaggcgctgtggctgctgcttccggcccgctgctgcttggccctggggctgcagcctgaggcccgcctggtcctggaggtgcagttccagattgacccgatgaccttccgcctctggcaccaggcagtggacacactgcctgaggagcagctggtggtgcccgacttgcccacctgcgccctgcccagaccttggtctgtcccacccttgcggcgtggcaaccgcaagcaggagctggccgtggcgctcatcgcgggctggggccctggggatgggaggcgtgtccccccgctactcatctatggcccctttggcaccggcaagacctacacgctggccatggcctccctggaggtcatccggaggcctgaaaccaaggtgctcatctgcacacacaccaacagtgccgccgacatctacatccgggagtatttccacagccacgtcagcggcggccaccccgaggccactcctctccgtgtgatgtacacggaccggccgctgagccagacggacccagtcacgctgcagtactgttgcctgaccgacgaccgccaggctttccgcccgcccacacgggcagagctggcgcggcaccgcgtggtggtcaccaccacctcccaggcccgtgagctcagggtgccggtcggcttcttctcccacattctcatcgatgaggcggcccagatgctggagtgcgaggccctcaccccgctggcctatgcctcgcacggcacccgcctcgtgctggcgggcgaccacatgcaggtcacaccccggctgttcagtgtggccagggcccgggcggccgagcacacgctgctgcaccgcctcttcctgtgctaccagcaggagactcacgaggtggcgcggcagagccgcctggtcttccacgagaactaccgctgcacggacgccattgtcagcttcatctcgcggcacttctacgtggccaagggcaaccccatccacgccaggggcaaggttccgccccacccccggcactacccgctcatgttctgccacgtggcgggcagcccagaccgggacatgtccatggcgtcctggctgaatctggctgagattgcgcaggtcgtcgagaaggtgcaggaggcctacaacacctggcccagctgctggggcggccg

SEQ ID NO: 12069 - protein, 441 aa, Homo sapiens
MLFAPPGALYAEVPVPSSLMPDTDQGFLLGRAVSTALVAPVPAPDNTVFEVRLERRASSEQALWLLLPARCCLALGLQPEARLVLEVQFQIDPMTFRLWHQAVDTLPEEQLVVPDLPTCALPRPWSVPPLRRGNRKQELAVALIAGWGPGDGRRVPPLLIYGPFGTGKTYTLAMASLEVIRRPETKVLICTHTNSAADIYIREYFHSHVSGGHPEATPLRVMYTDRPLSQTDPVTLQYCCLTDDRQAFRPPTRAELARHRVVVTTTSQARELRVPVGFFSHILIDEAAQMLECEALTPLAYASHGTRLVLAGDHMQVTPRLFSVARARAAEHTLLHRLFLCYQQETHEVARQSRLVFHENYRCTDAIVSFISRHFYVAKGNPIHARGKVPPHPRHYPLMFCHVAGSPDRDMSMASWLNLAEIAQVVEKVQEAYNTWPSCWG

SEQ ID NO: 12070 - DNA, 3063 bp, Homo sapiens
atcgaaactgagagctcctgggcaggctcggcagggcaggcagctccaggagggcttcgaaccgtggccaacagttccagtggactgcgtggacccgtgagctcaggagcctcagacgcctccctggagagccaagctggtgttcgaggtggcgcctccagggtccaccctgctgcccaacagccccgcggccaccagagggccgtccctggcccggctgtgtgccctggtggacctgtgtctgggctgctcccgctgcacccagcggctcaatgaaagcacctacgtcctccgtagggtggagcatgactgctcccgcgagatcctgctggcccgctttaagcaggccaccaagagcaaggtctggcgcgtggtgggctgccggcccaccttcccaaggcccctgtgctaccaagtctgccactactacagccctgggctcggctgccggcgccaccgaaaccggtgcacctttgcccgcagtcgcgaggaggccctggtctggaccttcgagcgtcagcacaacctccagcgcctatggctgaaggcggaggtgcagggcagcggggcccagggaggggcaggccgggcggccgacgccatccttacggagtttggcggccgcttcgagctgctttgctccctctgcttcaggcgctgtcccccatgcatctgtcgcgtggacccccaggggcagtgccctgagcacggagcctgcccctccctcctggcccacgtgagcgccgagggccgccgcaagcaacagtttgtggtggtgaggccgcggccccgggccggccagcctcctgcctactgcaggtttgtggggcgtgggcagccgtgctggcgtggggagtcccgctgccagtttgcacacagcgccgtggagatggctgtgtgggaggccgagcagctgggtggcctccagcggggggacctgctcacaccccctgcccctgatggcgacgggcgcacggccccccttggccagccccctggggcccagctgtactgcccggcctgcttggtcacctgccactctcaggaggccttcgagaaccactgcgcatcctcggagcacgcacagatggtggccttcgaccaggccctgccctgggagcaccgttccccacccccgggactctccaagttcgagctctgcccaaagtaaggatactcgaggcaggagcttggagtagggcaggagcccaccataggcagaaccagaggttcccaggagcttggagtggggcaggagcccaccacaggcagagccagaggctcccaggagcttggagtagggcaggagcccaccgtaggcagagccagaggctcccaggagcttggagtagcgcaggagcccaccacaggcagagccagaggctcccaggagcttggagcagggcaggagcccaccgtaggcagagccagaggttcccaggagcttggagtggggcaggagcccaccgtaggcagagccagaggctcccaggagcttggagcggggcaggagcccaccacaggcagagccagaggctcccaggagcttggagcggggcaggagcccaccgtaggcagagccagaggttcccaggagcttggagcggggcaggagcccactgtaggcagagccagagactcccaggagcttggagcggggcaggagcccaccacaggcagagccagaggctcccaggagcttggagcagggcaggagcccaccgtaggcagagccagaggttcccaggagcttggagcagggcaggagcccaccacaggcagagccagaggctcccaggagcttggagcagggcaggagcccaccgtaggcagagccagaggttcccaggagcttggagcggggcaggagcccaccgtaggcagagccagaggttcccaggagcttggagcggggcaggagcccaccacaggcagagccagaggctcccaggagcttggagcggggcaggagcccaccacaggcagagccagaggttcccaggagcttggagcggggcaggagcccaccacaggcagagccagaggctcccaggagcttggagcggggcaggagcccaccgtaggcagagccagaggttcccaggagcttggagcggggcaggagcccaccgtaggcagagccagaggctcccaggttcagtggacgggggcctccctgccacctgctgagggctaaagccatgtggcctctgaggacccggataagggaggttcatgtttgggaactgcttgagccaggccttgtcccgggagcacaggagtgggtgggacgaataaagcccctgctccctacagaggccagtattgggctgaggggtcccggcctttgaactcagcacggcggctgtgcctctgtgtagccctgctgacctccctgtcccccaggcctgacctctgtgagtatggggacgcctgcaccaaggcacactcagcacaggagctgcaggagtgggtccggcgcacgcaggctgtggagctgcgggggcaggcggcctggcaggacgggctggtgccctaccaggagcggctgctggccgagtaccagcgcagcagcagtgaggtccttgtgctggcagagacccttgatggagtgcgtgtcacctgcaaccagcccctgatgtaccaggcccaggagaggaagacccagtacagctggacgtttgccgtccactctgaggtgagcggagaacagctccgactgggcggagggagccctggggaagtggtgacttcagcccgggcagacgtcaacagcctgggtcatggagctaataccgaggcactgccgctcagcacctgcgtgacctgcagcaggtcccttagcctctctgcctcagtctcctcacctagagacagggggccaggacagtcccaccttggcagggttattctatggagtatatgggttaaaacaaggatttggccaggtgcggtggttcacgcctgtaatcccagcactttgggagaccgaggcaggtggatcacctgaggtcgggagttcgagatcagcctggccaatagggtgaaactccgtctctactg

SEQ ID NO: 12071 - protein, 71 aa, Homo sapiens
MGTPAPRHTQHRSCRSGSGARRLWSCGGRRPGRTGWCPTRSGCWPSTSAAAVRSLCWQRPLMECVSPATSP

SEQ ID NO: 12072 - DNA, 1827 bp, Homo sapiens
agaatcgaaactgagagctcctgggcaggctcggcagggcaggcagctccaggagggcttcgaaccgtggccaacagttccagtggactgcgtggacccgtgagctcaggagcctcagacgcctccctggagagccaagctggtgttcgaggtggcgcctccagggtccaccctgctgcccaacagccccgcggccaccagagggccgtccctggcccggctgtgtgccctggtggacctgtgtctgggctgctcccgctgcacccagcggctcaatgaaagcacctacgtcctccgtagggtggagcatgactgctcccgcgagatcctgctggcccgctttaagcaggccaccaagagcaaggtctggcgcgtggtgggctgccggcccaccttcccaaggcccctgtgctaccaagtctgccactactacagccctgggctcggctgccggcgccaccgaaaccggtgcacctttgcccgcagtcgcgaggaggccctggtctggaccttcgagcgtcagcacaacctccagcgcctatggctgaaggcggaggtgcagggcagcggggcccagggaggggcaggccgggcggccgacgccatccttacggagtttggcggccgcttcgagctgctttgctccctctgcttcaggcgctgtcccccatgcatctgtcgcgtggacccccaggggcagtgccctgagcacggagcctgcccctccctcctggcccacgtgagcgccgagggccgccgcaagcaacagtttgtggtggtgaggccgcggccccgggccggccagcctcctgcctactgcaggtttgtggggcgtgggcagccgtgctggcgtggggagtcccgctgccagtttgcacacagcgccgtggagatggctgtgtgggaggccgagcagctgggtggcctccagcggggggacctgctcacaccccctgcccctgatggcgacgggcgcacggccccccttggccagccccctggggcccagctgtactgcccggcctgcttggtcacctgccactctcaggaggccttcgagaaccactgcgcatcctcggagcacgcacagatggtggccttcgaccaggccctgccctgggagcaccgttccccacccccgggactctccaagttcgagctctgcccaaagcctgacctctgtgagtatggggacgcctgcaccaaggcacactcagcacaggagctgcaggagtgggtccggcgcacgcaggctgtggagctgcgggggcaggcggcctggcaggacgggctggtgccctaccaggagcggctgctggccgagtaccagcgcagcagcagtgaggtccttgtgctggcagagacccttgatggagtgcgtgtcacctgcaaccagcccctgatgtaccaggcccaggagaggaagacccagtacagctggacgtttgccgtccactctgaggtgagcggagaacagctccgactgggcggagggagccctggggaagtggtgacttcagcccgggcagacgtcaacagcctgggtcatggagctaataccgaggcactgccgctcagcacctgcgtgacctgcagcaggtcccttagcctctctgcctcagtctcctcacctagagacagggggccaggacagtcccaccttggcagggttattctatggagtatatgggttaaaacaaggatttggccaggtgcggtggttcacgcctgtaatcccagcactttgggagaccgaggcaggtggatcacctgaggtcgggagttcgagatcagcctggccaatagggtgaaactccgtctctactg

SEQ ID NO: 12073 - protein, 293 aa, Homo sapiens
MAVWEAEQLGGLQRGDLLTPPAPDGDGRTAPLGQPPGAQLYCPACLVTCHSQEAFENHCASSEHAQMVAFDQALPWEHRSPPPGLSKFELCPKPDLCEYGDACTKAHSAQELQEWVRRTQAVELRGQAAWQDGLVPYQERLLAEYQRSSSEVLVLAETLDGVRVTCNQPLMYQAQERKTQYSWTFAVHSEVSGEQLRLGGGSPGEVVTSARADVNSLGHGANTEALPLSTCVTCSRSLSLSASVSSPRDRGPGQSHLGRVILWSIWVKTRIWPGAVVHACNPSTLGDRGRWIT

SEQ ID NO: 12074 - DNA, 556 bp, Homo sapiens
agcaggaacctcagtcattgcaggtgaggacgtggagcaggaacctcagtcattgcaggtgaggacgtggagcaggaacctcagtcattgcaggtgaggacgtagaggaacaggaacctcagtcattgcaggtgaggacgtagaggaacaggaacctcagtcattgcaggtgaggacgtggagcaacaggaatctcagtcattgcaggtgaggacgtggagcaacaggaatctcagtcattgcgggtgggaatgcgagatggtgctgccactgtgagcggcggtgcctccgacgccagcctcgggtcaaggtggggcccaggctgttcttactattgtcctccagcgatttgcaggacaccttcaaaaccctcacgagttaccgaatcggctgattcaaaaccctcaccaggcaccaaatcggctgatgctcttgatctccgacttgccagcgtgcagaactgcataaatgaacctctgttgcttgcaagccccccagcctgcggtattttgttacagtagcactaacgactaaaacggccatgatcctcccacca

SEQ ID NO: 12075 - protein, 89 aa, Homo sapiens
MRDGAATVSGGASDASLGSRWGPGCSYYCPPAICRTPSKPSRVTESADSKPSPGTKSADALDLRLASVQNCINEPLLLASPPACGILLQ

SEQ ID NO: 12076 - DNA, 4020 bp, Homo sapiens
gtgccctgcaggttgtgccctccgggatcctgattctattctctcctcccttcacttcaccaggggcgacctgacggaagataacatggagacagaaaatgcagcggcagcagctgccgcggccttcacagcctcctcccagctcaaggaagccgtgttagtgaagatggctgaagagggggagaacctggaagctgagattgtgtaccccatcacctgtggagacagcagagccaacctcatctggaggaagtttgtgtgtcccggcatcaatgtgaaatgtgttcagtacgacgagcatgtaatcagcccaaaggaatttgtgcacctggccgggaagtccaccctgaaggactggaagagagccatccgcatgaacggcatcatgctcaggaagatcatggactccggggaactggacttctaccagcatgacaaggtctgctccaacacctgccgcagcacaaagattgacctctcaggagcccgtgtgtccctgagcagccccacgtcggccgagtacattcccctcacgcccgccgcagccgacgtgaatgggtctcctgcgaccatcaccatagagacctgtgaagaccctggcgactggaccgcggccattggagatgacacatttaccttctggcgggggctgaaggacgccggcctgctggacgaggtcatccaggagttccaccaggagctggtggagaccatgagaggcctgcagcagcgggtccaggaccctcccctgcagcttcgagatgctgtacttctcaacaacatcgtgcagaacttcggcatgctggacctggtgaagaaggtgctggccagccacaagtgccagatggaccgctcgcgggagcagtacgcccgggacctggcagccctggagcagcagtgtgatgagcatcgtcgccgagccaaggagctgaagcacaagtcccagcacctcagcaacgtgctcatgacgctgacgccggtctccctgccaccgcctgtgaagcggccccggcttgcacgtgccacatcaggaccggccgccatggcctcgcaggtgctcacccagtctgcccagctggcgcttggcccgggcgtgcccgtcccccagctgaccagcgtgccccttggtaaagtggtgtccaccctgccgtccaccgtcctgggcaagggttcccttcaggcgccccccgccagctccccggcctccccgctgctcgggggatacacagtcttggcctcttccggctccacctaccccagcacagtggagatccacccggacgcgtccagcctcacggtcctgagcacggccgccgtgcaggacggtagcacggtgttcaaggtggtcagcccgctacagctgctcacgttgcctggcctgggccccaccctgcagaacgtggcccaggcctcgcctggctccagcacaattgtgacagtgcccgcaggggctgcccccgggcctgaggagcacacggccaccattgaggtggctgccatggcagaggaccacgagcggaagtagccgacaggagggcgaggcccctgggacggacagggctggctgtctctcagccgcggcagcagggagcgggcagaggccgcagggctggctcgggcaggtgggtcacgtggtctgcagaaccaaagagaggaatcgccaaaacaaatcacgagaagagagaaggggacagaacagcgagagcaacctggaaaatcggtcttcaggtcccacgtttcctcccccttttttcttgggaaatatatttttccatctgttgcttattaatactgtttacacattgggccttgatcaggagccaggtgggcgggggctagggggagcctgggtgcagcagagacagaggaagcagagccaggtgccgagcgcgaccctgcaggtgctggacgcggtgcagcaggtcacgaggcccccatgtctgcacccagccaggtccctggggacgttactaactcatgacttgggagctaagcccaagtgtgaaacctctggatcctatggatttggtttcttcccacagttttctgtaggtttagtgtggctggcgccccgttctcctccagttgggaacatgcacccggagcttggggtgcagatcctgatgggtgcctgcctcccccgcccccagccggtgctcaggtggcccaggggccgcacagacgaggcgtggtccaggcattgttgcacatgtactgagggtgtttttaagtgaattgcttagtaggcttctaggaagagtcagatttatagcattttcaaccaaaataatggtgagtgcctaggcttcccgagttagctctttgggtggcccctgagcccctgtgagtgcacttgaccgggtgcggaggtcctgggcagcctgtccctgagccggcccctcccaggggtctgagatccatgaggtgtgtccctagggcttcagtcctggggcagaggcataaacagaaccagtcactatggaggtcgaggattcccatgtgggcccttcagcttgggctgcttggccacggaacagcccttggctccctggcccccggcccccatgcagcccctgggctggcccttggtggtctctgtccaagggagagcccctgggtgttcaggaggctgccccgggtgggctgctcagggcagctgccgaaggtggagcccagagcctgtctggaagggctgtctgtggctgtcctgagacctggccttggactcacaaggaagaccaggctgaggcccctccaggccagggtcctggggcaggcatctcagggagcagccagcccaggcctcctgccgtctccaacagggcatgtcccgggaggaccctgagtgccagattcccctggacgctcctgctgattctgtcggcagttgaaggcccgtctgaggccccgcaatgcgagggtcctgtgtcccacttcactgctccgaagggaactggctggctgtccgtccagtgagcggcccagaccccacctctgcgccattgtcaccagggccctgtcctggctgccctcacccatgtcaagctactgaggctgtgtcttgtttgttttctctgttacatttttgtttgctgttgtcacagtcagctggtttcggcgtgatgttgatcttttgatgtacatactccgttttaaactcatttccactctagttgagttctgcagcatgcagcggtatgaccctacgggggtcaggagagccctgcggcccccacccaccagctcagaacctgtcactaatacagctgcctgtgaccctgggacccgcaaccttccagctgcttccctttgtcaaagtcacgagtgcgtctgccttgacagccctcgtcaacagaacttccagtgggttgtgggttcatttcctttctttttaagaacagggttgggaccttttctgcccctgccccttagctactgaggcatagggagaggaagttaatttcagagccatacaaaaataagccacaaccagcttcagaattaattcccaatcccccattccaccagggctgggagcccattcccagtgcttcccaaggccctcggggacatctaccgccaacccagctgcttctggcaggggctccaagccccagcgtggggaagggccctggagaagccctcatcctcatgggaaccacactgcagtgggtggggaaggttgttgtcagcaccgcccccggctcctccaggtcctgctggctcctcgggggcagggttccctggacctcccagttctgcgccttggggccagccagtactcagagaggaggaccttctcaaccacgtacagaacacgggttttcatggctgcctttggtttggttttctgagaagataggattggattggattttgcagagggtgagaacttctctgtgcctgctcagaggcgccctagggaagggccatgtttgagttttgctttgtatgttgttttgcaagtatctgcctggtactttgatttaaaataaaaacaattttcatagtttgagtgtc

SEQ ID NO: 12077 - protein, 479 aa, Homo sapiens
METENAAAAAAAAFTASSQLKEAVLVKMAEEGENLEAEIVYPITCGDSRANLIWRKFVCPGINVKCVQYDEHVISPKEFVHLAGKSTLKDWKRAIRMNGIMLRKIMDSGELDFYQHDKVCSNTCRSTKIDLSGARVSLSSPTSAEYIPLTPAAADVNGSPATITIETCEDPGDWTAAIGDDTFTFWRGLKDAGLLDEVIQEFHQELVETMRGLQQRVQDPPLQLRDAVLLNNIVQNFGMLDLVKKVLASHKCQMDRSREQYARDLAALEQQCDEHRRRAKELKHKSQHLSNVLMTLTPVSLPPPVKRPRLARATSGPAAMASQVLTQSAQLALGPGVPVPQLTSVPLGKVVSTLPSTVLGKGSLQAPPASSPASPLLGGYTVLASSGSTYPSTVEIHPDASSLTVLSTAAVQDGSTVFKVVSPLQLLTLPGLGPTLQNVAQASPGSSTIVTVPAGAAPGPEEHTATIEVAAMAEDHERK

SEQ ID NO: 12078 - DNA, 2990 bp, Homo sapiens
ccaggacttgggaccctggaggactgacgctgctggcctgggcgtccccttccgctgagccatggcgactcccgacgtgagtgtgcacatggaggaggtggtggttgtgacaacctgccgtccaccgtcctgggcaagggttcccttcaggcgccccccgccagctccccggcctccccgctgctcgggggatacacagtcttggcctcttccggctccacctaccccagcacagtggagatccacccggacgcgtccagcctcacggtcctgagcacggccgccgtgcaggacggtagcacggtgttcaaggtggtcagcccgctacagctgctcacgttgcctggcctgggccccaccctgcagaacgtggcccaggcctcgcctggctccagcacaattgtgacagtgcccgcaggggctgcccccgggcctgaggagcacacggccaccattgaggtggctgccatggcagaggaccacgagcggaagtagccgacaggagggcgaggcccctgggacggacagggctggctgtctctcagccgcggcagcagggagcgggcagaggccgcagggctggctcgggcaggtgggtcacgtggtctgcagaaccaaagagaggaatcgccaaaacaaatcacgagaagagagaaggggacagaacagcgagagcaacctggaaaatcggtcttcaggtcccacgtttcctcccccttttttcttgggaaatatatttttccatctgttgcttattaatactgtttacacattgggccttgatcaggagccaggtgggcgggggctagggggagcctgggtgcagcagagacagaggaagcagagccaggtgccgagcgcgaccctgcaggtgctggacgcggtgcagcaggtcacgaggcccccatgtctgcacccagccaggtccctggggacgttactaactcatgacttgggagctaagcccaagtgtgaaacctctggatcctatggatttggtttcttcccacagttttctgtaggtttagtgtggctggcgccccgttctcctccagttgggaacatgcacccggagcttggggtgcagatcctgatgggtgcctgcctcccccgcccccagccggtgctcaggtggcccaggggccgcacagacgaggcgtggtccaggcattgttgcacatgtactgagggtgtttttaagtgaattgcttagtaggcttctaggaagagtcagatttatagcattttcaaccaaaataatggtgagtgcctaggcttcccgagttagctctttgggtggcccctgagcccctgtgagtgcacttgaccgggtgcggaggtcctgggcagcctgtccctgagccggcccctcccaggggtctgagatccatgaggtgtgtccctagggcttcagtcctggggcagaggcataaacagaaccagtcactatggaggtcgaggattcccatgtgggcccttcagcttgggctgcttggccacggaacagcccttggctccctggcccccggcccccatgcagcccctgggctggcccttggtggtctctgtccaagggagagcccctgggtgttcaggaggctgccccgggtgggctgctcagggcagctgccgaaggtggagcccagagcctgtctggaagggctgtctgtggctgtcctgagacctggccttggactcacaaggaagaccaggctgaggcccctccaggccagggtcctggggcaggcatctcagggagcagccagcccaggcctcctgccgtctccaacagggcatgtcccgggaggaccctgagtgccagattcccctggacgctcctgctgattctgtcggcagttgaaggcccgtctgaggccccgcaatgcgagggtcctgtgtcccacttcactgctccgaagggaactggctggctgtccgtccagtgagcggcccagaccccacctctgcgccattgtcaccagggccctgtcctggctgccctcacccatgtcaagctactgaggctgtgtcttgtttgttttctctgttacatttttgtttgctgttgtcacagtcagctggtttcggcgtgatgttgatcttttgatgtacatactccgttttaaactcatttccactctagttgagttctgcagcatgcagcggtatgaccctacgggggtcaggagagccctgcggcccccacccaccagctcagaacctgtcactaatacagctgcctgtgaccctgggacccgcaaccttccagctgcttccctttgtcaaagtcacgagtgcgtctgccttgacagccctcgtcaacagaacttccagtgggttgtgggttcatttcctttctttttaagaacagggttgggaccttttctgcccctgccccttagctactgaggcatagggagaggaagttaatttcagagccatacaaaaataagccacaaccagcttcagaattaattcccaatcccccattccaccagggctgggagcccattcccagtgcttcccaaggccctcggggacatctaccgccaacccagctgcttctggcaggggctccaagccccagcgtggggaagggccctggagaagccctcatcctcatgggaaccacactgcagtgggtggggaaggttgttgtcagcaccgcccccggctcctccaggtcctgctggctcctcgggggcagggttccctggacctcccagttctgcgccttggggccagccagtactcagagaggaggaccttctcaaccacgtacagaacacgggttttcatggctgcctttggtttggttttctgagaagataggattggattggattttgcagagggtgagaacttctctgtgcctgctcagaggcgccctagggaagggccatgtttgagttttgctttgtatgttgttttgcaagtatctgcctggtactttgatttaaaataaaaacaattttcatagtttgagtgtc

SEQ ID NO: 12079 - protein, 70 aa, Homo sapiens
MATPDVSVHMEEVVVVTTCRPPSWARVPFRRPPPAPRPPRCSGDTQSWPLPAPPTPAQWRSTRTRPASRS

SEQ ID NO: 12080 - DNA, 4567 bp, Homo sapiens
gcgaggacttcttggagtgctttctgcacctgaaactcagttcagggattggggctggctttgagttcaggccaggagagacggaagaactggcaagccgggagcctgcgtccagggaagttgcttggaattccaggcccctcctgtcctcctgctctgagccccacgtggagggagtggctctgtgctttctacccaagggtttcggcttatccagtgggaaaaacgggtggagtgcgcttacaccgccctcggaaccagagcctggagtagcccttctgttgccgctcgtttttgtcaggaggtagcagtctgggactcaagggtgggtctttggagctgattagagatgcctttgtgagtgctatgttgtgtggatgtggagatgactccatccctgtgccctgccttgcttcctccaggacttgggaccctggaggactgacgctgctggcctgggcgtccccttccgctgagccatggcgactcccgacgtgagtgtgcacatggaggaggtggtggttgtgacaactccggacactgcagtggacggcagtggtgtggagggggtgaagaccgtgttggtgacgaccaacttggcccctcacgggggcgacctgacggaagataacatggagacagaaaatgcagcggcagcagctgccgcggccttcacagcctcctcccagctcaaggaagccgtgttagtgaagatggctgaagagggggagaacctggaagctgagattgtgtaccccatcacctgtggagacagcagagccaacctcatctggaggaagtttgtgtgtcccggcatcaatgtgaaatgtgttcagtacgacgagcatgtaatcagcccaaaggaatttgtgcacctggccgggaagtccaccctgaaggactggaagagagccatccgcatgaacggcatcatgctcaggaagatcatggactccggggaactggacttctaccagcatgacaaggtctgctccaacacctgccgcagcacaaagattgacctctcaggagcccgtgtgtccctgagcagccccacgtcggccgagtacattcccctcacgcccgccgcagccgacgtgaatgggtctcctgcgaccatcaccatagagacctgtgaagaccctggcgactggaccgcggccattggagatgacacatttaccttctggcgggggctgaaggacgccggcctgctggacgaggtcatccaggagttccaccaggagctggtggagaccatgagaggcctgcagcagcgggtccaggaccctcccctgcagcttcgagatgctgtacttctcaacaacatcgtgcagaacttcggcatgctggacctggtgaagaaggtgctggccagccacaagtgccagatggaccgctcgcgggagcagtacgcccgggacctggcagccctggagcagcagtgtgatgagcatcgtcgccgagccaaggagctgaagcacaagtcccagcacctcagcaacgtgctcatgacgctgacgccggtctccctgccaccgcctgtgaagcggccccggcttgcacgtgccacatcaggaccggccgccatggcctcgcaggtgctcacccagtctgcccagctggcgcttggcccgggcgtgcccgtcccccagctgaccagcgtgccccttggtaaagtggtgtccaccctgccgtccaccgtcctgggcaagggttcccttcaggcgccccccgccagctccccggcctccccgctgctcgggggatacacagtcttggcctcttccggctccacctaccccagcacagtggagatccacccggacgcgtccagcctcacggtcctgagcacggccgccgtgcaggacggtagcacggtgttcaaggtggtcagcccgctacagctgctcacgttgcctggcctgggccccaccctgcagaacgtggcccaggcctcgcctggctccagcacaattgtgacagtgcccgcaggggctgcccccgggcctgaggagcacacggccaccattgaggtggctgccatggcagaggaccacgagcggaagtagccgacaggagggcgaggcccctgggacggacagggctggctgtctctcagccgcggcagcagggagcgggcagaggccgcagggctggctcgggcaggtgggtcacgtggtctgcagaaccaaagagaggaatcgccaaaacaaatcacgagaagagagaaggggacagaacagcgagagcaacctggaaaatcggtcttcaggtcccacgtttcctcccccttttttcttgggaaatatatttttccatctgttgcttattaatactgtttacacattgggccttgatcaggagccaggtgggcgggggctagggggagcctgggtgcagcagagacagaggaagcagagccaggtgccgagcgcgaccctgcaggtgctggacgcggtgcagcaggtcacgaggcccccatgtctgcacccagccaggtccctggggacgttactaactcatgacttgggagctaagcccaagtgtgaaacctctggatcctatggatttggtttcttcccacagttttctgtaggtttagtgtggctggcgccccgttctcctccagttgggaacatgcacccggagcttggggtgcagatcctgatgggtgcctgcctcccccgcccccagccggtgctcaggtggcccaggggccgcacagacgaggcgtggtccaggcattgttgcacatgtactgagggtgtttttaagtgaattgcttagtaggcttctaggaagagtcagatttatagcattttcaaccaaaataatggtgagtgcctaggcttcccgagttagctctttgggtggcccctgagcccctgtgagtgcacttgaccgggtgcggaggtcctgggcagcctgtccctgagccggcccctcccaggggtctgagatccatgaggtgtgtccctagggcttcagtcctggggcagaggcataaacagaaccagtcactatggaggtcgaggattcccatgtgggcccttcagcttgggctgcttggccacggaacagcccttggctccctggcccccggcccccatgcagcccctgggctggcccttggtggtctctgtccaagggagagcccctgggtgttcaggaggctgccccgggtgggctgctcagggcagctgccgaaggtggagcccagagcctgtctggaagggctgtctgtggctgtcctgagacctggccttggactcacaaggaagaccaggctgaggcccctccaggccagggtcctggggcaggcatctcagggagcagccagcccaggcctcctgccgtctccaacagggcatgtcccgggaggaccctgagtgccagattcccctggacgctcctgctgattctgtcggcagttgaaggcccgtctgaggccccgcaatgcgagggtcctgtgtcccacttcactgctccgaagggaactggctggctgtccgtccagtgagcggcccagaccccacctctgcgccattgtcaccagggccctgtcctggctgccctcacccatgtcaagctactgaggctgtgtcttgtttgttttctctgttacatttttgtttgctgttgtcacagtcagctggtttcggcgtgatgttgatcttttgatgtacatactccgttttaaactcatttccactctagttgagttctgcagcatgcagcggtatgaccctacgggggtcaggagagccctgcggcccccacccaccagctcagaacctgtcactaatacagctgcctgtgaccctgggacccgcaaccttccagctgcttccctttgtcaaagtcacgagtgcgtctgccttgacagccctcgtcaacagaacttccagtgggttgtgggttcatttcctttctttttaagaacagggttgggaccttttctgcccctgccccttagctactgaggcatagggagaggaagttaatttcagagccatacaaaaataagccacaaccagcttcagaattaattcccaatcccccattccaccagggctgggagcccattcccagtgcttcccaaggccctcggggacatctaccgccaacccagctgcttctggcaggggctccaagccccagcgtggggaagggccctggagaagccctcatcctcatgggaaccacactgcagtgggtggggaaggttgttgtcagcaccgcccccggctcctccaggtcctgctggctcctcgggggcagggttccctggacctcccagttctgcgccttggggccagccagtactcagagaggaggaccttctcaaccacgtacagaacacgggttttcatggctgcctttggtttggttttctgagaagataggattggattggattttgcagagggtgagaacttctctgtgcctgctcagaggcgccctagggaagggccatgtttgagttttgctttgtatgttgttttgcaagtatctgcctggtactttgatttaaaataaaaacaattttcatagtttgagtgtc

SEQ ID NO: 12081 - protein, 530 aa, Homo sapiens; identical to SEQ ID NO: 2021

SEQ ID NO: 12082 - DNA, 1095 bp, Homo sapiens
gattcccctggacgctcctgctgattctgtcggcagttgaaggcccgtctgaggccccgcaatgcgagggtcctgtgtcccacttcactgctccgaagggaactggctggctgtccgtccagtgagcggcccagaccccacctctgcgccattgtcaccagggccctgtcctggctgccctcacccatgtcaagctactgaggctgtgtcttgtttgttttctctgttacatttttgtttgctgttgtcacagtcagctggtttcggcgtgatgttgatcttttgatgtacatactccgttttaaactcatttccactctagttgagttctgcagcatgcagcggtatgaccctacgggggtcaggagagccctgcggcccccacccaccagctcagaacctgtcactaatacagctgcctgtgaccctgggacccgcaaccttccagctgcttccctttgtcaaagtcacgagtgcgtctgccttgacagccctcgtcaacagaacttccagtgggttgtgggttcatttcctttctttttaagaacagggttgggaccttttctgcccctgccccttagctactgaggcatagggagaggaagttaatttcagagccatacaaaaataagccacaaccagcttcagaattaattcccaatcccccattccaccagggctgggagcccattcccagtgcttcccaaggccctcggggacatctaccgccaacccagctgcttctggcaggggctccaagccccagcgtggggaagggccctggagaagccctcatcctcatgggaaccacactgcagtgggtggggaaggttgttgtcagcaccgcccccggctcctccagtactcagagaggaggaccttctcaaccacgtacagaacacgggttttcatggctgcctttggtttggttttctgagaagataggattggattggattttgcagagggtgagaacttctctgtgcctgctcagaggcgccctagggaagggccatgtttgagttttgctttgtatgttgttttgcaagtatctgcctggtactttgatttaaaataaaaacaattttcatagtt

SEQ ID NO: 12083 - protein, 73 aa, Homo sapiens
MGTTLQWVGKVVVSTAPGSSSTQRGGPSQPRTEHGFSWLPLVWFSEKIGLDWILQRVRTSLCLLRGALGKGHV

SEQ ID NO: 12084 - DNA, 414 bp, Homo sapiens
gaagccctagggacacacctcatggatctcagacccctgggaggggccggctcagggacaggctgcccaggacctccgcacccggtcaagtgcactcacaggggctcaggggcgggggaggcaggcacccatcaggatctgcaccccaagctccgggtgcatgttcccaactggaggagaacggggcgccagccacactaaacctacagaaaactgtgggaagaaaccaaatccataggatccagaggtttcacacttgggcttagctcccaagtcatgagttagtaacgtccccagggacctggctgggtgcagacatgggggcctcgtgacctgctgcaccgcgtccagcacctgcagggtcgcgctcggcacctggctctgcttcctctgtctctgctgcacccaggctcc

SEQ ID NO: 12085 - protein, 59 aa, Homo sapiens
MDLRPLGGAGSGTGCPGPPHPVKCTHRGSGAGEAGTHQDLHPKLRVHVPNWRRTGRQPH

SEQ ID NO: 12086 - DNA, 2334 bp, Homo sapiens
gcgaggacttcttggagtgctttctgcacctgaaactcagttcagggattggggctggctttgagttcaggccaggagagacggaagaactggcaagccgggagcctgcgtccagggaagttgcttggaattccaggcccctcctgtcctcctgctctgagccccacgtggagggagtggctctgtgctttctacccaagggtttcggcttatccagtgggaaaaacgggtggagtgcgcttacaccgccctcggaaccagagcctggagtagcccttctgttgccgctcgtttttgtcaggaggtagcagtctgggactcaagggtgggtctttggagctgattagagatgcctttgtgagtgctatgttgtgtggatgtggagatgactccatccctgtgccctgccttgcttcctccaggacttgggaccctggaggactgacgctgctggcctgggcgtccccttccgctgagccatggcgactcccgacgtgagtgtgcacatggaggaggtggtggttgtgacaactccggacactgcagtggacggcagtggtgtggagggggtgaagaccgtgttggtgacgaccaacttggcccctcacgggggcgacctgacggaagataacatggagacagaaaatgcagcggcagcagctgccgcggccttcacagcctcctcccagctcaaggaagccgtgttagtgaagatggctgaagagggggagaacctggaagctgagattgtgtaccccatcacctgtggagacagcagagccaacctcatctggaggaagtttgtgtgtcccggcatcaatgtgaaatgtgttcagtacgacgagcatgtaatcagcccaaaggaatttgtgcacctggccgggaagtccaccctgaaggactggaagagagccatccgcatgaacggcatcatgctcaggaagatcatggactccggggaactggacttctaccagcatgacaaggtctgctccaacacctgccgcagcacaaagattgacctctcaggagcccgtgtgtccctgagcagccccacgtcggccgagtacattcccctcacgcccgccgcagccgacgtgaatgggtctcctgcgaccatcaccatagagacctgtgaagaccctggcgactggaccgcggccattggagatgacacatttaccttctggcgggggctgaaggacgccggcctgctggacgaggtcatccaggagttccaccaggagctggtggagaccatgagaggcctgcagcagcgggtccaggaccctcccctgcagcttcgagatgctgtacttctcaacaacatcgtgcagaacttcggcatgctggacctggtgaagaaggtgctggccagccacaagtgccagatggaccgctcgcgggagcagtacgcccgggacctggcagccctggagcagcagtgtgatgagcatcgtcgccgagccaaggagctgaagcacaagtcccagcacctcagcaacgtgctcatgacgctgacgccggtctccctgccaccgcctgtgaagcggccccggcttgcacgtgccacatcaggaccggccgccatggcctcgcaggtgctcacccagtctgcccagctggcgcttggcccgggcgtgcccgtcccccagctgaccagcgtgccccttggtaaagtggtgtccaccctgccgtccaccgtcctgggcaagggttcccttcaggcgccccccgccagctccccggcctccccgctgctcgggggatacacagtcttggcctcttccggctccacctaccccagcacagtggagatccacccggacgcgtccagcctcacggtcctgagcacggccgccgtgcaggacggtagcacggtgttcaaggtggtcagcccgctacagctgctcacgttgcctggcctgggccccaccctgcagaacgtggcccaggcctcgcctggctccagcacaattgtgacagtgcccgcaggggctgcccccgggcctgaggagcacacggccaccattgaggtggctgccatggcagaggaccacgagcggaagtagccgacaggagggcgaggcccctgggacggacagggctggctgtctctcagccgcggcagcagggagcgggcagaggccgcagggctggctcgggcaggtgggtcacgtggtctgcagaaccaaagagaggaatcgccaaaacaaatcacgagaagagagaaggggacagaacagcgagagcaacctggaaaatcggtcttcaggtcccacgtttcctcccccttttttcttgggaaatatatttttccatctgttgcttatt

SEQ ID NO: 12087 - protein, 530 aa, Homo sapiens; identical to SEQ ID NO: 2021

SEQ ID NO: 12088 - DNA, 2403 bp, Homo sapiens
agtcccctcgcgcccattcacacacagcagcgtccgggcgaggagcgcccgtacctggaggcctgaaggtaccgccctgccgcgcgtgggcactgctccctggcgccgtccgtccactgaccatcgtccctcggcccggccgcccgcgcggggcaggcaacgcccgaccgggggcctcggggaccaggaggaacctgcggcgttaggagctgacagtgtcggtccgcgcacgcgccccggggcccgtcgggccttatttcacggccccgccttcctcctccgcgagcgccaaataagtgtccggccctcccagccccgtgcgtgcgcggccccgccgcctgcgtcactaggaagcgcgcgcccgcgccgccgccgccgccgaatccccaacaaggagcgaagcccgcggccgccgccgccgcccgccgccgccgcagctcccgacgccgccgcccccgccgggtgcctaagcaggcccggcgcggccccaggacttgggaccctggaggactgacgctgctggcctgggcgtccccttccgctgagccatggcgactcccgacgtgagtgtgcacatggaggaggtggtggttgtgacaactccggacactgcagtggacggcagtggtgtggagggggtgaagaccgtgttggtgacgaccaacttggcccctcacgggggcgacctgacggaagataacatggagacagaaaatgcagcggcagcagctgccgcggccttcacagcctcctcccagctcaaggaagccgtgttagtgaagatggctgaagagggggagaacctggaagctgagattgtgtaccccatcacctgtggagacagcagagccaacctcatctggaggaagtttgtgtgtcccggcatcaatgtgaaatgtgttcagtacgacgagcatgtaatcagcccaaaggaatttgtgcacctggccgggaagtccaccctgaaggactggaagagagccatccgcatgaacggcatcatgctcaggaagatcatggactccggggaactggacttctaccagcatgacaaggtctgctccaacacctgccgcagcacaaagattgacctctcaggagcccgtgtgtccctgagcagccccacgtcggccgagtacattcccctcacgcccgccgcagccgacgtgaatgggtctcctgcgaccatcaccatagagacctgtgaagaccctggcgactggaccgcggccattggagatgacacatttaccttctggcgggggctgaaggacgccggcctgctggacgaggtcatccaggagttccaccaggagctggtggagaccatgagaggcctgcagcagcgggtccaggaccctcccctgcagcttcgagatgctgtacttctcaacaacatcgtgcagaacttcggcatgctggacctggtgaagaaggtgctggccagccacaagtgccagatggaccgctcgcgggagcagtacgcccgggacctggcagccctggagcagcagtgtgatgagcatcgtcgccgagccaaggagctgaagcacaagtcccagcacctcagcaacgtgctcatgacgctgacgccggtctccctgccaccgcctgtgaagcggccccggcttgcacgtgccacatcaggaccggccgccatggcctcgcaggtgctcacccagtctgcccagctggcgcttggcccgggcgtgcccgtcccccagctgaccagcgtgccccttggtaaagtggtgtccaccctgccgtccaccgtcctgggcaagggttcccttcaggcgccccccgccagctccccggcctccccgctgctcgggggatacacagtcttggcctcttccggctccacctaccccagcacagtggagatccacccggacgcgtccagcctcacggtcctgagcacggccgccgtgcaggacggtagcacggtgttcaaggtggtcagcccgctacagctgctcacgttgcctggcctgggccccaccctgcagaacgtggcccaggcctcgcctggctccagcacaattgtgacagtgcccgcaggggctgcccccgggcctgaggagcacacggccaccattgaggtggctgccatggcagaggaccacgagcggaagtagccgacaggagggcgaggcccctgggacggacagggctggctgtctctcagccgcggcagcagggagcgggcagaggccgcagggctggctcgggcaggtgggtcacgtggtctgcagaaccaaagagaggaatcgccaaaacaaatcacgagaagagagaaggggacagaacagcgagagcaacctggaaaatcggtcttcaggtcccacgtttcctcccccttttttcttgggaaatatatttttccatctgttgcttatt

SEQ ID NO: 12089 - protein, 530 aa, Homo sapiens; identical to SEQ ID NO: 2021

SEQ ID NO: 12090 - DNA, 422 bp, Homo sapiens
acctgagttctaaatttatttctcaaagaagccaagctcctgagagagaaatgatactgtaagagtatctgcctggaaaccctgttgcctggagaccactcttgaagaacatccactgctgtggcctcttaaagatttaagacatctaatgaacagctgacagaaatcatcaatttgctcctcatttcagtgtcaaatcatgatgcaacagcagagtgaactcagtgtttttggtatgaagatctccatgtgtttccatcatcagcatctcctgtgctcttaatcttaccctggacacctgacccaggtgcccattctgtgaattctttcattgtaggaaagagaaacagatgttgacaccatgctcttggacttcccagcttccagaatcatgagccaaataaacctcttttctttataaa

SEQ ID NO: 12091 - protein, 45 aa, Homo sapiens
TQCFWYEDLHVFPSSASPVLLILPWTPDPGAHSVNSFIVGKRNRC

SEQ ID NO: 12092 - DNA, 3412 bp, Homo sapiens
aggtgtcgaacccaagggctcttctcagcagagtgtctgcatgccacactctgctttagagtctgttccctggggaacacaaccagagactgaaataattggtgggcagtggggagcacaaagggctgtttttgtttcatgtgaagacgatgagcatgctatgaaccccgaagagctgttgtataaagtatctgcctggaaaccctgttgcctggagaccactcttgaagaacatccactgctgtggcctcttaaagatttaagacatctaatgaacagctgacagaaatcatcaatttgctcctcagcctccctcctccctgaaacacaaaaacattgaaattaggccaattaataactctacaatggcctctaagagttaaaatgaaaggaagtgtaaaatggtttctcacttgaaatcaaaagctagaaatgattaagcttcgtgaggaaggcaagttgaaagctgagacagccaaaagctgactcccgcaccagggagccaagttgtgcaagcaaaggaaaagttcttgaaggaaattaaaagtgctgctccagtgaacacatgaatgataagaaagcaaaagtgatctgggtagaagatcaaaccagccacaacatgcccttaagccaaagcctaatccagagcaaggctttaactctcttcaagtttgtgaagactgagagaggtaaggaaagtgcagaaggaaagttaaatgctagaagagtcggttcaggaggtttcaggaaaaagccatctccacaaataaacatacaacgcgaagcaacaaatgctgatgtagaagctgtggcaagttttccagaagagctagctcagatcattgataaacgtggctacattaaacaacatattttcagtgtggatgaaacagagtcctattggaagaagacaccatctaggactttcatagctacagggaaaagtcaatgactggcttcaaagcttcaaagaacagggtgactctcttgtcagacactaatacagctgctgacttgaagttgaagccagtgctcactgcacattctgaaaacttaaggatccttaagaactgtgctaaatctactgtgcctatgtgcaacaaagcccttatggcagcatgtctgtttacagtatcatttactgaatatttgaagcctactactgagaactactgctcaggaaaaaagatacttttcaaaatagtactgctctttgacaatggacctggtcacccaagagctctgatggaggtgtgcaaggagatgaacgctgtgttcatgcctgctaacacaacacccgttctgtactccatggatcacagagtaattttgactttcaagtcttattatttgagaaataaattttgtaaggctatagctgccacacatagttattcctgtgatggatccgggcaaagtaaattgaaaacctagaaaagagtcaccattctagatgtcactaagaacatttgtgattcatgggaggaggttaaattatcaacattaatagaagtttgaaagaaatttattccagccctcatggatgactttgatgggttcaagactttggtagaggaagtaactgcaggtatagtgataatatcaaggaaattagaactaaaagtggagcctgaagatgtgactgaattgcttcagtctcacgataaaacttgaacataacagcagttaattcttacggattagcaaaaaagtggttttgtgagatggaatctattcctggtgaaaatgctgtgaacactgtggaaatgacaacaaaggatttagaatattacataaacttagttgataaagcagcagtagggtttagaaggattgactccaattttgaaagaagttctacggtgggtcaaacgctaccgaagagcgttgcacgctatagagaaatctttcatgaaaggaggagtcaactgatgtagcagacttcactgttgtcttatttttaaaaatttccacagccaccccaattttcagcaaccaccaccttgatcagtcagcagccatcagcatcaaagcaagaccctcttccagcaaaaaaattacaacaacttgctgaaggctcggatgatttttagcaacaaactattttaaaattaagattgtcaaacatgacccttgaggcttacctctggattgtggtatgaaggaatgaaagcgaaaaataattacctttgtgagattcagtaagtacttaagtccacttttaaaatttgaaaacagaaacaaaatctaacgatttagacacaagggagaagccaatatattgacaatagatgctttttgcagagtacaacagacttttaaaggctatttattttacagttttcttggtgaatttccatagctctcatttttagtgctgtttaatttattcaaatatttagactggtcagttatcccaagggcttagtggggatgttttgcttcatgttcttaaaagccattcaatgtacgcctacagccatctgatctttgacaaagtcagcaaaaataagcaatggggaaaggactccctactcaataaatggtgttggataaccagttggccatacacagaagaatgaaactggactcctatcttttaccacatacaaaaattaactgaaaatggattaaagatttaaatgaaagacctcaaactataagactcctagaagaaaagctaggaagcaccgttcctgacatcagccttgggaaggaatttataactaagtcctcaatagcaattgcaacaaaagcaattgacaagcgggatttaattaaactaaagagcttctgcacagcaaaataaactatcaacagagtaaacaatctacagaatgggagaaaatatgtgtaagctatgcatctgacaaaagcctaatatccagaatctataaggaggttaaataattgaacaaacaaaaaccaaataatctcattaaaaaatgggcaaaggacatcaaccagacacttctcaaaagaagacatacaagcagccaacaaacacaacaaaaaaatgttcaacaagtcaccaatcatcagagaaatgcaaatcaaaacagagggctattattgaaaagtcaaaaaagcaacagatgctggtgagcctgtggagaaaagggaatacttatacactgctattggaaatgtaaattagttcaaccactgtggaaagcagttgggagatttctcaaagaacttaaatcaaaactaccatttgcctcagtgatcccattgctggggtatctatctaaagggaaataaatcattctatcaaaaagacaaatgcagttgtacattcgtcacagcactattcaaaatagtaaagagactgattcatcccaagtgttcattaatagtggactcagtaaagaaaatgtggtacatacacaccgtggaatactatgcagcc

SEQ ID NO: 12093 - protein, 80 aa, Homo sapiens
MPHSALESVPWGTQPETEIIGGQWGAQRAVFVSCEDDEHAMNPEELLYKVSAWKPCCLETTLEEHPLLWPLKDLRHLMNS

SEQ ID NO: 12094 - DNA, 3100 bp, Homo sapiens
agtcgttgccacccgcggagatgaaatgtgagcctgggtggccaaggacgccggagtggccgccttccccgcgcctgagcgcagtggggcgagacaaagagacctgggcccccagcgcagcccgtctcgggccacgggcgccccagctccgcggagtcccgcagtcgctggcccgggacgcgcccggcccgggctcccttggaaggctccctaggcaatggccgggtctctgctccacccggctctcaggagcgctgctctctccatctgatcgccctccatcctccccattccctccggttccgggctctcccttcgctccaagcctcaggccaccggcttggatggacgctccgaggctacccgtgcgtccaggggtcttgcttccgaagttggtcctgctctttgtctacgcagatgattgccttgctcagtgtggcaaagattgcaaatcttactgctgtgatggaaccacgccctactgttgctcctactacgcttatattgggaatatcctctcgggcactgcaattgcgggcattgtttttggaatagtatttatcatgggggtcattgctgggattgccatatgcatctgcatgtgcatgaagaaccacagggcgacccgcgtgggcatcctcaggacgactcacatcaacaccgtctcctcctatcctggaccaccaccctacggtcacgaccacgagatggaatactgtgcagacttgcctcctccatactcccccaccccacagggtccagcacagcgttctccaccccctccttatcctggaaacgcaaggaaataatctatctcccagaacagaacatgtgccaatgggcgatcttgcctggaataaaatgcctctactcagaaacaggcaggaaagaattgctccaaggaatactttttggggtcagataatgtgtcaggtggaatatccctgctaggagatataggatttctactctgctcaaagctgaccccatctggagtattaatgtttggttctatggaaccacattttaagagatctgctgatccacctaagcacattcagggaagagtaatgtaattgacaaaatatctgataatcatgttgtttaagggctaggtgaagaaagtttcagtattgatcctggaaaaaaagaagatctaagtaggatgggagaatgatttggcccacacaaggaagcaactttattctatatagctttaaaagtcagaactagaattgttcattctttcattcatcaataaatgtattttgagtgcctaagagtttactatgtgcctagcactgtttgaggtcctgatggaagttacaggacgggtactctggttttagtacaagaaagagcaatgactagattgctttgtgaagctcttggtagagacacgctccagaagggataacaaaatcaaatagtagatgggttcattgggcctcagaagttctgctcgtattttaggtgggtgtgaagtgaatttctatatgtccaggagtgaatacaacagaaagagttggatcttatttatttaattagggagttaaaacaagaccaaaaagactcaacagccgcttgaagccaagaactcttcaatgccagctactgccacctaaaaatcatctggctttatagtggatcagaataaaggttattctaactgtggggagaaaaaaaaaattgtatcaagttccacaggtagcagacacttcacttccaagtaaaagatgagaaatcaattattcccacaggattttaggtcagggagcaaaaatctcagaacttgaccatgaagatacacaacagactcgcaaaaataaagtgggaaatgaagttcagattcccttctgtagatttccttaaaactattatttttttcttcttcgtaaaattttgataatctgttctcttaaaaaagttaatgacacaattaagatactgacatcaaattgttgccttttaccaaaatgcaaattttatgaagtgcctacctttatatgtataaagcatttaataaataattctaatgtgccatattttgctgtgagtgaccttaacatttatatttttatatgaattgtttcatgtatttataaaaattgtatattgaacattggaaatagatgattagatttttgtgtcattttacaattaaatctaaaatgcttaatccaatatcatcatcaaaattcagtgaaatcccaaaacagtgccaagaattttgctgaatgaaacaatcaaacaaagcattttaaggtgtaagttatagtacctgtacttgcagataagaagcttactatatcattattataagtagcatatattactttcaaatacctatattagaaagatattgatctgactgaaatataacctacctgccagtaaggtccaaaggctgaatttgttttgaatgagttccttgatctttaagcactgatgattttcttatatatgaggatgcaaagcattcaagagtttcagcctgttctggtgaggggctccctgacttacataaagttttcagtgcaattttaatagtacatatgctttaatttatttttcttctgcgtgtggtcagacccaattacactgtggctaagactctcaaagtgccagggtttctgtgatgattctgagaatgctgaatacaaatataccttatattctttaaggaaaacggaaaggaaagatcagcagaaatagggttttctcatcttcaccatcaataaacatttattgcgtacctcctatattctgcaaattttccccaaatagaagccagttcagtccacaccatctcttctttgagttgtttatggcctcccttaaggcattttacaaacccataagcctacaatagatgagtatttttactatttgtattaagtgtcataatagcatcaatgtgcacattaccagtatagactgttggagttcactgattgttttcatagatgatgcttcttggggaaaaatagtataggatgtgaaagttttgaattacggttatttaaaaactaacatttgctatggccaaagtgtttacaataagcaataaagtgaaagaacctattataacacagattat

SEQ ID NO: 12095 - protein, 262 aa, Homo sapiens
MKCEPGWPRTPEWPPSPRLSAVGRDKETWAPSAARLGPRAPQLRGVPQSLARDAPGPGSLGRLPRQWPGLCSTRLSGALLSPSDRPPSSPFPPVPGSPFAPSLRPPAWMDAPRLPVRPGVLLPKLVLLFVYADDCLAQCGKDCKSYCCDGTTPYCCSYYAYIGNILSGTAIAGIVFGIVFIMGVIAGIAICICMCMKNHRATRVGILRTTHINTVSSYPGPPPYGHDHEMEYCADLPPPYSPTPQGPAQRSPPPPYPGNARK

SEQ ID NO: 12096 - DNA, 2044 bp, Homo sapiens
agtcgttgccacccgcggagatgaaatgtgagcctgggtggccaaggacgccggagtggccgccttccccgcgcctgagcgcagtggggcgagacaaagagacctgggcccccagcgcagcccgtctcgggccacgggcgccccagctccgcggagtcccgcagtcgctggcccgggacgcgcccggcccgggctcccttggaaggctccctaggcaatggccgggtctctgctccacccggctctcaggagcgctgctctctccatctgatcgccctccatcctccccattccctccggttccgggctctcccttcgctccaagcctcaggccaccggcttggatggacgctccgaggctacccgtgcgtccaggggtcttgcttccgaagttggtcctgctctttgtctacgcagatgattgccttgctcagtgtggcaaagattgcaaatcttactgctgtgatggaaccacgccctactgttgctcctactacgcttatattgggaatatcctctcgggcactgcaattgcgggcattgtttttggaatagtatttatcatgggggtcattgctgggattgccatatgcatctgcatgtgcatgaagaaccacagggcgacccgcgtgggcatcctcaggacgactcacatcaacaccgtctcctcctatcctggaccaccaccctacggtcacgaccacgagatggaatactgtgcagacttgcctcctccatactcccccaccccacagggtccagcacagcgttctccaccccctccttatcctggaaacgcaaggaaataatctatctcccagaacagaacatgtgccaatgggcgatcttgcctggaataaaatgcctctactcagaaacaggcaggaaagaattgctccaaggaatactttttggggtcagataatgtgtcaggtggaatatccctgctaggagatataggatttctactctgctcaaagctgaccccatctggagtattaatgtttggttctatggaaccacattttaagagatctgctgatccacctaagcacattcagggaagagtaatgtaattgacaaaatatctgataatcatgttgtttaagggctaggtgaagaaagtttcagtattgatcctggaaaaaaagaagatctaagtaggatgggagaatgatttggcccacacaaggaagcaactttattctatatagctttaaaagtcagaactagaattgttcattctttcattcatcaataaatgtattttgagtgcctaagagtttactatgtgcctagcactgtttgaggtcctgatggaagttacaggacgggtactctggttttagtacaagaaagagcaatgactagattgctttgtgaagctcttggtagagacacgctccagaagggataacaaaatcaaatagtagatgggttcattgggcctcagaagttctgctcgtattttaggtgggtgtgaagtgaatttctatatgtccaggagtgaatacaacagaaagagttggatcttatttatttaattagggagttaaaacaagaccaaaaagactcaacagccgcttgaagccaagaactcttcaatgccagctactgccacctaaaaatcatctggctttatagtggatcagaataaaggttattctaactgtggggagaaaaaaaaaattgtatcaagttccacaggtagcagacacttcacttccaagtaaaagatgagaaatcaattattcccacaggattttaggtcagggagcaaaaatctcagaacttgaccatgaagatacacaacagactcgcaaaaataaagtgggaaatgaagttcagattcccttctgtagatttccttaaaactattatttttttcttcttcgtaaaattttgataatctgttctcttaaaaaagttaatgacacaattaagatactgacatcaaattgttgccttttaccaaaatgcaaattttatgaagtgcctacctttatatgtataaagcatttaataaataattctaatgtgccat

SEQ ID NO: 12097 - protein, 262 aa, Homo sapiens; identical to SEQ ID NO: 12095

SEQ ID NO: 12098 - DNA, 499 bp, Homo sapiens
ttataaattgaagatctgtggcagcccttcattgagcaagtctattggcacaatttttccaacagcatatgctcactttgtgtttctgtgtcacattttggtaattttcacaatatgtcaaactttttcattatatctgtttttcactatatctttttcattacatctgttatggtaattgtgatcagtgatctttgatgatgttactattgtaattactttcggccaccacaaactgcacctgtataagatggtgaacttaattgataaatgttgtgtgtgttctcactgctccattgaccagctgttcccaatctttctctctcccctcaggcctccctcctcccagggtggaggtagctatggagtgagaaagagggcacacagcacactccatgatatagttagtgaatcaagagctaagctaggagccagatgaccaaagaatcacagaatcagtttgacttcacattctccaagttatactcgcacctctacc

SEQ ID NO: 12099 - protein, 62 aa, Homo sapiens
MVNLIDKCCVCSHCSIDQLFPIFLSPLRPPSSQGGGSYGVRKRAHSTLHDIVSESRAKLGAR

SEQ ID NO: 12100 - DNA, 967 bp, Homo sapiens
ttggcttattacaaaacaacaggatgctgcagctttatcaaagtctacttatttgtccactaaaagtttatggctatacgtttccaactagaacatctgaacaccaatatatggaattctgacaaagttaaaaccaggaagagatcctatgaaggctgacattttgtacatctgttttatagaacaataaaaataagaagaacaagaataagaacagcaacaacatttgcagccactgtctagaccacaggaaacctggtcaacaacatatgggatgtcaccagattcagactcagaagtttccataatgccgttgccaacagctagacacaaaacctgagcctgagaatttgcttatggattgtatatgatgccaggaaatggaatagaggactgggaagagtgagagaaggaagagaagccaggaggagagtatgttacgagctgtgaataattgggacttgattccactgagctcctttgaagtatctgagaatttgactgcagaattgtgaacctgaaaatcacagaaaagagaatatttatctattgaaccttctcttcatcttgcattggtcaagagttgtcctacgggatattaagacacttgcactttcaagtttgcagaagtatgggaacgaaagcatccaaaaagccctgaggcaggaagcaagctgagacaaggtgttggtgatgatggtacacctggatgaagctaacttcagcagcaatagttgctgaatgaatttttcatttcatctaagttgccacattcatcagcataaaattgttaatgatattcttttagaacttggagggtggtaggagagagaggagcagaaaaaaataactattggatatgagccttaatacctgggttttgacataatctgtacaacaaacctccatgaaacaagtttacctatataacaaaccttcacatgcacccccaaatctaaaataaaag

SEQ ID NO: 12101 - protein, 32 aa, Homo sapiens
MLQLYQSLLICPLKVYGYTFPTRTSEHQYMEF

SEQ ID NO: 12102 - DNA, 7200 bp, Homo sapiens
gccccgcatcgtgcccggccccgtcgcggagatcccggacgaccgtcgcgggttgatggtcgcattccagatgtaaacagcttcagaagcctgacggtcatatggtagaatcactgtggactgagacccacctttctagacctgaagcccaggaggaggaagaggaggctggttggtaccatgggcataatgctctgaatcctagtctctcacctagtatgtgagcagtccctgcagatggcccatttggagatcttgacaaagcctcttctgtttccaatggggtttttggcgcattctcacagacttagatgaaactgtgatggccaccgcagggggcaggtgctgacatcgtccccagccctgtggctgttcatccggacatcatttccaacctcaatatctaaatgccacagtgctcttggagcaagttgggctggggaccactgttgccttttaagaccataaaaccatgggaaacgcagaaagtcaacatgtagagcacgagttttatggagaaaagcatgccagcctggggcgcaagcacacttcccgctccctgcgcctctcgcacaagacgcggaggaccaggcacgcttcctcggggaaggtgatccacaggaactccgaagtgagcacccgatccagcagcacccccagcatcccccagtccctggctgaaaatggcctggagcccttctcccaagatggtaccctagaagacttcgggagccccatctgggtggaccgagtggacatgggcttgagacctgtgtcttacactgactcttctgtcactcccagcgtagacagcagcatcgtcctcacagcagcctctgtgcagagcatgccagacactgaggagagcaggctttacggggatgacgctacatatttggctgagggaggcaggaggcagcattcctatacatccaatgggcccactttcatggagacggcgagctttaagaagaaacgctccaaatctgcagacatctggcgggaggacagcctggaattctcactctctgatctgagccaagaacatttaacaagcaacgaagaaatcttgggttccgccgaagagaaggactgcgaggaggctcgggggatggaaacgcgggcgagtccgcggcagctcagcacctgtcagagagccaattccttgggtgacttgtatgctcagaaaaactctggagtgacagcaaacggggggccggggagcaaatttgcaggctactgtcggaatttggtgtctgatattcccaatcttgcaaaccataagatgccaccagctgctgctgaagagactcctccgtacagtaattataacacacttccctgtaggaaatctcactgtctctctgaaggtgccaccaacccacaaattagccatagcaacagcatgcaaggcagaagagctaaaacaactcaggatgttaatgcaggcgagggcagtgagtttgcagacagtgggattgaaggggccactaccgacacggacctcctgtccaggcgatctaatgccaccaactccagctactcacccaccacaggccgggcctttgtgggcagcgacagcggcagcagctccaccggggatgcggctcgtcagggggtgtacgagaacttccggcgggagctggagatgagcaccaccaacagcgagagcctggaggaggccggctcggcgcacagcgatgagcagagcagcggcaccctgagctctccgggccagtcggacatcctgctgaccgccgcacagggcacggtgcgcaaggccggcgccctggccgtcaagaacttcctggtgcacaagaagaacaagaaggtggagtcagccacccggaggaagtggaagcactactgggtgtccctgaaaggatgcacgctatttttctacgagagcgacggcaggtctgggatagaccacaacagcatccccaaacacgccgtctgggtggagaacagcattgtgcaggcggtgcctgagcaccccaagaaggactttgtcttctgcctcagcaattccctgggtgatgccttcctttttcagaccactagccagacggagcttgaaaactggatcaccgccatccactctgcctgcgccactgcggtcgcgaggcaccaccacaaggaagacacgctccgactcctgaaatcagagatcaaaaaactggaacagaagattgacatggatgaaaagatgaagaaaatgggtgaaatgcagctgtcttcagtcactgactcaaagaaaaagaaaacaatattagatcagatctttgtctgggagcaaaatctcgagcagttccaaatggacctgtttcgtttccgctgttatttagccagccttcagggtggggagctgccaaaccccaaaaggcttctcgcttttgcaagtcgaccaacgaaagtggccatgggccgccttggaatcttttcggtatcatcgtttcatgccctggtggcagcacgcactggtgaaactggagtgagaagacgtactcaggccatgtccagatccgcgagcaagcgaaggagcaggttttcttctctgtggggtctggatactacctccaaaaagaagcagggacggccaagcatcaatcaggtgtttggagagggaaccgaagctgtaaagaaatctttagagggaatatttgatgacattgttccagatggcaagagggagaaagaagtggtcttacctaacgttcaccagcacaaccctgactgcgacatttgggtccacgagtatttcactccatcctggttctgtctgcccaataatcagcctgccctgacggtcgtccggccaggcgacactgcacgggacaccctggagctgatttgcaagacacatcaactggatcattctgctcattacctgcgcctgaaatttctaatagaaaacaaaatgcagctctatgttccacagcccgaggaagacatctatgagctgctgtacaaagaaattgaaatctgtccaaaagtcactcagagcatccacattgagaagtcagatacagctgctgatacttacgggttttcactttcttctgtggaagaagatggtattcgaaggctgtacgtgaatagtgtgaaggaaaccggtttagcttccaagaaaggcctgaaagcaggagatgagattcttgagatcaataatcgtgctgctgacgccctgaactcttctatgctcaaagatttcctctcacagccctcgctgggcctcctggtgaggacctaccccgagctggaggaaggagtggagctgctggaaagcccgccccaccgagtggacggccctgccgaccttggcgagagccccctcgcctttctcaccagcaacccagggcacagcctttgcagcgagcagggcagcagtgctgagaccgctccagaggagaccgaggggccagacttggaatcctcagatgagactgatcacagcagcaagagtacagaacaggtggccgcattttgccgcagtttgcatgagatgaacccctctgaccagagcccatctcctcaggactccacggggcctcagctggcgaccatgagacaactctcggatgcagataagctgcgcaaggtgatctgcgagctcctggagacggagcgcacctacgtgaaggatttaaactgtcttatggagagatacctaaagcctcttcaaaaagaaacttttctcacccaggatgagcttgacgtgctttttggaaatttaacggaaatggtagagtttcaagtagaattccttaaaactctagaagatggagtgagactggtacctgatttggaaaagcttgagaaggttgatcaatttaagaaagtgctgttctctctggggggatcattcctgtattatgctgaccgcttcaagctctacagtgccttctgcgccagccacacaaaagttcccaaggtcctggtgaaagccaagacagacacggctttcaaggcattcttggatgcccagaacccgaagcagcagcactcatccacgctggagtcgtacctcatcaagcccatccagaggatcctcaagtacccacttctgctcagggagctgttcgccctgaccgatgcggagagcgaggagcactaccacctggacgtggccatcaagaccatgaacaaggttgccagtcacatcaatgagatgcagaaaatccatgaagagtttggggctgtgtttgaccagctgattgctgaacagactggtgagaaaaaagaggttgcagatctgagcatgggagacctgcttttgcacactaccgtgatctggctgaacccgccggcctcgctgggcaagtggaaaaaggaaccagagttggcagcattcgtcttcaaaactgctgtggtccttgtgtataaagatggttccaaacagaagaagaaacttgtaggatctcacaggctttccatttatgaggactgggaccccttcagatttcgacacatgatccccacggaagcgctgcaggttcgagctttggcgagtgcagatgcagaggcaaatgccgtgtgtgaaattgtccatgtaaaatccgagtctgaagggaggccggagagggtctttcacttgtgctgcagctccccagagagccgaaaggatttcctaaaggctgtgcattcaatcctgcgtgataagcacagaagacagctcctcaaaaccgagagccttccctcatcccagcaatatgtcccttttggaggcaaaagattgtgtgcactgaagggggccaggccggccatgagcagggcagtgtctgccccaagcaagtctcttgggaggaggaggcggcggctggctcgaaacaggtttaccattgattctgatgccgtctccgcaagcagcccggagaaagagtcccagcagccccccggtggtggggacactgaccgatgggtagaggagcagtttgatcttgctcagtatgaggagcaagatgacatcaaggagacagacatcctcagtgacgatgatgagttctgtgagtccgtgaagggtgcctcagtggacagagacctgcaggagcggcttcaggccacctccatcagtcagcgggaaagaggccggaaaaccctggatagtcacgcgtcccgcatggcacagctcaagaagcaagctgccctgtcggggatcaatggaggcctggagagcgcaagcgaggaagtcatttgggttaggcgtgaagactttgccccctccaggaaactgaacactgagatctgactgcgtcacctgccccgtagagaatgtgtgtagatacttcctgccctaactctgcccaccctcctgtaccgtcgacaagaatgtccccttaggtcgcgctcttgcacacacggttttggcagctgacttggttctgaagccatgtagccacccaactttgtcattttcaacaacatcagaaagaattgatcagaatcccaaataagcttgagtcctatcttctgtatattactaagggcttttatttattctcaataaatcagggcctgaacaattaaaagaaaaaagattctatagcactggaaagcaaatcaccccaggagttaacggatgtacaacagattaatttaagggatagtagcacacacacgatccttctatctgaaatcagtctcctagctggggaaacctctttcacacacaaaatgaaatgtgtacagcttgccgtgttctgactgtacccttccctcttccatgtctgagaatctccgtgtattttaagaatgtgtgaggagagggtggcgattcatgtttcaatgagcctctttttttttttccttcctgttttggtctatggctggtcttactctgtgtccatgttcggaagctctagttttgcatagaattatagagatgccaaactctttgaaaagagatccaaatttatcgcttgagagaaagaaaagaaacactattttttgtattttacctgagatacaggggcacaaatagatgagaattttacagtgttagtgtatgtatccctgagcctaaaaaatgaggatataaccttttacagagagagtgaggcgtggtggttttatatttatatatgaaaggccagcaagctcatgcgaaggatatacttttcttccaaaaagcggattttttttttttaatgtttgaatctatatttgagatgggagtttggttggattaaacatgacaccccggtgggcggtgtgtgtgtctgttgcacatggcagggaggggagcctccttctcatggggttgccatggtgatcattggtttttccatcaaaattgcatcttcatccatagattaccttccccttccctgacagtccataaccaaacctttaaacagaacaacctctttaaaaacttctcttgtgtttaacactttcttcatgccaacgaaacagggtaaacatgctcaaaacattaacagtctaaacagatatccaaatactaagaagaaaaacaagttatagcactttcaattttttttttttttttaaaaaaaggtttatagctttttcttttcccatgtcacaatgtccacttcctaagaagggtttaaaatactatgaaaactttctttttggggaaaatatctatttggtgtttgacacatcagtaggtactttaaagacctgaattttatagtagctttaggagttatattttataaaaatcagttatgactttatatttccagacaatagagagttcagtacatcatgctcttgtgcctctgcctgcttttcctgcgttcccaccctgtattccccccgcctttcgggtttccagggcttcgagcttgatcttttgaaagttttattctattaaatttttgctatatcttctggttttctgaaaaagctttagaatggtttctataccctttgtatcactgcatttttccatatcatctccggttcgatcgcgtccagatggaaaacggaagcagaggcttctaatcgtcgcatttactggctccagtgcaacacatccatctgaaaacactcggaagtctggtgcttggagagggtgccattgtctcttgtacataaggtcatgacgtgtctatgtcaaaagttcttatatatttcttttataagctgaaagaaggtctatttttatgtttttaggtctatgaatggaacgttgtaaatgcttgtcaaacaataaaaataacgaaaagtgtc

SEQ ID NO: 12103 - protein, 1591 aa, Homo sapiens; identical to SEQ ID NO: 2025

SEQ ID NO: 12104 - DNA, 2313 bp, Homo sapiens
acagaggagcccaggaggtctgcgtgaaccctgcccgagtcacttactctgcccagcaggttgatggtcgcattccagatgtaaacagcttcagaagcctgacggtcatatggtagaatcactgtggactgagacccacctttctagacctgaagcccaggaggaggaagaggaggctggttggtaccatgggcataatgctctgaatcctagtctctcacctagtatgtgagcagtccctgcagatggcccatttggagatcttgacaaagcctcttctgtttccaatggggatgttaatgcaggcgagggcagtgagtttgcagacagtgggattgaaggggccactaccgacacggacctcctgtccaggcgatctaatgccaccaactccagctactcacccaccacaggccgggcctttgtgggcagcgacagcggcagcagctccaccggggatgcggctcgtcagggggtgtacgagaacttccggcgggagctggagatgagcaccaccaacagcgagagcctggaggaggccggctcggcgcacagcgatgagcagagcagcggcaccctgagctctccgggccagtcggacatcctgctgaccgccgcacagggcacggtgcgcaaggccggcgccctggccgtcaagaacttcctggtgcacaagaagaacaagaaggtggagtcagccacccggaggaagtggaagcactactgggtgtccctgaaaggatgcacgctatttttctacgagagcgacggcaggtctgggatagaccacaacagcatccccaaacacgccgtctgggtggagaacagcattgtgcaggcggtgcctgagcaccccaagaaggactttgtcttctgcctcagcaattccctgggtgatgccttcctttttcagaccactagccagacggagcttgaaaactggatcaccgccatccactctgcctgcgccactgcggtcgcgaggcaccaccacaaggaagacacgctccgactcctgaaatcagagatcaaaaaactggaacagaagattgacatggatgaaaagatgaagaaaatgggtgaaatgcagctgtcttcagtcactgactcaaagaaaaagaaaacaatattagatcagatctttgtctgggagcaaaatctcgagcagttccaaatggacctgtttcgtttccgctgttatttagccagccttcagggtggggagctgccaaaccccaaaaggcttctcgcttttgcaagtcgaccaacgaaagtggccatgggccgccttggaatcttttcggtatcatcgtttcatgccctggtggcagcacgcactggtgaaactggagtgagaagacgtactcaggccatgtccagatccgcgagcaagcgaaggagcaggttttcttctctgtggggtctggatactacctccaaaaagaagcagggacggccaagcatcaatcaggtgtttggagagggaaccgaagctgtaaagaaatctttagagggaatatttgatgacattgttccagatggcaaggtaaaaataaacgtgtgttttcttttctaaaagtaccacaagtgcatcaacatatacatggtgcagtgttgtcttgagctactaaaattaagtaaactcaatattaaaaactgaaatcagtttttaaaagttatgtaataagtcaacaagagatggaaaatcattttatatttaaaactgagtggtagagggaacattctcctgctgacataacatttcccatacttaccatttgatgtgtgagtttctaactagaatgtaagaggaaatttgggttctgaatagctgaatattttatgccattgccaatttctttccatgtacaacttctcttcccaagaggtgtgttcttactaccctccctctctgcccacacatgctgttttgctcccattagtttcaaagaactgttctgatagcgtgttctttaaaaaaagaaaaacaacaaaaacgcatttgcctcccaagtcaagtattcaattaaagattcggccgggtgtggtggctcacgcctgtaatcccagcactttgggaggccaaggcgggtggatcacgaggtcaggagatggagaccatgctggctaacacgatgaaaccccgtctctactaaaaatacaaaaaaaaaaaaaattagctggacacctgtagtcccagctacttgggaggctgaggcagcagaatggcgtgaacccaggatgcggagcttgcagtgagcagagatggagccactgcactccagcctgtgcaaccgagcaagactctctctc

SEQ ID NO: 12105 - protein, 356 aa, Homo sapiens
MSTTNSESLEEAGSAHSDEQSSGTLSSPGQSDILLTAAQGTVRKAGALAVKNFLVHKKNKKVESATRRKWKHYWVSLKGCTLFFYESDGRSGIDHNSIPKHAVWVENSIVQAVPEHPKKDFVFCLSNSLGDAFLFQTTSQTELENWITAIHSACATAVARHHHKEDTLRLLKSEIKKLEQKIDMDEKMKKMGEMQLSSVTDSKKKKTILDQIFVWEQNLEQFQMDLFRFRCYLASLQGGELPNPKRLLAFASRPTKVAMGRLGIFSVSSFHALVAARTGETGVRRRTQAMSRSASKRRSRFSSLWGLDTTSKKKQGRPSINQVFGEGTEAVKKSLEGIFDDIVPDGKVKINVCFLF

SEQ ID NO: 12106 - DNA, 622 bp, Homo sapiens
gggctgtagagcgactatgggcgcacgccgggtatccgcgccgcagccaggctcggagcgcgcggctggaggggcgcgggcggcgcgcgctccagagatgccttcctgcgaggctccgtcagcgcggcccggggagatcgcccgcaggcagcggaggcgcggcgggccgggggacgaccagggagcccctaacaaagcagctttgggagggccggaggcctctgcctccctcggcgataggtccgcgaagctgcctgtcatctcgcataggtggaggtggccaatggcgtgcacagacggagctctagttggcgcgcgcgcgcggctcggcatcggtgggattggtcggaggttgtggagaacgcggaaacggagacgctggcggtacagcctcgagcgaaacctttccctacacgaggccggagcttcctcctctcctgaagagctctagacttccccatttacaacaaaggctgggatgtatgttccttacaccttgattccatacacacgtgttcgccccgggagctgggaaggtctgcgctcccggggtgatcttgttgaaaacaaaaagaattgcccacgctgtggaagataaacctaaaccggaaaattgaaagtc

SEQ ID NO: 12107 - protein, 144 aa, Homo sapiens
MGARRVSAPQPGSERAAGGARAARAPEMPSCEAPSARPGEIARRQRRRGGPGDDQGAPNKAALGGPEASASLGDRSAKLPVISHRWRWPMACTDGALVGARARLGIGGIGRRLWRTRKRRRWRYSLERNLSLHEAGASSSPEEL

SEQ ID NO: 12108 - DNA, 820 bp, Homo sapiens
gggctgtagagcgactatgggcgcacgccgggtatccgcgccgcagccaggctcggagcgcgcggctggaggggcgcgggcggcgcgcgctccagagatgccttcctgcgaggctccgtcagcgcggcccggggagatcgcccgcaggcagcggaggcgcggcgggccgggggacgaccagggagcccctaacaaagcagctttgggagggccggaggcctctgcctccctcggcgataggtccgcgaagctgcctgtcatctcgcataggtggaggtggccaatggcgtgcacagacggagctctagttggcgcgcgcgcgcggctcggcatcggtgggattggtcggaggttgtggagaacgcggaaacggagacgctggcggtacagcctcgagcgaaacctttccctacacgaggccggagcttcctcctctcctgaagagctctagacttccccatttacaacaaaggctgggatgtatgttccttacaccttgattccatacacacgtgttcgccccgggagctgggaaggtctgcgctcccggggtgatcttgttgaaaacaaaaagaattgcccacgctgtggaagataaacctaaaccggaaaattgaaagtcatccctgattcctccttcttcttaaccctctcccatccatttttgttaacctcccaaacccattcctcccatcctgtctcacctggacctcagtaaagggctcccatcgtccttctgtcccaggccttgccccctgaaatctgttctccactttgcagaatgatccttctaagcagaaaaatctcattttgcgctccc

SEQ ID NO: 12109 - protein, 144 aa, Homo sapiens; identical to SEQ ID NO: 12107

SEQ ID NO: 12110 - DNA, 1654 bp, Homo sapiens
ggaagttcggcagatttcagttcattgtaaacttgccaagggatccgcccacagacacgagagagctgctttgggacagtgaattactcttcttttgagacggtctaatgatgcctgggtggtgccttcgtaggatggtcgtcacacctgaacaagggggtccctggccccaggccccatgctttactgggccctgttctgtccctcttctggcatcatctcccatggagaaaagaatgtgttgaagccaagaagatgctccccccgcaagaatatcatctctgctagaacaggggctggagtgtaacggcatgatctcggctcactgcaccctcgacttcctggattcaggtgatcccctcacctcagcctccctagtagctggtgtgtccggaattggtgggttcttggtctcactgacttcaagaatgaagccgtggaccctcgcggtgagtgttacagttcttaaaggtggcgtgtccggagtttgttccttctgatgttcagatgtgttcggagtttcttccttctggtgggtttgtggtctcgctggctcaggagtgaagctgcagaccttcgcggtgagtgttacagctcttaaggcagcgcgtctcaagttgttcattcctcccggggggttcgtggtctcattggcttcagcagtgaagctgcagaccttcgtggtgagtgttacagctcataaaggcagtgtggacccaaagagtgagcagcagcaagatttattgcaaagaaagacaaagcttccacagtatggaaggggacccaagcagcttgccactgctggctcaggcagcctgcttttattcttttatctggccccacccacatcctgctgattggtagagccgagtggtctgttttgacagggcgctgattggtgtgtttacaatccctgagctagacacaaaggttctccacctccccaccagagtagctagatacagagtgtcgattcgtgcattcacaaaccctgagctagacacagggtgccgattggtgcatttacaatcccttagctagacataaaggttctgcaggtccccactaaactcaggagcccagctggcgtcacccagtggatcccgcacctgggctgcaggtggagctgcctgccactcccatgccgtgcacccgcactcctcagcccttgggcagaggaggtgccgagagcgagtgaggcctctgaggactgccagcatgctgtcacctctcactgggactacaggtgagcacccacacacccggctaattttttttttattttttggtagagatggggtctccctatgttgcccaagctcatttagaactcctgggctcaagcaatccacctgcctcagcctccccaagtgctaggattataggcatgagctaccgcccccagcctcaaagttgttttttaaaaatgtaattatctattccctttaaggcacataattttcttaatgaacctctaccctactaggtgggtaggagttgggtgagacttaaacttgaaatgataatgcctaaagtttgtgcggtttaaaccccaggggtccccatcacctgggccatattggcttcaaattggctatatttgaagaattgtcttgggccacacataaaatacgttaacactaatgatagctgg

SEQ ID NO: 12111 - protein, 42 aa, Homo sapiens
MLYWALFCPSSGIISHGEKNVLKPRRCSPRKNIISARTGAGV

SEQ ID NO: 12112 - DNA, 633 bp, Homo sapiens
gtgcgaggcgattggtttggggccagagtgggcgaggcgcggaggtctggcctataaagtagtcgcggagacggggtgctggtttgcgtcgtagtctcctgcagcgtctggggtttccgttgcagtcctcggaaccaggacctcggcgtggcctagcgagttatggcgacgaaggccgtgtgcgtgctgaagggcgacggcccagtgcagggcatcatcaatttcgagcagaaggctgtaccagtgcaggtcctcactttaatcctctatccagaaaacacggtgggccaaaggatgaagagaggcatgttggagacttgggcaatgtgactgctgacaaagatggtgtggccgatgtgtctattgaagattctgtgatctcactctcaggagaccattgcatcattggccgcacactggtggtccatgaaaaagcagatgacttgggcaaaggtggaaatgaagaaagtacaaagacaggaaacgctggaagtcgtttggcttgtggtgtaattgggatcgcccaataaacattcccttggatgtagtctgaggccccttaactcatctgttatcctgctagctgtagaaatgtatcctgataaacattaaacactgtaatcttaaaagtgt

SEQ ID NO: 12113 - protein, 55 aa, Homo sapiens
MATKAVCVLKGDGPVQGIINFEQKAVPVQVLTLILYPENTVGQRMKRGMLETWAM

SEQ ID NO: 12114 - DNA, 808 bp, Homo sapiens
gtgcgaggcgattggtttggggccagagtgggcgaggcgcggaggtctggcctataaagtagtcgcggagacggggtgctggtttgcgtcgtagtctcctgcagcgtctggggtttccgttgcagtcctcggaaccaggacctcggcgtggcctagcgagttatggcgacgaaggccgtgtgcgtgctgaagggcgacggcccagtgcagggcatcatcaatttcgagcagaaggctgtaccagtgcaggtcctcactttaatcctctatccagaaaacacggtgggccaaaggatgaagagaggcatgttggagacttgggcaatgtgactgctgacaaagatggtgtggccgatgtgtctattgaagattctgtgatctcactctcaggagaccattgcatcattggccgcacactggtggtccatgaaaaagcagatgacttgggcaaaggtggaaatgaagaaagtacaaagacaggaaacgctggaagtcgtttggcttgtggtgtaattgggatcgcccaataaacattcccttggatgtagtctgaggccccttaactcatctgttatcctgctagctgtagaaatgtatcctgataaacattaaacactgtaatcttaaaagtgtaattgtgtgactttttcagagttgctttaaagtacctgtagtgagaaactgatttatgatcacttggaagatttgtatagttttataaaactcagttaaaatgtctgtttcaatgacctgtattttgccagacttaaatcacagatgggtattaaacttgtcagaatttctttgt

SEQ ID NO: 12115 - protein, 55 aa, Homo sapiens; identical to SEQ ID NO: 12113

SEQ ID NO: 12116 - DNA, 883 bp, Homo sapiens
gtgcgaggcgattggtttggggccagagtgggcgaggcgcggaggtctggcctataaagtagtcgcggagacggggtgctggtttgcgtcgtagtctcctgcagcgtctggggtttccgttgcagtcctcggaaccaggacctcggcgtggcctagcgagttatggcgacgaaggccgtgtgcgtgctgaagggcgacggcccagtgcagggcatcatcaatttcgagcagaaggctgtaccagtgcaggtcctcactttaatcctctatccagaaaacacggtgggccaaaggatgaagagaggcatgttggagacttgggcaatgtgactgctgacaaagatggtgtggccgatgtgtctattgaagattctgtgatctcactctcaggagaccattgcatcattggccgcacactggtggtccatgaaaaagcagatgacttgggcaaaggtggaaatgaagaaagtacaaagacaggaaacgctggaagtcgtttggcttgtggtgtaattgggatcgcccaataaacattcccttggatgtagtctgaggccccttaactcatctgttatcctgctagctgtagaaatgtatcctgataaacattaaacactgtaatcttaaaagtgtaattgtgtgactttttcagagttgctttaaagtacctgtagtgagaaactgatttatgatcacttggaagatttgtatagttttataaaactcagttaaaatgtctgtttcaatgacctgtattttgccagacttaaatcacagatgggtattaaacttgtcagaatttctttgtcattcaagcctgtgaataaaaaccctgtatggcacttattatgaggctattaaaagaatccaaattcaaactaaa

SEQ ID NO: 12117 - protein, 55 aa, Homo sapiens; identical to SEQ ID NO: 12113

SEQ ID NO: 12118 - DNA, 716 bp, Homo sapiens
gtttggggccagagtgggcgaggcgcggaggtctggcctataaagtagtcgcggagacggggtgctggtttgcgtcgtagtctcctgcagcgtctggggtttccgttgcagtcctcggaaccaggacctcggcgtggcctagcgagttatggcgacgaaggccgtgtgcgtgctgaagggcgacggcccagtgcagggcatcatcaatttcgagcagaaggaaagtaatggaccagtgaaggtgtggggaagcattaaaggactgactgaaggcctgcatggattccatgttcatgagtttggagataatacagcaggctgtaccagtgcaggtcctcactttaatcctctatccagaaaacacggtgggccaaaggatgaagagaggcatgttggagacttgggcaatgtgactgctgacaaagatggtgtggccgatgtgtctattgaagattctgtgatctcactctcaggagaccattgcatcattggccgcacactggtggtccatgaaaaagcagatgacttgggcaaaggtggaaatgaagaaagtacaaagacaggaaacgctggaagtcgtttggcttgtggtgtaattgggatcgcccaataaacattcccttggatgtagtctgaggccccttaactcatctgttatcctgctagctgtagaaatgtatcctgataaacattaaacactgtaatcttaaaagtgt

SEQ ID NO: 12119 - protein, 154 aa, Homo sapiens [sequence omitted]

SEQ ID NO: 12120 - DNA, 892 bp, Homo sapiens
gtttggggccagagtgggcgaggcgcggaggtctggcctataaagtagtcgcggagacggggtgctggtttgcgtcgtagtctcctgcagcgtctggggtttccgttgcagtcctcggaaccaggacctcggcgtggcctagcgagttatggcgacgaaggccgtgtgcgtgctgaagggcgacggcccagtgcagggcatcatcaatttcgagcagaaggaaagtaatggaccagtgaaggtgtggggaagcattaaaggactgactgaaggcctgcatggattccatgttcatgagtttggagataatacagcaggctgtaccagtgcaggtcctcactttaatcctctatccagaaaacacggtgggccaaaggatgaagagaggcatgttggagacttgggcaatgtgactgctgacaaagatggtgtggccgatgtgtctattgaagattctgtgatctcactctcaggagaccattgcatcattggccgcacactggtggtccatgaaaaagcagatgacttgggcaaaggtggaaatgaagaaagtacaaagacaggaaacgctggaagtcgtttggcttgtggtgtaattgggatcgcccaataaacattcccttggatgtagtctgaggccccttaactcatctgttatcctgctagctgtagaaatgtatcctgataaacattaaacactgtaatcttaaaagtgtaattgtgtgactttttcagagttgctttaaagtacctgtagtgagaaactgatttatgatcacttggaagatttgtatagttttataaaactcagttaaaatgtctgtttcaatgacctgtattttgccagacttaaatcacagatgggtattaaacttgtcagaatttctttgtc

SEQ ID NO: 12121 - protein, 154 aa, Homo sapiens [sequence omitted]

SEQ ID NO: 12122 - DNA, 912 bp, Homo sapiens
gtttggggccagagtgggcgaggcgcggaggtctggcctataaagtagtcgcggagacggggtgctggtttgcgtcgtagtctcctgcagcgtctggggtttccgttgcagtcctcggaaccaggacctcggcgtggcctagcgagttatggcgacgaaggccgtgtgcgtgctgaagggcgacggcccagtgcagggcatcatcaatttcgagcagaaggaaagtaatggaccagtgaaggtgtggggaagcattaaaggactgactgaaggcctgcatggattccatgttcatgagtttggagataatacagcaggctgtaccagtgcaggtcctcactttaatcctctatccagaaaacacggtgggccaaaggatgaagagaggcatgttggagacttgggcaatgtgactgctgacaaagatggtgtggccgatgtgtctattgaagattctgtgatctcactctcaggagaccattgcatcattggccgcacactggtggtaagaaacgctggaagtcgtttggcttgtggtgtaattgggatcgcccaataaacattcccttggatgtagtctgaggccccttaactcatctgttatcctgctagctgtagaaatgtatcctgataaacattaaacactgtaatcttaaaagtgtaattgtgtgactttttcagagttgctttaaagtacctgtagtgagaaactgatttatgatcacttggaagatttgtatagttttataaaactcagttaaaatgtctgtttcaatgacctgtattttgccagacttaaatcacagatgggtattaaacttgtcagaatttctttgtcattcaagcctgtgaataaaaaccctgtatggcacttattatgaggctattaaaagaatccaaattcaaactaaa

SEQ ID NO: 12123 - protein, 136 aa, Homo sapiens
MATKAVCVLKGDGPVQGIINFEQKESNGPVKVWGSIKGLTEGLHGFHVHEFGDNTAGCTSAGPHFNPLSRKHGGPKDEERHVGDLGNVTADKDGVADVSIEDSVISLSGDHCIIGRTLVVRNAGSRLACGVIGIAQ

SEQ ID NO: 12124 - DNA, 966 bp, Homo sapiens
gtttggggccagagtgggcgaggcgcggaggtctggcctataaagtagtcgcggagacggggtgctggtttgcgtcgtagtctcctgcagcgtctggggtttccgttgcagtcctcggaaccaggacctcggcgtggcctagcgagttatggcgacgaaggccgtgtgcgtgctgaagggcgacggcccagtgcagggcatcatcaatttcgagcagaaggaaagtaatggaccagtgaaggtgtggggaagcattaaaggactgactgaaggcctgcatggattccatgttcatgagtttggagataatacagcaggctgtaccagtgcaggtcctcactttaatcctctatccagaaaacacggtgggccaaaggatgaagagaggcatgttggagacttgggcaatgtgactgctgacaaagatggtgtggccgatgtgtctattgaagattctgtgatctcactctcaggagaccattgcatcattggccgcacactggtggtccatgaaaaagcagatgacttgggcaaaggtggaaatgaagaaagtacaaagacaggaaacgctggaagtcgtttggcttgtggtgtaattgggatcgcccaataaacattcccttggatgtagtctgaggccccttaactcatctgttatcctgctagctgtagaaatgtatcctgataaacattaaacactgtaatcttaaaagtgtaattgtgtgactttttcagagttgctttaaagtacctgtagtgagaaactgatttatgatcacttggaagatttgtatagttttataaaactcagttaaaatgtctgtttcaatgacctgtattttgccagacttaaatcacagatgggtattaaacttgtcagaatttctttgtcattcaagcctgtgaataaaaaccctgtatggcacttattatgaggctattaaaagaatccaaattcaaactaaa

SEQ ID NO: 12125 - protein, 154 aa, Homo sapiens [sequence omitted]

SEQ ID NO: 12126 - DNA, 780 bp, Homo sapiens
gacggggtgctggtttgcgtcgtagtctcctgcagcgtctggggtttccgttgcagtcctcggaaccaggacctcggcgtggcctagcgagttatggcgacgaaggccgaaagtaatggaccagtgaaggtgtggggaagcattaaaggactgactgaaggcctgcatggattccatgttcatgagtttggagataatacagcaggctgtaccagtgcaggtcctcactttaatcctctatccagaaaacacggtgggccaaaggatgaagagaggcatgttggagacttgggcaatgtgactgctgacaaagatggtgtggccgatgtgtctattgaagattctgtgatctcactctcaggagaccattgcatcattggccgcacactggtggtccatgaaaaagcagatgacttgggcaaaggtggaaatgaagaaagtacaaagacaggaaacgctggaagtcgtttggcttgtggtgtaattgggatcgcccaataaacattcccttggatgtagtctgaggccccttaactcatctgttatcctgctagctgtagaaatgtatcctgataaacattaaacactgtaatcttaaaagtgtaattgtgtgactttttcagagttgctttaaagtacctgtagtgagaaactgatttatgatcacttggaagatttgtatagttttataaaactcagttaaaatgtctgtttcaatgacctgtattttgccagacttaaatcacagatgggtattaaacttgtcagaatttctttgtc

SEQ ID NO: 12127 - protein, 135 aa, Homo sapiens
MATKAESNGPVKVWGSIKGLTEGLHGFHVHEFGDNTAGCTSAGPHFNPLSRKHGGPKDEERHVGDLGNVTADKDGVADVSIEDSVISLSGDHCIIGRTLVVHEKADDLGKGGNEESTKTGNAGSRLACGVIGIAQ

SEQ ID NO: 12128 - DNA, 854 bp, Homo sapiens
gacggggtgctggtttgcgtcgtagtctcctgcagcgtctggggtttccgttgcagtcctcggaaccaggacctcggcgtggcctagcgagttatggcgacgaaggccgaaagtaatggaccagtgaaggtgtggggaagcattaaaggactgactgaaggcctgcatggattccatgttcatgagtttggagataatacagcaggctgtaccagtgcaggtcctcactttaatcctctatccagaaaacacggtgggccaaaggatgaagagaggcatgttggagacttgggcaatgtgactgctgacaaagatggtgtggccgatgtgtctattgaagattctgtgatctcactctcaggagaccattgcatcattggccgcacactggtggtccatgaaaaagcagatgacttgggcaaaggtggaaatgaagaaagtacaaagacaggaaacgctggaagtcgtttggcttgtggtgtaattgggatcgcccaataaacattcccttggatgtagtctgaggccccttaactcatctgttatcctgctagctgtagaaatgtatcctgataaacattaaacactgtaatcttaaaagtgtaattgtgtgactttttcagagttgctttaaagtacctgtagtgagaaactgatttatgatcacttggaagatttgtatagttttataaaactcagttaaaatgtctgtttcaatgacctgtattttgccagacttaaatcacagatgggtattaaacttgtcagaatttctttgtcattcaagcctgtgaataaaaaccctgtatggcacttattatgaggctattaaaagaatccaaattcaaactaaa

SEQ ID NO: 12129 - protein, 135 aa, Homo sapiens; identical to SEQ ID NO: 12127

SEQ ID NO: 12130 - DNA, 600 bp, Homo sapiens
gggtgctggtttgcgtcgtagtctcctgcagcgtctggggtttccgttgcagtcctcggaaccaggacctcggcgtggcctagcgagttatggcgacgaaggccgaaagtaatggaccagtgaaggtgtggggaagcattaaaggactgactgaaggcctgcatggattccatgttcatgagtttggagataatacagcaggctgtaccagtgcaggtcctcactttaatcctctatccagaaaacacggtgggccaaaggatgaagagaggcatgttggagacttgggcaatgtgactgctgacaaagatggtgtggccgatgtgtctattgaagattctgtgatctcactctcaggagaccattgcatcattggccgcacactggtggtccatgaaaaagcagatgacttgggcaaaggtggaaatgaagaaagtacaaagacaggaaacgctggaagtcgtttggcttgtggtgtaattgggatcgcccaataaacattcccttggatgtagtctgaggccccttaactcatctgttatcctgctagctgtagaaatgtatcctgataaacattaaacactgtaatcttaaaagtgt

SEQ ID NO: 12131 - protein, 135 aa, Homo sapiens; identical to SEQ ID NO: 12127

SEQ ID NO: 12132 - DNA, 1504 bp, Homo sapiens
gtctcctgcagcgtctggggtttccgttgcagtcctcggaaccaggacctcggcgtggcctagcgagttatggcgacgaaggccgtgtgcgtgctgaagggcgacggcccagtgcagggcatcatcaatttcgagcagaaggcaagggctgggacggaggcttgtttgcgaggccgctcccacccgctcgtccccccgcgcacctttgctaggagcgggtcgcccgccaggcctcggggccgccctggtccagcgcccggtcccggcccgtgccgcccggtcggtgccttcgcccccagcggtgcggtgcccaagtgctgagtcaccgggcgggcccgggcgcggggcgtgggaccgaggccgccgcggggctgggcctgcgcgtggcgggagcgcggggagggattgccgcgggccggggaggggcgggggcgggcgtgctgccctctgtggtccttgggccgccgccgcgggtctgtcgtggtgcctggagcggctgtgctcgtcccttgcttggccgtgttctcgttcctgagggtcccgcggacaccgagtggcgcagtgccaggcccagcccggggatggcgactgcgcctgggcccgcctggtgtcttcgcatccctctccgctttccggcttcagcgctctaggtcagggagtcttcgcttttgtacagctctaaggctaggaatggtttttatatttttaaaaggctttggaaaacaaaaatacgcaacagagaccgtttgtgtgacactttgcagggaagtttgctggcctctgttctaggtcatgattgggctgcaagggcagagaaggtagccttgaacagaggtccttttcctcctcctaagctccgggagccagaggtttaactgacccttttggggatttttgagggcagtgatcttaactttgggtgcacagttagcttatttgaagatcttactaaaaatacaccagagcccaacctccgaccaattacatcaaaacctgtcctagtgcagggaaagtaatggaccagtgaaggtgtggggaagcattaaaggactgactgaaggcctgcatggattccatgttcatgagtttggagataatacagcaggctgtaccagtgcaggtcctcactttaatcctctatccagaaaacacggtgggccaaaggatgaagagaggcatgttggagacttgggcaatgtgactgctgacaaagatggtgtggccgatgtgtctattgaagattctgtgatctcactctcaggagaccattgcatcattggccgcacactggtggtccatgaaaaagcagatgacttgggcaaaggtggaaatgaagaaagtacaaagacaggaaacgctggaagtcgtttggcttgtggtgtaattgggatcgcccaataaacattcccttggatgtagtctgaggccccttaactcatctgttatcctgctagctgtagaaatgtatcctgataaacattaaacactgtaatcttaaaagtgt

SEQ ID NO: 12133 - protein, 44 aa, Homo sapiens
MDSMFMSLEIIQQAVPVQVLTLILYPENTVGQRMKRGMLETWAM

SEQ ID NO: 12134 - DNA, 1680 bp, Homo sapiens
gtctcctgcagcgtctggggtttccgttgcagtcctcggaaccaggacctcggcgtggcctagcgagttatggcgacgaaggccgtgtgcgtgctgaagggcgacggcccagtgcagggcatcatcaatttcgagcagaaggcaagggctgggacggaggcttgtttgcgaggccgctcccacccgctcgtccccccgcgcacctttgctaggagcgggtcgcccgccaggcctcggggccgccctggtccagcgcccggtcccggcccgtgccgcccggtcggtgccttcgcccccagcggtgcggtgcccaagtgctgagtcaccgggcgggcccgggcgcggggcgtgggaccgaggccgccgcggggctgggcctgcgcgtggcgggagcgcggggagggattgccgcgggccggggaggggcgggggcgggcgtgctgccctctgtggtccttgggccgccgccgcgggtctgtcgtggtgcctggagcggctgtgctcgtcccttgcttggccgtgttctcgttcctgagggtcccgcggacaccgagtggcgcagtgccaggcccagcccggggatggcgactgcgcctgggcccgcctggtgtcttcgcatccctctccgctttccggcttcagcgctctaggtcagggagtcttcgcttttgtacagctctaaggctaggaatggtttttatatttttaaaaggctttggaaaacaaaaatacgcaacagagaccgtttgtgtgacactttgcagggaagtttgctggcctctgttctaggtcatgattgggctgcaagggcagagaaggtagccttgaacagaggtccttttcctcctcctaagctccgggagccagaggtttaactgacccttttggggatttttgagggcagtgatcttaactttgggtgcacagttagcttatttgaagatcttactaaaaatacaccagagcccaacctccgaccaattacatcaaaacctgtcctagtgcagggaaagtaatggaccagtgaaggtgtggggaagcattaaaggactgactgaaggcctgcatggattccatgttcatgagtttggagataatacagcaggctgtaccagtgcaggtcctcactttaatcctctatccagaaaacacggtgggccaaaggatgaagagaggcatgttggagacttgggcaatgtgactgctgacaaagatggtgtggccgatgtgtctattgaagattctgtgatctcactctcaggagaccattgcatcattggccgcacactggtggtccatgaaaaagcagatgacttgggcaaaggtggaaatgaagaaagtacaaagacaggaaacgctggaagtcgtttggcttgtggtgtaattgggatcgcccaataaacattcccttggatgtagtctgaggccccttaactcatctgttatcctgctagctgtagaaatgtatcctgataaacattaaacactgtaatcttaaaagtgtaattgtgtgactttttcagagttgctttaaagtacctgtagtgagaaactgatttatgatcacttggaagatttgtatagttttataaaactcagttaaaatgtctgtttcaatgacctgtattttgccagacttaaatcacagatgggtattaaacttgtcagaatttctttgtc

SEQ ID NO: 12135 - protein, 44 aa, Homo sapiens; identical to SEQ ID NO: 12133

SEQ ID NO: 12136 - DNA, 1754 bp, Homo sapiens
gtctcctgcagcgtctggggtttccgttgcagtcctcggaaccaggacctcggcgtggcctagcgagttatggcgacgaaggccgtgtgcgtgctgaagggcgacggcccagtgcagggcatcatcaatttcgagcagaaggcaagggctgggacggaggcttgtttgcgaggccgctcccacccgctcgtccccccgcgcacctttgctaggagcgggtcgcccgccaggcctcggggccgccctggtccagcgcccggtcccggcccgtgccgcccggtcggtgccttcgcccccagcggtgcggtgcccaagtgctgagtcaccgggcgggcccgggcgcggggcgtgggaccgaggccgccgcggggctgggcctgcgcgtggcgggagcgcggggagggattgccgcgggccggggaggggcgggggcgggcgtgctgccctctgtggtccttgggccgccgccgcgggtctgtcgtggtgcctggagcggctgtgctcgtcccttgcttggccgtgttctcgttcctgagggtcccgcggacaccgagtggcgcagtgccaggcccagcccggggatggcgactgcgcctgggcccgcctggtgtcttcgcatccctctccgctttccggcttcagcgctctaggtcagggagtcttcgcttttgtacagctctaaggctaggaatggtttttatatttttaaaaggctttggaaaacaaaaatacgcaacagagaccgtttgtgtgacactttgcagggaagtttgctggcctctgttctaggtcatgattgggctgcaagggcagagaaggtagccttgaacagaggtccttttcctcctcctaagctccgggagccagaggtttaactgacccttttggggatttttgagggcagtgatcttaactttgggtgcacagttagcttatttgaagatcttactaaaaatacaccagagcccaacctccgaccaattacatcaaaacctgtcctagtgcagggaaagtaatggaccagtgaaggtgtggggaagcattaaaggactgactgaaggcctgcatggattccatgttcatgagtttggagataatacagcaggctgtaccagtgcaggtcctcactttaatcctctatccagaaaacacggtgggccaaaggatgaagagaggcatgttggagacttgggcaatgtgactgctgacaaagatggtgtggccgatgtgtctattgaagattctgtgatctcactctcaggagaccattgcatcattggccgcacactggtggtccatgaaaaagcagatgacttgggcaaaggtggaaatgaagaaagtacaaagacaggaaacgctggaagtcgtttggcttgtggtgtaattgggatcgcccaataaacattcccttggatgtagtctgaggccccttaactcatctgttatcctgctagctgtagaaatgtatcctgataaacattaaacactgtaatcttaaaagtgtaattgtgtgactttttcagagttgctttaaagtacctgtagtgagaaactgatttatgatcacttggaagatttgtatagttttataaaactcagttaaaatgtctgtttcaatgacctgtattttgccagacttaaatcacagatgggtattaaacttgtcagaatttctttgtcattcaagcctgtgaataaaaaccctgtatggcacttattatgaggctattaaaagaatccaaattcaaactaaa

SEQ ID NO: 12137 - protein, 44 aa, Homo sapiens; identical to SEQ ID NO: 12133

SEQ ID NO: 12138 - DNA, 883 bp, Homo sapiens
gaggacacaggcctagagcagttaagcagcttgctggaggttcactggctagaaagtggtcagcctgggatttggacacagatttttccactcccaagtctggctgctttttacttcactgtgaggggtaaaggtaaatcagctgttttctttgttcagaaactctctccaactttgcacttttcttaaaggaaagtaatggaccagtgaaggtgtggggaagcattaaaggactgactgaaggcctgcatggattccatgttcatgagtttggagataatacagcaggctgtaccagtgcaggtcctcactttaatcctctatccagaaaacacggtgggccaaaggatgaagagaggcatgttggagacttgggcaatgtgactgctgacaaagatggtgtggccgatgtgtctattgaagattctgtgatctcactctcaggagaccattgcatcattggccgcacactggtggtaagaaacgctggaagtcgtttggcttgtggtgtaattgggatcgcccaataaacattcccttggatgtagtctgaggccccttaactcatctgttatcctgctagctgtagaaatgtatcctgataaacattaaacactgtaatcttaaaagtgtaattgtgtgactttttcagagttgctttaaagtacctgtagtgagaaactgatttatgatcacttggaagatttgtatagttttataaaactcagttaaaatgtctgtttcaatgacctgtattttgccagacttaaatcacagatgggtattaaacttgtcagaatttctttgtcattcaagcctgtgaataaaaaccctgtatggcacttattatgaggctattaaaagaatccaaattcaaactaaa

SEQ ID NO: 12139 - protein, 44 aa, Homo sapiens; identical to SEQ ID NO: 12133

SEQ ID NO: 12140 - DNA, 1043 bp, Homo sapiens
ataatggcgatagctttctggagttcatatggtatactacttgtaaatatgtgctaagataattccgtgtttcccccacctttgcttttgaacttgctgactcatctaaacccctgctcccaaatgctggaatgcttttacttcctgggcttaaaggaattgacaaatggggacacttaaaacgatttggttttgtagcatttattgaatatagaactaatacaagtgccaaaggggaactaatacaggaaatgtcatgaacagtactgtcaaccactagcaaaatcaatcatcattgtgaaacataggaagcttctgtagataaaaaaaaaaattgatactgaaaactagtcgagactccatttatatgtgtatgttttctgaaagcctttcagaaaaatattaaatttaaggacaagatttttatatcagaggccttgggacatagctttgttagctatgccagtaattaacaggcataactcagtaactgagagtttaccctttggtacttctgaaatcaggtgcagccccatctttcttcccagagcattagtgtgtagacgtgaagccttgtttgaagagctgtatttagaatgcctagctacttgtttgcaaatttgtgtctactcagtcaagttttaatttagctcatgaactaccttgatgtttagtggcatcagccctaatccatctgatgctttttcattattaggcatgttggagacttgggcaatgtgactgctgacaaagatggtgtggccgatgtgtctattgaagattctgtgatctcactctcaggagaccattgcatcattggccgcacactggtggtccatgaaaaagcagatgacttgggcaaaggtggaaatgaagaaagtacaaagacaggaaacgctggaagtcgtttggcttgtggtgtaattgggatcgcccaataaacattcccttggatgtagtctgaggccccttaactcatctgttatcctgctagctgtagaaatgtatcctgataaacattaaacactgtaatcttaaaagtg

SEQ ID NO: 12141 - protein, 61 aa, Homo sapiens
MPVINRHNSVTESLPFGTSEIRCSPIFLPRALVCRREALFEELYLECLATCLQICVYSVKF

SEQ ID NO: 12142 - DNA, 1294 bp, Homo sapiens
ataatggcgatagctttctggagttcatatggtatactacttgtaaatatgtgctaagataattccgtgtttcccccacctttgcttttgaacttgctgactcatctaaacccctgctcccaaatgctggaatgcttttacttcctgggcttaaaggaattgacaaatggggacacttaaaacgatttggttttgtagcatttattgaatatagaactaatacaagtgccaaaggggaactaatacaggaaatgtcatgaacagtactgtcaaccactagcaaaatcaatcatcattgtgaaacataggaagcttctgtagataaaaaaaaaaattgatactgaaaactagtcgagactccatttatatgtgtatgttttctgaaagcctttcagaaaaatattaaatttaaggacaagatttttatatcagaggccttgggacatagctttgttagctatgccagtaattaacaggcataactcagtaactgagagtttaccctttggtacttctgaaatcaggtgcagccccatctttcttcccagagcattagtgtgtagacgtgaagccttgtttgaagagctgtatttagaatgcctagctacttgtttgcaaatttgtgtctactcagtcaagttttaatttagctcatgaactaccttgatgtttagtggcatcagccctaatccatctgatgctttttcattattaggcatgttggagacttgggcaatgtgactgctgacaaagatggtgtggccgatgtgtctattgaagattctgtgatctcactctcaggagaccattgcatcattggccgcacactggtggtccatgaaaaagcagatgacttgggcaaaggtggaaatgaagaaagtacaaagacaggaaacgctggaagtcgtttggcttgtggtgtaattgggatcgcccaataaacattcccttggatgtagtctgaggccccttaactcatctgttatcctgctagctgtagaaatgtatcctgataaacattaaacactgtaatcttaaaagtgtaattgtgtgactttttcagagttgctttaaagtacctgtagtgagaaactgatttatgatcacttggaagatttgtatagttttataaaactcagttaaaatgtctgtttcaatgacctgtattttgccagacttaaatcacagatgggtattaaacttgtcagaatttctttgtcattcaagcctgtgaataaaaaccctgtatggcacttattatgaggctattaaaagaatccaaattcaaactaaa

SEQ ID NO: 12143 - protein, 61 aa, Homo sapiens; identical to SEQ ID NO: 12141

SEQ ID NO: 12144 - DNA, 1804 bp, Homo sapiens
tggtcttcttggcgcccggcccggtctcatcccactccagcgccctccaggaatgcccccacctcacttacagcggttccctttgatgccgccccgtcccatgccaccgcacatgatgcacagaggcccaccgccaggaccagggggctttgcgatgcctccacctcatggaatgaaaggtcccttcccaccgcatggcccctttgttaggcctggtggaatgccagggctcgggggcccagggccaggcccagggggtcctgaagacagagacggaaggcaacagccgccgcagcagccacagcagcagccacagccgcaggcgccccagcaaccacagcagcagcagcagcagcagccaccaccatcacaacagcctccaccaacacagcagcagccacagcagtttagaaatgataacaggcagcagttcaattcaggtagagaccaagaaaggtttggaagaagatcttttggaaatagggtggaaaatgaccgggaacggtatgggaaccgtaatgatgatagagataataacgctctagtgggcatcgagacagagagagagattctagagatagagagtctcgtagagagaaggaagaagcccgaggaaaggaaaagcctgaggtgacagacagggcaggtggtaacaaaaccgttgaacctcccattagccaagtgggaaatgtagacactgcttcagaacttgagaagggggtgtctgaggctgcagtcctaaagccttctgaagagttacctgctgaggctacctcatccgttgaacccgaaaaggattctggctcagcagcagaggctcctcgttagagactggaatttgtgaaaatgtgacagtgacacttcctggagtgtagagcttgaggtgtacagatgctgtattatatccgctcccgctgtactgcagccccgcgccagctggtggggaactgtaagcaatttgattgcttcccttctatttaaaaatagccacaaaataacaaaaaatactgaaaatatgaataaatattaccctttttgctgtaactttttaaaagttttgactttaaaaagtttacaaatcgtaattagaagtgctctctatttttttttttttttttaatttaagacaaggtaacggtgaaagctcctcaaaacaatagggatgtttttaataaactctattttcgtaacaaactttaatgtgtgctattcttcctacactgcattaaggtggaaaaggattgttcaccgtcaaagtttgagctgttaatactgtattggagtctaaattagacttatttgatgaaaatagacattttatgtagttattctcactttcatatgtaatacttttgatttttagtgctcagtcataaggtaaaggttagttgttttaatgtcaattgaaaagctgtgtttgcaattcaatcgaggttttctttttttttccattggctttgtggtatatgttgccctaatttgtaaggagattttgctgggtgaaaagttggatcccagtgttacacgttgtactataaattatcggactgcctgggtattacgttagaaggttgcgtgtgtgtgtgtgtgtgtctgtggttttttttttttccaaccatcccattgaatttttcaaaagggtaaaagaatcaaggttaacatttgcaacctaagagctttttgttgtgtttgaggacttcagtgcagcctactactgtttccttatataagccttgcctgttgcctttcttcaccagcgttttaattcccctgcggggcagaggtaaacgaacttttcccccac

SEQ ID NO: 12145 - protein, 193 aa, Homo sapiens
MPPPHLQRFPLMPPRPMPPHMMHRGPPPGPGGFAMPPPHGMKGPFPPHGPFVRPGGMPGLGGPGPGPGGPEDRDGRQQPPQQPQQQPQPQAPQQPQQQQQQQPPPSQQPPPTQQQPQQFRNDNRQQFNSGRDQERFGRRSFGNRVENDRERYGNRNDDRDNNALVGIETEREILEIESLVERRKKPEERKSLR

SEQ ID NO: 12146 - DNA, 4802 bp, Homo sapiens
gctggagagagggagagagaggcccgcccgctcgccggccgggccagtgtgagccagtgcgtgagggcgcggggggccgtgtcagcgagacgcagagcgcagccgccaccaccaaacggacatgttgaagaccagcgctgccgccgcctccttttcctcatcctgcgaacgggactgagagggggcccgccacctctccgcctctgcctcggccgcccgcctcgccgcttcgggcgcagcctcttcctgcccgggcctcggactccgccgctcgtcgcctccccccggccaccaggcccggctggtttcccagccccgctccgccgcggcgcgaggtctatgtgaccggcgggcccggagcagccgccgccgcagcgcgaacatggacgccgtcaacgccttcaaccaggagctcttttcgcttatggatatgaaacctcccatctctagagccaagatgattctcatcactaaagctgctattaaagctattaagctttataagcatgtagttcaaatagtagaaaagttcatcaaaaagtgtaaaccagaatacaaggttccgggattatatgtaattgactcaattgtgcgacagtctcgtcatcagtttggaactgataaagatgtttttgggccaagattctctaaaaacataactgccacattccaatatttatatctttgtccatctgaagataagagtaaaatagttcgtgtgctgaacctttggcaaaaaaatggagtgttcaaaattgaaattattcaacctcttttggacatggcagcgggaaccagtaatgcagccccagtagcagaaaatgttaccaataatgaaggctcacctccacctccagtaaaagtttcttctgaacctcccacacaagccactccaaactccgtcccagctgtaccacagttgcccagctctgatgcttttgctgctgtggctcagctgtttcagacaactcaaggccaacagcttcagcagatccttcagacttttcaacagcctccaaaaccacagtctcctgcccttgacaatgctgtgatggctcaggttcaggctatcacagctcagttaaagacaactcctacacaaccatctgaacaaaaagctgctttccccccacctgaacagaaaactgcatttgacaagaagttgcttgatagatttgactatgatgatgagccagaagctgtggaagaatcaaagaaagaggataccactgccgtcaccacgacagcacctgctgccgcagtaccccctgcacccaccgccaccgtgcctgctgctgctgcacccgctgctgcctctcctcctcctccacaggcaccatttggctttcctggagatggcatgcagcagccagcatacacacagcatcaaaatatggatcagtttcagccacgaatgatgggaatacaacaggatccaatgcaccatcaggttccacttcctcctaatggacaaatgccaggatttggacttcttcctacacctccatttcctcccatggctcagcctgtgattcctccaactccaccagtgcagcagcctttccaagcttcttttcaggcacaaaatgaaccacttacacagaagccgcatcagcaggaaatggaagtagaacaaccttgtattcaagaggttaagcgacatatgtctgataacagaaagtcaagatctaggtcagcatccaggtcaccaaaaaggaggcgatctagatctggttctagatctcgaaggtctcggcatcgacgttctcgatctcggtccagggatagacgccgacattctccccgatctcgatctcaagaaagacgggatcgagaaaaagagagagaacgtcgacaaaaaggcctccctcaagtgaaaccggaaactgcaagtgtttgcagtactaccctctgggtggggcagctggacaaaagaactactcagcaggatgttgccagtctcttggaagagtttggtccaattgaatcaattaatatgattcctcccaggggttgtgcctatattgttatggttcataggcaagatgcctatcgtgccctgcagaaactgagccgaggaaactataaagtgaaccagaaatccataaagattgcctgggccttaaacaaaggaataaaggcagattataagcagtattgggatgtagaacttggtgttacttatattccatgggacaaagtcaagcctgaggaactggagagtttttgtgaaggaggaatgttggacagtgacacacttaacccagattggaaaggaattcctaagaagcctgaaaatgaagttgctcaaaatggaggtgctgaaacctcacacacagaaccagtatcacccatacctaaaccattacctgtgcctgtccctcctattcctgttcctgcacctataacagtgccacctccacaggtcccaccacatcaaccgggtccacctgtagttggtgctctccagccgcctgctttcacgcctcctctgggaataccgcctccaggctttggtcctggtgttcctcctccccctcctcctccaccatttttgcgcccaggattcaacccaatgcatttaccaccaggttttctgcctcctggacccccacctcctataactccaccagtatccattcctcctcctcacactccaccaataagcatcccaaactctactatcgctggtataaatgaagacactacaaaagacttatctattggaaatcccattccaacagtggtgtctggggctagaggaaacgccgagtctggtgacagcgtgaaaatgtatggctctgccgtgccacctgctgcacccacgaatctgcccacccctcctgtaacccagcctgtttcacttcttggcactcaaggagttgcccctggtcctgtaattggacttcaggcaccatctactggtcttcttggcgcccggcccggtctcatcccactccagcgccctccaggaatgcccccacctcacttacagcggttccctttgatgccgccccgtcccatgccaccgcacatgatgcacagaggcccaccgccaggaccagggggctttgcgatgcctccacctcatggaatgaaaggtcccttcccaccgcatggcccctttgttaggcctggtggaatgccagggctcgggggcccagggccaggcccagggggtcctgaagacagagacggaaggcaacagccgccgcagcagccacagcagcagccacagccgcaggcgccccagcaaccacagcagcagcagcagcagcagccaccaccatcacaacagcctccaccaacacagcagcagccacagcagtttagaaatgataacaggcagcagttcaattcaggtagagaccaagaaaggtttggaagaagatcttttggaaatagggtggaaaatgaccgggaacggtatgggaaccgtaatgatgatagagataatagtaaccgtgacaggagagagtggggaaggaggagccctgaccgggacaggcacagagacttggaagagagaaatagacgctctagtgggcatcgagacagagagagagattctagagatagagagtctcgtagagagaaggaagaagcccgaggaaaggaaaagcctgaggtgacagacagggcaggtggtaacaaaaccgttgaacctcccattagccaagtgggaaatgtagacactgcttcagaacttgagaagggggtgtctgaggctgcagtcctaaagccttctgaagagttacctgctgaggctacctcatccgttgaacccgaaaaggattctggctcagcagcagaggctcctcgttagagactggaatttgtgaaaatgtgacagtgacacttcctggagtgtagagcttgaggtgtacagatgctgtattatatccgctcccgctgtactgcagccccgcgccagctggtggggaactgtaagcaatttgattgcttcccttctatttaaaaatagccacaaaataacaaaaaatactgaaaatatgaataaatattaccctttttgctgtaactttttaaaagttttgactttaaaaagtttacaaatcgtaattagaagtgctctctatttttttttttttttttaatttaagacaaggtaacggtgaaagctcctcaaaacaatagggatgtttttaataaactctattttcgtaacaaactttaatgtgtgctattcttcctacactgcattaaggtggaaaaggattgttcaccgtcaaagtttgagctgttaatactgtattggagtctaaattagacttatttgatgaaaatagacattttatgtagttattctcactttcatatgtaatacttttgatttttagtgctcagtcataaggtaaaggttagttgttttaatgtcaattgaaaagctgtgtttgcaattcaatcgaggttttctttttttttccattggctttgtggtatatgttgccctaatttgtaaggagattttgctgggtgaaaagttggatcccagtgttacacgttgtactataaattatcggactgcctgggtattacgttagaaggttgcgtgtgtgtgtgtgtgtgtctgtggttttttttttttccaaccatcccattgaatttttcaaaagggtaaaagaatcaaggttaacatttgcaacctaagagctttttgttgtgtttgaggacttcagtgcagcctactactgtttccttatataagccttgcctgttgcctttcttcaccagcgttttaattcccctgcggggcagaggtaaacgaacttttcccccac

SEQ ID NO: 12147 - protein, 1147 aa, Homo sapiens; identical to SEQ ID NO: 2029

SEQ ID NO: 12148 - DNA, 1191 bp, Homo sapiens
tggtcttcttggcgcccggcccggtctcatcccactccagcgccctccaggaatgcccccacctcacttacagcggttccctttgatgccgccccgtcccatgccaccgcacatgatgcacagaggcccaccgccaggaccagggggctttgcgatgcctccacctcatggaatgaaaggtcccttcccaccgcatggcccctttgttaggcctggtggaatgccagggctcgggggcccagggccaggcccagggggtcctgaagacagagacggaaggcaacagccgccgcagcagccacagcagcagccacagccgcaggcgccccagcaaccacagcagcagcagcagcagcagccaccaccatcacaacagcctccaccaacacagcagcagccacagcagtttagaaatgataacaggcagcagttcaattcaggtagagaccaagaaaggtttggaagaagatcttttggaaatagggtggaaaatgaccgggaacggtatgggaaccgtaatgatgatagagataataacgctctagtgggcatcgagacagagagagagattctagagatagagagtctcgtagagagaaggaagaagcccgaggaaaggaaaagcctgaggtgacagacagggcaggtggtaacaaaaccgttgaacctcccattagccaagtgggaaatgtagacactgcttcagaacttgagaagggggtgtctgaggctgcagtcctaaagccttctgaagagttacctgctgaggctacctcatccgttgaacccgaaaaggattctggctcagcagcagaggctcctcgttagagactggaatttgtgaaaatgtgacagtgacacttcctggagtgtagagcttgaggtgtacagatgctgtattatatccgctcccgctgtactgcagccccgcgccagctggtggggaactgtaagcaatttgattgcttcccttctatttaaaaatagccacaaaataacaaaaaatactgaaaatatgaataaatattaccctttttgctgtaactttttaaaagttttgactttaaaaagtttacaaatcgtaattagaagtgctctctatttttttttttttttttaatttaagacaaggtaacggtgaaagctcctcaaaacaatagggatgtttttaataaactctattttcgtaac

SEQ ID NO: 12149 - protein, 193 aa, Homo sapiens; identical to SEQ ID NO: 12145

SEQ ID NO: 12150 - DNA, 4190 bp, Homo sapiens
cgctggagagagggagagagaggcccgcccgctcgccggccgggccagtgtgagccagtgcgtgagggcgcggggggccgtgtcagcgagacgcagagcgcagccgccaccaccaaacggacatgttgaagaccagcgctgccgccgcctccttttcctcatcctgcgaacgggactgagagggggcccgccacctctccgcctctgcctcggccgcccgcctcgccgcttcgggcgcagcctcttcctgcccgggcctcggactccgccgctcgtcgcctccccccggccaccaggcccggctggtttcccagccccgctccgccgcggcgcgaggtctatgtgaccggcgggcccggagcagccgccgccgcagcgcgaacatggacgccgtcaacgccttcaaccaggagctcttttcgcttatggatatgaaacctcccatctctagagccaagatgattctcatcactaaagctgctattaaagctattaagctttataagcatgtagttcaaatagtagaaaagttcatcaaaaagtgtaaaccagaatacaaggttccgggattatatgtaattgactcaattgtgcgacagtctcgtcatcagtttggaactgataaagatgtttttgggccaagattctctaaaaacataactgccacattccaatatttatatctttgtccatctgaagataagagtaaaatagttcgtgtgctgaacctttggcaaaaaaatggagtgttcaaaattgaaattattcaacctcttttggacatggcagcgggaaccagtaatgcagccccagtagcagaaaatgttaccaataatgaaggctcacctccacctccagtaaaagtttcttctgaacctcccacacaagccactccaaactccgtcccagctgtaccacagttgcccagctctgatgcttttgctgctgtggctcagctgtttcagacaactcaaggccaacagcttcagcagatccttcagacttttcaacagcctccaaaaccacagtctcctgcccttgacaatgctgtgatggctcaggttcaggctatcacagctcagttaaagacaactcctacacaaccatctgaacaaaaagctgctttccccccacctgaacagaaaactgcatttgacaagaagttgcttgatagatttgactatgatgatgagccagaagctgtggaagaatcaaagaaagaggataccactgccgtcaccacgacagcacctgctgccgcagtaccccctgcacccaccgccaccgtgcctgctgctgctgcacccgctgctgcctctcctcctcctccacaggcaccatttggctttcctggagatggcatgcagcagccagcatacacacagcatcaaaatatggatcagtttcagccacgaatgatgggaatacaacaggatccaatgcaccatcaggttccacttcctcctaatggacaaatgccaggatttggacttcttcctacacctccatttcctcccatggctcagcctgtgattcctccaactccaccagtgcagcagcctttccaagcttcttttcaggcacaaaatgaaccacttacacagaagccgcatcagcaggaaatggaagtagaacaaccttgtattcaagaggttaagcgacatatgtctgataacagaaagtcaagatctaggtcagcatccaggtcaccaaaaaggaggcgatctagatctggttctagatctcgaaggtctcggcatcgacgttctcgatctcggtccagggatagacgccgacattctccccgatctcgatctcaagaaagacgggatcgagaaaaagagagagaacgtcgacaaaaaggcctccctcaagtgaaaccggaaactgcaagtgtttgcagtactaccctctgggtggggcagctggacaaaagaactactcagcaggatgttgccagtctcttggaagagtttggtccaattgaatcaattaatatgattcctcccaggggttgtgcctatattgttatggttcataggcaagatgcctatcgtgccctgcagaaactgagccgaggaaactataaagtgaaccagaaatccataaagattgcctgggccttaaacaaaggaataaaggcagattataagcagtattgggatgtagaacttggtgttacttatattccatgggacaaagtcaagcctgaggaactggagagtttttgtgaaggaggaatgttggacagtgacacacttaacccagattggaaaggaattcctaagaagcctgaaaatgaagttgctcaaaatggaggtgctgaaacctcacacacagaaccagtatcacccatacctaaaccattacctgtgcctgtccctcctattcctgttcctgcacctataacagtgccacctccacaggtcccaccacatcaaccgggtccacctgtagttggtgctctccagccgcctgctttcacgcctcctctgggaataccgcctccaggctttggtcctggtgttcctcctccccctcctcctccaccatttttgcgcccaggattcaacccaatgcatttaccaccaggttttctgcctcctggacccccacctcctataactccaccagtatccattcctcctcctcacactccaccaataagcatcccaaactctactatcgctggtataaatgaagacactacaaaagacttatctattggaaatcccattccaacagtggtgtctggggctagaggaaacgccgagtctggtgacagcgtgaaaatgtatggctctgccgtgccacctgctgcacccacgaatctgcccacccctcctgtaacccagcctgtttcacttcttggcactcaaggagttgcccctggtcctgtaattggacttcaggcaccatctactggtcttcttggcgcccggcccggtctcatcccactccagcgccctccaggaatgcccccacctcacttacagcggttccctttgatgccgccccgtcccatgccaccgcacatgatgcacagaggcccaccgccaggaccagggggctttgcgatgcctccacctcatggaatgaaaggtcccttcccaccgcatggcccctttgttaggcctggtggaatgccagggctcgggggcccagggccaggcccagggggtcctgaagacagagacggaaggcaacagccgccgcagcagccacagcagcagccacagccgcaggcgccccagcaaccacagcagcagcagcagcagcagccaccaccatcacaacagcctccaccaacacagcagcagccacagcagtttagaaatgataacaggcagcagttcaattcaggtagagaccaagaaaggtttggaagaagatcttttggaaatagggtggaaaatgaccgggaacggtatgggaaccgtaatgatgatagagataatagtaaccgtgacaggagagagtggggaaggaggagccctgaccgggacaggcacagagacttggaagagagaaatagacgctctagtgggcatcgagacagagagagagattctagagatagagagtctcgtagagagaaggaagaagcccgaggaaaggaaaagcctgaggtgacagacagggcaggtggtaacaaaaccgttgaacctcccattagccaagtgggaaatgtagacactgcttcagaacttgagaagggggtgtctgaggctgcagtcctaaagccttctgaagagttacctgctgaggctacctcatccgttgaacccgaaaaggattctggctcagcagcagaggctcctcgttagagactggaatttgtgaaaatgtgacagtgacacttcctggagtgtagagcttgaggtgtacagatgctgtattatatccgctcccgctgtactgcagccccgcgccagctggtggggaactgtaagcaatttgattgcttcccttctatttaaaaatagccacaaaataacaaaaaatactgaaaatatgaataaatattaccctttttgctgtaactttttaaaagttttgactttaaaaagtttacaaatcgtaattagaagtgctctctatttttttttttttttttaatttaagacaaggtaacggtgaaagctcctcaaaacaatagggatgtttttaataaactctattttcgtaac

SEQ ID NO: 12151 - protein, 1147 aa, Homo sapiens; identical to SEQ ID NO: 2029

SEQ ID NO: 12152 - DNA, 3974 bp, Homo sapiens
gctggagagagggagagagaggcccgcccgctcgccggccgggccagtgtgagccagtgcgtgagggcgcggggggccgtgtcagcgagacgcagagcgcagccgccaccaccaaacggacatgttgaagaccagcgctgccgccgcctccttttcctcatcctgcgaacgggactgagagggggcccgccacctctccgcctctgcctcggccgcccgcctcgccgcttcgggcgcagcctcttcctgcccgggcctcggactccgccgctcgtcgcctccccccggccaccaggcccggctggtttcccagccccgctccgccgcggcgcgaggtctatgtgaccggcgggcccggagcagccgccgccgcagcgcgaacatggacgccgtcaacgccttcaaccaggagctcttttcgcttatggatatgaaacctcccatctctagagccaagatgattctcatcactaaagctgctattaaagctattaagctttataagcatgtagttcaaatagtagaaaagttcatcaaaaagtgtaaaccagaatacaaggttccgggattatatgtaattgactcaattgtgcgacagtctcgtcatcagtttggaactgataaagatgtttttgggccaagattctctaaaaacataactgccacattccaatatttatatctttgtccatctgaagataagagtaaaatagttcgtgtgctgaacctttggcaaaaaaatggagtgttcaaaattgaaattattcaacctcttttggacatggcagcgggaaccagtaatgcagccccagtagcagaaaatgttaccaataatgaaggctcacctccacctccagtaaaagtttcttctgaacctcccacacaagccactccaaactccgtcccagctgtaccacagttgcccagctctgatgcttttgctgctgtggctcagctgtttcagacaactcaaggccaacagcttcagcagatccttcagacttttcaacagcctccaaaaccacagtctcctgcccttgacaatgctgtgatggctcaggttcaggctatcacagctcagttaaagacaactcctacacaaccatctgaacaaaaagctgctttccccccacctgaacagaaaactgcatttgacaagaagttgcttgatagatttgactatgatgatgagccagaagctgtggaagaatcaaagaaagaggataccactgccgtcaccacgacagcacctgctgccgcagtaccccctgcacccaccgccaccgtgcctgctgctgctgcacccgctgctgcctctcctcctcctccacaggcaccatttggctttcctggagatggcatgcagcagccagcatacacacagcatcaaaatatggatcagtttcagccacgaatgatgggaatacaacaggatccaatgcaccatcaggttccacttcctcctaatggacaaatgccaggatttggacttcttcctacacctccatttcctcccatggctcagcctgtgattcctccaactccaccagtgcagcagcctttccaagcttcttttcaggcacaaaatgaaccacttacacagaagccgcatcagcaggaaatggaagtagaacaaccttgtattcaagaggttaagcgacatatgtctgataacagaaagtcaagatctaggtcagcatccaggtcaccaaaaaggaggcgatctagatctggttctagatctcgaaggtctcggcatcgacgttctcgatctcggtccagggatagacgccgacattctccccgatctcgatctcaagaaagacgggatcgagaaaaagagagagaacgtcgacaaaaaggcctccctcaagtgaaaccggaaactgcaagtgtttgcagtactaccctctgggtggggcagctggacaaaagaactactcagcaggatgttgccagtctcttggaagagtttggtccaattgaatcaattaatatgattcctcccaggggttgtgcctatattgttatggttcataggcaagatgcctatcgtgccctgcagaaactgagccgaggaaactataaagtgaaccagaaatccataaagattgcctgggccttaaacaaaggaataaaggcagattataagcagtattgggatgtagaacttggtgttacttatattccatgggacaaagtcaagcctgaggaactggagagtttttgtgaaggaggaatgttggacagtgacacacttaacccagattggaaaggaattcctaagaagcctgaaaatgaagttgctcaaaatggaggtgctgaaacctcacacacagaaccagtatcacccatacctaaaccattacctgtgcctgtccctcctattcctgttcctgcacctataacagtgccacctccacaggtcccaccacatcaaccgggtccacctgtagttggtgctctccagccgcctgctttcacgcctcctctgggaataccgcctccaggctttggtcctggtgttcctcctccccctcctcctccaccatttttgcgcccaggattcaacccaatgcatttaccaccaggttttctgcctcctggacccccacctcctataactccaccagtatccattcctcctcctcacactccaccaataagcatcccaaacttggtgtctggggctagaggaaacgccgagtctggtgacagcgtgaaaatgtatggctctgccgtgccacctgctgcacccacgaatctgcccacccctcctgtaacccagcctgtttcacttcttggcactcaaggagttgcccctggtcctgtaattggacttcaggcaccatctactggtcttcttggcgcccggcccggtctcatcccactccagcgccctccaggaatgcccccacctcacttacagcggttccctttgatgccgccccgtcccatgccaccgcacatgatgcacagaggcccaccgccaggaccagggggctttgcgatgcctccacctcatggaatgaaaggtcccttcccaccgcatggcccctttgttaggcctggtggaatgccagggctcgggggcccagggccaggcccagggggtcctgaagacagagacggaaggcaacagccgccgcagcagccacagcagcagccacagccgcaggcgccccagcaaccacagcagcagcagcagcagcagccaccaccatcacaacagcctccaccaacacagcagcagccacagcagtttagaaatgataacaggcagcagttcaattcaggtagagaccaagaaaggtttggaagaagatcttttggaaatagggtggaaaatgaccgggaacggtatgggaaccgtaatgatgatagagataatagtaaccgtgacaggagagagtggggaaggaggagccctgaccgggacaggcacagagacttggaagagagaaatagacgctctagtgggcatcgagacagagagagagattctagagatagagagtctcgtagagagaaggaagaagcccgaggaaaggaaaagcctgaggtgacagacagggcaggtggtaacaaaaccgttgaacctcccattagccaagtgggaaatgtagacactgcttcagaacttgagaagggggtgtctgaggctgcagtcctaaagccttctgaagagttacctgctgaggctacctcatccgttgaacccgaaaaggattctggctcagcagcagaggctcctcgttagagactggaatttgtgaaaatgtgacagtgacacttcctggagtgtagagcttgaggtgtacagatgctgtattatatccgctcccgctgtactgcagccccgcgccagctggtggggaactgtaagcaatttgattgcttcccttctatttaaaaatagccacaaaataacaaaaaatactgaaaatatgaataaatattaccctttttgctgt

SEQ ID NO: 12153 - protein, 1125 aa, Homo sapiens
MDAVNAFNQELFSLMDMKPPISRAKMILITKAAIKAIKLYKHVVQIVEKFIKKCKPEYKVPGLYVIDSIVRQSRHQFGTDKDVFGPRFSKNITATFQYLYLCPSEDKSKIVRVLNLWQKNGVFKIEIIQPLLDMAAGTSNAAPVAENVTNNEGSPPPPVKVSSEPPTQATPNSVPAVPQLPSSDAFAAVAQLFQTTQGQQLQQILQTFQQPPKPQSPALDNAVMAQVQAITAQLKTTPTQPSEQKAAFPPPEQKTAFDKKLLDRFDYDDEPEAVEESKKEDTTAVTTTAPAAAVPPAPTATVPAAAAPAAASPPPPQAPFGFPGDGMQQPAYTQHQNMDQFQPRMMGIQQDPMHHQVPLPPNGQMPGFGLLPTPPFPPMAQPVIPPTPPVQQPFQASFQAQNEPLTQKPHQQEMEVEQPCIQEVKRHMSDNRKSRSRSASRSPKRRRSRSGSRSRRSRHRRSRSRSRDRRRHSPRSRSQERRDREKERERRQKGLPQVKPETASVCSTTLWVGQLDKRTTQQDVASLLEEFGPIESINMIPPRGCAYIVMVHRQDAYRALQKLSRGNYKVNQKSIKIAWALNKGIKADYKQYWDVELGVTYIPWDKVKPEELESFCEGGMLDSDTLNPDWKGIPKKPENEVAQNGGAETSHTEPVSPIPKPLPVPVPPIPVPAPITVPPPQVPPHQPGPPVVGALQPPAFTPPLGIPPPGFGPGVPPPPPPPPFLRPGFNPMHLPPGFLPPGPPPPITPPVSIPPPHTPPISIPNLVSGARGNAESGDSVKMYGSAVPPAAPTNLPTPPVTQPVSLLGTQGVAPGPVIGLQAPSTGLLGARPGLIPLQRPPGMPPPHLQRFPLMPPRPMPPHMMHRGPPPGPGGFAMPPPHGMKGPFPPHGPFVRPGGMPGLGGPGPGPGGPEDRDGRQQPPQQPQQQPQPQAPQQPQQQQQQQPPPSQQPPPTQQQPQQFRNDNRQQFNSGRDQERFGRRSFGNRVENDRERYGNRNDDRDNSNRDRREWGRRSPDRDRHRDLEERNRRSSGHRDRERDSRDRESRREKEEARGKEKPEVTDRAGGNKTVEPPISQVGNVDTASELEKGVSEAAVLKPSEELPAEATSSVEPEKDSGSAAEAPR

SEQ ID NO: 12154 - DNA, 4060 bp, Homo sapiens
cgggccgctgccgccatcccgctggagagagggagagagaggcccgcccgctcgccggccgggccagtgtgagccagtgcgtgagggcgcggggggccgtgtcagcgagacgcagagcgcagccgccaccaccaaacggacatgttgaagaccagcgctgccgccgcctccttttcctcatcctgcgaacgggactgagagggggcccgccacctctccgcctctgcctcggccgcccgcctcgccgcttcgggcgcagcctcttcctgcccgggcctcggactccgccgctcgtcgcctccccccggccaccaggcccggctggtttcccagccccgctccgccgcggcgcgaggtctatgtgaccggcgggcccggagcagccgccgccgcagcgcgaacatggacgccgtcaacgccttcaaccaggagctcttttcgcttatggatatgaaacctcccatctctagagccaagatgattctcatcactaaagctgctattaaagctattaagctttataagcatgtagttcaaatagtagaaaagttcatcaaaaagtgtaaaccagaatacaaggttccgggattatatgtaattgactcaattgtgcgacagtctcgtcatcagtttggaactgataaagatgtttttgggccaagattctctaaaaacataactgccacattccaatatttatatctttgtccatctgaagataagagtaaaatagttcgtgtgctgaacctttggcaaaaaaatggagtgttcaaaattgaaattattcaacctcttttggacatggcagcgggaaccagtaatgcagccccagtagcagaaaatgttaccaataatgaaggctcacctccacctccagtaaaagtttcttctgaacctcccacacaagccactccaaactccgtcccagctgtaccacagttgcccagctctgatgcttttgctgctgtggctcagctgtttcagacaactcaaggccaacagcttcagcagatccttcagacttttcaacagcctccaaaaccacagtctcctgcccttgacaatgctgtgatggctcaggttcaggctatcacagctcagttaaagacaactcctacacaaccatctgaacaaaaagctgctttccccccacctgaacagaaaactgcatttgacaagaagttgcttgatagatttgactatgatgatgagccagaagctgtggaagaatcaaagaaagaggataccactgccgtcaccacgacagcacctgctgccgcagtaccccctgcacccaccgccaccgtgcctgctgctgctgcacccgctgctgcctctcctcctcctccacaggcaccatttggctttcctggagatggcatgcagcagccagcatacacacagcatcaaaatatggatcagtttcagccacgaatgatgggaatacaacaggatccaatgcaccatcaggttccacttcctcctaatggacaaatgccaggatttggacttcttcctacacctccatttcctcccatggctcagcctgtgattcctccaactccaccagtgcagcagcctttccaagcttcttttcaggcacaaaatgaaccacttacacagaagccgcatcagcaggaaatggaagtagaacaaccttgtattcaagaggttaagcgacatatgtctgataacagaaagtcaagatctaggtcagcatccaggtcaccaaaaaggaggcgatctagatctggttctagatctcgaaggtctcggcatcgacgttctcgatctcggtccagggatagacgccgacattctccccgatctcgatctcaagaaagacgggatcgagaaaaagagagagaacgtcgacaaaaaggcctccctcaagtgaaaccggaaactgcaagtgtttgcagtactaccctctgggtggggcagctggacaaaagaactactcagcaggatgttgccagtctcttggaagagtttggtccaattgaatcaattaatatgattcctcccaggggttgtgcctatattgttatggttcataggcaagatgcctatcgtgccctgcagaaactgagccgaggaaactataaagtgaaccagaaatccataaagattgcctgggccttaaacaaaggaataaaggcagattataagcagtattgggatgtagaacttggtgttacttatattccatgggacaaagtcaagcctgaggaactggagagtttttgtgaaggaggaatgttggacagtgacacacttaacccagattggaaaggaattcctaagaagcctgaaaatgaagttgctcaaaatggaggtgctgaaacctcacacacagaaccagtatcacccatacctaaaccattacctgtgcctgtccctcctattcctgttcctgcacctataacagtgccacctccacaggtcccaccacatcaaccgggtccacctgtagttggtgctctccagccgcctgctttcacgcctcctctgggaataccgcctccaggctttggtcctggtgttcctcctccccctcctcctccaccatttttgcgcccaggattcaacccaatgcatttaccaccaggttttctgcctcctggacccccacctcctataactccaccagtatccattcctcctcctcacactccaccaataagcatcccaaactctactatcgctggtataaatgaagacactacaaaagacttatctattggaaatcccattccaacagtggtgtctggggctagaggaaacgccgagtctggtgacagcgtgaaaatgtatggctctgccgtgccacctgctgcacccacgaatctgcccacccctcctgtaacccagcctgtttcacttcttggcactcaaggagttgcccctggtcctgtaattggacttcaggcaccatctactggtcttcttggcgcccggcccggtctcatcccactccagcgccctccaggaatgcccccacctcacttacagcggttccctttgatgccgccccgtcccatgccaccgcacatgatgcacagaggcccaccgccaggaccagggggctttgcgatgcctccacctcatggaatgaaaggtcccttcccaccgcatggcccctttgttaggcctggtggaatgccagggctcgggggcccagggccaggcccagggggtcctgaagacagagacggaaggcaacagccgccgcagcagccacagcagcagccacagccgcaggcgccccagcaaccacagcagcagcagcagcagcagccaccaccatcacaacagcctccaccaacacagcagcagccacagcagtttagaaatgataacaggcagcagttcaattcaggtagagaccaagaaaggtttggaagaagatcttttggaaatagggtggaaaatgaccgggaacggtatgggaaccgtaatgatgatagagataatagtaaccgtgacaggagagagtggggaaggaggagccctgaccgggacaggcacagagacttggaagagagaaatagacgctctagtgggcatcgagacagagagagagattctagagatagagagtctcgtagagagaaggaagaagcccgaggaaaggaaaagcctgaggtgacagacagggcaggtggtaacaaaaccgttgaacctcccattagccaagtgggaaatgtagacactgcttcagaacttgagaagggggtgtctgaggctgcagtcctaaagccttctgaagagttacctgctgaggctacctcatccgttgaacccgaaaaggattctggctcagcagcagaggctcctcgttagagactggaatttgtgaaaatgtgacagtgacacttcctggagtgtagagcttgaggtgtacagatgctgtattatatccgctcccgctgtactgcagccccgcgccagctggtggggaactgtaagcaatttgattgcttcccttctatttaaaaatagccacaaaataacaaaaaatactgaaaatatgaataaatattaccctttttgctgt

SEQ ID NO: 12155 - protein, 1147 aa, Homo sapiens; identical to SEQ ID NO: 2029

SEQ ID NO: 12156 - DNA, 670 bp, Homo sapiens
aaaggcctccctcaagtgaaaccggaaactgcaagtgtttgcagtactaccctctgggtggggcagctggacaaaagaactactcagcaggatgttgccagtctcttggaagagtttggtccaattgaatcaattaatgtgagtgtttattcagttttttaagtacgatggacaggtgtgattaatgtcattttatgaaatggaggacctgagaccaaagttacaatttgcccaggtttatagatgtgactagaatttaggtgttcagagtccacgtttagaattatctgtatttaacatttcttagaattctttgtatttaacatttcttggataaccaagtttaatttcaaacatttctaggtaagtctttatataacaaagcttggaggactcagttgagaccaaacttgaattgccaacttagaaatgaatttaaccttacattatatagcatggggtgagggatgggattgttggaactgcttacttggtgttgtatcttgttgcttttcaattttgttatcttttataatattaaaatgttttggagcagatgattcctcccaggggttgtgcctatattgttatggttcataggcaagatgcctatcgtgccctgcagaaactgagccgaggaaactataaagtgaaccagaaatccataaag

SEQ ID NO: 12157 - protein, 56 aa, Homo sapiens
MNLTLHYIAWGEGWDCWNCLLGVVSCCFSILLSFIILKCFGADDSSQGLCLYCYGS

SEQ ID NO: 12158 - DNA, 1418 bp, Homo sapiens
gctggagagagggagagagaggcccgcccgctcgccggccgggccagtgtgagccagtgcgtgagggcgcggggggccgtgtcagcgagacgcagagcgcagccgccaccaccaaacggacatgttgaagaccagcgctgccgccgcctccttttcctcatcctgcgaacgggactgagagggggcccgccacctctccgcctctgcctcggccgcccgcctcgccgcttcgggcgcagcctcttcctgcccgggcctcggactccgccgctcgtcgcctccccccggccaccaggcccggctggtttcccagccccgctccgccgcggcgcgaggtctatgtgaccggcgggcccggagcagccgccgccgcagcgcgaacatggacgccgtcaacgccttcaaccaggagctcttttcgcttatggatatgaaacctcccatctctagagccaagatgattctcatcactaaagctgctattaaagctattaagctttataagcatgtagttcaaatagtagaaaagttcatcaaaaagtgtaaaccagaatacaaggttccgggattatatgtaattgactcaattgtgcgacagtctcgtcatcagtttggaactgataaagatgtttttgggccaagattctctaaaaacataactgccacattccaatatttatatctttgtccatctgaagataagagtaaaatagttcgtgtgctgaacctttggcaaaaaaatggagtgttcaaaattgaaattattcaacctcttttggacatggcagcgggaaccagtaatgcagccccagtagcagaaaatgttaccaataatgaaggctcacctccacctccagtaaaagtttcttctgaacctcccacacaagccactccaaactccgtcccagctgtaccacagttgcccagctctgatgcttttgctgctgtggctcagctgtttcagacaactcaaggccaacagcttcagcagatccttcagacttttcaacagcctccaaaaccacagtctcctgcccttgacaatgctgtgatggctcaggttcaggctatcacagctcagttaaagacaactcctacacaaccatctgaacaaaaagctgctttccccccacctgaacagaaaactgcatttgacaaggtatatttctctcacataacccaccccaccatttatatcactcaacttgagttatggaaattatcacttctgtatcccttctgtggattgttcattatgtcgttttgtaatttgagagattttccccctcaacaagaaaacatcgattattttccctggttttaaatgtgatatgtgctcagtgcaaaaatttccagggtttgaagctgaatttactagtgtaaaattaaaaaagtgaaaaaaaaaaaaaaaagaaaaa

SEQ ID NO: 12159 - protein, 313 aa, Homo sapiens [sequence omitted]

SEQ ID NO: 12160 - DNA, 448 bp, Homo sapiens
gaggcagcccagcctggaccagcaacccaacctgcttcttcagagcaaaacaagaactaggaatcatcttttcacctgggaaggaatcaagtaaaaagcaaaattgaactaaaggttgtttacctttcaaacttggtggccatgttgtgaggaagcccaagtgacatgaggagttcccgtggaggtgtgctgctgacagccccaggtgagagctcagccaagaatcagcacaacactgtgagtgcaaacatgtgagtgagtgagcttgcagaggatgtgatcccacctaggatgtcagcattcaagacaccctagctgacactgagtgagtataggtgaagaacatttacaacagtgataatagaaaacttgtcataagtttttaatttgtgctgtaattacactctgatattcccaaatcttcaataaaaatccattgtacagtaaa

SEQ ID NO: 12161 - protein, 34 aa, Homo sapiens
GSPAWTSNPTCFFRAKQELGIIFSPGKESSKKQN

SEQ ID NO: 12162 - DNA, 547 bp, Homo sapiens
caatgaggttctgaacctagatgttggccaagggagcagaggagggcaggtcaggaggccctcgccctgcaatcacccttcctgggagccttcacttcacctgtgatctcaagacctctccctactgcctgactcgcgccgagcttatggaacatcttcccttgagggtcgcagtccattcgatgagcccttgtcacaggtcctgcttctgtggggagctcaagcgcggacacccttggaacactccccaagtctcttccttcccatccagcaccacttccctaagtcacagctgcaccacctctcatctggactgctcacagcaggtggagtcaggatcaaaatagccaaagaaaaagtaagaatccgtatacaggaaacaaatatgtgatgatgaccggagcagctcagaatcagaacttgagcaagacctgggctgctttgattttctgaaggtctcaaaatattaggggcaaaaaagaaaataaaaaaagaaaaaaaagaaggaataccaaaagcaagttacataaagtatgagatatattac

SEQ ID NO: 12163 - protein, 108 aa, Homo sapiens; identical to SEQ ID NO: 2031

SEQ ID NO: 12164 - DNA, 2187 bp, Homo sapiens
ctgctgccaatacaacaccactgtgaaacagaatggtgtatgccaaatttgagtccctctttaggacgtatgacaaggacatcacctttcagtattttaagagcttcaaacgagtcagaataaacttcagcaaccccttctccgcagcagatgccaggctccagctgcataagactgagtttctgggaaaggaaatgaagttatattttgctcagaccttacacataggaagctcacacctggctccgccaaatccagacaagcagtttctgatctcccctcccgcctctccgccagtgggatggaaacaagtggaagatgcgaccccagtcataaactatgatctcttatatgccatctccaagctggggccaggggaaaagtatgaattgcacgcagcgactgacaccactcccagcgtggtggtccatgtatgtgagagtgatcaagagaaggaggaagaagaggaaatggaaagaatgaggagacctaagccaaaaattatccagaccaggaggccggagtacacgccgatccacctcagctgaactggcacgcgacgaggacgcattccaaatcatactcacgggaggaatcttttactgtggaggtggctggtcacgacttcttcggaggtggcagccgagatcggggtggcagaaatcccagttcatgttgctcagaagagaatcaaggccgtgtccccttgttctaatgctgcacaccagttactgttcatggcacccgggaatgacttgggccaatcactgagtttgtggtgatcgcacaaggacatttgggactgtcttgagaaaacagataatgatagtgttttgtacttgttcttttctggtaggttctgtctgtgccaagggcaggttgatcagtgagctcaggagagagcttcctgtttctaagtggcctgcaggggccactctctactggtaggaagaggtaccacaggaagccgcctagtgcagagaggttgtgaaaacagcagcaatgcaatgtggaaattgtagcgtttcctttcttccctcatgttctcatgtttgtgcatgtatattactgatttacaagactaacctttgttcgtatataaagttacaccgttgttgttttacatcttttgggaagccaggaaagcgtttggaaaacgtatcacctttcccagattctcggattctcgactctttgcaacagcacttgcttgcggaactcttcctggaatgcattcactcagcatccccaaccgtgcaacgtgtaacttgtgcttttgcaaaagaagttgatctgaaattcctctgtagaatttagcttatacaattcagagaatagcagtttcactgccaacttttagtgggtgagaaattttagtttaggtgtttgggatcggacctcagtttctgttgtttcttttatgtggtggtttctatacatgaatcatagccaaaaacttttttggaaactgttggttgagatagttggttcttttaccccacgaagacatcaagatacacttgtaaataaagctgatagcatatattcatacctgttgtacacttgggtgaaaagtatggcagtgggagactaagatgtattaacctacctgtgaatcatatgttgtaggaaaagctgttcccatgtctaacaggacttgaattcaaagcatgtcaagtggatagtagatctgtggcgatatgagagggatgcagtgcctttccccattcattcctgatggaattgttatactaggttaacatttgtaatttttttctagttgtaatgtgtatgtctggtaaataggtattatattttggccttacaataccgtaacaatgtttgtcattttgaaatacttaatgccaagtaacaatgcatgctttggaaatttggaagatggttttattctttgagaagcaaatatgtttgcattaaatgctttgattgttcatatcaagaaattgattgaacgttctcaaaccctgtttacggtacttggtaagagggagccggtttgggagagaccattgcatcgctgtccaagtgtttcttgttaagtgcttttaaactggagaggctaacctcaaaatattttttttaactgcattctataataaatgggcacagtatgctccttacagaaaagttgtcattttatttctagaataaatctgtgaaccttct

SEQ ID NO: 12165 - protein, 171 aa, Homo sapiens
MVYAKFESLFRTYDKDITFQYFKSFKRVRINFSNPFSAADARLQLHKTEFLGKEMKLYFAQTLHIGSSHLAPPNPDKQFLISPPASPPVGWKQVEDATPVINYDLLYAISKLGPGEKYELHAATDTTPSVVVHVCESDQEKEEEEEMERMRRPKPKIIQTRRPEYTPIHLS

SEQ ID NO: 12166 - DNA, 2240 bp, Homo sapiens
cagacattgagcggcgacgtgactcagtgttcataaataggacgacgtccctgcattcccaatctgcactattggaagaaaagccaatgtttgggccaaatttgagtccctctttaggacgtatgacaaggacatcacctttcagtattttaagagcttcaaacgagtcagaataaacttcagcaaccccttctccgcagcagatgccaggctccagctgcataagactgagtttctgggaaaggaaatgaagttatattttgctcagaccttacacataggaagctcacacctggctccgccaaatccagacaagcagtttctgatctcccctcccgcctctccgccagtgggatggaaacaagtggaagatgcgaccccagtcataaactatgatctcttatatgccatctccaagctggggccaggggaaaagtatgaattgcacgcagcgactgacaccactcccagcgtggtggtccatgtatgtgagagtgatcaagagaaggaggaagaagaggaaatggaaagaatgaggagacctaagccaaaaattatccagaccaggaggccggagtacacgccgatccacctcagctgaactggcacgcgacgaggacgcattccaaatcatactcacgggaggaatcttttactgtggaggtggctggtcacgacttcttcggaggtggcagccgagatcggggtggcagaaatcccagttcatgttgctcagaagagaatcaaggccgtgtccccttgttctaatgctgcacaccagttactgttcatggcacccgggaatgacttgggccaatcactgagtttgtggtgatcgcacaaggacatttgggactgtcttgagaaaacagataatgatagtgttttgtacttgttcttttctggtaggttctgtctgtgccaagggcaggttgatcagtgagctcaggagagagcttcctgtttctaagtggcctgcaggggccactctctactggtaggaagaggtaccacaggaagccgcctagtgcagagaggttgtgaaaacagcagcaatgcaatgtggaaattgtagcgtttcctttcttccctcatgttctcatgtttgtgcatgtatattactgatttacaagactaacctttgttcgtatataaagttacaccgttgttgttttacatcttttgggaagccaggaaagcgtttggaaaacgtatcacctttcccagattctcggattctcgactctttgcaacagcacttgcttgcggaactcttcctggaatgcattcactcagcatccccaaccgtgcaacgtgtaacttgtgcttttgcaaaagaagttgatctgaaattcctctgtagaatttagcttatacaattcagagaatagcagtttcactgccaacttttagtgggtgagaaattttagtttaggtgtttgggatcggacctcagtttctgttgtttcttttatgtggtggtttctatacatgaatcatagccaaaaacttttttggaaactgttggttgagatagttggttcttttaccccacgaagacatcaagatacacttgtaaataaagctgatagcatatattcatacctgttgtacacttgggtgaaaagtatggcagtgggagactaagatgtattaacctacctgtgaatcatatgttgtaggaaaagctgttcccatgtctaacaggacttgaattcaaagcatgtcaagtggatagtagatctgtggcgatatgagagggatgcagtgcctttccccattcattcctgatggaattgttatactaggttaacatttgtaatttttttctagttgtaatgtgtatgtctggtaaataggtattatattttggccttacaataccgtaacaatgtttgtcattttgaaatacttaatgccaagtaacaatgcatgctttggaaatttggaagatggttttattctttgagaagcaaatatgtttgcattaaatgctttgattgttcatatcaagaaattgattgaacgttctcaaaccctgtttacggtacttggtaagagggagccggtttgggagagaccattgcatcgctgtccaagtgtttcttgttaagtgcttttaaactggagaggctaacctcaaaatattttttttaactgcattctataataaatgggcacagtatgctccttacagaaaagttgtcattttatttctagaataaatctgtgaaccttct

SEQ ID NO: 12167 - protein, 117 aa, Homo sapiens; identical to SEQ ID NO: 2035

SEQ ID NO: 12168 - DNA, 2521 bp, Homo sapiens
ccgcgcgattccgagggggttaacggcggagccgccggccgggcgcggaccggagcgcgtgaggctccggcgcgcaagcccggagcagcccgctggggcgcacagggtcgcgcgggcgcggggatggaggacggcgtggccggtccccagctcggggccgcggcggaggcggcggaggcggccgaggcgcgagcgcggcccggggtgacgctgcggcccttcgcgcccctctcgggggcggccgaggcggacgagggcggcggcgactggagcttcattgactgcgagatggaggaggtggacctgcaggacctgcccagcgccaccatcgcctgtcacctggacccgcgcgtgttcgtggacggcctgtgccgggccaaatttgagtccctctttaggacgtatgacaaggacatcacctttcagtattttaagagcttcaaacgagtcagaataaacttcagcaaccccttctccgcagcagatgccaggctccagctgcataagactgagtttctgggaaaggaaatgaagttatattttgctcagaccttacacataggaagctcacacctggctccgccaaatccagacaagcagtttctgatctcccctcccgcctctccgccagtgggatggaaacaagtggaagatgcgaccccagtcataaactatgatctcttatatgccatctccaagctggggccaggggaaaagtatgaattgcacgcagcgactgacaccactcccagcgtggtggtccatgtatgtgagagtgatcaagagaaggaggaagaagaggaaatggaaagaatgaggagacctaagccaaaaattatccagaccaggaggccggagtacacgccgatccacctcagctgaactggcacgcgacgaggacgcattccaaatcatactcacgggaggaatcttttactgtggaggtggctggtcacgacttcttcggaggtggcagccgagatcggggtggcagaaatcccagttcatgttgctcagaagagaatcaaggccgtgtccccttgttctaatgctgcacaccagttactgttcatggcacccgggaatgacttgggccaatcactgagtttgtggtgatcgcacaaggacatttgggactgtcttgagaaaacagataatgatagtgttttgtacttgttcttttctggtaggttctgtctgtgccaagggcaggttgatcagtgagctcaggagagagcttcctgtttctaagtggcctgcaggggccactctctactggtaggaagaggtaccacaggaagccgcctagtgcagagaggttgtgaaaacagcagcaatgcaatgtggaaattgtagcgtttcctttcttccctcatgttctcatgtttgtgcatgtatattactgatttacaagactaacctttgttcgtatataaagttacaccgttgttgttttacatcttttgggaagccaggaaagcgtttggaaaacgtatcacctttcccagattctcggattctcgactctttgcaacagcacttgcttgcggaactcttcctggaatgcattcactcagcatccccaaccgtgcaacgtgtaacttgtgcttttgcaaaagaagttgatctgaaattcctctgtagaatttagcttatacaattcagagaatagcagtttcactgccaacttttagtgggtgagaaattttagtttaggtgtttgggatcggacctcagtttctgttgtttcttttatgtggtggtttctatacatgaatcatagccaaaaacttttttggaaactgttggttgagatagttggttcttttaccccacgaagacatcaagatacacttgtaaataaagctgatagcatatattcatacctgttgtacacttgggtgaaaagtatggcagtgggagactaagatgtattaacctacctgtgaatcatatgttgtaggaaaagctgttcccatgtctaacaggacttgaattcaaagcatgtcaagtggatagtagatctgtggcgatatgagagggatgcagtgcctttccccattcattcctgatggaattgttatactaggttaacatttgtaatttttttctagttgtaatgtgtatgtctggtaaataggtattatattttggccttacaataccgtaacaatgtttgtcattttgaaatacttaatgccaagtaacaatgcatgctttggaaatttggaagatggttttattctttgagaagcaaatatgtttgcattaaatgctttgattgttcatatcaagaaattgattgaacgttctcaaaccctgtttacggtacttggtaagagggagccggtttgggagagaccattgcatcgctgtccaagtgtttcttgttaagtgcttttaaactggagaggctaacctcaaaatattttttttaactgcattctataataaatgggcacagtatgctccttacagaaaagttgtcattttatttctagaataaatctgtgaaccttct

SEQ ID NO: 12169 - protein, 252 aa, Homo sapiens; identical to SEQ ID NO: 2033

SEQ ID NO: 12170 - DNA, 2160 bp, Homo sapiens
gaactatagttgaaggctgctgccaatacaacaccactgtgaaacagaatggtgtatgccaaatttgagtccctctttaggacgtatgacaaggacatcacctttcagtattttaagagcttcaaacgagtcagaataaacttcagcaaccccttctccgcagcagatgccaggctccagctgcataagactgagtttctgggaaaggaaatgaagttatattttgctcagaccttacacataggaagctcacacctggctccgccaaatccagacaagcagtttctgatctcccctcccgcctctccgccagtgggatggaaacaagtggaagatgcgaccccagtcataaactatgatctcttatatgccatctccaagctggggccaggggaaaagtatgaattgcacgcagcgactgacaccactcccagcgtggtggtccatgtatgtgagagtgatcaagagaaggaggaagaagaggaaatggaaagaatgaggagacctaagccaaaaattatccagaccaggaggccggagtacacgccgatccacctcagctgaactggcacgcgacgaggacgcattccaaatcatactcacgggaggaatcttttactgtggaggtggctggtcacgacttcttcggaggtggcagccgagatcggggtggcagaaatcccagttcatgttgctcagaagagaatcaaggccgtgtccccttgttctaatgctgcacaccagttactgttcatggcacccgggaatgacttgggccaatcactgagtttgtggtgatcgcacaaggacatttgggactgtcttgagaaaacagataatgatagtgttttgtacttgttcttttctggtaggttctgtctgtgccaagggcaggttgatcagtgagctcaggagagagcttcctgtttctaagtggcctgcaggggccactctctactggtaggaagaggtaccacaggaagccgcctagtgcagagaggttgtgaaaacagcagcaatgcaatgtggaaattgtagcgtttcctttcttccctcatgttctcatgtttgtgcatgtatattactgatttacaagactaacctttgttcgtatataaagttacaccgttgttgttttacatcttttgggaagccaggaaagcgtttggaaaacgtatcacctttcccagattctcggattctcgactctttgcaacagcacttgcttgcggaactcttcctggaatgcattcactcagcatccccaaccgtgcaacgtgtaacttgtgcttttgcaaaagaagttgatctgaaattcctctgtagaatttagcttatacaattcagagaatagcagtttcactgccaacttttagtgggtgagaaattttagtttaggtgtttgggatcggacctcagtttctgttgtttcttttatgtggtggtttctatacatgaatcatagccaaaaacttttttggaaactgttggttgagatagttggttcttttaccccacgaagacatcaagatacacttgtaaataaagctgatagcatatattcatacctgttgtacacttgggtgaaaagtatggcagtgggagactaagatgtattaacctacctgtgaatcatatgttgtaggaaaagctgttcccatgtctaacaggacttgaattcaaagcatgtcaagtggatagtagatctgtggcgatatgagagggatgcagtgcctttccccattcattcctgatggaattgttatactaggttaacatttgtaatttttttctagttgtaatgtgtatgtctggtaaataggtattatattttggccttacaataccgtaacaatgtttgtcattttgaaatacttaatgccaagtaacaatgcatgctttggaaatttggaagatggttttattctttgagaagcaaatatgtttgcattaaatgctttgattgttcatatcaagaaattgattgaacgttctcaaaccctgtttacggtacttggtaagagggagccggtttgggagagaccattgcatcgctgtccaagtgtttcttgttaagtgcttttaaactggagaggctaacctcaaaatattttttttaactgcattctataataaatgggcacagtatgctccttacag

SEQ ID NO: 12171 - protein, 171 aa, Homo sapiens; identical to SEQ ID NO: 12165

SEQ ID NO: 12172 - DNA, 2272 bp, Homo sapiens
ccccctgcgctctcgccatcgccccgcatttactcgctggaggagggggtcacctcattcctagggaggaggaaacagacattgagcggcgacgtgactcagtgttcataaataggacgacgtccctgcattcccaatctgcactattggaagaaaagccaatgtttgggccaaatttgagtccctctttaggacgtatgacaaggacatcacctttcagtattttaagagcttcaaacgagtcagaataaacttcagcaaccccttctccgcagcagatgccaggctccagctgcataagactgagtttctgggaaaggaaatgaagttatattttgctcagaccttacacataggaagctcacacctggctccgccaaatccagacaagcagtttctgatctcccctcccgcctctccgccagtgggatggaaacaagtggaagatgcgaccccagtcataaactatgatctcttatatgccatctccaagctggggccaggggaaaagtatgaattgcacgcagcgactgacaccactcccagcgtggtggtccatgtatgtgagagtgatcaagagaaggaggaagaagaggaaatggaaagaatgaggagacctaagccaaaaattatccagaccaggaggccggagtacacgccgatccacctcagctgaactggcacgcgacgaggacgcattccaaatcatactcacgggaggaatcttttactgtggaggtggctggtcacgacttcttcggaggtggcagccgagatcggggtggcagaaatcccagttcatgttgctcagaagagaatcaaggccgtgtccccttgttctaatgctgcacaccagttactgttcatggcacccgggaatgacttgggccaatcactgagtttgtggtgatcgcacaaggacatttgggactgtcttgagaaaacagataatgatagtgttttgtacttgttcttttctggtaggttctgtctgtgccaagggcaggttgatcagtgagctcaggagagagcttcctgtttctaagtggcctgcaggggccactctctactggtaggaagaggtaccacaggaagccgcctagtgcagagaggttgtgaaaacagcagcaatgcaatgtggaaattgtagcgtttcctttcttccctcatgttctcatgtttgtgcatgtatattactgatttacaagactaacctttgttcgtatataaagttacaccgttgttgttttacatcttttgggaagccaggaaagcgtttggaaaacgtatcacctttcccagattctcggattctcgactctttgcaacagcacttgcttgcggaactcttcctggaatgcattcactcagcatccccaaccgtgcaacgtgtaacttgtgcttttgcaaaagaagttgatctgaaattcctctgtagaatttagcttatacaattcagagaatagcagtttcactgccaacttttagtgggtgagaaattttagtttaggtgtttgggatcggacctcagtttctgttgtttcttttatgtggtggtttctatacatgaatcatagccaaaaacttttttggaaactgttggttgagatagttggttcttttaccccacgaagacatcaagatacacttgtaaataaagctgatagcatatattcatacctgttgtacacttgggtgaaaagtatggcagtgggagactaagatgtattaacctacctgtgaatcatatgttgtaggaaaagctgttcccatgtctaacaggacttgaattcaaagcatgtcaagtggatagtagatctgtggcgatatgagagggatgcagtgcctttccccattcattcctgatggaattgttatactaggttaacatttgtaatttttttctagttgtaatgtgtatgtctggtaaataggtattatattttggccttacaataccgtaacaatgtttgtcattttgaaatacttaatgccaagtaacaatgcatgctttggaaatttggaagatggttttattctttgagaagcaaatatgtttgcattaaatgctttgattgttcatatcaagaaattgattgaacgttctcaaaccctgtttacggtacttggtaagagggagccggtttgggagagaccattgcatcgctgtccaagtgtttcttgttaagtgcttttaaactggagaggctaacctcaaaatattttttttaactgcattctataataaatgggcacagtatgctccttacag

SEQ ID NO: 12173 - protein, 117 aa, Homo sapiens; identical to SEQ ID NO: 2035

SEQ ID NO: 12174 - DNA, 2478 bp, Homo sapiens
ccgcgcgattccgagggggttaacggcggagccgccggccgggcgcggaccggagcgcgtgaggctccggcgcgcaagcccggagcagcccgctggggcgcacagggtcgcgcgggcgcggggatggaggacggcgtggccggtccccagctcggggccgcggcggaggcggcggaggcggccgaggcgcgagcgcggcccggggtgacgctgcggcccttcgcgcccctctcgggggcggccgaggcggacgagggcggcggcgactggagcttcattgactgcgagatggaggaggtggacctgcaggacctgcccagcgccaccatcgcctgtcacctggacccgcgcgtgttcgtggacggcctgtgccgggccaaatttgagtccctctttaggacgtatgacaaggacatcacctttcagtattttaagagcttcaaacgagtcagaataaacttcagcaaccccttctccgcagcagatgccaggctccagctgcataagactgagtttctgggaaaggaaatgaagttatattttgctcagaccttacacataggaagctcacacctggctccgccaaatccagacaagcagtttctgatctcccctcccgcctctccgccagtgggatggaaacaagtggaagatgcgaccccagtcataaactatgatctcttatatgccatctccaagctggggccaggggaaaagtatgaattgcacgcagcgactgacaccactcccagcgtggtggtccatgtatgtgagagtgatcaagagaaggaggaagaagaggaaatggaaagaatgaggagacctaagccaaaaattatccagaccaggaggccggagtacacgccgatccacctcagctgaactggcacgcgacgaggacgcattccaaatcatactcacgggaggaatcttttactgtggaggtggctggtcacgacttcttcggaggtggcagccgagatcggggtggcagaaatcccagttcatgttgctcagaagagaatcaaggccgtgtccccttgttctaatgctgcacaccagttactgttcatggcacccgggaatgacttgggccaatcactgagtttgtggtgatcgcacaaggacatttgggactgtcttgagaaaacagataatgatagtgttttgtacttgttcttttctggtaggttctgtctgtgccaagggcaggttgatcagtgagctcaggagagagcttcctgtttctaagtggcctgcaggggccactctctactggtaggaagaggtaccacaggaagccgcctagtgcagagaggttgtgaaaacagcagcaatgcaatgtggaaattgtagcgtttcctttcttccctcatgttctcatgtttgtgcatgtatattactgatttacaagactaacctttgttcgtatataaagttacaccgttgttgttttacatcttttgggaagccaggaaagcgtttggaaaacgtatcacctttcccagattctcggattctcgactctttgcaacagcacttgcttgcggaactcttcctggaatgcattcactcagcatccccaaccgtgcaacgtgtaacttgtgcttttgcaaaagaagttgatctgaaattcctctgtagaatttagcttatacaattcagagaatagcagtttcactgccaacttttagtgggtgagaaattttagtttaggtgtttgggatcggacctcagtttctgttgtttcttttatgtggtggtttctatacatgaatcatagccaaaaacttttttggaaactgttggttgagatagttggttcttttaccccacgaagacatcaagatacacttgtaaataaagctgatagcatatattcatacctgttgtacacttgggtgaaaagtatggcagtgggagactaagatgtattaacctacctgtgaatcatatgttgtaggaaaagctgttcccatgtctaacaggacttgaattcaaagcatgtcaagtggatagtagatctgtggcgatatgagagggatgcagtgcctttccccattcattcctgatggaattgttatactaggttaacatttgtaatttttttctagttgtaatgtgtatgtctggtaaataggtattatattttggccttacaataccgtaacaatgtttgtcattttgaaatacttaatgccaagtaacaatgcatgctttggaaatttggaagatggttttattctttgagaagcaaatatgtttgcattaaatgctttgattgttcatatcaagaaattgattgaacgttctcaaaccctgtttacggtacttggtaagagggagccggtttgggagagaccattgcatcgctgtccaagtgtttcttgttaagtgcttttaaactggagaggctaacctcaaaatattttttttaactgcattctataataaatgggcacagtatgctccttacag

SEQ ID NO: 12175 - protein, 252 aa, Homo sapiens; identical to SEQ ID NO: 2033

SEQ ID NO: 12176 - DNA, 1969 bp, Homo sapiens
ctgctgccaatacaacaccactgtgaaacagaatggtgtatgccaaatttgagtccctctttaggacgtatgacaaggacatcacctttcagtattttaagagcttcaaacgagtcagaataaacttcagcaaccccttctccgcagcagatgccaggctccagctgcataagactgagtttctgggaaaggaaatgaagttatattttgctcagaccttacacataggaagctcacacctggctccgccaaatccagacaagcagtttctgatctcccctcccgcctctccgccagtgggatggaaacaagtggaagatgcgaccccagtcataaactatgatctcttatatgccatctccaagctggggccaggggaaaagtatgaattgcacgcagcgactgacaccactcccagcgtggtggtccatgtatgtgagagtgatcaagagaaggaggaagaagaggaaatggaaagaatgaggagacctaagccaaaaattatccagaccaggaggccggagtacacgccgatccacctcagctgaactggcacgcgacgaggacgcattccaaatcatactcacgggaggaatcttttactgtggaggtggctggtcacgacttcttcggaggtggcagccgagatcggggtggcagaaatcccagttcatgttgctcagaagagaatcaaggccgtgtccccttgttctaatgctgcacaccagttactgttcatggcacccgggaatgacttgggccaatcactgagtttgtggtgatcgcacaaggacatttgggactgtcttgagaaaacagataatgatagtgttttgtacttgttcttttctggtaggttctgtctgtgccaagggcaggttgatcagtgagctcaggagagagcttcctgtttctaagtggcctgcaggggccactctctactggtaggaagaggtaccacaggaagccgcctagtgcagagaggttgtgaaaacagcagcaatgcaatgtggaaattgtagcgtttcctttcttccctcatgttctcatgtttgtgcatgtatattactgatttacaagactaacctttgttcgtatataaagttacaccgttgttgttttacatcttttgggaagccaggaaagcgtttggaaaacgtatcacctttcccagattctcggattctcgactctttgcaacagcacttgcttgcggaactcttcctggaatgcattcactcagcatccccaaccgtgcaacgtgtaacttgtgcttttgcaaaagaagttgatctgaaattcctctgtagaatttagcttatacaattcagagaatagcagtttcactgccaacttttagtgggtgagaaattttagtttaggtgtttgggatcggacctcagtttctgttgtttcttttatgtggtggtttctatacatgaatcatagccaaaaacttttttggaaactgttggttgagatagttggttcttttaccccacgaagacatcaagatacacttgtaaataaagctgatagcatatattcatacctgttgtacacttgggtgaaaagtatggcagtgggagactaagatgtattaacctacctgtgaatcatatgttgtaggaaaagctgttcccatgtctaacaggacttgaattcaaagcatgtcaagtggatagtagatctgtggcgatatgagagggatgcagtgcctttccccattcattcctgatggaattgttatactaggttaacatttgtaatttttttctagttgtaatgtgtatgtctggtaaataggtattatattttggccttacaataccgtaacaatgtttgtcattttgaaatacttaatgccaagtaacaatgcatgctttggaaatttggaagatggttttattctttgagaagcaaatatgtttgcattaaatgctttgattgttcatatcaagaaattgat

SEQ ID NO: 12177 - protein, 171 aa, Homo sapiens; identical to SEQ ID NO: 12165

SEQ ID NO: 12178 - DNA, 2022 bp, Homo sapiens
cagacattgagcggcgacgtgactcagtgttcataaataggacgacgtccctgcattcccaatctgcactattggaagaaaagccaatgtttgggccaaatttgagtccctctttaggacgtatgacaaggacatcacctttcagtattttaagagcttcaaacgagtcagaataaacttcagcaaccccttctccgcagcagatgccaggctccagctgcataagactgagtttctgggaaaggaaatgaagttatattttgctcagaccttacacataggaagctcacacctggctccgccaaatccagacaagcagtttctgatctcccctcccgcctctccgccagtgggatggaaacaagtggaagatgcgaccccagtcataaactatgatctcttatatgccatctccaagctggggccaggggaaaagtatgaattgcacgcagcgactgacaccactcccagcgtggtggtccatgtatgtgagagtgatcaagagaaggaggaagaagaggaaatggaaagaatgaggagacctaagccaaaaattatccagaccaggaggccggagtacacgccgatccacctcagctgaactggcacgcgacgaggacgcattccaaatcatactcacgggaggaatcttttactgtggaggtggctggtcacgacttcttcggaggtggcagccgagatcggggtggcagaaatcccagttcatgttgctcagaagagaatcaaggccgtgtccccttgttctaatgctgcacaccagttactgttcatggcacccgggaatgacttgggccaatcactgagtttgtggtgatcgcacaaggacatttgggactgtcttgagaaaacagataatgatagtgttttgtacttgttcttttctggtaggttctgtctgtgccaagggcaggttgatcagtgagctcaggagagagcttcctgtttctaagtggcctgcaggggccactctctactggtaggaagaggtaccacaggaagccgcctagtgcagagaggttgtgaaaacagcagcaatgcaatgtggaaattgtagcgtttcctttcttccctcatgttctcatgtttgtgcatgtatattactgatttacaagactaacctttgttcgtatataaagttacaccgttgttgttttacatcttttgggaagccaggaaagcgtttggaaaacgtatcacctttcccagattctcggattctcgactctttgcaacagcacttgcttgcggaactcttcctggaatgcattcactcagcatccccaaccgtgcaacgtgtaacttgtgcttttgcaaaagaagttgatctgaaattcctctgtagaatttagcttatacaattcagagaatagcagtttcactgccaacttttagtgggtgagaaattttagtttaggtgtttgggatcggacctcagtttctgttgtttcttttatgtggtggtttctatacatgaatcatagccaaaaacttttttggaaactgttggttgagatagttggttcttttaccccacgaagacatcaagatacacttgtaaataaagctgatagcatatattcatacctgttgtacacttgggtgaaaagtatggcagtgggagactaagatgtattaacctacctgtgaatcatatgttgtaggaaaagctgttcccatgtctaacaggacttgaattcaaagcatgtcaagtggatagtagatctgtggcgatatgagagggatgcagtgcctttccccattcattcctgatggaattgttatactaggttaacatttgtaatttttttctagttgtaatgtgtatgtctggtaaataggtattatattttggccttacaataccgtaacaatgtttgtcattttgaaatacttaatgccaagtaacaatgcatgctttggaaatttggaagatggttttattctttgagaagcaaatatgtttgcattaaatgctttgattgttcatatcaagaaattgat

SEQ ID NO: 12179 - protein, 117 aa, Homo sapiens; identical to SEQ ID NO: 2035

SEQ ID NO: 12180 - DNA, 2288 bp, Homo sapiens
ggggttaacggcggagccgccggccgggcgcggaccggagcgcgtgaggctccggcgcgcaagcccggagcagcccgctggggcgcacagggtcgcgcgggcgcggggatggaggacggcgtggccggtccccagctcggggccgcggcggaggcggcggaggcggccgaggcgcgagcgcggcccggggtgacgctgcggcccttcgcgcccctctcgggggcggccgaggcggacgagggcggcggcgactggagcttcattgactgcgagatggaggaggtggacctgcaggacctgcccagcgccaccatcgcctgtcacctggacccgcgcgtgttcgtggacggcctgtgccgggccaaatttgagtccctctttaggacgtatgacaaggacatcacctttcagtattttaagagcttcaaacgagtcagaataaacttcagcaaccccttctccgcagcagatgccaggctccagctgcataagactgagtttctgggaaaggaaatgaagttatattttgctcagaccttacacataggaagctcacacctggctccgccaaatccagacaagcagtttctgatctcccctcccgcctctccgccagtgggatggaaacaagtggaagatgcgaccccagtcataaactatgatctcttatatgccatctccaagctggggccaggggaaaagtatgaattgcacgcagcgactgacaccactcccagcgtggtggtccatgtatgtgagagtgatcaagagaaggaggaagaagaggaaatggaaagaatgaggagacctaagccaaaaattatccagaccaggaggccggagtacacgccgatccacctcagctgaactggcacgcgacgaggacgcattccaaatcatactcacgggaggaatcttttactgtggaggtggctggtcacgacttcttcggaggtggcagccgagatcggggtggcagaaatcccagttcatgttgctcagaagagaatcaaggccgtgtccccttgttctaatgctgcacaccagttactgttcatggcacccgggaatgacttgggccaatcactgagtttgtggtgatcgcacaaggacatttgggactgtcttgagaaaacagataatgatagtgttttgtacttgttcttttctggtaggttctgtctgtgccaagggcaggttgatcagtgagctcaggagagagcttcctgtttctaagtggcctgcaggggccactctctactggtaggaagaggtaccacaggaagccgcctagtgcagagaggttgtgaaaacagcagcaatgcaatgtggaaattgtagcgtttcctttcttccctcatgttctcatgtttgtgcatgtatattactgatttacaagactaacctttgttcgtatataaagttacaccgttgttgttttacatcttttgggaagccaggaaagcgtttggaaaacgtatcacctttcccagattctcggattctcgactctttgcaacagcacttgcttgcggaactcttcctggaatgcattcactcagcatccccaaccgtgcaacgtgtaacttgtgcttttgcaaaagaagttgatctgaaattcctctgtagaatttagcttatacaattcagagaatagcagtttcactgccaacttttagtgggtgagaaattttagtttaggtgtttgggatcggacctcagtttctgttgtttcttttatgtggtggtttctatacatgaatcatagccaaaaacttttttggaaactgttggttgagatagttggttcttttaccccacgaagacatcaagatacacttgtaaataaagctgatagcatatattcatacctgttgtacacttgggtgaaaagtatggcagtgggagactaagatgtattaacctacctgtgaatcatatgttgtaggaaaagctgttcccatgtctaacaggacttgaattcaaagcatgtcaagtggatagtagatctgtggcgatatgagagggatgcagtgcctttccccattcattcctgatggaattgttatactaggttaacatttgtaatttttttctagttgtaatgtgtatgtctggtaaataggtattatattttggccttacaataccgtaacaatgtttgtcattttgaaatacttaatgccaagtaacaatgcatgctttggaaatttggaagatggttttattctttgagaagcaaatatgtttgcattaaatgctttgattgttcatatcaagaaattgat

SEQ ID NO: 12181 - protein, 252 aa, Homo sapiens; identical to SEQ ID NO: 2033

SEQ ID NO: 12182 - DNA, 7335 bp, Homo sapiens
cagtccattgaagacttgaacaagtgggccctatttcttgtgtctccttttatacttgaagcagaacacatagcatttgtgacggagagcatttgggtacaaagtgagaatttacagagatcatcctcttcagaaacaacggagtgtcgttctgtcgtccaggctggagtgcagtggtgtggtctcggctcaccacaacctctgcctactgggttccagtgattctcctgcctcagcatcccgagtagctgggactacaggtgcacgctaccatgcccggctaatttttgtatttttagtagaggcgggggtttcaccatgccatccaggctggtttcgaactcctgacctcgtgatccacctgtctcggcctcccaaagtgctgggattacaggtgtgagccaccgcgcctggccctgtattttcaaattctttacctctgcgtttccagccttgctccatccaatttgttactagagctttttaacaatttcacgttgaattaagatgatttggaagaggagaaacaagagtcagaaaaattagcagcatccgtgatctgactctgggtaccagtgggttgttgagatttctgttccccactcactgcagagctgctgcctgccaatgccccctgttgggcagggccacctgtgctagtttaacctggggtctttcactcccggactgcttcttggatgtgagttttaagttgagcagagaagatatgccttgcctgctgccatacattgtaacatcaagtcaagagctttagttacttaacagatttctgctggctgctattataggaggaaactcctttgtttagggacagccagggcttccttagctttgatctttgggagtgagccttttgcttgacttcccttctcttttccatgcctttgtttccatctcgaagtgcaaatttaaagtgtcctgtttgcctttatccactggaaggcaaacaccctggacgacgtatcagtgacagcgcggttctgctttgatcggagcacccagcgctgcttgaaggcgtttgcatggtccatggctcatggaccacgctcctagaaaacggaaatgcacttagattgtcaagtggtcagactgttgtttgccattagcttgcagacctggggatccttatcggctaattgctgaagcaagtgtggacaacttcagcaagctgggggtggcgttcatggaagatagactccacatggataatggactggtaccccaaaagattgtgtcggtgcacttgcaggactccactctgaaggaagttaaggatcaggtctcaaacaagcaagcccagatcctagagccgaagcctgaaccttctcttgagattaagcctgagcaggacggtatggagcatgttggcagagatgacccaaaggctcttggtgaagaacccaaacaaaggagaggcagtgcctctgggagtgagcctgctggggacagtgacaggggagggggccccgttgagcattatcacctccatctgtctagttgccacgagtgtctggaacttgagaacagcaccattgagtcagtcaagtttgcgtctgccgagaacattccagaccttccctacgattatagcagcagtttggagagtgttgctgatgagacctcccccgaaagagaagggaggagagtcaacctcacgggaaaggcacccaacatcctcctctatgtgggctccgactcccaggaagccctcggccggttccacgaggtccggtctgtgctggccgactgtgtggacattgacagttatattctctaccacctgctggaggacagtgctctcagagacccgtggacggacaactgtctgctgttggtcattgctaccagggagtccattcccgaagacctgtaccagaagttcatggcctatctttctcagggagggaaggtgttgggcctgtcttcatccttcacctttggtggctttcaggtgacaagcaagggtgcactgcacaagacagtccagaacttggttttctccaaggctgaccagagcgaggtgaagctcagcgtcttgagcagtggctgcaggtaccaggaaggccccgtccggctcagccccggcaggctccagggccacctggagaatgaggacaaggacaggatgattgtgcatgtgccttttggaactcgcgggggagaagctgttctttgccaggtgcacttagaactacctcccagctccaacatagtgcaaactccagaagattttaacttgctcaagtcaagcaattttagaagatacgaagtccttagagagattctgacaacccttggcctcagctgtgacatgaaacaagttcctgccttaactcctctttacttgctgtcagctgcggaggaaatcagggatcctcttatgcagtggcttgggaaacatgtggactccgagggagaaataaaatccggccagctctctcttagatttgtttcatcctacgtgtctgaagtagaaataaccccatcttgtatacctgtggtgaccaacatggaggccttctcatcagaacatttcaacttagagatctatcgccaaaatctgcagaccaagcagttggggaaagtaattttgtttgccgaagtgacccccacaacgatgcgtctcctggatgggctgatgtttcagacaccgcaggaaatgggcttaatagtgatcgcggcccggcagaccgagggcaaaggacggggagggaatgtgtggctgagccctgtgggatgtgctctttctactctgctcatctccattccactgagatcccagctgggacagaggatcccgtttgtccagcatctgatgtccgtggctgtcgtggaagcagtgaggtccattcccgagtatcaggatatcaacttacgagtgaagtggcccaacgatatttattacagtgacctcatgaagatcggcggagttctggttaactcaacactcatgggagaaacattttatatacttattggctgtggatttaatgtgactaacagtaaccctaccatctgcatcaacgacctcatcacagaatacaataaacaacacaaggcagaactgaagcccttaagagccgattatctcatcgccagagtcgtgactgtgctggagaaactgatcaaagagtttcaggacaaagggcccaacagcgtccttcccctttattaccgatactgggtccacagtggtcagcaagtccatctgggcagcgcagagggaccaaaggtgtccatcgttggcctggacgattctggcttcctccaggttcaccaggagggcggcgaggttgtgactgtgcacccggacggcaactccttcgacatgctgagaaacctcatcctccccaaacggcggtaatgccgggcgtccccgagacgcggctgcctgtccgtgcccatgcatctggaaatctaatttagagttgtaggtgaattttcttttcctccaattcatttgttaagtctttgttctttttctgtgtttctgtttgtttttaggtttgttttgttgtcgttttctttggtgtttgaagaggctctgggatagatggttaagaagtagaaaatttagtttagggaaagccctcccacaggtgggaaattgctctcccctctgtggcttggacttacgtttattgtcaaggggagtttttacatggaaatgacaatgggaaaattcagatattttcttagtagtgcagacctttacccctagtctatgaaaaaacaaaccaaaatatgctcttgcgcccaggccagtggtgagttagaggtatgctatcactgtttgtaagcatctggggaggtactgaactgtaagaacatgcttggacacttagtcattgttctgtgtttttattaatgaagaaaagggaagacagacttccaagagttactgtccacccggtggtgtggccccatagcgaagtctaaatgcctgtagagatagagctagctggtgtggttgcagtgaccttgtagaggaaatcagttcattactttgacatcattcagtgagctctcctttcctaaggaagtttaaatgtccttagttagggactgactttcttaagtaagtttaaatttactacatattgtgaagagacaggatcaagttcagaatccttaaatgtctgattaggcatcacttggatgaggaggtgggcgatttggctctgacagctggagatgaaggcacactcataccacatacaagggaggatttggagcttttaagccagtttcagatttactctgaaatgtggagcattcctgcaagactgtgcagctcacggaatatagaagacatggcattttactcagaagtcataagtttttgcccccctcatttacctcgtattaccaagaaagaaaatgttatcgatactaaacaccatcagttcagagggaggatgtgtgtgtgtgcccgcatatgtgtgtgcgtgcgtgtgtgcgcacatagctttaaaagaagacattcaaaatttgatgtgctacaagcctcatgaaagaacaaaagaaatgaagccttttgatatgcattcgctattcccagatgtacgccatgccttttccatgtccctcctatctctgttgaacttatgaatcatactcattacttttcagctttttaaaaggccaatttttgtccagttttctctcttccagtcccagctgaaattagtggaaagaaagtttgatggagctttcagctttgaacaaaatcccttcattgtaaactagcaccatctttatccaggtcttacccagtcaggctaattccagaaacttgtggtttttagtatagtctgtctacctttagccaggcacaggacagccctatgaaaaaatacccaatatatattttttggaaatgaaacattaaaagaacttaaaaagtaatttttggaaatgaggcttcaattagaattatttttctcaaaaaacaaacaaacaaaaaacacaaaaaaaaccactcttctccaaatgcccaagccttctttcaaaattagttagaaacttaagtaaaatacaagtccacaccatccccaaattacaaaatggacttacccttgagagggcatctgcagaatatcatcagggacaaagatctcgaggctaacgatgtaggtttcatttctcagactttgtaatataaggcaagccctctctcagagctgccatcatcactttttgaatttctttgggggttatttaatgaaaaacatgctatgttttgttttaagctgaagtcctattctggacactctgctttgggaaaaaatgttatcatttaatttcctttctgcaaattaaaactaatgaagtgtggccttgtcaaaggctatggagatgttccgggcatactgctgtgctctgtgctttccagcaggcgctcctccctcacgcaggagactcagttgtcctgagagagatgaagcagccttgaagcagatgctgcgttttccataaacctgattttgcctcacatgaaccaaagactctcaaaactccgcttctatagaattagctgaataaaggcattttactgatagctgttcgtgttagcgaaacctgtctacctgctatagcacactctccgatttgggccatttatgcaccccgcaacctgggatctcaaggagctttaaagtcttaatgggaacttggcattttcctgatgatctttaaaatgtggtcactaaactcaggattggcgtgtgcttttagaacactggagtagcccttgttttagaggctgtgcattgagtatcgaccgtattttgtaaaaggcaagatatcctcccttccaggctggtaacgggtttcaaggggactcttgaggaagtgccccctaaaatagaacacagcaataactgggcttcctgtccccacccccaccccagcagtgctctctggcactgggaactctgctagggagtggtggaagtaggaaggatttgtgtgcaaaggaaaatcgtggttgagtttcactgcagcaggctgacgttgcctgatgtgagagcaagtggccgactggggtgcgggtgcacaggtcgggggagcacaggccacagagcgcagcctctgggggtcccccaaggcacagcatatacagcatggtcgccccttgccctggagtctgggaacaaagagaggagccagcctccccgcactgcttcagatggaaaagggaggcagggtgggcttccgttctccagatctgtttgctcttaacaggcagaacatgggagaatccttattcctggttaatcactatgcatatttgaaataaaagaaagcgtaagcctctgcaattttaacttctcaaaggatgtctctgaaaagaatcactttaaaccaatgcctataaaaagcaagtctaccaaaataaactaagactttctatgtggtttgggctccctcttatttttacaagtttcatttttaaaagtaggcaactactttgggttacagtatttttattcatatttaaacatttttacaaaataaataaagtgttttacatagtaaggaatatgtacgtatttccaagtattaagaagccaagtgtttttttttttgacgtattattgacaaatgtattcagcgccatacacaagagaaatattattactccaaagaacgaaagttaacaaaactccaaagcaaaaacccttttaatggaggtgagaaataaatttaatgtaacaacagctagattgtttttaggatttttcttttcttttgtggaaacttcttgacttgacttttcatctgaacagtttttccccccaagattttaatcttatatgtcatacttaagtttaggaacagcttgaataattagcattctagataacacaagggccatgattcactaaaattccaagctactgtaattttatggcatttatttgcaaatgttctttgtatctcattttatctgtagcagtccccactagtctaccttaaccatcttatagctctggtaaattaaaacttacgtagactttatacaagatccattggccgtattaaacctcccccactcttagggcttagggcggaagggacgaaggcagggctgataggacttttaaaaggataaaaggagtgggggcaagggaggcggaaaatacaggctcttgcagataccctccgcgctgccctccacacccagcccactgctctacaaaggtatgaatggaatggcttttctagaaaagggcttccaagaacataaaggaattcctttccctgggaggccccgtggagggctgagccagccttgaattgggcttattt

SEQ ID NO: 12183 - protein, 726 aa, Homo sapiens; identical to SEQ ID NO: 2039

SEQ ID NO: 12184 - DNA, 6602 bp, Homo sapiens
acgagagggcgcagcgcggcgcggcagggattcgcgggcgaccacccggcgcaggagcggccgcgtttcggcctcagaatccattgaagacttgaacaagtgggccctatttcttgtgtctccttttatacttgaagcagaacacatagcatttgtgacggagagcatttgggtacaaagtgagaatttacagagatcatcctcttcagaaacagttcggtttttgcccactagggatgatgtggtttctcatgaggttacttgctctaaaggactttatattttggaaccataagagcacccttgtggcccaggcactttatggatgatcccttttagtgctcccagtaaccttccaagattgtcaagtggtcagactgttgtttgccattagcttgcagacctggggatccttatcggctaattgctgaagcaagtgtggacaacttcagcaagctgggggtggcgttcatggaagatagactccacatggataatggactggtaccccaaaagattgtgtcggtgcacttgcaggactccactctgaaggaagttaaggatcaggtctcaaacaagcaagcccagatcctagagccgaagcctgaaccttctcttgagattaagcctgagcaggacggtatggagcatgttggcagagatgacccaaaggctcttggtgaagaacccaaacaaaggagaggcagtgcctctgggagtgagcctgctggggacagtgacaggggagggggccccgttgagcattatcacctccatctgtctagttgccacgagtgtctggaacttgagaacagcaccattgagtcagtcaagtttgcgtctgccgagaacattccagaccttccctacgattatagcagcagtttggagagtgttgctgatgagacctcccccgaaagagaagggaggagagtcaacctcacgggaaaggcacccaacatcctcctctatgtgggctccgactcccaggaagccctcggccggttccacgaggtccggtctgtgctggccgactgtgtggacattgacagttatattctctaccacctgctggaggacagtgctctcagagacccgtggacggacaactgtctgctgttggtcattgctaccagggagtccattcccgaagacctgtaccagaagttcatggcctatctttctcagggagggaaggtgttgggcctgtcttcatccttcacctttggtggctttcaggtgacaagcaagggtgcactgcacaagacagtccagaacttggttttctccaaggctgaccagagcgaggtgaagctcagcgtcttgagcagtggctgcaggtaccaggaaggccccgtccggctcagccccggcaggctccagggccacctggagaatgaggacaaggacaggatgattgtgcatgtgccttttggaactcgcgggggagaagctgttctttgccaggtgcacttagaactacctcccagctccaacatagtgcaaactccagaagattttaacttgctcaagtcaagcaattttagaagatacgaagtccttagagagattctgacaacccttggcctcagctgtgacatgaaacaagttcctgccttaactcctctttacttgctgtcagctgcggaggaaatcagggatcctcttatgcagtggcttgggaaacatgtggactccgagggagaaataaaatccggccagctctctcttagatttgtttcatcctacgtgtctgaagtagaaataaccccatcttgtatacctgtggtgaccaacatggaggccttctcatcagaacatttcaacttagagatctatcgccaaaatctgcagaccaagcagttggggaaagtaattttgtttgccgaagtgacccccacaacgatgcgtctcctggatgggctgatgtttcagacaccgcaggaaatgggcttaatagtgatcgcggcccggcagaccgagggcaaaggacggggagggaatgtgtggctgagccctgtgggatgtgctctttctactctgctcatctccattccactgagatcccagctgggacagaggatcccgtttgtccagcatctgatgtccgtggctgtcgtggaagcagtgaggtccattcccgagtatcaggatatcaacttacgagtgaagtggcccaacgatatttattacagtgacctcatgaagatcggcggagttctggttaactcaacactcatgggagaaacattttatatacttattggctgtggatttaatgtgactaacagtaaccctaccatctgcatcaacgacctcatcacagaatacaataaacaacacaaggcagaactgaagcccttaagagccgattatctcatcgccagagtcgtgactgtgctggagaaactgatcaaagagtttcaggacaaagggcccaacagcgtccttcccctttattaccgatactgggtccacagtggtcagcaagtccatctgggcagcgcagagggaccaaaggtgtccatcgttggcctggacgattctggcttcctccaggttcaccaggagggcggcgaggttgtgactgtgcacccggacggcaactccttcgacatgctgagaaacctcatcctccccaaacggcggtaatgccgggcgtccccgagacgcggctgcctgtccgtgcccatgcatctggaaatctaatttagagttgtaggtgaattttcttttcctccaattcatttgttaagtctttgttctttttctgtgtttctgtttgtttttaggtttgttttgttgtcgttttctttggtgtttgaagaggctctgggatagatggttaagaagtagaaaatttagtttagggaaagccctcccacaggtgggaaattgctctcccctctgtggcttggacttacgtttattgtcaaggggagtttttacatggaaatgacaatgggaaaattcagatattttcttagtagtgcagacctttacccctagtctatgaaaaaacaaaccaaaatatgctcttgcgcccaggccagtggtgagttagaggtatgctatcactgtttgtaagcatctggggaggtactgaactgtaagaacatgcttggacacttagtcattgttctgtgtttttattaatgaagaaaagggaagacagacttccaagagttactgtccacccggtggtgtggccccatagcgaagtctaaatgcctgtagagatagagctagctggtgtggttgcagtgaccttgtagaggaaatcagttcattactttgacatcattcagtgagctctcctttcctaaggaagtttaaatgtccttagttagggactgactttcttaagtaagtttaaatttactacatattgtgaagagacaggatcaagttcagaatccttaaatgtctgattaggcatcacttggatgaggaggtgggcgatttggctctgacagctggagatgaaggcacactcataccacatacaagggaggatttggagcttttaagccagtttcagatttactctgaaatgtggagcattcctgcaagactgtgcagctcacggaatatagaagacatggcattttactcagaagtcataagtttttgcccccctcatttacctcgtattaccaagaaagaaaatgttatcgatactaaacaccatcagttcagagggaggatgtgtgtgtgtgcccgcatatgtgtgtgcgtgcgtgtgtgcgcacatagctttaaaagaagacattcaaaatttgatgtgctacaagcctcatgaaagaacaaaagaaatgaagccttttgatatgcattcgctattcccagatgtacgccatgccttttccatgtccctcctatctctgttgaacttatgaatcatactcattacttttcagctttttaaaaggccaatttttgtccagttttctctcttccagtcccagctgaaattagtggaaagaaagtttgatggagctttcagctttgaacaaaatcccttcattgtaaactagcaccatctttatccaggtcttacccagtcaggctaattccagaaacttgtggtttttagtatagtctgtctacctttagccaggcacaggacagccctatgaaaaaatacccaatatatattttttggaaatgaaacattaaaagaacttaaaaagtaatttttggaaatgaggcttcaattagaattatttttctcaaaaaacaaacaaacaaaaaacacaaaaaaaaccactcttctccaaatgcccaagccttctttcaaaattagttagaaacttaagtaaaatacaagtccacaccatccccaaattacaaaatggacttacccttgagagggcatctgcagaatatcatcagggacaaagatctcgaggctaacgatgtaggtttcatttctcagactttgtaatataaggcaagccctctctcagagctgccatcatcactttttgaatttctttgggggttatttaatgaaaaacatgctatgttttgttttaagctgaagtcctattctggacactctgctttgggaaaaaatgttatcatttaatttcctttctgcaaattaaaactaatgaagtgtggccttgtcaaaggctatggagatgttccgggcatactgctgtgctctgtgctttccagcaggcgctcctccctcacgcaggagactcagttgtcctgagagagatgaagcagccttgaagcagatgctgcgttttccataaacctgattttgcctcacatgaaccaaagactctcaaaactccgcttctatagaattagctgaataaaggcattttactgatagctgttcgtgttagcgaaacctgtctacctgctatagcacactctccgatttgggccatttatgcaccccgcaacctgggatctcaaggagctttaaagtcttaatgggaacttggcattttcctgatgatctttaaaatgtggtcactaaactcaggattggcgtgtgcttttagaacactggagtagcccttgttttagaggctgtgcattgagtatcgaccgtattttgtaaaaggcaagatatcctcccttccaggctggtaacgggtttcaaggggactcttgaggaagtgccccctaaaatagaacacagcaataactgggcttcctgtccccacccccaccccagcagtgctctctggcactgggaactctgctagggagtggtggaagtaggaaggatttgtgtgcaaaggaaaatcgtggttgagtttcactgcagcaggctgacgttgcctgatgtgagagcaagtggccgactggggtgcgggtgcacaggtcgggggagcacaggccacagagcgcagcctctgggggtcccccaaggcacagcatatacagcatggtcgccccttgccctggagtctgggaacaaagagaggagccagcctccccgcactgcttcagatggaaaagggaggcagggtgggcttccgttctccagatctgtttgctcttaacaggcagaacatgggagaatccttattcctggttaatcactatgcatatttgaaataaaagaaagcgtaagcctctgcaattttaacttctcaaaggatgtctctgaaaagaatcactttaaaccaatgcctataaaaagcaagtctaccaaaataaactaagactttctatgtggtttgggctccctcttatttttacaagtttcatttttaaaagtaggcaactactttgggttacagtatttttattcatatttaaacatttttacaaaataaataaagtgttttacatagtaaggaatatgtacgtatttccaagtattaagaagccaagtgtttttttttttgacgtattattgacaaatgtattcagcgccatacacaagagaaatattattactccaaagaacgaaagttaacaaaactccaaagcaaaaacccttttaatggaggtgagaaataaatttaatgtaacaacagctagattgtttttaggatttttcttttcttttgtggaaacttcttgacttgacttttcatctgaacagtttttccccccaagattttaatcttatatgtcatacttaagtttaggaacagcttgaataattagcattctagataacacaagggccatgattcactaaaattccaagctactgtaattttatggcatttatttgcaaatgttctttgtatctcattttatctgtagcagtccccactagtctaccttaaccatcttatagctctggtaaattaaaacttacgtagactttatacaagatccattggccgtattaaacctcccccactcttagggcttagggcggaagggacgaaggcagggctgataggacttttaaaaggataaaaggagtgggggcaagggaggcggaaaatacaggctcttgcagataccctccgcgctgccctccacacccagcccactgctctacaaaggtatgaatggaatggcttttctagaaaagggcttccaagaacataaaggaattcctttccctgggaggccccgtggagggctgagccagccttgaattgggcttattt

SEQ ID NO: 12185 - protein, 726 aa, Homo sapiens; identical to SEQ ID NO: 2039

SEQ ID NO: 12186 - DNA, 6742 bp, Homo sapiens
cagtccattgaagacttgaacaagtgggccctatttcttgtgtctccttttatacttgaagcagaacacatagcatttgtgacggagagcatttgggtacaaagtgagaatttacagagatcatcctcttcagaaacaacggagtgtcgttctgtcgtccaggctggagtgcagtggtgtggtctcggctcaccacaacctctgcctactgggttccagtgattctcctgcctcagcatcccgagtagctgggactacaggtgcacgctaccatgcccggctaatttttgtatttttagtagaggcgggggtttcaccatgccatccaggctggtttcgaactcctgacctcgtgatccacctgtctcggcctcccaaagtgctgggattacaggtgtgagccaccgcgcctggccctgtattttcaaattctttacctctgcgtttccagccttgctccatccaatttgttactagagctttttaacaatttcacgttgaattaagatgatttggaagaggagaaacaagagtcagaaaaattagcagcatccgtgatctgactctgggtaccagtgggttgttgagatttctgttccccactcactgcagagctgctgcctgccaatgccccctgttgggcagggccacctgtgctagtttaacctggggtctttcactcccggactgcttcttggatgtgagttttaagttgagcagagaagatatgccttgcctgctgccatacattgtaacatcaagtcaagagctttagttacttaacagatttctgctggctgctattataggaggaaactcctttgtttagggacagccagggcttccttagctttgatctttgggagtgagccttttgcttgacttcccttctcttttccatgcctttgtttccatctcgaagtgcaaatttaaagtgtcctgtttgcctttatccactggaaggcaaacaccctggacgacgtatcagtgacagcgcggttctgctttgatcggagcacccagcgctgcttgaaggcgtttgcatggtccatggctcatggaccacgctcctagaaaacggaaatgcacttagattgtcaagtggtcagactgttgtttgccattagcttgcagacctggggatccttatcggctaattgctgaagcaagtgtggacaacttcagcaagctgggggtggcgttcatggaagatagactccacatggataatggactggtaccccaaaagattgtgtcggtgcacttgcaggactccactctgaaggaagttaaggatcaggtctcaaacaagcaagcccagatcctagagccgaagcctgaaccttctcttgagattaagcctgagcaggacggtatggagcatgttggcagagatgacccaaaggctcttggtgaagaacccaaacaaaggagaggcagtgcctctgggagtgagcctgctggggacagtgacaggggagggggccccgttgagcattatcacctccatctgtctagttgccacgagtgtctggaacttgagaacagcaccattgagtcagtcaagtttgcgtctgccgagaacattccagaccttccctacgattatagcagcagtttggagagtgttgctgatgagacctcccccgaaagagaagggaggagagtcaacctcacgggaaaggcacccaacatcctcctctatgtgggctccgactcccaggaagccctcggccggttccacgaggtccggtctgtgctggccgactgtgtggacattgacagttatattctctaccacctgctggaggacagtgctctcagagacccgtggacggacaactgtctgctgttggtcattgctaccagggagtccattcccgaagacctgtaccagaagttcatggcctatctttctcagggagggaaggtgttgggcctgtcttcatccttcacctttggtggctttcaggtgacaagcaagggtgcactgcacaagacagtccagaacttggttttctccaaggctgaccagagcgaggtgaagctcagcgtcttgagcagtggctgcaggtaccaggaaggccccgtccggctcagccccggcaggctccagggccacctggagaatgaggacaaggacaggatgattgtgcatgtgccttttggaactcgcgggggagaagctgttctttgccaggtgcacttagaactacctcccagctccaacatagtgcaaactccagaagattttaacttgctcaagtcaagcaattttagaagatacgaagtccttagagagattctgacaacccttggcctcagctgtgacatgaaacaagttcctgccttaactcctctttacttgctgtcagctgcggaggaaatcagggatcctcttatgcagtggcttgggaaacatgtggactccgagggagaaataaaatccggccagctctctcttagatttgtttcatcctacgtgtctgaagtagaaataaccccatcttgtatacctgtggtgaccaacatggaggccttctcatcagaacatttcaacttagagatctatcgccaaaatctgcagaccaagcagttggggaaagtaattttgtttgccgaagtgacccccacaacgatgcgtctcctggatgggctgatgtttcagacaccgcaggaaatgggcttaatagtgatcgcggcccggcagaccgagggcaaaggacggggagggaatgtgtggctgagccctgtgggatgtgctctttctactctgctcatctccattccactgagatcccagctgggacagaggatcccgtttgtccagcatctgatgtccgtggctgtcgtggaagcagtgaggtccattcccgagtatcaggatatcaacttacgagtgaagtggcccaacgatatttattacagtgacctcatgaagatcggcggagttctggttaactcaacactcatgggagaaacattttatatacttattggctgtggatttaatgtgactaacagtaaccctaccatctgcatcaacgacctcatcacagaatacaataaacaacacaaggcagaactgaagcccttaagagccgattatctcatcgccagagtcgtgactgtgctggagaaactgatcaaagagtttcaggacaaagggcccaacagcgtccttcccctttattaccgatactgggtccacagtggtcagcaagtccatctgggcagcgcagagggaccaaaggtgtccatcgttggcctggacgattctggcttcctccaggttcaccaggagggcggcgaggttgtgactgtgcacccggacggcaactccttcgacatgctgagaaacctcatcctccccaaacggcggtaatgccgggcgtccccgagacgcggctgcctgtccgtgcccatgcatctggaaatctaatttagagttgtaggtgaattttcttttcctccaattcatttgttaagtctttgttctttttctgtgtttctgtttgtttttaggtttgttttgttgtcgttttctttggtgtttgaagaggctctgggatagatggttaagaagtagaaaatttagtttagggaaagccctcccacaggtgggaaattgctctcccctctgtggcttggacttacgtttattgtcaaggggagtttttacatggaaatgacaatgggaaaattcagatattttcttagtagtgcagacctttacccctagtctatgaaaaaacaaaccaaaatatgctcttgcgcccaggccagtggtgagttagaggtatgctatcactgtttgtaagcatctggggaggtactgaactgtaagaacatgcttggacacttagtcattgttctgtgtttttattaatgaagaaaagggaagacagacttccaagagttactgtccacccggtggtgtggccccatagcgaagtctaaatgcctgtagagatagagctagctggtgtggttgcagtgaccttgtagaggaaatcagttcattactttgacatcattcagtgagctctcctttcctaaggaagtttaaatgtccttagttagggactgactttcttaagtaagtttaaatttactacatattgtgaagagacaggatcaagttcagaatccttaaatgtctgattaggcatcacttggatgaggaggtgggcgatttggctctgacagctggagatgaaggcacactcataccacatacaagggaggatttggagcttttaagccagtttcagatttactctgaaatgtggagcattcctgcaagactgtgcagctcacggaatatagaagacatggcattttactcagaagtcataagtttttgcccccctcatttacctcgtattaccaagaaagaaaatgttatcgatactaaacaccatcagttcagagggaggatgtgtgtgtgtgcccgcatatgtgtgtgcgtgcgtgtgtgcgcacatagctttaaaagaagacattcaaaatttgatgtgctacaagcctcatgaaagaacaaaagaaatgaagccttttgatatgcattcgctattcccagatgtacgccatgccttttccatgtccctcctatctctgttgaacttatgaatcatactcattacttttcagctttttaaaaggccaatttttgtccagttttctctcttccagtcccagctgaaattagtggaaagaaagtttgatggagctttcagctttgaacaaaatcccttcattgtaaactagcaccatctttatccaggtcttacccagtcaggctaattccagaaacttgtggtttttagtatagtctgtctacctttagccaggcacaggacagccctatgaaaaaatacccaatatatattttttggaaatgaaacattaaaagaacttaaaaagtaatttttggaaatgaggcttcaattagaattatttttctcaaaaaacaaacaaacaaaaaacacaaaaaaaaccactcttctccaaatgcccaagccttctttcaaaattagttagaaacttaagtaaaatacaagtccacaccatccccaaattacaaaatggacttacccttgagagggcatctgcagaatatcatcagggacaaagatctcgaggctaacgatgtaggtttcatttctcagactttgtaatataaggcaagccctctctcagagctgccatcatcactttttgaatttctttgggggttatttaatgaaaaacatgctatgttttgttttaagctgaagtcctattctggacactctgctttgggaaaaaatgttatcatttaatttcctttctgcaaattaaaactaatgaagtgtggccttgtcaaaggctatggagatgttccgggcatactgctgtgctctgtgctttccagcaggcgctcctccctcacgcaggagactcagttgtcctgagagagatgaagcagccttgaagcagatgctgcgttttccataaacctgattttgcctcacatgaaccaaagactctcaaaactccgcttctatagaattagctgaataaaggcattttactgatagctgttcgtgttagcgaaacctgtctacctgctatagcacactctccgatttgggccatttatgcaccccgcaacctgggatctcaaggagctttaaagtcttaatgggaacttggcattttcctgatgatctttaaaatgtggtcactaaactcaggattggcgtgtgcttttagaacactggagtagcccttgttttagaggctgtgcattgagtatcgaccgtattttgtaaaaggcaagatatcctcccttccaggctggtaacgggtttcaaggggactcttgaggaagtgccccctaaaatagaacacagcaataactgggcttcctgtccccacccccaccccagcagtgctctctggcactgggaactctgctagggagtggtggaagtaggaaggatttgtgtgcaaaggaaaatcgtggttgagtttcactgcagcaggctgacgttgcctgatgtgagagcaagtggccgactggggtgcgggtgcacaggtcgggggagcacaggccacagagcgcagcctctgggggtcccccaaggcacagcatatacagcatggtcgccccttgccctggagtctgggaacaaagagaggagccagcctccccgcactgcttcagatggaaaagggaggcagggtgggcttccgttctccagatctgtttgctcttaacaggcagaacatgggagaatccttattcctggttaatcactatgcatatttgaaataaaagaaagcgtaagcctctgcaattttaacttctcaaaggatgtctctgaaaagaatcactttaaaccaatgcctataaaaagcaagtctaccaaaataaactaagactttctatgtggtttgggctccctcttatttttacaagtttcatttttaaaagtaggcaactactttgggttacagtatttttattcatatttaaacatttttacaaaataaataaagtgttttacatagtaaggaatatgtacgtatttccaagtattaagaagccaagtgtttttttttttgacgtattattgacaaatgtattcagcgccatacacaagagaaatattattactccaaagaacgaaagttaacaaaactccaaagcaaaaacccttttaatggaggtgagaaataaatttaatgtaacaac

SEQ ID NO: 12187 - protein, 726 aa, Homo sapiens; identical to SEQ ID NO: 2039

SEQ ID NO: 12188 - DNA, 6009 bp, Homo sapiens
acgagagggcgcagcgcggcgcggcagggattcgcgggcgaccacccggcgcaggagcggccgcgtttcggcctcagaatccattgaagacttgaacaagtgggccctatttcttgtgtctccttttatacttgaagcagaacacatagcatttgtgacggagagcatttgggtacaaagtgagaatttacagagatcatcctcttcagaaacagttcggtttttgcccactagggatgatgtggtttctcatgaggttacttgctctaaaggactttatattttggaaccataagagcacccttgtggcccaggcactttatggatgatcccttttagtgctcccagtaaccttccaagattgtcaagtggtcagactgttgtttgccattagcttgcagacctggggatccttatcggctaattgctgaagcaagtgtggacaacttcagcaagctgggggtggcgttcatggaagatagactccacatggataatggactggtaccccaaaagattgtgtcggtgcacttgcaggactccactctgaaggaagttaaggatcaggtctcaaacaagcaagcccagatcctagagccgaagcctgaaccttctcttgagattaagcctgagcaggacggtatggagcatgttggcagagatgacccaaaggctcttggtgaagaacccaaacaaaggagaggcagtgcctctgggagtgagcctgctggggacagtgacaggggagggggccccgttgagcattatcacctccatctgtctagttgccacgagtgtctggaacttgagaacagcaccattgagtcagtcaagtttgcgtctgccgagaacattccagaccttccctacgattatagcagcagtttggagagtgttgctgatgagacctcccccgaaagagaagggaggagagtcaacctcacgggaaaggcacccaacatcctcctctatgtgggctccgactcccaggaagccctcggccggttccacgaggtccggtctgtgctggccgactgtgtggacattgacagttatattctctaccacctgctggaggacagtgctctcagagacccgtggacggacaactgtctgctgttggtcattgctaccagggagtccattcccgaagacctgtaccagaagttcatggcctatctttctcagggagggaaggtgttgggcctgtcttcatccttcacctttggtggctttcaggtgacaagcaagggtgcactgcacaagacagtccagaacttggttttctccaaggctgaccagagcgaggtgaagctcagcgtcttgagcagtggctgcaggtaccaggaaggccccgtccggctcagccccggcaggctccagggccacctggagaatgaggacaaggacaggatgattgtgcatgtgccttttggaactcgcgggggagaagctgttctttgccaggtgcacttagaactacctcccagctccaacatagtgcaaactccagaagattttaacttgctcaagtcaagcaattttagaagatacgaagtccttagagagattctgacaacccttggcctcagctgtgacatgaaacaagttcctgccttaactcctctttacttgctgtcagctgcggaggaaatcagggatcctcttatgcagtggcttgggaaacatgtggactccgagggagaaataaaatccggccagctctctcttagatttgtttcatcctacgtgtctgaagtagaaataaccccatcttgtatacctgtggtgaccaacatggaggccttctcatcagaacatttcaacttagagatctatcgccaaaatctgcagaccaagcagttggggaaagtaattttgtttgccgaagtgacccccacaacgatgcgtctcctggatgggctgatgtttcagacaccgcaggaaatgggcttaatagtgatcgcggcccggcagaccgagggcaaaggacggggagggaatgtgtggctgagccctgtgggatgtgctctttctactctgctcatctccattccactgagatcccagctgggacagaggatcccgtttgtccagcatctgatgtccgtggctgtcgtggaagcagtgaggtccattcccgagtatcaggatatcaacttacgagtgaagtggcccaacgatatttattacagtgacctcatgaagatcggcggagttctggttaactcaacactcatgggagaaacattttatatacttattggctgtggatttaatgtgactaacagtaaccctaccatctgcatcaacgacctcatcacagaatacaataaacaacacaaggcagaactgaagcccttaagagccgattatctcatcgccagagtcgtgactgtgctggagaaactgatcaaagagtttcaggacaaagggcccaacagcgtccttcccctttattaccgatactgggtccacagtggtcagcaagtccatctgggcagcgcagagggaccaaaggtgtccatcgttggcctggacgattctggcttcctccaggttcaccaggagggcggcgaggttgtgactgtgcacccggacggcaactccttcgacatgctgagaaacctcatcctccccaaacggcggtaatgccgggcgtccccgagacgcggctgcctgtccgtgcccatgcatctggaaatctaatttagagttgtaggtgaattttcttttcctccaattcatttgttaagtctttgttctttttctgtgtttctgtttgtttttaggtttgttttgttgtcgttttctttggtgtttgaagaggctctgggatagatggttaagaagtagaaaatttagtttagggaaagccctcccacaggtgggaaattgctctcccctctgtggcttggacttacgtttattgtcaaggggagtttttacatggaaatgacaatgggaaaattcagatattttcttagtagtgcagacctttacccctagtctatgaaaaaacaaaccaaaatatgctcttgcgcccaggccagtggtgagttagaggtatgctatcactgtttgtaagcatctggggaggtactgaactgtaagaacatgcttggacacttagtcattgttctgtgtttttattaatgaagaaaagggaagacagacttccaagagttactgtccacccggtggtgtggccccatagcgaagtctaaatgcctgtagagatagagctagctggtgtggttgcagtgaccttgtagaggaaatcagttcattactttgacatcattcagtgagctctcctttcctaaggaagtttaaatgtccttagttagggactgactttcttaagtaagtttaaatttactacatattgtgaagagacaggatcaagttcagaatccttaaatgtctgattaggcatcacttggatgaggaggtgggcgatttggctctgacagctggagatgaaggcacactcataccacatacaagggaggatttggagcttttaagccagtttcagatttactctgaaatgtggagcattcctgcaagactgtgcagctcacggaatatagaagacatggcattttactcagaagtcataagtttttgcccccctcatttacctcgtattaccaagaaagaaaatgttatcgatactaaacaccatcagttcagagggaggatgtgtgtgtgtgcccgcatatgtgtgtgcgtgcgtgtgtgcgcacatagctttaaaagaagacattcaaaatttgatgtgctacaagcctcatgaaagaacaaaagaaatgaagccttttgatatgcattcgctattcccagatgtacgccatgccttttccatgtccctcctatctctgttgaacttatgaatcatactcattacttttcagctttttaaaaggccaatttttgtccagttttctctcttccagtcccagctgaaattagtggaaagaaagtttgatggagctttcagctttgaacaaaatcccttcattgtaaactagcaccatctttatccaggtcttacccagtcaggctaattccagaaacttgtggtttttagtatagtctgtctacctttagccaggcacaggacagccctatgaaaaaatacccaatatatattttttggaaatgaaacattaaaagaacttaaaaagtaatttttggaaatgaggcttcaattagaattatttttctcaaaaaacaaacaaacaaaaaacacaaaaaaaaccactcttctccaaatgcccaagccttctttcaaaattagttagaaacttaagtaaaatacaagtccacaccatccccaaattacaaaatggacttacccttgagagggcatctgcagaatatcatcagggacaaagatctcgaggctaacgatgtaggtttcatttctcagactttgtaatataaggcaagccctctctcagagctgccatcatcactttttgaatttctttgggggttatttaatgaaaaacatgctatgttttgttttaagctgaagtcctattctggacactctgctttgggaaaaaatgttatcatttaatttcctttctgcaaattaaaactaatgaagtgtggccttgtcaaaggctatggagatgttccgggcatactgctgtgctctgtgctttccagcaggcgctcctccctcacgcaggagactcagttgtcctgagagagatgaagcagccttgaagcagatgctgcgttttccataaacctgattttgcctcacatgaaccaaagactctcaaaactccgcttctatagaattagctgaataaaggcattttactgatagctgttcgtgttagcgaaacctgtctacctgctatagcacactctccgatttgggccatttatgcaccccgcaacctgggatctcaaggagctttaaagtcttaatgggaacttggcattttcctgatgatctttaaaatgtggtcactaaactcaggattggcgtgtgcttttagaacactggagtagcccttgttttagaggctgtgcattgagtatcgaccgtattttgtaaaaggcaagatatcctcccttccaggctggtaacgggtttcaaggggactcttgaggaagtgccccctaaaatagaacacagcaataactgggcttcctgtccccacccccaccccagcagtgctctctggcactgggaactctgctagggagtggtggaagtaggaaggatttgtgtgcaaaggaaaatcgtggttgagtttcactgcagcaggctgacgttgcctgatgtgagagcaagtggccgactggggtgcgggtgcacaggtcgggggagcacaggccacagagcgcagcctctgggggtcccccaaggcacagcatatacagcatggtcgccccttgccctggagtctgggaacaaagagaggagccagcctccccgcactgcttcagatggaaaagggaggcagggtgggcttccgttctccagatctgtttgctcttaacaggcagaacatgggagaatccttattcctggttaatcactatgcatatttgaaataaaagaaagcgtaagcctctgcaattttaacttctcaaaggatgtctctgaaaagaatcactttaaaccaatgcctataaaaagcaagtctaccaaaataaactaagactttctatgtggtttgggctccctcttatttttacaagtttcatttttaaaagtaggcaactactttgggttacagtatttttattcatatttaaacatttttacaaaataaataaagtgttttacatagtaaggaatatgtacgtatttccaagtattaagaagccaagtgtttttttttttgacgtattattgacaaatgtattcagcgccatacacaagagaaatattattactccaaagaacgaaagttaacaaaactccaaagcaaaaacccttttaatggaggtgagaaataaatttaatgtaacaac

SEQ ID NO: 12189 - protein, 726 aa, Homo sapiens; identical to SEQ ID NO: 2039

SEQ ID NO: 12190 - DNA, 6440 bp, Homo sapiens
cagtccattgaagacttgaacaagtgggccctatttcttgtgtctccttttatacttgaagcagaacacatagcatttgtgacggagagcatttgggtacaaagtgagaatttacagagatcatcctcttcagaaacaacggagtgtcgttctgtcgtccaggctggagtgcagtggtgtggtctcggctcaccacaacctctgcctactgggttccagtgattctcctgcctcagcatcccgagtagctgggactacaggtgcacgctaccatgcccggctaatttttgtatttttagtagaggcgggggtttcaccatgccatccaggctggtttcgaactcctgacctcgtgatccacctgtctcggcctcccaaagtgctgggattacaggtgtgagccaccgcgcctggccctgtattttcaaattctttacctctgcgtttccagccttgctccatccaatttgttactagagctttttaacaatttcacgttgaattaagatgatttggaagaggagaaacaagagtcagaaaaattagcagcatccgtgatctgactctgggtaccagtgggttgttgagatttctgttccccactcactgcagagctgctgcctgccaatgccccctgttgggcagggccacctgtgctagtttaacctggggtctttcactcccggactgcttcttggatgtgagttttaagttgagcagagaagatatgccttgcctgctgccatacattgtaacatcaagtcaagagctttagttacttaacagatttctgctggctgctattataggaggaaactcctttgtttagggacagccagggcttccttagctttgatctttgggagtgagccttttgcttgacttcccttctcttttccatgcctttgtttccatctcgaagtgcaaatttaaagtgtcctgtttgcctttatccactggaaggcaaacaccctggacgacgtatcagtgacagcgcggttctgctttgatcggagcacccagcgctgcttgaaggcgtttgcatggtccatggctcatggaccacgctcctagaaaacggaaatgcacttagattgtcaagtggtcagactgttgtttgccattagcttgcagacctggggatccttatcggctaattgctgaagcaagtgtggacaacttcagcaagctgggggtggcgttcatggaagatagactccacatggataatggactggtaccccaaaagattgtgtcggtgcacttgcaggactccactctgaaggaagttaaggatcaggtctcaaacaagcaagcccagatcctagagccgaagcctgaaccttctcttgagattaagcctgagcaggacggtatggagcatgttggcagagatgacccaaaggctcttggtgaagaacccaaacaaaggagaggcagtgcctctgggagtgagcctgctggggacagtgacaggggagggggccccgttgagcattatcacctccatctgtctagttgccacgagtgtctggaacttgagaacagcaccattgagtcagtcaagtttgcgtctgccgagaacattccagaccttccctacgattatagcagcagtttggagagtgttgctgatgagacctcccccgaaagagaagggaggagagtcaacctcacgggaaaggcacccaacatcctcctctatgtgggctccgactcccaggaagccctcggccggttccacgaggtccggtctgtgctggccgactgtgtggacattgacagttatattctctaccacctgctggaggacagtgctctcagagacccgtggacggacaactgtctgctgttggtcattgctaccagggagtccattcccgaagacctgtaccagaagttcatggcctatctttctcagggagggaaggtgttgggcctgtcttcatccttcacctttggtggctttcaggtgacaagcaagggtgcactgcacaagacagtccagaacttggttttctccaaggctgaccagagcgaggtgaagctcagcgtcttgagcagtggctgcaggtaccaggaaggccccgtccggctcagccccggcaggctccagggccacctggagaatgaggacaaggacaggatgattgtgcatgtgccttttggaactcgcgggggagaagctgttctttgccaggtgcacttagaactacctcccagctccaacatagtgcaaactccagaagattttaacttgctcaagtcaagcaattttagaagatacgaagtccttagagagattctgacaacccttggcctcagctgtgacatgaaacaagttcctgccttaactcctctttacttgctgtcagctgcggaggaaatcagggatcctcttatgcagtggcttgggaaacatgtggactccgagggagaaataaaatccggccagctctctcttagatttgtttcatcctacgtgtctgaagtagaaataaccccatcttgtatacctgtggtgaccaacatggaggccttctcatcagaacatttcaacttagagatctatcgccaaaatctgcagaccaagcagttggggaaagtaattttgtttgccgaagtgacccccacaacgatgcgtctcctggatgggctgatgtttcagacaccgcaggaaatgggcttaatagtgatcgcggcccggcagaccgagggcaaaggacggggagggaatgtgtggctgagccctgtgggatgtgctctttctactctgctcatctccattccactgagatcccagctgggacagaggatcccgtttgtccagcatctgatgtccgtggctgtcgtggaagcagtgaggtccattcccgagtatcaggatatcaacttacgagtgaagtggcccaacgatatttattacagtgacctcatgaagatcggcggagttctggttaactcaacactcatgggagaaacattttatatacttattggctgtggatttaatgtgactaacagtaaccctaccatctgcatcaacgacctcatcacagaatacaataaacaacacaaggcagaactgaagcccttaagagccgattatctcatcgccagagtcgtgactgtgctggagaaactgatcaaagagtttcaggacaaagggcccaacagcgtccttcccctttattaccgatactgggtccacagtggtcagcaagtccatctgggcagcgcagagggaccaaaggtgtccatcgttggcctggacgattctggcttcctccaggttcaccaggagggcggcgaggttgtgactgtgcacccggacggcaactccttcgacatgctgagaaacctcatcctccccaaacggcggtaatgccgggcgtccccgagacgcggctgcctgtccgtgcccatgcatctggaaatctaatttagagttgtaggtgaattttcttttcctccaattcatttgttaagtctttgttctttttctgtgtttctgtttgtttttaggtttgttttgttgtcgttttctttggtgtttgaagaggctctgggatagatggttaagaagtagaaaatttagtttagggaaagccctcccacaggtgggaaattgctctcccctctgtggcttggacttacgtttattgtcaaggggagtttttacatggaaatgacaatgggaaaattcagatattttcttagtagtgcagacctttacccctagtctatgaaaaaacaaaccaaaatatgctcttgcgcccaggccagtggtgagttagaggtatgctatcactgtttgtaagcatctggggaggtactgaactgtaagaacatgcttggacacttagtcattgttctgtgtttttattaatgaagaaaagggaagacagacttccaagagttactgtccacccggtggtgtggccccatagcgaagtctaaatgcctgtagagatagagctagctggtgtggttgcagtgaccttgtagaggaaatcagttcattactttgacatcattcagtgagctctcctttcctaaggaagtttaaatgtccttagttagggactgactttcttaagtaagtttaaatttactacatattgtgaagagacaggatcaagttcagaatccttaaatgtctgattaggcatcacttggatgaggaggtgggcgatttggctctgacagctggagatgaaggcacactcataccacatacaagggaggatttggagcttttaagccagtttcagatttactctgaaatgtggagcattcctgcaagactgtgcagctcacggaatatagaagacatggcattttactcagaagtcataagtttttgcccccctcatttacctcgtattaccaagaaagaaaatgttatcgatactaaacaccatcagttcagagggaggatgtgtgtgtgtgcccgcatatgtgtgtgcgtgcgtgtgtgcgcacatagctttaaaagaagacattcaaaatttgatgtgctacaagcctcatgaaagaacaaaagaaatgaagccttttgatatgcattcgctattcccagatgtacgccatgccttttccatgtccctcctatctctgttgaacttatgaatcatactcattacttttcagctttttaaaaggccaatttttgtccagttttctctcttccagtcccagctgaaattagtggaaagaaagtttgatggagctttcagctttgaacaaaatcccttcattgtaaactagcaccatctttatccaggtcttacccagtcaggctaattccagaaacttgtggtttttagtatagtctgtctacctttagccaggcacaggacagccctatgaaaaaatacccaatatatattttttggaaatgaaacattaaaagaacttaaaaagtaatttttggaaatgaggcttcaattagaattatttttctcaaaaaacaaacaaacaaaaaacacaaaaaaaaccactcttctccaaatgcccaagccttctttcaaaattagttagaaacttaagtaaaatacaagtccacaccatccccaaattacaaaatggacttacccttgagagggcatctgcagaatatcatcagggacaaagatctcgaggctaacgatgtaggtttcatttctcagactttgtaatataaggcaagccctctctcagagctgccatcatcactttttgaatttctttgggggttatttaatgaaaaacatgctatgttttgttttaagctgaagtcctattctggacactctgctttgggaaaaaatgttatcatttaatttcctttctgcaaattaaaactaatgaagtgtggccttgtcaaaggctatggagatgttccgggcatactgctgtgctctgtgctttccagcaggcgctcctccctcacgcaggagactcagttgtcctgagagagatgaagcagccttgaagcagatgctgcgttttccataaacctgattttgcctcacatgaaccaaagactctcaaaactccgcttctatagaattagctgaataaaggcattttactgatagctgttcgtgttagcgaaacctgtctacctgctatagcacactctccgatttgggccatttatgcaccccgcaacctgggatctcaaggagctttaaagtcttaatgggaacttggcattttcctgatgatctttaaaatgtggtcactaaactcaggattggcgtgtgcttttagaacactggagtagcccttgttttagaggctgtgcattgagtatcgaccgtattttgtaaaaggcaagatatcctcccttccaggctggtaacgggtttcaaggggactcttgaggaagtgccccctaaaatagaacacagcaataactgggcttcctgtccccacccccaccccagcagtgctctctggcactgggaactctgctagggagtggtggaagtaggaaggatttgtgtgcaaaggaaaatcgtggttgagtttcactgcagcaggctgacgttgcctgatgtgagagcaagtggccgactggggtgcgggtgcacaggtcgggggagcacaggccacagagcgcagcctctgggggtcccccaaggcacagcatatacagcatggtcgccccttgccctggagtctgggaacaaagagaggagccagcctccccgcactgcttcagatggaaaagggaggcagggtgggcttccgttctccagatctgtttgctcttaacaggcagaacatgggagaatccttattcctggttaatcactatgcatatttgaaataaaagaaagcgtaagcctctgcaattttaacttctcaaaggatgtctctgaaaagaatcactttaaaccaatgcctataaaaagcaagtctaccaaaataaactaagactttctatgtgg

SEQ ID NO: 12191 - protein, 726 aa, Homo sapiens; identical to SEQ ID NO: 2039

SEQ ID NO: 12192 - DNA, 5707 bp, Homo sapiens
acgagagggcgcagcgcggcgcggcagggattcgcgggcgaccacccggcgcaggagcggccgcgtttcggcctcagaatccattgaagacttgaacaagtgggccctatttcttgtgtctccttttatacttgaagcagaacacatagcatttgtgacggagagcatttgggtacaaagtgagaatttacagagatcatcctcttcagaaacagttcggtttttgcccactagggatgatgtggtttctcatgaggttacttgctctaaaggactttatattttggaaccataagagcacccttgtggcccaggcactttatggatgatcccttttagtgctcccagtaaccttccaagattgtcaagtggtcagactgttgtttgccattagcttgcagacctggggatccttatcggctaattgctgaagcaagtgtggacaacttcagcaagctgggggtggcgttcatggaagatagactccacatggataatggactggtaccccaaaagattgtgtcggtgcacttgcaggactccactctgaaggaagttaaggatcaggtctcaaacaagcaagcccagatcctagagccgaagcctgaaccttctcttgagattaagcctgagcaggacggtatggagcatgttggcagagatgacccaaaggctcttggtgaagaacccaaacaaaggagaggcagtgcctctgggagtgagcctgctggggacagtgacaggggagggggccccgttgagcattatcacctccatctgtctagttgccacgagtgtctggaacttgagaacagcaccattgagtcagtcaagtttgcgtctgccgagaacattccagaccttccctacgattatagcagcagtttggagagtgttgctgatgagacctcccccgaaagagaagggaggagagtcaacctcacgggaaaggcacccaacatcctcctctatgtgggctccgactcccaggaagccctcggccggttccacgaggtccggtctgtgctggccgactgtgtggacattgacagttatattctctaccacctgctggaggacagtgctctcagagacccgtggacggacaactgtctgctgttggtcattgctaccagggagtccattcccgaagacctgtaccagaagttcatggcctatctttctcagggagggaaggtgttgggcctgtcttcatccttcacctttggtggctttcaggtgacaagcaagggtgcactgcacaagacagtccagaacttggttttctccaaggctgaccagagcgaggtgaagctcagcgtcttgagcagtggctgcaggtaccaggaaggccccgtccggctcagccccggcaggctccagggccacctggagaatgaggacaaggacaggatgattgtgcatgtgccttttggaactcgcgggggagaagctgttctttgccaggtgcacttagaactacctcccagctccaacatagtgcaaactccagaagattttaacttgctcaagtcaagcaattttagaagatacgaagtccttagagagattctgacaacccttggcctcagctgtgacatgaaacaagttcctgccttaactcctctttacttgctgtcagctgcggaggaaatcagggatcctcttatgcagtggcttgggaaacatgtggactccgagggagaaataaaatccggccagctctctcttagatttgtttcatcctacgtgtctgaagtagaaataaccccatcttgtatacctgtggtgaccaacatggaggccttctcatcagaacatttcaacttagagatctatcgccaaaatctgcagaccaagcagttggggaaagtaattttgtttgccgaagtgacccccacaacgatgcgtctcctggatgggctgatgtttcagacaccgcaggaaatgggcttaatagtgatcgcggcccggcagaccgagggcaaaggacggggagggaatgtgtggctgagccctgtgggatgtgctctttctactctgctcatctccattccactgagatcccagctgggacagaggatcccgtttgtccagcatctgatgtccgtggctgtcgtggaagcagtgaggtccattcccgagtatcaggatatcaacttacgagtgaagtggcccaacgatatttattacagtgacctcatgaagatcggcggagttctggttaactcaacactcatgggagaaacattttatatacttattggctgtggatttaatgtgactaacagtaaccctaccatctgcatcaacgacctcatcacagaatacaataaacaacacaaggcagaactgaagcccttaagagccgattatctcatcgccagagtcgtgactgtgctggagaaactgatcaaagagtttcaggacaaagggcccaacagcgtccttcccctttattaccgatactgggtccacagtggtcagcaagtccatctgggcagcgcagagggaccaaaggtgtccatcgttggcctggacgattctggcttcctccaggttcaccaggagggcggcgaggttgtgactgtgcacccggacggcaactccttcgacatgctgagaaacctcatcctccccaaacggcggtaatgccgggcgtccccgagacgcggctgcctgtccgtgcccatgcatctggaaatctaatttagagttgtaggtgaattttcttttcctccaattcatttgttaagtctttgttctttttctgtgtttctgtttgtttttaggtttgttttgttgtcgttttctttggtgtttgaagaggctctgggatagatggttaagaagtagaaaatttagtttagggaaagccctcccacaggtgggaaattgctctcccctctgtggcttggacttacgtttattgtcaaggggagtttttacatggaaatgacaatgggaaaattcagatattttcttagtagtgcagacctttacccctagtctatgaaaaaacaaaccaaaatatgctcttgcgcccaggccagtggtgagttagaggtatgctatcactgtttgtaagcatctggggaggtactgaactgtaagaacatgcttggacacttagtcattgttctgtgtttttattaatgaagaaaagggaagacagacttccaagagttactgtccacccggtggtgtggccccatagcgaagtctaaatgcctgtagagatagagctagctggtgtggttgcagtgaccttgtagaggaaatcagttcattactttgacatcattcagtgagctctcctttcctaaggaagtttaaatgtccttagttagggactgactttcttaagtaagtttaaatttactacatattgtgaagagacaggatcaagttcagaatccttaaatgtctgattaggcatcacttggatgaggaggtgggcgatttggctctgacagctggagatgaaggcacactcataccacatacaagggaggatttggagcttttaagccagtttcagatttactctgaaatgtggagcattcctgcaagactgtgcagctcacggaatatagaagacatggcattttactcagaagtcataagtttttgcccccctcatttacctcgtattaccaagaaagaaaatgttatcgatactaaacaccatcagttcagagggaggatgtgtgtgtgtgcccgcatatgtgtgtgcgtgcgtgtgtgcgcacatagctttaaaagaagacattcaaaatttgatgtgctacaagcctcatgaaagaacaaaagaaatgaagccttttgatatgcattcgctattcccagatgtacgccatgccttttccatgtccctcctatctctgttgaacttatgaatcatactcattacttttcagctttttaaaaggccaatttttgtccagttttctctcttccagtcccagctgaaattagtggaaagaaagtttgatggagctttcagctttgaacaaaatcccttcattgtaaactagcaccatctttatccaggtcttacccagtcaggctaattccagaaacttgtggtttttagtatagtctgtctacctttagccaggcacaggacagccctatgaaaaaatacccaatatatattttttggaaatgaaacattaaaagaacttaaaaagtaatttttggaaatgaggcttcaattagaattatttttctcaaaaaacaaacaaacaaaaaacacaaaaaaaaccactcttctccaaatgcccaagccttctttcaaaattagttagaaacttaagtaaaatacaagtccacaccatccccaaattacaaaatggacttacccttgagagggcatctgcagaatatcatcagggacaaagatctcgaggctaacgatgtaggtttcatttctcagactttgtaatataaggcaagccctctctcagagctgccatcatcactttttgaatttctttgggggttatttaatgaaaaacatgctatgttttgttttaagctgaagtcctattctggacactctgctttgggaaaaaatgttatcatttaatttcctttctgcaaattaaaactaatgaagtgtggccttgtcaaaggctatggagatgttccgggcatactgctgtgctctgtgctttccagcaggcgctcctccctcacgcaggagactcagttgtcctgagagagatgaagcagccttgaagcagatgctgcgttttccataaacctgattttgcctcacatgaaccaaagactctcaaaactccgcttctatagaattagctgaataaaggcattttactgatagctgttcgtgttagcgaaacctgtctacctgctatagcacactctccgatttgggccatttatgcaccccgcaacctgggatctcaaggagctttaaagtcttaatgggaacttggcattttcctgatgatctttaaaatgtggtcactaaactcaggattggcgtgtgcttttagaacactggagtagcccttgttttagaggctgtgcattgagtatcgaccgtattttgtaaaaggcaagatatcctcccttccaggctggtaacgggtttcaaggggactcttgaggaagtgccccctaaaatagaacacagcaataactgggcttcctgtccccacccccaccccagcagtgctctctggcactgggaactctgctagggagtggtggaagtaggaaggatttgtgtgcaaaggaaaatcgtggttgagtttcactgcagcaggctgacgttgcctgatgtgagagcaagtggccgactggggtgcgggtgcacaggtcgggggagcacaggccacagagcgcagcctctgggggtcccccaaggcacagcatatacagcatggtcgccccttgccctggagtctgggaacaaagagaggagccagcctccccgcactgcttcagatggaaaagggaggcagggtgggcttccgttctccagatctgtttgctcttaacaggcagaacatgggagaatccttattcctggttaatcactatgcatatttgaaataaaagaaagcgtaagcctctgcaattttaacttctcaaaggatgtctctgaaaagaatcactttaaaccaatgcctataaaaagcaagtctaccaaaataaactaagactttctatgtgg

SEQ ID NO: 12193 - protein, 726 aa, Homo sapiens; identical to SEQ ID NO: 2039

SEQ ID NO: 12194 - DNA, 3131 bp, Homo sapiens
acgagagggcgcagcgcggcgcggcagggattcgcgggcgaccacccggcgcaggagcggccgcgtttcggcctcagaatccattgaagacttgaacaagtgggccctatttcttgtgtctccttttatacttgaagcagaacacatagcatttgtgacggagagcatttgggtacaaagtgagaatttacagagatcatcctcttcagaaacagttcggtttttgcccactagggatgatgtggtttctcatgaggttacttgctctaaaggactttatattttggaaccataagagcacccttgtggcccaggcactttatggatgatcccttttagtgctcccagtaaccttccaagattgtcaagtggtcagactgttgtttgccattagcttgcagacctggggatccttatcggctaattgctgaagcaagtgtggacaacttcagcaagctgggggtggcgttcatggaagatagactccacatggataatggactggtaccccaaaagattgtgtcggtgcacttgcaggactccactctgaaggaagttaaggatcaggtctcaaacaagcaagcccagatcctagagccgaagcctgaaccttctcttgagattaagcctgagcaggacggtatggagcatgttggcagagatgacccaaaggctcttggtgaagaacccaaacaaaggagaggcagtgcctctgggagtgagcctgctggggacagtgacaggggagggggccccgttgagcattatcacctccatctgtctagttgccacgagtgtctggaacttgagaacagcaccattgagtcagtcaagtttgcgtctgccgagaacattccagaccttccctacgattatagcagcagtttggagagtgttgctgatgagacctcccccgaaagagaagggaggagagtcaacctcacgggaaaggcacccaacatcctcctctatgtgggctccgactcccaggaagccctcggccggttccacgaggtccggtctgtgctggccgactgtgtggacattgacagttatattctctaccacctgctggaggacagtgctctcagagacccgtggacggacaactgtctgctgttggtcattgctaccagggagtccattcccgaagacctgtaccagaagttcatggcctatctttctcagggagggaaggtgttgggcctgtcttcatccttcacctttggtggctttcaggtgacaagcaagggtgcactgcacaagacagtccagaacttggttttctccaaggctgaccagagcgaggtgaagctcagcgtcttgagcagtggctgcaggtaccaggaaggccccgtccggctcagccccggcaggctccagggccacctggagaatgaggacaaggacaggatgattgtgcatgtgccttttggaactcgcgggggagaagctgttctttgccaggtgcacttagaactacctcccagctccaacatagtgcaaactccagaagattttaacttgctcaagtcaagcaattttagaagatacgaagtccttagagagattctgacaacccttggcctcagctgtgacatgaaacaagttcctgccttaactcctctttacttgctgtcagctgcggaggaaatcagggatcctcttatgcagtggcttgggaaacatgtggactccgagggagaaataaaatccggccagctctctcttagatttgtttcatcctacgtgtctgaagtagaaataaccccatcttgtatacctgtggtgaccaacatggaggccttctcatcagaacatttcaacttagagatctatcgccaaaatctgcagaccaagcagttggggaaagtaattttgtttgccgaagtgacccccacaacgatgcgtctcctggatgggctgatgtttcagacaccgcaggaaatgggcttaatagtgatcgcggcccggcagaccgagggcaaaggacggggagggaatgtgtggctgagccctgtgggatgtgctctttctactctgctcatctccattccactgagatcccagctgggacagaggatcccgtttgtccagcatctgatgtccgtggctgtcgtggaagcagtgaggtccattcccgagtatcaggatatcaacttacgagtgaagtggcccaacgatatttattacagtgacctcatgaagatcggcggagttctggttaactcaacactcatgggagaaacattttatatacttattggctgtggatttaatgtgactaacagtaaccctaccatctgcatcaacgacctcatcacagaatacaataaacaacacaaggcagaactgaagcccttaagagccgattatctcatcgccagagtcgtgactgtgctggagaaactgatcaaagagtttcaggacaaagggcccaacagcgtccttcccctttattaccgatactgggtccacagtggtcagcaagtccatctgggcagcgcagagggaccaaaggtgtccatcgttggcctggacgattctggcttcctccaggttcaccaggagggcggcgaggttgtgactgtgcacccggacggcaactccttcgacatgctgagaaacctcatcctccccaaacggcggtaatgccgggcgtccccgagacgcggctgcctgtccgtgcccatgcatctggaaatctaatttagagttgtaggtgaattttcttttcctccaattcatttgttaagtctttgttctttttctgtgtttctgtttgtttttaggtttgttttgttgtcgttttctttggtgtttgaagaggctctgggatagatggttaagaagtagaaaatttagtttagggaaagccctcccacaggtgggaaattgctctcccctctgtggcttggacttacgtttattgtcaaggggagtttttacatggaaatgacaatgggaaaattcagatattttcttagtagtgcagacctttacccctagtctatgaaaaaacaaaccaaaatatgctcttgcgcccaggccagtggtgagttagaggtatgctatcactgtttgtaagcatctggggaggtactgaactgtaagaacatgcttggacactt

SEQ ID NO: 12195 - protein, 726 aa, Homo sapiens; identical to SEQ ID NO: 2039

SEQ ID NO: 12196 - DNA, 2681 bp, Homo sapiens
tccattgaagacttgaacaagtgggccctatttcttgtgtctccttttatacttgaagcagaacacatagcatttgtgacggagagcatttgggtacaaagtgagaatttacagagatcatcctcttcagaaacagttcggtttttgcccactagggatgatgtggtttctcatgaggttacttgctctaaaggactttatattttggaaccataagagcacccttgtggcccaggcactttatggatgatcccttttagtgctcccagtaaccttccaagattgtcaagtggtcagactgttgtttgccattagcttgcagacctggggatccttatcggctaattgctgaagcaagtgtggacaacttcagcaagctgggggtggcgttcatggaagatagactccacatggataatggactggtaccccaaaagattgtgtcggtgcacttgcaggactccactctgaaggaagttaaggatcaggtctcaaacaagcaagcccagatcctagagccgaagcctgaaccttctcttgagattaagcctgagcaggacggtatggagcatgttggcagagatgacccaaaggctcttggtgaagaacccaaacaaaggagaggcagtgcctctgggagtgagcctgctggggacagtgacaggggagggggccccgttgagcattatcacctccatctgtctagttgccacgagtgtctggaacttgagaacagcaccattgagtcagtcaagtttgcgtctgccgagaacattccagaccttccctacgattatagcagcagtttggagagtgttgctgatgagacctcccccgaaagagaagggaggagagtcaacctcacgggaaaggcacccaacatcctcctctatgtgggctccgactcccaggaagccctcggccggttccacgaggtccggtctgtgctggccgactgtgtggacattgacagttatattctctaccacctgctggaggacagtgctctcagagacccgtggacggacaactgtctgctgttggtcattgctaccagggagtccattcccgaagacctgtaccagaagttcatggcctatctttctcagggagggaaggtgttgggcctgtcttcatccttcacctttggtggctttcaggtgacaagcaagggtgcactgcacaagacagtccagaacttggttttctccaaggctgaccagagcgaggtgaagctcagcgtcttgagcagtggctgcaggtaccaggaaggccccgtccggctcagccccggcaggctccagggccacctggagaatgaggacaaggacaggatgattgtgcatgtgccttttggaactcgcgggggagaagctgttctttgccaggtgcacttagaactacctcccagctccaacatagtgcaaactccagaagattttaacttgctcaagtcaagcaattttagaagatacgaagtccttagagagattctgacaacccttggcctcagctgtgacatgaaacaagttcctgccttaactcctctttacttgctgtcagctgcggaggaaatcagggatcctcttatgcagtggcttgggaaacatgtggactccgagggagaaataaaatccggccagctctctcttagatttgtttcatcctacgtgtctgaagtagaaataaccccatcttgtatacctgtggtgaccaacatggaggccttctcatcagaacatttcaacttagagatctatcgccaaaatctgcagaccaagcagttggggaaagtaattttgtttgccgaagtgacccccacaacgatgcgtctcctggatgggctgatgtttcagacaccgcaggaaatgggcttaatagtgatcgcggcccggcagaccgagggcaaaggacggggagggaatgtgtggctgagccctgtgggatgtgctctttctactctgctcatctccattccactgagatcccagctgggacagaggatcccgtttgtccagcatctgatgtccgtggctgtcgtggaagcagtgaggtccattcccgagtatcaggatatcaacttacgagtgaagtggcccaacgatatttattacagtgacctcatgaagatcggcggagttctggttaactcaacactcatgggagaaacattttatatacttattggctgtggatttaatgtgactaacagtaaccctaccatctgcatcaacgacctcatcacagaatacaataaacaacacaaggcagaactgaagcccttaagagccgattatctcatcgccagagtcgtgactgtgctggagaaactgatcaaagagtttcaggacaaagggcccaacagcgtccttcccctttattaccgatactgggtccacagtggtcagcaagtccatctgggcagcgcagagggaccaaaggtgtccatcgttggcctggacgattctggcttcctccaggttcaccaggagggcggcgaggttgtgactgtgcacccggacggcaactccttcgacatgctgagaaacctcatcctccccaaacggcggtaatgccgggcgtccccgagacgcggctgcctgtccgtgcccatgcatctggaaatctaatttagagttgtaggtgaattttcttttcctccaattcatttgttaagtctt

SEQ ID NO: 12197 - protein, 726 aa, Homo sapiens; identical to SEQ ID NO: 2039

SEQ ID NO: 12198 - DNA, 531 bp, Homo sapiens
cctagctccaagccctcccccttaccagctgtgtgtgttggcttcctgagatgaatggtggaaaaggctctggtcctgactgtgctgaactcaatggcgatacctctggactcgagcagcatgtcagtacagcttagccatgtgacccagaacatgtctgtctaccaagtttctgtatgtgggaggcctggacaatgacggccgcaatttccctctccttaaatagagcttcagggaaagaatccctcttttcagatgagtggcagttaccgtacctgctgggagcgttgcattgaacccagggaccagccaagaggaactaatggaccccgtggaagatcatttgagcctcagctacgggaagagctggatgcaggccggggaagcggattggtggactgcacattcatttaaggttgaaatgcttagcattgtaaaggtgactgtgaattttaagcttcattctttattgacctggcagatgggagagtgctgtgtcttggtgtaatgaagcattatgttggtacagtg

SEQ ID NO: 12199 - protein, 39 aa, Homo sapiens
MWEAWTMTAAISLSLNRASGKESLFSDEWQLPYLLGALH

SEQ ID NO: 12200 - DNA, 1440 bp, Homo sapiens
catgctcatcacgctgtgctacctgtacctgtgggcgcgctggggtcgccggccggctgagctcgtgcgcgccacggtgcggcggctgcgtgcctcgcgctgttccttcaccttctgcggcgcggccgcgcagcccccgggcgcccgcgtgtgcctgagccgtggcggccgcgtcttctgcgtcagcgacagccagtccattgaagacttgaacaagtgggccctatttcttgtgtctccttttatacttgaagcagaacacatagcatttgtgacggagagcatttgggtacaaagtgagaatttacagagatcatcctcttcagaaacaattgtcaagtggtcagactgttgtttgccattagcttgcagacctggggatccttatcggctaattgctgaagcaagtgtggacaacttcagcaagctgggggtggcgttcatggaagatagactccacatggataatggactggtaccccaaaagattgtgtcggtgcacttgcaggactccactctgaaggaagttaaggatcaggtctcaaacaagcaagcccagatcctagagccgaagcctgaaccttctcttgagattaagcctgagcaggacggtatggagcatgttggcagagatgacccaaaggctcttggtgaagaacccaaacaaaggagaggcagtgcctctgggagtgagcctgctggggacagtgacaggggagggggccccgttgagcattatcacctccatctgtctagttgccacgagtgtctggaacttgagaacagcaccattgagtcagtcaagtttgcgtctgccgagaacattccagaccttccctacgattatagcagcagtttggagagtgttgctgatgagacctcccccgaaagagaagggaggagagtcaacctcacgggaaaggcacccaacatcctcctctatgtgggctccgactcccaggaagccctcggccggttccacgaggtccggtctgtgctggccgactgtgtggacattgacagttatattctctaccacctgctggaggacagtgctctcagagacccgtggacggacaactgtctgctgttggtcattgctaccagggagtccattcccgaagacctgtaccagaagttcatggcctatctttctcagggagggaaggtgttgggcctgtcttcatccttcacctttggtggctttcaggtgacaagcaagggtgcactgcacaagacagtccagaacttggttttctccaaggctgaccagagcgaggtgaagctcagcgtcttgagcagtggctgcaggtaccaggaaggccccgtccggctcagccccggcaggctccagggccacctggagaatgaggacaaggacaggatgattgtgcatgtgccttttggaactcgcgggggagaagctgttctttgccaggt

SEQ ID NO: 12201 - protein, 478 aa, Homo sapiens
MLITLCYLYLWARWGRRPAELVRATVRRLRASRCSFTFCGAAAQPPGARVCLSRGGRVFCVSDSQSIEDLNKWALFLVSPFILEAEHIAFVTESIWVQSENLQRSSSSETIVKWSDCCLPLACRPGDPYRLIAEASVDNFSKLGVAFMEDRLHMDNGLVPQKIVSVHLQDSTLKEVKDQVSNKQAQILEPKPEPSLEIKPEQDGMEHVGRDDPKALGEEPKQRRGSASGSEPAGDSDRGGGPVEHYHLHLSSCHECLELENSTIESVKFASAENIPDLPYDYSSSLESVADETSPEREGRRVNLTGKAPNILLYVGSDSQEALGRFHEVRSVLADCVDIDSYILYHLLEDSALRDPWTDNCLLLVIATRESIPEDLYQKFMAYLSQGGKVLGLSSSFTFGGFQVTSKGALHKTVQNLVFSKADQSEVKLSVLSSGCRYQEGPVRLSPGRLQGHLENEDKDRMIVHVPFGTRGGEAVLC

SEQ ID NO: 12202 - DNA, 1501 bp, Homo sapiens
ggccgcccggggctctggggactcgggtgtccaggtgccgaagtcgccgcttccacgggggactcaggcccgtgagtgggtttcctaagaacttaccagattccacggctcgggtttcctgccttggatcctgctttttattccccagggggagttatttatagacaggaatcgtgtgttcaaggcctggctcttcggactcggcgtttttcttgttcgaggtgcttcaatgggggctggatgccatcatcttccagtccattgaagacttgaacaagtgggccctatttcttgtgtctccttttatacttgaagcagaacacatagcatttgtgacggagagcatttgggtacaaagtgagaatttacagagatcatcctcttcagaaacaattgtcaagtggtcagactgttgtttgccattagcttgcagacctggggatccttatcggctaattgctgaagcaagtgtggacaacttcagcaagctgggggtggcgttcatggaagatagactccacatggataatggactggtaccccaaaagattgtgtcggtgcacttgcaggactccactctgaaggaagttaaggatcaggtctcaaacaagcaagcccagatcctagagccgaagcctgaaccttctcttgagattaagcctgagcaggacggtatggagcatgttggcagagatgacccaaaggctcttggtgaagaacccaaacaaaggagaggcagtgcctctgggagtgagcctgctggggacagtgacaggggagggggccccgttgagcattatcacctccatctgtctagttgccacgagtgtctggaacttgagaacagcaccattgagtcagtcaagtttgcgtctgccgagaacattccagaccttccctacgattatagcagcagtttggagagtgttgctgatgagacctcccccgaaagagaagggaggagagtcaacctcacgggaaaggcacccaacatcctcctctatgtgggctccgactcccaggaagccctcggccggttccacgaggtccggtctgtgctggccgactgtgtggacattgacagttatattctctaccacctgctggaggacagtgctctcagagacccgtggacggacaactgtctgctgttggtcattgctaccagggagtccattcccgaagacctgtaccagaagttcatggcctatctttctcagggagggaaggtgttgggcctgtcttcatccttcacctttggtggctttcaggtgacaagcaagggtgcactgcacaagacagtccagaacttggttttctccaaggctgaccagagcgaggtgaagctcagcgtcttgagcagtggctgcaggtaccaggaaggccccgtccggctcagccccggcaggctccagggccacctggagaatgaggacaaggacaggatgattgtgcatgtgccttttggaactcgcgggggagaagctgttctttgccaggt

SEQ ID NO: 12203 - protein, 331 aa, Homo sapiens
MEDRLHMDNGLVPQKIVSVHLQDSTLKEVKDQVSNKQAQILEPKPEPSLEIKPEQDGMEHVGRDDPKALGEEPKQRRGSASGSEPAGDSDRGGGPVEHYHLHLSSCHECLELENSTIESVKFASAENIPDLPYDYSSSLESVADETSPEREGRRVNLTGKAPNILLYVGSDSQEALGRFHEVRSVLADCVDIDSYILYHLLEDSALRDPWTDNCLLLVIATRESIPEDLYQKFMAYLSQGGKVLGLSSSFTFGGFQVTSKGALHKTVQNLVFSKADQSEVKLSVLSSGCRYQEGPVRLSPGRLQGHLENEDKDRMIVHVPFGTRGGEAVLC

SEQ ID NO: 12204 - DNA, 1433 bp, Homo sapiens
agcgcggcgcggcagggattcgcgggcgaccacccggcgcaggagcggccgcgtttcggcctcagaatccattgaagacttgaacaagtgggccctatttcttgtgtctccttttatacttgaagcagaacacatagcatttgtgacggagagcatttgggtacaaagtgagaatttacagagatcatcctcttcagaaacaacggagtgtcgttctgtcgtccaggctggagtgcagtggtgtggtctcggctcaccacaacctctgcctactgggttccagtgattctcctgcctcagcatcccgagtagctgggactacagattgtcaagtggtcagactgttgtttgccattagcttgcagacctggggatccttatcggctaattgctgaagcaagtgtggacaacttcagcaagctgggggtggcgttcatggaagatagactccacatggataatggactggtaccccaaaagattgtgtcggtgcacttgcaggactccactctgaaggaagttaaggatcaggtctcaaacaagcaagcccagatcctagagccgaagcctgaaccttctcttgagattaagcctgagcaggacggtatggagcatgttggcagagatgacccaaaggctcttggtgaagaacccaaacaaaggagaggcagtgcctctgggagtgagcctgctggggacagtgacaggggagggggccccgttgagcattatcacctccatctgtctagttgccacgagtgtctggaacttgagaacagcaccattgagtcagtcaagtttgcgtctgccgagaacattccagaccttccctacgattatagcagcagtttggagagtgttgctgatgagacctcccccgaaagagaagggaggagagtcaacctcacgggaaaggcacccaacatcctcctctatgtgggctccgactcccaggaagccctcggccggttccacgaggtccggtctgtgctggccgactgtgtggacattgacagttatattctctaccacctgctggaggacagtgctctcagagacccgtggacggacaactgtctgctgttggtcattgctaccagggagtccattcccgaagacctgtaccagaagttcatggcctatctttctcagggagggaaggtgttgggcctgtcttcatccttcacctttggtggctttcaggtgacaagcaagggtgcactgcacaagacagtccagaacttggttttctccaaggctgaccagagcgaggtgaagctcagcgtcttgagcagtggctgcaggtaccaggaaggccccgtccggctcagccccggcaggctccagggccacctggagaatgaggacaaggacaggatgattgtgcatgtgccttttggaactcgcgggggagaagctgttctttgccaggt

SEQ ID NO: 12205 - protein, 331 aa, Homo sapiens; identical to SEQ ID NO: 12203

SEQ ID NO: 12206 - DNA, 438 bp, Homo sapiens
gagatggagtcttgctctgtcgcccaggctggagtgcagtggcgcaatcttggctcactacaagctgggcaagtgagacttcatctagcaggggtggggagtggtccttatagccataattcagcaaacttcaagaaggctatctgaaaggttgttcagtgaaacatttaggatttatcactgttgagcacttttcatcttcaaattcctgacttgtagtcctgtgttgtcctggagtggccaagtctctcctcagcgggaactgcacgtccttctccagtgacacaattttaaggtcttgttaccatgcaggaacccactttccggctgccactgtcctgtgggcgcgctggggtcgccggccggctgagctcgtgcgcgccacggtgcggcggctgcgtgcctcgcgctgttccttcaccttctgcggcgcggccg

SEQ ID NO: 12207 - protein, 47 aa, Homo sapiens
MESCSVAQAGVQWRNLGSLQAGQVRLHLAGVGSGPYSHNSANFKKAI

SEQ ID NO: 12208 - DNA, 2002 bp, Homo sapiens
caaagcccgaggccgcggggaccacagagggacggagaagccgggactcctcacatcccacatccggcaggggaagcccagcagccccgcgccgtggcgaccttggatccagacacctggagatgctgagctgaccagaactggaaggccgcttgaacctagggctgaccaacacacttttggatcaaagggagcctttgggtttcagcatcctgtaagagtctatttacccatgtcaaagcgtcaagaatacctgcggagttccggggagcaagtactggccagtttcccagtgcaagccacgattgacttctacgacgatgagtctactgagtctgcttccgaagctgaagagccagaggaaggacccccacccctccatcttctgccccaggaggtgggaggtcggcaggaaaatggcccagggggaaagggcagagaccagggcatcaaccaagggcagcgatcctcaggagggggtgaccactggggggagggtccgctccctcaaggtgtctcctcaaggggtggcaagtgctcctcatccaaatgaatcagtctctgtctcctgggccctgctctgggacctgcccctcacgttctcttggggacacccgagccaggacactacgcatccctgctgagtgtgcagaggctagaggcttctcgggcagcccctggcctgcacactactcatgacagaaagtcagcttttacttttctttcccctggcaattcgtttttggtgcactcatgcatgcctttgagaaaggattctaggagaaagagaaggtctatgtcaacagagttgttatctcatagagccagttttcaaagctccttctgcattgtcactcactgatcaggtgatgaattcttcctagatagtcgcccactccacctcctacttaacctgagactcattatttagctatttctgcttttgtaaaaataattcagatattaaactccaattttaatctatcatccaagggtagatgtagttgcttagtagcattttggaaaaaaaagaaaaaaaggtttggtttggttttgtgacggagttttgctcttgtctcccaggctggagtgcagtgacacaatctcggctcactgcaacctccacttcttgggttcaagtgattctcctgtctcagcctcccaagtagctgggattacaggcatgagctaccacgcctggctaattttttgtatttttagtagagactcggtttcaccatgttggtcaggctggctttgaactcctgacctcaggtgatccacccgccttggcctcccaaagtgctgggattacaggcgtgagccactgagcccggccaaaaaaaaatgtatttattaaaaaaaaatttttttaacccgccgaataattcccataagagtaacaaaaaggaccagcctgaccaacgtggagaaactctgtctctactaaaaatacaaaattagccaggcgtgatggctcatgcctgtaatcccagctactcgggaggctgaggcaggagaatggctagaacccgggaggcggaggttgccgtgagtcgagatcgcaccattgcattccagcctgggcaacaagagcgaaactccgtctcaaaaaaaaaaaaaaaaaaaaagaaagaaaagagtaacagaaagatagggatttttaggagacaattagataaaaatgtatgtgatgactgtataaggaggcctgtgtgtatgaatttatagggagtagaaccgtctctcttcttagttggtgactgtttggggcctggtattttaatagatgaacactacttttttaattttttatttttttaaccctacccttaacccatgaacactatttttaattaaagtatctgatgtaaaattattttgagtttttaatattttgataaacgtgtattcctgaaactttttgacttacttatcttacatgtggtgtcttcctgtatatagtacattatatcaatttctacttgaaataaatattttg

SEQ ID NO: 12209 - protein, 107 aa, Homo sapiens
MSLLSLLPKLKSQRKDPHPSIFCPRRWEVGRKMAQGERAETRASTKGSDPQEGVTTGGRVRSLKVSPQGVASAPHPNESVSVSWALLWDLPLTFSWGHPSQDTTHPC

SEQ ID NO: 12210 - DNA, 2232 bp, Homo sapiens
ctccgacccgggcttttccttcgtaccctgcggccccctccgcacccctcacggagctcctcgggtcctgccccctcccagcgcttgcccgcgccgccccgcccccgtttttaaacctggcgcgcgggtaggtgagcgcgttagcccgagtggatctaggcgcgctcgtaggccggcgccgcagcaaggggcgcgggctccgccggcaccatggagcccgaagcggcggccggagcccggaaggcgcgggggcgcggctgtcactgccccggggacgctccctggaggcctccgccaccgcgcgggccggagagccccgcgccgtggcgaccttggatccagacacctggagatgctgagctgaccagaactggaaggccgcttgaacctagggctgaccaacacacttttggatcaaagggagcctttgggtttcagcatcctgtaagagtctatttacccatgtcaaagcgtcaagaatacctgcggagttccggggagcaagtactggccagtttcccagtgcaagccacgattgacttctacgacgatgagtctactgagtctgcttccgaagctgaagagccagaggaaggacccccacccctccatcttctgccccaggaggtgggaggtcggcaggaaaatggcccagggggaaagggcagagaccagggcatcaaccaagggcagcgatcctcaggagggggtgaccactggggggagggtccgctccctcaaggtgtctcctcaaggggtggcaagtgctcctcatccaaatgaatcagtctctgtctcctgggccctgctctgggacctgcccctcacgttctcttggggacacccgagccaggacactacgcatccctgctgagtgtgcagaggctagaggcttctcgggcagcccctggcctgcacactactcatgacagaaagtcagcttttacttttctttcccctggcaattcgtttttggtgcactcatgcatgcctttgagaaaggattctaggagaaagagaaggtctatgtcaacagagttgttatctcatagagccagttttcaaagctccttctgcattgtcactcactgatcaggtgatgaattcttcctagatagtcgcccactccacctcctacttaacctgagactcattatttagctatttctgcttttgtaaaaataattcagatattaaactccaattttaatctatcatccaagggtagatgtagttgcttagtagcattttggaaaaaaaagaaaaaaaggtttggtttggttttgtgacggagttttgctcttgtctcccaggctggagtgcagtgacacaatctcggctcactgcaacctccacttcttgggttcaagtgattctcctgtctcagcctcccaagtagctgggattacaggcatgagctaccacgcctggctaattttttgtatttttagtagagactcggtttcaccatgttggtcaggctggctttgaactcctgacctcaggtgatccacccgccttggcctcccaaagtgctgggattacaggcgtgagccactgagcccggccaaaaaaaaatgtatttattaaaaaaaaatttttttaacccgccgaataattcccataagagtaacaaaaaggaccagcctgaccaacgtggagaaactctgtctctactaaaaatacaaaattagccaggcgtgatggctcatgcctgtaatcccagctactcgggaggctgaggcaggagaatggctagaacccgggaggcggaggttgccgtgagtcgagatcgcaccattgcattccagcctgggcaacaagagcgaaactccgtctcaaaaaaaaaaaaaaaaaaaaagaaagaaaagagtaacagaaagatagggatttttaggagacaattagataaaaatgtatgtgatgactgtataaggaggcctgtgtgtatgaatttatagggagtagaaccgtctctcttcttagttggtgactgtttggggcctggtattttaatagatgaacactacttttttaattttttatttttttaaccctacccttaacccatgaacactatttttaattaaagtatctgatgtaaaattattttgagtttttaatattttgataaacgtgtattcctgaaactttttgacttacttatcttacatgtggtgtcttcctgtatatagtacattatatcaatttctacttgaaataaatattttg

SEQ ID NO: 12211 - protein, 190 aa, Homo sapiens; identical to SEQ ID NO: 2043

SEQ ID NO: 12212 - DNA, 1853 bp, Homo sapiens
cagccccgcgccgtggcgaccttggatccagacacctggagatgctgagctgaccagaactggaaggccgagtctatttacccatgtcaaagcgtcaagaatacctgcggagttccggggagcaagtactggccagtttcccagtgcaagccacgattgacttctacgacgatgagtctactgagtctgcttccgaagctgaagagccagaggaaggacccccacccctccatcttctgccccaggaggtgggaggtcggcaggaaaatggcccagggggaaagggcagagaccagggcatcaaccaagggcagcgatcctcaggagggggtgaccactggggggagggtccgctccctcaaggtgtctcctcaaggggtggcaagtgctcctcatccaaatgaatcagtctctgtctcctgggccctgctctgggacctgcccctcacgttctcttggggacacccgagccaggacactacgcatccctgctgagtgtgcagaggctagaggcttctcgggcagcccctggcctgcacactactcatgacagaaagtcagcttttacttttctttcccctggcaattcgtttttggtgcactcatgcatgcctttgagaaaggattctaggagaaagagaaggtctatgtcaacagagttgttatctcatagagccagttttcaaagctccttctgcattgtcactcactgatcaggtgatgaattcttcctagatagtcgcccactccacctcctacttaacctgagactcattatttagctatttctgcttttgtaaaaataattcagatattaaactccaattttaatctatcatccaagggtagatgtagttgcttagtagcattttggaaaaaaaagaaaaaaaggtttggtttggttttgtgacggagttttgctcttgtctcccaggctggagtgcagtgacacaatctcggctcactgcaacctccacttcttgggttcaagtgattctcctgtctcagcctcccaagtagctgggattacaggcatgagctaccacgcctggctaattttttgtatttttagtagagactcggtttcaccatgttggtcaggctggctttgaactcctgacctcaggtgatccacccgccttggcctcccaaagtgctgggattacaggcgtgagccactgagcccggccaaaaaaaaatgtatttattaaaaaaaaatttttttaacccgccgaataattcccataagagtaacaaaaaggaccagcctgaccaacgtggagaaactctgtctctactaaaaatacaaaattagccaggcgtgatggctcatgcctgtaatcccagctactcgggaggctgaggcaggagaatggctagaacccgggaggcggaggttgccgtgagtcgagatcgcaccattgcattccagcctgggcaacaagagcgaaactccgtctcaaaaaaaaaaaaaaaaaaaaagaaagaaaagagtaacagaaagatagggatttttaggagacaattagataaaaatgtatgtgatgactgtataaggaggcctgtgtgtatgaatttatagggagtagaaccgtctctcttcttagttggtgactgtttggggcctggtattttaatagatgaacactacttttttaattttttatttttttaaccctacccttaacccatgaacactatttttaattaaagtatctgatgtaaaattattttgagtttttaatattttgataaacgtgtattcctgaaactttttgacttacttatcttacatgtggtgtcttcctgtatatagtacattatatcaatttctacttgaaataaatattttg

SEQ ID NO: 12213 - protein, 107 aa, Homo sapiens; identical to SEQ ID NO: 12209

SEQ ID NO: 12214 - DNA, 931 bp, Homo sapiens
tcccacagggaggccacgcttgcagagctggagcgcgcgtctatcgccccagaacccccctccctgccctatcctccgccaccccttctgttgcggggcgcgcgccagcctgggtgtctgtatgcgctcgaggcgggggcgcgggttgcggacggaggcgcgggaggcggttctgcgcggcgggggccgtacccgcggcggagcgaggaggcgagaatggatcaatggtgccacggagcacatcgctggcgctgattgtgttccttttccacagattgtctaaagccccaggaaaaatggtggaaaattcaccgtcgccattgccagaaagagcgatttatggctttgttcttttcttaagctcccaatttggcttcatactttacctcgtgtgggcctttattcctgaatcttggctaaactctttaggtttaacctattggcctcaaaaatattgggcagttgcattacctgtctacctccttattgctatagtaattggctacgtgctcttgtttgggattaacatgatgagtacctctccactcgactccatccatacaatcacagataactatgcaaaaaatcaacagcagaagaaataccaagaggaggccattccagccttaagagatatttctattagtgaagtaaaccaaatgttctttcttgcagccaaagaactttacaccaaaaactgaactgtgtgtaaccatagtaacaccaagcacgtatttatttataagtttttgccattataattttgaccataaattaatttgaccatctctcttattaatagagaagtaaaaaatgtaagttgaccttctcttagattatgttcaatgaatattgtaaatgttcaagtattgttaatgaatagaataaatacaatattgcattcccatatagcagacttaaaaaaaaaaat

SEQ ID NO: 12215 - protein, 158 aa, Homo sapiens
MVPRSTSLALIVFLFHRLSKAPGKMVENSPSPLPERAIYGFVLFLSSQFGFILYLVWAFIPESWLNSLGLTYWPQKYWAVALPVYLLIAIVIGYVLLFGINMMSTSPLDSIHTITDNYAKNQQQKKYQEEAIPALRDISISEVNQMFFLAAKELYTKN

SEQ ID NO: 12216 - DNA, 569 bp, Homo sapiens
gtctaaagccccaggaaaaatggtggaaaattcaccgtcgccattgccagaaagagcgatttatggctttgttcttttcttaagctcccaatttggcttcaatattgggcagttgcattacctgtctacctccttattgctatagtaattggctacgtgctcttgtttgggattaacatgatgagtacctctccactcgactccatccatacaatcacagataactatgcaaaaaatcaacagcagaagaaataccaagaggaggccattccagccttaagagatatttctattagtgaagtaaaccaaatgttctttcttgcagccaaagaactttacaccaaaaactgaactgtgtgtaaccatagtaacaccaagcacgtatttatttataagtttttgccattataattttgaccataaattaatttgaccatctctcttattaatagagaagtaaaaaatgtaagttgaccttctcttagattatgttcaatgaatattgtaaatgttcaagtattgttaatgaatagaataaatacaatattgcattcccatatagcagactt

SEQ ID NO: 12217 - protein, 57 aa, Homo sapiens
MMSTSPLDSIHTITDNYAKNQQQKKYQEEAIPALRDISISEVNQMFFLAAKELYTKN

SEQ ID NO: 12218 - DNA, 698 bp, Homo sapiens
gaatgggcagggcccggggcctgggcgccgcgacctagtaggcccgcatgctgattgtctaaagccccaggaaaaatggtggaaaattcaccgtcgccattgccagaaagagcgatttatggctttgttcttttcttaagctcccaatttggcttcatactttacctcgtgtgggcctttattcctgaatcttggctaaactctttaggtttaacctattggcctcaaaaatattgggcagttgcattacctgtctacctccttattgctatagtaattggctacgtgctcttgtttgggattaacatgatgagtacctctccactcgactccatccatacaatcacagataactatgcaaaaaatcaacagcagaagaaataccaagaggaggccattccagccttaagagatatttctattagtgaagtaaaccaaatgttctttcttgcagccaaagaactttacaccaaaaactgaactgtgtgtaaccatagtaacaccaagcacgtatttatttataagtttttgccattataattttgaccataaattaatttgaccatctctcttattaatagagaagtaaaaaatgtaagttgaccttctcttagattatgttcaatgaatattgtaaatgttcaagtattgttaatgaatagaataaatacaatattgcattcccatatagcagactt

SEQ ID NO: 12219 - protein, 134 aa, Homo sapiens; identical to SEQ ID NO: 2047

SEQ ID NO: 12220 - DNA, 916 bp, Homo sapiens
gcgccagggtgggggttgccgtcgcgcctaggcctttccctcaggttttcctcttccccactgcggctccccagtcggcgcttgcgcggagaactcagcgctgagattgtctaaagccccaggaaaaatggtggaaaattcaccgtcgccattgccagaaagagcgatttatggctttgttcttttcttaagctcccaatttggcttcaaaaatctgaagggatctcgtgtttgctgagtgttccgtgtgccagcactagcctaggaggttttagtctctacaaatatttatacagcaccagacgcgatggcaaagtggataaagcctggtccctgcccttaaggaggtcgtggtcttgtggaggagacagatggtactttacctcgtgtgggcctttattcctgaatcttggctaaactctttaggtttaacctattggcctcaaaaatattgggcagttgcattacctgtctacctccttattgctatagtaattggctacgtgctcttgtttgggattaacatgatgagtacctctccactcgactccatccatacaatcacagataactatgcaaaaaatcaacagcagaagaaataccaagaggaggccattccagccttaagagatatttctattagtgaagtaaaccaaatgttctttcttgcagccaaagaactttacaccaaaaactgaactgtgtgtaaccatagtaacaccaagcacgtatttatttataagtttttgccattataattttgaccataaattaatttgaccatctctcttattaatagagaagtaaaaaatgtaagttgaccttctcttagattatgttcaatgaatattgtaaatgttcaagtattgttaatgaatagaataaatacaatattgcattcccatatagcagactt

SEQ ID NO: 12221 - protein, 108 aa, Homo sapiens
MVLYLVWAFIPESWLNSLGLTYWPQKYWAVALPVYLLIAIVIGYVLLFGINMMSTSPLDSIHTITDNYAKNQQQKKYQEEAIPALRDISISEVNQMFFLAAKELYTKN

SEQ ID NO: 12222 - DNA, 804 bp, Homo sapiens; identical to SEQ ID NO: 2046

SEQ ID NO: 12223 - protein, 134 aa, Homo sapiens; identical to SEQ ID NO: 2047

SEQ ID NO: 12224 - DNA, 753 bp, Homo sapiens
ggcgcgggaggcggttctgcgcggcgggggccgtacccgcggcggagcgaggaggcgagaatggatcaatggtgccacggagcacatcgctggcgctgattgtgttccttttccacagattgtctaaagccccaggaaaaatggtggaaaattcaccgtcgccattgccagaaagagcgatttatggctttgttcttttcttaagctcccaatttggcttcatactttacctcgtgtgggcctttattcctgaatcttggctaaactctttaggtttaacctattggcctcaaaaatattgggcagttgcattacctgtctacctccttattgctatagtaattggctacgtgctcttgtttgggattaacatgatgagtacctctccactcgactccatccatacaatcacagataactatgcaaaaaatcaacagcagaagaaataccaagaggaggccattccagccttaagagatatttctattagtgaagtaaaccaaatgttctttcttgcagccaaagaactttacaccaaaaactgaactgtgtgtaaccatagtaacaccaagcacgtatttatttataagtttttgccattataattttgaccataaattaatttgaccatctctcttattaatagagaagtaaaaaatgtaagttgaccttctcttagattatgttcaatgaatattgtaaatgttcaagtattgttaatgaatagaataaatacaatattgcattcccata

SEQ ID NO: 12225 - protein, 158 aa, Homo sapiens; identical to SEQ ID NO: 12215

SEQ ID NO: 12226 - DNA, 633 bp, Homo sapiens
gttgcggggcgcgcgccagcctgggtgtctgtatgcgctcgaggcgggggcgcgggttgcggacggaggcgcgggaggcggttctgcgcggcgggggccgtacccgcggcggagcgaggaggcgagaatggatcaatggtgccacggagcacatcgctggcgctgattgtgttccttttccacagattgtctaaagccccaggaaaaatggtggaaaattcaccgtcgccattgccagaaagagcgatttatggctttgttcttttcttaagctcccaatttggcttcatactttacctcgtgtgggcctttattcctgaatcttggctaaactctttaggtttaacctattggcctcaaaagtaagtttaatatatttcttaaatgaggatataattaatgctgttttgaggagtcatatcatttcttaaacctacccaaatcttaaatatttgttctcttaaaattcatgaatagccatatagaaattgaaagctttttaaagatcgctattgatacatctctaattaaagatggtagcatgaacacacatgtttatctccatccatttcctccaaaaatcttgttaaaatgaccctacaggaaaaaaaaaaaaaactgaagatacaaacc

SEQ ID NO: 12227 - protein, 76 aa, Homo sapiens
MVPRSTSLALIVFLFHRLSKAPGKMVENSPSPLPERAIYGFVLFLSSQFGFILYLVWAFIPESWLNSLGLTYWPQK

SEQ ID NO: 12228 - DNA, 690 bp, Homo sapiens
ggccgaggtgtcgggaggggcctgggtgggcgtatgaaggacccgaggtcgagggcccccccataccccgcctcgaatgagaaatagaagtctccacgaatgggcagggcccggggcctgggcgccgcgacctagtaggcccgcatgctggtgggcgccgcgcgagccttgttccctgccctcccctcccacagggaggccacgcttgcagagctggagcgcgcgtctatcgccccagaacccccctccctgccctatcctccgccaccccttctgttgcggggcgcgcgccagcctgggtgtctgtatgcgctcgaggcgggggcgcgggttgcggacggaggcgcgggaggcggttctgcgcggcgggggccgtacccgcggcggagcgaggaggcgagaatggatcaatggtgccacggagcacatcgctggcgctgattgtgttccttttccacagattgtctaaagccccaggaaaaatggtggaaaattcaccgtcgccattgccagaaagagcgatttatggctttgttcttttcttaagctcccaatttggcttcaaaaatctgaagggatctcgtgtttgctgagtgttccgtgtgccagcactagcctaggaggttttagtctctacaaatatttatacagcaccagacgcgatggcaaagtggataaagcctggtccct

SEQ ID NO: 12229 - protein, 60 aa, Homo sapiens
MVPRSTSLALIVFLFHRLSKAPGKMVENSPSPLPERAIYGFVLFLSSQFGFKNLKGSRVC

SEQ ID NO: 12230 - DNA, 659 bp, Homo sapiens
caaagtgctgggattacaggcgtgagccactgcacccagcctatttatgcgttttttgaagaaaatatcatttttcttttagttacattggattttctgtcttttgtgttacatcatttcacttctaagtctagatagagattatatttatcctattttggatgcatgtgtttcatgattctgcattttgtctttcatgagatctagaagtttctgagccctgtattctttaaatattatgtctcattagtctcttctctcctgctggaactttaactggatatatatatacactaaactgtttccagatcacttattctttatctttcatattttttatctctttgtttctctttaccagaatttacagtgctggataatttcataaggcatatattttagttcaccacgcccggctaatttttttgtatttttagtagagacggggtttcaccgtgttacccaggatggtctcgatctcctgacctcgtcatctgctcacgttggcctcccagagtgctgggattacaggcatgagccaccatgcccggccgcatttttaatttctaaaagttctgcctggttcttttttgatatgtccagtcattcttcatgttctcatgttatatgctgatttttgtgactctatagctattctg

SEQ ID NO: 12231 - protein, 48 aa, Homo sapiens
ILCLISLFSPAGTLTGYIYTLNCFQITYSLSFIFFISLFLFTRIYSAG

SEQ ID NO: 12232 - DNA, 10368 bp, Homo sapiens
tgtattctttaaatattatgtctcattagtctcttctctcctgctggaactttaactggatatatatatacactaaactgtttccagatcacttattctttatctttcatattttttatctctttgtttctctttaccagaatttacagtgctggataatttcataaggcatatattttagttcaccaattttctcttcaactgtgcctaatatcctctgtaacccatcctgtctcttttttttcttttaacaattgcatttttaattactttttttttttttttttaagatggagtctctctctgtcgcccaggctggagtgcagaggcgcgatctcagctcactgcaagctccgcctcccgggttcacgccattctcctgcctcagcctcccgagtagctgggactacaggcgcccgccaccacgcccggctaatttttttgtatttttagtagagacggggtttcaccgtgttacccaggatggtctcgatctcctgacctcgtcatctgctcacgttggcctcccagagtgctgggattacaggcatgagccaccatgcccggccgcatttttaatttctaaaagttctgcctggttcttttttgatatgtccagtcattcttcatgttctcatgttatatgctgatttttgtgactctatagctattctgtagactatatcagacattcccaatgtctgatatccttgaggagggggatgtctaaatttattgcttttttgtttttttttctgttgtctctcctcaatgtagctgtcacctcatgtgtttggtgatcattgattatgaacttctgtttgatctttgtggtgatcttgagagtctaatttgaggatgcttgctttctgaaagcatttctatcagctttgtctgggagccagaaagtttagctggcatcacttttgagttcctacattttgcttctggcccagggctcagtgtcctgatcctattactgctcttggcaccactacttgtagcactaaactgtagccaggtttaatttctagctcaaggtttgttgcttttgcgtggagagggtgccttcacatgttcccctatttctatgagctcagcaaaaacatccaaaaagtgtttttttttttaatctaggatatacctttttcctcccaacagtacattcccccagagtgtatagttgaccataactgatgggatcagaagctctttattttaatatttaattttagtagtatatttttgtttgattgtattataaaaaattttatggtaccaagcaagctttcttggtgataccaacatttccattaaaactagtttacatctaagttaagatttgagttatcctaaagaaaagtattaagtaaatagcagtacagatggcaaatggattgcacaatatatcctctggatccatagtgaccctgcagagataaacctgtgatggtcaaacaatgtgaaaactgctgtcagagacatgggcagggtgctcttgtttacagagaagaggtgcaaaaatcaacttgatggtagtgggaagatcaggaaatgcttcctgaaattgagtattaagaactaatagacattaggtggttgcagaataagttttgtttaggaaggacaagcagttgggtatgactggcttctaggttgtgtgttgtggagtgactggggataaaagcaggagcaagatcacaaaaggtcttctatgcttatattagggaagttggactttattctcaagctgaagggaagctgttgcatggttttaagcagtaaagtgatatgatcagagttttagaggatgccaagattgaaggcaagtctgaccagttaggagactgcttgttaaattagttcagaggagaaacagtgaaggcagtggcactgggcatgaagaagtatatgtgtgctaattttagatttcttagggaagcagaaatgacaagagttagtggtccattggacagaaatattgaaggagactggggagtctaggttgactcccagggtttaggtttgggcagtaaaatgacatgtagaacaattaactgataaacagcatacagaaagaggaaagaacttcatttcatatgtttgtttttgaggaaaagatgtttgtttttgaacttcctgattcagaggggcttgtgggacatcttggttaagatcctgtagtagttctagtagggtctagaagtcaagagatacaaccccgcctggaaggatttgggagtcttcagcatttggaattttggaagccattgtttactgcagtgcatatgagataatttaaactggtacatagataaacacttgaaaaaattttaatagataggaatttaatgtgtatgagaaacataacttgcacatctaacctttgataatcatggacattatcacttaggccaagtgagctcaataaaagggaaatattaactaaaaatatatgtgatacatggaaatggcaaaaatcacggtgaagctatgcaaacgatgcaagttcagaaagtgctgtgttaagtcatgggtgtggtggataaattcacccaaggagagagtaagagtgagaagaaaagagagttgacattgggtggcggggaatggagaagaagaacccatgaaggaaactgaggaagagcagccagacgaataggaggaaaaccaggagaagatggtctttggagtccaaatgaagagttctgaggaggaagtggtccacagcgtcaaacttgtgcaccatggacaattttgctgagggagatttcactgtggcggattatgccttgttagaagattgccctcacgtggatgattgtgtctttgctgctgaatttatgagcaatgattatgttcgtgtgactcagctttactgtgatggggtgggtgtgcaatataaagattatatccaaagtgagaggaatttggaatttgacatctgcagtatatggtgtagtaaaccaatttctgtcctgcaagattattgcgatgccattaaaataaacatcttctggccacttctgtttcaacatcaaaacagttccgtaatatcacgattgcatccctgtgtggacgccaacaattcacgtgcttctgagataaatttgaagaaactacaacatcttgagttgatggaagatattgtggatttggcaaagaaagttgctaatgattcattccttattggaggcttattgagaattggttgtaaaatagaaaataaaatcttggcaatggaagaagctctgaattggataaaatatgcaggcgatgtaacaattctaactaaattaggatcaattgacaattgttggcctatgttaagtattttctttactgaatacaagtaccacataactaaaattgtaatggaagactgcaatttgcttgaagaacttaaaactcaaagttgtatggattgtatagaggaaggagaactaatgaaaatgaaaggaaatgaagagttttccaaagaaagatttgatatagctattatctattacaccagagccattgaatatagacctgaaaactaccttctttatggtaaccgagctctttgttttcttcgtactggacagtttagaaatgcactcggtgatggaaagagagccactattctgaagaacacttggccaaagggtcattatcgttattgtgatgctctttctatgctgggggaatatgactgggccctgcaagcaaacataaaagctcaaaaactctgtaaaaatgaccctgagggaatcaaggatctaattcagcagcatgtaaagttacaaaaacaaatagaagacctacaaggtcgaacagcaaataaggatccaattaaagccttttatgaaaacagggcctacacacctaggagtttatcagcacctatatttactacttcacttaactttgtggagaaggaaagagatttcagaaaaattaatcacgaaatggccaacggtggtaatcagaatctaaaggtggcggatgaggcgttgaaggtagatgattgtgactgtcatcctgaattttcaccaccatcaagtcagcctccaaaacataaaggaaaacaaaaatctcgaaacaatgaatcagaaaagttcagttctagttcaccattgactttaccagcagatttgaagaacatcttggagaaacagttttctaaatcttccagagctgcacaccaggattttgctaatataatgaaaatgctgagaagcttaattcaagatggctatatggccttattggagcagcgttgccgcagcgctgcacaggcctttacagagttgctgaacggtttagatcctcaaaaaataaagcaattgaacctggccatgattaactatgttttggtcgtctatggacttgccatttctctccttggaataggacagcctgaggaattatctgaagccgaaaaccagtttaagaggattattgaacactaccccagtgagggccttgattgcttggcctactgtggaattggaaaagtatatttgaaaaaaaacagatttctagaagctctcaatcactttgagaaagcaagaaccttgatttatcgtcttcctggagtgttaacttggcccacgagtaatgtgattattgaagagtctcagccacaaaaaataaagatgctgttagagaaatttgttgaagaatgcaagttccctccagtgccagatgccatttgttgctatcagaagtgccatggatattctaagatccagatatacataactgatccagactttaagggttttatacgcatcagctgttgccagtactgtaaaatagaatttcacatgaattgctggaagaagttaaaaactacaacctttaatgataaaattgacaaggattttctacaaggaatatgtcttacccctgactgtgaaggtgtcatttctaagattatcatcttcagcagtggtggtgaagttaaatgtgaatttgaacacaaggtcataaaagaaaaggttcctccaagacctattctgaaacagaaatgttctagcctagagaaactaagactgaaagaagacaaaaaattgaagagaaagatccaaaaaaaagaagcaaaaaagttagcacaagaaagaatggaggaggacttaagagaaagtaatccacccaaaaatgaagagcagaaagaaactgtagacaatgttcagcgttgtcagttccttgatgacagaattctacagtgtataaagcagtatgctgacaagattaaatccggcatacagaatacagccatgcttctcaaagaattgctttcttggaaagttttgagcacagaagactatacaacctgtttttctagcagaaattttctaaatgaagcagtggactatgttattcgccacttgattcaagaaaataacagagtaaagacaagaatatttctgcatgttttgagtgagcttaaagaagtggagcccaaattagccgcctggatccaaaaacttaatagctttggcttagatgccacaggaactttcttttctcgttatggagcatctcttaaactgcttgattttagtatcatgactttcctctggaatgagaaatatggtcacaaactagactctatagaaggaaagcaacttgattatttctctgagccagcatcattgaaggaagcccgttgtttaatatggctgctagaagaacacagagacaagttcccagcattgcatagtgctttagatgaattctttgatataatggacagccgctgtactgtgttaaggaaacaagatagtggtgaagcaccgtttagttcaaccaaggtgaaaaacaaaagcaagaaaaagaagccaaaggattcaaagcctatgttagttgggtctggaacaacttcagtaacttcaaataatgagatcatcacttcaagtgaagaccatagcaatcgaaattcagattctgcaggcccatttgcagtgcctgaccatcttcggcaagatgtagaagaattcgaagctctctatgaccaacacagtaacgaatatgttgtccgcaataagaagctatgggacatgaacccaaaacaaaaatgttcaactctatatgattacttctctcagtttttggaggaacatggtcccttggacatgagtaacaagatgttctctgcagaatatgagtttttcccagaagaaactcgacagatactagaaaaagcaggaggtttaaaaccttttctcttgggatgccctcgttttgttgtgattgacaactgtattgcactgaagaaggttgcatcacggctcaagaaaaaaaggaagaagaaaaacattaaaacaaaagtagaagaaatttcaaaagcaggggagtatgtacgagttaaactacaactgaatccagctgctagggaatttaaaccagatgtaaagtctaaaccagtgtcagattcatcttcagcaccagcttttgaaaatgtgaaacccaaacctgtgtctgcaaattctcccaagccagcttgtgaagatgtgaaggccaaaccagtatccgacaattcttctagacaagtttctgaggatgggcaacccaaaggggtctcttctaattctcctaaaccaggctctgaggatgcaaattacaagcgagtctcctgtaattcccccaaaccggttcttgaggatgtgaaaccaacttattgggctcaatcccatttggtcacaggatactgtacgtatcttcctttccagagatttgatatcacccagacaccgccagcatacataaacgtgttaccaggtttgccccagtacaccagcatatatacacccttggccagcctttctcctgaatatcagctaccaagatcagtaccagtggtgccgtcttttgtagccaatgacagagcagataaaaatgctgctgcctattttgagggtcatcatttgaatgctgagaatgttgctggtcaccagattgcctctgaaacacagatccttgagggctctttgggaatatctgtaaagtcacactgcagcacaggtgatgctcatacagtcctgagtgagtctaacagaaatgatgagcactgtggaaattctaacaacaaatgtgaagtaattccagaaagcaccagtgcagtaacaaacattccacacgtgcagatggttgccatacaggtatcttggaacataatacaccaagaagtcaatactgagccatataatccttttgaggaacgacaaggggaaatttcacggattgaaaaggagcaccaagtattacaagaccaacttcaagaagtgtatgaaaattatgagcagataaaacttaagggcttagaagagaccagggacctggaagagaagttgaaaaggcacttagaagaaaacaagatctcaaagacggaattagattggttccttcaagatttggaaagagaaattaaaaaatggcaacaggaaaaaaaagaaatccaagaaagactaaaatcactgaagaagaaaattaaaaaggtttcaaatgccagtgaaatgtatacccagaaaaatgatggaaaggaaaaggaacatgaattacatctggatcagtcccttgaaatcagcaacacacttacaaatgagaaaatgaaaatagaagagtatataaagaaagggaaagaggattatgaagagagtcatcagagagctgtggctgcagaggtatccgtacttgaaaactggaaggagagtgaagtgtataagctacagatcatggagtcacaagcagaagcctttctgaagaagctggggctgattagccgtgatcctgcagcatatcctgacatggagtctgatatacgttcatgggaattgtttctttctaatgttacaaaagaaattgagaaagcaaagtctcagtttgaagaacaaattaaggcaattaaaaatggttctcggctcagtgaactttctaaagtgcagatttctgagctttcatttcctgcctgtaacacggttcatcccgagttactccctgagtcttcaggcgacgatggccaagggcttgtgacttctgcaagcgacgtgactggaaaccacgcagcacttcacagggatcctagtgtgttctctgctggtgattccccaggggaggctccttctgcgctgttgccagggccaccccctggtcagcctgaagccactcagctgacagggccaaaacgggctggccaggcagctctgtcagaacgaagccctgtggctgatcggaagcagcctgttcctccaggacgtgctgcgcgttcaagccagtctccaaaaaagccgttcaatagtattattgagcacctgtcagtggtattcccatgttacaacagcactgagcttgctggttttattaaaaaagtgcgaagcaaaaacaagaactcactctcaggattgagtattgatgaaattgtccaaagagtgacagaacacattctagatgaacagaaaaagaaaaagccaaacccaggaaaggacaagaggacttatgagcccagctctgccacccccgtgaccaggtcctcccagggctcaccctcggtggttgttgcaccatcacccaaaaccaaggggcagaaagcagaagatgtccctgtgaggattgcactgggtgcaagttcctgtgaaatatgccacgaggtgttcaaatcaaaaaacgtgcgtgtgctcaaatgtgggcacaagtatcacaaagggtgctttaagcagtggcttaaagggcagagcgcttgcccggcctgccagggtcgtgatctcctgacagaagagtcaccttctggaagaggctggcccagtcagaatcaggagctgccttcctgctcttctaggtagtcacacttcactaaagtgtcatccaccagtgtgttgaatccgaagaatgacaattttctaccactggtgtaaaaaacaaacatttgaagacccttgtgcattgtgtgtcacaaagctaaatacatggaaatcgttaatatcgctgatattaagtaatttccccactctgagtgaatactttgatgattgccaacagtggctaataaaatgacggctaccacactcatgggtcactggggctgcgcagggctctttgaggtgggtggcttcttttggaaagtactatgaacgtctcgaagcagtattctagtgataagaattcttaacatagccaagcgccccacgtttgttccccacgtttgttccccttttctgtttgaaaaacctgttctggtagctccacaagagagatgatactgactttttaaattttttacaagagtctgtattcctgatatgcctatatttttcctcaaagattctgcattttaaggatgggcataagcaaactatattttaataatttatagttaatgttaaaatattggctgatttagaccaaaagattcaaatctcctctttgtgaaatcccatctgcatttgattttttattattttatgttcccccgttagattgttttaagtgtttgcttttcatcttttatagatgtaatctgattttcaaaaatcattaacactttttaattagtatcgactaagactttttccccctggaatcgaggctgtgtgtccgtcatcccagcccccggttggagcctgctctttgaactccgctgccttccttagcagcttctgtcctcttctgtgagtcagtcagcgagtgcttgggatccgcatccagccgtgctgagcacacaacaggctgtgtgtggaaatggccaccaccattctccttccccaccccaccacaaaaagagaagctgtgtctttagacaaccctgaggtatctgtgttacaatcgttctgtgtttgatatttgtgtaaagtatgcatgcagtcttgtactgtgacctaagaacaaaactgtaactgcattagaaaccatgaaaaaattagatattgttttgtgacttttagacagtggtaaatatagaaccatgaattctggtcacattccatttctctccaacatgaaggatcaaaaaatgtttttcaatgtgttctttgttccactggaaacttagagtcatgagtttatgagctgatttggtcaccttcctctgcctttgttcactgtgagttctgatgtcttagtgacttagttcttagaagctcacgccttagtttgaaacagattctccacggtggtccccaaaacactgtctgcatatccataagaattgagcgctatgggtgttaacgtgcatgaggatcagtttgcagcagcaagtacaaaaggagaagaggaacatccgttgaatgagtgtgttttgtacataacttcagatacttgtgaacatgccttatatttgtccaacaactgtcagaataaagaacattctaaaatgagaagttcactgtc

SEQ ID NO: 12233 - protein, 2025 aa, Homo sapiens; identical to SEQ ID NO: 2049

SEQ ID NO: 12234 - DNA, 1922 bp, Homo sapiens
cagtaaaatgacatgtagaacaattaactgataaacagcatacagaaagaggaaagaacttcatttcatatgtttgtttttgaggaaaagatgtttgtttttgaacttcctgattcagaggggcttgtgggacatcttggttaagatcctgtagtagttctagtagggtctagaagtcaagagatacaaccccgcctggaaggatttgggagtcttcagcatttggaattttggaagccattgtttactgcagtgcatatgagataatttaaactggtacatagataaacacttgaaaaaattttaatagataggaatttaatgtgtatgagaaacataacttgcacatctaacctttgataatcatggacattatcacttaggccaagtgagctcaataaaagggaaatattaactaaaaatatatgtgatacatggaaatggcaaaaatcacggtgaagctatgcaaacgatgcaagttcagaaagtgctgtgttaagtcatgggtgtggtggataaattcacccaaggagagagtaagagtgagaagaaaagagagttgacattgggtggcggggaatggagaagaagaacccatgaaggaaactgaggaagagcagccagacgaataggaggaaaaccaggagaagatggtctttggagtccaaatgaagagttctgaggaggaagtggtccacagcgtcaaacttgtgcaccatggacaattttgctgagggagatttcactgtggcggattatgccttgttagaagattgccctcacgtggatgattgtgtctttgctgctgaatttatgagcaatgattatgttcgtgtgactcagctttactgtgatggggtgggtgtgcaatataaagattatatccaaagtgagaggaatttgggtgagtacgttggtatttttaatgttaatttatggaaagactacaaagggaggtccatccatcctgtcatagcaatacaacagatttatatgccttttaaaaatgtattcttactagtttttcactagaaatcagaacttttctttgttaaaatagagtttttgccagcacttaaatattcttaacatttaacaggctagaatacttcattcattcatttcttccctctccatatccatttttgcctttttactattaagtgttgattcattaaaaaaatgaggcacaaacattaattttaaactttttttttaattaagaatttgacatctgcagtatatggtgtagtaaaccaatttctgtcctgcaagattattgcgatgccattaaaataaacatcttctggccacttctgtttcaacatcaaaacagttccgtaatatcacgattgcatccctgtgtggacgccaacaattcacgtgcttctgagataaatttgaagaaactacaacatcttgagttgatggaagatattgtggatttggcaaagaaagttgctaatgattcattccttattggaggcttattgagaattggttgtaaaatagaaaataaaatcttggcaatggaagaagctctgaattggataaaatatgcaggcgatgtaacaattctaactaaattaggatcaattgacaattgttggcctatgttaagtattttctttactgaatgtaagtataaatgctttaaattgttacttgactcagtttttaaaggtgtttgggaaaatgagatatgtagttaagtgatttctgatttatcttagaatttaaaaaaagtttttattttgttatatatggctgaaaaagagaatttcttttttttattatttatttatttatttatttatttattttgaggcagattcttgctctgttgcccaggcggagtttgcggtgagccaagatcatgccattgcactccagtctgggcaacaagagtgaaactccatctc

SEQ ID NO: 12235 - protein, 104 aa, Homo sapiens
MDNFAEGDFTVADYALLEDCPHVDDCVFAAEFMSNDYVRVTQLYCDGVGVQYKDYIQSERNLGEYVGIFNVNLWKDYKGRSIHPVIAIQQIYMPFKNVFLLVFH

SEQ ID NO: 12236 - DNA, 9089 bp, Homo sapiens
ctgaactagttgccagtgatcttgaaacgtgacagtaaccaagagataaataggtgacaatgacaggaaaattagatgtagtaaaagagagtgtttgagagcagaagctatggcaactaaagactggatttgaatccttcctagcttggtgacatgagcaaattacttgatttaagtgagcattttcccatctgtacagtggagataacgataattgtgcctgctaagaagaattgctgtgaagattagtgaaataatgcatgtaaaacatttggtacagtatgtgacacatagtacaaatagtttgctaggaagattgttattattcttcacttgtgatattgtgaagttttcatacagcaaattggacatcatgagatggattgattaaataaatagatttgaacttcaaggactggtagtgttcttgctttggaaagaagaaacttggtttatcctaataatagtaggataataatggtgaagtgataggtacaagtaatagtgtttatgatgcgctggtgatgataggaaaagaaagccattatatgggcaagagctagaagtaataaaatggtgcatttttcagtgatgtttggcctatgtagctattctctgataactataaaaatccttattattgaagattcttcaggaaaaaaaacccttagtctgaaactttaccaccaatcccccttgccccccattgaaatacgtatttttaaaacatggcttttgataatgtgagggttttttcctttttgcgatttagcagtgctgattgtgtattgcagtagttgtgagagcattagaagcagcagtcgataggaggatggaaggtctggatgccgccttggggagttaggagattggcagacttaccctgtaccactctagccctactcctttgcccaagacagaaacacactgagatggataggagaatatgagcagttgataggaaagttctcagtggagtcaggatttaggttaggccaggagattgagaatataacagtttgtgtatgatgaaatggcatatttcacagaatgcagtaaaagcaggtagggtacaagtgcagcaacaggaagatgtcttttcttcattcagcaaacacttatttgagagcttaccatgtgctaggcacatacaaagataaataagatgcccttgatgatcctctatttaaaggagacatgtaaacaggttaacttagagtagagatggtgaatatgtgaacctgaggaaaggaagaaatagattaaattatctggagagagaggaaaagtcagcagaatggggacgagaatctttcggagctcagtgttctgataggagttatttccttgggcataggttccaagtatttttctaatataccatagaagccaggaaaactttcttctgttatctcaaatgatttaattactgacttgagtttgtgttgtctccttagacttgtgcaccatggacaattttgctgagggagatttcactgtggcggattatgccttgttagaagattgccctcacgtggatgattgtgtctttgctgctgaatttatgagcaatgattatgttcgtgtgactcagctttactgtgatggggtgggtgtgcaatataaagattatatccaaagtgagaggaatttggaatttgacatctgcagtatatggtgtagtaaaccaatttctgtcctgcaagattattgcgatgccattaaaataaacatcttctggccacttctgtttcaacatcaaaacagttccgtaatatcacgattgcatccctgtgtggacgccaacaattcacgtgcttctgagataaatttgaagaaactacaacatcttgagttgatggaagatattgtggatttggcaaagaaagttgctaatgattcattccttattggaggcttattgagaattggttgtaaaatagaaaataaaatcttggcaatggaagaagctctgaattggataaaatatgcaggcgatgtaacaattctaactaaattaggatcaattgacaattgttggcctatgttaagtattttctttactgaatacaagtaccacataactaaaattgtaatggaagactgcaatttgcttgaagaacttaaaactcaaagttgtatggattgtatagaggaaggagaactaatgaaaatgaaaggaaatgaagagttttccaaagaaagatttgatatagctattatctattacaccagagccattgaatatagacctgaaaactaccttctttatggtaaccgagctctttgttttcttcgtactggacagtttagaaatgcactcggtgatggaaagagagccactattctgaagaacacttggccaaagggtcattatcgttattgtgatgctctttctatgctgggggaatatgactgggccctgcaagcaaacataaaagctcaaaaactctgtaaaaatgaccctgagggaatcaaggatctaattcagcagcatgtaaagttacaaaaacaaatagaagacctacaaggtcgaacagcaaataaggatccaattaaagccttttatgaaaacagggcctacacacctaggagtttatcagcacctatatttactacttcacttaactttgtggagaaggaaagagatttcagaaaaattaatcacgaaatggccaacggtggtaatcagaatctaaaggtggcggatgaggcgttgaaggtagatgattgtgactgtcatcctgaattttcaccaccatcaagtcagcctccaaaacataaaggaaaacaaaaatctcgaaacaatgaatcagaaaagttcagttctagttcaccattgactttaccagcagatttgaagaacatcttggagaaacagttttctaaatcttccagagctgcacaccaggattttgctaatataatgaaaatgctgagaagcttaattcaagatggctatatggccttattggagcagcgttgccgcagcgctgcacaggcctttacagagttgctgaacggtttagatcctcaaaaaataaagcaattgaacctggccatgattaactatgttttggtcgtctatggacttgccatttctctccttggaataggacagcctgaggaattatctgaagccgaaaaccagtttaagaggattattgaacactaccccagtgagggccttgattgcttggcctactgtggaattggaaaagtatatttgaaaaaaaacagatttctagaagctctcaatcactttgagaaagcaagaaccttgatttatcgtcttcctggagtgttaacttggcccacgagtaatgtgattattgaagagtctcagccacaaaaaataaagatgctgttagagaaatttgttgaagaatgcaagttccctccagtgccagatgccatttgttgctatcagaagtgccatggatattctaagatccagatatacataactgatccagactttaagggttttatacgcatcagctgttgccagtactgtaaaatagaatttcacatgaattgctggaagaagttaaaaactacaacctttaatgataaaattgacaaggattttctacaaggaatatgtcttacccctgactgtgaaggtgtcatttctaagattatcatcttcagcagtggtggtgaagttaaatgtgaatttgaacacaaggtcataaaagaaaaggttcctccaagacctattctgaaacagaaatgttctagcctagagaaactaagactgaaagaagacaaaaaattgaagagaaagatccaaaaaaaagaagcaaaaaagttagcacaagaaagaatggaggaggacttaagagaaagtaatccacccaaaaatgaagagcagaaagaaactgtagacaatgttcagcgttgtcagttccttgatgacagaattctacagtgtataaagcagtatgctgacaagattaaatccggcatacagaatacagccatgcttctcaaagaattgctttcttggaaagttttgagcacagaagactatacaacctgtttttctagcagaaattttctaaatgaagcagtggactatgttattcgccacttgattcaagaaaataacagagtaaagacaagaatatttctgcatgttttgagtgagcttaaagaagtggagcccaaattagccgcctggatccaaaaacttaatagctttggcttagatgccacaggaactttcttttctcgttatggagcatctcttaaactgcttgattttagtatcatgactttcctctggaatgagaaatatggtcacaaactagactctatagaaggaaagcaacttgattatttctctgagccagcatcattgaaggaagcccgttgtttaatatggctgctagaagaacacagagacaagttcccagcattgcatagtgctttagatgaattctttgatataatggacagccgctgtactgtgttaaggaaacaagatagtggtgaagcaccgtttagttcaaccaaggtgaaaaacaaaagcaagaaaaagaagccaaaggattcaaagcctatgttagttgggtctggaacaacttcagtaacttcaaataatgagatcatcacttcaagtgaagaccatagcaatcgaaattcagattctgcaggcccatttgcagtgcctgaccatcttcggcaagatgtagaagaattcgaagctctctatgaccaacacagtaacgaatatgttgtccgcaataagaagctatgggacatgaacccaaaacaaaaatgttcaactctatatgattacttctctcagtttttggaggaacatggtcccttggacatgagtaacaagatgttctctgcagaatatgagtttttcccagaagaaactcgacagatactagaaaaagcaggaggtttaaaaccttttctcttgggatgccctcgttttgttgtgattgacaactgtattgcactgaagaaggttgcatcacggctcaagaaaaaaaggaagaagaaaaacattaaaacaaaagtagaagaaatttcaaaagcaggggagtatgtacgagttaaactacaactgaatccagctgctagggaatttaaaccagatgtaaagtctaaaccagtgtcagattcatcttcagcaccagcttttgaaaatgtgaaacccaaacctgtgtctgcaaattctcccaagccagcttgtgaagatgtgaaggccaaaccagtatccgacaattcttctagacaagtttctgaggatgggcaacccaaaggggtctcttctaattctcctaaaccaggctctgaggatgcaaattacaagcgagtctcctgtaattcccccaaaccggttcttgaggatgtgaaaccaacttattgggctcaatcccatttggtcacaggatactgtacgtatcttcctttccagagatttgatatcacccagacaccgccagcatacataaacgtgttaccaggtttgccccagtacaccagcatatatacacccttggccagcctttctcctgaatatcagctaccaagatcagtaccagtggtgccgtcttttgtagccaatgacagagcagataaaaatgctgctgcctattttgagggtcatcatttgaatgctgagaatgttgctggtcaccagattgcctctgaaacacagatccttgagggctctttgggaatatctgtaaagtcacactgcagcacaggtgatgctcatacagtcctgagtgagtctaacagaaatgatgagcactgtggaaattctaacaacaaatgtgaagtaattccagaaagcaccagtgcagtaacaaacattccacacgtgcagatggttgccatacaggtatcttggaacataatacaccaagaagtcaatactgagccatataatccttttgaggaacgacaaggggaaatttcacggattgaaaaggagcaccaagtattacaagaccaacttcaagaagtgtatgaaaattatgagcagataaaacttaagggcttagaagagaccagggacctggaagagaagttgaaaaggcacttagaagaaaacaagatctcaaagacggaattagattggttccttcaagatttggaaagagaaattaaaaaatggcaacaggaaaaaaaagaaatccaagaaagactaaaatcactgaagaagaaaattaaaaaggtttcaaatgccagtgaaatgtatacccagaaaaatgatggaaaggaaaaggaacatgaattacatctggatcagtcccttgaaatcagcaacacacttacaaatgagaaaatgaaaatagaagagtatataaagaaagggaaagaggattatgaagagagtcatcagagagctgtggctgcagaggtatccgtacttgaaaactggaaggagagtgaagtgtataagctacagatcatggagtcacaagcagaagcctttctgaagaagctggggctgattagccgtgatcctgcagcatatcctgacatggagtctgatatacgttcatgggaattgtttctttctaatgttacaaaagaaattgagaaagcaaagtctcagtttgaagaacaaattaaggcaattaaaaatggttctcggctcagtgaactttctaaagtgcagatttctgagctttcatttcctgcctgtaacacggttcatcccgagttactccctgagtcttcaggcgacgatggccaagggcttgtgacttctgcaagcgacgtgactggaaaccacgcagcacttcacagggatcctagtgtgttctctgctggtgattccccaggggaggctccttctgcgctgttgccagggccaccccctggtcagcctgaagccactcagctgacagggccaaaacgggctggccaggcagctctgtcagaacgaagccctgtggctgatcggaagcagcctgttcctccaggacgtgctgcgcgttcaagccagtctccaaaaaagccgttcaatagtattattgagcacctgtcagtggtattcccatgttacaacagcactgagcttgctggttttattaaaaaagtgcgaagcaaaaacaagaactcactctcaggattgagtattgatgaaattgtccaaagagtgacagaacacattctagatgaacagaaaaagaaaaagccaaacccaggaaaggacaagaggacttatgagcccagctctgccacccccgtgaccaggtcctcccagggctcaccctcggtggttgttgcaccatcacccaaaaccaaggggcagaaagcagaagatgtccctgtgaggattgcactgggtgcaagttcctgtgaaatatgccacgaggtgttcaaatcaaaaaacgtgcgtgtgctcaaatgtgggcacaagtatcacaaagggtgctttaagcagtggcttaaagggcagagcgcttgcccggcctgccagggtcgtgatctcctgacagaagagtcaccttctggaagaggctggcccagtcagaatcaggagctgccttcctgctcttctaggtagtcacacttcactaaagtgtcatccaccagtgtgttgaatccgaagaatgacaattttctaccactggtgtaaaaaacaaacatttgaagacccttgtgcattgtgtgtcacaaagctaaatacatggaaatcgttaatatcgctgatattaagtaatttccccactctgagtgaatactttgatgattgccaacagtggctaataaaatgacggctaccacactcatgggtcactggggctgcgcagggctctttgaggtgggtggcttcttttggaaagtactatgaacgtctcgaagcagtattctagtgataagaattcttaacatagccaagcgccccacgtttgttccccacgtttgttccccttttctgtttgaaaaacctgttctggtagctccacaagagagatgatactgactttttaaattttttacaagagtctgtattcctgatatgcctatatttttcctcaaagattctgcattttaaggatgggcataagcaaactatattttaataatttatagttaatgttaaaatattggctgatttagaccaaaagattcaaatctcctctttgtgaaatcccatctgcatttgattttttattattttatgttcccccgttagattgttttaagtgtttgcttttcatcttttatagatgtaatctgattttcaaaaatcattaacactttttaattagtatcgactaagactttttccccctggaatcgaggctgtgtgtccgtcatcccagcccccggttggagcctgctctttgaactccgctgccttccttagcagcttctgtcctcttctgtgagtcagtcagcgagtgcttgggatccgcatccagccgtgctgagcacacaacaggctgtgtgtggaaatggccaccaccattctccttccccaccccaccacaaaaagagaagctgtgtctttagacaaccctgaggtatctgtgttacaatcgttctgtgtttgatatttgtgtaaagtatgcatgcagtcttgtactgtgacctaagaacaaaactgtaactgcattagaaaccatgaaaaaattagatattgttttgtgacttttagacagtggtaaatatagaaccatgaattctggtcacattccatttctctccaacatgaaggatcaaaaaatgtttttcaatgtgttctttgttccactggaaacttagagtcatgagtttatgagctgatttggtcaccttcctctgcctttgttcactgtgagttctgatgtcttagtgacttagttcttagaagctcacgccttagtttgaaacagattctccacggtggtccccaaaacactgtctgcatatccataagaattgagcgctatgggtgttaacgtgcatgaggatcagtttgcagcagcaagtacaaaaggagaagaggaacatccgttgaatgagtgtgttttgtacataacttcagatacttgtgaacatgccttatatttgtccaacaactgtcagaataaagaacattctaaaatgagaagttcactgtc

SEQ ID NO: 12237 - protein, 2025 aa, Homo sapiens; identical to SEQ ID NO: 2049

SEQ ID NO: 12238 - DNA, 9003 bp, Homo sapiens
ctgaactagttgccagtgatcttgaaacgtgacagtaaccaagagataaataggtgacaatgacaggaaaattagatgtagtaaaagagagtgtttgagagcagaagctatggcaactaaagactggatttgaatccttcctagcttggtgacatgagcaaattacttgatttaagtgagcattttcccatctgtacagtggagataacgataattgtgcctgctaagaagaattgctgtgaagattagtgaaataatgcatgtaaaacatttggtacagtatgtgacacatagtacaaatagtttgctaggaagattgttattattcttcacttgtgatattgtgaagttttcatacagcaaattggacatcatgagatggattgattaaataaatagatttgaacttcaaggactggtagtgttcttgctttggaaagaagaaacttggtttatcctaataatagtaggataataatggtgaagtgataggtacaagtaatagtgtttatgatgcgctggtgatgataggaaaagaaagccattatatgggcaagagctagaagtaataaaatggtgcatttttcagtgatgtttggcctatgtagctattctctgataactataaaaatccttattattgaagattcttcaggaaaaaaaacccttagtctgaaactttaccaccaatcccccttgccccccattgaaatacgtatttttaaaacatggcttttgataatgtgagggttttttcctttttgcgatttagcagtgctgattgtgtattgcagtagttgtgagagcattagaagcagcagtcgataggaggatggaaggtctggatgccgccttggggagttaggagattggcagacttaccctgtaccactctagccctactcctttgcccaagacagaaacacactgagatggataggagaatatgagcagttgataggaaagttctcagtggagtcaggatttaggttaggccaggagattgagaatataacagtttgtgtatgatgaaatggcatatttcacagaatgcagtaaaagcaggtagggtacaagtgcagcaacaggaagatgtcttttcttcattcagcaaacacttatttgagagcttaccatgtgctaggcacatacaaagataaataagatgcccttgatgatcctctatttaaaggagacatgtaaacaggttaacttagagtagagatggtgaatatgtgaacctgaggaaaggaagaaatagattaaattatctggagagagaggaaaagtcagcagaatggggacgagaatctttcggagctcagtgttctgataggagttatttccttgggcataggttccaagtatttttctaatataccatagaagccaggaaaactttcttctgttatctcaaatgatttaattactgacttgagtttgtgttgtctccttagacttgtgcaccatggacaattttgctgagggagatttcactgtggcggattatgccttgttagaagattgccctcacgtggatgattgtgtctttgctgctgaatttatgagcaatgattatgttcgtgtgactcagctttactgtgatggggtgggtgtgcaatataaagattatatccaaagtgagaggaatttggaatttgacatctgcagtatatggtgtagtaaaccaatttctgtcctgcaagattattgcgatgccattaaaataaacatcttctggccacttctgtttcaacatcaaaacagttccgtaatatcacgattgcatccctgtgtggacgccaacaattcacgtgcttctgagataaatttgaagaaactacaacatcttgagttgatggaagatattgtggatttggcaaagaaagttgctaatgattcattccttattggaggcttattgagaattggttgtaaaatagaaaataaaatcttggcaatggaagaagctctgaattggataaaatatgcaggcgatgtaacaattctaactaaattaggatcaattgacaattgttggcctatgttaagtattttctttactgaatgaaggagaactaatgaaaatgaaaggaaatgaagagttttccaaagaaagatttgatatagctattatctattacaccagagccattgaatatagacctgaaaactaccttctttatggtaaccgagctctttgttttcttcgtactggacagtttagaaatgcactcggtgatggaaagagagccactattctgaagaacacttggccaaagggtcattatcgttattgtgatgctctttctatgctgggggaatatgactgggccctgcaagcaaacataaaagctcaaaaactctgtaaaaatgaccctgagggaatcaaggatctaattcagcagcatgtaaagttacaaaaacaaatagaagacctacaaggtcgaacagcaaataaggatccaattaaagccttttatgaaaacagggcctacacacctaggagtttatcagcacctatatttactacttcacttaactttgtggagaaggaaagagatttcagaaaaattaatcacgaaatggccaacggtggtaatcagaatctaaaggtggcggatgaggcgttgaaggtagatgattgtgactgtcatcctgaattttcaccaccatcaagtcagcctccaaaacataaaggaaaacaaaaatctcgaaacaatgaatcagaaaagttcagttctagttcaccattgactttaccagcagatttgaagaacatcttggagaaacagttttctaaatcttccagagctgcacaccaggattttgctaatataatgaaaatgctgagaagcttaattcaagatggctatatggccttattggagcagcgttgccgcagcgctgcacaggcctttacagagttgctgaacggtttagatcctcaaaaaataaagcaattgaacctggccatgattaactatgttttggtcgtctatggacttgccatttctctccttggaataggacagcctgaggaattatctgaagccgaaaaccagtttaagaggattattgaacactaccccagtgagggccttgattgcttggcctactgtggaattggaaaagtatatttgaaaaaaaacagatttctagaagctctcaatcactttgagaaagcaagaaccttgatttatcgtcttcctggagtgttaacttggcccacgagtaatgtgattattgaagagtctcagccacaaaaaataaagatgctgttagagaaatttgttgaagaatgcaagttccctccagtgccagatgccatttgttgctatcagaagtgccatggatattctaagatccagatatacataactgatccagactttaagggttttatacgcatcagctgttgccagtactgtaaaatagaatttcacatgaattgctggaagaagttaaaaactacaacctttaatgataaaattgacaaggattttctacaaggaatatgtcttacccctgactgtgaaggtgtcatttctaagattatcatcttcagcagtggtggtgaagttaaatgtgaatttgaacacaaggtcataaaagaaaaggttcctccaagacctattctgaaacagaaatgttctagcctagagaaactaagactgaaagaagacaaaaaattgaagagaaagatccaaaaaaaagaagcaaaaaagttagcacaagaaagaatggaggaggacttaagagaaagtaatccacccaaaaatgaagagcagaaagaaactgtagacaatgttcagcgttgtcagttccttgatgacagaattctacagtgtataaagcagtatgctgacaagattaaatccggcatacagaatacagccatgcttctcaaagaattgctttcttggaaagttttgagcacagaagactatacaacctgtttttctagcagaaattttctaaatgaagcagtggactatgttattcgccacttgattcaagaaaataacagagtaaagacaagaatatttctgcatgttttgagtgagcttaaagaagtggagcccaaattagccgcctggatccaaaaacttaatagctttggcttagatgccacaggaactttcttttctcgttatggagcatctcttaaactgcttgattttagtatcatgactttcctctggaatgagaaatatggtcacaaactagactctatagaaggaaagcaacttgattatttctctgagccagcatcattgaaggaagcccgttgtttaatatggctgctagaagaacacagagacaagttcccagcattgcatagtgctttagatgaattctttgatataatggacagccgctgtactgtgttaaggaaacaagatagtggtgaagcaccgtttagttcaaccaaggtgaaaaacaaaagcaagaaaaagaagccaaaggattcaaagcctatgttagttgggtctggaacaacttcagtaacttcaaataatgagatcatcacttcaagtgaagaccatagcaatcgaaattcagattctgcaggcccatttgcagtgcctgaccatcttcggcaagatgtagaagaattcgaagctctctatgaccaacacagtaacgaatatgttgtccgcaataagaagctatgggacatgaacccaaaacaaaaatgttcaactctatatgattacttctctcagtttttggaggaacatggtcccttggacatgagtaacaagatgttctctgcagaatatgagtttttcccagaagaaactcgacagatactagaaaaagcaggaggtttaaaaccttttctcttgggatgccctcgttttgttgtgattgacaactgtattgcactgaagaaggttgcatcacggctcaagaaaaaaaggaagaagaaaaacattaaaacaaaagtagaagaaatttcaaaagcaggggagtatgtacgagttaaactacaactgaatccagctgctagggaatttaaaccagatgtaaagtctaaaccagtgtcagattcatcttcagcaccagcttttgaaaatgtgaaacccaaacctgtgtctgcaaattctcccaagccagcttgtgaagatgtgaaggccaaaccagtatccgacaattcttctagacaagtttctgaggatgggcaacccaaaggggtctcttctaattctcctaaaccaggctctgaggatgcaaattacaagcgagtctcctgtaattcccccaaaccggttcttgaggatgtgaaaccaacttattgggctcaatcccatttggtcacaggatactgtacgtatcttcctttccagagatttgatatcacccagacaccgccagcatacataaacgtgttaccaggtttgccccagtacaccagcatatatacacccttggccagcctttctcctgaatatcagctaccaagatcagtaccagtggtgccgtcttttgtagccaatgacagagcagataaaaatgctgctgcctattttgagggtcatcatttgaatgctgagaatgttgctggtcaccagattgcctctgaaacacagatccttgagggctctttgggaatatctgtaaagtcacactgcagcacaggtgatgctcatacagtcctgagtgagtctaacagaaatgatgagcactgtggaaattctaacaacaaatgtgaagtaattccagaaagcaccagtgcagtaacaaacattccacacgtgcagatggttgccatacaggtatcttggaacataatacaccaagaagtcaatactgagccatataatccttttgaggaacgacaaggggaaatttcacggattgaaaaggagcaccaagtattacaagaccaacttcaagaagtgtatgaaaattatgagcagataaaacttaagggcttagaagagaccagggacctggaagagaagttgaaaaggcacttagaagaaaacaagatctcaaagacggaattagattggttccttcaagatttggaaagagaaattaaaaaatggcaacaggaaaaaaaagaaatccaagaaagactaaaatcactgaagaagaaaattaaaaaggtttcaaatgccagtgaaatgtatacccagaaaaatgatggaaaggaaaaggaacatgaattacatctggatcagtcccttgaaatcagcaacacacttacaaatgagaaaatgaaaatagaagagtatataaagaaagggaaagaggattatgaagagagtcatcagagagctgtggctgcagaggtatccgtacttgaaaactggaaggagagtgaagtgtataagctacagatcatggagtcacaagcagaagcctttctgaagaagctggggctgattagccgtgatcctgcagcatatcctgacatggagtctgatatacgttcatgggaattgtttctttctaatgttacaaaagaaattgagaaagcaaagtctcagtttgaagaacaaattaaggcaattaaaaatggttctcggctcagtgaactttctaaagtgcagatttctgagctttcatttcctgcctgtaacacggttcatcccgagttactccctgagtcttcaggcgacgatggccaagggcttgtgacttctgcaagcgacgtgactggaaaccacgcagcacttcacagggatcctagtgtgttctctgctggtgattccccaggggaggctccttctgcgctgttgccagggccaccccctggtcagcctgaagccactcagctgacagggccaaaacgggctggccaggcagctctgtcagaacgaagccctgtggctgatcggaagcagcctgttcctccaggacgtgctgcgcgttcaagccagtctccaaaaaagccgttcaatagtattattgagcacctgtcagtggtattcccatgttacaacagcactgagcttgctggttttattaaaaaagtgcgaagcaaaaacaagaactcactctcaggattgagtattgatgaaattgtccaaagagtgacagaacacattctagatgaacagaaaaagaaaaagccaaacccaggaaaggacaagaggacttatgagcccagctctgccacccccgtgaccaggtcctcccagggctcaccctcggtggttgttgcaccatcacccaaaaccaaggggcagaaagcagaagatgtccctgtgaggattgcactgggtgcaagttcctgtgaaatatgccacgaggtgttcaaatcaaaaaacgtgcgtgtgctcaaatgtgggcacaagtatcacaaagggtgctttaagcagtggcttaaagggcagagcgcttgcccggcctgccagggtcgtgatctcctgacagaagagtcaccttctggaagaggctggcccagtcagaatcaggagctgccttcctgctcttctaggtagtcacacttcactaaagtgtcatccaccagtgtgttgaatccgaagaatgacaattttctaccactggtgtaaaaaacaaacatttgaagacccttgtgcattgtgtgtcacaaagctaaatacatggaaatcgttaatatcgctgatattaagtaatttccccactctgagtgaatactttgatgattgccaacagtggctaataaaatgacggctaccacactcatgggtcactggggctgcgcagggctctttgaggtgggtggcttcttttggaaagtactatgaacgtctcgaagcagtattctagtgataagaattcttaacatagccaagcgccccacgtttgttccccacgtttgttccccttttctgtttgaaaaacctgttctggtagctccacaagagagatgatactgactttttaaattttttacaagagtctgtattcctgatatgcctatatttttcctcaaagattctgcattttaaggatgggcataagcaaactatattttaataatttatagttaatgttaaaatattggctgatttagaccaaaagattcaaatctcctctttgtgaaatcccatctgcatttgattttttattattttatgttcccccgttagattgttttaagtgtttgcttttcatcttttatagatgtaatctgattttcaaaaatcattaacactttttaattagtatcgactaagactttttccccctggaatcgaggctgtgtgtccgtcatcccagcccccggttggagcctgctctttgaactccgctgccttccttagcagcttctgtcctcttctgtgagtcagtcagcgagtgcttgggatccgcatccagccgtgctgagcacacaacaggctgtgtgtggaaatggccaccaccattctccttccccaccccaccacaaaaagagaagctgtgtctttagacaaccctgaggtatctgtgttacaatcgttctgtgtttgatatttgtgtaaagtatgcatgcagtcttgtactgtgacctaagaacaaaactgtaactgcattagaaaccatgaaaaaattagatattgttttgtgacttttagacagtggtaaatatagaaccatgaattctggtcacattccatttctctccaacatgaaggatcaaaaaatgtttttcaatgtgttctttgttccactggaaacttagagtcatgagtttatgagctgatttggtcaccttcctctgcctttgttcactgtgagttctgatgtcttagtgacttagttcttagaagctcacgccttagtttgaaacagattctccacggtggtccccaaaacactgtctgcatatccataagaattgagcgctatgggtgttaacgtgcatgaggatcagtttgcagcagcaagtacaaaaggagaagaggaacatccgttgaatgagtgtgttttgtacataacttcagatacttgtgaacatgccttatatttgtccaacaactgtcagaataaagaacattctaaaatgagaagttcactgtc

SEQ ID NO: 12239 - protein, 1792 aa, Homo sapiens
MKMKGNEEFSKERFDIAIIYYTRAIEYRPENYLLYGNRALCFLRTGQFRNALGDGKRATILKNTWPKGHYRYCDALSMLGEYDWALQANIKAQKLCKNDPEGIKDLIQQHVKLQKQIEDLQGRTANKDPIKAFYENRAYTPRSLSAPIFTTSLNFVEKERDFRKINHEMANGGNQNLKVADEALKVDDCDCHPEFSPPSSQPPKHKGKQKSRNNESEKFSSSSPLTLPADLKNILEKQFSKSSRAAHQDFANIMKMLRSLIQDGYMALLEQRCRSAAQAFTELLNGLDPQKIKQLNLAMINYVLVVYGLAISLLGIGQPEELSEAENQFKRIIEHYPSEGLDCLAYCGIGKVYLKKNRFLEALNHFEKARTLIYRLPGVLTWPTSNVIIEESQPQKIKMLLEKFVEECKFPPVPDAICCYQKCHGYSKIQIYITDPDFKGFIRISCCQYCKIEFHMNCWKKLKTTTFNDKIDKDFLQGICLTPDCEGVISKIIIFSSGGEVKCEFEHKVIKEKVPPRPILKQKCSSLEKLRLKEDKKLKRKIQKKEAKKLAQERMEEDLRESNPPKNEEQKETVDNVQRCQFLDDRILQCIKQYADKIKSGIQNTAMLLKELLSWKVLSTEDYTTCFSSRNFLNEAVDYVIRHLIQENNRVKTRIFLHVLSELKEVEPKLAAWIQKLNSFGLDATGTFFSRYGASLKLLDFSIMTFLWNEKYGHKLDSIEGKQLDYFSEPASLKEARCLIWLLEEHRDKFPALHSALDEFFDIMDSRCTVLRKQDSGEAPFSSTKVKNKSKKKKPKDSKPMLVGSGTTSVTSNNEIITSSEDHSNRNSDSAGPFAVPDHLRQDVEEFEALYDQHSNEYVVRNKKLWDMNPKQKCSTLYDYFSQFLEEHGPLDMSNKMFSAEYEFFPEETRQILEKAGGLKPFLLGCPRFVVIDNCIALKKVASRLKKKRKKKNIKTKVEEISKAGEYVRVKLQLNPAAREFKPDVKSKPVSDSSSAPAFENVKPKPVSANSPKPACEDVKAKPVSDNSSRQVSEDGQPKGVSSNSPKPGSEDANYKRVSCNSPKPVLEDVKPTYWAQSHLVTGYCTYLPFQRFDITQTPPAYINVLPGLPQYTSIYTPLASLSPEYQLPRSVPVVPSFVANDRADKNAAAYFEGHHLNAENVAGHQIASETQILEGSLGISVKSHCSTGDAHTVLSESNRNDEHCGNSNNKCEVIPESTSAVTNIPHVQMVAIQVSWNIIHQEVNTEPYNPFEERQGEISRIEKEHQVLQDQLQEVYENYEQIKLKGLEETRDLEEKLKRHLEENKISKTELDWFLQDLEREIKKWQQEKKEIQERLKSLKKKIKKVSNASEMYTQKNDGKEKEHELHLDQSLEISNTLTNEKMKIEEYIKKGKEDYEESHQRAVAAEVSVLENWKESEVYKLQIMESQAEAFLKKLGLISRDPAAYPDMESDIRSWELFLSNVTKEIEKAKSQFEEQIKAIKNGSRLSELSKVQISELSFPACNTVHPELLPESSGDDGQGLVTSASDVTGNHAALHRDPSVFSAGDSPGEAPSALLPGPPPGQPEATQLTGPKRAGQAALSERSPVADRKQPVPPGRAARSSQSPKKPFNSIIEHLSVVFPCYNSTELAGFIKKVRSKNKNSLSGLSIDEIVQRVTEHILDEQKKKKPNPGKDKRTYEPSSATPVTRSSQGSPSVVVAPSPKTKGQKAEDVPVRIALGASSCEICHEVFKSKNVRVLKCGHKYHKGCFKQWLKGQSACPACQGRDLLTEESPSGRGWPSQNQELPSCSSR

SEQ ID NO: 12240 - DNA, 7430 bp, Homo sapiens
tacatttggaaagtcttactgacatgcagaaatagtacagaaaaacatacaaataggaatgttattggctgggcatggtggctcacacctgtaatcccagcactttgggaggccaaggcgggtggatcacaaggtcaggagatcgagaccatcgtggctaacatggtgaaaccctgtgcctactaaaaattcaaaaaattagccgggtgtactggcatgtgcctgtaatcctagctacttgggaggctgaggcaggagaatcacttgaacccgggaggcaaaggttgcagtgagccaagatcacgccactgcactccagcctgggcgacagagcgagactctgtctcaaaaaaaacaaaagaatgctatgcataggtacaatgtcgaaatgtgcaagaaatacttcagaaatattaaaagtagttattcctgggtagttgtgattgtgactctgggtgactttttccctttgttttatttttctgtattttccaaatttcctataatggacatatattatatggattttttttaattaaaattatcttttgactagataatatacatggaaaattcacaaagtacacatatgcaagatataatacttttactataaaagagtgaaaatttttaaatacttgtttttccttttagaaatgcactcggtgatggaaagagagccactattctgaagaacacttggccaaagggtcattatcgttattgtgatgctctttctatgctgggggaatatgactgggccctgcaagcaaacataaaagctcaaaaactctgtaaaaatgaccctgagggaatcaaggatctaattcagcagcatgtaaagttacaaaaacaaatagaagacctacaaggtcgaacagcaaataaggatccaattaaagccttttatgaaaacagggcctacacacctaggagtttatcagcacctatatttactacttcacttaactttgtggagaaggaaagagatttcagaaaaattaatcacgaaatggccaacggtggtaatcagaatctaaaggtggcggatgaggcgttgaaggtagatgattgtgactgtcatcctgaattttcaccaccatcaagtcagcctccaaaacataaaggaaaacaaaaatctcgaaacaatgaatcagaaaagttcagttctagttcaccattgactttaccagcagatttgaagaacatcttggagaaacagttttctaaatcttccagagctgcacaccaggattttgctaatataatgaaaatgctgagaagcttaattcaagatggctatatggccttattggagcagcgttgccgcagcgctgcacaggcctttacagagttgctgaacggtttagatcctcaaaaaataaagcaattgaacctggccatgattaactatgttttggtcgtctatggacttgccatttctctccttggaataggacagcctgaggaattatctgaagccgaaaaccagtttaagaggattattgaacactaccccagtgagggccttgattgcttggcctactgtggaattggaaaagtatatttgaaaaaaaacagatttctagaagctctcaatcactttgagaaagcaagaaccttgatttatcgtcttcctggagtgttaacttggcccacgagtaatgtgattattgaagagtctcagccacaaaaaataaagatgctgttagagaaatttgttgaagaatgcaagttccctccagtgccagatgccatttgttgctatcagaagtgccatggatattctaagatccagatatacataactgatccagactttaagggttttatacgcatcagctgttgccagtactgtaaaatagaatttcacatgaattgctggaagaagttaaaaactacaacctttaatgataaaattgacaaggattttctacaaggaatatgtcttacccctgactgtgaaggtgtcatttctaagattatcatcttcagcagtggtggtgaagttaaatgtgaatttgaacacaaggtcataaaagaaaaggttcctccaagacctattctgaaacagaaatgttctagcctagagaaactaagactgaaagaagacaaaaaattgaagagaaagatccaaaaaaaagaagcaaaaaagttagcacaagaaagaatggaggaggacttaagagaaagtaatccacccaaaaatgaagagcagaaagaaactgtagacaatgttcagcgttgtcagttccttgatgacagaattctacagtgtataaagcagtatgctgacaagattaaatccggcatacagaatacagccatgcttctcaaagaattgctttcttggaaagttttgagcacagaagactatacaacctgtttttctagcagaaattttctaaatgaagcagtggactatgttattcgccacttgattcaagaaaataacagagtaaagacaagaatatttctgcatgttttgagtgagcttaaagaagtggagcccaaattagccgcctggatccaaaaacttaatagctttggcttagatgccacaggaactttcttttctcgttatggagcatctcttaaactgcttgattttagtatcatgactttcctctggaatgagaaatatggtcacaaactagactctatagaaggaaagcaacttgattatttctctgagccagcatcattgaaggaagcccgttgtttaatatggctgctagaagaacacagagacaagttcccagcattgcatagtgctttagatgaattctttgatataatggacagccgctgtactgtgttaaggaaacaagatagtggtgaagcaccgtttagttcaaccaaggtgaaaaacaaaagcaagaaaaagaagccaaaggattcaaagcctatgttagttgggtctggaacaacttcagtaacttcaaataatgagatcatcacttcaagtgaagaccatagcaatcgaaattcagattctgcaggcccatttgcagtgcctgaccatcttcggcaagatgtagaagaattcgaagctctctatgaccaacacagtaacgaatatgttgtccgcaataagaagctatgggacatgaacccaaaacaaaaatgttcaactctatatgattacttctctcagtttttggaggaacatggtcccttggacatgagtaacaagatgttctctgcagaatatgagtttttcccagaagaaactcgacagatactagaaaaagcaggaggtttaaaaccttttctcttgggatgccctcgttttgttgtgattgacaactgtattgcactgaagaaggttgcatcacggctcaagaaaaaaaggaagaagaaaaacattaaaacaaaagtagaagaaatttcaaaagcaggggagtatgtacgagttaaactacaactgaatccagctgctagggaatttaaaccagatgtaaagtctaaaccagtgtcagattcatcttcagcaccagcttttgaaaatgtgaaacccaaacctgtgtctgcaaattctcccaagccagcttgtgaagatgtgaaggccaaaccagtatccgacaattcttctagacaagtttctgaggatgggcaacccaaaggggtctcttctaattctcctaaaccaggctctgaggatgcaaattacaagcgagtctcctgtaattcccccaaaccggttcttgaggatgtgaaaccaacttattgggctcaatcccatttggtcacaggatactgtacgtatcttcctttccagagatttgatatcacccagacaccgccagcatacataaacgtgttaccaggtttgccccagtacaccagcatatatacacccttggccagcctttctcctgaatatcagctaccaagatcagtaccagtggtgccgtcttttgtagccaatgacagagcagataaaaatgctgctgcctattttgagggtcatcatttgaatgctgagaatgttgctggtcaccagattgcctctgaaacacagatccttgagggctctttgggaatatctgtaaagtcacactgcagcacaggtgatgctcatacagtcctgagtgagtctaacagaaatgatgagcactgtggaaattctaacaacaaatgtgaagtaattccagaaagcaccagtgcagtaacaaacattccacacgtgcagatggttgccatacaggtatcttggaacataatacaccaagaagtcaatactgagccatataatccttttgaggaacgacaaggggaaatttcacggattgaaaaggagcaccaagtattacaagaccaacttcaagaagtgtatgaaaattatgagcagataaaacttaagggcttagaagagaccagggacctggaagagaagttgaaaaggcacttagaagaaaacaagatctcaaagacggaattagattggttccttcaagatttggaaagagaaattaaaaaatggcaacaggaaaaaaaagaaatccaagaaagactaaaatcactgaagaagaaaattaaaaaggtttcaaatgccagtgaaatgtatacccagaaaaatgatggaaaggaaaaggaacatgaattacatctggatcagtcccttgaaatcagcaacacacttacaaatgagaaaatgaaaatagaagagtatataaagaaagggaaagaggattatgaagagagtcatcagagagctgtggctgcagaggtatccgtacttgaaaactggaaggagagtgaagtgtataagctacagatcatggagtcacaagcagaagcctttctgaagaagctggggctgattagccgtgatcctgcagcatatcctgacatggagtctgatatacgttcatgggaattgtttctttctaatgttacaaaagaaattgagaaagcaaagtctcagtttgaagaacaaattaaggcaattaaaaatggttctcggctcagtgaactttctaaagtgcagatttctgagctttcatttcctgcctgtaacacggttcatcccgagttactccctgagtcttcaggcgacgatggccaagggcttgtgacttctgcaagcgacgtgactggaaaccacgcagcacttcacagggatcctagtgtgttctctgctggtgattccccaggggaggctccttctgcgctgttgccagggccaccccctggtcagcctgaagccactcagctgacagggccaaaacgggctggccaggcagctctgtcagaacgaagccctgtggctgatcggaagcagcctgttcctccaggacgtgctgcgcgttcaagccagtctccaaaaaagccgttcaatagtattattgagcacctgtcagtggtattcccatgttacaacagcactgagcttgctggttttattaaaaaagtgcgaagcaaaaacaagaactcactctcaggattgagtattgatgaaattgtccaaagagtgacagaacacattctagatgaacagaaaaagaaaaagccaaacccaggaaaggacaagaggacttatgagcccagctctgccacccccgtgaccaggtcctcccagggctcaccctcggtggttgttgcaccatcacccaaaaccaaggggcagaaagcagaagatgtccctgtgaggattgcactgggtgcaagttcctgtgaaatatgccacgaggtgttcaaatcaaaaaacgtgcgtgtgctcaaatgtgggcacaagtatcacaaagggtgctttaagcagtggcttaaagggcagagcgcttgcccggcctgccagggtcgtgatctcctgacagaagagtcaccttctggaagaggctggcccagtcagaatcaggagctgccttcctgctcttctaggtagtcacacttcactaaagtgtcatccaccagtgtgttgaatccgaagaatgacaattttctaccactggtgtaaaaaacaaacatttgaagacccttgtgcattgtgtgtcacaaagctaaatacatggaaatcgttaatatcgctgatattaagtaatttccccactctgagtgaatactttgatgattgccaacagtggctaataaaatgacggctaccacactcatgggtcactggggctgcgcagggctctttgaggtgggtggcttcttttggaaagtactatgaacgtctcgaagcagtattctagtgataagaattcttaacatagccaagcgccccacgtttgttccccacgtttgttccccttttctgtttgaaaaacctgttctggtagctccacaagagagatgatactgactttttaaattttttacaagagtctgtattcctgatatgcctatatttttcctcaaagattctgcattttaaggatgggcataagcaaactatattttaataatttatagttaatgttaaaatattggctgatttagaccaaaagattcaaatctcctctttgtgaaatcccatctgcatttgattttttattattttatgttcccccgttagattgttttaagtgtttgcttttcatcttttatagatgtaatctgattttcaaaaatcattaacactttttaattagtatcgactaagactttttccccctggaatcgaggctgtgtgtccgtcatcccagcccccggttggagcctgctctttgaactccgctgccttccttagcagcttctgtcctcttctgtgagtcagtcagcgagtgcttgggatccgcatccagccgtgctgagcacacaacaggctgtgtgtggaaatggccaccaccattctccttccccaccccaccacaaaaagagaagctgtgtctttagacaaccctgaggtatctgtgttacaatcgttctgtgtttgatatttgtgtaaagtatgcatgcagtcttgtactgtgacctaagaacaaaactgtaactgcattagaaaccatgaaaaaattagatattgttttgtgacttttagacagtggtaaatatagaaccatgaattctggtcacattccatttctctccaacatgaaggatcaaaaaatgtttttcaatgtgttctttgttccactggaaacttagagtcatgagtttatgagctgatttggtcaccttcctctgcctttgttcactgtgagttctgatgtcttagtgacttagttcttagaagctcacgccttagtttgaaacagattctccacggtggtccccaaaacactgtctgcatatccataagaattgagcgctatgggtgttaacgtgcatgaggatcagtttgcagcagcaagtacaaaaggagaagaggaacatccgttgaatgagtgtgttttgtacataacttcagatacttgtgaacatgccttatatttgtccaacaactgtcagaataaagaacattctaaaatgagaagttcactgtc

SEQ ID NO: 12241 - protein, 1715 aa, Homo sapiens
MLGEYDWALQANIKAQKLCKNDPEGIKDLIQQHVKLQKQIEDLQGRTANKDPIKAFYENRAYTPRSLSAPIFTTSLNFVEKERDFRKINHEMANGGNQNLKVADEALKVDDCDCHPEFSPPSSQPPKHKGKQKSRNNESEKFSSSSPLTLPADLKNILEKQFSKSSRAAHQDFANIMKMLRSLIQDGYMALLEQRCRSAAQAFTELLNGLDPQKIKQLNLAMINYVLVVYGLAISLLGIGQPEELSEAENQFKRIIEHYPSEGLDCLAYCGIGKVYLKKNRFLEALNHFEKARTLIYRLPGVLTWPTSNVIIEESQPQKIKMLLEKFVEECKFPPVPDAICCYQKCHGYSKIQIYITDPDFKGFIRISCCQYCKIEFHMNCWKKLKTTTFNDKIDKDFLQGICLTPDCEGVISKIIIFSSGGEVKCEFEHKVIKEKVPPRPILKQKCSSLEKLRLKEDKKLKRKIQKKEAKKLAQERMEEDLRESNPPKNEEQKETVDNVQRCQFLDDRILQCIKQYADKIKSGIQNTAMLLKELLSWKVLSTEDYTTCFSSRNFLNEAVDYVIRHLIQENNRVKTRIFLHVLSELKEVEPKLAAWIQKLNSFGLDATGTFFSRYGASLKLLDFSIMTFLWNEKYGHKLDSIEGKQLDYFSEPASLKEARCLIWLLEEHRDKFPALHSALDEFFDIMDSRCTVLRKQDSGEAPFSSTKVKNKSKKKKPKDSKPMLVGSGTTSVTSNNEIITSSEDHSNRNSDSAGPFAVPDHLRQDVEEFEALYDQHSNEYVVRNKKLWDMNPKQKCSTLYDYFSQFLEEHGPLDMSNKMFSAEYEFFPEETRQILEKAGGLKPFLLGCPRFVVIDNCIALKKVASRLKKKRKKKNIKTKVEEISKAGEYVRVKLQLNPAAREFKPDVKSKPVSDSSSAPAFENVKPKPVSANSPKPACEDVKAKPVSDNSSRQVSEDGQPKGVSSNSPKPGSEDANYKRVSCNSPKPVLEDVKPTYWAQSHLVTGYCTYLPFQRFDITQTPPAYINVLPGLPQYTSIYTPLASLSPEYQLPRSVPVVPSFVANDRADKNAAAYFEGHHLNAENVAGHQIASETQILEGSLGISVKSHCSTGDAHTVLSESNRNDEHCGNSNNKCEVIPESTSAVTNIPHVQMVAIQVSWNIIHQEVNTEPYNPFEERQGEISRIEKEHQVLQDQLQEVYENYEQIKLKGLEETRDLEEKLKRHLEENKISKTELDWFLQDLEREIKKWQQEKKEIQERLKSLKKKIKKVSNASEMYTQKNDGKEKEHELHLDQSLEISNTLTNEKMKIEEYIKKGKEDYEESHQRAVAAEVSVLENWKESEVYKLQIMESQAEAFLKKLGLISRDPAAYPDMESDIRSWELFLSNVTKEIEKAKSQFEEQIKAIKNGSRLSELSKVQISELSFPACNTVHPELLPESSGDDGQGLVTSASDVTGNHAALHRDPSVFSAGDSPGEAPSALLPGPPPGQPEATQLTGPKRAGQAALSERSPVADRKQPVPPGRAARSSQSPKKPFNSIIEHLSVVFPCYNSTELAGFIKKVRSKNKNSLSGLSIDEIVQRVTEHILDEQKKKKPNPGKDKRTYEPSSATPVTRSSQGSPSVVVAPSPKTKGQKAEDVPVRIALGASSCEICHEVFKSKNVRVLKCGHKYHKGCFKQWLKGQSACPACQGRDLLTEESPSGRGWPSQNQELPSCSSR

SEQ ID NO: 12242 - DNA, 366 bp, Homo sapiens
cactgtgcctggccctattttttctttatatgagtagaacttttattttaaaatgatttttaaaaatgctttttttcttttagttctagttcaccattgactttaccagcagatttgaagaacatcttggagaaacagttttctaaatcttccagagctgcacaccaggattttgctaatataatgaaaatgctgagaagcttaattcaagatggctatatggccttattggagcagcgttgccgcagcgctgcacaggcctttacagagttgctgaacggtttagatcctcaaaaaataaagcaattgaacctggccatgattaactatgttttggtcgtctatggacttgccatttctctcctt

SEQ ID NO: 12243 - protein, 60 aa, Homo sapiens
MKMLRSLIQDGYMALLEQRCRSAAQAFTELLNGLDPQKIKQLNLAMINYVLVVYGLAISL

SEQ ID NO: 12244 - DNA, 673 bp, Homo sapiens
tcaaagccaaataaggaatagaacatggcctatgccagtagtatgaggcgttattttaaggctttagtgtactatatggaaatgtaaatatttagttttctcacaaaaccatctgtatattcctacagacagccgctgtactgtgttaaggaaacaagatagtggtgaagcaccgtttagttcaaccaaggtgaaaaacaaaagcaagaaaaagaagccaaaggattcaaagcctatgttagttgggtctggaacaacttcagtaacttcaaataatgagatcatcacttcaagtgaagaccatagcaatcgaaattcagattctgcaggcccatttgcagtgcctgaccatcttcggcaagatgtagaagaattcgaagctctctatgaccaacacagtaacgaatatgttgtccgcaataagaagctatgggacatgaacccaaaacaaaaatgttcaactctatatgattacttctctcagtttttggaggaacatggtcccttggacatgagtaacaagatgttctctgcagaatatgagtttttcccagaagaaactcgacagatactagaaaaagcaggaggtttaaaaccttttctcttgggatgccctcgttttgttgtgattgacaactgtattgcactgaagaaggttgcatcacggctcaag

SEQ ID NO: 12245 - protein, 145 aa, Homo sapiens
MLVGSGTTSVTSNNEIITSSEDHSNRNSDSAGPFAVPDHLRQDVEEFEALYDQHSNEYVVRNKKLWDMNPKQKCSTLYDYFSQFLEEHGPLDMSNKMFSAEYEFFPEETRQILEKAGGLKPFLLGCPRFVVIDNCIALKKVASRL

SEQ ID NO: 12246 - DNA, 1151 bp, Homo sapiens
gtctctgggagacttccaactgggaatctcccgctgaggccacacctctagattaggttagtggcccctgatccacgccgctccagcattctgccatgagaaacctcactctgctgcagctttatcttctaaatgacgtgctgagaacacccacgaaactgcaataccggctaatcagccccagcttcttcagaaaggcttctgcttgtgactccatgatctgtagcttatacacttcactctccttccagttttcaagtacggatacctgccagtagatcagaagacatatgagtattttacaaatgacagcctgaaactattttaaaggttaaaacttaaacattcaaaccactttcccatttctccttaaatgaagcatgacagaatcatcagaacttgattgtatcataggtgaacatgaattagactttgagatttgaaaacagaacaaaatgacatcacaaatgcataccttccatgatcctttttgcagatatgaataactgtacatggctttctgcttaagctatatataagcacagagccaggttaactgcatgtgtacacgagtgtgcattacctatggtcctgcagcagaataacccttaataaaggctgcatcctctgcaagtttagaaaagcctcagagaagctgttctcggcaagggcatcaaaagcttcggggtatgcttttaagattttagactctctgtggcttccccacaaaccaactggccatttttgtgagaatcactgcaggaaatgtaaaatggcctcatggtccaaatgatccattaaatagccttttaatccaggtgtcagtaaacttgacagggcccaccaggcaaacctgcttaccaaacggtggtgtgaattaaacaagctcaggaatacggatgctggtgtaggacccaaaaagtattcatactttggctctttttcctttcctgtccttagaagcaggtgcatagtcaattcttaattgaaaagcctaatgtttgcagactgtataaactaagtcttttcttactttaccagaataatcacagacacatatgccaataaatatcatttgtttctcagctacagaaacatagagaatcatgtttctggaactaaataaaatacagccagatgtcataattttg

SEQ ID NO: 12247 - protein, 60 aa, Homo sapiens
MRNLTLLQLYLLNDVLRTPTKLQYRLISPSFFRKASACDSMICSLYTSLSFQFSSTDTCQ

SEQ ID NO: 12248 - DNA, 964 bp, Homo sapiens
gctttaagcagtggcttaaagggcagagcgcttgcccggcctgccagggtcgtgatctcctgacagaagagtcaccttctggaagaggctggcccagtcagaatcaggagctgccttcctgctcttctagtatcgactaagactttttccccctggaatcgaggctgtgtgtccgtcatcccagcccccggttggagcctgctctttgaactccgctgccttccttagcagcttctgtcctcttctgtgagtcagtcagcgagtgcttgggatccgcatccagccgtgctgagcacacaacaggctgtgtgtggaaatggccaccaccattctccttccccaccccaccacaaaaagagaagctgtgtctttagacaaccctgaggtatctgtgttacaatcgttctgtgtttgatatttgtgtaaagtatgcatgcagtcttgtactgtgacctaagaacaaaactgtaactgcattagaaaccatgaaaaaattagatattgttttgtgacttttagacagtggtaaatatagaaccatgaattctggtcacattccatttctctccaacatgaaggatcaaaaaatgtttttcaatgtgttctttgttccactggaaacttagagtcatgagtttatgagctgatttggtcaccttcctctgcctttgttcactgtgagttctgatgtcttagtgacttagttcttagaagctcacgccttagtttgaaacagattctccacggtggtccccaaaacactgtctgcatatccataagaattgagcgctatgggtgttaacgtgcatgaggatcagtttgcagcagcaagtacaaaaggagaagaggaacatccgttgaatgagtgtgttttgtacataacttcagatacttgtgaacatgccttatatttgtccaacaactgtcagaataaagaacattctaaaatgagaagttcactgtc

SEQ ID NO: 12249 - protein, 56 aa, Homo sapiens
MGVNVHEDQFAAASTKGEEEHPLNECVLYITSDTCEHALYLSNNCQNKEHSKMRSS

SEQ ID NO: 12250 - DNA, 1643 bp, Homo sapiens
cttctacccgggggctccagtgcatctggctttatctctggggtgcttccatacaaaggggacagaagagatgatggaaggcctcagtactgcaggaggggagacggatgtcatctacaatcacacaatacatgggaggtcacagaacgccagggtgacgtaacaattcaaaccatgaagaggtaacagagcccttcgcgcgtctcaacacgtggtgacgcagctaataacctgtgatgcatacatgggaacaaatgcatagaaaaacttgtcaatgacacggcaaagtaaaacccaaatgaagcgaggtgaaagaatgggctgcagcgcaggcaaaactgcaccacgttacagactgctcgcctgggatggaacggtggggaggtgcgcagacggatggacaagcgcctggcaaaatggatttcttttcctagactgctaatgctactaacagttccctcctcacagggtcgctataacgaggtaacatacagcacttagaagacggcctgacccagaataacactaatgttcacatggctgcgagtctcagaccaaaatcaatagccggtatctactgaaactgcagcaaggcgaaaccacgggaatggcgctccgttgagtagagcaacgcacagcacatcacatcgcatcctccgtagcgggaggctctggcctcaccgcagcggcacttcccggaagagcccaggatattcggggacccgcaccggacaggcggcccaggccccctggcgcccagctggccgccctgttgcagctctcatgccaagacctgcgcctaacggcagggattccggcggtcatcatttattcttggcgctaagctgccgcttctcttttttatcaccacagagtaacgcagaccccaccgtttccttccattctgagccaaccactccagcagccaccggggcgccaggttatgctggggctgcaccacccggcccgaggcttttgaagccacgcctgagcgcggaggatgggcaggatttgccccgtgaactcccgcgcacgcaggctccgcgcgaggcccgggcgcccgagcggcgattccctcccctatcaccagctccagggtggtgccccccggctgtggagcccagaccccggccgtccagcagcgtatagacgagcccatgtctgcgatgtaactgcaccgcgctggggatccacctcccgccagggtgagggcgccgtcctccagcgtatgctaggcaggcgcgccccgccctcctggtcacgtgaccacgcctacagccgaagaggatgggaaaatgcggccctgttcctgaacaggaagcggaagcaggaaggaactgagaacaccagcatctgctgccgccctgaatcagcgttagcatgtggaggcaacctcagcccccagtttttgaagaaggtgattcagattcagacacaggaattatggtgacggtagaaatggactggaaggttcgttccccttgcccaccaagactccagagcaggtgggttcttgatgtctactctgcatgaagccctgggctttccggccctccctacttttcctccgaattcacagcacagcggagccaaaatgtattcctgccaaaacgggcatttcccaaaagaaaatattgttttag

SEQ ID NO: 12251 - protein, 30 aa, Homo sapiens
MMEGLSTAGGETDVIYNHTIHGRSQNARVT

SEQ ID NO: 12252 - DNA, 2004 bp, Homo sapiens
ttctacccgggggctccagtgcatctggctttatctctggggtgcttccatacaaaggggacagaagagatgatggaaggcctcagtactgcaggaggggagacggatgtcatctacaatcacacaatacatgggaggtcacagaacgccagggtgacgtaacaattcaaaccatgaagaggtaacagagcccttcgcgcgtctcaacacgtggtgacgcagctaataacctgtgatgcatacatgggaacaaatgcatagaaaaacttgtcaatgacacggcaaagtaaaacccaaatgaagcgaggtgaaagaatgggctgcagcgcaggcaaaactgcaccacgttacagactgctcgcctgggatggaacggtggggaggtgcgcagacggatggacaagcgcctggcaaaatggatttcttttcctagactgctaatgctactaacagttccctcctcacagggtcgctataacgaggtaacatacagcacttagaagacggcctgacccagaataacactaatgttcacatggctgcgagtctcagaccaaaatcaatagccggtatctactgaaactgcagcaaggcgaaaccacgggaatggcgctccgttgagtagagcaacgcacagcacatcacatcgcatcctccgtagcgggaggctctggcctcaccgcagcggcacttcccggaagagcccaggatattcggggacccgcaccggacaggcggcccaggccccctggcgcccagctggccgccctgttgcagctctcatgccaagacctgcgcctaacggcagggattccggcggtcatcatttattcttggcgctaagctgccgcttctcttttttatcaccacagagtaacgcagaccccaccgtttccttccattctgagccaaccactccagcagccaccggggcgccaggttatgctggggctgcaccacccggcccgaggcttttgaagccacgcctgagcgcggaggatgggcaggatttgccccgtgaactcccgcgcacgcaggctccgcgcgaggcccgggcgcccgagcggcgattccctcccctatcaccagctccagggtggtgccccccggctgtggagcccagaccccggccgtccagcagcgtatagacgagcccatgtctgcgatgtaactgcaccgcgctggggatccacctcccgccagggtgagggcgccgtcctccagcgtatgctaggcaggcgcgccccgccctcctggtcacgtgaccacgcctacagccgaagaggatgggaaaatgcggccctgttcctgaacaggaagcggaagcaggaaggaactgagaacaccagcatctgctgccgccctgaatcagcgttagcatgtggaggcaacctcagcccccagtttttgaagaaggtgattcagattcagacacaggaattatggtgacggtagaaatggactggaaggttcgttccccttgcccaccaagactccagagcaggtgggttcttgatgtctactctgcatgaagccctgggctttccggccctccctacttttcctccgaattcacagcacagcggagccaaaatgtattcctgccaaaacgggcatttcccaaaagaaaatattgttttagattcattgttcacagcctctttttttttgttgttcatttgaagcaatttttcttttttattattatactttaagttttagggtacatgtgcacagtgtgcaggttagttacatatgtatacatgtgccatgctggtgcgctgcacccactaactcgtcatctagcattaggtatatctcccaatgctatccctccccctccccccaccccacaacagtccccagagtgtgatgttccccttcctgtgtccatgtgttctcattgttcagttcccacctatgagtgagaatatgcggtgtttggttttttgttcttgcgatagtttactgagaatgatgatttccaatttcatccatgtccct

SEQ ID NO: 12253 - protein, 30 aa, Homo sapiens; identical to SEQ ID NO: 12251

SEQ ID NO: 12254 - DNA, 786 bp, Homo sapiens
agcctttcccttaaggatgtctgagagctggtctcctcactcttttcttccgcctattaaactttccgcttcttaactcacccatgtgtgtccatgtcgttaatcatcttgacgagagatgatgaaccccggatatttaccccagacagtgatgccgcttcaccagcattgcactctacttccccgcttcctgatcctgcctcagcttctcctctccacagagaagaaaaaattctgcctaaagtctgcaacatcgtttcctgcctgagtttcagcctgccagcttctcctacggattctggacttgccagccccacaatcatcagggatcctgtggcctccaaatcccagttggaactcagctcaaggccagcaaaaacagagcctagagcctggagcgcacagtttggcaggtgcagtgcgcagccccaaccccaagtggattttctacctgcagagaatacctgctctgggtgaccacagctgctgagaaatcttcccagaagaggcaggatgggatggaatgctgggattacagatgaactttcctggccaccctggataagcagaacctgaataaagtaaatcatgatcacaccccaaggcaagacagaggcctctggcatgtaagaaggctccccagtggtcaagacagaagcaggcttcaagaaatggaaagtattggtgggcagagtggggtcagtgagggatgagggtgcaggagcactcagagaagcacacaaggtgtccttctgagctggatgcttgtgataactggagagggaa

SEQ ID NO: 12255 - protein, 127 aa, Homo sapiens
MSLIILTRDDEPRIFTPDSDAASPALHSTSPLPDPASASPLHREEKILPKVCNIVSCLSFSLPASPTDSGLASPTIIRDPVASKSQLELSSRPAKTEPRAWSAQFGRCSAQPQPQVDFLPAENTCSG

SEQ ID NO: 12256 - DNA, 525 bp, Homo sapiens
atgtcgttaatcatcttgacgagagatgatgaaccccggatatttaccccagacagtgatgccgcttcaccagcattgcactctacttccccgcttcctgatcctgcctcagcttctcctctccacagagaagaaaaaattctgcctaaagtctgcaacatcgtttcctgcctgagtttcagcctgccagcttctcctacggattctggacttgccagccccacaatcatactgcaattgagccatccaaggatacaatcatagcaatcaaaaagagtgactggaggaagaaggaaatgaacatagaagaggaaaaaaaagaaatcttgattttccctcatgctatagaagggaatggtgctgttatatttttggcctatccagaaaaccaattatgaaaataaacataaatggttttctgcctcatggtttagaagcacctctgtgtgtttgctcactgaattgttgtgatgttttgctctccatgatttggaagccaaaccaataaagcaattttatcctctc

SEQ ID NO: 12257 - protein, 87 aa, Homo sapiens
MSLIILTRDDEPRIFTPDSDAASPALHSTSPLPDPASASPLHREEKILPKVCNIVSCLSFSLPASPTDSGLASPTIILQLSHPRIQS

SEQ ID NO: 12258 - DNA, 1098 bp, Homo sapiens
cagtcacgggccagcctttcccttaaggatgtctgagagctggtctcctcactcttttcttccgcctattaaactttccgcttcttaactcacccatgtgtgtccatgtcgttaatcatcttgacgagagatgatgaaccccggatatttaccccagacagtgatgccgcttcaccagcattgcactctacttccccgcttcctgatcctgcctcagcttctcctctccacagagaagaaaaaattctgcctaaagtctgcaacatcgtttcctgcctgagtttcagcctgccagcttctcctacggattctggacttgccagccccacaatcataaccagagaggggcagcaattttgggcaaaatgtctgatttggaaataccaactttacctccatgggctccacaagaaatcagatgggagaagggacaagcagataagcgcaagcccatcaacctgaaggcataaaccacatccagccacctccttctgatcagcagcaaagctgacgttttgatctccatctgtctgattcttgtgtctacttctcagtttacaactccagtgggaaagaaagagctttatttacagacccataaaaatcccatcagtgtcgtcccctgctgagaggccatgtgagaccatatggaaaaacaacagccataatggcagcatggcagtggaagggtttgtcttgtgcccaggccttgcggtcatgcaagtttcttgtggatcctgttgggaccagccactcaccaaggctgagtaggtccacaaataatggggactttctaccagactcacagagaactgctgggtttttgggaagggtgtgcgtgtctttggggcatgcaagttggggttatagtggagacccagaggatgagaaaacttctctgcctcagcagaagagtggcagctgagagagaggcaagaaactcgcacccactgtggactggggcagagagattttgaggagaatgaaatccagaaactctgtgtggtattagtttgtatccagagggtgaccctcttctcaaggaaatgggtgtcatcaattttctacactattaaagatataaagttcttggcatta

SEQ ID NO: 12259 - protein, 118 aa, Homo sapiens; identical to SEQ ID NO: 2055

SEQ ID NO: 12260 - DNA, 800 bp, Homo sapiens
atgtctgagagctggtctcctcactcttttcttccgcctattaaactttccgcttcttaactcacccatgtgtgtccatgtcgttaatcatcttgacgagagatgatgaaccccggatatttaccccagacagtgatgccgcttcaccagcattgcactctacttccccgcttcctgatcctgcctcagcttctcctctccacagagaagaaaaaattctgcctaaagtctgcaacatcgtttcctgcctgagtttcagcctgccagcttctcctacggattctggacttgccagccccacaatcataagctggtgaaggctctcaggtaaaggaaatgacttgggacatctggctcctgttctgacataagtgaagatcaaacaaggtcacatgtttatgaggaagcaccttttaattgctgcattctctaaatatgaagagttacaatgattaacgaattgcatccttgtcacccctccaagcacattgagataagctttctcaacaaggagaatcttgagatgtagtttgaatcacaaggcattacctaatggatataaaattggatagtgtttttggcttagatgggagcagatctgacgtttccaaggaaatgtatacacatgcaccttccattttacataaatttcaggaaattcaagacctccagaagctcagtcatcactctctgaggagatcaacttcatgagccttctctacctgagagaggactacaaatactgttttattccatgatcaatcagctgagtgtagaaagaaatatattacctcttcctc

SEQ ID NO: 12261 - protein, 79 aa, Homo sapiens
MSLIILTRDDEPRIFTPDSDAASPALHSTSPLPDPASASPLHREEKILPKVCNIVSCLSFSLPASPTDSGLASPTIISW

SEQ ID NO: 12262 - DNA, 726 bp, Homo sapiens
gtagcgcgcagggaaggctggtcaccccaccctaatcttgttatgcaaataggcttcccacttggcaggggccgtcttgtccactcgtttctgtaaacatgggtggcaaaaagagaagatggagctgccatttagaacatgcctaatcccagcttcatcttgctgagcaaaaatgaaggagcctggacccaactttgttactgtgagaaagggtcttcattcattcaagatggcatttgttaagcacctactgtgagtagatgatctcctgtcaaagacagttaacaaatcctcggaatattgcttcatgtacagttattggagatgagtaacttacattctcttaattgtaatggttccttggaaagtcatcgtggaaaatgaaggctggctcatacattttcccagacaggaatttggctgccaacagggaattctaaacaactaaaaactccagatgatgaatgcacaacataatgatggttaaattaaaaaaaaaaaagagcacgacaaaccttggaaatcaagaaagttctggaatgatgaagctgttcatgccaagaccgaaagtgctggcccagtatgagtccattcagttcatgccgtgacaattttcttggaactcctttttattgttagttctcacttgtttccatatttagtgaatgtacatttaattgcaaagctgtcattaataaaaattcttatagtacctcactgcacaaa

SEQ ID NO: 12263 - protein, 47 aa, Homo sapiens
MHNIMMVKLKKKKSTTNLGNQESSGMMKLFMPRPKVLAQYESIQFMP

SEQ ID NO: 12264 - DNA, 446 bp, Homo sapiens
accccaccctaatcttgttatgcaaataggcttcccacttggcaggggccgtcttgtccactcgtttctgtaaacatgggtggcaaaaagagaagatggagctgccatttagaacatgcctaatcccagcttcatcttgctgagcaaaaatgaaggagcctggacccaactttgttactgtgagaaagggtcttcattcattcaagatggcatttgttaagcacctactacaaaccttggaaatcaagaaagttctggaatgatgaagctgttcatgccaagaccgaaagtgctggcccagtatgagtccattcagttcatgccgtgacaattttcttggaactcctttttattgttagttctcacttgtttccatatttagtgaatgtacatttaattgcaaagctgtcattaataaaaattcttatagtacctcactgcacaaa

SEQ ID NO: 12265 - protein, 37 aa, Homo sapiens; identical to SEQ ID NO: 2059

SEQ ID NO: 12266 - DNA, 543 bp, Homo sapiens
accccaccctaatcttgttatgcaaataggcttcccacttggcaggggccgtcttgtccactcgtttctgtaaacatgggtggcaaaaagagaagatggagctgccatttagaacatgcctaatcccagcttcatcttgctgagcaaaaatgaaggagcctggacccaactttgttactgtgagaaagggtcttcattcattcaagatggcatttgttaagcacctactgctggagtgcagtggttcaatcacggatcactgcagcctccacctcccagttcaagaaattctcatgtctcagcctcctgagcagctaggattacagacaaaccttggaaatcaagaaagttctggaatgatgaagctgttcatgccaagaccgaaagtgctggcccagtatgagtccattcagttcatgccgtgacaattttcttggaactcctttttattgttagttctcacttgtttccatatttagtgaatgtacatttaattgcaaagctgtcattaataaaaattcttatagtacctcactgcacaaa

SEQ ID NO: 12267 - protein, 91 aa, Homo sapiens; identical to SEQ ID NO: 2057

SEQ ID NO: 12268 - DNA, 603 bp, Homo sapiens
tcttgttatgcaaataggcttcccacttggcaggggccgtcttgtccactcgtttctgtaaacatgggtggcaaaaagagaagatggagctgccatttagaacatgcctaatcccagcttcatcttgctgagcaaaaatgaaggagcctggacccaactttgttactgtgagaaagggtcttcattcattcaagatggcatttgttaagcacctactgtgagtagatgatctcctgtcaaagacagttaacaaatcctcggaatattgcttcatgtacagttattggaggctggagtgcagtggttcaatcacggatcactgcagcctccacctcccagttcaagaaattctcatgtctcagcctcctgagcagctaggattacagacaaaccttggaaatcaagaaagttctggaatgatgaagctgttcatgccaagaccgaaagtgctggcccagtatgagtccattcagttcatgccgtgacaattttcttggaactcctttttattgttagttctcacttgtttccatatttagtgaatgtacatttaattgcaaagctgtcattaataaaaattcttatagtacctcactgcacaaa

SEQ ID NO: 12269 - protein, 70 aa, Homo sapiens
MYSYWRLECSGSITDHCSLHLPVQEILMSQPPEQLGLQTNLGNQESSGMMKLFMPRPKVLAQYESIQFMP

SEQ ID NO: 12270 - DNA, 760 bp, Homo sapiens
agttggaaatgatgtagaatctggggagagaccttttaaagaaaggtgatatcaaggcttgtttgtggactgagaatgatgtgtgatcttggaagtcagcttgagaatggagcagtcaagacacaaattggttggcaggtcatgatcagcatgagaggaatctctatcctgcttccaggctatccttggcactgtgatttttaataaaataatgcactgactttgcattcaaagaaattactggacagtcaaaatatacacacatatgcaaaaattgaggagcaatttcccataagatacaaaccttggaaatcaagaaagttctggaatgatgaagctgttcatgccaagaccgaaagtgctggcccagtatgagtccattcagttcatgccgtgacaattttcttggaactcctttttattgcttgtgctcctggtacatcagcccatttcatggtacgttgaagcatgcctccctgtgggattgctggattcccagcccagtgaggtaatgaccaagcagcgtcttcagaggaaggatagctgtacagcgtggtgaaggactcaatgagaaggtgcattgcccatccttcagagagctctgtgtgaatccataaaaggtgcttaaagcttttcactccatgaagcctcatctgtctcatgaaagcaataaatgcctggaggttcatccatcaagtgaggggccttaaccatgtttccaacaacagcctttccggccccatcttcctatgaaggagaa

SEQ ID NO: 12271 - protein, 46 aa, Homo sapiens
MSPFSSCRDNFLGTPFYCLCSWYISPFHGTLKHASLWDCWIPSPVR

SEQ ID NO: 12272 - DNA, 860 bp, Homo sapiens
ggcaaccaggatagaagatcagttgtgctgggggaggggagccagccaggttgtagaaacagcatccctgactttgttctgctaactgtgcagagagaggtgatagtctccgcccaggccatgagggacctggaaatggctgatgacacggtggagctcggccacaccaggcccagctggccccacagcaaaccagagggtccaaggaagctgggtcctgcccaccaaggtcccagggatcctcctctgaggccccctctctcctttgggtttagtcaacggagagggagatggggagaggactgaaaggtctccccaaaggtacaagctgagagacctggatttgcaatcagacagctcacatggacccaagttggggttaacatgcagattgtgcaggggttccctgcggatgcacccctgtgtgccctgatgtggacctgctccttcctgcttcctgggctccagacagaaacaccgtacccctgcaccagcctctgcctcagctcttcacagtcagcacaccctccgcttcctgtcagggtgttctctgctgagtctggttatgggatccctttctgtgcagagccatgctcccgtgtcactgtgtgtcaccttcaagctgtccccgtgtgtatgcctgtgtgagaatatgtgtgtgtgggtttgccatcgaaggaaaacctttattttggctgctaacatttggaaacatttagagaacaaacaatatcttttaaaaaacatcaaaggttcaaaaaaacaagacaagaaacaaactgttgtaaaatttcaactcctctaaatttgtcttaaattgaacttagaactaatctaataaaaatagtatgaagtttcaa

SEQ ID NO: 12273 - protein, 61 aa, Homo sapiens
MRDLEMADDTVELGHTRPSWPHSKPEGPRKLGPAHQGPRDPPLRPPLSFGFSQRRGRWGED

SEQ ID NO: 12274 - DNA, 2427 bp, Homo sapiens
tgatgggcatttgggttgcatccactttttggctgttctgaagagtgttactgtgaacattcatgcacaaatttttatgtggaggcagtagcagaatcccatggtagccaggtgggtgaaggggagcgaggacgttctacctgccttgaagaagacacctgacctgcggagtgagtgaccagtgtttccagagcctggcaatggatgccattcacatcggcatgtccagcacccccctggtgaagcacactgctggggctgggctcaaggccaacagaccccgcgtcatgtccaagagtgggcacagcaacgtgagaattgacaaagtggatggcatatacctactctacctgcaagacctgtggaccacagttatcgacatgaagtggagatacaaactcaccctgttcgctgccacttttgtgatgacctggttcctttttggagtcatctactatgccatcgcgtttattcatggggacttagaacccggtgagcccatttcaaatcataccccctgcatcatgaaagtggactctctcactggggcgtttctcttttccctggaatcccagacaaccattggctatggagtccgttccatcacagaggaatgtcctcatgccatcttcctgttggttgctcagttggtcatcacgaccttgattgagatcttcatcaccggaaccttcctggccaaaatcgccagacccaaaaagcgggctgagaccatcaagttcagccactgtgcagtcatcaccaagcagaatgggaagctgtgcttggtgattcaggtagccaatatgaggaagagcctcttgattcagtgccagctctctggcaagctcctgcagacccacgtcaccaaggagggggagcggattctcctcaaccaagccactgtcaaattccacgtggactcctcctctgagagccccttcctcattctgcccatgacattctaccatgtgctggatgagacgagccccctgagagacctcacaccccaaaacctaaaggagaaggagtttgagcttgtggtcctcctcaatgccactgtggaatccaccagcgctgtctgccagagccgaacatcttatatcccagaggaaatctactggggttttgagtttgtgcctgtggtatctctctccaaaaatggaaaatatgtggctgatttcagtcagtttgaacagattcggaaaagcccagattgcacattttactgtgcagattctgagaaacagcaactcgaggagaagtacaggcaggaggatcagagggaaagagaactgaggacacttttattacaacagagcaatgtctgatcacaggggcgccatccaggtttaaccctgcaagctgtttccacatcagaactcccttcaaacacaaagattgctgtgaaaacgaaaatgtgtagacgcactctcaaaaactgcacggacatacaaaatcaatcttttcctttgatcttgtggctaaaccagcatttctgtgtttgagagatttcctgttaggtgcttcgtctgaaagtgaactctcataattcaaattgtataaaataaagctacatttctaagagcttggtgtagggcaattggaataatgtcctgttagataaacagacatttagcaatcctgacattaaaaggaaatgtatttctatacaagattattagctgtaatacaagatatttatttaaccaatgaccttatggctgagagttgaattgtggttcagtattcattgatctcactgctttaaaacatgctctttttgttcaagcaggaaaaatattatatctaattatgtctatgtggtaatacctaaaaagaggtagagagactctatgttcacaaaatatagtaatttcatttttacctttcttcagtggactgaattgtatggaaggaaattgatcagatctgtaattcacaactgtggaaacctacacaaatggggctgatgccattgtttcctctattttattttatttatttttgaatccactatctctttccattcaaaatatttccattcaaaatgtggttcacagacccgccacatcagcaccatccgagagcttattagtaatgtgtagattctcatgtcccagccagacttacagaattggggtctgtatcttaacaagaaccccagatgatttgtgtacaaatgaaagttcgaaagctgtgctctggacagtgttctcaaagcaactttctgaagccgtgtggaaaactgactctgtgtgggtcccgtatccctgtggcatccagacctggcctctcttcatttcattattattggccaatatttctttcagccatttcatttcttatctattaaaatggcttgcccataaaggaactgcataggattatcccctgacattccaagagcaaaataaagctcttgagagt

SEQ ID NO: 12275 - protein, 375 aa, Homo sapiens; identical to SEQ ID NO: 2067

SEQ ID NO: 12276 - DNA, 762 bp, Homo sapiens
ggttgcatccactttttggctgttctgaagagtgttactgtgaacattcatgcacaaatttttatgtggaggtttgcagtttctccaagtgcaaaacatccaagccaccctccctctgcagtggagtattgattttgttctagatttctcagcaaaggttgggatattagagttcaaaacacaagtgggcagggtgagcccacagtctctgtgacggggcctgctggacactcccagtctgccggcgaatggcagaggcctgggacagcacggtggaattttcatctcgtgcaaatgaacttggcctcttagatccaggtcctctgctaccaacagtgaatttgttacagtgtgaaatgctgaggcaactacctaaataaatctgggcaaaatatactatcgaagcaatctgggatttccacccttcatgaattatctcacattttagtctaaattgtttaagaatgacttgctcacggctgggcatggaggctcatgcctgtaatcatagcactttgggaggccaaggagggcggattgcttgagctcaggagtttgagaccagtctgggcaacatggtgaaaccccgtctctactaaaatacaaaaaaaattagctggacattgtgatgggcacctgtaatcccagctacttggaagactgaggcaggagaatcgcttgaaccagggaggtggaagttgcagtgagccaagattatgccactgcccttcagcctgggtgacagagcaagactccatctaa

SEQ ID NO: 12277 - protein, 54 aa, Homo sapiens
MHKFLCGGLQFLQVQNIQATLPLQWSIDFVLDFSAKVGILEFKTQVGRVSPQSL

SEQ ID NO: 12278 - DNA, 1221 bp, Homo sapiens
atggcatctatcatacctcctatcaagtcttggtggacagaaatcacaggacaagacctagagcctctggtgtgtgatgccctcagaaccgtctactacctggtcactcactccgcaggtcaggtgtcttcttcaaggcaggagcacatgcaccatgacctttggccttggccttgggccattttcctccctacactacgcagcagtgaaggatccgctttaaaggctggtctgactgtacaaagtccagcttttaactcatccataccagccaagggcacagatagctttgccaagtggcctcagaaacagacatgttcattgaaaacaagcaaggtggacaaagtggattctcagcagattccagagggcaatccttcgaacatcaacccttctgtactcgacaaagacaagtttaaacagattccgggcccaacaggggactcatttgccattttccatggcaaagaatctgagcactggaataagccagagcgtggcttggacatgcattgttgtgagatgactggcaaaacaggaacactgatgtctggaagtgagtgtggaggggctacaagcatcctaaggggccttaccttgagtccaggtgctggggcccaatctcagctgaagatcccagagatctggggaagtgatgaagagatctggggaactgactcagcagggggaagcctgtgtacaacccacacctgcaggctacgtgctcctgtgctggctgagccgaggacattcctcctagagtttaaaacattacagtctccagagcccagcgccaattccgtgtcagcccacaacccgctctggttgcacagcttcacgagtcacaaggactggatggacaagtgtgtgtgcctagtgactgccttctcccagcacatgcaccatgtcccggtggcattgccggagatggtccgtgccctctcagcccagcagcagaccctcaggcagatcaccatctgtggagaccgccaggccaaggacaccaaagttctggtgcagtgcgtccaccctgtctacattcctaacatggtgctgattctggctgatggggacccctcgagtttcctgtcccactggctgcctttcctgagtaccctccgaaggcaggaagaccaggccactgcgtatgtgtgtgagaatcaagcctgctcaatgctcatcatggatccctgtgaattacgaaaactgctacatccgtga

SEQ ID NO: 12279 - protein, 406 aa, Homo sapiens
MASIIPPIKSWWTEITGQDLEPLVCDALRTVYYLVTHSAGQVSSSRQEHMHHDLWPWPWAIFLPTLRSSEGSALKAGLTVQSPAFNSSIPAKGTDSFAKWPQKQTCSLKTSKVDKVDSQQIPEGNPSNINPSVLDKDKFKQIPGPTGDSFAIFHGKESEHWNKPERGLDMHCCEMTGKTGTLMSGSECGGATSILRGLTLSPGAGAQSQLKIPEIWGSDEEIWGTDSAGGSLCTTHTCRLRAPVLAEPRTFLLEFKTLQSPEPSANSVSAHNPLWLHSFTSHKDWMDKCVCLVTAFSQHMHHVPVALPEMVRALSAQQQTLRQITICGDRQAKDTKVLVQCVHPVYIPNMVLILADGDPSSFLSHWLPFLSTLRRQEDQATAYVCENQACSMLIMDPCELRKLLHP

SEQ ID NO: 12280 - DNA, 2530 bp, Homo sapiens
aggtgtttggagagcccggactggatgcccactagaatcctgtgctgtgaacagtgagagagttttcttcattttgaggaaccctaaacacctatctttcccaaggcaacctgtctggactgagcatttctctgacttgacataacttcccatccagccaggagtctgcactcttcagtctttgcaggcagtagcagaatcccatggtagccaggtgggtgaaggggagcgaggacgttctacctgccttgaagaagacacctgacctgcggagtgagtgaccagtgtttccagagcctggcaatggatgccattcacatcggcatgtccagcacccccctggtgaagcacactgctggggctgggctcaaggccaacagaccccgcgtcatgtccaagagtgggcacagcaacgtgagaattgacaaagtggatggcatatacctactctacctgcaagacctgtggaccacagttatcgacatgaagtggagatacaaactcaccctgttcgctgccacttttgtgatgacctggttcctttttggagtcatctactatgccatcgcgtttattcatggggacttagaacccggtgagcccatttcaaatcataccccctgcatcatgaaagtggactctctcactggggcgtttctcttttccctggaatcccagacaaccattggctatggagtccgttccatcacagaggaatgtcctcatgccatcttcctgttggttgctcagttggtcatcacgaccttgattgagatcttcatcaccggaaccttcctggccaaaatcgccagacccaaaaagcgggctgagaccatcaagttcagccactgtgcagtcatcaccaagcagaatgggaagctgtgcttggtgattcaggtagccaatatgaggaagagcctcttgattcagtgccagctctctggcaagctcctgcagacccacgtcaccaaggagggggagcggattctcctcaaccaagccactgtcaaattccacgtggactcctcctctgagagccccttcctcattctgcccatgacattctaccatgtgctggatgagacgagccccctgagagacctcacaccccaaaacctaaaggagaaggagtttgagcttgtggtcctcctcaatgccactgtggaatccaccagcgctgtctgccagagccgaacatcttatatcccagaggaaatctactggggttttgagtttgtgcctgtggtatctctctccaaaaatggaaaatatgtggctgatttcagtcagtttgaacagattcggaaaagcccagattgcacattttactgtgcagattctgagaaacagcaactcgaggagaagtacaggcaggaggatcagagggaaagagaactgaggacacttttattacaacagagcaatgtctgatcacaggggcgccatccaggtttaaccctgcaagctgtttccacatcagaactcccttcaaacacaaagattgctgtgaaaacgaaaatgtgtagacgcactctcaaaaactgcacggacatacaaaatcaatcttttcctttgatcttgtggctaaaccagcatttctgtgtttgagagatttcctgttaggtgcttcgtctgaaagtgaactctcataattcaaattgtataaaataaagctacatttctaagagcttggtgtagggcaattggaataatgtcctgttagataaacagacatttagcaatcctgacattaaaaggaaatgtatttctatacaagattattagctgtaatacaagatatttatttaaccaatgaccttatggctgagagttgaattgtggttcagtattcattgatctcactgctttaaaacatgctctttttgttcaagcaggaaaaatattatatctaattatgtctatgtggtaatacctaaaaagaggtagagagactctatgttcacaaaatatagtaatttcatttttacctttcttcagtggactgaattgtatggaaggaaattgatcagatctgtaattcacaactgtggaaacctacacaaatggggctgatgccattgtttcctctattttattttatttatttttgaatccactatctctttccattcaaaatatttccattcaaaatgtggttcacagacccgccacatcagcaccatccgagagcttattagtaatgtgtagattctcatgtcccagccagacttacagaattggggtctgtatcttaacaagaaccccagatgatttgtgtacaaatgaaagttcgaaagctgtgctctggacagtgttctcaaagcaactttctgaagccgtgtggaaaactgactctgtgtgggtcccgtatccctgtggcatccagacctggcctctcttcatttcattattattggccaatatttctttcagccatttcatttcttatctattaaaatggcttgcccataaaggaactgcataggattatcccctgacattccaagagcaaaataaagctcttgagagt

SEQ ID NO: 12281 - protein, 375 aa, Homo sapiens; identical to SEQ ID NO: 2067

SEQ ID NO: 12282 - DNA, 4729 bp, Homo sapiens
aggtgtttggagagcccggactggatgcccactagaatcctgtgctgtgaacagtgagagagttttcttcattttgaggaaccctaaacacctatctttcccaaggcaacctgtctggactgagcatttctctgacttgacataacttcccatccagccaggagtctgcactcttcagtctttgcaggcagtagcagaatcccatggtagccaggtgggtgaaggggagcgaggacgttctacctgccttgaagaagacacctgacctgcggagtgagtgaccagtgtttccagagcctggcaatggatgccattcacatcggcatgtccagcacccccctggtgaagcacactgctggggctgggctcaaggccaacagaccccgcgtcatgtccaagagtgggcacagcaacgtgagaattgacaaagtggatggcatatacctactctacctgcaagacctgtggaccacagttatcgacatgaagtggagatacaaactcaccctgttcgctgccacttttgtgatgacctggttcctttttggagtcatctactatgccatcgcgtttattcatggggacttagaacccggtgagcccatttcaaatcataccccctgcatcatgaaagtggactctctcactggggcgtttctcttttccctggaatcccagacaaccattggctatggagtccgttccatcacagaggaatgtcctcatgccatcttcctgttggttgctcagttggtcatcacgaccttgattgagatcttcatcaccggaaccttcctggccaaaatcgccagacccaaaaagcgggctgagaccatcaagttcagccactgtgcagtcatcaccaagcagaatgggaagctgtgcttggtgattcaggtagccaatatgaggaagagcctcttgattcagtgccagctctctggcaagctcctgcagacccacgtcaccaaggagggggagcggattctcctcaaccaagccactgtcaaattccacgtggactcctcctctgagagccccttcctcattctgcccatgacattctaccatgtgctggatgagacgagccccctgagagacctcacaccccaaaacctaaaggagaaggagtttgagcttgtggtcctcctcaatgccactgtggaatccaccagcgctgtctgccagagccgaacatcttatatcccagaggaaatctactggggttttgagtttgtgcctgtggtatctctctccaaaaatggaaaatatgtggctgatttcagtcagtttgaacagattcggaaaagcccagattgcacattttactgtgcagattctgagaaacagcaactcgaggagaagtacaggcaggaggatcagagggaaagagaactgaggacacttttattacaacagagcaatgtctgatcacaggggcgccatccaggtttaaccctgcaagctgtttccacatcagaactcccttcaaacacaaagattgctgtgaaaacgaaaatgtgtagacgcactctcaaaaactgcacggacatacaaaatcaatcttttcctttgatcttgtggctaaaccagcatttctgtgtttgagagatttcctgttaggtgcttcgtctgaaagtgaactctcataattcaaattgtataaaataaagctacatttctaagagcttggtgtagggcaattggaataatgtcctgttagataaacagacatttagcaatcctgacattaaaaggaaatgtatttctatacaagattattagctgtaatacaagatatttatttaaccaatgaccttatggctgagagttgaattgtggttcagtattcattgatctcactgctttaaaacatgctctttttgttcaagcaggaaaaatattatatctaattatgtctatgtggtaatacctaaaaagaggtagagagactctatgttcacaaaatatagtaatttcatttttacctttcttcagtggactgaattgtatggaaggaaattgatcagatctgtaattcacaactgtggaaacctacacaaatggggctgatgccattgtttcctctattttattttatttatttttgaatccactatctctttccattcaaaatatttccattcaaaatgtggttcacagacccgccacatcagcaccatccgagagcttattagtaatgtgtagattctcatgtcccagccagacttacagaattggggtctgtatcttaacaagaaccccagatgatttgtgtacaaatgaaagttcgaaagctgtgctctggacagtgttctcaaagcaactttctgaagccgtgtggaaaactgactctgtgtgggtcccgtatccctgtggcatccagacctggcctctcttcatttcattattattggccaatatttctttcagccatttcatttcttatctattaaaatggcttgcccataaaggaactgcataggattatcccctgacattccaagagcaaaataaagctcttgagagtaattgttgtctcagtcatgcttgctgattacagttagcacaaaagaaaaattcagctgcctgacaatacaggaaatgttctcagatgctgatgtttgtaaggtccggtggggccatgaggaagaagaggagctgaaggtaagaaactcataaacaagatgactctttgatgcatgaacaagatttgaaaatctcaagcctgtaaagaatacccctgctatttaaataaagctcataccaagaggtaacattttgccccgggccaaattcaggggtctagtgccctgcattcctttgaggcaaaaaataaatgggctatgactggttaaatgtccaaaaggtgaattctcatttcattcaaacaaagacagatttgcgcattcactcaagcagaatgtggccatgaatattcagcccctgcatacatacaaagatgtacgcatgattccccccaccaagcacacacacagtcacacacgcacacacacacacatgcacacacgcgcgtgcacacacgcacacatgcacacacacatacgcacacgtaaacacatgcacacatgcacacacgcgcacacatgcacacacgcacacacttgcacaggccctggctcttcaagcataatcatggtagtcatcagtgaaagacatttgaggttaagacagcaagtccttgacaaatatgttcatgtctatttggttctagttctataaaaatatgaacattgggactcagagaaaatggggaaaataaagtggattcaggttatcagtgaaatgatggtatagattacagcaaatctggatatatattgatgttactgcatttgcaaatgtcctcccattaaacagaaaatgtggctaaaatccctggcctggaactgaactagtttaaggcaggtgtaagaatagtgggaggaaagtttgtgaaagtttaaagaatgccctcaatccatgaacgagagggaggatgttgtctttaattatttagaaggtttttttttccttgtctgttgataattttatggaaggttgctttagatctccattccttaaaaaaatattacatgtcagtgtagttagatattatctcttttagttattatacttgctatttttactgtatagtgtggtataatcaacaaaaaataatgccacgggcatgtttacaccttttctgttgcactattaaattcttttcacagtattcatatcaatgctaatttgaatgtgatgccaattaaaaatcttgttcatttatattgtatatggtacaaggacgtagcataagatccaaaaaaaattttgtattgtcatttagcatatcaatttcagccaaatttggaagacttgatcatcttatcttttgctctacacactcaaaacaaatattgcagcagaaatatcaccttaaaaatatcttattttatatttagataatattgaaatcacagtctattaaaattggaaatttaattcaaataaaaatcaaacaaaatagttgtttcaatttatctaaatatctggtcttaagagtgccttaagagtgtctcgtttttaagagtgtcttaaaaaccaatatatgtataagtcaacaaatcatataatattcaataaatagctctgaagttgtatctgatttgaaacttaccattttcctggaaccttaactattattactttgtacgtaatactttcatgttactatgctaacaaaggatttaggtagccaacttaatttattatatctggtcggtcttctgcttgaaacagattcacactcaacacccaactaaggaggagccaaagtagtggagtattcctgacccaaaaaggcttttgaattttgaaacatttctaatgtgttaggttttctcaatgagaccattaaaaaacgttgtgttccatttgagaaaccagagtcaacagcagtaaatcagtgtgccccacaagccacgtcttattcagcaataaaatagtgctcacatggtgcctggcagacagtggctctggacagcaaagcactgagtcacccaaccccactcctttgggatggggttgggagtcatgcattggctccctttttcatcctggggaaattacaacacaacgcagagtgtccagaaatctaaagagctggtttaaggtgaaaaaaatgccatgaatgaatgaaccagatgtttaataaatcaaaacaact

SEQ ID NO: 12283 - protein, 375 aa, Homo sapiens; identical to SEQ ID NO: 2067

SEQ ID NO: 12284 - DNA, 2581 bp, Homo sapiens
ctcctctgcccaatgtctcccaatctctttcctttctctcttcagttcctccaggtaattcttactcaaacttgtaccaacttgtttttgactgacagtgaacagtgagagagttttcttcattttgaggaaccctaaacacctatctttcccaaggcaacctgtctggactgagcatttctctgacttgacataacttcccatccagccaggagtctgcactcttcagtctttgcaggcagtagcagaatcccatggtagccaggtgggtgaaggggagcgaggacgttctacctgccttgaagaagacacctgacctgcggagtgagtgaccagtgtttccagagcctggcaatggatgccattcacatcggcatgtccagcacccccctggtgaagcacactgctggggctgggctcaaggccaacagaccccgcgtcatgtccaagagtgggcacagcaacgtgagaattgacaaagtggatggcatatacctactctacctgcaagacctgtggaccacagttatcgacatgaagtggagatacaaactcaccctgttcgctgccacttttgtgatgacctggttcctttttggagtcatctactatgccatcgcgtttattcatggggacttagaacccggtgagcccatttcaaatcataccccctgcatcatgaaagtggactctctcactggggcgtttctcttttccctggaatcccagacaaccattggctatggagtccgttccatcacagaggaatgtcctcatgccatcttcctgttggttgctcagttggtcatcacgaccttgattgagatcttcatcaccggaaccttcctggccaaaatcgccagacccaaaaagcgggctgagaccatcaagttcagccactgtgcagtcatcaccaagcagaatgggaagctgtgcttggtgattcaggtagccaatatgaggaagagcctcttgattcagtgccagctctctggcaagctcctgcagacccacgtcaccaaggagggggagcggattctcctcaaccaagccactgtcaaattccacgtggactcctcctctgagagccccttcctcattctgcccatgacattctaccatgtgctggatgagacgagccccctgagagacctcacaccccaaaacctaaaggagaaggagtttgagcttgtggtcctcctcaatgccactgtggaatccaccagcgctgtctgccagagccgaacatcttatatcccagaggaaatctactggggttttgagtttgtgcctgtggtatctctctccaaaaatggaaaatatgtggctgatttcagtcagtttgaacagattcggaaaagcccagattgcacattttactgtgcagattctgagaaacagcaactcgaggagaagtacaggcaggaggatcagagggaaagagaactgaggacacttttattacaacagagcaatgtctgatcacaggggcgccatccaggtttaaccctgcaagctgtttccacatcagaactcccttcaaacacaaagattgctgtgaaaacgaaaatgtgtagacgcactctcaaaaactgcacggacatacaaaatcaatcttttcctttgatcttgtggctaaaccagcatttctgtgtttgagagatttcctgttaggtgcttcgtctgaaagtgaactctcataattcaaattgtataaaataaagctacatttctaagagcttggtgtagggcaattggaataatgtcctgttagataaacagacatttagcaatcctgacattaaaaggaaatgtatttctatacaagattattagctgtaatacaagatatttatttaaccaatgaccttatggctgagagttgaattgtggttcagtattcattgatctcactgctttaaaacatgctctttttgttcaagcaggaaaaatattatatctaattatgtctatgtggtaatacctaaaaagaggtagagagactctatgttcacaaaatatagtaatttcatttttacctttcttcagtggactgaattgtatggaaggaaattgatcagatctgtaattcacaactgtggaaacctacacaaatggggctgatgccattgtttcctctattttattttatttatttttgaatccactatctctttccattcaaaatatttccattcaaaatgtggttcacagacccgccacatcagcaccatccgagagcttattagtaatgtgtagattctcatgtcccagccagacttacagaattggggtctgtatcttaacaagaaccccagatgatttgtgtacaaatgaaagttcgaaagctgtgctctggacagtgttctcaaagcaactttctgaagccgtgtggaaaactgactctgtgtgggtcccgtatccctgtggcatccagacctggcctctcttcatttcattattattggccaatatttctttcagccatttcatttcttatctattaaaatggcttgcccataaaggaactgcataggattatcccctgacattccaagagcaaaataaagctcttgagagt

SEQ ID NO: 12285 - protein, 375 aa, Homo sapiens; identical to SEQ ID NO: 2067

SEQ ID NO: 12286 - DNA, 4780 bp, Homo sapiens
ctcctctgcccaatgtctcccaatctctttcctttctctcttcagttcctccaggtaattcttactcaaacttgtaccaacttgtttttgactgacagtgaacagtgagagagttttcttcattttgaggaaccctaaacacctatctttcccaaggcaacctgtctggactgagcatttctctgacttgacataacttcccatccagccaggagtctgcactcttcagtctttgcaggcagtagcagaatcccatggtagccaggtgggtgaaggggagcgaggacgttctacctgccttgaagaagacacctgacctgcggagtgagtgaccagtgtttccagagcctggcaatggatgccattcacatcggcatgtccagcacccccctggtgaagcacactgctggggctgggctcaaggccaacagaccccgcgtcatgtccaagagtgggcacagcaacgtgagaattgacaaagtggatggcatatacctactctacctgcaagacctgtggaccacagttatcgacatgaagtggagatacaaactcaccctgttcgctgccacttttgtgatgacctggttcctttttggagtcatctactatgccatcgcgtttattcatggggacttagaacccggtgagcccatttcaaatcataccccctgcatcatgaaagtggactctctcactggggcgtttctcttttccctggaatcccagacaaccattggctatggagtccgttccatcacagaggaatgtcctcatgccatcttcctgttggttgctcagttggtcatcacgaccttgattgagatcttcatcaccggaaccttcctggccaaaatcgccagacccaaaaagcgggctgagaccatcaagttcagccactgtgcagtcatcaccaagcagaatgggaagctgtgcttggtgattcaggtagccaatatgaggaagagcctcttgattcagtgccagctctctggcaagctcctgcagacccacgtcaccaaggagggggagcggattctcctcaaccaagccactgtcaaattccacgtggactcctcctctgagagccccttcctcattctgcccatgacattctaccatgtgctggatgagacgagccccctgagagacctcacaccccaaaacctaaaggagaaggagtttgagcttgtggtcctcctcaatgccactgtggaatccaccagcgctgtctgccagagccgaacatcttatatcccagaggaaatctactggggttttgagtttgtgcctgtggtatctctctccaaaaatggaaaatatgtggctgatttcagtcagtttgaacagattcggaaaagcccagattgcacattttactgtgcagattctgagaaacagcaactcgaggagaagtacaggcaggaggatcagagggaaagagaactgaggacacttttattacaacagagcaatgtctgatcacaggggcgccatccaggtttaaccctgcaagctgtttccacatcagaactcccttcaaacacaaagattgctgtgaaaacgaaaatgtgtagacgcactctcaaaaactgcacggacatacaaaatcaatcttttcctttgatcttgtggctaaaccagcatttctgtgtttgagagatttcctgttaggtgcttcgtctgaaagtgaactctcataattcaaattgtataaaataaagctacatttctaagagcttggtgtagggcaattggaataatgtcctgttagataaacagacatttagcaatcctgacattaaaaggaaatgtatttctatacaagattattagctgtaatacaagatatttatttaaccaatgaccttatggctgagagttgaattgtggttcagtattcattgatctcactgctttaaaacatgctctttttgttcaagcaggaaaaatattatatctaattatgtctatgtggtaatacctaaaaagaggtagagagactctatgttcacaaaatatagtaatttcatttttacctttcttcagtggactgaattgtatggaaggaaattgatcagatctgtaattcacaactgtggaaacctacacaaatggggctgatgccattgtttcctctattttattttatttatttttgaatccactatctctttccattcaaaatatttccattcaaaatgtggttcacagacccgccacatcagcaccatccgagagcttattagtaatgtgtagattctcatgtcccagccagacttacagaattggggtctgtatcttaacaagaaccccagatgatttgtgtacaaatgaaagttcgaaagctgtgctctggacagtgttctcaaagcaactttctgaagccgtgtggaaaactgactctgtgtgggtcccgtatccctgtggcatccagacctggcctctcttcatttcattattattggccaatatttctttcagccatttcatttcttatctattaaaatggcttgcccataaaggaactgcataggattatcccctgacattccaagagcaaaataaagctcttgagagtaattgttgtctcagtcatgcttgctgattacagttagcacaaaagaaaaattcagctgcctgacaatacaggaaatgttctcagatgctgatgtttgtaaggtccggtggggccatgaggaagaagaggagctgaaggtaagaaactcataaacaagatgactctttgatgcatgaacaagatttgaaaatctcaagcctgtaaagaatacccctgctatttaaataaagctcataccaagaggtaacattttgccccgggccaaattcaggggtctagtgccctgcattcctttgaggcaaaaaataaatgggctatgactggttaaatgtccaaaaggtgaattctcatttcattcaaacaaagacagatttgcgcattcactcaagcagaatgtggccatgaatattcagcccctgcatacatacaaagatgtacgcatgattccccccaccaagcacacacacagtcacacacgcacacacacacacatgcacacacgcgcgtgcacacacgcacacatgcacacacacatacgcacacgtaaacacatgcacacatgcacacacgcgcacacatgcacacacgcacacacttgcacaggccctggctcttcaagcataatcatggtagtcatcagtgaaagacatttgaggttaagacagcaagtccttgacaaatatgttcatgtctatttggttctagttctataaaaatatgaacattgggactcagagaaaatggggaaaataaagtggattcaggttatcagtgaaatgatggtatagattacagcaaatctggatatatattgatgttactgcatttgcaaatgtcctcccattaaacagaaaatgtggctaaaatccctggcctggaactgaactagtttaaggcaggtgtaagaatagtgggaggaaagtttgtgaaagtttaaagaatgccctcaatccatgaacgagagggaggatgttgtctttaattatttagaaggtttttttttccttgtctgttgataattttatggaaggttgctttagatctccattccttaaaaaaatattacatgtcagtgtagttagatattatctcttttagttattatacttgctatttttactgtatagtgtggtataatcaacaaaaaataatgccacgggcatgtttacaccttttctgttgcactattaaattcttttcacagtattcatatcaatgctaatttgaatgtgatgccaattaaaaatcttgttcatttatattgtatatggtacaaggacgtagcataagatccaaaaaaaattttgtattgtcatttagcatatcaatttcagccaaatttggaagacttgatcatcttatcttttgctctacacactcaaaacaaatattgcagcagaaatatcaccttaaaaatatcttattttatatttagataatattgaaatcacagtctattaaaattggaaatttaattcaaataaaaatcaaacaaaatagttgtttcaatttatctaaatatctggtcttaagagtgccttaagagtgtctcgtttttaagagtgtcttaaaaaccaatatatgtataagtcaacaaatcatataatattcaataaatagctctgaagttgtatctgatttgaaacttaccattttcctggaaccttaactattattactttgtacgtaatactttcatgttactatgctaacaaaggatttaggtagccaacttaatttattatatctggtcggtcttctgcttgaaacagattcacactcaacacccaactaaggaggagccaaagtagtggagtattcctgacccaaaaaggcttttgaattttgaaacatttctaatgtgttaggttttctcaatgagaccattaaaaaacgttgtgttccatttgagaaaccagagtcaacagcagtaaatcagtgtgccccacaagccacgtcttattcagcaataaaatagtgctcacatggtgcctggcagacagtggctctggacagcaaagcactgagtcacccaaccccactcctttgggatggggttgggagtcatgcattggctccctttttcatcctggggaaattacaacacaacgcagagtgtccagaaatctaaagagctggtttaaggtgaaaaaaatgccatgaatgaatgaaccagatgtttaataaatcaaaacaact

SEQ ID NO: 12287 - protein, 375 aa, Homo sapiens; identical to SEQ ID NO: 2067

SEQ ID NO: 12288 - DNA, 2563 bp, Homo sapiens
ggcggtgggaccgaggctctgcctgaatgctcagcttctgcaagctggggtggagagtgtgttcctgcctaccggctcagccagcacaggagcacgtagcctgcaggtgtgggttgtacacaggcttccccctgctgagtcagttccccagatctcttcatcacttccccagatctctgggatcttcagctgagattgggccccagcacctggactcaaggcagtagcagaatcccatggtagccaggtgggtgaaggggagcgaggacgttctacctgccttgaagaagacacctgacctgcggagtgagtgaccagtgtttccagagcctggcaatggatgccattcacatcggcatgtccagcacccccctggtgaagcacactgctggggctgggctcaaggccaacagaccccgcgtcatgtccaagagtgggcacagcaacgtgagaattgacaaagtggatggcatatacctactctacctgcaagacctgtggaccacagttatcgacatgaagtggagatacaaactcaccctgttcgctgccacttttgtgatgacctggttcctttttggagtcatctactatgccatcgcgtttattcatggggacttagaacccggtgagcccatttcaaatcataccccctgcatcatgaaagtggactctctcactggggcgtttctcttttccctggaatcccagacaaccattggctatggagtccgttccatcacagaggaatgtcctcatgccatcttcctgttggttgctcagttggtcatcacgaccttgattgagatcttcatcaccggaaccttcctggccaaaatcgccagacccaaaaagcgggctgagaccatcaagttcagccactgtgcagtcatcaccaagcagaatgggaagctgtgcttggtgattcaggtagccaatatgaggaagagcctcttgattcagtgccagctctctggcaagctcctgcagacccacgtcaccaaggagggggagcggattctcctcaaccaagccactgtcaaattccacgtggactcctcctctgagagccccttcctcattctgcccatgacattctaccatgtgctggatgagacgagccccctgagagacctcacaccccaaaacctaaaggagaaggagtttgagcttgtggtcctcctcaatgccactgtggaatccaccagcgctgtctgccagagccgaacatcttatatcccagaggaaatctactggggttttgagtttgtgcctgtggtatctctctccaaaaatggaaaatatgtggctgatttcagtcagtttgaacagattcggaaaagcccagattgcacattttactgtgcagattctgagaaacagcaactcgaggagaagtacaggcaggaggatcagagggaaagagaactgaggacacttttattacaacagagcaatgtctgatcacaggggcgccatccaggtttaaccctgcaagctgtttccacatcagaactcccttcaaacacaaagattgctgtgaaaacgaaaatgtgtagacgcactctcaaaaactgcacggacatacaaaatcaatcttttcctttgatcttgtggctaaaccagcatttctgtgtttgagagatttcctgttaggtgcttcgtctgaaagtgaactctcataattcaaattgtataaaataaagctacatttctaagagcttggtgtagggcaattggaataatgtcctgttagataaacagacatttagcaatcctgacattaaaaggaaatgtatttctatacaagattattagctgtaatacaagatatttatttaaccaatgaccttatggctgagagttgaattgtggttcagtattcattgatctcactgctttaaaacatgctctttttgttcaagcaggaaaaatattatatctaattatgtctatgtggtaatacctaaaaagaggtagagagactctatgttcacaaaatatagtaatttcatttttacctttcttcagtggactgaattgtatggaaggaaattgatcagatctgtaattcacaactgtggaaacctacacaaatggggctgatgccattgtttcctctattttattttatttatttttgaatccactatctctttccattcaaaatatttccattcaaaatgtggttcacagacccgccacatcagcaccatccgagagcttattagtaatgtgtagattctcatgtcccagccagacttacagaattggggtctgtatcttaacaagaaccccagatgatttgtgtacaaatgaaagttcgaaagctgtgctctggacagtgttctcaaagcaactttctgaagccgtgtggaaaactgactctgtgtgggtcccgtatccctgtggcatccagacctggcctctcttcatttcattattattggccaatatttctttcagccatttcatttcttatctattaaaatggcttgcccataaaggaactgcataggattatcccctgacattccaagagcaaaataaagctcttgagagt

SEQ ID NO: 12289 - protein, 66 aa, Homo sapiens
MLSFCKLGWRVCSCLPAQPAQEHVACRCGLYTGFPLLSQFPRSLHHFPRSLGSSAEIGPQHLDSRQ

SEQ ID NO: 12290 - DNA, 4762 bp, Homo sapiens
ggcggtgggaccgaggctctgcctgaatgctcagcttctgcaagctggggtggagagtgtgttcctgcctaccggctcagccagcacaggagcacgtagcctgcaggtgtgggttgtacacaggcttccccctgctgagtcagttccccagatctcttcatcacttccccagatctctgggatcttcagctgagattgggccccagcacctggactcaaggcagtagcagaatcccatggtagccaggtgggtgaaggggagcgaggacgttctacctgccttgaagaagacacctgacctgcggagtgagtgaccagtgtttccagagcctggcaatggatgccattcacatcggcatgtccagcacccccctggtgaagcacactgctggggctgggctcaaggccaacagaccccgcgtcatgtccaagagtgggcacagcaacgtgagaattgacaaagtggatggcatatacctactctacctgcaagacctgtggaccacagttatcgacatgaagtggagatacaaactcaccctgttcgctgccacttttgtgatgacctggttcctttttggagtcatctactatgccatcgcgtttattcatggggacttagaacccggtgagcccatttcaaatcataccccctgcatcatgaaagtggactctctcactggggcgtttctcttttccctggaatcccagacaaccattggctatggagtccgttccatcacagaggaatgtcctcatgccatcttcctgttggttgctcagttggtcatcacgaccttgattgagatcttcatcaccggaaccttcctggccaaaatcgccagacccaaaaagcgggctgagaccatcaagttcagccactgtgcagtcatcaccaagcagaatgggaagctgtgcttggtgattcaggtagccaatatgaggaagagcctcttgattcagtgccagctctctggcaagctcctgcagacccacgtcaccaaggagggggagcggattctcctcaaccaagccactgtcaaattccacgtggactcctcctctgagagccccttcctcattctgcccatgacattctaccatgtgctggatgagacgagccccctgagagacctcacaccccaaaacctaaaggagaaggagtttgagcttgtggtcctcctcaatgccactgtggaatccaccagcgctgtctgccagagccgaacatcttatatcccagaggaaatctactggggttttgagtttgtgcctgtggtatctctctccaaaaatggaaaatatgtggctgatttcagtcagtttgaacagattcggaaaagcccagattgcacattttactgtgcagattctgagaaacagcaactcgaggagaagtacaggcaggaggatcagagggaaagagaactgaggacacttttattacaacagagcaatgtctgatcacaggggcgccatccaggtttaaccctgcaagctgtttccacatcagaactcccttcaaacacaaagattgctgtgaaaacgaaaatgtgtagacgcactctcaaaaactgcacggacatacaaaatcaatcttttcctttgatcttgtggctaaaccagcatttctgtgtttgagagatttcctgttaggtgcttcgtctgaaagtgaactctcataattcaaattgtataaaataaagctacatttctaagagcttggtgtagggcaattggaataatgtcctgttagataaacagacatttagcaatcctgacattaaaaggaaatgtatttctatacaagattattagctgtaatacaagatatttatttaaccaatgaccttatggctgagagttgaattgtggttcagtattcattgatctcactgctttaaaacatgctctttttgttcaagcaggaaaaatattatatctaattatgtctatgtggtaatacctaaaaagaggtagagagactctatgttcacaaaatatagtaatttcatttttacctttcttcagtggactgaattgtatggaaggaaattgatcagatctgtaattcacaactgtggaaacctacacaaatggggctgatgccattgtttcctctattttattttatttatttttgaatccactatctctttccattcaaaatatttccattcaaaatgtggttcacagacccgccacatcagcaccatccgagagcttattagtaatgtgtagattctcatgtcccagccagacttacagaattggggtctgtatcttaacaagaaccccagatgatttgtgtacaaatgaaagttcgaaagctgtgctctggacagtgttctcaaagcaactttctgaagccgtgtggaaaactgactctgtgtgggtcccgtatccctgtggcatccagacctggcctctcttcatttcattattattggccaatatttctttcagccatttcatttcttatctattaaaatggcttgcccataaaggaactgcataggattatcccctgacattccaagagcaaaataaagctcttgagagtaattgttgtctcagtcatgcttgctgattacagttagcacaaaagaaaaattcagctgcctgacaatacaggaaatgttctcagatgctgatgtttgtaaggtccggtggggccatgaggaagaagaggagctgaaggtaagaaactcataaacaagatgactctttgatgcatgaacaagatttgaaaatctcaagcctgtaaagaatacccctgctatttaaataaagctcataccaagaggtaacattttgccccgggccaaattcaggggtctagtgccctgcattcctttgaggcaaaaaataaatgggctatgactggttaaatgtccaaaaggtgaattctcatttcattcaaacaaagacagatttgcgcattcactcaagcagaatgtggccatgaatattcagcccctgcatacatacaaagatgtacgcatgattccccccaccaagcacacacacagtcacacacgcacacacacacacatgcacacacgcgcgtgcacacacgcacacatgcacacacacatacgcacacgtaaacacatgcacacatgcacacacgcgcacacatgcacacacgcacacacttgcacaggccctggctcttcaagcataatcatggtagtcatcagtgaaagacatttgaggttaagacagcaagtccttgacaaatatgttcatgtctatttggttctagttctataaaaatatgaacattgggactcagagaaaatggggaaaataaagtggattcaggttatcagtgaaatgatggtatagattacagcaaatctggatatatattgatgttactgcatttgcaaatgtcctcccattaaacagaaaatgtggctaaaatccctggcctggaactgaactagtttaaggcaggtgtaagaatagtgggaggaaagtttgtgaaagtttaaagaatgccctcaatccatgaacgagagggaggatgttgtctttaattatttagaaggtttttttttccttgtctgttgataattttatggaaggttgctttagatctccattccttaaaaaaatattacatgtcagtgtagttagatattatctcttttagttattatacttgctatttttactgtatagtgtggtataatcaacaaaaaataatgccacgggcatgtttacaccttttctgttgcactattaaattcttttcacagtattcatatcaatgctaatttgaatgtgatgccaattaaaaatcttgttcatttatattgtatatggtacaaggacgtagcataagatccaaaaaaaattttgtattgtcatttagcatatcaatttcagccaaatttggaagacttgatcatcttatcttttgctctacacactcaaaacaaatattgcagcagaaatatcaccttaaaaatatcttattttatatttagataatattgaaatcacagtctattaaaattggaaatttaattcaaataaaaatcaaacaaaatagttgtttcaatttatctaaatatctggtcttaagagtgccttaagagtgtctcgtttttaagagtgtcttaaaaaccaatatatgtataagtcaacaaatcatataatattcaataaatagctctgaagttgtatctgatttgaaacttaccattttcctggaaccttaactattattactttgtacgtaatactttcatgttactatgctaacaaaggatttaggtagccaacttaatttattatatctggtcggtcttctgcttgaaacagattcacactcaacacccaactaaggaggagccaaagtagtggagtattcctgacccaaaaaggcttttgaattttgaaacatttctaatgtgttaggttttctcaatgagaccattaaaaaacgttgtgttccatttgagaaaccagagtcaacagcagtaaatcagtgtgccccacaagccacgtcttattcagcaataaaatagtgctcacatggtgcctggcagacagtggctctggacagcaaagcactgagtcacccaaccccactcctttgggatggggttgggagtcatgcattggctccctttttcatcctggggaaattacaacacaacgcagagtgtccagaaatctaaagagctggtttaaggtgaaaaaaatgccatgaatgaatgaaccagatgtttaataaatcaaaacaact

SEQ ID NO: 12291 - protein, 66 aa, Homo sapiens; identical to SEQ ID NO: 12289

SEQ ID NO: 12292 - DNA, 2422 bp, Homo sapiens
aaaatattctagactcttcccttccagcgctcactgtttacttcctctgcacttccccttcctgcctccccgtgtgccggcagtagcagaatcccatggtagccaggtgggtgaaggggagcgaggacgttctacctgccttgaagaagacacctgacctgcggagtgagtgaccagtgtttccagagcctggcaatggatgccattcacatcggcatgtccagcacccccctggtgaagcacactgctggggctgggctcaaggccaacagaccccgcgtcatgtccaagagtgggcacagcaacgtgagaattgacaaagtggatggcatatacctactctacctgcaagacctgtggaccacagttatcgacatgaagtggagatacaaactcaccctgttcgctgccacttttgtgatgacctggttcctttttggagtcatctactatgccatcgcgtttattcatggggacttagaacccggtgagcccatttcaaatcataccccctgcatcatgaaagtggactctctcactggggcgtttctcttttccctggaatcccagacaaccattggctatggagtccgttccatcacagaggaatgtcctcatgccatcttcctgttggttgctcagttggtcatcacgaccttgattgagatcttcatcaccggaaccttcctggccaaaatcgccagacccaaaaagcgggctgagaccatcaagttcagccactgtgcagtcatcaccaagcagaatgggaagctgtgcttggtgattcaggtagccaatatgaggaagagcctcttgattcagtgccagctctctggcaagctcctgcagacccacgtcaccaaggagggggagcggattctcctcaaccaagccactgtcaaattccacgtggactcctcctctgagagccccttcctcattctgcccatgacattctaccatgtgctggatgagacgagccccctgagagacctcacaccccaaaacctaaaggagaaggagtttgagcttgtggtcctcctcaatgccactgtggaatccaccagcgctgtctgccagagccgaacatcttatatcccagaggaaatctactggggttttgagtttgtgcctgtggtatctctctccaaaaatggaaaatatgtggctgatttcagtcagtttgaacagattcggaaaagcccagattgcacattttactgtgcagattctgagaaacagcaactcgaggagaagtacaggcaggaggatcagagggaaagagaactgaggacacttttattacaacagagcaatgtctgatcacaggggcgccatccaggtttaaccctgcaagctgtttccacatcagaactcccttcaaacacaaagattgctgtgaaaacgaaaatgtgtagacgcactctcaaaaactgcacggacatacaaaatcaatcttttcctttgatcttgtggctaaaccagcatttctgtgtttgagagatttcctgttaggtgcttcgtctgaaagtgaactctcataattcaaattgtataaaataaagctacatttctaagagcttggtgtagggcaattggaataatgtcctgttagataaacagacatttagcaatcctgacattaaaaggaaatgtatttctatacaagattattagctgtaatacaagatatttatttaaccaatgaccttatggctgagagttgaattgtggttcagtattcattgatctcactgctttaaaacatgctctttttgttcaagcaggaaaaatattatatctaattatgtctatgtggtaatacctaaaaagaggtagagagactctatgttcacaaaatatagtaatttcatttttacctttcttcagtggactgaattgtatggaaggaaattgatcagatctgtaattcacaactgtggaaacctacacaaatggggctgatgccattgtttcctctattttattttatttatttttgaatccactatctctttccattcaaaatatttccattcaaaatgtggttcacagacccgccacatcagcaccatccgagagcttattagtaatgtgtagattctcatgtcccagccagacttacagaattggggtctgtatcttaacaagaaccccagatgatttgtgtacaaatgaaagttcgaaagctgtgctctggacagtgttctcaaagcaactttctgaagccgtgtggaaaactgactctgtgtgggtcccgtatccctgtggcatccagacctggcctctcttcatttcattattattggccaatatttctttcagccatttcatttcttatctattaaaatggcttgcccataaaggaactgcataggattatcccctgacattccaagagcaaaataaagctcttgagagt

SEQ ID NO: 12293 - protein, 375 aa, Homo sapiens; identical to SEQ ID NO: 2067

SEQ ID NO: 12294 - DNA, 724 bp, Homo sapiens
atgtgggagatcagatcaagtacaccctggcatggacttcccctgacgctgtgctggagcctggcctctgtgtctgtcctggcatctgcccagcggccttcaacacagaccctccacttttccaccagtttgtccaccggtgaaaaggagaagccagccaagaaccagcagcttctggctaccttgatcagaaggttgatgaaggcaatgaaacaaagatggaaaaacacatcacacaggcccttaccagatgccagcatcttgatattggacttcccagccttcagaactcaattacaaagatatgctaatgctctgcaccaagtggcagctacatgcttgagaccaacactgaaaatcagtcatggaatcactgcatatctgaacaagggccacgagaggaggcacagatgggtcaactgacttgagcagagccacccagcaaattcagcgtcggagtatgcttcccttgcctgagaatcgttacaaagaggagcatctgatgaggaaatgagaactccagccagaaaccagcaataaattgagggctcctatatgagcaatgcattctccagccccaatcaagcctttggataactgcagctcctgccagcattttgactgcacttcatgaaacactttgagtcagagccacctacctaagccactccaaaattcctgaccgtcaaaaactttgagataataaatgcttgttgttttaaac

SEQ ID NO: 12295 - protein, 140 aa, Homo sapiens
MWEIRSSTPWHGLPLTLCWSLASVSVLASAQRPSTQTLHFSTSLSTGEKEKPAKNQQLLATLIRRLMKAMKQRWKNTSHRPLPDASILILDFPAFRTQLQRYANALHQVAATCLRPTLKISHGITAYLNKGHERRHRWVN

SEQ ID NO: 12296 - DNA, 521 bp, Homo sapiens
gaaataaaactcagtgatttaactaaactactctcttttaaacaggaccctccacttttccaccagtttgtccaccggtgaaaaggagaagccagccaagaaccagcagcttctggctaccttgatcagaaggttgatgaaggcaatgaaacaaagatggaaaaacacatcacacaggcccttaccagatgccagcatcttgatattggacttcccagccttcagaactataaggctccagtcaagcaacccaccttatcaagtggaccaggcacagctcctacttatccctgagtagtgggtatcagtttcctgctaacctcggaattgttcaaagcccatcacattctcctgcaggaaccagggagcacctcaccctcttgttgctacaaagcttgccacccacagcccctgcctgttcaccctgctcctgagggcaacccctgtatggccagcatcccatgctgtgttcacctctcccaagctgcgagtgtatgtgaataataactgccgtcaatcgc

SEQ ID NO: 12297 - protein, 53 aa, Homo sapiens
MKAMKQRWKNTSHRPLPDASILILDFPAFRTIRLQSSNPPYQVDQAQLLLIPE

SEQ ID NO: 12298 - DNA, 1514 bp, Homo sapiens
cccccgagggacatgagagaagaggagcggcgctcaggttattccaggatctttggagacccgaggaaagccgtgttgaccaaaagcaagacaaatgactcacagagaaaaaagatggcagaaccaagggcaactaaagccgtcaggttctgaacagctggtagatgggctggcttactgaaggacatgattcagactgtcccggacccagcagctcatatcaaggaagccttatcagttgtgagtgaggaccagtcgttgtttgagtgtgcctacggaacgccacacctggctaagacagagatgaccgcgtcctcctccagcgactatggacagacttccaagatgagcccacgcgtccctcagcaggattggctgtctcaacccccagccagggtcaccatcaaaatggaatgtaaccctagccaggtgaatggctcaaggaactctcctgatgaatgcagtgtggccaaaggcgggaagatggtgggcagcccagacaccgttgggatgaactacggcagctacatggaggagaagcacatgccacccccaaacatgaccacgaacgagcgcagagttatcgtgccagcagatcctacgctatggagtacagaccatgtgcggcagtggctggagtgggcggtgaaagaatatggccttccagacgtcaacatcttgttattccagaacatcgatgggaaggaactgtgcaagatgaccaaggacgacttccagaggctcacccccagctacaacgccgacatccttctctcacatctccactacctcagagagactcctcttccacatttgacttcagatgatgttgataaagccttacaaaactctccacggttaatgcatgctagaaacacagggggtgcagcttttattttcccaaatacttcagtatatcctgaagctacgcaaagaattacaactaggccagatttaccatatgagccccccaggagatcagcctggaccggtcacggccaccccacgccccagtcgaaagctgctcaaccatctccttccacagtgcccaaaactgaagaccagcgtcctcagttagatccttatcagattcttggaccaacaagtagccgccttgcaaatccaggttggacccaatgatctgcttttaatgaatagaatatagcagatgtgacagtgtgtgacttctgggactgggtcatagaaggcagcgtggccttctctttgcatcacttattctgggggaagagactgccatgtcatgaagacttgcagccctacagagaagtgtatgggatgaggaaatgaagcctcctgtcaaaagccaattctccagccccagtcaagccttcgtgtaacctcagtcttggtcaacatcttaactgaaacctcatgagagaccctgagccaccagccacccacgtgagctgcttctgaatgcctgatccaccaaaactgtgagataataaatgtttatggagaaatttgttacacagcaataaatagttacacag

SEQ ID NO: 12299 - protein, 317 aa, Homo sapiens
MIQTVPDPAAHIKEALSVVSEDQSLFECAYGTPHLAKTEMTASSSSDYGQTSKMSPRVPQQDWLSQPPARVTIKMECNPSQVNGSRNSPDECSVAKGGKMVGSPDTVGMNYGSYMEEKHMPPPNMTTNERRVIVPADPTLWSTDHVRQWLEWAVKEYGLPDVNILLFQNIDGKELCKMTKDDFQRLTPSYNADILLSHLHYLRETPLPHLTSDDVDKALQNSPRLMHARNTGGAAFIFPNTSVYPEATQRITTRPDLPYEPPRRSAWTGHGHPTPQSKAAQPSPSTVPKTEDQRPQLDPYQILGPTSSRLANPGWTQ

SEQ ID NO: 12300 - DNA, 3164 bp, Homo sapiens
ccagctttggcagttcctcctggagctcctgtcggacagctccaactccagctgcatcacctgggaaggcaccaacggggagttcaagatgacggatcccgacgaggtggcccggcgctggggagagcggaagagcaaacccaacatgaactacgataagctcagccgcgccctccgttactactatgacaagaacatcatgaccaagtacccctcagacctcccgtacatgggctcctatcacgcccacccacagaagatgaactttgtggcgccccaccctccagccctccccgtgacatcttccagtttttttgctgccccaaacccatactggaattcaccaactgggggtatataccccaacactaggctccccaccagccatatgccttctcatctgggcacttactactaaagacctggcggaggcttttcccatcagcgtgcattcaccagcccatcgccacaaactctatcggagaacatgaatcaaaagtgcctcaagaggaatgaaaaaagctttactggggctggggaaggaagccggggaagagatccaaagactcttgggagggagttactgaagtcttactacagaaatgaggaggatgctaaaaatgtcacgaatatggacatatcatctgtggactgaccttgtaaaagacagtgtatgtagaagcatgaagtcttaaggacaaagtgccaaagaaagtggtcttaagaaatgtataaactttagagtagagtttggaatcccactaatgcaaactgggatgaaactaaagcaatagaaacaacacagttttgacctaacataccgtttataatgccattttaaggaaaactacctgtatttaaaaatagaaacatatcaaaaacaagagaaaagacacgagagagactgtggcccatcaacagacgttgatatgcaactgcatggcatgtgctgttttggttgaaatcaaatacattccgtttgatggacagctgtcagctttctcaaactgtgaagatgacccaaagtttccaactcctttacagtattaccgggactatgaactaaaaggtgggactgaggatgtgtatagagtgagcgtgtgattgtagacagaggggtgaagaaggaggaggaagaggcagagaaggaggagaccagggctgggaaagaaacttctcaagcaatgaagactggactcaggacatttggggactgtgtacaatgagttatggagactcgagggttcatgcagtcagtgttataccaaacccagtgttaggagaaaggacacagcgtaatggagaaaggggaagtagtagaattcagaaacaaaaatgcgcatctctttctttgtttgtcaaatgaaaattttaactggaattgtctgatatttaagagaaacattcaggacctcatcattatgtgggggctttgttctccacagggtcaggtaagagatggccttcttggctgccacaatcagaaatcacgcaggcattttgggtaggcggcctccagttttcctttgagtcgcgaacgctgtgcgtttgtcagaatgaagtatacaagtcaatgtttttccccctttttatataataattatataacttatgcatttatacactacgagttgatctcggccagccaaagacacacgacaaaagagacaatcgatataatgtggccttgaattttaactctgtatgcttaatgtttacaatatgaagttattagttcttagaatgcagaatgtatgtaataaaataagcttggcctagcatggcaaatcagatttatacaggagtctgcatttgcactttttttagtgactaaagttgcttaatgaaaacatgtgctgaatgttgtggattttgtgttataatttactttgtccaggaacttgtgcaagggagagccaaggaaataggatgtttggcacccaaatggcgtcagcctctccaggtccttcttgcctcccctcctgtcttttatttctagccccttttggaacagaaggaccccgggtttcacattggagcctccatatttatgcctggaatggaaagaggcctatgaagctggggttgtcattgagaaattctagttcagcacctggtcacaaatcacccttaattcctgctatgattaaaatacatttgttgaacagtgaacaagctaccactcgtaaggcaaactgtattattactggcaaataaagcgtcatggatagctgcaatttctcactttacagaaacaagggataacgtctagatttgctgcggggtttctctttcaggagctctcactaggtagacagctttagtcctgctacatcagagttacctgggcactgtggcttgggattcactagccctgagcctgatgttgctggctatcccttgaagacaatgtttatttccataatctagagtcagtttccctgggcatcttttctttgaatcacaaatgctgccaaccttggtccaggtgaaggcaactcaaaaggtgaaaatacaaggtgaccgtgcgaaggcgctagccgaaacatcttagctgaataggtttctgaactggcccttttcatagctgtttcagggcctgtttttttcacgttgcagtccttttgctatgattatgtgaagttgccaaacctctgtgctgtggatgttttggcagtgggctttgaagtcggcaggacacgattaccaatgctcctgacaccccgtgtcatttggattagacggagcccaaccatccatcattttgcagcagcctgggaaggcccacaaagtgcccgtatctccttagggaaaataaataaatacaatcatgaaagctggcagttaggctgacccaaactgtgctaatggaaaagatcagtcatttttattttggaatgcaaagtcaagacacacctacattcttcatagaaatacacatttacttggataatcactcagttctctcttcaagactgtctcatgagcaagatcataaaaacaagacatgattatcatattcaattttaacagatgttttccattagatccctcaaccctccacccccagtccaggttattagcaagtcttatgagcaactgggataattttggataacatgataatactgagttccttcaaatacataattcttaaattgttt

SEQ ID NO: 12301 - protein, 109 aa, Homo sapiens
MTDPDEVARRWGERKSKPNMNYDKLSRALRYYYDKNIMTKYPSDLPYMGSYHAHPQKMNFVAPHPPALPVTSSSFFAAPNPYWNSPTGGIYPNTRLPTSHMPSHLGTYY

SEQ ID NO: 12302 - DNA, 4289 bp, Homo sapiens
aatctcatccgctctaaacaacctcatcaaaactactttctggtcagagagaagcaataattattattaacatttattaacgatcaataaacttgatcgcattatggccagcactattaaggaagccttatcagttgtgagtgaggaccagtcgttgtttgagtgtgcctacggaacgccacacctggctaagacagagatgaccgcgtcctcctccagcgactatggacagacttccaagatgagcccacgcgtccctcagcaggattggctgtctcaacccccagccagggtcaccatcaaaatggaatgtaaccctagccaggtgaatggctcaaggaactctcctgatgaatgcagtgtggccaaaggcgggaagatggtgggcagcccagacaccgttgggatgaactacggcagctacatggaggagaagcacatgccacccccaaacatgaccacgaacgagcgcagagttatcgtgccagcagatcctacgctatggagtacagaccatgtgcggcagtggctggagtgggcggtgaaagaatatggccttccagacgtcaacatcttgttattccagaacatcgatgggaaggaactgtgcaagatgaccaaggacgacttccagaggctcacccccagctacaacgccgacatccttctctcacatctccactacctcagagagactcctcttccacatttgacttcagatgatgttgataaagccttacaaaactctccacggttaatgcatgctagaaacacagggggtgcagcttttattttcccaaatacttcagtatatcctgaagctacgcaaagaattacaactaggccagatttaccatatgagccccccaggagatcagcctggaccggtcacggccaccccacgccccagtcgaaagctgctcaaccatctccttccacagtgcccaaaactgaagaccagcgtcctcagttagatccttatcagattcttggaccaacaagtagccgccttgcaaatccaggcagtggccagatccagctttggcagttcctcctggagctcctgtcggacagctccaactccagctgcatcacctgggaaggcaccaacggggagttcaagatgacggatcccgacgaggtggcccggcgctggggagagcggaagagcaaacccaacatgaactacgataagctcagccgcgccctccgttactactatgacaagaacatcatgaccaaggtccatgggaagcgctacgcctacaagttcgacttccacgggatcgcccaggccctccagccccaccccccggagtcatctctgtacaagtacccctcagacctcccgtacatgggctcctatcacgcccacccacagaagatgaactttgtggcgccccaccctccagccctccccgtgacatcttccagtttttttgctgccccaaacccatactggaattcaccaactgggggtatataccccaacactaggctccccaccagccatatgccttctcatctgggcacttactactaaagacctggcggaggcttttcccatcagcgtgcattcaccagcccatcgccacaaactctatcggagaacatgaatcaaaagtgcctcaagaggaatgaaaaaagctttactggggctggggaaggaagccggggaagagatccaaagactcttgggagggagttactgaagtcttactacagaaatgaggaggatgctaaaaatgtcacgaatatggacatatcatctgtggactgaccttgtaaaagacagtgtatgtagaagcatgaagtcttaaggacaaagtgccaaagaaagtggtcttaagaaatgtataaactttagagtagagtttggaatcccactaatgcaaactgggatgaaactaaagcaatagaaacaacacagttttgacctaacataccgtttataatgccattttaaggaaaactacctgtatttaaaaatagaaacatatcaaaaacaagagaaaagacacgagagagactgtggcccatcaacagacgttgatatgcaactgcatggcatgtgctgttttggttgaaatcaaatacattccgtttgatggacagctgtcagctttctcaaactgtgaagatgacccaaagtttccaactcctttacagtattaccgggactatgaactaaaaggtgggactgaggatgtgtatagagtgagcgtgtgattgtagacagaggggtgaagaaggaggaggaagaggcagagaaggaggagaccagggctgggaaagaaacttctcaagcaatgaagactggactcaggacatttggggactgtgtacaatgagttatggagactcgagggttcatgcagtcagtgttataccaaacccagtgttaggagaaaggacacagcgtaatggagaaaggggaagtagtagaattcagaaacaaaaatgcgcatctctttctttgtttgtcaaatgaaaattttaactggaattgtctgatatttaagagaaacattcaggacctcatcattatgtgggggctttgttctccacagggtcaggtaagagatggccttcttggctgccacaatcagaaatcacgcaggcattttgggtaggcggcctccagttttcctttgagtcgcgaacgctgtgcgtttgtcagaatgaagtatacaagtcaatgtttttccccctttttatataataattatataacttatgcatttatacactacgagttgatctcggccagccaaagacacacgacaaaagagacaatcgatataatgtggccttgaattttaactctgtatgcttaatgtttacaatatgaagttattagttcttagaatgcagaatgtatgtaataaaataagcttggcctagcatggcaaatcagatttatacaggagtctgcatttgcactttttttagtgactaaagttgcttaatgaaaacatgtgctgaatgttgtggattttgtgttataatttactttgtccaggaacttgtgcaagggagagccaaggaaataggatgtttggcacccaaatggcgtcagcctctccaggtccttcttgcctcccctcctgtcttttatttctagccccttttggaacagaaggaccccgggtttcacattggagcctccatatttatgcctggaatggaaagaggcctatgaagctggggttgtcattgagaaattctagttcagcacctggtcacaaatcacccttaattcctgctatgattaaaatacatttgttgaacagtgaacaagctaccactcgtaaggcaaactgtattattactggcaaataaagcgtcatggatagctgcaatttctcactttacagaaacaagggataacgtctagatttgctgcggggtttctctttcaggagctctcactaggtagacagctttagtcctgctacatcagagttacctgggcactgtggcttgggattcactagccctgagcctgatgttgctggctatcccttgaagacaatgtttatttccataatctagagtcagtttccctgggcatcttttctttgaatcacaaatgctgccaaccttggtccaggtgaaggcaactcaaaaggtgaaaatacaaggtgaccgtgcgaaggcgctagccgaaacatcttagctgaataggtttctgaactggcccttttcatagctgtttcagggcctgtttttttcacgttgcagtccttttgctatgattatgtgaagttgccaaacctctgtgctgtggatgttttggcagtgggctttgaagtcggcaggacacgattaccaatgctcctgacaccccgtgtcatttggattagacggagcccaaccatccatcattttgcagcagcctgggaaggcccacaaagtgcccgtatctccttagggaaaataaataaatacaatcatgaaagctggcagttaggctgacccaaactgtgctaatggaaaagatcagtcatttttattttggaatgcaaagtcaagacacacctacattcttcatagaaatacacatttacttggataatcactcagttctctcttcaagactgtctcatgagcaagatcataaaaacaagacatgattatcatattcaattttaacagatgttttccattagatccctcaaccctccacccccagtccaggttattagcaagtcttatgagcaactgggataattttggataacatgataatactgagttccttcaaatacataattcttaaattgttt

SEQ ID NO: 12303 - protein, 479 aa, Homo sapiens
MASTIKEALSVVSEDQSLFECAYGTPHLAKTEMTASSSSDYGQTSKMSPRVPQQDWLSQPPARVTIKMECNPSQVNGSRNSPDECSVAKGGKMVGSPDTVGMNYGSYMEEKHMPPPNMTTNERRVIVPADPTLWSTDHVRQWLEWAVKEYGLPDVNILLFQNIDGKELCKMTKDDFQRLTPSYNADILLSHLHYLRETPLPHLTSDDVDKALQNSPRLMHARNTGGAAFIFPNTSVYPEATQRITTRPDLPYEPPRRSAWTGHGHPTPQSKAAQPSPSTVPKTEDQRPQLDPYQILGPTSSRLANPGSGQIQLWQFLLELLSDSSNSSCITWEGTNGEFKMTDPDEVARRWGERKSKPNMNYDKLSRALRYYYDKNIMTKVHGKRYAYKFDFHGIAQALQPHPPESSLYKYPSDLPYMGSYHAHPQKMNFVAPHPPALPVTSSSFFAAPNPYWNSPTGGIYPNTRLPTSHMPSHLGTYY

SEQ ID NO: 12304 - DNA, 4021 bp, Homo sapiens
aaagcaagacaaatgactcacagagaaaaaagatggcagaaccaagggcaactaaagccgtcaggttctgaacagctggtagatgggctggcttactgaaggacatgattcagactgtcccggacccagcagctcatatcaaggaactctcctgatgaatgcagtgtggccaaaggcgggaagatggtgggcagcccagacaccgttgggatgaactacggcagctacatggaggagaagcacatgccacccccaaacatgaccacgaacgagcgcagagttatcgtgccagcagatcctacgctatggagtacagaccatgtgcggcagtggctggagtgggcggtgaaagaatatggccttccagacgtcaacatcttgttattccagaacatcgatgggaaggaactgtgcaagatgaccaaggacgacttccagaggctcacccccagctacaacgccgacatccttctctcacatctccactacctcagagagactcctcttccacatttgacttcagatgatgttgataaagccttacaaaactctccacggttaatgcatgctagaaacacagatttaccatatgagccccccaggagatcagcctggaccggtcacggccaccccacgccccagtcgaaagctgctcaaccatctccttccacagtgcccaaaactgaagaccagcgtcctcagttagatccttatcagattcttggaccaacaagtagccgccttgcaaatccaggcagtggccagatccagctttggcagttcctcctggagctcctgtcggacagctccaactccagctgcatcacctgggaaggcaccaacggggagttcaagatgacggatcccgacgaggtggcccggcgctggggagagcggaagagcaaacccaacatgaactacgataagctcagccgcgccctccgttactactatgacaagaacatcatgaccaaggtccatgggaagcgctacgcctacaagttcgacttccacgggatcgcccaggccctccagccccaccccccggagtcatctctgtacaagtacccctcagacctcccgtacatgggctcctatcacgcccacccacagaagatgaactttgtggcgccccaccctccagccctccccgtgacatcttccagtttttttgctgccccaaacccatactggaattcaccaactgggggtatataccccaacactaggctccccaccagccatatgccttctcatctgggcacttactactaaagacctggcggaggcttttcccatcagcgtgcattcaccagcccatcgccacaaactctatcggagaacatgaatcaaaagtgcctcaagaggaatgaaaaaagctttactggggctggggaaggaagccggggaagagatccaaagactcttgggagggagttactgaagtcttactacagaaatgaggaggatgctaaaaatgtcacgaatatggacatatcatctgtggactgaccttgtaaaagacagtgtatgtagaagcatgaagtcttaaggacaaagtgccaaagaaagtggtcttaagaaatgtataaactttagagtagagtttggaatcccactaatgcaaactgggatgaaactaaagcaatagaaacaacacagttttgacctaacataccgtttataatgccattttaaggaaaactacctgtatttaaaaatagaaacatatcaaaaacaagagaaaagacacgagagagactgtggcccatcaacagacgttgatatgcaactgcatggcatgtgctgttttggttgaaatcaaatacattccgtttgatggacagctgtcagctttctcaaactgtgaagatgacccaaagtttccaactcctttacagtattaccgggactatgaactaaaaggtgggactgaggatgtgtatagagtgagcgtgtgattgtagacagaggggtgaagaaggaggaggaagaggcagagaaggaggagaccagggctgggaaagaaacttctcaagcaatgaagactggactcaggacatttggggactgtgtacaatgagttatggagactcgagggttcatgcagtcagtgttataccaaacccagtgttaggagaaaggacacagcgtaatggagaaaggggaagtagtagaattcagaaacaaaaatgcgcatctctttctttgtttgtcaaatgaaaattttaactggaattgtctgatatttaagagaaacattcaggacctcatcattatgtgggggctttgttctccacagggtcaggtaagagatggccttcttggctgccacaatcagaaatcacgcaggcattttgggtaggcggcctccagttttcctttgagtcgcgaacgctgtgcgtttgtcagaatgaagtatacaagtcaatgtttttccccctttttatataataattatataacttatgcatttatacactacgagttgatctcggccagccaaagacacacgacaaaagagacaatcgatataatgtggccttgaattttaactctgtatgcttaatgtttacaatatgaagttattagttcttagaatgcagaatgtatgtaataaaataagcttggcctagcatggcaaatcagatttatacaggagtctgcatttgcactttttttagtgactaaagttgcttaatgaaaacatgtgctgaatgttgtggattttgtgttataatttactttgtccaggaacttgtgcaagggagagccaaggaaataggatgtttggcacccaaatggcgtcagcctctccaggtccttcttgcctcccctcctgtcttttatttctagccccttttggaacagaaggaccccgggtttcacattggagcctccatatttatgcctggaatggaaagaggcctatgaagctggggttgtcattgagaaattctagttcagcacctggtcacaaatcacccttaattcctgctatgattaaaatacatttgttgaacagtgaacaagctaccactcgtaaggcaaactgtattattactggcaaataaagcgtcatggatagctgcaatttctcactttacagaaacaagggataacgtctagatttgctgcggggtttctctttcaggagctctcactaggtagacagctttagtcctgctacatcagagttacctgggcactgtggcttgggattcactagccctgagcctgatgttgctggctatcccttgaagacaatgtttatttccataatctagagtcagtttccctgggcatcttttctttgaatcacaaatgctgccaaccttggtccaggtgaaggcaactcaaaaggtgaaaatacaaggtgaccgtgcgaaggcgctagccgaaacatcttagctgaataggtttctgaactggcccttttcatagctgtttcagggcctgtttttttcacgttgcagtccttttgctatgattatgtgaagttgccaaacctctgtgctgtggatgttttggcagtgggctttgaagtcggcaggacacgattaccaatgctcctgacaccccgtgtcatttggattagacggagcccaaccatccatcattttgcagcagcctgggaaggcccacaaagtgcccgtatctccttagggaaaataaataaatacaatcatgaaagctggcagttaggctgacccaaactgtgctaatggaaaagatcagtcatttttattttggaatgcaaagtcaagacacacctacattcttcatagaaatacacatttacttggataatcactcagttctctcttcaagactgtctcatgagcaagatcataaaaacaagacatgattatcatattcaattttaacagatgttttccattagatccctcaaccctccacccccagtccaggttattagcaagtcttatgagcaactgggataattttggataacatgataatactgagttccttcaaatacataattcttaaattgttt

SEQ ID NO: 12305 - protein, 363 aa, Homo sapiens
MVGSPDTVGMNYGSYMEEKHMPPPNMTTNERRVIVPADPTLWSTDHVRQWLEWAVKEYGLPDVNILLFQNIDGKELCKMTKDDFQRLTPSYNADILLSHLHYLRETPLPHLTSDDVDKALQNSPRLMHARNTDLPYEPPRRSAWTGHGHPTPQSKAAQPSPSTVPKTEDQRPQLDPYQILGPTSSRLANPGSGQIQLWQFLLELLSDSSNSSCITWEGTNGEFKMTDPDEVARRWGERKSKPNMNYDKLSRALRYYYDKNIMTKVHGKRYAYKFDFHGIAQALQPHPPESSLYKYPSDLPYMGSYHAHPQKMNFVAPHPPALPVTSSSFFAAPNPYWNSPTGGIYPNTRLPTSHMPSHLGTYY

SEQ ID NO: 12306 - DNA, 4321 bp, Homo sapiens
cccccgagggacatgagagaagaggagcggcgctcaggttattccaggatctttggagacccgaggaaagccgtgttgaccaaaagcaagacaaatgactcacagagaaaaaagatggcagaaccaagggcaactaaagccgtcaggttctgaacagctggtagatgggctggcttactgaaggacatgattcagactgtcccggacccagcagctcatatcaaggaagccttatcagttgtgagtgaggaccagtcgttgtttgagtgtgcctacggaacgccacacctggctaagacagagatgaccgcgtcctcctccagcgactatggacagacttccaagatgagcccacgcgtccctcagcaggattggctgtctcaacccccagccagggtcaccatcaaaatggaatgtaaccctagccaggtgaatggctcaaggaactctcctgatgaatgcagtgtggccaaaggcgggaagatggtgggcagcccagacaccgttgggatgaactacggcagctacatggaggagaagcacatgccacccccaaacatgaccacgaacgagcgcagagttatcgtgccagcagatcctacgctatggagtacagaccatgtgcggcagtggctggagtgggcggtgaaagaatatggccttccagacgtcaacatcttgttattccagaacatcgatgggaaggaactgtgcaagatgaccaaggacgacttccagaggctcacccccagctacaacgccgacatccttctctcacatctccactacctcagagagactcctcttccacatttgacttcagatgatgttgataaagccttacaaaactctccacggttaatgcatgctagaaacacagatttaccatatgagccccccaggagatcagcctggaccggtcacggccaccccacgccccagtcgaaagctgctcaaccatctccttccacagtgcccaaaactgaagaccagcgtcctcagttagatccttatcagattcttggaccaacaagtagccgccttgcaaatccaggcagtggccagatccagctttggcagttcctcctggagctcctgtcggacagctccaactccagctgcatcacctgggaaggcaccaacggggagttcaagatgacggatcccgacgaggtggcccggcgctggggagagcggaagagcaaacccaacatgaactacgataagctcagccgcgccctccgttactactatgacaagaacatcatgaccaaggtccatgggaagcgctacgcctacaagttcgacttccacgggatcgcccaggccctccagccccaccccccggagtcatctctgtacaagtacccctcagacctcccgtacatgggctcctatcacgcccacccacagaagatgaactttgtggcgccccaccctccagccctccccgtgacatcttccagtttttttgctgccccaaacccatactggaattcaccaactgggggtatataccccaacactaggctccccaccagccatatgccttctcatctgggcacttactactaaagacctggcggaggcttttcccatcagcgtgcattcaccagcccatcgccacaaactctatcggagaacatgaatcaaaagtgcctcaagaggaatgaaaaaagctttactggggctggggaaggaagccggggaagagatccaaagactcttgggagggagttactgaagtcttactacagaaatgaggaggatgctaaaaatgtcacgaatatggacatatcatctgtggactgaccttgtaaaagacagtgtatgtagaagcatgaagtcttaaggacaaagtgccaaagaaagtggtcttaagaaatgtataaactttagagtagagtttggaatcccactaatgcaaactgggatgaaactaaagcaatagaaacaacacagttttgacctaacataccgtttataatgccattttaaggaaaactacctgtatttaaaaatagaaacatatcaaaaacaagagaaaagacacgagagagactgtggcccatcaacagacgttgatatgcaactgcatggcatgtgctgttttggttgaaatcaaatacattccgtttgatggacagctgtcagctttctcaaactgtgaagatgacccaaagtttccaactcctttacagtattaccgggactatgaactaaaaggtgggactgaggatgtgtatagagtgagcgtgtgattgtagacagaggggtgaagaaggaggaggaagaggcagagaaggaggagaccagggctgggaaagaaacttctcaagcaatgaagactggactcaggacatttggggactgtgtacaatgagttatggagactcgagggttcatgcagtcagtgttataccaaacccagtgttaggagaaaggacacagcgtaatggagaaaggggaagtagtagaattcagaaacaaaaatgcgcatctctttctttgtttgtcaaatgaaaattttaactggaattgtctgatatttaagagaaacattcaggacctcatcattatgtgggggctttgttctccacagggtcaggtaagagatggccttcttggctgccacaatcagaaatcacgcaggcattttgggtaggcggcctccagttttcctttgagtcgcgaacgctgtgcgtttgtcagaatgaagtatacaagtcaatgtttttccccctttttatataataattatataacttatgcatttatacactacgagttgatctcggccagccaaagacacacgacaaaagagacaatcgatataatgtggccttgaattttaactctgtatgcttaatgtttacaatatgaagttattagttcttagaatgcagaatgtatgtaataaaataagcttggcctagcatggcaaatcagatttatacaggagtctgcatttgcactttttttagtgactaaagttgcttaatgaaaacatgtgctgaatgttgtggattttgtgttataatttactttgtccaggaacttgtgcaagggagagccaaggaaataggatgtttggcacccaaatggcgtcagcctctccaggtccttcttgcctcccctcctgtcttttatttctagccccttttggaacagaaggaccccgggtttcacattggagcctccatatttatgcctggaatggaaagaggcctatgaagctggggttgtcattgagaaattctagttcagcacctggtcacaaatcacccttaattcctgctatgattaaaatacatttgttgaacagtgaacaagctaccactcgtaaggcaaactgtattattactggcaaataaagcgtcatggatagctgcaatttctcactttacagaaacaagggataacgtctagatttgctgcggggtttctctttcaggagctctcactaggtagacagctttagtcctgctacatcagagttacctgggcactgtggcttgggattcactagccctgagcctgatgttgctggctatcccttgaagacaatgtttatttccataatctagagtcagtttccctgggcatcttttctttgaatcacaaatgctgccaaccttggtccaggtgaaggcaactcaaaaggtgaaaatacaaggtgaccgtgcgaaggcgctagccgaaacatcttagctgaataggtttctgaactggcccttttcatagctgtttcagggcctgtttttttcacgttgcagtccttttgctatgattatgtgaagttgccaaacctctgtgctgtggatgttttggcagtgggctttgaagtcggcaggacacgattaccaatgctcctgacaccccgtgtcatttggattagacggagcccaaccatccatcattttgcagcagcctgggaaggcccacaaagtgcccgtatctccttagggaaaataaataaatacaatcatgaaagctggcagttaggctgacccaaactgtgctaatggaaaagatcagtcatttttattttggaatgcaaagtcaagacacacctacattcttcatagaaatacacatttacttggataatcactcagttctctcttcaagactgtctcatgagcaagatcataaaaacaagacatgattatcatattcaattttaacagatgttttccattagatccctcaaccctccacccccagtccaggttattagcaagtcttatgagcaactgggataattttggataacatgataatactgagttccttcaaatacataattcttaaattgttt

SEQ ID NO: 12307 - protein, 462 aa, Homo sapiens
MIQTVPDPAAHIKEALSVVSEDQSLFECAYGTPHLAKTEMTASSSSDYGQTSKMSPRVPQQDWLSQPPARVTIKMECNPSQVNGSRNSPDECSVAKGGKMVGSPDTVGMNYGSYMEEKHMPPPNMTTNERRVIVPADPTLWSTDHVRQWLEWAVKEYGLPDVNILLFQNIDGKELCKMTKDDFQRLTPSYNADILLSHLHYLRETPLPHLTSDDVDKALQNSPRLMHARNTDLPYEPPRRSAWTGHGHPTPQSKAAQPSPSTVPKTEDQRPQLDPYQILGPTSSRLANPGSGQIQLWQFLLELLSDSSNSSCITWEGTNGEFKMTDPDEVARRWGERKSKPNMNYDKLSRALRYYYDKNIMTKVHGKRYAYKFDFHGIAQALQPHPPESSLYKYPSDLPYMGSYHAHPQKMNFVAPHPPALPVTSSSFFAAPNPYWNSPTGGIYPNTRLPTSHMPSHLGTYY

SEQ ID NO: 12308 - DNA, 1754 bp, Homo sapiens
agtacagtggcccagggcagactagctggaatcagcctcccgggtgggtttcgaggcgtttccagggtcaggggtcaagtaggggcatgttcccgggacactgcttctttctgccagaaggacgaagaatctggagagtgcaatatttggatctggtcctgctgatgtgtttctgtgctacagaaaccttctccacccctcttctacccaacagctagaggacatggggtccggaagtgcatgtggctggagccagtgtggtcgctgtcgtgatggccgagtccagatgagctgccgctggggaaacacagggtacctgaggtctgaggtcgggacgtctttgtccaaccactaagagtccacattctcctttggagccgggtctccgttttctccagcatcatgggcccctcaaggaagctgatgcatgccacaggctgtcttctcagaaaaggtacccaagaacacattttgggtttgcatgtggattgggaagcccaacgtggcctccagcggtgctccttggctttgtctagactgcaggatcccacccatgccctgtggatttgccacgtggacactgacgtgagcaaatggacaattcaacatcagtggcagaaaggagctcagtctggttcacacgtggaaggcagcacattctgaaagagaatcacttgaacccaggaggcgaaggttgcattgagccaagattgtgctattgcactccagcctggacaacagagcaagactctgtctctcaaaaaaagaaaaagaaaagcgacgacattcagtcaatcagccagatatttttggtgatgctgcaactcttaatggtatcctgtctggattctgtttatttagttcctaagttggtaaatacagtgcctgttaatcattaacctttgccttgtcattgacaaagagttcacttgtcaagctgtgagtggaacacagaattgtgaggcctatggaattcaagcattgatcttgatattatggatgaggacaaaaagggtgggtgacttgaagctgttttcttcccagaatttgagctttgtgatcattgaatcaggacttgaatcgacactccttggctccctagtcctttttctgcttttcctttggtggtgattggaggctgtagtaggctgttcttctgttgctataaagagatacctgaggctgggcaatttataagcaaaagaggtttgattggctcccagttctgtgggctttacaggaagcctggtgccggcatctgcttggctcttggggaggcctcgagaagcctccaatcatggtggaaggcaacggagaagcaggagggtagagagatgccacgtgcttttaaacaaccagatcttgcgagaactcactatctcaaggagagcaccaagccatttaggaggcatctgcctggtgacccaaacacctcccaccagccccacctccaacattgcgaatgacatttcaacgtgagatgtggaggggacatccagactgtatcagaaaccaagagataacaacttagtagacatattccaaaaaattatgacccacagggtgccgatcagtgtgcagagaatgtcttcatttacacacaaaaagacacagacaagacactcagcagaggttctcagaggggctaagtgcggaaggcttcgtgtgttcatttttattctttggggctgaaagaatgctttataccatgagctgtgcttcttttaaaatagaaataaaatgcttagttagtc

SEQ ID NO: 12309 - protein, 101 aa, Homo sapiens
MDNSTSVAERSSVWFTRGRQHILKENHLNPGGEGCIEPRLCYCTPAWTTEQDSVSQKKKKKSDDIQSISQIFLVMLQLLMVSCLDSVYLVPKLVNTVPVNH

SEQ ID NO: 12310 - DNA, 3410 bp, Homo sapiens
ctgccgccacatgcgggaactgctggctccctcgtgcccgcccggggctgaggactgcacgtgcagccacagatgcatccggccctcctgccccacagcctctatgaaggccacataaatggcaccaagtgtctctgtctgccgatcagcatcccctcttggcttcacagcagacgcatctgcctttcaggactgccttgaacaacatctgggctggtcaggtggagagcgaggagtttccaggttgcagcccctatggtcctgagggctggcgtccaggatggtgggggtccagcagctctgggcagcgaggcccctggctgggtgatccaggtggcagctgaccagtggcctgggagccagccctcctgtcctcacgtggggccccatctccaaaagccagtgcagtgccctgcacattatccaacctacatctgtactgtctccccaaggaaaacgagtgtgtggttcacgtgctttaaggacgtttcccaggtgacattccaagctcccatctgtggccgcaagtgggggagtttccagttttccagatagattttctgccatgccagagaaccctccgcctccttcagagccatctcatcaatgcagtgatcgcaagcttcgatttacaaaaactcgcctcccttgcagcatttccaggtttcacacacagcgtaacaagtaaaaatggatttttgggcagcacgcctgtcctagtttgctgaggctgccataacaaagtaccagagactggggtggcgtcagcagcaaaagttgattcctcagttctggagctggaagtccaggatcaaggtgctgccaggttcggcttctccggaggcctcggtccctggtctgggaccttcttgctggggcctcggtccctggtgtgggaccttcttgctgggacctcggtccctggtgtgggaccttcttcctggccagcaagatggccgccttcttgctgggtcctcatgtggcctgttctctcggcacatgcatcccaggtgctcttcctcctctaatgaagacactagtcccatgggaccaaggcctcaccctgactagatggaaacttcattacctccgtaaaggccccgtctccaaatagccccactggggtcggggctttaccatgttgacctggggaagggggcagttcagttcgtaacatgcccttttgggaggagaaagtcaggcaatgagcagacacaggcaggaagccacgccgggctccagcagggatggcccagtgccctgtacaggcagcaggcagctgggctggaggtgggccctgggtggaggacacctaccaggtgtgtctaaactgcccctttcctacacatcttccttcgcactgggctcgccacccaagacctgctttttccagaaagcaaagcctactttggtcaaactctcatttttaaaaatcacttcatcttttcctccctaacttaattagctccaaagcactgagctgtattgaaatagatcaccacaatgacaatcctctttgggactgaaaacaaaatctatttcaacttgaacagggatattgatagaagacagggctccatgaaaaagggttaggaggagccgcttgctggggcaggggccgcatctgggcactgcagttaagatgttaaagtgtcttcggtcccagggggccgcagatgaacacagttcagcgtttctggatgtaaatcgtcaaagctccttcgatccccagcctcgggcaaggaaagggcctttctctctgtgatgccacctgtgctcaggtgtgcactggatggaactgtgtcctagacccctcagctgtgatattgatccgctgagattgtttttcatctgtagaaatcaataaattcctttttggtgcagtgttttgtgaacgggtgcactctctcacccggtcgctgtcctaagaattctccttgacttcggaactggccctccacgccccaggatccacctgccaggagacccccagtgtgctctcaaacccccacccatctgagtggcctggaaaggctggtctgaagacctctcttcccatgtctgccgaccaggctttgctctccagggactttctgggagggggagaacccacctcctgccaacggccctgctggcactccgaggacagcagagggaaggaagccaggggctggggagccggccacacaactgcccagtgcctatccttctcctgtgcccacagatgctgagctgcctggagcacatgtaccacgacctcgggctggtcagggacttcagcatcaaccctgtcaccctcaggaggtggctgttctgcgtccacgacaactacagaaacaaccccttccacaacttccggcactgcttctgcgtggcccagatgatgtacagcatggtctggctctgcagtctccaggagaagttctcacaaacggatatcctgatcctaatgacagcggccatctgccacgatctggaccatcccggctacaacaacacgtaccagatcaatgcccgcacagagctggcggtccgctacaatgacatctcaccgctggagaaccaccactgcgccgtggccttccagatcctcgccgagcctgagtgcaacatcttctccaacatcccacctgatgggttcaagcagatccgacagggaatgatcacattaatcttggccactgacatggcaagacatgcagaaattatggattctttcaaagagaaaatggagaattttgactacagcaacgaggagcacatgaccctgctgaagatgattttgataaaatgctgtgatatctctaacgaggtccgtccaatggaagtcgcagagccttgggtggactgtttattagaggaatattttatgcagagcgaccgtgagaagtcagaaggccttcctgtggcaccgttcatggaccgagacaaagtgaccaaggccacagcccagattgggttcatcaagtttgtcctgatcccaatgtttgaaacagtgaccaagctcttccccatggttgaggagatcatgctgcagccactttgggaatcccgagatcgctacgaggagctgaagcggatagatgacgccatgaaagagttacagaagaagactgacagcttgacgtctggggccaccgagaagtccagagagagaagcagagatgtgaaaaacagtgaaggagactgtgcctgaggaaagcggggggcgtggctgcagttctggacgggctggccgagctgcgcgggatccttgtgcagggaagagctgccctgggcacctggcaccacaagaccatgttttctaagaaccattttgttcactgatacaaaaaaaaaaaaaggaattcatgatgctgtacagaattttatttttaaactgtcttttaaataatatattcttatacgga

SEQ ID NO: 12311 - protein, 323 aa, Homo sapiens [sequence omitted]

SEQ ID NO: 12312 - DNA, 598 bp, Homo sapiens
tctgcaggacgctgctgccgtcctgggatacatccatccaactcacctctgcctatctctcagagcgaccgtgagaagtcagaaggccttcctgtggcaccgttcatggaccgagacaaagtgaccaaggccacagcccagattgggttcatcaagtttgtcctgatcccaatgtttgaaacagtgaccaagctcttccccatggttgaggagatcatgctgcagccactttgggaatcccgagatcgctacgaggagctgaagcggatagatgacgccatgaaagagttacagaagaagactgacagcttgacgtctggggccaccgagaagtccagagagagaagcagagatgtgaaaaacagtgaaggagactgtgcctgaggaaagcggggggcgtggctgcagttctggacgggctggccgagctgcgcgggatccttgtgcagggaagagctgccctgggcacctggcaccacaagaccatgttttctaagaaccattttgttcactgatacaaaaaaaaaaaaaggaattcatgatgctgtacagaattttatttttaaactgtcttttaaataatatattcttatacgga

SEQ ID NO: 12313 - protein, 92 aa, Homo sapiens
MDRDKVTKATAQIGFIKFVLIPMFETVTKLFPMVEEIMLQPLWESRDRYEELKRIDDAMKELQKKTDSLTSGATEKSRERSRDVKNSEGDCA

SEQ ID NO: 12314 - DNA, 3265 bp, Homo sapiens
cactcagatacatgcatgcacacacaggcacacaaaggcacacaggcacacacaggcacacaaatgcacacacaggcacacacacacacacacatgcacacaggtacacacaggcacacaaatgcacatgcaggtacacatgcacacacaggcacacacagggacacacaggcacacataggcacacaaatgcacacacaggcacacacatacacacatgcacacaggtacacgcaggcacacacgtacagaggcacacacatgcacacacaggtatgcacatgcacgcacacaggtacacacaggcacacctgcacacctgcacatcctgagcagcctcttccccggctgtcgtggtgaccgctgtccctgttccatccagagcctgctccccacagcctggcccgtgaccccagcatctcccactctgtgctgcactccctgccttgccttgctgggccctggggggcccctcactgccctcacccatcgctgccggccttcaggaccctggaggcagcactggctgtggactctcctgtccccactctgcgtcccagttcctcacctgtggaggaacccctgagctctgtgccctcgagctgtgaagcccctgtccagctcccagtctcaccgcacccagccaccgagaccttgctccttgcacacagctcgttcctgcccagctccccccagggcctctgagctgcctgtggccccctgccaaggcccccacctcaaggcacccccagcatgtccaaaacaggcccatctcttgttccccccggggatctgggctcacagcctcacaccctccgaccttcctgggctcctacgctgcgcatccttctgctctagggcatctcttggagccaacccacccacttcccactcccaggaccctcagccgggaggctgtcagctcctttcccctgccccgtgtctttgtaagaacctcccaacctgtcccccaccctcatctcacgggcacgggggacacaggaggcaggaaggggactttctgtaggacctcatggagggtgatgagggccagagacagagccgcagtgggtggaggcagcagagccggcacgagggtgtccaggagctgggactggcccagaggtttccgcacggagcacctgacacctgtttttctccgacgtttcccattgccttaagaacgagggactctgaataaatccgtgtgtctctcccagctcttccccatggttgaggagatcatgctgcagccactttgggaatcccgagatcgctacgaggagctgaagcggatagatgacgccatgaaagaggtaaaacacactgagaagagcctgccttccttgcggcaagcaggcacgctgccctccgcactcccgactccagaagcttggacgtgccaagcagggcaccactgaaggccccgtggacaggcacacgtgtaccttccatcagaaagcctggctcagtaaaattagggaatgcgatgagggaaaccaaaactgcattcgccaagaacacgtcaggtctcagtaccttcgagggagtttactggccgtgcccttcacaagaatcacaactgtcacccacacctgtggacacccaggtgtctttgggtgtatcagccgccgttagagcatctgggacccctcagagtacagtgcctggcctggccccagggctgacttgttcagaggaggccatggggtagaaaggggccctcccctggcacggggacaaagcgaccacccacctgccagctcccgggcccagaacacacaccggcacctctcaggggccagggagcctggggctggctttaggttgctgctggatagatatcattttggaggaaggggtccaggtcacagcctcagggcccacgcagtctttctacggattccccacggctgtctgctgtcctgctgcccatggtgtggcctctgcccctcccagcctcctgcctcctccctccagcgcccccaggcagctagaacagtcttactactcctgcagggtttgacccctcctggccttggccggtgttgcctctgccacccccgctccccacagtgccactgaagcaccctccaaggcccgtcagtcagggctcccctagttactgtgcccaccaccccgtcttttctgcctgggcgctcctgaagcccatgtggcccacaatgcccttttgagcactgagccattttccaggcgtagccttgggttggtctcatctccctcgactgacggccccgtgctccccatgcccacacccgcctggagcgccatgccaggcacatggtaggcgctcagcaattgcttaggagtccactgaaaatccagaccagctgccctgacttctccagttgatgtctcctactggaaagtcacagaaaggtctctaaacctctggaaggctgagagcacttatgcagagggacagatgtagcaagaaggcttcccccactccacaaccccgcaagagagctgaaggggcttctgcctctctcgtgggccctccgagagccatagccctgatggccttgagtctctagtcctgagccctgctgcccagtaggggatagtagggttccttaaggcctctgccttcccccctgtcagcccccacaaaaaggagagacacgccaaagaggtgaaaaggccaagcccaagccgcaggctctgcacacaccaccagtccccgcggctgtggtggctgcagctgggtgagctcactgtccaggccccagatgaggcaccaagggtagcgggacagggtatgcagagctgcctctgaaaagcccatgtcaggagtgcttgggctcagaggggctggggaccacaggctttcacgttgcagcacctccaggcaacagaagctgctgggagagaggcagacactcccctgctgtctcctgctccctgacttggccttctctgtactctgttccagttacagaagaagactgacagcttgacgtctggggccaccgagaagtccagagagagaagcagagatgtgaaaaacagtgaaggagactgtgcctgaggaaagcggggggcgtggctgcagttctggacgggctggccgagctgcgcgggatccttgtgcagggaagagctgccctgggcacctggcaccacaagaccatgttttctaagaaccattttgttcactgatacaaaaaaaaaaaaaggaattcatgatgctgtacagaattttatttttaaactgtcttttaaataatatattcttatacgg

SEQ ID NO: 12315 - protein, 114 aa, Homo sapiens
MHTQAHKGTQAHTGTQMHTQAHTHTHMHTGTHRHTNAHAGTHAHTGTHRDTQAHIGTQMHTQAHTYTHAHRYTQAHTYRGTHMHTQVCTCTHTGTHRHTCTPAHPEQPLPRLSW

SEQ ID NO: 12316 - DNA, 770 bp, Homo sapiens
acagacggcctgaggaccagccaggctcagaaactcctgacccagtgcagctgctcctgggactaacagaggaaaagctcaagggtttcgcaggagtggccatggcggtatctgggctcaaatctggctgcctccggctcgcggaaaacagtgtctgctgtctggggagcctgttcctggtgaagacaggaggataatgggatgcgctgttccattgccaacagtgtttttcttcgagaaggggaaaggacatggtactgattgagaacttctgggaacctcggggcaggtgagcagagtgggaggagcttgctggcagcagcgcctgtttcccacccggctggccgcagacctggcgctcagtgtggctcccgctcccacgggatgtatcgaaggaggcggctcagaggcagaagctgcgtcgccttcgcagccgcgcgtgcatgagattcagggtccggcccccgcagaattacaccggcgtgaacccggctcatcgtgagcttctgaggcaacacttgtgtttagtattttccatgatatgatgtctgcaaatacattcccatgagagggagcgtcggactgtcccgtccccatgtcgagcaggaaggaaccagaattaagaggagggtgtccaaggcggcagctcaccttgttttccagcttctcagaaacgctgagaaaaaacgaacatctctttgcagcggatggaagattgtatagtcttgctgtcccaaattctttggctaaaccaccagattttaaatatc

SEQ ID NO: 12317 - protein, 57 aa, Homo sapiens
MSSRKEPELRGGCPRRQLTLFSSFSETLRKNEHLFAADGRLYSLAVPNSLAKPPDFK

SEQ ID NO: 12318 - DNA, 2917 bp, Homo sapiens
gggacggcgacgcggcgcaggcggcgggagtgcgagctgggcccgtgtttcggccgccgccatggccgcggtggacctggagaagctgcgggcgtcgggcgcgggcaaggccatcggcgtcctgaccagcggcggcgacgcgcaaggcatgaacgctgctgtccgggctgtgacgcgcatgggcatttatgtgggtgccaaagtcttcctcatctacgagggctatgagggcctcgtggagggaggtgagaacatcaagcaggccaactggctgagcgtctccaacatcatccagctgggcggcactatcattggcagcgctcgctgcaaggcctttaccaccagggaggggcgccgggcagcggcctacaacctggtccagcacggcatcaccaacctgtgcgtcatcggcggggatggcagcctcacaggtgccaacatcttccgcagcgagtggggcagcctgctggaggagctggtggcggaaggtaagatctcagagactacagcccggacctactcgcacctgaacatcgcgggcctagtgggctccatcgataacgacttctgcggcaccgacatgaccatcggcacggactcggccctccaccgcatcatggaggtcatcgatgccatcaccaccactgcccagagccaccagaggaccttcgtgctggaagtgatgggccggcactgcgggtacctggcgctggtatctgcactggcctcaggggccgactggctgttcatccccgaggctccacccgaggacggctgggagaacttcatgtgtgagaggctgggtgagactcggagccgtgggtcccgactgaacatcatcatcatcgctgagggtgccattgaccgcaacgggaagcccatctcgtccagctacgtgaaggacctggtggttcagaggctgggcttcgacacccgtgtaactgtgctgggccacgtgcagcggggagggacgccctctgccttcgaccggatcctgagcagcaagatgggcatggaggcggtgatggcgctgctggaagccacgcctgacacgccggcctgcgtggtcaccctctcggggaaccagtcagtgcggctgcccctcatggagtgcgtgcagatgaccaaggaagtgcagaaagccatggatgacaagaggtttgacgaggccacccagctccgtggtgggagcttcgagaacaactggaacatttacaagctcctcgcccaccagaagccccccaaggagaagtctaacttctccctggccatcctgaatgtgggggccccggcggctggcatgaatgcggccgtgcgctcggcggtgcggaccggcatctcccatggacacacagtatacgtggtgcacgatggcttcgaaggcctagccaagggtcaggtgcaagaagtaggctggcacgacgtggccggctggttggggcgtggtggctccatgctggggaccaagaggaccctgcccaagggccagctggagtccattgtggagaacatccgcatctatggtattcacgccctgctggtggtcggtgggtttgaggcctatgaaggggtgctgcagctggtggaggctcgcgggcgctacgaggagctctgcatcgtcatgtgtgtcatcccagccaccatcagcaacaacgtccctggcaccgacttcagcctgggctccgacactgctgtaaatgccgccatggagagctgtgaccgcatcaaacagtctgcctcggggaccaagcgccgtgtgttcatcgtggagaccatggggggttactgtggctacctggccaccgtgactggcattgctgtgggggccgacgccgcctacgtcttcgaggaccctttcaacatccacgacttaaaggtcaacgtggagcacatgacggagaagatgaagacagacattcagaggggcctggtgctgcggaacgagaagtgccatgactactacaccacggagttcctgtacaacctgtactcatcagagggcaagggcgtcttcgactgcaggaccaatgtcctgggccacctgcagcagggtggcgctccaaccccctttgaccggaactatgggaccaagctgggggtgaaggccatgctgtggttgtcggagaagctgcgcgaggtttaccgcaagggacgggtgttcgccaatgccccagactcggcctgcgtgatcggcctgaagaagaaggcggtggccttcagccccgtcactgagctcaagaaagacactgatttcgagcaccgcatgccacgggagcagtggtggctgagcctgcggctcatgctgaagatgctggcacaataccgcatcagtatggccgcctacgtgtcaggggagctggagcacgtgacccgccgcaccctgagcatggacaagggcttctgaggccagccatgcccacgcccctccccagcccccacccatgccagcgcagcgccagggctcagatggggcctgggctgttgtgtctggagcctgcaggcaggtgggggctgcgtccctgctcagcccatcccctgcctctatccctggccacctgccaggcctccctcgggctggtgtcttgagaccagcctgccaggccctccagcaggaggacagagtgccctggggcatccaccttcctgcccaggggacgtggcgctgtcggtgtttggaggctgctgccccctggctttggcgccccatgggccctcagcgtctccccatgctgggctcactacatgggccagcccttgctctacctggccggtaggctgctggcgcctaggttgtgttgagagggggatgcccctggccctgcctcactgtgacctgctcctgcccacgtgcagcacctgtcaccttttctagaaataaaatcaccctgactgtggggtgcatcggtctccggagagc

SEQ ID NO: 12319 - protein, 780 aa, Homo sapiens; identical to SEQ ID NO: 2115

SEQ ID NO: 12320 - DNA, 750 bp, Homo sapiens
gacgcggcgcaggcggcgggagtgcgagctgggcccgtgtttcggccgccgccatggccgcggtggacctggagaagctgcgggcgtcgggcgcgggcaaggccatcggcgtcctgaccagcggcggcgacgcgcaaggcatgaacgctgctgtccgggctgtgacgcgcatgggcatttatgtgggtgccaaagtcttcctcatctacgagggctatgagggcctcgtggagggaggtgagaacatcaagcaggccaactggctgagcgtctccaacatcatccagctgggcggcactatcattggcagcgctcgctgcaaggcctttaccaccagggaggggcgccgggcagcggcctacaacctggtccagcacggcatcaccaacctgtgcgtcatcggcggggatggcagcctcacaggtgccaacatcttccgcagcgagtggggcagcctgctggaggagctggtggcggaaggtaagatctcagagactacagcccggacctactcgcacctgaacatcgcgggcctagtgggctccatcgataacgacttctgcggcaccgacatgaccatcggcacggactcggccctccaccgcatcatggaggtcatcgattcccccagagctgtgaccgcatcaaacagtctgcctcggggaccaagcgccgtgtgttcatcgtggagaccatggggggttactgtggctacctggccaccgtgactggcattgctgtgggggccga

SEQ ID NO: 12321 - protein, 224 aa, Homo sapiens
MAAVDLEKLRASGAGKAIGVLTSGGDAQGMNAAVRAVTRMGIYVGAKVFLIYEGYEGLVEGGENIKQANWLSVSNIIQLGGTIIGSARCKAFTTREGRRAAAYNLVQHGITNLCVIGGDGSLTGANIFRSEWGSLLEELVAEGKISETTARTYSHLNIAGLVGSIDNDFCGTDMTIGTDSALHRIMEVIDSPRAVTASNSLPRGPSAVCSSWRPWGVTVATWPP

SEQ ID NO: 12322 - DNA, 3352 bp, Homo sapiens
cgtgtttcggccgccgccatggccgcggtggacctggagaagctgcgggcgtcgggcgcgggcaaggccatcggcgtcctgaccagcggcggcgacgcgcaaggtcccctgacaagcccaccaggccccctgctgagatggctgtgaccctgggctgacccgcccagtggcacattgactccgcctggagctggggagaccagagaggccctgtggttggacggtggcctgggtgcgctgctcctgccctctccttgccctgcctcagctgctgcctgccagaggcgtggcacctcacctcacacctgctccctgctgctgagccccacgccaagctggagagcggatgagaagcatgtgtaaccagggtagaggtcgagagtcctctcgtgggggtctccatgttcaagggagctgccgaggcttgagcaggagcccccagcaggaaactggctttgccaaggcccccgctgggacagactgtttctttcactgcagtcctgggagccgagggcaaggggacaggaaagaggaagtgacctcagagcctggtggcaccagcatcatgtccaggctggggggcatgaacgctgctgtccgggctgtgacgcgcatgggcatttatgtgggtgccaaagtcttcctcatctacgagggctatgagggcctcgtggagggaggtgagaacatcaagcaggccaactggctgagcgtctccaacatcatccagctgggcggcactatcattggcagcgctcgctgcaaggcctttaccaccagggaggggcgccgggcagcggcctacaacctggtccagcacggcatcaccaacctgtgcgtcatcggcggggatggcagcctcacaggtgccaacatcttccgcagcgagtggggcagcctgctggaggagctggtggcggaaggtaagatctcagagactacagcccggacctactcgcacctgaacatcgcgggcctagtgggctccatcgataacgacttctgcggcaccgacatgaccatcggcacggactcggccctccaccgcatcatggaggtcatcgatgccatcaccaccactgcccagagccaccagaggaccttcgtgctggaagtgatgggccggcactgcgggtacctggcgctggtatctgcactggcctcaggggccgactggctgttcatccccgaggctccacccgaggacggctgggagaacttcatgtgtgagaggctgggtgagactcggagccgtgggtcccgactgaacatcatcatcatcgctgagggtgccattgaccgcaacgggaagcccatctcgtccagctacgtgaaggacctggtggttcagaggctgggcttcgacacccgtgtaactgtgctgggccacgtgcagcggggagggacgccctctgccttcgaccggatcctgagcagcaagatgggcatggaggcggtgatggcgctgctggaagccacgcctgacacgccggcctgcgtggtcaccctctcggggaaccagtcagtgcggctgcccctcatggagtgcgtgcagatgaccaaggaagtgcagaaagccatggatgacaagaggtttgacgaggccacccagctccgtggtgggagcttcgagaacaactggaacatttacaagctcctcgcccaccagaagccccccaaggagaagtctaacttctccctggccatcctgaatgtgggggccccggcggctggcatgaatgcggccgtgcgctcggcggtgcggaccggcatctcccatggacacacagtatacgtggtgcacgatggcttcgaaggcctagccaagggtcaggtgcaagaagtaggctggcacgacgtggccggctggttggggcgtggtggctccatgctggggaccaagaggaccctgcccaagggccagctggagtccattgtggagaacatccgcatctatggtattcacgccctgctggtggtcggtgggtttgaggcctatgaaggggtgctgcagctggtggaggctcgcgggcgctacgaggagctctgcatcgtcatgtgtgtcatcccagccaccatcagcaacaacgtccctggcaccgacttcagcctgggctccgacactgctgtaaatgccgccatggagagctgtgaccgcatcaaacagtctgcctcggggaccaagcgccgtgtgttcatcgtggagaccatggggggttactgtggctacctggccaccgtgactggcattgctgtgggggccgacgccgcctacgtcttcgaggaccctttcaacatccacgacttaaaggtcaacgtggagcacatgacggagaagatgaagacagacattcagaggggcctggtgctgcggaacgagaagtgccatgactactacaccacggagttcctgtacaacctgtactcatcagagggcaagggcgtcttcgactgcaggaccaatgtcctgggccacctgcagcagggtggcgctccaaccccctttgaccggaactatgggaccaagctgggggtgaaggccatgctgtggttgtcggagaagctgcgcgaggtttaccgcaagggacgggtgttcgccaatgccccagactcggcctgcgtgatcggcctgaagaagaaggcggtggccttcagccccgtcactgagctcaagaaagacactgatttcgagcaccgcatgccacgggagcagtggtggctgagcctgcggctcatgctgaagatgctggcacaataccgcatcagtatggccgcctacgtgtcaggggagctggagcacgtgacccgccgcaccctgagcatggacaagggcttctgaggccagccatgcccacgcccctccccagcccccacccatgccagcgcagcgccagggctcagatggggcctgggctgttgtgtctggagcctgcaggcaggtgggggctgcgtccctgctcagcccatcccctgcctctatccctggccacctgccaggcctccctcgggctggtgtcttgagaccagcctgccaggccctccagcaggaggacagagtgccctggggcatccaccttcctgcccaggggacgtggcgctgtcggtgtttggaggctgctgccccctggctttggcgccccatgggccctcagcgtctccccatgctgggctcactacatgggccagcccttgctctacctggccggtaggctgctggcgcctaggttgtgttgagagggggatgcccctggccctgcctcactgtgacctgctcctgcccacgtgcagcacctgtcaccttttctagaaataaaatcaccctgactgtggggtgcatcggtctccggagagc

SEQ ID NO: 12323 - protein, 830 aa, Homo sapiens
MRSMCNQGRGRESSRGGLHVQGSCRGLSRSPQQETGFAKAPAGTDCFFHCSPGSRGQGDRKEEVTSEPGGTSIMSRLGGMNAAVRAVTRMGIYVGAKVFLIYEGYEGLVEGGENIKQANWLSVSNIIQLGGTIIGSARCKAFTTREGRRAAAYNLVQHGITNLCVIGGDGSLTGANIFRSEWGSLLEELVAEGKISETTARTYSHLNIAGLVGSIDNDFCGTDMTIGTDSALHRIMEVIDAITTTAQSHQRTFVLEVMGRHCGYLALVSALASGADWLFIPEAPPEDGWENFMCERLGETRSRGSRLNIIIIAEGAIDRNGKPISSSYVKDLVVQRLGFDTRVTVLGHVQRGGTPSAFDRILSSKMGMEAVMALLEATPDTPACVVTLSGNQSVRLPLMECVQMTKEVQKAMDDKRFDEATQLRGGSFENNWNIYKLLAHQKPPKEKSNFSLAILNVGAPAAGMNAAVRSAVRTGISHGHTVYVVHDGFEGLAKGQVQEVGWHDVAGWLGRGGSMLGTKRTLPKGQLESIVENIRIYGIHALLVVGGFEAYEGVLQLVEARGRYEELCIVMCVIPATISNNVPGTDFSLGSDTAVNAAMESCDRIKQSASGTKRRVFIVETMGGYCGYLATVTGIAVGADAAYVFEDPFNIHDLKVNVEHMTEKMKTDIQRGLVLRNEKCHDYYTTEFLYNLYSSEGKGVFDCRTNVLGHLQQGGAPTPFDRNYGTKLGVKAMLWLSEKLREVYRKGRVFANAPDSACVIGLKKKAVAFSPVTELKKDTDFEHRMPREQWWLSLRLMLKMLAQYRISMAAYVSGELEHVTRRTLSMDKGF

SEQ ID NO: 12324 - DNA, 681 bp, Homo sapiens
ggcagatactctggctgctacgtgagaacagtgtgccgatccctggggtttctcaaggcgtggcacctcacctcacacctgctccctgctgctgagccccacgccaagctggagagcggatgagaagcatgtgtaaccagggtagaggtcgagagtcctctcgtgggggtctccatgttcaagggagctgccgaggcttgagcaggagcccccagcaggcatgaacgctgctgtccgggctgtgacgcgcatgggcatttatgtgggtgccaaagtcttcctcatctacgagggctatgagggcctcgtggagggaggtgagaacatcaagcaggccaactggctgagcgtctccaacatcatccagctgggcggcactatcattggcagcgctcgctgcaaggcctttaccaccagggaggggcgccgggcagcggcctacaacctggtccagcacggcatcaccaacctgtgcgtcatcggcggggatggcagcctcacaggtgccaacatcttccgcagcgagtggggcagcctgctggaggagctggtggcggaaggtaagatctcagagactacagcccggacctactcgcacctgaacatcgcgggcctagtgggctccatcgataacgacttctgcggcaccgacatgaccatcggcacggactcggccctcca

SEQ ID NO: 12325 - protein, 152 aa, Homo sapiens
MNAAVRAVTRMGIYVGAKVFLIYEGYEGLVEGGENIKQANWLSVSNIIQLGGTIIGSARCKAFTTREGRRAAAYNLVQHGITNLCVIGGDGSLTGANIFRSEWGSLLEELVAEGKISETTARTYSHLNIAGLVGSIDNDFCGTDMTIGTDSA

SEQ ID NO: 12326 - DNA, 6284 bp, Homo sapiens
ctggatgcaaggtcggcccacctggttccttcctgctctgtgtgagcagctcaggccctcactgagagtctgtttccccctgtaacatgcgggttcccgccttgcccaccacccagggtgcactggggcagggagggtggcacagctctcctgctggacctgcagcccatcttccgggtgtctgacctcacctgcactggcgccacctcctccaggtagccctccactcccaccacacccgggccctgtctgagctgctccaaccctgtccctgtaggaggcattgtggcccgtggtgggcaaacatggggcttgtggctcagagcgagtcccacaaatgttggctgggtcattgaagtggacggccgaaaagctctttcagttcccagagagctgggccgcggctggtgtgtggtgctgaggcagcagcctgaggctggcagaggggatggtgtgtcctatgtgcaccagtgtggacccacagtggcttcagggtgcagggtgtccggggagccctggctggtgccagcgatgcggggcccctggttataaggatgagcagatggaagctcacaggggccccaggtacctggcccaggctagcccgggcaggcccctctgccctgtgccccgtggagctgcagccctgtgcgtcttcccgcctggaaggcttcaccagacacaagggcccagccccagctgtgtgtgtgctgggcccagccccgagggcccccttcctcccctgctgcccttcccaggctttcgggcagagccctcttgttcaccgcctccaggagggcggggcgtcctagtgggcccagcctcatctctgccctcgcgctccaggcctgctttcctcctgctgggtggggattgtgccctggcccatgtgggttgggaatggtggccccagggagggctcctggcacccgggggctgtgtccggggcaggtttccctgcctggcagctgagccctgtcgtgtctttgacccagactcggagccgtgggtcccgactgaacatcatcatcatcgctgagggtgccattgaccgcaacgggaagcccatctcgtccagctacgtgaaggacctggtggttcagaggctgggcttcgacacccgtgtaactgtgctgggccacgtgcagcggggagggacgccctctgccttcgaccggatcctgagcagcaagatgggcatggaggcggtgatggcgctgctggaagccacgcctgacacgccggcctgcgtggtcaccctctcggggaaccagtcagtgcggctgcccctcatggagtgcgtgcagatgaccaaggaagtgcagaaagccatggatgacaagaggtttgacgaggccacccagctccgtggtgggtaagccccctcagcagacccctgcactcttacatggctgggtcccggtgccaggcagcatgtgctgcagtggcgctatgcacgcctggcctgggtcatccttctaggcaccgcgtctgaagatcgagggaggaaggggcctgcgggtggtacaggaggcgggctgggaggtgtggtaccacaggagaccctgggcggtggcacgggcagggcccagtgcacagggatctgggcatggcgaggggatgagaagctgtggatacaagcccaggacatggggtggccccgcgggggctgggaaggctggcagatgttgggtgtgggtaccacccccctgcaggcgtcctggcggccgggtcaggctggattggacgtctgggttcccatgcgtgcctccacccgctaccaaggtggccaaccctcccttgagctggatgccggccacgtgctttgctgcacgggctggcgtggcctcgtgttgtgttgggggtctcgcaccttctgtggaaggtgccctgcctggcatgcgcggtgtctgctgcctcatggctgagcttccatcgggccgtgtgcctgtgaccagcctcctgggctctgtcacggctgcgctgtggctgtacgccgtggcgctgcagggctgtgcatggtgtgacccgaatcccttccaggagcttcgagaacaactggaacatttacaagctcctcgcccaccagaagccccccaaggagaaggtgaggcagggagcggcgcccacagagggaggaacgggctcagttattctgcagcctcttcacgctggccccgtggctgggcctgcctgcccccaccttccctcctgctggggtccgagctgtgagctgggagggtgggcctgacctctgcctgggctcaggcaccactgtggctggcaggtcccgggtgctgggaccctggctgcagggctggctgttgcttctcagtggtggatggaaatgaagtcaggccacaggcttaactcaggagaggagaagccattgtgtagaaaatgtcccccggggccaggctcacacctgtaatcccagcactttggaaggctgaggtggccagttcacctgaggtcaggagttcgagaccagcctggccaacatggtgaaactccgtctctactaaaaatacaaaaattagctgggcgtggtggtggcacatgcctgtaatcacagctactcaggaggctgaggcaggagaatagcttgaacttgggaggtggagggtgcagtgagccgagatcgtgccattgcactccagcccgggcggcaagagtgaaactctgaaaataaaatgttcccaaacagctgaaaacctcaggaaatgggatctctccaaaataaggatgaaatggcttgtttctaaagtcctgggggacgagggtcctgtagagagagtcacggccagtgaggtcctggctcccaagccccttgagccacagccggagctgcaggccggggcagacagcgtggcccagcctgagtctggtcctcccttccatggacatctttgggtgtccctgctgctccagcctcctgcttatccccagagctagtcagcgggctctaccctccgtggtggggcaacctggtctccacgaacccagaacctggcaggggcgtgactggctttgtgggcagcagggctggctcgtaccaggacccagtggggccatgtggctatggagcccttgggtgtggctgctgccaagtgggatgtgctgcacgtgacaggtgcacgccaggttcagagcctcagcacggtgggtggaggggaggtggtggcggccgtcactggattcacatggatgtggtggggttttgggtccatcaggttaaattaactgtagtcctgatgggactgtctccatgtcttttcccttcccttaacgtggctactagaaaacaggatagccagggccccttccttactcgtggctgtgcaccccccaccctcccgcccgctgccagccccttgtgtgggcactgacctgtgttcccgcccgcaagcctggcttcacaacagtgctcgccccttctgcctcctctgttgcctgcgtgccagggggccaggcttgcaccgtgtctcttttggtcttcaccagaatcttctggaattagaacagataccgtattcccagggcagttgggcggtgtgctgggcagcgtccaggctgctggcagggcctggcccctttttccagaacctgccggcctgctgacctcctgtgcaggttgggggtcccctccccggctgtgcctcacgctcatctccccttctctctgaagtctaacttctccctggccatcctgaatgtgggggccccggcggctggcatgaatgcggccgtgcgctcggcggtgcggaccggcatctcccatggacacacagtatacgtggtgcacgatggcttcgaaggcctagccaagggtcaggtgcaagaagtaggctggcacgacgtggccggctggttggggcgtggtggctccatgctggggaccaagaggaccctgcccaagggccagctggagtccattgtggagaacatccgcatctatggtattcacgccctgctggtggtcggtgggtttgaggcctatgaaggggtgctgcagctggtggaggctcgcgggcgctacgaggagctctgcatcgtcatgtgtgtcatcccagccaccatcagcaacaacgtccctggcaccgacttcagcctgggctccgacactgctgtaaatgccgccatggagagctgtgaccgcatcaaacagtctgcctcggggaccaagcgccgtgtgttcatcgtggagaccatggggggttactgtggctacctggccaccgtgactggcattgctgtgggggccgacgccgcctacgtcttcgaggaccctttcaacatccacgacttaaaggtcaacgtggagcacatgacggagaagatgaagacagacattcagaggggcctggtgctgcggtgaggctgccgtgggtccctggccacagctgcgcgtccaactctcggggctggggtggggctgctgaggagcggctgggcaggagaaggcaggaggggtccttggagagggtgggccagggcggctttcctgggagctgccactccctctcccaggcctggcccagcggggactcaggatcggggggagacctgaactcgttcccgccgactcaggccctgctgcccctctcaggaacgagaagtgccatgactactacaccacggagttcctgtacaacctgtactcatcagagggcaagggcgtcttcgactgcaggaccaatgtcctgggccacctgcagcaggtgtggggcaggggtgaggctctgagaggcctgcccctctttcctgccaccatctgtccccggccccaggggtcccagccctcacgggcacccacgggcactcccggcaggccctcgggcacgtgtgcccttccccagtgaggggaccgaggcctgtatctaggtgaggtctcatttcaagaaggggtggggctggggctggagccggggcccgagccagggcattcacatgctgagccgagctccccacccctgccaggcctcccgcggccacttccgccgaacccctcacctagatccccgcatgctccctgccttatggtggccctgcaggaagcccgcgtcctggggttttctgagccagggaggggagtcagggtggctgggcatggggcccgaggtgatggggcccgaggtggggccgctggctgccgatgcagggcccaggagtcacttgacttggccaggggcagccgactgccggcctcgggaggcagcttctggcctggacttggagctggagagagcaggcagggtcctcgatcgggaacagacgggaacggtgcacgggttggaaggaatgggtgttcacaagctgcctgggaggctccccgtggggatcctgtctgcactggcgttggccttggcccaggcagcccaggggagtccagggaaccgggcctcacctgtttccagggtggcgctccaaccccctttgaccggaactatgggaccaagctgggggtgaaggccatgctgtggttgtcggagaagctgcgcgaggtttaccgcaagggacgggtgttcgccaatgccccagactcggcctgcgtgatcggcctgaagaagaaggcggtggccttcagccccgtcactgagctcaagaaagacactgatttcgagcaccgcatgccacgggagcagtggtggctgagcctgcggctcatgctgaagatgctggcacaataccgcatcagtatggccgcctacgtgtcaggggagctggagcacgtgacccgccgcaccctgagcatggacaagggcttctgaggccagccatgcccacgcccctccccagcccccacccatgccagcgcagcgccagggctcagatggggcctgggctgttgtgtctggagcctgcaggcaggtgggggctgcgtccctgctcagcccatcccctgcctctatccctggccacctgccaggcctccctcgggctggtgtcttgagaccagcctgccaggccctccagcaggaggacagagtgccctggggcatccaccttcctgcccaggggacgtggcgctgtcggtgtttggaggctgctgccccctggctttggcgccccatgggccctcagcgtctccccatgctgggctcactacatgggccagcccttgctctacctggccggtaggctgctggcgcctaggttgtgttgagagggggatgcccctggccctgcctcactgtgacctgctcctgcccacgtgcagcacctgtcaccttttctagaaataaaatcaccctgactgtggggtgcatcggtctccggagagc

SEQ ID NO: 12327 - protein, 243 aa, Homo sapiens
MVALQEARVLGFSEPGRGVRVAGHGARGDGARGGAAGCRCRAQESLDLARGSRLPASGGSFWPGLGAGESRQGPRSGTDGNGARVGRNGCSQAAWEAPRGDPVCTGVGLGPGSPGESREPGLTCFQGGAPTPFDRNYGTKLGVKAMLWLSEKLREVYRKGRVFANAPDSACVIGLKKKAVAFSPVTELKKDTDFEHRMPREQWWLSLRLMLKMLAQYRISMAAYVSGELEHVTRRTLSMDKGF

SEQ ID NO: 12328 - DNA, 1339 bp, Homo sapiens
cgaggccacccagctccgtggtgggtaagccccctcagcagacccctgcactcttacatggctgggtcccggtgccaggcagcatgtgctgcagtggcgctatgcacgcctggcctgggtcatccttctaggcaccgcgtctgaagatcgagggaggaaggggcctgcgggtggtacaggaggcgggctgggaggtgtggtaccacaggagaccctgggcggtggcacgggcagggcccagtgcacagggatctgggcatggcgaggggatgagaagctgtggatacaagcccaggacatggggtggccccgcgggggctgggaaggctggcagatgttgggtgtgggtaccacccccctgcaggcgtcctggcggccgggtcaggctggattggacgtctgggttcccatgcgtgcctccacccgctaccaaggtggccaaccctcccttgagctggatgccggccacgtgctttgctgcacgggctggcgtggcctcgtgttgtgttgggggtctcgcaccttctgtggaaggtgccctgcctggcatgcgcggtgtctgctgcctcatggctgagcttccatcgggccgtgtgcctgtgaccagcctcctgggctctgtcacggctgcgctgtggctgtacgccgtggcgctgcagggctgtgcatggtgtgacccgaatcccttccaggagcttcgagaacaactggaacatttacaagctcctcgcccaccagaagccccccaaggagaagtctaacttctccctggccatcctgaatgtgggggccccggcggctggcatgaatgcggccgtgcgctcggcggtgcggaccggcatctcccatggacacacagtatacgtggtgcacgatggcttcgaaggcctagccaagggtcaggtgcaagaagtaggctggcacgacgtggccggctggttggggcgtggtggctccatgctggggaccaagaggaccctgcccaagggccagctggagtccattgtggagaacatccgcatctatggtattcacgccctgctggtggtcggtgggtttgaggcctatgaaggggtgctgcagctggtggaggctcgcgggcgctacgaggagctctgcatcgtcatgtgtgtcatcccagccaccatcagcaacaacgtccctggcaccgacttcagcctgggctccgacactgctgtaaatgccgccatggagggtagccatgccgacggcctacagggaagggtgggcacgtggaggacccccgacccccccttgtcccccagagctgtgaccgcatcaaacagtctgcctcggggaccaagcgccgtgtgttcat

SEQ ID NO: 12329 - protein, 177 aa, Homo sapiens
MNAAVRSAVRTGISHGHTVYVVHDGFEGLAKGQVQEVGWHDVAGWLGRGGSMLGTKRTLPKGQLESIVENIRIYGIHALLVVGGFEAYEGVLQLVEARGRYEELCIVMCVIPATISNNVPGTDFSLGSDTAVNAAMEGSHADGLQGRVGTWRTPDPPLSPRAVTASNSLPRGPSAVC

SEQ ID NO: 12330 - DNA, 3352 bp, Homo sapiens
cgaggccacccagctccgtggtgggtaagccccctcagcagacccctgcactcttacatggctgggtcccggtgccaggcagcatgtgctgcagtggcgctatgcacgcctggcctgggtcatccttctaggcaccgcgtctgaagatcgagggaggaaggggcctgcgggtggtacaggaggcgggctgggaggtgtggtaccacaggagaccctgggcggtggcacgggcagggcccagtgcacagggatctgggcatggcgaggggatgagaagctgtggatacaagcccaggacatggggtggccccgcgggggctgggaaggctggcagatgttgggtgtgggtaccacccccctgcaggcgtcctggcggccgggtcaggctggattggacgtctgggttcccatgcgtgcctccacccgctaccaaggtggccaaccctcccttgagctggatgccggccacgtgctttgctgcacgggctggcgtggcctcgtgttgtgttgggggtctcgcaccttctgtggaaggtgccctgcctggcatgcgcggtgtctgctgcctcatggctgagcttccatcgggccgtgtgcctgtgaccagcctcctgggctctgtcacggctgcgctgtggctgtacgccgtggcgctgcagggctgtgcatggtgtgacccgaatcccttccaggagcttcgagaacaactggaacatttacaagctcctcgcccaccagaagccccccaaggagaagtctaacttctccctggccatcctgaatgtgggggccccggcggctggcatgaatgcggccgtgcgctcggcggtgcggaccggcatctcccatggacacacagtatacgtggtgcacgatggcttcgaaggcctagccaagggtcaggtgcaagaagtaggctggcacgacgtggccggctggttggggcgtggtggctccatgctggggaccaagaggaccctgcccaagggccagctggagtccattgtggagaacatccgcatctatggtattcacgccctgctggtggtcggtgggtttgaggcctatgaaggggtgctgcagctggtggaggctcgcgggcgctacgaggagctctgcatcgtcatgtgtgtcatcccagccaccatcagcaacaacgtccctggcaccgacttcagcctgggctccgacactgctgtaaatgccgccatggagagctgtgaccgcatcaaacagtctgcctcggggaccaagcgccgtgtgttcatcgtggagaccatggggggttactgtggctacctggccaccgtgactggcattgctgtgggggccgacgccgcctacgtcttcgaggaccctttcaacatccacgacttaaaggtcaacgtggagcacatgacggagaagatgaagacagacattcagaggggcctggtgctgcggtgaggctgccgtgggtccctggccacagctgcgcgtccaactctcggggctggggtggggctgctgaggagcggctgggcaggagaaggcaggaggggtccttggagagggtgggccagggcggctttcctgggagctgccactccctctcccaggcctggcccagcggggactcaggatcggggggagacctgaactcgttcccgccgactcaggccctgctgcccctctcaggaacgagaagtgccatgactactacaccacggagttcctgtacaacctgtactcatcagagggcaagggcgtcttcgactgcaggaccaatgtcctgggccacctgcagcaggtgtggggcaggggtgaggctctgagaggcctgcccctctttcctgccaccatctgtccccggccccaggggtcccagccctcacgggcacccacgggcactcccggcaggccctcgggcacgtgtgcccttccccagtgaggggaccgaggcctgtatctaggtgaggtctcatttcaagaaggggtggggctggggctggagccggggcccgagccagggcattcacatgctgagccgagctccccacccctgccaggcctcccgcggccacttccgccgaacccctcacctagatccccgcatgctccctgccttatggtggccctgcaggaagcccgcgtcctggggttttctgagccagggaggggagtcagggtggctgggcatggggcccgaggtgatggggcccgaggtggggccgctggctgccgatgcagggcccaggagtcacttgacttggccaggggcagccgactgccggcctcgggaggcagcttctggcctggacttggagctggagagagcaggcagggtcctcgatcgggaacagacgggaacggtgcacgggttggaaggaatgggtgttcacaagctgcctgggaggctccccgtggggatcctgtctgcactggcgttggccttggcccaggcagcccaggggagtccagggaaccgggcctcacctgtttccagggtggcgctccaaccccctttgaccggaactatgggaccaagctgggggtgaaggccatgctgtggttgtcggagaagctgcgcgaggtttaccgcaagggacgggtgttcgccaatgccccagactcggcctgcgtgatcggcctgaagaagaaggcggtggccttcagccccgtcactgagctcaagaaagacactgatttcgagcaccgcatgccacgggagcagtggtggctgagcctgcggctcatgctgaagatgctggcacaataccgcatcagtatggccgcctacgtgtcaggggagctggagcacgtgacccgccgcaccctgagcatggacaagggcttctgaggccagccatgcccacgcccctccccagcccccacccatgccagcgcagcgccagggctcagatggggcctgggctgttgtgtctggagcctgcaggcaggtgggggctgcgtccctgctcagcccatcccctgcctctatccctggccacctgccaggcctccctcgggctggtgtcttgagaccagcctgccaggccctccagcaggaggacagagtgccctggggcatccaccttcctgcccaggggacgtggcgctgtcggtgtttggaggctgctgccccctggctttggcgccccatgggccctcagcgtctccccatgctgggctcactacatgggccagcccttgctctacctggccggtaggctgctggcgcctaggttgtgttgagagggggatgcccctggccctgcctcactgtgacctgctcctgcccacgtgcagcacctgtcaccttttctagaaataaaatcaccctgactgtggggtgcatcggtctccggagagc

SEQ ID NO: 12331 - protein, 243 aa, Homo sapiens; identical to SEQ ID NO: 12327

SEQ ID NO: 12332 - DNA, 2421 bp, Homo sapiens
cgaggccacccagctccgtggtgggtaagccccctcagcagacccctgcactcttacatggctgggtcccggtgccaggcagcatgtgctgcagtggcgctatgcacgcctggcctgggtcatccttctaggcaccgcgtctgaagatcgagggaggaaggggcctgcgggtggtacaggaggcgggctgggaggtgtggtaccacaggagaccctgggcggtggcacgggcagggcccagtgcacagggatctgggcatggcgaggggatgagaagctgtggatacaagcccaggacatggggtggccccgcgggggctgggaaggctggcagatgttgggtgtgggtaccacccccctgcaggcgtcctggcggccgggtcaggctggattggacgtctgggttcccatgcgtgcctccacccgctaccaaggtggccaaccctcccttgagctggatgccggccacgtgctttgctgcacgggctggcgtggcctcgtgttgtgttgggggtctcgcaccttctgtggaaggtgccctgcctggcatgcgcggtgtctgctgcctcatggctgagcttccatcgggccgtgtgcctgtgaccagcctcctgggctctgtcacggctgcgctgtggctgtacgccgtggcgctgcagggctgtgcatggtgtgacccgaatcccttccaggagcttcgagaacaactggaacatttacaagctcctcgcccaccagaagccccccaaggagaagtctaacttctccctggccatcctgaatgtgggggccccggcggctggcatgaatgcggccgtgcgctcggcggtgcggaccggcatctcccatggacacacagtatacgtggtgcacgatggcttcgaaggcctagccaagggtcaggtgcaagaagtaggctggcacgacgtggccggctggttggggcgtggtggctccatgctggggaccaagaggaccctgcccaagggccagctggagtccattgtggagaacatccgcatctatggtattcacgccctgctggtggtcggtgggtttgaggcctatgaaggggtgctgcagctggtggaggctcgcgggcgctacgaggagctctgcatcgtcatgtgtgtcatcccagccaccatcagcaacaacgtccctggcaccgacttcagcctgggctccgacactgctgtaaatgccgccatggagagctgtgaccgcatcaaacagtctgcctcggggaccaagcgccgtgtgttcatcgtggagaccatggggggttactgtggctacctggccaccgtgactggcattgctgtgggggccgacgccgcctacgtcttcgaggaccctttcaacatccacgacttaaaggtcaacgtggagcacatgacggagaagatgaagacagacattcagaggggcctggtgctgcggaacgagaagtgccatgactactacaccacggagttcctgtacaacctgtactcatcagagggcaagggcgtcttcgactgcaggaccaatgtcctgggccacctgcagcagggtggcgctccaaccccctttgaccggaactatgggaccaagctgggggtgaaggccatgctgtggttgtcggagaagctgcgcgaggtttaccgcaagggacgggtgttcgccaatgccccagactcggcctgcgtgatcggcctgaagaagaaggcggtggccttcagccccgtcactgagctcaagaaagacactgatttcgagcaccgcatgccacgggagcagtggtggctgagcctgcggctcatgctgaagatgctggcacaataccgcatcagtatggccgcctacgtgtcaggggagctggagcacgtgacccgccgcaccctgagcatggacaagggcttctgaggccagccatgcccacgcccctccccagcccccacccatgccagcgcagcgccagggctcagatggggcctgggctgttgtgtctggagcctgcaggcaggtgggggctgcgtccctgctcagcccatcccctgcctctatccctggccacctgccaggcctccctcgggctggtgtcttgagaccagcctgccaggccctccagcaggaggacagagtgccctggggcatccaccttcctgcccaggggacgtggcgctgtcggtgtttggaggctgctgccccctggctttggcgccccatgggccctcagcgtctccccatgctgggctcactacatgggccagcccttgctctacctggccggtaggctgctggcgcctaggttgtgttgagagggggatgcccctggccctgcctcactgtgacctgctcctgcccacgtgcagcacctgtcaccttttctagaaataaaatcaccctgactgtggggtgcatcggtctccggagagc

SEQ ID NO: 12333 - protein, 367 aa, Homo sapiens [sequence omitted]

SEQ ID NO: 12334 - DNA, 2817 bp, Homo sapiens
ttagctgggcgtggtggtggcacatgcctgtaatcacagctactcaggaggctgaggcaggagaatagcttgaacttgggaggtggagggtgcagtgagccgagatcgtgccattgcactccagcccgggcggcaagagtgaaactctgaaaataaaatgttcccaaacagctgaaaacctcaggaaatgggatctctccaaaataaggatgaaatggcttgtttctaaagtcctgggggacgagggtcctgtagagagagtcacggccagtgaggtcctggctcccaagccccttgagccacagccggagctgcaggccggggcagacagcgtggcccagcctgagtctggtcctcccttccatggacatctttgggtgtccctgctgctccagcctcctgcttatccccagagctagtcagcgggctctaccctccgtggtggggcaacctggtctccacgaacccagaacctggcaggggcgtgactggctttgtgggcagcagggctggctcgtaccaggacccagtggggccatgtggctatggagcccttgggtgtggctgctgccaagtgggatgtgctgcacgtgacaggtgcacgccaggttcagagcctcagcacggtgggtggaggggaggtggtggcggccgtcactggattcacatggatgtggtggggttttgggtccatcaggttaaattaactgtagtcctgatgggactgtctccatgtcttttcccttcccttaacgtggctactagaaaacaggatagccagggccccttccttactcgtggctgtgcaccccccaccctcccgcccgctgccagccccttgtgtgggcactgacctgtgttcccgcccgcaagcctggcttcacaacagtgctcgccccttctgcctcctctgttgcctgcgtgccagggggccaggcttgcaccgtgtctcttttggtcttcaccagaatcttctggaattagaacagataccgtattcccagggcagttgggcggtgtgctgggcagcgtccaggctgctggcagggcctggcccctttttccagaacctgccggcctgctgacctcctgtgcaggttgggggtcccctccccggctgtgcctcacgctcatctccccttctctctgaagtctaacttctccctggccatcctgaatgtgggggccccggcggctggcatgaatgcggccgtgcgctcggcggtgcggaccggcatctcccatggacacacagtatacgtggtgcacgatggcttcgaaggcctagccaagggtcaggtgcaagaagtaggctggcacgacgtggccggctggttggggcgtggtggctccatgctggggaccaagaggaccctgcccaagggccagctggagtccattgtggagaacatccgcatctatggtattcacgccctgctggtggtcggtgggtttgaggcctatgaaggggtgctgcagctggtggaggctcgcgggcgctacgaggagctctgcatcgtcatgtgtgtcatcccagccaccatcagcaacaacgtccctggcaccgacttcagcctgggctccgacactgctgtaaatgccgccatggagagctgtgaccgcatcaaacagtctgcctcggggaccaagcgccgtgtgttcatcgtggagaccatggggggttactgtggctacctggccaccgtgactggcattgctgtgggggccgacgccgcctacgtcttcgaggaccctttcaacatccacgacttaaaggtcaacgtggagcacatgacggagaagatgaagacagacattcagaggggcctggtgctgcggaacgagaagtgccatgactactacaccacggagttcctgtacaacctgtactcatcagagggcaagggcgtcttcgactgcaggaccaatgtcctgggccacctgcagcagggtggcgctccaaccccctttgaccggaactatgggaccaagctgggggtgaaggccatgctgtggttgtcggagaagctgcgcgaggtttaccgcaagggacgggtgttcgccaatgccccagactcggcctgcgtgatcggcctgaagaagaaggcggtggccttcagccccgtcactgagctcaagaaagacactgatttcgagcaccgcatgccacgggagcagtggtggctgagcctgcggctcatgctgaagatgctggcacaataccgcatcagtatggccgcctacgtgtcaggggagctggagcacgtgacccgccgcaccctgagcatggacaagggcttctgaggccagccatgcccacgcccctccccagcccccacccatgccagcgcagcgccagggctcagatggggcctgggctgttgtgtctggagcctgcaggcaggtgggggctgcgtccctgctcagcccatcccctgcctctatccctggccacctgccaggcctccctcgggctggtgtcttgagaccagcctgccaggccctccagcaggaggacagagtgccctggggcatccaccttcctgcccaggggacgtggcgctgtcggtgtttggaggctgctgccccctggctttggcgccccatgggccctcagcgtctccccatgctgggctcactacatgggccagcccttgctctacctggccggtaggctgctggcgcctaggttgtgttgagagggggatgcccctggccctgcctcactgtgacctgctcctgcccacgtgcagcacctgtcaccttttctagaaataaaatcaccctgactgtggggtgcatcggtctccggagagc

SEQ ID NO: 12335 - protein, 367 aa, Homo sapiens [sequence omitted]

SEQ ID NO: 12336 - DNA, 1560 bp, Homo sapiens
cccttcccttaacgtggctactagaaaacaggatagccagggccccttccttactcgtggctgtgcaccccccaccctcccgcccgctgccagccccttgtgtgggcactgacctgtgttcccgcccgcaagcctggcttcacaacagtgctcgccccttctgcctcctctgttgcctgcgtgccagggggccaggcttgcaccgtgtctcttttggtcttcaccagaatcttctggaattagaacagataccgtattcccagggcagttgggcggtgtgctgggcagcgtccaggctgctggcagggcctggcccctttttccagaacctgccggcctgctgacctcctgtgcaggttgggggtcccctccccggctgtgcctcacgctcatctccccttctctctgaagtctaacttctccctggccatcctgaatgtgggggccccggcggctggcatgaatgcggccgtgcgctcggcggtgcggaccggcatctcccatggacacacagtatacgtggtgcacgatggcttcgaaggcctagccaagggtcaggtgcaagaagtaggctggcacgacgtggccggctggttggggcgtggtggctccatgctggggaccaagaggaccctgcccaagggccagctggagtccattgtggagaacatccgcatctatggtattcacgccctgctggtggtcggtgggtttgaggcctatgaaggggtgctgcagctggtggaggctcgcgggcgctacgaggagctctgcatcgtcatgtgtgtcatcccagccaccatcagcaacaacgtccctggcaccgacttcagcctgggctccgacactgctgtaaatgccgccatggagagctgtgaccgcatcaaacagtctgcctcggggaccaagcgccgtgtgttcatcgtggagaccatggggggttactgtggctacctggccaccgtgactggcattgctgtgggggccgacgccgcctacgtcttcgaggaccctttcaacatccacgacttaaaggtcaacgtggagcacatgacggagaagatgaagacagacattcagaggggcctggtgctgcggaacgagaagtgccatgactactacaccacggagttcctgtacaacctgtactcatcagagggcaagggcgtcttcgactgcaggaccaatgtcctgggccacctgcagcaggtgtggggcaggggtgaggctctgagaggcctgcccctctttcctgccaccatctgtccccggccccaggggtcccagccctcacgggcacccacgggcactcccggcaggccctcgggcacgtgtgcccttccccagtgaggggaccgaggcctgtatctaggtgaggtctcatttcaagaaggggtggggctggggctggagccggggcccgagccagggcattcacatgctgagccgagctccccacccctgccaggcctcccgcggccacttccgccgaacccctcacctagatccccgcatgctccctgccttatggtggccctgcaggaagcccgcgtcctgggg

SEQ ID NO: 12337 - protein, 296 aa, Homo sapiens
MNAAVRSAVRTGISHGHTVYVVHDGFEGLAKGQVQEVGWHDVAGWLGRGGSMLGTKRTLPKGQLESIVENIRIYGIHALLVVGGFEAYEGVLQLVEARGRYEELCIVMCVIPATISNNVPGTDFSLGSDTAVNAAMESCDRIKQSASGTKRRVFIVETMGGYCGYLATVTGIAVGADAAYVFEDPFNIHDLKVNVEHMTEKMKTDIQRGLVLRNEKCHDYYTTEFLYNLYSSEGKGVFDCRTNVLGHLQQVWGRGEALRGLPLFPATICPRPQGSQPSRAPTGTPGRPSGTCALPQ

SEQ ID NO: 12338 - DNA, 430 bp, Homo sapiens
agggcttctgaggccagccatgcccacgcccctccccagcccccacccatgcctctatccctggccacctgccaggcctccctcgggctggtgtcttgagaccagcctgccaggccctccagcaggaggacagagtgccctggggcatccaccttcctgcccaggggacgtggcgctgtcggtgtttggaggctgctgccccctggctttggcgccccatgggccctcagcgtctccccatgctgggctcactacatgggccagcccttgctctacctggccggtaggctgctggcgcctaggttgtgttgagagggggatgcccctggccctgcctcactgtgacctgctcctgcccacgtgcagcacctgtcaccttttctagaaataaaatcaccctgactgtggggtgcatcggtctccggagagc

SEQ ID NO: 12339 - protein, 121 aa, Homo sapiens
MPTPLPSPHPCLYPWPPARPPSGWCLETSLPGPPAGGQSALGHPPSCPGDVALSVFGGCCPLALAPHGPSASPHAGLTTWASPCSTWPVGCWRLGCVERGMPLALPHCDLLLPTCSTCHLF

SEQ ID NO: 12340 - DNA, 2001 bp, Homo sapiens
tgacctcccaggagttgcctcccttctcttgcccccgtgtgccaggtgggatttgtatgagcccctcctttgcttggatgcgacccgcagacagggtttgcagaggcccccccggtgccacgagccccctgaccctcacacgcctttgtctccctctcagcagcggcgcccaggatgaacgtggcctgaagccgccttcccggggccagtttccttccctctcagccagggatgcctcgagcagccacaggggcagggtgagtggcgggccgctaggggccgcggctgcctctgcccactgcacccactgcacagaaaccgtggggagggagcatggagcctcacagggccccgtggggagggagcatggagcctcacagggccttgaagagctgtgccccagggggagctgcgtgtgcgggtctgtgaatgcgcacacacgtgtaacacgtgccccgcacggagccgtcctggcccctcagcctctcctgctgtcctggtctgtggaatgtgggcccgggccctgctgggctgagggcaacaggagtcacgtggaagaggtgccacacacgcgtccacaggcggggctcctctgctcagattctccgagtgtgccgaacgtcctgactgccatcctgctgctgctgcgggagctggatgcagaggggctggaggccgtgcagcagactgtgggcagccggctgcaggccctgcgtggggaagaggtgcaggagcacgccgagtgaccgcaggacctgaacgccgctccagcctccacggggaccccagcgtcttccccagcccccgggagctggagggtggctgccatggccgcagccccggccccacacaaaagcctccccggtttgccacatcggccgagggcaggagtgggtgttaggtactggctaaccggggcggtggagatgcctgtctacaccagtcctgtccccaggactccccttctgtggtctggaggttctaggctggcctgggctcttaaagggaggattttgcaggctgtcctccctaataaaagattttcccaaggttgatctggaggtgacgtttcccaaggcatggttgtgacagtcttcctgaaagcaagggccgtttctccacagaatgaggaggtcttcacggatggctttgccgattccagcccttggtccttggatagatttctgttgggcaagggagacttcgagaatgctggcacccatagcgacatctgccctgagctgctcagcaggcaggcagcagcctcccgcacccatgggagagagttttgttttcttggccgggctgggcaggtgcgccttcctttctctctcctgtgaagaactgcaggagggccctcagctgtgaggttgtggatgaacaggcctgttcgccctggggtccgggcctggcacaggaagcagctagactaggggagtccttggagcatctgagaggggttttctttcctctgggaagagtcgcaagtcttatgaggatgccacaatctgggcagtgacccgtggccctggggaccttcctagtgccccccaaaaccaaggaagcattcacgtgagatggggagtcagccttccagctggtgtgtaggaaagccaggtccctgggcccttgtcccatgtggggttgagatccagatctccatgagatattcccatcctccgccgagcggtgatgcgtgaccgtgtgtgcaggccgctgttctcccaagctcggggccatgccgtgccaccgtcaccagagccagctgcagcactggggcagccactgtcgccggacttggggaagcccagggtgaagacagtcactcatccgtgcaagctctccagaagggatgcaagctctccagaaggggtgtgatctctgagcagtggggagtggagtcaccactcgggacatagagggtggacagttcaggcctgtgtctgcctccttgggactgtggagtgggtgccctcagtaaagcgctttgttggaatggtt

SEQ ID NO: 12341 - protein, 229 aa, Homo sapiens [sequence omitted]

SEQ ID NO: 12342 - DNA, 2486 bp, Homo sapiens
ctgggcccccccccatttcccggcccgcctttgccccgggtgccctgtgggctgggtctgttgtctggggttgccagcagtcactgggaccaagtcgaataggagagagaactgagctttccaggactgagtcaggaaacacgttggtaatcagtactgggggcggccgttcccagggtactcctagcaggtgacaggaagggacgtgggtgcggtgggacccaggcaggctgaaaggcaggtaatgctgagtctcactgagccaaggaagaccaggagcttccagaagagggagcctggagttgaggcctgcaagatctccagggttccctggggactcagcagagtgaccgcgccgtgtcaactggcctcaccgtgcaggcgggtgtgggggtcagcgagagcagacgcttcctcccaggggtgtccgcagactgcccagagggcagccgcctcacagattagagatggagtttcactgtgtcggccaggctggtctcaaaccccctgagttcaggtgatccacctgcctcagcctcgcaaagtattggaattacagatctccatttgccaggagatgcccagcctggaggtgatcacgctcagtgtcaacagcatctccaccctggagcctgtgagccggtgccagcgcctgagtgagctgtacctgcggaggaaccgcatccccagcctggctgagctcttctacctgaaggggctgccgcgtctgcgggtgctgtggctggccgagaacccgtgctgcggcaccagcccccaccgctaccgcatgaccgtgctgcgcaccctgccgcgcctacagaagctggacaaccaggctgtgacggaggaggagctgtcccgtgcactgagtgagggagaggagatcactgcggccccagagagagagggcacaggccacggcggccccaagctatgctgcacactgagctccctcagctccgctgctgagactggccgggacccgctggacagcgaggaggaggcaaccggcgcccaggatgaacgtggcctgaagccgccttcccggggccagtttccttccctctcagccagggatgcctcgagcagccacaggggcaggaacgtcctgactgccatcctgctgctgctgcgggagctggatgcagaggggctggaggccgtgcagcagactgtgggcagccggctgcaggccctgcgtggggaagaggtgcaggagcacgccgagtgaccgcaggacctgaacgccgctccagcctccacggggaccccagcgtcttccccagcccccgggagctggagggtggctgccatggccgcagccccggccccacacaaaagcctccccggtttgccacatcggccgagggcaggagtgggtgttaggtactggctaaccggggcggtggagatgcctgtctacaccagtcctgtccccaggactccccttctgtggtctggaggttctaggctggcctgggctcttaaagggaggattttgcaggctgtcctccctaataaaagattttcccaaggttgatctggaggtgacgtttcccaaggcatggttgtgacagtcttcctgaaagcaagggccgtttctccacagaatgaggaggtcttcacggatggctttgccgattccagcccttggtccttggatagatttctgttgggcaagggagacttcgagaatgctggcacccatagcgacatctgccctgagctgctcagcaggcaggcagcagcctcccgcacccatgggagagagttttgttttcttggccgggctgggcaggtgcgccttcctttctctctcctgtgaagaactgcaggagggccctcagctgtgaggttgtggatgaacaggcctgttcgccctggggtccgggcctggcacaggaagcagctagactaggggagtccttggagcatctgagaggggttttctttcctctgggaagagtcgcaagtcttatgaggatgccacaatctgggcagtgacccgtggccctggggaccttcctagtgccccccaaaaccaaggaagcattcacgtgagatggggagtcagccttccagctggtgtgtaggaaagccaggtccctgggcccttgtcccatgtggggttgagatccagatctccatgagatattcccatcctccgccgagcggtgatgcgtgaccgtgtgtgcaggccgctgttctcccaagctcggggccatgccgtgccaccgtcaccagagccagctgcagcactggggcagccactgtcgccggacttggggaagcccagggtgaagacagtcactcatccgtgcaagctctccagaagggatgcaagctctccagaaggggtgtgatctctgagcagtggggagtggagtcaccactcgggacatagagggtggacagttcaggcctgtgtctgcctccttgggactgtggagtgggtgccctcagtaaagcgctttgttggaatggtt

SEQ ID NO: 12343 - protein, 217 aa, Homo sapiens [sequence omitted]

SEQ ID NO: 12344 - DNA, 2231 bp, Homo sapiens
atgagcaggagcagagccaacgtgtcagcggcgcccaagcggccccagcgggctcgcgtcgccccgctctcctcaccgagccgccaatcggctcaggatccgcccctgacgacgcgggccccgcccctggagacacgcgccgcgcagtcgtcacccgcccgggatcaggaggccgggggcgcccgccggtcgggcctgggcggccgccatgaagctgacgcggaagatggttctgacccgggccaaggcctcggagctgcacagcgtgcgcaagctcaactgctggggcagccgcctcacagatatctccatttgccaggagatgcccagcctggaggtgatcacgctcagtgtcaacagcatctccaccctggagcctgtgagccggtgccagcgcctgagtgagctgtacctgcggaggaaccgcatccccagcctggctgagctcttctacctgaaggggctgccgcgtctgcgggtgctgtggctggccgagaacccgtgctgcggcaccagcccccaccgctaccgcatgaccgtgctgcgcaccctgccgcgcctacagaagctggacaaccaggctgtgacggaggaggagctgtcccgtgcactgagtgagggagaggagatcactgcggccccagagagagagggcacaggccacggcggccccaagctatgctgcacactgagctccctcagctccgctgctgagactggccgggacccgctggacagcgaggaggaggcaaccggcgcccaggatgaacgtggcctgaagccgccttcccggggccagtttccttccctctcagccagggatgcctcgagcagccacaggggcaggaacgtcctgactgccatcctgctgctgctgcgggagctggatgcagaggggctggaggccgtgcagcagactgtgggcagccggctgcaggccctgcgtggggaagaggtgcaggagcacgccgagtgaccgcaggacctgaacgccgctccagcctccacggggaccccagcgtcttccccagcccccgggagctggagggtggctgccatggccgcagccccggccccacacaaaagcctccccggtttgccacatcggccgagggcaggagtgggtgttaggtactggctaaccggggcggtggagatgcctgtctacaccagtcctgtccccaggactccccttctgtggtctggaggttctaggctggcctgggctcttaaagggaggattttgcaggctgtcctccctaataaaagattttcccaaggttgatctggaggtgacgtttcccaaggcatggttgtgacagtcttcctgaaagcaagggccgtttctccacagaatgaggaggtcttcacggatggctttgccgattccagcccttggtccttggatagatttctgttgggcaagggagacttcgagaatgctggcacccatagcgacatctgccctgagctgctcagcaggcaggcagcagcctcccgcacccatgggagagagttttgttttcttggccgggctgggcaggtgcgccttcctttctctctcctgtgaagaactgcaggagggccctcagctgtgaggttgtggatgaacaggcctgttcgccctggggtccgggcctggcacaggaagcagctagactaggggagtccttggagcatctgagaggggttttctttcctctgggaagagtcgcaagtcttatgaggatgccacaatctgggcagtgacccgtggccctggggaccttcctagtgccccccaaaaccaaggaagcattcacgtgagatggggagtcagccttccagctggtgtgtaggaaagccaggtccctgggcccttgtcccatgtggggttgagatccagatctccatgagatattcccatcctccgccgagcggtgatgcgtgaccgtgtgtgcaggccgctgttctcccaagctcggggccatgccgtgccaccgtcaccagagccagctgcagcactggggcagccactgtcgccggacttggggaagcccagggtgaagacagtcactcatccgtgcaagctctccagaagggatgcaagctctccagaaggggtgtgatctctgagcagtggggagtggagtcaccactcgggacatagagggtggacagttcaggcctgtgtctgcctccttgggactgtggagtgggtgccctcagtaaagcgctttgttggaatggtt

SEQ ID NO: 12345 - protein, 255 aa, Homo sapiens
MKLTRKMVLTRAKASELHSVRKLNCWGSRLTDISICQEMPSLEVITLSVNSISTLEPVSRCQRLSELYLRRNRIPSLAELFYLKGLPRLRVLWLAENPCCGTSPHRYRMTVLRTLPRLQKLDNQAVTEEELSRALSEGEEITAAPEREGTGHGGPKLCCTLSSLSSAAETGRDPLDSEEEATGAQDERGLKPPSRGQFPSLSARDASSSHRGRNVLTAILLLLRELDAEGLEAVQQTVGSRLQALRGEEVQEHAE

SEQ ID NO: 12346 - DNA, 556 bp, Homo sapiens
gccacatcggccgagggcaggagtgggtgttaggtactggctaaccggggcggtggagatgcctgtctacaccagtcctgtccccaggactccccttctgtggtctggaggttctaggctggcctgggctcttaaagggaggattttgcaggctgtcctccctaataaaagattttcccaaggttgatctggaggtgacgtttcccaaggcatggttgtgacagtcttcctgaaagcaagggccgtttctccacagaatgaggaggtcttcacggatggctttgccgattccagcccttggtccttggatagatttctgttgggcaagggagacttcgagaatgctggcacccatagcgacatctgccctgagctgctcagcaggcaggcagcagctctccagaagggatgcaagctctccagaaggggtgtgatctctgagcagtggggagtggagtcaccactcgggacatagagggtggacagttcaggcctgtgtctgcctccttgggactgtggagtgggtgccctcagtaaagcgctttgttggaatggt

SEQ ID NO: 12347 - protein, 87 aa, Homo sapiens
MVVTVFLKARAVSPQNEEVFTDGFADSSPWSLDRFLLGKGDFENAGTHSDICPELLSRQAAALQKGCKLSRRGVISEQWGVESPLGT

SEQ ID NO: 12348 - DNA, 1040 bp, Homo sapiens
cacggggaccccagcgtcttccccagcccccgggagctggagggtggctgccatggccgcagccccggccccacacaaaagcctccccggtttgccacatcggccgagggcaggagtgggtgttaggtactggctaaccggggcggtggagatgcctgtctacaccagtcctgtccccaggactccccttctgtggtctggaggttctaggctggcctgggctcttaaagggaggattttgcaggctgtcctccctaataaaagattttcccaaggttgatctggaggtgacgtttcccaaggcatggttgtgacagtcttcctgaaagcaagggccgtttctccacagaatgaggaggtcttcacggatggctttgccgattccagcccttggtccttggatagatttctgttgggcaagggagacttcgagaatgctggcacccatagcgacatctgccctgagctgctcagcaggcaggcagcagcctcccgcacccatgggagagagttttgttttcttggccgggctgggcaggtgcgccttcctttctctctcctgtgaagaactgcaggagggccctcagctgtgaggttgtggatgaacaggcctgttcgccctggggtccgggcctggcacaggaagcagctagactaggggagtccttggagcatctgagaggggttttctttcctctgggaagagtcgcaagtcttatgaggatgccacaatctgggcagtgacccgtggccctggggaccttcctagtgccccccaaaaccaaggaagcattcacgtgagatggggagtcagccttccagctggtgtgtaggaaagccaggtccctgggcccttgtcccatgtggggttgagatccagatctccatgaggatgcaagctctccagaaggggtgtgatctctgagcagtggggagtggagtcaccactcgggacatagagggtggacagttcaggcctgtgtctgcctccttgggactgtggagtgggtgccctcagtaaagcgctttgttggaatggt

SEQ ID NO: 12349 - protein, 40 aa, Homo sapiens
MGSQPSSWCVGKPGPWALVPCGVEIQISMRMQALQKGCDL

SEQ ID NO: 12350 - DNA, 987 bp, Homo sapiens
cagaacgtcctgactgccatcctgctgctgctgcgggagctggatgcagaggggctggaggccgtgcagcagactgtgggcagccggctgcaggccctgcgtggggaagaggtgcaggagcacgccgagtgaccgcaggacctgaacgccgctccagcctccacggggaccccagcgtcttccccagcccccgggagctggagggtggctgccatggccgcagccccggccccacacaaaagcctccccggtttgccacatcggccgagggcaggagtgggtgttaggtactggctaaccggggcggtggagatgcctgtctacaccagtcctgtccccaggactccccttctgtggtctggaggttctaggctggcctgggctcttaaagggaggattttgcaggctgtcctccctaataaaagattttcccaaggttgatctggaggtgacgtttcccaaggcatggttgtgacagtcttcctgaaagcaagggccgtttctccacagaatgaggaggtcttcacggatggctttgccgattccagcccttggtccttggatagatttctgttgggcaagggagacttcgagaatgctggcacccatagcgacatctgccctgagctgctcagcaggcaggcagcagcctcccgcacccatgggagagagttttgttttcttggccgggctgggcaggccgctgttctcccaagctcggggccatgccgtgccaccgtcaccagagccagctgcagcactggggcagccactgtcgccggacttggggaagcccagggtgaagacagtcactcatccgtgcaagctctccagaagggatgcaagctctccagaaggggtgtgatctctgagcagtggggagtggagtcaccactcgggacatagagggtggacagttcaggcctgtgtctgcctccttgggactgtggagtgggtgccctcagtaaagcgctttgttggaatggt

SEQ ID NO: 12351 - protein, 146 aa, Homo sapiens [sequence omitted]

SEQ ID NO: 12352 - DNA, 961 bp, Homo sapiens
ccgggccctgctgggctgagggcaacaggagtcacgtggaagaggtgccacacacgcgtccacaggcggggctcctctgctcagattctccgagtgtgccggtcagtcacttggacggcccacacccccgggaccagtcgctccgtggtggggcaccgctggccaggccccagcccttgtggagggaagcagcctcgccgtgccgggtgggcttagtccgcacccctctgccctcagaacgtcctgactgccatcctgctgctgctgcgggagctggatgcagaggggctggaggccgtgcagcagactgtgggcagccggctgcaggccctgcgtggggaagaggtgcaggagcacgccgagtgaccgcaggacctgaacgccgctccagcctccacggggaccccagcgtcttccccagcccccgggagctggagggtggctgccatggccgcagccccggccccacacaaaagcctccccgaatgaggaggtcttcacggatggctttgccgattccagcccttggtccttggatagatttctgttgggcaagggagacttcgagaatgctggcacccatagcgacatctgccctgagctgctcagcaggcaggcagcagcctcccgcacccatgggagagagttttgttttcttggccgggctgggcaggccgctgttctcccaagctcggggccatgccgtgccaccgtcaccagagccagctgcagcactggggcagccactgtcgccggacttggggaagcccagggtgaagacagtcactcatccgtgcaagctctccagaagggatgcaagctctccagaaggggtgtgatctctgagcagtggggagtggagtcaccactcgggacatagagggtggacagttcaggcctgtgtctgcctccttgggactgtggagtgggtgccctcagtaaagcgctttgttggaatggt

SEQ ID NO: 12353 - protein, 117 aa, Homo sapiens
MRRSSRMALPIPALGPWIDFCWARETSRMLAPIATSALSCSAGRQQPPAPMGESFVFLAGLGRPLFSQARGHAVPPSPEPAAALGQPLSPDLGKPRVKTVTHPCKLSRRDASSPEGV

SEQ ID NO: 12354 - DNA, 1060 bp, Homo sapiens
tgacctcccaggagttgcctcccttctcttgcccccgtgtgccaggtgggatttgtatgagcccctcctttgcttggatgcgacccgcagacagggtttgcagaggcccccccggtgccacgagccccctgaccctcacacgcctttgtctccctctcagcagcggcgcccaggatgaacgtggcctgaagccgccttcccggggccagtttccttccctctcagccagggatgcctcgagcagccacaggggcagggtgagtggcgggccgctaggggccgcggctgcctctgcccactgcacccactgcacagaaaccgtggggagggagcatggagcctcacagggccccgtggggagggagcatggagcctcacagggccttgaagagctgtgccccagggggagctgcgtgtgcgggtctgtgaatgcgcacacacgtgtaacacgtgccccgcacggagccgtcctggcccctcagcctctcctgctgtcctggtctgtggaatgtgggcccgggccctgctgggctgagggcaacaggagtcacgtggaagaggtgccacacacgcgtccacaggcggggctcctctgctcagattctccgagtgtgccgaacgtcctgactgccatcctgctgctgctgcgggagctggatgcagaggggctggaggccgtgcagcagactgtgggcagccggctgcaggccctgcgtggggaagaggtgcaggagcacgccgagtgaccgcaggacctgaacgccgctccagcctccacggggaccccagcgtcttccccagcccccgggagctggagggtggctgccatggccgcagccccggccccacacaaaagcctccccggtttgccacatcggccgagggcaggagtgggtgttaggtactggctaaccggggcggtggagatgcctgtctacaccagtcctgtccccaggactccccttctgtggtctggaggttctaggctggcctgggctcttaaagggaggattttgcaggctgtcctccctaataaaagattttcccaaggttgatctgg

SEQ ID NO: 12355 - protein, 229 aa, Homo sapiens [sequence omitted]

SEQ ID NO: 12356 - DNA, 1545 bp, Homo sapiens
ctgggcccccccccatttcccggcccgcctttgccccgggtgccctgtgggctgggtctgttgtctggggttgccagcagtcactgggaccaagtcgaataggagagagaactgagctttccaggactgagtcaggaaacacgttggtaatcagtactgggggcggccgttcccagggtactcctagcaggtgacaggaagggacgtgggtgcggtgggacccaggcaggctgaaaggcaggtaatgctgagtctcactgagccaaggaagaccaggagcttccagaagagggagcctggagttgaggcctgcaagatctccagggttccctggggactcagcagagtgaccgcgccgtgtcaactggcctcaccgtgcaggcgggtgtgggggtcagcgagagcagacgcttcctcccaggggtgtccgcagactgcccagagggcagccgcctcacagattagagatggagtttcactgtgtcggccaggctggtctcaaaccccctgagttcaggtgatccacctgcctcagcctcgcaaagtattggaattacagatctccatttgccaggagatgcccagcctggaggtgatcacgctcagtgtcaacagcatctccaccctggagcctgtgagccggtgccagcgcctgagtgagctgtacctgcggaggaaccgcatccccagcctggctgagctcttctacctgaaggggctgccgcgtctgcgggtgctgtggctggccgagaacccgtgctgcggcaccagcccccaccgctaccgcatgaccgtgctgcgcaccctgccgcgcctacagaagctggacaaccaggctgtgacggaggaggagctgtcccgtgcactgagtgagggagaggagatcactgcggccccagagagagagggcacaggccacggcggccccaagctatgctgcacactgagctccctcagctccgctgctgagactggccgggacccgctggacagcgaggaggaggcaaccggcgcccaggatgaacgtggcctgaagccgccttcccggggccagtttccttccctctcagccagggatgcctcgagcagccacaggggcaggaacgtcctgactgccatcctgctgctgctgcgggagctggatgcagaggggctggaggccgtgcagcagactgtgggcagccggctgcaggccctgcgtggggaagaggtgcaggagcacgccgagtgaccgcaggacctgaacgccgctccagcctccacggggaccccagcgtcttccccagcccccgggagctggagggtggctgccatggccgcagccccggccccacacaaaagcctccccggtttgccacatcggccgagggcaggagtgggtgttaggtactggctaaccggggcggtggagatgcctgtctacaccagtcctgtccccaggactccccttctgtggtctggaggttctaggctggcctgggctcttaaagggaggattttgcaggctgtcctccctaataaaagattttcccaaggttgatctgg

SEQ ID NO: 12357 - protein, 217 aa, Homo sapiens [sequence omitted]

SEQ ID NO: 12358 - DNA, 1290 bp, Homo sapiens
atgagcaggagcagagccaacgtgtcagcggcgcccaagcggccccagcgggctcgcgtcgccccgctctcctcaccgagccgccaatcggctcaggatccgcccctgacgacgcgggccccgcccctggagacacgcgccgcgcagtcgtcacccgcccgggatcaggaggccgggggcgcccgccggtcgggcctgggcggccgccatgaagctgacgcggaagatggttctgacccgggccaaggcctcggagctgcacagcgtgcgcaagctcaactgctggggcagccgcctcacagatatctccatttgccaggagatgcccagcctggaggtgatcacgctcagtgtcaacagcatctccaccctggagcctgtgagccggtgccagcgcctgagtgagctgtacctgcggaggaaccgcatccccagcctggctgagctcttctacctgaaggggctgccgcgtctgcgggtgctgtggctggccgagaacccgtgctgcggcaccagcccccaccgctaccgcatgaccgtgctgcgcaccctgccgcgcctacagaagctggacaaccaggctgtgacggaggaggagctgtcccgtgcactgagtgagggagaggagatcactgcggccccagagagagagggcacaggccacggcggccccaagctatgctgcacactgagctccctcagctccgctgctgagactggccgggacccgctggacagcgaggaggaggcaaccggcgcccaggatgaacgtggcctgaagccgccttcccggggccagtttccttccctctcagccagggatgcctcgagcagccacaggggcaggaacgtcctgactgccatcctgctgctgctgcgggagctggatgcagaggggctggaggccgtgcagcagactgtgggcagccggctgcaggccctgcgtggggaagaggtgcaggagcacgccgagtgaccgcaggacctgaacgccgctccagcctccacggggaccccagcgtcttccccagcccccgggagctggagggtggctgccatggccgcagccccggccccacacaaaagcctccccggtttgccacatcggccgagggcaggagtgggtgttaggtactggctaaccggggcggtggagatgcctgtctacaccagtcctgtccccaggactccccttctgtggtctggaggttctaggctggcctgggctcttaaagggaggattttgcaggctgtcctccctaataaaagattttcccaaggttgatctgg

SEQ ID NO: 12359 - protein, 255 aa, Homo sapiens; identical to SEQ ID NO: 12345

SEQ ID NO: 12360 - DNA, 1650 bp, Homo sapiens
atgagcaggagcagagccaacgtgtcagcggcgcccaagcggccccagcgggctcgcgtcgccccgctctcctcaccgagccgccaatcggctcaggatccgcccctgacgacgcgggccccgcccctggagacacgcgccgcgcagtcgtcacccgcccgggatcaggaggccgggggcgcccgccggtcgggcctgggcggccgccatgaagctgacgcggaagatggttctgacccgggccaaggcctcggagctgcacagcgtgcgcaagctcaactgctggggcagccgcctcacagatatctccatttgccaggagatgcccagcctggaggtgatcacgctcagtgtcaacagcatctccaccctggagcctgtgagccggtgccagcgcctgagtgagctgtacctgcggaggaaccgcatccccagcctggctgagctcttctacctgaaggggctgccgcgtctgcgggtgctgtggctggccgagaacccgtgctgcggcaccagcccccaccgctaccgcatgaccgtgctgcgcaccctgccgcgcctacagaagctggacaaccaggctgtgacggaggaggagctgtcccgtgcactgagtgagggagaggagatcactgcggccccagagagagagggcacaggccacggcggccccaagctatgctgcacactgagctccctcagctccgctgctgagactggccgggacccgctggacagcgaggaggaggcaaccggcgcccaggatgaacgtggcctgaagccgccttcccggggccagtttccttccctctcagccagggatgcctcgagcagccacaggggcagggtgagtggcgggccgctaggggccgcggctgcctctgcccactgcacccactgcacagaaaccgtggggagggagcatggagcctcacagggccccgtggggagggagcatggagcctcacagggccttgaagagctgtgccccagggggagctgcgtgtgcgggtctgtgaatgcgcacacacgtgtaacacgtgccccgcacggagccgtcctggcccctcagcctctcctgctgtcctggtctgtggaatgtgggcccgggccctgctgggctgagggcaacaggagtcacgtggaagaggtgccacacacgcgtccacaggcggggctcctctgctcagattctccgagtgtgccgaacgtcctgactgccatcctgctgctgctgcgggagctggatgcagaggggctggaggccgtgcagcagactgtgggcagccggctgcaggccctgcgtggggaagaggtgcaggagcacgccgagtgaccgcaggacctgaacgccgctccagcctccacggggaccccagcgtcttccccagcccccgggagctggagggtggctgccatggccgcagccccggccccacacaaaagcctccccggtttgccacatcggccgagggcaggagtgggtgttaggtactggctaaccggggcggtggagatgcctgtctacaccagtcctgtccccaggactccccttctgtggtctggaggttctaggctggcctgggctcttaaagggaggattttgcaggctgtcctccctaataaaagattttcccaaggttgatctgg

SEQ ID NO: 12361 - protein, 375 aa, Homo sapiens
MKLTRKMVLTRAKASELHSVRKLNCWGSRLTDISICQEMPSLEVITLSVNSISTLEPVSRCQRLSELYLRRNRIPSLAELFYLKGLPRLRVLWLAENPCCGTSPHRYRMTVLRTLPRLQKLDNQAVTEEELSRALSEGEEITAAPEREGTGHGGPKLCCTLSSLSSAAETGRDPLDSEEEATGAQDERGLKPPSRGQFPSLSARDASSSHRGRVSGGPLGAAAASAHCTHCTETVGREHGASQGPVGREHGASQGLEELCPRGSCVCGSVNAHTRVTRAPHGAVLAPQPLLLSWSVECGPGPCWAEGNRSHVEEVPHTRPQAGLLCSDSPSVPNVLTAILLLLRELDAEGLEAVQQTVGSRLQALRGEEVQEHAE

SEQ ID NO: 12362 - DNA, 4516 bp, Homo sapiens
ctcctgaccatggggtcaggccctgtgccggatggcagatgcctaacagagatcacatcccgatgcccccaccacaggcaccagcagcgggtgtgatctgccaagcaggagagaagtgcccagcttctgtcaaatgcgttcgtgacccgctgccaactgccctgggaggcgccggcgtctcactgcagagtcagccctgtggcccctccacggcccccaggcccaaggccatacgggcactgatggccgtgcccacaaaccattccagtcactgtggccctaggccaccccccccaccaggggctccctgcacctcacgagctctggtgctgtgagccttctctgtgccagggcacggggcctggctcaccccctctcctgctccctggcacatccgctgttgggcaaaacatggacctgccactgaaatcactacctgggcactgagtcactcccagagaatatggatgagaacagacactccccccggataatccctgtccctcacttcccagagacgcagctcacgggaagccccattcactccccgtgggaggaccctgggggacagggatgggctgcggagtccccgctgccctccagcctcacgttgcctcctcctcgctgtccagcgggtcccggccagtctcagcagcggagctgagggagctcagtgtgcagcatagcttggggccgccgtggcctgtgccctctctctctggggccgcagtgatctcctctccctcactcagtgcacgggacagctcctcctccgtcacagctttgggatgaaagacagaagacagcatgagtggcctcacccacgtgcaggccacatgcactgcagctcccgtcctcactgtggcttcaggcacagtctgcttgtgaaatgcatgcacgtgtatccacctccagggacaactcccagagtagcagccggttcctcactgtcccatccccagcctggcacaggctgacacacaacagatggtggagggctgctcaggaatctcaacaccagccttggccagaagcaaatactcctcaaaacctcaactaagacacaatagaaaaaggaacagaccatattgaatttattccatttctctcatatatcaatttccctgaagtttatattattaatatcaataaaattgtctgggagaaaatagtggtgtctgtatacctgacaaggatgagacactagtgtgctgagaatgccaaggatgaacaaacagcatgaaaccacagcctggaaaactgtgtcggtgctggcgctggctagaggaggcacgagtgcctccaataggtggagcgcagcagcaggcactgcggtgctgggacggcccctccccacggcaggggcgcgatggcaccgccaccctaggttcacagtggcccgtggagcctgcccagtccctgtggaccagtgcgatgctgcttgccagatactgacgcccccgctcgccatggcgcatggcgatggtcagagcagggctgctactcacagaagcaaaagaaggaacccttttgctttgctaccaggtcctgcggtcgttgggggatacccaaactgtcagtcccaggagggaccctacgctgcgctgctgcattcgggtggcgggatcaagaggagacacagaagccaggggaacagcctctggaggagacttcacaggacacatctatgtcccgccagaccaggtacagctcactcaggcgctggcaccggctcacaggctccagggtggagatgctgttgacactgcacggagaccagcacagtcagcgagggacgtggccagggcccccagggccacctctcaatccccacccccagtaaaaggcactcatgggacctgtgtccctgccctctcctgagaagcctaaatcggatgtcacaagtcacgtgcagcaggacctgggccgaggagagagctgtaggaaggccaggccctgaactcaaaggcggactggggtggaccccaccagcaacagccccttggcccgacgctccacatcagctcctcagggcgctagagtgcgggaggtgggggatgtggccctccttcacaggtgaggaaaattaaggcctctcaggggacatatcatgttgccccaaagcagggagcggccagaaaaactcatggcaaaaactaggagccagctccacgtgacatgggagtgagcacggaccttccaaacccccacttgagggcggcaacactggggatgggcctcatttccattctacagaacgtggacgcgtcagagaagagaaacagcaggcctggagcggggacctgcaggctttaccctgcagcgtggggtccgtcccctccacaagcgaacacgcggagccgctcccgcaggccctcaaaggcgcggagccagggccccctgcctggagggctgcactcgcgtccggcaggcgcctcagaagggcggtcaccaggcccccatgggcagcctgccgtcctgagcccccctccccatgccatcccttcactcggggtttcccaggtctcatgcagctcctagctatgaggccgccccattttaccaagagcaaaactccggctgtgggactctttccaggatggggtctgcctcaggcacaggcagcagcgtgatgtaccgaccgcgtccgcggcctcgaggcttcctgctccgctccagtgcagtcaggcgtgcaggcaccacgcacctgagctcggtcaacacccctggggtcctgtccctcccgagatgtgacagaaatggccccacacacgagcggcctgatgctcggaggccctgtggcccctgggtgactcagtgagcggcagggatagggctggatccacagccccgccccaagcttcctgccaccgtgggaaccacaagctccacgtttccctgtcaggtaagcctttcggaggcaggcctgaaatcccagcctcactgtgtcgcctgactagtgaaacgagccccgcggcaggcacgcgcaccccccctcaacctctgggcgggcacgcgcaccccccccccccccccgctcaacctctgggcgggcacgcgcacccctgctcaacctctggactcgggctccatctcctcctcatctccctgtggggtgggcacttgtaatacctccatgttacagaaaggaaactgaggcacagagagggccatgcctcgcccaaggttagccagccaatagatgggagggctgagatttgacccatgagcatgcctccaagcccatttcattcattcagcaaggctcgggcaggacaggctggtgcccgcgctggggatgcctgaacaccagatggactggcctcagcccatggcgggcagcaggctgggcacgggcatcaacatggcaatgccaacctcagagggcattacggaggatgggcaggggctggcctaccccgtggctgcctgtgagatcaagaaggtaggtcacagtcagggaccaggggcctgcaatacccactctcagagggcaagccctagagacttctgagctgccagaggggtgggccttccccacagggtttaaacccttgtgagcttttaaatgcggaaacccacagaaggcgcccatccagcgtctggtgggcagtggtgagccatgagcgtctgctccctccgtgggtcccacagtaggcaggagggaattcagggataaagggagctcttctcttccccagagcccccaaatacaccccaactgcctgaaagtccagtaacatttgttcattcaagcttcccttagtctgctgggagggcagtgaccccagaagacgggcacaggtcatggggtgcagagaaactggtaggcagtggtggcactggggggcagaagaggccaggactctgggggtcccagggcagatgtggccaccgtgggggcggccagggcgggccaccgtgaatccttaggagggctccaccaccgactggcccagtgaacacagcaatggcttatcggagcacacaggccaagggtgggcaggcgtacagcagggcaggcaggggacaggagccatcaggaggcccaggtgaggctctgaggaaggagggctgaacatgggggccacagggtaggcccagctctcgctgtcccggcccctccccttctggaagccgccctcagtctgtgttggaggtttccaggttatgtcacagtgctgggtcccactggagggacgtgaggctctgccccggcttccaggccccaggctgagcatgacagcaggagcgaggtacctgagcgtgatcacctccaggctgggcatctcctggcaaatggagatctaggaggaaaagaacatgactagcaagcatggcacagcagggcatcgcggccgcactgccatcagccacagagaactgtcgaagccacggccaacccacttccggggcctgaggggcacggccttactcagccagtgtgcccagggtgaatgcccagggcctgaggggagcggccctgctcagccagtgtgcccagggtgaatgccca

SEQ ID NO: 12363 - protein, 181 aa, Homo sapiens
MPRMNKQHETTAWKTVSVLALARGGTSASNRWSAAAGTAVLGRPLPTAGARWHRHPRFTVARGACPVPVDQCDAACQILTPPLAMAHGDGQSRAATHRSKRRNPFALLPGPAVVGGYPNCQSQEGPYAALLHSGGGIKRRHRSQGNSLWRRLHRTHLCPARPGTAHSGAGTGSQAPGWRCC

SEQ ID NO: 12364 - DNA, 261 bp, Homo sapiens
cgcggaagatggttctgacccgggccaaggcctcggagctgcacagcgtgcgcaagctcaactgctggggcagccgcctcacagatgtaacctgtgagccggtgccagcgcctgagtgagctgtacctgcggaggaaccgcatccccagcctggctgagctcttctacctgaaggggctgccgcgtctgcgggtgctgtggctggccgagaacccgtgctgcggcaccagcccccaccgctaccgcatgaccgtgctgcgc

SEQ ID NO: 12365 - protein, 36 aa, Homo sapiens
MVLTRAKASELHSVRKLNCWGSRLTDVTCEPVPAPE

SEQ ID NO: 12366 - DNA, 744 bp, Homo sapiens
ccagaagacgggcacaggtcatggggtgcagagaaactggtaggcagtggtggcactggggggcagaagaggccaggactctgggggtcccagggcagatgtggccacccggccctgctcagccagtgtgcccaggatgaatgcccacgagtatgccaggttctcctctgacaccaccttgcagcccagacgccccgcagactgaaggagaaatgtgaggctcctccttgcacgcactctgtctttattaaattttacgacagcatcgttgctgtcagatgctgccagcagtggagacagagcattcattactttagatgccctcaaaggacatcaggtaaggggaccccaatgtcccctacgcagggatagaaagcaaggaaaggatggaaatcccttcttgataacaggtctaggccaaaaggaagacaggcttgagactggatctcagatcacattggtactgtcaattcaggggtgaggtgcccggggtggtccacaaagcctcacaacctgcaaagctcccacatatgtgagagcccaccatacgccaggcatggcaccagcagctcacagcctggtcagatgcgtcccatgtataagtgactcgtgtctatggacatggtacgtttgtatattcactgctaaacatgcagtatttcagttacagcacaaaacagattacacccagatgccacgtatccaggcttttttttgtctttaagaaaaggtacagttcaaatt

SEQ ID NO: 12367 - protein, 39 aa, Homo sapiens
MGCRETGRQWWHWGAEEARTLGVPGQMWPPGPAQPVCPG

SEQ ID NO: 12368 - DNA, 1926 bp, Homo sapiens
cggccgccatgaagctgacgcggaagatggttctgacccgggccaaggcctcggagctgcacagcgtgcgcaagctcaactgctggggcagccgcctcacagatgtaagtattgcctcacagatgtaagtattgcactgatcatctccaaatagcctcaacccaaatgttgtagcttctttcccaagagaatttttaagttgacaaaactgcacctatcaattcagtcccacacttggtactttgttcacttagcggttttcattctgcagaaccactaatggaaaaacaattctctagtgccaggcttattttgcagttcccgtcaacatccctataaatgaaacaccctttgtcacttggtcgcagaggaggggagcaatagtttggaacttgctctcacctggaaaggaatcccaggagggcttgttttactttgttacggggaagttgaaggtctacaccccctcttcttggtcacatctagccttgtacccccttgccgctgccccaaaggcaggcagagaataagccctgctgggagaacttgagtgtgtgcgtctgtgaaagatttttttcttctctccctcattgtctttctcagtccaaaatgtccccaacttacacagggatcgcataccaattgtttctttcttttttttttttttttacacggagtctctctctgttgcccaggctggagtacagtggcacgatcttggctcactgcaacctctgcctcccgggttcaagcaattttcctgcctcagcctttgagtagctgggactacaggcacccaccaccatgcctggctaatttttgtactttttagtagagatggagtttcactgtgtcggccaggctggtctcaaaccccctgagttcaggtgatccacctgcctcagcctcgcaaagtattggaattacaggtatgagccaccatgtccagcgcaattatttatctctttattttcctttgtttttttaatttgaactgtaccttttcttaaagacaaaaaaaagcctggatacgtggcatctgggtgtaatctgttttgtgctgtaactgaaatactgcatgtttagcagtgaatatacaaacgtaccatgtccatagacacgagtcacttatacatgggacgcatctgaccaggctgtgagctgctggtgccatgcctggcgtatggtgggctctcacatatgtgggagctttgcaggttgtgaggctttgtggaccaccccgggcacctcacccctgaattgacagtaccaatgtgatctgagatccagtctcaagcctgtcttccttttggcctagacctgttatcaagaagggatttccatcctttccttgctttctatccctgcgtaggggacattggggtccccttacctgatgtcctttgagggcatctaaagtaatgaatgctctgtctccactgctggcagcatctgacagcaacgatgctgtcgtaaaatttaataaagacagagtgcgtgcaaggaggagcctcacatttctccttcagtctgcggggcgtctgggctgcaaggtggtgtcagaggagaacctggcatactcgtgggcattcatcctgggcacactggctgagcagggccgctcccctcaggccctgggcattcaccctgggcacactggctgagcagggccgctcccctcaggccctgggcattcaccctgggcacactggctgagcagggccgctcccctcaggccctgggcattcaccctgggcacactggctgagcagggccgctcccctcaggccctgggcattcaccctgggcacactggctgagtaaggccgtgcccctcaggccccggaagtgggttggccgtggcttcgacagttctctgtggctgatggcagtgcggccgcgatgccctgctgtgccatgcttgct

SEQ ID NO: 12369 - protein, 39 aa, Homo sapiens
MKLTRKMVLTRAKASELHSVRKLNCWGSRLTDVSIASQM

SEQ ID NO: 12370 - DNA, 179 bp, Homo sapiens
tgcacctgccacccgaggagttccaaagtttgcctcagggatgtggtgtggagcccagagcctccagggtggaccaggttctgcccctgagtcgtaccaggaggctgagcccagccatgcagctcagctgctccagatgcctgagcctcagaaaccgggagacagcgatgtctattgtg

SEQ ID NO: 12371 - protein, 45 aa, Homo sapiens
MWCGAQSLQGGPGSAPESYQEAEPSHAAQLLQMPEPQKPGDSDVY

SEQ ID NO: 12372 - DNA, 6217 bp, Homo sapiens
tgtgcagaattgtacagttgcgaaaccatgtcgctggcagctggtgctggcggtggagacttccctgtgcggtgctcagtgcagctgcacccgtgggggagggagctctttctctggccctgcagtcacctgaggttgttaccattatgaacggccgctgggacccccgcatgtgcatgtactcccccagagtgtccgggggccccagccaagggacacagctcaggcagctgggaacatgtgcaggctgatgaagagaaccggatgagggcttcacatgaggaagcatgtggccaggtcctctcagaacatcagcctcatcttcctgtctctgatctatttcagcaaccaccccatgtgtctctagaaccccagtgtagcgagctggagagaggactgtcctgagggcagcaggcctggttgcagctggcgtgggggtctcagaatggagccctcagccctgaggaaagctggctcggagcaggaggagggctttgaggggctgcccagaagggtcactgacctggggatggtctccaatctccggcgcagcaacagcagcctcttcaagagctggaggctacagtgccccttcggcaacaatgacaagcaagaaagcctcagttcgtggattcctgaaaacatcaagaagaaagaatgcgtgtattttgtggaaagttccaaactgtctgatgctgggaaggtggtgtgtcagtgtggctacacgcatgagcagcacttggaggaggctaccaagccccacaccttccagggcacacagtgggacccaaagaaacatgtccaggagatgccaaccgatgcctttggcgacatcgtcttcacgggcctgagccagaaggtgaaaaagtacgtccgagtctcccaggacacgccctccagcgtgatctaccacctcatgacccagcactgggggctggacgtccccaatctcttgatctcggtgaccgggggggccaagaacttcaacatgaagccgcggctgaagagcattttccgcagaggcctggtcaaggtggctcagaccacaggggcctggatcatcacaggggggtcccacaccggcgtcatgaagcaggtaggcgaggcggtgcgggacttcagcctgagcagcagctacaaggaaggcgagctcatcaccatcggagtcgccacctggggcactgtccaccgccgcgagggcctgatccatcccacgggcagcttccccgccgagtacatactggatgaggatggccaagggaacctgacctgcctagacagcaaccactctcacttcatcctcgtggacgacgggacccacggccagtacggggtggagattcctctgaggaccaggctggagaagttcatatcggagcagaccaaggaaagaggaggtgtggccatcaagatccccatcgtgtgcgtggtgctggagggcggcccgggcacgttgcacaccatcgacaacgccaccaccaacggcaccccctgtgtggttgtggagggctcgggccgcgtggccgacgtcattgcccaggtggccaacctgcctgtctcggacatcactatctccctgatccagcagaaactgagcgtgttcttccaggagatgtttgagaccttcacggaaagcaggattgtcgagtggaccaaaaagatccaagatatcgtccggaggcggcagctgctgactgtcttccgggaaggcaaggatggtcagcaggacgtggatgtggccatcttgcaggccttgctgaaagcctcacggagccaagaccactttggccacgagaactgggaccaccagctgaaactggcagtggcatggaatcgcgtggacattgcccgcagtgagatcttcatggatgagtggcagtggaagccttcagatctgcaccccacgatgacagctgcactcatctccaacaagcctgagtttgtgaagctcttcctggagaacggggtgcagctgaaggagtttgtcacctgggacaccttgctctacctgtacgagaacctggacccctcctgcctgttccacagcaagctgcagaaggtgctggtggaggatcccgagcgcccggcttgcgcgcccgcggcgccccgcctgcagatgcaccacgtggcccaggtgctgcgggagctgctgggggacttcacgcagccgctttatccccggccccggcacaacgaccggctgcggctcctgctgcccgttccccacgtcaagctcaacgtgcagggagtgagcctccggtccctctacaagcgttcctcaggccatgtgaccttcaccatggaccccatccgtgaccttctcatttgggccattgtccagaaccgtcgggagctggcaggaatcatctgggctcagagccaggactgcatcgcagcggccttggcctgcagcaagatcctgaaggaactgtccaaggaggaggaggacacggacagctcggaggagatgctggcgctggcggaggagtatgagcacagagccatcggggtcttcaccgagtgctaccggaaggacgaagagagagcccagaaactgctcacccgcgtgtccgaggcctgggggaagaccacctgcctgcagctcgccctggaggccaaggacatgaagtttgtgtctcacgggggcatccaggccttcctgaccaaggtgtggtggggccagctctccgtggacaatgggctgtggcgtgtgaccctgtgcatgctggccttcccgctgctcctcaccggcctcatctccttcagggagaagaggctgcaggatgtgggcacccccgcggcccgcgcccgtgccttcttcaccgcacccgtggtggtcttccacctgaacatcctctcctacttcgccttcctctgcctgttcgcctacgtgctcatggtggacttccagcctgtgccctcctggtgcgagtgtgccatctacctctggctcttctccttggtgtgcgaggagatgcggcagctcttctatgaccctgacgagtgcgggctgatgaagaaggcagccttgtacttcagtgacttctggaataagctggacgtcggcgcaatcttgctcttcgtggcagggctgacctgcaggctcatcccggcgacgctgtaccccgggcgcgtcatcctctctctggacttcatcctgttctgcctccggctcatgcacatttttaccatcagtaagacgctggggcccaagatcatcattgtgaagcggatgatgaaggacgtcttcttcttcctcttcctgctggctgtgtgggtggtgtccttcggggtggccaagcaggccatcctcatccacaacgagcgccgggtggactggctgttccgaggggccgtctaccactcctacctcaccatcttcgggcagatcccgggctacatcgacggtgtgaacttcaacccggagcactgcagccccaatggcaccgacccctacaagcctaagtgccccgagagcgacgcgacgcagcagaggccggccttccctgagtggctgacggtcctcctactctgcctctacctgctcttcaccaacatcctgctgctcaacctcctcatcgccatgttcaactacaccttccagcaggtgcaggagcacacggaccagatttggaagttccagcgccatgacctgatcgaggagtaccacggccgccccgccgcgccgccccccttcatcctcctcagccacctgcagctcttcatcaagagggtggtcctgaagactccggccaagaggcacaagcagctcaagaacaagctggagaagaacgaggaggcggccctgctatcctgggagatctacctgaaggagaactacctccagaaccgacagttccagcaaaagcagcggcccgagcagaagatcgaggacatcagcaataaggttgacgccatggtggacctgctggacctggacccactgaagaggtcgggctccatggagcagaggttggcctccctggaggagcaggtggcccagacagcccaagccctgcactggatcgtgaggacgctgcgggccagcggcttcagctcggaggcggacgtccccactctggcctcccagaaggccgcggaggagccggatgctgagccgggaggcaggaagaagacggaggagccgggcgacagctaccacgtgaatgcccggcacctcctctaccccaactgccctgtcacgcgcttccccgtgcccaacgagaaggtgccctgggagacggagttcctgatctatgacccacccttttacacggcagagaggaaggacgcggccgccatggaccccatgggagacaccctggagccactgtccacgatccagtacaacgtggtggatggcctgagggaccgccggagcttccacgggccgtacacagtgcaggccgggttgcccctgaaccccatgggccgcacaggactgcgtgggcgcgggagcctcagctgcttcggacccaaccacacgctgtaccccatggtcacgcggtggaggcggaacgaggatggagccatctgcaggaagagcataaagaagatgctggaagtgctggtggtgaagctccctctctccgagcactgggccctgcctgggggctcccgggagccaggggagatgctacctcggaagctgaagcggatcctccggcaggagcactggccgtcttttgaaaacttgctgaagtgcggcatggaggtgtacaaaggctacatggatgacccgaggaacacggacaatgcctggatcgagacggtggccgtcagcgtccacttccaggaccagaatgacgtggagctgaacaggctgaactctaacctgcacgcctgcgactcgggggcctccatccgatggcaggtggtggacaggcgcatcccactctatgcgaaccacaagaccctcctccagaaggcagccgctgagttcggggctcactactgactgtgccctcaggctgggcggctccagtccatagacgttccccccagaaaccagggcttctctctcctgagcctggccaggactcaggctgttcctgggccctgcacatgatggggtttggtggacccagtgcccctcacggctgccgcaagtctgctgcagatgacctcatgaactggaaggggtcaaggtgacccgggaggagagctcaagacagggcacaggctactcagagctgaggggcccctgggacccttggccatcaggcgaggggctgggcctgtgcagctgggcccttggccagagtccactcccttcctggctgtgtcaccccgagcagctcatccaccatggaggtcattggcctgaggcaagttccccggagagtcggggtcccctgtggccccctcaggcctatgtctgtgaggaaggggccctgccactctccccaagagggcctccatgtttcgaggtgcctcaacatggagccttgcctggcctgggctaggggcactgtctgaactcctgactgtcaggataaactccgtgggggtacaggagcccagacaaagcccaggcctgtcaagagacgcagagggcccctgccagggttggccccagggaccctgggacgaggctgcagaagctctccctccctactccctgggagccacgtgctggccatgtggccagggacggcatgagcaggaggcggggacgtgggggccttctggtttggtgtcaacagctcacaggagcgtgaaccatgagggccctcaggaggggaacgtggtaaaacccaagacattaaatctgccatctcaggcctggctggctcttctgtgctttccacaaataaagttcctgacacgtccagggccaggggctgtgtgacggctgcctgaagttctcctcgatcccccggtgagcttcctgcagcctgtggatgtcctgcagcccctcagccctacccccaagtttctcctctgacccatcagctccctgtcttcattttcctaaacctgggctccagcatcgtccccaagcccaccaggccaggatgcaggcatccacatgccctcctccttggcttcccctgcgtggtggtgccaatgtgccctggcacccctgcagaggctccggatggagcctggggctgcctggccactgagcactggccgaggtgatgcccacccttccctggacaggcctctgtcttccacctgacccaaagctctctagccacccccttgtccccag

SEQ ID NO: 12373 - protein, 1503 aa, Homo sapiens
MEPSALRKAGSEQEEGFEGLPRRVTDLGMVSNLRRSNSSLFKSWRLQCPFGNNDKQESLSSWIPENIKKKECVYFVESSKLSDAGKVVCQCGYTHEQHLEEATKPHTFQGTQWDPKKHVQEMPTDAFGDIVFTGLSQKVKKYVRVSQDTPSSVIYHLMTQHWGLDVPNLLISVTGGAKNFNMKPRLKSIFRRGLVKVAQTTGAWIITGGSHTGVMKQVGEAVRDFSLSSSYKEGELITIGVATWGTVHRREGLIHPTGSFPAEYILDEDGQGNLTCLDSNHSHFILVDDGTHGQYGVEIPLRTRLEKFISEQTKERGGVAIKIPIVCVVLEGGPGTLHTIDNATTNGTPCVVVEGSGRVADVIAQVANLPVSDITISLIQQKLSVFFQEMFETFTESRIVEWTKKIQDIVRRRQLLTVFREGKDGQQDVDVAILQALLKASRSQDHFGHENWDHQLKLAVAWNRVDIARSEIFMDEWQWKPSDLHPTMTAALISNKPEFVKLFLENGVQLKEFVTWDTLLYLYENLDPSCLFHSKLQKVLVEDPERPACAPAAPRLQMHHVAQVLRELLGDFTQPLYPRPRHNDRLRLLLPVPHVKLNVQGVSLRSLYKRSSGHVTFTMDPIRDLLIWAIVQNRRELAGIIWAQSQDCIAAALACSKILKELSKEEEDTDSSEEMLALAEEYEHRAIGVFTECYRKDEERAQKLLTRVSEAWGKTTCLQLALEAKDMKFVSHGGIQAFLTKVWWGQLSVDNGLWRVTLCMLAFPLLLTGLISFREKRLQDVGTPAARARAFFTAPVVVFHLNILSYFAFLCLFAYVLMVDFQPVPSWCECAIYLWLFSLVCEEMRQLFYDPDECGLMKKAALYFSDFWNKLDVGAILLFVAGLTCRLIPATLYPGRVILSLDFILFCLRLMHIFTISKTLGPKIIIVKRMMKDVFFFLFLLAVWVVSFGVAKQAILIHNERRVDWLFRGAVYHSYLTIFGQIPGYIDGVNFNPEHCSPNGTDPYKPKCPESDATQQRPAFPEWLTVLLLCLYLLFTNILLLNLLIAMFNYTFQQVQEHTDQIWKFQRHDLIEEYHGRPAAPPPFILLSHLQLFIKRVVLKTPAKRHKQLKNKLEKNEEAALLSWEIYLKENYLQNRQFQQKQRPEQKIEDISNKVDAMVDLLDLDPLKRSGSMEQRLASLEEQVAQTAQALHWIVRTLRASGFSSEADVPTLASQKAAEEPDAEPGGRKKTEEPGDSYHVNARHLLYPNCPVTRFPVPNEKVPWETEFLIYDPPFYTAERKDAAAMDPMGDTLEPLSTIQYNVVDGLRDRRSFHGPYTVQAGLPLNPMGRTGLRGRGSLSCFGPNHTLYPMVTRWRRNEDGAICRKSIKKMLEVLVVKLPLSEHWALPGGSREPGEMLPRKLKRILRQEHWPSFENLLKCGMEVYKGYMDDPRNTDNAWIETVAVSVHFQDQNDVELNRLNSNLHACDSGASIRWQVVDRRIPLYANHKTLLQKAAAEFGAHY

SEQ ID NO: 12374 - DNA, 5412 bp, Homo sapiens
tgggggtctcagaatggagccctcagccctgaggaaagctggctcggagcaggaggagggctttgaggggctgcccagaagggtcactgacctggggatggtctccaatctccggcgcagcaacagcagcctcttcaagagctggaggctacagtgccccttcggcaacaatgacaagcaagaaagcctcagttcgtggattcctgaaaacatcaagaagaaagaatgcgtgtattttgtggaaagttccaaactgtctgatgctgggaaggtggtgtgtcagtgtggctacacgcatgagcagcacttggaggaggctaccaagccccacaccttccagggcacacagtgggacccaaagaaacatgtccaggagatgccaaccgatgcctttggcgacatcgtcttcacgggcctgagccagaaggtgaaaaagtacgtccgagtctcccaggacacgccctccagcgtgatctaccacctcatgacccagcactgggggctggacgtccccaatctcttgatctcggtgaccgggggggccaagaacttcaacatgaagccgcggctgaagagcattttccgcagaggcctggtcaaggtggctcagaccacaggggcctggatcatcacaggggggtcccacaccggcgtcatgaagcaggtaggcgaggcggtgcgggacttcagcctgagcagcagctacaaggaaggcgagctcatcaccatcggagtcgccacctggggcactgtccaccgccgcgagggcctgatccatcccacgggcagcttccccgccgagtacatactggatgaggatggccaagggaacctgacctgcctagacagcaaccactctcacttcatcctcgtggacgacgggacccacggccagtacggggtggagattcctctgaggaccaggctggagaagttcatatcggagcagaccaaggaaagaggaggtgtggccatcaagatccccatcgtgtgcgtggtgctggagggcggcccgggcacgttgcacaccatcgacaacgccaccaccaacggcaccccctgtgtggttgtggagggctcgggccgcgtggccgacgtcattgcccaggtggccaacctgcctgtctcggacatcactatctccctgatccagcagaaactgagcgtgttcttccaggagatgtttgagaccttcacggaaagcaggattgtcgagtggaccaaaaagatccaagatatcgtccggaggcggcagctgctgactgtcttccgggaaggcaaggatggtcagcaggacgtggatgtggccatcttgcaggccttgctgaaagcctcacggagccaagaccactttggccacgagaactgggaccaccagctgaaactggcagtggcatggaatcgcgtggacattgcccgcagtgagatcttcatggatgagtggcagtggaagccttcagatctgcaccccacgatgacagctgcactcatctccaacaagcctgagtttgtgaagctcttcctggagaacggggtgcagctgaaggagtttgtcacctgggacaccttgctctacctgtacgagaacctggacccctcctgcctgttccacagcaagctgcagaaggtgctggtggaggatcccgagcgcccggcttgcgcgcccgcggcgccccgcctgcagatgcaccacgtggcccaggtgctgcgggagctgctgggggacttcacgcagccgctttatccccggccccggcacaacgaccggctgcggctcctgctgcccgttccccacgtcaagctcaacgtgcagggagtgagcctccggtccctctacaagcgttcctcaggccatgtgaccttcaccatggaccccatccgtgaccttctcatttgggccattgtccagaaccgtcgggagctggcaggaatcatctgggctcagagccaggactgcatcgcagcggccttggcctgcagcaagatcctgaaggaactgtccaaggaggaggaggacacggacagctcggaggagatgctggcgctggcggaggagtatgagcacagagccatcggggtcttcaccgagtgctaccggaaggacgaagagagagcccagaaactgctcacccgcgtgtccgaggcctgggggaagaccacctgcctgcagctcgccctggaggccaaggacatgaagtttgtgtctcacgggggcatccaggccttcctgaccaaggtgtggtggggccagctctccgtggacaatgggctgtggcgtgtgaccctgtgcatgctggccttcccgctgctcctcaccggcctcatctccttcagggagaagaggctgcaggatgtgggcacccccgcggcccgcgcccgtgccttcttcaccgcacccgtggtggtcttccacctgaacatcctctcctacttcgccttcctctgcctgttcgcctacgtgctcatggtggacttccagcctgtgccctcctggtgcgagtgtgccatctacctctggctcttctccttggtgtgcgaggagatgcggcagctcttctatgaccctgacgagtgcgggctgatgaagaaggcagccttgtacttcagtgacttctggaataagctggacgtcggcgcaatcttgctcttcgtggcagggctgacctgcaggctcatcccggcgacgctgtaccccgggcgcgtcatcctctctctggacttcatcctgttctgcctccggctcatgcacatttttaccatcagtaagacgctggggcccaagatcatcattgtgaagcggatgatgaaggacgtcttcttcttcctcttcctgctggctgtgtgggtggtgtccttcggggtggccaagcaggccatcctcatccacaacgagcgccgggtggactggctgttccgaggggccgtctaccactcctacctcaccatcttcgggcagatcccgggctacatcgacggtgtgaacttcaacccggagcactgcagccccaatggcaccgacccctacaagcctaagtgccccgagagcgacgcgacgcagcagaggccggccttccctgagtggctgacggtcctcctactctgcctctacctgctcttcaccaacatcctgctgctcaacctcctcatcgccatgttcaactacaccttccagcaggtgcaggagcacacggaccagatttggaagttccagcgccatgacctgatcgaggagtaccacggccgccccgccgcgccgccccccttcatcctcctcagccacctgcagctcttcatcaagagggtggtcctgaagactccggccaagaggcacaagcagctcaagaacaagctggagaagaacgaggaggcggccctgctatcctgggagatctacctgaaggagaactacctccagaaccgacagttccagcaaaagcagcggcccgagcagaagatcgaggacatcagcaataaggttgacgccatggtggacctgctggacctggacccactgaagaggtcgggctccatggagcagaggttggcctccctggaggagcaggtggcccagacagcccaagccctgcactggatcgtgaggacgctgcgggccagcggcttcagctcggaggcggacgtccccactctggcctcccagaaggccgcggaggagccggatgctgagccgggaggcaggaagaagacggaggagccgggcgacagctaccacgtgaatgcccggcacctcctctaccccaactgccctgtcacgcgcttccccgtgcccaacgagaaggtgccctgggagacggagttcctgatctatgacccacccttttacacggcagagaggaaggacgcggccgccatggaccccatgggagagaaccccatgggccgcacaggactgcgtgggcgcgggagcctcagctgcttcggacccaaccacacgctgtaccccatggtcacgcggtggaggcggaacgaggatggagccatctgcaggaagagcataaagaagatgctggaagtgctggtggtgaagctccctctctccgagcactgggccctgcctgggggctcccgggagccaggggagatgctacctcggaagctgaagcggatcctccggcaggagcactggccgtcttttgaaaacttgctgaagtgcggcatggaggtgtacaaaggctacatggatgacccgaggaacacggacaatgcctggatcgagacggtggccgtcagcgtccacttccaggaccagaatgacgtggagctgaacaggctgaactctaacctgcacgcctgcgactcgggggcctccatccgatggcaggtggtggacaggcgcatcccactctatgcgaaccacaagaccctcctccagaaggcagccgctgagttcggggctcactactgactgtgccctcaggctgggcggctccagtccatagacgttccccccagaaaccagggcttctctctcctgagcctggccaggactcaggctgttcctgggccctgcacatgatggggtttggtggacccagtgcccctcacggctgccgcaagtctgctgcagatgacctcatgaactggaaggggtcaaggtgacccgggaggagagctcaagacagggcacaggctactcagagctgaggggcccctgggacccttggccatcaggcgaggggctgggcctgtgcagctgggcccttggccagagtccactcccttcctggctgtgtcaccccgagcagctcatccaccatggaggtcattggcctgaggcaagttccccggagagtcggggtcccctgtggccccctcaggcctatgtctgtgaggaaggggccctgccactctccccaagagggcctccatgtttcgaggtgcctcaacatggagccttgcctggcctgggctaggggcactgtctgaactcctgactgtcaggataaactccgtgggggtacaggagcccagacaaagcccaggcctgtcaagagacgcagagggcccctgccagggttggccccagggaccctgggacgaggctgcagaagctctccctccctactccctgggagccacgtgctggccatgtggccagggacggcatgagcaggaggcggggacgtgggggccttctggtttggtgtcaacagctcacaggagcgtgaaccatgagggccctcaggaggggaacgtggtaaaacccaagacattaaatctgccatctcaggcctggctggctcttctgtgctttccacaaataaagttcctgacacgtccagggccaggggctgtgtgacggctgcctgaagttctcctcgatcccccggtgagcttcctgcagcctgtggatgtcctgcagcccctcagccctacccccaagtttctcctctg

SEQ ID NO: 12375 - protein, 1469 aa, Homo sapiens
MEPSALRKAGSEQEEGFEGLPRRVTDLGMVSNLRRSNSSLFKSWRLQCPFGNNDKQESLSSWIPENIKKKECVYFVESSKLSDAGKVVCQCGYTHEQHLEEATKPHTFQGTQWDPKKHVQEMPTDAFGDIVFTGLSQKVKKYVRVSQDTPSSVIYHLMTQHWGLDVPNLLISVTGGAKNFNMKPRLKSIFRRGLVKVAQTTGAWIITGGSHTGVMKQVGEAVRDFSLSSSYKEGELITIGVATWGTVHRREGLIHPTGSFPAEYILDEDGQGNLTCLDSNHSHFILVDDGTHGQYGVEIPLRTRLEKFISEQTKERGGVAIKIPIVCVVLEGGPGTLHTIDNATTNGTPCVVVEGSGRVADVIAQVANLPVSDITISLIQQKLSVFFQEMFETFTESRIVEWTKKIQDIVRRRQLLTVFREGKDGQQDVDVAILQALLKASRSQDHFGHENWDHQLKLAVAWNRVDIARSEIFMDEWQWKPSDLHPTMTAALISNKPEFVKLFLENGVQLKEFVTWDTLLYLYENLDPSCLFHSKLQKVLVEDPERPACAPAAPRLQMHHVAQVLRELLGDFTQPLYPRPRHNDRLRLLLPVPHVKLNVQGVSLRSLYKRSSGHVTFTMDPIRDLLIWAIVQNRRELAGIIWAQSQDCIAAALACSKILKELSKEEEDTDSSEEMLALAEEYEHRAIGVFTECYRKDEERAQKLLTRVSEAWGKTTCLQLALEAKDMKFVSHGGIQAFLTKVWWGQLSVDNGLWRVTLCMLAFPLLLTGLISFREKRLQDVGTPAARARAFFTAPVVVFHLNILSYFAFLCLFAYVLMVDFQPVPSWCECAIYLWLFSLVCEEMRQLFYDPDECGLMKKAALYFSDFWNKLDVGAILLFVAGLTCRLIPATLYPGRVILSLDFILFCLRLMHIFTISKTLGPKIIIVKRMMKDVFFFLFLLAVWVVSFGVAKQAILIHNERRVDWLFRGAVYHSYLTIFGQIPGYIDGVNFNPEHCSPNGTDPYKPKCPESDATQQRPAFPEWLTVLLLCLYLLFTNILLLNLLIAMFNYTFQQVQEHTDQIWKFQRHDLIEEYHGRPAAPPPFILLSHLQLFIKRVVLKTPAKRHKQLKNKLEKNEEAALLSWEIYLKENYLQNRQFQQKQRPEQKIEDISNKVDAMVDLLDLDPLKRSGSMEQRLASLEEQVAQTAQALHWIVRTLRASGFSSEADVPTLASQKAAEEPDAEPGGRKKTEEPGDSYHVNARHLLYPNCPVTRFPVPNEKVPWETEFLIYDPPFYTAERKDAAAMDPMGENPMGRTGLRGRGSLSCFGPNHTLYPMVTRWRRNEDGAICRKSIKKMLEVLVVKLPLSEHWALPGGSREPGEMLPRKLKRILRQEHWPSFENLLKCGMEVYKGYMDDPRNTDNAWIETVAVSVHFQDQNDVELNRLNSNLHACDSGASIRWQVVDRRIPLYANHKTLLQKAAAEFGAHY

SEQ ID NO: 12376 - DNA, 2056 bp, Homo sapiens
agagagcagagccacgccacacgggaggccagctccaggcacagaactcagcccacagacctcacaattccaggcttcctgggaaccaaagcaagaaaaaaggagaagcacacagactttcgatattataagcctcactggctaataacacgaagtgggtgtttatcaggagacagacactgtctggcactgaactctaggacctgatctgtggattctgacgagcacaagagccagaccctccaggggtgcatgtggaaggggcagggctgcaggggcctccttggtgtgtctcagggtgacaggcacagagccctccgcagtgggagccggaagtgtgggtgccatacttgctgcagggacagtgtcctgccaccagccccttggcctcgagatgacagtcctggcccatgctcgggttctctcaatgttcagaacccacgttctgaaaggtggcaacctcagcaacttagccaatgaaacaagaagagaaacggttggttcctaacaaaaccaggaacacaaggattttcagagtcctgggtagcacagggtctgtctgcagatgctgggaagggctctgagggcctgggaggctttctgaattatgggggcaacgtggggagactgggctttctgtggaccatgacagctccgcagccgtgctgggctcctcagctccactgtcagggctaggaattggccacagaacccccagagccaaccctggggcccactaggaccccaaacacctgtgttttcattctgcgtggcctcctggttccctggagttcttttttatgctgcctctggtgtgaggtcctcagcatttaatttgttctaagtttaaaagctgcaagagcaaaacagaacccccaaagcctggggcccacagctgctgcggctgatcagagatacgaccccagaggaccacgtccaccaggggccggatggacagccacctattttgtactccttgtttcaaaagcaacaatagcaaataacattccaaaagttctatgataagacttcaagacactaggatttaaagaaaatcctagacattttcaaagagaagaaacagctactgcatgggtctcctgatgctgctgtagtgaaccgccacggccttggcagcttaaagcaatcagactcttctctcagtcctggaggtcaggagtctcactgggctaaaaccaaggttcggcagggctgtgctcctcccgtaggtcgggagcctccatgccttgcctttcctgccttccagaggctgcctgcattcctgggctgaggctctcccctcccgccgacgctcactgccaccgtcacattccttctccgcctccctcttccacggcccctcatgatgatgtcgggcccatgcagataaccccagataatttcccacctcaggatcctccacttaaccccaccctcccagtcccttttgccacatagggccccatagccacagggttcgagtgtggacctccctggggctgttattcaaactgccacagatgccacaaacaccaggcccagaggaggtggacacgtgtgtgcaaatccacaaaaccagcaaagcacgtgaagacgtgcagatgaggaagaccccaatggcacgggagggcagacacagagccgtccacagatggatcggagctctggggaaggcaccgcagagccagcgccgtctgaggcacacgatggcagacgggaaaagaagccacctgctgggatgctgagactcgcttgcaggagcttttggaactggctgaggtcacagctggaaccactgtggccagctggagtctgcacagcccgagtttccaccccagggtcccagtaactccgcccaaatgtgcacacgagacctatgaggagacataactttccagaacccccttttcttccaccagccacttactcatccaagaacccacccccgaaccttccctaatagaaacactgcattaaagccagcgcggggagacagacgtgaactgcgcccctgtctccttgtgggttggcctagaataaaagcttttcttttctc

SEQ ID NO: 12377 - protein, 74 aa, Homo sapiens
MPQTPGPEEVDTCVQIHKTSKAREDVQMRKTPMAREGRHRAVHRWIGALGKAPQSQRRLRHTMADGKRSHLLGC

SEQ ID NO: 12378 - DNA, 812 bp, Homo sapiens
gggcccccagggaggacagccacgggagctcaggcagcgtccccgccggcacctgcctctttgtgcagcggcagtcagggccctcggcaatgagctgaactcgcagtgcggttacgagggcaaatatgctccttgagggccggcgaaactcagcagcccgaggaaggctactgatgtgcatttcatagccggctgcgaatttaggaaaacagactttgcttctcgtcactcagcctacgtgaccaggttcagacacagtctgcagccgcccgcctcgcacccccactctgcagtgcggtatgtggggagctcagggcacagcaggccaggcctccccgtggacgtccaggaaccagaaccaaactgcccagggccccagaggggaagatgtctcagcagacggacagccgaggctcacatggcaagctctggcagcctgtcggtcccaggagagagggggagatggcagacgggaaaagaagccacctgctgggatgctgagactcgcttgcaggagcttttggaactggctgaggtcacagctggaaccactgtggccagctggagtctgcacagcccgagtttccaccccagggtcccagtaactccgcccaaatgtgcacacgagacctatgaggagacataactttccagaacccccttttcttccaccagccacttactcatccaagaacccacccccgaaccttccctaatagaaacactgcattaaagccagcgcggggagacagacgtgaactgcgcccctgtctccttgtgggttggcctagaataaaagcttttcttttctc

SEQ ID NO: 12379 - protein, 101 aa, Homo sapiens
MWGAQGTAGQASPWTSRNQNQTAQGPRGEDVSADGQPRLTWQALAACRSQERGGDGRREKKPPAGMLRLACRSFWNWLRSQLEPLWPAGVCTARVSTPGSQ

SEQ ID NO: 12380 - DNA, 1682 bp, Homo sapiens
cggggaggtggaggagcccagatgttttggcggaaggaccacagaggaagtccttgtcctgcgggcgggcacctgagcccgggctccgccttgcgtcacgtcttcctgactgtccccagcctcccagaaggccgcggaggagccggatgctgagccgggaggcaggaagaagacggaggagccgggcgacagctaccacgtgaatgcccggcacctcctctaccccaactgccctgtcacgcgcttccccgtgcccaacgagaaggtgccctgggagagaggaaggacgcggccgccatggaccccatgggagagaaccccatgggccgcacaggactgcgtgggcgcgggagcctcagctgcttcggacccaaccacacgctgtaccccatggtcacgcggtggaggcggaacgaggatggagccatctgcaggaagagcataaagaagatgctggaagtgctggtggtgaagctccctctctccgagcactgggccctgcctgggggctcccgggagccaggggagatgctacctcggaagctgaagcggatcctccggcaggagcactggccgtcttttgaaaacttgctgaagtgcggcatggaggtgtacaaaggctacatggatgacccgaggaacacggacaatgcctggatcgagacggtggccgtcagcgtccacttccaggaccagaatgacgtggagctgaacaggctgaactctaacctgcacgcctgcgactcgggggcctccatccgatggcaggtggtggacaggcgcatcccactctatgcgaaccacaagaccctcctccagaaggcagccgctgagttcggggctcactactgactgtgccctcaggctgggcggctccagtccatagacgttccccccagaaaccagggcttctctctcctgagcctggccaggactcaggctgttcctgggccctgcacatgatggggtttggtggacccagtgcccctcacggctgccgcaagtctgctgcagatgacctcatgaactggaaggggtcaaggtgacccgggaggagagctcaagacagggcacaggctactcagagctgaggggcccctgggacccttggccatcaggcgaggggctgggcctgtgcagctgggcccttggccagagtccactcccttcctggctgtgtcaccccgagcagctcatccaccatggaggtcattggcctgaggcaagttccccggagagtcggggtcccctgtggccccctcaggcctatgtctgtgaggaaggggccctgccactctccccaagagggcctccatgtttcgaggtgcctcaacatggagccttgcctggcctgggctaggggcactgtctgaactcctgactgtcaggataaactccgtgggggtacaggagcccagacaaagcccaggcctgtcaagagacgcagagggcccctgccagggttggccccagggaccctgggacgaggctgcagaagctctccctccctactccctgggagccacgtgctggccatgtggccagggacggcatgagcaggaggcggggacgtgggggccttctggtttggtgtcaacagctcacaggagcgtgaaccatgagggccctcaggaggggaacgtggtaaaacccaagacattaaatctgccatctcaggcctg

SEQ ID NO: 12381 - protein, 184 aa, Homo sapiens
MDPMGENPMGRTGLRGRGSLSCFGPNHTLYPMVTRWRRNEDGAICRKSIKKMLEVLVVKLPLSEHWALPGGSREPGEMLPRKLKRILRQEHWPSFENLLKCGMEVYKGYMDDPRNTDNAWIETVAVSVHFQDQNDVELNRLNSNLHACDSGASIRWQVVDRRIPLYANHKTLLQKAAAEFGAHY

SEQ ID NO: 12382 - DNA, 1841 bp, Homo sapiens
cggggaggtggaggagcccagatgttttggcggaaggaccacagaggaagtccttgtcctgcgggcgggcacctgagcccgggctccgccttgcgtcacgtcttcctgactgtccccagcctcccagaaggccgcggaggagccggatgctgagccgggaggcaggaagaagacggaggagccgggcgacagctaccacgtgaatgcccggcacctcctctaccccaactgccctgtcacgcgcttccccgtgcccaacgagaaggtgccctgggagagaggaaggacgcggccgccatggaccccatgggagagaaccccatgggccgcacaggactgcgtgggcgcgggagcctcagctgcttcggacccaaccacacgctgtaccccatggtcacgcggtggaggcggaacgaggatggagccatctgcaggaagagcataaagaagatgctggaagtgctggtggtgaagctccctctctccgagcactgggccctgcctgggggctcccgggagccaggggagatgctacctcggaagctgaagcggatcctccggcaggagcactggccgtcttttgaaaacttgctgaagtgcggcatggaggtgtacaaaggctacatggatgacccgaggaacacggacaatgcctggatcgagacggtggccgtcagcgtccacttccaggaccagaatgacgtggagctgaacaggctgaactctaacctgcacgcctgcgactcgggggcctccatccgatggcaggtggtggacaggcgcatcccactctatgcgaaccacaagaccctcctccagaaggcagccgctgagttcggggctcactactgactgtgccctcaggctgggcggctccagtccatagacgttccccccagaaaccagggcttctctctcctgagcctggccaggactcaggctgttcctgggccctgcacatgatggggtttggtggacccagtgcccctcacggctgccgcaagtctgctgcagatgacctcatgaactggaaggggtcaaggtgacccgggaggagagctcaagacagggcacaggctactcagagctgaggggcccctgggacccttggccatcaggcgaggggctgggcctgtgcagctgggcccttggccagagtccactcccttcctggctgtgtcaccccgagcagctcatccaccatggaggtcattggcctgaggcaagttccccggagagtcggggtcccctgtggccccctcaggcctatgtctgtgaggaaggggccctgccactctccccaagagggcctccatgtttcgaggtgcctcaacatggagccttgcctggcctgggctaggggcactgtctgaactcctgactgtcaggataaactccgtgggggtacaggagcccagacaaagcccaggcctgtcaagagacgcagagggcccctgccagggttggccccagggaccctgggacgaggctgcagaagctctccctccctactccctgggagccacgtgctggccatgtggccagggacggcatgagcaggaggcggggacgtgggggccttctggtttggtgtcaacagctcacaggagcgtgaaccatgagggccctcaggaggggaacgtggtaaaacccaagacattaaatctgccatctcaggcctggctggctcttctgtgctttccacaaataaagttcctgacacgtccagggccaggggctgtgtgacggctgcctgaagttctcctcgatcccccggtgagcttcctgcagcctgtggatgtcctgcagcccctcagccctacccccaagtttctcctctg

SEQ ID NO: 12383 - protein, 184 aa, Homo sapiens; identical to SEQ ID NO: 12381

SEQ ID NO: 12384 - DNA, 782 bp, Homo sapiens
ccggtggtgcggctttagatggagctggtactaagacccaggacttctggggcttgaagaccctgggtctgcgggaagcccctgctgagcgtccctcgcctaccccgtggccagtggcttttcagtgcagaaaccaccttatctatgtgacaaagctcgggccatcagtggcaaggtagattggcatcacgtacctttgatacaacaacctgagaaggacgtcacttctgcgatattcctgccaaaaatgcatctccgcattccgatcgtgagaacatcctgggcacacccaaactgagagacaccatacaaagtgactggtcagtgcactcaaaggcaaaaagctcatggaaggcaacagaagacaggagaagtgacagctaaaagcagcgtggaatcctggaagggacaaagaacacgagcagagaaactgtagaagctgagtgagggcagcggtccagcttgcgctgttttgctgggcctcaggttttccttaggattccgtgtgtgttccccgcctggcccctccgcagcgactctgctgtcagtggctgccccagggtggagagtgacctacctccggcttctcctgtcccggcttctcctgtgccagccggtcaggcacactgtaagatccccacagcggggtgcccccaccctcacctggaccctacaccatcaccatcacaccttctcgtgtgtcataaaccccacaacacattgttatgatttttgctttaaatcaattatcttttaaagggattaaaataatgtgagctgtg

SEQ ID NO: 12385 - protein, 106 aa, Homo sapiens
KLSEGSGPACAVLLGLRFSLGFRVCSPPGPSAATLLSVAAPGWRVTYLRLLLSRLLLCQPVRHTVRSPQRGAPTLTWTLHHHHHTFSCVINPTTHCYDFCFKSIIF

SEQ ID NO: 12386 - DNA, 2528 bp, Homo sapiens
accccgcccctcgcccgcgcaggccggagtcgcggcctccccagctagtggtcgcgggcgcggtcgcaggggcagcggggtggccgccgcgccaggcgtggagctgggtctggcgggctccgagaggcccgggagcggcgcgcagagcagcctccggccgccgccgcgcagagctgccagagtggactgcactgcttctcccagcggggcaggatggcggtttcatgtctggttggataaggccttgcctgcggaaaccagctccatccccaggccctagcagaggctcgcgtgtccccgtccccaggtcaggtcaggatgggcaccgtgcgcccacctcgcccctcgctcctgctggtctccacccgggagtcttgtctcttcctcctcttctgcctgcacctgggcgccgcctgcccacagccctgccggtgccctgaccacgcaggggctgtggctgtcttctgcagcttgcggggccttcaggaggtccccgaggacatcccggccaacaccgtgctcctgaagctcgatgccaacaagatctcccacctcccggacggggccttccagcacctgcaccggctcagggagctggatctgtctcacaacgccatcgaggccatcggctccgccaccttcgcgggcctggccgggggcctgcggctgctggacctgtcttacaaccgcatccagaggatccccaaggacgccctgggcaaactcagcgccaagatacgcctgtcccacaaccccctgcactgcgagtgcgccctgcaggaggccctgtgggagctgaagctggaccccgactctgtggacgagatcgcctgccacacctcagtgcaggaggagtttgtggggaagcctctggttcaggctctggatgcgggtgccagcctctgcagcgtcccccacaggaccacagacgtggccatgctggtcaccatgttcggctggttcgccatggtgatcgcctacgtcgtgtactatgtgcgccacaaccaggaggatgcccggaggcacctggagtacctgaagtctctgcccagcgcccccgcctccaaggaccccatcggcccggggccctagcgcctgttccggcagacccccgccggtggctgctgtcacttttgtagtaggtggtgactgatgctgcttttgctcttccctgaggcaggtgtcacagccatgtgtgctccccactgttgcactcaggcacagcagcacctccaggctgggtggttttgccacacatccgtgtgacggatgaggaacctgaagcttagaggaacggaatgactgcccgtgacgataccatcaggaaattatcccagtggaacttcaacccgggctgtccatcgtgacattccgcctccttccaccatgccagcctctcccacacggggccctgcaggctgtggatatgcactcagaggactaagggggtgctctgcaagcgagagggttcaccagagggagcttgggtgcaggttcacccgctgaaggcgctgataagtcctgtgctgaggagctgacttgcccttgtttacttacaaagtgcattgtaggtaaacatgagccttgttccagtgttcgaagtacattggaacgtaagccctgtttccagagcaaagtaacagagaccaggtttttctagagagctaagtgggatgtgtagctcaaacaaactgtcctacccttttttattctcaaatgtttgttttgagtaaccgtagtgccaaaatttcagttcagtaatggggtgaacaatatggagagagacctgggaaaagtccagggtagcttgcccaggggaagacagcagccacatacctgggggcccgcctgcttcctgcccctctgggtgtgcctgatgcgggaggccctgccccagggcgatctcagctcactgcaacctttgcctcccaggctcaatcacttctgctgcctcagcctccctagtagctggaattacaggcatgagccaccacgcctggctaatttttgtatttttagtagagaccgggtttcaccatgttggccaggctggtctcgaactgttggcctcaagtgatccgcccgcctcagcctcccaaagtgctgggattacaggcgtcagccaccgcgcccggccctgtgccttgctttttctactcactaagatataaaacagctctttttccaaggcccggagtactggggattgatgtttcaaggccaatcaatgggatgcttcgttttctccagcaacaggaactctctcttttcacctttgctgccaggaatctcagagataatttagtgctcaatttactaaccttacttcacattcaggttagatgttacctccacctatatgatagtaattcctaattttattttttattgtcctttttatgagtgtttatattttaaagtactttgagtatttttggggggggtgtaaatgagtgatcagtgtacattgtgtgtggactgaagtgtaggtatgtagagatgcttcgccaaacagatgcttaaaaatg

SEQ ID NO: 12387 - protein, 257 aa, Homo sapiens; identical to SEQ ID NO: 2123

SEQ ID NO: 12388 - DNA, 2146 bp, Homo sapiens
ggagtcgcggcctccccagctagtggtcgcgggcgcggtcgcaggggcagcggggtggccgccgcgccaggcgtggagctgggtctggcgggctccgagaggcccgggagcggcgcgcagagcagcctccggccgccgccgcgcagagctgccagagtggactgcactgcttctcccagcggggcaggatggcggtttcatgtctggttggataaggccttgcctgcggaaaccagctccatccccaggccctagcagaggctcgcgtgtccccgtccccaggtcaggtcaggatgggcaccgtgcgcccacctcgcccctcgctcctgctggtctccacccgggagtcttgtctcttcctcctcttctgcctgcacctgggcgccgcctgcccacagccctgccggtgccctgaccacgcaggggctgtggctgtcttctgcagcttgcggggccttcaggaggtccccgaggacatcccggccaacaccgtgctcctgaagctcgatgccaacaagatctcccacctcccggacggggccttccagcacctgcaccggctcagggagctggatctgtctcacaacgccatcgaggccatcggctccgccaccttcgcgggcctggccgggggcctgcggctgctggacctgtcttacaaccgcatccagaggatccccaaggacgcccccatcggcccggggccctagcgcctgttccggcagacccccgccggtggctgctgtcacttttgtagtaggtggtgactgatgctgcttttgctcttccctgaggcaggtgtcacagccatgtgtgctccccactgttgcactcaggcacagcagcacctccaggctgggtggttttgccacacatccgtgtgacggatgaggaacctgaagcttagaggaacggaatgactgcccgtgacgataccatcaggaaattatcccagtggaacttcaacccgggctgtccatcgtgacattccgcctccttccaccatgccagcctctcccacacggggccctgcaggctgtggatatgcactcagaggactaagggggtgctctgcaagcgagagggttcaccagagggagcttgggtgcaggttcacccgctgaaggcgctgataagtcctgtgctgaggagctgacttgcccttgtttacttacaaagtgcattgtaggtaaacatgagccttgttccagtgttcgaagtacattggaacgtaagccctgtttccagagcaaagtaacagagaccaggtttttctagagagctaagtgggatgtgtagctcaaacaaactgtcctacccttttttattctcaaatgtttgttttgagtaaccgtagtgccaaaatttcagttcagtaatggggtgaacaatatggagagagacctgggaaaagtccagggtagcttgcccaggggaagacagcagccacatacctgggggcccgcctgcttcctgcccctctgggtgtgcctgatgcgggaggccctgccccagggcgatctcagctcactgcaacctttgcctcccaggctcaatcacttctgctgcctcagcctccctagtagctggaattacaggcatgagccaccacgcctggctaatttttgtatttttagtagagaccgggtttcaccatgttggccaggctggtctcgaactgttggcctcaagtgatccgcccgcctcagcctcccaaagtgctgggattacaggcgtcagccaccgcgcccggccctgtgccttgctttttctactcactaagatataaaacagctctttttccaaggcccggagtactggggattgatgtttcaaggccaatcaatgggatgcttcgttttctccagcaacaggaactctctcttttcacctttgctgccaggaatctcagagataatttagtgctcaatttactaaccttacttcacattcaggttagatgttacctccacctatatgatagtaattcctaattttattttttattgtcctttttatgagtgtttatattttaaagtactttgagtatttttggggggggtgtaaatgagtgatcagtgtacattgtgtgtggactgaagtgtaggtatgtagagatgcttcgccaaacagatgcttaaaaatg

SEQ ID NO: 12389 - protein, 138 aa, Homo sapiens
MGTVRPPRPSLLLVSTRESCLFLLFCLHLGAACPQPCRCPDHAGAVAVFCSLRGLQEVPEDIPANTVLLKLDANKISHLPDGAFQHLHRLRELDLSHNAIEAIGSATFAGLAGGLRLLDLSYNRIQRIPKDAPIGPGP

SEQ ID NO: 12390 - DNA, 2161 bp, Homo sapiens
ggagtcgcggcctccccagctagtggtcgcgggcgcggtcgcaggggcagcggggtggccgccgcgccaggcgtggagctgggtctggcgggctccgagaggcccgggagcggcgcgcagagcagcctccggccgccgccgcgcagagctgccagagtggactgcactgcttctcccagcggggcaggatggcggtttcatgtctggttggataaggccttgcctgcggaaaccagctccatccccaggccctagcagaggctcgcgtgtccccgtccccaggtcaggtcaggatgggcaccgtgcgcccacctcgcccctcgctcctgctggtctccacccgggagtcttgtctcttcctcctcttctgcctgcacctgggcgccgcctgcccacagccctgccggtgccctgaccacgcaggggctgtggctgtcttctgcagcttgcggggccttcaggaggtccccgaggacatcccggccaacaccgtgctcctgaagctcgatgccaacaagatctcccacctcccggacggggccttccagcacctgcaccggctcagggagctggatctgtctcacaacgccatcgaggccatcggctccgccaccttcgcgggcctggccgggggcctgcggctgctggacctgtcttacaaccgcatccagaggatccccaaggacgcccccatcggcccggggccctagcgcctgttccggcagacccccgccggtggctgctgtcacttttgtagtaggtggtgactgatgctgcttttgctcttccctgaggcaggtgtcacagccatgtgtgctccccactgttgcactcaggcacagcagcacctccaggctgggtggttttgccacacatccgtgtgacggatgaggaacctgaagcttagaggaacggaatgactgcccgtgacgataccatcaggaaattatcccagtggaacttcaacccgggctgtccatcgtgacattccgcctccttccaccatgccagcctctcccacacggggccctgcaggctgtggatatgcactcagaggactaagggggtgctctgcaagcgagagggttcaccagagggagcttgggtgcaggttcacccgctgaaggcgctgataagtcctgtgctgaggagctgacttgcccttgtttacttacaaagtgcattgtaggtaaacatgagccttgttccagtgttcgaagtacattggaacgtaagccctgtttccagagcaaagtaacagagaccaggtttttctagagagctaagtgggatgtgtagctcaaacaaactgtcctacccttttttattctcaaatgtttgttttgagtaaccgtagtgccaaaatttcagttcagtaatggggtgaacaatatggagagagacctgggaaaagtccagggtagcttgcccaggggaagacagcagccacatacctgggggcccgcctgcttcctgcccctctgggtgtgcctgatgcgggaggccctgccccagggcgatctcagctcactgcaacctttgcctcccaggctcaatcacttctgctgcctcagcctccctagtagctggaattacaggcatgagccaccacgcctggctaatttttgtatttttagtagagaccgggtttcaccatgttggccaggctggtctcgaactgttggcctcaagtgatccgcccgcctcagcctcccaaagtgctgggattacaggcgtcagccaccgcgcccggccctgtgccttgctttttctactcactaagatataaaacagctctttttccaaggcccggagtactggggattgatgtttcaaggccaatcaatgggatgcttcgttttctccagcaacaggaactctctcttttcacctttgctgccaggaatctcagagataatttagtgctcaatttactaaccttacttcacattcaggttagatgttacctccacctatatgatagtaattcctaattttattttttattgtcctttttatgagtgtttatattttaaagtactttgagtatttttggggggggtgtaaatgagtgatcagtgtacattgtgtgtggactgaagtgtaggtatgtagagatgcttcgccaaacagatgcttaaaaatgaatggaagttgaggg

SEQ ID NO: 12391 - protein, 138 aa, Homo sapiens; identical to SEQ ID NO: 12389

SEQ ID NO: 12392 - DNA, 3629 bp, Homo sapiens
ccagtgagagctagaaccaagtgccagcccccgggggtgcacccgtgctggtgtggggccacgtggtccttgtggtccaggcagggccagcatgtggcggggtgtccagctccactgtttggaggaagtgggcgctgacacagcagagtgccctgggcccgtggggatttccttccagaggacacgtggctgaaagcataggataaggatgtataggtgaatgactggtgccatccctggctgtctgatagatgcaggtagggcaggtgaactgttgctggcctggccagcaggcctagggtcacatggtgattggcgtcctcctgccaccccttctccatgccagggtgcctgtggtgggtttgcccagcacgcatgaccccaggtcccaaggagagtgtgaactgaggcctgggtggtgaaggcagggcctctcctcagccctgtgtcctgtgggtgccagccagtcccatctcgcattttggggtgccctttccctgctgccaggggactcttcatttgtccttaccctagaatcagcccagacactggacatcacccagacgtggcccttcaggaggtgcacagggcaggggcaggcccgtccctccctgccccaatttgctgggctgcctcagcccagggtctggccttctccttggtgaaggtctgctgggcccctgtccacctcctgctgggaggaggagatggggagaggaccaggaggacaccggaggccctgtcccctgcactgtgagctcagtcaggtccatgagctgcccaccgtcctggccttactgtgccccctgccccaccaacataggtgaaagcacctcccctctaaggaagaccatagagaccccaacactgtgggaccccaaagctccttcatgctcactggagctcccaccgtgggtgcttgcaagtcctcagcgctcccggggtacagccctccccttcctgccctctaatgtcctcccctcccttgcccttccctccacttcctttctctgccgtcccctcctctcccatcttgtgacctctttactggcggggcctggagcccatgatggacacttgcggaaggaggggtggcggagcacccctgagatgacatcgctgcctgccccagagcaccccgcctctccctgtgactcagttctttgcagcccagatgtgagcatgtgcaccctgggacctgctgcccgttgggatgcccaggccaaatcagcccctctgcctccatgctgcactgattgcaagagtttcccacatctgcagaggccgtgggctcagccccacaccagccaggccaccagtgttgatagcggtgaggcggggacaaagggaatgtctcagttcacagtgtggacatggtggaggtctcggccttgcgagacaaggcagggggaggggataggaaattgggggtattctgtgactcctgggccaccggggagccagaatcttccagccagactggatgggcagggcttagcttcctgatgccgcccattcaccactttcaccccgggaacctacctgggcatcatgggaggcagagcctgaaccccaacccaaccctaactctaatgctaacccctaaaccatcccccaccctaacccaatcctcgccctaaccctaatgctaacccctgacccgacccaatcctaaccctgatgctaacccctgactcaactctcaccctaaccctgatgctaacccctgacccaatcctcaccctaaccctgatactaacccttaacctaacccaacccagccctaactccaactctaaagctaactcctaaccctaggagaggagcccaggccgggccctctccctgctggtttcctgttgggctttggagccccagatgcctgcccagaggcttccttgtgcggggtggggtccagcagtgggggatgggcccagagctggtatagccaccagcagagccatcctgatccacaggaccatccctggtggggtggggccccctggggcaggaaggccactgaggccagggagactcccaggcccactcacggcgcaggccccacaggagctggctggaggctatgggtgcggggcgtgggcctgccgggggttgcgtgacaggcagtggggagtgggttgtgctggcagctgtgggtgagtgaggaggctcctctcatgaagggccctggggaagtggaatctggccctgagagacccccggcctcctctgcaggggctgctggcaggaggggaaccggggaccacctcccgccacagagcctggggcccccagccttgcctacagggagggtagatgagagtgtaaactgcatatgaggttgggctaaacctggacatgtgtttcataaccaaagcagccaggaatctccggctctgcccagtgatcatctgggcaggacatggggacgagtgtccaggctgaagtcagggcccggccagcagagggccattttgtattgagctccacagctggtcacattctgtggaatgtgcagacgtgcacggcccatcagacagggtctggagtggggctgccgtcttgggcagctcctcccgggtgtctgcaaaatgcagaggtcaccagagccaaggcagcaaggcaaggagcccggcttctaaggaactctgagcaggtgtggtccatggctgggaggcagctggccccacagcacatagcacggagggcggcgcggagtcctggacgctcttggcaggtcccctcatggaggatgtgggggattggcttaggcctggtctggctggccttcctggaccgcagtggccaggagctgaaaaccgtgaccccagtctccctgcagctgttcttgatgggatttctgttcgccagtcagatgcatttgcacaggacttggatcctgaactgtgtaacctggagaggcaggtgtgagcgggccatgctgctggcccagcctgtgccggtgtctgtttctgttgtctctcggcccttctgtgagccctcagtaaagctcttcgtgcttcagtcagcaagtgtggattctgtcgtcggcaactctgcggcccaaaccccgagcctccccctcccccagaccttgcagtgccatggagctgagggacctgtggatccacagctgtggccccggaagggctgcaggagctgaacctgcgtgagccccgcagagggtgcagagccggcttgtgcaggctcccagcaggctcatgacagcgcggatggttaaatgtagctcctgacagccaactgttaaggtttcaggcatttttgcaccaggtgacatgatggtagcctgaacgtgaccttggcagcagtctctacatcaaggaaactggcaaatgtcaacatgctgggtaccctcgctcctgccgccgcaggctgtcagtgtcttccagcccacactgcggggggccttgttgtgtggctgcctcccaggctggggcgagggtctccagagaccaccatcgtgcaggctcttggtcaatagcagggtgtggtgctcctgccaggggacgcattctccgtgtgacctctacaccccaggtcaggtcaggatgtgatttgcttctccagggccgtgactcactagatccacctcccactggtgcctggtg

SEQ ID NO: 12393 - protein, 246 aa, Homo sapiens
MGTSVQAEVRARPAEGHFVLSSTAGHILWNVQTCTAHQTGSGVGLPSWAAPPGCLQNAEVTRAKAARQGARLLRNSEQVWSMAGRQLAPQHIARRAARSPGRSWQVPSWRMWGIGLGLVWLAFLDRSGQELKTVTPVSLQLFLMGFLFASQMHLHRTWILNCVTWRGRCERAMLLAQPVPVSVSVVSRPFCEPSVKLFVLQSASVDSVVGNSAAQTPSLPLPQTLQCHGAEGPVDPQLWPRKGCRS

SEQ ID NO: 12394 - DNA, 1406 bp, Homo sapiens
agaaactgctggatgctgagaggaacgcatcagtggaagaaaacaagcggctggacgtggagaggacgtcaagggagcatgccggcggaagagcacaccacagacgccggcaggccaccgagcggcaggaccaggcggagtttggccggggcagtcggaggagagctaggccactaagcagctcaactccaggagataaaccatctcccttgtggctcctccgtcggctgagagctgcttccactcaataacactttgcactcgttctccaagcccccgtgtgatccgattcttctggtacacccaggcaagaacccaggatacagaaaggcctcggtcctttccacaagtacctctacttgaggtactcattgacctggttaacacaagctgcctacagacgccaaaactaagggcaccctggaacacaggcttcagctgtaaacattcacccctgggcactgccgtggggtgggagcctgcctgagtgtatgctcccctagaggtttgagctgcggggcactgaagaagtgagccacactcccatcgcacactgcgagggggacaaaggaacttttcctcttttaactggggcctcatctggaatctcggaaggtgaatgtctgccttcgaaaaccctaccacctgtctttcttgtggatcaccctggcctgccatgcccccatcctgggcctataaaaaccctgagaccctagcaaggcagagatagaagctgccggatgctgagagaaacacatcagtggaagggaagaagaaaagcggctggacatggagaggacgtcagtggagcatgccggcggaagagcacacccacagaccctggcacgccggcaggccacgtagcggcaggccacgtagcggcaggccacgtagcggcaggccacgtagcggcaggccaaggcggagtttggccggggcagtcggaggagagctaggccactaagcagctcaactccaggagaaaaccatctcccttctggctcctccatcagctgagagctgcttccactcaataacacttcgcactgattctccaagcccaggtgtgatccgattcttctggtacacccaggcaagaacccaggatacagacagccctctgtccttttgataactagagggtctcattgacctggttaacacaagctgcctacagacggcaaaactaaaagagcaccctggaacacacgcccactggggcttcagctgtaaacattcacccctagacacggctatggggttggagcctgcctgtctgtatgctcccctagaggtttgggcagcagggcactgaagaatcaagccacacccccatcgcacaccctgcgagggggacaagggaacctttctcttttcagttggtcttaataaacactgagtaaatg

SEQ ID NO: 12395 - protein, 36 aa, Homo sapiens
MSAFENPTTCLSCGSPWPAMPPSWAYKNPETLARQR

SEQ ID NO: 12396 - DNA, 3967 bp, Homo sapiens
tgaggagcagccacttccctgcaggctgagcggagccctggatggagcttggcacccaagcccctcatgtctgccctgctgagtctgtgttttgtgctgcccctggcggcccccggccacggcacgcagggttgggagccctgcacagacctgcgccccctggacatcctggcggaagtggtcccttctgatggcgccacaagcgggatcaggatagttcaggttcacggtgcacggggactccagctctcagtagccgccccccgcaccatgagcttcccagcatccaggattttctcccagtgtgacctcttccctgaagaattttccatcgtcgtaactttgagagttcccaatcttccacccaagaggaacgagtacctgctgacggtggtggcagaggagagcgacctgctgctgctcggcctgcggttgtcacctgcccagctgcacttcctgttccttcgcgaggacacggccggcgcctggcagacccgagtgtccttccgcagcccggccctggtggatggccgctggcacacactggtcctggctgtgtccgcaggcgtcttctccctcaccacggactgcggcctcccggtggacataatggccgatgtgcccttcccagccaccctgtcagtgaaaggagctcgattcttcgtcggcagccggaggagagccaaaggcctgttcatgggactggtgaggcaactggtcctgctgccgggctcagacgccaccccaaggctgtgtcccagcaggaacgccccgctggcggtgctgtccatcccacgggtcctgcaggctctcacggggaagccagaagataacgaggtgctaaaatatccctatgaaaccaacattcgagtgacgctgggaccccagccaccgtgtaccgaggtggaagacgcccagttctggtttgatgccagccggaagggcctgtatctgtgtgttggcaacgagtgggtctccgtgttagcagccaaagaaagactggactacgtggaggagcatcagaacttgtccaccaactcagagaccctgggcattgaggtgttccgcatccctcaggtggggctctttgtggccacagccaatcgcaaagccacatccgccgtctacaagtggaccgaagagaagttcgtctcatatcagaacatccccacgcaccaagcacaggcctggaggcatttcaccatcgggaaaaagatcttcctggcagtggctaattttgaaccagatgagaagggtcaggagttctctgtcatttacaaatggagccacagaaagctgaagtttaccccatatcagagcattgccacacacagcgcccgagactgggaggccttcgaggtggatggggagcacttcctggcggtggccaaccaccgggaaggcgacaaccacaacatcgacagtgtcatctacaagtggaacccggcaacccggctcttcgaggccaaccagaccatcgccacctccggcgcctacgactgggagttcttcagtgtggggccctactcgttcctggtggtggccaacaccttcaacggcacctccaccaaggtgcactcgcacctctacatccgactcctgggctccttccagctcttccagtccttcccgacgttcggtgctgcagactgggaggtcttccagatcggggagaggatcttcctcgctgtggcaaacagtcacagctacgatgtggagatgcaagtccagaatgattcctatgtcatcaactccgtcatctacgagctgaacgtgaccgcgcaggcctttgtcaagttccaggacattctcacctgcagtgctctggactgggagtttttctcggtgggagaagattatttcctggtggtggccaactccttcgatgggcgtaccttctcggtgaacagtattatttacaggtggcagggctacgagggcttcgtggcggtgcacagcctccccaccgtcggctgcagggactgggaggccttcagcaccacggctggtgcctacctcatctactccagcgccaaggagcccctctccagggtcctgcggctgaggacacgctgaggccgcggctgcccggcagcaactggggtggccaggtggggcgggaccccagcacctcccccaactgaccctggacgtccaggtgggcccagcctagggcatcccgggcctgggcatcaggcagggtgcaggtggggccatctgcggccctggttcgggcagggacatccatccacctctgagtccttctgagccacagccccagtgacggtctggtcttgcaggcagaggcccagagcccctgccagtgctcgcccatctgagtgtcaagcggggatttcgctgtcaaggaaccgtttctatacatttttacctcaaacaacaggacctcggttcatgtccctgcggctggcctctcgccagccactcctgcagtgtgcgtccggccgcctgagcaggtgtggtgccgtcccgccattgccgccacctatttattgtgttttatctgaacggaagtgtatttatactgctctttacaaaagcaccggtgctcctctctaggcagcgggtgggcacagcccctcaccacggacacggacagaggaccacctccccatacagagagaggcttccctcccagcctcagtttacccgtaaatgcactagcgcgaggtcagaaatcacaagcctgggcatggcctgggtcgcaccccctccccacggccccacccacagggacctcaacttctgggcccgggattttttccctattcagcagcattttaatcacatgtcctccagctgactgggactcaggctgcgtgcctccgtctgcctgtgtgctggctgtcctagctccctggtaacagcatcctctgctggctctcctgtggtcatcttgtctctgcagctgggagagctgcttgtctgtccgtcacaggcagtgaggatgagagggggtgatgggcgcaaggccccaggggtcctccctcttaacccatgtaggtgccagagaaaccacccccactccatgagaagaggctcagacagcaggctccggggccacgcagcccagaccacacctgccacggtcttccaggaacggtgctcctgcttctgcaacacaaatcggaacaggagcgatcctcagagagtttacaatgtgctttttccgccaatcagaactgtggacaaaacttcctatttcctacaccgcagctgtctgttcaccttcagctcagagagcactcctgacctttcgtaatgaaatggaagcctccccttgtctggcaaataataaactcagtgtctacttttgccggctttgggaccttcgtgtttttccggggctcaggtctcactccagccatcgctgtggccagtggagagccactcccctctgggggcagtcgccgagagcctccttcccctccgtccagccagcaaggctttcccaagcgtcctgggcaggagggttgggccctgctttccaccaagtcactcagaaggtcccaatcacacatgattggcctcattgggtcagcacctgtgaaaggaagattaaaaactcgacaccccaattcactcaaccaagaagaaaaaagctgaaagctgagtcctgcaggaagctgcctttccctttgccctaagcagacagctgcagatgagagggtcagcatctccactagtggctgctctgtgtgccccttatctcatggaaagtgccaatttactgagcacgagataaacaggtaactgactgttcccacctgctccttttctcctgcagcatggagcaatcagtcatgtgaccacaccctcctccctctgccccctccagccggcttttccccttgactgaagccttcaacatcatcttgggagagaggcacagacctgtctcctgggtgcatccttagccttggcaaaataaacttctccattgatcgag

SEQ ID NO: 12397 - protein, 669 aa, Homo sapiens; identical to SEQ ID NO: 2125

SEQ ID NO: 12398 - DNA, 514 bp, Homo sapiens
cggatgtaccagtggtggaagatcctgtccggctgcaccgaggctcacatcagaagccggcttcggtttcaccacaaaataaggcatctagtgcccgattctgcctccaaagcagccctgggtcacactcgctgtaggacagatgttattcttcagaatcacgccctctggcaaatgcccatcatcggacaaatggacggatgaagtgtgactcagccatgagaagggggatgctctgagccgcgcggccacaccaccaacccggaggacacggtgctgcgagaaaaagccagccaggagttcagaagtaacagggcaaatagggaaagtccttcctggcctgtctacatacccctgcagccctcccggtcctagggtgactgctgacggagagggcactcccttcccgagtcttctctgcacgtccgtgggcacgcacagctgagcggcacacagcagcccggctcgctcctccgcactggggacacaagatttcactgcacctcacccagcc

SEQ ID NO: 12399 - protein, 66 aa, Homo sapiens
MYQWWKILSGCTEAHIRSRLRFHHKIRHLVPDSASKAALGHTRCRTDVILQNHALWQMPIIGQMDG

SEQ ID NO: 12400 - DNA, 2087 bp, Homo sapiens
ctttgccacagacctgcgccccctggacatcctggcggaagtggtcccttctgatggcgccacaagcgggatcaggatagttcaggttcacggtgcacggggactccagctctcagtagccgccccccgcaccatgagcttcccagcatccaggattttctcccagtgtgacctcttccctgaagaattttccatcgtcgtaactttgagagttcccaatcttccacccaagaggaacgagtacctgctgacggtggtggcagaggagagcgacctgctgctgctcggcctgcggttgtcacctgcccagctgcacttcctgttccttcgcgaggacacggccggcgcctggcagacccgagtgtccttccgcagcccggccctggtggatggccgctggcacacactggtcctggctgtgtccgcaggcgtcttctccctcaccacggactgcggcctcccggtggacataatggccgatgtgcccttcccagccaccctgtcagtgaaaggagctcgattcttcgtcggcagccggaggagagccaaaggcctgttcatgggactggtgaggcaactggtcctgctgccgggctcagacgccaccccaaggctgtgtcccagcaggaacgccccgctggcggtgctgtccatcccacgggtcctgcaggctctcacggggaagccagaagataacgaggtgctaaaatatccctatgaaaccaacattcgagtgacgctgggaccccagccaccgtgtaccgaggtggaagacgcccagttctggtttgatgccagccggaagggcctgtatctgtgtgttggcaacgagtgggtctccgtgttagcagccaaagaaagactggactacgtggaggagcatcagaacttgtccaccaactcagagaccctgggcattgaggtgttccgcatccctcaggtggggctctttgtggccacagccaatcgcaaagccacatccgccgtctacaagtggaccgaagagaagttcgtctcatatcagaacatccccacgcaccaagcacaggcctggaggcatttcaccatcgggaaaaagatcttcctggcagtggctaattttgaaccagatgagaagggtcaggagttctctgtcatttacaaatggagccacagaaagctgaagtttaccccatatcagagcattgccacacacagcgcccgagactgggaggccttcgaggtggatggggagcacttcctggcggtggccaaccaccgggaaggcgacaaccacaacatcgacagtgtcatctacaagtggaacccggcaacccggctcttcgaggccaaccagaccatcgccacctccggcgcctacgactgggagttcttcagtgtggggccctactcgttcctggtggtggccaacaccttcaacggcacctccaccaaggtgcactcgcacctctacatccgactcctgggctccttccagctcttccagtccttcccgacgttcggtgctgcagactgggaggtcttccagatcggggagaggatcttcctcgctgtggcaaacagtcacagctacgatgtggagatgcaagtccagaatgattcctatgtcatcaactccgtcatctacgagctgaacgtgaccgcgcaggcctttgtcaagttccaggacattctcacctgcagtggaggcaggagggggcttcatgcccgtcgtgcggagggatagccgaggccccagagggacaggtgcgaggtgcaggcttcgagtgcccgctgcctgccagtgccagctgccaccagacatgattacttccttcccccgatgttgcatcctccccgacaacaaacaccaggacacggagactggcctgttgagacagatgtgagatccagggaacatggagggtgggtctgtatgtacgagaaagtgatggttccagaccgacacgctccgtggagccacaggaggttgcgtgggcaccacattttggacagtgggcactgagaatccacaaccatcctgaccagtgtggggcgtcctctggggtggaattccggtctgtgaataaacctgcaatcgaatccgt

SEQ ID NO: 12401 - protein, 530 aa, Homo sapiens
MSFPASRIFSQCDLFPEEFSIVVTLRVPNLPPKRNEYLLTVVAEESDLLLLGLRLSPAQLHFLFLREDTAGAWQTRVSFRSPALVDGRWHTLVLAVSAGVFSLTTDCGLPVDIMADVPFPATLSVKGARFFVGSRRRAKGLFMGLVRQLVLLPGSDATPRLCPSRNAPLAVLSIPRVLQALTGKPEDNEVLKYPYETNIRVTLGPQPPCTEVEDAQFWFDASRKGLYLCVGNEWVSVLAAKERLDYVEEHQNLSTNSETLGIEVFRIPQVGLFVATANRKATSAVYKWTEEKFVSYQNIPTHQAQAWRHFTIGKKIFLAVANFEPDEKGQEFSVIYKWSHRKLKFTPYQSIATHSARDWEAFEVDGEHFLAVANHREGDNHNIDSVIYKWNPATRLFEANQTIATSGAYDWEFFSVGPYSFLVVANTFNGTSTKVHSHLYIRLLGSFQLFQSFPTFGAADWEVFQIGERIFLAVANSHSYDVEMQVQNDSYVINSVIYELNVTAQAFVKFQDILTCSGGRRGLHARRAEG

SEQ ID NO: 12402 - DNA, 374 bp, Homo sapiens; identical to SEQ ID NO: 2126

SEQ ID NO: 12403 - protein, 59 aa, Homo sapiens; identical to SEQ ID NO: 2127

SEQ ID NO: 12404 - DNA, 824 bp, Homo sapiens; identical to SEQ ID NO: 2128

SEQ ID NO: 12405 - protein, 65 aa, Homo sapiens
MGNPRLPRLLCALKFSGFLSNIRGPLAGEDGMGDTQLARVRDSALKTPWRPAPCPPPAHSLDDWK

SEQ ID NO: 12406 - DNA, 750 bp, Homo sapiens
gaactttccttatggtcatctttgggtggagccaccacttccagttctgatcttctcattctggttgagtacctgggcttgccagtgcaccccccaggaacaccgcctagtccagggctcccacaggtctcagactgacaggagactgggtcatatgaccagcactagccaatgagctgtgagtacacgtgacacagggacaagctgggtcatgtgactggcactagccaatgagctgtgaggacgtgagcacaggtccagctaggctgggtcatatgacaagcattagccaatgagctgtgaggacacgtgagtacaggtccagctaggctgggacatgtgactggcactggcccatgggctgtgagcacaggtcaggtcagccccttcctgctgcttcccaccgtgtgtgctccttgtctgacttgatatgagaactaacccaatatggcaggaagccactgacatgtgggagccgtgcatggcagtggccagcgtccttgtcctgcgggggctctgtggacatcactcgccttcagaacactgagccctcctacctcctgatatccagggctgccgatgggaaatcccaggctgccgcggctcctgtgtgctttgaagggtgcgcgactctgctctcaagaccccctggaggcccgccccctgccccccaccagctcattcgttagatgattggaagtgactgcctacgtcttctttcaggataaagcctcaagtcctgcaactatt

SEQ ID NO: 12407 - protein, 37 aa, Homo sapiens
MGNPRLPRLLCALKGARLCSQDPLEARPLPPTSSFVR

SEQ ID NO: 12408 - DNA, 2421 bp, Homo sapiens
accgtgtgtgctccttgtctgacttgatatgagaactaacccaatatggcaggaagccactgacatgtgggagccgtgcatggcagtggccagcgtccttgtcctgcgggggctctgtggacatcactcgccttcagaacactgagccctcctacctcctgatatccagggctgccgatgggaaatcccaggctgccgcggctcctgtgtgctttgaagggtgcgcgactctgctctcaagaccccctggaggcccgccccctgccccccaccagctcattcgttagatgattggaagtgactgcctacgtcttctttcaggataaagcctcaagtcctgcaactattccttgtgtgataacgtttcaaatcccttcctggttctggcaaagctcctcaaacatgctccagtgtgctggggctctgcatgtgtgagcctggggccagcagggcgcacgttcatgtcagggcaccagtatgatcctgatgacacatgactggtgtggagccccgggtgtttccacgggaactgctgtcggccggattgctgtgctctgcagctgtgcccaagtccccaagccaccctttcgttgctgctcgatgtcaccatttgcttttgttgttttttttttgtttttgagatggagtctcactctgtcgcccaggctggagtgcagtggcgtgatctcggctcactgcaagctccgcctcccgggttcacgccattctcctgcctcagcctcccgagtagctgggattacaggtacccgccaccatgccaggctaatttttttttgtatttttagtagagacagggtttcaccgtgttcaccaggatggtcttgatctcctgaccttgtgatccgcctgccttggcttcccaaagggttgggattacaggcttgagccactgcgcccagcccaccatttgccttttgagccactgtccccgcgtatcgagccctccttgggagtcccaatttccagcccatatcacgctcttggccccagcttgcagctgctttcgcatctcaacctcaccagcctcaagtccaactccaggtcaatgattactggtcagaggggccattcctgctgagccctgtggtcaggctaacccatgaccgaaggctcctgaaccctccttcaggtccgctgtccgcacaccagcacgtggccaccagcccaggacacccttgtagtttcccagagtcttagcagcatgcgtgttgtggtgagaggactgtgcagggaccagtaagacaaggaacttatgctcagctctgtcccgtgccacatcaaaccaagtgacaggccgcattgcttggcttgatcccagttctgccacgggcaaagccctccaccgttctgagcctctgtgtccttgtggataacagggaccagtggcagcaagcccctctcaaggtgctgtgagggtgatgtgggcggatgcgggcagagctcttggcacaggtgctctacagagtcgaggctcagccagtgtgagccgctaccaccacctacctcctgaggctgttaccaaggccaatggctggaaggaatcttgctcacccccaatcccagtgcactgagcctcactctgcccccgtggcaggaggctcatcccgcctcttcctggctcccaggcacgctcacctgttccatccacagcactagcgagctcaaggtgtgttccttctggcactgctgcctcctcacctgggcgcctgcggctcatctgggcggccacagcagcctcccaatggctcactccctcccagccaccgaccagtcattatcgtgcagccctgtcaaccccacaagggcaggcttcacgtttcacttgcagcctgtggctctgggtggtgaccctgctgcctactcccagccccactgccctgcaggtaccctcccaactttcccagccctcacttcctcctggtgagggctgggaaagtggggagggtgctccctgacatctgctctcctcgtgccctgaacatccacgtaaagctgcccttccccactggaccatgagtgcccgaagggtggggcggtggtcacctggatgacgctgtgccccagcctgccagagggctgagcacgtgggagtcccggagcaattctctgcacgcattaaggcgtgtgattggtccctgtgagccgcggctcctggtccggcccctgcgggcttctcaaggtggtcacactcccggtttcctaagctgctcttactcctgctgggtggaggggctccaggaacctgcgactgctgaactccatcttcctcccttctgttttgaagctcattcccatgtgctacctgcaggcttgctctaatgagatgtatgtatggaatgttatgtatggaatgttccagaatgccttcaatcatttcagccataaagccccacccaccac

SEQ ID NO: 12409 - protein, 37 aa, Homo sapiens; identical to SEQ ID NO: 12407

SEQ ID NO: 12410 - DNA, 5289 bp, Homo sapiens
atggcctcggcccccgcggaggcggagacccgacagaggctgctacgcaccgtcaagaaggagcctgaaaggccttgtggggagcaatgcagcccttttggggcacctatacccaggtcaccttggtcaccttggacctcttcccctccggtcacctttgccttccaggtgaagcagatcatggaggaggctgtgacacgcaagtttgtccacgaagacagcagccacatcatctccttctgtgcggctgtggaggcctgcgttctgcacgggcttcggcggcgggcggctggcttcctacgcagcaataagattgcagccctctttatgaaagtgggcaagaacttcccgccggctgaggatctgagccgcaaggtgcaagacctggagcagctgatcgagagcgcgagaaaccagattcaaggcctccaggagaatgtgcggaagctgccgaagctgcccaacttgtccccacttgccatcaagcatctgtggattcgcacagccttgtttgagaaggtcctggacaaaattgtgcattaccttgtggaaaacagcagtaaatactatgagaaggaagctctcctgatggaccctgtggacggccccatccttgcatctttgttggtggggccctgtgccctagagtacaccaagatgaagactgcagatcacttctggaccgatccctcggctgacgaacttgtccagaggcaccgcatccacagctcccacgtgcggcaggactcgcccaccaagcgtcctgccctctgtatccagaagaggcattccagtggcagcatggatgaccggccatccctctctgcccgcgactacgtggagtccctgcatcagaactcccgtgccacccttctctatggcaaaaacaacgttcttgttcagccgagggacgacatggaggctgtgccagggtacctgtccctgcaccagacggctgacgtcatgaccttgaagtggacacccaaccagctgatgaacgggtctgtgggggacctggactatgagaagagcgtctactgggactatgccatgaccatccgcttggaggagattgtctacctgcactgccaccagcaagttgacagcggcgggacagtggtattggtcagccaggacgggatccagaggccgcccttccgcttccccaagggcgggcacctcctgcagttcctctcgtgcctggagaatgggctgctcccacatgggcagttggacccgccactgtggtcccagaggggtaagggcaaagtgtttcctaaactgcgcaagcgaagccctcagggttctgccgagtccacatcttcagacaaagatgatgatgaggccacggattatgtgttcaggatcatctaccctggcatgcagtcggaattcgtgccccaggatctgatggacgtctctgtaagcaacctcccatccctgtggcagcccagtccccggaagtcctcctgttcatcctgttcacagagtggctcggctgatggtagctcgaccaatggctgcaaccatgagagggctcccctgaaacttctctgtgacaatatgaagtaccagatcctctccagagccttctatggatggctggcctactgcagacacctgtccaccgtgagaacccacctatcagccctggtcaatcacatgatcgtgtctccagacttgccctgcgatgctggacagggactgacagccaggatctgggagcagtaccttcacgacagcacaagttacgaggagcaggagctgctgcgcctcatctactacgggggcatccagcctgagatccgcaaggccgtgtggcccttcctcctgggccactaccagttcgggatgacggaaacagaaaggaaagaggtggacgagcagattcatgcctgctatgcacagaccatggctgagtggctgggctgcgaggcgatcgtgcggcagagggagcgggagtcccatgcggccgccctggccaaatgctcatccggggccagcttggacagccacctgcaccggatgttgcacagggactcaaccatcagcaatgagtcctcccagagctgcagttcgggccgccagaacatccgcctgcacagcgactccagcagcagcacacaggtgtttgagtctgtggatgaggtggagcaggtggaggctgaaggcagattggaggagaaacagcccaagatccccaatgggaacctagtgaacggcacttgttccccagactcgggtcatccttcctcccataacttctcctcgggcctctcagagcactcagagcccagtctgagcacagaagacagtgtcttggacgcccagcggaacacccccacggtgctgcgacctagggatggcagcgtggatgacaggcagagcagcgaggccaccacatctcaggatgaggctccccgggaggagctggccgtgcaggacagcctggagagtgacctcctggccaacgagagcatggacgagttcatgtccatcacgggcagcctggacatggccctgcctgaaaaggacgatgttgtgatggagggctggaggagcagcgagacagagaaacatggccaggcggacagtgaggacaacctctcggaggagcctgagatggaaagtctcttccctgccctggcttctctggctgtgactacttctgccaacgaggtgtcccctgtgtcttccagcggcgtcacctactctccagagctgctggatctgtacacggtgaacctgcaccgcatcgagaaggatgtgcagaggtgcgaccgcaactactggtacttcacgcccgccaacttggagaagctgcgtaacatcatgtgcagctacatctggcagcacattgagatcggctatgtccagggcatgtgtgatcttctggctccactgctggtcattctggatgatgaggcccttgccttcagctgcttcacggagctcatgaagaggatgaaccagaacttcccccacggaggcgccatggacacgcactttgcaaacatgagatcgttgatccagatcctggactcagagctgtttgagctgatgcatcagaacggggactatactcacttctacttctgctaccgctggttcctgctggatttcaagcgagaactcgtctatgatgacgtcttcttggtctgggagaccatctgggcagccaaacacgtctcctctgcgcactacgtcctgttcattgcgctggctctggtggaagtctaccgtgacatcattttggagaacaacatggatttcacagacatcatcaaattctttaatgaaatggctgagcgacacaacaccaagcaagtcctgaagctggcgcgggacctcgtgtacaaggtgcagactctgattgagaacaagtgaggggcacctcaccccggcagcctcagccaagctgcccctgccccgctcctctgcttacttttcctcctgtcttttgacgctaagccaccctggtcctgacgcctcccctcacttagaaaaggcatacaggaggccgggcatggtggctcacacctgtaatcccagcactttgggaggctaaggtgggcggatcacaaggtcaggagttttgagaccagcctggccaacatggtgaaaccccatctctactaaaaatacaaaaattagctgggtgtggtggcgggtgcctgtaatcccagctacttgggaggctgaggcaggagaatcacttgaacctgggaggtggaggttgcagtgagttgagatcacgccactgcactccagcccgggcgacagttcaagactccatctcaaaaaaaaaaagaaaaggcacacaagagtccctcacacatctctcttggagtctgggattccatctgttgtattttctccttttttctcctctgtctgatgccagaagatacttgttttcttcttttcaagaaaagtatctccccacataggcggtggacccaaaaagtgtaggcatgagacggtcagagctctttggggtcctgctcagagtcccccaggcagggcagagtctgtatcctgctgccatcttgcaagggaaaaccgcctctccttccaagtattgggtcttggaaaggtgtgtgtttggtgaaagccacttaatggtggtggggtgcagcttttctctaagtgcagttactcactcaggacaaaggaggaaaaggaaggcagaggtcagccagggtagagggtgatgtctgttttccttgggaaacatctgctgatgaactgggtccagggccgtgctaggtctgggaacaatcctctccaggtcttcacacagagtatcaccaatccacaaacagacccgaagtgaactagtttactctgcctacctgtcctttcaatagagcagtctttcccgctcttctgttctgagaatgcacccggaatgggggaaacccagcaagcagcagagagaaaggctcttcccgggagacctgccgcctctagggtggtcagagaatagcagctgggattttggagagggagaggataggtaaagcagcgtattgaagcatttgcggaggggtgtattagtcctcccaccctgagcacaccaggacggggatgcatccttgccttgtgtgcttgtaaaggcttctttcccttggtatagcaacttcaactgcacctgaacctccaacctctgcccagcctctggtgcagggtggatagaggtctagccagcccttacttcctgaagagagctctgtgggaaactcgaggctacagtagcttcccggctcccagctcctaccctacccccaccaaagcagaaacgggagacggcaacgttctggctgccattagacttacgtctccctcccctacgtcccctagcttcccaagacaggaagaaatgtgcaaaaggcccctccggagaaaactattttgccgttcagctgttctttacagaggatgttattttagtgagacccaggtcctagaccttctgattcctatttatttttttaacagactagtctcaaagtacagcacaaaatctcttctctgccttctcttgtgatgttccagagagcatctgtggttgtgatttggaataagtcatatttatttggtttactgtgcctattcagatctctgtatgttgtgtgtgtttctgtgtcctggaattggatgcgtgggactcgttctgtccgcggagtgcactctttttttcagtgtggcccacatatcttgtaaatgtttgctgaagagttgtgtctatatatagagaaaatatatataaacagagaaatatgtgaa

SEQ ID NO: 12411 - protein, 1128 aa, Homo sapiens
MASAPAEAETRQRLLRTVKKEPERPCGEQCSPFGAPIPRSPWSPWTSSPPVTFAFQVKQIMEEAVTRKFVHEDSSHIISFCAAVEACVLHGLRRRAAGFLRSNKIAALFMKVGKNFPPAEDLSRKVQDLEQLIESARNQIQGLQENVRKLPKLPNLSPLAIKHLWIRTALFEKVLDKIVHYLVENSSKYYEKEALLMDPVDGPILASLLVGPCALEYTKMKTADHFWTDPSADELVQRHRIHSSHVRQDSPTKRPALCIQKRHSSGSMDDRPSLSARDYVESLHQNSRATLLYGKNNVLVQPRDDMEAVPGYLSLHQTADVMTLKWTPNQLMNGSVGDLDYEKSVYWDYAMTIRLEEIVYLHCHQQVDSGGTVVLVSQDGIQRPPFRFPKGGHLLQFLSCLENGLLPHGQLDPPLWSQRGKGKVFPKLRKRSPQGSAESTSSDKDDDEATDYVFRIIYPGMQSEFVPQDLMDVSVSNLPSLWQPSPRKSSCSSCSQSGSADGSSTNGCNHERAPLKLLCDNMKYQILSRAFYGWLAYCRHLSTVRTHLSALVNHMIVSPDLPCDAGQGLTARIWEQYLHDSTSYEEQELLRLIYYGGIQPEIRKAVWPFLLGHYQFGMTETERKEVDEQIHACYAQTMAEWLGCEAIVRQRERESHAAALAKCSSGASLDSHLHRMLHRDSTISNESSQSCSSGRQNIRLHSDSSSSTQVFESVDEVEQVEAEGRLEEKQPKIPNGNLVNGTCSPDSGHPSSHNFSSGLSEHSEPSLSTEDSVLDAQRNTPTVLRPRDGSVDDRQSSEATTSQDEAPREELAVQDSLESDLLANESMDEFMSITGSLDMALPEKDDVVMEGWRSSETEKHGQADSEDNLSEEPEMESLFPALASLAVTTSANEVSPVSSSGVTYSPELLDLYTVNLHRIEKDVQRCDRNYWYFTPANLEKLRNIMCSYIWQHIEIGYVQGMCDLLAPLLVILDDEALAFSCFTELMKRMNQNFPHGGAMDTHFANMRSLIQILDSELFELMHQNGDYTHFYFCYRWFLLDFKRELVYDDVFLVWETIWAAKHVSSAHYVLFIALALVEVYRDIILENNMDFTDIIKFFNEMAERHNTKQVLKLARDLVYKVQTLIENK

SEQ ID NO: 12412 - DNA, 7045 bp, Homo sapiens
gggccacaggacagtgggaaacgctgtgggttccactgggtgggggtaactcagaactttgctttatttaccccaaacatcagaatcctcagggtgacatagagctggaacaggccttttggattgttttccaacctcctcaacctcaaagtggggtaactgaggtccagagaggagacggactttgcttaaatcctacaatgactctgggcagaatcaggcccagaatctagtggagcagaaggtattcaggctgccagaggatcaacaccaagagcagagaggcacagctgcccttttgcactgtgtccctgtgcctggcacattagaggcactcaggtgagaattcttgagcaagggagtgcgcagggaagagcacacagcctgggtgtctgtctcgagctggaacctgtctctgatagccagctctgcctccctgggtaagtgctttcatcttgctgagcatccatttcccaaaataagatcagaaacccacttgggaggtctccaagcagggatttgaactcaggtctacctgattccagggcaggtttttttaccctgcactttcttgattcctttatatatcttattcattcatacactgattcattcattcatccagtcatttagaaaatgttgattgagcatctgccctgtgccaggcactgttctaggctgtgcaaattcagcagtgaatgaggcaaatgaagtttctgcccttgtggaacttaaattctagaagagagagatagacggtcaacaaatcaacaaatagaatgggaatagtggtagactgggcgcggcggctcacgcatgtaatccaagcacttttggaggccgaggcgggcagatcacttgaggtcaggagttcaagacaacatagtgaaaccccgtctgtactaaaaatagaaaagttagctagacgtggtggtgggcacttgtaatcccagctactcggaaggcagaggcaggagaatggcttgaacccgggaggcggaggttgcgatgagccaagattgtgccattgcactccagccggggcaacaagagcgaaactccgtctaaaaaaaaaaagaatgagaatagtggtgagtgccctacaggaactaaaacaggggatgggagtggggaggggtctgccttagacagtgtggtcaggaaaggagatgacgttttgtgagatgcctaagagaagcagcagcctgctgtgtgaagaacctgaacgaataattgataaaatgagaagcatggagctgtgacaggcctcagacctccaaaagacaaggcgaggagggggaaggaaagcaggtgtcaaaacatcccaaacagcctgaaaggccttgtggggagcaatgcagcccttttggggcacctatacccaggtcaccttggtcaccttggacctcttcccctccggtcacctttgccttccaggtgaagcagatcatggaggaggctgtgacacgcaagtttgtccacgaagacagcagccacatcatctccttctgtgcggctgtggaggcctgcgttctgcacgggcttcggcggcgggcggctggcttcctacgcagcaataagattgcagccctctttatgaaagtgggcaagaacttcccgccggctgaggatctgagccgcaaggtgcaagacctggagcagctgatcgagagcgcgagaaaccagattcaaggcctccaggagaatgtgcggaagctgccgaagctgcccaacttgtccccacttgccatcaagcatctgtggattcgcacagccttgtttgagaaggtcctggacaaaattgtgcattaccttgtggaaaacagcagtaaatactatgagaaggaagctctcctgatggaccctgtggacggccccatccttgcatctttgttggtggggccctgtgccctagagtacaccaagatgaagactgcagatcacttctggaccgatccctcggctgacgaacttgtccagaggcaccgcatccacagctcccacgtgcggcaggactcgcccaccaagcgtcctgccctctgtatccagaagaggcattccagtggcagcatggatgaccggccatccctctctgcccgcgactacgtggagtccctgcatcagaactcccgtgccacccttctctatggcaaaaacaacgttcttgttcagccgagggacgacatggaggctgtgccagggtacctgtccctgcaccagacggctgacgtcatgaccttgaagtggacacccaaccagctgatgaacgggtctgtgggggacctggactatgagaagagcgtctactgggactatgccatgaccatccgcttggaggagattgtctacctgcactgccaccagcaagttgacagcggcgggacagtggtattggtcagccaggacgggatccagaggccgcccttccgcttccccaagggcgggcacctcctgcagttcctctcgtgcctggagaatgggctgctcccacatgggcagttggacccgccactgtggtcccagaggggtaagggcaaagtgtttcctaaactgcgcaagcgaagccctcagggttctgccgagtccacatcttcagacaaagatgatgatgaggccacggattatgtgttcaggatcatctaccctggcatgcagtcggaattcgtgccccaggatctgatggacgtctctgtaagcaacctcccatccctgtggcagcccagtccccggaagtcctcctgttcatcctgttcacagagtggctcggctgatggtagctcgaccaatggctgcaaccatgagagggctcccctgaaacttctctgtgacaatatgaagtaccagatcctctccagagccttctatggatggctggcctactgcagacacctgtccaccgtgagaacccacctatcagccctggtcaatcacatgatcgtgtctccagacttgccctgcgatgctggacagggactgacagccaggatctgggagcagtaccttcacgacagcacaagttacgaggagcaggagctgctgcgcctcatctactacgggggcatccagcctgagatccgcaaggccgtgtggcccttcctcctgggccactaccagttcgggatgacggaaacagaaaggaaagagtcctcccagagctgcagttcgggccgccagaacatccgcctgcacagcgactccagcagcagcacacaggtgtttgagtctgtggatgaggtggagcaggtggaggctgaaggcagattggaggagaaacagcccaagatccccaatgggaacctagtgaacggcacttgttccccagactcgggtcatccttcctcccataacttctcctcgggcctctcagagcactcagagcccagtctgagcacagaagacagtgtcttggacgcccagcggaacacccccacggtgctgcgacctagggatggcagcgtggatgacaggcagagcagcgaggccaccacatctcaggatgaggctccccgggaggagctggccgtgcaggacagcctggagagtgacctcctggccaacgagagcatggacgagttcatgtccatcacgggcagcctggacatggccctgcctgaaaaggacgatgttgtgatggagggctggaggagcagcgagacagagaaacatggccaggcggacagtgaggacaacctctcggaggagcctgagatggaaagtctcttccctgccctggcttctctggctgtgactacttctgccaacgaggtgtcccctgtgtcttccagcggcgtcacctactctccagagctgctggatctgtacacggtgaacctgcaccgcatcgagaaggatgtgcagaggtgcgaccgcaactactggtacttcacgcccgccaacttggagaagctgcgtaacatcatgtgcagctacatctggcagcacattgagatcggctatgtccagggcatgtgtgatcttctggctccactgctggtcattctggatgatgaggcccttgccttcagctgcttcacggagctcatgaagaggatgaaccagaacttcccccacggaggcgccatggacacgcactttgcaaacatgagatcgttgatccagatcctggactcagagctgtttgagctgatgcatcagaacggggactatactcacttctacttctgctaccgctggttcctgctggatttcaagcgagaactcgtctatgatgacgtcttcttggtctgggagaccatctgggcagccaaacacgtctcctctgcgcactacgtcctgttcattgcgctggctctggtggaagtctaccgtgacatcattttggagaacaacatggatttcacagacatcatcaaattctttaatgaaatggctgagcgacacaacaccaagcaagtcctgaagctggcgcgggacctcgtgtacaaggtgcagactctgattgagaacaagtgaggggcacctcaccccggcagcctcagccaagctgcccctgccccgctcctctgcttacttttcctcctggctggatgggcaccccgggagcggggtcctggtgtctgttcacaagcgtggagttcagtgcgcaaagaaactaccctgacttttacttctgggcagatggggtggagggagtaccccttcaattcagccttacattttcctgtttgaccaaagattgcccaagtctggcgttcctcccttgcaggaggtggaggttgttggtggaggaggagccatctttgtttgctggtgcccggaatggtctcctcttcttctttccctatccctccaaactgtcttgtaagatgagacctggggaggaaacttctttttggaaattggtgtagaagaggtgtgtggggctacctctatgctcctctgcaaggggcctttggcgatgttctggacatggctgaagattgacttagagattgaccctccacctcgacattactgacatttggggccaggtgattctttttgaggggactgtcccctgcattgtaggatgctgagcagcatcccgggcctcaccagatgccagtagtgccatcccccaaccatacccctggttgtgacagcccccaaaaatgtctctagacattgcgaaatgttccctgcagggcaaaattgcccccatttgagaaccactggcttggagaagggactacaaatgtacttcctcccccattcttttgacgctaagccaccctggtcctgacgcctcccctcacttagaaaaggcatacaggaggccgggcatggtggctcacacctgtaatcccagcactttgggaggctaaggtgggcggatcacaaggtcaggagttttgagaccagcctggccaacatggtgaaaccccatctctactaaaaatacaaaaattagctgggtgtggtggcgggtgcctgtaatcccagctacttgggaggctgaggcaggagaatcacttgaacctgggaggtggaggttgcagtgagttgagatcacgccactgcactccagcccgggcgacagttcaagactccatctcaaaaaaaaaaagaaaaggcacacaagagtccctcacacatctctcttggagtctgggattccatctgttgtattttctccttttttctcctctgtctgatgccagaagatacttgttttcttcttttcaagaaaagtatctccccacataggcggtggacccaaaaagtgtaggcatgagacggtcagagctctttggggtcctgctcagagtcccccaggcagggcagagtctgtatcctgctgccatcttgcaagggaaaaccgcctctccttccaagtattgggtcttggaaaggtgtgtgtttggtgaaagccacttaatggtggtggggtgcagcttttctctaagtgcagttactcactcaggacaaaggaggaaaaggaaggcagaggtcagccagggtagagggtgatgtctgttttccttgggaaacatctgctgatgaactgggtccagggccgtgctaggtctgggaacaatcctctccaggtcttcacacagagtatcaccaatccacaaacagacccgaagtgaactagtttactctgcctacctgtcctttcaatagagcagtctttcccgctcttctgttctgagaatgcacccggaatgggggaaacccagcaagcagcagagagaaaggctcttcccgggagacctgccgcctctagggtggtcagagaatagcagctgggattttggagagggagaggataggtaaagcagcgtattgaagcatttgcggaggggtgtattagtcctcccaccctgagcacaccaggacggggatgcatccttgccttgtgtgcttgtaaaggcttctttcccttggtatagcaacttcaactgcacctgaacctccaacctctgcccagcctctggtgcagggtggatagaggtctagccagcccttacttcctgaagagagctctgtgggaaactcgaggctacagtagcttcccggctcccagctcctaccctacccccaccaaagcagaaacgggagacggcaacgttctggctgccattagacttacgtctccctcccctacgtcccctagcttcccaagacaggaagaaatgtgcaaaaggcccctccggagaaaactattttgccgttcagctgttctttacagaggatgttattttagtgagacccaggtcctagaccttctgattcctatttatttttttaacagactagtctcaaagtacagcacaaaatctcttctctgccttctcttgtgatgttccagagagcatctgtggttgtgatttggaataagtcatatttatttggtttactgtgcctattcagatctctgtatgttgtgtgtgtttctgtgtcctggaattggatgcgtgggactcgttctgtccgcggagtgcactctttttttcagtgtggcccacatatcttgtaaatgtttgctgaagagttgtgtctatatatagagaaaatatatataaacagagaaatatgtgaa

SEQ ID NO: 12413 - protein, 1007 aa, Homo sapiens
MEEAVTRKFVHEDSSHIISFCAAVEACVLHGLRRRAAGFLRSNKIAALFMKVGKNFPPAEDLSRKVQDLEQLIESARNQIQGLQENVRKLPKLPNLSPLAIKHLWIRTALFEKVLDKIVHYLVENSSKYYEKEALLMDPVDGPILASLLVGPCALEYTKMKTADHFWTDPSADELVQRHRIHSSHVRQDSPTKRPALCIQKRHSSGSMDDRPSLSARDYVESLHQNSRATLLYGKNNVLVQPRDDMEAVPGYLSLHQTADVMTLKWTPNQLMNGSVGDLDYEKSVYWDYAMTIRLEEIVYLHCHQQVDSGGTVVLVSQDGIQRPPFRFPKGGHLLQFLSCLENGLLPHGQLDPPLWSQRGKGKVFPKLRKRSPQGSAESTSSDKDDDEATDYVFRIIYPGMQSEFVPQDLMDVSVSNLPSLWQPSPRKSSCSSCSQSGSADGSSTNGCNHERAPLKLLCDNMKYQILSRAFYGWLAYCRHLSTVRTHLSALVNHMIVSPDLPCDAGQGLTARIWEQYLHDSTSYEEQELLRLIYYGGIQPEIRKAVWPFLLGHYQFGMTETERKESSQSCSSGRQNIRLHSDSSSSTQVFESVDEVEQVEAEGRLEEKQPKIPNGNLVNGTCSPDSGHPSSHNFSSGLSEHSEPSLSTEDSVLDAQRNTPTVLRPRDGSVDDRQSSEATTSQDEAPREELAVQDSLESDLLANESMDEFMSITGSLDMALPEKDDVVMEGWRSSETEKHGQADSEDNLSEEPEMESLFPALASLAVTTSANEVSPVSSSGVTYSPELLDLYTVNLHRIEKDVQRCDRNYWYFTPANLEKLRNIMCSYIWQHIEIGYVQGMCDLLAPLLVILDDEALAFSCFTELMKRMNQNFPHGGAMDTHFANMRSLIQILDSELFELMHQNGDYTHFYFCYRWFLLDFKRELVYDDVFLVWETIWAAKHVSSAHYVLFIALALVEVYRDIILENNMDFTDIIKFFNEMAERHNTKQVLKLARDLVYKVQTLIENK

SEQ ID NO: 12414 - DNA, 751 bp, Homo sapiens
atgaagaagaccccgaccttctcctttggcatcctcacctactgctcctggcctcagggcaacagttggaaccagagctgcgtgaccttcagttccctggaggatattcctgactttgcctggaaggtctcagctgtgatgctcctcggaggctggctcctgttggccttcaatgcaattttcctcctgtcttgggctgtggcccccaaagggctgtgcccaaggagaagcagtgttccaatgccaggggtgcaggcagtggcagctactgccatgattgtgggtctgctgattttcccaatcggccttgcctccccattcatcaaggaagtgtgcgaagcctcctccatgtattatggtgggaagtgccggctgggttggggttacatgactgctatcctcaatgcagtcctggccagcctcctgcccatcatcagctggccccacacaaccaaggtccaagggaggaccatcatcttctccagtgccaccgagagaatcatctttgtgccagaaatgaacaaataaaaatctcctgggagtagcacaaagggcacactccagagttttatgaaatcatcatgtagccaacttcaaatcccatctctgctccttcttgctgtgtgacttcaggcaagccactttacctctctggaacagttttttcttctggaaaatgaaagttgaaatcatacctacctcataaggttgttctgagaattcactggagatgctctgtgtaaataaagca

SEQ ID NO: 12415 - protein, 175 aa, Homo sapiens
MKKTPTFSFGILTYCSWPQGNSWNQSCVTFSSLEDIPDFAWKVSAVMLLGGWLLLAFNAIFLLSWAVAPKGLCPRRSSVPMPGVQAVAATAMIVGLLIFPIGLASPFIKEVCEASSMYYGGKCRLGWGYMTAILNAVLASLLPIISWPHTTKVQGRTIIFSSATERIIFVPEMNK

SEQ ID NO: 12416 - DNA, 866 bp, Homo sapiens
cattgttctacaagctaaattattccttcaaaggagaggagaattgtataaggtcacagacgtggatccaaagccggagcctgagcagaggtggccacgctggagggtcttgacctaaagtgtgaccccgaccttctcctttggcatcctcacctactgctcctggcctcagggcaacagttggaaccagagctgcgtgaccttcagttccctggaggatattcctgactttgcctggaaggtctcagctgtgatgctcctcggaggctggctcctgttggccttcaatgcaattttcctcctgtcttgggctgtggcccccaaagggctgtgcccaaggagaagcagtgttccaatgccaggggtgcaggcagtggcagctactgccatgattgtgggtctgctgattttcccaatcggccttgcctccccattcatcaaggaagtgtgcgaagcctcctccatgtattatggtgggaagtgccggctgggttggggttacatgactgctatcctcaatgcagtcctggccagcctcctgcccatcatcagctggccccacacaaccaaggtccaagggaggaccatcatcttctccagtgccaccgagagaatcatctttgtgccagaaatgaacaaataaaaatctcctgggagtagcacaaagggcacactccagagttttatgaaatcatcatgtagccaacttcaaatcccatctctgctccttcttgctgtgtgacttcaggcaagccactttacctctctggaacagttttttcttctggaaaatgaaagttgaaatcatacctacctcataaggttgttctgagaattcactggagatgctctgtgtaaataaagca

SEQ ID NO: 12417 - protein, 129 aa, Homo sapiens; identical to SEQ ID NO: 2134

SEQ ID NO: 12418 - DNA, 1929 bp, Homo sapiens
gcgggcaggtggcggcgcggcgcgggctggcggtggctccacgacagggtcttactctgtcacccaggctggcgtgccatggtgcagtcatagctcactgcagcctcaaattcatgggctcaagcaattcacctcagcctcccaaagtgctggaactacaagcatacaccaccatacccaacctgctgaaactcagcctgctgggacgagtcttctttcccccttcttgtttctgccatggaagtgtgtggacagccccattcatgatgacatgtgacactactggcttttcccggcagtcacaccccctgacccagggcctgccagcttggcaattgcttctccattcttgaagttcctaacccccatgaatccacaaccataaccatggccacgcgggtcgaggtgggctccataacgcccttgacggccgtgccaggcctgggtgagatgggcaaggaggagaccctgacgaggacctacttcctccaggccggcgaagcctctggggctcccccagcccggatcttggaagcgaagagccccctgcggagcccggcccggttactccctctgccaaggctcgcccccaaacccttctcgaaggagcaggacgtgaaatctcctgtcccgtctctgcggcccagttcgactggaccttccccctctggggggctctctgaggagccagcagcaaaggatctggacaacaggatgcccggcttggtggggcaggaggtgggcagtggggagggcccgaggacgagctcgcccctcttcaacaaggctgtgttcctgcggcccagctccagcaccatgattctcttcgaaaccaccaaaagcggccccgctctggggaaggcggttagtgagggggcggaggaggccaagctaggtgtgtccggctcccggcctgaggtggctgccaagcccgccctgcccacccagaagcctgcggggacccttccccggtcagctcccctgtctcaggacacaaaaccacctgtaccccaagaggaggcaggccaagaccatcctccctcaaaggccagcagtgtggaggacacggcacgcccccttgtggagcccaggcctcgcctgaagagaaggcccgtgtctgccattttcacggagtccattcagcctcagaagccaggccccggcgcagcggccacagtgggcaaagtgccacccacccctcccgagaagacgtgggtgaggaagcccaggcccttgtccatggacctcacggcccggtttgagaacaaagaggccttgctgaggaaggtggccgatgaaggaagtggacccacagcaggggatatggctgggctagagaggcccagagcagcgtccaagctggacagggactgtttggtcaaggcggaggctcctcttcatgatcctgatttggacttcctggaggtggccaagaaaatccgtgaacggaaggagaagatgctttcgaagccggagatgggcagccccagagccctggtggggggctcatctggggtcacccccagcaatgaccagagtccctgggaagaaaaggccaagctggacccagagccagagaaggctgctgagtccccctcacccaggctgggaaggggcctagaacttgctgaggttaagagcagagtggcggatggggaggccgcggcagggggagagtgggcctccaggaggagtgtcaggaagtgcatcagcctgtttcgggaggacagcaccttggccttggcagtggggtctgaatctcccctggccacccctgcgtccccatcggcggcaccagagccggagaaaggggttgtgagcgttcaggaacggatcagaggctggactgccgagagctcagaggctaagcccgaggtcaggaggaggacgttccaggctcggccgctgtcggcggatttgaccaaattg

SEQ ID NO: 12419 - protein, 79 aa, Homo sapiens
MGSSNSPQPPKVLELQAYTTIPNLLKLSLLGRVFFPPSCFCHGSVWTAPFMMTCDTTGFSRQSHPLTQGLPAWQLLLHS

SEQ ID NO: 12420 - DNA, 805 bp, Homo sapiens
tatatattttttccttcaatgcaatgaatattttattgagcatcttatgtgggcaaggcactctatttgtgaaaaattcaaaagatcacctgcccttaggaatcctctggtcaactgtacgagaagaaggaagggggcaaggtgagacaagtaagcaaataattatggacttgacttctgggcagaagctatcacagctacatttgttaattgctcagttaagtgacctttgaaatgttctatagccatgtctccattaagaatatgaaatacggccgggcgcggtggctcacgcctgtaatcccagcactttgggaccccgagggaggtggatcatttgaggtcaggagttcgaaaccagcctggccaacatggtgaaaccccgtctctactaaaaatacaaaaaattagccgggctttgtggcggacacctgtaattccagctacttgggaggctgaggcaggagaatcacttgaacctgggaggcggctcttgcagtgagccaagatcacgccactgcactccagcctgggcaacaagagtgaaactccatctcaaaaaaaaaaaaaaaaaaaaaaaagtatcctctaattaaaaaatttttttcctcccaaagtgctgggattaaaggtctgagccaccatgccctacccctatacattgttgtatttgattcttgtgactccattttacaggtgaggaaactgagttttggagaaggagtcacttgcccaggaccatactactgggaatggggaatgtggatccatgtagcctgactccagccaccatgctctgaatcac

SEQ ID NO: 12421 - protein, 69 aa, Homo sapiens
MNILLSILCGQGTLFVKNSKDHLPLGILWSTVREEGRGQGETSKQIIMDLTSGQKLSQLHLLIAQLSDL

SEQ ID NO: 12422 - DNA, 1731 bp, Homo sapiens
gggtcttactctgtcacccaggctggcgtgccatggtgcagtcatagctcactgcagcctcaaattcatgggctcaagcaattcacctcagcctcccaaagtgctggaactacaagcatacaccaccatacccacaattgcttctccattcttgaagttcctaacccccatgaatccacaaccataaccatggccacgcgggtcgaggtgggctccataacgcccttgacggccgtgccaggcctgggtgagatgggcaaggaggagaccctgacgaggacctacttcctccaggccggcgaagcctctggggctcccccagcccggatcttggaagcgaagagccccctgcggagcccggcccggttactccctctgccaaggctcgcccccaaacccttctcgaaggagcaggacgtgaaatctcctgtcccgtctctgcggcccagttcgactggaccttccccctctggggggctctctgaggagccagcagcaaaggatctggacaacaggatgcccggcttggtggggcaggaggtgggcagtggggagggcccgaggacgagctcgcccctcttcaacaaggctgtgttcctgcggcccagctccagcaccatgattctcttcgaaaccaccaaaagcggccccgctctggggaaggcggttagtgagggggcggaggaggccaagctaggtgtgtccggctcccggcctgaggtggctgccaagcccgccctgcccacccagaagcctgcggggacccttccccggtcagctcccctgtctcaggacacaaaaccacctgtaccccaagaggaggcaggccaagaccatcctccctcaaaggccagcagtgtggaggacacggcacgcccccttgtggagcccaggcctcgcctgaagagaaggcccgtgtctgccattttcacggagtccattcagcctcagaagccaggccccggcgcagcggccacagtgggcaaagtgccacccacccctcccgagaagacgtgggtgaggaagcccaggcccttgtccatggacctcacggcccggtttgagaacaaagaggccttgctgaggaaggtggccgatgaaggaagtggacccacagcaggggatatggctgggctagagaggcccagagcagcgtccaagctggacagggactgtttggtcaaggcggaggctcctcttcatgatcctgatttggacttcctggaggtggccaagaaaatccgtgaacggaaggagaagatgctttcgaagccggagatgggcagccccagagccctggtggggggctcatctggggtcacccccagcaatgaccagagtccctgggaagaaaaggccaagctggacccagagccagagaaggctgctgagtccccctcacccaggctgggaaggggcctagaacttgctgaggttaagagcagagtggcggatggggaggccgcggcagggggagagtgggcctccaggaggagtgtcaggaagtgcatcagcctgtttcgggaggacagcaccttggccttggcagtggggtctgaatctcccctggccacccctgcgtccccatcggcggcaccagagccggagaaaggggttgtgagcgttcaggaacggatcagaggctggactgccgagagctcagaggctaagcccgaggtcaggaggaggacgttccaggctcggccgctgtcggcggatttgaccaaattg

SEQ ID NO: 12423 - protein, 39 aa, Homo sapiens
MGSSNSPQPPKVLELQAYTTIPTIASPFLKFLTPMNPQP

SEQ ID NO: 12424 - DNA, 578 bp, Homo sapiens
ggcaaaggagagacgcgaagattacctctgctgggttaacatggcacaatctcggctcaatgaacccatcagctcccaggtttgaggacttctccggcttccgcatcccgagtagctgggattacggacgcctgccaccacacccagctcaaatcattttatgaatgcatatttccatctgggtgaaaaaaaaatcacaagcctctctctcttcctactgagcacctgtgaacagtgacctgcagtttgtggctgcagccagtcctcatggagcctgctgttcttacatttcattctgaggctcacattctcagtcaccatgcagaagaacacccgccccatcctgggtcattacagagtgggccaatccatctgctgcatctgaggagctgggtccagcttctacggtgaatccatatatttctgtatttcctggataaggaagaggaaaggagctgagctggtggaggaagaagatctaatattaactgactccttattttgtaccaggtactgtgttagttacatattttatctcatgtaattcttaccaaatagtaagggggttgggagtgatg

SEQ ID NO: 12425 - protein, 47 aa, Homo sapiens
MEPAVLTFHSEAHILSHHAEEHPPHPGSLQSGPIHLLHLRSWVQLLR

SEQ ID NO: 12426 - DNA, 1770 bp, Homo sapiens
agtatctgggattacaggcgtgtgccaccacgcctggctaattcttttgtattttcagtagagatggggtttcacccatcaggctggtctcgaacttttgacgacctcagatgatccactcacgtcagcctcccaaagtgctgggattataggcctgagccaccacgcccggcctcccagcccctaattcttatgttcatcaatcaatctcttgctggggttcccctaggaggaggtgaaatgaccccagctcgctgttcctcacatgggtgctgccgtgtcactggctcaggctcagttgctgggtcaccagtagaatggacccttcctccacctcagttcagagcacagtgatgattcgtgactttctttcccaatagaacttcaaatctctgaagacggggggtggggggatgtgcttgagtgtttgtactcatggtcttgttctagaagtgacaaagctgggacacaatacctttatgcatgaaaaggttgtcacttgtcacaactaacaggctttcacctcacggaaattttcttcccttgtgcacttttcccctggcagtggacatggctgcactcttccaagaagcaagcagctgtcccgtctgctcagactatctagagaaaccaatgtccctggagtgtggatgcgctgtctgcttcaagtgcatcaattcactgcagaaggagccccatggggaggatctactttgctgttgctgttccatggtctctcagaagaacaaaatcaggcccagttggcagctagagaggctggcttcccacatcaaggaactggagcccaagctgaagaagattctgcagatgaacccaaggatgcggaagttccaagtggatatgaccttggatgccgacacagccaacaacttcctcctcatttctgacgacctcaggagcgtccgaagtgggtgcatcacacagaatcggcaagaccttgccgagagatttgacgtgtccatttgcatcctgggctcccctcgctttacctgtggccgccactactgggaggtggacgtgggaacaagcacagaatgggacctgggagtctgcagagaatctgttcaccgcaaagggaggatccatctgaccacagagcgtggattctggactgtgagtttgagggatggaagccgcctctctgccagcacggtgccgctgactttcctcttcgtagaccgcaagttacagcgagtggggatttttctggatatgggcatgcagaacgtttccttttttgatgctgaaggtggttcccatgtctatacattcaggagtgtctctgctgaggagccactgcacttgttttttgctcctccaagtccacctaatggtgataagagtgtcttgagtatctgtcctgtgataaacccgggcactactgatgctccagtccatcctggggaggccaaataagcccccactgcaaaaaaacaaaaaacaggttaagaaaattacttgggtgggcagacttaggaacgctctactcggtaaaagcgttatacaaagtcataggagaaaaatatgggacaattcatgattatacttaatctaatttgattagtttataaattgagtcctaagtattaattattgccaccatccaactcattgagtcttatggttcacatcttgtttcctatagaaatattctgtattctgggatcaatttccaaatgcttttttatttctgtaagttcaaattaatgtattatagaagttatgagttaaataaacattggaatatca

SEQ ID NO: 12427 - protein, 317 aa, Homo sapiens
MKRLSLVTTNRLSPHGNFLPLCTFPLAVDMAALFQEASSCPVCSDYLEKPMSLECGCAVCFKCINSLQKEPHGEDLLCCCCSMVSQKNKIRPSWQLERLASHIKELEPKLKKILQMNPRMRKFQVDMTLDADTANNFLLISDDLRSVRSGCITQNRQDLAERFDVSICILGSPRFTCGRHYWEVDVGTSTEWDLGVCRESVHRKGRIHLTTERGFWTVSLRDGSRLSASTVPLTFLFVDRKLQRVGIFLDMGMQNVSFFDAEGGSHVYTFRSVSAEEPLHLFFAPPSPPNGDKSVLSICPVINPGTTDAPVHPGEAK

SEQ ID NO: 12428 - DNA, 300 bp, Homo sapiens
acagcgagtggggatttttctggatatgggcatgcagaacgtttccttttttgatgctgaaggtggttcccatgtctatacattcaggagtgtctctgctgaggagccactgcacttgttttttgctcctccaagtccacctaatggtgataagagtgtcttgagtatctgtcctgtgataaacccgggcactactgatgctccagtccatcctggggaggccaaataagcccccacaaagcttcttagagttgtggagcctagggccgggcgtggtagctcacgcctgtaatcccaaca

SEQ ID NO: 12429 - protein, 33 aa, Homo sapiens
MLQSILGRPNKPPQSFLELWSLGPGVVAHACNP

SEQ ID NO: 12430 - DNA, 3911 bp, Homo sapiens
ctcgagctcttgggctcaagcgatcctctcgcttggccgcccaaagtgctgggattagaggtgtgagccactgcaccgccgaaagtgggtttgatgacaatgttgtgaggcaaagcttcttagagttgtggagcctagggccgggcgtggtagctcacgcctgtaatcccaacactttgggaggctgaggcgggtggatcacgaggtcaggagatcgagacattcctggttaacacggtgaaaccccatctctactgctcaggccatgatgagcttcggcggcgcggacgcgctgctgggcgccccgttcgcgccgctgcatggcggcggcagcctccactacgcgctagcccgaaagggtggcgcaggcgggacgcgctccgccgctggctcctccagcggcttccactcgtggacacggacgtccgtgagctccgtgtccgcctcgcccagccgcttccgtggcgcaggcgccgcctcaagcaccgactcgctggacacgctgagcaacgggccggagggctgcatggtggcggtggccacctcacgcagtgagaaggagcagctgcaggcgctgaacgaccgcttcgccgggtacatcgacaaggtgcggcagctggaggcgcacaaccgcagcctggagggcgaggctgcggcgctgcggcagcagcaggcgggccgctccgctatgggcgagctgtacgagcgcgaggtccgcgagatgcgcggcgcggtgctgcgcctgggcgcggcgcgcggtcagctacgcctggagcaggagcacctgctcgaggacatcgcgcacgtgcgccagcgcctagacgacgaggcccggcagcgagaggaggccgaggcggcggcccgcgcgctggcgcgcttcgcgcaggaggccgaggcggcgcgcgtggacctgcagaagaaggcgcaggcgctgcaggaggagtgcggctacctgcggcgccaccaccaggaagaggtgggcgagctgctcggccagatccagggctccggcgccgcgcaggcgcagatgcaggccgagacgcgcgacgccctgaagtgcgacgtgacgtcggcgctgcgcgagattcgcgcgcagcttgaaggccacgcggtgcagagcacgctgcagtccgaggagtggttccgagtgaggctggaccgactgtcggaggcagccaaggtgaacacagacgctatgcgctcagcgcaggaggagataactgagtaccggcgtcagctgcaggccaggaccacagagctggaggcactgaaaagcaccaaggactcactggagaggcagcgctctgagctggaggaccgtcatcaggccgacattgcctcctaccaggaagccattcagcagctggacgctgagctgaggaacaccaagtgggagatggccgcccagctgcgagaataccaggacctgctcaatgtcaagatggctctggatatagagatagccgcttacagaaaactcctggaaggtgaagagtgtcggattggctttggcccaattcctttctcgcttccagaaggactccccaaaattccctctgtgtccactcacataaaggtgaaaagcgaagagaagatcaaagtggtggagaagtctgagaaagaaactgtgattgtggaggaacagacagaggagacccaagtgactgaagaagtgactgaagaagaggagaaagaggccaaagaggaggagggcaaggaggaagaagggggtgaagaagaggaggcagaagggggagaagaagaaacaaagtctcccccagcagaagaggctgcatccccagagaaggaagccaagtcaccagtaaaggaagaggcaaagtcaccggctgaggccaagtccccagagaaggaggaagcaaaatccccagccgaagtcaagtcccctgagaaggccaagtctccagcaaaggaagaggcaaagtcaccgcctgaggccaagtccccagagaaggaggaagcaaaatctccagctgaggtcaagtcccccgagaaggccaagtccccagcaaaggaagaggcaaagtcaccggctgaggccaagtctccagagaaggccaagtccccagtgaaggaagaagcaaagtcaccggctgaggccaagtccccagtgaaggaagaagcaaaatctccagctgaggtcaagtccccggaaaaggccaagtctccaacgaaggaggaagcaaagtcccctgagaaggccaagtccccagagaaggaagaggccaagtcccctgagaaggccaagtccccagtgaaggcagaagcaaagtcccctgagaaggccaagtccccagtgaaggcagaagcaaagtcccctgagaaggccaagtccccagtgaaggaagaagcaaagtcccctgagaaggccaagtccccagtgaaggaagaagcaaagtcccctgagaaggccaagtccccagtgaaggaagaagcaaagacccccgagaaggccaagtccccagtgaaggaagaagctaagtccccagagaaggccaagtccccagagaaggccaagactcttgatgtgaagtctccagaagccaagactccagcgaaggaggaagcaaggtcccctgcagacaaattccctgaaaaggccaaaagccctgtcaaggaggaggtcaagtccccagagaaggcgaaatctcccctgaaggaggatgccaaggcccctgagaaggagatcccaaaaaaggaagaggtgaagtccccagtgaaggaggaggagaagccccaggaggtgaaagtcaaagagcccccaaagaaggcagaggaagagaaagcccctgccacaccaaaaacagaggagaagaaggacagcaagaaagaggaggcacccaagaaggaggctccaaagcccaaggtggaggagaagaaggaacctgctgtcgaaaagcccaaagaatccaaagttgaagccaagaaggaagaggctgaagataagaaaaaagtccccaccccagagaaggaggctcctgccaaggtggaggtgaaggaagacgctaaacccaaagaaaagacagaggtagccaagaaggaaccagatgatgccaaggccaaggaacccagcaaaccagcagagaagaaggaggcagcaccggagaaaaaagacaccaaggaggagaaggccaagaagcctgaggagaaacccaagacagaggccaaagccaaggaagatgacaagaccctctcaaaagagcctagcaagcctaaggcagaaaaggctgaaaaatcctccagcacagaccaaaaagacagcaagcctccagagaaggccacagaagacaaggccgccaaggggaagtaaggcagggagaaaggaacatccggaacagccaaagaaactcagaagagtcccggagctcaaggatcagagtaacacaattttcactttttctgtctttatgtaagaagaaactgcttagatgacggggcctccttcttcaaacaggaatttctgttagcaatatgttagcaagagagggcactcccaggcccctgcccccaggccctccccaggcgatggacaattatgatagcttatgtagctgaatgtgatacatgccgaatgccacacgtaaacacttgactataaaaactgcccccctcctttccaaataagtgcatttattgcctctatgtgcaactgacagatgaccgcaataatgaatgagcagttagaaatacattatgcttgagatgtcttaacctattcccaaatgccttctgttttccaaaggagtggtcaagcccttgcccagagctctctattctggaagagcggtccaggtggggccggggactggccactgaattatgccagggcgcactttccactggagttcactttcaattgcttctgtgcaataaaaccaagtgcttataaaatg

SEQ ID NO: 12431 - protein, 1020 aa, Homo sapiens; identical to SEQ ID NO: 2140

SEQ ID NO: 12432 - DNA, 4015 bp, Homo sapiens
ctcgagctcttgggctcaagcgatcctctcgcttggccgcccaaagtgctgggattagaggtgtgagccactgcaccgccgaaagtgggtttgatgacaatgttgtgaggcaaagcttcttagagttgtggagcctagggccgggcgtggtagctcacgcctgtaatcccaacactttgggaggctgaggcgggtggatcacgaggtcaggagatcgagacattcctggttaacacggtgaaaccccatctctactgctcaggccatgatgagcttcggcggcgcggacgcgctgctgggcgccccgttcgcgccgctgcatggcggcggcagcctccactacgcgctagcccgaaagggtggcgcaggcgggacgcgctccgccgctggctcctccagcggcttccactcgtggacacggacgtccgtgagctccgtgtccgcctcgcccagccgcttccgtggcgcaggcgccgcctcaagcaccgactcgctggacacgctgagcaacgggccggagggctgcatggtggcggtggccacctcacgcagtgagaaggagcagctgcaggcgctgaacgaccgcttcgccgggtacatcgacaaggtgcggcagctggaggcgcacaaccgcagcctggagggcgaggctgcggcgctgcggcagcagcaggcgggccgctccgctatgggcgagctgtacgagcgcgaggtccgcgagatgcgcggcgcggtgctgcgcctgggcgcggcgcgcggtcagctacgcctggagcaggagcacctgctcgaggacatcgcgcacgtgcgccagcgcctagacgacgaggcccggcagcgagaggaggccgaggcggcggcccgcgcgctggcgcgcttcgcgcaggaggccgaggcggcgcgcgtggacctgcagaagaaggcgcaggcgctgcaggaggagtgcggctacctgcggcgccaccaccaggaagaggtgggcgagctgctcggccagatccagggctccggcgccgcgcaggcgcagatgcaggccgagacgcgcgacgccctgaagtgcgacgtgacgtcggcgctgcgcgagattcgcgcgcagcttgaaggccacgcggtgcagagcacgctgcagtccgaggagtggttccgagtgaggctggaccgactgtcggaggcagccaaggtgaacacagacgctatgcgctcagcgcaggaggagataactgagtaccggcgtcagctgcaggccaggaccacagagctggaggcactgaaaagcaccaaggactcactggagaggcagcgctctgagctggaggaccgtcatcaggccgacattgcctcctaccaggaagccattcagcagctggacgctgagctgaggaacaccaagtgggagatggccgcccagctgcgagaataccaggacctgctcaatgtcaagatggctctggatatagagatagccgcttacagaaaactcctggaaggtgaagagtgtcggattggctttggcccaattcctttctcgcttccagaaggactccccaaaattccctctgtgtccactcacataaaggtgaaaagcgaagagaagatcaaagtggtggagaagtctgagaaagaaactgtgattgtggaggaacagacagaggagacccaagtgactgaagaagtgactgaagaagaggagaaagaggccaaagaggaggagggcaaggaggaagaagggggtgaagaagaggaggcagaagggggagaagaagaaacaaagtctcccccagcagaagaggctgcatccccagagaaggaagccaagtcaccagtaaaggaagaggcaaagtcaccggctgaggccaagtccccagagaaggaggaagcaaaatccccagccgaagtcaagtcccctgagaaggccaagtctccagcaaaggaagaggcaaagtcaccgcctgaggccaagtccccagagaaggaggaagcaaaatctccagctgaggtcaagtcccccgagaaggccaagtccccagcaaaggaagaggcaaagtcaccggctgaggccaagtctccagagaaggccaagtccccagtgaaggaagaagcaaagtcaccggctgaggccaagtccccagtgaaggaagaagcaaaatctccagctgaggtcaagtccccggaaaaggccaagtctccaacgaaggaggaagcaaagtcccctgagaaggccaagtccccagagaaggaagaggccaagtcccctgagaaggccaagtccccagtgaaggcagaagcaaagtcccctgagaaggccaagtccccagtgaaggcagaagcaaagtcccctgagaaggccaagtccccagtgaaggaagaagcaaagtcccctgagaaggccaagtccccagtgaaggaagaagcaaagtcccctgagaaggccaagtccccagtgaaggaagaagcaaagacccccgagaaggccaagtccccagtgaaggaagaagctaagtccccagagaaggccaagtccccagagaaggccaagactcttgatgtgaagtctccagaagccaagactccagcgaaggaggaagcaaggtcccctgcagacaaattccctgaaaaggccaaaagccctgtcaaggaggaggtcaagtccccagagaaggcgaaatctcccctgaaggaggatgccaaggcccctgagaaggagatcccaaaaaaggaagaggtgaagtccccagtgaaggaggaggagaagccccaggaggtgaaagtcaaagagcccccaaagaaggcagaggaagagaaagcccctgccacaccaaaaacagaggagaagaaggacagcaagaaagaggaggcacccaagaaggaggctccaaagcccaaggtggaggagaagaaggaacctgctgtcgaaaagcccaaagaatccaaagttgaagccaagaaggaagaggctgaagataagaaaaaagtccccaccccagagaaggaggctcctgccaaggtggaggtgaaggaagacgctaaacccaaagaaaagacagaggtagccaagaaggaaccagatgatgccaaggccaaggaacccagcaaaccagcagagaagaaggaggcagcaccggagaaaaaagacaccaaggaggagaaggccaagaagcctgaggagaaacccaagacagaggccaaagccaaggaagatgacaagaccctctcaaaagagcctagcaagcctaaggcagaaaaggctgaaaaatcctccagcacagaccaaaaagacagcaagcctccagagaaggccacagaagacaaggccgccaaggggaagtaaggcagggagaaaggaacatccggaacagccaaagaaactcagaagagtcccggagctcaaggatcagagtaacacaattttcactttttctgtctttatgtaagaagaaactgcttagatgacggggcctccttcttcaaacaggaatttctgttagcaatatgttagcaagagagggcactcccaggcccctgcccccaggccctccccaggcgatggacaattatgatagcttatgtagctgaatgtgatacatgccgaatgccacacgtaaacacttgactataaaaactgcccccctcctttccaaataagtgcatttattgcctctatgtgcaactgacagatgaccgcaataatgaatgagcagttagaaatacattatgcttgagatgtcttaacctattcccaaatgccttctgttttccaaaggagtggtcaagcccttgcccagagctctctattctggaagagcggtccaggtggggccggggactggccactgaattatgccagggcgcactttccactggagttcactttcaattgcttctgtgcaataaaaccaagtgcttataaaatgaaaatgttgctgctgttattctctttccctgggaaggctgggggcagggcaggggaggtctggatgtgacaccccagactgcatgggactgagcaagcatcagt

SEQ ID NO: 12433 - protein, 1020 aa, Homo sapiens; identical to SEQ ID NO: 2140

SEQ ID NO: 12434 - DNA, 637 bp, Homo sapiens
tccttcactggggacttggccttctcgggggtctttgcttcttccttcactggggacttggccttctcaggggactttgcttcttccttcactggggacttggccttctcaggggactttgcttcttccttcactggggacttggccttctcaggggattggccttctcaggggactttgcttcctccttcgttggagacttggccttttccggggacttgacctcagctggagattttgcttcttccttcactggggacttggcctcagccggtgactttgcttcttccttcactggggacttggccttctctggagacttggcctcagccggtgactttgcctcttcctttgctggggacttggccttctcgggggacttgacctcagctggagattttgcttcctccttctctggggacttggcctcaggcggtgactttgcctcttcctttgctggagacttggccttctcaggggacttgacttcggctggggattttgcttcctccttctctggggacttggcctcagccggtgactttgcctcttcctttactggtgacttggcttccttctctggggatgcagcctcttctgctgggggagactttgtttcttcttctcccccttctgc

SEQ ID NO: 12435 - protein, 210 aa, Homo sapiens
LHWGLGLLGGLCFFLHWGLGLLRGLCFFLHWGLGLLRGLCFFLHWGLGLLRGLAFSGDFASSFVGDLAFSGDLTSAGDFASSFTGDLASAGDFASSFTGDLAFSGDLASAGDFASSFAGDLAFSGDLTSAGDFASSFSGDLASGGDFASSFAGDLAFSGDLTSAGDFASSFSGDLASAGDFASSFTGDLASFSGDAASSAGGDFVSSSPP

SEQ ID NO: 12436 - DNA, 1704 bp, Homo sapiens
gtcaccagtaaaggaagaggcaaagtcaccggctgaggccaagtccccagagaaggaggaagcaaaatccccagccgaagtcaagtcccctgagaaggccaagtctccagcaaaggaagaggcaaagtcaccgcctgaggccaagtccccagagaaggaggaagccaagtctccagagaaggccaatcccctgagaaggccaagtccccagagaaggaagaggccaagtcccctgagaaggccaagtccccagtgaaggcagaagcaaagtcccctgagaaggccaagtccccagtgaaggcagaagcaaagtcccctgagaaggccaagtccccagtgaaggaagaagcaaagtcccctgagaaggccaagtccccagtgaaggaagaagcaaagtcccctgagaaggccaagtccccagtgaaggaagaagcaaagacccccgagaaggccaagtccccagtgaaggaagaagctaagcccctgagaaggagatcccaaaaaaggaagaggtgaagtccccagtgaaggaggaggagaagccccaggaggtgaaagtcaaagagcccccaaagaaggcagaggaagagaaagcccctgccacaccaaaaacagaggagaagaaggacagcaagaaagaggaggcacccaagaaggaggctccaaagcccaaggtggaggagaagaaggaacctgctgtcgaaaagcccaaagaatccaaagttgaagccaagaaggaagaggctgaagataagaaaaaagtccccaccccagagaaggaggctcctgccaaggtggaggtgaaggaagacgctaaacccaaagaaaagacagaggtagccaagaaggaaccagatgatgccaaggccaaggaacccagcaaaccagcagagaagaaggaggcagcaccggagaaaaaagacaccaaggaggagaaggccaagaagcctgaggagaaacccaagacagaggccaaagccaaggaagatgacaagaccctctcaaaagagcctagcaagcctaaggcagaaaaggctgaaaaatcctccagcacagaccaaaaagacagcaagcctccagagaaggccacagaagacaaggccgccaaggggaagtaaggcagggagaaaggaacatccggaacagccaaagaaactcagaagagtcccggagctcaaggatcagagtaacacaattttcactttttctgtctttatgtaagaagaaactgcttagatgacggggcctccttcttcaaacaggaatttctgttagcaatatgttagcaagagagggcactcccaggcccctgcccccaggccctccccaggcgatggacaattatgatagcttatgtagctgaatgtgatacatgccgaatgccacacgtaaacacttgactataaaaactgcccccctcctttccaaataagtgcatttattgcctctatgtgcaactgacagatgaccgcaataatgaatgagcagttagaaatacattatgcttgagatgtcttaacctattcccaaatgccttctgttttccaaaggagtggtcaagcccttgcccagagctctctattctggaagagcggtccaggtggggccggggactggccactgaattatgccagggcgcactttccactggagttcactttcaattgcttctgtgcaataaaaccaagtgcttataaaatgaaa

SEQ ID NO: 12437 - protein, 121 aa, Homo sapiens
MMPRPRNPANQQRRRRQHRRKKTPRRRRPRSLRRNPRQRPKPRKMTRPSQKSLASLRQKRLKNPPAQTKKTASLQRRPQKTRPPRGSKAGRKEHPEQPKKLRRVPELKDQSNTIFTFSVFM

SEQ ID NO: 12438 - DNA, 1709 bp, Homo sapiens
gcaaagtcaccggctgaggccaagtccccagagaaggaggaagaagcaaaatctccagctgaggtcaagtcccccgagaaggccaagtccccagcaaaggaagaggcaaagtcaccggctgaggccaagtctccagagaaggccaagtccccagtgaaggaagaagcaaagtcaccggctgagaagcaaagtcccctgagaaggccaagtccccagagaaggaagaggccaagtcccctgagaaggccaagtccccagtgaaggcagaagcaaagtcccctgagaaggccaagtccccagtgaaggcagaagcaaagtcccctgagaaggccaagtccccagtgaaggaagaagcaaagtcccctgagaaggccaagtccccagtgaaggaagaagcaaagtcccctgagaaggccaagtccccagtgaaggaagaagcaaagacccccgagaaggccaagtccccagtgaaggaagaagctaagcccctgagaaggagatcccaaaaaaggaagaggtgaagtccccagtgaaggaggaggagaagccccaggaggtgaaagtcaaagagcccccaaagaaggcagaggaagagaaagcccctgccacaccaaaaacagaggagaagaaggacagcaagaaagaggaggcacccaagaaggaggctccaaagcccaaggtggaggagaagaaggaacctgctgtcgaaaagcccaaagaatccaaagttgaagccaagaaggaagaggctgaagataagaaaaaagtccccaccccagagaaggaggctcctgccaaggtggaggtgaaggaagacgctaaacccaaagaaaagacagaggtagccaagaaggaaccagatgatgccaaggccaaggaacccagcaaaccagcagagaagaaggaggcagcaccggagaaaaaagacaccaaggaggagaaggccaagaagcctgaggagaaacccaagacagaggccaaagccaaggaagatgacaagaccctctcaaaagagcctagcaagcctaaggcagaaaaggctgaaaaatcctccagcacagaccaaaaagacagcaagcctccagagaaggccacagaagacaaggccgccaaggggaagtaaggcagggagaaaggaacatccggaacagccaaagaaactcagaagagtcccggagctcaaggatcagagtaacacaattttcactttttctgtctttatgtaagaagaaactgcttagatgacggggcctccttcttcaaacaggaatttctgttagcaatatgttagcaagagagggcactcccaggcccctgcccccaggccctccccaggcgatggacaattatgatagcttatgtagctgaatgtgatacatgccgaatgccacacgtaaacacttgactataaaaactgcccccctcctttccaaataagtgcatttattgcctctatgtgcaactgacagatgaccgcaataatgaatgagcagttagaaatacattatgcttgagatgtcttaacctattcccaaatgccttctgttttccaaaggagtggtcaagcccttgcccagagctctctattctggaagagcggtccaggtggggccggggactggccactgaattatgccagggcgcactttccactggagttcactttcaattgcttctgtgcaataaaaccaagtgcttataaaatgaaa

SEQ ID NO: 12439 - protein, 121 aa, Homo sapiens; identical to SEQ ID NO: 12437

SEQ ID NO: 12440 - DNA, 1986 bp, Homo sapiens
caaagtcaccggctgaggccaagtccccagagaaggaggaagcaaaatccccagccgaagtcaagtcccctgagaaggccaagtctccagcaaaggaagaggcaaagtcaccgcctgaggccaagtccccagagaaggaggaagcaaaatctccagctgaggtcaagtcccccgagaaggccaagtccccagcaaaggaagaggcaaagtcaccggctgaggccaagtctccagagaaggccaagtccccagtgaaggaagaagcaaagtcaccggctgaggccaagtccccagtgaaggaagaagcaaaatctccagctgaggtcaagtccccggaaaaggccaagtctccaacgaaggaggaagcaaagtcccctgagaaggccaagtccccagagaaggaagaggccaagtcccctgagaaggccaagtccccagtgaaggcagaagcaaagtcccctgagaaggccaagtccccagtgaaggcagaagcaaagtcccctgagaaggccaagtccccagtgaaggaagaagcaaagtcccctgagaaggccaagtccccagtgaaggaagaagcaaagtcccctgagaaggccaagtccccagtgaaggaagaagcaaagacccccgagaaggccaagtccccagtgaaggaagaagctaagtccccagagaaggccaagtccccagagaaggccaagactcttgatgtgaagtctccagaagccaagactccagcgaaggaggaagcaaggtcccctgcagacaaattccctgaaaaggccaaaagccctgtcaaggaggaggtcaagtccccagagaaggcgaaatctcccctgaaggaggatgccaaggcccctgagaaggagatcccaaaaaaggaagaggtgaagtccccagagaagaaggacagcaagaaagaggaggcacccaagaaggaggctccaaagcccaaggtggaggagaagaaggaacctgctgtcgaaaagcccaaagaatccaaagttgaagccaagaaggaagaggctgaagataagaaaaaagtccccaccccagagaaggaggctcctgccaaggtggaggtgaaggaagacgctaaacccaaagaaaagacagaggtagccaagaaggaaccagatgatgccaaggccaaggaacccagcaaaccagcagagaagaaggaggcagcaccggagaaaaaagacaccaaggaggagaaggccaagaagcctgaggagaaacccaagacagaggccaaagccaaggaagatgacaagaccctctcaaaagagcctagcaagcctaaggcagaaaaggctgaaaaatcctccagcacagaccaaaaagacagcaagcctccagagaaggccacagaagacaaggccgccaaggggaagtaaggcagggagaaaggaacatccggaacagccaaagaaactcagaagagtcccggagctcaaggatcagagtaacacaattttcactttttctgtctttatgtaagaagaaactgcttagatgacggggcctccttcttcaaacaggaatttctgttagcaatatgttagcaagagagggcactcccaggcccctgcccccaggccctccccaggcgatggacaattatgatagcttatgtagctgaatgtgatacatgccgaatgccacacgtaaacacttgactataaaaactgcccccctcctttccaaataagtgcatttattgcctctatgtgcaactgacagatgaccgcaataatgaatgagcagttagaaatacattatgcttgagatgtcttaacctattcccaaatgccttctgttttccaaaggagtggtcaagcccttgcccagagctctctattctggaagagcggtccaggtggggccggggactggccactgaattatgccagggcgcactttccactggagttcactttcaattgcttctgtgcaataaaaccaagtgcttataaaatgaaa

SEQ ID NO: 12441 - protein, 121 aa, Homo sapiens; identical to SEQ ID NO: 12437

SEQ ID NO: 12442 - DNA, 890 bp, Homo sapiens
tggcccacatgtgactcttgatattctccaaagacaccagccaattaaaaagcgtcacctgaccagtggcctttgtctgtggttcctggcaaggtggctttgcagtctggaagggcaggtgggagctgtgacacagtgtgaaaaagcatttgtagagagactttttctcagcagccaataaaagcagagtggaaaaagattccaattctgcagagagatgctcacctcttgtctacgcacaccctatttgtgctttgcggggtgaggtcctcatgatcttgtatttattatcccaagttcctgctgttaagaggtggtaggagaagccaaaggcagcagagcacaaaaagcaaaactcttccctccccacccgctcttcccattagtcctgtcagggttgccgatggacaaattgtctctgatcgttggatgttataaatgtctgacagtgcagtgcaaacagaagacaaactcagttgatccttgaacaactcaggggttaggggcaccaacaccccctgccctgcacagttgaaaaatccgtgtataacttttgactccctaaaaacttaactaatagcctgctgttgaccagtagtatgctattagtagttacttactgctaacatagtcagtacatattttcagtatatattttgtatcttatacactgtattcttacaatacagtaaactagagaaaagaaaatgttataaggaaagtcacaagggggcctgagtgcagtggctcaagtgatccacctgcctcagcctcccaagtgctaggattataggcatgaaccactgtgcccagccctaattaaggcttttttatttttatttatttttaattcatttattattattactttttgagatggagtctcactc

SEQ ID NO: 12443 - protein, 31 aa, Homo sapiens [sequence omitted]

SEQ ID NO: 12444 - DNA, 5398 bp, Homo sapiens
gttctctatggtgcgcgggcaagctttgctccgcctccggcagtggcttactcccggtgccaggttcttggagctgtgaggaggaacaaccatgtcatcagaatcgagcaaaaaacggaagcccaaagtgatccgaagcgatggagccccagctgaaggaaagcggaatcgatctgacaccgagcaggaaggtaaatactacagtgaggaggccgaggtggatctgcgggaccctggcagagactatgagttatacaagtacacctgccaggagctacagaggctgatggctgagatccaagacctgaagagcaggggtggcaaggatgtggcaatagaaatagaagaacggaggatccagagctgtgtgcatttcatgactctaaagaagcttaaccgattagcccacatcaggttgaagaaaggaagagatcagacccacgaggctaagcagaaagtagatgcctatcatctgcagctccagaacctgttgtatgaggtgatgcacctacagaaggagatcaccaaatgtttggagtttaagtcaaagcatgaagaaattgatctggtcagtttagaggagttttataaggaggctccaccagatatcagcaaggccgaagtcaccatgggagaccctcaccagcaaacactggcacgtctggactgggagctggagcagcggaaaaggctggcagagaagtaccgagagtgcctatctaacaaggagaagattctcaaggagattgaggtgaagaaggagtacctgagcagcctccagccccgcctcaacagcatcatgcaggcttcccttccggtgcaggagtacctgtttatgccattcgaccaggctcacaagcagtatgagacagccagacacctgccgcctcccctctatgtcctctttgttcaggccactgcgtatgggcaggcctgtgataagacgttatctgtggcaatcgaaggcagtgtggatgaagccaaggctctgttcaaacctccagaggactcccaagatgacgagagtgactcagatgccgaggaggagcagactacgaagcgccggagacccacactgggggttcagttggacgacaaacgcaaggagatgctgaagaggcacccactgtctgtcatgctcgacctgaagtgcaaagatgacagtgtgcttcacctgactttctactacctcatgaacctcaacatcatgacagtaaaagccaaagtgacaactgccatggagctgatcacccccatcagtgcaggtgacttgctgtctcctgactcagtcctgagttgcttgtatcctggggatcatggaaagaaaactccgaatccagccaatcagtatcagtttgataaagttggcatcctgactttgagcgactatgtacttgagctaggtcacccctatttgtgggtgcagaagctgggtggcctccacttccccaaagagcagccccagcaaacagtgattgctgaccactcgctgagcgccagccacatggagaccaccatgaaacttctgaagaccagggtgcagtcccgcctggccctccacaaacagtttgcatccctagaacatggcattgtgccagttaccagtgattgccagtacctcttccctgccaaggttgtctctcgcctggtgaaatgggtgacagttgcccatgaggattacatggagctgcacttcaccaaagacattgtggatgcgggactggctggggacaccaatctctactacatggcgctcatcgaaaggggcacagccaaactgcaggccgctgtggtgttgaaccctggctactcctccatcccacctgttttccagctctgtttgaactggaaaggggagaaaaccaacagcaacgatgacaacattcgggccatggagggcgaagtcaatgtgtgctacaaggagctgtgtggcccttggcccagccaccagctgttgaccaaccagctgcagcggctgtgtgtgctgctggatgtttacctggagaccgagagccatgacgacagtgtggaggggcccaaggaatttccccaggagaagatgtgtctgcggctcttcaggggtcctagcaggatgaagccatttaaatacaaccatcctcagggattcttcagccatcgctgatctcccgcgcagaccgttgtttcccccaaggcctcaccctgagcactgggcttctgctttctgctctggcccacatgtgactcttgatattctccaaagacaccagccaattaaaaagcgtcacctgaccagtggcctttgtctgtggttcctggcaaggtggctttgcagtctggaagggcaggtgggagctgtgacacagtgtgaaaaagcatttgtagagagactttttctcagcagccaataaaagcagagtggaaaaagattccaattctgcagagagatgctcacctcttgtctacgcacaccctatttgtgctttgcggggtgaggtcctcatgatcttgtatttattatcccaagttcctgctgttaagaggtggtaggagaagccaaaggcagcagagcacaaaaagcaaaactcttccctccccacccgctcttcccattagtcctgtcagggttgccgatggacaaattgtctctgatcgttggatgttataaatgtctgacagtgcagtgcaaacagaagacaaactcagttgatccttgaacaactcaggggttaggggcaccaacaccccctgccctgcacagttgaaaaatccgtgtataacttttgactccctaaaaacttaactaatagcctgctgttgaccagtagtatgctattagtagttacttactgctaacatagtcagtacatattttcagtatatattttgtatcttatacactgtattcttacaatacagtaaactagagaaaagaaaatgttataaggaaagtcacaagggggcctgagtgcagtggctcacgtctgtaatcccagcactttgggaggccaaggcgggtggatcacttgaggtcaggagtttgagaccagcctggccgacatggtgaaaccctgtctctactaaaaacatggaaattagccaagcgtggtggcgcatgcctgtagtcccagttactcaggaggctgaggcagaattacttgaacccatgaggcagaggttgcagtaagccaagatcacgctcctgcgctccggcttgggcgagagtgagactccgtctcaaaaataaataaataagaaagccataaggaagaaaatatatatctactattaagtagaagtggatcaccataaaggtcttcacatactgtctcagggttgaatagtctaaggaagaggaggggttggtcttggtgtctcagggatggcagaggcagaaaaagtgggggaggtggagggggaggcaggcaccactgttatttttattgaacaaaatctgtgcagggactcatgactgtaatcctagtactttggaaagctaaggcgggaggatcccttgaggccaggagttcaggtccagcctgggcaacgtagtgagagaccctgtatctacaaaaaatttaaaaatcagccaggtgtggtggtatgcaccaatagtcccagttactcagaaggctgaggtgggcggatgactggagtccaggagttcaaggtagcagtgagctattcatcgtgcctgtactgtactccagcctgggaaacaatgcgagtccctatctctaaaaaattttaaaaaaagaaatctgcatataatagacccacagagtccaaactattgttcagagatcaactgtacttcacagagagtaattctaagtcttacaggatttcatggagatggcgagagtggtgttggagaatcaatcacatacagagatacaggacagtgagaccaggtaacatttgaggagaatattttttttttattgagacagggtcttgctctgttgtccaggctggagtgcagtggcacgaacacagctcactgccgcctcaacctctcctgggttcaagtgatcctcctgcctcagcctcccaagtagctgggaccacaggtgtgtgccaccatttctggctaatttttaaattttttgtagaggcgggatcccactatttttcccaggctggtctcaaactcctgggctcaaatgatcctcccacctcggcctcccaaagtgctaggattataggcatgagccaccacacccggcctgagtagagtctttaaggtaatgacaaaagtgcctcaaaatataattatttgattaagagaagtcttgggaagataggtaacaacctttaaaatgttcataaaattacatcctttgtaatactcctgcaagtcaaagtaaaggatggcatagactattcttggacagttttgtcaaaaagtgtatcttgaccccaccatcagtactccattcttcattttaaaaaataagatgggctgggcacagtggcttacgcctttaatatcagtactttgggaggctggtgggcggatcacctgagatcaggagttcaagaccagcctggccaacatggtgaaaccccgtctctactaaaaatacaaaaattagctgggcatggtggtgcgcgcctgtaatcccagccactcgggaggctgaggcaggagaattgcttgaatccccgaggcggaggttgcactgagccgagatggtgccactgcaccatctggacaacagagcaagactccgtcttggaaaaaaaaaaaaagatgtagaaatgtaaaaatatttgagaattattacatagttgcagatatagtttgctaactccaagaggaaacacattttattttttgtgattgtcctgatgaaactttatccccccacaacatgctgttaagcttggttcccatcataagcatattccccctaagtggacttttactgattttccatggataatgcagacctccagtataaaagctattcctccaggtctctctgccgaccactgagtatcccagggataaggattttaagagtaagagctaagtaataaattcctgcccctagcagggccgttcattttacggatgaaaacctgatccttgctgggcgtggtggctcatgcctataatccaagccattcagaaggctgaggcaggaggattgcttgagcccaggagttcaagaccagcctgtgtaatatagtgagtccccattcagaaaaagaaaagaaacctgagcctagcaaggagaagagaatggtacctttggtggctgttaaatcaccaccgctaccctcagtccacatcagtcctttgaattccaaaggcaggtactctctagctcagaggtcctcgaacttcagcctgtgtgggagtcacccatcctggcacctgattagaaacacagacacccaagtcccattc

SEQ ID NO: 12445 - protein, 683 aa, Homo sapiens; identical to SEQ ID NO: 2142

SEQ ID NO: 12446 - DNA, 954 bp, Homo sapiens
gtctagcttgatctgatggcctagcccctggcccagcccctgcagaggcatcagcgctcgggcccatccagggacggaagcctggccagtgtggtcccccacatgcaggaaggtagtgctgagatgctggctttcctatcacacaggccatggagggcgaagtcaatgtgtgctacaaggagctgtgtggcccttggcccagccaccagctgttgaccaaccagctgcagcggctgtgtgtgctgctggatgtttacctggagaccgagagccatgacgacagtgtggaggggcccaaggaatttccccaggagaagatgtgtctgcggctcttcaggggtcctagcaggatgaagccatttaaatacaaccatcctcagggattcttcagccatcgctgatctcccgcgcagaccgttgtttcccccaaggcctcaccctgagcactgggcttctgctttctgctctggcccacatgtgactcttgatattctccaaagacaccagccaattaaaaagcgtcacctgaccagtggcctttgtctgtggttcctggcaaggtggctttgcagtctggaagggcaggtgggagctgtgacacagtgtgaaaaagcatttgtagagagactttttctcagcagccaataaaagcagagtggaaaaagattccaattctgcagagagatgctcacctcttgtctacgcacaccctatttgtgctttgcggggtgaggtcctcatgatcttgtatttattatcccaagttcctgctgttaagaggtggtaggagaagccaaaggcagcagagcacaaaaagcaaaactcttccctccccacccgctcttcccattagtcctgtcagggttgccgatggacaaattgtctctgatcgttggatgttataaatgtctgacagtgcagtgcaaacagaagacaaactcagttgatccttga

SEQ ID NO: 12447 - protein, 83 aa, Homo sapiens [sequence omitted]

SEQ ID NO: 12448 - DNA, 3636 bp, Homo sapiens
ctggagtcggagtttgcagtgagcggggattgcgccactgcacttcagcctgggtgagagagcaaaactctgtctcaaataaaaataaaaataaaaaagagccagtattttcctccttgctcctgggaaggagaaggaactggccccgtacaaccagggattcaggacacgtgttactagctccagatgaggatttacacgaaaaaatcctgggccttgtttgtacagttcatgccaggggtaggaaatacctgaagctttcaaatactgcgttagagttgtgactctgtcctgggcaagtcaggcctaaaatggagaaactggtgatgcactcctcaaaaagccaagtgtaaaatgaggttaatgccctccctgacttgttgccttcactggcgtggcatattatggtaaaaataataattaagaagtaaggttatgcaggcaaatcctctagcgccgaaatcttccccgccgcgctaccaggttctttcgtgttatcttggacataacacaacattaattcaactactcggtggagcgcccactagctgctggacactctcttaggccctgggcacagtgaacgagaagcatgtgtctttgtttttacagtctcaccacgccaccacctccctcgggggcctccgcgctgagcttccggcctctacgcctcgcttccggtcggccgccccttccttacttccggttctctatggtgcgcgggcaagctttgctccgcctccggcagtggcttactcccggtgccaggttcttggagctgtgaggtgttcagcattatttaagatcacctatgcatcatctgaagccacagtcccaggtcatcttcatcaccttccccagtggaatgcctcctgtgttaaagcccacaacaacccctgtggaggaacaaccatgtcatcagaatcgagcaaaaaacggaagcccaaagtgatccgaagcgatggagccccagctgaaggaaagcggaatcgatctgacaccgagcaggaaggtaaatactacagtgaggaggccgaggtggatctgcgggaccctggcagagactatgagttatacaagtacacctgccaggagctacagaggctgatggctgagatccaagacctgaagagcaggggtggcaaggatgtggcaatagaaatagaagaacggaggatccagagctgtgtgcatttcatgactctaaagaagcttaaccgattagcccacatcaggttgaagaaaggaagagatcagacccacgaggctaagcagaaagtagatgcctatcatctgcagctccagaacctgttgtatgaggtgatgcacctacagaaggagatcaccaaatgtttggagtttaagtcaaagcatgaagaaattgatctggtcagtttagaggagttttataaggaggctccaccagatatcagcaaggccgaagtcaccatgggagaccctcaccagcaaacactggcacgtctggactgggagctggagcagcggaaaaggctggcagagaagtaccgagagtgcctatctaacaaggagaagattctcaaggagattgaggtgaagaaggagtacctgagcagcctccagccccgcctcaacagcatcatgcaggcttcccttccggtgcaggagtacctgtttatgccattcgaccaggctcacaagcagtatgagacagccagacacctgccgcctcccctctatgtcctctttgttcaggccactgcgtatgggcaggcctgtgctcatatgaaatcctcccagccccctagacaggataagacgttatctgtggcaatcgaaggcagtgtggatgaagccaaggctctgttcaaacctccagaggactcccaagatgacgagagtgactcagatgccgaggaggagcagactacggtgccgtcctccctagaagcagaagaggtgtgaaagaaggtgctgctgggaggggagtctgacaacccagctagctgaagcagcagaagcgccggagacccacactgggggttcagttggacgacaaacgcaaggagatgctgaagaggcacccactgtctgtcatgctcgacctgaagtgcaaagatgacagtgtgcttcacctgactttctactacctcatgaacctcaacatcatgacagtaaaagccaaagtgacaactgccatggagctgatcacccccatcagtgcaggtgacttgctgtctcctgactcagtcctgagttgcttgtatcctggggatcatggaaagaaaactccgaatccagccaatcagtatcagtttgataaagttggcatcctgactttgagcgactatgtacttgagctaggtcacccctatttgtgggtgcagaagctgggtggcctccacttccccaaagagcagccccagcaaacagtgattgctgaccactcgctgagcgccagccacatggagaccaccatgaaacttctgaagaccagggtgcagtcccgcctggccctccacaaacagtttgcatccctagaacatggcattgtgccagttaccagtgattgccagtacctcttccctgccaaggttgtctctcgcctggtgaaatgggtgacagttgcccatgaggattacatggagctgcacttcaccaaagacattgtggatgcgggactggctggggacaccaatctctactacatggcgctcatcgaaaggggcacagccaaactgcaggccgctgtggtgttgaaccctggctactcctccatcccacctgttttccagctctgtttgaactggaaaggggagaaaaccaacagcaacgatgacaacattcgggccatggagggcgaagtcaatgtgtgctacaaggagctgtgtggcccttggcccagccaccagctgttgaccaaccagctgcagcggctgtgtgtgctgctggatgtttacctggagaccgagagccatgacgacagtgtggaggggcccaaggaatttccccaggagaagatgtgtctgcggctcttcaggggtcctagcaggatgaagccatttaaatacaaccatcctcagggattcttcagccatcgctgatctcccgcgcagaccgttgtttcccccaaggcctcaccctgagcactgggcttctgctttctgctctggcccacatgtgactcttgatattctccaaagacaccagccaattaaaaagcgtcacctgaccagtggcctttgtctgtggttcctggcaaggtggctttgcagtctggaagggcaggtgggagctgtgacacagtgtgaaaaagcatttgtagagagactttttctcagcagccaataaaagcagagtggaaaaagattccaattctgcagagagatgctcacctcttgtctacgcacaccctatttgtgctttgcggggtgaggtcctcatgatcttgtatttattatcccaagttcctgctgttaagaggtggtaggagaagccaaaggcagcagagcacaaaaagcaaaactcttccctccccacccgctcttcccattagtcctgtcagggttgccgatggacaaattgtctctgatcgttggatgttataaatgtctgacagtgcagtgcaaacagaagacaaactcagttgatccttga

SEQ ID NO: 12449 - protein, 344 aa, Homo sapiens
MLKRHPLSVMLDLKCKDDSVLHLTFYYLMNLNIMTVKAKVTTAMELITPISAGDLLSPDSVLSCLYPGDHGKKTPNPANQYQFDKVGILTLSDYVLELGHPYLWVQKLGGLHFPKEQPQQTVIADHSLSASHMETTMKLLKTRVQSRLALHKQFASLEHGIVPVTSDCQYLFPAKVVSRLVKWVTVAHEDYMELHFTKDIVDAGLAGDTNLYYMALIERGTAKLQAAVVLNPGYSSIPPVFQLCLNWKGEKTNSNDDNIRAMEGEVNVCYKELCGPWPSHQLLTNQLQRLCVLLDVYLETESHDDSVEGPKEFPQEKMCLRLFRGPSRMKPFKYNHPQGFFSHR

SEQ ID NO: 12450 - DNA, 3372 bp, Homo sapiens
ctggagtcggagtttgcagtgagcggggattgcgccactgcacttcagcctgggtgagagagcaaaactctgtctcaaataaaaataaaaataaaaaagagccagtattttcctccttgctcctgggaaggagaaggaactggccccgtacaaccagggattcaggacacgtgttactagctccagatgaggatttacacgaaaaaatcctgggccttgtttgtacagttcatgccaggggtaggaaatacctgaagctttcaaatactgcgttagagttgtgactctgtcctgggcaagtcaggcctaaaatggagaaactggtgatgcactcctcaaaaagccaagtgtaaaatgaggttaatgccctccctgacttgttgccttcactggcgtggcatattatggtaaaaataataattaagaagtaaggttatgcaggcaaatcctctagcgccgaaatcttccccgccgcgctaccaggttctttcgtgttatcttggacataacacaacattaattcaactactcggtggagcgcccactagctgctggacactctcttaggccctgggcacagtgaacgagaagcatgtgtctttgtttttacagtctcaccacgccaccacctccctcgggggcctccgcgctgagcttccggcctctacgcctcgcttccggtcggccgccccttccttacttccggttctctatggtgcgcgggcaagctttgctccgcctccggcagtggcttactcccggtgccaggttcttggagctgtgaggtgttcagcattatttaagatcacctatgcatcatctgaagccacagtcccaggtcatcttcatcaccttccccagtggaatgcctcctgtgttaaagcccacaacaacccctgtggaggaacaaccatgtcatcagaatcgagcaaaaaacggaagcccaaagtgatccgaagcgatggagccccagctgaaggaaagcggaatcgatctgacaccgagcaggaaggtaaatactacagtgaggaggccgaggtggatctgcgggaccctggcagagactatgagttatacaagtacacctgccaggagctacagaggctgatggctgagatccaagacctgaagagcaggggtggcaaggatgtggcaatagaaatagaagaacggaggatccagagctgtgtgcatttcatgactctaaagaagcttaaccgattagcccacatcaggttgaagaaaggaagagatcagacccacgaggctaagcagaaagtagatgcctatcatctgcagctccagaacctgttgtatgaggtgatgcacctacagaaggagatcaccaaatgtttggagtttaagtcaaagcatgaagaaattgatctggtcagtttagaggagttttataaggaggctccaccagatatcagcaaggccgaagtcaccatgggagaccctcaccagcaaacactggcacgtctggactgggagctggagcagcggaaaaggctggcagagaagtaccgagagtgcctatctaacaaggagaagattctcaaggagattgaggtgaagaaggagtacctgagcagcctccagccccgcctcaacagcatcatgcaggcttcccttccggtgcaggagtacctgtttatgccattcgaccaggctcacaagcagtatgagacagccagacacctgccgcctcccctctatgtcctctttgttcaggccactgcgtatgggcaggcctgtgctcatatgaaatcctcccagccccctagacaggataagacgttatctgtggcaatcgaaggcagtgtggatgaagccaaggctctgttcaaacctccagaggactcccaagatgacgagagtgactcagatgccgaggaggagcagactacggtgccgtcctccctagaagcagaagaggtgtgaaagaaggtgctgctgggaggggagtctgacaacccagctagctgaagcagcagaagcgccggagacccacactgggggttcagttggacgacaaacgcaaggagatgctgaagaggcacccactgtctgtcatgctcgacctgaagtgcaaagatgacagtgtgcttcacctgactttctactacctcatgaacctcaacatcatgacagtaaaagccaaagtgacaactgccatggagctgatcacccccatcagtgcaggtgacttgctgtctcctgactcagtcctgagttgcttgtatcctggggatcatggaaagaaaactccgaatccagccaatcagtatcagtttgataaagttggcatcctgactttgagcgactatgtacttgagctaggtcacccctatttgtgggtgcagaagctgggtggcctccacttccccaaagagcagccccagcaaacagtgattgctgaccactcgctgagcgccagccacatggagaccaccatgaaacttctgaagaccagggtgcagtcccgcctggccctccacaaacagtttgcatccctagaacatggcattgtgccagttaccagtgattgccagtacctcttccctgccaaggttgtctctcgcctggtgaaatgggtgacagttgcccatgaggattacatggagctgcacttcaccaaagacattgtggatgcgggactggctggggacaccaatctctactacatggcgctcatcgaaaggggcacagccaaactgcaggccgctgtggtgttgaaccctggctactcctccatcccacctgttttccagctctgtttgaactggaaaggggagaaaaccaacagcaacgatgacaacattcgggccatggagggcgaagtcaatgtgtgctacaaggagctgtgtggcccttggcccagccaccagctgttgaccaaccagctgcagcggctgtgtgtgctgctggatgtttacctggagaccgagagccatgacgacagtgtggaggggcccaaggaatttccccaggagaagatgtgtctgcggctcttcaggggtcctagcaggatgaagccatttaaatacaaccatcctcagggattcttcagccatcgctgatctcccgcgcagaccgttgtttcccccaaggcctcaccctgagcactgggcttctgctttctgctctggcccacatgtgactcttgatattctccaaagacaccagccaattaaaaagcgtcacctgaccagtggcctttgtctgtggttcctggcaaggtggctttgcagtctggaagggcaggtgggagctgtgacacagtgtgaaaaagcatttgtagagagactttttctcagcagccaataaaagcagagtggaaaaagattccaattctgcagagagatgctc

SEQ ID NO: 12451 - protein, 344 aa, Homo sapiens; identical to SEQ ID NO: 12449

SEQ ID NO: 12452 - DNA, 2507 bp, Homo sapiens
gctgggagatggggcggggctgggcgctccgggactgaggtgctgatcgcccaaagggcgcccctgggctggggtctgacccggcttctcctccctcactacccgcggtccccggcctctcggcgctgcgctgttacctcatccgaaaagtgttcgctgcagcatcctcaggcttcacgttggagcctcttgattgtggtgttcagcattatttaagatcacctatgcatcatctgaagccacagtcccaggtcatcttcatcaccttccccagtggaatgcctcctgtgttaaagcccacaacaacccctgtggaggaacaaccatgtcatcagaatcgagcaaaaaacggaagcccaaagtgatccgaagcgatggagccccagctgaaggaaagcggaatcgatctgacaccgagcaggaaggtaaatactacagtgaggaggccgaggtggatctgcgggaccctggcagagactatgagttatacaagtacacctgccaggagctacagaggctgatggctgagatccaagacctgaagagcaggggtggcaaggatgtggcaatagaaatagaagaacggaggatccagagctgtgtgcatttcatgactctaaagaagcttaaccgattagcccacatcaggttgaagaaaggaagagatcagacccacgaggctaagcagaaagtagatgcctatcatctgcagctccagaacctgttgtatgaggtgatgcacctacagaaggagatcaccaaatgtttggagtttaagtcaaagcatgaagaaattgatctggtcagtttagaggagttttataaggaggctccaccagatatcagcaaggccgaagtcaccatgggagaccctcaccagcaaacactggcacgtctggactgggagctggagcagcggaaaaggctggcagagaagtaccgagagtgcctatctaacaaggagaagattctcaaggagattgaggtgaagaaggagtacctgagcagcctccagccccgcctcaacagcatcatgcaggcttcccttccggtgcaggagtacctgtttatgccattcgaccaggctcacaagcagtatgagacagccagacacctgccgcctcccctctatgtcctctttgttcaggccactgcgtatgggcaggcctgtgataagacgttatctgtggcaatcgaaggcagtgtggatgaagccaaggctctgttcaaacctccagaggactcccaagatgacgagagtgactcagatgccgaggaggagcagactacgaagcgccggagacccacactgggggttcagttggacgacaaacgcaaggagatgctgaagaggcacccactgtctgtcatgctcgacctgaagtgcaaagatgacagtgtgcttcacctgactttctactacctcatgaacctcaacatcatgacagtaaaagccaaagtgacaactgccatggagctgatcacccccatcagtgcaggtgacttgctgtctcctgactcagtcctgagttgcttgtatcctggggatcatggaaagaaaactccgaatccagccaatcagtatcagtttgataaagttggcatcctgactttgagcgactatgtacttgagctaggtcacccctatttgtgggtgcagaagctgggtggcctccacttccccaaagagcagccccagcaaacagtgattgctgaccactcgctgagcgccagccacatggagaccaccatgaaacttctgaagaccagggtgcagtcccgcctggccctccacaaacagtttgcatccctagaacatggcattgtgccagttaccagtgattgccagtacctcttccctgccaaggttgtctctcgcctggtgaaatgggtgacagttgcccatgaggattacatggagctgcacttcaccaaagacattgtggatgcgggactggctggggacaccaatctctactacatggcgctcatcgaaaggggcacagccaaactgcaggccgctgtggtgttgaaccctggctactcctccatcccacctgttttccagctctgtttgaactggaaaggggagaaaaccaacagcaacgatgacaacattcgggccatggagggcgaagtcaatgtgtgctacaaggagctgtgtggcccttggcccagccaccagctgttgaccaaccagctgcagcggctgtgtgtgctgctggatgtttacctggagaccgagagccatgacgacagtgtggaggggcccaaggaatttccccaggagaagatgtgtctgcggctcttcaggggtcctagcaggatgaagccatttaaatacaaccatcctcagggattcttcagccatcgctgatctcccgcgcagaccgttgtttcccccaaggcctcaccctgagcactgggcttctgctttctgctctggcccacatgtgactcttgatattctccaaagacaccagccaattaaaaagcgtcacctgacc

SEQ ID NO: 12453 - protein, 683 aa, Homo sapiens; identical to SEQ ID NO: 2142

SEQ ID NO: 12454 - DNA, 2406 bp, Homo sapiens
gacaagggcagtggggctgggagatggggcggggctgggcgctccgggactgaggtgctgatcgcccaaagggcgcccctgggctggggtctgacccggcttctcctccctcactacccgcggtccccggcctctcggcgctgcgctgttacctcatccgaaaagtgttcgctgcagcatcctcaggcttcacgttggagcctcttgattgtggaggaacaaccatgtcatcagaatcgagcaaaaaacggaagcccaaagtgatccgaagcgatggagccccagctgaaggaaagcggaatcgatctgacaccgagcaggaaggtaaatactacagtgaggaggccgaggtggatctgcgggaccctggcagagactatgagttatacaagtacacctgccaggagctacagaggctgatggctgagatccaagacctgaagagcaggggtggcaaggatgtggcaatagaaatagaagaacggaggatccagagctgtgtgcatttcatgactctaaagaagcttaaccgattagcccacatcaggttgaagaaaggaagagatcagacccacgaggctaagcagaaagtagatgcctatcatctgcagctccagaacctgttgtatgaggtgatgcacctacagaaggagatcaccaaatgtttggagtttaagtcaaagcatgaagaaattgatctggtcagtttagaggagttttataaggaggctccaccagatatcagcaaggccgaagtcaccatgggagaccctcaccagcaaacactggcacgtctggactgggagctggagcagcggaaaaggctggcagagaagtaccgagagtgcctatctaacaaggagaagattctcaaggagattgaggtgaagaaggagtacctgagcagcctccagccccgcctcaacagcatcatgcaggcttcccttccggtgcaggagtacctgtttatgccattcgaccaggctcacaagcagtatgagacagccagacacctgccgcctcccctctatgtcctctttgttcaggccactgcgtatgggcaggcctgtgataagacgttatctgtggcaatcgaaggcagtgtggatgaagccaaggctctgttcaaacctccagaggactcccaagatgacgagagtgactcagatgccgaggaggagcagactacgaagcgccggagacccacactgggggttcagttggacgacaaacgcaaggagatgctgaagaggcacccactgtctgtcatgctcgacctgaagtgcaaagatgacagtgtgcttcacctgactttctactacctcatgaacctcaacatcatgacagtaaaagccaaagtgacaactgccatggagctgatcacccccatcagtgcaggtgacttgctgtctcctgactcagtcctgagttgcttgtatcctggggatcatggaaagaaaactccgaatccagccaatcagtatcagtttgataaagttggcatcctgactttgagcgactatgtacttgagctaggtcacccctatttgtgggtgcagaagctgggtggcctccacttccccaaagagcagccccagcaaacagtgattgctgaccactcgctgagcgccagccacatggagaccaccatgaaacttctgaagaccagggtgcagtcccgcctggccctccacaaacagtttgcatccctagaacatggcattgtgccagttaccagtgattgccagtacctcttccctgccaaggttgtctctcgcctggtgaaatgggtgacagttgcccatgaggattacatggagctgcacttcaccaaagacattgtggatgcgggactggctggggacaccaatctctactacatggcgctcatcgaaaggggcacagccaaactgcaggccgctgtggtgttgaaccctggctactcctccatcccacctgttttccagctctgtttgaactggaaaggggagaaaaccaacagcaacgatgacaacattcgggccatggagggcgaagtcaatgtgtgctacaaggagctgtgtggcccttggcccagccaccagctgttgaccaaccagctgcagcggctgtgtgtgctgctggatgtttacctggagaccgagagccatgacgacagtgtggaggggcccaaggaatttccccaggagaagatgtgtctgcggctcttcaggggtcctagcaggatgaagccatttaaatacaaccatcctcagggattcttcagccatcgctgatctcccgcgcagaccgttgtttcccccaaggcctcaccctgagcactgggcttctgctttctgctctggcccacatgtgactcttgatattctccaaagacaccagccaattaaaaagcgtcacctgacc

SEQ ID NO: 12455 - protein, 683 aa, Homo sapiens; identical to SEQ ID NO: 2142

SEQ ID NO: 12456 - DNA, 2273 bp, Homo sapiens
gttctctatggtgcgcgggcaagctttgctccgcctccggcagtggcttactcccggtgccaggttcttggagctgtgaggaggaacaaccatgtcatcagaatcgagcaaaaaacggaagcccaaagtgatccgaagcgatggagccccagctgaaggaaagcggaatcgatctgacaccgagcaggaaggtaaatactacagtgaggaggccgaggtggatctgcgggaccctggcagagactatgagttatacaagtacacctgccaggagctacagaggctgatggctgagatccaagacctgaagagcaggggtggcaaggatgtggcaatagaaatagaagaacggaggatccagagctgtgtgcatttcatgactctaaagaagcttaaccgattagcccacatcaggttgaagaaaggaagagatcagacccacgaggctaagcagaaagtagatgcctatcatctgcagctccagaacctgttgtatgaggtgatgcacctacagaaggagatcaccaaatgtttggagtttaagtcaaagcatgaagaaattgatctggtcagtttagaggagttttataaggaggctccaccagatatcagcaaggccgaagtcaccatgggagaccctcaccagcaaacactggcacgtctggactgggagctggagcagcggaaaaggctggcagagaagtaccgagagtgcctatctaacaaggagaagattctcaaggagattgaggtgaagaaggagtacctgagcagcctccagccccgcctcaacagcatcatgcaggcttcccttccggtgcaggagtacctgtttatgccattcgaccaggctcacaagcagtatgagacagccagacacctgccgcctcccctctatgtcctctttgttcaggccactgcgtatgggcaggcctgtgataagacgttatctgtggcaatcgaaggcagtgtggatgaagccaaggctctgttcaaacctccagaggactcccaagatgacgagagtgactcagatgccgaggaggagcagactacgaagcgccggagacccacactgggggttcagttggacgacaaacgcaaggagatgctgaagaggcacccactgtctgtcatgctcgacctgaagtgcaaagatgacagtgtgcttcacctgactttctactacctcatgaacctcaacatcatgacagtaaaagccaaagtgacaactgccatggagctgatcacccccatcagtgcaggtgacttgctgtctcctgactcagtcctgagttgcttgtatcctggggatcatggaaagaaaactccgaatccagccaatcagtatcagtttgataaagttggcatcctgactttgagcgactatgtacttgagctaggtcacccctatttgtgggtgcagaagctgggtggcctccacttccccaaagagcagccccagcaaacagtgattgctgaccactcgctgagcgccagccacatggagaccaccatgaaacttctgaagaccagggtgcagtcccgcctggccctccacaaacagtttgcatccctagaacatggcattgtgccagttaccagtgattgccagtacctcttccctgccaaggttgtctctcgcctggtgaaatgggtgacagttgcccatgaggattacatggagctgcacttcaccaaagacattgtggatgcgggactggctggggacaccaatctctactacatggcgctcatcgaaaggggcacagccaaactgcaggccgctgtggtgttgaaccctggctactcctccatcccacctgttttccagctctgtttgaactggaaaggggagaaaaccaacagcaacgatgacaacattcgggccatggagggcgaagtcaatgtgtgctacaaggagctgtgtggcccttggcccagccaccagctgttgaccaaccagctgcagcggctgtgtgtgctgctggatgtttacctggagaccgagagccatgacgacagtgtggaggggcccaaggaatttccccaggagaagatgtgtctgcggctcttcaggggtcctagcaggatgaagccatttaaatacaaccatcctcagggattcttcagccatcgctgatctcccgcgcagaccgttgtttcccccaaggcctcaccctgagcactgggcttctgctttctgctctggcccacatgtgactcttgatattctccaaagacaccagccaattaaaaagcgtcacctgacc

SEQ ID NO: 12457 - protein, 683 aa, Homo sapiens; identical to SEQ ID NO: 2142

SEQ ID NO: 12458 - DNA, 3213 bp, Homo sapiens
ctggagtcggagtttgcagtgagcggggattgcgccactgcacttcagcctgggtgagagagcaaaactctgtctcaaataaaaataaaaataaaaaagagccagtattttcctccttgctcctgggaaggagaaggaactggccccgtacaaccagggattcaggacacgtgttactagctccagatgaggatttacacgaaaaaatcctgggccttgtttgtacagttcatgccaggggtaggaaatacctgaagctttcaaatactgcgttagagttgtgactctgtcctgggcaagtcaggcctaaaatggagaaactggtgatgcactcctcaaaaagccaagtgtaaaatgaggttaatgccctccctgacttgttgccttcactggcgtggcatattatggtaaaaataataattaagaagtaaggttatgcaggcaaatcctctagcgccgaaatcttccccgccgcgctaccaggttctttcgtgttatcttggacataacacaacattaattcaactactcggtggagcgcccactagctgctggacactctcttaggccctgggcacagtgaacgagaagcatgtgtctttgtttttacagtctcaccacgccaccacctccctcgggggcctccgcgctgagcttccggcctctacgcctcgcttccggtcggccgccccttccttacttccggttctctatggtgcgcgggcaagctttgctccgcctccggcagtggcttactcccggtgccaggttcttggagctgtgaggtgttcagcattatttaagatcacctatgcatcatctgaagccacagtcccaggtcatcttcatcaccttccccagtggaatgcctcctgtgttaaagcccacaacaacccctgtggaggaacaaccatgtcatcagaatcgagcaaaaaacggaagcccaaagtgatccgaagcgatggagccccagctgaaggaaagcggaatcgatctgacaccgagcaggaaggtaaatactacagtgaggaggccgaggtggatctgcgggaccctggcagagactatgagttatacaagtacacctgccaggagctacagaggctgatggctgagatccaagacctgaagagcaggggtggcaaggatgtggcaatagaaatagaagaacggaggatccagagctgtgtgcatttcatgactctaaagaagcttaaccgattagcccacatcaggttgaagaaaggaagagatcagacccacgaggctaagcagaaagtagatgcctatcatctgcagctccagaacctgttgtatgaggtgatgcacctacagaaggagatcaccaaatgtttggagtttaagtcaaagcatgaagaaattgatctggtcagtttagaggagttttataaggaggctccaccagatatcagcaaggccgaagtcaccatgggagaccctcaccagcaaacactggcacgtctggactgggagctggagcagcggaaaaggctggcagagaagtaccgagagtgcctatctaacaaggagaagattctcaaggagattgaggtgaagaaggagtacctgagcagcctccagccccgcctcaacagcatcatgcaggcttcccttccggtgcaggagtacctgtttatgccattcgaccaggctcacaagcagtatgagacagccagacacctgccgcctcccctctatgtcctctttgttcaggccactgcgtatgggcaggcctgtgctcatatgaaatcctcccagccccctagacaggataagacgttatctgtggcaatcgaaggcagtgtggatgaagccaaggctctgttcaaacctccagaggactcccaagatgacgagagtgactcagatgccgaggaggagcagactacggtgccgtcctccctagaagcagaagaggtgtgaaagaaggtgctgctgggaggggagtctgacaacccagctagctgaagcagcagaagcgccggagacccacactgggggttcagttggacgacaaacgcaaggagatgctgaagaggcacccactgtctgtcatgctcgacctgaagtgcaaagatgacagtgtgcttcacctgactttctactacctcatgaacctcaacatcatgacagtaaaagccaaagtgacaactgccatggagctgatcacccccatcagtgcaggtgacttgctgtctcctgactcagtcctgagttgcttgtatcctggggatcatggaaagaaaactccgaatccagccaatcagtatcagtttgataaagttggcatcctgactttgagcgactatgtacttgagctaggtcacccctatttgtgggtgcagaagctgggtggcctccacttccccaaagagcagccccagcaaacagtgattgctgaccactcgctgagcgccagccacatggagaccaccatgaaacttctgaagaccagggtgcagtcccgcctggccctccacaaacagtttgcatccctagaacatggcattgtgccagttaccagtgattgccagtacctcttccctgccaaggttgtctctcgcctggtgaaatgggtgacagttgcccatgaggattacatggagctgcacttcaccaaagacattgtggatgcgggactggctggggacaccaatctctactacatggcgctcatcgaaaggggcacagccaaactgcaggccgctgtggtgttgaaccctggctactcctccatcccacctgttttccagctctgtttgaactggaaaggggagaaaaccaacagcaacgatgacaacattcgggccatggagggcgaagtcaatgtgtgctacaaggagctgtgtggcccttggcccagccaccagctgttgaccaaccagctgcagcggctgtgtgtgctgctggatgtttacctggagaccgagagccatgacgacagtgtggaggggcccaaggaatttccccaggagaagatgtgtctgcggctcttcaggggtcctagcaggatgaagccatttaaatacaaccatcctcagggattcttcagccatcgctgatctcccgcgcagaccgttgtttcccccaaggcctcaccctgagcactgggcttctgctttctgctctggcccacatgtgactcttgatattctccaaagacaccagccaattaaaaagcgtcacctgacc

SEQ ID NO: 12459 - protein, 344 aa, Homo sapiens; identical to SEQ ID NO: 12449

SEQ ID NO: 12460 - DNA, 3426 bp, Homo sapiens
cagtccccctggtgcgacacatggagtctaggatcatgatccccttgaagatctcgcctctgcagtgatgctgcctacacctccacctccttccccttctccctcaggcaaccccgacagacagtggcactcctggtcctgctgtcttggttttgtcttggctctgggaggactctgaggggcagtgctcagttcagacaagggggaactgaaggctgacaagttctgaggattacagctctgcccaggccctttctactttccctgcctgcctccctccccctgctagaagtagtttctgatttccctgaatgaaagatagtgatcttttaggccttcatttatcttctaaaattcctcatctcaaggccaccagtccccagttatcacccttggaaatcctctgtttagcttagttgcacaaaaggtagtatgtccagtggctagaggtggggtgggaagagaggaggccaggccaggccctcaggaattccctggtttccactgggccacccacttgctggacagtctgagccaagtccctcctgctggagaaaagcctggaactgccaaaacaaaaaaacaaatacaaacaaacctcgtcaccacggtcaggaggaggttcagacattctgcccagaggggctggggaaagggatgggagccaggaaagatttaggggcaggagacagacacgtaacaggaactcggaaggtagaacttagaattcagaacttgggtttcaattgtagaatttggaatctggaatacagaattgggaagaagaacagagatgacaaaagaccacttgaagagaggttcctaatactagacagatggagagtggcttggctgtttccccctgcatattggggttgaaaacttaaatgtgtagttccagtccttctatgcagagtctctcctgccctccctccttcctgcagtctcaccacgccaccacctccctcgggggcctccgcgctgagcttccggcctctacgcctcgcttccggtcggccgccccttccttacttccggttctctatggtgcgcgggcaagctttgctccgcctccggcagtggcttactcccggtgccaggttcttggagctgtgaggtgttcagcattatttaagatcacctatgcatcatctgaagccacagtcccaggtcatcttcatcaccttccccagtggaatgcctcctgtgttaaagcccacaacaacccctgtggaggaacaaccatgtcatcagaatcgagcaaaaaacggaagcccaaagtgatccgaagcgatggagccccagctgaaggaaagcggaatcgatctgacaccgagcaggaaggtaaatactacagtgaggaggccgaggtggatctgcgggaccctggcagagactatgagttatacaagtacacctgccaggagctacagaggctgatggctgagatccaagacctgaagagcaggggtggcaaggatgtggcaatagaaatagaagaacggaggatccagagctgtgtgcatttcatgactctaaagaagcttaaccgattagcccacatcaggttgaagaaaggaagagatcagacccacgaggctaagcagaaagtagatgcctatcatctgcagctccagaacctgttgtatgaggtgatgcacctacagaaggagatcaccaaatgtttggagtttaagtcaaagcatgaagaaattgatctggtcagtttagaggagttttataaggaggctccaccagatatcagcaaggccgaagtcaccatgggagaccctcaccagcaaacactggcacgtctggactgggagctggagcagcggaaaaggctggcagagaagtaccgagagtgcctatctaacaaggagaagattctcaaggagattgaggtgaagaaggagtacctgagcagcctccagccccgcctcaacagcatcatgcaggcttcccttccggtgcaggagtacctgtttatgccattcgaccaggctcacaagcagtatgagacagccagacacctgccgcctcccctctatgtcctctttgttcaggccactgcgtatgggcaggcctgtgataagacgttatctgtggcaatcgaaggcagtgtggatgaagccaaggctctgttcaaacctccagaggactcccaagatgacgagagtgactcagatgccgaggaggagcagactacgaagcgccggagacccacactgggggttcagttggacgacaaacgcaaggagatgctgaagaggcacccactgtctgtcatgctcgacctgaagtgcaaagatgacagtgtgcttcacctgactttctactacctcatgaacctcaacatcatgacagtaaaagccaaagtgacaactgccatggagctgatcacccccatcagtgcaggtgacttgctgtctcctgactcagtcctgagttgcttgtatcctggggatcatggaaagaaaactccgaatccagccaatcagtatcagtttgataaagttggcatcctgactttgagcgactatgtacttgagctaggtcacccctatttgtgggtgcagaagctgggtggcctccacttccccaaagagcagccccagcaaacagtgattgctgaccactcgctgagcgccagccacatggagaccaccatgaaacttctgaagaccagggtgcagtcccgcctggccctccacaaacagtttgcatccctagaacatggcattgtgccagttaccagtgattgccagtacctcttccctgccaaggttgtctctcgcctggtgaaatgggtgacagttgcccatgaggattacatggagctgcacttcaccaaagacattgtggatgcgggactggctggggacaccaatctctactacatggcgctcatcgaaaggggcacagccaaactgcaggccgctgtggtgttgaaccctggctactcctccatcccacctgttttccagctctgtttgaactggaaaggggagaaaaccaacagcaacgatgacaacattcgggccatggagggcgaagtcaatgtgtgctacaaggagctgtgtggcccttggcccagccaccagctgttgaccaaccagctgcagcggctgtgtgtgctgctggatgtttacctggagaccgagagccatgacgacagtgtggaggggcccaaggaatttccccaggagaagatgtgtctgcggctcttcaggggtcctagcaggatgaagccatttaaatacaaccatcctcagggattcttcagccatcgctgatctcccgcgcagaccgttgtttcccccaaggcctcaccctgagcactgggcttctgctttctgctctggcccacatgtgactcttgatattctccaaagacaccagccaattaaaaagcgtcacctgacc

SEQ ID NO: 12461 - protein, 802 aa, Homo sapiens
MCSSSPSMQSLSCPPSFLQSHHATTSLGGLRAELPASTPRFRSAAPSLLPVLYGARASFAPPPAVAYSRCQVLGAVRCSALFKITYASSEATVPGHLHHLPQWNASCVKAHNNPCGGTTMSSESSKKRKPKVIRSDGAPAEGKRNRSDTEQEGKYYSEEAEVDLRDPGRDYELYKYTCQELQRLMAEIQDLKSRGGKDVAIEIEERRIQSCVHFMTLKKLNRLAHIRLKKGRDQTHEAKQKVDAYHLQLQNLLYEVMHLQKEITKCLEFKSKHEEIDLVSLEEFYKEAPPDISKAEVTMGDPHQQTLARLDWELEQRKRLAEKYRECLSNKEKILKEIEVKKEYLSSLQPRLNSIMQASLPVQEYLFMPFDQAHKQYETARHLPPPLYVLFVQATAYGQACDKTLSVAIEGSVDEAKALFKPPEDSQDDESDSDAEEEQTTKRRRPTLGVQLDDKRKEMLKRHPLSVMLDLKCKDDSVLHLTFYYLMNLNIMTVKAKVTTAMELITPISAGDLLSPDSVLSCLYPGDHGKKTPNPANQYQFDKVGILTLSDYVLELGHPYLWVQKLGGLHFPKEQPQQTVIADHSLSASHMETTMKLLKTRVQSRLALHKQFASLEHGIVPVTSDCQYLFPAKVVSRLVKWVTVAHEDYMELHFTKDIVDAGLAGDTNLYYMALIERGTAKLQAAVVLNPGYSSIPPVFQLCLNWKGEKTNSNDDNIRAMEGEVNVCYKELCGPWPSHQLLTNQLQRLCVLLDVYLETESHDDSVEGPKEFPQEKMCLRLFRGPSRMKPFKYNHPQGFFSHR

SEQ ID NO: 12462 - DNA, 529 bp, Homo sapiens
gtctagcttgatctgatggcctagcccctggcccagcccctgcagaggcatcagcgctcgggcccatccagggacggaagcctggccagtgtggtcccccacatgcaggaaggtagtgctgagatgctggctttcctatcacacaggccatggagggcgaagtcaatgtgtgctacaaggagctgtgtggcccttggcccagccaccagctgttgaccaaccagctgcagcggctgtgtgtgctgctggatgtttacctggagaccgagagccatgacgacagtgtggaggggcccaaggaatttccccaggagaagatgtgtctgcggctcttcaggggtcctagcaggatgaagccatttaaatacaaccatcctcagggattcttcagccatcgctgatctcccgcgcagaccgttgtttcccccaaggcctcaccctgagcactgggcttctgctttctgctctggcccacatgtgactcttgatattctccaaagacaccagccaattaaaaagcgtcacctga

SEQ ID NO: 12463 - protein, 83 aa, Homo sapiens [sequence omitted]

SEQ ID NO: 12464 - DNA, 291 bp, Homo sapiens
tttgaggactgggaactgggagcttttgttttacaaacttgaataccactttttttttttttccttttccttacccacctttgccaccgccccccatgactttaaaatgctttttttttttttttttttggagacagagttgctctgtcgcacaggctggaattgggccattgcactctagccttggtaacaagagcgagactctgtctcaaaaaaaaaaaaaaaattgatgaacagagataaatccagaaatgtatgctgattattaggacagaagcaatacagcagcag

SEQ ID NO: 12465 - protein, 44 aa, Homo sapiens
MTLKCFFFFFFWRQSCSVAQAGIGPLHSSLGNKSETLSQKKKKN

SEQ ID NO: 12466 - DNA, 1426 bp, Homo sapiens
gcggctccaacatggctccgcggctgtgcagcatctctgtgacggcgcggcggctgctggggggcccggggcctcgcgctggggacgttgcgtctgcagctgcggcgcgtttctattccaaggacaatgaaggcagctggttccgctccctctttgttcacaaagtggatccccggaaggatgcccactccaccctgctgtccaagaaggaaaccagcaacctctataagatccagtttcacaatgtaaagcctgaatacctggatgcctacaacagcctcacggaggctgtgctgcccaagcttcacctggatgaggactacccatgctcactcgtgggcaactggaacacgtggtcctgctgtcttggttttgtcttggctctgggaggactctgaggggcagtgctcagttcagacaagggggaactgaaggctgacaagttctgaggattacagctctgcccaggccctttctactttccctgcctgcctccctccccctgctagaagtagtttctgatttccctgaatgaaagatagtgatcttttaggccttcatttatcttctaaaattcctcatctcaaggccaccagtccccagttatcacccttggaaatcctctgtttagcttagttgcacaaaaggtagtatgtccagtggctagaggtggggtgggaagagaggaggccaggccaggccctcaggaattccctggtttccactgggccacccacttgctggacagtctgagccaagtccctcctgctggagaaaagcctggaactgccaaaacaaaaaaacaaatacaaacaaacctcgtcaccacggtcaggaggaggttcagacattctgcccagaggggctggggaaagggatgggagccaggaaagatttaggggcaggagacagacacgtaacaggaactcggaaggtagaacttagaattcagaacttgggtttcaattgtagaatttggaatctggaatacagaattgggaagaagaacagagatgacaaaagaccacttgaagagaggttcctaatactagacagatggagagtggcttggctgtttccccctgcatattggggttgaaaacttaaatgtgtagttccagtccttctatgcagagtctctcctgccctccctccttcctgcaggcaaatatacaagctagaccctgttccctcaccctgtatcctgtctcccctaattgacattctatcagcccaaccctcattctgcagggccacctggtgtgtggaggtggcgggaggggtcagtgactctgggggtctcctcagtgacccccatacctcatcatgaacccttgggtagcttgattctgcctaccatccaggaaaacttgtgctggaattgctgatggaaacaattaaatatttactataaatcagtgtcttt

SEQ ID NO: 12467 - protein, 128 aa, Homo sapiens
MAPRLCSISVTARRLLGGPGPRAGDVASAAAARFYSKDNEGSWFRSLFVHKVDPRKDAHSTLLSKKETSNLYKIQFHNVKPEYLDAYNSLTEAVLPKLHLDEDYPCSLVGNWNTWSCCLGFVLALGGL

SEQ ID NO: 12468 - DNA, 1253 bp, Homo sapiens
gcggctccaacatggctccgcggctgtgcagcatctctgtgacggcgcggcggctgctggggggcccggggcctcgcgctggggacgttgcgtctgcagctgcggcgcgtttctattccaaggacaatgaaggcagctggttccgctccctctttgttcacaaagtggatccccggaaggatgcccactccaccctgctgtccaagaaggaaaccagcaacctctataagatccagtttcacaatgtaaagcctgaatacctggatgcctacaacagcctcacggaggctgtgctgccctttctactttccctgcctgcctccctccccctgctagaagtagtttctgatttccctgaatgaaagatagtgatcttttaggccttcatttatcttctaaaattcctcatctcaaggccaccagtccccagttatcacccttggaaatcctctgtttagcttagttgcacaaaaggtagtatgtccagtggctagaggtggggtgggaagagaggaggccaggccaggccctcaggaattccctggtttccactgggccacccacttgctggacagtctgagccaagtccctcctgctggagaaaagcctggaactgccaaaacaaaaaaacaaatacaaacaaacctcgtcaccacggtcaggaggaggttcagacattctgcccagaggggctggggaaagggatgggagccaggaaagatttaggggcaggagacagacacgtaacaggaactcggaaggtagaacttagaattcagaacttgggtttcaattgtagaatttggaatctggaatacagaattgggaagaagaacagagatgacaaaagaccacttgaagagaggttcctaatactagacagatggagagtggcttggctgtttccccctgcatattggggttgaaaacttaaatgtgtagttccagtccttctatgcagagtctctcctgccctccctccttcctgcaggcaaatatacaagctagaccctgttccctcaccctgtatcctgtctcccctaattgacattctatcagcccaaccctcattctgcagggccacctggtgtgtggaggtggcgggaggggtcagtgactctgggggtctcctcagtgacccccatacctcatcatgaacccttgggtagcttgattctgcctaccatccaggaaaacttgtgctggaattgctgatggaaacaattaaatatttactataaatcagtgtcttt

SEQ ID NO: 12469 - protein, 116 aa, Homo sapiens
MAPRLCSISVTARRLLGGPGPRAGDVASAAAARFYSKDNEGSWFRSLFVHKVDPRKDAHSTLLSKKETSNLYKIQFHNVKPEYLDAYNSLTEAVLPFLLSLPASLPLLEVVSDFPE

SEQ ID NO: 12470 - DNA, 2250 bp, Homo sapiens
ttccacgctcccattttaccgaggtggatcctgaggcccagagtgggcaaagggcttgccaaggtcgcagagcgcgcagaggattagaaccctgacttccgtccagcacctgcggagttggagacgcccacaggaaacgcccacctgaccgggtgagtgagggggcgggcgagccggaggggtggagtttattcgcgccccgcctccgccaccagggcttgggggcggggccttcctgcaacctttgcggctccaacatggctccgcggctgtgcagcatctctgtgacggcgcggcggctgctggggggcccggggcctcgcgctggggacgttgcgtctgcagctgcggcgcgtttctattccaaggacaatgaaggcagctggttccgctccctctttgttcacaaagtggatccccggaaggatgcccactccaccctgctgtccaagaaggaaaccagcaacctctataagatccagtttcacaatgtaaagcctgaatacctggatgcctacaacagcctcacggaggctgtgctgcccaagcttcacctggatgaggactacccatgctcactcgtgggcaactggaacacgtggtatggggagcaggaccaggcagtgcacctgtggcgattctcaggtggctacccagccctcatggactgcatgaacaagctcaaaaacaataaggagtacctggagttccgaagggagcggagccagatgctgctgtccaggagaaaccagctgctcctcgagttcagcttctggaatgagccacagcccagaatgggtcccaacatctatgagctgaggacatacaagctcaagccaggaaccatgatcgagtgggggaacaactgggctcgggccatcaagtaccggcaggagaaccaggaggcagtgggcggcttcttctcacagataggagagctctacgtggtgcaccatctctgggcctataaagacctgcagtctcgggaggagactcgaaacgctgcctggaggaagagaggctgggatgaaaatgtctactatacagtccccctggtgcgacacatggagtctaggatcatgatccccttgaagatctcgcctctgcagtgatgctgcctacacctccacctccttccccttctccctcaggcaaccccgacagacagtggcactcctggtcctgctgtcttggttttgtcttggctctgggaggactctgaggggcagtgctcagttcagacaagggggaactgaaggctgacaagttctgaggattacagctctgcccaggccctttctactttccctgcctgcctccctccccctgctagaagtagtttctgatttccctgaatgaaagatagtgatcttttaggccttcatttatcttctaaaattcctcatctcaaggccaccagtccccagttatcacccttggaaatcctctgtttagcttagttgcacaaaaggtagtatgtccagtggctagaggtggggtgggaagagaggaggccaggccaggccctcaggaattccctggtttccactgggccacccacttgctggacagtctgagccaagtccctcctgctggagaaaagcctggaactgccaaaacaaaaaaacaaatacaaacaaacctcgtcaccacggtcaggaggaggttcagacattctgcccagaggggctggggaaagggatgggagccaggaaagatttaggggcaggagacagacacgtaacaggaactcggaaggtagaacttagaattcagaacttgggtttcaattgtagaatttggaatctggaatacagaattgggaagaagaacagagatgacaaaagaccacttgaagagaggttcctaatactagacagatggagagtggcttggctgtttccccctgcatattggggttgaaaacttaaatgtgtagttccagtccttctatgcagagtctctcctgccctccctccttcctgcaggcaaatatacaagctagaccctgttccctcaccctgtatcctgtctcccctaattgacattctatcagcccaaccctcattctgcagggccacctggtgtgtggaggtggcgggaggggtcagtgactctgggggtctcctcagtgacccccatacctcatcatgaacccttgggtagcttgattctgcctaccatccaggaaaacttgtgctggaattgctgatggaaacaattaaatatttactataaatcagtgtcttt

SEQ ID NO: 12471 - protein, 284 aa, Homo sapiens
MAPRLCSISVTARRLLGGPGPRAGDVASAAAARFYSKDNEGSWFRSLFVHKVDPRKDAHSTLLSKKETSNLYKIQFHNVKPEYLDAYNSLTEAVLPKLHLDEDYPCSLVGNWNTWYGEQDQAVHLWRFSGGYPALMDCMNKLKNNKEYLEFRRERSQMLLSRRNQLLLEFSFWNEPQPRMGPNIYELRTYKLKPGTMIEWGNNWARAIKYRQENQEAVGGFFSQIGELYVVHHLWAYKDLQSREETRNAAWRKRGWDENVYYTVPLVRHMESRIMIPLKISPLQ

SEQ ID NO: 12472 - DNA, 603 bp, Homo sapiens
acagacagtggcactcctggtcctgctgtcttggttttgtcttggctctgggaggactctgaggggcagtgctcagttcagacaagggggaactgaaggctgacaagttaggaactcggaaggtagaacttagaattcagaacttgggtttcaattgtagaatttggaatctggaatacagaattgggaagaagaacagagatgacaaaagaccacttgaagagaggttcctaatactagacagatggagagtggcttggctgtttccccctgcatattggggttgaaaacttaaatgtgtagttccagtccttctatgcagagtctctcctgccctccctccttcctgcaggcaaatatacaagctagaccctgttccctcaccctgtatcctgtctcccctaattgacattctatcagcccaaccctcattctgcagggccacctggtgtgtggaggtggcgggaggggtcagtgactctgggggtctcctcagtgacccccatacctcatcatgaacccttgggtagcttgattctgcctaccatccaggaaaacttgtgctggaattgctgatggaaacaattaaatatttactataaa

SEQ ID NO: 12473 - protein, 37 aa, Homo sapiens
MCSSSPSMQSLSCPPSFLQANIQARPCSLTLYPVSPN

SEQ ID NO: 12474 - DNA, 1083 bp, Homo sapiens
cagtccccctggtgcgacacatggagtctaggatcatgatccccttgaagatctcgcctctgcagtgatgctgcctacacctccacctccttccccttctccctcaggcaaccccgacagacagtggcactcctggtcctgctgtcttggttttgtcttggctctgggaggactctgaggggcagtgctcagttcagacaagggggaactgaaggctgacaagttctgaggattacagctctgcccaggccctttctactttccctgcctgcctccctccccctgctagaagtagtttctgatttccctgaatgaaagatagtgatcttttaggccttcatttatcttctaaaattcctcatctcaaggccaccagtccccagttatcacccttggaaatcctctgtttagcttagttgcacaaaaggtagtatgtccagtggctagaggtggggtgggaagagaggaggccaggccaggccctcaggaattccctggtttccactgggccacccacttgctggacagtctgagccaagtccctcctgctggagaaaagcctggaactgccaaaacaaaaaaacaaatacaaacaaacctcgtcaccacggtcaggaggaggttcagacattctgcccagaggggctggggaaagggatgggagccaggaaagatttaggggcaggagacagacacgtaacaggaactcggaaggtagaacttagaattcagaacttgggtttcaattgtagaatttggaatctggaatacagaattgggaagaagaacagagatgacaaaagaccacttgaagagaggttccttcctgcaggcaaatatacaagctagaccctgttccctcaccctgtatcctgtctcccctaattgacattctatcagcccaaccctcattctgcagggccacctggtgtgtggaggtggcgggaggggtcagtgactctgggggtctcctcagtgacccccatacctcatcatgaacccttgggtagcttgattctgcctaccatccaggaaaacttgtgctggaattgctgatggaaacaattaaatatttactataaa

SEQ ID NO: 12475 - protein, 63 aa, Homo sapiens
MGARKDLGAGDRHVTGTRKVELRIQNLGFNCRIWNLEYRIGKKNRDDKRPLEERFLPAGKYTS

SEQ ID NO: 12476 - DNA, 259 bp, Homo sapiens
gttccgctccctctttgttcacaaagtggatccccggaaggatgcccactccaccctgctgtccaagaaggaaaccagcaaccctcattctgcagggccacctggtgtgtggaggtggcgggaggggtcagtgactctgggggtctcctcagtgacccccatacctcatcatgaacccttgggtagcttgattctgcctaccatccaggaaaacttgtgctggaattgctgatggaaacaattaaatatttactataaa

SEQ ID NO: 12477 - protein, 30 aa, Homo sapiens
MPTPPCCPRRKPATLILQGHLVCGGGGRGQ

SEQ ID NO: 12478 - DNA, 441 bp, Homo sapiens
ggggcctcgcgctggggacgttgcgtctgcagctgcggcgcgcctcccaccctcagagggctcaggactgtgtatggtcaaggaatatttaccaaagaagtgaggccacctgttccccctcccccaacctgtgaaaaggaagcaaccatccctcctgccctgcagcccaggaatgaagctgcaaagttctgatagtgcctgccatgagatgttacagcacagagcagtggggcttttggacagctgggaaagaggagtggcataagcgccccacctagactgcccaataattagggataaagctgacaccgtgggaaaagcctagagtttgcctggcactaacagatctaactcagactttgtaggtggggtgacctcaggactctttaagcctcgggttcctcatctgtaaaatgggagtaatcaggatgtatctcatag

SEQ ID NO: 12479 - protein, 30 aa, Homo sapiens
MKLQSSDSACHEMLQHRAVGLLDSWERGVA

SEQ ID NO: 12480 - DNA, 6005 bp, Homo sapiens
gcggagtgaggacggtgacagccacgcgcgcgcgtacgcgcccgatgcagcgcggccccgtgaccctagtcggccgctgagaggcgcgcggagtctgggccgctgccgtctaggggtcccgtcccgaggcgtccccggcatctccggcccgaatcccggagtgccgggtcgcgcctgcaccgaaggtcccggctcctgtgccctccctgcagccgtcagggcccgtcccccaactcccctttccgctcaggcagggtcctcgcggcccatgctggccgctggggacccgcgcagcccagaccgttcccgggccgggcagccggccaccatggtggccctgaggcctgtgcagcaactccaggggggctaaagggctcagagtgcaggccgtggggcgcgagggtcccgggcctgagccccgcgccatggccggggccatcgcttcccgcatgagcttcagctctctcaagaggaagcaacccaagacgttcaccgtgaggatcgtcaccatggacgccgagatggagttcaattgcgagatgaagtggaaagggaaggacctctttgatttggtgtgccggactctggggctccgagaaacctggttctttggactgcagtacacaatcaaggacacagtggcctggctcaaaatggacaagaaggtactggatcatgatgtttcaaaggaagaaccagtcacctttcacttcttggccaaattttatcctgagaatgctgaagaggagctggttcaggagatcacacaacatttattcttcttacaggtaaagaagcagattttagatgaaaagatctactgccctcctgaggcttctgtgctcctggcttcttacgccgtccaggccaagtatggtgactacgaccccagtgttcacaagcggggatttttggcccaagaggaattgcttccaaaaagggtaataaatctgtatcagatgactccggaaatgtgggaggagagaattactgcttggtacgcagagcaccgaggccgagccagggatgaagctgaaatggaatatctgaagatagctcaggacctggagatgtacggtgtgaactactttgcaatccggaataaaaagggcacagagctgctgcttggagtggatgccctggggcttcacatttatgaccctgagaacagactgacccccaagatctccttcccgtggaatgaaatccgaaacatctcgtacagtgacaaggagtttactattaaaccactggataagaaaattgatgtcttcaagtttaactcctcaaagcttcgtgttaataagctgattctccagctatgtatcgggaaccatgatctatttatgaggagaaggaaagccgattctttggaagttcagcagatgaaagcccaggccagggaggagaaggctagaaagcagatggagcggcagcgcctcgctcgagagaagcagatgagggaggaggctgaacgcacgagggatgagttggagaggaggctgctgcagatgaaagaagaagcaacaatggccaacgaagcactgatgcggtctgaggagacagctgacctgttggctgaaaaggcccagatcaccgaggaggaggcaaaacttctggcccagaaggccgcagaggctgagcaggaaatgcagcgcatcaaggccacagcgattcgcacggaggaggagaagcgcctgatggagcagaaggtgctggaagccgaggtgctggcactgaagatggctgaggagtcagagaggagggccaaagaggcagatcagctgaagcaggacctgcaggaagcacgcgaggcggagcgaagagccaagcagaagctcctggagattgccaccaagcccacgtacccgcccatgaacccaattccagcaccgttgcctcctgacataccaagcttcaacctcattggtgacagcctgtctttcgacttcaaagatactgacatgaagcggctttccatggagatagagaaagaaaaagtggaatacatggaaaagagcaagcatctgcaggagcagctcaatgaactcaagacagaaatcgaggccttgaaactgaaagagagggagacagctctggatattctgcacaatgagaactccgacaggggtggcagcagcaagcacaataccattaaaaagctcaccttgcagagcgccaagtcccgagtggccttctttgaagagctctagcaggtgacccagccaccccaggacctgccacttctcctgctaccgggaccgcgggatggaccagatatcaagagagccatccatagggagctggctgggggtttccgtgggagctccagaactttccccagctgagtgaagagcccagcccctcttatgtgcaattgccttgaactacgaccctgtagagatttctctcatggcgttctagttctctgacctgagtctttgttttaagaagtatttgtcttcctttgtctaatgtgggattcctgactcccttcgtccaaggcaccggtgtgtgtgtgtcttgcactccagagctgacctccaccgcccagcctgggaagtcattgtagggagtgagacactgaagccctgagaagccagtgccatcatccccaccccgcccagggttccggaacattcattcccccaccggtgaggacctggcatgcagcgaagcagcccagcccggcggatcccaggccagcacgcctgccggcttctcatcgtcagggagcccgcccagagctcgtgacgagcaagtgctgggtccccgccaggcaccccgaggcggcgctctggctggcagctggtggggaataggcagggcagctgtggctggggagagactttaggcagaagctgtgatgcaggctgactgccagccgaggggctgggtagtgccgtgcgggagctgatggtacagggcactcgctgtccccctccggccaccctagaccagggtccgagaggcaggcaggagccactcatgtcttccccattgcccgacgcccatagacgctccttcctgtgtggggctggggtactccctggtcgtactgcagtcagcacccgtaacccggctatgaccagggatctgtaagccctgtggctccacaggtgctgcttctcactggcccagactctgagctccaccggcccagtctgcacggcccatctgcttcaccttccctcccagccacgtgccagtggccacagcccacttcccaacccactgttgtacccaggcctcactttgctgttgcccttgtccctcttcgggccctgaattttctgttccctgggggccagccagggccctttgtgcccctcccagcacaggcctgatgcaggtgtccactcacaggtggcgctcacctaggctgtcacaggacccacctccatgccaggcaacagagggccacagaaccacccccacggctcactccttggtctggggccaccttcttgccctttctttttttttttttttttttttttccgagatggagtctctctctgtcacccaggtgggagtgtggtggcacaatctcggctcactgcaacctccacctcctgagttcaagcaattctcctgcctcagcctcccaagtagctgggactacaggcatgcaccaccacacttggccaatgttctgtatttttaatagggacggggttttgccatgttagctaggctggtctcaaactcacacctgggattacaggcatgagccactgcacccagccccttcttgccctttcttttctccatggctgatgctgctgtggccagccagggcccttgagatccttccagtttggctgttatgcaaagcaggtgatttgtcttaatcagataaaagatagaggctatgggggcctcaagatttttggagagcagaggtggtctctggcaattccatctggttttgagaaacttagcagctcacagagcacagagatcctgccttcttcctactatcaggctgacctaatggggttgggctgctcggcaactgcttgggtcaccttgccccaaggaaaccagccctgggtgccacccagccacttagggtctacagggtgggactccagacctagagcgtaagtatggatgttgtggccctgtgtcttcctagtgtgacccagccaggagcggaagcttcaggcgtttgtaaagtgaggtctggctctgcctcctccgttttttttttttttctgtttctgtttctgttttttttttgagatggagtctcgctctgtcgcccaggctggagtgcagtgtcacgatctcagctcactgcaacctccgcctcccaggtacaagagattctcctgcctcagcctcccgagtagctgggactacaggcgtgtgccaccatgcctggctaatttttgtatttttagtagagatggggtttcgccatgttagccagactggtctcgaactcctgacctcaggtgatcctcccaccccggcttcccaaagttctgggattataggcgtgagccaccatgcccggtctcttctcagtcttgaagcccatccctggatttccaccaggagttactttcctcctgacctgtaaatttgttctttaacaatggctgcaggtgggagcatatggtggtttataaaaacgctgtcgggctttgtttccttctttagctgccgtgtctacttctgaagtctgggaagtgccaagccacgcggcctcaagggagctggctggtgtttgagctgtggcagaagcacctggggctccagggagcaggctgggaactgcaggaccttgctcagccaggagcacttccccctccttgaggcaggaatactgaggtgcctccccacagatggagaaggtggagaggaggatgggcctcaggagcatctcaagccccagtagcaggagaaagaaagaaagagatgcctggttttcacagactggttcctgtggctgggatgactgcatccttttttttttttttttgagacggagtttttgcctttgtcgcccaggctggagtgcaatggcgtgatctcggctcaccgcaacctccgcctcccggattcaagcaattctcctgcctcagcctcccgagtagctgggattacaggcacgcacctccacgtccggctaattttgtatttttagtggagacggggtttctccatgtcggtcaggctggtctcgaactcccgacctcaggtgatctgcccacctcggcctcccaaagtgctgggattacaggcatgagccaccgcgcttggccagactgcgtcctttttaagcgaacattttagggcctgggagtttgtcaagtaaggaagtctcaagcccaaagagcagcgtcctgaccatggtggtttcattacgagcccttctgctggctctcaggcagaagccccacagcaccgggaccattcatgaggtcactgcccagctcatgatgtccgtgaggctgtccttttggccagtagccgtgtgcagctgtgtggcacagatggcttcgttcatcctgatcaaggccccacctcagccacagcagtccccccaacctgtgttgtccaccctattattcatgtacctgccaggccctgctagatagcaccccgtggcattacataacacttcatgagtggctgtgtcttgtaattttggggacaggtttctctctttccctctcttttttttgtcaaaagcccagagactgacaaccagctgcagtgtctaagtgttcctcactgacagggtggggcctcaccacccctggagggagcagcgttggcagggagacagcctggcccagtgaccctgggcccaagccagcccctccagggctttcagggaagcgccatccattttcaaagatgtcaaacgtcacttcttcctgtagggcccgagtcctgcctcctatcagggccagatcatagaaggctattttctattctggggaacgattataacttaaatgattgttttaataaaaattctaagctgg

SEQ ID NO: 12481 - protein, 595 aa, Homo sapiens; identical to SEQ ID NO: 2152

SEQ ID NO: 12482 - DNA, 6050 bp, Homo sapiens
gcggagtgaggacggtgacagccacgcgcgcgcgtacgcgcccgatgcagcgcggccccgtgaccctagtcggccgctgagaggcgcgcggagtctgggccgctgccgtctaggggtcccgtcccgaggcgtccccggcatctccggcccgaatcccggagtgccgggtcgcgcctgcaccgaaggtcccggctcctgtgccctccctgcagccgtcagggcccgtcccccaactcccctttccgctcaggcagggtcctcgcggcccatgctggccgctggggacccgcgcagcccagaccgttcccgggccgggcagccggccaccatggtggccctgaggcctgtgcagcaactccaggggggctaaagggctcagagtgcaggccgtggggcgcgagggtcccgggcctgagccccgcgccatggccggggccatcgcttcccgcatgagcttcagctctctcaagaggaagcaacccaagacgttcaccgtgaggatcgtcaccatggacgccgagatggagttcaattgcgagatgaagtggaaagggaaggacctctttgatttggtgtgccggactctggggctccgagaaacctggttctttggactgcagtacacaatcaaggacacagtggcctggctcaaaatggacaagaaggtactggatcatgatgtttcaaaggaagaaccagtcacctttcacttcttggccaaattttatcctgagaatgctgaagaggagctggttcaggagatcacacaacatttattcttcttacaggtaaagaagcagattttagatgaaaagatctactgccctcctgaggcttctgtgctcctggcttcttacgccgtccaggccaagtatggtgactacgaccccagtgttcacaagcggggatttttggcccaagaggaattgcttccaaaaagggtaataaatctgtatcagatgactccggaaatgtgggaggagagaattactgcttggtacgcagagcaccgaggccgagccagggatgaagctgaaatggaatatctgaagatagctcaggacctggagatgtacggtgtgaactactttgcaatccggaataaaaagggcacagagctgctgcttggagtggatgccctggggcttcacatttatgaccctgagaacagactgacccccaagatctccttcccgtggaatgaaatccgaaacatctcgtacagtgacaaggagtttactattaaaccactggataagaaaattgatgtcttcaagtttaactcctcaaagcttcgtgttaataagctgattctccagctatgtatcgggaaccatgatctatttatgaggagaaggaaagccgattctttggaagttcagcagatgaaagcccaggccagggaggagaaggctagaaagcagatggagcggcagcgcctcgctcgagagaagcagatgagggaggaggctgaacgcacgagggatgagttggagaggaggctgctgcagatgaaagaagaagcaacaatggccaacgaagcactgatgcggtctgaggagacagctgacctgttggctgaaaaggcccagatcaccgaggaggaggcaaaacttctggcccagaaggccgcagaggctgagcaggaaatgcagcgcatcaaggccacagcgattcgcacggaggaggagaagcgcctgatggagcagaaggtgctggaagccgaggtgctggcactgaagatggctgaggagtcagagaggagggccaaagaggcagatcagctgaagcaggacctgcaggaagcacgcgaggcggagcgaagagccaagcagaagctcctggagattgccaccaagcccacgtacccgcccatgaacccaattccagcaccgttgcctcctgacataccaagcttcaacctcattggtgacagcctgtctttcgacttcaaagatactgacatgaagcggctttccatggagatagagaaagaaaaagtggaatacatggaaaagagcaagcatctgcaggagcagctcaatgaactcaagacagaaatcgaggccttgaaactgaaagagagggagacagctctggatattctgcacaatgagaactccgacaggggtggcagcagcaagcacaataccattaaaaagcctcaagcccaaggcagaagacctatctgcatttgagccctcaaactcaccttgcagagcgccaagtcccgagtggccttctttgaagagctctagcaggtgacccagccaccccaggacctgccacttctcctgctaccgggaccgcgggatggaccagatatcaagagagccatccatagggagctggctgggggtttccgtgggagctccagaactttccccagctgagtgaagagcccagcccctcttatgtgcaattgccttgaactacgaccctgtagagatttctctcatggcgttctagttctctgacctgagtctttgttttaagaagtatttgtcttcctttgtctaatgtgggattcctgactcccttcgtccaaggcaccggtgtgtgtgtgtcttgcactccagagctgacctccaccgcccagcctgggaagtcattgtagggagtgagacactgaagccctgagaagccagtgccatcatccccaccccgcccagggttccggaacattcattcccccaccggtgaggacctggcatgcagcgaagcagcccagcccggcggatcccaggccagcacgcctgccggcttctcatcgtcagggagcccgcccagagctcgtgacgagcaagtgctgggtccccgccaggcaccccgaggcggcgctctggctggcagctggtggggaataggcagggcagctgtggctggggagagactttaggcagaagctgtgatgcaggctgactgccagccgaggggctgggtagtgccgtgcgggagctgatggtacagggcactcgctgtccccctccggccaccctagaccagggtccgagaggcaggcaggagccactcatgtcttccccattgcccgacgcccatagacgctccttcctgtgtggggctggggtactccctggtcgtactgcagtcagcacccgtaacccggctatgaccagggatctgtaagccctgtggctccacaggtgctgcttctcactggcccagactctgagctccaccggcccagtctgcacggcccatctgcttcaccttccctcccagccacgtgccagtggccacagcccacttcccaacccactgttgtacccaggcctcactttgctgttgcccttgtccctcttcgggccctgaattttctgttccctgggggccagccagggccctttgtgcccctcccagcacaggcctgatgcaggtgtccactcacaggtggcgctcacctaggctgtcacaggacccacctccatgccaggcaacagagggccacagaaccacccccacggctcactccttggtctggggccaccttcttgccctttctttttttttttttttttttttttccgagatggagtctctctctgtcacccaggtgggagtgtggtggcacaatctcggctcactgcaacctccacctcctgagttcaagcaattctcctgcctcagcctcccaagtagctgggactacaggcatgcaccaccacacttggccaatgttctgtatttttaatagggacggggttttgccatgttagctaggctggtctcaaactcacacctgggattacaggcatgagccactgcacccagccccttcttgccctttcttttctccatggctgatgctgctgtggccagccagggcccttgagatccttccagtttggctgttatgcaaagcaggtgatttgtcttaatcagataaaagatagaggctatgggggcctcaagatttttggagagcagaggtggtctctggcaattccatctggttttgagaaacttagcagctcacagagcacagagatcctgccttcttcctactatcaggctgacctaatggggttgggctgctcggcaactgcttgggtcaccttgccccaaggaaaccagccctgggtgccacccagccacttagggtctacagggtgggactccagacctagagcgtaagtatggatgttgtggccctgtgtcttcctagtgtgacccagccaggagcggaagcttcaggcgtttgtaaagtgaggtctggctctgcctcctccgttttttttttttttctgtttctgtttctgttttttttttgagatggagtctcgctctgtcgcccaggctggagtgcagtgtcacgatctcagctcactgcaacctccgcctcccaggtacaagagattctcctgcctcagcctcccgagtagctgggactacaggcgtgtgccaccatgcctggctaatttttgtatttttagtagagatggggtttcgccatgttagccagactggtctcgaactcctgacctcaggtgatcctcccaccccggcttcccaaagttctgggattataggcgtgagccaccatgcccggtctcttctcagtcttgaagcccatccctggatttccaccaggagttactttcctcctgacctgtaaatttgttctttaacaatggctgcaggtgggagcatatggtggtttataaaaacgctgtcgggctttgtttccttctttagctgccgtgtctacttctgaagtctgggaagtgccaagccacgcggcctcaagggagctggctggtgtttgagctgtggcagaagcacctggggctccagggagcaggctgggaactgcaggaccttgctcagccaggagcacttccccctccttgaggcaggaatactgaggtgcctccccacagatggagaaggtggagaggaggatgggcctcaggagcatctcaagccccagtagcaggagaaagaaagaaagagatgcctggttttcacagactggttcctgtggctgggatgactgcatccttttttttttttttttgagacggagtttttgcctttgtcgcccaggctggagtgcaatggcgtgatctcggctcaccgcaacctccgcctcccggattcaagcaattctcctgcctcagcctcccgagtagctgggattacaggcacgcacctccacgtccggctaattttgtatttttagtggagacggggtttctccatgtcggtcaggctggtctcgaactcccgacctcaggtgatctgcccacctcggcctcccaaagtgctgggattacaggcatgagccaccgcgcttggccagactgcgtcctttttaagcgaacattttagggcctgggagtttgtcaagtaaggaagtctcaagcccaaagagcagcgtcctgaccatggtggtttcattacgagcccttctgctggctctcaggcagaagccccacagcaccgggaccattcatgaggtcactgcccagctcatgatgtccgtgaggctgtccttttggccagtagccgtgtgcagctgtgtggcacagatggcttcgttcatcctgatcaaggccccacctcagccacagcagtccccccaacctgtgttgtccaccctattattcatgtacctgccaggccctgctagatagcaccccgtggcattacataacacttcatgagtggctgtgtcttgtaattttggggacaggtttctctctttccctctcttttttttgtcaaaagcccagagactgacaaccagctgcagtgtctaagtgttcctcactgacagggtggggcctcaccacccctggagggagcagcgttggcagggagacagcctggcccagtgaccctgggcccaagccagcccctccagggctttcagggaagcgccatccattttcaaagatgtcaaacgtcacttcttcctgtagggcccgagtcctgcctcctatcagggccagatcatagaaggctattttctattctggggaacgattataacttaaatgattgttttaataaaaattctaagctgg

SEQ ID NO: 12483 - protein, 590 aa, Homo sapiens; identical to SEQ ID NO: 2154

SEQ ID NO: 12484 - DNA, 2170 bp, Homo sapiens
ggagtgaggacggtgacagccacgcgcgcgcgtacgcgcccgatgcagcgcggccccgtgaccctagtcggccgctgagaggcgcgcggagtctgggccgctgccgtctaggggtcccgtcccgaggcgtccccggcatctccggcccgaatcccggagtgccgggtcgcgcctgcaccgaaggtcccggctcctgtgccctccctgcagccgtcagggcccgtcccccaactcccctttccgctcaggcagggtcctcgcggcccatgctggccgctggggacccgcgcagcccagaccgttcccgggccgggcagccggccaccatggtggccctgaggcctgtgcagcaactccaggggggctaaagggctcagagtgcaggccgtggggcgcgagggtcccgggcctgagccccgcgccatggccggggccatcgcttcccgcatgagcttcagctctctcaagaggaagcaacccaagacgttcaccgtgaggatcgtcaccatggacgccgagatggagttcaattgcgaggtaaagaagcagattttagatgaaaagatctactgccctcctgaggcttctgtgctcctggcttcttacgccgtccaggccaagtatggtgactacgaccccagtgttcacaagcggggatttttggcccaagaggaattgcttccaaaaagggtaataaatctgtatcagatgactccggaaatgtgggaggagagaattactgcttggtacgcagagcaccgaggccgagccagggatgaagctgaaatggaatatctgaagatagctcaggacctggagatgtacggtgtgaactactttgcaatccggaataaaaagggcacagagctgctgcttggagtggatgccctggggcttcacatttatgaccctgagaacagactgacccccaagatctccttcccgtggaatgaaatccgaaacatctcgtacagtgacaaggagtttactattaaaccactggataagaaaattgatgtcttcaagtttaactcctcaaagcttcgtgttaataagctgattctccagctatgtatcgggaaccatgatctatttatgaggagaaggaaagccgattctttggaagttcagcagatgaaagcccaggccagggaggagaaggctagaaagcagatggagcggcagcgcctcgctcgagagaagcagatgagggaggaggctgaacgcacgagggatgagttggagaggaggctgctgcagatgaaagaagaagcaacaatggccaacgaagcactgatgcggtctgaggagacagctgacctgttggctgaaaaggcccagatcaccgaggaggaggcaaaacttctggcccagaaggccgcagaggctgagcaggaaatgcagcgcatcaaggccacagcgattcgcacggaggaggagaagcgcctgatggagcagaaggtgctggaagccgaggtgctggcactgaagatggctgaggagtcagagaggagggccaaagaggcagatcagctgaagcaggacctgcaggaagcacgcgaggcggagcgaagagccaagcagaagctcctggagattgccaccaagcccacgtacccgcccatgaacccaattccagcaccgttgcctcctgacataccaagcttcaacctcattggtgacagcctgtctttcgacttcaaagatactgacatgaagcggctttccatggagatagagaaagaaaaagtggaatacatggaaaagagcaagcatctgcaggagcagctcaatgaactcaagacagaaatcgaggccttgaaactgaaagagagggagacagctctggatattctgcacaatgagaactccgacaggggtggcagcagcaagcacaataccattaaaaagcctcaagcccaaggcagaagacctatctgcatttgagccctcaaacttcctctccataggctgagcagagatgtggtcagagtgaactcacattggaacagtacactcacggcaccctggagaggagcggtcactggttgctgagtgaattaaccgaatgtttgctgcttttctcctgcaacagttcattattcctccagcatgcctaggcagtggagagaatgtattttgcccaataataaaatgacatcctgcctct

SEQ ID NO: 12485 - protein, 507 aa, Homo sapiens; identical to SEQ ID NO: 2162

SEQ ID NO: 12486 - DNA, 3055 bp, Homo sapiens
ggagtgaggacggtgacagccacgcgcgcgcgtacgcgcccgatgcagcgcggccccgtgaccctagtcggccgctgagaggcgcgcggagtctgggccgctgccgtctaggggtcccgtcccgaggcgtccccggcatctccggcccgaatcccggagtgccgggtcgcgcctgcaccgaaggtcccggctcctgtgccctccctgcagccgtcagggcccgtcccccaactcccctttccgctcaggcagggtcctcgcggcccatgctggccgctggggacccgcgcagcccagaccgttcccgggccgggcagccggccaccatggtggccctgaggcctgtgcagcaactccaggggggctaaagggctcagagtgcaggccgtggggcgcgagggtcccgggcctgagccccgcgccatggccggggccatcgcttcccgcatgagcttcagctctctcaagaggaagcaacccaagacgttcaccgtgaggatcgtcaccatggacgccgagatggagttcaattgcgagatgaagtggaaagggaaggacctctttgatttggtgtgccggactctggggctccgagaaacctggttctttggactgcagtacacaatcaaggacacagtggcctggctcaaaatggacaagaaggtactggatcatgatgtttcaaaggaagaaccagtcacctttcacttcttggccaaattttatcctgagaatgctgaagaggagctggttcaggagatcacacaacatttattcttcttacaggtaaagaagcagattttagatgaaaagatctactgccctcctgaggcttctgtgctcctggcttcttacgccgtccaggccaagtatggtgactacgaccccagtgttcacaagcggggatttttggcccaagaggaattgcttccaaaaagggtaataaatctgtatcagatgactccggaaatgtgggaggagagaattactgcttggtacgcagagcaccgaggccgagccagggatgaagctgaaatggaatatctgaagatagctcaggacctggagatgtacggtgtgaactactttgcaatccggaataaaaagggcacagagctgctgcttggagtggatgccctggggcttcacatttatgaccctgagaacagactgacccccaagatctccttcccgtggaatgaaatccgaaacatctcgtacagtgacaaggagtttactattaaaccactggataagaaaattgatgtcttcaagtttaactcctcaaagcttcgtgttaataagctgattctccagctatgtatcgggaaccatgatctatttatgaggagaaggaaagccgattctttggaagttcagcagatgaaagcccaggccagggaggagaaggctagaaagcagatggagcggcagcgcctcgctcgagagaagcagatgagggaggaggctgaacgcacgagggatgagttggagaggaggctgctgcagatgaaagaagaagcaacaatggccaacgaagcactgatgcggtctgaggagacagctgacctgttggctgaaaaggcccagatcaccgaggaggaggcaaaacttctggcccagaaggccgcagaggctgagcaggaaatgcagcgcatcaaggccacagcgattcgcacggaggaggagaagcgcctgatggagcagaaggtgctggaagccgaggtgctggcactgaagatggctgaggagtcagagaggagggccaaagaggcagatcagctgaagcaggacctgcaggaagcacgcgaggcggagcgaagagccaagcagaagctcctggagattgccaccaagcccacgtacccgcccatgaacccaattccagcaccgttgcctcctgacataccaagcttcaacctcattggtgacagcctgtctttcgacttcaaagatactgacatgaagcggctttccatggagatagagaaagaaaaagtggaatacatggaaaagagcaagcatctgcaggagcagctcaatgaactcaagacagaaatcgaggccttgaaactgaaagagagggagacagctctggatattctgcacaatgagaactccgacaggggtggcagcagcaagcacaataccattaaaaagcctcaagcccaaggcagaagacctatctgcatttgagccctcaaagtaggttgttcccaggtactctctatgtggtgatggtgctgccctctgtgatactaacccgtgcatgagcttgcctgtctctgtcctcgggccacactgagcccttacgagggcaggtggtgcctgggtactggccgcagcatgctttgagtctaaaagtaggcacccaccctgtgaagccagaccagcctccagggccccagaagactgcctcgttccgaagagcatgtcatggggctgtaggaccagccattcttcccatctcgggtcattgttgggctggggaaggttatggcttcttgtccagtcaggtgtgtctaaaagtcctttgtcttggtggcatactcctagcatggaaatggggtcaatctgggcactttggagactggtgtgtttaactcaagatcaagaccttttatgcgttgacagcctctcaagacccatggtcacacctggcagcttctggtagtggggcaaaagggttgcttgtgctggctcattttcctttagagctttccctttctgcacacatcccttttcttttcaaataaagcaaacccagagcacagggtctgatatgtgagtccacggggagtggactgtctgttcatctgtgctcagccacctctgcttcagcttcctctccataggctgagcagagatgtggtcagagtgaactcacattggaacagtacactcacggcaccctggagaggagcggtcactggttgctgagtgaattaaccgaatgtttgctgcttttctcctgcaacagttcattattcctccagcatgcctaggcagtggagagaatgtattttgcccaataataaaatgacatcctgcctct

SEQ ID NO: 12487 - protein, 590 aa, Homo sapiens; identical to SEQ ID NO: 2154

SEQ ID NO: 12488 - DNA, 5022 bp, Homo sapiens
ggagtgaggacggtgacagccacgcgcgcgcgtacgcgcccgatgcagcgcggccccgtgaccctagtcggccgctgagaggcgcgcggagtctgggccgctgccgtctaggggtcccgtcccgaggcgtccccggcatctccggcccgaatcccggagtgccgggtcgcgcctgcaccgaaggtcccggctcctgtgccctccctgcagccgtcagggcccgtcccccaactcccctttccgctcaggcagggtcctcgcggcccatgctggccgctggggacccgcgcagcccagaccgttcccgggccgggcagccggccaccatggtggccctgaggcctgtgcagcaactccaggggggctaaagggctcagagtgcaggccgtggggcgcgagggtcccgggcctgagccccgcgccatggccggggccatcgcttcccgcatgagcttcagctctctcaagaggaagcaacccaagacgttcaccgtgaggatcgtcaccatggacgccgagatggagttcaattgcgaggtaaagaagcagattttagatgaaaagatctactgccctcctgaggcttctgtgctcctggcttcttacgccgtccaggccaagaataaaaagggcacagagctgctgcttggagtggatgccctggggcttcacatttatgaccctgagaacagactgacccccaagatctccttcccgtggaatgaaatccgaaacatctcgtacagtgacaaggagtttactattaaaccactggataagaaaattgatgtcttcaagtttaactcctcaaagcttcgtgttaataagctgattctccagctatgtatcgggaaccatgatctatttatgaggagaaggaaagccgattctttggaagttcagcagatgaaagcccaggccagggaggagaaggctagaaagcagggccaaagaggcagatcagctgaagcaggacctgcaggaagcacgcgaggcggagcgaagagccaagcagaagctcctggagattgccaccaagcccacgtacccgcccatgaacccaattccagcaccgttgcctcctgacataccaagcttcaacctcattggtgacagcctgtctttcgacttcaaagatactgacatgaagcggctttccatggagatagagaaagaaaactcaccttgcagagcgccaagtcccgagtggccttctttgaagagctctagcaggtgacccagccaccccaggacctgccacttctcctgctaccgggaccgcgggatggaccagatatcaagagagccatccatagggagctggctgggggtttccgtgggagctccagaactttccccagctgagtgaagagcccagcccctcttatgtgcaattgccttgaactacgaccctgtagagatttctctcatggcgttctagttctctgacctgagtctttgttttaagaagtatttgtcttcctttgtctaatgtgggattcctgactcccttcgtccaaggcaccggtgtgtgtgtgtcttgcactccagagctgacctccaccgcccagcctgggaagtcattgtagggagtgagacactgaagccctgagaagccagtgccatcatccccaccccgcccagggttccggaacattcattcccccaccggtgaggacctggcatgcagcgaagcagcccagcccggcggatcccaggccagcacgcctgccggcttctcatcgtcagggagcccgcccagagctcgtgacgagcaagtgctgggtccccgccaggcaccccgaggcggcgctctggctggcagctggtggggaataggcagggcagctgtggctggggagagactttaggcagaagctgtgatgcaggctgactgccagccgaggggctgggtagtgccgtgcgggagctgatggtacagggcactcgctgtccccctccggccaccctagaccagggtccgagaggcaggcaggagccactcatgtcttccccattgcccgacgcccatagacgctccttcctgtgtggggctggggtactccctggtcgtactgcagtcagcacccgtaacccggctatgaccagggatctgtaagccctgtggctccacaggtgctgcttctcactggcccagactctgagctccaccggcccagtctgcacggcccatctgcttcaccttccctcccagccacgtgccagtggccacagcccacttcccaacccactgttgtacccaggcctcactttgctgttgcccttgtccctcttcgggccctgaattttctgttccctgggggccagccagggccctttgtgcccctcccagcacaggcctgatgcaggtgtccactcacaggtggcgctcacctaggctgtcacaggacccacctccatgccaggcaacagagggccacagaaccacccccacggctcactccttggtctggggccaccttcttgccctttctttttttttttttttttttttttccgagatggagtctctctctgtcacccaggtgggagtgtggtggcacaatctcggctcactgcaacctccacctcctgagttcaagcaattctcctgcctcagcctcccaagtagctgggactacaggcatgcaccaccacacttggccaatgttctgtatttttaatagggacggggttttgccatgttagctaggctggtctcaaactcacacctgggattacaggcatgagccactgcacccagccccttcttgccctttcttttctccatggctgatgctgctgtggccagccagggcccttgagatccttccagtttggctgttatgcaaagcaggtgatttgtcttaatcagataaaagatagaggctatgggggcctcaagatttttggagagcagaggtggtctctggcaattccatctggttttgagaaacttagcagctcacagagcacagagatcctgccttcttcctactatcaggctgacctaatggggttgggctgctcggcaactgcttgggtcaccttgccccaaggaaaccagccctgggtgccacccagccacttagggtctacagggtgggactccagacctagagcgtaagtatggatgttgtggccctgtgtcttcctagtgtgacccagccaggagcggaagcttcaggcgtttgtaaagtgaggtctggctctgcctcctccgttttttttttttttctgtttctgtttctgttttttttttgagatggagtctcgctctgtcgcccaggctggagtgcagtgtcacgatctcagctcactgcaacctccgcctcccaggtacaagagattctcctgcctcagcctcccgagtagctgggactacaggcgtgtgccaccatgcctggctaatttttgtatttttagtagagatggggtttcgccatgttagccagactggtctcgaactcctgacctcaggtgatcctcccaccccggcttcccaaagttctgggattataggcgtgagccaccatgcccggtctcttctcagtcttgaagcccatccctggatttccaccaggagttactttcctcctgacctgtaaatttgttctttaacaatggctgcaggtgggagcatatggtggtttataaaaacgctgtcgggctttgtttccttctttagctgccgtgtctacttctgaagtctgggaagtgccaagccacgcggcctcaagggagctggctggtgtttgagctgtggcagaagcacctggggctccagggagcaggctgggaactgcaggaccttgctcagccaggagcacttccccctccttgaggcaggaatactgaggtgcctccccacagatggagaaggtggagaggaggatgggcctcaggagcatctcaagccccagtagcaggagaaagaaagaaagagatgcctggttttcacagactggttcctgtggctgggatgactgcatccttttttttttttttttgagacggagtttttgcctttgtcgcccaggctggagtgcaatggcgtgatctcggctcaccgcaacctccgcctcccggattcaagcaattctcctgcctcagcctcccgagtagctgggattacaggcacgcacctccacgtccggctaattttgtatttttagtggagacggggtttctccatgtcggtcaggctggtctcgaactcccgacctcaggtgatctgcccacctcggcctcccaaagtgctgggattacaggcatgagccaccgcgcttggccagactgcgtcctttttaagcgaacattttagggcctgggagtttgtcaagtaaggaagtctcaagcccaaagagcagcgtcctgaccatggtggtttcattacgagcccttctgctggctctcaggcagaagccccacagcaccgggaccattcatgaggtcactgcccagctcatgatgtccgtgaggctgtccttttggccagtagccgtgtgcagctgtgtggcacagatggcttcgttcatcctgatcaaggccccacctcagccacagcagtccccccaacctgtgttgtccaccctattattcatgtacctgccaggccctgctagatagcaccccgtggcattacataacacttcatgagtggctgtgtcttgtaattttggggacaggtttctctctttccctctcttttttttgtcaaaagcccagagactgacaaccagctgcagtgtctaagtgttcctcactgacagggtggggcctcaccacccctggagggagcagcgttggcagggagacagcctggcccagtgaccctgggcccaagccagcccctccagggctttcagggaagcgccatccattttcaaagatgtcaaacgtcacttcttcctgtagggcccgagtcctgcctcctatcagggccagatcatagaaggctattttctattctggggaacgattataacttaaatgattgttttaataaaaattctaagctgg

SEQ ID NO: 12489 - protein, 220 aa, Homo sapiens
MAGAIASRMSFSSLKRKQPKTFTVRIVTMDAEMEFNCEVKKQILDEKIYCPPEASVLLASYAVQAKNKKGTELLLGVDALGLHIYDPENRLTPKISFPWNEIRNISYSDKEFTIKPLDKKIDVFKFNSSKLRVNKLILQLCIGNHDLFMRRRKADSLEVQQMKAQAREEKARKQGQRGRSAEAGPAGSTRGGAKSQAEAPGDCHQAHVPAHEPNSSTVAS

SEQ ID NO: 12490 - DNA, 5799 bp, Homo sapiens
ggagtgaggacggtgacagccacgcgcgcgcgtacgcgcccgatgcagcgcggccccgtgaccctagtcggccgctgagaggcgcgcggagtctgggccgctgccgtctaggggtcccgtcccgaggcgtccccggcatctccggcccgaatcccggagtgccgggtcgcgcctgcaccgaaggtcccggctcctgtgccctccctgcagccgtcagggcccgtcccccaactcccctttccgctcaggcagggtcctcgcggcccatgctggccgctggggacccgcgcagcccagaccgttcccgggccgggcagccggccaccatggtggccctgaggcctgtgcagcaactccaggggggctaaagggctcagagtgcaggccgtggggcgcgagggtcccgggcctgagccccgcgccatggccggggccatcgcttcccgcatgagcttcagctctctcaagaggaagcaacccaagacgttcaccgtgaggatcgtcaccatggacgccgagatggagttcaattgcgaggtaaagaagcagattttagatgaaaagatctactgccctcctgaggcttctgtgctcctggcttcttacgccgtccaggccaagtatggtgactacgaccccagtgttcacaagcggggatttttggcccaagaggaattgcttccaaaaagggtaataaatctgtatcagatgactccggaaatgtgggaggagagaattactgcttggtacgcagagcaccgaggccgagccagggatgaagctgaaatggaatatctgaagatagctcaggacctggagatgtacggtgtgaactactttgcaatccggaataaaaagggcacagagctgctgcttggagtggatgccctggggcttcacatttatgaccctgagaacagactgacccccaagatctccttcccgtggaatgaaatccgaaacatctcgtacagtgacaaggagtttactattaaaccactggataagaaaattgatgtcttcaagtttaactcctcaaagcttcgtgttaataagctgattctccagctatgtatcgggaaccatgatctatttatgaggagaaggaaagccgattctttggaagttcagcagatgaaagcccaggccagggaggagaaggctagaaagcagatggagcggcagcgcctcgctcgagagaagcagatgagggaggaggctgaacgcacgagggatgagttggagaggaggctgctgcagatgaaagaagaagcaacaatggccaacgaagcactgatgcggtctgaggagacagctgacctgttggctgaaaaggcccagatcaccgaggaggaggcaaaacttctggcccagaaggccgcagaggctgagcaggaaatgcagcgcatcaaggccacagcgattcgcacggaggaggagaagcgcctgatggagcagaaggtgctggaagccgaggtgctggcactgaagatggctgaggagtcagagaggagggccaaagaggcagatcagctgaagcaggacctgcaggaagcacgcgaggcggagcgaagagccaagcagaagctcctggagattgccaccaagcccacgtacccgcccatgaacccaattccagcaccgttgcctcctgacataccaagcttcaacctcattggtgacagcctgtctttcgacttcaaagatactgacatgaagcggctttccatggagatagagaaagaaaaagtggaatacatggaaaagagcaagcatctgcaggagcagctcaatgaactcaagacagaaatcgaggccttgaaactgaaagagagggagacagctctggatattctgcacaatgagaactccgacaggggtggcagcagcaagcacaataccattaaaaagcctcaagcccaaggcagaagacctatctgcatttgagccctcaaactcaccttgcagagcgccaagtcccgagtggccttctttgaagagctctagcaggtgacccagccaccccaggacctgccacttctcctgctaccgggaccgcgggatggaccagatatcaagagagccatccatagggagctggctgggggtttccgtgggagctccagaactttccccagctgagtgaagagcccagcccctcttatgtgcaattgccttgaactacgaccctgtagagatttctctcatggcgttctagttctctgacctgagtctttgttttaagaagtatttgtcttcctttgtctaatgtgggattcctgactcccttcgtccaaggcaccggtgtgtgtgtgtcttgcactccagagctgacctccaccgcccagcctgggaagtcattgtagggagtgagacactgaagccctgagaagccagtgccatcatccccaccccgcccagggttccggaacattcattcccccaccggtgaggacctggcatgcagcgaagcagcccagcccggcggatcccaggccagcacgcctgccggcttctcatcgtcagggagcccgcccagagctcgtgacgagcaagtgctgggtccccgccaggcaccccgaggcggcgctctggctggcagctggtggggaataggcagggcagctgtggctggggagagactttaggcagaagctgtgatgcaggctgactgccagccgaggggctgggtagtgccgtgcgggagctgatggtacagggcactcgctgtccccctccggccaccctagaccagggtccgagaggcaggcaggagccactcatgtcttccccattgcccgacgcccatagacgctccttcctgtgtggggctggggtactccctggtcgtactgcagtcagcacccgtaacccggctatgaccagggatctgtaagccctgtggctccacaggtgctgcttctcactggcccagactctgagctccaccggcccagtctgcacggcccatctgcttcaccttccctcccagccacgtgccagtggccacagcccacttcccaacccactgttgtacccaggcctcactttgctgttgcccttgtccctcttcgggccctgaattttctgttccctgggggccagccagggccctttgtgcccctcccagcacaggcctgatgcaggtgtccactcacaggtggcgctcacctaggctgtcacaggacccacctccatgccaggcaacagagggccacagaaccacccccacggctcactccttggtctggggccaccttcttgccctttctttttttttttttttttttttttccgagatggagtctctctctgtcacccaggtgggagtgtggtggcacaatctcggctcactgcaacctccacctcctgagttcaagcaattctcctgcctcagcctcccaagtagctgggactacaggcatgcaccaccacacttggccaatgttctgtatttttaatagggacggggttttgccatgttagctaggctggtctcaaactcacacctgggattacaggcatgagccactgcacccagccccttcttgccctttcttttctccatggctgatgctgctgtggccagccagggcccttgagatccttccagtttggctgttatgcaaagcaggtgatttgtcttaatcagataaaagatagaggctatgggggcctcaagatttttggagagcagaggtggtctctggcaattccatctggttttgagaaacttagcagctcacagagcacagagatcctgccttcttcctactatcaggctgacctaatggggttgggctgctcggcaactgcttgggtcaccttgccccaaggaaaccagccctgggtgccacccagccacttagggtctacagggtgggactccagacctagagcgtaagtatggatgttgtggccctgtgtcttcctagtgtgacccagccaggagcggaagcttcaggcgtttgtaaagtgaggtctggctctgcctcctccgttttttttttttttctgtttctgtttctgttttttttttgagatggagtctcgctctgtcgcccaggctggagtgcagtgtcacgatctcagctcactgcaacctccgcctcccaggtacaagagattctcctgcctcagcctcccgagtagctgggactacaggcgtgtgccaccatgcctggctaatttttgtatttttagtagagatggggtttcgccatgttagccagactggtctcgaactcctgacctcaggtgatcctcccaccccggcttcccaaagttctgggattataggcgtgagccaccatgcccggtctcttctcagtcttgaagcccatccctggatttccaccaggagttactttcctcctgacctgtaaatttgttctttaacaatggctgcaggtgggagcatatggtggtttataaaaacgctgtcgggctttgtttccttctttagctgccgtgtctacttctgaagtctgggaagtgccaagccacgcggcctcaagggagctggctggtgtttgagctgtggcagaagcacctggggctccagggagcaggctgggaactgcaggaccttgctcagccaggagcacttccccctccttgaggcaggaatactgaggtgcctccccacagatggagaaggtggagaggaggatgggcctcaggagcatctcaagccccagtagcaggagaaagaaagaaagagatgcctggttttcacagactggttcctgtggctgggatgactgcatccttttttttttttttttgagacggagtttttgcctttgtcgcccaggctggagtgcaatggcgtgatctcggctcaccgcaacctccgcctcccggattcaagcaattctcctgcctcagcctcccgagtagctgggattacaggcacgcacctccacgtccggctaattttgtatttttagtggagacggggtttctccatgtcggtcaggctggtctcgaactcccgacctcaggtgatctgcccacctcggcctcccaaagtgctgggattacaggcatgagccaccgcgcttggccagactgcgtcctttttaagcgaacattttagggcctgggagtttgtcaagtaaggaagtctcaagcccaaagagcagcgtcctgaccatggtggtttcattacgagcccttctgctggctctcaggcagaagccccacagcaccgggaccattcatgaggtcactgcccagctcatgatgtccgtgaggctgtccttttggccagtagccgtgtgcagctgtgtggcacagatggcttcgttcatcctgatcaaggccccacctcagccacagcagtccccccaacctgtgttgtccaccctattattcatgtacctgccaggccctgctagatagcaccccgtggcattacataacacttcatgagtggctgtgtcttgtaattttggggacaggtttctctctttccctctcttttttttgtcaaaagcccagagactgacaaccagctgcagtgtctaagtgttcctcactgacagggtggggcctcaccacccctggagggagcagcgttggcagggagacagcctggcccagtgaccctgggcccaagccagcccctccagggctttcagggaagcgccatccattttcaaagatgtcaaacgtcacttcttcctgtagggcccgagtcctgcctcctatcagggccagatcatagaaggctattttctattctggggaacgattataacttaaatgattgttttaataaaaattctaagctgg

SEQ ID NO: 12491 - protein, 507 aa, Homo sapiens; identical to SEQ ID NO: 2162

SEQ ID NO: 12492 - DNA, 6164 bp, Homo sapiens
ggagtgaggacggtgacagccacgcgcgcgcgtacgcgcccgatgcagcgcggccccgtgaccctagtcggccgctgagaggcgcgcggagtctgggccgctgccgtctaggggtcccgtcccgaggcgtccccggcatctccggcccgaatcccggagtgccgggtcgcgcctgcaccgaaggtcccggctcctgtgccctccctgcagccgtcagggcccgtcccccaactcccctttccgctcaggcagggtcctcgcggcccatgctggccgctggggacccgcgcagcccagaccgttcccgggccgggcagccggccaccatggtggccctgaggcctgtgcagcaactccaggggggctaaagggctcagagtgcaggccgtggggcgcgagggtcccgggcctgagccccgcgccatggccggggccatcgcttcccgcatgagcttcagctctctcaagaggaagcaacccaagacgttcaccgtgaggatcgtcaccatggacgccgagatggagttcaattgcgagtcttgctctgtcaccctagctggagtgcagtggcgtgatcttggtttactgcaacctctgcctcccaagttcaagcgattctcctgcctcagcttcccaagtagctgggactacagatgaagtggaaagggaaggacctctttgatttggtgtgccggactctggggctccgagaaacctggttctttggactgcagtacacaatcaaggacacagtggcctggctcaaaatggacaagaaggtactggatcatgatgtttcaaaggaagaaccagtcacctttcacttcttggccaaattttatcctgagaatgctgaagaggagctggttcaggagatcacacaacatttattcttcttacaggtaaagaagcagattttagatgaaaagatctactgccctcctgaggcttctgtgctcctggcttcttacgccgtccaggccaagtatggtgactacgaccccagtgttcacaagcggggatttttggcccaagaggaattgcttccaaaaagggtaataaatctgtatcagatgactccggaaatgtgggaggagagaattactgcttggtacgcagagcaccgaggccgagccagggatgaagctgaaatggaatatctgaagatagctcaggacctggagatgtacggtgtgaactactttgcaatccggaataaaaagggcacagagctgctgcttggagtggatgccctggggcttcacatttatgaccctgagaacagactgacccccaagatctccttcccgtggaatgaaatccgaaacatctcgtacagtgacaaggagtttactattaaaccactggataagaaaattgatgtcttcaagtttaactcctcaaagcttcgtgttaataagctgattctccagctatgtatcgggaaccatgatctatttatgaggagaaggaaagccgattctttggaagttcagcagatgaaagcccaggccagggaggagaaggctagaaagcagatggagcggcagcgcctcgctcgagagaagcagatgagggaggaggctgaacgcacgagggatgagttggagaggaggctgctgcagatgaaagaagaagcaacaatggccaacgaagcactgatgcggtctgaggagacagctgacctgttggctgaaaaggcccagatcaccgaggaggaggcaaaacttctggcccagaaggccgcagaggctgagcaggaaatgcagcgcatcaaggccacagcgattcgcacggaggaggagaagcgcctgatggagcagaaggtgctggaagccgaggtgctggcactgaagatggctgaggagtcagagaggagggccaaagaggcagatcagctgaagcaggacctgcaggaagcacgcgaggcggagcgaagagccaagcagaagctcctggagattgccaccaagcccacgtacccgcccatgaacccaattccagcaccgttgcctcctgacataccaagcttcaacctcattggtgacagcctgtctttcgacttcaaagatactgacatgaagcggctttccatggagatagagaaagaaaaagtggaatacatggaaaagagcaagcatctgcaggagcagctcaatgaactcaagacagaaatcgaggccttgaaactgaaagagagggagacagctctggatattctgcacaatgagaactccgacaggggtggcagcagcaagcacaataccattaaaaagcctcaagcccaaggcagaagacctatctgcatttgagccctcaaactcaccttgcagagcgccaagtcccgagtggccttctttgaagagctctagcaggtgacccagccaccccaggacctgccacttctcctgctaccgggaccgcgggatggaccagatatcaagagagccatccatagggagctggctgggggtttccgtgggagctccagaactttccccagctgagtgaagagcccagcccctcttatgtgcaattgccttgaactacgaccctgtagagatttctctcatggcgttctagttctctgacctgagtctttgttttaagaagtatttgtcttcctttgtctaatgtgggattcctgactcccttcgtccaaggcaccggtgtgtgtgtgtcttgcactccagagctgacctccaccgcccagcctgggaagtcattgtagggagtgagacactgaagccctgagaagccagtgccatcatccccaccccgcccagggttccggaacattcattcccccaccggtgaggacctggcatgcagcgaagcagcccagcccggcggatcccaggccagcacgcctgccggcttctcatcgtcagggagcccgcccagagctcgtgacgagcaagtgctgggtccccgccaggcaccccgaggcggcgctctggctggcagctggtggggaataggcagggcagctgtggctggggagagactttaggcagaagctgtgatgcaggctgactgccagccgaggggctgggtagtgccgtgcgggagctgatggtacagggcactcgctgtccccctccggccaccctagaccagggtccgagaggcaggcaggagccactcatgtcttccccattgcccgacgcccatagacgctccttcctgtgtggggctggggtactccctggtcgtactgcagtcagcacccgtaacccggctatgaccagggatctgtaagccctgtggctccacaggtgctgcttctcactggcccagactctgagctccaccggcccagtctgcacggcccatctgcttcaccttccctcccagccacgtgccagtggccacagcccacttcccaacccactgttgtacccaggcctcactttgctgttgcccttgtccctcttcgggccctgaattttctgttccctgggggccagccagggccctttgtgcccctcccagcacaggcctgatgcaggtgtccactcacaggtggcgctcacctaggctgtcacaggacccacctccatgccaggcaacagagggccacagaaccacccccacggctcactccttggtctggggccaccttcttgccctttctttttttttttttttttttttttccgagatggagtctctctctgtcacccaggtgggagtgtggtggcacaatctcggctcactgcaacctccacctcctgagttcaagcaattctcctgcctcagcctcccaagtagctgggactacaggcatgcaccaccacacttggccaatgttctgtatttttaatagggacggggttttgccatgttagctaggctggtctcaaactcacacctgggattacaggcatgagccactgcacccagccccttcttgccctttcttttctccatggctgatgctgctgtggccagccagggcccttgagatccttccagtttggctgttatgcaaagcaggtgatttgtcttaatcagataaaagatagaggctatgggggcctcaagatttttggagagcagaggtggtctctggcaattccatctggttttgagaaacttagcagctcacagagcacagagatcctgccttcttcctactatcaggctgacctaatggggttgggctgctcggcaactgcttgggtcaccttgccccaaggaaaccagccctgggtgccacccagccacttagggtctacagggtgggactccagacctagagcgtaagtatggatgttgtggccctgtgtcttcctagtgtgacccagccaggagcggaagcttcaggcgtttgtaaagtgaggtctggctctgcctcctccgttttttttttttttctgtttctgtttctgttttttttttgagatggagtctcgctctgtcgcccaggctggagtgcagtgtcacgatctcagctcactgcaacctccgcctcccaggtacaagagattctcctgcctcagcctcccgagtagctgggactacaggcgtgtgccaccatgcctggctaatttttgtatttttagtagagatggggtttcgccatgttagccagactggtctcgaactcctgacctcaggtgatcctcccaccccggcttcccaaagttctgggattataggcgtgagccaccatgcccggtctcttctcagtcttgaagcccatccctggatttccaccaggagttactttcctcctgacctgtaaatttgttctttaacaatggctgcaggtgggagcatatggtggtttataaaaacgctgtcgggctttgtttccttctttagctgccgtgtctacttctgaagtctgggaagtgccaagccacgcggcctcaagggagctggctggtgtttgagctgtggcagaagcacctggggctccagggagcaggctgggaactgcaggaccttgctcagccaggagcacttccccctccttgaggcaggaatactgaggtgcctccccacagatggagaaggtggagaggaggatgggcctcaggagcatctcaagccccagtagcaggagaaagaaagaaagagatgcctggttttcacagactggttcctgtggctgggatgactgcatccttttttttttttttttgagacggagtttttgcctttgtcgcccaggctggagtgcaatggcgtgatctcggctcaccgcaacctccgcctcccggattcaagcaattctcctgcctcagcctcccgagtagctgggattacaggcacgcacctccacgtccggctaattttgtatttttagtggagacggggtttctccatgtcggtcaggctggtctcgaactcccgacctcaggtgatctgcccacctcggcctcccaaagtgctgggattacaggcatgagccaccgcgcttggccagactgcgtcctttttaagcgaacattttagggcctgggagtttgtcaagtaaggaagtctcaagcccaaagagcagcgtcctgaccatggtggtttcattacgagcccttctgctggctctcaggcagaagccccacagcaccgggaccattcatgaggtcactgcccagctcatgatgtccgtgaggctgtccttttggccagtagccgtgtgcagctgtgtggcacagatggcttcgttcatcctgatcaaggccccacctcagccacagcagtccccccaacctgtgttgtccaccctattattcatgtacctgccaggccctgctagatagcaccccgtggcattacataacacttcatgagtggctgtgtcttgtaattttggggacaggtttctctctttccctctcttttttttgtcaaaagcccagagactgacaaccagctgcagtgtctaagtgttcctcactgacagggtggggcctcaccacccctggagggagcagcgttggcagggagacagcctggcccagtgaccctgggcccaagccagcccctccagggctttcagggaagcgccatccattttcaaagatgtcaaacgtcacttcttcctgtagggcccgagtcctgcctcctatcagggccagatcatagaaggctattttctattctggggaacgattataacttaaatgattgttttaataaaaattctaagctgg

SEQ ID NO: 12493 - protein, 552 aa, Homo sapiens
MKWKGKDLFDLVCRTLGLRETWFFGLQYTIKDTVAWLKMDKKVLDHDVSKEEPVTFHFLAKFYPENAEEELVQEITQHLFFLQVKKQILDEKIYCPPEASVLLASYAVQAKYGDYDPSVHKRGFLAQEELLPKRVINLYQMTPEMWEERITAWYAEHRGRARDEAEMEYLKIAQDLEMYGVNYFAIRNKKGTELLLGVDALGLHIYDPENRLTPKISFPWNEIRNISYSDKEFTIKPLDKKIDVFKFNSSKLRVNKLILQLCIGNHDLFMRRRKADSLEVQQMKAQAREEKARKQMERQRLAREKQMREEAERTRDELERRLLQMKEEATMANEALMRSEETADLLAEKAQITEEEAKLLAQKAAEAEQEMQRIKATAIRTEEEKRLMEQKVLEAEVLALKMAEESERRAKEADQLKQDLQEAREAERRAKQKLLEIATKPTYPPMNPIPAPLPPDIPSFNLIGDSLSFDFKDTDMKRLSMEIEKEKVEYMEKSKHLQEQLNELKTEIEALKLKERETALDILHNENSDRGGSSKHNTIKKPQAQGRRPICI

SEQ ID NO: 12494 - DNA, 5925 bp, Homo sapiens
ggagtgaggacggtgacagccacgcgcgcgcgtacgcgcccgatgcagcgcggccccgtgaccctagtcggccgctgagaggcgcgcggagtctgggccgctgccgtctaggggtcccgtcccgaggcgtccccggcatctccggcccgaatcccggagtgccgggtcgcgcctgcaccgaaggtcccggctcctgtgccctccctgcagccgtcagggcccgtcccccaactcccctttccgctcaggcagggtcctcgcggcccatgctggccgctggggacccgcgcagcccagaccgttcccgggccgggcagccggccaccatggtggccctgaggcctgtgcagcaactccaggggggctaaagggctcagagtgcaggccgtggggcgcgagggtcccgggcctgagccccgcgccatggccggggccatcgcttcccgcatgagcttcagctctctcaagaggaagcaacccaagacgttcaccgtgaggatcgtcaccatggacgccgagatggagttcaattgcgagatgaagtggaaagggaaggacctctttgatttggtgtgccggactctggggctccgagaaacctggttctttggactgcagtacacaatcaaggacacagtggcctggctcaaaatggacaagaaggtaaagaagcagattttagatgaaaagatctactgccctcctgaggcttctgtgctcctggcttcttacgccgtccaggccaagtatggtgactacgaccccagtgttcacaagcggggatttttggcccaagaggaattgcttccaaaaagggtaataaatctgtatcagatgactccggaaatgtgggaggagagaattactgcttggtacgcagagcaccgaggccgagccagggatgaagctgaaatggaatatctgaagatagctcaggacctggagatgtacggtgtgaactactttgcaatccggaataaaaagggcacagagctgctgcttggagtggatgccctggggcttcacatttatgaccctgagaacagactgacccccaagatctccttcccgtggaatgaaatccgaaacatctcgtacagtgacaaggagtttactattaaaccactggataagaaaattgatgtcttcaagtttaactcctcaaagcttcgtgttaataagctgattctccagctatgtatcgggaaccatgatctatttatgaggagaaggaaagccgattctttggaagttcagcagatgaaagcccaggccagggaggagaaggctagaaagcagatggagcggcagcgcctcgctcgagagaagcagatgagggaggaggctgaacgcacgagggatgagttggagaggaggctgctgcagatgaaagaagaagcaacaatggccaacgaagcactgatgcggtctgaggagacagctgacctgttggctgaaaaggcccagatcaccgaggaggaggcaaaacttctggcccagaaggccgcagaggctgagcaggaaatgcagcgcatcaaggccacagcgattcgcacggaggaggagaagcgcctgatggagcagaaggtgctggaagccgaggtgctggcactgaagatggctgaggagtcagagaggagggccaaagaggcagatcagctgaagcaggacctgcaggaagcacgcgaggcggagcgaagagccaagcagaagctcctggagattgccaccaagcccacgtacccgcccatgaacccaattccagcaccgttgcctcctgacataccaagcttcaacctcattggtgacagcctgtctttcgacttcaaagatactgacatgaagcggctttccatggagatagagaaagaaaaagtggaatacatggaaaagagcaagcatctgcaggagcagctcaatgaactcaagacagaaatcgaggccttgaaactgaaagagagggagacagctctggatattctgcacaatgagaactccgacaggggtggcagcagcaagcacaataccattaaaaagcctcaagcccaaggcagaagacctatctgcatttgagccctcaaactcaccttgcagagcgccaagtcccgagtggccttctttgaagagctctagcaggtgacccagccaccccaggacctgccacttctcctgctaccgggaccgcgggatggaccagatatcaagagagccatccatagggagctggctgggggtttccgtgggagctccagaactttccccagctgagtgaagagcccagcccctcttatgtgcaattgccttgaactacgaccctgtagagatttctctcatggcgttctagttctctgacctgagtctttgttttaagaagtatttgtcttcctttgtctaatgtgggattcctgactcccttcgtccaaggcaccggtgtgtgtgtgtcttgcactccagagctgacctccaccgcccagcctgggaagtcattgtagggagtgagacactgaagccctgagaagccagtgccatcatccccaccccgcccagggttccggaacattcattcccccaccggtgaggacctggcatgcagcgaagcagcccagcccggcggatcccaggccagcacgcctgccggcttctcatcgtcagggagcccgcccagagctcgtgacgagcaagtgctgggtccccgccaggcaccccgaggcggcgctctggctggcagctggtggggaataggcagggcagctgtggctggggagagactttaggcagaagctgtgatgcaggctgactgccagccgaggggctgggtagtgccgtgcgggagctgatggtacagggcactcgctgtccccctccggccaccctagaccagggtccgagaggcaggcaggagccactcatgtcttccccattgcccgacgcccatagacgctccttcctgtgtggggctggggtactccctggtcgtactgcagtcagcacccgtaacccggctatgaccagggatctgtaagccctgtggctccacaggtgctgcttctcactggcccagactctgagctccaccggcccagtctgcacggcccatctgcttcaccttccctcccagccacgtgccagtggccacagcccacttcccaacccactgttgtacccaggcctcactttgctgttgcccttgtccctcttcgggccctgaattttctgttccctgggggccagccagggccctttgtgcccctcccagcacaggcctgatgcaggtgtccactcacaggtggcgctcacctaggctgtcacaggacccacctccatgccaggcaacagagggccacagaaccacccccacggctcactccttggtctggggccaccttcttgccctttctttttttttttttttttttttttccgagatggagtctctctctgtcacccaggtgggagtgtggtggcacaatctcggctcactgcaacctccacctcctgagttcaagcaattctcctgcctcagcctcccaagtagctgggactacaggcatgcaccaccacacttggccaatgttctgtatttttaatagggacggggttttgccatgttagctaggctggtctcaaactcacacctgggattacaggcatgagccactgcacccagccccttcttgccctttcttttctccatggctgatgctgctgtggccagccagggcccttgagatccttccagtttggctgttatgcaaagcaggtgatttgtcttaatcagataaaagatagaggctatgggggcctcaagatttttggagagcagaggtggtctctggcaattccatctggttttgagaaacttagcagctcacagagcacagagatcctgccttcttcctactatcaggctgacctaatggggttgggctgctcggcaactgcttgggtcaccttgccccaaggaaaccagccctgggtgccacccagccacttagggtctacagggtgggactccagacctagagcgtaagtatggatgttgtggccctgtgtcttcctagtgtgacccagccaggagcggaagcttcaggcgtttgtaaagtgaggtctggctctgcctcctccgttttttttttttttctgtttctgtttctgttttttttttgagatggagtctcgctctgtcgcccaggctggagtgcagtgtcacgatctcagctcactgcaacctccgcctcccaggtacaagagattctcctgcctcagcctcccgagtagctgggactacaggcgtgtgccaccatgcctggctaatttttgtatttttagtagagatggggtttcgccatgttagccagactggtctcgaactcctgacctcaggtgatcctcccaccccggcttcccaaagttctgggattataggcgtgagccaccatgcccggtctcttctcagtcttgaagcccatccctggatttccaccaggagttactttcctcctgacctgtaaatttgttctttaacaatggctgcaggtgggagcatatggtggtttataaaaacgctgtcgggctttgtttccttctttagctgccgtgtctacttctgaagtctgggaagtgccaagccacgcggcctcaagggagctggctggtgtttgagctgtggcagaagcacctggggctccagggagcaggctgggaactgcaggaccttgctcagccaggagcacttccccctccttgaggcaggaatactgaggtgcctccccacagatggagaaggtggagaggaggatgggcctcaggagcatctcaagccccagtagcaggagaaagaaagaaagagatgcctggttttcacagactggttcctgtggctgggatgactgcatccttttttttttttttttgagacggagtttttgcctttgtcgcccaggctggagtgcaatggcgtgatctcggctcaccgcaacctccgcctcccggattcaagcaattctcctgcctcagcctcccgagtagctgggattacaggcacgcacctccacgtccggctaattttgtatttttagtggagacggggtttctccatgtcggtcaggctggtctcgaactcccgacctcaggtgatctgcccacctcggcctcccaaagtgctgggattacaggcatgagccaccgcgcttggccagactgcgtcctttttaagcgaacattttagggcctgggagtttgtcaagtaaggaagtctcaagcccaaagagcagcgtcctgaccatggtggtttcattacgagcccttctgctggctctcaggcagaagccccacagcaccgggaccattcatgaggtcactgcccagctcatgatgtccgtgaggctgtccttttggccagtagccgtgtgcagctgtgtggcacagatggcttcgttcatcctgatcaaggccccacctcagccacagcagtccccccaacctgtgttgtccaccctattattcatgtacctgccaggccctgctagatagcaccccgtggcattacataacacttcatgagtggctgtgtcttgtaattttggggacaggtttctctctttccctctcttttttttgtcaaaagcccagagactgacaaccagctgcagtgtctaagtgttcctcactgacagggtggggcctcaccacccctggagggagcagcgttggcagggagacagcctggcccagtgaccctgggcccaagccagcccctccagggctttcagggaagcgccatccattttcaaagatgtcaaacgtcacttcttcctgtagggcccgagtcctgcctcctatcagggccagatcatagaaggctattttctattctggggaacgattataacttaaatgattgttttaataaaaattctaagctgg

SEQ ID NO: 12495 - protein, 549 aa, Homo sapiens; identical to SEQ ID NO: 2160

SEQ ID NO: 12496 - DNA, 5922 bp, Homo sapiens
ggagtgaggacggtgacagccacgcgcgcgcgtacgcgcccgatgcagcgcggccccgtgaccctagtcggccgctgagaggcgcgcggagtctgggccgctgccgtctaggggtcccgtcccgaggcgtccccggcatctccggcccgaatcccggagtgccgggtcgcgcctgcaccgaaggtcccggctcctgtgccctccctgcagccgtcagggcccgtcccccaactcccctttccgctcaggcagggtcctcgcggcccatgctggccgctggggacccgcgcagcccagaccgttcccgggccgggcagccggccaccatggtggccctgaggcctgtgcagcaactccaggggggctaaagggctcagagtgcaggccgtggggcgcgagggtcccgggcctgagccccgcgccatggccggggccatcgcttcccgcatgagcttcagctctctcaagaggaagcaacccaagacgttcaccgtgaggatcgtcaccatggacgccgagatggagttcaattgcgaggtactggatcatgatgtttcaaaggaagaaccagtcacctttcacttcttggccaaattttatcctgagaatgctgaagaggagctggttcaggagatcacacaacatttattcttcttacaggtaaagaagcagattttagatgaaaagatctactgccctcctgaggcttctgtgctcctggcttcttacgccgtccaggccaagtatggtgactacgaccccagtgttcacaagcggggatttttggcccaagaggaattgcttccaaaaagggtaataaatctgtatcagatgactccggaaatgtgggaggagagaattactgcttggtacgcagagcaccgaggccgagccagggatgaagctgaaatggaatatctgaagatagctcaggacctggagatgtacggtgtgaactactttgcaatccggaataaaaagggcacagagctgctgcttggagtggatgccctggggcttcacatttatgaccctgagaacagactgacccccaagatctccttcccgtggaatgaaatccgaaacatctcgtacagtgacaaggagtttactattaaaccactggataagaaaattgatgtcttcaagtttaactcctcaaagcttcgtgttaataagctgattctccagctatgtatcgggaaccatgatctatttatgaggagaaggaaagccgattctttggaagttcagcagatgaaagcccaggccagggaggagaaggctagaaagcagatggagcggcagcgcctcgctcgagagaagcagatgagggaggaggctgaacgcacgagggatgagttggagaggaggctgctgcagatgaaagaagaagcaacaatggccaacgaagcactgatgcggtctgaggagacagctgacctgttggctgaaaaggcccagatcaccgaggaggaggcaaaacttctggcccagaaggccgcagaggctgagcaggaaatgcagcgcatcaaggccacagcgattcgcacggaggaggagaagcgcctgatggagcagaaggtgctggaagccgaggtgctggcactgaagatggctgaggagtcagagaggagggccaaagaggcagatcagctgaagcaggacctgcaggaagcacgcgaggcggagcgaagagccaagcagaagctcctggagattgccaccaagcccacgtacccgcccatgaacccaattccagcaccgttgcctcctgacataccaagcttcaacctcattggtgacagcctgtctttcgacttcaaagatactgacatgaagcggctttccatggagatagagaaagaaaaagtggaatacatggaaaagagcaagcatctgcaggagcagctcaatgaactcaagacagaaatcgaggccttgaaactgaaagagagggagacagctctggatattctgcacaatgagaactccgacaggggtggcagcagcaagcacaataccattaaaaagcctcaagcccaaggcagaagacctatctgcatttgagccctcaaactcaccttgcagagcgccaagtcccgagtggccttctttgaagagctctagcaggtgacccagccaccccaggacctgccacttctcctgctaccgggaccgcgggatggaccagatatcaagagagccatccatagggagctggctgggggtttccgtgggagctccagaactttccccagctgagtgaagagcccagcccctcttatgtgcaattgccttgaactacgaccctgtagagatttctctcatggcgttctagttctctgacctgagtctttgttttaagaagtatttgtcttcctttgtctaatgtgggattcctgactcccttcgtccaaggcaccggtgtgtgtgtgtcttgcactccagagctgacctccaccgcccagcctgggaagtcattgtagggagtgagacactgaagccctgagaagccagtgccatcatccccaccccgcccagggttccggaacattcattcccccaccggtgaggacctggcatgcagcgaagcagcccagcccggcggatcccaggccagcacgcctgccggcttctcatcgtcagggagcccgcccagagctcgtgacgagcaagtgctgggtccccgccaggcaccccgaggcggcgctctggctggcagctggtggggaataggcagggcagctgtggctggggagagactttaggcagaagctgtgatgcaggctgactgccagccgaggggctgggtagtgccgtgcgggagctgatggtacagggcactcgctgtccccctccggccaccctagaccagggtccgagaggcaggcaggagccactcatgtcttccccattgcccgacgcccatagacgctccttcctgtgtggggctggggtactccctggtcgtactgcagtcagcacccgtaacccggctatgaccagggatctgtaagccctgtggctccacaggtgctgcttctcactggcccagactctgagctccaccggcccagtctgcacggcccatctgcttcaccttccctcccagccacgtgccagtggccacagcccacttcccaacccactgttgtacccaggcctcactttgctgttgcccttgtccctcttcgggccctgaattttctgttccctgggggccagccagggccctttgtgcccctcccagcacaggcctgatgcaggtgtccactcacaggtggcgctcacctaggctgtcacaggacccacctccatgccaggcaacagagggccacagaaccacccccacggctcactccttggtctggggccaccttcttgccctttctttttttttttttttttttttttccgagatggagtctctctctgtcacccaggtgggagtgtggtggcacaatctcggctcactgcaacctccacctcctgagttcaagcaattctcctgcctcagcctcccaagtagctgggactacaggcatgcaccaccacacttggccaatgttctgtatttttaatagggacggggttttgccatgttagctaggctggtctcaaactcacacctgggattacaggcatgagccactgcacccagccccttcttgccctttcttttctccatggctgatgctgctgtggccagccagggcccttgagatccttccagtttggctgttatgcaaagcaggtgatttgtcttaatcagataaaagatagaggctatgggggcctcaagatttttggagagcagaggtggtctctggcaattccatctggttttgagaaacttagcagctcacagagcacagagatcctgccttcttcctactatcaggctgacctaatggggttgggctgctcggcaactgcttgggtcaccttgccccaaggaaaccagccctgggtgccacccagccacttagggtctacagggtgggactccagacctagagcgtaagtatggatgttgtggccctgtgtcttcctagtgtgacccagccaggagcggaagcttcaggcgtttgtaaagtgaggtctggctctgcctcctccgttttttttttttttctgtttctgtttctgttttttttttgagatggagtctcgctctgtcgcccaggctggagtgcagtgtcacgatctcagctcactgcaacctccgcctcccaggtacaagagattctcctgcctcagcctcccgagtagctgggactacaggcgtgtgccaccatgcctggctaatttttgtatttttagtagagatggggtttcgccatgttagccagactggtctcgaactcctgacctcaggtgatcctcccaccccggcttcccaaagttctgggattataggcgtgagccaccatgcccggtctcttctcagtcttgaagcccatccctggatttccaccaggagttactttcctcctgacctgtaaatttgttctttaacaatggctgcaggtgggagcatatggtggtttataaaaacgctgtcgggctttgtttccttctttagctgccgtgtctacttctgaagtctgggaagtgccaagccacgcggcctcaagggagctggctggtgtttgagctgtggcagaagcacctggggctccagggagcaggctgggaactgcaggaccttgctcagccaggagcacttccccctccttgaggcaggaatactgaggtgcctccccacagatggagaaggtggagaggaggatgggcctcaggagcatctcaagccccagtagcaggagaaagaaagaaagagatgcctggttttcacagactggttcctgtggctgggatgactgcatccttttttttttttttttgagacggagtttttgcctttgtcgcccaggctggagtgcaatggcgtgatctcggctcaccgcaacctccgcctcccggattcaagcaattctcctgcctcagcctcccgagtagctgggattacaggcacgcacctccacgtccggctaattttgtatttttagtggagacggggtttctccatgtcggtcaggctggtctcgaactcccgacctcaggtgatctgcccacctcggcctcccaaagtgctgggattacaggcatgagccaccgcgcttggccagactgcgtcctttttaagcgaacattttagggcctgggagtttgtcaagtaaggaagtctcaagcccaaagagcagcgtcctgaccatggtggtttcattacgagcccttctgctggctctcaggcagaagccccacagcaccgggaccattcatgaggtcactgcccagctcatgatgtccgtgaggctgtccttttggccagtagccgtgtgcagctgtgtggcacagatggcttcgttcatcctgatcaaggccccacctcagccacagcagtccccccaacctgtgttgtccaccctattattcatgtacctgccaggccctgctagatagcaccccgtggcattacataacacttcatgagtggctgtgtcttgtaattttggggacaggtttctctctttccctctcttttttttgtcaaaagcccagagactgacaaccagctgcagtgtctaagtgttcctcactgacagggtggggcctcaccacccctggagggagcagcgttggcagggagacagcctggcccagtgaccctgggcccaagccagcccctccagggctttcagggaagcgccatccattttcaaagatgtcaaacgtcacttcttcctgtagggcccgagtcctgcctcctatcagggccagatcatagaaggctattttctattctggggaacgattataacttaaatgattgttttaataaaaattctaagctgg

SEQ ID NO: 12497 - protein, 548 aa, Homo sapiens; identical to SEQ ID NO: 2158

SEQ ID NO: 12498 - DNA, 5056 bp, Homo sapiens
ggagtgaggacggtgacagccacgcgcgcgcgtacgcgcccgatgcagcgcggccccgtgaccctagtcggccgctgagaggcgcgcggagtctgggccgctgccgtctaggggtcccgtcccgaggcgtccccggcatctccggcccgaatcccggagtgccgggtcgcgcctgcaccgaaggtcccggctcctgtgccctccctgcagccgtcagggcccgtcccccaactcccctttccgctcaggcagggtcctcgcggcccatgctggccgctggggacccgcgcagcccagaccgttcccgggccgggcagccggccaccatggtggccctgaggcctgtgcagcaactccaggggggctaaagggctcagagtgcaggccgtggggcgcgagggtcccgggcctgagccccgcgccatggccggggccatcgcttcccgcatgagcttcagctctctcaagaggaagcaacccaagacgttcaccgtgaggatcgtcaccatggacgccgagatggagttcaattgcgagatgaagtggaaagggaaggacctctttgatttggtgtgccggactctggggctccgagaaacctggttctttggactgcagtacacaatcaaggacacagtggcctggctcaaaatggacaagaaggtactggatcatgatgtttcaaaggaagaaccagtcacctttcacttcttggccaaattttatcctgagaatgctgaagaggagctggttcaggagatcacacaacatttattcttcttacaggtaaagaagcagattttagatgaaaagatctactgccctcctgaggcttctgtgctcctggcttcttacgccgtccaggccaagtatggtgactacgaccccagtgttcacaagcggggatttttggcccaagaggaattgcttccaaaaagggtaataaatctgtatcagatgactccggaaatgtgggaggagagaattactgcttggtacgcagagcaccgaggccgagccagggatgaagctgaaatggaatatctgaagatagctcaggacctggagatgtacggtgtgaactactttgcaatccggaataaaaagggcacagagctgctgcttggagtggatgccctggggcttcacatttatgaccctgagaacagactgacccccaagatcggctttccatggagatagagaaagaaaactcaccttgcagagcgccaagtcccgagtggccttctttgaagagctctagcaggtgacccagccaccccaggacctgccacttctcctgctaccgggaccgcgggatggaccagatatcaagagagccatccatagggagctggctgggggtttccgtgggagctccagaactttccccagctgagtgaagagcccagcccctcttatgtgcaattgccttgaactacgaccctgtagagatttctctcatggcgttctagttctctgacctgagtctttgttttaagaagtatttgtcttcctttgtctaatgtgggattcctgactcccttcgtccaaggcaccggtgtgtgtgtgtcttgcactccagagctgacctccaccgcccagcctgggaagtcattgtagggagtgagacactgaagccctgagaagccagtgccatcatccccaccccgcccagggttccggaacattcattcccccaccggtgaggacctggcatgcagcgaagcagcccagcccggcggatcccaggccagcacgcctgccggcttctcatcgtcagggagcccgcccagagctcgtgacgagcaagtgctgggtccccgccaggcaccccgaggcggcgctctggctggcagctggtggggaataggcagggcagctgtggctggggagagactttaggcagaagctgtgatgcaggctgactgccagccgaggggctgggtagtgccgtgcgggagctgatggtacagggcactcgctgtccccctccggccaccctagaccagggtccgagaggcaggcaggagccactcatgtcttccccattgcccgacgcccatagacgctccttcctgtgtggggctggggtactccctggtcgtactgcagtcagcacccgtaacccggctatgaccagggatctgtaagccctgtggctccacaggtgctgcttctcactggcccagactctgagctccaccggcccagtctgcacggcccatctgcttcaccttccctcccagccacgtgccagtggccacagcccacttcccaacccactgttgtacccaggcctcactttgctgttgcccttgtccctcttcgggccctgaattttctgttccctgggggccagccagggccctttgtgcccctcccagcacaggcctgatgcaggtgtccactcacaggtggcgctcacctaggctgtcacaggacccacctccatgccaggcaacagagggccacagaaccacccccacggctcactccttggtctggggccaccttcttgccctttctttttttttttttttttttttttccgagatggagtctctctctgtcacccaggtgggagtgtggtggcacaatctcggctcactgcaacctccacctcctgagttcaagcaattctcctgcctcagcctcccaagtagctgggactacaggcatgcaccaccacacttggccaatgttctgtatttttaatagggacggggttttgccatgttagctaggctggtctcaaactcacacctgggattacaggcatgagccactgcacccagccccttcttgccctttcttttctccatggctgatgctgctgtggccagccagggcccttgagatccttccagtttggctgttatgcaaagcaggtgatttgtcttaatcagataaaagatagaggctatgggggcctcaagatttttggagagcagaggtggtctctggcaattccatctggttttgagaaacttagcagctcacagagcacagagatcctgccttcttcctactatcaggctgacctaatggggttgggctgctcggcaactgcttgggtcaccttgccccaaggaaaccagccctgggtgccacccagccacttagggtctacagggtgggactccagacctagagcgtaagtatggatgttgtggccctgtgtcttcctagtgtgacccagccaggagcggaagcttcaggcgtttgtaaagtgaggtctggctctgcctcctccgttttttttttttttctgtttctgtttctgttttttttttgagatggagtctcgctctgtcgcccaggctggagtgcagtgtcacgatctcagctcactgcaacctccgcctcccaggtacaagagattctcctgcctcagcctcccgagtagctgggactacaggcgtgtgccaccatgcctggctaatttttgtatttttagtagagatggggtttcgccatgttagccagactggtctcgaactcctgacctcaggtgatcctcccaccccggcttcccaaagttctgggattataggcgtgagccaccatgcccggtctcttctcagtcttgaagcccatccctggatttccaccaggagttactttcctcctgacctgtaaatttgttctttaacaatggctgcaggtgggagcatatggtggtttataaaaacgctgtcgggctttgtttccttctttagctgccgtgtctacttctgaagtctgggaagtgccaagccacgcggcctcaagggagctggctggtgtttgagctgtggcagaagcacctggggctccagggagcaggctgggaactgcaggaccttgctcagccaggagcacttccccctccttgaggcaggaatactgaggtgcctccccacagatggagaaggtggagaggaggatgggcctcaggagcatctcaagccccagtagcaggagaaagaaagaaagagatgcctggttttcacagactggttcctgtggctgggatgactgcatccttttttttttttttttgagacggagtttttgcctttgtcgcccaggctggagtgcaatggcgtgatctcggctcaccgcaacctccgcctcccggattcaagcaattctcctgcctcagcctcccgagtagctgggattacaggcacgcacctccacgtccggctaattttgtatttttagtggagacggggtttctccatgtcggtcaggctggtctcgaactcccgacctcaggtgatctgcccacctcggcctcccaaagtgctgggattacaggcatgagccaccgcgcttggccagactgcgtcctttttaagcgaacattttagggcctgggagtttgtcaagtaaggaagtctcaagcccaaagagcagcgtcctgaccatggtggtttcattacgagcccttctgctggctctcaggcagaagccccacagcaccgggaccattcatgaggtcactgcccagctcatgatgtccgtgaggctgtccttttggccagtagccgtgtgcagctgtgtggcacagatggcttcgttcatcctgatcaaggccccacctcagccacagcagtccccccaacctgtgttgtccaccctattattcatgtacctgccaggccctgctagatagcaccccgtggcattacataacacttcatgagtggctgtgtcttgtaattttggggacaggtttctctctttccctctcttttttttgtcaaaagcccagagactgacaaccagctgcagtgtctaagtgttcctcactgacagggtggggcctcaccacccctggagggagcagcgttggcagggagacagcctggcccagtgaccctgggcccaagccagcccctccagggctttcagggaagcgccatccattttcaaagatgtcaaacgtcacttcttcctgtagggcccgagtcctgcctcctatcagggccagatcatagaaggctattttctattctggggaacgattataacttaaatgattgttttaataaaaattctaagctgg

SEQ ID NO: 12499 - protein, 259 aa, Homo sapiens
MAGAIASRMSFSSLKRKQPKTFTVRIVTMDAEMEFNCEMKWKGKDLFDLVCRTLGLRETWFFGLQYTIKDTVAWLKMDKKVLDHDVSKEEPVTFHFLAKFYPENAEEELVQEITQHLFFLQVKKQILDEKIYCPPEASVLLASYAVQAKYGDYDPSVHKRGFLAQEELLPKRVINLYQMTPEMWEERITAWYAEHRGRARDEAEMEYLKIAQDLEMYGVNYFAIRNKKGTELLLGVDALGLHIYDPENRLTPKIGFPWR

SEQ ID NO: 12500 - DNA, 4713 bp, Homo sapiens
ggagtgaggacggtgacagccacgcgcgcgcgtacgcgcccgatgcagcgcggccccgtgaccctagtcggccgctgagaggcgcgcggagtctgggccgctgccgtctaggggtcccgtcccgaggcgtccccggcatctccggcccgaatcccggagtgccgggtcgcgcctgcaccgaaggtcccggctcctgtgccctccctgcagccgtcagggcccgtcccccaactcccctttccgctcaggcagggtcctcgcggcccatgctggccgctggggacccgcgcagcccagaccgttcccgggccgggcagccggccaccatggtggccctgaggcctgtgcagcaactccaggggggctaaagggctcagagtgcaggccgtggggcgcgagggtcccgggcctgagccccgcgccatggccggggccatcgcttcccgcatgagcttcagctctctcaagaggaagcaacccaagacgttcaccgtgaggatcgtcaccatggacgccgagatggagttcaattgcgagatgaagtggaaagggaaggacctctttgatttggtgtgccggactctggggctccgagaaacctggttctttggactgcagtacacaatcaaggacacagtggcctggctcaaaatggacaagaaggtactggatcatgatgtttcaaaggaagaaccagtcacctttcacttcttggccaaattttatcctgagaatgctgaagaggagctggttcaggagatcacacaacatttattcttcttacaggtaaagaagcagattttagatgaaaagatctactgccctcctgaggcttctgtgctcctggcttcttacgccgtccaggccaagctcaccttgcagagcgccaagtcccgagtggccttctttgaagagctctagcaggtgacccagccaccccaggacctgccacttctcctgctaccgggaccgcgggatggaccagatatcaagagagccatccatagggagctggctgggggtttccgtgggagctccagaactttccccagctgagtgaagagcccagcccctcttatgtgcaattgccttgaactacgaccctgtagagatttctctcatggcgttctagttctctgacctgagtctttgttttaagaagtatttgtcttcctttgtctaatgtgggattcctgactcccttcgtccaaggcaccggtgtgtgtgtgtcttgcactccagagctgacctccaccgcccagcctgggaagtcattgtagggagtgagacactgaagccctgagaagccagtgccatcatccccaccccgcccagggttccggaacattcattcccccaccggtgaggacctggcatgcagcgaagcagcccagcccggcggatcccaggccagcacgcctgccggcttctcatcgtcagggagcccgcccagagctcgtgacgagcaagtgctgggtccccgccaggcaccccgaggcggcgctctggctggcagctggtggggaataggcagggcagctgtggctggggagagactttaggcagaagctgtgatgcaggctgactgccagccgaggggctgggtagtgccgtgcgggagctgatggtacagggcactcgctgtccccctccggccaccctagaccagggtccgagaggcaggcaggagccactcatgtcttccccattgcccgacgcccatagacgctccttcctgtgtggggctggggtactccctggtcgtactgcagtcagcacccgtaacccggctatgaccagggatctgtaagccctgtggctccacaggtgctgcttctcactggcccagactctgagctccaccggcccagtctgcacggcccatctgcttcaccttccctcccagccacgtgccagtggccacagcccacttcccaacccactgttgtacccaggcctcactttgctgttgcccttgtccctcttcgggccctgaattttctgttccctgggggccagccagggccctttgtgcccctcccagcacaggcctgatgcaggtgtccactcacaggtggcgctcacctaggctgtcacaggacccacctccatgccaggcaacagagggccacagaaccacccccacggctcactccttggtctggggccaccttcttgccctttctttttttttttttttttttttttccgagatggagtctctctctgtcacccaggtgggagtgtggtggcacaatctcggctcactgcaacctccacctcctgagttcaagcaattctcctgcctcagcctcccaagtagctgggactacaggcatgcaccaccacacttggccaatgttctgtatttttaatagggacggggttttgccatgttagctaggctggtctcaaactcacacctgggattacaggcatgagccactgcacccagccccttcttgccctttcttttctccatggctgatgctgctgtggccagccagggcccttgagatccttccagtttggctgttatgcaaagcaggtgatttgtcttaatcagataaaagatagaggctatgggggcctcaagatttttggagagcagaggtggtctctggcaattccatctggttttgagaaacttagcagctcacagagcacagagatcctgccttcttcctactatcaggctgacctaatggggttgggctgctcggcaactgcttgggtcaccttgccccaaggaaaccagccctgggtgccacccagccacttagggtctacagggtgggactccagacctagagcgtaagtatggatgttgtggccctgtgtcttcctagtgtgacccagccaggagcggaagcttcaggcgtttgtaaagtgaggtctggctctgcctcctccgttttttttttttttctgtttctgtttctgttttttttttgagatggagtctcgctctgtcgcccaggctggagtgcagtgtcacgatctcagctcactgcaacctccgcctcccaggtacaagagattctcctgcctcagcctcccgagtagctgggactacaggcgtgtgccaccatgcctggctaatttttgtatttttagtagagatggggtttcgccatgttagccagactggtctcgaactcctgacctcaggtgatcctcccaccccggcttcccaaagttctgggattataggcgtgagccaccatgcccggtctcttctcagtcttgaagcccatccctggatttccaccaggagttactttcctcctgacctgtaaatttgttctttaacaatggctgcaggtgggagcatatggtggtttataaaaacgctgtcgggctttgtttccttctttagctgccgtgtctacttctgaagtctgggaagtgccaagccacgcggcctcaagggagctggctggtgtttgagctgtggcagaagcacctggggctccagggagcaggctgggaactgcaggaccttgctcagccaggagcacttccccctccttgaggcaggaatactgaggtgcctccccacagatggagaaggtggagaggaggatgggcctcaggagcatctcaagccccagtagcaggagaaagaaagaaagagatgcctggttttcacagactggttcctgtggctgggatgactgcatccttttttttttttttttgagacggagtttttgcctttgtcgcccaggctggagtgcaatggcgtgatctcggctcaccgcaacctccgcctcccggattcaagcaattctcctgcctcagcctcccgagtagctgggattacaggcacgcacctccacgtccggctaattttgtatttttagtggagacggggtttctccatgtcggtcaggctggtctcgaactcccgacctcaggtgatctgcccacctcggcctcccaaagtgctgggattacaggcatgagccaccgcgcttggccagactgcgtcctttttaagcgaacattttagggcctgggagtttgtcaagtaaggaagtctcaagcccaaagagcagcgtcctgaccatggtggtttcattacgagcccttctgctggctctcaggcagaagccccacagcaccgggaccattcatgaggtcactgcccagctcatgatgtccgtgaggctgtccttttggccagtagccgtgtgcagctgtgtggcacagatggcttcgttcatcctgatcaaggccccacctcagccacagcagtccccccaacctgtgttgtccaccctattattcatgtacctgccaggccctgctagatagcaccccgtggcattacataacacttcatgagtggctgtgtcttgtaattttggggacaggtttctctctttccctctcttttttttgtcaaaagcccagagactgacaaccagctgcagtgtctaagtgttcctcactgacagggtggggcctcaccacccctggagggagcagcgttggcagggagacagcctggcccagtgaccctgggcccaagccagcccctccagggctttcagggaagcgccatccattttcaaagatgtcaaacgtcacttcttcctgtagggcccgagtcctgcctcctatcagggccagatcatagaaggctattttctattctggggaacgattataacttaaatgattgttttaataaaaattctaagctgg

SEQ ID NO: 12501 - protein, 165 aa, Homo sapiens; identical to SEQ ID NO: 2168

SEQ ID NO: 12502 - DNA, 2454 bp, Homo sapiens
ggacggtgacagccacgcgcgcgcgtacgcgcccgatgcagcgcggccccgtgaccctagtcggccgctgagaggcgcgcggagtctgggccgctgccgtctaggggtcccgtcccgaggcgtccccggcatctccggcccgaatcccggagtgccgggtcgcgcctgcaccgaaggtcccggctcctgtgccctccctgcagccgtcagggcccgtcccccaactcccctttccgctcaggcagggtcctcgcggcccatgctggccgctggggacccgcgcagcccagaccgttcccgggccgggcagccggccaccatggtggccctgaggcctgtgcagcaactccaggggggctaaagggctcagagtgcaggccgtggggcgcgagggtcccgggcctgagccccgcgccatggccggggccatcgcttcccgcatgagcttcagctctctcaagaggaagcaacccaagacgttcaccgtgaggatcgtcaccatggacgccgagatggagttcaattgcgagatgaagtggaaagggaaggacctctttgatttggtgtgccggactctggggctccgagaaacctggttctttggactgcagtacacaatcaaggacacagtggcctggctcaaaatggacaagaaggtactggatcatgatgtttcaaaggaagaaccagtcacctttcacttcttggccaaattttatcctgagaatgctgaagaggagctggttcaggagatcacacaacatttattcttcttacaggtaaagaagcagattttagatgaaaagatctactgccctcctgaggcttctgtgctcctggcttcttacgccgtccaggccaagtatggtgactacgaccccagtgttcacaagcggggatttttggcccaagaggaattgcttccaaaaagggtaataaatctgtatcagatgactccggaaatgtgggaggagagaattactgcttggtacgcagagcaccgaggccgagccagggatgaagctgaaatggaatatctgaagatagctcaggacctggagatgtacggtgtgaactactttgcaatccggaataaaaagggcacagagctgctgcttggagtggatgccctggggcttcacatttatgaccctgagaacagactgacccccaagatctccttcccgtggaatgaaatccgaaacatctcgtacagtgacaaggagtttactattaaaccactggataagaaaattgatgtcttcaagtttaactcctcaaagcttcgtgttaataagctgattctccagctatgtatcgggaaccatgatctatttatgaggagaaggaaagccgattctttggaagttcagcagatgaaagcccaggccagggaggagaaggctagaaagcagatggagcggcagcgcctcgctcgagagaagcagatgagggaggaggctgaacgcacgagggatgagttggagaggaggctgctgcagatgaaagaagaagcaacaatggccaacgaagcactgatgcggtctgaggagacagctgacctgttggctgaaaaggcccagatcaccgaggaggaggcaaaacttctggcccagaaggccgcagaggctgagcaggaaatgcagcgcatcaaggccacagcgattcgcacggaggaggagaagcgcctgatggagcagaaggtgctggaagccgaggtgctggcactgaagatggctgaggagtcagagaggagggccaaagaggcagatcagctgaagcaggacctgcaggaagcacgcgaggcggagcgaagagccaagcagaagctcctggagattgccaccaagcccacgtacccgcccatgaacccaattccagcaccgttgcctcctgacataccaagcttcaacctcattggtgacagcctgtctttcgacttcaaagatactgacatgaagcggctttccatggagatagagaaagaaaaagtggaatacatggaaaagagcaagcatctgcaggagcagctcaatgaactcaagacagaaatcgaggccttgaaactgaaagagagggagacagctctggatattctgcacaatgagaactccgacaggggtggcagcagcaagcacaataccattaaaaagcctcaagcccaaggcagaagacctatctgcatttgagccctcaaactcaccttgcagagcgccaagtcccgagtggccttctttgaagagctctagcaggtgacccagccaccccaggacctgccacttctcctgctaccgggaccgcgggatggaccagatatcaagagagccatccatagggagctggctgggggtttccgtgggagctccagaactttccccagctgagtgaagagcccagcccctcttatgtgcaattgccttgaactacgaccctgtagagatttctctcatggcg

SEQ ID NO: 12503 - protein, 590 aa, Homo sapiens; identical to SEQ ID NO: 2154

SEQ ID NO: 12504 - DNA, 2464 bp, Homo sapiens
ggacggtgacagccacgcgcgcgcgtacgcgcccgatgcagcgcggccccgtgaccctagtcggccgctgagaggcgcgcggagtctgggccgctgccgtctaggggtcccgtcccgaggcgtccccggcatctccggcccgaatcccggagtgccgggtcgcgcctgcaccgaaggtcccggctcctgtgccctccctgcagccgtcagggcccgtcccccaactcccctttccgctcaggcagggtcctcgcggcccatgctggccgctggggacccgcgcagcccagaccgttcccgggccgggcagccggccaccatggtggccctgaggcctgtgcagcaactccaggggggctaaagggctcagagtgcaggccgtggggcgcgagggtcccgggcctgagccccgcgccatggccggggccatcgcttcccgcatgagcttcagctctctcaagaggaagcaacccaagacgttcaccgtgaggatcgtcaccatggacgccgagatggagttcaattgcgagatgaagtggaaagggaaggacctctttgatttggtgtgccggactctggggctccgagaaacctggttctttggactgcagtacacaatcaaggacacagtggcctggctcaaaatggacaagaaggtactggatcatgatgtttcaaaggaagaaccagtcacctttcacttcttggccaaattttatcctgagaatgctgaagaggagctggttcaggagatcacacaacatttattcttcttacaggtaaagaagcagattttagatgaaaagatctactgccctcctgaggcttctgtgctcctggcttcttacgccgtccaggccaagtatggtgactacgaccccagtgttcacaagcggggatttttggcccaagaggaattgcttccaaaaagggtaataaatctgtatcagatgactccggaaatgtgggaggagagaattactgcttggtacgcagagcaccgaggccgagccagggatgaagctgaaatggaatatctgaagatagctcaggacctggagatgtacggtgtgaactactttgcaatccggaataaaaagggcacagagctgctgcttggagtggatgccctggggcttcacatttatgaccctgagaacagactgacccccaagatctccttcccgtggaatgaaatccgaaacatctcgtacagtgacaaggagtttactattaaaccactggataagaaaattgatgtcttcaagtttaactcctcaaagcttcgtgttaataagctgattctccagctatgtatcgggaaccatgatctatttatgaggagaaggaaagccgattctttggaagttcagcagatgaaagcccaggccagggaggagaaggctagaaagcagatggagcggcagcgcctcgctcgagagaagcagatgagggaggaggctgaacgcacgagggatgagttggagaggaggctgctgcagatgaaagaagaagcaacaatggccaacgaagcactgatgcggtctgaggagacagctgacctgttggctgaaaaggcccagatcaccgaggaggaggcaaaacttctggcccagaaggccgcagaggctgagcaggaaatgcagcgcatcaaggccacagcgattcgcacggaggaggagaagcgcctgatggagcagaaggtgctggaagccgaggtgctggcactgaagatggctgaggagtcagagaggagggccaaagaggcagatcagctgaagcaggacctgcaggaagcacgcgaggcggagcgaagagccaagcagaagctcctggagattgccaccaagcccacgtacccgcccatgaacccaattccagcaccgttgcctcctgacataccaagcttcaacctcattggtgacagcctgtctttcgacttcaaagatactgacatgaagcggctttccatggagatagagaaagaaaaagtggaatacatggaaaagagcaagcatctgcaggagcagctcaatgaactcaagacagaaatcgaggccttgaaactgaaagagagggagacagctctggatattctgcacaatgagaactccgacaggggtggcagcagcaagcacaataccattaaaaagctcaccttgcagagcgccaagtcccgagtggccttctttgaagagctctagcaggtgacccagccaccccaggacctgccacttctcctgctaccgggaccgcgggatggaccagatatcaagagagccatccatagggagctggctgggggtttccgtgggagctccagaactttccccagctgagtgaagagcccagcccctcttatgtgcaattgccttgaactacgaccctgtagagatttctctcatggcgttctagttctctgacctgagtctttgttttaagaagtatttgtcttcctttgtct

SEQ ID NO: 12505 - protein, 595 aa, Homo sapiens; identical to SEQ ID NO: 2152

SEQ ID NO: 12506 - DNA, 2509 bp, Homo sapiens
ggacggtgacagccacgcgcgcgcgtacgcgcccgatgcagcgcggccccgtgaccctagtcggccgctgagaggcgcgcggagtctgggccgctgccgtctaggggtcccgtcccgaggcgtccccggcatctccggcccgaatcccggagtgccgggtcgcgcctgcaccgaaggtcccggctcctgtgccctccctgcagccgtcagggcccgtcccccaactcccctttccgctcaggcagggtcctcgcggcccatgctggccgctggggacccgcgcagcccagaccgttcccgggccgggcagccggccaccatggtggccctgaggcctgtgcagcaactccaggggggctaaagggctcagagtgcaggccgtggggcgcgagggtcccgggcctgagccccgcgccatggccggggccatcgcttcccgcatgagcttcagctctctcaagaggaagcaacccaagacgttcaccgtgaggatcgtcaccatggacgccgagatggagttcaattgcgagatgaagtggaaagggaaggacctctttgatttggtgtgccggactctggggctccgagaaacctggttctttggactgcagtacacaatcaaggacacagtggcctggctcaaaatggacaagaaggtactggatcatgatgtttcaaaggaagaaccagtcacctttcacttcttggccaaattttatcctgagaatgctgaagaggagctggttcaggagatcacacaacatttattcttcttacaggtaaagaagcagattttagatgaaaagatctactgccctcctgaggcttctgtgctcctggcttcttacgccgtccaggccaagtatggtgactacgaccccagtgttcacaagcggggatttttggcccaagaggaattgcttccaaaaagggtaataaatctgtatcagatgactccggaaatgtgggaggagagaattactgcttggtacgcagagcaccgaggccgagccagggatgaagctgaaatggaatatctgaagatagctcaggacctggagatgtacggtgtgaactactttgcaatccggaataaaaagggcacagagctgctgcttggagtggatgccctggggcttcacatttatgaccctgagaacagactgacccccaagatctccttcccgtggaatgaaatccgaaacatctcgtacagtgacaaggagtttactattaaaccactggataagaaaattgatgtcttcaagtttaactcctcaaagcttcgtgttaataagctgattctccagctatgtatcgggaaccatgatctatttatgaggagaaggaaagccgattctttggaagttcagcagatgaaagcccaggccagggaggagaaggctagaaagcagatggagcggcagcgcctcgctcgagagaagcagatgagggaggaggctgaacgcacgagggatgagttggagaggaggctgctgcagatgaaagaagaagcaacaatggccaacgaagcactgatgcggtctgaggagacagctgacctgttggctgaaaaggcccagatcaccgaggaggaggcaaaacttctggcccagaaggccgcagaggctgagcaggaaatgcagcgcatcaaggccacagcgattcgcacggaggaggagaagcgcctgatggagcagaaggtgctggaagccgaggtgctggcactgaagatggctgaggagtcagagaggagggccaaagaggcagatcagctgaagcaggacctgcaggaagcacgcgaggcggagcgaagagccaagcagaagctcctggagattgccaccaagcccacgtacccgcccatgaacccaattccagcaccgttgcctcctgacataccaagcttcaacctcattggtgacagcctgtctttcgacttcaaagatactgacatgaagcggctttccatggagatagagaaagaaaaagtggaatacatggaaaagagcaagcatctgcaggagcagctcaatgaactcaagacagaaatcgaggccttgaaactgaaagagagggagacagctctggatattctgcacaatgagaactccgacaggggtggcagcagcaagcacaataccattaaaaagcctcaagcccaaggcagaagacctatctgcatttgagccctcaaactcaccttgcagagcgccaagtcccgagtggccttctttgaagagctctagcaggtgacccagccaccccaggacctgccacttctcctgctaccgggaccgcgggatggaccagatatcaagagagccatccatagggagctggctgggggtttccgtgggagctccagaactttccccagctgagtgaagagcccagcccctcttatgtgcaattgccttgaactacgaccctgtagagatttctctcatggcgttctagttctctgacctgagtctttgttttaagaagtatttgtcttcctttgtct

SEQ ID NO: 12507 - protein, 590 aa, Homo sapiens; identical to SEQ ID NO: 2154

SEQ ID NO: 12508 - DNA, 5048 bp, Homo sapiens
ggacggtgacagccacgcgcgcgcgtacgcgcccgatgcagcgcggccccgtgaccctagtcggccgctgagaggcgcgcggagtctgggccgctgccgtctaggggtcccgtcccgaggcgtccccggcatctccggcccgaatcccggagtgccgggtcgcgcctgcaccgaaggtcccggctcctgtgccctccctgcagccgtcagggcccgtcccccaactcccctttccgctcaggcagggtcctcgcggcccatgctggccgctggggacccgcgcagcccagaccgttcccgggccgggcagccggccaccatggtggccctgaggcctgtgcagcaactccaggggggctaaagggctcagagtgcaggccgtggggcgcgagggtcccgggcctgagccccgcgccatggccggggccatcgcttcccgcatgagcttcagctctctcaagaggaagcaacccaagacgttcaccgtgaggatcgtcaccatggacgccgagatggagttcaattgcgagatgaagtggaaagggaaggacctctttgatttggtgtgccggactctggggctccgagaaacctggttctttggactgcagtacacaatcaaggacacagtggcctggctcaaaatggacaagaaggtactggatcatgatgtttcaaaggaagaaccagtcacctttcacttcttggccaaattttatcctgagaatgctgaagaggagctggttcaggagatcacacaacatttattcttcttacaggtaaagaagcagattttagatgaaaagatctactgccctcctgaggcttctgtgctcctggcttcttacgccgtccaggccaagtatggtgactacgaccccagtgttcacaagcggggatttttggcccaagaggaattgcttccaaaaagggtaataaatctgtatcagatgactccggaaatgtgggaggagagaattactgcttggtacgcagagcaccgaggccgagccagggatgaagctgaaatggaatatctgaagatagctcaggacctggagatgtacggtgtgaactactttgcaatccggaataaaaagggcacagagctgctgcttggagtggatgccctggggcttcacatttatgaccctgagaacagactgacccccaagatctccttcccgtggaatgaaatccgaaacctcaccttgcagagcgccaagtcccgagtggccttctttgaagagctctagcaggtgacccagccaccccaggacctgccacttctcctgctaccgggaccgcgggatggaccagatatcaagagagccatccatagggagctggctgggggtttccgtgggagctccagaactttccccagctgagtgaagagcccagcccctcttatgtgcaattgccttgaactacgaccctgtagagatttctctcatggcgttctagttctctgacctgagtctttgttttaagaagtatttgtcttcctttgtctaatgtgggattcctgactcccttcgtccaaggcaccggtgtgtgtgtgtcttgcactccagagctgacctccaccgcccagcctgggaagtcattgtagggagtgagacactgaagccctgagaagccagtgccatcatccccaccccgcccagggttccggaacattcattcccccaccggtgaggacctggcatgcagcgaagcagcccagcccggcggatcccaggccagcacgcctgccggcttctcatcgtcagggagcccgcccagagctcgtgacgagcaagtgctgggtccccgccaggcaccccgaggcggcgctctggctggcagctggtggggaataggcagggcagctgtggctggggagagactttaggcagaagctgtgatgcaggctgactgccagccgaggggctgggtagtgccgtgcgggagctgatggtacagggcactcgctgtccccctccggccaccctagaccagggtccgagaggcaggcaggagccactcatgtcttccccattgcccgacgcccatagacgctccttcctgtgtggggctggggtactccctggtcgtactgcagtcagcacccgtaacccggctatgaccagggatctgtaagccctgtggctccacaggtgctgcttctcactggcccagactctgagctccaccggcccagtctgcacggcccatctgcttcaccttccctcccagccacgtgccagtggccacagcccacttcccaacccactgttgtacccaggcctcactttgctgttgcccttgtccctcttcgggccctgaattttctgttccctgggggccagccagggccctttgtgcccctcccagcacaggcctgatgcaggtgtccactcacaggtggcgctcacctaggctgtcacaggacccacctccatgccaggcaacagagggccacagaaccacccccacggctcactccttggtctggggccaccttcttgccctttctttttttttttttttttttttttccgagatggagtctctctctgtcacccaggtgggagtgtggtggcacaatctcggctcactgcaacctccacctcctgagttcaagcaattctcctgcctcagcctcccaagtagctgggactacaggcatgcaccaccacacttggccaatgttctgtatttttaatagggacggggttttgccatgttagctaggctggtctcaaactcacacctgggattacaggcatgagccactgcacccagccccttcttgccctttcttttctccatggctgatgctgctgtggccagccagggcccttgagatccttccagtttggctgttatgcaaagcaggtgatttgtcttaatcagataaaagatagaggctatgggggcctcaagatttttggagagcagaggtggtctctggcaattccatctggttttgagaaacttagcagctcacagagcacagagatcctgccttcttcctactatcaggctgacctaatggggttgggctgctcggcaactgcttgggtcaccttgccccaaggaaaccagccctgggtgccacccagccacttagggtctacagggtgggactccagacctagagcgtaagtatggatgttgtggccctgtgtcttcctagtgtgacccagccaggagcggaagcttcaggcgtttgtaaagtgaggtctggctctgcctcctccgttttttttttttttctgtttctgtttctgttttttttttgagatggagtctcgctctgtcgcccaggctggagtgcagtgtcacgatctcagctcactgcaacctccgcctcccaggtacaagagattctcctgcctcagcctcccgagtagctgggactacaggcgtgtgccaccatgcctggctaatttttgtatttttagtagagatggggtttcgccatgttagccagactggtctcgaactcctgacctcaggtgatcctcccaccccggcttcccaaagttctgggattataggcgtgagccaccatgcccggtctcttctcagtcttgaagcccatccctggatttccaccaggagttactttcctcctgacctgtaaatttgttctttaacaatggctgcaggtgggagcatatggtggtttataaaaacgctgtcgggctttgtttccttctttagctgccgtgtctacttctgaagtctgggaagtgccaagccacgcggcctcaagggagctggctggtgtttgagctgtggcagaagcacctggggctccagggagcaggctgggaactgcaggaccttgctcagccaggagcacttccccctccttgaggcaggaatactgaggtgcctccccacagatggagaaggtggagaggaggatgggcctcaggagcatctcaagccccagtagcaggagaaagaaagaaagagatgcctggttttcacagactggttcctgtggctgggatgactgcatccttttttttttttttttgagacggagtttttgcctttgtcgcccaggctggagtgcaatggcgtgatctcggctcaccgcaacctccgcctcccggattcaagcaattctcctgcctcagcctcccgagtagctgggattacaggcacgcacctccacgtccggctaattttgtatttttagtggagacggggtttctccatgtcggtcaggctggtctcgaactcccgacctcaggtgatctgcccacctcggcctcccaaagtgctgggattacaggcatgagccaccgcgcttggccagactgcgtcctttttaagcgaacattttagggcctgggagtttgtcaagtaaggaagtctcaagcccaaagagcagcgtcctgaccatggtggtttcattacgagcccttctgctggctctcaggcagaagccccacagcaccgggaccattcatgaggtcactgcccagctcatgatgtccgtgaggctgtccttttggccagtagccgtgtgcagctgtgtggcacagatggcttcgttcatcctgatcaaggccccacctcagccacagcagtccccccaacctgtgttgtccaccctattattcatgtacctgccaggccctgctagatagcaccccgtggcattacataacacttcatgagtggctgtgtcttgtaattttggggacaggtttctctctttccctctcttttttttgtcaaaagcccagagactgacaaccagctgcagtgtctaagtgttcctcactgacagggtggggcctcaccacccctggagggagcagcgttggcagggagacagcctggcccagtgaccctgggcccaagccagcccctccagggctttcagggaagcgccatccattttcaaagatgtcaaacgtcacttcttcctgtagggcccgagtcctgcctcctatcagggccagatcatagaaggctattttctattctggggaacgattataacttaaatgattgttttaataaaaattctaagctgg

SEQ ID NO: 12509 - protein, 279 aa, Homo sapiens
MAGAIASRMSFSSLKRKQPKTFTVRIVTMDAEMEFNCEMKWKGKDLFDLVCRTLGLRETWFFGLQYTIKDTVAWLKMDKKVLDHDVSKEEPVTFHFLAKFYPENAEEELVQEITQHLFFLQVKKQILDEKIYCPPEASVLLASYAVQAKYGDYDPSVHKRGFLAQEELLPKRVINLYQMTPEMWEERITAWYAEHRGRARDEAEMEYLKIAQDLEMYGVNYFAIRNKKGTELLLGVDALGLHIYDPENRLTPKISFPWNEIRNLTLQSAKSRVAFFEEL

SEQ ID NO: 12510 - DNA, 6013 bp, Homo sapiens
ggacggtgacagccacgcgcgcgcgtacgcgcccgatgcagcgcggccccgtgaccctagtcggccgctgagaggcgcgcggagtctgggccgctgccgtctaggggtcccgtcccgaggcgtccccggcatctccggcccgaatcccggagtgccgggtcgcgcctgcaccgaaggtcccggctcctgtgccctccctgcagccgtcagggcccgtcccccaactcccctttccgctcaggcagggtcctcgcggcccatgctggccgctggggacccgcgcagcccagaccgttcccgggccgggcagccggccaccatggtggccctgaggcctgtgcagcaactccaggggggctaaagggctcagagtgcaggccgtggggcgcgagggtcccgggcctgagccccgcgccatggccggggccatcgcttcccgcatgagcttcagctctctcaagaggaagcaacccaagacgttcaccgtgaggatcgtcaccatggacgccgagatggagttcaattgcgagatgaagtggaaagggaaggacctctttgatttggtgtgccggactctggggctccgagaaacctggttctttggactgcagtacacaatcaaggacacagtggcctggctcaaaatggacaagaaggtactggatcatgatgtttcaaaggaagaaccagtcacctttcacttcttggccaaattttatcctgagaatgctgaagaggagctggttcaggagatcacacaacatttattcttcttacaggtaaagaagcagattttagatgaaaagatctactgccctcctgaggcttctgtgctcctggcttcttacgccgtccaggccaagtatggtgactacgaccccagtgttcacaagcggggatttttggcccaagaggaattgcttccaaaaagggtaataaatctgtatcagatgactccggaaatgtgggaggagagaattactgcttggtacgcagagcaccgaggccgagccagggatgaagctgaaatggaatatctgaagatagctcaggacctggagatgtacggtgtgaactactttgcaatccggaataaaaagggcacagagctgctgcttggagtggatgccctggggcttcacatttatgaccctgagaacagactgacccccaagatctccttcccgtggaatgaaatccgaaacatctcgtacagtgacaaggagtttactattaaaccactggataagaaaattgatgtcttcaagtttaactcctcaaagcttcgtgttaataagctgattctccagctatgtatcgggaaccatgatctatttatgaggagaaggaaagccgattctttggaagttcagcagatgaaagcccaggccagggaggagaaggctagaaagcagatggagcggcagcgcctcgctcgagagaagcagatgagggaggaggctgaacgcacgagggatgagttggagaggaggctgctgcagatgaaagaagaagcaacaatggccaacgaagcactgatgcggtctgaggagacagctgacctgttggctgaaaaggcccagatcaccgaggaggaggcaaaacttctggcccagaaggccgcagaggctgagcaggaaatgcagcgcatcaaggccacagcgattcgcacggaggaggagaagcgcctgatggagcagaaggtgctggaagccgaggtgctggcactgaagatggctgaggagtcagagaggagggccaaagaggcagatcagctgaagcaggacctgcaggaagcacgcgaggcggagcgaagagccaagcagaagctcctggagattgccaccaagcccacgtacccgcccatgaacccaattccagcaccgttgcctcctgacataccaagcttcaacctcattggtgacagcctgtctttcgacttcaaagatactgacatgaagcggctttccatggagatagagaaagaaaaagtggaatacatggaaaagagcaagcatctgcaggagcagctcaatgaactcaagacagaaatcgaggccttgaaactgaaagagagggagacagctctggatattctgcacaatgagaactccgacaggggtggcagcagcaagcacaataccattaaaaagctcaccttgcagagcgccaagtcccgagtggccttctttgaagagctctagcaggtgacccagccaccccaggacctgccacttctcctgctaccgggaccgcgggatggaccagatatcaagagagccatccatagggagctggctgggggtttccgtgggagctccagaactttccccagctgagtgaagagcccagcccctcttatgtgcaattgccttgaactacgaccctgtagagatttctctcatggcgttctagttctctgacctgagtctttgttttaagaagtatttgtcttcctttgtctaatgtgggattcctgactcccttcgtccaaggcaccggtgtgtgtgtgtcttgcactccagagctgacctccaccgcccagcctgggaagtcattgtagggagtgagacactgaagccctgagaagccagtgccatcatccccaccccgcccagggttccggaacattcattcccccaccggtgaggacctggcatgcagcgaagcagcccagcccggcggatcccaggccagcacgcctgccggcttctcatcgtcagggagcccgcccagagctcgtgacgagcaagtgctgggtccccgccaggcaccccgaggcggcgctctggctggcagctggtggggaataggcagggcagctgtggctggggagagactttaggcagaagctgtgatgcaggctgactgccagccgaggggctgggtagtgccgtgcgggagctgatggtacagggcactcgctgtccccctccggccaccctagaccagggtccgagaggcaggcaggagccactcatgtcttccccattgcccgacgcccatagacgctccttcctgtgtggggctggggtactccctggtcgtactgcagtcagcacccgtaacccggctatgaccagggatctgtaagccctgtggctccacaggtgctgcttctcactggcccagactctgagctccaccggcccagtctgcacggcccatctgcttcaccttccctcccagccacgtgccagtggccacagcccacttcccaacccactgttgtacccaggcctcactttgctgttgcccttgtccctcttcgggccctgaattttctgttccctgggggccagccagggccctttgtgcccctcccagcacaggcctgatgcaggtgtccactcacaggtggcgctcacctaggctgtcacaggacccacctccatgccaggcaacagagggccacagaaccacccccacggctcactccttggtctggggccaccttcttgccctttctttttttttttttttttttttttccgagatggagtctctctctgtcacccaggtgggagtgtggtggcacaatctcggctcactgcaacctccacctcctgagttcaagcaattctcctgcctcagcctcccaagtagctgggactacaggcatgcaccaccacacttggccaatgttctgtatttttaatagggacggggttttgccatgttagctaggctggtctcaaactcacacctgggattacaggcatgagccactgcacccagccccttcttgccctttcttttctccatggctgatgctgctgtggccagccagggcccttgagatccttccagtttggctgttatgcaaagcaggtgatttgtcttaatcagataaaagatagaggctatgggggcctcaagatttttggagagcagaggtggtctctggcaattccatctggttttgagaaacttagcagctcacagagcacagagatcctgccttcttcctactatcaggctgacctaatggggttgggctgctcggcaactgcttgggtcaccttgccccaaggaaaccagccctgggtgccacccagccacttagggtctacagggtgggactccagacctagagcgtaagtatggatgttgtggccctgtgtcttcctagtgtgacccagccaggagcggaagcttcaggcgtttgtaaagtgaggtctggctctgcctcctccgttttttttttttttctgtttctgtttctgttttttttttgagatggagtctcgctctgtcgcccaggctggagtgcagtgtcacgatctcagctcactgcaacctccgcctcccaggtacaagagattctcctgcctcagcctcccgagtagctgggactacaggcgtgtgccaccatgcctggctaatttttgtatttttagtagagatggggtttcgccatgttagccagactggtctcgaactcctgacctcaggtgatcctcccaccccggcttcccaaagttctgggattataggcgtgagccaccatgcccggtctcttctcagtcttgaagcccatccctggatttccaccaggagttactttcctcctgacctgtaaatttgttctttaacaatggctgcaggtgggagcatatggtggtttataaaaacgctgtcgggctttgtttccttctttagctgccgtgtctacttctgaagtctgggaagtgccaagccacgcggcctcaagggagctggctggtgtttgagctgtggcagaagcacctggggctccagggagcaggctgggaactgcaggaccttgctcagccaggagcacttccccctccttgaggcaggaatactgaggtgcctccccacagatggagaaggtggagaggaggatgggcctcaggagcatctcaagccccagtagcaggagaaagaaagaaagagatgcctggttttcacagactggttcctgtggctgggatgactgcatccttttttttttttttttgagacggagtttttgcctttgtcgcccaggctggagtgcaatggcgtgatctcggctcaccgcaacctccgcctcccggattcaagcaattctcctgcctcagcctcccgagtagctgggattacaggcacgcacctccacgtccggctaattttgtatttttagtggagacggggtttctccatgtcggtcaggctggtctcgaactcccgacctcaggtgatctgcccacctcggcctcccaaagtgctgggattacaggcatgagccaccgcgcttggccagactgcgtcctttttaagcgaacattttagggcctgggagtttgtcaagtaaggaagtctcaagcccaaagagcagcgtcctgaccatggtggtttcattacgagcccttctgctggctctcaggcagaagccccacagcaccgggaccattcatgaggtcactgcccagctcatgatgtccgtgaggctgtccttttggccagtagccgtgtgcagctgtgtggcacagatggcttcgttcatcctgatcaaggccccacctcagccacagcagtccccccaacctgtgttgtccaccctattattcatgtacctgccaggccctgctagatagcaccccgtggcattacataacacttcatgagtggctgtgtcttgtaattttggggacaggtttctctctttccctctcttttttttgtcaaaagcccagagactgacaaccagctgcagtgtctaagtgttcctcactgacagggtggggcctcaccacccctggagggagcagcgttggcagggagacagcctggcccagtgaccctgggcccaagccagcccctccagggctttcagggaagcgccatccattttcaaagatgtcaaacgtcacttcttcctgtagggcccgagtcctgcctcctatcagggccagatcatagaaggctattttctattctggggaacgattataacttaaatgattgttttaataaaaattctaagctggaaaatacttgccttggg

SEQ ID NO: 12511 - protein, 595 aa, Homo sapiens; identical to SEQ ID NO: 2152

SEQ ID NO: 12512 - DNA, 5065 bp, Homo sapiens
ggacggtgacagccacgcgcgcgcgtacgcgcccgatgcagcgcggccccgtgaccctagtcggccgctgagaggcgcgcggagtctgggccgctgccgtctaggggtcccgtcccgaggcgtccccggcatctccggcccgaatcccggagtgccgggtcgcgcctgcaccgaaggtcccggctcctgtgccctccctgcagccgtcagggcccgtcccccaactcccctttccgctcaggcagggtcctcgcggcccatgctggccgctggggacccgcgcagcccagaccgttcccgggccgggcagccggccaccatggtggccctgaggcctgtgcagcaactccaggggggctaaagggctcagagtgcaggccgtggggcgcgagggtcccgggcctgagccccgcgccatggccggggccatcgcttcccgcatgagcttcagctctctcaagaggaagcaacccaagacgttcaccgtgaggatcgtcaccatggacgccgagatggagttcaattgcgagatgaagtggaaagggaaggacctctttgatttggtgtgccggactctggggctccgagaaacctggttctttggactgcagtacacaatcaaggacacagtggcctggctcaaaatggacaagaaggtactggatcatgatgtttcaaaggaagaaccagtcacctttcacttcttggccaaattttatcctgagaatgctgaagaggagctggttcaggagatcacacaacatttattcttcttacaggtaaagaagcagattttagatgaaaagatctactgccctcctgaggcttctgtgctcctggcttcttacgccgtccaggccaagtatggtgactacgaccccagtgttcacaagcggggatttttggcccaagaggaattgcttccaaaaagggtaataaatctgtatcagatgactccggaaatgtgggaggagagaattactgcttggtacgcagagcaccgaggccgagccagggatgaagctgaaatggaatatctgaagatagctcaggacctggagatgtacggtgtgaactactttgcaatccggaataaaaagggcacagagctgctgcttggagtggatgccctggggcttcacatttatgaccctgagaacagactgacccccaagatctccttcccgtggaatgaaatccgaaacctcaccttgcagagcgccaagtcccgagtggccttctttgaagagctctagcaggtgacccagccaccccaggacctgccacttctcctgctaccgggaccgcgggatggaccagatatcaagagagccatccatagggagctggctgggggtttccgtgggagctccagaactttccccagctgagtgaagagcccagcccctcttatgtgcaattgccttgaactacgaccctgtagagatttctctcatggcgttctagttctctgacctgagtctttgttttaagaagtatttgtcttcctttgtctaatgtgggattcctgactcccttcgtccaaggcaccggtgtgtgtgtgtcttgcactccagagctgacctccaccgcccagcctgggaagtcattgtagggagtgagacactgaagccctgagaagccagtgccatcatccccaccccgcccagggttccggaacattcattcccccaccggtgaggacctggcatgcagcgaagcagcccagcccggcggatcccaggccagcacgcctgccggcttctcatcgtcagggagcccgcccagagctcgtgacgagcaagtgctgggtccccgccaggcaccccgaggcggcgctctggctggcagctggtggggaataggcagggcagctgtggctggggagagactttaggcagaagctgtgatgcaggctgactgccagccgaggggctgggtagtgccgtgcgggagctgatggtacagggcactcgctgtccccctccggccaccctagaccagggtccgagaggcaggcaggagccactcatgtcttccccattgcccgacgcccatagacgctccttcctgtgtggggctggggtactccctggtcgtactgcagtcagcacccgtaacccggctatgaccagggatctgtaagccctgtggctccacaggtgctgcttctcactggcccagactctgagctccaccggcccagtctgcacggcccatctgcttcaccttccctcccagccacgtgccagtggccacagcccacttcccaacccactgttgtacccaggcctcactttgctgttgcccttgtccctcttcgggccctgaattttctgttccctgggggccagccagggccctttgtgcccctcccagcacaggcctgatgcaggtgtccactcacaggtggcgctcacctaggctgtcacaggacccacctccatgccaggcaacagagggccacagaaccacccccacggctcactccttggtctggggccaccttcttgccctttctttttttttttttttttttttttccgagatggagtctctctctgtcacccaggtgggagtgtggtggcacaatctcggctcactgcaacctccacctcctgagttcaagcaattctcctgcctcagcctcccaagtagctgggactacaggcatgcaccaccacacttggccaatgttctgtatttttaatagggacggggttttgccatgttagctaggctggtctcaaactcacacctgggattacaggcatgagccactgcacccagccccttcttgccctttcttttctccatggctgatgctgctgtggccagccagggcccttgagatccttccagtttggctgttatgcaaagcaggtgatttgtcttaatcagataaaagatagaggctatgggggcctcaagatttttggagagcagaggtggtctctggcaattccatctggttttgagaaacttagcagctcacagagcacagagatcctgccttcttcctactatcaggctgacctaatggggttgggctgctcggcaactgcttgggtcaccttgccccaaggaaaccagccctgggtgccacccagccacttagggtctacagggtgggactccagacctagagcgtaagtatggatgttgtggccctgtgtcttcctagtgtgacccagccaggagcggaagcttcaggcgtttgtaaagtgaggtctggctctgcctcctccgttttttttttttttctgtttctgtttctgttttttttttgagatggagtctcgctctgtcgcccaggctggagtgcagtgtcacgatctcagctcactgcaacctccgcctcccaggtacaagagattctcctgcctcagcctcccgagtagctgggactacaggcgtgtgccaccatgcctggctaatttttgtatttttagtagagatggggtttcgccatgttagccagactggtctcgaactcctgacctcaggtgatcctcccaccccggcttcccaaagttctgggattataggcgtgagccaccatgcccggtctcttctcagtcttgaagcccatccctggatttccaccaggagttactttcctcctgacctgtaaatttgttctttaacaatggctgcaggtgggagcatatggtggtttataaaaacgctgtcgggctttgtttccttctttagctgccgtgtctacttctgaagtctgggaagtgccaagccacgcggcctcaagggagctggctggtgtttgagctgtggcagaagcacctggggctccagggagcaggctgggaactgcaggaccttgctcagccaggagcacttccccctccttgaggcaggaatactgaggtgcctccccacagatggagaaggtggagaggaggatgggcctcaggagcatctcaagccccagtagcaggagaaagaaagaaagagatgcctggttttcacagactggttcctgtggctgggatgactgcatccttttttttttttttttgagacggagtttttgcctttgtcgcccaggctggagtgcaatggcgtgatctcggctcaccgcaacctccgcctcccggattcaagcaattctcctgcctcagcctcccgagtagctgggattacaggcacgcacctccacgtccggctaattttgtatttttagtggagacggggtttctccatgtcggtcaggctggtctcgaactcccgacctcaggtgatctgcccacctcggcctcccaaagtgctgggattacaggcatgagccaccgcgcttggccagactgcgtcctttttaagcgaacattttagggcctgggagtttgtcaagtaaggaagtctcaagcccaaagagcagcgtcctgaccatggtggtttcattacgagcccttctgctggctctcaggcagaagccccacagcaccgggaccattcatgaggtcactgcccagctcatgatgtccgtgaggctgtccttttggccagtagccgtgtgcagctgtgtggcacagatggcttcgttcatcctgatcaaggccccacctcagccacagcagtccccccaacctgtgttgtccaccctattattcatgtacctgccaggccctgctagatagcaccccgtggcattacataacacttcatgagtggctgtgtcttgtaattttggggacaggtttctctctttccctctcttttttttgtcaaaagcccagagactgacaaccagctgcagtgtctaagtgttcctcactgacagggtggggcctcaccacccctggagggagcagcgttggcagggagacagcctggcccagtgaccctgggcccaagccagcccctccagggctttcagggaagcgccatccattttcaaagatgtcaaacgtcacttcttcctgtagggcccgagtcctgcctcctatcagggccagatcatagaaggctattttctattctggggaacgattataacttaaatgattgttttaataaaaattctaagctggaaaatacttgccttggg

SEQ ID NO: 12513 - protein, 279 aa, Homo sapiens; identical to SEQ ID NO: 12509

SEQ ID NO: 12514 - DNA, 6058 bp, Homo sapiens
ggacggtgacagccacgcgcgcgcgtacgcgcccgatgcagcgcggccccgtgaccctagtcggccgctgagaggcgcgcggagtctgggccgctgccgtctaggggtcccgtcccgaggcgtccccggcatctccggcccgaatcccggagtgccgggtcgcgcctgcaccgaaggtcccggctcctgtgccctccctgcagccgtcagggcccgtcccccaactcccctttccgctcaggcagggtcctcgcggcccatgctggccgctggggacccgcgcagcccagaccgttcccgggccgggcagccggccaccatggtggccctgaggcctgtgcagcaactccaggggggctaaagggctcagagtgcaggccgtggggcgcgagggtcccgggcctgagccccgcgccatggccggggccatcgcttcccgcatgagcttcagctctctcaagaggaagcaacccaagacgttcaccgtgaggatcgtcaccatggacgccgagatggagttcaattgcgagatgaagtggaaagggaaggacctctttgatttggtgtgccggactctggggctccgagaaacctggttctttggactgcagtacacaatcaaggacacagtggcctggctcaaaatggacaagaaggtactggatcatgatgtttcaaaggaagaaccagtcacctttcacttcttggccaaattttatcctgagaatgctgaagaggagctggttcaggagatcacacaacatttattcttcttacaggtaaagaagcagattttagatgaaaagatctactgccctcctgaggcttctgtgctcctggcttcttacgccgtccaggccaagtatggtgactacgaccccagtgttcacaagcggggatttttggcccaagaggaattgcttccaaaaagggtaataaatctgtatcagatgactccggaaatgtgggaggagagaattactgcttggtacgcagagcaccgaggccgagccagggatgaagctgaaatggaatatctgaagatagctcaggacctggagatgtacggtgtgaactactttgcaatccggaataaaaagggcacagagctgctgcttggagtggatgccctggggcttcacatttatgaccctgagaacagactgacccccaagatctccttcccgtggaatgaaatccgaaacatctcgtacagtgacaaggagtttactattaaaccactggataagaaaattgatgtcttcaagtttaactcctcaaagcttcgtgttaataagctgattctccagctatgtatcgggaaccatgatctatttatgaggagaaggaaagccgattctttggaagttcagcagatgaaagcccaggccagggaggagaaggctagaaagcagatggagcggcagcgcctcgctcgagagaagcagatgagggaggaggctgaacgcacgagggatgagttggagaggaggctgctgcagatgaaagaagaagcaacaatggccaacgaagcactgatgcggtctgaggagacagctgacctgttggctgaaaaggcccagatcaccgaggaggaggcaaaacttctggcccagaaggccgcagaggctgagcaggaaatgcagcgcatcaaggccacagcgattcgcacggaggaggagaagcgcctgatggagcagaaggtgctggaagccgaggtgctggcactgaagatggctgaggagtcagagaggagggccaaagaggcagatcagctgaagcaggacctgcaggaagcacgcgaggcggagcgaagagccaagcagaagctcctggagattgccaccaagcccacgtacccgcccatgaacccaattccagcaccgttgcctcctgacataccaagcttcaacctcattggtgacagcctgtctttcgacttcaaagatactgacatgaagcggctttccatggagatagagaaagaaaaagtggaatacatggaaaagagcaagcatctgcaggagcagctcaatgaactcaagacagaaatcgaggccttgaaactgaaagagagggagacagctctggatattctgcacaatgagaactccgacaggggtggcagcagcaagcacaataccattaaaaagcctcaagcccaaggcagaagacctatctgcatttgagccctcaaactcaccttgcagagcgccaagtcccgagtggccttctttgaagagctctagcaggtgacccagccaccccaggacctgccacttctcctgctaccgggaccgcgggatggaccagatatcaagagagccatccatagggagctggctgggggtttccgtgggagctccagaactttccccagctgagtgaagagcccagcccctcttatgtgcaattgccttgaactacgaccctgtagagatttctctcatggcgttctagttctctgacctgagtctttgttttaagaagtatttgtcttcctttgtctaatgtgggattcctgactcccttcgtccaaggcaccggtgtgtgtgtgtcttgcactccagagctgacctccaccgcccagcctgggaagtcattgtagggagtgagacactgaagccctgagaagccagtgccatcatccccaccccgcccagggttccggaacattcattcccccaccggtgaggacctggcatgcagcgaagcagcccagcccggcggatcccaggccagcacgcctgccggcttctcatcgtcagggagcccgcccagagctcgtgacgagcaagtgctgggtccccgccaggcaccccgaggcggcgctctggctggcagctggtggggaataggcagggcagctgtggctggggagagactttaggcagaagctgtgatgcaggctgactgccagccgaggggctgggtagtgccgtgcgggagctgatggtacagggcactcgctgtccccctccggccaccctagaccagggtccgagaggcaggcaggagccactcatgtcttccccattgcccgacgcccatagacgctccttcctgtgtggggctggggtactccctggtcgtactgcagtcagcacccgtaacccggctatgaccagggatctgtaagccctgtggctccacaggtgctgcttctcactggcccagactctgagctccaccggcccagtctgcacggcccatctgcttcaccttccctcccagccacgtgccagtggccacagcccacttcccaacccactgttgtacccaggcctcactttgctgttgcccttgtccctcttcgggccctgaattttctgttccctgggggccagccagggccctttgtgcccctcccagcacaggcctgatgcaggtgtccactcacaggtggcgctcacctaggctgtcacaggacccacctccatgccaggcaacagagggccacagaaccacccccacggctcactccttggtctggggccaccttcttgccctttctttttttttttttttttttttttccgagatggagtctctctctgtcacccaggtgggagtgtggtggcacaatctcggctcactgcaacctccacctcctgagttcaagcaattctcctgcctcagcctcccaagtagctgggactacaggcatgcaccaccacacttggccaatgttctgtatttttaatagggacggggttttgccatgttagctaggctggtctcaaactcacacctgggattacaggcatgagccactgcacccagccccttcttgccctttcttttctccatggctgatgctgctgtggccagccagggcccttgagatccttccagtttggctgttatgcaaagcaggtgatttgtcttaatcagataaaagatagaggctatgggggcctcaagatttttggagagcagaggtggtctctggcaattccatctggttttgagaaacttagcagctcacagagcacagagatcctgccttcttcctactatcaggctgacctaatggggttgggctgctcggcaactgcttgggtcaccttgccccaaggaaaccagccctgggtgccacccagccacttagggtctacagggtgggactccagacctagagcgtaagtatggatgttgtggccctgtgtcttcctagtgtgacccagccaggagcggaagcttcaggcgtttgtaaagtgaggtctggctctgcctcctccgttttttttttttttctgtttctgtttctgttttttttttgagatggagtctcgctctgtcgcccaggctggagtgcagtgtcacgatctcagctcactgcaacctccgcctcccaggtacaagagattctcctgcctcagcctcccgagtagctgggactacaggcgtgtgccaccatgcctggctaatttttgtatttttagtagagatggggtttcgccatgttagccagactggtctcgaactcctgacctcaggtgatcctcccaccccggcttcccaaagttctgggattataggcgtgagccaccatgcccggtctcttctcagtcttgaagcccatccctggatttccaccaggagttactttcctcctgacctgtaaatttgttctttaacaatggctgcaggtgggagcatatggtggtttataaaaacgctgtcgggctttgtttccttctttagctgccgtgtctacttctgaagtctgggaagtgccaagccacgcggcctcaagggagctggctggtgtttgagctgtggcagaagcacctggggctccagggagcaggctgggaactgcaggaccttgctcagccaggagcacttccccctccttgaggcaggaatactgaggtgcctccccacagatggagaaggtggagaggaggatgggcctcaggagcatctcaagccccagtagcaggagaaagaaagaaagagatgcctggttttcacagactggttcctgtggctgggatgactgcatccttttttttttttttttgagacggagtttttgcctttgtcgcccaggctggagtgcaatggcgtgatctcggctcaccgcaacctccgcctcccggattcaagcaattctcctgcctcagcctcccgagtagctgggattacaggcacgcacctccacgtccggctaattttgtatttttagtggagacggggtttctccatgtcggtcaggctggtctcgaactcccgacctcaggtgatctgcccacctcggcctcccaaagtgctgggattacaggcatgagccaccgcgcttggccagactgcgtcctttttaagcgaacattttagggcctgggagtttgtcaagtaaggaagtctcaagcccaaagagcagcgtcctgaccatggtggtttcattacgagcccttctgctggctctcaggcagaagccccacagcaccgggaccattcatgaggtcactgcccagctcatgatgtccgtgaggctgtccttttggccagtagccgtgtgcagctgtgtggcacagatggcttcgttcatcctgatcaaggccccacctcagccacagcagtccccccaacctgtgttgtccaccctattattcatgtacctgccaggccctgctagatagcaccccgtggcattacataacacttcatgagtggctgtgtcttgtaattttggggacaggtttctctctttccctctcttttttttgtcaaaagcccagagactgacaaccagctgcagtgtctaagtgttcctcactgacagggtggggcctcaccacccctggagggagcagcgttggcagggagacagcctggcccagtgaccctgggcccaagccagcccctccagggctttcagggaagcgccatccattttcaaagatgtcaaacgtcacttcttcctgtagggcccgagtcctgcctcctatcagggccagatcatagaaggctattttctattctggggaacgattataacttaaatgattgttttaataaaaattctaagctggaaaatacttgccttggg

SEQ ID NO: 12515 - protein, 590 aa, Homo sapiens; identical to SEQ ID NO: 2154

SEQ ID NO: 12516 - DNA, 4723 bp, Homo sapiens
ggacggtgacagccacgcgcgcgcgtacgcgcccgatgcagcgcggccccgtgaccctagtcggccgctgagaggcgcgcggagtctgggccgctgccgtctaggggtcccgtcccgaggcgtccccggcatctccggcccgaatcccggagtgccgggtcgcgcctgcaccgaaggtcccggctcctgtgccctccctgcagccgtcagggcccgtcccccaactcccctttccgctcaggcagggtcctcgcggcccatgctggccgctggggacccgcgcagcccagaccgttcccgggccgggcagccggccaccatggtggccctgaggcctgtgcagcaactccaggggggctaaagggctcagagtgcaggccgtggggcgcgagggtcccgggcctgagccccgcgccatggccggggccatcgcttcccgcatgagcttcagctctctcaagaggaagcaacccaagacgttcaccgtgaggatcgtcaccatggacgccgagatggagttcaattgcgagatgaagtggaaagggaaggacctctttgatttggtgtgccggactctggggctccgagaaacctggttctttggactgcagtacacaatcaaggacacagtggcctggctcaaaatggacaagaaggtactggatcatgatgtttcaaaggaagaaccagtcacctttcacttcttggccaaattttatcctgagaatgctgaagaggagctggttcaggagatcacacaacatttattcttcttacaggtaaagaagcagattttagatgaaaagatctactgccctcctgaggcttctgtgctcctggcttcttacgccgtccaggccaagctcaccttgcagagcgccaagtcccgagtggccttctttgaagagctctagcaggtgacccagccaccccaggacctgccacttctcctgctaccgggaccgcgggatggaccagatatcaagagagccatccatagggagctggctgggggtttccgtgggagctccagaactttccccagctgagtgaagagcccagcccctcttatgtgcaattgccttgaactacgaccctgtagagatttctctcatggcgttctagttctctgacctgagtctttgttttaagaagtatttgtcttcctttgtctaatgtgggattcctgactcccttcgtccaaggcaccggtgtgtgtgtgtcttgcactccagagctgacctccaccgcccagcctgggaagtcattgtagggagtgagacactgaagccctgagaagccagtgccatcatccccaccccgcccagggttccggaacattcattcccccaccggtgaggacctggcatgcagcgaagcagcccagcccggcggatcccaggccagcacgcctgccggcttctcatcgtcagggagcccgcccagagctcgtgacgagcaagtgctgggtccccgccaggcaccccgaggcggcgctctggctggcagctggtggggaataggcagggcagctgtggctggggagagactttaggcagaagctgtgatgcaggctgactgccagccgaggggctgggtagtgccgtgcgggagctgatggtacagggcactcgctgtccccctccggccaccctagaccagggtccgagaggcaggcaggagccactcatgtcttccccattgcccgacgcccatagacgctccttcctgtgtggggctggggtactccctggtcgtactgcagtcagcacccgtaacccggctatgaccagggatctgtaagccctgtggctccacaggtgctgcttctcactggcccagactctgagctccaccggcccagtctgcacggcccatctgcttcaccttccctcccagccacgtgccagtggccacagcccacttcccaacccactgttgtacccaggcctcactttgctgttgcccttgtccctcttcgggccctgaattttctgttccctgggggccagccagggccctttgtgcccctcccagcacaggcctgatgcaggtgtccactcacaggtggcgctcacctaggctgtcacaggacccacctccatgccaggcaacagagggccacagaaccacccccacggctcactccttggtctggggccaccttcttgccctttctttttttttttttttttttttttccgagatggagtctctctctgtcacccaggtgggagtgtggtggcacaatctcggctcactgcaacctccacctcctgagttcaagcaattctcctgcctcagcctcccaagtagctgggactacaggcatgcaccaccacacttggccaatgttctgtatttttaatagggacggggttttgccatgttagctaggctggtctcaaactcacacctgggattacaggcatgagccactgcacccagccccttcttgccctttcttttctccatggctgatgctgctgtggccagccagggcccttgagatccttccagtttggctgttatgcaaagcaggtgatttgtcttaatcagataaaagatagaggctatgggggcctcaagatttttggagagcagaggtggtctctggcaattccatctggttttgagaaacttagcagctcacagagcacagagatcctgccttcttcctactatcaggctgacctaatggggttgggctgctcggcaactgcttgggtcaccttgccccaaggaaaccagccctgggtgccacccagccacttagggtctacagggtgggactccagacctagagcgtaagtatggatgttgtggccctgtgtcttcctagtgtgacccagccaggagcggaagcttcaggcgtttgtaaagtgaggtctggctctgcctcctccgttttttttttttttctgtttctgtttctgttttttttttgagatggagtctcgctctgtcgcccaggctggagtgcagtgtcacgatctcagctcactgcaacctccgcctcccaggtacaagagattctcctgcctcagcctcccgagtagctgggactacaggcgtgtgccaccatgcctggctaatttttgtatttttagtagagatggggtttcgccatgttagccagactggtctcgaactcctgacctcaggtgatcctcccaccccggcttcccaaagttctgggattataggcgtgagccaccatgcccggtctcttctcagtcttgaagcccatccctggatttccaccaggagttactttcctcctgacctgtaaatttgttctttaacaatggctgcaggtgggagcatatggtggtttataaaaacgctgtcgggctttgtttccttctttagctgccgtgtctacttctgaagtctgggaagtgccaagccacgcggcctcaagggagctggctggtgtttgagctgtggcagaagcacctggggctccagggagcaggctgggaactgcaggaccttgctcagccaggagcacttccccctccttgaggcaggaatactgaggtgcctccccacagatggagaaggtggagaggaggatgggcctcaggagcatctcaagccccagtagcaggagaaagaaagaaagagatgcctggttttcacagactggttcctgtggctgggatgactgcatccttttttttttttttttgagacggagtttttgcctttgtcgcccaggctggagtgcaatggcgtgatctcggctcaccgcaacctccgcctcccggattcaagcaattctcctgcctcagcctcccgagtagctgggattacaggcacgcacctccacgtccggctaattttgtatttttagtggagacggggtttctccatgtcggtcaggctggtctcgaactcccgacctcaggtgatctgcccacctcggcctcccaaagtgctgggattacaggcatgagccaccgcgcttggccagactgcgtcctttttaagcgaacattttagggcctgggagtttgtcaagtaaggaagtctcaagcccaaagagcagcgtcctgaccatggtggtttcattacgagcccttctgctggctctcaggcagaagccccacagcaccgggaccattcatgaggtcactgcccagctcatgatgtccgtgaggctgtccttttggccagtagccgtgtgcagctgtgtggcacagatggcttcgttcatcctgatcaaggccccacctcagccacagcagtccccccaacctgtgttgtccaccctattattcatgtacctgccaggccctgctagatagcaccccgtggcattacataacacttcatgagtggctgtgtcttgtaattttggggacaggtttctctctttccctctcttttttttgtcaaaagcccagagactgacaaccagctgcagtgtctaagtgttcctcactgacagggtggggcctcaccacccctggagggagcagcgttggcagggagacagcctggcccagtgaccctgggcccaagccagcccctccagggctttcagggaagcgccatccattttcaaagatgtcaaacgtcacttcttcctgtagggcccgagtcctgcctcctatcagggccagatcatagaaggctattttctattctggggaacgattataacttaaatgattgttttaataaaaattctaagctggaaaatacttgccttggg

SEQ ID NO: 12517 - protein, 165 aa, Homo sapiens; identical to SEQ ID NO: 2168

SEQ ID NO: 12518 - DNA, 2260 bp, Homo sapiens
gaggcgcgcggagtctgggccgctgccgtctaggggtcccgtcccgaggcgtccccggcatctccggcccgaatcccggagtgccgggtcgcgcctgcaccgaaggtcccggctcctgtgccctccctgcagccgtcagggcccgtcccccaactcccctttccgctcaggcagggtcctcgcggcccatgctggccgctggggacccgcgcagcccagaccgttcccgggccgggcagccggccaccatggtggccctgaggcctgtgcagcaactccaggggggctaaagggctcagagtgcaggccgtggggcgcgagggtcccgggcctgagccccgcgccatggccggggccatcgcttcccgcatgagcttcagctctctcaagaggaagcaacccaagacgttcaccgtgaggatcgtcaccatggacgccgagatggagttcaattgcgagatgaagtggaaagggaaggacctctttgatttggtgtgccggactctggggctccgagaaacctggttctttggactgcagtacacaatcaaggacacagtggcctggctcaaaatggacaagaaggtaaagaagcagattttagatgaaaagatctactgccctcctgaggcttctgtgctcctggcttcttacgccgtccaggccaagtatggtgactacgaccccagtgttcacaagcggggatttttggcccaagaggaattgcttccaaaaagggtaataaatctgtatcagatgactccggaaatgtgggaggagagaattactgcttggtacgcagagcaccgaggccgagccagggatgaagctgaaatggaatatctgaagatagctcaggacctggagatgtacggtgtgaactactttgcaatccggaataaaaagggcacagagctgctgcttggagtggatgccctggggcttcacatttatgaccctgagaacagactgacccccaagatctccttcccgtggaatgaaatccgaaacatctcgtacagtgacaaggagtttactattaaaccactggataagaaaattgatgtcttcaagtttaactcctcaaagcttcgtgttaataagctgattctccagctatgtatcgggaaccatgatctatttatgaggagaaggaaagccgattctttggaagttcagcagatgaaagcccaggccagggaggagaaggctagaaagcagatggagcggcagcgcctcgctcgagagaagcagatgagggaggaggctgaacgcacgagggatgagttggagaggaggctgctgcagatgaaagaagaagcaacaatggccaacgaagcactgatgcggtctgaggagacagctgacctgttggctgaaaaggcccagatcaccgaggaggaggcaaaacttctggcccagaaggccgcagaggctgagcaggaaatgcagcgcatcaaggccacagcgattcgcacggaggaggagaagcgcctgatggagcagaaggtgctggaagccgaggtgctggcactgaagatggctgaggagtcagagaggagggccaaagaggcagatcagctgaagcaggacctgcaggaagcacgcgaggcggagcgaagagccaagcagaagctcctggagattgccaccaagcccacgtacccgcccatgaacccaattccagcaccgttgcctcctgacataccaagcttcaacctcattggtgacagcctgtctttcgacttcaaagatactgacatgaagcggctttccatggagatagagaaagaaaaagtggaatacatggaaaagagcaagcatctgcaggagcagctcaatgaactcaagacagaaatcgaggccttgaaactgaaagagagggagacagctctggatattctgcacaatgagaactccgacaggggtggcagcagcaagcacaataccattaaaaagcctcaagcccaaggcagaagacctatctgcatttgagccctcaaactcaccttgcagagcgccaagtcccgagtggccttctttgaagagctctagcaggtgacccagccaccccaggacctgccacttctcctgctaccgggaccgcgggatggaccagatatcaagagagccatccatagggagctggctgggggtttccgtgggagctccagaactttccccagctgagtgaagagcccagcccctcttatgtgcaattgccttgaactacgaccctgtagagatttctctcatggcg

SEQ ID NO: 12519 - protein, 549 aa, Homo sapiens; identical to SEQ ID NO: 2160

SEQ ID NO: 12520 - DNA, 2315 bp, Homo sapiens
gaggcgcgcggagtctgggccgctgccgtctaggggtcccgtcccgaggcgtccccggcatctccggcccgaatcccggagtgccgggtcgcgcctgcaccgaaggtcccggctcctgtgccctccctgcagccgtcagggcccgtcccccaactcccctttccgctcaggcagggtcctcgcggcccatgctggccgctggggacccgcgcagcccagaccgttcccgggccgggcagccggccaccatggtggccctgaggcctgtgcagcaactccaggggggctaaagggctcagagtgcaggccgtggggcgcgagggtcccgggcctgagccccgcgccatggccggggccatcgcttcccgcatgagcttcagctctctcaagaggaagcaacccaagacgttcaccgtgaggatcgtcaccatggacgccgagatggagttcaattgcgagatgaagtggaaagggaaggacctctttgatttggtgtgccggactctggggctccgagaaacctggttctttggactgcagtacacaatcaaggacacagtggcctggctcaaaatggacaagaaggtaaagaagcagattttagatgaaaagatctactgccctcctgaggcttctgtgctcctggcttcttacgccgtccaggccaagtatggtgactacgaccccagtgttcacaagcggggatttttggcccaagaggaattgcttccaaaaagggtaataaatctgtatcagatgactccggaaatgtgggaggagagaattactgcttggtacgcagagcaccgaggccgagccagggatgaagctgaaatggaatatctgaagatagctcaggacctggagatgtacggtgtgaactactttgcaatccggaataaaaagggcacagagctgctgcttggagtggatgccctggggcttcacatttatgaccctgagaacagactgacccccaagatctccttcccgtggaatgaaatccgaaacatctcgtacagtgacaaggagtttactattaaaccactggataagaaaattgatgtcttcaagtttaactcctcaaagcttcgtgttaataagctgattctccagctatgtatcgggaaccatgatctatttatgaggagaaggaaagccgattctttggaagttcagcagatgaaagcccaggccagggaggagaaggctagaaagcagatggagcggcagcgcctcgctcgagagaagcagatgagggaggaggctgaacgcacgagggatgagttggagaggaggctgctgcagatgaaagaagaagcaacaatggccaacgaagcactgatgcggtctgaggagacagctgacctgttggctgaaaaggcccagatcaccgaggaggaggcaaaacttctggcccagaaggccgcagaggctgagcaggaaatgcagcgcatcaaggccacagcgattcgcacggaggaggagaagcgcctgatggagcagaaggtgctggaagccgaggtgctggcactgaagatggctgaggagtcagagaggagggccaaagaggcagatcagctgaagcaggacctgcaggaagcacgcgaggcggagcgaagagccaagcagaagctcctggagattgccaccaagcccacgtacccgcccatgaacccaattccagcaccgttgcctcctgacataccaagcttcaacctcattggtgacagcctgtctttcgacttcaaagatactgacatgaagcggctttccatggagatagagaaagaaaaagtggaatacatggaaaagagcaagcatctgcaggagcagctcaatgaactcaagacagaaatcgaggccttgaaactgaaagagagggagacagctctggatattctgcacaatgagaactccgacaggggtggcagcagcaagcacaataccattaaaaagcctcaagcccaaggcagaagacctatctgcatttgagccctcaaactcaccttgcagagcgccaagtcccgagtggccttctttgaagagctctagcaggtgacccagccaccccaggacctgccacttctcctgctaccgggaccgcgggatggaccagatatcaagagagccatccatagggagctggctgggggtttccgtgggagctccagaactttccccagctgagtgaagagcccagcccctcttatgtgcaattgccttgaactacgaccctgtagagatttctctcatggcgttctagttctctgacctgagtctttgttttaagaagtatttgtcttcctttgtct

SEQ ID NO: 12521 - protein, 549 aa, Homo sapiens; identical to SEQ ID NO: 2160

SEQ ID NO: 12522 - DNA, 5864 bp, Homo sapiens
gaggcgcgcggagtctgggccgctgccgtctaggggtcccgtcccgaggcgtccccggcatctccggcccgaatcccggagtgccgggtcgcgcctgcaccgaaggtcccggctcctgtgccctccctgcagccgtcagggcccgtcccccaactcccctttccgctcaggcagggtcctcgcggcccatgctggccgctggggacccgcgcagcccagaccgttcccgggccgggcagccggccaccatggtggccctgaggcctgtgcagcaactccaggggggctaaagggctcagagtgcaggccgtggggcgcgagggtcccgggcctgagccccgcgccatggccggggccatcgcttcccgcatgagcttcagctctctcaagaggaagcaacccaagacgttcaccgtgaggatcgtcaccatggacgccgagatggagttcaattgcgagatgaagtggaaagggaaggacctctttgatttggtgtgccggactctggggctccgagaaacctggttctttggactgcagtacacaatcaaggacacagtggcctggctcaaaatggacaagaaggtaaagaagcagattttagatgaaaagatctactgccctcctgaggcttctgtgctcctggcttcttacgccgtccaggccaagtatggtgactacgaccccagtgttcacaagcggggatttttggcccaagaggaattgcttccaaaaagggtaataaatctgtatcagatgactccggaaatgtgggaggagagaattactgcttggtacgcagagcaccgaggccgagccagggatgaagctgaaatggaatatctgaagatagctcaggacctggagatgtacggtgtgaactactttgcaatccggaataaaaagggcacagagctgctgcttggagtggatgccctggggcttcacatttatgaccctgagaacagactgacccccaagatctccttcccgtggaatgaaatccgaaacatctcgtacagtgacaaggagtttactattaaaccactggataagaaaattgatgtcttcaagtttaactcctcaaagcttcgtgttaataagctgattctccagctatgtatcgggaaccatgatctatttatgaggagaaggaaagccgattctttggaagttcagcagatgaaagcccaggccagggaggagaaggctagaaagcagatggagcggcagcgcctcgctcgagagaagcagatgagggaggaggctgaacgcacgagggatgagttggagaggaggctgctgcagatgaaagaagaagcaacaatggccaacgaagcactgatgcggtctgaggagacagctgacctgttggctgaaaaggcccagatcaccgaggaggaggcaaaacttctggcccagaaggccgcagaggctgagcaggaaatgcagcgcatcaaggccacagcgattcgcacggaggaggagaagcgcctgatggagcagaaggtgctggaagccgaggtgctggcactgaagatggctgaggagtcagagaggagggccaaagaggcagatcagctgaagcaggacctgcaggaagcacgcgaggcggagcgaagagccaagcagaagctcctggagattgccaccaagcccacgtacccgcccatgaacccaattccagcaccgttgcctcctgacataccaagcttcaacctcattggtgacagcctgtctttcgacttcaaagatactgacatgaagcggctttccatggagatagagaaagaaaaagtggaatacatggaaaagagcaagcatctgcaggagcagctcaatgaactcaagacagaaatcgaggccttgaaactgaaagagagggagacagctctggatattctgcacaatgagaactccgacaggggtggcagcagcaagcacaataccattaaaaagcctcaagcccaaggcagaagacctatctgcatttgagccctcaaactcaccttgcagagcgccaagtcccgagtggccttctttgaagagctctagcaggtgacccagccaccccaggacctgccacttctcctgctaccgggaccgcgggatggaccagatatcaagagagccatccatagggagctggctgggggtttccgtgggagctccagaactttccccagctgagtgaagagcccagcccctcttatgtgcaattgccttgaactacgaccctgtagagatttctctcatggcgttctagttctctgacctgagtctttgttttaagaagtatttgtcttcctttgtctaatgtgggattcctgactcccttcgtccaaggcaccggtgtgtgtgtgtcttgcactccagagctgacctccaccgcccagcctgggaagtcattgtagggagtgagacactgaagccctgagaagccagtgccatcatccccaccccgcccagggttccggaacattcattcccccaccggtgaggacctggcatgcagcgaagcagcccagcccggcggatcccaggccagcacgcctgccggcttctcatcgtcagggagcccgcccagagctcgtgacgagcaagtgctgggtccccgccaggcaccccgaggcggcgctctggctggcagctggtggggaataggcagggcagctgtggctggggagagactttaggcagaagctgtgatgcaggctgactgccagccgaggggctgggtagtgccgtgcgggagctgatggtacagggcactcgctgtccccctccggccaccctagaccagggtccgagaggcaggcaggagccactcatgtcttccccattgcccgacgcccatagacgctccttcctgtgtggggctggggtactccctggtcgtactgcagtcagcacccgtaacccggctatgaccagggatctgtaagccctgtggctccacaggtgctgcttctcactggcccagactctgagctccaccggcccagtctgcacggcccatctgcttcaccttccctcccagccacgtgccagtggccacagcccacttcccaacccactgttgtacccaggcctcactttgctgttgcccttgtccctcttcgggccctgaattttctgttccctgggggccagccagggccctttgtgcccctcccagcacaggcctgatgcaggtgtccactcacaggtggcgctcacctaggctgtcacaggacccacctccatgccaggcaacagagggccacagaaccacccccacggctcactccttggtctggggccaccttcttgccctttctttttttttttttttttttttttccgagatggagtctctctctgtcacccaggtgggagtgtggtggcacaatctcggctcactgcaacctccacctcctgagttcaagcaattctcctgcctcagcctcccaagtagctgggactacaggcatgcaccaccacacttggccaatgttctgtatttttaatagggacggggttttgccatgttagctaggctggtctcaaactcacacctgggattacaggcatgagccactgcacccagccccttcttgccctttcttttctccatggctgatgctgctgtggccagccagggcccttgagatccttccagtttggctgttatgcaaagcaggtgatttgtcttaatcagataaaagatagaggctatgggggcctcaagatttttggagagcagaggtggtctctggcaattccatctggttttgagaaacttagcagctcacagagcacagagatcctgccttcttcctactatcaggctgacctaatggggttgggctgctcggcaactgcttgggtcaccttgccccaaggaaaccagccctgggtgccacccagccacttagggtctacagggtgggactccagacctagagcgtaagtatggatgttgtggccctgtgtcttcctagtgtgacccagccaggagcggaagcttcaggcgtttgtaaagtgaggtctggctctgcctcctccgttttttttttttttctgtttctgtttctgttttttttttgagatggagtctcgctctgtcgcccaggctggagtgcagtgtcacgatctcagctcactgcaacctccgcctcccaggtacaagagattctcctgcctcagcctcccgagtagctgggactacaggcgtgtgccaccatgcctggctaatttttgtatttttagtagagatggggtttcgccatgttagccagactggtctcgaactcctgacctcaggtgatcctcccaccccggcttcccaaagttctgggattataggcgtgagccaccatgcccggtctcttctcagtcttgaagcccatccctggatttccaccaggagttactttcctcctgacctgtaaatttgttctttaacaatggctgcaggtgggagcatatggtggtttataaaaacgctgtcgggctttgtttccttctttagctgccgtgtctacttctgaagtctgggaagtgccaagccacgcggcctcaagggagctggctggtgtttgagctgtggcagaagcacctggggctccagggagcaggctgggaactgcaggaccttgctcagccaggagcacttccccctccttgaggcaggaatactgaggtgcctccccacagatggagaaggtggagaggaggatgggcctcaggagcatctcaagccccagtagcaggagaaagaaagaaagagatgcctggttttcacagactggttcctgtggctgggatgactgcatccttttttttttttttttgagacggagtttttgcctttgtcgcccaggctggagtgcaatggcgtgatctcggctcaccgcaacctccgcctcccggattcaagcaattctcctgcctcagcctcccgagtagctgggattacaggcacgcacctccacgtccggctaattttgtatttttagtggagacggggtttctccatgtcggtcaggctggtctcgaactcccgacctcaggtgatctgcccacctcggcctcccaaagtgctgggattacaggcatgagccaccgcgcttggccagactgcgtcctttttaagcgaacattttagggcctgggagtttgtcaagtaaggaagtctcaagcccaaagagcagcgtcctgaccatggtggtttcattacgagcccttctgctggctctcaggcagaagccccacagcaccgggaccattcatgaggtcactgcccagctcatgatgtccgtgaggctgtccttttggccagtagccgtgtgcagctgtgtggcacagatggcttcgttcatcctgatcaaggccccacctcagccacagcagtccccccaacctgtgttgtccaccctattattcatgtacctgccaggccctgctagatagcaccccgtggcattacataacacttcatgagtggctgtgtcttgtaattttggggacaggtttctctctttccctctcttttttttgtcaaaagcccagagactgacaaccagctgcagtgtctaagtgttcctcactgacagggtggggcctcaccacccctggagggagcagcgttggcagggagacagcctggcccagtgaccctgggcccaagccagcccctccagggctttcagggaagcgccatccattttcaaagatgtcaaacgtcacttcttcctgtagggcccgagtcctgcctcctatcagggccagatcatagaaggctattttctattctggggaacgattataacttaaatgattgttttaataaaaattctaagctggaaaatacttgccttggg

SEQ ID NO: 12523 - protein, 549 aa, Homo sapiens; identical to SEQ ID NO: 2160

SEQ ID NO: 12524 - DNA, 2058 bp, Homo sapiens
cggagtgccgggtcgcgcctgcaccgaaggtcccggctcctgtgccctccctgcagccgtcagggcccgtcccccaactcccctttccgctcaggcagggtcctcgcggcccatgctggccgctggggacccgcgcagcccagaccgttcccgggccgggcagccggccaccatggtggccctgaggcctgtgcagcaactccaggggggctaaagggctcagagtgcaggccgtggggcgcgagggtcccgggcctgagccccgcgccatggccggggccatcgcttcccgcatgagcttcagctctctcaagaggaagcaacccaagacgttcaccgtgaggatcgtcaccatggacgccgagatggagttcaattgcgaggtaaagaagcagattttagatgaaaagatctactgccctcctgaggcttctgtgctcctggcttcttacgccgtccaggccaagtatggtgactacgaccccagtgttcacaagcggggatttttggcccaagaggaattgcttccaaaaagggtaataaatctgtatcagatgactccggaaatgtgggaggagagaattactgcttggtacgcagagcaccgaggccgagccagggatgaagctgaaatggaatatctgaagatagctcaggacctggagatgtacggtgtgaactactttgcaatccggaataaaaagggcacagagctgctgcttggagtggatgccctggggcttcacatttatgaccctgagaacagactgacccccaagatctccttcccgtggaatgaaatccgaaacatctcgtacagtgacaaggagtttactattaaaccactggataagaaaattgatgtcttcaagtttaactcctcaaagcttcgtgttaataagctgattctccagctatgtatcgggaaccatgatctatttatgaggagaaggaaagccgattctttggaagttcagcagatgaaagcccaggccagggaggagaaggctagaaagcagatggagcggcagcgcctcgctcgagagaagcagatgagggaggaggctgaacgcacgagggatgagttggagaggaggctgctgcagatgaaagaagaagcaacaatggccaacgaagcactgatgcggtctgaggagacagctgacctgttggctgaaaaggcccagatcaccgaggaggaggcaaaacttctggcccagaaggccgcagaggctgagcaggaaatgcagcgcatcaaggccacagcgattcgcacggaggaggagaagcgcctgatggagcagaaggtgctggaagccgaggtgctggcactgaagatggctgaggagtcagagaggagggccaaagaggcagatcagctgaagcaggacctgcaggaagcacgcgaggcggagcgaagagccaagcagaagctcctggagattgccaccaagcccacgtacccgcccatgaacccaattccagcaccgttgcctcctgacataccaagcttcaacctcattggtgacagcctgtctttcgacttcaaagatactgacatgaagcggctttccatggagatagagaaagaaaaagtggaatacatggaaaagagcaagcatctgcaggagcagctcaatgaactcaagacagaaatcgaggccttgaaactgaaagagagggagacagctctggatattctgcacaatgagaactccgacaggggtggcagcagcaagcacaataccattaaaaagcctcaagcccaaggcagaagacctatctgcatttgagccctcaaactcaccttgcagagcgccaagtcccgagtggccttctttgaagagctctagcaggtgacccagccaccccaggacctgccacttctcctgctaccgggaccgcgggatggaccagatatcaagagagccatccatagggagctggctgggggtttccgtgggagctccagaactttccccagctgagtgaagagcccagcccctcttatgtgcaattgccttgaactacgaccctgtagagatttctctcatggcg

SEQ ID NO: 12525 - protein, 507 aa, Homo sapiens; identical to SEQ ID NO: 2162

SEQ ID NO: 12526 - DNA, 2423 bp, Homo sapiens
cggagtgccgggtcgcgcctgcaccgaaggtcccggctcctgtgccctccctgcagccgtcagggcccgtcccccaactcccctttccgctcaggcagggtcctcgcggcccatgctggccgctggggacccgcgcagcccagaccgttcccgggccgggcagccggccaccatggtggccctgaggcctgtgcagcaactccaggggggctaaagggctcagagtgcaggccgtggggcgcgagggtcccgggcctgagccccgcgccatggccggggccatcgcttcccgcatgagcttcagctctctcaagaggaagcaacccaagacgttcaccgtgaggatcgtcaccatggacgccgagatggagttcaattgcgagtcttgctctgtcaccctagctggagtgcagtggcgtgatcttggtttactgcaacctctgcctcccaagttcaagcgattctcctgcctcagcttcccaagtagctgggactacagatgaagtggaaagggaaggacctctttgatttggtgtgccggactctggggctccgagaaacctggttctttggactgcagtacacaatcaaggacacagtggcctggctcaaaatggacaagaaggtactggatcatgatgtttcaaaggaagaaccagtcacctttcacttcttggccaaattttatcctgagaatgctgaagaggagctggttcaggagatcacacaacatttattcttcttacaggtaaagaagcagattttagatgaaaagatctactgccctcctgaggcttctgtgctcctggcttcttacgccgtccaggccaagtatggtgactacgaccccagtgttcacaagcggggatttttggcccaagaggaattgcttccaaaaagggtaataaatctgtatcagatgactccggaaatgtgggaggagagaattactgcttggtacgcagagcaccgaggccgagccagggatgaagctgaaatggaatatctgaagatagctcaggacctggagatgtacggtgtgaactactttgcaatccggaataaaaagggcacagagctgctgcttggagtggatgccctggggcttcacatttatgaccctgagaacagactgacccccaagatctccttcccgtggaatgaaatccgaaacatctcgtacagtgacaaggagtttactattaaaccactggataagaaaattgatgtcttcaagtttaactcctcaaagcttcgtgttaataagctgattctccagctatgtatcgggaaccatgatctatttatgaggagaaggaaagccgattctttggaagttcagcagatgaaagcccaggccagggaggagaaggctagaaagcagatggagcggcagcgcctcgctcgagagaagcagatgagggaggaggctgaacgcacgagggatgagttggagaggaggctgctgcagatgaaagaagaagcaacaatggccaacgaagcactgatgcggtctgaggagacagctgacctgttggctgaaaaggcccagatcaccgaggaggaggcaaaacttctggcccagaaggccgcagaggctgagcaggaaatgcagcgcatcaaggccacagcgattcgcacggaggaggagaagcgcctgatggagcagaaggtgctggaagccgaggtgctggcactgaagatggctgaggagtcagagaggagggccaaagaggcagatcagctgaagcaggacctgcaggaagcacgcgaggcggagcgaagagccaagcagaagctcctggagattgccaccaagcccacgtacccgcccatgaacccaattccagcaccgttgcctcctgacataccaagcttcaacctcattggtgacagcctgtctttcgacttcaaagatactgacatgaagcggctttccatggagatagagaaagaaaaagtggaatacatggaaaagagcaagcatctgcaggagcagctcaatgaactcaagacagaaatcgaggccttgaaactgaaagagagggagacagctctggatattctgcacaatgagaactccgacaggggtggcagcagcaagcacaataccattaaaaagcctcaagcccaaggcagaagacctatctgcatttgagccctcaaactcaccttgcagagcgccaagtcccgagtggccttctttgaagagctctagcaggtgacccagccaccccaggacctgccacttctcctgctaccgggaccgcgggatggaccagatatcaagagagccatccatagggagctggctgggggtttccgtgggagctccagaactttccccagctgagtgaagagcccagcccctcttatgtgcaattgccttgaactacgaccctgtagagatttctctcatggcg

SEQ ID NO: 12527 - protein, 552 aa, Homo sapiens; identical to SEQ ID NO: 12493

SEQ ID NO: 12528 - DNA, 2181 bp, Homo sapiens
cggagtgccgggtcgcgcctgcaccgaaggtcccggctcctgtgccctccctgcagccgtcagggcccgtcccccaactcccctttccgctcaggcagggtcctcgcggcccatgctggccgctggggacccgcgcagcccagaccgttcccgggccgggcagccggccaccatggtggccctgaggcctgtgcagcaactccaggggggctaaagggctcagagtgcaggccgtggggcgcgagggtcccgggcctgagccccgcgccatggccggggccatcgcttcccgcatgagcttcagctctctcaagaggaagcaacccaagacgttcaccgtgaggatcgtcaccatggacgccgagatggagttcaattgcgaggtactggatcatgatgtttcaaaggaagaaccagtcacctttcacttcttggccaaattttatcctgagaatgctgaagaggagctggttcaggagatcacacaacatttattcttcttacaggtaaagaagcagattttagatgaaaagatctactgccctcctgaggcttctgtgctcctggcttcttacgccgtccaggccaagtatggtgactacgaccccagtgttcacaagcggggatttttggcccaagaggaattgcttccaaaaagggtaataaatctgtatcagatgactccggaaatgtgggaggagagaattactgcttggtacgcagagcaccgaggccgagccagggatgaagctgaaatggaatatctgaagatagctcaggacctggagatgtacggtgtgaactactttgcaatccggaataaaaagggcacagagctgctgcttggagtggatgccctggggcttcacatttatgaccctgagaacagactgacccccaagatctccttcccgtggaatgaaatccgaaacatctcgtacagtgacaaggagtttactattaaaccactggataagaaaattgatgtcttcaagtttaactcctcaaagcttcgtgttaataagctgattctccagctatgtatcgggaaccatgatctatttatgaggagaaggaaagccgattctttggaagttcagcagatgaaagcccaggccagggaggagaaggctagaaagcagatggagcggcagcgcctcgctcgagagaagcagatgagggaggaggctgaacgcacgagggatgagttggagaggaggctgctgcagatgaaagaagaagcaacaatggccaacgaagcactgatgcggtctgaggagacagctgacctgttggctgaaaaggcccagatcaccgaggaggaggcaaaacttctggcccagaaggccgcagaggctgagcaggaaatgcagcgcatcaaggccacagcgattcgcacggaggaggagaagcgcctgatggagcagaaggtgctggaagccgaggtgctggcactgaagatggctgaggagtcagagaggagggccaaagaggcagatcagctgaagcaggacctgcaggaagcacgcgaggcggagcgaagagccaagcagaagctcctggagattgccaccaagcccacgtacccgcccatgaacccaattccagcaccgttgcctcctgacataccaagcttcaacctcattggtgacagcctgtctttcgacttcaaagatactgacatgaagcggctttccatggagatagagaaagaaaaagtggaatacatggaaaagagcaagcatctgcaggagcagctcaatgaactcaagacagaaatcgaggccttgaaactgaaagagagggagacagctctggatattctgcacaatgagaactccgacaggggtggcagcagcaagcacaataccattaaaaagcctcaagcccaaggcagaagacctatctgcatttgagccctcaaactcaccttgcagagcgccaagtcccgagtggccttctttgaagagctctagcaggtgacccagccaccccaggacctgccacttctcctgctaccgggaccgcgggatggaccagatatcaagagagccatccatagggagctggctgggggtttccgtgggagctccagaactttccccagctgagtgaagagcccagcccctcttatgtgcaattgccttgaactacgaccctgtagagatttctctcatggcg

SEQ ID NO: 12529 - protein, 548 aa, Homo sapiens; identical to SEQ ID NO: 2158

SEQ ID NO: 12530 - DNA, 2113 bp, Homo sapiens
cggagtgccgggtcgcgcctgcaccgaaggtcccggctcctgtgccctccctgcagccgtcagggcccgtcccccaactcccctttccgctcaggcagggtcctcgcggcccatgctggccgctggggacccgcgcagcccagaccgttcccgggccgggcagccggccaccatggtggccctgaggcctgtgcagcaactccaggggggctaaagggctcagagtgcaggccgtggggcgcgagggtcccgggcctgagccccgcgccatggccggggccatcgcttcccgcatgagcttcagctctctcaagaggaagcaacccaagacgttcaccgtgaggatcgtcaccatggacgccgagatggagttcaattgcgaggtaaagaagcagattttagatgaaaagatctactgccctcctgaggcttctgtgctcctggcttcttacgccgtccaggccaagtatggtgactacgaccccagtgttcacaagcggggatttttggcccaagaggaattgcttccaaaaagggtaataaatctgtatcagatgactccggaaatgtgggaggagagaattactgcttggtacgcagagcaccgaggccgagccagggatgaagctgaaatggaatatctgaagatagctcaggacctggagatgtacggtgtgaactactttgcaatccggaataaaaagggcacagagctgctgcttggagtggatgccctggggcttcacatttatgaccctgagaacagactgacccccaagatctccttcccgtggaatgaaatccgaaacatctcgtacagtgacaaggagtttactattaaaccactggataagaaaattgatgtcttcaagtttaactcctcaaagcttcgtgttaataagctgattctccagctatgtatcgggaaccatgatctatttatgaggagaaggaaagccgattctttggaagttcagcagatgaaagcccaggccagggaggagaaggctagaaagcagatggagcggcagcgcctcgctcgagagaagcagatgagggaggaggctgaacgcacgagggatgagttggagaggaggctgctgcagatgaaagaagaagcaacaatggccaacgaagcactgatgcggtctgaggagacagctgacctgttggctgaaaaggcccagatcaccgaggaggaggcaaaacttctggcccagaaggccgcagaggctgagcaggaaatgcagcgcatcaaggccacagcgattcgcacggaggaggagaagcgcctgatggagcagaaggtgctggaagccgaggtgctggcactgaagatggctgaggagtcagagaggagggccaaagaggcagatcagctgaagcaggacctgcaggaagcacgcgaggcggagcgaagagccaagcagaagctcctggagattgccaccaagcccacgtacccgcccatgaacccaattccagcaccgttgcctcctgacataccaagcttcaacctcattggtgacagcctgtctttcgacttcaaagatactgacatgaagcggctttccatggagatagagaaagaaaaagtggaatacatggaaaagagcaagcatctgcaggagcagctcaatgaactcaagacagaaatcgaggccttgaaactgaaagagagggagacagctctggatattctgcacaatgagaactccgacaggggtggcagcagcaagcacaataccattaaaaagcctcaagcccaaggcagaagacctatctgcatttgagccctcaaactcaccttgcagagcgccaagtcccgagtggccttctttgaagagctctagcaggtgacccagccaccccaggacctgccacttctcctgctaccgggaccgcgggatggaccagatatcaagagagccatccatagggagctggctgggggtttccgtgggagctccagaactttccccagctgagtgaagagcccagcccctcttatgtgcaattgccttgaactacgaccctgtagagatttctctcatggcgttctagttctctgacctgagtctttgttttaagaagtatttgtcttcctttgtct

SEQ ID NO: 12531 - protein, 507 aa, Homo sapiens; identical to SEQ ID NO: 2162

SEQ ID NO: 12532 - DNA, 2236 bp, Homo sapiens
cggagtgccgggtcgcgcctgcaccgaaggtcccggctcctgtgccctccctgcagccgtcagggcccgtcccccaactcccctttccgctcaggcagggtcctcgcggcccatgctggccgctggggacccgcgcagcccagaccgttcccgggccgggcagccggccaccatggtggccctgaggcctgtgcagcaactccaggggggctaaagggctcagagtgcaggccgtggggcgcgagggtcccgggcctgagccccgcgccatggccggggccatcgcttcccgcatgagcttcagctctctcaagaggaagcaacccaagacgttcaccgtgaggatcgtcaccatggacgccgagatggagttcaattgcgaggtactggatcatgatgtttcaaaggaagaaccagtcacctttcacttcttggccaaattttatcctgagaatgctgaagaggagctggttcaggagatcacacaacatttattcttcttacaggtaaagaagcagattttagatgaaaagatctactgccctcctgaggcttctgtgctcctggcttcttacgccgtccaggccaagtatggtgactacgaccccagtgttcacaagcggggatttttggcccaagaggaattgcttccaaaaagggtaataaatctgtatcagatgactccggaaatgtgggaggagagaattactgcttggtacgcagagcaccgaggccgagccagggatgaagctgaaatggaatatctgaagatagctcaggacctggagatgtacggtgtgaactactttgcaatccggaataaaaagggcacagagctgctgcttggagtggatgccctggggcttcacatttatgaccctgagaacagactgacccccaagatctccttcccgtggaatgaaatccgaaacatctcgtacagtgacaaggagtttactattaaaccactggataagaaaattgatgtcttcaagtttaactcctcaaagcttcgtgttaataagctgattctccagctatgtatcgggaaccatgatctatttatgaggagaaggaaagccgattctttggaagttcagcagatgaaagcccaggccagggaggagaaggctagaaagcagatggagcggcagcgcctcgctcgagagaagcagatgagggaggaggctgaacgcacgagggatgagttggagaggaggctgctgcagatgaaagaagaagcaacaatggccaacgaagcactgatgcggtctgaggagacagctgacctgttggctgaaaaggcccagatcaccgaggaggaggcaaaacttctggcccagaaggccgcagaggctgagcaggaaatgcagcgcatcaaggccacagcgattcgcacggaggaggagaagcgcctgatggagcagaaggtgctggaagccgaggtgctggcactgaagatggctgaggagtcagagaggagggccaaagaggcagatcagctgaagcaggacctgcaggaagcacgcgaggcggagcgaagagccaagcagaagctcctggagattgccaccaagcccacgtacccgcccatgaacccaattccagcaccgttgcctcctgacataccaagcttcaacctcattggtgacagcctgtctttcgacttcaaagatactgacatgaagcggctttccatggagatagagaaagaaaaagtggaatacatggaaaagagcaagcatctgcaggagcagctcaatgaactcaagacagaaatcgaggccttgaaactgaaagagagggagacagctctggatattctgcacaatgagaactccgacaggggtggcagcagcaagcacaataccattaaaaagcctcaagcccaaggcagaagacctatctgcatttgagccctcaaactcaccttgcagagcgccaagtcccgagtggccttctttgaagagctctagcaggtgacccagccaccccaggacctgccacttctcctgctaccgggaccgcgggatggaccagatatcaagagagccatccatagggagctggctgggggtttccgtgggagctccagaactttccccagctgagtgaagagcccagcccctcttatgtgcaattgccttgaactacgaccctgtagagatttctctcatggcgttctagttctctgacctgagtctttgttttaagaagtatttgtcttcctttgtct

SEQ ID NO: 12533 - protein, 548 aa, Homo sapiens; identical to SEQ ID NO: 2158

SEQ ID NO: 12534 - DNA, 2478 bp, Homo sapiens
cggagtgccgggtcgcgcctgcaccgaaggtcccggctcctgtgccctccctgcagccgtcagggcccgtcccccaactcccctttccgctcaggcagggtcctcgcggcccatgctggccgctggggacccgcgcagcccagaccgttcccgggccgggcagccggccaccatggtggccctgaggcctgtgcagcaactccaggggggctaaagggctcagagtgcaggccgtggggcgcgagggtcccgggcctgagccccgcgccatggccggggccatcgcttcccgcatgagcttcagctctctcaagaggaagcaacccaagacgttcaccgtgaggatcgtcaccatggacgccgagatggagttcaattgcgagtcttgctctgtcaccctagctggagtgcagtggcgtgatcttggtttactgcaacctctgcctcccaagttcaagcgattctcctgcctcagcttcccaagtagctgggactacagatgaagtggaaagggaaggacctctttgatttggtgtgccggactctggggctccgagaaacctggttctttggactgcagtacacaatcaaggacacagtggcctggctcaaaatggacaagaaggtactggatcatgatgtttcaaaggaagaaccagtcacctttcacttcttggccaaattttatcctgagaatgctgaagaggagctggttcaggagatcacacaacatttattcttcttacaggtaaagaagcagattttagatgaaaagatctactgccctcctgaggcttctgtgctcctggcttcttacgccgtccaggccaagtatggtgactacgaccccagtgttcacaagcggggatttttggcccaagaggaattgcttccaaaaagggtaataaatctgtatcagatgactccggaaatgtgggaggagagaattactgcttggtacgcagagcaccgaggccgagccagggatgaagctgaaatggaatatctgaagatagctcaggacctggagatgtacggtgtgaactactttgcaatccggaataaaaagggcacagagctgctgcttggagtggatgccctggggcttcacatttatgaccctgagaacagactgacccccaagatctccttcccgtggaatgaaatccgaaacatctcgtacagtgacaaggagtttactattaaaccactggataagaaaattgatgtcttcaagtttaactcctcaaagcttcgtgttaataagctgattctccagctatgtatcgggaaccatgatctatttatgaggagaaggaaagccgattctttggaagttcagcagatgaaagcccaggccagggaggagaaggctagaaagcagatggagcggcagcgcctcgctcgagagaagcagatgagggaggaggctgaacgcacgagggatgagttggagaggaggctgctgcagatgaaagaagaagcaacaatggccaacgaagcactgatgcggtctgaggagacagctgacctgttggctgaaaaggcccagatcaccgaggaggaggcaaaacttctggcccagaaggccgcagaggctgagcaggaaatgcagcgcatcaaggccacagcgattcgcacggaggaggagaagcgcctgatggagcagaaggtgctggaagccgaggtgctggcactgaagatggctgaggagtcagagaggagggccaaagaggcagatcagctgaagcaggacctgcaggaagcacgcgaggcggagcgaagagccaagcagaagctcctggagattgccaccaagcccacgtacccgcccatgaacccaattccagcaccgttgcctcctgacataccaagcttcaacctcattggtgacagcctgtctttcgacttcaaagatactgacatgaagcggctttccatggagatagagaaagaaaaagtggaatacatggaaaagagcaagcatctgcaggagcagctcaatgaactcaagacagaaatcgaggccttgaaactgaaagagagggagacagctctggatattctgcacaatgagaactccgacaggggtggcagcagcaagcacaataccattaaaaagcctcaagcccaaggcagaagacctatctgcatttgagccctcaaactcaccttgcagagcgccaagtcccgagtggccttctttgaagagctctagcaggtgacccagccaccccaggacctgccacttctcctgctaccgggaccgcgggatggaccagatatcaagagagccatccatagggagctggctgggggtttccgtgggagctccagaactttccccagctgagtgaagagcccagcccctcttatgtgcaattgccttgaactacgaccctgtagagatttctctcatggcgttctagttctctgacctgagtctttgttttaagaagtatttgtcttcctttgtct

SEQ ID NO: 12535 - protein, 552 aa, Homo sapiens; identical to SEQ ID NO: 12493

SEQ ID NO: 12536 - DNA, 4885 bp, Homo sapiens
cggagtgccgggtcgcgcctgcaccgaaggtcccggctcctgtgccctccctgcagccgtcagggcccgtcccccaactcccctttccgctcaggcagggtcctcgcggcccatgctggccgctggggacccgcgcagcccagaccgttcccgggccgggcagccggccaccatggtggccctgaggcctgtgcagcaactccaggggggctaaagggctcagagtgcaggccgtggggcgcgagggtcccgggcctgagccccgcgccatggccggggccatcgcttcccgcatgagcttcagctctctcaagaggaagcaacccaagacgttcaccgtgaggatcgtcaccatggacgccgagatggagttcaattgcgaggtaaagaagcagattttagatgaaaagatctactgccctcctgaggcttctgtgctcctggcttcttacgccgtccaggccaagaataaaaagggcacagagctgctgcttggagtggatgccctggggcttcacatttatgaccctgagaacagactgacccccaagatctccttcccgtggaatgaaatccgaaacatctcgtacagtgacaaggagtttactattaaaccactggataagaaaattgatgtcttcaagtttaactcctcaaagcttcgtgttaataagctgattctccagctatgtatcgggaaccatgatctatttatgaggagaaggaaagccgattctttggaagttcagcagatgaaagcccaggccagggaggagaaggctagaaagcagggccaaagaggcagatcagctgaagcaggacctgcaggaagcacgcgaggcggagcgaagagccaagcagaagctcctggagattgccaccaagcccacgtacccgcccatgaacccaattccagcaccgttgcctcctgacataccaagcttcaacctcattggtgacagcctgtctttcgacttcaaagatactgacatgaagcggctttccatggagatagagaaagaaaactcaccttgcagagcgccaagtcccgagtggccttctttgaagagctctagcaggtgacccagccaccccaggacctgccacttctcctgctaccgggaccgcgggatggaccagatatcaagagagccatccatagggagctggctgggggtttccgtgggagctccagaactttccccagctgagtgaagagcccagcccctcttatgtgcaattgccttgaactacgaccctgtagagatttctctcatggcgttctagttctctgacctgagtctttgttttaagaagtatttgtcttcctttgtctaatgtgggattcctgactcccttcgtccaaggcaccggtgtgtgtgtgtcttgcactccagagctgacctccaccgcccagcctgggaagtcattgtagggagtgagacactgaagccctgagaagccagtgccatcatccccaccccgcccagggttccggaacattcattcccccaccggtgaggacctggcatgcagcgaagcagcccagcccggcggatcccaggccagcacgcctgccggcttctcatcgtcagggagcccgcccagagctcgtgacgagcaagtgctgggtccccgccaggcaccccgaggcggcgctctggctggcagctggtggggaataggcagggcagctgtggctggggagagactttaggcagaagctgtgatgcaggctgactgccagccgaggggctgggtagtgccgtgcgggagctgatggtacagggcactcgctgtccccctccggccaccctagaccagggtccgagaggcaggcaggagccactcatgtcttccccattgcccgacgcccatagacgctccttcctgtgtggggctggggtactccctggtcgtactgcagtcagcacccgtaacccggctatgaccagggatctgtaagccctgtggctccacaggtgctgcttctcactggcccagactctgagctccaccggcccagtctgcacggcccatctgcttcaccttccctcccagccacgtgccagtggccacagcccacttcccaacccactgttgtacccaggcctcactttgctgttgcccttgtccctcttcgggccctgaattttctgttccctgggggccagccagggccctttgtgcccctcccagcacaggcctgatgcaggtgtccactcacaggtggcgctcacctaggctgtcacaggacccacctccatgccaggcaacagagggccacagaaccacccccacggctcactccttggtctggggccaccttcttgccctttctttttttttttttttttttttttccgagatggagtctctctctgtcacccaggtgggagtgtggtggcacaatctcggctcactgcaacctccacctcctgagttcaagcaattctcctgcctcagcctcccaagtagctgggactacaggcatgcaccaccacacttggccaatgttctgtatttttaatagggacggggttttgccatgttagctaggctggtctcaaactcacacctgggattacaggcatgagccactgcacccagccccttcttgccctttcttttctccatggctgatgctgctgtggccagccagggcccttgagatccttccagtttggctgttatgcaaagcaggtgatttgtcttaatcagataaaagatagaggctatgggggcctcaagatttttggagagcagaggtggtctctggcaattccatctggttttgagaaacttagcagctcacagagcacagagatcctgccttcttcctactatcaggctgacctaatggggttgggctgctcggcaactgcttgggtcaccttgccccaaggaaaccagccctgggtgccacccagccacttagggtctacagggtgggactccagacctagagcgtaagtatggatgttgtggccctgtgtcttcctagtgtgacccagccaggagcggaagcttcaggcgtttgtaaagtgaggtctggctctgcctcctccgttttttttttttttctgtttctgtttctgttttttttttgagatggagtctcgctctgtcgcccaggctggagtgcagtgtcacgatctcagctcactgcaacctccgcctcccaggtacaagagattctcctgcctcagcctcccgagtagctgggactacaggcgtgtgccaccatgcctggctaatttttgtatttttagtagagatggggtttcgccatgttagccagactggtctcgaactcctgacctcaggtgatcctcccaccccggcttcccaaagttctgggattataggcgtgagccaccatgcccggtctcttctcagtcttgaagcccatccctggatttccaccaggagttactttcctcctgacctgtaaatttgttctttaacaatggctgcaggtgggagcatatggtggtttataaaaacgctgtcgggctttgtttccttctttagctgccgtgtctacttctgaagtctgggaagtgccaagccacgcggcctcaagggagctggctggtgtttgagctgtggcagaagcacctggggctccagggagcaggctgggaactgcaggaccttgctcagccaggagcacttccccctccttgaggcaggaatactgaggtgcctccccacagatggagaaggtggagaggaggatgggcctcaggagcatctcaagccccagtagcaggagaaagaaagaaagagatgcctggttttcacagactggttcctgtggctgggatgactgcatccttttttttttttttttgagacggagtttttgcctttgtcgcccaggctggagtgcaatggcgtgatctcggctcaccgcaacctccgcctcccggattcaagcaattctcctgcctcagcctcccgagtagctgggattacaggcacgcacctccacgtccggctaattttgtatttttagtggagacggggtttctccatgtcggtcaggctggtctcgaactcccgacctcaggtgatctgcccacctcggcctcccaaagtgctgggattacaggcatgagccaccgcgcttggccagactgcgtcctttttaagcgaacattttagggcctgggagtttgtcaagtaaggaagtctcaagcccaaagagcagcgtcctgaccatggtggtttcattacgagcccttctgctggctctcaggcagaagccccacagcaccgggaccattcatgaggtcactgcccagctcatgatgtccgtgaggctgtccttttggccagtagccgtgtgcagctgtgtggcacagatggcttcgttcatcctgatcaaggccccacctcagccacagcagtccccccaacctgtgttgtccaccctattattcatgtacctgccaggccctgctagatagcaccccgtggcattacataacacttcatgagtggctgtgtcttgtaattttggggacaggtttctctctttccctctcttttttttgtcaaaagcccagagactgacaaccagctgcagtgtctaagtgttcctcactgacagggtggggcctcaccacccctggagggagcagcgttggcagggagacagcctggcccagtgaccctgggcccaagccagcccctccagggctttcagggaagcgccatccattttcaaagatgtcaaacgtcacttcttcctgtagggcccgagtcctgcctcctatcagggccagatcatagaaggctattttctattctggggaacgattataacttaaatgattgttttaataaaaattctaagctggaaaatacttgccttggg

SEQ ID NO: 12537 - protein, 220 aa, Homo sapiens; identical to SEQ ID NO: 12489

SEQ ID NO: 12538 - DNA, 5785 bp, Homo sapiens
cggagtgccgggtcgcgcctgcaccgaaggtcccggctcctgtgccctccctgcagccgtcagggcccgtcccccaactcccctttccgctcaggcagggtcctcgcggcccatgctggccgctggggacccgcgcagcccagaccgttcccgggccgggcagccggccaccatggtggccctgaggcctgtgcagcaactccaggggggctaaagggctcagagtgcaggccgtggggcgcgagggtcccgggcctgagccccgcgccatggccggggccatcgcttcccgcatgagcttcagctctctcaagaggaagcaacccaagacgttcaccgtgaggatcgtcaccatggacgccgagatggagttcaattgcgaggtactggatcatgatgtttcaaaggaagaaccagtcacctttcacttcttggccaaattttatcctgagaatgctgaagaggagctggttcaggagatcacacaacatttattcttcttacaggtaaagaagcagattttagatgaaaagatctactgccctcctgaggcttctgtgctcctggcttcttacgccgtccaggccaagtatggtgactacgaccccagtgttcacaagcggggatttttggcccaagaggaattgcttccaaaaagggtaataaatctgtatcagatgactccggaaatgtgggaggagagaattactgcttggtacgcagagcaccgaggccgagccagggatgaagctgaaatggaatatctgaagatagctcaggacctggagatgtacggtgtgaactactttgcaatccggaataaaaagggcacagagctgctgcttggagtggatgccctggggcttcacatttatgaccctgagaacagactgacccccaagatctccttcccgtggaatgaaatccgaaacatctcgtacagtgacaaggagtttactattaaaccactggataagaaaattgatgtcttcaagtttaactcctcaaagcttcgtgttaataagctgattctccagctatgtatcgggaaccatgatctatttatgaggagaaggaaagccgattctttggaagttcagcagatgaaagcccaggccagggaggagaaggctagaaagcagatggagcggcagcgcctcgctcgagagaagcagatgagggaggaggctgaacgcacgagggatgagttggagaggaggctgctgcagatgaaagaagaagcaacaatggccaacgaagcactgatgcggtctgaggagacagctgacctgttggctgaaaaggcccagatcaccgaggaggaggcaaaacttctggcccagaaggccgcagaggctgagcaggaaatgcagcgcatcaaggccacagcgattcgcacggaggaggagaagcgcctgatggagcagaaggtgctggaagccgaggtgctggcactgaagatggctgaggagtcagagaggagggccaaagaggcagatcagctgaagcaggacctgcaggaagcacgcgaggcggagcgaagagccaagcagaagctcctggagattgccaccaagcccacgtacccgcccatgaacccaattccagcaccgttgcctcctgacataccaagcttcaacctcattggtgacagcctgtctttcgacttcaaagatactgacatgaagcggctttccatggagatagagaaagaaaaagtggaatacatggaaaagagcaagcatctgcaggagcagctcaatgaactcaagacagaaatcgaggccttgaaactgaaagagagggagacagctctggatattctgcacaatgagaactccgacaggggtggcagcagcaagcacaataccattaaaaagcctcaagcccaaggcagaagacctatctgcatttgagccctcaaactcaccttgcagagcgccaagtcccgagtggccttctttgaagagctctagcaggtgacccagccaccccaggacctgccacttctcctgctaccgggaccgcgggatggaccagatatcaagagagccatccatagggagctggctgggggtttccgtgggagctccagaactttccccagctgagtgaagagcccagcccctcttatgtgcaattgccttgaactacgaccctgtagagatttctctcatggcgttctagttctctgacctgagtctttgttttaagaagtatttgtcttcctttgtctaatgtgggattcctgactcccttcgtccaaggcaccggtgtgtgtgtgtcttgcactccagagctgacctccaccgcccagcctgggaagtcattgtagggagtgagacactgaagccctgagaagccagtgccatcatccccaccccgcccagggttccggaacattcattcccccaccggtgaggacctggcatgcagcgaagcagcccagcccggcggatcccaggccagcacgcctgccggcttctcatcgtcagggagcccgcccagagctcgtgacgagcaagtgctgggtccccgccaggcaccccgaggcggcgctctggctggcagctggtggggaataggcagggcagctgtggctggggagagactttaggcagaagctgtgatgcaggctgactgccagccgaggggctgggtagtgccgtgcgggagctgatggtacagggcactcgctgtccccctccggccaccctagaccagggtccgagaggcaggcaggagccactcatgtcttccccattgcccgacgcccatagacgctccttcctgtgtggggctggggtactccctggtcgtactgcagtcagcacccgtaacccggctatgaccagggatctgtaagccctgtggctccacaggtgctgcttctcactggcccagactctgagctccaccggcccagtctgcacggcccatctgcttcaccttccctcccagccacgtgccagtggccacagcccacttcccaacccactgttgtacccaggcctcactttgctgttgcccttgtccctcttcgggccctgaattttctgttccctgggggccagccagggccctttgtgcccctcccagcacaggcctgatgcaggtgtccactcacaggtggcgctcacctaggctgtcacaggacccacctccatgccaggcaacagagggccacagaaccacccccacggctcactccttggtctggggccaccttcttgccctttctttttttttttttttttttttttccgagatggagtctctctctgtcacccaggtgggagtgtggtggcacaatctcggctcactgcaacctccacctcctgagttcaagcaattctcctgcctcagcctcccaagtagctgggactacaggcatgcaccaccacacttggccaatgttctgtatttttaatagggacggggttttgccatgttagctaggctggtctcaaactcacacctgggattacaggcatgagccactgcacccagccccttcttgccctttcttttctccatggctgatgctgctgtggccagccagggcccttgagatccttccagtttggctgttatgcaaagcaggtgatttgtcttaatcagataaaagatagaggctatgggggcctcaagatttttggagagcagaggtggtctctggcaattccatctggttttgagaaacttagcagctcacagagcacagagatcctgccttcttcctactatcaggctgacctaatggggttgggctgctcggcaactgcttgggtcaccttgccccaaggaaaccagccctgggtgccacccagccacttagggtctacagggtgggactccagacctagagcgtaagtatggatgttgtggccctgtgtcttcctagtgtgacccagccaggagcggaagcttcaggcgtttgtaaagtgaggtctggctctgcctcctccgttttttttttttttctgtttctgtttctgttttttttttgagatggagtctcgctctgtcgcccaggctggagtgcagtgtcacgatctcagctcactgcaacctccgcctcccaggtacaagagattctcctgcctcagcctcccgagtagctgggactacaggcgtgtgccaccatgcctggctaatttttgtatttttagtagagatggggtttcgccatgttagccagactggtctcgaactcctgacctcaggtgatcctcccaccccggcttcccaaagttctgggattataggcgtgagccaccatgcccggtctcttctcagtcttgaagcccatccctggatttccaccaggagttactttcctcctgacctgtaaatttgttctttaacaatggctgcaggtgggagcatatggtggtttataaaaacgctgtcgggctttgtttccttctttagctgccgtgtctacttctgaagtctgggaagtgccaagccacgcggcctcaagggagctggctggtgtttgagctgtggcagaagcacctggggctccagggagcaggctgggaactgcaggaccttgctcagccaggagcacttccccctccttgaggcaggaatactgaggtgcctccccacagatggagaaggtggagaggaggatgggcctcaggagcatctcaagccccagtagcaggagaaagaaagaaagagatgcctggttttcacagactggttcctgtggctgggatgactgcatccttttttttttttttttgagacggagtttttgcctttgtcgcccaggctggagtgcaatggcgtgatctcggctcaccgcaacctccgcctcccggattcaagcaattctcctgcctcagcctcccgagtagctgggattacaggcacgcacctccacgtccggctaattttgtatttttagtggagacggggtttctccatgtcggtcaggctggtctcgaactcccgacctcaggtgatctgcccacctcggcctcccaaagtgctgggattacaggcatgagccaccgcgcttggccagactgcgtcctttttaagcgaacattttagggcctgggagtttgtcaagtaaggaagtctcaagcccaaagagcagcgtcctgaccatggtggtttcattacgagcccttctgctggctctcaggcagaagccccacagcaccgggaccattcatgaggtcactgcccagctcatgatgtccgtgaggctgtccttttggccagtagccgtgtgcagctgtgtggcacagatggcttcgttcatcctgatcaaggccccacctcagccacagcagtccccccaacctgtgttgtccaccctattattcatgtacctgccaggccctgctagatagcaccccgtggcattacataacacttcatgagtggctgtgtcttgtaattttggggacaggtttctctctttccctctcttttttttgtcaaaagcccagagactgacaaccagctgcagtgtctaagtgttcctcactgacagggtggggcctcaccacccctggagggagcagcgttggcagggagacagcctggcccagtgaccctgggcccaagccagcccctccagggctttcagggaagcgccatccattttcaaagatgtcaaacgtcacttcttcctgtagggcccgagtcctgcctcctatcagggccagatcatagaaggctattttctattctggggaacgattataacttaaatgattgttttaataaaaattctaagctggaaaatacttgccttggg

SEQ ID NO: 12539 - protein, 548 aa, Homo sapiens; identical to SEQ ID NO: 2158

SEQ ID NO: 12540 - DNA, 6027 bp, Homo sapiens
cggagtgccgggtcgcgcctgcaccgaaggtcccggctcctgtgccctccctgcagccgtcagggcccgtcccccaactcccctttccgctcaggcagggtcctcgcggcccatgctggccgctggggacccgcgcagcccagaccgttcccgggccgggcagccggccaccatggtggccctgaggcctgtgcagcaactccaggggggctaaagggctcagagtgcaggccgtggggcgcgagggtcccgggcctgagccccgcgccatggccggggccatcgcttcccgcatgagcttcagctctctcaagaggaagcaacccaagacgttcaccgtgaggatcgtcaccatggacgccgagatggagttcaattgcgagtcttgctctgtcaccctagctggagtgcagtggcgtgatcttggtttactgcaacctctgcctcccaagttcaagcgattctcctgcctcagcttcccaagtagctgggactacagatgaagtggaaagggaaggacctctttgatttggtgtgccggactctggggctccgagaaacctggttctttggactgcagtacacaatcaaggacacagtggcctggctcaaaatggacaagaaggtactggatcatgatgtttcaaaggaagaaccagtcacctttcacttcttggccaaattttatcctgagaatgctgaagaggagctggttcaggagatcacacaacatttattcttcttacaggtaaagaagcagattttagatgaaaagatctactgccctcctgaggcttctgtgctcctggcttcttacgccgtccaggccaagtatggtgactacgaccccagtgttcacaagcggggatttttggcccaagaggaattgcttccaaaaagggtaataaatctgtatcagatgactccggaaatgtgggaggagagaattactgcttggtacgcagagcaccgaggccgagccagggatgaagctgaaatggaatatctgaagatagctcaggacctggagatgtacggtgtgaactactttgcaatccggaataaaaagggcacagagctgctgcttggagtggatgccctggggcttcacatttatgaccctgagaacagactgacccccaagatctccttcccgtggaatgaaatccgaaacatctcgtacagtgacaaggagtttactattaaaccactggataagaaaattgatgtcttcaagtttaactcctcaaagcttcgtgttaataagctgattctccagctatgtatcgggaaccatgatctatttatgaggagaaggaaagccgattctttggaagttcagcagatgaaagcccaggccagggaggagaaggctagaaagcagatggagcggcagcgcctcgctcgagagaagcagatgagggaggaggctgaacgcacgagggatgagttggagaggaggctgctgcagatgaaagaagaagcaacaatggccaacgaagcactgatgcggtctgaggagacagctgacctgttggctgaaaaggcccagatcaccgaggaggaggcaaaacttctggcccagaaggccgcagaggctgagcaggaaatgcagcgcatcaaggccacagcgattcgcacggaggaggagaagcgcctgatggagcagaaggtgctggaagccgaggtgctggcactgaagatggctgaggagtcagagaggagggccaaagaggcagatcagctgaagcaggacctgcaggaagcacgcgaggcggagcgaagagccaagcagaagctcctggagattgccaccaagcccacgtacccgcccatgaacccaattccagcaccgttgcctcctgacataccaagcttcaacctcattggtgacagcctgtctttcgacttcaaagatactgacatgaagcggctttccatggagatagagaaagaaaaagtggaatacatggaaaagagcaagcatctgcaggagcagctcaatgaactcaagacagaaatcgaggccttgaaactgaaagagagggagacagctctggatattctgcacaatgagaactccgacaggggtggcagcagcaagcacaataccattaaaaagcctcaagcccaaggcagaagacctatctgcatttgagccctcaaactcaccttgcagagcgccaagtcccgagtggccttctttgaagagctctagcaggtgacccagccaccccaggacctgccacttctcctgctaccgggaccgcgggatggaccagatatcaagagagccatccatagggagctggctgggggtttccgtgggagctccagaactttccccagctgagtgaagagcccagcccctcttatgtgcaattgccttgaactacgaccctgtagagatttctctcatggcgttctagttctctgacctgagtctttgttttaagaagtatttgtcttcctttgtctaatgtgggattcctgactcccttcgtccaaggcaccggtgtgtgtgtgtcttgcactccagagctgacctccaccgcccagcctgggaagtcattgtagggagtgagacactgaagccctgagaagccagtgccatcatccccaccccgcccagggttccggaacattcattcccccaccggtgaggacctggcatgcagcgaagcagcccagcccggcggatcccaggccagcacgcctgccggcttctcatcgtcagggagcccgcccagagctcgtgacgagcaagtgctgggtccccgccaggcaccccgaggcggcgctctggctggcagctggtggggaataggcagggcagctgtggctggggagagactttaggcagaagctgtgatgcaggctgactgccagccgaggggctgggtagtgccgtgcgggagctgatggtacagggcactcgctgtccccctccggccaccctagaccagggtccgagaggcaggcaggagccactcatgtcttccccattgcccgacgcccatagacgctccttcctgtgtggggctggggtactccctggtcgtactgcagtcagcacccgtaacccggctatgaccagggatctgtaagccctgtggctccacaggtgctgcttctcactggcccagactctgagctccaccggcccagtctgcacggcccatctgcttcaccttccctcccagccacgtgccagtggccacagcccacttcccaacccactgttgtacccaggcctcactttgctgttgcccttgtccctcttcgggccctgaattttctgttccctgggggccagccagggccctttgtgcccctcccagcacaggcctgatgcaggtgtccactcacaggtggcgctcacctaggctgtcacaggacccacctccatgccaggcaacagagggccacagaaccacccccacggctcactccttggtctggggccaccttcttgccctttctttttttttttttttttttttttccgagatggagtctctctctgtcacccaggtgggagtgtggtggcacaatctcggctcactgcaacctccacctcctgagttcaagcaattctcctgcctcagcctcccaagtagctgggactacaggcatgcaccaccacacttggccaatgttctgtatttttaatagggacggggttttgccatgttagctaggctggtctcaaactcacacctgggattacaggcatgagccactgcacccagccccttcttgccctttcttttctccatggctgatgctgctgtggccagccagggcccttgagatccttccagtttggctgttatgcaaagcaggtgatttgtcttaatcagataaaagatagaggctatgggggcctcaagatttttggagagcagaggtggtctctggcaattccatctggttttgagaaacttagcagctcacagagcacagagatcctgccttcttcctactatcaggctgacctaatggggttgggctgctcggcaactgcttgggtcaccttgccccaaggaaaccagccctgggtgccacccagccacttagggtctacagggtgggactccagacctagagcgtaagtatggatgttgtggccctgtgtcttcctagtgtgacccagccaggagcggaagcttcaggcgtttgtaaagtgaggtctggctctgcctcctccgttttttttttttttctgtttctgtttctgttttttttttgagatggagtctcgctctgtcgcccaggctggagtgcagtgtcacgatctcagctcactgcaacctccgcctcccaggtacaagagattctcctgcctcagcctcccgagtagctgggactacaggcgtgtgccaccatgcctggctaatttttgtatttttagtagagatggggtttcgccatgttagccagactggtctcgaactcctgacctcaggtgatcctcccaccccggcttcccaaagttctgggattataggcgtgagccaccatgcccggtctcttctcagtcttgaagcccatccctggatttccaccaggagttactttcctcctgacctgtaaatttgttctttaacaatggctgcaggtgggagcatatggtggtttataaaaacgctgtcgggctttgtttccttctttagctgccgtgtctacttctgaagtctgggaagtgccaagccacgcggcctcaagggagctggctggtgtttgagctgtggcagaagcacctggggctccagggagcaggctgggaactgcaggaccttgctcagccaggagcacttccccctccttgaggcaggaatactgaggtgcctccccacagatggagaaggtggagaggaggatgggcctcaggagcatctcaagccccagtagcaggagaaagaaagaaagagatgcctggttttcacagactggttcctgtggctgggatgactgcatccttttttttttttttttgagacggagtttttgcctttgtcgcccaggctggagtgcaatggcgtgatctcggctcaccgcaacctccgcctcccggattcaagcaattctcctgcctcagcctcccgagtagctgggattacaggcacgcacctccacgtccggctaattttgtatttttagtggagacggggtttctccatgtcggtcaggctggtctcgaactcccgacctcaggtgatctgcccacctcggcctcccaaagtgctgggattacaggcatgagccaccgcgcttggccagactgcgtcctttttaagcgaacattttagggcctgggagtttgtcaagtaaggaagtctcaagcccaaagagcagcgtcctgaccatggtggtttcattacgagcccttctgctggctctcaggcagaagccccacagcaccgggaccattcatgaggtcactgcccagctcatgatgtccgtgaggctgtccttttggccagtagccgtgtgcagctgtgtggcacagatggcttcgttcatcctgatcaaggccccacctcagccacagcagtccccccaacctgtgttgtccaccctattattcatgtacctgccaggccctgctagatagcaccccgtggcattacataacacttcatgagtggctgtgtcttgtaattttggggacaggtttctctctttccctctcttttttttgtcaaaagcccagagactgacaaccagctgcagtgtctaagtgttcctcactgacagggtggggcctcaccacccctggagggagcagcgttggcagggagacagcctggcccagtgaccctgggcccaagccagcccctccagggctttcagggaagcgccatccattttcaaagatgtcaaacgtcacttcttcctgtagggcccgagtcctgcctcctatcagggccagatcatagaaggctattttctattctggggaacgattataacttaaatgattgttttaataaaaattctaagctggaaaatacttgccttggg

SEQ ID NO: 12541 - protein, 552 aa, Homo sapiens; identical to SEQ ID NO: 12493

SEQ ID NO: 12542 - DNA, 5662 bp, Homo sapiens
cggagtgccgggtcgcgcctgcaccgaaggtcccggctcctgtgccctccctgcagccgtcagggcccgtcccccaactcccctttccgctcaggcagggtcctcgcggcccatgctggccgctggggacccgcgcagcccagaccgttcccgggccgggcagccggccaccatggtggccctgaggcctgtgcagcaactccaggggggctaaagggctcagagtgcaggccgtggggcgcgagggtcccgggcctgagccccgcgccatggccggggccatcgcttcccgcatgagcttcagctctctcaagaggaagcaacccaagacgttcaccgtgaggatcgtcaccatggacgccgagatggagttcaattgcgaggtaaagaagcagattttagatgaaaagatctactgccctcctgaggcttctgtgctcctggcttcttacgccgtccaggccaagtatggtgactacgaccccagtgttcacaagcggggatttttggcccaagaggaattgcttccaaaaagggtaataaatctgtatcagatgactccggaaatgtgggaggagagaattactgcttggtacgcagagcaccgaggccgagccagggatgaagctgaaatggaatatctgaagatagctcaggacctggagatgtacggtgtgaactactttgcaatccggaataaaaagggcacagagctgctgcttggagtggatgccctggggcttcacatttatgaccctgagaacagactgacccccaagatctccttcccgtggaatgaaatccgaaacatctcgtacagtgacaaggagtttactattaaaccactggataagaaaattgatgtcttcaagtttaactcctcaaagcttcgtgttaataagctgattctccagctatgtatcgggaaccatgatctatttatgaggagaaggaaagccgattctttggaagttcagcagatgaaagcccaggccagggaggagaaggctagaaagcagatggagcggcagcgcctcgctcgagagaagcagatgagggaggaggctgaacgcacgagggatgagttggagaggaggctgctgcagatgaaagaagaagcaacaatggccaacgaagcactgatgcggtctgaggagacagctgacctgttggctgaaaaggcccagatcaccgaggaggaggcaaaacttctggcccagaaggccgcagaggctgagcaggaaatgcagcgcatcaaggccacagcgattcgcacggaggaggagaagcgcctgatggagcagaaggtgctggaagccgaggtgctggcactgaagatggctgaggagtcagagaggagggccaaagaggcagatcagctgaagcaggacctgcaggaagcacgcgaggcggagcgaagagccaagcagaagctcctggagattgccaccaagcccacgtacccgcccatgaacccaattccagcaccgttgcctcctgacataccaagcttcaacctcattggtgacagcctgtctttcgacttcaaagatactgacatgaagcggctttccatggagatagagaaagaaaaagtggaatacatggaaaagagcaagcatctgcaggagcagctcaatgaactcaagacagaaatcgaggccttgaaactgaaagagagggagacagctctggatattctgcacaatgagaactccgacaggggtggcagcagcaagcacaataccattaaaaagcctcaagcccaaggcagaagacctatctgcatttgagccctcaaactcaccttgcagagcgccaagtcccgagtggccttctttgaagagctctagcaggtgacccagccaccccaggacctgccacttctcctgctaccgggaccgcgggatggaccagatatcaagagagccatccatagggagctggctgggggtttccgtgggagctccagaactttccccagctgagtgaagagcccagcccctcttatgtgcaattgccttgaactacgaccctgtagagatttctctcatggcgttctagttctctgacctgagtctttgttttaagaagtatttgtcttcctttgtctaatgtgggattcctgactcccttcgtccaaggcaccggtgtgtgtgtgtcttgcactccagagctgacctccaccgcccagcctgggaagtcattgtagggagtgagacactgaagccctgagaagccagtgccatcatccccaccccgcccagggttccggaacattcattcccccaccggtgaggacctggcatgcagcgaagcagcccagcccggcggatcccaggccagcacgcctgccggcttctcatcgtcagggagcccgcccagagctcgtgacgagcaagtgctgggtccccgccaggcaccccgaggcggcgctctggctggcagctggtggggaataggcagggcagctgtggctggggagagactttaggcagaagctgtgatgcaggctgactgccagccgaggggctgggtagtgccgtgcgggagctgatggtacagggcactcgctgtccccctccggccaccctagaccagggtccgagaggcaggcaggagccactcatgtcttccccattgcccgacgcccatagacgctccttcctgtgtggggctggggtactccctggtcgtactgcagtcagcacccgtaacccggctatgaccagggatctgtaagccctgtggctccacaggtgctgcttctcactggcccagactctgagctccaccggcccagtctgcacggcccatctgcttcaccttccctcccagccacgtgccagtggccacagcccacttcccaacccactgttgtacccaggcctcactttgctgttgcccttgtccctcttcgggccctgaattttctgttccctgggggccagccagggccctttgtgcccctcccagcacaggcctgatgcaggtgtccactcacaggtggcgctcacctaggctgtcacaggacccacctccatgccaggcaacagagggccacagaaccacccccacggctcactccttggtctggggccaccttcttgccctttctttttttttttttttttttttttccgagatggagtctctctctgtcacccaggtgggagtgtggtggcacaatctcggctcactgcaacctccacctcctgagttcaagcaattctcctgcctcagcctcccaagtagctgggactacaggcatgcaccaccacacttggccaatgttctgtatttttaatagggacggggttttgccatgttagctaggctggtctcaaactcacacctgggattacaggcatgagccactgcacccagccccttcttgccctttcttttctccatggctgatgctgctgtggccagccagggcccttgagatccttccagtttggctgttatgcaaagcaggtgatttgtcttaatcagataaaagatagaggctatgggggcctcaagatttttggagagcagaggtggtctctggcaattccatctggttttgagaaacttagcagctcacagagcacagagatcctgccttcttcctactatcaggctgacctaatggggttgggctgctcggcaactgcttgggtcaccttgccccaaggaaaccagccctgggtgccacccagccacttagggtctacagggtgggactccagacctagagcgtaagtatggatgttgtggccctgtgtcttcctagtgtgacccagccaggagcggaagcttcaggcgtttgtaaagtgaggtctggctctgcctcctccgttttttttttttttctgtttctgtttctgttttttttttgagatggagtctcgctctgtcgcccaggctggagtgcagtgtcacgatctcagctcactgcaacctccgcctcccaggtacaagagattctcctgcctcagcctcccgagtagctgggactacaggcgtgtgccaccatgcctggctaatttttgtatttttagtagagatggggtttcgccatgttagccagactggtctcgaactcctgacctcaggtgatcctcccaccccggcttcccaaagttctgggattataggcgtgagccaccatgcccggtctcttctcagtcttgaagcccatccctggatttccaccaggagttactttcctcctgacctgtaaatttgttctttaacaatggctgcaggtgggagcatatggtggtttataaaaacgctgtcgggctttgtttccttctttagctgccgtgtctacttctgaagtctgggaagtgccaagccacgcggcctcaagggagctggctggtgtttgagctgtggcagaagcacctggggctccagggagcaggctgggaactgcaggaccttgctcagccaggagcacttccccctccttgaggcaggaatactgaggtgcctccccacagatggagaaggtggagaggaggatgggcctcaggagcatctcaagccccagtagcaggagaaagaaagaaagagatgcctggttttcacagactggttcctgtggctgggatgactgcatccttttttttttttttttgagacggagtttttgcctttgtcgcccaggctggagtgcaatggcgtgatctcggctcaccgcaacctccgcctcccggattcaagcaattctcctgcctcagcctcccgagtagctgggattacaggcacgcacctccacgtccggctaattttgtatttttagtggagacggggtttctccatgtcggtcaggctggtctcgaactcccgacctcaggtgatctgcccacctcggcctcccaaagtgctgggattacaggcatgagccaccgcgcttggccagactgcgtcctttttaagcgaacattttagggcctgggagtttgtcaagtaaggaagtctcaagcccaaagagcagcgtcctgaccatggtggtttcattacgagcccttctgctggctctcaggcagaagccccacagcaccgggaccattcatgaggtcactgcccagctcatgatgtccgtgaggctgtccttttggccagtagccgtgtgcagctgtgtggcacagatggcttcgttcatcctgatcaaggccccacctcagccacagcagtccccccaacctgtgttgtccaccctattattcatgtacctgccaggccctgctagatagcaccccgtggcattacataacacttcatgagtggctgtgtcttgtaattttggggacaggtttctctctttccctctcttttttttgtcaaaagcccagagactgacaaccagctgcagtgtctaagtgttcctcactgacagggtggggcctcaccacccctggagggagcagcgttggcagggagacagcctggcccagtgaccctgggcccaagccagcccctccagggctttcagggaagcgccatccattttcaaagatgtcaaacgtcacttcttcctgtagggcccgagtcctgcctcctatcagggccagatcatagaaggctattttctattctggggaacgattataacttaaatgattgttttaataaaaattctaagctggaaaatacttgccttggg

SEQ ID NO: 12543 - protein, 507 aa, Homo sapiens; identical to SEQ ID NO: 2162

SEQ ID NO: 12544 - DNA, 588 bp, Homo sapiens
actttgcatatctgcttgcttttgcattagagcttggtcagcactgttgagagatttgcaaatgcaactaacagggctttcttttagcatcctaccctttcaaaaatccaggaggcaaacaatgatcaatgttgtcataagtaatgcagaggatggcaataataataatacctgactttcaccataagccatgtgctgtgcgaaatgcttacctgtattgttttacttcatcctcatcatcccctataaggcagatgctattatgaccctcactctacagatgaggaagttgaggcttagagagaggatgccttactcaaggcctcagaaggggtacttcagcacccccccacttcccttcaggatcctctaaggccagtgctctcatttgacaaatgaaagacagatttggagagacctgagatcttttggacatcaggtttatgtgtcaagcatagttttatttattttattttattttgttattttctgagatcacgccattgcactccagcctgggtgacagagcgagactctgtctcaaaaaaaaaaaaaaaaaaaattgacaaattaattctcttaagattc

SEQ ID NO: 12545 - protein, 60 aa, Homo sapiens [sequence omitted]

SEQ ID NO: 12546 - DNA, 1036 bp, Homo sapiens
cccggtctcttctcagtcttgaagcccatccctggatttccaccaggagttactttcctcctgacctgtaaatttgttctttaacaatggctgcaggtgggagcatatggtggtttataaaaacgctgtcgggctttgtttccttctttagctgccgtgtctacttctgaagtctgggaagtgccaagccacgcggcctcaagggagctggctggtgtttgagctgtggcagaagcacctggggctccagggagcaggctgggaactgcaggaccttgctcagccaggagcacttccccctccttgaggcaggaatactgaggtgcctccccacagatggagaaggtggagaggaggatgggcctcaggagcatctcaagccccagtagcaggagaaagaaagaaagagatgcctggttttcacagactggttcctgtggctgggatgactgcatccttttttttttttttttgagacggagtttttgcctttgtcgcccaggctggagtgcaatggcgtgatctcggctcaccgcaacctccgcctcccggattcaagcaattctcctgcctcagcctcccgagtagctgggattacaggcacgcacctccacgtccggctaattttgtatttttagtggagacggggtttctccatgtcggtcaggctggtctcgaactcccgacctcaggtgatctgcccacctcggcctcccaaagtgctgggattacaggcatgagccaccgcgcttggccagactgcgtcctttttaagcgaacattttagggcctgggagtttgtcaagtaaggaagtctcaagcccaaagagcagcgtcctgaccatggtggtttcattacgagcccttctgctggcttttcagggaagcgccatccattttcaaagatgtcaaacgtcacttcttcctgtagggcccgagtcctgcctcctatcagggccagatcatagaaggctattttctattctggggaacgattataacttaaatgattgttttaataaaaattctaagctgg

SEQ ID NO: 12547 - protein, 63 aa, Homo sapiens
MVVSLRALLLAFQGSAIHFQRCQTSLLPVGPESCLLSGPDHRRLFSILGNDYNLNDCFNKNSK

SEQ ID NO: 12548 - DNA, 1098 bp, Homo sapiens
ccccgattcccctttcccactagggctcccctctgttcactggctctcctcaccctaagtctgcagccaccaggaccagggagggggtgggttgcgggggtcctccttcctgccccttggctcaccttcccccatccacgcaccaggagcggagagcccggaactaagaactgtagacccagagaggtgagactggccccaagcacctgggtcctcaagaagagtcaccgtttccgtgccaggaggatccaaggtggggaaactgaggctgagagagaaggacgttgaccaaggtcacagggcaggagcagcaggcctgccagataaacgcaaatgttatgggacatcatcccttctggtggctcgagctccctggcattctgggtcctcactctgtgccaggcgctgtgcaagcactggcctggccagagcaggcattcagaagacattgtggccccaaccccacgcacacaggatcagtgctggggttgggacggggcccatcagccaagcaggtgggtccaggaggagctgggaggcttggagagggggctgcgcttagcctgtgctgccctacccagtggagctgagccggctctaatgaagtgggctagctgcaggccacattgatttcaagtctccgtggccacttcccagctggtaaatgtcactggagagtgcagccgtggcacctggcatgggtccagtagtgagtgggggctggcaggctgccagaggggctggggatgcccatgaaatgctgataccagtccagggtctccagagcctccagactctcccaccaatccctgaggaggggctgtgtcaggccagctgaagctgccacccccctggggacatctgcaaccaccagcccctctcctgctgtcaatatacaatggactgatgcccgttgctgggagggttgcccgtttctttactgggggggccgtttagggtggtctagagatgggcccagggcccaggagtcaaggcgcagccatgtgaggacccctcctggcccactgccctcccaaccctgagctgtctcctttgataactggctcaggacaagctaagagtaaacagccataacca

SEQ ID NO: 12549 - protein, 98 aa, Homo sapiens
MLWDIIPSGGSSSLAFWVLTLCQALCKHWPGQSRHSEDIVAPTPRTQDQCWGWDGAHQPSRWVQEELGGLERGLRLACAALPSGAEPALMKWASCRPH

SEQ ID NO: 12550 - DNA, 521 bp, Homo sapiens
cccggggctccttctccccttcggccccgattcccctttcccactagggctcccctctgttcactggctctcctcaccctaagtctgcagccaccaggaccagggagggggtgggttgcgggggtcctccttcctgccccttggctcaccttcccccatccacgcaccaggagcggagagcccggaactaagaactgtagacccagagaggtgagactggccccaagcacctgggtcctcaagaagagtcaccgtttccgtgccaggaggatccaaggtggggaaactgaggctgagagagaaggacgttgaccaaggtcacagggcaggagcagcagagacagagtctcgctatgttgctcagactggtctccaacttctggctcaagcgatcctcctgccttgacctcgctaagtgctgggattaccgaatgggagccaccatgcccagtctttactcaaaattcaccttctccctgggtcttctctggagaccctagctttaaaaataaacaagtaaa

SEQ ID NO: 12551 - protein, 48 aa, Homo sapiens [sequence omitted]

SEQ ID NO: 12552 - DNA, 250 bp, Homo sapiens
agcggagagcccggaactaagaactgtagacccagagaggtgagactggccccaagcacctgggtcctcaagaagagtcaccgtttccgtgccaggaggatccaaggtggggaaactgaggctgagagagaaggacccttgacctcgctaagtgctgggattaccgaatgggagccaccatgcccagtctttactcaaaattcaccttctccctgggtcttctctggagaccctagctttaaaaataaac

SEQ ID NO: 12553 - protein, 82 aa, Homo sapiens
SGEPGTKNCRPREVRLAPSTWVLKKSHRFRARRIQGGETEAEREGPLTSLSAGITEWEPPCPVFTQNSPSPWVFSGDPSFKN

SEQ ID NO: 12554 - DNA, 4409 bp, Homo sapiens
cggccgcgctcgtctcgccgggctgttcgcgggcaggccctgccctgaagggacgaatcggcttggagcgcgggaggtggagtcggccccggcggtcgctccctggacccaacccgaggctgacccaggcccctgcccatgcggggcgcccctggctcggaagagtcccccgggccgggagcagctccaggcagcggccccggaggaagaggaagaagggacagtgctcagcttgggggacccggaccctcgccgcggcatttggagccgggggcagtcccgaactctgtgcttggcaccgccgctccgagtagggcagcgcctgccgggaccctgacccggaccccctgcgcctcgtaggcggcggcgccgccgcgccaccctgttcttccgtgtctccctctgcctggcggcagtcacggccaagaacctacattaagaaacgcattcagatgcatcagccgtttgtaaagcacctgtcgtgagccagagagtattatgagggaggccgaggacttcatgctccggacagagaaacggcgctgggattagggattgccacttctgagaggatgctgggaatctgcagggggagacggaaattcttggctgcctcgttgagtcttctctgcatcccagccatcacctggatttacctgttttctgggagcttcgaagatggaaagcccgtgtctctgtcaccgctggagtcccaggcacacagccccaggtacacggcctccagccagcgggagcgcgagagcctggaggtgcgcatgcgcgaggtggaggaggagaaccgcgccctccgcaggcagctcagcctggcccagggccgagccccatcccatcgccgaggcaaccactccaagacctactccatggaggagggcactggagacagcgagaaccttcgggctggcatcgtggcaggcaacagctccgagtgtgggcagcagccggtcgtggagaaatgcgagacaatccacgttgctattgtctgcgccggatacaatgccagccgggatgtcgtcaccctggtcaaatccgtcctgttccatagacggaaccctctgcacttccaccttattgctgactccattgcggagcagatcctggccacgctcttccagacctggatggtgcccgctgtgcgtgtggacttctacaatgcagacgagctcaagtctgaagtttcctggatccccaataaacattactctgggatttatggtctgatgaagcttgtcctgaccaagactcttcctgccaacctggagagagtcatcgtccttgacacggatatcacctttgccactgacattgcagagctgtgggctgtgttccacaagttcaaaggtcagcaagtcctgggcttggtggagaaccagagtgactggtaccttggaaacctgtggaaaaatcaccgcccatggccagcccttggaagaggctacaacacaggggtgatcctgttacttctggataagctgcggaagatgaaatgggagcagatgtggaggctgaccgcagagagggagctcatgggcatgctctctacatccttagctgaccaggatattttcaatgccgtcatcaaacaaaaccccttccttgtgtaccagctcccctgcttctggaatgtgcagctgtcagaccacacccgctccgagcagtgctacagagacgtgtctgatctaaaggtcattcactggaactcccccaagaagctccgggtgaagaacaagcatgtggagttttttcgcaacctctacctgaccttcctggagtatgacggcaatcttctgaggcgggaactgtttggctgccccagtgaggctgatgtcaacagtgaaaacctccagaagcagctgtctgagctggacgaggacgacctgtgctatgagttccggcgagagcgcttcactgtccaccgcacccacctgtacttcctgcactacgagtatgagcctgcagcagacagcacggacgtcaccctggtcgctcagctgtccatggacaggctccagatgctggaggccatctgcaagcactgggaggggcccatcagcctggccctctacctgtcagacgccgaggcccagcagttcctccgctacgcacagggctctgaggtgcttatgagccgccacaacgtgggctaccacatcgtgtacaaggagggccagttctaccccgtgaacctgctgcgcaacgtggccatgaagcacatcagcactccctacatgttcctgtctgacattgacttcctgcccatgtatgggctctatgagtacctcaggaagtctgtcatccagctcgatcttgccaacaccaagaaagcaatgattgtccccgcgttcgagacactgcgctaccggctgtccttccccaagtcaaaagcggagttgctgtcaatgctggacatggggaccctcttcacattcaggtaccacgtctggacgaaaggccacgcacccacaaacttcgccaagtggcggaccgccaccacgccttaccgggttgagtgggaggccgattttgagccgtatgttgttgtgagacgtgactgcccggagtacgaccggaggtttgtaggctttggctggaacaaagtggctcatatcatggagctggatgtgcaggagtatgagttcattgtgctgcccaacgcctacatgatccacatgcctcatgcccccagcttcgacattaccaagttccgttccaacaagcaataccgcatctgtctcaaaaccctcaaggaagagtttcagcaggacatgtcccgccgctacggctttgctgccctgaaatatctcacagccgagaacaacagctagcaccaagaagcccaccactagggggagacatgctgtaggggaagtgccactcgctgtttggggcccggccttcaaattcaaaattgagccatgctttttcggtttgtttttatttatctctttggcccagccaagctgccctcactacagagaccttggacaaggatccagccagtccctctctgccccacaaccctgcattcccagaggttagctatgcagcccacctagatgagtctcttcaagaatgggaaatcaaggggtgacagggagtaaaagggttatcatcttactgcaaagccacaagatcagggcagggctttaggatgttctggatgctttttaataattatgcttcccatcataactggggagaaagggaagtcagggttctaggggttattcgtcccaggaaatagaagtgaaattgtctttattaagtgaaaactttcccctttgccctgcaatgtagctgggcattcaaacggagggcaaaccgatgatctaaaccaaccacttggaaaaacccaatggggacattgtaaccagagggtcctggaggtggggttgatgggtttccttatccccaaagtcactcctgttttgttttgtttttctttgggggttttgtttatttttggggctggcaatccaaaatagaaaatctgatcctttgaggctctaaaggaaaatcagctgcctctaccaaccaccctctatcagcagtggcccaggaaggaggtcaagcatcttcggccgatatttaaacatgggcagcttccttcaggatgatcaccgaggctcccgtgactttgaactccctactctccagaatccaggggctatagcgatggggactgcggaattacgagggctggctgttttacaccggtcacattttctattggcagtgactgattcatgggaaagggctttgaaggaactacttcagtgcacacacaaggtacgaacctctcaggcctttcgaagaactttcataattcatgaaagcccagttctgaagattcacgtatccatctggagacctacaggaagaaagtgattgggttcctctggttcttgcctgcttcactgtggatgggaagaggtgacaacctcagtctccctttgggacctgtccaagggtaggcaaccaccttcaccttcacacagattgaggagacactggactttttacccattttctttaatcttcaatattaatattgtgtttacattgatgagaacaagagttaatgccctaccctctgctgggctgtttgtattgagttgcaatgtgaccagcgaaagctgcatttaataaatgaaagtacagactgtttcttccccattcccctcccactcttgcaggaagctactgagacacaccttgacatagagagctaaattgcagtggataaacagcaacttcacactttctgttcccccattctatttttctcatcatttgaactttagccttttttttccccttttgcctgaagttagatcccactctgtctctaactcaaaccatcttcaagttttccattccgcatctttctc

SEQ ID NO: 12555 - protein, 756 aa, Homo sapiens; identical to SEQ ID NO: 2170

SEQ ID NO: 12556 - DNA, 4253 bp, Homo sapiens
gcggccgcgctcgtctcgccgggctgttcgcgggcaggccctgccctgaagggacgaatcggcttggagcgcgggaggtggagtcggccccggcggtcgctccctggacccaacccgaggctgacccaggcccctgcccatgcggggcgcccctggctcggaagagtcccccgggccgggagcagctccaggcagcggccccggaggaagaggaagaagggacagtgctcagcttgggggacccggaccctcgccgcggcatttggagccgggggcagtcccgaactctgtgcttggcaccgccgctccgagtagggcagcgcctgccgggaccctgacccggaccccctgcgcctcgtaggcggcggcgccgccgcgccaccctgttcttccgtgtctccctctgcctggcggcagtcacggccaagagagtattatgagggaggccgaggacttcatgctccggacagagaaacggcgctgggattagggattgccacttctgagaggatgctgggaatctgcagggggagacggaaattcttggctgcctcgttgagtcttctctgcatcccagccatcacctggatttacctgttttctgggagcttcgaagatggaaagcccgtgtctctgtcaccgctggagtcccaggcacacagccccaggtacacggcctccagccagcgggagcgcgagagcctggaggtgcgcatgcgcgaggtggaggaggagaaccgcgccctccgcaggcagctcagcctggcccagggccgagccccatcccatcgccgaggcaaccactccaagacctactccatggaggagggcactggagacagcgagaaccttcgggctggcatcgtggcaggcaacagctccgagtgtgggcagcagccggtcgtggagaaatgcgagacaatccacgttgctattgtctgcgccggatacaatgccagccgggatgtcgtcaccctggtcaaatccgtcctgttccatagacggaaccctctgcacttccaccttattgctgactccattgcggagcagatcctggccacgctcttccagacctggatggtgcccgctgtgcgtgtggacttctacaatgcagacgagctcaagtctgaagtttcctggatccccaataaacattactctgggatttatggtctgatgaagcttgtcctgaccaagactcttcctgccaacctggagagagtcatcgtccttgacacggatatcacctttgccactgacattgcagagctgtgggctgtgttccacaagttcaaaggtcagcaagtcctgggcttggtggagaaccagagtgactggtaccttggaaacctgtggaaaaatcaccgcccatggccagcccttggaagaggctacaacacaggggtgatcctgttacttctggataagctgcggaagatgaaatgggagcagatgtggaggctgaccgcagagagggagctcatgggcatgctctctacatccttagctgaccaggatattttcaatgccgtcatcaaacaaaaccccttccttgtgtaccagctcccctgcttctggaatgtgcagctgtcagaccacacccgctccgagcagtgctacagagacgtgtctgatctaaaggtcattcactggaactcccccaagaagctccgggtgaagaacaagcatgtggagttttttcgcaacctctacctgaccttcctggagtatgacggcaatcttctgaggcgggaactgtttggctgccccagtgaggctgatgtcaacagtgaaaacctccagaagcagctgtctgagctggacgaggacgacctgtgctatgagttccggcgagagcgcttcactgtccaccgcacccacctgtacttcctgcactacgagtatgagcctgcagcagacagcacggacgtcaccctggtcgctcagctgtccatggacaggctccagatgctggaggccatctgcaagcactgggaggggcccatcagcctggccctctacctgtcagacgccgaggcccagcagttcctccgctacgcacagggctctgaggtgcttatgagccgccacaacgtgggctaccacatcgtgtacaaggagggccagttctaccccgtgaacctgctgcgcaacgtggccatgaagcacatcagcactccctacatgttcctgtctgacattgacttcctgcccatgtatgggctctatgagtacctcaggaagtctgtcatccagctcgatcttgccaacaccaagaaagcaatgattgtccccgcgttcgagacactgcgctaccggctgtccttccccaagtcaaaagcggagttgctgtcaatgctggacatggggaccctcttcacattcaggtaccacgtctggacgaaaggccacgcacccacaaacttcgccaagtggcggaccgccaccacgccttaccgggttgagtgggaggccgattttgagccgtatgttgttgtgagacgtgactgcccggagtacgaccggaggtttgtaggctttggctggaacaaagtggctcatatcatggagctggatgtgcaggagtatgagttcattgtgctgcccaacgcctacatgatccacatgcctcatgcccccagcttcgacattaccaagttccgttccaacaagcaataccgcatctgtctcaaaaccctcaaggaagagtttcagcaggacatgtcccgccgctacggctttgctgccctgaaatatctcacagccgagaacaacagctagcaccaagaagcccaccactagggggagacatgctgtaggggaagtgccactcgctgtttggggcccggccttcaaattcaaaattgagccatgctttttcggtttgtttttatttatctctttggcccagccaagctgccctcactacagagaccttggacaaggatccagccagtccctctctgccccacaaccctgcattcccagaggttagctatgcagcccacctagatgagtctcttcaagaatgggaaatcaaggggtgacagggagtaaaagggttatcatcttactgcaaagccacaagatcagggcagggctttaggatgttctggatgctttttaataattatgcttcccatcataactggggagaaagggaagtcagggttctaggggttattcgtcccaggaaatagaagtgaaattgtctttattaagtgaaaactttcccctttgccctgcaatgtagctgggcattcaaacggagggcaaaccgatgatctaaaccaaccacttggaaaaacccaatggggacattgtaaccagagggtcctggaggtggggttgatgggtttccttatccccaaagtcactcctgttttgttttgtttttctttgggggttttgtttatttttggggctggcaatccaaaatagaaaatctgatcctttgaggctctaaaggaaaatcagctgcctctaccaaccaccctctatcagcagtggcccaggaaggaggtcaagcatcttcggccgatatttaaacatgggcagcttccttcaggatgatcaccgaggctcccgtgactttgaactccctactctccagaatccaggggctatagcgatggggactgcggaattacgagggctggctgttttacaccggtcacattttctattggcagtgactgattcatgggaaagggctttgaaggaactacttcagtgcacacacaaggtacgaacctctcaggcctttcgaagaactttcataattcatgaaagcccagttctgaagattcacgtatccatctggagacctacaggaagaaagtgattgggttcctctggttcttgcctgcttcactgtggatgggaagaggtgacaacctcagtctccctttgggacctgtccaagggtaggcaaccaccttcaccttcacacagattgaggagacactggactttttacccattttctttaatcttcaatattaatattgtgtttacattgatgagaacaagagttaatgccctaccctctgctgggctgtttgtattgagttgcaatgtgaccagcgaaagctgcatttaataaatgaaagtacagactgtttcttccccattcccctcccactcttgcaggaagctactgagacacaccttgacatagagagctaaattgcagtggataaacagcaacttcacactttctgttcccccattctatttttctcatcatttga

SEQ ID NO: 12557 - protein, 756 aa, Homo sapiens; identical to SEQ ID NO: 2170

SEQ ID NO: 12558 - DNA, 4193 bp, Homo sapiens
cggccgcgctcgtctcgccgggctgttcgcgggcaggccctgccctgaagggacgaatcggcttggagcgcgggaggtggagtcggccccggcggtcgctccctggacccaacccgaggctgacccaggcccctgcccatgcggggcgcccctggctcggaagagtcccccgggccgggagcagctccaggcagcggccccggaggaagaggaagaagggacagtgctcagcttgggggacccggaccctcgccgcggcatttggagccgggggcagtcccgaactctgtgcttggcaccgccgctccgagtagggcagcgcctgccgggaccctgacccggaccccctgcgcctcgtaggcggcggcgccgccgcgccaccctgttcttccgtgtctccctctgcctggcggcagtcacggccaagaacctacattaagaaacgcattcagatgcatcagccgtttgtaaagcacctgtcgtgagccagagagtattatgagggaggccgaggacttcatgctccggacagagaaacggcgctgggattagggattgccacttctgagaggatgctgggaatctgcagggggagacggaaattcttggctgcctcgttgagtcttctctgcatcccagccatcacctggatttacctgttttctgggagcttcgaagatggaaagcccgtgtctctgtcaccgctggagtcccaggcacacagccccaggtacacggcctccagccagcgggagcgcgagagcctggaggtgcgcatgcgcgaggtggaggaggagaaccgcgccctccgcaggcagctcagcctggcccagggccgagccccatcccatcgccgaggcaaccactccaagacctactccatggaggagggcactggagacagcgagaaccttcgggctggcatcgtggcaggcaacagctccgagtgtgggcagcagccggtcgtggagaaatgcgagacaatccacgttgctattgtctgcgccggatacaatgccagccgggatgtcgtcaccctggtcaaatccgtcctgttccatagacggaaccctctgcacttccaccttattgctgactccattgcggagcagatcctggccacgctcttccagacctggatggtgcccgctgtgcgtgtggacttctacaatgcagacgagctcaagtctgaagtttcctggatccccaataaacattactctgggatttatggtctgatgaagcttgtcctgaccaagactcttcctgccaacctggagagagtcatcgtccttgacacggatatcacctttgccactgacattgcagagctgtgggctgtgttccacaagttcaaaggtcagcaagtcctgggcttggtggagaaccagagtgactggtaccttggaaacctgtggaaaaatcaccgcccatggccagcccttggaagaggctacaacacaggggtgatcctgttacttctggataagctgcggaagatgaaatgggagcagatgtggaggctgaccgcagagagggagctcatgggcatgctctctacatccttagctgaccaggatattttcaatgccgtcatcaaacaaaaccccttccttgtgtaccagctcccctgcttctggaatgtgcagctgtcagaccacacccgctccgagcagtgctacagagacgtgtctgatctaaaggtcattcactggaactcccccaagaagctccgggtgaagaacaagcatgtggagttttttcgcaacctctacctgaccttcctggagtatgacggcaatcttctgaggcgggaactgtttggctgccccagtgaggctgatgtcaacagtgaaaacctccagaagcagctgtctgagctggacgaggacgacctgtgctatgagttccggcgagagcgcttcactgtccaccgcacccacctgtacttcctgcactacgagtatgagcctgcagcagacagcacggacgtcaccctggtcgctcagctgtccatggacaggctccagatgctggaggccatctgcaagcactgggaggggcccatcagcctggccctctacctgtcagacgccgaggcccagcagttcctccgctacgcacagggctctgaggtgcttatgagccgccacaacgtgggctaccacatcgtgtacaaggagggccagttctaccccgtgaacctgctgcgcaacgtggccatgaagcacatcagcactccctacatgttcctgtctgacattgacttcctgcccatgtatgggctctatgagtacctcaggaagtctgtcatccagctcgatcttgccaacaccaagaaagcaatgattgtccccgcgttcgagacactgcgctaccggctgtccttccccaagtcaaaagcggagttgctgtcaatgctggacatggggaccctcttcacattcaggtaccacgtctggacgaaaggccacgcacccacaaacttcgccaagtggcggaccgccaccacgccttaccgggttgagtgggaggccgattttgagccgtatgttgttgtgagacgtgactgcccggagtacgaccggaggtttgtaggctttggctggaacaaagtggctcatatcatggagctggatgtgcaggagtatgagttcattgtgctgcccaacgcctacatgatccacatgcctcatgcccccagcttcgacattaccaagttccgttccaacaagcaataccgcatctgtctcaaaaccctcaaggaagagtttcagcaggacatgtcccgccgctacggctttgctgccctgaaatatctcacagccgagaacaacagctagcaccaagaagcccaccactagggggagacatgctgtaggggaagtgccactcgctgtttggggcccggccttcaaattcaaaattgagccatgctttttcggtttgtttttatttatctctttggcccagccaagctgccctcactacagagaccttggacaaggatccagccagtccctctctgccccacaaccctgcattcccagaggttagctatgcagcccacctagatgagtctcttcaagaatgggaaatcaaggggtgacagggagtaaaagggttatcatcttactgcaaagccacaagatcagggcagggctttaggatgttctggatgctttttaataattatgcttcccatcataactggggagaaagggaagtcagggttctaggggttattcgtcccaggaaatagaagtgaaattgtctttattaagtgaaaactttcccctttgccctgcaatgtagctgggcattcaaacggagggcaaaccgatgatctaaaccaaccacttggaaaaacccaatggggacattgtaaccagagggtcctggaggtggggttgatgggtttccttatccccaaagtcactcctgttttgttttgtttttctttgggggttttgtttatttttggggctggcaatccaaaatagaaaatctgatcctttgaggctctaaaggaaaatcagctgcctctaccaaccaccctctatcagcagtggcccaggaaggaggtcaagcatcttcggccgatatttaaacatgggcagcttccttcaggatgatcaccgaggctcccgtgactttgaactccctactctccagaatccaggggctatagcgatggggactgcggaattacgagggctggctgttttacaccggtcacattttctattggcagtgactgattcatgggaaagggctttgaaggaactacttcagtgcacacacaaggtacgaacctctcaggcctttcgaagaactttcataattcatgaaagcccagttctgaagattcacgtatccatctggagacctacaggaagaaagtgattgggttcctctggttcttgcctgcttcactgtggatgggaagaggtgacaacctcagtctccctttgggacctgtccaagggtaggcaaccaccttcaccttcacacagattgaggagacactggactttttacccattttctttaatcttcaatattaatattgtgtttacattgatgagaacaagagttaatgccctaccctctgctgggctgtttgtattgagttgcaatgtgaccagcgaaagctgcatttaataaatgaaagtacagactgtttcttcccc

SEQ ID NO: 12559 - protein, 756 aa, Homo sapiens; identical to SEQ ID NO: 2170

SEQ ID NO: 12560 - DNA, 4131 bp, Homo sapiens; identical to SEQ ID NO: 2171

SEQ ID NO: 12561 - protein, 756 aa, Homo sapiens; identical to SEQ ID NO: 2170

SEQ ID NO: 12562 - DNA, 715 bp, Homo sapiens
tcatctctgtaataccttgtcgctcccgctgaactgtgagttccttgaggacagagaagggactctgtatctctttcccatctctacatcctcaggtcacagagcctggcacaacgtggaatttcttctcaccaggacagtgcatgctgcggcactccatgatggtacctcatccctgcctctgatgcccagtgccaatcacccttctgccggcacagttacaacctcgactgcgtagttgacacaatgcaaccctccaagttccagaatgatgcttcttttctaggagctcccagagagccaaagccttgagtgtcccacacagaacagattccctctccccagcctggcatccctcttggtcatcccagcaccaagaggactgtctgagcaccaatgtctcaagaagacttttgatgacaacagtggaaaccatttcttcagcttctctttacattgtttctttctctagaatctgcatgcaggattttccctctggattaaatgaccaatctctgagacagacacccattttcttctcccaaccttcctccccatcattcatgcactgattgtgtttcttccaccaaaggctttaagtaagttgacttgtgaaaacttcatcccagagtgtctaccttactagtcctttataactgcctattgcaggcatttttttcaggtcaaatgtgggatgtctgctacataccaaaaa

SEQ ID NO: 12563 - protein, 51 aa, Homo sapiens
MTTVETISSASLYIVSFSRICMQDFPSGLNDQSLRQTPIFFSQPSSPSFMH

SEQ ID NO: 12564 - DNA, 6692 bp, Homo sapiens
tcggagctggagctgccggtgcccggagcgggaggagacggagccgatcccggcctgagcaagcggccgcgcactgaggaggcggcggccgacggtggcggcgggatgcagagggtaaccaggagccgacaacaactcctgacgcaatggttcagccttttactaccatcccatttccaccacctccgcagaatggaattcccacagagtatggggtgccacacactcaagactatgccggccagaccggtgagcataacctgacactctacggaagtacgcaagcccacggggagcagagcagcaactcacccagcacacaaaatggatctcttacgacagaaggtggagcacagacagacggccagcagtcacagacacaaagtagtgaaaattcagagagtaaatctaccccgaaacggctgcatgtctctaatattcctttccgcttccgggaccctgacctccggcagatgtttgggcagtttggcaaaatcctagatgtagaaataatctttaatgaacgtggctctaagggattcgggttcgtaactttcgagaatagtgctgatgcagacagggccagggagaaattacacggcaccgtggtagagggccgtaaaatcgaggtgaataatgctacagcacgtgtaatgaccaataagaagatggtcacaccatatgcaaatggttggaaattaagcccagtagttggagctgtatatggtccggagttatatgcagcatccagctttcaagcagatgtgtccctaggcaatgatgcagcagtgcccctatcaggaagagggggtatcaacacttacattcctttaatcattcctggcttcccttaccctactgcagccaccacggcagccgctttcagaggagcccatttgaggggcagagggcggacagtatatggtgcagtccgagcggtacctccaacagccatccccgcctatccaggtgtggtttaccaggacggattttacggtgctgacctctatggtggatatgcagcctacagatatgcacagcctgctactgcaaccgcagccaccgctgctgcagccgctgcagccgcttacagtgacggttatggcagggtgtacacagccgacccctaccatgcccttgcccctgccgctagctatggagttggcgctgtggcgagtttataccgaggtggctacagccgatttgccccctactgaagtgacgtgagacccctgcaaatgggacagccccccagttcatgaggcctggctattgcaatatttactagtagaggaactctatagcaagatgaagaggaaaaacaaacaaacaaacaaaaaaaaacacaaaaaaagaaagaatacttttttatacctcactatgttctttgaatatgtatttttcctttaaatttctgcctttaattcttttgttccaaagattgtgcatttttttctttttttttttaaactgtggtaaaaaaaaaaaaaataatgcatttccatgtctgtatgtccgtgcttagcttattctatcaatcacggaagaggcagtcaaggaggaaggagagacattaggagccgataaatgcatctgatcagaaatcagcagacagaattaccaaagtgtatctggtgctgaatgactgggggacaagcagaagtggaagagatctttctgcaacaggatattcttctagtcttctgagtttctggtctttgacaggcaattctggttggctgtggctggaatccacatgctgatagataggaatttgtgcttacaaagcaggagaattaaaaagacgctttcctctcctcttccctcctgtcttctccgttctttttacaatcatcttacacgcacagcctgagacagctggcatagtttttggaattatagtattgatatttccaaacgtgctctcagacagtggataataaacacctcattaggaaaccgatctcagaatgaactctggagtatgaaaaagatcatttctttttgttcctgtaacctagcattccttctaggcttcttctcctttaattgaaccacagcttagctcatgtattcttttattaacaccctgctctcatgtccataagattcaggaatttaggacccagggacagaaaagtgaataagccagtgaccagatttcccccagatgtcttgaggattagaagtacaaattgttgacagccattaaagagggtgaggaagggaaaaggaatattagaagatctggtatttcttacttttttcttgcctcagaaagtacaaagtttaaaaaatagaataaagaatctgctggggaaagatagagtaccaggtcctaggtcagtagtccctggaagttttggtgatgaggacatggaagggcaggcagaggcactttgtacttgctccaaagccataggaattttcatcttccagagcctttatgagtcacttctctatccacagtcttgagcctgtggctatcccgctgagcttctcactgtcctccaaaaacaccccgctgagcacccggaccactttgtacacattaacactacaggacataaaatgcagaggccctgagattgctgccctcccatattggaaggagggtctgcgatggcaagggtcttctatatcaccagaaagagtcgcgcagtgagtcactgccgttgccatctggctgtaattttctatgttatcaaggtaggagggagtgtttctcttctagctgttagatagaactgataaaagcaagtgtcctacagcatttcccaaatgaaggcattaggaaatagaaaagcacggtctttttggctccctggtctagtcacattggtactagggtgacctttcacccaagggacagctgctaaagggagtaattcagagacatggagcttctggttatgggtttgttttgggtttgtttttaactcctgcctccacacatgttcttgactgataactgactcatgtccctgaattaaaatgactgacctatgacagcatcaagcattctttgtaagcagagtgatatatctgagagggcgttgacctgttgtgtagaatacatatcctttcccccttcagaatcctgtctcgcctcgtaactgggagagaggctgtgcctgaaactaggggcgatgtcaaggaagctagaggcctcgatgcaattattactgactctggggaggaagacagagaataaggggacaccaactgcccagtccactggccatttttaagggtccccccaccccaagccaaagtttggtttgttgctgttaagacaatttttgttgtatgtatataaatattttagttagaggagcggggaatgggatgcgggctttcacagttctagggaatgggggcagggaggattttgcttttgcttttgctttgagggagaactttagctgactaaaaaaacagaagtttggggtcatgatcacaaaggggccattcccaaaagatggcaagccacgtattcagtggagactaggccaaattctaaatggttttatccatagcaggggagaataggagaatgagtttaagagtttttctcttcttttttcctagaaagaggtaaggataatgggaaaggtagagaaggcggctcccacagaccttttaagagaggcagaatcttgagcttgaggcaccttgagtgcatctcagttcagctggttctggctgaggcctccaaaggcaagctctgtgctttccagtggtttctgctgcatttccagggatggtgtttaacaccgcttcctccagctcccttttctaagaaagaataaatggagttctgctttttatgaaagggtctttggttttcagtgtcaacactgagaattggggctcttgcaagcatctggatttcacagtatcaacctccccgtcaccttttgaactttgagactccgtacggtcaacttcaccagaggcaggttgctcgaagcagcactgcttgtctgttcctgactctggttctcactgtattaaaaaagagagtcagaggagtctggcatttcgtgagtttgttagaggatgctggctgataattccagaaaacttactgatgctaaatcacagtacatgcatgattctttttcagctttactatagttcatgacctggactttctgtactcttggaagctgggctccttaaaggaggcctctagtgaacacctttatctccatgtccctcttagagcccagagagctgcccataggcattttccagaattcctcatgtcacctagttcaatttccattaactcagatcagccattgtgattcaccatttgtcaggctctcaggtttaacaaaacctactatcaccatcatccttcaacagccacagtctgaattgagccaacatttttttttctttgagaaagaagtggactggggcacaacttttagtctgaggggagctagtggaaatctagacaatagaagtcatcgatagcagcttttcctcaaatgtgtgactcctcaggggctaaactgctcttagcttagaattatgctttactagagatctagcagataagtgggttaatcactaccatcctgtaactagttatatagcttccagacatgagggagacatcaaacagggatggaagcaaccccaaggatatgcaagaagggcatgatgaacccccttccctctggcaggagaacaaggccaaccaagggacagactggaaagcacttagatgtttaaggaggagaaaggggaagctttgaccagtccttgccttttgccaagttcagccagttctccgctgcttgcaacctctagcgcagtaacatttgcagaattgcagattttcccccagatactaggaggaaagggactttggggggtggggaaggggtcgtggtgttttaaaagcataagttacctgtttgcactgttttaagataggaaaaaaaaatagtgggcaaggtgaacatcagacgtaaatttgtgtgtttttattttgtcatgctcttgaaaatgtttgaccatttgtagtatacacagtgaaacttgattctctgttgcataaaacactatatttttttggaaatgttactgtccaaaagcctcttccctccctttccttttcctatgtacttccttcatacttgctttactgatcagccaggcaatagccatccaagagctagagcatgaaacagggccctttccaagtaggctctgggtgtcctaagccagcgtgtgccctctggtttagtgagtgtaatagagtccctggcacctttctttgcaaatgaggctaacagaccagactgcagcaagttatcagattcctcaatcagatgcactaggagtgaggagcccagggatggagggggttcctgaagtattgcagttggctgtagtagctgagttcttttccatgttaccgaaactgtagccagttacagtttactcaggaaaacggtagatcaattcagccatggtagtgctggttggcagggattggtaacggagagaactgctcatcagccaaaactcaagccttgccttttaggaggccaccagcagagggacttggtcctccttgtctggtacttgtgtacatgccggtgacctgaggactccactcacactggcgagcaaaaagggagcagtgattctcttttctctccccaccccctgccctttgttaccaacaccagtttcccagggggtacatgagtttctgaatttttaaaaaatgtttttggtttggtttttctggggactgataagtgctttaagcaatgtccataccccgtcaagactcccagcttagtcattttcttgtatttttctgttcacagtatttgtgtgtgtgcttgttttggcagctcattttggctgtattatatattgagtgatgaattgatcctcttttttccctaagggatatgaattgtttttcttgtgttatattctgcttgtgaatagctggagcaaacctggggctgacacgcgtaagctagggctgcaaagcgagaagagagccggtggagtgtacttgtccctgacaggctgacctacctgagtctctgagcttttcagtccaaatctttgcaaggctcaaaatgccacagaacctctcctcttctccccactccccatggcagggaccggaccatccctacatgcaacatgctgttcctccagcccctcccattgccatggcaaaacaggtacctttggggcatgggggcattacatgggatgcttgtgtaatcgaccacctagccttctctctcccctcccgtcctcccccagaatcacttcctaggacacccgagctgcttgcccagggtcctgtttccctgctaactccagagaagcatcccagggctttgtgacagtctctaattcccttcccttctcgttaagaatcatattgtatagtagctttcagaccatacagtattcattgggttactcctattattatcaagtagctggaattgtgaaggtcggagtagttagatctttagcttttattccttatttttttgtattactctccatgtgtataaattattgatcatgttgctggcttttataaactctaagcgaaggaggagcactgcctcagcctttgcacatggtaatgaagcactgtttttaaataaaagagagaaacaccattcttt

SEQ ID NO: 12565 - protein, 356 aa, Homo sapiens [sequence omitted]

SEQ ID NO: 12566 - DNA, 6922 bp, Homo sapiens
gggggcaggcgcgcgcccgcctgtcgcgacagtcggggccgaggcccagggggaggtggcctgtcgcgggtcgcccggctcccggaggcgaggggggcgcgggcggatggcggagggcgcccagccgcatcagccgcctcagctcgggcccggcgccgccgcccggggcatgaagcgggagtcggagctggagctgccggtgcccggagcgggaggagacggagccgatcccggcctgagcaagcggccgcgcactgaggaggcggcggccgacggtggcggcgggatgcagaacgagcctctgactccaggttatcatggattcccagcgcgggacagccagggtaaccaggagccgacaacaactcctgacgcaatggttcagccttttactaccatcccatttccaccacctccgcagaatggaattcccacagagtatggggtgccacacactcaagactatgccggccagaccggtgagcataacctgacactctacggaagtacgcaagcccacggggagcagagcagcaactcacccagcacacaaaatggatctcttacgacagaaggtggagcacagacagacggccagcagtcacagacacaaagtagtgaaaattcagagagtaaatctaccccgaaacggctgcatgtctctaatattcctttccgcttccgggaccctgacctccggcagatgtttgggcagtttggcaaaatcctagatgtagaaataatctttaatgaacgtggctctaagggattcgggttcgtaactttcgagaatagtgctgatgcagacagggccagggagaaattacacggcaccgtggtagagggccgtaaaatcgaggtgaataatgctacagcacgtgtaatgaccaataagaagatggtcacaccatatgcaaatggttggaaattaagcccagtagttggagctgtatatggtccggagttatatgcagcatccagctttcaagcagatgtgtccctaggcaatgatgcagcagtgcccctatcaggaagagggggtatcaacacttacattcctttaatcattcctggcttcccttaccctactgcagccaccacggcagccgctttcagaggagcccatttgaggggcagagggcggacagtatatggtgcagtccgagcggtacctccaacagccatccccgcctatccaggtgtggtttaccaggacggattttacggtgctgacctctatggtggatatgcagcctacagatatgcacagcctgctactgcaaccgcagccaccgctgctgcagccgctgcagccgcttacagtgacggttatggcagggtgtacacagccgacccctaccatgcccttgcccctgccgctagctatggagttggcgctgtggcgagtttataccgaggtggctacagccgatttgccccctactgaagtgacgtgagacccctgcaaatgggacagccccccagttcatgaggcctggctattgcaatatttactagtagaggaactctatagcaagatgaagaggaaaaacaaacaaacaaacaaaaaaaaacacaaaaaaagaaagaatacttttttatacctcactatgttctttgaatatgtatttttcctttaaatttctgcctttaattcttttgttccaaagattgtgcatttttttctttttttttttaaactgtggtaaaaaaaaaaaaaataatgcatttccatgtctgtatgtccgtgcttagcttattctatcaatcacggaagaggcagtcaaggaggaaggagagacattaggagccgataaatgcatctgatcagaaatcagcagacagaattaccaaagtgtatctggtgctgaatgactgggggacaagcagaagtggaagagatctttctgcaacaggatattcttctagtcttctgagtttctggtctttgacaggcaattctggttggctgtggctggaatccacatgctgatagataggaatttgtgcttacaaagcaggagaattaaaaagacgctttcctctcctcttccctcctgtcttctccgttctttttacaatcatcttacacgcacagcctgagacagctggcatagtttttggaattatagtattgatatttccaaacgtgctctcagacagtggataataaacacctcattaggaaaccgatctcagaatgaactctggagtatgaaaaagatcatttctttttgttcctgtaacctagcattccttctaggcttcttctcctttaattgaaccacagcttagctcatgtattcttttattaacaccctgctctcatgtccataagattcaggaatttaggacccagggacagaaaagtgaataagccagtgaccagatttcccccagatgtcttgaggattagaagtacaaattgttgacagccattaaagagggtgaggaagggaaaaggaatattagaagatctggtatttcttacttttttcttgcctcagaaagtacaaagtttaaaaaatagaataaagaatctgctggggaaagatagagtaccaggtcctaggtcagtagtccctggaagttttggtgatgaggacatggaagggcaggcagaggcactttgtacttgctccaaagccataggaattttcatcttccagagcctttatgagtcacttctctatccacagtcttgagcctgtggctatcccgctgagcttctcactgtcctccaaaaacaccccgctgagcacccggaccactttgtacacattaacactacaggacataaaatgcagaggccctgagattgctgccctcccatattggaaggagggtctgcgatggcaagggtcttctatatcaccagaaagagtcgcgcagtgagtcactgccgttgccatctggctgtaattttctatgttatcaaggtaggagggagtgtttctcttctagctgttagatagaactgataaaagcaagtgtcctacagcatttcccaaatgaaggcattaggaaatagaaaagcacggtctttttggctccctggtctagtcacattggtactagggtgacctttcacccaagggacagctgctaaagggagtaattcagagacatggagcttctggttatgggtttgttttgggtttgtttttaactcctgcctccacacatgttcttgactgataactgactcatgtccctgaattaaaatgactgacctatgacagcatcaagcattctttgtaagcagagtgatatatctgagagggcgttgacctgttgtgtagaatacatatcctttcccccttcagaatcctgtctcgcctcgtaactgggagagaggctgtgcctgaaactaggggcgatgtcaaggaagctagaggcctcgatgcaattattactgactctggggaggaagacagagaataaggggacaccaactgcccagtccactggccatttttaagggtccccccaccccaagccaaagtttggtttgttgctgttaagacaatttttgttgtatgtatataaatattttagttagaggagcggggaatgggatgcgggctttcacagttctagggaatgggggcagggaggattttgcttttgcttttgctttgagggagaactttagctgactaaaaaaacagaagtttggggtcatgatcacaaaggggccattcccaaaagatggcaagccacgtattcagtggagactaggccaaattctaaatggttttatccatagcaggggagaataggagaatgagtttaagagtttttctcttcttttttcctagaaagaggtaaggataatgggaaaggtagagaaggcggctcccacagaccttttaagagaggcagaatcttgagcttgaggcaccttgagtgcatctcagttcagctggttctggctgaggcctccaaaggcaagctctgtgctttccagtggtttctgctgcatttccagggatggtgtttaacaccgcttcctccagctcccttttctaagaaagaataaatggagttctgctttttatgaaagggtctttggttttcagtgtcaacactgagaattggggctcttgcaagcatctggatttcacagtatcaacctccccgtcaccttttgaactttgagactccgtacggtcaacttcaccagaggcaggttgctcgaagcagcactgcttgtctgttcctgactctggttctcactgtattaaaaaagagagtcagaggagtctggcatttcgtgagtttgttagaggatgctggctgataattccagaaaacttactgatgctaaatcacagtacatgcatgattctttttcagctttactatagttcatgacctggactttctgtactcttggaagctgggctccttaaaggaggcctctagtgaacacctttatctccatgtccctcttagagcccagagagctgcccataggcattttccagaattcctcatgtcacctagttcaatttccattaactcagatcagccattgtgattcaccatttgtcaggctctcaggtttaacaaaacctactatcaccatcatccttcaacagccacagtctgaattgagccaacatttttttttctttgagaaagaagtggactggggcacaacttttagtctgaggggagctagtggaaatctagacaatagaagtcatcgatagcagcttttcctcaaatgtgtgactcctcaggggctaaactgctcttagcttagaattatgctttactagagatctagcagataagtgggttaatcactaccatcctgtaactagttatatagcttccagacatgagggagacatcaaacagggatggaagcaaccccaaggatatgcaagaagggcatgatgaacccccttccctctggcaggagaacaaggccaaccaagggacagactggaaagcacttagatgtttaaggaggagaaaggggaagctttgaccagtccttgccttttgccaagttcagccagttctccgctgcttgcaacctctagcgcagtaacatttgcagaattgcagattttcccccagatactaggaggaaagggactttggggggtggggaaggggtcgtggtgttttaaaagcataagttacctgtttgcactgttttaagataggaaaaaaaaatagtgggcaaggtgaacatcagacgtaaatttgtgtgtttttattttgtcatgctcttgaaaatgtttgaccatttgtagtatacacagtgaaacttgattctctgttgcataaaacactatatttttttggaaatgttactgtccaaaagcctcttccctccctttccttttcctatgtacttccttcatacttgctttactgatcagccaggcaatagccatccaagagctagagcatgaaacagggccctttccaagtaggctctgggtgtcctaagccagcgtgtgccctctggtttagtgagtgtaatagagtccctggcacctttctttgcaaatgaggctaacagaccagactgcagcaagttatcagattcctcaatcagatgcactaggagtgaggagcccagggatggagggggttcctgaagtattgcagttggctgtagtagctgagttcttttccatgttaccgaaactgtagccagttacagtttactcaggaaaacggtagatcaattcagccatggtagtgctggttggcagggattggtaacggagagaactgctcatcagccaaaactcaagccttgccttttaggaggccaccagcagagggacttggtcctccttgtctggtacttgtgtacatgccggtgacctgaggactccactcacactggcgagcaaaaagggagcagtgattctcttttctctccccaccccctgccctttgttaccaacaccagtttcccagggggtacatgagtttctgaatttttaaaaaatgtttttggtttggtttttctggggactgataagtgctttaagcaatgtccataccccgtcaagactcccagcttagtcattttcttgtatttttctgttcacagtatttgtgtgtgtgcttgttttggcagctcattttggctgtattatatattgagtgatgaattgatcctcttttttccctaagggatatgaattgtttttcttgtgttatattctgcttgtgaatagctggagcaaacctggggctgacacgcgtaagctagggctgcaaagcgagaagagagccggtggagtgtacttgtccctgacaggctgacctacctgagtctctgagcttttcagtccaaatctttgcaaggctcaaaatgccacagaacctctcctcttctccccactccccatggcagggaccggaccatccctacatgcaacatgctgttcctccagcccctcccattgccatggcaaaacaggtacctttggggcatgggggcattacatgggatgcttgtgtaatcgaccacctagccttctctctcccctcccgtcctcccccagaatcacttcctaggacacccgagctgcttgcccagggtcctgtttccctgctaactccagagaagcatcccagggctttgtgacagtctctaattcccttcccttctcgttaagaatcatattgtatagtagctttcagaccatacagtattcattgggttactcctattattatcaagtagctggaattgtgaaggtcggagtagttagatctttagcttttattccttatttttttgtattactctccatgtgtataaattattgatcatgttgctggcttttataaactctaagcgaaggaggagcactgcctcagcctttgcacatggtaatgaagcactgtttttaaataaaagagagaaacaccattcttt

SEQ ID NO: 12567 - protein, 446 aa, Homo sapiens
MAEGAQPHQPPQLGPGAAARGMKRESELELPVPGAGGDGADPGLSKRPRTEEAAADGGGGMQNEPLTPGYHGFPARDSQGNQEPTTTPDAMVQPFTTIPFPPPPQNGIPTEYGVPHTQDYAGQTGEHNLTLYGSTQAHGEQSSNSPSTQNGSLTTEGGAQTDGQQSQTQSSENSESKSTPKRLHVSNIPFRFRDPDLRQMFGQFGKILDVEIIFNERGSKGFGFVTFENSADADRAREKLHGTVVEGRKIEVNNATARVMTNKKMVTPYANGWKLSPVVGAVYGPELYAASSFQADVSLGNDAAVPLSGRGGINTYIPLIIPGFPYPTAATTAAAFRGAHLRGRGRTVYGAVRAVPPTAIPAYPGVVYQDGFYGADLYGGYAAYRYAQPATATAATAAAAAAAAYSDGYGRVYTADPYHALAPAASYGVGAVASLYRGGYSRFAPY

SEQ ID NO: 12568 - DNA, 1511 bp, Homo sapiens
tcggagctggagctgccggtgcccggagcgggaggagacggagccgatcccggcctgagcaagcggccgcgcactgaggaggcggcggccgacggtggcggcgggatgcagagggtaaccaggagccgacaacaactcctgacgcaatggttcagccttttactaccatcccatttccaccacctccgcagaatggaattcccacagagtatggggtgccacacactcaagactatgccggccagaccggtgagcataacctgacactctacggaagtacgcaagcccacggggagcagagcagcaactcacccagcacacaaaatggatctcttacgacagaaggtggagcacagacagacggccagcagtcacagacacaaagtagtgaaaattcagagagtaaatctaccccgaaacggctgcatgtctctaatattcctttccgcttccgggaccctgacctccggcagatgtttgggcagtttggcaaaatcctagatgtagaaataatctttaatgaacgtggctctaagggattcgggttcgtaactttcgagaatagtgctgatgcagacagggccagggagaaattacacggcaccgtggtagagggccgtaaaatcgaggtgaataatgctacagcacgtgtaatgaccaataagaagatggtcacaccatatgcaaatggttggaaattaagcccagtagttggagctgtatatggtccggagttatatgcagcatccagctttcaagcagatgtgtccctaggcaatgatgcagcagtgcccctatcaggaagagggggtatcaacacttacattcctttaatcattcctggcttcccttaccctactgcagccaccacggcagccgctttcagaggagcccatttgaggggcagagggcggacagtatatggtgcagtccgagcggtacctccaacagccatccccgcctatccaggtgtggtttaccaggacggattttacggtgctgacctctatggtggatatgcagcctacagatatgcacagcctgctactgcaaccgcagccaccgctgctgcagccgctgcagccgcttacagtgacggttatggcagggtgtacacagccgacccctaccatgcccttgcccctgccgctagctatggagttggcgctgtggcgagtttataccgaggtggctacagccgatttgccccctactgaagtgacgtgagacccctgcaaatgggacagccccccagttcatgaggcctggctattgcaatatttactagtagaggaactctatagcaagatgaagaggaaaaacaaacaaacaaacaaaaaaaaacacaaaaaaagaaagaatacttttttatacctcactatgttctttgaatatgtatttttcctttaaatttctgcctttaattcttttgttccaaagattgtgcatttttttctttttttttttaaactgtggtaaaaaaaaaaaaaataatgcatttccatgtctgt

SEQ ID NO: 12569 - protein, 356 aa, Homo sapiens [sequence omitted]

SEQ ID NO: 12570 - DNA, 1741 bp, Homo sapiens
gggggcaggcgcgcgcccgcctgtcgcgacagtcggggccgaggcccagggggaggtggcctgtcgcgggtcgcccggctcccggaggcgaggggggcgcgggcggatggcggagggcgcccagccgcatcagccgcctcagctcgggcccggcgccgccgcccggggcatgaagcgggagtcggagctggagctgccggtgcccggagcgggaggagacggagccgatcccggcctgagcaagcggccgcgcactgaggaggcggcggccgacggtggcggcgggatgcagaacgagcctctgactccaggttatcatggattcccagcgcgggacagccagggtaaccaggagccgacaacaactcctgacgcaatggttcagccttttactaccatcccatttccaccacctccgcagaatggaattcccacagagtatggggtgccacacactcaagactatgccggccagaccggtgagcataacctgacactctacggaagtacgcaagcccacggggagcagagcagcaactcacccagcacacaaaatggatctcttacgacagaaggtggagcacagacagacggccagcagtcacagacacaaagtagtgaaaattcagagagtaaatctaccccgaaacggctgcatgtctctaatattcctttccgcttccgggaccctgacctccggcagatgtttgggcagtttggcaaaatcctagatgtagaaataatctttaatgaacgtggctctaagggattcgggttcgtaactttcgagaatagtgctgatgcagacagggccagggagaaattacacggcaccgtggtagagggccgtaaaatcgaggtgaataatgctacagcacgtgtaatgaccaataagaagatggtcacaccatatgcaaatggttggaaattaagcccagtagttggagctgtatatggtccggagttatatgcagcatccagctttcaagcagatgtgtccctaggcaatgatgcagcagtgcccctatcaggaagagggggtatcaacacttacattcctttaatcattcctggcttcccttaccctactgcagccaccacggcagccgctttcagaggagcccatttgaggggcagagggcggacagtatatggtgcagtccgagcggtacctccaacagccatccccgcctatccaggtgtggtttaccaggacggattttacggtgctgacctctatggtggatatgcagcctacagatatgcacagcctgctactgcaaccgcagccaccgctgctgcagccgctgcagccgcttacagtgacggttatggcagggtgtacacagccgacccctaccatgcccttgcccctgccgctagctatggagttggcgctgtggcgagtttataccgaggtggctacagccgatttgccccctactgaagtgacgtgagacccctgcaaatgggacagccccccagttcatgaggcctggctattgcaatatttactagtagaggaactctatagcaagatgaagaggaaaaacaaacaaacaaacaaaaaaaaacacaaaaaaagaaagaatacttttttatacctcactatgttctttgaatatgtatttttcctttaaatttctgcctttaattcttttgttccaaagattgtgcatttttttctttttttttttaaactgtggtaaaaaaaaaaaaaataatgcatttccatgtctgt

SEQ ID NO: 12571 - protein, 446 aa, Homo sapiens; identical to SEQ ID NO: 12567

SEQ ID NO: 12572 - DNA, 468 bp, Homo sapiens
gcggccgcgcactgaggaggcggcggccgacggtggcggcgggatgcagaacgagcctctgactccaggttatcatggattcccagcgcgggacagccaggttggtatctgctgtttgtaactcagatgatgtatgtgtgtggtgtgtttcatcaaagggttgctatgatagagagcatttcctgaaattacttactttgaaaggaaatgtggcttgtttcagcagtgaatttacttttacagatgtaaattaagcatatttttaaattctataagtattatgttattaaaattgtggatattagaagagaaaataatcactcaagcacagtcatgattggttttgtattttcttctccaggctacataataattttttgacctggttttcttgatgccttataattctgaatgctggacttgtctctttattacctgccagttagcccctgcctgcacagagttttt

SEQ ID NO: 12573 - protein, 59 aa, Homo sapiens [sequence omitted]

SEQ ID NO: 12574 - DNA, 763 bp, Homo sapiens
atcttcttaaacatgaggtgggcaacatgagacccccacttctatcagtatccatcctgactggacccaagtggacagcttgagtttccagttcaatccagttcctgcctggcctctgctggcctctgggtttgcaatcccaactccctaccaccgccactactgctgagagcatcccctctacagtactcagaacctcactggctgcctgcaaccctgggggatcagcagaagagactctaagcccatctatcagtgcccagagaaatgcacgtggcccacggctgctgccttctgaggtcacctggccataccccaagtagtctgggaacccatgctgagcctggagaatcttcactctcccacctctccctccattcctcaggggaacaaggactccaaaagagccgtcggataaacctgggtttggatccaggctttctaccttggacaagttacctaaacctcctgcatctcggtttcttcttcgtcaaatggggacaatacttctttctttaaaggctttactttgaggatgaggtgagagggaagccatcctcctccgtaccccacaaggatcacaggccagtgagatccagctattatcacctctggtgatgctggtcgccaacaacccaaggacccctgttactgagctctaaccagaccctccctctagtatccaacacatactctcaagggaaacagaaatcacacagaagaggccaggcaggcgcagtggctcacgcctgtaatcttagca

SEQ ID NO: 12575 - protein, 83 aa, Homo sapiens
MHVAHGCCLLRSPGHTPSSLGTHAEPGESSLSHLSLHSSGEQGLQKSRRINLGLDPGFLPWTSYLNLLHLGFFFVKWGQYFFL

SEQ ID NO: 12576 - DNA, 679 bp, Homo sapiens
caggaagacgcagaacaacagaaatagccgcccctccccgcccactgtgcctgttggcctatcatagatctctatgttcttgactttgtctctcctttccgagtcaatggtgggttacactgatcttgttccactgattactctctctgacgagtccatcacctgcaacttaaatgaacaagcttacatcccattttgagtgaagattttgaggtttttaatttaaaggctgtgtacagttatacttttttatacacctgttcatttctacttaaattatggcacagattgatgcgcaccagtcttgaggaaacgatctccctattcccttaccctgttactcagccacgccgtgtgtaggcttagcctcaggtggcagatgtttgaggaaaggaattatgccaggaaggtgggaccgggttatggtcggtgtttcacgtgactcagcagtgcccgccgccgtcaccagctatgcattcactccgtttccagtgagcagatgtcttgcttggaaagtggacctgtgtctgtgtctgtcctgagaacttaccagcagaaatcctcatttctgtgctacggatttaccaaaaattgtcaagtctttttcagtttaacagttcctttacatgtgtagtatttgaggaaaaaaatcaataaacagttgatctcgtgcatatgg

SEQ ID NO: 12577 - protein, 47 aa, Homo sapiens
MPGRWDRVMVGVSRDSAVPAAVTSYAFTPFPVSRCLAWKVDLCLCLS

SEQ ID NO: 12578 - DNA, 379 bp, Homo sapiens
cccgcccagtctgcgcagtcacagtccagctacaaccccttcgaggattcgcccgggagcaggtgctgcagccagagttacgcgggggccacgcgggccggcgggggtggggggaacgtgggggaacctgtgtttcacgtgactcagcagtgcccgccgccgtcaccagctatgcattcactccgtttccagtgagcagatgtcttgcttggaaagtggacctgtgtctgtgtctgtcctgagaacttaccagcagaaatcctcatttctgtgctacggatttaccaaaaattgtcaagtctttttcagtttaacagttcctttacatgtgtagtatttgaggaaaaaaatcaataaacagttgatctcgtgcatatgg

SEQ ID NO: 12579 - protein, 44 aa, Homo sapiens
MSCLESGPVSVSVLRTYQQKSSFLCYGFTKNCQVFFSLTVPLHV

SEQ ID NO: 12580 - DNA, 3087 bp, Homo sapiens
agaggtcagacatgccagcagggttggaaagaggcaggtacggaagctgagctgcagagttagccggcatctgacagaaaaatgtttgtctacagattttgagcgttcgaagttgacccctgactaagtatactttgctgctccctcagcctttgaaaaaatgtctgtcacatatgatgattccgttggagtagaagtgtccagcgacagcttctgggaggtcgggaactacaagcggactgtgaagcggatcgacgatggccaccgcctgtgcagcgacctcatgaactgcctgcatgagcgggcgcgcatcgagaaggcgtatgcgcagcagctcactgagtgggcccggcgctggaggcagctcgtggagaaagggccccagtacgggaccgtggagaaggcctggatggccttcatgtccgaggcagagagggtgagcgagctgcacctcgaggtgaaggcctcactgatgaacgatgacttcgagaagatcaagaactggcagaaggaagcctttcacaagcagatgatgggcggcttcaaggagaccaaggaagctgaggacggctttcggaaggcacagaagccctgggccaagaagctgaaagaggtagaagcagcaaagaaagcccaccatgcagcgtgcaaagaggagaagctggctatctcacgagaagccaacagcaaggcagacccatccctcaaccctgaacagctcaagaaattgcaagacaaaatagaaaagtgcaagcaagatgttcttaagaccaaagagaagtatgagaagtccctgaaggaactcgaccagggcacaccccagtacatggagaacatggagcaggtgtttgagcagtgccagcagttcgaggagaaacgccttcgcttcttccgggaggttctgctggaggttcagaagcacctagacctgtccaatgtggctggctacaaagccatttaccatgacctggagcagagcatcagagcagctgatgcagtggaggacctgaggtggttccgagccaatcacgggccgggcatggccatgaactggccgcagtttgaggagtggtccgcagacctgaatcgaaccctcagccggagagagaagaagaaggccactgacggcgtcaccctgacgggcatcaaccagacaggcgaccagtctctgccgagtaagcccagcagtgtgagcagctacgagaagacccagagctatcccaccgactggtcagacgatgagtctaacaaccccttctcctccacggatgccaatggggactcgaatccattcgacgacgacgccacctcggggacggaagtgcgagtccgggccctgtatgactatgaggggcaggagcatgatgagctgagcttcaaggctggggatgagctgaccaagatggaggacgaggatgagcagggctggtgcaagggacgcttggacaacgggcaagttggcctatacccggcaaattatgtggaggcgatccagtgatgagtcggggacaggccagcggggggacggaggcggcgggcccaggagcctcagccagccacgtgggcatccactccttttcctgcaagagatgatggttccattgctcttggcttcatggtgttcctggaaggcagatgagctggtcatttcgcctgggactcggcacctttccgagtgcagctggagggatctgagcgcaggaagacgcagaacaacagaaatagccgcccctccccgcccactgtgcctgttggcctatcatagatctctatgttcttgactttgtctctcctttccgagtcaatggtgggttacactgatcttgttccactgattactctctctgacgagtccatcacctgcaacttaaatgaacaagcttacatcccattttgagtgaagattttgaggtttttaatttaaaggctgtgtacagttatacttttttatacacctgttcatttctacttaaattatggcacagattgatgcgcaccagtcttgaggaaacgatctccctattcccttaccctgttactcagccacgccgtgtgtaggcttagcctcaggtggcagatgtttgaggaaaggaattatgccaggaaggtgggaccgggttatggtcgggtttctattgggaatgctctttgtgcttttgggcatctgaatggaagctttacatagaaccttaggtagaactcccccaaatcgccatatttaaaaattattttcactctattcttgcttaaaactgtactcttttgcaaattaacaattttatcactgattcagagttaaaaagaagactaacttttcaagcaaatgcatctgtaaagatgctttagattagactgtcatgtctcagtgtctatctgtatatattatttgatattcagagaatctaaagcactcgtctactgttttaatgagatttaacagcttttaacagtgagtttcgtttgtaaactgcttgaagtctgtggcattcaggcacacgtctggctggccggctgggtctcctcccgggctcagtgggcctggggcctctctgacgtggtgcctgctggagggaggctcgtcgtcaccagctgactgctggtccggcttctgaccggcctttgtcctggctccgtagcagaacactgtaaaagtgcccgcgtctttgcagtagttgcagatttcagtcgtcgtgttacttgtgcacaaacagaagctgggtcttacccgcagcacgagtgtctcgggctgcccggagtcgcccgggagcaggtgctgcagccagagttacgcgggggccacgcgggccggcgggggtggggggaacgtgggggaacctgtgtttcacgtgactcagcagtgcccgccgccgtcaccagctatgcattcactccgtttccagtgagcagatgtcttgcttggaaagtggacctgtgtctgtgtctgtcctgagaacttaccagcagaaatcctcatttctgtgctacggatttaccaaaaattgtcaagtctttttcagtttaacagttcctttacatgtgtagtatttgaggaaaaaaatcaataaacagttgatctcgtgcatatgg

SEQ ID NO: 12581 - protein, 445 aa, Homo sapiens
MSVTYDDSVGVEVSSDSFWEVGNYKRTVKRIDDGHRLCSDLMNCLHERARIEKAYAQQLTEWARRWRQLVEKGPQYGTVEKAWMAFMSEAERVSELHLEVKASLMNDDFEKIKNWQKEAFHKQMMGGFKETKEAEDGFRKAQKPWAKKLKEVEAAKKAHHAACKEEKLAISREANSKADPSLNPEQLKKLQDKIEKCKQDVLKTKEKYEKSLKELDQGTPQYMENMEQVFEQCQQFEEKRLRFFREVLLEVQKHLDLSNVAGYKAIYHDLEQSIRAADAVEDLRWFRANHGPGMAMNWPQFEEWSADLNRTLSRREKKKATDGVTLTGINQTGDQSLPSKPSSVSSYEKTQSYPTDWSDDESNNPFSSTDANGDSNPFDDDATSGTEVRVRALYDYEGQEHDELSFKAGDELTKMEDEDEQGWCKGRLDNGQVGLYPANYVEAIQ

SEQ ID NO: 12582 - DNA, 3754 bp, Homo sapiens
aaccccccgtttaaactaagcgggtccacgtggaatgacgcttttggcgcaagtcggaggagctcctaacgacattagcttctttgagtcccttgggagaggaaactttctgaaagactgtaggattaccttccctgaacttccggtcaggtgcggtgctgccctgccgcgccctcttacccctggatgccgacgaaaccgcaaaactccagccccgggaagcgcgtctcaaggaccaccaccagcgagcggctttgggagagtaatctgcgccaccctcgcagcccattaaataggcactccccgtttgattgacaggagaagtcaccaatgcgcgtcctggggctttccctcgtcctcacgcggggtgagccgcctctctactcatctggcccaatcgggggcgccggggaggctgtggggcggggctcggtgtccggtagccaatggacagagcccagcgggagcggcgggggcggtgcggtcgcggctggcggcagaagcggccgcaggggtctgggcagggctgggcagtgctgccggagcaaaagcggtagcgggagcccggccggagctgggtctggagacgccgtggcagcctgaacggagtgtgcgacggattgggaggtttgtctacagattttgagcgttcgaagttgacccctgactaagtatactttgctgctccctcagcctttgaaaaaatgtctgtcacatatgatgattccgttggagtagaagtgtccagcgacagcttctgggaggtcgggaactacaagcggactgtgaagcggatcgacgatggccaccgcctgtgcagcgacctcatgaactgcctgcatgagcgggcgcgcatcgagaaggcgtatgcgcagcagctcactgagtgggcccggcgctggaggcagctcgtggagaaagggccccagtacgggaccgtggagaaggcctggatggccttcatgtccgaggcagagagggtgagcgagctgcacctcgaggtgaaggcctcactgatgaacgatgacttcgagaagatcaagaactggcagaaggaagcctttcacaagcagatgatgggcggcttcaaggagaccaaggaagctgaggacggctttcggaaggcacagaagccctgggccaagaagctgaaagaggtagaagcagcaaagaaagcccaccatgcagcgtgcaaagaggagaagctggctatctcacgagaagccaacagcaaggcagacccatccctcaaccctgaacagctcaagaaattgcaagacaaaatagaaaagtgcaagcaagatgttcttaagaccaaagagaagtatgagaagtccctgaaggaactcgaccagggcacaccccagtacatggagaacatggagcaggtgtttgagcagtgccagcagttcgaggagaaacgccttcgcttcttccgggaggttctgctggaggttcagaagcacctagacctgtccaatgtggctggctacaaagccatttaccatgacctggagcagagcatcagagcagctgatgcagtggaggacctgaggtggttccgagccaatcacgggccgggcatggccatgaactggccgcagtttgaggagtggtccgcagacctgaatcgaaccctcagccggagagagaagaagaaggccactgacggcgtcaccctgacgggcatcaaccagacaggcgaccagtctctgccgagtaagcccagcagcacccttaatgtcccgagcaaccccgcccagtctgcgcagtcacagtccagctacaaccccttcgaggatgaggacgacacgggcagcaccgtcagtgagaaggacgacactaaggccaaaaatgtgagcagctacgagaagacccagagctatcccaccgactggtcagacgatgagtctaacaaccccttctcctccacggatgccaatggggactcgaatccattcgacgacgacgccacctcggggacggaagtgcgagtccgggccctgtatgactatgaggggcaggagcatgatgagctgagcttcaaggctggggatgagctgaccaagatggaggacgaggatgagcagggctggtgcaagggacgcttggacaacgggcaagttggcctatacccggcaaattatgtggaggcgatccagtgatgagtcggggacaggccagcggggggacggaggcggcgggcccaggagcctcagccagccacgtgggcatccactccttttcctgcaagagatgatggttccattgctcttggcttcatggtgttcctggaaggcagatgagctggtcatttcgcctgggactcggcacctttccgagtgcagctggagggatctgagcgcaggaagacgcagaacaacagaaatagccgcccctccccgcccactgtgcctgttggcctatcatagatctctatgttcttgactttgtctctcctttccgagtcaatggtgggttacactgatcttgttccactgattactctctctgacgagtccatcacctgcaacttaaatgaacaagcttacatcccattttgagtgaagattttgaggtttttaatttaaaggctgtgtacagttatacttttttatacacctgttcatttctacttaaattatggcacagattgatgcgcaccagtcttgaggaaacgatctccctattcccttaccctgttactcagccacgccgtgtgtaggcttagcctcaggtggcagatgtttgaggaaaggaattatgccaggaaggtgggaccgggttatggtcgggtttctattgggaatgctctttgtgcttttgggcatctgaatggaagctttacatagaaccttaggtagaactcccccaaatcgccatatttaaaaattattttcactctattcttgcttaaaactgtactcttttgcaaattaacaattttatcactgattcagagttaaaaagaagactaacttttcaagcaaatgcatctgtaaagatgctttagattagactgtcatgtctcagtgtctatctgtatatattatttgatattcagagaatctaaagcactcgtctactgttttaatgagatttaacagcttttaacagtgagtttcgtttgtaaactgcttgaagtctgtggcattcaggcacacgtctggctggccggctgggtctcctcccgggctcagtgggcctggggcctctctgacgtggtgcctgctggagggaggctcgtcgtcaccagctgactgctggtccggcttctgaccggcctttgtcctggctccgtagcagaacactgtaaaagtgcccgcgtctttgcagtagttgcagatttcagtcgtcgtgttacttgtgcacaaacagaagctgggtcttacccgcagcacgagtgtctcgggctgcccggagtcgcccgggagcaggtgctgcagccagagttacgcgggggccacgcgggccggcgggggtggggggaacgtgggggaacctgtgtttcacgtgactcagcagtgcccgccgccgtcaccagctatgcattcactccgtttccagtgagcagatgtcttgcttggaaagtggacctgtgtctgtgtctgtcctgagaacttaccagcagaaatcctcatttctgtgctacggatttaccaaaaattgtcaagtctttttcagtttaacagttcctttacatgtgtagtatttgaggaaaaaaatcaataaacagttgatctcgtgcatatgg

SEQ ID NO: 12583 - protein, 486 aa, Homo sapiens
MSVTYDDSVGVEVSSDSFWEVGNYKRTVKRIDDGHRLCSDLMNCLHERARIEKAYAQQLTEWARRWRQLVEKGPQYGTVEKAWMAFMSEAERVSELHLEVKASLMNDDFEKIKNWQKEAFHKQMMGGFKETKEAEDGFRKAQKPWAKKLKEVEAAKKAHHAACKEEKLAISREANSKADPSLNPEQLKKLQDKIEKCKQDVLKTKEKYEKSLKELDQGTPQYMENMEQVFEQCQQFEEKRLRFFREVLLEVQKHLDLSNVAGYKAIYHDLEQSIRAADAVEDLRWFRANHGPGMAMNWPQFEEWSADLNRTLSRREKKKATDGVTLTGINQTGDQSLPSKPSSTLNVPSNPAQSAQSQSSYNPFEDEDDTGSTVSEKDDTKAKNVSSYEKTQSYPTDWSDDESNNPFSSTDANGDSNPFDDDATSGTEVRVRALYDYEGQEHDELSFKAGDELTKMEDEDEQGWCKGRLDNGQVGLYPANYVEAIQ

SEQ ID NO: 12584 - DNA, 2107 bp, Homo sapiens
ctgtcccactgggcaggtgcctctgacggagaggaggcgtcgtcgggaagtatgtggccgtggctgctctggcatgatcctgaagactggcacgaaggggaatggagccgcacagagaatttcaggcatcagaggggaagcgcaggtttgtctacagattttgagcgttcgaagttgacccctgactaagtatactttgctgctccctcagcctttgaaaaaatgtctgtcacatatgatgattccgttggagtagaagtgtccagcgacagcttctgggaggtcgggaactacaagcggactgtgaagcggatcgacgatggccaccgcctgtgcagcgacctcatgaactgcctgcatgagcgggcgcgcatcgagaaggcgtatgcgcagcagctcactgagtgggcccggcgctggaggcagctcgtggagaaagggccccagtacgggaccgtggagaaggcctggatggccttcatgtccgaggcagagagggtgagcgagctgcacctcgaggtgaaggcctcactgatgaacgatgacttcgagaagatcaagaactggcagaaggaagcctttcacaagcagatgatgggcggcttcaaggagaccaaggaagctgaggacggctttcggaaggcacagaagccctgggccaagaagctgaaagaggtagaagcagcaaagaaagcccaccatgcagcgtgcaaagaggagaagctggctatctcacgagaagccaacagcaaggcagacccatccctcaaccctgaacagctcaagaaattgcaagacaaaatagaaaagtgcaagcaagatgttcttaagaccaaagagaagtatgagaagtccctgaaggaactcgaccagggcacaccccagtacatggagaacatggagcaggtgtttgagcagtgccagcagttcgaggagaaacgccttcgcttcttccgggaggttctgctggaggttcagaagcacctagacctgtccaatgtggctggctacaaagccatttaccatgacctggagcagagcatcagagcagctgatgcagtggaggacctgaggtggttccgagccaatcacgggccgggcatggccatgaactggccgcagtttgaggagtggtccgcagacctgaatcgaaccctcagccggagagagaagaagaaggccactgacggcgtcaccctgacgggcatcaaccagacaggcgaccagtctctgccgagtaagcccagcagcacccttaatgtcccgagcaaccccgcccagtctgcgcagtcacagtccagctacaaccccttcgaggatgaggacgacacgggcagcaccgtcagtgagaaggacgacactaaggccaaaaatgtgagcagctacgagaagacccagagctatcccaccgactggtcagacgatgagtctaacaaccccttctcctccacggatgccaatggggactcgaatccattcgacgacgacgccacctcggggacggaagtgcgagtccgggccctgtatgactatgaggggcaggagcatgatgagctgagcttcaaggctggggatgagctgaccaagatggaggacgaggatgagcagggctggtgcaagggacgcttggacaacgggcaagttggcctatacccggcaaattatgtggaggcgatccagtgatgagtcggggacaggccagcggggggacggaggcggcgggcccaggagcctcagccagccacgtgggcatccactccttttcctgcaagagatgatggttccattgctcttggcttcatggtgttcctggaaggcagatgagctggtcatttcgcctgggactcggcacctttccgagtgcagctggagggatctgagcgcaggaagacgcagaacaacagaaatagccgcccctccccgcccactgtgcctgttggcctatcatagatctctatgttcttgactttgtctctcctttccgagtcaatggtgggttacactgatcttgttccactgattactctctctgacgagtccatcacctgcaacttaaatgaacaagcttacatcccattttgagtgaagattttgaggtttttaattt

SEQ ID NO: 12585 - protein, 486 aa, Homo sapiens; identical to SEQ ID NO: 12583

SEQ ID NO: 12586 - DNA, 745 bp, Homo sapiens
acagtttaaagagcaagatttcaatctgacatcctcaatctacacttaaggggcaaaccataaacccttgagaaaggacgggaacacacccggagaggcataggaggaaaatggcccaaagaaacaccttggctaaaaaatgtcgctgcctctgaagtccttaaagtgattcactgtctcttcacgtgctgaatctgagagtgctgtaggcgatgaaatatcacctgccatcttacacatgcatcagaaatggacagaaggaggaaagaaaagaaggtgttcacataaaacaagacttcagttgctgtggaggcaggtgagcctcacatagcttctaatttcatgcatcagagtacagaaatcaggttcttttgttcaccttttagaatggatgtcatactaatcacacagctggggacatctttccaattgtgtgacgtctgctccagaatgatggtctacttcaactcggacaaggcaggagagtgacccgccacccggggctccaaacagagccctgccctttcagccacaacatgcagcagcaccaggacctctgggtttgggccctggacacactcagcacctttgtctcagctctcagaccttctctggaccctcctgtcctcgtgtctcacgcagagcctagcacagatgaggcacccactcaatcctgacccaagaagtacatggatacccacgttcacaccacataaacaagggaaaaagttattcaataaactaa

SEQ ID NO: 12587 - protein, 48 aa, Homo sapiens [sequence omitted]

SEQ ID NO: 12588 - DNA, 293 bp, Homo sapiens
tccgttacagagaactagcaggtgagctattttccatccgaaattgggtataagcaaaaaaggcagagtggcacagcgcatccactacacatcaacttataaggtgaggactgtagctgggcgcggtggctcacgcctataatctcagcactttgggaggccaagatgggtggatcacctgaggtcaggagttcaagaccacaaaataataagaatccttccaattacttttataacataaagaagtgtttaaactgcatgtgagcataacatacctaatataatccagggta

SEQ ID NO: 12589 - protein, 32 aa, Homo sapiens
MGGSPEVRSSRPQNNKNPSNYFYNIKKCLNCM

SEQ ID NO: 12590 - DNA, 1677 bp, Homo sapiens; identical to SEQ ID NO: 2175

SEQ ID NO: 12591 - protein, 379 aa, Homo sapiens; identical to SEQ ID NO: 2176

SEQ ID NO: 12592 - DNA, 1506 bp, Homo sapiens
tccggctccggctctggctctgcgcggtggcagcggcggcggcggcgcggggaccgaggttgaagttcatgagttcgcccagcctcagtgacctgggcaagagagagccggccgccgccgcggacgagcggggcacgcagcagcgccgggcctgcgccaacgccacctggaacagcatccacaacggggtgatcgccgtcttccagcgcaaggggctgcccgaccaggagctcttcagcctcaacgagggcgtccggcagctgttgaagacagagctggggtccttcttcacggagtacctgcagaaccagctgctgacaaaaggcatggtgatccttcgggacaagattcgcttctatgagggacagaagctgctggactcactggcagagacctgggacttcttcttcagtgacgtgctgcccatgctgcaggccatcttctacccggtgcagggcaaggagccatcggtgcgccagctggccctgctgcacttccggaatgccatcaccctcagtgtgaagctagaggatgcgctggcccgggcccatgcccgtgtgccccctgccatcgtgcagatgctgctggtgctgcagaaaagcgcctcctccgccgctcccgctcgggggacgtgctggccaagaaccctgtggtgcgctccaagagctacaacacgcctctgctgaaccccgtgcaggagcacgaggcggagggcgcggcggccggcggtaccagcatccgcaggcactctgtgtcggagatgacgtcctgccccgagcctcagggcttctccgacccgcccggccagggccccaccgggaccttcaggtcctccccggcgccccactcagggccctgccccagcagactgtaccccacgacccagccccctgagcagggcttggatcccacccgcagctccctgccccgctccagcccggagaacctggtggaccagatcctggagtccgtggactcggattctgaagggattttcattgactttggccggggccggggctctggcatgtccgacttggagggctctgggggccggcagagtgtcgtgtgaggcctcacagctggccttgagtttttactgacacgtccctgtgtgcgggggtgtccatgtggcgtgtgtgtgagtgagacttttttactgcgtcccgtcccgccagccctatcggcctcgtcactggccttggtcactttgtatttctgtcttggttggaaataccatcagccttccttgctcggcccaggtctgtttcaggcatctgagtcggcgtttacccaggggccgggccagagacgggggtcggccgctcgctcccacgctcctcctgccccagccctctggtgtccacacctgcccacagagaatgtaaacccagtgggctctgcccacgccgggccccaaagtgaccagactccagcacacctgtctcctcctgcctggggtggccatggggatggaagggggtggaataaaacctgtcaacctgg

SEQ ID NO: 12593 - protein, 205 aa, Homo sapiens
MSSPSLSDLGKREPAAAADERGTQQRRACANATWNSIHNGVIAVFQRKGLPDQELFSLNEGVRQLLKTELGSFFTEYLQNQLLTKGMVILRDKIRFYEGQKLLDSLAETWDFFFSDVLPMLQAIFYPVQGKEPSVRQLALLHFRNAITLSVKLEDALARAHARVPPAIVQMLLVLQKSASSAAPARGTCWPRTLWCAPRATTRLC

SEQ ID NO: 12594 - DNA, 1942 bp, Homo sapiens
caggaaggggtgctctgtgggcttggaggatgcaggcgccttcctggggactgctctgtgagcagtgataaaatatttatcagccagcagctgggcttccctgcatagggtgcagtcgggggcagctcccacccgagcctgcagcctgagttctgctgagtcatgggggagcccagtgagccgcctgccctcaagctcctgggccccctctgccctttggccatgtgaacgcctcctaatgtgtaagccattcggctgcccccaaggccaggcatccagtgtgcttagtgctgagcagggtttcagagctcacccccaggagggtgcagacctcagccaaggtcgcagagcagaggagacccgtgggctgggattccacctgtgcccaccctggcagcatcccacctcctgagtcctctcggcacccagcaaggttgaagttcatgagttcgcccagcctcagtgacctgggcaagagagagccggccgccgccgcggacgagcggggcacgcagcagcgccgggcctgcgccaacgccacctggaacagcatccacaacggggtgatcgccgtcttccagcgcaaggggctgcccgaccaggagctcttcagcctcaacgagggcgtccggcagctgttgaagacagagctggggtccttcttcacggagtacctgcagaaccagctgctgacaaaaggcatggtgatccttcgggacaagattcgcttctatgaggagactcacctgtcaagatgtgtccccataccactacgtctggcaagcccagctcctatagccagcttggatgctcttcctccaggaagccctccctgcctgaccctctgcaccctcttcttccttcgacgtggtgctgctattggaaggggtctccgtggatccccagacctgaccacaggcagagctggcctggccctgggtcctctgggccactgactgtggtgcaccctttcctcggaggctcagcctctgtctgcttggtggggggtcgatcacccctggctactgcccttatgatcctgctcagtgtcccacttccctgtcatgtgatggatgggcagctgtttggggctcagctgggtccccagtgcccagcatcagcgccagcacacagtaggtgttctgtgtttgttggaggggcagatagtgtgggggaaggagggaggaggtcggtgggtagaagaaatcaactgcttagccgggttgttaggaggatctgatgagactaggatgtgagttgaaactgctgtgccaggcacacctgtgtgggtctcacttgtgccaggcatacctgcgtgggtctcacctgtgtaggtctcacctgtgccaggtgtacctgtgtgggtcttacctgtgcaggtctcctgatgcaggtctcacctgtgccgagtgtacctacctgtgcgggtctcacctgtgtcaggcgtacgtgtaggggtctcacctgtgaacgtctcacctgtgccaggtgtatacctgtgtggctctcacttgtgtgggtctggtatgtgacaaaggcctgggaattggcagctgtcatctgccaggagcagaccctgagccaagttccctgtgccttaggctcatttcatgccctcagctctgggaggccaatccctttactgccacattttataaatggaagactgaggttaagcagtgggcccagggccatagaacagctgagctgtggagctggacatcgaccttgggcaggtgctgccaggggcctgagcccaggccctccactcccgcatcctctgatgacccatcctgggtgagtggaggcatctgcccgcgccagtcaggcccagtggtgatggcccccatgcccacaggacagaagctgctggactcactggcagagacctgggacttcttcttcagtgacgtgctgcccatgctgcaggccatcttctacc

SEQ ID NO: 12595 - protein, 170 aa, Homo sapiens
MSSPSLSDLGKREPAAAADERGTQQRRACANATWNSIHNGVIAVFQRKGLPDQELFSLNEGVRQLLKTELGSFFTEYLQNQLLTKGMVILRDKIRFYEETHLSRCVPIPLRLASPAPIASLDALPPGSPPCLTLCTLFFLRRGAAIGRGLRGSPDLTTGRAGLALGPLGH

SEQ ID NO: 12596 - DNA, 2556 bp, Homo sapiens
caggaaggggtgctctgtgggcttggaggatgcaggcgccttcctggggactgctctgtgagcagtgataaaatatttatcagccagcagctgggcttccctgcatagggtgcagtcgggggcagctcccacccgagcctgcagcctgagttctgctgagtcatgggggagcccagtgagccgcctgccctcaagctcctgggccccctctgccctttggccatgtgaacgcctcctaatgtgtaagccattcggctgcccccaaggccaggcatccagtgtgcttagtgctgagcagggtttcagagctcacccccaggagggtgcagacctcagccaaggtcgcagagcagaggagacccgtgggctgggattccacctgtgcccaccctggcagcatcccacctcctgagtcctctcggcacccagcaagagtcccttcagtgacttcgagcgtgcattgagagcccagtaacactggggggcaactgccacaaagacacagcctcagccaggcgcagtgactcatgcctgtaatcccagcaccttgggaggccaaggcttgtggatcacctgaggtcaggagtttgagaccagccggaccaacatggagaaaccccatctctactaaaaatacaaaaaaattagctaggcattgtggcgcatgcctgtaatcccggctactcgggaggctgagggaggagaagcacttgaacccaggaggcgcggttgcagtgagccgagatcgccccattgcactccagcctgggcaacaagagcgaaactccatctcaaaataataataataacaataatagtaagactcagcctccccgctctgggacactcagtctgatggggcaggctggtcagaagacatagagccatggtgtgtttggaactttcacagagggaagcctggggctcgggaagcccggaaaagatgccggcgcagcctgagggcttgtacaggttgaagttcatgagttcgcccagcctcagtgacctgggcaagagagagccggccgccgccgcggacgagcggggcacgcagcagcgccgggcctgcgccaacgccacctggaacagcatccacaacggggtgatcgccgtcttccagcgcaaggggctgcccgaccaggagctcttcagcctcaacgagggcgtccggcagctgttgaagacagagctggggtccttcttcacggagtacctgcagaaccagctgctgacaaaaggcatggtgatccttcgggacaagattcgcttctatgagggacagaagctgctggactcactggcagagacctgggacttcttcttcagtgacgtgctgcccatgctgcaggccatcttctacccggtgcagggcaaggagccatcggtgcgccagctggccctgctgcacttccggaatgccatcaccctcagtgtgaagctagaggatgcgctggcccgggcccatgcccgtgtgccccctgccatcgtgcagatgctgctggtgctgcagggggtacatgagtccaggggcgtgactgaggactacctgcgcctggagacgctggtccagaaggtggtgtcgccatacctgggcacctacggcctccactccagcgaggggcccttcacccattcctgcatcctggaaaagcgcctcctccgccgctcccgctcgggggacgtgctggccaagaaccctgtggtgcgctccaagagctacaacacgcctctgctgaaccccgtgcaggagcacgaggcggagggcgcggcggccggcggtaccagcatccgcaggcactctgtgtcggagatgacgtcctgccccgagcctcagggcttctccgacccgcccggccagggccccaccgggaccttcaggtcctccccggcgccccactcagggccctgccccagcagactgtaccccacgacccagccccctgagcagggcttggatcccacccgcagctccctgccccgctccagcccggagaacctggtggaccagatcctggagtccgtggactcggattctgaagggattttcattgactttggccggggccggggctctggcatgtccgacttggagggctctgggggccggcagagtgtcgtgtgaggcctcacagctggccttgagtttttactgacacgtccctgtgtgcgggggtgtccatgtggcgtgtgtgtgagtgagacttttttactgcgtcccgtcccgccagccctatcggcctcgtcactggccttggtcactttgtatttctgtcttggttggaaataccatcagccttccttgctcggcccaggtctgtttcaggcatctgagtcggcgtttacccaggggccgggccagagacgggggtcggccgctcgctcccacgctcctcctgccccagccctctggtgtccacacctgcccacagagaatgtaaacccagtgggctctgcccacgccgggccccaaagtgaccagactccagcacacctgtctcctcctgcctggggtggccatggggatggaagggggtggaataaaacctgtcaacctgg

SEQ ID NO: 12597 - protein, 411 aa, Homo sapiens
MVCLELSQREAWGSGSPEKMPAQPEGLYRLKFMSSPSLSDLGKREPAAAADERGTQQRRACANATWNSIHNGVIAVFQRKGLPDQELFSLNEGVRQLLKTELGSFFTEYLQNQLLTKGMVILRDKIRFYEGQKLLDSLAETWDFFFSDVLPMLQAIFYPVQGKEPSVRQLALLHFRNAITLSVKLEDALARAHARVPPAIVQMLLVLQGVHESRGVTEDYLRLETLVQKVVSPYLGTYGLHSSEGPFTHSCILEKRLLRRSRSGDVLAKNPVVRSKSYNTPLLNPVQEHEAEGAAAGGTSIRRHSVSEMTSCPEPQGFSDPPGQGPTGTFRSSPAPHSGPCPSRLYPTTQPPEQGLDPTRSSLPRSSPENLVDQILESVDSDSEGIFIDFGRGRGSGMSDLEGSGGRQSVV

SEQ ID NO: 12598 - DNA, 2017 bp, Homo sapiens; identical to SEQ ID NO: 2181

SEQ ID NO: 12599 - protein, 379 aa, Homo sapiens; identical to SEQ ID NO: 2176

SEQ ID NO: 12600 - DNA, 1904 bp, Homo sapiens
gcccccggcctccgtttgcgccgggtctgtgctggccgcgcgcctggcgctccacgctgagcctctccgtgcaatgattaacccggcggggcggccggcgcgggacccgagacggaggcgcggggccggggcgggaccccgcaggaccgctcggcttcctgctctcgccggagtttccgcgtagagggcgcatcgccggcccggggcccttggtgcggcgtggcgcagggcgcggcgtggggcgcgcgtgggcgcggcgcaggcggcccgggtcaccatgaggactctccgcaggttgaagttcatgagttcgcccagcctcagtgacctgggcaagagagagccggccgccgccgcggacgagcggggcacgcagcagcgccgggcctgcgccaacgccacctggaacagcatccacaacggggtgatcgccgtcttccagcgcaaggggctgcccgaccaggagctcttcagcctcaacgagggcgtccggcagctgttgaagacagagctggggtccttcttcacggagtacctgcagaaccagctgctgacaaaaggcatggtgatccttcgggacaagattcgcttctatgagggacagaagctgctggactcactggcagagacctgggacttcttcttcagtgacgtgctgcccatgctgcaggccatcttctacccggtgcagggcaaggagccatcggtgcgccagctggccctgctgcacttccggaatgccatcaccctcagtgtgaagctagaggatgcgctggcccgggcccatgcccgtgtgccccctgccatcgtgcagatgctgctggtgctgcagggggtacatgagtccaggggcgtgactgaggactacctgcgcctggagacgctggtccagaaggtggtgtcgccatacctgggcacctacggcctccactccagcgaggggcccttcacccattcctgcatcctggaaaagcgcctcctccgccgctcccgctcgggggacgtgctggccaagaaccctgtggtgcgctccaagagctacaacacgcctctgctgaaccccgtgcaggagcacgaggcggagggcgcggcggccggcggtaccagcatccgcaggcactctgtgtcggagatgacgtcctgccccgagcctcagggcttctccgacccgcccggccagggccccaccgggaccttcaggtcctccccggcgccccactcagggccctgccccagcagactgtaccccacgacccagccccctgagcagggcttggatcccacccgcagctccctgccccgctccagcccggagaacctggtggaccagatcctggagtccgtggactcggattctgaagggattttcattgactttggccggggccggggctctggcatgtccgacttggagggctctgggggccggcagagtgtcgtgtgaggcctcacagctggccttgagtttttactgacacgtccctgtgtgcgggggtgtccatgtggcgtgtgtgtgagtgagacttttttactgcgtcccgtcccgccagccctatcggcctcgtcactggccttggtcactttgtatttctgtcttggttggaaataccatcagccttccttgctcggcccaggtctgtttcaggcatctgagtcggcgtttacccaggggccgggccagagacgggggtcggccgctcgctcccacgctcctcctgccccagccctctggtgtccacacctgcccacagagaatgtaaacccagtgggctctgcccacgccgggccccaaagtgaccagactccagcacacctgtctcctcctgcctggggtggccatggggatggaagggggtggaataaaacctgtcaacctggctcatgtctgcagtgcctgccctggg

SEQ ID NO: 12601 - protein, 388 aa, Homo sapiens; identical to SEQ ID NO: 2184

SEQ ID NO: 12602 - DNA, 2129 bp, Homo sapiens
ccgcgcgcctggcgctccacgctgagcctctccgtgcaatgattaacccggcggggcggccggcgcgggacccgagacggaggcgcggggccggggcgggaccccgcaggaccgctcggcttcctgctctcgccggagtttccgcgtagagggcgcatcgccggcccggggcccttggtgcggcgtggcgcagggcgcggcgtggggcgcgcgtgggcgcggcgcaggcggcccgggtcaccatgaggactctccgcaggttgaagttcatgagttcgcccagcctcagtgacctgggcaagagagagccggccgccgccgcggacgagcggggcacgcagcagcgccgggcctgcgccaacgccacctggaacagcatccacaacggggtgatcgccgtcttccagcgcaaggggctgcccgaccaggagctcttcagcctcaacgagggcgtccggcagctgttgaagacagagctggggtccttcttcacggagtacctgcagaaccagctgctgacaaaaggcatggtgatccttcgggacaagattcgcttctatgaggagctgcagagagacaaggcggcggcggctgctgtgctgggtgcagtgaggaagaggccctcggtggtgcccatggctggccaggatcctgcgctgagcacgagtcacccgttctacgacgtggccagacatggcattctgcaggtggcaggggatgaccgctttggaagacgtgttgtcacgttcagctgctgccggatgccaccctcccacgagctggaccaccagcggctgctggagtatttgaagtacacactggaccaatacgttgagaacgattataccatcgtctatttccactacgggctgaacagccggaacaagccttccctgggctggctccagagcgcatacaaggagttcgataggaagtacaagaagaacttgaaggccctctacgtggtgcaccccaccagcttcatcaaggtcctgtggaacatcttgaagcccctcatcagtcacaagtttgggaagaaagtcatctatttcaactacctgagtgagctccacgaacaccttaaatacgaccagctggtcatccctcccgaagttttgcggtacgatgagaagctccagagcctgcacgagggccggacgccgcctcccaccaagacaccaccgccgcggcccccgctgcccacacagcagtttggcgtcagtctgcaatacctcaaagacaaaaatcaaggcgaactcatcccccctgtgctgaggttcacagtgacgtacctgagagagaaaggcctgcgcaccgagggcctgttccggagatccgccagcgtgcagaccgtccgcgagatccagaggctctacaaccaagggaagcccgtgaactttgacgactacggggacattcacatccctgccgtgatcctgaagaccttcctgcgagagctgccccagccgcttctgaccttccaggcctacgagcagattctcgggatcacctgtgtggagagcagcctgcgtgtcactggctgccgccagatcttacggagcctcccagagcacaactacgtcgtcctccgctacctcatgggcttcctgcatgcggtgtcccgggagagcatcttcaacaaaatgaacagctctaacctggcctgtgtcttcgggctgaatttgatctggccatcccagggggtctcctccctgagtgcccttgtgcccctgaacatgttcactgaactgctgatcgagtactatgaaaagatcttcagcaccccggaggcacctggggagcacggcctggcaccatgggaacaggggagcagggcagcccctttgcaggaggctgtgccacggacacaagccacgggcctcaccaagcctaccctacctccgagtcccctgatggcagccagaagacgtctctagtgttgcgaacactctgtatatttcgagctacctcccacacctgtctgtgcacttgtatgttttgtaaacttggcatctgtaaaaataaccagccattagatgaattcagaaccttctaatgaaaactccatgcctctggtccttggactcttgtccatggttcctgagctgtggaccgggatagaataatgc

SEQ ID NO: 12603 - protein, 564 aa, Homo sapiens
MRTLRRLKFMSSPSLSDLGKREPAAAADERGTQQRRACANATWNSIHNGVIAVFQRKGLPDQELFSLNEGVRQLLKTELGSFFTEYLQNQLLTKGMVILRDKIRFYEELQRDKAAAAAVLGAVRKRPSVVPMAGQDPALSTSHPFYDVARHGILQVAGDDRFGRRVVTFSCCRMPPSHELDHQRLLEYLKYTLDQYVENDYTIVYFHYGLNSRNKPSLGWLQSAYKEFDRKYKKNLKALYVVHPTSFIKVLWNILKPLISHKFGKKVIYFNYLSELHEHLKYDQLVIPPEVLRYDEKLQSLHEGRTPPPTKTPPPRPPLPTQQFGVSLQYLKDKNQGELIPPVLRFTVTYLREKGLRTEGLFRRSASVQTVREIQRLYNQGKPVNFDDYGDIHIPAVILKTFLRELPQPLLTFQAYEQILGITCVESSLRVTGCRQILRSLPEHNYVVLRYLMGFLHAVSRESIFNKMNSSNLACVFGLNLIWPSQGVSSLSALVPLNMFTELLIEYYEKIFSTPEAPGEHGLAPWEQGSRAAPLQEAVPRTQATGLTKPTLPPSPLMAARRRL

SEQ ID NO: 12604 - DNA, 1507 bp, Homo sapiens
agtgacctgggcaagagagagccggccgccgccgcggacgagcggggcacgcagcagcgccgggcctgcgccaacgccacctggaacagcatccacaacggggtgatcgccgtcttccagcgcaaggggctgcccgaccaggagctcttcagcctcaacgagggcgtccgaaccagctgctgacaaaaggcatggtgatccttcgggacaagattcgcttctatgagggacagaagctgctggactcactggcagagacctgggacttcttcttcagtgacgtgctgcccatgctgcaggccatcttctacccggtgcagggcaaggagccatcggtgcgccagctggccctgctgcacttccggaatgccatcaccctcagtgtgaagctagaggatgcgctggcccgggcccatgcccgtgtgccccctgccatcgtgcagatgctgctggtgctgcagggggtacatgagtccaggggcgtgactgaggactacctgcgcctggagacgctggtccagaaggtggtgtcgccatacctgggcacctacggcctccactccagcgaggggcccttcacccattcctgcatcctggaaaagcgcctcctccgccgctcccgctcgggggacgtgctggccaagaaccctgtggtgcgctccaagagctacaacacgcctctgctgaaccccgtgcaggagcacgaggcggagggcgcggcggccggcggtaccagcatccgcaggcactctgtgtcggagatgacgtcctgccccgagcctcagggcttctccgacccgcccggccagggccccaccgggaccttcaggtcctccccggcgccccactcagggccctgccccagcagactgtaccccacgacccagccccctgagcagggcttggatcccacccgcagctccctgccccgctccagcccggagaacctggtggaccagatcctggagtccgtggactcggattctgaagggattttcattgactttggccggggccggggctctggcatgtccgacttggagggctctgggggccggcagagtgtcgtgtgaggcctcacagctggccttgagtttttactgacacgtccctgtgtgcgggggtgtccatgtggcgtgtgtgtgagtgagacttttttactgcgtcccgtcccgccagccctatcggcctcgtcactggccttggtcactttgtatttctgtcttggttggaaataccatcagccttccttgctcggcccaggtctgtttcaggcatctgagtcggcgtttacccaggggccgggccagagacgggggtcggccgctcgctcccacgctcctcctgccccagccctctggtgtccacacctgcccacagagaatgtaaacccagtgggctctgcccacgccgggccccaaagtgaccagactccagcacacctgtctcctcctgcctggggtggccatggggatggaagggggtggaataaaacctgtcaacctgg

SEQ ID NO: 12605 - protein, 293 aa, Homo sapiens; identical to SEQ ID NO: 2178

SEQ ID NO: 12606 - DNA, 1860 bp, Homo sapiens
ctcagtccaggcagaaaggccaagggttcttcacgttgcctctcccactggaacccagagccagcttgggcagctgtccccgtcccacaagggtcactcacctggtgcatggcaccgttcctctcaaggccagcagaaatcctacagagctggtcccgatgtctgctacctacgtatctgtttcagagactcacctgtcaagatgtgtccccataccactacgtctggcaagcccagctcctatagccagcttggatgctcttcctccaggaagccctccctgcctgaccctctgcaccctcttcttccttcgacgtggtgctgctattggaaggggtctccgtggatccccagacctgaccacaggcagagctggcctggccctgggtcctctgggccactgactgtggtgcaccctttcctcggaggctcagcctctgtctgcttggtggggggtcgatcacccctggctactgcccttatgatcctgctcagtgtcccacttccctgtcatgtgatggatgggcagctgtttggggctcagctgggtccccagtgcccagcatcagcgccagcacacagacagaagctgctggactcactggcagagacctgggacttcttcttcagtgacgtgctgcccatgctgcaggccatcttctacccggtgcagggcaaggagccatcggtgcgccagctggccctgctgcacttccggaatgccatcaccctcagtgtgaagctagaggatgcgctggcccgggcccatgcccgtgtgccccctgccatcgtgcagatgctgctggtgctgcagggggtacatgagtccaggggcgtgactgaggactacctgcgcctggagacgctggtccagaaggtggtgtcgccatacctgggcacctacggcctccactccagcgaggggcccttcacccattcctgcatcctggaaaagcgcctcctccgccgctcccgctcgggggacgtgctggccaagaaccctgtggtgcgctccaagagctacaacacgcctctgctgaaccccgtgcaggagcacgaggcggagggcgcggcggccggcggtaccagcatccgcaggcactctgtgtcggagatgacgtcctgccccgagcctcagggcttctccgacccgcccggccagggccccaccgggaccttcaggtcctccccggcgccccactcagggccctgccccagcagactgtaccccacgacccagccccctgagcagggcttggatcccacccgcagctccctgccccgctccagcccggagaacctggtggaccagatcctggagtccgtggactcggattctgaagggattttcattgactttggccggggccggggctctggcatgtccgacttggagggctctgggggccggcagagtgtcgtgtgaggcctcacagctggccttgagtttttactgacacgtccctgtgtgcgggggtgtccatgtggcgtgtgtgtgagtgagacttttttactgcgtcccgtcccgccagccctatcggcctcgtcactggccttggtcactttgtatttctgtcttggttggaaataccatcagccttccttgctcggcccaggtctgtttcaggcatctgagtcggcgtttacccaggggccgggccagagacgggggtcggccgctcgctcccacgctcctcctgccccagccctctggtgtccacacctgcccacagagaatgtaaacccagtgggctctgcccacgccgggccccaaagtgaccagactccagcacacctgtctcctcctgcctggggtggccatggggatggaagggggtggaataaaacctgtcaacctgg

SEQ ID NO: 12607 - protein, 407 aa, Homo sapiens
MCPHTTTSGKPSSYSQLGCSSSRKPSLPDPLHPLLPSTWCCYWKGSPWIPRPDHRQSWPGPGSSGPLTVVHPFLGGSASVCLVGGRSPLATALMILLSVPLPCHVMDGQLFGAQLGPQCPASAPAHRQKLLDSLAETWDFFFSDVLPMLQAIFYPVQGKEPSVRQLALLHFRNAITLSVKLEDALARAHARVPPAIVQMLLVLQGVHESRGVTEDYLRLETLVQKVVSPYLGTYGLHSSEGPFTHSCILEKRLLRRSRSGDVLAKNPVVRSKSYNTPLLNPVQEHEAEGAAAGGTSIRRHSVSEMTSCPEPQGFSDPPGQGPTGTFRSSPAPHSGPCPSRLYPTTQPPEQGLDPTRSSLPRSSPENLVDQILESVDSDSEGIFIDFGRGRGSGMSDLEGSGGRQSVV

SEQ ID NO: 12608 - DNA, 2125 bp, Homo sapiens
tcacccctggctactgcccttatgatcctgctcagtgtcccacttccctgtcatgtgatggatgggcagctgtttggggctcagctgggtccccagtgcccagcatcagcgccagcacacagtaggtgttctgtgtttgttggaggggcagatagtgtgggggaaggagggaggaggtcggtgggtagaagaaatcaactgcttagccgggttgttaggaggatctgatgagactaggatgtgagttgaaactgctgtgccaggcacacctgtgtgggtctcacttgtgccaggcatacctgcgtgggtctcacctgtgtaggtctcacctgtgccaggtgtacctgtgtgggtcttacctgtgcaggtctcctgatgcaggtctcacctgtgccgagtgtacctacctgtgcgggtctcacctgtgtcaggcgtacgtgtaggggtctcacctgtgaacgtctcacctgtgccaggtgtatacctgtgtggctctcacttgtgtgggtctggtatgtgacaaaggcctgggaattggcagctgtcatctgccaggagcagaccctgagccaagttccctgtgccttaggctcatttcatgccctcagctctgggaggccaatccctttactgccacattttataaatggaagactgaggttaagcagtgggcccagggccatagaacagctgagctgtggagctggacatcgaccttgggcaggtgctgccaggggcctgagcccaggccctccactcccgcatcctctgatgacccatcctgggtgagtggaggcatctgcccgcgccagtcaggcccagtggtgatggcccccatgcccacaggacagaagctgctggactcactggcagagacctgggacttcttcttcagtgacgtgctgcccatgctgcaggccatcttctacccggtgcagggcaaggagccatcggtgcgccagctggccctgctgcacttccggaatgccatcaccctcagtgtgaagctagaggatgcgctggcccgggcccatgcccgtgtgccccctgccatcgtgcagatgctgctggtgctgcagggggtacatgagtccaggggcgtgactgaggactacctgcgcctggagacgctggtccagaaggtggtgtcgccatacctgggcacctacggcctccactccagcgaggggcccttcacccattcctgcatcctggaaaagcgcctcctccgccgctcccgctcgggggacgtgctggccaagaaccctgtggtgcgctccaagagctacaacacgcctctgctgaaccccgtgcaggagcacgaggcggagggcgcggcggccggcggtaccagcatccgcaggcactctgtgtcggagatgacgtcctgccccgagcctcagggcttctccgacccgcccggccagggccccaccgggaccttcaggtcctccccggcgccccactcagggccctgccccagcagactgtaccccacgacccagccccctgagcagggcttggatcccacccgcagctccctgccccgctccagcccggagaacctggtggaccagatcctggagtccgtggactcggattctgaagggattttcattgactttggccggggccggggctctggcatgtccgacttggagggctctgggggccggcagagtgtcgtgtgaggcctcacagctggccttgagtttttactgacacgtccctgtgtgcgggggtgtccatgtggcgtgtgtgtgagtgagacttttttactgcgtcccgtcccgccagccctatcggcctcgtcactggccttggtcactttgtatttctgtcttggttggaaataccatcagccttccttgctcggcccaggtctgtttcaggcatctgagtcggcgtttacccaggggccgggccagagacgggggtcggccgctcgctcccacgctcctcctgccccagccctctggtgtccacacctgcccacagagaatgtaaacccagtgggctctgcccacgccgggccccaaagtgaccagactccagcacacctgtctcctcctgcctggggtggccatggggatggaagggggtggaataaaacctgtcaacctgg

SEQ ID NO: 12609 - protein, 287 aa, Homo sapiens
MAPMPTGQKLLDSLAETWDFFFSDVLPMLQAIFYPVQGKEPSVRQLALLHFRNAITLSVKLEDALARAHARVPPAIVQMLLVLQGVHESRGVTEDYLRLETLVQKVVSPYLGTYGLHSSEGPFTHSCILEKRLLRRSRSGDVLAKNPVVRSKSYNTPLLNPVQEHEAEGAAAGGTSIRRHSVSEMTSCPEPQGFSDPPGQGPTGTFRSSPAPHSGPCPSRLYPTTQPPEQGLDPTRSSLPRSSPENLVDQILESVDSDSEGIFIDFGRGRGSGMSDLEGSGGRQSVV

SEQ ID NO: 12610 - DNA, 2632 bp, Homo sapiens
aaaattagggtctgtgaggacactcgggaccctcacagggcaaccagagcaaggaaggggcggccagtgtggagctgtgcaaggtgggggctgccctgggtggaagttgagagagtttaggtcaggcctggctgggttgaagcggggacccttgagggactttgctgtgtcagcttcagcttcccggtctttaacagagggaggcctcctccctggcaggataggtgaggacttggtcattcacaaccaagtcactgctcctacaggcagacaattccagggacacgtggggtcccctgtgttagtgtaggtgaccttactgtgggcacctgtggagtcccacctactcattgtaacacaggccaggacataggagcctgtaccagccccgaaaccccaagagttcaggcgactttgctcacccccagggacgtggcctggaccgtgcctcactccctgcctggagtggcctcccacagccatcccaagagtcctgggttagtcctcgcctctggctggctggattgtcacttacaattgtacctgggtgtggccgggtgcagtcactcatgcctgcaatcccagtactttgggaggccaaggcaggcagatcacaaggtcaggagattgagaccatcctggccaacatggcgaaaccccgtctctactaaaaatacaaaaattagccgggcatggtgatgcatgcctgtagtcccagctactcgggaggctgaggcaggagaatcacttgaacctgggaggcggaggttgcagtgagccaagatcgcaccactgcactccagcctggtgacagagcgaaactctgtctcaaaaaaaaaaattctacccccgtgtatcttgtccctgaaccccctgacagccccttgaggcctgctgtcttccattcattcacttatttaatgagtgcaagcactcgttataagtcagctttctcccagccctctttgctgggtgctgaggtcccagagcttttgtcccagctcagcgcacagctgggtgagcagcctcatctcccgggccttggctcaaatacacctggaggtagcggtgagcccttcagagctccggatgaggggagatgatggcgtgagccagtgatgggaagaagagagtggggcttgtgaggtggtccctgatggatgtggactgcacctggccccatggggcagggagccccaggtgagcagcttggccctccctgcgtggggtcagccagtgtctctggagagactgtccaaagcctctaggactcttgagtacagggcccctccgaggggtggaaggtgcagaacacccatctcatctggccacagggcctttttccagggcacaccatggtctcccagatcccgacgctgctgtgagcagcagagtgactcaggccacatgctctgagaggggctgggaggccaccgtgggccctgccatggggacagagagcctgtgggaatggggaggcgggaggcagaggacaggctgtctggtgggtgggacatatggttgagagcctggagccaccaagctcgggtgcatgaccccctaccccctgccccactctcctgcagggggtacatgagtccaggggcgtgactgaggactacctgcgcctggagacgctggtccagaaggtggtgtcgccatacctgggcacctacggcctccactccagcgaggggcccttcacccattcctgcatcctggaaaagcgcctcctccgccgctcccgctcgggggacgtgctggccaagaaccctgtggtgcgctccaagagctacaacacgcctctgctgaaccccgtgcaggagcacgaggcggagggcgcggcggccggcggtaccagcatccgcaggcactctgtgtcggagatgacgtcctgccccgagcctcagggcttctccgacccgcccggccagggccccaccgggaccttcaggtcctccccggcgccccactcagggccctgccccagcagactgtaccccacgacccagccccctgagcagggcttggatcccacccgcagctccctgccccgctccagcccggagaacctggtggaccagatcctggagtccgtggactcggattctgaagggattttcattgactttggccggggccggggctctggcatgtccgacttggagggctctgggggccggcagagtgtcgtgtgaggcctcacagctggccttgagtttttactgacacgtccctgtgtgcgggggtgtccatgtggcgtgtgtgtgagtgagacttttttactgcgtcccgtcccgccagccctatcggcctcgtcactggccttggtcactttgtatttctgtcttggttggaaataccatcagccttccttgctcggcccaggtctgtttcaggcatctgagtcggcgtttacccaggggccgggccagagacgggggtcggccgctcgctcccacgctcctcctgccccagccctctggtgtccacacctgcccacagagaatgtaaacccagtgggctctgcccacgccgggccccaaagtgaccagactccagcacacctgtctcctcctgcctggggtggccatggggatggaagggggtggaataaaacctgtcaacctgg

SEQ ID NO: 12611 - protein, 103 aa, Homo sapiens
MTSCPEPQGFSDPPGQGPTGTFRSSPAPHSGPCPSRLYPTTQPPEQGLDPTRSSLPRSSPENLVDQILESVDSDSEGIFIDFGRGRGSGMSDLEGSGGRQSVV

SEQ ID NO: 12612 - DNA, 378 bp, Homo sapiens
agaaccctgtggtgcgctccaagagctacaacacgcctctgctgaaccccgtgcaggagcacgaggcggagggcgcggcggccggcggtaccagcatccgcaggcactctgtgtcggagatgacgtcctgccccgagcctcagggcttctccgacccgcccggccagggccccaccgggaccttcaggtcctccccggcgccccactcagggccctgccccagcagactgtaccccacgacctgcccacagagaatgtaaacccagtgggctctgcccacgccgggccccaaagtgaccagactccagcacacctgtctcctcctgcctggggtggccatggggatggaagggggtggaataaaacctgtcaacctgg

SEQ ID NO: 12613 - protein, 46 aa, Homo sapiens
MTSCPEPQGFSDPPGQGPTGTFRSSPAPHSGPCPSRLYPTTCPQRM

SEQ ID NO: 12614 - DNA, 497 bp, Homo sapiens
gctgagccgcagttttgtcatctgtgatacgggtgcataccaaccctgtggagctctctgaagctactcggaatgggtaatgtgccccaggcagggctcagctgggcaagtaggggagcaagagcagcctggggtggcccagggactggtggcccctgctggctggcacttggacccttggcaaggcagtccctaagctctcagtcctcctgccctggggcaggaggggaggcccctgggcagcagccagcagcatccccaaccacagattggggggctgcagtccaggagggtgggtgctgggcctgggccctgcagcagctcacaggactcagtgggggccccaaggaggtgaggaggctgcactcccactcccagaaagcagcagcccaccaagagggtgtgtgtgtgtgtcctagccttgttcccaaagatgtcagaggtgatctgcattcagacatcttataaattggtaaacacctgtaatcccaacagag

SEQ ID NO: 12615 - protein, 131 aa, Homo sapiens
MGNVPQAGLSWASRGARAAWGGPGTGGPCWLALGPLARQSLSSQSSCPGAGGEAPGQQPAASPTTDWGAAVQEGGCWAWALQQLTGLSGGPKEVRRLHSHSQKAAAHQEGVCVCPSLVPKDVRGDLHSDIL

SEQ ID NO: 12616 - DNA, 1657 bp, Homo sapiens
acgtccggggaggggccaggtgagcggcagacccggcacgcaggtgggggccggcggggtccgtggccagagctgcagagagacaaggcggcggcggctgctgtgctgggtgcagtgaggaagaggccctcggtggtgcccatggctggccaggatcctgcgctgagcacgagtcacccgttctacgacgtggccagacatggcattctgcaggtggcaggggatgaccgctttggaagacgtgttgtcacgttcagctgctgccggatgccaccctcccacgagctggaccaccagcggctgctggagtatttgaagtacacactggaccaatacgttgagaacgattataccatcgtctatttccactacgggctgaacagccggaacaagccttccctgggctggctccagagcgcatacaaggagttcgataggaaagacggggatctcactatgtggcccaggctggtctcgaactccaagctcaagcgatcctcccacctcagcctcccaaagtactgggattacaggtacaagaagaacttgaaggccctctacgtggtgcaccccaccagcttcatcaaggtcctgtggaacatcttgaagcccctcatcagtcacaagtttgggaagaaagtcatctatttcaactacctgagtgagctccacgaacaccttaaatacgaccagctggtcatccctcccgaagttttgcggtacgatgagaagctccagagcctgcacgagggccggacgccgcctcccaccaagacaccaccgccgcggcccccgctgcccacacagcagtttggcgtcagtctgcaatacctcaaagacaaaaatcaaggcgaactcatcccccctgtgctgaggttcacagtgacgtacctgagagagaaaggcctgcgcaccgagggcctgttccggagatccgccagcgtgcagaccgtccgcgagatccagaggctctacaaccaagggaagcccgtgaactttgacgactacggggacattcacatccctgccgtgatcctgaagaccttcctgcgagagctgccccagccgcttctgaccttccaggcctacgagcagattctcgggatcacctgtgtggagagcagcctgcgtgtcactggctgccgccagatcttacggagcctcccagagcacaactacgtcgtcctccgctacctcatgggcttcctgcatgcggtgtcccgggagagcatcttcaacaaaatgaacagctctaacctggcctgtgtcttcgggctgaatttgatctggccatcccagggggtctcctccctgagtgcccttgtgcccctgaacatgttcactgaactgctgatcgagtactatgaaaagatcttcagcaccccggaggcacctggggagcacggcctggcaccatgggaacaggggagcagggcagcccctttgcaggaggctgtgccacggacacaagccacgggcctcaccaagcctaccctacctccgagtcccctgatggcagccagaagacgtctctagtgttgcgaacactctgtatatttcgagctacctcccacacctgtctgtgcacttgtatgttttgtaaacttggcatctgtaaaaataaccagccattagatgaattcagaaccttctaatg

SEQ ID NO: 12617 - protein, 464 aa, Homo sapiens; identical to SEQ ID NO: 2188

SEQ ID NO: 12618 - DNA, 1728 bp, Homo sapiens
acgtccggggaggggccaggtgagcggcagacccggcacgcaggtgggggccggcggggtccgtggccagagctgcagagagacaaggcggcggcggctgctgtgctgggtgcagtgaggaagaggccctcggtggtgcccatggctggccaggatcctgcgctgagcacgagtcacccgttctacgacgtggccagacatggcattctgcaggtggcaggggatgaccgctttggaagacgtgttgtcacgttcagctgctgccggatgccaccctcccacgagctggaccaccagcggctgctggagtatttgaagtacacactggaccaatacgttgagaacgattataccatcgtctatttccactacgggctgaacagccggaacaagccttccctgggctggctccagagcgcatacaaggagttcgataggaaagacggggatctcactatgtggcccaggctggtctcgaactccaagctcaagcgatcctcccacctcagcctcccaaagtactgggattacaggtacaagaagaacttgaaggccctctacgtggtgcaccccaccagcttcatcaaggtcctgtggaacatcttgaagcccctcatcagtcacaagtttgggaagaaagtcatctatttcaactacctgagtgagctccacgaacaccttaaatacgaccagctggtcatccctcccgaagttttgcggtacgatgagaagctccagagcctgcacgagggccggacgccgcctcccaccaagacaccaccgccgcggcccccgctgcccacacagcagtttggcgtcagtctgcaatacctcaaagacaaaaatcaaggcgaactcatcccccctgtgctgaggttcacagtgacgtacctgagagagaaaggcctgcgcaccgagggcctgttccggagatccgccagcgtgcagaccgtccgcgagatccagaggctctacaaccaagggaagcccgtgaactttgacgactacggggacattcacatccctgccgtgatcctgaagaccttcctgcgagagctgccccagccgcttctgaccttccaggcctacgagcagattctcgggatcacctgtgtggagagcagcctgcgtgtcactggctgccgccagatcttacggagcctcccagagcacaactacgtcgtcctccgctacctcatgggcttcctgcatgcggtgtcccgggagagcatcttcaacaaaatgaacagctctaacctggcctgtgtcttcgggctgaatttgatctggccatcccagggggtctcctccctgagtgcccttgtgcccctgaacatgttcactgaactgctgatcgagtactatgaaaagatcttcagcaccccggaggcacctggggagcacggcctggcaccatgggaacaggggagcagggcagcccctttgcaggaggctgtgccacggacacaagccacgggcctcaccaagcctaccctacctccgagtcccctgatggcagccagaagacgtctctagtgttgcgaacactctgtatatttcgagctacctcccacacctgtctgtgcacttgtatgttttgtaaacttggcatctgtaaaaataaccagccattagatgaattcagaaccttctaatgaaaactccatgcctctggtccttggactcttgtccatggttcctgagctgtggaccgggatagaataatgc

SEQ ID NO: 12619 - protein, 464 aa, Homo sapiens; identical to SEQ ID NO: 2188

SEQ ID NO: 12620 - DNA, 1758 bp, Homo sapiens
acgtccggggaggggccaggtgagcggcagacccggcacgcaggtgggggccggcggggtccgtggccagagctgcagagagacaaggcggcggcggctgctgtgctgggtgcagtgaggaagaggccctcggtggtgcccatggctggccaggatcctgcgctgagcacgagtcacccgttctacgacgtggccagacatggcattctgcaggtggcaggggatgaccgctttggaagacgtgttgtcacgttcagctgctgccggatgccaccctcccacgagctggaccaccagcggctgctggagtatttgaagtacacactggaccaatacgttgagaacgattataccatcgtctatttccactacgggctgaacagccggaacaagccttccctgggctggctccagagcgcatacaaggagttcgataggaaagacggggatctcactatgtggcccaggctggtctcgaactccaagctcaagcgatcctcccacctcagcctcccaaagtactgggattacaggtacaagaagaacttgaaggccctctacgtggtgcaccccaccagcttcatcaaggtcctgtggaacatcttgaagcccctcatcagtcacaagtttgggaagaaagtcatctatttcaactacctgagtgagctccacgaacaccttaaatacgaccagctggtcatccctcccgaagttttgcggtacgatgagaagctccagagcctgcacgagggccggacgccgcctcccaccaagacaccaccgccgcggcccccgctgcccacacagcagtttggcgtcagtctgcaatacctcaaagacaaaaatcaaggcgaactcatcccccctgtgctgaggttcacagtgacgtacctgagagagaaaggcctgcgcaccgagggcctgttccggagatccgccagcgtgcagaccgtccgcgagatccagaggctctacaaccaagggaagcccgtgaactttgacgactacggggacattcacatccctgccgtgatcctgaagaccttcctgcgagagctgccccagccgcttctgaccttccaggcctacgagcagattctcgggatcacctgtgtggagagcagcctgcgtgtcactggctgccgccagatcttacggagcctcccagagcacaactacgtcgtcctccgctacctcatgggcttcctgcatgcggtgtcccgggagagcatcttcaacaaaatgaacagctctaacctggcctgtgtcttcgggctgaatttgatctggccatcccagggggtctcctccctgagtgcccttgtgcccctgaacatgttcactgaactgctgatcgagtactatgaaaagatcttcagcaccccggaggcacctggggagcacggcctggcaccatgggaacaggggagcagggcagcccctttgcaggaggctgtgccacggacacaagccacgggcctcaccaagcctaccctacctccgagtcccctgatggcagccagaagacgtctctagtgttgcgaacactctgtatatttcgagctacctcccacacctgtctgtgcacttgtatgttttgtaaacttggcatctgtaaaaataaccagccattagatgaattcagaaccttctaatgaaaactccatgcctctggtccttggactcttgtccatggttcctgagctgtggaccgggatagaataatgcatttgttaggatggatgttttgaatcccaa

SEQ ID NO: 12621 - protein, 464 aa, Homo sapiens; identical to SEQ ID NO: 2188

SEQ ID NO: 12622 - DNA, 2905 bp, Homo sapiens
caggtgagcggcagacccggcacgcaggtgggggccggcggggtccgtggccagagctgcagagagacaaggcggcggcggctgctgtgctgggtgcagtgaggaagaggccctcggtggtgcccatggctggccaggatcctgcgctgagcacgagtcacccgttctacgacgtggccagacatggcattctgcaggtggcaggggatgaccgctttggaagacgtgttgtcacgttcagctgctgccggatgccaccctcccacgagctggaccaccagcggctgctggagtatttgaagtacacactggaccaatacgttgagaacgattataccatcgtctatttccactacgggctgaacagccggaacaagccttccctgggctggctccagagcgcatacaaggagttcgataggaagtacaagaagaacttgaaggccctctacgtggtgcaccccaccagcttcatcaaggtcctgtggaacatcttgaagcccctcatcagtcacaagtttgggaagaaagtcatctatttcaactacctgagtgagctccacgaacaccttaaatacgaccagctggtcatccctcccgaagttttgcggtacgatgagaagctccagagcctgcacgagggccggacgccgcctcccaccaagacaccaccgccgcggcccccgctgcccacacagcagtttggcgtcagtctgcaatacctcaaagacaaaaatcaaggcgaactcatcccccctgtgctgaggttcacagtgacgtacctgagagagaaaggcctgcgcaccgagggcctgttccggagatccgccagcgtgcagaccgtccgcgagatccagaggctctacaaccaagggaagcccgtgaactttgacgactacggggacattcacatccctgccgtgatcctgaagaccttcctgcgagagctgccccagccgcttctgaccttccaggcctacgagcagattctcgggatcacctgtgcgtagctgccctggcgcaggggtggggggcttggtcctcagatgctgtcccccagctactggcccagggtcaggctctggggtggccgaggtgacgtgtacccaccctcctcctgttgccatctggcactgcagggcaagagagggggttgttggggctgcccccaccatgcacagccagtccacactgtccaaaggcagaggaggtggggtcggtcagggttgtccaggccggtctctcaggcacagctgggccaggaggcagggtgatggggggctctctagatttggggctcatcatcctggtcaaagtcctgcctgtaaccgctcccaggccccagaccctcagctctctcatctagaaagggctctcggcatttctccccagatcattgtaggatgccaagcatatatcacaggaactgagcagctatagtgtctgatcctacaggcgctttgtgatgggtcaaatgctcagtgtggctgagcacagatgactcgtaaaaaactccgtaacagcatctcaaaacactggtgaatgctaaggaaagtgatgcctcgaaagaaccataaaacccctcaggccttcatctaagtcatcgaacaccgtcttttcaaatgggactacctccagcgccctcctttcttcttggagcactaacagtcgaaggggggagctgattttggtgtgaattctgaagcagctcggttaagatatcgtaaagacaaatcttgaatcttaaaatcaatgtttctaccccactgtgtattcaagaatcacatttgcccaaagggcagcctggcctttgtcctggcccctggggggtgacttctgaaccttgcactttcccaaggggcaggagttacctttgtcactcatcaggggccctgatggtttatggtaactcatggttatggtgtgactcaagataggggtgtaggggtggccattccagaaagaccaattacatggttagagggtgcgggctttgagtgatgtgagaccagcctgacctctggggagggcatggggctggagactgatttcagtctcaaggcgtcctgtcaaggtcgctggaccccaaactcccctcaaaggcaaatttacacccatttactcagcagtgctcctaagcgcctgccaaatgcaacgccctttctgagatggggaaggtctctcctacaccctggaagaccatgaaagatgttgagggctgactgactttggctagtggatgggaagcctgggagagttcagagccaggctgagcctcatggagacaaatttgatcatgcgcatagaggtacctatctggtggagacagaaggaggcactacattcagcagcatcctaccagccggggccagagcaggcaagatggacaatgctccatcacctgaatgcgccaggctgtgtcctagagagaagcttccagaagcctcccaacttcattagcccctgcagagggatgatgactccagcctctgtaggttcctgcttgagaaaactcaatgctgccaggcgaacttactgtttgttccagccaaaacctggtgacagggagataggccctggaacccctctttgagcagcagttcctttagaaagcttgcaattgtgggccaggcatggtggctcacacctgtaatcccagcactttgagaggctgagttgggtggatcacttgtcataggagttcaagaccagcctggtcaacatggcaaaaccctgtctctactaaaatacaaaaattagccaagcgtggtggtgcacgcctgtaatcccagctactcaggaggctgaggcaggagaatgacttgaacccaggaggcagaggttgtagtgagccaggatcgtgccattgcactgcagcctaggtgacagaacaagactccatctc

SEQ ID NO: 12623 - protein, 294 aa, Homo sapiens
MAGQDPALSTSHPFYDVARHGILQVAGDDRFGRRVVTFSCCRMPPSHELDHQRLLEYLKYTLDQYVENDYTIVYFHYGLNSRNKPSLGWLQSAYKEFDRKYKKNLKALYVVHPTSFIKVLWNILKPLISHKFGKKVIYFNYLSELHEHLKYDQLVIPPEVLRYDEKLQSLHEGRTPPPTKTPPPRPPLPTQQFGVSLQYLKDKNQGELIPPVLRFTVTYLREKGLRTEGLFRRSASVQTVREIQRLYNQGKPVNFDDYGDIHIPAVILKTFLRELPQPLLTFQAYEQILGITCA

SEQ ID NO: 12624 - DNA, 1440 bp, Homo sapiens
caggtgagcggcagacccggcacgcaggtgggggccggcggggtccgtggccagagctgcagagagacaaggcggcggcggctgctgtgctgggtgcagtgaggaagaggccctcggtggtgcccatggctggccaggatcctgcgctgagcacgagtcacccgttctacgacgtggccagacatggcattctgcaggtggcaggggatgaccgctttggaagacgtgttgtcacgttcagctgctgccggatgccaccctcccacgagctggaccaccagcggctgctggagtatttgaagtacacactggaccaatacgttgagaacgattataccatcgtctatttccactacgggctgaacagccggaacaagccttccctgggctggctccagagcgcatacaaggagttcgataggaagtacaagaagaacttgaaggccctctacgtggtgcaccccaccagcttcatcaaggtcctgtggaacatcttgaagcccctcatcagtcacaagtttgggaagaaagtcatctatttcaactacctgagtgagctccacgaacaccttaaatacgaccagctggtcatccctcccgaagttttgcggtacgatgagaagctccagagcctgcacgagggccggacgccgcctcccaccaagacaccaccgccgcggcccccgctgcccacacagcagtttggcgtcagtctgcaatacctcaaagacaaaaatcaaggcgaactcatcccccctgtgctgaggttcacagtgacgtacctgagagagaaaggcctgcgcaccgagggcctgttccggagatccgccagcgtgcagaccgtccgcgagatccagaggctctacaaccaagggaagcccgtgaactttgacgactacggggacattcacatccctgccgtgatcctgaagaccttcctgcgagagctgccccagccgcttctgaccttccaggcctacgagcagattctcgggatcacctgtgtcccgggagagcatcttcaacaaaatgaacagctctaacctggcctgtgtcttcgggctgaatttgatctggccatcccagggggtctcctccctgagtgcccttgtgcccctgaacatgttcactgaactgctgatcgagtactatgaaaagatcttcagcaccccggaggcacctggggagcacggcctggcaccatgggaacaggggagcagggcagcccctttgcaggaggctgtgccacggacacaagccacgggcctcaccaagcctaccctacctccgagtcccctgatggcagccagaagacgtctctagtgttgcgaacactctgtatatttcgagctacctcccacacctgtctgtgcacttgtatgttttgtaaacttggcatctgtaaaaataaccagccattagatgaattcagaaccttct

SEQ ID NO: 12625 - protein, 305 aa, Homo sapiens
MAGQDPALSTSHPFYDVARHGILQVAGDDRFGRRVVTFSCCRMPPSHELDHQRLLEYLKYTLDQYVENDYTIVYFHYGLNSRNKPSLGWLQSAYKEFDRKYKKNLKALYVVHPTSFIKVLWNILKPLISHKFGKKVIYFNYLSELHEHLKYDQLVIPPEVLRYDEKLQSLHEGRTPPPTKTPPPRPPLPTQQFGVSLQYLKDKNQGELIPPVLRFTVTYLREKGLRTEGLFRRSASVQTVREIQRLYNQGKPVNFDDYGDIHIPAVILKTFLRELPQPLLTFQAYEQILGITCVPGEHLQQNEQL

SEQ ID NO: 12626 - DNA, 1513 bp, Homo sapiens
ggcacgcaggtgggggccggcggggtccgtggccagagctgcagagagacaaggcggcggcggctgctgtgctgggtgcagtgaggaagaggccctcggtggtgcccatggctggccaggatcctgcgctgagcacgagtcacccgttctacgacgtggccagacatggcattctgcaggtggcaggtatttgaagtacacactggaccaatacgttgagaacgattataccatcgtctatttccactacgggctgaacagccggaacaagccttccctgggctggctccagagcgcatacaaggagttcgataggaagtacaagaagaacttgaaggccctctacgtggtgcaccccaccagcttcatcaaggtcctgtggaacatcttgaagcccctcatcagtcacaagtttgggaagaaagtcatctatttcaactacctgagtgagctccacgaacaccttaaatacgaccagctggtcatccctcccgaagttttgcggtacgatgagaagctccagagcctgcacgagggccggacgccgcctcccaccaagacaccaccgccgcggcccccgctgcccacacagcagtttggcgtcagtctgcaatacctcaaagacaaaaatcaaggcgaactcatcccccctgtgctgaggttcacagtgacgtacctgagagagaaaggcctgcgcaccgagggcctgttccggagatccgccagcgtgcagaccgtccgcgagatccagaggctctacaaccaagggaagcccgtgaactttgacgactacggggacattcacatccctgccgtgatcctgaagaccttcctgcgagagctgccccagccgcttctgaccttccaggcctacgagcagattctcgggatcacctgtgtggagagcagcctgcgtgtcactggctgccgccagatcttacggagcctcccagagcacaactacgtcgtcctccgctacctcatgggcttcctgcatgcggtgtcccgggagagcatcttcaacaaaatgaacagctctaacctggcctgtgtcttcgggctgaatttgatctggccatcccagggggtctcctccctgagtgcccttgtgcccctgaacatgttcactgaactgctgatcgagtactatgaaaagatcttcagcaccccggaggcacctggggagcacggcctggcaccatgggaacaggggagcagggcagcccctttgcaggaggctgtgccacggacacaagccacgggcctcaccaagcctaccctacctccgagtcccctgatggcagccagaagacgtctctagtgttgcgaacactctgtatatttcgagctacctcccacacctgtctgtgcacttgtatgttttgtaaacttggcatctgtaaaaataaccagccattagatgaattcagaaccttctaatgaaaactccatgcctctggtccttggactcttgtccatggttcctgagctgtggaccgggatagaataatgc

SEQ ID NO: 12627 - protein, 112 aa, Homo sapiens
MGFLHAVSRESIFNKMNSSNLACVFGLNLIWPSQGVSSLSALVPLNMFTELLIEYYEKIFSTPEAPGEHGLAPWEQGSRAAPLQEAVPRTQATGLTKPTLPPSPLMAARRRL

SEQ ID NO: 12628 - DNA, 1267 bp, Homo sapiens
ccaagaaaacgttattggcaaaaacaggcagtgggccagatctaagccatgggccgtagtttgccaacccctggtctagaccactcccatttataaagtgattcggctttagcagcttcctggaaggtggtgctgctggctgataaagcagagggatggagcttgtagaattcaggtgatgatagggcttggatctgagtccccagcgcgtctcatgttgaattgaaactttggaggtggggactggtggcaggtgattggatcatgagggcagatacctcatgggttggtgctgtcctcgagatagtgagttcttaccagatctggtttaaaagcatgtggcacctctgtcccactctctcttgctcctgtttttgccacgtgatgcacctccttcctttttgccttctgccataattggaagcctcctgaggcttctccagaagctgaacaggtgctggtgccatgcttgtacagcctgtagaaccatgagccagttaaacctcttttcttataaataaccccatctcagcaagaatagccaaacacacaggtttgctgagcagagccatacggccagaagataagtgggggtcccaagcccaaatgtgggatagtccatcctcagagctgtccttcctacacccctgttctcctcccgggccgggatgcagcgctgcccctggcccctctggagctcagcagggagccccatgcccttccaggtgtggagagcagcctgcgtgtcactggctgccgccagatcttacggagcctcccagagcacaactacgtcgtcctccgctacctcatgggcttcctgcatgcggtgtcccgggagagcatcttcaacaaaatgaacagctctaacctggcctgtgtcttcgggctgaatttgatctggccatcccagggggtctcctccctgagtgcccttgtgcccctgaacatgttcactgaactgctgatcgagtactatgaaaagatcttcagcaccccggaggcacctggggagcacggcctggcaccatgggaacaggggagcagggcagcccctttgcaggaggctgtgccacggacacaagccacgggcctcaccaagcctaccctacctccgagtcccctgatggcagccagaagacgtctctagtgttgcgaacactctgtatatttcgagctacctcccacacctgtctgtgcacttgtatgttttgtaaacttggcatctgtaaaaataaccagccattagatgaattcagaaccttct

SEQ ID NO: 12629 - protein, 112 aa, Homo sapiens; identical to SEQ ID NO: 12627

SEQ ID NO: 12630 - DNA, 1342 bp, Homo sapiens
ccaagaaaacgttattggcaaaaacaggcagtgggccagatctaagccatgggccgtagtttgccaacccctggtctagaccactcccatttataaagtgattcggctttagcagcttcctggaaggtggtgctgctggctgataaagcagagggatggagcttgtagaattcaggtgatgatagggcttggatctgagtccccagcgcgtctcatgttgaattgaaactttggaggtggggactggtggcaggtgattggatcatgagggcagatacctcatgggttggtgctgtcctcgagatagtgagttcttaccagatctggtttaaaagcatgtggcacctctgtcccactctctcttgctcctgtttttgccacgtgatgcacctccttcctttttgccttctgccataattggaagcctcctgaggcttctccagaagctgaacaggtgctggtgccatgcttgtacagcctgtagaaccatgagccagttaaacctcttttcttataaataaccccatctcagcaagaatagccaaacacacaggtttgctgagcagagccatacggccagaagataagtgggggtcccaagcccaaatgtgggatagtccatcctcagagctgtccttcctacacccctgttctcctcccgggccgggatgcagcgctgcccctggcccctctggagctcagcagggagccccatgcccttccaggtgtggagagcagcctgcgtgtcactggctgccgccagatcttacggagcctcccagagcacaactacgtcgtcctccgctacctcatgggcttcctgcatgcggtgtcccgggagagcatcttcaacaaaatgaacagctctaacctggcctgtgtcttcgggctgaatttgatctggccatcccagggggtctcctccctgagtgcccttgtgcccctgaacatgttcactgaactgctgatcgagtactatgaaaagatcttcagcaccccggaggcacctggggagcacggcctggcaccatgggaacaggggagcagggcagcccctttgcaggaggctgtgccacggacacaagccacgggcctcaccaagcctaccctacctccgagtcccctgatggcagccagaagacgtctctagtgttgcgaacactctgtatatttcgagctacctcccacacctgtctgtgcacttgtatgttttgtaaacttggcatctgtaaaaataaccagccattagatgaattcagaaccttctaatgaaaactccatgcctctggtccttggactcttgtccatggttcctgagctgtggaccgggatagaataatgc

SEQ ID NO: 12631 - protein, 112 aa, Homo sapiens; identical to SEQ ID NO: 12627

SEQ ID NO: 12632 - DNA, 1372 bp, Homo sapiens
ccaagaaaacgttattggcaaaaacaggcagtgggccagatctaagccatgggccgtagtttgccaacccctggtctagaccactcccatttataaagtgattcggctttagcagcttcctggaaggtggtgctgctggctgataaagcagagggatggagcttgtagaattcaggtgatgatagggcttggatctgagtccccagcgcgtctcatgttgaattgaaactttggaggtggggactggtggcaggtgattggatcatgagggcagatacctcatgggttggtgctgtcctcgagatagtgagttcttaccagatctggtttaaaagcatgtggcacctctgtcccactctctcttgctcctgtttttgccacgtgatgcacctccttcctttttgccttctgccataattggaagcctcctgaggcttctccagaagctgaacaggtgctggtgccatgcttgtacagcctgtagaaccatgagccagttaaacctcttttcttataaataaccccatctcagcaagaatagccaaacacacaggtttgctgagcagagccatacggccagaagataagtgggggtcccaagcccaaatgtgggatagtccatcctcagagctgtccttcctacacccctgttctcctcccgggccgggatgcagcgctgcccctggcccctctggagctcagcagggagccccatgcccttccaggtgtggagagcagcctgcgtgtcactggctgccgccagatcttacggagcctcccagagcacaactacgtcgtcctccgctacctcatgggcttcctgcatgcggtgtcccgggagagcatcttcaacaaaatgaacagctctaacctggcctgtgtcttcgggctgaatttgatctggccatcccagggggtctcctccctgagtgcccttgtgcccctgaacatgttcactgaactgctgatcgagtactatgaaaagatcttcagcaccccggaggcacctggggagcacggcctggcaccatgggaacaggggagcagggcagcccctttgcaggaggctgtgccacggacacaagccacgggcctcaccaagcctaccctacctccgagtcccctgatggcagccagaagacgtctctagtgttgcgaacactctgtatatttcgagctacctcccacacctgtctgtgcacttgtatgttttgtaaacttggcatctgtaaaaataaccagccattagatgaattcagaaccttctaatgaaaactccatgcctctggtccttggactcttgtccatggttcctgagctgtggaccgggatagaataatgcatttgttaggatggatgttttgaatcccaa

SEQ ID NO: 12633 - protein, 112 aa, Homo sapiens; identical to SEQ ID NO: 12627

SEQ ID NO: 12634 - DNA, 468 bp, Homo sapiens
ggagaacagagtcaccctggctgacagccagctcagccaggacattagagacggggtttcaccatgttggccaggctggtctcgaactcttgacctcaggtgatgcaactgccttggcttcctaaagtgctgggattacaggcgtgagtcaccgcgcccggccagtcgaactctttcttctgaggaggcaaggattgagattgctgcagaacataggcattggccgtcagtaatataccgtgtgactcagaacctcccccgcttctccctgcatcaagagctggggagacggcagcgtgggactcgtgggtaatcccctgcagcggcctgccactcctcccccactgcctggtctgggtggggcacaagactcaggcctaagccaatcagagccttccctggctgcagcaatgggtctaagggccctccctctgtgaccctggccttggccaccaggcttgctttggc

SEQ ID NO: 12635 - protein, 69 aa, Homo sapiens
CNCLGFLKCWDYRRESPRPASRTLSSEEARIEIAAEHRHWPSVIYRVTQNLPRFSLHQELGRRQRGTRG

SEQ ID NO: 12636 - DNA, 668 bp, Homo sapiens
atggagaagaccatcattctcaacattgaaccattggatacaatagaaaatgtaaaggccaagacccaggataaggaaggaatttctcctgaccagcaaagactgatcttcgctgtcaagcaactggaagatggacgtactttgtctgactacaacattcaagaggagtccactcttcatcatgtgttgagatttcatggtggtgctaagaaaatgaagaagtcttatgccattgccaaaaagaatatgcattacagaaagaagattaagctggctgtcctgaaaaactccaaggtgcatgacaatggcaaaattggttgccttcatgggaagtgccttttagatgaatgtggtgcaggaggttttatggccagccactttgacaggcattattgtggcaaatgttgtcttattgcttcaacaaaccagacaagtaatcgtgtatgagttaataagagacatgaactaagaaaataaaagtcataagttgaaatagagattgttcagccagttgacataaggtagagcactgacaaagagaagctgctcacctttagtggtggttatgttcggagctagcagaaaagcctcctgacttcctccaggactcagggaaggcaggggaaggaggactttggtgtcttagtcccttctcacctctttggcat

SEQ ID NO: 12637 - protein, 148 aa, Homo sapiens [sequence omitted]

SEQ ID NO: 12638 - DNA, 660 bp, Homo sapiens
ctttttcaaaatgtggcggtggcagggaaggttgtctgctccagaggcttccctagagtgaagagctctactatgtatgctttatgcggcagaaggagtgctttggaggagtttttaaatttgttttttttttaaatcttatcggttttaattgtagcaatgattcaagaaacgttagtaggtgcccataacttcggtggtggagatccaaaagtgaacaagacagtgttctggctgctaaattcttcttaactggttatgcctggagaccttcacttggttctgtgccagcactgcccatgaacttcatagactgtgatctttgctaaggcctaaatgaatgaagtgtacacttctttggttcactggaactgaacaacagctgaatgtttaaccttgattgcaggtgcaggaccggaagcagaagacagaaagtggagaccagatgtttgaagctgggtaaaggcagggatggagcaggaaccgaggaacaaaccttggaactagccacttgattgccgagccccatagaagacataatttacaagaaactcatagagactcaaaatgtaaggttctctgaaagaaattgaggtgtagttcttaggttaagggaaatgattaacttgatttatctatgaaggttttttctcagtgtgg

SEQ ID NO: 12639 - protein, 42 aa, Homo sapiens
MFNLDCRCRTGSRRQKVETRCLKLGKGRDGAGTEEQTLELAT

SEQ ID NO: 12640 - DNA, 714 bp, Homo sapiens
gggaaggttgtctgctccagaggcttccctagagtgaagagctctactatgtatgctttatgcggcagaaggagtgctttggaggagtttttaaatttgttttttttttaaatcttatcggttttaattgtagcaatgattcaagaaacgttagtaggtgcccataacttcggtggtggagatccaaaagtgaacaagacagtgttctggctgctaaattcttcttaactggttatgcctggagaccttcacttggttctgtgccagcactgcccatgaacttcatagactgtgatctttgctaaggcctaaatgaatgaaggtgcaggaccggaagcagaagacagaaagtggagaccagatgtttgaagctgggtaaaggcagggatggagcaggaaccgaggaacaaaccttggaactagttgcacttgcccaaaggaagttctcgtttgattgactctgtctgctgctccatagcgactttccagctctcaggcctgatccaaggagccacagagcatgcccatcaagagctatgtgggaccatgggggcgggcctgggttttatgtgaagtaatggcttttcaagcctggcatgacagttcgcagtccagcatggcaaccagcagcccagcatgaaggaggcagacagttgaacagattatttttatggcttacttaaagaaatagttttgatgtcaaatccattttgg

SEQ ID NO: 12641 - protein, 39 aa, Homo sapiens
MPIKSYVGPWGRAWVLCEVMAFQAWHDSSQSSMATSSPA

SEQ ID NO: 12642 - DNA, 6106 bp, Homo sapiens
atcggaacataattccaaaatgtaaaataaggtaaaactgtaccttgctccatcccagggagtatgagcaatgtttatgatatgcaaaacctgttccacttatttccttccatacttttcttcctgtgtttctatttctgccatcatatttttttgtattcttatgtctgagtcactgtttctctggcattatcttttagtgtgtgcttctcttactgctagagtctgaatgttggtgtcccctcaaaatccatatattgaaacttaacccggaaggtgatggtattaggacgtgggaactctgggaggtgatgaggtcatgagagtagagccctcatgaatgggattaatgctcttcaaaagaggctccagctccttcgccccttctgccatgtgaggactcagtgagaaggcaccgtctatgaagcgggaagccctcaccaggcaccaaatctgtcagtgctttgaccttggacttccaggctccagaaatgtgagaaacacatttctgttgcttatgagcctcccagtttatggtgttttgttatagcagccccaacagactaagccatttgcttagttccaagatcaaatgtaatgttgggcaatgaatgaaaaggagaacagaaccctcaaatgtccagtaggggaaggccaaagctgtttcttgtttctgcacaaaggagatgacttcatttccttagaaggtaaatgaattagagaagggattagaaacaggcttttttctgcaggaaagaaacatagagggtcagtgttcagtgtcttcttctagtcatatccctttacttggtcagacaccaagggtctgggcccaggatctgctggggaaagtcaatcatgaaaggaacattgggacagatgagccacttggctctttttcattcctgatgctttgcaggggatcagacaattatcttgccctccccctcttctctcaccaagagacttccatcagaggcatgcatgagctgctcatgcagtctgtggaagggccaggagcacattgagcttcgcaaaagggtgaagccttctgggttcacccttttgccaatacaggggccaaaccacactggtttgcaatgtcatggcccagcaaagtgtgcaagtgagcacaagtggagcaattcagcagtgacaggtaccagataaatgagctggcctgaccctggatgaatttcttcacagtcattctgaaaatgtgagtgttaagtgttgaattgtgttcccctcaaaaatgtggaagtcctagcccccagtacttgtgaatgtgatcttatttggaaattgagtctttgcagatgatcaagttaagatgaggtcattagggtgggccctaatccaatatggctggtgtcctaaaaatcaaggggatgttggggcacagacacagacacacacagacacagacacacacacacacacacgtgcatgcagaaaacaccatatgaagactggagttatgctgcccgatgtgaaagaaatcccagaagctgggagaaaggcctggaacagatccttccctagagccttcagagggagcatgtccctgctgacaccttgatcttggacttctgtcctcaagaactgtgagagaataaatttctgttgcttatgccactacatttatggccctttgttatggcagccacagcaaactaatgtgttgagcaaaggtcaagtagcaggaatcacccagagcacctttccttctccagtgagtgctaccaagaaagcgttttccttttgagacaacaattctcatagaagcagcgtacactaagagggaccttctgttacccagtctgggaggctgttgtcttcaccccattatcttcctgcccccactatcatcacctacagaagtcatatgaagaaatgaactttcagaggaaagcttttcattattaaagcaaaacaaaggtgtaatcaggcaacattcagaagtgaggggagcaggaggacttaaagaagaaatggaaaataagcaaaattggggaagtggcatttacatttaagatttgcttttgcatcttctgcatgggaacttcgacccacggctatgtgactatgaggcaactgtaaatgcatcacaaagatgggggtggatggaagctcaaaggattcaaaagatgccagaggaaagtgaagctcaaattgggccccctggcccagcagcatcagcatctcctgggagctcgttagaaacaagaattctcagccgccccaggcatacaggatcaggaattctgggtgggggcccagccatctgcgttttaacaagccctctaggggattctgatacatagtacacaaaagcttgaaaagcatcttgctggggaaaccacaaaagggagagaggtggaaggggaaaggcagcaagatccaaaatgctgttctaaggcaatgcttggcctgaacaatgtcaaatcatacttttaaaaaaatccagctgaaactagaaatcataaaatgatcacatgttacattttacctgaaagcataaatgtacatcatttactaatctttcaacaaggagccaaggccttttgcatctctgggtgcggtgggtcagcagtgccacttcatccttcttactaatgcacagtggatgaaccacatccactgtgcatcatctattcttccagttccagggctttttttttttttaacagcaaatttaagaaacgactacaaagcagtgagtgaaaaattattctgatttttatgatattttctaaaccccttccagtttcatggcaacattttttgggattctccttcaaagccttccttatcattcattagtctttatatacttggcttatgcatttacattgcattgtctgttgttttggttaattaaaataattacgttactggctcatgctaagccggctgctcaactaggaggatggggacctcctggctgtagggatcaaccagcactctagcctgggtgactgagcaggactctgtctccaaaaaaaaaaaaaaaacaacaacaatggaaaaaaacaaacaaaaaaacttttggaaaaaaatcgggataactcattaaaattaaaggaaataaaatgaaagatagcagttgggtgtatcaaggcaggatttaaaggaaaaatattaatttttactttaatcaatttttagctattttatctattatcagtcatgtgaagtgggaaaattatatttctttttctttatgagacaatatttattctgtttatgattatgtatcccaataaatataagtcccagcatcatccatgaaaatggctactgattcaaaagcttgattccttgggctagacactggaagactcaaaagtcccaaaggaaatcaatattctctttgttttatttattttgttttaacctcatgggtatctataggtgaagtttggcatataatatattttttatttcttgtgaaccaaacttcatttaataatagataataacaatagctaacattcattgattaaaatgtgttagggccttattaattactttatattaatttttatttaattatcgtaacaacctgatgatataggtacggttaaagtataatttttaacaagttaaaaacatgaatgtcatatacatacggaatgaaaacattccaaacagtcatttaactcattaatgattggaaccattacaaaattaaactaattccaagagcattttgaggaatctggtatttatagacattttgagggaaaaaaaagtgttgaataagattttgaggctacatttaaaactggttaatatccttcaaagcaataaaaccacagtatttgatgttatcttttctattggatagaaatttatgaattaacgtaacttcagtcatctaaattctaaccaaatagaaaatagaaagtcaaacacaggtacattccctagataatgaagtaacttttagcaccagtcagtgctctggtaaaattttgaaaggtcatgccgcacccttttaaccttattcaacttttagataatttttcttgataaaattataattgtgtacattttaccaatgaggaaattgatgcttagagatattaaataacatgataagggaatcacagtaagggtagagcaaaagtggaacccaggtccttctgatactttaatccactgtcttataccagttgaaagccatttttatctgtcctataaaattctttgtgtgtgtgtgtgtattcaacattacttaaaataaatggaatcaatatttgagattgaaaaacctgtattatatgaaaatttttattatgatggtatcagttgcagtgagatttgtcctatcaaggattttgttctgttttgtttacatgtacatacatgcttacaatggtggaatgatgcattctttgcaagcaaaccagaccccaactaatggtgggtaaaggactcagagttagaagttatgccgaagatagactataacaggatatagttatgccgaagatagactataacagggctaaaaaatgaaggagggagacagactttgacagcaatgatctgaagagccttgatggaagaaagctgagaaggaaaaaactacaaacactgaaatgtacttaactctcaccttttcagtttgaagctgttcatagtgaactcagcctgtgttctaaataaacagacaccaaaaaaatcatgtgggagctagaatgttgactctggggattctgaatattgagctgatttatagtattccaactctttgataaatgtctaaaatgtttcaatacttaggctatctatgatttatttgtatttgatattagctttatgatgatattgtttataaatcagcatggattttgtgtgagttattacaagaaaagtttactcttctgattaattaaggaaagaaccacctaactttgtgaaacttctgactaatcaacatttgaaatgtgtttgttggcatggttttctaaaatagggagtataataaagtaggttaaaagaatgttgtatagtgaaggtccccaagagattgacctaatttatttattgtttaaaacaaaacaaacagaacaaaactaaaaatgatggacttgtacttcagactagtatagaataacaaggtccagatttaccctcttacctgaaataacacaaaaaaaactacacaaaatatatgaagtagtgattttcaagacactaatatcagctaatgaaggacagtggtccttgagagatgataaatgaagtgaactctatgatttcccaagcttactgccttgggagaatttccagaccatcatgctggggaagggggtcggtggagcttgatgaactccatgatatgaggaggtggagctgagagtccagggagaacaacaaggctagaattcacagaaaagagtaccagggaggagagagctgcccagagataggactctggatacctgcagaatatccatcacagtactgacagtgtattcatgtgaggatgctacccagaaccagagaaataatgacctgaaaggattacaggcagtgatatgcagcactctcactggcatgggaatagtgcctattccaccagcaagacttagaaaacctcataattcatgaagcattagatggtaaactctgaaggatcttgcctcaataatggaagaataattcgttctaaacacaactctggccccgcctaacaaatcttaagagcaagacccaaatggatcaaaaagttaggtagagacatggaagatatagaaaagacccaattcaaacttctagagaccaaaactgcaatgttggagacaaagtagaccacatgggaatagtgacagagtagacattgtagaagaaaaggttagtgaatgtgaagatatgtcaataaaagctatccaaaataaaacatacagaaaaattgtttaaatgaacagcacatcagtgatctgtgtgataacttcacacagcctaagatatatgtgcaattggattccctgaagggggaagagggattataggaaaaaatttcaatacaatagccaaaaatataaaactataaactcacatatctaagtaggtcaataaacctaaagcataa

SEQ ID NO: 12643 - protein, 65 aa, Homo sapiens
MATFFGILLQSLPYHSLVFIYLAYAFTLHCLLFWLIKIITLLAHAKPAAQLGGWGPPGCRDQPAL

SEQ ID NO: 12644 - DNA, 835 bp, Homo sapiens
ggggtgcgtgagaacgccggcggtgaccgcagccacagcggtgaccgagtgagaggaaggcggcggcggcggcggcggcggcgtgaagtcactgctgctctgggttcgggttggcgactgaaggcggtaccggcctcccggaacagcccgggggagggcttaggtgcagaagggcaggctggccgcggccggtttggtctggggaccacgggctggagcaggtggaaatttaaaattgtttacagtcaacactgtttccagccatgggtttgtctccatctgctcctgctgttgcagttcaggcctcaaatgcttcagcgtccccaccttcaggatgcccgatgcatgaagggaaaatgaaaggctgtccagtgaatacagagccatctggcccaacctgtgagaagaaaacatactctgtgcctgcccaccaggaacgcgcctatgagtacgtggagtgtcccattaggggcactgcggctgagaataaggagaacctagatccttcaaatctgatgccaccaccaaatcaaacaccagctccagatcagccatttgcattgtctactgtcagagaagagtcatccattccgagagcagattcagagaaaaagtgggtttacccttctgagcagatgttctggaatgcaatgttaaagaaagggtggaagtggaaggatgaggatatcagtcagaaggatatgtataatatcattagaattcacaatcagaataacgagcaggcttggaaggagattttgaagtgggaagcccttcatgctgcgtaagtatgtttgagatcttaaatgtttcaagcatctttgttatttcatat

SEQ ID NO: 12645 - protein, 174 aa, Homo sapiens
MGLSPSAPAVAVQASNASASPPSGCPMHEGKMKGCPVNTEPSGPTCEKKTYSVPAHQERAYEYVECPIRGTAAENKENLDPSNLMPPPNQTPAPDQPFALSTVREESSIPRADSEKKWVYPSEQMFWNAMLKKGWKWKDEDISQKDMYNIIRIHNQNNEQAWKEILKWEALHAA

SEQ ID NO: 12646 - DNA, 1140 bp, Homo sapiens
ggggtgcgtgagaacgccggcggtgaccgcagccacagcggtgaccgagtgagaggaaggcggcggcggcggcggcggcggcgtgaagtcactgctgctctgggttcgggttggcgactgaaggcggtaccggcctcccggaacagcccgggggagggcttaggtgcagaagggcaggctggccgcggccggtttggtctggggaccacgggctggagcaggtggaaatttaaaattgtttacagtcaacactgtttccagccatgggtttgtctccatctgctcctgctgttgcagttcaggcctcaaatgcttcagcgtccccaccttcaggatgcccgatgcatgaagggaaaatgaaaggctgtccagtgaatacagagccatctggcccaacctgtgagaagaaaacatactctgtgcctgcccaccaggaacgcgcctatgagtacgtggagtgtcccattaggggcactgcggctgagaataaggagaacctagatccttcaaatctgatgccaccaccaaatcaaacaccagctccagatcagccatttgcattgtctactgtcagagaagagtcatccattccgagagcagattcagagaaaaagtgggtttacccttctgagcagatgttctggaatgcaatgttaaagaaagggtggaagtggaaggatgaggatatcagtcagaaggatatgtataatatcattagaattcacaatcagaataacgagcaggcttggaaggagattttgaagtgggaagcccttcatgctgcagagtgtccttgtggtccatcattgatccggtttggagggaaagcaaaagagtattcaccaagggcacgaattcgttcctggatggggtatgagttgccttttgataggcacgattggatcataaaccgttgcgggacagaagttagatatgtgattgattattatgatggtggtgaagtcaacaaggactaccagttcaccatcctggacgtccgtcctgccttagattcactttcggcagtatgggacagaatgaaagtcgcttggtggcgttggacctcgtaaagcactgtttcagatggaaaaatataaactatttttttctgagcgatacattaaactattttccccagat

SEQ ID NO: 12647 - protein, 268 aa, Homo sapiens
MGLSPSAPAVAVQASNASASPPSGCPMHEGKMKGCPVNTEPSGPTCEKKTYSVPAHQERAYEYVECPIRGTAAENKENLDPSNLMPPPNQTPAPDQPFALSTVREESSIPRADSEKKWVYPSEQMFWNAMLKKGWKWKDEDISQKDMYNIIRIHNQNNEQAWKEILKWEALHAAECPCGPSLIRFGGKAKEYSPRARIRSWMGYELPFDRHDWIINRCGTEVRYVIDYYDGGEVNKDYQFTILDVRPALDSLSAVWDRMKVAWWRWTS

SEQ ID NO: 12648 - DNA, 2345 bp, Homo sapiens
ggggtgcgtgagaacgccggcggtgaccgcagccacagcggtgaccgagtgagaggaaggcggcggcggcggcggcggcggcgtgaagtcactgctgctctgggttcgggttggcgactgaaggcggtaccggcctcccggaacagcccgggggagggcttaggtgcagaagggcaggctggccgcggccggtttggtctggggaccacgggctggagcaggtggaaatttaaaattgtttacagtcaacactgtttccagccatgggtttgtctccatctgctcctgctgttgcagttcaggcctcaaatgcttcagcgtccccaccttcaggatgcccgatgcatgaagggaaaatgaaaggctgtccagtgaatacagagccatctggcccaacctgtgagaagaaaacatactctgtgcctgcccaccaggaacgcgcctatgagtacgtggagtgtcccattaggggcactgcggctgagaataaggagaacctagatccttcaaatctgatgccaccaccaaatcaaacaccagctccagatcagccatttgcattgtctactgtcagagaagagtcatccattccgagagcagattcagagaaaaagtgggtttacccttctgagcagatgttctggaatgcaatgttaaagaaagggtggaagtggaaggatgaggatatcagtcagaaggatatgtataatatcattagaattcacaatcagaataacgagcaggcttggaaggagattttgaagtgggaagcccttcatgctgcagagtgtccttgtggtccatcattgatccggtttggagggaaagcaaaagagtattcaccaagggcacgaattcgttcctggatggggtatgagttgccttttgataggcacgattggatcataaaccgttgcgggacagaagttagatatgtgattgattattatgatggtggtgaagtcaacaaggactaccagttcaccatcctggacgtccgtcctgccttagattcactttcggcagtatgggacagaatgaaagtcgcttggtggcgttggacctcgtaaagcactgtttcagatggaaaaatataaactatttttttctgagcgatacattaaactattttccccagattgaattgcactcatgatgtaatgggaacttcaagtgggtaatcacactttttccttcacttaacgaaggatactatgcactgttcacttttgacttgtgttgtaccttgcagtttatagcagatcattttgttttcttcctacttagcttaagtgggaagcagtctctcagtttttcctttacctgcagtattgtctgtatatttcatctcgaaaagcctgaacaacctctgaaaaagagcttttaaaaagtgatgaaagttgcttttttttcttactattttctcaggaatactccagagatgtaaagcctgagagtccatggtgatgctcaagagctttcatctggccaaatattttaactaaagctgttcattataaataagaggtgattataccttttttaaaaaaagttaccattatttctaaagcccctatggtatgattgtgacctttaacaaaatgcaaaggtatacactggaaaggtactcagcaaaattctctccaaattctgatttatatgaatttcttggactggatagagtactttcaactataccttcctttggaacataccttttaaaaaatgttccctttaaatcctgttattctaatatgtaactctgctcccaacaaacaggtctcctcattgtccttggcatttgacaagttatcccaacttcgaatctcatttcttcctttgctggcagcctccacccttccccacatcagtcggcctaatccaaaccttgaaagcctggcttaagtcccagtatcagtgatggtccccctctaaaacatgattttatatttggctgagtgttaaaattcacaagatgagcatttttttcccagatggagaacgcttcaactcagtctagattttttttgtttgttttaaggaagctctaagtttgccattgaaactttttgtaccagtaatccataaactggttgttctatttatagcagcatgttacaaatgactgctttttttttttaactgtctatactattaaatcctttaatttatcctgaatgctgtagtgttaaattagtggatgaaattggcagtctgtgggtgattaatttggtatggatttgtcagttttgtgtggagtttaagaaatagaacagccttaaactctacatttcaaaatacttgtatattttaaaataaagctgattagttcacaggttttgaaa

SEQ ID NO: 12649 - protein, 268 aa, Homo sapiens; identical to SEQ ID NO: 12647

SEQ ID NO: 12650 - DNA, 2284 bp, Homo sapiens
gtgcgtgagaacgccggcggtgaccgcagccacagcggtgaccgagtgagaggaaggcggcggcggcggcggcggcggcgtgaagtcactgctgctctgggttcgggttggcgactgaaggcggtaccggcctcccggaacagcccgggggagggcttaggtggaaatttaaaattgtttacagtcaacactgtttccagccatgggtttgtctccatctgctcctgctgttgcagttcaggcctcaaatgcttcagcgtccccaccttcaggatgcccgatgcatgaagggaaaatgaaaggctgtccagtgaatacagagccatctggcccaacctgtgagaagaaaacatactctgtgcctgcccaccaggaacgcgcctatgagtacgtggagtgtcccattaggggcactgcggctgagaataaggagaacctagatccttcaaatctgatgccaccaccaaatcaaacaccagctccagatcagccatttgcattgtctactgtcagagaagagtcatccattccgagagcagattcagagaaaaagtgggtttacccttctgagcagatgttctggaatgcaatgttaaagaaagggtggaagtggaaggatgaggatatcagtcagaaggatatgtataatatcattagaattcacaatcagaataacgagcaggcttggaaggagattttgaagtgggaagcccttcatgctgcagagtgtccttgtggtccatcattgatccggtttggagggaaagcaaaagagtattcaccaagggcacgaattcgttcctggatggggtatgagttgccttttgataggcacgattggatcataaaccgttgcgggacagaagttagatatgtgattgattattatgatggtggtgaagtcaacaaggactaccagttcaccatcctggacgtccgtcctgccttagattcactttcggcagtatgggacagaatgaaagtcgcttggtggcgttggacctcgtaaagcactgtttcagatggaaaaatataaactatttttttctgagcgatacattaaactattttccccagattgaattgcactcatgatgtaatgggaacttcaagtgggtaatcacactttttccttcacttaacgaaggatactatgcactgttcacttttgacttgtgttgtaccttgcagtttatagcagatcattttgttttcttcctacttagcttaagtgggaagcagtctctcagtttttcctttacctgcagtattgtctgtatatttcatctcgaaaagcctgaacaacctctgaaaaagagcttttaaaaagtgatgaaagttgcttttttttcttactattttctcaggaatactccagagatgtaaagcctgagagtccatggtgatgctcaagagctttcatctggccaaatattttaactaaagctgttcattataaataagaggtgattataccttttttaaaaaaagttaccattatttctaaagcccctatggtatgattgtgacctttaacaaaatgcaaaggtatacactggaaaggtactcagcaaaattctctccaaattctgatttatatgaatttcttggactggatagagtactttcaactataccttcctttggaacataccttttaaaaaatgttccctttaaatcctgttattctaatatgtaactctgctcccaacaaacaggtctcctcattgtccttggcatttgacaagttatcccaacttcgaatctcatttcttcctttgctggcagcctccacccttccccacatcagtcggcctaatccaaaccttgaaagcctggcttaagtcccagtatcagtgatggtccccctctaaaacatgattttatatttggctgagtgttaaaattcacaagatgagcatttttttcccagatggagaacgcttcaactcagtctagattttttttgtttgttttaaggaagctctaagtttgccattgaaactttttgtaccagtaatccataaactggttgttctatttatagcagcatgttacaaatgactgctttttttttttaactgtctatactattaaatcctttaatttatcctgaatgctgtagtgttaaattagtggatgaaattggcagtctgtgggtgattaatttggtatggatttgtcagttttgtgtggagtttaagaaatagaacagccttaaactctacatttcaaaatacttgtatattttaaaataaagctgattagttcacaggttttgaaa

SEQ ID NO: 12651 - protein, 268 aa, Homo sapiens; identical to SEQ ID NO: 12647

SEQ ID NO: 12652 - DNA, 1001 bp, Homo sapiens
ccgagtgagaggaaggcggcggcggcggcggcggcggcgtgaagtcactgctgctctgggttcgggttggcgactgaaggcggtggaaatttaaaattgtttacagtcaacactgtttccagccatgggtttgtctccatctgctcctgctgttgcagttcaggcctcaaatgcttcagcgtccccaccttcaggatgcccgatgcatgaagggaaaatgaaaggctgtccagtgaatacagagccatctggcccaacctgtgagaagaaaacatactctgtgcctgcccaccaggaacgcgcctatgagtacgtggagtgtcccattaggggcactgcggctgagaataaggagaacctagatccttcaaatctgatgccaccaccaaatcaaacaccagctccagatcagccatttgcattgtctactgtcagagaagagtcatccattccgagagcagattcagagaaaaagtgggtttacccttctgagcagatgttctggaatgcaatgttaaagaaagggtggaagtggaaggatgaggatatcagtcagaaggatatgtataatatcattagaattcacaatcagaataacgagcaggcttggaaggagattttgaagtgggaagcccttcatgctgcagagtgtccttgtggtccatcattgatccggtttggagggaaagcaaaagagtattcaccaagggcacgaattcgttcctggatggggtatgagttgccttttgataggcacgattggatcataaaccgttgcgggacagaagttagatatgtgattgattattatgatggtggtgaagtcaacaaggactaccagttcaccatcctggacgtccgtcctgccttagattcactttcggcagtatgggacagaatgaaagtcgcttggtggcgttggacctcgtaaagcactgtttcagatggaaaaatataaactatttttttctgagcgatacattaaactattttccccagat

SEQ ID NO: 12653 - protein, 268 aa, Homo sapiens; identical to SEQ ID NO: 12647

SEQ ID NO: 12654 - DNA, 2205 bp, Homo sapiens
cgagtgagaggaaggcggcggcggcggcggcggcggcgtgaagtcactgctgctctgggttcgggttggcgactgaaggcggtggaaatttaaaattgtttacagtcaacactgtttccagccatgggtttgtctccatctgctcctgctgttgcagttcaggcctcaaatgcttcagcgtccccaccttcaggatgcccgatgcatgaagggaaaatgaaaggctgtccagtgaatacagagccatctggcccaacctgtgagaagaaaacatactctgtgcctgcccaccaggaacgcgcctatgagtacgtggagtgtcccattaggggcactgcggctgagaataaggagaacctagatccttcaaatctgatgccaccaccaaatcaaacaccagctccagatcagccatttgcattgtctactgtcagagaagagtcatccattccgagagcagattcagagaaaaagtgggtttacccttctgagcagatgttctggaatgcaatgttaaagaaagggtggaagtggaaggatgaggatatcagtcagaaggatatgtataatatcattagaattcacaatcagaataacgagcaggcttggaaggagattttgaagtgggaagcccttcatgctgcagagtgtccttgtggtccatcattgatccggtttggagggaaagcaaaagagtattcaccaagggcacgaattcgttcctggatggggtatgagttgccttttgataggcacgattggatcataaaccgttgcgggacagaagttagatatgtgattgattattatgatggtggtgaagtcaacaaggactaccagttcaccatcctggacgtccgtcctgccttagattcactttcggcagtatgggacagaatgaaagtcgcttggtggcgttggacctcgtaaagcactgtttcagatggaaaaatataaactatttttttctgagcgatacattaaactattttccccagattgaattgcactcatgatgtaatgggaacttcaagtgggtaatcacactttttccttcacttaacgaaggatactatgcactgttcacttttgacttgtgttgtaccttgcagtttatagcagatcattttgttttcttcctacttagcttaagtgggaagcagtctctcagtttttcctttacctgcagtattgtctgtatatttcatctcgaaaagcctgaacaacctctgaaaaagagcttttaaaaagtgatgaaagttgcttttttttcttactattttctcaggaatactccagagatgtaaagcctgagagtccatggtgatgctcaagagctttcatctggccaaatattttaactaaagctgttcattataaataagaggtgattataccttttttaaaaaaagttaccattatttctaaagcccctatggtatgattgtgacctttaacaaaatgcaaaggtatacactggaaaggtactcagcaaaattctctccaaattctgatttatatgaatttcttggactggatagagtactttcaactataccttcctttggaacataccttttaaaaaatgttccctttaaatcctgttattctaatatgtaactctgctcccaacaaacaggtctcctcattgtccttggcatttgacaagttatcccaacttcgaatctcatttcttcctttgctggcagcctccacccttccccacatcagtcggcctaatccaaaccttgaaagcctggcttaagtcccagtatcagtgatggtccccctctaaaacatgattttatatttggctgagtgttaaaattcacaagatgagcatttttttcccagatggagaacgcttcaactcagtctagattttttttgtttgttttaaggaagctctaagtttgccattgaaactttttgtaccagtaatccataaactggttgttctatttatagcagcatgttacaaatgactgctttttttttttaactgtctatactattaaatcctttaatttatcctgaatgctgtagtgttaaattagtggatgaaattggcagtctgtgggtgattaatttggtatggatttgtcagttttgtgtggagtttaagaaatagaacagccttaaactctacatttcaaaatacttgtatattttaaaataaagctgattagttcacaggttttgaaa

SEQ ID NO: 12655 - protein, 268 aa, Homo sapiens; identical to SEQ ID NO: 12647

SEQ ID NO: 12656 - DNA, 3884 bp, Homo sapiens
accggctccgcagcggcagcgggacgctgtgccaggggcgctttgcacagcactcggcacgcacggagcagggctcgcgcccaggggctgccccaggatggcagtgaagtgcggggaactcagagagacaccgtgaccccaggctgagcccaaggcgcgccactcctcccggaggcgacatggggcacccggtgtaccgcggcgagaagccccagctgcactacgcgggtgatttcacctggaacagcatgtcaggccgcagtgtacggctgaggtcagtccccatccagagtctctcagagctggagagggcccggctgcaggaagtggctttttatcagttgcaacaggactgtgacctgagctgtcagatcaccattcccaaagatggacaaaagagaaagaaatctttaagaaagaaactggattcactaggaaaggagaaaaacaaagacaaagaattcatcccacaggcatttggaatgcccttatcccaagtcattgcgaatgacagggcctataaactcaagcaggacttgcagagggacgagcagaaagatgcatctgactttgtggcttccctcctcccatttggaaataaaagacaaaacaaagaactctcaagcagtaactcatctctcagctcaacctcagaaacaccgaatgagtcaacgtccccaaacaccccggaaccggctcctcgggctaggaggaggggtgccatgtcagtggattctatcaccgatcttgatgacaatcagtctcgactactagaagctttacaactttccttgcctgctgaggctcaaagtaaaaaggaaaaagccagagataagaaactcagtctgaatcctatttacagacaggtccctaggctggtggacagctgctgtcagcacctagaaaaacatggcctccagacagtggggatattccgagttggaagctcaaaaaagagagtgagacaattacgtgaggaatttgaccgtgggattgatgtctctctggaggaggagcacagtgttcatgatgtggcagccttgctgaaagagttcctgagggacatgccagacccccttctcaccagggagctgtacacagctttcatcaacactctcttgttggagccggaggaacagctgggcaccttgcagctcctcatataccttctacctccctgcaactgcgacaccctccaccgcctgctacagttcctctccatcgtggccaggcatgccgatgacaacatcagcaaagatgggcaagaggtcactgggaataaaatgacatctctaaacttagccaccatatttggacccaacctgctgcacaagcagaagtcatcagacaaagaattctcagttcagagttcagcccgggctgaggagagcacggccatcatcgctgttgtgcaaaagatgattgaaaattatgaagccctgttcatggttcccccagatctccagaacgaagtgctgatcagcctgttagagaccgatcctgatgtcgtggactatttactcagaagaaaggcttcccaatcatcaagccctgacatgctgcagtcggaagtttccttttccgtgggagggaggcattcatctacagactccaacaaggcctccagcggagacatctccccttatgacaacaactccccagtgctgtctgagcgctccctgctggctatgcaagaggacgcggccccggggggctcggagaagctttacagagtgccagggcagtttatgctggtgggccacttgtcgtcgtcaaagtcaagggaaagttctcctggaccaaggcttgggaaagatctgtcagaggagcctttcgatatctggggaacttggcattcaacattaaaaagcggatccaaagacccaggaatgacaggttcctctggagacatttttgaaagcagctccctaagagcggggccctgctccctttctcaagggaacctgtccccaaattggcctcggtggcaggggagccccgcagagctggacagcgacacgcagggggctcggaggactcaggccgcagcccccgcgacggagggcagggcccaccctgcggtgtcgcgcgcctgcagcacgccccacgtccaggtggcagggaaagccgagcggcccacggccaggtcggagcagtacttgaccctgagcggcgcccacgacctcagcgagagtgagctggatgtggccgggctgcagagccgggccacacctcagtgccaaagaccccatgggagtgggagggatgacaagcggcccccgcctccatacccgggcccagggaagcccgcggcagcggcagcctggatccaggggcccccggaaggcgtggagacacccacggaccagggaggccaagcagccgagcgagagcagcaggtcacgcagaaaaaactgagcagcgccaactccctgccagcgggcgagcaggacagtccgcgcctgggggacgctggctggctcgactggcagagagagcgctggcagatctgggagctcctgtcgaccgacaaccccgatgccctgcccgagacgctggtctgagcccgcacccagccgagccccccctgccccgagccccccgccctccagcccaggggggaccgtgggtggtggccactggcacacttagtgttcttctttcacacttctcaaaagtgacacaagagaaatccagttcacctacagaggtagagcactcacgcccccgccattgagaataaggttccattgcgtagccagccttaggaaaaacaaacagaacccaaaccagatggcaatgtccaatctaaaaacgtccctcttggctctataatataagatacaactcttgcttggtatagcctaaccgtatttatgtgtcttcggttttgactattgtgtattctgtaacagattatgtataatcatatatgatatattcacaaagagaaaacaaaaggaacttttaaaaaaaaaatcacttcacttatattaagcaatgagatatactaaacaatgagattctatagaatgttctagaatgtgcacaagcgggtttctgtgcttttgccatagctttataactggggataacccttccttcgataccaaacactaacaagaggaagcagaatatgagaagccatatttttacataggagtcagatacaaaaagaaaaatcactgaatgcttttagatattgaatacgttttcaggaaaatgctaaatctgatagattacgaaatatatttttagaacttgtttagaaaggattcagttaaccaaacaagaaaaaggcagtgcctcacaaagaaattaagaagttgtccgtcccacgttacatcaaattcagttttatataggccatatataatatatatttataatgtataatttttatgtatttttcaaaactacaaactggaatccaactataaagtgtttaagaatctacacagaatattcaaattatagaacatgttttttccctttgccccataatcagtatttgccaaattacatgcaattccttaaaaactaaatcacatttggtaaaaggcctacagctttgtacttacattgtgccaaaggctgaggaaatgttttctttcgtaattttatgtgtattgtaaaatgttctaccgtactttagtagtttgaagtttttcaagtgcataactatttttgaccagcagatggcgatacgcttcagtattttatgcaattttttttcacttctgaagggaaagtgtattataaaaaaagattttttttttttttataaaacatgctactcttaattttcatgttggtgatgaaattcccagtggtgtttcttaaggttctatcttgtgccatgatgaataaaaagttaagcaaag

SEQ ID NO: 12657 - protein, 794 aa, Homo sapiens
MGHPVYRGEKPQLHYAGDFTWNSMSGRSVRLRSVPIQSLSELERARLQEVAFYQLQQDCDLSCQITIPKDGQKRKKSLRKKLDSLGKEKNKDKEFIPQAFGMPLSQVIANDRAYKLKQDLQRDEQKDASDFVASLLPFGNKRQNKELSSSNSSLSSTSETPNESTSPNTPEPAPRARRRGAMSVDSITDLDDNQSRLLEALQLSLPAEAQSKKEKARDKKLSLNPIYRQVPRLVDSCCQHLEKHGLQTVGIFRVGSSKKRVRQLREEFDRGIDVSLEEEHSVHDVAALLKEFLRDMPDPLLTRELYTAFINTLLLEPEEQLGTLQLLIYLLPPCNCDTLHRLLQFLSIVARHADDNISKDGQEVTGNKMTSLNLATIFGPNLLHKQKSSDKEFSVQSSARAEESTAIIAVVQKMIENYEALFMVPPDLQNEVLISLLETDPDVVDYLLRRKASQSSSPDMLQSEVSFSVGGRHSSTDSNKASSGDISPYDNNSPVLSERSLLAMQEDAAPGGSEKLYRVPGQFMLVGHLSSSKSRESSPGPRLGKDLSEEPFDIWGTWHSTLKSGSKDPGMTGSSGDIFESSSLRAGPCSLSQGNLSPNWPRWQGSPAELDSDTQGARRTQAAAPATEGRAHPAVSRACSTPHVQVAGKAERPTARSEQYLTLSGAHDLSESELDVAGLQSRATPQCQRPHGSGRDDKRPPPPYPGPGKPAAAAAWIQGPPEGVETPTDQGGQAAEREQQVTQKKLSSANSLPAGEQDSPRLGDAGWLDWQRERWQIWELLSTDNPDALPETLV

SEQ ID NO: 12658 - DNA, 3944 bp, Homo sapiens
gcctgcctctgttctgaaaggacaggaacttctcaatgatccgatgaaaagattgcatatttttggtcccaagattcacagtagcggaggtctctggcaacaaaaggtatcgtgggagtcacagctatgccagctgggccatttctcagacattcaatatgatctgccatttcaggatgcattttttaccaaaaaaataatttttttaaaacagactcaacttcctactgcaagcttagttcagttagattagagaggacagcaaagacgcggctgattataatttatggggtgatttcacctggaacagcatgtcaggccgcagtgtacggctgaggtcagtccccatccagagtctctcagagctggagagggcccggctgcaggaagtggctttttatcagttgcaacaggactgtgacctgagctgtcagatcaccattcccaaagatggacaaaagagaaagaaatctttaagaaagaaactggattcactaggaaaggagaaaaacaaagacaaagaattcatcccacaggcatttggaatgcccttatcccaagtcattgcgaatgacagggcctataaactcaagcaggacttgcagagggacgagcagaaagatgcatctgactttgtggcttccctcctcccatttggaaataaaagacaaaacaaagaactctcaagcagtaactcatctctcagctcaacctcagaaacaccgaatgagtcaacgtccccaaacaccccggaaccggctcctcgggctaggaggaggggtgccatgtcagtggattctatcaccgatcttgatgacaatcagtctcgactactagaagctttacaactttccttgcctgctgaggctcaaagtaaaaaggaaaaagccagagataagaaactcagtctgaatcctatttacagacaggtccctaggctggtggacagctgctgtcagcacctagaaaaacatggcctccagacagtggggatattccgagttggaagctcaaaaaagagagtgagacaattacgtgaggaatttgaccgtgggattgatgtctctctggaggaggagcacagtgttcatgatgtggcagccttgctgaaagagttcctgagggacatgccagacccccttctcaccagggagctgtacacagctttcatcaacactctcttgttggagccggaggaacagctgggcaccttgcagctcctcatataccttctacctccctgcaactgcgacaccctccaccgcctgctacagttcctctccatcgtggccaggcatgccgatgacaacatcagcaaagatgggcaagaggtcactgggaataaaatgacatctctaaacttagccaccatatttggacccaacctgctgcacaagcagaagtcatcagacaaagaattctcagttcagagttcagcccgggctgaggagagcacggccatcatcgctgttgtgcaaaagatgattgaaaattatgaagccctgttcatggttcccccagatctccagaacgaagtgctgatcagcctgttagagaccgatcctgatgtcgtggactatttactcagaagaaaggcttcccaatcatcaagccctgacatgctgcagtcggaagtttccttttccgtgggagggaggcattcatctacagactccaacaaggcctccagcggagacatctccccttatgacaacaactccccagtgctgtctgagcgctccctgctggctatgcaagaggacgcggccccggggggctcggagaagctttacagagtgccagggcagtttatgctggtgggccacttgtcgtcgtcaaagtcaagggaaagttctcctggaccaaggcttgggaaagatctgtcagaggagcctttcgatatctggggaacttggcattcaacattaaaaagcggatccaaagacccaggaatgacaggttcctctggagacatttttgaaagcagctccctaagagcggggccctgctccctttctcaagggaacctgtccccaaattggcctcggtggcaggggagccccgcagagctggacagcgacacgcagggggctcggaggactcaggccgcagcccccgcgacggagggcagggcccaccctgcggtgtcgcgcgcctgcagcacgccccacgtccaggtggcagggaaagccgagcggcccacggccaggtcggagcagtacttgaccctgagcggcgcccacgacctcagcgagagtgagctggatgtggccgggctgcagagccgggccacacctcagtgccaaagaccccatgggagtgggagggatgacaagcggcccccgcctccatacccgggcccagggaagcccgcggcagcggcagcctggatccaggggcccccggaaggcgtggagacacccacggaccagggaggccaagcagccgagcgagagcagcaggtcacgcagaaaaaactgagcagcgccaactccctgccagcgggcgagcaggacagtccgcgcctgggggacgctggctggctcgactggcagagagagcgctggcagatctgggagctcctgtcgaccgacaaccccgatgccctgcccgagacgctggtctgagcccgcacccagccgagccccccctgccccgagccccccgccctccagcccaggggggaccgtgggtggtggccactggcacacttagtgttcttctttcacacttctcaaaagtgacacaagagaaatccagttcacctacagaggtagagcactcacgcccccgccattgagaataaggttccattgcgtagccagccttaggaaaaacaaacagaacccaaaccagatggcaatgtccaatctaaaaacgtccctcttggctctataatataagatacaactcttgcttggtatagcctaaccgtatttatgtgtcttcggttttgactattgtgtattctgtaacagattatgtataatcatatatgatatattcacaaagagaaaacaaaaggaacttttaaaaaaaaaatcacttcacttatattaagcaatgagatatactaaacaatgagattctatagaatgttctagaatgtgcacaagcgggtttctgtgcttttgccatagctttataactggggataacccttccttcgataccaaacactaacaagaggaagcagaatatgagaagccatatttttacataggagtcagatacaaaaagaaaaatcactgaatgcttttagatattgaatacgttttcaggaaaatgctaaatctgatagattacgaaatatatttttagaacttgtttagaaaggattcagttaaccaaacaagaaaaaggcagtgcctcacaaagaaattaagaagttgtccgtcccacgttacatcaaattcagttttatataggccatatataatatatatttataatgtataatttttatgtatttttcaaaactacaaactggaatccaactataaagtgtttaagaatctacacagaatattcaaattatagaacatgttttttccctttgccccataatcagtatttgccaaattacatgcaattccttaaaaactaaatcacatttggtaaaaggcctacagctttgtacttacattgtgccaaaggctgaggaaatgttttctttcgtaattttatgtgtattgtaaaatgttctaccgtactttagtagtttgaagtttttcaagtgcataactatttttgaccagcagatggcgatacgcttcagtattttatgcaattttttttcacttctgaagggaaagtgtattataaaaaaagattttttttttttttataaaacatgctactcttaattttcatgttggtgatgaaattcccagtggtgtttcttaaggttctatcttgtgccatgatgaataaaaagttaagca

SEQ ID NO: 12659 - protein, 771 aa, Homo sapiens; identical to SEQ ID NO: 2202

SEQ ID NO: 12660 - DNA, 5115 bp, Homo sapiens
ggctgggctgcgaatagcgtgttcctctccggcggaacacacacacccggccttggggctgtctcctgagctccctcctccacggagagcgctgagcgccgccgggaattccatcccaccgtgggcacgcagtctttggaggtcccgggcgcagcacgctcggtgtccccacactgcagcaagacagagaccccgcgggaaccttgagcttggaacaacccttgagcctctgcagtcggaagagtgggcgcagcagcccagcggaggccaggcgcgcaacctcgggcgccggggcaaggagagagtgcagggaggcgcagctcaggcgcccggctcaggagcgggaggaagttctcgcggcgccgggagcgcggtggacgcgccctgggcgcacgcccaggcagccttctccctggccctcgggactgtcctcgggccgcaaggaggagcttgctggagtcttagaggccatccagagccagcgagcaggagcgctgcgtctcccgcctcagctaggaagggggagtggcgctggcaggctggagctgggaacccagcgagcgcctgaccttcctcctcctcttcctgaccctcttcgcgtcttgggctccggaggaaggttctagcggctgcaggaggtccccagacccattttcctagaaggctggtgatggatctgctgctcctgccgccgccggggcacttggagcgcaccggcggcgcgtgagctgggctttgctctccactgccctgggcaaaccccgggccagccccgcctggcacctttgcctgagtccctttcggttcccgacccaaagccaccagcgtccagggagggaggaggaggtggtcctcaggtgcagccccgccgagatgtccgcgcagagcctgctccacagcgtcttctcctgttcctcgcccgcttcaagtagcgcggcctcggccaagggcttctccaagaggaagctgcgccagacccgcagcctggacccggccctgatcggcggctgcgggagcgacgaggcgggcgcggagggcagtgcgcggggagccacggcgggccgcctctactccccatcactcccagccgagagtctcggccctcgcttggcgtcctcttcccggggtccgccccccagggccaccaggctaccgcctcctggacctctttgctcgtccttctccacacccagcaccccgcaggagaagtcaccatccggcagctttcactttgactatgaggttcccctgggtcgcggcggcctcaagaagagcatggcctgggacctgccttctgtcctggccgggccagccagtagccgaagcgcttccagcatcctctgttcatccgggggaggccccaatggcatcttcgcttctcctaggaggtggctccagcagaggaagttccagtccccacccgacagtcgcgggcacccctacgtcgtgtggaaatccgagggtgatttcacctggaacagcatgtcaggccgcagtgtacggctgaggtcagtccccatccagagtctctcagagctggagagggcccggctgcaggaagtggctttttatcagttgcaacaggactgtgacctgagctgtcagatcaccattcccaaagatggacaaaagagaaagaaatctttaagaaagaaactggattcactaggaaaggagaaaaacaaagacaaagaattcatcccacaggcatttggaatgcccttatcccaagtcattgcgaatgacagggcctataaactcaagcaggacttgcagagggacgagcagaaagatgcatctgactttgtggcttccctcctcccatttggaaataaaagacaaaacaaagaactctcaagcagtaactcatctctcagctcaacctcagaaacaccgaatgagtcaacgtccccaaacaccccggaaccggctcctcgggctaggaggaggggtgccatgtcagtggattctatcaccgatcttgatgacaatcagtctcgactactagaagctttacaactttccttgcctgctgaggctcaaagtaaaaaggaaaaagccagagataagaaactcagtctgaatcctatttacagacaggtccctaggctggtggacagctgctgtcagcacctagaaaaacatggcctccagacagtggggatattccgagttggaagctcaaaaaagagagtgagacaattacgtgaggaatttgaccgtgggattgatgtctctctggaggaggagcacagtgttcatgatgtggcagccttgctgaaagagttcctgagggacatgccagacccccttctcaccagggagctgtacacagctttcatcaacactctcttgttggagccggaggaacagctgggcaccttgcagctcctcatataccttctacctccctgcaactgcgacaccctccaccgcctgctacagttcctctccatcgtggccaggcatgccgatgacaacatcagcaaagatgggcaagaggtcactgggaataaaatgacatctctaaacttagccaccatatttggacccaacctgctgcacaagcagaagtcatcagacaaagaattctcagttcagagttcagcccgggctgaggagagcacggccatcatcgctgttgtgcaaaagatgattgaaaattatgaagccctgttcatggttcccccagatctccagaacgaagtgctgatcagcctgttagagaccgatcctgatgtcgtggactatttactcagaagaaaggcttcccaatcatcaagccctgacatgctgcagtcggaagtttccttttccgtgggagggaggcattcatctacagactccaacaaggcctccagcggagacatctccccttatgacaacaactccccagtgctgtctgagcgctccctgctggctatgcaagaggacgcggccccggggggctcggagaagctttacagagtgccagggcagtttatgctggtgggccacttgtcgtcgtcaaagtcaagggaaagttctcctggaccaaggcttgggaaagatctgtcagaggagcctttcgatatctggggaacttggcattcaacattaaaaagcggatccaaagacccaggaatgacaggttcctctggagacatttttgaaagcagctccctaagagcggggccctgctccctttctcaagggaacctgtccccaaattggcctcggtggcaggggagccccgcagagctggacagcgacacgcagggggctcggaggactcaggccgcagcccccgcgacggagggcagggcccaccctgcggtgtcgcgcgcctgcagcacgccccacgtccaggtggcagggaaagccgagcggcccacggccaggtcggagcagtacttgaccctgagcggcgcccacgacctcagcgagagtgagctggatgtggccgggctgcagagccgggccacacctcagtgccaaagaccccatgggagtgggagggatgacaagcggcccccgcctccatacccgggcccagggaagcccgcggcagcggcagcctggatccaggggcccccggaaggcgtggagacacccacggaccagggaggccaagcagccgagcgagagcagcaggtcacgcagaaaaaactgagcagcgccaactccctgccagcgggcgagcaggacagtccgcgcctgggggacgctggctggctcgactggcagagagagcgctggcagatctgggagctcctgtcgaccgacaaccccgatgccctgcccgagacgctggtctgagcccgcacccagccgagccccccctgccccgagccccccgccctccagcccaggggggaccgtgggtggtggccactggcacacttagtgttcttctttcacacttctcaaaagtgacacaagagaaatccagttcacctacagaggtagagcactcacgcccccgccattgagaataaggttccattgcgtagccagccttaggaaaaacaaacagaacccaaaccagatggcaatgtccaatctaaaaacgtccctcttggctctataatataagatacaactcttgcttggtatagcctaaccgtatttatgtgtcttcggttttgactattgtgtattctgtaacagattatgtataatcatatatgatatattcacaaagagaaaacaaaaggaacttttaaaaaaaaaatcacttcacttatattaagcaatgagatatactaaacaatgagattctatagaatgttctagaatgtgcacaagcgggtttctgtgcttttgccatagctttataactggggataacccttccttcgataccaaacactaacaagaggaagcagaatatgagaagccatatttttacataggagtcagatacaaaaagaaaaatcactgaatgcttttagatattgaatacgttttcaggaaaatgctaaatctgatagattacgaaatatatttttagaacttgtttagaaaggattcagttaaccaaacaagaaaaaggcagtgcctcacaaagaaattaagaagttgtccgtcccacgttacatcaaattcagttttatataggccatatataatatatatttataatgtataatttttatgtatttttcaaaactacaaactggaatccaactataaagtgtttaagaatctacacagaatattcaaattatagaacatgttttttccctttgccccataatcagtatttgccaaattacatgcaattccttaaaaactaaatcacatttggtaaaaggcctacagctttgtacttacattgtgccaaaggctgaggaaatgttttctttcgtaattttatgtgtattgtaaaatgttctaccgtactttagtagtttgaagtttttcaagtgcataactatttttgaccagcagatggcgatacgcttcagtattttatgcaattttttttcacttctgaagggaaagtgtattataaaaaaagattttttttttttttataaaacatgctactcttaattttcatgttggtgatgaaattcccagtggtgtttcttaaggttctatcttgtgccatgatgaataaaaagttaagca

SEQ ID NO: 12661 - protein, 974 aa, Homo sapiens; identical to SEQ ID NO: 2204

SEQ ID NO: 12662 - DNA, 5301 bp, Homo sapiens
ggctgggctgcgaatagcgtgttcctctccggcggaacacacacacccggccttggggctgtctcctgagctccctcctccacggagagcgctgagcgccgccgggaattccatcccaccgtgggcacgcagtctttggaggtcccgggcgcagcacgctcggtgtccccacactgcagcaagacagagaccccgcgggaaccttgagcttggaacaacccttgagcctctgcagtcggaagagtgggcgcagcagcccagcggaggccaggcgcgcaacctcgggcgccggggcaaggagagagtgcagggaggcgcagctcaggcgcccggctcaggagcgggaggaagttctcgcggcgccgggagcgcggtggacgcgccctgggcgcacgcccaggcagccttctccctggccctcgggactgtcctcgggccgcaaggaggagcttgctggagtcttagaggccatccagagccagcgagcaggagcgctgcgtctcccgcctcagctaggaagggggagtggcgctggcaggctggagctgggaacccagcgagcgcctgaccttcctcctcctcttcctgaccctcttcgcgtcttgggctccggaggaaggttctagcggctgcaggaggtccccagacccattttcctagaaggctggtgatggatctgctgctcctgccgccgccggggcacttggagcgcaccggcggcgcgtgagctgggctttgctctccactgccctgggcaaaccccgggccagccccgcctggcacctttgcctgagtccctttcggttcccgacccaaagccaccagcgtccagggagggaggaggaggtggtcctcaggtgcagccccgccgagatgtccgcgcagagcctgctccacagcgtcttctcctgttcctcgcccgcttcaagtagcgcggcctcggccaagggcttctccaagaggaagctgcgccagacccgcagcctggacccggccctgatcggcggctgcgggagcgacgaggcgggcgcggagggcagtgcgcggggagccacggcgggccgcctctactccccatcactcccagccgagagtctcggccctcgcttggcgtcctcttcccggggtccgccccccagggccaccaggctaccgcctcctggacctctttgctcgtccttctccacacccagcaccccgcaggagaagtcaccatccggcagctttcactttgactatgaggttcccctgggtcgcggcggcctcaagaagagcatggcctgggacctgccttctgtcctggccgggccagccagtagccgaagcgcttccagcatcctctgttcatccgggggaggccccaatggcatcttcgcttctcctaggaggtggctccagcagaggaagttccagtccccacccgacagtcgcgggcacccctacgtcgtgtggaaatccgagttggagttgtatgatcttcagatcttaggcacaaaaccaccgatgaattccgatacacatcgtaactttgaccccaccgcaacccttagaaatcagggtgatttcacctggaacagcatgtcaggccgcagtgtacggctgaggtcagtccccatccagagtctctcagagctggagagggcccggctgcaggaagtggctttttatcagttgcaacaggactgtgacctgagctgtcagatcaccattcccaaagatggacaaaagagaaagaaatctttaagaaagaaactggattcactaggaaaggagaaaaacaaagacaaagaattcatcccacaggcatttggaatgcccttatcccaagtcattgcgaatgacagggcctataaactcaagcaggacttgcagagggacgagcagaaagatgcatctgactttgtggcttccctcctcccatttggaaataaaagacaaaacaaagaactctcaagcagtaactcatctctcagctcaacctcagaaacaccgaatgagtcaacgtccccaaacaccccggaaccggctcctcgggctaggaggaggggtgccatgtcagtggattctatcaccgatcttgatgacaatcagtctcgactactagaagctttacaactttccttgcctgctgaggctcaaagtaaaaaggaaaaagccagagataagaaactcagtctgaatcctatttacagacaggtccctaggctggtggacagctgctgtcagcacctagaaaaacatggcctccagacagtggggatattccgagttggaagctcaaaaaagagagtgagacaattacgtgaggaatttgaccgtgggattgatgtctctctggaggaggagcacagtgttcatgatgtggcagccttgctgaaagagttcctgagggacatgccagacccccttctcaccagggagctgtacacagctttcatcaacactctcttgttggagccggaggaacagctgggcaccttgcagctcctcatataccttctacctccctgcaactgcgacaccctccaccgcctgctacagttcctctccatcgtggccaggcatgccgatgacaacatcagcaaagatgggcaagaggtcactgggaataaaatgacatctctaaacttagccaccatatttggacccaacctgctgcacaagcagaagtcatcagacaaagaattctcagttcagagttcagcccgggctgaggagagcacggccatcatcgctgttgtgcaaaagatgattgaaaattatgaagccctgttcatggttcccccagatctccagaacgaagtgctgatcagcctgttagagaccgatcctgatgtcgtggactatttactcagaagaaaggcttcccaatcatcaacaagttctgtgcttccggctgcagtgcaggcctgcccacagtaccctgccagcatgtttacgccctgacctggagggaccagctaaggaagccctgacatgctgcagtcggaagtttccttttccgtgggagggaggcattcatctacagactccaacaaggcctccagcggagacatctccccttatgacaacaactccccagtgctgtctgagcgctccctgctggctatgcaagaggacgcggccccggggggctcggagaagctttacagagtgccagggcagtttatgctggtgggccacttgtcgtcgtcaaagtcaagggaaagttctcctggaccaaggcttgggaaagatctgtcagaggagcctttcgatatctggggaacttggcattcaacattaaaaagcggatccaaagacccaggaatgacaggttcctctggagacatttttgaaagcagctccctaagagcggggccctgctccctttctcaagggaacctgtccccaaattggcctcggtggcaggggagccccgcagagctggacagcgacacgcagggggctcggaggactcaggccgcagcccccgcgacggagggcagggcccaccctgcggtgtcgcgcgcctgcagcacgccccacgtccaggtggcagggaaagccgagcggcccacggccaggtcggagcagtacttgaccctgagcggcgcccacgacctcagcgagagtgagctggatgtggccgggctgcagagccgggccacacctcagtgccaaagaccccatgggagtgggagggatgacaagcggcccccgcctccatacccgggcccagggaagcccgcggcagcggcagcctggatccaggggcccccggaaggcgtggagacacccacggaccagggaggccaagcagccgagcgagagcagcaggtcacgcagaaaaaactgagcagcgccaactccctgccagcgggcgagcaggacagtccgcgcctgggggacgctggctggctcgactggcagagagagcgctggcagatctgggagctcctgtcgaccgacaaccccgatgccctgcccgagacgctggtctgagcccgcacccagccgagccccccctgccccgagccccccgccctccagcccaggggggaccgtgggtggtggccactggcacacttagtgttcttctttcacacttctcaaaagtgacacaagagaaatccagttcacctacagaggtagagcactcacgcccccgccattgagaataaggttccattgcgtagccagccttaggaaaaacaaacagaacccaaaccagatggcaatgtccaatctaaaaacgtccctcttggctctataatataagatacaactcttgcttggtatagcctaaccgtatttatgtgtcttcggttttgactattgtgtattctgtaacagattatgtataatcatatatgatatattcacaaagagaaaacaaaaggaacttttaaaaaaaaaatcacttcacttatattaagcaatgagatatactaaacaatgagattctatagaatgttctagaatgtgcacaagcgggtttctgtgcttttgccatagctttataactggggataacccttccttcgataccaaacactaacaagaggaagcagaatatgagaagccatatttttacataggagtcagatacaaaaagaaaaatcactgaatgcttttagatattgaatacgttttcaggaaaatgctaaatctgatagattacgaaatatatttttagaacttgtttagaaaggattcagttaaccaaacaagaaaaaggcagtgcctcacaaagaaattaagaagttgtccgtcccacgttacatcaaattcagttttatataggccatatataatatatatttataatgtataatttttatgtatttttcaaaactacaaactggaatccaactataaagtgtttaagaatctacacagaatattcaaattatagaacatgttttttccctttgccccataatcagtatttgccaaattacatgcaattccttaaaaactaaatcacatttggtaaaaggcctacagctttgtacttacattgtgccaaaggctgaggaaatgttttctttcgtaattttatgtgtattgtaaaatgttctaccgtactttagtagtttgaagtttttcaagtgcataactatttttgaccagcagatggcgatacgcttcagtattttatgcaattttttttcacttctgaagggaaagtgtattataaaaaaagattttttttttttttataaaacatgctactcttaattttcatgttggtgatgaaattcccagtggtgtttcttaaggttctatcttgtgccatgatgaataaaaagttaagca

SEQ ID NO: 12663 - protein, 690 aa, Homo sapiens; identical to SEQ ID NO: 2196

SEQ ID NO: 12664 - DNA, 2267 bp, Homo sapiens
ttggagttgtatgatcttcagatcttaggcacaaaaccaccgatgaattccgatacacatcgtaactttgaccccaccgcaacccttagaaatcagggtgatttcacctggaacagcatgtcaggccgcagtgtacggctgaggtcagtccccatccagagtctctcagagctggagagggcccggctgcaggaagtggctttttatcagttgcaacaggactgtgacctgagctgtcagatcaccattcccaaagatggacaaaagagaaagaaatctttaagaaagaaactggattcactaggaaaggagaaaaacaaagacaaagaattcatcccacaggcatttggaatgcccttatcccaagtcattgcgaatgacagggcctataaactcaagcaggacttgcagagggacgagcagaaagatgcatctgactttgtggcttccctcctcccatttggaaataaaagacaaaacaaagaactctcaagcagtaactcatctctcagctcaacctcagaaacaccgaatgagtcaacgtccccaaacaccccggaaccggctcctcgggctaggaggaggggtgccatgtcagtggattctatcaccgatcttgatgacaatcagtctcgactactagaagctttacaactttccttgcctgctgaggctcaaagtaaaaaggaaaaagccagagataagaaactcagtctgaatcctatttacagacaggtccctaggctggtggacagctgctgtcagcacctagaaaaacatggcctccagacagtggggatattccgagttggaagctcaaaaaagagagtgagacaattacgtgaggaatttgaccgtgggattgatgtctctctggaggaggagcacagtgttcatgatgtggcagccttgctgaaagagttcctgagggacatgccagacccccttctcaccagggagctgtacacagctttcatcaacactctcttgttggagccggaggaacagctgggcaccttgcagctcctcatataccttctacctccctgcaactgcgacaccctccaccgcctgctacagttcctctccatcgtggccaggcatgccgatgacaacatcagcaaagatgggcaagaggtcactgggaataaaatgacatctctaaacttagccaccatatttggacccaacctgctgcacaagcagaagtcatcagacaaagaattctcagttcagagttcagcccgggctgaggagagcacggccatcatcgctgttgtgcaaaagatgattgaaaattatgaagccctgttcatggttcccccagatctccagaacgaagtgctgatcagcctgttagagaccgatcctgatgtcgtggactatttactcagaagaaaggcttcccaatcatcaagccctgacatgctgcagtcggaagtttccttttccgtgggagggaggcattcatctacagactccaacaaggcctccagcggagacatctccccttatgacaacaactccccagtgctgtctgagcgctccctgctggctatgcaagaggacgcggccccggggggctcggagaagctttacagagtgccagggcagtttatgctggtgggccacttgtcgtcgtcaaagtcaagggaaagttctcctggaccaaggcttgggaaaggtaactggagcctggccagcaggcgctggccaaaacaagcgaccctcctcttgttgcatgtggcatggtgtggggctcttcggaccttctcttcgtctctcccttatttgatgtttctgtaattcaacctgcatttaccgagtacctgctgaacgcctactctaggaagaggaaggtatggcgagcccagtcgttggctgggagggtccctgcaggccacactccaagtctcagatatctgggaaataaacgcatgcccagaggagccactcctattcccagctgattctttttccctccagcatcctaggaactttatgtatactggatttgggttgcatatttgctagtctgaggtgccacccaattactgctgttacatttctaaagaaaacaagctgaacctactatatgtatgaagacaaccttccagaaccaaatagtgttagtatccaatgacaagagagcactatactgggagtcacaaacctgctctgccactttcaacctgcaggatctccagtgagcgattgagcttcccagagtcccatttcctcctgctgtgaaaactcagaatgataac

SEQ ID NO: 12665 - protein, 587 aa, Homo sapiens
MNSDTHRNFDPTATLRNQGDFTWNSMSGRSVRLRSVPIQSLSELERARLQEVAFYQLQQDCDLSCQITIPKDGQKRKKSLRKKLDSLGKEKNKDKEFIPQAFGMPLSQVIANDRAYKLKQDLQRDEQKDASDFVASLLPFGNKRQNKELSSSNSSLSSTSETPNESTSPNTPEPAPRARRRGAMSVDSITDLDDNQSRLLEALQLSLPAEAQSKKEKARDKKLSLNPIYRQVPRLVDSCCQHLEKHGLQTVGIFRVGSSKKRVRQLREEFDRGIDVSLEEEHSVHDVAALLKEFLRDMPDPLLTRELYTAFINTLLLEPEEQLGTLQLLIYLLPPCNCDTLHRLLQFLSIVARHADDNISKDGQEVTGNKMTSLNLATIFGPNLLHKQKSSDKEFSVQSSARAEESTAIIAVVQKMIENYEALFMVPPDLQNEVLISLLETDPDVVDYLLRRKASQSSSPDMLQSEVSFSVGGRHSSTDSNKASSGDISPYDNNSPVLSERSLLAMQEDAAPGGSEKLYRVPGQFMLVGHLSSSKSRESSPGPRLGKGNWSLASRRWPKQATLLLLHVAWCGALRTFSSSLPYLMFL

SEQ ID NO: 12666 - DNA, 3632 bp, Homo sapiens; identical to SEQ ID NO: 2197

SEQ ID NO: 12667 - protein, 765 aa, Homo sapiens; identical to SEQ ID NO: 2198

SEQ ID NO: 12668 - DNA, 1497 bp, Homo sapiens
ccatgtaagaagtccctttggtcttcctttgtcttctgccgtgattgtgaggcctccccagccatgtggaactgtactcaaactgtggcccaagtgctggtagcattagcatcaactggaagcttgttagaaatgtagaatctcagatctcaccccagaatggactatggactcagaatctgcattttaataagattcacaattcacagtataaaataataagatggctgatcctgcaaagaggcgcggtgacatcaacagtgactcagtctctatgatggtattagtaactggcagctgactctcctatttatcatcaagttatgttccaaataagactttcaagtctgagaaaaatgacaaatcccttccaggcatggttcaagttaaagctgaaactgtgtcttcgtttcagctcaagagaggttttgattgtgtcgtggcttttccttgtgtattggttgaggaactgtgccttggaggggcggggagtcttgagaatgggtcaactgatggagggggagtggaagacattggttgcccaagaaaatatgtcaacatctgtccatcactgcaactccggcctgattatcattttttctgcttctgtaagcaccaatgagacaatgccactgaaccacattctttgttgcctgcagtatttcccaccactgcgccacctctgatatgctaatgaggaagcccagggttttgtgtggctgaaaagcctttcaggcacaatcagtgggtcaacaatctcaactctgtacagcggctcagcctgctctgtgagaggctcctctttcggaggggtccttcctcacaccttttctgtgagtgcgtctgtgcttaaggaagggcaattaaccatctggctgcttgtcccctggagaaattgacagaacatcaaacagaataaactcataccttgaaaactgccaagtggcacatgactgtccggttcactgtggggagaagccactaaccaatggtctgaatctaaaaatgacccagtggcaccggtttgtagtaaaactttgaagatagaactccatgcaaattctgactccatagtgctggttcttgatgtaaatctcccaatgtaactgtcaaggtttaaaaatatcttacgtaggtgttcagaatcataaggtcatagaattataaaatgttaaccggcagaagtattttcatctttgtcatacgaaaaagagtaatttgctcataataagccttcaatatttatgtattggattgcaattaacaggaatcaaaggaatcttataaggatcatttatctagaataatctctattttctagaattacttaatgatcattgtctttattcagcctaagtaacattgaaatttttcttcattcaaataaattcatactcatgaagcctttccccacttttcatttcatattctgtttctactagtattgttaaccattgcaaagaaatactgttgccctccattaaaacctgaactgcc

SEQ ID NO: 12669 - protein, 120 aa, Homo sapiens
MFQIRLSSLRKMTNPFQAWFKLKLKLCLRFSSREVLIVSWLFLVYWLRNCALEGRGVLRMGQLMEGEWKTLVAQENMSTSVHHCNSGLIIIFSASVSTNETMPLNHILCCLQYFPPLRHL

SEQ ID NO: 12670 - DNA, 1096 bp, Homo sapiens
ctcttgcctgccaccatgtaagaagtccctttggtcttcctttgtcttctgccgtgattgtgaggcctccccagccatgtggaacttataaaataataagatggctgatcctgcaaagaggcgcggtgacatcaacagtgactcagtctctatgatggtattagtaactggcagctgactctcctatttatcattttttctgcttctgtaagcaccaatgagacaatgccactgaaccacattctttgttgcctgcagtatttcccaccactgcgccacctctgatatgctaatgaggaagcccagggttttgtgtggctgaaaagcctttcaggcacaatcagtgggtcaacaatctcaactctgtacagcggctcagcctgctctgtgagaggctcctctttcggaggggtccttcctcacaccttttctgtgagtgcgtctgtgcttaaggaagggcaattaaccatctggctgcttgtcccctggagaaattgacagaacatcaaacagaataaactcataccttgaaaactgccaagtggcacatgactgtccggttcactgtggggagaagccactaaccaatggtctgaatctaaaaatgacccagtggcaccggtttgtagtaaaactttgaagatagaactccatgcaaattctgactccatagtgctggttcttgatgtaaatctcccaatgtaactgtcaaggtttaaaaatatcttacgtaggtgttcagaatcataaggtcatagaattataaaatgttaaccggcagaagtattttcatctttgtcatacgaaaaagagtaatttgctcataataagccttcaatatttatgtattggattgcaattaacaggaatcaaaggaatcttataaggatcatttatctagaataatctctattttctagaattacttaatgatcattgtctttattcagcctaagtaacattgaaatttttcttcattcaaataaattcatactcatgaagcctttccccacttttcatttcatattctgtttctactagtattgttaaccattgcaaagaaatactgttgccctccattaaaacctgaactgcc

SEQ ID NO: 12671 - protein, 50 aa, Homo sapiens
LACHHVRSPFGLPLSSAVIVRPPQPCGTYKIIRWLILQRGAVTSTVTQSL

SEQ ID NO: 12672 - DNA, 1421 bp, Homo sapiens
gagatctgatggttttataaagaggagttcccctgcacaagctccctctcttgcctgccaccatgtaagaagtccctttggtcttcctttgtcttctgccgtgattgtgaggcctccccagccatgtggaacttataaaataataagatggctgatcctgcaaagaggcgcggtgacatcaacagtgactcagtctctatgatggtattagtaactggcagctgactctcctatttatcatcaagttatgttccaaataagactttcaagtctgagaaaaatgacaaatcccttccaggcatggttcaagttaaagctgaaactgtgtcttcgtttcagctcaagagaggttttgattgtgtcgtggcttttccttgtgtattggttgaggaactgtgccttggaggggcggggagtcttgagaatgggtcaactgatggagggggagtggaagacattggttgcccaagaaaatatgtcaacatctgtccatcactgcaactccggcctgattatcattttttctgcttctgtaagcaccaatgagacaatgccactgaaccacattctttgttgcctgcagtatttcccaccactgcgccacctctgatatgctaatgaggaagcccagggttttgtgtggctgaaaagcctttcaggcacaatcagtgggtcaacaatctcaactctgtacagcggctcagcctgctctgtgagaggctcctctttcggaggggtccttcctcacaccttttctgtgagtgcgtctgtgcttaaggaagggcaattaaccatctggctgcttgtcccctggagaaattgacagaacatcaaacagaataaactcataccttgaaaactgccaagtggcacatgactgtccggttcactgtggggagaagccactaaccaatggtctgaatctaaaaatgacccagtggcaccggtttgtagtaaaactttgaagatagaactccatgcaaattctgactccatagtgctggttcttgatgtaaatctcccaatgtaactgtcaaggtttaaaaatatcttacgtaggtgttcagaatcataaggtcatagaattataaaatgttaaccggcagaagtattttcatctttgtcatacgaaaaagagtaatttgctcataataagccttcaatatttatgtattggattgcaattaacaggaatcaaaggaatcttataaggatcatttatctagaataatctctattttctagaattacttaatgatcattgtctttattcagcctaagtaacattgaaatttttcttcattcaaataaattcatactcatgaagcctttccccacttttcatttcatattctgtttctactagtattgttaaccattgcaaagaaatactgttgccctccattaaaacctgaactgcc

SEQ ID NO: 12673 - protein, 120 aa, Homo sapiens; identical to SEQ ID NO: 12669

SEQ ID NO: 12674 - DNA, 1407 bp, Homo sapiens
ccatgtaagaagtccctttggtcttcctttgtcttctgccgtgattgtgaggcctccccagccatgtggaactgtactcaaactgtggcccaagtgctggtagcattagcatcaactggaagcttgttagaaatgtagaatctcagatctcaccccagaatggactatggactcagaatctgcattttaataagattcacaattcacagtataaaataataagatggctgatcctgcaaagaggcgcggtgacatcaacagtgactcagtctctatgatggtattagtaactggcagctgactctcctatttatcatcaagttatgttccaaataagactttcaagtctgagaaaaatgacaaatcccttccaggcatggttcaagttaaagctgaaactgtgtcttcgtttcagctcaagagaggttttgattgtgtcgtggcttttccttgtgtattggttgaggaactgtgccttggaggggcggggagtcttgagaatgggtcaactgatggagggggagtggaagacattggttgcccaagaaaatatgtcaacatctgtccatcactgcaactccggcctgattatcattttttctgcttctgtaagcaccaatgagacaatgccactgaaccacattctttgttgcctgcagtatttcccaccactgcgccacctctgatatgctaatgaggaagcccagggttttgtgtggctgaaaagcctttcaggcacaatcagtgggtcaacaatctcaactctgtacagcggctcagcctgctctgtgagaggctcctctttcggaggggtccttcctcacaccttttctgtgagtgcgtctgtgcttaaggaagggcaattaaccatctggctgcttgtcccctggagaaattgacagaacatcaaacagaataaactcataccttgaaaactgccaagtggcacatgactgtccggttcactgtggggagaagccactaaccaatggtctgaatctaaaaatgacccagtggcaccggtttgtagtaaaactttgaagatagaactccatgcaaattctgactccatagtgctggttcttgatgtaaatctcccaatgtaactgtcaaggtttaaaaatatcttacgtaggtgttcagaatcataaggtcatagaattataaaatgttaaccggcagaagtattttcatctttgtcatacgaaaaagagtaatttgctcataataagccttcaatatttatgtattggattgcaattaacaggaatcaaaggaatcttataaggatcatttatctagaataatctctattttctagaattacttaatgatcattgtctttattcagcctaagtaacattgaaatttttcttcattcaaataaattcatactcatgaagcctt

SEQ ID NO: 12675 - protein, 120 aa, Homo sapiens; identical to SEQ ID NO: 12669

SEQ ID NO: 12676 - DNA, 1006 bp, Homo sapiens
ctcttgcctgccaccatgtaagaagtccctttggtcttcctttgtcttctgccgtgattgtgaggcctccccagccatgtggaacttataaaataataagatggctgatcctgcaaagaggcgcggtgacatcaacagtgactcagtctctatgatggtattagtaactggcagctgactctcctatttatcattttttctgcttctgtaagcaccaatgagacaatgccactgaaccacattctttgttgcctgcagtatttcccaccactgcgccacctctgatatgctaatgaggaagcccagggttttgtgtggctgaaaagcctttcaggcacaatcagtgggtcaacaatctcaactctgtacagcggctcagcctgctctgtgagaggctcctctttcggaggggtccttcctcacaccttttctgtgagtgcgtctgtgcttaaggaagggcaattaaccatctggctgcttgtcccctggagaaattgacagaacatcaaacagaataaactcataccttgaaaactgccaagtggcacatgactgtccggttcactgtggggagaagccactaaccaatggtctgaatctaaaaatgacccagtggcaccggtttgtagtaaaactttgaagatagaactccatgcaaattctgactccatagtgctggttcttgatgtaaatctcccaatgtaactgtcaaggtttaaaaatatcttacgtaggtgttcagaatcataaggtcatagaattataaaatgttaaccggcagaagtattttcatctttgtcatacgaaaaagagtaatttgctcataataagccttcaatatttatgtattggattgcaattaacaggaatcaaaggaatcttataaggatcatttatctagaataatctctattttctagaattacttaatgatcattgtctttattcagcctaagtaacattgaaatttttcttcattcaaataaattcatactcatgaagcctt

SEQ ID NO: 12677 - protein, 50 aa, Homo sapiens; identical to SEQ ID NO: 12671

SEQ ID NO: 12678 - DNA, 1331 bp, Homo sapiens
gagatctgatggttttataaagaggagttcccctgcacaagctccctctcttgcctgccaccatgtaagaagtccctttggtcttcctttgtcttctgccgtgattgtgaggcctccccagccatgtggaacttataaaataataagatggctgatcctgcaaagaggcgcggtgacatcaacagtgactcagtctctatgatggtattagtaactggcagctgactctcctatttatcatcaagttatgttccaaataagactttcaagtctgagaaaaatgacaaatcccttccaggcatggttcaagttaaagctgaaactgtgtcttcgtttcagctcaagagaggttttgattgtgtcgtggcttttccttgtgtattggttgaggaactgtgccttggaggggcggggagtcttgagaatgggtcaactgatggagggggagtggaagacattggttgcccaagaaaatatgtcaacatctgtccatcactgcaactccggcctgattatcattttttctgcttctgtaagcaccaatgagacaatgccactgaaccacattctttgttgcctgcagtatttcccaccactgcgccacctctgatatgctaatgaggaagcccagggttttgtgtggctgaaaagcctttcaggcacaatcagtgggtcaacaatctcaactctgtacagcggctcagcctgctctgtgagaggctcctctttcggaggggtccttcctcacaccttttctgtgagtgcgtctgtgcttaaggaagggcaattaaccatctggctgcttgtcccctggagaaattgacagaacatcaaacagaataaactcataccttgaaaactgccaagtggcacatgactgtccggttcactgtggggagaagccactaaccaatggtctgaatctaaaaatgacccagtggcaccggtttgtagtaaaactttgaagatagaactccatgcaaattctgactccatagtgctggttcttgatgtaaatctcccaatgtaactgtcaaggtttaaaaatatcttacgtaggtgttcagaatcataaggtcatagaattataaaatgttaaccggcagaagtattttcatctttgtcatacgaaaaagagtaatttgctcataataagccttcaatatttatgtattggattgcaattaacaggaatcaaaggaatcttataaggatcatttatctagaataatctctattttctagaattacttaatgatcattgtctttattcagcctaagtaacattgaaatttttcttcattcaaataaattcatactcatgaagcctt

SEQ ID NO: 12679 - protein, 120 aa, Homo sapiens; identical to SEQ ID NO: 12669

SEQ ID NO: 12680 - DNA, 2248 bp, Homo sapiens
gaggctggtgagccaggcagaagtcagagtgggaggagccttgaggtctctccaggagattcagggaccataggatttggtagtgattcagctatagagtgaaaagatgacagtggccatatccagggtaatgtctacgggaatttgtgaatatccagatatccagataagagaggatgatggccctaactcgagtaccaaaattggatttcctcagagtctggctgaggtgagaaatgattgagtcttgtcttggtgtcctgtagagagaaatgctgtcttctgggaccaccgccctgagcttgggggcccccactagcattcaggttcccgggagaaaatcctgaagaacgggggtcatgagcaggggacgtgtctgctatctgggtaagtgattgtgtgcaccataaacttaccacggacaacctgatcttcacgtttgtaggtcagtgaggttcctttccctgaacagtttaccatgtgatgcgtttatgggtattccggtaagaaagggtagtggctcctcgttctccttgccatgtaatcctattgttttctgtcttggagagaacgtatgaggtaagtaccctgtgagtgctgatggattggcacgtaaccagggaactccagtggcactgtgcatcacaggagtaactaaggtggatgtgcagagaagacggccagagaaaatgaagtgtcctatgatgtcctaccccttggagcaaccacaagcatccagaagtcaagggaaccctcattatgctcgagcaggggcactctgcccatatccagagaggagacagtatgggcgtaagcaggccatggacgatccagtcttccgatacacaggataatgtgcattgaacctgagtccgtgttgactgtggtagatgcgggtgtccaggtatgccaagtggcatcccggaaaacacctgtcagatgcgtttcttctgctgctgctagtcatgagatcaagattcctgctatgacatcacagtgaatccaacatgggtccctatcaggaagcagggctgctctgcaggtcaaggctgcatgaggacccaaagcaacacatgggccacttgaagttcaggtgtataggttttccagggtcccacaaggaaatcccgataaacaggagtcaggatcagggaacacgtctgctatctgggttcaggcaggcagaagtcagagcatgaggacaacattgaggtctctccaggcgatttatggactctcggatttggtagtgattcagttttttttctttttttgagagtctggctgaggtattgctgatgcacgcataaaccacagcatgcaccatgggactgtcccagggacctggttcactgatgagatgtccccacacgtcttcccgccgtgatttctttcacagatgaccaaaatggatcctacagtataatcacacaggataatgttggaaagtatgaactgtggcccggcagatctgactgttgttgctgctgcttctgttcctgctgatgcttttcaaaatagtcttcttttattttcttcggctgttctgaagcaggagttacacatgatgtctttggaagatcttgcgatgtgtttccggaactaccttgcatgcttaactcaatagtactgcggagatgttcatcttctctattggtttcttggcggcttagttcaagggccctctgaaaatcctcctcatcttggtctgatgttccagactcatcactttcttctgatactttttcaaggactgttttatagactctatgctctttttgttttactaatttttttccattaagttttggtgtatccatctcttcgacactgatgatctgcaggagttggtcagcttcacagtctggcagatcacccttgacaacaaatacagaatatgcttgttgttgtaatcgagccaagaaatttgcaaggatcaatgccgagcttctgatattcaggattattgaaatggatgatctctaaaccccagaacttcaaggcattgcttattacctgaatggagaagaaaccggtatcatccatgttttctgaaggctgctgtaaaaatgcaagatactcttcactggtgactcctccttctgccattctcatcctctcttcttcatctagctgatgtgcaattgaggctaattccacagggctaaaatattctccttgcaatagattgttcagacagtgctgagcacacaggaaaccttcctgtttctcatgaaagatgaaatcc

SEQ ID NO: 12681 - protein, 63 aa, Homo sapiens
MGPYQEAGLLCRSRLHEDPKQHMGHLKFRCIGFPGSHKEIPINRSQDQGTRLLSGFRQAEVRA

SEQ ID NO: 12682 - DNA, 1560 bp, Homo sapiens
ccattatcatctatgggataactccaaaatcccatattcactttaggtttaccatcagcttttgactggatactggcaaaaccaccttggtcacaatagtgctttgtgacataccatctcttacctgaatacctgcaaaaacccatggtcttcataaggtttgaaaacctaacatctgttacatggctatccacaaactgcccaggtaactgccatagctgggcatacaacatcttccggcatacctacagaaactcacggatacaattaacatggatttcatctttcatgagaaacaggaaggtttcctgtgtgctcagcactgtctgaacaatctattgcaaggagaatattttagccctgtggaattagcctcaattgcacatcagctagatgaagaagagaggatgagaatggcagaaggaggagtcaccagtgaagagtatcttgcatttttacagcagccttcagaaaacatggatgataccggtttcttctccattcaggtaataagcaatgccttgaagttctggggtttagagatcatccatttcaataatcctgaatatcagaagctcggcattgatcctataaatgaaagatcttttatatgtaattataaacaacactggtttactattagaaaatttggaaaacactggtttaacttgaattctctcttggcgggtccagaattaatatcagatacatgccttgcaaatttcttggctcgattacaacaacaagcatattctgtatttgttgtcaagggtgatctgccagactgtgaagctgaccaactcctgcagatcatcagtgtcgaagagatggatacaccaaaacttaatggaaaaaaattagtaaaacaaaaagagcatagagtctataaaacagtccttgaaaaagtatcagaagaaagtgatgagtctggaacatcagaccaagatgaggaggattttcagagggcccttgaactaagccgccaagaaaccaatagagaagatgaacatctccgcagtactattgagttaagcatgcaaggtagttccggaaacacatcgcaagatcttccaaagacatcatgtgtaactcctgcttcagaacagccgaagaaaataaaagaagactattttgaaaagcatcagcaggaacagaagcagcagcaacaacagtcagatctgccgggccacagttcatacctacacgaaaggccaacaacaagttcgagagcaattgagagtgatctcagtgatgacatcagtgaaggcacagtacaggccgctgtcgacaccattttagaaattatgagaaagaatttgaaaatcaaaggggaaaaataatgcctttaaaaataatttagatagtcatactttccaacattatcctgtgtgattatactgtaggatccattttggtcatctgtcaaagagatgaggaaataaggcttttagacagtttgcaaacaaaatgacgagagagatgtgggactaaataatgatcgttcaactactagccaaggagacattcagcaattaattaaatttaaattagctttcaaaa

SEQ ID NO: 12683 - protein, 355 aa, Homo sapiens; identical to SEQ ID NO: 2206

SEQ ID NO: 12684 - DNA, 580 bp, Homo sapiens
cgagctatttgctatccaaggaattaaccatggagttgcatgtcatagtagcaattgtgggtttgtttgcaggatcctgtcaagaagacatggtaaacctcatcatgatcaagaatgagactttgcttgcatccaggcattcagttaagaaatgatgttttcccaaccaaggctagcttcccaaaagttgtttgatagtatacaggcatgagatggtgtgactctaactcattagatgccttcgtcttttcagtcatcatgtgatggaaagaaagctatcaacttcattcctgagacttcctgcaacacagctcctgatacacatctggtcagaaccatggtacccctccacaatccacgccaggaaattggatgtctactccctgcctttcttcccattgtttggggacttttccttagttcagctgaagacggggtccttgtcacacggccacgaaaatttaggcttgcagattatttgaaggaaatccaaacaaaagctttagaagaaacacctggaaaaatagtatctccactttgaaaatgcagaaatacaggcataatacaatggtgaaattta

SEQ ID NO: 12685 - protein, 101 aa, Homo sapiens
MPSSFQSSCDGKKAINFIPETSCNTAPDTHLVRTMVPLHNPRQEIGCLLPAFLPIVWGLFLSSAEDGVLVTRPRKFRLADYLKEIQTKALEETPGKIVSPL

SEQ ID NO: 12686 - DNA, 492 bp, Homo sapiens
ggggaaaagcaggtaacaggaagaccaatgaggaggctcctgcaataatccaggagatagatggagctacaatctgccattccaagaacaaaagtaaaacaaagactacacactgatgcaactccctctcatgttaaagcactgggaattgggcaaaactgatctagacagagaatggagtcaccttgcaagaccatcatgaggttctctgcccagagctctgtaacaggtctttggataaactcaaccaactgtcaactagaacatttttcaatctacctataacccggaagccacgcccctcctcccccttgcttcgagttgtcctgcctttctgaactgaaccaatgtatttcttaaatgtatttgattgaattctcatgtctccctaaaatgtattaattctacaattaatttttatggtttactcagtagtaagaccaaaacaaaagaatgttgtgatatgtaaataaagcaatgccaaaagctaaa

SEQ ID NO: 12687 - protein, 36 aa, Homo sapiens
MESPCKTIMRFSAQSSVTGLWINSTNCQLEHFSIYL

SEQ ID NO: 12688 - DNA, 2716 bp, Homo sapiens
tgaagattacaaatgagactgggaaaccctcttcaataagacctgtgtgatgatagattgtgtcctgagcccgcaggtcaggctgaaagagtcaacaaccagcaaagtgaagatctaggagtctgttccccttgaacctgtgtggacctgatcaaacctcgagggaaaggctgggagaacacatccctggtcagctgtaggaaagccagagagcatttgagaagaggctgaagcttgaattttgcaaacacacaagccctctgcatttccccagagagaaggtttttttctcgtcttcatttcctttgaaacacctggggtgaggaaaaacctctacattggccaagcagaagaaacagaatctatgactgaagaggatcggctaagagtggttcctcgcagcttaaagggaggcacttttcacactctgtcttaaaatcagaagttgaattcatgaacacatatgatttagatagaagtcatgggatgcagcagttcttcaacgaaaaccaggagatctgacacatcactgagagctgcgttgatcatccagaactggtaccgaggttacaaagctcgactgaaggccagacaacactatgccctcaccatcttccagtccatcgaatatgctgatgaacaaggccaaatgcagttatccaccttcttttccttcatgttggaaaactacacacatatacataaggaagagctagatacttcatgcccattatgtcttagaggtgctatttgaaaccaagaaagtcctgaagcaaatgccgaatttcactcacatacaaacttctccctccaaagaggtaacaatctgtggtgatttgcatgggaaactggatgatctttttttgatcttctacaagaatggtctcccctcagagaggaacccgtatgtttttaatggtgactttgtagatcgaggaaagaattccatagagatcctaatgatcctgtgtgtgagttttcttgtctaccccaatgacctgcacttgaacagagggaaccacgaagattttatgatgaatctgaggtatggcttcacgaaagaaattttgcataaatataagctacatggaaaaagaatcttacaaatcttggaagaattctatgcctggctcccaatcggtacaatcgttgacaatgaaatcctggtcatccatggtgggatatcagagaccacagacttgaatttactccaccgtgtagagaggaacaagatgaaatctgtgctgataccaccaacggaaacaaacagagaccatgacactgactcgaagcacaataaagtaggtgtgacttttaatgcacatggaagaatcaaaacaaatggatctcctactgaacacttaacagagcatgaatgggaacagattattgatattctgtggagtgatcccagaggcaaaaatggctgttttccaaatacgtgccgaggagggggctgctattttggaccagatgttacttccaagattcttaataaataccagttgaagatgctcatcaggtctcatgaatgtaagcccgaagggtatgaaatctgtcatgatgggaaggtggtgactatattttctgcttctaattattatgaagaaggcagcaatcgaggagcttacatcaaactatgttctggtacaactcctcgatttttccagtaccaagtaactaaagcaacgtgctttcagcctcttcgccaaagagtggatactatggaaaacagcgccatcaagatattaagagagagagtgatttcacgaaaaagtgaccttactcgtgctttccaacttcaagaccacagaaaatcaggaaaactttctgtgagccagtgggctttttgcatggagaacattttggggctgaacttaccatggagatccctcagttcgaatctggtaaacatagaccaaaatggaaacgttgaatacatgtccagcttccagaatatccgcattgaaaaacctgtacaagaggctcattctactctagttgaaactctgtacagatacagatctgacctggaaatcatatttaatgccattgacactgatcactcaggcctgatctccgtggaagaatttcgtgccatgtggaaactttttagttctcactacaatgttcacattgatgattcccaagtcaataagcttgccaacataatggacttgaacaaagatggaagcattgactttaatgagtttttaaaggctttctatgtagtgcatagatatgaagacttgatgaaacctgatgtcaccaaccttggctaaacacaaatgagagcttccctcaggctccctgaaacagctaggcccaaatcacaagtacagtcctttccaacacccctgaaattcatagtcagtagcagagaaaagcagatcccaattcatcccacaaacagatgcatagtatgggttttggaagtccctagcaagctgttattggtaagattaggttaaatgtcagtaataggatttggtttcagcattagtacctacatattgccagtgagaaactgggttggacctagtggtgttgtcgtgagtgccacctaaccaggaggccagagcggtttgaaaacatcctgaaaggaactcatacagcacaagagaaaactactaagcttgacatctgtgagtgactgagggagacaggaggaataccaggttattcatggaataaagtctttccatctttaaactgt

SEQ ID NO: 12689 - protein, 501 aa, Homo sapiens
MPNFTHIQTSPSKEVTICGDLHGKLDDLFLIFYKNGLPSERNPYVFNGDFVDRGKNSIEILMILCVSFLVYPNDLHLNRGNHEDFMMNLRYGFTKEILHKYKLHGKRILQILEEFYAWLPIGTIVDNEILVIHGGISETTDLNLLHRVERNKMKSVLIPPTETNRDHDTDSKHNKVGVTFNAHGRIKTNGSPTEHLTEHEWEQIIDILWSDPRGKNGCFPNTCRGGGCYFGPDVTSKILNKYQLKMLIRSHECKPEGYEICHDGKVVTIFSASNYYEEGSNRGAYIKLCSGTTPRFFQYQVTKATCFQPLRQRVDTMENSAIKILRERVISRKSDLTRAFQLQDHRKSGKLSVSQWAFCMENILGLNLPWRSLSSNLVNIDQNGNVEYMSSFQNIRIEKPVQEAHSTLVETLYRYRSDLEIIFNAIDTDHSGLISVEEFRAMWKLFSSHYNVHIDDSQVNKLANIMDLNKDGSIDFNEFLKAFYVVHRYEDLMKPDVTNLG

SEQ ID NO: 12690 - DNA, 2877 bp, Homo sapiens
tgaagattacaaatgagactgggaaaccctcttcaataagacctgtgtgatgatagattgtgtcctgagcccgcaggtcaggctgaaagagtcaacaaccagcaaagtgaagatctaggagtctgttccccttgaacctgtgtggacctgatcaaacctcgagggaaaggctgggagaacacatccctggtcagctgtaggaaagccagagagcatttgagaagaggctgaagcttgaattttgcaaacacacaagccctctgcatttccccagagagaaggtttttttctcgtcttcatttcctttgaaacacctggggtgaggaaaaacctctacattggccaagcagaagaaacagaatctatgactgaagaggatcggctaagagtggttcctcgcagcttaaagggaggcacttttcacactctgtcttaaaatcagaagttgaattcatgaacacatatgatttagatagaagtcatgggatgcagcagttcttcaacgaaaaccaggagatctgacacatcactgagagctgcgttgatcatccagaactggtaccgaggttacaaagctcgactgaaggccagacaacactatgccctcaccatcttccagtccatcgaatatgctgatgaacaaggccaaatgcagttatccaccttcttttccttcatgttggaaaactacacacatatacataaggaagagctagaattaagaaatcagtctcttgaaagcgaacaggacatgagggatagatgggattatgtggactcgatagatgtcccagactcctataatggtcctcggctacaatttcctctcacttgtacggatattgatttacttcttgaggccttcaaggaacaacagatacttcatgcccattatgtcttagaggtgctatttgaaaccaagaaagtcctgaagcaaatgccgaatttcactcacatacaaacttctccctccaaagaggtaacaatctgtggtgatttgcatgggaaactggatgatctttttttgatcttctacaagaatggtctcccctcagagaggaacccgtatgtttttaatggtgactttgtagatcgaggaaagaattccatagagatcctaatgatcctgtgtgtgagttttcttgtctaccccaatgacctgcacttgaacagagggaaccacgaagattttatgatgaatctgaggtatggcttcacgaaagaaattttgcataaatataagctacatggaaaaagaatcttacaaatcttggaagaattctatgcctggctcccaatcggtacaatcgttgacaatgaaatcctggtcatccatggtgggatatcagagaccacagacttgaatttactccaccgtgtagagaggaacaagatgaaatctgtgctgataccaccaacggaaacaaacagagaccatgacactgactcgaagcacaataaagtaggtgtgacttttaatgcacatggaagaatcaaaacaaatggatctcctactgaacacttaacagagcatgaatgggaacagattattgatattctgtggagtgatcccagaggcaaaaatggctgttttccaaatacgtgccgaggagggggctgctattttggaccagatgttacttccaagattcttaataaataccagttgaagatgctcatcaggtctcatgaatgtaagcccgaagggtatgaaatctgtcatgatgggaaggtggtgactatattttctgcttctaattattatgaagaaggcagcaatcgaggagcttacatcaaactatgttctggtacaactcctcgatttttccagtaccaagtaactaaagcaacgtgctttcagcctcttcgccaaagagtggatactatggaaaacagcgccatcaagatattaagagagagagtgatttcacgaaaaagtgaccttactcgtgctttccaacttcaagaccacagaaaatcaggaaaactttctgtgagccagtgggctttttgcatggagaacattttggggctgaacttaccatggagatccctcagttcgaatctggtaaacatagaccaaaatggaaacgttgaatacatgtccagcttccagaatatccgcattgaaaaacctgtacaagaggctcattctactctagttgaaactctgtacagatacagatctgacctggaaatcatatttaatgccattgacactgatcactcaggcctgatctccgtggaagaatttcgtgccatgtggaaactttttagttctcactacaatgttcacattgatgattcccaagtcaataagcttgccaacataatggacttgaacaaagatggaagcattgactttaatgagtttttaaaggctttctatgtagtgcatagatatgaagacttgatgaaacctgatgtcaccaaccttggctaaacacaaatgagagcttccctcaggctccctgaaacagctaggcccaaatcacaagtacagtcctttccaacacccctgaaattcatagtcagtagcagagaaaagcagatcccaattcatcccacaaacagatgcatagtatgggttttggaagtccctagcaagctgttattggtaagattaggttaaatgtcagtaataggatttggtttcagcattagtacctacatattgccagtgagaaactgggttggacctagtggtgttgtcgtgagtgccacctaaccaggaggccagagcggtttgaaaacatcctgaaaggaactcatacagcacaagagaaaactactaagcttgacatctgtgagtgactgagggagacaggaggaataccaggttattcatggaataaagtctttccatctttaaactgt

SEQ ID NO: 12691 - protein, 653 aa, Homo sapiens; identical to SEQ ID NO: 2208

SEQ ID NO: 12692 - DNA, 2548 bp, Homo sapiens
tgaagattacaaatgagactgggaaaccctcttcaataagacctgtgtgatgatagattgtgtcctgagcccgcaggtcaggctgaaagagtcaacaaccagcaaagtgaagatctaggagtctgttccccttgaacctgtgtggacctgatcaaacctcgagggaaaggctgggagaacacatccctggtcagctgtaggaaagccagagagcatttgagaagaggctgaagcttgaattttgcaaacacacaagccctctgcatttccccagagagaaggtttttttctcgtcttcatttcctttgaaacacctggggtgaggaaaaacctctacattggccaagcagaagaaacagaatctatgactgaagaggatcggctaagagtggttcctcgcagcttaaagggaggcacttttcacactctgtcttaaaatcagaagttgaattcatgaacacatatgatttagatagaagtcatgggatgcagcagttcttcaacgaaaaccaggagatctgacacatcactgagagctgcgttgatcatccagaactggtaccgaggttacaaagctcgactgaaggccagacaacactatgccctcaccatcttccagtccatcgaatatgctgatgaacaaggccaaatgcagttatccaccttcttttccttcatgttggaaaactacacacatatacataaggaagagctagaattaagaaatcagtctcttgaaagcgaacaggacatgagggatagatgggattatgtggactcgatagatgtcccagactcctataatggtcctcggctacaatttcctctcacttgtacggatattgatttacttcttgaggccttcaaggaacaacagatacttcatgcccattatgtcttagaggtgctatttgaaaccaagaaagtcctgaagcaaatgccgaatttcactcacatacaaacttctccctccaaagaggtaacaatctgtggtgatttgcatgggaaactggatgatctttttttgatcttctacaagaatggtctcccctcagagaggaacccgtatgtttttaatggtgactttgtagatcgaggaaagaattccatagagatcctaatgatcctgtgtgtgagttttcttgtctaccccaatgacctgcacttgaacagagggaaccacgaagattttatgatgaatctgaggtatggcttcacgaaagaaattttgcataaatataagctacatggaaaaagaatcttacaaatcttggaagaattctatgcctggctcccaatcggtacaatcgttgacaatgaaatcctggtcatccatggtgggatatcagagaccacagacttgaatttactccaccgtgtagagaggaacaagatgaaatctgtgctgataccaccaacggaaacaaacagagaccatgacactgactcgaagcacaataaagtaggtgtgacttttaatgcacatggaagaatcaaaacaaatggatctcctactgaacacttaacagagcatgaatgggaacagagtggatactatggaaaacagcgccatcaagatattaagagagagagtgatttcacgaaaaagtgaccttactcgtgctttccaacttcaagaccacagaaaatcaggaaaactttctgtgagccagtgggctttttgcatggagaacattttggggctgaacttaccatggagatccctcagttcgaatctggtaaacatagaccaaaatggaaacgttgaatacatgtccagcttccagaatatccgcattgaaaaacctgtacaagaggctcattctactctagttgaaactctgtacagatacagatctgacctggaaatcatatttaatgccattgacactgatcactcaggcctgatctccgtggaagaatttcgtgccatgtggaaactttttagttctcactacaatgttcacattgatgattcccaagtcaataagcttgccaacataatggacttgaacaaagatggaagcattgactttaatgagtttttaaaggctttctatgtagtgcatagatatgaagacttgatgaaacctgatgtcaccaaccttggctaaacacaaatgagagcttccctcaggctccctgaaacagctaggcccaaatcacaagtacagtcctttccaacacccctgaaattcatagtcagtagcagagaaaagcagatcccaattcatcccacaaacagatgcatagtatgggttttggaagtccctagcaagctgttattggtaagattaggttaaatgtcagtaataggatttggtttcagcattagtacctacatattgccagtgagaaactgggttggacctagtggtgttgtcgtgagtgccacctaaccaggaggccagagcggtttgaaaacatcctgaaaggaactcatacagcacaagagaaaactactaagcttgacatctgtgagtgactgagggagacaggaggaataccaggttattcatggaataaagtctttccatctttaaactgt

SEQ ID NO: 12693 - protein, 376 aa, Homo sapiens
MGCSSSSTKTRRSDTSLRAALIIQNWYRGYKARLKARQHYALTIFQSIEYADEQGQMQLSTFFSFMLENYTHIHKEELELRNQSLESEQDMRDRWDYVDSIDVPDSYNGPRLQFPLTCTDIDLLLEAFKEQQILHAHYVLEVLFETKKVLKQMPNFTHIQTSPSKEVTICGDLHGKLDDLFLIFYKNGLPSERNPYVFNGDFVDRGKNSIEILMILCVSFLVYPNDLHLNRGNHEDFMMNLRYGFTKEILHKYKLHGKRILQILEEFYAWLPIGTIVDNEILVIHGGISETTDLNLLHRVERNKMKSVLIPPTETNRDHDTDSKHNKVGVTFNAHGRIKTNGSPTEHLTEHEWEQSGYYGKQRHQDIKRESDFTKK

SEQ ID NO: 12694 - DNA, 2793 bp, Homo sapiens
tgaagattacaaatgagactgggaaaccctcttcaataagacctgtgtgatgatagattgtgtcctgagcccgcaggtcaggctgaaagagtcaacaaccagcaaagtgaagatctaggagtctgttccccttgaacctgtgtggacctgatcaaacctcgagggaaaggctgggagaacacatccctggtcagctgtaggaaagccagagagcatttgagaagaggctgaagcttgaattttgcaaacacacaagccctctgcatttccccagagagaaggtttttttctcgtcttcatttcctttgaaacacctggggtgaggaaaaacctctacattggccaagcagaagaaacagaatctatgactgaagaggatcggctaagagtggttcctcgcagcttaaagggaggcacttttcacactctgtcttaaaatcagaagttgaattcatgaacacatatgatttagatagaagtcatgggatgcagcagttcttcaacgaaaaccaggagatctgacacatcactgagagctgcgttgatcatccagaactggtaccgaggttacaaagctcgactgaaggccagacaacactatgccctcaccatcttccagtccatcgaatatgctgatgaacaaggccaaatgcagttatccaccttcttttccttcatgttggaaaactacacacatatacataaggaagagctagaattaagaaatcagtctcttgaaagcgaacaggacatgagggatagatgggattatgtggactcgatagatgtcccagactcctataatggtcctcggctacaatttcctctcacttgtacggatattgatttacttcttgaggccttcaaggaacaacagatacttcatgcccattatgtcttagaggtgctatttgaaaccaagaaagtcctgaagcaaatgccgaatttcactcacatacaaacttctccctccaaagaggtaacaatctgtggtgatttgcatgggaaactggatgatctttttttgatcttctacaagaatggtctcccctcagagaggaacccgtatgtttttaatggtgactttgtagatcgaggaaagaattccatagagatcctaatgatcctgtgtgtgagttttcttgtctaccccaatgacctgcacttgaacagagggaaccacgaagattttatgatgaatctgaggtatggcttcacgaaagaaattttgcataaatataagctacatggaaaaagaatcttacaaatcttggaagaattctatgcctggctcccaatcggtacaatcgttgacaatgaaatcctggtcatccatggtgggatatcagagaccacagacttgaatttactccaccgtgtagagaggaacaagatgaaatctgtgctgataccaccaacggaaacaaacagagaccatgacactgactcgaagcacaataaaattattgatattctgtggagtgatcccagaggcaaaaatggctgttttccaaatacgtgccgaggagggggctgctattttggaccagatgttacttccaagattcttaataaataccagttgaagatgctcatcaggtctcatgaatgtaagcccgaagggtatgaaatctgtcatgatgggaaggtggtgactatattttctgcttctaattattatgaagaaggcagcaatcgaggagcttacatcaaactatgttctggtacaactcctcgatttttccagtaccaagtaactaaagcaacgtgctttcagcctcttcgccaaagagtggatactatggaaaacagcgccatcaagatattaagagagagagtgatttcacgaaaaagtgaccttactcgtgctttccaacttcaagaccacagaaaatcaggaaaactttctgtgagccagtgggctttttgcatggagaacattttggggctgaacttaccatggagatccctcagttcgaatctggtaaacatagaccaaaatggaaacgttgaatacatgtccagcttccagaatatccgcattgaaaaacctgtacaagaggctcattctactctagttgaaactctgtacagatacagatctgacctggaaatcatatttaatgccattgacactgatcactcaggcctgatctccgtggaagaatttcgtgccatgtggaaactttttagttctcactacaatgttcacattgatgattcccaagtcaataagcttgccaacataatggacttgaacaaagatggaagcattgactttaatgagtttttaaaggctttctatgtagtgcatagatatgaagacttgatgaaacctgatgtcaccaaccttggctaaacacaaatgagagcttccctcaggctccctgaaacagctaggcccaaatcacaagtacagtcctttccaacacccctgaaattcatagtcagtagcagagaaaagcagatcccaattcatcccacaaacagatgcatagtatgggttttggaagtccctagcaagctgttattggtaagattaggttaaatgtcagtaataggatttggtttcagcattagtacctacatattgccagtgagaaactgggttggacctagtggtgttgtcgtgagtgccacctaaccaggaggccagagcggtttgaaaacatcctgaaaggaactcatacagcacaagagaaaactactaagcttgacatctgtgagtgactgagggagacaggaggaataccaggttattcatggaataaagtctttccatctttaaactgt

SEQ ID NO: 12695 - protein, 625 aa, Homo sapiens; identical to SEQ ID NO: 2210

SEQ ID NO: 12696 - DNA, 2691 bp, Homo sapiens
tgaagattacaaatgagactgggaaaccctcttcaataagacctgtgtgatgatagattgtgtcctgagcccgcaggtcaggctgaaagagtcaacaaccagcaaagtgaagatctaggagtctgttccccttgaacctgtgtggacctgatcaaacctcgagggaaaggctgggagaacacatccctggtcagctgtaggaaagccagagagcatttgagaagaggctgaagcttgaattttgcaaacacacaagccctctgcatttccccagagagaaggtttttttctcgtcttcatttcctttgaaacacctggggtgaggaaaaacctctacattggccaagcagaagaaacagaatctatgactgaagaggatcggctaagagtggttcctcgcagcttaaagggaggcacttttcacactctgtcttaaaatcagaagttgaattcatgaacacatatgatttagatagaagtcatgggatgcagcagttcttcaacgaaaaccaggagatctgacacatcactgagagctgcgttgatcatccagaactggtaccgaggttacaaagctcgactgaaggccagacaacactatgccctcaccatcttccagtccatcgaatatgctgatgaacaaggccaaatgcagttatccaccttcttttccttcatgttggaaaactacacacatatacataaggaagagctagaattaagaaatcagtctcttgaaagcgaacaggacatgagggatagatgggattatgtggactcgatagatgtcccagactcctataatggtcctcggctacaatttcctctcacttgtacggatattgatttacttcttgaggccttcaaggaacaacagatacttcatgcccattatgtcttagaggtgctatttgaaaccaagaaagtcctgaagcaaatgccgaatttcactcacatacaaacttctccctccaaagaggtaacaatctgtggtgatttgcatgggaaactggatgatctttttttgatcttctacaagaatggtctcccctcagagaggaacccgtatgtttttaatggtgactttgtagatcgaggaaagaattccatagagatcctaatgatcctgtgtgtgagttttcttgtctaccccaatgacctgcacttgaacagagggaaccacgaagattttatgatgaatctgaggtatggcttcacgaaagaaattttgcataaatataagctacatggaaaaagaatcttacaaatcttggaagaattctatgcctggctcccaatcggtacaatcgttgacaatgaaatcctggtcatccatggtgggatatcagagaccacagacttgaatttactccaccgtgtagagaggaacaagatgaaatctgtgctgataccaccaacggaaacaaacagagaccatgacactgactcgaagcacaataaagtaggtgtgacttttaatgcacatggaagaatcaaaacaaatggatctcctactgaacacttaacagagcatgaatgggaacaggtggtgactatattttctgcttctaattattatgaagaaggcagcaatcgaggagcttacatcaaactatgttctggtacaactcctcgatttttccagtaccaagtaactaaagcaacgtgctttcagcctcttcgccaaagagtggatactatggaaaacagcgccatcaagatattaagagagagagtgatttcacgaaaaagtgaccttactcgtgctttccaacttcaagaccacagaaaatcaggaaaactttctgtgagccagtgggctttttgcatggagaacattttggggctgaacttaccatggagatccctcagttcgaatctggtaaacatagaccaaaatggaaacgttgaatacatgtccagcttccagaatatccgcattgaaaaacctgtacaagaggctcattctactctagttgaaactctgtacagatacagatctgacctggaaatcatatttaatgccattgacactgatcactcaggcctgatctccgtggaagaatttcgtgccatgtggaaactttttagttctcactacaatgttcacattgatgattcccaagtcaataagcttgccaacataatggacttgaacaaagatggaagcattgactttaatgagtttttaaaggctttctatgtagtgcatagatatgaagacttgatgaaacctgatgtcaccaaccttggctaaacacaaatgagagcttccctcaggctccctgaaacagctaggcccaaatcacaagtacagtcctttccaacacccctgaaattcatagtcagtagcagagaaaagcagatcccaattcatcccacaaacagatgcatagtatgggttttggaagtccctagcaagctgttattggtaagattaggttaaatgtcagtaataggatttggtttcagcattagtacctacatattgccagtgagaaactgggttggacctagtggtgttgtcgtgagtgccacctaaccaggaggccagagcggtttgaaaacatcctgaaaggaactcatacagcacaagagaaaactactaagcttgacatctgtgagtgactgagggagacaggaggaataccaggttattcatggaataaagtctttccatctttaaactgt

SEQ ID NO: 12697 - protein, 591 aa, Homo sapiens; identical to SEQ ID NO: 2212

SEQ ID NO: 12698 - DNA, 3018 bp, Homo sapiens
tgaagattacaaatgagactgggaaaccctcttcaataagacctgtgtgatgatagattgtgtcctgagcccgcaggtcaggctgaaagagtcaacaaccagcaaagtgaagatctaggagtctgttccccttgaacctgtgtggacctgatcaaacctcgagggaaaggctgggagaacacatccctggtcagctgtaggaaagccagagagcatttgagaagaggctgaagcttgaattttgcaaacacacaagccctctgcatttccccagagagaaggtttttttctcgtcttcatttcctttgaaacacctggggtgaggaaaaacctctacattggccaagcagaagaaacagaatctatgactgaagaggatcggctaagagtggttcctcgcagcttaaagggaggcacttttcacactctgtcttaaaatcagaagttgaattcatgaacacatatgatttagatagaagtcatgggatgcagcagttcttcaacgaaaaccaggagatctgacacatcactgagagctgcgttgatcatccagaactggtaccgaggttacaaagctcgactgaaggccagacaacactatgccctcaccatcttccagtccatcgaatatgctgatgaacaaggccaaatgcagttatccaccttcttttccttcatgttggaaaactacacacatatacataaggaagagctagaattaagaaatcagtctcttgaaagcgaacaggacatgagggatagatgggattatgtggactcgatagatgtcccagactcctataatggtcctcggctacaatttcctctcacttgtacggatattgatttacttcttgaggccttcaaggaacaacagatacttcatgcccattatgtcttagaggtgctatttgaaaccaagaaagtcctgaagcaaatgccgaatttcactcacatacaaacttctccctccaaagaggtaacaatctgtggtgatttgcatgggaaactggatgatctttttttgatcttctacaagaatggtctcccctcagagaggaacccgtatgtttttaatggtgactttgtagatcgaggaaagaattccatagagatcctaatgatcctgtgtgtgagttttcttgtctaccccaatgacctgcacttgaacagagggaaccacgaagattttatgatgaatctgaggtatggcttcacgaaagaaattttgcataaatataagctacatggaaaaagaatcttacaaatcttggaagaattctatgcctggctcccaatcggtacaatcgttgacaatgaaatcctggtcatccatggtgggatatcagagaccacagacttgaatttactccaccgtgtagagaggaacaagatgaaatctgtgctgataccaccaacggaaacaaacagagaccatgacactgactcgaagcacaataaagtaggtgtgacttttaatgcacatggaagaatcaaaacaaatggatctcctactgaacacttaacagagcatgaatgggaacagattattgatattctgtggagtgatcccagaggcaaaaatggctgttttccaaatacgtgccgaggagggggctgctattttggaccagatgttacttccaagattcttaataaataccagttgaagatgctcatcaggtctcatgaatgtaagcccgaagggtatgaaatctgtcatgatgggaaggtggtgactatattttctgcttctaattattatgaagaaggcagcaatcgaggagcttacatcaaactatgttctggtacaactcctcgatttttccagtaccaagtaactaaagcaacgtgctttcagcctcttcgccaaagagtggatactatggaaaacagcgccatcaagatattaagagagagagtgatttcacgaaaaagtgaccttactcgtgctttccaacttcaagaccacagaaaatcaggaaaactttctgtgagccagtgggctttttgcatggagaacattttggggctgaacttaccatggagatccctcagttcgaatctggtaaacatagaccaaaatggaaacgttgaatacatgtccagcttccagaatatccgcattgaaaaacctgtacaagaggctcattctactctagttgaaactctgtacagatacagatctgacctggaaatcatatttaatgccattgacactgatcactcaggcctgatctccgtggaagaatttcgtgccatgtggaaactttttagttctcactacaatgttcacattgatgattcccaagtcaataagcttgccaacataatggacttgaacaaagatggaagcattgactttaatgagtttttaaaggctttctatgtagtgcatagatatgaagacttgatgaaacctgatgtcaccaaccttggctaaacacaaatgagagcttccctcaggctccctgaaacagctaggcccaaatcacaagtacagtcctttccaacacccctgaaattcatagtcagtagcagagaaaagcagatcccaattcatcccacaaacagatgcatagtatgggttttggaagtccctagcaagctgttattggtaagattaggttaaatgtcagtaataggatttggtttcagcattagtacctacatattgccagtgagaaactgggttggacctagtggtgttgtcgtgagtgccacctaaccaggaggccagagcggtttgaaaacatcctgaaaggaactcatacagcacaagagaaaactactaagcttgacatctgtgagtgactgagggagacaggaggaataccaggttattcatggaataaagtctttccatctttaaactgtgatcttctttggagattttataagccagtgatcctcaattaagggatccacccttcagggatgagaaccatattggattcttggggggaatctgtgggagtgtattgtttgaaaaagcgtatttgtgtgtgtgtgtatgtt

SEQ ID NO: 12699 - protein, 653 aa, Homo sapiens; identical to SEQ ID NO: 2208

SEQ ID NO: 12700 - DNA, 2689 bp, Homo sapiens
tgaagattacaaatgagactgggaaaccctcttcaataagacctgtgtgatgatagattgtgtcctgagcccgcaggtcaggctgaaagagtcaacaaccagcaaagtgaagatctaggagtctgttccccttgaacctgtgtggacctgatcaaacctcgagggaaaggctgggagaacacatccctggtcagctgtaggaaagccagagagcatttgagaagaggctgaagcttgaattttgcaaacacacaagccctctgcatttccccagagagaaggtttttttctcgtcttcatttcctttgaaacacctggggtgaggaaaaacctctacattggccaagcagaagaaacagaatctatgactgaagaggatcggctaagagtggttcctcgcagcttaaagggaggcacttttcacactctgtcttaaaatcagaagttgaattcatgaacacatatgatttagatagaagtcatgggatgcagcagttcttcaacgaaaaccaggagatctgacacatcactgagagctgcgttgatcatccagaactggtaccgaggttacaaagctcgactgaaggccagacaacactatgccctcaccatcttccagtccatcgaatatgctgatgaacaaggccaaatgcagttatccaccttcttttccttcatgttggaaaactacacacatatacataaggaagagctagaattaagaaatcagtctcttgaaagcgaacaggacatgagggatagatgggattatgtggactcgatagatgtcccagactcctataatggtcctcggctacaatttcctctcacttgtacggatattgatttacttcttgaggccttcaaggaacaacagatacttcatgcccattatgtcttagaggtgctatttgaaaccaagaaagtcctgaagcaaatgccgaatttcactcacatacaaacttctccctccaaagaggtaacaatctgtggtgatttgcatgggaaactggatgatctttttttgatcttctacaagaatggtctcccctcagagaggaacccgtatgtttttaatggtgactttgtagatcgaggaaagaattccatagagatcctaatgatcctgtgtgtgagttttcttgtctaccccaatgacctgcacttgaacagagggaaccacgaagattttatgatgaatctgaggtatggcttcacgaaagaaattttgcataaatataagctacatggaaaaagaatcttacaaatcttggaagaattctatgcctggctcccaatcggtacaatcgttgacaatgaaatcctggtcatccatggtgggatatcagagaccacagacttgaatttactccaccgtgtagagaggaacaagatgaaatctgtgctgataccaccaacggaaacaaacagagaccatgacactgactcgaagcacaataaagtaggtgtgacttttaatgcacatggaagaatcaaaacaaatggatctcctactgaacacttaacagagcatgaatgggaacagagtggatactatggaaaacagcgccatcaagatattaagagagagagtgatttcacgaaaaagtgaccttactcgtgctttccaacttcaagaccacagaaaatcaggaaaactttctgtgagccagtgggctttttgcatggagaacattttggggctgaacttaccatggagatccctcagttcgaatctggtaaacatagaccaaaatggaaacgttgaatacatgtccagcttccagaatatccgcattgaaaaacctgtacaagaggctcattctactctagttgaaactctgtacagatacagatctgacctggaaatcatatttaatgccattgacactgatcactcaggcctgatctccgtggaagaatttcgtgccatgtggaaactttttagttctcactacaatgttcacattgatgattcccaagtcaataagcttgccaacataatggacttgaacaaagatggaagcattgactttaatgagtttttaaaggctttctatgtagtgcatagatatgaagacttgatgaaacctgatgtcaccaaccttggctaaacacaaatgagagcttccctcaggctccctgaaacagctaggcccaaatcacaagtacagtcctttccaacacccctgaaattcatagtcagtagcagagaaaagcagatcccaattcatcccacaaacagatgcatagtatgggttttggaagtccctagcaagctgttattggtaagattaggttaaatgtcagtaataggatttggtttcagcattagtacctacatattgccagtgagaaactgggttggacctagtggtgttgtcgtgagtgccacctaaccaggaggccagagcggtttgaaaacatcctgaaaggaactcatacagcacaagagaaaactactaagcttgacatctgtgagtgactgagggagacaggaggaataccaggttattcatggaataaagtctttccatctttaaactgtgatcttctttggagattttataagccagtgatcctcaattaagggatccacccttcagggatgagaaccatattggattcttggggggaatctgtgggagtgtattgtttgaaaaagcgtatttgtgtgtgtgtgtatgtt

SEQ ID NO: 12701 - protein, 376 aa, Homo sapiens; identical to SEQ ID NO: 12693

SEQ ID NO: 12702 - DNA, 2857 bp, Homo sapiens
tgaagattacaaatgagactgggaaaccctcttcaataagacctgtgtgatgatagattgtgtcctgagcccgcaggtcaggctgaaagagtcaacaaccagcaaagtgaagatctaggagtctgttccccttgaacctgtgtggacctgatcaaacctcgagggaaaggctgggagaacacatccctggtcagctgtaggaaagccagagagcatttgagaagaggctgaagcttgaattttgcaaacacacaagccctctgcatttccccagagagaaggtttttttctcgtcttcatttcctttgaaacacctggggtgaggaaaaacctctacattggccaagcagaagaaacagaatctatgactgaagaggatcggctaagagtggttcctcgcagcttaaagggaggcacttttcacactctgtcttaaaatcagaagttgaattcatgaacacatatgatttagatagaagtcatgggatgcagcagttcttcaacgaaaaccaggagatctgacacatcactgagagctgcgttgatcatccagaactggtaccgaggttacaaagctcgactgaaggccagacaacactatgccctcaccatcttccagtccatcgaatatgctgatgaacaaggccaaatgcagttatccaccttcttttccttcatgttggaaaactacacacatatacataaggaagagctagatacttcatgcccattatgtcttagaggtgctatttgaaaccaagaaagtcctgaagcaaatgccgaatttcactcacatacaaacttctccctccaaagaggtaacaatctgtggtgatttgcatgggaaactggatgatctttttttgatcttctacaagaatggtctcccctcagagaggaacccgtatgtttttaatggtgactttgtagatcgaggaaagaattccatagagatcctaatgatcctgtgtgtgagttttcttgtctaccccaatgacctgcacttgaacagagggaaccacgaagattttatgatgaatctgaggtatggcttcacgaaagaaattttgcataaatataagctacatggaaaaagaatcttacaaatcttggaagaattctatgcctggctcccaatcggtacaatcgttgacaatgaaatcctggtcatccatggtgggatatcagagaccacagacttgaatttactccaccgtgtagagaggaacaagatgaaatctgtgctgataccaccaacggaaacaaacagagaccatgacactgactcgaagcacaataaagtaggtgtgacttttaatgcacatggaagaatcaaaacaaatggatctcctactgaacacttaacagagcatgaatgggaacagattattgatattctgtggagtgatcccagaggcaaaaatggctgttttccaaatacgtgccgaggagggggctgctattttggaccagatgttacttccaagattcttaataaataccagttgaagatgctcatcaggtctcatgaatgtaagcccgaagggtatgaaatctgtcatgatgggaaggtggtgactatattttctgcttctaattattatgaagaaggcagcaatcgaggagcttacatcaaactatgttctggtacaactcctcgatttttccagtaccaagtaactaaagcaacgtgctttcagcctcttcgccaaagagtggatactatggaaaacagcgccatcaagatattaagagagagagtgatttcacgaaaaagtgaccttactcgtgctttccaacttcaagaccacagaaaatcaggaaaactttctgtgagccagtgggctttttgcatggagaacattttggggctgaacttaccatggagatccctcagttcgaatctggtaaacatagaccaaaatggaaacgttgaatacatgtccagcttccagaatatccgcattgaaaaacctgtacaagaggctcattctactctagttgaaactctgtacagatacagatctgacctggaaatcatatttaatgccattgacactgatcactcaggcctgatctccgtggaagaatttcgtgccatgtggaaactttttagttctcactacaatgttcacattgatgattcccaagtcaataagcttgccaacataatggacttgaacaaagatggaagcattgactttaatgagtttttaaaggctttctatgtagtgcatagatatgaagacttgatgaaacctgatgtcaccaaccttggctaaacacaaatgagagcttccctcaggctccctgaaacagctaggcccaaatcacaagtacagtcctttccaacacccctgaaattcatagtcagtagcagagaaaagcagatcccaattcatcccacaaacagatgcatagtatgggttttggaagtccctagcaagctgttattggtaagattaggttaaatgtcagtaataggatttggtttcagcattagtacctacatattgccagtgagaaactgggttggacctagtggtgttgtcgtgagtgccacctaaccaggaggccagagcggtttgaaaacatcctgaaaggaactcatacagcacaagagaaaactactaagcttgacatctgtgagtgactgagggagacaggaggaataccaggttattcatggaataaagtctttccatctttaaactgtgatcttctttggagattttataagccagtgatcctcaattaagggatccacccttcagggatgagaaccatattggattcttggggggaatctgtgggagtgtattgtttgaaaaagcgtatttgtgtgtgtgtgtatgtt

SEQ ID NO: 12703 - protein, 501 aa, Homo sapiens; identical to SEQ ID NO: 12689

SEQ ID NO: 12704 - DNA, 2934 bp, Homo sapiens
tgaagattacaaatgagactgggaaaccctcttcaataagacctgtgtgatgatagattgtgtcctgagcccgcaggtcaggctgaaagagtcaacaaccagcaaagtgaagatctaggagtctgttccccttgaacctgtgtggacctgatcaaacctcgagggaaaggctgggagaacacatccctggtcagctgtaggaaagccagagagcatttgagaagaggctgaagcttgaattttgcaaacacacaagccctctgcatttccccagagagaaggtttttttctcgtcttcatttcctttgaaacacctggggtgaggaaaaacctctacattggccaagcagaagaaacagaatctatgactgaagaggatcggctaagagtggttcctcgcagcttaaagggaggcacttttcacactctgtcttaaaatcagaagttgaattcatgaacacatatgatttagatagaagtcatgggatgcagcagttcttcaacgaaaaccaggagatctgacacatcactgagagctgcgttgatcatccagaactggtaccgaggttacaaagctcgactgaaggccagacaacactatgccctcaccatcttccagtccatcgaatatgctgatgaacaaggccaaatgcagttatccaccttcttttccttcatgttggaaaactacacacatatacataaggaagagctagaattaagaaatcagtctcttgaaagcgaacaggacatgagggatagatgggattatgtggactcgatagatgtcccagactcctataatggtcctcggctacaatttcctctcacttgtacggatattgatttacttcttgaggccttcaaggaacaacagatacttcatgcccattatgtcttagaggtgctatttgaaaccaagaaagtcctgaagcaaatgccgaatttcactcacatacaaacttctccctccaaagaggtaacaatctgtggtgatttgcatgggaaactggatgatctttttttgatcttctacaagaatggtctcccctcagagaggaacccgtatgtttttaatggtgactttgtagatcgaggaaagaattccatagagatcctaatgatcctgtgtgtgagttttcttgtctaccccaatgacctgcacttgaacagagggaaccacgaagattttatgatgaatctgaggtatggcttcacgaaagaaattttgcataaatataagctacatggaaaaagaatcttacaaatcttggaagaattctatgcctggctcccaatcggtacaatcgttgacaatgaaatcctggtcatccatggtgggatatcagagaccacagacttgaatttactccaccgtgtagagaggaacaagatgaaatctgtgctgataccaccaacggaaacaaacagagaccatgacactgactcgaagcacaataaaattattgatattctgtggagtgatcccagaggcaaaaatggctgttttccaaatacgtgccgaggagggggctgctattttggaccagatgttacttccaagattcttaataaataccagttgaagatgctcatcaggtctcatgaatgtaagcccgaagggtatgaaatctgtcatgatgggaaggtggtgactatattttctgcttctaattattatgaagaaggcagcaatcgaggagcttacatcaaactatgttctggtacaactcctcgatttttccagtaccaagtaactaaagcaacgtgctttcagcctcttcgccaaagagtggatactatggaaaacagcgccatcaagatattaagagagagagtgatttcacgaaaaagtgaccttactcgtgctttccaacttcaagaccacagaaaatcaggaaaactttctgtgagccagtgggctttttgcatggagaacattttggggctgaacttaccatggagatccctcagttcgaatctggtaaacatagaccaaaatggaaacgttgaatacatgtccagcttccagaatatccgcattgaaaaacctgtacaagaggctcattctactctagttgaaactctgtacagatacagatctgacctggaaatcatatttaatgccattgacactgatcactcaggcctgatctccgtggaagaatttcgtgccatgtggaaactttttagttctcactacaatgttcacattgatgattcccaagtcaataagcttgccaacataatggacttgaacaaagatggaagcattgactttaatgagtttttaaaggctttctatgtagtgcatagatatgaagacttgatgaaacctgatgtcaccaaccttggctaaacacaaatgagagcttccctcaggctccctgaaacagctaggcccaaatcacaagtacagtcctttccaacacccctgaaattcatagtcagtagcagagaaaagcagatcccaattcatcccacaaacagatgcatagtatgggttttggaagtccctagcaagctgttattggtaagattaggttaaatgtcagtaataggatttggtttcagcattagtacctacatattgccagtgagaaactgggttggacctagtggtgttgtcgtgagtgccacctaaccaggaggccagagcggtttgaaaacatcctgaaaggaactcatacagcacaagagaaaactactaagcttgacatctgtgagtgactgagggagacaggaggaataccaggttattcatggaataaagtctttccatctttaaactgtgatcttctttggagattttataagccagtgatcctcaattaagggatccacccttcagggatgagaaccatattggattcttggggggaatctgtgggagtgtattgtttgaaaaagcgtatttgtgtgtgtgtgtatgtt

SEQ ID NO: 12705 - protein, 625 aa, Homo sapiens; identical to SEQ ID NO: 2210

SEQ ID NO: 12706 - DNA, 2832 bp, Homo sapiens
tgaagattacaaatgagactgggaaaccctcttcaataagacctgtgtgatgatagattgtgtcctgagcccgcaggtcaggctgaaagagtcaacaaccagcaaagtgaagatctaggagtctgttccccttgaacctgtgtggacctgatcaaacctcgagggaaaggctgggagaacacatccctggtcagctgtaggaaagccagagagcatttgagaagaggctgaagcttgaattttgcaaacacacaagccctctgcatttccccagagagaaggtttttttctcgtcttcatttcctttgaaacacctggggtgaggaaaaacctctacattggccaagcagaagaaacagaatctatgactgaagaggatcggctaagagtggttcctcgcagcttaaagggaggcacttttcacactctgtcttaaaatcagaagttgaattcatgaacacatatgatttagatagaagtcatgggatgcagcagttcttcaacgaaaaccaggagatctgacacatcactgagagctgcgttgatcatccagaactggtaccgaggttacaaagctcgactgaaggccagacaacactatgccctcaccatcttccagtccatcgaatatgctgatgaacaaggccaaatgcagttatccaccttcttttccttcatgttggaaaactacacacatatacataaggaagagctagaattaagaaatcagtctcttgaaagcgaacaggacatgagggatagatgggattatgtggactcgatagatgtcccagactcctataatggtcctcggctacaatttcctctcacttgtacggatattgatttacttcttgaggccttcaaggaacaacagatacttcatgcccattatgtcttagaggtgctatttgaaaccaagaaagtcctgaagcaaatgccgaatttcactcacatacaaacttctccctccaaagaggtaacaatctgtggtgatttgcatgggaaactggatgatctttttttgatcttctacaagaatggtctcccctcagagaggaacccgtatgtttttaatggtgactttgtagatcgaggaaagaattccatagagatcctaatgatcctgtgtgtgagttttcttgtctaccccaatgacctgcacttgaacagagggaaccacgaagattttatgatgaatctgaggtatggcttcacgaaagaaattttgcataaatataagctacatggaaaaagaatcttacaaatcttggaagaattctatgcctggctcccaatcggtacaatcgttgacaatgaaatcctggtcatccatggtgggatatcagagaccacagacttgaatttactccaccgtgtagagaggaacaagatgaaatctgtgctgataccaccaacggaaacaaacagagaccatgacactgactcgaagcacaataaagtaggtgtgacttttaatgcacatggaagaatcaaaacaaatggatctcctactgaacacttaacagagcatgaatgggaacaggtggtgactatattttctgcttctaattattatgaagaaggcagcaatcgaggagcttacatcaaactatgttctggtacaactcctcgatttttccagtaccaagtaactaaagcaacgtgctttcagcctcttcgccaaagagtggatactatggaaaacagcgccatcaagatattaagagagagagtgatttcacgaaaaagtgaccttactcgtgctttccaacttcaagaccacagaaaatcaggaaaactttctgtgagccagtgggctttttgcatggagaacattttggggctgaacttaccatggagatccctcagttcgaatctggtaaacatagaccaaaatggaaacgttgaatacatgtccagcttccagaatatccgcattgaaaaacctgtacaagaggctcattctactctagttgaaactctgtacagatacagatctgacctggaaatcatatttaatgccattgacactgatcactcaggcctgatctccgtggaagaatttcgtgccatgtggaaactttttagttctcactacaatgttcacattgatgattcccaagtcaataagcttgccaacataatggacttgaacaaagatggaagcattgactttaatgagtttttaaaggctttctatgtagtgcatagatatgaagacttgatgaaacctgatgtcaccaaccttggctaaacacaaatgagagcttccctcaggctccctgaaacagctaggcccaaatcacaagtacagtcctttccaacacccctgaaattcatagtcagtagcagagaaaagcagatcccaattcatcccacaaacagatgcatagtatgggttttggaagtccctagcaagctgttattggtaagattaggttaaatgtcagtaataggatttggtttcagcattagtacctacatattgccagtgagaaactgggttggacctagtggtgttgtcgtgagtgccacctaaccaggaggccagagcggtttgaaaacatcctgaaaggaactcatacagcacaagagaaaactactaagcttgacatctgtgagtgactgagggagacaggaggaataccaggttattcatggaataaagtctttccatctttaaactgtgatcttctttggagattttataagccagtgatcctcaattaagggatccacccttcagggatgagaaccatattggattcttggggggaatctgtgggagtgtattgtttgaaaaagcgtatttgtgtgtgtgtgtatgtt

SEQ ID NO: 12707 - protein, 591 aa, Homo sapiens; identical to SEQ ID NO: 2212

SEQ ID NO: 12708 - DNA, 2349 bp, Homo sapiens
ctgtgtattcctcattagaatctatgactgaagaggatcggctaagagtggttcctcgcagcttaaagggaggcacttttcacactctgtcttaaaatcagaagttgaattcatgaacacatatgatttagatagaagtcatgggatgcagcagttcttcaacgaaaaccaggagatctgacacatagaattaagaaatcagtctcttgaaagcgaacaggacatgagggatagatgggattatgtggactcgatagatgtcccagactcctataatggtcctcggctacaatttcctctcacttgtacggatattgatttacttcttgaggccttcaaggaacaacagatacttcatgcccattatgtcttagaggtgctatttgaaaccaagaaagtcctgaagcaaatgccgaatttcactcacatacaaacttctccctccaaagaggtaacaatctgtggtgatttgcatgggaaactggatgatctttttttgatcttctacaagaatggtctcccctcagagaggaacccgtatgtttttaatggtgactttgtagatcgaggaaagaattccatagagatcctaatgatcctgtgtgtgagttttcttgtctaccccaatgacctgcacttgaacagagggaaccacgaagattttatgatgaatctgaggtatggcttcacgaaagaaattttgcataaatataagctacatggaaaaagaatcttacaaatcttggaagaattctatgcctggctcccaatcggtacaatcgttgacaatgaaatcctggtcatccatggtgggatatcagagaccacagacttgaatttactccaccgtgtagagaggaacaagatgaaatctgtgctgataccaccaacggaaacaaacagagaccatgacactgactcgaagcacaataaagtaggtgtgacttttaatgcacatggaagaatcaaaacaaatggatctcctactgaacacttaacagagcatgaatgggaacagattattgatattctgtggagtgatcccagaggcaaaaatggctgttttccaaatacgtgccgaggagggggctgctattttggaccagatgttacttccaagattcttaataaataccagttgaagatgctcatcaggtctcatgaatgtaagcccgaagggtatgaaatctgtcatgatgggaaggtggtgactatattttctgcttctaattattatgaagaaggcagcaatcgaggagcttacatcaaactatgttctggtacaactcctcgatttttccagtaccaagtaactaaagcaacgtgctttcagcctcttcgccaaagagtggatactatggaaaacagcgccatcaagatattaagagagagagtgatttcacgaaaaagtgaccttactcgtgctttccaacttcaagaccacagaaaatcaggaaaactttctgtgagccagtgggctttttgcatggagaacattttggggctgaacttaccatggagatccctcagttcgaatctggtaaacatagaccaaaatggaaacgttgaatacatgtccagcttccagaatatccgcattgaaaaacctgtacaagaggctcattctactctagttgaaactctgtacagatacagatctgacctggaaatcatatttaatgccattgacactgatcactcaggcctgatctccgtggaagaatttcgtgccatgtggaaactttttagttctcactacaatgttcacattgatgattcccaagtcaataagcttgccaacataatggacttgaacaaagatggaagcattgactttaatgagtttttaaaggctttctatgtagtgcatagatatgaagacttgatgaaacctgatgtcaccaaccttggctaaacacaaatgagagcttccctcaggctccctgaaacagctaggcccaaatcacaagtacagtcctttccaacacccctgaaattcatagtcagtagcagagaaaagcagatcccaattcatcccacaaacagatgcatagtatgggttttggaagtccctagcaagctgttattggtaagattaggttaaatgtcagtaataggatttggtttcagcattagtacctacatattgccagtgagaaactgggttggacctagtggtgttgtcgtgagtgccacctaaccaggaggccagagcggtttgaaaacatcctgaaaggaactcatacagcacaagagaaaactactaagcttgacatctgtgagtgactgagggagacaggaggaataccaggttattcatggaataaagtctttccatctttaaactgt

SEQ ID NO: 12709 - protein, 563 aa, Homo sapiens
MRDRWDYVDSIDVPDSYNGPRLQFPLTCTDIDLLLEAFKEQQILHAHYVLEVLFETKKVLKQMPNFTHIQTSPSKEVTICGDLHGKLDDLFLIFYKNGLPSERNPYVFNGDFVDRGKNSIEILMILCVSFLVYPNDLHLNRGNHEDFMMNLRYGFTKEILHKYKLHGKRILQILEEFYAWLPIGTIVDNEILVIHGGISETTDLNLLHRVERNKMKSVLIPPTETNRDHDTDSKHNKVGVTFNAHGRIKTNGSPTEHLTEHEWEQIIDILWSDPRGKNGCFPNTCRGGGCYFGPDVTSKILNKYQLKMLIRSHECKPEGYEICHDGKVVTIFSASNYYEEGSNRGAYIKLCSGTTPRFFQYQVTKATCFQPLRQRVDTMENSAIKILRERVISRKSDLTRAFQLQDHRKSGKLSVSQWAFCMENILGLNLPWRSLSSNLVNIDQNGNVEYMSSFQNIRIEKPVQEAHSTLVETLYRYRSDLEIIFNAIDTDHSGLISVEEFRAMWKLFSSHYNVHIDDSQVNKLANIMDLNKDGSIDFNEFLKAFYVVHRYEDLMKPDVTNLG

SEQ ID NO: 12710 - DNA, 677 bp, Homo sapiens
gaatctatgactgaagaggatcggctaagagtggttcctcgcagcttaaagggaggcacttttcacactctgtcttaaaatcagaagttgaattcatgaacacatatgatttagatagaagtcatgggatgcagcagttcttcaacgaaaaccaggagatctgacacatatacttcatgcccattatgtcttagaggtgctatttgaaaccaagaaagtcctgaagcaaatgccgaatttcactcacatacaaacttctccctccaaagaggtaacaatctgtggtgatttgcatgggaaactggatgatctttttttgatcttctacaagaatggtctcccctcagagaggaacccgtatgtttttaatggtgactttgtagatcgaggaaagaattccatagagatcctaatgatcctgtgtgtgagttttcttgtctaccccaatgacctgcacttgaacagagggaaccacgaagattttatgatgaatctgaggtatggcttcacgaaagaaattttgcataaatataagctacatggaaaaagaatcttacaaatcttggaagaattctatgcctggctcccaatcggtacaatcgttgacaatgaaatcctggtcatccatggtgggatatcagagaccacagacttgaatttactccaccgtgtagaga

SEQ ID NO: 12711 - protein, 148 aa, Homo sapiens
MPNFTHIQTSPSKEVTICGDLHGKLDDLFLIFYKNGLPSERNPYVFNGDFVDRGKNSIEILMILCVSFLVYPNDLHLNRGNHEDFMMNLRYGFTKEILHKYKLHGKRILQILEEFYAWLPIGTIVDNEILVIHGGISETTDLNLLHRV

SEQ ID NO: 12712 - DNA, 13949 bp, Homo sapiens
atgctgtctgtgaagctgaatctgtgagaacacctcactattcacggcaaccggagtggaagaaacaggtgcaaaaagattgtgtgtttgtctgcttttgtgaggctggtcagagattctgtgcctgctttatctgtgcttggctatgactctacctccaggtttaccataccccatagaatgtgtaagagaaaagtaccaacagggaaatcagcaaaaagctttcctatgaaggtgtgtagccagcctccgcagaatttgaaatgtctgaggtctcatctgatgaaagagaagatgttcaaaagaaaacattcacaaaatgggtaaatgcacaattttctaagtttgggaagcagcatattgagaacctcttcagtgacctacaggatgggaggcgcctcctagacctcctcgaaggcctgacagggcaaaaactgccaaaagaaaaaggatccacaagagttcatgccctgaacaatgtcaacaaggcactgcgggttttgcagaacaataatgttgatttagtgaatattggaagtactgacatcgtagatggaaatcataaactgactcttggtttgatttggaatataatcctccactggcaggtcaaaaatgtaatgaaaaatatcatggctggattgcaacaaaccaacagtgaaaagattctcctgagctgggtccgacaatcaactcgtaattatccacaggttaatgtaatcaacttcaccaccagctggtctgatggcctggctttgaatgctctcatccatagtcataggccagacctatttgactggaatagtgtggtttgccagcagtcagccacacaacgactggaacatgcattcaacatcgccagatatcaattaggcatagagaaactactcgatcctgaagatgttgataccacctatccagataagaagtccatcttaatgtacatcacatcactcttccaagttttgcctcaacaagtgagcattgaagccatccaggaagtggaaatgttgccaaggccacctaaagtgactaaagaagaacattttcagttacatcatcaaatgcactattctcaacagatcacggtcagtctagcacagggatatgagagaacttcttcccctaagcctcgattcaagagctatgcctacacacaggctgcttatgtcaccacctctgaccctacacggagcccatttccttcacagcatttggaagctcctgaagacaagtcatttggcagttcattgatggagagtgaagtaaacctggaccgttatcaaacagctttagaagaagtattatcgtggcttctttctgctgaggacacattgcaagcacaaggagagatttctaatgatgtggaagtggtgaaagaccagtttcatactcatgaggggtacatgatggatttgacagcccatcagggccgggttggtaatattctacaattgggaagtaagctgattggaacaggaaaattatcagaagatgaagaaactgaagtacaagagcagatgaatctcctaaattcaagatgggaatgcctcagggtagctagcatggaaaaacaaagcaatttacatagagttttaatggatctccagaatcagaaactgaaagagttgaatgactggctaacaaaaacagaagaaagaacaaggaaaatggaggaagagcctcttggacctgatcttgaagacctaaaacgccaagtacaacaacataaggtgcttcaagaagatctagaacaagaacaagtcagggtcaattctctcactcacatggtggtggtagttgatgaatctagtggagatcacgcaactgctgctttggaagaacaacttaaggtattgggagatcgatgggcaaacatctgtagatggacagaagaccgctgggttcttttacaagacatccttctcaaatggcaacgtcttactgaagaacagtgcctttttagtgcatggctttcagaaaaagaagatgcagtgaacaagattcacacaactggctttaaagatcaaaatgaaatgttatcaagtcttcaaaaactggccgttttaaaagcggatctagaaaagaaaaagcaatccatgggcaaactgtattcactcaaacaagatcttctttcaacactgaagaataagtcagtgacccagaagacggaagcatggctggataactttgcccggtgttgggataatttagtccaaaaacttgaaaagagtacagcacagatttcacaggctgtcaccaccactcagccatcactaacacagacaactgtaatggaaacagtaactacggtgaccacaagggaacagatcctggtaaagcatgctcaagaggaacttccaccaccacctccccaaaagaagaggcagattactgtggattctgaaattaggaaaaggttggatgttgatataactgaacttcacagctggattactcgctcagaagctgtgttgcagagtcctgaatttgcaatctttcggaaggaaggcaacttctcagacttaaaagaaaaagtcaatgccatagagcgagaaaaagctgagaagttcagaaaactgcaagatgccagcagatcagctcaggccctggtggaacagatggtgaatgagggtgttaatgcagatagcatcaaacaagcctcagaacaactgaacagccggtggatcgaattctgccagttgctaagtgagagacttaactggctggagtatcagaacaacatcatcgctttctataatcagctacaacaattggagcagatgacaactactgctgaaaactggttgaaaatccaacccaccaccccatcagagccaacagcaattaaaagtcagttaaaaatttgtaaggatgaagtcaaccggctatcagatcttcaacctcaaattgaacgattaaaaattcaaagcatagccctgaaagagaaaggacaaggacccatgttcctggatgcagactttgtggcctttacaaatcattttaagcaagtcttttctgatgtgcaggccagagagaaagagctacagacaatttttgacactttgccaccaatgcgctatcaggagaccatgagtgccatcaggacatgggtccagcagtcagaaaccaaactctccatacctcaacttagtgtcaccgactatgaaatcatggagcagagactcggggaattgcaggctttacaaagttctctgcaagagcaacaaagtggcctatactatctcagcaccactgtgaaagagatgtcgaagaaagcgccctctgaaattagccggaaatatcaatcagaatttgaagaaattgagggacgctggaagaagctctcctcccagctggttgagcattgtcaaaagctagaggagcaaatgaataaactccgaaaaattcagaatcacatacaaaccctgaagaaatggatggctgaagttgatgtttttctgaaggaggaatggcctgcccttggggattcagaaattctaaaaaagcagctgaaacagtgcagacttttagtcagtgatattcagacaattcagcccagtctaaacagtgtcaatgaaggtgggcagaagataaagaatgaagcagagccagagtttgcttcgagacttgagacagaactcaaagaacttaacactcagtgggatcacatgtgccaacaggtctatgccagaaaggaggccttgaagggaggtttggagaaaactgtaagcctccagaaagatctatcagagatgcacgaatggatgacacaagctgaagaagagtatcttgagagagattttgaatataaaactccagatgaattacagaaagcagttgaagagatgaagagagctaaagaagaggcccaacaaaaagaagcgaaagtgaaactccttactgagtctgtaaatagtgtcatagctcaagctccacctgtagcacaagaggccttaaaaaaggaacttgaaactctaaccaccaactaccagtggctctgcactaggctgaatgggaaatgcaagactttggaagaagtttgggcatgttggcatgagttattgtcatacttggagaaagcaaacaagtggctaaatgaagtagaatttaaacttaaaaccactgaaaacattcctggcggagctgaggaaatctctgaggtgctagattcacttgaaaatttgatgcgacattcagaggataacccaaatcagattcgcatattggcacagaccctaacagatggcggagtcatggatgagctaatcaatgaggaacttgagacatttaattctcgttggagggaactacatgaagaggctgtaaggaggcaaaagttgcttgaacagagcatccagtctgcccaggagactgaaaaatccttacacttaatccaggagtccctcacattcattgacaagcagttggcagcttatattgcagacaaggtggacgcagctcaaatgcctcaggaagcccagaaaatccaatctgatttgacaagtcatgagatcagtttagaagaaatgaagaaacataatcaggggaaggaggctgcccaaagagtcctgtctcagattgatgttgcacagaaaaaattacaagatgtctccatgaagtttcgattattccagaaaccagccaattttgagcagcgtctacaagaaagtaagatgattttagatgaagtgaagatgcacttgcctgcattggaaacaaagagtgtggaacaggaagtagtacagtcacagctaaatcattgtgtgaacttgtataaaagtctgagtgaagtgaagtctgaagtggaaatggtgataaagactggacgtcagattgtacagaaaaagcagacggaaaatcccaaagaacttgatgaaagagtaacagctttgaaattgcattataatgagctgggagcaaaggtaacagaaagaaagcaacagttggagaaatgcttgaaattgtcccgtaagatgcgaaaggaaatgaatgtcttgacagaatggctggcagctacagatatggaattgacaaagagatcagcagttgaaggaatgcctagtaatttggattctgaagttgcctggggaaaggctactcaaaaagagattgagaaacagaaggtgcacctgaagagtatcacagaggtaggagaggccttgaaaacagttttgggcaagaaggagacgttggtggaagataaactcagtcttctgaatagtaactggatagctgtcacctcccgagcagaagagtggttaaatcttttgttggaataccagaaacacatggaaacttttgaccagaatgtggaccacatcacaaagtggatcattcaggctgacacacttttggatgaatcagagaaaaagaaaccccagcaaaaagaagacgtgcttaagcgtttaaaggcagaactgaatgacatacgcccaaaggtggactctacacgtgaccaagcagcaaacttgatggcaaaccgcggtgaccactgcaggaaattagtagagccccaaatctcagagctcaaccatcgatttgcagccatttcacacagaattaagactggaaaggcctccattcctttgaaggaattggagcagtttaactcagatatacaaaaattgcttgaaccactggaggctgaaattcagcagggggtgaatctgaaagaggaagacttcaataaagatatgaatgaagacaatgagggtactgtaaaagaattgttgcaaagaggagacaacttacaacaaagaatcacagatgagagaaagcgagaggaaataaagataaaacagcagctgttacagacaaaacataatgctctcaaggatttgaggtctcaaagaagaaaaaaggctctagaaatttctcatcagtggtatcagtacaagaggcaggctgatgatctcctgaaatgcttggatgacattgaaaaaaaattagccagcctacctgagcccagagatgaaaggaaaataaaggaaattgatcgggaattgcagaagaagaaagaggagctgaatgcagtgcgtaggcaagctgagggcttgtctgaggatggggccgcaatggcagtggagccaactcagatccagctcagcaagcgctggcgggaaattgagagcaaatttgctcagtttcgaagactcaactttgcacaaattcacactgtccgtgaagaaacgatgatggtgatgactgaagacatgcctttggaaatttcttatgtgccttctacttatttgactgaaatcactcatgtctcacaagccctattagaagtggaacaacttctcaatgctcctgacctctgtgctaaggactttgaagatctctttaagcaagaggagtctctgaagaatataaaagatagtctacaacaaagctcaggtcggattgacattattcatagcaagaagacagcagcattgcaaagtgcaacgcctgtggaaagggtgaagctacaggaagctctctcccagcttgatttccaatgggaaaaagttaacaaaatgtacaaggaccgacaagggcgatttgacagatctgttgagaaatggcggcgttttcattatgatataaagatatttaatcagtggctaacagaagctgaacagtttctcagaaagacacaaattcctgagaattgggaacatgctaaatacaaatggtatcttaaggaactccaggatggcattgggcagcggcaaactgttgtcagaacattgaatgcaactggggaagaaataattcagcaatcctcaaaaacagatgccagtattctacaggaaaaattgggaagcctgaatctgcggtggcaggaggtctgcaaacagctgtcagacagaaaaaagaggctagaagaacaaaagaatatcttgtcagaatttcaaagagatttaaatgaatttgttttatggttggaggaagcagataacattgctagtatcccacttgaacctggaaaagagcagcaactaaaagaaaagcttgagcaagtcaagttactggtggaagagttgcccctgcgccagggaattctcaaacaattaaatgaaactggaggacccgtgcttgtaagtgctcccataagcccagaagagcaagataaacttgaaaataagctcaagcagacaaatctccagtggataaaggtttccagagctttacctgagaaacaaggagaaattgaagctcaaataaaagaccttgggcagcttgaaaaaaagcttgaagaccttgaagagcagttaaatcatctgctgctgtggttatctcctattaggaatcagttggaaatttataaccaaccaaaccaagaaggaccatttgacgttaaggaaactgaaatagcagttcaagctaaacaaccggatgtggaagagattttgtctaaagggcagcatttgtacaaggaaaaaccagccactcagccagtgaagaggaagttagaagatctgagctctgagtggaaggcggtaaaccgtttacttcaagagctgagggcaaagcagcctgacctagctcctggactgaccactattggagcctctcctactcagactgttactctggtgacacaacctgtggttactaaggaaactgccatctccaaactagaaatgccatcttccttgatgttggaggtacctgctctggcagatttcaaccgggcttggacagaacttaccgactggctttctctgcttgatcaagttataaaatcacagagggtgatggtgggtgaccttgaggatatcaacgagatgatcatcaagcagaaggcaacaatgcaggatttggaacagaggcgtccccagttggaagaactcattaccgctgcccaaaatttgaaaaacaagaccagcaatcaagaggctagaacaatcattacggatcgaattgaaagaattcagaatcagtgggatgaagtacaagaacaccttcagaaccggaggcaacagttgaatgaaatgttaaaggattcaacacaatggctggaagctaaggaagaagctgagcaggtcttaggacaggccagagccaagcttgagtcatggaaggagggtccctatacagtagatgcaatccaaaagaaaatcacagaaaccaagcagttggccaaagacctccgccagtggcagacaaatgtagatgtggcaaatgacttggccctgaaacttctccgggattattctgcagatgataccagaaaagtccacatgataacagagaatatcaatgcctcttggagaagcattcataaaagggtgagtgagcgagaggctgctttggaagaaactcatagattactgcaacagttccccctggacctggaaaagtttcttgcctggcttacagaagctgaaacaactgccaatgtcctacaggatgctacccgtaaggaaaggctcctagaagactccaagggagtaaaagagctgatgaaacaatggcaagacctccaaggtgaaattgaagctcacacagatgtttatcacaacctggatgaaaacagccaaaaaatcctgagatccctggaaggttccgatgatgcagtcctgttacaaagacgtttggataacatgaacttcaagtggagtgaacttcggaaaaagtctctcaacattaggtcccatttggaagccagttctgaccagtggaagcgtctgcacctttctctgcaggaacttctggtgtggctacagctgaaagatgatgaattaagccggcaggcacctattggaggcgactttccagcagttcagaagcagaacgatgtacatagggccttcaagagggaattgaaaactaaagaacctgtaatcatgagtactcttgagactgtacgaatatttctgacagagcagcctttggaaggactagagaaactctaccaggagcccagagagctgcctcctgaggagagagcccagaatgtcactcggcttctacgaaagcaggctgaggaggtcaatactgagtgggaaaaattgaacctgcactccgctgactggcagagaaaaatagatgagacccttgaaagactccgggaacttcaagaggccacggatgagctggacctcaagctgcgccaagctgaggtgatcaagggatcctggcagcccgtgggcgatctcctcattgactctctccaagatcacctcgagaaagtcaaggcacttcgaggagaaattgcgcctctgaaagagaacgtgagccacgtcaatgaccttgctcgccagcttaccactttgggcattcagctctcaccgtataacctcagcactctggaagacctgaacaccagatggaagcttctgcaggtggccgtcgaggaccgagtcaggcagctgcatgaagcccacagggactttggtccagcatctcagcactttctttccacgtctgtccagggtccctgggagagagccatctcgccaaacaaagtgccctactatatcaaagctgacctgaataatgtcagattctcagcttataggactgccatgaaactccgaagactgcagaaggccctttgcttggatctcttgagcctgtcagctgcatgtgatgccttggaccagcacaacctcaagcaaaatgaccagcccatggatatcctgcagattattaattgtttgaccactatttatgaccgcctggagcaagagcacaacaatttggtcaacgtccctctctgcgtggatatgtgtctgaactggctgctgaatgtttatgatacgggacgaacagggaggatccgtgtcctgtcttttaaaactggcatcatttccctgtgtaaagcacatttggaagacaagtacagataccttttcaagcaagtggcaagttcaacaggattttgtgaccagcgcaggctgggcctccttctgcatgattctatccaaattccaagacagttgggtgaagttgcatcctttgggggcagtaacattgagccaagtgtccggagctgcttccaatttgctaataataagccagagatcgaagcggccctcttcctagactggatgagactggaaccccagtccatggtgtggctgcccgtcctgcacagagtggctgctgcagaaactgccaagcatcaggccaaatgtaacatctgcaaagagtgtccaatcattggattcaggtacaggagtctaaagcactttaattatgacatctgccaaagctgctttttttctggtcgagttgcaaaaggccataaaatgcactatcccatggtggaatattgcactccgactacatcaggagaagatgttcgagactttgccaaggtactaaaaaacaaatttcgaaccaaaaggtattttgcgaagcatccccgaatgggctacctgccagtgcagactgtcttagagggggacaacatggaaactcccgttactctgatcaacttctggccagtagattctgcgcctgcctcgtcccctcagctttcacacgatgatactcattcacgcattgaacattatgctagcaggctagcagaaatggaaaacagcaatggatcttatctaaatgatagcatctctcctaatgagagcatagatgatgaacatttgttaatccagcattactgccaaagtttgaaccaggactcccccctgagccagcctcgtagtcctgcccagatcttgatttccttagagagtgaggaaagaggggagctagagagaatcctagcagatcttgaggaagaaaacaggaatctgcaagcagaatatgaccgtctaaagcagcagcacgaacataaaggcctgtccccactgccgtcccctcctgaaatgatgcccacctctccccagagtccccgggatgctgagctcattgctgaggccaagctactgcgtcaacacaaaggccgcctggaagccaggatgcaaatcctggaagaccacaataaacagctggagtcacagttacacaggctaaggcagctgctggagcaaccccaggcagaggccaaagtgaatggcacaacggtgtcctctccttctacctctctacagaggtccgacagcagtcagcctatgctgctccgagtggttggcagtcaaacttcggactccatgggtgaggaagatcttctcagtcctccccaggacacaagcacagggttagaggaggtgatggagcaactcaacaactccttccctagttcaagaggaagaaatacccctggaaagccaatgagagaggacacaatgtaggaagtcttttccacatggcagatgatttgggcagagcgatggagtccttagtatcagtcatgacagatgaagaaggagcagaataaatgttttacaactcctgattcccgcatggtttttataatattcatacaacaaagaggattagacagtaagagtttacaagaaataaatctatatttttgtgaagggtagtggtattatactgtagatttcagtagtttctaagtctgttattgttttgttaacaatggcaggttttacacgtctatgcaattgtacaaaaaagttataagaaaactacatgtaaaatcttgatagctaaataacttgccatttctttatatggaacgcattttgggttgtttaaaaatttataacagttataaagaaagattgtaaactaaagtgtgctttataaaaaaaagttgtttataaaaacccctaaaaacaaaacaaacacacacacacacacatacacacacacacacaaaactttgaggcagcgcattgttttgcatccttttggcgtgatatccatatgaaattcatggctttttctttttttgcatattaaagataagacttcctctaccaccacaccaaatgactactacacactgctcatttgagaactgtcagctgagtggggcaggcttgagttttcatttcatatatctatatgtctataagtatataaatactatagttatatagataaagagatacgaatttctatagactgactttttccattttttaaatgttcatgtcacatcctaatagaaagaaattacttctagtcagtcatccaggcttacctgcttggtctagaatggatttttcccggagccggaagccaggaggaaactacaccacactaaaacattgtctacagctccagatgtttctcattttaaacaactttccactgacaacgaaagtaaagtaaagtattggatttttttaaagggaacatgtgaatgaatacacaggacttattatatcagagtgagtaatcggttggttggttgattgattgattgattgatacattcagcttcctgctgctagcaatgccacgatttagatttaatgatgcttcagtggaaatcaatcagaaggtattctgaccttgtgaacatcagaaggtattttttaactcccaagcagtagcaggacgatgatagggctggagggctatggattcccagcccatccctgtgaaggagtaggccactctttaagtgaaggattggatgattgttcataatacataaagttctctgtaattacaactaaattattatgccctcttctcacagtcaaaaggaactgggtggtttggtttttgttgcttttttagatttattgtcccatgtgggatgagtttttaaatgccacaagacataatttaaaataaataaactttgggaaaaggtgtaaaacagtagccccatcacatttgtgatactgacaggtatcaacccagaagcccatgaactgtgtttccatcctttgcatttctctgcgagtagttccacacaggtttgtaagtaagtaagaaagaaggcaaattgattcaaatgttacaaaaaaacccttcttggtggattagacaggttaaatatataaacaaacaaacaaaaattgctcaaaaaagaggagaaaagctcaagaggaaaagctaaggactggtaggaaaaagctttactctttcatgccattttatttctttttgatttttaaatcattcattcaatagataccaccgtgtgacctataattttgcaaatctgttacctctgacatcaagtgtaattagcttttggagagtgggctgacatcaagtgtaattagcttttggagagtgggttttgtccattattaataattaattaattaacatcaaacacggcttctcatgctatttctacctcactttggttttggggtgttcctgataattgtgcacacctgagttcacagcttcaccacttgtccattgcgttattttctttttcctttataattctttctttttccttcataattttcaaaagaaaacccaaagctctaaggtaacaaattaccaaattacatgaagatttggtttttgtcttgcatttttttcctttatgtgacgctggaccttttctttacccaaggatttttaaaactcagatttaaaacaaggggttactttacatcctactaagaagtttaagtaagtaagtttcattctaaaatcagaggtaaatagagtgcataaataattttgttttaatctttttgtttttcttttagacacattagctctggagtgagtctgtcataatatttgaacaaaaattgagagctttattgctgcattttaagcataattaatttggacattatttcgtgttgtgttctttataaccaccaagtattaaactgtaaatcataatgtaactgaagcataaacatcacatggcatgttttgtcattgttttcaggtactgagttcttacttgagtatcataatatattgtgttttaacaccaacactgtaacatttacgaattatttttttaaacttcagttttactgcattttcacaacatatcagacttcaccaaatatatgccttactattgtattatagtactgctttactgtgtatctcaataaagcacgcagttatgttacaaaaaagta

SEQ ID NO: 12713 - protein, 3661 aa, Homo sapiens
MSEVSSDEREDVQKKTFTKWVNAQFSKFGKQHIENLFSDLQDGRRLLDLLEGLTGQKLPKEKGSTRVHALNNVNKALRVLQNNNVDLVNIGSTDIVDGNHKLTLGLIWNIILHWQVKNVMKNIMAGLQQTNSEKILLSWVRQSTRNYPQVNVINFTTSWSDGLALNALIHSHRPDLFDWNSVVCQQSATQRLEHAFNIARYQLGIEKLLDPEDVDTTYPDKKSILMYITSLFQVLPQQVSIEAIQEVEMLPRPPKVTKEEHFQLHHQMHYSQQITVSLAQGYERTSSPKPRFKSYAYTQAAYVTTSDPTRSPFPSQHLEAPEDKSFGSSLMESEVNLDRYQTALEEVLSWLLSAEDTLQAQGEISNDVEVVKDQFHTHEGYMMDLTAHQGRVGNILQLGSKLIGTGKLSEDEETEVQEQMNLLNSRWECLRVASMEKQSNLHRVLMDLQNQKLKELNDWLTKTEERTRKMEEEPLGPDLEDLKRQVQQHKVLQEDLEQEQVRVNSLTHMVVVVDESSGDHATAALEEQLKVLGDRWANICRWTEDRWVLLQDILLKWQRLTEEQCLFSAWLSEKEDAVNKIHTTGFKDQNEMLSSLQKLAVLKADLEKKKQSMGKLYSLKQDLLSTLKNKSVTQKTEAWLDNFARCWDNLVQKLEKSTAQISQAVTTTQPSLTQTTVMETVTTVTTREQILVKHAQEELPPPPPQKKRQITVDSEIRKRLDVDITELHSWITRSEAVLQSPEFAIFRKEGNFSDLKEKVNAIEREKAEKFRKLQDASRSAQALVEQMVNEGVNADSIKQASEQLNSRWIEFCQLLSERLNWLEYQNNIIAFYNQLQQLEQMTTTAENWLKIQPTTPSEPTAIKSQLKICKDEVNRLSDLQPQIERLKIQSIALKEKGQGPMFLDADFVAFTNHFKQVFSDVQAREKELQTIFDTLPPMRYQETMSAIRTWVQQSETKLSIPQLSVTDYEIMEQRLGELQALQSSLQEQQSGLYYLSTTVKEMSKKAPSEISRKYQSEFEEIEGRWKKLSSQLVEHCQKLEEQMNKLRKIQNHIQTLKKWMAEVDVFLKEEWPALGDSEILKKQLKQCRLLVSDIQTIQPSLNSVNEGGQKIKNEAEPEFASRLETELKELNTQWDHMCQQVYARKEALKGGLEKTVSLQKDLSEMHEWMTQAEEEYLERDFEYKTPDELQKAVEEMKRAKEEAQQKEAKVKLLTESVNSVIAQAPPVAQEALKKELETLTTNYQWLCTRLNGKCKTLEEVWACWHELLSYLEKANKWLNEVEFKLKTTENIPGGAEEISEVLDSLENLMRHSEDNPNQIRILAQTLTDGGVMDELINEELETFNSRWRELHEEAVRRQKLLEQSIQSAQETEKSLHLIQESLTFIDKQLAAYIADKVDAAQMPQEAQKIQSDLTSHEISLEEMKKHNQGKEAAQRVLSQIDVAQKKLQDVSMKFRLFQKPANFEQRLQESKMILDEVKMHLPALETKSVEQEVVQSQLNHCVNLYKSLSEVKSEVEMVIKTGRQIVQKKQTENPKELDERVTALKLHYNELGAKVTERKQQLEKCLKLSRKMRKEMNVLTEWLAATDMELTKRSAVEGMPSNLDSEVAWGKATQKEIEKQKVHLKSITEVGEALKTVLGKKETLVEDKLSLLNSNWIAVTSRAEEWLNLLLEYQKHMETFDQNVDHITKWIIQADTLLDESEKKKPQQKEDVLKRLKAELNDIRPKVDSTRDQAANLMANRGDHCRKLVEPQISELNHRFAAISHRIKTGKASIPLKELEQFNSDIQKLLEPLEAEIQQGVNLKEEDFNKDMNEDNEGTVKELLQRGDNLQQRITDERKREEIKIKQQLLQTKHNALKDLRSQRRKKALEISHQWYQYKRQADDLLKCLDDIEKKLASLPEPRDERKIKEIDRELQKKKEELNAVRRQAEGLSEDGAAMAVEPTQIQLSKRWREIESKFAQFRRLNFAQIHTVREETMMVMTEDMPLEISYVPSTYLTEITHVSQALLEVEQLLNAPDLCAKDFEDLFKQEESLKNIKDSLQQSSGRIDIIHSKKTAALQSATPVERVKLQEALSQLDFQWEKVNKMYKDRQGRFDRSVEKWRRFHYDIKIFNQWLTEAEQFLRKTQIPENWEHAKYKWYLKELQDGIGQRQTVVRTLNATGEEIIQQSSKTDASILQEKLGSLNLRWQEVCKQLSDRKKRLEEQKNILSEFQRDLNEFVLWLEEADNIASIPLEPGKEQQLKEKLEQVKLLVEELPLRQGILKQLNETGGPVLVSAPISPEEQDKLENKLKQTNLQWIKVSRALPEKQGEIEAQIKDLGQLEKKLEDLEEQLNHLLLWLSPIRNQLEIYNQPNQEGPFDVKETEIAVQAKQPDVEEILSKGQHLYKEKPATQPVKRKLEDLSSEWKAVNRLLQELRAKQPDLAPGLTTIGASPTQTVTLVTQPVVTKETAISKLEMPSSLMLEVPALADFNRAWTELTDWLSLLDQVIKSQRVMVGDLEDINEMIIKQKATMQDLEQRRPQLEELITAAQNLKNKTSNQEARTIITDRIERIQNQWDEVQEHLQNRRQQLNEMLKDSTQWLEAKEEAEQVLGQARAKLESWKEGPYTVDAIQKKITETKQLAKDLRQWQTNVDVANDLALKLLRDYSADDTRKVHMITENINASWRSIHKRVSEREAALEETHRLLQQFPLDLEKFLAWLTEAETTANVLQDATRKERLLEDSKGVKELMKQWQDLQGEIEAHTDVYHNLDENSQKILRSLEGSDDAVLLQRRLDNMNFKWSELRKKSLNIRSHLEASSDQWKRLHLSLQELLVWLQLKDDELSRQAPIGGDFPAVQKQNDVHRAFKRELKTKEPVIMSTLETVRIFLTEQPLEGLEKLYQEPRELPPEERAQNVTRLLRKQAEEVNTEWEKLNLHSADWQRKIDETLERLRELQEATDELDLKLRQAEVIKGSWQPVGDLLIDSLQDHLEKVKALRGEIAPLKENVSHVNDLARQLTTLGIQLSPYNLSTLEDLNTRWKLLQVAVEDRVRQLHEAHRDFGPASQHFLSTSVQGPWERAISPNKVPYYIKADLNNVRFSAYRTAMKLRRLQKALCLDLLSLSAACDALDQHNLKQNDQPMDILQIINCLTTIYDRLEQEHNNLVNVPLCVDMCLNWLLNVYDTGRTGRIRVLSFKTGIISLCKAHLEDKYRYLFKQVASSTGFCDQRRLGLLLHDSIQIPRQLGEVASFGGSNIEPSVRSCFQFANNKPEIEAALFLDWMRLEPQSMVWLPVLHRVAAAETAKHQAKCNICKECPIIGFRYRSLKHFNYDICQSCFFSGRVAKGHKMHYPMVEYCTPTTSGEDVRDFAKVLKNKFRTKRYFAKHPRMGYLPVQTVLEGDNMETPVTLINFWPVDSAPASSPQLSHDDTHSRIEHYASRLAEMENSNGSYLNDSISPNESIDDEHLLIQHYCQSLNQDSPLSQPRSPAQILISLESEERGELERILADLEEENRNLQAEYDRLKQQHEHKGLSPLPSPPEMMPTSPQSPRDAELIAEAKLLRQHKGRLEARMQILEDHNKQLESQLHRLRQLLEQPQAEAKVNGTTVSSPSTSLQRSDSSQPMLLRVVGSQTSDSMGEEDLLSPPQDTSTGLEEVMEQLNNSFPSSRGRNTPGKPMREDTM

SEQ ID NO: 12714 - DNA, 14033 bp, Homo sapiens
atgctgtctgtgaagctgaatctgtgagaacacctcactattcacggcaaccggagtggaagaaacaggtgcaaaaagattgtgtgtttgtctgcttttgtgaggctggtcagagattctgtgcctgctttatctgtgcttggctatgactctacctccaggtttaccataccccatagaatgtgtaagagaaaagtaccaacagggaaatcagcaaaaagctttcctatgaaggtgtgtagccagcctccgcagaatttgaaatgtctgaggtctcatctggtgagtaaaagctgcagataaatgcaacagccattcagaagaatgataaattccacaagcattcagaagcaggcttccctaaagatgaaagagaagatgttcaaaagaaaacattcacaaaatgggtaaatgcacaattttctaagtttgggaagcagcatattgagaacctcttcagtgacctacaggatgggaggcgcctcctagacctcctcgaaggcctgacagggcaaaaactgccaaaagaaaaaggatccacaagagttcatgccctgaacaatgtcaacaaggcactgcgggttttgcagaacaataatgttgatttagtgaatattggaagtactgacatcgtagatggaaatcataaactgactcttggtttgatttggaatataatcctccactggcaggtcaaaaatgtaatgaaaaatatcatggctggattgcaacaaaccaacagtgaaaagattctcctgagctgggtccgacaatcaactcgtaattatccacaggttaatgtaatcaacttcaccaccagctggtctgatggcctggctttgaatgctctcatccatagtcataggccagacctatttgactggaatagtgtggtttgccagcagtcagccacacaacgactggaacatgcattcaacatcgccagatatcaattaggcatagagaaactactcgatcctgaagatgttgataccacctatccagataagaagtccatcttaatgtacatcacatcactcttccaagttttgcctcaacaagtgagcattgaagccatccaggaagtggaaatgttgccaaggccacctaaagtgactaaagaagaacattttcagttacatcatcaaatgcactattctcaacagatcacggtcagtctagcacagggatatgagagaacttcttcccctaagcctcgattcaagagctatgcctacacacaggctgcttatgtcaccacctctgaccctacacggagcccatttccttcacagcatttggaagctcctgaagacaagtcatttggcagttcattgatggagagtgaagtaaacctggaccgttatcaaacagctttagaagaagtattatcgtggcttctttctgctgaggacacattgcaagcacaaggagagatttctaatgatgtggaagtggtgaaagaccagtttcatactcatgaggggtacatgatggatttgacagcccatcagggccgggttggtaatattctacaattgggaagtaagctgattggaacaggaaaattatcagaagatgaagaaactgaagtacaagagcagatgaatctcctaaattcaagatgggaatgcctcagggtagctagcatggaaaaacaaagcaatttacatagagttttaatggatctccagaatcagaaactgaaagagttgaatgactggctaacaaaaacagaagaaagaacaaggaaaatggaggaagagcctcttggacctgatcttgaagacctaaaacgccaagtacaacaacataaggtgcttcaagaagatctagaacaagaacaagtcagggtcaattctctcactcacatggtggtggtagttgatgaatctagtggagatcacgcaactgctgctttggaagaacaacttaaggtattgggagatcgatgggcaaacatctgtagatggacagaagaccgctgggttcttttacaagacatccttctcaaatggcaacgtcttactgaagaacagtgcctttttagtgcatggctttcagaaaaagaagatgcagtgaacaagattcacacaactggctttaaagatcaaaatgaaatgttatcaagtcttcaaaaactggccgttttaaaagcggatctagaaaagaaaaagcaatccatgggcaaactgtattcactcaaacaagatcttctttcaacactgaagaataagtcagtgacccagaagacggaagcatggctggataactttgcccggtgttgggataatttagtccaaaaacttgaaaagagtacagcacagatttcacaggctgtcaccaccactcagccatcactaacacagacaactgtaatggaaacagtaactacggtgaccacaagggaacagatcctggtaaagcatgctcaagaggaacttccaccaccacctccccaaaagaagaggcagattactgtggattctgaaattaggaaaaggttggatgttgatataactgaacttcacagctggattactcgctcagaagctgtgttgcagagtcctgaatttgcaatctttcggaaggaaggcaacttctcagacttaaaagaaaaagtcaatgccatagagcgagaaaaagctgagaagttcagaaaactgcaagatgccagcagatcagctcaggccctggtggaacagatggtgaatgagggtgttaatgcagatagcatcaaacaagcctcagaacaactgaacagccggtggatcgaattctgccagttgctaagtgagagacttaactggctggagtatcagaacaacatcatcgctttctataatcagctacaacaattggagcagatgacaactactgctgaaaactggttgaaaatccaacccaccaccccatcagagccaacagcaattaaaagtcagttaaaaatttgtaaggatgaagtcaaccggctatcagatcttcaacctcaaattgaacgattaaaaattcaaagcatagccctgaaagagaaaggacaaggacccatgttcctggatgcagactttgtggcctttacaaatcattttaagcaagtcttttctgatgtgcaggccagagagaaagagctacagacaatttttgacactttgccaccaatgcgctatcaggagaccatgagtgccatcaggacatgggtccagcagtcagaaaccaaactctccatacctcaacttagtgtcaccgactatgaaatcatggagcagagactcggggaattgcaggctttacaaagttctctgcaagagcaacaaagtggcctatactatctcagcaccactgtgaaagagatgtcgaagaaagcgccctctgaaattagccggaaatatcaatcagaatttgaagaaattgagggacgctggaagaagctctcctcccagctggttgagcattgtcaaaagctagaggagcaaatgaataaactccgaaaaattcagaatcacatacaaaccctgaagaaatggatggctgaagttgatgtttttctgaaggaggaatggcctgcccttggggattcagaaattctaaaaaagcagctgaaacagtgcagacttttagtcagtgatattcagacaattcagcccagtctaaacagtgtcaatgaaggtgggcagaagataaagaatgaagcagagccagagtttgcttcgagacttgagacagaactcaaagaacttaacactcagtgggatcacatgtgccaacaggtctatgccagaaaggaggccttgaagggaggtttggagaaaactgtaagcctccagaaagatctatcagagatgcacgaatggatgacacaagctgaagaagagtatcttgagagagattttgaatataaaactccagatgaattacagaaagcagttgaagagatgaagagagctaaagaagaggcccaacaaaaagaagcgaaagtgaaactccttactgagtctgtaaatagtgtcatagctcaagctccacctgtagcacaagaggccttaaaaaaggaacttgaaactctaaccaccaactaccagtggctctgcactaggctgaatgggaaatgcaagactttggaagaagtttgggcatgttggcatgagttattgtcatacttggagaaagcaaacaagtggctaaatgaagtagaatttaaacttaaaaccactgaaaacattcctggcggagctgaggaaatctctgaggtgctagattcacttgaaaatttgatgcgacattcagaggataacccaaatcagattcgcatattggcacagaccctaacagatggcggagtcatggatgagctaatcaatgaggaacttgagacatttaattctcgttggagggaactacatgaagaggctgtaaggaggcaaaagttgcttgaacagagcatccagtctgcccaggagactgaaaaatccttacacttaatccaggagtccctcacattcattgacaagcagttggcagcttatattgcagacaaggtggacgcagctcaaatgcctcaggaagcccagaaaatccaatctgatttgacaagtcatgagatcagtttagaagaaatgaagaaacataatcaggggaaggaggctgcccaaagagtcctgtctcagattgatgttgcacagaaaaaattacaagatgtctccatgaagtttcgattattccagaaaccagccaattttgagcagcgtctacaagaaagtaagatgattttagatgaagtgaagatgcacttgcctgcattggaaacaaagagtgtggaacaggaagtagtacagtcacagctaaatcattgtgtgaacttgtataaaagtctgagtgaagtgaagtctgaagtggaaatggtgataaagactggacgtcagattgtacagaaaaagcagacggaaaatcccaaagaacttgatgaaagagtaacagctttgaaattgcattataatgagctgggagcaaaggtaacagaaagaaagcaacagttggagaaatgcttgaaattgtcccgtaagatgcgaaaggaaatgaatgtcttgacagaatggctggcagctacagatatggaattgacaaagagatcagcagttgaaggaatgcctagtaatttggattctgaagttgcctggggaaaggctactcaaaaagagattgagaaacagaaggtgcacctgaagagtatcacagaggtaggagaggccttgaaaacagttttgggcaagaaggagacgttggtggaagataaactcagtcttctgaatagtaactggatagctgtcacctcccgagcagaagagtggttaaatcttttgttggaataccagaaacacatggaaacttttgaccagaatgtggaccacatcacaaagtggatcattcaggctgacacacttttggatgaatcagagaaaaagaaaccccagcaaaaagaagacgtgcttaagcgtttaaaggcagaactgaatgacatacgcccaaaggtggactctacacgtgaccaagcagcaaacttgatggcaaaccgcggtgaccactgcaggaaattagtagagccccaaatctcagagctcaaccatcgatttgcagccatttcacacagaattaagactggaaaggcctccattcctttgaaggaattggagcagtttaactcagatatacaaaaattgcttgaaccactggaggctgaaattcagcagggggtgaatctgaaagaggaagacttcaataaagatatgaatgaagacaatgagggtactgtaaaagaattgttgcaaagaggagacaacttacaacaaagaatcacagatgagagaaagcgagaggaaataaagataaaacagcagctgttacagacaaaacataatgctctcaaggatttgaggtctcaaagaagaaaaaaggctctagaaatttctcatcagtggtatcagtacaagaggcaggctgatgatctcctgaaatgcttggatgacattgaaaaaaaattagccagcctacctgagcccagagatgaaaggaaaataaaggaaattgatcgggaattgcagaagaagaaagaggagctgaatgcagtgcgtaggcaagctgagggcttgtctgaggatggggccgcaatggcagtggagccaactcagatccagctcagcaagcgctggcgggaaattgagagcaaatttgctcagtttcgaagactcaactttgcacaaattcacactgtccgtgaagaaacgatgatggtgatgactgaagacatgcctttggaaatttcttatgtgccttctacttatttgactgaaatcactcatgtctcacaagccctattagaagtggaacaacttctcaatgctcctgacctctgtgctaaggactttgaagatctctttaagcaagaggagtctctgaagaatataaaagatagtctacaacaaagctcaggtcggattgacattattcatagcaagaagacagcagcattgcaaagtgcaacgcctgtggaaagggtgaagctacaggaagctctctcccagcttgatttccaatgggaaaaagttaacaaaatgtacaaggaccgacaagggcgatttgacagatctgttgagaaatggcggcgttttcattatgatataaagatatttaatcagtggctaacagaagctgaacagtttctcagaaagacacaaattcctgagaattgggaacatgctaaatacaaatggtatcttaaggaactccaggatggcattgggcagcggcaaactgttgtcagaacattgaatgcaactggggaagaaataattcagcaatcctcaaaaacagatgccagtattctacaggaaaaattgggaagcctgaatctgcggtggcaggaggtctgcaaacagctgtcagacagaaaaaagaggctagaagaacaaaagaatatcttgtcagaatttcaaagagatttaaatgaatttgttttatggttggaggaagcagataacattgctagtatcccacttgaacctggaaaagagcagcaactaaaagaaaagcttgagcaagtcaagttactggtggaagagttgcccctgcgccagggaattctcaaacaattaaatgaaactggaggacccgtgcttgtaagtgctcccataagcccagaagagcaagataaacttgaaaataagctcaagcagacaaatctccagtggataaaggtttccagagctttacctgagaaacaaggagaaattgaagctcaaataaaagaccttgggcagcttgaaaaaaagcttgaagaccttgaagagcagttaaatcatctgctgctgtggttatctcctattaggaatcagttggaaatttataaccaaccaaaccaagaaggaccatttgacgttaaggaaactgaaatagcagttcaagctaaacaaccggatgtggaagagattttgtctaaagggcagcatttgtacaaggaaaaaccagccactcagccagtgaagaggaagttagaagatctgagctctgagtggaaggcggtaaaccgtttacttcaagagctgagggcaaagcagcctgacctagctcctggactgaccactattggagcctctcctactcagactgttactctggtgacacaacctgtggttactaaggaaactgccatctccaaactagaaatgccatcttccttgatgttggaggtacctgctctggcagatttcaaccgggcttggacagaacttaccgactggctttctctgcttgatcaagttataaaatcacagagggtgatggtgggtgaccttgaggatatcaacgagatgatcatcaagcagaaggcaacaatgcaggatttggaacagaggcgtccccagttggaagaactcattaccgctgcccaaaatttgaaaaacaagaccagcaatcaagaggctagaacaatcattacggatcgaattgaaagaattcagaatcagtgggatgaagtacaagaacaccttcagaaccggaggcaacagttgaatgaaatgttaaaggattcaacacaatggctggaagctaaggaagaagctgagcaggtcttaggacaggccagagccaagcttgagtcatggaaggagggtccctatacagtagatgcaatccaaaagaaaatcacagaaaccaagcagttggccaaagacctccgccagtggcagacaaatgtagatgtggcaaatgacttggccctgaaacttctccgggattattctgcagatgataccagaaaagtccacatgataacagagaatatcaatgcctcttggagaagcattcataaaagggtgagtgagcgagaggctgctttggaagaaactcatagattactgcaacagttccccctggacctggaaaagtttcttgcctggcttacagaagctgaaacaactgccaatgtcctacaggatgctacccgtaaggaaaggctcctagaagactccaagggagtaaaagagctgatgaaacaatggcaagacctccaaggtgaaattgaagctcacacagatgtttatcacaacctggatgaaaacagccaaaaaatcctgagatccctggaaggttccgatgatgcagtcctgttacaaagacgtttggataacatgaacttcaagtggagtgaacttcggaaaaagtctctcaacattaggtcccatttggaagccagttctgaccagtggaagcgtctgcacctttctctgcaggaacttctggtgtggctacagctgaaagatgatgaattaagccggcaggcacctattggaggcgactttccagcagttcagaagcagaacgatgtacatagggccttcaagagggaattgaaaactaaagaacctgtaatcatgagtactcttgagactgtacgaatatttctgacagagcagcctttggaaggactagagaaactctaccaggagcccagagagctgcctcctgaggagagagcccagaatgtcactcggcttctacgaaagcaggctgaggaggtcaatactgagtgggaaaaattgaacctgcactccgctgactggcagagaaaaatagatgagacccttgaaagactccgggaacttcaagaggccacggatgagctggacctcaagctgcgccaagctgaggtgatcaagggatcctggcagcccgtgggcgatctcctcattgactctctccaagatcacctcgagaaagtcaaggcacttcgaggagaaattgcgcctctgaaagagaacgtgagccacgtcaatgaccttgctcgccagcttaccactttgggcattcagctctcaccgtataacctcagcactctggaagacctgaacaccagatggaagcttctgcaggtggccgtcgaggaccgagtcaggcagctgcatgaagcccacagggactttggtccagcatctcagcactttctttccacgtctgtccagggtccctgggagagagccatctcgccaaacaaagtgccctactatatcaaagctgacctgaataatgtcagattctcagcttataggactgccatgaaactccgaagactgcagaaggccctttgcttggatctcttgagcctgtcagctgcatgtgatgccttggaccagcacaacctcaagcaaaatgaccagcccatggatatcctgcagattattaattgtttgaccactatttatgaccgcctggagcaagagcacaacaatttggtcaacgtccctctctgcgtggatatgtgtctgaactggctgctgaatgtttatgatacgggacgaacagggaggatccgtgtcctgtcttttaaaactggcatcatttccctgtgtaaagcacatttggaagacaagtacagataccttttcaagcaagtggcaagttcaacaggattttgtgaccagcgcaggctgggcctccttctgcatgattctatccaaattccaagacagttgggtgaagttgcatcctttgggggcagtaacattgagccaagtgtccggagctgcttccaatttgctaataataagccagagatcgaagcggccctcttcctagactggatgagactggaaccccagtccatggtgtggctgcccgtcctgcacagagtggctgctgcagaaactgccaagcatcaggccaaatgtaacatctgcaaagagtgtccaatcattggattcaggtacaggagtctaaagcactttaattatgacatctgccaaagctgctttttttctggtcgagttgcaaaaggccataaaatgcactatcccatggtggaatattgcactccgactacatcaggagaagatgttcgagactttgccaaggtactaaaaaacaaatttcgaaccaaaaggtattttgcgaagcatccccgaatgggctacctgccagtgcagactgtcttagagggggacaacatggaaactcccgttactctgatcaacttctggccagtagattctgcgcctgcctcgtcccctcagctttcacacgatgatactcattcacgcattgaacattatgctagcaggctagcagaaatggaaaacagcaatggatcttatctaaatgatagcatctctcctaatgagagcatagatgatgaacatttgttaatccagcattactgccaaagtttgaaccaggactcccccctgagccagcctcgtagtcctgcccagatcttgatttccttagagagtgaggaaagaggggagctagagagaatcctagcagatcttgaggaagaaaacaggaatctgcaagcagaatatgaccgtctaaagcagcagcacgaacataaaggcctgtccccactgccgtcccctcctgaaatgatgcccacctctccccagagtccccgggatgctgagctcattgctgaggccaagctactgcgtcaacacaaaggccgcctggaagccaggatgcaaatcctggaagaccacaataaacagctggagtcacagttacacaggctaaggcagctgctggagcaaccccaggcagaggccaaagtgaatggcacaacggtgtcctctccttctacctctctacagaggtccgacagcagtcagcctatgctgctccgagtggttggcagtcaaacttcggactccatgggtgaggaagatcttctcagtcctccccaggacacaagcacagggttagaggaggtgatggagcaactcaacaactccttccctagttcaagaggaagaaatacccctggaaagccaatgagagaggacacaatgtaggaagtcttttccacatggcagatgatttgggcagagcgatggagtccttagtatcagtcatgacagatgaagaaggagcagaataaatgttttacaactcctgattcccgcatggtttttataatattcatacaacaaagaggattagacagtaagagtttacaagaaataaatctatatttttgtgaagggtagtggtattatactgtagatttcagtagtttctaagtctgttattgttttgttaacaatggcaggttttacacgtctatgcaattgtacaaaaaagttataagaaaactacatgtaaaatcttgatagctaaataacttgccatttctttatatggaacgcattttgggttgtttaaaaatttataacagttataaagaaagattgtaaactaaagtgtgctttataaaaaaaagttgtttataaaaacccctaaaaacaaaacaaacacacacacacacacatacacacacacacacaaaactttgaggcagcgcattgttttgcatccttttggcgtgatatccatatgaaattcatggctttttctttttttgcatattaaagataagacttcctctaccaccacaccaaatgactactacacactgctcatttgagaactgtcagctgagtggggcaggcttgagttttcatttcatatatctatatgtctataagtatataaatactatagttatatagataaagagatacgaatttctatagactgactttttccattttttaaatgttcatgtcacatcctaatagaaagaaattacttctagtcagtcatccaggcttacctgcttggtctagaatggatttttcccggagccggaagccaggaggaaactacaccacactaaaacattgtctacagctccagatgtttctcattttaaacaactttccactgacaacgaaagtaaagtaaagtattggatttttttaaagggaacatgtgaatgaatacacaggacttattatatcagagtgagtaatcggttggttggttgattgattgattgattgatacattcagcttcctgctgctagcaatgccacgatttagatttaatgatgcttcagtggaaatcaatcagaaggtattctgaccttgtgaacatcagaaggtattttttaactcccaagcagtagcaggacgatgatagggctggagggctatggattcccagcccatccctgtgaaggagtaggccactctttaagtgaaggattggatgattgttcataatacataaagttctctgtaattacaactaaattattatgccctcttctcacagtcaaaaggaactgggtggtttggtttttgttgcttttttagatttattgtcccatgtgggatgagtttttaaatgccacaagacataatttaaaataaataaactttgggaaaaggtgtaaaacagtagccccatcacatttgtgatactgacaggtatcaacccagaagcccatgaactgtgtttccatcctttgcatttctctgcgagtagttccacacaggtttgtaagtaagtaagaaagaaggcaaattgattcaaatgttacaaaaaaacccttcttggtggattagacaggttaaatatataaacaaacaaacaaaaattgctcaaaaaagaggagaaaagctcaagaggaaaagctaaggactggtaggaaaaagctttactctttcatgccattttatttctttttgatttttaaatcattcattcaatagataccaccgtgtgacctataattttgcaaatctgttacctctgacatcaagtgtaattagcttttggagagtgggctgacatcaagtgtaattagcttttggagagtgggttttgtccattattaataattaattaattaacatcaaacacggcttctcatgctatttctacctcactttggttttggggtgttcctgataattgtgcacacctgagttcacagcttcaccacttgtccattgcgttattttctttttcctttataattctttctttttccttcataattttcaaaagaaaacccaaagctctaaggtaacaaattaccaaattacatgaagatttggtttttgtcttgcatttttttcctttatgtgacgctggaccttttctttacccaaggatttttaaaactcagatttaaaacaaggggttactttacatcctactaagaagtttaagtaagtaagtttcattctaaaatcagaggtaaatagagtgcataaataattttgttttaatctttttgtttttcttttagacacattagctctggagtgagtctgtcataatatttgaacaaaaattgagagctttattgctgcattttaagcataattaatttggacattatttcgtgttgtgttctttataaccaccaagtattaaactgtaaatcataatgtaactgaagcataaacatcacatggcatgttttgtcattgttttcaggtactgagttcttacttgagtatcataatatattgtgttttaacaccaacactgtaacatttacgaattatttttttaaacttcagttttactgcattttcacaacatatcagacttcaccaaatatatgccttactattgtattatagtactgctttactgtgtatctcaataaagcacgcagttatgttacaaaaaagta

SEQ ID NO: 12715 - protein, 3542 aa, Homo sapiens
MKNIMAGLQQTNSEKILLSWVRQSTRNYPQVNVINFTTSWSDGLALNALIHSHRPDLFDWNSVVCQQSATQRLEHAFNIARYQLGIEKLLDPEDVDTTYPDKKSILMYITSLFQVLPQQVSIEAIQEVEMLPRPPKVTKEEHFQLHHQMHYSQQITVSLAQGYERTSSPKPRFKSYAYTQAAYVTTSDPTRSPFPSQHLEAPEDKSFGSSLMESEVNLDRYQTALEEVLSWLLSAEDTLQAQGEISNDVEVVKDQFHTHEGYMMDLTAHQGRVGNILQLGSKLIGTGKLSEDEETEVQEQMNLLNSRWECLRVASMEKQSNLHRVLMDLQNQKLKELNDWLTKTEERTRKMEEEPLGPDLEDLKRQVQQHKVLQEDLEQEQVRVNSLTHMVVVVDESSGDHATAALEEQLKVLGDRWANICRWTEDRWVLLQDILLKWQRLTEEQCLFSAWLSEKEDAVNKIHTTGFKDQNEMLSSLQKLAVLKADLEKKKQSMGKLYSLKQDLLSTLKNKSVTQKTEAWLDNFARCWDNLVQKLEKSTAQISQAVTTTQPSLTQTTVMETVTTVTTREQILVKHAQEELPPPPPQKKRQITVDSEIRKRLDVDITELHSWITRSEAVLQSPEFAIFRKEGNFSDLKEKVNAIEREKAEKFRKLQDASRSAQALVEQMVNEGVNADSIKQASEQLNSRWIEFCQLLSERLNWLEYQNNIIAFYNQLQQLEQMTTTAENWLKIQPTTPSEPTAIKSQLKICKDEVNRLSDLQPQIERLKIQSIALKEKGQGPMFLDADFVAFTNHFKQVFSDVQAREKELQTIFDTLPPMRYQETMSAIRTWVQQSETKLSIPQLSVTDYEIMEQRLGELQALQSSLQEQQSGLYYLSTTVKEMSKKAPSEISRKYQSEFEEIEGRWKKLSSQLVEHCQKLEEQMNKLRKIQNHIQTLKKWMAEVDVFLKEEWPALGDSEILKKQLKQCRLLVSDIQTIQPSLNSVNEGGQKIKNEAEPEFASRLETELKELNTQWDHMCQQVYARKEALKGGLEKTVSLQKDLSEMHEWMTQAEEEYLERDFEYKTPDELQKAVEEMKRAKEEAQQKEAKVKLLTESVNSVIAQAPPVAQEALKKELETLTTNYQWLCTRLNGKCKTLEEVWACWHELLSYLEKANKWLNEVEFKLKTTENIPGGAEEISEVLDSLENLMRHSEDNPNQIRILAQTLTDGGVMDELINEELETFNSRWRELHEEAVRRQKLLEQSIQSAQETEKSLHLIQESLTFIDKQLAAYIADKVDAAQMPQEAQKIQSDLTSHEISLEEMKKHNQGKEAAQRVLSQIDVAQKKLQDVSMKFRLFQKPANFEQRLQESKMILDEVKMHLPALETKSVEQEVVQSQLNHCVNLYKSLSEVKSEVEMVIKTGRQIVQKKQTENPKELDERVTALKLHYNELGAKVTERKQQLEKCLKLSRKMRKEMNVLTEWLAATDMELTKRSAVEGMPSNLDSEVAWGKATQKEIEKQKVHLKSITEVGEALKTVLGKKETLVEDKLSLLNSNWIAVTSRAEEWLNLLLEYQKHMETFDQNVDHITKWIIQADTLLDESEKKKPQQKEDVLKRLKAELNDIRPKVDSTRDQAANLMANRGDHCRKLVEPQISELNHRFAAISHRIKTGKASIPLKELEQFNSDIQKLLEPLEAEIQQGVNLKEEDFNKDMNEDNEGTVKELLQRGDNLQQRITDERKREEIKIKQQLLQTKHNALKDLRSQRRKKALEISHQWYQYKRQADDLLKCLDDIEKKLASLPEPRDERKIKEIDRELQKKKEELNAVRRQAEGLSEDGAAMAVEPTQIQLSKRWREIESKFAQFRRLNFAQIHTVREETMMVMTEDMPLEISYVPSTYLTEITHVSQALLEVEQLLNAPDLCAKDFEDLFKQEESLKNIKDSLQQSSGRIDIIHSKKTAALQSATPVERVKLQEALSQLDFQWEKVNKMYKDRQGRFDRSVEKWRRFHYDIKIFNQWLTEAEQFLRKTQIPENWEHAKYKWYLKELQDGIGQRQTVVRTLNATGEEIIQQSSKTDASILQEKLGSLNLRWQEVCKQLSDRKKRLEEQKNILSEFQRDLNEFVLWLEEADNIASIPLEPGKEQQLKEKLEQVKLLVEELPLRQGILKQLNETGGPVLVSAPISPEEQDKLENKLKQTNLQWIKVSRALPEKQGEIEAQIKDLGQLEKKLEDLEEQLNHLLLWLSPIRNQLEIYNQPNQEGPFDVKETEIAVQAKQPDVEEILSKGQHLYKEKPATQPVKRKLEDLSSEWKAVNRLLQELRAKQPDLAPGLTTIGASPTQTVTLVTQPVVTKETAISKLEMPSSLMLEVPALADFNRAWTELTDWLSLLDQVIKSQRVMVGDLEDINEMIIKQKATMQDLEQRRPQLEELITAAQNLKNKTSNQEARTIITDRIERIQNQWDEVQEHLQNRRQQLNEMLKDSTQWLEAKEEAEQVLGQARAKLESWKEGPYTVDAIQKKITETKQLAKDLRQWQTNVDVANDLALKLLRDYSADDTRKVHMITENINASWRSIHKRVSEREAALEETHRLLQQFPLDLEKFLAWLTEAETTANVLQDATRKERLLEDSKGVKELMKQWQDLQGEIEAHTDVYHNLDENSQKILRSLEGSDDAVLLQRRLDNMNFKWSELRKKSLNIRSHLEASSDQWKRLHLSLQELLVWLQLKDDELSRQAPIGGDFPAVQKQNDVHRAFKRELKTKEPVIMSTLETVRIFLTEQPLEGLEKLYQEPRELPPEERAQNVTRLLRKQAEEVNTEWEKLNLHSADWQRKIDETLERLRELQEATDELDLKLRQAEVIKGSWQPVGDLLIDSLQDHLEKVKALRGEIAPLKENVSHVNDLARQLTTLGIQLSPYNLSTLEDLNTRWKLLQVAVEDRVRQLHEAHRDFGPASQHFLSTSVQGPWERAISPNKVPYYIKADLNNVRFSAYRTAMKLRRLQKALCLDLLSLSAACDALDQHNLKQNDQPMDILQIINCLTTIYDRLEQEHNNLVNVPLCVDMCLNWLLNVYDTGRTGRIRVLSFKTGIISLCKAHLEDKYRYLFKQVASSTGFCDQRRLGLLLHDSIQIPRQLGEVASFGGSNIEPSVRSCFQFANNKPEIEAALFLDWMRLEPQSMVWLPVLHRVAAAETAKHQAKCNICKECPIIGFRYRSLKHFNYDICQSCFFSGRVAKGHKMHYPMVEYCTPTTSGEDVRDFAKVLKNKFRTKRYFAKHPRMGYLPVQTVLEGDNMETPVTLINFWPVDSAPASSPQLSHDDTHSRIEHYASRLAEMENSNGSYLNDSISPNESIDDEHLLIQHYCQSLNQDSPLSQPRSPAQILISLESEERGELERILADLEEENRNLQAEYDRLKQQHEHKGLSPLPSPPEMMPTSPQSPRDAELIAEAKLLRQHKGRLEARMQILEDHNKQLESQLHRLRQLLEQPQAEAKVNGTTVSSPSTSLQRSDSSQPMLLRVVGSQTSDSMGEEDLLSPPQDTSTGLEEVMEQLNNSFPSSRGRNTPGKPMREDTM

SEQ ID NO: 12716 - DNA, 13736 bp, Homo sapiens
tgttggtttctcattgtttttaagcctactggagcaataaagtttgaagaacttttaccaggttttttttatcgctgccttgatatacacttttcaaaatgctttggtgggaagaagtagaggactgttagtttgggaagcagcatattgagaacctcttcagtgacctacaggatgggaggcgcctcctagacctcctcgaaggcctgacagggcaaaaactgccaaaagaaaaaggatccacaagagttcatgccctgaacaatgtcaacaaggcactgcgggttttgcagaacaataatgttgatttagtgaatattggaagtactgacatcgtagatggaaatcataaactgactcttggtttgatttggaatataatcctccactggcaggtcaaaaatgtaatgaaaaatatcatggctggattgcaacaaaccaacagtgaaaagattctcctgagctgggtccgacaatcaactcgtaattatccacaggttaatgtaatcaacttcaccaccagctggtctgatggcctggctttgaatgctctcatccatagtcataggccagacctatttgactggaatagtgtggtttgccagcagtcagccacacaacgactggaacatgcattcaacatcgccagatatcaattaggcatagagaaactactcgatcctgaagatgttgataccacctatccagataagaagtccatcttaatgtacatcacatcactcttccaagttttgcctcaacaagtgagcattgaagccatccaggaagtggaaatgttgccaaggccacctaaagtgactaaagaagaacattttcagttacatcatcaaatgcactattctcaacagatcacggtcagtctagcacagggatatgagagaacttcttcccctaagcctcgattcaagagctatgcctacacacaggctgcttatgtcaccacctctgaccctacacggagcccatttccttcacagcatttggaagctcctgaagacaagtcatttggcagttcattgatggagagtgaagtaaacctggaccgttatcaaacagctttagaagaagtattatcgtggcttctttctgctgaggacacattgcaagcacaaggagagatttctaatgatgtggaagtggtgaaagaccagtttcatactcatgaggggtacatgatggatttgacagcccatcagggccgggttggtaatattctacaattgggaagtaagctgattggaacaggaaaattatcagaagatgaagaaactgaagtacaagagcagatgaatctcctaaattcaagatgggaatgcctcagggtagctagcatggaaaaacaaagcaatttacatagagttttaatggatctccagaatcagaaactgaaagagttgaatgactggctaacaaaaacagaagaaagaacaaggaaaatggaggaagagcctcttggacctgatcttgaagacctaaaacgccaagtacaacaacataaggtgcttcaagaagatctagaacaagaacaagtcagggtcaattctctcactcacatggtggtggtagttgatgaatctagtggagatcacgcaactgctgctttggaagaacaacttaaggtattgggagatcgatgggcaaacatctgtagatggacagaagaccgctgggttcttttacaagacatccttctcaaatggcaacgtcttactgaagaacagtgcctttttagtgcatggctttcagaaaaagaagatgcagtgaacaagattcacacaactggctttaaagatcaaaatgaaatgttatcaagtcttcaaaaactggccgttttaaaagcggatctagaaaagaaaaagcaatccatgggcaaactgtattcactcaaacaagatcttctttcaacactgaagaataagtcagtgacccagaagacggaagcatggctggataactttgcccggtgttgggataatttagtccaaaaacttgaaaagagtacagcacagatttcacaggctgtcaccaccactcagccatcactaacacagacaactgtaatggaaacagtaactacggtgaccacaagggaacagatcctggtaaagcatgctcaagaggaacttccaccaccacctccccaaaagaagaggcagattactgtggattctgaaattaggaaaaggttggatgttgatataactgaacttcacagctggattactcgctcagaagctgtgttgcagagtcctgaatttgcaatctttcggaaggaaggcaacttctcagacttaaaagaaaaagtcaatgccatagagcgagaaaaagctgagaagttcagaaaactgcaagatgccagcagatcagctcaggccctggtggaacagatggtgaatgagggtgttaatgcagatagcatcaaacaagcctcagaacaactgaacagccggtggatcgaattctgccagttgctaagtgagagacttaactggctggagtatcagaacaacatcatcgctttctataatcagctacaacaattggagcagatgacaactactgctgaaaactggttgaaaatccaacccaccaccccatcagagccaacagcaattaaaagtcagttaaaaatttgtaaggatgaagtcaaccggctatcagatcttcaacctcaaattgaacgattaaaaattcaaagcatagccctgaaagagaaaggacaaggacccatgttcctggatgcagactttgtggcctttacaaatcattttaagcaagtcttttctgatgtgcaggccagagagaaagagctacagacaatttttgacactttgccaccaatgcgctatcaggagaccatgagtgccatcaggacatgggtccagcagtcagaaaccaaactctccatacctcaacttagtgtcaccgactatgaaatcatggagcagagactcggggaattgcaggctttacaaagttctctgcaagagcaacaaagtggcctatactatctcagcaccactgtgaaagagatgtcgaagaaagcgccctctgaaattagccggaaatatcaatcagaatttgaagaaattgagggacgctggaagaagctctcctcccagctggttgagcattgtcaaaagctagaggagcaaatgaataaactccgaaaaattcagaatcacatacaaaccctgaagaaatggatggctgaagttgatgtttttctgaaggaggaatggcctgcccttggggattcagaaattctaaaaaagcagctgaaacagtgcagacttttagtcagtgatattcagacaattcagcccagtctaaacagtgtcaatgaaggtgggcagaagataaagaatgaagcagagccagagtttgcttcgagacttgagacagaactcaaagaacttaacactcagtgggatcacatgtgccaacaggtctatgccagaaaggaggccttgaagggaggtttggagaaaactgtaagcctccagaaagatctatcagagatgcacgaatggatgacacaagctgaagaagagtatcttgagagagattttgaatataaaactccagatgaattacagaaagcagttgaagagatgaagagagctaaagaagaggcccaacaaaaagaagcgaaagtgaaactccttactgagtctgtaaatagtgtcatagctcaagctccacctgtagcacaagaggccttaaaaaaggaacttgaaactctaaccaccaactaccagtggctctgcactaggctgaatgggaaatgcaagactttggaagaagtttgggcatgttggcatgagttattgtcatacttggagaaagcaaacaagtggctaaatgaagtagaatttaaacttaaaaccactgaaaacattcctggcggagctgaggaaatctctgaggtgctagattcacttgaaaatttgatgcgacattcagaggataacccaaatcagattcgcatattggcacagaccctaacagatggcggagtcatggatgagctaatcaatgaggaacttgagacatttaattctcgttggagggaactacatgaagaggctgtaaggaggcaaaagttgcttgaacagagcatccagtctgcccaggagactgaaaaatccttacacttaatccaggagtccctcacattcattgacaagcagttggcagcttatattgcagacaaggtggacgcagctcaaatgcctcaggaagcccagaaaatccaatctgatttgacaagtcatgagatcagtttagaagaaatgaagaaacataatcaggggaaggaggctgcccaaagagtcctgtctcagattgatgttgcacagaaaaaattacaagatgtctccatgaagtttcgattattccagaaaccagccaattttgagcagcgtctacaagaaagtaagatgattttagatgaagtgaagatgcacttgcctgcattggaaacaaagagtgtggaacaggaagtagtacagtcacagctaaatcattgtgtgaacttgtataaaagtctgagtgaagtgaagtctgaagtggaaatggtgataaagactggacgtcagattgtacagaaaaagcagacggaaaatcccaaagaacttgatgaaagagtaacagctttgaaattgcattataatgagctgggagcaaaggtaacagaaagaaagcaacagttggagaaatgcttgaaattgtcccgtaagatgcgaaaggaaatgaatgtcttgacagaatggctggcagctacagatatggaattgacaaagagatcagcagttgaaggaatgcctagtaatttggattctgaagttgcctggggaaaggctactcaaaaagagattgagaaacagaaggtgcacctgaagagtatcacagaggtaggagaggccttgaaaacagttttgggcaagaaggagacgttggtggaagataaactcagtcttctgaatagtaactggatagctgtcacctcccgagcagaagagtggttaaatcttttgttggaataccagaaacacatggaaacttttgaccagaatgtggaccacatcacaaagtggatcattcaggctgacacacttttggatgaatcagagaaaaagaaaccccagcaaaaagaagacgtgcttaagcgtttaaaggcagaactgaatgacatacgcccaaaggtggactctacacgtgaccaagcagcaaacttgatggcaaaccgcggtgaccactgcaggaaattagtagagccccaaatctcagagctcaaccatcgatttgcagccatttcacacagaattaagactggaaaggcctccattcctttgaaggaattggagcagtttaactcagatatacaaaaattgcttgaaccactggaggctgaaattcagcagggggtgaatctgaaagaggaagacttcaataaagatatgaatgaagacaatgagggtactgtaaaagaattgttgcaaagaggagacaacttacaacaaagaatcacagatgagagaaagcgagaggaaataaagataaaacagcagctgttacagacaaaacataatgctctcaaggatttgaggtctcaaagaagaaaaaaggctctagaaatttctcatcagtggtatcagtacaagaggcaggctgatgatctcctgaaatgcttggatgacattgaaaaaaaattagccagcctacctgagcccagagatgaaaggaaaataaaggaaattgatcgggaattgcagaagaagaaagaggagctgaatgcagtgcgtaggcaagctgagggcttgtctgaggatggggccgcaatggcagtggagccaactcagatccagctcagcaagcgctggcgggaaattgagagcaaatttgctcagtttcgaagactcaactttgcacaaattcacactgtccgtgaagaaacgatgatggtgatgactgaagacatgcctttggaaatttcttatgtgccttctacttatttgactgaaatcactcatgtctcacaagccctattagaagtggaacaacttctcaatgctcctgacctctgtgctaaggactttgaagatctctttaagcaagaggagtctctgaagaatataaaagatagtctacaacaaagctcaggtcggattgacattattcatagcaagaagacagcagcattgcaaagtgcaacgcctgtggaaagggtgaagctacaggaagctctctcccagcttgatttccaatgggaaaaagttaacaaaatgtacaaggaccgacaagggcgatttgacagatctgttgagaaatggcggcgttttcattatgatataaagatatttaatcagtggctaacagaagctgaacagtttctcagaaagacacaaattcctgagaattgggaacatgctaaatacaaatggtatcttaaggaactccaggatggcattgggcagcggcaaactgttgtcagaacattgaatgcaactggggaagaaataattcagcaatcctcaaaaacagatgccagtattctacaggaaaaattgggaagcctgaatctgcggtggcaggaggtctgcaaacagctgtcagacagaaaaaagaggctagaagaacaaaagaatatcttgtcagaatttcaaagagatttaaatgaatttgttttatggttggaggaagcagataacattgctagtatcccacttgaacctggaaaagagcagcaactaaaagaaaagcttgagcaagtcaagttactggtggaagagttgcccctgcgccagggaattctcaaacaattaaatgaaactggaggacccgtgcttgtaagtgctcccataagcccagaagagcaagataaacttgaaaataagctcaagcagacaaatctccagtggataaaggtttccagagctttacctgagaaacaaggagaaattgaagctcaaataaaagaccttgggcagcttgaaaaaaagcttgaagaccttgaagagcagttaaatcatctgctgctgtggttatctcctattaggaatcagttggaaatttataaccaaccaaaccaagaaggaccatttgacgttaaggaaactgaaatagcagttcaagctaaacaaccggatgtggaagagattttgtctaaagggcagcatttgtacaaggaaaaaccagccactcagccagtgaagaggaagttagaagatctgagctctgagtggaaggcggtaaaccgtttacttcaagagctgagggcaaagcagcctgacctagctcctggactgaccactattggagcctctcctactcagactgttactctggtgacacaacctgtggttactaaggaaactgccatctccaaactagaaatgccatcttccttgatgttggaggtacctgctctggcagatttcaaccgggcttggacagaacttaccgactggctttctctgcttgatcaagttataaaatcacagagggtgatggtgggtgaccttgaggatatcaacgagatgatcatcaagcagaaggcaacaatgcaggatttggaacagaggcgtccccagttggaagaactcattaccgctgcccaaaatttgaaaaacaagaccagcaatcaagaggctagaacaatcattacggatcgaattgaaagaattcagaatcagtgggatgaagtacaagaacaccttcagaaccggaggcaacagttgaatgaaatgttaaaggattcaacacaatggctggaagctaaggaagaagctgagcaggtcttaggacaggccagagccaagcttgagtcatggaaggagggtccctatacagtagatgcaatccaaaagaaaatcacagaaaccaagcagttggccaaagacctccgccagtggcagacaaatgtagatgtggcaaatgacttggccctgaaacttctccgggattattctgcagatgataccagaaaagtccacatgataacagagaatatcaatgcctcttggagaagcattcataaaagggtgagtgagcgagaggctgctttggaagaaactcatagattactgcaacagttccccctggacctggaaaagtttcttgcctggcttacagaagctgaaacaactgccaatgtcctacaggatgctacccgtaaggaaaggctcctagaagactccaagggagtaaaagagctgatgaaacaatggcaagacctccaaggtgaaattgaagctcacacagatgtttatcacaacctggatgaaaacagccaaaaaatcctgagatccctggaaggttccgatgatgcagtcctgttacaaagacgtttggataacatgaacttcaagtggagtgaacttcggaaaaagtctctcaacattaggtcccatttggaagccagttctgaccagtggaagcgtctgcacctttctctgcaggaacttctggtgtggctacagctgaaagatgatgaattaagccggcaggcacctattggaggcgactttccagcagttcagaagcagaacgatgtacatagggccttcaagagggaattgaaaactaaagaacctgtaatcatgagtactcttgagactgtacgaatatttctgacagagcagcctttggaaggactagagaaactctaccaggagcccagagagctgcctcctgaggagagagcccagaatgtcactcggcttctacgaaagcaggctgaggaggtcaatactgagtgggaaaaattgaacctgcactccgctgactggcagagaaaaatagatgagacccttgaaagactccgggaacttcaagaggccacggatgagctggacctcaagctgcgccaagctgaggtgatcaagggatcctggcagcccgtgggcgatctcctcattgactctctccaagatcacctcgagaaagtcaaggcacttcgaggagaaattgcgcctctgaaagagaacgtgagccacgtcaatgaccttgctcgccagcttaccactttgggcattcagctctcaccgtataacctcagcactctggaagacctgaacaccagatggaagcttctgcaggtggccgtcgaggaccgagtcaggcagctgcatgaagcccacagggactttggtccagcatctcagcactttctttccacgtctgtccagggtccctgggagagagccatctcgccaaacaaagtgccctactatatcaaagctgacctgaataatgtcagattctcagcttataggactgccatgaaactccgaagactgcagaaggccctttgcttggatctcttgagcctgtcagctgcatgtgatgccttggaccagcacaacctcaagcaaaatgaccagcccatggatatcctgcagattattaattgtttgaccactatttatgaccgcctggagcaagagcacaacaatttggtcaacgtccctctctgcgtggatatgtgtctgaactggctgctgaatgtttatgatacgggacgaacagggaggatccgtgtcctgtcttttaaaactggcatcatttccctgtgtaaagcacatttggaagacaagtacagataccttttcaagcaagtggcaagttcaacaggattttgtgaccagcgcaggctgggcctccttctgcatgattctatccaaattccaagacagttgggtgaagttgcatcctttgggggcagtaacattgagccaagtgtccggagctgcttccaatttgctaataataagccagagatcgaagcggccctcttcctagactggatgagactggaaccccagtccatggtgtggctgcccgtcctgcacagagtggctgctgcagaaactgccaagcatcaggccaaatgtaacatctgcaaagagtgtccaatcattggattcaggtacaggagtctaaagcactttaattatgacatctgccaaagctgctttttttctggtcgagttgcaaaaggccataaaatgcactatcccatggtggaatattgcactccgactacatcaggagaagatgttcgagactttgccaaggtactaaaaaacaaatttcgaaccaaaaggtattttgcgaagcatccccgaatgggctacctgccagtgcagactgtcttagagggggacaacatggaaactcccgttactctgatcaacttctggccagtagattctgcgcctgcctcgtcccctcagctttcacacgatgatactcattcacgcattgaacattatgctagcaggctagcagaaatggaaaacagcaatggatcttatctaaatgatagcatctctcctaatgagagcatagatgatgaacatttgttaatccagcattactgccaaagtttgaaccaggactcccccctgagccagcctcgtagtcctgcccagatcttgatttccttagagagtgaggaaagaggggagctagagagaatcctagcagatcttgaggaagaaaacaggaatctgcaagcagaatatgaccgtctaaagcagcagcacgaacataaaggcctgtccccactgccgtcccctcctgaaatgatgcccacctctccccagagtccccgggatgctgagctcattgctgaggccaagctactgcgtcaacacaaaggccgcctggaagccaggatgcaaatcctggaagaccacaataaacagctggagtcacagttacacaggctaaggcagctgctggagcaaccccaggcagaggccaaagtgaatggcacaacggtgtcctctccttctacctctctacagaggtccgacagcagtcagcctatgctgctccgagtggttggcagtcaaacttcggactccatgggtgaggaagatcttctcagtcctccccaggacacaagcacagggttagaggaggtgatggagcaactcaacaactccttccctagttcaagaggaagaaatacccctggaaagccaatgagagaggacacaatgtaggaagtcttttccacatggcagatgatttgggcagagcgatggagtccttagtatcagtcatgacagatgaagaaggagcagaataaatgttttacaactcctgattcccgcatggtttttataatattcatacaacaaagaggattagacagtaagagtttacaagaaataaatctatatttttgtgaagggtagtggtattatactgtagatttcagtagtttctaagtctgttattgttttgttaacaatggcaggttttacacgtctatgcaattgtacaaaaaagttataagaaaactacatgtaaaatcttgatagctaaataacttgccatttctttatatggaacgcattttgggttgtttaaaaatttataacagttataaagaaagattgtaaactaaagtgtgctttataaaaaaaagttgtttataaaaacccctaaaaacaaaacaaacacacacacacacacatacacacacacacacaaaactttgaggcagcgcattgttttgcatccttttggcgtgatatccatatgaaattcatggctttttctttttttgcatattaaagataagacttcctctaccaccacaccaaatgactactacacactgctcatttgagaactgtcagctgagtggggcaggcttgagttttcatttcatatatctatatgtctataagtatataaatactatagttatatagataaagagatacgaatttctatagactgactttttccattttttaaatgttcatgtcacatcctaatagaaagaaattacttctagtcagtcatccaggcttacctgcttggtctagaatggatttttcccggagccggaagccaggaggaaactacaccacactaaaacattgtctacagctccagatgtttctcattttaaacaactttccactgacaacgaaagtaaagtaaagtattggatttttttaaagggaacatgtgaatgaatacacaggacttattatatcagagtgagtaatcggttggttggttgattgattgattgattgatacattcagcttcctgctgctagcaatgccacgatttagatttaatgatgcttcagtggaaatcaatcagaaggtattctgaccttgtgaacatcagaaggtattttttaactcccaagcagtagcaggacgatgatagggctggagggctatggattcccagcccatccctgtgaaggagtaggccactctttaagtgaaggattggatgattgttcataatacataaagttctctgtaattacaactaaattattatgccctcttctcacagtcaaaaggaactgggtggtttggtttttgttgcttttttagatttattgtcccatgtgggatgagtttttaaatgccacaagacataatttaaaataaataaactttgggaaaaggtgtaaaacagtagccccatcacatttgtgatactgacaggtatcaacccagaagcccatgaactgtgtttccatcctttgcatttctctgcgagtagttccacacaggtttgtaagtaagtaagaaagaaggcaaattgattcaaatgttacaaaaaaacccttcttggtggattagacaggttaaatatataaacaaacaaacaaaaattgctcaaaaaagaggagaaaagctcaagaggaaaagctaaggactggtaggaaaaagctttactctttcatgccattttatttctttttgatttttaaatcattcattcaatagataccaccgtgtgacctataattttgcaaatctgttacctctgacatcaagtgtaattagcttttggagagtgggctgacatcaagtgtaattagcttttggagagtgggttttgtccattattaataattaattaattaacatcaaacacggcttctcatgctatttctacctcactttggttttggggtgttcctgataattgtgcacacctgagttcacagcttcaccacttgtccattgcgttattttctttttcctttataattctttctttttccttcataattttcaaaagaaaacccaaagctctaaggtaacaaattaccaaattacatgaagatttggtttttgtcttgcatttttttcctttatgtgacgctggaccttttctttacccaaggatttttaaaactcagatttaaaacaaggggttactttacatcctactaagaagtttaagtaagtaagtttcattctaaaatcagaggtaaatagagtgcataaataattttgttttaatctttttgtttttcttttagacacattagctctggagtgagtctgtcataatatttgaacaaaaattgagagctttattgctgcattttaagcataattaatttggacattatttcgtgttgtgttctttataaccaccaagtattaaactgtaaatcataatgtaactgaagcataaacatcacatggcatgttttgtcattgttttcaggtactgagttcttacttgagtatcataatatattgtgttttaacaccaacactgtaacatttacgaattatttttttaaacttcagttttactgcattttcacaacatatcagacttcaccaaatatatgccttactattgtattatagtactgctttactgtgtatctcaataaagcacgcagttatgttacaaaaaagta

SEQ ID NO: 12717 - protein, 3542 aa, Homo sapiens; identical to SEQ ID NO: 12715

SEQ ID NO: 12718 - DNA, 13942 bp, Homo sapiens
tcctggcatcagttactgtgttgactcactcagtgttgggatcactcactttccccctacaggactcagatctgggaggcaattaccttcggagaaaaacgaataggaaaaactgaagtgttactttttttaaagctgctgaagtttgttggtttctcattgtttttaagcctactggagcaataaagtttgaagaacttttaccaggttttttttatcgctgccttgatatacacttttcaaaatgctttggtgggaagaagtagaggactgttatgaaagagaagatgttcaaaagaaaacattcacaaaatgggtaaatgcacaattttctaagtttgggaagcagcatattgagaacctcttcagtgacctacaggatgggaggcgcctcctagacctcctcgaaggcctgacagggcaaaaactgccaaaagaaaaaggatccacaagagttcatgccctgaacaatgtcaacaaggcactgcgggttttgcagaacaataatgttgatttagtgaatattggaagtactgacatcgtagatggaaatcataaactgactcttggtttgatttggaatataatcctccactggcaggtcaaaaatgtaatgaaaaatatcatggctggattgcaacaaaccaacagtgaaaagattctcctgagctgggtccgacaatcaactcgtaattatccacaggttaatgtaatcaacttcaccaccagctggtctgatggcctggctttgaatgctctcatccatagtcataggccagacctatttgactggaatagtgtggtttgccagcagtcagccacacaacgactggaacatgcattcaacatcgccagatatcaattaggcatagagaaactactcgatcctgaagatgttgataccacctatccagataagaagtccatcttaatgtacatcacatcactcttccaagttttgcctcaacaagtgagcattgaagccatccaggaagtggaaatgttgccaaggccacctaaagtgactaaagaagaacattttcagttacatcatcaaatgcactattctcaacagatcacggtcagtctagcacagggatatgagagaacttcttcccctaagcctcgattcaagagctatgcctacacacaggctgcttatgtcaccacctctgaccctacacggagcccatttccttcacagcatttggaagctcctgaagacaagtcatttggcagttcattgatggagagtgaagtaaacctggaccgttatcaaacagctttagaagaagtattatcgtggcttctttctgctgaggacacattgcaagcacaaggagagatttctaatgatgtggaagtggtgaaagaccagtttcatactcatgaggggtacatgatggatttgacagcccatcagggccgggttggtaatattctacaattgggaagtaagctgattggaacaggaaaattatcagaagatgaagaaactgaagtacaagagcagatgaatctcctaaattcaagatgggaatgcctcagggtagctagcatggaaaaacaaagcaatttacatagagttttaatggatctccagaatcagaaactgaaagagttgaatgactggctaacaaaaacagaagaaagaacaaggaaaatggaggaagagcctcttggacctgatcttgaagacctaaaacgccaagtacaacaacataaggtgcttcaagaagatctagaacaagaacaagtcagggtcaattctctcactcacatggtggtggtagttgatgaatctagtggagatcacgcaactgctgctttggaagaacaacttaaggtattgggagatcgatgggcaaacatctgtagatggacagaagaccgctgggttcttttacaagacatccttctcaaatggcaacgtcttactgaagaacagtgcctttttagtgcatggctttcagaaaaagaagatgcagtgaacaagattcacacaactggctttaaagatcaaaatgaaatgttatcaagtcttcaaaaactggccgttttaaaagcggatctagaaaagaaaaagcaatccatgggcaaactgtattcactcaaacaagatcttctttcaacactgaagaataagtcagtgacccagaagacggaagcatggctggataactttgcccggtgttgggataatttagtccaaaaacttgaaaagagtacagcacagatttcacaggctgtcaccaccactcagccatcactaacacagacaactgtaatggaaacagtaactacggtgaccacaagggaacagatcctggtaaagcatgctcaagaggaacttccaccaccacctccccaaaagaagaggcagattactgtggattctgaaattaggaaaaggttggatgttgatataactgaacttcacagctggattactcgctcagaagctgtgttgcagagtcctgaatttgcaatctttcggaaggaaggcaacttctcagacttaaaagaaaaagtcaatgccatagagcgagaaaaagctgagaagttcagaaaactgcaagatgccagcagatcagctcaggccctggtggaacagatggtgaatgagggtgttaatgcagatagcatcaaacaagcctcagaacaactgaacagccggtggatcgaattctgccagttgctaagtgagagacttaactggctggagtatcagaacaacatcatcgctttctataatcagctacaacaattggagcagatgacaactactgctgaaaactggttgaaaatccaacccaccaccccatcagagccaacagcaattaaaagtcagttaaaaatttgtaaggatgaagtcaaccggctatcagatcttcaacctcaaattgaacgattaaaaattcaaagcatagccctgaaagagaaaggacaaggacccatgttcctggatgcagactttgtggcctttacaaatcattttaagcaagtcttttctgatgtgcaggccagagagaaagagctacagacaatttttgacactttgccaccaatgcgctatcaggagaccatgagtgccatcaggacatgggtccagcagtcagaaaccaaactctccatacctcaacttagtgtcaccgactatgaaatcatggagcagagactcggggaattgcaggctttacaaagttctctgcaagagcaacaaagtggcctatactatctcagcaccactgtgaaagagatgtcgaagaaagcgccctctgaaattagccggaaatatcaatcagaatttgaagaaattgagggacgctggaagaagctctcctcccagctggttgagcattgtcaaaagctagaggagcaaatgaataaactccgaaaaattcagaatcacatacaaaccctgaagaaatggatggctgaagttgatgtttttctgaaggaggaatggcctgcccttggggattcagaaattctaaaaaagcagctgaaacagtgcagacttttagtcagtgatattcagacaattcagcccagtctaaacagtgtcaatgaaggtgggcagaagataaagaatgaagcagagccagagtttgcttcgagacttgagacagaactcaaagaacttaacactcagtgggatcacatgtgccaacaggtctatgccagaaaggaggccttgaagggaggtttggagaaaactgtaagcctccagaaagatctatcagagatgcacgaatggatgacacaagctgaagaagagtatcttgagagagattttgaatataaaactccagatgaattacagaaagcagttgaagagatgaagagagctaaagaagaggcccaacaaaaagaagcgaaagtgaaactccttactgagtctgtaaatagtgtcatagctcaagctccacctgtagcacaagaggccttaaaaaaggaacttgaaactctaaccaccaactaccagtggctctgcactaggctgaatgggaaatgcaagactttggaagaagtttgggcatgttggcatgagttattgtcatacttggagaaagcaaacaagtggctaaatgaagtagaatttaaacttaaaaccactgaaaacattcctggcggagctgaggaaatctctgaggtgctagattcacttgaaaatttgatgcgacattcagaggataacccaaatcagattcgcatattggcacagaccctaacagatggcggagtcatggatgagctaatcaatgaggaacttgagacatttaattctcgttggagggaactacatgaagaggctgtaaggaggcaaaagttgcttgaacagagcatccagtctgcccaggagactgaaaaatccttacacttaatccaggagtccctcacattcattgacaagcagttggcagcttatattgcagacaaggtggacgcagctcaaatgcctcaggaagcccagaaaatccaatctgatttgacaagtcatgagatcagtttagaagaaatgaagaaacataatcaggggaaggaggctgcccaaagagtcctgtctcagattgatgttgcacagaaaaaattacaagatgtctccatgaagtttcgattattccagaaaccagccaattttgagcagcgtctacaagaaagtaagatgattttagatgaagtgaagatgcacttgcctgcattggaaacaaagagtgtggaacaggaagtagtacagtcacagctaaatcattgtgtgaacttgtataaaagtctgagtgaagtgaagtctgaagtggaaatggtgataaagactggacgtcagattgtacagaaaaagcagacggaaaatcccaaagaacttgatgaaagagtaacagctttgaaattgcattataatgagctgggagcaaaggtaacagaaagaaagcaacagttggagaaatgcttgaaattgtcccgtaagatgcgaaaggaaatgaatgtcttgacagaatggctggcagctacagatatggaattgacaaagagatcagcagttgaaggaatgcctagtaatttggattctgaagttgcctggggaaaggctactcaaaaagagattgagaaacagaaggtgcacctgaagagtatcacagaggtaggagaggccttgaaaacagttttgggcaagaaggagacgttggtggaagataaactcagtcttctgaatagtaactggatagctgtcacctcccgagcagaagagtggttaaatcttttgttggaataccagaaacacatggaaacttttgaccagaatgtggaccacatcacaaagtggatcattcaggctgacacacttttggatgaatcagagaaaaagaaaccccagcaaaaagaagacgtgcttaagcgtttaaaggcagaactgaatgacatacgcccaaaggtggactctacacgtgaccaagcagcaaacttgatggcaaaccgcggtgaccactgcaggaaattagtagagccccaaatctcagagctcaaccatcgatttgcagccatttcacacagaattaagactggaaaggcctccattcctttgaaggaattggagcagtttaactcagatatacaaaaattgcttgaaccactggaggctgaaattcagcagggggtgaatctgaaagaggaagacttcaataaagatatgaatgaagacaatgagggtactgtaaaagaattgttgcaaagaggagacaacttacaacaaagaatcacagatgagagaaagcgagaggaaataaagataaaacagcagctgttacagacaaaacataatgctctcaaggatttgaggtctcaaagaagaaaaaaggctctagaaatttctcatcagtggtatcagtacaagaggcaggctgatgatctcctgaaatgcttggatgacattgaaaaaaaattagccagcctacctgagcccagagatgaaaggaaaataaaggaaattgatcgggaattgcagaagaagaaagaggagctgaatgcagtgcgtaggcaagctgagggcttgtctgaggatggggccgcaatggcagtggagccaactcagatccagctcagcaagcgctggcgggaaattgagagcaaatttgctcagtttcgaagactcaactttgcacaaattcacactgtccgtgaagaaacgatgatggtgatgactgaagacatgcctttggaaatttcttatgtgccttctacttatttgactgaaatcactcatgtctcacaagccctattagaagtggaacaacttctcaatgctcctgacctctgtgctaaggactttgaagatctctttaagcaagaggagtctctgaagaatataaaagatagtctacaacaaagctcaggtcggattgacattattcatagcaagaagacagcagcattgcaaagtgcaacgcctgtggaaagggtgaagctacaggaagctctctcccagcttgatttccaatgggaaaaagttaacaaaatgtacaaggaccgacaagggcgatttgacagatctgttgagaaatggcggcgttttcattatgatataaagatatttaatcagtggctaacagaagctgaacagtttctcagaaagacacaaattcctgagaattgggaacatgctaaatacaaatggtatcttaaggaactccaggatggcattgggcagcggcaaactgttgtcagaacattgaatgcaactggggaagaaataattcagcaatcctcaaaaacagatgccagtattctacaggaaaaattgggaagcctgaatctgcggtggcaggaggtctgcaaacagctgtcagacagaaaaaagaggctagaagaacaaaagaatatcttgtcagaatttcaaagagatttaaatgaatttgttttatggttggaggaagcagataacattgctagtatcccacttgaacctggaaaagagcagcaactaaaagaaaagcttgagcaagtcaagttactggtggaagagttgcccctgcgccagggaattctcaaacaattaaatgaaactggaggacccgtgcttgtaagtgctcccataagcccagaagagcaagataaacttgaaaataagctcaagcagacaaatctccagtggataaaggtttccagagctttacctgagaaacaaggagaaattgaagctcaaataaaagaccttgggcagcttgaaaaaaagcttgaagaccttgaagagcagttaaatcatctgctgctgtggttatctcctattaggaatcagttggaaatttataaccaaccaaaccaagaaggaccatttgacgttaaggaaactgaaatagcagttcaagctaaacaaccggatgtggaagagattttgtctaaagggcagcatttgtacaaggaaaaaccagccactcagccagtgaagaggaagttagaagatctgagctctgagtggaaggcggtaaaccgtttacttcaagagctgagggcaaagcagcctgacctagctcctggactgaccactattggagcctctcctactcagactgttactctggtgacacaacctgtggttactaaggaaactgccatctccaaactagaaatgccatcttccttgatgttggaggtacctgctctggcagatttcaaccgggcttggacagaacttaccgactggctttctctgcttgatcaagttataaaatcacagagggtgatggtgggtgaccttgaggatatcaacgagatgatcatcaagcagaaggcaacaatgcaggatttggaacagaggcgtccccagttggaagaactcattaccgctgcccaaaatttgaaaaacaagaccagcaatcaagaggctagaacaatcattacggatcgaattgaaagaattcagaatcagtgggatgaagtacaagaacaccttcagaaccggaggcaacagttgaatgaaatgttaaaggattcaacacaatggctggaagctaaggaagaagctgagcaggtcttaggacaggccagagccaagcttgagtcatggaaggagggtccctatacagtagatgcaatccaaaagaaaatcacagaaaccaagcagttggccaaagacctccgccagtggcagacaaatgtagatgtggcaaatgacttggccctgaaacttctccgggattattctgcagatgataccagaaaagtccacatgataacagagaatatcaatgcctcttggagaagcattcataaaagggtgagtgagcgagaggctgctttggaagaaactcatagattactgcaacagttccccctggacctggaaaagtttcttgcctggcttacagaagctgaaacaactgccaatgtcctacaggatgctacccgtaaggaaaggctcctagaagactccaagggagtaaaagagctgatgaaacaatggcaagacctccaaggtgaaattgaagctcacacagatgtttatcacaacctggatgaaaacagccaaaaaatcctgagatccctggaaggttccgatgatgcagtcctgttacaaagacgtttggataacatgaacttcaagtggagtgaacttcggaaaaagtctctcaacattaggtcccatttggaagccagttctgaccagtggaagcgtctgcacctttctctgcaggaacttctggtgtggctacagctgaaagatgatgaattaagccggcaggcacctattggaggcgactttccagcagttcagaagcagaacgatgtacatagggccttcaagagggaattgaaaactaaagaacctgtaatcatgagtactcttgagactgtacgaatatttctgacagagcagcctttggaaggactagagaaactctaccaggagcccagagagctgcctcctgaggagagagcccagaatgtcactcggcttctacgaaagcaggctgaggaggtcaatactgagtgggaaaaattgaacctgcactccgctgactggcagagaaaaatagatgagacccttgaaagactccgggaacttcaagaggccacggatgagctggacctcaagctgcgccaagctgaggtgatcaagggatcctggcagcccgtgggcgatctcctcattgactctctccaagatcacctcgagaaagtcaaggcacttcgaggagaaattgcgcctctgaaagagaacgtgagccacgtcaatgaccttgctcgccagcttaccactttgggcattcagctctcaccgtataacctcagcactctggaagacctgaacaccagatggaagcttctgcaggtggccgtcgaggaccgagtcaggcagctgcatgaagcccacagggactttggtccagcatctcagcactttctttccacgtctgtccagggtccctgggagagagccatctcgccaaacaaagtgccctactatatcaaagctgacctgaataatgtcagattctcagcttataggactgccatgaaactccgaagactgcagaaggccctttgcttggatctcttgagcctgtcagctgcatgtgatgccttggaccagcacaacctcaagcaaaatgaccagcccatggatatcctgcagattattaattgtttgaccactatttatgaccgcctggagcaagagcacaacaatttggtcaacgtccctctctgcgtggatatgtgtctgaactggctgctgaatgtttatgatacgggacgaacagggaggatccgtgtcctgtcttttaaaactggcatcatttccctgtgtaaagcacatttggaagacaagtacagataccttttcaagcaagtggcaagttcaacaggattttgtgaccagcgcaggctgggcctccttctgcatgattctatccaaattccaagacagttgggtgaagttgcatcctttgggggcagtaacattgagccaagtgtccggagctgcttccaatttgctaataataagccagagatcgaagcggccctcttcctagactggatgagactggaaccccagtccatggtgtggctgcccgtcctgcacagagtggctgctgcagaaactgccaagcatcaggccaaatgtaacatctgcaaagagtgtccaatcattggattcaggtacaggagtctaaagcactttaattatgacatctgccaaagctgctttttttctggtcgagttgcaaaaggccataaaatgcactatcccatggtggaatattgcactccgactacatcaggagaagatgttcgagactttgccaaggtactaaaaaacaaatttcgaaccaaaaggtattttgcgaagcatccccgaatgggctacctgccagtgcagactgtcttagagggggacaacatggaaactcccgttactctgatcaacttctggccagtagattctgcgcctgcctcgtcccctcagctttcacacgatgatactcattcacgcattgaacattatgctagcaggctagcagaaatggaaaacagcaatggatcttatctaaatgatagcatctctcctaatgagagcatagatgatgaacatttgttaatccagcattactgccaaagtttgaaccaggactcccccctgagccagcctcgtagtcctgcccagatcttgatttccttagagagtgaggaaagaggggagctagagagaatcctagcagatcttgaggaagaaaacaggaatctgcaagcagaatatgaccgtctaaagcagcagcacgaacataaaggcctgtccccactgccgtcccctcctgaaatgatgcccacctctccccagagtccccgggatgctgagctcattgctgaggccaagctactgcgtcaacacaaaggccgcctggaagccaggatgcaaatcctggaagaccacaataaacagctggagtcacagttacacaggctaaggcagctgctggagcaaccccaggcagaggccaaagtgaatggcacaacggtgtcctctccttctacctctctacagaggtccgacagcagtcagcctatgctgctccgagtggttggcagtcaaacttcggactccatgggtgaggaagatcttctcagtcctccccaggacacaagcacagggttagaggaggtgatggagcaactcaacaactccttccctagttcaagaggaagaaatacccctggaaagccaatgagagaggacacaatgtaggaagtcttttccacatggcagatgatttgggcagagcgatggagtccttagtatcagtcatgacagatgaagaaggagcagaataaatgttttacaactcctgattcccgcatggtttttataatattcatacaacaaagaggattagacagtaagagtttacaagaaataaatctatatttttgtgaagggtagtggtattatactgtagatttcagtagtttctaagtctgttattgttttgttaacaatggcaggttttacacgtctatgcaattgtacaaaaaagttataagaaaactacatgtaaaatcttgatagctaaataacttgccatttctttatatggaacgcattttgggttgtttaaaaatttataacagttataaagaaagattgtaaactaaagtgtgctttataaaaaaaagttgtttataaaaacccctaaaaacaaaacaaacacacacacacacacatacacacacacacacaaaactttgaggcagcgcattgttttgcatccttttggcgtgatatccatatgaaattcatggctttttctttttttgcatattaaagataagacttcctctaccaccacaccaaatgactactacacactgctcatttgagaactgtcagctgagtggggcaggcttgagttttcatttcatatatctatatgtctataagtatataaatactatagttatatagataaagagatacgaatttctatagactgactttttccattttttaaatgttcatgtcacatcctaatagaaagaaattacttctagtcagtcatccaggcttacctgcttggtctagaatggatttttcccggagccggaagccaggaggaaactacaccacactaaaacattgtctacagctccagatgtttctcattttaaacaactttccactgacaacgaaagtaaagtaaagtattggatttttttaaagggaacatgtgaatgaatacacaggacttattatatcagagtgagtaatcggttggttggttgattgattgattgattgatacattcagcttcctgctgctagcaatgccacgatttagatttaatgatgcttcagtggaaatcaatcagaaggtattctgaccttgtgaacatcagaaggtattttttaactcccaagcagtagcaggacgatgatagggctggagggctatggattcccagcccatccctgtgaaggagtaggccactctttaagtgaaggattggatgattgttcataatacataaagttctctgtaattacaactaaattattatgccctcttctcacagtcaaaaggaactgggtggtttggtttttgttgcttttttagatttattgtcccatgtgggatgagtttttaaatgccacaagacataatttaaaataaataaactttgggaaaaggtgtaaaacagtagccccatcacatttgtgatactgacaggtatcaacccagaagcccatgaactgtgtttccatcctttgcatttctctgcgagtagttccacacaggtttgtaagtaagtaagaaagaaggcaaattgattcaaatgttacaaaaaaacccttcttggtggattagacaggttaaatatataaacaaacaaacaaaaattgctcaaaaaagaggagaaaagctcaagaggaaaagctaaggactggtaggaaaaagctttactctttcatgccattttatttctttttgatttttaaatcattcattcaatagataccaccgtgtgacctataattttgcaaatctgttacctctgacatcaagtgtaattagcttttggagagtgggctgacatcaagtgtaattagcttttggagagtgggttttgtccattattaataattaattaattaacatcaaacacggcttctcatgctatttctacctcactttggttttggggtgttcctgataattgtgcacacctgagttcacagcttcaccacttgtccattgcgttattttctttttcctttataattctttctttttccttcataattttcaaaagaaaacccaaagctctaaggtaacaaattaccaaattacatgaagatttggtttttgtcttgcatttttttcctttatgtgacgctggaccttttctttacccaaggatttttaaaactcagatttaaaacaaggggttactttacatcctactaagaagtttaagtaagtaagtttcattctaaaatcagaggtaaatagagtgcataaataattttgttttaatctttttgtttttcttttagacacattagctctggagtgagtctgtcataatatttgaacaaaaattgagagctttattgctgcattttaagcataattaatttggacattatttcgtgttgtgttctttataaccaccaagtattaaactgtaaatcataatgtaactgaagcataaacatcacatggcatgttttgtcattgttttcaggtactgagttcttacttgagtatcataatatattgtgttttaacaccaacactgtaacatttacgaattatttttttaaacttcagttttactgcattttcacaacatatcagacttcaccaaatatatgccttactattgtattatagtactgctttactgtgtatctcaataaagcacgcagttatgttacaaaaaagta

SEQ ID NO: 12719 - protein, 3665 aa, Homo sapiens
MLWWEEVEDCYEREDVQKKTFTKWVNAQFSKFGKQHIENLFSDLQDGRRLLDLLEGLTGQKLPKEKGSTRVHALNNVNKALRVLQNNNVDLVNIGSTDIVDGNHKLTLGLIWNIILHWQVKNVMKNIMAGLQQTNSEKILLSWVRQSTRNYPQVNVINFTTSWSDGLALNALIHSHRPDLFDWNSVVCQQSATQRLEHAFNIARYQLGIEKLLDPEDVDTTYPDKKSILMYITSLFQVLPQQVSIEAIQEVEMLPRPPKVTKEEHFQLHHQMHYSQQITVSLAQGYERTSSPKPRFKSYAYTQAAYVTTSDPTRSPFPSQHLEAPEDKSFGSSLMESEVNLDRYQTALEEVLSWLLSAEDTLQAQGEISNDVEVVKDQFHTHEGYMMDLTAHQGRVGNILQLGSKLIGTGKLSEDEETEVQEQMNLLNSRWECLRVASMEKQSNLHRVLMDLQNQKLKELNDWLTKTEERTRKMEEEPLGPDLEDLKRQVQQHKVLQEDLEQEQVRVNSLTHMVVVVDESSGDHATAALEEQLKVLGDRWANICRWTEDRWVLLQDILLKWQRLTEEQCLFSAWLSEKEDAVNKIHTTGFKDQNEMLSSLQKLAVLKADLEKKKQSMGKLYSLKQDLLSTLKNKSVTQKTEAWLDNFARCWDNLVQKLEKSTAQISQAVTTTQPSLTQTTVMETVTTVTTREQILVKHAQEELPPPPPQKKRQITVDSEIRKRLDVDITELHSWITRSEAVLQSPEFAIFRKEGNFSDLKEKVNAIEREKAEKFRKLQDASRSAQALVEQMVNEGVNADSIKQASEQLNSRWIEFCQLLSERLNWLEYQNNIIAFYNQLQQLEQMTTTAENWLKIQPTTPSEPTAIKSQLKICKDEVNRLSDLQPQIERLKIQSIALKEKGQGPMFLDADFVAFTNHFKQVFSDVQAREKELQTIFDTLPPMRYQETMSAIRTWVQQSETKLSIPQLSVTDYEIMEQRLGELQALQSSLQEQQSGLYYLSTTVKEMSKKAPSEISRKYQSEFEEIEGRWKKLSSQLVEHCQKLEEQMNKLRKIQNHIQTLKKWMAEVDVFLKEEWPALGDSEILKKQLKQCRLLVSDIQTIQPSLNSVNEGGQKIKNEAEPEFASRLETELKELNTQWDHMCQQVYARKEALKGGLEKTVSLQKDLSEMHEWMTQAEEEYLERDFEYKTPDELQKAVEEMKRAKEEAQQKEAKVKLLTESVNSVIAQAPPVAQEALKKELETLTTNYQWLCTRLNGKCKTLEEVWACWHELLSYLEKANKWLNEVEFKLKTTENIPGGAEEISEVLDSLENLMRHSEDNPNQIRILAQTLTDGGVMDELINEELETFNSRWRELHEEAVRRQKLLEQSIQSAQETEKSLHLIQESLTFIDKQLAAYIADKVDAAQMPQEAQKIQSDLTSHEISLEEMKKHNQGKEAAQRVLSQIDVAQKKLQDVSMKFRLFQKPANFEQRLQESKMILDEVKMHLPALETKSVEQEVVQSQLNHCVNLYKSLSEVKSEVEMVIKTGRQIVQKKQTENPKELDERVTALKLHYNELGAKVTERKQQLEKCLKLSRKMRKEMNVLTEWLAATDMELTKRSAVEGMPSNLDSEVAWGKATQKEIEKQKVHLKSITEVGEALKTVLGKKETLVEDKLSLLNSNWIAVTSRAEEWLNLLLEYQKHMETFDQNVDHITKWIIQADTLLDESEKKKPQQKEDVLKRLKAELNDIRPKVDSTRDQAANLMANRGDHCRKLVEPQISELNHRFAAISHRIKTGKASIPLKELEQFNSDIQKLLEPLEAEIQQGVNLKEEDFNKDMNEDNEGTVKELLQRGDNLQQRITDERKREEIKIKQQLLQTKHNALKDLRSQRRKKALEISHQWYQYKRQADDLLKCLDDIEKKLASLPEPRDERKIKEIDRELQKKKEELNAVRRQAEGLSEDGAAMAVEPTQIQLSKRWREIESKFAQFRRLNFAQIHTVREETMMVMTEDMPLEISYVPSTYLTEITHVSQALLEVEQLLNAPDLCAKDFEDLFKQEESLKNIKDSLQQSSGRIDIIHSKKTAALQSATPVERVKLQEALSQLDFQWEKVNKMYKDRQGRFDRSVEKWRRFHYDIKIFNQWLTEAEQFLRKTQIPENWEHAKYKWYLKELQDGIGQRQTVVRTLNATGEEIIQQSSKTDASILQEKLGSLNLRWQEVCKQLSDRKKRLEEQKNILSEFQRDLNEFVLWLEEADNIASIPLEPGKEQQLKEKLEQVKLLVEELPLRQGILKQLNETGGPVLVSAPISPEEQDKLENKLKQTNLQWIKVSRALPEKQGEIEAQIKDLGQLEKKLEDLEEQLNHLLLWLSPIRNQLEIYNQPNQEGPFDVKETEIAVQAKQPDVEEILSKGQHLYKEKPATQPVKRKLEDLSSEWKAVNRLLQELRAKQPDLAPGLTTIGASPTQTVTLVTQPVVTKETAISKLEMPSSLMLEVPALADFNRAWTELTDWLSLLDQVIKSQRVMVGDLEDINEMIIKQKATMQDLEQRRPQLEELITAAQNLKNKTSNQEARTIITDRIERIQNQWDEVQEHLQNRRQQLNEMLKDSTQWLEAKEEAEQVLGQARAKLESWKEGPYTVDAIQKKITETKQLAKDLRQWQTNVDVANDLALKLLRDYSADDTRKVHMITENINASWRSIHKRVSEREAALEETHRLLQQFPLDLEKFLAWLTEAETTANVLQDATRKERLLEDSKGVKELMKQWQDLQGEIEAHTDVYHNLDENSQKILRSLEGSDDAVLLQRRLDNMNFKWSELRKKSLNIRSHLEASSDQWKRLHLSLQELLVWLQLKDDELSRQAPIGGDFPAVQKQNDVHRAFKRELKTKEPVIMSTLETVRIFLTEQPLEGLEKLYQEPRELPPEERAQNVTRLLRKQAEEVNTEWEKLNLHSADWQRKIDETLERLRELQEATDELDLKLRQAEVIKGSWQPVGDLLIDSLQDHLEKVKALRGEIAPLKENVSHVNDLARQLTTLGIQLSPYNLSTLEDLNTRWKLLQVAVEDRVRQLHEAHRDFGPASQHFLSTSVQGPWERAISPNKVPYYIKADLNNVRFSAYRTAMKLRRLQKALCLDLLSLSAACDALDQHNLKQNDQPMDILQIINCLTTIYDRLEQEHNNLVNVPLCVDMCLNWLLNVYDTGRTGRIRVLSFKTGIISLCKAHLEDKYRYLFKQVASSTGFCDQRRLGLLLHDSIQIPRQLGEVASFGGSNIEPSVRSCFQFANNKPEIEAALFLDWMRLEPQSMVWLPVLHRVAAAETAKHQAKCNICKECPIIGFRYRSLKHFNYDICQSCFFSGRVAKGHKMHYPMVEYCTPTTSGEDVRDFAKVLKNKFRTKRYFAKHPRMGYLPVQTVLEGDNMETPVTLINFWPVDSAPASSPQLSHDDTHSRIEHYASRLAEMENSNGSYLNDSISPNESIDDEHLLIQHYCQSLNQDSPLSQPRSPAQILISLESEERGELERILADLEEENRNLQAEYDRLKQQHEHKGLSPLPSPPEMMPTSPQSPRDAELIAEAKLLRQHKGRLEARMQILEDHNKQLESQLHRLRQLLEQPQAEAKVNGTTVSSPSTSLQRSDSSQPMLLRVVGSQTSDSMGEEDLLSPPQDTSTGLEEVMEQLNNSFPSSRGRNTPGKPMREDTM

SEQ ID NO: 12720 - DNA, 14018 bp, Homo sapiens
cgttaaatgcaaacgctgctctggctcatgtgtttgctccgaggtataggttttgttcgactgacgtatcagatagtcagagtggttaccacaccgacgttgtagcagctgcataataaatgactgaaagaatcatgttaggcatgcccacctaacctaacttgaatcatgcgaaaggggagctgttggaattcaaatagactttctggttcccagcagtcggcagtaatagaatgctttcaggaagatgacagaatcaggagaaagatgctgttttgcactatcttgatttgttacagcagccaacttattggcatgatggagtgacaggaaaaacagctggcatggaagatgaaagagaagatgttcaaaagaaaacattcacaaaatgggtaaatgcacaattttctaagtttgggaagcagcatattgagaacctcttcagtgacctacaggatgggaggcgcctcctagacctcctcgaaggcctgacagggcaaaaactgccaaaagaaaaaggatccacaagagttcatgccctgaacaatgtcaacaaggcactgcgggttttgcagaacaataatgttgatttagtgaatattggaagtactgacatcgtagatggaaatcataaactgactcttggtttgatttggaatataatcctccactggcaggtcaaaaatgtaatgaaaaatatcatggctggattgcaacaaaccaacagtgaaaagattctcctgagctgggtccgacaatcaactcgtaattatccacaggttaatgtaatcaacttcaccaccagctggtctgatggcctggctttgaatgctctcatccatagtcataggccagacctatttgactggaatagtgtggtttgccagcagtcagccacacaacgactggaacatgcattcaacatcgccagatatcaattaggcatagagaaactactcgatcctgaagatgttgataccacctatccagataagaagtccatcttaatgtacatcacatcactcttccaagttttgcctcaacaagtgagcattgaagccatccaggaagtggaaatgttgccaaggccacctaaagtgactaaagaagaacattttcagttacatcatcaaatgcactattctcaacagatcacggtcagtctagcacagggatatgagagaacttcttcccctaagcctcgattcaagagctatgcctacacacaggctgcttatgtcaccacctctgaccctacacggagcccatttccttcacagcatttggaagctcctgaagacaagtcatttggcagttcattgatggagagtgaagtaaacctggaccgttatcaaacagctttagaagaagtattatcgtggcttctttctgctgaggacacattgcaagcacaaggagagatttctaatgatgtggaagtggtgaaagaccagtttcatactcatgaggggtacatgatggatttgacagcccatcagggccgggttggtaatattctacaattgggaagtaagctgattggaacaggaaaattatcagaagatgaagaaactgaagtacaagagcagatgaatctcctaaattcaagatgggaatgcctcagggtagctagcatggaaaaacaaagcaatttacatagagttttaatggatctccagaatcagaaactgaaagagttgaatgactggctaacaaaaacagaagaaagaacaaggaaaatggaggaagagcctcttggacctgatcttgaagacctaaaacgccaagtacaacaacataaggtgcttcaagaagatctagaacaagaacaagtcagggtcaattctctcactcacatggtggtggtagttgatgaatctagtggagatcacgcaactgctgctttggaagaacaacttaaggtattgggagatcgatgggcaaacatctgtagatggacagaagaccgctgggttcttttacaagacatccttctcaaatggcaacgtcttactgaagaacagtgcctttttagtgcatggctttcagaaaaagaagatgcagtgaacaagattcacacaactggctttaaagatcaaaatgaaatgttatcaagtcttcaaaaactggccgttttaaaagcggatctagaaaagaaaaagcaatccatgggcaaactgtattcactcaaacaagatcttctttcaacactgaagaataagtcagtgacccagaagacggaagcatggctggataactttgcccggtgttgggataatttagtccaaaaacttgaaaagagtacagcacagatttcacaggctgtcaccaccactcagccatcactaacacagacaactgtaatggaaacagtaactacggtgaccacaagggaacagatcctggtaaagcatgctcaagaggaacttccaccaccacctccccaaaagaagaggcagattactgtggattctgaaattaggaaaaggttggatgttgatataactgaacttcacagctggattactcgctcagaagctgtgttgcagagtcctgaatttgcaatctttcggaaggaaggcaacttctcagacttaaaagaaaaagtcaatgccatagagcgagaaaaagctgagaagttcagaaaactgcaagatgccagcagatcagctcaggccctggtggaacagatggtgaatgagggtgttaatgcagatagcatcaaacaagcctcagaacaactgaacagccggtggatcgaattctgccagttgctaagtgagagacttaactggctggagtatcagaacaacatcatcgctttctataatcagctacaacaattggagcagatgacaactactgctgaaaactggttgaaaatccaacccaccaccccatcagagccaacagcaattaaaagtcagttaaaaatttgtaaggatgaagtcaaccggctatcagatcttcaacctcaaattgaacgattaaaaattcaaagcatagccctgaaagagaaaggacaaggacccatgttcctggatgcagactttgtggcctttacaaatcattttaagcaagtcttttctgatgtgcaggccagagagaaagagctacagacaatttttgacactttgccaccaatgcgctatcaggagaccatgagtgccatcaggacatgggtccagcagtcagaaaccaaactctccatacctcaacttagtgtcaccgactatgaaatcatggagcagagactcggggaattgcaggctttacaaagttctctgcaagagcaacaaagtggcctatactatctcagcaccactgtgaaagagatgtcgaagaaagcgccctctgaaattagccggaaatatcaatcagaatttgaagaaattgagggacgctggaagaagctctcctcccagctggttgagcattgtcaaaagctagaggagcaaatgaataaactccgaaaaattcagaatcacatacaaaccctgaagaaatggatggctgaagttgatgtttttctgaaggaggaatggcctgcccttggggattcagaaattctaaaaaagcagctgaaacagtgcagacttttagtcagtgatattcagacaattcagcccagtctaaacagtgtcaatgaaggtgggcagaagataaagaatgaagcagagccagagtttgcttcgagacttgagacagaactcaaagaacttaacactcagtgggatcacatgtgccaacaggtctatgccagaaaggaggccttgaagggaggtttggagaaaactgtaagcctccagaaagatctatcagagatgcacgaatggatgacacaagctgaagaagagtatcttgagagagattttgaatataaaactccagatgaattacagaaagcagttgaagagatgaagagagctaaagaagaggcccaacaaaaagaagcgaaagtgaaactccttactgagtctgtaaatagtgtcatagctcaagctccacctgtagcacaagaggccttaaaaaaggaacttgaaactctaaccaccaactaccagtggctctgcactaggctgaatgggaaatgcaagactttggaagaagtttgggcatgttggcatgagttattgtcatacttggagaaagcaaacaagtggctaaatgaagtagaatttaaacttaaaaccactgaaaacattcctggcggagctgaggaaatctctgaggtgctagattcacttgaaaatttgatgcgacattcagaggataacccaaatcagattcgcatattggcacagaccctaacagatggcggagtcatggatgagctaatcaatgaggaacttgagacatttaattctcgttggagggaactacatgaagaggctgtaaggaggcaaaagttgcttgaacagagcatccagtctgcccaggagactgaaaaatccttacacttaatccaggagtccctcacattcattgacaagcagttggcagcttatattgcagacaaggtggacgcagctcaaatgcctcaggaagcccagaaaatccaatctgatttgacaagtcatgagatcagtttagaagaaatgaagaaacataatcaggggaaggaggctgcccaaagagtcctgtctcagattgatgttgcacagaaaaaattacaagatgtctccatgaagtttcgattattccagaaaccagccaattttgagcagcgtctacaagaaagtaagatgattttagatgaagtgaagatgcacttgcctgcattggaaacaaagagtgtggaacaggaagtagtacagtcacagctaaatcattgtgtgaacttgtataaaagtctgagtgaagtgaagtctgaagtggaaatggtgataaagactggacgtcagattgtacagaaaaagcagacggaaaatcccaaagaacttgatgaaagagtaacagctttgaaattgcattataatgagctgggagcaaaggtaacagaaagaaagcaacagttggagaaatgcttgaaattgtcccgtaagatgcgaaaggaaatgaatgtcttgacagaatggctggcagctacagatatggaattgacaaagagatcagcagttgaaggaatgcctagtaatttggattctgaagttgcctggggaaaggctactcaaaaagagattgagaaacagaaggtgcacctgaagagtatcacagaggtaggagaggccttgaaaacagttttgggcaagaaggagacgttggtggaagataaactcagtcttctgaatagtaactggatagctgtcacctcccgagcagaagagtggttaaatcttttgttggaataccagaaacacatggaaacttttgaccagaatgtggaccacatcacaaagtggatcattcaggctgacacacttttggatgaatcagagaaaaagaaaccccagcaaaaagaagacgtgcttaagcgtttaaaggcagaactgaatgacatacgcccaaaggtggactctacacgtgaccaagcagcaaacttgatggcaaaccgcggtgaccactgcaggaaattagtagagccccaaatctcagagctcaaccatcgatttgcagccatttcacacagaattaagactggaaaggcctccattcctttgaaggaattggagcagtttaactcagatatacaaaaattgcttgaaccactggaggctgaaattcagcagggggtgaatctgaaagaggaagacttcaataaagatatgaatgaagacaatgagggtactgtaaaagaattgttgcaaagaggagacaacttacaacaaagaatcacagatgagagaaagcgagaggaaataaagataaaacagcagctgttacagacaaaacataatgctctcaaggatttgaggtctcaaagaagaaaaaaggctctagaaatttctcatcagtggtatcagtacaagaggcaggctgatgatctcctgaaatgcttggatgacattgaaaaaaaattagccagcctacctgagcccagagatgaaaggaaaataaaggaaattgatcgggaattgcagaagaagaaagaggagctgaatgcagtgcgtaggcaagctgagggcttgtctgaggatggggccgcaatggcagtggagccaactcagatccagctcagcaagcgctggcgggaaattgagagcaaatttgctcagtttcgaagactcaactttgcacaaattcacactgtccgtgaagaaacgatgatggtgatgactgaagacatgcctttggaaatttcttatgtgccttctacttatttgactgaaatcactcatgtctcacaagccctattagaagtggaacaacttctcaatgctcctgacctctgtgctaaggactttgaagatctctttaagcaagaggagtctctgaagaatataaaagatagtctacaacaaagctcaggtcggattgacattattcatagcaagaagacagcagcattgcaaagtgcaacgcctgtggaaagggtgaagctacaggaagctctctcccagcttgatttccaatgggaaaaagttaacaaaatgtacaaggaccgacaagggcgatttgacagatctgttgagaaatggcggcgttttcattatgatataaagatatttaatcagtggctaacagaagctgaacagtttctcagaaagacacaaattcctgagaattgggaacatgctaaatacaaatggtatcttaaggaactccaggatggcattgggcagcggcaaactgttgtcagaacattgaatgcaactggggaagaaataattcagcaatcctcaaaaacagatgccagtattctacaggaaaaattgggaagcctgaatctgcggtggcaggaggtctgcaaacagctgtcagacagaaaaaagaggctagaagaacaaaagaatatcttgtcagaatttcaaagagatttaaatgaatttgttttatggttggaggaagcagataacattgctagtatcccacttgaacctggaaaagagcagcaactaaaagaaaagcttgagcaagtcaagttactggtggaagagttgcccctgcgccagggaattctcaaacaattaaatgaaactggaggacccgtgcttgtaagtgctcccataagcccagaagagcaagataaacttgaaaataagctcaagcagacaaatctccagtggataaaggtttccagagctttacctgagaaacaaggagaaattgaagctcaaataaaagaccttgggcagcttgaaaaaaagcttgaagaccttgaagagcagttaaatcatctgctgctgtggttatctcctattaggaatcagttggaaatttataaccaaccaaaccaagaaggaccatttgacgttaaggaaactgaaatagcagttcaagctaaacaaccggatgtggaagagattttgtctaaagggcagcatttgtacaaggaaaaaccagccactcagccagtgaagaggaagttagaagatctgagctctgagtggaaggcggtaaaccgtttacttcaagagctgagggcaaagcagcctgacctagctcctggactgaccactattggagcctctcctactcagactgttactctggtgacacaacctgtggttactaaggaaactgccatctccaaactagaaatgccatcttccttgatgttggaggtacctgctctggcagatttcaaccgggcttggacagaacttaccgactggctttctctgcttgatcaagttataaaatcacagagggtgatggtgggtgaccttgaggatatcaacgagatgatcatcaagcagaaggcaacaatgcaggatttggaacagaggcgtccccagttggaagaactcattaccgctgcccaaaatttgaaaaacaagaccagcaatcaagaggctagaacaatcattacggatcgaattgaaagaattcagaatcagtgggatgaagtacaagaacaccttcagaaccggaggcaacagttgaatgaaatgttaaaggattcaacacaatggctggaagctaaggaagaagctgagcaggtcttaggacaggccagagccaagcttgagtcatggaaggagggtccctatacagtagatgcaatccaaaagaaaatcacagaaaccaagcagttggccaaagacctccgccagtggcagacaaatgtagatgtggcaaatgacttggccctgaaacttctccgggattattctgcagatgataccagaaaagtccacatgataacagagaatatcaatgcctcttggagaagcattcataaaagggtgagtgagcgagaggctgctttggaagaaactcatagattactgcaacagttccccctggacctggaaaagtttcttgcctggcttacagaagctgaaacaactgccaatgtcctacaggatgctacccgtaaggaaaggctcctagaagactccaagggagtaaaagagctgatgaaacaatggcaagacctccaaggtgaaattgaagctcacacagatgtttatcacaacctggatgaaaacagccaaaaaatcctgagatccctggaaggttccgatgatgcagtcctgttacaaagacgtttggataacatgaacttcaagtggagtgaacttcggaaaaagtctctcaacattaggtcccatttggaagccagttctgaccagtggaagcgtctgcacctttctctgcaggaacttctggtgtggctacagctgaaagatgatgaattaagccggcaggcacctattggaggcgactttccagcagttcagaagcagaacgatgtacatagggccttcaagagggaattgaaaactaaagaacctgtaatcatgagtactcttgagactgtacgaatatttctgacagagcagcctttggaaggactagagaaactctaccaggagcccagagagctgcctcctgaggagagagcccagaatgtcactcggcttctacgaaagcaggctgaggaggtcaatactgagtgggaaaaattgaacctgcactccgctgactggcagagaaaaatagatgagacccttgaaagactccgggaacttcaagaggccacggatgagctggacctcaagctgcgccaagctgaggtgatcaagggatcctggcagcccgtgggcgatctcctcattgactctctccaagatcacctcgagaaagtcaaggcacttcgaggagaaattgcgcctctgaaagagaacgtgagccacgtcaatgaccttgctcgccagcttaccactttgggcattcagctctcaccgtataacctcagcactctggaagacctgaacaccagatggaagcttctgcaggtggccgtcgaggaccgagtcaggcagctgcatgaagcccacagggactttggtccagcatctcagcactttctttccacgtctgtccagggtccctgggagagagccatctcgccaaacaaagtgccctactatatcaaagctgacctgaataatgtcagattctcagcttataggactgccatgaaactccgaagactgcagaaggccctttgcttggatctcttgagcctgtcagctgcatgtgatgccttggaccagcacaacctcaagcaaaatgaccagcccatggatatcctgcagattattaattgtttgaccactatttatgaccgcctggagcaagagcacaacaatttggtcaacgtccctctctgcgtggatatgtgtctgaactggctgctgaatgtttatgatacgggacgaacagggaggatccgtgtcctgtcttttaaaactggcatcatttccctgtgtaaagcacatttggaagacaagtacagataccttttcaagcaagtggcaagttcaacaggattttgtgaccagcgcaggctgggcctccttctgcatgattctatccaaattccaagacagttgggtgaagttgcatcctttgggggcagtaacattgagccaagtgtccggagctgcttccaatttgctaataataagccagagatcgaagcggccctcttcctagactggatgagactggaaccccagtccatggtgtggctgcccgtcctgcacagagtggctgctgcagaaactgccaagcatcaggccaaatgtaacatctgcaaagagtgtccaatcattggattcaggtacaggagtctaaagcactttaattatgacatctgccaaagctgctttttttctggtcgagttgcaaaaggccataaaatgcactatcccatggtggaatattgcactccgactacatcaggagaagatgttcgagactttgccaaggtactaaaaaacaaatttcgaaccaaaaggtattttgcgaagcatccccgaatgggctacctgccagtgcagactgtcttagagggggacaacatggaaactcccgttactctgatcaacttctggccagtagattctgcgcctgcctcgtcccctcagctttcacacgatgatactcattcacgcattgaacattatgctagcaggctagcagaaatggaaaacagcaatggatcttatctaaatgatagcatctctcctaatgagagcatagatgatgaacatttgttaatccagcattactgccaaagtttgaaccaggactcccccctgagccagcctcgtagtcctgcccagatcttgatttccttagagagtgaggaaagaggggagctagagagaatcctagcagatcttgaggaagaaaacaggaatctgcaagcagaatatgaccgtctaaagcagcagcacgaacataaaggcctgtccccactgccgtcccctcctgaaatgatgcccacctctccccagagtccccgggatgctgagctcattgctgaggccaagctactgcgtcaacacaaaggccgcctggaagccaggatgcaaatcctggaagaccacaataaacagctggagtcacagttacacaggctaaggcagctgctggagcaaccccaggcagaggccaaagtgaatggcacaacggtgtcctctccttctacctctctacagaggtccgacagcagtcagcctatgctgctccgagtggttggcagtcaaacttcggactccatgggtgaggaagatcttctcagtcctccccaggacacaagcacagggttagaggaggtgatggagcaactcaacaactccttccctagttcaagaggaagaaatacccctggaaagccaatgagagaggacacaatgtaggaagtcttttccacatggcagatgatttgggcagagcgatggagtccttagtatcagtcatgacagatgaagaaggagcagaataaatgttttacaactcctgattcccgcatggtttttataatattcatacaacaaagaggattagacagtaagagtttacaagaaataaatctatatttttgtgaagggtagtggtattatactgtagatttcagtagtttctaagtctgttattgttttgttaacaatggcaggttttacacgtctatgcaattgtacaaaaaagttataagaaaactacatgtaaaatcttgatagctaaataacttgccatttctttatatggaacgcattttgggttgtttaaaaatttataacagttataaagaaagattgtaaactaaagtgtgctttataaaaaaaagttgtttataaaaacccctaaaaacaaaacaaacacacacacacacacatacacacacacacacaaaactttgaggcagcgcattgttttgcatccttttggcgtgatatccatatgaaattcatggctttttctttttttgcatattaaagataagacttcctctaccaccacaccaaatgactactacacactgctcatttgagaactgtcagctgagtggggcaggcttgagttttcatttcatatatctatatgtctataagtatataaatactatagttatatagataaagagatacgaatttctatagactgactttttccattttttaaatgttcatgtcacatcctaatagaaagaaattacttctagtcagtcatccaggcttacctgcttggtctagaatggatttttcccggagccggaagccaggaggaaactacaccacactaaaacattgtctacagctccagatgtttctcattttaaacaactttccactgacaacgaaagtaaagtaaagtattggatttttttaaagggaacatgtgaatgaatacacaggacttattatatcagagtgagtaatcggttggttggttgattgattgattgattgatacattcagcttcctgctgctagcaatgccacgatttagatttaatgatgcttcagtggaaatcaatcagaaggtattctgaccttgtgaacatcagaaggtattttttaactcccaagcagtagcaggacgatgatagggctggagggctatggattcccagcccatccctgtgaaggagtaggccactctttaagtgaaggattggatgattgttcataatacataaagttctctgtaattacaactaaattattatgccctcttctcacagtcaaaaggaactgggtggtttggtttttgttgcttttttagatttattgtcccatgtgggatgagtttttaaatgccacaagacataatttaaaataaataaactttgggaaaaggtgtaaaacagtagccccatcacatttgtgatactgacaggtatcaacccagaagcccatgaactgtgtttccatcctttgcatttctctgcgagtagttccacacaggtttgtaagtaagtaagaaagaaggcaaattgattcaaatgttacaaaaaaacccttcttggtggattagacaggttaaatatataaacaaacaaacaaaaattgctcaaaaaagaggagaaaagctcaagaggaaaagctaaggactggtaggaaaaagctttactctttcatgccattttatttctttttgatttttaaatcattcattcaatagataccaccgtgtgacctataattttgcaaatctgttacctctgacatcaagtgtaattagcttttggagagtgggctgacatcaagtgtaattagcttttggagagtgggttttgtccattattaataattaattaattaacatcaaacacggcttctcatgctatttctacctcactttggttttggggtgttcctgataattgtgcacacctgagttcacagcttcaccacttgtccattgcgttattttctttttcctttataattctttctttttccttcataattttcaaaagaaaacccaaagctctaaggtaacaaattaccaaattacatgaagatttggtttttgtcttgcatttttttcctttatgtgacgctggaccttttctttacccaaggatttttaaaactcagatttaaaacaaggggttactttacatcctactaagaagtttaagtaagtaagtttcattctaaaatcagaggtaaatagagtgcataaataattttgttttaatctttttgtttttcttttagacacattagctctggagtgagtctgtcataatatttgaacaaaaattgagagctttattgctgcattttaagcataattaatttggacattatttcgtgttgtgttctttataaccaccaagtattaaactgtaaatcataatgtaactgaagcataaacatcacatggcatgttttgtcattgttttcaggtactgagttcttacttgagtatcataatatattgtgttttaacaccaacactgtaacatttacgaattatttttttaaacttcagttttactgcattttcacaacatatcagacttcaccaaatatatgccttactattgtattatagtactgctttactgtgtatctcaataaagcacgcagttatgttacaaaaaagta

SEQ ID NO: 12721 - protein, 3657 aa, Homo sapiens
MEDEREDVQKKTFTKWVNAQFSKFGKQHIENLFSDLQDGRRLLDLLEGLTGQKLPKEKGSTRVHALNNVNKALRVLQNNNVDLVNIGSTDIVDGNHKLTLGLIWNIILHWQVKNVMKNIMAGLQQTNSEKILLSWVRQSTRNYPQVNVINFTTSWSDGLALNALIHSHRPDLFDWNSVVCQQSATQRLEHAFNIARYQLGIEKLLDPEDVDTTYPDKKSILMYITSLFQVLPQQVSIEAIQEVEMLPRPPKVTKEEHFQLHHQMHYSQQITVSLAQGYERTSSPKPRFKSYAYTQAAYVTTSDPTRSPFPSQHLEAPEDKSFGSSLMESEVNLDRYQTALEEVLSWLLSAEDTLQAQGEISNDVEVVKDQFHTHEGYMMDLTAHQGRVGNILQLGSKLIGTGKLSEDEETEVQEQMNLLNSRWECLRVASMEKQSNLHRVLMDLQNQKLKELNDWLTKTEERTRKMEEEPLGPDLEDLKRQVQQHKVLQEDLEQEQVRVNSLTHMVVVVDESSGDHATAALEEQLKVLGDRWANICRWTEDRWVLLQDILLKWQRLTEEQCLFSAWLSEKEDAVNKIHTTGFKDQNEMLSSLQKLAVLKADLEKKKQSMGKLYSLKQDLLSTLKNKSVTQKTEAWLDNFARCWDNLVQKLEKSTAQISQAVTTTQPSLTQTTVMETVTTVTTREQILVKHAQEELPPPPPQKKRQITVDSEIRKRLDVDITELHSWITRSEAVLQSPEFAIFRKEGNFSDLKEKVNAIEREKAEKFRKLQDASRSAQALVEQMVNEGVNADSIKQASEQLNSRWIEFCQLLSERLNWLEYQNNIIAFYNQLQQLEQMTTTAENWLKIQPTTPSEPTAIKSQLKICKDEVNRLSDLQPQIERLKIQSIALKEKGQGPMFLDADFVAFTNHFKQVFSDVQAREKELQTIFDTLPPMRYQETMSAIRTWVQQSETKLSIPQLSVTDYEIMEQRLGELQALQSSLQEQQSGLYYLSTTVKEMSKKAPSEISRKYQSEFEEIEGRWKKLSSQLVEHCQKLEEQMNKLRKIQNHIQTLKKWMAEVDVFLKEEWPALGDSEILKKQLKQCRLLVSDIQTIQPSLNSVNEGGQKIKNEAEPEFASRLETELKELNTQWDHMCQQVYARKEALKGGLEKTVSLQKDLSEMHEWMTQAEEEYLERDFEYKTPDELQKAVEEMKRAKEEAQQKEAKVKLLTESVNSVIAQAPPVAQEALKKELETLTTNYQWLCTRLNGKCKTLEEVWACWHELLSYLEKANKWLNEVEFKLKTTENIPGGAEEISEVLDSLENLMRHSEDNPNQIRILAQTLTDGGVMDELINEELETFNSRWRELHEEAVRRQKLLEQSIQSAQETEKSLHLIQESLTFIDKQLAAYIADKVDAAQMPQEAQKIQSDLTSHEISLEEMKKHNQGKEAAQRVLSQIDVAQKKLQDVSMKFRLFQKPANFEQRLQESKMILDEVKMHLPALETKSVEQEVVQSQLNHCVNLYKSLSEVKSEVEMVIKTGRQIVQKKQTENPKELDERVTALKLHYNELGAKVTERKQQLEKCLKLSRKMRKEMNVLTEWLAATDMELTKRSAVEGMPSNLDSEVAWGKATQKEIEKQKVHLKSITEVGEALKTVLGKKETLVEDKLSLLNSNWIAVTSRAEEWLNLLLEYQKHMETFDQNVDHITKWIIQADTLLDESEKKKPQQKEDVLKRLKAELNDIRPKVDSTRDQAANLMANRGDHCRKLVEPQISELNHRFAAISHRIKTGKASIPLKELEQFNSDIQKLLEPLEAEIQQGVNLKEEDFNKDMNEDNEGTVKELLQRGDNLQQRITDERKREEIKIKQQLLQTKHNALKDLRSQRRKKALEISHQWYQYKRQADDLLKCLDDIEKKLASLPEPRDERKIKEIDRELQKKKEELNAVRRQAEGLSEDGAAMAVEPTQIQLSKRWREIESKFAQFRRLNFAQIHTVREETMMVMTEDMPLEISYVPSTYLTEITHVSQALLEVEQLLNAPDLCAKDFEDLFKQEESLKNIKDSLQQSSGRIDIIHSKKTAALQSATPVERVKLQEALSQLDFQWEKVNKMYKDRQGRFDRSVEKWRRFHYDIKIFNQWLTEAEQFLRKTQIPENWEHAKYKWYLKELQDGIGQRQTVVRTLNATGEEIIQQSSKTDASILQEKLGSLNLRWQEVCKQLSDRKKRLEEQKNILSEFQRDLNEFVLWLEEADNIASIPLEPGKEQQLKEKLEQVKLLVEELPLRQGILKQLNETGGPVLVSAPISPEEQDKLENKLKQTNLQWIKVSRALPEKQGEIEAQIKDLGQLEKKLEDLEEQLNHLLLWLSPIRNQLEIYNQPNQEGPFDVKETEIAVQAKQPDVEEILSKGQHLYKEKPATQPVKRKLEDLSSEWKAVNRLLQELRAKQPDLAPGLTTIGASPTQTVTLVTQPVVTKETAISKLEMPSSLMLEVPALADFNRAWTELTDWLSLLDQVIKSQRVMVGDLEDINEMIIKQKATMQDLEQRRPQLEELITAAQNLKNKTSNQEARTIITDRIERIQNQWDEVQEHLQNRRQQLNEMLKDSTQWLEAKEEAEQVLGQARAKLESWKEGPYTVDAIQKKITETKQLAKDLRQWQTNVDVANDLALKLLRDYSADDTRKVHMITENINASWRSIHKRVSEREAALEETHRLLQQFPLDLEKFLAWLTEAETTANVLQDATRKERLLEDSKGVKELMKQWQDLQGEIEAHTDVYHNLDENSQKILRSLEGSDDAVLLQRRLDNMNFKWSELRKKSLNIRSHLEASSDQWKRLHLSLQELLVWLQLKDDELSRQAPIGGDFPAVQKQNDVHRAFKRELKTKEPVIMSTLETVRIFLTEQPLEGLEKLYQEPRELPPEERAQNVTRLLRKQAEEVNTEWEKLNLHSADWQRKIDETLERLRELQEATDELDLKLRQAEVIKGSWQPVGDLLIDSLQDHLEKVKALRGEIAPLKENVSHVNDLARQLTTLGIQLSPYNLSTLEDLNTRWKLLQVAVEDRVRQLHEAHRDFGPASQHFLSTSVQGPWERAISPNKVPYYIKADLNNVRFSAYRTAMKLRRLQKALCLDLLSLSAACDALDQHNLKQNDQPMDILQIINCLTTIYDRLEQEHNNLVNVPLCVDMCLNWLLNVYDTGRTGRIRVLSFKTGIISLCKAHLEDKYRYLFKQVASSTGFCDQRRLGLLLHDSIQIPRQLGEVASFGGSNIEPSVRSCFQFANNKPEIEAALFLDWMRLEPQSMVWLPVLHRVAAAETAKHQAKCNICKECPIIGFRYRSLKHFNYDICQSCFFSGRVAKGHKMHYPMVEYCTPTTSGEDVRDFAKVLKNKFRTKRYFAKHPRMGYLPVQTVLEGDNMETPVTLINFWPVDSAPASSPQLSHDDTHSRIEHYASRLAEMENSNGSYLNDSISPNESIDDEHLLIQHYCQSLNQDSPLSQPRSPAQILISLESEERGELERILADLEEENRNLQAEYDRLKQQHEHKGLSPLPSPPEMMPTSPQSPRDAELIAEAKLLRQHKGRLEARMQILEDHNKQLESQLHRLRQLLEQPQAEAKVNGTTVSSPSTSLQRSDSSQPMLLRVVGSQTSDSMGEEDLLSPPQDTSTGLEEVMEQLNNSFPSSRGRNTPGKPMREDTM

SEQ ID NO: 12722 - DNA, 3855 bp, Homo sapiens
atgcgaaaggggagctgttggaattcaaatagactttctggttcccagcagtcggcagtaatagaatgctttcaggaagatgacagaatcaggagaaagatgctgttttgcactatcttgatttgttacagcagccaacttattggcatgatggagtgacaggaaaaacagctggcatggaagatgaaagagaagatgttcaaaagaaaacattcacaaaatgggtaaatgcacaattttctaagtttgggaagcagcatattgagaacctcttcagtgacctacaggatgggaggcgcctcctagacctcctcgaaggcctgacagggcaaaaactgccaaaagaaaaaggatccacaagagttcatgccctgaacaatgtcaacaaggcactgcgggttttgcagaacaataatgttgatttagtgaatattggaagtactgacatcgtagatggaaatcataaactgactcttggtttgatttggaatataatcctccactggcaggtcaaaaatgtaatgaaaaatatcatggctggattgcaacaaaccaacagtgaaaagattctcctgagctgggtccgacaatcaactcgtaattatccacaggttaatgtaatcaacttcaccaccagctggtctgatggcctggctttgaatgctctcatccatagtcataggccagacctatttgactggaatagtgtggtttgccagcagtcagccacacaacgactggaacatgcattcaacatcgccagatatcaattaggcatagagaaactactcgatcctgaagatgttgataccacctatccagataagaagtccatcttaatgtacatcacatcactcttccaagttttgcctcaacaagtgagcattgaagccatccaggaagtggaaatgttgccaaggccacctaaagtgactaaagaagaacattttcagttacatcatcaaatgcactattctcaacagatcacggtcagtctagcacagggatatgagagaacttcttcccctaagcctcgattcaagagctatgcctacacacaggctgcttatgtcaccacctctgaccctacacggagcccatttccttcacagcatttggaagctcctgaagacaagtcatttggcagttcattgatggagagtgaagtaaacctggaccgttatcaaacagctttagaagaagtattatcgtggcttctttctgctgaggacacattgcaagcacaaggagagatttctaatgatgtggaagtggtgaaagaccagtttcatactcatgaggggtacatgatggatttgacagcccatcagggccgggttggtaatattctacaattgggaagtaagctgattggaacaggaaaattatcagaagatgaagaaactgaagtacaagagcagatgaatctcctaaattcaagatgggaatgcctcagggtagctagcatggaaaaacaaagcaatttacatagagttttaatggatctccagaatcagaaactgaaagagttgaatgactggctaacaaaaacagaagaaagaacaaggaaaatggaggaagagcctcttggacctgatcttgaagacctaaaacgccaagtacaacaacataaggtgcttcaagaagatctagaacaagaacaagtcagggtcaattctctcactcacatggtggtggtagttgatgaatctagtggagatcacgcaactgctgctttggaagaacaacttaaggtattgggagatcgatgggcaaacatctgtagatggacagaagaccgctgggttcttttacaagacatccttctcaaatggcaacgtcttactgaagaacagtgcctttttagtgcatggctttcagaaaaagaagatgcagtgaacaagattcacacaactggctttaaagatcaaaatgaaatgttatcaagtcttcaaaaactggccgttttaaaagcggatctagaaaagaaaaagcaatccatgggcaaactgtattcactcaaacaagatcttctttcaacactgaagaataagtcagtgacccagaagacggaagcatggctggataactttgcccggtgttgggataatttagtccaaaaacttgaaaagagtacagcacagatttcacaggctgtcaccaccactcagccatcactaacacagacaactgtaatggaaacagtaactacggtgaccacaagggaacagatcctggtaaagcatgctcaagaggaacttccaccaccacctccccaaaagaagaggcagattactgtggattctgaaattaggaaaaggttggatgttgatataactgaacttcacagctggattactcgctcagaagctgtgttgcagagtcctgaatttgcaatctttcggaaggaaggcaacttctcagacttaaaagaaaaagtcaatgtaggttatgcattaatttttatatctgtactcattttgtgctgcttgtaaactccgtgctttgttatctgtgattctactagttgatagattaatgcgatatgataaaatgctgtttaatatgtcttaaaaatatattttagatagcaagcaaaatcaaagtttagcctagagaaatctttctggattcttctgtgactgactagggatgcctttcataaacttgccttaacttacatattatttaactataaattaacaattttatgacattaattcatgttgattcctttcatatattgttcagttacctcaaggctaggccttagcaagcttgcacaattgtgtagagtagaatagagtaaaatagaatagaataatataatagataccatacttaggactatgtctatattctcactgttatcaaaaagttattctttatagtcatcaatccctgtcatatattataagatatttaaatttcccagatatttgtgtattaccttatctaaaaggtgtccagcctttctcagtatttacatgtggtagcagatgctttgttgttgttattcccttctgagatggtataattttgaccttcacaaataggaagttttattaatttaatataaagtgtttcatctttagggaaattgtcaaggctttaatttttcaacttcaacaattataaaacatgcatctttgtatatgattggcaacagtttgtaaaataatttctaacaggcagagtaaataaaatgggcaagctaaggaagcagtgattatgaatgaaaagtaattttatccatgggaagatcacatctaaatgtgtatattagctctgctttttctctccaggattcaaatcatgaagttcaaaatccattgtatttttacaaatacgacattacctcagttacaagctaatgtttgctgttggggttggaacttttggagatcaacaaaagatatatatatattctggaaaaaaaatctattttttaggctgcttgaaaaagggaagacaattttgtcaccagttcttcttagagttaactacttataaattggaaagctattttaaattacttattagctttataagacatgctgttgtcagcattataatagactattctaaattgtttcaagaaatgggaaatatgaaaactgaaagataatatataattgtagaaaattagctaaatgtcttttttcaagtatacttctttgaaggtaaattgtttgctgtgatttttgagggaaattctcttagtagtagaaaattaattagagaacattaaactctaattttcaaacatcatgttacatatttgaccactgaaagtatgaatcacctttagcattttattagctaattaaaaatgattattgatctgattctcac

SEQ ID NO: 12723 - protein, 772 aa, Homo sapiens
MEDEREDVQKKTFTKWVNAQFSKFGKQHIENLFSDLQDGRRLLDLLEGLTGQKLPKEKGSTRVHALNNVNKALRVLQNNNVDLVNIGSTDIVDGNHKLTLGLIWNIILHWQVKNVMKNIMAGLQQTNSEKILLSWVRQSTRNYPQVNVINFTTSWSDGLALNALIHSHRPDLFDWNSVVCQQSATQRLEHAFNIARYQLGIEKLLDPEDVDTTYPDKKSILMYITSLFQVLPQQVSIEAIQEVEMLPRPPKVTKEEHFQLHHQMHYSQQITVSLAQGYERTSSPKPRFKSYAYTQAAYVTTSDPTRSPFPSQHLEAPEDKSFGSSLMESEVNLDRYQTALEEVLSWLLSAEDTLQAQGEISNDVEVVKDQFHTHEGYMMDLTAHQGRVGNILQLGSKLIGTGKLSEDEETEVQEQMNLLNSRWECLRVASMEKQSNLHRVLMDLQNQKLKELNDWLTKTEERTRKMEEEPLGPDLEDLKRQVQQHKVLQEDLEQEQVRVNSLTHMVVVVDESSGDHATAALEEQLKVLGDRWANICRWTEDRWVLLQDILLKWQRLTEEQCLFSAWLSEKEDAVNKIHTTGFKDQNEMLSSLQKLAVLKADLEKKKQSMGKLYSLKQDLLSTLKNKSVTQKTEAWLDNFARCWDNLVQKLEKSTAQISQAVTTTQPSLTQTTVMETVTTVTTREQILVKHAQEELPPPPPQKKRQITVDSEIRKRLDVDITELHSWITRSEAVLQSPEFAIFRKEGNFSDLKEKVNVGYALIFISVLILCCL

SEQ ID NO: 12724 - DNA, 486 bp, Homo sapiens
tgacactgctgaggtctaaacaaggaggcagaagtagtcttcagttcacgatcttctagttgcagcgatgagtgcacgagtgagatcaagatccagaggaagaggagatggtcaggaggctcccgatgtggttgcattcgtggctcccggtgaatctcagcaagaggaaccaccaactgacaatcaggatattgaacctggacaagagagagaaggaacacctccgatcgaagaacgtaaagtagaaggtgattgccaggaaatggatctggaaaagactcggagtgagcgtggagatggctctgatgtaaaagagaagactccacctaatcctaagcatgctaagactaaagaagcaggagatgggcagccataagttaaaaagaagacaagctgaagctacacacatggctgatgtcacattgaaaatgtgactgaaaatttgaaaattctctcaataaagtttgagttttctctgaagaagtc

SEQ ID NO: 12725 - protein, 102 aa, Homo sapiens; identical to SEQ ID NO: 2250

SEQ ID NO: 12726 - DNA, 497 bp, Homo sapiens
gccacttctcttcccttcattcttcgccaggctctctgctgactcaagttcttcagttcacgatcttctagttgcagcgatgagtgcacgagtgagatcaagatccagaggaagaggagatggtcaggaggctcccgatgtggttgcattcgtggctcccggtgaatctcagcaagaggaaccaccaactgacaatcaggatattgaacctggacaagagagagaaggaacacctccgatcgaagaacgtaaagtagaaggtgattgccaggaaatggatctggaaaagactcggagtgagcgtggagatggctctgatgtaaaagagaagactccacctaatcctaagcatgctaagactaaagaagcaggagatgggcagccataagttaaaaagaagacaagctgaagctacacacatggctgatgtcacattgaaaatgtgactgaaaatttgaaaattctctcaataaagtttgagttttctctgaagaagt

SEQ ID NO: 12727 - protein, 102 aa, Homo sapiens; identical to SEQ ID NO: 2250

SEQ ID NO: 12728 - DNA, 1153 bp, Homo sapiens
gccacttctcttcccttcattcttcgccaggctctctgctgactcaagttcttcagttcacgatcttctagttgcagcgatgagtgcacgagtgagatcaagatccagaggaagaggagatggtcaggaggctcccgatgtggttgcattcgtggctcccggtgaatctcagcaagaggaaccaccaactgacaatcaggatattgaacctggacaagagagagaaggaacacctccgatcgaagaacgtaaagtagaaggtgattgccaggaaatggatctggaaaagactcggagtgagcgtggagatggctctgatgtaaaagagaagactccacctaatcctaagcatgctaagactaaagaagcaggagatgggcagccataagttaaaaagaagacaagctgaagctacacacatggctgatgtcacattgaaaatgtgactgaaaatttgaaaattctctcaataaagtttgagttttctctgaagaagtcatgcgtgtcttttgtaaaatttattcctaggaaattgacactattgtaaatggtatctttaaaaaatccttgtgttctgtttagagctggtatatatttttgtatactgattttgtgttgggcaacattgctaaacttgcctattctgttggtttatccctacgtccttttggattttctccatacacaatcataccacatgtaaataatgataattctgttttttccttttgaggctttgtactttcatttctggtccttatgacactggccagacccctccagtacaatgttgattagaagtgatgatgatgtgaattcttgtcatattcctgatgtcaagagggaaactttcaacatttcactatgataggttttaaaaatatatgtagattccttctataggttgagtatacctaatatgaagtcctccaaaatctgaaactgtttgagtgcctccgtgatgctcaaaggaagtgctcatttcagatttcagattttcagattatggatgtttaaccagtaagtatgatgcaagtattccaaaatctgaaacagcatttcagggatggtatactcaacctgtattagattaaggacttttcaaaaaattcttagttttctaagagtacttaccatgctcaccatgaatata

SEQ ID NO: 12729 - protein, 102 aa, Homo sapiens; identical to SEQ ID NO: 2250

SEQ ID NO: 12730 - DNA, 1494 bp, Homo sapiens
aagtgtaagtgagaacaggtgtgagtgagtgggccggcgggcttctggtgggtcgggcactgtggtccctggcctcagagaaggaagggcctcgaggtcatcatccttctcctagcaggcagctatgcggcggggcagggacaggggaggaaggagggccatgaaggggaggagggtcagccaagatgctgtgagttttggagcgggacactatctgagtcctggaggcatatgaaactgtccataaaggacggatgctggggtcctcagtgggggccagggaaagggtgggacagcccgcgcttgacagcgcctgcctcagtgctcgtgttcactgggggtcttcccatcagccccttcacccacgaggtgaactgccgcggagctgtgagggtgccgtttgcattccaattgtcgggactctttcacctgagactgagactcagtgggtgggtccaccgatcgttcctccatgggagtttaagtgtgaagaggagctggtgggcttcaggagggtcgggcagcacagtccgtggcctcggaggaggaagggcctcacaggtggtggcgccgccatgaccttgtggttgtggcagggctggggcgagggaggaagttgggccacggaggggagagggatcagatggagcaaaacttggggggtactttttgaggtatctttgagtcccagaggcacctgaaactgccgaaagaggacaggtttcggagttctcagtggggacctggggaggaggggacctggggtggctgtatattaaaaaatctcttcataatggagtttagttatgaaattaagtctctttaggaaagaccccatgttttgatctaggacttgaagatcacttctctgccgagctggctgtggaagaaacaaagcagtttgcagatagatttatttgatgtgattggaaaccaggcgtagttattattaactcaggacctattatggaaatctcacaaaattaaaaaaaattacaatcagcagatggccatggaaagagtcaagtataattactcctttttattgcagtcttcagttcacgatcttctagttgcagcgatgagtgcacgagtgagatcaagatccagaggaagaggagatggtcaggaggctcccgatgtggttgcattcgtggctcccggtgaatctcagcaagaggaaccaccaactgacaatcaggatattgaacctggacaagagagagaaggaacacctccgatcgaaggtgagaagggcatggaggagcattttgtgtttcatgtatgattttatactagtaacaggaataaataaaccatcccctaaaaattggctggaaacctgtaaagtaatccttggtaagggaatagtgtagttttcagctgctgtagtccttgtgataaattttctcttcagcattttacttatcttatatcttaagagttctttggcatacttggaaaatacaatccttgccaagactctatattagc

SEQ ID NO: 12731 - protein, 93 aa, Homo sapiens
MAMERVKYNYSFLLQSSVHDLLVAAMSARVRSRSRGRGDGQEAPDVVAFVAPGESQQEEPPTDNQDIEPGQEREGTPPIEGEKGMEEHFVFHV

SEQ ID NO: 12732 - DNA, 458 bp, Homo sapiens
ctgcatatgtatgtttttaagagtctggaaatagtcttatgactttcctatcatgcttattaataaataatacagcccagagaagatgaaaatgggttccagaattattggtccttgcagcccggtgaatctcagcaagaggaaccaccaactgacaatcaggatattgaacctggacaagagagagaaggaacacctccgatcgaagaacgtaaagtagaaggtgattgccaggaaatggatctggaaaagactcggagtgagcgtggagatggctctgatgtaaaagagaagactccacctaatcctaagcatgctaagactaaagaagcaggagatgggcagccataagttaaaaagaagacaagctgaagctacacacatggctgatgtcacattgaaaatgtgactgaaaatttgaaaattctctcaataaagtttgagttttctctgaagaa

SEQ ID NO: 12733 - protein, 44 aa, Homo sapiens
MKMGSRIIGPCSPVNLSKRNHQLTIRILNLDKREKEHLRSKNVK

SEQ ID NO: 12734 - DNA, 2516 bp, Homo sapiens
aaacttgcttgttcacgagaatcacgtggggagcgtgttaaaattacagattccttggctccacccgcaggcctactgaatcagaatctcgaagggaggtactccggaacctgtatctctaactagggccccagaggctgcttatgatcaggtcctgcgcttcccgaaaaggatgaagctccagctgcagttctggggaggcctggaccccagctccgggggggccgggctaccaaggccgctgggcctggagaggcgcgtccctggcccatcttatcagcgctctgcagggtctgggcctgctgctcgcgtcctcctgggctcccaaggccacgggtgggttaatggcttgacagccggcctcctggcccagcagacgctgagcagcccgatggcacaatccacctcttctctccaaggccagctggagggacgaggcacgacaaggccatccctacagctggcacttcccctacagctgagagggggcctaaactacaggacacactcccaagacccttaagccctggcagcatcccgggggaggggggcagcaggtggaagtggaaagaagcctgtggagctgccagcagggagagggagtcggacatgaggctgagaggcctctgggaacccctgtgccaaggggctgctggcactgggcagcagcaccccagagcccacgaggagtgtgcccagagcaagtggctcagacctgggtcatggctcgagggtgtcgggctgtagctgctggtcccagagagtgcagcccagggcaggcatcaggacaggagtaggaggagaaagagtgttctaggaagagtctagtcccctaatcctggtggtggctggctgtagcctagtgcacgctgtctggcttgtgtggctgtgctgcctgagtatacataccctagcaacattctccttgctcagcactggacatcagctctccacctggccccttcctctagggaggggatggggaggcctcctagggttagcagcaggagttgggcctcaggaatcaggagcccttgaaaggaggatgcgtggttcccataaaactgagggttgccctgggccctacccttcctgagtcagctcttgcttcaattccttgaagcaccccagcatcctttcaataaatgcctgccctttgtggcctgcaaccagaggaactgcaactagcacactcactgaaggaatcctgctgctgctgctgctgctaaaaacaaccgaggtcatggatgagggggtggaggatactctcatcccacctccagactgacaacaaaaagacctaaagatctctgtgtacctgggactgtctaccattgaagattagccatggtaacttgttgacttagtgatcaacttcctgcagaagcccataggtccacctggactctgcccaggccagcgtgttctgaaaatggagggctctgtcaccattcactcaacaaatgtttattctgcactgaccgagggccagatgtaccaagagctgtggacacagcactccaacttactccagggctactgaaatcagggatggcttccccaaaaggcacactaaggaaagtctatgtcactagcagagaagaggcaccaaagacaaaaaatcaaaaaagaaaaaataccagaaacagtttgacatttgattttttttaagtagtcctcgtgggaaaaatcagaactttgttgtacttccttacattcatttcctgattacatgatgcttttgttttgaatcacgtgtggagggtgtcaccaaaatctttagatgctttgtccttatgtggatctggacccagatcctagcaaatgttaccatctctgcctcacaaagatctgacagaatgcaggcagttggggctatccttaggagagacagctctccttcgcagtagatgcacctgggtgataaatccaactctgaccacaaggtggcaaaagagtaaatgacaattcctcatatatgttttgtatgtttatataaaactattggtttatataaaatgctctctaaaaatattaagaaaaacgtgtgctccttcacacatttttgggttgatgtctgatattttgcatcacaaatgtcaattggctacaaataatgtaatttgtgacaaatgttaatattcaaaaataaaactgttatgtcactatttcacatgaatccggtgaaacctaaataccttagtgacttgagagccaccatcatctgttttaaaaatgtataactgagctcttctttgatacttggaagttgtacattttcccttttctcagctcttaattccattctgtttttccaacagaattttgtctcaataattgtctgttttttcacttgaaatgtttttgattatcctatcgtatttctctgcagcaaaaatgtgtatatatttttcaatttaaatgctctttaaatgttcctctgattataaggctctaagtgttgtttaaaaatttgctcttgtttgaattatcatgacaattagtattagaataaa

SEQ ID NO: 12735 - protein, 116 aa, Homo sapiens; identical to SEQ ID NO: 2252

SEQ ID NO: 12736 - DNA, 1916 bp, Homo sapiens
atgagaacccagcgcggagcggcggtggcggcaacagcgacgagctttaaggtgggagagaactggaggcaggaactgcgggttatctaccagtgcttcgtgtggtgtggaaccccagagaccaggaaaagcaaggcaaagtcctgcatctgccatgtgtgtggcacccatctgaacagactccactcttgcctttcctgtgtcttctttggctgcttcacggagaaacacattcacgagcacgcagagacgaaacaacacaacttagcagtagacctgtattacggaggtatatactgctttatgtgtaaggactatgtatatgacaaagacattgagcaaattgccaaagaagagcaaggagaagctttgaaattacaagcctccacctcaacagaggtttctcaccagcagtgttcagtgccaggccttggtgagaaattcccaacctgggaaacaaccaaaccagaattagaactgctggggcacaacccgaggagaagaagaatcacctccagctttacgatcggtttaagaggactcatcaatcttggcaacacgtgctttatgaactgcattgtccaggccctcacccacacgccgatactgagagatttctttctctctgacaggcaccgatgtgagatgccgagtcccgagttgtgtctggtctgtgagatgtcgtcgctgtttcgggagttgtattctggaaacccgtctcctcatgtgccctataagttactgcacctggtgtggatacatgcccgccatttagcagggtacaggcaacaggatgcccacgagttcctcattgcagcgttagatgtcctgcacaggcactgcaaaggtgatgatgtcgggaaggcggccaacaatcccaaccactgtaactgcatcatagaccaaatcttcacaggtggcctgcagtctgatgtcacctgtcaagcctgccatggcgtctccaccacgatagacccatgctgggacattagtttggacttgcctggctcttgcacctccttctggcccatgagcccagggagggagagcagtgtgaacggggaaagccacataccaggaatcaccaccctcacggactgcttgcggaggtttacgaggccagagcacttaggaagcagtgccaaaatcaaatgtggtagttgccaaagctaccaggaatctaccaaacagctcacaatgaataaattacctgtcgttgcctgttttcatttcaaacggtttgaacattcagcgaaacagaggcgcaagatcactacatacatttcctttcctctggagctggatatgacgccgtttatggcctcaagtaaagagagcagaatgaatggacaattgcagctgccaaccaatagtggaaacaacgaaaataagtattccttgtttgctgtggttaatcaccaaggaaccttggagagtggccactataccagcttcatccggcaccacaaggaccagtggttcaagtgtgatgatgccgtcatcactaaggccagtattaaggacgtactggacagtgaagggtatttactgttctatcacaaacaggtgctagaacatgagtcagaaaaagtgaaagaaatgaacacacaagcctactgaagtgacacacagacctacctgcaatggaagatgacgacaccaatactacaactggcatcgagatctaaaggacctacttgaccatggcccatgggcctgacagagtaagaattgaacagtacccagtgtccaaaaggtcctgattggaagagaaatagaaggggagggagaagaggctctagtctaagcagttgatgaaagggaaattaaatggtagaaacactctgggtgaggaaggcaggagcaggaaaatgctgacactggtacatatcctatattcctccaaaagattgtgt

SEQ ID NO: 12737 - protein, 539 aa, Homo sapiens
MRTQRGAAVAATATSFKVGENWRQELRVIYQCFVWCGTPETRKSKAKSCICHVCGTHLNRLHSCLSCVFFGCFTEKHIHEHAETKQHNLAVDLYYGGIYCFMCKDYVYDKDIEQIAKEEQGEALKLQASTSTEVSHQQCSVPGLGEKFPTWETTKPELELLGHNPRRRRITSSFTIGLRGLINLGNTCFMNCIVQALTHTPILRDFFLSDRHRCEMPSPELCLVCEMSSLFRELYSGNPSPHVPYKLLHLVWIHARHLAGYRQQDAHEFLIAALDVLHRHCKGDDVGKAANNPNHCNCIIDQIFTGGLQSDVTCQACHGVSTTIDPCWDISLDLPGSCTSFWPMSPGRESSVNGESHIPGITTLTDCLRRFTRPEHLGSSAKIKCGSCQSYQESTKQLTMNKLPVVACFHFKRFEHSAKQRRKITTYISFPLELDMTPFMASSKESRMNGQLQLPTNSGNNENKYSLFAVVNHQGTLESGHYTSFIRHHKDQWFKCDDAVITKASIKDVLDSEGYLLFYHKQVLEHESEKVKEMNTQAY

SEQ ID NO: 12738 - DNA, 1136 bp, Homo sapiens
aattacctgtcgttgcctgttttcatttcaaacggtttgaacattcagcgaaacagaggcgcaagatcactacatacatttcctttcctctggagctggatatgacgccgtttatggcctcaagtaaagagagcagaatgaatggacaattgcagctgccaaccaatagtggaaacaacgaaaataagtattccttgtttgctgtggttaatcaccaaggaaccttggagagtggccactataccagcttcatccggcaccacaaggaccagtggttcaagtgtgatgatgccgtcatcactaaggccagtattaaggacgtactggacagtgaagggtatttactgttctatcacaaacaggtgctagaacatgagtcagaaaaagtgaaagaaatgaacacacaagcctactgaagtgacacacagacctacctgcaatggaagatgacgacaccaatactacaactggcatcgagatctaaaggacctacttgaccatggcccatgggcctgacagagtaagaattgaacagtacccagtgtccaaaaggtcctgattggaagagaaatagaaggggagggagaagaggctctagtctaagcagttgatgaaagggaaaaaaagtttctaaaaaatgtagcccattacatatatgggtatgaaagcagaaaagtggaggaggcagggatatcattgacaaacacctttgccagtttctttgtattcgtgattttttgtgctattaaatgcagtattaaaacaagaaaagcccacctgggctagtgaaaggagaggaaataagggggcttgtaaaaggggagccgtcgctccaaaagtagagaagacaagaaatgctgtaagataagcaaccaacgcagacaggcctcagctaagagtatagtgtgtgtgtgttaaaaaaaaaaaaaaaaaaaagaaaaaaaaaagctgtatgatatacttgagcaaatcaatgaacctctttgcgattgttttatcatctgtaaaatgcagataattcctaccttaaagggttattgttaaagataaaatgatataaaaatgtgtcaaagtataaagtaaaaggcttggaactttgtagggactcagtaaacgtttgttggatccaaacctga

SEQ ID NO: 12739 - protein, 104 aa, Homo sapiens
MTPFMASSKESRMNGQLQLPTNSGNNENKYSLFAVVNHQGTLESGHYTSFIRHHKDQWFKCDDAVITKASIKDVLDSEGYLLFYHKQVLEHESEKVKEMNTQAY

SEQ ID NO: 12740 - DNA, 5323 bp, Homo sapiens
gtcacatgagccgcgcgcccgcttcgctccccctcctccccggctgggctgtgtgaatgaagctctgccggctacgtggggcgctcactcaacttggtgtcctggacgccagagccgaccgagcgcgctgcccaccggcggcggacacgggctccgccgctccggacctcggcgacagagcaaatcagttgcctggagttcccagtgaagttgtacctgtgcccgtgcgataacgtcagtggaagctgccccgagtaagtgagggaaatctagaagtttggagcataaaaaaccagcacgaatcaactttacataaacttcatacatttattagcaactgctcgggtttaacttcagggatgttaaatttcgcctagtcccacgggacgatgatcattacttcttaactgcacgcgaaataggagaagaaaaaaggcaaatcaaaacagactgtcccaggtctcagagaagtcatcggagcgctttttcctgctgaattcaccctaggagtttgtttggggctttagccccttggagaaaacagggccacatagctgcctttctatcaagtctccctacaaaactgagaggctctgggaaactcagcctgtgaccccagcgtgggtgaagataggatcaagatggccatgtggcagggtgccatggataacagaggctttcagcaggggagttttagtagcttccagaacagctccagtgatgaagacctgatggacattccagcaaccgctatggatttctccatgagagatgatgttcctcccttagaccgagaagtaggagaggacaagtcgtacaatggtggaggaataggttcttcaaataggatcatggacttcttggaggagccaatccctggtgtagggacctatgatgatttcaatacaattgattgggtgagagagaagtctcgagaccgggataggcaccgagagattaccaataaaagcaaagagtcaacatgggccttaattcacagtgtgagtgatgctttttccggctggttgttgatgctccttattgggcttttatcaggttcgttagctggtttgatagacatctctgctcattggatgacagacttaaaagaaggtatatgcacagggggattctggtttaaccatgaacattgttgctggaactctgagcatgtcacctttgaagagagagacaaatgtccagagtggaatagttggtcccagcttatcatcagcacagatgagggagcctttgcctacatagtcaattatttcatgtacgtcctctgggctctcctatttgccttccttgccgtatctcttgtcaaggtgtttgcgccttatgcctgtggctctggaatccctgagataaaaactatcttgagtggtttcattattaggggctatttgggtaagtggactctggttatcaaaaccatcaccttggtgctggcagtgtcgtctggcttgagcctgggcaaagagggccctctagtgcacgtggcttgctgctgtgggaacatcctgtgccactgcttcaacaaatacaggaagaatgaagccaagcgcagagaggtcttgtcggctgcagcagcagctggtgtatctgtagcctttggagcacctataggtggagtattattcagccttgaagaggtcagctactattttcccctcaaaacattgtggcgttcattctttgctgccttggtggcagcattcactctacgctccatcaatccatttgggaacagccgcctggtactattttatgtggagtttcacaccccatggcatctctttgagctcgtgccattcattctgctgggcatatttggtggtctgtggggagcactgtttatccgcacaaacattgcctggtgtcggaagcgaaagaccacccagttgggcaagtatcctgttatagaggtactcgtcgtgacagccatcactgccatcctggctttccccaatgaatacactcggatgagcacaagtgagctcatttctgagctgtttaatgactgtggccttctggactcctccaagctctgtgattatgagaaccgtttcaacacaagcaaagggggtgaactgcctgacagaccggctggcgtgggagtctacagtgcaatgtggcagctggctttaacactcatactgaaaattgtcattactatattcacctttggcatgaagatcccttctggcctctttatccctagcatggctgttggtgctatagcaggtcgacttctaggagtaggaatggaacagctggcttattaccaccaggaatggaccgtcttcaatagctggtgtagtcagggagctgattgcatcacccccggcctttatgcaatggttggggctgcagcctgcttaggtggggtgactcggatgactgtttctcttgttgtcataatgtttgaactgactggtggcttagaatacatcgtgcctctgatggctgcagccatgacaagcaagtgggtggcagatgctcttgggcgggagggcatctatgatgcccacatccgtctcaatggatacccctttcttgaagccaaagaagagtttgctcataagaccctggcaatggatgtgatgaaaccccggagaaatgatcctttgttgactgtccttactcaggacagtatgactgtggaagatgtagagaccataatcagtgaaaccacttacagtggcttcccagtggtggtatcccgggagtcccaaagacttgtgggctttgtcctccgaagagatctcattatttcaattgaaaatgctcgaaagaaacaggatggggttgttagcacttccatcatttatttcacggagcattctcctccattgccaccatacactccacccactctaaagcttcggaacatcctcgatctcagccccttcactgtgactgaccttacacccatggagatcgtagtggatattttccgaaagctgggactgcggcagtgcctggttacacacaacgggcgattgcttggaatcattaccaaaaaggatgtgttaaagcatatagcacagatggcgaaccaagatcctgattccattctcttcaactagaatcatagagttctggatgtaaagcgggaaggacattacagaccatggatatgttgtattaactgggtacccaaaacacattttccatatttggatggtgaagtcacattagtgtgttgtctctttcctacaagttaaccagttgcactacataatctctggaaattaattttctctttaggagaaattatagttaggcttccatgatgttacattaggaagatatcatgaaagaataaataagattgctatggtttaattatatttgctttttaaaagatttttttaacttaaaaagtagttagccaatatgcaatcactgaaaactatgcaagagaaattccaaccgtcctgacctataacctgtaggaaaccgacgaaaaagtcactcttttgggatctaactgttgttactggaagacgaagtgtaaactaaggggctttgcttttcaaaccagagaaaggaaagccagaaggaaaagagtaatggtattttctagactgtgaagattcagttcaaatgttatccttgttcctgttacaatatttagcattattagtttgttatgtgtgtatgtttatgttaattttaatttctgattataagacaatgctgctttggttaatctcttctaaatgaatttagagagattgacttttatagcttgcttgttgctggtactcttttgaagtgcacaaagataagttatagagctttctccttgtctgcaaaaacggtaattttccaggtggcatttgttagctggtagacaaggactttgccgtgaatttgttagtagcaaggaatgatttcttccagcttccttgaaatgaataattagtaaacttctaagcaaagtcaatgactaggagtttcacatgtttgtgaggtcctaactaattctcttacccagatgccacctccatgaatgatggtgctttaggcttctggaatatgtaaaaacagcaaagggaaccaagtctagactgcatactggtaaaccagggaagactcagaactgcatatgcatcctcatgcattcctttgtaaagaccaccagtactaaaataactggacactcattgtacctcccagcgataagtatgtgtaacaggccagtgtgttgtccccatgatcatgaattaggcttgggatgcttccaaatatattcaaggtgttggaacaggataggcagctgtgactccctcaagagtccttagaattctaaataaaatgcagagccatcctaagacacaggggtatggacaaggcctggtgacaccaaaggtgcttgtatccaattgaaaaggtgcctgtctcaatttcataccacctttattgcagttaaaaaaaaatcacactctggggacacttggtggaattacagagccaccatcatcattccaaccactatttcattttctgtagttttacctgtgtgcaattactccccctccattctgttccacttcttactccttagtaccaaatcctctgtttgggattgagcgctgctcctggttaatcattcctactacaaaaaaaaataactcccagggctagttaaattgtaaaccaaggctcagcagtctcacaacacatggaccagaggtgacacacagccatttcctttgccatgtggcccagttgctgctgccatgcctccatttccacactggatgcctacggcagtgagatttcactgccggggtaagagttcagcctggatgattttatagctctgttcctagcacttctcatcatccttccagcccagaatcagcggtcattctgcatattcccaccaaccctctacccccaaacacttcagtgtacctcattttaagagttgctgatccctgattctaggacgtttttacccatagttcttgtctttccaaaatctgaaattcttttttttgctcagaactgggtagccaagggttattttatttttatctttaaaataatcaaggcagtcgctagagtttctccttgtgaatagatcactctagcattttaatgaaaaagaaaaaaatctttctggggtatgttgtatcatagtaatggctcagtaaccacatattttgtcctttccatgtcactgattccttcatatgagactatttggcttgactaccctgtatattgtgtagaaatcaaagttcttatctgtacatttctggtccaatacctgtcttattagttgtccttccccactaaagtttgc

SEQ ID NO: 12741 - protein, 816 aa, Homo sapiens
MAMWQGAMDNRGFQQGSFSSFQNSSSDEDLMDIPATAMDFSMRDDVPPLDREVGEDKSYNGGGIGSSNRIMDFLEEPIPGVGTYDDFNTIDWVREKSRDRDRHREITNKSKESTWALIHSVSDAFSGWLLMLLIGLLSGSLAGLIDISAHWMTDLKEGICTGGFWFNHEHCCWNSEHVTFEERDKCPEWNSWSQLIISTDEGAFAYIVNYFMYVLWALLFAFLAVSLVKVFAPYACGSGIPEIKTILSGFIIRGYLGKWTLVIKTITLVLAVSSGLSLGKEGPLVHVACCCGNILCHCFNKYRKNEAKRREVLSAAAAAGVSVAFGAPIGGVLFSLEEVSYYFPLKTLWRSFFAALVAAFTLRSINPFGNSRLVLFYVEFHTPWHLFELVPFILLGIFGGLWGALFIRTNIAWCRKRKTTQLGKYPVIEVLVVTAITAILAFPNEYTRMSTSELISELFNDCGLLDSSKLCDYENRFNTSKGGELPDRPAGVGVYSAMWQLALTLILKIVITIFTFGMKIPSGLFIPSMAVGAIAGRLLGVGMEQLAYYHQEWTVFNSWCSQGADCITPGLYAMVGAAACLGGVTRMTVSLVVIMFELTGGLEYIVPLMAAAMTSKWVADALGREGIYDAHIRLNGYPFLEAKEEFAHKTLAMDVMKPRRNDPLLTVLTQDSMTVEDVETIISETTYSGFPVVVSRESQRLVGFVLRRDLIISIENARKKQDGVVSTSIIYFTEHSPPLPPYTPPTLKLRNILDLSPFTVTDLTPMEIVVDIFRKLGLRQCLVTHNGRLLGIITKKDVLKHIAQMANQDPDSILFN

SEQ ID NO: 12742 - DNA, 5014 bp, Homo sapiens
gtgtgaatgaagctctgccggctacgtggggcgctcactcaacttggtgtcctggacgccagagccgaccgagcgcgctgcccaccggcggcggacacgggctccgccgctccggacctcggcgacagagcaaatcagttgcctggagttcccagtgaagttgtacctgtgcccgtgcgataacgtcagtggaagctgccccgagtttggggctttagccccttggagaaaacagggccacatagctgcctttctatcaagtctccctacaaaactgagaggctctgggaaactcagcctgtgaccccagcgtgggtgaagataggatcaagatggccatgtggcagggtgccatggataacagaggctttcagcaggggagttttagtagcttccagaacagctccagtgatgaagacctgatggacattccagcaaccgctatggatttctccatgagagatgatgttcctcccttagaccgagaagtaggagaggacaagtcgtacaatggtggaggaataggttcttcaaataggatcatggacttcttggaggagccaatccctggtgtagggacctatgatgatttcaatacaattgattgggtgagagagaagtctcgagaccgggataggcaccgagagattaccaataaaagcaaagagtcaacatgggccttaattcacagtgtgagtgatgctttttccggctggttgttgatgctccttattgggcttttatcaggttcgttagctggtttgatagacatctctgctcattggatgacagacttaaaagaaggtatatgcacagggggattctggtttaaccatgaacattgttgctggaactctgagcatgtcacctttgaagagagagacaaatgtccagagtggaatagttggtcccagcttatcatcagcacagatgagggagcctttgcctacatagtcaattatttcatgtacgtcctctgggctctcctatttgccttccttgccgtatctcttgtcaaggtgtttgcgccttatgcctgtggctctggaatccctgagataaaaactatcttgagtggtttcattattaggggctatttgggtaagtggactctggttatcaaaaccatcaccttggtgctggcagtgtcgtctggcttgagcctgggcaaagagggccctctagtgcacgtggcttgctgctgtgggaacatcctgtgccactgcttcaacaaatacaggaagaatgaagccaagcgcagagaggtcttgtcggctgcagcagcagctggtgtatctgtagcctttggagcacctataggtggagtattattcagccttgaagaggtcagctactattttcccctcaaaacattgtggcgttcattctttgctgccttggtggcagcattcactctacgctccatcaatccatttgggaacagccgcctggtactattttatgtggagtttcacaccccatggcatctctttgagctcgtgccattcattctgctgggcatatttggtggtctgtggggagcactgtttatccgcacaaacattgcctggtgtcggaagcgaaagaccacccagttgggcaagtatcctgttatagaggtactcgtcgtgacagccatcactgccatcctggctttccccaatgaatacactcggatgagcacaagtgagctcatttctgagctgtttaatgactgtggccttctggactcctccaagctctgtgattatgagaaccgtttcaacacaagcaaagggggtgaactgcctgacagaccggctggcgtgggagtctacagtgcaatgtggcagctggctttaacactcatactgaaaattgtcattactatattcacctttggcatgaagatcccttctggcctctttatccctagcatggctgttggtgctatagcaggtcgacttctaggagtaggaatggaacagctggcttattaccaccaggaatggaccgtcttcaatagctggtgtagtcagggagctgattgcatcacccccggcctttatgcaatggttggggctgcagcctgcttaggtggggtgactcggatgactgtttctcttgttgtcataatgtttgaactgactggtggcttagaatacatcgtgcctctgatggctgcagccatgacaagcaagtgggtggcagatgctcttgggcgggagggcatctatgatgcccacatccgtctcaatggatacccctttcttgaagccaaagaagagtttgctcataagaccctggcaatggatgtgatgaaaccccggagaaatgatcctttgttgactgtccttactcaggacagtatgactgtggaagatgtagagaccataatcagtgaaaccacttacagtggcttcccagtggtggtatcccgggagtcccaaagacttgtgggctttgtcctccgaagagatctcattatttcaattgaaaatgctcgaaagaaacaggatggggttgttagcacttccatcatttatttcacggagcattctcctccattgccaccatacactccacccactctaaagcttcggaacatcctcgatctcagccccttcactgtgactgaccttacacccatggagatcgtagtggatattttccgaaagctgggactgcggcagtgcctggttacacacaacgggcgattgcttggaatcattaccaaaaaggatgtgttaaagcatatagcacagatggcgaaccaagatcctgattccattctcttcaactagaatcatagagttctggatgtaaagcgggaaggacattacagaccatggatatgttgtattaactgggtacccaaaacacattttccatatttggatggtgaagtcacattagtgtgttgtctctttcctacaagttaaccagttgcactacataatctctggaaattaattttctctttaggagaaattatagttaggcttccatgatgttacattaggaagatatcatgaaagaataaataagattgctatggtttaattatatttgctttttaaaagatttttttaacttaaaaagtagttagccaatatgcaatcactgaaaactatgcaagagaaattccaaccgtcctgacctataacctgtaggaaaccgacgaaaaagtcactcttttgggatctaactgttgttactggaagacgaagtgtaaactaaggggctttgcttttcaaaccagagaaaggaaagccagaaggaaaagagtaatggtattttctagactgtgaagattcagttcaaatgttatccttgttcctgttacaatatttagcattattagtttgttatgtgtgtatgtttatgttaattttaatttctgattataagacaatgctgctttggttaatctcttctaaatgaatttagagagattgacttttatagcttgcttgttgctggtactcttttgaagtgcacaaagataagttatagagctttctccttgtctgcaaaaacggtaattttccaggtggcatttgttagctggtagacaaggactttgccgtgaatttgttagtagcaaggaatgatttcttccagcttccttgaaatgaataattagtaaacttctaagcaaagtcaatgactaggagtttcacatgtttgtgaggtcctaactaattctcttacccagatgccacctccatgaatgatggtgctttaggcttctggaatatgtaaaaacagcaaagggaaccaagtctagactgcatactggtaaaccagggaagactcagaactgcatatgcatcctcatgcattcctttgtaaagaccaccagtactaaaataactggacactcattgtacctcccagcgataagtatgtgtaacaggccagtgtgttgtccccatgatcatgaattaggcttgggatgcttccaaatatattcaaggtgttggaacaggataggcagctgtgactccctcaagagtccttagaattctaaataaaatgcagagccatcctaagacacaggggtatggacaaggcctggtgacaccaaaggtgcttgtatccaattgaaaaggtgcctgtctcaatttcataccacctttattgcagttaaaaaaaaatcacactctggggacacttggtggaattacagagccaccatcatcattccaaccactatttcattttctgtagttttacctgtgtgcaattactccccctccattctgttccacttcttactccttagtaccaaatcctctgtttgggattgagcgctgctcctggttaatcattcctactacaaaaaaaaataactcccagggctagttaaattgtaaaccaaggctcagcagtctcacaacacatggaccagaggtgacacacagccatttcctttgccatgtggcccagttgctgctgccatgcctccatttccacactggatgcctacggcagtgagatttcactgccggggtaagagttcagcctggatgattttatagctctgttcctagcacttctcatcatccttccagcccagaatcagcggtcattctgcatattcccaccaaccctctacccccaaacacttcagtgtacctcattttaagagttgctgatccctgattctaggacgtttttacccatagttcttgtctttccaaaatctgaaattcttttttttgctcagaactgggtagccaagggttattttatttttatctttaaaataatcaaggcagtcgctagagtttctccttgtgaatagatcactctagcattttaatgaaaaagaaaaaaatctttctggggtatgttgtatcatagtaatggctcagtaaccacatattttgtcctttccatgtcactgattccttcatatgagactatttggcttgactaccctgtatattgtgtagaaatcaaagttcttatctgtacatttctggtccaatacctgtcttattagttgtccttccccactaaagtttgc

SEQ ID NO: 12743 - protein, 816 aa, Homo sapiens; identical to SEQ ID NO: 12741

SEQ ID NO: 12744 - DNA, 448 bp, Homo sapiens
cagagcaaatcagttgcctggagttcccagtgaagttgtacctgtgcccgtgcgataacgtcagtggaagctgccccgagtttggggctttagccccttggagaaaacagggccacatagctgcctttctatcaagtctccctacaaaactgagaggctctgggaaactcagcctgtgaccccagcgtgggtgaagataggatcaagatggccatgtggcagggtgccatggataacagaggctttcagcaggggagttttagtagcttccagaacagctccagtgatgaagacctgatggacattccagcaaccgctatggatttctccatgagagatgatgttcctcccttagaccgagaagtaggaggtatcattattggtgatgataatttatcttaattttttaaaatttatgtacaataaaattttatttttttttaatttt

SEQ ID NO: 12745 - protein, 64 aa, Homo sapiens
MAMWQGAMDNRGFQQGSFSSFQNSSSDEDLMDIPATAMDFSMRDDVPPLDREVGGIIIGDDNLS

SEQ ID NO: 12746 - DNA, 680 bp, Homo sapiens
cacattctgaccgccagggaacactggtagttctttaggtggcgtttgttgctgtgaaaggcagagaatgcagcaagtgcccttctaaagcacttcagactggggcttcttttgtaaaagctccccaacctgaatgaccaaatgcgggctgccaaggttatttcttccttgaggcagaaaaaaagaaaactgtgattgaagaggacaagtcgtacaatggtggaggaataggttcttcaaataggatcatggacttcttggaggagccaatccctggtgtagggacctatgatgatttcaatacaattgattgggtgagagagaagtctcgagaccgggataggcaccgagagattaccaataaaagcaaagagtcaacatgggccttaattcacagtgtgagtgatgctttttccggctggttgttgatgctccttattgggcttttatcaggtatggtaaactgttagttttcaaaacaaatctcctaaaattgtggtatgtctctcccgtaagtcctgagctgagtcacgtactgtgttttcctgtttttctaccttaaatgaattgctggtgaaccttatagaagctcaatgtccccatctgtaaagggtactaatacctgcaattcttaccttgaataaatgaggaaatgcatttaaatgcattttgtacactat

SEQ ID NO: 12747 - protein, 73 aa, Homo sapiens
MDFLEEPIPGVGTYDDFNTIDWVREKSRDRDRHREITNKSKESTWALIHSVSDAFSGWLLMLLIGLLSGMVNC

SEQ ID NO: 12748 - DNA, 585 bp, Homo sapiens
agttctttaggtggcgtttgttgctgtgaaaggcagagaatgcagcaagtgcccttctaaagcacttcagactggggcttcttttgtaaaagctccccaacctgaatgaccaaatgcgggctgccaaggttatttcttccttgaggcagaaaaaaagaaaactgtgattgaagaggacaagtcgtacaatggtggaggaataggttcttcaaataggatcatggacttcttggaggagccaatccctggtgtagggacctatgatgatttcaatacaattgattgggtgagagagaagtctcgagaccgggataggcaccgagagattaccaataaaagcaaagagtcaacatgggccttaattcacagtgtgagtgatgctttttccggctggttgttgatgctccttattgggcttttatcaggttcgttagctggtttgatagacatctctgctcattggatgacagacttaaaagaaggtatatgcacagggggattctggtttaaccatgaacattgttgctggaactctgagcatgtcacctttgaagagagagacaaatgtccagagtggaatagttg

SEQ ID NO: 12749 - protein, 120 aa, Homo sapiens
MDFLEEPIPGVGTYDDFNTIDWVREKSRDRDRHREITNKSKESTWALIHSVSDAFSGWLLMLLIGLLSGSLAGLIDISAHWMTDLKEGICTGGFWFNHEHCCWNSEHVTFEERDKCPEWN

SEQ ID NO: 12750 - DNA, 4763 bp, Homo sapiens
tgatgtgatatggctgcaagtgcctttgacccttttgtctcccttccataaactgaaatacctaagctgctccaacctcctttttgtcttttgtttcataaatcctttcccattgcacatcaactcctgtctctctttgtactgtcactctcatctgttgctttccattcacactgcctttagccactcatcattttgtgcctacaccacagaaacctctgaatgtaatggatgttcctaccagaggacaagtcgtacaatggtggaggaataggttcttcaaataggatcatggacttcttggaggagccaatccctggtgtagggacctatgatgatttcaatacaattgattgggtgagagagaagtctcgagaccgggataggcaccgagagattaccaataaaagcaaagagtcaacatgggccttaattcacagtgtgagtgatgctttttccggctggttgttgatgctccttattgggcttttatcaggttcgttagctggtttgatagacatctctgctcattggatgacagacttaaaagaaggtatatgcacagggggattctggtttaaccatgaacattgttgctggaactctgagcatgtcacctttgaagagagagacaaatgtccagagtggaatagttggtcccagcttatcatcagcacagatgagggagcctttgcctacatagtcaattatttcatgtacgtcctctgggctctcctatttgccttccttgccgtatctcttgtcaaggtgtttgcgccttatgcctgtggctctggaatccctgagataaaaactatcttgagtggtttcattattaggggctatttgggtaagtggactctggttatcaaaaccatcaccttggtgctggcagtgtcgtctggcttgagcctgggcaaagagggccctctagtgcacgtggcttgctgctgtgggaacatcctgtgccactgcttcaacaaatacaggaagaatgaagccaagcgcagagaggtcttgtcggctgcagcagcagctggtgtatctgtagcctttggagcacctataggtggagtattattcagccttgaagaggtcagctactattttcccctcaaaacattgtggcgttcattctttgctgccttggtggcagcattcactctacgctccatcaatccatttgggaacagccgcctggtactattttatgtggagtttcacaccccatggcatctctttgagctcgtgccattcattctgctgggcatatttggtggtctgtggggagcactgtttatccgcacaaacattgcctggtgtcggaagcgaaagaccacccagttgggcaagtatcctgttatagaggtactcgtcgtgacagccatcactgccatcctggctttccccaatgaatacactcggatgagcacaagtgagctcatttctgagctgtttaatgactgtggccttctggactcctccaagctctgtgattatgagaaccgtttcaacacaagcaaagggggtgaactgcctgacagaccggctggcgtgggagtctacagtgcaatgtggcagctggctttaacactcatactgaaaattgtcattactatattcacctttggcatgaagatcccttctggcctctttatccctagcatggctgttggtgctatagcaggtcgacttctaggagtaggaatggaacagctggcttattaccaccaggaatggaccgtcttcaatagctggtgtagtcagggagctgattgcatcacccccggcctttatgcaatggttggggctgcagcctgcttaggtggggtgactcggatgactgtttctcttgttgtcataatgtttgaactgactggtggcttagaatacatcgtgcctctgatggctgcagccatgacaagcaagtgggtggcagatgctcttgggcgggagggcatctatgatgcccacatccgtctcaatggatacccctttcttgaagccaaagaagagtttgctcataagaccctggcaatggatgtgatgaaaccccggagaaatgatcctttgttgactgtccttactcaggacagtatgactgtggaagatgtagagaccataatcagtgaaaccacttacagtggcttcccagtggtggtatcccgggagtcccaaagacttgtgggctttgtcctccgaagagatctcattatttcaattgaaaatgctcgaaagaaacaggatggggttgttagcacttccatcatttatttcacggagcattctcctccattgccaccatacactccacccactctaaagcttcggaacatcctcgatctcagccccttcactgtgactgaccttacacccatggagatcgtagtggatattttccgaaagctgggactgcggcagtgcctggttacacacaacgggcgattgcttggaatcattaccaaaaaggatgtgttaaagcatatagcacagatggcgaaccaagatcctgattccattctcttcaactagaatcatagagttctggatgtaaagcgggaaggacattacagaccatggatatgttgtattaactgggtacccaaaacacattttccatatttggatggtgaagtcacattagtgtgttgtctctttcctacaagttaaccagttgcactacataatctctggaaattaattttctctttaggagaaattatagttaggcttccatgatgttacattaggaagatatcatgaaagaataaataagattgctatggtttaattatatttgctttttaaaagatttttttaacttaaaaagtagttagccaatatgcaatcactgaaaactatgcaagagaaattccaaccgtcctgacctataacctgtaggaaaccgacgaaaaagtcactcttttgggatctaactgttgttactggaagacgaagtgtaaactaaggggctttgcttttcaaaccagagaaaggaaagccagaaggaaaagagtaatggtattttctagactgtgaagattcagttcaaatgttatccttgttcctgttacaatatttagcattattagtttgttatgtgtgtatgtttatgttaattttaatttctgattataagacaatgctgctttggttaatctcttctaaatgaatttagagagattgacttttatagcttgcttgttgctggtactcttttgaagtgcacaaagataagttatagagctttctccttgtctgcaaaaacggtaattttccaggtggcatttgttagctggtagacaaggactttgccgtgaatttgttagtagcaaggaatgatttcttccagcttccttgaaatgaataattagtaaacttctaagcaaagtcaatgactaggagtttcacatgtttgtgaggtcctaactaattctcttacccagatgccacctccatgaatgatggtgctttaggcttctggaatatgtaaaaacagcaaagggaaccaagtctagactgcatactggtaaaccagggaagactcagaactgcatatgcatcctcatgcattcctttgtaaagaccaccagtactaaaataactggacactcattgtacctcccagcgataagtatgtgtaacaggccagtgtgttgtccccatgatcatgaattaggcttgggatgcttccaaatatattcaaggtgttggaacaggataggcagctgtgactccctcaagagtccttagaattctaaataaaatgcagagccatcctaagacacaggggtatggacaaggcctggtgacaccaaaggtgcttgtatccaattgaaaaggtgcctgtctcaatttcataccacctttattgcagttaaaaaaaaatcacactctggggacacttggtggaattacagagccaccatcatcattccaaccactatttcattttctgtagttttacctgtgtgcaattactccccctccattctgttccacttcttactccttagtaccaaatcctctgtttgggattgagcgctgctcctggttaatcattcctactacaaaaaaaaataactcccagggctagttaaattgtaaaccaaggctcagcagtctcacaacacatggaccagaggtgacacacagccatttcctttgccatgtggcccagttgctgctgccatgcctccatttccacactggatgcctacggcagtgagatttcactgccggggtaagagttcagcctggatgattttatagctctgttcctagcacttctcatcatccttccagcccagaatcagcggtcattctgcatattcccaccaaccctctacccccaaacacttcagtgtacctcattttaagagttgctgatccctgattctaggacgtttttacccatagttcttgtctttccaaaatctgaaattcttttttttgctcagaactgggtagccaagggttattttatttttatctttaaaataatcaaggcagtcgctagagtttctccttgtgaatagatcactctagcattttaatgaaaaagaaaaaaatctttctggggtatgttgtatcatagtaatggctcagtaaccacatattttgtcctttccatgtcactgattccttcatatgagactatttggcttgactaccctgtatattgtgtagaaatcaaagttcttatctgtacatttctggtccaatacctgtcttattagttgtccttccccactaaagtttgc

SEQ ID NO: 12751 - protein, 766 aa, Homo sapiens
MFLPEDKSYNGGGIGSSNRIMDFLEEPIPGVGTYDDFNTIDWVREKSRDRDRHREITNKSKESTWALIHSVSDAFSGWLLMLLIGLLSGSLAGLIDISAHWMTDLKEGICTGGFWFNHEHCCWNSEHVTFEERDKCPEWNSWSQLIISTDEGAFAYIVNYFMYVLWALLFAFLAVSLVKVFAPYACGSGIPEIKTILSGFIIRGYLGKWTLVIKTITLVLAVSSGLSLGKEGPLVHVACCCGNILCHCFNKYRKNEAKRREVLSAAAAAGVSVAFGAPIGGVLFSLEEVSYYFPLKTLWRSFFAALVAAFTLRSINPFGNSRLVLFYVEFHTPWHLFELVPFILLGIFGGLWGALFIRTNIAWCRKRKTTQLGKYPVIEVLVVTAITAILAFPNEYTRMSTSELISELFNDCGLLDSSKLCDYENRFNTSKGGELPDRPAGVGVYSAMWQLALTLILKIVITIFTFGMKIPSGLFIPSMAVGAIAGRLLGVGMEQLAYYHQEWTVFNSWCSQGADCITPGLYAMVGAAACLGGVTRMTVSLVVIMFELTGGLEYIVPLMAAAMTSKWVADALGREGIYDAHIRLNGYPFLEAKEEFAHKTLAMDVMKPRRNDPLLTVLTQDSMTVEDVETIISETTYSGFPVVVSRESQRLVGFVLRRDLIISIENARKKQDGVVSTSIIYFTEHSPPLPPYTPPTLKLRNILDLSPFTVTDLTPMEIVVDIFRKLGLRQCLVTHNGRLLGIITKKDVLKHIAQMANQDPDSILFN

SEQ ID NO: 12752 - DNA, 2067 bp, Homo sapiens
tcttttgggatctaactgttgttactggaagacgaagtgtaaactaaggggctttgcttttcaaaccagagaaaggaaagccagaaggaaaagagtaatggtattttctagactgtgaagattcagttcaaatgttatccttgttcctgttacaatatttagcattattagtttgttatgtgtgtatgtttatgttaattttaatttctgattataagacaatgctgctttggttaatctcttctaaatgaatttagagagattgacttttatagcttgcttgttgctggtactcttttgaagtgcacaaagataagttatagagctttctccttgtctgcaaaaacggtaattttccaggtggcatttgttagctggtagacaaggactttgccgtgaatttgttagtagcaaggaatgatttcttccagcttccttgaaatgaataattagtaaacttctaagcaaagtcaatgactaggagtttcacatgtttgtgaggtcctaactaattctcttacccagatgccacctccatgaatgatggtgctttaggcttctggaatatgtaaaaacagcaaagggaaccaagtctagactgcatactggtaaaccagggaagactcagaactgcatatgcatcctcatgcattcctttgtaaagaccaccagtactaaaataactggacactcattgtacctcccagcgataagtatgtgtaacaggccagtgtgttgtccccatgatcatgaattaggcttgggatgcttccaaatatattcaaggtgttggaacaggataggcagctgtgactccctcaagagtccttagaattctaaataaaatgcagagccatcctaagacacaggggtatggacaaggcctggtgacaccaaaggtgcttgtatccaattgaaaaggtgcctgtctcaatttcataccacctttattgcagttaaaaaaaaatcacactctggggacacttggtggaattacagagccaccatcatcattccaaccactatttcattttctgtagttttacctgtgtgcaattactccccctccattctgttccacttcttactccttagtaccaaatcctctgtttgggattgagcgctgctcctggttaatcattcctactacaaaaaaaaataactcccagggctagttaaattgtaaaccaaggctcagcagtctcacaacacatggaccagaggtgacacacagccatttcctttgccatgtggcccagttgctgctgccatgcctccatttccacactggatgcctacggcagtgagatttcactgccggggtaagagttcagcctggatgattttatagctctgttcctagcacttctcatcatccttccagcccagaatcagcggtcattctgcatattcccaccaaccctctacccccaaacacttcagtgtacctcattttaagagttgctgatccctgattctaggacgtttttacccatagttcttgtctttccaaaatctgaaattcttttttttgctcagaactgggtagccaagggttattttatttttatctttaaaataatcaaggcagtcgctagagtttctccttgtgaatagatcactctagcattttaatgaaaaagaaaaaaatctttctggggtatgttgtatcatagtaatggctcagtaaccacatattttgtcctttccatgtcactgattccttcatatgagactatttggcttgactaccctgtatattgtgtagaaatcaaagttcttatctgtacatttctggtccaatacctgtcttattagttgtccttccccactaaagtttgcaaaacagaaaatgttactatttctggtatttaatgacaatgaaaggtttggtcatatttcatagtgcagtagcgataaggagggtgtctcaagtttgcttttgtgtttcttctaggctttgttcttgattttagacagatgagccagtgttaaggtgctacttcagagaataaattagagaaatcagatttgtaattatgcatgtaataaagcacagccttatcc

SEQ ID NO: 12753 - protein, 61 aa, Homo sapiens
MHSFVKTTSTKITGHSLYLPAISMCNRPVCCPHDHELGLGCFQIYSRCWNRIGSCDSLKSP

SEQ ID NO: 12754 - DNA, 2886 bp, Homo sapiens
ccagctggcagtcaaggctgtaggagggcatggagagttgaagaaaaaagcagtatcttgaggcagactggaagagtcatcacagcatccaaatcaacaagaaaacatcattccagggtcctacatgatggcgtactctgatactacaatgatgtctgatgatattgactggttacgcagccacaggggtgtgtgcaaggtagatctctacaacccagaaggacagcaagatcaggaccggaaagtgatatgctttgtcgatgtgtccaccctgaatgtagaagataaagattacaaggatgctgctagttccagctcagaaggcaacttaaacctgggaagtctggaagaaaaagagattatcgtgatcaaggacactgagaagaaagaccagtctaagacagagggatctgtatgccttttcaaacaagctccctctgatcctgtaagtgtcctcaactggcttctcagtgatctccagaagtatgccttgggtttccaacatgcactgagcccctcaacctctacctgtaaacataaagtaggagacacagagggcgaatatcacagagcatcctctgagaactgctacagtgtctatgccgatcaagtgaacatagattatttgatgaacagacctcaaaacctacgtctagaaatgacagcagctaaaaacaccaacaataatcaaagtccttcagctcctccagccaaacctcctagcactcagagagcagtcatttcccctgatggagaatgttctatagatgacctttccttctacgtcaaccgactatcttctctggtaatccagatggcccataaggaaatcaaggagaagttggaaggtaaaagcaaatgccttcatcattcaatctgtccatcccctgggaacaaagagagaatcagtccccgaactcctgcgagcaagattgcttctgaaatggcctatgaagctgtggaactgacagctgcagaaatgcgtggcactggagaggagtccagggaaggtggccagaaaagctttctatatagcgaattatccaacaagagcaaaagtggagacaaacagatgtcccagagagagagcaaagaatttgcagattccatcagcaaggggctcatggtttatgcaaatcaggtggcatctgacatgatggtctctctcatgaagaccttgaaagtgcacagctctgggaagccaattccagcatctgtggtcctgaagagggtgttgctaaggcacaccaaggagattgtgtccgatttgattgattcttgcatgaagaacctgcataatattactggggtcctgatgactgactcagactttgtctcagctgtcaagagaaatctgttcaaccagtggaaacaaaatgctacagacatcatggaggccatgctgaagcgcttggtcagtgcccttataggtgaggagaaggagactaagtctcagagtctgtcatatgcatctttaaaagctgggtcccatgatcccaaatgcaggaatcagagtcttgaattctccaccatgaaagctgaaatgaaagagagggacaaaggcaaaatgaaatcagacccatgcaagtcactgactagtgctgagaaagtcggtgaacacattctcaaagagggcctaaccatctggaaccaaaagcaaggaaactcatgcaaggtggctaccaaagcatgcagcaataaagatgagaaaggagaaaagatcaatgcttccacagattcactggccaaggacctgattgtctctgcccttaagctgatccagtaccatctgacccagcagactaagggcaaagatacatgtgaagaagactgtcctggttccaccatgggctatatggctcagagtactcaatatgaaaagtgtggaggtggccaaagtgccaaagcactttcagtgaaacaactagaatctcacagagcccctggaccatccacctgtcaaaaggagaaccaacacctggactcccagaaaatggatatgtcaaacatcgttctaatgctgattcagaaactgcttaatgagaaccccttcaaatgtgaggatccatgcgaaggtgagaacaagtgttctgagcccagggcaagcaaagcagcttccatgtccaacagatctgacaaagcggaagaacaatgccaggagcatcaagaacttgactgtaccagtgggatgaagcaagcgaacgggcaatttatagataaactagtagaatctgtgatgaagctctgccttatcatggctaagtatagcaacgatggggcagcccttgctgagttggaagaacaagcagcctcggcaaataagcccaatttcaggggcaccagatgcattcacagtggtgcaatgccacagaactatcaagactctcttggacatgaagtaattgtcaataatcagtgctctacaaatagcttgcagaagcagctccaggctgtcctgcagtggattgcagcctcccagtttaacgtgcccatgctctacttcatgggagataaggatggacaactggaaaagcttcctcaggtttcagctaaagcagcagagaaggggtacagtgtaggaggtcttcttcaagaggtcatgaagtttgccaaggaacggcaaccagatgaagctgtgggaaaggtggccaggaaacagttgctggactggctgctcgctaacctgtgagctgatccttgactcctcttcatcttagcccccctagcagcattccatcccagccagagcacccccaccatcaggccagtcaactgcacaatacacaactgtatttcccaatacacttgagcagttgcctgtgaatgtaagaggtgtcaacaaactgggaaataaaataaaaaaaaataataataaatgtgtcattg

SEQ ID NO: 12755 - protein, 854 aa, Homo sapiens; identical to SEQ ID NO: 2260

SEQ ID NO: 12756 - DNA, 2845 bp, Homo sapiens
tggtccaacagctgacaggggtggcagccaactgcaggtgcccaagaacttggcacttctcagttccatctaaaggggcacatctcccttctgggtgtcacgttttcagccaaacatctaaaagaacttcatcatcaagatgtctgatgatattgactggttacgcagccacaggggtgtgtgcaaggtagatctctacaacccagaaggacagcaagatcaggaccggaaagtgatatgctttgtcgatgtgtccaccctgaatgtagaagataaagattacaaggatgctgctagttccagctcagaaggcaacttaaacctgggaagtctggaagaaaaagagattatcgtgatcaaggacactgagaagaaagaccagtctaagacagagggatctgtatgccttttcaaacaagctccctctgatcctgtaagtgtcctcaactggcttctcagtgatctccagaagtatgccttgggtttccaacatgcactgagcccctcaacctctacctgtaaacataaagtaggagacacagagggcgaatatcacagagcatcctctgagaactgctacagtgtctatgccgatcaagtgaacatagattatttgatgaacagacctcaaaacctacgtctagaaatgacagcagctaaaaacaccaacaataatcaaagtccttcagctcctccagccaaacctcctagcactcagagagcagtcatttcccctgatggagaatgttctatagatgacctttccttctacgtcaaccgactatcttctctggtaatccagatggcccataaggaaatcaaggagaagttggaaggtaaaagcaaatgccttcatcattcaatctgtccatcccctgggaacaaagagagaatcagtccccgaactcctgcgagcaagattgcttctgaaatggcctatgaagctgtggaactgacagctgcagaaatgcgtggcactggagaggagtccagggaaggtggccagaaaagctttctatatagcgaattatccaacaagagcaaaagtggagacaaacagatgtcccagagagagagcaaagaatttgcagattccatcagcaaggggctcatggtttatgcaaatcaggtggcatctgacatgatggtctctctcatgaagaccttgaaagtgcacagctctgggaagccaattccagcatctgtggtcctgaagagggtgttgctaaggcacaccaaggagattgtgtccgatttgattgattcttgcatgaagaacctgcataatattactggggtcctgatgactgactcagactttgtctcagctgtcaagagaaatctgttcaaccagtggaaacaaaatgctacagacatcatggaggccatgctgaagcgcttggtcagtgcccttataggtgaggagaaggagactaagtctcagagtctgtcatatgcatctttaaaagctgggtcccatgatcccaaatgcaggaatcagagtcttgaattctccaccatgaaagctgaaatgaaagagagggacaaaggcaaaatgaaatcagacccatgcaagtcactgactagtgctgagaaagtcggtgaacacattctcaaagagggcctaaccatctggaaccaaaagcaaggaaactcatgcaaggtggctaccaaagcatgcagcaataaagatgagaaaggagaaaagatcaatgcttccacagattcactggccaaggacctgattgtctctgcccttaagctgatccagtaccatctgacccagcagactaagggcaaagatacatgtgaagaagactgtcctggttccaccatgggctatatggctcagagtactcaatatgaaaagtgtggaggtggccaaagtgccaaagcactttcagtgaaacaactagaatctcacagagcccctggaccatccacctgtcaaaaggagaaccaacacctggactcccagaaaatggatatgtcaaacatcgttctaatgctgattcagaaactgcttaatgagaaccccttcaaatgtgaggatccatgcgaaggtgagaacaagtgttctgagcccagggcaagcaaagcagcttccatgtccaacagatctgacaaagcggaagaacaatgccaggagcatcaagaacttgactgtaccagtgggatgaagcaagcgaacgggcaatttatagataaactagtagaatctgtgatgaagctctgccttatcatggctaagtatagcaacgatggggcagcccttgctgagttggaagaacaagcagcctcggcaaataagcccaatttcaggggcaccagatgcattcacagtggtgcaatgccacagaactatcaagactctcttggacatgaagtaattgtcaataatcagtgctctacaaatagcttgcagaagcagctccaggctgtcctgcagtggattgcagcctcccagtttaacgtgcccatgctctacttcatgggagataaggatggacaactggaaaagcttcctcaggtttcagctaaagcagcagagaaggggtacagtgtaggaggtcttcttcaagaggtcatgaagtttgccaaggaacggcaaccagatgaagctgtgggaaaggtggccaggaaacagttgctggactggctgctcgctaacctgtgagctgatccttgactcctcttcatcttagcccccctagcagcattccatcccagccagagcacccccaccatcaggccagtcaactgcacaatacacaactgtatttcccaatacacttgagcagttgcctgtgaatgtaagaggtgtcaacaaactgggaaataaaat

SEQ ID NO: 12757 - protein, 845 aa, Homo sapiens; identical to SEQ ID NO: 2262

SEQ ID NO: 12758 - DNA, 790 bp, Homo sapiens
agtctggtccaacagctgacaggggtggcagccaactgcaggtgcccaagaacttggcacttctcagttccatctaaaggggcacatctcccttctgggtgtcacgttttcagccaaacatctaaaagaacttcatcatcaagatgtctgatgatattgactggttacgcagccacaggggtgtgtgcaaggtagatctctacaacccagaaggacagcaagatcaggaccggaaagtgatatgctttgtcgatgtgtccaccctgaatgtagaagataaagattacaaggatgctgctagttccagctcagaaggcaacttaaacctgggaagtctggaagaaaaagagattatcgtgatcaaggacactgagaagaaagaccagtctaagacagagggatctgtatgccttttcaaacaagctccctctgatcctgtaagtgtcctcaactggcttctcagtgatctccagaagtatgccttgggtttccaacatgcactgagcccctcaacctctacctgtaaacataaagtaggagacacagagggcgaatatcacagagcatcctctgagaactgctacagtgtctatgccgatcaagtgaacatagattatttgatgaacagacctcaaaacctacgtctagaaatgacagcagctaaaaacaccaacaataatcaaaatacatgtgaagaagactgtcctggttccaccatgggctatatggctcagagtactcaatatgaaaagtgtggaggtggccaaagtgccaaagcactttcagtgaa

SEQ ID NO: 12759 - protein, 214 aa, Homo sapiens
MSDDIDWLRSHRGVCKVDLYNPEGQQDQDRKVICFVDVSTLNVEDKDYKDAASSSSEGNLNLGSLEEKEIIVIKDTEKKDQSKTEGSVCLFKQAPSDPVSVLNWLLSDLQKYALGFQHALSPSTSTCKHKVGDTEGEYHRASSENCYSVYADQVNIDYLMNRPQNLRLEMTAAKNTNNNQNTCEEDCPGSTMGYMAQSTQYEKCGGGQSAKALS

SEQ ID NO: 12760 - DNA, 4513 bp, Homo sapiens
aggtgtctggaactggattacagtttcttctgattgaacgcagcctttgaatactgcctggcctatcgcgaatacatccctgccttggacaagacgcagctgaatctctaagtgatgctactgccactaccaccccagagctccaaacctgtgcctaagaaatctcagtccagcaaaattgtgcccagtcatcatgacccatctgaaaagacgggggagaattgccaaacgaagatatctccatcttcacttcaggagtctccatcttcacttcagggagcactcaaaaagagatcagcttttgaagatctcactaatgcttctcaatgtcaacctgtccagcccaagaaagaagccaataaagagtttgtaaaagttgtttccaagaagataaacaggaacacacatgctcttggactggccaaaaagaataagcggaatctaaaatggcataagctggaagtcacaccagtagtagcctctactaccgtggtaccaaacattatggagaaaccactcattctagacatatccaccacctccaaaacacccaacactgaggaggcatctctcttcagaaagccattagttttaaaggaggaacccactattgaggatgaaacccttatcaataagtcattatctttaaaaaagtgctcaaatcatgaggaggtgtccttactggaaaagctacagcccctgcaggaggagagtgacagtgatgatgcgtttgttatagagccaatgacttttaagaagacacataaaactgaggaggcagccatcaccaagaagacattatccttaaagaagaagatgtgtgcaagtcagcggaagcagtcctgccaggaagagtcgttggctgtgcaggatgtcaatatggaagaggattccttctttatggagtcaatgagttttaagaagaagcctaaaactgaggagtcaatccccacccataagttatcatctttaaagaagaaatgtaccatttatgggaagatatgccactttaggaagccaccagtattgcagacaaccatctgtggagcaatgtcctccattaagaagcctaccactgagaaggagacacttttccaagagctatctgtattgcaagagaaacacaccactgagcatgagatgtccatcttgaagaaatcattggccttgcagaagaccaactttaaagaggattcccttgttaaggagtcgttagcctttaagaagaagcctagcactgaggaggcaatcatgatgccagtaatattgaaggagcagtgcatgactgaggggaagaggtcccgtctgaagccattagtattgcaggagatcacctctggagagaagtcgctcattatgaagccattgtccattaaagaaaagccatctactgagaaggagtccttttcccaggaaccatctgcattgcaaaagaagcacaccactcaggaggaggtttccatcttaaaggagccctcgtccttgctaaagtctccaactgaggagtcaccttttgatgaggctttggcttttacaaagaagtgtaccattgaggaggcaccccccaccaagaagcctttaattttaaagaggaagcatgccactcaggggacaatgtcccacttgaagaaaccactaatattacagaccacctctggagaaaagtcacttattaaggagccactgccctttaaagaagaaaaagtgtctttaaagaaaaagtgtaccacacaagagatgatgtccatctgtccagaactgttggactttcaggatatgattggtgaagataagaattctttctttatggagccaatgtcatttaggaagaaccctacaactgaggagacagtacttaccaagacatcgttgtctttacaggaaaagaaaattactcaggggaagatgtcccacttaaagaagccactggtcttgcagaagatcacttctgaggaggagtcattctataagaagctgttgccctttaagatgaaatctacaacggaagaaaagttcctctcccaggaaccatctgcattgaaagagaagcataccaccttgcaggaagtgtccctctcaaaagagtcattggccatccaagagaaggctaccactgaggaggaattctctcaggaactattttcattgcatgttaagcataccaacaaaagtgggtccctcttccaggaggctttggtcttgcaagagaagactgatgccgaagaggattccttgaagaacttgttggctttgcaggagaaaagcaccatggaagaagagtcccttatcaataagctattggctctgaaggaggagctttctgctgaggcagccacaaacatacagacacaattatctttaaagaagaagtccacttctcatggaaaagtgttcttcctgaagaagcagttggctttgaatgagaccatcaatgaagaggagttccttaataagcagccactggccttggaggggtatcccagcattgcggagggggagaccctcttcaagaagcttttggccatgcaggaggagcccagcattgagaaggaagctgtcctcaaggagcccactattgacacagaagctcactttaaggaacctttggccttgcaggaggagcccagcactgagaaggaggctgtcctcaaggagcccagtgttgacacagaagctcactttaaggaaactttggccttgcaggagaagcccagcattgagcaggaggccctctttaagcgacactcagctttgtgggagaagcccagcactgagaaggagaccatcttcaaggagtctttggacttgcaagagaagcccagcattaagaaagagaccctcctcaaaaagccattagccttgaagatgtctaccatcaatgaggcagtcctcttcgaagatatgatagctctgaatgagaaacccaccactgggaaggagttgtccttcaaggagccattagccttacaagagagtcccacctacaaggaagacacctttctcaaaacattgttggtcccccaagttggaaccagcccaaatgtgtctagcactgcccctgaatccataaccagcaagtccagcattgctaccatgaccagtgtgggcaaatctggtaccatcaatgaggcattcctcttcgaagatatgataactctgaatgagaaacccaccactgggaaggagttgtccttcaaggagccattggccttacaagagagtcccacctgcaaggaagacacctttctggaaacattcttgatcccccaaattggaaccagcccatatgtgtttagcaccacccctgaatccataacagagaagtccagcattgcaaccatgaccagcgtgggcaagtccaggaccaccaccgagtccagtgcatgtgaatctgcttctgataaacctgtctcaccacaggccaagggaacaccaaaggagataaccccacgggaagatattgatgaggacagcagtgatccaagtttcaacccaatgtatgccaaggaaatcttcagttacatgaaagagagagaggaacagtttatacttacagattacatgaacaggcagattgaaatcaccagtgacatgagggccattcttgtggactggttggtggaggtgcaggtgtcctttgagatgacccatgagaccctgtacttggcagtgaagctggtggatctctacctaatgaaggcagtatgcaagaaggataagttacaactccttggtgccactgcctttatgattgcagcaaaatttgaggagcacaactcacctcgtgtggatgactttgtgtacatctgtgatgataattatcagcgatctgaggtactcagcatggaaatcaacatcctgaacgtcctcaaatgtgacattaacattcccatcgcctaccattttctgcgcagatatgctaggtgtatccacaccaacatgaagacactgaccttgtcccgctacatctgcgagatgaccctgcaggaataccactatgtccaggagaaggcttccaagctagctgctgcctccttactcctggccctctacatgaagaagctcggatactgggttcccttcctggagcattacagtggctacagtatctctgagcttcaccccttggtcagacagctgaacaaactgctgactttcagttcttacgatagtctcaaggctgtgtattacaagtattctcacccggtcttctttgaagtcgccaaaatccctgccttggatatgttgaagctggaggagattttgaactgtgattgtgaggctcagggcctggtactctagcagcagccacagggctaagcatgcatgttaacagggtatatttattctatgttcgaatttgtcttttgatcgcttttattcatttttcctttctttgtcttttcccaaactgataatgttataaatatttatgttgcttgtttttatgaaagaaaaaatattgtcatatttgactacaaatttaataaaaaattaatggttattgttaaaa

SEQ ID NO: 12761 - protein, 1395 aa, Homo sapiens; identical to SEQ ID NO: 2264

SEQ ID NO: 12762 - DNA, 1201 bp, Homo sapiens
aggtgtctggaactggattacagtttcttctgattgaacgcagcctttgaatactgcctggcctatcgcgaatacatccctgccttggacaagacgcagctgaatctctaagtgatgctactgccactaccaccccagagctccaaacctgtgcctaagaaatctcagtccagcaaaattgtgcccagtcatcatgacccatctgaaaagacgggggagaattgccaaacgaagatatctccatcttcacttcaggagtctccatcttcacttcagggagcactcaaaaagagatcagcttttgaagatctcactaatgtgtcctttgagatgacccatgagaccctgtacttggcagtgaagctggtggatctctacctaatgaaggcagtatgcaagaaggataagttacaactccttggtgccactgcctttatgattgcagcaaaatttgaggagcacaactcacctcgtgtggatgactttgtgtacatctgtgatgataattatcagcgatctgaggtactcagcatggaaatcaacatcctgaacgtcctcaaatgtgacattaacattcccatcgcctaccattttctgcgcagatatgctaggtgtatccacaccaacatgaagacactgaccttgtcccgctacatctgcgagatgaccctgcaggaataccactatgtccaggagaaggcttccaagctagctgctgcctccttactcctggccctctacatgaagaagctcggatactgggttcccttcctggagcattacagtggctacagtatctctgagcttcaccccttggtcagacagctgaacaaactgctgactttcagttcttacgatagtctcaaggctgtgtattacaagtattctcacccggtcttctttgaagtcgccaaaatccctgccttggatatgttgaagctggaggagattttgaactgtgattgtgaggctcagggcctggtactctagcagcagccacagggctaagcatgcatgttaacagggtatatttattctatgttcgaatttgtcttttgatcgcttttattcatttttcctttctttgtcttttcccaaactgataatgttataaatatttatgttgcttgtttttatgaaagaaaaaatattgtcatatttgactacaaatttaataaaaaattaatggttattgttaaaa

SEQ ID NO: 12763 - protein, 291 aa, Homo sapiens; identical to SEQ ID NO: 2266

SEQ ID NO: 12764 - DNA, 1521 bp, Homo sapiens
aggtgtctggaactggattacagtttcttctgattgaacgcagcctttgaatactgcctggcctatcgcgaatacatccctgccttggacaagacgcagctgaatctctaagtgatgctactgccactaccaccccagagctccaaacctgtgcctaagaaatctcagtccagcaaaattgtgcccagtcatcatgacccatctgaaaagacgggggagaattgccaaacgaagatatctccatcttcacttcaggagtctccatcttcacttcagggagcactcaaaaagagatcagcttttgaagatctcactaatgcttctcaatgtcaacctgtccagcccaagaaagaagccaataaagagtttgtaaaagttgtttccaagaagataaacaggaacacacatgctcttggactggccaaaaagaataagcggaatctaaaatgataaccccacgggaagatattgatgaggacagcagtgatccaagtttcaacccaatgtatgccaaggaaatcttcagttacatgaaagagagagaggaacagtttatacttacagattacatgaacaggcagattgaaatcaccagtgacatgagggccattcttgtggactggttggtggaggtgcaggtgtcctttgagatgacccatgagaccctgtacttggcagtgaagctggtggatctctacctaatgaaggcagtatgcaagaaggataagttacaactccttggtgccactgcctttatgattgcagcaaaatttgaggagcacaactcacctcgtgtggatgactttgtgtacatctgtgatgataattatcagcgatctgaggtactcagcatggaaatcaacatcctgaacgtcctcaaatgtgacattaacattcccatcgcctaccattttctgcgcagatatgctaggtgtatccacaccaacatgaagacactgaccttgtcccgctacatctgcgagatgaccctgcaggaataccactatgtccaggagaaggcttccaagctagctgctgcctccttactcctggccctctacatgaagaagctcggatactgggttcccttcctggagcattacagtggctacagtatctctgagcttcaccccttggtcagacagctgaacaaactgctgactttcagttcttacgatagtctcaaggctgtgtattacaagtattctcacccggtcttctttgaagtcgccaaaatccctgccttggatatgttgaagctggaggagattttgaactgtgattgtgaggctcagggcctggtactctagcagcagccacagggctaagcatgcatgttaacagggtatatttattctatgttcgaatttgtcttttgatcgcttttattcatttttcctttctttgtcttttcccaaactgataatgttataaatatttatgttgcttgtttttatgaaagaaaaaatattgtcatatttgactacaaatttaataaaaaattaatggttattgttaaaa

SEQ ID NO: 12765 - protein, 287 aa, Homo sapiens
MITPREDIDEDSSDPSFNPMYAKEIFSYMKEREEQFILTDYMNRQIEITSDMRAILVDWLVEVQVSFEMTHETLYLAVKLVDLYLMKAVCKKDKLQLLGATAFMIAAKFEEHNSPRVDDFVYICDDNYQRSEVLSMEINILNVLKCDINIPIAYHFLRRYARCIHTNMKTLTLSRYICEMTLQEYHYVQEKASKLAAASLLLALYMKKLGYWVPFLEHYSGYSISELHPLVRQLNKLLTFSSYDSLKAVYYKYSHPVFFEVAKIPALDMLKLEEILNCDCEAQGLVL

SEQ ID NO: 12766 - DNA, 634 bp, Homo sapiens
gaggacagcagtgatccaagtttcaacccaatgtatgccaaggaaatcttcagttacatgaaagagagagaggaacagtttatacttacagattacatgaacaggcaggaataccactatgtccaggagaaggcttccaagctagctgctgcctccttactcctggccctctacatgaagaagctcggatactgggttcccttcctggagcattacagtggctacagtatctctgagcttcaccccttggtcagacagctgaacaaactgctgactttcagttcttacgatagtctcaaggctgtgtattacaagtattctcacccggtcttctttgaagtcgccaaaatccctgccttggatatgttgaagctggaggagattttgaactgtgattgtgaggctcagggcctggtactctagcagcagccacagggctaagcatgcatgttaacagggtatatttattctatgttcgaatttgtcttttgatcgcttttattcatttttcctttctttgtcttttcccaaactgataatgttataaatatttatgttgcttgtttttatgaaagaaaaaatattgtcatatttgactacaaatttaataaaaaattaatggttattgttaaaa

SEQ ID NO: 12767 - protein, 130 aa, Homo sapiens
MYAKEIFSYMKEREEQFILTDYMNRQEYHYVQEKASKLAAASLLLALYMKKLGYWVPFLEHYSGYSISELHPLVRQLNKLLTFSSYDSLKAVYYKYSHPVFFEVAKIPALDMLKLEEILNCDCEAQGLVL

SEQ ID NO: 12768 - DNA, 702 bp, Homo sapiens
taccctgtcctcccactctgagtcagaatgatattgactgaaaccactagtatttggggctagagtcagctcatggagcacagttgatagatgacaaggcccaggagcaggtgtggcttgctcaatccctcagttacctcctaaattgctaagttaccagtagtttcccaaaaaggaagatagcttgccaagcacctgttcttgcatatgctcacttggaaacaaagcaagaagtgatgcctcaagggagttgtcttagctctgggagtgtgagctcctttaaggactttgttaaccacttgcagtaattaatacaattgcttgggtggtgggaccaaacaccaaatatccatctcaattatgttcagacatcattaagacccattagcaccattccatcctatatgagaccttgcttggctatatgatttgtggaattgcatttgtctatttgtcagtgaatctgtaacccattgttgttttctgctctgtgttttttatttcctcagaggcccctgcaaataagcagcagggccaggggctggttgggggaggaagctggggtatttacatggtaacaggaaaaagcagaaaaaaaagatccacaaagtgtgcctattcctctccccccgccaaatggaacaccagtcctcaatgttaataaagtattgcttctttaaatattttaataaatggataaac

SEQ ID NO: 12769 - protein, 30 aa, Homo sapiens
PLAVINTIAWVVGPNTKYPSQLCSDIIKTH

SEQ ID NO: 12770 - DNA, 3354 bp, Homo sapiens
atggatttgggtattggtttatcaaagaggattcagaatgaaactgaagcagagttttccaaagctttagccttctctgcaagggctgccatggttttggcaaagaccattttgtgtgaacactgtacacaggacctgaattactttgcacactttgaaacgattgatctgtctcaagccactgtggcagaaagcagctgtagaaacctttgccacagtttttgtgttattacaccacaacgaaaaatcactctggctgcacccaaccggaaagacatggaagaatggattaacatcataaaaaccatccaacagggagaaatttataagatacctgcagcagaaaacaacccttttcttgttggaatgcattgttggtactccagttacagccaccggacccagcactgcaatgtttgtcgagagagcattcctgccttatctagagatgccatcatctgtgaagtgtgcaaagtgaaatctcacagattgtgtgctttgagagcaagcaaagactgcaagtggaatacattgtctatcactgatgacctccttctgcctgcagatgaagtaaacatgccccatcaatgggtagaaggaaacatgcctgtcagctctcagtgtgcagtgtgtcatgagagctgtggcagttatcaaagacttcaagacttccgctgcctgtggtgtaattctacggtgcatgatgactgtaggagacggttttccaaggaatgttgcttcagaagccatcgctcatcagtcattcctcccactgctctaagcgaccccaaaggcgatggccaattagtagtatcttcagacttctggaatcttgattggtcatcagcctgttcatgtcccttgctcatcttcatcaactccaaaagtggcgatcatcaggggatcgtcttcctccgaaaattcaagcaataccttaacccatctcaagtgttcgacttattgaagggtggacctgaagcagggctgtctatgttcaagaactttgctcgctttcgcattctggtttgtggtggagatggcagcgtgagctgggtcttatctctgattgatgcctttggattacatgaaaagtgtcagttggcagtcatcccacttggaaccggcaatgatctggctcgtgttctgggctggggtgcattctggaacaaaagcaagtcacctctggacatcctcaacagagtggagcaggctagtgtgaggatcctagacagatggagtgtgatgattcgtgagactcccagacaaaccccgctgctaaaaggacaggttgaaatggatgtaccacgatttgaggctgctgccatccaacacttagaatctgcagccaccgagttgaacaaaatcctgaaggccaagtaccccacagagatgatcatcgcaaccagattcttgtgttcagctgtggaagattttgtggttgatattgtaaaggcctggggtcagataaaacagaacaacactgcaatagtgtctgtgattttgaaaagtgacttaatgtatgataggctcagtgtcctgatcgatgtcctggctgaggaggcagcagctacttctgctgaaaaaagtgctacagaatatgcagacagcagcaaggcagataggaagcccttcattcctcaaatagaccacatagccaagtgcaagttggagctggctacaaaggcccagagtctccagaaatccttgaaactcatcatatttcaagttgaacaagctctggatgaggaaagcagacagacaatatctgttaagaactttagttcaactttcttcctggaagatgacccagaagatattaaccagacaagcccacgacgccgttctcgtcgtggcactttgtcttctatatcttctctcaaaagtgaggacctggacaaccttaacttggatcacttacattttacacctgaatctatacgcttcaaagaaaaatgtgtcatgaacaactacttcggaattggactggatgctaaaatttctctggacttcaacaccagaagagatgaacacccagggcaatacaatagccgccttaagaacaagatgtggtatggccttctgggaaccaaagaacttttgcagcgctcttacaggaaactggaagaacgagtgcatttggagtgtgatggagaaaccatctccttgccaaacctgcaaggcattgtagtgctcaacattaccagctatgctggaggtatcaacttctggggaagcaacacagcaaccacggaatatgaggctcctgcaatcgatgatgggaaactggaggtggtggcaatctttggttctgtgcagatggcaatgtcccgtatcatcaacctgcatcatcatcgcattgcccagtgccatgaggtgatgataaccattgatggtgaagaaggtatcccagtgcaggactttgagaactcaatgaaaatgtgggaatacaagcatactgaaattcaagctgcccctcaaccccagctggacttccaggactctcaagagagcctctctgacgaggagtatgcccagatgcagcacttagctcggcttgcagaaaacctcatcagcaaacttaatgacctgagcaagatccaccagcatgtgtctgtcctcatgggttctgtgaatgccagcgctaacatcctgaatgatatattttacggccaagacagtggcaatgagatgggtgcagcttcctgtattcccattgaaactctaagcagaaatgatgccgtagatgttacatttagtcttaaaggtctctacgatgacaccacagctttcctggatgaaaagctgctgagaagtgctgaggatgagactgcactacaaagcgccctggatgccatgaataaggagttcaaaaagctatctgagattgactggatgaatccaatctttgttccagaggaaaaatcttcggacactgacagtagaagcctcaggctgaaaattaagttccccaaattgggaaagaaaaaggtagaagaggaacgcaagcctaaatcaggccagagtgtccagagttttattgaaatgtttgtgggaatggtgatgatgaagcgggaggccatctgggagtcagcagtaagtgataccaagccatatcttggacaagggtcaggaacaggttctgtggcctatctaaacacttttgttcctgttataagaaaactggcctctccctacttctcagacaaacttagcgtgctcaattacctgattcagtccaatggctggttcattgaggtgcacaattcagattccaagcactggttctcaactctggaactccaccagcctaacccacttaaaccagccacctgtgctccacctccgcaggggtga

SEQ ID NO: 12771 - protein, 1117 aa, Homo sapiens
MDLGIGLSKRIQNETEAEFSKALAFSARAAMVLAKTILCEHCTQDLNYFAHFETIDLSQATVAESSCRNLCHSFCVITPQRKITLAAPNRKDMEEWINIIKTIQQGEIYKIPAAENNPFLVGMHCWYSSYSHRTQHCNVCRESIPALSRDAIICEVCKVKSHRLCALRASKDCKWNTLSITDDLLLPADEVNMPHQWVEGNMPVSSQCAVCHESCGSYQRLQDFRCLWCNSTVHDDCRRRFSKECCFRSHRSSVIPPTALSDPKGDGQLVVSSDFWNLDWSSACSCPLLIFINSKSGDHQGIVFLRKFKQYLNPSQVFDLLKGGPEAGLSMFKNFARFRILVCGGDGSVSWVLSLIDAFGLHEKCQLAVIPLGTGNDLARVLGWGAFWNKSKSPLDILNRVEQASVRILDRWSVMIRETPRQTPLLKGQVEMDVPRFEAAAIQHLESAATELNKILKAKYPTEMIIATRFLCSAVEDFVVDIVKAWGQIKQNNTAIVSVILKSDLMYDRLSVLIDVLAEEAAATSAEKSATEYADSSKADRKPFIPQIDHIAKCKLELATKAQSLQKSLKLIIFQVEQALDEESRQTISVKNFSSTFFLEDDPEDINQTSPRRRSRRGTLSSISSLKSEDLDNLNLDHLHFTPESIRFKEKCVMNNYFGIGLDAKISLDFNTRRDEHPGQYNSRLKNKMWYGLLGTKELLQRSYRKLEERVHLECDGETISLPNLQGIVVLNITSYAGGINFWGSNTATTEYEAPAIDDGKLEVVAIFGSVQMAMSRIINLHHHRIAQCHEVMITIDGEEGIPVQDFENSMKMWEYKHTEIQAAPQPQLDFQDSQESLSDEEYAQMQHLARLAENLISKLNDLSKIHQHVSVLMGSVNASANILNDIFYGQDSGNEMGAASCIPIETLSRNDAVDVTFSLKGLYDDTTAFLDEKLLRSAEDETALQSALDAMNKEFKKLSEIDWMNPIFVPEEKSSDTDSRSLRLKIKFPKLGKKKVEEERKPKSGQSVQSFIEMFVGMVMMKREAIWESAVSDTKPYLGQGSGTGSVAYLNTFVPVIRKLASPYFSDKLSVLNYLIQSNGWFIEVHNSDSKHWFSTLELHQPNPLKPATCAPPPQG

SEQ ID NO: 12772 - DNA, 1693 bp, Homo sapiens
tcaaagagtgcagaggaacctgtggtcaggcccaaaatcagaaacctggcaagtccaaactgcgtgaaaccaaaaattttttttgatactgatgatgatgacgatatgccacacagtacttccaggtggagggataccgccaatgacaatgagggccactcggatggcctggcaagaagagggagaggcgagagttcaagtggctatcccgagccaaagtaccctgaagacaaacgggaagcgaggagtgaccaagtgaaaccagaaaaggtgccgagacgacgacgcaccatggccgaccctgacttctggacgcacagtgatgattactacaaatactgcgacgaagactctgacagtgacaaagagtggattgctgctctgcgtcggaaatatcgaagccgagagcaaaccctgtcctccagtggcgaaagctgggagactctgccggggaaagaagagcgggaacctccacaggctaaggtgatgctggcagcaatggcagcaattaccttgaagaagttcgagaaccatctcttcaggaagagcaggcatccctggaagaaggagaaattccttggctccagtaccatgagaatgacagtagcagtgagggggataatgattctggtcacgagttgatgcaacctggggtattcatgctggatggaaacaacaaccttgaagatgactccagtgtgagcgaagacctagaagtggattggagcctctttgatggatttgcagatgggttaggagtggctgaagccatttcctatgtggaccctcagttcctcacctacatggcacttgaagaacgcctggcccaggcaatggaaactgcccttgcgcacttggagtctctcgcagtggatgtagaggtggccaatccaccagcaagcaaggagagcattgacgctcttcccgagatcctggtcactgaagatcatggcgcagttggtcaggagatgtgctgccccatctgctgtagcgaatatgtgaagggggaggtggcaactgagctgccgtgccaccactatttccacaagccgtgtgtgtccatctggcttcagaagtcaggcacctgccccgtgtgccgctgcatgttccctcccccactctaaagaccaaggccgtttactcctggtctgattattttccccatctgaaatccacaatactgcaggagccctcttgaaattaacaatggaaataaaaccaatcagtcagttagcctaaacctattgattcctcgtgattatttccaatgtgaaaacagttgtgtatgattgcattaaaaatcatatcatcttttagaggttagaaaagggaaaactaaactttctaaatgctacttgagattgcagtaagaagatacgttttctaacctgaaagttaaatcgcatttgttttcttcagtagaatgggaatgtgttgctgttacttgtaatgtcaagtttatctgttaaatatgtccaaaaggcaaaatcatttttgttgcatgttatgggtcgatgttcctgtaattgcagtgccgtaaaagcttattaaagttgttcttttggttttacatggtataatggaattttttggttttgtctgaagcagtggtactgaatgactttataattgatcccttgcatttgcatcaaaagctttagtttcactggaaatgctgacttcaacaattgca

SEQ ID NO: 12773 - protein, 178 aa, Homo sapiens
MPHSTSRWRDTANDNEGHSDGLARRGRGESSSGYPEPKYPEDKREARSDQVKPEKVPRRRRTMADPDFWTHSDDYYKYCDEDSDSDKEWIAALRRKYRSREQTLSSSGESWETLPGKEEREPPQAKVMLAAMAAITLKKFENHLFRKSRHPWKKEKFLGSSTMRMTVAVRGIMILVTS

SEQ ID NO: 12774 - DNA, 2535 bp, Homo sapiens
gcagtcgccgcccgccccgctgctgtctggcgggggaggagctcgggaccgggagcagcggctctggcggtcgtggcggtcggagatccgagagctctgcttctctgaaaagcgtgtggctttctggacttgtttcaggccacccacgagccagcgggaaaggattgccagccagagaaagacgaactccgaagtcccaatgcacagatcagcccccagtcaaaccaccaagaggagccgatcgccattttccactactcgtcgtagttgggacgacagcgagagttcgggaaccaacctgaatattgataatgaggactattccaggtatccgccaagagagtacagagcttcgggtagcagaagaggaatggcctatggacatattgactcttatggggcagatgatagtgaggaggagggggctgggcctgttgagcgaccgccagtgagagggaaaactggcaagtttaaagatgataagctgtatgacccagagaaaggggcaaggtctttggctgggccacctccacatttctctagttttagccgtgatgtgagagaggagcgagacaagttagacccagtccctgcagcaagatgctcagctagcagagctgacttcctgccacaaagtagtgtggcctcacagtcgtcttctgaaggcaagctggctacaaaaggtgacagctcggagagggagagaagggagcaaaatttacctgcacgtcccagcagggctcctgtgagtatttgtggtggtggggaaaacacctcaaagagtgcagaggaacctgtggtcaggcccaaaatcagaaacctggcaagtccaaactgcgtgaaaccaaaaattttttttgatactgatgatgatgacgatatgccacacagtacttccaggtggagggataccgccaatgacaatgagggccactcggatggcctggcaagaagagggagaggcgagagttcaagtggctatcccgagccaaagtaccctgaagacaaacgggaagcgaggagtgaccaagtgaaaccagaaaaggtgccgagacgacgacgcaccatggccgaccctgacttctggacgcacagtgatgattactacaaatactgcgacgaagactctgacagtgacaaagagtggattgctgctctgcgtcggaaatatcgaagccgagagcaaaccctgtcctccagtggcgaaagctgggagactctgccggggaaagaagagcgggaacctccacaggctaaggtgagtgccagcactggcaccagccctggccccggtgctagtgccagtgccggggctggcgccggggccagtgctggcagcaatggcagcaattaccttgaagaagttcgagaaccatctcttcaggaagagcaggcatccctggaagaaggagaaattccttggctccagtaccatgagaatgacagtagcagtgagggggataatgattctggtcacgagttgatgcaacctggggtattcatgctggatggaaacaacaaccttgaagatgactccagtgtgagcgaagacctagaagtggattggagcctctttgatggatttgcagatgggttaggagtggctgaagccatttcctatgtggaccctcagttcctcacctacatggcacttgaagaacgcctggcccaggcaatggaaactgcccttgcgcacttggagtctctcgcagtggatgtagaggtggccaatccaccagcaagcaaggagagcattgacgctcttcccgagatcctggtcactgaagatcatggcgcagttggtcaggagatgtgctgccccatctgctgtagcgaatatgtgaagggggaggtggcaactgagctgccgtgccaccactatttccacaagccgtgtgtgtccatctggcttcagaagtcaggcacctgccccgtgtgccgctgcatgttccctcccccactctaaagaccaaggccgtttactcctggtctgattattttccccatctgaaatccacaatactgcaggagccctcttgaaattaacaatggaaataaaaccaatcagtcagttagcctaaacctattgattcctcgtgattatttccaatgtgaaaacagttgtgtatgattgcattaaaaatcatatcatcttttagaggttagaaaagggaaaactaaactttctaaatgctacttgagattgcagtaagaagatacgttttctaacctgaaagttaaatcgcatttgttttcttcagtagaatgggaatgtgttgctgttacttgtaatgtcaagtttatctgttaaatatgtccaaaaggcaaaatcatttttgttgcatgttatgggtcgatgttcctgtaattgcagtgccgtaaaagcttattaaagttgttcttttggttttacatggtataatggaattttttggttttgtctgaagcagtggtactgaatgactttataattgatcccttgcatttgcatcaaaagctttagtttcactggaaatgctgacttcaacaattgca

SEQ ID NO: 12775 - protein, 588 aa, Homo sapiens; identical to SEQ ID NO: 2270

SEQ ID NO: 12776 - DNA, 2879 bp, Homo sapiens
acaatcacttccgccgccgcagtcgccgcccgccccgctgctgtctggcgggggaggagctcgggaccgggagcagcggctctggcggtcgtggcggtcggagatccgagagctctgcttctctgaaaagcgtgtggctttctggacttggtctacacctgacagtcactggaatgctactccaggccttagaagaaagtgaaactaattttaaaggccccttattctttctgttacctgcctgctgaagtgaaaataaatctccctgctcctttattctaaactgattttactttcccatctcaaaaacgtgtgcagggagcaggagccctcctacccgagccccagctgtattggaaaccctcctaagtcagagtgatgggtcaggaatctagcaagcctgtatggcccaatccaacaggagggtatcagtccaatacaggtaggaggtatggaagaaggcatgcttatgtcagtttcaggccacccacgagccagcgggaaaggattgccagccagagaaagacgaactccgaagtcccaatgcacagatcagcccccagtcaaaccaccaagaggagccgatcgccattttccactactcgtcgtagttgggacgacagcgagagttcgggaaccaacctgaatattgataatgaggactattccaggtatccgccaagagagtacagagcttcgggtagcagaagaggaatggcctatggacatattgactcttatggggcagatgatagtgaggaggagggggctgggcctgttgagcgaccgccagtgagagggaaaactggcaagtttaaagatgataagctgtatgacccagagaaaggggcaaggtctttggctgggccacctccacatttctctagttttagccgtgatgtgagagaggagcgagacaagttagacccagtccctgcagcaagatgctcagctagcagagctgacttcctgccacaaagtagtgtggcctcacagtcgtcttctgaaggcaagctggctacaaaaggtgacagctcggagagggagagaagggagcaaaatttacctgcacgtcccagcagggctcctgtgagtatttgtggtggtggggaaaacacctcaaagagtgcagaggaacctgtggtcaggcccaaaatcagaaacctggcaagtccaaactgcgtgaaaccaaaaattttttttgatactgatgatgatgacgatatgccacacagtacttccaggtggagggataccgccaatgacaatgagggccactcggatggcctggcaagaagagggagaggcgagagttcaagtggctatcccgagccaaagtaccctgaagacaaacgggaagcgaggagtgaccaagtgaaaccagaaaaggtgccgagacgacgacgcaccatggccgaccctgacttctggacgcacagtgatgattactacaaatactgcgacgaagactctgacagtgacaaagagtggattgctgctctgcgtcggaaatatcgaagccgagagcaaaccctgtcctccagtggcgaaagctgggagactctgccggggaaagaagagcgggaacctccacaggctaaggtgagtgccagcactggcaccagccctggccccggtgctagtgccagtgccggggctggcgccggggccagtgctggcagcaatggcagcaattaccttgaagaagttcgagaaccatctcttcaggaagagcaggcatccctggaagaaggagaaattccttggctccagtaccatgagaatgacagtagcagtgagggggataatgattctggtcacgagttgatgcaacctggggtattcatgctggatggaaacaacaaccttgaagatgactccagtgtgagcgaagacctagaagtggattggagcctctttgatggatttgcagatgggttaggagtggctgaagccatttcctatgtggaccctcagttcctcacctacatggcacttgaagaacgcctggcccaggcaatggaaactgcccttgcgcacttggagtctctcgcagtggatgtagaggtggccaatccaccagcaagcaaggagagcattgacgctcttcccgagatcctggtcactgaagatcatggcgcagttggtcaggagatgtgctgccccatctgctgtagcgaatatgtgaagggggaggtggcaactgagctgccgtgccaccactatttccacaagccgtgtgtgtccatctggcttcagaagtcaggcacctgccccgtgtgccgctgcatgttccctcccccactctaaagaccaaggccgtttactcctggtctgattattttccccatctgaaatccacaatactgcaggagccctcttgaaattaacaatggaaataaaaccaatcagtcagttagcctaaacctattgattcctcgtgattatttccaatgtgaaaacagttgtgtatgattgcattaaaaatcatatcatcttttagaggttagaaaagggaaaactaaactttctaaatgctacttgagattgcagtaagaagatacgttttctaacctgaaagttaaatcgcatttgttttcttcagtagaatgggaatgtgttgctgttacttgtaatgtcaagtttatctgttaaatatgtccaaaaggcaaaatcatttttgttgcatgttatgggtcgatgttcctgtaattgcagtgccgtaaaagcttattaaagttgttcttttggttttacatggtataatggaattttttggttttgtctgaagcagtggtactgaatgactttataattgatcccttgcatttgcatcaaaagctttagtttcactggaaatgctgacttcaacaattgca

SEQ ID NO: 12777 - protein, 643 aa, Homo sapiens; identical to SEQ ID NO: 2274

SEQ ID NO: 12778 - DNA, 1597 bp, Homo sapiens
tcaaagagtgcagaggaacctgtggtcaggcccaaaatcagaaacctggcaagtccaaactgcgtgaaaccaaaaattttttttgatactgatgatgatgacgatatgccacacagtacttccaggtggagggataccgccaatgacaatgagggccactcggatggcctggcaagaagagggagaggcgagagttcaagtggctatcccgagccaaagtaccctgaagacaaacgggaagcgaggagtgaccaagtgaaaccagaaaaggtgccgagacgacgacgcaccatggccgaccctgacttctggacgcacagtgatgattactacaaatactgcgacgaagactctgacagtgacaaagagtggattgctgctctgcgtcggaaatatcgaagccgagagcaaaccctgtcctccagtggcgaaagctgggagactctgccggggaaagaagagcgggaacctccacaggctaaggtgatgctggcagcaatggcagcaattaccttgaagaagttcgagaaccatctcttcaggaagagcaggcatccctggaagaaggagaaattccttggctccagtaccatgagaatgacagtagcagtgagggggataatgattctggtcacgagttgatgcaacctggggtattcatgctggatggaaacaacaaccttgaagatgactccagtgtgagcgaagacctagaagtggattggagcctctttgatggatttgcagatgggttaggagtggctgaagccatttcctatgtggaccctcagttcctcacctacatggcacttgaagaacgcctggcccaggcaatggaaactgcccttgcgcacttggagtctctcgcagtggatgtagaggtggccaatccaccagcaagcaaggagagcattgacgctcttcccgagatcctggtcactgaagatcatggcgcagttggtcaggagatgtgctgccccatctgctgtagcgaatatgtgaagggggaggtggcaactgagctgccgtgccaccactatttccacaagccgtgtgtgtccatctggcttcagaagtcaggcacctgccccgtgtgccgctgcatgttccctcccccactctaaagaccaaggccgtttactcctggtctgattattttccccatctgaaatccacaatactgcaggagccctcttgaaattaacaatggaaataaaaccaatcagtcagttagcctaaacctattgattcctcgtgattatttccaatgtgaaaacagttgtgtatgattgcattaaaaatcatatcatcttttagaggttagaaaagggaaaactaaactttctaaatgctacttgagattgcagtaagaagatacgttttctaacctgaaagttaaatcgcatttgttttcttcagtagaatgggaatgtgttgctgttacttgtaatgtcaagtttatctgttaaatatgtccaaaaggcaaaatcatttttgttgcatgttatgggtcgatgttcctgtaattgcagtgccgtaaaagcttattaaagttgttcttttggttttacatggtataatggaattttttggtttt

SEQ ID NO: 12779 - protein, 178 aa, Homo sapiens; identical to SEQ ID NO: 12773

SEQ ID NO: 12780 - DNA, 959 bp, Homo sapiens
gacgaactccgaagtcccaatgcacagatcagcccccagtcaaaccaccaagaggagccgatcgccattttccactactcgtcgtagttgggacgacagcgagagttcgggaaccaacctgaatattgataatgaggactattccaggtatccgccaagagagtacagagcttcgggtagcagaagaggaatggcctatggacatattgactcttatggggcagatgatagtgaggaggagggggctgggcctgttgagcgaccgccagtgagagggaaaactggcaagtttaaagatgataagctgtatgacccagagaaaggggcaaggtctttggctgggccacctccacatttctctagttttagccgtgatgtgagagaggagcgagacaagttagacccagtccctgcagcaagatgctcagctagcagagctgacttcctgccacaaagtagtgtggcctcacagtcgtcttctgaaggcaagctggctacaaaaggtgacagctcggagagggagagaagggagcaaaatttacctgcacgagccctcttgaaattaacaatggaaataaaaccaatcagtcagttagcctaaacctattgattcctcgtgattatttccaatgtgaaaacagttgtgtatgattgcattaaaaatcatatcatcttttagaggttagaaaagggaaaactaaactttctaaatgctacttgagattgcagtaagaagatacgttttctaacctgaaagttaaatcgcatttgttttcttcagtagaatgggaatgtgttgctgttacttgtaatgtcaagtttatctgttaaatatgtccaaaaggcaaaatcatttttgttgcatgttatgggtcgatgttcctgtaattgcagtgccgtaaaagcttattaaagttgttcttttggttttacatggtataatggaattttttggtttt

SEQ ID NO: 12781 - protein, 193 aa, Homo sapiens
MHRSAPSQTTKRSRSPFSTTRRSWDDSESSGTNLNIDNEDYSRYPPREYRASGSRRGMAYGHIDSYGADDSEEEGAGPVERPPVRGKTGKFKDDKLYDPEKGARSLAGPPPHFSSFSRDVREERDKLDPVPAARCSASRADFLPQSSVASQSSSEGKLATKGDSSERERREQNLPARALLKLTMEIKPISQLA

SEQ ID NO: 12782 - DNA, 2192 bp, Homo sapiens
gcccgccccgctgctgtctggcgggggaggagctcgggaccgggagcagcggctctggcggtcgtggcggtcggagatccgagagctctgcttctctgaaaagcgtgtggctttctggacttggtctacacctgacagtcactggaatgctactccaggccttagaagaaagtgaaactaattttaaaggccccttattctttctgttacctgcctgctgaagtgaaaataaatctccctgctcctttattctaaactgattttactttcccatctcaaaaacgtgtgcagggagcaggagccctcctacccgagccccagctgtattggaaaccctcctaagtcagagtgatgggtcaggaatctagcaagcctgtatggcccaatccaacaggagggtatcagtccaatacaggtaggaggtatggaagaaggcatgcttatgtcagtttcaggccacccacgagccagcgggaaaggattgccagccagagaaagacgaactccgaagtcccaatgcacagatcagcccccagtcaaaccaccaagaggagccgatcgccattttccactactcgtcgtagttgggacgacagcgagagttcgggaaccaacctgaatattgataatgaggactattccagtacttccaggtggagggataccgccaatgacaatgagggccactcggatggcctggcaagaagagggagaggcgagagttcaagtggctatcccgagccaaagtaccctgaagacaaacgggaagcgaggagtgaccaagtgaaaccagaaaaggtgccgagacgacgacgcaccatggccgaccctgacttctggacgcacagtgatgattactacaaatactgcgacgaagactctgacagtgacaaagagtggattgctgctctgcgtcggaaatatcgaagccgagagcaaaccctgtcctccagtggcgaaagctgggagactctgccggggaaagaagagcgggaacctccacaggctaaggtgagtgccagcactggcaccagccctggccccggtgctagtgccagtgccggggctggcgccggggccagtgctggcagcaatggcagcaattaccttgaagaagttcgagaaccatctcttcaggaagagcaggcatccctggaagaaggagaaattccttggctccagtaccatgagaatgacagtagcagtgagggggataatgattctggtcacgagttgatgcaacctggggtattcatgctggatggaaacaacaaccttgaagatgactccagtgtgagcgaagacctagaagtggattggagcctctttgatggatttgcagatgggttaggagtggctgaagccatttcctatgtggaccctcagttcctcacctacatggcacttgaagaacgcctggcccaggcaatggaaactgcccttgcgcacttggagtctctcgcagtggatgtagaggtggccaatccaccagcaagcaaggagagcattgacgctcttcccgagatcctggtcactgaagatcatggcgcagttggtcaggagatgtgctgccccatctgctgtagcgaatatgtgaagggggaggtggcaactgagctgccgtgccaccactatttccacaagccgtgtgtgtccatctggcttcagaagtcaggcacctgccccgtgtgccgctgcatgttccctcccccactctaaagaccaaggccgtttactcctggtctgattattttccccatctgaaatccacaatactgcaggagccctcttgaaattaacaatggaaataaaaccaatcagtcagttagcctaaacctattgattcctcgtgattatttccaatgtgaaaacagttgtgtatgattgcattaaaaatcatatcatcttttagaggttagaaaagggaaaactaaactttctaaatgctacttgagattgcagtaagaagatacgttttctaacctgaaagttaaatcgcatttgttttcttcagtagaatgggaatgtgttgctgttacttgtaatgtcaagtttatctgttaaatatgtccaaaaggcaaaatcatttttgttgcatgttatgggtcgatgttcctgtaattgcagtgccgtaaaagcttattaaagttgttcttttggttttacatggtataatggaattttttggtttt

SEQ ID NO: 12783 - protein, 455 aa, Homo sapiens; identical to SEQ ID NO: 2272

SEQ ID NO: 12784 - DNA, 2439 bp, Homo sapiens
gcagtcgccgcccgccccgctgctgtctggcgggggaggagctcgggaccgggagcagcggctctggcggtcgtggcggtcggagatccgagagctctgcttctctgaaaagcgtgtggctttctggacttgtttcaggccacccacgagccagcgggaaaggattgccagccagagaaagacgaactccgaagtcccaatgcacagatcagcccccagtcaaaccaccaagaggagccgatcgccattttccactactcgtcgtagttgggacgacagcgagagttcgggaaccaacctgaatattgataatgaggactattccaggtatccgccaagagagtacagagcttcgggtagcagaagaggaatggcctatggacatattgactcttatggggcagatgatagtgaggaggagggggctgggcctgttgagcgaccgccagtgagagggaaaactggcaagtttaaagatgataagctgtatgacccagagaaaggggcaaggtctttggctgggccacctccacatttctctagttttagccgtgatgtgagagaggagcgagacaagttagacccagtccctgcagcaagatgctcagctagcagagctgacttcctgccacaaagtagtgtggcctcacagtcgtcttctgaaggcaagctggctacaaaaggtgacagctcggagagggagagaagggagcaaaatttacctgcacgtcccagcagggctcctgtgagtatttgtggtggtggggaaaacacctcaaagagtgcagaggaacctgtggtcaggcccaaaatcagaaacctggcaagtccaaactgcgtgaaaccaaaaattttttttgatactgatgatgatgacgatatgccacacagtacttccaggtggagggataccgccaatgacaatgagggccactcggatggcctggcaagaagagggagaggcgagagttcaagtggctatcccgagccaaagtaccctgaagacaaacgggaagcgaggagtgaccaagtgaaaccagaaaaggtgccgagacgacgacgcaccatggccgaccctgacttctggacgcacagtgatgattactacaaatactgcgacgaagactctgacagtgacaaagagtggattgctgctctgcgtcggaaatatcgaagccgagagcaaaccctgtcctccagtggcgaaagctgggagactctgccggggaaagaagagcgggaacctccacaggctaaggtgagtgccagcactggcaccagccctggccccggtgctagtgccagtgccggggctggcgccggggccagtgctggcagcaatggcagcaattaccttgaagaagttcgagaaccatctcttcaggaagagcaggcatccctggaagaaggagaaattccttggctccagtaccatgagaatgacagtagcagtgagggggataatgattctggtcacgagttgatgcaacctggggtattcatgctggatggaaacaacaaccttgaagatgactccagtgtgagcgaagacctagaagtggattggagcctctttgatggatttgcagatgggttaggagtggctgaagccatttcctatgtggaccctcagttcctcacctacatggcacttgaagaacgcctggcccaggcaatggaaactgcccttgcgcacttggagtctctcgcagtggatgtagaggtggccaatccaccagcaagcaaggagagcattgacgctcttcccgagatcctggtcactgaagatcatggcgcagttggtcaggagatgtgctgccccatctgctgtagcgaatatgtgaagggggaggtggcaactgagctgccgtgccaccactatttccacaagccgtgtgtgtccatctggcttcagaagtcaggcacctgccccgtgtgccgctgcatgttccctcccccactctaaagaccaaggccgtttactcctggtctgattattttccccatctgaaatccacaatactgcaggagccctcttgaaattaacaatggaaataaaaccaatcagtcagttagcctaaacctattgattcctcgtgattatttccaatgtgaaaacagttgtgtatgattgcattaaaaatcatatcatcttttagaggttagaaaagggaaaactaaactttctaaatgctacttgagattgcagtaagaagatacgttttctaacctgaaagttaaatcgcatttgttttcttcagtagaatgggaatgtgttgctgttacttgtaatgtcaagtttatctgttaaatatgtccaaaaggcaaaatcatttttgttgcatgttatgggtcgatgttcctgtaattgcagtgccgtaaaagcttattaaagttgttcttttggttttacatggtataatggaattttttggtttt

SEQ ID NO: 12785 - protein, 588 aa, Homo sapiens; identical to SEQ ID NO: 2270

SEQ ID NO: 12786 - DNA, 2783 bp, Homo sapiens
acaatcacttccgccgccgcagtcgccgcccgccccgctgctgtctggcgggggaggagctcgggaccgggagcagcggctctggcggtcgtggcggtcggagatccgagagctctgcttctctgaaaagcgtgtggctttctggacttggtctacacctgacagtcactggaatgctactccaggccttagaagaaagtgaaactaattttaaaggccccttattctttctgttacctgcctgctgaagtgaaaataaatctccctgctcctttattctaaactgattttactttcccatctcaaaaacgtgtgcagggagcaggagccctcctacccgagccccagctgtattggaaaccctcctaagtcagagtgatgggtcaggaatctagcaagcctgtatggcccaatccaacaggagggtatcagtccaatacaggtaggaggtatggaagaaggcatgcttatgtcagtttcaggccacccacgagccagcgggaaaggattgccagccagagaaagacgaactccgaagtcccaatgcacagatcagcccccagtcaaaccaccaagaggagccgatcgccattttccactactcgtcgtagttgggacgacagcgagagttcgggaaccaacctgaatattgataatgaggactattccaggtatccgccaagagagtacagagcttcgggtagcagaagaggaatggcctatggacatattgactcttatggggcagatgatagtgaggaggagggggctgggcctgttgagcgaccgccagtgagagggaaaactggcaagtttaaagatgataagctgtatgacccagagaaaggggcaaggtctttggctgggccacctccacatttctctagttttagccgtgatgtgagagaggagcgagacaagttagacccagtccctgcagcaagatgctcagctagcagagctgacttcctgccacaaagtagtgtggcctcacagtcgtcttctgaaggcaagctggctacaaaaggtgacagctcggagagggagagaagggagcaaaatttacctgcacgtcccagcagggctcctgtgagtatttgtggtggtggggaaaacacctcaaagagtgcagaggaacctgtggtcaggcccaaaatcagaaacctggcaagtccaaactgcgtgaaaccaaaaattttttttgatactgatgatgatgacgatatgccacacagtacttccaggtggagggataccgccaatgacaatgagggccactcggatggcctggcaagaagagggagaggcgagagttcaagtggctatcccgagccaaagtaccctgaagacaaacgggaagcgaggagtgaccaagtgaaaccagaaaaggtgccgagacgacgacgcaccatggccgaccctgacttctggacgcacagtgatgattactacaaatactgcgacgaagactctgacagtgacaaagagtggattgctgctctgcgtcggaaatatcgaagccgagagcaaaccctgtcctccagtggcgaaagctgggagactctgccggggaaagaagagcgggaacctccacaggctaaggtgagtgccagcactggcaccagccctggccccggtgctagtgccagtgccggggctggcgccggggccagtgctggcagcaatggcagcaattaccttgaagaagttcgagaaccatctcttcaggaagagcaggcatccctggaagaaggagaaattccttggctccagtaccatgagaatgacagtagcagtgagggggataatgattctggtcacgagttgatgcaacctggggtattcatgctggatggaaacaacaaccttgaagatgactccagtgtgagcgaagacctagaagtggattggagcctctttgatggatttgcagatgggttaggagtggctgaagccatttcctatgtggaccctcagttcctcacctacatggcacttgaagaacgcctggcccaggcaatggaaactgcccttgcgcacttggagtctctcgcagtggatgtagaggtggccaatccaccagcaagcaaggagagcattgacgctcttcccgagatcctggtcactgaagatcatggcgcagttggtcaggagatgtgctgccccatctgctgtagcgaatatgtgaagggggaggtggcaactgagctgccgtgccaccactatttccacaagccgtgtgtgtccatctggcttcagaagtcaggcacctgccccgtgtgccgctgcatgttccctcccccactctaaagaccaaggccgtttactcctggtctgattattttccccatctgaaatccacaatactgcaggagccctcttgaaattaacaatggaaataaaaccaatcagtcagttagcctaaacctattgattcctcgtgattatttccaatgtgaaaacagttgtgtatgattgcattaaaaatcatatcatcttttagaggttagaaaagggaaaactaaactttctaaatgctacttgagattgcagtaagaagatacgttttctaacctgaaagttaaatcgcatttgttttcttcagtagaatgggaatgtgttgctgttacttgtaatgtcaagtttatctgttaaatatgtccaaaaggcaaaatcatttttgttgcatgttatgggtcgatgttcctgtaattgcagtgccgtaaaagcttattaaagttgttcttttggttttacatggtataatggaattttttggtttt

SEQ ID NO: 12787 - protein, 643 aa, Homo sapiens; identical to SEQ ID NO: 2274

SEQ ID NO: 12788 - DNA, 2691 bp, Homo sapiens
gtcagattctcctctaagtctggctttcctgcaaacccagtcttgtaatcattttgccaacattaaaaatgtgttccaggtctacacctgacagtcactggaatgctactccaggccttagaagaaagtgaaactaattttaaaggccccttattctttctgttacctgcctgctgaagtgaaaataaatctccctgctcctttattctaaactgattttactttcccatctcaaaaacgtgtgcagggagcaggagccctcctacccgagccccagctgtattggaaaccctcctaagtcagagtgatgggtcaggaatctagcaagcctgtatggcccaatccaacaggagggtatcagtccaatacaggtaggaggtatggaagaaggcatgcttatgtcagtttcaggccacccacgagccagcgggaaaggattgccagccagagaaagacgaactccgaagtcccaatgcacagatcagcccccagtcaaaccaccaagaggagccgatcgccattttccactactcgtcgtagttgggacgacagcgagagttcgggaaccaacctgaatattgataatgaggactattccaggtatccgccaagagagtacagagcttcgggtagcagaagaggaatggcctatggacatattgactcttatggggcagatgatagtgaggaggagggggctgggcctgttgagcgaccgccagtgagagggaaaactggcaagtttaaagatgataagctgtatgacccagagaaaggggcaaggtctttggctgggccacctccacatttctctagttttagccgtgatgtgagagaggagcgagacaagttagacccagtccctgcagcaagatgctcagctagcagagctgacttcctgccacaaagtagtgtggcctcacagtcgtcttctgaaggcaagctggctacaaaaggtgacagctcggagagggagagaagggagcaaaatttacctgcacgtcccagcagggctcctgtgagtatttgtggtggtggggaaaacacctcaaagagtgcagaggaacctgtggtcaggcccaaaatcagaaacctggcaagtccaaactgcgtgaaaccaaaaattttttttgatactgatgatgatgacgatatgccacacagtacttccaggtggagggataccgccaatgacaatgagggccactcggatggcctggcaagaagagggagaggcgagagttcaagtggctatcccgagccaaagtaccctgaagacaaacgggaagcgaggagtgaccaagtgaaaccagaaaaggtgccgagacgacgacgcaccatggccgaccctgacttctggacgcacagtgatgattactacaaatactgcgacgaagactctgacagtgacaaagagtggattgctgctctgcgtcggaaatatcgaagccgagagcaaaccctgtcctccagtggcgaaagctgggagactctgccggggaaagaagagcgggaacctccacaggctaaggtgagtgccagcactggcaccagccctggccccggtgctagtgccagtgccggggctggcgccggggccagtgctggcagcaatggcagcaattaccttgaagaagttcgagaaccatctcttcaggaagagcaggcatccctggaagaaggagaaattccttggctccagtaccatgagaatgacagtagcagtgagggggataatgattctggtcacgagttgatgcaacctggggtattcatgctggatggaaacaacaaccttgaagatgactccagtgtgagcgaagacctagaagtggattggagcctctttgatggatttgcagatgggttaggagtggctgaagccatttcctatgtggaccctcagttcctcacctacatggcacttgaagaacgcctggcccaggcaatggaaactgcccttgcgcacttggagtctctcgcagtggatgtagaggtggccaatccaccagcaagcaaggagagcattgacgctcttcccgagatcctggtcactgaagatcatggcgcagttggtcaggagatgtgctgccccatctgctgtagcgaatatgtgaagggggaggtggcaactgagctgccgtgccaccactatttccacaagccgtgtgtgtccatctggcttcagaagtcaggcacctgccccgtgtgccgctgcatgttccctcccccactctaaagaccaaggccgtttactcctggtctgattattttccccatctgaaatccacaatactgcaggagccctcttgaaattaacaatggaaataaaaccaatcagtcagttagcctaaacctattgattcctcgtgattatttccaatgtgaaaacagttgtgtatgattgcattaaaaatcatatcatcttttagaggttagaaaagggaaaactaaactttctaaatgctacttgagattgcagtaagaagatacgttttctaacctgaaagttaaatcgcatttgttttcttcagtagaatgggaatgtgttgctgttacttgtaatgtcaagtttatctgttaaatatgtccaaaaggcaaaatcatttttgttgcatgttatgggtcgatgttcctgtaattgcagtgccgtaaaagcttattaaagttgttcttttggttttacatggt

SEQ ID NO: 12789 - protein, 643 aa, Homo sapiens; identical to SEQ ID NO: 2274

SEQ ID NO: 12790 - DNA, 546 bp, Homo sapiens
gtctggcgggggaggagctcgggaccgggagcagcggctctggcggtcgtggcggtcggagatccgagagctctgcttctctgaaaagcgttgtgtcagacacagctctcttttgctggtccctgaggtgcacacactcgcactcacataaatccttctacggggacacaacctgcctccctgcttgccatatccacacaggcaggcatcattctttgattgcctgcctctgttccatccacctcaagcacatccctctccagtgctgcgcaccccccacccccgcttccatttgtgcctgctgcatttgctcacactgacatttctccattgttgcctcccattttgactaacatacacacacacaaactctcagacactcctctccattgccaaccatacactcctctgcctgtgacatacgcataaacatgggcatccttctgtagtttcagctgcctcacatacagctacacacacaaacaccttccctttcctcatacatacacgcacccctctcctccaaagccaccccacccatgcctg

SEQ ID NO: 12791 - protein, 105 aa, Homo sapiens
LAGEELGTGSSGSGGRGGRRSESSASLKSVVSDTALFCWSLRCTHSHSHKSFYGDTTCLPACHIHTGRHHSLIACLCSIHLKHIPLQCCAPPTPASICACCICSH

SEQ ID NO: 12792 - DNA, 2418 bp, Homo sapiens
gttgagcttgagcgtgagccggctgctgaagacttgcgaacagttcggagccagcgagagcgcgccagagagagcgagagtgagggagtgagtgcgaggggatctagaggagtcagggcgagaaagcgagggccggaggacccacgatagagacagagtgaccatggctgtctccgcatctccagtgatctctgcaacttccagcggcgccggcgtcccggggggcttattccgggccgaacccctgtactcgactcccagagagccccctcgtcttactcctaatatgatcaatagtttcgtggttaataaccacagcaacagtgccggaggcggcggcaggggcaacaccaacaccaacgagtgccgcatggtcgacatgcacgggatgaaggtggcttcgttcctgatggacggccaggaactgatctgcctgccgcaagtctttgatctttttctcaagcacctggtgggaggcttgcacactgtgtacaccaagctgaagagactggatatatcccccgtggtgtgtactgttgagcaggtccggatcctccgcgggctgggggccatccagcccggggtaaaccgctgcaaactcatcaccaggaaagacttcgaaactttgttcaccgattgcaccaatgccagttcaagacccggcaggccccctaagcgttctttgggagtgttgcaggaaaatgcccgccttctgacccatgcagtcccaggcctcttatcgccaggacttatcactccgacaggtataacagctgcagcgatggctgaggcgatgaaacttcagaagatgaagcttatggctatgaacactcttcagggaaatggaagccaaaatgggaccgaatcagagcctgatgatcttaattctaacacaggtggaagtgaatcctcctgggataaagataagatgcagtctccatttgctgcacctggaccccaacatggaattgctcatgcagccctagctggccagccaggcattgggggtgctccaaccctcaatccactgcagcagaaccacctgctaaccaatagactggatctgccatttatgatgatgcctcatcccctacttccagtcagcttacctcctgcatcagttgccatggcaatgaatcagatgaaccatctcaatactattgccaacatggctgctgcagcacagattcacagtccactctccagagctggtacctctgttataaaggagcggatcccagagagtccttctcctgctccttctctagaagagaatcatcgtcctgggagccagacctcttcccacaccagcagcagtgtgtccagctctccctctcagatggatcatcatttggaaagaatggaagaggtaccagttcaaattccaataatgaagtcacccttggacaagatacagctgactcctgggcaggcattgcccgctggattccctggaccattcatttttgctgatagtctgtcctccgtggagactctgttgaccaacattcagggtctgctgaaagttgctttggataatgctcgcatccaggagaagcagattcaacaagaaaagaaggagctgcgactggagctctatagagagagagaaattagagaaaaccttgaaagacaacttgcagttgagcttcaaagcagaactactatgcaaaagcgcctgaagaaggagaaaaaaaccaagagaaaattgcaggaagccttggaatttgaatcaaagcgccgggagcaagtggagcaggcacttaagcaagccaccactagtgacagtggcctgaggatgttaaaagatactggaattccagatattgaaatagaaaacaatgggactcctcatgatagtgctgctatgcaagcctgaacactgatgccggaactccaactgatcataggcacgaatagggaggtaactattactgtttagaaatggcacaacagttgtattcagcctgaaaggtcctcgctggctttacataaatgaagatgcttgtgattccagtttatctctgaaactattcaacatggagttatttcagttttgtttatcagcaaagctttgtttactgaaggagctatttaatctatgttacattaaaaaagaaacgcgtgtacattttaaaagcaatgatgtaaactttgttcttgcattagactgaccagtttaaaaatatgaactaaaacctaatggctaaagtaacttgaccatatttgatgcttttctatgctcatttcaacttggctttttgtcttttaaatttttaaaaaatgcagtagtgtgttagagactagaaagttatatgtatggtttccctgttctactatacataacgttaaagtacaccttctttgttaaaaatgtacttgctaaacttcagcgtaaataaaaacattttgactttg

SEQ ID NO: 12793 - protein, 571 aa, Homo sapiens
MAVSASPVISATSSGAGVPGGLFRAEPLYSTPREPPRLTPNMINSFVVNNHSNSAGGGGRGNTNTNECRMVDMHGMKVASFLMDGQELICLPQVFDLFLKHLVGGLHTVYTKLKRLDISPVVCTVEQVRILRGLGAIQPGVNRCKLITRKDFETLFTDCTNASSRPGRPPKRSLGVLQENARLLTHAVPGLLSPGLITPTGITAAAMAEAMKLQKMKLMAMNTLQGNGSQNGTESEPDDLNSNTGGSESSWDKDKMQSPFAAPGPQHGIAHAALAGQPGIGGAPTLNPLQQNHLLTNRLDLPFMMMPHPLLPVSLPPASVAMAMNQMNHLNTIANMAAAAQIHSPLSRAGTSVIKERIPESPSPAPSLEENHRPGSQTSSHTSSSVSSSPSQMDHHLERMEEVPVQIPIMKSPLDKIQLTPGQALPAGFPGPFIFADSLSSVETLLTNIQGLLKVALDNARIQEKQIQQEKKELRLELYREREIRENLERQLAVELQSRTTMQKRLKKEKKTKRKLQEALEFESKRREQVEQALKQATTSDSGLRMLKDTGIPDIEIENNGTPHDSAAMQA

SEQ ID NO: 12794 - DNA, 2407 bp, Homo sapiens
gagcttgagcgtgagccggctgctgaagacttgcgaacagttcggagccagcgagagcgcgccagagagagcgagagtgagggagtgagtgcgaggggatctagaggagtcagggcgagaaagcgagggccggaggacccacgatagagacagagtgaccatggctgtctccgcatctccagtgatctctgcaacttccagcggcgccggcgtcccggggggcttattccgggccgaacccctgtactcgactcccagagagccccctcgtcttactcctaatatgatcaatagtttcgtggttaataaccacagcaacagtgccggaggcggcggcaggggcaacaccaacaccaacgagtgccgcatggtcgacatgcacgggatgaaggtggcttcgttcctgatggacggccaggaactgatctgcctgccgcaagtctttgatctttttctcaagcacctggtgggaggcttgcacactgtgtacaccaagctgaagagactggatatatcccccgtggtgtgtactgttgagcaggtccggatcctccgcgggctgggggccatccagcccggggtaaaccgctgcaaactcatcaccaggaaagacttcgaaactttgttcaccgattgcaccaatgccagaaggaagaggcaaatgacaagaaaacaagctgttaacagttcaagacccggcaggccccctaagcgttctttgggagtgttgcaggaaaatgcccgccttctgacccatgcagtcccaggcctcttatcgccaggacttatcactccgacaggtataacagctgcagcgatggctgaggcgatgaaacttcagaagatgaagcttatggctatgaacactcttcagggaaatggaagccaaaatgggaccgaatcagagcctgatgatcttaattctaacacaggtggaagtgaatcctcctgggataaagataagatgcagtctccatttgctgcacctggaccccaacatggaattgctcatgcagccctagctggccagccaggcattgggggtgctccaaccctcaatccactgcagcagaaccacctgctaaccaatagactggatctgccatttatgatgatgcctcatcccctacttccagtcagcttacctcctgcatcagttgccatggcaatgaatcagatgaaccatctcaatactattgccaacatggctgctgcagcacagattcacagtccactctccagagctggtacctctgttataaaggagcggatcccagagagtccttctcctgctccttctctagaagagaatcatcgtcctgggagccagacctcttcccacaccagcagcagtgtgtccagctctccctctcagatggatcatcatttggaaagaatggaagaggtaccagttcaaattccaataatgaagtcacccttggacaagatacagctgactcctgggcaggcattgcccgctggattccctggaccattcatttttgctgatagtctgtcctccgtggagactctgttgaccaacattcagggtctgctgaaagttgctttggataatgctcgcatccaggagaagcagattcaacaagaaaagaaggagctgcgactggagctctatagagagagagaaattagagaaaaccttgaaagacaacttgcagttgagcttcaaagcagaactactatgcaaaagcgcctgaagaaggagaaaaaaaccaagagaaaattgcaggaagccttggaatttgaatcaaagcgccgggagcaagtggagcaggcacttaagcaagccaccactagtgacagtggcctgaggatgttaaaagatactggaattccagatattgaaatagaaaacaatgggactcctcatgatagtgctgctatgcaaggaggtaactattactgtttagaaatggcacaacagttgtattcagcctgaaaggtcctcgctggctttacataaatgaagatgcttgtgattccagtttatctctgaaactattcaacatggagttatttcagttttgtttatcagcaaagctttgtttactgaaggagctatttaatctatgttacattaaaaaagaaacgcgtgtacattttaaaagcaatgatgtaaactttgttcttgcattagactgaccagtttaaaaatatgaactaaaacctaatggctaaagtaacttgaccatatttgatgcttttctatgctcatttcaacttggctttttgtcttttaaatttttaaaaaatgcagtagtgtgttagagactagaaagttatatgtatggtttccctgttctactatacataacgttaaagtacaccttctttgttaaaaatgtacttgctaaacttcagcgtaaataaaaacattttgactttg

SEQ ID NO: 12795 - protein, 599 aa, Homo sapiens; identical to SEQ ID NO: 2276

SEQ ID NO: 12796 - DNA, 1764 bp, Homo sapiens
atatgcacccaaagcactcttagttgcagccaaagcagtggaagttcaagacccggcaggccccctaagcgttctttgggagtgttgcaggaaaatgcccgccttctgacccatgcagtcccaggcctcttatcgccaggacttatcactccgacaggtataacagctgcagcgatggctgaggcgatgaaacttcagaagatgaagcttatggctatgaacactcttcagggaaatggaagccaaaatgggaccgaatcagagcctgatgatcttaattctaacacaggtggaagtgaatcctcctgggataaagataagatgcagtctccatttgctgcacctggaccccaacatggaattgctcatgcagccctagctggccagccaggcattgggggtgctccaaccctcaatccactgcagcagaaccacctgctaaccaatagactggatctgccatttatgatgatgcctcatcccctacttccagtcagcttacctcctgcatcagttgccatggcaatgaatcagatgaaccatctcaatactattgccaacatggctgctgcagcacagattcacagtccactctccagagctggtacctctgttataaaggagcggatcccagagagtccttctcctgctccttctctagaagagaatcatcgtcctgggagccagacctcttcccacaccagcagcagtgtgtccagctctccctctcagatggatcatcatttggaaagaatggaagaggtaccagttcaaattccaataatgaagtcacccttggacaagatacagctgactcctgggcaggcattgcccgctggattccctggaccattcatttttgctgatagtctgtcctccgtggagactctgttgaccaacattcagggtctgctgaaagttgctttggataatgctcgcatccaggagaagcagattcaacaagaaaagaaggagctgcgactggagctctatagagagagagaaattagagaaaaccttgaaagacaacttgcagttgagcttcaaagcagaactactatgcaaaagcgcctgaagaaggagaaaaaaaccaagagaaaattgcaggaagccttggaatttgaatcaaagcgccgggagcaagtggagcaggcacttaagcaagccaccactagtgacagtggcctgaggatgttaaaagatactggaattccagatattgaaatagaaaacaatgggactcctcatgatagtgctgctatgcaaggaggtaactattactgtttagaaatggcacaacagttgtattcagcctgaaaggtcctcgctggctttacataaatgaagatgcttgtgattccagtttatctctgaaactattcaacatggagttatttcagttttgtttatcagcaaagctttgtttactgaaggagctatttaatctatgttacattaaaaaagaaacgcgtgtacattttaaaagcaatgatgtaaactttgttcttgcattagactgaccagtttaaaaatatgaactaaaacctaatggctaaagtaacttgaccatatttgatgcttttctatgctcatttcaacttggctttttgtcttttaaatttttaaaaaatgcagtagtgtgttagagactagaaagttatatgtatggtttccctgttctactatacataacgttaaagtacaccttctttgttaaaaatgtacttgctaaacttcagcgtaaataaaaacattttgactttg

SEQ ID NO: 12797 - protein, 380 aa, Homo sapiens
MAEAMKLQKMKLMAMNTLQGNGSQNGTESEPDDLNSNTGGSESSWDKDKMQSPFAAPGPQHGIAHAALAGQPGIGGAPTLNPLQQNHLLTNRLDLPFMMMPHPLLPVSLPPASVAMAMNQMNHLNTIANMAAAAQIHSPLSRAGTSVIKERIPESPSPAPSLEENHRPGSQTSSHTSSSVSSSPSQMDHHLERMEEVPVQIPIMKSPLDKIQLTPGQALPAGFPGPFIFADSLSSVETLLTNIQGLLKVALDNARIQEKQIQQEKKELRLELYREREIRENLERQLAVELQSRTTMQKRLKKEKKTKRKLQEALEFESKRREQVEQALKQATTSDSGLRMLKDTGIPDIEIENNGTPHDSAAMQGGNYYCLEMAQQLYSA

SEQ ID NO: 12798 - DNA, 1628 bp, Homo sapiens
aggagtaagtggagaggtagagggcagaagaaaaggggtcaagaaggcaggaccccgtgaagcacacctttcctaaggattttgacgaatgagaatgaagataaactgtgagttgaaagtgaaagagaaagcataagggatcttaggtgcatctgacaagccttagatgacctccagcaacttcagttctcaccgaattactgcatttcagccttactgagaagcagccagtcatactatcctcaaattttaacccaggatgagttatcctactaaagaaggaagtgatacagctggaaatgctcacaaaaattctgaaaatgagcctcctaatgactgtagtacagacatagagtctccatctgctgatcccaatatgatctatcaggtagaaaccaacccaataaacagggagccaggcacagcaacctcccaggaagatgttgttcctcaagcagcagaaaacagcgagctcgaaacagagatccaaaaagatcaacgagaagaagatctaaaagaagagcttcttctacttcagacccccattcccagaaaattggtctctcacaagcccttaaatgatagatcaagatcccactcagggaaagttgagatgaaagcaaacaatttccccataaatcacaaaactcgttttcgactttcaacttcatggagagtcccatttattaacagtcatgagataagaagtatgattctccatctgctatgtgatagatatttctctcaggctgcagggtgtcagaataccatgtgggtaaagcgaaaatatatagcatgtctttaccatccaaatagtttcacccatcacgagagagccataacatttagaaggccttcgagggtgcactactaccgtcccctcactgagagaatgacatcaggaaaattttgcaaatcaactgacactaaagggaaatgtagattccgtgctattgtgaggtctgtgctctttgtgtcacagatacaaattgaaagtatttttaatataaaaggttttgtggatatattgacatatatccataccatgaatgttatgatcacaaacaccaataatggttggaaatacttttgtcccatctgtggaaggctttttaacacttactctgaattaagacaacattcatgcagctcttctgggaattaaattaaattggggtaaattcattttaaaatataacttctaaaattcataatttgactactaaagtaagacaaaattgcatgaacataaattttagtattattagagggagtagcagaaaggaacacaaactaatagtacctctcagtaagaaatacctatggggagtgaggaaacatctgtttatactttgcttttacaagtacatcattgaaatatcagacctgtcatctatattgagtcagcatttgaaccaagtaaatgttttcactgtcttaacatctatttctgtagatgtaaatattgttaacataaaagaatccaagttaacaggatcctgactaagatagcaaacatatattggaaggccagacaaagttctaccaagtgtttccagagattctgctacatgtattatctgaaatgttctccatatattcaataaaaaccaatttgaagacataga

SEQ ID NO: 12799 - protein, 301 aa, Homo sapiens
MSYPTKEGSDTAGNAHKNSENEPPNDCSTDIESPSADPNMIYQVETNPINREPGTATSQEDVVPQAAENSELETEIQKDQREEDLKEELLLLQTPIPRKLVSHKPLNDRSRSHSGKVEMKANNFPINHKTRFRLSTSWRVPFINSHEIRSMILHLLCDRYFSQAAGCQNTMWVKRKYIACLYHPNSFTHHERAITFRRPSRVHYYRPLTERMTSGKFCKSTDTKGKCRFRAIVRSVLFVSQIQIESIFNIKGFVDILTYIHTMNVMITNTNNGWKYFCPICGRLFNTYSELRQHSCSSSGN

SEQ ID NO: 12800 - DNA, 1580 bp, Homo sapiens
ggagaggtagagggcagaagaaaaggggtcaagaaggcaggaccccgtgaagcacacctttcctaaggattttgacgaatgagaatgaagataaactggtgcatctgacaagccttagatgacctccagcaacttcagttctcaccgaattactgcatttcagccttactgagaagcagccagtcatactatcctcaaattttaacccaggatgagttatcctactaaagaaggaagtgatacagctggaaatgctcacaaaaattctgaaaatgagcctcctaatgactgtagtacagacatagagtctccatctgctgatcccaatatgatctatcaggtagaaaccaacccaataaacagggagccaggcacagcaacctcccaggaagatgttgttcctcaagcagcagaaaacagcgagctcgaaacagagatccaaaaagatcaacgagaagaagatctaaaagaagagcttcttctacttcagacccccattcccagaaaattggtctctcacaagcccttaaatgatagatcaagatcccactcagggaaagttgagatgaaagcaaacaatttccccataaatcacaaaactcgttttcgactttcaacttcatggagagtcccatttattaacagtcatgagataagaagtatgattctccatctgctatgtgatagatatttctctcaggctgcagggtgtcagaataccatgtgggtaaagcgaaaatatatagcatgtctttaccatccaaatagtttcacccatcacgagagagccataacatttagaaggccttcgagggtgcactactaccgtcccctcactgagagaatgacatcaggaaaattttgcaaatcaactgacactaaagggaaatgtagattccgtgctattgtgaggtctgtgctctttgtgtcacagatacaaattgaaagtatttttaatataaaaggttttgtggatatattgacatatatccataccatgaatgttatgatcacaaacaccaataatggttggaaatacttttgtcccatctgtggaaggctttttaacacttactctgaattaagacaacattcatgcagctcttctgggaattaaattaaattggggtaaattcattttaaaatataacttctaaaattcataatttgactactaaagtaagacaaaattgcatgaacataaattttagtattattagagggagtagcagaaaggaacacaaactaatagtacctctcagtaagaaatacctatggggagtgaggaaacatctgtttatactttgcttttacaagtacatcattgaaatatcagacctgtcatctatattgagtcagcatttgaaccaagtaaatgttttcactgtcttaacatctatttctgtagatgtaaatattgttaacataaaagaatccaagttaacaggatcctgactaagatagcaaacatatattggaaggccagacaaagttctaccaagtgtttccagagattctgctacatgtattatctgaaatgttctccatatattcaataaaaaccaatttgaagacataga

SEQ ID NO: 12801 - protein, 301 aa, Homo sapiens; identical to SEQ ID NO: 12799

SEQ ID NO: 12802 - DNA, 786 bp, Homo sapiens
cctgatttaccaacataacctgtttctggccatgctgtgaatctgcattctttactgtgtccttgggatactaggaggaaccagaggagcagatcctgctaggaggctaagcatgaagaaggaattcaaagaaaccttgtggagaacgaagacacagcagggagtctctgatcaagtgccacatctttagagaagcttttccaaacaaccgattatgaagtacacattaacaatgaagcctcttttcaagtaaagaagttttatttgatatgattaaaataactataacatatatgcgaaatatgaagccaaataataaaattaagaagcatggatccatcattctactcaaaaagccttcaagctccagataatcctcagtgaggtatactgtccgctcaatatccaagagtcacccttctacaagggacctctagactgcccataagtgagacatgacagaggtaaagtcatgctcctgtctcccttggacctggctggaaactgcattcatcaacccatggaaccacccccctgccatgaaagctagcaagaggccaagacccacagaacaaccaccatcatccctctgtcagcaggaagcggttacaaaagactaacctttgcccattttccccaaagaattggggtcttggaatcttgagggaggaaatgttacagtaggtagctagtcagacatgagcagagcagaagagggcttacacacacacacacacacacacacacacacaccccacacacaaagaatcctgggcaaccatcagg

SEQ ID NO: 12803 - protein, 34 aa, Homo sapiens
MIKITITYMRNMKPNNKIKKHGSIILLKKPSSSR

SEQ ID NO: 12804 - DNA, 716 bp, Homo sapiens
gagaccaatttggcctggggagaaccgccttcaggcgtttggactcagtggaggttgtgagtgcccagcagtgtggcctgaatctccgtggggtttagggagacgaaaggaccccagatcgacgtcccctcgttcccactttggggatcggcgctctggctgtttcgtgaaggagagagaggttgattccataccctggctattgtgaataatgctgcagtgaacatgggagtacatacatctgtttgaggaactcagagtggttttccagatgggaatcacattgctctctgtccctgagatcttgctggagacagggctactcagtccctctttgccaggtaatctgttccagaagaaacatgtgtcgttctgactgagcccctgcctgtctgtcaccttaagagccagtcaattcatatggtccccatatcaaagtctcctgtgcccagagagaggatttcatttcaaccatcaccatcaccaccatcatcatcatcaccaagagatgttgttgaattgatactggaaaagcagtttctattgagcccccaaatgaagagtgagtgcagatgaagaggaggcaggactcacaagcccttgaactttattccagatctgttagcacctacaggaccctgcaccaggatttcatctgtactatcagcttcttcaaagagagagaggttgttgaattgatattggaaaagcagttt

SEQ ID NO: 12805 - protein, 51 aa, Homo sapiens
MVPISKSPVPRERISFQPSPSPPSSSSPRDVVELILEKQFLLSPQMKSECR

SEQ ID NO: 12806 - DNA, 2101 bp, Homo sapiens
ggagaaccgccttcaggcgtttggactcagtggaggttgtgagtgcccagcagtgtggcctgaatctccgtggggtttagggagacgaaaggaccccagatcgacgtcccctcgttcccactttggggatcggcgctctggctgtttcgtgaaggagagagaggttgattccataccctggctattgtgaataatgctgcagtgaacatgggagtacatacatctgtttgaggaactcagagtggttttccagatgggaatcacattgctctctgtccctgagatcttgctggagacagggctactcagtccctctttgccagattgatactggaaaagcagtttctattgagcccccaaatgaagagtgagtgcagatgaagaggaggcaggactcacaagcccttgaactttattccagatctgttagcacctacaggaccctgcaccaggatttcatctgtactatcagcttcttcaaagagagagaggttgttgaattgatattggaaaagcagtttcccattgagtctcaaatgaagagagtgcagatgaagaggagctcttcatgtggatgtctgagctcatatcaggtgtctgaaagaggcagattctgaggatttgggtcatgatggctgccaaagcttctactcctgacttaaagggcaacaatcctaggagaccaccagcacttacatccctggtaggacatgacacctgcttatggctcagaagtgacaaaagagaattatcaggatggcagtccttataaccagatgcttatcaacattcttcactacattctgaagatgaatttctacaagggaaattgtttatatttgttgttggggatagataaggaaagaagaaaaaggctctggtgagaaacccattgtaccttctggatatgatcactacccaattttatcagtgtcattgatcactaacccagtgcctcgtatggtgccaggcacagagttactccaagaatgtacaataatggctggattctctttctccctgtgcaactcttcatgcatgtgactgaacttatattaagtgtctgaaggaggttcgttctgaggatctgggacatgatgggtgctgaagcttctactcaagatttgaagggcagctgtcctcaggagacccctggcacttccctccatggtgggatgtgatgcctgattccagtgagttcatagagctgaacaaaagtacgttgtggaatagctcctgtgaggttcacaacatagtccggaagatgagaaactactttttttagtaacctggattcccatctaagagatgccttactttatcgtaaagcaatgagttgttcacttgaggagggaacttcatgtttaacatgtatttgcaacaaatttacatacattttctgcctgtatgaatagttgtcagtgatgcccatgaatttctcagatggatgttgaagtatacagttagaaggttagaagatcttcctagcaatctgtgattacggtatgcattcttccatggtttctacgtttttgtctattctataatgaaattttctaagaagccagaaattaattaagtgctacctaaaaatatcaaaatgtcaggtacaagaatttggcattttcaaaattagtaattacaatgtaagtttgccctattataatgatacccagctatgtccagtaacataactagattgttctgaataccgttattatttcccaataatacaaacatcacaatttcagttctgtagtacctggcctacctacccttcccactgccttgccccaggtaaacacagcatgcctgtcactatacattattttacatgcctggaaatatatttaaatggaatcatagaggtggtttcttttttttttttttatcaacacctggcttttttcattcactccacttatttttatatttatccattttattgcatttatctattgatatacttcattctttttgattgctaaatactattgcggtatacaaccacactaaacattttattatccatccatttgtcgatggacattttggttgtttctcatttggggctcttgtaaataaagctgctatgaacatt

SEQ ID NO: 12807 - protein, 79 aa, Homo sapiens
MKRRQDSQALELYSRSVSTYRTLHQDFICTISFFKEREVVELILEKQFPIESQMKRVQMKRSSSCGCLSSYQVSERGRF

SEQ ID NO: 12808 - DNA, 617 bp, Homo sapiens
tgagtgcccagcagtgtggcctgaatctccgtggggtttagggagacgaaaggaccccagatcgacgtcccctcgttcccactttggggatcggcgctctggctgtttcgtgaaggagagagaggaactcagagtggttttccagatgggaatcacattgctctctgtccctgagatcttgctggagacagggctactcagtccctctttgccaggtaatctgttccagaagaaacatgtgtcgttctgactgagcccctgcctgtctgtcaccttaagagccagtcaattcatatggtccccatatcaaagtctcctgtgcccagagagaggatttcatttcaaccatcaccatcaccaccatcatcatcatcaccaagagatgttgttgaattgatactggaaaagcagtttctattgagcccccaaatgaagagtgagtgcagatgaagaggaggcaggactcacaagcccttgaactttattccagatctgttagcacctacaggaccctgcaccaggatttcatctgtactatcagcttcttcaaagagagagaggttgttgaattgatattggaaaagcagtttcccattgagtctcaaatgaagaaagag

SEQ ID NO: 12809 - protein, 56 aa, Homo sapiens
MKRRQDSQALELYSRSVSTYRTLHQDFICTISFFKEREVVELILEKQFPIESQMKK

SEQ ID NO: 12810 - DNA, 1161 bp, Homo sapiens
gcagatggctgaaattctgatccgatgtggctggttaatgcatgatctgaaaacccctgcactggtgattttgggacagatctagaatataccaataaatatattaacataccaagtagtctaggagcagccactgggcgaacaccaaaccttgcatccctgctgctgtctctgagctcagcagacacgtctttgcagaagagttctataatggtggtacaatggtgccccctcgtgacagaagcttgaactacagcttgaacatcgtgtgacatgatgaatgaatttattgagccccaggaagaaggaaaattaaagaagagcaaagaataatagctggacagaagatgggggtcattgaacctatatcctagttgccagaccagtaaactgaccatgggacctgggggaggcagcagatgaccgaaaacctggagtgatgtggctgaataccgcatgatctgaagactgcactggtggctgcggtatgggtccaaatttttccttaacaaaaacaaaaaaagagcccaaaaccatactgactagtccaggaatagccattaggcaaacaactttttgctaccctggtgttaccgatttctgaactcaacaggtgaattcaaagatatgcctgtctttccagcatggggagctggatttgggtcagctcaggcgcatgatgttgaacagctcttatgagcttctgatagtgcccaggaagtacagaaacaactgtctacaaatctttgaactcaaggcatatcacagggacatttgctttcttcaactagatatctgttttctcataaagagaaacaatgagaaatggtttttcacaatgcctcgttagccctgaggctcagccatcccctagtgctgtgtcccaacatttaaaggccgttgaagtcccactctatgccatatactctgtacaggttttctcatttacccctcaggacagcactgtaaggatggtgtggtcagtcccatttcatagatgaccaaactcaggctttcagagcctaagtcacttctccagataggtggtaggattgaaatgaggttccatccctcatcatccatagacagccctgagtagcctcccttttagaagatgggcttccagggcttgagaaatggtcagattccacccccctgcta

SEQ ID NO: 12811 - protein, 60 aa, Homo sapiens
MRNGFSQCLVSPEAQPSPSAVSQHLKAVEVPLYAIYSVQVFSFTPQDSTVRMVWSVPFHR

SEQ ID NO: 12812 - DNA, 1077 bp, Homo sapiens
aggcccggcaccgcctctgcgcacaaccttgctggtctggcccaggcggggggcggggccagcacgatgagcgccccgggcagccccgaccaggcctacgacttcctgctcaagttcctgctggtgggcgacagggacgtaggcaagagtgagatcctggagagcctgcaggacggcacggccgagtccccgtacagtcacctggggggaatcgactacaagacgaccaccatcctgctggacggccagcgggtgaagctgaagctctgggatacgtcggggcagggaagattttgtaccatattccgctcctactctcgtggtgcacaaggagtgatcctggtctacgacattgcaaaccgctggtctttcgagggtatggatcgatggattaagaagattgaggaacatgcccctggtgtccctaaaatcctggtggggaatcgcctacatctggcattcaagaggcaggtgcccagggagcaggcccaggcctacgccgagcgcctgggcgtgaccttctttgaggtcagccctctgtgcaatttcaacatcatagagtctttcacggagctggccaggatagtgctgctgcggcacaggttgaactggctcgggaggccgagcaaggtactgagcttgcaagacctctgctgccgcaccatcgtgtcctgcacacctgtgcatctggtggacaagctcccgctccccattgccttaagaagccacctcaagtccttctccatggctaagggcctgaatgccaggatgatgcgaggcctctcctactccctcaccaccagctccactcacaaaaggagcagcctctgcaaagtgaagatcgtctgcccaccccagagcccacccaaaaactgcaccagaaacagctgcaaaatttcttaaggaaggcaccaaaaggaaacaagctggaatcgctccaggaaaaactctgaatggttacacctggaagagggaagatgcattctagattcaaagaaatacgttttcagtttctcatgggaacaatgctgcttgggaatgtgtgtgatgccttctgtcaataaaagcactttacgc

SEQ ID NO: 12813 - protein, 278 aa, Homo sapiens; identical to SEQ ID NO: 2280

SEQ ID NO: 12814 - DNA, 893 bp, Homo sapiens
cttggcggtgacgcacggccctcacgtgaccgggagctgcagagctacgcagccttcggtgcagtcgtcactcgtgtctcgctaccagctccccgctgccctgcgctcggcgggctggcatccggcccgggggaaagcggaccagcccttctgcaggtctgcggggccaagtgtcccggcggcgcacctcgtggcgagaatcgggagaaggaggagactacaaggataggcccaggagtaatggagtccaaagagaaacgagcagtaaacagtctcagcatggaaaatgccaaccaagaaaatgaagaaaaggagcaagttgctaataaaggggagcccttggccctccctttggatgctggtgaatactgtgtgcctagaggaaatcgtaggcggttccgcgttaggcagcccatcctgcagtatagatgggatatgatgcataggcttggagaaccacaggcaaggatgagagaagagaatatggaaaggattggggaggaggtgagacagctgatggaaaagctgagggaaaagcagttgagtcatagtctgcgggcagtcagcactgacccccctcaccatgaccatcatgatgagttttgccttatgccctgaatcctgatggtttccctaaagttattacggaaacagacccctgctttcgaatttacatgttcatgatgtgcccttgttgtaaacctttacctgtcacttgtttacgtgggtctcctattaccagcttctaattgaatattgtgtttttgaaccagtctgtaagatttttgttagcagaagaattttacctattgcatggaaagatgctcattatagtgaagttaataaagcacctttaaaaagcaatctctatattctttttttgttaaaaattt

SEQ ID NO: 12815 - protein, 125 aa, Homo sapiens; identical to SEQ ID NO: 2282

SEQ ID NO: 12816 - DNA, 862 bp, Homo sapiens; identical to SEQ ID NO: 2281

SEQ ID NO: 12817 - protein, 125 aa, Homo sapiens; identical to SEQ ID NO: 2282

SEQ ID NO: 12818 - DNA, 1944 bp, Homo sapiens
gtaagcaaggcttgaggcttgctctcgccttcgtcagcagccctcctcaatcttctccaaactcccgtccccaggccacacagattctcctcaagagagccctataaggacattggtaaaatgtcactgccttcaggacacactacgggtcacactgatcaagttgttcaaagaagagcaagatgttgggatatttaccaaaggagatttagcagtaggtctgaacctgtcaatcctggcatgcattcttcatcccatcagcagcaagatggagatgcagcaatgcatggtgcccacatggactctccagtaagatacactccctatactatttcaccctataatcggaaaggcagttttcgtaaacaagaccaaacccacgttaacatggagagagagcaaaaacctccagagagaagaatggaggggaacatgccggatgggaccttagggagctggttcaagatcacagttccctttggcataaaatacaatgagaagtggctgctgaatttgattcagaatgaatgcagtgtacccttcgtcccagttgagtttcactatgaaaacatgcatgccagcttctttgtggagaatgccagcatcgcctatgcactgaagaatgtcagtggcaagatttgggatgaggataatgaaaagatatcaatctttgtcaaccctgctggcataccccactttgtgcacagggagctgaagtcagaaaaggtggagcagataaagctggccatgaaccaacagtgtgatgtctcccaggaagctcttgatatccagagactcccattttacccagacatggtgaaccgtgatactaagatggcatcgaatcctagaaagtgcatggctgcctccctggacgtccatgaagagaacatacctacagtgatgtctgcaggggagatggacaagtggaaagggatagagccaggagagaagtgtgcggacagaagcccagtgtgcacgaccttctcggatacctccagcaacataaactccatcctggaattgttccccaaattattatgcctggatggccagcagtcacccagagcaactttatgtggtactgaagcccacaagaggttaccaacctgtaagggaagcttctttggatctgagatgttgaagaatctggtcctgcaattcctgcagcagtattacttgatctatgactctggagatcgacagggtctccttagtgcttaccacgatgaggcctgcttctccctgagcattcccttcaatcctgaggactcagccccgagcagcttctgcaagttcttcaaggatagcaggaatataaaaattctcaaggacccctaccttcggggggagctgctgaagcacacaaaacttgatattgtggactccctcagtgcgttgcctaaaactcagcatgacctcagctccttcctggtggacatgtggtaccagacggaatggatgctctgcttttctgtcaacggggtgttcaaggaagtggaaggacagtctcagggttctgttctcgccttcacccggaccttcattgctacccctggcagcagttccagtctgtgcatcgtgaatgacaagctctttgtgcgggataccagccaccaagggacccagagtgccttgttcaccctagtgcccacagccttctccagctccgtgcctgccttctcccaggagcagcagaaaatgctgccttcgtaacaaccagtgtgactacgtcagagctcctcatgttcttgcatggcccaagatgtatttccctgtgactgaaccaggagatctggctggggctaagaagccgaagcccaactcacagggctgactctcatccttccaaaggggccagttgttctgtgcacttgtccacccctgttacccccaggatctctgttccttttcacaataaagtatggtgtcttgttatgtcaa

SEQ ID NO: 12819 - protein, 531 aa, Homo sapiens; identical to SEQ ID NO: 2284

SEQ ID NO: 12820 - DNA, 2276 bp, Homo sapiens
tgtcatgccatctcttcctctggccaatgctaggagctgggccctccttggggagaaacctgggtttcctgagtcaagggaccagaagcgggccacattcctgaggcaggagtggaaggcagagggcagaggaggttgaggagacagaaggacaggcctctcagggcactgcccctccttccctccttctccacctcacatcatcctgcctgggtcctcagaggagccctgggtagcccgagatgggtagcattcctcggtcaaggcatcagcacagaggggcacaggagtctgggaccatcagaagagaatgcagtggtcgggagagggggtccccagactctgaaccccatgctgagctggggcttgacccttcacttctcccgggagaaggtctcctgtccccgtggctgctctgtttcccatgcccagctcagactgagctcacacaggtgagaaaggctccagctgcatccagtgggccccagcccaacaggcgcatgttttcctttcttgcctcggtccccagggccagctggggccagtgagggaaagggctgcagcaggggagcccttttcttctctcttcctccctgaactccaccaccacggtagagcatctttcccttccctttgctttgcatcctgtttctccattgtctctcctctcatatgtctcacctgtctctccctcccctaccttcaccccgtttctgccatcattcccctgccttccccttctgcctcctgagcctgcgtcactcacctccctgtcccagcatcctgggccatccctaagagctgacctggtcttggccagggccaggacaggcagactgacggacatccagtgaggtagcagagccctgggctcccaccccatttcctactccctgcagagccttcagtggggacttggacaaaggtgagagagggatggagggaggggaagaaagtcctgaagcctgggctcccaatgctgcccagggctgcagaggcaggaacttcggagtgtaggtggacacactgcactgtgtctctgacgtaggtgtgattgctcccatgaggaggacagctccacagtttcacttaccgttgtccattttgttttgattttcggcagctccatcctggaattgttccccaaattattatgcctggatggccagcagtcacccagagcaactttatgtggtactgaagcccacaagaggttaccaacctgtaaggtgagaagagaggatccagcagggtggtgcatgaggaagggggggtaccatctgtggtcctggggactctttattccagggaagcttctttggatctgagatgttgaagaatctggtcctgcaattcctgcagcagtaagtatccctgggaatctgaggcaagagaaggctaggtcagatgaatttacccaagtacaagtctgcctacagtcagactttcaagactcatttggcacccaggccacagagatagcctgtcctcactggtctccaacaggtattacttgatctatgactctggagatcgacagggtctccttagtgcttaccacgatgaggcctgcttctccctgagcattcccttcaatcctgaggactcagccccgagcagcttctgcaagttcttcaaggatagcaggaatataaaaattctcaaggacccctaccttcggggggagctgctgaagcacacaaaacttgatattgtggactccctcagtgcgttgcctaaaactcagcatgacctcagctccttcctggtggacatgtggtaccagacggaatggatgctctgcttttctgtcaacggggtgttcaaggaagtggaaggacagtctcagggttctgttctcgccttcacccggaccttcattgctacccctggcagcagttccagtctgtgcatcgtgaatgacaagctctttgtgcgggataccagccaccaagggacccagagtgccttgttcaccctagtgcccacagccttctccagctccgtgcctgccttctcccaggagcagcagaaaatgctgccttcgtaacaaccagtgtgactacgtcagagctcctcatgttcttgcatggcccaagatgtatttccctgtgactgaaccaggagatctggctggggctaagaagccgaagcccaactcacagggctgactctcatccttccaaaggggccagttgttctgtgcacttgtccacccctgttacccccaggatctctgttccttttcacaataaagtatggtgtcttgttatgtc

SEQ ID NO: 12821 - protein, 91 aa, Homo sapiens
MWYQTEWMLCFSVNGVFKEVEGQSQGSVLAFTRTFIATPGSSSSLCIVNDKLFVRDTSHQGTQSALFTLVPTAFSSSVPAFSQEQQKMLPS

SEQ ID NO: 12822 - DNA, 1274 bp, Homo sapiens
gtgaccggccaacactgagtgttgtctcgctctggcgtcagagccgtcgtggctcgttccattctcggcggtggtacctgctcccggtggccctgaggacgtgtgggccaggggcggccccgaaattaggaagcggagggggagcagtctgcaggtctgcggggctaagtgtcgcggcggcgcacctcgcgtcaagaatccggaggaggagactgcaaggataggcccaggagtaatggagtccaaagaggaactagcggcaaacaatctcaacggggaaaatgcccaacaagaaaacgaaggaggggagcaggcccccacgcagaatgaagaagaatcccgccatttgggagggggtgaaggccagaagcctggaggaaatatcaggcgggggcgagttaggcgacttgtccctaattttcgatgggccatacctaataggcatattgagcacaatgaagcgagagatgatgtagaaaggtttgtagggcagatgatggaaatcaagagaaagactagggaacagcagatgaggcactatatgcgcttccaaactcctgaacctgacaaccattatgacttttgcctcataccttgaatcctaaaagttttcgctgaggttaatgtgaacactgctttacaagcttgtatttttgtgatttactttttctgtaagccttttggggtttacacttaccagtttctaatggaaattagaattctaattgaatattgttttgtctcagcctaaaagttacggtcagcatggcaattcacctattttaggaaaaatactcttttcataatatgaaatgcataaagcagttcaaaaagcagtctgtattccatcatcttcctttttcattccagtccttatttttgtaagtattacttttcctcctccggctacctggactcaaaatctcagttgtctttgacagtttttttcttgtccctgaccaaaaaagaatgatcatacccagaattcaatgtttgatattttaagaatgtatgttctagtgtttttcagagtgagtctaccatctgtataaaaacaccttgggggcaggcaggggcatttaaaaatgtaggacctatcgtccagactcacagagtggggctccagaatctccatttttaacaaactctcttaagtaattctgatgtgtaccaaaatcagtgccattggtgtgtgtgtacgtaactatatacatatgtgtgtgtgtgtatatatataatgtgtcataaccgtaaacaataaacaatatcaagat

SEQ ID NO: 12823 - protein, 120 aa, Homo sapiens; identical to SEQ ID NO: 2286

SEQ ID NO: 12824 - DNA, 1798 bp, Homo sapiens
gtgaccggccaacactgagtgttgtctcgctctggcgtcagagccgtcgtggctcgttccattctcggcggtggtacctgctcccggtggccctgaggacgtgtgggccaggggcggccccgaaattaggaagcggagggggagcagtctgcaggtctgcggggctaagtgtcgcggcggcgcacctcgcgtcaagaatccggaggaggagactgcaaggataggcccaggagtaatggagtccaaagaggaactagcggcaaacaatctcaacggggaaaatgcccaacaagaaaacgaaggaggggagcaggcccccacgcagaatgaagaagaatcccgccatttgggagggggtgaaggccagaagcctggaggaaatatcaggcgggggcgagttaggcgacttgtccctaattttcgatgggccatacctaataggcatattgagcacaatgaagcgagagatgatgtagaaaggtttgtagggcagatgatggaaatcaagagaaagactagggaacagcagatgaggcactatatgcgcttccaaactcctgaacctgacaaccattatgacttttgcctcataccttgaatcctaaaagttttcgctgaggttaatgtgaacactgctttacaagcttgtatttttgtgatttactttttctgtaagccttttggggtttacacttaccagtttctaatggaaattagaattctaattgaatattgttttgtctcagcctaaaagttacggtcagcatggcaattcacctattttaggaaaaatactcttttcataatatgaaatgcataaagcagttcaaaaagcagtctgtattccatcatcttcctttttcattccagtccttatttttgtaagtattacttttcctcctccggctacctggactcaaaatctcagttgtctttgacagtttttttcttgtccctgaccaaaaaagaatgatcatacccagaattcaatgtttgatattttaagaatgtatgttctagtgtttttcagagtgagtctaccatctgtataaaaacaccttgggggcaggcaggggcatttaaaaatgtaggacctatcgtccagactcacagagtggggctccagaatctccatttttaacaaactctcttaagtaattctgatgtgtaccaaaatcagtgccattggtgtgtgtgtacgtaactatatacatatgtgtgtgtgtgtatatatataatgtgtcataaccgtaaacaataaacaatatcaagataaatctgactttgatgggcaagtaattaaaaaagaaaagtatgagaccttaaaataagactgatgattataggagtggtagggacagtggcaaagttattcactgtgcaaagcaaaacatgcctgaaggtcacagcctgaggaactcagaattcatcacccctgtcagcagtttcacatccaggatctcattttattcttagaacaacctataaaatctgtattgttatcccacttttacagatgaggtcactggggcttagagatgttaagtaccaaggctaactcctgctgaatatcttgggggtgggggaatccagcctgggccattttctattggaccttatcatctggagatgcagaatatttgacttttgtaacttgatgacaagctgaggatggtaaaagagactcagcaagaatggggctgtttttctatacactgtttttctacatctcaagtacactttaatttttagaatattgagggataaaaaaagtaagatcctctagtgttgttcaaag

SEQ ID NO: 12825 - protein, 120 aa, Homo sapiens; identical to SEQ ID NO: 2286

SEQ ID NO: 12826 - DNA, 1167 bp, Homo sapiens
tctcgctctggcgtcagagccgtcgtggctcgttccattctcggcggtggtacctgctcccggtggccctgaggacgtgtgggccaggggcggccccgaaattaggaagcggagggggagcaggagtaatggagtccaaagaggaactagcggcaaacaatctcaacggggaaaatgcccaacaagaaaacgaaggaggggagcaggcccccacgcagaatgaagaagaatcccgccatttgggagggggtgaaggccagaagcctggaggaaatatcaggcgggggcgagttaggcgacttgtccctaattttcgatgggccatacctaataggcatattgagcacaatgaagcgagagatgatgtagaaaggtttgtagggcagatgatggaaatcaagagaaagactagggaacagcagatgaggcactatatgcgcttccaaactcctgaacctgacaaccattatgacttttgcctcataccttgaatcctaaaagttttcgctgaggttaatgtgaacactgctttacaagcttgtatttttgtgatttactttttctgtaagccttttggggtttacacttaccagtttctaatggaaattagaattctaattgaatattgttttgtctcagcctaaaagttacggtcagcatggcaattcacctattttaggaaaaatactcttttcataatatgaaatgcataaagcagttcaaaaagcagtctgtattccatcatcttcctttttcattccagtccttatttttgtaagtattacttttcctcctccggctacctggactcaaaatctcagttgtctttgacagtttttttcttgtccctgaccaaaaaagaatgatcatacccagaattcaatgtttgatattttaagaatgtatgttctagtgtttttcagagtgagtctaccatctgtataaaaacaccttgggggcaggcaggggcatttaaaaatgtaggacctatcgtccagactcacagagtggggctccagaatctccatttttaacaaactctcttaagtaattctgatgtgtaccaaaatcagtgccattggtgtgtgtgtacgtaactatatacatatgtgtgtgtgtgtatatatataatgtgtcataaccgtaaacaataaacaatatcaagat

SEQ ID NO: 12827 - protein, 120 aa, Homo sapiens; identical to SEQ ID NO: 2286

SEQ ID NO: 12828 - DNA, 1691 bp, Homo sapiens
tctcgctctggcgtcagagccgtcgtggctcgttccattctcggcggtggtacctgctcccggtggccctgaggacgtgtgggccaggggcggccccgaaattaggaagcggagggggagcaggagtaatggagtccaaagaggaactagcggcaaacaatctcaacggggaaaatgcccaacaagaaaacgaaggaggggagcaggcccccacgcagaatgaagaagaatcccgccatttgggagggggtgaaggccagaagcctggaggaaatatcaggcgggggcgagttaggcgacttgtccctaattttcgatgggccatacctaataggcatattgagcacaatgaagcgagagatgatgtagaaaggtttgtagggcagatgatggaaatcaagagaaagactagggaacagcagatgaggcactatatgcgcttccaaactcctgaacctgacaaccattatgacttttgcctcataccttgaatcctaaaagttttcgctgaggttaatgtgaacactgctttacaagcttgtatttttgtgatttactttttctgtaagccttttggggtttacacttaccagtttctaatggaaattagaattctaattgaatattgttttgtctcagcctaaaagttacggtcagcatggcaattcacctattttaggaaaaatactcttttcataatatgaaatgcataaagcagttcaaaaagcagtctgtattccatcatcttcctttttcattccagtccttatttttgtaagtattacttttcctcctccggctacctggactcaaaatctcagttgtctttgacagtttttttcttgtccctgaccaaaaaagaatgatcatacccagaattcaatgtttgatattttaagaatgtatgttctagtgtttttcagagtgagtctaccatctgtataaaaacaccttgggggcaggcaggggcatttaaaaatgtaggacctatcgtccagactcacagagtggggctccagaatctccatttttaacaaactctcttaagtaattctgatgtgtaccaaaatcagtgccattggtgtgtgtgtacgtaactatatacatatgtgtgtgtgtgtatatatataatgtgtcataaccgtaaacaataaacaatatcaagataaatctgactttgatgggcaagtaattaaaaaagaaaagtatgagaccttaaaataagactgatgattataggagtggtagggacagtggcaaagttattcactgtgcaaagcaaaacatgcctgaaggtcacagcctgaggaactcagaattcatcacccctgtcagcagtttcacatccaggatctcattttattcttagaacaacctataaaatctgtattgttatcccacttttacagatgaggtcactggggcttagagatgttaagtaccaaggctaactcctgctgaatatcttgggggtgggggaatccagcctgggccattttctattggaccttatcatctggagatgcagaatatttgacttttgtaacttgatgacaagctgaggatggtaaaagagactcagcaagaatggggctgtttttctatacactgtttttctacatctcaagtacactttaatttttagaatattgagggataaaaaaagtaagatcctctagtgttgttcaaag

SEQ ID NO: 12829 - protein, 120 aa, Homo sapiens; identical to SEQ ID NO: 2286

SEQ ID NO: 12830 - DNA, 587 bp, Homo sapiens
ggcgtcagagccgtcgtggctcgttccattctcggcggtggtacctgctcccggtggccctgaggacgtgtgggccaggggcggccccgaaattaggaagcggagggggagcagtctgcaggtctgcggggctaagtgtcgcggcggcgcacctcgcgtcaagaatccggaggaggagactgcaaggataggcccaggagtaatggagtccaaagaggaactagcggcaaacaatctcaacttgtctttgacagtttttttcttgtccctgaccaaaaaagaatgatcatacccagaattcaatgtttgatattttaagaatgtatgttctagtgtttttcagagtgagtctaccatctgtataaaaacaccttgggggcaggcaggggcatttaaaaatgtaggacctatcgtccagactcacagagtggggctccagaatctccatttttaacaaactctcttaagtaattctgatgtgtaccaaaatcagtgccattggtgtgtgtgtacgtaactatatacatatgtgtgtgtgtgtatatatataatgtgtcataaccgtaaacaataaacaatatcaagat

SEQ ID NO: 12831 - protein, 62 aa, Homo sapiens
RQSRRGSFHSRRWYLLPVALRTCGPGAAPKLGSGGGAVCRSAGLSVAAAHLASRIRRRRLQG

SEQ ID NO: 12832 - DNA, 1111 bp, Homo sapiens
ggcgtcagagccgtcgtggctcgttccattctcggcggtggtacctgctcccggtggccctgaggacgtgtgggccaggggcggccccgaaattaggaagcggagggggagcagtctgcaggtctgcggggctaagtgtcgcggcggcgcacctcgcgtcaagaatccggaggaggagactgcaaggataggcccaggagtaatggagtccaaagaggaactagcggcaaacaatctcaacttgtctttgacagtttttttcttgtccctgaccaaaaaagaatgatcatacccagaattcaatgtttgatattttaagaatgtatgttctagtgtttttcagagtgagtctaccatctgtataaaaacaccttgggggcaggcaggggcatttaaaaatgtaggacctatcgtccagactcacagagtggggctccagaatctccatttttaacaaactctcttaagtaattctgatgtgtaccaaaatcagtgccattggtgtgtgtgtacgtaactatatacatatgtgtgtgtgtgtatatatataatgtgtcataaccgtaaacaataaacaatatcaagataaatctgactttgatgggcaagtaattaaaaaagaaaagtatgagaccttaaaataagactgatgattataggagtggtagggacagtggcaaagttattcactgtgcaaagcaaaacatgcctgaaggtcacagcctgaggaactcagaattcatcacccctgtcagcagtttcacatccaggatctcattttattcttagaacaacctataaaatctgtattgttatcccacttttacagatgaggtcactggggcttagagatgttaagtaccaaggctaactcctgctgaatatcttgggggtgggggaatccagcctgggccattttctattggaccttatcatctggagatgcagaatatttgacttttgtaacttgatgacaagctgaggatggtaaaagagactcagcaagaatggggctgtttttctatacactgtttttctacatctcaagtacactttaatttttagaatattgagggataaaaaaagtaagatcctctagtgttgttcaaag

SEQ ID NO: 12833 - protein, 62 aa, Homo sapiens; identical to SEQ ID NO: 12831

SEQ ID NO: 12834 - DNA, 1666 bp, Homo sapiens
gctcgttccattctcggcggtggtacctgctcccggtggccctgaggacgtgtgggccaggggcggccccgaaattaggaagcggagggggagcaggtaaggaacccggcggggggtccctggggttggtgtgagggagtggctccggcctgcggatgcccaccccgggggagccgtgcggagaagcaatcggtccgcgatgcagcccccgggccccgcggcgggcccgcgagccttccttgagcggagaggtgcccggcccggagggagccggcggtcctggggctacgacccttcggaaacacctgcctacgccatcagcgcaagcttttccgacacccctgccccgcacttcttggtgcagaaaatggtggtcagcttgcggggcggggcggctgaggcggggggcgagggtggcgaggagggccagggccagggccagggccagggcctcggggcggggcgggggaggggccggatggcggtagttcctagctagcgttctgctgcagcagcccccacttcccccaccccggcagtctgcaggtctgcggggctaagtgtcgcggcggcgcacctcgcgtcaagaatccggaggaggagactgcaaggataggcccaggagtaatggagtccaaagaggaactagcggcaaacaatctcaacggggaaaatgcccaacaagaaaacgaaggaggggagcaggcccccacgcagaatgaagaagaatcccgccatttgggagggggtgaaggccagaagcctggaggaaatatcaggcgggggcgagttaggcgacttgtccctaattttcgatgggccatacctaataggcatattgagcacaatgaagcgagagatgatgtagaaaggtttgtagggcagatgatggaaatcaagagaaagactagggaacagcagatgaggcactatatgcgcttccaaactcctgaacctgacaaccattatgacttttgcctcataccttgaatcctaaaagttttcgctgaggttaatgtgaacactgctttacaagcttgtatttttgtgatttactttttctgtaagccttttggggtttacacttaccagtttctaatggaaattagaattctaattgaatattgttttgtctcagcctaaaagttacggtcagcatggcaattcacctattttaggaaaaatactcttttcataatatgaaatgcataaagcagttcaaaaagcagtctgtattccatcatcttcctttttcattccagtccttatttttgtaagtattacttttcctcctccggctacctggactcaaaatctcagttgtctttgacagtttttttcttgtccctgaccaaaaaagaatgatcatacccagaattcaatgtttgatattttaagaatgtatgttctagtgtttttcagagtgagtctaccatctgtataaaaacaccttgggggcaggcaggggcatttaaaaatgtaggacctatcgtccagactcacagagtggggctccagaatctccatttttaacaaactctcttaagtaattctgatgtgtaccaaaatcagtgccattggtgtgtgtgtacgtaactatatacatatgtgtgtgtgtgtatatatataatgtgtcataaccgtaaacaataaacaatatcaagat

SEQ ID NO: 12835 - protein, 120 aa, Homo sapiens; identical to SEQ ID NO: 2286

SEQ ID NO: 12836 - DNA, 2190 bp, Homo sapiens
gctcgttccattctcggcggtggtacctgctcccggtggccctgaggacgtgtgggccaggggcggccccgaaattaggaagcggagggggagcaggtaaggaacccggcggggggtccctggggttggtgtgagggagtggctccggcctgcggatgcccaccccgggggagccgtgcggagaagcaatcggtccgcgatgcagcccccgggccccgcggcgggcccgcgagccttccttgagcggagaggtgcccggcccggagggagccggcggtcctggggctacgacccttcggaaacacctgcctacgccatcagcgcaagcttttccgacacccctgccccgcacttcttggtgcagaaaatggtggtcagcttgcggggcggggcggctgaggcggggggcgagggtggcgaggagggccagggccagggccagggccagggcctcggggcggggcgggggaggggccggatggcggtagttcctagctagcgttctgctgcagcagcccccacttcccccaccccggcagtctgcaggtctgcggggctaagtgtcgcggcggcgcacctcgcgtcaagaatccggaggaggagactgcaaggataggcccaggagtaatggagtccaaagaggaactagcggcaaacaatctcaacggggaaaatgcccaacaagaaaacgaaggaggggagcaggcccccacgcagaatgaagaagaatcccgccatttgggagggggtgaaggccagaagcctggaggaaatatcaggcgggggcgagttaggcgacttgtccctaattttcgatgggccatacctaataggcatattgagcacaatgaagcgagagatgatgtagaaaggtttgtagggcagatgatggaaatcaagagaaagactagggaacagcagatgaggcactatatgcgcttccaaactcctgaacctgacaaccattatgacttttgcctcataccttgaatcctaaaagttttcgctgaggttaatgtgaacactgctttacaagcttgtatttttgtgatttactttttctgtaagccttttggggtttacacttaccagtttctaatggaaattagaattctaattgaatattgttttgtctcagcctaaaagttacggtcagcatggcaattcacctattttaggaaaaatactcttttcataatatgaaatgcataaagcagttcaaaaagcagtctgtattccatcatcttcctttttcattccagtccttatttttgtaagtattacttttcctcctccggctacctggactcaaaatctcagttgtctttgacagtttttttcttgtccctgaccaaaaaagaatgatcatacccagaattcaatgtttgatattttaagaatgtatgttctagtgtttttcagagtgagtctaccatctgtataaaaacaccttgggggcaggcaggggcatttaaaaatgtaggacctatcgtccagactcacagagtggggctccagaatctccatttttaacaaactctcttaagtaattctgatgtgtaccaaaatcagtgccattggtgtgtgtgtacgtaactatatacatatgtgtgtgtgtgtatatatataatgtgtcataaccgtaaacaataaacaatatcaagataaatctgactttgatgggcaagtaattaaaaaagaaaagtatgagaccttaaaataagactgatgattataggagtggtagggacagtggcaaagttattcactgtgcaaagcaaaacatgcctgaaggtcacagcctgaggaactcagaattcatcacccctgtcagcagtttcacatccaggatctcattttattcttagaacaacctataaaatctgtattgttatcccacttttacagatgaggtcactggggcttagagatgttaagtaccaaggctaactcctgctgaatatcttgggggtgggggaatccagcctgggccattttctattggaccttatcatctggagatgcagaatatttgacttttgtaacttgatgacaagctgaggatggtaaaagagactcagcaagaatggggctgtttttctatacactgtttttctacatctcaagtacactttaatttttagaatattgagggataaaaaaagtaagatcctctagtgttgttcaaag

SEQ ID NO: 12837 - protein, 120 aa, Homo sapiens; identical to SEQ ID NO: 2286

SEQ ID NO: 12838 - DNA, 865 bp, Homo sapiens
ttattgctggagaaggagaaaagtgcccaagatcctttcaggattaatttattcaaaaaggaaataaaaaatactcaatatgcaaaagtcttgtgaaaaatgataagaggagtagatgagcttgaaaggcttagggaagagataagaagagtaagaaacaagtttgtgatgatgcattggaagcaaagacattcacgcagccgtccttatcctgtgtgctttaggccttgaattcatttttgcctaatattaaaatctggccccagctttctttctgttagcattttctgatgtatctttgacctccattttacttttaatcatctgatgaaattttgttttaggtaatttccttggtaccagcatctcattggattttggattttgacccattttccaggtctatttttcaattggaaactttcacacatttgcatgggaatatgttcattccatgttgtaaagtaaaacataacaggttatggcaaagcagcatatttaatatcagctcacatatgtaggataaaattccaaactttgtgtgtgtgcgtgtgtgtatacatacatccatataacatatatcacaaacttaaccaagcttatttctgtgtggtgtgaaattttatttgttttcttctttttgttctttttgcttatatgtactttttaatgaacacgtgtctcacacacaaaaagaattaaggattttttttacaagtaagagtcaaataatttgcaaccagcttatgagggcaatgggggcacctaaactcttgatgaaagaactttaaaaagaaatgtaaacctcaaattacctctggatctcttagccagaggaataaactggcaattattacagatacac

SEQ ID NO: 12839 - protein, 43 aa, Homo sapiens
MIRGVDELERLREEIRRVRNKFVMMHWKQRHSRSRPYPVCFRP

SEQ ID NO: 12840 - DNA, 1134 bp, Homo sapiens
acgtgaccaggagtcgacgtgtgcagaagtccttatagtccagggcctgtttccctgtagcagctccttattgctggagaaggagaaaagtgcccaagatcctttcaggattaatttattcaaaaaggaaataaaaaatactcaatatgcaaaagtcttgtgaagaaaatgagggaaaaccacagaacatgccaaaggccgaggaagatcgccctttggaggatgtaccacaggaggcagaaggaaatcctcaaccttccgaagaaggcgtaagccaggaagcagaaggaaaccccagaggagggccgaatcagcctggccagggatttaaagaggacacacccgttaggcatttggaccctgaagaaatgataagaggagtagatgagcttgaaaggcttagggaagagataagaagagtaagaaacaagtttgtgatgatgcattggaagcaaagacattcacgcagccgtccttatcctgtgtgctttaggccttgaattcatttttgcctaatattaaaatctggccccagctttctttctgttagcattttctgatgtatctttgacctccattttacttttaatcatctgatgaaattttgttttaggtaatttccttggtaccagcatctcattggattttggattttgacccattttccaggtctatttttcaattggaaactttcacacatttgcatgggaatatgttcattccatgttgtaaagtaaaacataacaggttatggcaaagcagcatatttaatatcagctcacatatgtaggataaaattccaaactttgtgtgtgtgcgtgtgtgtatacatacatccatataacatatatcacaaacttaaccaagcttatttctgtgtggtgtgaaattttatttgttttcttctttttgttctttttgcttatatgtactttttaatgaacacgtgtctcacacacaaaaagaattaaggattttttttacaagtaagagtcaaataatttgcaaccagcttatgagggcaatgggggcacctaaactcttgatgaaagaactttaaaaagaaatgtaaacctcaaattacctctggatctcttagccagaggaataaactggcaattattacagatacac

SEQ ID NO: 12841 - protein, 117 aa, Homo sapiens; identical to SEQ ID NO: 2288

SEQ ID NO: 12842 - DNA, 1116 bp, Homo sapiens
cgactctcacgtgaccaggagtcgacgtgtgcagaagtccttatagtccagggcctgtttccctgtagcagctccttattgctggagaaggagaaaagtgcccaagatcctttcaggatatttggttttttgggcgcgacacaaatcgaggtgagggaagagagaggaaaatcccctgaatccctgcaggattaatttattcaaaaaggaaataaaaaatactcaatatgcaaaagtcttgtgaagaaaatgagggaaaaccacagaacatgccaaaggccgaggaagatcgccctttggaggatgtaccacaggaggacacacccgttaggcatttggaccctgaagaaatgataagaggagtagatgagcttgaaaggcttagggaagagataagaagagtaagaaacaagtttgtgatgatgcattggaagcaaagacattcacgcagccgtccttatcctgtgtgctttaggccttgaattcatttttgcctaatattaaaatctggccccagctttctttctgttagcattttctgatgtatctttgacctccattttacttttaatcatctgatgaaattttgttttaggtaatttccttggtaccagcatctcattggattttggattttgacccattttccaggtctatttttcaattggaaactttcacacatttgcatgggaatatgttcattccatgttgtaaagtaaaacataacaggttatggcaaagcagcatatttaatatcagctcacatatgtaggataaaattccaaactttgtgtgtgtgcgtgtgtgtatacatacatccatataacatatatcacaaacttaaccaagcttatttctgtgtggtgtgaaattttatttgttttcttctttttgttctttttgcttatatgtactttttaatgaacacgtgtctcacacacaaaaagaattaaggattttttttacaagtaagagtcaaataatttgcaaccagcttatgagggcaatgggggcacctaaactcttgatgaaagaactttaaaaagaaatgtaaacctcaaattacctctggatctcttagccagaggaataaactggcaattattacagatacac

SEQ ID NO: 12843 - protein, 84 aa, Homo sapiens
MQKSCEENEGKPQNMPKAEEDRPLEDVPQEDTPVRHLDPEEMIRGVDELERLREEIRRVRNKFVMMHWKQRHSRSRPYPVCFRP

SEQ ID NO: 12844 - DNA, 1225 bp, Homo sapiens
agtgatgacgcgactctcacgtgaccaggagtcgacgtgtgcagaagtccttatagtccagggcctgtttccctgtagcagctccttattgctggagaaggagaaaagtgcccaagatcctttcaggatatttggttttttgggcgcgacacaaatcgaggtgagggaagagagaggaaaatcccctgaatccctgcaggattaatttattcaaaaaggaaataaaaaatactcaatatgcaaaagtcttgtgaagaaaatgagggaaaaccacagaacatgccaaaggccgaggaagatcgccctttggaggatgtaccacaggaggcagaaggaaatcctcaaccttccgaagaaggcgtaagccaggaagcagaaggaaaccccagaggagggccgaatcagcctggccagggatttaaagaggacacacccgttaggcatttggaccctgaagaaatgataagaggagtagatgagcttgaaaggcttagggaagagataagaagagtaagaaacaagtttgtgatgatgcattggaagcaaagacattcacgcagccgtccttatcctgtgtgctttaggccttgaattcatttttgcctaatattaaaatctggccccagctttctttctgttagcattttctgatgtatctttgacctccattttacttttaatcatctgatgaaattttgttttaggtaatttccttggtaccagcatctcattggattttggattttgacccattttccaggtctatttttcaattggaaactttcacacatttgcatgggaatatgttcattccatgttgtaaagtaaaacataacaggttatggcaaagcagcatatttaatatcagctcacatatgtaggataaaattccaaactttgtgtgtgtgcgtgtgtgtatacatacatccatataacatatatcacaaacttaaccaagcttatttctgtgtggtgtgaaattttatttgttttcttctttttgttctttttgcttatatgtactttttaatgaacacgtgtctcacacacaaaaagaattaaggattttttttacaagtaagagtcaaataatttgcaaccagcttatgagggcaatgggggcacctaaactcttgatgaaagaactttaaaaagaaatgtaaacctcaaattacctctggatctcttagccagaggaataaactggcaattattacagatacac

SEQ ID NO: 12845 - protein, 66 aa, Homo sapiens
MTRLSRDQESTCAEVLIVQGLFPCSSSLLLEKEKSAQDPFRIFGFLGATQIEVREERGKSPESLQD

SEQ ID NO: 12846 - DNA, 692 bp, Homo sapiens
gcggccgcggggctgcggctccccagccccgccagctggagcgctcggaggtagaggaaaggtcttgacggggtggctggatccgtggcagcctcgagtctcctacgtggctccccggagccctgagaccaagcgagcagtttgcatgatcccagttcgcggacaagtgggtgtgtcagggccgttcccagagggccggggctccttcgcttggtcaaaccctagactcgtttactggggcctgggccgcttgaggcaaaacccgccttgaaagctacgtcagcctaatccagttccagattctagacttgagggttctgggctgttggtctgtagaagcgaaggagagaaggactcaaatccaggccaagtgtatggctgtctgaggtattggaacagaaggaggtccattcctgttggtgacaacaccgtggccctgttctgggatgagcaaggtgtaaagcatccccacccacgtaacccaccttcaggaaccagtagctttaaccaagagaacaagaaactcaatgagcagcagcctcaacaactggctctttcctcctgggtaaggagagggcagtggggaaggacggtgcctcaaagggaagtggaggcgctatcaatctggcctagacaggtaggttgactgcttttacatgggtgggctggggcctggtctgggacccctgctc

SEQ ID NO: 12847 - protein, 41 aa, Homo sapiens
MIPVRGQVGVSGPFPEGRGSFAWSNPRLVYWGLGRLRQNPP

SEQ ID NO: 12848 - DNA, 824 bp, Homo sapiens
atccagttccagattctagacttgagggttctgggctgttggtctgtagaagcgaaggagagaaggactcaaatccaggccaagtgtatggctgtctgaggtattggaacagaaggaggtccattcctgttggtgacaacaccgtggccctgttctgggatgagcaaggtgtaaaggtcagtgcggttttcactgggccatttgcaaaattataattgggcaagatctgtgatttggtacttgaggcctccaatcaggggcaactttgggcaaaaagacttgatatggtaatgaatgactaacaggcagaggcttggagagagagccatttgtaagcctctgtttctggatacaagtgtcatatcccccagcccatgcaagaagcaaaatgggaagagactaggaggtagcctgggcaagagctgacagctgagaatcctgaggtcagagagaccttaggatgtcaaggagctgaccctgcaagtctccggacaggcagctgggccttgtaggagagatctgacaggaaaaggaggttcacatgcaatagggttataagctaggggacacaggaccctagggacattctcaccagctaaccattcccacaggttgcagaatttcctggtcagaggtggaaatggtatatagggcaaacaagtttgctgaggtcttgggagagggtgagtggtggacataccaggtgagggaaacgagaaataaaaagaactgcagggatgggaaggtgctgacatccgagagtttgctattatgtgttcagagactaagctactaaattaaggttaaagaaggtggccaaggca

SEQ ID NO: 12849 - protein, 51 aa, Homo sapiens [sequence omitted]

SEQ ID NO: 12850 - DNA, 739 bp, Homo sapiens
gaggttccaaagggcagttgcaaggctatacagtcaggttagcagaagatgaaggtagaaattgggacaaccagaagtttaggcaggtagccttcagaaaaaaatctagaggtaaaggagctgtctgtttccagcaggagaaaggacagaatcctcaacaagattaagtgctgaaaacctggaaagcgtgcttaaagagacagggtctcactatattgtccatgctgctcttgaactcctgagctcaaacgatcctcctgcctcggcctctcaaagtgctaggattacagagtacaagacaagatcaaattttggaacagacactaaaaagctcttctattaatgactctcagcgaaagtgtattgttttcatttatgcctgaattttctcctgaaaggaatattcgcatgtgagtgcatatttggaacttggtactttctcctactttcagcaaactttgggtacataaggaagcaatgatctcccctagtagttgacaaacatttttatcaagggccaaatattaaatattttaggttttgtggaccatatgatccctatcaaaactactcaaatctgttgtaacattgagggagccatagaacatatgtaaacaagtgggtgtggctgtgttctaataaagccttattcacaaaacaggccatactttgcctgctcctagtctaccccatatggagataagaaaattgaggcacaaagaacttagacgacttgccc

SEQ ID NO: 12851 - protein, 75 aa, Homo sapiens
RSCLFPAGERTESSTRLSAENLESVLKETGSHYIVHAALELLSSNDPPASASQSARITEYKTRSNFGTDTKKLFY

SEQ ID NO: 12852 - DNA, 4751 bp, Homo sapiens
acccgcgcgaggtaggcgctctggtgcttgcggaggacgcttccttcctcagatgcaccgatcttcccgatactgcctttggagcggctagattgctagccttggctgctccattggcctgccttgccccttacctgccgattgcatatgaactcttcttctgtctgtacatcgttgtcgtcggagtcgtcgcgatcgtcgtggcgctcgtgtgatggccttcgtccgtttagagtagtgtagttagttaggggccaacgaagaagaaagaagacgcgattagtgcagagatgctggaggtggtcagttactaagctagagtaagatagcggagcgaaaagagccaaacctagccggggggcgcacggtcacccaaaggaggtcgactcgccggcgcttcctatcgcgccgagctccctccattcctctccctccgccgaggcgcgaggttgcggcgcgcagcgcagcgcagctcagcgcaccgactgccgcgggctccgctgggcgattgcagccgagtccgtttctcgtctagctgccgccgcggcgaccgctgcctggtcttcctcccggacgctagtgggttatcagctaacacccgcgagcatctataacataggccaactgacgccatccttcaaaaacaactaaaggatgatatgatgaacctagcctgttaatttcgtcttctcaattttaaactttggttgcttaagactgaagcaatcatggtgaacctgaggaatgcggtgcattcattccttgtgcacctaattggcctattggtttggcaatgtgatatttctgtgagcccagtagcagctatagtaactgacattttcaatacctccgatggtggacgcttcaaattcccagacggggtacaaaactggccagcactttcaatcgtcatcataataatcatgacaataggtggcaacatccttgtgatcatggcagtaagcatggaaaagaaactgcacaatgccaccaattacttcttaatgtccctagccattgctgatatgctagtgggactacttgtcatgcccctgtctctcctggcaatcctttatgattatgtctggccactacctagatatttgtgccccgtctggatttctttagatgttttattttcaacagcgtccatcatgcacctctgcgctatatcgctggatcggtatgtagcaatacgtaatcctattgagcatagccgtttcaattcgcggactaaggccatcatgaagattgctattgtttgggcaatttctataggtgtatcagttcctatccctgtgattggactgagggacgaagaaaaggtgttcgtgaacaacacgacgtgcgtgctcaacgacccaaatttcgttcttattgggtccttcgtagctttcttcataccgctgacgattatggtgattacgtattgcctgaccatctacgttctgcgccgacaagctttgatgttactgcacggccacaccgaggaaccgcctggactaagtctggatttcctgaagtgctgcaagaggaatacggccgaggaagagaactctgcaaaccctaaccaagaccagaacgcacgccgaagaaagaagaaggagagacgtcctaggggcaccatgcaggctatcaacaatgaaagaaaagcttcgaaagtccttgggattgttttctttgtgtttctgatcatgtggtgcccatttttcattaccaatattctgtctgttctttgtgagaagtcctgtaaccaaaagctcatggaaaagcttctgaatgtgtttgtttggattggctatgtttgttcaggaatcaatcctctggtgtatactctgttcaacaaaatttaccgaagggcattctccaactatttgcgttgcaattataaggtagagaaaaagcctcctgtcaggcagattccaagagttgccgccactgctttgtctgggagggagcttaatgttaacatttatcggcataccaatgaaccggtgatcgagaaagccagtgacaatgagcccggtatagagatgcaagttgagaatttagagttaccagtaaatccctccagtgtggttagcgaaaggattagcagtgtgtgagaaagaacagcacagtcttttcctacggtacaagctacatatgtaggaaaattttcttctttaatttttctgttggtcttaactaatgtaaatattgctgtctgaaaaagtgtttttacatatagctttgcaaccttgtactttacaatcatgcctacattagtgagatttagggttctatatttactgtttataataggtggagactaacttattttgattgtttgatgaataaaatgtttatttttgctctccctcccttctttccttccttttttcctttcttccttcctttctctctttcttttgtgcatatggcaacgttcatgttcatctcaggtggcatttgcaggtgaccagaatgaggcacatgacagtggttatatttcaaccacacctaaattaacaaattcagtggacatttgttctgggttaacagtaaatatacactttacattcttgctctgctcatctacacatataaacacagtaagataggttctgctttctgatacatctgtcagtgagtcagaggcagaacctagtcttgttgttcatataggggcaaaaatttgacattgtcagaatgttgtgttggtatttactgcaatgtctgtccctaaacatagtggtattttaacatagcagctggttaaccgggactacagaagtggaaggataatgagatgtaatacaccaaatagcttttcacttcttaaggacagtgttcaaattctgattattacaacaagcaaactgaaattagtgttttcattctggtccttagtaaattcctaattctatgattaaactgggaaatgagatcccagagttatttcccaacccaggattcaacatcaattgggttttgatctcagcatcctggaaatttgtgtgcttcacacaaagtgaaattagtattttgagccttattaaaatattttcttaattatggtacctctgtctataggacttaatttagcagtccatttttgagtaaaacttgtattggaagtatagatggtagaaactttggaagttttacttgattaaggactacagaattgggcccttagaatgtgaaaaaaaaaagtaattaaaaagacacttttaccgaactcgggattacagaaacacggagtttccatttggattttaaacaaaatttatgtcattttcagatccttccaaactctctagtgcaggaaaaggctgcagctaatttgtgaaagtggcaagctcttcattgcactgcagttatttaccagaagtttaaatctttgttaaaatatagtgttgtgttacaataagtgttggccatcatttcattcgtgggcctgctgctctctaagaattcagtagcattttaatagtttctaaaccatgaaaagttttcaagcattgctaaagtcaggccattcagtctatgctgtgtgcagagtatacaagtgtttctagtaacagtatttccatacgtgcccatttcacacaactgtggataaattttggaagaattcatgatgctagttcttacgcttgacagttacttacacacctgagaatgtgcctctcagtatcttaaaattggttaatgaaaaatctgaatttctaaaacccttggtctgtgttctcaacacacagtatagataaatccaatagtctgccacaagggcagtggaagagctgctgtatttgaggaaactcatacagtctctatttgatttgcaacactgccaaacatcagtcaattgcttgagcatgcccaaatataacatgaaagtcaagtctacctgccttgcctgttaggtctgttgaagtgcatgttaaaataattatatgaagcagaatgagatgatttaattcttaccgaaatgaaaatggctgaagaaacacagcatgcatttagcatgagttctgcacatacagatggtgtcctgcatgtatgccatgtatgttgcatgaatccatcgatttgtattaatgtagggcagaatagctgatagaagaaggactgaagaaaatccttcagcaatccttaaaaagaccatgcattcagatctgaagtagtgtgagtgttagaaaaaactggaaacatctgatttctgaactatcagggcaagctcatagcacatgttttacaaagaaacaaaatataaatcacagatttccaaaagtactagcaataagttgaatgataatagctcacagcacatttgttaatgattcttgtgtcatcaagtagtagtacttaatagtacccaacctggtaattatcctcaagttgtgtgctattcgtaagttctgtgcagtttggtatgaaacaaatatactcatttggatataaatcttacccttcaatgttaaatctacaaacttttataaatgttttaaagaagtccatgtgataattgtaaaggtgatgaatttaccatcaaacaaatcattttgatgtattattatatatgtatatctgtgtaagacacgtgcaacagactgccttatattattttctgtaattcttctcctttgtcaaatggtattttttgtgaatggttgcaaagtgttgtcttattcctaattcctgtatgttatccactacaggttttatgagacttcctattaatttattaaatttattaaatgttg

SEQ ID NO: 12853 - protein, 458 aa, Homo sapiens; identical to SEQ ID NO: 2294

SEQ ID NO: 12854 - DNA, 3727 bp, Homo sapiens
gaggtaggcgctctggtgcttgcggaggacgcttccttcctcagatgcaccgatcttcccgatactgcctttggagcggctagattgctagccttggctgctccattggcctgccttgccccttacctgccgattgcatatgaactcttcttctgtctgtacatcgttgtcgtcggagtcgtcgcgatcgtcgtggcgctcgtgtgatggccttcgtccgtttagagtagtgtagttagttaggggccaacgaagaagaaagaagacgcgattagtgcagagatgctggaggtggtcagttactaagctagagtaagatagcggagcgaaaagagccaaacctagccggggggcgcacggtcacccaaaggaggtcgactcgccggcgcttcctatcgcgccgagctccctccattcctctccctccgccgaggcgcgaggttgcggcgcgcagcgcagcgcagctcagcgcaccgactgccgcgggctccgctgggcgattgcagccgagtccgtttctcgtctagctgccgccgcggcgaccgctgcctggtcttcctcccggacgctagtgggttatcagctaacacccgcgagcatctataacataggccaactgacgccatccttcaaaaacaactgtctgggaaaaaaagaataaaaagtagtgtgagagcagaaaacgtgattgaaacacgaccaatctttcttcagtgccaaagggtggaaaagaaaggatgatatgatgaacctagcctgttaatttcgtcttctcaattttaaactttggttgcttaagactgaagcaatcatggtgaacctgaggaatgcggtgcattcattccttgtgcacctaattggcctattggtttggcaatgtgatatttctgtgagcccagtagcagctatagtaactgacattttcaatacctccgatggtggacgcttcaaattcccagacggggtacaaaactggccagcactttcaatcgtcatcataataatcatgacaataggtggcaacatccttgtgatcatggcagtaagcatggaaaagaaactgcacaatgccaccaattacttcttaatgtccctagccattgctgatatgctagtgggactacttgtcatgcccctgtctctcctggcaatcctttatgattatgtctggccactacctagatatttgtgccccgtctggatttctttagatgttttattttcaacagcgtccatcatgcacctctgcgctatatcgctggatcggtatgtagcaatacgtaatcctattgagcatagccgtttcaattcgcggactaaggccatcatgaagattgctattgtttgggcaatttctataggtgtatcagttcctatccctgtgattggactgagggacgaagaaaaggtgttcgtgaacaacacgacgtgcgtgctcaacgacccaaatttcgttcttattgggtccttcgtagctttcttcataccgctgacgattatggtgattacgtattgcctgaccatctacgttctgcgccgacaagctttgatgttactgcacggccacaccgaggaaccgcctggactaagtctggatttcctgaagtgctgcaagaggaatacggccgaggaagagaactctgcaaaccctaaccaagaccagaacgcacgccgaagaaagaagaaggagagacgtcctaggggcaccatgcaggctatcaacaatgaaagaaaagcttcgaaagtccttgggattgttttctttgtgtttctgatcatgtggtgcccatttttcattaccaatattctgtctgttctttgtgagaagtcctgtaaccaaaagctcatggaaaagcttctgaatgtgtttgtttggattggctatgtttgttcaggaatcaatcctctggtgtatactctgttcaacaaaatttaccgaagggcattctccaactatttgcgttgcaattataaggtagagaaaaagcctcctgtcaggcagattccaagagttgccgccactgctttgtctgggagggagcttaatgttaacatttatcggcataccaatgaaccggtgatcgagaaagccagtgacaatgagcccggtatagagatgcaagttgagaatttagagttaccagtaaatccctccagtgtggttagcgaaaggattagcagtgtgtgagaaagaacagcacagtcttttcctacggtacaagctacatatgtaggaaaattttcttctttaatttttctgttggtcttaactaatgtaaatattgctgtctgaaaaagtgtttttacatatagctttgcaaccttgtactttacaatcatgcctacattagtgagatttagggttctatatttactgtttataataggtggagactaacttattttgattgtttgatgaataaaatgtttatttttgctctccctcccttctttccttccttttttcctttcttccttcctttctctctttcttttgtgcatatggcaacgttcatgttcatctcaggtggcatttgcaggtgaccagaatgaggcacatgacagtggttatatttcaaccacacctaaattaacaaattcagtggacatttgttctgggttaacagtaaatatacactttacattcttgctctgctcatctacacatataaacacagtaagataggttctgctttctgatacatctgtcagtgagtcagaggcagaacctagtcttgttgttcatataggggcaaaaatttgacattgtcagaatgttgtgttggtatttactgcaatgtctgtccctaaacatagtggtattttaacatagcagctggttaaccgggactacagaagtggaaggataatgagatgtaatacaccaaatagcttttcacttcttaaggacagtgttcaaattctgattattacaacaagcaaactgaaattagtgttttcattctggtccttagtaaattcctaattctatgattaaactgggaaatgagatcccagagttatttcccaacccaggattcaacatcaattgggttttgatctcagcatcctggaaatttgtgtgcttcacacaaagtgaaattagtattttgagccttattaaaatattttcttaattatggtacctctgtctataggacttaatttagcagtccatttttgagtaaaacttgtattggaagtatagatggtagaaactttggaagttttacttgattaaggactacagaattgggcccttagaatgtgaaaaaaaaaagtaattaaaaagacacttttaccgaactcgggattacagaaacacggagtttccatttggattttaaacaaaatttatgtcattttcagatccttccaaactctctagtgcaggaaaaggctgcagctaatttgtgaaagtggcaagctcttcattgcactgcagttatttaccagaagtttaaatctttgttaaaatatagtgttgtgttacaataagtgttggccatcatttcattcgtgggcctgctgctctctaagaattcagtagcattttaatagtttctaaaccatgaaaagttttcaagcattgctaaagtcaggccattcagtctatgctgtgtgcagagtatacaagtgtttctagtaacagtatttccatacgtgcccatttcacacaactgtggataaattttggaagaattcatgatgctagttcttacgcttg

SEQ ID NO: 12855 - protein, 458 aa, Homo sapiens; identical to SEQ ID NO: 2294

SEQ ID NO: 12856 - DNA, 4648 bp, Homo sapiens
gaggtaggcgctctggtgcttgcggaggacgcttccttcctcagatgcaccgatcttcccgatactgcctttggagcggctagattgctagccttggctgctccattggcctgccttgccccttacctgccgattgcatatgaactcttcttctgtctgtacatcgttgtcgtcggagtcgtcgcgatcgtcgtggcgctcgtgtgatggccttcgtccgtttagagtagtgtagttagttaggggccaacgaagaagaaagaagacgcgattagtgcagagatgctggaggtggtcagttactaagctagagtaagatagcggagcgaaaagagccaaacctagccggggggcgcacggtcacccaaaggaggtcgactcgccggcgcttcctatcgcgccgagctccctccattcctctccctccgccgaggcgcgaggttgcggcgcgcagcgcagcgcagctcagcgcaccgactgccgcgggctccgctgggcgattgcagccgagtccgtttctcgtctagctgccgccgcggcgaccgctgcctggtcttcctcccggacgctagtgggttatcagctaacacccgcgagcatctataacataggccaactgacgccatccttcaaaaacaactaaaggatgatatgatgaacctagcctgttaatttcgtcttctcaattttaaactttggttgcttaagactgaagcaatcatggtgaacctgaggaatgcggtgcattcattccttgtgcacctaattggcctattggtttggcaatgtgatatttctgtgagcccagtagcagctatagtaactgacattttcaatacctccgatggtggacgcttcaaattcccagacggggtacaaaactggccagcactttcaatcgtcatcataataatcatgacaataggtggcaacatccttgtgatcatggcagtaagcatggaaaagaaactgcacaatgccaccaattacttcttaatgtccctagccattgctgatatgctagtgggactacttgtcatgcccctgtctctcctggcaatcctttatgattatgtctggccactacctagatatttgtgccccgtctggatttctttagatgttttattttcaacagcgtccatcatgcacctctgcgctatatcgctggatcggtgtatcagttcctatccctgtgattggactgagggacgaagaaaaggtgttcgtgaacaacacgacgtgcgtgctcaacgacccaaatttcgttcttattgggtccttcgtagctttcttcataccgctgacgattatggtgattacgtattgcctgaccatctacgttctgcgccgacaagctttgatgttactgcacggccacaccgaggaaccgcctggactaagtctggatttcctgaagtgctgcaagaggaatacggccgaggaagagaactctgcaaaccctaaccaagaccagaacgcacgccgaagaaagaagaaggagagacgtcctaggggcaccatgcaggctatcaacaatgaaagaaaagcttcgaaagtccttgggattgttttctttgtgtttctgatcatgtggtgcccatttttcattaccaatattctgtctgttctttgtgagaagtcctgtaaccaaaagctcatggaaaagcttctgaatgtgtttgtttggattggctatgtttgttcaggaatcaatcctctggtgtatactctgttcaacaaaatttaccgaagggcattctccaactatttgcgttgcaattataaggtagagaaaaagcctcctgtcaggcagattccaagagttgccgccactgctttgtctgggagggagcttaatgttaacatttatcggcataccaatgaaccggtgatcgagaaagccagtgacaatgagcccggtatagagatgcaagttgagaatttagagttaccagtaaatccctccagtgtggttagcgaaaggattagcagtgtgtgagaaagaacagcacagtcttttcctacggtacaagctacatatgtaggaaaattttcttctttaatttttctgttggtcttaactaatgtaaatattgctgtctgaaaaagtgtttttacatatagctttgcaaccttgtactttacaatcatgcctacattagtgagatttagggttctatatttactgtttataataggtggagactaacttattttgattgtttgatgaataaaatgtttatttttgctctccctcccttctttccttccttttttcctttcttccttcctttctctctttcttttgtgcatatggcaacgttcatgttcatctcaggtggcatttgcaggtgaccagaatgaggcacatgacagtggttatatttcaaccacacctaaattaacaaattcagtggacatttgttctgggttaacagtaaatatacactttacattcttgctctgctcatctacacatataaacacagtaagataggttctgctttctgatacatctgtcagtgagtcagaggcagaacctagtcttgttgttcatataggggcaaaaatttgacattgtcagaatgttgtgttggtatttactgcaatgtctgtccctaaacatagtggtattttaacatagcagctggttaaccgggactacagaagtggaaggataatgagatgtaatacaccaaatagcttttcacttcttaaggacagtgttcaaattctgattattacaacaagcaaactgaaattagtgttttcattctggtccttagtaaattcctaattctatgattaaactgggaaatgagatcccagagttatttcccaacccaggattcaacatcaattgggttttgatctcagcatcctggaaatttgtgtgcttcacacaaagtgaaattagtattttgagccttattaaaatattttcttaattatggtacctctgtctataggacttaatttagcagtccatttttgagtaaaacttgtattggaagtatagatggtagaaactttggaagttttacttgattaaggactacagaattgggcccttagaatgtgaaaaaaaaaagtaattaaaaagacacttttaccgaactcgggattacagaaacacggagtttccatttggattttaaacaaaatttatgtcattttcagatccttccaaactctctagtgcaggaaaaggctgcagctaatttgtgaaagtggcaagctcttcattgcactgcagttatttaccagaagtttaaatctttgttaaaatatagtgttgtgttacaataagtgttggccatcatttcattcgtgggcctgctgctctctaagaattcagtagcattttaatagtttctaaaccatgaaaagttttcaagcattgctaaagtcaggccattcagtctatgctgtgtgcagagtatacaagtgtttctagtaacagtatttccatacgtgcccatttcacacaactgtggataaattttggaagaattcatgatgctagttcttacgcttgacagttacttacacacctgagaatgtgcctctcagtatcttaaaattggttaatgaaaaatctgaatttctaaaacccttggtctgtgttctcaacacacagtatagataaatccaatagtctgccacaagggcagtggaagagctgctgtatttgaggaaactcatacagtctctatttgatttgcaacactgccaaacatcagtcaattgcttgagcatgcccaaatataacatgaaagtcaagtctacctgccttgcctgttaggtctgttgaagtgcatgttaaaataattatatgaagcagaatgagatgatttaattcttaccgaaatgaaaatggctgaagaaacacagcatgcatttagcatgagttctgcacatacagatggtgtcctgcatgtatgccatgtatgttgcatgaatccatcgatttgtattaatgtagggcagaatagctgatagaagaaggactgaagaaaatccttcagcaatccttaaaaagaccatgcattcagatctgaagtagtgtgagtgttagaaaaaactggaaacatctgatttctgaactatcagggcaagctcatagcacatgttttacaaagaaacaaaatataaatcacagatttccaaaagtactagcaataagttgaatgataatagctcacagcacatttgttaatgattcttgtgtcatcaagtagtagtacttaatagtacccaacctggtaattatcctcaagttgtgtgctattcgtaagttctgtgcagtttggtatgaaacaaatatactcatttggatataaatcttacccttcaatgttaaatctacaaacttttataaatgttttaaagaagtccatgtgataattgtaaaggtgatgaatttaccatcaaacaaatcattttgatgtattattatatatgtatatctgtgtaagacacgtgcaacagactgccttatattattttctgtaattcttctcctttgtcaaatggtattttttgtgaatggttgcaaagtgttgtcttattcctaattcctgtatgttatccactacaggttttatgagacttcctattaatttattaaatttattaaatgttg

SEQ ID NO: 12857 - protein, 293 aa, Homo sapiens [sequence omitted]

SEQ ID NO: 12858 - DNA, 465 bp, Homo sapiens
tgagaaacctatgtctcccacatcctctgtatgtctagtttggttgaagtgttgcaaatgaattataaatatgttgttgtctgaaaagaaatcatggctgttagaaagaggatgtgggccagatgtggtaactcatgcctgtaattccagcagtttgggaggccgaggtgggaggattgcttgagcccaggatgttcccaaattttggtctcaaatggttctcctgtcttggcctcccaaacctctgagattgcaggcatgagccaccatgcccagccagataacaaacacctttaagtttgacattcatcattattgtaaacttttatttccttttaagacttaaatattggtgtttaaaaatgaaaataaactgaaatgacatattgtcttttccaatgaacaaaataaatgtgataatattcaatttgtacattgatttgaataaactggtgtataatttca

SEQ ID NO: 12859 - protein, 37 aa, Homo sapiens
MPVIPAVWEAEVGGLLEPRMFPNFGLKWFSCLGLPNL

SEQ ID NO: 12860 - DNA, 433 bp, Homo sapiens
actattgaagacacctcatgtgacatcacaaacagctttcttggactctccagggaggtggagcaagatggctgaatagaagcctccagcaattgtcccccactcacaggaacaccaaattgaacaactatccacacacaaaaaaaagcaccttcatacaaagaaaaatcaggcctggaacagatcagcctccctgcaggaatcaactgagaaagaattaatgacactttcgaaagctttaaattccaatgagaaattgaagccctgggaatatctgcctcaacattttatagggtgtatgcctgcagtcagtgagaagcacgaggatattccgttccttgtaagtgtaaagtatgataaaacattaatcttaaatctcttacatagtaacaaaacaagacctacactaaaatatttggcattctgtggcaca

SEQ ID NO: 12861 - protein, 70 aa, Homo sapiens
MTLSKALNSNEKLKPWEYLPQHFIGCMPAVSEKHEDIPFLVSVKYDKTLILNLLHSNKTRPTLKYLAFCG

SEQ ID NO: 12862 - DNA, 1498 bp, Homo sapiens
taaaaatttgatcctaagattctataaagtagccattgaggcttaccaaagttacaatattacagatggatcaggggagacggttgctatggagatggatgatatcataactccattgtgaaccagtaagaacactctcgtgagtctaacggtcttccggatgaaggctatttgaagtcgccataacctggtcagaagtgtgcctgtcggcggggagagaggcaatatcaaggttttaaatctcggagaaatggctttcgtttgcttggctatcggatgcttatatacctttctgataagcacaacatttggctgtacttcatcttcagacaccgagataaaagttaaccctcctcaggattttgagatagtggatcccggatacttaggttatctctatttgcaatggcaacccccactgtctctggatcattttaaggaatgcacagtggaatatgaactaaaataccgaaacattggtagtgaaacatggaagaccatcattactaagaatctacattacaaagatgggtttgatcttaacaagggcattgaagcgaagatacacacgcttttaccatggcaatgcacaaatggatcagaagttcaaagttcctgggcagaaactacttattggatatcaccacaaggaattccagaaactaaagttcaggatatggattgcgtatattacaattggcaatatttactctgttcttggaaacctggcataggtgtacttcttgataccaattacaacttgttttactggtatgagggcttggatcatgcattacagtgtgttgattacatcaaggctgatggacaaaatataggatgcagatttccctatttggaggcatcagactataaagatttctatatttgtgttaatggatcatcagagaacaagcctatcagatccagttatttcacttttcagcttcaaaatatagttaaacctttgccgccagtctatcttacttttactcgggagagttcatgtgaaattaagctgaaatggagcatacctttgggacctattccagcaaggtgttttgattatgaaattgagatcagagaagatgatactaccttggtgactgctacagttgaaaatgaaacatacaccttgaaaacaacaaatgaaacccgacaattatgctttgtagtaagaagcaaagtgaatatttattgctcagatgacggaatttggagtgagtggagtgataaacaatgctgggaaggtgaagacctatcgaagaaaactttgctacgtttctggctaccatttggtttcatcttaatattagttatatttgtaaccggtctgcttttgcgtaagccaaacacctacccaaaaatgattccagaatttttctgtgatacatgaagactttccatatcaagagacatggtattgactcaacagtttccagtcatggccaaatgttcaatatgagtctcaataaactgaatttttcttgcgaatgttgaa

SEQ ID NO: 12863 - protein, 380 aa, Homo sapiens; identical to SEQ ID NO: 2299

SEQ ID NO: 12864 - DNA, 1595 bp, Homo sapiens
tattacagaatttggttacaactggacacattgttcatatagagtccccctggtccttgtgaaaaactccggtgttcctggtaaccacatagtgtataaagcccctcattgcactagtgacaatcctgtaacccagaagcaaaggagagaattgtctttgtgttcatttgggggagacggttgctatggagatggatgatatcataactccattgtgaaccagtaagaacactctcgtgagtctaacggtcttccggatgaaggctatttgaagtcgccataacctggtcagaagtgtgcctgtcggcggggagagaggcaatatcaaggttttaaatctcggagaaatggctttcgtttgcttggctatcggatgcttatatacctttctgataagcacaacatttggctgtacttcatcttcagacaccgagataaaagttaaccctcctcaggattttgagatagtggatcccggatacttaggttatctctatttgcaatggcaacccccactgtctctggatcattttaaggaatgcacagtggaatatgaactaaaataccgaaacattggtagtgaaacatggaagaccatcattactaagaatctacattacaaagatgggtttgatcttaacaagggcattgaagcgaagatacacacgcttttaccatggcaatgcacaaatggatcagaagttcaaagttcctgggcagaaactacttattggatatcaccacaaggaattccagaaactaaagttcaggatatggattgcgtatattacaattggcaatatttactctgttcttggaaacctggcataggtgtacttcttgataccaattacaacttgttttactggtatgagggcttggatcatgcattacagtgtgttgattacatcaaggctgatggacaaaatataggatgcagatttccctatttggaggcatcagactataaagatttctatatttgtgttaatggatcatcagagaacaagcctatcagatccagttatttcacttttcagcttcaaaatatagttaaacctttgccgccagtctatcttacttttactcgggagagttcatgtgaaattaagctgaaatggagcatacctttgggacctattccagcaaggtgttttgattatgaaattgagatcagagaagatgatactaccttggtgactgctacagttgaaaatgaaacatacaccttgaaaacaacaaatgaaacccgacaattatgctttgtagtaagaagcaaagtgaatatttattgctcagatgacggaatttggagtgagtggagtgataaacaatgctgggaaggtgaagacctatcgaagaaaactttgctacgtttctggctaccatttggtttcatcttaatattagttatatttgtaaccggtctgcttttgcgtaagccaaacacctacccaaaaatgattccagaatttttctgtgatacatgaagactttccatatcaagagacatggtattgactcaacagtttccagtcatggccaaatgttcaatatgagtctcaataaactgaatttttcttgcgaatgttgaa

SEQ ID NO: 12865 - protein, 380 aa, Homo sapiens; identical to SEQ ID NO: 2299

SEQ ID NO: 12866 - DNA, 324 bp, Homo sapiens
atgttgctgatcattgttaatcaagtcgggacggcggagcaaccccagtgcggcttcagcaacgccatggtgcagatcctgtgggtgcacggcgtccgcgactatgcggcctacgaagtgctggacgaccccgagctgcgacaaggcattaaagactattccaactggcccaccatcccgcaagtgtacctcaacggcgagtttgtgcggggctgtgacattcttttgcagatgcaccagaatgggggtctggtggaagaactgaaaaagctggggatccactccgcccttttagatgaaaagaaagaccaagactcaaagtga

SEQ ID NO: 12867 - protein, 107 aa, Homo sapiens
MLLIIVNQVGTAEQPQCGFSNAMVQILWVHGVRDYAAYEVLDDPELRQGIKDYSNWPTIPQVYLNGEFVRGCDILLQMHQNGGLVEELKKLGIHSALLDEKKDQDSK

SEQ ID NO: 12868 - DNA, 443 bp, Homo sapiens
gccgagatggccagggagcccgcggaggaggccgcagaggagaagctctcagaggaggccacagaggaaccagacgcagaggaaccggccacagaagaaccgaccgcacaggaggccacggccccagaggaagtcactaaatctcagcccgaaaagtgggatgaagaggcccaagatgctgcaggcgaggaagagaaagaacaagaaaaagagaaggatgcggaaaacaaggtgaagaactccaaagggacctagacgcagcagaggtgaagccaagaaaatccagatgcctgtgggaattgtaacacatatcattccaaagttcgttacatcaaaagtgatatccagtgacatctaactttcatggatgtatgtgacagtgttcaagttaaaaaataaaagtttgttttaaatgaataaactgaaacgtgggaagatttttc

SEQ ID NO: 12869 - protein, 82 aa, Homo sapiens
MAREPAEEAAEEKLSEEATEEPDAEEPATEEPTAQEATAPEEVTKSQPEKWDEEAQDAAGEEEKEQEKEKDAENKVKNSKGT

SEQ ID NO: 12870 - DNA, 1291 bp, Homo sapiens
accagaatctttcccaacttgtctaagtcctctcaggccagccttggtgggaggtttctaggattcgctccctgcccttcccatcttagggtgtcgtctgagacagactcttattccctcaataaagagagagactcttattccctcagcggccagctcctcgcctcccctcggccgtagccacctcagtggtcaccgtcttcaccgtggtcgcctcagcccgctcgccaccccagttgaggcgctgctggtgtcatgtctgccacaggggaccgacacccgacccaaggggaccaggaggccccggtaagccaggagggagcacaggccgaggcggccggagctggtaaccaggagggcggcgactccggccccgacagcagcgacgtggtgcctgcggccgaggtggtcggagtcgcagggcccgtggaaggcctcggggaggaggagggtgagcaggcggcaggcctggccgcagtcccccggggcgggagcgccgaggaggactcagatatcgggcccgcgacggaggaagaggaggaggaagaggggaacgaggcggccaacttcgacttggcggtggtcgcccgtcgctacccggcgtcgggcattcacttcgtgctcctggacatggtccactcccttctccaccgcctctctcacaacgaccacatcctcatagagaaccgtcaactcagccgcctgatggtggggccacacgctgctgcgcgcaacctctggggcaacctccccccgctgctgctgccccagaggctgggtgcaggggccgcagcccgggcgggcgagggcctgggcctgatccaggaggccgcatcggtcccagagcctgcagtgccagctgacctggccgagatggccagggagcccgcggaggaggccgcagaggagaagctctcagaggaggccacagaggaaccagacgcagaggaaccggccacagaagaaccgaccgcacaggaggccacggccccagaggaagtcactaaatctcagcccgaaaagtgggatgaagaggcccaagatgctgcaggcgaggaagagaaagaacaagaaaaagagaaggatgcggaaaacaaggtgaagaactccaaagggacctagacgcagcagaggtgaagccaagaaaatccagatgcctgtgggaattgtaacacatatcattccaaagttcgttacatcaaaagtgatatccagtgacatctaactttcatggatgtatgtgacagtgttcaagttaaaaaataaaagtttgttttaaatgaataaactg

SEQ ID NO: 12871 - protein, 288 aa, Homo sapiens; identical to SEQ ID NO: 2306

SEQ ID NO: 12872 - DNA, 443 bp, Homo sapiens; identical to SEQ ID NO: 12868

SEQ ID NO: 12873 - protein, 82 aa, Homo sapiens; identical to SEQ ID NO: 12869

SEQ ID NO: 12874 - DNA, 1291 bp, Homo sapiens; identical to SEQ ID NO: 12870

SEQ ID NO: 12875 - protein, 288 aa, Homo sapiens; identical to SEQ ID NO: 2306

SEQ ID NO: 12876 - DNA, 443 bp, Homo sapiens; identical to SEQ ID NO: 12868

SEQ ID NO: 12877 - protein, 82 aa, Homo sapiens; identical to SEQ ID NO: 12869

SEQ ID NO: 12878 - DNA, 1291 bp, Homo sapiens; identical to SEQ ID NO: 12870

SEQ ID NO: 12879 - protein, 288 aa, Homo sapiens; identical to SEQ ID NO: 2306

SEQ ID NO: 12880 - DNA, 1282 bp, Homo sapiens
accagaatctttcccaacttgtctaagtcctctcaggccagccttggtgggaggtttctaggattcgctccctgcccttcccatcttagggtgtcgtctgagacagactcttattccctcaataaagagagagactcttattccctcagcggccagctcctcgcctcccctcggccgtagccacctcagtggtcaccgtcttcaccgtggtcgcctcagcccgctcgccaccccagttgaggcgctgctggtgtcatgtctgccacaggggaccgacacccgacccaaggggaccaggaggccccggtaagccaggagggagcacaggccgaggcggccggagctggtaaccaggagggcggcgactccggccccgacagcagcgacgtggtgcctgcggccgaggtggtcggagtcgcagggcccgtggaaggcctcggggaggaggagggtgagcaggcggcaggcctggccgcagtcccccggggcgggagcgccgaggaggactcagatatcgggcccgcgacggaggaagaggaggaggaagaggggaacgaggcggccaacttcgacttggcggtggtcgcccgtcgctacccggcgtcgggcattcacttcgtgctcctggacatggtccactcccttctccaccgcctctctcacaacgaccacatcctcatagagaaccgtcaactcagccgcctgatggtggggccacacgctgctgcgcgcaacctctggggcaacctccccccgctgctgctgccccagaggctgggtgcaggggccgcagcccgggcgggcgagggcctgggcctgatccaggaggccgcatcggtcccagagcctgcagtgccagctgacctggccgagatggccagggagcccgcggaggaggccgcagaggagaagctctcagaggaggccacagaggaaccagacgcagaggaaccggccacagaagaaccgaccgcacaggaggccacggccccagaggaagtcactaaatctcagcccgaaaagtgggatgaagaggcccaagatgctgcaggcgaggaagagaaagaacaagaaaaagagaaggatgcagaaaacaaggtgaagaactccaaagggacctagacgcagcagaggtgaagccaagaaaatccagatgcctgtgggaattgtaacacatatcattccaaagttcgttacatcaaaagtgatatccagtgacatctaactttcatggatgtatgtgacagtgttcaagttaaaaaataaaagtttgttttaaatg

SEQ ID NO: 12881 - protein, 288 aa, Homo sapiens; identical to SEQ ID NO: 2306

SEQ ID NO: 12882 - DNA, 2346 bp, Homo sapiens
ccgcgccggacccttccttcctagtcgcggggagtctgagaaagcgcacctgttccgcgaccgtcacgcacccctcctccgcctgccgcgatgtaccgctacctggccaaagcgctgctgccgtcccgggccgggcccgctgccctgggctccgcggccaaccactcggccgcgttgctgggccggggccgcggacagcccgccgccgcctcgcagccggggctcgcattggccgcccggcgccactacagcgagttggtggccgaccgcgaggacgaccccaacttcttcaagatggtggagggcttcttcgatcgcggcgccagcatcgtggaggacaagttggtgaaggacctgaggacccaggaaagcgaggagcagaagcggaaccgggtgcgcggcatcctgcggatcatcaagccctgcaaccatgtgctgagtctctccttccccatccggcgcgacgacggctcctgggaggtcatcgaaggctaccgggcccagcacagccagcaccgcacgccctgcaagggaggtatccgttacagcactgatgtgagtgtagatgaagtaaaagctttggcttctctgatgacatacaagtgtgcagtggttgatgtgccgtttgggggtgctaaagctggtgttaagatcaatcccaagaactataccgaaaatgaattggaaaagatcacaaggaggttcaccatggagctagcaaagaagggctttattggtcctggcgttgatgtgcctgctccagacatgaacacaggtgagcgggagatgtcctggattgctgatacctatgccagcaccatagggcactatgatattaatgcacacgcctgtgttactggtaaacccatcagccaagggggaatccatggacgcatctctgctactggccgtggtgtcttccatgggattgaaaacttcatcaatgaagcttcttacatgagcattttaggaatgacaccagggtttagagataaaacatttgttgttcagggatttggtaatgtgggcctacactctatgagatatttacatcgttttggtgctaaatgtattgctgttggtgagtctgatgggagtatatggaatccagatggtattgacccaaaggaactggaagacttcaaattgcaacatgggtccattctgggcttccccaaggcaaagccctatgaaggaagcatcttggaggtcgactgtgacatactgatcccagctgccactgagaagcagttgaccaaatccaacgcacccagagtcaaagccaagatcattgctgaaggtgccaatgggccaacaactccagaagctgataagatcttcctggagagaaacattttggttattccagatctctacttgaatgctggaggagtgacagtatcttactttgagtggctgaagaatctaaatcatgtcagctatggccgtttgaccttcaaatatgaaagggattctaactaccacttgctcctgtctgttcaagagagtttagaaagaaaatttggaaagcatggtggaactattcccattgtacccacggcagagttccaagacagtatatcgggtgcatctgagaaagacattgtgcactctgccttggcatacacaatggagcgttctgccaggcaaattatgcacacagccatgaagtataacctgggattggacctgagaacagctgcctatgtcaatgccattgaaaaagtcttcaaagtgtacagtgaagctggtgtgaccttcacatagatggatcatggctgacttcctcactaacctcttcacgtgtaacttctgcagacctaccacaagtttacatgtaaccacagaaatccctttctctcctgactcattactaatggataccattctcaacaagtcaatccaaatcagcccgttaaggagaaagaaattaatatacaagctgagtgtgaaagtagaaatcacctacaccagagagctattttggtattttgcctttaaataaaaagcctcctccatatggctgtgcagccttgctctgtggcttttcccagcacaatcagtgctagtgctggggaagggacagtcaagagcagtcagttgcttacttattttgctctggatgagtctgggacacgctgtaactttaacacatttaagaagaaggtgtgtggccttttcagaaggtggcatggtcctcaagtgagttcttagtattttatatcagcaaaataactcaattttgcagattgcaaacaaatataaaagctgtttctgtttatgaattttattcttttagaatagaataagtacatgctgctgtaataaaattgcctttaatcactt

SEQ ID NO: 12883 - protein, 558 aa, Homo sapiens; identical to SEQ ID NO: 2326

SEQ ID NO: 12884 - DNA, 2484 bp, Homo sapiens
ccgcgccggacccttccttcctagtcgcggggagtctgagaaagcgcacctgttccgcgaccgtcacgcacccctcctccgcctgccgcgatgtaccgctacctggccaaagcgctgctgccgtcccgggccgggcccgctgccctgggctccgcggccaaccactcggccgcgttgctgggccggggccgcggacagcccgccgccgcctcgcagccggggctcgcattggccgcccggcgccactacagcgagttggtggccgaccgcgaggacgaccccaacttcttcaagatggtggagggcttcttcgatcgcggcgccagcatcgtggaggacaagttggtgaaggacctgaggacccaggaaagcgaggagcagaagcggaaccgggtgcgcggcatcctgcggatcatcaagccctgcaaccatgtgctgagtctctccttccccatccggcgcgacgacggctcctgggaggtcatcgaaggctaccgggcccagcacagccagcaccgcacgccctgcaagggaggtatccgttacagcactgatgtgagtgtagatgaagtaaaagctttggcttctctgatgacatacaagtgtgcagtggttgatgtgccgtttgggggtgctaaagctggtgttaagatcaatcccaagaactataccgaaaatgaattggaaaagatcacaaggaggttcaccatggagctagcaaagaagggctttattggtcctggcgttgatgtgcctgctccagacatgaacacaggtgagcgggagatgtcctggattgctgatacctatgccagcaccatagggcactatgatattaatgcacacgcctgtgttactggtaaacccatcagccaagggggaatccatggacgcatctctgctactggccgtggtgtcttccatgggattgaaaacttcatcaatgaagcttcttacatgagcattttaggaatgacaccagggtttagagataaaacatttgttgttcagggatttggtaatgtgggcctacactctatgagatatttacatcgttttggtgctaaatgtattgctgttggtgagtctgatgggagtatatggaatccagatggtattgacccaaaggaactggaagacttcaaattgcaacatgggtccattctgggcttccccaaggcaaagccctatgaaggaagcatcttggaggtcgactgtgacatactgatcccagctgccactgagaagcagttgaccaaatccaacgcacccagagtcaaagccaagatcattgctgaaggtgccaatgggccaacaactccagaagctgataagatcttcctggagagaaacattttggttattccagatctctacttgaatgctggaggagtgacagtatcttactttgagtggctgaagaatctaaatcatgtcagctatggccgtttgaccttcaaatatgaaagggattctaactaccacttgctcctgtctgttcaagagagtttagaaagaaaatttggaaagcatggtggaactattcccattgtacccacggcagagttccaagacagtatatcgggtgcatctgagaaagacattgtgcactctgccttggcatacacaatggagcgttctgccaggcaaattatgcacacagccatgaagtataacctgggattggacctgagaacagctgcctatgtcaatgccattgaaaaagtcttcaaagtgtacagtgaagctggtgtgaccttcacatagatggatcatggctgacttcctcactaacctcttcacgtgtaacttctgcagacctaccacaagtttacatgtaaccacagaaatccctttctctcctgactcattactaatggataccattctcaacaagtcaatccaaatcagcccgttaaggagaaagaaattaatatacaagctgagtgtgaaagtagaaatcacctacaccagagagctattttggtattttgcctttaaataaaaagcctcctccatatggctgtgcagccttgctctgtggcttttcccagcacaatcagtgctagtgctggggaagggacagtcaagagcagtcagttgcttacttattttgctctggatgagtctgggacacgctgtaactttaacacatttaagaagaaggtgtgtggccttttcagaaggtggcatggtcctcaagtgagttcttagtattttatatcagcaaaataactcaattttgcagattgcaaacaaatataaaagctgtttctgtttatgaattttattcttttagaatagaataagtacatgctgctgtaataaaattgcctttaatcacttaacaagcctaaccttgactcagtgaatgcctataaaaataataaatgaaaaaaaacagtatttttatatcataaaagtttcatttgtagcttatcattcacgtattgttgtccagcaaacattaaaagccctgtggat

SEQ ID NO: 12885 - protein, 558 aa, Homo sapiens; identical to SEQ ID NO: 2326

SEQ ID NO: 12886 - DNA, 1156 bp, Homo sapiens
cgctcatcgagggacgcccggcccaagtggctggggccaagccgcagagcggagttggcatttccagattggggctcgggccgcgcctcctccgggaccctccccttggaccgagccgatcgccgcggggcagttcgggccggctgtcctggcgcggtgaaggtgataaagtaaagtgctttcactgtggaggagggctaactgattggaagcccagtgaagacccttgggaacaacatgctaaatggtatccagggtaagaactactgagaaaacaccatcactaactagaagaattgatgataccatcttccaaaatcctatggtacaagaagctatacgaatggggttcagtttcaaggacattaagaaaataatggaggaaaaaattcagatatctgggagcaactataaatcacttgaggttctggttgcagatctagtgaatgctcagaaagacagtatgcaagatgagtcaagtcagacttcattacagaaagagattagtactgaagagcagctaaggcgcctgcaagaggagaagctttgcaaaatctgtatggatagaaatattgctatcgtttttgttccttgtggacatctagtcacttgtaaacaatgtgctgaagcagttgacaagtgtcccatgtgctacacagtcattactttcaagcaaaaaatttttatgtcttaatctaactctatagtaggcatgttatgttgttcttattaccctgattgaatgtgtgatgtgaactgactttaagtaatcaggattgaattccattagcatttgctaccaagtaggaaaaaaaatgtacatggcagtgttttagttggcaatataatctttgaatttcttgatttttcagggtattagctgtattatccattttttttactgttatttaattgaaaccatagactaagaataagaagcatcatactataactgaacacaatgtgtattcatagtatactgatttaatttctaagtgtaagtgaattaatcatctggattttttattcttttcagataggcttaacaaatggagctttctgtatataaatgtggagattagagttaatctccccaatcacataatttgttttgtgtgaaaaaggaataaattgttccatgctggtggaaagatag

SEQ ID NO: 12887 - protein, 149 aa, Homo sapiens
MVSRVRTTEKTPSLTRRIDDTIFQNPMVQEAIRMGFSFKDIKKIMEEKIQISGSNYKSLEVLVADLVNAQKDSMQDESSQTSLQKEISTEEQLRRLQEEKLCKICMDRNIAIVFVPCGHLVTCKQCAEAVDKCPMCYTVITFKQKIFMS

SEQ ID NO: 12888 - DNA, 5874 bp, Homo sapiens
cgctcatcgagggacgcccggcccaagtggctggggccaagccgcagagcggagttggcatttccagattggggctcgggccgcgcctcctccgggaccctccccttggaccgagccgatcgccgcggggcagttcgggccggctgtcctggcgcggtgaaggtgataaagtaaagtgctttcactgtggaggagggctaactgattggaagcccagtgaagacccttgggaacaacatgctaaatggtatccagggtaagaactactgagaaaacaccatcactaactagaagaattgatgataccatcttccaaaatcctatggtacaagaagctatacgaatggggttcagtttcaaggacattaagaaaataatggaggaaaaaattcagatatctgggagcaactataaatcacttgaggttctggttgcagatctagtgaatgctcagaaagacagtatgcaagatgagtcaagtcagacttcattacagaaagagattagtactgaagagcagctaaggcgcctgcaagaggagaagctttgcaaaatctgtatggatagaaatattgctatcgtttttgttccttgtggacatctagtcacttgtaaacaatgtgctgaagcagttgacaagtgtcccatgtgctacacagtcattactttcaagcaaaaaatttttatgtcttaatctaactctatagtaggcatgttatgttgttcttattaccctgattgaatgtgtgatgtgaactgactttaagtaatcaggattgaattccattagcatttgctaccaagtaggaaaaaaaatgtacatggcagtgttttagttggcaatataatctttgaatttcttgatttttcagggtattagctgtattatccattttttttactgttatttaattgaaaccatagactaagaataagaagcatcatactataactgaacacaatgtgtattcatagtatactgatttaatttctaagtgtaagtgaattaatcatctggattttttattcttttcagataggcttaacaaatggagctttctgtatataaatgtggagattagagttaatctccccaatcacataatttgttttgtgtgaaaaaggaataaattgttccatgctggtggaaagatagagattgtttttagaggttggttgttgtgttttaggattctgtccattttcttttaaagttataaacacgtacttgtgcgaattatttttttaaagtgatttgccatttttgaaagcgtatttaatgatagaatactatcgagccaacatgtactgacatggaaagatgtcaaagatatgttaagtgtaaaatgcaagtggcaaaacactatgtatagtctgagccagatcaaagtatgtatgtttttaatatgcatagaacaaaagatttggaaagatatacaccaaactgttaaatgtggtttctcttcggggagggggggattgggggaggggccccagaggggttttataggggccttttcactttctacttttttcattttgttctgttcgaattttttataagtatgtattacttttgtaatcagaatttttagaaagtattttgctgatttaaaggcttaggcatgttcaaacgcctgcaaaactacttatcactcagctttagtttttctaatccaagaaggcagggcagttaacctttttggtgccaatgtgaaatgtaaatgattttatgtttttcctgctttgtggatgaaaaatatttctgagtggtagttttttgacaggtagaccatgtcttatcttgtttcaaaataagtatttctgattttgtaaaatgaaatataaaatatgtctcagatcttccaattaattagtaaggattcatccttaatccttgctagtttaagcctgcctaagtcactttactaaaagatctttgttaactcagtattttaaacatctgtcagcttatgtaggtaaaagtagaagcatgtttgtacactgcttgtagttatagtgacagctttccatgttgagattctcatatcatcttgtatcttaaagtttcatgtgagtttttaccgttaggatgattaagatgtatataggacaaaatgttaagtctttcctctacctacatttgttttcttggctagtaatagtagtagatacttctgaaataaatgttctctcaagatccttaaaacctcttggaaattataaaaatattggcaagaaaagaagaatagttgtttaaatattttttaaaaaacacttgaataagaatcagtagggtataaactagaagtttaaaaatgcttcatagaacgtccagggtttacattacaagattctcacaacaaacctattgtagaggtgagtaaggcatgttactacagaggaaagtttgagagtaaaactgtaaaaaattatatttttgttgtactttctaagagaaagagtattgttatgttctcctaacttctgttgattactactttaagtgatattcatttaaaacattgcaaatttattttatttatttaattttctttttgagatggagtcttgcttgtcacccaggctggagtgcagtggagtgatctctgctcactgcaacctccgccttctgggttcaagcgattctcgtgcctcagcttcctgagtagctggaattacaggcaggtgccaccatgcccgactaatttttttttatttttagtagagacggggtttcaccatgttggccaggctggtatcaaactcctgacctcaagagatccactcgccttgccctcccaaagtgctgggattacaggcttgagccaccacgcccggctaaaacattgcaaatttaaatgagagttttaaaaattaaataatgactgccctgtttctgttttagtatgtaaatcctcagttcttcacctttgcactgtctgccacttagtttggttatatagtcattaacttgaatttggtctgtatagtctagactttaaatttaaagttttctacaaggggagaaaagtgttaaaatttttaaaatatgttttccaggacacttcacttccaagtcaggtaggtagttcaatctagttgttagccaaggactcaaggactgaattgttttaacataaggcttttcctgttctgggagccgcacttcattaaaattcttctaaaacttgtatgtttagagttaagcaagactttttttcttcctctccatgagttgtgaaatttaatgcacaacgctgatgtggctaacaagtttattttaagaattgtttagaaatgctgttgcttcaggttcttaaaatcactcagcactccaacttctaatcaaatttttggagacttaacagcatttgtctgtgtttgaactataaaaagcaccggatcttttccatctaattccgcaaaaattgatcatttgcaaagtcaaaactatagccatatccaaatcttttccccctcccaagagttctcagtgtctacatgtagactattccttttctgtataaagttcactctaggatttcaagtcaccacttattttacattttagtcatgcaaagattcaagtagttttgcaataagtacttatctttatttgtaataatttagtctgctgatcaaaagcattgtcttaatttttgagaactggttttagcatttacaaactaaattccagttaattaattaatagctttatattgcctttcctgctacatttggttttttcccctgtccctttgattacgggctaaggtagggtagagtgggtgtagtgagtgtatataatgtgatttggccctgtgtattatgatattttgttatttttgttgttatattatttacatttcagtagttgttttttgtgtttccattttagtggataaaatttgtattttgaactatgaatggagactaccgccccagcattagtttcacatgatataccctttaaacccgaatcattgttttatttcctgattacacaggtgttgaatggggaaaggggctagtatatcagtaggatatactatgggatgtatatatatcattgctgttagagaaatgaaataaaatggggctgggctcagtggctcacgcctgtaatcccagcactttgggaggctgaggcaggtggatcacgaggtcaggagatcgagaccatcctggctaacacggtgaaaccccgtctctactaaaaaacagaaaattagccgggcgtggtggcgggcgcctgtagtcccagctactcgggaggctgaggcaggagaatggtgtgaacccgggaggcagagcttgcagtgagccgagatctcgccactgcactccagcctgggcaacagagcaagactctgtctcaaaaaaaaaaaaaaaagaaataagaaaatgggaagcaatatttgacatagttctttttagtcaaatctacttgttaaaaaaagggtagcagtttattcatctgtgaaaggaaaataatacttatcttacaaggttgcaagagctcaaggagaccatgtatgtaaagttcctgctgtaaatatgaactcccatcctaatacccttttacctctctgtgggtttgtcttgacctggaaatttgggctaaaacttagaaaaaattcttacatgataactcagtgatgcttactcatagtttttggtgtttctcatagataagatataaatcagctgggcgcggtggctcatgcctgtaatcccagcactttgggaggccgaggcgggcagatcacctgaggtcgggaggtcgagaccagcctgaccaacatggagaaaccccgtctctactaaaaatacaaaattagctgggcgtggtggctcatgcctgtaatcccagctacttgggaggctgaggcaggagaatcgcttgaacccaggaggcggaggttgtggtgagcgaagatcgtgccattgcactccagcctgggcaacaagagcaaaactctgtctcaaaaaaaaaaaaagatataaatcacaataaataaataggtcaatacaaatgttagccaggcgtggtggcacatgcccatagtcgcagctactctggaggcagaggcaggaggatcacttgagcccatgaatttgaggcagcagtgagctatgattgtgccactgtactccagtctgggtgacagagtgagaccccatctctaaataaataggtcaaacccttaaaaatatttaaattcttaaaaaattgaaaagattattcttctcaaatttagttgagctttctaagagaagcaattggctttttcccacttcaataatcattttcagtttgactcatacagttaacacaatgtgaatttcttcctcagcataacagagttatagaatgacagggctggaagtgaccttagagagtatccagttctttcattttacaggtgaggcaactgagactcaaaggtgatgtaatttgtgcaaagattatagctaattagtagcagagccctgactgggacatagtttgaaggtgaaaaacttcaccaagctacctttcttgaaaggtccaaatgtttatgttttcaactactctttccactgtaccataactttcactacatattaaatgacactttataactaatataataggacaatcatcaatgcatatatagccagcccttcatatctgtgggttttgcatccatggattcaaccaaggaggaattgaaaacactgagaaaaaaaaaaaagaccacacaataaaaaaaaaaaatacaaaataatacaaagaaaaagccaaaattgtcatactgttgttaagcaacagtataacaactatttacatagcattaaggttggtgcaaaaatgcaaaaaaaaaaaaa

SEQ ID NO: 12889 - protein, 149 aa, Homo sapiens; identical to SEQ ID NO: 12887

SEQ ID NO: 12890 - DNA, 933 bp, Homo sapiens
gctcatcgagggacgcccggcccaagtgaaaaggtggacaagtcctattttcaagagaagatgacttttaacagttttgaaggatctaaaacttgtgtacctgcagacatcaataaggaagaagaatttgtagaagagtttaatagattaaaaacttttgctaattttccaagtggtagtcctgtttcagcatcaacactggcacgagcagggtttctttatactggtgaaggagataccgtgcggtgctttagttgtcatgcagctgtagatagatggcaatatggagactcagcagttggaagacacaggaaagtatccccaaattgcagatttatcaacggcttttatcttgaaaatagtgccacgcagtctacaaattctggtatccagaatggtcagtacaaagttgaaaactatctgggaagcagagatcattttgccttagacaggccatctgagacacatgcagactatcttttgagaactgggcaggttgtagatatatcagacaccatatacccgaggaaccctgccatgtatagtgaagaagctagattaaagtcctttcagaactggccagactatgctcacctaaccccaagagagttagcaagtgctggactctactacacaggtattggtgaccaagtgcagtgcttttgttgtggtggaaaactgaaaaattgggaaccttgtgatcgtgcctggtcagaacacaggcgacactttcctaattgcttctttgttttgggccggaatcttaatattcgaagtgaatctgatgctgtgagttctgataggaatttcccaaattcaacaaatcttccaagaaatccatccatggcagattatgaagcacggatctttacttttgggacatggatatactcagttaacaaggagcagcttgcaagagctggattttatgct

SEQ ID NO: 12891 - protein, 290 aa, Homo sapiens
MTFNSFEGSKTCVPADINKEEEFVEEFNRLKTFANFPSGSPVSASTLARAGFLYTGEGDTVRCFSCHAAVDRWQYGDSAVGRHRKVSPNCRFINGFYLENSATQSTNSGIQNGQYKVENYLGSRDHFALDRPSETHADYLLRTGQVVDISDTIYPRNPAMYSEEARLKSFQNWPDYAHLTPRELASAGLYYTGIGDQVQCFCCGGKLKNWEPCDRAWSEHRRHFPNCFFVLGRNLNIRSESDAVSSDRNFPNSTNLPRNPSMADYEARIFTFGTWIYSVNKEQLARAGFY

SEQ ID NO: 12892 - DNA, 1172 bp, Homo sapiens
tgacggaccgcgcccggtgtctctttgaggccctgacgtggacacacttcgggtttcacgactccgggtttctccaggggatgggccggccggtagaggcgcgtgagggagacgaagggacttccgtttccttcacctaggctggggccaagccgcagagcggagttggcatttccagattggggctcgggccgcgcctcctccgggaccctccccttggaccgagccgatcgccgcggggcagttcgggccggctgtcctggcgcgaaaaggtggacaagtcctattttcaagagaagatgacttttaacagttttgaaggatctaaaacttgtgtacctgcagacatcaataaggaagaagaatttgtagaagagtttaatagattaaaaacttttgctaattttccaagtggtagtcctgtttcagcatcaacactggcacgagcagggtttctttatactggtgaaggagataccgtgcggtgctttagttgtcatgcagctgtagatagatggcaatatggagactcagcagttggaagacacaggaaagtatccccaaattgcagatttatcaacggcttttatcttgaaaatagtgccacgcagtctacaaattctggtatccagaatggtcagtacaaagttgaaaactatctgggaagcagagatcattttgccttagacaggccatctgagacacatgcagactatcttttgagaactgggcaggttgtagatatatcagacaccatatacccgaggaaccctgccatgtatagtgaagaagctagattaaagtcctttcagaactggccagactatgctcacctaaccccaagagagttagcaagtgctggactctactacacaggtattggtgaccaagtgcagtgcttttgttgtggtggaaaactgaaaaattgggaaccttgtgatcgtgcctggtcagaacacaggcgacactttcctaattgcttctttgttttgggccggaatcttaatattcgaagtgaatctgatgctgtgagttctgataggaatttcccaaattcaacaaatcttccaagaaatccatccatggcagattatgaagcacggatctttacttttgggacatggatatactcagttaacaaggagcagcttgcaagagctggattttatgct

SEQ ID NO: 12893 - protein, 290 aa, Homo sapiens; identical to SEQ ID NO: 12891

SEQ ID NO: 12894 - DNA, 2237 bp, Homo sapiens
gaggccctgacgtggacacacttcgggtttcacgactccgggtttctccaggggatgggccggccggtagaggcgcgtgagggagacgaagggacttccgtttccttcacctaggctggggccaagccgcagagcggagttggcatttccagattggggctcgggccgcgcctcctccgggaccctccccttggaccgagccgatcgccgcggggcagttcgggccggctgtcctggcgcgaaaaggtggacaagtcctattttcaagagaagatgacttttaacagttttgaaggatctaaaacttgtgtacctgcagacatcaataaggaagaagaatttgtagaagagtttaatagattaaaaacttttgctaattttccaagtggtagtcctgtttcagcatcaacactggcacgagcagggtttctttatactggtgaaggagataccgtgcggtgctttagttgtcatgcagctgtagatagatggcaatatggagactcagcagttggaagacacaggaaagtatccccaaattgcagatttatcaacggcttttatcttgaaaatagtgccacgcagtctacaaattctggtatccagaatggtcagtacaaagttgaaaactatctgggaagcagagatcattttgccttagacaggccatctgagacacatgcagactatcttttgagaactgggcaggttgtagatatatcagacaccatatacccgaggaaccctgccatgtatagtgaagaagctagattaaagtcctttcagaactggccagactatgctcacctaaccccaagagagttagcaagtgctggactctactacacaggtattggtgaccaagtgcagtgcttttgttgtggtggaaaactgaaaaattgggaaccttgtgatcgtgcctggtcagaacacaggcgacactttcctaattgcttctttgttttgggccggaatcttaatattcgaagtgaatctgatgctgtgagttctgataggaatttcccaaattcaacaaatcttccaagaaatccatccatggcagattatgaagcacggatctttacttttgggacatggatatactcagttaacaaggagcagcttgcaagagctggattttatgctttaggtgaaggtgataaagtaaagtgctttcactgtggaggagggctaactgattggaagcccagtgaagacccttgggaacaacatgctaaatggtatccagggtgcaaatatctgttagaacagaagggacaagaatatataaacaatattcatttaactcattcacttgaggagtgtctggtaagaactactgagaaaacaccatcactaactagaagaattgatgataccatcttccaaaatcctatggtacaagaagctatacgaatggggttcagtttcaaggacattaagaaaataatggaggaaaaaattcagatatctgggagcaactataaatcacttgaggttctggttgcagatctagtgaatgctcagaaagacagtatgcaagatgagtcaagtcagacttcattacagaaagagattagtactgaagagcagctaaggcgcctgcaagaggagaagctttgcaaaatctgtatggatagaaatattgctatcgtttttgttccttgtggacatctagtcacttgtaaacaatgtgctgaagcagttgacaagtgtcccatgtgctacacagtcattactttcaagcaaaaaatttttatgtcttaatctaactctatagtaggcatgttatgttgttcttattaccctgattgaatgtgtgatgtgaactgactttaagtaatcaggattgaattccattagcatttgctaccaagtaggaaaaaaaatgtacatggcagtgttttagttggcaatataatctttgaatttcttgatttttcagggtattagctgtattatccattttttttactgttatttaattgaaaccatagactaagaataagaagcatcatactataactgaacacaatgtgtattcatagtatactgatttaatttctaagtgtaagtgaattaatcatctggattttttattcttttcagataggcttaacaaatggagctttctgtatataaatgtggagattagagttaatctccccaatcacataatttgttttgtgtgaaaaaggaataaattgttccatgctggtggaaagatagagattgtt

SEQ ID NO: 12895 - protein, 497 aa, Homo sapiens; identical to SEQ ID NO: 2330

SEQ ID NO: 12896 - DNA, 8564 bp, Homo sapiens
gaggccctgacgtggacacacttcgggtttcacgactccgggtttctccaggggatgggccggccggtagaggcgcgtgagggagacgaagggacttccgtttccttcacctaggctggggccaagccgcagagcggagttggcatttccagattggggctcgggccgcgcctcctccgggaccctccccttggaccgagccgatcgccgcggggcagttcgggccggctgtcctggcgcgaaaaggtggacaagtcctattttcaagagaagatgacttttaacagttttgaaggatctaaaacttgtgtacctgcagacatcaataaggaagaagaatttgtagaagagtttaatagattaaaaacttttgctaattttccaagtggtagtcctgtttcagcatcaacactggcacgagcagggtttctttatactggtgaaggagataccgtgcggtgctttagttgtcatgcagctgtagatagatggcaatatggagactcagcagttggaagacacaggaaagtatccccaaattgcagatttatcaacggcttttatcttgaaaatagtgccacgcagtctacaaattctggtatccagaatggtcagtacaaagttgaaaactatctgggaagcagagatcattttgccttagacaggccatctgagacacatgcagactatcttttgagaactgggcaggttgtagatatatcagacaccatatacccgaggaaccctgccatgtatagtgaagaagctagattaaagtcctttcagaactggccagactatgctcacctaaccccaagagagttagcaagtgctggactctactacacaggtattggtgaccaagtgcagtgcttttgttgtggtggaaaactgaaaaattgggaaccttgtgatcgtgcctggtcagaacacaggcgacactttcctaattgcttctttgttttgggccggaatcttaatattcgaagtgaatctgatgctgtgagttctgataggaatttcccaaattcaacaaatcttccaagaaatccatccatggcagattatgaagcacggatctttacttttgggacatggatatactcagttaacaaggagcagcttgcaagagctggattttatgctttaggtgaaggtgataaagtaaagtgctttcactgtggaggagggctaactgattggaagcccagtgaagacccttgggaacaacatgctaaatggtatccagggtgcaaatatctgttagaacagaagggacaagaatatataaacaatattcatttaactcattcacttgaggagtgtctggtaagaactactgagaaaacaccatcactaactagaagaattgatgataccatcttccaaaatcctatggtacaagaagctatacgaatggggttcagtttcaaggacattaagaaaataatggaggaaaaaattcagatatctgggagcaactataaatcacttgaggttctggttgcagatctagtgaatgctcagaaagacagtatgcaagatgagtcaagtcagacttcattacagaaagagattagtactgaagagcagctaaggcgcctgcaagaggagaagctttgcaaaatctgtatggatagaaatattgctatcgtttttgttccttgtggacatctagtcacttgtaaacaatgtgctgaagcagttgacaagtgtcccatgtgctacacagtcattactttcaagcaaaaaatttttatgtcttaatctaactctatagtaggcatgttatgttgttcttattaccctgattgaatgtgtgatgtgaactgactttaagtaatcaggattgaattccattagcatttgctaccaagtaggaaaaaaaatgtacatggcagtgttttagttggcaatataatctttgaatttcttgatttttcagggtattagctgtattatccattttttttactgttatttaattgaaaccatagactaagaataagaagcatcatactataactgaacacaatgtgtattcatagtatactgatttaatttctaagtgtaagtgaattaatcatctggattttttattcttttcagataggcttaacaaatggagctttctgtatataaatgtggagattagagttaatctccccaatcacataatttgttttgtgtgaaaaaggaataaattgttccatgctggtggaaagatagagattgtttttagaggttggttgttgtgttttaggattctgtccattttcttttaaagttataaacacgtacttgtgcgaattatttttttaaagtgatttgccatttttgaaagcgtatttaatgatagaatactatcgagccaacatgtactgacatggaaagatgtcaaagatatgttaagtgtaaaatgcaagtggcaaaacactatgtatagtctgagccagatcaaagtatgtatgtttttaatatgcatagaacaaaagatttggaaagatatacaccaaactgttaaatgtggtttctcttcggggagggggggattgggggaggggccccagaggggttttataggggccttttcactttctacttttttcattttgttctgttcgaattttttataagtatgtattacttttgtaatcagaatttttagaaagtattttgctgatttaaaggcttaggcatgttcaaacgcctgcaaaactacttatcactcagctttagtttttctaatccaagaaggcagggcagttaacctttttggtgccaatgtgaaatgtaaatgattttatgtttttcctgctttgtggatgaaaaatatttctgagtggtagttttttgacaggtagaccatgtcttatcttgtttcaaaataagtatttctgattttgtaaaatgaaatataaaatatgtctcagatcttccaattaattagtaaggattcatccttaatccttgctagtttaagcctgcctaagtcactttactaaaagatctttgttaactcagtattttaaacatctgtcagcttatgtaggtaaaagtagaagcatgtttgtacactgcttgtagttatagtgacagctttccatgttgagattctcatatcatcttgtatcttaaagtttcatgtgagtttttaccgttaggatgattaagatgtatataggacaaaatgttaagtctttcctctacctacatttgttttcttggctagtaatagtagtagatacttctgaaataaatgttctctcaagatccttaaaacctcttggaaattataaaaatattggcaagaaaagaagaatagttgtttaaatattttttaaaaaacacttgaataagaatcagtagggtataaactagaagtttaaaaatgcttcatagaacgtccagggtttacattacaagattctcacaacaaacctattgtagaggtgagtaaggcatgttactacagaggaaagtttgagagtaaaactgtaaaaaattatatttttgttgtactttctaagagaaagagtattgttatgttctcctaacttctgttgattactactttaagtgatattcatttaaaacattgcaaatttattttatttatttaattttctttttgagatggagtcttgcttgtcacccaggctggagtgcagtggagtgatctctgctcactgcaacctccgccttctgggttcaagcgattctcgtgcctcagcttcctgagtagctggaattacaggcaggtgccaccatgcccgactaatttttttttatttttagtagagacggggtttcaccatgttggccaggctggtatcaaactcctgacctcaagagatccactcgccttgccctcccaaagtgctgggattacaggcttgagccaccacgcccggctaaaacattgcaaatttaaatgagagttttaaaaattaaataatgactgccctgtttctgttttagtatgtaaatcctcagttcttcacctttgcactgtctgccacttagtttggttatatagtcattaacttgaatttggtctgtatagtctagactttaaatttaaagttttctacaaggggagaaaagtgttaaaatttttaaaatatgttttccaggacacttcacttccaagtcaggtaggtagttcaatctagttgttagccaaggactcaaggactgaattgttttaacataaggcttttcctgttctgggagccgcacttcattaaaattcttctaaaacttgtatgtttagagttaagcaagactttttttcttcctctccatgagttgtgaaatttaatgcacaacgctgatgtggctaacaagtttattttaagaattgtttagaaatgctgttgcttcaggttcttaaaatcactcagcactccaacttctaatcaaatttttggagacttaacagcatttgtctgtgtttgaactataaaaagcaccggatcttttccatctaattccgcaaaaattgatcatttgcaaagtcaaaactatagccatatccaaatcttttccccctcccaagagttctcagtgtctacatgtagactattccttttctgtataaagttcactctaggatttcaagtcaccacttattttacattttagtcatgcaaagattcaagtagttttgcaataagtacttatctttatttgtaataatttagtctgctgatcaaaagcattgtcttaatttttgagaactggttttagcatttacaaactaaattccagttaattaattaatagctttatattgcctttcctgctacatttggttttttcccctgtccctttgattacgggctaaggtagggtagagtgggtgtagtgagtgtatataatgtgatttggccctgtgtattatgatattttgttatttttgttgttatattatttacatttcagtagttgttttttgtgtttccattttagtggataaaatttgtattttgaactatgaatggagactaccgccccagcattagtttcacatgatataccctttaaacccgaatcattgttttatttcctgattacacaggtgttgaatggggaaaggggctagtatatcagtaggatatactatgggatgtatatatatcattgctgttagagaaatgaaataaaatggggctgggctcagtggctcacgcctgtaatcccagcactttgggaggctgaggcaggtggatcacgaggtcaggagatcgagaccatcctggctaacacggtgaaaccccgtctctactaaaaaacagaaaattagccgggcgtggtggcgggcgcctgtagtcccagctactcgggaggctgaggcaggagaatggtgtgaacccgggaggcagagcttgcagtgagccgagatctcgccactgcactccagcctgggcaacagagcaagactctgtctcaaaaaaaaaaaaaaaagaaataagaaaatgggaagcaatatttgacatagttctttttagtcaaatctacttgttaaaaaaagggtagcagtttattcatctgtgaaaggaaaataatacttatcttacaaggttgcaagagctcaaggagaccatgtatgtaaagttcctgctgtaaatatgaactcccatcctaatacccttttacctctctgtgggtttgtcttgacctggaaatttgggctaaaacttagaaaaaattcttacatgataactcagtgatgcttactcatagtttttggtgtttctcatagataagatataaatcagctgggcgcggtggctcatgcctgtaatcccagcactttgggaggccgaggcgggcagatcacctgaggtcgggaggtcgagaccagcctgaccaacatggagaaaccccgtctctactaaaaatacaaaattagctgggcgtggtggctcatgcctgtaatcccagctacttgggaggctgaggcaggagaatcgcttgaacccaggaggcggaggttgtggtgagcgaagatcgtgccattgcactccagcctgggcaacaagagcaaaactctgtctcaaaaaaaaaaaaagatataaatcacaataaataaataggtcaatacaaatgttagccaggcgtggtggcacatgcccatagtcgcagctactctggaggcagaggcaggaggatcacttgagcccatgaatttgaggcagcagtgagctatgattgtgccactgtactccagtctgggtgacagagtgagaccccatctctaaataaataggtcaaacccttaaaaatatttaaattcttaaaaaattgaaaagattattcttctcaaatttagttgagctttctaagagaagcaattggctttttcccacttcaataatcattttcagtttgactcatacagttaacacaatgtgaatttcttcctcagcataacagagttatagaatgacagggctggaagtgaccttagagagtatccagttctttcattttacaggtgaggcaactgagactcaaaggtgatgtaatttgtgcaaagattatagctaattagtagcagagccctgactgggacatagtttgaaggtgaaaaacttcaccaagctacctttcttgaaaggtccaaatgtttatgttttcaactactctttccactgtaccataactttcactacatattaaatgacactttataactaatataataggacaatcatcaatgcatatatagccagcccttcatatctgtgggttttgcatccatggattcaaccaaggaggaattgaaaacactgagaaaaaaaaaaaagaccacacaataaaaaaaaaaaatacaaaataatacaaagaaaaagccaaaattgtcatactgttgttaagcaacagtataacaactatttacatagcattaaggttggtgcaaaaatgcaaaaaaaaaaaaagcaattatttttaaaccaacctaatatattgtattaggtattaaagtcatctggacatgaattaaagtatatgatgccagcctggacaaaaggcaaaaccctgtctctacaaaaaatacaaaaattagctgggcatggtggtgtgtgcctgtagtcctggctactccggagcctgaggtgggaggatcgcttgagtctgggaggcagaggctgcattgagctatgatcatggcactgcattccagcctgggtgacagtgcaagaccttgtctcagaataaataaagtatgtgatgaagatgtgcatacattatatgcaaatactgttttttttttttttaatttaaacagtctcactgtgttgcccaggatggagtgcaatggcacaatcttggctcatggcaaactctgcctcgcaagcagctgggactacaggcatgctccacggtgcccagttaattttttttgtattcttagtagagacagggtttcaccatgttggccaggctagtcttgaatttctgacctcaagtgattcatctcccaaagtgctgggattacaggcgtgagccaccacggccggctaatttttgtattttttagtagtgactggtttcgcggtgttgaccaggctggtctcgaactcctgatctcaggtgatctgcctgcctcggcctcacaaagtgctgggattacaggtgtgaaccactgctcccggccttgtgtgattttatctaagggacttaagcgtcctcaggtcctagggggtcgtgaaaccaaaaccccagggatagcaagggacaattgtatcttcaaagtagacaaatggcgccgggcacggtggctcacgcctgtaatcccagcagtttccgaggctgaggcaggcggctcacctgaggtcaggagttggagaccagcctggccaacatgctgaaaccctgtctgtacaaaaatacaaaaatagctgggcatggtggcgcatgcctgtagtcccagctactagagcgactgaggcaggagaattgcttgaacctgggaggcggaggttgcagggagccaagatggcgccaccgcactccagcctaggtgatagagtgagactccctctcaaaaacaaaacaaaacaaaaaaattagacaaatgctacattaatgtttgggtggtcagattctactttgaatctgaagtttgcagatatgcctatagatttttggagtttaccactttcttattctgtatcattaatgtaatattttaaattactatatatgttaccatttttctggatttagtaagaaatttgcagttttggtttgatgtaacaagggttttaatgtaatttatgttagattttgcatttttttcattactgttatattttaacctgactgactgatctaattgtattagtattgtgaataatcatgtgaaatgttttgagacagagtactatatttgtgaatataattttatggtttttttcacttagaacctttctgtgtggaaaactaagaaaattgctttctgctgtataatctggcattcattgtagattaaagcttatttttctgtgaataaaacgtattcaataaaatactattctttaaaattatatcat

SEQ ID NO: 12897 - protein, 497 aa, Homo sapiens; identical to SEQ ID NO: 2330

SEQ ID NO: 12898 - DNA, 481 bp, Homo sapiens
cagacggactcttgctgtgtcgcccaggctggagtgcagtggcgcaatttgggctcactgcaacctccaccttccaggttcaagcaattcttctgcctcagcttcccaagtagctgggattacaggcgaagctgaggtggaaggactgcctgagcctgggaagcagagtctgcagtgagctatgattgtgccagtgcactgtaccctgggagacagaatgaaaagctatccaaaaaaaagagagagagagggatacaggtcaagtcccagagataaaagcagtcatcagatcatgtccatggtggttggccagaaacaaatgccttttggtccactgcttgagtggcagtaaaccagcagcagaagagaagggctgagaaacacaggtgatacctgattgctacttattgggtttctttttttgtgatggagtcttgctctgtcacccaggctagagtgcagtggcgtgatctcggctcac

SEQ ID NO: 12899 - protein, 56 aa, Homo sapiens
MIVPVHCTLGDRMKSYPKKREREGYRSSPRDKSSHQIMSMVVGQKQMPFGPLLEWQ

SEQ ID NO: 12900 - DNA, 8838 bp, Homo sapiens
gactgcttgcattaaaggacttcctcatcctttttttcatgaaactgagcttgcttaatcagagatggagcaaactgactgcaaaccctaccagcctctaccaaaagtcaagcatgaaatggatctagcttacaccagttcttctgatgagagtgaagatggaagaaaaccaagacagtcatacaactccagggagaccctgcacgagtataaccaggagctgaggatgaattacaatagccagagtagaaagaggaaagaagtagaaaaatctactcaagagatggaattctgtgaaacctctcacactctgtgctctggctaccaaacagacatgcacagcgtttctcggcatggctaccagctagagatgggatctgatgtggacacagagacagaaggtgctgcctcacctgaccatgcactaagaatgtggataaggggaatgaaatcagagcatagttcctgtttgtccagccgggccaactctgcattatccttgactgacactgaccatgaaaggaagtctgatggggaaaatggtttcaaattctctcctgtttgttgtgacatggaggctcaagctgggtctactcaagatgtgcagagcagcccacacaaccagttcaccttcagacccctcccaccgccacctccgcctcctcatgcctgcacctgtgccaggaagccaccccctgcagcggactctcttcagaggagatcaatgactacccgcagccagcccagcccagctgctccagctcccccaaccagcacgcaggattcagtccatctgcataacagctgggtcctgaacagcaacataccattggagaccaggcatttcctgttcaaacatggatctggttcctctgcgatcttcagtgcagccagtcagaactaccctctgacatccaataccgtgtactcgccccctcccaggcctcttcctcgaagcaccttttcccgacctgcctttacctttaacaaaccttacaggtgctgcaactggaagtgcacagcattgagcgccactgcaatcacagtgactttggccttgttactagcctatgtgattgcagtgcatttgttcggcctgacttggcagttgcaaccagttgaaggagagctgtatgcaaatggagttagcaaagggaacagggggaccgagtccatggacactacttactctccaattggaggaaaagtttctgataaatcagagaaaaaagtgtttcagaagggacgggcgatagacactggagaagttgacattggtgcacaggtcatgcagaccattccacctggtttattctggcgtttccagattactatccaccatccaatatatctgaagttcaatatttctttagccaaggactctctgctgggaatttatggcagaagaaacattccacctacacatactcagtttgattttgtaaaactaatggatggcaaacagctggtcaagcaggactccaagggctctgatgatacacagcactcccctcggaacctgatcttaacttcgcttcaggagacaggtttcatagagtatatggatcaaggaccttggtatctggcgttttacaatgatggaaaaaagatggagcaagtattcgtgttaactacagcaattgaaataatggatgactgttcaaccaattgcaatggaaatggagagtgtatctctggccattgtcattgtttcccaggattccttggacctgactgtgctagagattcctgccctgtgctgtgtggtgggaatggagaatacgagaaaggacactgtgtctgccggcatggctggaaggggccagagtgtgacgttccggaagaacaatgcattgatccaacatgctttggccacggcacctgcatcatgggagtctgcatctgtgtgccaggatacaaaggagaaatatgcgaggaagaggactgcctagacccaatgtgttccaaccatggcatctgtgtaaaaggagaatgtcactgttctactggctggggaggagttaactgtgaaacaccacttcctgtatgtcaagagcagtgctcaggacacggaacttttcttctggacgctggagtatgcagctgtgatcccaagtggacaggatctgactgctcaacagagctgtgtaccatggagtgtggtagccatggagtctgctcaagaggaatttgccagtgtgaagaaggctgggtaggaccaacatgtgaggaacgctcctgtcattctcattgtactgagcatggccaatgcaaagatggaaaatgtgagtgtagccctggatgggagggcgaccactgcacaattgctcactacttagatgctgtccgagatggctgcccagggctctgctttggaaatggacgatgtaccctggatcaaaatggttggcactgtgtgtgtcaggtgggttggagtgggacaggctgcaatgttgtcatggaaatgctttgtggagataacttggacaatgatggagatggtttaaccgactgtgtggatcctgactgttgtcaacaaagcaactgttatataagtcctctctgccagggctcaccagatcctcttgacctcattcagcaaagccaaactctcttctctcagcacacttcaagacttttttatgatcgaatcaaattcctcattggcaaggacagtactcatgtcattcctcctgaggtgtcatttgacagcaggcgtgcctgtgtgattcgaggccaagtggtggccatagatggaactcctctagtgggagtgaatgtcagtttcttgcaccacagtgattatgggtttaccatcagccggcaagatggaagctttgacctcgtggccatcggtggcatctctgtcatcttaatcttcgaccgatcccctttcctgcctgagaagagaacactctggttgccttggaatcagtttattgtggtagagaaagtcaccatgcagagagttgtatcagacccgccatcctgcgatatctccaactttatcagcccaaaccctattgtgcttccttcaccgctcacatcatttggagggtcctgtccagagaggggaactattgttcctgagctgcaggttgtacaggaggaaattcccattccctccagctttgtgaggctgagttacctgagcagccgcacccctgggtataaaaccctgctacggatccttctgacacattcaacgattcctgtaggcatgataaaagtacacctcacagtagctgtggaagggcgactcacacagaagtggtttcccgccgcaattaatcttgtctacacatttgcttggaacaagaccgacatctatggacagaaggtttggggcctggcagaggctttggtatctgtgggatatgaatatgaaacgtgccctgactttattctctgggagcaaaggacagtcgttttacaaggttttgagatggatgcttctaacctaggaggctggtctttgaataagcatcacattttgaatcctcaaagtggaatcatacataaagggaatggagaaaatatgttcatttcccagcagcccccagtcatatcaaccataatgggtaatggacaccaaaggagtgtagcctgcaccaactgcaatggcccagcccacaacaacaaactctttgctcctgtcgccttagcttctggccctgatggcagtgtgtatgttggcgacttcaattttgtaaggagaatatttccctcgggaaactccgttagtattttggaattaagcacaagtcctgctcacaaatactatctggctatggaccctgtgtctgaatcactctatctatcagacaccaatactcgcaaagtctacaagttgaaatctcttgtggagacgaaagatctgtccaagaattttgaagtggtggcaggaactggtgatcagtgccttccctttgaccagagtcattgtggagatggtgggagagcatcggaagcttcactgaatagccctcgaggcatcacagttgataggcatggatttatttactttgtggatgggactatgattcgcaaaattgatgagaatgctgtgatcacaactgtaatcggctcaaatggtctgacttccacacaaccactgagctgtgactcaggaatggacatcactcaggtgcgattagagtggccaacagaccttgcagtaaatcctatggacaattcattgtatgtcttggataacaacattgtgctgcaaatttctgagaacaggcgtgttcggatcatcgcaggacgccccattcactgccaggtgccaggcatcgatcatttcctggtcagcaaggtagcaattcactccactctagagtcagcgagggccatcagtgtctcccacagcgggctgctcttcatagctgaaacagacgagaggaaagtaaaccgcattcagcaagtaaccaccaatggggagatctacatcatcgctggtgcccccactgactgtgactgcaaaattgatccaaactgtgactgtttttcaggtgatggtggctatgccaaagatgcaaagatgaaagccccttcctccttagcagtgtcgcctgatggaaccctctatgtggcagacctcggaaatgttcgaattcgtaccatcagcaggaaccaagcccacctgaatgacatgaacatttatgagattgcttcacccgctgatcaggaactgtaccagttcactgtaaatggaacccacctacacaccctgaacttgataacaagggactatgtttataacttcacctacaattctgaaggtgacttgggcgcgattaccagcagcaatggcaattcagtgcacattcgccgtgatgcaggcggaatgccgctatggcttgtggtgcctggcggacaagtatactggctgactataagcagcaatggagtcctgaaaagagtgtcagcccaaggctataatctggccttaatgacctatccaggaaacacagggcttctggctaccaaaagtaacgaaaatggatggacaaccgtttatgagtatgaccccgagggacacctgaccaatgcaacgtttcccactggagaggtcagcagcttccacagtgacctggagaagctgacaaaagtggagctagatacttccaaccgtgaaaatgtcctcatgtcaaccaacttgacggcaactagtaccatatatattttaaaacaagaaaatactcaaagtacctatcgggtgaatccagatggttccctgcgtgtcacttttgccagcgggatggagatcggcctcagctcagagccccacatcctggcaggggcagtcaaccctaccctgggcaaatgcaacatctcattgcccggagagcacaatgcaaacctcatcgagtggcggcagaggaaggagcaaaacaaaggcaatgtttcggcttttgaaaggaggctgagggcccacaacagaaacctactctccatagattttgatcatataacccgcacaggaaagatctatgatgaccatcgaaaattcacccttcgaattctttatgaccagactgggcgacccattctgtggtctcctgtaagcagatataatgaagtgaacatcacatattcaccttcgggattggtgacgtttattcaaagaggaacgtggaatgaaaaaatggaatatgaccagagtgggaaaattatttcaagaacttgggctgatgggaaaatttggagctatacctacttagaaaaatctgtgatgcttctcctacacagccagcggcgttacatctttgagtatgaccaaccagattgtctgctctcagtcaccatgcctagcatggtgcgtcacagcttacaaaccatgctttcagtgggctactaccggaacatctacaccccaccggacagtagcacttcttttatccaagactatagtcgagatggccgattgctacagaccctgcatctggggacagggcgcagagtcttatacaagtacaccaagcaagcaaggctttctgaggttctctatgataccactcaggtcacattaacatatgaagagtcttctggagtgattaagacaatacacctgatgcatgacggattcatctgcacaatcagatacaggcaaacaggacctcttattggacgccagattttcagattcagtgaagaaggccttgtgaatgcacggttcgactacagctacaacaatttccgagtcacaagcatgcaagctgtaatcaatgaaacccctttgcctatagatctttaccgatatgttgatgtctctggcagaacagagcagtttggaaaattcagtgtaattaattacgatttaaatcaggtcataactactacagtgatgaaacacaccaaaatcttcagtgccaatggacaagtcattgaagtccaatatgaaatcctaaaggcaattgcctactggatgaccattcaatatgataatgtgggccgcatggtaatatgtgacataagggtaggagtagatgccaatataacaaggtacttctatgaatacgatgctgatgggcaacttcagactgtttctgtaaatgacaaaacccagtggcgttatagttacgatctgaatggaaacatcaacctcttaagccatgggaagagtgctcgtcttactcctctccgatatgacctccgagaccgcatcaccagattaggagaaattcagtataaaatggatgaagatggctttctgaggcagaggggaaatgatatttttgaatataattctaatggcctgctgcagaaagcctacaataaggcttctggctggactgtgcagtattactatgatgggcttgggcgacgtgtcgcgagtaagtccagcctagggcagcaccttcagttcttttatgcagaccttaccaaccccataagagttactcatttgtacaaccacacaagctcggagattacatctctgtattatgatctccaaggtcaccttattgccatggagttaagcagtggtgaagaatattatgtagcctgtgataatacaggtaccccactagctgtgttcagcagccgaggtcaggtcataaaggagatactatacacaccttatggcgatatctatcatgacacttaccctgactttcaggtcattattggttttcatggaggactctatgatttccttactaaattagtgcacctggggcaaagggattatgatgttgttgctggcagatggacaacgcctaatcatcacatatggaaacagttgaacctccttcctaaaccattcaacctctactcctttgaaaataactacccagttggcaaaattcaagatgttgcaaagtataccacagacatcagaagttggttggagctatttggtttccaattacacaatgtactacctggatttcccaaacctgaattagaaaatttagaattaacttacgagcttctacggcttcagacaaaaactcaagagtgggatcctggaaagactatcctgggcattcagtgtgaactccagaaacagctcaggaatttcatttccttggaccaactacctatgactccccgatacaatgatggacggtgccttgaaggagggaagcaaccaaggtttgctgctgtcccttctgtttttgggaaaggtataaaatttgccatcaaggatggcatagtaacagctgatattataggagtagccaatgaagatagcaggcggcttgctgccattctcaataatgcccattacctggaaaacctacattttaccatagaggggagggacactcactacttcattaagcttgggtctctggaggaagacctggtgctcatcggtaacactggggggaggcggattctggagaatggtgtcaatgtcactgtgtcccagatgacttctgtgttgaatgggaggactagacggtttgcagatattcagctccagcatggagccctgtgcttcaacatccggtatgggacaactgtcgaagaggaaaagaatcacgtgttggagattgccagacagcgcgcagtggcccaggcctggactaaggaacaaagaaggctgcaagagggggaagaggggattagggcatggacagaaggggaaaagcagcagcttttgagcactgggcgggtacaaggttacgatgggtattttgttttgtctgttgagcagtatttagaactttctgacagtgccaataatattcactttatgagacagagcgaaataggcaggaggtaacaaaaatatctctgcctttgcgtcaccaaagactgcctgtttttaaaacataaaatggtttattgtattggttttctagatcagaactctgtatatgtaaatatggaggaaaaacatatccaactgcctttcaatgtgacggaagatggtattttaatattgtttgtttaaactctttaagaaatgacagagatttttagttcttgtgtggcagtattcaaaataacacaagtagaactcaaacagctaaaaacagttttcagaaagcaccactttcaatttgccgagccatgcatatgttccaatatccagaaagaacccaaggttctctatctctattgtgagaagcagtttcatccttaactgttggcagaacttacgggctatttgaataggtggtgcaatagtatctgaaacttgcctttcgaaagactgccagccctttgacgttttccagatctgttataggaaacttaaaaacaggtgtaaaatgtcttcagccaccatctcctagagtgaggacccaattgcccttccttcttgattattcctccttgcttgttaaagtaaatgccatattgttgtgctgtgttttg

SEQ ID NO: 12901 - protein, 2725 aa, Homo sapiens; identical to SEQ ID NO: 2332

SEQ ID NO: 12902 - DNA, 408 bp, Homo sapiens
caccaattccggacacactacgtccattaagaaatgtggacaaacagtactctaggctttcaaggttcacctcaagagccaactccagcccacaatgctcaatgatctctctctgggttcatatgacagttgtattttgtacctcaagatcaagctcttcattgcactgtatggtgttataccttccccactcttttttctttggatgtagacactacataaaccacttgtggctctgcctcactccaccaattccacaatgtggtatctgattgttaggactccactgtctctcccaacttgtcaaattcaccatatgagacacacagaatgcatcccaagaagaggagatggaaccgatagcattcagtttactggaagctgctttctttggccacttggtttctg

SEQ ID NO: 12903 - protein, 56 aa, Homo sapiens
MISLWVHMTVVFCTSRSSSSLHCMVLYLPHSFFFGCRHYINHLWLCLTPPIPQCGI

SEQ ID NO: 12904 - DNA, 2982 bp, Homo sapiens
atggcgatgaactttggggaccatgccagcgggttccgccatgatgatgtgatcaggttcatcaacaatgaagtcctcaggaacggcggcagcccagccttttacacggccttccgctcgcggccgtggaacgaggtagaggaccggcttcgggccattgtggccgacccgcgggtgccccgtgccattaagagggcctgtacctggagcgctttggcgctgagtgtgcaagtggctgcgaggcagcaggaggagctgctgtaccaggtttggtggctgcaagggcatgtggaggagtgccaggcgacctcctgggctctaacttcccagctgcagcagctgcgcctggagcatgaggaggtggcaacacagctgcacctcacgcaggccgccctgcagcaggtgctgaatgagcgtgatgggttatgcgggaggctgctagaagttgagagatccatgcaggtctatccgatgcctcaggattttgtacccggtccagaagccggccagtatgggcctgtggccgggactttaaatgcagaacagagtgaggcggtggccacagaggcacagggaatgccacattcggaagcccaggtagcagccccaacagctgtgtattacatgcctgaaccccagagtggcagggtccagggcatgcaacctcttctgctaatgcaggcacctcatccagtcccattccatatgccttcaccaatgggactgccatactcaacacctctaccacccccagtagtaatggaatcagcagcagcaattgcaccacagatgcctcctgcagggatctatccacctggtctttgggccacagtgggatcccaggaggagacggcccctccgtgggaccagaagtgccatggccaggatggatatcctgagaatttccagggagtatatcacccaggagataacagaagctgcaaccaaaaggaaggttctgagtgtccccaaggaatgacttcccaaggggacagcagcagccacagcctgaagaaagatccagtgatgcaagagggcacagctcccccagagtttagcaggagccacagcctggagaaaaaaccagtgatgcccaaggagatggtccccctaggggacagcaacagccacagcctgaagaaagatccagttgtgcccaaggagattgtccccataggggacagcaacagccacagcctgacgaaaaatccagttgtgcacaaggagatggtctccctgggggacagcaacagccacagcatgaagaaagatccagtgatgccccagaagatggtccccctgggggacagcaacagccacagtctgaagaaagatccaatgatgtgccaggagatggtccccctgggggacagcaacagccatagcctgaagaaagatccagtggtggcccagggcacagctcccctgatgtatagcaggaggcacagccagaagaaagtgccaatgatgcccaaggagatggtccccctgggggaaagccacagccacagcctgaagaaagatctagttgtgcccaaggagctggtccccctgggggacagcaagagtcacaggatgaagaaagatccagtgatgccccagaagatggtccccctgggggacagcagaagccacagcctgaagaaagatccagtgatgccccagaacatgatccccctggaggacagcaacagccacagcctgaagaaagatccagtgatgccccagaacatgatccccctggaggacagcaacagccacagtctgaagaaagatccaatgatgcaccaggagatggtccccctgggggacagcaacagccatagcctgaagaaagatccagtggtgccccaggacacagctcccctgatgtttagcaggagacacagcctgaagaaagtgccagtgatgcccaaggagatggtccccctgggggacagccacagcctgaagaaagatccagtgatgccccagaacatggtccccctggaggacagcaacagccatagcctgaagaaagatccagtggtgccccagggcacagctcccctgatgtttagcaggagacacagcctgaagaaagtgccagtgatgcccaaggagatggtccccctgggggacagcaacagccatagcctgaagaaagatccagtggtgccccagggcacagctcccctgatgtttagcaggagacacagcctgaagaaagtgccagtgatgcccaaggagatggtccccctgggggacagccacagcctgaagaaagatccagtgatgccccagaacatggtccccctggaggacagcaacagccatagcctgaagaaagatccagtggtgccccagggcacagctcccctgacgtttagcaggagacacagcctgaagaaagtgccagtggtgccccaggggacagcctccctggggttcagcagaatccacagcctgaagaaagagttagtgatgcccgaggagatggtccccctgggggacagcaacagccacagcatgaagaaagatctagtgatgcccaaggagatggtccccctaggggacagcaacagtcacagcctgaagaaagatccagtggtgcaccaggaggtggtctccttgggggacagcaacagccacagcctgaagaaacatccagtgattccccagggcacagcctcactgaggtttagcaagagccacagccagaaggaagatcaggagaggccccaggtaacccctctggaggatagcaagagccatggtgtgaaaaatagcccatggaaacaccagcctcaggggcagaaggtcaaggaacaaaaaaggaaaaaggcctcagaatcccagcaacagaagcctgcctcatgctccagcccagtgaattgggcctgcccatggtgtaatgccatgaattttccacggaacaaggtgtgctctaaatgcaagagagtccgtatgccagttgagaatggcagcgttgacccagcgtaa

SEQ ID NO: 12905 - protein, 993 aa, Homo sapiens
MAMNFGDHASGFRHDDVIRFINNEVLRNGGSPAFYTAFRSRPWNEVEDRLRAIVADPRVPRAIKRACTWSALALSVQVAARQQEELLYQVWWLQGHVEECQATSWALTSQLQQLRLEHEEVATQLHLTQAALQQVLNERDGLCGRLLEVERSMQVYPMPQDFVPGPEAGQYGPVAGTLNAEQSEAVATEAQGMPHSEAQVAAPTAVYYMPEPQSGRVQGMQPLLLMQAPHPVPFHMPSPMGLPYSTPLPPPVVMESAAAIAPQMPPAGIYPPGLWATVGSQEETAPPWDQKCHGQDGYPENFQGVYHPGDNRSCNQKEGSECPQGMTSQGDSSSHSLKKDPVMQEGTAPPEFSRSHSLEKKPVMPKEMVPLGDSNSHSLKKDPVVPKEIVPIGDSNSHSLTKNPVVHKEMVSLGDSNSHSMKKDPVMPQKMVPLGDSNSHSLKKDPMMCQEMVPLGDSNSHSLKKDPVVAQGTAPLMYSRRHSQKKVPMMPKEMVPLGESHSHSLKKDLVVPKELVPLGDSKSHRMKKDPVMPQKMVPLGDSRSHSLKKDPVMPQNMIPLEDSNSHSLKKDPVMPQNMIPLEDSNSHSLKKDPMMHQEMVPLGDSNSHSLKKDPVVPQDTAPLMFSRRHSLKKVPVMPKEMVPLGDSHSLKKDPVMPQNMVPLEDSNSHSLKKDPVVPQGTAPLMFSRRHSLKKVPVMPKEMVPLGDSNSHSLKKDPVVPQGTAPLMFSRRHSLKKVPVMPKEMVPLGDSHSLKKDPVMPQNMVPLEDSNSHSLKKDPVVPQGTAPLTFSRRHSLKKVPVVPQGTASLGFSRIHSLKKELVMPEEMVPLGDSNSHSMKKDLVMPKEMVPLGDSNSHSLKKDPVVHQEVVSLGDSNSHSLKKHPVIPQGTASLRFSKSHSQKEDQERPQVTPLEDSKSHGVKNSPWKHQPQGQKVKEQKRKKASESQQQKPASCSSPVNWACPWCNAMNFPRNKVCSKCKRVRMPVENGSVDPA

SEQ ID NO: 12906 - DNA, 3144 bp, Homo sapiens
atggcgatgaactttggggaccatgccagcgggttccgccatgatgatgtgatcaggttcatcaacaatgaagtcctcaggaacggcggcagcccagccttttacacggccttccgctcgcggccgtggaacgaggtagaggaccggcttcgggccattgtggccgacccgcgggtgccccgtgccattaagagggcctgtacctggagcgctttggcgctgagtgtgcaagtggctgcgaggcagcaggaggagctgctgtaccaggtttggtggctgcaagggcatgtggaggagtgccaggcgacctcctgggctctaacttcccagctgcagcagctgcgcctggagcatgaggaggtggcaacacagctgcacctcacgcaggccgccctgcagcaggtgctgaatgagcgtgatgggttatgcgggaggctgctagaagttgagagatccatgcaggtctatccgatgcctcaggattttgtacccggtccagaagccggccagtatgggcctgtggccgggactttaaatgcagaacagagtgaggcggtggccacagaggcacagggaatgccacattcggaagcccaggtagcagccccaacagctgtgtattacatgcctgaaccccagagtggcagggtccagggcatgcaacctcttctgctaatgcaggcacctcatccagtcccattccatatgccttcaccaatgggactgccatactcaacacctctaccacccccagtagtaatggaatcagcagcagcaattgcaccacagatgcctcctgcagggatctatccacctggtctttgggccacagtgggatcccaggaggagacggcccctccgtgggaccagaagtgccatggccaggatggatatcctgagaatttccagggagtatatcacccaggagataacagaagctgcaaccaaaaggaaggttctgagtgtccccaaggaatgacttcccaaggggacagcagcagccacagcctgaagaaagatccagtgatgcaagagggcacagctcccccagagtttagcaggagccacagcctggagaaaaaaccagtgatgcccaaggagatggtccccctaggggacagcaacagccacagcctgaagaaagatccagttgtgcccaaggagattgtccccataggggacagcaacagccacagcctgacgaaaaatccagttgtgcacaaggagatggtctccctgggggacagcaacagccacagcatgaagaaagatccagtgatgccccagaagatggtccccctgggggacagcaacagccacagtctgaagaaagatccaatgatgtgccaggagatggtccccctgggggacagcaacagccatagcctgaagaaagatccagtggtggcccagggcacagctcccctgatgtatagcaggaggcacagccagaagaaagtgccaatgatgcccaaggagatggtccccctgggggaaagccacagccacagcctgaagaaagatctagttgtgcccaaggagctggtccccctgggggacagcaagagtcacaggatgaagaaagatccagtgatgccccagaagatggtccccctgggggacagcagaagccacagcctgaagaaagatccagtgatgccccagaacatgatccccctggaggacagcaacagccacagcctgaagaaagatccagtgatgccccagaacatgatccccctggaggacagcaacagccacagtctgaagaaagatccaatgatgcaccaggagatggtccccctgggggacagcaacagccatagcctgaagaaagatccagtggtgccccaggacacagctcccctgatgtttagcaggagacacagcctgaagaaagtgccagtgatgcccaaggagatggtccccctgggggacagccacagcctgaagaaagatccagtgatgccccagaacatggtccccctggaggacagcaacagccatagcctgaagaaagatccagtggtgccccagggcacagctcccctgatgtttagcaggagacacagcctgaagaaagtgccagtgatgcccaaggagatggtccccctgggggacagcaacagccatagcctgaagaaagatccagtggtgccccagggcacagctcccctgatgtttagcaggagacacagcctgaagaaagtgccagtgatgcccaaggagatggtccccctgggggacagccacagcctgaagaaagatccagtgatgccccagaacatggtccccctggaggacagcaacagccatagcctgaagaaagatccagtggtgccccagggcacagctcccctgacgtttagcaggagacacagcctgaagaaagtgccagtggtgccccaggggacagcctccctggggttcagcagaatccacagcctgaagaaagagttagtgatgcccgaggagatggtccccctgggggacagcaacagccacagcatgaagaaagatctagtgatgcccaaggagatggtccccctaggggacagcaacagtcacagcctgaagaaagatccagtggtgcaccaggaggtggtctccttgggggacagcaacagccacagcctgaagaaacatccagtgattccccagggcacagcctcactgaggtttagcaagagccacagccagaaggaagatcaggagaggccccaggtaacccctctggaggatagcaagagccatgcccagtgaattgggcctgcccatggtgtaatgccatgaattttccacggaacaaggtgtgctctaaatgcaagagagtccgtatgccagttgagaatggcagcgttgacccagcgtaaactcattgatttcaggaaggcttacccaaggcaactgctgcaaggcaaggaaggagccagggtggagcccaggggtggttggttagatctgccttcaatccaagctaaagatgtccttgagtttcccaatgagatcccacccagctcaccaaaatcaatgtttgtcagggattttctgggcctaactagtaataaagaatgtgcatttgactgctgtgtcttctgtgtagtgtgtatctcagggcaggtttgctcagaggtggcagcttaa

SEQ ID NO: 12907 - protein, 920 aa, Homo sapiens
MAMNFGDHASGFRHDDVIRFINNEVLRNGGSPAFYTAFRSRPWNEVEDRLRAIVADPRVPRAIKRACTWSALALSVQVAARQQEELLYQVWWLQGHVEECQATSWALTSQLQQLRLEHEEVATQLHLTQAALQQVLNERDGLCGRLLEVERSMQVYPMPQDFVPGPEAGQYGPVAGTLNAEQSEAVATEAQGMPHSEAQVAAPTAVYYMPEPQSGRVQGMQPLLLMQAPHPVPFHMPSPMGLPYSTPLPPPVVMESAAAIAPQMPPAGIYPPGLWATVGSQEETAPPWDQKCHGQDGYPENFQGVYHPGDNRSCNQKEGSECPQGMTSQGDSSSHSLKKDPVMQEGTAPPEFSRSHSLEKKPVMPKEMVPLGDSNSHSLKKDPVVPKEIVPIGDSNSHSLTKNPVVHKEMVSLGDSNSHSMKKDPVMPQKMVPLGDSNSHSLKKDPMMCQEMVPLGDSNSHSLKKDPVVAQGTAPLMYSRRHSQKKVPMMPKEMVPLGESHSHSLKKDLVVPKELVPLGDSKSHRMKKDPVMPQKMVPLGDSRSHSLKKDPVMPQNMIPLEDSNSHSLKKDPVMPQNMIPLEDSNSHSLKKDPMMHQEMVPLGDSNSHSLKKDPVVPQDTAPLMFSRRHSLKKVPVMPKEMVPLGDSHSLKKDPVMPQNMVPLEDSNSHSLKKDPVVPQGTAPLMFSRRHSLKKVPVMPKEMVPLGDSNSHSLKKDPVVPQGTAPLMFSRRHSLKKVPVMPKEMVPLGDSHSLKKDPVMPQNMVPLEDSNSHSLKKDPVVPQGTAPLTFSRRHSLKKVPVVPQGTASLGFSRIHSLKKELVMPEEMVPLGDSNSHSMKKDLVMPKEMVPLGDSNSHSLKKDPVVHQEVVSLGDSNSHSLKKHPVIPQGTASLRFSKSHSQKEDQERPQVTPLEDSKSHAQ

SEQ ID NO: 12908 - DNA, 5270 bp, Homo sapiens
cagtcaatcagcggcagagctgagaagggcacagccgcgcggcggagggcagagtcagccgagccgagtccagccggacgagcggaccagcgcagggcagcccaagcagcgcgcagcgaacgcccgccgccgcccacaccctctgcggtccccgcggcgcctgccacccttccctccttccccgcgtccccgcctcgccggccagtcagcttgccgggttcgctgccccgcgaaaccccgaggtcaccagcccgcgcctctgcttccctgggccgcgcgccgcctccacgccctccttctcccctggcccggcgcctggcaccggggaccgttgcctgacgcgaggcccagctctacttttcgccccgcgtctcctccgcctgctcgcctcttccaccaactccaactccttctccctccagctccactcgctagtccccgactccgccagccctcggcccgctgccgtagcgccgcttcccgtccggtcccaaaggtgggaacgcgtccgccccggcccgcaccatggcacggttcggcttgcccgcgcttctctgcaccctggcagtgctcagcgccgcgctgctggctgccgagctcaagtcgaaaagttgctcggaagtgcgacgtctttacgtgtccaaaggcttcaacaagaacgatgcccccctccacgagatcaacggtgatcatttgaagatctgtccccagggttctacctgctgctctcaagagatggaggagaagtacagcctgcaaagtaaagatgatttcaaaagtgtggtcagcgaacagtgcaatcatttgcaagctgtctttgcttcacgttacaagaagtttgatgaattcttcaaagaactacttgaaaatgcagagaaatccctgaatgatatgtttgtgaagacatatggccatttatacatgcaaaattctgagctatttaaagatctcttcgtagagttgaaacgttactacgtggtgggaaatgtgaacctggaagaaatgctaaatgacttctgggctcgcctcctggagcggatgttccgcctggtgaactcccagtaccactttacagatgagtatctggaatgtgtgagcaagtatacggagcagctgaagcccttcggagatgtccctcgcaaattgaagctccaggttactcgtgcttttgtagcagcccgtactttcgctcaaggcttagcggttgcgggagatgtcgtgagcaaggtctccgtggtaaaccccacagcccagtgtacccatgccctgttgaagatgatctactgctcccactgccggggtctcgtgactgtgaagccatgttacaactactgctcaaacatcatgagaggctgtttggccaaccaaggggatctcgattttgaatggaacaatttcatagatgctatgctgatggtggcagagaggctagagggtcctttcaacattgaatcggtcatggatcccatcgatgtgaagatttctgatgctattatgaacatgcaggataatagtgttcaagtgtctcagaaggttttccagggatgtggaccccccaagcccctcccagctggacgaatttctcgttccatctctgaaagtgccttcagtgctcgcttcagaccacatcaccccgaggaacgcccaaccacagcagctggcactagtttggaccgactggttactgatgtcaaggagaaactgaaacaggccaagaaattctggtcctcccttccgagcaacgtttgcaacgatgagaggatggctgcaggaaacggcaatgaggatgactgttggaatgggaaaggcaaaagcaggtacctgtttgcagtgacaggaaatggattagccaaccagggcaacaacccagaggtccaggttgacaccagcaaaccagacatactgatccttcgtcaaatcatggctcttcgagtgatgaccagcaagatgaagaatgcatacaatgggaacgacgtggacttctttgatatcagtgatgaaagtagtggagaaggaagtggaagtggctgtgagtatcagcagtgcccttcagagtttgactacaatgccactgaccatgctgggaagagtgccaatgagaaagccgacagtgctggtgtccgtcctggggcacaggcctacctcctcactgtcttctgcatcttgttcctggttatgcagagagagtggagataattctcaaactctgagaaaaagtgttcatcaaaaagttaaaaggcaccagttatcacttttctaccatcctagtgactttgctttttaaatgaatggacaacaatgtacagtttttactatgtggccactggtttaagaagtgctgactttgttttctcattcagttttgggaggaaaagggactgtgcattgagttggttcctgctcccccaaaccatgttaaacgtggctaacagtgtaggtacagaactatagttagttgtgcatttgtgattttatcactctattatttgtttgtatgtttttttctcatttcgtttgtgggtttttttttccaactgtgatctcgccttgtttcttacaagcaaaccagggtcccttcttggcacgtaacatgtacgtatttctgaaatattaaatagctgtacagaagcaggttttatttatcatgttatcttattaaaagaaaaagcccaaaaagcagtaaaatttccatttctccctgttattttagttgccttatctggagagacgtggaggtgattttcttttttttaaattattattaagacagaatgtgagggcacaagcaggcttctgagccacttgtcagattgtattcaaagcatcaatccaagaaggaggttatgtgtacttcatttattggtgatagttggaagagactgcagactactgctttgaatgagttgaattacataagctaagatcactataggtccatttcttgaacccacttatacataaaatgtaacccatttagaaaaagattctggatatcatcccccttgaaagatagaaagcattcaggatgtcccagttatcacatgttcacacttgggtttaggggtgtttttttttaaaaccaggcaggttagctagcccaccctgtgctagttttcatgttcacactgaccctatttgaattaatatcctttgttagagtggtcgagatttcaaacccaattatgtacagggagctgtctgagagctagccagaactggggtacagcctgggctcagggaatagctgtcaacactcgggcaaagtttttgtctgtgcatgtgtatctccatttgttttgggatcccagtttttgttttaagagagtataaggtgtctcatttgagtctttttcttacctagccccctcttatcagtaaaacaaaggacttgccatggttcacagcaatgtgctacgatccaagatatcagccaaggagcccacttaggggagaactaggtgtccagatttttgtatgtgttgtttttcttgggggatggggtggggtgggagtaggtagagctgagaatactacatcttagtggtgacctttagccacgtgggtgaagtggcaaaggccatggccatatctgttgtcccaggccaaagactaacaactgccttgggaatcccttccttgtgtccttaccaaatgatagctcataaaactctgataatgtaacaaatcactttcaaaggagttcccagaagtcttcagaaagactaaaattctgtctcttcctgctttagacagccattaagatcccaactaattttaccgaacctaaaacccacaaagaggttgtttgtgttattgttcaatcttcagttgtaagagtaattctctatttttatattgaaacataattacttgatagctcagggtctacatttcattcaactttttacaccaaattctgcagagtggtcaaaatggaatattgggggctgttgtaaacagaggcttaattttattagaagtagccagttatttattaaagcatgatgttaataaaataggcatattctggctggtgtgtataagtggttttttttttaaaacaaatcagaagacataaaattgaaaaggcactccatttatatataagggaaaatagattgtaaatagctaaggggccttgtgagaacttggaaaatgtgctgatacttagtaactacctcagttgtgaggaatttcctttttagcttagactgctattacttttacttggtagaaatgaatctggtctccaaaatatggctcagagagttatccccatagaccttgttagattgtttttaatttaaaaccttgaactctgcccagctgttttcttccagtcaaattctctaaaccaataacattttccaaattaagtattcttgaaggttcttctgaactcttactgatttgttttctttctttgcattttttcctgttactcttttattatttaaattgtctcttgcttttgaacttcaactatgaaataaacaaatcatagatttttccattcaggtctgactggataactcttggcttctaagcagctggcaagctcacccccactccccaaaaaagaagaaaggcaagttgaatattttaaaaccttaagagtttggagtatgaagtagaataaaagccttgttaggagaagacctgacttttccaaagttaacagcatgtgaagggcttgtgttttacaaagtcatttataaattatttttctttaaaacacatcacctactctgtaccttaaagattttacaactcttagatttatattttatttcaaaaatcgtaactagcacctgttattttgattaaaagacactgcgaagaattgacgtaaatttctaaagtttagttactgagtgttcaaaacctaacagttcacatgaagtaaaaattgtcatttgtgattacagaatcaaaataaaaataggtatgaatggtgctacacaaatttctgcttcccctttgttagcagaatatgtctatttacatagctaaagggtagtaggttattaggttagtgcaaaagtaactgcagtttttgccattactttcaatggcaaaatactaacagttatctactagaggagggtgtgtgtgtgtgtgtgtgcgtgtgcacgcacacgcgcatgcacatgtaatgtcactgctaagccaaatgtaactttctaccttttttgaaacaacaacaaagtactcaaaattcttctgactttgaacttcatgggaaaaaatataactgcataccgtgatac

SEQ ID NO: 12909 - protein, 556 aa, Homo sapiens; identical to SEQ ID NO: 2335

SEQ ID NO: 12910 - DNA, 4030 bp, Homo sapiens
cagtcaatcagcggcagagctgagaagggcacagccgcgcggcggagggcagagtcagccgagccgagtccagccggacgagcggaccagcgcagggcagcccaagcagcgcgcagcgaacgcccgccgccgcccacaccctctgcggtccccgcggcgcctgccacccttccctccttccccgcgtccccgcctcgccggccagtcagcttgccgggttcgctgccccgcgaaaccccgaggtcaccagcccgcgcctctgcttccctgggccgcgcgccgcctccacgccctccttctcccctggcccggcgcctggcaccggggaccgttgcctgacgcgaggcccagctctacttttcgccccgcgtctcctccgcctgctcgcctcttccaccaactccaactccttctccctccagctccactcgctagtccccgactccgccagccctcggcccgctgccgtagcgccgcttcccgtccggtcccaaaggtgggaacgcgtccgccccggcccgcaccatggcacggttcggcttgcccgcgcttctctgcaccctggcagtgctcagcgccgcgctgctggctgccgagctcaagtcgaaaagttgctcggaagtgcgacgtctttacgtgtccaaaggcttcaacaagaacgatgcccccctccacgagatcaacggtgatcatttgaagatctgtccccagggttctacctgctgctctcaagagatggaggagaagtacagcctgcaaagtaaagatgatttcaaaagtgtggtcagcgaacagtgcaatcatttgcaagctgtctttgcttcacgttacaagaagtttgatgaattcttcaaagaactacttgaaaatgcagagaaatccctgaatgatatgtttgtgaagacatatggccatttatacatgcaaaattctgagctatttaaagatctcttcgtagagttgaaacgttactacgtggtgggaaatgtgaacctggaagaaatgctaaatgacttctgggctcgcctcctggagcggatgttccgcctggtgaactcccagtaccactttacagatgagtatctggaatgtgtgagcaagtatacggagcagctgaagcccttcggagatgtccctcgcaaattgaagctccaggttactcgtgcttttgtagcagcccgtactttcgctcaaggcttagcggttgcgggagatgtcgtgagcaaggtctccgtggtaaaccccacagcccagtgtacccatgccctgttgaagatgatctactgctcccactgccggggtctcgtgactgtgaagccatgttacaactactgctcaaacatcatgagaggctgtttggccaaccaaggggatctcgattttgaatggaacaatttcatagatgctatgctgatggtggcagagaggctagagggtcctttcaacattgaatcggtcatggatcccatcgatgtgaagatttctgatgctattatgaacatgcaggataatagtgttcaagtgtctcagaaggttttccagggatgtggaccccccaagcccctcccagctggacgaatttctcgttccatctctgaaagtgccttcagtgctcgcttcagaccacatcaccccgaggaacgcccaaccacagcagctggcactagtttggaccgactggttactgatgtcaaggagaaactgaaacaggccaagaaattctggtcctcccttccgagcaacgtttgcaacgatgagaggatggctgcaggaaacggcaatgaggatgactgttggaatgggaaaggcaaaagcaggtacctgtttgcagtgacaggaaatggattagccaaccagggcaacaacccagaggtccaggttgacaccagcaaaccagacatactgatccttcgtcaaatcatggctcttcgagtgatgaccagcaagatgaagaatgcatacaatgggaacgacgtggacttctttgatatcagtgatgaaagtagtggagaaggaagtggaagtggctgtgagtatcagcagtgcccttcagagtttgactacaatgccactgaccatgctgggaagagtgccaatgagaaagccgacagtgctggtgtccgtcctggggcacaggcctacctcctcactgtcttctgcatcttgttcctggttatgcagagagagtggagataattctcaaactctgagaaaaagtgttcatcaaaaagttaaaaggcaccagttatcacttttctaccatcctagtgactttgctttttaaatgaatggacaacaatgtacagtttttactatgtggccactggtttaagaagtgctgactttgttttctcattcagttttgggaggaaaagggactgtgcattgagttggttcctgctcccccaaaccatgttaaacgtggctaacagtgtaggtacagaactatagttagttgtgcatttgtgattttatcactctattatttgtttgtatgtttttttctcatttcgtttgtgggtttttttttccaactgtgatctcgccttgtttcttacaagcaaaccagggtcccttcttggcacgtaacatgtacgtatttctgaaatattaaatagctgtacagaagcaggttttatttatcatgttatcttattaaaagaaaaagcccaaaaagcagtaaaatttccatttctccctgttattttagttgccttatctggagagacgtggaggtgattttcttttttttaaattattattaagacagaatgtgagggcacaagcaggcttctgagccacttgtcagattgtattcaaagcatcaatccaagaaggaggttatgtgtacttcatttattggtgatagttggaagagactgcagactactgctttgaatgagttgaattacataagctaagatcactataggtccatttcttgaacccacttatacataaaatgtaacccatttagaaaaagattctggatatcatcccccttgaaagatagaaagcattcaggatgtcccagttatcacatgttcacacttgggtttaggggtgtttttttttaaaaccaggcaggttagctagcccaccctgtgctagttttcatgttcacactgaccctatttgaattaatatcctttgttagagtggtcgagatttcaaacccaattatgtacagggagctgtctgagagctagccagaactggggtacagcctgggctcagggaatagctgtcaacactcgggcaaagtttttgtctgtgcatgtgtatctccatttgttttgggatcccagtttttgttttaagagagtataaggtgtctcatttgagtctttttcttacctagccccctcttatcagtaaaacaaaggacttgccatggttcacagcaatgtgctacgatccaagatatcagccaaggagcccacttaggggagaactaggtgtccagatttttgtatgtgttgtttttcttgggggatggggtggggtgggagtaggtagagctgagaatactacatcttagtggtgacctttagccacgtgggtgaagtggcaaaggccatggccatatctgttgtcccaggccaaagactaacaactgccttgggaatcccttccttgtgtccttaccaaatgatagctcataaaactctgataatgtaacaaatcactttcaaaggagttcccagaagtcttcagaaagactaaaattctgtctcttcctgctttagacagccattaagatcccaactaattttaccgaacctaaaacccacaaagaggttgtttgtgttattgttcaatcttcagttgtaagagtaattctctatttttatattgaaacataattacttgatagctcagggtctacatttcattcaactttttacaccaaattctgcagagtggtcaaaatggaatattgggggctgttgtaaacagaggcttaattttattagaagtagccagttatttattaaagcatgatgttaataaaataggcatattctgg

SEQ ID NO: 12911 - protein, 556 aa, Homo sapiens; identical to SEQ ID NO: 2335

SEQ ID NO: 12912 - DNA, 2633 bp, Homo sapiens
cagtcaatcagcggcagagctgagaagggcacagccgcgcggcggagggcagagtcagccgagccgagtccagccggacgagcggaccagcgcagggcagcccaagcagcgcgcagcgaacgcccgccgccgcccacaccctctgcggtccccgcggcgcctgccacccttccctccttccccgcgtccccgcctcgccggccagtcagcttgccgggttcgctgccccgcgaaaccccgaggtcaccagcccgcgcctctgcttccctgggccgcgcgccgcctccacgccctccttctcccctggcccggcgcctggcaccggggaccgttgcctgacgcgaggcccagctctacttttcgccccgcgtctcctccgcctgctcgcctcttccaccaactccaactccttctccctccagctccactcgctagtccccgactccgccagccctcggcccgctgccgtagcgccgcttcccgtccggtcccaaaggtgggaacgcgtccgccccggcccgcaccatggcacggttcggcttgcccgcgcttctctgcaccctggcagtgctcagcgccgcgctgctggctgccgagctcaagtcgaaaagttgctcggaagtgcgacgtctttacgtgtccaaaggcttcaacaagaacgatgcccccctccacgagatcaacggtgatcatttgaagatctgtccccagggttctacctgctgctctcaagagatggaggagaagtacagcctgcaaagtaaagatgatttcaaaagtgtggtcagcgaacagtgcaatcatttgcaagctgtctttgcttcacgttacaagaagtttgatgaattcttcaaagaactacttgaaaatgcagagaaatccctgaatgatatgtttgtgaagacatatggccatttatacatgcaaaattctgagctatttaaagatctcttcgtagagttgaaacgttactacgtggtgggaaatgtgaacctggaagaaatgctaaatgacttctgggctcgcctcctggagcggatgttccgcctggtgaactcccagtaccactttacagatgagtatctggaatgtgtgagcaagtatacggagcagctgaagcccttcggagatgtccctcgcaaattgaagctccaggttactcgtgcttttgtagcagcccgtactttcgctcaaggcttagcggttgcgggagatgtcgtgagcaaggtctccgtggtaaaccccacagcccagtgtacccatgccctgttgaagatgatctactgctcccactgccggggtctcgtgactgtgaagccatgttacaactactgctcaaacatcatgagaggctgtttggccaaccaaggggatctcgattttgaatggaacaatttcatagatgctatgctgatggtggcagagaggctagagggtcctttcaacattgaatcggtcatggatcccatcgatgtgaagatttctgatgctattatgaacatgcaggataatagtgttcaagtgtctcagaaggttttccagggatgtggaccccccaagcccctcccagctggacgaatttctcgttccatctctgaaagtgccttcagtgctcgcttcagaccacatcaccccgaggaacgcccaaccacagcagctggcactagtttggaccgactggttactgatgtcaaggagaaactgaaacaggccaagaaattctggtcctcccttccgagcaacgtttgcaacgatgagaggatggctgcaggaaacggcaatgaggatgactgttggaatgggaaaggcaaaagcaggtacctgtttgcagtgacaggaaatggattagccaaccagggcaacaacccagaggtccaggttgacaccagcaaaccagacatactgatccttcgtcaaatcatggctcttcgagtgatgaccagcaagatgaagaatgcatacaatgggaacgacgtggacttctttgatatcagtgatgaaagtagtggagaaggaagtggaagtggctgtgagtatcagcagtgcccttcagagtttgactacaatgccactgaccatgctgggaagagtgccaatgagaaagccgacagtgctggtgtccgtcctggggcacaggcctacctcctcactgtcttctgcatcttgttcctggttatgcagagagagtggagataattctcaaactctgagaaaaagtgttcatcaaaaagttaaaaggcaccagttatcacttttctaccatcctagtgactttgctttttaaatgaatggacaacaatgtacagtttttactatgtggccactggtttaagaagtgctgactttgttttctcattcagttttgggaggaaaagggactgtgcattgagttggttcctgctcccccaaaccatgttaaacgtggctaacagtgtaggtacagaactatagttagttgtgcatttgtgattttatcactctattatttgtttgtatgtttttttctcatttcgtttgtgggtttttttttccaactgtgatctcgccttgtttcttacaagcaaaccagggtcccttcttggcacgtaacatgtacgtatttctgaaatattaaatagctgtacagaagcagg

SEQ ID NO: 12913 - protein, 556 aa, Homo sapiens; identical to SEQ ID NO: 2335

SEQ ID NO: 12914 - DNA, 2312 bp, Homo sapiens
aagcggttcccgccctcgcccagcgcccaggtagctgcgaggaaacttttgcagcggctgggtagcagcacgtctcttgctcctcagggccactgccaggcttgccgagtcctgggactgctctcgctccggctgccactctcccgcgctctcctagctccctgcgaagcaggatggccgggaccgtgcgcaccgcgtgcttggtggtggcgatgctgctcagcttggacttcccgggacaggcgcagcccccgccgccgccgccggacgccacctgtcaccaagtccgctccttcttccagagactgcagcccggactcaagtgggtgccagaaactcccgtgccaggatcagatttgcaagtatgtctccctaagggcccaacatgctgctcaagaaagatggaagaaaaataccaactaacagcacgattgaacatggaacagctgcttcagtctgcaagtatggagctcaagttcttaattattcagaatgctgcggttttccaagaggcctttgaaattgttgttcgccatgccaagaactacaccaatgccatgttcaagaacaactacccaagcctgactccacaagcttttgagtttgtgggtgaatttttcacagatgtgtctctctacatcttgggttctgacatcaatgtagatgacatggtcaatgaattgtttgacagcctgtttccagtcatctatacccagctaatgaacccaggcctgcctgattcagccttggacatcaatgagtgcctccgaggagcaagacgtgacctgaaagtatttgggaatttccccaagcttattatgacccaggtttccaagtcactgcaagtcactaggatcttccttcaggctctgaatcttggaattgaagtgatcaacacaactgatcacctgaagttcagtaaggactgtggccgaatgctcaccagaatgtggtactgctcttactgccagggactgatgatggttaaaccctgtggcggttactgcaatgtggtcatgcaaggctgtatggcaggtgtggtggagattgacaagtactggagagaatacattctgtcccttgaagaacttgtgaatggcatgtacagaatctatgacatggagaacgtactgcttggtctcttttcaacaatccatgattctatccagtatgtccagaagaatgcaggaaagctgaccaccactattggcaagttatgtgcccattctcaacaacgccaatatagatctgcttattatcctgaagatctctttattgacaagaaagtattaaaagttgctcatgtagaacatgaagaaaccttatccagccgaagaagggaactaattcagaagttgaagtctttcatcagcttctatagtgctttgcctggctacatctgcagccatagccctgtggcggaaaacgacaccctttgctggaatggacaagaactcgtggagagatacagccaaaaggcagcaaggaatggaatgaaaaaccagttcaatctccatgagctgaaaatgaagggccctgagccagtggtcagtcaaattattgacaaactgaagcacattaaccagctcctgagaaccatgtctatgcccaaaggtagagttctggataaaaacctggatgaggaagggtttgaaagtggagactgcggtgatgatgaagatgagtgcattggaggctctggtgatggaatgataaaagtgaagaatcagctccgcttccttgcagaactggcctatgatctggatgtggatgatgcgcctggaaacagtcagcaggcaactccgaaggacaacgagataagcacctttcacaacctcgggaacgttcattccccgctgaagcttctcaccagcatggccatctcggtggtgtgcttcttcttcctggtgcactgactgcctggtgcccagcacatgtgctgccctacagcaccctgtggtcttcctcgataaagggaaccactttcttatttttttctatttttttttttttgttatcctgtatacctcctccagccatgaagtagaggactaaccatgtgttatgttttcgaaaatcaaatggtatcttttggaggaagatacattttagtggtagcatatagattgtccttttgcaaagaaagaaaaaaaaccatcaagttgtgccaaattattctcctatgtttggctgctagaacatggttaccatgtctttctctctcactccctccctttctatcgttctctctttgcatggatttctttgaaaaaaaataaattgctcaaataaaaatgtattggccctttttt

SEQ ID NO: 12915 - protein, 580 aa, Homo sapiens; identical to SEQ ID NO: 2337

SEQ ID NO: 12916 - DNA, 2307 bp, Homo sapiens
ccctgccccgcgccgccaagcggttcccgccctcgcccagcgcccaggtagctgcgaggaaacttttgcagcggctgggtagcagcacgtctcttgctcctcagggccactgccaggcttgccgagtcctgggactgctctcgctccggctgccactctcccgcgctctcctagctccctgcgaagcaggatggccgggaccgtgcgcaccgcgtgcttggtggtggcgatgctgctcagcttggacttcccgggacaggcgcagcccccgccgccgccgccggacgccacctgtcaccaagtccgctccttcttccagagactgcagcccggactcaagtgggtgccagaaactcccgtgccaggatcagatttgcaagtatgtctccctaagggcccaacatgctgctcaagaaagatggaagaaaaataccaactaacagcacgattgaacatggaacagctgcttcagtctgcaagtatggagctcaagttcttaattattcagaatgctgcggttttccaagaggcctttgaaattgttgttcgccatgccaagaactacaccaatgccatgttcaagaacaactacccaagcctgactccacaagcttttgagtttgtgggtgaatttttcacagatgtgtctctctacatcttgggttctgacatcaatgtagatgacatggtcaatgaattgtttgacagcctgtttccagtcatctatacccagctaatgaacccaggcctgcctgattcagccttggacatcaatgagtgcctccgaggagcaagacgtgacctgaaagtatttgggaatttccccaagcttattatgacccaggtttccaagtcactgcaagtcactaggatcttccttcaggctctgaatcttggaattgaagtgatcaacacaactgatcacctgaagttcagtaaggactgtggccgaatgctcaccagaatgtggtactgctcttactgccagggactgatgatggttaaaccctgtggcggttactgcaatgtggtcatgcaaggctgtatggcaggtgtggtggagattgacaagtactggagagaatacattctgtcccttgaagaacttgtgaatggcatgtacagaatctatgacatggagaacgtactgcttggtctcttttcaacaatccatgattctatccagtatgtccagaagaatgcaggaaagctgaccaccactattggcaagttatgtgcccattctcaacaacgccaatatagatctgcttattatcctgaagatctctttattgacaagaaagtattaaaagttgctcatgtagaacatgaagaaaccttatccagccgaagaagggaactaattcagaagttgaagtctttcatcagcttctatagtgctttgcctggctacatctgcagccatagccctgtggcggaaaacgacaccctttgctggaatggacaagaactcgtggagagatacagccaaaaggcagcaaggaatggaatgaaaaaccagttcaatctccatgagctgaaaatgaagggccctgagccagtggtcagtcaaattattgacaaactgaagcacattaaccagctcctgagaaccatgtctatgcccaaaggtagagttctggataaaaacctggatgaggaagggtttgaaagtggagactgcggtgatgatgaagatgagtgcattggaggctctggtgatggaatgataaaagtgaagaatcagctccgcttccttgcagaactggcctatgatctggatgtggatgatgcgcctggaaacagtcagcaggcaactccgaaggacaacgagataagcacctttcacaacctcgggaacgttcattccccgctgaagcttctcaccagcatggccatctcggtggtgtgcttcttcttcctggtgcactgactgcctggtgcccagcacatgtgctgccctacagcaccctgtggtcttcctcgataaagggaaccactttcttatttttttctatttttttttttttgttatcctgtatacctcctccagccatgaagtagaggactaaccatgtgttatgttttcgaaaatcaaatggtatcttttggaggaagatacattttagtggtagcatatagattgtccttttgcaaagaaagaaaaaaaaccatcaagttgtgccaaattattctcctatgtttggctgctagaacatggttaccatgtctttctctctcactccctccctttctatcgttctctctttgcatggatttctttgaaaaaaaataaattgctcaaat

SEQ ID NO: 12917 - protein, 580 aa, Homo sapiens; identical to SEQ ID NO: 2337

SEQ ID NO: 12918 - DNA, 670 bp, Homo sapiens
gaaactttggagggttgccctgggccacaggtgaatgattagttcttctgtgaactaaaattaattttgagccgtttgaagccctttctggtcatttccccctcagatgatgccctgtctcctggaaggtttgggagggcacctctgctaaaaagttcctctcagctaggcttaaatgctcagagccagccattcacacatcattgctcaatcgcgatggcaaagaaagttccagtgctttttcccttgcccattttccctgatgataagccattcctactcatgccttgacccatactttaccgaggaccaaaataagagaactgagactcttccacttcttaagttctcaatgtggggatgaagggatttgaagcttcccttggctattcattgcaaggtttatttcttctctctcaggaagctcttttttattttttttagagactggttctcctgtactccacccaggctggagtacagtgacaccatcataactaactgcagtctcaacctcctgggctcaagtgctcctcttgcctcaacctcccaactactcgggaggctgaggcaggagaatggcgtgaacccaggaggcagagcttgcagtgagcggagatcgcgccactgcactccagcctgggcgacagagcaagactccgtctcaaaa

SEQ ID NO: 12919 - protein, 62 aa, Homo sapiens
MLRASHSHIIAQSRWQRKFQCFFPCPFSLMISHSYSCLDPYFTEDQNKRTETLPLLKFSMWG

SEQ ID NO: 12920 - DNA, 1129 bp, Homo sapiens
ttcccgccctcgcccagcgcccaggtagctgcgaggaaacttttgcagcggctgggtagcagcacgtctcttgctcctcagggccactgccaggcttgccgagtcctgggactgctctcgctccggctgccactctcccgcgctctcctagctccctgcgaagcaggatggccgggaccgtgcgcaccgcgtgcttggtggtggcgatgctgctcagcttggacttcccgggacaggcgcagcccccgccgccgccgccggacgccacctgtcaccaagtccgctccttcttccagagactgcagcccggactcaagtgggtgccagaaactcccgtgccaggatcagatttgcaagtatgtctccctaagggcccaacatgctgctcaagaaagatggaagaaaaataccaactaacagcacgattgaacatggaacagctgcttcagtctgcaagtatggagctcaagttcttaattattcagaatgctgcggttttccaagcctgactccacaagcttttgagtttgtgggtgaatttttcacagatgtgtctctctacatcttgggttctgacatcaatgtagatgacatggtcaatgaattgtttgacagcctgtttccagtcatctatacccagctaatgaacccaggcctgcctgattcagccttggacatcaatgagtgcctccgaggagcaagacgtgacctgaaagtatttgggaatttccccaagcttattatgacccaggtttccaagtcactgcaagtcactaggatcttccttcaggctctgaatcttggaattgaagtgatcaacacaactgatcacctgaagttcagtaaggactgtggccgaatgctcaccagaatgtggtactgctcttactgccagggactgatgatggttaaaccctgtggcggttactgcaatgtggtcatgcaaggctgtatggcaggtgtggtggagattgacaagtactggagagaatacattctgtcccttgaagaacttgtgaatggcatgtacagaatctatgacatggagaacgtactgcttggtctcttttcaacaatccatgattctatccagtatgtccagaagaatgcaggaaagctgaccaccact

SEQ ID NO: 12921 - protein, 249 aa, Homo sapiens
MLLKKDGRKIPTNSTIEHGTAASVCKYGAQVLNYSECCGFPSLTPQAFEFVGEFFTDVSLYILGSDINVDDMVNELFDSLFPVIYTQLMNPGLPDSALDINECLRGARRDLKVFGNFPKLIMTQVSKSLQVTRIFLQALNLGIEVINTTDHLKFSKDCGRMLTRMWYCSYCQGLMMVKPCGGYCNVVMQGCMAGVVEIDKYWREYILSLEELVNGMYRIYDMENVLLGLFSTIHDSIQYVQKNAGKLTT

SEQ ID NO: 12922 - DNA, 700 bp, Homo sapiens
ttcccgccctcgcccagcgcccaggtagctgcgaggaaacttttgcagcggctgggtagcagcacgtctcttgctcctcagggccactgccaggcttgccgagtcctgggactgctctcgctccggctgccactctcccgcgctctcctagctccctgcgaagcaggatggccgggaccgtgcgcaccgcgtgcttggtggtggcgatgctgctcagcttggacttcccgggacaggcgcagcccccgccgccgccgccggacgccacctgtcaccaagtccgctccttcttccagagactgcagcccggactcaagtgggtgccagaaactcccgtgccaggatcagatttgcaagtatgtctccctaagggcccaacatgctgctcaagaaagatggaagaaaaataccaactaacagcacgattgaacatggaacagctgcttcagtctgcaagtatggagctcaagttcttaattattcagaatgctgcggttttccaagaggcctttgaaattgttgttcgccatgccaagaactacaccaatgccatgttcaagaacaactacccaagcctgactccacaagcttttgagtttgtgggtgaatttttcacagatgtgtctctctacatcttgggttctgacatcaatgtagatgacatggtcaatgaattgtttgacagcctgtttccaagtca

SEQ ID NO: 12923 - protein, 176 aa, Homo sapiens
MAGTVRTACLVVAMLLSLDFPGQAQPPPPPPDATCHQVRSFFQRLQPGLKWVPETPVPGSDLQVCLPKGPTCCSRKMEEKYQLTARLNMEQLLQSASMELKFLIIQNAAVFQEAFEIVVRHAKNYTNAMFKNNYPSLTPQAFEFVGEFFTDVSLYILGSDINVDDMVNELFDSLFP

SEQ ID NO: 12924 - DNA, 437 bp, Homo sapiens
tatgtacgtgtgtgttagggagtctgtgtgagagaataggccgtgttgctctaatgaagttcttagtctagctgggcacgttagtctctgtttcccccagttgtcttacaaggccatcgaggcactaaagcaaccatgtaatttatcattatttgattgctgaggagtttgataaattctggatgcatctccaaaagtctctaatgcctatacgcagagggggaagagtttcacaatttactgagcatcgagcgcctaaagtaaagaattcactctccaggaagagctcgagagtaagtaaagattgactccatggaccttttcatgaagcaaaacttttctcctttttccagcaggtctttgcaacctctttttgacattgcctttgcttaaaaagaaaattattgtcatgtatccaaaactagagtatatacata

SEQ ID NO: 12925 - protein, 41 aa, Homo sapiens
MHLQKSLMPIRRGGRVSQFTEHRAPKVKNSLSRKSSRVSKD

SEQ ID NO: 12926 - DNA, 918 bp, Homo sapiens
cgtagacagaggccctggcacccagcgccccgccgcccgcaagcctcgcgcctgtccgccgcgccccgagcccgccgcttccggtctcagcgcctgccgcagcagctgcggcccagcgagcggcccagatgcaggccatcaagggtgtggtggtgggagacggagctgtaggtaaaacttgcctactgatcagttacacaaccaacgcatttcctggagaagatatccctactgcctttgacaattattctgccaatgttatggtagatggaaaactggtgaatctgggcttatggaatacagctggacaagaagattatgacagattacgccccctatcctatccgcaagcagatgtgttcttaatttgcttttcgcttgtgagtcctgcatcatttgaaaatgtccttgcaaagtggtatcctgaggtgcagcaccactgtcccaacactcccattatcctagtgggaactaaacttgatcttagggatgataaagacaggatccagaaactgaaggagaagaagctaactcccatcacctatccgcagggtctagccatggctaaggagatgggtgctgtaaaatacctggagtgcttggccctcacaaggcgaggcctcaagacagtgtttgacgaagcgatccgagctgtcctctgcccacctcccgtgaagaagaggaagagaaaatgcctgcagttgtaaatgtctgagcccctagttcttggtcctgtcccttggaacctttgttcgctttgctcaaaaaacggtggagcctttgcactcaatgccaactttttgttacagattaatttttccataaatccattttgaatcaatcagtatcttttaggttttgtttgttctaaatgtaagagttcagactcacattctattaaaatttagccctaaaatg

SEQ ID NO: 12927 - protein, 192 aa, Homo sapiens
MQAIKGVVVGDGAVGKTCLLISYTTNAFPGEDIPTAFDNYSANVMVDGKLVNLGLWNTAGQEDYDRLRPLSYPQADVFLICFSLVSPASFENVLAKWYPEVQHHCPNTPIILVGTKLDLRDDKDRIQKLKEKKLTPITYPQGLAMAKEMGAVKYLECLALTRRGLKTVFDEAIRAVLCPPPVKKRKRKCLQL

SEQ ID NO: 12928 - RNA, 96 nt, Homo sapiens
  misc_RNA: miRNA sequence.
gcgggcggccccgcggugcauugcuguugcauugcacgugugugaggcgggugcagugccucggcagugcagcccggagccggccccuggcaccac

SEQ ID NO: 12929 - RNA, 96 nt, Homo sapiens
  misc_RNA: miRNA sequence.
ucuauuugucuuaggugagcuaaaugugugcugggacacauuugagccaaaugucccagcacacauuuagcucacauaagaaaaauggacucuagu

SEQ ID NO: 12930 - RNA, 111 nt, Homo sapiens
  misc_RNA: miRNA sequence.
gccgggagguugaacauccugcauagugcugccaggaaaucccuauuucauauaagagggggcuggcugguugcauauguaggaugucccaucucccagcccacuucguca

SEQ ID NO: 12931 - RNA, 84 nt, Homo sapiens
  misc_RNA: miRNA sequence.
ugugcagugggaaggggggccgauacacuguacgagagugaguagcaggucucacagugaaccggucucuuucccuacuguguc

SEQ ID NO: 12932 - RNA, 87 nt, Homo sapiens
  misc_RNA: miRNA sequence.
gaaagcgcuuuggaaugacacgaucacucccguugagugggcacccgagaagccaucgggaaugucguguccgcccagugcucuuuc

SEQ ID NO: 12933 - RNA, 92 nt, Homo sapiens
  misc_RNA: miRNA sequence.
cggcuggacagcgggcaacggaaucccaaaagcagcuguugucuccagagcauuccagcugcgcuuggauuucguccccugcucuccugccu

SEQ ID NO: 12934 - RNA, 96 nt, Homo sapiens
  misc_RNA: miRNA sequence.
ggggacugccgggugacccuggaaauccagaguggguggggccagucugaccguuucuaggcgacccacucuugguuuccaggguugcccuggaaa

SEQ ID NO: 12935 - RNA, 95 nt, Homo sapiens
  misc_RNA: miRNA sequence.
cucaucugucuguugggcuggaggcagggccuuugugaaggcggguggugcucagaucgccucugggcccuuccuccagccccgaggcggauuca

SEQ ID NO: 12936 - RNA, 78 nt, Homo sapiens
  misc_RNA: miRNA sequence.
uugugcuuucagcuucuuuacagugcugccuuguagcauucaggucaagcagcauuguacagggcuaugaaagaacca

SEQ ID NO: 12937 - RNA, 91 nt, Homo sapiens
  misc_RNA: miRNA sequence.
cgacuugcuuucucuccuccaugccuugaguguaggaccguuggcaucuuaauuacccucccacacccaaggcuugcaaaaaagcgagccu

SEQ ID NO: 12938 - RNA, 86 nt, Homo sapiens
  misc_RNA: miRNA sequence.
ugcucccucucucacaucccuugcaugguggagggugagcuuucugaaaaccccucccacaugcaggguuugcaggauggcgagcc

SEQ ID NO: 12939 - RNA, 84 nt, Homo sapiens
  misc_RNA: miRNA sequence.
gcucccccucucuaauccuugcuaccugggugagagugcugucugaaugcaaugcaccugggcaaggauucugagagcgagagc

SEQ ID NO: 12940 - RNA, 65 nt, Homo sapiens
  misc_RNA: miRNA sequence.
cuugaauccuuggaaccuaggugugagugcuauuucagugcaacacaccuauucaaggauucaaa

SEQ ID NO: 12941 - RNA, 84 nt, Homo sapiens
  misc_RNA: miRNA sequence.
gcucuuccucucuaauccuuugucccugggugagagugcuuucugaaugcaaugcacccgggcaaggauucugagagggugagc

SEQ ID NO: 12942 - RNA, 97 nt, Homo sapiens
  misc_RNA: miRNA sequence.
cugcuccuucucccauacccauugcauaucggaguugugaauucucaaaacaccuccugugugcauggauuacaggagggugagccuugucaucgug

SEQ ID NO: 12943 - RNA, 86 nt, Homo sapiens
  misc_RNA: miRNA sequence.
ugcucccccucucuaauccuugcuaucugggugcuagugcuggcucaaugcaaugcaccugggcaaggauucagagagggggagcu

SEQ ID NO: 12944 - DNA, 21 bp, Homo sapiens
aaatacaacamtgttttaaag

SEQ ID NO: 12945 - DNA, 21 bp, Homo sapiens
tatgagagtayaatgtgacta

SEQ ID NO: 12946 - DNA, 21 bp, Homo sapiens
taattcactcrtctgtttcaa

SEQ ID NO: 12947 - DNA, 21 bp, Homo sapiens
gagtttccttwtgacaaataa

SEQ ID NO: 12948 - DNA, 21 bp, Homo sapiens
gtccttctggmctgaatatgg

SEQ ID NO: 12949 - DNA, 21 bp, Homo sapiens
taagtccccaygtacgccatt

SEQ ID NO: 12950 - DNA, 21 bp, Homo sapiens
gaccaactaaygcagcctggt

SEQ ID NO: 12951 - DNA, 21 bp, Homo sapiens
cgccctgtccrctctcacggc

SEQ ID NO: 12952 - DNA, 21 bp, Homo sapiens
ttgaagataarcaaaaacaca

SEQ ID NO: 12953 - DNA, 21 bp, Homo sapiens
tatttcatgarattgctgagt

SEQ ID NO: 12954 - DNA, 21 bp, Homo sapiens
cgcccacaccrgcttgaatgg

SEQ ID NO: 12955 - DNA, 21 bp, Homo sapiens
agcggctcccmcctcccaatt

SEQ ID NO: 12956 - DNA, 21 bp, Homo sapiens
aagactgtgcratggtagcag

SEQ ID NO: 12957 - DNA, 21 bp, Homo sapiens
ccagcttccarcggttgctga

SEQ ID NO: 12958 - DNA, 21 bp, Homo sapiens
cagtctccagygctgactgta

SEQ ID NO: 12959 - DNA, 21 bp, Homo sapiens
gtacagtcatyaagtccaaac

SEQ ID NO: 12960 - DNA, 21 bp, Homo sapiens
caatactcgaytgactcttta

SEQ ID NO: 12961 - DNA, 21 bp, Homo sapiens
tcagattccayccatccaata

SEQ ID NO: 12962 - DNA, 21 bp, Homo sapiens
aggcataaggraaaaacacga

SEQ ID NO: 12963 - DNA, 21 bp, Homo sapiens
actgaacaccrtaagagtcac

SEQ ID NO: 12964 - DNA, 21 bp, Homo sapiens
ttgataagtgsggtccatatc

SEQ ID NO: 12965 - DNA, 21 bp, Homo sapiens
tctgtgtgagygtgctaagtg

SEQ ID NO: 12966 - DNA, 21 bp, Homo sapiens
tctgaaaagargtcatttatg

SEQ ID NO: 12967 - DNA, 21 bp, Homo sapiens
cgctgcctcckgctgctgtag

SEQ ID NO: 12968 - DNA, 21 bp, Homo sapiens
gtgatgcaagmctcttccaca

SEQ ID NO: 12969 - DNA, 21 bp, Homo sapiens
tctttgctttygcagagctta

SEQ ID NO: 12970 - DNA, 21 bp, Homo sapiens
ttgcaaaccayaccagcaaag

SEQ ID NO: 12971 - DNA, 21 bp, Homo sapiens
agtcacacctmtcaattcgct

SEQ ID NO: 12972 - DNA, 21 bp, Homo sapiens
cacataaatcyaatattatca

SEQ ID NO: 12973 - DNA, 21 bp, Homo sapiens
gagtaggaaayttaatgataa

SEQ ID NO: 12974 - DNA, 21 bp, Homo sapiens
aggacatgccrtccctgtgaa

SEQ ID NO: 12975 - DNA, 21 bp, Homo sapiens
caccatcaagragtaaacggt

SEQ ID NO: 12976 - DNA, 21 bp, Homo sapiens
ttcaactagayattgatcaat

SEQ ID NO: 12977 - DNA, 21 bp, Homo sapiens
agaaaaatacrtagccattaa

SEQ ID NO: 12978 - DNA, 21 bp, Homo sapiens
tgctcagttgyatttgatcca

SEQ ID NO: 12979 - DNA, 21 bp, Homo sapiens
gctcccattcytggctcaggt

SEQ ID NO: 12980 - DNA, 21 bp, Homo sapiens
tgtctattaargccctgtcca

SEQ ID NO: 12981 - DNA, 21 bp, Homo sapiens
gcctcagggtycctaggaaat

SEQ ID NO: 12982 - DNA, 21 bp, Homo sapiens
accagcctcayttgggttctg

SEQ ID NO: 12983 - DNA, 21 bp, Homo sapiens
aggatcgccakgtagttaaag

SEQ ID NO: 12984 - DNA, 21 bp, Homo sapiens
tttctaggatkcctgatgcac

SEQ ID NO: 12985 - DNA, 21 bp, Homo sapiens
tactcagagcsagtttcggga

SEQ ID NO: 12986 - DNA, 21 bp, Homo sapiens
cagctcatttygacttgccca

SEQ ID NO: 12987 - DNA, 21 bp, Homo sapiens
ggtatctatgrcaaaggccta

SEQ ID NO: 12988 - DNA, 21 bp, Homo sapiens
ttttgcaagargcttttacat

SEQ ID NO: 12989 - DNA, 21 bp, Homo sapiens
cattgaaaggygatgtgtgta

SEQ ID NO: 12990 - DNA, 21 bp, Homo sapiens
ggttcaagtasagtgaggagg

SEQ ID NO: 12991 - DNA, 21 bp, Homo sapiens
agtggtatgtrtatgttcatg

SEQ ID NO: 12992 - DNA, 21 bp, Homo sapiens
aaatattttcrtagagttatg

SEQ ID NO: 12993 - DNA, 21 bp, Homo sapiens
atggtcaaagsctcttaccaa

SEQ ID NO: 12994 - DNA, 21 bp, Homo sapiens
ctgtgttggargccaaagcca

SEQ ID NO: 12995 - DNA, 21 bp, Homo sapiens
tatttgcagargggcccagaa

SEQ ID NO: 12996 - DNA, 21 bp, Homo sapiens
tagggaaaagkaattgctgtg

SEQ ID NO: 12997 - DNA, 21 bp, Homo sapiens
ttacgatctartcaactcact

SEQ ID NO: 12998 - DNA, 21 bp, Homo sapiens
ctacaaacaarttacaagact

SEQ ID NO: 12999 - DNA, 21 bp, Homo sapiens
ggactttcttyagctttagca

SEQ ID NO: 13000 - DNA, 21 bp, Homo sapiens
gaactcttggygggtgcggtg

SEQ ID NO: 13001 - DNA, 21 bp, Homo sapiens
ttgtgatctgkacctcaccca

SEQ ID NO: 13002 - DNA, 21 bp, Homo sapiens
gggcatgggaygcaagcaaac

SEQ ID NO: 13003 - DNA, 21 bp, Homo sapiens
gaacccgaagytttcactctg

SEQ ID NO: 13004 - DNA, 21 bp, Homo sapiens
tcacttgctcrgtattcccat

SEQ ID NO: 13005 - DNA, 21 bp, Homo sapiens
ctgacatactrtttttatcaa

SEQ ID NO: 13006 - DNA, 21 bp, Homo sapiens
gagcctcagcytaggtctaga

SEQ ID NO: 13007 - DNA, 21 bp, Homo sapiens
tgacatctgtsaagtaggaaa

SEQ ID NO: 13008 - DNA, 21 bp, Homo sapiens
ggtggaaacasaatcttgtat

SEQ ID NO: 13009 - DNA, 21 bp, Homo sapiens
gtcttgctgcygcacgtgcac

SEQ ID NO: 13010 - DNA, 21 bp, Homo sapiens
aagcaaccagwaatccagcta

SEQ ID NO: 13011 - DNA, 21 bp, Homo sapiens
tgtccatggcytctgtgtctc

SEQ ID NO: 13012 - DNA, 21 bp, Homo sapiens
agctccaagargtaactggga

SEQ ID NO: 13013 - DNA, 21 bp, Homo sapiens
tgttgccccawatcttcaagg

SEQ ID NO: 13014 - DNA, 21 bp, Homo sapiens
tggtttggggycctgcccgtt

SEQ ID NO: 13015 - DNA, 21 bp, Homo sapiens
acctgccagtkggacatcaca

SEQ ID NO: 13016 - DNA, 21 bp, Homo sapiens
ctatttcttaygcattccttt

SEQ ID NO: 13017 - DNA, 21 bp, Homo sapiens
gggtccttggrcatctgaaga

SEQ ID NO: 13018 - DNA, 21 bp, Homo sapiens
tattacagcamacatacatag

SEQ ID NO: 13019 - DNA, 21 bp, Homo sapiens
agttctttccmtttttgtata

SEQ ID NO: 13020 - DNA, 21 bp, Homo sapiens
aactcctaagytgtctcagga

SEQ ID NO: 13021 - DNA, 21 bp, Homo sapiens
cagattaaagytttgtgactg

SEQ ID NO: 13022 - DNA, 21 bp, Homo sapiens
ggatgttggcstctgcagcag

SEQ ID NO: 13023 - DNA, 21 bp, Homo sapiens
aactggactcmtgtggtttga

SEQ ID NO: 13024 - DNA, 21 bp, Homo sapiens
tactagaggtragtgagctta

SEQ ID NO: 13025 - DNA, 21 bp, Homo sapiens
tattgaaggasgagggtgctc

SEQ ID NO: 13026 - DNA, 21 bp, Homo sapiens
actcctctgcwgtggttgtca

SEQ ID NO: 13027 - DNA, 21 bp, Homo sapiens
agcaatttgartggtaaagga

SEQ ID NO: 13028 - DNA, 21 bp, Homo sapiens
gaatttcttgytttcatctca

SEQ ID NO: 13029 - DNA, 21 bp, Homo sapiens
tctttgtaaartaagtttctg

SEQ ID NO: 13030 - DNA, 21 bp, Homo sapiens
tagaccctgayagtaaagcac

SEQ ID NO: 13031 - DNA, 21 bp, Homo sapiens
gaacacagaayttgcaggccc

SEQ ID NO: 13032 - DNA, 21 bp, Homo sapiens
ggtgttagctmtaactgtggc

SEQ ID NO: 13033 - DNA, 21 bp, Homo sapiens
gtagcaagccygggaggaaaa

SEQ ID NO: 13034 - DNA, 21 bp, Homo sapiens
ttgcttagacrtctctagggc

SEQ ID NO: 13035 - DNA, 21 bp, Homo sapiens
gaccacagaamagaatcagtt

SEQ ID NO: 13036 - DNA, 21 bp, Homo sapiens
gtttccacccrtgtccctttc

SEQ ID NO: 13037 - DNA, 21 bp, Homo sapiens
aaagacattcmgtagctgtga

SEQ ID NO: 13038 - DNA, 21 bp, Homo sapiens
atgctactcaragtcaagata

SEQ ID NO: 13039 - DNA, 21 bp, Homo sapiens
cctcaccacgytatctgcctt

SEQ ID NO: 13040 - DNA, 21 bp, Homo sapiens
actgtgcccarggagtcacct

SEQ ID NO: 13041 - DNA, 21 bp, Homo sapiens
gtcacaccaasacatgaatca

SEQ ID NO: 13042 - DNA, 21 bp, Homo sapiens
gaggggacacratcccacgtg

SEQ ID NO: 13043 - DNA, 21 bp, Homo sapiens
ttatatgggarggagaacaac

SEQ ID NO: 13044 - DNA, 21 bp, Homo sapiens
atttttactcyttgcttcatc

SEQ ID NO: 13045 - DNA, 21 bp, Homo sapiens
taactgacttscagagcatga

SEQ ID NO: 13046 - DNA, 21 bp, Homo sapiens
acagactagawtcagaatatt

SEQ ID NO: 13047 - DNA, 21 bp, Homo sapiens
cattctataastttattacat

SEQ ID NO: 13048 - DNA, 21 bp, Homo sapiens
catctgtaccrtcaagaattt

SEQ ID NO: 13049 - DNA, 21 bp, Homo sapiens
cataatttgcycatttacaga

SEQ ID NO: 13050 - DNA, 21 bp, Homo sapiens
aggccaaggtwgctgtcccaa

SEQ ID NO: 13051 - DNA, 21 bp, Homo sapiens
cagtgttctgsctagtataag

SEQ ID NO: 13052 - DNA, 21 bp, Homo sapiens
agacaatgatmtttcctgaaa

SEQ ID NO: 13053 - DNA, 21 bp, Homo sapiens
atacattttartgtcatcatt

SEQ ID NO: 13054 - DNA, 21 bp, Homo sapiens
agcacattttyttaattgcca

SEQ ID NO: 13055 - DNA, 21 bp, Homo sapiens
ggtgagaacarctcattccaa

SEQ ID NO: 13056 - DNA, 21 bp, Homo sapiens
atctctctgtygttactactt

SEQ ID NO: 13057 - DNA, 21 bp, Homo sapiens
cacaccacackcagtcttcta

SEQ ID NO: 13058 - DNA, 21 bp, Homo sapiens
ttgttatcgtkttttatgttt

SEQ ID NO: 13059 - DNA, 21 bp, Homo sapiens
gattggacatyttgctcagtg

SEQ ID NO: 13060 - DNA, 21 bp, Homo sapiens
gctgcaagaamcatagaaaag

SEQ ID NO: 13061 - DNA, 21 bp, Homo sapiens
catacactttwtttttaaccc

SEQ ID NO: 13062 - DNA, 21 bp, Homo sapiens
actgggatgayattcctgata

SEQ ID NO: 13063 - DNA, 21 bp, Homo sapiens
atcatgatgtwaaaaaaaatg

SEQ ID NO: 13064 - DNA, 21 bp, Homo sapiens
aaacagactgsagagattata

SEQ ID NO: 13065 - DNA, 21 bp, Homo sapiens
actgtaaaatrtaaatcaaac

SEQ ID NO: 13066 - DNA, 21 bp, Homo sapiens
gtgtatctccwtcttgtgctg

SEQ ID NO: 13067 - DNA, 21 bp, Homo sapiens
agaataaaaawgtatccccaa

SEQ ID NO: 13068 - DNA, 21 bp, Homo sapiens
attttgtctcycaacccgatg

SEQ ID NO: 13069 - DNA, 21 bp, Homo sapiens
ataacccagarctctatcagg

SEQ ID NO: 13070 - DNA, 21 bp, Homo sapiens
gctagaggaamagtagaagaa

SEQ ID NO: 13071 - DNA, 21 bp, Homo sapiens
gtgtaaatcakgtactttttc

SEQ ID NO: 13072 - DNA, 21 bp, Homo sapiens
tagaaagcccrcatggagtta

SEQ ID NO: 13073 - DNA, 21 bp, Homo sapiens
gattaatattrgtatgtgagc

SEQ ID NO: 13074 - DNA, 21 bp, Homo sapiens
aactctgtgasacagatatca

SEQ ID NO: 13075 - DNA, 21 bp, Homo sapiens
gagacagcagracaggtggaa

SEQ ID NO: 13076 - DNA, 21 bp, Homo sapiens
ggcattatagrgtttttagct

SEQ ID NO: 13077 - DNA, 21 bp, Homo sapiens
ctaatttctcyttactgatag

SEQ ID NO: 13078 - DNA, 21 bp, Homo sapiens
ttagcaacgastggcaacaaa

SEQ ID NO: 13079 - DNA, 21 bp, Homo sapiens
gaaatccttgmatgtaatata

SEQ ID NO: 13080 - DNA, 21 bp, Homo sapiens
agaggtcactrgcgattatgt

SEQ ID NO: 13081 - DNA, 21 bp, Homo sapiens
agacaccagcrgctgaagagg

SEQ ID NO: 13082 - DNA, 21 bp, Homo sapiens
aggggactttrtaagaaaatt

SEQ ID NO: 13083 - DNA, 21 bp, Homo sapiens
atcgacttctygggctgctcc

SEQ ID NO: 13084 - DNA, 21 bp, Homo sapiens
aaactcttaaycaacacactc

SEQ ID NO: 13085 - DNA, 21 bp, Homo sapiens
ataaatgttcsaagtagctca

SEQ ID NO: 13086 - DNA, 21 bp, Homo sapiens
catttcatgayggggacgcat

SEQ ID NO: 13087 - DNA, 21 bp, Homo sapiens
ggggtgtgggytgtagctaaa

SEQ ID NO: 13088 - DNA, 21 bp, Homo sapiens
actcagctccraaatgagcta

SEQ ID NO: 13089 - DNA, 21 bp, Homo sapiens
actatcttgcmttacttcaat

SEQ ID NO: 13090 - DNA, 21 bp, Homo sapiens
catgctgtaamccttatcaca

SEQ ID NO: 13091 - DNA, 21 bp, Homo sapiens
attccagagarataaaatgtt

SEQ ID NO: 13092 - DNA, 21 bp, Homo sapiens
actccctgtgytgtgaggccc

SEQ ID NO: 13093 - DNA, 21 bp, Homo sapiens
cagtgtttcaygtccaatact

SEQ ID NO: 13094 - DNA, 21 bp, Homo sapiens
gctcaggttayatagctccga

SEQ ID NO: 13095 - DNA, 21 bp, Homo sapiens
atcgtaagacragggcattat

SEQ ID NO: 13096 - DNA, 21 bp, Homo sapiens
caggaactcaratcctttgat

SEQ ID NO: 13097 - DNA, 21 bp, Homo sapiens
gtgggctgctrcacacagaca

SEQ ID NO: 13098 - DNA, 21 bp, Homo sapiens
ctcttgatttmacctctcata

SEQ ID NO: 13099 - DNA, 21 bp, Homo sapiens
ccttgggcagrtgggtgggcc

SEQ ID NO: 13100 - DNA, 21 bp, Homo sapiens
ggtaaactggytcaagcaagc

SEQ ID NO: 13101 - DNA, 21 bp, Homo sapiens
ctgggccattrttcccaccca

SEQ ID NO: 13102 - DNA, 21 bp, Homo sapiens
tgggaacaaarcgtcctgagg

SEQ ID NO: 13103 - DNA, 21 bp, Homo sapiens
gcctgattacratttcccgga

SEQ ID NO: 13104 - DNA, 21 bp, Homo sapiens
agttataattytaatacagat

SEQ ID NO: 13105 - DNA, 21 bp, Homo sapiens
aggctcatcaragtttgaatt

SEQ ID NO: 13106 - DNA, 21 bp, Homo sapiens
agaaagcaagmaatgccctat

SEQ ID NO: 13107 - DNA, 21 bp, Homo sapiens
gggggattctyacgcttggcg

SEQ ID NO: 13108 - DNA, 21 bp, Homo sapiens
gggagaccccyggcggacctc

SEQ ID NO: 13109 - DNA, 21 bp, Homo sapiens
aaccctaggcyttggtggctt

SEQ ID NO: 13110 - DNA, 21 bp, Homo sapiens
gataggctctmctggtaactt

SEQ ID NO: 13111 - DNA, 21 bp, Homo sapiens
ctttgcccacrccaaaaccta

SEQ ID NO: 13112 - DNA, 21 bp, Homo sapiens
aaaacacacasaatacctggc

SEQ ID NO: 13113 - DNA, 21 bp, Homo sapiens
ccaattacaarcttcccggcg

SEQ ID NO: 13114 - DNA, 21 bp, Homo sapiens
ggtagatgctrctgcgcagaa

SEQ ID NO: 13115 - DNA, 21 bp, Homo sapiens
agtaaattgcstaaatgacag

SEQ ID NO: 13116 - DNA, 21 bp, Homo sapiens
atgtttgggcracaccaaagc

SEQ ID NO: 13117 - DNA, 21 bp, Homo sapiens
tcaagtctgcwtttgagggtg

SEQ ID NO: 13118 - DNA, 21 bp, Homo sapiens
ctgatgcttcyacgtgctcct

SEQ ID NO: 13119 - DNA, 21 bp, Homo sapiens
gcagctgggcrctcaggatgt

SEQ ID NO: 13120 - DNA, 21 bp, Homo sapiens
tctgcacagcstagtgtgtgg

SEQ ID NO: 13121 - DNA, 21 bp, Homo sapiens
ttcctggggtrtgacctgtgc

SEQ ID NO: 13122 - DNA, 21 bp, Homo sapiens
caagagaagcyttatgggcca

SEQ ID NO: 13123 - DNA, 21 bp, Homo sapiens
taagaaacaaragtacagcct

SEQ ID NO: 13124 - DNA, 21 bp, Homo sapiens
tgtgtgctggraaaaagaaag

SEQ ID NO: 13125 - DNA, 21 bp, Homo sapiens
cttgttttcaragtaaccgtt

SEQ ID NO: 13126 - DNA, 21 bp, Homo sapiens
tgtaacaacgygcacgtagtg

SEQ ID NO: 13127 - DNA, 21 bp, Homo sapiens
agtgatgactrttatctaatt

SEQ ID NO: 13128 - DNA, 21 bp, Homo sapiens
tgggtgatacrtgtgtagagg

SEQ ID NO: 13129 - DNA, 21 bp, Homo sapiens
gcttcatgcgygtccttcttg

SEQ ID NO: 13130 - DNA, 21 bp, Homo sapiens
gtagagtagawtcctaggcac

SEQ ID NO: 13131 - DNA, 21 bp, Homo sapiens
accaagctgtygattgaacaa

SEQ ID NO: 13132 - DNA, 21 bp, Homo sapiens
ttagagaagtragactccaag

SEQ ID NO: 13133 - DNA, 21 bp, Homo sapiens
acctctaaatyttaaaaaggc

SEQ ID NO: 13134 - DNA, 21 bp, Homo sapiens
cctggtcactyttttagatac

SEQ ID NO: 13135 - DNA, 21 bp, Homo sapiens
tgaggaaaatraagtaaggga

SEQ ID NO: 13136 - DNA, 21 bp, Homo sapiens
aaccaaagaasgggacaataa

SEQ ID NO: 13137 - DNA, 21 bp, Homo sapiens
catgcccttcwtatcaggcct

SEQ ID NO: 13138 - DNA, 21 bp, Homo sapiens
tttcaatggtrtagtgttata

SEQ ID NO: 13139 - DNA, 21 bp, Homo sapiens
tcattccctcrgcttctacag

SEQ ID NO: 13140 - DNA, 21 bp, Homo sapiens
tggaataggaytgactgtact

SEQ ID NO: 13141 - DNA, 21 bp, Homo sapiens
tatatcttgasccacttcctg

SEQ ID NO: 13142 - DNA, 21 bp, Homo sapiens
agttttcacarttgttttcca

SEQ ID NO: 13143 - DNA, 21 bp, Homo sapiens
ttcccgtgctsgaagctttgg

SEQ ID NO: 13144 - DNA, 21 bp, Homo sapiens
taaaattaacraagctactca

SEQ ID NO: 13145 - DNA, 21 bp, Homo sapiens
gattgatttcrtatctgtatc

SEQ ID NO: 13146 - DNA, 21 bp, Homo sapiens
gctcaccaaayctagggttcc

SEQ ID NO: 13147 - DNA, 21 bp, Homo sapiens
atttatcttcytgacgaatgc

SEQ ID NO: 13148 - DNA, 21 bp, Homo sapiens
aaatagaggcmcatgtacaca

SEQ ID NO: 13149 - DNA, 21 bp, Homo sapiens
gtagctcagtktaggcctgcc

SEQ ID NO: 13150 - DNA, 21 bp, Homo sapiens
cctctttcttrtgctgtcctc

SEQ ID NO: 13151 - DNA, 21 bp, Homo sapiens
agacattaaaktttgaaagaa

SEQ ID NO: 13152 - DNA, 21 bp, Homo sapiens
atgtagcagasagttcacaaa

SEQ ID NO: 13153 - DNA, 21 bp, Homo sapiens
tcatagatgastttcctattt

SEQ ID NO: 13154 - DNA, 21 bp, Homo sapiens
ctatggaaacmatcacggatc

SEQ ID NO: 13155 - DNA, 21 bp, Homo sapiens
caaggttggcyttattggctg

SEQ ID NO: 13156 - DNA, 21 bp, Homo sapiens
aggtatttttrtggccatcct

SEQ ID NO: 13157 - DNA, 21 bp, Homo sapiens
aatgattctarcatagataag

SEQ ID NO: 13158 - DNA, 21 bp, Homo sapiens
actgagaattmactgcatttt

SEQ ID NO: 13159 - DNA, 21 bp, Homo sapiens
atgacccacamtccaatttct

SEQ ID NO: 13160 - DNA, 21 bp, Homo sapiens
gtattaagtcwttattctctc

SEQ ID NO: 13161 - DNA, 21 bp, Homo sapiens
tgccttgtggycaagcatttg

SEQ ID NO: 13162 - DNA, 21 bp, Homo sapiens
gatttcatagmagacatttcc

SEQ ID NO: 13163 - DNA, 21 bp, Homo sapiens
cctgtgttatrctgaggtcac

SEQ ID NO: 13164 - DNA, 21 bp, Homo sapiens
atcaaaacatstaaagcaaca

SEQ ID NO: 13165 - DNA, 21 bp, Homo sapiens
agacagaggcratgcctagtg

SEQ ID NO: 13166 - DNA, 21 bp, Homo sapiens
agaccagagasgatagaacaa

SEQ ID NO: 13167 - DNA, 21 bp, Homo sapiens
acaaactaaakgagatagtgg

SEQ ID NO: 13168 - DNA, 21 bp, Homo sapiens
ttttaaatggraagatttgat

SEQ ID NO: 13169 - DNA, 21 bp, Homo sapiens
tgtggaaatasaaaaagtgga

SEQ ID NO: 13170 - DNA, 21 bp, Homo sapiens
ttgtacctacrttcagacaga

SEQ ID NO: 13171 - DNA, 21 bp, Homo sapiens
gtgttgggaartgattttttt

SEQ ID NO: 13172 - DNA, 21 bp, Homo sapiens
acaaagaatgwagcttaaaaa

SEQ ID NO: 13173 - DNA, 21 bp, Homo sapiens
gtgaatggttsatggctgacc

SEQ ID NO: 13174 - DNA, 21 bp, Homo sapiens
tatgtattcaraagaaaattg

SEQ ID NO: 13175 - DNA, 21 bp, Homo sapiens
gggtcaaggawtctatgatta

SEQ ID NO: 13176 - DNA, 21 bp, Homo sapiens
atgacttggtrtgctgcaatg

SEQ ID NO: 13177 - DNA, 21 bp, Homo sapiens
tatcctaagcwtctgtatcat

SEQ ID NO: 13178 - DNA, 21 bp, Homo sapiens
ggcctcaggawtgacagcagc

SEQ ID NO: 13179 - DNA, 21 bp, Homo sapiens
gttgtagcacwttaaaagccc

SEQ ID NO: 13180 - DNA, 21 bp, Homo sapiens
taagttttccyttccagtctg

SEQ ID NO: 13181 - DNA, 21 bp, Homo sapiens
tttgctttacygtttcaccag

SEQ ID NO: 13182 - DNA, 21 bp, Homo sapiens
tcgttgccccktcatatcatt

SEQ ID NO: 13183 - DNA, 21 bp, Homo sapiens
tcatctttgtycgttgcaatt

SEQ ID NO: 13184 - DNA, 21 bp, Homo sapiens
aaaacaggaarttgggctaat

SEQ ID NO: 13185 - DNA, 21 bp, Homo sapiens
gaaggatccartagagttaaa

SEQ ID NO: 13186 - DNA, 21 bp, Homo sapiens
taatgttttgytctgaaagct

SEQ ID NO: 13187 - DNA, 21 bp, Homo sapiens
cactgtctttmttaaccagga

SEQ ID NO: 13188 - DNA, 21 bp, Homo sapiens
ggagagaattyaggacttagc

SEQ ID NO: 13189 - DNA, 21 bp, Homo sapiens
aacgttcctcrgaaatgcaga

SEQ ID NO: 13190 - DNA, 21 bp, Homo sapiens
cttctccattrgtttcataag

SEQ ID NO: 13191 - DNA, 21 bp, Homo sapiens
cagcatggggyatggtagata

SEQ ID NO: 13192 - DNA, 21 bp, Homo sapiens
tttttttctcrtgtgattgtg

SEQ ID NO: 13193 - DNA, 21 bp, Homo sapiens
atgaatggttrtagtgatatt

SEQ ID NO: 13194 - DNA, 21 bp, Homo sapiens
tgccttcagayggatcctagt

SEQ ID NO: 13195 - DNA, 21 bp, Homo sapiens
aaagaattgcmgtcatttcag

SEQ ID NO: 13196 - DNA, 21 bp, Homo sapiens
tagtactgacytagaatttaa

SEQ ID NO: 13197 - DNA, 21 bp, Homo sapiens
gaacgtaaaargtattcacat

SEQ ID NO: 13198 - DNA, 21 bp, Homo sapiens
gaggtcacgcrctccaggaaa

SEQ ID NO: 13199 - DNA, 21 bp, Homo sapiens
acccttcttaycaggactaca

SEQ ID NO: 13200 - DNA, 21 bp, Homo sapiens
cagggactttrtacaagaaag

SEQ ID NO: 13201 - DNA, 21 bp, Homo sapiens
caagccatgayttaaaaaaaa

SEQ ID NO: 13202 - DNA, 21 bp, Homo sapiens
tctccaaaagytttcacagtc

SEQ ID NO: 13203 - DNA, 21 bp, Homo sapiens
cttagatttawtgcttcattc

SEQ ID NO: 13204 - DNA, 21 bp, Homo sapiens
aggctttatckactctcccca

SEQ ID NO: 13205 - DNA, 21 bp, Homo sapiens
gcaacatttawataggaagtc

SEQ ID NO: 13206 - DNA, 21 bp, Homo sapiens
atcttctttcrtattgggatt

SEQ ID NO: 13207 - DNA, 21 bp, Homo sapiens
atggcctgagygtgtatgtat

SEQ ID NO: 13208 - DNA, 21 bp, Homo sapiens
atcagtcctcrgcccctcagt

SEQ ID NO: 13209 - DNA, 21 bp, Homo sapiens
gaatataggckaagaaatgta

SEQ ID NO: 13210 - DNA, 21 bp, Homo sapiens
gtcatggggcraaactgaatt

SEQ ID NO: 13211 - DNA, 21 bp, Homo sapiens
ccaagtgccckgttccctctt

SEQ ID NO: 13212 - DNA, 21 bp, Homo sapiens
agttattaacytattcacact

SEQ ID NO: 13213 - DNA, 21 bp, Homo sapiens
gtttctaaccyctggaataaa

SEQ ID NO: 13214 - DNA, 21 bp, Homo sapiens
aacatcaaaarcatcagttgt

SEQ ID NO: 13215 - DNA, 21 bp, Homo sapiens
gaattatcacyactgctagga

SEQ ID NO: 13216 - DNA, 21 bp, Homo sapiens
tggaaatgttstgtggcgatt

SEQ ID NO: 13217 - DNA, 21 bp, Homo sapiens
tgaggtctgaygggagaaatg

SEQ ID NO: 13218 - DNA, 21 bp, Homo sapiens
gattctgaggragatatctag

SEQ ID NO: 13219 - DNA, 21 bp, Homo sapiens
ttccatggackgccccaaaga

SEQ ID NO: 13220 - DNA, 21 bp, Homo sapiens
atatattacckttataattga

SEQ ID NO: 13221 - DNA, 21 bp, Homo sapiens
gttgggataayacactagctg

SEQ ID NO: 13222 - DNA, 21 bp, Homo sapiens
taccaaaacakgtccggagat

SEQ ID NO: 13223 - DNA, 21 bp, Homo sapiens
aaactgagagwaggtataaag

SEQ ID NO: 13224 - DNA, 21 bp, Homo sapiens
gtaagtactargaagaagtat

SEQ ID NO: 13225 - DNA, 21 bp, Homo sapiens
aagcccaagtraaccatttag

SEQ ID NO: 13226 - DNA, 21 bp, Homo sapiens
ggtagagatcygggcccaagg

SEQ ID NO: 13227 - DNA, 21 bp, Homo sapiens
tggatttggcrgtgacttaaa

SEQ ID NO: 13228 - DNA, 21 bp, Homo sapiens
ctgtctggagstaagacatgt

SEQ ID NO: 13229 - DNA, 21 bp, Homo sapiens
ttccacagttsttggatgaaa

SEQ ID NO: 13230 - DNA, 21 bp, Homo sapiens
attagccaaartgaagcaaat

SEQ ID NO: 13231 - DNA, 21 bp, Homo sapiens
tggttctccaygtaattgtcc

SEQ ID NO: 13232 - DNA, 21 bp, Homo sapiens
cttgagagtcrttgctgaaat

SEQ ID NO: 13233 - DNA, 21 bp, Homo sapiens
acttccatcawctttctagct

SEQ ID NO: 13234 - DNA, 21 bp, Homo sapiens
gtgtgcaatgrtatgatgttt

SEQ ID NO: 13235 - DNA, 21 bp, Homo sapiens
aggcatgtctrtattcaccaa

SEQ ID NO: 13236 - DNA, 21 bp, Homo sapiens
tatgatgctaraatgcttatg

SEQ ID NO: 13237 - DNA, 21 bp, Homo sapiens
tatggaagtaygaaaatatat

SEQ ID NO: 13238 - DNA, 21 bp, Homo sapiens
gtgctcacacrtatttactgc

SEQ ID NO: 13239 - DNA, 21 bp, Homo sapiens
aagcaacagawgccacttgcc

SEQ ID NO: 13240 - DNA, 21 bp, Homo sapiens
gtctcaggttrgcattcctct

SEQ ID NO: 13241 - DNA, 21 bp, Homo sapiens
gaaaccttttyttatgaactc

SEQ ID NO: 13242 - DNA, 21 bp, Homo sapiens
gaactataccrtttagtgtaa

SEQ ID NO: 13243 - DNA, 21 bp, Homo sapiens
tttctagcccraggcccttaa

SEQ ID NO: 13244 - DNA, 21 bp, Homo sapiens
tttttattcarcagggagtct

SEQ ID NO: 13245 - DNA, 21 bp, Homo sapiens
tagaaattatkcatgcggcat

SEQ ID NO: 13246 - DNA, 21 bp, Homo sapiens
tattgtcttgrcttgcactat

SEQ ID NO: 13247 - DNA, 21 bp, Homo sapiens
ttagaaactaytcaagggttt

SEQ ID NO: 13248 - DNA, 21 bp, Homo sapiens
cactgtgaaargttttcctgt

SEQ ID NO: 13249 - DNA, 21 bp, Homo sapiens
tgtttacatamaatttcaaca

SEQ ID NO: 13250 - DNA, 21 bp, Homo sapiens
aaaaatcagtktttgaggagg

SEQ ID NO: 13251 - DNA, 21 bp, Homo sapiens
gaagaacaaamagcacatttc

SEQ ID NO: 13252 - DNA, 21 bp, Homo sapiens
tgaacacccartgtgtgtcca

SEQ ID NO: 13253 - DNA, 21 bp, Homo sapiens
gaaattctatrtgctttactt

SEQ ID NO: 13254 - DNA, 21 bp, Homo sapiens
tattataaaaractcaaaagt

SEQ ID NO: 13255 - DNA, 21 bp, Homo sapiens
tttactattartgaactcaac

SEQ ID NO: 13256 - DNA, 21 bp, Homo sapiens
gacacaggacrttggggcatt

SEQ ID NO: 13257 - DNA, 21 bp, Homo sapiens
tcaccttgacygagttccctc

SEQ ID NO: 13258 - DNA, 21 bp, Homo sapiens
ccaaggtaaayagaaatttcc

SEQ ID NO: 13259 - DNA, 21 bp, Homo sapiens
agccagccacsctttgcccca

SEQ ID NO: 13260 - DNA, 21 bp, Homo sapiens
ttcaggaattygggacctgtt

SEQ ID NO: 13261 - DNA, 21 bp, Homo sapiens
aaaatatctamgaggctcccc

SEQ ID NO: 13262 - DNA, 21 bp, Homo sapiens
atggccctgtygttatgctct

SEQ ID NO: 13263 - DNA, 21 bp, Homo sapiens
ctgacccatcrccttgatcta

SEQ ID NO: 13264 - DNA, 21 bp, Homo sapiens
ttgtacttagmagccctggga

SEQ ID NO: 13265 - DNA, 21 bp, Homo sapiens
tactgctttgyggaaccacac

SEQ ID NO: 13266 - DNA, 21 bp, Homo sapiens
tgttatgttargacgaaggat

SEQ ID NO: 13267 - DNA, 21 bp, Homo sapiens
ttcttggatayaccttttgtc

SEQ ID NO: 13268 - DNA, 21 bp, Homo sapiens
tttcagactcrgctttgtaag

SEQ ID NO: 13269 - DNA, 21 bp, Homo sapiens
ttatccctgtyccatgcctaa

SEQ ID NO: 13270 - DNA, 21 bp, Homo sapiens
cactgctaaargagtttattc

SEQ ID NO: 13271 - DNA, 21 bp, Homo sapiens
tctcttcctayctctctacag

SEQ ID NO: 13272 - DNA, 21 bp, Homo sapiens
cagacaaagamttaaacactc

SEQ ID NO: 13273 - DNA, 21 bp, Homo sapiens
ctgagaaaccscatccctaca

SEQ ID NO: 13274 - DNA, 21 bp, Homo sapiens
tgagtaagatragaagggaga

SEQ ID NO: 13275 - DNA, 21 bp, Homo sapiens
tttagtgaatytggagatgga

SEQ ID NO: 13276 - DNA, 21 bp, Homo sapiens
aaggtactaakaaatctaggc

SEQ ID NO: 13277 - DNA, 21 bp, Homo sapiens
caacataggaytgtgacagca

SEQ ID NO: 13278 - DNA, 21 bp, Homo sapiens
ctcactggatyactctcaagg

SEQ ID NO: 13279 - DNA, 21 bp, Homo sapiens
atcaacactgstggagagacc

SEQ ID NO: 13280 - DNA, 21 bp, Homo sapiens
gggccaagaayggtttcccta

SEQ ID NO: 13281 - DNA, 21 bp, Homo sapiens
tttatcagccraacagaaatg

SEQ ID NO: 13282 - DNA, 21 bp, Homo sapiens
gcttccctacktcacatttct

SEQ ID NO: 13283 - DNA, 21 bp, Homo sapiens
tcttttcatcrtccatgacat

SEQ ID NO: 13284 - DNA, 21 bp, Homo sapiens
ttgaccaattraaaaaattcc

SEQ ID NO: 13285 - DNA, 21 bp, Homo sapiens
tcccataatcrcagcggtttc

SEQ ID NO: 13286 - DNA, 21 bp, Homo sapiens
atataaatctmtttgaaagtg

SEQ ID NO: 13287 - DNA, 21 bp, Homo sapiens
ctaccaaaggyatatagataa

SEQ ID NO: 13288 - DNA, 21 bp, Homo sapiens
tattaacaacyatgtattatt

SEQ ID NO: 13289 - DNA, 21 bp, Homo sapiens
gtaggaagacwctgacgacag

SEQ ID NO: 13290 - DNA, 21 bp, Homo sapiens
aacacatcttsaatgcagaat

SEQ ID NO: 13291 - DNA, 21 bp, Homo sapiens
tgagcacttgytatgagacag

SEQ ID NO: 13292 - DNA, 21 bp, Homo sapiens
gaagtttgacytggagattag

SEQ ID NO: 13293 - DNA, 21 bp, Homo sapiens
tttcaaacaaygtactctgag

SEQ ID NO: 13294 - DNA, 21 bp, Homo sapiens
tagttagctcsctaggttaga

SEQ ID NO: 13295 - DNA, 21 bp, Homo sapiens
ttttgccttayttggaaatac

SEQ ID NO: 13296 - DNA, 21 bp, Homo sapiens
ctcagagtctstatcagaaaa

SEQ ID NO: 13297 - DNA, 21 bp, Homo sapiens
atatagaaagyaatgcgagga

SEQ ID NO: 13298 - DNA, 21 bp, Homo sapiens
cttcccgtagrgctattgtga

SEQ ID NO: 13299 - DNA, 21 bp, Homo sapiens
ggctgtgaggycatcttttca

SEQ ID NO: 13300 - DNA, 21 bp, Homo sapiens
gtcggtccacrttttaaactt

SEQ ID NO: 13301 - DNA, 21 bp, Homo sapiens
ctaaagaggayatgtatttta

SEQ ID NO: 13302 - DNA, 21 bp, Homo sapiens
ctcttgtcatycaatggtata

SEQ ID NO: 13303 - DNA, 21 bp, Homo sapiens
ctaatacatakaaatacacat

SEQ ID NO: 13304 - DNA, 21 bp, Homo sapiens
attccttggargtctgtaagg

SEQ ID NO: 13305 - DNA, 21 bp, Homo sapiens
ttcaagactaygtccagttcc

SEQ ID NO: 13306 - DNA, 21 bp, Homo sapiens
ctctttcaggrctgttggtac

SEQ ID NO: 13307 - DNA, 21 bp, Homo sapiens
aaaataagaamatttcatgat

SEQ ID NO: 13308 - DNA, 21 bp, Homo sapiens
ctatctggaayctgggtgaga

SEQ ID NO: 13309 - DNA, 21 bp, Homo sapiens
gctgaaaaatrtgatcttccc

SEQ ID NO: 13310 - DNA, 21 bp, Homo sapiens
ttgtcagcttyctattcttag

SEQ ID NO: 13311 - DNA, 21 bp, Homo sapiens
ttgaaatggtrctaggatatt

SEQ ID NO: 13312 - DNA, 21 bp, Homo sapiens
aatatatccaytgaaaataat

SEQ ID NO: 13313 - DNA, 21 bp, Homo sapiens
tttgtccaccyttactcatgg

SEQ ID NO: 13314 - DNA, 21 bp, Homo sapiens
attcagtactrttgtaaaaga

SEQ ID NO: 13315 - DNA, 21 bp, Homo sapiens
ttgttaggaamcatgctaagt

SEQ ID NO: 13316 - DNA, 21 bp, Homo sapiens
ctccggatacyccagacacaa

SEQ ID NO: 13317 - DNA, 21 bp, Homo sapiens
gtgagagaggkctttctaagc

SEQ ID NO: 13318 - DNA, 21 bp, Homo sapiens
ttatttcaggkcctccttggc

SEQ ID NO: 13319 - DNA, 21 bp, Homo sapiens
acaaatgtagwcaatgctcag

SEQ ID NO: 13320 - DNA, 21 bp, Homo sapiens
tcctgggcaartgatacttgt

SEQ ID NO: 13321 - DNA, 21 bp, Homo sapiens
caggttttgaytggaacttgg

SEQ ID NO: 13322 - DNA, 21 bp, Homo sapiens
cttcagtgttsccttttccca

SEQ ID NO: 13323 - DNA, 21 bp, Homo sapiens
ctcgtgagaaracctatagat

SEQ ID NO: 13324 - DNA, 21 bp, Homo sapiens
aactgacacgscttaggacct

SEQ ID NO: 13325 - DNA, 21 bp, Homo sapiens
caaaaatttgytgccatctga

SEQ ID NO: 13326 - DNA, 21 bp, Homo sapiens
agctaaggtcrgctgtgtttg

SEQ ID NO: 13327 - DNA, 21 bp, Homo sapiens
ggaagatgccrgtaccgcagc

SEQ ID NO: 13328 - DNA, 21 bp, Homo sapiens
cagaaaaatcycgtgtccagt

SEQ ID NO: 13329 - DNA, 21 bp, Homo sapiens
ccatctaggamaagaaaagga

SEQ ID NO: 13330 - DNA, 21 bp, Homo sapiens
ctgtgcccgcygcgatggtag

SEQ ID NO: 13331 - DNA, 21 bp, Homo sapiens
tgctgggatcygggcaccctc

SEQ ID NO: 13332 - DNA, 21 bp, Homo sapiens
ctcaacttacygtgtccaacc

SEQ ID NO: 13333 - DNA, 21 bp, Homo sapiens
atccaggcaaycgtctctcat

SEQ ID NO: 13334 - DNA, 21 bp, Homo sapiens
gggctaatccrtggcaatttg

SEQ ID NO: 13335 - DNA, 21 bp, Homo sapiens
gttacaattcrtgcatttcag

SEQ ID NO: 13336 - DNA, 21 bp, Homo sapiens
gctatttacayttgcagaccc

SEQ ID NO: 13337 - DNA, 21 bp, Homo sapiens
aatagcatcgyttgtggaagt

SEQ ID NO: 13338 - DNA, 21 bp, Homo sapiens
attctacctayggctcctcag

SEQ ID NO: 13339 - DNA, 21 bp, Homo sapiens
tgtcacaaaamttctcaacct

SEQ ID NO: 13340 - DNA, 21 bp, Homo sapiens
agtccctcagsctttgctaca

SEQ ID NO: 13341 - DNA, 21 bp, Homo sapiens
tttacaaatcraatgagaaag

SEQ ID NO: 13342 - DNA, 21 bp, Homo sapiens
ggatttgtgartcaagactaa

SEQ ID NO: 13343 - DNA, 21 bp, Homo sapiens
aattctcactratgccttgaa

SEQ ID NO: 13344 - DNA, 21 bp, Homo sapiens
cattagaataratttataagc

SEQ ID NO: 13345 - DNA, 21 bp, Homo sapiens
tataaatatarattcattcat

SEQ ID NO: 13346 - DNA, 21 bp, Homo sapiens
tgaaattcaakttaagcctca

SEQ ID NO: 13347 - DNA, 21 bp, Homo sapiens
gttatgggagkttagagaaaa

SEQ ID NO: 13348 - DNA, 21 bp, Homo sapiens
ctgagcaagtrccatccacca

SEQ ID NO: 13349 - DNA, 21 bp, Homo sapiens
aagctgaaatmtcagggtgcc

SEQ ID NO: 13350 - DNA, 21 bp, Homo sapiens
gcaaaagcctytttgacttca

SEQ ID NO: 13351 - DNA, 21 bp, Homo sapiens
gacctaaggtrttgattctga

SEQ ID NO: 13352 - DNA, 21 bp, Homo sapiens
cagggcacatwgctgtggctc

SEQ ID NO: 13353 - DNA, 21 bp, Homo sapiens
tcttttcaaayacagggtgga

SEQ ID NO: 13354 - DNA, 21 bp, Homo sapiens
actccctctasactcatttta

SEQ ID NO: 13355 - DNA, 21 bp, Homo sapiens
tgtaaataacwaagcatgccc

SEQ ID NO: 13356 - DNA, 21 bp, Homo sapiens
cagtatacccrtctcccaaat

SEQ ID NO: 13357 - DNA, 21 bp, Homo sapiens
atagaaaatartaaggtaaat

SEQ ID NO: 13358 - DNA, 21 bp, Homo sapiens
catttttaaartagctatgta

SEQ ID NO: 13359 - DNA, 21 bp, Homo sapiens
agctccatgcmtattactgcc

SEQ ID NO: 13360 - DNA, 21 bp, Homo sapiens
cgtccggtagsggttaaatca

SEQ ID NO: 13361 - DNA, 21 bp, Homo sapiens
tatgtgaatgkcgtcccagta

SEQ ID NO: 13362 - DNA, 21 bp, Homo sapiens
cttgcacatawtaattttttt

SEQ ID NO: 13363 - DNA, 21 bp, Homo sapiens
cttggtccacwctcaagatac

SEQ ID NO: 13364 - DNA, 21 bp, Homo sapiens
gctgcatcagraagcaagtct

SEQ ID NO: 13365 - DNA, 21 bp, Homo sapiens
caattttctgstcaattttaa

SEQ ID NO: 13366 - DNA, 21 bp, Homo sapiens
acctaaaagtrcacaaaactc

SEQ ID NO: 13367 - DNA, 21 bp, Homo sapiens
gagctatgtaygtatgaatat

SEQ ID NO: 13368 - DNA, 21 bp, Homo sapiens
tcctggccatrccccagacct

SEQ ID NO: 13369 - DNA, 21 bp, Homo sapiens
ctaaaaacttytcctttaatt

SEQ ID NO: 13370 - DNA, 21 bp, Homo sapiens
agggaagtggmgatgaggagg

SEQ ID NO: 13371 - DNA, 21 bp, Homo sapiens
aaatattaagkgtaactacaa

SEQ ID NO: 13372 - DNA, 21 bp, Homo sapiens
gctcgatcaaygtcaagttca

SEQ ID NO: 13373 - DNA, 21 bp, Homo sapiens
gtttttatctyccttctgtgg

SEQ ID NO: 13374 - DNA, 21 bp, Homo sapiens
tcagacaggtrtggaggtttt

SEQ ID NO: 13375 - DNA, 21 bp, Homo sapiens
ctgatgggtamattttcaacc

SEQ ID NO: 13376 - DNA, 21 bp, Homo sapiens
tgtatccctcsctttcctcgt

SEQ ID NO: 13377 - DNA, 21 bp, Homo sapiens
tatatccaatsaggcactctg

SEQ ID NO: 13378 - DNA, 21 bp, Homo sapiens
ggtggttgccrctcagcagca

SEQ ID NO: 13379 - DNA, 21 bp, Homo sapiens
atgttgtgccygacctattct

SEQ ID NO: 13380 - DNA, 21 bp, Homo sapiens
atttctgacckggatttgatg

SEQ ID NO: 13381 - DNA, 21 bp, Homo sapiens
acagagttcaygccacgaacc

SEQ ID NO: 13382 - DNA, 21 bp, Homo sapiens
aatgagtgagsgcatgtaact

SEQ ID NO: 13383 - DNA, 21 bp, Homo sapiens
cctgtaactaygcttttgcct

SEQ ID NO: 13384 - DNA, 21 bp, Homo sapiens
gacagaatgaycaaaggccca

SEQ ID NO: 13385 - DNA, 21 bp, Homo sapiens
aaatgggatcrtgcgttaaaa

SEQ ID NO: 13386 - DNA, 21 bp, Homo sapiens
tgggctgaagwtggggcatcc

SEQ ID NO: 13387 - DNA, 21 bp, Homo sapiens
caataaagggrggatttacac

SEQ ID NO: 13388 - DNA, 21 bp, Homo sapiens
tggagttcaasatcacccttg

SEQ ID NO: 13389 - DNA, 21 bp, Homo sapiens
ctttgctgagsatcaaatgta

SEQ ID NO: 13390 - DNA, 21 bp, Homo sapiens
gctagcttatmtccctggctt

SEQ ID NO: 13391 - DNA, 21 bp, Homo sapiens
caaggagcttyggacaccagg

SEQ ID NO: 13392 - DNA, 21 bp, Homo sapiens
gaaaaccagayatttgaaaac

SEQ ID NO: 13393 - DNA, 21 bp, Homo sapiens
tcaattacgtygtgctttttc

SEQ ID NO: 13394 - DNA, 21 bp, Homo sapiens
atcgctcaacyaaactacctt

SEQ ID NO: 13395 - DNA, 21 bp, Homo sapiens
taggcaatctrctccacacag

SEQ ID NO: 13396 - DNA, 21 bp, Homo sapiens
gatcagttctmagatcagcta

SEQ ID NO: 13397 - DNA, 21 bp, Homo sapiens
agagttgtgamttaaatcact

SEQ ID NO: 13398 - DNA, 21 bp, Homo sapiens
ctatgcttccsgccaatccca

SEQ ID NO: 13399 - DNA, 21 bp, Homo sapiens
gatttaaaaayaggcccaatt

SEQ ID NO: 13400 - DNA, 21 bp, Homo sapiens
ttgtagttgcrgtggtaatca

SEQ ID NO: 13401 - DNA, 21 bp, Homo sapiens
ggaactcagamatgcagaggg

SEQ ID NO: 13402 - DNA, 21 bp, Homo sapiens
aggaggtagcrtcacagcgga

SEQ ID NO: 13403 - DNA, 21 bp, Homo sapiens
gataagtggawgacactgctg

SEQ ID NO: 13404 - DNA, 21 bp, Homo sapiens
atcttcagcayaggctacagc

SEQ ID NO: 13405 - DNA, 21 bp, Homo sapiens
gcaaatatatraagaaaggac

SEQ ID NO: 13406 - DNA, 21 bp, Homo sapiens
ctaccatccaragatttttat

SEQ ID NO: 13407 - DNA, 21 bp, Homo sapiens
acttcaaggcrttatggattt

SEQ ID NO: 13408 - DNA, 21 bp, Homo sapiens
aaatacttgamaaatttgaag

SEQ ID NO: 13409 - DNA, 21 bp, Homo sapiens
aatccaggagmtgctttgaca

SEQ ID NO: 13410 - DNA, 21 bp, Homo sapiens
ctattgcttcytctagtacca

SEQ ID NO: 13411 - DNA, 21 bp, Homo sapiens
tagtatgcttytgtatatatg

SEQ ID NO: 13412 - DNA, 21 bp, Homo sapiens
agtggtaattwtttataaggc

SEQ ID NO: 13413 - DNA, 21 bp, Homo sapiens
ttataaatatkcactcactca

SEQ ID NO: 13414 - DNA, 21 bp, Homo sapiens
accatacaatygtggaatgtt

SEQ ID NO: 13415 - DNA, 21 bp, Homo sapiens
tacagtagcayacgaatgaaa

SEQ ID NO: 13416 - DNA, 21 bp, Homo sapiens
tataatcagartgtagtggga

SEQ ID NO: 13417 - DNA, 21 bp, Homo sapiens
gcaacatagaygggatgcatt

SEQ ID NO: 13418 - DNA, 21 bp, Homo sapiens
ttatcagaaakattccaccaa

SEQ ID NO: 13419 - DNA, 21 bp, Homo sapiens
aagccctgaarcaatgttgtc

SEQ ID NO: 13420 - DNA, 21 bp, Homo sapiens
attttctcgcytttgttactc

SEQ ID NO: 13421 - DNA, 21 bp, Homo sapiens
aaacttgaaayacaaggaaga

SEQ ID NO: 13422 - DNA, 21 bp, Homo sapiens
ccgtcaaaggrctatttttca

SEQ ID NO: 13423 - DNA, 21 bp, Homo sapiens
acataatctgsaatacatctc

SEQ ID NO: 13424 - DNA, 21 bp, Homo sapiens
acagttgtccstatactttta

SEQ ID NO: 13425 - DNA, 21 bp, Homo sapiens
tgatttcctgragatacagtt

SEQ ID NO: 13426 - DNA, 21 bp, Homo sapiens
ccttttggcarctgaccacct

SEQ ID NO: 13427 - DNA, 21 bp, Homo sapiens
tatgacagtgmacagcaaata

SEQ ID NO: 13428 - DNA, 21 bp, Homo sapiens
gtggccagaargagatcctct

SEQ ID NO: 13429 - DNA, 21 bp, Homo sapiens
catgacttgcrccataagtat

SEQ ID NO: 13430 - DNA, 21 bp, Homo sapiens
ggttggatccytgtgctgatc

SEQ ID NO: 13431 - DNA, 21 bp, Homo sapiens
tgcttctgtcrtggtcttctt

SEQ ID NO: 13432 - DNA, 21 bp, Homo sapiens
gaagtacaaastacagcttag

SEQ ID NO: 13433 - DNA, 21 bp, Homo sapiens
atgcggtgagstaatatagat

SEQ ID NO: 13434 - DNA, 21 bp, Homo sapiens
tactgttgaartctgttcagt

SEQ ID NO: 13435 - DNA, 21 bp, Homo sapiens
aattataccaytttcgcttgc

SEQ ID NO: 13436 - DNA, 21 bp, Homo sapiens
tctcttgcatrtcctgaatac

SEQ ID NO: 13437 - DNA, 21 bp, Homo sapiens
ttttgcctccyaaagatgaac

SEQ ID NO: 13438 - DNA, 21 bp, Homo sapiens
gatgcagatcmaaatacagct

SEQ ID NO: 13439 - DNA, 21 bp, Homo sapiens
tatttaactgyattggaccca

SEQ ID NO: 13440 - DNA, 21 bp, Homo sapiens
aaagacaggtrggacctggga

SEQ ID NO: 13441 - DNA, 21 bp, Homo sapiens
gtctgtaacawtgacttttct

SEQ ID NO: 13442 - DNA, 21 bp, Homo sapiens
tgtaaacaatmatctttatgc

SEQ ID NO: 13443 - DNA, 21 bp, Homo sapiens
ctagtccaaasagatgtggac

SEQ ID NO: 13444 - DNA, 21 bp, Homo sapiens
gtcagagtttrtaagaataaa

SEQ ID NO: 13445 - DNA, 21 bp, Homo sapiens
aggttgtcccmagccagttta

SEQ ID NO: 13446 - DNA, 21 bp, Homo sapiens
taatatgaagyacacgtttga

SEQ ID NO: 13447 - DNA, 21 bp, Homo sapiens
cactgaataamtgtctccaaa

SEQ ID NO: 13448 - DNA, 21 bp, Homo sapiens
tcaacagcttyaataactcaa

SEQ ID NO: 13449 - DNA, 21 bp, Homo sapiens
ggtttcccttsatagatgcac

SEQ ID NO: 13450 - DNA, 21 bp, Homo sapiens
tctttgaaggrtgacatgcag

SEQ ID NO: 13451 - DNA, 21 bp, Homo sapiens
gagtatggatraagagatttt

SEQ ID NO: 13452 - DNA, 21 bp, Homo sapiens
acctgttcaaytggttgtttt

SEQ ID NO: 13453 - DNA, 21 bp, Homo sapiens
ttgaaagctgratgtgataat

SEQ ID NO: 13454 - DNA, 21 bp, Homo sapiens
cttttcttcawctctctgaga

SEQ ID NO: 13455 - DNA, 21 bp, Homo sapiens
tggttcagctrgttcttaaat

SEQ ID NO: 13456 - DNA, 21 bp, Homo sapiens
agaagatgcaygaatttgtat

SEQ ID NO: 13457 - DNA, 21 bp, Homo sapiens
cacttatattsagaataaacc

SEQ ID NO: 13458 - DNA, 21 bp, Homo sapiens
acctgacagcygacttttcat

SEQ ID NO: 13459 - DNA, 21 bp, Homo sapiens
tatgctataayaggggttcac

SEQ ID NO: 13460 - DNA, 21 bp, Homo sapiens
tacaggacacygagagacagc

SEQ ID NO: 13461 - DNA, 21 bp, Homo sapiens
caggaaggtgrcgtgattttg

SEQ ID NO: 13462 - DNA, 21 bp, Homo sapiens
ttgtctatgaytttcctggta

SEQ ID NO: 13463 - DNA, 21 bp, Homo sapiens
aggcatagagytctgattctt

SEQ ID NO: 13464 - DNA, 21 bp, Homo sapiens
ccacacttgcrtttttccgag

SEQ ID NO: 13465 - DNA, 21 bp, Homo sapiens
gtgtaccaggraacctcttcc

SEQ ID NO: 13466 - DNA, 21 bp, Homo sapiens
tgtcatttatrtacctcaaat

SEQ ID NO: 13467 - DNA, 21 bp, Homo sapiens
tggacagagcygagaggtaga

SEQ ID NO: 13468 - DNA, 21 bp, Homo sapiens
tgatatataayttgtacataa

SEQ ID NO: 13469 - DNA, 21 bp, Homo sapiens
cacttccactscattaaaagg

SEQ ID NO: 13470 - DNA, 21 bp, Homo sapiens
aaattgatggraacataattg

SEQ ID NO: 13471 - DNA, 21 bp, Homo sapiens
gaaccatgtcwgtttttctcc

SEQ ID NO: 13472 - DNA, 21 bp, Homo sapiens
ttgcctaaacrgaacctggtt

SEQ ID NO: 13473 - DNA, 21 bp, Homo sapiens
gatttaggacygtggtaagca

SEQ ID NO: 13474 - DNA, 21 bp, Homo sapiens
atgatctaggygaattcctca

SEQ ID NO: 13475 - DNA, 21 bp, Homo sapiens
ggaaaattatygggtgtatag

SEQ ID NO: 13476 - DNA, 21 bp, Homo sapiens
tgctcggcacwgaatttcaga

SEQ ID NO: 13477 - DNA, 21 bp, Homo sapiens
tagcaacttcrtggcaagtct

SEQ ID NO: 13478 - DNA, 21 bp, Homo sapiens
ttttatgcacrgctctgacac

SEQ ID NO: 13479 - DNA, 21 bp, Homo sapiens
acaccaaactyatttcaatgt

SEQ ID NO: 13480 - DNA, 21 bp, Homo sapiens
tcaccctgaamtacactccaa

SEQ ID NO: 13481 - DNA, 21 bp, Homo sapiens
aactttcaaarggtgaaattc

SEQ ID NO: 13482 - DNA, 21 bp, Homo sapiens
tcaaagttctyccccatcatt

SEQ ID NO: 13483 - DNA, 21 bp, Homo sapiens
caaaccaaggmggtgatgaaa

SEQ ID NO: 13484 - DNA, 21 bp, Homo sapiens
tttacagggcsgtagatcgat

SEQ ID NO: 13485 - DNA, 21 bp, Homo sapiens
ttttcagagtrtgcagaggat

SEQ ID NO: 13486 - DNA, 21 bp, Homo sapiens
ggaaaattccycaagatctaa

SEQ ID NO: 13487 - DNA, 21 bp, Homo sapiens
aacatgacagsatatgacagg

SEQ ID NO: 13488 - DNA, 21 bp, Homo sapiens
tgtaaacaggscttggaatgt

SEQ ID NO: 13489 - DNA, 21 bp, Homo sapiens
tctcaggtccwtgaggaaact

SEQ ID NO: 13490 - DNA, 21 bp, Homo sapiens
caaactttgcygaaagcagct

SEQ ID NO: 13491 - DNA, 21 bp, Homo sapiens
gtctcccctgyttgctaccct

SEQ ID NO: 13492 - DNA, 21 bp, Homo sapiens
actgttacatkctagggatct

SEQ ID NO: 13493 - DNA, 21 bp, Homo sapiens
actctgatagycatccaatct

SEQ ID NO: 13494 - DNA, 21 bp, Homo sapiens
aaattgctcgstgcttattag

SEQ ID NO: 13495 - DNA, 21 bp, Homo sapiens
tctgtaaaagraggacactaa

SEQ ID NO: 13496 - DNA, 21 bp, Homo sapiens
ggaaggagagwtgacaacagc

SEQ ID NO: 13497 - DNA, 21 bp, Homo sapiens
aggtcgtgctktacaggggct

SEQ ID NO: 13498 - DNA, 21 bp, Homo sapiens
aaatgaggtcracttcctgtt

SEQ ID NO: 13499 - DNA, 21 bp, Homo sapiens
tgtttccataygaataataga

SEQ ID NO: 13500 - DNA, 21 bp, Homo sapiens
gggtcatagawaagggctcca

SEQ ID NO: 13501 - DNA, 21 bp, Homo sapiens
aggtaaggtgratgagaggaa

SEQ ID NO: 13502 - DNA, 21 bp, Homo sapiens
ggctaaaatayacacacttac

SEQ ID NO: 13503 - DNA, 21 bp, Homo sapiens
ttgtgcacctsctggtaggac

SEQ ID NO: 13504 - DNA, 21 bp, Homo sapiens
ttctgttttcratacgatccc

SEQ ID NO: 13505 - DNA, 21 bp, Homo sapiens
tcaaagggaayatagcaaatg

SEQ ID NO: 13506 - DNA, 21 bp, Homo sapiens
acatttaactktttatttgga

SEQ ID NO: 13507 - DNA, 21 bp, Homo sapiens
ggtagccaaawgtttcttcag

SEQ ID NO: 13508 - DNA, 21 bp, Homo sapiens
catccccaacraggtccaggt

SEQ ID NO: 13509 - DNA, 21 bp, Homo sapiens
caaatttatcrtttcaaccaa

SEQ ID NO: 13510 - DNA, 21 bp, Homo sapiens
tgtatttactsgcatagcaag

SEQ ID NO: 13511 - DNA, 21 bp, Homo sapiens
ctcaatggaamtgtaaaatta

SEQ ID NO: 13512 - DNA, 21 bp, Homo sapiens
caaaatttaayaagctttact

SEQ ID NO: 13513 - DNA, 21 bp, Homo sapiens
gataaggaaayccaagttact

SEQ ID NO: 13514 - DNA, 21 bp, Homo sapiens
tatatagaaamttttgtctat

SEQ ID NO: 13515 - DNA, 21 bp, Homo sapiens
acaaaaaaaamccattagttt

SEQ ID NO: 13516 - DNA, 21 bp, Homo sapiens
agcatttacasacattctata

SEQ ID NO: 13517 - DNA, 21 bp, Homo sapiens
tgcagtgctgscagagggcat

SEQ ID NO: 13518 - DNA, 21 bp, Homo sapiens
tgctcgtgctrtgctatgcta

SEQ ID NO: 13519 - DNA, 21 bp, Homo sapiens
atcacataggwgtgcttagtg

SEQ ID NO: 13520 - DNA, 21 bp, Homo sapiens
cttgatagctratgtgtagag

SEQ ID NO: 13521 - DNA, 21 bp, Homo sapiens
cataccatgcraggggaccac

SEQ ID NO: 13522 - DNA, 21 bp, Homo sapiens
ggccaagaaakagcttgcatg

SEQ ID NO: 13523 - DNA, 21 bp, Homo sapiens
ctgtgagcacrtgcagcccag

SEQ ID NO: 13524 - DNA, 21 bp, Homo sapiens
ctccacatccmagatagaata

SEQ ID NO: 13525 - DNA, 21 bp, Homo sapiens
ttctgattgtyaaaaaaaacc

SEQ ID NO: 13526 - DNA, 21 bp, Homo sapiens
cctaggcaacytactgatgtc

SEQ ID NO: 13527 - DNA, 21 bp, Homo sapiens
gtattttaagrttgcttgaga

SEQ ID NO: 13528 - DNA, 21 bp, Homo sapiens
tcaacgaagamatgatctcag

SEQ ID NO: 13529 - DNA, 21 bp, Homo sapiens
atctaaaatcrtgtcctatag

SEQ ID NO: 13530 - DNA, 21 bp, Homo sapiens
aacctaagaarcctcttatta

SEQ ID NO: 13531 - DNA, 21 bp, Homo sapiens
caatgcaaaaygttaccagga

SEQ ID NO: 13532 - DNA, 21 bp, Homo sapiens
ttttctatgcsagagggaaga

SEQ ID NO: 13533 - DNA, 21 bp, Homo sapiens
cctagctattmacgccgaagg

SEQ ID NO: 13534 - DNA, 21 bp, Homo sapiens
atctgtgtgtrggccgaagaa

SEQ ID NO: 13535 - DNA, 21 bp, Homo sapiens
gctgtaacttygaccattgca

SEQ ID NO: 13536 - DNA, 21 bp, Homo sapiens
tacttaattckttttttctat

SEQ ID NO: 13537 - DNA, 21 bp, Homo sapiens
ctctgacctayatctcatgga

SEQ ID NO: 13538 - DNA, 21 bp, Homo sapiens
attctgagtasgctgttggta

SEQ ID NO: 13539 - DNA, 21 bp, Homo sapiens
aaatagagccyacgatttggg

SEQ ID NO: 13540 - DNA, 21 bp, Homo sapiens
tcagctgtgcrttcctgggtg

SEQ ID NO: 13541 - DNA, 21 bp, Homo sapiens
acgctcgcagrgtgatggcac

SEQ ID NO: 13542 - DNA, 21 bp, Homo sapiens
aggagaaaaaygcctaatggc

SEQ ID NO: 13543 - DNA, 21 bp, Homo sapiens
aagatgaaaamccttgatgtg

SEQ ID NO: 13544 - DNA, 21 bp, Homo sapiens
catctcggtamatggtatatc

SEQ ID NO: 13545 - DNA, 21 bp, Homo sapiens
atggtgtttayaatgcgaaag

SEQ ID NO: 13546 - DNA, 21 bp, Homo sapiens
ccattccaccsaaacatgctg

SEQ ID NO: 13547 - DNA, 21 bp, Homo sapiens
gtttgatccaytgcagaacaa

SEQ ID NO: 13548 - DNA, 21 bp, Homo sapiens
cacgcatgagstgaactccac

SEQ ID NO: 13549 - DNA, 21 bp, Homo sapiens
tacagaactgsaatgcagaat

SEQ ID NO: 13550 - DNA, 21 bp, Homo sapiens
gcatccatgcrtagctgtgtg

SEQ ID NO: 13551 - DNA, 21 bp, Homo sapiens
gtttcacaaaygtgaatgttc

SEQ ID NO: 13552 - DNA, 21 bp, Homo sapiens
aacaggtaatrtggtttcttt

SEQ ID NO: 13553 - DNA, 21 bp, Homo sapiens
cttgtcttcaraagcagcaca

SEQ ID NO: 13554 - DNA, 21 bp, Homo sapiens
tgtagtatccratgtggtcct

SEQ ID NO: 13555 - DNA, 21 bp, Homo sapiens
tgtggtcctgmaatgagtatc

SEQ ID NO: 13556 - DNA, 21 bp, Homo sapiens
ttctccaacayttgaatgtat

SEQ ID NO: 13557 - DNA, 21 bp, Homo sapiens
cttcactgcayaatgcaagag

SEQ ID NO: 13558 - DNA, 21 bp, Homo sapiens
cttcatctcakaaatcacaga

SEQ ID NO: 13559 - DNA, 21 bp, Homo sapiens
ggacagtcttrtacaaatcta

SEQ ID NO: 13560 - DNA, 21 bp, Homo sapiens
catggaaacgygaaggggcat

SEQ ID NO: 13561 - DNA, 21 bp, Homo sapiens
atgagtgtacrtacaggctga

SEQ ID NO: 13562 - DNA, 21 bp, Homo sapiens
ttttccataaytctttttgct

SEQ ID NO: 13563 - DNA, 21 bp, Homo sapiens
acactaacggsagcttaagtc

SEQ ID NO: 13564 - DNA, 21 bp, Homo sapiens
cagtgagcatrtagtttgctg

SEQ ID NO: 13565 - DNA, 21 bp, Homo sapiens
tttgatgtgcktatgcatgtt

SEQ ID NO: 13566 - DNA, 21 bp, Homo sapiens
gagctggttcrtgtgacagat

SEQ ID NO: 13567 - DNA, 21 bp, Homo sapiens
cagataaaaayggacatgccc

SEQ ID NO: 13568 - DNA, 21 bp, Homo sapiens
ggttactgttwatagaccaca

SEQ ID NO: 13569 - DNA, 21 bp, Homo sapiens
gtttcactagrtagggccaat

SEQ ID NO: 13570 - DNA, 21 bp, Homo sapiens
actcttttagraagtaggagg

SEQ ID NO: 13571 - DNA, 21 bp, Homo sapiens
atgctttgttwtctttggaag

SEQ ID NO: 13572 - DNA, 21 bp, Homo sapiens
gatgacacagrctctaggcaa

SEQ ID NO: 13573 - DNA, 21 bp, Homo sapiens
caagggaagayagtcattaac

SEQ ID NO: 13574 - DNA, 21 bp, Homo sapiens
ctagagaccargaccttttaa

SEQ ID NO: 13575 - DNA, 21 bp, Homo sapiens
gactaaacctrtggttctttt

SEQ ID NO: 13576 - DNA, 21 bp, Homo sapiens
tgaaagagacmtgggggatgc

SEQ ID NO: 13577 - DNA, 21 bp, Homo sapiens
atcgagtaatyggtgtacata

SEQ ID NO: 13578 - DNA, 21 bp, Homo sapiens
tttggtgacasactatcaaaa

SEQ ID NO: 13579 - DNA, 21 bp, Homo sapiens
agctgcacgtrtggacccagt

SEQ ID NO: 13580 - DNA, 21 bp, Homo sapiens
ttataaccacwgttttctatg

SEQ ID NO: 13581 - DNA, 21 bp, Homo sapiens
aaacatggtakagtagaaatt

SEQ ID NO: 13582 - DNA, 21 bp, Homo sapiens
taatagggcaytaagcactgg

SEQ ID NO: 13583 - DNA, 21 bp, Homo sapiens
agatttggagyaggagttaca

SEQ ID NO: 13584 - DNA, 21 bp, Homo sapiens
aacactttttwaaaaatccag

SEQ ID NO: 13585 - DNA, 21 bp, Homo sapiens
tcatgttgttrattgaataaa

SEQ ID NO: 13586 - DNA, 21 bp, Homo sapiens
ttttttaaagycttgcaaccc

SEQ ID NO: 13587 - DNA, 21 bp, Homo sapiens
tagcaattttycccttcatta

SEQ ID NO: 13588 - DNA, 21 bp, Homo sapiens
atttatccttygttagagtaa

SEQ ID NO: 13589 - DNA, 21 bp, Homo sapiens
cccggaatttsaagctcctta

SEQ ID NO: 13590 - DNA, 21 bp, Homo sapiens
aatgcccactrgatttgaagg

SEQ ID NO: 13591 - DNA, 21 bp, Homo sapiens
tgcccttaaaygcgtgaaaga

SEQ ID NO: 13592 - DNA, 21 bp, Homo sapiens
ttgtactcttyggatggactt

SEQ ID NO: 13593 - DNA, 21 bp, Homo sapiens
aatcagtgaargaggtaggaa

SEQ ID NO: 13594 - DNA, 21 bp, Homo sapiens
gaagcacctayggcatctgtt

SEQ ID NO: 13595 - DNA, 21 bp, Homo sapiens
tgaaaaagtgytccttctagt

SEQ ID NO: 13596 - DNA, 21 bp, Homo sapiens
tttgctagaaytcatttaatc

SEQ ID NO: 13597 - DNA, 21 bp, Homo sapiens
cctaaatttaygcttatctaa

SEQ ID NO: 13598 - DNA, 21 bp, Homo sapiens
tttgcaattcrtagcacatga

SEQ ID NO: 13599 - DNA, 21 bp, Homo sapiens
aaatatttacrgacatttaga

SEQ ID NO: 13600 - DNA, 21 bp, Homo sapiens
tgctattaaaytgtagtcaat

SEQ ID NO: 13601 - DNA, 21 bp, Homo sapiens
tttctcagctrtcaatcacct

SEQ ID NO: 13602 - DNA, 21 bp, Homo sapiens
atgtaaatttygaaatatgag

SEQ ID NO: 13603 - DNA, 21 bp, Homo sapiens
acatacttggratttaacaat

SEQ ID NO: 13604 - DNA, 21 bp, Homo sapiens
gaaaggatgawctaaaggaat

SEQ ID NO: 13605 - DNA, 21 bp, Homo sapiens
tactcttattygattattcaa

SEQ ID NO: 13606 - DNA, 21 bp, Homo sapiens
ttaaataaaaractaaagcac

SEQ ID NO: 13607 - DNA, 21 bp, Homo sapiens
ctttttttaaktttacaaagg

SEQ ID NO: 13608 - DNA, 21 bp, Homo sapiens
acaatttttcwagcttagaac

SEQ ID NO: 13609 - DNA, 21 bp, Homo sapiens
gttaccctcarcaaggtgcta

SEQ ID NO: 13610 - DNA, 21 bp, Homo sapiens
cacagcatcakaaatctattc

SEQ ID NO: 13611 - DNA, 21 bp, Homo sapiens
cacgctatatycaactggact

SEQ ID NO: 13612 - DNA, 21 bp, Homo sapiens
gatctgatgcrgtatataggc

SEQ ID NO: 13613 - DNA, 21 bp, Homo sapiens
cacaattgagsactccacagg

SEQ ID NO: 13614 - DNA, 21 bp, Homo sapiens
aagacaatgasttagaaaagt

SEQ ID NO: 13615 - DNA, 21 bp, Homo sapiens
tactccctaarcccataagaa

SEQ ID NO: 13616 - DNA, 21 bp, Homo sapiens
gcaaaaagttkagttctgagt

SEQ ID NO: 13617 - DNA, 21 bp, Homo sapiens
tgcctccttgsagtaattttc

SEQ ID NO: 13618 - DNA, 21 bp, Homo sapiens
atttgtgtaaytgatggaatg

SEQ ID NO: 13619 - DNA, 21 bp, Homo sapiens
tactatggagytgttactagg

SEQ ID NO: 13620 - DNA, 21 bp, Homo sapiens
aacatagtaaygccccactta

SEQ ID NO: 13621 - DNA, 21 bp, Homo sapiens
ctacaacttgwtttttgattc

SEQ ID NO: 13622 - DNA, 21 bp, Homo sapiens
aaccaataatrattaaactag

SEQ ID NO: 13623 - DNA, 21 bp, Homo sapiens
aactctctcgygagtgataac

SEQ ID NO: 13624 - DNA, 21 bp, Homo sapiens
ataatgtacarttatggctac

SEQ ID NO: 13625 - DNA, 21 bp, Homo sapiens
cttaacagtcygaactcaggc

SEQ ID NO: 13626 - DNA, 21 bp, Homo sapiens
tgagtcttgartggacgtatg

SEQ ID NO: 13627 - DNA, 21 bp, Homo sapiens
taaaaaatatyagttttgcaa

SEQ ID NO: 13628 - DNA, 21 bp, Homo sapiens
tgtgcactcartttctttagt

SEQ ID NO: 13629 - DNA, 21 bp, Homo sapiens
tcagatataascaactggccc

SEQ ID NO: 13630 - DNA, 21 bp, Homo sapiens
actataatttkcagtttataa

SEQ ID NO: 13631 - DNA, 21 bp, Homo sapiens
gctttgtgagrtactccaaat

SEQ ID NO: 13632 - DNA, 21 bp, Homo sapiens
aaagccctatmtttttaagcc

SEQ ID NO: 13633 - DNA, 21 bp, Homo sapiens
ttctcagaatktaaagggaaa

SEQ ID NO: 13634 - DNA, 21 bp, Homo sapiens
atttgctgcartgcgtcccaa

SEQ ID NO: 13635 - DNA, 21 bp, Homo sapiens
tgatatcgaayacaatgtgaa

SEQ ID NO: 13636 - DNA, 21 bp, Homo sapiens
atgtagtatgytgtatttcat

SEQ ID NO: 13637 - DNA, 21 bp, Homo sapiens
ttattgttgartgcctgctaa

SEQ ID NO: 13638 - DNA, 21 bp, Homo sapiens
gcattttgtascttaaaagag

SEQ ID NO: 13639 - DNA, 21 bp, Homo sapiens
tgagccatccygcgtgtcttg

SEQ ID NO: 13640 - DNA, 21 bp, Homo sapiens
gatcagacacmgattgaatag

SEQ ID NO: 13641 - DNA, 21 bp, Homo sapiens
aaaaaggtacrgagctttcac

SEQ ID NO: 13642 - DNA, 21 bp, Homo sapiens
gtgtgcaaacrtagttttatt

SEQ ID NO: 13643 - DNA, 21 bp, Homo sapiens
ataaccaaaaytgacctgtac

SEQ ID NO: 13644 - DNA, 21 bp, Homo sapiens
ctttaataaartgacatttac

SEQ ID NO: 13645 - DNA, 21 bp, Homo sapiens
gtctggtttcyttttgtccag

SEQ ID NO: 13646 - DNA, 21 bp, Homo sapiens
aggagagacayttaattgtgg

SEQ ID NO: 13647 - DNA, 21 bp, Homo sapiens
gtctttgctcmaatagcaatg

SEQ ID NO: 13648 - DNA, 21 bp, Homo sapiens
cacattatcasagaaacagtg

SEQ ID NO: 13649 - DNA, 21 bp, Homo sapiens
tgggagttgtrtagattcctg

SEQ ID NO: 13650 - DNA, 21 bp, Homo sapiens
aatttgttttrcaggcagcag

SEQ ID NO: 13651 - DNA, 21 bp, Homo sapiens
aagctaaatasgaaattatgg

SEQ ID NO: 13652 - DNA, 21 bp, Homo sapiens
aaaactagttrcccaacacat

SEQ ID NO: 13653 - DNA, 21 bp, Homo sapiens
gaaacattccrcaagtctttt

SEQ ID NO: 13654 - DNA, 21 bp, Homo sapiens
tatgccttttrtagctctaag

SEQ ID NO: 13655 - DNA, 21 bp, Homo sapiens
gcccacttcawtgattggtgc

SEQ ID NO: 13656 - DNA, 21 bp, Homo sapiens
agaaggcagaygaataacaca

SEQ ID NO: 13657 - DNA, 21 bp, Homo sapiens
aggtgagatgwtagagtggtt

SEQ ID NO: 13658 - DNA, 21 bp, Homo sapiens
aggaggtcttwaaaagtgcac

SEQ ID NO: 13659 - DNA, 21 bp, Homo sapiens
tactgccccartagtggaaaa

SEQ ID NO: 13660 - DNA, 21 bp, Homo sapiens
ctttgagaggstgaatgacat

SEQ ID NO: 13661 - DNA, 21 bp, Homo sapiens
tgcaccatccytatttttgtg

SEQ ID NO: 13662 - DNA, 21 bp, Homo sapiens
agcatgaataygggaatagaa

SEQ ID NO: 13663 - DNA, 21 bp, Homo sapiens
gaacctatacrtgcccacatc

SEQ ID NO: 13664 - DNA, 21 bp, Homo sapiens
gagtttgtacsagaatatccc

SEQ ID NO: 13665 - DNA, 21 bp, Homo sapiens
atgaaagaaayggaagccaag

SEQ ID NO: 13666 - DNA, 21 bp, Homo sapiens
ttcttaatgartgttctctat

SEQ ID NO: 13667 - DNA, 21 bp, Homo sapiens
cttaataaatrtattgctttt

SEQ ID NO: 13668 - DNA, 21 bp, Homo sapiens
agacaccgatrtatttatttg

SEQ ID NO: 13669 - DNA, 21 bp, Homo sapiens
ttattttgagrtgttttttct

SEQ ID NO: 13670 - DNA, 21 bp, Homo sapiens
aacacaaatayaattctgaaa

SEQ ID NO: 13671 - DNA, 21 bp, Homo sapiens
ttcaaggtttrttgatggaag

SEQ ID NO: 13672 - DNA, 21 bp, Homo sapiens
actgctcatgraaaccttgtg

SEQ ID NO: 13673 - DNA, 21 bp, Homo sapiens
gcatcaagtcrtgttttgctt

SEQ ID NO: 13674 - DNA, 21 bp, Homo sapiens
tttccatctgygcgcttgaac

SEQ ID NO: 13675 - DNA, 21 bp, Homo sapiens
aattgtggagyaaatgacctc

SEQ ID NO: 13676 - DNA, 21 bp, Homo sapiens
tatacatgctrttaactagca

SEQ ID NO: 13677 - DNA, 21 bp, Homo sapiens
taaagaaatamgcaattggaa

SEQ ID NO: 13678 - DNA, 21 bp, Homo sapiens
aaataatatastctcattcct

SEQ ID NO: 13679 - DNA, 21 bp, Homo sapiens
tagcaactctrtattggcaat

SEQ ID NO: 13680 - DNA, 21 bp, Homo sapiens
aaacagagctrtaatttctgt

SEQ ID NO: 13681 - DNA, 21 bp, Homo sapiens
catagagatayaattgatcta

SEQ ID NO: 13682 - DNA, 21 bp, Homo sapiens
aaaatcatgarcccaataatt

SEQ ID NO: 13683 - DNA, 21 bp, Homo sapiens
agccatgtgcyacagatcaaa

SEQ ID NO: 13684 - DNA, 21 bp, Homo sapiens
ttgattttctrcccactaggg

SEQ ID NO: 13685 - DNA, 21 bp, Homo sapiens
ggaatgtcccmacattttgag

SEQ ID NO: 13686 - DNA, 21 bp, Homo sapiens
gtgtttgcctygcacactgtt

SEQ ID NO: 13687 - DNA, 21 bp, Homo sapiens
atcatccaggrttggaatgga

SEQ ID NO: 13688 - DNA, 21 bp, Homo sapiens
ggttattctgrgactttcatc

SEQ ID NO: 13689 - DNA, 21 bp, Homo sapiens
atatttctccrcatgttcagg

SEQ ID NO: 13690 - DNA, 21 bp, Homo sapiens
gatgttagaargattagaaat

SEQ ID NO: 13691 - DNA, 21 bp, Homo sapiens
actctggcttrccaccattta

SEQ ID NO: 13692 - DNA, 21 bp, Homo sapiens
tagtataaagyatatgttcaa

SEQ ID NO: 13693 - DNA, 21 bp, Homo sapiens
cctcttacctrgtcatagttt

SEQ ID NO: 13694 - DNA, 21 bp, Homo sapiens
atcctccttcrctgataactc

SEQ ID NO: 13695 - DNA, 21 bp, Homo sapiens
caaaaaagggmtttgaggctg

SEQ ID NO: 13696 - DNA, 21 bp, Homo sapiens
tttctggcaamttagaggagc

SEQ ID NO: 13697 - DNA, 21 bp, Homo sapiens
gataaaaaacsaaaaagcaaa

SEQ ID NO: 13698 - DNA, 21 bp, Homo sapiens
atattaacacragagtatgta

SEQ ID NO: 13699 - DNA, 21 bp, Homo sapiens
aatttgtgtarttggtaatag

SEQ ID NO: 13700 - DNA, 21 bp, Homo sapiens
cttcaaattasggtatcagct

SEQ ID NO: 13701 - DNA, 21 bp, Homo sapiens
gaggggatgaycaaagaagtt

SEQ ID NO: 13702 - DNA, 21 bp, Homo sapiens
ggaataaatayaacgataaag

SEQ ID NO: 13703 - DNA, 21 bp, Homo sapiens
atctggtttgyaaccatgtac

SEQ ID NO: 13704 - DNA, 21 bp, Homo sapiens
tagaaggacasggtaaggaga

SEQ ID NO: 13705 - DNA, 21 bp, Homo sapiens
gtaaaattccrtaggtaaaaa

SEQ ID NO: 13706 - DNA, 21 bp, Homo sapiens
ctcagaggaasaaatgtggat

SEQ ID NO: 13707 - DNA, 21 bp, Homo sapiens
caaaatatccrtaaacttcac

SEQ ID NO: 13708 - DNA, 21 bp, Homo sapiens
ttttataattstcagttatgt

SEQ ID NO: 13709 - DNA, 21 bp, Homo sapiens
gttaaaacctraaactattga

SEQ ID NO: 13710 - DNA, 21 bp, Homo sapiens
aagaagcaatyatttaaatcc

SEQ ID NO: 13711 - DNA, 21 bp, Homo sapiens
tagtgaaagtrtttgatttaa

SEQ ID NO: 13712 - DNA, 21 bp, Homo sapiens
cttggctttcyatgacattca

SEQ ID NO: 13713 - DNA, 21 bp, Homo sapiens
gcaataaaagrggagttaggt

SEQ ID NO: 13714 - DNA, 21 bp, Homo sapiens
ttctagacctrcctttaatcc

SEQ ID NO: 13715 - DNA, 21 bp, Homo sapiens
ttaccacttcygtaagtctat

SEQ ID NO: 13716 - DNA, 21 bp, Homo sapiens
gccaattgtcrtcaaaagtca

SEQ ID NO: 13717 - DNA, 21 bp, Homo sapiens
cattctcccaygtcacgctgt

SEQ ID NO: 13718 - DNA, 21 bp, Homo sapiens
ccacctgcctmacccatcact

SEQ ID NO: 13719 - DNA, 21 bp, Homo sapiens
accagaacaayttagattatt

SEQ ID NO: 13720 - DNA, 21 bp, Homo sapiens
ttagagattayagttggttgc

SEQ ID NO: 13721 - DNA, 21 bp, Homo sapiens
tctatcttctrtataaatgag

SEQ ID NO: 13722 - DNA, 21 bp, Homo sapiens
ttttaaatagracgtgtttaa

SEQ ID NO: 13723 - DNA, 21 bp, Homo sapiens
cacaatttccmtctcatttgc

SEQ ID NO: 13724 - DNA, 21 bp, Homo sapiens
atgcaagctcrgaactgaaaa

SEQ ID NO: 13725 - DNA, 21 bp, Homo sapiens
atttgaaactmtttctcttta

SEQ ID NO: 13726 - DNA, 21 bp, Homo sapiens
agctgtcacayagttctcttc

SEQ ID NO: 13727 - DNA, 21 bp, Homo sapiens
gtatgtgcatwaaaagatgaa

SEQ ID NO: 13728 - DNA, 21 bp, Homo sapiens
acagaattagygcatggttga

SEQ ID NO: 13729 - DNA, 21 bp, Homo sapiens
gatttattatmcacaaagtga

SEQ ID NO: 13730 - DNA, 21 bp, Homo sapiens
aaaagtcaackcactgttcga

SEQ ID NO: 13731 - DNA, 21 bp, Homo sapiens
cttacctttcyctaactacca

SEQ ID NO: 13732 - DNA, 21 bp, Homo sapiens
cacaaattatrttattacatg

SEQ ID NO: 13733 - DNA, 21 bp, Homo sapiens
ttagggcttcmagacacacac

SEQ ID NO: 13734 - DNA, 21 bp, Homo sapiens
aaggttgacakgttaatcaca

SEQ ID NO: 13735 - DNA, 21 bp, Homo sapiens
gtattgctatrcttactacca

SEQ ID NO: 13736 - DNA, 21 bp, Homo sapiens
aattgcaatasaatatggtaa

SEQ ID NO: 13737 - DNA, 21 bp, Homo sapiens
cactgagcccrtctggtaggg

SEQ ID NO: 13738 - DNA, 21 bp, Homo sapiens
gtttcccagcrtatgaaaagc

SEQ ID NO: 13739 - DNA, 21 bp, Homo sapiens
cagtcttctcsttctacagat

SEQ ID NO: 13740 - DNA, 21 bp, Homo sapiens
ggtatcaaggktggctgacat

SEQ ID NO: 13741 - DNA, 21 bp, Homo sapiens
tttatctctcyttcaaattaa

SEQ ID NO: 13742 - DNA, 21 bp, Homo sapiens
tctgatgcacrttgcagttag

SEQ ID NO: 13743 - DNA, 21 bp, Homo sapiens
ggaaggcaccwcttagaatgt

SEQ ID NO: 13744 - DNA, 21 bp, Homo sapiens
ttgttctttcrtctttgatca

SEQ ID NO: 13745 - DNA, 21 bp, Homo sapiens
tctatggagayctaccgggat

SEQ ID NO: 13746 - DNA, 21 bp, Homo sapiens
ggactgaaggrtaaggggaga

SEQ ID NO: 13747 - DNA, 21 bp, Homo sapiens
tggagtcagtyagcgtgctcc

SEQ ID NO: 13748 - DNA, 21 bp, Homo sapiens
atcagtgcttsaagcttagcg

SEQ ID NO: 13749 - DNA, 21 bp, Homo sapiens
tcttctcaccrgccggtttgg

SEQ ID NO: 13750 - DNA, 21 bp, Homo sapiens
gaagacggtgrtgctgggtac

SEQ ID NO: 13751 - DNA, 21 bp, Homo sapiens
tacaagccccygcctccatta

SEQ ID NO: 13752 - DNA, 21 bp, Homo sapiens
ggttaagggaygactgtgttg

SEQ ID NO: 13753 - DNA, 21 bp, Homo sapiens
tgattgcaccyctcctgtggc

SEQ ID NO: 13754 - DNA, 21 bp, Homo sapiens
gcgcgctcacrtatgccagac

SEQ ID NO: 13755 - DNA, 21 bp, Homo sapiens
aggtcacatayaagctcagtt

SEQ ID NO: 13756 - DNA, 21 bp, Homo sapiens
cttttctagcrcctcccaggt

SEQ ID NO: 13757 - DNA, 21 bp, Homo sapiens
taggaaatcgrggatttgatg

SEQ ID NO: 13758 - DNA, 21 bp, Homo sapiens
gtaaaactgamgtcccagtca

SEQ ID NO: 13759 - DNA, 21 bp, Homo sapiens
tcctgcacccrattgaaatgt

SEQ ID NO: 13760 - DNA, 21 bp, Homo sapiens
gtccgcactcwggaatagcat

SEQ ID NO: 13761 - DNA, 21 bp, Homo sapiens
ctccagagctyggagcctcat

SEQ ID NO: 13762 - DNA, 21 bp, Homo sapiens
taataaatcaygtacaggact

SEQ ID NO: 13763 - DNA, 21 bp, Homo sapiens
accagcatagytcactgtgtt

SEQ ID NO: 13764 - DNA, 21 bp, Homo sapiens
acaaaaacacwgccaaggacc

SEQ ID NO: 13765 - DNA, 21 bp, Homo sapiens
cagtgagattygtggcaccat

SEQ ID NO: 13766 - DNA, 21 bp, Homo sapiens
aacaatcacakagtttactca

SEQ ID NO: 13767 - DNA, 21 bp, Homo sapiens
caactctgccrgtctcttgcc

SEQ ID NO: 13768 - DNA, 21 bp, Homo sapiens
tcgcctcccasggcggccttg

SEQ ID NO: 13769 - DNA, 21 bp, Homo sapiens
aggggaaaaayacaccacccc

SEQ ID NO: 13770 - DNA, 21 bp, Homo sapiens
ctgctgggagmagggaggccc

SEQ ID NO: 13771 - DNA, 21 bp, Homo sapiens
acgtttacacrtgtccttgtg

SEQ ID NO: 13772 - DNA, 21 bp, Homo sapiens
agagcaggccrggactccgct

SEQ ID NO: 13773 - DNA, 21 bp, Homo sapiens
acggcttccgrtggtaaaaaa

SEQ ID NO: 13774 - DNA, 21 bp, Homo sapiens
gcatggctccygggaggcccc

SEQ ID NO: 13775 - DNA, 21 bp, Homo sapiens
cacatgagtgyacagcccact

SEQ ID NO: 13776 - DNA, 21 bp, Homo sapiens
tcaacactgcygtgttgctgc

SEQ ID NO: 13777 - DNA, 21 bp, Homo sapiens
cagctgagacrgggcaaaaaa

SEQ ID NO: 13778 - DNA, 21 bp, Homo sapiens
ctggtcaactrcaagaaggaa

SEQ ID NO: 13779 - DNA, 21 bp, Homo sapiens
gttcctttccrtgttagttcc

SEQ ID NO: 13780 - DNA, 21 bp, Homo sapiens
caggcgctccstctgtctgca

SEQ ID NO: 13781 - DNA, 21 bp, Homo sapiens
agactcaaatrtgaaagacaa

SEQ ID NO: 13782 - DNA, 21 bp, Homo sapiens
aaaatagaaamcattggagaa

SEQ ID NO: 13783 - DNA, 21 bp, Homo sapiens
aaaatgccccrgccacagaat

SEQ ID NO: 13784 - DNA, 21 bp, Homo sapiens
caggggaataygcttcttttt

SEQ ID NO: 13785 - DNA, 21 bp, Homo sapiens
gtgcctgatargttgctaaga

SEQ ID NO: 13786 - DNA, 21 bp, Homo sapiens
attttgtggtsgttgaacttt

SEQ ID NO: 13787 - DNA, 21 bp, Homo sapiens
ggattcttagsggataaaagg

SEQ ID NO: 13788 - DNA, 21 bp, Homo sapiens
atcatcccaarttttagcata

SEQ ID NO: 13789 - DNA, 21 bp, Homo sapiens
ttaaaaagatrataccactat

SEQ ID NO: 13790 - DNA, 21 bp, Homo sapiens
gatgagacatkgaacaaagtc

SEQ ID NO: 13791 - DNA, 21 bp, Homo sapiens
gaagggaggaragaccagtgg

SEQ ID NO: 13792 - DNA, 21 bp, Homo sapiens
aagccagatayaaggaaaagt

SEQ ID NO: 13793 - DNA, 21 bp, Homo sapiens
acagtctctcygtcaaacaca

SEQ ID NO: 13794 - DNA, 21 bp, Homo sapiens
ccttggtaackgccttctcac

SEQ ID NO: 13795 - DNA, 21 bp, Homo sapiens
tagtgtatcamggtaggttca

SEQ ID NO: 13796 - DNA, 21 bp, Homo sapiens
agccaggattyggaaagtggc

SEQ ID NO: 13797 - DNA, 21 bp, Homo sapiens
ttgaatgaaaygaccaaatca

SEQ ID NO: 13798 - DNA, 21 bp, Homo sapiens
tagtgacagayctcaatgaca

SEQ ID NO: 13799 - DNA, 21 bp, Homo sapiens
aataagatgcytctaaaagat

SEQ ID NO: 13800 - DNA, 21 bp, Homo sapiens
agattagaaayagaaaagact

SEQ ID NO: 13801 - DNA, 21 bp, Homo sapiens
taccaataacrttctggtggg

SEQ ID NO: 13802 - DNA, 21 bp, Homo sapiens
gcacacaaaaygcatctgtgt

SEQ ID NO: 13803 - DNA, 21 bp, Homo sapiens
ttagttaaacyggaagcctct

SEQ ID NO: 13804 - DNA, 21 bp, Homo sapiens
tccagaaagcmgtcaagttag

SEQ ID NO: 13805 - DNA, 21 bp, Homo sapiens
gtcatggagcrctgattgagt

SEQ ID NO: 13806 - DNA, 21 bp, Homo sapiens
cagttgccatygttagaaaac

SEQ ID NO: 13807 - DNA, 21 bp, Homo sapiens
tgctgcttccrtgtgctcagg

SEQ ID NO: 13808 - DNA, 21 bp, Homo sapiens
ccttgtcttaygtatggccag

SEQ ID NO: 13809 - DNA, 21 bp, Homo sapiens
tgtattccccrcatgtggcac

SEQ ID NO: 13810 - DNA, 21 bp, Homo sapiens
gatcttgtagrctgctaaaca

SEQ ID NO: 13811 - DNA, 21 bp, Homo sapiens
gaaaactggartatgtacatg

SEQ ID NO: 13812 - DNA, 21 bp, Homo sapiens
attatggccaygtttaatttg

SEQ ID NO: 13813 - DNA, 21 bp, Homo sapiens
atggaatgctytccagaaata

SEQ ID NO: 13814 - DNA, 21 bp, Homo sapiens
agacaaagttmttaattacct

SEQ ID NO: 13815 - DNA, 21 bp, Homo sapiens
cagatgagagkctactacagt

SEQ ID NO: 13816 - DNA, 21 bp, Homo sapiens
agcaaaaattsatgcgtttgc

SEQ ID NO: 13817 - DNA, 21 bp, Homo sapiens
cccaagagggrccactactct

SEQ ID NO: 13818 - DNA, 21 bp, Homo sapiens
cctaaatattsgtctgtcacc

SEQ ID NO: 13819 - DNA, 21 bp, Homo sapiens
tattattaccwctactatcat

SEQ ID NO: 13820 - DNA, 21 bp, Homo sapiens
taaagccaatrtcagtagaag

SEQ ID NO: 13821 - DNA, 21 bp, Homo sapiens
tttccttttgwgttcttggca

SEQ ID NO: 13822 - DNA, 21 bp, Homo sapiens
tctagagagtmaccaaatacc

SEQ ID NO: 13823 - DNA, 21 bp, Homo sapiens
gtaagctgtcraaattatcac

SEQ ID NO: 13824 - DNA, 21 bp, Homo sapiens
tttcctatgckgttttggcaa

SEQ ID NO: 13825 - DNA, 21 bp, Homo sapiens
tctcttagacmttgtaaagaa

SEQ ID NO: 13826 - DNA, 21 bp, Homo sapiens
gccctaggctktctataggtt

SEQ ID NO: 13827 - DNA, 21 bp, Homo sapiens
tttaaatgctsttgctactaa

SEQ ID NO: 13828 - DNA, 21 bp, Homo sapiens
tttgatgcacrtgttttccag

SEQ ID NO: 13829 - DNA, 21 bp, Homo sapiens
atggaagagcrtgcctttgag

SEQ ID NO: 13830 - DNA, 21 bp, Homo sapiens
ttgccttttastagcatttgt

SEQ ID NO: 13831 - DNA, 21 bp, Homo sapiens
agtttctgacrtgaaaacctc

SEQ ID NO: 13832 - DNA, 21 bp, Homo sapiens
gcatcaagctmaatatagaag

SEQ ID NO: 13833 - DNA, 21 bp, Homo sapiens
ggagagtatgwtaccaacgtg

SEQ ID NO: 13834 - DNA, 21 bp, Homo sapiens
tgagttttcaktggtgggcag

SEQ ID NO: 13835 - DNA, 21 bp, Homo sapiens
cccatgccaamatcaagaagt

SEQ ID NO: 13836 - DNA, 21 bp, Homo sapiens
cacttactctyaggtgctcta

SEQ ID NO: 13837 - DNA, 21 bp, Homo sapiens
tcaaaaagtargataggttac

SEQ ID NO: 13838 - DNA, 21 bp, Homo sapiens
tgggattgtgwtaagtcctgt

SEQ ID NO: 13839 - DNA, 21 bp, Homo sapiens
ttgagaaataycctacattcc

SEQ ID NO: 13840 - DNA, 21 bp, Homo sapiens
catggacaaamatgaggtaaa

SEQ ID NO: 13841 - DNA, 21 bp, Homo sapiens
agaataatcarcctgggcatc

SEQ ID NO: 13842 - DNA, 21 bp, Homo sapiens
aaggagtttayattgtagtgg

SEQ ID NO: 13843 - DNA, 21 bp, Homo sapiens
ttcctctcctrtctttctcac

SEQ ID NO: 13844 - DNA, 21 bp, Homo sapiens
atatctgagargtgaaggagc

SEQ ID NO: 13845 - DNA, 21 bp, Homo sapiens
tgagactcctstaaaaaaaat

SEQ ID NO: 13846 - DNA, 21 bp, Homo sapiens
tttaatttttwgccctggagc

SEQ ID NO: 13847 - DNA, 21 bp, Homo sapiens
ctttgtccacrtgggtttctg

SEQ ID NO: 13848 - DNA, 21 bp, Homo sapiens
ttgcagcctcygaggaaattt

SEQ ID NO: 13849 - DNA, 21 bp, Homo sapiens
ccaaccagagygctctccact

SEQ ID NO: 13850 - DNA, 21 bp, Homo sapiens
tttgtgcagcyggcccatctg

SEQ ID NO: 13851 - DNA, 21 bp, Homo sapiens
tcaaaaatctkccattgttgt

SEQ ID NO: 13852 - DNA, 21 bp, Homo sapiens
agcataaaagmgagtgcatga

SEQ ID NO: 13853 - DNA, 21 bp, Homo sapiens
ggttctcagcrtaaatgttga

SEQ ID NO: 13854 - DNA, 21 bp, Homo sapiens
atgcacacacragtagcatga

SEQ ID NO: 13855 - DNA, 21 bp, Homo sapiens
gcctaatttakttgaaatgca

SEQ ID NO: 13856 - DNA, 21 bp, Homo sapiens
acagttttatygcctgtgcca

SEQ ID NO: 13857 - DNA, 21 bp, Homo sapiens
gtcactcaatwtcctaatatt

SEQ ID NO: 13858 - DNA, 21 bp, Homo sapiens
ctggtggaggkcccaaattct

SEQ ID NO: 13859 - DNA, 21 bp, Homo sapiens
gcattataacrtcagtattgt

SEQ ID NO: 13860 - DNA, 21 bp, Homo sapiens
caagaattgcrtacataaaaa

SEQ ID NO: 13861 - DNA, 21 bp, Homo sapiens
ttctcatgggmatcacaaata

SEQ ID NO: 13862 - DNA, 21 bp, Homo sapiens
gaatattagawacatacaaga

SEQ ID NO: 13863 - DNA, 21 bp, Homo sapiens
gaagatcagcraggaaggcac

SEQ ID NO: 13864 - DNA, 21 bp, Homo sapiens
cagttttctgytccatagagg

SEQ ID NO: 13865 - DNA, 21 bp, Homo sapiens
tgagatggacrtaattagcgg

SEQ ID NO: 13866 - DNA, 21 bp, Homo sapiens
caggagcttcrtggtcatccc

SEQ ID NO: 13867 - DNA, 21 bp, Homo sapiens
gtactattttygagcttctaa

SEQ ID NO: 13868 - DNA, 21 bp, Homo sapiens
gaaagcagaamctgagcaagg

SEQ ID NO: 13869 - DNA, 21 bp, Homo sapiens
gttttccattrgaaggtcctt

SEQ ID NO: 13870 - DNA, 21 bp, Homo sapiens
agcctacagcyatatttaaat

SEQ ID NO: 13871 - DNA, 21 bp, Homo sapiens
aaagccttcawtaacaagagt

SEQ ID NO: 13872 - DNA, 21 bp, Homo sapiens
aagaacaagcracaccgaagg

SEQ ID NO: 13873 - DNA, 21 bp, Homo sapiens
gacacagagamaagctttgtg

SEQ ID NO: 13874 - DNA, 21 bp, Homo sapiens
aagcacagagmaacctggtgc

SEQ ID NO: 13875 - DNA, 21 bp, Homo sapiens
aagtagcaatrcccatcttac

SEQ ID NO: 13876 - DNA, 21 bp, Homo sapiens
ggcccatctgwtcaagagctg

SEQ ID NO: 13877 - DNA, 21 bp, Homo sapiens
tgtgaaatggkttgtaagtca

SEQ ID NO: 13878 - DNA, 21 bp, Homo sapiens
tgtgatccacstatcttcctc

SEQ ID NO: 13879 - DNA, 21 bp, Homo sapiens
ggctgatttcrtgattgccaa

SEQ ID NO: 13880 - DNA, 21 bp, Homo sapiens
tcagctttaayaggctctacc

SEQ ID NO: 13881 - DNA, 21 bp, Homo sapiens
ttagatttaayctttgaactt

SEQ ID NO: 13882 - DNA, 21 bp, Homo sapiens
cccacttcctstccagttcca

SEQ ID NO: 13883 - DNA, 21 bp, Homo sapiens
attaaaccatrgtatttggat

SEQ ID NO: 13884 - DNA, 21 bp, Homo sapiens
tgctttgcctyctgtgggcgt

SEQ ID NO: 13885 - DNA, 21 bp, Homo sapiens
tgaagttgaascttcagtctt

SEQ ID NO: 13886 - DNA, 21 bp, Homo sapiens
cagcattctcygtaccccttc

SEQ ID NO: 13887 - DNA, 21 bp, Homo sapiens
tggcaagaaaraggtgaatta

SEQ ID NO: 13888 - DNA, 21 bp, Homo sapiens
ggatgcctctrcccaggaggc

SEQ ID NO: 13889 - DNA, 21 bp, Homo sapiens
gagtacctatytattacagtt

SEQ ID NO: 13890 - DNA, 21 bp, Homo sapiens
atgatatcacratctgcttac

SEQ ID NO: 13891 - DNA, 21 bp, Homo sapiens
cagaagaaatwtcagccataa

SEQ ID NO: 13892 - DNA, 21 bp, Homo sapiens
cctagcccgaygaatattgga

SEQ ID NO: 13893 - DNA, 21 bp, Homo sapiens
gcagtggtccygtcttcagca

SEQ ID NO: 13894 - DNA, 21 bp, Homo sapiens
tctaagtgagrtctcccttgc

SEQ ID NO: 13895 - DNA, 21 bp, Homo sapiens
aaaaacagccrttaacccttc

SEQ ID NO: 13896 - DNA, 21 bp, Homo sapiens
tacccttgcayaagagtggaa

SEQ ID NO: 13897 - DNA, 21 bp, Homo sapiens
gagagactgtycttgctctag

SEQ ID NO: 13898 - DNA, 21 bp, Homo sapiens
gagagactgtycttgctctag

SEQ ID NO: 13899 - DNA, 21 bp, Homo sapiens
agtctgaagcrtcaagtttac

SEQ ID NO: 13900 - DNA, 21 bp, Homo sapiens
agtctgaagcrtcaagtttac

SEQ ID NO: 13901 - DNA, 21 bp, Homo sapiens
actagactgtyataatggtgt

SEQ ID NO: 13902 - DNA, 21 bp, Homo sapiens
actagactgtyataatggtgt

SEQ ID NO: 13903 - DNA, 21 bp, Homo sapiens
accaaaacaaygatagaaacc

SEQ ID NO: 13904 - DNA, 21 bp, Homo sapiens
accaaaacaaygatagaaacc

SEQ ID NO: 13905 - DNA, 21 bp, Homo sapiens
cttcctttctscatcttcccc

SEQ ID NO: 13906 - DNA, 21 bp, Homo sapiens
gagagaccaayttaaggctca

SEQ ID NO: 13907 - DNA, 21 bp, Homo sapiens
atatgtaatarcatgaatttg

SEQ ID NO: 13908 - DNA, 21 bp, Homo sapiens
tatttgtaaargagaggaggt

SEQ ID NO: 13909 - DNA, 21 bp, Homo sapiens
tatgtaaactsaaaggattag

SEQ ID NO: 13910 - DNA, 21 bp, Homo sapiens
attaaaacatrcaaaattttt

SEQ ID NO: 13911 - DNA, 21 bp, Homo sapiens
acctaaatacmcaagtgttac

SEQ ID NO: 13912 - DNA, 21 bp, Homo sapiens
cacaacacaasactgttctat

SEQ ID NO: 13913 - DNA, 21 bp, Homo sapiens
tctcaaatcarccacatcggg

SEQ ID NO: 13914 - DNA, 21 bp, Homo sapiens
taccacctacmgctttttata

SEQ ID NO: 13915 - DNA, 21 bp, Homo sapiens
gttagcaaaayagaaaagaga

SEQ ID NO: 13916 - DNA, 21 bp, Homo sapiens
gtaacagattygctatcttgt

SEQ ID NO: 13917 - DNA, 21 bp, Homo sapiens
tatcctaactstaggctgcaa

SEQ ID NO: 13918 - DNA, 21 bp, Homo sapiens
cttttaatacrtacacacact

SEQ ID NO: 13919 - DNA, 21 bp, Homo sapiens
attacaatatmggcgacaaca

SEQ ID NO: 13920 - DNA, 21 bp, Homo sapiens
ttacccttccyttaccacaat

SEQ ID NO: 13921 - DNA, 21 bp, Homo sapiens
actagggctawcctgagcaaa

SEQ ID NO: 13922 - DNA, 21 bp, Homo sapiens
tagcaacatcrtgccaatgct

SEQ ID NO: 13923 - DNA, 21 bp, Homo sapiens
cattcactggytcaacttggt

SEQ ID NO: 13924 - DNA, 21 bp, Homo sapiens
atgtgactatktccaaacact

SEQ ID NO: 13925 - DNA, 21 bp, Homo sapiens
gcttcattcarattatcctca

SEQ ID NO: 13926 - DNA, 21 bp, Homo sapiens
taggtgggcasttggagtaca

SEQ ID NO: 13927 - DNA, 21 bp, Homo sapiens
gtcagacttaygggctaagat

SEQ ID NO: 13928 - DNA, 21 bp, Homo sapiens
tgcagatgcawtattaaaaca

SEQ ID NO: 13929 - DNA, 21 bp, Homo sapiens
ggaaacacttyccaagccttt

SEQ ID NO: 13930 - DNA, 21 bp, Homo sapiens
aggtattatgrgcaaatagat

SEQ ID NO: 13931 - DNA, 21 bp, Homo sapiens
cctccttatcrtaacctcatg

SEQ ID NO: 13932 - DNA, 21 bp, Homo sapiens
catgttttgayaacagaatgt

SEQ ID NO: 13933 - DNA, 21 bp, Homo sapiens
tgacctttagraagctcatga

SEQ ID NO: 13934 - DNA, 21 bp, Homo sapiens
agagttcttaytaaaagcaat

SEQ ID NO: 13935 - DNA, 21 bp, Homo sapiens
acacagaaaayatgtgcaaca

SEQ ID NO: 13936 - DNA, 21 bp, Homo sapiens
taagctctaascccaagcggc

SEQ ID NO: 13937 - DNA, 21 bp, Homo sapiens
gacctctttaygtggatcagt

SEQ ID NO: 13938 - DNA, 21 bp, Homo sapiens
tccatagctaytgaaatgttt

SEQ ID NO: 13939 - DNA, 21 bp, Homo sapiens
cttgctgaaaygagatgtggc

SEQ ID NO: 13940 - DNA, 21 bp, Homo sapiens
gaagttttagmaagtcagctg

SEQ ID NO: 13941 - DNA, 21 bp, Homo sapiens
agtcatagttkaaagaccatt

SEQ ID NO: 13942 - DNA, 21 bp, Homo sapiens
tgaagttaaaygggctctctt

SEQ ID NO: 13943 - DNA, 21 bp, Homo sapiens
ggcttgccaayagaggacaat

SEQ ID NO: 13944 - DNA, 21 bp, Homo sapiens
tttatacctascatagcacgt

SEQ ID NO: 13945 - DNA, 21 bp, Homo sapiens
gtaaccctcgycctggatctt

SEQ ID NO: 13946 - DNA, 21 bp, Homo sapiens
aaagatttttytctcaaactt

SEQ ID NO: 13947 - DNA, 21 bp, Homo sapiens
taaagtttccktgtaaaccca

SEQ ID NO: 13948 - DNA, 21 bp, Homo sapiens
ataaccaaatkaagtcagtat

SEQ ID NO: 13949 - DNA, 21 bp, Homo sapiens
ggcatctttcytactggacat

SEQ ID NO: 13950 - DNA, 21 bp, Homo sapiens
cactttttaamaacccattct

SEQ ID NO: 13951 - DNA, 21 bp, Homo sapiens
caccatggctkggaagtagta

SEQ ID NO: 13952 - DNA, 21 bp, Homo sapiens
ttggctgttgrtttaatattt

SEQ ID NO: 13953 - DNA, 21 bp, Homo sapiens
gagatccagasccttatttcc

SEQ ID NO: 13954 - DNA, 21 bp, Homo sapiens
ctagatcctgrgaattattca

SEQ ID NO: 13955 - DNA, 21 bp, Homo sapiens
tccatgtagcwtttttggatt

SEQ ID NO: 13956 - DNA, 21 bp, Homo sapiens
tctcaattctygttcttcctc

SEQ ID NO: 13957 - DNA, 21 bp, Homo sapiens
tgcataatctrtagtggtttt

SEQ ID NO: 13958 - DNA, 21 bp, Homo sapiens
ttagtggatargctcatatgc

SEQ ID NO: 13959 - DNA, 21 bp, Homo sapiens
gaaaagcaagwtcaatcaaca

SEQ ID NO: 13960 - DNA, 21 bp, Homo sapiens
tcgtaaacatygcccactttt

SEQ ID NO: 13961 - DNA, 21 bp, Homo sapiens
ttctttcagtyacataaaata

SEQ ID NO: 13962 - DNA, 21 bp, Homo sapiens
tgctttaatayagacaaagtg

SEQ ID NO: 13963 - DNA, 21 bp, Homo sapiens
tcaaaattatyatggttttta

SEQ ID NO: 13964 - DNA, 21 bp, Homo sapiens
atattcttccytaaagcactc

SEQ ID NO: 13965 - DNA, 21 bp, Homo sapiens
ctggtcaaagktattttcctg

SEQ ID NO: 13966 - DNA, 21 bp, Homo sapiens
tgtcgagggawtccaggtaag

SEQ ID NO: 13967 - DNA, 21 bp, Homo sapiens
aatatcaaagkctctatgtga

SEQ ID NO: 13968 - DNA, 21 bp, Homo sapiens
cactacccacrgactttataa

SEQ ID NO: 13969 - DNA, 21 bp, Homo sapiens
aacagaaatcmtgaaaacttt

SEQ ID NO: 13970 - DNA, 21 bp, Homo sapiens
gggacgttcartgaaggttga

SEQ ID NO: 13971 - DNA, 21 bp, Homo sapiens
tctgtcgctcrttaacgaaaa

SEQ ID NO: 13972 - DNA, 21 bp, Homo sapiens
aaatggttccyaagaaagaaa

SEQ ID NO: 13973 - DNA, 21 bp, Homo sapiens
acaaatagcakcagagttcac

SEQ ID NO: 13974 - DNA, 21 bp, Homo sapiens
gtgaggcaaamaatattttga

SEQ ID NO: 13975 - DNA, 21 bp, Homo sapiens
aggtaaagtgygctcctaata

SEQ ID NO: 13976 - DNA, 21 bp, Homo sapiens
cattaaaaatmtaacttcaaa

SEQ ID NO: 13977 - DNA, 21 bp, Homo sapiens
gagaaacatgyactatactca

SEQ ID NO: 13978 - DNA, 21 bp, Homo sapiens
tgtgtagaggrcaaacacaag

SEQ ID NO: 13979 - DNA, 21 bp, Homo sapiens
tataatcttgrttttgcaact

SEQ ID NO: 13980 - DNA, 21 bp, Homo sapiens
ataatccatamaaattacagt

SEQ ID NO: 13981 - DNA, 21 bp, Homo sapiens
atagtaatggyatacaataga

SEQ ID NO: 13982 - DNA, 21 bp, Homo sapiens
attcaatttasttttatttaa

SEQ ID NO: 13983 - DNA, 21 bp, Homo sapiens
ttgctcttccraaccttggct

SEQ ID NO: 13984 - DNA, 21 bp, Homo sapiens
accatattcaycttgctctct

SEQ ID NO: 13985 - DNA, 21 bp, Homo sapiens
aatcaggctgytaatgaagaa

SEQ ID NO: 13986 - DNA, 21 bp, Homo sapiens
attgaaggctytttagttttt

SEQ ID NO: 13987 - DNA, 21 bp, Homo sapiens
taaactctgamactcgttcta

SEQ ID NO: 13988 - DNA, 21 bp, Homo sapiens
catgctaagayttatctgtgg

SEQ ID NO: 13989 - DNA, 21 bp, Homo sapiens
aagataactayttctgcatgt

SEQ ID NO: 13990 - DNA, 21 bp, Homo sapiens
gctcaaaaccygcataaaaca

SEQ ID NO: 13991 - DNA, 21 bp, Homo sapiens
gttgctccagsgcataggtga

SEQ ID NO: 13992 - DNA, 21 bp, Homo sapiens
gctgctttctmggtaattata

SEQ ID NO: 13993 - DNA, 21 bp, Homo sapiens
tatcctgtttrgtttgtgtat

SEQ ID NO: 13994 - DNA, 21 bp, Homo sapiens
agagaagcaasgcctgttagg

SEQ ID NO: 13995 - DNA, 21 bp, Homo sapiens
gctctacaatrtataattcaa

SEQ ID NO: 13996 - DNA, 21 bp, Homo sapiens
atcccataaasaaaatccaag

SEQ ID NO: 13997 - DNA, 21 bp, Homo sapiens
cactttcctcrttaagcacag

SEQ ID NO: 13998 - DNA, 21 bp, Homo sapiens
ctaggtttaakgaatacaaga

SEQ ID NO: 13999 - DNA, 21 bp, Homo sapiens
gggacctaggrttattctacc

SEQ ID NO: 14000 - DNA, 21 bp, Homo sapiens
caggccattcrgtaattaacc

SEQ ID NO: 14001 - DNA, 21 bp, Homo sapiens
attctggaaaygatggtctac

SEQ ID NO: 14002 - DNA, 21 bp, Homo sapiens
ggacaataatmgaagagttca

SEQ ID NO: 14003 - DNA, 21 bp, Homo sapiens
gggaaaaaccyaccatcagtt

SEQ ID NO: 14004 - DNA, 21 bp, Homo sapiens
ggtacaaactrtggctaactg

SEQ ID NO: 14005 - DNA, 21 bp, Homo sapiens
tagcctttcaygtacaatttt

SEQ ID NO: 14006 - DNA, 21 bp, Homo sapiens
ccagcacagamcttaaatcag

SEQ ID NO: 14007 - DNA, 21 bp, Homo sapiens
ttattgcagaygacacttaca

SEQ ID NO: 14008 - DNA, 21 bp, Homo sapiens
aaaaatttcaraccatgccca

SEQ ID NO: 14009 - DNA, 21 bp, Homo sapiens
tccattttgcrggtgtggaaa

SEQ ID NO: 14010 - DNA, 21 bp, Homo sapiens
ttgccatctcrcattggctct

SEQ ID NO: 14011 - DNA, 21 bp, Homo sapiens
taaaaggggaygttcatactc

SEQ ID NO: 14012 - DNA, 21 bp, Homo sapiens
caacactacargccttaatta

SEQ ID NO: 14013 - DNA, 21 bp, Homo sapiens
ttagaggtctwaatctgctcc

SEQ ID NO: 14014 - DNA, 21 bp, Homo sapiens
aagtagtttayagcagaactt

SEQ ID NO: 14015 - DNA, 21 bp, Homo sapiens
ttttaaaagcraatgaattgg

SEQ ID NO: 14016 - DNA, 21 bp, Homo sapiens
tatatatatawaacactgtaa

SEQ ID NO: 14017 - DNA, 21 bp, Homo sapiens
tgggagttcasactctccccg

SEQ ID NO: 14018 - DNA, 21 bp, Homo sapiens
ggaaactgttrcaaggataca

SEQ ID NO: 14019 - DNA, 21 bp, Homo sapiens
tccatccttcrtggcacagct

SEQ ID NO: 14020 - DNA, 21 bp, Homo sapiens
gaaactggacrcttctctttt

SEQ ID NO: 14021 - DNA, 21 bp, Homo sapiens
tgcatagttgrcaaaatttgt

SEQ ID NO: 14022 - DNA, 21 bp, Homo sapiens
ctacaactatraaggaaacaa

SEQ ID NO: 14023 - DNA, 21 bp, Homo sapiens
cctagtctttyaattacataa

SEQ ID NO: 14024 - DNA, 21 bp, Homo sapiens
caatctcagaracagtcatgt

SEQ ID NO: 14025 - DNA, 21 bp, Homo sapiens
tgctaataaasatcttacaca

SEQ ID NO: 14026 - DNA, 21 bp, Homo sapiens
tgttagcaaayatccaggaat

SEQ ID NO: 14027 - DNA, 21 bp, Homo sapiens
gaggcagtgasgaggatggga

SEQ ID NO: 14028 - DNA, 21 bp, Homo sapiens
tcttttggatkgattctctgc

SEQ ID NO: 14029 - DNA, 21 bp, Homo sapiens
ttcccagacaygtggaactgt

SEQ ID NO: 14030 - DNA, 21 bp, Homo sapiens
tccaatctggyttccatcccc

SEQ ID NO: 14031 - DNA, 21 bp, Homo sapiens
gccttttgtgrtgttttctat

SEQ ID NO: 14032 - DNA, 21 bp, Homo sapiens
atttgaaaagwgcttggatgg

SEQ ID NO: 14033 - DNA, 21 bp, Homo sapiens
ggatgcaggtsgtggttgcct

SEQ ID NO: 14034 - DNA, 21 bp, Homo sapiens
atgcatgaggscttcagtctg

SEQ ID NO: 14035 - DNA, 21 bp, Homo sapiens
ctgtgatgccrtcaaaatgag

SEQ ID NO: 14036 - DNA, 21 bp, Homo sapiens
cctgactaccmctgcgggatt

SEQ ID NO: 14037 - DNA, 21 bp, Homo sapiens
acctgttggcrtcacacctgc

SEQ ID NO: 14038 - DNA, 21 bp, Homo sapiens
caattcaaacstggtcattgt

SEQ ID NO: 14039 - DNA, 21 bp, Homo sapiens
catccagagcmctccaaggac

SEQ ID NO: 14040 - DNA, 21 bp, Homo sapiens
agcaaaggagwgtgtcttatt

SEQ ID NO: 14041 - DNA, 21 bp, Homo sapiens
tagctgttttygtctgtacat

SEQ ID NO: 14042 - DNA, 21 bp, Homo sapiens
atttcttgagygcacattatc

SEQ ID NO: 14043 - DNA, 21 bp, Homo sapiens
ttactttattsctctatgatt

SEQ ID NO: 14044 - DNA, 21 bp, Homo sapiens
gggaacagaarcatttccagt

SEQ ID NO: 14045 - DNA, 21 bp, Homo sapiens
gactttgggtwtcttcccgta

SEQ ID NO: 14046 - DNA, 21 bp, Homo sapiens
cacaggattasaacgattggc

SEQ ID NO: 14047 - DNA, 21 bp, Homo sapiens
tcaaggcttartgttgatact

SEQ ID NO: 14048 - DNA, 21 bp, Homo sapiens
tgatgaattayctttgtcatt

SEQ ID NO: 14049 - DNA, 21 bp, Homo sapiens
agctgaaagaygttagaagct

SEQ ID NO: 14050 - DNA, 21 bp, Homo sapiens
ggattacctartgattatgac

SEQ ID NO: 14051 - DNA, 21 bp, Homo sapiens
ctgtgcttttygagacgaatg

SEQ ID NO: 14052 - DNA, 21 bp, Homo sapiens
tgagttattcragtatgtgtc

SEQ ID NO: 14053 - DNA, 21 bp, Homo sapiens
tatttaacaastaaagacgca

SEQ ID NO: 14054 - DNA, 21 bp, Homo sapiens
tatttaacaastaaagacgca

SEQ ID NO: 14055 - DNA, 21 bp, Homo sapiens
tgataaaaaamtgacgtgagg

SEQ ID NO: 14056 - DNA, 21 bp, Homo sapiens
ttgctgttgayggagataaag

SEQ ID NO: 14057 - DNA, 21 bp, Homo sapiens
ttgctgttgayggagataaag

SEQ ID NO: 14058 - DNA, 21 bp, Homo sapiens
tagagcttttrcccaaattaa

SEQ ID NO: 14059 - DNA, 21 bp, Homo sapiens
tagagcttttrcccaaattaa

SEQ ID NO: 14060 - DNA, 21 bp, Homo sapiens
aacagaaatcraaccctactg

SEQ ID NO: 14061 - DNA, 21 bp, Homo sapiens
aacagaaatcraaccctactg

SEQ ID NO: 14062 - DNA, 21 bp, Homo sapiens
tagaactgcasagaaaatact

SEQ ID NO: 14063 - DNA, 21 bp, Homo sapiens
agtggttaacyatacaactga

SEQ ID NO: 14064 - DNA, 21 bp, Homo sapiens
agtggttaacyatacaactga

SEQ ID NO: 14065 - DNA, 21 bp, Homo sapiens
ttgtagcaccyggaattagcg

SEQ ID NO: 14066 - DNA, 21 bp, Homo sapiens
agacaacacgwctttagagaa

SEQ ID NO: 14067 - DNA, 21 bp, Homo sapiens
attttcaatckggacccaaca

SEQ ID NO: 14068 - DNA, 21 bp, Homo sapiens
ttacaaatgcyagtcttagat

SEQ ID NO: 14069 - DNA, 21 bp, Homo sapiens
ttacaaatgcyagtcttagat

SEQ ID NO: 14070 - DNA, 21 bp, Homo sapiens
atagacagatrttcatgtccc

SEQ ID NO: 14071 - DNA, 21 bp, Homo sapiens
aacaccagggktcagatgtag

SEQ ID NO: 14072 - DNA, 21 bp, Homo sapiens
taggaaaataygggagaaagt

SEQ ID NO: 14073 - DNA, 21 bp, Homo sapiens
taggaaaataygggagaaagt

SEQ ID NO: 14074 - DNA, 21 bp, Homo sapiens
caattttgcasacaccctgta

SEQ ID NO: 14075 - DNA, 21 bp, Homo sapiens
cgtgtagttarcttcctttta

SEQ ID NO: 14076 - DNA, 21 bp, Homo sapiens
tggtgatgccrgtgcttgtca

SEQ ID NO: 14077 - DNA, 21 bp, Homo sapiens
gctactgcccrtaaagtttat

SEQ ID NO: 14078 - DNA, 21 bp, Homo sapiens
cagtgtcatgkaggccacaag

SEQ ID NO: 14079 - DNA, 21 bp, Homo sapiens
gaaatattcakgtgaggagca

SEQ ID NO: 14080 - DNA, 21 bp, Homo sapiens
tcatattttakattgatatgg

SEQ ID NO: 14081 - DNA, 21 bp, Homo sapiens
catcccatgcstttcttgttt

SEQ ID NO: 14082 - DNA, 21 bp, Homo sapiens
gtagaatgttytcccactctc

SEQ ID NO: 14083 - DNA, 21 bp, Homo sapiens
gcactcaatgmatgtttgtta

SEQ ID NO: 14084 - DNA, 21 bp, Homo sapiens
gaagggtagasaagggccata

SEQ ID NO: 14085 - DNA, 21 bp, Homo sapiens
tatttaatcayattgagcact

SEQ ID NO: 14086 - DNA, 21 bp, Homo sapiens
atgtagtaatytgactgttat

SEQ ID NO: 14087 - DNA, 21 bp, Homo sapiens
atattacaatsgtctctcatc

SEQ ID NO: 14088 - DNA, 21 bp, Homo sapiens
tcaatgaagcrtacttgtcgt

SEQ ID NO: 14089 - DNA, 21 bp, Homo sapiens
atgacacaccrtgatcggagc

SEQ ID NO: 14090 - DNA, 21 bp, Homo sapiens
aacttgctccyggctgtcagc

SEQ ID NO: 14091 - DNA, 21 bp, Homo sapiens
tacatttataygtatatatgt

SEQ ID NO: 14092 - DNA, 21 bp, Homo sapiens
atttttgcaargggaacttct

SEQ ID NO: 14093 - DNA, 21 bp, Homo sapiens
gattaatgccytccctgggta

SEQ ID NO: 14094 - DNA, 21 bp, Homo sapiens
taggagctaastagaagaact

SEQ ID NO: 14095 - DNA, 21 bp, Homo sapiens
tgggaaaaatytgagacagtt

SEQ ID NO: 14096 - DNA, 21 bp, Homo sapiens
acttcttcctkaatagttttt

SEQ ID NO: 14097 - DNA, 21 bp, Homo sapiens
cgccagggctmccagtcaatt

SEQ ID NO: 14098 - DNA, 21 bp, Homo sapiens
cgagtgaaagsctgtgtgatt

SEQ ID NO: 14099 - DNA, 21 bp, Homo sapiens
ttttcctgtcyccaaataatg

SEQ ID NO: 14100 - DNA, 21 bp, Homo sapiens
atgacaaataygatttcgaca

SEQ ID NO: 14101 - DNA, 21 bp, Homo sapiens
gtggcttttartggatatttt

SEQ ID NO: 14102 - DNA, 21 bp, Homo sapiens
cagctgagcamaaacagcatg

SEQ ID NO: 14103 - DNA, 21 bp, Homo sapiens
tctattttggktgtccgctct

SEQ ID NO: 14104 - DNA, 21 bp, Homo sapiens
catcagattgytgatttattc

SEQ ID NO: 14105 - DNA, 21 bp, Homo sapiens
tttaaagttgstatataatcg

SEQ ID NO: 14106 - DNA, 21 bp, Homo sapiens
tggtatttccrgtgagagtat

SEQ ID NO: 14107 - DNA, 21 bp, Homo sapiens
ggaatgtcaasctacatcacc

SEQ ID NO: 14108 - DNA, 21 bp, Homo sapiens
tctgcttagtwatagaggcct

SEQ ID NO: 14109 - DNA, 21 bp, Homo sapiens
tataacaactktgctggaaat

SEQ ID NO: 14110 - DNA, 21 bp, Homo sapiens
ccttctgtaaytggatatggc

SEQ ID NO: 14111 - DNA, 21 bp, Homo sapiens
attagttgttkatgcagtttc

SEQ ID NO: 14112 - DNA, 21 bp, Homo sapiens
aacttggaaarttcaccaaga

SEQ ID NO: 14113 - DNA, 21 bp, Homo sapiens
attgctaactsattctttcct

SEQ ID NO: 14114 - DNA, 21 bp, Homo sapiens
cctgaaaattyctatcatcat

SEQ ID NO: 14115 - DNA, 21 bp, Homo sapiens
cctcctaagtwcctattcagc

SEQ ID NO: 14116 - DNA, 21 bp, Homo sapiens
tgcaagcatgrtgattctaat

SEQ ID NO: 14117 - DNA, 21 bp, Homo sapiens
acaggagttayataattccta

SEQ ID NO: 14118 - DNA, 21 bp, Homo sapiens
agtatcttgcyggctgtaata

SEQ ID NO: 14119 - DNA, 21 bp, Homo sapiens
cctgacctctmtgctgccaac

SEQ ID NO: 14120 - DNA, 21 bp, Homo sapiens
gcttgaatttyaatgacatgc

SEQ ID NO: 14121 - DNA, 21 bp, Homo sapiens
ttatgtcaccrttagtaaatt

SEQ ID NO: 14122 - DNA, 21 bp, Homo sapiens
ctttgtgttaygtactatctc

SEQ ID NO: 14123 - DNA, 21 bp, Homo sapiens
taacatatatrcccctaaatc

SEQ ID NO: 14124 - DNA, 21 bp, Homo sapiens
agatgttggtrtaaaaccata

SEQ ID NO: 14125 - DNA, 21 bp, Homo sapiens
ttggctgaaaygattttgtta

SEQ ID NO: 14126 - DNA, 21 bp, Homo sapiens
acaaaaaattrtaaaaacttg

SEQ ID NO: 14127 - DNA, 21 bp, Homo sapiens
aacactgaacwgtactcctta

SEQ ID NO: 14128 - DNA, 21 bp, Homo sapiens
ttctttatgaraagagtgtta

SEQ ID NO: 14129 - DNA, 21 bp, Homo sapiens
ttcaagaaaayttgcgcttca

SEQ ID NO: 14130 - DNA, 21 bp, Homo sapiens
cagtgggaggmagaccagcct

SEQ ID NO: 14131 - DNA, 21 bp, Homo sapiens
actggaaatayagggaaggaa

SEQ ID NO: 14132 - DNA, 21 bp, Homo sapiens
atttttcccayagactgaagc

SEQ ID NO: 14133 - DNA, 21 bp, Homo sapiens
aacaagaaaargaacaatgca

SEQ ID NO: 14134 - DNA, 21 bp, Homo sapiens
attaaaatggmatctaatttc

SEQ ID NO: 14135 - DNA, 21 bp, Homo sapiens
cacacctggcygaaaatagtc

SEQ ID NO: 14136 - DNA, 21 bp, Homo sapiens
tttacagaagmtacttgggct

SEQ ID NO: 14137 - DNA, 21 bp, Homo sapiens
acttatgcggytgataccagg

SEQ ID NO: 14138 - DNA, 21 bp, Homo sapiens
caaaaccaatktatttactct

SEQ ID NO: 14139 - DNA, 21 bp, Homo sapiens
tttttcttacrtttcttcaaa

SEQ ID NO: 14140 - DNA, 21 bp, Homo sapiens
cagcaaagagrgtatgaatgc

SEQ ID NO: 14141 - DNA, 21 bp, Homo sapiens
ggtatttggaraaccacagtg

SEQ ID NO: 14142 - DNA, 21 bp, Homo sapiens
ctgtaacatayttaaagaaat

SEQ ID NO: 14143 - DNA, 21 bp, Homo sapiens
taagtgtcttmttctcaaggc

SEQ ID NO: 14144 - DNA, 21 bp, Homo sapiens
ggttacatttsagcagggaga

SEQ ID NO: 14145 - DNA, 21 bp, Homo sapiens
tgaaaatcaartaatttcgac

SEQ ID NO: 14146 - DNA, 21 bp, Homo sapiens
aatctcagtgygccacctgtg

SEQ ID NO: 14147 - DNA, 21 bp, Homo sapiens
caaagaacgcyggtggcacag

SEQ ID NO: 14148 - DNA, 21 bp, Homo sapiens
aggccatttawggactcaccc

SEQ ID NO: 14149 - DNA, 21 bp, Homo sapiens
gagtgggagcrtatgtgcaca

SEQ ID NO: 14150 - DNA, 21 bp, Homo sapiens
aaagtgtaacrgaggaaccat

SEQ ID NO: 14151 - DNA, 21 bp, Homo sapiens
cgcgtaacacrggctgtagca

SEQ ID NO: 14152 - DNA, 21 bp, Homo sapiens
ctaatttcttyccagcactgg

SEQ ID NO: 14153 - DNA, 21 bp, Homo sapiens
cctacaggccractgtgggct

SEQ ID NO: 14154 - DNA, 21 bp, Homo sapiens
aaagcagtgasaattattacc

SEQ ID NO: 14155 - DNA, 21 bp, Homo sapiens
caagacgggakccgctggtgg

SEQ ID NO: 14156 - DNA, 21 bp, Homo sapiens
aacaaacaaakgagcaaacaa

SEQ ID NO: 14157 - DNA, 21 bp, Homo sapiens
ccttcactatrctgggagcat

SEQ ID NO: 14158 - DNA, 21 bp, Homo sapiens
ccctgccatcsttcctcctgg

SEQ ID NO: 14159 - DNA, 21 bp, Homo sapiens
acctggggaaycaaatgctgc

SEQ ID NO: 14160 - DNA, 21 bp, Homo sapiens
tctgcactgtsccagctccct

SEQ ID NO: 14161 - DNA, 21 bp, Homo sapiens
gacaccatctrgacccaaacg

SEQ ID NO: 14162 - DNA, 21 bp, Homo sapiens
agaaatggaasagcttcaaaa

SEQ ID NO: 14163 - DNA, 21 bp, Homo sapiens
cccacctttcstcattctggt

SEQ ID NO: 14164 - DNA, 21 bp, Homo sapiens
tctgtacaagrggactgcgtc

SEQ ID NO: 14165 - DNA, 21 bp, Homo sapiens
agatcatgccrgctcagtgag

SEQ ID NO: 14166 - DNA, 21 bp, Homo sapiens
cgttatttgastccattttcg

SEQ ID NO: 14167 - DNA, 21 bp, Homo sapiens
caattatatarcacagtacag

SEQ ID NO: 14168 - DNA, 21 bp, Homo sapiens
gcttccatccygtcagtcacc

SEQ ID NO: 14169 - DNA, 21 bp, Homo sapiens
tgttgtctgaratcctgaatt

SEQ ID NO: 14170 - DNA, 21 bp, Homo sapiens
gtccctggccrgtgccagcat

SEQ ID NO: 14171 - DNA, 21 bp, Homo sapiens
catgaggcacrtgttatcgtc

SEQ ID NO: 14172 - DNA, 21 bp, Homo sapiens
ctggttcatcmacagcattgc

SEQ ID NO: 14173 - DNA, 21 bp, Homo sapiens
ggtctgagggyatttgaaggt

SEQ ID NO: 14174 - DNA, 21 bp, Homo sapiens
aaagctttacrctaacattgt

SEQ ID NO: 14175 - DNA, 21 bp, Homo sapiens
ggaaaagagartattagaaat

SEQ ID NO: 14176 - DNA, 21 bp, Homo sapiens
acggttagcaktgtcaggttt

SEQ ID NO: 14177 - DNA, 21 bp, Homo sapiens
gtaatcacctsctctcctaat

SEQ ID NO: 14178 - DNA, 21 bp, Homo sapiens
gtgagtctcgrtcactggcag

SEQ ID NO: 14179 - DNA, 21 bp, Homo sapiens
actcagaagtygggcatttga

SEQ ID NO: 14180 - DNA, 21 bp, Homo sapiens
cagggaacacrtgtgagcgga

SEQ ID NO: 14181 - DNA, 21 bp, Homo sapiens
ctgtgcatacyggcaagggag

SEQ ID NO: 14182 - DNA, 21 bp, Homo sapiens
aagggctggcygcctctcctg

SEQ ID NO: 14183 - DNA, 21 bp, Homo sapiens
agctctgcttytttgcccgag

SEQ ID NO: 14184 - DNA, 21 bp, Homo sapiens
cacacatgcayagatcacata

SEQ ID NO: 14185 - DNA, 21 bp, Homo sapiens
aagacctgccsttggacacca

SEQ ID NO: 14186 - DNA, 21 bp, Homo sapiens
tcccccacttyggcgatgaga

SEQ ID NO: 14187 - DNA, 21 bp, Homo sapiens
acctgagattsagagagaaaa

SEQ ID NO: 14188 - DNA, 21 bp, Homo sapiens
attcagattcyaccaatcctt

SEQ ID NO: 14189 - DNA, 21 bp, Homo sapiens
tgagttccatsagttcttcta

SEQ ID NO: 14190 - DNA, 21 bp, Homo sapiens
tttcctgcacrgaacagtctt

SEQ ID NO: 14191 - DNA, 21 bp, Homo sapiens
caaatgtctastgaaggattt

SEQ ID NO: 14192 - DNA, 21 bp, Homo sapiens
cctaaaagtayctgccagata

SEQ ID NO: 14193 - DNA, 21 bp, Homo sapiens
agtccaattayaggatgtttt

SEQ ID NO: 14194 - DNA, 21 bp, Homo sapiens
ctaggaggggsctctggtctg

SEQ ID NO: 14195 - DNA, 21 bp, Homo sapiens
tcatgaaatcrgaagagccca

SEQ ID NO: 14196 - DNA, 21 bp, Homo sapiens
aatgtccaagmaaaggcaagt

SEQ ID NO: 14197 - DNA, 21 bp, Homo sapiens
aatgatacacwaagcccttta

SEQ ID NO: 14198 - DNA, 21 bp, Homo sapiens
agcccgttgcyctagcctact

SEQ ID NO: 14199 - DNA, 21 bp, Homo sapiens
tctgtaagcasttctgaatat

SEQ ID NO: 14200 - DNA, 21 bp, Homo sapiens
ttgggacccartagaacttag

SEQ ID NO: 14201 - DNA, 21 bp, Homo sapiens
ttaatgacatmtttagggaca

SEQ ID NO: 14202 - DNA, 21 bp, Homo sapiens
agtatgtcctstgtgccccgg

SEQ ID NO: 14203 - DNA, 21 bp, Homo sapiens
tggagtagcaygatctaaggt

SEQ ID NO: 14204 - DNA, 21 bp, Homo sapiens
ccttcaaagcrgttttatgcc

SEQ ID NO: 14205 - DNA, 21 bp, Homo sapiens
tcttaatgtakcaggtgagat

SEQ ID NO: 14206 - DNA, 21 bp, Homo sapiens
ccagcaacccrttagaatgac

SEQ ID NO: 14207 - DNA, 21 bp, Homo sapiens
catgcctcttrtgtgggaaag

SEQ ID NO: 14208 - DNA, 21 bp, Homo sapiens
tcatgccttcrgccacagtac

SEQ ID NO: 14209 - DNA, 21 bp, Homo sapiens
attttggatgygtgacccaga

SEQ ID NO: 14210 - DNA, 21 bp, Homo sapiens
ccagtccgtgwtgaaggtgtc

SEQ ID NO: 14211 - DNA, 21 bp, Homo sapiens
atacattccaygtcaattaaa

SEQ ID NO: 14212 - DNA, 21 bp, Homo sapiens
tcctcccaacraaatactgca

SEQ ID NO: 14213 - DNA, 21 bp, Homo sapiens
attccctcaamtccaaacaat

SEQ ID NO: 14214 - DNA, 21 bp, Homo sapiens
cctaaagcttygtacagagtg

SEQ ID NO: 14215 - DNA, 21 bp, Homo sapiens
tataccgattyctattcagag

SEQ ID NO: 14216 - DNA, 21 bp, Homo sapiens
caatttgaggwagaaacatct

SEQ ID NO: 14217 - DNA, 21 bp, Homo sapiens
aggagccatgyaacaaattgt

SEQ ID NO: 14218 - DNA, 21 bp, Homo sapiens
ggtgttagagwgcaaaaggct

SEQ ID NO: 14219 - DNA, 21 bp, Homo sapiens
aagatgctgamtttctagcag

SEQ ID NO: 14220 - DNA, 21 bp, Homo sapiens
attgcgttacrtgcttcccag

SEQ ID NO: 14221 - DNA, 21 bp, Homo sapiens
agtttcaggartataaatctg

SEQ ID NO: 14222 - DNA, 21 bp, Homo sapiens
cttttttcctyctatacactg

SEQ ID NO: 14223 - DNA, 21 bp, Homo sapiens
ttaaaacaaaygcttgctaga

SEQ ID NO: 14224 - DNA, 21 bp, Homo sapiens
aattcaattaytataggaaga

SEQ ID NO: 14225 - DNA, 21 bp, Homo sapiens
caggtattaaraagacttttg

SEQ ID NO: 14226 - DNA, 21 bp, Homo sapiens
tctaaatcttyacatctctgc

SEQ ID NO: 14227 - DNA, 21 bp, Homo sapiens
aagtttttatytaagtgacat

SEQ ID NO: 14228 - DNA, 21 bp, Homo sapiens
aataaacagcsactttttcaa

SEQ ID NO: 14229 - DNA, 21 bp, Homo sapiens
gcatccaattkgttagacttc

SEQ ID NO: 14230 - DNA, 21 bp, Homo sapiens
aagcaaatacmaccaatcaat

SEQ ID NO: 14231 - DNA, 21 bp, Homo sapiens
acagagctacmtattccttta

SEQ ID NO: 14232 - DNA, 21 bp, Homo sapiens
aggaattaggwggaacatgat

SEQ ID NO: 14233 - DNA, 21 bp, Homo sapiens
caaaatacaasgacatttcat

SEQ ID NO: 14234 - DNA, 21 bp, Homo sapiens
tctggctcctsgctcaaggtt

SEQ ID NO: 14235 - DNA, 21 bp, Homo sapiens
ttttgcttaamagagtggttg

SEQ ID NO: 14236 - DNA, 21 bp, Homo sapiens
gttcttagaamactgcctgga

SEQ ID NO: 14237 - DNA, 21 bp, Homo sapiens
ttttcttgatkaaagatgaat

SEQ ID NO: 14238 - DNA, 21 bp, Homo sapiens
taatataaaaygaagttgaga

SEQ ID NO: 14239 - DNA, 21 bp, Homo sapiens
ctgtgtaagaytgaacatttt

SEQ ID NO: 14240 - DNA, 21 bp, Homo sapiens
cctaaataggrtgagaattct

SEQ ID NO: 14241 - DNA, 21 bp, Homo sapiens
tctgtgcactrattttatttc

SEQ ID NO: 14242 - DNA, 21 bp, Homo sapiens
ctatttctagygtggttgcac

SEQ ID NO: 14243 - DNA, 21 bp, Homo sapiens
gttggatctgstgcaggaagg

SEQ ID NO: 14244 - DNA, 21 bp, Homo sapiens
aatgtaacttrgagactattg

SEQ ID NO: 14245 - DNA, 21 bp, Homo sapiens
ggatgccccamatgagagctc

SEQ ID NO: 14246 - DNA, 21 bp, Homo sapiens
tgagagagttyatctttagtt

SEQ ID NO: 14247 - DNA, 21 bp, Homo sapiens
tacaggtgccytgagctctgt

SEQ ID NO: 14248 - DNA, 21 bp, Homo sapiens
gcaacgtagtrgacgacatgg

SEQ ID NO: 14249 - DNA, 21 bp, Homo sapiens
gaacatatgamatttgccctt

SEQ ID NO: 14250 - DNA, 21 bp, Homo sapiens
aagatggaacrtgaaattttg

SEQ ID NO: 14251 - DNA, 21 bp, Homo sapiens
ctgagaagccrcagcctatgt

SEQ ID NO: 14252 - DNA, 21 bp, Homo sapiens
gccacagtaaratttgcattt

SEQ ID NO: 14253 - DNA, 21 bp, Homo sapiens
ccagacagcamactgcctctc

SEQ ID NO: 14254 - DNA, 21 bp, Homo sapiens
cataagaagcygtggtatttc

SEQ ID NO: 14255 - DNA, 21 bp, Homo sapiens
gacaatgaaarggtggtcctt

SEQ ID NO: 14256 - DNA, 21 bp, Homo sapiens
tttcaaagatktttttgggag

SEQ ID NO: 14257 - DNA, 21 bp, Homo sapiens
acaattgacayatctgctgca

SEQ ID NO: 14258 - DNA, 21 bp, Homo sapiens
ggcatttaacrtcagcttaaa

SEQ ID NO: 14259 - DNA, 21 bp, Homo sapiens
aacctgtaacycattaatggt

SEQ ID NO: 14260 - DNA, 21 bp, Homo sapiens
taggtggaacrataaggtgta

SEQ ID NO: 14261 - DNA, 21 bp, Homo sapiens
cgaggggacaygcagtaaaat

SEQ ID NO: 14262 - DNA, 21 bp, Homo sapiens
gactttggctytcctggatat

SEQ ID NO: 14263 - DNA, 21 bp, Homo sapiens
aactcattgtkaggtttaatg

SEQ ID NO: 14264 - DNA, 21 bp, Homo sapiens
gatgttctgtrataatttctt

SEQ ID NO: 14265 - DNA, 21 bp, Homo sapiens
tggtccatccrtaagttcacg

SEQ ID NO: 14266 - DNA, 21 bp, Homo sapiens
tgttacaatasaaatcaagct

SEQ ID NO: 14267 - DNA, 21 bp, Homo sapiens
gttacaaatamtgcttgatga

SEQ ID NO: 14268 - DNA, 21 bp, Homo sapiens
tatttcataaygcattttact

SEQ ID NO: 14269 - DNA, 21 bp, Homo sapiens
ttgttccaagwataatttaat

SEQ ID NO: 14270 - DNA, 21 bp, Homo sapiens
atgtttaaaaycccaaaaagg

SEQ ID NO: 14271 - DNA, 21 bp, Homo sapiens
tcaaaagcagmtaaggaaact

SEQ ID NO: 14272 - DNA, 21 bp, Homo sapiens
cttagctaacrcaaaaatttg

SEQ ID NO: 14273 - DNA, 21 bp, Homo sapiens
tttcaaaattytattatatca

SEQ ID NO: 14274 - DNA, 21 bp, Homo sapiens
tagatctgagyctaatacctt

SEQ ID NO: 14275 - DNA, 21 bp, Homo sapiens
ctaggcttctytgaaaatgtg

SEQ ID NO: 14276 - DNA, 21 bp, Homo sapiens
ttaaattcatmactgatttgc

SEQ ID NO: 14277 - DNA, 21 bp, Homo sapiens
ttgaacaccamatgctattct

SEQ ID NO: 14278 - DNA, 21 bp, Homo sapiens
tagcccaaagygtattttgta

SEQ ID NO: 14279 - DNA, 21 bp, Homo sapiens
aaatccccacrtgctctttgg

SEQ ID NO: 14280 - DNA, 21 bp, Homo sapiens
taaaatgagcrcttccttcaa

SEQ ID NO: 14281 - DNA, 21 bp, Homo sapiens
aaatgacataytgtgtgagac

SEQ ID NO: 14282 - DNA, 21 bp, Homo sapiens
agcaatacttracatttacta

SEQ ID NO: 14283 - DNA, 21 bp, Homo sapiens
gaaggttaatscatgaacgga

SEQ ID NO: 14284 - DNA, 21 bp, Homo sapiens
ttatgtatggrgtacagcaca

SEQ ID NO: 14285 - DNA, 21 bp, Homo sapiens
cccctttttaytctggtcaca

SEQ ID NO: 14286 - DNA, 21 bp, Homo sapiens
ctttgctgttyttttccgtcc

SEQ ID NO: 14287 - DNA, 21 bp, Homo sapiens
tctatacttastttccttaca

SEQ ID NO: 14288 - DNA, 21 bp, Homo sapiens
taaaaggactrtatacaaagc

SEQ ID NO: 14289 - DNA, 21 bp, Homo sapiens
agaaccacatygctaggaaag

SEQ ID NO: 14290 - DNA, 21 bp, Homo sapiens
gggctacctgraaaataattt

SEQ ID NO: 14291 - DNA, 21 bp, Homo sapiens
ttttgaagcarcaaaatatag

SEQ ID NO: 14292 - DNA, 21 bp, Homo sapiens
agtgtgaaggyaggagtggtg

SEQ ID NO: 14293 - DNA, 21 bp, Homo sapiens
gggttcagaargaggaacgga

SEQ ID NO: 14294 - DNA, 21 bp, Homo sapiens
aagttttcaaytcatcatacc

SEQ ID NO: 14295 - DNA, 21 bp, Homo sapiens
atttgcctaaktctttttggt

SEQ ID NO: 14296 - DNA, 21 bp, Homo sapiens
ttaccattttrttggaactgt

SEQ ID NO: 14297 - DNA, 21 bp, Homo sapiens
cctggagttcygcaggctgaa

SEQ ID NO: 14298 - DNA, 21 bp, Homo sapiens
aaactcttaaytgaactgagc

SEQ ID NO: 14299 - DNA, 21 bp, Homo sapiens
atgccctcagrttgtgatgtg

SEQ ID NO: 14300 - DNA, 21 bp, Homo sapiens
gatacacataytgacctcaga

SEQ ID NO: 14301 - DNA, 21 bp, Homo sapiens
ctcttttgctmcatctgttct

SEQ ID NO: 14302 - DNA, 21 bp, Homo sapiens
gaaagatattwctggcaataa

SEQ ID NO: 14303 - DNA, 21 bp, Homo sapiens
atttctttcaygcccaattca

SEQ ID NO: 14304 - DNA, 21 bp, Homo sapiens
tagtttgctayataaaacctt

SEQ ID NO: 14305 - DNA, 21 bp, Homo sapiens
cacatcaagcwttaaatctta

SEQ ID NO: 14306 - DNA, 21 bp, Homo sapiens
tctcacttgaygggtgttcag

SEQ ID NO: 14307 - DNA, 21 bp, Homo sapiens
caaagagagaytggtatcttg

SEQ ID NO: 14308 - DNA, 21 bp, Homo sapiens
acatccaacastgttagagcc

SEQ ID NO: 14309 - DNA, 21 bp, Homo sapiens
taacactgccytgaggttttc

SEQ ID NO: 14310 - DNA, 21 bp, Homo sapiens
cacacgcacaycaagaaacct

SEQ ID NO: 14311 - DNA, 21 bp, Homo sapiens
ccaagcctttsccagctccca

SEQ ID NO: 14312 - DNA, 21 bp, Homo sapiens
tcacctctgaytcgttaactg

SEQ ID NO: 14313 - DNA, 21 bp, Homo sapiens
atggacgtgtmctggggcaag

SEQ ID NO: 14314 - DNA, 21 bp, Homo sapiens
agaatggactrctcacatgct

SEQ ID NO: 14315 - DNA, 21 bp, Homo sapiens
catttagaatytgccattctc

SEQ ID NO: 14316 - DNA, 21 bp, Homo sapiens
gtaatagatgraaaaggatgg

SEQ ID NO: 14317 - DNA, 21 bp, Homo sapiens
atcctttgctktttcatgccc

SEQ ID NO: 14318 - DNA, 21 bp, Homo sapiens
tccaatttgcytaattttgag

SEQ ID NO: 14319 - DNA, 21 bp, Homo sapiens
agtctgaattsaagcctaccc

SEQ ID NO: 14320 - DNA, 21 bp, Homo sapiens
tagaaacactragctaaggtg

SEQ ID NO: 14321 - DNA, 21 bp, Homo sapiens
tctcaaaattrttcttaaact

SEQ ID NO: 14322 - DNA, 21 bp, Homo sapiens
tataggatggygacccaacct

SEQ ID NO: 14323 - DNA, 21 bp, Homo sapiens
cttttttttckattagaaaca

SEQ ID NO: 14324 - DNA, 21 bp, Homo sapiens
agggaaaagtrtctgctcaga

SEQ ID NO: 14325 - DNA, 21 bp, Homo sapiens
tcagcagaaakaaattgggaa

SEQ ID NO: 14326 - DNA, 21 bp, Homo sapiens
tctcaatgccrtcatgtttac

SEQ ID NO: 14327 - DNA, 21 bp, Homo sapiens
ttcagaactcrgttcaagcaa

SEQ ID NO: 14328 - DNA, 21 bp, Homo sapiens
gcagaggctgmgtaactattt

SEQ ID NO: 14329 - DNA, 21 bp, Homo sapiens
tcccgtgtggrattctgttgc

SEQ ID NO: 14330 - DNA, 21 bp, Homo sapiens
ctaagtaacasaaaacagagg

SEQ ID NO: 14331 - DNA, 21 bp, Homo sapiens
acaaaattatrgagatgtgtg

SEQ ID NO: 14332 - DNA, 21 bp, Homo sapiens
tacccttcacrtgacctaaca

SEQ ID NO: 14333 - DNA, 21 bp, Homo sapiens
catgttagacwcttaatgcca

SEQ ID NO: 14334 - DNA, 21 bp, Homo sapiens
tcttctgctarccattaagct

SEQ ID NO: 14335 - DNA, 21 bp, Homo sapiens
ttatcaaaatyattcaacctt

SEQ ID NO: 14336 - DNA, 21 bp, Homo sapiens
gggagactctwtgatacttta

SEQ ID NO: 14337 - DNA, 21 bp, Homo sapiens
aaaatactatrttctctgaaa

SEQ ID NO: 14338 - DNA, 21 bp, Homo sapiens
acttgatcaargtcacctagc

SEQ ID NO: 14339 - DNA, 21 bp, Homo sapiens
gttacaagccwataagaaagt

SEQ ID NO: 14340 - DNA, 21 bp, Homo sapiens
aaatccactayagtcatcccc

SEQ ID NO: 14341 - DNA, 21 bp, Homo sapiens
atctatgacartattgcctgt

SEQ ID NO: 14342 - DNA, 21 bp, Homo sapiens
tttagatgatrttctggcatt

SEQ ID NO: 14343 - DNA, 21 bp, Homo sapiens
attgtgaattrgcaagtcata

SEQ ID NO: 14344 - DNA, 21 bp, Homo sapiens
gatgaactccytgcgtggtct

SEQ ID NO: 14345 - DNA, 21 bp, Homo sapiens
actattcagargaacaaaaag

SEQ ID NO: 14346 - DNA, 21 bp, Homo sapiens
gttgtgtaagwcattttgata

SEQ ID NO: 14347 - DNA, 21 bp, Homo sapiens
gtatcagataycggttgctgt

SEQ ID NO: 14348 - DNA, 21 bp, Homo sapiens
ttataccttgmttcccttcat

SEQ ID NO: 14349 - DNA, 21 bp, Homo sapiens
caggaggagaraaggagggat

SEQ ID NO: 14350 - DNA, 21 bp, Homo sapiens
taaacatttcrtttttaaacg

SEQ ID NO: 14351 - DNA, 21 bp, Homo sapiens
gaatttccatkaggtcttcat

SEQ ID NO: 14352 - DNA, 21 bp, Homo sapiens
tgccactaaakcacacagtgg

SEQ ID NO: 14353 - DNA, 21 bp, Homo sapiens
atcatagtgtkagtgatgtcg

SEQ ID NO: 14354 - DNA, 21 bp, Homo sapiens
tgcagaaagtygactggtccc

SEQ ID NO: 14355 - DNA, 21 bp, Homo sapiens
tggtaatgggytcagataaat

SEQ ID NO: 14356 - DNA, 21 bp, Homo sapiens
gtctatagctytgcatctcta

SEQ ID NO: 14357 - DNA, 21 bp, Homo sapiens
gcttcatttcractagaatca

SEQ ID NO: 14358 - DNA, 21 bp, Homo sapiens
acatgctttgyggcttacatt

SEQ ID NO: 14359 - DNA, 21 bp, Homo sapiens
ttccccattgytaaatcagga

SEQ ID NO: 14360 - DNA, 21 bp, Homo sapiens
agctgcaggarcacagacaac

SEQ ID NO: 14361 - DNA, 21 bp, Homo sapiens
atcgaatgagyaaacaagaat

SEQ ID NO: 14362 - DNA, 21 bp, Homo sapiens
ttctgtagggmagattttaat

SEQ ID NO: 14363 - DNA, 21 bp, Homo sapiens
atgatctaatstttccatctg

SEQ ID NO: 14364 - DNA, 21 bp, Homo sapiens
tatgtctgtgrgaatttttgt

SEQ ID NO: 14365 - DNA, 21 bp, Homo sapiens
ataacattaaracacaccagc

SEQ ID NO: 14366 - DNA, 21 bp, Homo sapiens
acttcataatrggcagctttg

SEQ ID NO: 14367 - DNA, 21 bp, Homo sapiens
tgtagtttatragcattgtct

SEQ ID NO: 14368 - DNA, 21 bp, Homo sapiens
gtaccgacacraagacttcac

SEQ ID NO: 14369 - DNA, 21 bp, Homo sapiens
tgccacaggtytcatagcacc

SEQ ID NO: 14370 - DNA, 21 bp, Homo sapiens
ctggatcccckattattttcc

SEQ ID NO: 14371 - DNA, 21 bp, Homo sapiens
cagcagtgttrtgatgaaaat

SEQ ID NO: 14372 - DNA, 21 bp, Homo sapiens
agtaaacaccytgagagctgg

SEQ ID NO: 14373 - DNA, 21 bp, Homo sapiens
gaggcaatgtytgaatggcaa

SEQ ID NO: 14374 - DNA, 21 bp, Homo sapiens
gctttccaccwctcaggagag

SEQ ID NO: 14375 - DNA, 21 bp, Homo sapiens
atgtacacctrtgttttgaat

SEQ ID NO: 14376 - DNA, 21 bp, Homo sapiens
aattgcaaaakaaatgataga

SEQ ID NO: 14377 - DNA, 21 bp, Homo sapiens
tcaaccgaggyggcagcagca

SEQ ID NO: 14378 - DNA, 21 bp, Homo sapiens
tttttaaagtrgaaaggaata

SEQ ID NO: 14379 - DNA, 21 bp, Homo sapiens
aaaaggacacrctatcaaaac

SEQ ID NO: 14380 - DNA, 21 bp, Homo sapiens
agacagaatcmaccaactgca

SEQ ID NO: 14381 - DNA, 21 bp, Homo sapiens
acaaaaatagygcatttagtc

SEQ ID NO: 14382 - DNA, 21 bp, Homo sapiens
gtactacaaakttttccaaaa

SEQ ID NO: 14383 - DNA, 21 bp, Homo sapiens
ttctcagttcrtataatgaca

SEQ ID NO: 14384 - DNA, 21 bp, Homo sapiens
aggcaatcaaragggctggct

SEQ ID NO: 14385 - DNA, 21 bp, Homo sapiens
aggattcctartcattcctgt

SEQ ID NO: 14386 - DNA, 21 bp, Homo sapiens
ggacagaaaarctttttattc

SEQ ID NO: 14387 - DNA, 21 bp, Homo sapiens
taatctattgmaaaatgagcc

SEQ ID NO: 14388 - DNA, 21 bp, Homo sapiens
caaactatggmttgtgggtat

SEQ ID NO: 14389 - DNA, 21 bp, Homo sapiens
cataaactaayacattcatta

SEQ ID NO: 14390 - DNA, 21 bp, Homo sapiens
gagactggtckgcgggagata

SEQ ID NO: 14391 - DNA, 21 bp, Homo sapiens
taaaatgcaartttaaagagg

SEQ ID NO: 14392 - DNA, 21 bp, Homo sapiens
ctaaacttggygagataagaa

SEQ ID NO: 14393 - DNA, 21 bp, Homo sapiens
gcatggaatcwcactttcaag

SEQ ID NO: 14394 - DNA, 21 bp, Homo sapiens
cacgatttctkgagggcaagg

SEQ ID NO: 14395 - DNA, 21 bp, Homo sapiens
taatattaaasttcttattca

SEQ ID NO: 14396 - DNA, 21 bp, Homo sapiens
aaaataaaatmgaaaagaaag

SEQ ID NO: 14397 - DNA, 21 bp, Homo sapiens
ctcttattaawagctcatttt

SEQ ID NO: 14398 - DNA, 21 bp, Homo sapiens
atttttatttyaatactattg

SEQ ID NO: 14399 - DNA, 21 bp, Homo sapiens
gaacaagtggmaaactcattc

SEQ ID NO: 14400 - DNA, 21 bp, Homo sapiens
gatctcttgayctctgggaga

SEQ ID NO: 14401 - DNA, 21 bp, Homo sapiens
tgtaagtttaygtgtttccat

SEQ ID NO: 14402 - DNA, 21 bp, Homo sapiens
tacaaagagtsagatacaaag

SEQ ID NO: 14403 - DNA, 21 bp, Homo sapiens
tgttcagatayggatataact

SEQ ID NO: 14404 - DNA, 21 bp, Homo sapiens
gttgaatgcayagtacggctc

SEQ ID NO: 14405 - DNA, 21 bp, Homo sapiens
tcactgcaatrtgtataatta

SEQ ID NO: 14406 - DNA, 21 bp, Homo sapiens
cttcttgtctmgccatcactt

SEQ ID NO: 14407 - DNA, 21 bp, Homo sapiens
ataatagggcraatgtgtctc

SEQ ID NO: 14408 - DNA, 21 bp, Homo sapiens
agctgaggaamcatttctatt

SEQ ID NO: 14409 - DNA, 21 bp, Homo sapiens
gttctttacckgcacagtcct

SEQ ID NO: 14410 - DNA, 21 bp, Homo sapiens
ttcagctcaastccatgcttt

SEQ ID NO: 14411 - DNA, 21 bp, Homo sapiens
acacagccatrgggaacctgg

SEQ ID NO: 14412 - DNA, 21 bp, Homo sapiens
ttggagtctgkttcttcaatc

SEQ ID NO: 14413 - DNA, 21 bp, Homo sapiens
cttagaagagrccatatatga

SEQ ID NO: 14414 - DNA, 21 bp, Homo sapiens
tgtaagcattyataactcctt

SEQ ID NO: 14415 - DNA, 21 bp, Homo sapiens
agcaacacaartgtccagaat

SEQ ID NO: 14416 - DNA, 21 bp, Homo sapiens
tgctaaacagyatgaagacta

SEQ ID NO: 14417 - DNA, 21 bp, Homo sapiens
aaaaattgctrgaaaatattt

SEQ ID NO: 14418 - DNA, 21 bp, Homo sapiens
atcttcctctwtgtgattgaa

SEQ ID NO: 14419 - DNA, 21 bp, Homo sapiens
cagcttctgaytctactcctt

SEQ ID NO: 14420 - DNA, 21 bp, Homo sapiens
ctaccctactratcataatgg

SEQ ID NO: 14421 - DNA, 21 bp, Homo sapiens
aagtgactatyattcacctaa

SEQ ID NO: 14422 - DNA, 21 bp, Homo sapiens
tgataatatarcacttaacaa

SEQ ID NO: 14423 - DNA, 21 bp, Homo sapiens
ccttttcttcratattgtgat

SEQ ID NO: 14424 - DNA, 21 bp, Homo sapiens
ccctataatgrtggttataat

SEQ ID NO: 14425 - DNA, 21 bp, Homo sapiens
gaactctagcrtggtggctgg

SEQ ID NO: 14426 - DNA, 21 bp, Homo sapiens
gcactttgtaygtattagttc

SEQ ID NO: 14427 - DNA, 21 bp, Homo sapiens
tttttaggcaygtgaactgat

SEQ ID NO: 14428 - DNA, 21 bp, Homo sapiens
agatacaaccwcatttttcat

SEQ ID NO: 14429 - DNA, 21 bp, Homo sapiens
ttctggcttckgcctgatgtt

SEQ ID NO: 14430 - DNA, 21 bp, Homo sapiens
aacaccaagartgctggtaag

SEQ ID NO: 14431 - DNA, 21 bp, Homo sapiens
cacagaaagcyggaaggttta

SEQ ID NO: 14432 - DNA, 21 bp, Homo sapiens
ctgatgaattycataaaaaac

SEQ ID NO: 14433 - DNA, 21 bp, Homo sapiens
gagcatgcacmttgtttgtac

SEQ ID NO: 14434 - DNA, 21 bp, Homo sapiens
agaaagagaaygataatggac

SEQ ID NO: 14435 - DNA, 21 bp, Homo sapiens
gtgctcttttstcagtgtttt

SEQ ID NO: 14436 - DNA, 21 bp, Homo sapiens
atttgaggatrtaggggtaac

SEQ ID NO: 14437 - DNA, 21 bp, Homo sapiens
gtcctgaggakgaaacagaag

SEQ ID NO: 14438 - DNA, 21 bp, Homo sapiens
ggacatcagawgggagaaaat

SEQ ID NO: 14439 - DNA, 21 bp, Homo sapiens
gaactcaaatrcaactgaaaa

SEQ ID NO: 14440 - DNA, 21 bp, Homo sapiens
ctaaaactttytctctcttcc

SEQ ID NO: 14441 - DNA, 21 bp, Homo sapiens
cttatgcattyaggagttctc

SEQ ID NO: 14442 - DNA, 21 bp, Homo sapiens
aaaaatccacytcttaataac

SEQ ID NO: 14443 - DNA, 21 bp, Homo sapiens
tatgcaatggyacattcttca

SEQ ID NO: 14444 - DNA, 21 bp, Homo sapiens
cacagtgtggktctccacatg

SEQ ID NO: 14445 - DNA, 21 bp, Homo sapiens
gacattgtatyatttcttaag

SEQ ID NO: 14446 - DNA, 21 bp, Homo sapiens
gtgcacaccarataatgcaaa

SEQ ID NO: 14447 - DNA, 21 bp, Homo sapiens
agcaatattcyagaaatttgt

SEQ ID NO: 14448 - DNA, 21 bp, Homo sapiens
tgtcctaacgwagtagtattt

SEQ ID NO: 14449 - DNA, 21 bp, Homo sapiens
ggtaactattrttatactaac

SEQ ID NO: 14450 - DNA, 21 bp, Homo sapiens
gccctgcttcytcctgccctg

SEQ ID NO: 14451 - DNA, 21 bp, Homo sapiens
acattttcagytggttcagta

SEQ ID NO: 14452 - DNA, 21 bp, Homo sapiens
tccttgctcarttttgatgta

SEQ ID NO: 14453 - DNA, 21 bp, Homo sapiens
ctttaacaccyttgattgaac

SEQ ID NO: 14454 - DNA, 21 bp, Homo sapiens
tgctgaagcarcaatcgggaa

SEQ ID NO: 14455 - DNA, 21 bp, Homo sapiens
tgaaatagaamaaactcggaa

SEQ ID NO: 14456 - DNA, 21 bp, Homo sapiens
ggcttccttcrtatcctgaca

SEQ ID NO: 14457 - DNA, 21 bp, Homo sapiens
ttacaaccatyacagaaagag

SEQ ID NO: 14458 - DNA, 21 bp, Homo sapiens
aagtgatttaragcccaggag

SEQ ID NO: 14459 - DNA, 21 bp, Homo sapiens
gacatttgagkgtatgactct

SEQ ID NO: 14460 - DNA, 21 bp, Homo sapiens
atgccaggaayatgcagtatc

SEQ ID NO: 14461 - DNA, 21 bp, Homo sapiens
tagggaatacstgttttacag

SEQ ID NO: 14462 - DNA, 21 bp, Homo sapiens
ataaggttcaygtaccctttc

SEQ ID NO: 14463 - DNA, 21 bp, Homo sapiens
ccctggagcayctttgaaaat

SEQ ID NO: 14464 - DNA, 21 bp, Homo sapiens
acacagagcayttgcaatatg

SEQ ID NO: 14465 - DNA, 21 bp, Homo sapiens
aagaggaagartaaaagaatc

SEQ ID NO: 14466 - DNA, 21 bp, Homo sapiens
gcaacattaartaaaatgaag

SEQ ID NO: 14467 - DNA, 21 bp, Homo sapiens
tgctgactgakaagtgttcac

SEQ ID NO: 14468 - DNA, 21 bp, Homo sapiens
ttgttggatgraagaatggca

SEQ ID NO: 14469 - DNA, 21 bp, Homo sapiens
gagtaccagaygtggcccttt

SEQ ID NO: 14470 - DNA, 21 bp, Homo sapiens
caccaaagagyatgatggcaa

SEQ ID NO: 14471 - DNA, 21 bp, Homo sapiens
ggccatgatcrgaaaggagag

SEQ ID NO: 14472 - DNA, 21 bp, Homo sapiens
tatggcaaagscttcaataaa

SEQ ID NO: 14473 - DNA, 21 bp, Homo sapiens
gagaagttgawcaaggtgagc

SEQ ID NO: 14474 - DNA, 21 bp, Homo sapiens
gtctttgaaasttgtatctca

SEQ ID NO: 14475 - DNA, 21 bp, Homo sapiens
ttgttttctgytttgcctgaa

SEQ ID NO: 14476 - DNA, 21 bp, Homo sapiens
ttaagcccacmtaaggcaaaa

SEQ ID NO: 14477 - DNA, 21 bp, Homo sapiens
ccttacaatgractacataaa

SEQ ID NO: 14478 - DNA, 21 bp, Homo sapiens
cctaaatctgytcttcttttc

SEQ ID NO: 14479 - DNA, 21 bp, Homo sapiens
gttggtataayagtgtaagcc

SEQ ID NO: 14480 - DNA, 21 bp, Homo sapiens
catgagatcayactgattttg

SEQ ID NO: 14481 - DNA, 21 bp, Homo sapiens
gttctttgttyaatgatttgg

SEQ ID NO: 14482 - DNA, 21 bp, Homo sapiens
cttacaaagtrtatgggtttt

SEQ ID NO: 14483 - DNA, 21 bp, Homo sapiens
caggagaagtsacttttacta

SEQ ID NO: 14484 - DNA, 21 bp, Homo sapiens
catgtaattcrtccatgtagg

SEQ ID NO: 14485 - DNA, 21 bp, Homo sapiens
gtgtagaattmaaacaaatga

SEQ ID NO: 14486 - DNA, 21 bp, Homo sapiens
tgaagatgctmagactttcct

SEQ ID NO: 14487 - DNA, 21 bp, Homo sapiens
tatagttgccsattaatacaa

SEQ ID NO: 14488 - DNA, 21 bp, Homo sapiens
agggcaccagkcttgttttcc

SEQ ID NO: 14489 - DNA, 21 bp, Homo sapiens
attttctttgytccttagtag

SEQ ID NO: 14490 - DNA, 21 bp, Homo sapiens
ttgcaattaamcccattgttt

SEQ ID NO: 14491 - DNA, 21 bp, Homo sapiens
atgaatccctygaaagctaga

SEQ ID NO: 14492 - DNA, 21 bp, Homo sapiens
atttaggtcaycacttttaga

SEQ ID NO: 14493 - DNA, 21 bp, Homo sapiens
atgagaaaaasctagtagata

SEQ ID NO: 14494 - DNA, 21 bp, Homo sapiens
cttgtctctcrtttaaatgtg

SEQ ID NO: 14495 - DNA, 21 bp, Homo sapiens
actctatttcygttatgaagt

SEQ ID NO: 14496 - DNA, 21 bp, Homo sapiens
tggaacaaggrtgtgtaattt

SEQ ID NO: 14497 - DNA, 21 bp, Homo sapiens
agccctctaartgtgtagaag

SEQ ID NO: 14498 - DNA, 21 bp, Homo sapiens
tagttatttcrccaagattcc

SEQ ID NO: 14499 - DNA, 21 bp, Homo sapiens
tctccccaacyagacataggg

SEQ ID NO: 14500 - DNA, 21 bp, Homo sapiens
ttagtgtgacrtttaaagtga

SEQ ID NO: 14501 - DNA, 21 bp, Homo sapiens
gcaatcaaatkttgtagaata

SEQ ID NO: 14502 - DNA, 21 bp, Homo sapiens
agaccagccargacattgctg

SEQ ID NO: 14503 - DNA, 21 bp, Homo sapiens
caggtcagaayataatggctt

SEQ ID NO: 14504 - DNA, 21 bp, Homo sapiens
cttgatagaawacaatttcca

SEQ ID NO: 14505 - DNA, 21 bp, Homo sapiens
tggaaacacgwtagcttccca

SEQ ID NO: 14506 - DNA, 21 bp, Homo sapiens
tgtagtttttytgaagtccat

SEQ ID NO: 14507 - DNA, 21 bp, Homo sapiens
tgtccaccccyagggaaagtg

SEQ ID NO: 14508 - DNA, 21 bp, Homo sapiens
tagaatttctrcacatacaaa

SEQ ID NO: 14509 - DNA, 21 bp, Homo sapiens
ccgtgtatatrtgtgtagaaa

SEQ ID NO: 14510 - DNA, 21 bp, Homo sapiens
aaagcaaaatktgaaatctaa

SEQ ID NO: 14511 - DNA, 21 bp, Homo sapiens
taatcacatcrcttttctttt

SEQ ID NO: 14512 - DNA, 21 bp, Homo sapiens
agctagcgtcmgaagacagga

SEQ ID NO: 14513 - DNA, 21 bp, Homo sapiens
ccaggtcagayctgcgagtag

SEQ ID NO: 14514 - DNA, 21 bp, Homo sapiens
aatctttaagsactccattcc

SEQ ID NO: 14515 - DNA, 21 bp, Homo sapiens
caacttagggwtatgcacaca

SEQ ID NO: 14516 - DNA, 21 bp, Homo sapiens
ctcaagattgmtgaataaatt

SEQ ID NO: 14517 - DNA, 21 bp, Homo sapiens
tctggactctrcctgtcttca

SEQ ID NO: 14518 - DNA, 21 bp, Homo sapiens
aaatgtaattygagatttgtc

SEQ ID NO: 14519 - DNA, 21 bp, Homo sapiens
tataagggaawtagatcttga

SEQ ID NO: 14520 - DNA, 21 bp, Homo sapiens
aacataaaaakggtcacaaat

SEQ ID NO: 14521 - DNA, 21 bp, Homo sapiens
gtcttgcctayaattttatgt

SEQ ID NO: 14522 - DNA, 21 bp, Homo sapiens
ctataattgcygcaagaatcc

SEQ ID NO: 14523 - DNA, 21 bp, Homo sapiens
ccaacatataygggttaaaaa

SEQ ID NO: 14524 - DNA, 21 bp, Homo sapiens
gttcaaaactygtgaagcatc

SEQ ID NO: 14525 - DNA, 21 bp, Homo sapiens
tatcagaagcrtagggtctta

SEQ ID NO: 14526 - DNA, 21 bp, Homo sapiens
cttcacgaaaycctagtcccc

SEQ ID NO: 14527 - DNA, 21 bp, Homo sapiens
atgataatttycgatgatctt

SEQ ID NO: 14528 - DNA, 21 bp, Homo sapiens
ttggaaaactrtcctgtagat

SEQ ID NO: 14529 - DNA, 21 bp, Homo sapiens
tgatgatgaargaaaggtgga

SEQ ID NO: 14530 - DNA, 21 bp, Homo sapiens
aactttcaccwgtttactcaa

SEQ ID NO: 14531 - DNA, 21 bp, Homo sapiens
ctgaaattctrggatatatgg

SEQ ID NO: 14532 - DNA, 21 bp, Homo sapiens
atgaattgggwtggaaaggtt

SEQ ID NO: 14533 - DNA, 21 bp, Homo sapiens
tgtggaaaatktggtccccag

SEQ ID NO: 14534 - DNA, 21 bp, Homo sapiens
tgtgtgtctgygctggggaag

SEQ ID NO: 14535 - DNA, 21 bp, Homo sapiens
gggttttcccygtcattgggg

SEQ ID NO: 14536 - DNA, 21 bp, Homo sapiens
agtttgaaggrggtgggggag

SEQ ID NO: 14537 - DNA, 21 bp, Homo sapiens
cacaaaagaawgaaagtcaag

SEQ ID NO: 14538 - DNA, 21 bp, Homo sapiens
gtacagaactkcagaactaga

SEQ ID NO: 14539 - DNA, 21 bp, Homo sapiens
tctgtgtgcaytgcactgaat

SEQ ID NO: 14540 - DNA, 21 bp, Homo sapiens
tacacagcttyaaaaaagaag

SEQ ID NO: 14541 - DNA, 21 bp, Homo sapiens
aatcaatatastaatctcaac

SEQ ID NO: 14542 - DNA, 21 bp, Homo sapiens
ccacacctccrggtcccggcc

SEQ ID NO: 14543 - DNA, 21 bp, Homo sapiens
tttatatttamatcgttaagg

SEQ ID NO: 14544 - DNA, 21 bp, Homo sapiens
atggaagtagraccatgctcc

SEQ ID NO: 14545 - DNA, 21 bp, Homo sapiens
aattgaaatcrgtgaccttga

SEQ ID NO: 14546 - DNA, 21 bp, Homo sapiens
acatacagcaktttagttacc

SEQ ID NO: 14547 - DNA, 21 bp, Homo sapiens
tttttaccttsagtgcttagg

SEQ ID NO: 14548 - DNA, 21 bp, Homo sapiens
aagaatattgyctgattgttt

SEQ ID NO: 14549 - DNA, 21 bp, Homo sapiens
acctagaaaayggcgatggtg

SEQ ID NO: 14550 - DNA, 21 bp, Homo sapiens
aagaagggacrgcttcttgcc

SEQ ID NO: 14551 - DNA, 21 bp, Homo sapiens
aatgtcaaaamtgttgaattt

SEQ ID NO: 14552 - DNA, 21 bp, Homo sapiens
tgtctaaatgraagagttcat

SEQ ID NO: 14553 - DNA, 21 bp, Homo sapiens
catggtgttcrgaaaatatta

SEQ ID NO: 14554 - DNA, 21 bp, Homo sapiens
aaaacagtagkagattccatt

SEQ ID NO: 14555 - DNA, 21 bp, Homo sapiens
acaaggtctcrttaacacatt

SEQ ID NO: 14556 - DNA, 21 bp, Homo sapiens
agttgggggtrcaagtatctg

SEQ ID NO: 14557 - DNA, 21 bp, Homo sapiens
ccctcaagggmcattggtttc

SEQ ID NO: 14558 - DNA, 21 bp, Homo sapiens
caaaaattacrtttgtcaacc

SEQ ID NO: 14559 - DNA, 21 bp, Homo sapiens
ccaccataagmttcaaagatt

SEQ ID NO: 14560 - DNA, 21 bp, Homo sapiens
tatatggtgayggacatagat

SEQ ID NO: 14561 - DNA, 21 bp, Homo sapiens
ctcagatacascctggatgtt

SEQ ID NO: 14562 - DNA, 21 bp, Homo sapiens
ccaaatcctgktattctcaca

SEQ ID NO: 14563 - DNA, 21 bp, Homo sapiens
gtgaaaaggcstagaagatct

SEQ ID NO: 14564 - DNA, 21 bp, Homo sapiens
gtcaagatgcytattctcccc

SEQ ID NO: 14565 - DNA, 21 bp, Homo sapiens
tttctttccaygagtacatca

SEQ ID NO: 14566 - DNA, 21 bp, Homo sapiens
atcatcatccmtgcagaaaag

SEQ ID NO: 14567 - DNA, 21 bp, Homo sapiens
attaggaaaargtgaaggagg

SEQ ID NO: 14568 - DNA, 21 bp, Homo sapiens
atccagcaaamcacggtccta

SEQ ID NO: 14569 - DNA, 21 bp, Homo sapiens
gggcataattmtcccaattaa

SEQ ID NO: 14570 - DNA, 21 bp, Homo sapiens
gcaagccatgwggacagtcac

SEQ ID NO: 14571 - DNA, 21 bp, Homo sapiens
ctctctcagawtgaaagcatc

SEQ ID NO: 14572 - DNA, 21 bp, Homo sapiens
caaacaaaatyctgacatact

SEQ ID NO: 14573 - DNA, 21 bp, Homo sapiens
tttgccacctrtgtcattgat

SEQ ID NO: 14574 - DNA, 21 bp, Homo sapiens
gaaaacttcayagatgaccct

SEQ ID NO: 14575 - DNA, 21 bp, Homo sapiens
aacactgatarccctgtacaa

SEQ ID NO: 14576 - DNA, 21 bp, Homo sapiens
ctagccaggcscaaagattat

SEQ ID NO: 14577 - DNA, 21 bp, Homo sapiens
tagctgtcacytggtatgtct

SEQ ID NO: 14578 - DNA, 21 bp, Homo sapiens
ttcatggatcytcagacagga

SEQ ID NO: 14579 - DNA, 21 bp, Homo sapiens
cagaatagccrtgacatttgt

SEQ ID NO: 14580 - DNA, 21 bp, Homo sapiens
taagagcctgmagattaaaga

SEQ ID NO: 14581 - DNA, 21 bp, Homo sapiens
agtgagaagcrgtagtaacca

SEQ ID NO: 14582 - DNA, 21 bp, Homo sapiens
gctccgtagcmggtcctcagt

SEQ ID NO: 14583 - DNA, 21 bp, Homo sapiens
attacagattwttcaggccaa

SEQ ID NO: 14584 - DNA, 21 bp, Homo sapiens
gatcctaaaamtttttctggg

SEQ ID NO: 14585 - DNA, 21 bp, Homo sapiens
tctactcccawtctggggaca

SEQ ID NO: 14586 - DNA, 21 bp, Homo sapiens
ggaaattaacracaatgattg

SEQ ID NO: 14587 - DNA, 21 bp, Homo sapiens
ttcttgcactragtgttgaaa

SEQ ID NO: 14588 - DNA, 21 bp, Homo sapiens
ctcttctataycctggtatgt

SEQ ID NO: 14589 - DNA, 21 bp, Homo sapiens
ttttgtataayaactattgta

SEQ ID NO: 14590 - DNA, 21 bp, Homo sapiens
tatcatttgtytggagaaaag

SEQ ID NO: 14591 - DNA, 21 bp, Homo sapiens
actattatagyaaattctcag

SEQ ID NO: 14592 - DNA, 21 bp, Homo sapiens
taaaagaagcraaacatgtcc

SEQ ID NO: 14593 - DNA, 21 bp, Homo sapiens
gactcaaccasaccctccaaa

SEQ ID NO: 14594 - DNA, 21 bp, Homo sapiens
tacatgctcaytgattttgat

SEQ ID NO: 14595 - DNA, 21 bp, Homo sapiens
gctgttgaacytctctaagaa

SEQ ID NO: 14596 - DNA, 21 bp, Homo sapiens
tgttgcagatyatttagacat

SEQ ID NO: 14597 - DNA, 21 bp, Homo sapiens
tgctagttgtrtaatatgaaa

SEQ ID NO: 14598 - DNA, 21 bp, Homo sapiens
gacatgttttstttctctgaa

SEQ ID NO: 14599 - DNA, 21 bp, Homo sapiens
ggaggcagctycatcctttaa

SEQ ID NO: 14600 - DNA, 21 bp, Homo sapiens
aaggaggcctsttgagcttct

SEQ ID NO: 14601 - DNA, 21 bp, Homo sapiens
actaagaaatkgatccaaaat

SEQ ID NO: 14602 - DNA, 21 bp, Homo sapiens
caataaaaacyctggaccagt

SEQ ID NO: 14603 - DNA, 21 bp, Homo sapiens
ctgaaagaagmaagcctggat

SEQ ID NO: 14604 - DNA, 21 bp, Homo sapiens
tgggctggggktggctgcaaa

SEQ ID NO: 14605 - DNA, 21 bp, Homo sapiens
ctagaaacatrggctccaggc

SEQ ID NO: 14606 - DNA, 21 bp, Homo sapiens
acacattgcaycacattggga

SEQ ID NO: 14607 - DNA, 21 bp, Homo sapiens
catggagaaaratagacaata

SEQ ID NO: 14608 - DNA, 21 bp, Homo sapiens
ttttatataayacgaaatata

SEQ ID NO: 14609 - DNA, 21 bp, Homo sapiens
aagattccaaytgaaatatat

SEQ ID NO: 14610 - DNA, 21 bp, Homo sapiens
atgctccactractgagatat

SEQ ID NO: 14611 - DNA, 21 bp, Homo sapiens
tggcggcggtstcaatgtcag

SEQ ID NO: 14612 - DNA, 21 bp, Homo sapiens
acccatgcacrtaagaggtat

SEQ ID NO: 14613 - DNA, 21 bp, Homo sapiens
ctgtatcgtaygaatatagat

SEQ ID NO: 14614 - DNA, 21 bp, Homo sapiens
caatcttgggrtgttggatga

SEQ ID NO: 14615 - DNA, 21 bp, Homo sapiens
caatacttcasttttttaagg

SEQ ID NO: 14616 - DNA, 21 bp, Homo sapiens
catgaggcaawgaatgttttt

SEQ ID NO: 14617 - DNA, 21 bp, Homo sapiens
gtcatacttaygtggatttca

SEQ ID NO: 14618 - DNA, 21 bp, Homo sapiens
gtgtgagtatstaaggtaaga

SEQ ID NO: 14619 - DNA, 21 bp, Homo sapiens
ttccttccctrtgggtcttgc

SEQ ID NO: 14620 - DNA, 21 bp, Homo sapiens
tactaaaactmttcagcattg

SEQ ID NO: 14621 - DNA, 21 bp, Homo sapiens
cttgtgtttgytttcataata

SEQ ID NO: 14622 - DNA, 21 bp, Homo sapiens
tctaacattayctgaaataca

SEQ ID NO: 14623 - DNA, 21 bp, Homo sapiens
gaattatcccrgaagtgaaca

SEQ ID NO: 14624 - DNA, 21 bp, Homo sapiens
gctttgccagygtatccgaaa

SEQ ID NO: 14625 - DNA, 21 bp, Homo sapiens
aagtacacaawgctgatattg

SEQ ID NO: 14626 - DNA, 21 bp, Homo sapiens
ttagagagctyccaaagcact

SEQ ID NO: 14627 - DNA, 21 bp, Homo sapiens
ttccacatcakcctaaactaa

SEQ ID NO: 14628 - DNA, 21 bp, Homo sapiens
ggagggccagygaaaaagaga

SEQ ID NO: 14629 - DNA, 21 bp, Homo sapiens
gaaccgatatrtcagtacctt

SEQ ID NO: 14630 - DNA, 21 bp, Homo sapiens
aactttgaaayagcaccagat

SEQ ID NO: 14631 - DNA, 21 bp, Homo sapiens
gagttcaactktctggtcact

SEQ ID NO: 14632 - DNA, 21 bp, Homo sapiens
cccaccaggayactgtttttc

SEQ ID NO: 14633 - DNA, 21 bp, Homo sapiens
ttggaagggcrgtatcatata

SEQ ID NO: 14634 - DNA, 21 bp, Homo sapiens
gtcatttgttragggcatgtc

SEQ ID NO: 14635 - DNA, 21 bp, Homo sapiens
tctgaggccaytggaacgagg

SEQ ID NO: 14636 - DNA, 21 bp, Homo sapiens
ccaggcacgamtattagattt

SEQ ID NO: 14637 - DNA, 21 bp, Homo sapiens
attcccacttscagctgtctt

SEQ ID NO: 14638 - DNA, 21 bp, Homo sapiens
agtttttcctrcctttctgcc

SEQ ID NO: 14639 - DNA, 21 bp, Homo sapiens
gagcagacaayggaccagtgt

SEQ ID NO: 14640 - DNA, 21 bp, Homo sapiens
gcccagaaggyggtttttcat

SEQ ID NO: 14641 - DNA, 21 bp, Homo sapiens
tcttacccatscatccctttt

SEQ ID NO: 14642 - DNA, 21 bp, Homo sapiens
tatgcctcttyaatcttcttc

SEQ ID NO: 14643 - DNA, 21 bp, Homo sapiens
ctagcttggtmtgaacctcat

SEQ ID NO: 14644 - DNA, 21 bp, Homo sapiens
gtttaacttcygtccctacct

SEQ ID NO: 14645 - DNA, 21 bp, Homo sapiens
aaggctggctrctgataaaag

SEQ ID NO: 14646 - DNA, 21 bp, Homo sapiens
aggcaaggggkccctggaagt

SEQ ID NO: 14647 - DNA, 21 bp, Homo sapiens
ctcttcccacmtctgatcact

SEQ ID NO: 14648 - DNA, 21 bp, Homo sapiens
acatagccttrgtgacccatt

SEQ ID NO: 14649 - DNA, 21 bp, Homo sapiens
caagcaagttmacacaatttt

SEQ ID NO: 14650 - DNA, 21 bp, Homo sapiens
gtagactgtgrattatcaaat

SEQ ID NO: 14651 - DNA, 21 bp, Homo sapiens
tgccacattartccttcttat

SEQ ID NO: 14652 - DNA, 21 bp, Homo sapiens
atggttaggakccaaattgat

SEQ ID NO: 14653 - DNA, 21 bp, Homo sapiens
tgaggctagargctgcatctc

SEQ ID NO: 14654 - DNA, 21 bp, Homo sapiens
tatcaattcayttatttattt

SEQ ID NO: 14655 - DNA, 21 bp, Homo sapiens
acacatttaargcatatcagt

SEQ ID NO: 14656 - DNA, 21 bp, Homo sapiens
atctcccataygccagcacta

SEQ ID NO: 14657 - DNA, 21 bp, Homo sapiens
tgacaatagayccacacctca

SEQ ID NO: 14658 - DNA, 21 bp, Homo sapiens
gagttttagakggtgagaaga

SEQ ID NO: 14659 - DNA, 21 bp, Homo sapiens
gtacagtgacracttacttat

SEQ ID NO: 14660 - DNA, 21 bp, Homo sapiens
cttaatttgaycaaggattgc

SEQ ID NO: 14661 - DNA, 21 bp, Homo sapiens
ttgctttaggstgctggtctc

SEQ ID NO: 14662 - DNA, 21 bp, Homo sapiens
agaagcagtartgtgttaaca

SEQ ID NO: 14663 - DNA, 21 bp, Homo sapiens
tctaccaacamgctgaattta

SEQ ID NO: 14664 - DNA, 21 bp, Homo sapiens
gtggtgagggmcttgttaatt

SEQ ID NO: 14665 - DNA, 21 bp, Homo sapiens
ctgagagtcasctgtagtccc

SEQ ID NO: 14666 - DNA, 21 bp, Homo sapiens
ttaggcttgcyttattcaaaa

SEQ ID NO: 14667 - DNA, 21 bp, Homo sapiens
acactacctawaatgtcaaaa

SEQ ID NO: 14668 - DNA, 21 bp, Homo sapiens
agacgtatagrgggaaaaaat

SEQ ID NO: 14669 - DNA, 21 bp, Homo sapiens
ggctcattttsgagttgtttt

SEQ ID NO: 14670 - DNA, 21 bp, Homo sapiens
gtgtgttttayattaccctag

SEQ ID NO: 14671 - DNA, 21 bp, Homo sapiens
tctgctagaaygtggcatata

SEQ ID NO: 14672 - DNA, 21 bp, Homo sapiens
cagtttccagrggcactgatg

SEQ ID NO: 14673 - DNA, 21 bp, Homo sapiens
ctaaatagacrtaattatcag

SEQ ID NO: 14674 - DNA, 21 bp, Homo sapiens
tcttttttcastgactgcaca

SEQ ID NO: 14675 - DNA, 21 bp, Homo sapiens
agctgggcatkagttgagcga

SEQ ID NO: 14676 - DNA, 21 bp, Homo sapiens
attttatttcytgtccctacc

SEQ ID NO: 14677 - DNA, 21 bp, Homo sapiens
ctatttcagtrgtgttttgat

SEQ ID NO: 14678 - DNA, 21 bp, Homo sapiens
gaaggcctcayatacttaatt

SEQ ID NO: 14679 - DNA, 21 bp, Homo sapiens
ccatacaccargaaaagtttc

SEQ ID NO: 14680 - DNA, 21 bp, Homo sapiens
atggctgttcmtaagaaatcc

SEQ ID NO: 14681 - DNA, 21 bp, Homo sapiens
acgggaaggcyaaagagccag

SEQ ID NO: 14682 - DNA, 21 bp, Homo sapiens
gaaatatggtraacctacatc

SEQ ID NO: 14683 - DNA, 21 bp, Homo sapiens
caaattgaaarctatacaaag

SEQ ID NO: 14684 - DNA, 21 bp, Homo sapiens
taagggggcarcttgctttag

SEQ ID NO: 14685 - DNA, 21 bp, Homo sapiens
ccattcttccrgagtttataa

SEQ ID NO: 14686 - DNA, 21 bp, Homo sapiens
agctgaaaaaytttagttcaa

SEQ ID NO: 14687 - DNA, 21 bp, Homo sapiens
actgtataatmcttcatgtga

SEQ ID NO: 14688 - DNA, 21 bp, Homo sapiens
gttactggttyagacaagtaa

SEQ ID NO: 14689 - DNA, 21 bp, Homo sapiens
tgtcacatgtrccttaaaact

SEQ ID NO: 14690 - DNA, 21 bp, Homo sapiens
ataaagggaarataggatcca

SEQ ID NO: 14691 - DNA, 21 bp, Homo sapiens
tgcattttttmaacatagtaa

SEQ ID NO: 14692 - DNA, 21 bp, Homo sapiens
taccgtttctrctttgtttgg

SEQ ID NO: 14693 - DNA, 21 bp, Homo sapiens
ctcttccttgytgtgagtttt

SEQ ID NO: 14694 - DNA, 21 bp, Homo sapiens
tctcctggggytcggctttcc

SEQ ID NO: 14695 - DNA, 21 bp, Homo sapiens
ctgcacgtcgwtattaaaagt

SEQ ID NO: 14696 - DNA, 21 bp, Homo sapiens
atgaaactcarctggtaatgc

SEQ ID NO: 14697 - DNA, 21 bp, Homo sapiens
tgcctgtgagycaagcatctg

SEQ ID NO: 14698 - DNA, 21 bp, Homo sapiens
gtagttttacrgcttgccttc

SEQ ID NO: 14699 - DNA, 21 bp, Homo sapiens
ggaacaagackctcatggtac

SEQ ID NO: 14700 - DNA, 21 bp, Homo sapiens
ctcaggcagtytcaggaagac

SEQ ID NO: 14701 - DNA, 21 bp, Homo sapiens
atgatgagctraaccagcact

SEQ ID NO: 14702 - DNA, 21 bp, Homo sapiens
cacgaatttcraacaacacag

SEQ ID NO: 14703 - DNA, 21 bp, Homo sapiens
agcaccttgtyccgtgctctg

SEQ ID NO: 14704 - DNA, 21 bp, Homo sapiens
ctaggaagtcrctctgtgtct

SEQ ID NO: 14705 - DNA, 21 bp, Homo sapiens
tttaagtttcytcaagagggg

SEQ ID NO: 14706 - DNA, 21 bp, Homo sapiens
gtcaatcatcytctaactaag

SEQ ID NO: 14707 - DNA, 21 bp, Homo sapiens
aaacagacccrttgttttggc

SEQ ID NO: 14708 - DNA, 21 bp, Homo sapiens
ctggaaattarggcccagaaa

SEQ ID NO: 14709 - DNA, 21 bp, Homo sapiens
aattctttgtmttgtatggcc

SEQ ID NO: 14710 - DNA, 21 bp, Homo sapiens
gcaactttccwtccctttcac

SEQ ID NO: 14711 - DNA, 21 bp, Homo sapiens
aacagctaacyatgcagcggc

SEQ ID NO: 14712 - DNA, 21 bp, Homo sapiens
caatgttgctrgaaaatgaaa

SEQ ID NO: 14713 - DNA, 21 bp, Homo sapiens
gcaacttctaycttcatggtt

SEQ ID NO: 14714 - DNA, 21 bp, Homo sapiens
cacaacaatakcccttggcca

SEQ ID NO: 14715 - DNA, 21 bp, Homo sapiens
ctattctagtscttacacatc

SEQ ID NO: 14716 - DNA, 21 bp, Homo sapiens
gacaggcctarggaagccatg

SEQ ID NO: 14717 - DNA, 21 bp, Homo sapiens
atataaatagrgaaagatggt

SEQ ID NO: 14718 - DNA, 21 bp, Homo sapiens
agctgaaattyttcataaaaa

SEQ ID NO: 14719 - DNA, 21 bp, Homo sapiens
acctgttgtgyccctttggta

SEQ ID NO: 14720 - DNA, 21 bp, Homo sapiens
caaaatgcttyagtgtgtcat

SEQ ID NO: 14721 - DNA, 21 bp, Homo sapiens
cacatacagcmagttcctcac

SEQ ID NO: 14722 - DNA, 21 bp, Homo sapiens
atatcattttycagtatgcct

SEQ ID NO: 14723 - DNA, 21 bp, Homo sapiens
tatttgcagawgagaagaatc

SEQ ID NO: 14724 - DNA, 21 bp, Homo sapiens
tgttaatgtgkgaactttcca

SEQ ID NO: 14725 - DNA, 21 bp, Homo sapiens
tttcctcatakcactgtcata

SEQ ID NO: 14726 - DNA, 21 bp, Homo sapiens
ttccagtcagsgtctcctcaa

SEQ ID NO: 14727 - DNA, 21 bp, Homo sapiens
tattgctagcygtgttaagga

SEQ ID NO: 14728 - DNA, 21 bp, Homo sapiens
gttggcagcasagccagatta

SEQ ID NO: 14729 - DNA, 21 bp, Homo sapiens
aacagattgcrtttatcaacc

SEQ ID NO: 14730 - DNA, 21 bp, Homo sapiens
ataaaacacaytctagatcgt

SEQ ID NO: 14731 - DNA, 21 bp, Homo sapiens
tcagcaacagkcatattaaca

SEQ ID NO: 14732 - DNA, 21 bp, Homo sapiens
gaacatttgcygtttgctgcc

SEQ ID NO: 14733 - DNA, 21 bp, Homo sapiens
tcactccaagyttcaaccatc

SEQ ID NO: 14734 - DNA, 21 bp, Homo sapiens
ttttctcctcrcatttgctta

SEQ ID NO: 14735 - DNA, 21 bp, Homo sapiens
tgacaatcaayggcaggcata

SEQ ID NO: 14736 - DNA, 21 bp, Homo sapiens
ccagtttcacrcaagaaggaa

SEQ ID NO: 14737 - DNA, 21 bp, Homo sapiens
tgttaaggttrattccagttc

SEQ ID NO: 14738 - DNA, 21 bp, Homo sapiens
tctagatgcartctgcacact

SEQ ID NO: 14739 - DNA, 21 bp, Homo sapiens
ggttcttcctrgattatgctc

SEQ ID NO: 14740 - DNA, 21 bp, Homo sapiens
agggtattgayagggaaagat

SEQ ID NO: 14741 - DNA, 21 bp, Homo sapiens
tgctgaatgayggtcaccagc

SEQ ID NO: 14742 - DNA, 21 bp, Homo sapiens
agaagaaaatyctgctggaga

SEQ ID NO: 14743 - DNA, 21 bp, Homo sapiens
acaaagatatycacagaaatg

SEQ ID NO: 14744 - DNA, 21 bp, Homo sapiens
gcagagccaartgtggtcaga

SEQ ID NO: 14745 - DNA, 21 bp, Homo sapiens
ttttgccaacratctctacat

SEQ ID NO: 14746 - DNA, 21 bp, Homo sapiens
tccaacatctrtatatgcagt

SEQ ID NO: 14747 - DNA, 21 bp, Homo sapiens
aatctcaaacrggctgcgagg

SEQ ID NO: 14748 - DNA, 21 bp, Homo sapiens
gtctcaaaaaraagaaggaca

SEQ ID NO: 14749 - DNA, 21 bp, Homo sapiens
tttaagaacaytgggccgggc

SEQ ID NO: 14750 - DNA, 21 bp, Homo sapiens
gttgtgcagtrtatagtgatg

SEQ ID NO: 14751 - DNA, 21 bp, Homo sapiens
agttcatctasagagtcatgt

SEQ ID NO: 14752 - DNA, 21 bp, Homo sapiens
tgaatatatcrtttgcatcta

SEQ ID NO: 14753 - DNA, 21 bp, Homo sapiens
catcattcagytttttctttt

SEQ ID NO: 14754 - DNA, 21 bp, Homo sapiens
ttagttatccwttgtcaacta

SEQ ID NO: 14755 - DNA, 21 bp, Homo sapiens
accgtgcctcrcctgcattct

SEQ ID NO: 14756 - DNA, 21 bp, Homo sapiens
aattttagtgwgtagtgttct

SEQ ID NO: 14757 - DNA, 21 bp, Homo sapiens
gtgtgtgtgtsagtctcgttc

SEQ ID NO: 14758 - DNA, 21 bp, Homo sapiens
gtccttaagtkattttctaaa

SEQ ID NO: 14759 - DNA, 21 bp, Homo sapiens
ctgttccaggrtatgtaagaa

SEQ ID NO: 14760 - DNA, 21 bp, Homo sapiens
ggggagggacyttcccgcagc

SEQ ID NO: 14761 - DNA, 21 bp, Homo sapiens
ttatcctaccraaaagttctt

SEQ ID NO: 14762 - DNA, 21 bp, Homo sapiens
atctggaatakaaatagttta

SEQ ID NO: 14763 - DNA, 21 bp, Homo sapiens
tctaattttgrtaggtgatgg

SEQ ID NO: 14764 - DNA, 21 bp, Homo sapiens
aagtgacaaayggcattattg

SEQ ID NO: 14765 - DNA, 21 bp, Homo sapiens
cttatctagcrgtgaatttga

SEQ ID NO: 14766 - DNA, 21 bp, Homo sapiens
agctcacccartttttatacg

SEQ ID NO: 14767 - DNA, 21 bp, Homo sapiens
gtgtactgttrggaaggggtt

SEQ ID NO: 14768 - DNA, 21 bp, Homo sapiens
aaacaaatttrgttctatttt

SEQ ID NO: 14769 - DNA, 21 bp, Homo sapiens
agagttgaccyggcccaggat

SEQ ID NO: 14770 - DNA, 21 bp, Homo sapiens
ggaggcagatrtctagctagc

SEQ ID NO: 14771 - DNA, 21 bp, Homo sapiens
gttttcctttmtgggttgcaa

SEQ ID NO: 14772 - DNA, 21 bp, Homo sapiens
gatagttaggrgccataagca

SEQ ID NO: 14773 - DNA, 21 bp, Homo sapiens
aggattaagargatctgatgg

SEQ ID NO: 14774 - DNA, 21 bp, Homo sapiens
acccaattttsaatcctagct

SEQ ID NO: 14775 - DNA, 21 bp, Homo sapiens
tatcccttggkcatagcctat

SEQ ID NO: 14776 - DNA, 21 bp, Homo sapiens
ccaccgaccarttgtgagatt

SEQ ID NO: 14777 - DNA, 21 bp, Homo sapiens
ttgtggtcagytgcggcagca

SEQ ID NO: 14778 - DNA, 21 bp, Homo sapiens
atcaacttgcrtggagcgtat

SEQ ID NO: 14779 - DNA, 21 bp, Homo sapiens
ctctcagaacytcttgtgtgg

SEQ ID NO: 14780 - DNA, 21 bp, Homo sapiens
agtatatctcygcttccaaac

SEQ ID NO: 14781 - DNA, 21 bp, Homo sapiens
aagtgtggttmtaaattgagt

SEQ ID NO: 14782 - DNA, 21 bp, Homo sapiens
attgcaataaractcagacca

SEQ ID NO: 14783 - DNA, 21 bp, Homo sapiens
tagttagtctrtggttgaata

SEQ ID NO: 14784 - DNA, 21 bp, Homo sapiens
tgtagatcaarcaggctttgt

SEQ ID NO: 14785 - DNA, 21 bp, Homo sapiens
aggccaaagtwtgtcaaattt

SEQ ID NO: 14786 - DNA, 21 bp, Homo sapiens
cagagaagtgrcattattaat

SEQ ID NO: 14787 - DNA, 21 bp, Homo sapiens
agtatgttgartttcttaatt

SEQ ID NO: 14788 - DNA, 21 bp, Homo sapiens
gcttgcggtarctcctaggca

SEQ ID NO: 14789 - DNA, 21 bp, Homo sapiens
agaaattctcrtgacatttcc

SEQ ID NO: 14790 - DNA, 21 bp, Homo sapiens
atgttctgtaragggatgacc

SEQ ID NO: 14791 - DNA, 21 bp, Homo sapiens
gattaatgaaycacacagttt

SEQ ID NO: 14792 - DNA, 21 bp, Homo sapiens
atagttctgtrcactccaaca

SEQ ID NO: 14793 - DNA, 21 bp, Homo sapiens
cactcattgcyattgtttgat

SEQ ID NO: 14794 - DNA, 21 bp, Homo sapiens
ggggaggatawtccctgtctt

SEQ ID NO: 14795 - DNA, 21 bp, Homo sapiens
gtttcctcggyactataaaag

SEQ ID NO: 14796 - DNA, 21 bp, Homo sapiens
gctgtggcacractgtctgct

SEQ ID NO: 14797 - DNA, 21 bp, Homo sapiens
agaaagctttsggcttcccta

SEQ ID NO: 14798 - DNA, 21 bp, Homo sapiens
atcctcgggtraaaatcacag

SEQ ID NO: 14799 - DNA, 21 bp, Homo sapiens
ttcacgtgctstaagcatgag

SEQ ID NO: 14800 - DNA, 21 bp, Homo sapiens
gagccatgatygaattcaagg

SEQ ID NO: 14801 - DNA, 21 bp, Homo sapiens
gcccagggacrccataaatcg

SEQ ID NO: 14802 - DNA, 21 bp, Homo sapiens
ataacagaacrgttgggcagg

SEQ ID NO: 14803 - DNA, 21 bp, Homo sapiens
gtaattttgtytctcagtctg

SEQ ID NO: 14804 - DNA, 21 bp, Homo sapiens
gtcttgacttygcttcgacct

SEQ ID NO: 14805 - DNA, 21 bp, Homo sapiens
gtgttgaaatwaagcccaagc

SEQ ID NO: 14806 - DNA, 21 bp, Homo sapiens
cctccacttcraatcctgtct

SEQ ID NO: 14807 - DNA, 21 bp, Homo sapiens
aacaaagagargggccttcca

SEQ ID NO: 14808 - DNA, 21 bp, Homo sapiens
tccacagggcrcattggaaaa

SEQ ID NO: 14809 - DNA, 21 bp, Homo sapiens
ataattttttwaaaagactac

SEQ ID NO: 14810 - DNA, 21 bp, Homo sapiens
cagaatctgaktctttaacta

SEQ ID NO: 14811 - DNA, 21 bp, Homo sapiens
ttagccaaagwtgtagttata

SEQ ID NO: 14812 - DNA, 21 bp, Homo sapiens
caaggagccartatgctagaa

SEQ ID NO: 14813 - DNA, 21 bp, Homo sapiens
agaagaaaaamctatgagaag

SEQ ID NO: 14814 - DNA, 21 bp, Homo sapiens
gtctcacaaakttcaacttta

SEQ ID NO: 14815 - DNA, 21 bp, Homo sapiens
atagatgctgrgtggatgccc

SEQ ID NO: 14816 - DNA, 21 bp, Homo sapiens
tatgattgtcmgagtcaaagt

SEQ ID NO: 14817 - DNA, 21 bp, Homo sapiens
cagagcccagygccctttcca

SEQ ID NO: 14818 - DNA, 21 bp, Homo sapiens
ctaatgagtamcagaagtttt

SEQ ID NO: 14819 - DNA, 21 bp, Homo sapiens
taacaggaggwgatcctatgg

SEQ ID NO: 14820 - DNA, 21 bp, Homo sapiens
cttgtaataaygactttgtgt

SEQ ID NO: 14821 - DNA, 21 bp, Homo sapiens
ttcttatttayggttctgctc

SEQ ID NO: 14822 - DNA, 21 bp, Homo sapiens
caaaacaattrtgacagttaa

SEQ ID NO: 14823 - DNA, 21 bp, Homo sapiens
aacattctcawcctgctttca

SEQ ID NO: 14824 - DNA, 21 bp, Homo sapiens
ttctttgagcmcacgaggacc

SEQ ID NO: 14825 - DNA, 21 bp, Homo sapiens
ctggtagagaygggaagcatg

SEQ ID NO: 14826 - DNA, 21 bp, Homo sapiens
ttttcttgtayactgttgttt

SEQ ID NO: 14827 - DNA, 21 bp, Homo sapiens
tcattttaggrttctacagta

SEQ ID NO: 14828 - DNA, 21 bp, Homo sapiens
agtaattccartgggttgcca

SEQ ID NO: 14829 - DNA, 21 bp, Homo sapiens
cctttattgarcttgtacctg

SEQ ID NO: 14830 - DNA, 21 bp, Homo sapiens
attatgcatcrtagtgtacat

SEQ ID NO: 14831 - DNA, 21 bp, Homo sapiens
agtctcgaacraagaagggat

SEQ ID NO: 14832 - DNA, 21 bp, Homo sapiens
ccttttttacrcaccaagttg

SEQ ID NO: 14833 - DNA, 21 bp, Homo sapiens
ttgaatacctytgtctcaagt

SEQ ID NO: 14834 - DNA, 21 bp, Homo sapiens
taaaggaaacygcagctttga

SEQ ID NO: 14835 - DNA, 21 bp, Homo sapiens
cgttagttttrtttatggttt

SEQ ID NO: 14836 - DNA, 21 bp, Homo sapiens
tgaaaggtcartgggagctac

SEQ ID NO: 14837 - DNA, 21 bp, Homo sapiens
ggcaccagtgrctcaatttgc

SEQ ID NO: 14838 - DNA, 21 bp, Homo sapiens
atttatgacaygatgtataga

SEQ ID NO: 14839 - DNA, 21 bp, Homo sapiens
cttaatagggragctttatca

SEQ ID NO: 14840 - DNA, 21 bp, Homo sapiens
gattcagggartacttagatc

SEQ ID NO: 14841 - DNA, 21 bp, Homo sapiens
aatgagtagaragagagtcac

SEQ ID NO: 14842 - DNA, 21 bp, Homo sapiens
gtattattagyttctttgcat

SEQ ID NO: 14843 - DNA, 21 bp, Homo sapiens
ggggggctcaytatggtctct

SEQ ID NO: 14844 - DNA, 21 bp, Homo sapiens
gtgagcattgwggaatacaga

SEQ ID NO: 14845 - DNA, 21 bp, Homo sapiens
tttcccaagcwttctccctcc

SEQ ID NO: 14846 - DNA, 21 bp, Homo sapiens
gaaattatttrctgatcgggc

SEQ ID NO: 14847 - DNA, 21 bp, Homo sapiens
tctgaaagctyacattgaaat

SEQ ID NO: 14848 - DNA, 21 bp, Homo sapiens
ccttttctcaygcattcattc

SEQ ID NO: 14849 - DNA, 21 bp, Homo sapiens
cctatcctctycttccccttc

SEQ ID NO: 14850 - DNA, 21 bp, Homo sapiens
taattaagtaytaccctcagc

SEQ ID NO: 14851 - DNA, 21 bp, Homo sapiens
atagatatttktcatctgagg

SEQ ID NO: 14852 - DNA, 21 bp, Homo sapiens
ctcagaacacraaaaaccaaa

SEQ ID NO: 14853 - DNA, 21 bp, Homo sapiens
gttttggaaayggagatactt

SEQ ID NO: 14854 - DNA, 21 bp, Homo sapiens
atcattttttwaaatcagatc

SEQ ID NO: 14855 - DNA, 21 bp, Homo sapiens
ctctttttttyattatgaaga

SEQ ID NO: 14856 - DNA, 21 bp, Homo sapiens
tctgacctagyatgtcttctc

SEQ ID NO: 14857 - DNA, 21 bp, Homo sapiens
gcaaagtatasagagtaagtc

SEQ ID NO: 14858 - DNA, 21 bp, Homo sapiens
aaaagcagaamacatgtcaaa

SEQ ID NO: 14859 - DNA, 21 bp, Homo sapiens
tttgagagacratgaatacta

SEQ ID NO: 14860 - DNA, 21 bp, Homo sapiens
tgatgttaatrttttcgttta

SEQ ID NO: 14861 - DNA, 21 bp, Homo sapiens
catcgaaaagkaactattttt

SEQ ID NO: 14862 - DNA, 21 bp, Homo sapiens
tgaaaaataasaccaaatgtt

SEQ ID NO: 14863 - DNA, 21 bp, Homo sapiens
ccatttgtaascccgagaata

SEQ ID NO: 14864 - DNA, 21 bp, Homo sapiens
cagcaaaaackttgtcttcta

SEQ ID NO: 14865 - DNA, 21 bp, Homo sapiens
cctggttcaargacaggcata

SEQ ID NO: 14866 - DNA, 21 bp, Homo sapiens
caatgctgttsgttagcccag

SEQ ID NO: 14867 - DNA, 21 bp, Homo sapiens
catggattacrtgtatcttac

SEQ ID NO: 14868 - DNA, 21 bp, Homo sapiens
tgattttaacrgagaatttaa

SEQ ID NO: 14869 - DNA, 21 bp, Homo sapiens
cagaaaaacaygtgactaaaa

SEQ ID NO: 14870 - DNA, 21 bp, Homo sapiens
gggtacacccraattgaataa

SEQ ID NO: 14871 - DNA, 21 bp, Homo sapiens
gcttctcacakggctgttaag

SEQ ID NO: 14872 - DNA, 21 bp, Homo sapiens
ttatgtctttwtgcacttgga

SEQ ID NO: 14873 - DNA, 21 bp, Homo sapiens
gaccaagaccrtcacaaatat

SEQ ID NO: 14874 - DNA, 21 bp, Homo sapiens
aggtcactgcygaaatgttgt

SEQ ID NO: 14875 - DNA, 21 bp, Homo sapiens
gtctgtttccytagctggatc

SEQ ID NO: 14876 - DNA, 21 bp, Homo sapiens
atttgtaggayatttgcattt

SEQ ID NO: 14877 - DNA, 21 bp, Homo sapiens
aatgtggtgaratgaaatcag

SEQ ID NO: 14878 - DNA, 21 bp, Homo sapiens
gaggcgcctgmccaagtgatg

SEQ ID NO: 14879 - DNA, 21 bp, Homo sapiens
tgaggcatcayatacatttga

SEQ ID NO: 14880 - DNA, 21 bp, Homo sapiens
ctggtcctgtrtgacagcatt

SEQ ID NO: 14881 - DNA, 21 bp, Homo sapiens
atttgacagasagaggaaatt

SEQ ID NO: 14882 - DNA, 21 bp, Homo sapiens
ccctgggcttkcaggctgatg

SEQ ID NO: 14883 - DNA, 21 bp, Homo sapiens
atgctcatccyagtttgtcat

SEQ ID NO: 14884 - DNA, 21 bp, Homo sapiens
aggaccaataracatgctcag

SEQ ID NO: 14885 - DNA, 21 bp, Homo sapiens
aagccattcayttctcatgct

SEQ ID NO: 14886 - DNA, 21 bp, Homo sapiens
aaaatgactcrtcaagcatca

SEQ ID NO: 14887 - DNA, 21 bp, Homo sapiens
ctttgattatrgcccaataaa

SEQ ID NO: 14888 - DNA, 21 bp, Homo sapiens
gtccttgatgrctgaaatgca

SEQ ID NO: 14889 - DNA, 21 bp, Homo sapiens
tgagcactgayggttgccctc

SEQ ID NO: 14890 - DNA, 21 bp, Homo sapiens
atgcaaatacrtatataggag

SEQ ID NO: 14891 - DNA, 21 bp, Homo sapiens
attcgcttatwtcaaggctta

SEQ ID NO: 14892 - DNA, 21 bp, Homo sapiens
tgtactgctgwtatatgctgg

SEQ ID NO: 14893 - DNA, 21 bp, Homo sapiens
tggaagagaayctttaagtat

SEQ ID NO: 14894 - DNA, 21 bp, Homo sapiens
aaaaaatgaamacaagttgtt

SEQ ID NO: 14895 - DNA, 21 bp, Homo sapiens
acttttcctcmaactgtctat

SEQ ID NO: 14896 - DNA, 21 bp, Homo sapiens
tgcaaacaatrccttcagtac

SEQ ID NO: 14897 - DNA, 21 bp, Homo sapiens
tgactctgaartagttaagaa

SEQ ID NO: 14898 - DNA, 21 bp, Homo sapiens
atttcctccaygtatttagtt

SEQ ID NO: 14899 - DNA, 21 bp, Homo sapiens
gagttcttcarcttactattt

SEQ ID NO: 14900 - DNA, 21 bp, Homo sapiens
ctaggtttggsaggtcattta

SEQ ID NO: 14901 - DNA, 21 bp, Homo sapiens
tcacagatcaytgtgaagatt

SEQ ID NO: 14902 - DNA, 21 bp, Homo sapiens
actgcctgtcrtatctcctca

SEQ ID NO: 14903 - DNA, 21 bp, Homo sapiens
gatctatctcstatctctcta

SEQ ID NO: 14904 - DNA, 21 bp, Homo sapiens
atcagcactcracaaatgtaa

SEQ ID NO: 14905 - DNA, 21 bp, Homo sapiens
aaaatcaaaastgactacata

SEQ ID NO: 14906 - DNA, 21 bp, Homo sapiens
gtatcaggccytccattaatt

SEQ ID NO: 14907 - DNA, 21 bp, Homo sapiens
tttcaaaggtmttaaacactg

SEQ ID NO: 14908 - DNA, 21 bp, Homo sapiens
aactaacaaamcttattttcc

SEQ ID NO: 14909 - DNA, 21 bp, Homo sapiens
ctggagcccartgttaatact

SEQ ID NO: 14910 - DNA, 21 bp, Homo sapiens
ctgaatgaaaygactgatcga

SEQ ID NO: 14911 - DNA, 21 bp, Homo sapiens
tctgcatggcscataaaaatg

SEQ ID NO: 14912 - DNA, 21 bp, Homo sapiens
cgctgttagamtccttcaggt

SEQ ID NO: 14913 - DNA, 21 bp, Homo sapiens
gaagaacacasatttttatgt

SEQ ID NO: 14914 - DNA, 21 bp, Homo sapiens
tggttgtattwatatctttta

SEQ ID NO: 14915 - DNA, 21 bp, Homo sapiens
gtgctacgacwcaagtccttg

SEQ ID NO: 14916 - DNA, 21 bp, Homo sapiens
tctatttttartctgtggaaa

SEQ ID NO: 14917 - DNA, 21 bp, Homo sapiens
ccatgagcacrtaatgagagg

SEQ ID NO: 14918 - DNA, 21 bp, Homo sapiens
tattagatacrtagggttaga

SEQ ID NO: 14919 - DNA, 21 bp, Homo sapiens
ttctctatacrtgatactgaa

SEQ ID NO: 14920 - DNA, 21 bp, Homo sapiens
gaaaagaccayatatttgtag

SEQ ID NO: 14921 - DNA, 21 bp, Homo sapiens
tgctggtcccrttcagtgccg

SEQ ID NO: 14922 - DNA, 21 bp, Homo sapiens
tgaaatgggawgaatgactgg

SEQ ID NO: 14923 - DNA, 21 bp, Homo sapiens
ctgagtggtcrgttctgagaa

SEQ ID NO: 14924 - DNA, 21 bp, Homo sapiens
ggctcccagaraatgtttctt

SEQ ID NO: 14925 - DNA, 21 bp, Homo sapiens
atctgcaacawcaactaagaa

SEQ ID NO: 14926 - DNA, 21 bp, Homo sapiens
acaagagctcygtgaatgcag

SEQ ID NO: 14927 - DNA, 21 bp, Homo sapiens
aatgctgttcyataatgtaga

SEQ ID NO: 14928 - DNA, 21 bp, Homo sapiens
acaatcctcaytgcatcagtg

SEQ ID NO: 14929 - DNA, 21 bp, Homo sapiens
attctattccytcattcccat

SEQ ID NO: 14930 - DNA, 21 bp, Homo sapiens
agaactctctrgcataaggac

SEQ ID NO: 14931 - DNA, 21 bp, Homo sapiens
acatacgtgcratttttcttt

SEQ ID NO: 14932 - DNA, 21 bp, Homo sapiens
gattcctttgwataacctata

SEQ ID NO: 14933 - DNA, 21 bp, Homo sapiens
tgaagacagasctcctgtttg

SEQ ID NO: 14934 - DNA, 21 bp, Homo sapiens
ttcaacttaaytcctaatatt

SEQ ID NO: 14935 - DNA, 21 bp, Homo sapiens
catctgaagarcaatgtttag

SEQ ID NO: 14936 - DNA, 21 bp, Homo sapiens
tacaatacgtwgtcttctatt

SEQ ID NO: 14937 - DNA, 21 bp, Homo sapiens
tctttgtacakttcagaagta

SEQ ID NO: 14938 - DNA, 21 bp, Homo sapiens
ctaaacagaaygcattaaagt

SEQ ID NO: 14939 - DNA, 21 bp, Homo sapiens
agtgaaattcytgtttgtaat

SEQ ID NO: 14940 - DNA, 21 bp, Homo sapiens
ctgtggcagtmatttattcaa

SEQ ID NO: 14941 - DNA, 21 bp, Homo sapiens
tgtttataacytttatgatca

SEQ ID NO: 14942 - DNA, 21 bp, Homo sapiens
cgtaccaatamacagaagtag

SEQ ID NO: 14943 - DNA, 21 bp, Homo sapiens
gactttatcayggataaataa

SEQ ID NO: 14944 - DNA, 21 bp, Homo sapiens
gggtcacattrtgatagcacc

SEQ ID NO: 14945 - DNA, 21 bp, Homo sapiens
atgcaaaattstgtgtgaatg

SEQ ID NO: 14946 - DNA, 21 bp, Homo sapiens
agaacacctasttgtccttgc

SEQ ID NO: 14947 - DNA, 21 bp, Homo sapiens
gccttcagcartttctggtta

SEQ ID NO: 14948 - DNA, 21 bp, Homo sapiens
gtccagcttgkgtaacaaagt

SEQ ID NO: 14949 - DNA, 21 bp, Homo sapiens
tcaaagtacckcctattggac

SEQ ID NO: 14950 - DNA, 21 bp, Homo sapiens
tttgaattacygttaggctgc

SEQ ID NO: 14951 - DNA, 21 bp, Homo sapiens
aagaagtttayggggcaccaa

SEQ ID NO: 14952 - DNA, 21 bp, Homo sapiens
gcaaatcccayactagctggg

SEQ ID NO: 14953 - DNA, 21 bp, Homo sapiens
atacataaagrggattggaga

SEQ ID NO: 14954 - DNA, 21 bp, Homo sapiens
acatcagccaygcaaaaatga

SEQ ID NO: 14955 - DNA, 21 bp, Homo sapiens
gaagagataamatatgagtta

SEQ ID NO: 14956 - DNA, 21 bp, Homo sapiens
cataaaacaargtgtttgaac

SEQ ID NO: 14957 - DNA, 21 bp, Homo sapiens
tttaaaagagyattaaaataa

SEQ ID NO: 14958 - DNA, 21 bp, Homo sapiens
gagccgtttgytcccacacgt

SEQ ID NO: 14959 - DNA, 21 bp, Homo sapiens
tattaatacaytgtgctatca

SEQ ID NO: 14960 - DNA, 21 bp, Homo sapiens
tatgatttctraaagaactat

SEQ ID NO: 14961 - DNA, 21 bp, Homo sapiens
cttccatcacsttatagctat

SEQ ID NO: 14962 - DNA, 21 bp, Homo sapiens
gaaatgttgamtagaggatca

SEQ ID NO: 14963 - DNA, 21 bp, Homo sapiens
ataaaaaatcygcaaaccagc

SEQ ID NO: 14964 - DNA, 21 bp, Homo sapiens
gattcttctgytaataattgg

SEQ ID NO: 14965 - DNA, 21 bp, Homo sapiens
tggtgaattgrcacaaaaacc

SEQ ID NO: 14966 - DNA, 21 bp, Homo sapiens
caatttttcarcctcgaatta

SEQ ID NO: 14967 - DNA, 21 bp, Homo sapiens
ctgacaattastgtactgtga

SEQ ID NO: 14968 - DNA, 21 bp, Homo sapiens
aactcatactmagcaaaggca

SEQ ID NO: 14969 - DNA, 21 bp, Homo sapiens
agtaatgatgrcagtgatatt

SEQ ID NO: 14970 - DNA, 21 bp, Homo sapiens
tcagagaagartgctgttctt

SEQ ID NO: 14971 - DNA, 21 bp, Homo sapiens
ttcttcactasactacgaatt

SEQ ID NO: 14972 - DNA, 21 bp, Homo sapiens
ggttgatcctstgagagttga

SEQ ID NO: 14973 - DNA, 21 bp, Homo sapiens
aaagatatgargctgcaaagt

SEQ ID NO: 14974 - DNA, 21 bp, Homo sapiens
gctggatgacrataagcctgg

SEQ ID NO: 14975 - DNA, 21 bp, Homo sapiens
ttagcccatarggatggttct

SEQ ID NO: 14976 - DNA, 21 bp, Homo sapiens
tatattttaayatcagacttg

SEQ ID NO: 14977 - DNA, 21 bp, Homo sapiens
ggcttccagargttactggac

SEQ ID NO: 14978 - DNA, 21 bp, Homo sapiens
ataaaactttrgctgcttaac

SEQ ID NO: 14979 - DNA, 21 bp, Homo sapiens
tttattttacyttgtcaatga

SEQ ID NO: 14980 - DNA, 21 bp, Homo sapiens
tcaggagcccrggtctctagc

SEQ ID NO: 14981 - DNA, 21 bp, Homo sapiens
tatgcttcacrgaaacatgta

SEQ ID NO: 14982 - DNA, 21 bp, Homo sapiens
ctacctattgyctcatcttag

SEQ ID NO: 14983 - DNA, 21 bp, Homo sapiens
caagtacatgrtctggtaaaa

SEQ ID NO: 14984 - DNA, 21 bp, Homo sapiens
ggaaaaggctrggccaaactc

SEQ ID NO: 14985 - DNA, 21 bp, Homo sapiens
tctaaacaaartagaatcaga

SEQ ID NO: 14986 - DNA, 21 bp, Homo sapiens
gatcagtctgwaaacaaggca

SEQ ID NO: 14987 - DNA, 21 bp, Homo sapiens
cacttactatrtgctaaactt

SEQ ID NO: 14988 - DNA, 21 bp, Homo sapiens
cataaggaatyattgaaggat

SEQ ID NO: 14989 - DNA, 21 bp, Homo sapiens
acgttattggrtggctaaaat

SEQ ID NO: 14990 - DNA, 21 bp, Homo sapiens
taaccagatawgtgtcagaac

SEQ ID NO: 14991 - DNA, 21 bp, Homo sapiens
aataaacacastggggttagg

SEQ ID NO: 14992 - DNA, 21 bp, Homo sapiens
aatactgatayagccacagag

SEQ ID NO: 14993 - DNA, 21 bp, Homo sapiens
acaaaagaaaygttttaaagc

SEQ ID NO: 14994 - DNA, 21 bp, Homo sapiens
atcatcggagrgcaatccctt

SEQ ID NO: 14995 - DNA, 21 bp, Homo sapiens
ccttcctcacyggcttttgag

SEQ ID NO: 14996 - DNA, 21 bp, Homo sapiens
ggatcacaccragccctgggc

SEQ ID NO: 14997 - DNA, 21 bp, Homo sapiens
cagagccctcrgggcaccacg

SEQ ID NO: 14998 - DNA, 21 bp, Homo sapiens
taggggggctygtagtcatag

SEQ ID NO: 14999 - DNA, 21 bp, Homo sapiens
gctccagcccrttgcagcctg

SEQ ID NO: 15000 - DNA, 21 bp, Homo sapiens
aagaaaatatragcaggaatt

SEQ ID NO: 15001 - DNA, 21 bp, Homo sapiens
caagagagttygtggcctgtt

SEQ ID NO: 15002 - DNA, 21 bp, Homo sapiens
taatgaattcytggctttcta

SEQ ID NO: 15003 - DNA, 21 bp, Homo sapiens
gctgtttagcmtcaaggtgtt

SEQ ID NO: 15004 - DNA, 21 bp, Homo sapiens
ctccatagtgwgtcctactaa

SEQ ID NO: 15005 - DNA, 21 bp, Homo sapiens
aaaatgttacktgtgtccaag

SEQ ID NO: 15006 - DNA, 21 bp, Homo sapiens
gggttgaactstaggcagcca

SEQ ID NO: 15007 - DNA, 21 bp, Homo sapiens
cctgtattaartcacaaactg

SEQ ID NO: 15008 - DNA, 21 bp, Homo sapiens
gccatcttcakttattccttc

SEQ ID NO: 15009 - DNA, 21 bp, Homo sapiens
tgttgcatttygacccatcat

SEQ ID NO: 15010 - DNA, 21 bp, Homo sapiens
cttttagctcratgcctgtca

SEQ ID NO: 15011 - DNA, 21 bp, Homo sapiens
ttggccacacrctgactagcc

SEQ ID NO: 15012 - DNA, 21 bp, Homo sapiens
cattgtacccragggatgtcc

SEQ ID NO: 15013 - DNA, 21 bp, Homo sapiens
tgtttagaggmaggtcataaa

SEQ ID NO: 15014 - DNA, 21 bp, Homo sapiens
tctaactcctmcatttatata

SEQ ID NO: 15015 - DNA, 21 bp, Homo sapiens
agcaacagacrtagagtatag

SEQ ID NO: 15016 - DNA, 21 bp, Homo sapiens
gtctaaacagycccagtgcca

SEQ ID NO: 15017 - DNA, 21 bp, Homo sapiens
agagtagcttyccttcttcca

SEQ ID NO: 15018 - DNA, 21 bp, Homo sapiens
tatcttataaktagggtttca

SEQ ID NO: 15019 - DNA, 21 bp, Homo sapiens
atcaactgtcrctaactgaag

SEQ ID NO: 15020 - DNA, 21 bp, Homo sapiens
aggttaaaacktccctaaact

SEQ ID NO: 15021 - DNA, 21 bp, Homo sapiens
cactttactayaaatattttc

SEQ ID NO: 15022 - DNA, 21 bp, Homo sapiens
atcctataaamcaagagcagt

SEQ ID NO: 15023 - DNA, 21 bp, Homo sapiens
gaacatttatraaatagcagt

SEQ ID NO: 15024 - DNA, 21 bp, Homo sapiens
tgtaatgctcrtaacaagttt

SEQ ID NO: 15025 - DNA, 21 bp, Homo sapiens
cttgagagttytaccattcat

SEQ ID NO: 15026 - DNA, 21 bp, Homo sapiens
aactgcaataytccttgcctg

SEQ ID NO: 15027 - DNA, 21 bp, Homo sapiens
tattaaaagaygttaagccta

SEQ ID NO: 15028 - DNA, 21 bp, Homo sapiens
gaaatgaaatkattttcaaga

SEQ ID NO: 15029 - DNA, 21 bp, Homo sapiens
tcttcatgtcrgaataaattt

SEQ ID NO: 15030 - DNA, 21 bp, Homo sapiens
ttgagtgttgrctagattaag

SEQ ID NO: 15031 - DNA, 21 bp, Homo sapiens
tcccataaaawgtatcaggtt

SEQ ID NO: 15032 - DNA, 21 bp, Homo sapiens
atcagattgcrtaattgaaaa

SEQ ID NO: 15033 - DNA, 21 bp, Homo sapiens
tttaaatggcwacagatttac

SEQ ID NO: 15034 - DNA, 21 bp, Homo sapiens
tgtaaacatcwagaggaatga

SEQ ID NO: 15035 - DNA, 21 bp, Homo sapiens
attgaactctrttagggaaga

SEQ ID NO: 15036 - DNA, 21 bp, Homo sapiens
aaaattcttgracgtctcagt

SEQ ID NO: 15037 - DNA, 21 bp, Homo sapiens
tgtttcttcarttaaaaaaag

SEQ ID NO: 15038 - DNA, 21 bp, Homo sapiens
aaaatgggatmaataaatata

SEQ ID NO: 15039 - DNA, 21 bp, Homo sapiens
ccataagtgartgagtcaagt

SEQ ID NO: 15040 - DNA, 21 bp, Homo sapiens
atttaatttaracttctgatt

SEQ ID NO: 15041 - DNA, 21 bp, Homo sapiens
aatatcaatargctactaaat

SEQ ID NO: 15042 - DNA, 21 bp, Homo sapiens
aatgggatttwacaagcagca

SEQ ID NO: 15043 - DNA, 21 bp, Homo sapiens
aactgtaaatmgaaaagctag

SEQ ID NO: 15044 - DNA, 21 bp, Homo sapiens
tcaagcaaaaytgagtcaaca

SEQ ID NO: 15045 - DNA, 21 bp, Homo sapiens
tggttgtggakacttttatgc

SEQ ID NO: 15046 - DNA, 21 bp, Homo sapiens
ggtgactttgmcagcttcaga

SEQ ID NO: 15047 - DNA, 21 bp, Homo sapiens
gcctcactcamatttgagaca

SEQ ID NO: 15048 - DNA, 21 bp, Homo sapiens
tctcagaaaayctgctgccat

SEQ ID NO: 15049 - DNA, 21 bp, Homo sapiens
agagatttctrccctgagagg

SEQ ID NO: 15050 - DNA, 21 bp, Homo sapiens
ctagaaagaartgaggtttcg

SEQ ID NO: 15051 - DNA, 21 bp, Homo sapiens
tttctcctgcytctaacgact

SEQ ID NO: 15052 - DNA, 21 bp, Homo sapiens
tagtaagttayataatcatct

SEQ ID NO: 15053 - DNA, 21 bp, Homo sapiens
tctgggggcgwaggccgacac

SEQ ID NO: 15054 - DNA, 21 bp, Homo sapiens
ttcagaattayttctgttgga

SEQ ID NO: 15055 - DNA, 21 bp, Homo sapiens
tcagtagcgayggcttttctc

SEQ ID NO: 15056 - DNA, 21 bp, Homo sapiens
aagtttgaggyttacaagaat

SEQ ID NO: 15057 - DNA, 21 bp, Homo sapiens
atgtgttttgratgtcaaaat

SEQ ID NO: 15058 - DNA, 21 bp, Homo sapiens
tactattcttkttaatagcat

SEQ ID NO: 15059 - DNA, 21 bp, Homo sapiens
gacctgtaaartagattctag

SEQ ID NO: 15060 - DNA, 21 bp, Homo sapiens
tctactattcwttctagtaag

SEQ ID NO: 15061 - DNA, 21 bp, Homo sapiens
gagaatatgawtttaagtaat

SEQ ID NO: 15062 - DNA, 21 bp, Homo sapiens
acctgctacayggcgaactta

SEQ ID NO: 15063 - DNA, 21 bp, Homo sapiens
gaaatggcacscatttggcta

SEQ ID NO: 15064 - DNA, 21 bp, Homo sapiens
ttaatcctttrataaggtaaa

SEQ ID NO: 15065 - DNA, 21 bp, Homo sapiens
gatggcaaatrtaggtttctg

SEQ ID NO: 15066 - DNA, 21 bp, Homo sapiens
aacagatcaasggatttacgg

SEQ ID NO: 15067 - DNA, 21 bp, Homo sapiens
tctcttttatkctaaaatttt

SEQ ID NO: 15068 - DNA, 21 bp, Homo sapiens
ttagttaaagyaaggagatta

SEQ ID NO: 15069 - DNA, 21 bp, Homo sapiens
agcagatttgygtgcatagta

SEQ ID NO: 15070 - DNA, 21 bp, Homo sapiens
ccttcttattytgcagttgtc

SEQ ID NO: 15071 - DNA, 21 bp, Homo sapiens
gaaattaccargaaggatgac

SEQ ID NO: 15072 - DNA, 21 bp, Homo sapiens
aaaaaatgtgyccaagaggct

SEQ ID NO: 15073 - DNA, 21 bp, Homo sapiens
gggaagtcaaytaaagttttg

SEQ ID NO: 15074 - DNA, 21 bp, Homo sapiens
aacatttttckgatttgaaaa

SEQ ID NO: 15075 - DNA, 21 bp, Homo sapiens
ccaccgacagkccctgccggc

SEQ ID NO: 15076 - DNA, 21 bp, Homo sapiens
ggaactagggmaattaattag

SEQ ID NO: 15077 - DNA, 21 bp, Homo sapiens
gcatggcatartgtttttgca

SEQ ID NO: 15078 - DNA, 21 bp, Homo sapiens
gaatgacattrctgatctcat

SEQ ID NO: 15079 - DNA, 21 bp, Homo sapiens
aggtactgctstcattttaaa

SEQ ID NO: 15080 - DNA, 21 bp, Homo sapiens
tactctatgaraaaatctaaa

SEQ ID NO: 15081 - DNA, 21 bp, Homo sapiens
ttaatttgatyatacatattt

SEQ ID NO: 15082 - DNA, 21 bp, Homo sapiens
tgctattactmtcattaaatg

SEQ ID NO: 15083 - DNA, 21 bp, Homo sapiens
taaagttctaygaaaagacag

SEQ ID NO: 15084 - DNA, 21 bp, Homo sapiens
tcaacattggkacagtgataa

SEQ ID NO: 15085 - DNA, 21 bp, Homo sapiens
ttatgtattaytattatgcta

SEQ ID NO: 15086 - DNA, 21 bp, Homo sapiens
ctattctttcrgggtacaggt

SEQ ID NO: 15087 - DNA, 21 bp, Homo sapiens
atctgttcaaytgacaaccaa

SEQ ID NO: 15088 - DNA, 21 bp, Homo sapiens
tgccatcagawttcctgtaaa

SEQ ID NO: 15089 - DNA, 21 bp, Homo sapiens
ttatgacaacrttcaatcaga

SEQ ID NO: 15090 - DNA, 21 bp, Homo sapiens
taagaagatgyacattagaat

SEQ ID NO: 15091 - DNA, 21 bp, Homo sapiens
ttaaatttgtkcaattgcaga

SEQ ID NO: 15092 - DNA, 21 bp, Homo sapiens
tccttaagacwacctataaaa

SEQ ID NO: 15093 - DNA, 21 bp, Homo sapiens
agtttagtctsccaaagagaa

SEQ ID NO: 15094 - DNA, 21 bp, Homo sapiens
taaggtggaaktgcatcatgt

SEQ ID NO: 15095 - DNA, 21 bp, Homo sapiens
cttcagatttycaagagaaga

SEQ ID NO: 15096 - DNA, 21 bp, Homo sapiens
aatacttattkattattacca

SEQ ID NO: 15097 - DNA, 21 bp, Homo sapiens
ttatgttcaartcattcttcc

SEQ ID NO: 15098 - DNA, 21 bp, Homo sapiens
atttccatgargagtaattag

SEQ ID NO: 15099 - DNA, 21 bp, Homo sapiens
ggttattactwatacaaaaat

SEQ ID NO: 15100 - DNA, 21 bp, Homo sapiens
attatactttycatgtactca

SEQ ID NO: 15101 - DNA, 21 bp, Homo sapiens
agatagaaatrcaatctgttg

SEQ ID NO: 15102 - DNA, 21 bp, Homo sapiens
gcatgaagaaygtagataatt

SEQ ID NO: 15103 - DNA, 21 bp, Homo sapiens
aacagtgatasaaatcaagat

SEQ ID NO: 15104 - DNA, 21 bp, Homo sapiens
tcaatgtgttmatacaattac

SEQ ID NO: 15105 - DNA, 21 bp, Homo sapiens
tacatactcarttacaccata

SEQ ID NO: 15106 - DNA, 21 bp, Homo sapiens
agcagtagatwcagtgccagt

SEQ ID NO: 15107 - DNA, 21 bp, Homo sapiens
tatgtggaaakgtcaaagata

SEQ ID NO: 15108 - DNA, 21 bp, Homo sapiens
agcaatttagktcaaagatat

SEQ ID NO: 15109 - DNA, 21 bp, Homo sapiens
ggagaaatcamcttcaaaagc

SEQ ID NO: 15110 - DNA, 21 bp, Homo sapiens
gttcttagggraaattgtcac

SEQ ID NO: 15111 - DNA, 21 bp, Homo sapiens
cagaacattcrttatatatgc

SEQ ID NO: 15112 - DNA, 21 bp, Homo sapiens
ttctgtgataygttttgaaaa

SEQ ID NO: 15113 - DNA, 21 bp, Homo sapiens
aatttaagtayagatgttttt

SEQ ID NO: 15114 - DNA, 21 bp, Homo sapiens
atacaggggakgtctttgact

SEQ ID NO: 15115 - DNA, 21 bp, Homo sapiens
aataagactgyctctctttgc

SEQ ID NO: 15116 - DNA, 21 bp, Homo sapiens
aaatgtttctwatcagaatta

SEQ ID NO: 15117 - DNA, 21 bp, Homo sapiens
tttagaagtcrtctatcttct

SEQ ID NO: 15118 - DNA, 21 bp, Homo sapiens
agttggaaatrtaaaaaaatt

SEQ ID NO: 15119 - DNA, 21 bp, Homo sapiens
ccacaatggtyaatatgatcc

SEQ ID NO: 15120 - DNA, 21 bp, Homo sapiens
gttctagagasattatgtgtc

SEQ ID NO: 15121 - DNA, 21 bp, Homo sapiens
tctttccacartggacttgtg

SEQ ID NO: 15122 - DNA, 21 bp, Homo sapiens
ttttacaactsccagtaaaca

SEQ ID NO: 15123 - DNA, 21 bp, Homo sapiens
agaagtgggarggatctttca

SEQ ID NO: 15124 - DNA, 21 bp, Homo sapiens
ttgcacttttyagtcaataca

SEQ ID NO: 15125 - DNA, 21 bp, Homo sapiens
cattgcataayttggtcatct

SEQ ID NO: 15126 - DNA, 21 bp, Homo sapiens
aggacaaggarcaataagaat

SEQ ID NO: 15127 - DNA, 21 bp, Homo sapiens
tagagaaactragtatccatt

SEQ ID NO: 15128 - DNA, 21 bp, Homo sapiens
tggaaattctrtaattaggta

SEQ ID NO: 15129 - DNA, 21 bp, Homo sapiens
gctatcatctrctgcttacac

SEQ ID NO: 15130 - DNA, 21 bp, Homo sapiens
ttgactggatyaatttagcaa

SEQ ID NO: 15131 - DNA, 21 bp, Homo sapiens
acattaccaartattgtttcc

SEQ ID NO: 15132 - DNA, 21 bp, Homo sapiens
gtttaaaagaytaacctaggc

SEQ ID NO: 15133 - DNA, 21 bp, Homo sapiens
cttcgtgtagyagatgtacca

SEQ ID NO: 15134 - DNA, 21 bp, Homo sapiens
ggtttctctawagattgtttt

SEQ ID NO: 15135 - DNA, 21 bp, Homo sapiens
cctattgatargtagcctttg

SEQ ID NO: 15136 - DNA, 21 bp, Homo sapiens
tgtgaacctgsaaaataatga

SEQ ID NO: 15137 - DNA, 21 bp, Homo sapiens
aactatgtggmttcattgtta

SEQ ID NO: 15138 - DNA, 21 bp, Homo sapiens
agcaatataaycttgtgccct

SEQ ID NO: 15139 - DNA, 21 bp, Homo sapiens
aaattagtaawgaaaatatgg

SEQ ID NO: 15140 - DNA, 21 bp, Homo sapiens
aaactttacakagatgtcacc

SEQ ID NO: 15141 - DNA, 21 bp, Homo sapiens
ttaatttaatktaatcatgtg

SEQ ID NO: 15142 - DNA, 21 bp, Homo sapiens
gaacatttttrtggaatgaat

SEQ ID NO: 15143 - DNA, 21 bp, Homo sapiens
cctttcctatrcaactatatg

SEQ ID NO: 15144 - DNA, 21 bp, Homo sapiens
cattaaataakttgtttcgta

SEQ ID NO: 15145 - DNA, 21 bp, Homo sapiens
tcctcttgctrtgtgaatgag

SEQ ID NO: 15146 - DNA, 21 bp, Homo sapiens
tgtgacttccrtattgctata

SEQ ID NO: 15147 - DNA, 21 bp, Homo sapiens
actcagactcktgcatgtgca

SEQ ID NO: 15148 - DNA, 21 bp, Homo sapiens
ttggatataartgatggtgct

SEQ ID NO: 15149 - DNA, 21 bp, Homo sapiens
atacagggatrgtattatggc

SEQ ID NO: 15150 - DNA, 21 bp, Homo sapiens
agagtgaagakagacaattga

SEQ ID NO: 15151 - DNA, 21 bp, Homo sapiens
catttccttcytgatccatag

SEQ ID NO: 15152 - DNA, 21 bp, Homo sapiens
tgtgtacactstacccaatgt

SEQ ID NO: 15153 - DNA, 21 bp, Homo sapiens
tgtgtttgccygggagtgccc

SEQ ID NO: 15154 - DNA, 21 bp, Homo sapiens
tagcaagcctrtcaggtgagt

SEQ ID NO: 15155 - DNA, 21 bp, Homo sapiens
attttattatytttctatact

SEQ ID NO: 15156 - DNA, 21 bp, Homo sapiens
tggtttaaagyttcttaattt

SEQ ID NO: 15157 - DNA, 21 bp, Homo sapiens
ctctcagttcrtgaaagttgt

SEQ ID NO: 15158 - DNA, 21 bp, Homo sapiens
tattttaatgyctttgtttcc

SEQ ID NO: 15159 - DNA, 21 bp, Homo sapiens
aatgtggcctragagaggagt

SEQ ID NO: 15160 - DNA, 21 bp, Homo sapiens
tatggcatccrttacatactg

SEQ ID NO: 15161 - DNA, 21 bp, Homo sapiens
acagttgtatkgatggcttct

SEQ ID NO: 15162 - DNA, 21 bp, Homo sapiens
ttgataagggmtatttactgc

SEQ ID NO: 15163 - DNA, 21 bp, Homo sapiens
tcctttgtcarggcagaatat

SEQ ID NO: 15164 - DNA, 21 bp, Homo sapiens
tatccaaaaamcatcagtata

SEQ ID NO: 15165 - DNA, 21 bp, Homo sapiens
ctttgagaagytggtcataaa

SEQ ID NO: 15166 - DNA, 21 bp, Homo sapiens
ctttaaaattkcacattgtac

SEQ ID NO: 15167 - DNA, 21 bp, Homo sapiens
gctatccccaraataataata

SEQ ID NO: 15168 - DNA, 21 bp, Homo sapiens
acactactgaraataattgaa

SEQ ID NO: 15169 - DNA, 21 bp, Homo sapiens
gtatggcaacrtatagacagt

SEQ ID NO: 15170 - DNA, 21 bp, Homo sapiens
aattatgggtmtccaacaaga

SEQ ID NO: 15171 - DNA, 21 bp, Homo sapiens
tctgaaagacmgctttgccag

SEQ ID NO: 15172 - DNA, 21 bp, Homo sapiens
aagaaaatcaygtaccataat

SEQ ID NO: 15173 - DNA, 21 bp, Homo sapiens
agggaatagaktcactccaac

SEQ ID NO: 15174 - DNA, 21 bp, Homo sapiens
tcctttctaartcctgtttct

SEQ ID NO: 15175 - DNA, 21 bp, Homo sapiens
ttattgacctyaaatatatta

SEQ ID NO: 15176 - DNA, 21 bp, Homo sapiens
ccataccaagrcagccattat

SEQ ID NO: 15177 - DNA, 21 bp, Homo sapiens
tggtaaatacrtgctgataat

SEQ ID NO: 15178 - DNA, 21 bp, Homo sapiens
attaagaaggrgctcagttac

SEQ ID NO: 15179 - DNA, 21 bp, Homo sapiens
aaaaataagarttagacaagg

SEQ ID NO: 15180 - DNA, 21 bp, Homo sapiens
cttataatatkctgggcaagg

SEQ ID NO: 15181 - DNA, 21 bp, Homo sapiens
tcccattacaytgaaagattt

SEQ ID NO: 15182 - DNA, 21 bp, Homo sapiens
gagcatgcacrgaagcaaatt

SEQ ID NO: 15183 - DNA, 21 bp, Homo sapiens
caagtttggakattttacact

SEQ ID NO: 15184 - DNA, 21 bp, Homo sapiens
ctttttccccyacatcccttc

SEQ ID NO: 15185 - DNA, 21 bp, Homo sapiens
ttctaaattcyggttatttta

SEQ ID NO: 15186 - DNA, 21 bp, Homo sapiens
ttgcagtgacsgttgttccac

SEQ ID NO: 15187 - DNA, 21 bp, Homo sapiens
taatatgactstgtgtggtgc

SEQ ID NO: 15188 - DNA, 21 bp, Homo sapiens
ctttggcattytcatagcttt

SEQ ID NO: 15189 - DNA, 21 bp, Homo sapiens
gccaggaagaktttcctttta

SEQ ID NO: 15190 - DNA, 21 bp, Homo sapiens
cttataatgcraagtatcatc

SEQ ID NO: 15191 - DNA, 21 bp, Homo sapiens
gcagttgtaartaataaataa

SEQ ID NO: 15192 - DNA, 21 bp, Homo sapiens
atctctcgatygggcaaagga

SEQ ID NO: 15193 - DNA, 21 bp, Homo sapiens
ccacattttgwcaaggttatt

SEQ ID NO: 15194 - DNA, 21 bp, Homo sapiens
ctttagaactsttatgatggc

SEQ ID NO: 15195 - DNA, 21 bp, Homo sapiens
tgaatcataaktgctttccaa

SEQ ID NO: 15196 - DNA, 21 bp, Homo sapiens
aagtttataaytggtattttt

SEQ ID NO: 15197 - DNA, 21 bp, Homo sapiens
aatgtgtatcragactcttca

SEQ ID NO: 15198 - DNA, 21 bp, Homo sapiens
gctttaaaaayacaatgcttg

SEQ ID NO: 15199 - DNA, 21 bp, Homo sapiens
ggaaagaccayggattcagac

SEQ ID NO: 15200 - DNA, 21 bp, Homo sapiens
atctggatcaytggagtctct

SEQ ID NO: 15201 - DNA, 21 bp, Homo sapiens
ctccaggcagyttgctgaaga

SEQ ID NO: 15202 - DNA, 21 bp, Homo sapiens
atggctatgayattccggtca

SEQ ID NO: 15203 - DNA, 21 bp, Homo sapiens
ggaatagacakgccaagttta

SEQ ID NO: 15204 - DNA, 21 bp, Homo sapiens
ctgcagtatcratgtacctgg

SEQ ID NO: 15205 - DNA, 21 bp, Homo sapiens
tttggaaacargcctgttcag

SEQ ID NO: 15206 - DNA, 21 bp, Homo sapiens
tatccagttarctccaatatg

SEQ ID NO: 15207 - DNA, 21 bp, Homo sapiens
tatgagatgcyctgcagctgt

SEQ ID NO: 15208 - DNA, 21 bp, Homo sapiens
gcatttagagmgatcctcatg

SEQ ID NO: 15209 - DNA, 21 bp, Homo sapiens
agctaactaaytcatgcccgg

SEQ ID NO: 15210 - DNA, 21 bp, Homo sapiens
ttcttccaggkcctccttttc

SEQ ID NO: 15211 - DNA, 21 bp, Homo sapiens
cattaggagcrcagcacaagt

SEQ ID NO: 15212 - DNA, 21 bp, Homo sapiens
taggatgtttwaaccacaaat

SEQ ID NO: 15213 - DNA, 21 bp, Homo sapiens
ggttatgtctrcagcgtgaag

SEQ ID NO: 15214 - DNA, 21 bp, Homo sapiens
gaaatgaccayaggccaagac

SEQ ID NO: 15215 - DNA, 21 bp, Homo sapiens
caacccagaamtgaactgaca

SEQ ID NO: 15216 - DNA, 21 bp, Homo sapiens
tggccctagcrttcaaatagt

SEQ ID NO: 15217 - DNA, 21 bp, Homo sapiens
tcaattatttractaacattt

SEQ ID NO: 15218 - DNA, 21 bp, Homo sapiens
ctgtctacccrtgggaatttc

SEQ ID NO: 15219 - DNA, 21 bp, Homo sapiens
ttgtggtgagyataaaaatga

SEQ ID NO: 15220 - DNA, 21 bp, Homo sapiens
gagatagtacrtgaaagtggt

SEQ ID NO: 15221 - DNA, 21 bp, Homo sapiens
tgtttttaaakttttaataaa

SEQ ID NO: 15222 - DNA, 21 bp, Homo sapiens
tataaaaattwgtcatatttg

SEQ ID NO: 15223 - DNA, 21 bp, Homo sapiens
ggatgctagasagatcagaaa

SEQ ID NO: 15224 - DNA, 21 bp, Homo sapiens
tacatattacrtagtataaat

SEQ ID NO: 15225 - DNA, 21 bp, Homo sapiens
cttgtgaaaaytgaattggag

SEQ ID NO: 15226 - DNA, 21 bp, Homo sapiens
agtgtgctctycacacagtaa

SEQ ID NO: 15227 - DNA, 21 bp, Homo sapiens
accaagcacaytcaatctttc

SEQ ID NO: 15228 - DNA, 21 bp, Homo sapiens
ttattttgaargaataattgc

SEQ ID NO: 15229 - DNA, 21 bp, Homo sapiens
atttattttcraaaggaaaca

SEQ ID NO: 15230 - DNA, 21 bp, Homo sapiens
tctagcctgcmataatagaaa

SEQ ID NO: 15231 - DNA, 21 bp, Homo sapiens
acaatattttycatccattct

SEQ ID NO: 15232 - DNA, 21 bp, Homo sapiens
agtcaggttgyaatcaggaag

SEQ ID NO: 15233 - DNA, 21 bp, Homo sapiens
ttaatcaagtrgaaagtataa

SEQ ID NO: 15234 - DNA, 21 bp, Homo sapiens
ggattagcagkgatctgaatt

SEQ ID NO: 15235 - DNA, 21 bp, Homo sapiens
gagcttctcartttatgctcc

SEQ ID NO: 15236 - DNA, 21 bp, Homo sapiens
atgtgtctcayttccctccag

SEQ ID NO: 15237 - DNA, 21 bp, Homo sapiens
aatgctcaaayatactttatt

SEQ ID NO: 15238 - DNA, 21 bp, Homo sapiens
tttcctttatkctattaggtt

SEQ ID NO: 15239 - DNA, 21 bp, Homo sapiens
ctccaagcgtrtatattccat

SEQ ID NO: 15240 - DNA, 21 bp, Homo sapiens
cataggtgacrtatatcctag

SEQ ID NO: 15241 - DNA, 21 bp, Homo sapiens
ttagttaaaartgctaccttc

SEQ ID NO: 15242 - DNA, 21 bp, Homo sapiens
gtgaggaagcyacttgcctgg

SEQ ID NO: 15243 - DNA, 21 bp, Homo sapiens
atcagctgaaygtaatgggat

SEQ ID NO: 15244 - DNA, 21 bp, Homo sapiens
tttttgtgtcrtcagtcacaa

SEQ ID NO: 15245 - DNA, 21 bp, Homo sapiens
ctctccagtcygcaccccctg

SEQ ID NO: 15246 - DNA, 21 bp, Homo sapiens
atgatattggyggaatagtgg

SEQ ID NO: 15247 - DNA, 21 bp, Homo sapiens
tgggcaacacygtagcaatat

SEQ ID NO: 15248 - DNA, 21 bp, Homo sapiens
ttcaggccaaycttcatgaaa

SEQ ID NO: 15249 - DNA, 21 bp, Homo sapiens
atcgaaaattyagatatctct

SEQ ID NO: 15250 - DNA, 21 bp, Homo sapiens
gctgcctcaartaccatttta

SEQ ID NO: 15251 - DNA, 21 bp, Homo sapiens
gtagttctttraaagggagga

SEQ ID NO: 15252 - DNA, 21 bp, Homo sapiens
agtcttagctkattccctcga

SEQ ID NO: 15253 - DNA, 21 bp, Homo sapiens
agtcctggtgstttctacact

SEQ ID NO: 15254 - DNA, 21 bp, Homo sapiens
tacatatttcygcatattttt

SEQ ID NO: 15255 - DNA, 21 bp, Homo sapiens
ttagtgttatrggttgaatat

SEQ ID NO: 15256 - DNA, 21 bp, Homo sapiens
aaaaatatgtraggaaacaag

SEQ ID NO: 15257 - DNA, 21 bp, Homo sapiens
aaataaaactraatagtttag

SEQ ID NO: 15258 - DNA, 21 bp, Homo sapiens
aatagaggttycactacaatt

SEQ ID NO: 15259 - DNA, 21 bp, Homo sapiens
cagtatttccyggaacaccta

SEQ ID NO: 15260 - DNA, 21 bp, Homo sapiens
agatcagcaasaggagatggg

SEQ ID NO: 15261 - DNA, 21 bp, Homo sapiens
caaagtgaagkttgaactgcc

SEQ ID NO: 15262 - DNA, 21 bp, Homo sapiens
cagaagtgttmcaaataaagt

SEQ ID NO: 15263 - DNA, 21 bp, Homo sapiens
ttgaagaggcrtttttataac

SEQ ID NO: 15264 - DNA, 21 bp, Homo sapiens
cagccactggractgcaggat

SEQ ID NO: 15265 - DNA, 21 bp, Homo sapiens
aacatctacasagtaaaaaaa

SEQ ID NO: 15266 - DNA, 21 bp, Homo sapiens
ggtatatatargagaatctgt

SEQ ID NO: 15267 - DNA, 21 bp, Homo sapiens
taactaaatayctgctagaga

SEQ ID NO: 15268 - DNA, 21 bp, Homo sapiens
aaaggtcaggsctgcatgtac

SEQ ID NO: 15269 - DNA, 21 bp, Homo sapiens
ccaaaaagatkcatttgaaac

SEQ ID NO: 15270 - DNA, 21 bp, Homo sapiens
aattatcatcrtcattgtcgt

SEQ ID NO: 15271 - DNA, 21 bp, Homo sapiens
tttttcctacsaagaaatatt

SEQ ID NO: 15272 - DNA, 21 bp, Homo sapiens
tagtgttataratattgcaaa

SEQ ID NO: 15273 - DNA, 21 bp, Homo sapiens
atgagacaccraactttatga

SEQ ID NO: 15274 - DNA, 21 bp, Homo sapiens
caatttgttasgtgcccacaa

SEQ ID NO: 15275 - DNA, 21 bp, Homo sapiens
actgtttacgytctggagtcc

SEQ ID NO: 15276 - DNA, 21 bp, Homo sapiens
gcagtattcayttgacaagtt

SEQ ID NO: 15277 - DNA, 21 bp, Homo sapiens
tgctcacgctyatctctgaaa

SEQ ID NO: 15278 - DNA, 21 bp, Homo sapiens
ttgggaaatayaggcaaagtc

SEQ ID NO: 15279 - DNA, 21 bp, Homo sapiens
ttcagagtgtrtgctagtatg

SEQ ID NO: 15280 - DNA, 21 bp, Homo sapiens
ccctataggcyaggttatcac

SEQ ID NO: 15281 - DNA, 21 bp, Homo sapiens
aaatcctaacsagcattatat

SEQ ID NO: 15282 - DNA, 21 bp, Homo sapiens
ttctgttgctytagttgtaac

SEQ ID NO: 15283 - DNA, 21 bp, Homo sapiens
aaaatcttttytttattgaag

SEQ ID NO: 15284 - DNA, 21 bp, Homo sapiens
atgttgtgacwtaagggtgaa

SEQ ID NO: 15285 - DNA, 21 bp, Homo sapiens
tctgaggcacygaataaggaa

SEQ ID NO: 15286 - DNA, 21 bp, Homo sapiens
cactgagatgwctgaaatagc

SEQ ID NO: 15287 - DNA, 21 bp, Homo sapiens
tacagatagtrggtgaaatga

SEQ ID NO: 15288 - DNA, 21 bp, Homo sapiens
gagagtgcatmccccaatgaa

SEQ ID NO: 15289 - DNA, 21 bp, Homo sapiens
taattcttacwtatcttttca

SEQ ID NO: 15290 - DNA, 21 bp, Homo sapiens
actccatgaargaaaacaaag

SEQ ID NO: 15291 - DNA, 21 bp, Homo sapiens
cgttgggcatytagcatagaa

SEQ ID NO: 15292 - DNA, 21 bp, Homo sapiens
tgaacccaggmtgacttgctc

SEQ ID NO: 15293 - DNA, 21 bp, Homo sapiens
tctcatgcatkttgctgaaaa

SEQ ID NO: 15294 - DNA, 21 bp, Homo sapiens
ttagcaatacrataagataga

SEQ ID NO: 15295 - DNA, 21 bp, Homo sapiens
aatgttaaatragaaaatatt

SEQ ID NO: 15296 - DNA, 21 bp, Homo sapiens
taatcctgttygggaaatcag

SEQ ID NO: 15297 - DNA, 21 bp, Homo sapiens
acttattctgyctctggtagt

SEQ ID NO: 15298 - DNA, 21 bp, Homo sapiens
atttataaaastcattactga

SEQ ID NO: 15299 - DNA, 21 bp, Homo sapiens
tttaaaaaacmtatctacttg

SEQ ID NO: 15300 - DNA, 21 bp, Homo sapiens
tacattacgtrtggtagatag

SEQ ID NO: 15301 - DNA, 21 bp, Homo sapiens
gacataattcrtcaacccaat

SEQ ID NO: 15302 - DNA, 21 bp, Homo sapiens
ctgtgttctaytttcctaact

SEQ ID NO: 15303 - DNA, 21 bp, Homo sapiens
ggaaatgatcyatgagctata

SEQ ID NO: 15304 - DNA, 21 bp, Homo sapiens
tatagttggayccacaaagtt

SEQ ID NO: 15305 - DNA, 21 bp, Homo sapiens
gaccctgcatytgttttatca

SEQ ID NO: 15306 - DNA, 21 bp, Homo sapiens
ttgattaaaaygtagccaagt

SEQ ID NO: 15307 - DNA, 21 bp, Homo sapiens
tgatgtaatastggaactcaa

SEQ ID NO: 15308 - DNA, 21 bp, Homo sapiens
gtcttgcctgyattgggaaaa

SEQ ID NO: 15309 - DNA, 21 bp, Homo sapiens
atcatcatgtrtaagctttag

SEQ ID NO: 15310 - DNA, 21 bp, Homo sapiens
agtcctgctcytataaaatcg

SEQ ID NO: 15311 - DNA, 21 bp, Homo sapiens
actaattcagyatctttcttg

SEQ ID NO: 15312 - DNA, 21 bp, Homo sapiens
cagcaagaacmtacctgtgtc

SEQ ID NO: 15313 - DNA, 21 bp, Homo sapiens
tgcactgagayggtacaaaaa

SEQ ID NO: 15314 - DNA, 21 bp, Homo sapiens
ctctttcacastagtctgtta

SEQ ID NO: 15315 - DNA, 21 bp, Homo sapiens
ggtggataacsgaaaggatca

SEQ ID NO: 15316 - DNA, 21 bp, Homo sapiens
tgtgctcaaarcaggaaagga

SEQ ID NO: 15317 - DNA, 21 bp, Homo sapiens
gtcagaatatmtgttttatac

SEQ ID NO: 15318 - DNA, 21 bp, Homo sapiens
tagaggtttcrctgcagaaag

SEQ ID NO: 15319 - DNA, 21 bp, Homo sapiens
attggttatamttaccataat

SEQ ID NO: 15320 - DNA, 21 bp, Homo sapiens
atgtaatgttraatagcatga

SEQ ID NO: 15321 - DNA, 21 bp, Homo sapiens
gactttctagrctaaactttt

SEQ ID NO: 15322 - DNA, 21 bp, Homo sapiens
aatcaaatcaygtgcatgttt

SEQ ID NO: 15323 - DNA, 21 bp, Homo sapiens
ttggagaaacrttacaataat

SEQ ID NO: 15324 - DNA, 21 bp, Homo sapiens
ttatccatggmaaatatgtta

SEQ ID NO: 15325 - DNA, 21 bp, Homo sapiens
tcctcatgacmaacttacatc

SEQ ID NO: 15326 - DNA, 21 bp, Homo sapiens
attgggcaagrctaggacttc

SEQ ID NO: 15327 - DNA, 21 bp, Homo sapiens
caataattttmctgagcatgg

SEQ ID NO: 15328 - DNA, 21 bp, Homo sapiens
atttctgaacmtaggctgggc

SEQ ID NO: 15329 - DNA, 21 bp, Homo sapiens
atacacctttycattttgaga

SEQ ID NO: 15330 - DNA, 21 bp, Homo sapiens
tgtcactctgracagatagaa

SEQ ID NO: 15331 - DNA, 21 bp, Homo sapiens
cagctcttgcrgtacatcatt

SEQ ID NO: 15332 - DNA, 21 bp, Homo sapiens
ttttagaaatytgctttttag

SEQ ID NO: 15333 - DNA, 21 bp, Homo sapiens
cagaatacagytgggctttct

SEQ ID NO: 15334 - DNA, 21 bp, Homo sapiens
aaaattaggayatctattttt

SEQ ID NO: 15335 - DNA, 21 bp, Homo sapiens
taagatttttkaaatacagtg

SEQ ID NO: 15336 - DNA, 21 bp, Homo sapiens
tcctggactcyattcttggac

SEQ ID NO: 15337 - DNA, 21 bp, Homo sapiens
gcaagagttayacatgtcaca

SEQ ID NO: 15338 - DNA, 21 bp, Homo sapiens
cagaccaatamcaagatgtta

SEQ ID NO: 15339 - DNA, 21 bp, Homo sapiens
caatgtaataktctttgaagc

SEQ ID NO: 15340 - DNA, 21 bp, Homo sapiens
tattgtcactkttaaattaca

SEQ ID NO: 15341 - DNA, 21 bp, Homo sapiens
taagaatgctrgtatttgaaa

SEQ ID NO: 15342 - DNA, 21 bp, Homo sapiens
gattgttttgytcccgtctgt

SEQ ID NO: 15343 - DNA, 21 bp, Homo sapiens
gctctattccrcgcgatttat

SEQ ID NO: 15344 - DNA, 21 bp, Homo sapiens
aatagctctgmaattagaaag

SEQ ID NO: 15345 - DNA, 21 bp, Homo sapiens
ttctcagacarttaatttcca

SEQ ID NO: 15346 - DNA, 21 bp, Homo sapiens
gatgtcacttsatgaaggttg

SEQ ID NO: 15347 - DNA, 21 bp, Homo sapiens
actatttactrttttgacaca

SEQ ID NO: 15348 - DNA, 21 bp, Homo sapiens
taactcttatstccaacttgt

SEQ ID NO: 15349 - DNA, 21 bp, Homo sapiens
aatatgcttcraaacatattc

SEQ ID NO: 15350 - DNA, 21 bp, Homo sapiens
aggcagaagtrtctgattaag

SEQ ID NO: 15351 - DNA, 21 bp, Homo sapiens
aggcagaagtrtctgattaag

SEQ ID NO: 15352 - DNA, 21 bp, Homo sapiens
attctagatayatgcatcaaa

SEQ ID NO: 15353 - DNA, 21 bp, Homo sapiens
gcccaagaaartgagaagatt

SEQ ID NO: 15354 - DNA, 21 bp, Homo sapiens
cattttggagyttattatttt

SEQ ID NO: 15355 - DNA, 21 bp, Homo sapiens
gaattaggagycttgggggct

SEQ ID NO: 15356 - DNA, 21 bp, Homo sapiens
ctctatgttaygcctcttgag

SEQ ID NO: 15357 - DNA, 21 bp, Homo sapiens
tcagaaaatayttacttaaac

SEQ ID NO: 15358 - DNA, 21 bp, Homo sapiens
tatccacttayagctttttcc

SEQ ID NO: 15359 - DNA, 21 bp, Homo sapiens
agtataaggasaaagctgata

SEQ ID NO: 15360 - DNA, 21 bp, Homo sapiens
aatgcaaccamatttatcttg

SEQ ID NO: 15361 - DNA, 21 bp, Homo sapiens
aatcctcactrgtgatcacct

SEQ ID NO: 15362 - DNA, 21 bp, Homo sapiens
aatcctcactrgtgatcacct

SEQ ID NO: 15363 - DNA, 21 bp, Homo sapiens
gatacagtcaycgttagctaa

SEQ ID NO: 15364 - DNA, 21 bp, Homo sapiens
gcagtgatgtytccagagtat

SEQ ID NO: 15365 - DNA, 21 bp, Homo sapiens
caagggaggtygcattggcta

SEQ ID NO: 15366 - DNA, 21 bp, Homo sapiens
taactcctgtyttttttttga

SEQ ID NO: 15367 - DNA, 21 bp, Homo sapiens
ggcattcctaygtcaattttt

SEQ ID NO: 15368 - DNA, 21 bp, Homo sapiens
tatgtgatatrtaggacatga

SEQ ID NO: 15369 - DNA, 21 bp, Homo sapiens
ggaggcagctrtcttaattct

SEQ ID NO: 15370 - DNA, 21 bp, Homo sapiens
atgttccttgkaaaggggatc

SEQ ID NO: 15371 - DNA, 21 bp, Homo sapiens
aacactgtaarcctactacct

SEQ ID NO: 15372 - DNA, 21 bp, Homo sapiens
taaaaatccaytttctgtagt

SEQ ID NO: 15373 - DNA, 21 bp, Homo sapiens
cagaggagatrttcccagaat

SEQ ID NO: 15374 - DNA, 21 bp, Homo sapiens
tttcccattgrttgtagaagt

SEQ ID NO: 15375 - DNA, 21 bp, Homo sapiens
ccttcctaaasctggctggct

SEQ ID NO: 15376 - DNA, 21 bp, Homo sapiens
tgtcctgttcrcaccaagtag

SEQ ID NO: 15377 - DNA, 21 bp, Homo sapiens
gagggtataarggaagccgat

SEQ ID NO: 15378 - DNA, 21 bp, Homo sapiens
atgcgtgaagrtgctataatg

SEQ ID NO: 15379 - DNA, 21 bp, Homo sapiens
gagttacttgrccactgtata

SEQ ID NO: 15380 - DNA, 21 bp, Homo sapiens
tctgcacatcsaaagagaatt

SEQ ID NO: 15381 - DNA, 21 bp, Homo sapiens
taatctctgtrtcctgcatca

SEQ ID NO: 15382 - DNA, 21 bp, Homo sapiens
cgcagatggayatcctctttt

SEQ ID NO: 15383 - DNA, 21 bp, Homo sapiens
cctgaagatgygaggtaaaaa

SEQ ID NO: 15384 - DNA, 21 bp, Homo sapiens
tttttattccwcaagtctgcc

SEQ ID NO: 15385 - DNA, 21 bp, Homo sapiens
tacttttgccratacaatact

SEQ ID NO: 15386 - DNA, 21 bp, Homo sapiens
ggctgccaccrtgacattgac

SEQ ID NO: 15387 - DNA, 21 bp, Homo sapiens
ccttaaccackgacaacaatg

SEQ ID NO: 15388 - DNA, 21 bp, Homo sapiens
attccaattgyctttatggtc

SEQ ID NO: 15389 - DNA, 21 bp, Homo sapiens
tgcagcccagrgccactaaaa

SEQ ID NO: 15390 - DNA, 21 bp, Homo sapiens
catggaaatgmcccagctgcc

SEQ ID NO: 15391 - DNA, 21 bp, Homo sapiens
ggaccctgaaygctgtggtgg

SEQ ID NO: 15392 - DNA, 21 bp, Homo sapiens
aaaaatgagaratcatcgtac

SEQ ID NO: 15393 - DNA, 21 bp, Homo sapiens
cctttacagaytggagatgga

SEQ ID NO: 15394 - DNA, 21 bp, Homo sapiens
gggagctgccytcccagaatc

SEQ ID NO: 15395 - DNA, 21 bp, Homo sapiens
tacatttgggkcctagagaaa

SEQ ID NO: 15396 - DNA, 21 bp, Homo sapiens
aattactcttycacttcatat

SEQ ID NO: 15397 - DNA, 21 bp, Homo sapiens
taaaaaatcartaagtgaaca

SEQ ID NO: 15398 - DNA, 21 bp, Homo sapiens
gacccaggacrggttcttctc

SEQ ID NO: 15399 - DNA, 21 bp, Homo sapiens
tataaatttgrcaactttgat

SEQ ID NO: 15400 - DNA, 21 bp, Homo sapiens
aaagcagttcrgtacagtgaa

SEQ ID NO: 15401 - DNA, 21 bp, Homo sapiens
ctttgactatygttaggtgcc

SEQ ID NO: 15402 - DNA, 21 bp, Homo sapiens
aaaataatgtraagtagtaat

SEQ ID NO: 15403 - DNA, 21 bp, Homo sapiens
atctgggcaayatgaaatcat

SEQ ID NO: 15404 - DNA, 21 bp, Homo sapiens
tttacaacttytactgaattc

SEQ ID NO: 15405 - DNA, 21 bp, Homo sapiens
actgtggtgcrttacaaacac

SEQ ID NO: 15406 - DNA, 21 bp, Homo sapiens
ccatgtgtatsgtgggaatcc

SEQ ID NO: 15407 - DNA, 21 bp, Homo sapiens
tctttgtaaastgcatggaaa

SEQ ID NO: 15408 - DNA, 21 bp, Homo sapiens
tggcgtctagygcgtaagtgg

SEQ ID NO: 15409 - DNA, 21 bp, Homo sapiens
agctccttggycacttctgtc

SEQ ID NO: 15410 - DNA, 21 bp, Homo sapiens
aaccctggcasagaggcaggc

SEQ ID NO: 15411 - DNA, 21 bp, Homo sapiens
tcacgtccccraagagtcctc

SEQ ID NO: 15412 - DNA, 21 bp, Homo sapiens
tcaccgaaccrttttgctgat

SEQ ID NO: 15413 - DNA, 21 bp, Homo sapiens
gacacctggcrattagcccca

SEQ ID NO: 15414 - DNA, 21 bp, Homo sapiens
tcctgtacttsggagagctgc

SEQ ID NO: 15415 - DNA, 21 bp, Homo sapiens
tcattgccatygagaggggtt

SEQ ID NO: 15416 - DNA, 21 bp, Homo sapiens
aaaacagagcyagagagagaa

SEQ ID NO: 15417 - DNA, 21 bp, Homo sapiens
tacatcaatgrgaagcattaa

SEQ ID NO: 15418 - DNA, 21 bp, Homo sapiens
ctcctgccaarctgggaagag

SEQ ID NO: 15419 - DNA, 21 bp, Homo sapiens
cctcgtcaacyctccccgaat

SEQ ID NO: 15420 - DNA, 21 bp, Homo sapiens
tttagccataytttcatcaac

SEQ ID NO: 15421 - DNA, 21 bp, Homo sapiens
ccgccgctccrccatcattta

SEQ ID NO: 15422 - DNA, 21 bp, Homo sapiens
catcgacatawttcctttgtc

SEQ ID NO: 15423 - DNA, 21 bp, Homo sapiens
tgcaaaacttkcagtaatgct

SEQ ID NO: 15424 - DNA, 21 bp, Homo sapiens
ttctgtctagktttgatgtga

SEQ ID NO: 15425 - DNA, 21 bp, Homo sapiens
aatgggataawggtatggact

SEQ ID NO: 15426 - DNA, 21 bp, Homo sapiens
ctcaaatggawtcatcaccaa

SEQ ID NO: 15427 - DNA, 21 bp, Homo sapiens
tcatcgaatgsaatggaaagc

SEQ ID NO: 15428 - DNA, 21 bp, Homo sapiens
tagaaaggaawcatcttcata

SEQ ID NO: 15429 - DNA, 21 bp, Homo sapiens
ttttgagcacyctgtggctca

SEQ ID NO: 15430 - DNA, 21 bp, Homo sapiens
aatatctttgkataaaatcca

SEQ ID NO: 15431 - DNA, 21 bp, Homo sapiens
tttttcagaaracctaattat

SEQ ID NO: 15432 - DNA, 21 bp, Homo sapiens
atcagaaagcwgtttctcaaa

SEQ ID NO: 15433 - DNA, 21 bp, Homo sapiens
catattttcawaaaggatata

SEQ ID NO: 15434 - DNA, 21 bp, Homo sapiens
ctgaatccagsgaaaggtttc

SEQ ID NO: 15435 - DNA, 21 bp, Homo sapiens
tggtgataaarcaaatatccc

SEQ ID NO: 15436 - DNA, 21 bp, Homo sapiens
cctttcttttmattcagctgt

SEQ ID NO: 15437 - DNA, 21 bp, Homo sapiens
aacaatgtgargtgaatgctc

SEQ ID NO: 15438 - DNA, 21 bp, Homo sapiens
taagaaactgytttgtcatgt

SEQ ID NO: 15439 - DNA, 21 bp, Homo sapiens
agaatggacawaaacagcggt

SEQ ID NO: 15440 - DNA, 21 bp, Homo sapiens
atggcaaaaamgataatatca

SEQ ID NO: 15441 - DNA, 21 bp, Homo sapiens
ttatgtcttcrtattcactac

SEQ ID NO: 15442 - DNA, 21 bp, Homo sapiens
aaatcctcctrtttacagatg

SEQ ID NO: 15443 - DNA, 21 bp, Homo sapiens
gtccacacttsggtgtttcca

SEQ ID NO: 15444 - DNA, 21 bp, Homo sapiens
cctgttaatgytactttcaag

SEQ ID NO: 15445 - DNA, 21 bp, Homo sapiens
gacggacacaytcaatttatg

SEQ ID NO: 15446 - DNA, 21 bp, Homo sapiens
ggataatgtcwcctggcttcc

SEQ ID NO: 15447 - DNA, 21 bp, Homo sapiens
ccgaatgagcstctggtacta

SEQ ID NO: 15448 - DNA, 21 bp, Homo sapiens
aggcagaaaayaatagtgctt

SEQ ID NO: 15449 - DNA, 21 bp, Homo sapiens
atctaacttgwatttcataat

SEQ ID NO: 15450 - DNA, 21 bp, Homo sapiens
tagagacatayaccttcagga

SEQ ID NO: 15451 - DNA, 21 bp, Homo sapiens
cctctgaccaycctttttcca

SEQ ID NO: 15452 - DNA, 21 bp, Homo sapiens
gttccagtttkcaataaaggt

SEQ ID NO: 15453 - DNA, 21 bp, Homo sapiens
ttgatgtttgygtagcttctt

SEQ ID NO: 15454 - DNA, 21 bp, Homo sapiens
ctccatgtacragcctaatga

SEQ ID NO: 15455 - DNA, 21 bp, Homo sapiens
tcacttaaccyacagggcaat

SEQ ID NO: 15456 - DNA, 21 bp, Homo sapiens
ccctccttctkccagaacaaa

SEQ ID NO: 15457 - DNA, 21 bp, Homo sapiens
aaatgagttaytgaggaatgt

SEQ ID NO: 15458 - DNA, 21 bp, Homo sapiens
ttggaagtttrtggagaaaaa

SEQ ID NO: 15459 - DNA, 21 bp, Homo sapiens
actagaaagakaaatttatga

SEQ ID NO: 15460 - DNA, 21 bp, Homo sapiens
tgactttcctrtaagctccct

SEQ ID NO: 15461 - DNA, 21 bp, Homo sapiens
ttcagagtgawctacagggag

SEQ ID NO: 15462 - DNA, 21 bp, Homo sapiens
cacataatgarcaatgaacac

SEQ ID NO: 15463 - DNA, 21 bp, Homo sapiens
aaaggtattgkccactttagg

SEQ ID NO: 15464 - DNA, 21 bp, Homo sapiens
tcattgctttrtatcatattt

SEQ ID NO: 15465 - DNA, 21 bp, Homo sapiens
aattcagagtragtggtttaa

SEQ ID NO: 15466 - DNA, 21 bp, Homo sapiens
atctacaatgkaatggtgcta

SEQ ID NO: 15467 - DNA, 21 bp, Homo sapiens
atttcatgccrgagagataga

SEQ ID NO: 15468 - DNA, 21 bp, Homo sapiens
atttcaagcartcttccttta

SEQ ID NO: 15469 - DNA, 21 bp, Homo sapiens
ttagaaaaaaktaagatcatc

SEQ ID NO: 15470 - DNA, 21 bp, Homo sapiens
aaatttctgcygtaatattta

SEQ ID NO: 15471 - DNA, 21 bp, Homo sapiens
aagaaaattawtcaggcagtc

SEQ ID NO: 15472 - DNA, 21 bp, Homo sapiens
aaaatttatayatcagcactt

SEQ ID NO: 15473 - DNA, 21 bp, Homo sapiens
aggctaccatrcaatcaggcc

SEQ ID NO: 15474 - DNA, 21 bp, Homo sapiens
agtgtcttcarctcttgtttt

SEQ ID NO: 15475 - DNA, 21 bp, Homo sapiens
aagtgttgctraggataggct

SEQ ID NO: 15476 - DNA, 21 bp, Homo sapiens
atgaccatacrtacatacaaa

SEQ ID NO: 15477 - DNA, 21 bp, Homo sapiens
ttggctttcartggataaaag

SEQ ID NO: 15478 - DNA, 21 bp, Homo sapiens
aagcctctccrgtgactaata

SEQ ID NO: 15479 - DNA, 21 bp, Homo sapiens
atccaaatttsacaagaccca

SEQ ID NO: 15480 - DNA, 21 bp, Homo sapiens
tctgtacatayatttaaaaac

SEQ ID NO: 15481 - DNA, 21 bp, Homo sapiens
tagttttacayacactgtaat

SEQ ID NO: 15482 - DNA, 21 bp, Homo sapiens
tagatgccacraaatgagacc

SEQ ID NO: 15483 - DNA, 21 bp, Homo sapiens
actctgtatayggcaatcttg

SEQ ID NO: 15484 - DNA, 21 bp, Homo sapiens
gacataccctycttttcagac

SEQ ID NO: 15485 - DNA, 21 bp, Homo sapiens
ctgccaccttsatgaggagac

SEQ ID NO: 15486 - DNA, 21 bp, Homo sapiens
aaatatgactrtatctctgaa

SEQ ID NO: 15487 - DNA, 21 bp, Homo sapiens
tattcactccyacatacacag

SEQ ID NO: 15488 - DNA, 21 bp, Homo sapiens
tacaactgatyagccctttat

SEQ ID NO: 15489 - DNA, 21 bp, Homo sapiens
tagtgaggtarcaattcgaga

SEQ ID NO: 15490 - DNA, 21 bp, Homo sapiens
gtatctatgasaactaatttc

SEQ ID NO: 15491 - DNA, 21 bp, Homo sapiens
aaaataatttwcagtcattgt

SEQ ID NO: 15492 - DNA, 21 bp, Homo sapiens
agaactaggtracaacaatat

SEQ ID NO: 15493 - DNA, 21 bp, Homo sapiens
caatagaatgygcttaatgct

SEQ ID NO: 15494 - DNA, 21 bp, Homo sapiens
ttattctgtcrtaggaaacaa

SEQ ID NO: 15495 - DNA, 21 bp, Homo sapiens
ataactttctrttttgtcaaa

SEQ ID NO: 15496 - DNA, 21 bp, Homo sapiens
tgtaaattgastgttcagttg

SEQ ID NO: 15497 - DNA, 21 bp, Homo sapiens
cagctggactyatcatttctc

SEQ ID NO: 15498 - DNA, 21 bp, Homo sapiens
agatcacttartatagaattt

SEQ ID NO: 15499 - DNA, 21 bp, Homo sapiens
tgactatataygtgtcagcca

SEQ ID NO: 15500 - DNA, 21 bp, Homo sapiens
attaaaaaccmatgcttttac

SEQ ID NO: 15501 - DNA, 21 bp, Homo sapiens
ctagactgttrtaatgatgtt

SEQ ID NO: 15502 - DNA, 21 bp, Homo sapiens
aagaaattcartaaaacatcc

SEQ ID NO: 15503 - DNA, 21 bp, Homo sapiens
gagtgctagcrtcaccagagt

SEQ ID NO: 15504 - DNA, 21 bp, Homo sapiens
tagaaaaaacrtaacgtatta

SEQ ID NO: 15505 - DNA, 21 bp, Homo sapiens
tgagatcctaygctaaagcag

SEQ ID NO: 15506 - DNA, 21 bp, Homo sapiens
actccctttgscttggtctag

SEQ ID NO: 15507 - DNA, 21 bp, Homo sapiens
tttttaaaaayaattcaggaa

SEQ ID NO: 15508 - DNA, 21 bp, Homo sapiens
aattattgtcwctaaacggaa

SEQ ID NO: 15509 - DNA, 21 bp, Homo sapiens
atgattctctyttagccacat

SEQ ID NO: 15510 - DNA, 21 bp, Homo sapiens
catggcatagyggaggagttc

SEQ ID NO: 15511 - DNA, 21 bp, Homo sapiens
cgtgttagccrtaagatcaga

SEQ ID NO: 15512 - DNA, 21 bp, Homo sapiens
ctggtggcttrcacattagtg

SEQ ID NO: 15513 - DNA, 21 bp, Homo sapiens
gtttccttatrtacttactgt

SEQ ID NO: 15514 - DNA, 21 bp, Homo sapiens
tatgcatcaastagtattagc

SEQ ID NO: 15515 - DNA, 21 bp, Homo sapiens
ggagacctgtyggattgcact

SEQ ID NO: 15516 - DNA, 21 bp, Homo sapiens
tccctatggtkgcatttgata

SEQ ID NO: 15517 - DNA, 21 bp, Homo sapiens
aataaaatctrcagatgaaat

SEQ ID NO: 15518 - DNA, 21 bp, Homo sapiens
tttaacaaaaygcttgcagac

SEQ ID NO: 15519 - DNA, 21 bp, Homo sapiens
gacctgcagtrcactagaaat

SEQ ID NO: 15520 - DNA, 21 bp, Homo sapiens
aagacggactsggttcagacc

SEQ ID NO: 15521 - DNA, 21 bp, Homo sapiens
actgcaggaaygaccaatgag

SEQ ID NO: 15522 - DNA, 21 bp, Homo sapiens
agatggcttcrtgaaagacca

SEQ ID NO: 15523 - DNA, 21 bp, Homo sapiens
gctttcttcayttggtatctt

SEQ ID NO: 15524 - DNA, 21 bp, Homo sapiens
gggaatccacsggggaacaag

SEQ ID NO: 15525 - DNA, 21 bp, Homo sapiens
ctccacaaatrgtagatatta

SEQ ID NO: 15526 - DNA, 21 bp, Homo sapiens
atattaattcrggctcttaga

SEQ ID NO: 15527 - DNA, 21 bp, Homo sapiens
tgcatctcccrcagtccttcc

SEQ ID NO: 15528 - DNA, 21 bp, Homo sapiens
cttgtacaagrctcatttagg

SEQ ID NO: 15529 - DNA, 21 bp, Homo sapiens
tagttatagtrtggcttatat

SEQ ID NO: 15530 - DNA, 21 bp, Homo sapiens
attacaggcargtctaattta

SEQ ID NO: 15531 - DNA, 21 bp, Homo sapiens
cttggaaggcraaattgggac

SEQ ID NO: 15532 - DNA, 21 bp, Homo sapiens
acagatttagstgccagtcct

SEQ ID NO: 15533 - DNA, 21 bp, Homo sapiens
aaatgtcagakatactcagta

SEQ ID NO: 15534 - DNA, 21 bp, Homo sapiens
ccactacatcrtattctattg

SEQ ID NO: 15535 - DNA, 21 bp, Homo sapiens
catagcacagygacggaaggg

SEQ ID NO: 15536 - DNA, 21 bp, Homo sapiens
tcacaaatgcsagctcgttct

SEQ ID NO: 15537 - DNA, 21 bp, Homo sapiens
atttgtgcatrtggagttgtg

SEQ ID NO: 15538 - DNA, 21 bp, Homo sapiens
ggtagaaatcrtgctttgggt

SEQ ID NO: 15539 - DNA, 21 bp, Homo sapiens
gaggcaggtastattttctaa

SEQ ID NO: 15540 - DNA, 21 bp, Homo sapiens
ctgagaaccaytggtcccata

SEQ ID NO: 15541 - DNA, 21 bp, Homo sapiens
atgtatatttsatgacatctt

SEQ ID NO: 15542 - DNA, 21 bp, Homo sapiens
tagcagctaayaaaattctca

SEQ ID NO: 15543 - DNA, 21 bp, Homo sapiens
tagtgtgccaytgctaactat

SEQ ID NO: 15544 - DNA, 21 bp, Homo sapiens
gagctgaggcraaaagcaaat

SEQ ID NO: 15545 - DNA, 21 bp, Homo sapiens
gaaagtatatmgtgcacagag

SEQ ID NO: 15546 - DNA, 21 bp, Homo sapiens
aactttttagrtagcatataa

SEQ ID NO: 15547 - DNA, 21 bp, Homo sapiens
tgttcaggaastcacacttga

SEQ ID NO: 15548 - DNA, 21 bp, Homo sapiens
gccattctacygaagacgacg

SEQ ID NO: 15549 - DNA, 21 bp, Homo sapiens
agcactactcygtggaacact

SEQ ID NO: 15550 - DNA, 21 bp, Homo sapiens
gtctctatagrtatattctaa

SEQ ID NO: 15551 - DNA, 21 bp, Homo sapiens
ctggcatctaytgactataat

SEQ ID NO: 15552 - DNA, 21 bp, Homo sapiens
ctattctgccyctgtaaattt

SEQ ID NO: 15553 - DNA, 21 bp, Homo sapiens
ttttaccatawaagtcagaat

SEQ ID NO: 15554 - DNA, 21 bp, Homo sapiens
ttaaaatccaytgtaatctga

SEQ ID NO: 15555 - DNA, 21 bp, Homo sapiens
aacgtctgackttgagactat

SEQ ID NO: 15556 - DNA, 21 bp, Homo sapiens
ataggcatacracatgggctt

SEQ ID NO: 15557 - DNA, 21 bp, Homo sapiens
agttttaatgytcatagttac

SEQ ID NO: 15558 - DNA, 21 bp, Homo sapiens
ttaggactatsctcaagttag

SEQ ID NO: 15559 - DNA, 21 bp, Homo sapiens
tcagaatgcaytacgatgaaa

SEQ ID NO: 15560 - DNA, 21 bp, Homo sapiens
accttctactrgacctttctt

SEQ ID NO: 15561 - DNA, 21 bp, Homo sapiens
gcgcgtgaggwgtcttaaaac

SEQ ID NO: 15562 - DNA, 21 bp, Homo sapiens
tgcttctccamatgaacaaac

SEQ ID NO: 15563 - DNA, 21 bp, Homo sapiens
tctaagatgawttctatgcag

SEQ ID NO: 15564 - DNA, 21 bp, Homo sapiens
ataggttatgmatgtcagtac

SEQ ID NO: 15565 - DNA, 21 bp, Homo sapiens
agagccatctrtttcaatatt

SEQ ID NO: 15566 - DNA, 21 bp, Homo sapiens
gaagaacactmtatctggaaa

SEQ ID NO: 15567 - DNA, 21 bp, Homo sapiens
tggtataagakaataatattg

SEQ ID NO: 15568 - DNA, 21 bp, Homo sapiens
attatctataygttatttagg

SEQ ID NO: 15569 - DNA, 21 bp, Homo sapiens
aagggtttctsattatgtaca

SEQ ID NO: 15570 - DNA, 21 bp, Homo sapiens
aaactcttggrttcaagggat

SEQ ID NO: 15571 - DNA, 21 bp, Homo sapiens
taggatgttaygataatgcca

SEQ ID NO: 15572 - DNA, 21 bp, Homo sapiens
ccaatatgtgygtatacctta

SEQ ID NO: 15573 - DNA, 21 bp, Homo sapiens
aaacaagctayggtattgcac

SEQ ID NO: 15574 - DNA, 21 bp, Homo sapiens
agtcaggtgaygtattaacat

SEQ ID NO: 15575 - DNA, 21 bp, Homo sapiens
acactataacyttgacaagtc

SEQ ID NO: 15576 - DNA, 21 bp, Homo sapiens
gctgttgatayttgcttttct

SEQ ID NO: 15577 - DNA, 21 bp, Homo sapiens
gtcttagtatyacattatttc

SEQ ID NO: 15578 - DNA, 21 bp, Homo sapiens
atgaatatacrcagaagaatt

SEQ ID NO: 15579 - DNA, 21 bp, Homo sapiens
ttaggcaaatyttctctgcat

SEQ ID NO: 15580 - DNA, 21 bp, Homo sapiens
tttttctgtayattgttcagg

SEQ ID NO: 15581 - DNA, 21 bp, Homo sapiens
cctaagataarccaccagcag

SEQ ID NO: 15582 - DNA, 21 bp, Homo sapiens
ggctgagaagyacggcctcct

SEQ ID NO: 15583 - DNA, 21 bp, Homo sapiens
gggaaagtggkctccattatg

SEQ ID NO: 15584 - DNA, 21 bp, Homo sapiens
ccagcactgtrgcaaatactt

SEQ ID NO: 15585 - DNA, 21 bp, Homo sapiens
tgcaacaggcrattaacactt

SEQ ID NO: 15586 - DNA, 21 bp, Homo sapiens
aagtttctaayacaatgtctt

SEQ ID NO: 15587 - DNA, 21 bp, Homo sapiens
accattgcagygtgaagttct

SEQ ID NO: 15588 - DNA, 21 bp, Homo sapiens
aatcatgactrtgcaggaaat

SEQ ID NO: 15589 - DNA, 21 bp, Homo sapiens
gggtcccacartggcctttag

SEQ ID NO: 15590 - DNA, 21 bp, Homo sapiens
cgggagcctcrttttccccac

SEQ ID NO: 15591 - DNA, 21 bp, Homo sapiens
tttatgaaatstaagcgtgtt

SEQ ID NO: 15592 - DNA, 21 bp, Homo sapiens
tgattcctacmacaatcatct

SEQ ID NO: 15593 - DNA, 21 bp, Homo sapiens
aactccttttrggttagatga

SEQ ID NO: 15594 - DNA, 21 bp, Homo sapiens
ttggcgcataktttacttatc

SEQ ID NO: 15595 - DNA, 21 bp, Homo sapiens
aattggtcaayattgtttggc
